United States Patent Application Publication US 2008/0050393 A1 - sequence listing, part 30

SEQ ID NO: 110628 - DNA, 399 bp, Homo sapiens
ttttttttttcttaagatagggtctttctctgtcacccacactagagtgcagtggcgcaatcacagctcactgtagcctcaaactcccaggcctaagcgatcctcccactcagcctcccaggcagctgggactacaggcatgcaccaccgcacccgactaatttttaaatttttttgtagagatggggttctcactatgttgcccaggctggtcactaactcctgggctcaagcaatcctcccgccttgacctcccaaagtgctgggattacaggtgtgaatacagggggttttttggtttgaattttaagagataaaatttataaaacatttagccaatgccacaaatgtagcttcttttggttattgtcattattctttgaaattcacaagtgcccc

SEQ ID NO: 110629 - DNA, 626 bp, Homo sapiens
ttttttttttggcctgagtctcactttgatgtccaggctggagtgcaatggcacgacctcggctcactgcaatctccacctcccaggttcaagagattctcctgcctcagcctctcgagtagctgagattacaggtgcccgccaccacgcctggctaatttttgtatttttggtagagacagggtttcgccatgttagccaggatggtcttgatctcctggcctcgtgatccgcctgcctcggcctcccaaagtgctgggattacaggcgtgagccaccgcgcctggccacattttgtttttctcttactgtttgcttacttgtatgacgtagcctgtgtccaaagttttgactaagggaatgatggacctgttcccacttggggaacttgaagaagtgtttcattagcagactaatgaggaaacatattgtctagagagagagaaaaaaatccctggttccctgaaaagattagattgcaatttgtgcccctgaattgagttcaggtttttacagctcagagaagtaacagcaggtggttgcaacagcttgtgatgttggtacattgtcgatagaatgtggatgataaacgtgtataacttacaattttttaacggacgcgtggg

SEQ ID NO: 110630 - DNA, 2546 bp, Homo sapiens
  misc_feature (1)...(2546): n = a,t,c or g
cccacgcgtccgcccacgcgtacgccccgcgtccgctcgcctgcagctcttgggttctttgtggcattcctccgatattggagccaggcgctacaccccagcaaccatgttccaagggnacctgcagcttggtattgatcttggcaccacctactctttgtgtgggtgttttccagcacggaaaagtccgagattaattgccaatgtatcagggagaaccgaaccactccaagcgtatgtcgcctttacgggacactgaaccggttggatcggtgatgccgcaaagaatcaaagttgcaatgaacccccaccaacacagttttttgattgccaaacggtctgatttggacggcagattttgaatgaatgctgttgtcccagtcttgattatgaaacattgggccctttattgggtgggtgaaatgatgctgggcaggccccaaggtcccaagtaggattacaagggagaagaccaaaaagctttctatccagaggaaggttgtcttctatgggttcctgacaaagattgaaaggaaatttgcagaagccctaaccttggggaagaactggttaccaatgctgtgggtcacagtgcccagtttacctttaatgactctccagcgtcaggctaccaaagatgcttgggactattggctggtcctccaatgtacttaagaaattattaaatggagcccaactgctgcctgctattgccttacggccttagacaaaaaaggtttggagccagaaagaaacggtgctcatcttttgacctggggaggtggcactttttgatgtgtcaatcctcacctattgaggattggaatctttgaaggtcaagtctacagctggagacacccacttgggtgggaggaagattttgacaaccagaatggtcaaccattttattgctgagtttaagcgcaagcataaagaaggacatcagtgaagaacaagagaagctgtaagacgcctccgtactgcttgtgaaccgtgctaagccgtacccctctcttccaggcacccagggccagtatttgagatcgattctctctatggaagggaatcgacttctattacctccatttacccgtggcccgattttgaaggaacttgaatggttgacctgttccgtggcgaccctgggacccagtaggagaaagcccttccgagatgccaaacttaggacaagtcacagatttcatgatatttgtccctggttgggtngttctacttcgtattccccaagattgcagaagtcttgctgccaagacttctttcaatgggaaaaagaacttgaattaaggagcatcaaccctggatggaaggctgttgcttatgggtggcagcttgtccagagcagcccatctttgtctgggagacaagtcttgaggaatgtttcaagatttgctgctcttgggatgtcactcctctttccccttgggtattgaaaactgctggtgggagtcatgactgtcctccatccaagcgtaataccaccattcctaccaagcagacacagaccttcactacctatttctggacaacccagcctgggtgtggcttattcaggttttatgaagggcgagcgtgccaatgacaaacggataaacaacctgcttgggcaagttttgaactcacagggacaacctcccgccccccccaggttgtttcctcaggattggaagttcacttttggacattggatggccatgggtatccttcaatgtcttctggctgtggggacaaggagtacggggaaaagaggaacaaggttacttattcactaattgacaaggggccgttttgaggcaagggaaggacattggaacgtatggttccagggaagctgaggaagttacaaagctggaaggtggaggaaggcaggaggggacaagggtgtcatccaacgatttcacttggagtcctatgcctttcaacatgaaaagcaccttgttgaaagatgagaaactttcaagggcaaagattaacgatgagggacaaaacagaaagattctgcgacaagtgtaattgaaattatcaactgggcttgataagaactcagcactgcttgagaaggaagaatttgaacatcaacaggaaagagctggagaaagtgtgcaacgcccattcatcacccaagctggtacccagagtgccaggaggcattgccagggagggaatccctggggggatttcctgggtggtggagcctccctcctcctgtgggtgcttcctacagggcccaccatttgaagaggttgatttaagcccaacccaagtgttagatgtagcattgtttccacacattttaaaaccattttgaagggacctaaatttcgtaggcaaaatttcttttgggcaagttttaaaaaagtttaaggctngcttattagttaaggtttacttgggcattcttcaattactttgaattttgggaacatatggcacaggggagaggaaataacattgcccttttataaacactgttttgttagttggaaaatgccatgtcttaaataaaactatttaaaattggcaccctc

SEQ ID NO: 110631 - DNA, 342 bp, Homo sapiens
agatttcgccgagtcgacccacgcgtccgtgtgtgtgtgtcagcctctatcttcaagttattttataccatccttttctgctgtataagagcctattgtcattatacttgcatttctcccgtcgtagaatctgtatgattgttgtttatgttttacttccacataaagtataaatggcacaatattgttactattttttatttaaacaatatattatcttttaggctgggcgcggtggctcacacctgtaatcctagcactttgggagtccgaggaaggaggatcacttgagtccaggagtttgagaccagccttggcaacatagtgagaccctgtctctac

SEQ ID NO: 110632 - DNA, 402 bp, Homo sapiens
  misc_feature (1)...(402): n = a,t,c or g
gttcgggcttttaattgccaatctacctgccatgtcctcaatccataaaacagggcccgtccgttgagcctccagccccttgccatcctgtggagagggctgcccaacccagggtgggaatcccttgcctggccacggtgaggagtctgctgcccaaggccctgttatgaccccacaagtatgaccccagctcccagacgggcaatttgacagcagcaggggtcatttaaagcagcgccagacannnnnnnnnnnnnnnnnnnnnnnnnnnnnnnnnnnnnnnnnnnnnnnnnnnnnnnnnnnnnnnnnnnnnnnnnnnnnnnnnnnnnnnnnnnnnnnnnnnnnnnnnnnnnnnnnnnnnnnnnnnnnnnnnnnnnnnnnnnnnnnnnncggacgcgtggg

SEQ ID NO: 110633 - DNA, 441 bp, Homo sapiens
gagacagtgcctcactctgtcactcaggctagctagagtgcagcggcgtgatcacggctcactgcagcctaccttccctgggttcaggtgatcttcctacctcagcctccagagtagctgggactataggcatgtgctgccaggcctggctaagttttgtatttcttgtagagatggggtcttgctgtgttgcccaggctggtctctaactgctggactcaagtgatcctctcgcctcggcctcccaaagtgttaggattacaggtgtgagccaccacactcaactatattactttttagtagcacaactaatcactgaggttggttatttgttatcaaaccatagaacttttactaacagagcatactatatgcccttttttccccttgagtagctctagaatagtttctaaaaataatttcctaaatagtgttttaaaa

SEQ ID NO: 110634 - DNA, 386 bp, Homo sapiens
  misc_feature (1)...(386): n = a,t,c or g
gcttttcgggggagaagcgagagtcacaggacagtgacggaagaaaccctcggggcgggggggatggttccggggccgggcgctccggtgagcgcngnggggggnggggcncngnggcgagaggggggncnngngnnncnngngnggnnnnnnnnnnnnnntttttgttccaaggggttttaatgggggaccccccgggttttnnnnnnnnnnnntttttaaaacccggccccgggaatttatttttggggcccctttaaaaaaattttactttcccccccccgggggttaaaacttggtccctttaaaggggcccccccnnnnnnnnnnnngaaatggttcaattcatttttaccgggagaaaatacatagcaagaggtaaacag

SEQ ID NO: 110635 - DNA, 433 bp, Homo sapiens
  misc_feature (1)...(433): n = a,t,c or g
gaaccactgataccctnnnnnctgacgcacgcgttcgatcagaaaggaagaagtaaaactgtttctatttgttgttgacagcgcttgtttatgcagaaaaacccaggaaacctaaaaaataactattagaactaatttatttagcaagacataaggtcagtatacaaaaatcattatatttttatatacttaccataaatgaaattttaaaaatttcattaaaaatagtgttaaaaaaccataaaatacttagaaataaatttaacaaaaaatgtgtaagaccagtatcttgaagactgtaaaacattgctgggagaaattgaagaaaacctgaataaaagaatatctaccatgctcatggaccggatgactcagtgtggttaagatatcagttctcannnnnnnnnnnnnnnnnnnnnnnnnnnnngagcaa

SEQ ID NO: 110636 - DNA, 1039 bp, Homo sapiens
  misc_feature (1)...(1039): n = a,t,c or g
ttttttttttttcttcagaatatatagtctttttaaacatacatggcacatttacaacattgatctcatactaggccaacaaccaagtttcaacaaattttgaaggatggaaaccatatgggtcattttctctgaccacaaagcaatcaagctagaaaagaaactataactagaaaaatctcatgtttggaaggtaggaaatatacttttaagtaacccatgggttatacatcctctcacttaatcctcctaactattccataacgcagaccctccattttagaaaccgcaggaagctgagataagaaagagaataccatttgctcaaatttacccagttggcagtggtggagccaggactcaaaaccaggctctgtaacttttagagcccagggcttttaatgatacccttcttatgctatgtctcatggggaattcaaagatcctccctcacagcctcaacgatctgctgtttcacctcttagaatggccagtcactgacaggtggagatcctaggccccagcttgctctggtggccctgacccatgggccattgtgtagagatgcatttcccttttgctcttacctacttggactgagggcaccgaaagtcttggagtagtggagaaggagagtttcagttggatgccccccaaatagctttgaactggatccctaaggaagacttccttccttttaaagtttttttcccacatgggcccaagtagtaagcgaacacagaagaaagacagaaggaagtcaattccagatggctctccatcttgctctactgcagattaaacagaaaattccaacataacattaagcaaacaagagtattaatatcattccttattattaaccaggancagaatggaaattcagtctgtatctgacttaaatttggggcaagggcctcagagccagaaaacagacaataaaagcaccctgattctgagcaagttggaggtttataatatttgaggcaagaaaaaatgaccaaggtactcctaggcctctctgggagtggccttctgc

SEQ ID NO: 110637 - DNA, 502 bp, Homo sapiens
gctcgacttttactcttcttctccttctccttcttttcttctctcttattcttctccttctcctccttcttctttttttctttttttccagacacagtcttgtcttcctctgtcacccaggctggactgcagtggcatgatcgtagctcactgcaaccctgaactcccaggctcaaccaatcctcctacctctccagagtagctgggactaaaggcatgtgccaccatgcccagctatttttttggatttttagtaaggacaaggtctcactatgttgccaaggcaggtcttctttgtccttcctaaagaatacagttctggtatttactacttttccaaggatagcctccttactttggctcatgatcatgtttttgtcagcaactacagctccatctttaaaccctctttccccttgaatttttagtctctttctatctacttgagctgagggaaggctccagtaacctgaattcaaaaaaattccgcttgaacctaatt

SEQ ID NO: 110638 - DNA, 856 bp, Homo sapiens
ttgagatggagtctcactctgtcactacgctggaatgtagtggtgcaatcttggctcacggcaagctctgcctcccgggttcacgccattctcctgcctcagcctcccgagtagctgggactacaggtgtccgccaccacacccagctaattttttgtatttttagtagagacgggctttcaccatgttagccaggatggtctggatctcctgaccttgtgacccacctgcctcggcctcccaaagtgctgggattacaggcatgagccactgcacctggccaagatttttcatacttcaatcctgatcttggaccttcccgagaccaatcttagaaacagctttatggtatgagcaatctaaagatcttccaacatcatgattctaaaataaaaatttttaggcttttggttgattgaaggtagaccagagagaatcacaaggaaagtttaaatggagcattaccattattagttgttcttttaatccatgcagaatggtgaacagacgctctgacttggtggtggaagagaactgctagtttgttttagtcaatatcaagtccatagctgacttttagaggaaatatgcaatcaattacttccttgactcagtgtagtttaactcccctataccccaaagattaaactccttagaaattttgggtggggaaactggtttccttcaaatgtacacaacagaaaccatcaccccatcaatcaaacaaagaatctcatttcagagtctatccaaggccaggcatgggcacagacctgatcactgaaaaccatctttactattcggacacctttgactgttgagtcataaggtttcccagggaagaggttcatgaaaa

SEQ ID NO: 110639 - DNA, 501 bp, Homo sapiens
ttttttttttgagacggatctcactctgccgcccagctgaagtgcagtggcataatctcggttcactgcaacctctaactcccaagctcaagcaattctcccgcctcagcctcccgagtatgggaccacagccacatgccaccactcccggctaacttttgtatttttagtagagacggggtttcaccatgttggccaggatagtcttgatctcttgatccgcccgccttggcctcccaaagtgctagaattacaggcgtgacagctcgcacccagatggctggcttcttttatttagcatgttttcaaggttcatccatgcagcaggtgcattgtcactgtagatttatatgtaataatgtcttctagaaaaatactcctgcccatgtagaatagtatatagacagaataggttctttatgaaaagaataggaaaacatttctattagcttgcaaaacatactttcaagtcgacgcggccgcaatttagtagtagtagta

SEQ ID NO: 110640 - DNA, 517 bp, Homo sapiens
  misc_feature (1)...(517): n = a,t,c or g
cnnnnnnnnnnnnnnnnnnnnnnnnnnnnnnnnnnnnnnnnnnnnnnnnnnnnnnnnnnnnnnnnnnnnnnnnnnnnnnnnnnnnnnnncaccttaaagcgaacatcatacttaatggcaaaaagttagataccttccccttaagatcaggaacaaggcaaagatgtcccctcttatcactatgatttaacatcatatagaagtctcagctaatgcaattatgcaagagaaggaaacaaaaagtataaaggttgggaaactgtctttgctgacagatgacctctctgactgggaaccaagcaaggaggtcactctggagatttccgaatccaagcaacgtaaacacggtgacatgagtcagtctacctgctgcttgctatgcaatgtagccttctcactggatggagcaggaaacaggcagaagagtaactggctgaagcacactcagggcacggtggcaaatacaagttcatcttgggcttagtcagatgggcggacgcgtgggcggacgcgtggg

SEQ ID NO: 110641 - DNA, 417 bp, Homo sapiens
  misc_feature (1)...(417): n = a,t,c or g
ttaaaaagttaaatgactacaaaaaaactggcaacgaatgttgtattttaaaatgaaagactgaatgctttccccctaaaatcaggaacaaggtcagggcatctactcttaccatgcctattcaacactgtattgcaaatcttggataaagcaataaggcaagaaaatgaaatacaatgcatacgttaggaaaggaagaaattaaattattcctatgtatagacaatatgtgcttgtctgcattaaaaacaaaaacacannnnnnnnnnnnnnnnnnnnnnnnnnnnnnnnnnnnnnnnnnnnnnnnnnnnnnnnnnnnnnnnnnnnnnnnnnnnnnnnnnnnnnnnnnnnnnnnnnnnnnnnnnnnnnnnnnnnnnnnnnnngggcgcgtggntcnaaaccnaaatggctaatcct

SEQ ID NO: 110642 - DNA, 402 bp, Homo sapiens
  misc_feature (1)...(402): n = a,t,c or g
cccagtcggcggggggctttcccccccgaaaaattctctgggaaaggggccatccccggggggcccagcggtttcccccccatnnnnnnnnnnnggaaaccgggcaagggggaaaaccccccgggccaagcaaaccaggaattaaaaaccccccccaccaaaaaaaagtaacccgaaaaagggggaaaagggggcccccccgggccccctttgaaaaccccccttcccaaaagcaaagccccgggggggaaaaagnnnnnnnnnnnnnnnnnnngataaattctcctctgggggagaaaaagcgtctcctaaggttgggacggtaaaagaggtggagggggaagccggaggtggaaagttctaacaagaagtttcttgccccagcagccgtttcggctgggg

SEQ ID NO: 110643 - DNA, 425 bp, Homo sapiens
aaatagagatggagccttgttatgttgcccaggctggtcttgaactcctgggctcaagtgatccagtgatcctcccacctcagcctcccaaagtgctggaattacaagtatgagccaccatgcctggctaaagaaaattctatgctatttaattggagaactgagttcattaacattcagtgttattattgataagaacttactactgccattttgttccttattttctggttgttttgcaactcctctcttcctttcttctggtcttcctttgtggttaagtgattttctctggtagaatgttttgttgctttatatttttagtaaacctattacaagtgttccgcattgtggttcccatgaggctcacaaaaaaatatctcacaaatgtaataagtcaaattaaagagatgacaacttatcgc

SEQ ID NO: 110644 - DNA, 476 bp, Homo sapiens
ttttttttttttgagacagagcctagctctgttgctcaggctggagtacaggggcatgatctcagctcactgcaacctctacctcccggactcaagcaatcctcctgcctcagcctcctgaatagctgggtctataggtgcatgccaccacacccagctaattttgtttgtatttttaatagagacggggtttcaccacgttggccaggccggtcttgaactgctgacctcaagtgatctgcccacctcagccctccaaagtgctgggattaccagtgtgagacaccacaaccagccaatgatgatattttaattctgtaattccttacatatttattagccaccgtgcctggccttctgtggcttttgtaaagggctcacctgtctgcacattctggttgtgtttagaacacgtaattccaactattatactagaacataacaaacaggttctaaattacctctttctggaaaga

SEQ ID NO: 110645 - DNA, 647 bp, Homo sapiens
ttaagacagtcttgctctgtcgcccaggctagagtgcaatggcatgatcttggctcactgcaaccttgaaccttgggttcaagcgattcttccgcctcagcctcaggctcctgagtagccggaattacaggcacccgccatcatgcccggctaatttttgtatatatatatattttttttagtagagatgggggttcaccatgttggccaggctggtcttgaactcctgacctcagctgatccgcctgcctcggcctcccaaagtgttgggattacaggtgtgagccaccgcgcccggtctttgtgctcttcttttccaccaagctgacagcatcttcaagatcaagaccatgtcttattcatatttgtatcaactggtcaggtgagctcccagcagttgttccataaatgtttgttgactaaacaaatgaatgacacagtcccagtgagagtgctccagcccagagaggggccccagataaaaatggggcaacgtggaggtcctgaagcatcacactcacaaaagtgtgtctgagaagcactgctaccactctgacccctcccaaaagcactgaacacatagaagtataacagctgacaggagctcgagaccagcctgggcaacatgatgaaaccctgtctctacc

SEQ ID NO: 110646 - DNA, 742 bp, Homo sapiens
aaacataaagatttggttccaaaggtccggataacccataggccacaggtgtggtggaaatccgggaaaaccctggccaaggggtgggggggttcaagccgataaatcccaacaaactttggaacctttgaggcaagaaaatatccccttgaatttcgggaaaaaccgagggttgcaagtaaccccgaagaaccacggccattggcattccaagcctaaggtgacagaggcaatcctcccacctcaaaaaaccaccaaccaaaaaacaattagggaaacccaatgccaggagaaggaaaggcactcgatcaagatcccctgctaaatgtcagggtccgggggttttaaatcccaggtttaacctgggggccaggccatagtgccccagtggggttcatggtcccagctgggtgccagggctaaggtgggtgttgggccaaagagctggctttccatagtaagggtcagagcacaaagccaggcccttaaaggaccttgtctgcactccctggtcctggacaggaaccagctgaggctgtgacccctccagccacctgccccaaccctgcacccgtgtctcccccagcaacaccgtgctccccattacacagcaatagtaccacctacaccctgacctgtaccgggccctatggatgagctttcattccccacagtaacctttaaggtgagctcaatactcccattttgcagatgagcaaacaggctcggaatggtacaggga

SEQ ID NO: 110647 - DNA, 748 bp, Homo sapiens
atgcggtaccgctccggaatttccgggtcgacgattctctagaaatttggcctggttgtgaaatctgatacttagaaggttgtcatattagtgcttatctttttaaacaaggactcttcaggtaagacggctggtctaaacatgtattcgttcatttgttgtttgttttctggattttttgcttcaacaaatgtaaaagatcacatatttttatagtctgtttcaatctttgaattccctcctcacctcccacaaatctcacagagttacttttccctctttcctagaatttgatcttcttattttcttctagagaactaagcatgatgcatattataggcatgctttatcgtgtggctttcccctcttcacatattaatggccaggtattttaggatgtgagaaggaagatcatggcttgttaaagttgctttggtgcatcaagagttttttcactctattctgatgttttttcagaatggcctgaacatctgtggaataatttagcaatgtttttcagttagcaagtgaatattgaaccttaaataagaagtgcttttaatgtgaacaaccttatatgactccactattttagttagaacttataaaaacttttatgctggctgggcgcggtcgtacgcctgtaatcccagcactttgggaggcggaggcgggtgtatcacgaggtcaggagatcaagcgcatcctggctaacaccgtgaaaccccgtcttttgttaaaattccaa

SEQ ID NO: 110648 - DNA, 411 bp, Homo sapiens
tctgtcacccaggctggagtgcagtggtgcaatctcaatctcggctcactgcaccctccgcctcttgggttcaagcgattctcctgcctcagcctcctgactagctgggattacaggtgcacgccaacatgccaagctaatttttgtatttttagtagagacggggtttcaccatgttggtcaggctggtctcggactcctgacctcatgatccacccacctcgccctcccaaagtgttgggattataggcatgagccacctagcccggcctatttgaattttttaatcacatactttctcttgatatcgcttaagttttcccctggactgcacatgaattattcacttcgttgtactactttttcatgtaactgcaagattgtcatcagaagtttcaccggacgcgtggg

SEQ ID NO: 110649 - DNA, 452 bp, Homo sapiens
  misc_feature (1)...(452): n = a,t,c or g
agaataaatgaatttgaaagagaaaatagagaaattcaatgaaatgaagaatctgttctttgaaaaggtaactaaaatccacaagcctgtagcaggactgacagagagatgatacaaatgttcaacatcaggaatgaaacaaagagtatcactaaaactctgcagacatcaaaaggataataagagaatactaataaattactcacataaatttgacaactgagacaaaacggaccaattcctctaaaagcacaaactatcacatttcacccaaaataaaatagataatttgannnnnnnnnnnnnnnnnnnnnnnnnnnnnnnnnnnnnnnnnnnnnnnnnnnnnnnnnnnnnnnnnnnnnnnnnnnnnnnnnnnnnnnnnnnnnnnnnnnnnnnnnnnnnnnnnnnnnnnnnnnnnnnnnnnnnnnnnnnnnnnnnnnnnnnnnncgaaa

SEQ ID NO: 110650 - DNA, 407 bp, Homo sapiens
gattctcctgccttagcctcccaaatagctgggattacaggtgcctgccaccacgccaggttaatttttgtattttcagtagagattgggtttcaccatgttggcaaggctggtctagaactcctgacctcaggtgatctgcccaccttggcctcccaaagtgctgggattacaggcgtgagccactgcgcccaccctagacaatggtttcttaaggtacaaaaccaaaaagacaagttatgaaagaaaaaaaatagattggacatcatcacaattaaaaacttttgtgcttcaaaagtcatcttcaagaaagtgaagccaaaaacagaatggggggaaaattttgcaaatatatatctgagaaggacctaatatccaaaatgcataaagaactcttacacttcaat

SEQ ID NO: 110651 - DNA, 533 bp, Homo sapiens
cctcctgtctgtcttcatgcgtgtgactctgggtcacagattttcctcctaatctttatgtgtgtttgtgtgtatgacagtctcactctgtcacacaggctggagagcagtggcgcaatcttggctcactgcaacctccgcctcccaggttcaaaccattctcctgtctcagcctcccgagtagctgagattacaggcatgcaccaccacaactggctgatttttgtatttctagtagagacggggtttcaccatgttggccaggctggtctcaaacccctgacctcaggtgatccacccaccacggcctcccaaagtgctgggattacaggcatgagccactgcacccagtcctaacctttacctgtcaaccggcaattctatacagcttactgtggttagggacatatttagttttgtttccaccatcttaatttgcccagtttgtttctgatttttttttcttttttgagagagggtctcactcttttgctcaggctggagtgtagtggtatgactacagctcactgcag

SEQ ID NO: 110652 - DNA, 426 bp, Homo sapiens
  misc_feature (1)...(426): n = a,t,c or g
gtagcccaagcttttgaagaaaaaatgtatcgaaaagcttccacagagggtcttcctccatcaagacatggcaatgctcctgctcaatattctcatcaaacaaaggcaatttttttgagaatttttatggagaagccattaggcatccaccttatagtccaaatttgactccttctgacnnnnnnnnnnnngttacttaatctttaaaaatcttcaaagggcacccatttttctttagttaacaatgtaagaaagattgcattgatgtgattaaattcccaggaccctcagttctttagggatggactaaatggccgctatcatagcttataacagtatcttgaatgtgatggagaatatgttgagaagtaaagttaacatctttaaacttttatcttttaatctcattttaccgtcgtgcggaat

SEQ ID NO: 110653 - DNA, 529 bp, Homo sapiens
tttttgttttgtgtttgtgtttgtttttgagacaggttctcactttgtctcccaggctggagtgctgtggcaccatcatggctcactgcagcctcaacctcctgggctcaagtgatcctcctgcctcagcctcccatgtagctagaactacagatacacgtaccaccatgtctggctaatttatttttctttttagagatgggttctcactatgttgcccaggccggtctcaaaaccctgggctcaagtgatcctcatgcctcaacctcccaaagtgctaagattataggcatgaccaccatgcctggccttttctgctttctgaggaggaaaaaggtactggtggcagagatccaaaagaaaagttgccagtggcagtgtggaaattcacctgagaacaacaggacaagctggggcacaaatgcaaagatgcagagggaggcaacacctgggtcatctgtgagaccttcatgggacctgaagacgcagcacagaggaggaacttgaaaaaggacgggatttctactac

SEQ ID NO: 110654 - DNA, 751 bp, Homo sapiens
ccatcaccacgccagggtaatttttgtatttttagtagggaaggtgtttcaccatgttggccagtctggtctcgaactcctgacctcgtgatccacccgcctcagcctcccaaagtgctgggattacatgtgtgagccaccacgcccggccccaaacgggtagatttcttttgtttttgttttttttttttgagacagagtcttgctctgttgcccaggccggactgcggactgcagtggcgcaatctcggctcactgcaagctctgccctccccgggttcgcaccattctcctgcctcagcctcccaattagcttggcctacagtcatctgccaccacacctggctaattttttgtatttttttagtagagcacagggtttcaccgtgttagccaggatggtctcgatctcctgacctcatgatccgcccgccttggcctcccaaagtgctgggattacaggcgtgagccaccgtgcccggccccacatgtatggttttatgtagttcttacagcaaccattatgattattaatcgtagtttacaaatgtgaaaaactaaggttgagaaaaatacagaccatcaatgcaagatcagaatcttaggctgtccttggaaccacagaaccccccaaacagtacttttcttgcccaattcctacaccctacctttgagagaagcaaggaaacgaagccatttgtcccatatgaagcaagtccatagcagagccaggataagaacctagttctcc

SEQ ID NO: 110655 - DNA, 1519 bp, Homo sapiens
gcacaacctgccacttttaatcagaagtccatgtatgaaatccaggctggttttggatgttaacatggagcgaatgggatacatcaaagaatggttggctgcttgttttaaagaggtcccactggtgacaggatggtagtggcgatggcagtgaggacagactggtaaagggaaaacccagaggcttgtggggagaaagggcttttgtagttaggaagagacagaggtaggcccctcagccagctccagcaggatagagacaacaacatacagcgcacagagaattcgtgcctcagggtcatagtccatgtcaggaggactgctggccagctcatcccagttctgctccatgacagatttcacctggtccttcaacagaggaagggtccccttctccagggcctcagccacaaactgctgctcttcagacagctctagcagggcatccaggaagtccagaatggcttttgcacgcgcttctaccaagaccccagcagcattaaaaaggctgcttaggagaggcttgtctgggtcctccatgtgtagctccccggaaatcaggacctcagatactctttgctctagatcctgccgaatatcctccttgccgaggcacttagcgagggagtttagcacatcttttctcttctcctctgtcaggtccttgaggacactctccatgtcctccaacttctccttcatgtttctggaatcctccgaacccaaagactttcctaaacaggatgaagcaccatccttcttcatcgtctccttgttggggaagacaagctgctttactcgatagctcaggacccgatttggggggatggtcacttccctttggcccttgtgtttatagctgagatggccctgagagatctggctccaaaatttatattgccggtcgcttttcagggtttcctcctttaccgtctccagagtttctgtcaccagatacaggttttctctcgtattaattgatcggaatgaaaagggtagttccctcttcagcttcctgttttcaagggtagccagatactgctgggatatccggttctccgatatcttgattttctgatggtggaagccctggaaactgcctgaaattgttatttctttgggtaatctcactatcaactctcccgttgagtctacattatccagaatttgaaactcagccttttgaccttggagcccagaatccagttcatctaaccacttgtccccatctgtgtccagaatgtccatcagggtgaggcctgttgtgtagtgccggcatccaaagaaagttctattctcccccaccagatggaagcagcggaatctatcagcatcaacaaggcttctaacggcaatcatatcccctccagcatccatctccttaactacaattcttgtgatttcctcaaatacgctgaacattgcgcctggaccaactcagaaacagaagccaatttcagtttttgggaggagggtattggttcaagtatttaaatcttccacatttggcagcctgagg

SEQ ID NO: 110656 - DNA, 442 bp, Homo sapiens
  misc_feature (1)...(442): n = a,t,c or g
cggaattcttgaaagaaaaaagaacaaaaaagaaagaagaatgcctacagaatccagaaaatagcctcatagggcaaatctaaaagttattggccttaaaaaggagacagaaagagagatagggaaaaaagttttctgttaagggctaataacagagaacgtcccaaacatagagaaagatttcaatattcaagtacaaggttacagaacaccaagcagatttaaccaaaataagactaccttaggatatttaataatcaaactcctnnnnnnnnnnnnnnnnnnnnnnnnnnnnnnnnnnnnnnnnnnnnnnnnnnnnnnnnnnnnnnnnnnnnnnnnnnnnnnnnnnnnnnnnnnnnnnnnnnnnnnnnnnnnnnnnnnnnnntctacccanaaaaaaacccnnnnnnnnnnnnnnnnnnnnnnnnnnnnnnnnnnnnnn

SEQ ID NO: 110657 - DNA, 449 bp, Homo sapiens
  misc_feature (1)...(449): n = a,t,c or g
gcgcataccccagcttggtacgaggcactgcccctgctcccggggctgccccagaccctgccgcccccgtcccacctgccgcccccgcctccgctcttccccaccactgccagccccggcgggaggatgaacgccaacaactagctgccgagctgcacccgtgcacccgctggggcctggagtcagggcccactccaggagggacccactgccttcccggggagcacagtagtgcgggcctgggccctgctccacctccagaagtggctggatgtaccctgcctgaggccccgacgaggaggggtatgcaggctggcaggccccagagctggtggagggcatctcactcccaagtgccccccctttctgtgactccttgaagcctttacnnnnnnnnnnnnggaaggggaggaaaaaaaaactttttaccggacccccctccagggggg

SEQ ID NO: 110658 - DNA, 434 bp, Homo sapiens
  misc_feature (1)...(434): n = a,t,c or g
cgtccccccggggtcaaaggtttaggcccacccggcccccccgggtaaaacccgtttttttttaaaaatccaaaacttaccccgggttatgggccggggcttcaatttccacccctttggggggttaggccagaaaattccttttacccagggggccaaaaatggcagggccctgggttccccccccgccttttaagcccgggggcaaaagtgggcccccttttcnnnnnnnnnnggnnnnnnnnnnngaaaggagtagannnnnnnnnnnnnnnnnnnnnnnnnnnnnnnnnnnnnnnnnnnnnnnnnnnnnnnnnnnnnnnnnnnnnnnnnnnnnnnnnnnnnnnnnnnnnnnnnnnnnnnnnnnnnnnnnnnnnnnnnnnnnnnnaacttccttacattgccgctctttcacagcatgcggtagatctctt

SEQ ID NO: 110659 - DNA, 446 bp, Homo sapiens
gtgcagtggcgcaatctcggctcagtggaagctccgcctccagggtgcaagtgagtctcctgcctcaacctcctgagtagctgggattacaggcatgcgccaccacgcccggctaatttttgtatttttagttgagacagggtttcaccatgttggtcaggctggtctcgaactcctgacctcatgatccccccgcctcagcctcccaaagtgctgggattacaggcatgagccactgtgcccggcccctaaattggaaatcttaacctggcaatcaggagttatgaattgctgaccacagatgtatataaatacattacttcagagaatcattctttttgtatggccatcaaccataacagactaaataagctaccatcagcttacacctggatgcccataatagcctctcatctgatctccctacatccaatcttttccccctc

SEQ ID NO: 110660 - DNA, 601 bp, Homo sapiens
tttgagatcggagtcttgctcttgtcccccaggctggagtgtaatggcgagattttggctcactgcaacctccacctcccagcttcaagtgattctcctgcctcagcatctcgagtagctgagactacaggcacccactaccatgcctggctaatttttgtatttttagtagagatggggtttcaccatgttggccaggctggttttggtcttgaactcctgacctcaggtgatccacctgcctcagcctcccaaagtgctgggattacaggtctgagccactgcgcctggccaaaaccacgaactttttaaagcacataaacacacatactattagccttcagttaccactgtatgctattaagagaaaaagtaaaaagaggcaaaatacactttagtaattaccgtgaaaagtaatactaaactttgtggggcccctatgaagatctcaggaattctcaaaaatctctggacatttgtaaaatgctaccaaatactcacatgctttatacatatggagtgctcaaaaataactaaggaatttaaaaagatacatttacctcgtgccgctcgtgccgaattcggcaagagctcgtagcga

SEQ ID NO: 110661 - DNA, 592 bp, Homo sapiens
tcgtccaagctggagtgcggtggcgtgatctcagctcactccagcctccacttcccaggttcaagtgattctcctgcctcagcccccccaagtaactgacattacaggcatgcaccatcatgcctggctaattttttgtatttttagtagagacggggctttgccaatgttggccaggctggtctcggaactcctgacctttgagtaatccaacccgccttcggcctcccaaaagtgctgggattaccaggtgtgagccgactgagcccggccacagtgcagtatttctaaccagtgatcagggtaaagagaatgcggtggtccaccatcccagccctgatcagcctgtctgtgcatcccccatcccagccagggcttggagcagccttgctcaccaactgtgtcccctgcattgtaacacatccaggcacaagaatagccgcccagtgactgccaagtgagtgaaccagcctgcttggagcctgcctctttcccaaactgctcattatcctgttaccccacccagcccacgtgtccaaatacactccagatgcaaaataaaaagctctacgacattggcaaaaaaaaaaaa

SEQ ID NO: 110662 - DNA, 460 bp, Homo sapiens
  misc_feature (1)...(460): n = a,t,c or g
ggagcctaagaacttgtgggctcctccaagcttaccaacaaacacacaataggagtcccagaaagagaggagagggagaaagtggtaaagtctatttgaataagtaatggctgaaaacttcccaaatttgatgaaaggcatgaatctatacactctaaactaaatctatacactcaacaaactttaagtggcataaactcaaagaaatccacaccaaagacacattataatcaaactgttgaaaggcaaagacaaagagagaatcctagaagcagtaggagagaagtggcgtctcaaacaaagaatccagaatatgagtaatggctgatttctcaacagaaaccatggaggccagagggcagtgaaacgacttaatcaaagtgccagaaagcggaaaaacccacannnnnnnnnnnnnnnnnnnnnnnnnnnnnnnnnnnnnnnnnccctcgtgcgcgat

SEQ ID NO: 110663 - DNA, 488 bp, Homo sapiens
accacgcctggctaatgtttgcatttttagtagagatggggtttcaccatgttggccagtctggtctctaactcttgacctcaggtgacctgcctgccttggcctcccaaagtgctaggattacaggcatgagctaccgtgcccagtcacccattttttaaattagggtttttgttgttattgagttgtaagagttatatatcttggatgctagaacctcttcagatatatcatatgcaaatattttcttccattttgtagcttgtcatatccctttaaaaattgtatttaatgagtgtgtcacttcacttcaaaaacttcacctctctcacgcctgtaattccagcactttgggaggctgaggcgggtggatcacctgaggtcaggcgttcgagaccagcttgaccaacgtgacaaaaccacctctctactacaaatacaaaaaaaagtcgcaccggccgcgaatttagtagtagtaggcggccgct

SEQ ID NO: 110664 - DNA, 632 bp, Homo sapiens
ttttttttttttttgagacggagtcttgctctgtcgcccaggctggagtgcagtggcatgatctcagctcactgcaacgtccgcctcccgggttcaagtgattctcctgcctcagcctcctgagtagctgggactacaggcacccgccaccatgtccggctaatttttttgtatttttttttttttagtagagatggggtttcaccgtgttagccaggatgatctcgatctcctgacctcgtgatccacccacctcggcctcccaaagtgctgggattacatgtcttgttttttctttttaagcccatatctctccaagaagagacactcccccactgacttttatgtatgtaacatttaaaactaacatttctactttttaagcaataaaagccacaaagagaactaaacacatacacagtgctcactgtgagggtcttgatcaaaccttaaatactttatggaagaaaagtgccaatatccttggccaaatatactaaaataagcatttaaaatcccattagagattttctaaatagtgactttgaaaagggaggaaaaatacttgtgacatttgagaacttaagaaaatgtgccccctctctatgggggctcgtgccgaataccggcaa

SEQ ID NO: 110665 - DNA, 456 bp, Homo sapiens
tgtgatggagtcttgctctgccccacccaggctggagtacagtggtgcgatctcggctcactgcaagctctgcctcccaggttcaagcgattctcctgcctcagcctcccaagtagctgggattagcaccaccaggcccagctaagttttgtattttttgtagagatgggttttcaccatgttgtccaggctggtctcaaactcctgacctcgtgatccacccgcctcggcctcccaaagtgctgggattacaggtgtgagccacggcgcctggcctattttttcttatggcttcaagtttctgttcagtatcctttcatttcagcatgaaggactccctttagcatttctggtagggcatgtctactaataatgatctccttcaattttatttggaaatgtctggatttctctttcatttgtgaagaatagttaagccatctcgtgccgtactcg

SEQ ID NO: 110666 - DNA, 619 bp, Homo sapiens
  misc_feature (1)...(619): n = a,t,c or g
ttttttttttttgagacggagttttgctgttgttgcccaggccggagtgcaatggcacgatctcaactcaccgcaacctccgcctcctgggttcaagcaatactttctgcctcagttctcccaagtagctgggtattacaggcacctgccaacaagtccggctaatttatttttgtatttttagtagagatggggtttcaccatgttgggccaggctggtctcgaactcctgacctcaagtgatccaccggcctcggcctcccaaagtgctgggattacaggtgtgagccaccgcgcccagccaaccaatcctaccactcttgactttcccaaacacattccccaacagcagcaagcttcttcagacctccattcccatctctgctgcctccactctccaaggctttctagcatcttaaggcatcaagagtattggtgacttgtagtatcagtgttaggaaaaatgccttctccaaatcccatatgagacctggccatggtaaggccctagtgtcaagcctaagactcatggctccttgggcccagtccccaaaatcagggctgcacaggtctgaatagcaaagccaggctttaaccttggttttcccatcntaaactt

SEQ ID NO: 110667 - DNA, 562 bp, Homo sapiens
agagtgtgtgtttgtgtgtttcaaggtcagaacaggttttttggttttggtttttggttcttggtttttttttttgagatggagtcttgctcttggtcgcccaggctggaagttcaagtggcgcaatctcagctcactgcaacctccgcctcccaggttcaagcagttctcctgcctcagcctccctgagtagctgggatgacaggcacccgccaccacacccagctaatttttgtacttttagtagagacgaggtttcccccatgttggccaggctggtctcgaactcctgacctcaggtgatccacccgcctcggccttccaaagtgctgggattacaggcgtgagccaccgtgcctggccagaataggttttttctttcaacttgatcagtatgaaaatggacatcaatgtttgaacagataaatcatggacagccttattgtgattgaaatgcttgtaggttctgtgccaattttccaccactgttgtactttgttgctatttaaaactgtatcaactctaacggaagaataaattatttgtgattttaaaaaataat

SEQ ID NO: 110668 - DNA, 415 bp, Homo sapiens
caccgtacatgtaggcatatcatattcaaactgaagaaaaatcaaagataaagtgtttcaagaaggcaaaagaaaaaaaagctctttatctcagaggagcaaagataagaattacatgtgatgtctcctcagcaagtaggcaagcaagaatagagtgaagggaagtgtttaaagttttgagataaaaggcctccaacctagaatactgtaccctgagaaattattcaaaagtgaaggagaaatgaactttctcaaacaaacaaaaatcaaatttgttgccagtagacctgccttgcaagaaatgttgaagcatgttcttcaaagaggaggaaactgattcaggtcagcacctcagatgtacataaagaaaagattagcaatggaaaatgaataagatatggttggacaaaaactt

SEQ ID NO: 110669 - DNA, 397 bp, Homo sapiens
  misc_feature (1)...(397): n = a,t,c or g
aaaatcatcatgatcagatgataccatgtttctgaaggtgctcaagccctggtcctctgtaagattacatccaacgatttacacaaacaaatcaggtcttcgtgtttaaagccctctcaacaaagaatatcccaggatgtcacggcttcnctggtgaatttcatcaaatatttaaagagaagaattaacaccaacccttcttaaactctttccaacaactgaagaggatggaatcaacccttccaaactcattttgcaaggccagcaaggannnnnnnnnnnnnnnnnnnnnnnnnnnnnnnnnnnnnnnnnnnnnnnnnnnnnnnnnnnnnnnnnnnnnnnnnnnnnnnnnnnnnnnnnnnnnnnnnnnnnnnnnnnnnnnnnnnnnnnnnnnngt

SEQ ID NO: 110670 - DNA, 406 bp, Homo sapiens
gttatatttttagtagagacagggttttgccatgtttccctggctggtctcagactcctgggctcaagcaatctgcccgcctctgcctcccaaagtgctgggattacagacgtgagccaccacagctggctgaagattatactttcaattcagagcgagtttgaagatgacactttgaggcatcgtgtctatggttcattactacagaagcttctctggatgtgtaaagcacagggaaaccaggcagaggagggcacaggggtggctctcccagaacgagaagccagctcctggagttgtttgctgcaactgccattccccgttgatgaaccatgctcttccttcaaaagaagggagagtgagaaggaaccaagtccaaatgggtttcccaatttgaacatttaaa

SEQ ID NO: 110671 - DNA, 1909 bp, Homo sapiens
  misc_feature (1)...(1909): n = a,t,c or g
ttttttttttttcattgttaatgagtgtttattgttaataaaaccatagtacatttacagtaagtgacaacaattattgtacagttaaagtatcatacaatattacagcaataaaataatgcctatttctttgtacatccagccaagcagctagtcaaaatattttccagaattgcaagcccctgggggcttttcaggggtgacctgagtgccaccttctgaaatgcctggggctttttggtgaataaaatagtttttaaggtgcggccagacagctgaagaaagttgcacccagacagacttgtgcctgatgttgccccagtgtctgggtccataaatatggacagggtgtcagggggagcccaggggccctgccagaattcgaggggcaaggccgtgagggggacacaggcagaaaggcctctttctcctggggncctttacctttccatccaatgccctgtccttttaatctccaagagtcacagtccccagtgggacctgtttgcccagctctcaatcctacattaaaggagccgagagacttgaccaggggactctgcttcatcgcccccaaaaaggcaacctagtctaggcctgaggttcccagaaatcccaccccattttactttggccccctaaaaaaccaagcagcaaaacaagagctgaggcccattccctaacacagcacccccatccccctaccccttgcccccctcccatgcccagacttagcctcagaaacccatcaagctggggaactgccctctgctgctaactgagcaagctggtagtcctgatgggagggactcgtggaagcccaaggcaccaaaagacaatgggggaacctccgggttggcaagcaagtcgtggtggcaagggggggggtccaacaaggccaactggaatgcccaacaatttaagccttgtcaaaccttttgaaagaacaaagtttggggaatttggggcaagcctttgctaatgtgaacaatttaggaagaaaaataccaagcttttgaaattactgcagaacgactgggggcctaggcagtatgcattctatacattcataaggattcctgtacccccaggagccccagttgggatggtctgagtttactgaggccctaggggtgagtagagctttgagtgttctctgggcggaggtggatcaggatctgctgctgacctgcaggaggggagagcgacacccagggggagtgcatggctgcccttgagttgcaaactgtgatggggaggagggccaccagttagctacatctcccctttgcccatcagtgattgaacaaacagctctagggcagaggagatgagggtgagctgcccggtgacaggggggacatctgggggaggaggaggaaacagccccgtgaacctggctccaagagggcctacaaccataccccgacatggtgggccctggcacctccacaggccctggcctcgggagcctccgccccctgtctcacacccgggaggtgatggaaacagagtgcacgcgctctgccagggtgttctgcaggtcctgcagtggatccaggccctgcactttgctgctgcggccgtagatgagctgccggaaggcatcctgctccagtagggccttcatgtgcttgaggaagaagccctcacagaacagggccagttctggggcattgtggatcttggcatatttgtaggtgttcacggcactctccatgctgagggtctgggagcacaggatctcgcagtgcctctgcagggcatccaggtggagcagggtggcagctgacagcagctccaggatgtcagtggtggggatctccatggattctgttcctccgtagtacagatactgcatcatcatgtgaaaaatgtggtacttcatgtcgctgatctagatggtctt

SEQ ID NO: 110672 - DNA, 361 bp, Homo sapiens
  misc_feature (1)...(361): n = a,t,c or g
ctttcattcagggcctggtttgggtctctgggcccctgaaccttatcccaagtcccctgaacttttgattcccaaacctccctttcagcatttgatatggggctttaaaacagatttggggtttcaaaaaacaggttctggggctttgcaggaggcaaaagatgggtggcccttttgaaggcctcaacccctttggtatccatggccaacatgttacaattttgcccaaaggcctttaggttccctgccgcatatatgggggccctggttaaaaatttggtttgatgagtaacctttccttttcnnnnnnnnnnnnnnttctctcttccctgttactggtagttctgaaccctagattttt

SEQ ID NO: 110673 - DNA, 355 bp, Homo sapiens
  misc_feature (1)...(355): n = a,t,c or g
cattggttcccctccccaccccccagaaccaaacccggccaggtttcccaagccccttgcccccgttgtccccttggtttttnnnnnnnnnnnnngaaaggttaaggannnnnnnnnnnnnnnncccaattaaggctttcccggtttctaaattttttgaaacaaaacccccctgtttttccccgtttaggttaaaacccccccctgcttgaaatcccaaaactttaaaaaaaaatgggtaaaaaaaccttttttaaaatttttttggcccttttttttaaaaaaagggggnnnnnnnnnnnnccttttcccttcttctttttttaatatcttgtcattcttggcactgtttcta

SEQ ID NO: 110674 - DNA, 906 bp, Homo sapiens
ttgtttttgtttttctgagacagggtctcgctctgtcactcaggctggagtgcaatgatacaatctgggctcactgcagcctccaccttccaggttcagtcagttcttgtgcatcagcctcccgagtagctggcattacaggcgtgcgccaccacacccaactgatttttgtgtttttagtacagacgggggtttcatcacgttggccaggctggtcttgaactcctgaccttaagtgttctgcctgccttctcccaaagtgctgggattacaggcacgaaccaccacgcccagcccagataatttcattttgaacaaatacttcagtatttgtctctacgacatgaggattattttttaaaacataaatcataaaaacatgaccgcatcattattttataaacctagaattctaaatctagtgacaatatccttcaaaaaatgaaggtgaaataaagatgttttcatataaaagctgagaaaatgcatcaccaagagatgcacactaagtgaaatggtaaagaaaggtttttttttttaaagccaaagggaaattatcttagatttaaaaaaaaaaatgaatctgaggaaagaaataaggagaaccagaaatagtaatgtgagtaaatataagattatttttgaaaatagttaaaaattaaagcaagaataacagtaacaaagtattatatttgtgacacgtagaaataatatatgacaacaccaccacaaagagctggagtgaggtaaatggaattatattattatgagcttcttttctttttttttgagacgaagtctcgctcttgtcccctaggctgaagcgcaatggcgtgatctcgacccactgcaacctacgccacctgggctcaagcgattctcatgcctcagcctcccaagtagctg

SEQ ID NO: 110675 - DNA, 599 bp, Homo sapiens
  misc_feature (1)...(599): n = a,t,c or g
gctagatatgttgaccgtttccaggtcttttatctagtgtagttaagggaaagcctatttaagaagtttggcttcaagtttctgttttataagacaaaagtgcatatttctttacaggctaatgctaggtttttgtctttacaaattattttcagaaatggctaaaagtgtacagaaaacagtaaatcccttctttactcagaataacttcttaatagttgaagcatccaaaatatgtaaaagcaagggtgggcgtagtggctcttgcctgtaatcccagcattctgggaggccgaggcgggcagatcacttgagatcaggagttcgagaccaccctggccaacgtggtgaaaccccgtctctactaaaaatacaaaaactagctgggcatggtggcttttttgcacgcctgtggtcccagctactcgggaggctgaggcacgagaatcacttgaacccaggaagtggaggttgcagtgagctaggatcgtgccactgcactccagcctggacaacggagtaangactctggggaaaaaaaaaattaaacttcctactttttttctttttgtagagacagagtttcactctgtcgccca

SEQ ID NO: 110676 - DNA, 389 bp, Homo sapiens
  misc_feature (1)...(389): n = a,t,c or g
ggtctttcggtaagtatggctttttccatttcttcctgtacttttatcattttttagttttatatttcaaaactatgttgtttggagcataaaggtttgtgattattagatcttcatggacaattattctttcataaatattaaatatccttctttgtcttttttaaatgctgcgttttattctatttgtttttgtttgaggagtattggttgacttttaaaaataccagacagctgaatttcattttattatactttgcannnnnnnnnnnnnnnnnnnnnnnnnnnnnnnnnnnnnnnnnnnnnnnnnnnnnnnnnnnnnnnnnnnnnnnnnnnnnnnnnnnnnnnnnnnnnnnnnnnnnnnnnnnnnnnnnnnnnnnnnnnnnccn

SEQ ID NO: 110677 - DNA, 619 bp, Homo sapiens
aatgttgtctgttatttcattaggaaataattacatatataaaatatataataattatatatgtatatatctaatgtagatgtaacaggctgggcacagtggctcacgcctgtaattctagcactttaggaggcctaggtgggtggactgcttgagtccgggagttcaggactagcctggggcaatgtggtgaaaccatgtctctattaaaaatacaaaaaactaaccggtcatgggtaggactagctggggtagttcccagttgcttggggaggctgaggtggggaagaatccaccctggagccccggggaggtccgaagctgccagtgagcccaagatccatgcccactgtacttccagccctgagccaaccagggaatgaggcccctgtccttaaaaaaaaaaaataacatatcctatatagatcctatataaatatagattagatagatgtaacaaactatattacgtaaatctggggttcactcttcaactaaattattgcctcttctaaaatttatttttgtgtcactaatatctagttcagtgccttacatagggtaggcacttgttaaatatttgttgaataaatagtatttgctggtagaattgagcgcc

SEQ ID NO: 110678 - DNA, 582 bp, Homo sapiens
tgaccaggatctcactcagtcactcaggctagagtgcagtggcatgatcatggctcaccacagacttgacctcccagactcaggtgattctcccacctcagcctcccgagtagctacgactacaggcgtgcgccaccacgcctggactaatttttccatagaaacggggttttaccatgttgccccaggctggtctcgaactcttgtgcttaagagatcctcctgcctcacactcccaaagtgctgggattacaggtgtgagccacggtgcctggcctatactatctctttcaactctctcaataacttacaaatgaagaaactaggtcttacacaggttaagggttaagtaggggcacatggtaggaaatcagaattctaacatacatctatgcacccccgacatgtgtgctccttccattccattaaaaacatttagggtgcaaaaaaccacaggccctcaacaaatcttcctttccaaaagagttcccaagagaagaaaagccacaagatagataaaagaaatagaagatacaaaaggaaatctatagaaattcaattagcattctgacctagaagcac

SEQ ID NO: 110679 - DNA, 366 bp, Homo sapiens; identical to SEQ ID NO: 110562
  misc_feature (1)...(366): n = a,t,c or g

SEQ ID NO: 110680 - DNA, 351 bp, Homo sapiens
  misc_feature (1)...(351): n = a,t,c or g
cccgaatgggggcggagtttgggtgggggccaccccaagggggggttaaagccatttannnnnnnnnnnnaaaaggagatttggtttgttggccccggtgaagaaaagttttttttcnnnnnnnnnnnnngtttcaataattaagatggtgtactggtagcaaaagaacaaatagatcaagggaccccagaccctcataaatatagtcacctgatctttgacaaaggaacaaagacatttcaatggagaaagaacagtcttttcaacaaatggtgccagaacaactagatttccacaggcaaaaaaatgaatctagacatagatnnnnnnnnnnnnnnnnnnnnnnnnnnn

SEQ ID NO: 110681 - DNA, 393 bp, Homo sapiens
ggtgcataccaccacacctagtgaatttttgtatttttagtagagatggggtttcaccacgttggccagcatggtcttgatctcttgacctcgtgatccacccaccttggcttcccaaagtgctgggattacaggcatgagccacagtgcccagccccgttctagggctcttaagcaggctaactctgacccataatggacacattctctgcctaagaatggattgtataaagcctgaagaatggataaatgagaactattcataaggcaaacatggagtgttgaacatagattacataaacaagaaatagttattgattacaacgaatgctaattaagcaattgctatgcaaggaagccccattctaatcttttataagcttaccctcgtgc

SEQ ID NO: 110682 - DNA, 881 bp, Homo sapiens
tctttctttctttctttctttctttctttctttcctttctctctttctttttctttcctcccttcctttatctctctctctctctctctctttctctctttctttttgagatggagtttcactctcgctgcccaggctggagtacaatggtgcgatctcggcttattattattctccatgttggtcaggctggtcttgaactcccaacctcgggtgatccgcctgcgttggcctcccaaagtgctggtgtgagccactgcacccggcttaggatgcatttttcaatattttagtgtttgaataacgggctatcttgagaaaaaaataatttgaatcacacatcacaccaaaaataaattctaggtggattttaacactttcaaaaattattattagtttagagacagggtctcactccgtcgcctaggctggagtgcagtggtatgatcatggttcactgcaaccttaaactcctggcctcatatgatcctccggcctcagcctctcaaagtactggaactacaaacatgcaccaccacgcccagcctaggtgggtttttaaaatccattcaagggcgggtgcagtggctcacacctgttaatcccaggcattttggggaagccaaggtggggagggttcactttgaggcccgggagtttcgaggaccagcctggggcaacatagtgaggaccacattttttacaaaaaatttaaaaatgagccaggcatggtggtgcacacctgtagtctctgctattcaggaggctgaggcgggatcattgtttgagcccaggagacagattgcagtgagctatgatggcaccactgcatggcagcctgggtgacaaagggagactcagtctcaaaaaaaagagtcgac

SEQ ID NO: 110683 - DNA, 563 bp, Homo sapiens
ggaaggctgtggtccaaggccatttttgctggctataagcggggtctccggaaccaaagggagcacacagctcttcttaaaattgaaggtgtttacgcccgagatgaaacagaattctatttgggcaagagatgcgcttatgtatataaagcaaagaactgggattaaccccttggtgtcttcagtctttccttccggcccaggacacacactccttgggccccagtgcctgcgcttagtcatcccgtggatcacttcatgggcatttcccctccctttccagttctttgtttccatggtcacctcagtgagaccttccttggctatttaaaatggcagcaacacagtcactcctggcggcaaaccaaacaaaaccagagtcatctggggaaaagtaactcgggcccatggaaacagtggcatggttcgtgccaaattccgaagcaatcttcctgctaaggccattggacacagaatccgagtgatgctgtacccctcaaggatttaaactaacgaaaaatcaataaataaatgtggatttgtgctcttgtaaaaaaaaaaaa

SEQ ID NO: 110684 - DNA, 593 bp, Homo sapiens
gagacagagtctcactgtggttctcaggttggagtacagtggcgtgatcttggctcatggcaacctctgcctcccaggttcaagcaattttcatgactcggcctcccaagcagcggggactacagatatgcaccatcacgcccagctaatttttttgttgttgttgttgtattcttagtagacagggttttgccacattggccaggctggtctcaaacgcttggcctcatgtgattcacctgccttggcttcccaaagtgctaggattacaggcatgagccactgcgcccagccaggatacatcttgagggagccacagagaaaatgaaaaggctggctcagggcggccaagtggccctggggcttaactgatgaaatcctctccttccctatagctgctgtccttattcaggcttcctcctctctcccatgctacaataatcttcgcctattctcccatccagactttgtccccaaatccatcctccatattagccacaaaatactgtgatcttcccaatgtagacatgtgatcctgttactgtctgtttaaaattttcagtagttctccgctacctatggctaattatttt

SEQ ID NO: 110685 - DNA, 1223 bp, Homo sapiens
  misc_feature (1)...(1223): n = a,t,c or g
cgtctattgccctgtgcagtgggagtatggccgcctcaacctgcactatgctgttgtctctaagaggaagatcctccagcttgtagcaactggtgctgtgcgggactgggatgacccacggctctttacactcacggccctgcgacggcggggcttcccacctgatgccatcagacaacttctgtgcccgggagggagtgacatggggcacaaaccacaatggagccacatcttctaaaagcctgcgtgcgtgatgagctgaatgacacaatcccactatccatggctgagctggagtcactacggttcatcatcaccaactttactgctgtcaagaccttggacattcaggtgcccaacttcccagctgatgagaccaaaggctttcatcaggttacctttgcacccattgtcttcattgataggactgacttcaaggaggagccagagccaagatttaagcgcctggcttggggccatcctgtgggcctgaggcatacaggctacgtcattgagctgccgcatgttgtcaagggccccagtggatgagtagagagtctggaagagacctgcagacgggcacatgctggagagaagccaaaggcctttattcactgcgtgtaacagcctttgatgtgtgaggctcgcctctatgagcgactattccagcacacgaaccctgaagatcctactgaggtgcctggtggatttttaagtgacctgaacctggcatcactacacgtggtggatgcagcattagtggactgctctgtggccctggcaaaacccttcgacaagttccagtttgagcgtcttggatatttctccgtggatccagacagccatcagggaaagcttgtctttaaccgaactgtcacactgaaggaagaccgcgggaaaggtgtgagctggaagcactgaacctacctcatcctcctggagggtgtggctaccctcgccaccccaaattccatgtcaataaagaacagctaaattctcnnnnnnnnnnnnnnnggggcggccgttttaaagaacccctagggggccccatgtttacgcggccttgcaaggtcaaacctctctccttaaagggagccaaattaaaggcttggcccgggccgtcttttaacacacgcggaacgggaaaaccggctaccttgggattttggagaaggacccttattcgggggggggacttattggccaagcttcctccgaaattt

SEQ ID NO: 110686 - DNA, 835 bp, Homo sapiens
  misc_feature (1)...(835): n = a,t,c or g
tttaatgtaaaagtaatgaaatactcgaaaaaatgtttaatagaatttaaaattttaacttcagggaatttggaagttcaatcattctcaaagaggctgtaaggatgattaaaatcctgaaggaagccattgaagaaacttccttctgctctttctggaggatctcttttcaattatctattcatcatatacagtagcactgcggtcgtgaataggaactgtttctcgtcttccataaaaatagacacgatttctgttcaaatcctgcaggtaaaagtgataggcgcagcagtaccaaacgaatcctgtaattaatactgcaatgagtagaagcatcatgattccaaacatgtcaactttacagtttaaccaatatatagaactgaatcgacaaccgaaatagggaaaacagtattttttgcatgctttttcttcactacaccaaacacatttcttatcttctgtgcacaattgacaactcttctttacannnnnnnnnnnnnnnnnnnnnnnnnnnnnnnnnnnnnnnnnnnnnnnnnnnnnnnnnnnnnnnnnnnnnnnnnnnnnnnnnnnnnnnnnnnnnnnnnnnnnnnnngctttgaggtacctgacagttccaaaacagctttattcagcttagaagagacacatgaagatctgaatacagagtagcaataatctgagcctgcttctcacaatgcagggcattttactcgcccacactgaggagcctcttggagcgtctccctctcagcgtcccaggaagtgcgttcccagcgaggtacaccggaggcttctgggagcgcagtcaggttttcccgtggccctgacgaaa

SEQ ID NO: 110687 - DNA, 379 bp, Homo sapiens
tccccagtagctgggagtacaggcaagagccatgacgcccggctatttttttgtagagatggggttttgccatgttgcccaggccggtctcaaactcctgagctcaagtgatccgcccacctcgtcctcccaaagtgctgggatcacaggtgtgggccactgtgcctggctagaagctcattttataaggccctctccagtgctgtctgtatgtttgtttgtgcggggactattatttaaaaaaagcataaaactatttctagattggggtaaattaatatttttaatttaatgctctggcaacggctattactgggtttcaaccagggaagttggtcattccccaacactgcaatgtttgttgaatatctacaatcaa

SEQ ID NO: 110688 - DNA, 394 bp, Homo sapiens
  misc_feature (1)...(394): n = a,t,c or g
nnnnnnnnnnnnnnnnnnnnnnnnnnnatctatgtctagattcatttttttgcctgtggaaatctagttgttctggcaccatttgttgaaaagactgttctttctccattgaaatgtctttgttcctttgtcaaagatcaggtgactatatttatgagggtctgtgttcccttgatctatttgttcttttgctaccagtacaccatcttaattattgaaacnnnnnnnnnnnnnggaaaaaaatttttgttaacccggggcaaaaaagggaaactccttttnnnnnnnnnnnntaaaagccttttaccccccctttgggttgggcccctttaattcccgcccaatttccccacccttggaaatttgctttttccaaacaattaaggggggcccg

SEQ ID NO: 110689 - DNA, 1601 bp, Homo sapiens
tttttgagacagttcttactctgtcgcccaggctggagtgcagtggcgcaatcacagctcactgcagcgttgaactccctgggcccaaaccatcctcctgcttagcctcctgaagcagctgggactacaggtgtgtgtcgctacacctggctattttttattttttgtagagataggggtattgctttgctccacaggctgggctcagattcctggcttcaagcaattctcccaccttggcttcccaaagtgttgggattacaagcatgaagcccatgtgtctggccccgggtgattccttatcctgacatagaggttgggaaccagaccaacaaaaaaaaaattgataaattacataacttacaaattagtaagaaagatatgaccatactaatggaaaaaagttaattcaaaaacttttgaccttaaactaactttttggatattaggcttcctgaagttcaagagtgacatattaggcttatattaggcttatttgtaatgtttgaattatacaggaaacattgtcaagtgtgaggtggtgtttagcttcctttgggttatactgatagagatttgttgttaatatgtgttccaggattgtatgggagttcttaaaattctgatatgtcttaatatatgttgtaatggattatgttaaattgttgtaagccacagaaatagccacatttgtcaactgtgtctttatggctgtcttaagacttttgtcatccataattgatgttttgctttgatccttctcaaaaaaaaaaagtgacttataatcagctacagtccaaggcttacttctttggagttcatgaaaagaactcttgaatgcaggtttctggtaactttggagagtgtgccattggattagacagaaaacttccaaggccactaaattgaaaaggctgatgtgttccataaagatgaatatgaagtagagcaggagttgattacatggactgaaatgaactaatggaagactgaaataatttgtatggcttttgttgtttgaaatattgcctacttctttttgttttttcagagtctgaataatctttttattttgagctatttatagccttgaaatacactttaagtgtattgagtattcctaatttctccagaatttgtaaactatttatgaatattcttaattcatggcatttgtctgtataaagttaataaccacgttttcttttgtaatagggcacaattgaaaccggttactttctcaggactttgactgaaatggccttgtgaaatgttcctagcaaagccaatctaggagagtctatatggacaatgattcttgttgcactttgtgtgggtaatcaggcccagtatatgggactgcagtttattttgaagttaggtcggttctgctgtgatttgtctttggtggaagtggtagactggagacagaaatattgtatgtccctaaattaatatagctcccaacaaccaatccctcattatacctttaactgcaaccaccagacacaacggataggaataacagcagaggtaggaatgggagttagcgggattgcaacttccctatcctattaccaacgcttgtccaaggattttat

SEQ ID NO: 110690 - DNA, 365 bp, Homo sapiens
aaaacaaaaaaaaacccacagctgatatcatactccatgatgaaataataaaagcttcccctgagataaggaacaagacaagcgtgtgctcttttcacaactgctattcaacattgcactggaagttcaagccacagcaattaggcaagacaaagaaatagaaagcattcagatttgaaagtaaaggtatccctattcacagaagacaaacatatataaaaacccccaaatacacacaaaaaatagagctaataatttggcaaaatttcaggatacaagatcaacacacaaaaatcagttttacacaccaccataaacatccataaacatgaaaattaaattaaattccatttacaaacgtgacg

SEQ ID NO: 110691 - DNA, 374 bp, Homo sapiens
gtgcaatcttggctcactgcaatcttcacttcccgggttcaagcaattctcctgcctcagcctcccgagtagctggcattacaggtgcccgccaccacacccagttaattttttgtatttttagtagagacggggtttcaccatcttggccaggctggtctcgaactcctgacctcgtgatccgcccacctcagcttccaaagtgctaagattacaggcgtgaaccactacacctggccaaccagtccagtattctatagtcttgtgcatttatagcatttgggttaggaaacaattagtgcatcatctcttcctagaaaagggtctagaaaggcccgaggcgatgcagtagtactttcctggcagtcacatca

SEQ ID NO: 110692 - DNA, 384 bp, Homo sapiens
  misc_feature (1)...(384): n = a,t,c or g
ggacagaagccacagctgaccagtaggcagcacctacccctcttcggtggtagtggtactcacagtattttacacaagcatgcagggnnnnnnnnnnnnngggccctccccttcccaggggaccccctaaaacccggggaaaaaaacttaatttgggaacccgggggaagcctttggataaaaaacttcccccggggccaaaatggtttaaaaaaacccccggggaaaaattttaaaaaatttgggaaaaaaacggcccattaacaaaagcctttttcctgggggggccccaaggttatggtccccttacccaaacccaaatttaaaggccctttaaaattctttggggaaacaggaaaaatttttaccaaaaaaaaatttggg

SEQ ID NO: 110693 - DNA, 384 bp, Homo sapiens
  misc_feature (1)...(384): n = a,t,c or g
tatttcagcaattcaaggtgatttttgaggaagctaagaaatgactagatttaccagaacatttgaaactcaaagaagataatttcttccaggtttctaaaagcaaaataatgaatggccactgatgaaaaatcatattatttattcattcactgtcttccagtatttcagtgnnnnnnnnnnnnnnnnnnnnnnnnnnnnnnnnnnnnnnnnnnnnnnnnnnnnnnnnnnnnnnnnnnnnnnnnnnnnnnnnnnnnnnnnnnnnnnnnnnnnnnnnnnnnnnnnnnnnnnnnnnnnnnnnnnnnnnnnnnnnnnnnnnnnnnnnnnnnnnnnnnnnnnnnnnnnnnnnnnnnnnnnnnnnnnnnnnnnnnnnnnnnnnnnnnn

SEQ ID NO: 110694 - DNA, 634 bp, Homo sapiens
tttttttttaattttgatgttttagtgttatgtttttttgagacagagtccagactctgttgcccaggtatggagtgcagtggtgtgagcatagctcactgctgtcttgaacttccaggctcaagtgatcctcccacctcagtttcctgaatagctaggaccacaggcatgcaccatcatgcctgggctaatttttaaatattttgtaggaaactgggtctccctttgttatccagggctggttctccaactcctggggctcaagtgatcctcctcccttgggcttcccaaagtgttgaggattacagggcatgaggccactgtggccagggccaacattgttttttaatattatggacttgttaagggcaagttgggggggggcattaattccttatttaaggatgttactgagttggaattaaaaggcccctccaaccatcaaccccccaaaatatatggtccaagtaattaaggttccaggatttgtggaatgcaaactaatttgggataaagagtatttgcatgtaattaagggaaagattcttgagattagatcactataaattacccaggtggcctttaaatccaatgaccagtgtccttctaagagacagaagaggagacacagaca

SEQ ID NO: 110695 - DNA, 637 bp, Homo sapiens
ttttttttttctttctttctttctttctttctttctttctttccttctttctttttggagacagagtcttgctctgtcacccaggctgaagtgtaggggggcaatctcggctcactgtaacctctgcctcccaggctcgagcgattctcctgactcagcctcctgagtagctgggaccacaggagtgcaccacgacccccggcccaatttttggatttttagtagagatgggctttcaccatgttgaccaggctggtctcaaactcctgacctcaagtgatctgcctgcctcggcctctcaaagtgctgggattacaggcatgagcccgatgacttcagatagtttcttcctgtctctgcccctttcttttcgtggggcatagagacaaagctcctggtctgcttggccaatgacaccttagggaattttgaaatgcactggtgtttgttgttgtttctctctgaagataaagccgtgggtaatgtaatgccatatgattcatcccaagaatctctttagactaatatggtaagaatatgaggttgaaagcctgcaaacctcatcagcgtatctgttaatgaatatttttgaaggttttcaagtcactggatgaaagttgcattaataagtcgctgt

SEQ ID NO: 110696 - DNA, 409 bp, Homo sapiens
  misc_feature (1)...(409): n = a,t,c or g
tgaactggatgtcagtatggggaaaactaaactctactccttacgtcgtaccaaatacaagaattaccttaaatagatcagacctaaacataaaagataaaactataagacgtctcaatgaaaacataggcaaaaatatttatgactctggagataggctgagatttcttacagcagaagtactaatatataagaaaaaaataaattgaactttttaatctttaagaaaattagaagaaaatatctgcaatacacatttcatgacacagcacttgtaacaacacactgaataccaaaaacacatgaagnnnnnnnnnnnnnnnnnnnnnnnnnnnngtggttacagacatttcaggaatggcccataagcacataaaaatatgctaataatcatgaggcactcgggttn

SEQ ID NO: 110697 - DNA, 373 bp, Homo sapiens
cctcccagcagttcttagcattccatcatggtcaatatcactcaactcccaaaccttaaaaagagaataattgaaaaaagattaatgttctttcagttcatgttctactcgagggcaagaaaagaaagtttatgagctaggaatggtggctcatgcccatatggcctcccagcactttgagaggccaaggcaggaggatcacttcagcccaggagtttgagacagcctaggaaacataacgagatcccatctctacaaaagataaaaaaaaaaaattagctgggattggtggcatccacctgtaggccaagctactcaggaggctgaggtaggaggatcccttaagcccaggagatcaaggctgcagtgcact

SEQ ID NO: 110698 - DNA, 356 bp, Homo sapiens
  misc_feature (1)...(356): n = a,t,c or g
gatataggtaggcaatctattcctcacacctaatgcaaaaattagcacagaatacatcattgacgttaaaactataaaacttctagaagaaaatgtaggagaaaatctgcatgaccctgtgcttgatgagattttatagacatcaccaaaaacacaatctgtaaaagaaaatataaataaattgaactctatcaaaattaaaatcttctctgctaaatacactgatccaagaataaaaagactggaggtaaatatttgaaaatcacaattctgacaaagatcnnnnnnnnnnnnnnnnnnnnnnnnnnnnnnnnnnnnnnnnnnnnnnnnnnnnnnnnnnnnnnnnncaaattgct

SEQ ID NO: 110699 - DNA, 711 bp, Homo sapiens
  misc_feature (1)...(711): n = a,t,c or g
ttttttttttnnnntaagagatagggtatcactatgttgcccaggctgatcttgaactcttggcctcagatgatcctcctgcctcagcctcccacagtgctgggactacaggcatgagccaccatgcctggctaatttttgtatttttagtagagacgggatttgaccatcttggccaggctggttttgaactcctgacctcgtgatccacccgcctcagcctcccaaagtgctgggattacaggcgtgagccaccatactcgtctgataaagtcttttcttaaatacagatggaaggccttcatgtgccctgggggtcacgtcctaaatcctcatggtggcccccagccctgaaagttggccctgtccttgccagccccagcttgcatgacttcaggctccagccatttccttcatagcctggcagctttgctcctgccttcgcagacagaaatgctgtccttccagcttctcctacccttcgggtcagagcccaaaggtccccacccctggttagggctgttttcactgggcggggggcgggggactacactccttggtaactgtcacaactgcccttaactaatcatttgtgcattgccacctcacccctgtcccccatgacaacagcagaagcgaaaaggcgaggctgtcagtaaacgcgcccgaaaattccacatctataatcgtagatactaacaaaccgacaca

SEQ ID NO: 110700 - DNA, 443 bp, Homo sapiens
  misc_feature (1)...(443): n = a,t,c or g
ttttttttttttgggatggagtttcgctcttgtcacccaggctggagtacaatggcgcgatctcagctcactgcaacctccacctcccaagttcaagcgattctcctgcctcagcctcccgagtagctggaactacaggcatgtgccaccacacctggttaattttttgtatttttagtagagacggggtttcaccatgttggccagtgtggtctcgaactcctgacctcaggtgatccgccagcctcagcctcccaaagtgtcgggattacagctgtgagccaccgtgccctgcctcttccttnactttttgaaagacactgttggccagatatttganttcttgggttgantgttttttgttttttgtttttnaggaccgttttctgggcttctgtttggcactccagccggggggttgnacaggaggcggagganttcca

SEQ ID NO: 110701 - DNA, 478 bp, Homo sapiens
ttgagacgaagtcttgctgcgacgcccaggcttgagtgcaatggcttgatctccgctcactggaacctccgcttcccagttcaagtgattctcctgcctcagagtagctggaactataggcacatgccaccacgcccagttaatttttgtatttttagtagggatagggtttcaccttattggccaggatggtctcgaactcctgacctcaagtgatccacccgcctcagccgcctccccaagtgctgggattataggtgagcgccactgtgcctggcctatcttcttttacataaatccagagtctttgaaaaaacttggcaatgagagagcctcaggggttagcatagtgctatacacaaaatttttactcaataaatggtaaaaatttcaagtgatccaggcctaagttaacattctccagacacagaaatattgaagtgctcaccaagtcctgaatctctgagttcagattttc

SEQ ID NO: 110702 - DNA, 922 bp, Homo sapiens
  misc_feature (1)...(922): n = a,t,c or g
tagacagtgcggtggaattccagatggggatagctatgggccctggtgctacacgatggacccaaggaccccattcgactactgtgccctgcgacgctgcgctgatgaccagccgccatcaatcctggacccccccaggataggagttgggccagttatgggtcaggccctttagcccacgacatccacacagtctgggtttcatccagcccaccccatcctacagaccaggtgcagtttgagaagtgtggcaagagggtggatcggctggatcagcgtcgttccaagctgcgcgtggctgggggccatccgggcaactcaccctggacagtcagcttggggaatcggtgaggcacaactgcctgtctcccacagagaggagctgaggttgtgtcctctgtggttatgccactgggggctgggaatctatccctgcccccagaggtcctagccagaagatggcaggtctagcatctgtcccaggagtctgtttcctgtcctaattccccactcctctaggcagggccagcatttctgcgcggggtctctagtgaaggagcagtggatactgactgcccgggcagtgcttctcctcctgccatatgcctctcacgggctatgaggtatggttgggcaccctgttccagaacccacaacatggagagccaggcctacagcgggtcccagtagccaagatgctgtgtgggccctcaggctcccagcttgtcctgctcaagctggagagatctgtgaccctgaaccagcgtgtggccctgatctgcctgccgcctgaatggtatgggtgcctccagggaccaagtgtgagattgcaggctggggtgagaccaaaggtacgggtaatgacacagtcctaaatgtggccttgcntgacgtcatctccaaccaggagtgtaacatcaag

SEQ ID NO: 110703 - DNA, 1358 bp, Homo sapiens
gaagtttttcttgtgagttgaggtgaacatctgaatcccctcggggaactgaggaggaactaccctgccctgacagaggctggggatgaaggaggaagagacagccggtcccctggataaagaggtgagggggtgtgaagtctgggagccccccctcccagggcccaggcttacggggggacagaagggctatacccaggagtgccacagagcttgcatttgggtgtgatctaatccccagtcctgccctgacctcctgggtgctcttagccaagccctcttccctgtgtgtgctagaaagtgagggtcactcccttccacacaagggagtgaattgagggtggggatctgagctctctgagcagcaaagctggacacaggccaaattgccaatcctgagtccctctgtcatgtggacctgggaagcttgtcctcatcctccatccttccccagggtggggcctgagaatctggagtgcagtggtgccatcttggctcactgcagcctcagcctcccaaggttcgaagtgatcctcccaacttcaggtcctaaaggaagagtcggcttacaattggggacttgtttggacaaaggagatccacggggtagacttagcgggattgtccctggggcagccttggatccttgaggcttgccccgcctccttcctcagcccctccctggtcaggcgctccctggtgggtgggggggggtagtcccaggcttgtcttgcaactgtatgttctccttcagacccctccctggggatgccagattcactgcgcttggcagattctgcccccaaacctgtccaaccagttgtttgagaggagggggtagctgggaggggcatcaggaaatgccaggaacagcttcccctagcacagcacagactacagacaggggagcctctggggctgcatacactggagacggacggacagacagatggacaacagctgggaggcttggcccggccatagggctctctgcgggacagtcccagctgctagtggcgcttgtgctgctactgacccgtgtccagcctgggacagacgtgggtgagtaagggtggggattggcacaggggtacccgctgcatctcaggctgcaggacaaacccaagacctcactttgtttccaaattctcacacatggctcctgcctccttcctttccctgaggagaggtttccagatgtccaggacaatgcatgtccccaggaagctctggtaagcccagcctgggcaacataacaagaccccttttttcaaaaagatttttttttttttaaaatttttgtttttaattagctgggggggggggagtgcacctgtaatcccagctacttgggagac

SEQ ID NO: 110704 - DNA, 384 bp, Homo sapiens
  misc_feature (1)...(384): n = a,t,c or g
ccaggaataatccaaggacttccactttcatttctgtttaacatagtactggaacnnnnnnnnnnnnnnnnnnnnnnnnnnnnnnnnnnnnnnnnnnnnnnnnnnnnnnnnnnnnnnnnnnnnnnnnnnnnnnnnnnnnnnnnnnnnnnnnnnnnnnnnnnnnngctgaaagaatcccccaaaaagactgttagaactaataaacaaattcagtaaagttgcaggcatatcaatatacaacaagcagtagtgtcacaaaatataaaatacttaggaataaatttaaccaagaaggtaaaatatctctacactgaaaactgtaaaacattgacataagaaattaaagtcacaaataaatgcaaaaatatcccacattcatagatt

SEQ ID NO: 110705 - DNA, 382 bp, Homo sapiens
cccatctcagtttttgtctgtctggaaatctctttatttcactttcatttttgagtgatattttttctgggtgtagaattttaggttgtttagctgtctttttgtttgggtttttttgtttccttttttgcctttacagacataattttgttctttggcttccattgtttttgttgaaaaaatagctgaatattgtgtctgcgtataatgtattttttattttcttttacactagctacttttgcaatttttcctttgtttttcagctgttttactatgatgtatattgtagtttcatttgtttctggggttatttccctgcttggagtttgtaacacttcttgaatctgtggctttatgtttttgttagtttttaaatcct

SEQ ID NO: 110706 - DNA, 369 bp, Homo sapiens
  misc_feature (1)...(369): n = a,t,c or g
ctgctgttattggcgtttgatgcatttgatggcatgaccttggaatttgannnnnnnnnnnnnnaaagggaccccccnnnnnnnnnnnnnnnnnnnnnnnnnnnnnnnnnnnccnnnnnnnnnnnnnnnnccccggccccggggaaattttggcccggctttggggccccttcaacaccccggggcggggggatcccccttgaaaaaaccccccttaggggacatttttagcccctaaaaaaatacccgccaagggcttgggcccccccccggggccgggaaaatggttttgagagttcccatttcccgggcccccccttgggaccctggggataagggaattaaggaacccggccnnnnnnnnnnctt

SEQ ID NO: 110707 - DNA, 402 bp, Homo sapiens
  misc_feature (1)...(402): n = a,t,c or g
cccttaaaggggggctccctccagaagaaaaaagaaagaaagggaaagggtttgacccccccttttgttcttctgtgggtttttggaacaggaaggccccctttcccctttttcctcccgggcaaaagtcctttggttccgggnnnnnnnnnnnnnttagggggtttgcccccccccagggtttcccaaatccccctcccaaaccatgcccattttttttaaaggtccttttgcccccaaccattttcctgggaaattcggggtggttccctccggtaaaattccccccaaagggaaccnnnnnnnnnnnnnnnnnnnnnnnnnnnnnnnnnnnnnnnnnnnnnnnnnnnnnnnnnnnnnnnnnnnnnnnnnnnnnnnnnnnnnnnnnnnnnnnnnnnnnnn

SEQ ID NO: 110708 - DNA, 788 bp, Homo sapiens
gtgatcatagctcactgcaccctcaacctcctggggtcaagcaatcctcctgccccaacctcctgaacagctgaggacacaggtgcacgccacggcacctggctttattttgttgtttttagagacagggtctcactatattgctcaagctggtctttgaactcctgggctcaagtgatcttcccacgtgggcctcccaaaacgctggaaactacaagtgtgagccaccgcgccctggcccaagccctccacattttcaatccaggaagccttgagtctgtgttgtgtcctgacacctccaagttctaagggccgtcaagaacacgggaggggtttggggacagagtgtccttcctctgtcctctcatccccaagtccttgatggccgcttggtgagtgtctggtgccctggtggcctgccccaagctcttcttctgggctttcttgagcaggaagcgagcagaggctccagcaaggttacgctgctctcctgaaagccaccacgcgacccctcgggtgcagaagtgcagaggcggctctggttcctccagccacctcagtccctctttgggaggtgatgttcccattgtttttcaaaggcctcaccttcaacttgtctgtcttagaatttcccctctggagggctatgggcttccctatgctttcacttcccacctctctacctaagttccttcccagcacatcgccagccctgggcctggggatgtccccgaatgctgtacctggctgaccccggattaaaagcctcatccccgaaaaaaaaaaaa

SEQ ID NO: 110709 - DNA, 158 bp, Homo sapiens
tgtctttactttcttaagatggcagtagtccccaagttgatctatggattcaactcaatccctgtttaaaccccaaattgcttttttttgtagaaatcggcaggctgatcctaaaattcatatggaaataaaaagggactgagaatagccaaaactat

SEQ ID NO: 110710 - DNA, 625 bp, Homo sapiens
ttttttttttttgagacggagtctcgctctgtcaccccaggctggagtgcagtggccgcaatctcggcttcactgcaaagtccgcctcccgggttcacgccattctcctgcctcagcctcccaagtagctgggactacaggcacccgccactacgcccggctaatttttttaaattttttttttatttttagtagagaacgtggtttcacccgtgttagccagggatggtctcaatctcctgacctcgtgatcaggcccgcctcggcctcccaaaagtgctggggattacagggcgtgagccaccgcgcccggcctagaatcctgtttttgctatagtttgtttactctgccttcctgggatcaaatctataccatcatgtgctgcattaggggcttttctcccagaagggttgaaacctcccatgattgtaggagggcagcaccttgggctgtattaccctagcctgagatttcctttggagttgcattcgggtctgggccgtcagggttgtcctgctcactgtgcagcatgatccccctgacattccatcctttggagccccagtaaccacagcaggagggccagcagctgaggctgagccagaagagacctgttctagctgg

SEQ ID NO: 110711 - DNA, 496 bp, Homo sapiens
cctgggttcccctgaagttcccctcccagtgcctttgttctctggccccacctgggccacctgcagacaggggcccctcctggggcctccgtgtttctgaagcctgcccactgggacgaaacctaaactctggctcctggcccgtcgcagaagcaatgggatggaggcttcacccagagactggcacttggaggtccgacaaatcccctaattccacccccctctacagggctggggccaggggtcccccttctccctttggccgaggggtttctagatcttctcctggggtatagagaggcattctgacagggccagtgtgaggtccagattcctccccttccctggagcagcccagtgcagctcctgctcccacttagagcccaggtgacagggacagccacctggtgcaggctctgcgagacaggctgctcatgaccgctccccagtgactgaagtcacagtggggatcaggccacatttctttccagaactc

SEQ ID NO: 110712 - DNA, 2028 bp, Homo sapiens
agattcggcacagggatctcggctcactgcaacctctgcctcctggactctcaggattctcctgcctcagcctccaactagctgggattacaggcacaagccaccatgcctggctaaaattcttttgtatttttactacagacggagtttccccatgttggccgggctagtctcgaactcctgacctcaggtgatccaccagcctcggcctcccaaagttctggggattaaatgcgtgaggcaccatggcccggccgctattgctctttttaacttcatttgatgccttgcttataatatcatatgcttgaggctcactgttgatgtagagtagggcaaatctgtgtgtgtatgtcattaaaaaaattctaccatctttctttatcatctggtgtggggcgcactctacagtgacttcagtctgctcagaacgaatgtggaaggccggccgaaactgatgctgcccacagttcccagtgaagttaggtgggttaattactgccattcctttctaagtgtgttttatggcatcctgcccacaaagaactcacagtctgattaggatgaacttaatgactatttacacctcaaaatatattcagcaaagggttcacttagttgcccctcatgcttcacaggttgactagtatctgtgggtacctccctgcccaggttattcactcaccaaccccccgggccttcaggacatctcaagattcagtcttgacaatataatagcaaaagctggactaaagcccaaatggattgtctgtggcaatgcagaagctgatagcattaacagcagggtgttacagcataattgttaattcgcacatctattaggatccttaaatattcattacttaatgttaaattaacattctgtgtacgggaggggaggcttattcaattcttctgacctcagaactggcagaaggtcagatgtgactacagaactctaggtgaaaaatcaggtagggttcaaattaagtagaactgcccttgccggaatagtgatcttcaaaaaacccttgcttttaggggagggaagcggggaaggaaaggaatgagggaggaaatattcctttctagcattcattttgcttagatcactccattagtgagtttgaccattttgggagtcattatgagcagacttccaaggagttgaccagtttgtggactagtctgggtcacctttccagttacacggatcatatttaactgtgtaaatgaattcatgggtagatgatttgtgcagatctgaatttaagaacatttcctttttctgtgggaatcacaagagtttatccactaaaaaaagatatgtaaaaaagatactttccagcacataaataaaggctggaatttttacaaccctgatgtatatattaggacagttctagggatgttagttcccttcattccagaggctatgccttgtggatacagccccttttctttattaaagtcagttagggagggacttcccttaaccatggactatttattaatgtcttactttaaaatacagttttgtattctgtcaatgcaaatataagacaggttgaagcattaatcatgtaacaaaatattttgatagattacatattgatattacaaaaattaaaaatgtatttcaaactattcttactgtgctgtgaatttatatcttcttctgcaagacctggggctatttttttttcttaaggtatgaaatcaatttcaataaccttaaacaattgaccctctgtcaggcatatgtcaggctccactcttaaggagtcagtgaccatgacctctttgcatatcctggaaaaatgacatcatcaaagtatagttgataatgttataaaggatgattttaaaaacagggtataatcatgactcacaaagatatgaggctgggtgtggtggctcacgcctgtaatcccagctctttgggaggccgaagcgggtggatcatgaggtcagaagatcaagaccatactggctagcacggtgaaaccccgtctctactaaaaatgc

SEQ ID NO: 110713 - DNA, 363 bp, Homo sapiens
  misc_feature (1)...(363): n = a,t,c or g
aataacaaatataaagttgacagcagatttctcaaaaaaatgtataaagtaaggtagaagacagtggaatgaaatttttaagttactgaaaggaagaaaaaactttcagactagaattccatacccagcaaaatatattttttaaaaaaaggtgagacataaagattttttcagacatacaaacaataaaagaattcatcaccaacaaacctgcattacaagaaatgttaaagggaaacccttcaagaagaaagaaaatgatgcagtattannnnnnnnnnnnnnnnnnnnnnnnnnnnnnnnnnnnnnnnnnnnnnnnnnnnnnnnnnnnnnnnnnnnnnnnnnnnnnnnnnnnnnnnnnnn

SEQ ID NO: 110714 - DNA, 716 bp, Homo sapiens
  misc_feature (1)...(716): n = a,t,c or g
tgagacaaggtctcactttcgtcacccaggccagaaagcagtggcatgatctcagctcactgcagccctgacttcctaggttcaaaccatcctcccacctcagcccctaagtagctgcaactacaggctaatttttagtattttttgtagagacggggtttcgccacattgcgaaaggttggtctcaaactcctgagctcaagagatccacctgcctcagtctcgcaaagtgctaggattacaggcgtgacgacacgtgccccgccaagatcttttgatgctgtataaaatctcaccatctggccgcgctcgttggctcacgcctgtaactccagcactttgggtgtaggcatgtatcacttaacccctgcctgcatggtcttaggtcctgtttataatttggtattttgttgttacaagagtcggttttgtcggtcttataatctctattttaatgttaagtggtggtcacttgtgcctaaaattccaaaagggccgggggggtggggcacaaatgagggtgtgtccaaatgcccacttcctgccataccctgataagattttcaaggggtttttggggaatccccgtttgggccaagagcgggtccattcagtctgtcgggaggcttaggatttttatttttttagttcatattccntttaatggtcaacatatggccagagggctaatcngatataaacnagtcaattttgta

SEQ ID NO: 110715 - DNA, 1805 bp, Homo sapiens
agggtcagaaggtttgaagaggcccacacgctgagagccggagacctgcgtaggaagggggattgaggaaggaaattctgagagggtcgaggagtgaaagagcttagtcaagggatttcgtacgtgcgttttggggggccgatgagagtgctttctcgggcctttgtactcagtatagagacggcaagactctccctgttttgggttctaaatgttcccgtgacaatgtcgaaatgttcgtgcacgtttgtacagatttttcctgcctggatgatttttacaatgtgctgttgagagttaactttagctgcactagtaagggtaaaccgagaacagtattgagccgaatattgtgccacgggtgtaatttggtactggctctggtggtgaggtctaagacgttgagacctagaagcccattttgatgtcggatattaatacctcgttcttcttacctcgtctccccatcaaatgccgttcccttcctcagccctcacctcataggttttaatagcaaacggtttatcccttaaagtaacccgttaaatatttactgcagtgccgggtgttgggaattcggagagaaatatgaatgcttattttaggcctttttgtatatttgtcctagctcctagcccagtgtcatggaaacggtaggtaaccagtaaacgtaaaactaggtccttcatacaatggataagtgtcttggcaacgttgatggggaaaattgttggagagagcgcggagaggtcatctttaaggaagatgaagggatatctaggttttttttcggttttgtttaaagtactgtcaatttctgaatacatagagctttaaatttttcgatagtgcatttcaacgctcttcataaaattttaaaagcccactggaatactactttgtagcaaatgagataatgttaagacctacccctctgaatgggaggtggggcgaggaccggaatattaaggatctttaaaggaatcgacttcagctctgcagaaagattagcaattcagtaaagatttggggatgaatgggcaccctagagaagtttattcttgctctctgttatttctgctactggctttttagatcttgttaatatggtaattcagggttttgtcaggaattgatccacacttttgagtaacctggctgccacttaaaaagctgttacattgttttcctcctgatctttaaatgtgacttgattgctaggatatcagacacctgtttggaaatatcttttagcgtgacagaaaactccaggtgatatgaaatttaacaaagttaaagggattaagtcattaagtttacagcttcggaagaggtcggtttaaactagacgaccttgaagacctttccccaatcatataagcgtatctttaagtaccctgggttttgtttttgttttgaagaacaggtgagaacagggtctctggtcgcccaggctggaagtgcagtggcacgatcgatcagtgctccctgcagcctccgcctcccctggctcgggtgatcctcctgcttcaaccccctcttcccccaccaccactacagtagctcggactacaggtgtgcacccattacacccgactaattttttgtatttttagtagagaccagattttgccacattgcccaggctggtctccaactactagacccaagcgatctgcccacctcggcctcccaaagtgctggaattacaggtgtgagccacctcgcccagccagtacttaaaaaaaaattttttttaaccataagtaatgcattcattaaaatacctccaagctgttgcaaaa

SEQ ID NO: 110716 - DNA, 385 bp, Homo sapiens
tcatgatctttaatagggaaagatgtaaagaaaaatgtcagttctctccaaattaatctctgtattcagtgtacttccagtcataattacaaggaaatttttcatggatcttgaaaaactgattgtaaaattgatatagacaagtaaatactcaagaataatcaagagaaccctagaaaaatgtattgcatctgacagcaagatttactacaaaatcataataggacagtatgggtttgatgctagggatgggacaattagggtcagtgggagcgttaatgggaaagccccaggaaacacattggggatcccttgtggaatttttattatataggaaagagacccctacaaatcaacatttatttaataatactgagtgagcctc

SEQ ID NO: 110717 - DNA, 398 bp, Homo sapiens
  misc_feature (1)...(398): n = a,t,c or g
gaagctactcatcacatacaaggaatcttcaataatcagctgatttctcatcagaaactttggaggccagaaggcagtgggccaatatattcaaagtactaaaggaacaaaactgtcaaccaagaattctatgactggcaaactgtccttcaaagtgagagagaaagtaagacatttccagataaataaaagctaagggagttcattaatagacctgtcctgaaagaaatgctaaaggagtccttcaggttgaaatgaaaggacactagacaataattcaaagccagtgaagaaataaagatctcagtaaaagtaaataataggcaagtataaaaactagtgttactgtaacattggtatttaactccactttttgttttctacatgatttaagagan

SEQ ID NO: 110718 - DNA, 2452 bp, Homo sapiens
ttcccgggtcgacgatttcgtatgaacattgctgaagttgtttgcaggcgacttgaatgtgggtctgcaatcagggtctccagagagcctcatttcacagaaagaacattacacatcttaatgtcgaattctggctgcactggaggggaagcctctctctgggattgtatacgatgggagtggaaacagactgcgtgtcatttaaatatggaagcaagtttgatctgctcagcccacaggcagcccaggctggttggagctgatatgccctgctctggacgtgttgaagtgaaacatgcagacacatggcgctctgccttgagattctgatttctctcttcatgtctgccaacgcgctgcgccgcgaatccacctgcggaaatgccaaatgtctttctgggggagatcactttggacaagggaatgggctaacttgggccgaaaagttccagtgtgaagggagtgaaactcaccttgcattatcgccccattgttcaacatccggaagacacttgtatccacagcagagaagttggagttgtctgttcccgatatacagatgtccgacttgtgaatggcaaatcccagtgtgacgggcaagtggagatcaacgtgcttggacactggggctcactgtgtgacacccactgggacccagaagatgcccgtgttctatgcagacagctcagctgtggggactgcttctctcaaccacagggagggaaaatatattggagaaagaagtgttttcgtgtggtgggggacaccagggttttcaattgcttaggggaatggagtcacttctggataactgtcaaatgacagttcttggagcacctccctgtatccatggaaatactgtctctgtgatctgcacaggaagcctgacccagccactgtttccatgcctcgcaaatgtatctgacccatatttgtctgcagttccagagggcagtgctttgatctgcttagaggacaaacgggttcgccctaggggatggggacagccgctgtgcccgggagagttaagatttattacgacgggttctggggccccatctgtgatgacgggtgggacctgatcgatgccccaggggtggggccaaaagctgggctgtggagtggccttcaatgccacggtctctgctcactttggggaggggtcagggcccatctggctggatgacctgaactgcacaggaatggagtcccacttgtggcagtgcccttcccgcggctgggggcagcacgactgcaggcacaaggaggacgcaggggtcatctgctcagaattcacagccttgaggctctacagtgaaactgaaacagagagctgtgctgggagattggaagtcttctataacgggacctggggcagcgtcggcaggaggaacatcaccacagccatagcaaggattgtgttgcaggccaccttggctgtggggagaatggagtggtcggcctcgcccctttatctaagacaggctctggtttcatgtgggtggatgacattcagtgtcctaaaacgcatatctccatatggcagtgcctgtctgccccatgggagcgaagaatctccagcccagcataagagacctggatcacatgtgaagatagaataagagtgcgtggaggagacacccgagtgctctgtgagagaggagatatggcacgcacgctcctgtggcacagtgtgtgatgactcctgtgacctgtgcgaggcggaagtggtgtgtcaccagctgtgctgtggctctgctctgtctgccctgagggacagcttgtttgggcagggaactggaaccatctgggtggatgacatgcggtgcaaaggaaatgagtcatttctatgggactgtcacgccaaaccctggggacagagtgactgtggacacaaggaagatgctggcgtgaggtgctctggacagtcgctgaaatcactgaatgcctcctcaggtcatttagcacttattttatccagtatctttgggctccttctcctgggtctggttattctatttctcacgtggtgccgagttcagaaacaaaaacatctgcccccttcagagtttcaaccagaaggaggggttctctcgaggagaatttattccatgagatggagaccctgcctcaagagagaggacccacattggggacaagaacctcagatgacaccccccaaccatggttgtgaagatgctagcgacacatcgctgttgggagttcttccctgcctctgaaagccacaaaaatgactttaagacttccccaggctcaccaagatcaaccctctaatatctttgaaggagacaaccaacttttaaatgaataaagaggaagtcaagttgccctgtggaaaacttgtccaaataacatttcttgaacaataggagaacagctaaattgataaagactggtgataataaaaattgaattatgtatatcactgtta

SEQ ID NO: 110719 - DNA, 1249 bp, Homo sapiens
  misc_feature (1)...(1249): n = a,t,c or g
ttttttcaacagcaacacaggtttattactagcaaaaccctgcggagggggaaaccagcttagtgtcagggcccactgccgctcacaggctggggtaatcatagcgctgggagggagggctctggacagtatagcttgctgctcagtaaaaaatgataaggatgttcctgaagtcaggctgttgggcctttgcccagcaggatgtgataaggatgtttctgcagtcagggggttaggacatttttcacagcccgagttcccatggaatgttttactccaaccaggatcactcaccaaaacacaggtcatgaagcatacccagcccctgaaggcacgtccagggccagaccagctggctgggctgccagcatcctagtagagatcccagaagatcagataagcttgctcggcacaagtgcatcaatgaagtccaaagtcttgaatgtggccttggcctttggaggacgtcaaacaccctggctagtgagggtgcagtgccgctcccaggatgatggtgtctaaagttgagcaccaggtcgcaggcccgcagaagcatctcccctcaggagtgaaggtagtacaagaagtctgtgcacaggcgaatccgctggtgccattacactatgagggcatggagctccaagatggtggcaanatagtcactagaattcctacagggtaaagctggggagaggaagtagctgcataaaacatatgataccctggaagcacttcccagccagagtctcaggaccacattacatccagatacaggtgccctctgaacacacttctctctctgcctcccactctgagctgcctcctggccccacatgggcagcctggcccaagggttggagcccagcaagtgttcagtccatggtgttgactgctccctgggccaggagagcccttggtgactctctgactcctcctgtggaacctctgactctgccttgggacctcccaattcccatgggaagcccccatggctctggattgccccaccttgcctgggatcctccagccccacaggccttacttgatgccttagccctcccagaacatgacatgttcctcagaatgtggctgatgtccagggccatctgtggatgtttgctgggggcttcttgctgttctcctttatggtctgtagggcagggcaaggccaaaaggagaaaccaatccaacctcagaatggacaaaatgctcactgccacaaacggcaaccacgaattccaccacacgg

SEQ ID NO: 110720 - DNA, 358 bp, Homo sapiens
tttatgtgagagatactgcgttcatgattggaagactcaacatagtaaagatgtcagttctcctcaaattaatctacaagtttaatgcaatttttatcaaaagcccaggaagattttttgtagatataggcaagattattatcaattgtgtgtagaaatacaaggaaactagaatagctaaactgaataaaaaaattggaggaatcactctacctgatttcaagacttattgtatagctccagtaatcaagattgtgtaatattggtagaaggatagaccaaagatcaatgaaacagaatagaaaagcaggaataacagaatagagacctatacagatatcctcagtaaatttttaaa

SEQ ID NO: 110721 - DNA, 1360 bp, Homo sapiens
  misc_feature (1)...(1360): n = a,t,c or g
ggcacgagcgtatcctgaaatggcaccagcagagagatcctgggagtaagaaagattattcccagtatgaggaaaacatcacacacctgcaggagcagatagtggatggtaagatgaccaatgctcagattattcttctcattgacaatgccaggatggcagtggatgacttcaacctcaagtatgaaaatgaacactcctttaagaaagacttggaaattgaagtcgagggcctccgaaggaccttagacaacctgaccattgtcacaacagacctagaacaggaggtggaaggaatgaggaaagagctcattctcatgaagaagcaccatgagcaggaaatggagaagcatcatgtgccaagtgacttcaatgtcaatgtgaaggtggatacaggtcccagggaagatctgattaaggtcctgggaggatatgagacaagaatatgagcttattaataaagaaggaagcatcgagacttggacacttggtattaaagaacagtcttgcagccatgtcccaggaggcagccagtccagccactgtgcagagcagacaaggtgacatccacgaactgaagcgcacattccaggccctgggagattgacctgcagacacagtacagcacgaaatcttgcttttgggaaaacatgttattccgagacccagtctcgggtactccttgcaagctccaggaccatgcaaggagatcatctcccactatgaggagggaactgacgcagctaccgccattgaacttggagccggcagaacaatgaataccaagtgcttgctggggcattcaaaacccaccttggaagaaggaaatcaccaccgtacccgacggcttcctgggagggagagagtgaaggggaccacgggaaagaatccaaagttcggagcatgtaaagtgttcttgcaacttccaaagattcaaggcccttaaccccgggggggaccattcaaacgggaggtttagtttctttttgttcaagttgaattgaaattcccaaaaggcacgcatggagaccaatgaaagttttccgcctgtttgttaaaatctatttttcccccaagggaaagtccctttgcacagacaccagttgagttgagttcttaaaagatacccctttggaattatcagacttcagaaactttttattttttttttttttctngttaacagtcttcacccagatttcttcataaatggctcttaatattattggcacttttttcttaattcaaagtgcgagtttatgagggtaaagctctactttcctactgcagccttcagattctcgatcattttgcatctattttgtagccaataaaactccgcactagctgaaaaaaaaaa

SEQ ID NO: 110722 - DNA, 357 bp, Homo sapiens
gaactcttcacctcagatgatccacctgcctcagccaatgggtggactgttaactcaaaatacgcacaatgaatactgaggaaaatgtatagccatcatcaccagcagctgagatgccagttgagataccacaaacgccccagcatgtaactgctcttttaattcacacacacacacacacacacacacacacacacacacactcatggtaaccagttcaggatggacacagaaacagtcacagtcttttttgggaatacactcccctgtgacacttagatcctagtgctgactccaattccctcctgagacctcccctcccttgcagcatgctgggctttctcttagaacaaccca

SEQ ID NO: 110723 - DNA, 1133 bp, Homo sapiens
tttttttgagacggtgtctcactctgtcacccaggctagagtgcacctgagccatcttggctcactgcaacctctgcttcccacgttcaagcaattctcttgcctcagcctcccaggtagctgagattacaggcgcctgctactacacccagctaatttttgtattttcagtagagacagggtttcaccatgttggtcaggctggtctcgaactcctgaccttaggtgatccacccacctcggcctcccaaaatgctggaattacaggtgtgagccactgtgcctggctttgttggttttaacagttctttcccatgcaggctgcagctgaacagccaagtcccctccttgggtcacatatttttctgaaaatgttataaaaaaattgagtccactggcctggggctaattacctagcagaacatcccccatggtttgggtgattctgaatatcgctgcccaaacaagcacttgtagaggctcaaacaaggccataaaacatgggcaatggggggcgcgctcccactcttggggaaatgaaaatctgacgatactttgaattacagtggatcaagattaattccaggctctacttagaggaagctttcaggcccaatggttaagacataaaaagcagtttgcccctaaagcggcaggtgaaaagctgtgaacaacccaattgcctggtgcccaataacaattaaggaacttgtaccccaggagtgcctaggaaaatgtccacccattagtgcctgacgtaactgcccagttggtggctctgtcctaagtggggttcctgaatttgaaagactcattattaaatattcccctgtaagtgatcctgcaatgcctgctcccatcatggcaagtctgtcaggaacggagtttgtgtaggaattttagaaaacagcaataggttgagggctatgtggtaggccccagagcttctcaaactactgtgcacacaaatcacccagagtctcgttgagatgcagattcggaatcatgtcctgagctgaggcttgatacttttcttcttttttggagacaggatctctctctgttgcccaggccagagtgcaatggtgcagtcatggctcactgcagcctcaaattcttaggctcaagcaatc

SEQ ID NO: 110724 - DNA, 593 bp, Homo sapiens
agaagcttgtgtaatcgcagaggaaggacataacagtttgtatgtaaagaattcttgaaccgattctacaagtcactgatagacagaggagttaacttttcgctggacactatagagaaagaattgatcagtttttgcttggacaccaaaggaaaagaaaaccgcctgtgctattatctaggagccacaaaaagacgcagccacaaaagatccctaagtgaagtcactcgcccaattgagtgtgcatatgcctgcaatgaagatttgtgagaagctgaagaagttggatagccagatctgtgagctgaaatatgaaaaaacactggacttggcatcagttgacctgcggaagatgagagtggcagagctgaagcagatcctgcatagctggggggaggagtgcagggcctgttgcagaaaaaactgactatgtgaatctcattcaagagctggcccccaagtatgcagcgacacaccccaaaacagagctctgatctccaatgccagcacatttgtgacttgtaattagagagaaaagtgactctctaggatatggacatgttgattaaggataactgggaatgcatcataaa

SEQ ID NO: 110725 - DNA, 512 bp, Homo sapiens
  misc_feature (1)...(512): n = a,t,c or g
gaaaaaaacaaggttatgaaagaaattaaaagcaaggtagtgaatcacggatttgaatagggctctgtttttcttactggttttgtaacatcagacaactcatgtaacatttcggtttcctcatctgtaaaatttgaatgtttttgaggattaagtaaagtaatacatttaagacacttatcctggtggcaagaaatagtaaatgctcgataaatattagctaaaagtatatatgccgatatacatgggttaatacagatactacgatggagtattagataaagttctagctcactgcagccttcaccttccagactcaagcgattcttctgcctcagcctctcaagcagctgggaccacagatgtgtgccaccacacatggctatgttgcccaggcaggtcttaaactcctggnactcaagcagtcctctccccttggcctcccaaagtgctgcgattacaggtgtgagccactgttccagccctgaggttcttgatagtcttaggtagag

SEQ ID NO: 110726 - DNA, 564 bp, Homo sapiens
tgagacagggtctccctctgtcacccaggctggagtgtagtcgtgcgatgccaggctcactgccaattctccgccaccctggctccagcaatcctctacctcagcctctcaagtagcctgagactataggcatgcaccaccacaccaggctaatttttatattattattatttgtagagatggaatttcgccctgttgcccaggctggtttcgaactaacctcaagtgatctgcctgcctcggcctcccaaggtgctgagattacagggataatccaccatgccggggaagtaaataagtatcttaatggtaataagagggctgggattgggttaggtgggggatcatggagcaagattcttagaaaatttgggagaatttattaatcaaaaacacaaatggggagcttcgcttgatatagcagaagacacctcgttcctcagaaaaagtgaaaaaagaagagaagagaaagataaaaagagatttttgagtagaatagagtcatgctagaagaaggctcttcagagggtctcaaatggcaaaaagtggaggactatcatatct

SEQ ID NO: 110727 - DNA, 1266 bp, Homo sapiens
gagggtttcaccatgttggccaggctggtctcgaactcctgacctcgtgatccgcctgcctcagcctcccaaagtgctgggattacaggtgtgagccaccacgcctggccccagtccaaaatatttaaagattgtttccttagtgtcttgaagttttgcacaaaattcttttttttgagatggagtctcactctgtcacccaggctggagtgcagtggcgtgatcttggctcactgcaacctctgcctcctggggttcaagctattctcctggggttcagagaaccttgggagggttcagcctccccaagtaggctggggattacagacgtgttgccaccataacctggggtaattttttggcatttttagtgggagaggggagttttcaccatgtttgggccaggttgggtctttgaactcctggacctcaggtgatcctcctgcctcggcctcccaaagtgctgggattacaggcatgagccaccgtgctcagccgcaaaattctttatgaattttaacacttggcaaatgttaatgaccggaagccatagtctgctcctaatacatgtccaaagcatttgactgttgtggtcattaagctggcctggttacattaagctcccgggcttcttgtttaagaccactggctaatcccttaaaaacaaagaggtctggcactagtagcacaacctaaggtggcattacagattctttgagcgatccaccagcaacttttctgccaagtcagcttagtttagacttcagtgaatcaggctattgctatcctaatgtatgtctctatgagtgtatttagcccacacatctgcccttggttgaactttctgactccattgcttgcttggcttgtttccttggctttgggaaaactattggaagattgctaaaaaataccactggcaaagtggatgggaaaagggtggagaacagggggagtagccatgctggatggctcaaatataaaatgaatgaggaattcctttatggaagtatcagtcagattttatggattaagtgatgtaatataggaaattatgtaaaagggaagaaatgtcctgatactgatcctattagagaggtactttagaggcttcttgattggcataaagttcctaaggttatagattttccccccttttggctgtatagcaaagtgttttaatccacggttgtgccttattgttccattaaaattgtatcttcgatccatcaatacaattcttgtggttgaaacaaaaaaaaaaaa

SEQ ID NO: 110728 - DNA, 351 bp, Homo sapiens
ctccaagtcttgagagagagagataaccaccagatacagcaggctcaaagatccccacatatattcaatccaaaaaggtcttctctaggcacactatagtcaagctgtcaaaagtgaaagagaattctaaaaacagcaagagtgtcaagtcatatataagggaatctccattagactaagagcaaatttcttagcagaacccttatagaacaggagagaatgggatgatacaatcaaagtactgaaagaaaaaaaactgcttatcaaaaatactatatccagcaaaactatccttcagaaatgaaggagaaataaagtctttcccagacaagtaaaaacagataattcctc

SEQ ID NO: 110729 - DNA, 319 bp, Homo sapiens
  misc_feature (1)...(319): n = a,t,c or g
cgggtaggggnaaggcnggtggtgnagccccagtttncggcccactgcacctaccacgcgggcccaatttttgtaatttttnagtaagagacgggnctttcaccatgtttgnccaggctggtccttgtaactccgttgctcaaaaaatgagttaaaaaanaaaaggaaaaaaagacaagttggactcaatcaaaattaaaacctttttctgcttcaaaggtcactaccaagaaagtaaaaagacgacatatagcatgggagaaaaatatttgcaaatcatatatctgacaagtgactagtatccagaatataaaaagaa

SEQ ID NO: 110730 - DNA, 393 bp, Homo sapiens
  misc_feature (1)...(393): n = a,t,c or g
cctgcttcagcctcccaagtagctgggattacaggcgcccaccaccgcacccggctaatttttgtatttttagtagggacgggatttctccgtgttggccaggctttttgaactcctgaccttaggtgatctgcctgccttggcctcccaaagtgctgggattacaggtatgagccactgtgcccatcctcatgtcaatttttaaagtgataaatcctgatattatacattgcaattagtgtagaataaacgcttggcttatagaactctctgttcttagtctaaagctgttcccaaaccatgtcatcctcacgaaacattcttgaccaagaaaaaagataaggtcattgagatagggaaggacagaggaaaagcctcttgcttgtgnttctt

SEQ ID NO: 110731 - DNA, 534 bp, Homo sapiens
gaacttagtagagtaaaactcataaaccttcatgggattttggggagggaagtccttttttggtgctgcatagactttgaaggtgagtaggctcaggctggtcagccccatggacctctaaaccaccttgaacatgttactggcagtggggactttcacaaggtctttttaaacgtttgaaactcagtttctagcctgggcaacagggcgagacccctgtctctacaaaaataaaaattaaaaaaaaaatagccgagtgtggtatcatgtacctataatcctggctactttgggaggctggggtgggaggatcacttgagtccaggaggttgaggctgcagtgagccttgtttgtgccactgcactacaacgtaggcaacagagagagaccctgtctcaaacaaaataacagcctgggtcttgtggcacactcctgtaatcccactttgggaagccgaggcaggaggattgcttgagcccaggagttcaagaccagcctgggcaaaatagtgagactctgtctctacacaaaat

SEQ ID NO: 110732 - DNA, 392 bp, Homo sapiens
gcggtatcagtttgccgcagagtgctgatgcgggacttacggagcatgggttacgggcagcagcgcagggagtccaacctgaaataccatactagctgcatacgagcggttccaaacaagcagggttatgtattaagctctattgaaggccgagtggcaggtgaatatttggacccaagccctgaggtacagaagaagaagtatgccttcaaatgtcacagactaaaagaagataatattgagcagatgtacccagtcaatgccatttcttttcacaatatccacaatacatttgccacaggtggttctgatggcttatgaaatatttgggatcattgaacaaagagcgactgagccaattccagtcggaccccacgagcatcgcatgactg

SEQ ID NO: 110733 - DNA, 757 bp, Homo sapiens
ttttttttttttgagacggagtattgtttctggcgcccaggctggagtacaggggcacaatcccaacccaccgcaacctctgcctcccgggttcaagcgatccccccgcctcagtctcccaagaagctgggaacacaggcatccaccaccaagcctggctaatttttttttttttccccaagatggagtcttgatctgttgccctggttggagtgcggtggcatgatctcagctcactgtaacctctgcctcccaggttcaagcaattctcctgcctcagcctcctgagtagctgatgagagaccattcatccaataaatatttattactgtctacagttcattgagggtttagaatacagagatgaacgacccatgtcatgaataggactatggaggatacagaaatctggggggaaaaaaggaaacccacgataaatttttaagaattatggaattaatgatgcctctgaaacatttctttcccagttttggggaactaaataggttcttggtagaaatgggaaagccatctaaaaaccacagtctgttaatttggctagtttatatgcagctaccttcaaaagaacctagatattctccaaaggagatatacaaatgggctgggcaaagtggctcacacctgtaatcccacccctttgggagactgaggcatgagcatcgttggaacccaggagtttgagaccacctgggcaacatagtgagagcctgtctcaaaattttaaaattaaaaaaga

SEQ ID NO: 110734 - DNA, 508 bp, Homo sapiens
ctttgtagagatgaggtcttactatgttgtccagactggtttcaaactcctggcctcaagtgatccttccaccttggcctcccaaagtcctatggtaacaggcgtgagccatcatgccaggcctacattcccctcctgatgagtactttggttgtttccaaccgtttcctccgagaataatggcatagtgagtaacttacaagtgtgtgttcctagaagtgaaatagttgggtcaaaaggtatgcatatttgtaattttgaagagattgtcaaattgtcctccaaagaacttatacaaatttaaatttccaccaagatatgagaataaattttctgataattttgtccagttatcaaactttaatttttgccattctggcaagtaaaaaatggaatctaaggtagttttaatttgcatttttattagcattagggaggttttcttttcacatgttccaaagccctttgggccatgcccagtggttcacatttccaatcccagcaactc

SEQ ID NO: 110735 - DNA, 360 bp, Homo sapiens
  misc_feature (1)...(360): n = a,t,c or g
gaaaaaacttttatcctagaatagtacatccagtgaaaatatccttcaaacatgaaggagaaatatattcctagaccaacaaaagctgagggatttcaacactggacctgtcttaaaaggaatgctaaaaggagttcttcaatctcaaataaaaaggatgttaatgagcagtaagaaatcatctgaaggtacaaaactcactgttaatagtaagtacaggccaggcatggnnnnnnnnnnnnnnnnnnnnnnnnnnnnnnnnnnnnnnnnnnnnnnnnnnnnnnnnnnnnnnnnnnnnnnnnnnnnnnnnnnnnnnnnnnnnnnnnnnnnnnnnnnnnnnnnnnnnnnnnnnntccatct

SEQ ID NO: 110736 - DNA, 940 bp, Homo sapiens
  misc_feature (1)...(940): n = a,t,c or g
aaagacagggtctcattctgtcacttaggctggagtgcagtggcntattcactgcacccttgaactcctgggctcaagcaatcctcccacctcagtctcccaagtagctaggaatacaagcacacaccactttgcccagctaattttttgtggggatggggtctcactatgttcgcattgtctaatctcctaacaaacctggttatttctaattctgtgaatactgtttttgcaaaattcattattgaataagttggaggcctagatgttttctttttctttctagcaaggatttacatttgattctacaaggaaacttgagggagccagcgatatgatttcactttaatccaattttagttgctgagctttagtccctgtgagggaacaacttactagctaatttatctttactataatagtgcaggcttttcagggtcccaactcaagacaaggagacacattcaccatgcatgatccttgcactctaagctgtgatttctcagccctgtgagcctatcaaaattactcctcaatctctgggcaaatacctcaaggggagaaaaaggcccccaccatttttagccccaactccaacccaatcctgtccaataatgctttactatttgctctagcatttcatatagacaatttctgtattttgtgcaggttttctagtcattctcactgttgatccaaattatctagtctgccattatcgggagcctagaccatcataagcaattatatttgtatcaatccgaatcttactgtctaaatcatctgttgctgacctttgaatgactgttgagatcagatttaaaagtgagctttgctaggaactataatgaactggaaaaggcatgcctcaaatgttgacatgaagtatacagacccagggctagaacagcttccgttttctcaaaaaagccctcgtgcc

SEQ ID NO: 110737 - DNA, 382 bp, Homo sapiens
gccatgccccagtgggcaggaggtaggatggccactccccagagggcagggaacaggatggccatgccccagtgggcagggagcaggatggccacaccccccagtgggtggggagtaagacggccacacccccaaagtgggcggggaacaagacagtcacaccctaaagtgggcaggcagcaagacggccagcccctggccatgcaggggcctctaactcttacagctttgcaaggaaagaggaacatcctgctcacactagagagacagattcactgggccctgtaccccaaacccaggggcccccaccctagaaaacaaagcagggtggctgggaggggccaggcagggacctggttggaggctagaaaggggtcctgtg

SEQ ID NO: 110738 - DNA, 1211 bp, Homo sapiens
ttttttttttttgagacaaggtcttgctctgtcacttaggctggaattcagtggcatgaccatggctcactgcagccttgccctcctaggctcaagcaatcctcgtctcagcctcctgagtagctgaaactaaggcacatgccaccatgcccagctaatttcttttcttttagagatgggagccttgcccaggctagtctcaaactcctagcctcaagtgatcctcccatctcagcctcccaaagtgacaggattacaggtgtgagccaccatgcctggctgctctgtaagtgtctgaatttcattttgtatttatcagtctgtttagattttctttcccttcttgggtactgttaggccattggtttctttttaaaggttttcaaatttatttgcatctaattcttcaaattactctcaaaattattccagtatatattcttttgttcctattttaaatctgtattctttattaaaatagctaatgatttatctagcaggacttatattctttccataactttcctgcaccccaattaatctccaattttatatttcttctggccttccttatagtttccacaggtttattttattcattttttaaaacttttatttaattgtttattttattatcattctttcttattcagtaatctaatgtgcttagggatataaaatttcctctaagcatcatatgctaggctttaacaatgttagggaggcctcccctttctggggaagaccacactttacattaacacaggactgtgggatgccatagaggtacgagacagagctttatgaaatatcccagattacatcttcactgatcctgcacaaaggtggggttcctcggttacccactgggtcctattacccaagtctgggtcagcataccgagactacgggtatatagaacaagtgcaactggcgataatccttctgttggggagaaaaatcttttttttctattcatcttaggttctccatctgtggccctatcaagtagactaacaaaagacagattgacaagacagaaacaaagcatgtgccattgtacaaacacaggggagtactgagatgaatactcaaaagaggatttagaacttgggcttatatagcattttaagaaaagaattcattttctaagtgacaaggaaggcgaaaaggactaaaagtatatagtgcagtaaattgtgggaaggcaa

SEQ ID NO: 110739 - DNA, 366 bp, Homo sapiens
  misc_feature (1)...(366): n = a,t,c or g
aactggatgtcagtatggggaaaactaaactctactccttacgtcgtaccaaatacaagaattaccttaaatagatcagacctaaacataaaagataaaactataagacgtctcaatgaaaacataggcaaaaatatttatgactctggagataggctgagatttcttacagcagaagtactaatatataagagaaaaataaagtgaactttttaatctttaagaaaattagaagaaaatatctgcaatacacatttcatgacacagcacttgtaacaacacactgaataccaaaaacacatgaagnnnnnnnnnnnnnnnnnnnnnnnnngaagtgggtacagacatttcaggaatggccgatag

SEQ ID NO: 110740 - DNA, 980 bp, Homo sapiens
ggctgtctcacaagaaaagatgggtgttaggctagccagagaacagcccttgaccacttggttgtctcctgcatgccgcacaccaagacctcacagacagcagcagctttgagcgagcaaagttctgggtgaaggaactgcgcagcctagaggagggctgccaaatctacttatgtggcaccaagagtgacctgctggaagaagaccggagggcgtcgacgtgtggacttccacgacgtccaggactatgcagacagtagctgctcctcagccctttggggggtgggggtgtgtggctgtctgggtggatcaaagaaaatagggactgccttggctgccagggcaaggtgctctaggaggtcttcctggcctccttgaactgtggggtccaggagactccctgaactgctagccctcccttttgtctgtttatctaattctcaggtatgaggctttagtcacttctctttacagaaatcaaagctcagctcctttgaaacatccagcaagacaggccagagtgtggaacgaacctcttccaaaaaagtgggcaagaggattacgtcagtgtggcctgcccttcccaggtgaatgaacagaggacaagggcgtggatctgggccagaagccaaacccctacttcctacagctgttgtcatcactgaagtcagcactcaccctggccctgggggaattaaaggaattccccgtaagggctggacccagctcctttcctgggcttggggtagtcaaatgtctgagctaccccagggttccctcatgtcagcagagtggcgcctgcctgttgctggcccatgggaacggagacagcattgaggctgactgtgggcatgaggagggattaaggctgattttggaccccaggcttctgccctgggacagcacgtgtgtctgcagatatatataagtggcttttgatctgtaaataaaatcagtgcactgtgaatcacaaaaaaaaa

SEQ ID NO: 110741 - DNA, 367 bp, Homo sapiens
  misc_feature (1)...(367): n = a,t,c or g
gctgaggcctgcggagaagggagtgtctgggaacttttcggaccccagttcccaacactgcatccagtcccgccnnnnnnnnnnnnnnaaaaaaaaggggtttgggaattgtccccagggggggtttgaaccccaaacccaaaggggaccctcgggctgggccccccaaannnnnnnnnntaaaaggggggacccccccggggggccccatttttaaaggggggggccgggggggaattttccccggccaaaaacctttccctggggaaaaaggggtttggaacctggccttaatttcttccctggggaggggggaaagggcaccccctgttttggaaccgggtggggggattttnnnnnnnnnnnn

SEQ ID NO: 110742 - DNA, 683 bp, Homo sapiens
  misc_feature (1)...(683): n = a,t,c or g
actgagtgaggcaatggcaaaaagaagagctttacttttttaacctttgagcacagccatgactctgcgaataagattgtctctcagaaataccgtaaagtacatagccactaccatgaagtatggaaaaccatgttgaagaaagaaatggttagtacttcagccagccagagaggtcagagtggttctggaaactttggtggtgtccatggaggtggttttggtgggagtaacaactttggtcatcaaggaaaaatttcactgataatggtagctttggaggcagctgtattggtggatatgggggcagcagggatggctataatggatttagtacttaaatgatggaagcagttttggagatggtgggaactacaacgattttggtaattacaacaaccaatcttcaatcaattttgaacccatgaagagaagaaactttggagacagaaactctggcacctnnnnnnnnnngaaagaaggaacctctggcccctgtgggggctgaggctactatgttgccaaaacatcaaatcaaggtggctaaggcatgtgaaagttgccagtaccagaatggagtcacttatgtcaaaaccctaacaaagtggagtcaggaggccctaaaaaagttctcaccgcacatgcctataatataccttatcacaagaaattcctgcaggtcg

SEQ ID NO: 110743 - DNA, 319 bp, Homo sapiens; identical to SEQ ID NO: 110729
  misc_feature (1)...(319): n = a,t,c or g

SEQ ID NO: 110744 - DNA, 902 bp, Homo sapiens
  misc_feature (1)...(902): n = a,t,c or g
attttggggagcaggaaaattgtttctctccctttcttcatatcataaaagaatataggttattttccagaggacccctgtgcaatcggagtattgaattttctttatcttcatgatctcctccttttcagggcctctttcatatttccttgcccagtaagtcttttatataatcaatacatttgtaaaaattgattgccattctatatacactatataagtttgacatcttttagtcaaatgcttatgctttttagttttatttgtttgagagagggtcttgctctgtcacccaagctggagtgcangtggtgtgattatactccgctgtatccttgaacatcctgagctcaggtgatcctccgtgcctcagccttcccaagtaagctaggaccataggcatgtgccacaatgcctggctaattttgaatttttttttttcataaacagggtcttgctatgtttggccatgctggtttcaaactcctgggcctcaagctatatttcctccttcagcctaccaaagtgttggggattacagggtgtgaggccaccatgccctgggcacttagggagttgttttaagttttatctttgattgattgggtttttctttgggggaaaagtatttaactggataattttatgttggggtggattcatatttttaaatattttctggaaatatttcatattttccggagtagggaaagtttgttttttaacctggaaggtgttaaggaggaaaggattatggcccttaaatggatttttttttccccttaaatgtattagggccaaaatcctcaatggatggatactgctctcaaaggaattattaaaattggatggggaaaaccttgtgggtgggtatgggtgacccaagtaagtttcaacccctt

SEQ ID NO: 110745 - DNA, 350 bp, Homo sapiens
gcagaagggaaaaataatgggaaaggaatagacaatatttgatgagataatagttgagaatgtttcagagctgataaaaagcaccatgacaaatttgagaagctgagagaactgcaagcagaataacgtaaagaaaatatgcttctagagacatcatagtaaaatgaagaacatcaacaacaaagaaaatctcttaaaagttgccagagaataaaagattaccttcaaaggagctgaggcagttacaatgatagctgactatacaggggcaaaaatggaagccaggaaacactggagtgatatctcaatgtgctggaaaaaaatttgccaatctaggctgggtgtggtgg

SEQ ID NO: 110746 - DNA, 353 bp, Homo sapiens
  misc_feature (1)...(353): n = a,t,c or g
gcagaagggaaaaataatgggaaaggaatagacaatatttgatgagataatagttgagaatgtttcagagctgataaaaagcaccatgacaaatttgagaagctgagagaactgcaagcagaataacgtaaagaaaatatgcttctagagacatcatagtaaaatgaagaacatcaacaacaaagaaaatctcttaaaagttgccagagaataaaagattaccttctaaggagctgaggcagttacaatgatagctgactatacaggggcaaaaatggaagccaggaaacactggagtgatatctcaatgtgctggaaaaaaatttgccaatctangctgggtgtggtggctc

SEQ ID NO: 110747 - DNA, 697 bp, Homo sapiens
  misc_feature (1)...(697): n = a,t,c or g
gagatttgtcacagtttggaagcagtctattccatcaactagccaaaaatgcaaacaccctgaggattcagagaacaatttctttgaagggtttccttcaagatactggctcccagctttcttctttccacaagcctttcttgctgctgtgcttcaagactatgggaggtcccgaggaatcgctgtgggatgccctcaccttcacccaccatgtgatttccaacaccactgacaagggatgaggaagttctccgtattttatgcccaaaggaaacttcaacataggtcagggagagcgtttaaggggntcagcttcctctcacactggagttttacatttttgggtttatttcatcgagggggcaagatggaatcgtgaacagaaaatactggaagactcgctgcctctggagatgtgctgtgattttcccgacatatactttttgccaacaaagatttctaccaaaacaccaaatgcttccaaccagacagattcagaactctatgcttttgaatgcccagtttaccagacacctgagaggtcaagaattttggcaactaccggtttaccaacaaactttttaacatcagtgtatttatcaacgaagaaacctcctagtcactggatcccaatgcgggttgcattgctttgtgagaagaatgaaaaataaatgtccatatcaacccaaaaaaaaaa

SEQ ID NO: 110748 - DNA, 794 bp, Homo sapiens
cagatgggaggatgcctggctgtgcccgaggcgagtgggcattggccatcaggacaggagagaggtggtgtccagtggagacatccacgtagccctgcaggccctcagcccccaggaccacctcagtttgggcattgcccctcccctcccactggggtgcgagtgaccaggagtgacccagctgggaccaggcgggaggcaggacagctctggaggggccccaaggctcccgccccccatgggggcccagcatcgactccatcccccgagtgctcccggacaccccggcacctgtggagaggcggaggaaggcatgaaccccatctgctcccagggtggcagccgtgggcggaggctctgctgcaggatccgggaggcccacagaaggcacctgcatttcacgctgagcgcatctgaggatgcgatcaggaagcagccccggcactctctctttatggatgcccacttccagtttaaccgtggcatcccgggggcaagggcgccctccaagctgtgcttcactaattccctcagggtttggaactatttgccaagtttcccccgatgggcctttaagctctcgtccttcctaacctaaggcaacttcaaccatctgataaatctaataataagttacaatcgaggccgggcacagtggtctgtaatcccagcaccgtgggaggctgaggtggaaggattgcttgagcctggggaggtggaggctgcagtgagccatgacagtgccactccactccggcctgggcaagacagcaagaccctgtttaaaaaaaaaa

SEQ ID NO: 110749 - DNA, 651 bp, Homo sapiens
tcccggcccgtcccgcttagttttcggtttgacaatgccatgaagcagatgagcgggacctgaaagacctgacccacagccgacttccgatccaagaagaagaagagaaagcagggcggcagtcctgatgagccagatagcaaagccactcgcacggactgctcggacaacagcgactcaaacaatgatgagggcaccgagggggaagccacagagggccttgaaggcaccgaggctgtggagaagggctccagagtggtaagtggctctggctgggcattttctgtctgcaggcagggcgagctggcctaaagagtggtgctctccctgggggccagaggcaatgctgtgtcagctctgcgtgcatggtgaccagcatggggaggcagtgtggtctggcaaaaagcacaggctgcctagctggaggcacagtttccttgttggaaaatgggatgagcccctgtgcaccaggtagtgggaggatgtgaggtttctggcacatagccgggccttgtcatttaaagccattgtaaataactgggctactctgggccaccctgcctataggatagccctgctctgtctatggagcaagcagctgttttactatataccgttgctctaataaactcggtttcttttaaaaaaaaa

SEQ ID NO: 110750 - DNA, 569 bp, Homo sapiens
gtcctaactttattggtctttctcagaattgcttaaactattctagctcctttatcttttcatataaattttagaatcatcttgtctatttccacaaaatagcctgctgatattttgtttggcctacattaatacaggtcgattggaggaaaattgacatcttaaaaatataaagtctttcaatccctgaaattcatttatttatatattcttttatttgtttcatcagtgttttatagtttttagcatgcatatcttggacatcttttttatttttaataggggtagggacttttctctgtcacccaggctggagtgtagctgcgtgatcatacctcactgcagcctggatctcctgggttgaagcattcatcccacctcagcctcccaagtagctaggactctacgcttgtaccaccacacccagctaattttttaaaaaatttttgtagaaatagggccctgctgtgtttgcacaggcttttcgtaaactcctggcctcaggcagtctactcacctcagtctcccaaactgctgggattacaagtgtaagccaccacgcctagccc

SEQ ID NO: 110751 - DNA, 778 bp, Homo sapiens
  misc_feature (1)...(778): n = a,t,c or g
ggcacgagcttctgttctctttgtttgaaacagggaatggggaggccatctgagctgttttatctgatgataggattgtgctgtgttgctttctcaggcgagatgctcttaaagatgcctctcagagcagatctcacacctctcccccaagcatccaaagatggtctgggcactggggcatccaggctgaaagcagcccagctgggagcctgggcctgtcttcaccttcatgggaaatgcctctctgccctgaaggggtgggaaattctttgctcactcagggagggtccatccaggggtttgacctgttcagtcttcaagtgacacctctagttccctcccatgggcttctgtgccccctgggcagggaagtttctgatgggtgggctttgagtgttgcacatcagggagaaaagggacatcaagagacccacgggggcctggtgggggacgggctgggctctggagcctcacagccctgggtttgaatcttgggctctagagacatatggtgtcttggcaagtcacttaatgtctctgcacccctcaccccatatctgcaacctttggataatagtgtcaacctcacaggcttgctgtgaataagtagtagatagaaacaaaaaaaagaggatgctttaattaacgggcccgccggctttttcccctttaggggggggaaattttaatttggggctgggggggggntgtttaaaaaaaaccttcnccgggggggggaagaaaannnnntnnctncnggggggggcgttcccccccg

SEQ ID NO: 110752 - DNA, 383 bp, Homo sapiens
ataatttggtacagccactttggaagacagttggataggttaaaaaactaaacactcttaccacatgatccaacagttgcgctccttggtacttaccaaaaggagttgaaaacatgtccacacaaaaacctgcatacaatgtttataggagctttattcataattgccaaaagttggaagcaagggatagctgacatctgatggataaaataataaatagaagagaaacttgggagactgagatttctttaacagcggttataatagctaacatttattgaatacttaagtggcatgcagtgtcttgaatgcttatgttaaattatatatcttcccaataacaaccacatgtatctgattatcaaagaattttcctcttgatg

SEQ ID NO: 110753 - DNA, 931 bp, Homo sapiens
  misc_feature (1)...(931): n = a,t,c or g
gcgagcnnaccaaattctatagcatactcaaggagctgaaaaactggttgctgaacttgaaggagactctcataagtctcatggatcaaccagtcagatgccagaggcccttcaagcttctgatctctggtactgccccgatgggagctttgtcaagaagatcgtaatccgtggccatgggcttgacaaaaccaaaactaggctacttgctgccgggtactggctttggggtttcccttcgggatcagggccgcccagagggctggacagagctaactatggggcgtagggccatggagggaggaaacttgggggggagctcatagagaaatgcttggagtccatgtgtcaaggtgaggaagcagagcttcagctgcctgggccactctggacctcctgtcaggctcacactggcatccttcactcaaggccgagactcctgggagctggagactagcgagaaggaagcccctggccagggaagaacgtgcaaggggcacagaactatttcgagctgggaaccctgaaggagctgcccgatgctatggacgggctcttcggctgctcctgactttacccccacctggccctccagaacgaactgtccttcatgccaatctggctgcctgtcagttgttgctagggcagcctcagttggcagcccagagctgtgaccgggtgttggagcgggagcctggccatttaaaggccttataccgaaggggggttgcccaggctgcccttgggaacctggaaaaagcaactgctgacctcaagaaggtgctggcgatagatcccaaaaaccgggcagcccaggaggaactggggaaggtggtcattcaggggaagaaccaggatgcagggctggctcagggtctgcgcaagatgtttggctgattaaaagttaacccttaaaagagaaaaaaaaaaa

SEQ ID NO: 110754 - DNA, 2469 bp, Homo sapiens
tgggcctattccctggtggattccagtcaagtgtctacatttctgatttccattcttcttatagtctatggtagtttcaggtcccttaatatggactttgaaaatcaagatatggagaaagacagtaatagttcttctgggtctttctatggctacagcacctataatagcatccaaacaattgactctacccaggctctgttccttccaattggagcatctgtctctcttttagtaatgttcttcttctttgactcagttcaagtagtttttacaatatgtacagcagttcttgcaacgatagcttttgcttttcttctcctcccgatgtgccagtatttaacaagaccctgctcacctcaggaacaaggatttcctttggttgctgtgggacgtttcactgctgctgagttgctgtcattctctctgtctgtcatgctcgtcctcatctgggggttcttcactgggccattgggtttcttcatgggatggcactgggccatgggcctctgtgtcgccatgatcgcctttgtccgcctgccgagcctcaaggtctcctgcctgctttctctcagggcttctcatctatggatgtcttttggggtatttttctcagcctacatctttcaataggcaacgtcatgggtgaaggtgggccactcaggccgggctggacaaatccccttgacgttctattcccggaaggctccacctggggcccaatgttgggcgtgatgttcctcgcctgtctctgcctgggaaaactggtcttcccaagctccactgggcagccacttcttccatgttggggcatcgggaggacatcgttatggcctgggtctcctactatggtttgttccttcggtatggacaactacaaaaagcaagccagtggggactcctgtggggcccctgggacctggccaacatctccggggcgcatgcaggaaggtctcctacttttcacttgcaccctcatcgggatactttgttagggcctgctcactgcttactgtgggcgttttcgcatttcaccggggccggcccagcccgcccttctctatttgggtggccattttacttttattgccactcctcacgatggcctatttaaagggcgacctccggcggatgtggtctgagccttcccactccaaagcccagcagctccccgatcctggaagtatgatggatcacgtggaaaagtgaccagattggccgtccatagtcccttttcctcctcaactcatggtttgtttccctccttaagagctggcccggtacctcagaaatgtaccctgtgtttaagggaaatgccccgtgtgaactggatttgggccattgaaaaagggaagcctccgtttgccaggaaaaaaaggtgcctggaaacccctgtttgggttccccttcctccctccctgcggatgtaaaaggtgggggccccccttccccaagagggaacaggccctcctccccccagcgccgcccttccctcccccacgtttttaagggatctgcacccagatctgttacccttcctgggggagattggagatttgaactgtttaaaaactgaaaacagtcgaggagtctttactagaacttttgaacactaaaaggatgaaaaaaattagcaaaccgaagtttcttcaatgacccctcgagaactttggggaccagtttcctatgggggactcagtttcagagaacttgagacagaagctcttctgtcgttatattcttctttcctttttttgggatttattaaatattttcctgtgggtgtgaagtgacttatttaaatcccacagacattgagttgacttcttacaacatccacataagaatttgttgtaatgagttcatgttccacccagatgttgtgtttggcagtgaacaagggcacggtttttatatcattcgtacatatatatatatataaacacacacatagatatatatgaataaacaaaaatgaaatccctgctaagatcacggctgtgtaggctgacagggggcttgctgtccgttttgagcatgtcgagcagtttactgtggcttccttgtatatggataagctgctgtccttccccttcacaactgaccccgcagttaccaaactagtatagcatttgtgctgattgatgatagactcatgggacttcaggagctctttacttgggtttgatcagtgtagcaaattaggggatgaaggagtttcaaaccttttgggccctttcttttctttttctagggtttctcccctcgcagggggggttcggtagtttcttctccgagccaatgcatgtattatagcagcaggtgtctttgtgctttctcatcatagtaacgtactacttgtaaatacatttttctattttctatttttttgtatttttttttttgacattttgtttcattggtgtgctgtatattttccatgccctcactcctttaagaaaaaaaaaa

SEQ ID NO: 110755 - DNA, 561 bp, Homo sapiens
ggctggagtgcagtggccaatctcggctctccgctcccagggttcaagtaattctcctgactcagcctcccgggtagctgggaatacaggcgcatgcaccacgcccaactaatttttgtatttttagtaaaaatgaggtttcactatgttggccaggctggtctcgaactcctgacctcaagcaatccacctgccttggcctcccaaagtgctgggattataggtgtgagccacagcactcgaccaaaagatgtttaaattaactcaacatctaaaagtttggaggctttcacgttacaattcctaatgaagatctagagcagtggttctcagccagggtcgattctgcgccactcccagggacatctagcaatatctggaagcattggtgattgtcacaactggacggggagtgctactgcggatgctgaacatcctgtgatgcacagaacaaccctcaaaataataaattatctggtccaaaatgtcaagtgcccagatgaaaaaactgatctagaagtattgcatgcatctgtgggtcccgcctaccaaaagaaattt

SEQ ID NO: 110756 - DNA, 371 bp, Homo sapiens
  misc_feature (1)...(371): n = a,t,c or g
tctttaggtcctaaaagtcccgattaaccccccttaatttgcccttacaacccagccccccnnnnnnnnnnggtgaaggttgacaaaaattttcaatgtttttttacaaaaccaccctccccttttttaaaccccgggtttttggccccccggccaaagggttaaaccccagttttccaaaaagccagggatccccccccaactgcccccgcccccaaaaggttcccccaaaaaaacccccggctttccaaaggggnnnnnnnnnnnnnnnnnnnnnnnnnnnnnnnnnnnnnnnnnnnnnnnnnnnnnnnnnnnnnnnnnnnnnnnnnnnnnnnnnnnnnnnnnnnnnnnnnnnnnnnnnnnnnnnnnnn

SEQ ID NO: 110757 - DNA, 549 bp, Homo sapiens
tgagactgagtctcgctctgtcaccaatgctggaatgcagtggtgcaaactcagctcactgcagcctccgcctcccgggtccaagcgagttcctgcctcagctacctaagtagctaggactacaggtgctggccatcacgctcggctaacttttgtattttttagtagagacagggtttcgccatgttggccaggctggtcttgaatttccgacctcaggtgatctgcctgccccggcctcccaaagggctgggattacaggcgtgaaccaccatgcccggcaagcttcaattattaattgaataactttgtcattgtcctgtcctgttctacacgaagggaggggcctcactgcacactgggaaacagtggccccactgtggcaaggggcagggcaggtgttgcacggcacaaaccacatacgtgtctacaaagccacacatgcacgcctttaacgggagatcctgctggcgaaatctcgttatttgcctagagaggatacttttgaacagccagccaatacatgatgcagatgtaacagcaaaagat

SEQ ID NO: 110758 - DNA, 389 bp, Homo sapiens
  misc_feature (1)...(389): n = a,t,c or g
gaaaaaacttttatcctagaatagtacatccagtgaaaatatccttcaaacatgaaggagaaatactttcctagaccaacaaaagctgagggatttcaacactggacctgtcttaaaaggaatgctaaaaggagttcttcaatctcaaataaaaaggatgttaatgagcagtaagaaatcatctgaaggtacaaaactcactgttaatagtaagtacaggccaggcatggnnnnnnnnnnnnnnnnnnnnnnnnnnnnnnnnnnnnnnnnnnnnnnnnnnnnnnnnnnnnnnnnnnnnnnnnnnnnnnnnnnnnnnnnnnnnnnnnnnnnnnnnnnnnnnnnnnnnnnnnnnntccatcttactaaaaatacaaaacccatctctaaaa

SEQ ID NO: 110759 - DNA, 437 bp, Homo sapiens
aagagactgcatcctgctctgttccccaggctggactcctgcggtggaatcatagttcactgcagcctccaaaccccaggctcaagaaatcctcctgccaaagcctctggagtagctaggactacaggcatgtgctcctatgcccaactaattttttaaattttattattattttctgtagagatagaggcctcagtatcttgtccaggctcgtcttcaactcttggtgtcaagcgattctactgcctcagcctcccaaagtgctgggattacaggcataaaccactgcaacccgcccaatttacatacttttaaaatgatagccaatatgaagaaaggtagaaagaaatataaatatcaagtattcctgctatctaaatcagtttaaatatttataattttatctttataattggtatttaactctgatgcctctc

SEQ ID NO: 110760 - DNA, 588 bp, Homo sapiens
  misc_feature (1)...(588): n = a,t,c or g
gtcaaaagatggggagtctcatgattcaagtttttcagatattgagttgccaaggcagataaatactactcagatgcttctcttctaaaagtcactaatgaaattaattatggtaacttctattgaactcccatgattttgctgattcaaagtctgactgttcatggtactaaagcatttctgtctgagaaaaacattcctgcatttaatttgttggtggcagtgtccttatatgacaaaaccagtctcacaattcattataaacaataacctcagccgggcacagtggctcatgcctgtaatcccagcactctaggaggctgaggcaggtggattacctgaggtcaggagtttgagaccagcctggctaacatggtgaaaccccttctctactaaaaaaatacaaaaattagccgggcgcagtggcgcgtgcctgtaatcccagctacgtggggagactgagggcagggagattgtttgaacctggggagggcagaggttgcagtgagctgagatccgcaccantgcactgcaacctggggcgacagagcgagattntcttcacaaacaaacaaaccaccaccacca

SEQ ID NO: 110761 - DNA, 451 bp, Homo sapiens; identical to SEQ ID NO: 110563
  misc_feature (1)...(451): n = a,t,c or g

SEQ ID NO: 110762 - DNA, 445 bp, Homo sapiens
ttttttagtttattatttatttttggagacagagtcttggtctgtcactcaggctggagtatagtgatgtaatccatggcctcacctaatagcctcaaacttccctgggcttaagccatcctcccccctcaccctttcatgtaggtaggctacaggcatgccgccattcatagctagtttttttatttttagtagagagagagtctcactatgttgccgaggttggtcttgaactcttggcctcaagcagtcctcccctattagcctcccaaagtactgggattacagatatgaactaccgtgctccctgataccctaaatatttatcaaaatttttcactgctattttcctcataggattaaaagggctatttattattttttataactacagctgacccttgaacaacataggggttaaaggtgcagatcccccgtgcagtaa

SEQ ID NO: 110763 - DNA, 576 bp, Homo sapiens
gagacaaggtctcattctgtcgcccaggctggagtgcagtggtacaatctcagtccactgcaacctccttcttctgggcttaagcaatcctcccaccttgacccttcaagtagctcggaccacaggtgtgtgacaccatgcccagctaatttttatattttttgtacagatggggtctcatcacgttgcccaggctagtcttgaactcctgagctcaagcgatccacccacctgggcctcccaaagtgttaggattacaggtatgagccaccaggcccagctgtttttttattactgagaatcagtcacaaaaagtgaagtatgtatattgccacattttcattatcttagttaaaatgttaaaagggggaaacttcctgggaaacgtgaactcctatccagttaactatggccagaaataacaacattattataatgttgtaataatggaaaaccaaatacctgcatgttctcacttataagtgggagctaaacatatggtacacctcgacataaagatgggaacaacagccactggggaatataagaagagggagggagagggccaaactaagc

SEQ ID NO: 110764 - DNA, 542 bp, Homo sapiens
tctgcacctacacaatctgcacctagatccactgcacctacacagtcatggctcattgtggcctcaacctcctgggctcaggtgatcctcccacctcagcctcccaagtagctgggacttaggcgtgcatgaccacacccagctaatttttgtgtttttttgtagagacagggtttcaccatgttgcttgggctggcttcgaactcctgagctcaagtgatcagcatgcctcagcctcccaaagtgctaggataacaggcctgagccaccacacctggcctccctctttcttttctgattccgcctagcatattgatttcctttgttttagtttttcttttagttatctttgtaatttacagttaaacctttatttcttctttatgaactctagggcagtatctcttatccccctacttttagaaggataaggatgggagagtgtagggatcctttcttcataattccgtgtgggaggaaagccaagtattacgtttaggggaatacccagaggaagagagatgactcaccccaccagcctc

SEQ ID NO: 110765 - DNA, 914 bp, Homo sapiens
  misc_feature (1)...(914): n = a,t,c or g
agatggggtttcaccatgttggccaggatctcttgacctcgtgatctgcccgcctcggcctcccaaagtgctgtgattacaggcgtgacacacggtgcctagccaggtcttgttttgaaaacctcactgtgggagattcaggcatcctccctaagccagctggccgctgtgctaaagcctgttcagagttaataataatcattagctgaatggtgctggggcctttcagcttcagatctctaagcacttgcaaggctgagtcagtcagccctcatcttccccctccttcctgggggctgcagaagtgtaacaagaatgggaaggcactgtgggaaggaagtcaggaatcttgctgctagccacgccttgcagtgacttctcgtctgggagtgggcactgagtcctctcagtaaactaataagacttgccacctgaccaaaggtcaagatatgtagggaaccacagtgtatgctaggctgagacctatggtggtggccaggggtggctgttgagcctgaacttcccagtactcctgcccttccttctgtttaccctggcttggcctaacagggggcacccctggtcttgatgccctcaagccccagcatttcctgggtnccccctcctgcaaagctcagagagcagggaggccttcctggtagtgctcttgatgctccctgtgtcctggttggcacaaagatccctgtgtaacatgaaatgaaaggtgcatcagcttggggggctgggaaacctgcgagtatgggtttactccgtccctatccactggtgtggctgtgggcaaaccacttattgcctgacctacctcacagggatgttgtgagggtttgatgagagaatgaatgttaataggaattggaaaattcaaagcattaaacacatgtaaacaggtggta

SEQ ID NO: 110766 - DNA, 1442 bp, Homo sapiens
tcttgctttgtctcccaggctggaacacagtggtgtgatcatagctcactgcagcctgaaactccttggcttccacctcagcctcccaaagcattgggattataggcgtgagcactgcacctggccaagtaatttcttttaggaataaaaggtacttggcattccttatttgggaagtaattacagtcttatctttttttttcttttttcttttttttaataaaatctaccagtaatttaaatgtgagctttttatgtctgtcatcattctgccccctttgcctttaaaacttacaaaaatacgtgtttgttatttgagaaagcatgtttaaaaattgcagatgagaaatattgtcgttaataattatgtactgtcttaatgtggggcacttcatttgttagtattaatactaggataataggcagcctagttctttaggtatttgacgattcaaattttttttttgttttttgtttttgtttttttttgagacagagtcttgactcctgttgacccagggctggcgtggcagtgggtgtgatctcgggctcacttcagcctccgccacctcaagggcagttcaaggcaattctcctgcctcagccctcccgagtaggctagggacttacaaggcgtgttgccacctctccccggctaaattttttttgtaatttttagtaggagacggggtttcaccgggttagccagggatgatctcgatctccctgacctcgtgaatcacccccctcggccctccccaaagtgctgggaattactgtgcgtgagcccacccatggccccagccctcaaatatgtttttagaaaatatcattgtcctcctcctcttaagatttttttaagttattttgcctcaagtacttaagtagtctggctcaagtactttgtttacaattaaaaatggatattataggcatttaaatagaagaaatggttatggcttatccaaaaagaatggtcagccatgacctgggtgtaggacttaaaaaaactaccatgtttgtggaatattttattaatgtgggaatgatcattgaaatatccaaggattctagtaattgtatttcctgaataaatgtatgtttatgaattttctaacttacattttgttgtgtcctctgccaacaatctggttttataattgttgtctaaagtttgctagtagtgtttccctcaaaggttatccccaggtatggttaagtagtgagaaaaatcacctattaattttcaagaactttgagactaatttgtattgactcggttttttaaaataactggcaaatgctatgcttctacttttaaaatttgtggtaatacccagaatggatgtaaaataacatttttcaatagattacttcatttatcaatttaattctgattttaaggcttatttaaaataaatttgtatgagttaaaaaaaaaa

SEQ ID NO: 110767 - DNA, 584 bp, Homo sapiens
ggctcttgtcaaatggagaaggtgcggggggaagaggagcctaaagcaccaaacctgggctagggggtctgaggggagacaggggagaggccactgcccctggggcagcagttttaccagctcccctccgtgtgctccccctcactccccagggtacgcccgcagggctgcaggcatcatctgcttaccgcacccaggaaggggatgttgcagacattgcccaggaagccgaaggcgacagggaaaaagcccctaggagcagaggggagaagggaggagtcagtgatggcccaggaagagaggatagagggcacgaggctgaggtccactgaaaggttcaagctctggcttccacacaccagggacaggcttgattctgcactcctgtgttccgagagacagtcgagtgacatgattaagaatgaaggccccagggtcacactccttgggttcacttcttggctctaccacttactggcaccatatacacttgggcaaattccttaacttctctgaatctcaatttccagccataaaatgtggctaacaataacagtatctacatcataaggccacgtacaaag

SEQ ID NO: 110768 - DNA, 356 bp, Homo sapiens
aggcaatataaagctgggtcctaagactaggtttcatttatagcttatgaactattgccagacattttctcttacttgaatttttaaaaaatgatacaaggaagctaggcatggtggctcccatgtataatcccagcactctgggaggctgaggcaaggggattgcttgagccgaggagttcgacaccagcctgagcaacatagcgaaaccccgtctctattaaaaaacaagatacaaagatttgagcgtacccatctatgctccagaaacactcatttacactttgtgatctatcttgctagcactgtattatcagattatgaggaaaaatataaattaatatcaggctaaaaaa

SEQ ID NO: 110769 - DNA, 1447 bp, Homo sapiens
  misc_feature (1)...(1447): n = a,t,c or g
ttatactataacccgaaggttttgcctggatctgaacatgccggggttttcatcattacgagccactctagggacgatatttcaccgttccattaaggtataatatttggtgcaggcacagagcagggtaacaagagactgggatgctgcttaattgtcccagtataccgggaaaggcaccggttcacttacatttcagatgtcaccggaagtggacacttctgtggcgtggcagaaatgaaatctgctggtggactacaacacatgtgcaggtgtgtggtcccaggacaaatgggaagggccgttttgatgtcaggtggatttttgtgaagggacgttccccaatagccccaactgcgacaccattcgccctagagaaccaacgagaattaaaccagtgacccaactcttagggacacttcaggaagtgcctctggaaaaggctaagcaggtgttgaaaattaatagccagctacaagcacaccacttccatttttgatgacttctcacactatgagaaacgccaagaggaagaagaaagtgttaaaaaggaacgtcaaggtcgtgggaaataaaaanggcagttctacacagactgccagcaacgggttgcatctgcatatcctaagaggaaaaaatgacctgtggggagaattaggacttttttcattaatttcacttgacttcagagacgattgcagacttgcaagtttaagtattggaatttcacaaaagacataggacttaactgggaaaatgaaaaaaaaaagaaaaagaaaaaactaaacaaaaaatccctctaggtagtttaggtgaaaaatgtccccttttattttggctttgggttgtgatttcagagcctaatgctatgtttttttggctttttactatgtttttcggatttttaagtccggaagtgcatacaagtttcttctatttttaaaaccctttcctcctcccattttgacatttgcacttgggagaacactttgagtgtgaaggttttgggcatccaccccccagaaagcgggaatttgattttatccttccgaactggaagaacatttttatgaagaatttttgtctaggagaatataacagcgttaccccaggtttgtgtcttttaagggtgggttcattttctctgaccttttgtctacctcaaagtaaagtacctaggagtcctaagaaatgttctgttcttgtacattatactgattaagtcagggattaatttgatttcaaagctgagaacagccggtggtaaaaactcgtttacaggaaatgcattttgggaggagaaaaaatactgttaaaacgtgtccgtgaatgtttcttcagtttcttgttcagccaatgaggaaagggcattgcctttctttttaccattaatcacttctcaataaacgtgagatcctgttgagcatcaaaaaaaaaaaaagtcgac

SEQ ID NO: 110770 - DNA, 655 bp, Homo sapiens
cggggtctcactttgtagtccaggctggagtacagtggctcaatcacagctcaatgcagcctccaactcctgggctcaggtgatcctcccacttcagcatcccaagtagctaggaatacaggttgcaccaccatgcctggataatttcttaattttttttttttggtagagacgaggtcttgctgtgttgcccagactggtcttgaactcctaggctcaagggatcctccctccttggcctccgaaagtgtcaagattacaggcctgagaacaccacacccggcctgtttgttgaataaatgaatgaagaggaatgagctcacactttatgccatctgtaatagccaagtacggagtcaacactttaaactggcaggcatgggaaagtggagtttctcatactcttaagaaggcgacctagcagtatttaggcaaatcagactggcccttggatagtgggtacctgataagaatggatgtgggtgagggtgcagattcaaggatgttgctgaggcaaatgctacgttggtccttccacatacaagttacacacctgctaaagagaaagatgtatgttgtgtcaggtcaccagatgggtgagtgaaaatgcagcatggggccagcatgcaggggaaaatctcattttgtaaactat

SEQ ID NO: 110771 - DNA, 507 bp, Homo sapiens
  misc_feature (1)...(507): n = a,t,c or g
gactggaagaaaacagctcagaactcccaacacgtctctttcgcatctttccttgaagattcttaccaagaacaaccaggctttttgagtcaccatatgctgacgaacatttttgttgttttttgagacagggtctggctctatagccaggttgtagtgtagtggtgcagtcttagctcactgcagccacaacttcctgggtttaagcaatcctcccgcctcaacctcctgagaagctgggactacaggcacatggcacttcactcatctncagntgtnttatntgttttgtagagacagggtttctccatgttgtccaggctggtcttgaactcttgggctgaactgatccccttgcctcggcctcccaaagtgctatgattacaggcatgagccactgtgcctggcctttacgaccttttaaaaacccattactaatgaggatgagaggaaggacagcatggaatcctctagcccttgcttgtggccgcctggttttctctaaca

SEQ ID NO: 110772 - DNA, 708 bp, Homo sapiens
  misc_feature (1)...(708): n = a,t,c or g
aatcgaagaccactagattgtagcacgattagttcgngctgngctcaccctcatgagtnaggctgacgagtcgtgaacgggactcaggtgtgggaagaggcgagagggctgtggaggagctcgcacggcgccaggtgatgggctgcacaggcactgtcccctgcctgcgtcctggggcctgtgcactgttgcgtccatgctcagagtggctgagacttgtgtcctgaccaggccctgcttacctctgttttggtttttgtttttgatatttttttttccattgtgtttttacgtagtgtcatgttctgtgcatatagtgttgtattctcctttgcactgtttatggtagcggggaaggctctccttattaaaaatcttcgcaaaggtcactttttaatggctatctaacactccatatgtggtgggcaagtctggttggcctccggggggtttccaggtataggggatgtagggccttgcctggcctggtctgcgggtccatcgtcagtgcctgagcggccagcagaaggggggcagcagcctccactgagcctctggttcccatttcccaggttctccagagagcgggcatccagagaggagtcctgggagagcgggcggagcgagcgagggcccccggactggaggcttgagagctccaacgggaagatggcttcacggaggtcaaaagaagaaagaggccggcca

SEQ ID NO: 110773 - DNA, 767 bp, Homo sapiens
  misc_feature (1)...(767): n = a,t,c or g
taaaaggtgggtcatagtggagctctaagccaggcagagaaatcatacccctcagagtttgaatatgtagaaaacagcttcaaaagctgtgagaagcaacagaaactgaaatctgcttagaaacatacatgattagaattggttatgaaaaactgtgtgacatttgtaaaatgaaaacaaaaggaaactgggtttaagggaattgttttgaaatgtgagttacaagttgtttctggactttgggtggcctagagtggtggctacttcaattttccctcttaggaatagtttttatgggtagaatattccagatccctcttccagtttctgccaggtttgaaaagcactaggggtgggaggccaggggctgtgccaaacaggtattcctgagtcttttttgagctgttgccctgctctgtggtccttgtggctgtaaagacacatttctttcaaagcaacttctttgtttaaacacgttggcactggccgggcacggtgtcacatgcctgtaatctcagcactttgcgaggccaaggcgggaaggtgggtggatcacctcagtcaggagttcaagaccagcctggccaatatggtgaataaaaatacaaaaattagctgggcatggtggcgggtgcctgtaatcccatctacttggaaggctgaggcaggaggatagcttgaacctgggaggccgaggttgcagtgagccaagattgcacnactgcactacagcctgggcaacaacagngaaactccacctcaaaaaa

SEQ ID NO: 110774 - DNA, 398 bp, Homo sapiens
tgatcatagctcactgcagcctcagcctcctgagctcaagtaatcctaccacttcagcctcctgagtagctcggactacaggcccaaatcatttatttatttattttgtagagatagggtcttgtcacgttgtccaggctggtcttgaactcctgggcctcaagcaatcttcccacctcagcctcccaaagtgctgagactacaggtgtgagccatgattgccagtccacgtcttagtttttaatctcccctgcatggctgaggggcagaggccagccagggagcatcttgaggagacccaaatttggcatcccaccatgggccagttagtagtttgtgttgacctctggtgatgggcatcactttgctgagcctgctctgagggtgactgtgtggcg

SEQ ID NO: 110775 - DNA, 461 bp, Homo sapiens
tcagagacagtgtctcactctgttgggcaggctggaatgcagtggtgagcccttggcactctgcaacctctgcctcctaggctcatgcgattcttagcctcctgagtagctgggattacaagtgtgtgcaaccacgcccggctaatttttgtatttttagtagaaacgaggtttcaccatgttgcccagactggtcttgaactcctggcctgaagtgattcgcccacctgagcctccagaactgctgggattacaggcgtgagccactgcacccagccgggagatcatcaatattaactattgaatcctcgcaagaatttaaaacatcaagatttatttttctacttaagattttaaaattatcatattttgattatgcactgaatctattttttatctgtacaggtccaatgggcagtttttaaagaattagtagctcttggcactagcatgattttttt

SEQ ID NO: 110776 - DNA, 992 bp, Homo sapiens
  misc_feature (1)...(992): n = a,t,c or g
ttttttttttttgttatcactacaaatttttattcagaaacccatctttgtatgtttttttttttgttgtttttttaaaaaaaattccccttatgaactggtttggtcaatcaactacaacactttctagcagacataaggtaaaaatggcatggctcagaatcgcccagatctttcacgatctctcgaccgcctcctgtcacgctcccgtccgccgccacctccaccacctgccaccgccaccgccacgaccacggtctctagaccgatgaacgacgctcccgggatcgggatctttgatctatgcttctttgcggacggcggccatacagctcccgccgcagctctctgggaaatgggcttcaaatgcatgaagttgcagaagccgcctcgttgtgcattctcccatctcatactgacgggaagcaggcttctctgaagtccgtcacggggtgacagctcggcgtggaatcggctgtccattaaaccaacggttattcaagtcaatcacagcctttttcccgcatcttccctcaacggcgaaaacttgaacgtaacacgttcccccacccaggtggtctccccaggttgttcacaagacgttcatctcctctacttcccccatacttctcctccatttctgtaaaaacctcctcaaaaaactcatcaatagtgttcctgcatctccacaatcgctcaacggcacagcgcaaacccgtcagcagactgggaagagttttgagggttacggtaaatgttcaagagggcaatggtagtgtgagccgtcagccgtctgtgcactgttttggggattacgatagatgttttgaatcaagatggtctggctaaacgtcggtttattgtgcaaccgagagcacctgtctccatgacgacatgctccaattttgaaataaaatgaacagttgactttgtctttctcggtgccgaagatggaggccaganactccgccatttcccancnccgncgacgc

SEQ ID NO: 110777 - DNA, 639 bp, Homo sapiens
ttttttttttaatttttgagataggatcttgctctgtcacccaggctggagtgcagtggtatgatcacagctcaccatatccttgacctccaggactcacgtgttgctcccaccttctcagcctcccaagtagctggggaactccaggcgtgtgcccaccacacttggcttttcttttggttttttttccagagatgtggtttctgcaaaaccccatctcaaactggtttcaaactgcccaggctcaagcaacccacccgcctcagcctcctcaaagtgctgggaattacaggcatgagcccatcggcaccccgggaaaacccctattttttatgatatgcaaaaaagtcttgtttcttactttcatatggagatggcagtttcttttccctttagatatctaacaagtaaacttcctgaaggatatttggctacagaagctcagaaagctatgagctgaatgtctggatactacttgtttcacttcatggttcaattaagaagaatagtcacaacttagaccagttatttttaatctaggaaggatgaactcttaaggaggccactaatgggcatgtaacaaagtaattcatataagaaaagtttaagtataacattctggttagggccatagctttc

SEQ ID NO: 110778 - DNA, 383 bp, Homo sapiens
  misc_feature (1)...(383): n = a,t,c or g
aataacaaatataaagttgacagcagatttctcaaaaaaatgtataaagtaaggtagaagacaggggaatgaaatttttaagttactgaaaggaagaaaaaactttcagactagaattccatacccagcaaaatatattttttaaaaaaaggtgagacataaagattttttcagacataccaacaataaaagaattcatcaccaacaaacctgcattacaagaaatgttaaagggaaacccttcaagaagaaagaaaatgatgcagcattagttctcatactgctggannnnnnnnnnnnnnnnnnnnnnnnnnnnnnnnnnnnnnnnnnnnnnnnnnnnnnnnnnnnnnnnnnnnnnnnnnnnnnnnnnnatggtggccatg

SEQ ID NO: 110779 - DNA, 608 bp, Homo sapiens
ccaccacccctcccgccacgacccacagcagaggggggaaaagctgacactgccggcttcctctgccgctggccaggcaggccccaggcctctttacacagctctgtttgtcaatagagatggagctttgtctccccctccagattctaccccaacccacatcccagcacccaacaaagacccttttagatcagagcctgtgtggggtagaatggagaccagaggcagagttattgccccacggctgtgagcaggccccacgcagagtagctcgctaccaggccagagaccacccagccaaggctcctcaggcttagacgttcccagctcccatttctccccaggtctcccagcagctggccttgggaatcccccagggtcatgccacagctcctggcaagcttcaggaccaaggccgcctgtgtgagactgagcatgactgctgtttgccataaaagtgtaggcgagatctttacttcactgagtcggcaaggtccattgtaggcaatagaaactgatgtatgagggattgggaaggcctagaaacggccaagaaccaggaggtctccagggacgcggagaggaagaattggtgaaagagaaccagg

SEQ ID NO: 110780 - DNA, 493 bp, Homo sapiens
gcacgagataatcatgaaacaaataagacattctgtcatttaattgtagattcatttgagaacatcttttgcatacaaagtaaaagtcagtttatggatcaagccagttgctcaaggcatttgatgtttgctaaataacattagaaaaagccaggacaaaaacgatctgtcatcctgagattgagttaaacttgtcacgccctttgttacttcctggtgtgtcattagttcgatatatgcctttgctctccctcagtaacaataaatgtattggattttttttaaaggccgagaagcaatggaatgggtaatacataaattaaatgctgagattgaagaactgacagcctcagcaagaggaaccataaggactccaatggcagcagcagcgtttgcagagaagtgatcgtgacagttggtagacaacatcgggtactccaggtctctccaaactgactatatatttatttgttattttaaaaatacaactata

SEQ ID NO: 110781 - DNA, 616 bp, Homo sapiens
ggcacgagcacaaaatttgtggcacttttttacagcagcaacaggaaaggaataggagtcttccagtggtagggggtgaatctcattacgtttctaaggcaagcattgcttagtatcttgcttatttaaaagataaatttagctagtatacacaatagtgaccaattagattgtatgctataatacttgtaagaaaaatgattgcatactctttgttttcttgtttgagacagagcctcactctgttgcccaggctggagtgcagtggccaatcttggctcactgcaacctccacctcccggtttcaagctcttctcgtgcctcagtctcccaagtagctgggactacaggcacacaccaccacacccagctaacttttgtatttttagtagagacagggttttgccattttggccagactagtctcgaactcccgacctcaggtgatccacccgcctcagcctcgcaaagtgctggggattacagggcatggagccaccacacccaggccaattggcataactctggaattcaaaaaaccattttccctcaagtttaggattatggcaatatttatttgtgacattgagtgccttctggtggtttacccaaagtt

SEQ ID NO: 110782 - DNA, 664 bp, Homo sapiens
ttttttttttcttaagacagggtctcgctctgttgcccagactcgagtacagttgtgtgatcatagctcactgcaaactccaactcctgggctgaagcgatgctccctcctcagcctccccagtagctggaactacaagtgtatgctacaatgcccagctaattttttccttcaagtagagacagagtcttgaactcctgggctcaagcaatcttcctgtctcaacctcccaaactgttaggactataagcatgaaccactgcacccagcctcaacaatcttttaaaattcaccttttgtcacttgaggcttaaaatttttcaacggcttcccactgcatcaaggaaaacatccaagctctctgccagtttggaaacttagagaatgcaccatctgcacgaggaccctcacatggtataaatcaagactgtcctgggcaaactgggcctctggcacctgcctgaggccgtgtggccaaggcctggcttccacccctacctctgccctacagctttgctcctgtgtgctgagcttcacccgctgtcccttccgcaggacctctgctgagcttcgcctgctgtcccttccgcagggcctctgcaatcactgccctctccacctgaagcataggggctccatgcctacctggttccttctcatcctt

SEQ ID NO: 110783 - DNA, 1815 bp, Homo sapiens
  misc_feature (1)...(1815): n = a,t,c or g
ttttttttttggagacgggctcaatctgacagacacgctggaagtgcagtgacatgatcttgactcatggcaggcttgacctcctgggctcaaggaccacctcccaagtagctgagaccacaggtttgccccatcacacctggccgatttttattttttttgtagagatggggttgtccaggctggtctcaaactcctgagctcaagcaatgtgcccgccttggcttcccaaagtgctgggattataggcgtaaaccactgcacgcagcctaccctctgcctttttaagatgatgtatttatttaatttttgccatcattgggtgcttcaccttcctgcgagggaaattccagagcctgtatttaagctacctagggttttttacactccctttaattgcctttccaaatagtatctcatttgggggtactctagtgtcctatacctcttgggaaacgaaagagggggccccaacctacaactaaggaggggacaaaccttggaactaaggtaaggaccttacacacccagaaagaacactggggccctccttcttcaggggacaatgcagtaggccacttggcttgtgggaatttactgaaggctattttcctgttaacttctagttaactttaggttttgtattttcaggcaggaggtgcggttctgtaatgttgggcctttgacttcacagtactgggagagctgttcacacagatgtttagacctttctctctctctctctctctgtgggntgtgtctctctctcttttcttctttctcaacaactcttttcacagagggcagtcattttgaaaggttgaaatatttgggcctttaccaaagagctttttttttccttaaggcaaaatcctttcaggaaaggaaacaaagggggaaggggcagattaaggaatgcatatgtccccaatccacttctatagggagtttaaatccatattcacatggaggtaaaatgatggggaggacctctttaaggtaatcctttgggataaaagattcctggggaagttctctcaggtaaagaaagcttacagcagatttgtaatatatgtctggagagctatttataagaaatttaagaggattgttttgttttccctttattaaagatttaagcctttttacttgggcaaaaagaaaaactaccaaaagtttttatagatataaccttggccctaattttttaaaaccttttctgaaaacgattaggctgtaggcccaaattatgcggttaccgttttgcctacattagaatttgaaaatgccaatatgtgtggtaaatcctacctgtttgaaatttataatggtctctgatatgattccgaattttggtaacttttgaaagttattttccccctttagtcatggatttctatttgttttttaatgttaatttttctagaaagcatctgaattgactaggcttttcctatatcaacacactcataccttgttaactctgtactttaataaaatttaaaattaaaactgtgttgtttttttctcttctgctagatacatatataattaaagtactcaagttagttgttttgcagagatgttgccttcagatgttaatcaggtctctcaagtttcatggagtctatgctgatcctttaattgacaaataaaagatatatatctgtggcgtgcaacatgatgttttgaaatatgtatatattcaggaatagccaaatcatgctaattagcatatgcagtacctcatgtttttgtgctgagaacatttaaaatctactcacagtaattttttttttctttttttttggagag

SEQ ID NO: 110784 - DNA, 986 bp, Homo sapiens
  misc_feature (1)...(986): n = a,t,c or g
gtgcggtggaattcggggtgggggccgggctgagggtgggggtgcgaggcggtcactcccatcgtgcccctggccgtccctccactcacccacacctggcccagtccacgttgaggtccaggactgggaaggaccgggtgagtgcaccggggacccaggccaggtgccccccggagcctgctggggtggccagagcaggagggggtgtgtttcctttttgtgggtgttgcatgcaaatcaagtggacaagaaaaaataacaaaacaaaaaacaagnnnnnnnnnncacaaaaccccgtaaaatcacaaagaaaatccaacaccaaaggcgcagaagccggctggccgtggtgggggcagcgtacgcgtagcatccctctcctctcacttagcctgttgactcttgttattatcatgatattcacaaaacgccgcatgtttaaaaagtcatagatgtcatcttctctctgcccccagggaggaaagccaccttctcttgccccttggcccctttgtcaggggccaggggtctgccgggtgggggtgccaacaggcctggccctttcctcccctgcatccagccatgggggcctctgcgattgccggaaggttgcatggctggtcccagggccagcacaggcccgaggccgggctgcctggttttatttttatttaactttattttctgttttatgagtgtgtgtccgcccacccccacccccttcagtgttaagtggggagccctgggggagtctctcctgcctcccagcctctcccaagacctcccccctcgtcaccagccatccctctggaccaggcagagggcggaccgggtgggcaggggcctgagggtggctcgggccagcccaccagccaatggacccctcctcaggccgccagtgtcgccctgcccctttttaaaacaaaatgccctcgtttgtaaacccttagacgcttgagaataaaccccttccttttctttcaaaa

SEQ ID NO: 110785 - DNA, 1093 bp, Homo sapiens
ctggagtgcagctgcacgatcttggctcactacaacctccacctcccgggttcaagcaattcttgtgcctcagcctcctaagtggctgggactacagcacgccccaccacacctggctaagtttttgtatttttggtagagacagggtttcaccatgttgcctaggctggtctccaacttcctgaactcaagccatctgcctgcctctgcatcccaaagtgctgggatttcagacgtgagccaccgcgcccagccaaatattttactaattaattagtcatctccaaaaaatgggcagtcgggtcttatactatgagtaagaagaagagaaaagaagagctgatggattacggagcaaaggaccccagggagctggggcaaggcagcccagcggcagtcagacagacaaagtcctccccaacagccagggacgacgaagctgaacagaggggcagctcttggtcagctttggcatttaagaccatgtgatctcaaggtgctattgaacaagaatgggtacacaggagcagccaagtggcactctggaaccctatcctcctactcagggtatgtacacagcttcctgtttcatacgctggatggctggctaaggagaaggaaggaaaactaagattgtcttatttcaaagggctgcaactatattccagctgttacaggcaagcctgttatgtttcttccaacggatgcccaattcacacacatagctgctctcctcgagaataaacaagtggattctatatacaaataccaagggcaccaggtctccaaaaggagaaaaaatttgttttacaaatgtccagcccaaaatggctttcacatttttttcagggtgaattttgcagctctaacccagatgtggttcagtgcggaaggtggctgggagagccacaagggactggctggtgttccctcttaagaggcaaaaagcacatcaagggcacagtgttccctggccttcctcacaggttagattggtctgagcaaatctgtgattcaattagtgtgagttcagttgctcttttttaggtcagttgtttgttttgttcacatttaactcgccatttacctcaat

SEQ ID NO: 110786 - DNA, 784 bp, Homo sapiens
  misc_feature (1)...(784): n = a,t,c or g
cggcacgagaagagagattggtaactattagagagagaagttaaagacatgagccttattgtggcttggnnnnnnnnnnnnnnnnnnnnnnnnnnnnnnnnnnnnnntgtgaatggaactgatagaaggttgcatttctttttgcaagaaagctgtacagggaaaataattatataaacctgttttttaaaatacaaagatattactgcacagttctttagcctcaaaccttgaaattggatttgccttggaatccaaaatattctgaattttaaaaactgtattagtggtaaatactatatattatgtaacatttcctagagagatctattgcagaaccctataatcaaatatatcagcaattctgaattgaaaaatactaatatgcatttcagttcaggtcaggttttaccgtcaaataagttatgtaaaactttagtctttagaactttgtgggattttaggattttgttcaaggggcctaggcacggtggcctcaaacctgtaatcccagtggctttggggaggccaaggcagggagggatccagttgagcccagggattccaagatcagcctggggaagtcaaaatgaggactccgtttctacaaaaataaaaatgaaatcagccgggtagggtggcacatgcctgtcatcccagttacttgggaggctgaggtgagaggatcacttgagcccaggaggtcaaggctgcagtaaactatgattgtgccactgcaattcagcctaggcaactgagtgagaccctgtctcaaaaaaaaaaa

SEQ ID NO: 110787 - DNA, 508 bp, Homo sapiens
tctgtaaaaaagaaaaagataaggtctgtcacccaggctggagtatagtggtatggtcatagctcactgcagcctgaaacttctgggcttaagcagtcctcctcctcagcttcctgagtggctgggactgcaggtgcatgccattgcacccagctgtttaattttttgtagagatggggtctcagtatgttgcccaggctggtcttgacctccttggcttcaggcagtcctctgccttggcctccccaaaggtgctgggattaccagggatgtgccaggcctcaaaatttctatctcatatcaagacttctctcccagtctctcaatattgaactgtctacttgacacctccacttaagttatctggcattttcaaaatcaatatatcctggaaactaaattcctgctaaccccttcaccagaaagaaaacatacacaaatcctacaaccttagcctttgccaaccatctcatttaatgacaattccatctttccagttctcgtgccg

SEQ ID NO: 110788 - DNA, 1035 bp, Homo sapiens
tccgcacgagtaaagtcactaacaaccaaacaaaaacagaaacttctcaggaaattagatcgactggagattgatttaaaagaaaaaagatagaagaaagagggggtttcagaagagcagaagtaaacacaaaaaacataagtcctcttcttcctcatcttcctcctcctcctcctcttcctctactgagacttcagaaagcagtagtgagagtgagagtaacaataaagaaaaaaaaataccaaggaagaaaagaaagaaaaacaagtgttcagggcataacaacagtgattctgaagagaaggacaagtctaagaagagaaagcttcatgaagaactttctagcagtcaccataaccgggaaaaagccaaggaaaagcccaggttcttaaaacacgagagttctagggaggacagcaaatggagccattctgattctgacaaaaagtccagaacccataaacatagcccagagaagagaggctctgaaagaaaggaggggagcagcagaagccacggcagggaggaaaggagccggagaagccggagcagaagtcctggtagttacaagcaaagggagacaaggaaacgggcacagcgaaatcctggtgaagagcaaagcagaagaaatgacagcagaagccatggcacagacttgtatagaggagaaaaaatgtacagagagcacccaggaggtacacatactaaagtgacacaaagagaatgaagcagaagtagagaagaaagactgtatgtgacaattacctgggaataaaaatatctccacttttttattgaatacctttagcaaggggtaaattatgtactgttgtctttctaataaaaaagctcaattttaatttttcatctctagactgtcaattcaagtacaaaactacatgagtactataagaatgaattttgcaaatatttgtaagtaagctattttggggctgtggaaatattttctgttggtaactgtttcttgttccccataccagataaaaaccgcatataactctgtgacattttctt

SEQ ID NO: 110789 - DNA, 725 bp, Homo sapiens
tcaggctcaagagatcctctcgcctcagcttcctgagtagctgggactacaggtgcatgccaccacacctggctctattttttatttttggaagagatggggtttcaccatgttgcctaggctggtctccaacttctgggctcaggtgatcttcctgcctcagcctcccaaaatgctaggattataggcatgggccactgtgcccggccaatcataaaggttttgataaaggcaagcagagactaaggtatcattgggagggggagggggcacccaagagaaagggagagagggagaaagacaaagcagtgtaaggtttgacggaaactacttcacagttttgcaatgcaccagttatatttacacactagttctgcacaccagacaaattactctctttaagcactgtagttatgcttgccctaccccaaaactaaactgaacacttctttgaataatactatagggtcagcagagggtgaatggaaaaagaaaacaaaattataaacaatcaaaagaaagcagggaaaatctactggccaggtgtggtggctcacacttgtaattccagcactttgagagtccgaggcaggaggattgcttaagcccaggaatttgaaagtagcctggcaacatagcgagactgtgtctcctgtgaaggcatggcttggctcttgctgggaagttttctgtttcctggcctgttcctgtctctcttctcctcc

SEQ ID NO: 110790 - DNA, 973 bp, Homo sapiens
gagacagggtctaactctgtagcctaggctggagttcagtggcacgatcattcctggactcaaataatcctcccacctcagccctccgagtagctgggactacaggtgcatcaccaggcctggttgattcttttttattttttgtaacaattaaataataaataaaaatctcactgtgttacccaggctggtcttgaactcctgggctggagtgatcctcccacctcagcctctcaaagtattgggattacagatgtgagccaccatgcccagcccctgttctctcaactggccaaacaggaaaggacctgcgaatggtcactggggagcaggaagaccagtcagagaccagggagcaaagaaggcctagcttggcctggagagagaagcacatcccctgggttagtggttttaacagtgccctgctcctctattgcctcacccttaaaataaaaacaccacaccctcagtcagagtttgtaaaagttttagttttaaacaggtaaaaagtccataaaaatcaagaaaaaaaattggggaaaacaagtgtcttttcttctactccttcaaataattaaaataaaggcaagcctaagagaaggcctaagtgggacatatccttcaaggcaatgggaactcagttttaaatgggttcctcatcaggcaatgttatttcacacagattgttttgtgaaatgggccactctgatcttaaggctacttactgttttccccaagcatctctaaaaggaccctgtggagtcccttgcccacaagaagactctctcaggctccatctgccctgatatttctacctacacacacttcccctattctctgacccactgaatttactgcctgaatgtttcatttcagcccttaatcacatattgccatgttgtggaatttagcttgtaaactccctacagttgtcagacatgaatctaatttctcttgtaagctaagtatcact

SEQ ID NO: 110791 - DNA, 594 bp, Homo sapiens
ttcttggttttatttttatttttatgttttttgagacagggtctggctatgtcatccaggctggagtgcagtggcacaatctcagttcagtgcaacctttgccttcaggctcaagcaatccgtcccacctcagcctcctaagtagctgggactacatgtatgcaccaccacaccctggctaattttttgttgttgtttatagagatggggttttgacatgttgcctaggctggtctctaactcctgagctcaagtgatctgccctcctcagtctcccaaagtgttgggattacaggcgtgaaacactgagcctagcctgaacaaccatttgataaagagataatgggtgtgacccaaggatttaatcagccatctcagcagaagccaggaagagagatgggattattccagcagagacactgccaatttaaactaacgtaggcagagaaaacagaaaggaacaaaggaaggttgtcgactttttgaattctatagaacaggatcatagagctacctggctgtcaatgtgtactattctttaagaaaaggaaagactgacccaccaaaggcaacttacaagatcactagggctga

SEQ ID NO: 110792 - DNA, 693 bp, Homo sapiens
tgggatccctgaggggagggtccgagctgtgaggagggaagggagtgaaggcccagccagagagccaggctccattgggaacagatgcaagggtaaggggtagctcaccaaatccctccatgggaacgggctgggagcaagcacaaaggaaaccacactggaggcagcagcccagggcagactgcaagacactggtggcccacggcctggagggctccacccagacacaagctgcactggttttctatgctgcgtaagaagcagcatggatgtaaggactgcaagcagtgcccatttatgatctcgcagctctccagggcagaagtcgcggtgggctcagtgggtgccctgagcggggtctctcagactgacgtcaggccttggtgggctgcactctcacctggaggctccggggaagcatctgcctccaggaccattcaggctgttgacaagtcaactcctcatggctgtaggactgaggttcccaagtccttgtccctggtcctgtggtccctccacccgtaggcccctggcctgtggattctggtttaggggaacggcaccattcaccagggtccagggtcatatgctgtaggactctctgcagtcttgtggtggcatcttccagctgagctcctaaataatcctgagtggtcctgagaagccagatcaccatcccacagggctgggtca

SEQ ID NO: 110793 - DNA, 358 bp, Homo sapiens
cgtagatatttgccaggaatcaaagacaacaacccttatcgtaaagctcacgctgagcgtcaagctatcaacacaatagtccaaggatcagcagctgatattgtcaaaatagccacagttaacattcagaagcaattagagaccttccactcaaccttcaaatcccatggtcatcgagagggtatgctccaaagagaccgaacaggattgtcacgaaagagaaaactgcaagggatgttctagcccaatcataggaggttttgtcatccttgaactgcatgaagacctcctatttgaagtggcctaaaattaagttgaactgaacagtgaacaatataagccagggcacctcccagcg

SEQ ID NO: 110794 - DNA, 372 bp, Homo sapiens
agccacaggctttactttgcagcctttcagcagccgcagcctaaaggctccccccccatcgaatgtacttgggtgtgcccacacagtgagggatcagcaaaagcccatgcagggttgggggcacactccaggaccaggctgcatagccagcgtccatgtttccccaggcccgcccagtccagcccagcccgtgggtgccactgtccagtgggatccacccagcagtgtccacccaaggccgtggcgccctctcgtgtcctcctgcccagctgcagggagttgggagcttgccctccccgggccaatgcgtggatccgcttccctgttatggacatggaaactggagtagtatatattctcgttacttcaaca

SEQ ID NO: 110795 - DNA, 377 bp, Homo sapiens
  misc_feature (1)...(377): n = a,t,c or g
gcagctccacccctcacctgggggacgccagcgcacccgggccctgcccaccccctgggtccagctggggagtctgcgtcccccagtgccctgcggaccaaaacccaggagtttcatcccctcctccctctgattcagatgactcaaccccctactttctcttccctttggacttttcttgccagacaccttcttattttacaggcggtgagaggaaaactccttttccctgagggcccagagtaagagggacttctgcgtctccccctccattacctgctacatatcgcttaatttactctcccctgcgggcctttagttaacgcgctggngaagccaaaccgctctacacttcccaggagccccctggagaaagg

SEQ ID NO: 110796 - DNA, 477 bp, Homo sapiens
gcccctactttctccctgtccccctaaatcttcctctccagcctctctgcccctcactaatcacctctcccggcatcactttgcatgtagataagatcttttctccgtcccctccctccctctgctccatttttaccaccatcccatcccagtgtaactaggttggtgggtgttcttgccccctcactgaccatttgaacccctttattccccccttaatcgttctccccactgtaaccacctctgctcccctcccccagcctctcaccctctggagacccaggcagggaaggtgcaggaggctcaagtgagatgggggaaagggtggaggggaggagagagacggacttgttccacatcccacactggggggaggtggcaaaggggaaacagtcaccccagggccctcggctcattgccccaatccctcacaccacccagtgcagctttctggggaaaggcagattctggggattg

SEQ ID NO: 110797 - DNA, 886 bp, Homo sapiens
ttttttttttagatagagtcttgcttgtcacctaggctggagtgcagtaatgcgatcatggctcactgccgccttaacttctgggctcaagcagtcatcctgcctcagccttccaaagctcagggattacagacatgagccacagcaccaggccaacaatatttcttaaagctcctggagtgattccaatatgcagccaaggttgaaaactaccctttaaaaggctcggcatccagtgtggaagaccagcacactcacgtcaggagaccttacctggagccaggatgcccctgatcatctctgataactttaaaaggaaggcctcagaagcagccccagaagcaaaaagttctctctgaccttctcctgcccctcttgtttctggcttttcattctcccccccaaggctaccccataggaaactaggaatccctctttccccaagggcaggtcattcaggaaaccaggaaccggtttttaccccaaaggccaggccataaaaccttaaaaatagtcctctcactcccccattccccctttctgtgtaaaaactggtaggaaagaaatgatctgacctaccgtgtttgactgtcgtaagatacccattccagagagggtcccaccccgtgcccagaaggaaggaatcctgcacagagaggccaagaagaatctagacaggccttgcctgggtttcccctctcagtctattactattagatcataccctttttgtccaatcatatttttacacagtccataatctgttgaacctaaacataaaaatggacaattcccctgtatcttggggttttcattttgagggctcacatacaattatgatcaaataaatttgtttgctttttctcctgttaaaaaaaaaaaaaaa

SEQ ID NO: 110798 - DNA, 1009 bp, Homo sapiens
ggggtctggaacgtcagatgaggtgcagcccaggggaggacagaggtgttagtgcccccaactcctgccagagccccagtccagccacagagtggctcagaaaggccattcctagagggctgcggccctcccttctcccttgcccatgcccccagagctgcctgccgggcagggtggcaccattgcaggagaggagcttggcctccgggggtcaggcaggaggcgcctggctagccagtgctggctccactgggcaggaagccctggacccccaggtatgaggagggggtggtcttagggttctgttccaggtctgccccgcccccctcccagccatgccccaggcagaacttggaattcaggtgtgcacctgcaggctgaggggctctgtgagcaggtgctgctcacacagggagttcaggcgccagccaagcccctgtgctgctgggataggcctgcttcacttagggagcactgcctcaagacaggtaaagccccctcgtttgcccccacccccatggggccgctcaggagagaaactccctttcacccctttcccagggtgctctctctctaggtggcatgccagcccccaaacacaagtggcttttgggcccaggtgggtcagcctgctgcccctgccccatacgccctcgggccattgggacccctgcccttcaaatgtcctagggtctaggagtggggccagtcactgtgggaagaggccaggggcttggccggagaggcagcccagggcaggactcagtcctgagtcctggagcagggccagggaggcgcccatcccgccccggccagccgccctctctgctgtttcttctatttgttcttcttttcacccacagctctgtgttcctgtcatccctcctttcagcaaaagtcctgttcccattccctctgtccccacccactcctgttcccccaagaaaataagctatcgttgtatttacaatctatggattagaggtttaagtatttattattattggtt

SEQ ID NO: 110799 - DNA, 484 bp, Homo sapiens
  misc_feature (1)...(484): n = a,t,c or g
tttcgacttgacacggcttccatgtccgtacctggacaacgctatgactgtgacacccctgaccttaccccacttaaacgacttgtctttgaagttggtaactgggtagtcttacctgttgaaatgtctatccacatatcaggctcatctggagacgtactgccctcctgagctcccccatctctaggcctaaaaacggattcagatccaggacttttagatagagcagctctcacatcggcacaacccggcctggagcacggacagtgcttaaacatttctagttgaactttccattcaacccaggaattgtgctccttggtgtctacacaaaggagttaaaaacttgtgtccacacaaacacctgcatagaaatgtttacattcataattgccaaaacctggaagcagccaggatgtctttctgtgggtgaatgaatcgtgatgccacatctacaaccatctgatcttcaacaaacctgacn

SEQ ID NO: 110800 - DNA, 590 bp, Homo sapiens
  misc_feature (1)...(590): n = a,t,c or g
ctttctagtttatttttctacttagattacttaacctggtctaggccgccttacacatgaaatcatgcaggattttttttacagaaatacttcttgttacaatttcagcatttatatttttgaaaaacatatgtctttcatctatatttcctaactaatgtaacattttttaaaaagtacttttttatgttagcaaatctctctatatctggaggggcttttgttctatattttgctgatttgtatcttacttgcttgttttttggtttgattggtctttttcaagctctactttattaatctttctaagaaggagtggnttttttggctaatctttttgataagactttatttgcttctgcccttatattcattatttcctttcttcttgacgcttacaatgaattcagaggttctattcagttctcacaatctctgattgaacactttgttttatctctgagttttcatgcttcctggaaaacattagaaattataaacttcttttaagtgctatttaacaatgttctacaaagagcacatttttgtcttattttatctgccctacacattgggaacctctctggctt

SEQ ID NO: 110801 - DNA, 642 bp, Homo sapiens
cggtccatctcattacgcattcgaggtcggtacccggagatccttccctacctcaacaccacccctggacccataaaccgccttaatccttccccacctcagcatcgcctctggcctcatcaaatccgaggtacctgttccgcctccatcacatgtcccctcctggcttccctccgcctctgttgccggctcctcttccctccccacatcgaaaactgaggtccccagcagccctttttcagccaatcacgaagcctaatgctgcgtccgcatcagcaaatccatttatgtacagaagctccctccacagtaacgactcccacatcttcctgaggccacaacattctcccaacgtccggatatcccactaggtagctggcccacattcgctgcgatcatcactaatgtacccaaaccatcctgttccctccaccagagctcacgggctcccacacacacggcccaggccccacaccctgctctcttccgtgttatctgtccaccactcccatatctgactcttaaaacgacaacaaaatctagttaagagaaccggaatgtcgggcaaggcgaataagctgtctagcgccacgctctatcccagtcatcccgatgtacagcgacggacagtgaatctcgtaa

SEQ ID NO: 110802 - DNA, 357 bp, Homo sapiens
gcgacacacaggaaggacagagggggcgcggatctgggaagtgacggacagaacggtcaggacgttggattggggaggcggttgccgccgctgctgctgactgtgtgacgttctttgttccggtcacatctcatacgttgcggcatttctatgcgatgcacatgctgtatgccgttattccgctgattgttttgcgacccctgtttggtcatcaaggcatctttttatctttagtttacacgaaggtttttgcactggatctttgtgccccacactggatgccttttgcgaccccctagctcgatgcgggttccatcctttgggaccaattgtgcgattaatagccgtgctctttat

SEQ ID NO: 110803 - DNA, 438 bp, Homo sapiens
  misc_feature (1)...(438): n = a,t,c or g
tcaccncggggccaaacttatcccatttgaatgtggaagggcctcttcaacaggtgctgctggcacaccaggtgttgctggcacaacttcattcttccatgtgcagaagaatgaagttggacccttgcctcacaccacatacaaaattatgtcaaatgaattaaaacataaatgtaaaagctaaatctataaacaccttaaacgaaattataggggtaaatcctcatgattttggactagacagtggtttcttagatttgacacctcaagcacaagcaaccaatgtggaaaaataagatacactgggcttcattaaagttaaaacctttttgcttcaaagccccctatcagcagggtgaaaagccagcccacaaagtgggagaaaatccgtctagttcatgtagaaggatgtcggggtcggacctaaattatagtgat

SEQ ID NO: 110804 - DNA, 445 bp, Homo sapiens
atacggattcaatggccgtcgccgtacaacggcgcgactgggaaaaacctggcgtgacacaacttaattggcttgcagcagaagacagaggcagggtatgtgcttaccctcaccctggcgcctggccctacagcagggccggcaggaggccccagcccttgggctgcagtcgaagcagccacggactgcacgctgtccttccagcagaaccctggggctctgcagacacagctggtgcgtgactacacatggcagggccatgtaaggacagcagagaacgggctccaccaaccaagccccttctagagcacatggccactccttctcactaagtggaggaggaagcagactcgaaatggagctgtcaacgctgaggacacagagaccggaggtgagcgaggcacccacgagggcacccacagtcctcggtcagagcaatgtctgg

SEQ ID NO: 110805 - DNA, 347 bp, Homo sapiens
agtttcgtgcccaaaaaagggcgttatattctctcccccgacgccgaaaaagcgctattccattcgttgccggagatgcagcgcgaccggacatgaccgcgcactgggaatcggtgctgacgcattctagcagaaaagcagtgtcgctatcaggactttatgcaaccggtggtgggcacgctatatccgcttattgatcaagcctatcgtacgccggtgcggcagttttgaggcaaaggggctccgggcagtggtggcagtgctgataagaaaaaggttgctcggcgtattcgtagtgcgaaatatagtcccacagcatatggagttgtcccccgcccaatagcgtg

SEQ ID NO: 110806 - DNA, 342 bp, Homo sapiens
  misc_feature (1)...(342): n = a,t,c or g
agntggnaactggggagtcttacctgttgaaatgtctatccacatatcagtctcatctggagacgtactgccctcctgagctcccccatctctaggcctaaaaacggattcagatccaggacttttagatagagcagctctcacatcggcacaacccggcctggagcacggacagtgcttaaacatttctagttgaactttccattcaacccaggaattgtgctccttggtgtctacacaaaggagttaaaaacttgtgtccacacaaacacctgcatagaaatgtttacattcataattgccaaaacctggaagcagccaggatgtctttctgtgggtgag

SEQ ID NO: 110807 - DNA, 349 bp, Homo sapiens
caggagaactaccactccttgaagttggtaactgggtagtcttacctgttgaaatgtctatccacatatcagtctcatctggagacgtactgccctcctgagctcccccatctctaggcctaaaaacggattcagatccaggacttttagatagagcagctctcacatcggcacaacccggcctggagcacggacagtgcttagacatttctagttgaactttccattcaacccaggaattgtgctccttggtgtttacacaaaggagttaaaaacttgtgtccacacaaacacctgcatagaaatgtttacattcataattgccaaaacctggaaccagcctgtacgt

SEQ ID NO: 110808 - DNA, 708 bp, Homo sapiens
cttctgggaggccccgcctcaaccccacatctgcctcctccatcccaggcccctcctgccccagaccctcctccttgtcaccaggaccatcacgatggcctcctcctctctctccctctccccctgcctccacccagacacagctgtggggctgaccccctcaaatgcaccccagcccatccaccaacttttaggggagccctgttcttctcagcctgtcacccagggccacatctaggacagcaagctccctgcgggcacagctgccttccttgtgacagccacgggccatcccgcagcagtgccaggcccagaccagacgtccaagctctgtgatgaccagaggagctgccgagcctccctctgccccacggtccgcacgtccctgtgagtctgctgagccttaagcacacccggctgccgtcatttgtagatgtcgctgcccgggtcctgccgcctctcctcccaggcctggaatgcatccctgcattcactccaagacccggctccacaccactcggccttgctgtgtgccgtcctcgaggccaaagacccagacaggagcaagaagtggccacctcgacggctgagcgtggccgtctcctcaggaagggaactatctcccctccagggcgaacaatttgggtatctccagggtcttctcagtccctcggatgtacgggtacggacatggaattcgtagtcagt

SEQ ID NO: 110809 - DNA, 351 bp, Homo sapiens
  misc_feature (1)...(351): n = a,t,c or g
nannttgnagnctcagaagactgaacaaaattagcagctgaccaacaccaaagttcaatattctcctctcttcctctgtctctggagccttcaacaagaggcctcnnnnnnnnnnnnnnnnnnnnnnncccccctgaaaccnnnnnnnnnnnncctaaaggggccgccccccaaaaataacgagggttcccccccctgtgccccaaatttaaaaaggtttggccaaaacctagtttccccccccctggggtccccccccaaaggagaccccttttccccctttgggcacggtccccccccaacccccnnnnnnnnnnnnnnccctctggggtggcccctaaaacctgtgtg

SEQ ID NO: 110810 - DNA, 1141 bp, Homo sapiens
ctttcatggtataatgacacctagcgcctttttcatccaattgagcgaacacacatgcttcccaagctacactctgggctatgaaacacacggtaacagatgtaaaagaagcaccactggttacctagctgtaatgaacacctaacaccctacttcatccaactacagcagaacacacatgcttcccaaggtaccattggggtttataaacaccccgctaccagatgtaaaagaatataggtccttccatgggtatgacctctcaattccatacgggagttaaactagaaatcagtaacagaaagatagctggaaaatccccaaacacatggagattaagcaatgcacttctaataccacatggatctacaaagaagtctcaaaagaaatttaaaaatatttaaactaaatgaaaatagcgaacacgggatatgtaaatttgtgagatgcagcaaaagcagtgcctggaagaaatgcatagcattcaatgcctgtattagaaaagaatgatccaaaagcaatcatttagatatccatcttaggaggcagtcaaatccaaagtaagcacaggaaatgaaggtaataaaaattagagcagaaatcaatacaattgaaaataggaaacagagaaaaataatgtaatcaaaagccagcgctttgaaaagatccataaaattgataagccggtaaccggtcccttttcttgaaaaaggggctccagcaaggaacccaagtggtctggctcggtgggtcccacccccaaaggagcccagcaagctaagatccactggcttgaaattcttggctggcagcacaagaatcaaactgaaatcaacctgaaatgctcaaccttggtgcgggcaggggtgcccaccacttggagggtttgataaggcaggtttaccctcaccgtgtaaacaaagcctctgggaaggtcgaaatgggccattccaccgcgaaatttaaaaaggcgcagtggggccaaactggctctctagactccgctctctgggcagggcatctctgaaaaacagcagcagccccatcaggggcttgagaataaaccccatctaactggacagacacccaggaaaggggcggctgggtgcagctcacagattaaacgctatgctgacgctgg

SEQ ID NO: 110811 - DNA, 417 bp, Homo sapiens
  misc_feature (1)...(417): n = a,t,c or g
ccgcccctccggtttacgtgacagccccctccctaccctgcctcctctccaccctctctcatctcctcccggtgaccccccttctccctccccatgtgtcccnttctncttcttttctcccaaggcgatttaatttggtaacccccgggttttccccctccccccgttgtttaaccacggcccgttcccaacttgcctgccctccagttcgcctttcagggtcccccccccgcccccccggttggggtgcaaaacttaaccccctttccnnnnnnnnnnnnnnntgtgagaaatcattctgctcgtggcgtcatggcggaatgggaagcggagcaggcatcacatgccaagaggaaaaaagccataaagaggcacagagagagagtaaagtagctcccaggctctttctatcactca

SEQ ID NO: 110812 - DNA, 374 bp, Homo sapiens
  misc_feature (1)...(374): n = a,t,c or g
aatttcaaagcatctttaatgcggctgcaataaaaatcccagcaggttaccttgtgtctgttgacaaccggattttaaagtttatatggagaggcaaagtcccagaccagcctgcaaaatagggagggaggaaagcatagtcagaggagtgtcccttcccacctttgtgtttggctgtaccgccgcaacaatcaggatggtgtgtgatttgctaaatgacaggccaggtcaatgaaacagaattgagaccccagaaacagtcccacatgaatgtagtcgggttatctttgacaaaggaccaaatgcaagtcagtggtgaaaagatcgttttttaaacaaatagtgctatctcagccggacagccncgggcaaaa

SEQ ID NO: 110813 - DNA, 426 bp, Homo sapiens
acgatcacgaattcaagcgtccgacccggggatcacgaagactggcggcagcactgtccggcccaaacgaatgccgtacaatgagtaaggggatttaacgggtcgtgccgcgcagttttaatttgctgggaacgaaaactaacagcgggagcgcgcgaccatcgggggctttttcatacaccaggttaacgccctgacttcccatcatctcggaatggatgcgcacggtggagagcggcggaaaggaaaatcgcgcggtggggatatcgttaacgctgataagcgaaatatcctgtgggatgttcaggcctcgttcatgaattgcccgcagtacgccgattgcaatggaatcggaagcaacaaacagtggcttcggatagtctttccgcgccaggatttggttttgccagttaaaaaccccgacaa

SEQ ID NO: 110814 - DNA, 380 bp, Homo sapiens
  misc_feature (1)...(380): n = a,t,c or g
gatgcttacaattcttgctcggtacccgcggatctgtttcctcttttggtgtcccctgaactgtgttgtttgtgagatgtacacatcagtatttcctgggggggttccccaatcaaaggagcttccaggcctgcgggtgtggcactgtaggagtgtccagcagatgctgtgcagggcccatcccagggaattctttaagacgccgtgttcaggagaggcagggcctcctgttcaggcacggagcctttgcatgtgctggagatctgctcgctttctggactggcgtgctctgccctcagcgagaaaccatttccattttctttcnnnnnnnnnnngaaacagagtctaattttgttgcttaggttgcggggcaggggacc

SEQ ID NO: 110815 - DNA, 1928 bp, Homo sapiens
  misc_feature (1)...(1928): n = a,t,c or g
ccaggggacagcatgacagatccttccgccccgcaccccaggggacagcatgacagatccttccgccccgcaccccaggggacagcatgacagatcctctcgccgcacaccccaggggacagcagggcagatcctctcgccccgcaccccatgggacagcatggaagattcttccgccccgcaccccaagggacagcatgacatatcctctcgtcgcacaccccaagggacatgcatgacagattcttccgccccgcaccccaggggacagcatgacagatcctctcgccgcacaccccaggggacagcatgacagaaccttttcgatcgcaccccaggggacagcatgacagatccttccgccccgcaccccagggaccccagaattcctttcaaggaaacccccccatgaaaaaaatttgggggaattaggagttcttaggtatgagacccacccgcttccctggttattcccggtcccaccggcaaacttccttatgcccagaaacaccacacaacacacacgccaacgcggggtcacatcctttctcagtgcctcatgctgagaaataaatagtcgaagaccaccagacacaaggaagccttcgacatggagaaagaggcaaaaccaaattgtgtgggtcagaggagaccagtgaatggggcaaaaaaaaactttcacagaaaaaaacggatggtggaattgctcgggggtttttttctccccccagtggaaattgttggtgcccctcgggtgtgggtcaagtgtgtccagaagccattttcctgtttctaatgggagcttctgggatcaaaattagtgactggtccacgaacactcatccacccactagaggaggaggaaagggcgcagggctttattatgaacaggttaggtcaacaggacgggccctcgggatgggaagtgggtttgaagagaaagaggaatcaagaaaaatccccaaaagttttgactgcatcacctgaaagcagagcagccccctgtcaccgagatggaggtaacaggaagaagagccccttgtgggggaaaacaaagcccctggtgtgggttgccttgaggcctgtaaaaagtgtgtgatgctccagataaggtgtcagctgacccagtattcaggtctgggctggaagtgagattttgggagcttcttgggtatggatgtgatttacaggtgactttgcctgggaagatcctacagatggagaagaaagacatgaggaggttaggatgatgggaggggggaccaggaatcggctccagggatccctctccaaaaaagctcttctggaggaagggttggtggagcaagtgctggccgccggtgccctggcaggggtgactgtggggggcaaagggcactgtggtgggccttgggcctaagagacaacaggaaagaggaggtggggctggtgtgtgtaggaagtcgttctacggtggtgtctatataaagagaagaggtagctgctggagggggtgagatctgtttcctcttttggtgtcccctgaactgtgttgtttgtgagatgtacacatcagtatttcctgtgggggttccccaatcaaaggagcttccaggcctgcgggtgtggcactgtaggagtgtccagcagatgctgtgcagggcccatcccaggcaactttttaagacgccgtgttcaggaggggcagggcctcctgttcaggcacggagcctttgcatgtgctggagatctgctcgctttctggactggcgtgctctgccctcagcgagaaaccatttccattttctttcnnnnnnnnnnngaaacaaagtctcattttgttgcctaggctgcagggcaggggcccgatcttggttcattacaagctttgccttccgggttcacttctttctcctgcctaagcctcctggagtactggactacggccg

SEQ ID NO: 110816 - DNA, 673 bp, Homo sapiens
aaaggcggatgtggaacacctgccccagccaagggaatgccctgcagcacgaaatggctgggacaagtccagcggggacagagagcagcctaagggccaccccaggttcacgcaggcccagggggaggccctttcaaaagggaagggtcacgggccaaaaaaaccaggaaggccacacagcggggtgagaagcagacacagccacggtgtcctcgctcaggcgctctgcagattcagacccagagttcagaattcccccggactgtgtgtttagggaccagtccccgagaagctaccagtggggggaagagggggtgaggaaggggaggaggccacacggctgcatctttagggagtcccggcccagctggaccctcagagggttctacagcacgaacttcacctgcccgagacccctcatatcagcccccaggctctccacacctgagcccctcagccatggatatgggagacccagctctagcaatgggcaaagtgtccccacagcccaaggacagaccccagaccaaagatgaggagggcggctttcaggaaaaaagaaaaaaactgtaggatgggcgacgacacgggagaagatcccgggatggaggggagcccccactaggggatggaggggaacccccactggaggagagacagggagctgtgaggt

SEQ ID NO: 110817 - DNA, 600 bp, Homo sapiens
cgaaaaacaacaccaggaccacacttcacccagaattgaacccctggaggagccttagtgaaaggaaaaccccccccttcccattcccccaaagaaaaaacccttggggggtctcccccgaaagaaaaagaccgggccttccctttccccccaggaggaaccccttggggggcccccccgaaaagaaatgacccggccttccacattccaacccagaagggagcccttgggtgggaacccccgaaaaagaaatacccggccttttccattccaccaagaagtgagacctttggtggtgactctggtaaaggaaatgcacgggcattcccattccacccaggagtgagacctttggtggtgactcccgtagaggaatgacacggccttcccattccacccaggagtgagacctttggtggtgactctggtagaggaatgacacggccttcccattccacccaggagtgagacctttgagcacatcatcacacagttaactaacttaatcttttacttaccatcgacttctctttggcataatgccaaggcattttcttgtaaagcatgagctggtaacaattctagaaaataacataaatt

SEQ ID NO: 110818 - DNA, 632 bp, Homo sapiens
  misc_feature (1)...(632): n = a,t,c or g
ctttctagtttatttttctacttagattagttaacctgttctaggccgtcttacacatgaaatcatgcaggattttttttacagaaatccttcttgttacaatttcagcatttatatttttgaaaaacatatgtctttcatctatatttcctaactaatgtaacattttttaaaaagtacttttttatgttagcaaatctctctatatctgtagggtcttttgttctatattttggtgatttggatcttacttgcttgttttttggtttgattgggctttttcaagctctactttattaatctttctaagaagaagtgggttttttggctaacctttttgaaaaagtattatttggttctggccttatattcaataattcctttcttcttggtggtttcaatggattcaggggttctattcaggtttcagaatttttgattggatattttggtttaatttgaaggttttctggttcctgtgaataccttaaaaattattaaaattctttaagggttatttaacaatggttaccaagcgggacaattttgttttatttcatttgggctcaaaatttggaacccccttttggttacttttacccccaagaaatttannaagggatttcctttcc

SEQ ID NO: 110819 - DNA, 325 bp, Homo sapiens
cgccgcacaccccaggggacagcatgacagatcctctcgccccgcaccccaggggacagcatgacagattcttccgccccgcaccccaggggacaggatgacagattcttccgccccgcaccccaggggacaggatgacagatcctctcgccgcacaccccaggggacagcatgacagatcctctcgccccgcaccccaggggacagcatgacagatcctttcgccccgcaccccaggggacagcatgacagattctctcgccgcacaccccaggggacaggatgacagattctctcgccgcacaccccaggggacagcatgaca

SEQ ID NO: 110820 - DNA, 1315 bp, Homo sapiens
ttttttttttgagacagagtcctactccattgcccagggtggagtgcagtggggcaatcttggctcactgcaacctccatctcctgggttcaagcaattatcctgcctcagcctcccgagtagctggaactacaggtgcgcgcccccatgcccggctaattttgtatttttagtagagatggggtttcactggattaagccaggctagtctcggaactgacctcgtgatccacctgcctcggcctcccaaagtgctgggattacaggtgtgagccaccatgcccagccctaatgtagtatttttaaatgatatgattatacaacaactttctttaaaatctaagttcacaaaaatttgtcagtacatcatctgttttatctctattgactataattaccagttgtaagaacaattctaaccatattaatacctgacagaacgttgaggcctgattataactgggatattggggtagcatccagttaaagtatcagtagagcttggatgtatcaaagaaaatattttattcaagttcccaaaacaaacttgaggagttatgctgggtttgaattgaagaaaaaaggccaagttaaaataggaaaacaaatggttttcatttggtggcagttgaaatcaaagtatacatgtgtatacattctaatccgtcatctatcccatgtggcattttccaaggttttaagagtctaccaggccaaaccctttgccactttcactgcttttgctttgcttttcccctttcttttctctcgctttgccttcagcctttttctttgccttttggttcatccatattggggtaactgtccattgctggtctagaaagagtctttttttgtttctcttataattcagtctccattttcatgtcatctttttcatcttttacctcacattgcattttctcttggcaatgtttgggtttgggtaccaccacagttgctatctcttgaacatctttcattaaaacatcaccgtctagtttgagaatacttttaagcctgctggcctcctttgggcgcattcttttttctcttttcagcacgcatctttcttttccacttactccgtaagcttttagccatgttttacctgagaaacgaacacccacacctcacgctcacgccgaccggcatggacagtacccaatatggatgaaccaaaggcaaagaaaaaggctgaaggcaaagcgagagaaaagaaaggggaaaagcaaagcaaaagcagtggaaagtgggcaaagggtttggcctggtagactcttaaaaccttgggaaaatggccacatggggatag

SEQ ID NO: 110821 - DNA, 1679 bp, Homo sapiens
gcaccggcagcggtgttctcgcgcttgcgaagcgggctccggctcggctcgcggggactgtgcacgaggttggcgacgccgccccgccgggccccagatcaatgccgcagagatcgggagccgcgggagcactaaggcgcaagggccacagcagcagccgggctcagagggtcccagctatgccaaaaaaagttgcgctctggcttgctgggctgcttggagctggtgggactgtgagcgtcgtctatatctttggaaacaacccggtggacgaaaatggtgccaagattcctgatgagtttcgacaatgattccaattctggttacagcagtttgcgccggacattacaaatattttcaaagatttttaggacagatgattcattcgaggcccaccagcccttgccttcttcccagaccctctgcaggaaccgtactaccagccaccctacacgctcggttttggaagctcaccggcgtcctcttgcatcctgagtggtcgctggccactggctgggaggtttaagaaggcgcccaggcatcgagaccttgttccagcagcttgcccctttatatgaaattgtcatctttacgtcagagactcggcatgactgcgtttccactcattgatagtgtggacccccatgggcttcatctcctaccgcctattccgggacgccacaagatacatggattggacaccatgtaaaggatatttcatgtctgaatcggggacccagctcgagtagtagttgtgggactgcaagaaggaagccttccgccttgcagcccctataacggcgtttgccctgcgggccctggggacggccaaactttggatgaccggggtcttgttggatctggtctgccttccttcaagacccattgcactggaatggtgtgggagggacgtggcgaagccgtgctgggagcacttatggccctggggagggatggaccccgctgggcggcttttccaaacagcggcaaagccggctagagcaggaggaagcaagcaagcgcctggccgaagctctccaaagtccaaacaagcagaacctcttcccttggctcccctcacccagccgcttgtggcctcgctcccaaacagccctgaaactctgggcctcctcaaacttcagtggccctggtccagggccccagtgcttccagaccaagacttgggccacccacttgtccaataaagtacatcccagacgccacacctgctgtgtcccgagagtctcccagatgggggcatcagggtgaggtccgggactcttgggtcatcgtcccacagtggctgatcggctgccaagcacagtgggggtgctttgttggatcatagtagatttttcaccctggtctcggaatctaaaaaccctcgctgtgtcttcctgtgtgttgcgtgatctgtgaaaaatacatctccctctgaccacagactcctcatctgtggagaagggaagagaggatggcacttggctttaaagacaggtagctgccaggctactgtggagagaatgtgttatgggcctagtgggcctctggtggaccagagattacccctctcaacaggccagctgctggttggctccagccagtgtggccctggggtaaagggggcctggagttgcttgacacgccagttgttcaaaagaagcaagaacttgggaata

SEQ ID NO: 110822 - DNA, 1205 bp, Homo sapiens
tagtagagatggggttttgccaagctgaccaggctggtctcgaactcctgacctcaggtgatccacccgcctcagtgtcccaaagtactgggattacagtattatcactttcttttttttttgagacgggagtctcgcctcctgtggcccaggctggagtgcaatggtgcgccatctctgctcactgcaagctccgcctcctgggttcacgccattctcctgcctcagcctcccgagtagctgggactacaggcgcccgccaccacacccggctaatttttttgtattatttttagtagagacgggggtttcaccttgttagccaggatgggtctcgatatcctgacctcgtgatcaggcccgcctcggcctcccaaaagtgctgggattacagggcgtgagccactgcacccagccctttttcatttcatctactcctattgccatcagaattcggcattaatgacccattggaaattggaacaaaccaagaatatgcatgtccgccctaattccttcattgaatttgtgacatcaagttctgtcttgcagttttacttgactaaaactttgaccatcacccaaccttctgctggtgctcaagtgttcagagcagactcaccctccttcctgtctttacagtgctgtgcaaaagaactacaatacaagcagccacatccaagttaaaaagtcacaaatttcatagtgatatgtcaagtctatagtgcttgcactacaaggtgatgtttatcagtcccttggatatcctgggtgaagataagctccctgccttcctctggacctacacacagtaccaggggctccatacacttaactattcacctcctgtgaaaccagcccttacccactgactcaactctagtcgtcagctcaggctgcaagtctcagaaagcacttataccaaaggcaaacaggttaagacccaccaatctcagcattccacagaatactgtatttttagatagtgtacctatctggcattttgaatataggatataatcaatgtgggcgaaaactttaggcagtaaaggtagacctgaattggcatcattttttaaagttatatgttttttcttcaatctcctttaaaatttccagagccatgaaactggcctataagatttcaactcagtagttttgaagtgtgtacgtttccttgaaaattttgaattgcacctcacggg

SEQ ID NO: 110823 - DNA, 1251 bp, Homo sapiens
ccgtaccggctcgcaattcctgggtcgacgatttcgtgcagagagagaggcaggctgggtccgcctggcagcctacgggaggaggcgggagccgggaaggaggggagcctaggcccggcgtggggaggccggcaggaagggcctcgagcccagtgcggacctttcttcagcctctgtgcgaccgagccgcgcgccaggctcctgtgcgaggaggacgcgctgactccctccgacctgggctccgatggagcagaaatagcgggacctggacttgtggcgcgcctggtgccacatctcgggcttctgcgagcgtcctggcgcgggatcctgcctgttcccttcttttcgccaggtttgcatccaagagaggggaggacaggggcaaaaggatgcagggaggctgctgatttccactgaagagctaatttcctgtgagaacattaacagtgatttaagaaaaagattcctgtaactgtaatgtcttacaataacagaatgcaggagagcacatatcaatgaagaaaagacaaaatgtacttatccatgaagctgaggttaagaaaccagtgtcttcaaaaagccaggaacagcactgggtctgtgcagagttgagagatggtgatgacatgtggtttccagcattcctcacccagtccagggacactgtgggtgtgcccagcttaagtccagtaactggaaatacaagcccaagttctggagagtttgagctgcagagatatatatgggaacactttgaatcttgactcattggccataaccagcagagtggaaaatacaagaagagaaaaaaacattgaactgcgattttataacatcctttactaggcagagagaagaggaaacaccaggaaagaaaactgtattacgatgtgaaaacttaatgttgagaaattcaggcatcttggggttagtgaggagaagttttaggggcttagattcttctaaacacatgtacagaaatgcatatttcatctgatatcaaatggcatttatagtgctaatctttacctcaagacttcacatcttttggtgattgcatcttttaggtttatagcagctaagtttgcatgaaaacaccagggctgtttcatttcagtcaagaattaatgttcattgattgtgcttctgcatttcatgtaactattgtagaatttgttttagttttatgagggaataaccgttccaacttctatataactcaggaatttactctcaaacaacacgtgtatt

SEQ ID NO: 110824 - DNA, 408 bp, Homo sapiens
  misc_feature (1)...(408): n = a,t,c or g
tttcgtaagacttgggctttaatttattttaagaatacaaaaacagatataaannnnnnnnnnnnnnnnnnnggaaacattttgttccccggccagaagggcggccgcgtaattttggttcgttgaaccctccgcctccggggttggggggattttccgggttaaccctcccaaggggcgggaataacgggggcgacccaccctgccgggttaattttaattttatgggggaaacggggttttttnnnnnnnnnnnnnnnnnnnnnnnnnnnnnnnnggacctaagggggtcggcctgctttgccctccaaaagggctgaatttaggggcataacccattgggtttggccccaaaaagggatatacatactttacaaaggccggttaagccggggcttattttataag

SEQ ID NO: 110825 - DNA, 407 bp, Homo sapiens
gggccccaggggctgcccagactggccctcaccgctggctgtgcccgccgccccgtactggccgcccacagggcccgacgacgtctctaggaaactggcctctgggaaggccgttgagtgcttgcgcttttccgccccagagctgctcacgccgcaagggtacagggggacactctgcaggaagggcaccggcgtgctgaaggggcctgtggagagttggggcaaaagtcgccaaagctcccaccccaagcaacccaggcctcctctccctgggttggacctggggaccattgacacctagaggcccaagaatgttacatctcaggtgatgcttgctcctctaccattaggaggtacagaatagttatatccccactttaagctgaagaaatggaggctggacgaaa

SEQ ID NO: 110826 - DNA, 295 bp, Homo sapiens
  misc_feature (1)...(295): n = a,t,c or g
tttcgtcttcgctgtgagatttcgtacaattctggtttctaactcagttatgagaccttgggcaaagtcattaaatttctctgaacttcagatttttgggagtcaataaaccaatacatgtcaaagggcctggtaaactttacagtttagaccangcgtggtgtctcacccctgcagtctcagcactttgggaggccaaggcgggtggatcacatgaggccaggagnttgagaccagcctggccaatgtgggtgaaaccctgtttctactgaaaatacaaaggtgagccgggcgt

SEQ ID NO: 110827 - DNA, 1422 bp, Homo sapiens
cacagccacatttttcagcacgcgctttacgttgtcacaggcactgcccaggccgtagtgctgcacgtacccaaagcgctggtgtttgttgagggtgtacagcaggtagtcagccatggtctcctccccgaccaggtggtccagcaccgttccacacagggccagcttcaggccctgtctccacactttcaatccgaggagccagcacgccagggagtgtccaacaggaacatcaggggccgctcagagacctgtgtgggcacagagggcatgatcaggccgcggtggcagcctcccacccagggtgggcccactcaggaagcctggggcagcccctgggaaccccaatgctccgaggaaggccttcagggacccaaccccatggcagcgtcactctcaccaagctccagggttccccagaggatctaattcccacttaatttggagaataaataaaagcgtcaggtcccaacagcttgtcttctgctcccaaggagaacacaaggaagggagtggagggtggggcggggggcgccacactcaggtctgtcctgaccactgcatggccctggacagtggcctcctcatctggaaatggggaaaacagcgtgccttccccaaaggtttggcgcaaagactatgacgactgtggaataagggcaggggcagtgcctgccccgggggtgctcagcggggacactgagtggaggggagggaagcgtggtcagcagccggaagccacacagaggtcggcaggtgccagacgcctgcagagctcttgacagagtgctgggcctggcccctgaggactccacttgaattttggacatcacagctctggtgatcccaggctcgccacccaccctggtggctttccctgtaggaaaaggagaaaaggaggctcaaatgtatactaaacacagaagctgcagaacaagtagggagacgtatgtaacaaacacatctgaccagccaagcagggagactatgtaacaaacacaacttaccagccaagcagggagactatgtaacaaacatatctggccaaaatggaaactaaaagccagatgagcttcccaaggctataatttgtttcactttcagtcacaaaccagctcacagcaagggcactttccaagccacacagagactgagattcttcaacaaatgcaccagaacctaactccccaggactggaaaggcactgtcagactgcggaggtcagacctgagctgctccttccacgcagtcccccacctccctcctgggacccacccctggcaccccaaggttcagcctgcctcccacaggcactgttccacagggcgattgggttggttttagggacccagttcaggggtgtgttcccaagggagggccattccattgtgggacaaacaacccaaggattaaaaacacaca

SEQ ID NO: 110828 - DNA, 498 bp, Homo sapiens
catgcttggctaatttttatgtttttagtagaccacggggtttcaccctgttggccaggctggtctcaaactcctgacctcaggtgaccacctgcctcagcctcccaaactgttgggattacaggcatgagccaccacacccagcctaattatttgtaatttttagtagagacagggttttgctatgtttgcccaggctgggtcttgaacttctgggcttcaaatgatctgcccacctcagcctcccaaagtgctgggattataggagtgagccatcacgcccagctgacttcgatttgttattgggactgaccttctaattagtccagattggatcaatatttgtgtatccagaaagccaggtagtcccaagtgttctctgcacattgtgggcccagtaggaggcagggcttatcccactggaaggtgacagtcttaggagccttagtagtggagtccccgtgacacgaagtcgtcgtcacaggaattcgggtggtc

SEQ ID NO: 110829 - DNA, 447 bp, Homo sapiens
  misc_feature (1)...(447): n = a,t,c or g
gacgtcccgggtcgacgacttcgnnnnnattatcctccaggaagtagccagtgctttgtgttcacattctcggtcacagggagcttctattctgcatgctccactccccagactggaagggggcgatggaggaggagggtggacacaggatactggaggagagcaaggaaggcaggcggatgaaccaggaagctgcatgatgggttgcccaggcagggcaggcaatggaggaagagggtggagacagcccctgccccggggtctcacaggacagtggaggagaggaaggaaggcaggcagatgaacccagaagcagcatgatgggtcgcccaggcagggcaggcaatggaggaagagggtggagacagcccctgccccagagtctcacaggacactggaggagaggagggaaggcaggcagatgaacccagaagcagcatgatgggt

SEQ ID NO: 110830 - DNA, 426 bp, Homo sapiens
tttcgtgggcttatcagcacgcacaccatgcatagctccttaaggacggtgcgacacatgaaaggtgccactgggattcttttcctgcttgtggccccgcccccaggtatagcatcacctgcaagtggaggaggtgcgaattctacccgccgttgggtggggcagacgacccctgcccgtgacggaggggctggtggaagtcaggctttctgacagctggtccaagcgtgcgacccaggctgtatcgcccacttacagccacgtgggctgcggcatgctgggcttccccagcgaaaagagggtcaacgctggcttctacacgcccgtagccgtctaaagggcggggctcaccctgtagagggccgtgtccaagttctgaacggcatcacatttagcacagtgtgggacccccgtgggatttattgg

SEQ ID NO: 110831 - DNA, 434 bp, Homo sapiens
aacggccacgtacgcttacgtgaactcggacccgctagagcggccgcatacatgtcgcttttacaggggtaaatttcttttataaagagaacacttaagataaggaggagttcaaaagtgcttcagagagctaacgacagcccaagttagttttataaaagactctggaaaacattctggctttacaccccatttgaccctaaggctgccaaaaatcagcacgcggtgaacacagcatttgtcaggcaagcccagggtaacatcaagcagaagctgcagacatgaatgccacccaacttataaaagtggccaccaaggtatatgttaactgtaaccaaggaacataatgggaaagagcaaaagtaacaagctaggcacgccaagggttaagtccctctccccagcccagctctatctagaaaaagagggggcgg

SEQ ID NO: 110832 - DNA, 446 bp, Homo sapiens
  misc_feature (1)...(446): n = a,t,c or g
ccatgtccacagaagccccagaacattcttagggctccctgaggactgtaaccctctggaacagatcaaaggcctgccctctgggtcccctccccaagccccagcagcacctctcctagccccacctcgggcccggaaagcccagcgcccctgcctaagtcctgcattcgccagcctctcccgcccacgtccctgcagacccagcctggggccacaagcctgcctttgtcagctcaccctctcacgtggggccgtgccagcaggggctaacgggcattctgcctgcagctgggactagccccctgagaggcctaggcccccctggagagatggaactggcgtgaatgcaacatcttgggctgtcacaaattgactaaggtgaagggcaggccttgggaagacagtgtatgggncctctctaanattcnnggcgttcttcggtcggn

SEQ ID NO: 110833 - DNA, 442 bp, Homo sapiens
  misc_feature (1)...(442): n = a,t,c or g
cttgcatcgtctgtttggaggaaccacagcggncgaatacactggtgctgtttcaaatatgttatttttattagagtaaatcaaaaaggcttttgacatgggggatgcagctatttatgtaaaatatactttttttcctgctgtattgggtacaggcacttttggaaggtgtttgctttcacatggcagggacagcagtacatcttcacgatttgagctcaggtctatggcaactctcctgttctgtcataagcaaggcttcaggggtcttgataatcacaacatcccataaaatgcagaactagtccattatatggataatatgttgagcatgtgacatttctaggagttcagtggcctgaggcatgttggttatctccttcaaatgaaaacaaattgctgcatcatgtactcctatgctaggaaagaggtaaaaaaaata

SEQ ID NO: 110834 - DNA, 954 bp, Homo sapiens
agccgccgcactgccatcagccacagagaactgtcgaagccttgttttcccacttccggggcctgaggggcacgggctggctcatccagagtgcccagggtgaatgcccagggcctgaggggagcggccctgctcagccagtgtgcccagggtgaatgcccaggtcctgaggggagcggccttgctcagccagtgtgcccagggtgaatgcccagggcctgaggggagcggccctgctcaaccagtgtgcccagggtgaatgcccagggcctgaggggagcggccctgctcagccagtgtgcccaggatgaatgcccacgagtatgccaggttcccctctgacaccaccttgcagcccagacgccccgcagactgaaggagaaatgtgaggcttctccttgcacgcactctgtctttattagattgtacgacagcatcgttgctgtcagatgctgccagcagtggagacagagcattcattactttagatgccctcaaaggacatcaggtaaaggggaccccaatgtcccctacgcagggatagaaagcaagggaaaggatggaaatcccttcttgataacaggtctaggccaaaaggaagacaggcttgagactggatctcagatcacattggtactgtcaattcaggggtgaggtgcccggggtggtccacaaagcctcacaacctgcaaagctcccacatatgtgagagcccaccatacgccaggcatggcaccagcagtctcacagcctggtcagatgcgtcccatgtataagtgactcgtgtctatggacatggtacgtttgtatattcactgctaaacatgcagtatttcagttacagcacaaaacagattacacccagatgccacgtatccaggcttttttttgtctttaagaaaaggtacagttcaaattaaaaaaacaaaggaaaataaagagataaataattgc

SEQ ID NO: 110835 - DNA, 1125 bp, Homo sapiens
gggtcgacccacgcgtccgggcttatttgaaagacgaatagagccccaaatgtggtttccggtgacttgggcaggccctctgccatggcagagctggccctgggccaatggagttactgctccgaggaccagttccaccacctgaaaacctgcacccaggcatggccgcctcacagactgtgcgactgccagaggaagatcctagtacctccccctctccggggacccgagcagccagccagccacctaactcctcataggctggccggaagccctgggagcggagcaactcgcgtggttatttttgtgtcctcgattctgtccagaaccccgggtgtggcaaagagccccgaagctaaaagcccccttcagtcgcagcctcactctaggtaccgaacaaccctcctgctcacatgtcccccagggtttggggctcctctgtcccccgtcccgtgactaacacccttgcacgctggctcacgtcctggcatttaacaacttgctctgcgaaggtggtctgttctttcatacccaggacctcggggtcctgtcagacagctgctccgtcttttccctctgagagagagaccaagggcaaggagggcagtgacctgtccacagaggtagtgcagggggggggccaacatggagtcccagctctggactcactacgtgtgaacagtgggcaagttagggggacctctccaagcctctgtttttccccccacaaagtgaggtctgttaacccctgctgcacagggtggtggtggggacagctgtgagcaacagctggacatggggtgtggtcactagccagggctgcaccctacagttcaaccagtcctagcactggcgctgagccctacccctttcctccagcccagagtccttcctctgcggccggcacacagaatcagtttccccacagacatactgaccatatttcccaagccaaaagctggcatgacaacatgatagaatatttggaactgagattgcccaaaaaggcagaggcagccagccacatagtatctggaggtacatgtggcctgaattggaaggcctctagaatccgcgccaagaatgtcaccatcgtctccacagatagaagggaaatctcccttg

SEQ ID NO: 110836 - DNA, 404 bp, Homo sapiens
  misc_feature (1)...(404): n = a,t,c or g
gtgaaagcaaagggggcggttttgggcccattcgggctttgccctccgggttcaaacgggtttcctggatcaaccccctaaggaagtggggatgcagggggcccccccccaggccgggtaannnnnnnnnnnnnaatgggggccctgttgggcaggggggtttttaactccccgcttcaggggatttggcccccccggccccccaaaaaggttgggtttccgggggtaaccccccaggctgggccccccggttcaaaattaaccctgaaaggaaaagggccaaaaggttttttttaaaaaccccaaggggccaaatgggtttnnnnnnnnnnnnnnnnnnnccacccttccttctgctgtctttgagagacccatctcacatgcagcaacacccatagtgtatt

SEQ ID NO: 110837 - DNA, 2002 bp, Homo sapiens
ccaggtcaaaccacagggacttctctcaggccaaagccccaggaacccttgctgttgtcctagaacatggtgggattggagcagagaccatcccactgggatcccccagccctatttaggcagccacaggtgtccctcaggaagctcccccaacacccctgccactttgagaagccaggacagatctctaagattgggacactgccctctccctgggccaaccccagccctgcaatgaggccccaacccactttggttctcacctggcttttgcctcccaggggtggagactgcctccccactcttttcacccccaaagaagaagcacagccgaggccgacatcagagaaactgtgttgctgacttagttgcagcaggaaatgactgaaatggggtaactgtcactcacacactcacacctgtgcccacacacacccacacatgcacacacacagaccacatccgcagcaggtgggcctggccagacacctatgggacacttattggaggcccaagaattaaagtaagggggtgacacccaggaggcctgggagggggaaagccccagtggcctcatggtctctctcatcgaactcctaagggtccttccatggccctgggcccccgagggtcagggaaaagagagtgaggccgggaccagtgtgaggaggcctctcccctgcctgagcgtagagtccattctcaacagagacaaagcctgccacgtgcagggatgggtgtggaggcccaggcggcagggccctggggccggtgtgcagcgtgggtggggagtgacgcccaccaggacggccccctgtcgggggtgagctgtgtccaaagtagctgggcagcagctggtgttgatagtggcataagggacgtggagagcagcttgggaggcctggctgggtgcccatgctcgtgctctcagtgcataggagctggtgtgggatggctggagcctaggggcagggcggtgcttctgtcggcacagcagatgaaggaggtagccacagtcaaagagaaggactcctgcgacctccaagatcccggccaggtctgcccgcagaatgggggcaggagtcggcggggcagagagccctgggtctgagctgggcgggaggctcccagaggcctcccaaggagccctcaggggaaggacgcaaacttgcagcagaaggtggtgttggcgcaggggctgctggccccagagccttccaggatgagagagatgctgctctgggtttcccagcgggcctggcgagcaggggcccattgccggatgccacgttctgggtgcaacacagccagcgtggtccccccagcaccgttggggcccccccagctcacagtcaccagggagatggagccagaccccaggaacccacaacggatggtgaaggacgagagctcggtggcctccatccgaacttgaacccacacctccggggtccccgcagtgacacacaaggtcagcagcacccagggcaggaccagggtccggtgccccatggccccctccagtccaggttctgggggctgcagggccggcacctgtgcactctgttctcatcgcaggaagtcttcatgttgtcagcagccaaacagccacttccttctctcctctcacaccttcccaagaggtggtgagcacaaagtggctgattcccttcttaaagtgacagtgagggcctgctcagtccccaaggctgtgcttccaggtaacaaggcagggcggcacaggtgggtgagaactcaaccctggctaggcctttgagttgaattaaaagcagcaagatttggaggtgaccgggaggaaacaggctggcccttgccgtgaggtgtgcacagacagggaatgagaggccagcactttaggatgagtccaggagttcaagaccagcctgggcaacatggtgagaccctatcgctcagaataggtttctttgccatattttgggacggttctgtaggcagctgtgggcctgcaacatggtcttca

SEQ ID NO: 110838 - DNA, 878 bp, Homo sapiens
gatttagagacagggtctgctctgtcctgcagtggcagcatcatggctcactgcagcctccaactcctgggctcaagtgatccttccatctcagcctcctgactagccaggactacaggtgtgtgcatgccactgcccccagctaattttattttattttttgtcttgctttgtagcccaggctggtatgaaactcctgtcttcaagcaatctgtctgcctcagcctcccaaagtgctgggattacaggtgcaagccattgtgcccagcccccatgactcttagaataaatgactctggcccctgacagtccaggcccccttttcattgctagctctgcaagtctattcctttgcttgttcttgcatccaggcctttgcactagttgctccctctgcctggaatgctccctctgcctggaatgctcatccctaaattttgctggctagctgtcttgtgctagggaattagctcatactcccctcagcacagcggcttcctttacccaaccccctccagccacccagtctccttttcccttcctcccttgtctctctctggcctcaaggccattggacttgatcttatcatgtatgtgatctgtgaactcaaagaggtcacggtcatacctgtcttgtctgtctctgtgacgccagtgcctgattaaggagggtatttggtaagacctggccacacccactgctcacttactttatgggccttgcttggcacctgccctgtgggagggtgacgacctctacccaccaaccccaccagcctctcaccattgagccagcgggagtcgtgtggctctgttcggagacttggacgttgccctaggctgcgaaagatcggacgcgtgggcggacgcgtgggtcg

SEQ ID NO: 110839 - DNA, 399 bp, Homo sapiens
  misc_feature (1)...(399): n = a,t,c or g
gtctcnnnnnnnnnnntagaatcttgaaagcaacaagagaaaagcaattccccacatacaagtgatcttcagttagatcatcagcagatttctcatcagaaggtggctcagaaggcagtggagtgatacattcaaagccctaaaagggnnnnnnnnnnctgtcaaccaagaatcctatctctggcaaagctgtccttcaaagtggagggagaagttaacatatttctagacccgtaagaagctgagggagttcattacttcattaccactaatgccgctctgtaagaaatgctcaagggagtcctgcaggctgacaagaaaggacactagacagttaattcaaagccttatgaagaaataaagatgtcaataaaggtaaatccaaggccagtttgtatt

SEQ ID NO: 110840 - DNA, 992 bp, Homo sapiens
  misc_feature (1)...(992): n = a,t,c or g
ttttttttttttgagacagagttttagtcttgtttcccaggctggagtgcaatggcacaatcttggctcactgcaacctccgcctcctgggtttcagggcaattttcctgcctcagcctcccaagtagctgggattacaggcacccaccaccatgcccagctaatttttgtatttttaatagagagctaataattgtatatttaataaagacgggtttcaccatgttggccaggctggtcttgaactcctgacctcaggtgatcctcccgcctcagccttccaaagtgctgggattacaagcatgagccactgcgcccagtctacacactaattcttgttagcccaacagctgttctgttctatctacccctcatttcacgctcaaggagtcatacctagaatagttacacacaagagggaaactggaagccaaacactgtacagtattgtgtagaaagtcacctccctactccttttattttacatgagtgctggatgtgttttgggcagatgagctttcagctggaggcctgatgggaaattggaggntaacctgcaaagacataaacagtatttatgagttatatcttagttcttgaaattgtgggaatgcatgattgacaatattatttttaatttttattttttcaagtaataccagtactkgtttaactatagccagaactggctaaaatttttatattttcagagttgaagttggtgaagacattcatgatttaaacaccagatcctgaaaggggttaaatctactttgaaatgaatctgcaatcagtatttcaaagcttttctggtaattttagtgatcttatttgattagactttttcagaagtactaaataaggaattttaacaggtttttattaatgcacagataaatagaagtacagtgaggtctatagccattttattaaaatagcttaaaagtttgtaaaaaaatgaatctttgtaattacttaatatgttagttaag

SEQ ID NO: 110841 - DNA, 809 bp, Homo sapiens
gctgggcctcgtggctcccatcaccaatggcttggcaggtgtcgtgccctttcaaggtgggcaccctgccctggaaactcgtctatgccaatggccttgtgccatacccagctcagagcccgactgtggccgagacactgcatcctgccttctccggagtccagcagtacacagccatgtgccccaccgcggccatcacgcccatcgcgcacagcgtcctccagccgccgcccctcctgcagcagcagcagcgagaaggagtttggagacacggaagtgacgcagatgttccctacccttcggcaatatcatttcctccaaggtgtttatggatcgagctaccaaccagagcaagtgtttcggcttcgtgagctttgataaccgggccagcgcccaggcagccatccaggccatgaacggcttccagatcggcatgaagaggctcaaagtccagctgaagcggcccaaagacccgtgaaagggggtttctcccctgtcctccatcccccgtttctgttcattcacagctgcgtccccgagcactggaacagtgcctagcacataatagatgcctcagttaaaaaaaaaaagtgcagactgagagttaaaagtgaagggatcgcagagagcagctttggattttgcttctggttggcagttcctgaaggtgcgttctgtgcaggtaaatactcccaaatctgtgtgtgctgacccgggagaaggtgaaaaggccagacagcttctaactgagcgtctactctgtgccaggccctaggcgagactctgatgacgacagcgatggtgattta

SEQ ID NO: 110842 - DNA, 2485 bp, Homo sapiens
  misc_feature (1)...(2485): n = a,t,c or g
agaggcatttaagtgggttaacccaagggttttccaggccccgcggtgttaaaccccggcccatggaattgattttgggggccccattaaaaaagttttacgttgcaagcccggggttgtaaacttggattctttaaaacgggcgccccnnnnnnnnnnnnnnctgctcagttctttattgattggtgtgccgttttctctggaagcctcttaagaacacagtggcacaggctgggtggagccgtccccccatggagcacaggcagaacacagnanangtttntcctccccccncccaaaannnncccctgccccccccccccccccccccccaaaaaaaaaaaggggggggctgtgtgggcttcaaagccagcctttccggttccttggaagcttggtctccacacagtgcctggtttccgtcacccccttcccagggaagcaggtctgagcaagcttgtcctggcttgtgtccatgtcagagcaacggcccaagtctggggtctgggggggggaaaggtgtcatgggagcccccctaacgattcccagatcgttcctgcgtcctgcctctgccatgtggctgctgcggtggcggcagagggagggatgggagtctgacaaacggggcaaaaggctcctccggggcccctcaccaagccccagggtccttttcccagagatggcccttgcgcctcatgaccagcttgttgaagagatccgacatcaagtgcccaccttggctcgtggctctcacttgctcctgctcccttctgctgccttcttctccagctttcgctccctttcaatctgcgcaaccttgcccttgccaatgcccccagcttggcggatggactctagcaagattggcccggccaccggaggggtcgaccacttccctgggagctccctggactgaaggagcacgcgctgctgctgctgtccgtccctccctggcgccttgccctaacaggggccgcggttgaagggtgggaagtgggggttgcaactggcccaacaccttcagaaactgggggtggtggtgggcccggtggacctggtggtggtgctgtttaagtaaccccatcttgtaaggtctgccttgaagaggctcgggctaacctcagtgtggaaggtgggcagttctggaatggtgccaggggcagaggggtgcaatgccggggccccaggtcggcaatgtacatgaggtcggttggcaaatgctgggcaggtcaggcaggtaggatggaacatcaaatctcaaggcaccttggccccaggtcttggcacataggaaagtagttcttctgggacctggtgttccagctgctctctcttgctgatggacaagggggcatcaaacagcttctcctctgtctctgcccccagcatcacatgggtctttgttacagcaccagccagggggtccaggaagacatacttcttgtacaggttctcagtggtgttgaagagcagcaaggagctgacagagctgatgttgctgggaagacccccaagtccctcttctgcatcgtcctcgggctccggccttggtgctaacagcaacacgggaaagtacttcagcttctcctgcagggcccgctcgtcccagggggcggtgcttgctctggatccttgtggctgggggcggtntcatgcaaggccagggtccctgggcgcccgtgaagatggagccatattcctgcaggcgctctggagcagggtacttggcacatggagaacaccttgatggccttcttgctgcccttgatcttctcaactcttggcctgggccaaggagaccttctctccaatggcctgtcacctggctccggctctgctctacctgctgggagatcctgctgctgaagatgtctccagagaccttctgcaggtactgcagggcatccgccatctgctggacggcctcctctcgccgcaggtctggctggatgaggggcacggcataggtctgacctgccagggagtgctgcatcctcacaggagtgcatggtgcatatttcttttctttttctttcctctcactcagcgtcctgtgattccaaggaaatgagtctctgctgtttttgggcagcagatatcctagaatggactctgacctaagcatcaaaattaatcatcataacgttatcattttatggccccttcttcctatatctggtagcttttaaatgatgaccatgtagataatctttattgtccctctttcagcagacggtattttcttatgctacagtatgactgctaataatacctacacatgttagaaccattctgagtcctcaagaatctcatttagctcttattatcagtgaatttatcatcatccccaattttacataaggaaatggggttagaaagaccaaataacattttttcaacatcaaaacactagcttgagatcaagcccagacttggatctgttgtctgaattccaagctttttgttatttattgatatgttttg

SEQ ID NO: 110843 - DNA, 386 bp, Homo sapiens
cttggacagcatttttgggccagtattgtcccccaagtctgttgctgttaatgctgaagaaaagtgggtccatttttctgatacatccccggaacatgttactccggagttgactccaagggaaaaagtggtgtccccaccagctacaccagacaacccagctgactccccagccccaggccctctcggccccccaggtcccacaggccccccagggcctcctgggcctcctcgcaatgtactatcgccgctcaatttagaagaagtccagaagaaagtcgctgagcagaccttcattaaagatgattacttagaaacaatctcctctcctaaagattttgggttgggacaaagagcaactccacctcccccaccaccactgtatt

SEQ ID NO: 110844 - DNA, 427 bp, Homo sapiens
  misc_feature (1)...(427): n = a,t,c or g
acccagcctccaggccctccacgcctaccaagagtcgttcacgcctactgaggagcatgtgttggtggtgcgcctgctgctgaagcacctgcacgcctttgccaacagcctgaagccagagcaggcctcaccctccgcccactcccacgccaccagccccctggaggagttcaaacgggctgctgtcccgaggttcgtccagcagaaactctacctcttcttgcagcattgctttggccactggcccctggacgcatcgttcagagctgtcctggagatgtggctgagctacatgcagccgtggcggtacgcgcatgacaagcaggctccgggcagggactcccagctccggtgaatgtagaagaaatgggcaccctttgtccaggagtgtttgcgggggctcggnncntacccgcaacgtcgcttn

SEQ ID NO: 110845 - DNA, 400 bp, Homo sapiens
  misc_feature (1)...(400): n = a,t,c or g
aatacagtgcctgtgcgtgcctgtgcgtgcctgtgtatgcatgcatgtgcctgcccatgtatgtgcctgtgcgtgcctgtgtatgcaagcacgtgcctgcccgtgtatgtgcctgtgcgtgcctgtgtatgcatgcatgtgcctgcccgtgtatgtgcctgtgcgtgcctgtgtatgcaagcacgtgcctgcccgtgtatgtgcctgtgcgtgcctgtgtatgcatgcatgtgcctgcccatgtatgtgcctgtgtatgcatgcatgtgcctgtgtgcgcatctgagtgcatgcatgtgcctatgcctgtgtgtgtgtgcctgtgcctgctcctacatgtatgtgtgagagcgcaatgtgtctggccctggaaaagtgggcattcagtctctctttcacn

SEQ ID NO: 110846 - DNA, 1139 bp, Homo sapiens
ctgcatgcctattttggtgtttccctcgttctgggcttcgttttcatgttgctggtggaccagattggtaactcccatgtgcattctactgacgatccagaagcagcaaggtctagcaattccaaaatcaccaccacgctgggtctggttgtccatgctgcagctgatggtgttgctttgggagcagcagcatctacttcacagaccagtgtccagttaattgtgtttgtggcaatcatgctacataaggcaccagctgcttttggactggtttccttcttgatgcatgctggcttagagcggaatcgaatcagaaagcacttgctggtctttgcattggcagcaccagttatgtccatggtgacatacttaggactgagtaaggattagaactaagaggacacaccagcatcggagtgtattaagccccttgaaacacatggttgctagggactgaacacaggaaccgtatgacagcagcacaaacccccaaaggatgttcctgccttgtgggcccctgagccccttggggaggacttgaggaatcatgaccagattcatccagaactgctgcagtgttaagtgaaaatcctctgtagttgttctgcagagggaaccttccttccattagaaaatttctggctcaatacagaatgggtccacatcaccccaaagtggcactgttgggagatgcctgtgaaaatttaaaacctccttttgtaccctgagacatcctagattcaccctccaggaaggccctgaaagggaaatgttgtaacctggtgggaaaagaactaggccaacccatttagggaattcctcctagatatactcaagcctaaccccagtggctttaacaccaaggagattggctttgatccttttttcctggtggcatctttccagcaagttagaagtctccatggggataagactgcagtttcccccgggtcaaaaagctggaacagtgattttaaatgtccctttttctggatcccttgtaaacatgaaatcattccatggatggctgccttataattttgtctctttccactttaattgtgaatggttaaaaaaatgctgttttctgatattaaatttttattagtgcataccttaaaaaaaaagaaaaagtcgac

SEQ ID NO: 110847 - DNA, 1353 bp, Homo sapiens
ttttttttttttgagacagagtctcgctctgtcacccaggctagagtgcagtggcgcaatcttggctcactgcaacctctgcctcctgggttcaagcaattctcctacctcaaccttcccgagtagcctgggattacaggcgtccgccaccacgcccggctaatttttgtgtttttagtagagacggggtttcaccatgttggccaggctgatctcgaactcctgacctcaggtgatccgcctgcctcagcctcccaaagtgctgggattataggtgtgagccaccgcgcccggccagaacattagttttaaacttcctaacccttgggagaaggcaaaacacttgatgaaatctacataaagactaaaacattttaccaattttgcattgtttgtttgaaattgcattgacgactgatggagtttcactcttatcacccaggctggaggctggagtgcagtggcctgtgatctcagctcactgcaacctccgcctccccaggttcaagtgattcatgtgcttcagcctcccaagtaggctggggattacagacgtgttgccaccataacctggggtaattttttggcatttttagtgggagaggggagttttcaccatgtttgggccagggttggtctttgaactcctgacctcaggtgatccgcccgcctcggcctcccaaagtgctaggatttacaggagtgagccaccacgcccggcctaatttttgtatttttagcagagacagggtttcaccatgttggccagtctggtctcaaactcctgacctcaggtgatccgcccacctcagcctcccaaagtgctgggattacaggtgtgagccaccacgcccggcctggaaaagggaatcgtaactgagctccagacatctcagaatactgcaggagtgcaactgcgaatgtttaggggcccttcagcatcctgtacccactctgtatctcacctccatgccctggggaaatgggcacggctgccctgggtccgagggtgggtagaagtcaggaggcaggaaattttcggcagcagaagcagggcaagagtaggggctgtcagtgtaggcagcatgcgtgttggggtcccagtctggaaagcccaggttgttaggtccagaacccacagtctccgagtgtgctgggaagggagggtggccagtcacagcctcattcacagatggggtcaggggctgctctgggggagggagaaattgtccctgcaccccgccagcgtcgggctgctgctgctggcggcgcctctgctcttccagaagcttcttcacggtttgcgttgggcagtggctgcgctcacccctgctcaccttccgagcctgggtt

SEQ ID NO: 110848 - DNA, 814 bp, Homo sapiens
ttttttttttatcaaggaaagaggtttatttagctcatggttcttggggctggatggtccaagattgggcgactgtatctggtgaagggcttgtgctacttcatagtatggtgatagttgcttctgccaatggacactggcttctgcgacagagtctcgggaatgagtatgaagctctcacatccccgcagacctccttccgccttaaagagcctccacggtgtgtggggattttcctggactatgaagcaggagtcatctctttctttcttctaaggaattgaagctcccagtgacctggagggaggattcgtgattatggaggcggttaaatcccaagatctgcaggataagtcagcaagatggagtcccatgagagctgatggtttagttccagtctgatggcagcaggcttgacgcccaaggaagagatgatgtttcaattacaaaacccgaaaggcaaggaaaaagctgatggtccctgtcccaaaggctattaggcaggaagaattctcttaaggcagaggtaagctcttttgttctattcaggccttcaactgattcagcaaggcccgcccacatttgggaggacagtctgcattactcattctactgatttgaatgttaatgtcattgagaaacacccctcacaggaacactcagaataatgtttgaccaaatagctgggcatcttgtgacccagttaagtggatacataagattaactatcccagtgactcagtggaattttttgtttgcttttgtacagttttaaaataaaagtttggtatttgtgttttggaaaaaaaaaaaa

SEQ ID NO: 110849 - DNA, 468 bp, Homo sapiens
  misc_feature (1)...(468): n = a,t,c or g
tctgtctaattaattcttttattgtgcaccggataaagaaagacaaaggcctcgccggcaataacgattcattaaaatgcagcgccttcgcccgtgctcctggcccagcaccagcccggctgctccgccccactgtgggcacagccgcctgcgccccttaaccctttgtggagtctcctgggctggggtgcccggcctttgccagggccctgggggagcagggtttatgcagccgccagctgccctgggggagaagccgggcctgggcccgtctgggcactgccaaggaagggggtcctgggcatcttacacttgtccatggcagacctcagtgggcctgggcccgggaatcccggacggtcccctggccagagggccaacctaggctggggcaagtcctccagtcctggccgtaggcccatggggaaggcggnggccggggcaggcagggaggaccatctgccacac

SEQ ID NO: 110850 - DNA, 1895 bp, Homo sapiens
  misc_feature (1)...(1895): n = a,t,c or g
atggtaacgtggctttacagatttttacccacttcaaatatggccgccaagctccgttctcttttaccgcctgatctacggctacaattctggcttcatgcccgcctccaaaagtgcttcctctcgaggggttgtggttcttactgcgcaggcgcaaaagcaagtcctcttccgggcaaaatggcgatgggactaagggtgcggaccgcgggagcttctgcgcattgctacagtccgggcgtcgggtccacagcgggggcggggacctcgcaatggctggggaaaccgctgaccacacggctgctattcccagtagccccgtgctgctgtcgcccacactacctcttccttgcggcttccggcccccggaagcctcagtacctctgctatctcttttgcagaagtccaggttcaggcccctccatgttgttgctgcaactccctcacccacaagcaagtacctgaaggtggcttcttggagagacttgcagatgtaagtccaaaattgcttgcagagcagagctttcgctggaactgggggctgggggtcataacaccccagtggggaacttgatccaagaatttacttgggaatttaatgcatgttgatcttggggcctaccttgggtgggggggccatttgctggcatgtaacagtctttggcccgnttgcctgatttttcctctcatcgtgaaggggccagcgagaggcagccaggatccacaatcacttgccagagatccagaagttttccagtcgaatcagagaggccaagttagcaggagaccatattgagtattacaaggcttcctcgggagatggcactttaccaagaaaaaacatggtattaaactcctataaaccctcctcattctcccctgtgactcaaggccccaatcttcatctccttccttcaatgcctttgagagagatggccaacctgtcctgtgcccaagcctgcaagacaggtgggcctctggtggttccagggatctcacgggtatccgatcccatctaccatattacccactgggcagtcactgcttacaatgtggggctgttcttgagctagggtgctgaggacaggtgtgcaaaagttctggacctttcagtgggatggaggaaatgttcattcaggaatggatggcccctggattaaccttggccccataaaccatggcattttcccccacggggcagtgtttttatggtactgggctctccctccaaatttgttttccccctggtcccaagttatccttttctcggaattccagccagtacgcaacttgtactttaaatcccccaggcgtgtttgttacatggaccggggacaaaatttaccttcccacgggggaagggtttccttaggaggagttttcaaaaaaaggctggaaaaatgctgaaatggacgcgtccagctgcggagagccgtgaaacnaacgccatgcgggaatccagttgggagctagccagtccaggggtcctttacgacaagaccttttaccccacaaccctcttcctacaacctggcaaaggataaccctcccaaatatccctagcagccagcagcagcagcagcaaaccaaagttcaaagtattccctggggcacgacacactttggctggacttatggttctgtggcgcatttctggcaaggaattctggtctctttcagagacttcattccttcaaaacaagacttggacactggtgttccttggccccagttcctagggaactgtgggcacacaggaggatgttccattttaaaaaacggattttcatggaaacactctttgttanttattgtttattaagagagcactggggtagccaagtgatcttccccattcacaggagttagtaaacctctgtactacaaaaaaaaaa

SEQ ID NO: 110851 - DNA, 556 bp, Homo sapiens
  misc_feature (1)...(556): n = a,t,c or g
ttttttttttttgagacagggtctttctctgttgcccaggctagagtgcactggtgatcacggctcactctagccttggaattcctgggcccaagcaattctcccacctcagcctcctgagtagctggggactaaaagtgtgcacccacccatgccctggctaattttttgaaattttgtaagtgatggggatctcgctcttttgcccagggtggtctcgaactccctggcctcaagcgatcctcccacctcgacctcccaaagtgcttggggattacaaggtgtgagccacccttgcctggggcccctttttccatatgcctccaaaaacatgtccctggaaagtagcctgctccccccctgtcactggatgtcatggggccaataaaatttcctgcaattgtgtatctcnnnnnnnnnnnnnnnnncctaggggggggccccggcccccatttcccccaatagggggggtaaataacaatccacggcccgagttttaacaccgccggaacgggaaaaccccgggggtacccaaattaaatcgctttgtgaaaaa

SEQ ID NO: 110852 - DNA, 1504 bp, Homo sapiens
  misc_feature (1)...(1504): n = a,t,c or g
cggccgccttccacgcccgagggcatcgcgctggcctatcggcatcctcctgctcatggcgctgctgcccatcttcttcggcgccctgcgctccgtacgctgcgcccgcggcaagaatgcttcagacatgcctgaaacaatcaccagccgggatgccgcccgcttccccatcatcgccagctgcacactcttggggctctacctctttttcaaaatattctcccaggagtacatcaacctcctgctgtccatgtatttcttcgtgctgggaatcctggccctgtcccacaccatcaagccctttatgaaataagttttttcagcccagctttccaaatcggacagtaccaagctgctcttcacacaagggttctggggaaaacaaggaaaaagatcatcaattatgaatttgacaccaagggacctgtgtgtgcctggggcctgagcagcatcgttggcgttctggtacctggctgaggaagcactgggattgccaacaacctttttgggcctgggccttctcccttaatgggagtagagctcctgcacctcaacaatgtcagcactgggctgcatcctgctgggcggactcttcatctacgatgtcttctgggtatttggcaccaatgtgatggtgacagtggccaagtccttcgaggcaccaatgaaaatttggtgtttccccagggatcttgctggagaaaggcctcgaagcaaacaactttgccatgctggggacttgggagatgtcgtcatttccaggggatcttcattggccttgctggctgcgcttttggacattcaggtttgaaaggaaggattacccacaccttacttcttacaccagctttgcaggccttacatctttcggcctggggctttaccatctttcatccatggcacatttttcaagcatgcttcagccttgccctcctatacctgggtccccggcttgcaatcggttttcctgtcctgggtgggcgctggcccaaggggaagaagtgacagagatgtttcagttatgaggagttcaaatcctaaggattccagcgggcagttgacagaaatccaaaggaggggaacagaggcattcagcattcgaaggggctggagaagtaaagagaaatgatgccagctggtgcccagagcctcctcagggccagaccagacagactggggctggggcccacacaggcgctgcaccggttagagggcacaagagggccaaggggnagctcccagaacagggcaagggggcagcaggatacctcccagcccaggcctctgttggcctctgtttccttctccctttctttggccctcctctgctcctccccacaccctgcaggcaaaagaaacccccagcttcccccctccccggggagcccaggtggggaaaagtgggtgataatttttagaattttgtattttggactgattttgccttcacatttaaaaacttcatcccaatggccaggggcgggccactgtaaaaaaaaaaaaa

SEQ ID NO: 110853 - DNA, 3894 bp, Homo sapiens
  misc_feature (1)...(3894): n = a,t,c or g
gataatggaatcggctagcccatgtgtaagacctacgtaaaccctggcttataggagagcatgcattctgttcctttcccaactcaatcctctcaaaataggatcaggaccatttcccatcaacccagcaagccccatatgacgtgctgatttagccagagtacacaaggattgtccccaaagcccagctctgtctgtctctccctgcgcacaggccatagacgaggatgcagaggaacccaacaacctggtggactattccatcacccatgcagagcccgccaacgtgttcgacatcaattcccacacgggggagatctggctcaagaattccatccgctccctggatgccctgcacaacatcacacctggtaagggactgcctatggtccctaggaggtgaaggccaaggaccggggctccccatccttcagcaccacagccttactcaagattgacatcacaagatgctgagaccctctcccggagccccatggctgccttcctgatacaagaccaaggacaaccccatgaaggccgtgggtgtgctggccggcaccatggccaccgtcgtggccatcactgtcctcatctccaccgccaccttctggcgcaacaagaagtctaacaaggtcctgccaatgcggcgggtgctccgcaagcggcccagccctgcgccccgcaccatccgcattgagtggctcaagtccaagagcaccaaagccgctaccaagttcatgctcaaagagaaacctcccaatgagaactgtaacaacaacagcccagaaagctctctgctcccgagagctccggctctccctccaccacccagcgtggcgcccagcactggcgcagcccagtggaccgtgcctaccgtctctggctctctcactccgcagccgacccaacccccgccaaaacccaaaactatgggaagccccgtccagtcaactctgatctctgagctcaagcaaaagtttgagaagaagagtgtgcacaacaaggcttacttctagtgtgtgccctatgaccccccatctttcctccgcccctgacccccaccaccctgctgctcggactatgctccccttcctctgctccttaaggtcactgacccctgttttgcacaatggtataatccccactgtcctcatctctaccgccaccttctggcgcaacaagaagttgcgctctgacagggctctagtcagggccttgggcaagacattgggctctaggatgcaattggcaaatacgtccccgttactcaaatccttggcactactacaatgccctccattcttcagggctgagaattgacgagaagccagctcacccatcccagacctcacagtccctcaggttctactgggatctcatcatcatccttagtcaagcagcagggccctggccacgtggagcaacactgactagaatctggatcctgacgcctgcagctgagagcaggagcaggaaaaggaggctcagcactgtctcaggctggaggtcagcgaacctcgtgggctgtaggaaagcaaatgtaggtaaggggagagcaaggatgcacagaaaacacactgactgtgggactgtgccaggatgcatttggaaagatagagcattctgtctgggcagagactgtggaccctggtatgcccacgtgggacagaggacacagaggtggaagattgatcttgccaagagtgagggcagatgtcttcagccaggactgtcctgagccgcaaaatgtcaaagctggagctatagaggtagccctaaaggcaactagaagagcatcagggctgctctctgaggagctgccccaccagccatccttgaagagacaattcagggcagttgatgaatatcagggctgagatgtggggagacttccgtttttatccagctcttttgctcacatcgcgtaaccttgggaaagctgattaaagtcgctgatcatcctcttcctcatctgtaaatgaagaaagtttgccctgtctacctcacatgcaggtctagggtgaggattgtttaaaatagtggtgatgagggctttaaccaagtgcaaagcggcatgaatgcaaagtatttttctgcagcccagttctgtgggtgcagctcttccagaaagtattaggagcctcacatctactctgccaagcgccccagcaggcactgtgctgggcttaggggctaccactggatgatggcattgccgtgactcacacacctctacttctgttcttccctcactccatccccgctaccgtcctggccagctaccgtcagagagaaccagagctccaagtctttaatttgccaagatgaagaaaatgagttctcaaggagggaatgctttgcttgaggccacacagcaggttggtagcaaagatcttgtcctagccagggcagcccttatcagcttgttgacaaccttccccaggacagaagtcatacaaggcctctggggttaatacaaataggttgtgccctgctttaaggaacctgctatcaggaaatctacatagtgtgcacagagagagaaaagtagaacagttctttgcatttggctctacttactaacaacccctctagaatacattggtgatttcatttaaagagattgtatgcatttgtggctttcctgatttctgagtctgtgtttggaggtgttactgagatgtgccagtgtccaggaatccttgctggggtttctacaagtccccaacggtgaacaagtattaagcaagaggtggactcgagcaatccagggagcccaggactgaggcaaattaagtactttccaagcctgtgtttcagggagagggactgtgctggatcatgcttgccctccacagggaattacagcatcctttacaggttgcatgcaattcaaccttttttgtaaatggaaaataaagtctgtttacccaaagggccatgctgatcccctgctccctgctttcatttatgtttgctgacctgtggagaccagtctttctgacacacagggaagctcaacttgcctcctggctgcttcagcaggtggatccattcttcgaccgggcagatgtgactctaaagaaggctgaaaatttttgtccaaattgccatgcagatatcttgaacagcaggacatttgcaggccttgtctactggacttttctcccaaacaggacaagcccaggcagggctgcatggagaggaatggaacctggagctagaattaattgcccactctcccaccctaccagtgcagcccggcaagggcaggaattgggaggcctagggtgggcatgaaagcttgggaagcactgtcgtctctcagacaggcgtcctaaagacctctaggctggaagcttgggcttgcaagtggatccgggaccgagggtggtctcttggacaaccccaggaacttggacccaaggcagagcccaatcttgcaaactggcccatggatggggaagtgcccggtagcccagcatgagccacactaggaaagaggaggagggtgcagccaaacttaaggcaccggcaagtgttgtcagcactggaggagaccccgcccagtggggtgaggccagccaagtccctgtgttacgaatggtgggccaaggggctgtctgctcggtcccagtaggacaggcagagctccaggctggcaccatggtaggcctccagggaaagagctgggaggcaggaatggcaacanctgggcaggcttgcccattcctggccctgagaatggagctgtagcctcatggacaataaatggatgtgacaccaaatactctgcagagtcattttccttctgcggctgagctcagatcttccaatcacatgaaataacaaagtcctttacagtttgacagccctaggtctgaattctggttc

SEQ ID NO: 110854 - DNA, 519 bp, Homo sapiens
  misc_feature (1)...(519): n = a,t,c or g
ccccgttgncaagcttccttgtgggtcccnagttacttgggaggctgtggtggggagggatcacttgagcccagggagactaaggctgcagtgagctgtgttcctgccattccactccagcctgggcaatagagtgagaccctgtctcgaaacaagcaaaagaactaaaactttggtgaaaaaaaaaattaaagatgatctaaataaatggtaagacattccacgttcatggattggaaagtataatattgttaagatggcagtactccacaaattggtctacggatgcaatgtaatccctttcaaatttacaatgtttttgttgaaattgacaaattgatcctaaaattaataataaattgcaaatggccccaaaatagccaaaacaatattgaataaaatacgaggactcatactttctcatttcaaacaatacaaaggtacaataaccaaaactgtggtattggcataaggattgtattgcggccgctgtagagtatccaacataacgtcggcggt

SEQ ID NO: 110855 - DNA, 381 bp, Homo sapiens
  misc_feature (1)...(381): n = a,t,c or g
aatacatgggacatggtttgagagcagcccagaggagtgctgggctgtggcctanaatacaccatgggccctgttcacactgcactgctcagcttagcacactagggtggcccagacaggggtccacagtgaggaagcaggacaagatggaccacaaaggcctgcagctgggagagtggctcctggctgtcagctgttgggacagggtggaggcaactcattctcatggagcccagccaggtccaggctagaaccatgtgcctctcggaagaggcctggggaactgctggcagtgtaacttcaggtgtaggggagccgggtctggcttaggaatggatgccctgggtgtgtgacagggatgtggcatggctgagagccaca

SEQ ID NO: 110856 - DNA, 2086 bp, Homo sapiens
cggaggtaggcttacgaggcctgtgtcgggtagaaagggtccttcctggaccgggaccctctgccacgaccatggaccgtaggaaaaagcctttggacgtcacggcctcctcgttggtagatcttaaggctgaactcttccgaaagcaagaagaattcaaacaagaaaaacttctaaaagattctggagtttttggaaaaccaaaaacaactaacaagaaaccaagtatctggagcaaacagaatgtaggcgtttcaaatccgagctgagaaggatgctgaacagaagattgaagaacaggcagactttagacaaagcaagggaaaaattggaagaaaaagccaaattatatgaaaaaatgactaaaggagactttatagatgaagaagtagaggatatgtaccttgtggatttcacacagaagatcatagacaagcgcaaagaaatggaggcatctggtgcccatagagattctcaaaaggcaggagaaagggacgacgatgaggaaaaccttcctgagggagagatccctcctccccaagaccccagtgaagaatgggtggattacgtggactctttggggccgttcccccggcgcctgtatgagaaagggatttgccccagatcctgcctggagatggataaaaatccttccaggggagacctttttattagtccctgcctaatgaaaaaacccctattatcttgaagatattgaggaaaagaactttcagcgccagcaattggggagggaaggaaggaaagagaggcccttgaagaggcccatggggcccgtacattatgaagacattcgggaaaattagggcccggcaacttggtgttgggtattttgcctttgcccgagacaaagagttgagaaacaagcagatgaaaaccttagagatgctgcgtgaacagacaacagatcagagaacaaaacgagaaaacataaaggaaaagcgaaaggctatctttagaggcaagacttgccaaacttcgacaaaaaaagatgagaaaatcaaaagaaggtggaacagaagaagaaaatagagatggagatgttattgggccctttgccaccggaaccaaaaggctgtgccaaccccaacgtcctgctgccccagagtagcaaagtagaagtcatttgtccaggagaagaaaggacaccaagccctgggagtgccacacatccgggagtgggaccgcggaaaagaattttcctttggatactggtcgaagaggcagtcagatctccgggctgagagagatcctgaggttgcccccgccgtcagattactttgtgggtcagaagagaactggtttttccagcagccaggcatggagcagacctgggccagcacagagtgacccagggcagtgccctgaccagagccacggacctagccctgaacatacgtcacccactcctgcccccgacaacccacccacaagcccccccacagttacctttccaaaactctggatgaccatgatttcccctattacaaacaagtgaacatggatctttccaaagcacgctgacttgggtttgtacctttgacagtgcccttttcctccccagagggagaaataactttaggaactgaattgtacctttgtcctgtcctttccctaggaggcacagacttcgggttggatttgtcagcaaggaggaaagttatggaaactttggccacttggctgttcattttattctaagtgggatagggacatacctccctggatttacatgtgagctgcgatagaatagaagtatttattctgtaaaattagacacttgagatgtgcttataaccctgtttcatatctactcccacgacttactcatatttaaggggtcttttccattccttttgcaaaaccgagcatgcaggggtctttatttcaaggggtcagcttccagatcaaccgatggaccataggtcacgaggaatttctccctgtctagcagtggaaaactggatgggaggcaaaatgctctgttctcccagaggacccgggagtgatcacctatgaaatgataagggagaccccggtgagctcttcgtatttcagaaagggagag

SEQ ID NO: 110857 - DNA, 780 bp, Homo sapiens
cggccgccgggcagcggtccagacccagtacttattatgaactgttgggggtgcatcctggtgccagcactgaggaagttaaacgagctttcttctccaagtccaaagagctgcacccagaccgggaccctgcgaacccaagcctgtacagtcgctttgtggagctgagctaggcataccgtgtgctcagccgtgagcagagccgtcgcagctatgatgaccagctacgctcaggtagtcctccaaagtttccaaggaaccacatccattgacaagtctgcccaccaaaacacacagcagctcctgaacaccccccaacgcacaagtactggtcccaagtttcacagccttgaggccacaggggaccccagttgaggcagcagcaacacaaacaaaacaaacaagtgctggggtactgccctcctcctcatgctggcgggacatgggcctgcactacattgccttcaggaaggtgaagcagatgcaccttaacttcatggatgaaaaggatcggatcatcacagccttctacaactgaacgccggggcacgggccagggccaacagatgcatccttcagcacgagcgacaacagctagggcagcggcagccgccaccatccgagccaacccaaggcgcccgagatccgtgccccggggcgccggcccctgaggggctcacctggatggggcctgcagtgcgtttcccgctttgcttccttccctggacggcccgctccccgaaacgcgcgcaataaagtgattcgcagaaaaaaaaaaaa

SEQ ID NO: 110858 - DNA, 363 bp, Homo sapiens
  misc_feature (1)...(363): n = a,t,c or g
aatacaggtccttgttgtgtgttgtgttgtgtccttgttgtccttgttgtgactgtccttgttgtgttgtcctggggcagtgcctgtgtggaatgcctcctgggccctgtggttctgtttgctgagtgcccctggcagggtagctgcatggttgcagcaggtgcccagacaggcaggctcagatagctctgatgggggatcagaccctgcttgtggccaaggacctattcttggtttgggacttttcttataagcttatatggcctcagaaagaagcaaggggaaaggctctccaagctggggaactnnnnnnnnnnnnnnnnnnnnnnnnnnnnnnnnnatgtgtgtacctttccctgtaaa

SEQ ID NO: 110859 - DNA, 382 bp, Homo sapiens
aatacacccttcctcctttccttccatctacttatccagccacccatccaactgtcagtttgtccctccctccctcacttccctcccttcttccttccctcaacccagtcactcaccaatcctgtacccactgattgttggtgaatagatattgaatatgtaggactctgacccacagcttggtccctgtgcagagagggagctcagagagcccacagggtgcttccctgattcagccccacctccctcaggtgggctcccctaccatcctggccccccaccccactgtgatctcacctgcccctgggtgtggagagccacaaagccatccttctggaaggaacctctcggatcctctccccttggggtcctccgcctttct

SEQ ID NO: 110860 - DNA, 1364 bp, Homo sapiens
ttttttttttttgagaggagtctcgctctgtcgcccaggcttgagtgcagtggcgcgatctcggctcactgcaagctctgtctcctgggttcatgccattctcctgcttcagcctcccgagtagtcccaggagtagctgggactacaggtgcccaccaccacacccagctaatttttttgtatttttagtagagatggggtttcaccatgttatccaggatggttttgatctcctgacctcgtgatccgcccgccttggcctcccaaaagtgctgggattataggcgtgagccaccgcccgggcaaatttttgtatttttagtagagatggggtttcaccgtgttggccaggatggtctcaatctgaccttgtgatctgcccacctcggcctcccaaagtgctaggattactggcgtgagccaccactcctagccttaatgcaatattcttaaatatacaaaggtagatttgttatgaaaattgctttggggctctaataacctaccttttaagaatgagaaactgctgggcttaagggagttcagtatgaatcaagattgaaccattcaaatgtggctgtgatttctgcatatatcatagatgggatccttctgagaatactggaatagggaattaggacaccaagccaattcagctgtgaaccttattcttgtacttttctttcttgctgggtaattttatgggagcaggttaaggaaggctggctctgtgttagggataaactgtattaccaataatgttggacaacctgttaattgaggtgttgcatttttacttcttgtatcttttccttcctaccttgatgccagtaaactataaagggatctttatagtttgaaatggtatttggaataacttccagtatacctttagttctacttttttatttgactcacaaccattcttaggtctcaagtattcccatgtgttttaaaagcctgaagtcagtgagatgaaattcaacatcaagaatttgaagtaacttgtaaggaaaaataatataaagataccattggggcagtggctcacggctgtaatctcaggcactttgggaggctgaggtgggaaggatcacttggaaggccaggagtttgaggaccagcctgtgccaacacaggcaaggaccccgtcttcttacaaaaacttaaaaaattagctggctgtggtgttgctcacccatagttccagctactcgggaagctgaggcagtaagatcacttgagcccaggaggccgatgctgcagtgaactgtgattgttccactacagtccagctttgtgttttatgttctgagaacgattaccagccatctcaaattctgtggttgtcaaagctcccctgg

SEQ ID NO: 110861 - DNA, 629 bp, Homo sapiens
tccactgctgggacccccttccagactgcatgcccagcaggccagagccgtagatcagacggaggtaattgtcaaagccttcctggcgctgctgccaggagggtgggggctgggctgctgggaccactagccccagcctcaactgctgaaggtctcggtcccgggccactatggcgtccaagtcctgagtcagggttcagggatcagcctgctcttccttgagccttgctatgtgctgcccgggcaaccatggggatcccaggcctgccccagggctgacggctggggcctgagccggggcagggcgggctaaggaggacccaccccacctccttcggcaccaggtgctgagatgttgccctccgacgatggatgagagacaaggcctcgctgcaaacagggacaggcacaggtgggatgctgggtggcatgccagtgggctggggcagaggctgggacaaggaccaaccccaaacgggtgtgccagggctcaggcaggcttgtatcaactccagagggccccacaccgccaggcccccacccagagtgggaaaggagggcctccaggagggctgagcaggcctgcatgggacctgaggctggctgccccatggaggttggtgacgaaa

SEQ ID NO: 110862 - DNA, 1252 bp, Homo sapiens
gttactgcaggagtgcctaaagggcactgcccaagacgtgggacatcctcagcaatagcatcatgccctccttacggctctccgcccagagccgagtgcgcgttaagagcggggtcaacagttaccacctgaaggcggtcttgttgcacctcatactcctccggcaggccgccgactggaaggcggggcagctggacgctcgtctgcactagttgctgtgcttcctggagaagagcttgctccagaagaagctccacctcttcttcatcggcaaccgcaaggtgcctgaggccatgggactccctgaggccgtgctcagggccgagcccctcaacctcttccggcccttcgtcctgcagcgaagcctttaccgtaagacactggactccttctatgagatgctcaagaatgccccaacgctcattagcgagtattccctacatgtcccctcagaccagcctaccccaaaaagctgacgtcttttacagaatgtgggatcctcgagctaagatgagggcatccctcacgttcacacccctggtggcatctgccagccctgttctggggacaaggcgggctttcgtgggagccgtgctcagcctgccaggaagccaagccctacagtgcagaggaaacagaatttcaacgggaagctggtttgcttcataccattgggatctgctggtaaagctgttatttgggtttagggactgatcccttgcaagttacttctggatcaccatgaatggccaagatggtggcagaacacgctgtggaccctgagttagagacaatgcaaatgttggattgggtgtaattctttttgaatcccagatccagtctgtacttgaatatgagcagaggatctacaagaatgctgacagggaaccgtgttaagacccagcacccctattcccaggagcttctggcctgaccatctgcagccaaagcactaacagggacagatatgggaatgtccacctttgatccgcatcctgcacaatagtggtcccaccatggctgccacttttttatactatttggagaaaagaccttgtataaattcgaggcccgaatgactaacgtctctgtcacacggaaatgggtacttggtggcatagagaaacacaattagccactttttcagctacacttctcactcagctgcttctaaagcagaaagcagtggggctcttggtgtttcatgctgccttatttatattaaaggaagaattaaatcttgaaaaaaaaa

SEQ ID NO: 110863 - DNA, 416 bp, Homo sapiens
tttaaggcagggtctcactctgttgccaaggttggagtagagtggtacaagcatggatcactgcagcctcaacctcttcatgctcaagagatccttccacctcagcctcctgagtagctgggaccacaggcatgtgccaccacaattggctaatttttgtattttttgtagagagagggttttgccatgttgcccagcctggtttcaaactcctgggctcaagcaattcacccacctcagccttccaaagcactgggattacaggtgtgagccactgcacccggcctagtaatatattttaatgaacagatattcttcattgtagcatagataaattaacctttttatgattcgtgctttttgtatcctttccctaacataggaaattattcattggccccttcaaacactgtcat

SEQ ID NO: 110864 - DNA, 478 bp, Homo sapiens
aaaattccaggcgcccaaaagaataagctccagggaatttcacacctatttattttactatcctgtccaaatgtgtacctctcctacccgtcatctttggttagtccattttgttcccttctgtcaatccaaaagtgtggaacgttttttaaacccacaatagccacacatcacatcccagtcaaaataaccttcagagacatcctccattttccttcatccgcctcaatattccattagcccagccagcctcaggggcctcaaacctattatctgtgagtttttacaagctcagattctcaaacctgttaactctccccacaacacccttgtcctggctgtcaaaaaaacagacagattttaccacttggtccaggatctccatgtcatttaccaagtggaggtaccaacctatccagtggcccccaacccctatactctactctaccatattcccccatgttgcacacctgtattt

SEQ ID NO: 110865 - DNA, 511 bp, Homo sapiens
tagttactcagttttatcagaatattcttgaccctcctcagttcttctatctctattgtgagagtcaatggaatcccctctaggcacatactggtcccctattatgcaacctattcaatacccccttcatccactccttcttagttatcccttagtgtcctacccctatcttggggtggaatatactgagtaaattccaggcccccatatgactagcctcctgcaattctaccccttttattttactctgctgtccagatgcttccctctcctccccctcatctttgctatccactctgttaccttctgtcaatccagaagtgtggaacgtttctaaacccacaatagccacacatcgcatcccagtcaaaataaccttccaagactcctccattttccttcatcagcctcaatattcccttagcccagccagcctcaggggcctcaaacctattataagtgagattttcaagctcagattctcaaacctgttaactctccccactgtatt

SEQ ID NO: 110866 - DNA, 503 bp, Homo sapiens
aatacaaattctgaagacatctttaaccttgattttccctgaaataacaaatgcataaaaccatgtgaacattctgtggttcgctgaagcaaagtcacctgcagcagaggattttaaagcgctcacagcacctgcatttgttccctaagagtggggatggggaagctgcacctgcatttgtgcctaaagagtggggatggggaagctgcacctgcatttgtgcctaaagagtggggatggggaagctgcacctgcatttgtgccctaagaggggggatggggaaactgcgcctgcatttgtgccctaagagtggggatggggaagctgcacctgcatttgtgccctaggagtggggatgggaaagctgcacctgcatttgtgccctaagagtggggatgggaaagctgcacctgcatttgtgcctaaagagtggggatggggaagctgcacctgcatttgtgccctatgagtggggatggggaagctgcacctgcatttgtgg

SEQ ID NO: 110867 - DNA, 585 bp, Homo sapiens
  misc_feature (1)...(585): n = a,t,c or g
ggcacgagggaggatgaggaggacaaggaggaagatgaggaggaagatgtccccggccaggccaaggacgagctgtagagaggcctgcctccagggctggactgaggcctgagcgctcctgccgcaaagcttgccgcgccaaataatgtctctgtgagactcgagaactttcatttttttccaggctggttcggatttggggtggattttggttttgttcccctcctccactnnnanntggttctcatctttctagatcaacatcttttcttgcctctgtccccttctctcatctcttagctcaactccaacctggggggcagtggtgtggagaacgcacaggcctgagatttcatctgctctccttcctggagcccagaggagggcagcagaagggggtggtgtctccaaccccccagcactgaggaagaacggggctcttctcatttcacccctccctttctcccctgcccccaggactgggccacttctgggtggggcagtgggtcccagattggctcacactgagaatgtaagaactacaaacaaaatttctattaaattaaattttgtgtctccaaaaaa

SEQ ID NO: 110868 - DNA, 845 bp, Homo sapiens
  misc_feature (1)...(845): n = a,t,c or g
atgtcggccggtgcccgccgcaaccaacggcagatgtttcccagcaacgccccgagaccccgggccacgcatgcgccgcgcatgcgcgtgggggaggtcaaagggcgcggggcggtgcctgcgaagagccacacggcgcgacaagatggcgaaaaaggagagcatcttggacttgtccaaagtacatcgaccaagactatccgggtaaagttccagggaggccgcaaaagccagtggaatcttgaagggcttcgaacccaacctcctccaacttggtgctgaccgtcaccatttagtacatgcgagaccctgacgaccagtacaagctcacggaggacatcccggcagcttgggtctcgtggtgttccggggcaacgtccttggtgctaaatctgcccgcaggacggcatggaggccatcccccaaccccttcatccagcagcaggacgcctagcctggccgggggcgcggagggtgcaaggcaggcccgagcaagctcggtttcccgcggacttggctgctgctcccaccgcagtaccgcctcctggaacggacgcatttctcctttttgtaaaaggtttgaatttttgttttccttaataaaattgcaaacctcatnnnnnnnnnnnnnnnnnnnnnnnnggggggggcccttttaaaaaaacccttgggggggcccaaatttacccgggggcgggaaaggaaaaatttttttctttatgggggggcaaaaaaaaacccccctggggatttttggaaaaaaacctttttttggggggggaaaaaaatgggccccccccccccccaaaattaaacgcctcgggggaaaaaaaaaatttttaggt

SEQ ID NO: 110869 - DNA, 2079 bp, Homo sapiens
ggcccaggcaccggtgggccccggagcgagcctgccccgccgggactccgcgtctgtgcgtcagccccgcccgttgtcctggcaacaacccgttgcccgggcaaccagctttgctcttaccccgcttgagaggagcccggctgttgctctgggcaacgcggtctgctggttcccacgtctgccttcgcccgcttccggttcagaccctgcggaggggcgaggacgaggcagaagtcagcgggatgcctgtggggccgtggaggaagagggtatccctttaggatggaactaggtcctggacaccccctctcaagtgcggggaggctgatactacaactcccagcatgactcgcggtggctgtccggtttctgcgcggctgttcgcgcaaaggcctcatgggagttggagttctttgttgtgcgtggggctcaaaggacgtctggggtgggaatgggggactagggtgcttgagtgtctctgcagaaaagactccaggaccccgccaccatgttcccggagcccccaaccccggggcctccatcgcccgacacgcctcccgactccagtcgcatcagccacggcccagtgcccccctgggccctggccaccatcgtgctggtctcaggcctcctcatcttcagctgctgtttctgtctctaccggaagagctgtcggaggcggacaggcaagaagagccaggcccaagcccaggtccaccttcaggaagtgaaggggctgggccagagttacatagacaaggtgcagccagaagtagaggagctggagccagcaccatccgggccagggcagcaggtggcagacaagcatgagctaggacgactgcagtactccctggattatgacttccagagtggccagctgctggctggggcatttctgcaaggcaatgggattgggcagccttggattcttggtggctcctcggcacccctatgtgcgggtctaccttgcttgccggacaaacggagggcggtacgagcaccaaggttgcatcggcaagacgctgtaaccctcactttggggagaccttcgccttcaaggtcccctacgtggagctggggggcagggtgctggtcatggcggttgttacgacttcgaccgcttctctcgcaaatgaacgcccatcggggaggtgcgggtcccctatgagcttccgtgggacctgggggcggcccattgccaggcctggcgggagctgcaggcggctccgcgggaggagcaggagaagccttggggacatctgcttctccctccgctatgtccccacggccgggaagctcaccgtcatcgtccctggaggctaaaaacctgaagaagatggacgtaggaggactgtcagatccatacgtcaaggtccacctgctgcagggcggcaaaaaggtgcggaagaagaaaaccaccattaagaagaacactctgaacccctattacaacgaagctttcagcttcgaggtgccctgtgaccaagtccagaaggtgcaggtggagctgcccgtgctggactacgacaagctgggcaagaacgaggccatcgggagggtggccgtgggggcggccgccggcggggctggcctgcggcactgggcggacatgctggccaacccgcggcggcccattgcccagtggcactcgctgcggcccccggaccgagtgaggctgctgcctgcgccctgactcccaccccaagcccccggccaagcctggactctagcccctgaccccagactcccgagaccggccaaagccaagccagccccacccttaagcttcctctgacggttaccctccccccaccttccaccccaaccatctgaaccattcctgtcttctcacccccaacgatgccaatcacgacaactttccagcacactcccccgaccctcgcggacacacccagatgccccagggaccccgggaagggaaggcagcctggtttctcctgcccccgggtcctgccccctgctttgacaatcagccatcctcgtctgctctcctctctcttccaacacagcccatccctgcactgctcctgaggccaaataaatattcagcagctc

SEQ ID NO: 110870 - DNA, 851 bp, Homo sapiens
  misc_feature (1)...(851): n = a,t,c or g
gttgtggcgtcagaaccgccgtcgctcgctcccttctcggcagtggtacctgttcccggtgtccctgaggacgtgcgggccaggtacggccccgaaagtaggaagcggagggggagcaggtttgcggggccaagttttgcggcgacgcacctcacgtcgagaatcgggaggaggagactgcaaggataggcccaggagtaatggagtccaaagaggaacgagcgttaaacaatctcatcgtggaaaatgtcaaccaggaaaatgatgaaaaagatgaaaaaggagcaagttgctaataaagggggagccctttggccctacctttgaatgttagtgaatactgtgtgcctagaaganacccgtaggcgggttccgcgttaggcagcccattcctgcagttattagatgggaccataatgcattaggcttggagaagcacccgccaaggttggaagagggagaatttggaagggattggggaggaggtgagacagctgattggaaaagcttgagggaaaagcagttgaagtcataattttgcgggcagtcagcactgatcccccctcacccatgacccatcacgatgagttttgcccttatgccctgaaacctgatggttaccattctgatgttaatagggagacccctgcttcctaaacttacacatttgtggtgtacctttgtcgtaaacgttttgatgttacctatttcttgtgggtctcctattaccagcttctaaatgaatgttgtttttgacccagtttgtaagtttctgtcagcaggagagttttacctattgcatggaaagatgctcattatatattgtgaagttaataaaacagtttaaaaag

SEQ ID NO: 110871 - DNA, 715 bp, Homo sapiens
  misc_feature (1)...(715): n = a,t,c or g
ttttttttttgagacagggtcttgctctgttgcccaggctggagtgcagtggtgcaatcttggctcactgcaacctccacctcctgggttcaggtgattctcttgcctcagccttctaagtagctgggattacaggtgcctgccacgagacacccagctaatttttgtatttttagtagtaaacggggtttncaaccatgttggcccaggctggtctcaaactcctgacctcaaatgatccgcccaacttggcctcccaaagtgctgggattacaaacgtgagccactgcgcccaagcacctcctctcttttctaccacttcctgattctgtttcctccatctctcaccactttcacgtctttcaactctttttatctttttgttttataaaaaaataaatttgcccatgttcttggagagcctgctgtctcctaccccaattggtcagatttgggttctccccaagaatccagtttagatggagttgaggataatggctctcaaatgaggggcctgaagttgtgtgtcaaaccaaagtatgttgaaaactcttagaaaatacgcaattaataaattgcaaaccccctcactctcccgcccctaccttcccaccctcccccactccctatccaaatgtagaatcaactgtaccttgccccccacccccaccccagggcagggcttgtctcagtcccctcggagtccactgattcc

SEQ ID NO: 110872 - DNA, 1029 bp, Homo sapiens
gtgtttttttgagagagagtcctgctctgtcgcccaggctggagtgcagtggtgcaatctcggctcactgcaacctccgcctcccaggttcaagcagttctcctgcctcagcctcctgagtagctgggattacaggcgcgtgccaccacacccggctaacttttgtatttttagtagagacggggtttcaccatgttggccaggatggtctcgactgcctgacctcgtgatccatccgcctcagcctcccaaagtgctgggattacaggcgtgagccaccatgcccggcctgtgtatcttctttatgtttaccctaccaagagcagacctgagcattttgctggccgtagaggtatataaaagaactctaagcttaggcatgcagaataggcactggatgaatgtagtgaggctattaggagtcttgttggctccctgatgtccttatcatgtcttcttcgcagactgtggatgcacacaagacagctaaaaccttgggcatcatttgaaaatgtttggctgcctgctacaatctcaggagagagaatccttcatacttatattggactggatatattgtcaatcaaattcttttttaaaaaaagatgcttcactttaggaaataagacaccagaccagcaacatcaagtaggtatggaatacttgctggtgaaacacttaaaactaggaaacttctaaatcttctaaaggtgcttaagagaatggagaagttaatcaacaggaatccaagtgttgtggctgtaaagcaatacgacataagatccctagtaaaaagcagaacctaagagttggttttggaaagaacttgggccaagaacagcagaaaaagctaaatgagctacttacgtcgatgtgttttaatactggtgcattagcagtatcttatggaagttgtgaacactaagaaccaatttcaaaaaatataaaaatgtttatagggcatattaaaataaaaacagcttaaatgacctctataaataacctaggcccagcacagtgacacacgcc

SEQ ID NO: 110873 - DNA, 915 bp, Homo sapiens
ttttttttttctggaggcagagtctccctttgtcaccaggctggagtgcagtggtgccatctcggctcactgcagcactgtctcggctcactgcagcctccggcctcccgtattcaagcgattctcctgtctcagcctcctgagtagctgggactacaggtgtgcaccaccacgcccggctaatttttgtatttttagtagagacggggtttcactgtgttggccaggatggtctcaatctcgacctcgtgatccagcccaccttgggcctccccaaagtgttggggattacaggcgtgactcaccatgcccagccactttagtttttttttattccccaccttttctatccccatggaaacactctttttttatcttcccctgaaaccatattgatggggataaatgggggcttgggggctgggcccccgctgggtcacctcaaaaaggagtattccccctgggcccgagaagggaaagttttggcccccaaatagatgaagcctgcctgagccatccaacaaggtgaacatttttcctgcctgccccatttgtgtccctggagaccggtgggtacccctgaaaggcaaaaggcgcagcttgccggaaaggacagcaattgaacaagtccacttgccgaacctggattccctggaatcaatggaattaaccacatgggctaccttctattcctctgtttcccaaatgggtgggtgggcacttatcctgaagtccgtcaaatgatttccctttgaaaactactttaattttactaaatttaaactatttttgtactgatgtaggccctgaaggtaagttcatggaaaatgctgccgcactcattcccatgggaataaatggttggaaagctgatcttttttgatataaaatgttgaatgataaaaaaaaaaaaaa

SEQ ID NO: 110874 - DNA, 1421 bp, Homo sapiens
attcggcacaaaggggactacaggcatgtgcgactatgcccagctaatttttgtacttttagtagagacagggtttcaccacattggtcaggctggtcttaaaatgctggcgtcaagtgatctgcctgcctccgcctcacaaagcactgggattacaggcatgaatctggccttacgtaatatattttcttaatggctgcataatatcacatcaaataggcatttttcaaacctctttccttattaaacatgtagactatatccattttttactaaaataaataacatttcagataatatctttgcactgataatgttgccaagccatttctaaagtgaccttatcaatttaattaccattggatgagggtgttgctttcatcgcaccattgtagattgtcttttttatttcaatttgcgtttatttataactggttggcaaagggtacacagaacacacggctccttcaacttatctttggattaaacccaagcaaggatacaaaaagttggacgacattgagtagagtcatggtatacggtgctgaccctacagtatcagtgggaaaagataaggaaaatgtcactactcacctatgttatggcaaaacagttagggtgtgctgggggctgggatactggctcttttacttggaggcattggttggatttaaagtttagggtaccatcccaggctgggtctagagaagtctttgggagttaaccatgctctttttgttaaagaagagagtaatgtgtttatcctgggctcatagtccgtcacccgaaaataggaaaatgccatccataggtaaaatgctgacctattaggaaaaaaattgaactcttacttttattagcctagttaaaaatgctcttacctgagtagtttaaaaggcaattcatggaagcctggaagcttaaagagcactctggatggttttgggcataatagctggcattttcccagaccttgaccttttggcccccaacccacaagttgctcccaagcccccacccagcttggacccaaaggaaaggccccagtttctcccttcttgttccctttccccacaacctccctggctcccaaaactatggaaattaatttggaccatatttaacacagctggactccttccagtttacttaagggtaggaaaggatggagttttacaacaggtggaaaataggtgctttggggcgaactgtattccttttaaacagatcccaaactaattttacatttaaaaaaaaagttaaaactaaaacttctttttactggctggatatgtttcctgtattctagaaaaatttttacactttcacattatttttgtacactttccccatgttaagggatgatggcttttataaaatgtgtattcattaaatgttactttaaaaataaaaaaaaaaaa

SEQ ID NO: 110875 - DNA, 411 bp, Homo sapiens
cgcagcatgaccatgatacgcccatgcttgcccgaatcactgatttttaaaagtctactgagaagcactaactgacttcctcactctaacatcagaaagccatcgggaagcctggactaacttactgctattgcttctaacgtaaagatctaaagacaatgtgacattagccttacagctcatgcatcattctactaccctctcctgtgtgaaattgtgcaccgcgacttgattcctgaacttcgtgctgttcttagaagattttttctgcgaatcggagtagtttttcagatatcacaaccacctgaacaggaacttggaataaacaagcaatgatgggaacttaatatttttgttggcatttacatccctctgctctttaaaaggacgctggagctgaggtttcctacc

SEQ ID NO: 110876 - DNA, 468 bp, Homo sapiens
ctgttcagagaagcattgaagacgatggcgcggagcgccccagtctcccggacgctccggagccagtctggtgtcaggttttcccttctgaccactcgctgactccctcctcttttcttcctcggttcgcagagggaccgactctggggatgggcacccccagcgcccctctcttggttttcctggcacctctgcttctcggctgcgctaggcagaaaatccgcccacgggccaggtctgcaagccccaatcgggggctccggggggttagtacctccccatgcccccaggcccctgccgcatccttgcaggttcgtgaggaggacgggctgcctccctctcctacagtcctggcttccctctcagcctagccctcttctgccactgggctgcgcgcgggggactccggtcctcgctgcagcaaagatttcgccctcgtgcccagactggagtatgatggtcatacca

SEQ ID NO: 110877 - DNA, 919 bp, Homo sapiens
  misc_feature (1)...(919): n = a,t,c or g
cgagccgctcagtctccctgctctccgtggtcccggctcgcgtgtagcggcggcggcggcgtcatccgtgaggaggcgcgcggggccatgacgtcagcgtccacaaaggtcggagagatcttctcggcggccggcgccgccttcacgaagctcggggagctgacgatgcagctgcatcccgtggccgactcttctcctgcgggtgcgaagtggacggagacggaaatagagatgctgagggctgctgtgaagcgatttggggacgatcttaatcacatcagctgtgtcatcaaggaacggacagtggcccagataaaggccactgttgaaacgcaaggtatattgaagatttttgggcatccccctttccagcttgagtcacccaagaaagggcccaagaaggtgggcatctggtgtttttgttcacctcctccagctggcccctcctcccaagcagctcccagtgttccctgagggccgggggtccccccccataaaagaaacagaaaggctgatgtgacacttcaggtgctcttgaacgacctccgatggccaacagtgacgtgggtggatattgaaagggcttaggagaaactccctccagcttaagaaattcaactttcggaccaggacagcctgacccctggattctggccttctcatgacctctgctgatcctcctctccgtctcctgctgagccttcccacctctgacctctcactgttcatgccggacctgtggatctccctgggactccgagcaagngcctgcacgagagaggggctgaaagggctgctgggggctgccaacctcgctattcccggcataagcatctgcccccaacccctttgaccttcatctgatggacatttttatacagaaaacaataaagatttccctctcagcaaaaaaaaaaaa

SEQ ID NO: 110878 - DNA, 1708 bp, Homo sapiens
aagctcctgacctcaagtgacctacccacccttggcctcccacagtgctggaagccactgcacctggctcagaatacttttttttttgagatgcagtcttgctctcatcacgcaggctggagtgcagtggcgtatctcggctcactgcgacctccacctcccgagttcaagcgattctccttcctcagtcccccaagtagcttggattataggtgtgcgccaccacgtacagctaatttttgtatttttagtagagatggggtttcgccatgttgaccaggctggtctcaaaacgcctgacctcaggtgatccacccacctcggccccacaaagtgctaggattacaggtgtgagccaccatgcccggcccagaatactttttaaaagaagagcaggttagaggaaagaaaaaaattgatgctgaatgtggtgatgaaagcatgtttctaaaatgggaagcagatgcttaaagaggaaagactaatctgggattttgccccatttctctggtttttcactcctatatttaattctcacaatcgtgtcgtcacatagtgcaaaaaacaaaattcttgtaaagtccccagggagttttatggcttggggtgaaagttttagcctgagtattttcttcctcttaaaaaaggtggggaaatgaggacattgagggaattaacatataaatgtctgctatggggtttaaggaggaactgggcgtatttggaatgcttcttacactaacactgtctcattgtaaaatataaaaccccttactctaactacatttttattcctcctggtagtgtggtatccagggcaacatatcacttctgctatgtaattctaaggaattctcatttctaggagtacctgaggccaaacaaatacacaacgggaaggctggcagctgttatcatcactaggcaattttgctccatccattatttactacccttggaacccagggttttcccgcccatgcttttggaaggcaaaaatcagtctcctttgcatgaaaaagagccttagatttttaaacatgttagttaccagaatgctaaaatacccagttggattacccaaaattattttggaaatcctatcccataaatggaagtcctacaacaaacaccataaaacagattacacctaagagctgagaaattcaaaggaactgaagattctgagagataaactgttcaagtcttagcaatgatactgcacttctctttgacaggttctgggcttaagttagaggccctactggttccaaaccatattcccgctgactttgcaagtaaaataaatttgattctgaaataggaaacaaaaaaaggagaaataaccgaatagtagaagaaaaactgtttgtaggaagacgattccagatggaatgatgtggacattgagttacccatgtcaataaaatactataaaccaaacttaaaatttgtgaaaataaggaagttggtaccttttgttgttacagtgtataaaaacaatttcggaactgctgttgcaaaaagacatatatagttttgcttccttctggtgttaagctgtttatatttcagtttcagttttaacttctaagttgccttgtaattgggactgtgtttcagcatcacaaaaaccaaatatttattatggatgcatctgtatcagcaattaaaaaataaacaagtaaaagtgatactgtaaaaaaaa

SEQ ID NO: 110879 - DNA, 1313 bp, Homo sapiens
  misc_feature (1)...(1313): n = a,t,c or g
gaggggacgtcgtcgtagagggccggagcgggcgggcggcgacggacccggctcccgcgcaggacggagccgtggctcaggtcggcccctccccaacaccaccccgggcctccgccccttcctgggcctctcggtggagcagggacccgaaccggtgcccatccagtccggtgccatctgaagcccccttcccagaaaatgagccacagagcaagctgaccccagcgacacagccccccagccctactgtatttccgttcctatcaaaaaatggatgactcggagacaggtttcaatctgaaagtcgtcctggtcagtttcaagcagtgtctcgatgagaaggaagaggtcttgctggacccctacattgccagctggaagggcctggtcaggtttctgaacagcctgggcaccatcttctcattcatctccaaggacgtggtctccaagctgcggatcatggagcgcctcaggggcggcccgcagagcgagcactaccgcagcctgcaggccatggtggcccacgagctgagcaaccggctggtggacctggagcgccgctcccaccacccggagtctggctgccggacggtgctgcgcctgcaccgcgccctgcactggctgcagctgttcctgggagggcctgcgtaccagcccccnaggacgcacgcacctccgcgctctgcgccgactcctacaacgcctcgctggccgcctaccacccctgggtcgtgcgccgtgccgtcaccgtggccttctgcacgctgcccacacgcgaggtcttcctggaggccatgaacgtggggcccccggagcaggccgtgcagatgctaggcgaggccctccccttcatccagcgtgtctacaacgtctcccagaagctctacgccgaacactccctgctggacctgccctagaggcgggaagccagggccgcaccggctttcctgctgcagatctgggctgcggtggccagggccgtgagtcccgtggcagagccttctgggcgctgcgggaacaggagatcctctgtcgcccctgtgagctgagctggttaggaaccacagactgtgacagagaaggtggcgaccagcccagaagaggcccaccctctcggtccggaacaagacgcctcagccacggctccccctcggcctattacacgcgtgcgcagccaggcctcgccagggtgcggtgcagagcaaagcaggcaggggtgggggctgggcccgcaagagcccgaaaggtcgccaccccctagcctgtggggtgcatctgcgaaccagggtgaagtcacaggtcgccggggtgtg

SEQ ID NO: 110880 - DNA, 739 bp, Homo sapiens
tcacctgagttcaggagttcaagaccagcttggccaacatggcgaaacccgtctctactaaagaatacaaaaattagccaggtgttgtggcacatgcctgtactcccagctactcaggaggctgaggcagaagaatcatttgaaccccggaggtggaggttgcagtgagccgacattgtgccgcttcattccagcctgggcaacagagtgaaactctttgtctcaaaagtaaaaaaataataatgtttaaaaatatttcaatgtggagacaagcttcaaaatgaaattagacacattcccattacccaggtaaaagaaggggaagcctgactttgatagtagtattcaggaaaaaagagttggcagttttatttggccaaattccaatatccagctcatggtacagcacaccgggggagggggacgggaggcgagaactaagggcttttttaaggaatgtgtttgatgggaagtatgtgcctagatcaaaagacttaatccccccgggactccagtgtaagatcaattactgttggaatattgtgttcctttctagatatcacattttaagcagactttggccaagtagtacagtgtttgcaggagcagtaacaagatggtgataactttgaaaatacttctcaaaagaaaaataaaaaagaattagggaagttcagtctggagataattcagaaatacagatgataattgttttcaaattcttgaaggaatggggaga

SEQ ID NO: 110881 - DNA, 933 bp, Homo sapiens
ctccagtcggactttctattgaagaagtggagaggctcaacacacctcgccctagaaacccaagaattttcagtgcagaccatgggaggtcttcttcagaggaggactgcagaaggccactgtctagaacaaggaatccagcggatggcattccagctccagaatcctcttctgatagtgactcccatgaatctttcacttgctcagaaatggaatatgacagggagaagccaatggtatatacttccagaatgcccaaattatctcaagtcaatgaatctgatgcagatgatgaagataattatggagccagactgaagcctcgaaggtaccacggtcgcagggccgagggaggacctgtgggcacccaggcagctagcaccaggcactgctgacaacacactgcccatgaagctagggcagcaagcagggactttcaactgggaccaccttttgatttggggccctggctttggccattatgtagatgtttttaaagcatgtggcatctcttccagaaaaagcagcagcaaatgaagaaggcaaagctgggacaactaaaccagtccccaaagatggggaagcagaacagtatgtgtgaagtttatgtactgggcactataaaatataaaaacaagaaataatacttcaaaccattgttaaagttgctgactaggttggggtcacatttggaaaaacagggccagtatgggactagtgggtgggaggggaaaacttttaaaaaataattaaccacattgctgctgaaacagacttcaccaacaactcttaatttaaacatgtgtggttgaatttatttccctgcatgcattgtgttttgtaactagttatgtggcatgcagcatttggaaaatttttcttatttaccagtgtttgatttgtgatttttaaaaattgatacctttaccattg

SEQ ID NO: 110882 - DNA, 829 bp, Homo sapiens
  misc_feature (1)...(829): n = a,t,c or g
ttttttttttttttaaaattaacagacatcaactggtataaatacactgtctaaagcatttaatggtctttctttaacacagccaactcccccgggtttgaaacaagtgttaaattctctcttgcttgtggcaaaaagaagctgtcaagtccaacactgaaaaattggtaccatttcctggccagtaagcccaaaaaaaaaggggctaaatttttttatggttttatttatttacctgtgttctcatgctgtgtttttcttttctctgtctctccctcctgctcgtgtctgcccaggggctggattgttgtgacattgggccgtatgctgggatgcccaaccaggattcgggagggatcatgggctgcggccaaaacccaaggcacggactgggacgagggtcctactttccggggcgttacatggattcctcctcccctttttcgggaggacgtttttctacctcagactcgggtcatcaacccgctcctgtacacgggtgtcctcgcagcagtttcgccggggtgttcgtggcagggtgctgtgctggccgcctgtcgctgcaacacgccaaccacgagaagcgcctgccgcgtacatgcgcactccaccaccgacagcgcccgctatgtgcagcgcccgttgctcttcgcgtaccggcgccagtcctctggcagagagaactgagaagatattattaagcacttactcgagcgaggccgagccccagtcctaagtccagccattgagtcctcagtcactaataccccactcatgcgcgaaaccagccaattctgctgcagagaatggttttcangagcatgaagta

SEQ ID NO: 110883 - DNA, 1537 bp, Homo sapiens
  misc_feature (1)...(1537): n = a,t,c or g
cctcctccctcctccctcttcttcctccttcctccctcctnctccccnctttttaaaaaagggggtctctctctggttgccccaggcctagagtgcaatggccaaaaccctagctcaactgcaaccctcaaaactcccgggcctcaaatgaaccttcccagcctcagcctgctgaagtaaactgggacccacacatgtgcaccactgtgccctaatttttttgtttttttaacttatttaatagaaatgaggtctcactatgttgcccaggctggtctcatacttctggcctcaagtgttcctcctctttggcctcccaaagcactgggattacaggtgtgagccaccatgctttggcatggtggagtatgcagtaggagagcaggggtcggtggtagtgtctccatatgtactctcactaaaactggtgtgggcagatactggatgcctacttatttaggggcatctaaattcctgtgctaaattacgaaaatagaggcagctcttgaaaggagtgatggcatgaaggagagatgcttggaccaaccaccacacaacccttataaataattgataaccttgggttttgatgccacgtcctcttccgacagttgttggttgaaatgacacatgattccaggtgagcttttccagataaattgccctgggaacttcagactttgtcaggtgaatcgatgtggaatttcagaatgggctggaatgtctgagatgggcatgtccgatattccccacactgagctgaatatcggacatgcccatctcagtgtggggaaactggtggccagggctggttgcaagctgagttgtaggggtggacagttcaccaacagtgtataagcaaggcgttcccttctttgcattctcgccaagaggtcaacgtttttctgcaggccactgcgtgctgactctctcaccaagcaggagcgggcccctcccctcacgcggaacgctggccacggacagccccgggaaggtccaggctgagcgtcctttcctcttgtgcacccacggagggtgctcccattggctttctcagatagcaccatctcagggtccagctggccatggcctggattaagtttaaaatgctgggccagtccccacttccgtatatatgactttttacaagtttgacacttgaagcttttgggcctcagggagcagcttgataagtcaaagagcgcctgcctctccctgtgatcgtcttccgccctgacttctgaatcatcatcagaatctggcagatgaccgtcggccaaatcatccctttttatgaactcagctttagctttatacttggcaggtagagatacctgtctcagcgtgtcttcacttttaacgatggttttagtttctcagtatgttttgtatgcaagttggaaataaatgaacgtcgtgatctggatgaaacatgccccagtcggcggactggaggcaaagaaggggtaaacatggtgtcctgtccatttaagaaagaataaatcggccccgggattcctaccggtagcagaaggtg

SEQ ID NO: 110884 - DNA, 450 bp, Homo sapiens
gcgatattggctcaccgcgacctctacctctgggttcgagcgattctcctgcctcagcctcccgagtagctgggattacaggcatgtgccaccacgccggctaattttttagagacagggtttcaccgtgttggtcaggctggtctcgaactcccaacctcaggtgatccgcccaccttggcctcccaaagtgttgggattacaggtgtgagccactgcgcctggccatgagtcttgttgaaagttaacatttttgggccatagtacaggtcatctaaaacaaagtaacctggtaaggtactaagaaatagtggcatataaagaaactttatagacgttgaatcattgagactttataatacctgtagagatcttgttctctctggcaaaccgtagttctttcctgaaaccccaatgttgttttttcccttgatagtgtttaggacaatt

SEQ ID NO: 110885 - DNA, 2035 bp, Homo sapiens
  misc_feature (1)...(2035): n = a,t,c or g
gtcaaaatactttttaagtcctgagtgctttccagggtagttgttaaaaaaattttaagncccaggcattggtggctcgctcacacctataatcctaggatcttgggaggtcgaggcaagctgatcgcttgagcccaagaagttaaggccggcctgagtagcatagcaagaccctgtctctacaaaaaatacaaaaattagctgggcatggtggcatgcacatgtagtcagagctactggggggtgctgaggtgggaggatcgttttgagcccaggagagtgagtgccrtcagtgagctgagattacgtcactgcactctagcctgggcaacggtgagaccctgcctcaaaaaaaataaaaataaaaataaaacactttaattagaatctatttttacctattttctaaatttatttaaatgcttagcaggaagcataaggaaaagccatcggcctccaatacccatgatgacagagggagcacttgagccttgtccttccctcctcttaaatcagggtgtgttccgagattacagaacatcacaccttggcgtgatgaaatcatgccaagattctgactctccctttccggtgatactgctcatgatttctcctaatacgcttcaagcaactgttaccacaaaaaatacagtttccgcagggctttaaagggattgagtttaggcatgtatatcatgcgttattaaagttcacgtggattcatgtggaaattaactgtcctttttggctagtgcccaaaacagtggccttctctggcacactttacttgtttataaagttctcccacatgtccttaaatatccaagggggaaagtatggatattcgcgtagcaataatgccagcaaaggtcattttcattttttagtcatatagatatgaaaataagttcatatagatatgaaattggcttgactttaatggttttgggggagatttatatttccttacatggattatattaaacactttaaaatagccttccggtttctggattttgagaagcctgatctgttattgttgtggttgttggtgtttgtaatattcattattgtttgtatatacacggtttagtcttactgatttcaaatgcattttgttattgctcaacccaactggtaacactgtttgctggggagcattatacttaactttggattcacccatgggttggatgccactgcccatggatccgctggggtcttaaaggagctttccctagccactgacaagccccgtgggagatcataatcagggccccaggctgggttccagggatcaggcagcctatagagtgtgagcatctatgtgtagctacccttgttgggtgggctcttagactgatggggtagggtatgaagtgaaaggacttcaaattgcaagtaaggtagtttggggttccctaattccaaacatcccatgagtatatcaagatgaataaggaccaagggacctctgtgactcatagaaggggctggctgaatccctggaagtagcattagtgggaccctgggtctaccaatttatgccaccatgccactgactgttcttgctgtggcccacgtgccctcacccaagaccccagttgggaaaagagccgtccatattgcccaacaggttgggtttcctctggccctacaccctgatttaatgggccctttatcgtttggtgtcccctaggagtgtcccagttgttttattgcctgtattttgttattgccagtaccttaataaaaattgttgatagggccccaaaaccccacagaaattcctatgtcctgtaaaaacccaacgaaaggcattggacttgtgtgaatgtacagggtttttttagtagtaattttaaatttaaatgttttaagtgatcatcagtgttcctttttacttataaagttggattcttttttagaatttgtaataaataaaaaactgctgcttttaccactgtaaaatatgctttctgatgtggtgtatttttaaaataaattttaatatgtaataataaaaaaaaaaaaa

SEQ ID NO: 110886 - DNA, 800 bp, Homo sapiens
  misc_feature (1)...(800): n = a,t,c or g
gagatggagttcaattgcgagtcttgctctgtcaccctagctggagtgcagtggcgtgatcttggtttactgcaacctctgcctcccaagttcaagcgattctcctgcctcagcttcccaagtagctgggactacaggcacacgccaccacgcccaactaatttttgtatttttagtagagatggggtttcaccatgttggccaggattgtctccatctcttgaccttgtgatccacccacctcagcctcccaaagtgctgggattacaggcatgagccaccacacccagcgagacggggtttcattatgttggccaggctggtctccaactcctgacctaaagtgatctgcccgccttggcctcccaaagtgctgggattacagacatgagccaccacggcttggcccgggatagtatattttttatagcaccttcccccctactgattgcctgcccttcctctgtggcctacaagggaccccacagaatttacagggaagttacaggggtagcaggttttcattctcaatattggggagagatttcaaacaatcacaactgcctgaggaaggagttgggcttgttcattagggattttttatttncccagttccgttcaggaattttttgttagaaggggtttcatgtgcttggtaccaataggacagggaagatttttaatccagcttttacttatcttatgtttttttatgggaaactgtgttgtatgtaatacatacattttccaaaaagaaaaattaaatgattatagagattatgtttttcagactaaaaaaa

SEQ ID NO: 110887 - DNA, 441 bp, Homo sapiens
  misc_feature (1)...(441): n = a,t,c or g
acgtatgacatgctatcgatgtcactgccctcgtgactggagaatctaatcctaatgtanacacagntgggaagtttattttttagatatctttgaaagataagccggtccgccagcagctgtcagatccgccacagtatctgctatccgatccacggccttgttaagatgctcccaatccagcatgatccattagcaatatgatgtaaccggagcagtggaagaccaacgaagcccaagccatagaaacagctagagcatggactaggctatatgccatgaataatatttaaattgatacgatcatcaagtgtgcatcacttctcctgttctgccaagacttcctcctctttgtttgcatttaatggacacagtcttataaacattactgaataaacaagcccagacatcttcagtcctttggtgattaaatgcacattt

SEQ ID NO: 110888 - DNA, 490 bp, Homo sapiens
  misc_feature (1)...(490): n = a,t,c or g
catcgaccatgcttacgcgcagcttggcacgaggcaatgaacgccaaacgaacttgagaagtgggtgctgaaaggcgctgatgtttccacgtgagatttctgggtcaccctcctggtgactcttgtgcctctgacttctatctgatcctaagtccctgtgcattaaaatacaagcaattggctggatgcggtggctcatgcctgtaaccccagcactttgggaggcccaggcgagtggattacctgaggtcaggagtttgagaccagcctggccaacatggtgaatctctgtctctactaaaaatacaaaaattaactgggcgtggtggcaggtgcctgtaatctcagctactcgggaggctnaggcaggagaattgctnggaccccagggaggcggaggttgcagtgagccaagatcatgncattgcactccagttcggtgacaatagncagaccccgttttaacaacaanatcaacagcaacaacatt

SEQ ID NO: 110889 - DNA, 487 bp, Homo sapiens
ccccaggggtggtgctgcaggaggtcccggcatggtgttatcactggtaccacagaagccatggtgcgtgcaggccttgggcgagggcacacctgaggataggcctgcacagagtggcctgcagggcagaggggcccccacaccgggccaggccttccaagtccccgcactggagctggaaggccccatttcactctgtggcccgttccccttccagaggaggcgtgcggaagaggctggggagtgggtgggcaggtggggcaggggcagtctgccctgtatggggtatttgagatgggagtaaatgccgcacagtcctgcagacacaagcctatgtggcaagaggcctcacagagccctgacggcagggacggcccctaaggtttgaaacctccactcagggtcccccttcctcatgggcgagaactcggtgggtggtccaggcggtggcgggcttccgggtgggtcccgccagcttcgtatcagc

SEQ ID NO: 110890 - DNA, 1766 bp, Homo sapiens
ccagccttccgagtggctgggattacaggcgtgcgtgccaccatgcccaactcattttgtatttttggtagagatggggtttctccatgttggtcaggctggtctcgaactcccgacctcaggtgatccacctgcctcagcctcccgaagtgctcggattacaggtgtgagccaccgtgcctgacctgtgtgattgttaacatccccatctcccaccaaacactggacttccctccttgggcctgtgtctctcttttctgttcatgccatctccctcagcacccagcatagtgccagtgcttcacgggtgctgggttcatatttgtcaagctgatgtttatcacacacttttaaagggttttttgtttttgtttttgagacagagtctcggtttggcttttccaggcttggagtgcagtggtggcgatctgtggatcaactgcaacctccgcctcctgggttcaagcggtcgcatgccttcagcctccagagcagctgggattacaggtgcgtgccaccacacccagctaattttttgtagagacagggttttgccatgttgtccagactgatcttgaactcctgatctcaagtgatccacccgcctcggcctcccaaagtgctggggattacagggtgtgagccaccgtgctggggccaatattttttaaataggttctggtttttgaattggtataattcgaaacacaggaaacgggcacccagtgcttgggctttatttcacaccacgtacgtgacaacaagctggccctagacgccacatcagcaggcaggcggcccacagtgccccaggacctacccctgcccccaacaaggccatggggccccttaggaagatgtggggcttcttgagatcagctccagtttttctggagagcccctgtgaaaggagctcccatctgccttcctgtggaaaacctggaactctggctgggttcagaatggaactccctaagttgctcctcttccttttgtttctgtttaaagcttgttccaaaatcctttccagggccacttttccccatgaagaaggtgatggcaaaattgcgcttgtaccaatctctgttataatacatgtgcttctgaaaatttttacttaaaaattccttgtagaagtccgccatttcttctgcattcaatgttgctttcttgacctgattcaagttcctcagggccccaggccctttagtttttaagtccttgaagtgaaaataaaatcctcctttttccccttacctaaaaagtcaaaattcctggtttgcccccagaactgttgattcccattccttgtgtttccttgtccttaattttcctaagcttttgttcccaatggagattcattttcaggtatgtaaaagtgaacaggtcgaaggtttgaatatttatctgggggtcctatccaatcatggcaagactttcttggagggcagaatcttgagacttgccaggtgactctgttacgcttaaaggttctggctgtcaacagtccccggcgtggtggcgggcggcaccctcagtcccatccgactgagggcgttgatgcgggagcctcggggctgcgggactgttcgggataggacgcgagagcacctggacaaaggcctgaggcggcccgctgggcgccgtatccctgcgctgggcgccgcgctccggagcgagttgtcagccgcggcaggcgaaggcgcggcagagaggggggagaaaggtcttcttcacagcccgcaagaccaccacccacgcgtccg

SEQ ID NO: 110891 - DNA, 432 bp, Homo sapiens
  misc_feature (1)...(432): n = a,t,c or g
aggctggaantgcantggccgcngatctcaagctnaactgcaaacctctgccctccctgggttaaaagtgatccttctttnctcagcctccccaagtagctgggactacaggcacaccagcacacccagctactttatttatttattggtagagatgaagtttcaccatgttgaccaggctggtctcgaactcctgacctcaagtgatccaccagcctcggcctcccaaagtgctgggactacaggcatgagccactgcgcccggccttcagcttaatttttaaagcactttttggttactgaaatgatattatttattgtttatctctccagtgtgtttcaggagagcaggcccttgtccgtctatttgccaccacatcccctggccgagattgggtctagaacaggttgcctcgtccaagatggcagtaa

SEQ ID NO: 110892 - DNA, 862 bp, Homo sapiens
gtgattctcctgcctcagtctcccaggtagctgggactacaggcatggatcaccacgctcagctaattttttttttctttgtatttttagtacaggcagggttttgccatgttgggcgggctggtcttgaacttctgacctcaggtcatccatccacctcggcctcccaaggtgttgggattacaggcacgagccaccacacctggccgggaggagacagggtttagactcagggtggagaggaggggagcccctgctcctcatctgtggcctctgtgtcttcctaggatcaccattaacaaggacaccaagggtacccaatgcctgttttattcaccatcaagcaaagaagacccacacactggggaaacattcattaaaattcacaactccttaaaagacccgcaagtggttattttgctgggttacaaagttcccccaccccttgggaggcacaagatcatcatccgaagtgcagaccacgccggacttacagcccccaaggaaagcctttaccaaccgccaatcacccgaccttcattcagtgaagctgtccctgctggaaggagcgcttttcgggtgggccataaaaagacaagccaggaaaggaatttgagtaggggggccagaggggggctctgctccggcctgtgaagcccccgttccctaactgtgccctgaccctccgctccaggttaccacaccgaggagagcggccggtagatcagccatggcccgccttgtggccacccctcaccctgacaccgacgtgttggccacccctcaccctgacaccgacgtgtcctgtacatagattaggttttatattcctaataaagtatagcggaagagaaaaaaaaaa

SEQ ID NO: 110893 - DNA, 946 bp, Homo sapiens
tgtgagacagagtctcactctgtcgctcaggctggagtgcagtggcgtgatcctagctcactgcaacctctgcctcctgggttcaagcgattctcctgccccagcctcccgagtagctgggattacaggcgtgtaccaccacacctggctaatttttgtatttttagtcgagacggggttttatcatgttggctaggctggcccaacctcaagtgatcctcccatctcagcctcccaaagtgctaggattacaggtgtgagccaccatgcctagcctaggagagctttcaatcccttcaacaagcccgtgccatttactccatggccactcccaccactggtttatgggcataggcaacagagggtcacatgttaccaacgcctccaaagcaccatggtgcccacctcccatatctcatcacctgtgtttctgctccttttgggtgcaacaaatcatgacctcattgtgatggataaaattaccctcccaacttgatgggattatgaaatattttaaaataatatccttaatagtaaaagatttttacaccgaagattccatccctcaaccacttaaagcttcagtgaagccagtcaggtgtagtgcttctcagttaatgctactattggacttgattggagagaggggcatcaaggcggccttaagggtgattaccccaacagcaaggggctcagtttgaaaggcttaaggagacagtctgggagagaagaggggatatcttatcacagggcgtggaactgtgcctttgtggatggaggtgacaggatttctaacccttcccagcattgtcacagcaaaggccacagaatgacaaagctggaaactgaaaagtgctgcaaaggggagagaaaaaggaaactgatttcaaggtccagctgaacaggccccagggtatggtttggtttagtttggttggtatgcaag

SEQ ID NO: 110894 - DNA, 446 bp, Homo sapiens
aagcgtacgactctgaccacgccaagcttgtgccgggggagaggacagggaagattggaaaaagttcactgctaatgcatgtctccaggaagcagggaatgatctcacagcgacacttgaggcacattgctgaggccgtcgatgagaattcatgtaactttctccagcttacagcggactaaattgacatgcaagctgatccagtccaattggtagggcatcatggattctcattactcactgacttaaaatacttttattgccatcctggggaagcactgcactgggtagataacacaggggcaccttgctgatcagagcccttgggcagggacaaagagctcagtttctaaaactctggcatttccataatggtataaattgaatcatacagcatggaattttatgggattcgctttttttctggtgaactctttttttctgag

SEQ ID NO: 110895 - DNA, 1967 bp, Homo sapiens
ggcacgaggggctgtgggaggccaagtccactgcccggaagtcttgtcagccctaagccagggaagcctggagcgtggcctggcgggtctgggtggacaccgtccccactccggactcccagcacaggggagagcctgtatggccctgtagccctgggcagagctgggcctgtcgtgtgttcctgcctggcaggtgcaggtgctggccatctgcaggtggaaggaggtgggaatcttggattttttgtttttttttgtctttttttttttgagatgaagtctcgctctgacacccaggctggcgtgcagtggtgtgatctcggctcactgcaaactccgcttcctgggttcaagtggttctcctgccccagcctcccaagtagctgggattacaggcatgcgccaccacgctcagctgatttttgtatttttagtagagatggggtttcaccatgttggccaagctggtctcaaactcctgacctcaagtgatctgcccgcctcggcctcccagagtgctgggattacaggcgtgagccagttgcacccggcggaatcttggaatttttatagacggcacctcagtttctgactccagccgcacacctcctgcctctaccagcaggggttgccgccagaccagagcgagggccaggtccctgcgtccatcccccccggtaggatggacgtgagccatccttctaggggacttttttcagtgtgcgaactcgtcctctgttaggttggtaggagcccagtttgtgtggccctgttcaacgctccacagtgcgtggctgggctctgtgtgtggcctgtgtcccctgtccctgcaggacccagcaggcatcgtggcgtgaacagctgtgtcccaagccactgcccgggcatcccattcacccaccagggtgcacggtctctccttgctgggggctttctgtcgcatgtgtgtctcctgtcgactctgcagtttgttctcagagcagaatgtttcctgttctcagtgcacaaagacactggttttcaatcggcgtctaaaaccacgttcctgccttttcattgcgaacacggtgtgttcatttgtttaaaacagtttaatgagtaagtttagatgactggtcaatatcttaaaaatgtatattagtaagaagttcttcctggaatttttctttcgattctggcagaataaacaggtgtttttagttttcccactgtctgagccaagcaggaccctgtcccagagcaagagatgtcccctttccatctctgacccttgcctgggacaagctttgatgggggggccccagcttcaaggctgtggtgggaacagcacccccaaaatgccagcctctcctttcttcccatccaacccagtataactgcggggccatttctggtctttgtcccaacaggaaacccatttctggtggggatatgccttccaagtgccacagggccacttcaccccatggcatctctgtcctgcccgtcaagtgcttgggacggacaagcaaagggcaagcccagtgtctgggcggatagggttgggttgggaacagagagggggagaattgccgtcctaagcttcttgttgggggatcccccacacgacctgggtactgcctgggaaacctgtcctaagtaaaactatggacctcgcctcgcccaccggcctgcaaagccagcatctccgtgaaggtggatggaagcgcctttgtccttcattttgagctgcaagctgggtcagcggcttctgaagccctcgagtgactttctaacccaagacccagcccctggcaggaggaggggtgggtgcagggctggagggacaaataagaggcctcagcaggcctggaagacccttccagtacatcccacagcgtgtcgagcagctgggaggaacttgtgtcaagctcgagccgccataggtccccatgaggtgtctgaagccccatcttggtgatgggagg

SEQ ID NO: 110896 - DNA, 650 bp, Homo sapiens
tttatatggctgggtgtgcaatgatgaataaaacactgtccctgccttcaaggaccttacagactggtgagaatgtctgggagacagtgtgatcaaatgcctctgtttatgggtcttgcagtgagcttatcagggtgctgctgtgattagaggtggggagccttggattcttgagtaagtctcactgtgacatcagctaagatggacttttatgtgcttcctttgaaggcatcacgttgggtggcttccatttagacccgaggccggttcagaacttcccaaatgatggtcctcctcctgaccgttgtaaatcaggaccccaacaataacttacaggtatggagcctcccacgaagcccaggcgagcttgacgtgatatgccaggctctccaatcctcaacctttagattgccagcttgcggtttaccattttattgggctaaatatttcatgatttgttcacatttcttcttagagcagcagctatttttaaaacgtcgaatgtgccatcacattctatcacatatttttgacgtggcaatttgcattttggcttaagtaaataacatttttttaaacccactattttgagcgttcagtgggctgtaacagtgtgttataccataagaactgggatgaagcggataacg

SEQ ID NO: 110897 - DNA, 2030 bp, Homo sapiens
gctcgacctgtgaatgttagtgtataaaaattttgtagacaaatatttttgtttctcttggacaaacactgtgaggaattgctggatttgtaaacatccatttggacagtttgtcttttttaactggagtaccgggcgtcaaagcagaacgctttgatataaagaatgacggtaaagcactgtgcattgtccctcgtgggagaaccaataatgtacccagagatcaacaggtttttgaagctactccaccagtgtaaaatttccagcttcctggtcacaaacgcacaatttcctgcgggaatcaggaacctcgagccggttactcagctgtatgtcagtgtggatgccagtaccagagacagcctgaagaaaatcgaccgcccactcttcaaggatttctggcagagattccttgacagtttaaaagccttggcacgtcaagcaacaagcgaactgtctacagactgacgctcgtgaaagcatgggaacgtggacgagcctccaggcctacgcgcagctcgtgtccctggggaatcctgacttcatcgaagtgaagggcgttacctactgcagagaaagttcagcaagcagtcttaccatggcccacggtgccctggcatgaggaagtggtacagtttgtccgcgagctggtggatctgatccccgaatatgaaattgcatgtgaacacgaacactctaattgcctcctgatagcacacagaaagtttaaaattggtggtgaatggtggacatggatcgattataaccgcttccaggagctcatccaggaatatgaagatagtggtggatcaaaaacgttcagcgcaaaggattatatggccagaactcctcactgggcattatttggtgccagtgaaagaggctttgatcccaaggacacaagacattcagaggaaaggaacaaattcaaagggcttattttctgggtgtttgagatttatctgatttcaaggtactgaaggacaaaaacttggatggcctcaaaaggttcttgaacaccactgtgattctccaaggacgaattacgtaaattattactttcatacaaaggagacaataaggcagttaaacacaggggacacgggggacagcgttccaccacttcagaggggcctggggccacagccccgatgtttcttttcagaacttcagcccctttcctggattttacttcttaagaggaaaattattttgggggagggaactacacagtcgtggatttaggattttatctggatggtttttgtttttattaacttgttaaggacctgcccaggatggctagttcccgaggagtgttcagacaagggaggaattcccgggggcctcttccccttacccgggcccttagatttcatggagcagccacttaggcattggaattggcacttaccctgagctaaacgtgtctggtgctttcctaagataagaagcttgatcccctttcttctaaccttaaagacaggacctcctggaaaagaatcgaagtttgtcacaactctccaattattttttaaatactgcatagattgagttttggtttattaccaaccccttcccagaattgcgttggatctaaaaactactagatctcatcccaattccccatgtaaaattacccacagacccgcagtacccggggcctggaagcggagtgaaagctgtcctgcctgtaaagaggagtggcccatgtgagggcatgggagtcattagtctcacaaacacacttgggactgaaagagggatcatttttttttggttccgtgaggtcactgtcccaggcctctcatatccatgacccagacggcgggtctccatccttccttcactcctgtggcccctgggtggctttacacaatctggttctataaggttcaggtgttttcaagttggaaagatcataaatactaaaaattgttttcaagttagcaagttctaataacaaacttttatacaacaaattgaactacataaaataatcttttgtaaagacttgcaaaaaaaaaaaa

SEQ ID NO: 110898 - DNA, 527 bp, Homo sapiens
gatgataccacagatttccaaattcattacaaagactacaatcttaaaaaaacatattcttgctttagcaattacttcaattttgggattcatatatttgcaaacctggaggatgggcagctatagaattggtttttctaaactcgatgatatactggaagccatcatgctgttatggaccttcatccccacaaagcaccatggctgatgcaatcactcttaatgacttttaatgaattttaaatcctacttgatacacatgccctaggtaaacaaatctcgcgtaattgttcaaattttatcttcccacaatggggaaaaacagatttaaaaaaaaatacttagattatgtctttttctttctaaattattttttgtaaagatgaggtcttatcatgttgtctaggctggtctccaactcttggcctcaagctatcctcccaccttggcctcccaaagtgctgggattacaagcataagccaccatgcttggctgtcttgttcttatacactgaatgtgcactgtt

SEQ ID NO: 110899 - DNA, 456 bp, Homo sapiens
gcacatatgccatgcttacgccgagcttgggacgaggggcacaacggggttacctaagggtgtgattatgcccactgttgtatacgctgtcatgctacactggtcaatgtcttccatatacggacttcatcccggaaaggtgtggcgggcagcttctgacttaggctggggtgttggacattcctatatctgctatggacctcttcttcatgggaacacaacaggtttatatgaggggaagcctgtgggaacaccacatgctggcgcttatttccgtgtgcttgcagagcatggagtacctgccttgtttacagcaccaactgcaattagagcaatccgtcaacaggaccctggggcagctttggggaagcagcactctctgaccaggttcacaacattactttgtgggtggacaaccatgtgatgcatagaccctggaacggtcccaaattggcg

SEQ ID NO: 110900 - DNA, 416 bp, Homo sapiens
ggcccctacgggagactaatacaggggaatccccgccacccccttcggaggccctggacggccatccgccctagaatcccgaccttagcccttggaaagccagggagatgcggaccccctagacccgcagcccggccgcgtggggcggcgcgcagctgagggaccaggagctgcgccccaccacaagtgaggggcggaccggagacgccgaggtcggcgagggggcacgcgctagttccacagctcggctggcgagacggagggtaggcaggggtcccaggccgcgggtgactcggggtccgtcacatacatactcactgccatagctgcaaacagaaagcaccaaacagggaccaaaacgcgtagagggacggggaggggcgaggacaaatgaggtaaggaggccgcgtccgccc

SEQ ID NO: 110901 - DNA, 878 bp, Homo sapiens
ttttttttttgagacggagtttcacgcttattgcccaggctggagtgcaatggcacgatctcagctcaccacaacctccacctcctgggtttaagcaatgcttctgcctcagcttcccaagtagctgagattacaggcgcacaccaccacggccaactggtttttgtatttttagtagagacggggttcccccatgttggtcaggctggtctcgaaactcctgaccctcgtgatttgcctgcctggggcctcccaaagtgctaggattacaggcatgagccaccatgcccgggcctaaactttgtttttaaaatgaactttttttccccccaattgctgccaatagtggataacatgtatcactcactgccaaaaatagaaagtgacccatggaaaataaattcgctggggaagggggctcccatgctggtgtggccaaggggctgagagctctctcttcttctgttacaaaacgagataagcaagtgttaagaaattgccttaaaggccacactggcatactcccctgacccttccccccagggacagaagcagggagtaaagtttcctcatccccatgggcgaccccagggcccatctccctccccacccagtgggccccccacttcacagggagcctggcaatgcccctaccctgcctgttcctccagatgggagaaacaggctctgaggattcacaagggcttggcccaaagtccattgattttggatgattaaaaagaataaacacagtgtttcctgaggagcagtgaatggtaagccctgctattttaataaagattctattttcgtataacattgtcaagtggaaacatgctgaaatctattaaaccatctttgtttgtggaaaaaaaaaa

SEQ ID NO: 110902 - DNA, 1160 bp, Homo sapiens
gagatgtcctcggagaccattcttgctatgacaaggcctgggagatgtcccggtaccgcagtgctcgtgctcagcgctccaaagccctccttcatcttcggaatacggagtttcaagagtgtgtagagggcttcgaacgctcggttgagacaaatcccatgcagctcggggtgtggatttctctcggttgtgcctatatggccttggaggactatcaaggttcagcaaaggcattccagcgctgtgtgactctagaacccgataatgctgaagcttggatcatatttgtcaacttcctatatccgattaaaacaaaaagtaaaagcttttagaactttacaagaagctctcaagtgtaactatgaacactggcagatttgggaaaactacatcctcaccagcactgacgttgggggaattttcagaagccattaaaagcttattcaccggctcttgggacttacgtgacaaatacaaagatggtcaggcccttaaaattctagtcagggcagtgattgatgggatgactgatcgaagtggagatgttgcaactggcctcaaaggaaagctgcaggagttatttggcagagcgacttcaagagtgacaaatgatggagaaatctggaggctgtatgcccacgtatatggaaatgggcagagtgtaaagcctgatgaaaatgaaaaggcatcccagtgcccctcaaggccatacaagtgtgaacacccagtcccaattgttgggagaaagatatttacatcattttaaggaagttgttccaaagagcccttaggacttgcacatgtggcccataaaatgccagtaaaaacaaatcccagttccccaagaagctgtacaaatgcctttcttctgttcgactcaatattacggggcttgttatttaaaagcaaaagcaactttttacagatgtggcaactggagaaatgtcccagggaattagctgatgacataacagctatggacaccttagtgacagagctccaagacttaagcaaccagtttcgaaatcagtattgattgtgctggaagcagattctgaaaaaggtgctttcacctgctggtaaaagatacatctgtatatgtgaaatccccccatattgatttttaaaataaatttgttttatgacttaaaaaaaaaaaa

SEQ ID NO: 110903 - DNA, 613 bp, Homo sapiens
ctgctggagaccctgagcaggaccgaagaaatccaccagggctacagcactgaggctgagttcgaggagcccagggtgattgacctgtgggacctgcgcagtccgccaacctcacggacaaggagctggaggcgttccgggagaagcatctgcaggacctgtccggcaggatctccagagctcggcacaacgaactctgaaggcactggggagcccagcccggcagggaagaggccagcgtgaaggacctgggctcttggccgtggcatttccgtggacagcccgccgtcagggtggctggggctggcacgggtgtcgaggcaggaaggattgtttctggtgactgcagccgctgccgtcgcgacacagggcttggtggtggtagcatttgggtctgagatcggcccagctctgactgaaggggcttggcttccactcagcatcagcgtggcagtcaccaccccagtgaggacctcgatgtccagctgctgtcaggtctgatagtcctctgctaaaacaacacgatttacataaaaaatcttacacatctgccaccggaaataccatgcacagagtccttaaaaaatagagtgcagtatttaaaaaaaaaaaa

SEQ ID NO: 110904 - DNA, 421 bp, Homo sapiens
ctggagccgcctcttgagttgatgcctgcgccggaggctgacaagaccaccccatctgaccaacaaaggccatccgagaggacctgtggatctctctgcaacggaagctctgggtcctcagtccaatgctatggtcctgcagccccctgcacccatgcctaggaagtcgtaggcaaccaagttgaaacctaatcggttgattactctgtatacctgtgaggctgacataccccgatgagctcaccttctccgagggggatgtgatcatcgtggacggggaggaggaccacgagtggtggattggccacattgatggagatcctggtcgcacaggcgcattcccggtgtcatttgtgcactttatcgctgactgaattgctactgaacaaaagcattaacagttatgttcctgtttccgtat

SEQ ID NO: 110905 - DNA, 1498 bp, Homo sapiens
tttcgttaatgaccccttcattgacctcaactacatggtttacatgttccaatatgattccacccatggcaaattccatggcaccgtcaaggctgagaacgggaagcttgtcatcaatggaaatcccatcaccatcttccaggagcgtttatccctccaaaatcaattggggctgatgctggcgctgagtacgtcttggagtccactggcgccttcaccaccatggagaacgctggggctcatttgcaggggggagccaaaagggtcatcatctctgccccctctgctgaggcccccatgttcatcatgggtgtgaaccatgagaagtatgacaacaggctcaagatcatcagcattgcctcctgcaccaccaactgcttaacaacccttggccaaggtcatccatgacaactttggtatcgtggaaggactcatgaccacagtccatgccatcactgccacccagaaaactgtggatggcccctccgggaaactgtggcgtgagggccgcggggcgtctccagaacatcatccctgcctctactggcgctgccaaggctgtgggcaaggtcatccctgagctgaacgggaagctcactggcatggccttccgtgtccccactgccaacgtgtcagtggtggacctgacctgccgtctagaaaaacctgccaaatatgatgacatcaagaaacgtggtgaagcaagccgtcggagggccccctcaagggcatcctgggctacactgagcacccaggtggactcctctgactgtaacagcggacccccagtctttccaccttttgacgctgggggctggcattgccctctacgaccactttgtcaagctcatttcctggtatgacaacgaatttggctacagcaacagggtggtggacctcattggccacattggcctccaaggagtaagacccctggaccaccagccccagcaagagcacaagaggaagagagagaccctcactgctggggagtccctgccacactcagtcccccaccacactgaatctcccctcctcacagttgccatgtagaccccttgaagaggggaggggcctagggagccgcaccttgtcatgtaccatcaataaagtaccctgtgctcacccaccaagagaaaaaacctagacaaaaatgaaagccaaaaggggggggccctttttaaaggatatcctggggggcctctttaaaaaaaattccccggggggcccaaattttaccgggggctggaaaggtaaaatttttctctttatggggggccgttttaaaacccaccttgggattttttggaaaagaaccttttttttggggggggaaaatattggcccaacccccccccaaaatttaaagcctttagggaaaatataaatttttaaagggtttagggggtaaacctacctgcatatcctggcggttggaaagttttgcttccggggttggttttaggaaatttttatccccggggctggggtttattat

SEQ ID NO: 110906 - DNA, 600 bp, Homo sapiens
ggttggccaatggcttatcaatttaataggactttcaaacgacagctcttgtattgactgattctattatttttgtttcctaacttataaattcctattatcttcattgcttccctaatttcctttgtgagaggaaactgaaccaacccaaatgcccatcaatgatagactggataaagaaaaatgtggcacatatacaccatggaatactatgcagccatagaaaaggatgagttcatgtcctttgcagcgacatggatgaatctggaagccatcattctcagcaaagtaacacaggaacagaaaatcaaacactgcatgtccctcactcataggtgggaattgaacaatgagaacacttggacacagggtggggaacatcacacaatcacacaccggggcctgttgaggggtggggggtggggggcaaggaaagggagagcattaggacaaatacctaatgcatgcagggcttaaaacctagatgatgggttgacaggttgataggtgcagcaaaccaccatggcacatgtatacctatgtaacaaacctgcacgttctgcacatgtattctagaacttaaaactataataaaaaaaa

SEQ ID NO: 110907 - DNA, 397 bp, Homo sapiens
  misc_feature (1)...(397): n = a,t,c or g
tagnnnnnnnnnnnnnnnnnnnnnnncccagcatatacttccatatgaacactcatgcacacacatgtgcccagccacacgtatatgcttgtacacaaaacacttgcatgcacatgtccacccacatgttcatgcctacatacatgcgtacacctgtgtatgtgcacacagcgaggcctgggcagagttggcccgtcctgtgacgttcacttttgtgaccaggggctcagtgcagctcccagctggcgggctttgggttgacttatggctgagctgcctggatgtaggcgacgcaaaactcactgggatatgcctacttcctccttcacagcagagagcagctctgagcgagaagccaggagaacccaaggatgggctctttcttcccacgcgtccg

SEQ ID NO: 110908 - DNA, 424 bp, Homo sapiens
tttttggtaggggggacagagtcttgctctgtcgcccaggctggagtgcagtggcgcaatctcagctcactgcaacctccaccttccgggttcaagcaattcccctgctgcagcctcccaagtagcttgggattacaggcacggtgccaccatgcccagctaattttttttctcctgtaaggaaagtagaacatatcccagcaatatgtaatagccataccctcttttcaagtagtaattctaactgtataggttgaattttaagcactgttggttttcttttaaactatttatagacgtgctcaatgacaaacttaggaattgttcccatgtgtctactcataaaatcaagcaaaaacatattcatctattactttctaatgttatttttgttttgtttttttgagacagagtcttgctctgt

SEQ ID NO: 110909 - DNA, 423 bp, Homo sapiens
cgaggcttcggctcggatcagtccgagaatgtcgaccggggcgcgggctccatccgggaagccggtggggcttcggaaagagagagcaggctgaagaggaacgatatttccgagcacttggagctaccttctgtttctttgctgtagaagccgttgtgtgaacaaatccgtttatttctctcatcagtctcctttgatagacatttgggtcacgtccggttttacgcttttacaatacatcagtgaacagcagtaatacgagctcaagacagaaggcctgaaaaacattgaaaaacacagagacggaaaaaaaaaaaccacagagggggaaatataatttcgggttatttcagtttcacctttacactttgttatattccacattttttgcaataaatataaatttggaagtaaaagcataaa

SEQ ID NO: 110910 - DNA, 489 bp, Homo sapiens
gcggccgccgggaccccggccccgtgcattgtcccgacctcgcgtccgccgggcctccgcggcacaaagcgccctgagttgtaaattcgagcgctcaggcagcggagggacggaggtgttttctcacccaggttgggaggcggactccggggaccgtccccgttctggggcgtccggttggatctggtgtggctggggaattcctgacctccccgggcgcggggctcgcccgcacctgctccggtgcgctcccccggagggcgcgccgtggctcggaagcgctcttccaaatcactttctaacagcactgcctagcgtcgggcttacgttcgaaaacagctgcaaggaacgcagatgttgtcaggttttgggactgggcccagagttctgacccgggcgctgttgggttccgaatccacctgtttttcggggagtttgtaccctgcagtgtgtggtgcagccagcatccggccaggtgtgcgcttgcaa

SEQ ID NO: 110911 - DNA, 463 bp, Homo sapiens
  misc_feature (1)...(463): n = a,t,c or g
ggtaccgccccggaattcccgnnncacgatttcgtgaataattaggcagaacatcagtgaagatacagcggatttcatcaatactcttaatcaatttgacctaattgacattgatagaatgttccatccaacaacagaacacacgctctttctcaagtgtatgtggaatatttactaatgcagaccatatatggggacatgaaacagatctcaatacatttaaaaggattcaggtatgaaatctgatctgcattagcccaggctgccatgnnnnnnnnnnnnnnnnnnnnnnnnnnnnnnnnnnnnnnnnnnnnnnnnnnnnnnnnnnnnnnnnnnnnnnnnnnnnnnnnnnaacatggctagattnnnnnnnnnnnnnnnnnnnnnnnnnnnnnnnnnnnnnnnnnnnnnnnnnnnnnnnnnnnnnnntacatccttgtgtccttgccaacacttagttatc

SEQ ID NO: 110912 - DNA, 417 bp, Homo sapiens
tgcagccgcaccatttcaccctctgtttccgtcagcacctctccttcctccgtttccttcatcacttctcctttctccctgtttccatcatcaactctccctcctccctgtttccatcgtcacctctccctcctccgtttccatcatcacctctccctcctccgtttcctttatcacctctccttcctccctgtttccatcatcacctctccctcctccctgtttccttcatcacctctccctcctccctgtttccttcatcacctctccctcctccctgtttccattatcacctctccctcctccatttccttcatcacctctccctcctccctgtttccatcatcacctctccctcctccctgtttccatcatcacctctccacgaaatcgtcgacccggagaattccggagcgg

SEQ ID NO: 110913 - DNA, 452 bp, Homo sapiens
  misc_feature (1)...(452): n = a,t,c or g
gacccctggtcgacacgaaaggccgcaatacacgtgatgccacagggcagatgaccccgaccaattgggatgtctccagcccattggcccttgaactgctgattgctgatgactgctttgggctggacaacacggctctgtggccagagctatatgtggaagggtacgtggctcctctgtaacagcctgagatgcctgtagctgctctgacccgggcaggcttccctttgcaggactcaccctgtctagctgcttgtaaaagacagcctcaggaagcctgcatgcttctggctgaccattttctctctttaaaaattttttttaaaagannnnnnnnnnnnnnnnnnnnnnnnnnnnnnnnnnnnnnnnnnnnnnnnnnnnnnnnnnnnnnnnnnnnnnnnnnnnnnnnnnnnnnnnnnnnnnnnnnnnnnnnnngcataggccttgctatt

SEQ ID NO: 110914 - DNA, 549 bp, Homo sapiens
ttttttttttcagatggaatctcttattggccaggctggagtacagtggcacaatcacggctcactgaagccttgagttcccaggcctctaacctcggcctcccaaggaactggaccacctgggaccgcaggtgtgcaccaccatgcctggctaatttttatcgtttctagaaacaaggatctcactatgttacccaggctggtcttgaattcctgggctcaagctattctcccatcatggcctcccaaagtgttgggattacaggcgtgagccactgcacctagccttaggttttaaatcccatctcagctacttactatcatctgtgtttccatgggaacaatttgtcacctcccagagctcagttgtcacacttttgaaatgggtttcaaaacaaacactcattagtaataatggaccaagcaatataccctcataggaccctaaatcaagggtatcaaatcaaatccatcagaaggacagccccaccccaaccccaaccctacacaaacaagtagcagatcacacttctttgtaacaaatgattg

SEQ ID NO: 110915 - DNA, 988 bp, Homo sapiens
aggaaatctaattccagcctcgagactttccagcacagcaaagccaggaaccctacggctctttccaaatatgccactgaccttttgagtgtggctttgaacaggaacttcaacccagcagggtctctattccaatgtggcctgtccaggtacagcattgaccaatttgacatatggaattctgcctccgtttatatggacgctgttgatgccggcaatattgctacttcgcttttttgcaaatgcattcactttgacacaatatatgggaacggaagctctggtatgctttttccaccaaaaagcctgaatctctcaatcctctgatcaaatatctgagtgccaccactggctttggaagaaattacattatgacccagaagatggacctagatgaagacactgctgaaaaattttatcaaaagttactggaactggaaaagcacattagggtcactattcaaaaaacagatgatcaggccaggctcagtggcctcatgcctataattccagcactttgggaaggcccaaggccagaaggatcacttgagaccaggagttcaaaccccagccctgagaaaccatagtgagccccttgtctcctacaaaaagaaataaaaataatagcctgggtgtggtggcatgccgcatgtagtccccagcctacctcagaaggatgaggtgggaggatctctttgaggctgggaggcagaggttgcagtgagctgagattgtgccactgcactccagccctgggtgacagcgagaccctgtctcaaaacatatatatatttaatatatatgtaaagccagagctgacaatgacactctggaacattgcatacccttctgtacattctgggggtacgatggatttctactgagttggataatatgcatttgtactaaactatgaactatgactctctttaccttcctttgggaattatctccaagactgtgcatgtgtatgcatatgaaataaaga

SEQ ID NO: 110916 - DNA, 515 bp, Homo sapiens
agatctcatcgccagggtgccagccccctgcccagcggctgtgccagcctgtgctacccagcccagcctgccagctggttctgcaccagatactgaagggtggctcggggacatactgcctcaatgtgtctctggctgataccaacagcctggcagtggtcagcacccagcttatcatgcctggtcaagaagcaggccttgggcaggttccgctgatcgtgggcatcttgctggtgttgatggctgtggtccttgcatctctgatatataggcgcagacttatgaagcaagacttctccgtaccccagatgccacataccagcagtcactggctgcgtctaccccgcatcttctgctcttgtcccattggtgagaatagccccctcctcagtgggcaccaggtctgagtactctcatatgatgctgtgattttcctggagttgacagaaacacctatatttcccccagtcttccctgggagactactattaactgaaataaatactcagagcctg

SEQ ID NO: 110917 - DNA, 666 bp, Homo sapiens
tagcgccgcgcaggacacgctggcccgagaattccccgggcgagacaccaccctgtggagcgcaaccttcattgctgggactggggtctgctagcctaccaaccaccccgaaaacaggggactctcctggcaatgaaacctgggccaccaccccagagaggcctatcaccacagcagggaccaaggctgcctttgtgcaaggcaccaaccccaccccccaaggcctgccccagcggctgaacctgaccggagcagtcagggtgctctgcgagatgcacaacgaggccgtggccatccagaaacgcttcctgcagcaggaatccatccccgagtactcgttgcacctcagccacccctcctgcggcgtgagccacagcaatggcacacacgtgctcctggaggccggctggaacgagtgtgggaccctcatgcagagcaacatgacgaacaccgtggtgaggaccacgctgaggaacgacctgtcccaggagggcatcatccaccacctgaagatcctgagccccatctactgcgccttccagaacgacctgctgacatcctccggcttcaccctggagtggggggtttacaccatcatcgaggacctccacggcgctgggaattttgttaccgaactgcggttgcttatcggggactctccgctac

SEQ ID NO: 110918 - DNA, 1277 bp, Homo sapiens
  misc_feature (1)...(1277): n = a,t,c or g
ttcacaattgtatctgcttcctgtgatgtgaggatgaaacaaaataggattttaagggcccaggacttcacacaccataggggtgagctctccattgctgggggaaaccaagcgggccatggctgtggtagggcccttctcggagatcctggccggccttgaccctgaggaccacccctgccccggcccacaggncccttcccagctgcctgcctgccctagccagctcccagggtgaagagacttctcggctttcagggcgggaaacagcacttcatcaaccaggcagtgcggaactcagacctcgtgcccaaggccaaggggcggaagagcctccagcgcctggagaacacccagtacctcctgaccctgctggagacagacgggggcctgcctggcctggaggatggggacttggcaccccctgcatcaccaggcatctttgccgaggcctgcaacaacgccacctatgtggaggtctggaacgatttcatgaaccgctccggggaggagcaggagcgggttcttcgctacctggaggatgtatggcagtttcaaggctcggaggaggggccctggccgtggggaggaccggaggagagaggagcccgcctatacaccccgcgagtgcttccagcgcatcagccggcgtctgcgagccggcctcaagcgcagccgcatccccatggaaacgctggagacctgggaggagcggctgcttcggatcttctccgtggccccccaggccgtgtacacagtaatgctagacaacagcttcgagaggcttttgctgcacgctgtctgccagtacatggacctcatcttcggccagtgctgacctgggaggggaagcggcagatgaaggtcagtaatcggcacctggattttcctgccgccggggctgctcctgtccgcctacctgggagcagcacagctgactggcggccccgcgggagnaccccgctgccacctcgcccagccattcaagccctccgatacctttcggcttaaaatatcttttcatatttttagaaatttgttcctcgggaaaccttttttcgtttgggggtggtctctctcactctgccccctcctcacgcagctctttgcaggccaacagaacgctggcaggctgaggcttgcccatgcgcatcccagctttcaagctttcccacatccaggaccttggggttaggggtggggaagaacttgaccctgggcatgttcctgtttcttcatccgttgaagcttttctggcccggtctgaagctcaagtg

SEQ ID NO: 110919 - DNA, 655 bp, Homo sapiens
agaagatagtttggcagtgtccaccaaagctgagcaccagccatctgccctagctgtgtgcacaggagaagtggggacacacactcaacctttagaaagtgtccccctcactcagcagccaggacttactctagccccaactggaacaacccaagtatccactgtgagaggaacagtcagatccactgtggagtgttctcacagtgggacgcccacacagcagttgggaatgagctacagcttacacacgacagtgtggacgcgtctcataggctaatgtcgagggaaagccgcacagaggaggtgagtccacagttcacaggtgtgtctgtgtgcagtggtacagatgggaagtagaggttaattcttgtgggggatggtcagtaaccgggaggggcacacagggccttccagggggagatgccacctcagcctcgcaagtagctgggactataggtgtgtgccaccatgcctggctaattttttttttcatattaagaaatatggagatggggtctcgctgtgttgcccaggctggtctcaaactcatgggttcaagcaatcctgccacctaagtcccccaaattgctgggattacaggtgtgagccactttgcctggctgcatatttcataattaaaggacagaaagtctag

SEQ ID NO: 110920 - DNA, 603 bp, Homo sapiens
gaatcggcctaagtgttgtgtgcctgaggatttttctgtgtttctgggaaccattttggtaactgagagttttctagaaagccacctgtttggtccctgttttctcgtggattcgcacagagtaaaagacagtgctcttaccattatttccatttccttgttctgcctgtagctatttctacttttacatttctgtttatgcttcctttttctggattagtttacacactgttttttgtctttttctttgtgagacaggatcttgctctgtctgccaggcttggagtgcagtggcacaggtatgattcacttgcagaactcctgggctcaagagattcacctgccttagcctctcatgtagctggggaccacagtgcttacggccacacctggtgcttacggccacacctggctaattttcttttcttttttaatggagacaaggtctcactttgttgcccggtctggtcttgaactcctgaaattcagcgatcctcccacctcggcctcccaaagggctgagattacaggtgtgagccaccatgcccagccactgtatttcctttttaatagtgtcttttactgatttggtttctacatatt

SEQ ID NO: 110921 - DNA, 612 bp, Homo sapiens
ttttttttttgagacggagtttcactcttgttgtccaggctggagtgcaatggtgcgatctcggctcaccgcaacctccgcctcctgggttcaagcgattctcctgcctcagcctcccaagtagctgggattacaggcatgcaccaccacgcccggctaattttgtattttttagtagagacagtttcgccacgttggtcaggctggtctcgaactcccgacctcaggtctgcccaccttggcctcccaaagtgctgggattacaggcgtgagccactgtgcccggccgagattttttttttttaatctccagaacacagctctctcagtgtgaccctgaggattgggagtggggagggcgagacatgacttcccttgggactgacatccttcagagagagggcagccagctgaacctgctccctacgcacctctggtcaactttacaagtgaccccagcttcccccaacattgaccttcactctaagtcactgcagagagacaaagagaggcagaaacttctccaccccatcacacaatatgccctgatgggcttctgagggtggagggtggaataacaactcggagggccccaagggagggcttggaaga

SEQ ID NO: 110922 - DNA, 463 bp, Homo sapiens
  misc_feature (1)...(463): n = a,t,c or g
atgcgacctctgcaggaccnntccnaactcccgggtcgacgatttcgtgcctgattgtgtctgtggatgaaaccatcaagaatccgattgactgtggatgctcccccagcagctagctggggccgtggtcgtggccgcccccattgagaggcaccccgcctatcacatgactggctggcaggctggctgcagggtgtgcttactctccttggtttggttaatagactttacaaggaaggggtagtcactggcccactctgttctcactggaggctatttaaataaaacttgagactttggggggnnnnnnnnnnnnnnnnnnnnnnnnnnnnnnnnnnnnnnnnnnnnnnnnnnnnnnnnnnnnnnnnnnnnnnnnnnnnnnnnnnnnnnnnnnnnnnnnnnnnnnnnnnnnnnnnnnnnnnnnnnnnnnnnnnnnnnnnnnnnnnnnnnnnnnnnnnttcac

SEQ ID NO: 110923 - DNA, 420 bp, Homo sapiens
ttttttttttaagactctcaccgtcacccaggctggagtgcagatggcgcgatctcggctcactgcagtctctgcctcccgggctcaagggattctccagcctcagcctcctgagatagctgggatcaaaggtgtgcatcaccgcacccagctaatttcatatttttggtagagacggggtttactcatgctggccaggcagatcttgaactcccggcctcaagcgattcgcctacctcggcctcccaaagtgctgtgattacaggcatgagccaatgcacctggcctgtcttttttatgttatgtccatgtgaaacagcccagtggtcagcacacaaaggggtccaaatgtgaaaggaaagggcatacacgggaaacctaggggtgttcagaaatagttcccaggtcattgcctgtttc

SEQ ID NO: 110924 - DNA, 454 bp, Homo sapiens
  misc_feature (1)...(454): n = a,t,c or g
cccgccgcctgctggaaaatggtgaggacttcaatcttggtgatgccctggcagcaagcaaatccatggaaaccatccaaataccactacccgctggatagtggatagcaaagtggtgtctgagaccaacgacaccaaagttctgagacattaagccagcagaagcagggtaccctttggggagcaggaggccaataaaaagttcagaggtcaaaaaagtnnnnnnnnnnnnnnnnnnnnnnnnnnnnnnnnnnnnnnnnnnnnnnnnnnnnnnnnnnnnnnnnnnnnnnnnnnnnnnnnnnnnnnnnnnnnnnnnnnnnnnnnnnnnnnnnnnnnnnnnnnnnnnnnnnnnnnnnnnnnnnnnnnnnnnnttgttgataccattaggtccaatttctttgaatatgctggtaatgaataatacaatgtaatacgaaatcgtcccgaccggtac

SEQ ID NO: 110925 - DNA, 769 bp, Homo sapiens
ttttttttttgcgatggacttttgctctgtcgccaggctggagtgcagtggcgtaatctcggctcactgcaacctccgcctcccaggttcaagtgattctcatgcctcagcctcgcgagtagctgggattacaggcacctgccacaacgcccagctaactttttatattttagtggagatggggtttcaccatgttggccaggatggtcttgatctcctgactctgtgatctgcccgcctcggcctcccaaagtgctgggattacaggcgtgagtcaccacgcccggccagtttaacatttttcaacatgtgatgttttcaccttctcccgcatgaatgtaaacaccttgaggtgaactccctgtctgaagttctcactgcagccttccttgcacccagcacagcatctcaggtacactggatgcttggcagccaagcaaggaaggccatctgtgcctccacagctttgagactagatggactacatctacctttgcatctggccagcattcctccaaatgtagggtatactaggaaggctgggctgaaccacaggctccatggagtctcttgaatttatctggctaccctcctggaagcccagtactggagacaaagcccaggaggcccacatgatgctgctctggggagcaggcccttggaaatgaaaccccatgggtgaggaagccctgattgtctggatagaaagttcctgaggtagatttggggttgctttttcttctagagacttctagatactctagatatt

SEQ ID NO: 110926 - DNA, 401 bp, Homo sapiens
  misc_feature (1)...(401): n = a,t,c or g
cccacgcgtccggagaagaccccattctttatatttggagacttcaacacttcactttcagcattggacagattattcagacagaaaatcaacaaacattagacttatttgcactattgaccaaatggacttaagagatatttacagaatatttcatccaacagctgcagaatgtacatttttctcctcagcacatggatcattctcaaggatagatcctatgttaggccacaaagcaagggggggnnnnnnnnnnnnggggggtgggtttttggttgggttggaaaaagggggcttccttttgtcccccaggtgaannnnnnnnnncaaaatatgggttattggagccttcatttcccggggttaggggaatttccccccctgggccttgggagagtggn

SEQ ID NO: 110927 - DNA, 650 bp, Homo sapiens
ttttttttttttggagacggagtctggctttgtcacccaggctggactgcggactgcagtggcacgactctcagctcactgcaagctctgcctcccgggttcacgccattctcctgcctcagcctcccgagtagctgggactacaggcgcccgccaccgcgcccagctaattttttgtgtgtatttttatagtagagacggggtttcaccgtgttagccagggatggtctcgatctcctgacctcaagatccacccgcctcggcctcccaaagtgctgggattacaggcgtgagccaccgcgcctggccaacactctgtctcaaaaaaaaaagtcaaatacttattattaggtgtgggttatgtgcccggcagtattctaaaccaggaaaaatgctgggaataagacagtgcccacctacccttaaggtgttatattctaatggtgtaaatataagtcataaacccataaacaaataaataagaattccatgagatggttttggatgactctattttttcaacccatgttgcaatgggtggccatcctcattacctactcttaaaagaggactaaattttgaatatcctagaaacattcttaacctacataattttctataacctgcctggagagcagaattccaccaca

SEQ ID NO: 110928 - DNA, 800 bp, Homo sapiens
ttttttgagacagagtcttactctgttgcccaggctggagtgcagtggcgtaatcttggcccactgcaacgtctgccttccgggttcaagtgattctcctgcctcagcctcccgagtagctgggactacaggcacccgccaccacaccctgcttttttgtatttttagtagagacggggtctcaccatgttggccaggataatctccatctcttgacctcgtgatccacctcctcggcctcccaaagttctgggattacaggcgtgacgactgcacccagcccaccacattttctttatccagtctatcattgatgggcatttgggttgattccaggtctttgctattgtgaatagaaaagcacagatttattgaagaacaattcagagtgggagcgggatcgagccagcagctcaagagcctccccaattaaggtttgtaataagctagaaggaacccggcaacacccctagacgcccttcagaggcttccaattggttagatgctatgaaggattggctcaggaccaatcagtggccgtagtggagacccggcccgcagtcaatcagaggctgatgtggcttgttatcacgagggaagacgtgacctgtaagccacacctgctgctctcctgcctgtaggaactggctgcacctgctgaacccctgttcctctaatcccctattctcctgccacaaaactcatggaaacaaagtagaattagaaccgtggttgctgggggctaggaggggagaaaaacatgacatgatgtcggtcaaagggtagaaacttgcatttac

SEQ ID NO: 110929 - DNA, 644 bp, Homo sapiens
cggcacgagctatctcagagggtagcttttgacagttaaataagatgtatggagactagtacaatctctaccatatggtcactttgtgacaaatgcaaatttctggctccctcctcaatgctctgtgttgtgttttttctgagacatcaataacagttcttattgatccgttgacatttgggattaaaaagtcatatgcccgagttagaataaaaactggttaatgtcctcaagataataaaaatcaaaatagtggtgtcttttgtagaaggacagaaaatcatgtcactgcatcttaacagttttaaaaaattataaaataactagacactaatgaattgtaccaaattaagactctctaggcctagagagtcagatgactcccagacaggcctcagaaaatgctctcaactaggccaagtgccgtagctcatgcctgtaaggccaaggggtaagaagatcacttgagcccaggaatttgagaccagccttgtcaacatagtgagagcccatctctacaaaaaaatttaaaaattagccaggcatggtgttatgtgcctataatcacagctgctcaggaggctgaggcaagaggattgtgcaggaggctgaggctacagtgagccatgatcacgccactgcac

SEQ ID NO: 110930 - DNA, 567 bp, Homo sapiens
ttttttttttgagatagtctcgctttgttttccaggctggagtgcagtggtgtgatctcagctcaccacaacctccatctcccacgttcaagcgattctcttgcctcagcctcccaagtagctgggactacaggtgtgtactaccatgcctggctaatttttgtatttttagtaaagacagggtttcactatgttggccaggctggtctcgaactcctgacctcatgatctgcctgcctcggcctcccaaagtgctggaattacaggcacgagccaacacgcccagccagatgttagtgctttctacacagtcctacccatctcagttgctggcaattaggcactattttgtatgcttttgtttactcacgaacaaggcacattgtagtttaagaaagtcatgtttaacagaagaaccttgttatagtagacagtcctttctaggtttgtgtccaacttggatcttaattatactcttaagactcctgaggttaactggctggaagtcatgatgtcacatagttgttttatttctaaaagatgaaggaaattaaatgggaaaatttt

SEQ ID NO: 110931 - DNA, 699 bp, Homo sapiens
  misc_feature (1)...(699): n = a,t,c or g
ttttttttttgagacaaagtctccctcggtcacccaggctagagtgcaatggcaagatatcagctcactgcaacctctgcctcccgggcccaagcgantctcctgcctcagcctctcgagtngctgaaattacaggcatgcaccaccacacctggctaatttttgtntcttcagcagagacagggtttcaccatgttggtcaggctggtcctgaactcctgacctcgtgatccacccgccttggcctctcaaagtgctgggattacaggcgtgagccattgtgcccagcctcactgtctttttttaaaaatcatttttcttaaaatgtcagtcagtcaaattgctgctctttaaaagtattgtgtcttcccactgctcaccatggctattttaaatatttttttcctagtttaaaaactttgtcatagtttccatagtcttatattgacacccaaaggtgtgtttcatatgtattcattctgcttagggtttcctaagctttcaactctgttagctgctgtctttcatcattttgtaaaattcttagtattatcttttcaaatattgcttttgccctattctctcccttctctttctgaaactccaaacctacatgtgtctggaactctaaccaatctgctattgaactgaaccattagttctaatttcaaatatagtactttctgttataaaggaatg

SEQ ID NO: 110932 - DNA, 591 bp, Homo sapiens
ttttttttttttgaaattctgaagtctcactgtgtcacccaggctggagtgcagtggtgcaatcttgggctcactgcaaccccccgggttcaagcgattctcctgcctcagcatcctgagtagctgcgattacaagcacctaccaccacacctagcttatttctgtatttttagtatagatgggctttcaccgtgttggccaggctggtctcgaactcctgacctcaagtgatccgcccaccttgtcctctcaaagtgctggaattacaggagtgagccaccacgcccggccaaagggtggctgaaagttggttgcctcctaacttccaccaaaaaaaaattattcagaacattgttcagaaaacattattcagcacgataacttggaacaacatcaaataacctaaaagaatgaaaagtataccattaacaatgaactaatggaggcagtcaaaatatcaattaccaattacaggtccaaagataaacacagcagatatatgcacataatctttatattcatgaagccttctaaaaagaataaaatctttgttattggccatttggaaagtgctgctacctagatctagg

SEQ ID NO: 110933 - DNA, 808 bp, Homo sapiens
  misc_feature (1)...(808): n = a,t,c or g
actgtacagngcggcggnnnnnnnnnnnnnnnnnnnnnnnnnnnnnnnnnnnnnnnnnnnnnnnnnnnnnnnnnnnnnnnnnnnnnnnnnnnnnnnnnnnnnnnnnnnnnnnnnnnnnnnnnnnnnnnnnnnnnnnnnnnnnnnnnnnnnnnnnnnnnnnnnnacagaggctgggtcagatggaggagggcgattgaatagtaggataggagcagaagcagaaagtctgagtgcagaagctctggtctgattgggagggaaacacctccaaggactgggagagacttgtctgagggcggaggcagagttctagggggcgacaagtctcaccaggacccatgtgccatagagaaaaggctgggtctgatgggggaggggaagtgtgggtggggcagcaggactctggtctgagggcagaggctcagtgttggaggggagaggagaggaggcagggacaggatggactctaggctgagggcaggccaccctcccagttcccaatccccccggaccctcctccctcaggctgggacgcagagaccggcagcgattcggaggacgggctgcggcctgacgtgctggtgtctctcgcggcgcccaagcgctgcgcttggccgctttctccgggcgccaccacttcgtgcccggcaagttccgtgcccgatgacgtgcgccacaagttcgctctgcgcctgccgggatacacgggcaccgacttgcgtcgcggcactgtgaccgccacccgcgcccacaccgcagggaccctcgccaataaacagccctcccaccaccgcccaaaaaaaaaaaa

SEQ ID NO: 110934 - DNA, 440 bp, Homo sapiens
  misc_feature (1)...(440): n = a,t,c or g
ttttttttttttgtagagacaggggtcttggtatgttgcccaggctggtcttgaactcctagccctcaagtgatccctcctgccttggcctcccaaagtgttggggttacaagcgtgaaccaccacgtctggccccactttctaatgtgctgacctggccgtatccttcccctgcctaaagccttgccctggggcagaagtgggtttggagctcggccttacttcctgccctggggatggaggacaggcagcctcctgtttctgagcctgtctgctgtactttgggctggtggcatggccacggtgcctcagtcttcccacacgcaaagtggagcgacagctccanccatcatagggacgctataagaactagcgatgtggggaccgggctaagaggggagccggccacagtgagctcaataaatgtctgctgctgccaa

SEQ ID NO: 110935 - DNA, 443 bp, Homo sapiens
  misc_feature (1)...(443): n = a,t,c or g
nggggggtcccgcccgttatccccgccccttgggggggtgaaaccggcgggtccccaggtccggaggttggggccctcccgggccacctgatggaaccccctctggtcttaaaaccccaaaaataactnnnnnnnnnnnnnnnnncccggtattcccgcctcccgggggggtgaggccggggaaatgctttaacccggggggtgggaggtgccgtgagcccaccttggccccctgccctcccggctgggaacccaggggggttttgtttcnnnnnnnnnnnnnnnnnnnnnnnnnnnnnnnnnnnnnnnnnnnnnnnnnnnnnnnnnnnnnnnnnnnnnnnnnnnnnnnnnnnnnctgaagcccagcatgtccacacctcatcattttagggtgttatggtgggagcatcactcacaggacattggaattccgccacgctgga

SEQ ID NO: 110936 - DNA, 494 bp, Homo sapiens
agctcactgcagcctccacctccagggctcaagtaatccttcctcccacttcagccccccaagtagctgagactacaggtatgtaccaccatgcccagctaatttttttgttttgtacagagtggggtctccctatagttgcccaggctggtctcaaactcctgggcgcatggatcctcctaccttggtctcctaaagtgctgggattacaggcgtgacgactgtgaagggccccagtgagccttgaattcttcttctcgtccctttctccctacactcatgaaagtgctacaatcacctcccttttttcagatgagggaataatgaggctcacagagaaggcagtgacctggccaaggtccaggtttcctcttgtggagaagatggaatctgagtcaggatctgtaactttagagcctttctcatacagagacttggattaaccattgcccagagtataaagtcaggtgacaggagttctgagggctaaaata

SEQ ID NO: 110937 - DNA, 567 bp, Homo sapiens
acatatacatatattttttatttatttatttttttctttgagacagagtttcgctcttgttggcccaggctggagtgcaatggcgtaatctcggctcactgcaacctccacctcccgggttcaagcgattctcctgcctcagcctcctgagtagctgggattacaggcgcgcgccaccacgcccagctaattttttttttttttttttttttagtagagacggggtttcaccatgttggccaggctggtctcaagctcctgacctcacgtgatccgcccacctcagcctcccaaagtgctgggattacaggcctgagccaccgtgcccagccatcatgtgcttatttttaaagcgaggtggatgacaccattcccccagagctgtgttcctcgttggcaacaaaacaaaaccaaaaaaccctaggacttgactcattagaagtgttaatcgatttttaccacgctgaaatgaaggtataaagtcagtctgtgctgtcgtgaaattccaaggagatttggaagtaagatcattatttactggtcctttagaatagaccaaaaaaaaaa

SEQ ID NO: 110938 - DNA, 466 bp, Homo sapiens
  misc_feature (1)...(466): n = a,t,c or g
accctggtcgacccacgcgtccgcctgggtcaccccgcccaccagagtccaggcccaccagagtcccctgccacctgtgctcaccctagccttacccctcgctctactcccgccctcgccctatcctcgctcctcgccctacgcttgcccctcgctctggagctgcgatgccagcctcagggctttcagtcctgccttgatctttttttatactgaaactcaattttacacacacaaacccactcccagccagcctctgccttttgccttttcctcatgttctcattgaataggaagaaatgcccttttttttcnnnnnnnnnnnnnnnnnnnnnnnnnnnnnnnnnnnnnnnnnnnnnnnnnnnnnnnnnnnnnnnnnnnnnnnnnnnnnnnnnnnnnnnnnnnnnnnnnnnnnnnnnnnnnnnnnnnnnnnnnnnnnnnnnnnnnnnnnnnnnnnnnnnnnnnn

SEQ ID NO: 110939 - DNA, 495 bp, Homo sapiens
gagacagagtctcactctgctgcccaggctggagtgcagtggcacagtcttggctcactgcaactcctgcctcccggtccaagtgattctcgtgctgcagcttctcaagtagcgggccatcacccacccacaccccggcctaatttttgtatttttaagtaacgaccgaggtttcaccctgttgggcaaagcctggtcctcaaatccccggccctcaagtgatcctgccccacttcagccctccccaaagtgttgggattacaggcgtgagcccactgcgcccggcttttttaaacttttagattcatttaataggtaaattgcatgtcacgggctttgtagcttattctttcagaaactcttgcattatctgtagaccgtggacgtaaatatccacctcatagggggttttcataaaaaataattgagataatgtatgtaatgtttcacagtgctttgcagactatctaataaatagtagctattagtacaaaa

SEQ ID NO: 110940 - DNA, 421 bp, Homo sapiens
  misc_feature (1)...(421): n = a,t,c or g
agaaaagaaacaacatacaatggagctccaatatggctggcagtagacttttcagtagaaaccttacaggccaagagagtggcatgacatgtttcaaatgccgaaggaaaaaaccttttaccttagaatactatatccaatgaaaatatccttcaaacatgaaagagaaataaagactttcccagacaaacaaaagccaagggatttcatcagctccagacctgtcctacaagaaatgctaaagagcnnnnnnnnnnnnnnnnnnnnnnnnnnnnnnnnnnnnnnnnnnnnnnnnnnnnnnnnnnnnnnnnnnnnnnnnnnnnnnnnnnnnnnnnnnnnnnnnnnnnnnnnnnnnnnnnnnnnnnnnnnnnnnnnnnnnnnnnnnnnnnnnnnnnnnnnnnnnnnnnnnnnnnnnnnnnnn

SEQ ID NO: 110941 - DNA, 430 bp, Homo sapiens
  misc_feature (1)...(430): n = a,t,c or g
ggccctgatgtacggaaccaccacgcgtccggccaggtagaagagaacagaggccccgttttttctccagagagctttgtggttctccaccgggcggccaggaccagatcctcaccaacctaagcaagaggaagtgcccctctcaacctgtgcgggctgctgcgtcccaggactgagacgcaggccagccccggcccctagccctcaggccttctttcttatccaaataaatgtttcttaatgaggaagannnnnnnnnnnnnnnnnnnnnnnnnnnnnnnnnnnnnnnnnnnnnnnnnnnnttnnnnnnnnnnncgtgcttaaaaaaagtctttattaatgggggggggaggggagtttattttttttatttggggaacaaaatatataacccgcgcggcggttataacgcccggtggggggaggaacg

SEQ ID NO: 110942 - DNA, 405 bp, Homo sapiens
caaaagaatctcaaagattattggggtccgccctcagaagagacctgacaatcgccatagaaagcgccaggaaaaaacatgaaggtatcgttggcagctctcggatgggtgttgcacagcacaccccatctcttccaccagaaagtcctcggtcattgaatctctccaaacatctcttgacatgagcccttttacagtgacagaccacaccccaatggagatcgtggcggatattttccgaaggctgggactgaagcagggccttgtaactcacaatgggatagtcttggcgatcatctcgaacaagaacatagtacagcatttcgagcaactaaagcaagacgctgaacccttggcacctccttggtattataacaaaaaaagatatcctcctgcatatggccc

SEQ ID NO: 110943 - DNA, 644 bp, Homo sapiens
  misc_feature (1)...(644): n = a,t,c or g
ggtgatcatctccagcctaaatttcatcatcccttctatggtattcccaaggtgctggggttacaggcgtgagcacttagtatttgtaaccataagagaaagtatattttaacagcattacatttcatgccaattgacaagttttgccaattttaataagaaactaagctttatgtaatataacaccgtaatttatgaattttttcattgtcactgcctttattcatgaaactgtcaaatagagtgtctttcaagggttgcaggatcttagagatagaaagtaccttggtgatcatctccagcctaaatttcatcatcccttctatggtattcccaacaaattatcatccaacctatacttaaaaacatatggtggccaggcatggtggctcacgcctgtaatgctagcactttgggaggccgaggtgggtgaagcacctgaggtcaagagttcgagatcagcctggccaacatggcgaaaccccgtctccactaaaaatgcaaaaaaaaattaaccgggcgtggtgggcagggcatctgtnaatcccagctacttggggaggtttgagggcaggnagtatttgcttcaaacccgggnaggtcagaggtttgcagtgtacccggggttcgtggccactttcatt

SEQ ID NO: 110944 - DNA, 402 bp, Homo sapiens
  misc_feature (1)...(402): n = a,t,c or g
tcaggttgacaaaatatgctaagaataaactaaaattgtttttcatctaacttcaaacatgatatatactaataacaaaaagaatgtcaacatgcagaccctgtgaatacttgactataacacaaagttccatgaaggtacacctctccaagataaaacattaacaccaatcactctcaaactcttcccaaacatagaggaggaagaaatccttcctaacttattctatgaggctggtatttaccctaaaagccagacaaatacatcacacaagaaaagaaaatcacacgccaatatatcttatgactccannnnnnnnnnnnnnnnnnnnnnnnnnnnnnnnnnnnnnnnnnnnnnnnnnnnnnnnnnnnnnnnnnnnnnnnnnnnnnnnnnnnnnnnnag

SEQ ID NO: 110945 - DNA, 431 bp, Homo sapiens
  misc_feature (1)...(431): n = a,t,c or g
cgggtcgacccacgcgtccgcaccgcctcttcctggagaaggcacccttcatggaagacctcagctacaacctgaacaccatgcaatatcctagtcaaccgttccagtccgtggagctggccaactgaccgtctacctgccctggggccgggagcacccaagaccacagaaaagagaaagaaaaggaaaggccacnnnnnnnnnnnnnnnnnnnnnnnnncttaaaagaaacaaacttaacaacnnnnnnnnnncaaggcaaaatttttttaaaggggcccctaaaatcaactgcccggccgggggtttaaaacggccggaaggggaaaaccctggggataaccaaaataacccccttggcaccacaagccacgccaagggcttcctcaggctctggggaaggcatttgcttgcccagctaccaaggggct

SEQ ID NO: 110946 - DNA, 403 bp, Homo sapiens
  misc_feature (1)...(403): n = a,t,c or g
atatcatgaggaccttcaaagagatgcataccatatacagtagaagcaaaggagaggagtaaggcggaggagaaagaagaggaggaggagaaagggaggaagaaaaagaacatggagaagggaggaagaaggagaaggagggggaggaaagggaggaagaggaggaagaggggaggaagaaggagaaagagaggaatatggagattgatcacatatatatatcacactcttataggaatcatatgagggctggaagatatggtagaactatatgaaggaggtaacgtctggactgggctttgatgaataagtaggatttattagggaattgcttatcataactaccattggtgcnnnnnnnnnnnnnnnnnnnnnnnnnnnnnnnnnnnnnnnnnnnnnnntt

SEQ ID NO: 110947 - DNA, 484 bp, Homo sapiens
gactgcatcaagttggcaaattgattccatttatgattgttaaaataggtgaataagattagatgacaagataacaaaaaaggaatacgttatttatttgtttatttcagacagagttttgctcttgttgcccaggctggagtgcaatggcatgatctgggctcactgcaacctctgtctccctagttcaagcaattctcctgggaggtggaggttgtggtgtgctgagatcacatcattgcattccagtcttggcaacagagcgaaactgcatctcaaaatgaaaacaaaaacaaaaaccaaagtgcaaagcacaggatacgacactgtatatgccatgcatttctccatcattgtccttatcacatgcagtgaaattatcttttacttttgtctatctcccactaaactgttagctccataatgacaaagtctgtcttatttgtcagtgtgtgcccatggcctggtaccatgtttggcacat

SEQ ID NO: 110948 - DNA, 431 bp, Homo sapiens
tcttgctctgtcacccaagctggagtgcagtgtctcaaactgcaacctctgcctcctagcttcaaccaattctggtgcctcagcctcacaaggatctgggattacaggttcccgccacctcacctggcaatttttatacttttagtagagatggggtttcgccatggtggccaggctggtctcgaacttctgacctcaggtgatccacgtgcttcaggatcccaaagggctgggattacaggcagtgagccaccgcacccggccaaccttgatcttagggttgattccttcctttaggtttattttaacaattttaaacataaaaatattctctcagataatctgttagaggctataatcctatttgtcattgactctcatttcagtgaaatgtttcctaaagatatgttccggacgcgtgggtcggccga

SEQ ID NO: 110949 - DNA, 462 bp, Homo sapiens
gacagtgtctcactctgtcacccaggctggagtacagcagcacaatcatcacttgctgcagcctcaaactcctgggctcaagggatcctctcacctcagcctccgaagtagctgggaccacaggcgtgcaccaccatgcccggctaatttatttttattttttgtagagatggggtctcactatgttgcccaggctggtcttgaactcccgggctcaagtgatcctctcgtcttggcctcccaaagtgctgggattacaggcatgagccactgcacctggcccattcctgttgttttcagctctcagtttgtgtacttagttacagcaggtccaggaaacatcttgagatgggacatcatctcacgcctggcgtgtcccgaattgagctccagctgcccccacccctgctctcctggtggacttgaccatctcggttgacagcagctccatcaggtcaggcc

SEQ ID NO: 110950 - DNA, 360 bp, Homo sapiens
  misc_feature (1)...(360): n = a,t,c or g
tgcttttcaaattttgtagattttttgtctctcagttctgctaacagattggctttcagatgcttagtgacaccattgcttgaattaagaagccagagggagaatgttggggagagtgtgttattcctgagagttttaaatttagttctgcagccgggcacagtggttcacacctgcaatcccagcaccttgggaggctgaggcgggtggatcgcctgaggtcaggagtttgagaccagccttaacatggtgaaacgtcgtctctactaaaaataaaaaaattagctgggtgtggtggcaggcgcctgtaatcccagctactcgggaggctgaggcaggagatttgcttgaaccngggag

SEQ ID NO: 110951 - DNA, 387 bp, Homo sapiens
  misc_feature (1)...(387): n = a,t,c or g
caaaaacacaaaaaattttttggggagggcccgttggtttcccctttttttcccccccttttggggggccagggcggccgattcccctaggtccccggattttaagcccccccttcccccctggtttaacccccnnnnnnnnnnaaattcccaaaaattttccccgggtnnnnnnnnnnncccttttttcccccctcttcggggggttgggccgggtatttttctttacccccgaggcccaaggttcccttttcccaaatttccccccttcccccccagtttggggtttccaaaccaaacttttttcnnnnnnnnnnnnnnnnngaatactgtgaattataagaaccattgcacataagatttattagtatatttgaagtataaaaa

SEQ ID NO: 110952 - DNA, 377 bp, Homo sapiens
  misc_feature (1)...(377): n = a,t,c or g
gagagctatcaccatgagctgcatgtggatcctgagaacttcaagctcctgggaaatgtgctggagaccgccttggcaatccatttcggcacagaattcacccctgaggtgcaggcttcctggccaaaaatggtgactggagaggccagtgccctgtcctccagataccactgagctcactgtccatgatgcaaagctttcaaggataggctttattctgccagcaatcaaataataaatctattctgctaagagatcaccctcnnnnnnnnnnnnnnntgggttttaagtaagccgccggaagctttttcctttttaggggggttgattttacgttggaccctgctctctgtttatcaacacttctcgctgaaaaa

SEQ ID NO: 110953 - DNA, 710 bp, Homo sapiens
ttttttttttgagatggagtctcgttctgtcacccaggctggagtgcagtggcacgatctcgcctcactgcaacctcctcctcccaggttcaagcaattctcctgcctcagcctcccgagtagctggaattacaggcacctgccaccacgcccggctaatttttgtatttttagtagaaacggggtttcaccatctcggccaggctggtcttgaactcctgacctcatgatccatccgccttggcctcccaaagtgctgggattacaggccatgagctaccgcgcccggccttggctgcagattaacgggaatacctcccttgggcttcctaaggtgacactgtgatattcggtatgacctcccttgctctattccttgggaagaagtacaggcactggtcaagagtgcccgggacccacattgcctggttttgaatcccaagcacctccacatgttacccgtcggacctcccaggaagttacttaaactctctgtgcttcagtttcccgagtggcctaaccctaaggggggttacagaacctgcctcatagtgttgattggaagaaataaaggagctcagacctgccaagggctgaggatggtgcctatctagcacatggcaatgctccataagcataagcagctattattattgtggttcctattttttaaatcagatatatctgcggagccactagcagaatgtgct

SEQ ID NO: 110954 - DNA, 905 bp, Homo sapiens
ttttttttttgagacagtgtcttgctctgtcacccagggctgcagtgcagtggcatgaatttggctccctgcagcctggatctcaatctctcggcctcaagcgattctcctacctaaacctcctgagtagctgggactacaggcaaggaccactacgcctagctaatttttgtattttttgtagagacgaggttccctcttattgctcaggctggtctcgaattcctgggtttaagtgaaccgcccgcctcggcctcccagagtgtgaggacccgcctggcctaaaataatgttatcacttaattcttttcataaactttattgacaacgattggtgtgtttttttaaaaaacctttttaaatttttggtaaggtattacctgagaacagattaaatgcatagttgaatataaaagatctattttatagactggtttatgagtgtgaacacacaaaaggttaaaaggtcaaccttacagcagtctataaatagatctctcatattctctcagtatatctgagaatattgaaaaagtgcatttcaaaatcactggctagggtttagtgatagttaggtagacctcggttccctttcctattgggccctggatttcccatccctattttcttcctcaggtgtattaatacgtggcagggcctgggagactgacgctagggaagaggtgtgtaatgtaaggatacctcagattctttcatgatcctaggattcagctaaacctccacatagcccctgtcctcaaaaatgagtaaatacataaatttaaaaatgaaaggaaaaaaagagaaatccgttcccaccacccaccttcagggctaaaccagaaaaatcaatgacccgcgcttctcaaccataccaaaaccaaacaaataccactcaaaccctc

SEQ ID NO: 110955 - DNA, 405 bp, Homo sapiens
  misc_feature (1)...(405): n = a,t,c or g
caactgtgttcactagcaacctcaaacagacaccatggtgcacctgactcctgtggagaagtctgccgttactgccctgtggggcaaggtgaacgtggatgaagttggtggtgaggccctgggcaggctgctggtggtctacccttggacccaaaggttctttgagtcctttggggatctgtccactcctgatgctgttatgggcaaccctaaggtgaaggctcatggcaagaaagtgctcggcgcctttagtgatggcctggctcacctggacaacctcaagggcacctttgccacactgagtgagctgcactgtgacaagctgcacgtggatcctgagaacttcaggctcctgggcaacgttgctgcttgtgtgcatggcccatcactttggcaaaaaatttn

SEQ ID NO: 110956 - DNA, 834 bp, Homo sapiens
  misc_feature (1)...(834): n = a,t,c or g
gttgtatttaagaacatagtaaccacaagccttagaaatgctgcagttcactagcacacgcacctaaggcacagcagcaaacaggagctcaaggaacaacttgggcattagcctggtgcccatctctcctgctggaattcctgcacagctgggatggagagggtcagcgcccccacctgctgcttccaggatgggctctcccagtgtcagagccagtgagagcctgagcagtagcagactccctggacgcgtgtgttgaagagggagaccggaaggacagatagcacatgtgacatgtcatgtttaaatggtaggataattgtattttcaaatctttaattttgcttaaaacagatgtttgacggataaatgttgtagaatattttggctgaattgcatattttttaaaagaagggctgattttatgatgtaagaaatcttctaggaggggtgatccacacagcagcgcaggtgggtcctgggagtaaatgccctcagaagggatcaggaaggcagcagaggccgggagcggtggctcacatctgtaatctgagtacttttggaggccatggtggatgtattgcttgagcccaggagttcgagaccagcctgggcaacctggcaaaaccccatttctacaaaaaaatacaaaaaatcagctgggcttgatgggggcatctgtagttttagcgacttggaggctgaggcgaaggatncacccggcttgggaggtcnagcttgcagtgagttgtgattgaccacancacttcacctgggtgacagtgcaaaaccatntaaaccaaaaagtncacttaacttnaggtttgaatnaaa

SEQ ID NO: 110957 - DNA, 588 bp, Homo sapiens
tacatttcttttttgaaaaataaaacctctaaccttccctttgttcttcagacatattgaagaccacccagtctgtatgtcttgaatttcttgtatcccaaataaaatattaaatttagagatttatctttacatttttattttgacttttgacactttcctagagcaactctgtctcctttgtagggaattcacgagaaagcaacatgaattaaaacagttaagaatgaacagaattctaggtttctatggtcctagtggaatcagataaaataaaaacaactgtctacttttttggtttaaaagttttctaggccaggcatggtggctcacagccactggtagtttttgtgtttttttgtagaggagtctcactatgttgcctatgctggtctggaactcctggcctcaagcagtcctcccaccttcgcctcctaaagtgttgggattacaggcgtgaccccggaagaaggatgctggctctggcatggggaatgaaggccggtgccctgtcaccccgttctgcaaacctccagcgctgcaaacattgcttcccaccaaagggcctcttctgccactcttaaaatg

SEQ ID NO: 110958 - DNA, 436 bp, Homo sapiens
  misc_feature (1)...(436): n = a,t,c or g
cttgcggannnngcaggagggaccccagaggtgaagcacttctgccccaacgtgcccatcgacagccctgacagcctggaaaacattcccaagatgaagcaggagcccgttcggtctgaggaaggccgggacatggcgaaccggatcagtgcctttggctaccttgagtgctcagccaagaccaaggagggagtgcgggaggtgtttgagatggccactcgggctggcctccaggtccgcaagaacaagcgtcggaggggctgtcccattctctgagatccccaaggcctttcctacatgccccctcccttcacaggggtacagaaattatccccctacaaccccagcctcctgagggctccatgctgaaggctcccattttcagttccctcctgcccaggactgcattgttttctagccccgaggtggtggcacg

SEQ ID NO: 110959 - DNA, 575 bp, Homo sapiens
ttttttttttgtgagacggagtcttcctctgtcaacccaggcttgaagtccattggcgcaattttagctcactgcaacctccacctcccaggttcaagcaattctcctgcctcagcctcccaagtagctgggattacaggtgtgcgccaccatgcccgtctaatttttgtgttttcagtagagacggggtttcaccacgttggccaggctggtctccaactcctgacctcaagtgatccgcccacctcggcctcccaaagtgctaggattacaggtgtgagccaccatgctcagccaacataatttcaatgcatgggaaaacagaggaaatttatttagttatcaatcctttcctgggtagggttagccttatcagccggaaaacacttacttttagataaataaaaatagattaggatatttctaaacttcaaaaaagacacatgcccatttttgctgagacctcaaaagctgcaagtgcatttgcttttcctttcttctttaaatgaagtattatatagcataagccagatggttgccttgtctttaacttcatttgcaaatttattagtgac

SEQ ID NO: 110960 - DNA, 324 bp, Homo sapiens
tttttttttgtagagacagggttttactatgttgcccaggctggtttcaaacttctggactcatgcaatcctcttgcctcagcctcccaaagtgctgggattacaggcatgagcactgtgcccagccagatccttatttttatacctaacggtctacaatttcataacactgtgccttgatgtgcattattttaattcatcaatgtttagcattcagtgagtaggcgcttcctatctgaaaacacgagtctttcagttttgggaaatgttcatgaaggtcttgaggattcacttccctccatttttctgttcttgttccctgac

SEQ ID NO: 110961 - DNA, 815 bp, Homo sapiens
aatatgacaaatggttggttgaatttttttaatgtttaaaaacgagtaacatttttggtttaacacatttaaagaactgatgaactggctttaactattacatacttgagtaccttttgaggtctagtttttatacgaataggcaagcagagtaagttcacgtttcacctctaaaacgcagtgtgaaggatactttacacatgtatttgaaagaataggctttaatagtcaatgtgcttctttctgtttttgtcattaagaaattaagctgctcagcaaggaaactgcggagcttcctgacagctcttgtatcactgctctctgtctatgtgaccggtgtgtgcgtggccttcatactcctctccaaatcaaaatccaaccctctaagaaacaaagaaataaaagaagactcacaaaagaagaagagtgctcggcgtatttttcaggaaattgctcaagaactataccataagagacatgtggaaacaaatcagcaatctgagaaagataacaacacttatgaaaacagaagagtactttccaactatgaaaggccatagaaacgtttttattttcaatgaagtcactgaaaaatccaactccaacgagctatggcagtgttaatgaacataaatcatcaggtcttaaaaaaaaataaaggtaaactgaaaaagacaactggctacaaagaaggatgccagaatgtaaggaaactataactaatagtcattaccaaaatactaaaacccaacaaaatgcaactgaaatataccttccaaatttgccaagaaaaaaaattctattttaaacttgaa

SEQ ID NO: 110962 - DNA, 1085 bp, Homo sapiens
atttggcctgaactaggctagagtttctcttaatcaaaataataacgatgattttttcatgccaaggagtggtgtcatatcatgaagtagatttatgtacacattaaataaacttttacattttaatgtaccaatttgcaatttttttttctattcaccaaaatattccagataacgggtatcagtttttgattctacacatacttcaaatactattaatgcaaaatccttctttagaaatgttacctaattccaatggttcactttattcagcgaagacattcctttgattattctggttaggtgttatgatgccaatttgcccacacattttttcttaggcgcctatgcttgcagtagacagagagttgaggaaagctcaaggttaaaacaggaaaaagtaacacagtaaatacctatttttgtgcataattcaaattaaaaccccaaccacctagaagcaccaatacaaggaactggctgcatattgcattcctgtgacctgttgtattaatgatggaatgactaacgaggatcagagggaatgtggtcagcctcttatctcataagccaaatgctgcatattccaaggctgtcaattctgaaagcccttgttcatttttaaataatgaaaaactttggggccttgttcattgtttctaaaggaagacatttagaaaatttagaatataaatttctgttagtagaaactaatttctcttgctgttctctaaagtatacttgatttgaaatatgtgccctgaagttttgctatgttgaaaaaaatgatgagccgggcacagtggctcacgcctgtaatcccagcactttggaaggccaaggcgggtggatcacctgaggtcaggggtttgagaccagcctgaccaacatgttgaaaccgtttctctgctgaaaatacaaaaattagccaggaatggtggtacacagctgtagtcccagctacttgggaggctgaggcaggagaatcgcttgaacccgggaggtggaggttgcagtgagccgagatcttgccattgttctccagcctgggcgacaagagtgaaactccatctcaaaaaaaaaaa

SEQ ID NO: 110963 - DNA, 1915 bp, Homo sapiens
gtgttgacctcacacccagcttggacgagggtctagagcctgttgtagaaaattctggaatccttcaaggcaagttaataaaacgccagcggctagccaagaatgaccggggtgaccattaccattggaaagacctaaatcgaggaataaacatcacaatttatggcaaaactttccgcgttgttgactgtgaccaattcacacaggtatttttagaaagccaaggaattgagttaaatccaccagagaagatggctcttgatccttacactgaactccgaaaacagcctcttcgtaagtatgtcaccccatcagactttgatcaactcaagcaatttctcacctttgacaaacaggtccttcgattctatgcaatctgggatgatacagacagcatgtatggtgaatgtcggacctacatcattcattactatcttatggatgatacggtggaaattcgagaggtccacgaacggaatgatgggagagatcctttcccactcctaatgaaccgccagcgtgtgcccaaagttttgggtgggaaaatgcaaaggaacttccctcagtgtgtgctaggaaatctctggaccaaggaagtgttggggaattggtattactggcttaaaggactttcattgttgggggagtcactcactattccttgggagaactttcttcatttatgattgtgatccatttactcgacggtattacaaagagaagtttggaatcactgatttaccacgtattgatgtgagcaagcgggaaccacctccagtaaaacaggagttgcctccttataacggttttggactagtggaagattctgctcagaattgttttgctctcattccaaaagctccaaaaaaagacgttattaaaatgctggtgaatgataacaaggtgcttcgttatttggctgtactggaatcccccatcccagaagacaaagaccgcagatttgtcttctcttactttctagctaccgacacgatcagtatctttgagcctcctgttcgcaattctgggtatcattggggggcaagtaccttgggcaggactaaagttgttaaaccatactctacagtgggacaaccctgttctactatgggccccagtgacttctttcattgggtgcctgttgattgaagtgttttgggtcacccggttcatcaaccctggattacagacgagtatgttttgaaatacatggagagcaacgctgcccagtattcaccagaagcactcgcgtcaattcagaaccatgtcccgaaaagcgagaagccgccctgcctcccagaagcagtaaagcaagccaaactgaaaaaggatcccaggcgtgcaggaattggaagcattaatagacacaatttcagaagcaactgaaagatcactcatgcaaagacaacattccgtgaggcatttccaattttatgaccagggaagcttcaggatatgtggacagagacatgttctttaaaatctgtgaatcgcttaacgtcccagtggatgactccttggttaaggagttaatcaggatgtgctctcatggagaaggcaaaattaactacatataactttgttcggtgctttctcaaacatgacctgctgatgagaaaatgcaagacaatttttgatactggaactatgctttgaaatacaccttacactcttcatagaggcatttacagggttcctgaagttttatttctgttttggttcttatttcactcctactgaagtcgaaactaaattggatctaataggatctaagattggtgccttatttagggtgataggggtatagcaatgtctaattttgtgtgtcaaattgacttggccacagggggcccaaatatttcctttctttctttttaaaaaaataaatttttttagagatgggaaaaaaaaaaaa

SEQ ID NO: 110964 - DNA, 287 bp, Homo sapiens
gccgcgtcgacttttttttttgagacggagtctagctcttgtcacccaggctggagtgcagtggcgcgatctcggctcactgcaacctccacctcccaggttcaagcaattctcctgcctcagcctcccgagtagctgggattacaggcgcctggccaccatgcccggctaatttcacttagcattttctttcttcagcacttctaacatccttctattcatcagatttctgaaaatgattaggcagtattattaaaggtacttgtagttatggtctctggtcgacg

SEQ ID NO: 110965 - DNA, 428 bp, Homo sapiens
  misc_feature (1)...(428): n = a,t,c or g
tgtcttccgaaaancctacgggaatcgagccaaagtggctttgattcttttgaaatattcttctgctgggcgttttaaagttttaggaccaccttccggctgcaggctgcccggagccaatactcagtgcaggccctgcggcctggctcccgatacgaggtgtcagtcagtgccgtccgagggaccaacgagagcgattctgccaccactcagttcacaacaggttgaattgtgctccttaaaaagacnnnnnnnnnnnnnnnnnnnnnnnnnnnnnnnnnnnnnnnnnnnnnnnnnnnnnnnnnnnnnnnnnnnnnnnnnnnnnnnnnnnnnnnnnnnnnnnnnnnnnnnnnnnnnnnnnnnnnnnnnnnnnnnnnnnnnnnnnnnnnnnnngacagacatgcccccaagaagaacaccatagtgat

SEQ ID NO: 110966 - DNA, 1498 bp, Homo sapiens
agctgtggctggaccttcaccagcatgtccaaacttctaaggcacagaaggaaacatgacgatgaccggaggtttacctgccctgtcgagggctgtgggaaatcattcaccagagcagagcatctgaaaggccacagcataacccacctatgcacaaagccgttcgagtgtcctgtggaaagatgttgcgcgagggtctccgctcgtagcagtctgtacattcactctaaaaaacacgtgcaggatgtgggtgctccgaaaagccgttgcccagtttctacctgcaacagactcttcacctccaagcacagcatgaaggcgcacatggtcagacagcacagccggcgccaagatctcttacctcagctagaagctccgagttctcttactcccagcagtgaactcagcagcccaggccaaagagagctcactaacatggatcttgctgcactcttctctgacacacctgccaatgctagtggttctgcaggtgggtcagatgaggctctgaactccggaatcctgactattgacgtcacttctgtgagctcctctctgggagggaacctccctgctaataatagctccctagggccgatggaacccctggtcctggtggcccacagtgatattcccccaagcctgggacagccctctggttctcgggacagcagccacggttctgcagcagggcagcttcagtgtggatgacgtgcagactgtgagtgcaggagcattaggctgtctggtggctctgcccatgaagaacttgagtgacgacccactggctttgacctaccaatagtaacttagcagcacatatcaccacaccgacctcttcgagcaccccccgagaaaatgccagtgtcccggaactgctggctccaatcaaggtggagccggactcgccttctcgcccaggagcagttgggcagcaggaaggaagccatgggctgccccagtccacgttgcccagtccagcagagcagcacggtgcccaggacacagagctcagtgcaggcactggcaacttctatttggtatgaagcactctattcagtcaccaccatataggtcacttctctcatactcggtcttgaggatattctggattaatccctttcctatgccagacgtttctggtttaacaaaaggacgcagccccggactacaagtctggaactgacaagttccttatgacccttgacaaatcacccttaaccccatctgagccttaaattctcatttatttcctgcataaggagatttggctaaatgctttctgaggtcctttggagtcctgtggctccatggtaatgtgctcctttccttgaagattgggggttttgtaatgttgagatactttgcctctatgcttgtcagctcatgaccagtcctagaagaggagtcgagacataagccaccttcagaggttcaatggaaactttaaaaccataccaaactcttttttaaaattagaattaacaagaaaaaaaaa

SEQ ID NO: 110967 - DNA, 422 bp, Homo sapiens
ttctcacgctggggtgcagtactgagatctcagcacactgccgccttgaactcctggtctctcaagggatccttctgcttcagcctcctgagtaggtgggactacagtcacaagccatcatgcctagttaattttttttttttagagaccgagatctatgttgcctaggttcatcttttactcctggactcaagtgatcctcctgccttggcctcccaaagtgttgggattctgtaaacccaaccacacctggcactaagcttattacctctctaaacctcagttttctttcttgtaagttagggaagataatagggttattgtctggatgaaatgatatgatgctcagcaccttacacatagaaagtgctcaataaacgttggtggatatgatgttctcgtgccgaattcctgcagcgcgg

SEQ ID NO: 110968 - DNA, 506 bp, Homo sapiens
ggagacagggtttcactttgttgcccaggctgaagtgcagtggcatgatcatggctcaccacagcctggacttactgggctaaagcaatcttcctgcctcagcctcccaagtagctgggactactggtgtgaaccaccacgtctggctaattaaaattttttggtagaaacagggtctcactatgttgcccaggctggtctccaactcctggggctgaagcgatcaatcgtcccaccttggcctcccaaaatgttgggattataggcaagagccacagcaccagggcctgtaaagctttctgattagactccttgccaatgggtattattctcttcttaactcaacttcttaatctgccttgctgtcagttatttattaaaatgtcaattttgattatacaggattccacaattaaaactatcacctagagtataatgttaaaactccttagcatgatatataagggcatttcatgatcattcctctagccatctccttacaccac

SEQ ID NO: 110969 - DNA, 474 bp, Homo sapiens
tttgtttttacatgcagacaggctggaatatagtggcatgaccatatcacacctgcaacctcaaactcctggggctcaaggtgatcctctcacctcaagcctcccaagggaggtgggactacaggtgtatgccaccacactcagctattttttttttcatttttgtagagactgagtctcatcatcttgcccagggctggtctcaaactcttgggctcaagcgatcctactgcctcgccctcccaaagtgatgggattacaggcatgagccaccactcatgcccatctactttttaaaaactgcagtgtatgattttaatatatcttatctgtatgctgctaaagtactaactggtctataagaattaagaatagccaatgatcaactgcaaaaagagtaacaaaacctatccatgcttttactttattccattctttgtttttttctttttctccctatttaaatgtactgag

SEQ ID NO: 110970 - DNA, 382 bp, Homo sapiens
ctagccaaaattgacaaatgggatctaattaaagagcttctgcacagcaaaagaaactaccatcagagtgaacaggcaacctacagaatgggagaaaatttttgcaatctacctatctgacaaagggctaatatccagaatctacaggttgacatttcattacttatctttctccccctcaagacggcaagctctctgagggcagagtccatgagttaggtacctattttctctctagcacctggcacaggcctgttggcttttctagttatctaatgagtggttaactggatgggcagattccatcctgtaggagtttgtggtcatcatggcctccagtgtcacaagcctcaatacaggactgtgggggtattagggcccc

SEQ ID NO: 110971 - DNA, 385 bp, Homo sapiens
ttttttttttttgagacagagtttcactcttgttgcccaggctgcagtgcaatggcacaatctcagctcactgcaacctctgcctcccgggctcaagcgattctcctgcctcagcctcccgagttgctgagcttccataacactttaccacccaacccattaacttctttgatcatttacttttatgtttcctagatgttccttgcaactccttccttataaatattattctttcaagtcaatgttctcttctatggctaccatattctttacacaaaacaaaattctactcaaatttgttatggtgactatattgtagggaagacgatggagcagatgaaggaaaaaataagggcacaggatacgaaaatgagcaacccatgct

SEQ ID NO: 110972 - DNA, 1226 bp, Homo sapiens
tgttaggatactctatatttaataatgagtgtttgacaatccagctttttaaaattagaacttgagggataaatggataacgtaaaacctgttaaatctgacggtatcttttttctccagacaatgattgaagctcacgttgatgtcaagactaccgatggttacttgcttcgtctgttctgtgttggttttactaaaaaacgcaacaatcagatacggaagacctcttatgctcagcaccaacaggtcccgccaatccggaagaagatgatggaaaatcatgaccggagaagtgcagacaaatgacttgaaagaagtggtcaataaattgtaagtgtttctttgcttcctcacacaacacaaccttgagtattggattattcctgagatgagagaacgcatatgagacaaggtaaaggtctgtggaaatcctgtctgtgaatccttctagctatatctctttaagtgaaagagtgttaagtactcagtaaatatgattattattactattattatttgagtcagagtcttgctctgttgcccaggctggaagtgcagtattgtgatcctccttggctcactgtaaccactgcttcctgggttcaagcagttcttgagcctcagcctcctgagtatctgggaatacaggggactgccaccatacccagctaatttttttaaatttttagtagagatggggtttcatcatgttggccaggctggtcttgaactcctgacttcaggtgatccacccacctcggtctcccaaagtgctaggattacagacgtgaccccactgcaccccagccaaataattcaaacttaaagctgttggaacttaaattgttctgagtcttgaagaggaaatgtgactatgaagcctgagtcacatggcatgcagctgcaacttctgccttttttccacctataaataattgagactaagtggtgccagagataaaaccccctcagatcactgccccttctacagagtaataatgtcatcttccttgggatgcagcaatctgtaaccaatcaaatcactgtaacatatgcactgtcttgtatggaaaatgttataatcctgctaaaatttttctgtctgtctctgtataagtaaaaccttaacttcttcactttggaacgctgaacccattcgtttggagttgaggtctcctgggtggtatccgcacactcaaataaactctatgtgtaatcataaaaaa

SEQ ID NO: 110973 - DNA, 494 bp, Homo sapiens
cacattcataggactggcaggcaaataattgatggtctcaaggatgaatcagagtttagtcattcaacaagcacttattatcacctgctatttgccagggaaaagtagatgcaggtccaaaatcctttatccaaaactctttattgagagggagtttctctctgtcgcccgggctggagtgcggtggagcaatctcggctcactgcaacctccacctcccaggttcaagcgattcttgtgcctcagcctcctggagcaagctgggattacaggtacccgcctccacacctgggctaatttttgtatttttagtagagatggagtttcattatgttggccaggctggtctccgaattcctgacctcaagtcctcccgccttcgcctcacacttgttaattccagcacttggggaggctgaggtgggaggatcacttgagcccagaagtttgagaccagcctgagcaaaatggcgagcacctatctctaaaaaaat

SEQ ID NO: 110974 - DNA, 333 bp, Homo sapiens
  misc_feature (1)...(333): n = a,t,c or g
cgtnaacttnttcaaggtcagcctttatttggtgantttcccaaaagctggaaaccaatccaaattgtccgtcagcaggtgaatggataaacaaatgtggtacatccatacaatggagtattactcagcaacaaaaacgaatgaaccgttggtactcacaacatggatttatgcagagtggaagaaaccagacaaacaggagtatatactgtaagactccatttctatgaaattctagaaatgcagactaatctgtagtggttacctggggatagaggcaggcaggcaggaaaggatgagagggccggagtataaaggagcaccatatcccat

SEQ ID NO: 110975 - DNA, 327 bp, Homo sapiens
  misc_feature (1)...(327): n = a,t,c or g
gggaaatcattaggcatccaccttacagtcccgatttggctccttctgactttgtttcctcattttaaaaaatctttaaaagcactcattttttcttccgttaataatgttaaaaaggctgcactgacatggttaaattcccagagcccgcaattctttagaggtggactaaatggctggtgtcacagcttacaaaagtatcttgaccttgatggagcttacattgagaaataaaaatgttgttttgttgttgtcattgttggtggttttannnnnnnnnnnnnnnnnnnnnnnnnnnnnnnnnnnnnnnnnnnnnnnnnnnnnnnn

SEQ ID NO: 110976 - DNA, 503 bp, Homo sapiens
  misc_feature (1)...(503): n = a,t,c or g
cggaatatgtactttttgagttttgattaaatatcagtgcataaagtgctactgttcattgaggaatatttagtagttatattcatatttgggtattctgaatatacttgaaaaatttcagaaggatcatttggacaatatgggatttttattagaaaagttccctatagtaggacatttgttccctaatcccttttaagttagactgaagcagttttctaagttactatgggaaaaataggtttctgccgggagcaggtgtcacgcctataatcccaacactttntgggaggcagaggtaggagcccaggagttccagaccggcctgggcaacagagcgagaccctgtctcttaccaaaaattcaaaaattagccaggcatggcagtgtacatctgtaatctcagcaacttgggaggctgagatgggaggattacttgagcccaggaggttgaggctgcagtgagccaagngtcngccactgcactccaacctgggtgacag

SEQ ID NO: 110977 - DNA, 645 bp, Homo sapiens
  misc_feature (1)...(645): n = a,t,c or g
ttttttttttctgagacggagcttgctctgtcgcccaggctggagcgcagtggcaattctggactcactgcaagctctgccttccgggttcacgccattctcctgcctcagcctccccgaatagctgggaactaacaggcgccctgtcaccaacgccccggataaagttttttttggtataataacttaagtttttctttggtagctaaacttaagtcttccaaaagtccttcaaagtcctctccaagttgtgcttcccaacccagcccagtcatcagataaggctgttcttccctgttgctgctgccctgcctgctttctgggacctgcttcctgccttgggagttgggatccctccattcttgaactccaggggccttcgctttgttcattctctaggtttggtgaagcacaactggtcagaggcatttgaactaggagcaactgcatcttgaataggggctggggacaatgaggctgaaacctactgggctgcattcccaagacagtttaggcaattctaaggttacagaatgagataggaggtcgantccaagatatagatcataaagaccttgctggaggccaggcacgatggctcatgtctgcaatcccaccaccttgggaggccgaggcgggcggatg

SEQ ID NO: 110978 - DNA, 387 bp, Homo sapiens
ttttttttttgagacggagtcttgctctgtcgcccaggctggagtgcagtggcgcgatattggctcactgcaagctccgcctcccgggttcatgccattctcctgcctcagcgtgtttgacatttttaatgataatggaaaaacgtttatgccttagaagtgaataaagggctgcctgtggaccaataagaccccaattacctaaagaaaaatgtacacacacacagatacaaaactagcatgaactataccaacatgttaccagtggctgttttgaggtactgaaattgcgggaaatttttcttaattggtctgtattttctaaattttccacagcatgcacatggtgaagcagcactgcacagtgaggggcacacgggctttggg

SEQ ID NO: 110979 - DNA, 674 bp, Homo sapiens
tttttttttttcttgagacatttcactctggcttaggctgcagtgcagtgatgcgatcgtagctcactgtagcctcaacttcccaggctcaagcaatcctcccacctcagcttcccatgtaaataggactacagggatgtataccaccgcacccagctaattttttatattttgtagagatggggtctccctgtgttgtccaggctaatctcgaactcctggggcccaatcaatcctcccgccttggcctcccaaagtgttgagattccaggccaatgttttatttttacacggttagtttatcagagttgcatatgaataggtgaatgaatcaactcaagtccacaaagacactgggtaggggtaggaaaaagtaggctgggactgggagcaaggcacagacgggacttggacttgtcctatacttggagctagttactgtaaaagtagagcgagggccaaggccatgaattaaaagtagcccaagaccttgacatcaacggttcatactaagtacttaacagtgcacttcataacttaacagtgtataggctgccaacaaaacagctaatagtcttaggctactttaaaaatgatgaatttagcatagatcatattatactactctattttgtattactcgaaacctagtgaaaggctaggttaaatgtttt

SEQ ID NO: 110980 - DNA, 404 bp, Homo sapiens
tttttttttgagacggagtctagctctgttgcccaagctgaagcgcagtggtgccatctcggctcacttgcaacctctgcctcccgggtttaagcgattttcctgccctcggccctccccgagtagctgggatgacagcaggcagagcacacagagacacctctgttatgtgggtgcccagagggatgtgcctgaagaacagcaaggcagctctacgcctgtggactggcaaccaccagagagtgggaaaggccaagtgtgggcagaggtgggtgtacagcaccctttactgggatatactggtggaaacagactgggcaggcctctgtgcacaactaggcagtcattaaatcataaagcatgcaagtgccttacgatgacccagcagcttcattctgggctta

SEQ ID NO: 110981 - DNA, 479 bp, Homo sapiens
  misc_feature (1)...(479): n = a,t,c or g
atccaatcaatttgacaccctgtattatccatcacattaagtattttcattgttgtagcttttgcatatgcagaagaagaattggatgaaattcagccttgattatgatgaaaactctcaacaagttaggaatagaaggtatgtgccttaactcaataaaggccatttatgaaaaagcaatgctaactttatactgaataaggaaaagttgaaagctttctctctgagatctggaacaagacaaatcgtccaaactttcagccnnnnnnnnnnnnnnnnnnnnnnnnnnnnnnnnnnnnnnnnnnnnnnnnnnnnnnnnnnnnnnagtcatactaattgaaaggatgaaagtcaatggtctctgattgtggacaaaataatcttatatgtgaaaaactcttaacactaccccaaaactatttgaactactanaccaattcttgaacatttgcagaaaataacacaggaggaactttctg

SEQ ID NO: 110982 - DNA, 475 bp, Homo sapiens
  misc_feature (1)...(475): n = a,t,c or g
tactttttttcagacagagctcactctgtcacccaggctggagtgcaacgntngcaatcttgactcactgcaacctccgtctcctgggctcaagtgattctcctgcctcaggaggtggaggttgcagtgagctgagactgcgccactgcactccagactggcaatacagtgagactcaatctaagataaaccaaagaatcaaaaaggaatggccctttcttaataagctggagattattttaggcatggctttccctcatagtctatgaaattttcctacaatgatcatcctcagttagcacatggggcatttagtatatgtcaggaaacaggcctaaggtttttacaagctttctgatgtaatcatcaaaacaattctatgaggctgggaagtaggtacaattttacaatttttatcctcattttacagatgaagaaatactcttaaagaaaatgttaatgtcaacaaccctcg

SEQ ID NO: 110983 - DNA, 642 bp, Homo sapiens
catgtctcaggctccggaataagctgggatgaacaagtgtgcaccaccacacctggctaaatgttgtatttttagtagagacagggttttgccatattggccaggctggtctcgaactccttacctcaagtgatctgcctgcctcagcctcccaaagttttgggattacaggtgtgagccacagtgcgaggcttgatgattaaatgacacaggctcctataaatgtttactagactgaaataagctcttgtgcaatgctgtgctacatacagcagctcctctgtgagtccatgtggtacttccacgtctcagcagttctacttacaactgcgaatatggaatcagcttgatcatcatttaaaactcttgtctatgaacatctaaacttccattaaagcaaaaacatcatttggaaaaaaaaggcagattctgattcgatacgtttgggtgggggctggatgtcttaatgggctcccaggtgattcctggcagctgctggctggggaccatccttgagcagctaggcacctggggctcaaagagccggatgattctctgacttaaccacaggagggcacaggaagtgtgcagagacccgaacaacattctccctgccaaggaattcactttggcagagagggg

SEQ ID NO: 110984 - DNA, 299 bp, Homo sapiens
  misc_feature (1)...(299): n = a,t,c or g
ggaagacccggaaacttangggccacgtgagccacggccacggcgcantagncaagcaccggaagcaccccggcggccgcggtaatgctggtggtctgcatcaccaccggatcaacttcgacaaataggctactataaagttctgggaaagggaaagctcccaaagcagcctgtcatcgtgaaggccaaattcttcagcagaagagctgaggagaagattaagagtgttgggggggcctgtgtcctggtggcttgaagccacattggagggagtttcattaaatgctaactacttttta

SEQ ID NO: 110985 - DNA, 818 bp, Homo sapiens
caaaaccacaatgagatactatctcacaccagttagaatggcaatcattaaaaagtcagaaaacaacagatgctggagaggatgtggagaaacaagaatgcttttacactgttggtttgagtgtaaactagttcaactattgtggaagacagtgtggcaattcctcaaggatctagaactagaaataccatttgatccagccatcccattactgggtatatacccaaaggattacaaatcatactactataaagacacatgcacacgtatgtttattgcggcactattcacaatagcaaagacttggaaccaacccaaatgtccatcagtgatagactggattaagaaaatgtggcatatatacaccatgggaatactgtggcagccataaaaaggaatgagttcatggtcctttgcagggacatggatggaagctgggaaaccatcattctcaggcaaactaacacagcaacagaaaaccaaacaccgcatgttctcactcataagtgggagttgatcaatgagaacacatggacacagattggtaaaacttcagcggttgggatggacaccctcttttggtgatgccgtgggggaacgcaacatgattcaaccccaatgaaagagaagttgcaataacccgctaagacttgcaggtgccttttgacttcggcaaacccccttcaagaaatgcatatgaaaaaaactcatgtttcaggttattcattacaacattgtttgtaatagcaaaatgtggattagaaatagtccagatgtctgtccgtaggggactgtttaataaactattgtcagtccct

SEQ ID NO: 110986 - DNA, 468 bp, Homo sapiens
ttgtttgttttaagttagggtctctgtcgcccaggctggagtgcagtggcacaaacatggctcacagcagcttcgacctcctgtgctcaagccatcctcccacctcagccttctgagtagcttggactacaggtgtaagccaccacgcccggctaattttttatttctttttggagatgggatctcactgtgttgcccaggccagtcttgaactcctggcctcaagcgatcctcccgcctcagcttcccaaagtgttgagatttcaggcgtgagccaccacgcccagccccagaccacactttgagaaccactattataggttcaaggagttcataaatgtggctacttataacagggcccggcacagatggaatggagtaagtattcaataaatgttacacttattgcataaaaatagagggaaaaaagtaactcgcgtagtggtaccaagtacgtacgtacccacc

SEQ ID NO: 110987 - DNA, 383 bp, Homo sapiens
  misc_feature (1)...(383): n = a,t,c or g
ttttgtccaaggtcggtgagacgtggcgcccccccagacaggggtctccggatcttttcagggcaacccttcaaaagtgaggatggtccccagggttcagttttccttcaaaacagtttggagaccagagatttgctcagccctttccgaccccacttatccctatggggatttatgttggtggaaataagggctttgggggtggtgggcaccccctagttcccccaaaagaagaaaaagggcagcccccccccggtgttatggggtgaaaaagggttcccaaatttatatcctccccaaaaccccaaaaaggaacccnnnnnnnnnnnnagaacggtttcannnnnnnnnnnnnnnnnnnnnnnnnnnnnnnnnnnnnnnnn

SEQ ID NO: 110988 - DNA, 378 bp, Homo sapiens
  misc_feature (1)...(378): n = a,t,c or g
gctgatgcctgcggagaagggagtgtctgggaacttttgggaccccagttcccaacactgcatccagtcccgccnnnnnnnnnnnnnnaaaaaaaaggggttttggttttgtccccaggggggttttaaaccccaaacccaaagggaacccccggcctgggccccccaaannnnnnnnnntaaaaggggggcccccccgggggggccccatttttaaagggggggacggggggggatttttccccggccaaaacccttccccgggggaaaaaggggttgggaacctgcccttatttttggccctggggaagggaaaaaggacacccccggttttaaaaccgggtgggggaatttnnnnnnnnnnnaagggcctcgggg

SEQ ID NO: 110989 - DNA, 436 bp, Homo sapiens
gcaccatgagcttcaataccctggctaatttttgtatttttagtagagacggggtttcgccatgttggccaggctgatctcgaactcctgatctcaggtgacccgcctgcctcagcctctgaaagtgctgagattacaggcgtgaaccacccaagcccggcctgattttaatattaatataaaacaaagattccatctccccagctctgcccactttgtgaaggttaaaggtgtcaccttagccctctccaagtcacagtaaaatgggaacaatgggcacctgcccttcacagagctgctgtggaagggtaatagatcattttgctgctaggaccctggcacaatgcagccttgcccaaatggtggctgttattactggaagtttcccaggccaaggaaggctggcatccacagcccttcacccaaagcccaccag

SEQ ID NO: 110990 - DNA, 1240 bp, Homo sapiens
  misc_feature (1)...(1240): n = a,t,c or g
gctgcagtgagctatcattgcaccactgcactccagcctgggcancaggttgagaccctgtctcaaaaacaaaacaaagcaaaaacaaccccaaagtctggtttccttattaaccccaagttcatggtccacccgaagcttttcaaatgtcagtcccggctccccgcgccccagctgcagtgctgggccctatcgtcaccctcgccctcccggctccctgcgccccagtgccaggtgctgggcccagtcctcacccttgtcctcccggctgcccagcaggcggtgcgggcggcccagacaggcggctgacttcgctctgaaggtggaagtggaatgcagcagcctgcaggaggccgtgcaggcagctgaggctggtgccgaccttgtcctgctggacaacttcaagccagaggtaaggtgggctctgcctccggggagggatctgtggtgggctcttacctccccttggcttgtgtcccgcaggagctgcatcaccctggacaacctcccccagttctgcgggccgagtgtggctgtggaagccagtgggggcatcaccctggacaacctcccccagcccttgatttctcccctcaagctgttttgccaaagaggtggctccagtgcccaaaatccactaagtcctaaaccggaagaggatgacaccggccatgggttaacgtggctcctcagggacctcttggtaacacatctttagggtcagtggccaatggggcacattttggcactagcttgagcccaactctggctctgccacctgcttgctctgtgacctggcagggctgacttcacctctgctcatctcaattgtcctattctgtaaaatgggtctaaataaaggatcaaccacatggggttctgcggtgataatgaccacatagtgaggggtcagcaaatgtcaagaagttacctggggacagccgggcacgatggctcacacctgtaatcccagcactttgggaggctgaggcgggaagatcacttgagttcaggagtttgagaccagcctggccaacatggtgaaaccccatctctaccaaaaatagaagaattagctgggtgtggtggcacgcgcctgtaatcccagctacttaggaggctgaggcaggagaatcacttgaacctgggaggcggaggttgcactgagtcgagatcacatgactgcattccagcctaggttaccagagcaagactccgtctcaaaaggaaaaaaaaaaaa

SEQ ID NO: 110991 - DNA, 371 bp, Homo sapiens
  misc_feature (1)...(371): n = a,t,c or g
nnnnnnnnnnnnnnnnnnnnnnnnnnnnnnnnnnnnnnnnnnnnnnnnnnnnnnnnnnnnnnnnnnnnnnnnnnnnnnnnnnnnnnnnnnnnnnnnnnnnnnnnnnnnnnnnnngccttgtctttttatcttttggatagtcatgacaccaaaaatcctggtgtgggcaccgtggctcctttgagggcagaggctgaggagaagccccaagatatggccaaggccaagagggatgaggctgaggtggatggtaaaggggtacaaaggcctttgtagtggtgtccgggggacttacagagacaagaatggggagaatgagatgctggcttgacaggangaggagcaagctggctttcatttggtaagatttg

SEQ ID NO: 110992 - DNA, 908 bp, Homo sapiens
gcaaaactggaaggtgaacatgaaagggatctagaaagcacttcccgagactctctagccttggataaagagagaatggataaagatctgggatctgtgcagggatttgaaagatacaaattaaatccgagagaactgagagtctggaagcaggagatgacgagtccaagttagatgatgcacattcattaggctctggtgctggagaaggatacgagccaatcagtgatgacgaactagatgaaattctggcaggtgatgcagaaaagagggaggaccaacaggatgaggagaagatgccagatcccttagatgtgatagatgtggattggtctggtcttatgccaaagcatccaaaagaaccacgagagcctggggctgcactcttaaaattcacacctggagctgttatgctaagagttgggatttctaaaaagttggcaggttctgaactctttggccaaagtcaaagaaacatgtcagagactttttagaaaaacccaaaggtagtttcattttcttttaactatataatgtctgttaaccatttaagatgccatctgaaggggattctgatctgttcttatgtagcacttaacactgtgtagaaactattttttgagaaatcattttataatcattatttaaccctcatggtcaaagtttctctttaaaatttattttgagaagaagagttatcccacagaaaagttgggaaaagagtacaatgacctttttgtatgaaaattacttattaacaggccaggcgtggtgttgcatgtctgtagtcacagctactcagggaggttgaggcagcaggattgctggagcccaggaaattgaggctgcagtgagccatgattgagccaccacactccaacctaggtgacagagcaagaccctgtctc

SEQ ID NO: 110993 - DNA, 275 bp, Homo sapiens
tctccatcagcagtggtacaatcatagctcactgcagccttgagctcctgggctcaagtgattctcctgcctcggcctccctgagtagctgggaagacaggtgcaccaccatgcctagctttttttttttaactttttattttttgtagagatgggatcttattatgttgcccaggctgacttaattgtttctttggttgaattgttccttcctgaaggtaggaggatacctctctgcctaaaggtaaggtccagcagaggaaaaaaggcaaact

SEQ ID NO: 110994 - DNA, 1113 bp, Homo sapiens
  misc_feature (1)...(1113): n = a,t,c or g
ctcgcaccaaccccagcatgatgattgatgacctgctgacttcatgctcaccaggagacaccaggaggcatggacatgactcgcatggatgtacatgccgactatcgattagagcctgtggattgcatgtcggacatgctgcggtctctggccaccacccggcccacggtgaatgcagacgacctcctggaaagtgaagaaattctcagaggactttgggctcgataggcaaaagctgcttcacttgggcaatggtgaaggttgggaagtttgattggggcaaatccaggcactccccatgtcaacagccagacagggcttccagggcttgtcccagtcaatacagagttccctctgctgttctggccgtctgccaggggagccagaaggaagggccttgcagccacagagacactccactgccctgggggcaccacagtgggacactgctcttcctacttcctcctctcctgggatgctcatcagctccttctgcctccccccccttttttttccatcttttggtccccctaaatataatgctgcttggattttcatcttatttataaagataaaatcacctgggaagtgttcaagggagtggggcgggggttggcgggggagaagcagccgtgttnccaggggtcacccagacctccagacagcccccagacctccagacagccggctagccccactgccccgttcctttttacggcccaagttttgcgtccgttgagagcagagttggctgatgcccctgcaaccccagcccaagctctgcctcaaagaccgagtgacataagcccattcccaccctcctaggttcacatcccagggctgtgtcttccttcgggggaggagatggtgtcgtttagatcagggtaaggcagtcaggcgggtgttcaccactgccttttcttcctctgagcgtgagaacactgaacccagccactgcccctgggggtccctggtcctggaaatggtctaataaatccttctcccttcttgagctacccaagtgatttcatctttccttgactcttaactgagactctgaagggccacccttgcttccaattaaaagaccctctggttttcaaaaaaaaaaaa

SEQ ID NO: 110995 - DNA, 447 bp, Homo sapiens
tgagacagagtttcactctgctgccccggctggagtgcagtggcgccatctcagctcaccgcaacctcccgctcccgggctcaagcaattctcctgcctcagcctcccgagtagctggcatcacaggcacccgccaccacacccagccaatttttttttgtatttttagtagagatggagtctcaccacgttggccgggctggtcctgaactcctgacttcaggtgatacacccgccccggcctcccaaagtgctgggattacaggcacgagccactgtgcctgaccaagaccataacatctttaagtatgaaactttaaaacagaggaaaaaaatgttctttgtctttattgtgttttcacctgaggaaatattacaatagtactcccaaataaaaaactgtcccaatattggggaaacagtgaaaaatgtcatgctaagaataag

SEQ ID NO: 110996 - DNA, 546 bp, Homo sapiens
  misc_feature (1)...(546): n = a,t,c or g
gatggagtttcgcncttccttgcccaggctggagtgcncatcttggctcaccacaacccctgcctccccggttcaaccaattctcctgcctcagccntcctaagcagctgggatnacaggcatgcaccaccacgcccggctaattttgtattcntaatagagactgggtttctccatgttggtcaggctggtctcgaactcccgacctcaggtgatccgcccgcttcggcctcccaaagtgctgggattacaggcgtgacacttgttgcccggcccagtcagcagtactcttaaacgccaataatgttcaagctgagaaacacatcatcaagaatgcaatcctattaaaaatagccacaccccccaaaaaatggactaggagtatgtctaaccaaggttgtgaactatctctatgagaagaactacaaaataccagtgaaagaaatcagagacaactcgaacaaatggaaaagcatttcatgctcatgggttgaaagaatcaatatcaatgaaatgtgcaacgaaatcgtcgacccggaaagtccg

SEQ ID NO: 110997 - DNA, 1197 bp, Homo sapiens
atcgatctagaggatccctcccttccaagctggaaaaagaaatttcatgaaacagtttactggtcttactacatagaaatggcatctaatactttctattttatttcttaatgcttttaatgaactactaaaatcagcatgcaatttgagagacactacaaggttacatgaatttataaacttagttagagtgagaatataccatacaaactttcatttttctatttaaaaaatatttttgtagagacggggtctcactatattgcccaggcctgcctcaaactcctggctcaagcgatcctcctgcctcagcattccagaatgctgggattacaggcttgagccaccttgcccagctccaaactgttttataagtgagaaaacttaaaactcagtgtagagatgagatgggagggactctggccataaattctggatttaaaccttggttgtgtgttgttgggcagggtgtttaatgcctctttttcctcagctttctcatttgtaacatagcaataatagaacctatacataaagtagttgtgaggattcagtaagaatgccatgcatagcgtgtctgatagtgtgctgtaagtgtccaatacattttagcttttatgatggctgaagtctcaaattctttctgctgtactatacgtactttgaaaaatattttaagactttagaagtgttaaagcaacctccaagtaaagctagactcttgatctctagttggatgtatcatttgttgtgatctcagccctctgaaatagtaagttttaaaaatagcgaaaaggagccacttaaagttgttttgtctcagttgcaaattgactctcggttgccgagctttatgctatattattatatagttttaaaactattcctttttaactttcttaattttcaattttgttaaaagaatgaatactttagcagcttttcaagccttttttaaaaatctttataagcatgtaattaaatacaaatatgttcatacctgtaacctattaatttagctttcttgtagttttaattcattaaaataaaaaaataaaagttactgtttcctgttttatccacgtttctgcaggtttggtgagtttgcccatcctcaatattttatattgccattgggggtttaattttgtgtcctgccctaagaaaagggacatttacagggtattgaaatcgtaa

SEQ ID NO: 110998 - DNA, 369 bp, Homo sapiens
cttcagatctgcctctcaccttcgaacacatggaaggactcacactggagagaaaccctatgaatgtaaacaatgtggtaaagcctttggatgtgcctcgagcgttaaaatccatgaaaggactcacactggagaaaaaccctgtagctccaacacttcgaaaggccaaggcgagaagattgcttaattcacataagattcctagaagccaccgaatccaatcatgagagttggtcttgctgtttggacccggctggagtgcagtgatattcacaagtgtgatcttagtgcatgagagcttcatattcctgggctcacaatccttctacctcagcctgccaagtagctgtcactacaggtaccagctgg

SEQ ID NO: 110999 - DNA, 418 bp, Homo sapiens
gatctgtatgctaaaaattgcaaaatactgataaaagaaatcaaagcaaacccaaagaagtggagacacataccgtgttcatgtactggaaggctcagcagagacgtgggttccctccagactgatgtacaggtttgatgtacttgctagcaaaaatcccagcaaggtatttttttgtagatgcgcaagattattttcgtgacttttattccaacactttgtgaggcccagtgctgcatatcattgtggtcaggatatcgagaccattcttgccatcatttggaaaccctgtctttactattaattccttaattaacatggcatggtggttgcatgccttgattccagctacttgtgaggctgaaacatgaaaatcaacttgaatccctggtggcaaaagttttagttaaccttaatt

SEQ ID NO: 111000 - DNA, 438 bp, Homo sapiens
  misc_feature (1)...(438): n = a,t,c or g
cgtacccgccgaattccggtcgaccacgcgtccgcaacgatgagtttttatggacttcctgcaacactactggtggggaccccagaggagctctatgaggggaccttgggcaagtacaatgtcaacgaaaatgccaaggcagcaatgactgaactcaagtcctgcatagatggcctgcagccaatgcacaaggcggagctggtcaagctgctggtgcaagtgctgggcagacaggacggtgcctaagtggacctcagacatggctcagccataggacctgccacacaagcagccgtggacacaacgcccactaccacctcccacatggaaatgtatcctcaaaccgtttaatcaataaagcctcttccgcnnnnnnnnnnnnnnnnnnngggggcccgtttaaaaaaatccaagttataataatgcggcttacaaaaa

SEQ ID NO: 111001 - DNA, 561 bp, Homo sapiens
ttttttttttttgagagggtcttgctctgttacccaggctggagtgcaggggcacaatcacaggtcactgcaacctcaaactcctgggctcaagcaatcctccccacctcaggctcctgagtagcagggactataggagtgaaccactatgcctggctaatttttttattttttgtagagacagggttttgttatgttgcctaggctggtctctaactcctgggctcaagcaatcctcccacctcctaaagtgctgggattacaggctagagccaccgcacctgcccacaccttcttaataaggatcagggtattttaacctacattacttcattgaacaagtaatacagccacttaagagataagacagaagggaaatgactcacttaaggtcacttagcaaaaagggaagtcatttaacaattaattataaaccatccattaattgtgtaaagggaagaggggattcactcacacccgtggaggaggcaggatcgcctttcctaaagtgatagcatcaatttctgctggcttcttacagggtaatctaatcatctttct

SEQ ID NO: 111002 - DNA, 392 bp, Homo sapiens
  misc_feature (1)...(392): n = a,t,c or g
atatctttttaaaaatgggttctgcttttcctgaacatgttttccggattttaaaaattggtatatgggaaaacaaattaccatgaaagatttgagcatttccaaaattttaaaccataaaagcataaaccgagataaaatgaaggtgtacctatgatatcttcagttttatcagaaatgatgtaaaaattacaacctctttaaaaagtagtgttaatcattaagttagaaaatatatagctgggcatggtggcagatgcctgtaatcccagctacatgggaaggtgaggtgggagaatcgcttgaacccaggcagtggaggatgcagtgagccaagatcatgccactgcaccccagcctgggtgacagaacaagactccatcnnnnagaaa

SEQ ID NO: 111003 - DNA, 523 bp, Homo sapiens
gaaaaaatctaactctatgcattttccatgttgctagatacttagttatatttatttatcgattcatttatgtattttgttttgttttgtttttttgagacagagtctcactctgtcacccagtggcacgatctcggctcactgcagccctgcctcctgggttcaagcgattcttttgccccagcctcccgagtagctgggagtacaggtgcacgccaccatgcccagctaatttttgtatttttagtagagatgggtttcaccatattggccagactggtcttgaactcctgacctcgtgatctgccctcctcggcctcccaaagtgctgggattacagacgtgagccactgcgcctggctcctgctagatttttggtacaaatgtaataatgtatgtccattcatgataattgggaaaatgcaaaaaaaatagaaatagaaaaagaagaaaaaaatccttcaatcttaactataatatgcaaagacaactgttattcacatgttggtgtatttatttttaa

SEQ ID NO: 111004 - DNA, 493 bp, Homo sapiens
ttttttttttgaaacagtctcgctctgtcgccaggctggagtgtaggggcacgatctcagctcactgcaacctcccactcctgggatcaagcgattctcctgcctcagcctcccgcgtagctgggactacaggggtgcaccaccacacccagctaatttttgtaattttagtaaaaacagggtttagcccatgctggccaggatggtccctatctctggacctcgtgatcctcccagagtgctgggattacaggcgagccactgtgcccggcctggattttctttagagcatccacacacacttaggaagagtaaattaagtgtaacgatgcatagcttggcagtgaacttgtccaaaagatgacaaagctctgatttcccctctggtactagaaggaaaggggcaggaaaggctgtcaccaacttaaacccaaagtagcgtcgtgtgtagtttagcttgtgtggatctcgtgccgaattcctgcagcgcggg

SEQ ID NO: 111005 - DNA, 442 bp, Homo sapiens
  misc_feature (1)...(442): n = a,t,c or g
ccttagcccagtcagannaaattcgtacttgaccatgatgactccatgagaaaacagcagaacgccagctttgttggtttttgaagacctgatcattgaagttcaccagttatttttctcaagaatgtgaataacaatgggatttgcactcattatatttttagaatggcttcgcataattttcannnnnnnnnnnnnnnnnnnnnnnnnnnnnnnnnnnnnnnnnnnnnnnnnnnnnnnnnnnnnnnnnnnnnnnnnnnnnnnnnnnnnnnnnnnnnnnnnnnnnnnnnnnnnnnnnnnnnnnnnnnnnnnnnnnnnnnnnnnnnnnnnnnnnnnnnnnnnnnnnnnnnnnnnnnnnnnnnnnnnnnnnnnnnnnnnnnnnnnnnnnnnnnnnnnnnnnnnnnnnnnnnnnnnnnnnnnnnnnnnnnnnnnnnnnnnnnnn

SEQ ID NO: 111006 - DNA, 401 bp, Homo sapiens
  misc_feature (1)...(401): n = a,t,c or g
nctttttgtttcctaatcttaaaaaaatccgtaaagggcacctatttttcttcccttaataatgtaaagaaacaacaccaacaacaaaactatattgacatggttaaattcccaaagtgctccatgctttagaaatggattaaatgtccaatattgtcacttacaaaagtgtcttgacctggatggaacttatgttcagaaataannnnnnnnnnnnnnnnnnnnnnnnnnnnnnnnnnnnnnnnnnnnnnnnnnnnnnnnnnnnnnnnnnnnnnnnnnnnnnnnnnnnnnnnnnnnnnnnnnnnnnnnnnnnnnnnnnnnnnnnnnnnnnnnnnnnnnnnnnnnnnnnnnnnnnnnnnnnnnnnnnnnnnnnnnnnnnnnnnnnnnnnnnnnnnnnnnnn

SEQ ID NO: 111007 - DNA, 449 bp, Homo sapiens
tttttgagagtcgtactttgcaaccaggctgaagtgcagtggcacaatcatagatcactgcagcctagacctcccagactcaagcaatcctcagcctcagccttccaagtagttgggactatggatgcgtcatcatgcccaactaatttttaaaattcttttgtagaatggggtcttgctatgctccccagactggtctcaaactcctagactcaagcgatcctcccaccttggcccctaaagtgttaggattacagggcgagccactgcatcccaccaaaaattcttataacaaatcctaatccacaactcagaaagccacactgtcaatacacatctcagatggttgcaagggcaggcaattttccaaataaatgtttttatgttgtgtataaaactgtcttgaatttgaaagattgcctcttccctcgtgccaagcttggcgtaat

SEQ ID NO: 111008 - DNA, 425 bp, Homo sapiens
ccgagtagctgggattatagtgcccgccaccaccccagccaattttttcttttttttgcagagacggggtttcaccatgttggccaggctggtctcgaactcctgaccccaggtgatccacctgcctcagcctcccaaagtgctgggattacaggcgtgagccactgtgcccggccaggaaatcatcatttttattcctattttaaaaacaaccttctagtggtcatttctctccacttcccccaactttgtacctcagtacctattggcagttatcaaacagtcttgtgctgttagaaataactttcctggccaggctcggtcgtcacgcctgtaatcccaaaactctggcagccgaggccacaggatgacctgaggccaggagttcgagaccagcccgggcaacatagtgagaccgtctgacc

SEQ ID NO: 111009 - DNA, 563 bp, Homo sapiens
tgagacagagtgtctctctgtcgctcaggctggagtgcagtggcgcaatctcagctcactgcaacctctacctcctgggttcaagccattctcctgccttagcctcccaaatagctggaattacaggtgcgtgccaccatgtccagctagtttttgttttgtattttttagtagagatggggtttcactgtgttggccaagctggtcttgaactcctgatcttaagtgatctgcccaccttggtctcccaaagtgttggaattacaggcgtgagccactgcaccgccgcctagctgcataacttattatggacttactaacccaccagtttacccaagccattcttaaacctctatttattagtgatttatagagttcttgatgcttattttttaaatgatgtaaagaatcactgtattttcttatctttcagttaccttataaaagtttcatggttctgtgtagttctaaagctttggcattttttgaaaaagtgtcagatcaccccatccacaaccttttttgttgagttggagctcgtgccgaattcctgcaggcgggtc

SEQ ID NO: 111010 - DNA, 390 bp, Homo sapiens
  misc_feature (1)...(390): n = a,t,c or g
caggcccccccaattccttcccaggggtgccggctcgggcctccaacaggacccatggtttcagcctttgtcatgattcccggcccctggtccctgttccgtttttttttctcaaggcnnnnnnnnnnnntttccctgtgttccccggaaacccagaagatttccgtgggcgcaaccccggtttggtacccctggtccggcccccccgggcctgcaaacctggccccttcccaatggtccccagagtggggaaagcttatccccccagaaaaaaaagagcccaggcaaagttggttttttatgcccttttaagcccnnnnnnnnnnnnnccnnnnnnnnnnnnnnnnnnnnnnnnnnnnnnnnnnnnnnnnnnnnnnnnnnnnnnnnnnn

SEQ ID NO: 111011 - DNA, 388 bp, Homo sapiens
acatatgtcatgattgtggcaagggcttcagtctagcttcatcttatgcaaaacaggagacttcatacaggagacaaacttcacaagtatgatgattgcagcaaagcctttacttcacgttcacacctaattagacatcagagaatccatactggacagaaatcttacaaatgtcatcagtgtggcaaggtcttcagtctgagatcaccccttaaggaacatcagaaaattcatttttgagatgattgttccaaatgcaatgagtatagcaaaccatcaagcattaattggcattagagtcaattcagcattgacttgagtttgaattgacttaacattgagttcaagcattaattgacattaaagtgtttatgttaagaagattggg

SEQ ID NO: 111012 - DNA, 344 bp, Homo sapiens
ctatcaggagtgtgttgcatgcattctcctgaggtgtgtgttgcgtgctctcaggtatgcgatgcacacttcctctcaggtgtatgttgcgcgcattctcttggggtgtgtgttgcgcactttcaggtgtgtgttgcgtgctttctctcaggtgtgagttgcgtgctttctatcaggtgcgcgatgcgtgctttctctcaggtgtgcgttgtgcgcattctctcaggtgtgtgttgggcactttcttttccttttctggatgctccctatcgtatcctccacccggtaagcagatggaaccagttctgtgccatctccgagagtaaaatgggttctccattcag

SEQ ID NO: 111013 - DNA, 423 bp, Homo sapiens
  misc_feature (1)...(423): n = a,t,c or g
ttttttttctcctagtatactataatcctagggttatggttactcctgcttatatgtagttgcttattctgttttattcatcatccatcagagatctaattaaatagcaaacaacatgtcttcctaatgaaggcttctctcctcacgcctgttgaacgaatgccactcttcttttcccctatagcatttagtacttgggcctgcctagcttccatcttattttttttgtttgtttttcattttattttttgtagagatagggtctcactatgncgcccatgctggtcttgagctcctggcctcaagtgatcctcccacctcagcctcccaaagtgctgggattacaggcataaaccttctgatacctccttatacttcactactggggcagatccctccgtccctactggataccctgctact

SEQ ID NO: 111014 - DNA, 3972 bp, Homo sapiens
  misc_feature (1)...(3972): n = a,t,c or g
atgagctgcggccgcccccctcccgacgtggacggcatgatcaccctcaaggtggaacaacctgacctaccgcacctctcccgacagcttgaggcgcgtgttcgagaagtacgggcgcgtgggcgacgtgtacatcccgcgggagccccacaccaaggcgccccgggtgcttcgctttcgtccgctttcacgaccggcgtcgacgccgaagacgccgaggccgtccatggacggggcggagctggatcggacgcgagctgcgggtgcagttggcgcgctatggccgccgggacctgccccgcagccgccagggacgacgccacgcggcaggtccagaggcggcggctacggacggcggagccgcagctacgggcggcggagccgcagccccaggcggcgaacaccgcaaccgtttcttttgtcccagctgctccaggtcccgcaggcgaggtcgctatagggggtctcgctatagccgttctccctacagccgatctccttacagccggtcgcgctacagccgctctccctacagcagatctcgctacagggaatctcgctacggcggatctcactacagctcatctggttacagtaactctcgctacagccgatatcacagcagccggtctcactcgaagcctgggtcctccactagctctcgctctgcatcaacctccaaatcgagctctgcgcgacgatccaagtccttctcggtctcccaggtctcgctcgcgggtccaggtcttcatctatgaccaggagtcctccccggggtatccaagaggaaatccaagtcaaggatcgcgatccaagaggccccccaagtctcctgaagaggaaggacagatgtcctcttaagaaaatgatgcatcactgaagcaacgtgatggaggacttgacggaaaaggatcacatactcagtctatggaagcaacgtccctggaagaagaggctgcctattgagacggttgtgtcacactgttgtaccttattgccagtttgaagctttgcatcacgtgggcaaaattcattctatgtgccgagtttgttggtattcacattttattgtaacttaggaggtgaaccgacctaagattacgttattgggtttggatatttgaggcaaaaatttatttttatttctatagtgatgactgttttggtttgaaatgaacagattggtaacctaatttgtggcctcctgacttttaaggaaaacgtgtgcagccattacacacagcctaaagctgtcaagagattgactcgggcattgccttcattccttaaaaacctacaaaagggggggtaaattaatatggataattttatttacctccaggtctaaaaggtagggggacccaaatttgtataaagatttttcatgtgaaaggactggggttttagcaaaccacaggtctaatctcttttgtgttttttgtgcaccaggcccggctgtgtgagcacttgagggatgctggttagctattaaggaggccctgttgccagtgccaaagtgcctgaagctgcttcccgtttccctcctgattgcccccccggggaaaacacgcccttgtccctgaaggaacaaatggctgtcccagtttattaaaatgccctgtcaacctgcacttcccagtcacccccggccttgccagataaataatggagcatgcagtgagcacatcctagctgacggataatcacaccttttccccccgtcttttcctgaaaaaattgaaaatctgattcatattcaacatgtatggaacttaaaatatgggggaatgtttatggggaaggaaatagttttattaagttttgtttaaggtacttataacatcggtttatctttttgattattaatgttttacgctaacccattgtgtctgtagttaaaaattgttttcttggtgttatcttttctcagaataaaaattagaaacttttggatgggaaagtagggttggttttattttcccgtatgacttttggatatttgtacttttgaggaaaattattagcaccaagtgtttctcaaaatataatttttaaaaaaatccttaataggcttttagctatgtgctttattgttttatcacaatgcagtttatttgtagtttctctctttttttcctcacacctatggtttttttacttccaaaattattttcaaataatccgatttttggctttcgatcgattatcgctactagatgttatgtgttcttttgcaattgtttctgcttatacctttactagcaaagggaaaaataacaatttggtgtcaatgatctggtgacaataggattacattggagccaattgaataaatttattctttcaatcatatggatcttcattaaaatttttgactggaattatcaattaaaaatatttcattccctttgtgcagaaactgctaaatccagggttcgattcttgaatgaactggcaagctggctgtggtctgtagatatacatcccacatttttgttgttataacagtttagtagttagtattgcttttcatattattaggactccagaatctaaattttacgataatgacatttcttctggtcatgacaaatgtaatattttacaaatataaatctacgtagaatccaaagacacacacggagcagtcctgtctgagaaataaaaaatcaggacacccatggcatcgtagtagcccctcgcgtccagcaggtgggcgaagggaggtgaggtttatttattaaatgggaccgagtgggacggggacggggcagccctaagggtagggaagcattgtcaatttctggggatagaatgagacccaggcatagctggagtttgaagctttgaagcaaaaatatctgtagaacatcttaaacgtgaccaaaatatgatgttaaaatcagcaactctttatacgttaaaaaattttgaaaaccttagccaacgggaagggcctacacagcttttaattgcttgatttatactttattaaagagaggaagcacaatgagcagtgatactaaaatataactaatatggcatgtgaaagtgatcattattcagatgatcttcaccaacactgcatttgcatatatctgaccaaactttatgcgacataggcaggtctctggcacttcaaaaatgaatgttaaatagaaaataataaataatagctcgattagggtaatcatttatttaatcagaataaagattatatccataaaatttacttgcagagaaattaatcggcaagaatatcttttttgtttaaaacgggtcccactcggnccccaccttgggcagggcacaatcacagctcactgcaccggacctccggccctcaggggatgatcctcctacttcaggaattatgccaccatgcccggcctagttgagaagtactttcaaatagcaacatgaagcctttcctttacccatttgaaaataaaacatagttgtaaaccataaacccagtatgtctttgtaaagcccaataatatatcattttataggagcattgtcttcttgtgtttttcaagttgacctatgtaggttcaatgtcagtctccattttaatatccttgtttgtttatcagcctgagcatatttccattttaaaaggtatttgttgagaagtccatggtggttttttgtttttcacaagtcaagtagcttgaacactatcacttgtccaatgggaaagttgatgcttatctttatggcaaatgcttggttgaataatatatttgcaaagatgttaattctacagagagctaaataaagttaagatacctgtaaaacagtttctccagatgactttaaaataagccttatttttgtaaatttatgttaaattttaggtgttaagttgtgaaatacctaatgatgtgggcctaaatttgcctcattcagactgagacagggctgttaaaattcatttctagctaataaactgtgctataacttctt

SEQ ID NO: 111015 - DNA, 710 bp, Homo sapiens
tttttttttttggtcaacatgctgtgatctgggagcctggttaatttttaaatttgtgtgtgtggagacagggtctcaccatgttgcccaggatggtgtcaaactcctggcctcaagcagtccttctgccttggcctccgagtatgctgggattacaggcaaaagctagcacaactgtcctgtataacttttcataattactaaattatgcaaaaatttctgggtctgtacatatggatctatttcattccatttaactgtatgggatatactattaattgaatgaacccatttacctgctgatgggacatttctgtttataatgtttacattatgcagttcatattatatacaggttgacaaccaaaaaatgctgccctggaatatctttgtggcagctctttaatgcacagtgactatttccttagaattgttaagagtatcatttttcaattcaacaagaaatggttaaaaggtcccttaaaaaggttattcaagtttataccactaggctgttaagtatcccttatgtgaaatgcttgggactaaaagtgtttcgggtttcacatttattcagattttggaatatgtacattataccaactgagcataccaaatcagaaactctaaaatctaaatgctccaatgagcatttcctttgatcattatgtgggcactcaaaaagtttggggttttaaagcatttaggat

SEQ ID NO: 111016 - DNA, 373 bp, Homo sapiens
  misc_feature (1)...(373): n = a,t,c or g
caacaaagtagtatacccttatttgtaaaccaaagggccccaagggggttttttaaaaccttcttatccccaaccgggtggaattttttcttccccggttttccccggggccctggccccctcccgggggggccccccagcaaaattccctttggggccaaggacaagggtggtgcccccgggtttcccggagccaacaagggtttcaccggcccccccggttttttaaaggggttaaaaaactgggaaccggtaaaggtaaagggccttttatttcggttttccccaaaaaaannnnnnnnnnnnnnnnnnnnnnnnnnnnnnnnnnnnnnnnnnnnnnnnnnnnnnnggaaatgggggctatgaaattgtt

SEQ ID NO: 111017 - DNA, 383 bp, Homo sapiens
  misc_feature (1)...(383): n = a,t,c or g
naagaacttacagatgccagtaaatggaaagatacttcatattcatggatgggaagacaatattgtaaagatgccaatactacccaatgcagtctacagattcagtgcaatctatatcaagatcacaatattttttgaagaaacagaaaaatccaacctaaactttatgtnnnnnnnnnnnnnnnnnnnnnnnnnnnnnnnnnnnnnnnnnnnnnnnnnnnnctgcaccacaggataagctatcctaagagacaggaagagaaaagaaagcagatctagaaggagtgattcttccccatgtgtgtgcctttgtgggatccccatttgctcatgacctagcagaaaaatcagacgcttcctctggggttatcacatcaccataa

SEQ ID NO: 111018 - DNA, 574 bp, Homo sapiens
ttttttttgccattacttaacatttcattaaatgtatgtttccaaaattatatttgttcttgagaccttttgagtgatcacagtttctgctattctccataaggcctcagtttgacagggtgatgaaatcttgaataaaacacaaaggaatgtgtttgtatttgcagggcttcccttgcaggtgaaatggccaccagacccaggctttctggaatgcattcattttctgcagttgaaagggacaatcccggatctgaaagaaagagccacagtgactccaagagtggagccagggcatgctggacactgcatagctatggccacgtgtgtcacctccgagggagatgtgagagaaacacagagggatcgcttgtgactgtgccttctcgatgtatgatggactgttctgctcaaatagcagcagtagggctgattggagccattgtacagtgtcgggaacataccagcacactgagaatagcatcatgtcataaggacccagagcaggtggaccctgctgtgatgcacaaaggtgagggtgcagctgcccaggacacactcatgcatgtttgtg

SEQ ID NO: 111019 - DNA, 768 bp, Homo sapiens
cacactctgtctccttggctggagtgtggtggcacagtctcagctcactgcaacctctgcctcccagttcaagcaattcttctgcctcagcctcccaagtagctgggattacaggcacccgccaccacgcccagctaatttttgtatttttgtagagatggggtttcacgatgttggccaggctggtctcaaacttctgacctcaagtgatctgcccaccttggcctcccaaagtgctgggattacaggtgtaagccactgcgcccggcctttttaactttaaacatgttttagaattcacctaaagatcaaaatatcatggattgaacctcatcaattgatagcagtgagtgactgaagcttccaaatcaagaaaagccggcaccaagaacttccattctaatctagagctgaccagtttgagctgattctctctttgaagagtccttcttgattgcagtgcagtactggcatttctgaatggatgtaagtggagtattttagtctaaaggcttttcaaattacttgaatttttttaaaaattgaggagctttatttctatttacccttccatttttgtatatcaaatttccattgtcattaaaaactgtatcttgaaactttgtgaactgacttgctgtatttgcactttgagctcttgaaataaatgtgatttttgtgtgattatctggtttccagttttaaacattaactgtcaccttttattcttaaacttgaaagtacagaaatcattaaattattaagttg

SEQ ID NO: 111020 - DNA, 383 bp, Homo sapiens
  misc_feature (1)...(383): n = a,t,c or g
gagactgacaacctcattcagacgaccatccctgacgagttcgcccactgcacagggatcaccatcgcccacaggctgcacaccatcttgtacagtgacagggtactggtcctagacgacgggaagaccatagagtgcgggagccctgaagaactgctacaaatccctggaccctttcactttatgagctaaggatgctggcaatgagaatgtgaacagcacctatttctatcataaggccccatgggttaaaaaaggactataagaataatttcttatttaattttattttttataaaatacagaatacatactgaagtgcgtataaaatgtacgttttaaaaaaggataagtgaacacccatgaacctactacccaggttn

SEQ ID NO: 111021 - DNA, 1783 bp, Homo sapiens
ggtccgacggtatcgataagcttatcagaacagccggaccccctaccacatgttcggcacatggacctaaccagactctgccacgcccttagatatctgcatgagaatcagctgacccatacagacttgaaaccagagaacatcctgtttgtgaattctgagtttgaaaccctctacaatgagtcacaagagctgtgaggagaagtcagtgaagtaacaccagcatccgagtggctgactttggtcagtgccacatttgaccatgaggcaccacaccaccattgtggccacccgtcactatcgcccgcctgaggtgatccttgagctgggctgggcacagccctgtgacgtctgggagcattggctgcattctctttgataactaccggggcttcacactcttccagacccacgaaaaccgagagcacctggtgatgatggagaaagatcctagggcccaatcccatcacacatgatccaccgtaccaggaagcagaaatatttctacaaagggggcctagtttgggatgagaacagctctgacggccggtatgtgaaggagaactgcaaacctctgaaggtcagtttctggctacccccagctgaactcatgccaaggagagaccccaggcactgggcagacatacagcagagacaggccaggccgctaaaggctgcctccttgatccagctctatgggaggcggcacccaagactgctgggtgctggcaatggggcttcttgcaaactgccccagaggggcccttagccctaccccttccccatagggtggctatgaatgtaattggggaacaccagaagagccagatgtcagaagccctgctgcttcctgtccctctctctcctcgaaattttgggaagaactaggcaggactgaggtgagggggagggaagacctagacatggccaggaagcctctgtcaactgcatttggtgctcggacaagtgaatttcgcagaggtgatctctacccacctgtcaggactttgcatgtgggggcagaggcatcaacccagcaagacacctagtagcctggcaagttccgagcaaaacgttaaacaggcatgaaaggaaaggagctgctcattgtccaggagggcggaagtagagtcctccaaggaggcatcactgcctcctcgatccagtccagcaaggcgtcccagaggcaaggggacctgctgtggcttcccacgaccctgccgtcacactgaggcaccttgtgtccctgagcagagttacatgctccaagactccctggaacacgtgcaactttttgaccttgattaggaaggatgttagaattggaactctgccaagcgcattcacactggccgaggccctgctgcaccccttctttgctggcctgacccctgagaagcgggtccttccacaccaacccgcaacccaagcagatgacaggcacaggccaccgcatgagggagatggagggcgggactgggccgcccagccccttgactccagcctcgaccgccaggccccaggccagagcccacccaatgaacagtgcaatgtgaaggaagggcaggagcctgcaggggagcagaccttggttgccaagcttgcaagaaaagcccagatttgacccaagctatttatatgttataaagttataataaagtgtttcttactgtttgtaacccctggtaccagtgtgtccatttccaggctccttgccttccccttacctgaccttattaataaagtcttttttagcagttcaaaaaaaaaaccaaaaaaaaaa

SEQ ID NO: 111022 - DNA, 249 bp, Homo sapiens
gtagagatgggagtcgcattgtattgcccaggctggtctcgaactcctgggctcaagagatcctcccacctatgcctcccaaagtgctgggattacaggcgtgagccactgtgccctgccctaaatgatttctaagatgctaaacaaccctgacgtacggtcaatcctctggttctttcccctctgaccacattctgacctcttctcagaatatcccaaccatttctgttttccacctctgattcccct

SEQ ID NO: 111023 - DNA, 1218 bp, Homo sapiens
tgccgtacaaccaccagcacaaatacttcttcctaattgggcccccagccttgctgcctctctgtggagcttgggaaacagaagaaaaaatatatgccgtacaaccaccagcacaaatacttcttcctaattgggcccccagccttgctgcctctctacttgcagcggaatattttctattttgttatccagcgaaagaagtgggtggacttggcctggatgattaccttctacggccgcttcttcctcacttatgtgccactattggggctgaaagccttcctggggccttttcttcatagtcaggttcctgggaaagcaactggtttgtgtgggtgacacagatgaaccatattcccatgcacattgatcatgaccggaacatgggactggggtttccacccagctccaggccacatgcaatgtccacaagtcttgcctttcaatgactgggtttcagtgggacaacttcaacttccagattgagcaccatctttttcccacgatgcctcgacacaattaccacaaagtggcctcccctggtgcagtccttgtgtgccaagcatggcatagagtaccagtccaagcccctgctgtcagccttcgccggacatcatccactcactaaaggagtcaggggcagctctggctagatgcctatcttcaccaataacaacagccaccctgcccagtctggaagaaggaggagggaagactctggagccaaagcagaggggagcttgagggacaatgccactatagtttaatactcagagggggttgggtttggggacataaagcctctgactcaaactcctcccttttatcttcctagcccacagttcctaaagaccccaaagtggggggtggaacacagaaagtcccctaggagggaaggagctgttggggcaggggtgtaaaattatttcctttttctagtttgggcacatggccaggtagttggtgaacagaagagaaccagggagggtaacagaaagaggagggacctactgaacccagagtcaggaagagatttaacacttaaaattccactcatgccgggcgtggtggcaggtgcctgtaatcacagctactagggaggctgaggcaggagaatcgctttgtgaacccgggaggtggaggttgcagtgagctgagatcacgccattgtactccagcctgggcgacagagcaagactccatttcaaaaaaaaaaaa

SEQ ID NO: 111024 - DNA, 917 bp, Homo sapiens
gctggaatccagtggtgtgatctcggctcactgcaacctccgcctcccaggttcaagtgattctcctgcctgggggaaggagtgagactgtctccaaaaaaaaattaaataaaaagggggaatcaattttcctccacagaagaaataattttattccatttgagaaaagtaaaggatacattctttgtctgacaaaagtgattttgtcatggaactccaaggcctgcctggtgaagtgacagtgacagatgttagaggaacctgtggccctcagtgacacagagagcacagacatttggctgggaaagcacttgcatgatcgaaacatttcctattgcagagattcagacgttctttttatcctgaagatcattctggtctctaatttaagattgaaggatgatttaatttgctaatgggaacccgggccagctgttttttcacacaactgaaagggagagaaatcgggaaatcactcttacagggtgagacctttgatacttttttccggggcctcatgaagtcaaaggccatccctgtccctccaccgagcatctgggcagtgtctgcctcctgtccagaactcttggaggccgggccagcagccatctcagcccctcccacccctccatgccacagggcagcaccaactcccaagtagtagcaggctctgtcccgcagtccccagcccatccacagcaccactgctgccttggcagcgagaagggctgggaaaactgcaagccccttcctccctcaggtgttctgatcgccttttacaacaagggtcgcctctagcccctccatcaagtctttggtcctggaacattgtgagttacattgcatatagtgttattctaagggcatcacccagagaaaaaggacgaagcggccttctcactctgcggacgcgtggg

SEQ ID NO: 111025 - DNA, 499 bp, Homo sapiens
aaaaccgtttgttttttttttttgagaccgggtctcactgtcgcccaggctggagtgcagtggtacgatcacagctcactgcagccttgtatcctccaacctcaagcatcagcctcccaagtagctggtgctacgggcacgcaccaccaccagtggctaattattttatttttgttagtaaagccaaagtctcactatgttgcccaggctggtctcgaactcctgggctcaagcaaacctcccgcctcgacttctcaaagtcctcggattacaggcgtgacgaccatgtctggccaaaaacagcacttttaataagatgacacaaagataaaatgaaaagtagttttaaatattggcttcacaatactagttaatatctcaaggcatgataaaatgtcaggtaaagttcatacataataacagtggatgtaaattcagacttcaaagaatctctgtgatacttctgattttatttgtgactgtaaaggccctcgtgccg

SEQ ID NO: 111026 - DNA, 546 bp, Homo sapiens
cgagcggattgttgacgctgtgaccgcctgaaatgcatgtggtgattgatgctcttgaaaacatgggcgcttacactgttgctgctgcctctacgttcaatggcttccagaggccgacgatctactatgtgatgtccagggcctgcgtggcaactcatgcagcaattccagaaccccgactccccacccgaagtagaggaacaggatgccagcaccctgcctgtgtcttgtgcctgggagagtgggatgaaacgccacagagcagcctgtgcttcggctagtattaatgtgtagatagcactctggtagctgttaactgcaagtttagcttgaattaagggatttggggggaccatgtaacttaattactgctagttttgaatatttgttttatatggatttttattcactcttcagacacgctactcaagagtgcccctcagctgctgaacaagcatttgtagcttgtacaatggcagaatgggccaaaagcttagtgttgtgacctgtttttaaaataaagtatcttgaaataaaaaaaaaaaa

SEQ ID NO: 111027 - DNA, 368 bp, Homo sapiens
  misc_feature (1)...(368): n = a,t,c or g
attaaagttgggatgggggccgggtattttcttaaatttggccccgtttttgggtggggttgggaccagggccaatttcccctttcaaaatgggtccaaaaattttcccgggcccggggttcctccctttaattcccggcctttggggggttannnnnnnnnncctcctttaccttggaaggtttgggttcccccaacccctttttttgccccgcccctttaccaggggccccaaggcccccccctttttcaggggnnnnnnnnnnnnngaagaagaagagaagagaaagcagagaagagaagagagaacagaagagttccctccctttctgtttttctggaagagtatgtagaattgacattaattc

SEQ ID NO: 111028 - DNA, 657 bp, Homo sapiens
acccaggctggagtgcagtgttgcgatcacagctcactgcagcctcaaactcctgggctccaggagacctcctgcctcagcctcctgaatagctgggactacagtcgcgcaccaccacgcctggctaattttttatttttgtagaaatggggtattgctttgttgcccgtgctggcttcagcttactggtttcaagcagtcctcctgcctcagcttcccaaagtgctgggattacaggtgtgagccactgtgcccaacccagaaatacaccctttctgtgctgttttctcagcagggtgtgagctcacgggatacggtcctgccagactggccctcatagctggtcatgtgccagtcagagctgggtggggcttgcaggtcacggaacgtggtggtcttgacctggcagcagatgcttaaagaatgcctaaggtgggtggcagttggggagttcaagggtgaatgaggccagggcaacccccaggagctgaggccaactctttgagtcaggactgtgccgtgtgcccagggccttgcactgtgtgggccctcgagtgatttctactggcaggctgaaagccctgtgaggggcggctgtgggcggtagccacgcaggaagagtgcttatgagtaacttgtttctaacacctgtgtggt

SEQ ID NO: 111029 - DNA, 609 bp, Homo sapiens
gaatcacatgttcttcatcgcgagtaacgaagaaacctgaggttccattttttgggcctctgtttgatggagccatagtgagtgggaagctgctgccaagccttgtatgtgccacgtgcatcaacgccagcagggctgtgaagtgcctcatcccactctaccagagcttctatgaagagcgagctctgtatcttcgaagcaattaatttcaggaaccaccgcgaagtaatggacattcgagggttttcggcaggcccaagtcttttcttccctatcccagcttacttccctcaggcgggaacgggtttaaaacacgttaaaggtcttcattttcaatatttgaggcagggggccctggcctccagtctgagtgctgacctcgaagagcccctgagtgaggaggagacagaacaccatctaatgcctctgccccgagccactaaaccaagaatctccaggaaatttcgttgctgtactagtgccctcagcaggtcttcacattagtggacttctgaagcacatggtgaataccactaccgtgtctcagatgggactcaaactaggctgtatcatcttgtcctgaaacctcacaaaccttggacttccaaa

SEQ ID NO: 111030 - DNA, 622 bp, Homo sapiens
attacggcaacacttaagtgtctatcttaaacactgtaaaaaatccaacaagattagaaaaatttggctctaaaattaagttcctttggttacagatatatacttattttaggtatgtgtgaggttttttgttttaagagacagggtcttgctctgttgcctaggctggagtgcagtgacacgatcatggctcacctgcagccttgacctcctgtgctcaagtgattctaccgcttcagcctcccgagtagctggaaccataggcatgcacaccatgcctggataatcttttaaaatttctttgtagagatgggggtctcgctatgttgccaaggctggtcttaaactcctggcctcaggtaatcctcctgccttggcttcccaaagtgctgggattacaggcgtgagctactgcacctggtctaactttatgttttaaataaataccactggaacatcacatttgggggaactgtatgatcactccactataatacataattaatatatccatggtaaagaatggtgctcaaatgaaatagtttatagtgccatatgctggtttcttttggaagctggttcttcatattatctttacacaaggtcagtaaaactaaagtat

SEQ ID NO: 111031 - DNA, 1341 bp, Homo sapiens
ggtcccggtttccggaaggcctcttccaacctttctttccgggttatgaaatcttgcggcatccacgagaccacctttcactcccattcataaagtttgacgtggcaatccgccaaagacctttacgcccaaacgttgcttccgggcggcaaccaccaggtatcgggggcattgttgacagggatgcagaaagaaatccacgcccctgccgcccaggcaacattgagattcaagatcattgcacccccaggaagcgcaagtactcggtgggtggatcgtggggctccatcctggcctcactgtccaccttccaggcagatgtgggattagcaagcaagaagtacgcgaggtcggggcccctccattcgtccaaccgcaaaatgctttctaaacgacttcagcaagatgccgtagccatttgctgcatgggttaaatggggattggaaatttgcccctgggcaaatgcacacaccttcatggctaagcctcacgaaaactggaaataagcccttcgaaaaggaaattgtcctacaatccagtgctgatatcagatacaagcactgggattgtaggaacttgttgctggaattttggaccttgtaattgaaagttaaacctgttcccccttgggtaattaaccgtggtccagggctgaagtgttgctgggatttcctcctagaggcctggcaaagaacccagttggtttttgtccttgcggggtctgtcagggttggaaaagtcccaagccggtaggacccaagtttcccttccttagctgatgtcctttggccagaaccacccggtgggctgttaacttgctttgaagttgaaagcggttctgcatttacggcctgtaaaatgtattcgattcttaaatttatgtgagaggttttttttgtacgcaattctccgattctttgaagagatggacaacaaattttggttttctactgttatgtggagaacatttaggccccagcaactacgtcattggtgtaaggaaaaattaaaaagtggcggccgtaaccaatataaaatggaaggggggggccttttaaaagatcccttggggggcccaaattttacccgggcttgcaaggtaaaactttttcccttatagggggcctttttaaaacctaggccttggccgggttttaaaaacgccggaatgggaaaatttgctacttgggaatttttggaaaggacctttattttggggggggaacatattgggacaatttccctacggagtttaaaggctttagggaaattataaatttttaaggggaaaaaggggtaaaactactggaaaagcctggctgtttaaaagttttcttaat

SEQ ID NO: 111032 - DNA, 981 bp, Homo sapiens
agcgagcccaatgtcgccgttgacctggacagcactttggagagccagagcgcatgggagttctgcctggtccgcgagaacagttcaagggcagacggggtttttgaggaggattcgcaaattgacatagccacagtacaggatatgcttagcagccaccattacaagtcattcaaagtcagcatgatccacagactgcgattcacaaccgacgtacagctaggtatctctggagacaaagtagagatagaccctgttacgaatcagaaagccagcactaagttttggattaagcagaaacccatctcaatcgattccgacctgctctgtgcctgtgaccttgctgaagagaaaagccccagtcacgcaatatttatactcacgtatctaaagcaatcacgactataaacacctctactttgaatcggacgctgctaccgacaatgaaatagtgctcaaggttaactacatcctggaatcgcgaggtaacacttgccggggctgactactttgctcaaaaacaaagaaaactgaacagacgtacgagcttcagcttccagaaggagaagaaatccgggcagcagtgacactggcctccagcctcaatctgttccgtagctcagagcctgcctgccagggccaagtgcccttaggagcccacccggtgtcctgaagtccttcgggggggaggccagcccctgggtccactgggcacaggggcaggtggggtctcggggaaggtgtcgggggcccccctaggagggagcgctggggacattgccatgggacggaagtctgcttggcagtggctttgataagcgatgcttgggggtcagaccaccccctagaggagccacgtgccgaccagccaccttcaatgcctgccaccctgcccgaggatgtacagagcccggcccccccaattttctttgaaattggatcaaatttcttaaagcaaacaacaaaaatgtacatttctgg

SEQ ID NO: 111033 - DNA, 631 bp, Homo sapiens
aatgtaatttatgcagtcacttttccagtggcttggcataatttagtaaagaaaccagattgacaatgcctgggcctcaattctacttgaagtgtcagatacttccagtagagcgcataagcaggtcatatccacagaatgttagatgtgacagcctcatggcctcctctaggtatggtggcatctttcccaggttctgggactaggatgacatagcccaggaacaagtataaactgggtggatttagggttctgaagggtcttttgacttccaaacatatgtggaggaaatatgtggactgtagctgggaagagactgaaaaaaaccctgggtctcatctctctcatgattcccatgagaaagttgagatctagggactttccctacaaaaggaaaggagagttgtagatggcaccttaggtccccagtaaaatataggggaggctatggccagggccgacccccaagagaaccattcccagcacaggggtttcctatctctgcctgtcctccatgccacatctgcctctcccaacccaagcaccaagtggcccagagctggagttttgatgggcaacctgctcacacatatgcctggagctgcagttgtgagtgcccaggtgctcagca

SEQ ID NO: 111034 - DNA, 1270 bp, Homo sapiens
taccttgtattggacgaagctgacagaatgcttgatatggggtttgaaccccagaatccgtaaaaattgttgaccaaatcaggcctgataggcagacactgatgtggagtgcaacctggccaaaagaagtaagacagcttgcagaggatttccttcgtgattacacccagatcaacgtaggcaatctggagttgagtcccaaccaccaccatcctccagatagtgggatgtctggcatgggaaagtgaaaaaggacccacaagttgatccaactaatgggaagaaataatgcgctgaaaaggaaaacaaaacaataatatttgtggagacaaagagacgctgtgatgatctgactcgaaggatgcgcagagatggttggccagctatgtgtaaccatggagacaagagtcaaccagaaagagattgggtacttaatgagttccgttctggaaaggcacccatccttatttgctacagatgtagcctcccgtgggctaggtttgtatagataggtgtctctgtcaatggtatatgtatcttttggtttaaagattccgtcatttcaaattcagacttcaagtttaagaaagttgtatatacatgtgggttagataaatattttgaaagaaaaaaatacaaaagcgtgattctccccattccctgccccccccacaattttttttaactttggtttcccccaccccccttttattttcaaagtctcttcctgctcctaacaaacaggctttgggtctgcaggcaaggcctagggcatggactatttcaaacagaggggagaggagacagacagcttgaatgggctcagcttctctctgggtgggtgggtttctgggctgggataggaataaggcctggacggaaacctagctattgtaagctagtttccttccagttattcttttcccctatcccctgtcctaagcctagatatatacagagaggtcccagttttatgaatgccttattagatgggattttatgaagtctaatgcagtattcagaataggcaaatatgtgtattgcccccagtttaatttactgaggtcaaattatccatgggcacttggctatccccctccctaccccatgcacttatctgtaggtgtgttatcaactgatggattttctgggagttttttggacccatttaccctttaaggtgtacaggggattttatgggtagttttagcccactattctgagctaaacaggtctacactcagaacttctatattttataaaaaaagag

SEQ ID NO: 111035 - DNA, 710 bp, Homo sapiens
gcgcgatctcggctcaccgcaacctccgcctccaaggtttaagcgattctcctgcctcagcctcccgactagctgggattacaggcattcaccaccagcccgtctaattttatatttttagtagagacgggatttccccatgttggtcaggttggtctcgagctcccgacctcaggtgatcgcccgcctcgacctcccaaagtgctgggattgcaggcgtgaaccaccgtgcccggccttgccggaatgtgttttgaattttgctgcccggaattcactgcgaggactgggatcacccgtcaccccgccctggtctacggaaaatgaaatgtgtttactgatatagaaacggaataacggcgctgtgggctggggagggccgagctgccttcaggcttctggtctccagctgcagggcactcacacctgcccgttatgaaaatgcagacccgcagggcaggaattccgagtccgggctggagcgcgatctggaatcccgctctcttgaaacagccccgcggaggattctgatccggtggagttaagaaacttgctcctcaccccccttcccacgggcccgcccacggattccacggatccgcaaacgctttcctgctgcttccgtgccccccaggaaaggcccgccctcccgccttctggggcgggttccggccgggtcaacctggctgtccccgccccccacggtttac

SEQ ID NO: 111036 - DNA, 834 bp, Homo sapiens
ttcttggagacagggcctcacgctgtcacccaggctggagtgcagttgtgcaacatcatggctcaccgcagcctcaacctcctgggctcaaacagtcctcccaactcagactccagagtagctgggactacaggtgtgcgccaccacactcagctaattttttatttttttttttagagatggagtctgtgttgtccagggctggtctcaaactcttgggctcaagcaatcctcccacctcagcctcccaaagtgctggggattacaagcatgagctactgcacctgccctctgtttcctttgggaaatctcttacctttcattagggtttcctttccatagcaatttccctttggtttttaaagacttcctacattgctttttcttttattatctgtgcctccgtgaaccttatgaatgctgcttaaaaataatgtcaaaatatgttttagctgcctactcaggtaacgttttcttttgctctcatcttggtttccatatactatttttgtttttttgtgagatttaatcaatgatctagtcagaagctacttcactgggctaacagtgatccatgttcatgtgcttaaaaatggaacttggaaacacgggaagtagtggttggtccagtttgaaagctcttattagtattcttcatcctggctgtaataatagccattatttgttatgcctttgttatgtagcagacactcttaaggattttatgtgtattattcaaattgctattactgttctttttatagttgagaatctcaggatacctacatttatcactttttcaatatatatgtatttcttattcttaaaaaaaaa

SEQ ID NO: 111037 - DNA, 378 bp, Homo sapiens
  misc_feature (1)...(378): n = a,t,c or g
atccaatcaatttgacaccctgtattagccatcacattaagtattttcatttttgtagcttttgcatatgcagaagaagaattggatgaaattcagccttgattatgatgaaaactctcaacaagttaggaatagaaggtatgtgccttaactcaataaaggccatttatgaaaaagcaatgctaactttatactgaataaggaaaagttgaaagctttctctctgagatctggaacaagacaaatcgtccaaactttcagccnnnnnnnnnnnnnnnnnnnnnnnnnnnnnnnnnnnnnnnnnnnnnnnnnnnnnnnnnnnnnnagtcatactaattgaaaggatgaagtcaaatggtctctgattgtggacaaaat

SEQ ID NO: 111038 - DNA, 461 bp, Homo sapiens
taactgcggcctccacctcccagattcaagcgattgtcctgcctcagcctcccaagtagctgggagtacaggtgcgtgccaccatgcccagctaatttttctatttttagtagagatgggggttttgccatgtgggccaggctgatctcaaactcctgacctcaagcgatccgcctgcctcggcctcccaaagtgttgggattacagtcgtgagccaccgcacccggcccatccttttatatttaataaatcctactatctttgctactccattttgattatataaatcagactgcattacacaaatgcttataaaacaggttgaagaaatgcccttctgttcctagtttgttgagtgtttttatcacgaaggaacgttgtatcatgtcaaatgcgtttttgatacctactgagatgatggtgtaggttttttcccttcattttattaaaatggtatattt

SEQ ID NO: 111039 - DNA, 309 bp, Homo sapiens
  misc_feature (1)...(309): n = a,t,c or g
ggctgttgggcgaccaaggccttcccggagtcttcgtcctctatgagctctcattgggggcatgttcacagtggctggactcatcgattcgctcatctaccactcagcacgagccatccagaagaaaattgatctagggaagacaacgtagtcaccctcggtgcttcctctgtctcctctttctccctggcctgtggttgtcccccagcctctgccaccctccacctcctcggtcagccccagccccaggttgataaatctattgattgattgtgatagtnnnnnnnnnnnnnnnnnnnnnnnnnnnnn

SEQ ID NO: 111040 - DNA, 1360 bp, Homo sapiens
  misc_feature (1)...(1360): n = a,t,c or g
acgtggacgcgtgggcttattctgtgttctctgctgcaatccctgctgcagccattggggagaaagcaagaggctatgaggagagcgaaggtcataatactccaaagttgaagaaccagagagagctggaagaattgaagagaaccacagaaaaattggaacgtgttttggctgaaaggaatttgttccagcaaaaggtggaggagctggaacaggagaggaatcactggcagtctgaattcaagaaagtccaacatgaattggtgatctacagaacccaggaggcggaaggtttgtactggagcaagaaacacatgggttatcgccaagctgaattccagattctgaaagctgagctgggaaagaaccaaagaggaaaagcaagagttaaaagagaaactgaaggaaacagagacacacctgggaaatgctgcagaaggctcagggctttggcaaagcttacgcggctacgtatccacgtcagctatctccttacttctgtcctccctcacttggagcttcgtgagatcgggtatgactcagaacaagtggatgggatcctgtacacggtgctggaggcaaatcacatactggattgagcaccagactgtatacccttctcttctcttatcttctgtctgttctcttttctctccctccctcacgtctctctctctntntntntntntntntntntntctcaccctcacctttatgccttatatagagaatctctgtgtaaatcctggctcataatcagtctcctttttatcagttttggtgtggagaaagaggccagtttaaataggctttcaagagtctagggtcagaaaagcaataggtcactaagctaggtgacctggaaagcttttaatttttcatgacctggatatgtggtctattggtatatctttttctgaaatggtttgtattcatttaaggttagatcaatcagcagatattgggtccggtatacccaggtattatttttggggtaagcttaacaagtaccaactcatgtttgcaagccttcgaagatgtaacaatctcgttggaaacataagacatacatcacattatacacaaaagtgtatgatatgtacaactgagtggtacagatatgacatgggaagatctgggggaggaagttcaaggaaggcaccacaccagaaaatgggaccctaaattaaggctttaaaggaatgagcatggccacactgttcagtggagtgttctttagggtgggtagggactatggttgatatttttcttcttcctatcttcctgcctttttcagattttcaatattaaacttgttattcttacattggaaaaaaataaattgtttttaaaaagaaaa

SEQ ID NO: 111041 - DNA, 11232 bp, Homo sapiens
gtcctctagtgcttttcccgggtcgacgatttcgtggcgggcaccggagccgggaagggacaggtcaggcggggagtgcgagcgcgtactgcttgcgccactcgggctgggtcaggagcggctgcccgaggtccagaggaagtgtgtggacagcgcggccttcctggccggactagggcgccgacatgaacctgcaccatgagctgacccgtggctgtgaaccctggcgaccactgctggtacaagggcagcattggcgaccagcgcttcacggcttatgcatctggatgtgacattgtaatactgggaagcgattttgaaagattacagataatcccaggagctaaacatggaaatattcaagtgggatgtgtagactgttcaatgcaacaaggcaagattgcagcgtcttatggaaatgttatctccatttttgaaccagttaacctaccaaaacaaaagaaaaatttgggaattattatagtcagtggcagaaaagtggccaattttttctggaatcaatagcacacaatataacctgggatcccacaggcagtcgtcttttaactggttccagctatttgcaactctggtccaatactaacttggagaagccaactgaagatgaaaatttaaataaaacagatcttaactttggagattggaaatgcatttggcattgcaaaactgcttcccaagttcatttaatgaaattttcaccagatggagaattttttgccactgctgggaaggatgactgtcttttgaaggtttggtataatgtagaaaactggcggacagctgttacttctccagatggaagttcagaaaaacaatcccaaggagaaattgacttttcttttgtgtatctggcccatcctcgagcagtaaatggattttcctggcgtaaaacaagcaaatatatgcctagggcttctgtatgtaatgtactgttgacttgctgcaaagataatgtgtgtcgtctttggggtagagacattttacccaaatgattgtatgctatacggaggtgactgcagccattggactgaatccaattaatttaacaaataactttcaagagaaatgccttcccagtaaagaacgagttcaaaatgctttagaagtaaatctgagacattttcgtagaggtcggaggagatcacttgctcttgtagcacatacgggatatctaccacatcagcaggatcctcatcatgttcacaggaacactccactgcatgccaatgcactttgccactttcatattgcagccagcatcaacccagccacagacattccacttcttccatctattacatctctgagtctaaatgaaaatgaagagaagaccggaccttttgttgtacactggctaaacaataaagaactgcattttactttgtccatggaagtttttttacagcaacttagaaaaagttttgaacaaccatcttctgaggccagtgtagaagattctaatcaggcagatgtaaaatctgatgaagaaactgatgatggtgttgatgatctgaaaataaatcccgaaaagaaggaattaggctgtgataaaatggtaccaaactcaagttgtacatcattatcgtcagctgccattgatcatcagattgaagtacttctgtctgaatggagtaaaaatgcagatatgctatttagtattcatcccatggatggttctttgctagtttggcatgtggattggctggatgaataccagcctggtatgtttcgtcaagtacaggtgtcctttgtttccagaattccagtagctttccccacaggtgatgcaaactctctctgtaaaagcataatgatgtatgcctgtaccaagaatgttgacttggctattcagcaggggaaacaaaaaccttctggcctcacccgttccacatcaatgcttatttcttctggtcacaataaatcatctaatagtttaaaattaagtatttttacgcctaatgttatgatgatatcaaaacatgctgatggttctctgaatcagtggctggtcagttttgccgaggaatctgctttttctactgttctcagtatttcccacaaatccagatattgtggtcatcgttttcatcttaatgatttagcttgccactcagtattaccattattgctgacaacatcacaccataatgcattaaggacaccagatgttgataacccagagcaaccttttgatgctctaaatattgaagaatgctctttgacacaacaaaataaaagcactgttgacgtggcatttcaggatcccagtgcagtttacagtgagcttattctgtggagggttgacccagttgggccattgtctttttctggaggagtttctgagcttgcccggattaattctcttcatgtttctgccttttccaatgtggcatggctgcccactcttatacccagttattgtctgggtgcatactgcaactctcctagtgcatgctttgtagccagtgatggacaatatctgagattatatgaagcagttattgatgctaagaaacttttatctgagctttctaaccctgaaatttctaaatatgttggtgaagtctttaacatcgtcagtcaacaatcaacagccaggccaggatgcattattgcattagatcccattaccaaacttcatggcagaaaaacccaactgcttcatgtttttgaagaagacttcattttgaataaccttgagaagaaaagccttggcaaagacagcattttatctaatgcaggcagctcacctaatggattttctgagaagttctacctaattgtaatagaatgcactcaagacaaccgttcactgttacacatgtggaatttacatctaaagtcaattcctgtctcattagatgaaaaagtagatacaaaattatccgaagcggtttggcagccagaagaacattattcttcttctccagagaagatcctatctcctttttcacaaaagtatcaggcttgcagagcaaatctccagagtaccagcaggttgactctgttttcagaaatggtttatagccaagaattgcatttaccagaaggagttgagataataagtattaagccatcagcaggacatctgagttcatcttctatatatcctgcatgcagtgctccttatttattggcaacttcatgttcagatgagaaagtaagattctggagatgcagagtaacagatggagaatctgccacgtcaaagaatggaaaaattgatcttgcatacatttgggaagaatggccattacttattgaagatggacttcagagcaatagtagtataactgtacctggtaggcctgtagaagttagctgtgcacatacaaatcgtttagcagtagcttataagcagcctgcatctaatagtagatcttcccaggactttgtgatgcatgtaagtatttttgaatgtgagtcaacaggaggttcatgttgggtccttgarcagacaattcatttagatgagttaagcacagtattggattctggcattagtgttgatagcaatttagtggcctataataaacaagacatgtatttatctagtaaagagaatatcacatcaaacacaaagcatttagttcacttagattggatgtctagagaagacggttctcatatcctgactgtaggaattggatcaaaactttttatgtatggacccctggctggcaaggtacaagaccaaactggtaaggaaaccctggcatttcctctctgggagagtaccaaagttgtgcccctttctaaatttgtactattacgaagtgtggacctagtttcttctgtagatggctccccaccttttcctgtttctttatcgtgggtccgggatggcatccttgtggtaggaatggactgtgaaatgcatgtgtattgccaatggcaaccatcttctaaacaagaacctgttataacagattcgtacagtgggagcactccatctataacaagtttaataaaacagagtaactccagttctgggttacatcctccaaagaaaactctgactcgatccatgaccagtcttgcacagaaaatctgtggaaagaaaactgcattcgatccttcagtggatatggaagattcaggtctttttgaagcagctcatgtactttccccgactctacctcagtatcatcccttgcagcttttggaactcatggatcttggtaaagttcggagagccaaggccatcttgtcccatcttgttaagtgcattgctggggaagttgtggctctgaatgaagctgaatctaatcatgaacgccgccttaggtctctcacaatcagtgctagtggaagcactaccagagacccccaggcattcaacaaggctgaaaatacagattacacagaaatagattctgttcctccacttcctttatatgccttacttgcagcagatgatgatagctgttactcatctttggagaaatctagtaatgagagtacgttaagtaaatcaaaccaattatctaaagaaagttatgatgagctttttcagactcaacttctaatgactgatactcatatgttagagacagatgaagaaaatacaaagcctagagttattgacctttcacagtacagtccgacttactttggacctgagcatgctcaggttctttctggccacttacttcattctagtttaccaggactcagccggatggagcagatgtctttgatggccttagcagatacaattgcaactacaagcactgatattggagaaagccgagacagaagccaaggtggagaaactcttgatgaatgtgggttaaaatttcttttggctgttcgactccatacctttcttacaacttcccttccagcctatcgagctcaactccttcaccaaggcctgtctacaagtcattttgcttgggcatttcactcagtagcagaagaagaactgctgaacatgttgccagccatgcagaaagatgatcccacttggtctgaactaagagctatgggtgtggggtggtgggtccggaatacccgcatcttacgcaaatgcatagaaaaagtagctaaagcagccttttatagaaagaatgatcctttagatgctgccattttttaccttgcaatgaaaaagaaagctgtgatttggggattatatagagctgaaaaaaacaccaggatgacacagttttttggacacaattttgaggatgagaggtggcgtaaagcagctttaaagaatgctttttctttgctaggcaaacaaagatttgaacattctgcagcattttttcttttagctggttgcctcagagatgcaattgaggtatgtcttgagaaattgaatgacattcagttggctcttgtaatagcaagactctatgagtctgaatttgatacatctgcagcatataaatctattttacgtaaaaaagttttgggaatcgattctcctgtcagtgaactgtgttcattgaacataaatatgcatcatgatccttttcttcggagcatggcatattggattttggaagattatagtggtgctctggaaacattaataaagcaacctatcagagagaatgatgatcaagttttatcagccagtaatcctacagtttttaatttctacaattatctaagaacacatcctcttttgctgagacgtcattttggatcatctgatacattttccacacatatgagcctaacaggaaaaagtggactggcaggaacaattaatttaagtgaaagacgtttattttttaccactgccagtgctcatttaaaagctggctgcccaatgttggctttggaagtattatcaaagatgcctaaagtcatcaagaaaacaagacctttttatagggcttctagttttctggatactagtaaagactgttctccttcttctccattaaagttggatgcaagggaagataagtcttctgctgttgattggtcacagtcactgataaatggttttggatcttcttcagagggttcctcagagaagcaatcaaactccactctttcttttgactggagccaaccaagtgttgtgtttcaggatgactctttagagttaaaatgggacagtgataatgatgaagaaaatgaggatgtccctatttcaatgaaagaactaaaacctttacagagaaaaacagataaaaagttggatgacataagttctaactacacagaatctttcagcacactagatgaaaatgaccttttaaatccatcagaagatataattgcagttcagttaaaatttagagcatgtttaaagattctcacagtagaacttcgtacctttatctactggctatgaaatagatggtggaaaattgcgttaccaactataccactggcttgaaaaagaggtgatagctcttcagaggacttgtgacttttgctcagatgctgaagaactacagtctgcatttggcagaaatgaagatgaatttggattaaatgaggatgctgaagatttgcctcaccaaacaaaagtgaaacaactgagagaaaattttcaggaaaaaagacagtggctcttgaagtatcagtcacttttgagaatgtttcttagttactgcatacttcatggatcccatggtgggggtcttgcatctgtaagaatggaattgattttgcttttgcaagaatctcagcaggaaacatcagaaccactattttctagccttctgtcagagcaaacctcagtgcctctcctctttgcttgtacagccaatgccaaaacagtagttgccaatccattattgcaccttagtaatctgacacatgatattctccatgccataataaactttgattcaccaccccaccctgatatccaaagcaataaagtgtatgtaatgcatactttagcagcttcactttctgcttgtatttatcagtgcctttgtggtagtcataactacagttcatttcagacgaatcagtttactggaatggtatatcagacagtactgcttcctcatcgaccttctttgaaaacaggaagcttagatgaagcattaactcccaatacgtcaccagctcaatggccaggaataacttgtctaattcgacttttgaattcttctggcgaggaagcccagtcagggcttacagtcttgctctgtgagattctcacagcagtgtatcttagtctcttcatccatggcctggccacacattcaagtaatgagctatttcggattgtggcccatcctctaaatgagaaaatgtggtctgctgtgtttggtggaggtgcacatgttcctagcaaagaacagacacattcaaaaactttacctgtttcttcactagttgaagaaggagaaaaacagaacaaacgttttaggccgtcaaaaatgtcttgcagagaatctgccccactgaccccttcctcggcaccagtaagccaggagtcactggcggttaaagaaaagttcatcccacctgagctcagtatctgggactatttcatagctaagccttttctaccctcttctcaaagtagagccgaatatgattcagaggagagtctgggaagtgatgatgatgacaatgatgatgatgatgatgttttagcatcagatttccatctccaggaacattctaattcaaattcatatagttggtccttgatgcggttggcgatggtgcaattggtgctcaacaatttgaagactttttatcccttcgcaggtcatgatcttgcagagcttccagttagttcacctctttgtcatgcggttctaaaaactcttcaatgttgggaacaagttcttctccgacgacttgaaatccatggtgggccacctcaaaattatatcgcaagtcataccgccgaagagagtttgtctgcaggtcctgcaattcttcgccacaaagctttactggaacctacaaacactcctttcaaatccaaacaccatctggcactgtctgtgaagaggctttggcagtatttggtgaagcaggaagaaattcaggaaacctttatcaaaaatatattcacaaagaaacggtgtctaaatgagatagaagcagatttgggatatcctggaggtaaagcaagaattattcataaggaatctgatatcattactgcgtttgctgttaataaggcaaatagaaactgcatagcaatcgcttccagtcatgatgttcaagaactggatgtttctggaattctggccacacaggtctacacttgggtagatgatgatatagaagtggaaaccaaaggatcagaagatttcttggttatacatgctcgtgatgatttaacagctgttcaaggtacaactccatatacacatagcaatcctggcactccaatcaacatgccatggcttggtagtacacagactggcagaggagcatctgtgatgattaagaaagccattaataatgttagaagaatgacttctcatccaactcttccttactatctgacaggagctcaagatggaagtgtcagaatgtttgaatggggccattctcaacaaataacctgttttcgatctggtggcaattcaagagttacaagaatgagatttaactatcagggaaataagtttggaatagttgatgctgatggatatttaagtttgtatcaaacaaactggaaatgttgtccagttactggaagcatgcctaagccatacctgacttggcagtgtcataacaaaacagccaatgattttgtcttcgttagttcctcctctctgatagctacagctggtctttcaactgacaatagaaacgtatgtttgtgggatactcttgtagcacctgccgatagtttagtccatgcatttacctgccatgacagtggagccacagttttagcatatgctccaaaacatcagctactaatatcaggtggcagaaaaggttttacatatgtatttgacctttgtgcaacgccacaagaggcaggctttccaagagccattatttctcttgtaaaaccggttgctgttgatccacctgaagagtactttgttacaggatctgcgaaaggcaatataaagatttggagtctctctacctttggtcttctccatacttttgtcagtgaacatgctcggcagtccatttttagaaatattggaactggagtgatgcaaattgagacagggcctgcaaatcacattttctcctgtggagctgatggaacaatgaaaatgagaatactgccagatcagtttagccctttaaatggaagtgttgaaaaatggatgtggaaatttatgctataacatttttaccaataaggatggtacaatttattaacctatatggaagtggccaacagatataatatacagtgatcattctctatgccacaaattagctaatgctttcttggttttatatttattttatggagctttgccccttgatgccacctgatgcccttaaaaattaacaaggtcattcagaagtagattacattgccctaaagtagaatgtgtaagtaatgctgtaataatacatatcatagtattattataatcagtatgtcatagtgttaaaggtgttttgtttactcaattgatacttttccacaggcatctctgcatgaatttcttccacagtaaaaatacgttttttgtaaaggcaattgtacataatactcatcacttaattcaccacactctcacttcctttattagccttatacatctcaaactcttctcttaattaatgataggtatttgagtaagaatgaaaaaaataatgaacatcttcattaaaattgtcattgagacgtcagtgataaatgagctagatggctcaatatgtaaggttttcagtagtttaccctccggaacccaagttatatgtatgtatacgtgtgtgtgtgtgtgtgtgtgtgtatcttacacatcttatttgaacttagttgtatatattagcgaaaactggtttttcatgtgtttttgtgccataacaactattgccaccagaataacttttttttgcaactgtgcttttcatttttaaaaaatttttgaattcccatcctaattttcaaataagtttcaaggagactatcaggattattattttaaagattagatttagtcaaataagtcttagcaggcaataaagtttctgtggtggcatatatcatgtaagacacttaaagtaagtttgtgaatttgtcaactttcgagcatcaaacaaatattttacttaaattttattttatcttatttttaggggcttttaatctcaaaaattctggaaaagcgaatagcagtgtttttcaagaaacaaatgtgaaagcagtccaaattaagtagatactatttagaaatgtaaaatactctccagatctaccattaatagaaaataaactaaaccttatattttatttttgccaaaatattttattataaaatatggaccaaaatatttaaaatgcacaatgcttttaacttaaatgtgctaaccctgtttctgtctgttttgtgctgtaccttttctgattcagaattatagaaaacttgatttatacttgattttaaccaatggagactacaggcagatggggactaagtgtttatgggggacaattatgtactatttaacttaaatataattttgttcaatagagaatataatataatagcattttatgtaataaaatatgggcaacgattatcttggaaattaaagagtcaaagcaaagaaatgaagggctggtaaaatgaattttgtaatatcctcaggatacttttatccttaaaagtatgttgttaaagattttgtaaattgtattccaaccaattttaaaatggtgtggagcaagttgcagtgcaaacactgtcattatgtagagagtttatatgcacatgaataacctgtacctataaatcggtgcaataaccatatgcgactattttgccatggagaaatctgacagcattgcaaacaaatagtattgtttgatgtagttaaccttaagttatttttcagtaatttcttcacaaatcaagattcaaacagctttaaacacttccaatgagataaaatatttactattatgcttattagaacaaaaggtgtttaaggatgaacctaaatattttaattgagcatttatatggataatcatacattatgtaagcccatatgtatttacatccagagtcataatattttaaaataaacaatcatgcagaaactttaaaaaaaaaa

SEQ ID NO: 111042 - DNA, 365 bp, Homo sapiens
  misc_feature (1)...(365): n = a,t,c or g
cgtaaatggaaagatacttcatattcatggatgggaagacaatattgtaaagatgccaatactacccaatgcagtctacagattcagtgcaatctatatcaagatcacaatattttttgaagaaacagataaatccaacctaaactttatgtnnnnnnnnnnnnnnnnnnnnnnnnnnnnnnnnnnnnnnnnnnnnnnnnnnnnctgcaccacaggataagctatcctaagagacaggaagagaaaagaaagcagatctagaaggagtgattcttcaccatgtgtgtgcctttgtgggatccccatttgctcatgacctagcagaaaaatcagacgcttcctctggggttatcacatcaccataa

SEQ ID NO: 111043 - DNA, 594 bp, Homo sapiens
cgacttctctggagactctctggtgtgttaaaatttggacacaggagttctgatcgcagcagggtcctgctggaaggtgcagaggccaaagcagtttgaggattgcaggtcctttccagcaaagaacccactgaagctggggactgctgagcagcctggggctgcccagaaggaggggcaaacccatatgagaaaacgcccagggcagaaggtcctgccacccccccctctgacccggtctcctccgagtcctctcctctgtggctcccagagctccctgcaggctcccgcctgggatgccaggaacaggggctctcaggatggtgtgggggcttcagggctgcagggaccacagagccaggtggagctgggagaggctatgtggtcagccccccactctcctcacttcccacgcctcctgctgcagaagacacccttggagctgggggaggggcagccggggaggaaggtcgggtctgaccactccctgtgacccagccccatgcagctgcacaggcgagtgaattacgttgggtggcgccagggttttacctgtccagccgatgtcaggcgtaccggacattgatctcgtaa

SEQ ID NO: 111044 - DNA, 578 bp, Homo sapiens
aatttttatttatttatttgagatggagtcttgctctgttgccaggctggagtgcagtggcgcaatcctggttcactgcaacctccgcctcccgggttcaagcgattctcctgcctcagcctcccgagtagctgggactacaggcgcatgcaccacacacagctaatttttgtatttttagtagagacacgggtttcatcatgttggccaggatggtctctatctctcgatctcatgatctgcccggctcggcctcctgaagtgctgggatttcaggtgtgagccaccgcgcccaagcctaaaccttttttaaaaaaagtgggttgttccatggcttaagaaatgggggtttccagaaactttgaaaaaaaaattccagggaatatagatcgcaaaattagaaaatactcttttgattcttttcattagaattatttgcttgatttcctctataaatttccgtaattaatttaaggaggaccagcacagagctttttgaggagcatattcatcttaaaatctcagttactgaaggaagatattcttgatgagacagaatgcttttctttatcttagtc

SEQ ID NO: 111045 - DNA, 548 bp, Homo sapiens
gtagagatggaggtgtctcaccatgttgcccaggctggtctcaaactcctggcctcaagcaatcttcctgccttggctcccaaagtgctgggattacaggcatgagctaccacgcctgggcctccttgaatcttttggaaaacatttataagaatgatttttaacttcttttgtgttacctaaataatttcatcttactccaaagttattcttccactttgtaaaatttgctatttctctttttatgatgctagttctctttacatgctagtgatttctgactcttattaacaagagtggcctgagctgacggagtagatgtttccacttttgtgtaagattgttttagtaatagatctcttttttttcttactggaatttgttgctgcaatgggccaggcaatgactggtatctttgatgtaggatcagtggattgggagctcgctgtcatgctgagtttctgcaaatgcccgaatgataatggcttttctttgaggcacctgtaaattcagaaattttcacttttcacagtttgctcagtttcttt

SEQ ID NO: 111046 - DNA, 356 bp, Homo sapiens
  misc_feature (1)...(356): n = a,t,c or g
ggtcactgaactgcgctgccagtgcttgcagacactgcagggaattcacctcaagaacatccaaagtgtgaatgtaaggtcccccggaccccactgcgcccaaaccgaagtcatgtaagtcccgccccgcgcttccgctgccaccgctggggtccccgactctcccgctgccccaaccctgtccccagcccgacctcctgtctcacggaattcccttctctctgcagagccacactcaagaatgggaagaaagcttgtctcaaccccgcatcccccatggttcagaaaatcatcgaaaagatactgaacaagtgagttgtaatttccatatacacanggcgactggagcccgttgg

SEQ ID NO: 111047 - DNA, 1579 bp, Homo sapiens
ggcagccagtccacagtggcagtggtggtcctggcgcggctgcaatggtcgtccaccgagttggcctacttctcgctaagcgcctgccctgataagggggattgtgctctgtggggaatgaggagggcaacgtgtggctctacgacgtcaagcaaaatcctgaaagcagcccacccctgcatgccggcagccctgcaggcccccacacagccctcccctctctccccaccagatcctgaagtggccccagccctgggcccttggcccaggtggtgaccaagaccatggtgaacacagtggtggccaatgcctccttcacctacctcaccgccctgacggactccaacatcgtagcccatctgggggaggatgtagcctcacaccatcgccaaaggaaccagggacacagctaactaacttattgcagctttgggccgatgggggtgggggggggtctttcagtgaatatttttattaaactctactgtggacaagaagcctgtggaaaggtgtttcgagttatgcaggaagaagtgttcctgctttgactgacaggcaggcccaggagttgaggcttctagagcagagactcttgggagctcatgggtttgcacacttctctccggctcagcacagcccccgcagcagcccctgggaccccggatctttggtccagaatgaattcatccctgccagccggacgcccctgaaacaggtcatctgcctgcatcaagcctgacaatccatttgcttgcgaagtcaccgctgctcaaggtccacatccaggtctctccccgctataactttatttaggaatataaaacctaatctatgtacagggacacgtcggtgtcagggtgaggggtggccaacacgtcggtgtcagggtgagggggggccacaaggcgggccatggctgatctaccggccgctctccctcggtgtggtaacctggagcggagggtcaagcgcaaggtaggaaacgggggcttcacaggccggagcagagcccccctctggccccctactaaaatcccttccctgctttgtcttttaatggccaccccgaaaagcgcttcctcccagcaagggacagcttcactgaatgaaggtcgggtgatgggcgtttggtaaaggctttccttgggggctgtaggtccgggcgtgggtcttgcactcgggattgatgatcttgtgctcccaaggggttgggggaactttgtaagccagcaaataagcaccttgccgggtcctttaggtcacactgtgatttaatgatggtttccagtgtggggtctttctttggtgaatggtgaataaacaggcaattgggtacccttggtgtcccttgttaatggtgatcctcggcccgccgcagccggcgtcacttacttcttctcgccctcgaagagacaagaacgacctcgaaggctggaggggcgttcatgctcccgccgccgttgcgtccagaccccaagtgtccgccaccgccgccaccagagccctaataagaggcctcttccggattactccggcggggcaaacccgcccaaggatcggctcatcgcccccgttgggc

SEQ ID NO: 111048 - DNA, 408 bp, Homo sapiens
gtggccatctgaactatgttggtggagaggcgtatgccgaatgcctcagtgacagcagcatatttgtacagagtaagaactgcaactttcatcatggctttcatcccaccactggctgtaagattcccagcagctgcagcctcaaaatttttaacaatcaagagtttgctcagcttctggctcaatctgtcaaccatgggtttgaggcagtatatgagctcaccaaaatgggcaccattccgatgagttttgtcaagggttggggagacaatatcaccggcagaagtaaccagcaccccatgttggattgagattcatcttcatgggcctcttcagaggctggataaagaccttattcagatgggctcccctctgaaccacatatattctgttcataatgcagaagcg

SEQ ID NO: 111049 - DNA, 429 bp, Homo sapiens
  misc_feature (1)...(429): n = a,t,c or g
tttgaaaactgncatagggcctcggccgtggtgtgcgaatacacggctcaactgncagcttcancctccccaggttccaagctnaagcctccggagttagctgggacagcaggccagcactacaacgtctaaataatttttgtattttttttaagagatggggtccccactatgttgcccaggctggtcttgaactcctggactccagtgatcagcccacctcagcctcccaaagtgctgggattacaggtgtaagccactgggcctggatgttcatattatttaaaataaatcttttcacaccaaaaatctattggctcttttataaatatgaaatttaacacatttcttctaatacaatgtatctccaggttcctgaattaaagacttcctcagctattcactgaagcgttacctataaaaatatac

SEQ ID NO: 111050 - DNA, 675 bp, Homo sapiens
tgagagaattgtcagaattgtccctcctgtccctctatggaattcacaagcagaaagagaaatctaggctccaagggggtgtcctggtcaatgaaatcctcaatcacatgaagagagcaactcagataccaagctacaaaaaactcatcatgtatctgcgcatgacactactgtgagtggcctacagatggcgctagatgtttacaacggactccttcctccctatgcttcttgccacttgacggaattgtactttgagaagggggagtactttgtggagatgtactatcggaatgagacgcagcacgagccgtatcccctcatgctacctggctgcagccccagctgtcctctggagaggtttgctgagctggttggccctgtgatccctcaagactggtccacggagtgtatgaccacaaacagccatcaagttctaaaggtcatctttgctgttgccttttgcctgatatctgctgtcctaatggtactactgtttatccacattcgccgtggactctgctggcagagagaatcctatgggaacatctgaacagacagctggataagccaggccaacctcctgtgacacagcatctctcagtggtgccgcatctaaaggacaggcttttgccatgtgggcattgccatcctcacaccctgccttttgaatct

SEQ ID NO: 111051 - DNA, 434 bp, Homo sapiens
  misc_feature (1)...(434): n = a,t,c or g
ctatcctttaaagaatgaatctgaaaagctacacttacacattataacagaaaatacatgtctagattggaaaaaaagtaactttaaatgaaactagagattcttccccattattagctcctaactgaatttgaatgttttaaatataagtagtaagatcaactctgtaagtcaaagatgggctgggtgtggtggctcacgcctgttaatcccagcactttgggaggccgaagctggccgattctttgggagccctgggagttcgaggaccagcctggtcaattatgggcgaaaccccgtttctacaataaaataaacgggcacggtgacgcacgcctgtagtccaagctacttcggaggctgaatcagtaggatcacttgaacctgggaggcggaggttgcagtgagccgataangctgactccctgagtgac

SEQ ID NO: 111052 - DNA, 724 bp, Homo sapiens
ttagatcagcatttgaattgtggactcaggaaggtggactgccctccccaagtggctgggcataatccaatccctcaagaacttgaatagaacagacagcagagggaggaggagttcacccctcatttcctgcctcgccactggagccgggacatctcgtcatctcttgcccctggactggatgtccaccatcggctgccctggttctcaggcctccagacctgagctgagtttgaatcacacctcaggcttccctgggtttccagcttgcaacacagatggtgggccttctcagcccccagagtcacataaaccagattcctcatcctaaatctcctctgtgcgttggttctgcttctccagagagcctacactaacacgctccccctctttcccctgcaattcctgagatcacctaccaaagaaagcacatattctcaactgcatccttcagggtctcctcctggggggggccctggtccgagacagctgggattgactagccccaaggcttctgaacagccactacccggctttgactgggagggccagggctcggataggagggcaggagcagatggctcgggaagggagagctcggggacacctggaactgcagttctacaacgaagtagctgtgggagaagttgctgaacctctctgagcctctgttttctcaccctcgtgccaagcttggcgtagtgttggttcgagggtcccgaag

SEQ ID NO: 111053 - DNA, 389 bp, Homo sapiens
  misc_feature (1)...(389): n = a,t,c or g
cggggccacatgtcgcccccatccacacaggcaggcatgcacatgtgcacacccacccccaagtacgtgcacctccggtcacatgcacacagggacacacacgtctgcacatgtgcactcaaggcgcacacacgcctgcacacacatacgccctcacaatcacgtgtgcatacacacatgtgcatacatgcatacacacctgctcacacaatgcacaccccctcacactcctgtgcatacacacatgtgcatgggccttcccatctggtactcatagccctttaaagcacggcacacggcaacctccagaaatatgtgggctcagggcagagctacaattttctctgacattcacacactctcaagggcatggagtggcacaagancgc

SEQ ID NO: 111054 - DNA, 660 bp, Homo sapiens
  misc_feature (1)...(660): n = a,t,c or g
tcttttgtcgcggaaaacggcgcactggtttaccaacatggcaagcagttgttccacggcgaactgacccgacatgaatcgcggactgttattggcgagttgctaaaagataagcaactcaattttgtcgcctgcggtctgcaaagtgcatatgtcagcgaaaatgcccccgaagcatttgttgcactgatggcacaacactaccattgcctgaaacctgtaaaagattattatgagattgacgacgtactgtttaagttttcgctcaacctgccggaagaacaaatcccggtagtgatcgacaaactgtacgtaacgctcgatggcattatgaaacccgctaccagnggctttggctttatcgacctgagtattcccggtctacataaagcaaacggtatttcgcgcgcactgatacgctgtgatctgcaccagcaaatgtaggaccgattggcgacagccggnaccatgcngagatgcttgaaatggcgcgttattcctttgtcgacggccaggccggggaaacaatttacacaacgccccggtcgctcgcgggattataaatatttnttttttaaaaaaagggcggcggccccgnnnnnnnnnnnnnnnnnnnnnnnnnnnnnnnnnttattggggggggcgggggaagaaaaactt

SEQ ID NO: 111055 - DNA, 423 bp, Homo sapiens
  misc_feature (1)...(423): n = a,t,c or g
ccccgtgttaggcggtcccccatcgcgcaacggacgtagatgttttgaaaggggtgcaaccgggtaccttgcgttgaggagccaacaccacagattccctttatggcccccgttgttacttccgcccgcctttctcactactcgtgccgcgggacgcccaccnnccnccnnnnnnnnnttttttttcccaggggttttatttggggtccccccgggtttttnnnnnnnnnnnntttttaaaaacgggcccgggcccaaatttgatgcccccgggggtttttttaagggtccctttagcccgggggtttggggcccccccggggccaaaaattgggcccccctttttaaaaaagnnnnnnnnnnnnnnnnnnnnnnnnnnnnnnnnnnnnnnnnnnnnnnnnnnnnnnnnnnnnnnnnnnnnnn

SEQ ID NO: 111056 - DNA, 352 bp, Homo sapiens
cgaaagagggtcgtgactggttacgggaaattttgtgtatgtgccgatggcgaaccgcggcttgccggtcgtaccgtcgttcctgtgtcaacattaagcgggccggagctggcgttacaaaaattgggtaaaacgccggtaggacgctatctgttcacattattgacattaacccgggactttattgagataggccgggatgccgggctgtgggggcgacgctcccgcctgcgattaagcggtaaaccgctgttgctaacagaactgtttttaccggcgtcaccgttgtactaagaagaaaaaaatatggagtggagtctgacgcaaaataagctgctggcgtttcattgcg

SEQ ID NO: 111057 - DNA, 700 bp, Homo sapiens
attgcttttgtccccgcctgtgagtgttgcctcacctccccccgcagtttttcgatatgcttcgtgatctgctcaagacggttatcttaaagggtgggagcctgctgtaggtaccctgcttaccagactcggaaataataatggctctcagtccccgtggaatgaaggagccaaattcgggatggcctgggaaagcatgggttctaaaaaatgttgtccgtaaaccggatgaagtttggtaaaggtcagatccggatgagaactgtttttgtacacggccattgatcaacgctcttcaactggtgcctggagaaatgctctttctatttgggaaccgtgtctgcaactgaaattttcgatcgtgtgattaacaccccgctgggagattaaataatgaagcgtgcgcctgttttttcccaaacatacgctcaatactcggccggttgaagatggttcgttatcgacactcacctgccttgatggtgcattcgttaattgcgcgcgtagaagtaatggctcgcggtaatgccagtcctttgcgctgtatgtggtcggtatgtgaagtttactctaaaagtgctccgggcatgatagtgttgagaagacctctcgggtatggtcaggtaatgaacgtgttcagtagcggcatgctgaggacgctctggatgatctccgggtacgcgagattgaatctcgtaat

SEQ ID NO: 111058 - DNA, 129 bp, Homo sapiens
gaccacattatgctgggggataatcaacaccgatctgcctgcggaaaatccagcggttgccgcagcggaggaccattaatcatgacggataatccgaataaaaaaacattctgggataaagtccatctc

SEQ ID NO: 111059 - DNA, 409 bp, Homo sapiens
ctctttgcgccaaagtggcagtgttgttgaagtggaacaaccgttgcgtggaaaatatctgaccgggggttgtccaatgaaattctctgcctttacgccggatattaaagctgcgccgctattatgtgaacataccgctgctgtattgaaggagctggcccatagggaccgataaaattgctgcaatgaagccaaaccacgccatctgatattaacgggggcttctggctcccaatttataaaaatttcgagggtattaatcatgtcagatcaacttcaaatgacagatggtatgcatatcatcgttgaagcattaaaacagaataatattgacactatttatggagttgtaggcattcctgtgacggatatggcacgccatgcccaggcggaaggcattcgttatatg

SEQ ID NO: 111060 - DNA, 756 bp, Homo sapiens
  misc_feature (1)...(756): n = a,t,c or g
ccatattcagattcaagtcggtaccggggatccgccccccaaccagtcccctccccaaggccccctccaaagcgggggtcacatttcccaagagatttgagagggcccccacccccacatatccatggggttgttttgnnnnnnnnnnntccctttgaaaggaatgggggtggggccaaaaatccaattaccccccctcccccgggagaacaccttgctgtctcccaaagctcctgctacccccacagactcctcctttggcccccagtgccctatccccatgaaaatcccctttacttaaaagccgagccggcgtggctcacccctctcactgggggttccgacagccaaacattgttgtggttgtgaatgctgggatgagaaagctggaatgtttagctttgggctcacatttctctacccaggttgagttgggcaataggaaataacctttaatttagaattctaaacacgaaacatattcactatctgatatagtagtaagtgtaggggaggaaaaacccctgaaactcagcccccaaacagcacaaaccttgactggagtgagattttttgtccccacccacatgcctgccatgagtaacagaaattgcttcctgaagataatacatccagatcctcaaatcatttctacaacctttaataggcaacagcaacattcaaccaaaacttacctgacagagataagtcaagaaagaaattaccgacagccaagaaaaacaggcaataggaaga

SEQ ID NO: 111061 - DNA, 622 bp, Homo sapiens
  misc_feature (1)...(622): n = a,t,c or g
gtctcaaggaaggcccgcgcacccttcttgttgttgtcaaccccccgcggggaatcttagggaaacagggtgtgggggggggcctccagcaaactccaccgaaccttcagcagagggggcttttgtgtttaaaggaaaactttccacacaggaagccaatgcctccccctccccaaaaagggcctccccccccagacccccttgaaaggtccccccgcctcaaggcccaaagttagagaattccatgaagatggaagaanctggcgcaaaaaggctgaaaattccaaaagccataccnnnnnnnnnnnnnnnnnnnnnnnnnnnnnnnnnnnnnnnnnnnnnnnnnnnnnnnnnnnnnnnnnnnnnnnnnnnnnnnnnnnnnnnnnnnnnnnnnnnnnnnnnnnnnnnnnnnnnnnnnnnnnnnnnnnnnnnnnnnnnnnnnnnnnnnnnnnnnnnnnnnnnnnnnnnnnnnnnnnnnnnnnnnnnnnnnnnnnnnnnnnnnnnnnnnnnnnnnnnnnnnnnnnnnnnnnnnnnnnnnnnnnnnnnnnnnnnnnnnnnnnnnnnnnnnnnnnnnnnnnnnnnnnnnnnnnnnnnnnnnnnnnnnnnactatcagagattaaa

SEQ ID NO: 111062 - DNA, 651 bp, Homo sapiens
  misc_feature (1)...(651): n = a,t,c or g
cnnnnnnnnnnnnnnncccggaaaatcctccgggtcccgggggggccccgggggggggcccagaaattcctcggggctccggcccgggcccggggggttcccnnnnnnnnnnntttaaaacaaggnnnnnnnnnnnccccaaatggagggcaaatgggcaaaccgggctcccccgagggttatttcttagggcaaaggttcctccccttccaaccccctgaaaaagggggccccccaggggggagcccccccttttaagtaatttttgttttttttgnnnnnnnnnnnnnnnnnnnnnnnnnnnnnnnnnnnnnnnnnnnnnnnnnnnnnnnnnnnnnnnnnnnnnnnnnnnnnnnnnnnnnnnnnnnnnnnnnnnnnnnnnnnnnnnnnnnnnnagcatattttttaaccacagannnnnnnnnnnnnnnnnnnnnnnnnnnnnnnnnnnnnnnnnnnnnnnnnnnnnnnnnnnnnnnnnnnnnnnnnnnnnnnnnnnnnnnnnnnnnnnnnnnnnnnnnnnnnnnnnnnnnnnnnnnnnnnnnnnnnnnnnnnnnnnnnnnnnnnnnnnnnnnnnnnnnnnnnnnnnnnnnnnnnnnnnnnnnnnnnnnnnnnnnnnnnnnnnnnnnnnnnnnnnnnnnnnnnnnnnnn

SEQ ID NO: 111063 - DNA, 652 bp, Homo sapiens
ccggtaaaccgtacctctggaatgatgaaacggcatctccgcgattacgactggcgacgcgacactggggcgctgtttcccgctgccgccattgtgccactctatgtcggtatggcgaaccatgaacaggccgatcgttctggcatacgccgtgcgcagtcggttactgacacctggcgggatctggcaagcgagtacgaaaccggtgaccagtgggataaacccacgggctgggcaccgtaccaatggatggcgattcagggatttaaaatgtacggcgatgaccttctgggtgatgaaatcgcgcgaagctggctgaagacggtgaatcagttctatctggacagcacaaactgatcgaaaaatgccatattgccgatggtgttccccgcgaaggcggcggtggcgagtatccgttgcaggatgggtttggctggactaacggtgtggtacgccgtttaattggtttgtacggcgacccataatatttttacagccagccgctaacttcctgctggctgtaaaattatcctcttcaggagaagatatttaacatcattgccgcctgggtgcgatttttcacttccagacggcgatacagggattccagatgcgcttttaccgttccggtactgatattcagcgctctgcc

SEQ ID NO: 111064 - DNA, 423 bp, Homo sapiens
  misc_feature (1)...(423): n = a,t,c or g
aacgtgcctttactgggagnggaacacatgaggttcagctcgtgccgggcactgtacattcactgaagcagcttaggtgctcagccccgacactgacgccacactgagcaggatgcacggcccggggctcacactgtccatggaggaggtggggtcagcccgacgtgggcggatggtggcccgacacaccgacagcttggttctgggactgtggctcagctgacccgtggcacagctgcacctaagacatggccctggctaggcgggaacggctcacagtagcgatacattcacaggacacagttggtgtccagaaaagggggctcagaacacagtttttacacaagcacttgtcacccacacgacagagacgtcactcatgcagcacagccaccaatagtttacagcagctcatgcccggct

SEQ ID NO: 111065 - DNA, 331 bp, Homo sapiens
  misc_feature (1)...(331): n = a,t,c or g
ggtcgacgtcatgtgcgcctttattagctgagccattacttgagagggatgaagcgggaggagtgggtggccccgatgccgggccggccatgctttacgggcttgtaggtgatggagaactcgcccaggtagtggccgatcatctcgggcttgatctccacctggttgaaggtcttgccgttgtagacgcccaccatgctgcccaccatctcgggtaggatgatcatgtcccgcagtgcgtcttcaccacttccggcttctccatgggcggcggttcagcagcntggngcggcacactgtacagctgcatcagctgctcgtaggacatgtc

SEQ ID NO: 111066 - DNA, 825 bp, Homo sapiens
atgaggctcgtccacctctaacctcggacgtttcgcctttttatacgcaacgccgcgggttccaacagagacccggccgttcactgaaaatagagagccaaaggagacacaggccccaagttagtcccacgccagcttttccccgcccggaaagcagccccgcgcacatttcgatcccgagaccctctacgatgctcggggtcgccagaaatgccaccgcaggacagcacctaccacttatccggaaggaagggaacttcccttgccgccttcctccccgcccaaaccgcgacgggggacccacacctcggaaccagacataaggaaccctcaagggtggggaaaaagggaggaaagcaaatgcgggggcggggagggaagaggacccagaagtcccaggtattcagttcagcctccacaaaaaagggggaggggtgttattccgtaggtgttttggggaagggagtttggaacccaggaaggccatctttgggattggggagggaattcaattcgcgatggctcccagaggttgctcctcgcgggactacccgcaaccccgcccgaccgcgcttgttcccgtgaaaccccgagcattgggccgccgcctagacggctcccgcggctttgtactcactctgccctcgaagttgttttcctccacatcactcatgtcgacgaggcgctccccagaactaaataagagacaagtctcggctcgagggccgatggcctaattaacccgctgactggaccgtggggaagaggaaagagtcggcaaccacagccgctccactccactcccactcggtcgcaggctccagc

SEQ ID NO: 111067 - DNA, 423 bp, Homo sapiens
ttcagcaggctgctcttccacaaaaattggaaggaggacgggggcagttcttctgcctctcagccagaggaaatgcaggagcaaggtgcctgtagcaacaagggcactgcccaggaaaggaaggctgctgctacccctgagagccaggagccccaagccaagggggcagagggtaatgctgcctcagaagaagccccaggctacagagacatccactcccttggggcagagagtggccctataccaggcagtgctgagcagaatgaggagctaggtgggggcagcaaaaaccgtgctgtccttgtgaggtcattgcctggacctggtgccctgactgccttcctgtgcccagaaaggaaggggctattgcctcctgccagccgcattcccttttcccctctccctcctgtggattctacgaaa

SEQ ID NO: 111068 - DNA, 906 bp, Homo sapiens
atgggagcaggggcagagacgggcagagggcagagggcggcagcgccggagcgggcgtcatggcgcggctcctctggttgctccggggcctgaccctcggaactgcgcctcggcgggcggtgcggggccaagcgggcggcggcgggcccggcaccgcggggatcgtgggggaggcagggtctcttgcaacgtgtgagctgcctcttgccaagaagtgagtggcaaaagaaactaaccccggagcagtttctacgtcacaagagaaaagggaacggaaccgccttttcagtgggatctaacctgaataacaaggaagcaggaatgtatcattgcgtgtgctgcgacagtcccactcttcagttctgagaaaaaagtactgctctggccactgggtggccttcgttttccgaggctcatggtacgtctggctctgatgaaaagccacacagggaatcctgagacgtctggatacctcgtttaggatcagcatcgcacagaggttgtctgcaaagcaagtgtgaaagctccatcttaggtcacgtgtttccatgatggaccttgggcccaatggtcagaggtttttgcatcaaccagtgttggctttggaagttcaaacccaagggaaaccactggaccatctttcaagagtccgcgttcccttgccacccctttcacgtggcaccctcaattttccacaattcacttgaatgacttggtttttatttgcaataaaactgggctgaatttgctgctgtctccagcgagtcattgcttctcttaatttatttacctggaatcaacttaatcctgtgtgttaggctgttcttgtgttgctataaagaagtacctgatcaggatctgggagaatttgaaaaaacaagaaaaactagaaaaataaacaaaatt

SEQ ID NO: 111069 - DNA, 529 bp, Homo sapiens
tgagatggagtcttgctctgtcacctgggctggagtgcagtggtgtgatctcggctcactgcagtctctgcctcccgcgttcaagcaattctctgcctcagcctcccgagtacctgggattacaggtgcccaccaccacgcctggctaatttttagtatttttagtggagacggggtttcaccatcttggccaggctggtcttggtgatccacccgcctcggcctcccaaaatgctggcattacacggcgtgcaacccgtgcccggcctctgttaagatttttaagagcagaatcaagaaattgaaggatttgctgttattcctacctgcattggacttgacctgggtgttgggtgagtagcaatctgttactgtttctctatgtgggacgatgaggaaagggttgagaaatccagcgaaaggacacttctgttaaaagctcaatctgctgcccatggttgggaaaaggggagtatgcggtggtggttgtacgaatcgtcgacccgggaattcaggccggtgggcggtt

SEQ ID NO: 111070 - DNA, 451 bp, Homo sapiens
  misc_feature (1)...(451): n = a,t,c or g
tatttgtggtgggccggctgaaggtggcgttgaaaccacagctctgggaactgggaaaagtgcttcggaaggctgggctgtccgctggctatgtggacgctggggcagagccaggccggagtcgaatgatcagccaggaagagtttgccaggcagctacagctctctgatcctcagacggtggctggtgcctttggctacttccagcaggtaaaggagctggaacaaagagcagagcagaacccaggcttccctccaggctgacatgttcctagtggccgtatcagtcactcacagtttggagtcctcagtggatgttctcacagctgttgttagatggccatcccctgagatccactgaagattcattttttaatcaggcatccagtgcattgaagagcaatgacgaaatcgtcggcccgtgattnnngnannggtggtgctcatgacat

SEQ ID NO: 111071 - DNA, 440 bp, Homo sapiens
ttttttttttttctttttctttgagactgggtctcgctttgttgccccaggctggagtggagtggcgtgatcttggcttactgcagcctttgccctccccggctcgagcagtcctgcatcagcctccggagttagctgggaccacaggttcatgccaccatggccagccaacttttgcatgttttgtagagatggggtctcacagtgttgcccaggctggtctcaaactcctgggctcaggcgatccacctgtctcagcctcccagagtgctgggattacaattgtgagccaccacgtccagctggaagggtcaacatcttttacattctgcaagcacatctgcatttctaccccacccttcccctccctctccccttttatatcccatttttatatcgatctcttattttacaataaaactttgctgccaaaaaaaaaa

SEQ ID NO: 111072 - DNA, 5574 bp, Homo sapiens
  misc_feature (1)...(5574): n = a,t,c or g
aggctggcccagctccgcaaggaaagaatagaccttcgagcggctattgaagtgaacgccggcaggaagccgcaggcgatcctggaggagaagctgaagcagctggaggaggagtgccggcagaaggaggcggagcgtgtcagcctggagctggagctgacggaggtcaaggagagcctgaagaaagcgctggcggtgcggagtcaccctggggctggccatcgagcccaagtcagggacatcgagtccacagtctccagtgttccggcaccggaccctggaaaactcgcccatctccagctgtgacaccagtgacaccgagggccccgtgccggtgaacagcgcggccgtcttgaagaagagccaggctgccccgggcagctccccctgccgagggcatgtgctgcggaaggccaaggaatgggaattgaaagaacgggacctaggggacagcagcaccactccagcctcagagactgcacacccccttgcctgtatcctcatctgtgtgacggcaggaagctctgcccagagtggcctcagctgcacgactccagaggctccacgactgagctctgaggccagtgcctgtcccccaggcccacttgtattctttctactgtaaaatggcgcctttaaaaaagatgtaagactttggttcccaactttgttaaaaaacaaaaaaagtgatggaaaggtgtttgaaaggatgctatcaggcgacgtgacatctttctaaccagacaggccattgctttcaccgattccaacccagccctggactgaggatggatggttccatgagcccccagatgaaaacctggattcgacagggaagagcttggatccccggctgccccgggcatgagtgtggctggcgcatgggcactgggctcgccttgcacgcccaccaggagggccaggggcatacgcagtcctgacgtggactttgtgtcttggagtaccctctccacgtgcccgtccccctcgtcatcagaggtaaaggcatgagaaaatcgcgctgtgaaacgttttttaccttttattattattttttggacagatgcttttgtcaccaagacatgaaaagctgccattcttcttaacctgttttttaagaatgtctttttactgtgtgtcacacttagatcaaggagttttcagaggttccttattttattaattatttgtgctgcttttgacaggtagcagagggttttaatacttcactaacagtacaccctcctcccccttgggctagcatccccagcccttaatccacgtcggagccggcaggtgcttctcacaccaggagcctctgggggcaggggctggctcctcgccgctgtacaggacgtttactgctgcttggggccagggcagtcctttgaaagggaagcaagttccggaatttgttccctcatggaactataacaccttagagcaagaggcaggaattccagggcctcctgcccctccccttcctccagcttgtcaagttaaaccactaatgtgttggtgggcctggccgtgctgcctctcctgagtagggtgggtgcaagtagggcctctttcccagctttcttgcttgccttctgtgcaatatttcttggagaatttggatgcctaaggcataaaggaaaaaaacagagttcatagtttgagctggtatttaccccctgggtttaaaaatcagattaacttcttggtctcccggaggctgctgtcaggaattctccagtacgggaagatgcagtcacttatgacgaaataagtcacccctgaacgcctccgcaggcagattcatggagaccagtcccagtagcaaccgccccttccccaagcatagaatacagaggtgccatacttggtgtaagccttccttctgtccactgtccagaatgtcctttttcacacggaggaagagatggcgggaaaacactgactgactccttgggtttcccccagacatactttcagagcgctagctgtgtggtgcacgggacttttacagttaggattcatgtttaaggtggtggcgcttgaggcctgcaagggccacgttggattactgaagcggaaagcggtctcccatgtataagaaaaagttttacaacacgaattggaagctgcttgagtccacctgaacttgaattgattgcaaagccatctgccgggaacggttttgggttcctgagccatcagccagcctttctttcccctctgatgcacgttcctcccggcctagtccgtggaggcccatcacaccagcatccgtgacgccagcttcccactaggacatccaggcaggtcgggcggggacgccacacgcctcagggccgtccgctgcattgccatagaggagccctccctccagtggtcacttcccaccattgcaggcagacttcccaccattgcaggcagctgggcccacttcatatcacacaaaatgaattttctataaagggaaaaaagtttgctcctccatagattttttagctgccttcgggtcaaatagtttccctggttgacgctcttgggccactctgattggcagcctgctttgccaaagagaactgtgtgaggttttggtggttagtaagagaagggggagatggccagcctgaagtcacggtcctggcccagcacaggtgggcagcagcgagctggcaggtgaagtgtgagcagcacgcaaagtgtcacgtgggccttagccgtcacccaccagcttcctcaccaggcaaggaggccccggagccttagcagggacttgcccgacggcacagctgattggtgctcgactcccagcatgcatattttggttgtaaaaacccaggtttgtaattcacatccacaaccctaagccttttaaagcggaggcaaacgttaacgaaccccatcgtgggtccatgggagccttttcaaaatgggtgccctgggaggggccttgacagtgggttccttccatggcggatactcccttgaaatttcacattccatcaaagtttaaagcatttacttcagaataagttatttatgtgtatatgttcaataaatatagtttttaatttatatctgtacatattagacacacgtgagccatcttgccagaattctgacagtgatgtcattttattcccctcccaaaacatgccccaggaacaagcaccccttgcctctgtggcagctgcgagtgtgtctgatttcataacgaagccaggctgagggcaagaggcccgacaggcaggccagggtccccggagaagccagatttcttcgcaatgtcactggtacttagcagatggtcgtgttcacaggggctagccacctgtactacggtgccgaccgcaatgcgaggaatgtggtggccacgcgatggagctggccggaggacaggtcaggtgagggggccgacccctgcggggctcagggctccttccagtctaaccttgagccacagtgtcactccttcagggctctgccccctggctctattttgttaaaggtgtcatcaagccttcaaccctccaatttataatatttttataatgttaaagcccactgacccaactttttccatagaaacaactatcagatttgagggctcccctttgtccccctgaccctgggcacaggcatgggccatggctcccctcttccccagaatctgcggggaactggggcaaggcagtgctcgtctgcaaggctggtagctctctccctcggcttccagagtccacggcagttgcaaggtaaccagtgtggatctgctgagtcaccccaggcaccagacttaccccaggagcatgggccactgtccatggggccttccttgagaccttcccttggggcatggcgggcggcggcttaccagctgggtcagtcccatctcgcccctctgtgcctatgccctggcgttgccaggcttaaccttcccctggatcttactcatcccagaattattactggccatttctaaatagacaaaaacttaccctaaaaatgtgggagatttactcctttttgaaaagtctgttttcaaaaagtgtgggcctcagctctgggaggccacccccagggaaggaattttgaggtttcattgttcattatggccacagtttggtgcttgtgcacgggactcaaagggcagcgtcgaagctgggggttaggtgtagggttgtgagcaaagctcccctgtttgtggccacaccttccctttccaaaaaggctattaattctactcacccactatttcgggggatgtaaatytygcccacagactttsccacccaggtgaggtgctgtgttcatgcacggaactgatgtcattagacaccatccaaggatggggcagcctgcagtgtgggccggcgactgccattccagagaaaaggcaccttgtgccacagggcgggggccnacaccctgagctcacaggttggcccctgcatttcaggttggatgttccttccttgaaacagcctcttctgggaacacagcactggaggtctccagggcatcagggttggcccggcagggtgccctgcagcttacataaaggtcggggcaatgtttcaatgttaaactaaactattggccttcctcttacttttcctaaaaatgattttcttaatggggaacagttcacttcaagtttcatggacatagtttgaaggaggataattcattttttcctggttgtcactgtcttcttatccccttggtgggctgggttcatactgtgaaataaactaaaatgaaaccaaaacgttcctgccgtaaatacggtggcacagcactgcaggaaaaagcagtcacctctattcgtgagtccccaagccatagcagggcgtctgtaaaagaagggaaactgcacccagggaagtggtgggcgtcagacgcatcctttcgcccgtagttcatgaaatagttccggctttggtcttccagaaaatctcaacttcaccgtgcacaagtgttaccgggtctttttagtgtagccatgggaagatactttcaaaaggacatcttcagatcataagtctttagggacccaaaggtgttttttaatgaggataatcttttttgattttcctaacaagaagggaaatattcactttacattttaacatcaacttttaagtgatattcagaattaattgaccatggtgaatacgttgtaaaatgttttcatattaagaatgtaattatttcccttattgtattttttaaaagctaaagtcatatttaaaattctctttgaaagaaacaggcaaagaaacagcaaagatttttttaaattaaatatgttagtagtgcccacttcaaatgactgtaaatatattttcactgtttctcaatgtatttaattcataaagtaaaaattttatgaaaagaaacttgcaaggaaaatcctacgttttcagtccactcgccccactttgtagtagcttcactgaatttcctgctttcctggtttgaattttctactgtttcacgtggtgtaacccctagactggcgcccttggcgtgcccctttgtgtatgaataaacttctctcccccaaaaaaaaaa

SEQ ID NO: 111073 - DNA, 409 bp, Homo sapiens
ttgtggctggggccaactatgtctcatgagtgcccgggttttaaaacagtagcgaggaactccggcaagagtatcgacaataagagcatcgccaacgccacgaccaccctggtggccagatgcatgaaggtggaccacctcaagctgcactcatatgacacctccatccgtaaggctgtcctggcatccatggacaatgagaatatgcacactccggacatcgggggccagggcacaacatatgaagccatccaggacgccatccgccacatccgcgtcatcaacggccgggccgtggaggcctaggctggccataggaccttcttggtttgctccttggattccccttcccactccagcaccccagacagcgtggtacgcagatcccagaataaagcacccatgtatt

SEQ ID NO: 111074 - DNA, 541 bp, Homo sapiens
tacggtccgtttgctttgatcctatcgagcggccgctcctttagccgcagctccaacctcacccagcatcagttcctgcacacgggcgagcggcccttccgctgcgtggactgtggcaagggtttcgccaagggcgccgtgctgctcagccaccggtgcattcacacgggcgagaagcccttcgtgtgcacgcagtgtggccgcgccttccgtgagcgccctgccctcttgcaccaccagaggatccacaccacagagaagaccaatgccgcagcaccagactgcaccccggggccaggtttccttcagggacatcatcggaaggtgcgccggggagggaagccaagcccagtcctgaagccagcgaaggtctgaggtcacaggtcgcagcccaaccctttcttggccttctgtgaatcccttccacagctaaagggtccgagtgctcttcagatccacgatggggaaaagctctgtgcctgagagtcagggacgagggagaccctttggctgtggttccatttgcaggtggggacaggat

SEQ ID NO: 111075 - DNA, 474 bp, Homo sapiens
  misc_feature (1)...(474): n = a,t,c or g
aatccacggctgtaagtttattcaatgcaaaagaatcctctccaattttactgaggtggctgaccacgtacacgaccaaatccgcctctaaactggaattcggttgctgacccagccccagcctcggctttcttgtcggcaccaggtggcacagcactccgtctgtaggtatctctgtcagcttcccctcttgtgagactcgcaggtcgctcaccctccagacctttaggccgaggcctgccagtctctggacggctacggcgtatggtggcaggcacaatctccggcggcagatgaaggtaatcacggagatactgcataccctcattggtaagggaccagtagaaactgttccttcacgacgcctcgggacttgagagactgcatggccttcatgacatgaaggttgggcacattctttgctgccagctcccggatgcttaagcatgtgnacattcttcttggccaccatga

SEQ ID NO: 111076 - DNA, 402 bp, Homo sapiens
cggcatgacattgactgtcagtggattgtcatcacggatgtgaacccaggaaactacattctccaggttgtcatcaacccaaactctgaagtatcagagagtatctttagcagcaatgcaatgaaatgtaagtgcgaatatgatggccatagaatctgggtgcgcagctgccacattggtgatgccttcagtgaagaggccgacaggaggtttgaacgctacccgtggacagagcagcaaacacgatgatgtaagtgacagtgccctctgcaaacccactctggcccctaatggcaggggtgtgaggctgccattgcctcaggagcttaccaagaaacgcatgtcagcaacggcactcatcagcccatgcgctatgtatgtggatctgtcaagcagtgtatt

SEQ ID NO: 111077 - DNA, 395 bp, Homo sapiens
  misc_feature (1)...(395): n = a,t,c or g
ttcgccttcgtgcacatccaggcatagtaccttcccttgaacttatttgtgacccagattcctttgctcacgctgtcttgctgaccttctccccactatcaccttgctgtcctgccgcattcctcttgctgagatagtgaaaatagtaattaatgaatactgaggaaactcatagactggtgccggagcaggnnnnnnnnnnnnnnnnnnnnnnnnnnnnnnnnnnnnnnnnnnnnnnnnnnnnnnnnnnnnnnnnnnnnnnnnnnnnnnnnnnnnnnnnnnnnnnnnnnnnnnnnnnnnnnnnnnnnnnnnnnnnncggcccccttcaaaggacgatcgtttttacttgtcaatcctctctgcgaccccacctggaacaccagccctttttatg

SEQ ID NO: 111078 - DNA, 535 bp, Homo sapiens
ctgagtagctgggactacaggcgcccgccaccatgcccagctaattttttgtattttttagtggagatggggtttcaccgtgttagccaggatagtctcgatctcctgacctcgtgatccgcccgcctcagccttccaaagtgctgggattacaggcgtgagccaccgtgcccggccaaacttaataaaatcttgtagacattatttattcaattttaatgtctgactatagggtaagatttttatagactctttttaagcttttataatttttgttaaagagcgggttagtgctttaagaaaaatctattgtgcttttaacatccagttcacagaaaaactgcatgatacccctttagctttagccaatatgtttacacacagaatttcctttacaattaacattttaaaacttgcttaaacctttaaaacaaaatatattttttaaccttttaatgtaggtaaaaatccatattatgtctccttataatcctgttattaaaagtattattttatttttctgaaaaaaaaaaaa

SEQ ID NO: 111079 - DNA, 437 bp, Homo sapiens
ttctgatggcgtccactatcatcatgtggaggaggatgaagggctagatgacttggagaatgccgaagaggaagtccaggagaatgtcgagatcctcccctctggggagcgaccgcagtgccaaccagaagcgaatcgccacaccatacatgcccaagtacgagcgagtccgcgtgctgggcacccgagcgctccagattgcgatgtgtgcccctgtgatggtggagctggagggggagacagatcctctgctcattgccatgaaggaactcaagaggcggcggctcagagaggagtgactcgcctgaagccccgtgaacaatgcatggtggacggaagtacatgcaatgccagagccaggctggtgcatagtgctggtggtggggactggtcaagtcggccgctgtataggatccaagaatacgtacgcgggcggt

SEQ ID NO: 111080 - DNA, 387 bp, Homo sapiens
aggggcaacagaagaagccctttgaggagcactggaggaagcaccccctgtcctatgtggacgttggcactgggaagacccgtaatcgacaaaactttgaacgaggctgactgtgccaccgtccccccagccattcgctcctactgatgagacaagatgcggtgatgacagaatcaacttttgtaattatgtataatagctcatgcatgtgtccatgtcataactgtcttcatacgcttctgcactccggggaagaaggagtacattgaagggagattggcacccaggctgggagcttgccaggaacccagtggccagggagcgtgcgcacttacctttgtcccttgcttcattattgtgagatgataaaactgggcacagtgtatt

SEQ ID NO: 111081 - DNA, 762 bp, Homo sapiens
cagaccttatgctacagtgcaagatgcctactgaggaaaaaccttatgcctgtaactggtgtgaaaaattgttcagctgtaagtccagcctcattatccatcagagaattcacacaggggaaaagccctatggatgcaatgaatgtggaaaaacctttcgctgtaagtcattcctcactttacatgagagaactcacacaggggataaaccctacaaatgtattgaatgtggaaaaacttttcactgtaaatcaacttctcactttacatcacagaactcactcaggggaaaagccctatcagtgtagtgaatgtggaaaaacctttagtcagaagtcatacctcacaatacatcatagaactcacacctggcaaaagccctatgcatgtgaccattgtgaaaaagcatttagccataagtcaaagcttactgtccatcagagaacacacacaggggaaaagccctatgaatataatgagtgtagaaaaccctttatcaataagtcaaacctcaggatacatcagagaactcacattagggaaaaaccctatgaatgcaatgaatgtgggaaaacgtttcaccaaaagtcgttcctcactgtccatcaaaggactcacaggcggaaaaaaccctacgaatgcaatgaactggggaaaacctttcactgtaagtcattcctcactgtccatcagaaaactcatactggggaaaaaccatatgcatgtaacaaatgtggaaaaacatatagccacaagtcataa

SEQ ID NO: 111082 - DNA, 2169 bp, Homo sapiens
  misc_feature (1)...(2169): n = a,t,c or g
ccctagttaatgttccttttttattttttgagtcttgccctgtcactcagggtggagtgcggtgttacgatctcagctcactgcaacttccgcctcccgggtttaagcgattttcctgggtagctgggattacaggtgtgtccccccacacctagcacatgggcatatttgtaatagagacaaggttttgctatgttggccaggctggtctcgaactcctggcttcaagtgatccacccccctcggcctcccaaagtgctgggattacaggcatgagccactgtgcctggcccctttatttgataatttacacatacatttttgtccaaaactcttctttatttcaagatgatgtttctgtggctatgtgtggtatgtggtataaatctcaatctatggtcacacgaggggcattttccttgttgtaagtgtagtctaaaccagtaggaaggaggtttaattgccaaaaccggcgagaactcgggcactgtcggatactacagtgggcagctgaacggaggaccaaggagaatgtctaagaggcctccagcccctgcgctcagtggaagacaggacaggaacaacagagcatacattaccttggaaggggtgtgttctgatatactcgatgggaaagttctgacaggttttctccctgggaaattgcagcacataccccccaaaaaatggctctgcccagtgtgccccaatccccagatggtgcttgctttgtgtgcacccaacacccaaaaccccttgcccctccccatatgctcttctgtgtgcccccaggtaggcacctgccctcaggcagcaggcttctgaacacattcctcttggcgcagacaaaaagaaagtacttcgtctgtggaattcgaggctgagcctgagttctagcacaagaagaccgttgcagtccagagatgagaatctggaccagaggcaaatcatgaacagaacgggagtcaagagaaggggtttcttaagatggagaagtgggggcgggtgtggatccagtgggaatgtggcttccccaggttgcaaccccaaggaagtctctggaagcagcaccagtcctgatgggggagcagaagagctgccatcctcagtcagggtccgagtcagggtccgaggagagctgctgctccatagtctcgcacatggcatcctgcagggacgtaagatgaccccggggactcatccccattggctggatgactctgttcctgggagagcttttcaaacatggttcaccagttttcatggcctcgtgctccttctgctcctctgtcatgccctccatagggttaggcggcttctcctccaccctcccggtcacagggtttatgctggctttggcttccttgtactcatctgtgtctgtgtcctcatcctctgagtactggcccttgggccggcctcctgccatgaggcccctggcagccagaaggccagcagcattcccatagcctgtgtacttgatgaatcggggcacacctctcagagtctcattacaaacaagaactcggcagccaccctcttcacatctgtgtccaggtgtgtcatgaggcggacaagcttgttccgcagcatctccccaacctcaggccgtgtcctcacatcccgcagagggggcagcacctgggccttcaggaacttcctggctgggcggtgcatccgggcacattcagtcagcacgctcaagcacgggagctacactctccttcagcctgtgtgtcttgtgcaaacgcttctctaggaagatgaggagggcacgaattacatccatattcactcccatgaactccgtggagtctccatgtggctccagggtgaggagaacattccagacacttgaggggcaagttccccaggagggtttnctgcgtgaccgtggaactcctctgtgcggtctccagcagtagcgatcatcacacagtgccggagaagggtccccaggtgtcggtaaagggcagcgtcttcctcgtccacctcccccttgatgagagtcctagggtgatgttgaagagctcttttaggctctccatggcccgctcagtctcttgggaaggaaggagcgtgggtggggggttcccttcaggagtcacccccagcgtcagctccagtgtgtcagttagcaggcgcactcctttcagctcctgaaacagc

SEQ ID NO: 111083 - DNA, 1795 bp, Homo sapiens
atgggcagcgtcagtagcctcatctccggccacagcttccacagcaagcactgccgggcttcgcagtacaagctgcgcaagtcctcccacctcaagaagctcaaccggtattccgacgggctgctgaggtttggcttctcccaggactccggtcacggcaagtccagctccaaaatgggcaagagcgaagacttcttctacatcaaggtcagccagaaagcccggggctcccatcacccagattacacggcactgtccagcggggatttagggggccaggctggggtggactttgacccgtccacaccccccaaggctcatgcccttctccaatcagctagaaatgggctccgagaagggtgcagtgaggcccacagccttcaagcctgtgctgccacggtcaggagccatcctgcactcctccccggagagtgccagccaccagctgcaccccgcccctccagacaagcccaaggagcaggagctgaagcctggcctgtgctctggggcgctgtcaaacttcggccggtactccaatgtccagcctgcccacacacagcccccagcagaagttaccaagttgggacccgctggtcacacccgtgggacccacaacgctgttttgggggctccgcccacaacatcacacagggcatcgtcctccaggacagcaacatgatgagcctgaaggctctgtccttctccgacggaggtagcaagctgggccactcgaacaaggcagacaagggcccctcgtgtgtccgctcccccatctccacggacgagtgcagcatccaggagctggagcagaagctgttggagagggagggcgccctccagaagctgcagcgcagctttgaggagaaggagcttgcctccagcctggcctacgaggagcggccgcggcgctgcagggacgagctggagggcccggagcccaaaggcggcaacaagctcaagcaggcctcgcagaagagccagcgcgcgcagcaggtcctgcacctgcaggtactgcagcttcagcaggagaagcggcagctccggcaggagctcgagagcctcatgaaggagcaggacctgctggagaccaagctcaggtcctacgagagggagaagaccagcttcggccccgcgctggaggagacccagtgggaggtgtgccagaagtcaggcgagatctccctcctgaagcagcagctgaaggagtcccagacggaggtgaacgccaaggctagcgagatcctgggtctcaaggcacagctgaaggacacgcggggcaagctggagggcctggagctgaggacccaggacctggagggcgccctgcgcaccaagggcctggagctggaggtctgtgagaatgagctgcagcgcaagaagaacgaggcggagctgctgcgggagaaggtgaacctgctggagcaggagctgcaggagctgcgggcccaggccgccctggcccgcgacatggggccgcccaccttccccgaggacgtccctgccctgcagcgggagctggagcggctgcgggccgagctgcgggaggagcggcaaggccatgaccagatgtcctcgggcttccagcatgagcggctcgtgtggaaggaggagaaggagaaggtgattcagtaccagaaacagctgcagcatagctaacgtggccatgtaccagcggaaccagcgcctggagaaggccctgcagcagctggcacgtggggacagcgccggggagcccttggaggttgacctggaaggggctgacatcccctacgaggacatcatagccactgagatc

SEQ ID NO: 111084 - DNA, 414 bp, Homo sapiens
  misc_feature (1)...(414): n = a,t,c or g
aagcttctgagcacttcccaattccgggtgacttcaggcgctgggagccctgtgcatcagctgctgctgtctgtagctgagttccttcacccctctgctgtcctcagctccttcgcccctgggcctcaggaaatcaatgtcatgctgacatcactctagatctaaaagttgggttcttggaccaggcgtggtggctcacacctgtaatcccagcactttgggaggccgaggcgggtggatcacaaggtcaggagatcaagacgattctggctaacacggtgaaaccccgtctctactaaaaatacaaaaaaattagccgggtgtngtggcaggtgctgtagccccagctacttggggaggctgangcaggagaatggcttgaacctgggaggtggagctngcagtgaagccaag

SEQ ID NO: 111085 - DNA, 424 bp, Homo sapiens
  misc_feature (1)...(424): n = a,t,c or g
acttggccatcgagcagcaatgttctgagagccacccagtacaaagagagccacanccgaactcagcagcaggtagaagcagaggttaccaacatcaagaagacactcaaagccaccgcatcctcctcggctcaggagatggaccagcagctggctgaacgggagtgtccccctcacgctgagcagaggcagccctccaagaagatgtccaaagtgaaaggtttggtctccagccgccactagggccggctggggcagctggcactccccaggcctgggtcaggtggggaggggacaccaagggcccatttcctcccctctctacctccagtgagttccagccttgctagtcccctcaccagcgcctccccaccttgttggtgctgttccagaaaaactgttactccccctcaccccctgtatt

SEQ ID NO: 111086 - DNA, 1110 bp, Homo sapiens
tacgccttctatcatcactgccagagcctcatgaagcctgcttggtcagatgcagctcatggggatgaagtaccctatgtttttggggttcctatggtaggccccactgaccttttcccctgcaacttctccaagaatgatgttatgctcagtgctgtcgtcatgacctattggaccaactttgccaagactggggatcccaacaagccggtcccccaggacaccaagttcattcacaccaaggccaaccgctttgaggaagtggcctggtccaaatacaatccccgagaccagctctaccttcacatcgggctgaaaccaagggtccgagatcattaccgggccactaaggtggccttttggaaacatctggtgccccacctatacaacctgcatgacatgttccactatacgtccaccaccaccaaagtgccgcctccggataccacccacagctcccacatcacccgcaggcccaatggcaagacctggagcaccaagcggccagccatctcacctgcctacagcaacgagaatgcccaggggtcctggaacggggaccaggatgcagggccactcctggtggagaaccctcgtgactactccactgaattaagtgtcaccatcgccgtgggggcctccctcctgttccttaacgttctggccttcgctgccctctactaccgtaaggacaaacggcgccaggagcccctggcggcagcctagccctcagcggggagccggggccccggagttgggagctgctccagaggaggagctggcagcattacaactgggccccacccaccacgagtgtgaggccggtcccccccatgacacgctgcgcctcactgcattgcccgactacaccctgaccctgcggcgctccccggaagacatcccactcatgacccccaacaccatcactatgatccccaactccctggtagggctggagacattgcacccctataacaccttttgcggaggggtcaacagtaccggggtggcccaatcaaacctccattaaccgggtataggttccaactcaaaacacaggccattttccaggttccttcccttcccaaatccgggaacacttgggcccca

SEQ ID NO: 111087 - DNA, 1473 bp, Homo sapiens
aatgtatatgaaaaaataaatggagtttggattgtatccagtgatccagggcaatttaggaacccttttttataccaaattgtagaatgtgtgtggcatgcaaatatgaatgatagttttaatgtcaggatacccatatctgcaaattcgttcaataaagattagagattcaaaatttggtttagctcttgtcatagaaaggctctcagcagagtggtggatatgttcttggctttaacatagatcttgtggaaaaactacaagaatcagttaaggaaatcaattcacttcacaaagtctattctgccagtcccatatttggagttgattatgagatggaagaaaagccccagccgctcgaagctctgacagtcgaacaaattcaagatgatgtagaaatagactctgatggtcacacggatgcttttgtggcttattttgctgatggcaataagcaacaagatcgtgaacctgtattttcagaagaactggggcttgcaatagagaaattgaaggatggattcaccctacagggactttgggaagtaatgagttgattgaccttgagttgagatggatttctattaaagatatctctagtttaaagatactagtcacctgccataagtcatggaatagtttttatatttacagcttttatatttaaaacttgtaagagtttttttaatgattgaggaaaaagtcatttagaaaacttcagttttcggccagcgcgtcgagggaggggccagcgacacatgggcctagtaaccgtccggccgcggcgctggcttaagccaatggctgatggtagccggattcctcaggcccgggcgcttcctacagcagtgcctgcacgcccggctgcaaattcgcccagccgatggggacgtcgcggcccaagtgggtggaggtccaaagaggactgggtgatctacgtgtgctttttcaagggagctgataaagaacttcttcccaaaatggttaatacactgttaaatgtgaaattaagtgagacagaaaatggcaagcatgtctctatattggatctacctggcaacattcttattatccctcaagctacccttggaggaagactaaaaggaagaaacatgcaatatcactctttttttggaaaagattatgggtttgaactttactctcaatttgtgactctatgtgaaaaagaagtagctgctaatagcaagtgtgctgaagctagggttgtagtggaacatggcacttatgggaacaggcaggtgttaaagctggacaccaacggaccattcacacacttaattgagttttgaaaatgaaaaactagtttctatagctggtttctggtatgaaatgatctaaagtataattagattttcttccccttaatcttgaatatactaatcttcagcatttttagacaggaaaatcttgggtttcatatataactctgcacctgctaattggatgactttg

SEQ ID NO: 111088 - DNA, 400 bp, Homo sapiens
tggcgctgaggtctggggactcaagaggatttctactcgtctgcgagcccctgcatgtgccatgactgatcagccccaggacgactttgacaggagcgtggaggatgcccaggcatggatgaaggctgtgctggaccagctgcaggtgaatgacaacacgcacggaccccgcgcggccctggaggccatgctgtgggagaccgacaaaatatgccatctggagccctaggggcgtgtgagggtggacctcgtgctaccgatggctgaagccctcttggcatgctgccctggggaccacaagcccgggatctctggcccggctgaaggacatcaaggtccaatgggaggagacagtcacctacatgactcacttgcacagccgcatcgagtgggtgtggct

SEQ ID NO: 111089 - DNA, 435 bp, Homo sapiens
  misc_feature (1)...(435): n = a,t,c or g
gagcgaggattaccttaggnngtatnctctagagcggccgcaatacagccagctatacttaaaagacatattcagaacattccacccagcaagagcagaatacacattcttctctaaagcacatgaggtattcaccagactgtatgccacaattcaagtttcataatattttacaagatagatatcatacaaagtatcttctcggaccacacagatgaagttataaattaataacagaaggaaaactggaaaagtcacaaatatctgaaagttaaacaacactcttaacaactgggtcaaagaggnnnnnnnnnnnnnnnnnnnnnnnnnnnnnnnnnnnnnnnnnnnnnnnnnnnnnnnnnnnnnnnnnnnnnnnnnnnnnnnnnnnnnnnnnnnnnnnnnnnnnnnnnnnnnnnnnnnnnnnnnnnnntatcg

SEQ ID NO: 111090 - DNA, 415 bp, Homo sapiens
  misc_feature (1)...(415): n = a,t,c or g
ctcttgggcaaggggaaatggaggtcccggttccccaaaaagaagccaggaagtaccaaagccgggtctgcctgggcaataagacccgacccccctcattatggccttgtggggttggtgccatgcgccccaccagttcctccggttaagaaaagggaagtcagatcctcttcaaagccccaccccctgggacagggaaaagaaaggccgccattggtggaccccccctgggcctggcctttgggcaaaaaaatttcttccccccaaattttggcaggnnnnnnnnnnnnannnnnnnnnnnnnnnnnnnnnnnnnnnnnnnnnnnnnnnnnnnnnnnnnnnnnnnnnnnnnnnnnnnnnnnnnnnnnnnnnnnnnnnnnnnnnnnnnnnnnnnnnnnnnnnnnnnnnnnnnnnn

SEQ ID NO: 111091 - DNA, 406 bp, Homo sapiens
  misc_feature (1)...(406): n = a,t,c or g
aatacattgtgcatggatgtgtgtgtgtgcctgtacacaatgttgaaggagataacctgtgatgtgtgtgcgcgtgcatgtgcatgtgtgtatgagtgcatggatgtgtgtatgtgcctgtacacaatgttgaaggacgtaacctgtgatgtgtgtatgnnnnnnnnnnnnnnnnnnnnnnnnnnnnnnnnnncatggatgtgtgtgtgcatgtacacaatgttgaaggaggtaacctgtgatgtgtgnnnnnnnnnnnnnnnnnnnnnnnnnnnnnnnnnnnnnnnnnnnncgcctgtgtgtgtgtgttgtggcgggcagtggggggttataagcccagaccctccaggtaacaaccacagcgtcagcctcagtttgctgagtggtactcagcacaggcactgtg

SEQ ID NO: 111092 - DNA, 359 bp, Homo sapiens
cctcagcctatagacctcccggaccgatgctgctccagccagctgacgaaaaaggcgagcggaagggcgggcaccgagctctctcggcccctgcaaggcccggtggaggagcccggctggagggcagcaggactctccacagactggcagccgccgccgcctcccggcagagtaacctatcaccgagcgaggcccgcggctgggaagggaaggagggcggtgtcggcaggagccaggggtgtcctctggcttcccaaagctagggccgttccctccttccgcactcggttcccagacctggggaagagaagctgagggtggcggagccggaaccgcagacgtatctgggacctctcacg

SEQ ID NO: 111093 - DNA, 386 bp, Homo sapiens
  misc_feature (1)...(386): n = a,t,c or g
natgggagaaatgttcatggggttcacttgccaaaccccacctcctggcttttggctgtgccctgttcacggcctatcttggagtcggcatggcaacctttatggctgaggaaacgtgtaaaagaagaattgtggggaaaaaaaagcaagcataaccaaagatcatcagcagtgaagaatctaggctgtggctgagagaaccagaggcctctaaaatggacgtgagtcgatcttcagaacagggatctaccatgcaggagcttcttgtgctcacacaaatctgtaaatgggaacattgtacattgtcgaatttaaatgatattaattttctcaagctatttttgttactataatcataaaattgaatatttgcagggagcatgtat

SEQ ID NO: 111094 - DNA, 702 bp, Homo sapiens
atgttcaaattagtgggcaaagaaacatttctatgttggagctgcaaagacaaaagcgaccataaatatagacgctatcagtggttttgcttatgaatatactctggaaattaatgggaaaagtctcaagaagtatatggaggacagatcaaaaaccaccaatacttgggtattacacatggatggtgagaactttagaattgttttggaaaaagatgctatggacgtatggtgcaatggtaaagaattggagacagcgggtgagtttgtagatgatgggactgaaactcacttcagtatcgggaaccatgactgttacataaaggctgtcagtagtgggaagcggaaagaagggattattcatactctcattgtggataatagagaaatcccagagattgcaagttaatgaattttcatcttaagaagtaaagatcaggactttttaattactgtggtaattaaatgtgttcagtatgtacttatcagtacatttagtctgcaatgttttaattttttaaaaagttacatgaaactaacattccaagggtcaggaaaaaaaccaattatgtatagtcataaaaattacaatttatgatgcaaataatgtaaaatgttttaaagacaaatggcaaataagatatggaccaaagtcactaatgttttacaacagtaacctttactataataaatacttttaaa

SEQ ID NO: 111095 - DNA, 445 bp, Homo sapiens
  misc_feature (1)...(445): n = a,t,c or g
tgggtcntgagtcttatgcagtggtgggggtcccacctgacatcatgggcattggacctgcctatgccatcccagtagctttgcaaaaagcagggctgccagtgagtgacgtggacatcttcgagatcaatgaggccttgcaagccaggctgcctactgtgtggagaagctacgactcccccctgagaaggtgaaccccctggggggtgcagtggccttagggcacccactgggctgcactggggcacgacaggtcatcacgctgctcaatgagctgaagcgccgtgggaagagggcatacggagtggtgtccatgtgcatcgggactggaatgggagccgctgccgtctttgaataccctgggaactgagtgaggtcccaggctggaggcgctacgcagacagtcctgctgctctagcagcaaggcagtaacaccacatgtatt

SEQ ID NO: 111096 - DNA, 441 bp, Homo sapiens
ggaccctcagaaaagctgggtcagcatctggccaccgagcccttgggcaccaacagttgggagagagacaagacctgtcgggaactgggtgccaccagaggacacagtgcctctcatgacaaagacttgacaccaccaccttcctccaggggaaagaagaaaaagaagaaatccactcggaagaagagaaggaggtcctcatcctatagcccatcgcctgtcaagaaaaagaagaagaaaagttccaagaaacacaagcgacgcaggtcattctccaagaagagaaggcacagctcctctagcccaaaaagcaaaagaagagatgagaagaggcacaagaaacaatctcgaagccggccccgaaagtctcaccgccaccgccatcaccactaccctgtatgcggccgctctagaggatcgagcaacgtcgcagcattgctt

SEQ ID NO: 111097 - DNA, 1415 bp, Homo sapiens
cggacgcgtgggggtccgtaaagaatggggattacgtacagatgaaaattaggtattttcagctctagttgagggtacagggataggggacaatgcaactaggctgtggttggggcatccattccttgcagggatggtactcagcccttgtccctgagcttgctgcttcccccctaggtatgccggtgctttgtggtcagctggctgagcaatgagagcatccagaaggcgcatccaagaattggctttaactttcaaggagcattgtggacaaaagccatttgctctccagccagaaaacccccatggctcactttcttcttggcaggtggtgctatcaggtctctcacctgagctggctagaaaaaaaaactggtacagccttgcttgaaagccctctcagtgccactgtggaagatgccctccaaagcttccctaaaggctgaagaactacagccaggattttccaaagcaggaagggtatatatttccaagtgctacagagaactagggaaaaactctgaagctagatggtggatgaagttggccctggagctgccagatgtcacgaaggaggatttggctatccagaaggacctgggaagaacttggaagtcattttaccgagactaaccacgtttcactggccttcatgacttgatgccactatttaaggtgggggggcggggaggcttttttccttagacctttgcttgagattcaggaaaccacacaaatctgttctcctgggtctgactgctaccccactaccactccccattagttaatttattctaacctctaacctaatctagaattggggccagtactcatggcttcccgtttctgttgttcctctcccttgagtaatctccttaaaaaaatcaagattcaacaccctgccccccaggattacacatgggtagagccctgcaagaccctgagaccttcccaattgcctggtgagggtggatgaacttcaaagcctatagggaacaaaggcacataacttgtcactttaatctttttcactgactaataggactcagtacaaatagttctaaagatcatacctttacctaccaaaggtaaaaagagggatcagagtggcccacagacattgctttccttatcacctcatcatgtgaattctacctgtattcctgggctggaccacttgataacttccagtgtcctggcagcttttggaatgacagcagtggtatggggtttatgatgctataaaacattgtctgaaaaagttgcctagaatatattttgttacaaacttgaaataaaccgaaatttgatgttactctatgaatgagaaagaaatcctgctggggggggcggctataaggaatctttagggggcccaaatgttgcccgttttgccaatggaatttctctttcta

SEQ ID NO: 111098 - DNA, 411 bp, Homo sapiens
  misc_feature (1)...(411): n = a,t,c or g
cccaccagttaatttttcaatctttgccccactccctctctctagtagtcccagtgtctattgttgccatctttgtgtccatgagtacccaatgaaagactggatttaaaccggacgttagaccacatgaacctaacagacatttacagaacatttatccaacaacttcagagtacacattcttattagcacatggaacattctctagaataaatcatatgttaggccagaaaatgagtctcaacaaannnnnnnnnnnnnnnnnnnnnnnnnnnnnnnnnnnnnnnnnnnnnnnnnnnnnnnnnnnnnnnnnnnnnnnnnnnnnnnnnnnnnnnnnnnnnnnnnnnnnnnnnnnnnnnnnnnnnnnnnnnnnnnnnnnnnnnnnnnnnnnnnnnnnnnnnnnnntgtatt

SEQ ID NO: 111099 - DNA, 851 bp, Homo sapiens
gggaacgcttaatggggccgagggcgccagcaactccaagctctaccggaggtaagccccagccaggtggggcttgggcctgagagcgggtcgtcctggggaagaagggcttcctctaccggcgcaccagctctcgctctgccgcagacacagcttcatgagcacggagccgctgtcagctgaagccagtctgagctcggactcccagcgcctgggagagggcacgcgggacgaggagccctggggtcccatcggaagggaccccacgccctccatgctgggcctctgcggctccctggcctccattcccaagctgcaagtccctggcgaagcttcaaatccaacgaagtgcctggtgaagcgacagtcccgagggcagcccagcactgaagccccagcttgaggaacaagcatgggcagttgcagccccacctggccaggggccatggacacctgccacctttcttcaaacaagagtccccccaatcccaggctacccttcccagagaacgctacccaacccagccagggttctctcggggaagatcttcgtcttgctcacccttagctcttctgcccttggcagcacgggctgcggaagaaagcacgctgggccagggaggcaggggtgccctaagccacagggagcccctggggaagcctgctccattcttctggtgaccttggcgctccttcactcatctcccctgccccctcaggaactggtggcccagcttccacacccccacctcccagtctctagcctctccatctgtctgtgtatggcctggagtcactccttcctcagcccccagggcaagagagctcaaataaaaaccagagggtgtatt

SEQ ID NO: 111100 - DNA, 732 bp, Homo sapiens
ggcatctgtttttttgtttgttttgagatagagtctcactctgtcgccaggctggagtgcagtggcgtgatctcggctcactgcaatctttgcctcccgggttcaagcgattctcctgcctcagcctcccaagtagctgggactacaggcactggccaccacgcccggctaattttttgtatttttagtagagatggggtttcaccatattagccaggatggtctcaatttcctgcgcttgtgaatccgcccgcctcagcctccccaagtgctgggattccaggcgtgagagtgccggggagcacaggagaggttgggggcttctggggaacgggcgctgagggtctccagccaggagcaaagggccccttgctgctgctacagtctctttttaatgagtttctcgagcttgcggatgcgtgacgactcttgctctggtgttggcgccgtcagggacagtgagccggagctttctgcccccgagggcggtgcggggagccgctggcgcaggagttccagcatgctgctctgctcactcctcttcagccccttcatgtccagtatcttctgaaaggtttctgtgttgcagtctgtgaaaagtttgatgtagttgtcaacaaacaccaccaacggttcatgagggcccatcactaccttgaggatcatctcagcccgggttcatgcctttgacacacgatctatggtgtagctggccggtggcttcctcaccac

SEQ ID NO: 111101 - DNA, 372 bp, Homo sapiens
  misc_feature (1)...(372): n = a,t,c or g
ncttctacatggtccgcgttcatacagagtgaccgttgtccaatgtgttgctgttatctgcaactcctacctgtcatggaaggcacatcggctctaagcctgcctcactccctcgtttccaccttgcagtgatgcagcttgaccctggaacggtcagacaacctcctcaaagtgggcataccagtttccacggggttgggttgccggtcagagcttaagaggactagcaccctgcaatgcccctcttctctctaaaatgtactctgactgctttagagcccttgataatagtcttattcccaccacatactaggcactccataaatatctgttgaaccttcatgaccttatcaactttacacccattgtatt

SEQ ID NO: 111102 - DNA, 368 bp, Homo sapiens
  misc_feature (1)...(368): n = a,t,c or g
aannnnnnnnnnnnnnnnnnnnnnnnnnnnnnnnnnnnnnnnnnnnnnnnnnnnnagcaccacgtgaggcaagcagggaccccaaatccactgctaggggagatgccacagtgccctgccatggcaccactgctcgtgccaagcctgccccatcgacaccggccccacccaaggcaaaaccacgcacacccaaaccagaaacaacttatccccttagccagagagcacctccacacaagtctatcctgagtcctaaaagaggatggaaaaatctcaagtaaaaannnnnnnnnnnnnnnnnnnnnnnnnnnnnnnnnnnnnnnnnnnnnnnnnnnnnnnnnnnnnnnnnnnnnnnnnnnnnnnnnnnn

SEQ ID NO: 111103 - DNA, 1209 bp, Homo sapiens
aaactcagaagtgactgtgagtccccccaggaatgtgtccacaaaaacttttgccagctcccagagatcggttgtttgccaagaatcagaccttcctgatgagctgctttatggacgggcaggttatctgtatgccttactgtacctgaacacagagataggtcccaggcaccgtgtgtgagtcagctattaaagaggtagtcaatgctattattgaatcgggtaagactttgtcaagggaagaaagaaaaacggagcgctgcccgctgttgtaccagtggcaccggaagcagtacgttggagcagcccatggcatggctggaatttactatatgttaatgcagccggcagcaaaagtggaccaagaaaccttgacagaaatggtgaaacccagtattgattatgtgcgccataaaaaattccgatctgggaattacccatcatcattaagcaatgaaacagaccgggctggtgcactggtgccacggcgccccggggggtcatccacatgctcatgcaggcgtacaaggtctttaaggaggagaagtacttgaaagaggccatggagtgtagcgatgtgatttggcagcgaggtttgctgcggaagggctacgggatatgccatgggactgctggcaacggctattccttcctgtccctttaccgtctcacgcaggataagaagtacctctaccgagcttgcaacgtttgcagagtggtgtctagattacggaagcacacgggtgccgtattccttgacagaccctattcgctctttgaaggccatggctggcggctattcactttctctctgatgtcctgggaccagagacatcacggtttccagcatttgaacttgactcttccgaagagggattaaaaggtgcaaaaagacaactaaaatacccgtttggaccaaaagccgccagattgtttagtgcctgacacagaagcagctgggaatcctgaaagagaagcagacaccgtcacaggcccctctggttagactagcatgagtgtcggaagcacatccaacaacattttctaacagcaccctcatcaatataaaatatgacttcttcacatacagattctctgtagtgtttgcatgtttcttggtgtttgttgtctccaggtgtaagctgttttaaatggaaggcccttctattcctgaggggctcagagctgaccatgcatgaatgtatggca

SEQ ID NO: 111104 - DNA, 2460 bp, Homo sapiens
atggtggtgaatggcaggagaaatggaggcaagttgtctaatgaccatcagcagaatcaatcaaaattacagcacacggggaaggacaccctgaaggctggcaaaaatgcagtcgagaggaggtcgaacagatgtaatggtaactcgggatttgaaggacagagtcgctatgtaccatcctctggaatgtcccccaaggaactctgtggaaatgatgacctagcaaccagtttggttcttgatccctatttaggttttcaaacacaccaaatgaatactagcgcctttccttcgaggagctcgaggcatttttccaaatctgacagtttttctcacaacaaacctgtgagatttaggcctattaaaggaaggcagggagaactaaaggaagtaattgaacgttttaagaaagatgaacacttggagaaagccttcaaatgtttgacttcaggcgaatgggcacggcactattttctcaacaagaataaaatgcaggagaaattattcaaagaacatgtatttatttatttgcggatgtttgcaactgacagtggatttgaaatattgccatgtaatagatactcatcagaacaaaatggagccaaaatagttgcaacaaaagagtggaaacgaaatgacaaaatagaattactggtgggttgtattgccgaactttcagaaattgaggagaacatgctacttagacatggagaaaacgacttcagtgtcatgtactccacaaggaaaaactgtgctcaactctggctgggtcctgctgcgtttataaaccatgattgcagacctaattgtaagtttgtgtcaactggtcgagatacagcatgtgtgaaggctcttaagagacattgaacctggagaagaaatttcttgttattatggagatgggttctttggagaaaataatgagttctgcgagtgttacacttgcgaaagacggggcactggtgcttttaaatccagagtgggactgcctgcgcctgctcctgttatcaatagcaaatatggactcagagaaacagataaacgtttaaataggcttaaaaagttaggtgacagcagcaaaaattcagacagtcaatctgtccagctctaaacactgatgcagataccactcaggaaaaaaacattgcaagtaagtaagggagatttgataagcatatcttttaaaagtattttcacacaatttgctttataaagtggtgcttcagtagttttaaacttttaaatactcagagagactgggacttgtgagctttggctgcacttcaaggctctagacgtgatttgagtagaggcacagtctgtatcccatctctaacttcagtaccgtcctctagactatttttcttgaataccttgggtaactggatatgagttcttcatcatatgttcccaaggtcatccatatgttttaaacattttccaaggtgttaggagactgtggatggatgtcgctaagtcctgcaagaagacaaaaggactgagtagaattaaattagactctatacattccagtgcctagccagtttgttagaaaagatgatggacttggggaattcatagcttctggccttaaggcttccaccttttcattgcttgctgacctttttcaaaacgaactgactcagttcagcagaccaccagtaccagactcaggaattgtgatagagggagcattttgaacagtgccgtattgtggacatgctgtattgggctactccaggaaagtagggagttaaaggtgggaaagggaggaaaggaaggcaacctctgagattccagtggtgtgtgggggcaagatctgatggaaactgaagaagagaacgaagactaaacaaagagaaaggaaagagaagaaaccctaaatgggcaaaggaaagcacatcctgtttgcggagctttgaaatattggacccatttctaattgctcctgtttttctgggtaacaccagttttcgtgtagttgccactaaagcagtagactcttgagtctcacttgtctctgagagagacagaagttagaaagattttgacttggcgattccggaaagtaatgcctttgttggcacttaaaatgtccaagtgagacttcttggcaccttagaggccctctgagatactgatttattttaggttcttctccctactttacagatgttttcagcccaacactggggtgctctcttccactacagagaatccctgaagaaaagggaaggtgtttcccatgatgggtgaatgtcactgtccatgaattcctgaatctacctgctgctgggagtcagagtccaagcataacccgtgtagcactaaaagcagcgctgtgagccctattccagtctttttcgttaatgtcccagagtgaacaacaagagttagtcaatcattaactgttgactgttgattctcataataaatgcagcataacgaccaaaaaaaaaa

SEQ ID NO: 111105 - DNA, 610 bp, Homo sapiens
cagatggtgagtgaccgcggagctgggcagcacagatgcaggacgctgcctccatcgcagaaagttctcctggacgccactgttccagatcctgatggttcaagtgctacggatgcaatagctcagcgactggcagcgcagcacgtacctgctgtcgtgggaggtgagagccaccagtgcccgacagcggctgcaaggcagtggtggcgctctgcagccagccggcccacccctccaacatctgcaagggggtgggaggctgcctcaccaagctacctgctactcatgggggcgatgggcatcagggtggcctgcctggagccccgagagcacatagaagctgccagatgagggcagtgaggccgagggccggcagtagggctgcagatgccctgagccctaaggtcaaggtggatggaactgctgtgtaagtctgatgccgaggagaccaggtcgttgggctttcaggtgagtggacgctttctccccactcacaacccccaccatgcagtctctgctcctccatggtcactgtggaatggctcctgatggcgctcaaccccttgccctgttttctcccctgcggtccactgagccagccctgcggccg

SEQ ID NO: 111106 - DNA, 510 bp, Homo sapiens
  misc_feature (1)...(510): n = a,t,c or g
aatacacntnnntttgcgcttgtgcatctctgtgggtgtgtgcacattctattgtgtgggtgtgcacgtgtgcatatctgtggggggtgcgcattcaattgtgtgggtgtgcgtgtgtgctatctgtgggtgtgtgcgcattcgatcctgtgggtgtgcgtgtgtgcatatctgcgggggtgtgtacacgtgattgtgggggtgggtatatgggattgtgtgggnatgcncntgtgcctctccttggggggccatgtaactccactgtgttggtgcgcaagagtacactacctgccctgtgctgtatacagttcatggtacccccccatctagtctctttctgggccatggtggacccctttactgaagtgtatgggttcttctatgaaatactcttgtagttctgacccatcataactttctttatggtagctgttacaagtacctattttctctttgcatcgtgctatatatattctccaggacgttcatcataacgtatatactcct

SEQ ID NO: 111107 - DNA, 792 bp, Homo sapiens
  misc_feature (1)...(792): n = a,t,c or g
ttcttttataagagcgtcctggcccaaaaggaagttcgttgtgtcctggatgagtcagccctctcgggccccctgagctcaagnccgtgcgcatgtttgctgatcttcgccccacgagagtcggagggacagctccgtgcccgagctggccgagaagatgagcaggagcgtggacgtgcccacaccaccttccctgctcatggcggcctccatctatctccacgaccagaacccggatgccgccctgcgtgcgctgcaccagggggacagcctggagtgcacagccatgacaatgcaggatgcctactacatcttccaggagatggctgacaagtgctcgcccaccctgctgctgctcaatgggcaggcggcctgccacatggcccagggccgctgggaggccgctgagggcctgctgcaggaggcgctagacaaggatagtggctacccggagacgctggtcaacctcatcgtcctgtcccagcacctgggcaagccccctgaggtgacaaaccgatacctgtcccagctgaaggatgcccacaggtcccatcccttcatcaaggagtaccaggccaaggagaacgactttgacaggctggtgctacagtacgctcccagcgcctgaggctggcccagagctgtcaggaccatgaagccaggacagaggccaggagccagccctgcagccctccccacccggcatccacctgcatcccctctgggggcaggagcccacccccagcacccccatctgttaataaatatctcaactccagggtgttccacctg

SEQ ID NO: 111108 - DNA, 1238 bp, Homo sapiens
agctgaagcaagagaacacacagctggtgcacagggtgatgagctggaggagatggtgaaggatcaggagaccacggccgagcaggtctggaggaggaggcgcggcgccaccggaggcctacggaagctggagagggagaaggctaccgaggtggagctgctcaatgccagggtgcagcagttggaggaagaaaatacagagcttagaacaacagtgactcggctcaagtctcatacagagaaactggatgaggagcggccgcgcatgtctgaccgtctggaggacaccagcctgcggctcaaagatgagatggacctgtacaagcgcatgatggacaagctgcgacagaaccgccttgagttccagaaggagcgggaggcgacgcaggacttcatcgaggacttgccggaaggagctggaacacctgcagatgtacaagctggactgcgaccggccaggcaggggccgcagtgcctcctctggcctagggcgagtttcaattgccaggggcccgcgaggttggagcttcgagcacgaggttcaaagcggcttcaagcaggagaattataagctgcgggatcagaacgacgacttgaatgggcagattttgagcctcagcctctacgaaagcaaaaaaccctcttttgctgcccagactaaagcccagtcgtctggcctgcggagatagacaccgcctcgcgcgaatgagctaatggaagccctgaaggagcaggaggaggatcaacttccggctgaggcagtacatggacaagattatcctcgccatcctgggaccacaatccctccatcctcgaggatcaaaacactaaggcacgggcttggctgcagagcttttagggacccctggggacccaaagggcaagacccttgcccaaaggattgcaaggcctaagccgggcctcacacttcacactgttaaatgttctctcttggccaccatggcgttacgtgtacccgtgtatatgtgggggaggctgtgcacacgagcgaggggtgagttggccgtggctgttgggcagcattccacacggtttagccttgcattgcatttttttggcccctttgcaaagggcaggagggttattggaagtgggaagaaggcaagttttgtttttaaggatttattttaaaaacaggattggaagttctgttttccgtattgggtaaaatgattctacctctggggataaggattcacattcgctctagtacgatg

SEQ ID NO: 111109 - DNA, 408 bp, Homo sapiens
  misc_feature (1)...(408): n = a,t,c or g
gaaaagattgatcgccgttctggaaaaagctggaagatggccctaaattcttgaagtctggcgatgctgccattggtgatatggttcctggcaagcccatgtgtgttgagagcttctcagactatccacctttgggtcgctttgctgctcgtgatatgatacagacagttgcggtgggtgtcatcccagcagtggacaagaaggctgctggagctggcaagtcaccaagtctgcccacaaagctcagaaagctaaatgaatattatccctaatacctgccaccccactcttaatcagtggtggaagaacgggctcagaactgtttgcttcaattgtgcatttaagtgcactcgtagctgactggctattgatcgcactgcatcgtacaaccttcacacggaccggagn

SEQ ID NO: 111110 - DNA, 412 bp, Homo sapiens
tatgttttttttagggataagtaaggtcttacaagagcaaagaaatgaaattgagactcatatgtcctgtaatactgtcttgaaagcagatagaaaccaggagtattaccctaatagctggctttaagaaatctttgtaatatgaggattttattttggaaacaggcattgatgaagatgaccctactgctgatgataccagtgctgctgtaactgaagaaatgccaccccttgaaggagatgacgacacatctttgcatggaagaagtagactaatctctggctgagggatgacttacctgttcaacactctaccatacctctgatagtagatttgtccaggatagcgcgcttttctattagtaacattaaccacgcctctctggcgtgaacacattttttctagttggcg

SEQ ID NO: 111111 - DNA, 963 bp, Homo sapiens
  misc_feature (1)...(963): n = a,t,c or g
gtgtggcggaattcgaaagcgccgctgagacctcagccttgacctccctcagcgtggccgggacccaagagcctctgcgcagagccacccgccccgacgtacttaggcggcatagccctgagacctctggccagcgccaggcatggcagcgggggcggcagaggcctgggcctgagtcttctggctctgctgctccctggggacaggagggagcctgggggtgtgggtggggagccggccggccgtggacccagcgcctggctgctgcccgcaggagtgggacagtgcaatgaaggaagaagttgcagaggctgcagttccaggggtggaccttgctggaggagaagctgcagctggtgctggccccactgcacagcctggcctcgcaggcacttggagcatggggctcccgggaccccggcagcctcctggttgcactcctttccagcagctcggccgcatcgactccctgagcgagcagatttccttcctggaggagcagctggggtcctgctccttccaagaaagactcgtgactgcccagcgccccaggctggactgagcccgtcacgccgccctgcagcnccccatgcccctgccggaacatgctggggggtcccagaagccacctcgggggtgacttgaggcggaaggcccaggcagggccttccctccttcttccttcctccccttcctcgggaaggctccccagacccctggcatgggatgggctgggatcttctctgtgaatcccacccctggctacccccacccctggctaccccaacggcatccccaaggccaggtgggccctcagctgagggaaggtacggagctccctgctggagcctggggacccatgggcacaggccagggcagcccggaggctgggtggggccctcaagtgggggctgatgcctgcacccccagcacaataaaaatgaaacgttgaaaaaaaaaaaa

SEQ ID NO: 111112 - DNA, 397 bp, Homo sapiens
gcccttggtataaatgaatggcacaatacgggggtccagtatgatggcatcagatgcctgaacttgctggaccgctgtgatcaacccctgactttgttaaaagatatcagaagagtcttggagccaactacatgcaggggcatacttgcccttgtcctcccctttcattcctatgtggaaaacgcaagcggcaagtgggagaaaccatcacaaattttgtgaaatcaaaggacagaactgggaagaacaagtgaatagtctgcctgaaggtttcataaaagctggctttgatatcgaaactttcaccagactaccatacctgtgtgaaggagacatgtataatgactactacgttgtgtatgacgctgtgtttgttgtcaaagcagtataaacacat

SEQ ID NO: 111113 - DNA, 463 bp, Homo sapiens
  misc_feature (1)...(463): n = a,t,c or g
ctattccatagtccnggaactcggcgatcacggtctacatctcctaaaaatcaggaaagaagtccagatcccagtccagatctccacacaggtctcataaaaagtcaaagaaaaacaaacactgacgtaaatttttaagatgctgtcacttattggaaatgcgatttgttttgtgcctgaacggtctgttttttaaaaaaacaaaaaatcaaatgaaagagcattcctggggttttttgtttgtttgtgtatgcatgtgtaaactcatgagcaactgcatctgtagatctgtcattgttttatattgngtaaattactttcattgtggctatttctcaagatgaaatttttattgatctaatggatttcatcagaaatgtgtataatggatctgctgacagtagtagtatcttgttttaggatgttgcgactcaaccaaaataataccgatgtcttcccccct

SEQ ID NO: 111114 - DNA, 400 bp, Homo sapiens
cacgaggtagggtcgccgggaatcccccaagactatctcctaaaggcatcctcgggtgttcaaaaccaccctggatgccaatggccaggaggcatatgcatcgacctccaacagcggcccctcttacaattccattagctctgttgtatcccggtgagggcagcctctggcttgggcagggtctgtttggactgcagaaccaagggggtgatgtagcccatccttccctttggagatgctgagggtgtttcttcctgcacccacagccagggggatgccactcctccctccggcgtgacctgtttctctgccgctacctccctccccgtctcattccgttgtctgtggatggtcattgcagtataagagcagaccagttcttttacgttgtccgattgcc

SEQ ID NO: 111115 - DNA, 446 bp, Homo sapiens
cagcctaagttcaaacagaaatttgcacccacccatgcattcgccccaaaagcccataccaactcccgagcagacgtgcccacgctcacagaagcccacataggagcgctcacaccaacccacacgagagtgagcacacggattctcctgcacacacacaccttgttctttcaagctctcagctagggcagccggagggcaccgctcagccagcctgcactccctggcccttcctcgcctccacatgtgcaccactcagtctctctggctggcaggaagcccccagcacactccctgcccctcccagtatctgtgaggtcaggggccttcctaggctgccaatttagcctccagccaggcacactggggacaggtgggacctcctggagctgcctgcctcgtgccaagctgagcgtaatcatatcaaggtgttcaattgcgggccg

SEQ ID NO: 111116 - DNA, 2282 bp, Homo sapiens
  misc_feature (1)...(2282): n = a,t,c or g
ccgaaaccaatttcacaggcaattccaacttgaggttcttctacttatcgctcttcactagccaaggaccggggcaacttacaggtgtgcacttccaccattctggccattccccacccattttcctccccagaacgtcccagtgttcagagaccacggggtcaagttgtgagggcatcagcctgctggcttcagaacgcctcgtggctgttggttgctcctgctctcccctctccctcctccagggccacggatttcatgtccctgtgactggtggggcccatgggaggagacaggaagcctcaagttccagtgcagagatcctacttttttgagtcagctgacccccctccccgcaatggcctcaaaccttgaggagaaattgggaccccaccccttcatcaggaagttccaagtgctgcatgcgattatctaccccacgtccaacgcggcccgcctcaccctctcccgcacacctcttggctgttctttttgtacttttttgttccaaaagctgccttctgtctggtttatttaggttttatcccttccttttctttgagagttcgtgaagaggggaagcccaggattggggaccttgatggagagtgagaggatgtggaggggtaagtgggatggtggggtaccagccactggaggggtcatccttggcccattcgggaccagaaacctggggagagatttgggatgaggagtggttggggctgtgcctgggacctagcacggacatggtctgtactgacagcactcctcggcaggcatggctggttgcctgaagacccccaggatgtgagggcaccaccaagaatttagtggcctaccttgttgagggagagaactgagcatctccagcattctcagccacaaccaaaaaaaaaataaaaaggggcagccctcctttaccactgtgggaagtccctcagaggccttggggcattgacccagtgaagatgcaccgtttgaccaaggaaaagcagcgctaagtggaagggttggagaaggaggtaaagtatgaggggttcattcatccctccctgcctaaggaaggctaaaagcattggccctgctggcccctccctgccttccacccaacagtggagacgggctacataaggaggacaagaccctcttcagggctgtccccaagctcccagagatgcttccagaagctctgaacccaaccagccttccaaagtccaggtgggggtgggagttcccagaagcttgcacaggggttttggccccaagtttttttaaggggagggcatttccttccccttggcccttcagttgccagcccctgcctggttgggttgccttnagccccttcagaacagcccccctgccccgcaggccttgcctttcttcagggatttcttgcggggccctgaaggcaagcccatggaagtgagaccccaggagccggacacttctcaggaaatggcttttcccaacccccagccccacacccggtggttcttcctgttctgtgactgtgtatagtgccaccacagcttatggcatctcattgaggacaaagaaaactgccacaataaaacgcaagcctctggaatctgtcctcgtgtccacctggccttcgctcctcacagcagtgcctgcctgcccccgcttcgctggggtctccacgggtgaggctggggaacgccacctcttcctcttccctgacttctccccaaccacttagtagcaacgctaccccaggggctaatgactgcacactgggcttcttttcagaatgaccctaacgagacacatttgcccaaataaacgaacatcccatgtctgctgactcacctggctggaacaacatgcttactgccaacatgtgggccgaaccacatggccctggctctggaatgcacaagtggctttgcgtgaatctgcgctaagctatgcagtctgctttttcttctcagctctggtagttcttcagaaatgtaccctccaggcacatccactattgcgagggtgagcacgaagggtgggagatgcccatgtcctcaaggcatcacttcctaaatccaaaagcatcggcaggagaaaggactggggacaaatactgtcccttcgggagtagggagggaacactgaggcccatccctggctccttccctaaaagtagagtaaaatggaagcgagcatcctgggattgggggcaagagggggaccgcagggtagctgtgggttccaactgctgtcagagtcagagaggcagccccaagccagcctccctgctttgc

SEQ ID NO: 111117 - DNA, 474 bp, Homo sapiens
tacgcaacctggacgagtggtgaataaagcactgagacatttgaagaggctcctggattatagcctgacaaggagaggaccggcagcaatcgatttgccaaggcatgtcagagacctttgagacattacacaacctggtacacaaaggggtcaaggtggtgatggacatcccctatgagctgtggaacgagacttctgcagaggtggctgacctcaagaagcagtgtgatgtgctggtggaagagtttgaggaggtgatcgaggactggtacaggaaccaccaggaggaagacctgactgaattcctctgcgccaaccacgtgctgaagggaaaagacaccagttgcctggcagagcagtggtccggcaagaagggagacacagctgccctgggagggaagaagtccaagaagaagagcagcagggccaaggcagcaggcggcaggagtagcagcagcaaacaaaggaaggagg

SEQ ID NO: 111118 - DNA, 480 bp, Homo sapiens
ttacggattcactggacgacggactgggaaacataattactttgtttattttggatagcggaacgcctgaccaggcatggagtatctcacaaagtagacgattcctctgggtcaatcggaaggcgctatgccaggactgatgagattggcgtggttttggtgcaccattgactttgacacagtgaacaagaccccccacactgcaactctgagggaccgtgactcaatgcggcagataagagcagaggtatctggccttctctttggcatttttagccttagaaatgtgtactgcttcttactgatttgtgttggattttgatgtgtttatgctccctttcctttttttttctttttaattttaatgaacggcttgtatcagacagagcccagattctcaagtcccccgggttaattatgaaaatatccattagcacttctctaatattttataaacatttgtgttgctccaggcttatt

SEQ ID NO: 111119 - DNA, 1688 bp, Homo sapiens
accatgattacaggattcacctggccagtcgtgacgtgggaaaacaagggttttacaatatatgcttccgggggtggagggaggggggaaaaaacctttttccttatttgccccagggagtcggaccaggggaaagaattccccatgtctattatagtgacaagcgacgtcttagtaaggacagcagcaaggcaatggtcagatgacctatcagtgtgaccctcctttatgggaggatcaggaccaggtgggaacaaaggaggctcagagaagaaagacgtgtcccttctgaactgatgctttctcactgtcatcactgcttggctcctttgagccccgggtctcaatgacgttgctcattaattctagaaactataaccagggctctgggatagtaagagaggtgacaacccacccagactgcagttccctccccaccctctacccagtatacgaagcctttcagattactcatgaaacagggtagagggaaagaagggaagcatggcaaaaagctggcctggaagggatagccagagggatagaatgactctctctctacataccagcagcataccaaatgcgttctctaagttcctacctccttgacctgatcaccctccctcctccaaggaagagctcaaagttcccagccaatagacagcatgaatcaaggaacttgcattatatgtgctcttgaatctgttgtctccatggaccattcctcggagtagtggtgagatggccttgggttgcccttggcttctcctccctctactcagccttaaaaagggcttcttggaactttaccagcagcctcagctttataaatggccttggtatgtacctctggcaaatgccctggtatgtacctctggcaaatgccccaccttggtgattgttgcaacctttccttctgctagggtgtacacctagcctgtgcaggtgtcagctctgctagggagtcactgtacacacaaaactctactggaattcctgccaacatctgtcaccctgcagctcctttacagttcaatccaatgatagaaaccatcccttccctttctcccttggctggttcaaccaagccattccctgaaggccttaccaacaggaatatccaagaagctgttgtcctctctcgaaccctgaccagatcatcagccactgaggccagtggaatttccccaggccttgttaaaacaaagaaagcattgtacctctcagattccccttgtgggaaaaaaaaattctgctgtgaagatggaaaataaaaatgggagaggaaaacactgggaaaactattttcccctcctatttacttcctttgctgactgccaacttagtgccaagaggaggtgtgatgacagctatggaggcccccagatctctctctcctggaggctttagcaggggcaaggaaatagtaggggaatctccagctctcttggcagggcctttatttaaagagcgcagagattcctatgtctccctagtgcccctaatgagactgccaagtgggggctgtagaaaagccttgccttccccagggattgggcctgggtctctgtatttcactggatccataatgggttgctgttgttttgggatgaaggtaaacgatgcttggaattggaaactgagacttatagagagattattacattattaaaatgcacgtgtgtgtt

SEQ ID NO: 111120 - DNA, 465 bp, Homo sapiens
  misc_feature (1)...(465): n = a,t,c or g
ataacgtctgacctgcntacggttcctggccgagggactgggaaaaaaggcttcgggtctgggatataagcacagtcttttcattaaatgaagcatttggaagacgagagaggcttgttcttgggagtgcaagaaattcatctattagtggcccttttggcagcaggagctcagatacacccatggagtcttaatgaagatcatctaatttcctgcttaccttaactgggaattttaaaaagttggcctaaaaatgttccatgcgtggcagcaaccatgcagagtgactgaaacacaattcatttctgactgacattcctttctgcaactgcggtggcaccacaaatatccggtctttgtgcttgctcttcagatggatggtttgtaaggctcttgttgcatttcttaaaaaagagtaataaaaaggatttttaaaaagtaattccttaaacataccatctgtcg

SEQ ID NO: 111121 - DNA, 839 bp, Homo sapiens
  misc_feature (1)...(839): n = a,t,c or g
acgccacctgcaggctgtttgaccttcgtgctgaccaggagctcatgaccttaactccccatgacaacatcatctgcgggatcacctctgtctcccttctccaagagcgggcgcctcctccttgctgggtacgacgacttcaactgcaacgtctgggatgcactcaaagccgaccgggcaggtgtcttggctgggtcatgacaaccgcgtcagctgcctgggcgtgactgacgatggcatggctgtggcgacagggtcctgggatagcttcctcaagatctggaactaacgccagtaggtaatgcagcagcccaaatgcccttctctgaggagaaactgtgcgtgtttctcataggaacatttgaagttgtcattaacgggtttctagatagaatgtttgatgtaggcatttgatttgggaatttgttgttgtggggaaacgttttacagaaagctgaagttcacgttgccctcagcttgcagacattcattgcagtgatgggaagagcagtgacctgggctgtgcgtctgcactttagattctctgcctcttttcacatttctttaaactctgtttaaaacagcatgtgggatgccatgggagactgggaaggaccattccaacttgggacggcgttaccatgaggaggcatatcctattcccaaccgttacttaacgtgggacacccttacacctccccttcaggaactttcaaaaggggcaagatctttttttccttcacttatttgcctggaaacccaggggcacaattcccatttgagggaaaggtctttgtggtgttaaactaaaacaatttgtggcnttcctttccggggcc

SEQ ID NO: 111122 - DNA, 1091 bp, Homo sapiens
ttttttggagacggagtcgtccccgtcacccaagctggaacgcatggtgtggatctcggctcactgcaaactctgcctcccaggtttaagtgattctcctgccccagcctcccaagtagctgggattacagaagcgcgccactacacccagctaatttttgtatttttagtagagacagggtttcagtatgttggtcaggctggtctcgaactcttgacctagtgatccacccgcctcggcctcccaaagtgctgggattacaggcgtgacagctgcgtccggcctgattcacatatattttaaaagactaaacataggaaagctaggagatcttgtgtggtggcaggtttcttctgccactcaggggtaggacactggggcagggggagtggcccagcctgtactttcactctgactgcagcagccacgcaaagcagtgtttgctctatggattcgcagactgggctcctcttgccttcttcagataagccacaaaccagcctgacctgctcaccttctgggcctcggcacctgtgacagccacaatcctccggatacccttggcaatggcttcttccgtcacgatcacaaaagctcctgcatgactcgagttccgcaggtgcctgaatggcagaacacaaagtccatagtgaaagaggccctggcagcccttggctggggggtcacactagcggacaagagaagcaggaatgggttgacagtcagggaaagcctgggcttgagagtattctgacaccaagcgggacaccagctcgctgagcctgagtgttctcagttctcaaatggggatgattctccccacacagttgctgtgaaaatcaaatgagggaaacatgaaagcgctttgtggtccctaatatccaatacagtcttacccttaggctctacatgacagttctggtcttgtaggggaacttaagctccatttttgtattctgctcactatgcgacaattttgggaggattacttttataaatcttaccacaaccccttaaacaggctttatttctcagttcagagaacctcaaatgttcattaattcatcctcattctttgaagatagtatag

SEQ ID NO: 111123 - DNA, 437 bp, Homo sapiens
ccccaagtgagtgtgttctcagtgtcacgggggcaccccttgacagagcacgcatcagctcacacgtttcttgccgcctcagggagttcctctttaaacagcggaagcgcgcggccaccctcagcatgaggaacgcgagcgtcatgaagaaagggggcatattctctgcagaatttctgaaagttttccttccatttctgctgctctctcatttgctggccatcggattggggtaggtgatgtgactgtgagactcctgtcatggcatgtcgtggggcgattttgggttgcagtgatttattcgtaacctgattcctaaagtccagatcatcagttgcagcttggtgcattttctcaaacacccacgtagtctctgttcaggtccagaaaccaccagcctgcagccccctatgttcccagtcccggcgttgtaaacc

SEQ ID NO: 111124 - DNA, 402 bp, Homo sapiens
  misc_feature (1)...(402): n = a,t,c or g
tgcgctgagcaattcggcacgagggcaagaagagcctgagactgaacacaaggccttgaccagtgagattgcactgctgcagtccaggctgaagacagagggctctgatctgtgcgacagagtgagcgaaatgcagaagctggatgcacaggtcaaggagctggtgctgaagtcggcggtggaggctgagcgcctggtggctggcaagctcaagaaagacacgtacattgagaatgagaagctcatctcaggaaagcgccaggagctggtcaccaagatcgaccacatcctggatgccctgtagcccctgcccgcatcctccagggggcccagggtgcctgcactttgctgtggcaggcagattgggtggtagtgggagggtgtgcatggangcccntggat

SEQ ID NO: 111125 - DNA, 419 bp, Homo sapiens
gcccgagagaagtcagagaaaacactcttcctggataaaaaagaaaacattccagatgcatgatccacctgtgtgttttcaatccttgggagggtgccatccacattttaacagtacctgtgcctgagaatttaatttttaaaagactttgatgtgtttttgtatgaaggacttttaacgcatgtatttcattgctgtgtcacactctgtgatttgtgaggcgaatgtcttccttttctttctccctaaccactaatgctagaactgatttccacgaatcggcatgtatacttaatactgaatttctttgatttaactgacttaacaactgactaaccattgatgagcactcctgatttttatctagaacattctgatttaccataatgttccttagtggtagaggtgcgcgcctaccc

SEQ ID NO: 111126 - DNA, 1436 bp, Homo sapiens
  misc_feature (1)...(1436): n = a,t,c or g
ttttttttttttatgacaaaaccagaatgttgaatgtttattgcatcaaacaacttacttgatcattatcattagtagcaagctgccacacaattgcaacccgctgtgttttttgccattaggccgcccgctgggacaccccaagcaggaacccattgttgaagccccgtcttcaaggagcctggcatgccctatgccggtcatctttgcaaaagccacccccgtgggacagacaagaaaccaaacagacctacgagtgccctgtgtatagaaccaaactgagaggtnagaggccccagctacatctggaccttcaggctgaagagcgaagaagaagacttgcaaaatggggttctggcttggagttggctctgcttctagaaagcgtaaggtaacactgggcattcctctagcctctgcttggagtgcagtgaggattttctaagcatgttgctgcactgttcccatgcacatttattctgactttttagtaactcacacgtgcattcttttttcaacgctatccttagaagtgaaagtcagaaaaaaatactagaaactaactcagggctgagcgtggtggcacacgacttgtaatcccagttactcaggagggtaggaggatcactttgaacctaggaaggcaaaggttgccagtgagcccgaggttgcacccactgcactccccccccgggcaacagaacaagactcccatcctcaaaaaaaaaaagtacatccataaaagtacatccatatgtgaacatgcaaaagcaatgcagccggaaagaagcggagattttaaatttttaacaaacaacaaattaaattattagccccttaaactctttcaaaatataaaagcagcaggccccaggtgagtcctgaaggaagaggctagcactctgtaaggcctccagtgtccagtgtctacaatgttgatggtccccttttgttcagtcaagttttaataaaaataaaaactgttccaancagttaattgcaactttgttccagtgtaaaatttcccaatgacccaagagcaggttaaacgatgtgtgtggtctattaaactgtggtcactcgtgctaaggcacactgtggcctggagtgagttactgtttgggaagccaaagatagatagatcaagtgcaggagctgatcatacaatgttttctctctaacttacttacctgaactttaaccccaccccatttcaactgtgctttttaataactggcagatatttttaacaaagttcagcatacagacaggtctgtgcatacatctatatagattcctctgctctgctgtcttcctgagaaatctttgtaagcatataaacaatctttaacaaaaaatagtaatttctacaaagaatttctgtataaaaacacaactgtaaaaaaatcttaggcaccaatggtatgcatgtcttg

SEQ ID NO: 111127 - DNA, 449 bp, Homo sapiens
tgtttgcggaattcccacgagccggcctggtctgtctccaccatcctgactgggctcctgagcttcatggtggagaagggccccaccctgggcagtatagagacgtcggacttcacgaaaagacaactggcagtgcagagtttaacatttaatttgaaagataaagtcttttgtgaattatttcctgaagtcgtggaggagattaaacaaaaacagaaagcacaagacgaactcagtagcagaccccagactctccccttgccagacgtggttccagacggggagacgcacctcgtccagaacgggattcagctgctcatcgggcatgcgccgggggccgtcccaaacctcgcagggctccagcaggccgaccggcaccacggactcctgggtggcgccctggcgaacttgcttgtgatagatgccgtagcaccctttgcttacacggg

SEQ ID NO: 111128 - DNA, 597 bp, Homo sapiens
ggcacgaggaattccatttaccttctgggccagataccaccagaatgcccgctccagattccctcagacctttgccggtcccattattggtcctggtggtacaagccagtgccaacttcgctgccaactttggtgccattggtttcttctgggttgagtgagatgttgggtaggtacatcactttggattgggcagttagggtctctgggggatatagggtcccatggggttgtatttatgtgcatgagcctagaagtattaggaaacctcatttgtagggagatgaggaaagtatggggcagcactctttggtatgtatattccttattatttgatatatatcattgatttttttacttcttctttcttatgttcacagatattgctatcaatcgcagtagtctttcccctgtgtgaggctgaagcctcagattccttctaaacacagctatctagagagccacatcctgttgactgaaagtggcatgcaagataaatttatttgctgttccttgtctactgctttttttccccttgtgtgctgtcaagttttggtatcagaaataaacattgaaattgcaaagtgaaaaaaaaaa

SEQ ID NO: 111129 - DNA, 448 bp, Homo sapiens
ggtgtgtaattccgcacgagccctcatgttcgaagagcctgagtgggccgaggcggccccagtaaccgcgggccttgggcccgtaatctcacgacctccgcctgcggcctcctcgcaaaacaaggttcctctggaggatgagtctgtggatgtggctgtgttttgcctttcactgatgggaaccaacatcagggacttcctagaggaggcaaatagagtactgaagccagggggtctcctgaaagtggctgaggtcagcagccgctttgaggatgttcgaacctttctgcgggctgtgaccaagctaggcttcaagattgtctccaaggacctgaccaacagccatttcttcttgtttgatttccaaaagactgtgcccccctctggtagggcccaaggctaagctttcaggcctgcagcttcagccatgtctctacaagcgcaagtg

SEQ ID NO: 111130 - DNA, 454 bp, Homo sapiens
ctgctgaattcggccgagggctctcgggcaccacgtgtaaggtgatgtgcacatatcaagaagtcagagaaaacactttcctggataaaaaagaaaacattccagatgcatgatccagctgtgtgttttcaatccttgggagggtgccatccacattttaacagtacctgtgcctgagaatttaatttttaaaagactttgatgtgtttttgtatgaagtacttttaacgtatgtatttcattgctgtgtcacactctgtgttttgtgaggtgaatgtcttccttttctttctccctaaccactaatgttagaattgatttccaagaatcggcatgtatacttaatactgaatttctttgatttaactgacttaacaactgactaaccattgatgagcactcctgatttttatctagaacattcagatttaccataatgttccttattggcata

SEQ ID NO: 111131 - DNA, 422 bp, Homo sapiens
ctgcagcaattcggcacgaggagaagaagaaaaaggagagcatcttggacttgtccaagtacatcgacaagacgatccgggtaaagttccagggaggccgcgaagccagtggaatcctgaagggcttcgacccactcctcaaccttgtgctggacggcaccattgagtacatgcgagaccctgacgaccagtacaagctcacggaggacacccggcagctgggcctcgtggtgtgccggggcacgtccgtggtgctaatctgcccgcaggacggcatggaggccatccccaaccccttcatccagcaacaggacgcctagcctggccgggggcgcggggggcgcagggcaggcccgatcagctcggtttcccgcggacttgtgtgctggtgccaccgcagtaccgcctcctggaacggaagg

SEQ ID NO: 111132 - DNA, 446 bp, Homo sapiens
  misc_feature (1)...(446): n = a,t,c or g
tgcttacgccaagcttggcacgaggagaaactaggaataaaagggagcttccttgacttgttaaagaatatctttacaaaccctacagctaacatcatacttaatggtaaggaacttgaagcttttccattaagatcaggaacaaggcaagaatgtcccctcaccacactgcctttcaatgtcatataggaagtcctagcnnnnnnnnnnnnnnnnnnnnnnnnnnnnnnnnnnnnnnnnnnnnnnnnnnnnnnnnnnnnnnnnnnnnnnnnnnnnnnnnnnnnnnnnnnnnnnnnnnnnnnnnnnnnnnnnnnnnnnnnnnnnnnnnnnnnnnnnnnnttactctgcttccaagatgatactttattgctgtgtcctcacatggcagaagagatggaatggccaggcacgnnnnnnnnnnnnnnnnnnnnnnnnnnnnnnnnnnn

SEQ ID NO: 111133 - DNA, 402 bp, Homo sapiens
cggacgcgtgggcactggagagaaaccttatgtatggttacattgtggtaaagcttgcgttgcttcaacatgaagtcgaatacgtgaaagaactcatactggagagaaaccctatgagggtaagcaatgtgggaaagccttcaggtatctcaactcctttcgaacacatgaaatgattcacactggtgagaaaccctttgaatgtaagcgatgtgggaaagcctttaaaacttctagttcctttcgaccacgtgaaaggactcacactggacagaaaccctatcattgcaaggaatgtgggagagcctattcttgccgtgccagctttcagagacacatgttaacacatgctgaagatggaccaccttataaatgcatgtgggaaagcctttaatgctctgg

SEQ ID NO: 111134 - DNA, 444 bp, Homo sapiens
  misc_feature (1)...(444): n = a,t,c or g
cccctgaaaagagatggagaggaaaaggaagagccagatccgcagggatggcaaagagatcctggaaaacagagcccgggaggagaaagagagcccctgagaaaagggaaagacagtgatgtccagagagaggaaagacaaagagaccctaaagcaaagataaataaagagaacagaaatgaagagagatagagagacctgagagaaaaagaaaaagggaggaaaagaaagagagaaacagagaaatccagtctaattacaaagagatagaaacnnnnnnnnnnnnnnnnnnnnnnnnnnnnnnnnnnnnnnnnnnnnnnnnnnnnnnnnnnnnnnnnnnnnnnnnnnnnnnnnnnnnnnnnnnnnnnnnnnnnnnnnnnnnnnnnnnnnnnnnnnnnnnnnnnnnnnnnnnnnnnnnacccgggaatccgcgnnnnttcacag

SEQ ID NO: 111135 - DNA, 390 bp, Homo sapiens
  misc_feature (1)...(390): n = a,t,c or g
nnnnnnnnnnnnnnnnnnnnnnnnnnnnnnnnnnnnnnnnnnnnnnnnnnnnnnnnnnnnnnnnnnnnnnnnnnnnnnnnnnnnnnnnnnnnnnnnnnnnnnnnnnnnnnnnnnnnnnnnnnnnnnnnnnnnnnnnnnnnnnnnnnngggggcgcccttttaaaagaacccttggggggcccaattttaacggggggaggnnnnnnnnnnnttttcccctttgggggggcctttttaaacccagggggggaattttggaaaggaacctttttttgggggggggcacttttgggaccaacctcccaacggaattttgggcctcaagggnnnnnnnnnntttttaaggggaaaggggggaaaaccaaccgcaattccctggcgtttgaaaat

SEQ ID NO: 111136 - DNA, 408 bp, Homo sapiens
ttttttttttttgagacagagtcttgctctgtcagtgagtgcagtggcatggtctcagttcactgcaacctccacctcctgggttcaagtgattctcccgcctcagtctcccaagtagctgggattacaggcacatgccagcacgcacagctttaaacaatattttaagcagagtttcctgctactgctcagcttacataactccagacccacagcagctagaacctttgaattgagcagcatgttatgtttgcaagtgagctactccttatataacccctcagggagctgtcagatctgggaggatgctaatttcatacccagagactatagactaaatgaaccataccttggaagaaaatgactttattctaattaactcacaaagaatcggacgcgtgggtcgac

SEQ ID NO: 111137 - DNA, 391 bp, Homo sapiens
tatcacgcaaaacactcctaaccgaatttatgggaagtattatgaaattggcctgaggggcgcgcttcaaacaccccccggctgaatctctatcacctcttttaatgagtggcatgaaggaactccgattgaaaaagctgttcccaatagaaccacccttacagggcacctagattaccgccctcataaaccaggtctttacctaaaactgactcgcaaggggtctgaaaaatacaggaagggaagagcaacttatgctttaaaacgccagctgcctgcttcttaatgcattgattaaggtgtaatagttatcaaaagtcccctaatttctaaaaataactttcgttttgagttctggaaagaaaactgttcaaaacagtatatactatta

SEQ ID NO: 111138 - DNA, 392 bp, Homo sapiens
  misc_feature (1)...(392): n = a,t,c or g
cttaactaagtagtgactccaattgcagctgccgtaccagatgtggtttcattgctggagcaaatcaacacatctcttggnnnnnnnnnnnnnnnnnnnnnnnnnnnnnnnnnnnnnnnnnnnnnnnnnnnnnnnnnnnnnnnnnnnnnnnnnnnnnnnnnnnnnnnnnnnnnnnnnnnnnnnnnnnnnnnnnnnnnnnnnnnnnnnnnnnnnnnnnnnnnnnnnnnnnnnnnnnnnnnnnnnnnnnnnnnnnnnnnnnnnnnnnnnnnnnnnnnnnnnnnnnnnnnnnnnnnnnnnnnnnnnnnnnnnnnnnnnnnnnnnnnnnnnnnnnnnnnnnnnnnnnnnnnnnnnnnnnnnnnnnnnnnnnnnnnnnnnnnnnncggacgcgtggg

SEQ ID NO: 111139 - DNA, 403 bp, Homo sapiens
gtgatggtctcactctgtcagccagactggagtgcaatggtgtgatctcggctcactgttgccttgatcttctgggctcaagaggtcctcctgcatcagtgtcccgagtagctgggactacaggtgcacaccaccatgcctggctaatttatttttattttttgtagagaagggttcccaccacgctgcccaagctggtctcaaactcccgggcgcaagagatcagccttcctcggcctctcaaagtgctgggattgcaggtgtgagccactgcacccagctggacaattaacctgagctaatttgaaaaattttgatgttctcaagatgactagggaactggagccctcaatcaacagtcctcagtatcttttctgcagggagggctagatacctcctctgt

SEQ ID NO: 111140 - DNA, 421 bp, Homo sapiens
  misc_feature (1)...(421): n = a,t,c or g
caacgggttagcccgggtaaggttaacaaaggccccccaaggccaagggtcagggggtttcggggccccccaaaaaggcccccttaattttgggaaattggaaaggctccccggggaagggggggcccaaggggggggtaaacctgggccnnnnnnnnnnnnggcccttgggggccctttttgggttccccaccccccnnnnnnnnnnnnccccccaaggggccgttttttttgaaaatttttaatccccgtttgtttttttccccctggggggttttccccgggggggaagaaggggagggttttcaaaggccaaggccccccccaaaaataaggggggggtttccgggggggtcccnnnnnnnnnnnnnnnnnnnnnnnnnnnnnnnnnnnnnnnnnnnnnnnnnnnnnnnnnnnnnnn

SEQ ID NO: 111141 - DNA, 547 bp, Homo sapiens
ttttttttgagatggagtctggctgtgtctcccaggctggagtgcaatcgcaggatggtgcctgactgcaacctccacctcctgggttcaggtgattttcctgcctcagcctccctagtagctgggactacaggcacacaacaccacacccagctaatttttgtattttttgtagagacaaggtttcaccatgttgcccaggctggtctcaaacccctgggctcaagttaacccctcgcctcggctttccaaagtgttaggattacaggcgtgacagctgtgccaggccatggatatctttaacgacaagaactgtgtgtgtttggttttaagaccaagtggagccctgatggttacatgtccacccaaaggttatttaatattcccatcacttcagatgctataatcataagtgtgtcatctgtccttgaaacatgttttcaccgatggaatttttaaatacaggccttgagttcttcagcactctcaaaaatcagaaggaaaaggaaagagttatccagaaaaagctctttctcatggtcatgag

SEQ ID NO: 111142 - DNA, 467 bp, Homo sapiens
  misc_feature (1)...(467): n = a,t,c or g
ccgcgccggaattcccgggtcgacgggaggcaggaggagccttaaagtcccacctgggcaacacagttgacaccttgtctcagcgagtcaggggaactatcttagggataaaacttcacaaccttagatttggcagtggattcctagatataataccacaagcacaaacaacaaaagaaaaagataaattggactttatcaaaatttaaaacttctgtgcatcaaaggacactatcaagaaagtgaaaagacaacctacagaataggagaaaatatttgcaaatcatatgtatgttaagggtnnnnnnnnnnnnnnnnnnnnnnnnnnnnnnnnnnnnnnnnnnnnnnnnnnnnnnnnnnnnnnnnnnnnnnnnnnnnnnnnnnnnnnnnnnnnnnnnnnnnnnnnnnnnnnnnnnnnnnnnnnnnnnnnnnnnccattgaatcatagactttaaatgggtggatta

SEQ ID NO: 111143 - DNA, 389 bp, Homo sapiens
  misc_feature (1)...(389): n = a,t,c or g
attgacaagagctgaagtgggagaaaaaacagaggaaagaagagtagaaagggatattcttaaggaaatgttcccctatgaagcatctacaccaacaggaattagtgctagttgccgcagaccaatcaaaggggctgcaggccggccattataactcagtgatttcaggatggaggagtctttttcatctaaatatgttcctaagtatgttcccttggcagatgtcaagtcagaaaagacaaaaaagggacgctccattcccgtatggataaaaattttgctgtttggtgatgcggcagcnnnnnnnnnnngggtcacaagacgtatggaactcatcacctgaacccccttttttatttttttcagaggcgaccctagaaagtctaaac

SEQ ID NO: 111144 - DNA, 460 bp, Homo sapiens
  misc_feature (1)...(460): n = a,t,c or g
tttcgtccttcctgggattcctgttcctctaccatgagttgtgaagatgtcactgtggggtttttgcctttgctctctgtcttttaagaattgtgtttggccgaccagattataatggtttctacaagtcaggagcttattccnnnnnnnnnnnnnnnnnnaaaactggagtttggttttgcccccctggcgggagggcaggggcccattttgggttaattgaaaccggcccctccgggattaaagcagttttccggcctaaccctccccagaagcggggattatgggcagggnnnnnnnnnnnggggaaatttttggtttttttagaaaaaagggggttccccggggtttgaattnnnnnnnnnnnnnnnnnnnnnnnnnnnnnnnnnnnnnnnnnnnnnnnnnnnnnnnnnnnnnnnnnnnnnnncccagnnnnnnnnnnacttaaaggcaaaggggt

SEQ ID NO: 111145 - DNA, 460 bp, Homo sapiens
  misc_feature (1)...(460): n = a,t,c or g
tttcgtggaatggacagatggaatagtgatgaggttccagataactctgcaaaatgagcagacagccaaggaggaactgaaggaaacagaggagcactgtcaggccacagtggagagcacaggctcaggagtactgctggggaaggggcagcattggaaagatagaggccatgggcctccatatccnnnnnnnnnnnnnnnnnnnnngaaaaaaaatttatttttttttcccccggctaaagggattggggaaaatttaattttattggaccctccccctccgggttaaaggaatttttatgcttaaaccccccggggggttgggataaaggggttcccccccccggtccggttattttttgttttttggggaaaaaaggggtttacccatttgggccggggtggttttaaaccccggacccggggggaccccccccctgggccccccaaggggggggan

SEQ ID NO: 111146 - DNA, 428 bp, Homo sapiens
ttttttgtttttgagacagagtctcactctgttgcccaggctagagtgcagtggcgcaatctcagctcactgtaacctccacctcccgggttcaagcgattctcctgcctcagcctcctgagtagctgggattacaggtacatgccaccacacccagctaacttttatatttttagtagagatggggtttcatcatgttatccagaatggtctcaaactcctgacctcaagtgacccgcccatctcagcctcccaaagtgctggaattacaagtgtgagccaccgcaccaggccatcactttctgtctttatttttattttgcttgtttgtttgggcatttctgcaattagtgaataaaattagtctggttaaagaatgactgtttataagcttctgatcaaagtttactccctctttttcttcctag

SEQ ID NO: 111147 - DNA, 2007 bp, Homo sapiens
  misc_feature (1)...(2007): n = a,t,c or g
tttttttgttttgttttgtttttgagacggagtctctctctgtcacccaggctggagtgcagtggcctgatctcagcttactgcaacctccacctcccagggtcaagcgattctcctaccttaacctcccgagtagctgggattacaggcgcccgccactatgcccagctaaattttttgtattttttagtagagacggggtttcaccatattagccaggctggtctcgaactcctgacctcgtgattcgcccgcctcggcctcccaaagtactgggattacaggcatgaggaagttttattctcaaaagtacccaaagggagtaggaggaggtactctctccaacctggtaacccaggctgctaaaatctacgcctctggccgtaaacctccaacagcagtaacacaatggactgtttaaaaggttattttattaaatattttcagttcaaaggtttcattgtaacaaaagctatgaaagggtctaccaacattcagaacaaacactatttttaaattatttctatgttgtcatgcaaaaaatttctgcatcaaaatgccttcccgtttcttgtttaaaaaggtgattttttaatagtctattgtctatagatgctggacattagcccccagaagagggagtaggaatggctaaggaagtgggggctgggaggcaggccatatggaaggctatgggggtctcaatggaattctaaggcccatttgttctttcaaggccaggcaaaacggaaaccctgtggttgaagggattttgcgttgctgggcactgcaagactggcangggcagggaaaggcttaggggcccaggggctggggacatgcatgaggttgctcgggaggagccttggctaaatccaagcaccagcacctgtgagtctgctcctccttcctcagctggctccccaaagtaaaacttgtagctttgccctcttctccccagctctcgtgcctcctgaaggtaagtcccagggaactggaatctacccacctttcccccaaaaagtggagatgttggtgcagataaatctgcagcgttgttttgagggaaaccaaggcccatgacccaattgctcctccattatcgttctgtgcctatctgccttagggtatagatctcttccctcctggaatggaactcccttgagccacagagagggacaatgaaaggtaaaaagccttggctctggacacctcttttgggttacatgcggggaggggtgaatgccccatgcagattgtccagcagtaagtctatacttcagttggtcagtaaagaggccttcttgtaaggacacctcttctttcttgccagagcagtcaggtcaatcttcaaagacaggaaaagagatggacgtgcagcaaggaagaataagaagggaggcagccccaaaggcagcctgaatgcatagaaacgaccaccacctcttctcccactgcctcactcctccccatcccacagggggcacttggcaagaagcccaggcccagatgagggtcagcatggggaaccactaccgtgaaaaggcaagacaaagatggtccagatcagcacagaaacagaaccgccaaaggcggcacgggagccctgaccagggcctggcttctccccttgccgaggttagaggaaaccacgaagcaaagcagcaacaacccctccccctcctagctgcagggataaggcctcaatattagggcccacatgcattgtgcatcctatagaaatggatgagtgagtgcatgtcagactaacacgaggtttctcatcggcttcatggcgggtacacttctgcagcaccaattctcttcccttctacactaaacaacgacacgtacacgcaacgtccgggctctcagtcctgaggccaccacttctcagctgcctccacagcaggctgggagctctgcgttctctcccaagtaggtatgatggtcacgatgttctcatcagccccattctaggcgcctatgcaagttccaaagaagttc

SEQ ID NO: 111148 - DNA, 557 bp, Homo sapiens
gagacagtctcattctgtcgcccaggctggagtgcagtggtgcaatctcggctcactgaaacctccacctcctgggttcaagtgattctcccgccccagcctcccgagtacctgggactaagggcatgcgccacgatgcccggcaaattttttttgtattttcagtaaagacggggtttcaccatgttgatcaggctggtctgaaactcctgacctcaaatgatccacccaccttggcctcccaaagtgctgggattacaggcatgagccactgcgcccggccaatctgaaagttttctatgcacaaatctagtgtgcctctgaagtctttcaagtcaacctttttttggccccatactatgttgctaccgacatactataatccagttctgagaaaatcaggactgacagactttaaaaatgacactgaaaagcgacagacaggtttgaacctggcttaaccacataaaagttgaacaaactatctgaactctggcttccttcattataaaatgggcaaattcttgccgtgccttgtcgcatatagtcgacacggg

SEQ ID NO: 111149 - DNA, 496 bp, Homo sapiens
  misc_feature (1)...(496): n = a,t,c or g
accaaattttttggccgcctcagctttcccaaatgtgtggaatccaagccataacccctgtgtcccgccttaaatattttttttaacttttttttcaaaaaaacaaaaaaagttctggttttttccccccaggttgggggcaaagggtttattttggggtaatgcaacctttgccccctggggtccaaagattttcccgccccaacccccccaaaaagtgggattaaagggcccgccctcaagcccgggtaaattttggaatggaattttttagaaaaaaagggggtttcccaatttggcccgggtggttttcaactccttaaaaaaaggtcaaaaagggttttttgggggaattaaccattttttataccctcagggggggctgaannnnnnnnnnnnnnnnnnngggnnnnnnnnnnnnnnnnnnnnnnnnnnnnnnnnnnnnnnnnnnnnnnnnnnnnnnnnnnnnnnnnnnnnnnnnnnnnnnnnnnngaaa

SEQ ID NO: 111150 - DNA, 352 bp, Homo sapiens
gggagatggaggttgcagtgagccgagattgtgccactgtactccagcctgggcttaacagagcaagatcctgtcttgaaaataaataaataaatatgataacatgtgaagtgcatagcacagtgcctggctcttacccacagttaatgtcagctgtttcaagatatttgatatctaaagctccaagtataatgcttggcacgtcatagacacttagtgactggtccatttctttggggagtacttatgtggacgtggcatgtcttcactagcttatttatttattttaagcagaaccttatttctagcatctaaactactgcctccgtggttggcaagggtgacttccatg

SEQ ID NO: 111151 - DNA, 706 bp, Homo sapiens
atttcattttggttgttgaaacatgtacatatattacctattcaaaaagttaaattaaggtcaggtgcagtggctcatgcccgtaatcccagtactttgggaggttgaggtaggaggatcactttaccccaggagttggagaccagcctgggcaatatagtgagacctcctttctacaaaaagtttacaggtgtgagccactgcacccaacccaacgctatcctttctatgtaactcactagaggacagccccagggagtggaccagcaaagaccgcatgagccataccccagtgacacaggctcccaaacccggccatgtatcacaatcagaatctggggggagtacggtcagggatctgtgtcttttaaagtcctccaggtaattcagtcagttactgacctgtccttgtcaatgcttcccagtgaagagagtacaggctacatgtcccaggtacatatcccttccctttagacagcagtcatcactgacgtcttctgagtaccagtgctgtgccagacactgaggcattctacgtgttactgtaaggcaaacagcatcccggcagggcaggcctcgccaatgtgctcactgagctcggtgtcctctggagtgactgacttattcaatgtcatattgctggtaaatgtcagaactaggatctgaatgcagtcataaactccctgagcctctgttttcttctctg

SEQ ID NO: 111152 - DNA, 451 bp, Homo sapiens
  misc_feature (1)...(451): n = a,t,c or g
gtccatgcggaccactgagaacntcgggcgacatttcgatttatattgaaatacctacatttaagaagaagcatgcaccaaatcagtaacctaacttcataccttaagaaacaagtaaaagaagaacaaactaaattgaagaaagcagaagaagaaaggaaataacaaaagattagaacagaaataaacaaaatagagacaagaaggacaatatggaatcaacaaaatcaaaattggttctttaaaaatatcaacaannnnnnnnnnnnnnnnnnnnnnnnnnnnnnnnnnnnnnnnnnnnnnnnnnnnnnnnnnnnnnnnnnnnnnnnnnnnnnnnnnnnnnnnnnnnnnnnnnnnnnnnnnnnnnnnnnnnnnnnnnnnnnnnnnnnnnnnnnnnnnnnnnnnnnnnnnnnnnnnnnnnnnnnnnnnnnnnnnnnnnnnnnnnnnnnnn

SEQ ID NO: 111153 - DNA, 458 bp, Homo sapiens
  misc_feature (1)...(458): n = a,t,c or g
nnnnnnnnnnnnnnnnnnnnnnnnnnnnnnnnnnnnnnnnnnnnnnnnnnnnnnnnnnnnnnnnnnnnnnnnnnnnnnnnnnnnnnnnnnnnnnnnnacaattaattgctgacttctcatttaaaagaatgaaataaaatgtaacttttaaagtgctgaaagaaaacaactgttaaccaggaattctatacccagcaaaaccatccttgaaaaatgaaggcaacagaaagatgttcctatataaacagagatggagagaatttgttgctagcacacctgcctgatacaaaataattttaaaactcctcaggtnnnnnnnnnnnnnnnnnnnnnnnnnnnnnnnnnnnnnnnnnnnnnnnnnnnnnnnnnnnnnnnnnnnnnnnnnnnnnnnnnnnnnnnnnnnnnnnnnnnnnnnnnnnnnnnnnnnnnnnnnnnnnnnnnnnnnnnnncacacgaaa

SEQ ID NO: 111154 - DNA, 401 bp, Homo sapiens
  misc_feature (1)...(401): n = a,t,c or g
cacgtgctgaccactctgggtgagaggccgacttaagactttttggagaagtcgatggctgggcgggaggactgcaatggctgcatcaactatgaagcatttgtgaagcacatcatgtccagctaaacctcgtgcccaggtnnnnnnnnnnnnnnnnnnnnnnnnnnnnnnnnnnnnnnnnnnnnnnnnnnnnnnnnnnnnnnnnnnnnnnnnnnnnnnnnnnnnnnnnnnnnnnnnnnnnnnnnnnnnnnnnnnnnnnnngccacttggttgttttaaacctgaactcagtggtggcccacacttgactaccaagtgtgatatgtcagaaattccttgttnnnnnnnnnnnnnnnnnnnnnnnnnnnnnnnnnnnnnnnnnnnnnnnnnnnnnnnnnnng

SEQ ID NO: 111155 - DNA, 388 bp, Homo sapiens
gacgtgggaattacctcccgggttcacccacgcgtccgcgcatcttctggcggaccgtgcgaggtatgctgcctcacaaaaccaagcgaggccgggccgctctggaccgtctcagggtgtttgacggcattccaccgccctacgacaagaaaaagcggatggtggctcctgctgccctcaagggcgtgcgtctgaagcctacaagaaagtttgcctatctggggcgcctggctcacgaggttggctggaagtaccaggcagagacagccaccctggaggagaagaggaaagagaaagcctagatccactaccggaagaagaaacagctcatgaggctacggaaacaggccgagaataacgtggtgaataacattgactaatacgcggg

SEQ ID NO: 111156 - DNA, 441 bp, Homo sapiens
  misc_feature (1)...(441): n = a,t,c or g
gtccctcatacgattaaccaccgcncccagttcttcatctgcaccataaatacagactgggtgtttgtttagcatgtcgagctcggacacgtcagggagggcatggacgtcgtgaagaaaatataatctttcggctctacgagtgggaggacatccaagaagattgtcatcacagactgtggccagttgagctaatctgtggccagggtgctggcatggtggcagctgcaaatgtccatgcacccaggtggccgcgttgggctgtcagccaaggtgcctgaaacgatacgtgtgcccactccactgtcacagtgtgcctgaggaaggctgctagggatgttagacctcggccaggacccaccacattgcttcctaatacccacccttcctcacgacctcatttttgggcatctttgtggacatgatgtcccccaccccttg

SEQ ID NO: 111157 - DNA, 251 bp, Homo sapiens
gctcccccctccgccaaaaaaaaacatattactatagaagttaacacaggatggtgttggcacaaggaaatatagctcaacagaatactaaaaaatttagaaacaaacccatatatggacggttgtctcatttatgacaaaggtgacacagtacagtggggaaagaagaattttttcaataaatgatgctgggtcaactatatattcttctgcaaccaaagtgaatactgaccccctaccaaacacaatgt

SEQ ID NO: 111158 - DNA, 1099 bp, Homo sapiens
aaagaagcagctgatatgctataggcattacaaggagccagtcaaattattgctgaaatccgggagactcatctttggtgaagagaactatgtaatactgagactttgttgactcaaaacttgctagttactgcctacctgagtagaatcttatttatgaactcctgtgtattgcaatggtatgaatctgctcatgtggagactggctataaactgaaaagtgtattccaaattgcagaacacatcacacatttaatccaaataataaatggctgtttctaaagtttcccagtatatataaaatacatcaagtctgtcttgtgacagtttcatctgaacttaacttaaaaacaactgttaatgttctagttgtgcaaagcagtttgcctgtggataagatgacctgtgtaataatctttgttagtagtcttaaagctgctgccatagtcctccaagaagaaagcaccaagacaacatttcatatgactataatgcatgtactatataagctgatctggctttgaaagatgtgagttggcaagttcctcacatagagtcattgtattccacctgtccttcaatttagttttttctgagcttctttgcagcctttgatgtgtttttaagaaagctgaatgcacaagaggatctgtgacactgacatggctgtggtgtgcatactgtgtagttacatagcccttccaattctgggtccatttgcactagcaaattaaaatatgctttgattcatacttaaacctgaaagcaggaatgcctacattaattcctacattaaaaacagccatctacccttgattatctagaaagacttggtaatgatggtcagttccttttagatttcagaaaatcaaatgatgacctaaatttcccttaatttgcaaatacagtagtaattaaggtacatctctaaagtggagcacttacaccaggctctaagattcactttgaggtggaacttaaaaccagtgtactgtatgtatgcattggtaatagctacttttgcttcatagcttcataccaacaaaatatatttattagaatagtatgaaagtactggaggagctgaaagaaaaacacc

SEQ ID NO: 111159 - DNA, 662 bp, Homo sapiens
taatcctcgcgacgggcccaccactgccgcctgctgggccgctgcgtgggcttcggcaactaccggcccttcctgtgcctgctgcttcatgccgccggcgtcctgctccacgtctctgtgctgctgggccctgcactgtcggccctgctgcgagcccacacgcccctccacatggctgccctcctcctgcttccctggctcatgttgctcacagccttaaagcccactctcatcttgcaagcctctgaagccaccagttttctgagatgttcctcccggccccggagaccacggatgtggctaccttctcagaatatagatgtttccattgcggcaggccgcggcaagccggaactcaacatcaaactggccagaaacctctaggaagacggggacgctgggaaggctcatctgcaaacaagaagcgcaaacactccaatttctctggagcccccgtccctccctgccctgtcagtaactcctctgagtgagtgcctggtctaaagtcccaatctcctcacttacacccagtttaaactcatacagtttttcaggagggaaacttggggcaacatttagcaaaagccttttagtctgtgccttttgactaaacgatgccacttctaggactgcgatcctaaggatgtacttaaacaaccgtg

SEQ ID NO: 111160 - DNA, 203 bp, Homo sapiens
  misc_feature (1)...(203): n = a,t,c or g
cccacgcgtccgcggacgcgtgggttgtaggtggtaaaaaaaatcctttgttctcatggaattggcctattggcaagatcgcatgtttttttaataaacgctgtattttacaatnnnnnnnnnnnnnnnngggcggcccttcctaagggacccagctttaagaccccggcctgccaacttattactttttttttggggccccc

SEQ ID NO: 111161 - DNA, 294 bp, Homo sapiens
taagagacagggtccctctatgttgtccaggctgggctcaaactcctggcctcaagtgttcctcctgtctcagcctcccaaagcactgggattacaggagtgagccactgagcctgacccaattacaaatttattttcaaccctcattccagaaggaagacaaaaaaaaaataaaaagccaatatccacttaactgcaaatttcatgatgtccttataaagccagtgcattatattttctttcactcatgaagcaatttttaataatcacaatatatatttaaatgttaataat

SEQ ID NO: 111162 - DNA, 407 bp, Homo sapiens
  misc_feature (1)...(407): n = a,t,c or g
tcaactcgagcaagtgactccgccgacctgcaaaggtggccgatgacgtctggaagtgtctgtgttaaaccgaacaagtggctctgtgaaaaacgatatcttgactcgtaatgcgaacaagtggacagaaacatccgcagagtgaccagggcaggtattcttgatcagatcattgacatgacatcttacttgctggatctaacaagttacattgtatagtttctgggactgtttgaatattctattccaatgggcatttattttttatcctgtcattnnnnnnnnnngactgttatcctgctacacnnnnnnnnnnnnnnnnncctcggggggggcccgggcccccattcccccctaaagggggccgaataaacaatcctggcccgccttttaacaacggggggagg

SEQ ID NO: 111163 - DNA, 447 bp, Homo sapiens
  misc_feature (1)...(447): n = a,t,c or g
gaatccgacgagctgaggatgccctatctgacgccgagtttgagggggagggtgactactaggagggcatgtatgctgactggtggcaggagccggatgccaagggtgacgaggccgaggctgagccagagcctgaactcgcatgagaaggggacaccccacacccctcaagcttgggaagcctggtgccgatggccccaccctcaccagcctgggcagcagcaagaactatttattaaaaacttnnnnnnnnnnnnnnnnnnnnnnnnnnnnnnnnnnnnnnnnnnnnnnnnnnnnnnnnnnnnnnnnnnnnnnnnnnnnnnnnnnnnnnnnnnnnnnnnnnnnnnnnnnnnnnnnnnnnnnnnnnnnnnnnnnnnnnnnnnnnnnnnnnnnnnnnnnnnnnnnnnnnnnnnnnnnnnnnnnnnnnnnnnnnnnnnnnnnnnnnnn

SEQ ID NO: 111164 - DNA, 431 bp, Homo sapiens
  misc_feature (1)...(431): n = a,t,c or g
tgcccacgctctgcaggaattcggcacgagcacactggagaaaggccttatgagtgcaacaaatgtgggaattcctttagccaatgctccagcctcatacatcaccaaaaatgtcatagcacatagaggcctcatgaatgcagcaaatgtggaagcgccttcaactcaagatctatcatcatttagctcctgaaagtccacacttaagtagagccttagacctacagggaaagtgctgtctctgtagtatagtagcagtatagagcctttgtgagggagccatctgcctgaagttgaacctcattcttccttggttctctggtagaaaccatctaccctctaccaccttgcacagtgggcactggtcactcctatgtgctaagacaaggcagacatctgngtgttctcttaagtctttggaggaaatcttg

SEQ ID NO: 111165 - DNA, 428 bp, Homo sapiens
  misc_feature (1)...(428): n = a,t,c or g
agaactgtctgcgagcagaggtctacccagaaggacccagttccttaccagcctccctttctctgtcagtggggacgtcatcagccaagctggaagccattaatgaactaattcgttttgaccacatatataccaagcccctagtcttagagataccctctgagacagagagccaagctaatgtggtagtgaaaatcgaggaagcacctctcagcccctcagagaatgatcaccctgaattcattgtctcagtgaaggaagaacctgtagaagatgacctcgttccggagctgggtatctcaaatctgctttcatccagccactgcccaaagccatcttcctgcctactggatgcttacagtgactgtggatacggnggttccctttccccattcagtgacatgtcctctctgcttggtgaaaccatn

SEQ ID NO: 111166 - DNA, 532 bp, Homo sapiens
caattatacatgtgtcaggatgtcaaaaagcaattctcctgcctcagcctcctgagtagctgggactacaggttcctaccaccacacccggccaatttttgtatttttagtagagatggggtttcaccgtatcggcgaggatgatctctatctcttgacctcgtgatcttgcccgcctcggcctccccaaagtgctgggattaacaggcgtgtgcccactgcgctcggcctcagattccatatttgaaccccagctgattgagagaaggggaatgagaagagctggatgagtttaaataactttcattgttcagattcctgaacaggagttgggataatggccatcttttctttcctatcctttttttcccccctccctgtgaaaaataacaagtccaccccaagtcatacactggacccaagtgcctgcggggacaggactgtgggtttcttggtcacacctgtgttggtgctcaatgcagtgtagacatgttttcaaataaaacaaatgattgtgtacaaaaaaaaaaaa

SEQ ID NO: 111167 - DNA, 477 bp, Homo sapiens
  misc_feature (1)...(477): n = a,t,c or g
aggatcatactccagtgtcggtggagnngtggagactatattttatttgtctaaaatatatgtttttaaaatgtgttcctcaatagctggtaaaggacaaagccagggagttgagagcaaagggtatgcacgagctgagatagcaggatatttggaaaagttattgtttcnnnnnnnnnnnnnnnnncccggcccagggcccccccccggggaaaggcccttgggggggaaaaccctttttaccggcctcctgggcccccgcccctaaattttcccccggggggggcccccaattaaaaaaagggttggtttgaaaaccaaaaaaaccggggttggattggatcccccaggaaccgggaagggggggccatttttttaaccccccccacccttaannnnnnnnnnnggtaaaaaggggatataagggccaaaattttccctttatttaaggccccgggggggggtgggccccaaaaa

SEQ ID NO: 111168 - DNA, 1664 bp, Homo sapiens
ttttttttttttaatcctatacaagcctaaaaaccattcttaactcagggacacggacacacacacacacacacacacacacacacacacacacacacacacacacaccaggtcacaggctgaactttgctgacccctggcttacatacagcatctcatttaaatggcgctcatttccagtgttcatattttcatctgtggccaaaatcatgatggctttagcaattttatattctaagccatttcctaaacttaagcttctcatgtttaggattacaaccttgttttcactatattcttggaaattaccgactttcctcagcctggaaagatttatttccaattcactttcacataacctccaaatttgttacttgaaaagtcaaggaagatgaagaggtaatcccagggcacagcttaggccaaaataacccaaatttctggggaagctgccactttactattaacctcaaccctgacaattatcttgcaaatggataattgataaatcatttaattactatggtccaggttcaaatatgtatcattttactgccttgttaccagttatgccatacaaagcacagtaaataatgaagtttctgggcttttcttagttaacctgaagatctcgctggtacatgttcagacttgctaaaacttatttacatatttgtctcagtataatccaaaacgtctgggttataatctattttctaagtgtttactttagaaagtaaaattgcatgcacctgagatccctggaatttgctataccattggactggaggtccactaatatacctgaataatcttacctctaaggtcaacatcagttaggttctagtaacttcctatttctcattcctttgaaccttttaacacctgttgtttccttccacatgatggtactttcctaaagacatgttaggttggtacaaaaccaattgcaccaacatagtattttcgaaatccaatacacatttaggctttgtatgcaactccctgttatatttcagtgcaaccatctctggcaactagaaaaataacaaaattagaatgaatacttaatatcctccttttaaatccataccaaaatcaagccccaaatatatttacaaccctggaaatgatgtgtactacttttatttaaaaaaataagagtaaaggaactaactagatgtatatggtgccaatttttaaaagtcttgcttaactccacaggtctcaaaatagctaataaagaaaccatgtctccaatcatttcaatacaagctgtaaaaatgccttaaaaatctcaggtctggcattacttccatttaaacgcatcaagataaaagttcactgaaacatcagctgccaccattactttaggaatctttatctgtttagggatttttcccctagactattatagccagtttgtcaatcaaaagtagcattcagtatgcttaactttcattatcaaaaaagtgatctgctaggaagtgacaatcagattaaatccaagaagtccttggattttgtattttacaagaattcaactttcccaattaagtcattagtcattaagataagtacccttcccaaatgtgattcaacagcctggtttttagcaaataaaaaccccatataaaattcaatttaaaaattataaacacaca

SEQ ID NO: 111169 - DNA, 625 bp, Homo sapiens
attaaagacggagtctcactctgtcacccaggctagactgcagtggcgcaatctcgactcactgcaacctccatctcctgggttcaagcaattctcctgtctcagcctcccaagtagctgggattacaggcacgcaccacgatgccaagctaattttttgtatttttagtagagatgggggtttcactatgttggccaggctggtctcgaactcctgacctctggtgatccacctgccctggcctctcaaattgctgggattacaggtgtcagccaccgtgcccagcccatcagttatttttgaattaggggcatgaggtcagagctgcactttgggagatctctctggccacattggtgaggtggggcaggaaactccagaggcagaagacggtcaaggtcttgacaatggtcacacgggagggagggactcctgcctagaggtgacggcccaggaaatgagggccatgaaaggaaagaagcagccagacttggagcaggaaaggggaggccatggagagagaaaagctagatatgacttgagtttccagcacaaaagactgagaaaagagtgatttaataaggagaaaggaaagaggaaggcagaaaggagggctgctcacag

SEQ ID NO: 111170 - DNA, 538 bp, Homo sapiens
gctcgacatttatccaaaaagatattcacctaggcgcattttcatcaggttatccaaagttaagatgaaggaaagaattttaagagctgtgagagagaaggaccaggtaacatgtaaaggaaaacctttcagattaacagcaaatttctcagcagaaaccatacaagccagaagggattgaggccctatcttctgcctcctcaaacaaaacaattatcagccaagaattttgtatccagcaaaactaagcatcatatatgaaggaaaaatatagtctttttcagacagacaaatgctgagagaattcaccattaccaagccacccctacaagaaccgctaaaaggagctctaaatcttaaaacaaatcctggaaacacatcaaaatggaacctctttaaagcataaatcacagaggatctacaaaataaaaatacaagttaaaaagcaaaaacaaaaccaaaaaaatctgcaggacccaggagaccaccccccaaaaaatgtgagtgctccaactgtggaagtaggaaaggaagagca

SEQ ID NO: 111171 - DNA, 451 bp, Homo sapiens
  misc_feature (1)...(451): n = a,t,c or g
ggtggaattcccaatgacaaggctactaagaaattcatcatttgaaacgtagaggccgcagcagtcagcgatgtttctgaaatgagcatccttgacgcctgtgtacttcccaggctggatgtgaagctacattaccatgtgagttgtgccattcacagcacagtggtgaggaattgagctcatgaagcaggcaaggaccgaacacctccaccccaacgtagacctgcaggtgctgccccatgacctccaccaaagcccatataaggagcggagttgttaaggactgaagaaaaacttctctggagaaaaataaaattgcaattctacttannnnnnnnnnnnnnnnnnnnnnnnnnnnnnnnnnnnnnnnnnnnnnnnnnnnnnnnnnnnnnnnnnnnnnnnnnnnnnnnnnnnnnnnnnnnnnnnnnnnaaaanaaaaagggggcccttg

SEQ ID NO: 111172 - DNA, 445 bp, Homo sapiens
  misc_feature (1)...(445): n = a,t,c or g
natcagcattttaaatgcataaacctggccaagcatggtggtgcatgcctataannnnnnnnnnnnnnnnnnnnnnnnnnnnnnnnnnnnnnnnnnnnnnnnnnnnnnnnnnnnnnnnnnnnnnnnnnnnnnnnnnnnnnnnnnnnnnnnnnnnnnnnnnnnnnnnnnnnnnntcaactattaaacaggaaattctttgcagaaatgtatcctacacatacaaccttgaaatgatattagtgcaaacactgcaataaaaaaattctggaaacttcctaagtgtccaaccacagagggctggttaaatacatgattgtatattcatttagtggagtattatgcaactcttaaagtgtgtggagatatacatgataaggtagatttacatattatatgtaaacctgtacctgttctgttattaaggaattccaccgcactgtacgag

SEQ ID NO: 111173 - DNA, 459 bp, Homo sapiens
  misc_feature (1)...(459): n = a,t,c or g
gatcactagtcagtgtggtgtaattccccctcagaggtgggaggtgggaggggccctgggctgcctccctgatctccgtcttcctctggcttcccagggcactggtctgtgggtagaatgtttctttagaagaaggagaacaacgggctgttttgggaagtctgcctgggaccccagctcagcttcgtggcagggatgtgtgcctggcagccccaggggccctgctgggcctctcagtgccctgtcttatgaagggaggtcttggcttcccacaggtaatcctcagctctgacggcaggtggccctaggggaggggcctggaagaggactccctcaccacagtcaggagcattccactggcctgttttatgttttggggcttccccatgaattccaatttaggaaaggattctgtagctttnnnnnnnnnngccatacatggccgggcgtggtgactcg

SEQ ID NO: 111174 - DNA, 444 bp, Homo sapiens
  misc_feature (1)...(444): n = a,t,c or g
atcagcattttaaatgcataaacctggccaagcatggtggtgcatgcctataannnnnnnnnnnnnnnnnnnnnnnnnnnnnnnnnnnnnnnnnnnnnnnnnnnnnnnnnnnnnnnnnnnnnnnnnnnnnnnnnnnnnnnnnnnnnnnnnnnnnnnnnnnnnnnnnnnnnnntcaactattaaacaggaaattctttgcagaaatgtatcctacacatacaaccttgaaatgatattagtgcaaacactgcaataaaaaaattctggaaacttcctaagtgtccaaccacagagggctggttaaatacatgattgtatattcatttagtggagtattatgcaactcttaaagtgtgtggagatatacatgataaggtagatttacatattatatgtaaacctgtacctgttctgttattaaggaattccaccgcactgtacgag

SEQ ID NO: 111175 - DNA, 418 bp, Homo sapiens
  misc_feature (1)...(418): n = a,t,c or g
cctgcaaactttttcttccagggttcaaggatttttaaggcctcaccccctgaggtactgtgaattcagggccggggcccccaggcccagttattttttgggctttttagtaaaggccggggttttctttggtgggccgggtgggtttcaaattttgggcccccagggatcggtccccccgggcttccccgggggttgggattccggggttaaccccagggcccgggcttaaggcccagttttgggtggctggttggggctttgggaaacccnnnnnnnnnnnnnnnnnnnnnnnnnnnnnnnnnnnnnnnnnnnnnnnnnnnnnnnnnnnnnnnnnnnnnnnnnnnnnnnnnnnnnnnnnnnnnnnnnnnnnnnnnnnnnnnnnnnnnnnnnnnnnnnnnnnnnnnnnnnnactaag

SEQ ID NO: 111176 - DNA, 368 bp, Homo sapiens
ttttttttttttttgagacacagtctcctctgtcgcccaggctggagtgcagtggcgcaatctcggctcactgcaagctctgcctcccaggttcacgccattctcctgcctcagcctcctgagtagctgtggtcacctcaccagaaatcaaatactgcaccgacctggtgaaatccctgagtctattcctctagggctgagactgttgagctcatctttgtgtcctcaggtcccatcttggttctcaatacaataagcatttaattcagtgaccatgaggatgaggggagccagagagtatagagctaaaaggtgctgaacagaatctcaattcagtatctagacacacaagcttcccggaacctgag

SEQ ID NO: 111177 - DNA, 526 bp, Homo sapiens
tttttttttttttgagacagtcttgctctgttgtccaggctggagtgcagtgatgcgatctcagctcactacagcctccacctcccaggctcaagcgattctccctccccagcctcccgagtagccgggactacaggcgtgcaccaccacacctggctaatttttgcatttttagtagatagtttcaccatgttggccgggctggtctcgaaccgccgacctcaagtgatccacccaccttggcctcccaaaatgctgggattacaggtgtgagccaccatgtctggccaatatccactatttttagtaaatgatagccatgattactgctgccaccttcattattgacactcaaatgtcctctgctctgagtgcttattttgcctttctcttctaggatatccctgttttctgggtctctcctggtgtccagccattaccacaggcacagagatggattcctctacacttgggaaaccccaaggctgaccccagccagggatgcatgtgggttacttgggaatgg

SEQ ID NO: 111178 - DNA, 367 bp, Homo sapiens
ctcccaaagtgctgggattacaggcgtgagccacagcgcctgggccttattttttttgttttatagagatggggtctcactattttggccaggttggtcttgaactcctggccccaagcagtcctcctgccttggcctcccaaagtgttaggattacaggtgtcagccactatgcctggcctttattttcattttatattgcatacttgtgggtgtctggaaaatgccccttgttagttgcatgaagtgaaggagaataaaaggcacttggagcttatttctcctgcagtggtctctaatctttgaggtgtcctgggtctcttttgggaatctgattctcataaaataaaagctcataaaaactgtg

SEQ ID NO: 111179 - DNA, 418 bp, Homo sapiens
tgggctcaagctatcccactgtctcagcttcctgagtagctgggactacaggcgtgcataaccacccctggctaatttgttttgattcttagtagagatgagtcctcgccatgttgcccaagctgatctcgaactcttgggctcaggcaatcctcctgtctcagcctcccaaagtgctgggatttcaggcatgagccaccgtgcccggcccatttaacttcatttcattaaatttaagctccaattagcacatggggatactggctcccacgctgggctctgcaaatccagtttctgactaccttcttggggttgctgtgaagagtaagcaggccatccttaaaatgcccaggacaaagcctggcacatgacaaatgctcaacaaaagcgaggtcccttccctctgggttctgagacc

SEQ ID NO: 111180 - DNA, 556 bp, Homo sapiens
  misc_feature (1)...(556): n = a,t,c or g
gatgagcagcctgaaggagtgaccaagagggaagggagcagtcagctgcacaaagcaagggaaggccagagcagatggtgaggccagcctggggctgatggttcatgccctgtagggacttgggtgcccttgatgtctgctgccagcagccccagcccttgcccctgaccaccctccatcctcagcctgtcaccatccttcagcagagatgaaatgggtcctccccctcccgtccccagaggnnnnnnnnnnnnnnnnnnnnnnnnnnnnnnnnnnnnnnnnnnnnnnnnnnnnnnnnnnnnnnnnnnnnnnnnnnnnnnnnnnnnnnnnnnnnnnnnnnnnnnnnnnnnnnnnnnnnnnnnnnnnnnnnnnnnnnnnnnnnnnnnnnnnnnnnnnnnnnnnnnnnnnnnnnnnnnnnnnnnnnnnnnnnnnnnnnnnnnnnnnnnnnnnnnnnnnnnngctcctcctacctcnccgccccggtgcatccctttggaaagacacccgcctaccttcccactctagtactntaagcgctcgctgcctactagacgag

SEQ ID NO: 111181 - DNA, 526 bp, Homo sapiens
  misc_feature (1)...(526): n = a,t,c or g
nnnnnnnnnnnnnnnnnnnnnnnnnnnnnnnnnnnnnnnnnnnnnnnnnnnnnnnnnnnnnnnnnnnnnnnnnnnnnnnnngaaagatagaagaagagagaggagagaggagaaaggagagggtagaagggagagaggagaggggagagggggagaaggagagaggagagaggaggggaggggaaggcagggcaaggcagggcagggcagggcaggttagtggaggagaggagaagaaagtcnnnnnnnnnnnnnnnnnnnnnnnnnnnnnnnnnnnnnnnnnnnnnnnnnnnnnnnnnnnnnnnnnnnnnnnnnnnnnnnnnnnnnnnnnnnnnnnnnnnnnnnnnnnnnnnnnnnnnnnnnnnnnnnnnnnnnnnnnnnnnnnnnnnnnnnnnnnnnnnnnnnnnnnnnnnnnnnnnnagaagagagagaaagacannnnnnnnnnnnnnnnnnnnnnnnnnnnnnnnnnnnnnnnnnnnnnnnnnnnnnnnnnnnnnnnnnnnnnnnnnnnnnnnnaagggag

SEQ ID NO: 111182 - DNA, 423 bp, Homo sapiens
  misc_feature (1)...(423): n = a,t,c or g
cggtcgaagagagagaaaagaaagccgggtccggccaaaatgttcctgccgaaaaagtggcggaaaagcttgaagctctctcggtgaaagaggaggccaaggaggattcttaggagaaaccattaatcgtcctaatttaatttcttttcccctccttcccttcccttttttaaaaaattttaccccgcccctccttttcgggttggttttattccttcccttttacaaagggcgttatataaaaaactgaactcaaccttcagggtggnnnnnnnnnnngtttctaagtttttgccctattgaagatgacttcagaaaatccattccccagtcatgaaaatgtactgtgctaactttcttttccatagtggaaacacttatttatagtcatcaaaaatagtgaataaaaaacacatttggaac

SEQ ID NO: 111183 - DNA, 470 bp, Homo sapiens
tgagatggattccactcttgtccaggctggagtgcagtggagcaatcttggctcactgcaacctctgcctcccaggttcaaggcattctcctgcctcagcctcccgagtagctgagattacagatgtgcaccaccacgcccagctaatttttgtatttttagtagagatgggtttcaccatgttggccaggctggtctcaaactcctgacctcaggtgatcttcccaccttggcctgaaagagatacttacaaaaagaaaaccacactttcttaaaaaattagaagtaaagctttgtgttcccagggtaaagcagaatggctgagagcaaatatcaggtttagttttgctgtcttaatatgccaaagatttttgaccaacagaaaccctatcaatttaccagatactaacaacagcaacaacaaaaaattgctaccagcaaaggaatggagcttagaacagccacattct

SEQ ID NO: 111184 - DNA, 724 bp, Homo sapiens
gtggaggtgccctcggctgtgcccaggcctactttggataccagcagagcagctacctgtgccccagggcatgctgttcaccacccccagtccctcagctggcccagaactgctggcactgttggaggcagccctgcgctccggggcgcccatccctgacccctgcccaccgttcctgcagactgctgtgagccctgagagcagtgccctggccgccgtggacagcagcggctctgtgctccttctcacctcctcgctcaactgctcctttggctctgcacacctgtccccaagcactggggttctgctcagcaacctggtggccaagtctaccactagtgcctgggcctgccccctcatcctccgtggcagcctggatgacacagaggctgatgtgttggggcttgtggcttcagggacccctgatgtggccagggccatgactcacaccctactcaggcatctggcagcaaggccccctacccaggcccagcaccagcatcagggtcagcaagaaccaacagagcatcccagcacttgtggccaagggaccctgctccaggtggcagcccacacagagcacgcccatgtctccagtgtcccccatgcctgctgccccttccaggggttctaacaggatgggggtgggtctggcagaaggcagagttatttgaagcatgggggcaggagcagagcagacacagcagcaatggagtgtgcaccc

SEQ ID NO: 111185 - DNA, 634 bp, Homo sapiens
ttttttgtggatggggacttgtgaatttttctaaaggtgctatttaacatgggaggagagcgtgtgcggctccagcccagcccgctgctcactttccaccctctctccacctgcctctggcttctcaggcctctgctctccgacctctctcctctgaaaccctcctccacagctgcagcccatcctcccggctccctcctagtctgtcctgcgtcctctgtccccgggtttcagagacaacttcccattagcacaaagcagtttttccccctaggggtgggaggaagcaaaagactctgtacctattttgtatgtgtataataatttgagatgtttttaattattttgattgctggaataaagcatgtggaaatgacccatcccaaaaaataagaacttatttaaaaattgggggggcctcttttagaacatgccatttacctgcggggtggtgggaagttttactttttttattgggccactgaataaaatctgtcggggccgggtttataaagaggggtgagggaaaaaccttggggttcaccaaatatattaccttttgaaaaaagatactgcctagactaatagcctcctaactgatcttcatatatccattctttcctcttctgaatcg

SEQ ID NO: 111186 - DNA, 445 bp, Homo sapiens
  misc_feature (1)...(445): n = a,t,c or g
nnnnnnnnnnnnnnnnnnnnnnnnnnnnnnnnnnnnnnnnnnnnnnnnnnnnnnnnnnnnnnnnnnnnnnnnnnnnnnnnnnngtgtcttatcttaaattgcattnttctagttgtcttggcttccactacatgaagataaagaagaagctgttcagactttcaattatctgtgtgacctgattgaaagtaatcatccaattgttcttggcccaaacaataccaatctgcccaaaatatttagtataattgcggaaggagaaatgcacgaggcaataaaacatgaagatccttgtgccaaacgtctggccaatgtcgttcgccaagtacagacttctggtgggtgacattaaggcccttcacgcagagttcaggagctcctgaatggcggcctgctgctcaggactgagctgtgctatgcactcagcggacgcgtgggtcgaccc

SEQ ID NO: 111187 - DNA, 412 bp, Homo sapiens
  misc_feature (1)...(412): n = a,t,c or g
gtatccccgcccttttggagggccaggccggccaatcccaaggtccggagtttcaggcgcgcccgggccacatggttaacccgcccccccccgccttttctnnnnnnnnnnnnnnnnnnnnnnnnnnnnnnnnnnnnnnnnnnnnnnnnnnnnnnnnnnnnnnnnnnnnnnnnnnnnnnnnnnnnnnnnnnnnnnnnnnngggcaattaacttagatcgcccccccgccctcccnnnnnnnnnncaaagccagcccccgtttcnnnnnnnnnnnngaaaagaaagggacacttttaatcacaacccagaatttctgatcagttctctcagtggatagttccagccccctctgagaggtagctgtttctgtttagagtgaaacaaggtgctctgggcctgacaaacagctcag

SEQ ID NO: 111188 - DNA, 423 bp, Homo sapiens
  misc_feature (1)...(423): n = a,t,c or g
cccctgggggaaaaccaaggctccctccctccactgggggcccccctccttgggccccccaaagcctcaaccctcccccccaaaggtttattccattaacccccccaaagcttggcttaccccccaaagttttcccttttttgaggcccccctaagaaggggtggggcccggccccccctaaccccgggaaggttctttccttttccnnnnnnnnnnnnnnnnngaccactgtaactttataagaggtgggtgccatccctgttttgcagatgggttaaccaaagtccaagagactaagtcattttctagccacaggactagaaaagccatagctgggctgagattcaagctcattctgtctgtctttgccagcaaagctcaagtttttccactgtgctacatgtacggagcacatgctgagc

SEQ ID NO: 111189 - DNA, 393 bp, Homo sapiens
  misc_feature (1)...(393): n = a,t,c or g
gtgtccctgctcagcttcctcttcaaggcgccactagtcccgcccggcagcccggtggtcaatgcgcttttccgccagcgcagctgcatcgagaacatcttcagggcctgcgtggggctcccgccacagaaccacatgctcctggaacacaaaatggagcgcccagggcccagcctcaagcgagttggacccgtggctgccacctaccttatgttgaacaagaaaggaccggtacccgctgccaccaatggctgcaccggtgatgccaatgggcatctgcaagaggagcccccaatgcccaccacctgaggccccggtcacacagtttctcggctcttcctccccgctgccccccacgaccatacaatgaagcggnnnacaaataaaggcgct

SEQ ID NO: 111190 - DNA, 1084 bp, Homo sapiens
ttttttgagacggagtctcgctctgtcacccaagctggagtgcaacggcgccatctcggctcactgcaacctcctcccccttggttcaagcgattttcctgcctcagcctccagagtagctggggttacaggcacgtcccaccacaccccggctgatttttggtatttttagtaggagacgggggtttcactatgttgggccagggctggtctcaaaactcctgcacctccaggcgatccacccgcctcagactggcccagccccttttctctcaatttaaaaactgctttaaaaactgcaaatcaagtattgggttaataccactttactattattaactgattcctctaatattccagaaagagcacaagattttttccatttttgatagctgcctattgtcagttttaactggagctgaaaaacagaagacttaaataaacttgaaagccatcatcgagttttaaaaagggacactgaaataatccttcttgaagatattttctttaacagccacttatttctaccctgcaaaaagcttgaaatataaagtgtagtatttaaagcaccatacaaaataaaaaaaccagacaaaggagtaaggtatgttccaatttaatctttatgcaggcaaatttgtaaaaaatgttaatcacatctacatgaagtcgcaaaagagatgcaataattattgctcacttttaaacattaccttatattacagaaatttagggtacttactctcatcagtattccatgccctacaagttaaataactaaccaaattttcgcggtttattcctgctaggaaaggaaacagttccttagaaatttacttcgctttaaatcttaaagacataaattgagggtccatactttgtttagtgcttatctagaagaatgcattgccccatcacatactcaggtattgatgttcagattttagaaaactatcattgttcatactaaaaagcatcacagttgactgtttttacattctgtttcctcctgtgatctttctgaaccaataataaacagtcaactgtgatgctttttagtatgaacaatgatagtttattattg

SEQ ID NO: 111191 - DNA, 533 bp, Homo sapiens
ctttttttttttttgagatggagtcttgatctgtcgcccaggctggaatgtagtggcgcgacctcagctcactgcaacctccaccttctgggttcaagcaattctcctgcctcagcctcctgagtggctgggactacaggtgcacgccatcacacccggctaatttttgtattttagtagagacggggtttcaccatgttggccaggacggtctcgatatcctgacctcatgatccatcaactcagccttccaaagtgcagggattacaggcgcgacgcaccgcgcccggcccaggaacttggattttttttaaggcacccccactggggatatactggcccaggtgattaacttcagcaccaggtggtaacacctggaaattggttcccagttgctccaagtttccagttagggtccttatgatttgaaggataaaatgtgaaatgggttcactattagttcaaaatatatttagtgtacaaataagcttaaaaggctagaaaagaaaagggcactttaaagaagaactttt

SEQ ID NO: 111192 - DNA, 966 bp, Homo sapiens
  misc_feature (1)...(966): n = a,t,c or g
aaaccatcttcctcagaaattgaaattttagagccgctcttgctagcatgtgaaaccttttccttgcttattgccttttggcgggggcagtgaaggaggagcctggcctttcaaaatgtgatcaaaaaaataaccaaactccagggctcattagtccttttataaacgccggtgtgaaatgatgggtatgcgtgtgcctggtccaagtgtcctggtggttgacttgggcgaataaaaataagacatgttctgcagagttctcccttttaaattcttgtgtaatattccgtttgttttgctcctttgcaattaactacaaacttctaagtcctagaaaagatttcaagtatttatagagtgagcaacgatcattttcctagtcaaatagtatggcaaaaatcactgttttaaaaagttgtgggcattaaactataaatcctccctcccctcgcttcccacccccaattatgaaagaaaagcatatgacaatgcctactgggctcagcttttgggctaattgagtctgactgagccttcttagcaggttcctgtcttttgaaacctcaaatcccaaaaagctgtctaataattttacttttttagggactaagaccaggtattttcagcagaggttcttacttttctgtaattgaggcgcaactataatgttccagaacacaatcttaaatctgaaagtgagaggaagnnnnnnnnnnnnnngggggggccgttttaagggatcaaggttaactaacgcgggctggcaaggtaaaatcttttttatggggcccccaaaatcaaatccccgggccggggtttaacaacgcggggacgggaaaaccccgggggtaccccaattaaatccctttggggaaaaanannnnnnnnnnnnnnnnnnnnngtgggttttggggnnnnnntnntgggggggtgggggggggtatttgtttgttgggtggggggggg

SEQ ID NO: 111193 - DNA, 525 bp, Homo sapiens
  misc_feature (1)...(525): n = a,t,c or g
tttctttaactagattactgagttcagggtggagctcattaataagtagggcaaacagagcattttctattcctggactcagcatggatagaccagaatcttttataaacaatacttctaacctttacttacagtcagaaacacgttaatcctttttctttttttctttttcnnnnnnnnnnnnaaaaaactaagcccggtttgggggcccacccagggtggaggtcaagggggggggtctaggttaatggaaggcccggcctccggggttaccccctttttttggattaagcctccaaggaagggggggttaaggggcccggccacaaacccgggtaatttttggatttttaagaaaaaagggggttttccggggtaacccgggggggcccgaatccccggccctggggaccggccctcctaaccccccaaaggggtggggataacggggggggccaccaaacccgggccaatcnnnnnnnnnnncccaaaatgagagggcccagttgggggtgggtagttttt

SEQ ID NO: 111194 - DNA, 472 bp, Homo sapiens
ttttaagagacagggttttaccctgtcgtccagtctggagtacagtggtgatcattgcttactgcagcctccaaacctccaacccctgggctcaaatcattctcccacattagccttctgagtagctgggattacaggtgtgtgccaccacaggcctctgcaaactgcccttttttgtctgtaacatattcgtcttgctgccctcttcgtagcatgcaaagtcaggcccttgtcctcgcttccccagaaacctctctgctctggatcgcaaatttcctttactaagtgctttagtggtctcctgtctacagagcaggctcaggcagacccgcgcaggctcactctcctgatgagagcagacaggggtggacagaggaacaatgtgtttttcacccaggcaacacaccaatttagactgtggacaggggaggatggagggccggacgcgtgggtcggtccgggcacattcacg

SEQ ID NO: 111195 - DNA, 576 bp, Homo sapiens
gcggccgcgtcgacttttttttttttggaggcagggtctctccgtagcccagcctggactacagtggcaagatcacggctcactgcagtctcgaattcttagaatcaggtgatcctcctgcctcagcctcccgagcagctgggactaccagggcataccaccacgcctggctaatttttgtactttttgtagagacggggtttcatcatgttgctcaggctggtctcgaactccttagctaaagcaatctgcccgccttggcctttcaaagtgctgggattacaggtgtgaaccacccgtgcctggctgactacagtttttttaaattgcacgtttggtcctttgaacttgaccactgtgggggcattccatgccttcctccactgccgcctttttcccaagctgaaaagacaaggaagatgtggcatcaaattaactagaaagagcacgcctgtgacttcccatcaccacgtaacaacaggtgcatatcaaagctgtactcaagaaaaggtagacatagaatgataaatcccccaaaatgcagtaagaggaaaaaagtacaaaacatgatttatt

SEQ ID NO: 111196 - DNA, 414 bp, Homo sapiens
gcggcgcgatctcggctcactgcagccttagcctcctgggttcaaacagttctcctgcctcagcctcccaagtagctgggattataggcgctggccaccatacccggctaattttgtatttttagtagagacagggttttaccatgttggtcaggctgttctcgaactgctgacctcagatgatcctcctgcctcgggctccccaagtgttgggattgtaggcgtatgccaccgtgcccggccagaattttttaagataaaacatttcatgttagtgaggctaagcaatagaataagataccattgactgcataaataatgggactctttcttttttttttctttttgagacggagtcttgctctgtcgcccaggctgcagtgcagtggccagatcttggctcactggtcgacc

SEQ ID NO: 111197 - DNA, 723 bp, Homo sapiens
tttgcttctttcacttttttattttattttttgagacaggggcctgctctgtggtccaggctatagtgcagtggttccatcagagctcactgcagcttctaactcctgggctcaagcaatcctcccacctcagcccccagagctgctgagataacaggcgcatatcaccacacctggctagtttttaaaatttattttttgtagagacggggtcttgctatgtgacccaggctggtctcgaattcctgagctcaagtgatcctcctgcctcagcctcttaaagtgctgggattacaggcatgagccatgcacccctacttctttagtgggagtctgtgccacagctgtggcacacaggtgtccctagttattaaattagactttgtggtattttccccatcaggatgttcacacttccatgtggctaaagctattgatcttttctgttctggctcctgagctgagattttcttaaactctttctggatgaaatctttatttcatcaggctggtggcgtccacggcctcaactttacctccgtgatggaagagggggatctgaggctcccaggtgggccggcgccgccctacaggaaaggaggggtccctgggaggggctgctgccatggtggggttcacaggcccctcactgcaggggacccggagcaagggatgccccctggaatggccccgtgaccggaaagcgagcctgcccagcttccc

SEQ ID NO: 111198 - DNA, 363 bp, Homo sapiens
  misc_feature (1)...(363): n = a,t,c or g
ctggaggaattccattacctggttttaaattataccactaagttatggtaattaaaacagcatgacactaacataaaaacagacataaagacagatggaatgaaatagagaccttagaaacaaactcatacagctaaactgaacttactttcaacaaaagtgccaagaacatacaataaaaaataagacaggttttgnnnnnnnnnnnnnnnnnnnnnnnnnnnnnnnnnnnnnnnnnnnnnnnnnnnnnnnnnnnnnnnnnnnnnnnnnnnnnnnnnnnnnnnnnnnnnnnnnnnnnnnnnnnnnnnnnnnnnnnnnnnnnnnnnntttttacaagaaaacattggagaaactctttagggg

SEQ ID NO: 111199 - DNA, 341 bp, Homo sapiens
  misc_feature (1)...(341): n = a,t,c or g
atgacttagcaaggaattctactcccttgcttctccatgtcctctgaagaaagaggaagaatctactctaatacggtttctttcnnnnnnnnnnnnnggaaggggggtccctttttccccccgggggggggccgggacaaaaaccccagtttattggaaccccccccctcgggcttaaccccccaaggaccggggatgggggggnnnnnnnnnnnnnnnnggcaaaannnnnnnnnnaaaaaaaaaggggtttcccccggggggcccggggggttttgaaccccgggcccaaggggagcccccccccttggccctccaaaggccgggaattaacgggggag

SEQ ID NO: 111200 - DNA, 365 bp, Homo sapiens
  misc_feature (1)...(365): n = a,t,c or g
attgggggcccggcccggttggtccagcccgttaaccccccccctttgggggcccaaaccaggggggccccttaggcccctaatttaaaccccccctggcccccttgttaaannnnnnnnnnnnnaaaaaggtttgaatttttttcccgcccggggggtcgggcccattggtcccccctcccccgggggttaaaaaagaaaatttccctagtccccgagggttagggcccccttaagttaaaaggcccgcccccccgccttttccnnnnnnnnnnnnnnnnnnngcataatagatatgggtcaggaacttaatacaaatattacattatctcttctggattttgtgatgtctatgtaggcatttt

SEQ ID NO: 111201 - DNA, 982 bp, Homo sapiens
tgtgctctcagaacacacaggattgtgataaagctgccacctttcagttgacctatgaacccacaatttatggtatttttgagatagtttcgctcttgttgctcatcctggtatggggtggcattacctgagctcactgcagcctccacttcccaggttaaagtgattcttgtgcctcagcctcccaagtagctgggattataggcgaatgccatgatgcctggctaattttgtatttttggtggagatggggtttcagcatgttggccaggctggtctggaactcctgacctcaactgacccttctgcctcggcctcccaaagtgctggtatcacaggcatgagccaccatgcccatctgcaaatccagtgttcaaacaattccacactgtaaatacagctctcaagattgaaggtgtcttaagcagcagagactttattataatacaaacaagggaaataggcggcaggcaggctgtctgatttgtgactggcaggctggaaaattctatcttaagaatgctgtgagggccgggcacggtggctcacgcctataatcccagcattttgggaggctgaggcaggtggatcacgaggtcaggagatcgagaccatcctggccaacacagtgaaaccccatctctacagggaggatataagtgtcaaggtctccagcatcacgtcccggtacaggcatctttgagcctcattaagaagactccattcctccagggaaaagtttacagccccatcttcaaaggtcacactgctatgagcaggcgccctcagagcggctgctgcccccatgactttgggcgggggggggaacgcgggctcggcggtgttcctgtcgttgtcctgtcccgggtcgcgaccagcggcgtcgccgaacctcagatccgcctgtgtgcaatggccacaaccactcctcccgagctcgtccagacccagcatcgccggatggacctgacaggccaaaatg

SEQ ID NO: 111202 - DNA, 769 bp, Homo sapiens
  misc_feature (1)...(769): n = a,t,c or g
tttttagatggagtcttgctgtgtcaccaggctggagtgcagtggcgtgatctcagcctcccgagtagctgaagtatgagaattgcttgaacctgggaggcagaggttgtagtgagctgagatagcgccactgcattccagcctgggtgacagaaggagactctgtttcaaaaagaaagaaggaaaaaggtaagccacatagtgggattcatatccaggatatgtaaggaattcctaaaatcaataagaaaaagacaccattaagaaagtaaaaggtgggttgggcatggtggctgcaaaaattcttaaacaggacataaaagaactaagcataaagggaacaatgataaattgggctatattaaaattaagaccctccttgttcaaaagacagaacgccacaatagnnnnnnnnnnnnnnnnnnnnnnnnnnnnnnnnnnnnnnnnnnnnnnnnnnnnnnnnnnnnnnnnnnnnnnnnnnnnnncatttagttagttattggagatatcaaaatgtaaaaaataggtttccctgctaaatgactaatcaaaaagaaggaaaccaccaagtgttaacaaaatgtggagtaaaaggagcttctatacactactggtgattagattggcgcaaactactagagaaaactgtttagcagtagccactaaggctgactgtgtgaatactgtataactcaacaatttcccttctaggcatataatcaacagaagtgcactcgtgtgctccaaaaacaaaagtgctagaatgttc

SEQ ID NO: 111203 - DNA, 738 bp, Homo sapiens
ttttttttttttagaaaaaactggaaagatttgcaactgattccaattaatatcacgcattcaaatattttttatttatatgaattaaaaccacccacattatggccaggtgcggaggctcatcaagcctgcagtcccagcactttgggaggccaaggcgggcagatcacttgaactcaggagtttgacaccagcctgagtaacgtaccaagaccccatctcaaaaaaaaaagaaagagaccaccccacattaaaaattgacttgacaaaggatgaaaaaccaaaactgcggtgtgtgagttcaggagtgagagggacagtttgccctcaatatatgaacaataaaaataacaaaaattctttttttttttggtaagagatagggtcttgctactttgcccagttatatggtttggctctgtgtccccacccaaatctcattgccaactgtaatccccatgtgtcaagggagggacccggtgggaagtgaccggatcatgggggcggtttcccctatgctgttcttgagatactgagtgagttctcaggagattttaatagtttaaaagcgtggcacttcccctgctcactctctctctcctgccttgtgaaggtgctttttttctcttcaccttctaccataagtttcatgaagcctccccagtcatgagaaactgttagtcagttaaaccccttttctttataaattaccaatctcaggtagttctttttcttttc

SEQ ID NO: 111204 - DNA, 407 bp, Homo sapiens
gactgctagggctcggggtttcaccgtgttggccaggctggtcttgaactcctcacctcaggtgatccgcccgccttggcctcttaaaatgctagaattacaggcatgagacaccatgcccggcctgattttctttaaggcaatagttcttaatcaggaatggtttttaaaactaggcatgtaaaaatgcccatgcccattccagaatgttccaattcattagtgtatctgagtaaaaaatccaggtatgaatattttattttttacttccaatagaaacctacaggtatgaatattttaaatgttcataacatgattttctttttaccgctaaaattaaggaattcctttgggcactctaaagcaacgatattaatgaggtatttataataatcattttaaggggc

SEQ ID NO: 111205 - DNA, 371 bp, Homo sapiens
  misc_feature (1)...(371): n = a,t,c or g
gtaaataattgtttattaataattgtaaatttatttgttggagtcagaatggcttacactgccttatcatctagcctctggactctctagtagtgcttttatctgacactggtggggcatggaatgttctacacatcgctggtttccagctaacaagcatattcctttttaagtttcagttttatggtttttttgtttgtttgtttttaagagatgggctcttactgtgttggtcagggtagtgttggactcttggcctcaagaaatcctcccaccttggcctcccaaagtgctggggattacaggcatgagctaccacacctgggccaaggtttttttttatcattnatttangattttttngctgtccc

SEQ ID NO: 111206 - DNA, 759 bp, Homo sapiens
ttttatttttttttgagacagagtctcactctgtcacccaggctggagtgcaatggcacgatctcagctcactacaacctctgcctcccgggttcaagtgattctactgcctcagcctcccgtgtagctgggattacaggcgcgcaccaacacacccgactaatttttgtatttttagtaaagacagggtttcaccatgttggccaggctggtcttgcactcctgacctcacgtgatctgccccaccttggcctcccaaagtgctgggatttacaggtgtgaaccactgcgcccagccccaagtggctttttcaattacatgagccaacatattctcacaagtccattcgagtttggtgtctgttacttgcaaataagggagttctgattggttcccagtgaaacctcatctgtaagacctctgagccaccagtatccacggggcttgtcctataacagctcctgtgcaatccagtaaccttgaacactggaagccactgagcccttctgtgagtagatgcacacctctgaggctaagattactggtgtactcattgggaccagtttggtctcagtgactgaaaactcaacccaaacttgttcatttgggaaagggaaaagtcaaccaggcacagtgggcttcatgcctgtagttccaggcactttggggaggcttgagggtgggacagatcgctttgagcccaggggttcaagaccaacctgggcaacatagcaaaaccctgcctctacaaaaaaaaa

SEQ ID NO: 111207 - DNA, 371 bp, Homo sapiens
  misc_feature (1)...(371): n = a,t,c or g
tagacggcatatagtttggtcttgtttttgatccactctaaaaatctctgtcttttaattggtatatttctatcattaacatttaaaatgattattgatatagtttgattaatatatatcatattcattaatatttttatttgtgtttttgttctttcttcctagtttgccttccacactttttctgccttttgtggttttaattgagcattgtatgagattcaattttatctcctttcttagcatatcacttatagtcaattatggtttttgtttgtttgtttgacnnnnnnnnnnnnnnnnnnnnnnnnnnnnnnnnnnnnnnnnnnnnnnnnnnnnnnnnnnnnnnnnnnnnnnnnnnnnnnnnnnnn

SEQ ID NO: 111208 - DNA, 568 bp, Homo sapiens
ctttgacacagggtttcactcctacgccccggatggcgagcagtggtatggctcactgcagccttgaccgcctgggaactacaggtgtgcactgcggctagtttttgtgctttttgtagagttttgctatgttacccaggctactcttgaactcctgggctcaagtgatccgcctgccttggcatcccaaagtgttgagattactacaggcgtgagccaccatacccagttctccacacacacgcaagtcattctgacatgtcgttaactatgcaggttgtgaatcaacctgtacaattcgttcgttggaagaaaaaaaaatcgctatcgaaccccaaaccaatataaggtactgctgagtaatctggactaatttgaaagattgcttttagaagttatcaggattaaagttgcatacagtgctacaagtcattccaggtacttctaaatctttccataataatgtttttgtcttgtaaatttttagtggtaccctctctgtggtgggtattggaaaaagcctttaaaaatttataacaagaaatcagtcccaatatctaaatggcag

SEQ ID NO: 111209 - DNA, 768 bp, Homo sapiens
gcacttgtctattaagtaaaggagttaagtgtttcttaaaagggctattccaagcatgacgtcttttaattttatgcttagccagcctccaaatctaaagccatctgtaaagaaggtagtaatcctctcgtgaaaatgcaggggccatagatgtcaaatgcatattgttctgattgattgattgattgattgagaggaggtcttgctctgtcatctaggctggagtgccagtgaccccagtcatggcttactgctgtcttgacttcctgggctcaggtgattgtcctgcctcagcctcctgagtagctgggatcaccaggcacatgcccaccacgcctatatcatttattattattattattatttggagagatggagactccctctgttactcaggctggtcttgaactactggcctcaagcaattctcccaccttgaagaacaggattttcaagttcttctctgggcttcagtttcctttatttggaatatgtggataataactgcttaacaaagtccatttaggatcaaatgagataatgtatgtgaaaatactgtggtaaattatgaaaaatgtatacctaatactataaaactctttgcactgcataatttttgggaaattaccttgagggggctgaagtgcggtggctcatgcatgtaattccacacttttgggaggcaaagtctggaggatcccttgagccttggagttcaagaagatcagcatgggttacatggtgagatcctgtctctacagaaaatta

SEQ ID NO: 111210 - DNA, 405 bp, Homo sapiens
  misc_feature (1)...(405): n = a,t,c or g
ctatcccaaagttttttttgcagattttgcaaaagccaaacccctcccccccccgggaaaaacctttaaataaagaaagccccgcccaccccggggttttttggggggagagnnnnnnnnnnttgggctctggttgaaactaggagcccaacttaatgggggtttccccaaaggggccctttgccccgggggagggggtggtccccggcccccaagcaaaaaaggggttaggttttccagggtgaaaaagggaaagggccaaaaccaagggtgaagtggggcggtgaccaaaggccaatcatggaaggccccccaggcccnnnnnnnnnnnnnnnnnnaaagcctatagctaagaaatgaaaagaaaaaataaagtatctgatttccttgggcagcagaataaca

SEQ ID NO: 111211 - DNA, 390 bp, Homo sapiens
  misc_feature (1)...(390): n = a,t,c or g
ctgggtcttatgaatgcatatgtagaatataattgtagcagtattggtttgtcaaaagatatttgtgctatacannnnnnnnnnnnnnnnnnaaaaaaaaatctggttttgccccccannnnnnnnnncagggggccaaattgggttacccgaaaannnnnnnnnnggggaaaaccccattttttggcctaaccccccaaagaacgggggaaaacggggccctgcacccacccggggaaaatttttggaattttaaaaaaaaacggggtttccccatgtaacccaggaggggcggaacccccggcccccgggattggggggccccgccctcccaaagggggggaattacgggggaaaccccccggccccgccctgacaaaacatttaaaa

SEQ ID NO: 111212 - DNA, 375 bp, Homo sapiens
ctaccaactctcaggtgatgctgatgctgttaatacatgaaccacactttcagtagccaagaataaagcatttttaagtctttcagctaaatattctccacctgcatcaactgctagtgagtgaatgttgatacaagataacccattaaaattgtcccatatttagtgtaagatgacctagctaagttaaattgtcatgacagagtatggaatcattattagtttatttatttattttagagatggggtctcaccatgttgcccagactggtctcaaacttttgggctgaagcgatcctcctcctcgggctcccaaagtgttgggattacaggcgtgagccaccacacccagccgattgtcttcatttacaaatg

SEQ ID NO: 111213 - DNA, 355 bp, Homo sapiens
  misc_feature (1)...(355): n = a,t,c or g
ccccaggttccnaagcaaaccctgctgccctcancctcctcccagtaagtcgggaataataggcangcacccaccaacacccggcctaatttttaaaaaagtttttaacagagatgaagtcctcactgtgttgccccggccgatcttgaactcctgagctcaagccatcctcccaccttggcttcccaaagttttgggattattggtgtgagtcactgtggtcagccatcaacttatttttgatttagaaaataatctcagattttcttcagctagatggtaattgaagttgagtattttaaatttctttgccgattacaggaagcaaagaagtggttttattaaatagcagcta

SEQ ID NO: 111214 - DNA, 530 bp, Homo sapiens
ttgagacggggtttcactcatctcgcccaggctggagtgcagtgatgtgatctcggctcactgcaacctccgcctcccgggttcaagcagttttcctgcctctgcctcctgagtggctgggattgcaggtgcctgccaccacgcccaactaatttttgtatttttggtagagatggggtttcaccatgttggccaggttgatctcaaactcctgacctaaggtgatgtgcctctgccttccaaagtgctgggattgcaggcgtgaaccactgcacctggcccatttctttcttgatttactgtctcacattggttttttattttttattttttacggtcatccagtagcttctagggaaagggacacctggggggatgtatgggtttttttagacattgcttatctgaagctatctttttattctatactgacactaattgaaggttttaccggatataggaattctagtttgggaaatagttttccttcgaaacttgatggctctgcttctttttcttctcatttccag

SEQ ID NO: 111215 - DNA, 660 bp, Homo sapiens
ctgactacaactaatactactaggttattggacctcgaggccagaattcgaaacgaggtccagaagagagcctgactgtttcacttttaaggaaccttgctctttaaaaatggccactgatacgtcaaagtgacagcctaggacttggttctaggtgacttttacttcagcttggcaaacttcaactgtcctgcttgctccttctaaaactcattttctttttttgagacagagtctcactctgttgcccaggatggagtgcagtggccacaaccttggcctcactgtaaacttcaccctcccgggtttcaagcaattcctcatgcctcagccctccccaagtagccgggactacaagcgtacccacccatgccccaggatgtacagccctcccagcacggtgctcgctttccctaatgccattccacagtatttgttgcagagaaggaagcagcatgcccaggacagatggagacaggactaatttggcttgaggtatgtaattttgaacttgagcctctctctgggactgtaaaactccaaatcaaagtcttaatctgagaatacatacatctgaaagagtgattagggactggtaaacatctattaatattcaactctgatacaaagtacaagttgtttattcttaccacgcaaggc

SEQ ID NO: 111216 - DNA, 1049 bp, Homo sapiens
ttgattttaattatttacctttttatttttattacttttattttttctttttttgagacaaaatcttgtgctgttgcccaaactggagtacaatggcatgatctcagctcacttcaacttccacctcctgggttcaagtgattctcctgtatcagactcccgagtagctggggttataggcgtctgccaccaagctcagcttatttttgtatttttaggagagacgacgtttcaccatgttggccaggctggtcttgaactcctgaccgagctctgcttcttattccaggaatgacggacgctggggctttgatgggcaccgggtgaaatgggcagagtggcgcttacccgggatggcagtgaagcgggaccgggaggtcatcgtgacaaagggtggcatgaggtacctggccttgacgccctccccggctagacggtccagattgggggtgtccacatcctgatcctagtcccagcggaagccctggaaggagatcagcagcagctaaactcctggatggcagagccatgcctgccattttcatcattgcattaccaccacccagcacagtgcctggtacaaaagagttgctcaataaataaatcaggatgaatggataaatacacggataggcactttgaactacagatgagcttaaatactttgtgtttttcttagtcaaacatgtgcaattaagcatgtgataaattatatgatgaccacacctgtgtcttgcctgacgttctttgcaatcactaaatgaagtcaattgtgcctgttttgacagttctattttcaacctaatgatctgtttattttaacttctggctgttggctttgtttgggtgtgttagcctgacaaagtggtagatattagtatttgctgttttgtttaaatgtcacgaagtttaaaaatgcctttgcttttggtaagaaaccctagttaggacactctagtggtcaggatgatttgggttctggtgcagtaacaacaatccccaaatctcagtggctccatgcagtgcccgggaattccggacaagtactt

SEQ ID NO: 111217 - DNA, 673 bp, Homo sapiens
ttttttttttgacaattttaaattttacattctcatataagtaatgctcataatttaccctatcaatcactatccctcaagattatatgttttttttttttgatacactgtcttgctctgttgcccaagctggagcgcagcagtgccatcatagctcactggcagccttgaacctccccaggctcaaagagaaacctcccaacttcagcctcccaaagtagccggcacccacagctgcgtactactaccatacctagctaattttttgattttctgtggaaacaaggtctttgttgccagggctgttctcaacacctgagctcaagtgatcctcctgccttagcctcttaaagtgctggggattatagggaatgaggccaccacgcctggcctacattttttaatgtaataaaaaaatcttgtgactttgtgggcaatacctataatgatgttttctaaccccagtcaagaagggcgtgaagtttcattcctctctcttgttgctgaggtatcagagggcatttttccacttattcctctttcctttcatggcaagatgtattctgttcccttccttactgatcatactcctggcaagcttttattatttctttgtacctgtccaaggtaatctgtcttacatccttcttttgagccactgtttcctccagtt

SEQ ID NO: 111218 - DNA, 369 bp, Homo sapiens
  misc_feature (1)...(369): n = a,t,c or g
cctttggttttttggccatttttaagccccccctcttttttaaaatttccaacccccccttggcggcctttaattatcccgcctttgatccctccccctcccttcgccttaaagtggcaagtaaagattttggctttttttggatccctttaaaagcgggagggtgggccttttaaaaacaaccccgggcccccaaaaaaaggggggtttccatatgaaaataaaaagggtttgggccaagcctgcaggggtttccagccccccgggataggggccaggaaaacctccagaaattcccnnnnnnnnnnnnnnnnnacagtgttccttaggctggatttagttatttttttctttgcctttaaaaaaaaa

SEQ ID NO: 111219 - DNA, 462 bp, Homo sapiens
ttttttttttgtatttttagtagtgatgtggtttcgccatgttggccaagctggtctcgaacttctggcctcaaatgatccacccacctcagcctcccaaagtgctgggattacaggcgggagccactcaaaatagtttaaaaaatataaggcacgaaaaagagatgtgaacagtgtaaacagaagaagagatagacttgtcctctgccccttatgggagtttacattcctactggggaagagaaaccagtaattacacagtcagttatttcatgggtaactgtgctcagtgttcggagggaaaaatgtaatgtgcctatgacagcatgtgccaaagacaaggggggcccccaagcttgggggcagctcaggagaggtttattctatgtggagggggaagggagggggactcgtcccgaattatgtcctgagggccaaatccctaagtagtgtataaattgt

SEQ ID NO: 111220 - DNA, 360 bp, Homo sapiens
  misc_feature (1)...(360): n = a,t,c or g
gagatgaggtctgacgctgtcactcaggctggagtgcagtggccgantcatagctcactgcagcctcaaactcctggcctcaagtgattcccctgactttgtctcctaagtaactaggactataggcatgcaccatggacttccagctaagaatttaagttaaaaaaaacatacatatatacgtgtattaatgtagacaaacaaacctgaaactgtctttaaaaactttgttttgctattatgtgaaatttaaaattgctgtctaaaatatttattcacaggtatataatagtaaatataacctctatataggcagttatgtataattaaaaacagctttttattcttattcttgacaca

SEQ ID NO: 111221 - DNA, 286 bp, Homo sapiens
aaatgaagctttgttttctcagaaagttactatccagctgagattctctcaaactttctggagagctttggttagaaatatgaggggtaggagaaaatcatttggccgtagaaaatactgattaatctttgggaaaatttggcatgtgatattaagaataggatcagggttaggcgtggtggtgcgtgcctgtaatcccagcagtttgggaggccgtggtgggtggatcacttgagaccaggaattcaagaccagcctgggtacaaagtgagaacctgtcaaaaac

SEQ ID NO: 111222 - DNA, 403 bp, Homo sapiens
gcctgcctcagcctcccaagtagctggaattacaggttggcaccaccatacccgccttatttttgtatttttagtagagatgggttttcaccgtattggccaggctagtccctaactcctgacctcaagtgatcggcccacatcggcctcccagagtgttggaattataggtgtgagccactgtgcctggcccaaacaattttaagatatgttttgatataatgtagcttgctaaagctgtaagaccccatctctaaatttaaaaattataaacactatgaatggagattaacttggatgaagtgacttgtccaaggtgttgccaagcgttaattattggactatagcccgagtcccctaattcctagccgggaatcctttgtgttttggttttgccacaacg

SEQ ID NO: 111223 - DNA, 399 bp, Homo sapiens
gagacagggtcccactctgtcccccaggctgaagtacagtgctgtgatcacaggtccctatgctcaggtgacccttccacctcagcctcccaagtaactggaaccacaggcacacaccaccatgcctggctaatttttccatttttttagagacagggtttcaccattttgcccagggtggtctggaactgctgagctcaagtgatccgcccacctaggcctcccaaagcattgacattataggcgtgacgactgcgcccggcctcatcatgttttgaatgaggaactaaggagtaaagtactcggctgatgggcagaggatttctgccaagtgatgcattcagaggttcatgccccacggaccccacattagaatttcacatctgccttaaaagaagt

SEQ ID NO: 111224 - DNA, 378 bp, Homo sapiens
atacctagatgaatgggcctttagtgctacagcaaacactttatgttcctggtatgttctgaatccctaaagagcccatttctacccttcatcattttcaagattttaattgtatgctccaccttcatttctgcagataacctattggccagaggacattatagctctttaggtatgaacacctctaacttgttgtccccttatgtgcaccttagctctcaactaaatcttctttcagctgggcgcggtgctcacgcctctaattccagcactcggggaggctgaggaaggtgggtcacttgaggtcaggattttgagaccagtttggccaagatgtgaaaccccatttctaccaaaaatatgaaaaattagctggat

SEQ ID NO: 111225 - DNA, 535 bp, Homo sapiens
  misc_feature (1)...(535): n = a,t,c or g
atgtgagatcaaaatttttatactggcactatgatgttatttgccttttcctcatattcacaagtgaacagtggagttttacagaagctatataatgtcatgacatcactgatgggtaatagaatgtgtgcttgtatattccgaaactttcagttccaatttcttcgatcaatgtaatcctcataagtaaaagttatttgaggacctcagacatttttaaaaatgtaaagggggtggggtcaggctcagtggctcatgcctgtaatcccagcattttggagggccgaggcgaacggatcacttgaggccaggagtttgaaactagtctggtcaacatggtgaaaccccgtctccactaaaacaaaaagttttctggatgtggtngcacacatacctgtnaatcccagctactttggtggctgaggcatggagaatcacttgaacccagaagacaggttgcagtgagccaagattgtgccctggcnttttagcnggggttgacagtgagactgtcttcaaaaattaaaggtgtaca

SEQ ID NO: 111226 - DNA, 713 bp, Homo sapiens
ttttttttaattaagagacaggatcttgctttgttgcccaggctggagtgcaatggtgtgatcatggctcactgcagcctcaaactcttgggctcaaatgatcctcccacctcagcctctcaagtaactgggacttcaggtgcatgccaccatggcaggctaattaaaaaaaagtttaatggaaattggggtccctctatgttgtccaggctagtcttgaactcctggcctcaagcaatcctcctgcctcggcctcacaaagtgctgagattacaggcatgaaccactgtaccaggcctaattgattttttaattatcaattccacaagcttaaactgaactatctttaactgaaggtgctcatttgtcttgatggctacattcagttaaaatgtgctgactggaattttcttttaatccagccacgtttaggaacctactagataatataaactgaggagattcaagagattaagtagtgggcatataatttcatagttgcttctttttttgcatgtacaattggaaaactcagcctgcttttacatccagattaaggctcattggaatctgaattctcttctgatccatattctaattctggtgtgtagtatgatgaagattaagcacaacttttgtgcagacaaataaggaccataaaaaaaaattcaaacaaacttagtctcccagaattagactgtctctcagatcca

SEQ ID NO: 111227 - DNA, 295 bp, Homo sapiens
cgacattctactgtaaaggcaactattcatacttagagtataatgaaacacaattctatatactcacactaacacagtaatacacacacacacacacacacacacacacacacacacacactcctgcaggaacctgaaacagtgctcatgttgtagtgtctttgcttttcatcacggatatcattcattcattagccttgagccaccttgcctggcccaaagatgacaattttttaacacaaatatttcactatgcaaatcaactaggtgaaataaatgacccaataggctttga

SEQ ID NO: 111228 - DNA, 420 bp, Homo sapiens
ataattcaattagacttattgtaaggatatctttaatcagtacaaaaatatataaaaaacaattatactaaagcagcataattgtttagaagtatatatttgccagccaggcatggtggcttatgctctaatcccagcactttggaaggctgaggcgggtggatcactagaggtcaggagtttgagaacagcctgaccaacatggagaaaccccgtctccactaagcatagatttgcaagagctagatttgtcagaaaagaaatatttctacatgaacagttaaggctgggcattaatttcaatttcagtttgaaaaaactctgaaataattcatggttgaggttcagagctacccataccatagttgtctggggtaacaggatgcttgctttcagaggaaaacgtttgttctcgtgaaa

SEQ ID NO: 111229 - DNA, 458 bp, Homo sapiens
  misc_feature (1)...(458): n = a,t,c or g
cattttcctgcctcagcctcccaagtagctgggactacaggtacccgccaacacgcccggctaatttttttgtttttgtatttttagtagagacggatttcaccatgttagccagcatggtcttgatctcttaacctcgtgatccaccagcctcggccttccaaagtgctgggattataggcatgagcaccgcgcccagcctttgaggcatcatttattttcatagatggctaggatggggaagagtttgaatgaaatgttttgtcaaagaaaaatatagagccgtgtgctgcatagatgttttggtgaatgacagaccacatatattatggccccttaagattataatgggagcaggccaggtgtggtggttcacgcctgtaatcccagccatttggggagggccgagggcaagcaggttcccttcaggttcagggaattttgagagcaggcngggc

SEQ ID NO: 111230 - DNA, 614 bp, Homo sapiens
agatagggtcccactccatcacccaggctggagtgtagtggtacaatcatagctcactgcaacctccaactcctgggcccaagagatgctcccaccctagcctcccacgtagctggaactacaggcacacgccaccatgcccaaataattttattttagtttttgtagagtcagggtctcaccatattgccctagttggtcttgaactcctgggctcaagtgatcctcccgccctggcctcttgattagctgggattacaggtgtgagccaccactctcccagcccttcaccacttttagcaagaatattctatggcacaggtacgatgtacatctgcacttcacccatctgtcttccctcattgatgggagaagcagtttttttttcctattcctcaaagaggaaagtgagtctcagagacagaggcattccccagggccaagacccaaacacccacccatctggccctgtgcccatgacctccatgcccaactgccttctggcatgtggtaatatgcccctcacccccagcgggtgctggcatcaagcctggctcaaaacaggcatcctgtgaggtttgctgactgtcagaaggcctgtgtccaccccctgg

SEQ ID NO: 111231 - DNA, 381 bp, Homo sapiens
  misc_feature (1)...(381): n = a,t,c or g
gaaattgaaaaggacacaaaccactggaaagacatctcatgttcataggtcagaaaaattaatatttctaaaaggaccttatacccaaagcaatctagagnnnnnnnnnnnnnnnnnnnnnnnnnnnnnnnnnnnnnnnnnnnnnnnnnnnnnnnnnnnnnnnnnnnnnnnnnnnnnnnnnnnnnnnncccaaatagccaaaacaacacaaagcaaaataataaagtgagccactgtgcccagaatttgaatatcttttgagcgatgtgcccattcatgtcttttatacgtttttctctttatgngttaatctttcgaaaaaaaggttttannnnnnnnnnnnnnnnnnnnnnnnnnnnnnnnnnnnnnnnnnnnnnnnnn

SEQ ID NO: 111232 - DNA, 655 bp, Homo sapiens
gagacagtcttcctgtgttgcccaggctggagcacagtggtttgatcttggctcactgcagtctcaacctctcaggcccaagctatccttctgcctcagactctggggtagctgggacaacaggtacgagccatcatgcccaactaatttttgtgttttgtagagatgtgtttcatcacattgctctggctggtctcaaactcctgggctcaagccatccacccaccttggacttctaaagttttgagattacaggcaggagccaccatgcccggccctattctcttttacactggtttattgtgagggcctccaattgtcttcctattaggcttgctcacttcggcctgttcactgaagccagaggaaattctcctaaaaggcaaatttggatcaaaatagttcttgattaaaacctgctggtgactgcccattgcctttaagacaaagtccaaactaatttggccacagggcctggtaagagctggcctctgctcaccttcccagttttatcctgcaccagcctccccaaatccctaccctccagccacaggaatgtcagtttccttgggggacttcactggtccttcaggaatccctctccctacctccatcatcactctttcactctcatctttgctcatctttagcctca

SEQ ID NO: 111233 - DNA, 382 bp, Homo sapiens
  misc_feature (1)...(382): n = a,t,c or g
tgtcattttcctgttgaaaaacaatcaatgatttctcatttttttatgtgctaaatctaatatccttgggctagcattcaaaactctccatgccattagtcctaacacagtatttcnnnnnnnnnngggaaagggagtctcgttttgccccccaggcgggagggcgggggcacaatctcgcctaatggaagccctggcctccggggttaaggcgattttttggcctcaccctcccgaggggggggaactacgggcaggcgcccccatatccaggaaagtttggaattggctttccnnnnnnnnnnnaaaaaaaaaggggggttccccaaggtgcccagggggggtcaaaatccccggccccagggggaccggggggcctttt

SEQ ID NO: 111234 - DNA, 573 bp, Homo sapiens
  misc_feature (1)...(573): n = a,t,c or g
gagatggagtctgactctgtcacccaggctgaagtgcaatggcgtgatctcggctcactgcaccctctactccccaggttcaagtgattctcctgcctcagcctcctgagtagctgggattacagaggcatgccaccacacccagctaatttttatatttttagtaaagacagggtttcaccattgttcaagtcaggctgggcttgaactcctgacctcaggatccacccaccttggccctcccaaagggctgggattacaggcatcagccaccccacctgggncggcaaaagtcttccttaaatgtacagctgcctttggacaagatccccatcatcttatacttttgtacttgcaagagtgagctgtctctaccacttttagtttttcatgttggaagggaaggtaggcattttgggaaggcatatacgtatatgccataagaggaactagagtgcagtatgttctcttccaaaatgctatgctagctggcttaattgccagaataatctctaaatactattgtcttcatgttctagttctcttgagaatcaacagtagctctctactttg

SEQ ID NO: 111235 - DNA, 486 bp, Homo sapiens
gagatagagtctcaccctgttgcccaggctggggtgcagcggcgtgatcttagctcactgcaacctccacctcccaagctcaagtgattctcgtgcctcagcctccagagtagctgggattacaggcatgtgccaccacgcctgaataatttttgtatttttagtagagacagagaaatttaagtccccaccaaccccgtctcttaacacttgatgcattgaaccagggaagctcacctgcgccatctagtggtagaaatggtgattacaggcacgtgtggctggacattctcatccctgcgggcagctcttgtcccacaggagtagggggcacagggctatggagcgcttgaaatgcgactcatccgaattgagatgggctgaaggtgtaacatgcatactgaatctctaagacttagtatgaaaaataatgtaaagtagctctttaacaatggattatactgattacatattgattttctattg

SEQ ID NO: 111236 - DNA, 563 bp, Homo sapiens
gtctttttgtttttttgagacagggtctcactctgtcacccaggctggagtgcagtggcatgatcagggctcactgcagtgtcaacctcctgggctgaagccatcctcccacctcagcacccccaatagctgggtctacgggtgtgcatcaccatacccggctaatttttgcattttttgtagaggcagggttttgccatgttgcccaggctggtcttgaactcctgggctcaagcaatccacctcacctcagcttcccaaagcactgggattataggagtgagccaccatgaccggcctcttggtgattctcaatatatctcccacggtaatcccgctttctgccacagtgagcctaccttactgagaaagtgtatcacacaaagagcaatcccacaccaggacacggctcatgaatataccatggcaaatattctctgccattatacaaggagataagagacaagaaggatggaaagggtttttcctctagagtatcttacaaagaagcaggtgactactggaaagggaccatatggccaggttctaaaagttatccttcc

SEQ ID NO: 111237 - DNA, 439 bp, Homo sapiens
  misc_feature (1)...(439): n = a,t,c or g
ctgctatattttttttgccaaaggaaaatccccactatttttttaaattaaaaacaacaagatttttttgtctgggggggggaaaaggccaaagtgcccccccctctccggaaaccgcctctgttcccctctccaaaaagggcccccccgggattctccccggttaaccccccccctttttttttgggtcccccgccagggttttttcccaaaaaccttttttgaatttttaaaacaaatagggcggggttttccccccccacaaagggtgaaaaagtttgcnnnnnnnnnnnncnnnnnnnnnnnnngaactctcacttataannnnnnnnnnnnnnnnnnnnnnnnnnnnnnnnnnnnnnnnnnnnnnnnnnnnnnnnnnnnnnnnnnnnnncccctacaggcacatatgtttagaaatgtataaagaatctaaaag

SEQ ID NO: 111238 - DNA, 381 bp, Homo sapiens
  misc_feature (1)...(381): n = a,t,c or g
atnnnnnnnnnnnnnnnnnnnnnnatgtttttaagagttttaaacatctggctcnnnnnnnnnnnnnnnnaaaaacgaagcctatttttcccacaaagggggaaaaaagggggcccctttggggtacagggaaacccccttttcgggaacccccaaaattccccggccccacccccacaaaaagggggaataaaaggcccccaccccaaccccgggaaaatttttgaattttaaaaaaaacggggtattacccaaggggcccaaggggggcctaaccttttaaacctgaagnnnnnnnnnnnnggccctccaaaggggtggggccccaaaggtggccaggggcccccccccttggggctttttttaaaaggcaaaagtgac

SEQ ID NO: 111239 - DNA, 477 bp, Homo sapiens
ggaagttggggcgcaggaatgtggctgtccccgcctgtaaatcatggttggggaggagtcgcggaggcaccaggctggggtctgcagcgcgccatctgctgcagcacacaggaggcgctgaggctagttggagacagagtctcactgtgtcacccaggctggagtgaagtggcatgatcttggcttactgaaacctccatctcccaggttcaagcgattctcatgcctcagccacttgagtagctgggactacaggatttcgccatgttccccaggctggtctcaaactcctgaactcaggcagcccgcctaccttggcctcccaaagtgctaggattacagcccaaatgaccctccaagaccctctggaggcacccgcagtgcttccttaaatttgcagctcttacagaatgaggaccagcgtggcagccccctttcaggacagctcccgagacgagacgcgagagcagccctaaa

SEQ ID NO: 111240 - DNA, 508 bp, Homo sapiens
ttttttttttttactttttggagagaagggatctagctatgttgcccaggctgttctcaagtagtcctggcctcaaatgatccctccaccttggcttcccagagcactgggattacagtcatgagccaccctcctggctcctttttttttttatttttaataacagaagggtatttcttttgaatgtgaaattttaccacatggtatgaattagtccaagtgtttttatactaaatttacataatatacacttttcaagtaagtacaaagaggtataaacattgcttatgaattgaatgttaaaaaaataaatctctatgcattacttttgtctttccccataatctcacgtatacacataaaacaaaaaacaaggagacccagttatagttgtggtatctgctgtttctgccttgaaatttccagcttacagctaagcaacaactactgtgcatccagaacttacatctatgttcctagagtacttgaaccccattctcaagtgcac

SEQ ID NO: 111241 - DNA, 417 bp, Homo sapiens
  misc_feature (1)...(417): n = a,t,c or g
nnnnnnnnnngtctacggttagtaatttaagctaccactgtatgaaaccagaaaaagaagagcatatgagaacaaacagaaggaaataatgagcagaaattagtaaaatatagaacagaaaaacaatggagaaaatcaatgcaacccaaagctcattctttgaaaatattcatgaagtcaatgaacctctaatgaggcataataagagaaagataaaaatgactaatatcaagaatgaaagaaggggtatcattacagactctgtaaacattaaaagaatagtaatgggatatacaactctgtccataaatgcaaaagcagataaaatggacctattcctttaaatgtagatacagactaccaaaactcaagaagagacagataatttgaataatctcttatctattaaataaatca

SEQ ID NO: 111242 - DNA, 388 bp, Homo sapiens
  misc_feature (1)...(388): n = a,t,c or g
cttaattgtttcattattcgaaaattttgcgatgattaacatttatgcataaatggagcttacttcttcaataatcttatatatgatgtctgagggttgagacacacgggtcagaggttaannnnnnnnnnnnnnnngggggcagagtctacccttgtcccccctgctggagggctgggcaataacttcatttaactggaccctgggcgtgaggggttaaggtactttcttggagccagcctcccaggtcacggggattacgggagtccccccccaccccgctccagttttggcttttttattgaaaccgggttctcctcatgtaaaaaaggctgggcttgcaccccgagagtgagagctaccatgtcttgtcccccccaagggctgn

SEQ ID NO: 111243 - DNA, 222 bp, Homo sapiens
  misc_feature (1)...(222): n = a,t,c or g
cccacgcgtccgtctaaatacttttatctattaaacttttaggttttgaaattccaaattggatattcacttatggatacctttggaatagtcctagtcccttgcccataaaatataggatacaagtgtaatcccagcactatgagaggctgagacgggcggatcacaaggtcagganattgagactatcctggctaacacggtgaaaccccgtctctacta

SEQ ID NO: 111244 - DNA, 291 bp, Homo sapiens
tggataggaagattcaaaattataaagatgtcacttctccctaaattaatctagagactcagtatgatttcaatccaaatgccaactctctggggggctgatatgaaattgtcatacaacttgaataataaacatgagaatacagttggccctttggtaaaagattgtcataaaatcattcaaaatacaacttgaatataactgtgagaatatagtcagcccttcatatccatgggttctgcctccatggattcaacaaaggagggataaaaaatacttcaaaaagactgt

SEQ ID NO: 111245 - DNA, 507 bp, Homo sapiens
cccacgcgtccgcctccacgtccccaggccccacccacctcttccaactcctccagggaaacccaagccctgcagcgcatggaacaaaagaagtggaaccgatacttccggaacaaggctatctgagagcagttcttcctggccctcgggttcatgtaacggcataactggaaccaaagctcactgagcaagggtatatgagagcgggtctcctcgtacaggaagtagaagatgttttgtttgggggcctcgtcgtcctcctccatgtcattggccagatagctgaggacagaaatcaggttgctgctcaggggcaccaccaggagagacctccggctgaggtcagcttctcagagaggaaggtaagggaccgtccctagctcaggactggcacccaccctgcagagagccatgccttcctcaggagggctctgctggacagagacctgatcaagggcgtctcccactccttcaggatggagacaaaaacccaactggtgaccaaga

SEQ ID NO: 111246 - DNA, 669 bp, Homo sapiens
tttgagatggagtttcgctcgttgctccagctggagtgcaatggcacgatctcggcccactgcaacctccgcatcccaggctcaagtgattctcctgccttagactcccaagtagctgggactacaggcgcccaccaccactcccggctaattttgtaaaaaacaaagctgaaaacagtagcaagctctgcaaacagtaacagccttcaaacactgcctgatcaacaggctctacccacagtagcaggatgtacaaacagctgaaggctctgcaaacatgcacaggctgccatgaagagcggcagatgatacagagacactctagcctacccaatcacttcaagagaatgtcttcagtaggtaattgtaacaataacaacaaaaagcagaacttgggctccatgccttcaacaggcaacagaatctggtagatttcaataattttattttgctttttacagtattttttttttagaattaccttcatttcatgatactggttttccagttagaggagtgatataaaatttcctttaaaaataaatgcatgttgctgggtgcagtggctcacccctgtaataccagcactttgggagccaaggcaggcggatcacctgaggtcgggagttcgagaccagcctgaccaacacggtgaaaccccgtctctac

SEQ ID NO: 111247 - DNA, 301 bp, Homo sapiens
tccccccttacaacctgttgagaaggttaactgagttaatccattcaaagtcttagaatgcagccagtacactgttaaattagctgccaccaccaccactaccatcatcatcatcatcttcatcatcatcattattcttcctacttcctaaaatatcctcaagaatatttaagacacctgtgattgtactaataaccagcattaaaagttcataaaaaacatacctaattagtatgtttccctaactatcagagaaactcaaatagtttaaatggtcagtatagttaaaaatgactctggg

SEQ ID NO: 111248 - DNA, 839 bp, Homo sapiens
gcaagattttactgtcacctcgtgtgaagtgcagtggcataattttggctctctgtagcctcagcctcctgggctcaagtgatccttttacctcagttttctgagtagctaggactacagatacgcactagatgtctgtttaatggttggtttgtttgtagtgttcggatctgactacgttgcccaggctggtcttaaacttttggcaccaatggatcctcttaccttgatctcccaaagtgttaggattgtaggcaacagcattttcacccaatcacgtatttttgaatttaataaaacttggtatgtgtcctaacagaatacaccagatgcaaataagaatattttgtattatcttggttttgactggaaagttttgtatgcatctgtgaagcctagtgggtctataatatggtttggatatccatgttctcccaaacctcatgctgcagtataaatccttaatgttggatgtaggacctggtgggacatgtttgggtcacaggggcaaatttctcatgaatggctggtacattttcttggtaaccaaaaagtttatgctctattgattcaaatgagagtaggttccttaaaagaacctggctccttcacctcacacttgctctgtctcttaccatataatacatccagttactctttatttttcaccatgattgtaagtttcctgagatcttcaccagaagcagttgttgacacacacttcttatacagtctgccaatctgtgagccaaatatacccctttttgttataaataacgtactctcaattattcctctatttgcaaaataaataacatagtctataatgttaaaaaaaa

SEQ ID NO: 111249 - DNA, 805 bp, Homo sapiens
ttttggtaaattagagacatttgagacagtcttgctctgttgcccaggctggagtgcaatggcatgatcatagctcctggacctcaagccatcctcctgccgcagcctctcaagtatctaggactacaggtgtgtgccagtatgcccagctaatttaaaaaactttttatttagagatggagtctttctatgttgcccaagtatggcctcaaaccatactcctgccgtggcctctcaaagttgtggtgtgagcccctatgcccagcctatgcttagcttttcttttttacataagagtttgtagttttcaaacttttatttaaaaatgggagcaccctttcttcaaatctaaataaataagagcagagcagtttgttgaaaggaagaggcttcactgttgccctcaagctcctctccaagggatgccagcgatcctggtttgaaaaatactggacgctttcaactctaaattttagtttgtgcctacttgacacaatacagtgtattgttaccttaggtcagtttttgtctccatctatctgtggactctagaagatacgagggataggcagtgcttttgatatacctggtttctggagttctatgagagtctaagtgtttgtgccacttggaggatgtactcagatgtatgtgcagccttattttcccctaattaatgatgccccagtcttttctcctggtcatgtgggacatttacagggcagcacagagagtaaaacacaaaaggtcatgtgcaagttctcagacctaataaaagtgaaaaggattatgagcagaatgtagt

SEQ ID NO: 111250 - DNA, 903 bp, Homo sapiens
  misc_feature (1)...(903): n = a,t,c or g
tttggtttaaccacaccccaagttcccaaaaaaatttttggggtttcccggtcccccggggaatttctcccgaaannnnnnnnnnngtccccaaggggaaaaataatgccctttaaatttaaaaaaaggtatgtttttttttagcacattttgggggataaagcgcggggaccacagttcgttttaaaacccaaatgttccttttggtgggttcccccaggccccaatttgttgtttttttttccaaaaaaaatggaaaaacccccccccgggcggggggtcccccccttattctccccccctttggaggcccccgggggggggttcccagggtcagggattttgccccccctggggaaaaatgtggaacccccctttttctttaaaattaaaaannnnnnnnnnaaaaattcccnnnnnnnnnnnnnnncccctttgttcccacttcttcgggggggtgggccaagaaaatgcctttaccccggggggccaggtttcaatggggccgggtttccccccttgccttccaactggggggaaaaaaaaagatttttttttaaaagaaaaagnnnnnnnnnnggaaaagaaaaacagaaaatgggagaagggtcagtggagcaaaggtggtgttcttacaattttgattggtgtttggtgacattatatataagataaagcaaaggtgcagttaatgtatatagggtaaaaagttaatgattacataggtgtcttaaggtctggtgagggatatttgattctatcctgcttttgtgcttcatgtgataatcaaggttacagtcagtaatgccagtgaaatattttgacaaatgccagccttgcaggtgagacttcagctttagttcatagaacaaactttctattacttaatgtccaggctgtatt

SEQ ID NO: 111251 - DNA, 761 bp, Homo sapiens
atttttagtagagacagggtttcaccatgttggctgggctggtctcgatctcctgacctcgtgatctgcccgcctcggcctcccaaagtgctgggattacaggtttgagccaccgtacccagtctttttttactttttaagagacagggttttgctctgttgccttggctggagtgcagtggcacaatcatggctcactgcagccttgaactcctgggctcaagagatccttctgcatcagcctcctgagttactgggactacaggcatgcatcatgggtgcatagctatctgaaagagtttgtgtaagattaggtgaaaattatttcttccctaaatgtttggtaggaatgtaacagtaaaaacagtctaggattttctttctgggtgattttaaaattactgtttcaatttccattaggaaggtttaggaggttattggaggttttatttccctcttgtgttggtttggctatttttcaagaaatttgcccacttcatccaaactatcacatttgttgacattcatatattcccatattattcttttaaggtctatactgacgtctactctttcattcctggtattggcaacttgcttggttgttctttctttccttaatcagttttgttagggacttatcaatcttataaaataaaaataaaaaataaaaaaacccacccaaaacaaactcttgactttgctgataatataatctatttctacttcattgatttctgctcttatctttttattttctt

SEQ ID NO: 111252 - DNA, 530 bp, Homo sapiens
gcctcctgagtagctgggactacaggtgtgcaccaccacgcccacctaatattttctattttttatagagatgaggttttgccgtgttgcccaggctggtctcaaacacctgggctcaagtaagccacctgccttggcctcccaaagtgctgggattacaggtatgagccaccatgcctggtcctatgttattctgcatttagaaaaactcagggcatttattggtattaggtttccttttatcatgactactatagtacttctattgtttaacttagaatggttaaacattctaaagaatgcttaattagtctccagggtgctaatgaaccacgccactcactgactcctgggcaacaatactcactattctttcccaccaggtgcatatgtattgttttcttttttctttaagtctaagaggttgatgaaaagagctgttcttttgttacttgtccatttgtgcctcaaccattctgattctggtgtgtcttggaggagtagtcggacgaaatcgtcgacccgggaat

SEQ ID NO: 111253 - DNA, 484 bp, Homo sapiens
aagggacgaggtctcactctgttgtccaggctggagtgcagagccacaatcatgactcactgcagcctcaacctccagggctcaagcaatcctcccacctcaacttcctgagtagctgggactaaaggcacgcaccaccacacctggctaatttttgtactttttgtagagacgaggtctcgccatgttgccaagggtggtctcaaattcctgggcccaagagatccacatgccttggcctcccaaagtgctgggaccaacaggcatcatacacggtggttttacactaacacactattggggaagtgccacaggcctcaacgtcacaaggtgtttcactcatttatttgtccaaatacctgcttaagtttctacttagggatcagggacacccttggggtgccaacaacgataggcctcctactgggagctgcctcaggagccccaaggagaacactggagtggggggcacagcaggacgaaa

SEQ ID NO: 111254 - DNA, 430 bp, Homo sapiens
ttattttataatttaatgtattttattttttgagacagagtctcactctgttgcccaggctggaatgcagtggcacaatcttggctcactgcaacctccgcttcccaggttcaagtgattctcatgcctcagccccccgagtagctgggattacagatgtttaccactaaacctggctaatttttgtatttttaatagagacagggttttgccatgttgggcaggcttgctgcaagtgatccgcccaccttggcctcccaacgcgcagagattacaggtatgagcctctgcccctggccctttgataatgtcttttaatgcataaatgtttttaatttttatgatgttaagtttatttatctattcttttattccttgtgactttcatgtcatacctaagaaactgtagcctcttctaaggttatgaaga

SEQ ID NO: 111255 - DNA, 454 bp, Homo sapiens
  misc_feature (1)...(454): n = a,t,c or g
tccctgcaggaattcggcacgagggaaagcagtctggcaatttctgaaagaacttaaaacggaattgcctttcaaccctgcaatcccatgattgggtacttacatacccaaaggtatgtaagtacttctnnnnnnnnnnnnnnnnnnnnnnnnnnnnnnnnnnnnnnnnnnnnnnnnnnnnnnnnnnnnnnnnnnnnnnnnnnnnnnnnnnnnnnnnnnnnnnnnnnnnnnnnnnnnnnnnnnnnnnnnnnnnnnnnnnnnnnnnnnnnnnnnnnnnnnnnnnnnnnnnnnnnnnnnnnnnnnnnnnnnnnnnnnnnnnnnnnnnnnnnnnnnnnnnnnnnnnnnnnnnnnnnnnnnnnnnnnnnnnnnnnnnnnnnnnnnnnnnnnnnnnnnnnnnnnnnnnnnnnnnnnnnnnnnnnnnnnnnnnnnnnnnnnnnnnnnnnnnnnnnnnnnn

SEQ ID NO: 111256 - DNA, 506 bp, Homo sapiens
tgagctgggattacaggcacctgccacgcctggctaatttcgtatttttagtagagacggggtttcaccatgttggccaggctgctctggaactcctgacctcaggtgatctgcccgccttggcctcccgaagtgctgagattacaggcatgagccactgtgcccagccttgctgctgatattcttatacatgtctcttggtacacatatagaaattttccctagcgtatggacttactggatcacaggatatgcacaccttcaactttattaggtattgtccagttttcccaagcatttgggactggtttataatttccaccattcagtggcaagtgttcgttttccacaaagggcgttccttcttgcttcctcctagtataagtagctgttatgccacttatgaagaaatgtttgttagacaaatgaatcacagtcactagactgggataatttcctattttaaaattcttccctcttgaattttctttcttttctatatagaa

SEQ ID NO: 111257 - DNA, 999 bp, Homo sapiens
agccggtgctcgcctcctctcgtccggcggggcgcgtctccccgtgcggtagtccccggctcccctctcgccgcctcttctcgactcggactctcgccgcctcatctcggtcctacttacgtcttctggacggcctctggctcttccaacaccaaaagatttctcaatttatttgcatatatacattgtcaccccagggagccagctctatttcagaagtccccggctccccttacccagccaacacccaaaacccacccaagaggatgggtcctggataaataatgcccaggactcatatcctgaccccataggttataacagaattcatcaaacaaaaacagagggctagaggccagtgtccatgagaggtccttgcccctttgtaaacattgacatccaggccactggagcctggggaaagtgtgcaaacatgaggatgccacactgtgtgtccaggggccaggaacacagctggcaaccatacccgtgaagtcctgaggatctgccccccactggaacatggcaagtgccgggggcagaagcaaggcagttaccccacacccaagggctcacatgagatggcagcgacgctcttgcccataggaattctccacacgggcaatctcctggatgactttggtgaagatgccttgagtcagctataagaggagaggattcagggcaaaagtcagttcagtgccaataccacccagctctggggtgaaagccccattcccgcaacattcccaccaccaagcagtacaataaggaaaacacagctaccatcaccacccttctagtcttcaggcccagcacctgattctctcgagcagatgactccataaatgtcgcaccccaggactctgccagcttctttccttcaactgcctgtacctctctggaagcaaatttgggacataaagatggaggatagaaatgtcagtaagtgctctgaaaaatcttcagaatcaagacttcctggccaggcacagtggg

SEQ ID NO: 111258 - DNA, 653 bp, Homo sapiens
cttttttgaaacaggttcttgttctgtcatccaggctggagtgcagtcgttatccaagctcactgcagccttaaactcctgggctcagtggatcctcccacctcagcctcccaagaggctgggactacaggtgcacgccaccatggccagctaagttttcttatttttttgtagagatgaggtcttgctgtattgcccaggctgctcttgagctcctggcttcaagccatcctcctgtcttggtttcccaaagtgctgggactataggtgtgactcaccatgcctggcctacatccagtttaatttatactacactgtgggtttagtcctcaaacatgtttttgttttacatataaaaatttgaggtaaaagaacatttttacattggtcaataatggtacatttaaacaatggacgactatatccattaaaatcgtgttgtggaagaatattcagtgacatggaaagactgactcaagggcaagtgaaacgtgtcaagagtctgttaggtactagacactgtaaactgggtcttggctgtgttacttgcttacatcctccatcatgtgatcttttagataacaaaatcgagatacatagggataatgggtgggctgattgaagaacagaacttgggccacacttctagatgc

SEQ ID NO: 111259 - DNA, 418 bp, Homo sapiens
  misc_feature (1)...(418): n = a,t,c or g
cttctacacaaaatcaatggatgtcttagaaaacaaatagaggtaaatcttcatgacactgggtttgggtgatggcttattaaatatgacaccaaaaacccaaacaacaaaagaaaaagtagatcaattggacatcatcaaaataataaacttttgcacttcaaaacactatcacnnnnnnnnnnnnnnnnnnnnnnnnnnnnnnnnnnnnnnnnnnnnnnnnnnnnnnnnnnnnnnnnnnnnnnnnnnnnnnnnnnnnnnnnnnnnnnnnnnnnnnnnnnnnnnnnnnnnnnnnnnnnnnnnnnnnnnnnnnnnnnnnnnnnnnnnnnnnnnnnnnnnnnnnnnnnnnnnnnnnnnnnnnnnnnnnnnnnnnnnnnnnnnnnnnnnnnnnnnnnnnnnnnnnnnnnnnnnnnnnnnn

SEQ ID NO: 111260 - DNA, 458 bp, Homo sapiens
gagacttcagccacgtgccaccgtgcccagctaacttaatttttttttgtagagatagatagggtcttgctatgttgcccacattggactcaaaatcctggccttaagttatcttcccgcctcagcctcccatagtgctgggattacagttgtgagctactgtaccaggccttaacaatttttaactgtggttctgcccacacatcaagtcaaataattctaagtaagctaacactggtttctttgataacaggctactacctgggagttctcttcagagaaaattttccactgtttattttttgtgactgaagaccattagtgagttcagtcaaagagccatttcttgtccacatacactaaaacaatgacttttctcttaggaaatcagatagaagcttggcctgtttgtgatgccatacttggctatctagggattctaatgctatggggatatg

SEQ ID NO: 111261 - DNA, 419 bp, Homo sapiens
  misc_feature (1)...(419): n = a,t,c or g
aaaggcttttccattttgcttggagcaccgtccaaattgggcccgtttcctattccccaagatttccctttgccctgttggtccccccttcccgcctaattaggccccccttttaggggttttataaaaaacctggtttatttcccaaccaagggctgaggtttcctgtggggcccatggccaaaccagaaacttgttagagtgggcctttggggccttttaccaaaccaggggccttttagaatgggcccgggnnnnnnnnnnnnnnnnnnnnnnnnnnnnnnnnnnnnnnnnnnnnnnnnnnnnnnnnnnnnnnnnnnnnnnnnnnnnnnnnnnnnnnnnnnnnnnnnnnnnnnnnnnnnnnnnnnnnnnnnnnnnnnnnnnnnnnnnnnnnnnnnnnnnnnnnnnnnnnnnnnnnn

SEQ ID NO: 111262 - DNA, 389 bp, Homo sapiens
ttttttttggtagagacccgggtcttgctttgttgcccagcctagtctgaaacttctgggctcaagtgatccttctgcctcagcctcccaaagtgccggaattacggagtgagccacccttttaaatcccaaacactttggtgatcatgaaaatttaggctttcagagttgaccatcaccaagatgataattcaacatttcttttttctggaggacccaagcaggacagggaacagagcttatgaattccacctgtggtcaacgagttgtagactggaaagacacctgcttgagaagtgaggtggaccacacaggatgtctgagtgccgatcacctttatgtttctctctatctctctctctggctctctctctctctctctctctctc

SEQ ID NO: 111263 - DNA, 347 bp, Homo sapiens
atcattttctttttatcaatggttttttataatctaattatgatgtcctttgatatggttttcttcacatttcttctgcttgggatctattgagcttcttagatctgtgcacttattattttcatcaaatttggaaacatttcagtcactatttcttttttttctccttcctccactttggcttgatagtttgtcatgggtaaatataaatgcatcatagtcctgttctgcctgtatttcaatgtctgaaaacagctgttacatattcctcgtccaatttccagttctttattacaaaagggtaaatctagtactagttatggtactggtacttcattgctcgtgac

SEQ ID NO: 111264 - DNA, 614 bp, Homo sapiens
ttttttttttttaagagatgcgggtctagttatgtttggcaggttggtcctgaactgctggcctcaagcaatcctcccacctcatcctaccagagggctaggataacaggcataagcaccatgcccagtcaagatttgaatccagacagtctggtgccagaggtatgcactaaacctctaggcatgacattgtctctcaaaatgactcattatacttaaaaacataagggacaaatttttgcttcttcgggtttttatgctgtggcaccaatcacatactttttttgaaaactgggcacaatgcaaaccacaattacgtttttaaattacaagaaaaatactcccagattttaataagcttctacataatgcttagatttgggctttgcatggtgttttaattggatagtgcatcggctcttggccttgagccggcaagattagccattttgggattgcccgtgatggtgtgaggaggggcttcaacaattagtgaggcgatgcttcttctggggaaattcttttaaccatatatggataatagaaggcaatatacttgttcaaaacctgtaccacaaggcagaggttcttaccgaatagcacatcactggcgg

SEQ ID NO: 111265 - DNA, 592 bp, Homo sapiens
ttttgtgagatggagtcctgccgttgttgccaagcttgaattccaatgttccaatttgggttaattgaaacttcccaggttcaaatgattctccctcttcagcttcgaggatagccgggattacaggcaccggtcatcatgcccagctaatttgtttatttttgtagagagagggttccaccatgctgtccaggctggtcttgaactcctgacctcaggtgatctacccgcctcagcctcctaaagtgctgagattacaggtgtgagccactgcatccagcctccctgactctttattaccttttattctgtttctaagtacttaagtcctgtctccttggccaagccagactaggcccaacaccctcaattcaccctggctccaaagagggcaaaagcaactctctttctctaaggccagggaagtatctaccacaatctctgaaacctgtgaacttttctgtgggcctgtagtttcaagtcccaccttaactgtccttaaaaaaaaaaccaaacaatgacctacctaatccatctaatttctcaactaactgccaccatctctactatatccacctgcatcctatttcac

SEQ ID NO: 111266 - DNA, 345 bp, Homo sapiens
  misc_feature (1)...(345): n = a,t,c or g
gaggcgagaaattcacgagagatcgctctgtggtgctggtgaagcctcagcagcatgaggtagcactcaaaactgcaccaacgtgcaaatggtatagagacgaatgagctgtaacgaggaacttctcttgggcacaacgagcccttccaaaaactacaatatgatgactgtatcacgttaagatatagtctgtggatggatcatctgatgatgatggataaatttgatttttgctttgggtgggctcctcttggggatggattatggaatttaaaccatgtcacagctgtgaagatctggcacaagatagaatggtnnnnnnnnnnnnnnnnnnctcgagcggcc

SEQ ID NO: 111267 - DNA, 445 bp, Homo sapiens
caggctggagtgcagtggcacaatctcagcccactgcaaccttcggcttccaggttgaagcgattcttgtgcctcagccacccaagtagctgggattacaggtgcccaccaccacgcccagctaatttttgcatttttagtagagacaaggtttcaccatgctggccaggctggcttgcgtatgttaaaaacaatcctgtcctttgctgaatttcatttctggtggcatataatttggagactgtactgaggcttaatgttgacaaacacagtttaaaaatgcacatggctaaattctaaacaagttatataagggtatataagagttggtgggtctgttgggaactgtaaatataatggggtcttacataaagacattttacttttgttctataagattgggcattgaagttagatgttgtacaatttatttttagagatgggg

SEQ ID NO: 111268 - DNA, 254 bp, Homo sapiens
ttttttttttgggagaaacagtcttgctatcttgcccaaactgatctcaaactcctgacctcaagggatcctcctgctttggctccccaaagccctgggattacaggcttgtacgtcacaacccctggccatgagtcgtaatttagcacttacaaacattatatcattaagatgtatgtacgtatacatatacttagaaattcctgaccatctccatacatccaaattcagtcattttaggatttcttttttaa

SEQ ID NO: 111269 - DNA, 605 bp, Homo sapiens
tttttttttgagatagattctcactttgttgcccgagctggatacagtggtgcgatcaggtgcgtgccaccatgctcagctaattttttttaacttttaagttttttggagagataggggctccctgtgttgaccaagctggtctcgagctcctgggctcaagcgatcctcccatcttggcctcccaaagtgctaggattacagacttcagccatcgtgcccaaccatgtctataaattctttaagactcctcccactgagtaacagagtctgtttcttccccttgaatctgagccaaacttagtgactcagactacagtagaaatgattctatggtgacttgtgaggctgggtcataaaggcaatgtggcctgactcatgggagtcctgagctacagtgtaagaggtgtcaacactctcagctgccatgctgtgaggaagcccaactggctcatgcagagagacaacatggagaggccttgaggctatatgaagagagatgcttggccagctcccagctgctccagctccccagtgctccggcttcccctgtaaccacaaaagagaccccaaggcagaaccacccagatgagcccttcccaaat

SEQ ID NO: 111270 - DNA, 437 bp, Homo sapiens
  misc_feature (1)...(437): n = a,t,c or g
tcacttacggacccggaattactgggtcgacccacgcgcgcgagaaacagctctctcaatacatatagaacagcgtatcctccaacatgatggaggagatgtatatgaaagctcatgctgctatacgagagaatccagcctatgaaaagaagcccaagaaagaagttactaagaagaggtggaaccgtcccaaaatgtcccttgctcagactaaggatcgggtagctcaaaagaaggctagcttcctcagagctcacgagcgggctgctgagagctaaacccagcaattttctatgatcttttcagatatagataataaacttatgaacagcaactnnnnnnnnnnnnnnttagggccggcccctttaaaggaccattttttaaacccccgggtatgaccctgacttcttattttaggggggccccaaacccaaatc

SEQ ID NO: 111271 - DNA, 396 bp, Homo sapiens
  misc_feature (1)...(396): n = a,t,c or g
cccacacgtacgtgccgccctttaacaannnnnnnnnnataggatcaaagtgaaccgaaaagctgggaggcttgtaggaggggtggggaccatctaaaggatcaagaacaagatcaccgtgacatccgaggtgcctttctccaaaaggtatttgaaatatctaacccaataatatttgaagaagaataatttacgtgactggttgcgcgtagtggctaacatccaaaagagttacgaattacgttacttccagattaaccaggacgaataataggaggaagacgaggattaaatttcatttatctggaaaattctgtatgagttcttgtttaaaacttgggaaccactaatgcaaataaccaccaagacatgtatgacccctgcttgtaacgcggc

SEQ ID NO: 111272 - DNA, 690 bp, Homo sapiens
tttcgtccagaagcagatgctccagtgcttggtagtccttagaaggaagaggcagcctcagagccaccagctgctgctcctgatgctgcaccaccaccccctgataggcccattgagaagaaatcctattcccgggcaagaagaactcgaaccaaagttggagatgcagtcaagcttgcagaggaggtgccccctcctcctgaaggactgattccagcacctccagtcccagaaaccaccccaactccacctactaagactgggacctgggaagctccggtggattctagtacaagtggacttgagcaagatgtggcacaactaaatatagcagaacagaattggagtccggggcagccttctttcctgcaaccacgggaacttcgaggtatgcccaaccatatacacatgggagcaggacctccacctcagtttaaccggatggaagaaatgctcactttgcaaatatccattaaatacctgccatgtaccaagtgtttttcaacacctaaaggaaggtaggacttgatatgagagccctctagaattcttattgtttaggcctctttctttgtctcagggtgtccagggtggtcgagccaaacgctattcatcccagcggcaaagacctgtgccagagccccccgcccctccagtgcatatcagtatcatggagggacattactatga

SEQ ID NO: 111273 - DNA, 363 bp, Homo sapiens
  misc_feature (1)...(363): n = a,t,c or g
ttttccaggggctcaagtaaattcaaaaagcccataatccccagccatggtccacctttccagaaggaaccccaaaaaggtcttttttccccctttccccccaccgtattttggagtttccaaaaccccagaagggccctccaataggcccattcccccaatttccccatacaagaggcctccctgtttaataggccaacctaggtgagttaggacaactaatgaatggtgggcggtttccacaaagaaaaacccccctccnnnnnnnnnnnnnagctacttagcaaacaaaccccaaaaactaaaaaaccccacaagttatataactattgatatggatgatccataaaatcccaaaatcgc

SEQ ID NO: 111274 - DNA, 884 bp, Homo sapiens
  misc_feature (1)...(884): n = a,t,c or g
tagccccaatccgggttacgacccacgcgcccgctgactttggaccccgtgctggtggagagatttacatttagttcagcgagctgctccccaatcgagagggcctgaagaaagccgactgctccttctggtccaagtacatctcgtctctgaagacatctgcagatggagccaagggcgggcagtcagcagagagtgaagaggaggagttgacggctggatctgggctaagagaagatctcctaagcctccaggaaccaggctctaagacctacagcaagtgaccagcccttgagctccccaaaaacctcacccgaggctgcccactatggtcatctttttctctaaaatagccacttaccttcaataaagtatctacatgcggtgaagcattgttgactctaatgtgtgaatccaaggcaattcgttggtaacaccaactatatcttaataatctttctaaggtttgaatcccaggctgctgtttcnnnnnnnnnnnnnnnnnnnnnnnnnnnnnnnnnnnnnnnnnnnnnnnnnnnnnnnnnnnnnnnnaggactttgctcctccagaaggagagaatgctgggcaaacagtgacacaaaaaatggggatccatcaagagcaggccccaggtggcatagtcccacctgagtggtagaaaagactcactcacaaaggttccagagtggaggtagaagaccaactggaatgggtgcaatggtccagtgagaagcaatgcactctgaagcaagacaatgaggatggagctggggcaagaaacagagccacaggccctggaggaagtagaactgatggaacttgattaaatgtgagagggggttggtgcaaggtgatagaattgccccaactttgggatgatttg

SEQ ID NO: 111275 - DNA, 415 bp, Homo sapiens
  misc_feature (1)...(415): n = a,t,c or g
tccacttctagttttctaccctagaaaaatgtgtgtgtgagaagagacatgcacaaaaatgtttgtggccatgctgtttattttttaaactttagaaacaattaacttcttaagtagacaacctaactgcccctcattttagaaatggatttaaatactgtgaatcaacgtgaagcagcgtattaaaaaaaaacaacacccctcagaagtggagaatatttgtaaatcatatatctgataaaggannnnnnnnnnnnnnnnnnnnnnnnnnnnnnnnnnnnnnnngcaatnnnnnnnnnnnnnnnnnnnnnnnnnnnnnnnnnnnnnnnnnnccataatttagaacannnnnnnnnnnnnnnnnnnnnnnnnnnnnnnnnnnnnnnnnnnnnnnnnnnnnnnnnnnnnnnnnnnn

SEQ ID NO: 111276 - DNA, 414 bp, Homo sapiens
  misc_feature (1)...(414): n = a,t,c or g
annnnnnnnnnnnnnnnnnnnnnnnnnnnnnnnnnnnnnnnnnnnnnnnnnnnnnnnnnnnnnnnnnnnnnnnnnnnnnnnnnnnnnnnnnnnnnnnnnnnnnnnnnnnnnnnnnnnnnnnnnnnnnnnnnnnnnnnnnnnnnnnnnnnnnnnnnnnnnnnnnnnnnnnnnnnnnnnnnnnnnnnnnnnnnnnnnnnnnnnnnnnnnnnnnnnnnnnnnnnnnnnnnnnnnnnnnnnnnnnnnnnnnnnnnnnnnnnnnnnnnnnnntttnnnnnnnnnnngctacagcaatcaaagcagtgtggtactgacattaaaacagacataaagagcaatggaatggaatacagagtccagaaataaaccctcgcatatatggttaaatgatttttgacaaggttgccaagatcattt

SEQ ID NO: 111277 - DNA, 394 bp, Homo sapiens
  misc_feature (1)...(394): n = a,t,c or g
ttttccnnnnnnnnnnnnnnnnnnnnnnnnnnnnnnnnntgaaggtaatgatgttatcccagctccctggaaaatttcccctccggatttaaacaattcttcttccttagcctcccgagtaagttagattccaggggtgggccccccaggccccctaaagtgtgaaatttttttgtaaaagtaaagtttccttttattggtcagggtggtttcaaaatcctgggggcaggtaaacccttttggtcaacccccccaatgggtggggattcagggtttaannnnnnnnnnngggtttttttccccccccnnnnnnnnnnnnncnnnnnnnnnnnnnnnnnnnnnnnnnnnnnnnnnnnnnnnnnnnnnnnnnnnnnnnnnnnnnnnnnnnnnnnnn

SEQ ID NO: 111278 - DNA, 336 bp, Homo sapiens
  misc_feature (1)...(336): n = a,t,c or g
gcacgagcatcactcccatcatcctagcgggaactaaacttgatcttagggacgatccagacacgatcgatatactgaaggagaagaaactgactcgcctcacctatcctcagggtctagccgtggctaacgagattggcgctgtaaaatacctggagtgctcggcgctcacacagggaggcctaaagacagcgtttgacgaatcgatccgaacagtcctctgcccggctcccgtgaagaagaggaagtgaaaatgcctgctgttgtaaatgtctcaagccctcgatcttggtcctggcccttggaacctttgcacgctatgctcnnnnnnnnnnc

SEQ ID NO: 111279 - DNA, 388 bp, Homo sapiens
  misc_feature (1)...(388): n = a,t,c or g
gggacttgaagctcagtgagaaaaggatgatggagatagccaaagccatgaggctgaagatctccaaaagaaaggtgtctgtggccgccggcagtgaataagatcacaaactgggcaccctgtccctcccgctgcctccagcccagacctcagaccgcctggcaaagctgaggaagattacctagacgcatgctttccagacagggcgttttggctgcatcacagccactggctggtcctattcatttccatttttatgtatgttttgaaaagaaaaggtccgnnnnnnnnnnnnnnnnnnnnnnnnnnnnnnnnnnnnnnnnnnnnnnnnnnnnnnnnnnnnnnnnnnnnnnnnnnnnnnnnnnnnnnnnnnnnnnnnnnnnnnnnn

SEQ ID NO: 111280 - DNA, 812 bp, Homo sapiens
  misc_feature (1)...(812): n = a,t,c or g
cagcaagagcgaaaattcatctcaaaaaacaaaattagtaggacctggtgagatgcacctgtagtcccagctacttgggagaccgagccaggaggatctcttgagcccaggagtttgaggttacagtgaggaccactgcactccccctgggtggcagagggataccatgtctaaaaactacaatcaaaaaaagccttttttttaaaagttactttggttttaaggaataagaagccttgaaacactcagccctggactgaatcctccaggcaccagagctgtgctggtctggacccttccaccccacttgaaacctgttggccctgttgcaaccctctcttgctttccctgagaaccctaaggtgaccccaggggctgctgatggagacagtcacctccttgccctgctccctgcagcctctcactttggctgctttgctatcataaggaagggaaacataaaagctactttttaagacattacaaaggtnnnnnnnnnnnnccccctgggataacgggcgggacccactgcccccggccttnnnnnnnnnnnnnnnnnnnnnnnnnnnnnnnnnnnnnnnnnnnnnnnnnnnnnnncagcaccttttttgggggcacaaaaattggggcctcggggactcttgcctttgtagggccccaaaacacctgccggccgccttggtcccgggggctgctcaacaaattctggagctgttccggggcatggcaggacactttacctgaaagccttccttctttgaatatggatttgcccaggaggtgctggcgattgggaatgctctggaactccc

SEQ ID NO: 111281 - DNA, 455 bp, Homo sapiens
ggggttcaagcgattcctctcaagtagctgggattacaggtgcctgccaccacatccagctaatttttgtatctttagtaggtgtggggttttaccatgttggccaggctggtcttgaactcctgacctcagggatccacctgcctcgacgtcccaaagtgctgggattacaggtgtgagccaagacgcctggcctctgccgtgattctgacagtagcctggtttggaaataaggacaataattataagatcctaaggctgaagaataaagagatgaatgagggggaaagatcccacaagtgtcttgaagaattcacagttcaaatggcagagtctctgtgagccagtttggtccatttctgacaggcgtttcttatctgtaacttcaattttgaatatgtgattttttttccctgccaaaataatgtcagtccacgtcatttttaaaaaagaac

SEQ ID NO: 111282 - DNA, 394 bp, Homo sapiens
  misc_feature (1)...(394): n = a,t,c or g
agtgatgtttgaaaaggatccataacttggatttancatatcaggtggtgtcgggggtataggaaacccattcagacctgatgatgatgtaagttttctttgtatattcttgaaacacctataaagctttatttaccgactgaatacttaaatgtaagagaaaatctaatagatgtttatgtaaatctaggtagacatcacctggattccccactctattgcttaccnnnnnnnnnnnnnnngatcaggtgaggtgttcccaattccccgcaaatctttaaagggctctcccacacgaaggggggtttaaagttttttagcgttttcccacacccctttttaaagaannnnnnnnnnccttttaaaacaacccctaaagctaagatctgtgggg

SEQ ID NO: 111283 - DNA, 396 bp, Homo sapiens
gtttccaactatcaatttatttgaagttaaacactaagtgaataataatgttctgtggcttgagcataaactcaaagatcggacctcctggttggtcacctgagtacatgtctaagtcacctatctattcagtctttcccctcatgtttttgttttgctttgttttgttttgtttttgagatggggtctcgctctgttgcccaggctggagtgcagtggcatgatctcagctcactgcaacctccacctcccaggttcaagtgattctcctgcctcagcctcccgagtagctgggattacaggtgcctgccatcatgcctagctaatatttgtatatttagtggagatggggtttcacaatgttggccaggctggtcttgaactcctgagctcagg

SEQ ID NO: 111284 - DNA, 948 bp, Homo sapiens
cttttgaaatcacgtctaaaaaatatgactcagcctcttgagtagctgggattacaggcatgcgccaccatgcccagctaattttgtatttttagtagagacggagttgcaccatgttggccaggctggtcttgaattcctgacctcaggtgatccacctgcttcggcctcccaaagtgcctaggattaacaggtgtgagcccacccacccccggcctaattttgtatttttagtagagatggggtttcctcccaaaggctggtccttgaactccccgaccctcaggtgatcccgccccaccttggcctcccgaagtgcctgggattacagggcgtgagcccaccgtgcccggcctggatgtttttgaatgattatggaaaatggggtattacagcatttaaaacttagacttgatttttaaatatattaatttcctttttaaactcaatataatggttaatattactgtaggcacttactaggcatttctgaaggttgggtcttgaggataaggattgaaaatgacagttgttggattttctgagggtaatataccccaaattaaaaatatatggtatggtggtaccatggaatccctaaacctgtccttccttcctggttcccctcattttgcctttaccttaaaataatcctttccatattttttaaagtgttttggccccatgtgcttgggtagccttgaagtcacccagaataactaggactcaaattcagacccaaacccaggactagctttttgtgccatgagttagccatggtcctggacccgagcaaaaagaatgattatgatggtcagagtaagatgagcaattgcaacataatattctctaatattgtatactgtaaatttattcagctgccctcgtttactcacagtttgcttatttgccaccataagaaatggtacaataaaaattcatgtaatc

SEQ ID NO: 111285 - DNA, 906 bp, Homo sapiens
  misc_feature (1)...(906): n = a,t,c or g
tttttgtagagatggagttttaccatgttgcctaggctggtctcaaactcctgagctcaagcaatctgcccacttcggcaccccaaggtgctgggattacaggcgtcgagccaccatgcccagccacaggactccttttcttaaaacccagtaagtacattaccagatttaaaaaaaagttatttcatatcatcaaatatctatccagtcagcattggcagagtatttttactatattattccaaagtaatcagtaagcattattttactcttctaaaatacaatgcagtttacaacaaagttcacatgtatcaacttgccactataccattatgtttctgttgttcnnnnnnnnnnnnnnnnnnnnnnnnnnnnnnnnnnnnnnnnnnnnnnnnnnnnnnnnnnnnnnnnnnnnnnnnnnnnnnnnnnnnnnnnnnnnnnnnnnnnnnnnnnnnnnnnnnnnnnnnnnntctacaccattatttttgtttcaagttctactactaggacgttgggaatatacccaaaactgacagtatgcccagaaaaattaagcaaattactttgcattgatatagatttatactaacataattatttacaggtactttcagtactttcaagaaagaattttaaaaatgaaagtaatgtacaggcactgatgaacgtaaaagtgacgtaaaaatactagtaactacgtaatctcagtagcaaccattgtcacacagaacttgaagataagcagtcaataagctctcattttttgggaagattttgtttctccatctctctattagccttggtcaatccagggacaccagcaaaactacactgtcctctctttttgcataccataaagctacaataaattttaaaaatcccctttaaagaataaagataaagaag

SEQ ID NO: 111286 - DNA, 591 bp, Homo sapiens
catattagctactaatgaaaaggaagcataaaaagttttactaccactgaatctgctaggactttttattgggtttagtgatgcagttttcaatgaaacatgctgctttcggattaatgcctctagttaaaagaaaatctacaagtacttaaaaatcaaatcaaaattattgatccccgagtggctacaatgcctctttaataaattccagtcttctttatggaattggttaacccctttattaagccctctcttgcttatgtgtcttgtattgatatttggaccctgtatacacaatactataactcaaattgtttcttctcatctagaagcaatcaaactccaaatggtgctgtaaacagaaccacacatagacacatcattcttctgaggacccttagattgaccccaggaggagccctagctgctcttccccattcgacgcccttttgcaacaagaagtagccagaaggagtcgtcgcccaaaactccctaacagcagttagtgtggcatctccacaggggggaatgttgtaggagttattaagaaattattttaggcagatagagaggaaaatgggtccttgggtc

SEQ ID NO: 111287 - DNA, 417 bp, Homo sapiens
agcctcctgagtaaggatgatagtgtagtaccagcacacctggttgttttttgtttttgtttttgtttttgtttttggtagagtcaaggttttgccatgttgaccaggctggtcttgacctcctgggctcaagcagtcctcctgccttggcttcccaatgtgctagaattatagatgtgaaccactgcacttagcccagtcctcattcttagtggatatttgctgactcctatttcttaccttgtattaaaatttaaaattaactttgttacttgtactctgagtgttgttataggcatatagggcaattaactctttcagccactttaaccaatctggacatcccaggttttttctgtaaaagtagggaaataagtactctccctcacaggatttttattgttaagatcaaatgta

SEQ ID NO: 111288 - DNA, 375 bp, Homo sapiens
  misc_feature (1)...(375): n = a,t,c or g
cgagccccgtttttattaaaagttaaaaaaatttgctgggggtggggacctgggcccgttgttcccggttctttggaaagtgaggccggagaatccctttaaccccagaggccaaggctttggttaacccaaattgtgccccttccctttgggctgggggaccgttaaactttttttcaaaaacaaaaatttgggttttttttcccctttaaaattattccgtgggtcccccaaaaagttaaaaaaattcccttttattaaaccatttttctcctagggttttatcccnnnnnnnnnnnncaggaactttgagcnnnnnnnnnnnnnnnnnnnnnnnnnnnnnnnnnnnnnnnnnnnnnnnnnnnnnntacgacc

SEQ ID NO: 111289 - DNA, 655 bp, Homo sapiens
cccaggtggaaggccttgagagtctcagcctattccccccgctataccagctctcccacctggagctgagtgtccttgacccctcaggcggccactcatccctctgccctgccctgcctcttacttctgcaccactgcaggggggcccagcctgcactcttacccattgcagtcctgctaatgtggacaaaaaccacatgcagcccacgctacacaatgcctcccactacctggaaggccgcactgctcagaatggaggtcagggcccaaagctgtctaactcactccccacacctccatccacatgtctgcagtactccttgttctttgctttccttggttcatctctggattcgtctctgtcggaagtgctcttcctcccctctggatgtccaaatctgccaccgcccctgcaggacaggtcccctctctcctctgagctcccccagcatgtctcaggtgttctgatctctgacacacaagtctgtcacctccaggcactttaagctcctgggggtggcaggggcagggggaagcccctgatatggcaggggattgggaaatgcttgtggagtgagggaagcagggagaaggattgctggcctccaggatcgctgaggctgtccccacggcatgacgtgttttcatgactgtg

SEQ ID NO: 111290 - DNA, 576 bp, Homo sapiens
ggtgtctgccgttctgtcacctaggatggagtgcagtggcataatcttagctcactgcagcctcaacttcccaggttcaagtgatcctcctgccaaagcctcccaagtagctgggcctaaaggtgtgtaccaccatacccagctaatttttactttttgtagagatggggtctcactatgttgccccaaggatggtcctcgaaattcctagaccctcaagcgattccttcccaccttgggacttcctggtgttgggattaataggcgtgagcccacccacaccccaccccaagtcaggaacttatttaacaaatgaatacatgactgtgtagggaatgaggtgtgcaaatgtattagggagcgtcttatcccaacatttcttaaggagtcattaaatgccagagaagagttttttcttttcttttttgggagaaagggatgttgggtatgggaaagggatactgggcatgggaaagcagtgagggcagacaaagagttcaaaataaaacatgttaggctggaaatacttgtgagacatcctggtgaatccattgagctggaaaaaaaaacctctga

SEQ ID NO: 111291 - DNA, 331 bp, Homo sapiens
  misc_feature (1)...(331): n = a,t,c or g
gaaattgaaaaggacacaaaccactggaaagacatctcatgttcataggtcagaaaaattaatatttctaaaaggaccttatacccaaagcaatctagagnnnnnnnnnnnnnnnnnnnnnnnnnnnnnnnnnnnnnnnnnnnnnnnnnnnnnnnnnnnnnnnnnnnnnnnnnnnnnnnnnnnnnnnncccaaatagccaaaacaacacaaagcaaaataataaagtgagccactgtgcccagaatttgaatatcttttgagcgatgtgcccattcatgtcttttatacgtttttctctttatgtgttaatctttcgaaaaaaaggtttta

SEQ ID NO: 111292 - DNA, 1858 bp, Homo sapiens
atagagatgggttcccactgtgctgcccaggctgctctccaatccctggcgtcaagcaatcctcctgcctctgcctcccaaagcgctgggattacagttgagagccactgtcctctgcactgaggaggctccttacctggcggaacatcaggcaggtcttgccaggccaggtttcagaacttacggaaagctggtctggatgtagtgcttgtagagaagcttctgagagattgggcacatcctgttacgttgctgcttctcctgtccttatgttattagtaagttctgaagtgatgtaaatgctagaactactgtagaactgtatgccagacactaagagagactatgtaacattccaggatataaaggaatgtatgttgtcactgggcagcaaaccacaccctaaagacaattcagaaagagtccgagggagaggaatatagccccaggcaatctgctggctgaagatccctgccccttcattaaagctgagtgcctcctgattctgtctgagtattcgcctttgtaaagccccaggccagtaatcaaggggcagggcattgttgtgtgttaaccttgaaggccttctggggagagacagtacagggacctcaaatgaaaccaaagggggaaacggggactggggcacccacctccccaatcttcgtttttgttttttgtttttgtttaagacaggatctttgccatcttgcctagggttggcatcaaactcctgagctcaagtgatcttcctgcctcagcctcctgagtagctgggactacaggtgcatgccaccacacctggctcccagtcctaattccagcctaaactttccccattcagaaacactcctggatatagtggcccagcctgtcctgactgagtgcccagcactgacaatgttgacacctggggagggagggttgggtttcaagctgaggttgaaaagggatgttgaatgggctaaggataagagacagcagggttcgttatcttttctggctcaggtggaggaaaaagaaggatccccattctgtgggtgttccttgaccatctctctacgctagagctgaggtcacttctctgctatgacaacatagctgggttctgaccttttgaccatcaggaaagcaatgtcaagcaagctgaagctgaagcctgctcttgagggaagaaggggggggtcctgtcccagatgcaagaaggggagcttgcctgctgctctcacacaatggagcccttgtttctcttccttgaaccagtatttcccaagattgagtgacagcccaggagaggatgtgggtctcatgcagagagctgggatcttcttggccattaaagtatattgttcacccccaccccgcgagaaccaagctcaggagttgcctgcctctgcacacatgctgagtgtgctgtttgtgtatatggcaggaccgtccctatggggcatgtgtgagctccgcagttgggtcaaggctcctcggtccaggtttacttcatcccgcctggacgtgatttggctttgaactgtctcgcatgcagccacaaagcaacttccatccctgtggtatgctgatagctgtactcattgaaacagtggcctctccaagatttaaggatattgaacaaagaaactgggactgagtgacttgttacatgaacaagttcagagggcagagggccatcatctcagcttgtggagacctttctttccctggatgctgcttctcagctaactccctctctcttcgtgtgtgtactcggccttcagggtttccaccgatttttacaccttcttcccaccacgatagcttggctttaatgtggaattaaattatatatttttaaaaaaaaaaa

SEQ ID NO: 111293 - DNA, 541 bp, Homo sapiens
gcaaacgcttgcaatgcagttatacagaagccaggcaaaaagctgtcagatctggaaagagttacctccctgaaagtatataattggtttgctaacagaaggaaggagatcaagaggagagccaatattgaagcagcaatcctggagagtcatgggatagatgtgcagagtccaggaggccactcaaacagtgatgatgtcgacgggaatgactactctgagcagactgataggatgcaagctgaggtcgtggcacaggaatgacagacaccatttggggagtatccacagagtcaaaggaacactataatccccacctcagcgtgaggataattgatttccagctgcaataagccgtgcctcattatagccacactgtggctagattatacttctttgggtgctgtgctaagaatgtcaatggaaaaagccgatctcagattttgtttgaagttaacatgcctgacacagacatcctttcctctcacaagctgtgtgacttagtagataaaatactgccttctgcctttgggaccatgat

SEQ ID NO: 111294 - DNA, 363 bp, Homo sapiens
cctctttggcccttgtctctataattcactaattaaatatgtctcttccaggatatggcaatttcacacagagcccctaaaaatggaaagagatcatccaatcttccttggaggtcccagcacctacaagtacatatctcccttggatgccagtgggcaaagattctgcaactacggaggggctccttccctgacagagagcaagagagggagaccctgatgacttcttcgtcccacgtcagcaggaagtagttacagaagacccacgacgtccttatgcccaaagcttttcagggtctccaactcttgagggggaatactgttagggtaggcaggtagccagacaagagcaggcaaggaagc

SEQ ID NO: 111295 - DNA, 419 bp, Homo sapiens
tgcaccactgcagtcttcctttcaacagtcgtgggagatacaaaccagtccccattttacagatgtgaaaaagaaggcttggggaactcctcggccagaggccacagaggcctcccaatgggactccgtgctctgcaaagaagggaatctggggagcaggcaccgtttagagaaagaatctgcatccaacattcacaaaatccagcaggaggccatcaggagctgacctccatgcagagaaggaagcaccagcaccctgggtgagtgaggccaaggtcacagtcggtccccaggagagccggcagctggcccagggcccagacgggcctctggctcaagcccagcggaggctgtgtccagtgggccttgaggtcggcacgggaggcccgtccctcacccctcatggcaagaacaaaccc

SEQ ID NO: 111296 - DNA, 392 bp, Homo sapiens
  misc_feature (1)...(392): n = a,t,c or g
cgggatttctttaacccccgagtttcaaggcccccccggccacataagggggcccccttttcggatggattccccccccatttttttttccttgggccggggtgggccagcccccctattgttcccacttccttaaaaagttaagggaaagcctccttttaacccccggcgtccaaggtgttattaacccttattgggcccccaccctcccgcctgggccaaaaaacaaaattccttttccaaattttnnnnnnnnnnnnnnnnnnnnnnnnnnnnnnnnnnnnnnnnnnnnnnnnnnnnnnnnnnnnnnnnnnnnnnnnnnnnnnnnnnnnnnnnnnnnnnnnnnnnnnnnnnnnnnnnnnnnnnnnnnnnnnnnnnnnnnnnnnnnnnnn

SEQ ID NO: 111297 - DNA, 390 bp, Homo sapiens
ctctctactttcatgaaaattaaaattaaaaaatagctagagaaaaaattgcaaatacctaaaggtccatcaacagatgcacagataaacacattgatgtggtatacccatacaatgaaatactattcagtagtgaaacagaatcaatggatacccataacagcatgaataaatctcaaaataattatgctgagtaaaagaagacagattttacaatgggtacatactgcacgaccctgctgatataaaactctaaaatgtacaagctaatctttattggtagattagtagctgcttgggagggggaaacagaaggaagagaggaagggattacaaagggacatgacaaaacatctgaaaatgatgcttatgttcactatttctcgtgcc

SEQ ID NO: 111298 - DNA, 406 bp, Homo sapiens
  misc_feature (1)...(406): n = a,t,c or g
gaggcccggagttccaaacccccggggccccccccgtgaaacccccttttttcccaaaataaaaaaatccccttaacctggggatgggggcccgttatttccacctctccaaagggttaggccggggaatccctccaactccagaggtggagttttccatgagcctagattccctccctggttccccgccttaagggcccaacaaaaattttttttnnnnnnnnnnnnnnnnnntcttataactagtggatcttcttctgtctgtgtagttatgcatgtgatatgtatgtgatgtttatataaaaaagagctccaattaattggattaagtaaaaataagcacttagatcaaatatttttaaagaaaaaatagaagctgtaatcccttttagttcatgtgacttta

SEQ ID NO: 111299 - DNA, 911 bp, Homo sapiens
  misc_feature (1)...(911): n = a,t,c or g
gcgagccggagcgacggaaggtcattttccaagaagggccaaacgtgtgtggtgcactacacaggaatgctccaaaatgggaagaagtttgattcatccagagacagaaacaaacctttcaagttcagaattggcaaacaggaagtcatcaaaggttttgaagagggtgcagcccagctgggtcctctttctcctctccccatctgcccccatccctgctagatgagcttggggcagagggcgaagctgacctgcacccctgatgtggcatatggagccacgggccaccccggtgtcatccctcccaatgccaccctcatctttgacgtggagctgctcaacttagagtgaaggcaggaaggaactcaaggtggctggagatggctgctgctcaccctcctagcctgctctgccactgggacggctcctgcttttggggctcttgatcagtgtgctaacctcactgcctcatggcatcatccattctctctgcccaagttgctctgtatgtgttcgtcagtgttcatgcgaattcttgcttgaggaaacttcggttgcagattgaagcatttcaggttgtgcattttgtgtgatgcatgtagtagcctttcctgatgacagaacacagatctcttgttcgcacaatctacactgccttaccttcacttaaaccacacacacaaggtgctcagacatgaaatgtacatggcgtaccgtacacagagggacttgagccagttacctttgctgtcactttctctcttataaattctgttagctgctcacttaaacaatgtcctctttgagaaaatgtaaaataaaggctctgtgcttgacnnnnnnnnnnnnnnnnnnnnnnnncttnnnnnnnnnnccgggccccaattcccccttatagggagccgtataat

SEQ ID NO: 111300 - DNA, 1332 bp, Homo sapiens
ggaattcgcccatttggaacttttgagtccatcttgagaagctcccaacataatcttgacctcttttagaaagctgtgaagcaaggggagagtgaggtcagccggatcaacgaagtgctgcagaaactccagaatgagattctcaaagacctctcggatgggatccatgtggtgaaggacgcccgggagcgggacttcacgtccctggagaacacggtggaggagcggctgacggagctcaccaaatccatcaacgacaacatcgccatcttcacagaagtccagaagaggagccagaaggagatcaatgacatgaaggcaaaggttgcctccctggaagaatctgaggggaacaagcaggatttgaaagccttaaaggaagctgtgaaggagatacagacctcagccaagtccagagagtgggacatggaggccctgagaagtacccttcagactatggagtctgacatctacaccgaggtccgcgagctggtgagcctcaagcaggagcagcaggctttcaaggaggcggccgacacggagcggctcgccctgcaggccctcacggagaagcttctcaggtctgaggagtccgtctcccgcctcccggaggagatccggagactggaggaagagctccgccagctgaagtccgattcccacgggccgaaggaggacggaggcttcagacactcggaagcctttgaggcactccagcaaaagagtcagggactggactccaggctccagcacgtggaggatggggtgctctccatgcaggtggcttctgcgcgccagaccgagagcctggagtccctcctgtccaagagccaggagcacgagcagcgcctggccgccctgcaggggcgcctggaaggcctcgggtcctcagaggcagaccaggatggcctggccagcacggtgaggagcctgggcgagacccagctggtgctctacggtgacgtggaggagctgaagaggagtgtgggcgagctccccagcaccgtggaatcactccagaaggtgcaggagcaggtgcacacgctgctcagtcaggaccaagcccaggccgcccgtctgcctcctcaggacttcctggacagactttcttctctagacaacctgaaagcctcagtcagccaagtggaggcggacttgaaaatgctcaggactgctgtggacagtttggttgcatactcggtcaaaatagaaaccaacgagaacaatctggaatcagccaagggtttactagatgacctgaggaatgatctggataggttgtttgtgaaagtggagaagattcacgaaaaggtctaaatgaattgcgtgtgc

SEQ ID NO: 111301 - DNA, 356 bp, Homo sapiens
  misc_feature (1)...(356): n = a,t,c or g
gaatgatttaggtttaaaaaagttgctgttgagtcatctcaaagtaagtgatggaaatcaattcatattcaagtatttacagcattttatttatattaatccnnnnnnnnnnnaaatcaaaccggcgggggcgggaccttggcccatgggacccttgaccccctttgggcccaggctattcctccggccccacccgggggggccctacccggggaaataagggttacggggagccgggacccatggcacccctgcattccagcccgggggcaccaaagggaaatcttttccgggaaaaagaaaaaaaggggaaacccccgggggattaaggaaaattttgttccctcccccttatg

SEQ ID NO: 111302 - DNA, 387 bp, Homo sapiens
atttgggaagacttacgtgtaccttttagagctgtggaatgcttaacatggacatagaaaaagaaaatatttaaaaacacagaaaaccctaatcctttcctcccctggatcctcagttacacagggagccgctctgcctacaacatggcgatcgttgatgtgaagatggtctctggcttcattcccctgaagccaacagtgaaaatggtaggtgtatcataaccccagactgccctattttatttaatgatgtatgtatccccagcataagacaatactaatatcaaaatactattaaagtcaatctctatcaaagccttatcctttttccagctcagaaatataatgcacatgtgtttgtatggaatgctggaccatgtgcagagc

SEQ ID NO: 111303 - DNA, 361 bp, Homo sapiens
  misc_feature (1)...(361): n = a,t,c or g
cggcacgagggagactgagcctttcccgagaaaaaaggaattctgcctcgagcctgcagcacagaaactctgagtgagtttcnnnnnnnnnnnnnnnnnnnnnnnnnnnnnnnnnnnnnnnnnnnnnnnnnnnnnnnnnnnnnnnnnnnnnnnnnnnnnnnnnnnnnnggaaaagcgggccctgggtgagtgaaggagggaaaggaggccctcaaacgttgggtctgggattcaggaaaaaaaatgactggggaggagggggagaccgttctggcaggacacgaggacagcaacgggtgcatcaactacaaggcctttttgaaacacatcctatgcgtctgagtgctgcaaatccaggggg

SEQ ID NO: 111304 - DNA, 377 bp, Homo sapiens
  misc_feature (1)...(377): n = a,t,c or g
ccttattggcgggggtggtgatgcttactgttgtacatgttttattttgaatggtctttctttgctttccnnnnnnnnnnnnccctaaaaaaaacggggccccctttggtaccccaaacgggaccccaggggtggtaatgggccccttgggggttaaggcaccccaaacccccgggcctaagggaaccctctggcctaagccccccgggaagggggaataaagggttaaccccccggccctaagttaactttggagggatttaaagaacccccggccgcccccacctaaaagaaccccaaatttatttttcggaccttattttaaaaaaacccccccaaatttaaaaattttaagaaaacctttggaacccctatag

SEQ ID NO: 111305 - DNA, 391 bp, Homo sapiens
aagttttctgcttatggaccccgttcccctgttcgagaattgcttggaatggaaccagaaactgccaaatttaccccggctgacacaacttacaacgggaaggtcaaagtcactgtggaagtaccatgaaaggggaaatttataggtgttggtcaaagttacaggattgccaaatctgcagcagcaagaagagccctcctaagcctcaaagctaatcagcctcagggtcccaatatctgaaaccgctttttaaaattcaaaacaagagccttggcaaactaattatggggaaacttatttatatccgaaaggacgacttaacgttgactgtgagcggtatgaattgaaggcagaacttaccgcttgccagcttacaggataaacaacacat

SEQ ID NO: 111306 - DNA, 381 bp, Homo sapiens
  misc_feature (1)...(381): n = a,t,c or g
nnnnnnnnnnnnnnnnnnnnnnnnnnnnnnnnnnnnnnnnnnnnnnnnnnnnnnnnnnnnnnnnnnnnnnnnnnnnnnnnnnnnnnnnnnnnnnnnnnnnncacccggcttggggggtacttgccgggggacccacttctttggagggttgaggcaggagaacaattcaaccccaggcaagggttgcagggacccttaataaccccccgggcctccactttnnnnnnnnnntgtgggaaagggggtggcttctttttgcttttttgtaaaaaaaaaggtttattttggccccaaacccattgaggaacctttggggggactctcaaattgggggggaacttggggggcctaaaaccggagaggtgccaagccctgttgggg

SEQ ID NO: 111307 - DNA, 428 bp, Homo sapiens
  misc_feature (1)...(428): n = a,t,c or g
ctgcccccaaaacttctgttcttgccccagtctgcttgcattataggggaagagagtaattttgctaatggtctctttacaatgaaaagaaaagagaaatgttctgtaattagggaactacaacgattttggtaattacaacaaccaatcttcaatcaattttgaacccatgaagagaagaaactttggagacagaaactctggcacctnnnnnnnnnngaaagaaagaaactctggcccctgtggtggctgaggctactatgttgccaaaacatcaaatcaagggggctaaggcatgtgaaagttgccagtaccagaatggagtcacttatgtcaaaaccctaacaaaggggagtcaggaggccctaaaaaagttctcaccgcacatgcctataatataccttatcacaagaaattcctgcaggtcg

SEQ ID NO: 111308 - DNA, 391 bp, Homo sapiens
  misc_feature (1)...(391): n = a,t,c or g
tgggggcccccgggggtttcaaaatttacccgggctttgtttattatttaaggcccccttttttccaaagccttgggcccccaaattcttccaaaaccttgggccccaaaaggttttccctttttaccaaaaccccccctccgaatttttttccccccttaaaaaggtttgtggggcccctccctaaattttcccggcccgccaaaaaaggcccccgttttccccgcccaaaagcccccctccccgagggtttttttttccaggggnnnnnnnnnnnnnnnnnnnnnnnnnnnnnnnnnnnnnnnnnnaannnnnnnnnnnnnnnnnnnnnnnnnnnnnnnnnnnnnncccccgacccnnnnnnnnnnnnnnnnnnnnngctagctctctc

SEQ ID NO: 111309 - DNA, 228 bp, Homo sapiens; identical to SEQ ID NO: 101813
  misc_feature (1)...(228): n = a,t,c or g

SEQ ID NO: 111310 - DNA, 717 bp, Homo sapiens
  misc_feature (1)...(717): n = a,t,c or g
caatgttacntccattgtccttgaggccacttacctttgtcctccctgccatatgtcctnctgccaattcccccaacatttggcatacaataggagcttccagctctatgccaagagaggaggtacatgcaagaggtaagagcaggaagggaaatagcaaaatgatcaggtatttcaggatgatataatcatttctattaaaaattcaataaaattggctgggtggggtggctcacacctgtaatcccagcactttgggaggccgaggcaggcagatcacctgaggtcaggagtttcagaccagcatggccaacatggtgaaaccccatctctactaaaaattagctgggcatagtggcatgcgcctgtatctctcactatttgcaacagtaatagtaatagtgggctacttcactgagcacagccagagctgggagctggatggtatggaggtctctctaattgaggagatggaattgaaagttcagagaaaccaaggcaggcagagtttataaggcagagaactggagaggagacagctgcacaagtcaaggcctccagagagctgcagagggtgcccctaagctgcccagggcttacaggggagacaagcacctaaggccagggaaagaactacctgaaagaagcaggcacaagaatccaagctcccaaagggctgggagtagttgatattttcaaaagctggtgagaaaaaat

SEQ ID NO: 111311 - DNA, 363 bp, Homo sapiens
  misc_feature (1)...(363): n = a,t,c or g
gaaattgaaaaggacacaaaccactggaaagacatctcatgttcataggtcagaaaaattaatatttctaaaaggaccttatacccaaagcaatctatagnnnnnnnnnnnnnnnnnnnnnnnnnnnnnnnnnnnnnnnnnnnnnnnnnnnnnnnnnnnnnnnnnnnnnnnnnnnnnnnnnnnnnnnncccaaatagccaaaacaacacaaagcaaaataataaagtgagccactgtgcccagaatttgaatatcttttgagcgatgtgcccattcatgtcttttatacgtttttctctttatgtgttaatctttcgaaaaaaaggttttannnnnnnnnnnnnnnnnnnnnnnnnnnnnnnn

SEQ ID NO: 111312 - DNA, 363 bp, Homo sapiens
  misc_feature (1)...(363): n = a,t,c or g
ctatcccatgtcaataccctgatattgtttatatgcaccttctttctttcttgtttgattgatcgtgctcgatcttgacagagttgatcagtcttaccgaggctaacatttagtttagttggtcccttgtgctgtaactgtgatttctatttctgctcctttgttgttgttacttctttctgctttttttttctcattctcttatttttactctaaattaggttagacagcacattaattttaactttcatcttaaaatactnnnnnnnnnnnnnnnnnnnnnnnnnnnnnnnnnnnnnnnnnnnnnnnnnnnnnnnnnnnnnnnnnnnnnnnnnnnnnnnnnnnnnnnnnnnnnnnnnnnnn

SEQ ID NO: 111313 - DNA, 587 bp, Homo sapiens
cacgaatactaatctaataccatctcactatattggaatctctggacctcgaggccatgaattcgggacgagctatgctggaggaggcggccagggaagcggcggctccgtgaccagtgggtgccctcgcagtgggtagggtcccggaggggtcagcggcaattggcgcaacgcttgctgccgggtttggtccaagggctgcgacgtatcgggactgcacgctcgggagaagtgccacgcgcgtctgtcgcctgaccggagaggctggggagggcccatgccacggaaacaagactgcagaagtttctgggcactcagtcgggactctcatttaatacccagagagaggagatcttccaggttgtcccgactcccaccgggactcctaccagcagcaacctcatcattgtggccgaggcaggaattatccagactgccttgccactagatgaatggaagacaatgatttgaactaagggccagcaaagaattatccctggtttttgtgctttgcagcattcctcaaattgttttcacatctcttaccataaaaactgcattgaaattgaaaatgaagcagttgaaaa

SEQ ID NO: 111314 - DNA, 1323 bp, Homo sapiens
ctgagatggagtctcgctctactgtagcccaggatggattgcagtagtgtgatcttggctcactgcaacccctgcctcccgggttcaaggaattctcctgccttagcctcctgagtagctgagattacaggcgcccaccaccacacctggctgatttttgtttcttagtagagacagggtttcaccatgttggccaggctagtctcgaactgacctcaagtgatccatccgccttggtctcccaaagtgttgggattacaggtgtgagccactgtgcccagccaagttatatctctaaagcaatgtgcaaaaataaactgaacttgggttgattaggtatattcaacatttgtcgggagagtaagatgtttcattttatttcagtccctgtgtaatttgtcttctctaatgttaaatactatgtagaatgtgtctgtgtaattttatagatacttttagttatggatggacattctaatttgtactgactttgggtctgtgaactacttcaatgtttggaggttaccaaaatcttacctttcccttttctattctagaatttacatagtacatgacgaagttaaggataaagcttttgaactagaactcagctgggttggtgaatgtaagttatttttgtacatttatttgccttaggaatgatctgtaccacagctaatttacaactgagtgtcctttctaatataatgaaagctaaagcaaatttactaggttgtctaatgaagggaaagttctgcttaataattgacttaagttgtgaacacgttattttttgaaacatccatttcatggttttaagatactatgctataaattaatgctcaggatttataaatagcataatttactttcatttccataagaacttaatatgtaggcacatataatctcatgtagaagcagcacacaaaaatattcgagtattactcatagtacaactttgcaaccttaggtgagtcagatatgtggattgggtagaccctatggtatactgcaagttacaatatggtactcaatttaaaattcatttacacatgtggcttaatttacagtaactaatggaagacatgaaattgttccaaaagatataagagaagaagcagagaaatatgctaaggtaagccacagcacaaaaacttttcttggccaggtacagtcagggaatctcttagcccaggagtttgagaccagcctgagtagcacagcaagacccccatccctaatttaaaaaaaaaaaaattctctaaccaaaattatgtgttggaataatataaatagactggggtggtttctatggaaata

SEQ ID NO: 111315 - DNA, 665 bp, Homo sapiens
aactacaaatgaatcccattcttttccttaaccaccagaggtaaccactactcaagtagaatttttaatgtttgtcaaacctgttgcatgaatagctttgcttttctttagggaaaatttagttttaatttccatatgggtttttaggattttgtataattacctataatcttccttttccagaagggaaagatgcttatatttgcattttgcattttttgatatctgtggcagacttaaggtttattctgaagcatacagcattaataattagggcctaacttaacatcatttttaaaactaatttttacacttcaaatagatgatgaacaacatgggtggtgatgaggatgtagatttaccagaagtagatggagcagatgatgtaagtctaaaaattcttttttctgtttactttcatactattaaatagtaagaaacaacatatttacaaatggttttatatagattcacaattacttcttattttctaaaaaaaaagaaaagggaaaagcaatttttaaaatgtgcccatttttgacgaatgtgggggtatctattatggaactggctgtaccgaagaccattcctatatggattacatttccatagaatcattgtatagagacattatatattaataccgtactcaattataacagtca

SEQ ID NO: 111316 - DNA, 2078 bp, Homo sapiens
  misc_feature (1)...(2078): n = a,t,c or g
tttaaacatcaagtgtattctcttctgactgaaaggtttgtaagagaattttgtgatcagtcttctatcattatttgttctctttgtaagaacactggcagacacatgttgttcttttagaggatatttgaatggtataaatggcatggaaaagtgtttaagaaaacacacacatttctttgaacatttcaaagtaaaatgatcataattgttctaaagtgggtatccataagagtagctggactgggcaaggtggctcacacctataatcttagtactttgggagggcaaagcgggagtatctcttgagcccaggagttccagactagccttggcaacataggaaggccctgtctctacaaaaaaataaaataattggcctggagtaggtagtaagacagtaaacaaactggaaagtccagctatttttaatttccaaccaaactgttgaatcaattnnnnnnnnnnncgagtctatagtgcctttcaaatgcctgaattttgacatttgtacatcagctgatggattaatattttgaattgctatgtgatggctctgcatgggcatgggggccagtgcttcagttttgacagcattaccatccttggtgatgacatggacagcaatgtttctacaattgttggaaatggaaaatatatttttgattacatgctgccttttaggcatacgcttttattcattccaagtatttatcgaacctgctgttacaggatacagtgcatcctgcttatggatacagtgatgaacaaagcagacaagatccccgcagtcctgtagtttacattcttatgggacaaagactaatagtgaacaagtaaaacatgaaataataatttccatgtagagaagtgtaatgggttgatgtgatagactgacagtatgatttctttaaatcgcatattcagggaaactctttactatgaagctaacatttaactaaagactaaatggggaattggcagtgccacgatcataagaatggcttttccagatagggaagaggttgtgctaagttactaatccaggaatgagtttggcatgtcaaagaacagaaaaaaggggccactaaggctggagcttagagaggaaaggagacaatgttatgagacgggtttggagagactggctgggacctacgtcataaaaggtttttgtaaggtgatctgaagcatttggattttatattagtgcgatagaagctttcagagcatttgagatagggaagtattgttacctgataaatatttgagatttttaaacacagtcttttgcatgtgatttataatttggcataaatagaagtttaaatcagtggcaatcagttaaggctgggcaagttcctctctaaatggaggtgtgttacaaaggaaaatcagtaatagtctgtaagtactcaaaactatctcagcaaggtctaggagttggggaggtagaaagacagaggtaaaaccaatctttttggtgggggaggtggggattggaagggttaaggtggaaaaataaaaagattttgaaggtctcatcccattagggatataatataatttgcttgaggaaatcatttgaatcttggtaactgtaataagcattgagagggaaggtaactatattcatttgttaaattcagtaaggaagcaaaagagtatgttgtgcaaacagtgttgtataaaaataggagaaaagaggaaacaaaatgaaataataaacataaatagaaatataaaaagtaatagagtaaaatgaaaacaagtcctatcagtagttataataactgtagtcagtatatttaacaaaagacatgctgatttgattaaacccagctatactacattgtttacaagcatcatactaaaataacaatgtgaaagtaagtttaaagccacaagagatgcaaacaaaaagaaagcatgagtggaattttaattacaagggagatggagttaaggattaaaagcagtagacaggataaaggagcacattttgtaataggcacagtttatgggaacataacaaataaatgtaaagcctcccctaaaatagttaaaattcaagaaat

SEQ ID NO: 111317 - DNA, 572 bp, Homo sapiens
aaatcttcaaattgcttcagagtatacatcttctgtatgattaattccaaaaggaaatgccctctgaagacatcgaatcaaaactcaacttcctttttaaatttatttttatttttattttacgggtaataaatttagtagcagctgggcatggtagctcatgcctgtaatcccactttgggaggccaaggtgggggaatcgcttgagcccaggagttcaagacctacctgggcaacaaagcaagacctcaatatcctaaaaaaaaatttggaaaatccaatcaataaatttagcaagagaccgaaaaactgtccccagcaaaattccttttctcttttctcccataggcacagagctattgctggtcacataaatgccctgtaaggattttgttccccagccctgctttgcagctggcagtggagtatggccatgtgcctatgtccctgttaagggctgggagcaggagtgatatgggccacttttggaccagggccttgagacggcaagttgtgcctcttccatacccatgtttccttctcacgacagcacccagacttggctctttaga

SEQ ID NO: 111318 - DNA, 1601 bp, Homo sapiens
cccaagctggctctggaagcaaacaccatctctacagcctcagtaaggcccgcccaggaggagcagtcgatgacgcccccagggaaggtggtgaccgtcagctctcgcagcccccgctgccctcggaaccaggcctccctccgcagcagcaagaccttcccgcccagctctgcaccctgctcctcaggtttgagaaaccctccaaggacccctcttggtgcctgggtccctccaggcacaggaagcaatgacttcagatggaggcctttttgctgtcccgacaaccttgccacccaacagccgacacgggaagctcttctctcccagtaaagaagcagagctgacctttccgccagcatctgaactccatcagtgtgagtgtgtggggccgggccgcccgcgtgctagcgtccccgtggtctggagagtgcaccttcaggtgccggacgctgctccccttacagatgcagtcggatttcttcctgccaaagccccggaagcctgcggaaccggcacctgcggaagcccactggtggttccaggtcagggtcttctcaagtctgaacgtgtgggcctcgtggctgggccaacccagggacacagggctttttccctcttttcacattttcatgggtgttaaaatgtggggaaatttccttgcccctttccttccctcttgttgagtaggggtaaaaatacaaagtaattaacagtggaatttaatgggttacccagaagtaaaggtaatctttcaataacatggaaatccacttgcaaaaaagacaattatagggattcaagtccaaagaatgtcccagattgggatgtatttatggaatctcaacacctatttataaacatttagtctgtgggagcagttgccagggcatgtgggtcagccagagcccaggcctctcatgagctccccaggagtccccgaggatgccgtatgcaagcctgggggacagccagggactcagaggcacctcagaagaagagcttggcattctgacgcataaaaatacagaaagtgaggtgggaagtctgaggtaattatgggcctcagaaatgtatgggatgtgtgttattttgggatttcatgcacaggtttccttttgttagactcttagaaatctctttctcccttgagatttagtatatttacaaatgagacattgcatgaacggtcttaggaagaaagtgcctgctaaatcttaggtgttctttgttcaaactaagatcagggttgaaaactatggcccagggaccacttccagcctgactgttgttttgtttaatttaaaaccaccttaatagatagagaattcacatatcataatgtttgcccatttgaactttatgactcagtggtcacaaggtgtacgacgaccatcaccatggtctaatcccagaacgttaccacccagaaaggaaaccctgctcctatgaactcacgttgccttctcccgccagcccttggcaaccatggatccgctttctgtctctatggatttgtctgttctgggcatttcctataaatgggatcatacaatttgtgttcttttccacataatatttttgtaaataaagttttactggca

SEQ ID NO: 111319 - DNA, 358 bp, Homo sapiens
  misc_feature (1)...(358): n = a,t,c or g
ctggctccaaacaaaatgctgtaacagatttgacagcagaggctgtaaatgtagctattgcagcacctccatcagagggagaggctaatgctgagctctgtcggtatctttccaaggtcctagaactcaggaagagtgatgtggttttggataagcactgataattgaattcctcagaagcaagatgtttctctggcacccagaggcctcagcagtgtcacgacagctgaagtgtcacttattcctcatcctgggcacaccatgatggagtgcagccccactgattgggacccatgcagccagcctggcccagggccactctctctcccagaatgtgcacaagtcaagggatctctan

SEQ ID NO: 111320 - DNA, 273 bp, Homo sapiens
ttcagcaaaaagaaaggtgagcagccaacaggccagcagcggcggaaacaccagatcacatatttgatagatttttcttaacaagttagaaaattcagctcctttctgtcctggagctagcaaagacttgtgtgatgcctccgaaggggctctgagttctggggtgggagttttgctctctgtcaggtgtgataaaatgttgaaccctccccaccaccacttttttttttttaaaccagggatgtctgttgaaataaaacattcagtctgaaa

SEQ ID NO: 111321 - DNA, 1583 bp, Homo sapiens
  misc_feature (1)...(1583): n = a,t,c or g
ttttttacatacgaattaaagatgcttctttatgcaaatttttaaaccccaggtttgaagtaggataaaaggtaacattaaatctgagatcatttctagctctggaattctgtgattgtaatgagttttgatttctaaatgttttttcctttcataatttcagggttagtcagcaacataaaatcaacctaatgacagcagacaacttatccatctgtttttggccaaccttgatgagacctgattttgaaaatcgagagtttctgtctactactaagattcatcaatctgttgttgaaacattcattcagcagtgtcagtttttcttttacaatggagaaattgtagaaacgacaaacattgtggctcctccaccaccttcaaacccaggacagttggtggaaccaatggtgccacttcagttgccgccaccattgcaacctcagctgatacaaccacaattacaaacggatcctcttggtattatatgagtaggaagtgattgcaaacaggctggatttggacaaaaagcaaatctagacatgcatgtttcagggttcagtagtatacttcatgtttcatacagataattcacattcaaaattacattttctctttgaactagatggtattccttattcacttacattacaaatctaagaccatgtgataagcatgactggagaggtttaatttttataaacaaaaatagctataaagtacaaagctgctgctgcatgcaaccttattgcaatcagtatatcattcctgtggcaatttctgtcaccttatattgtgaataaaatttttctatagaaattaaatgatttaaaaactcacctatatgaaacatttaatgcttttcagcctgctttctggctgattttgttatttgatgtgctaatttgggcaacttaatttacattctggcagtcggtgtagataactaaaagcccagttaagtattttataatttcaggctactgaggccatgcttgggatgttgtttgaaagaaagaaaaaatacacttgacatatttcacatttctgtaccttcatctttacttccaagtaaacccgtgggatggatttggatgaggggnttaaatggaacctatttctttttacacacataccaagggacatggcttgtgggcttaaagtgagttggataatgttgtgcaaaggatagttgtcaccaactcatttctttatggtccataatgaaataaaaattttgtatactgttaattctgtaaacagatgcatgttcaaaagatctatgatggtcttgtaatcttaatctaatatattttagatattttaattttttccctcttggggaacacatttagtatagtgtagaaaatacttccatgacattttcatataaggttatataacttttcatacataaacatgaaatttgttgtagaaaattctttaaaccaaacatttaaatctaggacttcaatttaatttgttccttgaatctatttttatgtggcccttaaaaaatattccaaaaacccattgcttatatagcaataaaaatactttgggtactgacagaaaaaaaaaaa

SEQ ID NO: 111322 - DNA, 354 bp, Homo sapiens
  misc_feature (1)...(354): n = a,t,c or g
aactgaagatgatgaggatgacgatgtcgataccaagaagcagaagaccgacgaggatgactagacagcaaaaaaggaaaagttaaactnnnnnnnnnngggccgccgggacctattcaccctccacttcccgtctaaaaatctaaacggggtcaccttcgagtaaagaggcccgcccgcccaccgggggcagggccacccgcaaatgacacgcgctttccaccacccaacccaaaccatgaaaatttgcaacaggggaggaaaaaagaaccaaaacttccaaggccctgctttttttcttaaaagtactttaaaaaggaaattggttgggattttttatttacattttatatc

SEQ ID NO: 111323 - DNA, 1036 bp, Homo sapiens
ttttttttttgtatttttatagtagagacggggtttcactgtgttagccaggatggtctcgatctcctgaccttgtgatctgcccgcctcggcctcccaaagtgctgagattacaagtgtgagccatggtgcccagtctgttgaatttatttataaacacaacatgtatttagatgttactttaaatgaaattgtattcttatttcattttccaaatgctcattgctaatatacagaaatacaaaagaccacttatattgagagcttacattctgcaacactaccaaactcactgattagttctggtagatttttgtagatttctagcattgttaacaaacacagtcattatctgtgaataaagacagcttcaattctttcttttcaatacttttatttatttttcttactttattgcattgatttagatctctagtataatgctgaattgaaagaataacaacagatattctacttttttctctgatttaatagaaaagcatccaatcttatgccgatttaatataatgttacctctgagtttttttcaaatctgcccttaatggggttggaagtgttgccttctgttctcatcatgctgagcattttctggggtttgtttttataaatcatgaaaaaagttttcaattgtgccaaatgcttttactgtgtatgacaaggtaatcatatggtttttctcttttgccctgataatacataacattacattttcttaaatataaaaaagatttcttgaatcaagctaggacagtttttttaattataaacttttaacaaatatattgaaatataacttacatgcaattgagatgcatgaaagtgtataatcattaaagtgtataattttaagagtttgagcacactatacacgagtcaaagagaaaggacagaaaatactaacgatggctcagcacatgtggtctatcttgctgaatgctctatgtgagtttgagaagagttatttgttagctgttcttagatgtattttgcttaaatatcgaccgaattacaccgc

SEQ ID NO: 111324 - DNA, 355 bp, Homo sapiens
  misc_feature (1)...(355): n = a,t,c or g
cacaaagcaagataaagagttaggacctaagacttaaattaaaacatctcatatataaaaatattaaacccagccctgaattaatctaggagtactcataatctgataattaacccagattagtttattttgagcctctgaatttaacttgacaagtaagaatttttcagacttaaaaannnnnnnnnnnaatttttcagaatagagggataatttaattacnnnnnnnnnngagggaaatatgaaatctgaggaggatcctccggctattccaccgaaacagcctcctcctccaaaggtaaaacccaaagttcctgttcctactggggcatttgaggggcctttgcaatagcca

SEQ ID NO: 111325 - DNA, 962 bp, Homo sapiens
tttttttttcattttttttttataaatagagacagggtctcactatgatgcccaggctggtcttgaactgctgagctcaaacgatcctcccgccttggcacccaaagtgctaggactacaggcatgaaccaccgccatgcccagctaattttttttttttttaatttttagtagagacgaggtccttgccatgtggccctggctggtctcgaactcccagagctcaaatgaaaccacccaccttggcctcccaaagtgctgggattacagaaatgagccaccacacctggcctgattgtttttaaatggcagcaagaacagggttgggacagcaagggcaaatcacacagtatgtggcatattcagaattggttgtgagtttccagtagaaagcactgagaatatccatagggcaaaatggaatactaataatcctcatttgcctttgcctttgtactgggaaaccagaccttactttaagcccaccaaaggcaaggtttggggcctgccacagcgggatttcaaaaagacaaagcaatgcaagccacgtgttcaaaatgccctaagtggctattcaggtaatatataaaagtaagaccaggctaattagtatacaatggggtaaaccagagagcagaaagcccttctttaaaatgagcctaccactgcttggcctcagtgtgaatttagaccccatcttctgatatttcaggagaaagtaaaaatctagatttttatctaaaatctttttaatttttaaacagtcacctgattttaacgaaatactatgtgtgcacaatggaactgtctacgggaatgatctagtccagaggataccaggttcctcacaatgtcttataaagttgtttaacccatagtaagaaatattatacaattataccggaccaaaaacatacatacatacaaatatgtagctgggacaaaaatttcacagaacaata

SEQ ID NO: 111326 - DNA, 358 bp, Homo sapiens
gaagcaagcagtagaaccagatagcaccctataaagcctcctgagaatagccacttcagtcttttacaaaagggattgggaggaggcccgagaaaaggagaggaagtacaagagaaaaacagaggctctagtagcagcattacaagcttgtaaagtcctgaatccccaaggtgcatccactagctgttatcaatgtggtcagtcagggcattttaagaaggaatgcccaggaagcaagacaaagccaccttgaccctgtccagcctgtggtggagactactggagacagacctgctttggtcttttgttctgggttcagaactagtctcacagatggtccagcaggactgatgggtcc

SEQ ID NO: 111327 - DNA, 575 bp, Homo sapiens
ctttttcctttgagacagaggcttgttctgtcacccaggctggagggcagtggcatgatctcggctcactgaaacctccgcctcctaggctcaggtgattctcccacctcagcctcccaagtagctgagaccacaggcaggcgccaccacacctggcaaatttatcatcatcatcattattatattttgtagagacacggtttcactatgtttcccaggctagtcttgaactcctgagctcaagtgatcctcccaccttggactcccaaagtgctgggattacaggcgtgagccaccgcactcggccaaggccactattttaacccacatctgcctgaatctaaagcctaggctctttccaaacaccacgcggactcccctgcaacagtctagcactaactgaaccaggaacaggagaaaaccgtaggctatggaaatccctgtagacatatttatcctgcagtccttagcacagggcactctctagctctccctgtgtgcatatttacctatatagcctccacttcatagacaggtacccccattcaaagtgcacacatgcagaacataataat

SEQ ID NO: 111328 - DNA, 914 bp, Homo sapiens
ttttttttttttgggatgtagtcttactctgtcacccaggctagagtgcagtggcaccatcttggctcactgcaacctctgcctcctgatttcaagcgattctcttgcctcagcctcctgagtaactgggattacaggcatgtgctaccacgcccagctaacttttgtatttttagtagagatggggttttgacacgttggccaggctggtctcgaactcctggcctcaggtgatcgccccacctcagcctcccaaagtgctgggattacaggcgtcagccaccgtgcccagccagttgtaagatcttgataagtcatgtctccactcttagcatctgtcaaaaaaggggttggactccaaggcttgaggtttcttccagcttttgcattgcggggttctgtcacccgcatgtcaaactatttggctacgctgaggactgcagatagcgggaggggaagtgtggccagtgaaagctgtctcatccctgactctgaatgaatttgaggtatcagggaaatggtgacctttaccacctccccgccaccctcccccacacacatgcatatcatggatttgtttctcctctagttcctcctgcaatgctccttactccatttttgtttttgttttactcataaacagcaagtcaacatatatacccaggtatgtttttaagttcatgcactcaaaatctatcacgttaataggtgaaaaatcttaccttccagaaaacttggtcatcaaaatatttagccacatgaggtgctttccatattttgagatttaggagcaaacctgtcaggagaccagacgtgagagctatcacgatggccaagctgagttccccaatgctgaggaggacctggaagccaatcctagaaatgacaaagcagaggtggtcacttgggcatca

SEQ ID NO: 111329 - DNA, 656 bp, Homo sapiens
  misc_feature (1)...(656): n = a,t,c or g
ttgatctcagtctgtcacccaggctggagtgcagtgatgcaatcacggctcactgtagcctcgaccccctgggctcaagcaacccttccatttcagcctcccaagtagctgacaccacagacacatgccaccatgcaggattaatttattattattttttgtagagacgggggtctcacttcattgcccaggctggtctcgaactcctggcctcaagngatcctcccgcttgggcatcccaaagtgctgggattacaggcatgagccaccatgcaggaccacacatttgtacttataattttattttcagtacactcttggggaaaagatgacagaccttcacttgatcaataatgaaattgaggctccagttggctaagtagtttgtctaatggcctgtcactagcaactgaatcaaaactctgatgatttgtattccagtcctatgttctttcccctgggggagaagtagctgcctagccagtggtctatgaatataagacatcattaccagcaacttcacaccctatggtgcagagaacatacaaaagtcaaagataagctcaagttactatcataacacagaaattcaaagaccctgagtaccttgctgcagacttcagatgactggacaatcatggcctgaggccagtccc

SEQ ID NO: 111330 - DNA, 383 bp, Homo sapiens
  misc_feature (1)...(383): n = a,t,c or g
ttaaacattatctctaaaattacacctaataattaagtgtaagattaaattgagcattttttcagggataggaaggagaaacatcgtagaatcnnnnnnnnnnnnggaaagggggtttatttttggtggcccgggggggggaaaaaggggggaatccccagtttgggcccttttaagttacccaaaaattcggctttccggggttaaggaatttttctggcttaaccctcccgggaagtgggtttaaggggggctgccccccgggacgggggggggtttaccaaaaggtttttggaaaccacccgggccagggtggggaaccccccttctttnnnnnnnnnnnntaacccggcctgggggactgggccctgaaaccaattatt

SEQ ID NO: 111331 - DNA, 369 bp, Homo sapiens
  misc_feature (1)...(369): n = a,t,c or g
tgactatgtttcacccgcttcatgactaaatcacaggtggcagaatttttcagttcnnnnnnnnnnnnnaagggggaagtttggctttgcccccaaggttgaagggaaggggccaaatcaaagcaaagggaaatcccccccccgggggtaaaagaaatttcccggccaaaccccccaaaaaagggggaaaaaagggccccggccacaaacccgggtaattttttaattttaaaaaaaaaggggttcaatattttaacccagaagggcctaaacccccgaaccaaaaaannnnnnnnnntggccccccaaaagggggggaaaaaaagcaagaaccccccgcccccggtaatttaaagttttaaggcgggg

SEQ ID NO: 111332 - DNA, 376 bp, Homo sapiens
  misc_feature (1)...(376): n = a,t,c or g
gcttatgcctgcggagaagggagtgtctgggaacttttcggaccccagttcccaacactgcatccagtcccgccnnnnnnnnnnnnnnaaaaaaaaggggttttggatttttccccaggggggttttaaaccccaaacccaaagggaacccccggccttggccccccaaagggggggggttaaaaggggggacccccccggggggccccatttttaaagggggggaccgggccgaaaccttccccgggcaaaaacctttccctggggaaaaaggggtttggaacttggccttatttttttccctgggaaagggaaaaaagcccccctctgtttttaaacctggtgggttaattttnnnnnnnnnnaagggccctgg

SEQ ID NO: 111333 - DNA, 350 bp, Homo sapiens
ttttttttttgtatttttagtagagacggggtgtcaccattttggccaggctggtcttgaactgctgacctcaaatgatctgcccatctcaccctctcaaagtgcttgaattacaagtgtgagccaacgcacctggctctgatctccctttgctttgtatcaggtattctaccagacagtggggataaaagataaaaaggcctatagacttgtggagtaaggcagattgtaaatgcattgcggtgtgtgctgtttattaaatagcaagtagtcaaagccataagaccagatgaaatcattcaggaatttcaagagtatctttctttaattttttttccagggtattgaag

SEQ ID NO: 111334 - DNA, 393 bp, Homo sapiens
  misc_feature (1)...(393): n = a,t,c or g
aagagtaattttaaaaaatacaatagaaattatcaacgaagccaaaagttgattctttgaaaagattaatgaagtaggcaaaccactggtgagatgaatcaagaaaaatagagaaaagactcaaataaacattaggaatggaaaatagggcaatgctaaagagaattcaaagatcagaaaaatatgggagtatactaaaaacgatttcatgcccaagtgttcaaatctatattgcctttaaaaatatataaaaaaggnnnnnnnnnnnnnnnnnnnnnnnnnnnnnnnnnnnnnnnnnnnnnnnnnnnnnnnnnnnnnnnnnnnnnnnnnnnnnnnnnnnnnnnnnnnnnnnnnnnnnnnnnnnnnnnnnnnnnnnnnnnnnnnnnnnnnnnn

SEQ ID NO: 111335 - DNA, 373 bp, Homo sapiens
gttagtcaaagcaccaaagatattataagaaagcttcagaaacaggctgggtttgtgagtatgaatacttcacagttattaaaaatagccagtcagatgtttgtgagtagagatgtggcaggccgtagagagagccgcaaagaaagcaagtgccaagcccggcaaaacacctatctgctagctgcagctattagaggagttcccccgaagggccgaggaaggggggaccctgggaaaaacactcagtctgaccaaccatgcctgcagcataaccagtgtgcatactgtaaagaaacagcgcattggaaagacaagtgcccctagttaaaagagaaacaaaatggctctgagccagaggtttcaggcaaggatg

SEQ ID NO: 111336 - DNA, 373 bp, Homo sapiens
  misc_feature (1)...(373): n = a,t,c or g
aagacaccagggcctgtcagaggcctagcacctccnnnnnnnnnnnnnnnnnnnncatctttactgagtaataggccacctcccccagcccgagaccctcccagtcggggagcagctcctccacccccaccacctgtgatccgaaatggtgccagggatgctccccctcccccaccaccataccgaatgcatgggtcataacccccgagccgaggaaagcccccaacttcacccttcagggagcccggtggggcaaccccttcttcttcaacggcccttgaggaagggccccgaaaatctaatcacactggccgggctttttttgaataatttggagccaaagtattccttccatccagtagaagactttcct

SEQ ID NO: 111337 - DNA, 356 bp, Homo sapiens
  misc_feature (1)...(356): n = a,t,c or g
tttcaccaatttttaattttccgggcccccgggttaaaaatttcccctttttggaacaaggttttcctgtgttggccccggtggaaggccaaggggccctttggggaacccccgccccccgggggcaaagggggattcctttttaaggggcccaaaaacagggggttcaagggaggggcccccaagcccggggaaannnnnnnnnnnnnngagacaaagtttcgctttggaggcccgggtgaggctccctttccaaaaaaaaattaaaatnnnnnnnnnnnntatgatcatgtcacccattgtaaagaagactatgaaagcaagtcttttacaaattacttagaactatgtgtttc

SEQ ID NO: 111338 - DNA, 593 bp, Homo sapiens
ttttttcttttttttttttgagactgtttctcactctgtcgcccaggctggagtgcagtggcgcgatctcagcttactgcaacctcctcctaccaggttcaagcaattctcatgccttagcctcccgagtagctgggactactacttggcatgtttcaccctgcctggctaatcttttgtaattttagtagagacggggtttcaccatgttgcccaggctggtctcgaactcctgacctcaagtgatctgcctgccttggcctcccaaagtgctgggattacaggtgtgagccactgtgcctggccctctagatataattaaatgtctaaaacttaaggacaaaaccatcattcacccaaacatatgacgtatcaagtgagctgagatgacagtcctattactgctcacttacctctatatatggcaactagtagaactgggtatttatatcagaagccttagaattatccttgtagaatattgaattttacaaaattatctgcaatccacttatgcctccttttatttctccttccaggacccttgacactctccttggtcgtctcaggaaatcttacttttttctcgtgcc

SEQ ID NO: 111339 - DNA, 385 bp, Homo sapiens
ccatccttgcgcctgggtcggggccgccatcccagactgagctccacctttctccagaaacgcgggtagcgcctgcccgccacctgggaggtcacaggacaagcacccattgcccaccttcgacacagggagcccaggggagggaagcgaggggccagcagccggtaccagggcgacacagccggttgggggacaggggcaggaggccacagggagtgccagccctgcctgcagaccaggagccccacacgcccccaccaacagcagcttggcgcccacaaggaggagcgcgccagcaggactggctcagaggctggcgcgcacaaggattgcagtcagacccctcacagtcctcagtcctttatcgacaatgtccctcttctcc

SEQ ID NO: 111340 - DNA, 382 bp, Homo sapiens
acctgtttgttggacatactggatacagctggacaagaagagtacagtgccatgagagaccaatacatgaggacaggctaaggcttcctctgtgtatttgccatcaataatagcaagtcatttgcggatattaacctctacaggtactaggagcattattttctctgaaaggatgatctttgtgttctgaatctttatggggaaatgaggttaccacactagggaagatagagctttttaattatgggaagagttggttttaagttgtttgacattgagaatctagggtaactactgaaagctaatactggaatttattttacataatatactgttactataaagcttgataatacgtaagtgaagcttgctactgggaatg

SEQ ID NO: 111341 - DNA, 1298 bp, Homo sapiens
tttttttttgagatggagtctcactctgtagcccaggctggagtgcattggcgcgatctcggctcactgcaacaacctccgcctcccgggtgcaaacgattctcctgtctctgcctcccgagtagctgggactacaggcgcgtgccaccatgcctgggctaattatttgtatttttagtaggagatgaggtttcatcgtgttagccaggatgatctcagtcccctgacctcgtgatccaccgtctcggcctcccaaagtgcttggggattacaaggcgtgacaaacccgcgcccagccttaactatggagggtgatttaagggaaagtaatggggaagggtgcactttaaatgccctgtgattccctcttttctttatggttaatctgggaaacttgtaagaaaagcctttctccttgataaacaaattttaatggtaacctagctccaaaacagtgaattttgccagattttaacttaaatcaagggatatatttaggaggggaatcatgcaagataattttggggtaaaagtttggccaagttccataatctaaaagttaaaatgcaaccttatatgctggagagtaaactgccagtaacagtacatttagaaacattgcattctgaaaaagtctcctggggtttatgtgggagtgttacaatttccagaatgactggtctagataatcaacatgtgtgtccggattttaactttaagaagttagatgggaagataaagcaatatatgaagcaatctgtgaatagttaccataataacctgcacataacaggtagtaagttcaacataactttataaaatgttgtatggaaatataatctcaaattctaggagttaatgatctccaataaaatattcatgtccataaatatgaaaaaaggaaaagctcattgaaatatttttccattttaaatgactttcaggaggcacttacaaagactagaaatttcagtgtaacagctacagcctaccaattccacttggctgtagaagtcacccttgaaaataatttaaataaaaatacttgccaataatttgtgataattcccactgaagcccacacttacttgagtgttcctttctctctttaaatattttcacattcagaaccaatgcacattttctggaacaagtggatacatgtaaagaagctatactaaacttttataaaaaggacattatatccttgtatccttcctatatcctactcaattagttctatagattagtaaattttctaaagttattaaaagcagaagttttgaagatggattcaa

SEQ ID NO: 111342 - DNA, 573 bp, Homo sapiens
atttttttattcttacagacagggtctcactctgtcacccaggctggagtatactggcgtgatcacggtgaactacagccttgaactcctgggctcaagtcatcttcccacctcagcctcccaagtaactaggactacgggcatgtgccattgcaccaggttaattttaaaattaagaatccatatttttaaaaaggttttacaaatacactagaaaaattaatgccaaagagaaaaaaatgccaatagcctagagtcatggaccctatgaacagcttttcctgttgtgctgtttctcatctatccaggcacaccaactcgaagctaaaaagctcccaaagcctcccaacacttggggaaatatgctaccttaggagtttctatgtttaattggcttctattaggaaactgatctttgtagaaagatattgaagaaacataaatccaaaaaacctgccatagactgggcatggtggcttatgcctgtaatcccagaactttgggaagctgagacaggcagatcacctgaggtcaggagttcaagaccagcctggccaagatgatgaaacccca

SEQ ID NO: 111343 - DNA, 369 bp, Homo sapiens
  misc_feature (1)...(369): n = a,t,c or g
ctagttttaagggggcacccccttggggttacccaataaaaaatgggaacccccctttaaccccccgggaaaaccccggggggttttgggaaccccaacccggggaaaatttgggttgggccccgggggtttggggaaacccggggcaaagggttttttttccccccttttttgggttttttaaaaaaaggccccgcccctttaaaaaggggcccaaaaagggggggttcccccccccttggttccttttcaaaaaaaattaacccccttccccccaaaggtattgggcctttttttttggttgggnnnnnnnnnnnnnnggtcagcacatcatcagttacaaatgttaagtggtcaactagaaatctg

SEQ ID NO: 111344 - DNA, 701 bp, Homo sapiens
ttttttttttgggatctagatcctgaatcctcatctttattttttttattttttatttttctcttttagagacagagtcttgctctgtcgtacaggctggagtacagtggcgccatcatagatcaatacagcctccaactcctgggctcaagcaatcctcccacctcgacctcccaaagtcctgggattactgctcctggccttgaatcctcatctttagccctcccccagcaaatacacaatttcccttattgttccctacatacctctgtgcctttgtatctacctctcttccatttgcctggaatattctcccccacccacccctagtaaattcctattcagtcctcaagagctaatgatagcgctaatgatagcatgctgaaaccttcctgaacttttccctccgctccttagcaggcttaagtcacttctctctcgtggagtggagttgtggaaagggaatggcattaggaaccattcactctgtgttggggtgtggctgggtccaagggatgcagagataccttgccccttcctctgccaagccatagagcctggtggaagagaaagaaagaggccatcattctacagcagggtggagtcagggaagggctggtctagcagggtacctagaacgccgggtgcctacctgtaggaggtggcactagatcttagagcttttttttgtttgtttttaa

SEQ ID NO: 111345 - DNA, 369 bp, Homo sapiens
cattgaaattaaatggtggcagacatgtccaaggaatattgcggggatttgattcctttatgaaccttgtgatagatgaatgtgtggagatggcgactagtggacaacagaaaaatattggaatggtggaaatacgaggaaatagtatcatcatgttagaagccttggaatgagtataaataatggctgttcagcagagaaacccatgtcctctctccatagggcctgttttactatgatgtaaaaattaggtcatgtacattttcatattagactttttgttaaataaacttttgtaatagtcaaaaatgctttttcagatgttctgaatatacaatattagctctcattccaattttttataacatg

SEQ ID NO: 111346 - DNA, 359 bp, Homo sapiens
  misc_feature (1)...(359): n = a,t,c or g
caacaggctggaaagcagggtcatgatcctggaattttgtaaaaaggcttctgccaaaaaaaagactgttatggggcttcagtgctttgagccccgttgcaaatttaaaaaaatgccgccttttaaaagaagccagcctttttaaccgggaggnnnnnnnnnnnnnnnnngcccaattaacttgtttttagcctcctttttttttatggaggccattaaattttgagggaaggttccgtggggnnnnnnnnnnnnccctcatttttaacatgcttgtcttgaactatttcagaacgtattatggtcccaaattatccgtgttgttttcacagcaaatgaaagctgaccttcataattaa

SEQ ID NO: 111347 - DNA, 391 bp, Homo sapiens
  misc_feature (1)...(391): n = a,t,c or g
caggagccctcctgctatttccatccttcagcctcaggagccatcagtcactccccaggtcaagctccacagcaatggggcatggagcgctgaagcaacagagagcactccacagagagaggagatgaaaagatttggaatgggtttttttgggggggatgggggtacaggggtttgagatagagtctcactctgtcacccaggctggtgttcagtggcacaatctcatcagactgcaacctctgcctcccgggttcaattaattctcgtgcctcggccttctgagtcgctgggattacaagcatgccccaccatacccggctaatttttgtatttttagtagagacggagtttcaccatgcctgctcagnactcctggcctcaagtgatc

SEQ ID NO: 111348 - DNA, 347 bp, Homo sapiens
  misc_feature (1)...(347): n = a,t,c or g
aatctatgaatgtgggatatttttgcatttatttgtgactttaatttcttatgtcaatgttttacagttttcagtgtagagatattttaccttcttggttaaatttattcctaagtattttatattttgtgacactactgcttgttgtatattgatatgcctgcaactttactgaatttgtttattagttctaacagtctttttggtggattctttcagcnnnnnnnnnnnnnnnnnnnnnnnnnnnnnnnnnnnnnnnnnnnnnnnnnnnnnnnnnnnnnnnnnnnnnnnnnnnnnnnnnnnnnnnnnnnnnnnnnnnnnnnnnnnnngttccagtactatgttan

SEQ ID NO: 111349 - DNA, 441 bp, Homo sapiens
gcagcagagaagggaccaacccaggctcttatgcctcatgccctctgcccacttgttcattgccctgatcagccaaaccccacaggagccctcgatgtgccactattgggtgagtcttgtggccacagggctacagaggtgaccacacagcacccatcattgcagggattgtaggacaaggtgcatccacatgtctcagaacaacgcaaccatcgccacctggtgagggccaggggcagcgtgtggcctcaggggtctgcacctctgggtgtgggatctgcctttttttcatttttattttattttttgtagagatgggggtctcactgtattccccaggctggtctcgaactcctggatgccaatgatcctcccaccttggcctcccaaaatgctgggattataggcgtgaaccactgtacccagctccgcttaaaaaaa

SEQ ID NO: 111350 - DNA, 700 bp, Homo sapiens
ttttttttttgagacagggtcttgctcagtcactcaggctggagtggagtggtgcaatcacaatcacagctcactgtagcctccaactcctgggctcaagtgatcttcccacctcagcctccgaagtaactgggaccacaggcatgtaccaccacacaaagccaattttttattttttgcagagatagtgtcttcctatgttgctcaggctggtcttgaactcctggccccaactgatcctcccacctcagcgtcccaatgtgcttggattacaggtgtgaaccaccatgactgaccctagatgtttatctttaatagaaaaaaaaataggttaaaaaaagtcatgcccaatattaggggaacaattaagcaagaagccctcccttactccaccaatcaccaatcagatttaataccttcctttgtgggtggttagtgcttacatcttagcatttcgactgagttgtactatacatagtcatacccaagtctgtttcccttgctggactgtaaactctctgagtataaatttgagatcctattcagatctgtattatatcccttaccatcttttgggtcttttaggtccctcctccctaccctcagcatccagcacaatatttcactaacagcaggatatgaaaaaatcttaaggtgaaccactataaaaagcaattaatcaatgactttagagatacgc

SEQ ID NO: 111351 - DNA, 381 bp, Homo sapiens
tctcttaggaagcaagagatctgctgacaatagacctctagaaagtagaaagtcaaagagaagtttaaaatcagaagagagggtctagaaaatccaggaacccagggcacgatgtccctgcgcgacctcacagcagagtacagcccccacccatgcttcggaaaggccctcacacaaccgcgatctgggtcatcacagccgggagccaggccccaggcaaaggggttccaggtggcccggtcagcgtagcaggcagtccccaatccatactgaacccaggaaagcttctaaagtgtcacagaagtcacaagaccacacataataaggatttgtctgaattcaagagaactagtcaattaaggaaaaaattttgttactttg

SEQ ID NO: 111352 - DNA, 390 bp, Homo sapiens
cagacgggccaatccctatgacagcgcggcctacagctggaaccagcggttattaattatcaacttcatatacttgttattggagctggctggcgactgtcaggacagcatgtattgagaggctggagcgtacaccatctttgccatcctggaggacactgtcggcttaaccaacatggcgatgcacatgacggcctggcgggacttctagaacaaggagctgctcataatctctcagcctgaggaagagcgattctgaacccttcaatcctgcttgggaggacacatgccactgtccacacacaagaaacactatatcattctggacttcccaacccacatcctctcttggcttactggacatgcgtaaggatagaataactatgtagg

SEQ ID NO: 111353 - DNA, 366 bp, Homo sapiens
gccgactggcgtggaccacatggctttcccactggttcaaacgtcacggagcaggttccccccgctagtcatggagaccaaggggcagaatacagcatttcctggatgccggcttgtttgttacaaaggaaagcatctacaaaaccgggtggtgagtgccatgcctgaccgtacagaacgaaagcgtcttcgagaaagaacagccaccctggaacggttgttaaggaccagcacaacccacacgttccggcaatcggatactccttgaaaaagttcattgacacaaaaggaatttgctgctcacacatggacaggtccaagtattttgaccggatattctaaattggatacgggccagtgatgggg

SEQ ID NO: 111354 - DNA, 391 bp, Homo sapiens
gttttttttatagggccccctgcaaaatttgcgaggtagttaaactattggcgtgggctacgctttgaggaagccccaaattacatgtatctgaggcagctattccgcattctttttaggaccctgaaccatcaatatgactacacatttgattggacaatgctaaagcagaaagcagcacatcaggcagtctcttccagtgggcagggtcagcaggcccaaacccccacaggttgctaagcatgaattgaggaacagaaaaagcagagcaaatgatcggagcaccatttgtttctccccaaatctaaaaattttatttatatgtacattaccccacggttggggacaaccatatacttggtggaaagaacttaatttcagtatgaactgg

SEQ ID NO: 111355 - DNA, 349 bp, Homo sapiens
atgcgttagtcattccagctttcacgctttggagagtctgagccaatccagggtggaagggatcccccagcacagcacagctgctctaccaaaacgtggccaggctgctgatttaaccatgcaagatgggcctgcttccccttcaccttgtgccatgattgaaagtttcctgaggcctccccagctacgcttcgtatacagcctgcagaaccctcattcccccgagggaaggccattaccaggccataggccatgacccataagggagagtcaaggggtgtaaaggccatggactgccgattcaaaatcctgctccatcgtttgctaggacgggttggaaacttgggaa

SEQ ID NO: 111356 - DNA, 404 bp, Homo sapiens
taattttgtatttttaatagagacggggtttctccatgttggtcaggctggtcttgaacccccaacctcagatgatctgcccgccttggcctcccaaagtgctgggattacaggcatgagccaccatgcctagccgagagatattttcatactttttctttactgcactgataagaatatgccacttcttttagaatatattttgtggaattataaaaatttctttatcagatagagttatggatgactgcccttttcaatataattcccactcaacctcaaaataatgcaaatactttcaaaaggagaagaatatggttggttatgcacaggggaatactatataacagggagaggaaaaagattaagcagcatgagtattgaaattgcactgcagcagcttt

SEQ ID NO: 111357 - DNA, 693 bp, Homo sapiens
  misc_feature (1)...(693): n = a,t,c or g
ccttctgtgaaatgtctttatatatggtctagttagtattgctggtataaaagttagtattgctggtataaaagttaacagtgcctgagttgaaacactggccccgtgacttactagatgaatggctttgatcacgtaacttaatccacaggtaagatggggacaataaaagtaccaacttttagggttgttagaagaattttaaaatagttaacatttgtgcagttactagagtagtacatggcaaatagtgttatatgagtaattaaattaatgaatattcataggttaatttcagatcaggaacattgttgtactctaatagtttgtatggtttttttaaattggatgatatcatctgtaagctaatagttttatctcttccaattcttaacgtatctttttccaaaaagagaaaaatgttgattagaactttcagtactgtgtcagacagtatcagtctcagtcaacatggttatctttagctaatttcactttttgctgttgttgttgttgtagagaagagtctcattctgtcacccagactggagtacagtggtgtgatcatagctcaccacacagcctccaactcctgggctcaagcagtccgcctgcctcagcctcccaagtaggctaggcactaaagggcacacaccaccacgcnggggctaaattttttaaaatttttttttt

SEQ ID NO: 111358 - DNA, 369 bp, Homo sapiens
aatgcaaggcacagggcttgacataagagatacagcagcatccctgattgtcaagagtgatgatgaggagaaagaagaggaagaggaggaggaagaaaaggagaaagaggaggaactatcaaggaagagggaacaagacagccaaaggccttaaggaagaaagaagtagcgcatgtcaaaggaatccagagatgacaagcaaggccaggatgcagccagcaagaggtcaagggacaccagatgaggctacagcagtagacaagagccacccagatacagcttgtatgccatggtaaaaagtttggctttacacgaagacctacaggaagcctctgaagagctttaagcagaggagtgacataatatttt

SEQ ID NO: 111359 - DNA, 396 bp, Homo sapiens
  misc_feature (1)...(396): n = a,t,c or g
tgtcattttcctgttgaaaaacaatcaatgatttctcatttttttatgtgctaaatctaatatccttgggctagcattcaaaactctccatgccattagtcctaacacagtatttcnnnnnnnnnngggaaagggagtctcgttttgccccccaggcgggagggcgggggcacaatctcgcctaatggaagccctggcctccggggttaaggcgattttttggcctcaccctcccgaggggggggaactacgggcaggcgcccccatatccaggaaagtttggaattggtttttcnnnnnnnnnnnnaaaaaaaagggggtttccccctggtgccccagggtgggctaaattccctggccctaggggaacccgggggccttttaactaaaccgggt

SEQ ID NO: 111360 - DNA, 437 bp, Homo sapiens
  misc_feature (1)...(437): n = a,t,c or g
cccgagttccatttttccccagcctcccagtagcaagttgagtcaaccccaggtgccgagagtcaagcgcctgtcaagaagagtcctcgaccccagagggggctgggtaagcagcagaagtggcagaagccctgcccaggccctgcctcacaggccaccacccacccctcacggctgccacaccccccagcccatgactgtccacatcctgacccctacctacctcatgacctccccgaccctgatctccacacctgaccccaaagcacannnnnnnnnnnnnnnnnnnnnnnnnnnnnnnnnnnnnnnnnnnnnnnnnnnnnnnnnnnnnnnnnnnnnnnnnnnnnnnnnnnnnnnnnnnnnnnnnnnnnnnnnnnnnnnnnnnnnnnnnnnnnnnnnnnnnnnnnnnnnnnnnnnnnnnnnnnnnnnnnnnnggc

SEQ ID NO: 111361 - DNA, 688 bp, Homo sapiens
  misc_feature (1)...(688): n = a,t,c or g
atagccagggtcctccaggaagaggcttcccagtaggtgcagaggcaaacgtttcaatcaccactgtgacccgagcacactgtggtctcagcacaccgacctcgccgggccagcgcagtcctggctcacccaccacattctgacccctcatgatggcggcccctcagcagcgccactcttggcctcggctgccctggccggctcagtctccggctcagagcagcacagcagaaggggaagagaaagggccctggggtgtgtggccgggtaacacgggacagtaaacgtcctcggctgcctctccttgtcctggaagaggagacaatgctttccccacagctgccgggcatctgagccagccctggcacgctggcactggctgtctggngtcgcttctcctgcaatgggaaggccacagggtcagacccagcacgggcaccacacgagcaggcaacttgctggaagacgacacgaagaacccacaggacttcctttggcttttcgcttggccccggctgagacttttaaaataaacttcagggtgtaaatttgggctgtgcccgttttacacacgggggtgggagaaaacactnnnnnnnnnnnnnnnnntttttnnnnnnnnnnnntcccnnnnnnnnnnnnnaatatnnnnnnnnnnngaggggggggcgcgggccccgccgttttg

SEQ ID NO: 111362 - DNA, 1025 bp, Homo sapiens
ttacggattcaatgtccgtacccgtacatcgcccagacgggcaagaccctggcgggaaccagcatagtcttcttgtaagggaccacgctccgcctttttcacacggaaactctcaagcacctgcaggacatcaacatcgccacccctgttcacaacatgctgccaggtaaggggacgggacggggcccagggatgggacagcaaccggggacggacgtggggggtgcggagcgctgtcagcccaccttagcgcttcccagtgcaggacactgttcacaacatgctgccaggtaatggggtgggacaaggcccagggacagacgtgggagtacggagcatggtcagcccactttagcgcttcccggtgcagggcacaggtcctgaaggagccgcgtgctgggaggagccgcgtgctgggaggagccgcgtgctgggaaggagccgcgtggcagtgccatctctgtaggtcagagtgggtgggagacgatttctcatcatcggtgcaacaaggccctggggaagccaggacctgaggctgaagaacacagaacaggaggcctccctttggctgggagggctgttggggagaggccaacagaggcctatgtttgtgaatgccctgttgctggtgggtgtcactgaagtttctgggcaggggagaaggccattgcgcattgagttttgggaggatcatcctacatcaggatggaggaaagaaatgaggagggggcccaaccggcttctttcacgggtagccggaggccgctgtggggtccgtggaagggctgttttgcttctttgcctgctggtgggtattggaagacatttgcagttttaaggggaaggcatgaagtaagggctctgcctccgagcccttcggctgttgtgacacacgccacagacgggctggcttacaagccagagaggttgcccctccgcgttctggaggcagcacgccggggagcgctgcgcccacggttttgccatcctcgacgatgtccggcgacggccattgaatctcgtaa

SEQ ID NO: 111363 - DNA, 366 bp, Homo sapiens
cggttgctgtacccatggggaaattcgccatgtatcgggactggcaacccgatgccgattttatccgcctggcggcgctatggggcgtggcgctaagatagccggtgaccaccgaagaactggcctcattcattgcttactggcaggcggaaggtaaagtctttcaccatgtgcagtggcaacaaaaactggcgcgcagccttcaaatcggtcgtgccagcaacggcggactgccgaaacgagatgtgaatacggtcagcgaccctgacagccaaattccgccaggattcagagggtaacgatgaaaaacgttggcgacctgatgcaacgcctgcaaaaaatgatgcctgcccatatcaaactggc

SEQ ID NO: 111364 - DNA, 421 bp, Homo sapiens
ttcaatggccgtacccgtacaacgtagtgactgggacaaccctggcgtgacacaaattaataacgttgctgtataaccgtcatgcagaagggcccaggagggatgagtgagccccgtgctgagtgatgtgagcagctccatggattccagcccttattagaattcaccactctcacgggctgcaagcatcatcacaagcatgtatttatccctgacctcccaacgtggatattagtttagcgtgctggacaagttggtcctttgcaaaagatgaaattgtgggctcactgatgtgagttactgctgatgtccctgtgtcaaataaatactgaagagacattggcgctctgaaggcactcaacacgtccttctggaagatacgaccccggtgctctgaaggcactcaacacatccttctgga

SEQ ID NO: 111365 - DNA, 343 bp, Homo sapiens
  misc_feature (1)...(343): n = a,t,c or g
cttgttgttaaacgtctgtatgcccgtcatccgcgcgtgaatttattgtcgttaacatcctggcaaatgctgtatgcggcgctggtgatgagtgtggtcgctttactggtgccgcaacgtgaaattgactgccagcccaccgtgttctgggcgctggcctacagtgcgattctggcgacggcactggcgtggagcttatggttgtttgtattgaaaaactcgcctaacagtattaccagcttaagctctctcactgttcccgttttaggcgtactcttatcttgaagcttgcacgccaacaatccggctcccgaggaagggaccggtcctccccnnannnnnt

SEQ ID NO: 111366 - DNA, 337 bp, Homo sapiens
cggtgatggccgccgggcagaaagtgttgattcaggatttgcccggcgaactgtttgaatcaacggttgcggagagtacttcgcaaatgcaaccggacagctgggggacgcttcttgcgcagtgggcagacagagcgttgcgttccggtcatcaaaatctgctttccgaagcgcagccatagctggagcggacgttactgacgaccgcgttgcgacatacgcaggggcataaacagaaagcggcgcggttactcggctggggccgcaacaccctgacgcgtaagttaaaagagctggggatggagtgattcacagcttgtgtgtaaagattgattat

SEQ ID NO: 111367 - DNA, 386 bp, Homo sapiens
ggatcaggtaacccaaaaacccctgcgtgactcggttaaacaggcactgaagaactattttgctcaactgaatggtcaggatgtgaatgccctctatgagctggtactggctgaagtagaccagcccctgttggacatggtgatgctatacacccgtggtaaccagacccgtgctgcgctaatgatgggcatcaaccgtggtacactgcgtaaaaaattgaaataatacggcatgaattaattcaggttagctcaatgcttgattaaaaaggcgctactcggcatggggaagcgccttttttataggtgtcacaaagggagtgcccatgagaacaggatgtccccgaaccggtttgttatattgcaatacgactattttgtcgcgg

SEQ ID NO: 111368 - DNA, 342 bp, Homo sapiens
agattcaccgttcctggatttgtatcgggtagcggaacaggtagtacttgaagcgtttccgaaacaagagatggtggcccgtattaatacaaggctggaaggcggagatgctcatccattagaggccattgtcacgcggatgcttttgatgaaagtgatactcgagctgaaggatgaatatgtcgatgagccaacgcctgaaaatcatgaataaaaaaatgatgagggtaaaaaaccccagagcattaccagcattatcaaaatcagtttaacggtgatggtgataggttatgctctcggcaaaatcgcgatgttgtttagctgaccatgtgtttttttctc

SEQ ID NO: 111369 - DNA, 683 bp, Homo sapiens
agaacgaacgtgcttaccaattctatgtcggtacccgcacatcgcgcgagagctaatgagatgagtacaaatttagtgaggatggccccaacacagtttgattttgggcgcacaccatttgaccatacacctcccaccacaacattgaccagacacctcccaccacaccagtgaccacacacctctccaccacaccagtggccacgccccttccccccacatcgggtgaccagacacctcccaccacaccggtgaccaagacacctcctaccacaatgaccagacacctccccccacaccagtgacccagcaccctcccatcacaccagtgacccagacagcctcccatcacaccagggaccaaaacacttcccactaggccggcaccaacactggcgatccaatgtcagcctgaggttttgggggtgtcacaacatccaaacgatatcactggggtatgtctggggaggcaggatgattggcaaaagggcctcagaacaggaaaacctttcctttgggtccgaagcctgtgcacaaccatcaggaaactcatctgtttctgctggagtttaacttgactttgattggttattaaaagccatcttgtattcccagcagctatggtagtctcagttgggcagatctccgggtacggacatagaattggtaagcacggtcgggtg

SEQ ID NO: 111370 - DNA, 1087 bp, Homo sapiens
gggtaggagccgcattcccaccccgaaatgcgccaggcctgaaaccgggcagcacgttgttcttggtgcctgaaccactgccatgcattggtcttggtgctggccctcgggttgggtagggacccacaatcctcaccccgctcaggggaaactccaggtgccggggtataaagggttcccgtggcgcggccacagaccagagccggggtatcccgtggccatcccacaccctcactgctatcaaggctgccggcttcctggccccacaggtgtcgttcatgctcagctagctcaaactgatgcttactgatccacataggctctggaaggtctcaagagcaacttccagtcaaaggagcccttgtttaatggcaggaccaaccggcagccctttgaaagggccctttctctaagaccggtggccaaaggccaagtcaggatgtttgggctgtaaattgcaggggtggattcctgtatttgcttgggctgtgaactgcaggggcggactcctgtatttgcttgggatgtgaactgcaggggcggactcctgtatttccttttccattacggtccccccaagattgagactcactcccatccatagtgtgggtttgggaccttccaaccttctgatcaagctttatgggagacgttgacatgatttaggatatattcatttgactctgaggtgtaagtcagaggtaacacggtcttaactcttgtcagttgcctttgctttattggtttattaattttttaattgaaagtcactttcttattccttagaaataaagtcgttagtaccagcaggtatgcatatctgacggatcaatgtctgcgcactcactatttgccatgtgcatggtaaaaataaactctcatcatcaaataaaataccacccacacaattaaccccctccttggaaaccttggaaagaaaaaatttatttctgatacaccttcagtatagatgtcattcacaattaggggtcccgtggccgcacatgcacatatggagagacacactgactgtgaagatgtgtaacaaaggctcctcctgtcaggtacagaatttaaaaacagggcc

SEQ ID NO: 111371 - DNA, 435 bp, Homo sapiens
tacttctcccgtcgcgttcgttttgtggaagggaaaccgctgatgctggaagacagctatatgccggtaaaactgttccgtaatctttcgctgcaacatctggaagggtcgaagattgaatatattgaacaagagtgcgggattttgattgacagtaatcatgaaagcctgacgccagtgctcaccgatagactgttatcgcttctagtgaaagctcactgaccctcaccactgatacaagttacgcaagcttttaatcgttaaaaactactagtcgaagctcactattagtagacgtacgaagctgtctagttgatatggactagaacaaatacttgtgtacaatacttatacgtactatagcggatataatacacaaatcctactataaccagattatctcagtaaattcactcaatctactcccaccccacg

SEQ ID NO: 111372 - DNA, 547 bp, Homo sapiens
  misc_feature (1)...(547): n = a,t,c or g
ncctctggttgaagtttggagttacaagccctaaaggggcctctaatttccatgtccccccgccccccatgtttgtgggcctccgccctgccccagggcttttccggtgggacaannnnnnnnnnagccccaggtggccacaggttttccctgaagccctgtttgtcctcctcccaggctgtactggggtcccgggactgagcggcactgggtggagactcactacagggcttttctcccatcgcagcacctgagcagccccgtgactgcggcctgaggtttgccccacgtgcgctgtgggccaggcagagcgccaggtgcacccaggatgccttcatcttcaccgccgctccagagccagggactggtgactaaccctgtatccacgagatagcaggctcagtacggtcagggacttgtctgaggtctcacatccagggttgttcgccgtccccgggctcagtgtctcgctccccgcctgcggagtggagtagttttgagatgtgagcatgccatctccctttccacggccccctcntncnnnttc

SEQ ID NO: 111373 - DNA, 558 bp, Homo sapiens
tgaactgatgaccggccttaattacgaactgctgtttcttaaatcgtagaagctggttggccgccctaatcacccgctacttcaggagaacgcaacgctaatccgggtgctggaatggccgggcgttgtatcaccacaaggcactgcgccacgccagcattcagatgcattagtgcacagccagggctgtaaaattccttcggtgtgtatctaaacgctggatgcttcgctatctcgccaacttacggctgaatacgattacgcgtggtttgtaccttctggcgctggaaaagacgacctgcgtcatgccacgctggtggccctgcctgttccgggacatggtgcaggcgaaccgattggaatactgacccgcgtagatgcgacgttctcttctggttgccagttgatgattaacgctattcgaaaatcaatgccgttctgaaaggtgaagggatctgtcgatccctcctttgacatttttacaccgtagcgaaactaactggttcacccgcctcgcgagtttctgccgacacagattgtttggcagaccgaatacat

SEQ ID NO: 111374 - DNA, 595 bp, Homo sapiens
  misc_feature (1)...(595): n = a,t,c or g
agggccttccctgaatgggtcaagaagatacagccccgtattcggtggtagtccgcactccagcacaaggcgcggaacaggaatcgggaaattcctgttgcgatccagggactaacttcacttttttcccaggcaaagtttttggcattttacggacctttcccccccaaatcaatagaatacccctttgtggcaggtgttcaatatggttttttttaaaataaccccatgtttggaaattaacccctccccaaccaatgcaaaaggatggtagtccttaccaaggggctttttggccccaatgccattaaattagaactcggggttaaaaaactccctcaatgggcaaggnnnnnnnnnnnnnnnnnnnnnnnnnnnnnnnnnnnnnnnnnnnnnnnnnnnnnnnnnnnnnnnnnnnnnnnnnnnnnnnnnnnnnnnnnnnnnnnnnnnnnnnnctttttttttatttttgttgnnnnnnnnnnnnnnnngcgcnnnnnnnnnnnnnnnnnnnnnnnnnnnnnnnnnnnnnnnnnnnnnnnnnnnnnnnnnnnnnnnnnnnnnnnnnnnnnnnnnnnnnnnnnnnnnnnnnnnn

SEQ ID NO: 111375 - DNA, 605 bp, Homo sapiens
  misc_feature (1)...(605): n = a,t,c or g
nnnnnnnnnnnnnnnnnnnnnnnnnnnnnnnnnnnnnnnnnnnnnnnnnnnnnnnnnnnnnnnggnnnnnnnnnnnnggggaaaaaaacccccaaagggccccaaagtttttatttgggttttggaaagggaaaaagggaggaagggttgcccaaaaaaaattttgttggcgggggaaaaagggtcccccccgggggggggccggggacaaaaaatcccttccccnnnnnnnnnnnnngaacccttttaggggtcccccccaggaaaannnnnnnnnnnnccccttccgggaaataaaggggcaaaatggtttttgtaagggaaaaaggggggaaaacccctggccaggggggcggttaaaaaggttcgaaaaaaagggcccccaaagggttttggggcaaaaaaaggccggggggnnnnnnnnnnnnnnncctgccgggggaagtttttgaaagaggggttcnnnnnnnnnnaaaaaaaacggaattggggtttcccattttggccaagggggaaatccagggagggtttttgaactttccaccgagggccggggaaacctgggtgggcttgaccccccgggaaaaccctggaaaacagggggg

SEQ ID NO: 111376 - DNA, 636 bp, Homo sapiens
cccgcagagcctgctcccggctcagagctgcgccccttggggagggtgcgccgggcagaccctaaccctctcccagagcaccgccctttctgcggacccccacgggctgagctcacctgagggagggggcgtcgggcagacgctcccccccccagaacatcgcccctccctgcggacacccggggtgcgcccagccgaggagggggagtcggtaccccacccgacccgcccttgagcccccgtccctccgtccgcagctggccctgcccacagggcggtccgggtcatccgcgccagctgccctggaccagacaaggcttgggcggttggaaatgcgatggattcttccccttttccggggcgcgcttttaggcctgccttttcctcgagaaagactcattttttcccgacccttctctagtcatgacccccctctagacttggcaatccggccatcgggcctcattctgtctcatactttgagcgagggtcccgtgtctcgtgtacctcttcccaaggacaccatctgctgacacttcgcttcttttgtatcagcaccttacgcgtatgttttttctcttgtcgcacttacagagcgtgtggcgcatctaactgcactcgtggcgcaccttacgg

SEQ ID NO: 111377 - DNA, 644 bp, Homo sapiens
  misc_feature (1)...(644): n = a,t,c or g
ngggnnnnnnnnnnnnnnnnnnnnngcgcccccaaaaagggggccccccagaaaaaaaccccaggaacttcccaaaattcgccaaagcaagaaggggcccccggtttccccgcggtccccttttttagatttccccccggaaaaaaaannnnnnnnnnnaaatttctttttggccccccccgttttttaagggggtgtaaaaaatttccctcccccccctctcaaaaacccccctcttttttgggggcgggctcttctaaaaaaaaatttaaaaaaattttttttctaaaaaaaaagaaaaccccccttcggggggggaaacccgggggaaaaaaaccccnnnnnnnnnnnnnnnncttcccaaaaaaaaggggccggggtttttgaaaaaannnnnnnnnnnnnnnnnnnnnnnnnnnnnnnnnnnnnnnnnnnnnnnnnnnnnnnnnnnnnnnnnnnnnnnnnnnnnnnnnnnnnnnnnnnnnnnnnnnnnnnnnnnnnnnnnnnnnnnnnnnnnnnnnnnnnnnnnnnnnnnnnnnnnnnnnnnnnnnnnnnnnnnnnnnnnnnnnnnnnnnnnnnnnnnnnnnnnnnnnnnnnnnnnnnnnnnnnnnnnnnnnnnnnnnnnnnnnnnnnnnnnnnnnnnn

SEQ ID NO: 111378 - DNA, 425 bp, Homo sapiens
  misc_feature (1)...(425): n = a,t,c or g
gacgacaaaccnnattggtagaggaacacatgacgttcagcgcgtgccgagcactgtacattcactgaattttttttaggggctcagccccgacactgacgccagagtgagcaggatgcacgggccggggctcacactgtccatggaggaggtggtgtcagccccaggtgggcggatggtggccccacacaccgaaagcttggttctgggactgtggctcaactgacccgtggcacagctgcacctaatacatggccctggctaggcgggaacggctcacagtatcgatacattcacaggacacagttggtgtccagaaaagggggctcaaaacacagtttctacacaagcacttggcacccacacgacagagacgttactcaagcagcacagccacaaatagattacagcagctcatgcccggc

SEQ ID NO: 111379 - DNA, 519 bp, Homo sapiens
ttttttttttagacagggtctcattctgtcacccagtctggagtgcaatggtgtgatctcagctcactgcaacctctgcctcccgagttcaagtgattcccctgcctcagcctcccaagtagctaggattacaggcatgtaccaccctccctgactaatttttgtatttttagtagagacagcatttcaccatgttggccaggctggtctcaaactcctggcctcgggtgatccacccgcctcagcctcccaatgtgctggaattacagttgtgagccactgcacctggcctggtttctattactttttaaacatctttaatgatttaaaacgtattttcataatagccctgttccaaattattatgttatctccaattcttgagcttctgactttcatgtttccccatttgctgccgctactcatttttttgtgctgttgttatgtttctcataatattttggttattagataacttcagtttgtagatggtggtagtggtagggttcttgaacgaaa

SEQ ID NO: 111380 - DNA, 407 bp, Homo sapiens
  misc_feature (1)...(407): n = a,t,c or g
tttcgtaacatttataggtaatctacagttgtgccagattgaccctctattacaaattcaactttttctgtaagncnttnnnnnnnnnnnnnnnnnnnngggaaaaaaatttccctttttggccccccnnnnnnnnnnnnnnnnaaaaattcggttttttggaannnnnnnnnnggggggaaaagggaattccccgnnnnnnnnnnnnaaaaaaggggggaaaaagggggnnnnnnnnnnnnnnggggaaatttttttttggggtttaaaaaaaaaggggggttccccctgggggcccgggggggtttaaacccccgcccccaggggaatccccccccttggcccttaaaaggggggggaaaaaagggtgggcccccccgcccccccccttttaaagttaatggggn

SEQ ID NO: 111381 - DNA, 447 bp, Homo sapiens
  misc_feature (1)...(447): n = a,t,c or g
ctcaagcaccggtcttgaattaacgggtcgacgatctagtccagagggggatgagctcttctgagacccagtgcccctacccaacttagtacgtcgttgcagtacagggaaggggccattccgtctgtaccaaccccagtgacaagtgggtccaggactatatcaaggacatgaaggagaactgagtgacccagaaggggtggcgaaggcacagctcagagacataaggagaagatgccaaggccccctcctccacccaccgctaactctcagccccagtcaccctcttggagcttccctgctttgaattaaagaccactcatgctcatatatgaaaatagaagaaaaaggannnnnnnnnnnnccccccttttttagggggaccacccgggtgaataatataatgtcgggaacaaattttggggtgaaagctttttctttttttgg

SEQ ID NO: 111382 - DNA, 408 bp, Homo sapiens
  misc_feature (1)...(408): n = a,t,c or g
tttcgttgaacttgcaaatcatcaaataaggaaatagattaacagttaatgtgaattaagagagtatattatataggtagttaactttaaaaaatttttttcnnnnnnnnnnnnnnggaaaggaggttccccctaattgccccggccggaaggcaaggggggcaatttggcctaatggaaccctgggcccccgggttcaagggaatttcccgcccccaccccccgaaaaagcgggaataacgggccccgccccccaccttgggtaaatttttaattttaaaaaaaacgggggttccccctggtggcccaaccgggcctgaacccccgaacctagggggaaccccgtggcctaaccctccaaaggggctggaaaaacggggggaacccctggccccaaaccacattttg

SEQ ID NO: 111383 - DNA, 831 bp, Homo sapiens
tttcgtctcaggacaggcaggtgtgcctgtggaactcaatggaacacaggctgtaatggaccaggctggtagatgaaccaggacactgtgcagattttcatccaagtggcacagtggtggccataggaacgcactcaggcaggtggtttgttctggatgcagaaaccagagatctagtttctatccacacagacgggaatgaacagctctctgtgatgcgctactcaatagatggtaccttcctggctgtaggatctcatgacaactttatttacctctatgtagtctctgaaaatggaagaaaatatagcagatatggaaggtgcactggacattccagctacatcacacaccttgactggtccccagacaacaagtatataatgtctaactcgggagactatgaaatattgtactgggacattccagatggctgcaaactaatcaggaatcgatcggattgtaaggacattgattggacgacatatacctgtgtgctaggatttcaagtatttggtaaggaaatgacacctgatgtaaagaagtggtttgtgggttttttatatataatatttacttgcttaaatttataaatgaaaaatagtctgtgtattctttagctttatcactattaatgtcagcctcagagaaattaaatgtattaggattgaaccaacatgggatttgtattttgcagaatccagcacttttggtccttaatatgaaagacaaggaatttacatagtagtacagattaccttcccgtttttctttaagtgaaaaatgaagttattaaatttggaaaggcatttttaaatagcttgagatact

SEQ ID NO: 111384 - DNA, 421 bp, Homo sapiens
  misc_feature (1)...(421): n = a,t,c or g
tttcgacaacttattttttgaaaaagaaatttagaatttcttaaaatttaaagccaagacatgctctaggaatacaaagaagagaactcctaatttctcctgtgaaaattagggacatgcttttcnnnnnnnnnnnngaaaacaaaagcctcccttggccccccgggtgggagggaggggggcaaatttggttaaatgggacccccggcccccgggttaaagccttttccctggcctaaccccccnnnnnnnnnnnaataacggggcccggccccaacccacggtaaaaattggatttttggaaaaaaagggggttcaccatggtgacccaacggggcccaaacctctggacctggggggattggcgggcctggccccccaaaggggggggaataatgggaataacccccggccccacact

SEQ ID NO: 111385 - DNA, 455 bp, Homo sapiens
  misc_feature (1)...(455): n = a,t,c or g
ttctttcgcctgagctanngnnnnnttgtttccgggtcgacgatttcgtgcccaggcagacgcagctcaccggtcctctgatgccaccagcccagcaggctgcagggagcctggatctgcaggcggtggccgaggccatggtacagcccacccagcgttcaccctgcggtccgtggcgatggccgaggtcctggagtactgatgagaggtgccctcccaggtgccaaaaggagcttctgcagacacagttccgcgtgcagggctcccggcaatcgaagtgcagggccggcctgggccatagcacaggaaagccaggtgcggaaggcagataggacagaaggcactttggagccggctttcacgcacggagacagggcccgagtgggacttacggaacttggtcccccgtagctgaccctgggcagctcagctcctttggtatgaggcggatcagg

SEQ ID NO: 111386 - DNA, 394 bp, Homo sapiens
  misc_feature (1)...(394): n = a,t,c or g
taccgcctggtgcgcttcgaggacctggcgcgggagccgctggcagaaatccgtgcgctctacgccttcactgggctcagtctcacgccacagctcgaggcctggatccataacatcacccacggatctggacctggtgcgcgccgcgaagccttcaagacttcgtccaggaatgcgctcaacgtctcccaggcctggcgccatgcgctgccctttgccaagatccgccgcgtgcaggaactgtgcgctggtgcgctgcagctgctgggctaccggcctgtgtactctgaggacgagcagcgcaacctcgcccttgatctggtgctgccacgaggcctgaacggcttcacttgagcatnatccaccgcctcgcacccccgaaattagtggaggg

SEQ ID NO: 111387 - DNA, 1896 bp, Homo sapiens
  misc_feature (1)...(1896): n = a,t,c or g
ttttttttttcagacaaactctcgctctgtcgcccaggctggagtgcagtggcgcgatctcggctcactgcagcctctacctcccgggttccagcgattctcctgcctcagcctcctgggtagctgggattacaggcgcaggctaccacgcccggctaatttttgtatttttagggggtttcgccatgtcggccaggctggtctcgagctcctgacctaaagcgatccgcccgcctcggcctcccaaagcgctgggattacaggcgtaagccaccgcgccgggctctttcattctgtctttattttctgagatagagtctcgctcggacgctcaggttggactgcaacggcgtgatctcgggctcgctgaaacttccgcctcccggggttcaagcgattctcctgtctcagccttcccgagtagctggaataattgacgggcagaaccacgcccggctactttttgtggtttttgtatcttctgtcttctgctctttagtacctcatagagccgcagaagactagcgagtcgaacaaacggcccctcttgcagcagttgttgatcacggggctgccccccggtactcatcctgtgtctctcgtccaaatccccgctcctcgtcagctatcacctctgccgatgctggtggtttccctgggtaccgggaaccaaactctcattccccaggggcctaagacccccgtggccaggcccttctcaagtcagggttcctgcacattcacagttacgggtggccctgggagtaacacctggcacccaaacaggtcaccagagtccacacatagtccacctgccctccctgcgtaagatcagctcttcctcctcccgacgatagatcagggtcaatgatccctgccaagatggcgactgctccagcctgctggtccaacctgtccagccacagctgttgctcgaaggcttgaagttcaatgggaccctctcccgctttctacaaactggnnnnnnnnnnnnnnnnnnnnnnnnnnnnnnnnnnnnnnnnnnnnnnnnnnnnnnnnnnnnnnnnnnnnnnnnnnnnnnnnnnnnnnnnnnnnnnnnnnnnnnnnnnnnnnnnnnnnnnnnnnnnnnnnnnnnnnnnnnnnnnnnnnnnnnnnnnnnnnnncagcccgaacaggttttcactaggttgcctgggctctttctttctttgtctgtgtttgtttgttggttggttggttggtttttgtttgtttgtttcgagacggggctcgctctgcgccgggggctgcagtgcaatggcgcgatctcacctcactgcggccttctgggctcaagcgatcctcccactgtgcccggcctgtagacagcctttagagaaagaagcagggggagttcttccgaggacagacaagatttctggagtttggaaagggtgagagactgggtcagcgaaaggaacattccggtctttatgttgggatgcaacgtatagatacagggatgagacccaaaagagccggcaggaggtttgtcatcgtgctcgcaaggcaaacttccggtggctgatcccgtaaaggatacacaatacctagagcggagcctaaagatgcatccagcatgacgggtggagccacgatgcttggactcgagctctgctcctgtgcgttccgtgatcaatggcttatactacctgcacctcagtttttcccggggcaaaaaaggaagcttgctgccggtgcgttggcacctgccttaaagtgccagctactcagcgggctgaatgaggaagaagttcctactaggaagacacgtggacacgtattgtttactgcagcactatttacaatagcaaagacttggaaccaactcgaatgcccatgaatgataggctggataaagaaagtgtggcacgtata

SEQ ID NO: 111388 - DNA, 845 bp, Homo sapiens
ttttttttttttgaaaccggagcttcactcttgttgcccaggctggagtgcagtggcgtgatctcggctcactgcaacctccgcctttcaggtccaggtgattctcctgcctcagcctcccaagtagctgggaccacaggtgcctgccaccactcctggccaattttttgtatttttagtagagacgaagtttcaccatattggccaggctgctggtctcgaactcctgacctcgtgatctgcccgcctcggcctcccaaagtgccgggattacaggcatgagccaccacgcccagcccctgcaagcagtttctttaactctgttgggatgccattcgtgggcaaagctagatttgggacaagttgcccagctctgctaggaagagtcagtcctcagggggaaagtttcttttcacctccgggatccccagggcttcctgggttgactcaggacttcatacgcagcctggatctccaggaagtgcctctgtgcctcctctgtctggtccaagtttgtggtctgggtgccagaccttcactagctcctggtaactccgatgtatttcttcatttgttgccccttctgagaggcccaaaacctggtaagccagctgacgcatctcatcctgaaaactgtgaacaaactcatagagcttcgcccactcctgaaagcagctgctgttgaagccagtctcccccatcagtagcctccagatccggtaaggcagaaggaggacaaactccatgaggcggccaagaagggggaagaagctgaaccaattcaagaaggagccaaaggtttctgccacatagctgagggtggcagctgtgttgcagagggcact

SEQ ID NO: 111389 - DNA, 431 bp, Homo sapiens
tgggtgtgtcaagacgtggctgtgggtgcccccaaggaacttagaaactatctggagaaactcaaagataaggcttaggcccctctagccaaagggccctgcccagatgccttccttgtactggaaactggcccaagtggggcagaaggcgttgtcagtggggttaagaagggacggtcccagggtccatgctagaccagttggaaagttttgaagtcaggaaaagacgtttttgtatcaagggatttttagcagttaatggtggtggatttttaaaggtcaggggaataaagtctggggcatggggagtgcagaccaagttactgaactgcacaggcaaacctaggaaggttataaaatgagtcaaaacatactacagacaatgtatgcggccggtgtaagtattccagattacgtaccgtcatctgcct

SEQ ID NO: 111390 - DNA, 390 bp, Homo sapiens
aatacatgtctgtgtgtttatgtgtctatatatgtgtgaatgtgagtgtctgatggtatgtatgtgtgtccgtatatatgtgcaagtgaatgtgtatgagtgtgtatgagcgtgtatgagtatatgtgcgtgtgtatgagtgtgtgtctatgtatgagtatgcgtgtgagtgattgtatatgtgtgtcttttaattcaagcacgtcatatttcctctgatgacttacaatttgcttctgctttaaaggcttcacagagaagctgccgtccatgtgctgcaggggagaaagacaaagaggttaaggtggtcaagctggcgcctctgagcacccctgcgtggccgcctgggttggccaccctgccccagccaatccatgcccacagctggaa

SEQ ID NO: 111391 - DNA, 396 bp, Homo sapiens
cacacccactcgatgcggctgtgacagtgagtcatgtaggtgactgtctcctcccattgggccttgatgtccttcagccgggccaggatcccgggcttctggtccccagggcagcatgccaagagggcttcagccatccgtagcacgaggtccaccctcacacgcccctcgggctccagctggcatattttctcggtctcccacagcctggcctccagggccgcgcggggtccctgcgtgttgtcattgacctgcagctggtcctgcacagccttcatccatgcctgggcatcctccacgctcctgtcaaagtcgtcctggggctgctgagtcatggcacctgcaggggcttgcagacgcgtaggtgtcctcttgagtccccagacctcagcacca

SEQ ID NO: 111392 - DNA, 447 bp, Homo sapiens
gacatcgctcgtatcctctagagcggccgcaatacaccccttctctctctagctcttgttttcttttctttttccctgggatactgctcttcattttgtacccctctcctctcctgctatttatccccttcttccctttattccttctcttccacctcttctcctccatcctcacaacttatttaacctcttattgctccttctccccaatctttcaatcgtcctcaatctccatctatttctgcctcttctcccatctctgcgcctcctctgctctccctgttaaattccatcttccccgatatactcccctgtccccactctgtgtctccccagatccccagctgtcctctctgctgtggatctccctctggtctccttggcacaagcaccactctgctctgtctgccctggctccaaatccttccctttctccctcactctgaa

SEQ ID NO: 111393 - DNA, 952 bp, Homo sapiens
acggtcgacgatctcgtgccgcggcgtaggcggaggagattttcggacctgcgactttcgaacaaccctggcaggagggagcgggcgttcagccggggggaggcctgaagaaacgctccgggggccaatgggtctaacccttggttcttgccggccctggcggctccctcacggagccagcggccgggaatgcagacatcagaacgtgaggggagtgggccggagctgagccccagcgtgatgcccgaggctcccctggagtctccaccttttcctaccaagtccccagcgtttgaccttttcaacttggttctctcctacaagaggctggagatctacctggaacccttgaaggaggcagggaatgggtgttcgatacttgctcaggtacagactttgtggagttgctctggtctgctctgccttctgccgtcctgctctgtagtaactaacactgaccatttaggcagtggctgggctgtcctttctgccctagtgaggagcagttctgggaggtctgtttcggcctctgggtttatctagggcctaaccctgtgtctcaaggcccagtccagggagaggcagaatactgggaatggatcctgccctttcagcaaggttccttcctttgtgactgaataagctccttcctctggactgctggacaaccttgaacatcacgccttctacagcttagagcaggcttaattttttcctttgcccccaatattagcataattaatattaaaaaattagggtataattttgaacaaaaattaaagaaatacaaaaacctgtgaataagcagataccattttcactacttttttttttttgagacagagtcttgctgtattgtccaggctggaatgcagtcgtgtgaacatggctcactgtagcctcagcctcttcagctcaagcgatcctcctacctcagccaccatgcctggct

SEQ ID NO: 111394 - DNA, 443 bp, Homo sapiens
  misc_feature (1)...(443): n = a,t,c or g
nagcaagccccccccttgaatggttgccgagcccaccgccccattcagccactccgcctcgtcagaccccgtggaccgcctctcgccattcatgnccgctcgccacttcaacgtgccctccaagaccgagtccatgttcatggcgggggacagcgactccctcatcgtcgggggagaaggcggccaggcgctctacatcgatggggacgtgaaccggggccgcacaagccactgcgacaccttcaacaaccagcccctctgctccgagaacttcctcattgctgccgtgaaggcatggggcttccaggaccctgacacccagtgacggcctgtgccacggtgactgagccgtggtggggcggtgggccgagaatggaatnccgcctcgggcagcagagagcagatgtattgcgtgcgctctagacgaaacaaggagtgttcgt

SEQ ID NO: 111395 - DNA, 406 bp, Homo sapiens
actcgagggcggccttcagcgtggcccccagagagtagatgtgcgcctcaaaggtgttcccggtcacgtcgaactcggggggaacgaaggcaccctcagggtcgtcgctgagctgctccatgaaacacacgttcccgctggtgttgaaggccagggtgtcgggcgtgatgcacaggctctggaagatggcggcgtggggccacgctccgcatggacaggctgcactccaggcacacggcccaggcttcctgctcgctgaggccgcggtcccgcagggagaggatgtcagccagagacacgttctcctcgtcctcggggagggtgggcagcggctcgaagtcgtagaagtccaggtctttgccgtcctcctcgtaaagatacaccgcggccgggtccatggcctgca

SEQ ID NO: 111396 - DNA, 489 bp, Homo sapiens
ccgagccctgcaggcctctgccctgaaggcctggggcgggaagaaggagaacctgaaggctgcgcaggaggagtatgtcaaagcgagccctggtaaaggataggcaggaggtggggcagggtgcctgggtggatgggactcggagaagagcccttctcactccacccctctccctgcttaggccaacagccttgcctgtcaaggaaagtacactccgagcggtcaggctggggctgctgccagcgagtccctcttcgtctctaaccacgcctattaagcggaggtgttcccaggctgcccccaacactccaggccctgccccctcccactcttgaagaggaggccgcctcctcggggctccaggctggcttgcccgcgctctttcttccctcgtgacagtggtgtgtggtgtcgtctgtgaatgctaagtccatcaccctttccggcacactgccaaataaacagctatttaaggggggaaaaaaaaaa

SEQ ID NO: 111397 - DNA, 393 bp, Homo sapiens
cgtgatctatgtgaccaggccagcgatggtctgcagtcaacagcggtgccatgcccacgggctctgtgcccggcgagatccagcacagatgaaagcctttttacacgtgtggccagacggcagccttgcagatagcaagtcgttcagctcccactgatattggggttgggctggccccaccagccaggagcccaggcctgggcctaaaaaagcagtataaagccagggcccttgccactgcctcttctcttcagtgaagccactgttccagtccgggaactactatgtcccactcttgttatattcagtcaacagtcgaccctcccaagctcacactccgattccaatggaatccatgaagggtagaaggggccagaaataacgcagtgtatt

SEQ ID NO: 111398 - DNA, 391 bp, Homo sapiens
ctgaccaaggtacagagagctgtgtgcatgctgagcaacaccgcagccattgttgaggcatgggctcgcctggcccgcaagtttggcctgatgtatgccaagcgtgcctttgttctttggttcgtgggtgaggggatggaggaaggcgagttttcataggcccgtgaatatatggctgcccttgagaaggattatgaggaggttggtgtggattctgttgaagaagagggtgaggaagaaggagaggaatactaattatccattcctattggccctgcagcatgtcatgctcccagattttcagcttcagcttaacagacagatgttaaagctttctggttagattgttatcacttggtgatcttgtcttttccatgtgtacccctgtatt

SEQ ID NO: 111399 - DNA, 1355 bp, Homo sapiens
atcattagtccagagcggtggaattcaaaaataaaatgatttccagctggaagaaaatcttttgtagtctaagatttgtttcttcctatggtattcccagcctgtctactgtaaaagcaaacacgggctcatttaagcgtagagtgaaaatggaggcgcagaagcatgtggacagtaagaaagagtgcctctgacagagttcactgagaacttcaatgtctttttttgacattgagttatctctgtggcttctgtcatttattagctcagaccacagcattaattactgatttttttaatcttaaatgacaagacactgctgtcctgggaccttgctttaggtttagttatggctttttcctcagcctatgtggcccacctttctaattttttttcctctcttttgacctccccagaccgagtgacggttctctacaggagcaaagccattcgctatacctggccttgtccatttcctatggccgactccagcccctgggttcatattaccctaggtgatggcagcaccttccagaccaaattgttggtagtttaagattcttattttgctaggggtcttgtatatctattttttatcctagattctagggactctggttttcgatttaagctatagtttaattttaggcaaaacttttggttatgaggaccagtacctattcaggccagctcaagtggagatggtctcatcgtaaatcctgtacagggagcaatctcatgggccgtcttaggttgtgaaataacagatagctgggcctcacaggacaggcaccaaagtgttgggaatggaggctgttctttccctctgaggagtctgcgggcattgatctcttgcctctcatttttctcctttctgctcacaagcttccctttttgcatggcagccattcctaaccctacatcagaactattcagctccagtgtgtgccccatactgaaactttccttattgctctctagttcaaatatcaggagggcctggctgagtttaactcatggctggcacctgttcagtcatgtccagcttttgcttctgttggctgaaggttgatgtgaacagtgcaggggctccacctctaggggctgtgagtgaagcaggcctgatggaattatcctgccacacaacaatcagagctggaggaaactttagggagcagagaaaaacttctgaagcagtttatgaaaaggctggaagacttagcaggctcatgtgtccatgcagataggtgcagatggtcacaacttcggagtacggcaggctggtggaatccagaaaggcagctggaactatgaccagtctgctgttgtggctactctgcatttatcagaggtaa

SEQ ID NO: 111400 - DNA, 570 bp, Homo sapiens
  misc_feature (1)...(570): n = a,t,c or g
cgaaccattggtannnnnnnnnnnaacgatgcagtatttgtgcgttccagaaaagggcccagctctgagcccctcacccttccacactcacgaactctcagccgaggaaggcaagaagcgcagggggtggcccgcgtggcgtcggtggcctccgctcctgctcgcagcccctgtggtcagagctggatacaagattcaagacccttcttttgcttgtcacccgctccaggttggagccacagacaacccaccgccaccccggctggggctgcgtcctttcctgtgcctttccctccagaaagcggcctcagacctagaagctcaacccccctatgagggccacgtcctggggtagctcctgacctccgaccttatgtccaaatttcacacccatggtttttcatttgacccgcccccttctcgctcataatgacacccagctcctttgagagggatcagagcccattgcacaagaagagccgctgccaaccatccttgtcctccgattgcaaaatgacaccccagtaatctagaacattctcaagcccctttaactcagatgtcaagcca

SEQ ID NO: 111401 - DNA, 625 bp, Homo sapiens
ccttagaagaaaagaaacaggttgagtgggactataagctagtgcccagaaaaggagttaaggcaaacgaggtcctccagaacttcctgcagtcacaggtggttgtagaggaatccatcctgcagtcagacaaagccctcactgctggagagaaggccatagcagcggagcgggccatgaaggaagcagctgagaaggaacaggagctgctaagagaaaaacagaaggagcagcagcaaatgatggaggctcaagagagaagcttccaggaatacatggcccaaatggagaagaagttggaggaggaaagggaaaaccttctcagagagcatgaaaggctgctaaaacacaagctgaaggtacaagaagaaatgcttaaggaagaatttcaaatgaaatctgagcagttaaataaagagattaatcaactgaaaagaaaaaattgaaagcactaaaaactgaacagttaaggctctttaaagatccttgacatggctagcaacataatgattgtcactctacctggggcttccaagctacttggagtagggacaaaatatcttggctcacgtatttaagagcctgaatattccagcctgggcgacagagcgaaactccgtctcaa

SEQ ID NO: 111402 - DNA, 491 bp, Homo sapiens
cctgcctcagcctccctagtaggtgggataacaggcacccaccaccgcacccaggtaatttttttttttaatttttagtagagacgggtcttcaccatgttggccaggctggtctcaaactcctgacctcaaatgatccacctgcctcggcctcccaaagtactgggattacaggcatgagccaccacgcccagcccaggcagagttcttatgtacccccaatgagcctgcccgcctcagccatgcctgttgagggggtggggggggatgccctgtgggccggccatgccagcgggtacctgggaggtgggcagctctgggccacatccgagtacatccctctctgcagcagcaatgcagagtccctggacaggctcctgccacctgtgggcactgggcgctctccccggaagcggaccaccagccagtgcaagtcagagcctcccctgctgcgtacaagcaagcgtaccatctacaccgccgggcggccg

SEQ ID NO: 111403 - DNA, 391 bp, Homo sapiens
agactgcgcctataggatggtggaccggctcgcggatggctgcctggacactgatgcccagaaccttctcagcagcctcaaaagtcacatcactgacatgcacccaggggtcctcaagacccaccgcctgccgtggagccgcgacttggtgaaccccaagaacaagactcacgcctgctacctgaaggagctgggtgagcagtttgtggtgagggccaatcaccaggtcctcacacgcctccgtgagctggatacggccggacaggagttggcgtggctctaccaagagatccgccaccacctttggcagagctcggaggtcattcagaccttctgcggacgccaggaactcctggcccggcttgggcagcagctcaggcacgaatggcga

SEQ ID NO: 111404 - DNA, 415 bp, Homo sapiens
caggcagtcggcacgagagaaggaggagcacactcaagaagagggcactgtgccaagcaggaccattgaagaggaaaaaggcaccatctttgcccgtcctgctgcaccacccatctggccctctgtgcccattagcaccccaagtggagaacctctggaggtgactgaagacagtgaggataggcctggcaaagagcccagtgcacctgagaagaaagaagatgcactgatgccccccaagcttcggttgaagcggcgctggaatgatgaccctgaagcccgagagctgagcaagagtggcaagtttctctggaatgggtcaggaccccagggcttggcaacagcagctgctgatgcttagaactggaagtggattaggagcgtgtattgcgggcgctctagaggatacaagcaa

SEQ ID NO: 111405 - DNA, 435 bp, Homo sapiens
gaccgactttttcaccttgttctttgctgtcacccctgtgagagtccatattttgattggcccacatggaagagtcacgggtgaagcacatgttgagtttgctactcattaagaagctgtggcagctatgtccaaagacaggaccaatatgcagcacagatgtatagagctcttcttgaattcaacaacaggggccagcaatggggcgtatagcagccaggtcatgcaaggcatgggggtgtctgctgcccaggccacttacagtggcctggagagccagtcagtgagtggctgttacggggccggctacagtgggcagaacagcatgggtggctatgactagttttgttaggaacatttgagttacaacaatcattttcgcaggcagacaatgtattcggccgctgtagaggatcctcgcctacgacggccaac

SEQ ID NO: 111406 - DNA, 409 bp, Homo sapiens
  misc_feature (1)...(409): n = a,t,c or g
gccccccagaaaaactctgggaaaacctggctccacctcccctcttgctttctgcctcagactgagtgcgacctcctcacctcatcccacggcctcggccacctgctctgttgggccctccaacccacaattctgactggagcagcccctcccctgagtacggggtccccttgccaggcccagtcaggaaagtggggaccccccttcactaagagcaatgctggcagatagtggccccctgtcctcctgccacagagtgcactgcccctgcatgcccgcgcacaccttcccacagtttttactgttgttctgaactgcttgtccttggcagcaaaattcagcataatgtgataatgccaagagttgtattcggccgctctagaggggcnagctacgtaagcggcgtgtc

SEQ ID NO: 111407 - DNA, 383 bp, Homo sapiens
  misc_feature (1)...(383): n = a,t,c or g
agatgactgccgttccggcatcgagattaagctaggttagccatccattatcaatcacatacggatactcttgtgggaccgagatagccggtcttactcatacttcattgaagtgtcaatggatgaacttgattgggtcagagtgatagatcattcacaatatctgtgtcgttcttggcagaaattatattttccagcccgtgtctgcaggtatattcgaattgttgggactcacaacacagtgagcaagatttttcacattgtggcttttgaatgtatgtaaacaaacaaaaccttcactcttgagaaggggctaaaagatcccatggagaatgttgcaacaatgtattcgnccgcgctngttattttacctaagttgccta

SEQ ID NO: 111408 - DNA, 565 bp, Homo sapiens
tgattaggagtctcgttctgtctcccaggctggagtgcagtggtgtgatctcggctcactgcaacctccacctcctgggttcaagcaattctgcctcagcctcccgagtagctgagattacaggcacctgccaccatgcccagctaatttttgtattttagtagagagaggatttcgccatgttggccaggctggtctcaaactcctaacctcaaatgatccacccacctcggcctcccaaagtgctgggattacaggtgtgaaccactgcactggcctcttgtctcttaatctaagaaatttgaggactctgaaatctcagaaagatgttttcaagttaaggaaataaaagcaccataaaccaatattaaatgacctatagtaatttagaaatataaaatttagtatttgtgatgcagaataatttccttctgaaactccaagatgtgtgagcattatcaaagccatttagaacagttaccctgctgtgggaaagcatttccagaacagccaagaaaattccccaggagaaatccatttgcaaaggaaagtcacaccctgtatt

SEQ ID NO: 111409 - DNA, 297 bp, Homo sapiens
gcggcaactgcaccctagctaatttttatattttttgggagagacggggttttgcccatgttgctcaggctgatctttaactcttgggctcaagcgatccacctgccttggcctcccaaagtgctgggattataggcgtgaaccaccacgccaacctcaaatggctttcctttaaaatttcttgagcctagtccgaagatagtgagttatctcagttgattgttcacagtcagttacagattgaactccttgttccactcttttccccattctcactactgcacttgactattcttt

SEQ ID NO: 111410 - DNA, 386 bp, Homo sapiens
aatacagtgcctctacggggagaaatttgatgtcgaggacttcaccctaaagcatacaggtcctgacatcttgtccatggcaaatgcaggacccgatacaaacggttcctaatttttcatctgcactgccaagacagcgtggttgaatgggaagcaggtggtctctggcaaggtgagagaaggcatgaatattgtgaagcccatggagcgctttcggtccaggaatggcaagaccagcaagaagatcaccattgctgactggacaactctaataagtttcacttacgctttatcttaaccactggaccattccttctgtagctcagagagagcaccctccaccccatttgctcacactatcctgtcatctttgtgttcttgctgcg

SEQ ID NO: 111411 - DNA, 2101 bp, Homo sapiens
ctgctgcgtaccttcccattggactggacattgatattgcccaggatggtctcgaactcctgcactcaagcgatcctcccacctcagcctcccaaagtgttaagattacaggcgttgagcacctgcacctggccaacgaggctttctgaggtctctcaaggccaagcaacggacagagaagcgcatcgaggccttgcatgccaagctggacactgttcaaggcatcctggaccggatctatgcctcccagacagatcagatggtttttaacgcctaccaggctggggtaggagcactcaaactctccatgaaggatgtcacagtggagaaggcagagagcctcgtggatcagatccaagagctctgttgacacccaggatgaagttttctcaagactctggctggtggggtaacaaatggcttagattttgacagtgaagaactggagaaggaattggacatcctccttcaggataccaccaaagaacctttggatctgcctgacaacccccgcaataggcattttaccaacagcgtgcctaaccctaggatctcagatgctgaacttgaagctgaacttgagaaactgtccttatccgagggaggtttggtcccaagcagtaaatctccaaaaaggcaattggaaccgactctaaagccattgtaggaccctcaagtgaaggaccctcatgtaaaagagagaccagggcttgctgggtgtgtacatagttatttaaacaagaaactcttcagaatgtgtttgggaaggagggagaaagggagaaccactggattttattctgggatgctactactttacttacagggacagataggatttcttgggaagcgatgctccaaaggcttgctcccagctgtatcatggacctgccttctcatctttatagtgccacgatttatacagtcctgtgtctgacctgtcatttcatagcctgcagttcttgccattggcacacttagatttgtctttcacccaccagcttcgttccagcccatggaaggggaaagatttgcagctttgccaaatctgaatcagttcccactccccccctgcggttttttagagggggtttatcctgttcggtaaatgttcagtttaaatagcttattcctgtcccacttgatttccctggggagaaatgggaatgaaatacttaaaggttttatttgaggggacttagctgccattttatggaaaaacatgtagtataaaaggtttttctccagggtcattttgacagaattctccagggtgtttcagagaaagaggtcgccccaagtgggcccagagttcgtgacagtccggaggggctggtgtggccggtgggcgctgcctcttcatctgatggagccaggaggtccgccggtgggggaaaggcttcttccgaggcttctgcactcgcctgggaagaggcccagtcactacaggacccttgagatgtccagaccccttatgcaaagaaggcaaaatttgtttgcctttggccccatcatggaagtaacttaaaaatacatatctaatcttccagaacaaagccacacaacaacacacctcccctcctttgagcctggcacacagcaccgggctctctgaatttggaaagtgtttcattttggtgggccaatgctccggggcaaggggggctgagccaggatgttgcaatagaagcagggggttgtcccctctgccagatctgtggggagctgcccaggccacccgtgcacctgtcctgcttcctgcagtccccactccctgcctcctttgagggactgggggacttggggtagggggacagacgggaaagggtctgaatgctctggcaatggcgagaagaagcgatcgccacactgccactctgctgcccagccaccaggatttctgcctggagccctttgccctgtccctgctgcctgaggtggcgtaaagcaaaggagaagaatttgctccaggccaggagcacaaatcgttgttcaatgaatttctctccaactcgaccttggtaaacggaaatgttgggggtgaagagaaacaatcactattttttttcttttttatctggtaaataattaaaagaaaaac

SEQ ID NO: 111412 - DNA, 403 bp, Homo sapiens
  misc_feature (1)...(403): n = a,t,c or g
gacaccttagacgtcccgaattnaagggtcgacccaagcctccggttacttattaacatcaaagctggaacctattttccttagtcctatctgatccatgagcacatgggtattactgatcgcattgaaaacattgatcacctgggtttctttatttatcgactgtgtcttgacaaggaatcttacaaactgccccgcagataaactattaaaggtattcataaacgtgaagccagcaattgtttcgcaattcggcattttgaaaacaaatttgccgtggaaactttaattcgttcttgaacagtcaagaaaaacattattgaggaaaattaatatcacagcataaccccaccctttacattatacgctgtgacccttttctaacggctcttttcactgaaga

SEQ ID NO: 111413 - DNA, 421 bp, Homo sapiens
tcgtaacacgcacgaattccatggtcgacccacgcccccgcggacgcgcgggcacatttctgatatacatcatttagttactgaaaaagctgcaatcacccacagtcatgaacccctacatgaagcttgctccaggagaacctactatcatcctctaattttttaaaacaaatcttcatttattcttcttttccaactgacactttttcatagcacagaaaaaatttaaactgcctatattgataaaaccatacagtgagccagccttgcagtaggctttagactataagcaaaagcgcatatgaactggacctgcaccaaagctggcaccagggctcggaaggtctctgaactcaaaaggatggcattttttgcacgttaaagaaaatcaggatctgagttattttgctaaacttggggg

SEQ ID NO: 111414 - DNA, 377 bp, Homo sapiens
ttccctttttcccttcaccctctccaagtccttagatacttctctttccaaaagtctcacccgcggaagaagtcacctccagttaaggcagtccccatccaaccccctggacccccagaaaggtgagtgtggggtggggtgcttacttattaagtgaaattccactttcaagagctgtacccccagtagctgtcctgtgcctgtcattactgtcaccagtgggattatacctccctcctccactgggggtctcctgtctttttctctcatcctacccgcttccctggtagaaactgagcattgggcttagttcccctcaaatcctgtttccccacctgcctagggattctgtgggccagctgcaactatatcgcctg

SEQ ID NO: 111415 - DNA, 419 bp, Homo sapiens
attgtggatgcacaccgacctaaattaaatgaatgggtggatgagatcgcctcttatggtgacttagagaatgctattgaaaaactttctggagaggaaataaatgggagaaaaattactttaattgaaggcagcataaggcacagtaggtcaagaagcaggtctcgatcccggaccagaagatcctctatgtctcgtagccgatcccgttcccgtagtcgcaaatcttacagccggtcatgaagcaggagcatgagccgcagccggagcaagtcccgttctgttagtaggactcccgtgcctgagaagagccagatacgcggatcttcatgtagatctaagtctccatcatctgtggatcgacagaggtcccggtcccgatcaatgtccagattagttgacagcgactaataaactgg

SEQ ID NO: 111416 - DNA, 436 bp, Homo sapiens
aaaccaccccacactgggaatagccaccttgcccttgtagaatccatccgcccatccgtccattcatccatcggtccgtccatccatgtccccagttgaccgcccggcaccactagctggctgggtgcacccaccatcaacctggttgacctgtcatggccgcctgtgccctgcctccacccccatcctacactcccccagggcgtgcggggctgtgcagactggggtgccaggcatctcctccccacccggggtgtccccacatgcagtactgtataccccccatccctccctcggtccactgaacttcagagcagttcccattcctgccccgcccatctttttgtgtctcgctgtgataaatcaataaatattgtattttttgtcctggatatttggggaatacatttcgtttggtgaaattctgctctagaga

SEQ ID NO: 111417 - DNA, 377 bp, Homo sapiens
tagggatttgaagggtcgtttgaggaactgtgctgaaatatggatgccaaaaaagctatcctcgaagatatggtgagacttgggaaggattctggtctgaaaccatttgaacagggcaaaggcatcacattgcaccctgaattattttctatcgacaatggccttctgactccaacaatgaaggcgaacaggccaaagctgcggaactatttcaggtcgcagatatatgacctctattccactatcaaggtttagtgcgaagaacaaagctcagaggaaatggcacagttccacactctcttctcctgctgatggccttcatgttgttaattttgaatacagcaagtgtaaggaaggaagccgtcgtgtttgacttg

SEQ ID NO: 111418 - DNA, 434 bp, Homo sapiens
actacgctagtgcacgtgcggtgtaattctacaatcttctgcagtgcgtagaaaagcagcaaggactagattgcctaagggataatatttaatttactttgggagagaaaaatctgatcaagagactggacgtgtacttctgtttctcagtttatctggatgctatcagatcacagaccatggtctcaaggtttagactctgggaggagggctgccttatttggagcaccttaatctctctggttgtcttactataactggtgcaggcctgcaggatttggtttcagcatgtccttctctgaatgatgaatacttttactactgtgacaacattaacggtcctcatgctgataccgccagtggatgccagaatttgcagtgtgtgtgtcgagcctgctgccgctctggcgaaagacccttgacttctgatcttt

SEQ ID NO: 111419 - DNA, 446 bp, Homo sapiens
tactagtgaactgcggaggaattctctccagccaccccagccagtggaaccaaggttatcccatcatcaggtagcaagttgatacgaccaacaccaacttttcattctagtcggacatcccttgctggtgataccagcaataattcttccccggactccacaggtgccaaaactaatcgggcagaccctaaaaagtctgccagtcgccctgggagacgggctgggagtcgagccacgagtcgagccagcagccggcgaggaagtgacgcttctgactttgacctcttatagacgcagtctgcttgttccgacacttcagaaagcagcgctgcagggggccaaggctactccaggagagggctaaacaaacctttcgaaatcccaaccatgtctaagaagaccaccactggctcccccaggacttcaggtcccaagcgaaaacactg

SEQ ID NO: 111420 - DNA, 404 bp, Homo sapiens
  misc_feature (1)...(404): n = a,t,c or g
cagacagtctnggggaattcggcaccctgaagaaggcgcgctacaatgctcagtgccaggagattatccgcgtttccaagccctgcacccccaagaccaaagcataggccatagccaagaaagggaagggaaaggactagacgccaagcctggatgccaaggagcccctggtgacacatggggcctggcccacgcccttcctctcccaggcccgagatgtgacccaccagtgccttctgtctggtcgttagctttaatcaatcatgccctgccttgtccctctcactccccagccccacccctaagtgcccaaagtggggagggacaagggattctgggaagcttgagcctcccccaaagcaatgtggagtcccagagcccgcttttgttcttccccaacaatt

SEQ ID NO: 111421 - DNA, 400 bp, Homo sapiens
acatacgtcagtctaggcgaattccgatggcggctgggccgagtgggtgtctggtgccggcgtttgggctacggttgttgctggcgactgtgcttcaagcgtctgatgctgttggggcagagttttcatcggaggcatgcagagagttaggcttttctagcaacttgctttgcagctcttgtgatcttgtcggacagttcaacctgcttcagctggatcctgattgcagaggatgctgtcaggaggaagcacactttgaaaccaaaaagctgtatgccggagctattcttgaaggttgtggatgaaaactgggaaggttccctcaagtccaagcttttgttaagagtgataaaccctaactgttcagaggactgctgatcaagtatggccgtggctcaca

SEQ ID NO: 111422 - DNA, 449 bp, Homo sapiens
aacccaatccccctgacaaaccgcacgtagccgcctcttcagcttcagctgcggcagccttcccgcagctgtccggagaccacacagggccctgcaatcagctccgaggcagaactgcccgtgcgctcacctcccccaccgtttcgcctcttccccacccctgagctgggctaagcagacagtggcatagaggtggaagggacttcaaggacacctttttcagggcggagggcaaagggggagagttaaggaagggaagacggaggcccttgctccccgtcagaagaacccgtatccttccccatactcacgcctggagtcagggccagtgcactggggtgaacaggggccaaacaggaaatcgtggccgcctccaaatctacctgatcagggtttttgcaggagagggaggatgttttgccagtcacgtcggccagtgttccgtatca

SEQ ID NO: 111423 - DNA, 410 bp, Homo sapiens
cttcagctccactttgaggtaaaatgccaccacatctcgccatgggttgtccccccagactaaatccctgggaacagcctgagctgggtgcacgcggccgaggcgacggctgcccttgccctgcggagcacgggtgggcattggatgtaaggtattcctaacttccccttccccagtccttggcgtcctctctagccatcccaccccaggtcttctgcagcttcaccctgtcctccaagtcccctcgcccagctgcgaggcaggagaccccggccggagctccgccagcaggtccttctttcgcagggcgcagacgcacgattccgggatcgggtgcaccacggcgaagcccaggcgggagacggcaggagcagctcaggtaaccaggggaagcttgcgtgcccacggcc

SEQ ID NO: 111424 - DNA, 432 bp, Homo sapiens
aggaccatcttacgccatgctgggcacgaggcgaatttgggtacatgtacccgaatgtggtgacctggtgttattatgacagtgtggctcaccccaggaagccgggggagaagccgctgtcactgatgctgtggttgcctttggaggttgccctcacttccaggccagctgaccttgcctcccctgcttcagagaagtgcctgcaatcctgatggggaatgtaggcatctgcaccctcgaagtccagctctgacctcagtcccttctgacacgggacagactacgcccaagcaaggtttgatgcctatttccaccacaagaggaagcttggggtgggactgtggggaggactccatccacctcatcactggactgcatggggaggcagcaaaacgggggcccctctgtgctttcactactgctcctggggcg

SEQ ID NO: 111425 - DNA, 426 bp, Homo sapiens
gttagcctcatcacctgactatcgccattcttggcccgaggggctcagctgtggtcccacccaggaagggagggagctgatgccttccttgagtaggccctgctttatcaggggacaaaccaggggtaccaggcacatggctgggggagggactgctgacccaccaaggtctcacactcctcctgccagctctgtcaccctggccaccacccaacctgtccttactcagagctgcgggctgagggcatctctgagtgtctctgcctggagcaggggtggtttctacggtgacagtgacgtgactcaaagcttttcgaactgtgctcccacggggaccactgggcccctcaggggaagctgctaggggaaggactggccgtggctccagaatgtgctgcctttttaagttttgtttgttcacactcc

SEQ ID NO: 111426 - DNA, 463 bp, Homo sapiens
ctgagactgggtctcactctgtcactcaggctggagtgcagcaacagtcatggctcactgcaggcttgacttcccaggcccaagcagtcctcccacttcagcctcacaaagtgcggggattacagatgtcagccaccacacccagcctattcttgattttcatataatcaggcttaagacagattaaaccttccttcctatacttcctttctaaaaaataagaaaaccactagaactaaaattctggacagaaaatccagacacctcaccaatgatgatataaggatggcagattaagtatatgaaaaggtgctccacatcactatgggattgggaattaaaacgatgagaccactattcacccattagctaaaatgcaagagtgacatcaccaaatactaatgagggtgaggagctacaggaactcttattcattgtcaatgggaattcaaaatagtcatgt

SEQ ID NO: 111427 - DNA, 486 bp, Homo sapiens
cccacagatgggagcgagcctgagggagtacatcaacccccttcccaggcttctggatggccaggagtcggcttacctgggcggggggctcagacctccctgaggattcaaagtccagggagtcctgagaaaggcccggtaaggcggccagggggctgtccccaactgccatctccactcctgagtcccgggaggccagtttgagaaagagtgcctccctgccgacacctgtgaacttgtcacctctctcccaggatgagcatccgtgggcagcgtcggggatccgtctgtaggtgctggtgactccaggcactatgcagccccgtgccaggccctcgccagccccatctgctttgtgggggcccctgcggcatcaggatgccaggtgaagtctctcctgcagctcaccgggagagagataaaaatctccgcaataaccgatttgggctgttgttgtcacagtccctccggccacgtaatccgtaa

SEQ ID NO: 111428 - DNA, 432 bp, Homo sapiens
aagttatcgagcatgattacgccttgcttggccggacggactgacagaacacagttgagaaagatggtttgtcaacagtgaccctggttggaatcatagttggggtcttactagccatcggcttcattggtggaatcatcgctgtggttatgcgaaaaatgtcgggaaggtactcgccctaaagagctgaagggttacgccctgctgccaacgtgcttaaaaaaagaccgtttctgactctgtgccctgtccctgagctcgagggagaagatgacccgtggaacacttgcctggcccactcagaatccacggtgacctctccgcttgccaaaataaccgaaggaaagaccgttcaccagacttggctcctctaaacatttgctgatcaaacatgtttttgaatatacattctataaaagattatttgaaaga

SEQ ID NO: 111429 - DNA, 430 bp, Homo sapiens
cttgacctgatacgcctgcttggccgagggactgacaagcgatccaagttcaagaagctgatgaagcagggtgtggcggctctggagggtagtgcgttggccaacgggcgggccctgtctgctggctccccacccgtgccgcccggctggaaccctaactcttcatccgggaagggctcatgaggaaacgcgggctcctatatccccagctacacatcggggtacccttcagcgcaccaagaagctatgcagcaaccccaacttatgtgaggctgcccgcccgtctgcttcttgcctccccggcccaggtccctcccgcctccaggtccatccatcccgtccggaaaagaaggacccaaagggaagatggaacagtggaggcgggacgccctccatctcctcggagccccgcgaggtccggcccagcaac

SEQ ID NO: 111430 - DNA, 830 bp, Homo sapiens
ttacaggtgcgcaccactatgcccagctaatttttgtatttttagtagagatgggtctaaccatattgcctaggctggtctcgaactcctgagctcaagcgatcctcttgcctcaacctcccaaagtgctggggattacagctgttgagccaccgcacccggccgcattcttctaaaatcacagtacatctggttcccagtgcccaggctctcagggcagagggtccagtgtgatcactttgcatggccctctctcccctcctgaagcttgtgcccagggcccccagggctgacctggagaaggaaaatggcagagggtgaagatggggtgtctggtttggggaccatccctggccccccttgtcactgttggcatctcttctgcacagtggcattgctgggaggtgcttaactgtgcctattcaaggggctggcagccgcagcctcactgcagatcagggacttggcttcccggttgaccacaggtccaagaacctgcagggtccagcctccccccccatccccagtcttccccaccctggcccggccctccaggtgcagaaacatgcaggcccctctccaggactgtgggaggagtgtgtccctcagactggcctgtgtcctggctcctcttaccacctcttccagaggttgtcaactggcagctgccccaggataaaggcaaggccagagaggactcctgaactcctgtgtgcctggggtggcaggggcaaacatagccaactggtggcctgagcggggccatggtgaggacacccttggtggctttgtcccacatcaagctggggaggtgacacttaggatgcatt

SEQ ID NO: 111431 - DNA, 1797 bp, Homo sapiens
cggtgggcccttcccttgcaacgaggtcccttaggaggtagggcacggtgacgtgcgccagtaattcgagtcgctcaggaggttaaagcaggaagatcccatgaatccaggcgggtaagctccgcccgggcatttagtgggcatttggcttagggaaaaaacaaaagtgtatttggctgttctgaagcaggccatcatcacccttcacctcacccacaggtggctctcgggggctggtccatgggcggctgtggcgtcaggatggagtcctagctgtgacctgtgcccaggagggcgtgatccgagtgaagccccaggtctcagagagcaagctgtagccagaggtaccagcttcgcctggggcttcaagaacctcccatctatccccattcctgagacaggagttacagtcccttttggccctcacatccaataaagagactgataccactggagtggctggcttttaattcccctgggccagacctgcagccttgccttcatcccttaactccaggactccaggggcagagtccctggccttcagccaagaggccttgccagcttgggggcccaccaacaagggaacattgccccaacctgtgccacagccccccggctgtttataggctggagaggctgtgtcagacttccctgtactacacaagggcaaccccagccaaagctcaccctgagcctagctcaacagaagtttccttgatctgcttcacattctcttttggaacttctaggggctcccagcaccctctgcagcctcccagctattctgttctcatcaggtccttcccctgccttctggggcaacccctctcctcacagtggccttaaatctaggcaagggttagtccagcacctccttgatgagcaattctttgagactggggggtggtgtgggggtaaggcctgcctcctgcagggcttggagccgagcctctgattgacgtttgtccaggcccaggcgccaggagagccggacatgggcctccagaaagggtgccagcaaagggtggaggctcttgtccccaagcagctgcagggccttctcacagcatgcccgggcctctccagggtcttccagctcctggtggcacacggccagcccagccagggtcagcagggggcggtctgggccagagggggtgcccagctgggcttgcagctgccaggcattggcccagagtgccagagcctcacgatagaggccagtacaggtgaggctctgtgcccgccgcagctccggcagcacgaagaagtcctgcaggtccggggcatggcgcagctcaggcactgcctgcaggtgacccaaaaactgctcaaaggcccggctacggcgggcaatggtctctgcagtaaaattccggcgcagccgcttacgggggaaggagatggcagccattgggccccggaattgccgctgcaggtttcggtgcagccgctcaaagtccgagtaacggcgagagatctgggctggctggcaatctggcggtcctgggccgatcacggtgagggtgtagagctgcagggagggtgggtgtcagggcaaatgcaagttgtccacgggcccgttccctccccatccttccccatcccccacactcccagctgtacctccccacctcttcctttcacccctgggacagcacccaggagggcgggagctgctgcgcagtggcggggaagcccagtcccatcttacctgaggtttgtctgaaatgacccaggcccaaggcagcaagaagagagcctcgtgccaagattgcgaatgatgtgcaagca

SEQ ID NO: 111432 - DNA, 433 bp, Homo sapiens
ggctgatgcttatgactgttatgaactgcctcttcgactcattgagccatatgctgaggaaaaacgtagaaaaccgagcactgctggagaacatggaggggctgtccttggctgcggatgaaattgtatatggaggggggaccctagatagcgatccccaccaagcggtacaccgcgtggcgttaacgggtgaaaatgtcccccttaccgagcagaccgtgtctgaggtgctgcagtcagccgaagaacagatcacgtgggcactccttctgagaagacctaactgttgctggatgttgatcctcttcaaaaaattcgcatgtgtgctgtgaattttcatgtagttccccaatcgatgctctcagggtcatctcgtggatcacagggatccttaaatctccattctgtttgtggatgccacctcaacctggcc

SEQ ID NO: 111433 - DNA, 445 bp, Homo sapiens
tgattaccccaagcttggcacgaggctgtctgtgaggaatcttctgccagaccaggaggtgaaagtcttcaggatcagactctctgaaaactgcaaatggaaaggaattcaaaagaatttagattaaaagttaaataaaaagtaggcacagtagtgctgaattttcctcaaaggctctcttttgataaggctgaaccaaatataatcccaagtatcctctctccttccttgttggagatgtcttacctctcagctccccaaaatgcacttgcctataagaaacacaattgctggttcatatgaaacttaggaaatagtgaataaggtgcatttaactttggagaaatacttttatggctttggtggagatttctcaatactgcaaaagttgtccagaaatgaatctgagctgatggtgactttaagttaatattattaatatatc

SEQ ID NO: 111434 - DNA, 1727 bp, Homo sapiens
atagaacatttgaaatccgtacgaacgtaccgatccggaattccagggtcgacgcacgcgtccgctctcagggagcgtcagagagaggaactcagtaaggttacttccaacttgggaaagatgatcttgaaagaagagatggaaaagtcattgccgatccgaaggaaaacccgctctctgcctgaccggacacccttccatacctccttgcaccagggaacgtctaaatcttcctctctccccgcctatggcaggaccaccctgagccggctacagtccacagagttcagcccatcagggagtgagactggaagcccaggcctgcagatctatccctatgaaatgctagtggtgaccaacaaggggcgaaccaagctgccaccgggggtggatcggatgcggcttgagaggcatctgtctgccgaggacttctcaagggtatttgccatgtcccctgaagagtttggcaagctggctctgtggaagcggaatgagctcaagaagaaggcctctctcttctgatggcccccacctgctccgggacggcccccttacccctgctgcttcagggtttttccccggcgggttgggaggggcaggaggtggggtggaaatagggtgggctcctttcctcaggtagagtggggggccaaaacctctgcagtccccggcagtgagctatggactttcttccccctcacaaggctgggggcctcctgctctcgtccctggccctccctgcacagggcaaagccagtctgggctctggcacacagagttcatgtttgcgccctctccctgcccctcaccccagagggtgaggaggaatgaggggcattggtggttaggccggttggctgtcttgaacagctggagggaagatgcaggggtgggaagcggccaggcagaaagagctccaggctcttgtgtcgcccacccagccctcccatactcactcctgacagctttcctgcactgcagcttcctgctcctctgactctagtgggaacaggccccagctcagcctccggcagggaggtcacccctccacttcagcttgccctgacctccgctcgcaaaccccgagcttccaagccttttgctccagccctgcggcttccccagaagcctgggcttagggtggagatgccgcctacacacgatcctggccctccacctgcctccaggccacgaaatgggaattccagcactaagccaggcaccgggcagaagctgggccttccgcctcccttggatggggtcaagaggccaggcctggcacattttggagtgtcctggctaccagctctcacctacacccacgcacccccccacacactatgctctctcaagaatgtaatttattggggcccccccagctgctttcctcacctgcccctgccctaccttacacccccagcttgacttctttccagtccacgtgtgtatataatgatatctatatttttgcccaggtctgggtattgctcctgcccagaccctgacatccctttccactgtgtgtgtgaccatgctgggggagggggactctgcttggaattaaaaggttgcattgggtccctattaacaaactaaaaaaaaagaaaaaatgggggggcgccctctttaagaattcccgcgggggttccgaatatggcgatgttagaagatttagtcttttttctttatgtaagggcttattattctatcccttgggacttttgaaa

SEQ ID NO: 111435 - DNA, 727 bp, Homo sapiens
agcgacgaggctgtatttcagagacttacccatccctgtcatcacatatgatacctattccaaatttatagatgcagcaaaaatctccaatgcagatgagaggctggaagccgcccatgaagtgctgatgctgctgcctcctgcccactatgaaaccctccggtacctaatgatccacctcaaaaaggttactatgaatgaaaaagacaatttcatgaatgcagaaaatctggggatcgtgtttgggcccactctgatgaggccccctgaggacagcaccctgaccaccctgcatgatatgcggtaccaaaagctgattgtgcagattttaatagaaaacgaagacgttttattctaatccatcagggaaatgagctgaatggccccagcaccatccaagttgacacagctaaaggaataaaaacatttcttaccacttgatttgttttccaagcaagtgctagaatttgctggactgcagaggatcgctgagtggggtactgtgtctcatagacatgcgccacctccacgtgagaacaagggtgaaggtgagggaagcccctcaccttgggtcttttgctgtgcctcctatgtatgtctggtttgctggaagagtgattaatacatctttaatttattaaaaaacaatgtagacctttaaacttcagtcttattggtaataaaagggaacttaattcatacaggtacttgatacagttatacattt

SEQ ID NO: 111436 - DNA, 433 bp, Homo sapiens
  misc_feature (1)...(433): n = a,t,c or g
ggattctactgggaggagggatgctgatggcaccagagggtgggaagcagggatctgacgcttagcaccgcaggtgccaaggacggcctcctccccacaagggctccgggaggccacaccagagggtgggaggcaggggtgacgctcagcactgcaggcaccgaggacagcctcctcccaggaggaaaaaacaaagacgggaaaaaacaaaggctccccacaagggctccagggggccacaccagagggtgggaggcaggggtgacactcagcaccgcaggcaccgaggacagcctcccacaaaggctcctctgggccagagcctccgtagtgccaaggggaaaagcccggacacaaaggatccagtgttttcaacgttgctcagggtatctccacacagaaactcccctcgtgccaagnngggggtagccga

SEQ ID NO: 111437 - DNA, 634 bp, Homo sapiens
atttgattcagcaaatgggatcaatatttcacctgatgataagtatatctatgttgctgacatattggctcatgaaattcatgttttggaaaaacacactaatatgaatttaactcagttgaaggtacttgagctggatacactggtggataatttatctattgatccttcctcgggggacatctgggtaggctgtcatcctaatggccagaagctcttcgtgtatgacccgaacaatcctccctcgtcagaggttctccgcatccagaacattctatctgagaagcctacagtgactacagtttatgccaacaatgggtctgttctccaaggaagttctgtagcctcagtgtatgatgggaagctgctcataggcactttataccacagagccttgtattgtgaactttaaattgtacttttggcatgaaagtgcgataacttaacaattaattttctatgaattgctaattttgagggaatttaaccagcaacattgacccagaaatgtatggcatccgcagttagttttgttgcagtaaggaacggacataaaagttgttagagcggtttacacaaaagaaaatagcatcgtcggccaagctggcgtgtgtggttcacgatctagtccccg

SEQ ID NO: 111438 - DNA, 767 bp, Homo sapiens
gggggtttttttgttgttgttgtttttgagacagagtctcaccctgtcgcccaggctggagtgcaatggcgcctttctttctttctttttttttcagacggagtctcgctctgttgcccaggctggagcgcagtggcgtgatctcggctcactgcaacctccgcctcccgggattaagaaattctcctgcctcagcctgctgagtggctgggattgcgggcacatgccaccatgcctggctaatttttgtatttttagtacaggcggggtttcaccgtgctggccaggctggtctcaaactcctgaccttttgatccgccctccttggcctcccagagtgttgggattacaggcgtaagccactgcatcagctgttttgctacttctgatacttagtttcattttcatttattgtttgaaatgttcatcattgcattcagaaaaatgttgatgattatacaacaaacatgttgatgattacataagaacataggcaccctaactttttaactacactgttccttgtaaaccaaagttcatcctataaatctcagatactgactatagatccaaattaaattttaaaaataaataagagttaatcatctaccactggtgttcccttttgaaaagaaaaacaactgaaggcaaagtttataggctcttccagaacagagaaacagatttctagagaaggcaatggctttgagatacatacacttattaaaaagaaaggaaggccgggcacagtggctcatgcctgtaat

SEQ ID NO: 111439 - DNA, 449 bp, Homo sapiens
  misc_feature (1)...(449): n = a,t,c or g
tgtaggaccccncccttattgccgggtccacccacgcgtccgatctgcgtcagcagcgagcaggtgttgaaattcttgaaacttaacttcaatggggagggtgaacccgaagaactgatggtggacaactggcgcccagctcaaccactgaagaacaggcaaatcaaagcttccttcaaataagatggtcccatagtctgtatccaaataatgaatcttcgggtgtttccctttagctaagcacagatctaccttggtgatttggaccctggttgctttgtgtctagttttctagacccttcatctcttacttgatagacttactaataaaatgtgaagactagaccaattgtcatgcttgacacaactgctgtggctggttggggctttgnttatggtantagtttttctgtaacacaaaatatangataanaaataagaaatacggg

SEQ ID NO: 111440 - DNA, 372 bp, Homo sapiens
aatacagacagggtctccctatgttgttcaagctggtcttgaactcctagactcaagtgatcctcctgcattagcctcccaaagtgctgacattacaggcatgagtgaccgtgcccagccccaaactttcttatgagcaccactgtcaaaaagtcaagagttaggcctcagtttaggaaacacagacagtctttagaagcaaagttaccagacaaggttgtggtctgctttccagaccatcccatttgctgctgcatagtgtgatggttaggtccccattacaatgaatccagaagcttctttaattttttctcacctatccattatctatgatacaaacaagatgggcccacgcgtccgcccacgcgtccg

SEQ ID NO: 111441 - DNA, 1062 bp, Homo sapiens
atcctaatcatattaatattaattaagctagtctgtttacatgcactgtcactcatttattcattaggaatccttctgagctaggcatttatcatcattctacagatgacaaaatggaggttaaaagaggttgaataagctgctcatatagaggtcatatagcttttgagtggcgcagccttgacccaaattcaggtctgcctgacttgaatgctcatctctttactactaagttatatttccttaaaatcgaatataaaaatgccaagtccatgggtagagaagaggactattcaatagtctttattcttctgtcacgtgtttcaccctagggttctcatttttatcctacttttgcacccttcatgtaaaacagtccttaatgaaacaaagggtttgcggagaagtactcagaatgggaaacgttggtgtccttggggttgttagcagagccagcagtgatcctgtgaggtcagtcccagccctggaaacacaggtgtctccctgggctgagggtagtccccggctctgacggtccgatgtctttcctcaggtggagcagctcctgtacgaaagccctgagcggtactcccgctcagtgcttctcatcacccagcacctcagcctggtggagcaggctgaccacatcctctttctggaaggaggcgctatccgggaggggggaacccaccagcagctcatggagaaaaaggggtgctactgggccatggtgcaggctcctgcagatgctccagaatgaaagccttctcagacctgcgcactccatccccctcccttttcttctctctgtggtggagaaccacagctgcagagtaggcagctgcctccaggatgagttacttgaaatttgccttgagtgtgttacctcctttccaagctcctcgtgataatgcagacttcctcttactgtaacccatcgccaagtgggcttttgaaggcgcctgttcctttctcgctttcttcggaagacccttgacccatcattcccccgacccccataacgggagagcagagaagccggtccccagtgtgatggtcctg

SEQ ID NO: 111442 - DNA, 447 bp, Homo sapiens
gttttttttgagacagagattcactcttgtcacccaggctggagtgcaatggcacaatctccactcactgcaacctccacctccggggttcaggcaattctcctgcctcagcctcccaagtagctgggattacaggtgcccgccgccacacccggctaatttttttgtatttttaatagagatgggctttcaccatgttggccaggctgatcttgatctcctaacctcaggtgatccacctgccttggcctcccaaagtgctagaattacaggcatgagccactgtgcctggcccatagtgactattttttacaacttgaactcttattgttggtaagagtccagtgactctagaacatagtctttggatcatatttcaaattcctcacacatgtaactttctagccagacaatgggcccctgccctttacccacccgtcaaggtgt

SEQ ID NO: 111443 - DNA, 400 bp, Homo sapiens
  misc_feature (1)...(400): n = a,t,c or g
gagttgggcccaatttgtcccccccccaaaaaaaggttccctcccaaaaatcccccgcggggtttttttttgccccccctaaaggaaaaaaattttttttccccacccccggttaatttgggcccccccaaggatttttttaaagggcccccccccnnnnnnnnnnnnnnnnnnnnnnnnnnnnnnnnccctatgaaaatagccccactcaggcaagggtttttttccccaaaaaaaatgcagtcccttttttagttcccttnnnnnnnnnnnnnctcagatttactccagagcctatgcacttagtcactaatctatactgcatccccaacctattttttccatttggttcaattttatacatttaaaactaactgctttggtcaaatacgtaccatct

SEQ ID NO: 111444 - DNA, 380 bp, Homo sapiens
tcgcggacgcgtgggctgggacatttagcacactgtgtctgctggcatatttttctaggtacatttagggaccttaagggtgtaacggagatttttcttccctttttgtagggttactattgaacatgctaaggctcggtcacgagggggaagaggcagaggacgatactctgaccgttttagtagtcgcagacctcgaaatgataaacggtatgtgaagggtggatggctgcattgaacaattattgtaggggtagcatttaagattcaggaggcattagcagcgatgattttgggtcctgccgtataatctgatcttctattcccacgttagccaattgttcttgatgaatctatatgaagcatagaaccacaatctt

SEQ ID NO: 111445 - DNA, 630 bp, Homo sapiens
atccgctctccagaaccacagcacaccccaaaaagaaaactctacacacgtctcccacactctctagacgcggcccacacatctttttacaacagcgcacaacgctctctagaagctacagtgtcctcctgcccctcatcttcaccatattgctgctgcttttggtggccgcctcactcttggcttggaggatgatgaattaccaccaaaaagcagccgggatgtccccaaagcaggtactgcagcccttggagggcgacctttgttatgcaaacctgaccttgcagttggccggaacctccccgcaaaaggctaccacaaagctttcttttgcccaggttgaccaggtggaagtggaatatgtcaccatggtttctttgccgaaggaggacatttcttatgcatttttgaccttgggtgctgaggatcaggaaccgacctactgcaacatgggccacctaagaagccacttccccggcaggggccctgaggagcccacggaatacagcaccttcagcaggccttagcctgcactccaggctcctttttggaccccaggctgtgagcacactcttgcctaatcgaccgtttgccccttgttcccttaataaggaccaacccggggactgg

SEQ ID NO: 111446 - DNA, 762 bp, Homo sapiens
ttgttaacctcgtatacagcgccgaattctggtcgaccccgcgtccgctccctctctcatggttcttgacctagaaccaaggcatgaagaactcacagacactggagggtggagggtgggagagaccagagctacctgtgcacaggtacccacctgtccttcctccgtgccaacagtgtcctaccagcaaggggtcctgtctgccaccatcctctatgagatcctgctagggaaggccaccctgtatgctgtgctggtcagcgcccttgtgttgatggccatggtaagcaggagggcaggatggggccagcaggctggaggtgacacactgacaccaagcacccagaagtatagagtccctgccaggattggagctgggcagtagggagggaagagatttcattcaggtgcctcagaagataacttgcacctctgtaggatcacagtggaagggtcatgctgggaaggagaagctggagtcaccagaaaacccaatggatgttgtgatgagccttactatttgtgtggtcaatgggccctactactttctctcaatcctcacaactcctggctcttaataacccccaaaactttctcttctgcaggtcaagagaaaggatttctgaaggcagccctggaagtggagttaggagcttgtaccccgtcatggtttcaatacacattcttcttgtgccagcgcttctgaagagaagctctcacctctctgcatcccaatagatatccccctgtattgcgtcgtaa

SEQ ID NO: 111447 - DNA, 998 bp, Homo sapiens
aatttacagccttttcctggtacctgggaagaatatctggagaaattcttaactggaaaagtggcctatgggtcctggtttactcatgttaaaaactggtggaagaaaaaggaagaacacccaatactttttttgtactatgaagatatgaaagagaatccaaaggaggaaatcaagaagatcattagatttctagagaagaacctgaatgatgagatcttggataggatcatccatcacacctcatttgaagtgatgaaggacaatcctttggtaaattatacacatctaccaactacagggatggatcatagcaaatccccttttatgcgtaaagggacggctggtgactggaagaattacttcaccgtggcccaaaatgagaaatttgatgctatttatgagacagaaatgtccaaaactgcacttcaattccgcacagagatttaaaggggctaaatcacacatctgaagaaataagagattgtctgtagttgattgaaacgagggcagttatgaattgatttgggcaatcaaatgaatttataaaggagaataatatgcttttaatatgttgattcttttcaatggtattaatcagatcccagttttgttcctttgattctgagtttccaaattctctaaggctaatgttcattgttaactttttgtaacaaaggaacaatgtaaccacaggctcttcctgcctttttctacactagtactgataagaaagaagggatttattttacttaatctcccatatattatgatttagaattaagttcccctccctagtaccatggtccaagaaatgctgttttcataatgagactatatttcctaactctgccccaatttccctttgccgaaaatttgacccaggacactgtgttccactgctgtctaccgagtttcaagttgttctctgagtcatagctcatcttcctgcagtgcctctatttggataacaaagttcatgtccccgatcatgtaat

SEQ ID NO: 111448 - DNA, 413 bp, Homo sapiens
  misc_feature (1)...(413): n = a,t,c or g
tacagcgcccacgcattccaccaacctcatgtcagctccccgcgcttccagccctgagcttccgatgcggggagagcagagcctcgggaggggcacacagactgtggcagagctgcgcccatcccgcagaggcccctgtccacctggagacccggagacagaggcctggacaaggagtgaacacgggaactgtcacgactggaagggcgtgaggcctcccaacagtgccgcagcgtttcgaggggcgtgtgctggaccccaccactgtgggttgcaggcccaatgcagaagagtattaagaaagatgctcaagtcccatggcacagagcaaggcgggcagggaacggttatttttctaaataaatgctttaaangnnnnnnnnnntnaaaaaaacatntgcggggccgccccn

SEQ ID NO: 111449 - DNA, 411 bp, Homo sapiens
  misc_feature (1)...(411): n = a,t,c or g
tacagcgcccacgcattccaccaacctcatgttttctccccgcgcttccagccctgagcttccgatgcggggagagcagagcctcgggaggggcacacagactgtggcagagctgcgcccatcccgcagaggcccctgtccacctggagacccggagacagaggcctggacaaggagtgaacacgggaactgtcacgactggaagggcgtgaggcctcccagcagtgccgcagcgtttcgaggggcgtgtgctggaccccaccactgtgggttgcaggcccaatgcagaagagtattaagaaagatgctcaagtcccatggcacagagcaaggcgggcagggaacggttatttttctaaataaatgctttaanngnnnnnnnnnncataaaacatccttgggggggcggcc

SEQ ID NO: 111450 - DNA, 810 bp, Homo sapiens
  misc_feature (1)...(810): n = a,t,c or g
ctgccccccaggtgttgagtaccagctctccagcccaacaggcagaaaatgaagccaaagccagctcttccatcttaatcaacgaatcagagcctaccacaaacatccaaattcggcttgcagacggcgggaggctggtgcagaaatttaaccacagccacaggatcagcgacatccgactcttcatcgtggatgcccggccagccatggctgccaccagctttatcctcatgactactttcccgaacaaagagctggctgatgagagccagaccctgaaggaagccaacctgctcaatgctgtcatcgtgcagcggttaacataaccgcccagccagctgcctggcctccctcctgtgtttcccatggccagtggccatgccccatggggatcgcccctcctgcccccttgtgcatacccagcagtccagtgcaacgtctcctccatagctctgggttcttagatcttggttggacgtttgttttctccttagttgcatttcctgggtttttgtgatgatcaatggactttaatgnnnnnnnnnntaaaaacaaccaaaaaaattgaaggaatatcaccagcatgttgtacggaaactctcccactgaagcaggctttaattgctttaaaattatatttatcttggggcctgtgggaggaaacttccttccatcttctctgcataaaaacttgtggcacacaatgcttattcactagtgtgtcccacccgccagccccacagatgactggaggaaggaggggaaatgtgtagaaagaggcttcgccaccacttgttcccacaatgtatt

SEQ ID NO: 111451 - DNA, 439 bp, Homo sapiens
  misc_feature (1)...(439): n = a,t,c or g
cattacccgtccggaattnccgggnnaaccacgcggccggacccagaggttctttgagttctttggggatctttccactcctgatgctgttaggggcaaccctagggggaaggctcatggcaagaaagtgctcggtgcctttaaagatggcctggctcacctggacaacctcaagggcacctttgccacactgagtgagctgcactgtgacaagctgcacgtggatcctgagaacttcaggctcctgggcaacgtgctgggctgtgtgctggcccatcactttggcaaagaattcaccccaccagtgcaggctgcctatcagaaaggggtggctggtgtggctaatgccctggcccacaaatatcactaagctcgctttcttgctgtccaatttatattaaagggtcctttgttccctaagacccactactaaactggg

SEQ ID NO: 111452 - DNA, 1110 bp, Homo sapiens
acagtgcggtggaattccgacggcaaggattacatcgccctgaacgaggacctgcgctcctggaccgccgcggacaccgcggctcagatcacccagcgcaagtgggaggcggcccgtgaggcggagcagtggagagcctacctggagggcacgtgcgtggagtggctccgcagatacctggagaacgggaaggagacgctgcagcgcgcggaacacccaaagacacacgtgacccaccatcccgtctctgaccatgaggccaccctgaggtgctgggccctgggcttctaccctgcggagatcacactgacctggcagcgggatggggaggaccagacccaggacaccgagcttgtggagaccaggccagcaggagatggaaccttccagaagtgggcagctgtggtggtgccttctggacaagagcagagatacacgtgccatgtgcagcacgaggggctgccagagcccctcaccctgagatgggagccatcttcccagcccaccatccccatcgtgggcatcgttgctggcctggctgtcctggctgtcctagctgtcctaggagctgtgatggctgttgtgatgtgtaggaggaagagctcaggtggaaaaggagggagctgctctcaggctgcgtgcagcaacagtgcccagggctctgatgagtctctcatcacttgtaaagcctgagacagctgcctgtgtgggactgagatgcaggatttcttcacacctctcctttgtgacttcaagagcctctggcatctctttctgcaaaggcacctgaatgtgtctgcgttcctgttagcataatgtgaggaggtggagagacagcccacccccgtgtccaccgtgacccctgtccccacactgacctgtgttccctccccgatcatctttcctgttccagagaagtgggctggatgtctccatctctgtctcaacttcatggtgcgctgagctgcaacttcttacttccctaatgaagttaagaacctgaatataaatttgttttctcaaatatttgctatgaagggttgatggattaattaaataagtcaattcctggaagttgagagagcaaataaagacctgagaaccttccag

SEQ ID NO: 111453 - DNA, 401 bp, Homo sapiens
  misc_feature (1)...(401): n = a,t,c or g
ggcagaaagaaactcctgtatatattcaaacatccatttatgagaccagtacaaactactcaagaggaagatggctgtagctgccgatttccagaagaagaagaaggaggatgtgaactgtgaaatggaagtcaatagggctgttgggactttcttgaaaagaagcaaggaaatatgagtcatccgctatcacagctttcaaaagcaagaacaccatcctacataatacccaggattcccccaacacacgttcttttctaaatgccaatgagttggcctttaaaaatgcaccacnnnnnnnnnnnnnnngagggggtttgtttttttcccccaggctggagggagggggccccacaggggtttttggagcctttgcctttggggggcaaagggattcctct

SEQ ID NO: 111454 - DNA, 398 bp, Homo sapiens
  misc_feature (1)...(398): n = a,t,c or g
gtaaatacggcatcatctgcatggaggatttgattcatgagatctatactgttggaaaacgcttcaaagaggcaaataacttcctgtggcccttcaaattgtcttctccacgaggtggaatgaagaaaaagaccacccattttgtagaaggtggagatgctggcaacagggaggaccagatcaacaggcttattagaagaatgaactaaggtgtctaccatgattatttttctaagctggttggttaataaacagtacctgctctcaaattgnnnnnnnnnnnnnnggggcggccgttttaaaggatccctgggggggcccaagtttacccgggcatgcaacgtaatagctttttccttatagggagccgaattataacctacctggggatctttgaa

SEQ ID NO: 111455 - DNA, 489 bp, Homo sapiens
gagaaagtgagactcggtgtcatcaccaatccatcgccagaaggggaggaaactggaatccagcagcagcgagcagcagctggacggtcacatctggaaatggaaagccgacctccccctcctcctccacctactcctcctcctcctccttctcctcctctcacccaggatcacttccgaaaccacttggccttcagcccctgcctcggccagaggtttcatttttaactgaatatttacgaaagctgaaagcgtgcgaggggggtggggtggaaatagcggctgcttcttttccaaggatttatttaatggggatgtgttcaaggcaagaccgaattcagaaggatatcgacgtcgtgatccagaagtccagagctgaggactgcctgtttgcaggagtgaaggcaattttgaaggcatgactacgacctgctctggccacaagagctaagagttgccaggtgttgtggctcaaacactttgagatgc

SEQ ID NO: 111456 - DNA, 425 bp, Homo sapiens
  misc_feature (1)...(425): n = a,t,c or g
tttcgtccaacctggacgcttgcaccggagtattaaatccagctagagaatggcatgtgcaaagatacagagctacagtcaaatgggcagctgaagatgatgatgatgatgatcttgacaccgagaagcagaagaccaatgaagatgaccagacagcaaaaaaggataagttaatagaaggtaaaagaaggccactcgtacttgctgtctcagtatctaaaggtggtcaccttccagtagagaggcccacccactgcagaccgtgccaccgaaggtgacatgcactttctgccacccatccaaaaccgtaacgtgaatctgcaacaggagaggaaagaagaaccaaaacttccaaggccgtgcattttttcttataagcannnnnnnnnnnnggaagagggagcctcactttatggcctgaaggg

SEQ ID NO: 111457 - DNA, 620 bp, Homo sapiens
tttagatggagtttcacattgttgcccaggctggagtgcagtggtgtgatctcagctcactgctgcctctgcctcccgggtccaagcgattctcccgcctctgcctcctgaatagctgggattataggtgcccgccattacgcccagctaattattgtattcttagcagagacggggtttcaccatgttggtcaggctggtctcaaactcccggcctcgcgattcgcccgcctcggccttcttacaggagtgagccacagcatccggccttagctaagatctttcatcaagccagaatgtcaaggactcgggggaaaaggacagaatctactcacctacaatctttagtaacatttcacacttcactgagctatgctgcaggtcccatgatctctactgttacctaagtaattctgtttgaaaactgagggacatagccaccttgttatttcaggaaagatggttaagtacattatcagggatcaatactctgatgtggtaagtggggaggctgagtagtgcttggagacactgcataggaaatatggaggaatggattcagatgtaccaactgaatcaactacagctttctgatggcacgaaatcgtcgacgcgagaat

SEQ ID NO: 111458 - DNA, 420 bp, Homo sapiens
agagatgggtctcgccatcaccatgttgcccagtctggtctccaactcctgggctcaagcgatcctcctgccttggtctcccaaagtgctgggattacaggtgtgagcccccacacccggcctgagtgagtgggttctgaatggtgactgttgttgtccatagccttccccctgcttctgagagtggagtccctcccctcatgttggagacctcccaaggtccatgtggtcctataggggctgttcagcctccctagccccttaacgtgtcaggtaatactgtatatattccatgcaatgtgaataattagttatataattcctaagcaaatattttaaaaaacaacaatgtgatgcttaactcttcccacacgagatcgtcgtcccggaaattcgtgggcggttccgcaatgttaatcg

SEQ ID NO: 111459 - DNA, 484 bp, Homo sapiens
  misc_feature (1)...(484): n = a,t,c or g
gaattcccgggtcgacgatttcgtggaagagagaagtgagatctgaaggagagtttgaaggaatttaatagagattttggagccaactgccatggaggtagaaagagagaggagaaagttcaaacagagcccctgcaagcggcgccgggaagccagctctgagctccactgttcaagcaactgctgttggcatcacagaggtttgtcttggcccaaacccgtcccgggaaacacagagacgctcatgcacttggaattcgctcccttaatgattcactcagcaactcggcacaattacaaaaagaaggtgaaagaaaggaagggagaaaagaagaaaagaaaaagagagaaggaaagaaggaaggaaaagaaagggagaaaggagagagaaggatggaaggnnnnnnnnnnnnnnnnnnnnnnnnnnnnnnnnnnnnnnnnnnnnnnnnnnnnnnnnnnnnnnnnnnnnnnnnnnagggaagga

SEQ ID NO: 111460 - DNA, 426 bp, Homo sapiens
  misc_feature (1)...(426): n = a,t,c or g
cgcaaaagcaagtttttttctnnnnnnnnnnnnnnnnnnngtttcagttctcgaagctgggagatgagagagtcaggctaaggctttgttcctgattcacttctcagaagaacatctggtgctccagttcggccgagtgggcccagacacattcaccatggacttctgctttccatttagcccgctccaggccttcagcatctgcttgtccagtttcaattagaagctggctgttgaataactcaataaaataccatacccttgccagcttctgtgcctcctcatttggaggaagggccccgacatgccttcttttgcaccaccttaataaccaacactgannnnnnnnnnnnnnnnnnnnnnnnnnnnnnnnnnnnnnnnnnnnnnnnnnnnnnnnnnnnnnnnnnnnnnnnnnnnnnnncgaaa

SEQ ID NO: 111461 - DNA, 449 bp, Homo sapiens
  misc_feature (1)...(449): n = a,t,c or g
caggacggagatgcctggtctgcaggaagaccccagaaaagactgtcaccttcacacaggctcactgggaagacaaagcagctctggctaaggtggcggaagctatcaggaccgattacaatggcaggtgtgacgagatccacagtcactggggaggcaatggaacctcctttgcaaaaattataactgaggaaattatgacagtgaaagaaatcagacctaaccgactccnnnnnnnnnnnnnnnnnnnnnnnnnnnnnnnnnnnnnnnnnnnnnnnnnnnnnnnnnnnncggggaggaattcagctcgtggtttgactctgaaacaaaattgataatagcccttaaccgaaagactcttcttgcctggggaccagtctgcctttgcaagactaacagattatctacgagatcagatattgtagtttagggtcatccgactctgcttt

SEQ ID NO: 111462 - DNA, 427 bp, Homo sapiens
  misc_feature (1)...(427): n = a,t,c or g
ccatccacccagaaaccgctcgtgtttggtgccatggtgcacagggatgagtccttcgagaccattctcagccagtacatcaagatcacctcagcggcagcgtctggcggcgacagctagtattgacttgcccaggacgttgctggaannnnnnnnnnnnnnnnnnnnntcnnnnnnnnnnnnaacatactggaagggaaaacaatgggacatcctctggagctttggcattaattctcctggacctgggagcttatggggtggacctctgcgtttaatggaccaaaaagggcccagggccaaaagggacgggggagcccttttcacagagctaacttaagtgtcctttcagtgcccccgcccctactgcaagggagactaagcccttcttacnccctagcctggtgcactaatcaccacggaccgg

SEQ ID NO: 111463 - DNA, 437 bp, Homo sapiens
  misc_feature (1)...(437): n = a,t,c or g
tttcgtggtaacccgagatggaccagctccgaggctgccccgcaacggcctcgccctgcccccaggccggcctctccccagtccctgcggcagagagatccgccaccccccacagcctctccagcagagtgggagcccagggctgggcaagcccccgccttgtccgcaggtgcccacatctcttgggttggcagtggtaggcagatggcatgtttatctttggaggccccattcagccgttttctcggcaaagctttttggacctcctgtggaagatgagcctccgagggtttcacaaccccgattgtgtccactcnnnnnnnnnnnnnnnnnnnnnnnnnnnnnnnnnnnnnaacccccgtttcttccccctgtgaaatggctgttcccacaccttgtattgngagggcggagtgacgtgttgctaagctcagcgc

SEQ ID NO: 111464 - DNA, 1260 bp, Homo sapiens
cgaggagggcttctccttctgggtctggctggacaatatcattgaccttgtgaaaaagtacatcctggccctttggaacgaagggtacatcatgggctttatcagtaaggagcgggagcgggccatcttgagcactaagcctccaggcaccttcctgctaagattcagtgaaagcagcaaagaaggaggcgtcactttcacttgggtggagaaggacatcagcggtaagacccagatccagtccgtggaaccatacacaaagcagcagctgaacaacatgtcatttgctgaaatcatcatgggctataagatcatggatgctaccaatatcctggtgtctccactggtctatctctatcctgacattcccaaggaggaggcattcggaaagtattgtcggccagagagccaggagcatcctgaagctgacccaggtagcgctgccccatacctgaagaccaagtttatctgtgtgacaccaacgacctgcagcaataccattgacctgccgatgtccccccgcactttagattcattgatgcagtttggaaataatggtgaaggtgctgaaccctcagcaggagggcagtttgagtccctcacctttgacatggagttgacctcggagtgcgctacctcccccatgtgaggagctgagaacggaagctgcagaaagatacgactgaggcgcctacctgcattctgccacccctcacacagccaaaccccagatcatctgaaactactaactttgtggttccagattttttttaatctcctacttctgctatctttgagcaatctgggcacttttaaaaatagagaaatgagtgaatgtgggtgatctgcttttatctaaatgcaaataaggatgtgttctctgagacccatgatcaggggatgtggcggggggtggctagagggagaaaaaggaaatgtcttgtgttgttttgttcccctgccctcctttctcagcagctttttgttattggtggtggtgttcttagacaagtgcctcctggtgcctgcggcatccttctgcctgtttctgtaagcaaatgccacaggccacctatagctacatactcctggcattgcactttttaaccttgctgacatccaaatagaagataggactatctaagccctaggtttctttttaaattaagaaataataacaattaaagggcaaaaaaacactgtatcagcatagcctttctgtatttaagaaacttaagcagccgggcatggtggctcacg

SEQ ID NO: 111465 - DNA, 411 bp, Homo sapiens
  misc_feature (1)...(411): n = a,t,c or g
ttgcaggcaggcagcctccatgcagcaccattcaggtctgccctggagagcagcccagcagagccggccacgctcagtgaggacgaagcgcgcctcctgctggctgcactggtgcaggactatgtgcagatgaaggccagtgagctgnnnnnnnnnnnnnnnnnnnnnngctccagcctggacagccccagatctaagcggtgcgggaatctgagtacttgcatgctgggcacatacacgcaggacttgaacaagtttcacacgttcccccaaactgcaattggggttggagcacctggaaagaaaagggatatgtccagcgacttggagagagaccatcgccctcatgttagcatgccccagaatgccaactaaactcctccctttccttcctaanttcccttcttggan

SEQ ID NO: 111466 - DNA, 2496 bp, Homo sapiens
  misc_feature (1)...(2496): n = a,t,c or g
tgtccagtgtgctggaattcgacgccctcaccacctggcagaataagaccaaggctcacatccggttcaagccaacactttcccagcagcaaaagtccccagagcagcaagaaacagtcctggacggcaacctcattatccgctatgatgtggaccgggccatctccgggggctccattcagatcgagaacggctactttgtacactactttgcccccgagggcctaaccacaatgcccaagaatgtggtctttgtcattgacaagagcggctccatgagtggcaggaaaatccagcagacccgggaagccctaatcaagatcctggatgacctcagccccagagaccagttcaacctcatcgtcttcagtacagaagcaactcagtggaggccatcactggtgccagcctcagccgagaacgtgaacaaggccaggagctttgctgcgggcatccaggccctgggagggaccaacatcaatgatgcaatgctgatggctgtgcagttgctggacagcagcaaccaggaggagcggctgcccgaagggagtgtctcactcatcatcctgctcaccgatggcgaccccactgtgggggagactaaccccaggagcatccagaataacgtgcgggaagctgtaagtggccggtacagcctcttctgcctgggcttcggtttcgacgtcagctatgccttcctggagaagctggcactggacaatggcggcctggcccggcgcatccatgaggactcagactctgccctgcagctccaggacttctaccaggaagtggccaacccactgctgacagcagtgaccttcgagtacccaagcaatgccgtggaggaggtcactcagaacaacttccggctcctcttcaagggctcagagatggtggtggctgggaagctccaggaccgggggcctgatgtgctcacagccacagtcagtgggaagctgcctacacagaacatcactttccaaacggagtccagtgtggcagagcaggaggcggagttccagagccccaagtatatcttccacaacttcatggagaggctctgggcatacctgactatccagcagctgctggagcaaactgtctccgcatccgatgctgatcagcaggccctccggaaccaagcgctgaatttatcacttgcctacagctttgtcacgcctctcacatctatggtagtcaccaaacccgatgaccaagagcagtctcaagttgctgagaagcccatggaaggcgaaagtagaaacaggaatgtccactcaggttccactttcttcaaatattatctccagggagcaaaaataccaaaaccagaggcttccttttctccaagaagaggatggaatagacaagctggagctgctggctcccggatgaatttcagacctggggttctcagctccaggcaacttggactcccaggacctcctgatgttcctgaccatgctgcttaccaccccttccgccgtctggccatcttgcctgcttcagcaccaccagccacctcaaatcctgatccagctgtgtctcgtgtcatgaatatgaaaatcgaagaaacaaccatgacaacccaaaccccagcccccatacaggctccctctgccatcctgccactgcctgggcagagtgtggagcggctctgtgtggaccccagacaccgccaggggccagtgaacctgctctcagaccctgagcaaggggttgaggtgactggccagtatgagagggagaaggctgggttctcatggatcgaagtgaccttcaagaaccccctggtatgggttcacgcatcccctgaacacgtggtggtgactcggaaccgaagaagctctgcgtacaagtggaaggagacgctattctcagtgatgcccggcctgaagatgaccatggacaagacgggtctcctgctgctcagtgacccagacaaagtgaccatcggcctgttgttctgggatggccgtggggaggggctccggctccttctgcgtgacactgaccgcttctccagccacgttggagggacccttggccagttttaccaggaggtgctctggggatctccagcagcatcagatgacggcagacgcacgctgagggttcagggcaatgaccactctgccaccagagagcgcaggctggattaccaggaggggcccccgggagtggagatttcctgctggtctgtggagctgtagttctgatggaaggagctgtgcccaccctgtacacttggcttccccctgcaactgcagggccgcttctggggcctggaccaccatggggaggaagagtcccactcattacaaataaagaaaggtggtgtgagcctgggaaaaaacaacaataaaaagaaaagactatacaatgaaagtaaacgtaagccatatatatgcttntatgctcccaaacgtctcagtgtgagacagaataagcagattggggatatttgtcgtcgcttatgttcgctgctgcccg

SEQ ID NO: 111467 - DNA, 1943 bp, Homo sapiens
  misc_feature (1)...(1943): n = a,t,c or g
tacagcagatgctggacagaagttgctgggtttgttttgctactgatgaagatgatagaacagctgaatgggtgagaccatgcaggtgcagaggatctacaaaatgggttcaccaggcctgtctacaacgctgggtggatgaaaagcaaacaggaaacagtacagccagagtggcatgtcctcagtgcaatgctgaatacctaatagtttttccaaaattgggtccagtggtttacgtcttggatcttgcagatagactgatctcaaaagcctgtccatttgctgcagcaggaataatggtcggctctatctattggacagctgtgacttatggagcagtgacagtgatgcaggttgtaaggtcataaagaaggtctggatgttattggagagaagctgatcctttattccttttaatttgggacttcctacttattcctgtcatgctgatattaggcaagatgattcgctgggaggactatgtgcttagactgtggcgcaaatactcgaataaactacaaatgttaaatagtatatttccagggataggttgtcctgttcctcgaattccagctgaggccaatcctttagcagatcatgtctctgctactcgaatcttgtgtggagcccttgtctttcctactattgctacaatagttggtaaattgatgttcagtaagtgttaactctaatttacaaaggacaatcttggtaagacggctttaacattacttatattaccttgcaaaagagaatgaagtgtatttgtttttaaaaggtggggaactgtataaatattcggtctgtggctcctatgcattaagcctctatttgagcctcactatcattcaatagcttgagtggaaataaaaagaggagaaaccactgcagcagttctggccttttggaactatgttgtaggtgctttctctcctggcatatgcatgaatcatcacacctgtccctcttgccagtgggattacagtgctttacgatcagaccacctggttcaaatcccatcacagaaattgtcttgctgtgaaatctaaatcaaatgtctggactttttgttcctgtagtatggtgatggtaataatcaggattattgtgaggattgtataagtactagcacatagtaagcactcatgttgtttgctattattgttactcccacttctcccctctggtggcatgtaacctgcacggaccttggaggactgaacaaagggggcaagcgtgggaataaaacacaagagatgaaagagtatatttggaagaaggggtcagagggcaccttgcctctagtggacaagggccctgagctttacacagccctccgtatttattaggcaatagagatagagctttacacagccctccgtatttattggtaaaagagatcgcgacaaagtgcagtgattcgtcgggtaatcggcagtccgccgtttggttcacagcaggcttgcgaggactgcatccttcgaacaacaggcgctagatttcccagtagataacttcaaggaccccagtgccagggagtgaccgccctcagcaaaccttctgggcagcaggcgcantgttgagttttactcacatcctacattcaggataaacagtttgctgattgattcatatagcctccagtgggaatgctgagttgggtcacgatcccttcggcctttttggctcccagttttcagggtattttttttttcaaccagttcatccattcatgggatgacatagattcagcaccggtgctgttcttatttttcgtatttatagatcaaaacaccgaggaaaacccgcgcctgtaattaagcagatggcaccaggagttctgccgcttgactctgagcccttctgaagacttcatcagccggagcttgacaggttctccttcacatgtggctgaagccaaaagagaagcctcccggcctgca

SEQ ID NO: 111468 - DNA, 458 bp, Homo sapiens
  misc_feature (1)...(458): n = a,t,c or g
gaggcatttgtcgatctgacccccatctacgggctgaccatgaagcacgcccgctgtgaacatgttcaggcgcggctgcgcttctccatcaactgaagaagacaccaccattctgaggccagggagcgagtgggggccagccacggggactcagcccttgtttctcttcctttctttttttaaaaaatagcagctttagccaagtgcagnnnnnnnnnnnnnnnnnnnnnnnnnnnnnnnnnnnnnnnnnnnnnnnnnnnnnnnnnnnnnnnnnnnnnnnnnnnnnnnnnnnnnnnnnnnnnnnnnnnnnnnnnnnnnntttgcnnnnnnnnnnnnnnnnnnnnnnnnnnnnnnnnnnnnnnnnnnnnnnnncccnnnnnnnnnnccccttattttccctttttttttgcgcggtttaggggaaataaatttttaagccctaaaaatccccttttttt

SEQ ID NO: 111469 - DNA, 1341 bp, Homo sapiens
ctgggagaaatcccagctggagaaacaagtttgaattatgtgtcccagttggcttcacccatgtttggagacaaggacagtctcccaacaaacccagtagaggcaccacactgttcagagtataaaatgcaaatggcagtctccctgcgtcttgccttgcctcccccgaccgagaatagcagcctctcctcaattacccttttagatccaggtgaacactactgctaaccagcatgccgatttcataccttatgctacacagacattaagaagagcagagctggcaccctgtcatcaccagtggccttggtccttaatcccagtacgatttgcaggtctggtttatataagaccactacagtctggctaggttaaaggccagaggctatggaacttaacactccccattggagcaagcttgccctagagatggcaggatcatgggagcatgcttaccttctgctgtttgttccaggctcacctttagaacaggagacttgagcttgacctaaggatatgcattaaccactctacagactcccactcagtactgtacagggtggctgtggtcctagaagttcagtttttactgaggaaatatttccattaacagcaattattatattgaaggctttaataaaggccacaggagacattactatagcatagattgtcaaatgtaaatttactgagcgtgttttataaaaaactcacaggtgtttgaggccaaaacagattttagacttaccttgaacggataagaatctatagttcactgacacagtaaaattaactctgtgggtgggggcggggggcatagctctaatctaatatataaaatgtgtgatgaatcaacaagatttccacaattcttctgtcaagcttactacagtgaaagaatgggattggcaagtaacttctgacttactgtcagttgtacttctgctccatagacatcagtattctgccatcatttttgatgactacctcagaacataaaaaggaacgtatatcacataattccagtcacagtttttggttcctcttttctttcaagaactatatataaatgacctgttttcacttagcatcctttggactctgcagtaggttgtctgggtcaagataactctcagtcacatttatattcatattatgctaaaatagtaaaatgaaacctcattgttggacataatttagatataactaaaaagttctatgaagtgggaaattccgtgttggctctggagcagctttgtctcctctgaaccaatatatcccaaaccaatatatgcaaagcacctggtacacaactggtattttagtacatgttggttcttt

SEQ ID NO: 111470 - DNA, 455 bp, Homo sapiens
  misc_feature (1)...(455): n = a,t,c or g
gtgcaattcagaacaagtaatcttaactgaaaaagatctgctagaagatggttttggagagcaccctttttaccactgcctggttgcagaagtgccgagagagcactggactccggaagggaacccctcgccctttccagaagccagagagaccaagtgttatgtaagaagtagtgtcggctgtgtagaaccactgactacacaggccgaagttactgagaacttggacagaaaaaatagccagcaagtgttcaaactactgaggnnnnnnnnnnnttagatatgctgcacttaagaatactagggcaggttaaaagagctgtttaagtaagtatcagagtgctgtggagactcggaagtgtttaagctgcttaagtaagtataagtgctgtggagacccggaagagttaaatataagggcatttgttgtaattcagtttcataaaatggttctn

SEQ ID NO: 111471 - DNA, 1677 bp, Homo sapiens
  misc_feature (1)...(1677): n = a,t,c or g
cggacgcgtgggccgtgagcccgagtcgcaggtggtggtacaggtgctatgcttatgactcgaactctccctatgagtggtctctacccagtgatctcctggagctcctggtcctaggtgtttctaagaagccatcactctcagtgcagccaggtcctatcgtggcccctgaggagaccctgactctgcagtgtggctctgatgctggctacaacagatttgttctgtataaggacggggaacgtgacttccttcagctcgctggcgcacagccccaggctgggctctcccaggccaacttcaccctgggccctgtgagccgctcctacgggggccagtacagatgctacggtgcacacaacctctcctctgagtgctcggcccccagcgaccccctggacatcctgatcacaggacagatccgtggcacacccttcatctcagtgcagccaggccccacagtggcctcaggagagaacgtgaccctgctgtgtcagtcatggcggcagttccacactttccttctgaccaaggcgggagcagctgatgccccactccgtctaagatcaatacacgaatatcctaagtaccaggctgaattccccatgagtcctgtgacctcagcccacgcggggacctacaggtgctacggctcactcaactccgacccctacctgctgtctcaccccagtgagcccctggagctcgtggtctcaggaccctccatgggttccagccccccacccaccggtcccatctccacacctgcaggccctgaggaccagcccctcacccccactgggtcggatccccaaaggggtctgggaaggcacctgggggttgtgatcggcatcttggtggccgtcgtcctactgctcctcctcctcctcctcctcttcctcatcctccgacatcgacgtcagggcaaacactggacatcgacccagagaaaggctgatttccaacatcctgcaggggctgtggggccagagcccacagacagaggcctgcagtggaggtccagcccagctgccgacgcccaggaagaaaacctctatgctgccgtgaaggacacacagcctgaagatggggtggagatggacactcgggctgctgcatctgaagccccccaggatgtgacctacgcccagctgcacagcttgaccctcagacggaaggcaactgagcctcctccatcccaggaaagggaacctccagctgagcccagcatctacgccaccctggccatccactagcccggagggtacgcagactccacactcagtagaaggagactcaggactgctgaaggcacgggagctgcccccagtggacaccaatgaaccccagtcagcctggacccctaacaaagaccatgaggagatgctgggaactttgggactcacttgattctgcagtcgaaataactaatatccctacattttttaattaaagcaacagacttctcaataatcaatgagttaaccgagaaaactaaaatcagaagtaagaatgtgctttaaactgaatcacaatataaatattacacatcacacaatgaaattgaaaaagtacaaaccacaaatgaaaaaagtagaaacgnnnnnnnnnnnctaggaaatgaatgacgttggctttcgtataaggaatttagaaaaagaataaccaattattccg

SEQ ID NO: 111472 - DNA, 313 bp, Homo sapiens
ttttttttttttagacggagtctcactctgtggcccagcctggagtacagtggcacgatctcggctcactgcaacctccgcctcccgggttcaagcgattctcgtgcctcagcctcccgagcagctgggattacaggcgtaagccactgcgcccggccttgcatgctctttgaccctgaatttgacctacttgctggggtacagttgcttccttttgaacctccaacagggaaggctctgtccagaaaggattgaatgtgaaacgggggcacccccttttcttgccaaaatatatctctgcctttggttttat

SEQ ID NO: 111473 - DNA, 401 bp, Homo sapiens
cctcttagtaaaatgtctctcaacaaggacctgcattttaacacttccattgctaacttggtcattcttcgtgggaaagatgtgcaaagtgcagatgtggagggatttaaagatccagctctgtatacttcctggttgaagcctgttaatgctttcaacgtgtggaaaacccagcgggcctttagcaaatatgagaagtctgcagtgttggtcagcaacagccagttcttagtaaaaccacttgatatgattgttgggaaggcatggaatatgtttgcttcaaaagcctacattcatcagtacacaaaatttggaatcgaagaagaggactttttagacagtttcacgtcattagagcaggttgttgccagttactggaatctctgatcttgaacaatggg

SEQ ID NO: 111474 - DNA, 382 bp, Homo sapiens
  misc_feature (1)...(382): n = a,t,c or g
cccacgcgtccgctagcaggcaccatgcttctgacgccgacgtgtactcttacaatacgctgctgctgctgccgccgtcgttgttgtggctgcaactgctgctgccgttgttgtttctgctgtagaagaaaaagaggatttcgtattcaatttcaaaagtaagtttgaaaccacatctattttctgnnnnnnnnnnnnnnnnnnnnnnnnnnnnnnnngggggggccccttttaaaaaaaaacattttttccccccnnnnnnnnnnaaaaaannnnnnnnnnnnggggccccaaaaaataaattccggggccggttttaaaaaacnnnnnnnnnnaaaaaaccgggggcaacccaaaataaaatgtttagaaaaaaaaagcg

SEQ ID NO: 111475 - DNA, 635 bp, Homo sapiens
ttttttttttgagatggagtcttgctgtgttgcccagcctggagtgcagtgttatgattttggctcactgcaacctctgtctaccatgttcaagcgattctcccacctctgcctcccgtgtagctgggatcacaggcacacgccaccacacctagctactttttgtatttttagtagaaatggggtttcaccatgttggccaggatggtcccgaactcctgacctcaagtgatcctcctgcctcggcctcccaaagtgctgggattacaggtgtgagccactgtgcctggccaaaaatgtgatttcttatttcccacattgccaattccatttcaattaactataatagctatgtctattgagcactcaagcgtattctagaaactgttcctgattctggggatatatccatgaatgaactatagtccctgttattaagtaatccgtagtctgactaaaccattagaaattaaaaaaaaatggctactttcaaagacatcttggagttcaggagtcccacactgcgaaccatattacctaataatccaacctgcttgtaattcacttatttaaccaatatttattgagtgccaacgaatgccaccgcactggactagtgactacgagttaaccgc

SEQ ID NO: 111476 - DNA, 405 bp, Homo sapiens
  misc_feature (1)...(405): n = a,t,c or g
gtcgacgccacgcgtccggtgtgggcaaagaccccaccacccccacagtgcacctgcatgatgtgcagctggaggatcccagccctcctgctcctgccgctccccacactggacctgagggctgaaagcctgccccacctcctgtataggaagagggtatggtctgagatgtgcagactgggaccagcgctagcctgaggagctcagagcctaaggaaagactggcttttggggtacaagggtgactagaaccttcctgggactctggctatagtactttgaaattatcacccatataaaagagggacatggactatnnnnnnnnnnnnnnggggcgcccgttttaaaggaaccaggtttacttacccgggcttgcgaggttaaaacttttatatggggccccca

SEQ ID NO: 111477 - DNA, 443 bp, Homo sapiens
  misc_feature (1)...(443): n = a,t,c or g
attgcaccgcctgcaggaattcggcacgagaagagaagcagagggagaagcgggctgcctgtgagcagcttcaccagcagtatcagcagctgcaggaggagaccgccgctgccaccctgctactgcagggtgaggaagaaggggaagaagattgatcaaactgaatgnnnnnnnnnnnnnnnnnnnnnnnnnnnnnnnnnnnnnnnnnnnnnnnnnnnnnnnnnatatactgtaaagaaagagagaaaataaaaagttaaaaagttaaatatataaaaaaccctgttattttcaagggagcaccacccacaaaacttccgccaagtgacagnnnnnnnnnnngattagccaccaatcgctgaatgttgccccttttatctcccatataaaacagttagcggctgttaacccctacatgattacaaacggtaatagctttatgt

SEQ ID NO: 111478 - DNA, 294 bp, Homo sapiens
  misc_feature (1)...(294): n = a,t,c or g
aaacaagtggacagaaacatccgcagagtgaccagggcaggtattcttgatcagatcattgacatgacatcttacttgctggatctaacaagttacattgtatagtttctgggactgtttgaatattctattccaatgggcatttattttttatcctgtcattnnnnnnnnnngactgttatcctgctacacnnnnnnnnnnnnnnnnncctggnnnnnnnnnnnnnnnnnnnnnnnnnnnnnnnnnnnnnnnnnnnnnnnnnnnnnnnncgggttttaaaaagggcgggaggg

SEQ ID NO: 111479 - DNA, 286 bp, Homo sapiens
ttgaacttgggaggcggaggttgcagtgagccgagatcatgccactgcactccagcctgggcgacacaagactccatctcaaaaaaaaataatactcaatttcttctgtttgacaagtgttttagaccttaatgtttcctagattaaaaaactttatcctattttctcatgaaaaattcaaaggtaaggatgtaagaagttctcaatcctatactaaaagcagtttcttctggatggggctaatgtccatttgggagtggagagaatatgaggagagagtggctgg

SEQ ID NO: 111480 - DNA, 434 bp, Homo sapiens
  misc_feature (1)...(434): n = a,t,c or g
accccgtgctgcaggtccattcattccagaccagccattcagggtggaaattctttgtgagcacccacgtttccgagtgtttgtggatggacaccaactttttgatttttaccatcgcattcaaacgttatctgcaattgacaccataaagataaatggagacctccagatcaccaagcttggctgatttaaaccacctctatttcaaataggatcacgtgccacaactatctgactgttggtctggaagaagtgtcctagcaagatctggagacttaaaaagaaaacaaaaacaaatggcaagtttcacttaagggtggtttgcccttaagaagaaagctgttgggacaaagacaccgagccattatacccagaataaaataatacatttatgctggattttattcnnnnnnnnnnnnnnnnnnnnnnnnnnn

SEQ ID NO: 111481 - DNA, 431 bp, Homo sapiens
  misc_feature (1)...(431): n = a,t,c or g
cggcacgagggattcactccctctggttgatacccactcaaaaaggacacttctgattaagacggttgaaactagagatggacaggttatcaacgaaacttctcagcatcacgatgaccttgaataaaaattgcacacactcagtgcagcaatatattaccagcaagaataaaaaagaaatccatatcttaaagaaacagctttcaagtgcctttctgcagtttttcaggagcgcaagatagatttggaataggaataagctctagttcttaacaaccgacactcctacaagatttagaaaaaagtttacaacataatctagtttacagaaaaatcttgtgctagaatactttttaaaaggtattttgaataccattaaaactgcnnnnnnnnnnnccagcaagaatccaaccaacttgtttttgcttaaa

SEQ ID NO: 111482 - DNA, 439 bp, Homo sapiens
ggtccccgctctgcaggaattcggcacgagagcatatggagatagaatagaaagaatgcttcgcctcagtttgaacattgaccctgatgcaaaggtggaagaagagcctgaagaagaacctgaagagacagcacaagacacaacagaagacacagagcaagacgaagatgaagaaatggatgtgggaacagatgaagaagaagaaacagcacaggaatctacagctgagaaagatgaattgtaaattatactctcaccatttggatcctgtgtggagagggaatgtgaaatttacatcatttctttttgggagagacttgttttggatgccccctaatccccttctcccctgcactgtaaaatgtgggattatgggtcacaggaaaaagtgggttttttagttgaattttttttaacattcctcatgaatgtaaatttg

SEQ ID NO: 111483 - DNA, 671 bp, Homo sapiens
ccgcaagtatgcacaccttagtgaacattacagaattcacactggtgagaagccttatgagtgtattgagtgtggaaagttcttcagacatagttcagtccttttcagacatcagaaacttcacagtggtgactaatgctgccatttaggttatgacagtttctctagcgaggatgactacgaatctgactgggagtagaggggcaggtagagttcctggagggaaggatgaaggagccttggctactgtactctgagaggaatgtttccagaaatggaggtgggagcttagggaatgcagagcctacttgaggtgggcatctgggaatacagggtagaaagaaattcctgcttttcagataaagcctacacattgccactgtctccccatgtgactcttacagcttgaggaggcatttgttagcacttctgttcactttactacatcctgccccacattctgacttgtcacccattttcgttggctggcaggttgagatgtttttcttaaacactgcctgtcagtgtgaagtggcacagctctgatgtagtgctaagtctagcctccagatttgaggcagccctgaccatgctaccatgggggaggctcccaacctgtggaagtggtcctgtgaaaaggagacagaaacaagtaagagccaaaaaaaaaa

SEQ ID NO: 111484 - DNA, 395 bp, Homo sapiens
  misc_feature (1)...(395): n = a,t,c or g
atcaggaaattggatacactcacatgaaaatagcggaaggagtgaactctcttttgcagatggcaggcctcctggcaaggctgtgtcagaagacaatggccccggtggccagttagagcagagacttcactgactgacttacaggtgccctattctgaggtacaggagccgcggctttctgatgggggaaaatgccgccttaggctggagccaacatgactgtcctttaaactccagtggcnnnnnnnnnnnnnnnnnnnnnnnnnnnnnnnnnnnnnnnnnnnnnnnnnnnnnnnnnnnnnnnnnnnnnnnnnnnnnnnnnnnnnnnnnnnnnnnnnnnnnnnnnnnnnnnnnnnnnnnnnnnnnnnnnnnnnnnnnnnnnnnnnnnnnnnnnn

SEQ ID NO: 111485 - DNA, 385 bp, Homo sapiens
  misc_feature (1)...(385): n = a,t,c or g
cctggaaacagtcagcaggcaacttcgaaggacaacgagataagcacctttcacaacctcgggaacgttcattccccgctgaagcttctcaccagcatggccatctcggtggtgtgcttcttcttcctggtgcactgactgcctggtgcccagcacatgtgctgccctacagcaccctgtggtcttcctcgataaagggaaccactttcttatttttttctannnnnnnnnnnnnggaaacccggaaaccctcctccacccttgaagaaaaggactacccttggtttgttttcaaaaatcaaagggtttctttgggaggaaaatactttttaggggaagcaataaaatggcccttttgcaaaaaaagaaaaaaacccatcatgtt

SEQ ID NO: 111486 - DNA, 435 bp, Homo sapiens
  misc_feature (1)...(435): n = a,t,c or g
cagtgcggtggaattccctttttaaactcattttgaaaaaagaggatgaattgggggatagatctataatgttcactgttcaaaacgaagactagctattaaaattnnnnnnnnnnnnnnnnnnnnnnnnnnnnnnnnnnnnnnnnnnnnnnnnnnnnnnnnnnnnnnnnnnnnnnnnnnnnnnnnnnnnnnnnnnnnnnnnnnnnnnnnnnnnnnnnnnnnnnnnnnnnnnnnnnnnnnnnnnnnnnnnnnnnnnnnnnnnnnnnnnnnnnnnnnnnnnnnnnnnnnnnnnnnnnnnnnnnnnnnnnnnnnnnnnnnnnnnnnnnnnnnnnnnnnnnnnnnnnnnnnnnnnnnnnnnnnnnnnnnnnnnnnnnnnnnnnnnnnnnnnnnnnnnnnnnnnnnnnnnnnnnnnnnnnnnnnnnnnnnnntcaaaag

SEQ ID NO: 111487 - DNA, 394 bp, Homo sapiens
ttttttttttgtattttagtaaagacggggtttcaccgtgttacccaggctggtcgcgaactcctgagctcaggtaatccgcccgcctcggcctcccaaagtcctgggattacaggcgtgacgaccgcgcccggccagttttactcttcttaaatctgatgttcatggcataaagcaggagtagtggctttaaatatcactagccacagctttcagttgctctgatcgctatcattcacacctttgagtaaaaggaagaaagaaaattcttccaactgacttattcaactttcaaaaatgagtttgttgcaatgacagaaaaaaagctcccctactacaccgtgcttctataaaggattctcaaattgatgaattccaccgcactggagtaata

SEQ ID NO: 111488 - DNA, 635 bp, Homo sapiens
tatcactctgtcacagtgcagtggtgcaatctcagctcaatgcaacctatgcctcccgggttgaagcaattcttgtgcctcagtctcctgagtagctggaatcacaggcgcgcgcaccatgcccagttaatttctatattttcagtagagatagggttttgccatgttggccagttctggttctcgaactcctgggcctcaagtgatcagcccacctcggcctcccagagtgttggggattacagggcatgagccactgcaatgggccaggatacactttctaaggataaaatttatgtcttatgtttaaaggaaggtgacaagacatttggcaatgtactagtaataaaacatttttcaattttcttcagaataccttatgaacaaaaatcttgccttattacataaacattaaaaatttcattataaaatatttaaccactaagtaaaaatcattacttctttcaggaaaatgaaacaaacattaacatattatttgctacagtggtatgacataaatccctttttaagaaaaaaataggtgattggggatttaaacaagtagacttttcagtcttagatctcaaaatgaataaaaactaagtgtcaagacaacaggaattccaccgcaagta

SEQ ID NO: 111489 - DNA, 257 bp, Homo sapiens
attttttggtagagacagtggtctcactaggttgcccaggctggtctcgaactcctggggtcaagtgatcctccggcctcggcttccgaaagtgctgagatcacaggcctgagccaccattctcagatccccttcttgaagcaaatcagaaggctgaagactcccctaaatgatattcaacaacttctctacaactttccctttgcagactgcctcccctagccgggaggtctgtttttccggctactggtgacaaa

SEQ ID NO: 111490 - DNA, 1009 bp, Homo sapiens
ctccgtggtggacattcgcaagctataagctctgccagtggtgaccccgacgcgatcgccttgaagttacgcttgattgagtgtataactcatcaattttcggggaatcccgttcatcatctccggatccctctcagtggcagccgagaagaaccacaccagttgcctggtgaggagcagcctgggcaccaacatcctcagcgtcatggcggcctttgctgggacagccattctgctcatggattttggtgttaccaaccgggatgtggacaggggctatctggccgtgcttacttattttcactgtcctggagttcttcacagcgctcattggcatgcacttcgggtgccaagccatccatgcccaggccagtgcacctgtgatcttcctgccaaacgccttcagcgcagacttcaacattccccagctccggcattcctctgcgccccctgcctatgacaatgtgggcatatgcccaaggagtcgtctgaggagcaaaagtgagcacctgcgggtggagtccagccttttccctctgggcccagcctctccccacccccaccttgttcatcaggggccagccccatcccagctgccctccctcaccacatctacacatactccggcatctgagtgaagtgttccccagggaccatctctcccaaacttttccccagtgctttctttctaaaagtacaccgggcctgaaccgtcaggggtgtgtgtccttcagctccctgagccctgtcacccttccaggacacccaccttgtgcatctaagcatttctctgctcattggggaaatcctggcctcattggagactcaggttcgaggcctgccctgaccctcggggcctcgggaaggtcagagagcccgggaatcctccaaaatgggaagagtcctgacttctgggcatttccacagagggtgcccggataccagggcccagggccctaacaggcagggggtaagtgggccctggcccggcaaggtctccctgggcccc

SEQ ID NO: 111491 - DNA, 427 bp, Homo sapiens
  misc_feature (1)...(427): n = a,t,c or g
gaatattacggcgccggaggtcccgggcctgggggcttcggggctcatggtcccaagggagggtctgggtcacgccctaccattgaggaggtggattaggggccttcgttctttagtatgattgtctttgaggtggactgttgggactcaaggactttgctgctgttttcctatgtcatttctgcttcagctctttgctgcttcacttatttgtaaagatgcaacctgatggcaataagctggcttcattatttctgtagcacaaccgatatgttcattagaaatctttgcatttaacgttgatactgaaagggtgtttctttccctttaaatgaatcaacactgccaccttctgtacgagatggggtggggttannnnnnnnnnnnnnnggccgggaaaaacacctacaaaggtccgtgaaggtcg

SEQ ID NO: 111492 - DNA, 443 bp, Homo sapiens
  misc_feature (1)...(443): n = a,t,c or g
aattcctagcccatgccaccccacaatgccagataaaccaagtgaaattcaagtttcagtcttccaaccgagtttggaaaaaagaccggactaccattattgggaagttctgcactgcccttttgcctgtcaatgacagagaaaagatggtctgcttacctgaaccagtgaacttacaagcaagtgtgactgtttcctgtgacctgaagatagcctgtgtgtagtttaacctgggcaggacacatctccctgcannnnnnnnnnnnnnnnnngaaaaaaaggtgaaataaggtatgtgggcgtgcagtttattgcaaacctttcctattagggggaaaggcgaggcttttttttattttcctctaaaccagctaccctggaggggagggaaaactctttttacaaaatttggtttcctttgccgatgtatatgccatccccag

SEQ ID NO: 111493 - DNA, 454 bp, Homo sapiens
  misc_feature (1)...(454): n = a,t,c or g
attagcccagtgtggtggaattcgtcattgatgtctgagggaaataagtctcgaacggtagctgctaccaacatgaacgaagaaagcagccgctcccatgctgtgttcaacatcataatcacacagacactttatgacctgcagtctggggtaagggattaggcagaacctttttggagtgggggtggaagaactgaaagtgtccatataggtaaagtctttcatggttgggttcagtggctgagaattgtatgttggctcttctgcttactaggtgagctactttgcttatcatttaatttgttaggtctttctttatatttgactttttaaaaaattggattnnnnnnnnnnnnnnnnnnnnnnnnnnnnnnnnnnnnnnnnnnnnnnnnnnnnnnnnnnnnnnnnnnnnnnnnnnnnnnnnnnnnnnnnnnnnnnnnnnnnnnnnnnncan

SEQ ID NO: 111494 - DNA, 456 bp, Homo sapiens
agaatttttagtagagacggagttttaccatgttggtcaggctggtcttgaacttcccgaccttgtgatctgccctcctcggcctcccaaagtgctcggaattacaggcgtgagccactgcaccccacctattgaataacttgattttaaaaccccatcatcaaaaaccattgaattatatgtaattacatctactaggatcttgtgtagaatttcccaactgacacccatgggctggaaatgggttacaaggtgtggggacaaggaccacctcagcttcagaaggcctagtctggtccctgcagggctaagggctcatgacatcacctcctgcttatttgtttcaaggtgctgtacaaatatcctcgctttctatgtgtccacacatgaaaaaaggtagcaccaagacagtgcttgtttcagaaaacctagacttctttctttttttcattacta

SEQ ID NO: 111495 - DNA, 420 bp, Homo sapiens
  misc_feature (1)...(420): n = a,t,c or g
annnnnnnnnnnnnnagggaaagttttgctttttccccacgggttgagggccatggcaaaatttcggattactgccacctttgcctcctgggttccaacaatttttgggccctggccttccgaataacgggaatttcagggggcttcccccccggccaagttattnnnnnnnnnnnnnnnnnnnnnnnnnnnnnnnnnnnnnnnnnggccgggtgggtttcaactcccggcggcccttaattattcccctgcctcagccttcaaaatggttgggtttcaggagttaagccctgccccccgtttggttaaaccccttttaatttaannnnnnnnnnnnnnnnnnnnnnnnnnnnnnnnnnnnnnnnnnnnnnnnnnnnnnnnnnnnnnnnnnnnnnnnnnnnnnnnnnnnnnnnnnnnnnn

SEQ ID NO: 111496 - DNA, 903 bp, Homo sapiens
atacacacacacacacacacacaaatcagcatcataagggaatgtacccttcctacagagatgaagctgttcacatgttcatctcaaacacagtattttacgagagtggcacgtctgttcctgcgtaaaattttaaccattaggattgcagataaatgtttgaattctgctcctctctcatcaatccaggacagtatttgaagtgtgagggctttgtgtatagttgtttatccattaccacatttttgtattttaatagtctacaggctatataaaagaacatggctttttgactgatagaaagtgattacagatgttggctcaagttcagggccaccatcatatacctaacaagagttcatgattctttaggtaatgtcaaaacattttgtatttttccatcttaagctttataacattttgtgagtaagacaaatgttatttaaaattcttgttgtcagtccagcaattgaggctttcatagttcagtgttataatattcagtagggaccctcaacaaatatataaaaatatgttgctcactctataatcctcctatggctaacctctaggatagttctgccactatattttacttctttgccatcagcaagagtaggatttcatcaaggcaaggtaggaaatctaaatgaaattgatatataaatgaattgatctaaatgtaaaagcaaatgaaaaattgcatgtgtttttttcctgtcaaacatgtatacccattatgtatagagacccagtagtcacgtatggtgactgaaacaggattatgtaatccctaaaaagcagaatatgtaaaaatcacatgtatgcgtttggtttaggaatgtgcttttgtacttccacttggaataaaggtgtgtttggtattctgagaaaaaaaaaaaa

SEQ ID NO: 111497 - DNA, 437 bp, Homo sapiens
ttttagtatttttagtagagacagggtttcaccatgttgaccagcctggtctcaaacgcctgacctcaagtgatctgcctgcctcagccttccaaagtgctggagttacaggtgtgagcaactgtgcctggcctcaagctattttctgtagcatttcaagaaccaaggttttttaccctaatttgaatgccaaaattaaggcccactagtcactaatgggacaaatatgtagtggtttgcaacttaaatgcttaagtgaaaatctctcaaactgtgacacagtgataatagtgtttcttttaagaccaaatgactcaaatggtacacccagtgttttgcagttagttttgactaagctggacagctcatatttaagatggaaaaatgtagagaccgattttagatgtgctggtatagcttgtattcaaagcttaaga

SEQ ID NO: 111498 - DNA, 681 bp, Homo sapiens
ctctagcccagtgtggtggaattcatcagtaattcggggagatctgatcaaattgttctgtatttttactgtcgagggagcagcactggatccagatgacatggcctttgatgtgtcctggtttgcggtgcactcttttggcctggacaaggctcctgtgctcctgtcttccctggatcggaagggcatcgtgaccacctcccggagggactggaagagcgacctcagcctggagcgcgtgagtgtgctggaattcttgctgcaagtgcatggctccgaggaccaggactttggcaactactactgttccgtgactccatgggtgaagtcaccaacaggttcctggcagaaggaggcagagatccactccaagcccgtttttataactgtgaagatggatgtgctgaacgccttcaagtatcccttgctgatcggcatcggtctgtccacggtcatcgggctcctgtcctgtctcatcgggtactgcagctcccactggtgttgtaagaaggaggttcaggagacacggcgcgagcgccgcaggctcatgtcgatggagatggactaggctggcccgggaggggagtgacagagggacgttctaggagcaattggggcaagaagaggacagtgatattttaaaacaaagtgtgttacactaaaaaccagtcctctctaatc

SEQ ID NO: 111499 - DNA, 418 bp, Homo sapiens
  misc_feature (1)...(418): n = a,t,c or g
ggggagaagccttataaatgcaatgactgtggcaaagcttttaatcgtagctcatggcttacccagcatcaaaaaattcacatgggatagaccacttacatataaatgtgtatatatgtgaataaacctacagccttaacttacttattttatatggaatcgtttatactgacaaacatgtagaatgttggtaaaggttcagaattgctctcaagaatatccaacnnnnnnnnnnnnnnnnnnnnnnnnnnnnnnnnnnnnnnnnnnnnnnnnnnnnnnnnnnnnnnnnnnnnnnnnnnnnnnnnnnnnnnnnnnnnnnnnnnnnnnnnnnnnnnnnnnnnnnnnnnnnnnnnnnnnnnnnnnnnnnnnnnnnnnnnnnnnnnnnnnnnnnnnnnnnnnnnnnnnnnnnnnnnnnnnn

SEQ ID NO: 111500 - DNA, 1178 bp, Homo sapiens
  misc_feature (1)...(1178): n = a,t,c or g
aaacgcataactaatgatgccagagaagatgaaatggaagagaacctgactcaagtgggcagtatcctgggaaatctaaaagacatggccctgaacataggcaatgagattgatgctcaaaatccacaaataaaacgaatcacagacaaggctgacaccaacagagatcgtattgatattgccaatgccagagcaaagaaactcattgacagctaaagctactgctggtcttctttatcatttattcacttccgtagctcctccttgaaagttattaccttttcagagtttaagttttcggttccacgctcttctaattgggagataatatggaagaagggccagagcagttacagccctccttcttttttgttttctgttgagggccgactgctgctctgccttccttctagtattttctttctcaattcatacgcttagattggttttcatatgtcatgtttagtgttttcatcctcctcatatacttcagcaggttcttttgctttcaagatttggaagcattgccaaagacagccatgaagaaggaagctgtagaggtgttttttgttgttggttattttcgctctttggggtgaggcgaaggacaggagataagaggttggttacctcagtaaaaacctttttgccacatatttttaaagttgcatagccacaacgaagatctaggtggatatagtttttgatttaagttgcagttatagccaatttaggctaatgcttggttttggagcttttatacacaacgtttttgttaggcatcacagttttgcaacctctgctccaaagagaaaaatagaatgagttttctttcnnnnnnnnnnnnnggaagccaaagcctcctttttttgcccaggttggagggcaataccgcaattggggctaattgaaacctcggcctccttggttaaagaatttctctggctttgccccctaaaaaattgggaataacgggcggggtgccccaccctgggtaatttttgtgatttttaagaaaaggcagggtttccccatgtgaacccgggtttggacctcgaaccttggaaacccccccccttggcccccccaagtaccgggaataacgggggggcccccgtggcccggcccgtttttttaagggggcctaaatttcggaaccttaaggggtccaaattggc

SEQ ID NO: 111501 - DNA, 442 bp, Homo sapiens
  misc_feature (1)...(442): n = a,t,c or g
cgtgtggtggaattccagaccccaagctatggagacttggatgactgtagtccaaagcacaggaactcctcccccaggatgcctcacctggctgtggcaacggacaaaactctggcaccatcctcagaacaggaacagcctgaggggctctggccacccctagcctcacctctacatcccctggaagtacaaggactcatctgtggtccctgcttctcctccctccctgaacaccttggctctgttcccaagcagctggacttccagagacatggctcagatcctggatttgcagggagttggggccactgaactccaagataaagacaccatgaggggactgaaggtgggcaaggtgagagttaaggatcttggggaggnnnnnnnnnnnnnnnnnnnnnnnnnnnnnnnnnnnnnnnnnnnnnnnnnnnnnnnnnnnnnn

SEQ ID NO: 111502 - DNA, 440 bp, Homo sapiens
  misc_feature (1)...(440): n = a,t,c or g
ctggatatcccgccacccactggacccacctgggccctgggggccaccttcatccgaaagttctacacagagtttgatcggcgtaacaaccgcattggcttcgccttggcccgctgaggccctctgccacccaggcaggccctgccttcagccctggcccagagctggaacactctctgagatgcccctctgcctgggcttatgccctcagatggagacattggatgtggagctcctgctggatgcgtgccctgacccctgcaccagcccttccctgctttgaggacaaagagaataaagacttcatgttcacannnnnnnnnnnngacaaaaaaataaaaaaaagnnnnnnnnnncaaggaagaaagtgnntttacacctaggccccggggagaaaccctctctacggccgattggtcctgttctactggtccctcccc

SEQ ID NO: 111503 - DNA, 453 bp, Homo sapiens
  misc_feature (1)...(453): n = a,t,c or g
cagtgtggtggaattccatcatggattatgaaagcctggagaaggccaaccatgaagaagtcttatcagctggcaaacaagctgcacagaaattggaacagtttgtctccattcttatggccagcattccactccctgacaaagccagttgacctgccttggagtcgtctggcatctcccacacaagacccaagtagctgctaccttctttggccccttgctggagtcatgtgcctctgtccttaggttgtagcagaaaggaaaagattcctgtccttcacctttcccactttcttctaccagacccttctggtgccagatccnnnnnnnnnnnnnnnnnnnnnnnnnnnnnnnatagtgagaccttggcgctacaaaataaagctgttctcattcctgttctttcttacacaagagctggagcccgtgccctaccacacatctgtggagatg

SEQ ID NO: 111504 - DNA, 490 bp, Homo sapiens
  misc_feature (1)...(490): n = a,t,c or g
ggtttgtttatgcagcactgtcctcctatgtttttggatagtctcacctcacccttaacagctagcagtacgtctgtcaccaccaccagctcccatgaaagcagtactcatgttagttcatccagcagcaggagtgagacaggggtcataaccagcagtggaagtaacattcctgacatcatctcattggactaaaggaggactcacttgattctgggaatcattcatcagaactgctttttcttggatctctagtctgtggaaacgttcnnnnnnnnnnnnnnnaaaaaattgggaatttatggaaagccaaagggatttttttgttttctggggggggaacacaaaaaactgcaccaagaaccaaatgacaggcagggattttttttaattatgcgtgactctcagcatcaaatacattcaaccatatctgaatcttcctgagaagaggatttcactttcatacgttaagggatggagcctaacaaca

SEQ ID NO: 111505 - DNA, 454 bp, Homo sapiens
  misc_feature (1)...(454): n = a,t,c or g
cacagcaggaagaagccaggcagcaggagaaggcacttccgagcctgggagggcaggtgggggccttcctgggcccctaagagtacagggatgcctgagcctgcagctgtggtttgggcagctgtagctgtgggaaagggggtcccagggctcctgtctgccccatggaggaggccccattctgcagctgcagtttgggtagctgcagctgcacctgggagagcaggactcctgcctgctccatggagtgtgcagcccaggccatgcctccctgctgcagctgggtgatgatagcagcaggttgtctggagccacggctgccatcaaaagtgatcaatgactggtgattgtcatgagtggtacaaggtcaagagataatcaggtctnnnnnnnnnnnnnnnnnnnnnnnnnnnnnnnnnnnnnnnnnnnnnnnnnnnnnnngaattccaacagc

SEQ ID NO: 111506 - DNA, 451 bp, Homo sapiens
  misc_feature (1)...(451): n = a,t,c or g
aggcgggaattagttacagaactcctcacactggtgaacaggaaagtttctcagcgccgagtggacttttttaaagacccaagtgcaattggaaagaagcaggttccctgttttgcctcaatgctaactaaaaagctgcatttctttccaaaatctaattaattaatagaggctatctaattttacactctgtattgnnnnnnnnnnnnnnnnnnnnnnnnnnnnnnnnnnnnnnnnnnnnnnnnnnnnnnnnnnnnnnnnnnnnnnnnnnnnnnnnnnnnnnnnnnnnnnnnnnnnnnnnnnnnnnnnnnnnnnnnnnnnnnnnnnnnnnnnnnnnnnnnnnnnnnnnnnnnnnnnnnnnnnnnnnnnnnnnnnnnnnnnnnnnnnnnnnnnnnnnnnnnnnnnnnnnnnnnnnnnnnnnnnnnnnnnnnnnnnnnnnnnnnnnnnnnnn

SEQ ID NO: 111507 - DNA, 352 bp, Homo sapiens
  misc_feature (1)...(352): n = a,t,c or g
agtacaggtgccctctgtgcctattcagcaattccctactgaagactggagcgctcaccctgccacggaagactggtctgcagctcccactgctcaagccactgaatgggtaggagcaaccactgactggtcttaagctgatcttgcataggctcttaagcagcatggaaaaatggttgacggaaaataaacatcagtttctnnnnnnnnnnnnnnnngggcgcccattttaaaagatacaagtttatgtccgcggtaatgcaactgaaaaccttttttatagggaccccaaaattcaattctctggccgccgtttaaacaccatcgggacggagaaaaccctgtggttacc

SEQ ID NO: 111508 - DNA, 536 bp, Homo sapiens
  misc_feature (1)...(536): n = a,t,c or g
atgcgccttgccctctatggggaacacgtgggagccttgcgagctctgagcctgcctctgacccaggtactttctcagcccagcaggacctgcaagggtaccctgcactgggcctcgggggcagtcctgagccttgaggagctttggaagacctcagcttcctcatcttacctcttgggggctttgaggggattaagagaatcaatgaaaagggcttaacatnnnnnnnnnnnnnnnnnnnnnnnnnnnnnnnnnnnnnnnnnnnnnnnnnnnnnnnnnnnnnnnnnnnnnnnnnnnnnnnnnnnnnnnnnnnnnnnnnnnnnnnnnnnnnnnnnnnnnnnnnnnnnnnnnnnnnnnnnnnnnnnnnnnnnnnnnnnnnnnnnnnnnnnnnnnnnnnnnnnnnnnnnnnnnnnnnnnnnnnnnnnnnnnnnnnnnnnnnnnnnnnnnnnnnnnnnnnnnnnnnnnnnnnnnnnnnnnnnnnnnnnnnnnnnnnnnnnnnnnnnnnnnnnnnnnnntgcctggcgttttagggtcct

SEQ ID NO: 111509 - DNA, 422 bp, Homo sapiens
  misc_feature (1)...(422): n = a,t,c or g
gtcatcactgaggaagagaagaatttcaaagccttcgctagtctccgtatggcccgtgccaacgcccggctcttcggcatacgggcaaaaagagccaaggaagccgcagaacaggatgttgaaaagaaaaaataaagccctcctggggacttggaatcagtcggcagtcataaannnnnnnnnnnnnnnnnnnnnnnnnnnnnnnnnnnnnnnnnnnnnnnnnnnnnnnnnnnnnnnnnnnnnnnnnnnnnnnnnnnnnnnnnnnnnnnnnnnnnnnnnnnnnnnnnnnnnnnnnnnnnnnnnnnnnnnnnnnnnnnnnnnnnnnnnnnnnnnnnnnnnnnnnnnnnnnnnnnnnnnnnnnnnnnnnnnnnnnnnnnnnnnnnnnnnnnnnnnnnnnnnnnnnnnnnnnnnngcgtgctgat

SEQ ID NO: 111510 - DNA, 422 bp, Homo sapiens
  misc_feature (1)...(422): n = a,t,c or g
cttctgcctcagcaaccagagaaagttgagcaaggaccgcgacagaaagacagcgattcgcagttaggaggtggccggcagcagccaggaggcagacgctgctgggggaggtggacgcccggggtgactgcagacagcccccaccttggacctgagctgggcaaggcccaccgcaagcatgcccccaggccagccctggctgcgagcggggccgagggacagacggacgtacagacaggcgccggcagcgggactctgcgctggccccagcacctgcccgggcccactggaactttctgcgctggcttttcttccggccactgtgtgatggcatcttgtgtttttgatatgataatataaagtctgaaaattttgtataattaaaaacaaaacagtatcttccnnnnnnnnnnnnnnngggg

SEQ ID NO: 111511 - DNA, 466 bp, Homo sapiens
  misc_feature (1)...(466): n = a,t,c or g
caagaacccttgcggagactgccccggaatttccgggtcgagctgaggaggccggctgcagccccaagacagagcgctactcctggcagtgcgtcaatcagagcgtcctgtgcggtgagtccccagcagcaccatgccacccaccccgagtatcccctgggcaccctggcatagccagatgacttccgtgcccctgttgcaataaccactgcctccaagtctccatagaccaccccttgggtatatctaatgtaagtgannnnnnnnnnnnnnnnnnnnnnnnnnnnnnnnnnnnnnnnnnnnnnnnnnnnnnnnnnnnnnnnnnnnnnnnnnnnnnnnnnnnnnnnnnnnnnnnnnnnnnnnnnnnnnnnnnnnnnnnnnnnnnnnnnnnnnnnnnnnnnnnnnnnnnnnnnnnnnnnnnnnnnnnnnnnnnnnnnnnnnnnnnnnnnnnnnnnnnnnnnnnnna

SEQ ID NO: 111512 - DNA, 470 bp, Homo sapiens
  misc_feature (1)...(470): n = a,t,c or g
aaatatgattggttttttgtcttaactgggtttctgctgcatcatttctcaatcatttttactcccttcagaatttcttggctctttgtgccagtaattactacaatggctgtatatttcataggaatatcaagggtttcatggttcaaacaggagatccaacaggtaagttattccattaaccaagatctaaggaactgaatgtatagcatgaagaagtgggtaaaagaagaggaattaaatacgtggagcttttgctttgatttgatttgtttaannnnnnnnnnnnnnnnnnnnnnnnnnnnnnnnnnnnnnnnnnnnnnnnnnnnnnnnnnnnnnnnnnnnnnnnnnnnnnnnnnnnnnnnnnnnnnnnnnnnnnnnnnnnnnnnnnnnnnnnnnnnnnnnnnnnnnnnnnnnnnccttgcccccacccacaactagccctgctgtgtgttntcccctccttgagt

SEQ ID NO: 111513 - DNA, 426 bp, Homo sapiens
  misc_feature (1)...(426): n = a,t,c or g
ttaaaaaagcccccccnnnnnnnnnnnnnnnnccaatgtaaaacggctgatttaaagacaaaactaaggaagtaagcgtgtgacacaagactggccaggggttcagcagggaggggggttcaggagggaggcggattcaggcaggtcccagttgctggggcccccacgccccctgtcctgcgtgggccaagcggggaaggaaggaggtgttggcagccctgcgcgtgcacaggctcggggtagaatgggctacccactctctctggccagcaaggcccctggaccccctgggcactcagcctctgggcctggccacaggtcagctccagcctctgcctcaatgctcagagaaactgaggcagagacacgtgggagggggcaggtcaggccccaaggctcctgcagtgatgacctcacctactttag

SEQ ID NO: 111514 - DNA, 439 bp, Homo sapiens
  misc_feature (1)...(439): n = a,t,c or g
ctgcagagccgctaccggcagatggaggaacgcatcacctgccccatctgcatcgacagccacatccgcctcgtgttccagtgcggccacggcgcatgcgccccctgcggctccgcgctcagcgcctgccccatctgccgccagcccatccgcgaccgcatccagatcttcgtgtgagccgcgccgtccgccgcgcccgagctgccttcgcgtgcccccgccctgtgttttataaaaagaaagattctcggaccaaaaatcaaaaaaacaaaaataacnnnnnnnnnnnnnnnngggggggcgctctaaagggattaaacttaccgccccgggcgtgtggatgtggatctttttttgaatgtcacgataaacaaaatggacggggcggttgttaaaaattgggacgtgagaaaacccctgctccaccccatataatgcg

SEQ ID NO: 111515 - DNA, 427 bp, Homo sapiens
  misc_feature (1)...(427): n = a,t,c or g
aggagggctttttcaccacccggaaggtgagcccccacagtggggtggtggccctcaccaagcctgtccccgagcccagggacttgctcctgaccgtcaagatggatctctctcgccacggcaccgtcagctcctttgtggccaagcttttcatctttgtgtctgcagagctctgagcactcgcttcgcgtcgcggggtctccctcctgttgctttcctaaccctgccctccggggcgttaataaagtcttagcaagcgtcccacacagtgaaaaaaaaatnnnnnnnnnnnnnngggggggccctttttaggggaccaagtttaacttcccggccctgccaagattaaactttttttttggggccgcaaaattaaattccctggcccgcgttttaaaacgctggaaccgggaaaaccccgggcgtg

SEQ ID NO: 111516 - DNA, 453 bp, Homo sapiens
  misc_feature (1)...(453): n = a,t,c or g
cgtaccggatctgacggttcgacccaagcgaccggaccctactgagctgaccctgctggagctaaagaggaggcttgtggcaggcggcaggaatggcaggactctatggcccaccccctcctctccttcttagcctgccaggcccacccaccagtctgagctgcttctgctgaggctggtctgcttgaagcctcccaggagaaagaagccaggtgggaatggagagagagaggaaggcaagnnnnnnnnnnnnnnnnnnnnnnnnnngagtggggtttactcagagccttagggtgggcatgagttgcggcgtgttttgttggagcaagggatgtgcatttagggcgctatgtgacggcgcgggtatatgaggggagtagcagtgtgtgaaaggtgtggagtttccaggcgcttggtttgtgtgtacggtgtgaaggtatatagctaggggtt

SEQ ID NO: 111517 - DNA, 410 bp, Homo sapiens
  misc_feature (1)...(410): n = a,t,c or g
ttctatgtccgttgttgtaagaagaaaacatcagctgcagagggtccagagctcgtgagcttgcaggtcctggatcaacacccagttgggacgagtgaccacagggatgccacacagctcggatttcagcctctgatgtcagctcttgggtccactggctccactgagggcgcctagactctacagccaggcggctggaattgaattccctgcctggatctcacaagcactttccctcttggtgcctcagtttcctgacctatgaaacagagaaaataaaagcacttatttattgttnnnnnnnnnnnnnnnnnnggggcggccgttttaaagaatccaggtttacgtacccgggctgtgcaaggaatagtttttatatggggccccctaaatccaattcacgggccgcg

SEQ ID NO: 111518 - DNA, 454 bp, Homo sapiens
  misc_feature (1)...(454): n = a,t,c or g
ttcccgggtcgacttcacgcgtcggaggaagggaggccagggccggcgggagaatgccaacaggaacctggccaggaaggagagcaaggaggcgggtgctggctctcgaagacgcaaggggcagcaacagcagcagcagcaagggacagtggggccactcacatctgcagggcctgcctagggacactgtccagcctccaggcccatgcagaaagagttcagtgctactctgcgtgattcaagctttcctgaactggaacgtcgggggcaaagcatacacacacactccaatccatccatgcatacacagacacaagacacacacgctcaaacccctgtccacatatacaaccatacatacttgcacatgtgtgttcatgnnnnnnnnnnnnnnnnnnnnnnnnnnnnnnnnnnnnnnnnnnnnnnnnnnnnnnnnnnntgaggccaccagaag

SEQ ID NO: 111519 - DNA, 438 bp, Homo sapiens
  misc_feature (1)...(438): n = a,t,c or g
gggtcgacccacgcgtccggtgcgggaaagagaccatggtgaccagcaccacagagtccagtcgctgcgagtacctcatggagctgatgacgccagccgcctgcccggagccaccgcctgaagcacccaccgaagacgaccatgacgagctctagctggatgggcgcacaggtgggcggggaggtggagtctcgtcggcctgccccagcaaggggaggcggcgggccctgaggaagatggacccacatggccactctatcaacctgtgtccccatgttccctgnnnnnnnnnnnnnnnnnnnnnnnnnnnnnnnnnnnnnnnnnnnnnnnnnnnnnnnnnnnnnnnnnnnnnnnnnnnnnnnnnnnnnnnnnnnnnnnnnnnnnnnnnnnnnnnnncgtctctactaanaatacccannannnnnnnnnnnnnnnnnn

SEQ ID NO: 111520 - DNA, 399 bp, Homo sapiens
cttcatgcacagaaatgcattgactggaaccgtaatgtgctgaagcgggagctgggcctggcagagagtgacatcgtggacattccccagctcttcttcctgaaaaacttctacgcggaagccttcttcccagacatggttaacatggtggtcttaggcaagtacctgggcatccccaagccctacgggcccatcatcaatggccgctgctgcctggaggagaaggtgcagtccctgctggagcctctgggcctgcactgcatcttcattgatgactacttgtcctaccacgagctgcagggggagatccactgtggcaccaacgtgcgcaggaagccctttcccttccaatggtggaacatggtgccctgagcctggccccacccggcattctttctg

SEQ ID NO: 111521 - DNA, 415 bp, Homo sapiens
  misc_feature (1)...(415): n = a,t,c or g
gctgtagtccccgggcagatgctgtggaccccgtgctatcagcctggcccctggggtcacagtcacagatacccggagccccaccccacagccccagccccctcgccacctggggaggctgagacagaagcagctgggccccccaaagtgcctgagcccagggcacggaggagcacaaatgcccagcagggacaatgtcacagcgtctcagcggccaggcagcaggacgcagagacctctgggaggttcccggggccagccctggccctcctcctccaggggccagccgtgggatgcagaccacactctccctccaggggccatctctggggctgaggcgggcggnggcggtgcccagctgcaagaccatgggatagggaaggcaggtgcttggtgccacgcagccctgcactgg

SEQ ID NO: 111522 - DNA, 414 bp, Homo sapiens
  misc_feature (1)...(414): n = a,t,c or g
cacaatcacaccccctgaccgctatgacagtctgggcttactggagctggaccagcggacccacttcccccagttctcctactcggccagcatccgcgagtgagcagtctgcccacgcagaggacgcacgctcgctgccatcaccgctgggtggttttttccccctaactttttacttagcctttttggtttgtgtccccacccccacctcctcaccccctttccagttcttcttcaggcccctcccagacgcaccccagcggcccctgcagcccctgcctccagcctccagcctcacctttgtgcccagactcgcatttggaagactccacctcccgcccaggcctgggctgttgggcggntggagattcangttttaatccacacaagccccaatgaggggtgaagcatggg

SEQ ID NO: 111523 - DNA, 369 bp, Homo sapiens
ttttttttttacatggagtctcactcctgttgcccaggctggagtgcaatggcgcaatctcagctcactgcaatgtctgcctcccgggttcaagcgattctcctgcctcagcctcccaagtagctgggattacaggcacctgccaccacgcctggctaattttcttgtatttttagtagagacaggatttcatcatgttgtccaggctggtctcaaactcctgacctcaggtgatccgcccgctttggcctcccaaagtgctgggattacaggtgtgagccaccgcacccggccaaaacaggcagttttaagctttaggtggacatgggactgaataatgttatcacatgggggttgaagggaaccaca

SEQ ID NO: 111524 - DNA, 272 bp, Homo sapiens
  misc_feature (1)...(272): n = a,t,c or g
tcccgggcaggcgtccaggacgccgctgaccaccctcaacacggatatcagcatcctgtccttgcaggcttctgaattcccttctgagttaatgtcaaatgacagcaaagcactgtgtggctgaataagcggtgttcatgatttcttttattctttgcnnnnnnnnnnnnnnnnnnnnttcacggaatcttttaagtgctgaacttatttttcaaccatttcacaaggaggacaagttgaatggacctttttnnnnnnnnnnnnnnnnnngg

SEQ ID NO: 111525 - DNA, 417 bp, Homo sapiens
  misc_feature (1)...(417): n = a,t,c or g
atgtgggctccaggcctttgcagaccgtagagaactcagttggcctctgctcctcccctcgacacagggacgcgctggatgccctgggcctgaagcgctactgctgccgccggatgctgcnnnnnnnnnnnnnnnnnnnnnnnnnnnnnnnnnnnnnnnnnnnnnnnnnnnnnnnnnnnnnnnnnnnnnnnnnnnnnnnnnnnnnnnnnnnnnnnnnnnnnnnnnnnnnnnnnnnnnnnnnnnnnnnnnnnnnnnnnnnnnnnnnnnncccctgctgggcattggtgcgcagcaaaaggcacttgaagctgcctctgaggttggggtccccagaggttatggtgatggcacagggtgggtgtcatcagggagcccagcccctggtactcagtggtctcagctcagtagttgggtgca

SEQ ID NO: 111526 - DNA, 415 bp, Homo sapiens
  misc_feature (1)...(415): n = a,t,c or g
gccatggtgcagacagaggatgagtaccagttctgttaccaggcggcactggagtacctcggaagctttgaccactatgcaacctaaagccatggtcccccccaggcccgacaccactggccccggatgcctctgcccctcccgggcggacctcctgaggcctggacccccagtgggcagggcaggaggtggcagcggcagcagctgtgtttctgcaccatttccgaggacgacgcagccccgacccctgtccagcgcggctcccgccaccctcaataaatgttgcttggagtggaannnnnnnnnnnnnnnnnnnnnnnnnnnnnnnnnnnnnnnnngggggggggccctttaaaaaaacccatttttaaaccccgggggggggaaggaaaattttttttaaagggcgcccaaa

SEQ ID NO: 111527 - DNA, 400 bp, Homo sapiens
  misc_feature (1)...(400): n = a,t,c or g
cccacgcgtccggacctggacaatgacttgtacttcgccctggatgagtgggccggctgcttcggcatcaagcagaaggatatcgacaaggatcttgtgatctaaatccactccttccacagtaccggattctctctttaaccctccccttcgtgtttcccccaatgtttaaaatgtttggatggtttgttgttctgcctggagacaaggtgctaacatagatttaagtgaatacattaacggtgctaaaaatgnnnnnnnnnnnnnngggggggccgttttaaagaaccaagtttaactaccccgggctggcaaggaaaaattttttttatggggcccccaaaatcaattccccggcccgcggtttaacaacgcgggaacgggaaaaccccggcggttc

SEQ ID NO: 111528 - DNA, 433 bp, Homo sapiens
  misc_feature (1)...(433): n = a,t,c or g
gccagtggtaccacatcacgcagtgctggtgcaggacactgccaccatcgcacgcagttctcttgcacagctcaggtctacacactccgcctccatctcaccccttgccttgtttcccacctccctctctgtgtctccccccgtggcttcagccacccaggtctccgggtcacaccaggcatattcctgcctcagggcctttgcactgctgttctctttcttcaaatgtcacattcccagggagggcttccctgaccacctataaaaatgnnnnnnnnnnnnnnnnnnnnnnnnnnnnnnnnnnnnnnnnnnnnnnnnnnnnnnnnnnnnnnnnnnnnnnnnnnnnnnnnnnnnnnnnnnnnnnnnnnnnnnnnnnnnnnnnnnnnnnnnnnnnnnnnnnnnnnnnnnnnnnnnnnnnnnnnnnnnnnnnnnn

SEQ ID NO: 111529 - DNA, 521 bp, Homo sapiens
gaaagccaagcccaagaaatgtgcccggcgtttcaccgactactgtgacctgaacaaagacaaggtcatttcactgcctgagctgaagggctgcctgggtgttagcaaagaaggacgcctcgtctaaggagcagaaaaccccaagggcaggtggagagtccagggaggcaggatggatcacccagacacctaaccttcagcgttgcccatggccctgccacatcccgtgtaacataagtggtgcccaccatgtttgcacttttaataactcttacttgcgtgttttgtttttggtttcattttaaaacaccaatatctaataccacagtgggaaaaggaaagggaagaaagactttattctctctcttattgtaagtttttggatctgctactgacaacttttagagggtttttgggggcgcgggggagggtgttgttggggctgagaagaaagagcatttatatgctgtatataaatatatatgtaaattgtatagttcttttgtccaggcaaaaaaaaa

SEQ ID NO: 111530 - DNA, 370 bp, Homo sapiens
  misc_feature (1)...(370): n = a,t,c or g
tggggttttgagactgcccttagagatagagaaacagacccaagaaatgtgctcaattgcaatgggccacatacctagatctccagatgtcatttcccctctcttattttaagttatgttaagattactaaaacaataaaagctcctaaaaaatcnnnnnnnnnnnnnnnnnnngggggggcccttttaaaagaaccaaattttactcccgggggttgggaaggtattannnnnnnnnnggggccccaaaatttaattcccggggcggggttttaaaacggggggaaggggaaaacccggggggtacccaaattaattgccttggaagaaaacccccttttccccggggggggnnnnnnnnnngaagcgg

SEQ ID NO: 111531 - DNA, 1093 bp, Homo sapiens
ccctgagcagaaggctctggtgattggtggagaggcttgtatgtggggagaatatgtggacaacacaaacctggtccccaggctctgctaagggttttcgggggggaggtggagggttgggcctgagagcaggagttctcccttagagacccaatcccatctagccacctctggactagtacccttctttcaggcctgagagagagcaggccgtgcaacgagccttctgaagatttgtgtgcaatattcactctccacatgacttccgtctatatccctccagctgccctttggtatgtgggatagggattgttaaccttacttcccagagagataatgaggcctggagaacataggtgagttgctcaagacccagcacaagcatccatgattcctgtaataaggcttccctctgctgttttcactgcagccttaccaagtatggttgggtgtgcaaagtttacattttaaggacctctgctgctgccactgtcattgtggttaatgatggctttaaggtttattcttattcccgtatctttgagagaggaagagagtgggattgctacccacattttaatgaaggtggagctgagccgtagaactctctgggagccatccaacctggctgtggctcataacaaggtattgatcacttcctttggcctgagtgagtcccagggtgcctagacaagaggtagcagcctgtggatgtccagcacctttgcagggaatacagggcccaatctggcacatgccccttttcctccaggcccagagcaggggctgttgccgaaaggctgtggagcaacaagttgacatctgacctgacatttgcctatgaacgtttgtcacacttccgctgtgaattgctgaggtaagcaagctgtggggccttcgcaaggcggagcaggccagatccagggctggggaaccccttagagagaggaagacaataattaacaatagctaacacttacagaggcttatagtcagccctcatccacggattcaaccaactgcgataaaaagtattcaggaaaaaaaaaatacaacaaaaaatggtacaaataaaaaatactgtataacaact

SEQ ID NO: 111532 - DNA, 428 bp, Homo sapiens
  misc_feature (1)...(428): n = a,t,c or g
agctggccaaatttcgcagtctcctgtgcacagcggagggtgaagcagcagcttttctggtgagcaatcaccgcccaccacagcctctaaagggccgcaaagtgagagcctctttccattaaaaattgtcaccaatgaactcccccaaacatggctgtggagagacaacaaaacaaaacaaagcacaaaagtctctgccaacaactcttttgtggaattctaatttataggaaacattttagtatgagcttcagtgtcacaaagaaaaccagnnnnnnnnnnnnnnnnnnnnnnnnnnnnnnnnnnnnnnnnnnnnnnnnnnnnnnnnnnnnnnnnnnnnnnnnnnnnnnnnnnnnnnnnnnnnnnnnnnnnnnnnnnnnnnnnnnnnnnnnnnnnnnnnnnnnnnnnnnnnnnnnnnnnnnnnnnnn

SEQ ID NO: 111533 - DNA, 402 bp, Homo sapiens
atccggtcccctgcagtgatagagggcttggtgcctatctgagtcctcgctgtccccgccatcccctgatctgtgcggctccagcctcgccccctccccacgtgcaccatacctggggagttcctggcccagggtatcctggggccaccctccctgcctccaaaacagggatccctggcaggctgtctttccacgcccctgagttcagagtcggggacccaggccaggtcgggagcacagccgctccccaaacccagcaaaccggcagagagccggtttcccagcagccggatccctgcaggagaggcctttgtgttttgttttgttttgttttttctcttttgagacagagtttcactctgtcgcccaggctggagtgcagtggtgtgatctcgctcgtgc

SEQ ID NO: 111534 - DNA, 412 bp, Homo sapiens
  misc_feature (1)...(412): n = a,t,c or g
tgctgctctgttactctttgctacactgagatatttgggtttagagaagcataaatctggcctacctacgcatctgggcacagtaccttcccttggacttatttgtaacctggattnnnnnnnnnnnnnnnnnnnnnnnnnnnnnnnnnnnnnnnnncaccctgttctcctgccgcattcccctagccgagatagtgaaaatagtannnnnnnnnnnnnnnnnnnnnnnnnnnnnnnnggctagtgcagtnnnnnnnnnnnnnnnnnnnnnnnnnnnnnnnnnnnnnnnnnnnnnnnnnnnnnnnnnnnnnnnnnnnnnnnnnnnnnnnnnnnnnnnnnnnnnnnnnnnnnnnnnnnnnnnnnnnnnnnnnnnnnnntggcccccttcagagaccatcctggacaacattgt

SEQ ID NO: 111535 - DNA, 443 bp, Homo sapiens
  misc_feature (1)...(443): n = a,t,c or g
tttttgaaggcagaaaataactttttaggccagaaaaactttgcccagggtttccccgggacccccttttcccttaagagttccccgaaaaaaaagggctttccttccaatgcccggggaagaaatttaaaacccggggggttaggggaggggggcccccccccgttttgcggtttgggaaacccaaaccccccaaggaaaaaacccaaattggaaggggggccttttaaagggaagnnnnnnnnnnaacccgttcaaaaaaaaagggccggggaatttaaaaaaaaacccggccccttaagttttttttagggggaaagcccggaccaaaaggtttttcaaaaagttttcccacccccnnnnnnnnnnnnnnnnnnnnnnnnnnnnnnnnnnnnnnnnnnnnnnnnnnnnnnnnnnnnnnnnnnnnnnnnnnnnnnnnnnnn

SEQ ID NO: 111536 - DNA, 830 bp, Homo sapiens
  misc_feature (1)...(830): n = a,t,c or g
caatagagggatgctaggtgtctgggatcggtgtggagacacggagaccaggtgctcagcccaggcacaacttcagcaggggatggcgctaggggacttggggatttctggtcaaccccacaagcaccactctgggcacaagcagggcactctgttcccctcccccttaagccaacaaccacagtgccaccaagctcacacctgtccttctcaggctggcatctcccccaccctgtgccccttttaatggttaccaggcccgcactgggggtcaattgacttcctccaatccccactcctccgaaaccccaggagacaaacagcccttccttggggaaacttgggaatcattctggcttaaacaacacctcctcctgctgctcactcccgctgagcccactctactgccccagactccgtttctaccacccgcatcctcactgggctcactgcaggcatgctgaacaaggggcctccaaccttctgccctcctgccaaaagatctggggagtgtgaggagagggtggcatcaggagctgctcaggcttggcggagggagcggcatgggcgatgtcactcagccccttcccggtccgcccgcttccctccttcatgatttccattaaagtctgttgttttgtgacnnnnnnnnnnnnnggggggggccttttaagagaaccaattttaatgcccgggggggggaaaggtaaaatttttttaagggggcccccaaaatcaaattccggggcccggggtttaaacagggggggaggggaaaaacccggggggtccccaatttaaacctcgttgaggaaaagcatgattgcctt

SEQ ID NO: 111537 - DNA, 408 bp, Homo sapiens
  misc_feature (1)...(408): n = a,t,c or g
nnnnnnnnnnnnnnnnnnnnnnnnnnnnnngaacagtgtctcatatcgtcatccacaagctgccaacagacccgtctccaggagaaaagggaaggaagaagcggaaggcaaggggcccactgacagcagaggaagagccccccaggaatcccctgccccgcccacagccgaggtgtgactccaggcccagaggacttcggagggccgggagaggcagggaggggaggagaggctccgaagagtcaggctgaatccttccaaacagtctcagtccccaggcgtgagtggccacagtgctgctgaacaatgcacttttgaattcaattaaagcgattatctgttgtgccaaataaattgtgtacagcatatatcctgtggcgctttacacctccaggctcattattccgt

SEQ ID NO: 111538 - DNA, 377 bp, Homo sapiens
ctgagacattcaccttccatgcagatatatgcacactttttgagaaggagagaccaattaagaaaccaactgcacttgttgagctcgtgaaacacaagcccaaggcaacaaaagagcaactgaaagctgttatggatgatttcgcagcttttgtaaagaagtgctgcaaggctgaccataaggagacctgctttgccgaggagggtaaaaaacttgttgctgcaagccaagctgccttatgcttataacatcacatttaaaagcatctcagcctaccatgagaataagagaaagaaaatgaagatcacaagcttattcatctgtttttctttttcgatggggagaggcgacaccctgtctaaaaaacataaattatt

SEQ ID NO: 111539 - DNA, 380 bp, Homo sapiens
caaacgctaccgtcccctgattgctctacccacccaggaccccgcccacgggggcgcccccccaaagatgggcagtaatcggaagtgagcaaaactgccgcatgtctgcagcccggcgccaccatcctgcaaccttctcctgaccacggacgtttccatcaggttccatcccgaacatctctcggttccacgtccccctggagcttatcctgacccagtccccgagccccgcctccccgaaacaggctactctcctcggccccctccatcgggctgaagaagcacagcagcatctttaaacatgtacaaaatcgattggatttaaacacccttcacataccctccccccaaattatgcccaaatatacgcacacataatg

SEQ ID NO: 111540 - DNA, 375 bp, Homo sapiens
caaacgctatcgtcctctgagtgctctacccacccatgaccccgaacaagagggcgcccccccaaagatgggcactagtcggaagtgagcaaaactggcgcaagtctgcaacccagcgccaccatcctgcaatctcctactgaccacggacggttcaatcaggttgcataccgaacaactctgggatccacgtccccctggagcttatactgacccaggctgcgagccccgcctcctcgaaacaggctactctccttgggccccttcatcgggctgaggaagcacagcagcatctttacacatgtacaaagtcgattgggtttaaacacccttcacatacggtggaggcaaattattctctaatatacgcacacg

SEQ ID NO: 111541 - DNA, 1775 bp, Homo sapiens
  misc_feature (1)...(1775): n = a,t,c or g
aacagggcgcagagaatgaaagacaaactgaccaaaggagatgatgattcatctaaacccattgtaagagagtcatggatgcatgaacttcctccagaaatgaaagactttggtcttggcccaaggacttttaagagaagagctgatgacacatctggagatcgatcaatctggacagatactccagctgatagggaaaggaaagctaagggaacacaagaagcaaggaagtcatccagtaagcaagatgaagcccatatattatcaggaagagataagagactggctgagcaggtatcttcatacaatgaatcaagaagatcagaatcttttatggacatacatcataaaaagttacagagtaaggctgctgaagacaaaaataagcctcaagagagaataccatttggccgtgataaagatctcaaggttaatcggtttgatgaagctcagaaaaaagccctaataaaaaaatctagagaactaaacaccagattttcacacggcaaaggcaatatgtttttataaggggatttccctgtgcaatgaagaaaagttgaagaatactctttgtccatctttatttctttgtttttggcttcttaagattagagattactttaatcttaaaaaacatacaaatttaccttgttctgtatgtccttttaaggtcatgtggaaacataaaacgaatgttttttatgtagaacagaatattctatgtgcctttagcttctgtggaagtatgggggaattatgggcttttcttcaaataattattttaagagggcttccattccccctgatttttgtggtgtctcacaagtaccctcttaaggtctggtcagggactgaccaccaaatctctaccacagcctgggacctccttgtgaaaatgatacctaacctgcgcgatagttagtgtgtttagtgcttcctgtgaatccatgactttcaaatttgttgttttttccctttaaactgcagccagtgaatacaaatttacttgaaaatagagggtatggggttttgcctgttttgtaatcagtttgcttgttttagcactcagggctttttatttgttatttaattttttaattgtttttaagtcagaaagatctctgggttatctcatgtgctaaggaaaaactatttttgctttttccaactttaatagttaggtatttctaggggagggcaatcaggataaggatatgccattaactgttagcattgtgaaatctggtaaggactcaaatctctgatctcaaccaaagctttctgagtcctggaactttgctttgggacaacgtttactttacccatttatatgctgtacttaacagtttgtagctaatttatggggtcatatcttttttttagctaatttacgggggtcatatcagtcatgaatagcctttttttaaaaatttaataatccctgaatacaaaaatggaaatggaaaatttataatcataacccccctaattgggagtattataagtttgtaatgctttaagcactgcctcttaagatgataaatttataagatgagaaattctaatttaaactatttaaactatttgtttaaataaatgcccaattcctataagttaatatttccttgcagggattaatcccaattgttccactagtattctagttttgatgagacacaaatttttgttgttgtctatttntgtttttttgagaggtggagtcttgctctgtcacccagggccgagatcacgncattgcattccagccctgggca

SEQ ID NO: 111542 - DNA, 288 bp, Homo sapiens
gagtctcctctgcagagaaagctttccagacagccaagactgcccgggccccgtgtgggggtgcctcccctgggggcaccctgtgggggggcaccctgcaccaccccacccgcatggcggtcctgaggacgggtcagataaacccacccacccccgggctcgggagcacagcgcctccccaagggttctgcaggaagacctgggcacagccaggccttagcgccaggctccgtgtggcggtcaattccaggtgctgtaaagccgactaacagggtacagggagcctta

SEQ ID NO: 111543 - DNA, 386 bp, Homo sapiens
  misc_feature (1)...(386): n = a,t,c or g
agaattccaccacaagaaagaagattcaggagtaagtcccaccttcaacaccttgtaagtacagattnnnnnnnnnnnnnncagtttaaacatgtaaaaaaggggactttttatgtagttggacttttagggctcaccattaacttgattataattgactaaaagaaaagaaaaccgaagactagggatctcactgttcaatttacaacttatgggaaagaactatggactaaaccaatgggaggtaaaaggaaagggttaataaaaatcacagcannnnnnnnnnnnnnnnnnnnnnnnnnnnnnnnnnnnnnnnnnnnnnnnnnnnnnnnnnnnnnnnnnnnnnnnnnnnnnnnnnnnnnnnnnnnnnnnnnnnnnnnnnnncc

SEQ ID NO: 111544 - DNA, 626 bp, Homo sapiens
ttctgtagagatgaggggagggggatctcattatgttacctagactggtcttgaactcctggcctcaagccattctcctacctcagcctcccaaagtgctggaattacaggcatgagccactgcacccagccttaagtttttaaattgagatcaaattcacacagcataatattcacccttttaaagtgtatagttgagtgacctgtagtatataaacaaaattgtacaacctttacccatgccacattttcattaccccaaatgacacagttcttttaagtttacatatatagcccatttcaatgtcctcatatacaatattgtttatttgtcatccttatttcacctctgggaatcacttaaactttgtctcattttttttctcttccatcaaatatcaattttggattcagatccagtttttttctttcaattatttctgccttttaaaataatactacctccttcctcccacaattcatttcagcttgttttagttccttgggttctatattttttcttcctagtattacaatatatgcacaaatattaggttataaaacttccaatacaacttttactgccactcacaggtttttcaattgttttcattttcatgtacatt

SEQ ID NO: 111545 - DNA, 808 bp, Homo sapiens
gcggccgcagacagacgcgcctctagcatagccgcgctgaggctcaaggccaaggagcacgcggcgcagctcacgcagctcaacatcctgccgggcaccagcacgggcaaggaggtgtgctaaaggcttgccctccacacccgcgccccgsggcgcggccccgaaaggtcacctcactcagcaccactcacgaccaawatggagacagaggmccagcacactcccgagacggcactgagagagcgcagccgccttcacagcagtctggatgcgggcatggcagacctcgggcgctccgggacgtggcacctcctcggctggctgtccacccgcccctgcccctgcccctgctactgccaacctcgctccaactccaacatccactctctcttgttcttactttcctgaaaatatcggggaggttttctcccccagacgcctgatattgaagtaaaaaatttaaaaagcccaacctcttcctcctgacaccccacttagcctttcttttctttctttctttctttcttttttttttttaaatagcattttggcgctcgaagttgatctccccagcgagggccccagcgtgaagccagggcccgggaagcaaatgcgagcctgtaagatagctaacagtgcacttaaaggaaaggggcgtcttgttctctgttctcttctttatcatacaccaaccaaggtttttatatcacaccacragggaaataatactctgctagakatatggactgttgaagtcaccacactgtgattattgattctgtacataccattgttattaaaaaaaaaa

SEQ ID NO: 111546 - DNA, 430 bp, Homo sapiens
attcggcacagagaaaggtttaaagacaaaaaacatctggataaattctcttcttatcatgtgaaaactgccttctttcacgtatgtacccagaaccctcaagacagtcagtgggaccgcaaagacctgggcctctgctttgataactgcgtgacatactttcttcagtgcctcaggacagaaaaacttgagaattattttattcctgaattcaatctattctctagcaacttaattgacaaaagaagtaaggaatttctgacaaagcaaattgaatatgaaagaaacaatgagtttccagtttttgatgaatttttgagattgtattttttagaaagatctaaggaactaggagtcaccctaaatcctgggagaatacaagaaaaatttgaaaaggggccagacgctgtggcttcacacctgttagttc

SEQ ID NO: 111547 - DNA, 671 bp, Homo sapiens
ttttttgtttcttatttatttatttatttatttgagaaggagagttactctgttgcccaggctggagtgcagtggagcaatcttgattcactgcaaccttggctcactgcaacctctgcctcttgggttcaagcgattcttctgcctcagactcctgaggagctgggaccacaggtgtgtgccaccacacccagccgatttttgtatttttagtagagatgggttttgctgcgttggtcaggctggtctcgaactcctgacctcaagtgatctgtccacctcagcctcccaaagggctgggatgacaggtgtgagccaccgtgctcagccacaaatcggtgtttctgtgaatcagccccaactgccaatttcatctcgaggacggcaggcaaaaagcggccagtggacattgtgatcacttgctggtgatgctttgctcaccataaagcaggcttgcagaagtaagacactcagatgtcaccaattatcctgtataacaccccccatacctatctcctttcattactttaagagaggaatctccgctagataaaagtcaccttaatagctgacaaatgtctttcctacctaatagataatgtattaataaagatcgagtctaagccaagaaacttgcagagttctctagttgttctcagtaataaaacaat

SEQ ID NO: 111548 - DNA, 402 bp, Homo sapiens
ttttttttttaagagatggggtcttgctttgttgcccaggctggtcttgaacttctgggctcaaatgatcctcccacctcagcctcccaaaatgctgggattaggtgtgcaccacacacctggcctaaagctcctattctataaaccagcatttggtttctttgaccttctttctatgctggataattttagaactgtatcctgaacatcataaatgttacattgtgaagatcctaaattctgttatttttctaaaatgagaatggttttgttgtaagaagcaattatctttgcttaacttgaactgttctgtttattgggcagcaactccagtttcagttcagatcttttgcccttcatttggctgctctgagtctgtgacacacaggaattattcagatt

SEQ ID NO: 111549 - DNA, 530 bp, Homo sapiens
tgtcacctaggctgaagtgctgtggaaattctagggtcactgcaaccttcacctcttaggttcaagcgattcttctgccttcccctcccaagtaggtgggactacagccactacgcctggctaattttttttgtttttgtagttttagtagagacagggtttcaccatgttggccaggctgttctcgaattcttgagctcaactgatctgcctgcctcagccttccaaagtgctgggattataggcataaagccactgcgcctgactaagataatttctttttatattagttgagggtcataaaacaaagtgaatgcttattaaaaaggtagaaaaaataaagtcattaatgcacacagaggctgaaggattgtgattttataggaaatgtaagtcataataggaatgattattactaacttcctaggtataccaacataccagtgcttacagatgtcttactaattcatgctgtgtgttacacactgtactctgtgtgtttatgtaataaatcctcatcacagccttat

SEQ ID NO: 111550 - DNA, 654 bp, Homo sapiens
  misc_feature (1)...(654): n = a,t,c or g
ataaagttcttcccagacaaggaaacatttagaaaaattatcaccactagattggacctacaggaaatgctcaaaggggtcttaaacatggaaacaaaaggtcattgctcaccatcacaacaacacattgaaatataaaactcacagttcatataaaataatcacacaaggaagaagagaaaaaaataaaatggcataacagaatttcatcaaactaccaagacaaaaaaaacagaaaaagagggaaacaatttataaaataactttgaaaacaatcagcaatatgacaggaacaaagcctcacatatcaatattaaccttgaatgtgtgactcccaaaaatctgagacaggtcccagttaatttagaaagtttattttgccaaggttgaggatgtgcacccatgacacagcctctggaagtcctgacaacatgtgcccaaggcagttcagagcacagtttggttgtatacattttaggggagacacggagacatcaattcaacatatgttaagggtggaacattgggtttgggtcttgggaaaggccagggacaagcccaaagccaggaggagggggtctttcccggggtccttagggttaggttaaggnggaccaattgggtttaccnttcttttttgagctttcttgattt

SEQ ID NO: 111551 - DNA, 354 bp, Homo sapiens
  misc_feature (1)...(354): n = a,t,c or g
gtgtaatttttattttttgcgagacacggttttggtctgtcatccttcctggaaagaaatggccaaaagatggctcccccacgccttcacgttttgggatcaaacagttttccttaataaatgggacctcaggtgcgttcccccacacctggttaaattaaaaaaaannnnnnnnnnnnnnnnnnnnnnnnnnnnnnnnnnnnnnnnnnnnnnnnnnnnnnnnnnnnnnnnnnnnnnnnnnnnnnnnnnnnnnnnnnnnnnnnnnnnnnnnnnnnnnnnnnnnnnnnnnnnnnnnnnngggtctcatctttttatgtctttttagatcactttaacaaggcaaaaaaaattcca

SEQ ID NO: 111552 - DNA, 405 bp, Homo sapiens
  misc_feature (1)...(405): n = a,t,c or g
ggcttggcggaatcagcggggaaagaagaccctgttgagcttgactctagtctggcacggtgaagagacatgagaggtggagatgctggcaacagggaggaccagatcaacaggcttattagaagaatgaactaaggtgtctaccatgattatttttctaagctggttggttaataaacagtacctgctctcanattgggnnnnnnnnnnnnnnnnnnnnnnnnnnnnnnncaaaaaaaagaagataaaaaaaacnnnnnnnnnnnnnnnnnnnnngnnnnnnnnnnnccgggcccccggcnnnnnnnnnnnnnggggggggttattttttnnnnnnnnnnncggcgttttaaaaaccnnnnnnnnnnnaaaacccgggggcccccccaaaaatagttgggggag

SEQ ID NO: 111553 - DNA, 758 bp, Homo sapiens
gaagcttccattggatgaaattttccaatccccatggaagacaccacggccagtagcagagatgcgtccaatggattccccccttggctgatggggtttacccaggtaacacaggcgtgtgcattaatatcctgtaagagggggtaattgaaaagaaaggaaaggtcaagtcccaatttctctgttgaaaggaacataatggaattaaagtcaaagcacattctcatttaatcaaaaatatgctaattaggagtgtgtgtatgaatgtatttaaggtatacttttaccaatagagacaagactcactttttcagctttctgttcctagaaaatacaataaaatatactatattttctgtttttttgtttgtttgtttgtttgtttgtttttgagacggagtttcactcttgttgcccaggctggagtgcaatggcgtgatcttggctcaccgcaacctccacctcccaggttcaagcaattctcctgcctcagcctccccagtagctgggattataggcatgcaccaccacgcccagataattttgtatttttagtagagacggggtttctacatgttgaggctggtcttgaactcctgacctcaggtgatccgcccgccttggcctcccaaagtgctgggattacaggtgtgagccaccgcgcccggtcaggagacttttattatagcttcaatctcatcacttgctaatggtctgttttggttttggatttcttcatgtttgaatcttggtaggtt

SEQ ID NO: 111554 - DNA, 328 bp, Homo sapiens
  misc_feature (1)...(328): n = a,t,c or g
gtgaacaaagattatgaagaaaccgagcttatcagcaccacagctaactatagggctgttggccccactgctgaggcgtgagtactgagggaacagggcatggttccctcagcatccgagagtcatgcaaatacaatgtgaactcttcctcttactttcctgccctgaagccagtttgacatagagagatgtcagattgatttgaaaggtgtgcagcctgatttaaaaccaaaccctgaacccttttaaagaacaataaaacatattttacacgccnnnnnnaannnnnnnnnnnnnnnnnnnnnnnnnnnnnnnnnnnnnnnnnnnn

SEQ ID NO: 111555 - DNA, 332 bp, Homo sapiens
  misc_feature (1)...(332): n = a,t,c or g
gtgaacaaagattatgaagaaaccgagcttatcagcaccacagctaactatagggctgttggccccactgctgaggcgtgagtactgagggaacagggcatggttccctcagcatccgagagtcatgcaaatacaatgggaactcttcctcttactttcctgccctgaagccagtttgacatagagagatgtcagattgatttgaaaggtgtgcagcctgatttaaaaccaaaccctgaacccttttaaagaacaataaaacatattttacacgccgcanaaaaaataaacacaaaaacttnnnnnnnnnnnnnnnntnnnnnnnnnnttag

SEQ ID NO: 111556 - DNA, 306 bp, Homo sapiens
tttttttttaagagatgaggatctcactatgttgcccaggctggtctcaaactcctgggctcaaaccatcctcccacttcagcctcccaaagggagcagcattcctcatctacttaatttcttatgagcaagcaattggaactactcctttcctttttcataaggagctgtgtcccttgagggaaggccacaggtgctgggaccctacagcctgggattcagaatctcaggccctcacttaccagctgtgtgggctgggtaaagttactctgtctgagccttggttttctcacctggaaaataggg

SEQ ID NO: 111557 - DNA, 336 bp, Homo sapiens
ccagggcccggttaaatttttctgttttttaacagagatggggtttcaccatgttgcccaggctggtctcgaactcttgagctcagacaatctgcccacatcggcctcccaaagtgctgagattacaggcgtgagtcactgcacccggccgcagggtcttttaaggcattgataatgtccaatttcttgactttactaggaggttcataggttgctttttattcattctttaaagcatacataaaaattttaggtaatcatttggagacatactggtttgcagtttttttaacaggcaaaggaagagtaaaaatccaaaaaggagttggctgggag

SEQ ID NO: 111558 - DNA, 385 bp, Homo sapiens
gaactcgtggcctcaagcaatcctcctgccgtggtctcctaaagtgctgggattacaagcatgagacaccatgcctaggcttacagctcctttaaactcagacaagcttataaattagcacaaagcaactggtaaaagtggtagaaaggtttttcaaaagataataacataaaatcctgctgcaatgctaataaatggtgtccaacaatttgtttacataaaataagggattgttttaaaattaatgaaattagtatggtggcttgattgcggagaggagtcaattgctaactgcatcttttcaaatccatggtatccttgtgttttaatgtggttgcatctaacgtcaaagattaggtaaaatttaagagataatagggtattt

SEQ ID NO: 111559 - DNA, 370 bp, Homo sapiens
agctgggaccacaggtgttcgccaccatcccaggctaatttttaaattttttgtacagatgtggttttgctacattgcccaggctggtcttgaactcctgggctcgagcaatcctcccgtctcagcctcccaaagtgctgggattacaggtgtgagctaccacgtccggccaagatctgcttcttctgaaaccatggcaagagaaagacagacagacttggacctactgcagggagggttaagtagcagcgggactcccatgcaagaagaaggaatgtcttccggagcctcatctgtctgttgggctggaggcagggcctttgtgaaggcgggtggtgctcagatcgcctctgggcccttcctccagccg

SEQ ID NO: 111560 - DNA, 395 bp, Homo sapiens
  misc_feature (1)...(395): n = a,t,c or g
gtctcatcaagtatggacatttaagagtgaatcagaccttcaactggaatacaagtaagtgacattgttctggggagtttctactatatcgaatctaaaaagacaatatagtcgtgtcatnnnnnnnnnnnnnnnnnnnnnnnnnnnnnnnnnnnnnnnnnnnnnnnnnnnnnnnnnnnnnnnnnnnnnnnnnnnnnnnnnnnnnnnnnnnnnnnnnnnnnnnnnnnnnnnnnnnnnnnnnnnnnnnnnnnnnnnnnnnnnnnnnnnnnnnnnnnnnnnnnnnnnnnnnnnnnnnnnnnnnnnnnnnnnnnnnnnnnnnnnnnnnnnnnnnnnnnnnnnnnnnnnnnnnnnnnnnnnnnnnnnnnnnnnnnnnnnnnnnnnnnnnnnnnnnnnnn

SEQ ID NO: 111561 - DNA, 759 bp, Homo sapiens
tttgtggtctttatctgtagcacggatactaaattttgtgggttcataggtcagctggatacagggcattttttgtgacaatttctggcattttttgaacaagacaaaattcttttacgaggtatattgcattgtacttggtacggctgagggaagtctgttgcccagctcttgcaatgcagacacatgccctgatatccagaattctgtaggataacatcacagattgtaatgctatcaggtgaaattataattttatagaattactttatttataggcagtggaggagacagaataatgtaactgcaactcatgtcttttttttctttttttttctttttttttgaggcagagcctcaccctgttgcccaggctggagtgcagtggcataatctcggctcacggcaacctctgcctcccaggttcaaacgattctcctgcctcagcctcctgagtagctgggaccacaggcacatgccaccacacccagctaatttttgtatttttagtagagatggggtttcaccatgttggccaggctggtctcgaactcctgaccttgtgatctgctggcctcagctcccaaagtcctgggattacaggtgagccaccactgtgcatgcgtatatgcagtgtcgttttaaacagggcatccacaatgatccagtcactacgtatatgatgaatatgcagatacaggaattatcaggacttccataatgatgaatattgtattgttgaggccatgtcgacgcggc

SEQ ID NO: 111562 - DNA, 466 bp, Homo sapiens
agagacagggtcttgttttgttgcccaggcaggggggcagtggctcgatctcagctcctgcaacctccacctcccaggttcaagcaattcttgtgcctcagcctcccaagtagctgggattacaggcatgtgccaccatgcccagcttatagctgaactttaaactggagacataaagttacacatgtcctggaaaatgtttggtttagggaaagttcagatatttcactgtgtaatgtagctgaatattttgattattcttgagatgttagatccataattctgttcatttctaacttaataactatatatcctcattcaataaatatttattcagttacatctaaacaaataatttgtgacagtttaaaagaaaaattccatttgttatcaaatagtttcaattaccagtacattttagtatataggagtgtgagcacaaacaaacatattaattgcttattgc

SEQ ID NO: 111563 - DNA, 606 bp, Homo sapiens
tttttttttgagatggggatctcagttgcccaggctggagttcactgtcacaaccacagctcactactgcctcaacgtcctgggcccaggcgatcctcctgtctcaacctccagcatagctggaaccacaggcacaggtcaccacatccagccgattttttatttttatttttgtagagactgggtctccctaatggtgcccaagttgggtctcgaacttctggcctcaagcaatcctcccatcttgacctcccaaagtgctgggattataggcctgagccactatgtccagccggtctgacatatttaaactgataaatgaaaaacctttttgtcctacaatactatacccaacaaaaataaacttcaaacaagaagtaaaaataaagacatccccagaaaaaaacaaaagctgaaggatttcatcaacaacagacctgcctacaagaaatgcaaaagagagttcttcaaattgaaagaaatgacattaatgagcaataagcaatcatctgaaggtacaaaactcattagtaatagtaaatacacaaaaaagacagaatattataaccctgtaattgtcatgtgtaaacgactcatatcttcaat

SEQ ID NO: 111564 - DNA, 429 bp, Homo sapiens
aagcgacccccgacgtcagaaccccaccactgccacccccagtagcttagctgggactacaagcgtaccatcacacccagccaatttttgtatttttagtagagatggagtctcaccatgttgcccaggctggtctcaaactcctgggctcaagcaatcctcccacgctggcctctcaaagtgctggaattacaggtgtgagccaccacacgcagccaaagtagccaattcttttatccttaagttacagtgaaaacccacaagaatttgtgaaaattactgaatacaatttcttcagctcagtatagacttcagtttttaatttttagttcaatctgtagatactcatttactaataataaacatacaaaaaagattttaagtagactcttaaatcttacagtgcaggccaggcgtgagcggtcgacc

SEQ ID NO: 111565 - DNA, 412 bp, Homo sapiens
  misc_feature (1)...(412): n = a,t,c or g
gaaaagatggaggacaggtaggcagagatgtaacggaaccatgttattttactcaaactaatctttgtcatctattttcatgtttctacccactctatgttttagagttggaatgtattgtgactgaaagttacctaattatttgacctatgcaagaatattgaaacatctcttggtattgatctatttcacaagtcagccaatttcttttttggatatctttttctattagaatatttttcatctctggacgtggtggttcatgcctgtaatcccagaactttgggaggccaagatggggaaatngcttgaacccaggagttagagcccagccctggcaaacatagtggagacttataaaaatccttgacttatttgaggtacacctgaataataaaattttaaaattctc

SEQ ID NO: 111566 - DNA, 350 bp, Homo sapiens
  misc_feature (1)...(350): n = a,t,c or g
actcttcctggaagagttcatccgaggagccaaaagcgacccgtccattgtgcgcctcctgcagtgcgacccgagcagtgccggccagttctgagccctgcgcccaccaatcgaattgtagagctgcttgtgttcccttttgattcttctttttaacaannnnnnnnnnnnnnngccaaacaatataaagggggaggccgccccctggggggtttgaggccccttcttcggggacgccttaagttttttttgtcggggatgcttcggggaaaggcccaaacccccagggtgtttggggaaaacatggacaaacttcgggggggtcattgttggaggattttaaaccgttt

SEQ ID NO: 111567 - DNA, 505 bp, Homo sapiens
gagacaaggtcttcctatgtcacctaggctggtctcaaaactcctgagctcaaggcatcttcctgcctcggtctccccaaatcctggaattactggcatgagccaccatgcccagcctggtattcttttccagaatactggacagaataaatgcttattttagtatcctatttttgttcatttctaatgtgggaaactctttttcttttttttgagacagagtctcactttgtcgtccaggctggagtgagacgcggtctcaaaaaaaagattagacttatttcttccttgaatttgcctgcaaagtcatcttggtcaagattttgcttttgctttataggacgatttttgattactgaattaaatttcctttatagttatagaactattcaagttctctacttcacttcagcaaattttggcatcatatatttctagaaatgttcccattcatccaactctttatatttaccccaaaaaaatttatacgtatttcttactagct

SEQ ID NO: 111568 - DNA, 623 bp, Homo sapiens
tttgtagagatggggaatctcactatgttgtccaacctgctcttaaattcctggcctcaagtgatccttctgtcttggcttctcaaagtgttgggattacagatgtgagccactgtgccccacctacctctatattttaatataaacaaacctcccaacgtttagcacccaactctcacacctgcaaaagtatccaaatgcaactggaacaggcgtgccccagagctggtgtgggcttggctgcgggcacctgcactggggctgagggtgaaatatggcactaaagaggacagacggatgctggagcagagccgggggacaggtgggtggtgggcatcccctggcggatgcagctatgctgcctccctttcctgggttttgtaggactaaagggcccgggcactctggggagaaatcttaaccgagggtcttcctagggactaaaagtgtttggagttttgatgccgttcgctgccttggccgagctccacatcggcaggaattctatcatggggctgtgaaatgttacagattaacttaaccactcggctaatggtttttgttttcttctttgtgctttaatttcccaaatttcacaatgaaaataggttatttaaaaaatc

SEQ ID NO: 111569 - DNA, 1447 bp, Homo sapiens
caacctctgcctcctgggttcaagcgaacctcctgcctcagcatcccaagtagctgggattacaggcacccaccaccatgcccaactaatttttgtatttttatagagatagggtttcaccgtgttggccaggctgatctcgaactcctgaccgcaagtgatccacccgcctcggtctcccaaagtgctgggattacagatgtgagccgccgcgcccagacagttctttcgttttaaacagttactcagtactaggatgcacccagtggtgagagtaagcatctttgactgatgacaggtcttgaggtggatagggggcgctttcagtattttgccattaaagcatagtatttgatggcaggttttttttggattggatggcaggggatcaaatttagggaagttctgatctgttaatttactacaagtttttgtataaaatgaaaactcgtattctacctatgtcttttctgtaaattattgagacaattgtgtatcatttttgttctgttaatgtggctgtagtacattgatttaccttcaatttgttacccacaacttgctgaaatacaccattattatttgttgtatgcaatactggatttattttgataacgtattgtttagattttgttctcatctatgttaatgaaagaaattggcctgtatttttacattcttgtaatatctttgcccaggttctataaaatgcaataataagcaaataaattactttgtttttgtataagtatgtataggattgagctctaaaaccaaaccattataatgataatttgggtagcttcaacctcaaattgaagagagtcttcactccaatcttcacttccacccttgggccttccctctctccatttaagagtagcaatagaacaataaaaaaaaatacgtctttcaaattaattgcagtaaaaacaaaagagtagtggggagagaaaaacaatccaatacatatttttctctcagaatagaaagaaaacacaaagagaaaatatgaacaatattaagcacttaaaggaagaggatgatttcttccagcttttccacactctctttatgcgccggaaccaacccaccttttgagtgagctgctatgactttggtagagaggtgcaatatgttttttgaaccagctataaaagaaattaagaggtacatgtgagggtagaaacaaattatcaaggatgagaatggcactggctgtcccatatggtatccaggagccaccaatgtctgttgagtacttcatacatgcctagtctgaattgagatgtgctcaatgtataaaatatataccagatttcaaatacctacttcaaaaaataatgtaaaatatctcactaataacttttcctttgtgtattgcaatgataatatgttggctctattggattaaataaagtatgttattcattttaaaaaaaaaaaa

SEQ ID NO: 111570 - DNA, 393 bp, Homo sapiens
  misc_feature (1)...(393): n = a,t,c or g
gattaacgttaaaggcattaatgatgtaaaagaactgattgaagaaaaggccgttaagatgggggtattaatgctccctggaaatgctttctacgtcgatagctcagctcctagcccttacttgagagcatccttctcttcagcttctccagaacagatggatgtggccttccaggtattagcacaacttataaaagaatctttatgaagaaannnnnnnnnnnnnnnnnnnnnnnnnnnnnnnnnnnnnnnnnnnnnnnnnnnnnnnnnnnnnnnnnnnnnnnnnnnnnnnnnnnnnnnnnnnnnnnnnnnnnnnnnnnnnnnnnnntcctttaaaataaaattcttaaactaaacatnnnnnnnnnnnnnnnnnnnggatttttatttagg

SEQ ID NO: 111571 - DNA, 356 bp, Homo sapiens
  misc_feature (1)...(356): n = a,t,c or g
aagaaaatgaacaagaaacaccagcaaaacaaaaggaaactagaaaagaaataaatgcagacactacnnnnnnnnnnnnnnnnnnnnnnnnnnnnnnnnnnnnnnnnnnnnnnnnnnnnnnnnnnnnnnnnnnngtccttgttccatggatccaatggaaggcgagtgtcaggatcacaccctgaagtggcattacaacaaggaggaacgggtttgccagcagttctggtgtggcagctgtggcggcaatgccaaccggtttgaaaccaaggaagaatgtgaggcttggtgtgtcccaatacagtaacagtacaagcagagccctgttactgttaaaggcagagcttttaatgctt

SEQ ID NO: 111572 - DNA, 377 bp, Homo sapiens
aataaaaataggtttcaccatgttggccaggctggtcttgaactcctgacctcaggtgatctgcctgcctcggcctcccaaagtgctgggattacaagcgtgatccaccacgcccggcctccattgctttctgttcccagtccccgacacacacatctaaaaaggcaagttcgacgagagccaggatttttatctgtcccgtttctggttgtatccctgacacctagaacagatgagagttcttgacacagagtatgaactccataaatatttttaggccgagcatggtggttcacgcctgtagtcccagcactttgggcggccaaggagggaggattgctttgaccccaggagtttaagacctgcctgggcaacaa

SEQ ID NO: 111573 - DNA, 435 bp, Homo sapiens
  misc_feature (1)...(435): n = a,t,c or g
gagagcagtgctgccaagctaaagaggaagtattggtggaaaaactgcaaggtgaattttcttgtcccctcctccatcttttcctgggcttccactggtagaaggcaagaaaaccctcagcttctacatttcttccctctaatggtgcaggatctctctgaccagcataacgcttgggaggaaatctggaaagcctcctcttgagattgcattacccagaattggccaccagggtaggctagagtatttagaaccgctatcagggaaaaagtgataccctgaggagtttggaatggttagttaaggagctttaccccaaaggagttgcctgcaaaaaatttcacctgtctcatcctcagacacacccaacatcagcacccacgcgtccgcggacgcgtgggcggacgcgtggatagatngagatnctgcagacgt

SEQ ID NO: 111574 - DNA, 391 bp, Homo sapiens
  misc_feature (1)...(391): n = a,t,c or g
agtaggggaagaagaggaaagccagcctgaagcctgtgtcatagatgatcgttctcctgacacgtagcagtgcaaaaactttcatgccnnnnnnnnnnnaaagaaaaaaaatggttcccaaggggctggtcaaagcccaaaccccgggccacccctcattgtctttggccaggacgttggtgaaacaaaacggacctggactactcagcccagcgctaagaaatatcgaacccagttttttccccccctggcctcccgaccaggggggacattttcccaaccagggttttaaccaaaattccacctgggaaaaccggccaaaccaaataaaacctcccccaaattatttccaaaagagggggactcaccgggccccccaaaggttaatggg

SEQ ID NO: 111575 - DNA, 449 bp, Homo sapiens
gggtatatacctagcaatgggattgctggatcatatagtggctctatttttagtttttttgagtaacctctaaactgttctccacagtggctgtattaatttacattagtctttatcttctgattctgttgtttgattcaattatcttattggggtggaaaaacagtaatattttaagtctattatgccttccatatttattagccaacattcttcaagaattttctttaaatgatttggttgtcctgaaacacaatttgtatagaaaaagcaaaataaatacttaacactttcctttaattgttaattttcacagtaaagaactgggtgtggtgtgtacctccaatagagactactaactctgggggacactttcagtttctggttctcataaatgagtacattttaaaacattcaatatttttcattccaccgaaattgttcttcta

SEQ ID NO: 111576 - DNA, 1896 bp, Homo sapiens
acgacgatttcgtgtgaggttgttgctccttcagcgcctatcgctggctcttggggcgcagagaggggccgcagtctccgcggctgcgtcgagctcccttgcagtcccctccatgttccccggcgccactactccccttcctaaggccgccgcttaccccggggtctatggaagtaatggaaggacccctcaacctggctcatcaacagagcagacgagcagaccgtttattagctgcaggcaaatacgaagaggctatttcttgtcacaaaaaggctgcagcatatctttctgaagccatgaagctgacacagtcagagcaggctcatctttcactggaattgcaaagggatagccatatgaaacagctcctcctcatccaagagagatggaaaagggcccagcgtgaagaaagattgaaagcccagcagaacacagacaaggatgcagctgcccatcttcagacatctcacaaaccctctgcagaggatgcagagggccagagtcccctttctcagaagtacagcccttccacagagaaatgcctgcctgagattcaggggatctttgacagggatccagacacactactttatttacttcagcaaaagagtgagccagcagagccatgtattggaagcaaagccccaaaagatgataaaacaattatagaggagcaggcaaccaaaattgcagatttgaagaggcatgtggaattccttgtggctgagaatgaaagattaaggaaagaaaataaacaactaaaggctgaaaaggccagacttctaaaaggtccaatagaaaaggagctggatgtagatgctgattttgtagaaacgtcagagttatggagcttgccaccacatgcagaaactgctacagcctcctcaacctggcagaagttcgcagcaaatactgggaaagccaaggacattccaatccccaatcttcctcccttggattttccatctccagaacttcctcttatggagctctctgaggatattctgaaaggatttatgaataattaaaatggaaggccacagaaaaggggaaaagaggaaataataacagtaatcgttaatccagcaaaaagaaatgaaaagggaaaaccacatagaagggtaatcccggaaatgcttcatctggtggactgtgggagcagaggcattgccaggacttgggaaacagtcactgtgaaatgcgctgcgtatctcattcactcacttcagctaatgattccgacttggcagacgctaaactcatggaggttcggtttctcctgatacaaaccaaatggctacctggaagaatttctttcaagcaacagttatttttcttatcttcagggttaaaatgtataaaagttatgtgtaattaatctataatgccataaatgataatgcaaaacctaaataatatggtcgccggaggggctgccttatatttgaaacatgctttctatcatgcattgactgtatgcattttgttaatgcacattctgtttgtttaaggtgtgtaagatacacacccttctagatgaaactatatgtgccacactttgcactactcataatgataacctcaagactatcagaagaaatatttaaatttccattttatgaagaaaggaaccaaattattatgctttttaaaacaaattaccagtttacataattaatcagggtgcattttaagttctaacttcgtttattgtataatgcatcatttgaaaataccaaggaggaaataccctttgtttttaatgatgcaagagtggacgtaatgctagttggcagtattttattgtaagaaatcaataaagtaattgtgttttatacctttgttgaacgtggttgatagttaaaaagcaaggcactgagtggcttctctgtg

SEQ ID NO: 111577 - DNA, 366 bp, Homo sapiens
ttttttttttgtatttttggtagagggggggagtttcaccatgttgcccagactggtcttgaactcctgagctcaagtgatccaccagcctcagcctcccaaagtgctgggaatacaggcatgagccacctagcccagcccattaatcttatataataaatcaaatctcctcaaaataaccttttgtctcccgtagtcactacacaggccacaaattccttcatctggtcagaaatgcagtcccccttcaagctatatcttgtctcataatggtttcaatgaactaaataaaagaccttaaaaattggccgggcatgatggtgggcgcctgtaattctggctgcttgggaggctgggacaggagaa

SEQ ID NO: 111578 - DNA, 426 bp, Homo sapiens
  misc_feature (1)...(426): n = a,t,c or g
ncaaacactctacagagttcgggagtgggatgactggaagggcatccatcctagggactatggcagccaacagagcatgggctgatcttcccacaaatgagagactgaagggtgcacacctcccacgccaagaaaaccatgcagtcctcatctccctgggcttccgcttcagctgtgtacaacgaaggcaaagatgctaaatcttgctttgctttcaataaagtgtccagtgattaaaaaaannnnnnnnnnctgagatgccttctatgttcagtcattctgcaacttgggctggaaaatgatactaattatttttggcttcattggagtaactactggccacttgaaaattaaannnnnnnnnnnnnnnnnnnnnnnnnnnnnnnnnnnnnnnnnnnnnnnnnnnnnnnnnnnnnnnnnnnnnnn

SEQ ID NO: 111579 - DNA, 432 bp, Homo sapiens
  misc_feature (1)...(432): n = a,t,c or g
accagaccatgccattctccagacttgccattgcacctaggacacaaaccagactcctccctccacctccaaggccgctgccttacccacctctccagcttcatcccaagtcaccatttcccttgattgctcttatctgcagtgggcctttgtgctttctgttacctgtgtgtggaatccccaccaccattaccaccaccaccaccagccttaccgtggctggcttcttctttaccaaaacatcttgaggaagctttctctgaacagtcctagctctgattttctctaggcagagcctttgcagtttccttcattgcactaactgccatcagattaactcatcagaagaannnnnnnnnnnnnnnnnnnnnnnnnnnnnnnnnnnnnnnnnnnnnnnnnnnnnccgccccttcttctttatttctaccctgg

SEQ ID NO: 111580 - DNA, 417 bp, Homo sapiens
  misc_feature (1)...(417): n = a,t,c or g
attccccccctttggaaggccaagggggggggtccccttggggcccggaattttaaaccccccggggccccatggggaaaccccccccctcttaaaaaacccaaaattaccccnnnnnnnnnnccccaccccttgttcccccctccccgggggggttaacccgaaaattccctttaaccccgggggccttggtttccctaaaccggaattcccccctttcctcccccccggggcaccaaaaggaacttttttttccnnnnnnnnnnnnnnnngaaagatattgttcaaaatggaaagttaaatgtaaaccgaccctgtacaaaccannnnnnnnnnnnnnnnnnnnnnnnnnnnnnnnnnnnnnnnnnnnnnnnnnnnnnnnnncgaaatcgtcgacccgggaatagcggaccggga

SEQ ID NO: 111581 - DNA, 417 bp, Homo sapiens
  misc_feature (1)...(417): n = a,t,c or g
gtcaatacatagagagagtgaagactgcgagtgccaaaaaaatgcagaaccctgaccttgcccacaagtcgaatagttctgcacccctcccccagcttccccgggagccggttcacgcaatccctattggtcagtctgcttattccagcacctgcctggcagtgataagggaatctccagaagacaagaaggtctgaaaggaggcggcctgggaaactgtgaggcccagaaggacagggttcgaagaggaaaaggaggagagaagcttcggagggatgaggtcgggcggttagggctaatagggacatggcttgccaggccggctggggaacagggaaaggagatctctggagggcccaggtgaggtgacagggtgagggccgcaggaaatcgtcgactagggaaaggggnaatcga

SEQ ID NO: 111582 - DNA, 452 bp, Homo sapiens
  misc_feature (1)...(452): n = a,t,c or g
caccccaaatgagaaggtgcccaagttctatgctgcggccatgaatgctggggccccgtctcgtgggattattgattcctgatccaagaagggtcctctggggttcttccaacaacctattttaataggcaaatcccaaaaacccaaaaaaaatnnnnnnnnnnccagtaaggataaaatttcccaaacaaagataatagcgccaaacatagtataaaacatgtgcccaactnnnnnnnnnnnnnnnnnnnnnnnnnnnnnnnnnnnnnnnnnnnnnnnnnnnnnnnnnnnnnnnnnnnnnnnnnnnnnnnnnnnnnnnnnnnnnnnnnnnnnnnnnnnnnnnnnnnnnnnnnnnnnnnnnnnnnnnnnnnnnnnnnnnnnnnnnnnnnnnnnnnnnnnnnnnnnnnnnnnnnnnnnnnnnnnnnnnnnnnnnnnnnnnnnnnnnnncgaaa

SEQ ID NO: 111583 - DNA, 393 bp, Homo sapiens
  misc_feature (1)...(393): n = a,t,c or g
aatacattggatgaatggatggatggatggatggatggatggatggatgggttcatgtgttcgtgctgtcactgggcccggaacatcctccccacacacctccacctgtggacatnnnnnnnnnnnnnnnnnnnnnnnnnnnnnnnnnnnntgtgtacacgttttcctgggccactctggtgtgggtgttgatggtgagggaggctgcatgtttgtggtggagcagagggtgcatgggaactctgtactgcctgcttgattttactgtgaacctaaaccttccctaaaaagtaaagtctattttaaaaagcgaagaaggacaagctgcgttaatggacatgcctaagaaaactagagtaaatgaagcaggaatagcacgaaatcgtcgacccg

SEQ ID NO: 111584 - DNA, 444 bp, Homo sapiens
ggtcgacgatttcgtgggaaatcagaaagcttcagtgattagagaacattctgaaggttctacaggcaaagtcatatgatgtcttgaatttgtgtgaaatacccgtgcaaagctggagagagaagtgagaacagaagaagggcagaatgttaattcccgttgtaggaggtgacgacactcagagagacctcgtcctggcctgcgtgcttcaggctgtgtttgaaattttccactatatgtaattttttaaatttgcagtttctttcttccttccttccttccttccttccttccttccttccttccttccttccctccttctttctttccttctttctttctttcttgagggagtctcactctgtcgcctaggctggagtgcagtgagccgagattgcaccattgcactacagcctgggcaatacagcgagactccgtctcaaa

SEQ ID NO: 111585 - DNA, 450 bp, Homo sapiens
  misc_feature (1)...(450): n = a,t,c or g
tttcgtggcaatgagcagaggaaccatgatcgtgggtgcagccactggaggcatcttgcttctgctggatgtggtcagccttgcatatgagtcaaagcacttgcttgagggggcaaagtcagagtcagctgaggagctgaagaagcgggctcaggagctggaggggaagctcaactttctcaccaagatccatgagatgctgcagccaggccaaggccaatgaccccagagcagtgcagccaccagggcagaaatgccgggcacaggccaggacaaaatgcagacnnnnnnnnnnnnnnnnnnnnggagaaggggcccccctttttcccccaggggggagggggggggttaaatctggggtaatggaaaactccccccccggggttaaaacctttttcgggcctaaatttccgggggaggtgggaataagggggattggccaaacccccg

SEQ ID NO: 111586 - DNA, 2003 bp, Homo sapiens
ggcacgagggaagagcaaaaggcggagctgtagccactgtagcagcaaggtctgtgacagcaaatcctacaagagcaaggagccccatgagttggtgggcagcagcccccaccgagaggctagtcctatgcctggtgctaaggaagctgggcagggcaaggatatgatggaagaggaagccccagaggagcgggagagcactgaggccacccagagcaggactgtcaggaccaccagaaagggagagatgcctgtttcaggattggcagtggggagcactttgccatcccctcgagaagtgactgttacagaacggctcctcctggatggcccaccacctcattcaccagagactcctcaatttccccccacaactggagctgtactgtacactgttaagagaaaccaggttgggcctgaggttcgctcctgccccaaggcatcccccagacttcagaaagagagggagggccaaaaggcagtgagtgagtcagaggctttgatgctggtctgggatgcatcaaaaactgagaaattgcctggtaccgtggaaccccctgcttccttcctgagtcctgtttcctcaaagaccagagatgcatggagaagacatgtgtccgggaaaccagacactcaagagagatggctgccctcaagcagagctcgggtgaagacaagagacaggacgtgccctgtccatgaatctccatcaggaattgacacctcagagacttctcccaaagcccctagagggggtttggctaaagacagtggaacacaggccaagggtccagagggggagcagcagccaaaggccgcagaagctacggtgtgtgccaacaacagcaaggtcagctccactggggaaaaggttgtcctgtggacaagggaagctgaccgtgtgatcctcaccatgtgccaggagcaaggggcacagccacagaccttcaacatcatctcccagcagctgggaaataagacccctgctgaggtttcccaccgttttcgagaactcatgcagctcttccacactgcctgtgaagccagctctgaggatgaggatgatgcaaccagtaccagcaatgcagaccagctgtctgaccatggggaccttctgtctgaagaggagctggatgaatgagactctgggaatcatctacacaggaccaaacccaacaggcgccctggcaccggggagggggtagttgtactctgcttgtacagtccttgagcccagtttacagatctggagagcaggaggccaggacaaggacaaaggctggaggatggagtaggacccaggggctctgccatcctaggcatcattcaaggtcttttatgaagactttacagatgtcctctgtaaatagcatcgagagtggagttcagctcctttctctacttttttttggtctgatggcacatatttattgttctgtggtctaatcacagtgtttctaaatgtaaaaagtgcatatgttggtgtagctagtcccgcgacattgagctcctctgcatgaagacactgggctcctgcatccagctgtttttattgcaaactagctcctttctcccacactgggaactttagtccacgaggctgtcaccaccctggtagcactgggccaggctttgtagctcctgcagcagctctgctacgtcatcgtgctccactccagcatccatgaagctggcccagcgccgcaagtcgagtttggtgaggtctctggccaaggcttccagggtctggtgcagggacgaagaggaacacagtgccccaaacactgggatgctctccactgccggtggactgcagcttgagaagaggtgggggtaaggaggagccaccctgcagggagtcagcagcagatgggaagaactcatgactccaggctgctgctgttgtaaatactgagccaagatttcttccccagtggtacatgcatgaagggcagagggtggaggtgtccctggggtgagctggcttgtgtggcatgctctgt

SEQ ID NO: 111587 - DNA, 466 bp, Homo sapiens
tttttctctttccttctttcttttctttgagacaggtatcactatgttgctcaggctggcctcaaactcctaatatcaagcagtcctcccgcctcagcctcccgagtagctgggagtacaggcacatgccaacacacctgacgtaacagtcactttaaccaaacatgacttggtgtacaaaaatgcaagcaggcaaaagaaatcatttaggaggtgaaatacataaattaatgatttaaagtttcatttattaattataggattatttgcaaatttctttaaataatttccccctcacatagtttaatgagaacttgatctcctcatgacttttcaggagcactctgttacatttcagcggaaaggccctctttgtcgaagatcatggccccctttgacacagatcatggccccagcagcagaaaagtggactcatcctgggtagaggggcaaaatcctatatcta

SEQ ID NO: 111588 - DNA, 231 bp, Homo sapiens
ggggctaacttctataacatataaagttcctgccatcatatgaagatgtgctggcttccccttcaccttctgccatgattgtaagttttctgaggcctccccagccatgcctcctgtacagcttctttcccaaaatgaggtgtctgtgggggaggcccctgtcgctccgtgtgccaagggtcctccgattgctagcacacagcggtgagcagagaaggtaggtgaggaact

SEQ ID NO: 111589 - DNA, 443 bp, Homo sapiens
  misc_feature (1)...(443): n = a,t,c or g
tccttgctgtttcggacgaggctggccatctgctcctccacgacggcctccaggcaccaccccaccatgcccagccatggactgaagcttattttgcagacaagggcatcacctttgatgtgtcggaggcacttgagtgaaagaattttggctcctaaagattttgcagaacagagatgacatgccagcccagactttcatatttaggtacccgcatgcaatgtatggctctacaatcctcagcttccaccaaggttgtaccattgcctcccagcgcctgacgcccctggcccgaggggacacactctgcaccaacctcactgggacacttttgccttcccgaaacactgatgagaccttctttggagtgcagtgggtgcgcccctgaccactgctgctgattagggnnnnnnnnnnnnnnnnnnnnnnnnnnnnagttcaag

SEQ ID NO: 111590 - DNA, 610 bp, Homo sapiens
tttcttttttttacggagtctcgctctgtcgcccaggctgaagtgcagcgatctcggcatactgcaacctccgcctcccgggttcaagcaattttcctgtctcagactccggagtagctgggactacaggcacaagccacgacacccggctaatttttttgtatttttagtagaaacggggtttcaccatattagtcaggctggtcttgaactcctgacctcaggtgatccgcccgcccgggcctcccaaagtgctggaattacaggcgtgagccaccgcacccggccgaaatcagtttcttaatcttaaactgagttcagtttaccaaggtgaagcttgagtgattactttaaatctaacaccagtttactagaagaacattcatttaaataggaaagcaatttggagttgcgtaaagcgagcaataatataacataaaaggcctttcgagttcagaatatgaagactcttaagcagatcatctcaattagtagtaccggggctttctcagctatgccattttaagggagggaaaaaaatccattacttcatctcctatttaaaaacaaaacaacagtttcatccaaaaaaatcagataggagttaaca

SEQ ID NO: 111591 - DNA, 500 bp, Homo sapiens
  misc_feature (1)...(500): n = a,t,c or g
cgtgtgccggaattcnnnnnnnnnnnnnnnnnnnnnnnnnnnnnnnnnnnnnnnnnnnnnnnnnnnnnnnnnnnnnnnnnnnnnnnnnnnnnnnnnnnnnnnnnnnnnnnnnnnnnnnnnnnnnnnnnnnnnnnnnnnnnnnnnnnnnnnnnnnnnnnnnnnnnnnnnnnnnnnnnnnnnntnnnnnnnnnnngctttataattatagagactgtaagtcttgggaaacctgggaatgcatagacaaaaggtgagannnnnnnnnnnnaatttaatcttcagggcctttacggaaaaaaggaggaggcctcccttagggtcccttgcatttgggaacaaaagggaatctcaaaccttgggagggggactctgacttttgaggaaaaggcccgtttgaaaaaaagggcaaatcccctttgggggatccaaaaggagcggcaattttaaagccttcggaggccaataaatttcactgcctaggctacaacagggatttttgg

SEQ ID NO: 111592 - DNA, 459 bp, Homo sapiens
  misc_feature (1)...(459): n = a,t,c or g
ccccnnnnnnnnnnnnnnnnnnnnnnnnnnnnnnnnnnnnnnnnnnnnnnnnncttgcatttttgtatcaatcaagggtctggtgatacgtgggcacaggacaattntgagttatttgtacaggagggctgtgcgtcctggaccatgaggaaaggcagacttgcagcttatctgctttttctttttgcttccccctggtcctaccagcctaactcgttttccctaattaggactccacaattaatatttctgttcatcaaatatttgtagagaatgcttgcaactttagctgtttcctcttcgattacaggtcctgcggtagactggtgggcacttggagtttgcttgtttgaatttctaacaggaattccccctttcaatgatgaaacaccacaccaagtattccagaatattctaaaagaggtgatttnnnnnccnnaaaagatgtcattgaatacg

SEQ ID NO: 111593 - DNA, 188 bp, Homo sapiens
ttttttttttttagtttcactcttgtcgtccaggccactcttgtcttgcctcactgcaacctctgcctcccgggttcaagcgattctcctgcctcagcctcctgagtagctgggattacaggggcctgccaccacattgggctaatttttgtatttttagtggagatggcgttcaccatgttggctag

SEQ ID NO: 111594 - DNA, 417 bp, Homo sapiens
  misc_feature (1)...(417): n = a,t,c or g
cctcatccagcgtggtggaattcccacaacccacaagtgtggcccaacccagaggtgtttgacccttcctgttttttaccgggttctgctcaacacagccacgctttcctgcccttctcaggaggatcaaggacaaatggaagaagaccattgctgatgcacatctgaaatcttctgaacacatttcccagtgaccccgaacactattatgaagtataccttcagtcacaaggtagtcannnnnnnnnnnnnnnnnnnnnnnnnnnnnnnnnnnnnnnnnnnnnnnnnnnnnnnnnnnnnnnnnnnnnnnnnnnnnnnnnnnnnnnnnnnnnnnnnnncagcatggtcaggtgctggtgagggctctcttcagcatagtattcacagctctggaggctgaacgtctaagatgagggg

SEQ ID NO: 111595 - DNA, 569 bp, Homo sapiens
ggccccccctttgcctgcctgccgtttggaagaaaccttgaagaaagcgtctcctgatgggtatgattgttattttgataatgtaggtggagagttttcaaacactgttatcggccagatgaagaaatttggaaggattgccatatgtggagccatctctacatataacagaaccggcccacttcccccaggcccacccccagagattgttatctatcaggagcttcgcatggaagcttttgtcgtctaccgctggcaaggagatgcccgccaaaaagctctgaaggacttgctgaaatgggtcttagagggtaaaatccagtacaaggaatatatcattgaaggatttgaaaacatgccagctgcatttatgggaatgctgaaaggagataatttggggaagacaatagtgaaagcatgaaaaagaggacacatggaatctggaggccatttagatgattagttaatttggttttcaccatttagcaaaaatgtatactaccttaaatgtcttaagaaatagtactcataatgagtttgagctacttaataaaatacatttaagtggg

SEQ ID NO: 111596 - DNA, 443 bp, Homo sapiens
gcattcgacaaacatggcaaccgactggggaggggcaagggctactatgatgcctatctgaagcgctgtttgcagcatcaggaagtgaagccctacaccctggcgttggctttcaaagaacagatttgcctccaggtcccagtgaatgaaaacgacatgaaggtagatgaagtcctttacgaagactcgtcaacagcttaaatctggattactacagccaaataatcagtgttttatatgagagtaaagcaaagtatgtgtatttttcccttgtcaaaaattagttgaaattgttcattaatgtgaatacagactgcattttaaaattgtaattatgaaataccttatataaaaccatctttaaaaaccaatagaagtgtgaatagtagaatattaattaaaatggaggctatcagcctgtgattttcagcttaacttcctgg

SEQ ID NO: 111597 - DNA, 405 bp, Homo sapiens
agatcataaaaaatacagttcccaaactagcctagattcaggaaattattctaatgaagatgaaagcgaaagtaaaacaagtgaagaactacagcaggactttgtatgaccagaaatgaactgtgtcaagtataaggtttttcagcaggagttacactgggagcctgaggtcctcaccttcctctcagtaactacagagaggacgtttccctgtttagggaaagaaaaaacatcttcagatcataggtcctaaaaatacgggcaagctcttaactatttaaaaatgaaattacaggcccgggcacggtggctcacacctgtaatcccagcactttgggaggctgaggcaggcagatcatgaggtcaagagatcgagaccagcctggccaacgtggtgaaacccct

SEQ ID NO: 111598 - DNA, 1659 bp, Homo sapiens
ggacttcggacgaggcctggccgagcgcttcctcacagcgggcaggacggaccccgcccacgacgtgcgggtggcggtggtgcagtacagcggcacgggccagcagcgcccagagcgggcatcgctgcagttcctgcagaactacacggccctggccagtgccgtcgatgccatggactttatcaacgacgccaccgacgtcaacgatgccctgggctatgtgacccgcttctaccgcgaggcctcgtctggcgctgccaagaagaggctgctgctcttctcagatggcaactcgcagggcgccacgcccgctgccatcgagaaggccgtgcaggaagcccaacgggcaggcatcgagatcttcgtggtggtcgtgggccgccaggtgaatgagccccacatccgcgtcctggtcaccggcaagacggccgagtacgacgtggcctacggcgagagccacctagtccgtgtccccagctaccaggccctgcttcgcggagtcttccaccagacagtctccaggaaggtggcgctgggctagcccaccctgcacgccggcaccaaaccctgtcctcccacccctccccactcatcactaaacagagtaaaatgtgatgcgaattttcccgaccaacctgattcgctagattttttttaaagggaaagctttaaaagccaggacacaatgctgctgcctgctttgtgcagggtcctccggggctcagccctgagttggcatcacctgcgcagggccctctggggctcagccctgagctagtgtcacctgcacagggccctctgaggctcagccctgagctggcgtaacctgtgcagggccctctggggctcatccctgagctggcctcacctgggatccccaccccgggctctcctgccctgccctcctgcccgccctccctcctgcctgcgcagctccttccctaggcacctctgtgctgcatcccaccagcctgagcaagacgccctctcggggcctgtgccgcactagcctccctctcctctgtccccatagctggtttttcccaccaatcctcacctaacagttactttacaattaaactcaaagcaagctcttctcctcagcttggggcagccattggcctctgtctcgttttgggaaaccaaggtcaggaggccgttgcagacataaatctcggcgactcggccccgtctccctgagggtcctgctggtgaccggcctggaccttggccctacagcccttgaggccgctgctgaccagcactgaccccgacctcagagagtactcgcaggggcgctggctgcactcaagaccctcgagattaacggtgctaaccccgtctgctcctccctcccgcagagactggggcctggactggacatgagagccccttggtgccacagagggctgtgtcttactagaaacaacgcaaacctctccttcctcagaatagtgatgtgttcgacgttttatcaaaggccccctttctatgttcatgttagttttgctccttctgtgtttttttctgaaccatatccatgatgctgacttttccaaagaaaggttttcactcctcccggaagggggcagtgccatttccaagggggactcctctcggggctcccgcccgcgttgtcctcgcgcccgaaccccgacg

SEQ ID NO: 111599 - DNA, 671 bp, Homo sapiens
  misc_feature (1)...(671): n = a,t,c or g
ctgggcctcactctttgggagggggctgttctgggaggggtgaaggaggaggtgttgacaatctcccctctgcttcaggggtccggccagtctctttctcagactgggagaagctggatgccgaggaggtggcccggggccagggcacggggaagcccagggagaagctggtggatcctcaggagatgctgcgcctcctgggccactgagcccagccccagccccggcccccagcagggaagggatgagtgttgggaggggaagggctgggtccgtctgagtgggactttgcacctctgctgatcccggccggccctggcttggaggcttggctgctcttccagcgtctctcctccctccttgagaaggtcgcccttgcgcgcaaggttttagctttcagcaactgaggtaaccttatggacaggtggaggtgtgggccgatctaaccccttacccatctctctactgctggactgtggagggtcaccaggttgggaacatgctggaaataaaacagctgcaaccccgnnnnnnnnnnnnnnnnnnnnnnnnnnnnnnncctgggggggggcccgggcccccaattcccccttatagggggcggtttaaaatttccggggccggggtttaaaaacgcggggaggggaaaaaccttggggttccccattttg

SEQ ID NO: 111600 - DNA, 529 bp, Homo sapiens
  misc_feature (1)...(529): n = a,t,c or g
tcctccgaggaaggctgctttgattatgcaggttctacaactgactgcagaccagattgccatgttgcctcctgagcaaaggcagagtatcctgattttaaaggaacaaatacagaaatccactggagcaccttgataggttttcaaaaatacctggcaagaaatctggaaattctataattttgttgaaatattgaaaaaagatgacctgcatcctaacccttgaatgactcaaatcagtgccaggtggaggactcccatcaccttctctcagaacaaaatcacttcattttattgtcttagtttgtatattttctgtgacttgaaataaactttgaacacaattttnnnnnnnnnnnnnnnntaaaaaaaaataaaaccttgggggggggcccgggcccccaattcccctttatgggggggggaataaaaattccggggcccgggttttaaaaacgcggggaggggaaaaacccgggggttccccaaattaaaccccttttgcaaaaaannnnnnntattntcttgc

SEQ ID NO: 111601 - DNA, 621 bp, Homo sapiens
  misc_feature (1)...(621): n = a,t,c or g
cgacccacgcgtccgcaactataacccaaaggaatttgaaagttgtattcagtattatttggaaaacaattggcttcaacatgagaaagctcctacagaagaagggaaaaaagagctgctgttcctaagtaacgcgaacccctcgctgctggagcggcactgtgcctacctctaagccaagatcacagcatgtgaggaagacagtggacatctgctttatgctggacccagtaagatgaggaagtcgggcagtacacaggaagaggagccaggcccttgtacctatgggattggacaggactgcagttggctctggacctgcattaaaatgggtttcactgtgaatgcgtgacaataagatattcccttgttcctaaaactttatatcagtttattggatgtggtttttcacatttaagataattatggctcttttcctaaaaaataaaatatctttctaaagtgttgtgttagattaataatatggaaggagtctttagattggccaaattgcatttctctgatattcctcttgttgcaggtcagaagagatcaattctacagaaatttccagtggttctgttgaggctntatggaattcagcatgtcaaaattcacagc

SEQ ID NO: 111602 - DNA, 376 bp, Homo sapiens
  misc_feature (1)...(376): n = a,t,c or g
gtcccatcgggaaattccgcacgagaagagcgtgagatggcctgaaagagtggtcccgccgcgaagctgagaggcttgtgaaataccgagaggccaatggccttcccatcatggaatccaactgcttcgaccccagcaagatccagctgccagaggatgagtgaccagttgctaagtggggctcaagaagcaccgccttccccaccccctgcctgccattctgacctcttctcagagcacctaattaaaggggctgaaagtctgnnnnnnnnnnnnnnnnnnnnnncctcgggggggggccgggaccccaattccccttataggggggggaataacaattcacgggccggggtttaacaacgccgggacgggaaaa

SEQ ID NO: 111603 - DNA, 401 bp, Homo sapiens
  misc_feature (1)...(401): n = a,t,c or g
ccccttcattgtggcgctgagcggcacctccgagatgctggccttggtcattggccacttcatctacagcagcctgttcccagttccctgaggcctctgggtcaagctttcatcagccccagcccccacactccaccaaagttctcatgcactatgcactcagaaaaatccaggcttattttttttactgattttttattctccagctttcagtgccaaagaggccatgctgagttaggtaggtgggcgctgcccagaaaatatatttcaataaaagagagaagcanaaaaaataagaaataaaaatccttgggggggggcccgggccccaatttccccttatgggggggggtttaaaatttcctgggccggggttttaaaaacggggggcggggaaaacc

SEQ ID NO: 111604 - DNA, 397 bp, Homo sapiens
tggggaacgtggggcagacattttatgttgcatccaaggctggagtgattgggctgacccagaccgcagcccgggagcttggacgacatgggatccgctgtaactctgtcctcccagggttcattgcaacacccatgacacagaaagtgccacagaaagtggcggacaagattactgaaatgatcccgatgggacacttgggggaccctgaggatgtggcagatgtggccgcattcttggcatctgaagatagtggatacatcacagggacctcagtggaagtcactggaggtcttttcatgtaactgcctcaaggaccctggactctgctcacccccccaccactctgtctggacttctgctgatgaggactctaagttcccaagatacaaaaggg

SEQ ID NO: 111605 - DNA, 456 bp, Homo sapiens
ggcttatctgggctttgtgttctacttgggttggcaatgtttgattgcactgggcatgtccttcctggactgtgggcatacgtgccatctgggattgacagctcagcctgaactctatcttctgaacaccatggacgctgactcacttgtgtctagatgactgacagcctgagagactctataagaacatgtttttctaagccctttttgtgccaggtgtcccgttaacgtctctgttagttcagaggtgagttttgttcagacgttttgaacaaaaggcaaagatttcctcatgggaagggtgttcaaaactgacagctataaatgtaggtcagagacccacccacctcataacagtcatacactcccagagttaaacgattggcctctgatggccacacacccctatgggcttgtgtcttggactctgggatttaaaagatatatatgtatata

SEQ ID NO: 111606 - DNA, 633 bp, Homo sapiens
  misc_feature (1)...(633): n = a,t,c or g
gggactcaggcaaccaaatacaattctgaagttgttgataagaagatagaagagtttctttctagctttgaggagaagattgagaacctcactgaagaggcattcaacacccaggtcacagctctcatcaagctgaaggagtgtgaggatacccaccttggggaggaggtggataggaactggaatgaagtggttacacagcagtacctctttgaccgccttgcccacgagattgaagcactgaagtcattctcaaaatcagacctggtcaactggttcaaggcccatagagggccaggaagtaaaatgctcagcgttcatgttgttggatatgggaagtatgaactggaagaggatggtaccccttctagtgaggattcaaattcttcttgtgaagtgatgcagctgacctacctgccaacctctcctctgctggcagattgtatcatccccattactgatatcagggctttcacaacaacactcaaccttctcccctaccataaaatagtcaaataaataaactgcagtcacgttggcctgaagcaatgtgtattttanaatgannnanannnnnnnnnnnnnnnnnnnnnnnnnnnnnnnnnnnggggggcccctttttttttaggggcc

SEQ ID NO: 111607 - DNA, 260 bp, Homo sapiens
tgcagccaagaaaaggatcgatgaggatgattttgctgatgaagaattaggagatgatttgcttccagaataatattcactttaatatttattaaaggaaagaaattgccttatgagatcatcctcatgttaaaccttggattaaatatctaacctgtaattattttttttcactgtcaaaacttaagtaagtgtattctattctgtatgtatgcatttaagttgtttttttcttttaaggaataaaaacaggtaaaact

SEQ ID NO: 111608 - DNA, 2338 bp, Homo sapiens
agtttatataaccttcctaagcacctggatgttgagatgctagatcaaccactacccacgggtcataatgggacagcagaagaagcgacttccgaagaagaggaagaagaagacgagatggctgaagatatagaagacttaaatcactatgagatgaaggaagaagagcctattagtgggaaaaagtcagaggatgaaggaattgaaaaagaaaatttggcaatattagagaaaattaggaagactcaaaggcaagaccatttaaatggtgcagtgtctgggtcagtgcaagcttcagatagacttatgaaagagctcagggacatatacagatcacagagttataaaacagggatttattcagtggaactcataaatgacagtttatatgactggcatgttaaactgcagaaggttgaccctgatagtcctttgcacagtgatcttcagatcttaaaagaaaaagaaggcatagaatatattttgcttaacttctcttttaaggataactttccatttgatcctccatttgttcgagtggtgttacctgttctctcaggagggtatgtattgggtggaggagcattatgtatggaacttctcacaaaacagggctggagcagtgcctactcaatagaatcggtcatcatgcaaataaatgccaccttagtcaaaggcaaagccagagtgcagtttggagcaaataagaatcaatataatctagcaagagcccaacaatcctataattccattgtacagatacatgagaaaaatggctggtacacccctccaaaggaagatggctaaatatgttgactgttgtatgtttggactaatgttgctttaaagaaaatctttccaacatgcagacaaaagctttgagtgcccctattacagcagtaccgaagatgttagttaatagatattttagtggataatctgtcatctgacatccagtataagttacagccttcgcattttgctcattttagatatcttggactgagcagtggggcctttactgtatttttcctgataaatacacatactggccactccttatctctttttcttgaaaagtgaactttttaaagcagccaagtcaacatcaggctactgaagttgaggctttagggtaactttcctatattgagcccatgggttacaaggatttgcaatatattgttccatttacagccaatacaggtttaatcgatgttcaatattggtttaggaaatttaaggccttctaaatcataatagctctttcatgtctaaaaccattttatgatattgccaaaatgtgataggaaacctactcattaaattgttaaactttttaatgactatgtgaagatatgaattgtttcctgaagataatactcttaattgagttgtattgtacttcttaggcaaagcagtgtaaaactgtatcaattaaggcttgtgagtagtgatttccactggggcatcagagtcttggctgggctgaatctgctgcttgttggttcagtgtttcttatgaacaagagccacagtacagagcttcaagttatttaaaatactaagtcatcttacgtttccattttattaacgggatgttgcaatcgtttgtaaactaataaacttataaagtgattggcacaaagactccttgagcaaaagctgtgcagttaagtacaaaaagatacttaatttggagactcttacagtaatttttgccatgtcaaaacaatggcttttacattgaaagattaatagaaactctacatatgttaatttttttatagaacctgactcaaatcaaggtactctccattttattgccttacctgaatcagtcctttttggttggtaatagatttttttatacacccacgtttgatttaaaagtaaattctagttcttaagcacttttaacaagaaatccagaagcacatttttctgcacaaacaagttacaaagttcaaaagtgtttcttgtgcattagctttgagattcagtttttaactttgtaaaccacatctgagagacttgtcatttctacattgtgtgtgtttaatttcttttgattccattttggttaagagagcagtaaatagattttctggtattcttgttcacttgattacatttgtataaagttctgattgccagttgctcagataacaagtgacaaggcagaattctttaaatcagtaaagttccttaagcctaaggctaaatcttgaatacattgttgaattctttaatatcctgatggcaagcagactgatagctgcacatttggcatgctttgtttaatggattttatttttaattgcagatttatttggca

SEQ ID NO: 111609 - DNA, 391 bp, Homo sapiens
  misc_feature (1)...(391): n = a,t,c or g
ggagagattttcaagtctcagtgtgagatattcttcttcttcttcnnnnnnnnnnnnnnnngggaaggggggtcaaatttttttcccccggcgggaggccaagggaaaaaactgggttcaaaaaaaccccccccttgggggttaagggaaatttccgggcccggccccccaaagggggtgaaatggaagctggtgcccccacgcccggcaaatttggggtttttaaaaaaaagggggaatcccctggggggggagggggggcccaaacccccaacccgagggggaccccctgcctgggccccccaaaggggcgggaataaaggggtaaacccggtgccccggccaaatttctccttttttcctnnnnnnnnnnngggtggggggaaaccct

SEQ ID NO: 111610 - DNA, 395 bp, Homo sapiens
  misc_feature (1)...(395): n = a,t,c or g
agcgagcaaccaagtggcttttgggagaggaaactttagattccttgttttcaacactgatgactggacattatctttaactatgcaaactggtcttcctgctggcacatactgtgatgtcatttctggagataaaattaatggcaactgcccaggcattaaaaactacgtttctgatgaaggcaaagctcatttttctattattaactctgctgaagatacatttattgcagttcatgctgaatctaaattgttcaatttaaaattaaatgcagatccgcaaagcnnnnnnnnnnnntagggccgcctgctttaaaagagaccgggttaatgtgcgcgtgccgccgacatttaatctcttctaagggggccccaaaaacatctaccgtggccgg

SEQ ID NO: 111611 - DNA, 379 bp, Homo sapiens
gcttctccccgcggtttgtcactgatccgcagggcccggaagggccttcgtcttacccgggatccacctctcccctcatcttccctgcctacctcttcatcccaccttctgtccttggagaaactccctcctcctcgctgcctgccgggcttcggagtgactcggcagagacagaggcacaggggctgccctgctgctcaccggtccactcatctgcctggtcttctggagctgaggactcgggaaaccatgcaattgaggcaagccttgggctgctttagaggcgctgacatccgaggagacttctcctgggaggtccaacagccgagcttagcccaccgggctctgggaaagacccgactgaggctaaagccgcccc

SEQ ID NO: 111612 - DNA, 426 bp, Homo sapiens
ggcacgagactgaagaaacaattccaggagctctgggaaatggcacctacaaaggggaggactgctccccttgcacagcctagcccttcccctggtggcctggattctggtcccaaagcaattctgaaagccagtgtggtaaactagagagagcagcaaaaacaccagtcttgcctgagtctttctccagcatttccagtacatctatcaaaatcatcaagtcttggccgggaacacagacagggtgtctacccaagaagcctcacctatccccaacttagaatttgctacttattttaaagacttggtcagtgactgtaaactctatgaaaccagaaaccgaatctgcctcttgctgggatctctaaaagtgtctgataagcatcttaaagtcactcaattcctgaactaatcaatatatatgtt

SEQ ID NO: 111613 - DNA, 1834 bp, Homo sapiens
  misc_feature (1)...(1834): n = a,t,c or g
cgtggatatatggtctgtgggatgcattatgggagaaatggttcgccacaaaatcctctttccaggaagggactatattgaccagtggaataaggtaattgaacaactaggaacaccatgtccagaattcatgaagaaattgcaacccacagtaagaaactatgtggagaatcggcccaagtatgcgggactcaccttccccaaactcttcccagattccctcttcccagcggactccgagcacaataaactcaaagccagccaagccagggacttgttgtcaaagatgctagtgattgacccagcaaaaagaatatcagtggacgacgccttacagcatccctacatcaacgtctggtatgacccagccgaagtggaggcgcctccacctcagatatatgacaagcagttggatgaaagagaacacacaattgaagaatggaaagaacttatctacaaggaagtaatgaattcagaagaaaagactaaaaatggtgtagtaaaaggacagccttctccttcaggtgcagcagtgaacagcagtgagagtctccctccatcctcgtctgtcaatgacatctcctccatgtccaccgaccagaccctggcatctgacactgacagcagcctggaagcctcggcaggacccctgggttgttgcaggtgactagccgcctgcctgcgaaacccagcgttcttcaggagatgatgtgatggnnnnnnnnnnnnnnnnnnnnnnnnnnnnnnnnnnnnnnnnnnnnnnnnncatcaagaaaacagcaagggagagaatccaagcctaaaattaaataaatctttcagcctgcttcttccccagggttctgtattgcagctaagctcaaatgtatatttaacttctagttgctcttgctttggtcttcttccaatgatgcttactacagaaagcaaatcagacacaattagagaagccttttccataaagtgtaattttaatggctgcaaaaccggcaacctgtaactgcccttttaaatggcatgacaaggtgtgcagtggccccatccagcatgtgtgtgtctctatcttgcatctacctgctccttggcctagtcagatggatgtagatacagatccgcatgtgtctgtattcatacagcactacttacttagagatgctactgtcagtgtcctcaaggctctaccaagacataatgcactggggtaccacatggtccatttcatgtgatctattactctgacataaacccatctgtaatatattgccagtatataagctgtttagtttgttaattgattaaactgtatgtcttataagaaaacatgtaaagggggaatatatggggggagtgagctctctcagacccttgaagatgtagcttccaaatttgaatggattaaatggcacctgtataccaatttgtagaaagaacatatgtgatacttatgtaaagtgtggggggagtgggtaacagttttcaggcacaaaatggtttggccttcagaaggcaggtgtgaataaaagctgagagtcttttctgtgacagtaaagagtaggagagactggagggtagtgtgtggtgtggactaagactgaaaggaggttattacccagatactaggagacactggtgtccctgttttagagatttggctctatacccatttgtcatttctcaattactggtcacaacaagaggccactggagaaagtggcaggtggtgaagcaaggttattgtgtgtgcttttgatgataagaatctctctctggaactgagcagaattgcctccatgtgaattccttcaacaaacaaatgagcctgcctagactactt

SEQ ID NO: 111614 - DNA, 1202 bp, Homo sapiens
  misc_feature (1)...(1202): n = a,t,c or g
ggtgggcgggggtagcaggaagaatgtctcagggctatgtgagactggcaggagaagataagactttatgcctgagctcagtcgtttagttcctggtgtatgtgcttttgaatgtttatgttcataaagtcaccattttctgtttcctcttcgggaatgtttttactaacatgagtggctattcagagtattgcaatagatgagctgcttttaaatttgctttaagtcaggtgttcaaggttttctttggacagctcccaaggtagaaatggaagactctagacactatatgaagaaaaagatcaggaaagctctcctcttctttggtcttaggggatgttttgtttttagtgtttccatcctggtgaatgtctccatagccttcacttcttatgtttgttatacagagactcatgtttttctagatgcagagtttttatccacaaggaaacagttcttaacaccacacagtaaccactctcaatatttcttgcataagttcatgggatcagagactagagctaagtcaggctgttttgctacatgggattgttttggtcaccaagtgtacaagcagtggtggtctgtggtcgcctgcacataggccaggaggacagtgtgtgtcatgactgaaactctcctttgtctctgtgtgtggcaggtctggcagacccatctgcgttaacacaagcggttgctgcctaccaaggctgtcattttataggcatgcctgaatgtgaggtaaagtaatcagctcatttcttgcaaatcacttcttttctctctcgtgctctgtccctttgtagatttgaataaatgtccctccttcaccattggtgtattggacccactgagtatgctgcttggctttggaattccaattgtagactcttagactcctagagagggaaaccttctgtgtcaacgaggtcatgtttcaaactgttctcgggattccggggttcagagcacatgctccatatgttccagggagcagaaaggttaaaggagctgaacagcaaagcctctgcaagttcgcccccagagcagcttcatattcatctcttttatatattgggggcttaagaaaaatttaatgtagtaaaaagtccttcagttnnnnnnnnnnntgaaaaccactcacctggtttgcctctcgtttcacctcatgagaatttcttctgtctgtcgtaggtggttat

SEQ ID NO: 111615 - DNA, 419 bp, Homo sapiens
aatgagcctggcagtaatataatattacagatttttttcaatttttgtcaggcaaatttttgtatttttggtagagaccagggtttccccacgttgcccaggctggtctcgaacttctgggttcaagtgatccacccgccttggccttccaaagtgctaggattacaggcatgagccaccgtgcctggccttcattgctactttaatttgcatttcctatctataagtgagtttgagcatttattcatacattttttggctacccagatgtgttcttatgtgaattttttattcatattatttagctttatttctcaattgttttgttttttctccttctggtcagtttgtatcagtcctttgttactgaaattaattctctgccctcattttccattttgcaatattttttccgtgcc

SEQ ID NO: 111616 - DNA, 803 bp, Homo sapiens
cgagcacccacccgcttcgtggatgatgaggagctagcgtatgtgattcagcggtaccgggaggtgcacgacatgcttcacaccctgctggggatgcccaccaacatcctgggggagatcgtggtgaaatggtttgaggctgtccagactggcctgcccatgtgcatcctgggtgcattctttggaccgatccgacttggcgctcagagcctgcaagtgctggtctcggagttgatcccatgggccgttcagaacgggcgcagagccccatgtgtcctcaacctgtactatgagcggcgctgggagcagtccctgagggctctgcgggaggagctgggcattacagcaccacccatgcacgtccagggcttggcctgagctcctgagccagcggggcctggcctacctcccccatcccctgcttcccttggaggcagagggctcccttgactacctttgttcctcttctttgaacactgacccttggacaacatttatcataatttgtcataaccactgctgagtggccttgaggacgaaccccgcagggagcaagcagtacagtggcattcccagggggaccagcagctacccaaggagaaccatgcatgaacagtatcagtcgtctgggctcatgctgggatgtcgcagtgctcctgttgcaactcctcccagccagccaggtttgctgggggccaggctgggtgtcctcacaggagtgagggctacacccaattccaaaagcctgagaagagagaagtggagggggaggcgagtgtgtgaataaaggctcccatcaggtc

SEQ ID NO: 111617 - DNA, 478 bp, Homo sapiens
ttttgtagagatggaggtctcactgtgttgtcccagctggtctctagcttctggcctcgggggatcctcccgccttggcctcccaaggtagtggaattacaggcatgagcactgacccctgctgagccaggctgttttcaacattcaatggtcattgactatctttggcgtttaggagggccctccagggaccagggcgtaggggcatcagtcaccccgccctcacaccccaacctgcagccacacttggttcaatcccactgtctagcccgtctgactcagtagcccctcccgagggagcagggctaagcaaagcttgtttccccacatgcaaggcactgcaggccattctattctgggccttctcatccttcataaagtgaggaggcctgaacagggctccccactagccccgagagcacgcaattcctgaagatttccaggattttcttaatatcagttatggcttacggttatg

SEQ ID NO: 111618 - DNA, 374 bp, Homo sapiens
  misc_feature (1)...(374): n = a,t,c or g
actctccctggaagagttcatccgaggagccaaaagcgacccgtccattgtgcgcctcctgcagtgcgacccgagcagtgccggccagttctgagccctgcgcccaccaatcgaattgtagagctgcttgtgttcccttttgattcttctttttaacaannnnnnnnnnnnnnngccaaacaatataaagggggaggccgccccttggggggtctgaggccctttcttcggggaccctttaagttttttttgggggggatgcttcggggaaaggcccaaacccccagggggtttggggaaaccttgaacaaacttcggggggttaattgttggaggattttaaaccgttactataatttttttttatttaaagc

SEQ ID NO: 111619 - DNA, 338 bp, Homo sapiens
ttctattccaagaacttttataagattttgtctttgtattcttcagagtttaacaactcctttgtggatgcattgggttctgatgaggactctggaaatgaggatgtttttgatatggagtacacagaagctgaagctgaggaactgaaaagaaatgctgaggtaattgttttcattcctgagtacagttggtcaaattcagtgtcactcttcccactctttacttcaaaggccccactttcagtgtccactgcaggttcattttggccctttcagtagccattagatggtctcattttctcttgtcatttgctgttcatttttcacatacaagattt

SEQ ID NO: 111620 - DNA, 375 bp, Homo sapiens
  misc_feature (1)...(375): n = a,t,c or g
gaatcagtcagattggaggctggtaagaggagcatggaggatcagggcaccgaggagtggggtgttttaaccaaggttcctgaattcacgtcggaggaccactgaaggttcttcagctagagaatgtcatgaataannnnnnnnnnnnnngaaaactttgaccctcgggctggggggcagggtcgcaacctgggttccttgaaacctccacctccgggattaaagcgattctggggctttagttttgggaggagttggaaccacaggcccccgtcttttacccgggttattttttgtttttttaaaaaaaagaggttttaactttgttgcccaggtgtgccctaacctcctgagctaagggaacccacctccccg

SEQ ID NO: 111621 - DNA, 1249 bp, Homo sapiens
  misc_feature (1)...(1249): n = a,t,c or g
ccaagctcgtaatgagactatagcaaggcggctgtgggacgtcagttgtgacctgctgggcctcccaatagactaacaggcagtgccagttggacccaagagaagactgcagcagactacacagtacttcttgtcaaaatgattctccttcaaggttttcaaaacctttagcacaaagagagcaaaaccttccagccttgcctgcttggtgtccagttaaaactcagtgtactgccagattcgtctaaatgtctgtcatgtccagatttactttgcttctgttactgccagagttactagagatatcataataggataagaagaccctcatatgacctgcacagctcattttccttctgaaagaaactactacctaggagaatctaagctatagcagggatgatttatgcaaatttgaactagcttctttgttcacaattcagttcctcccaaccaaccagtcttcacttcaagagggccacactgcaacctcagcttaacatgaataacaaagactggctcaggagcagggcttnnnnnnnnnnnnnnnnnnnnnnnnnnnnnnnnnnnnnnnnnnnnnnnnnnnnnnnnnnnnnnnnnnnnnnnnnnnnnnnnnnngtgtatatctttgtgtgtcttcctgtttatgtgtgccaagggagtattttcacaaagttcaaaacagccacaataatcagagatggagcaaaccagtgccatccagtctttatgcaaatgaaatgctgcaaagggaagcagattctgtatatgttggtaactacccaccaagagcacatgggtagcagggaagaagtaaaaaaagagaaggagaatactggaagataatgcacaaaatgaagggactagttaaggattaactagccctttaaggattaactagttaaggattaatagcaaaagatattaaatatgctaacatagctatggaggaattgagggcaagcacccaggactgatgaggtcttaacaaaaaccagtgcatatctttgtgtggcttcctggttatgcgtgccaagggagtattttcacaaagttcataacagccacagtaatcagagatggagcaaaccagtgccatccagtctttatgcaaatgaaatgctgcaagggaagcagattctgtatatgttggtaactacccacgccgagccctatgcagtctcnnnnnnnnnnnnnnnnnntttttttttagggggccgaaggttttttccttttaaggggggtaaac

SEQ ID NO: 111622 - DNA, 409 bp, Homo sapiens
agtacttttccctcaagaaggaagtcttgatccctccctatgagctgtttaaagttataaatatgagctaccacccaagaggagactggttgcagttgaggtcaactgggaacctgagcacatataactgtcagctgctaaaagcttccagcaagaaatgcatccctgatcctatagctattgcatctctctcctttttgaccagcgtcatcatcttttccaaaagcagagtataaagaaatcttgtggctccttttatttaaaaaaaatatttaaataaaatcttttttattggccttttggctagaaatggacatttattttccaggaaggatgatcccatcatacttctgctgaaaccagcgcatggccccctctttgctaattatcttatgcctttccttggacg

SEQ ID NO: 111623 - DNA, 891 bp, Homo sapiens
ataatttgctctctgatcgtgatttaaagaaaaagctaaaagagcatggattatctattcaaggaaataaacaacagctcattaaaaggcaccaagaatttgtacacatgtacaatgcccaatgcgatgctttgcatcctaaatcagctgctgaaatagttcaagaaatcgaaaatatagagaagactaggatgcgtcttgaagctagtaaactcaatgaaagtgtaatggtttttacaaaggaccaaacagaaaaggaaatagatgaaatccacagtaaatatcgtaaaaaacataagagtgaatttcagcttctggtggatcaggctagaaaaggatacaagaaaattgctggaatgtcacaaaaaacagtaacaataacaaaagaagatgaatctacagaaaagctatcttctgtatgcagtgggacaggaagataatatgacctcagtaacaaaccacttttctcaatcaaagctggactccccagaggaattggaacctgacagagaagaggattcttctagctgtattgatattcaagaagttctttcttcatcagaatcagattcatgcaatagttccagttcagacatcataagagatcttttataagaagaggaagcctggggaagcatcacataaaaacgatcttcaagacacagaaataagtccaaggacagaatcgccgcacaagagccgctggaaagtgctgaggattggaaccaaggaaacaaggcgtaatagggaattaatgtggggctttttgctggactttttcaaatgcattgattagaataccgtacttttgggtttgccacagataggttttctcttttattaaattgccccagggaaagtggcttaatttcttaattttttacgggttag

SEQ ID NO: 111624 - DNA, 574 bp, Homo sapiens
ttggtcataatctaaggaaatataatgttcagtgtcagtaactttaattatgtctctcttttaggttaagctgaatgaacgaataatagccacttcacagggactcctgatccgctctgttcagggttctgaccaaggactttatcactgcattgctacagaaaatagtttcaagcagaccatagccaagatcaacttcaaagttttagattcagaaatggtggctgttgtgacggacaaatggtccccgtggacctgggccagctctgtgagggctttacccttccacccgaaggacatcatgggggcattcagccactcagaaatgcagatgattaaccaatactgcaaagacactcggcagcaacatcagcagggagatgaatcacagaaaatgagaggggactatggcaagttaaaggccctcatcaatagtcggaaaagtagaaacaggaggaatcagttgccagagtcataatattttcttatgtgggtcttatgcttccattaacaaatgctctgtcttcaatgatcaaattttgagcaaagaaacttgtgctttaccaaggggaat

SEQ ID NO: 111625 - DNA, 393 bp, Homo sapiens
  misc_feature (1)...(393): n = a,t,c or g
ggcaagccccagctccacatagtgacacagtaccggaagggcaaggattctctgtgtgcccagggaaagtggttttatgataggaaggacagtggcttatagtagtgtgtctgnnnnnnnnnnnnnnnnnnnnnnnnnnnnnnnnnnnnnnnnnnnnccgtgnnnnnnnnnnnnnnnnnnnnnnnnnnnnnnnnnnnnnnnnnnnnnnnnnnnnnnnnnnnnnnnnnnnnnnnnnnnnnnnnnnnnnnnnnnnnnnnnnnnnnnnnnnnnnnnnnnnnnnnnnnnnnnnnnnnnnnnnnnnnnnnnnnnnnnnnnnnnnnnnnnnnnnnnnnnnnnnnnntgttctgtttttgtcctatcagagtgcccttttttcaatcctccctgcccttt

SEQ ID NO: 111626 - DNA, 398 bp, Homo sapiens
ccctatcctgttcaaacaatttgagcagaatgacttaaggtttggaggtcaggatgttgatggagacaggatggaaatcattgaactggcaaatcatccttattttgttggggtccagttccatcctgagttttcttctaggccgatgaagccttcccctccgtatctggggctgttacttgcagcaactgggaacctgaatgcctacttgcaacagggttgcaaactgtcttccagtgatagatacagtgatgccagtgatgacagcttttcagagccaaggatagctgagttggaaataagctgaaatgaatacatgactgggaataatggggactgcctgtgaggcctctgaaataattgaaggcaagatgaaggaactatctgaagagatcact

SEQ ID NO: 111627 - DNA, 398 bp, Homo sapiens
  misc_feature (1)...(398): n = a,t,c or g
gtggtgaaggactggtactcgggccgcagcgacgctgggtgcctctacaagctcaccgctgagctactgtccgagcacgataacgtgctggctgagttcaccagcggtcatgcggcagagccccaagacagtgacggccgcggctggatggagatattccacaccttcaccgactacgggccgggcgtgcgattcgttcgcttcgagcacggggggcaggactccgtctactgcaagggctggttcggtgcccggatgaccaacaacagcgcgagggtagaaccctgagcgaacctgcctccactctcccccagctgcctggaggggcaaaggtcgagggtagataggccttatcttagtccatagcgtgctcaccttgcccaagccacacatactcn

SEQ ID NO: 111628 - DNA, 406 bp, Homo sapiens
ggcattattattgggaccatcttcatcatcaagggagtgcgcagaagcaatgcatcagaacgcagggggcctctgtaaggcacatggaggtgatggtgtttcttacagagaagatcactgaagaaacttctgctttaatgactttacaaagctggcaatattacaatccttgacctcagtgaaagcagccatcttcagcgttttccagccctatagccaccccaagtgtggttatgcctcctcgattgctccgtactctaacatctagctggcttccctgtctattgccttttcctgtatctattttcctctatttcctatcattttattatcaccatgcaatgcctctggaataaaacatacaggagtctgtctctgctatggaatgccccatggggcatctctt

SEQ ID NO: 111629 - DNA, 608 bp, Homo sapiens
tcgctccatatccttctctgttgtcatcagaagataacgctgatgatgaggtggacacacgaccagcctccttctgggagacatcatagtgctagtactatgtcaaagcaacagtccacactttgtccaatggttttttcactgcctgacctttaaaaggccatcgatattctttgctcttgccaaaattgcactattataggacttgtattgttatttaaattactggattctaaggaatttcttatctgacagagcatcagaaccagaggcttggtcccacaggccacggaccaatggcctgcagccgtgacaacactcctgtcatattggagtccaaaacttgaattctgggttgaattttttaaaaatcaggtaccacttgatttcatatgggaaattgaagcaggaaatattgagggcttcttgatcacagaaaactcagaagagatagtaatgctcaggacaggagcggcagccccagaacaggccactcatttagaattctagtgtttcaaaacacttttgtgtgttggatggtcaataacatttttcattactgagggtgtcattcacccattaggtaaacattcccttttaaatgtttg

SEQ ID NO: 111630 - DNA, 764 bp, Homo sapiens
gaggattaggaggttttggtttaggtttctttcgcggaagctatggaagtagcagctttggtgggagttatggaggcagctttggagggggcagtttcggaggtggcagctccggcggcggcagcagctccggcggcggatacggcggcggcagctccagcggaggccacaagtcctcctcttccgggtccgtgggcgagtcttcatctaagggaccaagatactaacaaaaccagagtaatcaagacaattattgaagaggtggcgcccgacggtagagttctttcatctatggttgaatcagaaaccaagaaacactactattaaactgcatcaagaggaaagagtctcccttcacacagaccattatttacagatgcatggaaaacaaagtctccaagaaaacacttctgtcttgatggtctatggaaatagaccttgaaaataaggtgtctacaaggtgttttgtggtttctgtatttcttcttttcactttaccagaaagtgttctttaatggaaagaaaaacaactttctgttctcatttactaatgaatttcaataaactttcttactgatgcaaactatcccaatttgtcagaatttatctttacttaagtacataatactctttaaaattaaagattagtaacccatagcagttgaaggttgatgtatccagaaattcggaagacagaactattgtcatgccttttctaagttttttaatcatgtatgttcagaccaccgtcagtaaattcactg

SEQ ID NO: 111631 - DNA, 520 bp, Homo sapiens
cagagatcttctcactgaagtactggatccgttacaagcgtcagggagctgcgcgcttccaccgggtggggcccattgaagccacgtccttcatcctcagggctgtgcggccccgagccaggtactacgtccaagtggcggctcaggacctcacagactacggggaactgagtgactggagtctccccgccactgccacaatgagcctgggcaagtagcaagggcttcccgctgcctccagacagcacctgggtcctcgccaccctaagccccgggacacctgttggagggcggatgggatctgcctagcctgggctggagtccttgctttgctgctgctgagctgccgggcaacctcagatgaccgacttttccctttgagcctcagtttctctagctgagaaatggagatgtactactctctcctttacctttacctttaccacagtgcagggctgactgaactgtcactgtgagatattttttattgtttaattagaaaagaattgttgttgggctg

SEQ ID NO: 111632 - DNA, 345 bp, Homo sapiens
  misc_feature (1)...(345): n = a,t,c or g
aggggttataatccccaccttcaattaatttggatatttgtgaggtcttgaatcctaacttaagccngcaatacagccccaggccnggttccaactataaatactaaactccacacacacacacacacacacacacacacacacacacacacacgaatgggtttgaacagaaaaggcatgctgttttctggactgatgtaaatattatttacttcagcttctagtgttatttctgtctctgtcattcttttacacacccaggttttactttacttaaaaattaaaagacccctcgaagaagtgatgtgacccactgtaaagaaacaaacagttaacagaatgagg

SEQ ID NO: 111633 - DNA, 629 bp, Homo sapiens
  misc_feature (1)...(629): n = a,t,c or g
ggaaagcgtacccaattgctagaatctgaagcaactgctctgagagtgttaggagaggtacaaagaagcactgcaaactcaggtgagtaggactgaaactagaagaaaaggtcggatgttggaaaggacagcaggagacacttgtgggactcagaagggcgtgaggatatggcagaggccccagtgagtgtccctgggcctctgtctgaggcagattaatacccacaaaaagtgggacaatccagattctcaaggttgccaggaatttctgtgaaaggccaaggggatggggaggcacgtgataaatttataagattctttttttaaagctctcgcaattcataaagggagctacacttaactttgaactcaagaaaataaaccacaagagagaaatgaaatgttctctttcagacttgcacacctacccctgtggagcgtgcaccctataagggagaagtcgccacactgaaatccagagtgacaaaagaagatgccacagcagggaccaggaaacaggcccacccctgaagtgtgtgccatcggtaagggactgtaggcaaaaaaagtctttctgcatgacagcatatgaaaatagcatctctcctcataangggtgaagagatcag

SEQ ID NO: 111634 - DNA, 471 bp, Homo sapiens
cagtgtgcccaggaagcaggccacgtatggcgacgctgggctgacctacacattttcaggcctcacgctgtctccaaagccctggatcccagttctagagcgcatccgggatcacgtctctggggtgactggacagaccttcaactttgtgctcatcaacaggtataaagatggctgtgaccacatcggggagcaccgagatgatgaaagagaactggcccctgggagccccattgcctctgtctccttcggtgcctgcagagactttgtcttccggcataaggattcccgtgggaaaagcccctccaggagggtggcggtggtcaggctgccgctggcccacgggagcttactaatgatgaaccacccgaccaacacgcactggtaccacagtcttcccgtgagaaagaaggttctggctccacgggtgaatctgacttttcgtaaaattttgcttactaaaaaataaaa

SEQ ID NO: 111635 - DNA, 624 bp, Homo sapiens
tttcgtgtgggagaaaaaacagaggaaagaagagtagaaagggatattcttaaggaaatgttcccctatgaagcatctacaccaacaggaattagtgctagttgccgcagaccaatcaaaggggctgcaggccggccattagaactcagtgatttcaggatggaggagtctttttcatctaaatatgttcctaagtatgttcccttggcagatgtcaagtcagaaaagacaaaaaagggacgctccattcccgtatggataaaaattttgctgtttgttgttgtggcagtttttttgtttttggtctatcaagctatggaaaccaaccaagtaaatcccttctctaattttcttcatgttgaccctagaaaatccaactgaatggtatctctttggcacgttcaacttggtctcctattttcaataactgttgaaaaacatttgtgtacacttgttgactccaagaactaaaaataatgtgatttcgcctcaataaatgtagtatttcattgaaaagcaaacaaaatatatataaatggacttcattaaaatgtttttgaactttggactagtaggagatcactttgtgccatatgaataatcttttttagctctggaactttt

SEQ ID NO: 111636 - DNA, 1002 bp, Homo sapiens
taggatatgatttgtattatttaagtaaaacctgctcatttgaaatgctgctgtggctggagaaatcactgacttaacaatcctttgtattcatcaaaaacaaaacctgggccaggtgcagtggcttacctgaggtcagaatcgcttgaacccgggagacagaggttgcagtgagccgagatggggccactgtactacagcttgggtgacagagcgagactctgtctcaaaaaaagaaagaaagaaacccaagaaaacgacacataacctgctcttgaatactcttaagagccagggagctcacctccttcccacgctgctcaagacggtctgtgggcagaaaacggaggccaatgaatgcctcccccttcagctgccaaaaagcagcctgctgggccccagtgttcctggcagcacccccagtcctggtggggaacgcctaggcagcttccacaatgcaaaccagctggggtctcgccctgcggggagcagatattcctatggcccagtcctggagccgcccacaaggcacttcaggtccctcccgggatttcagccacaggccctcacagctccctcactgggacctctccctggatgggtggcagctcagccctgctccggcggtgggctcctcagtgtccacatttggtcccatttatgttaaacagattcaggcttgtcatggggggagttgtgctggtgggacccaaccttccgtgtttgtgagccttgaaaaaggaggagggaaaaacaggctccccccattccccactgcgggggctctccatcaccagggacactggggctatgagccaggtcccgagcccttccgtgctgggcaggttgtgagaccttggcaaagtcaccaccagtccacccagtggattccccgtcagaagaatggagcggaggaggctgtgagcctgaacacacttcaccaatcacaaggcccgaagtgacagtcggtcacttttattctattgattattctcctgtgtt

SEQ ID NO: 111637 - DNA, 2031 bp, Homo sapiens
tgggtaaaattttgagaccactcgatagtccctcggaattcggcctgccgaggctgagcgctttgcaataagcatcaagttcaatgatgaggcgaagcacatcaaggtgttggagaaggacaactggatccacatcacagaggccaagaaattcgacagcctcctggagttggtggagtactaccagtgccactcactgaaggagagcttcaagcagctggacaccacactcaagtacccctacaagtcccgggaacgttcggcctccagggcctccagccggtccccagtgttcacgccccgcgtcatcggcacagctgtggccaggtataactttgccgcccgagatatgagggagctttcgctgcgggagggtgacgtggtgaggatctacagccgcatcggcggagaccagggctggtggaagggcgagaccaacggacggattggctggtttccttcaacgtacgtagaagaggagggcatccagtgacggcaggaacgtggacaagactcgcagattttcttgggagagtcactccagccctgaagtctgtctctagctcctctgtgactcagaggggaaataccaacctcccagtcttccactgcccacagggatagggagggtgttgagaatcctaaactcgaaccgtttcactgtcagcctgccctcggcgacccatcactgggtatgctattgtacatagaggaaacctgggctagccccacccagagcgcagaggagggggcaccgacagcgctgcgagccaggctctgggtagtggctgaggccagaggcccatcgcctgcccctgtccaactgagatggccttcaggagcctaggtttgaacagcagatgctgtcccaggaagggctagggacatcggaggggacctgcccccacaccctctgctcagcccctggactcagccttgcctgtcttttcctgctgctcccagggggaggtgtcagacctcgggaggcagacgggaccagagccaggctgttcactgtgggcccacttgccccactgtgctagggcgcgggaggagagagcactgtggtcgccctctgcagccactctggctcccaagacttccctgactcccccactcccctccttgccaggggcacacccggaccccacacggcaggcccctctcttgggaggggcctttggaatgatgaaattccaaccctgctgcccggtcagcggtaccgtttcctgccctctctctgagaggccctttctggagtcctgggaaggtgtctgcctggccgcgctgccagatcagtacatcttttgtaaaaaccctgaaatgggcagggaagaaaacagggatttcccctctctagatccctgccaggtccctctccaggaggcccctctgctctcctgaagggtggtccctgagggtctgcccagccttggcacgagaggttggttccagcccctggcagggcttccttccaagggcccctgcagcctacaaactgggcctcgggcgactcaaaataagtgctcttgggggtggctctaccccattacctcccccagccacaactcctggccttcgacttctggctgggttagccagaccctggtttctctaccctgatgttgcatgagacctggtaacagtgtctccctcccagctccttgccaaagcctctgttgagacctgggcttcttgtagccccttctccctctggccagctgcacagcctgtgggaggtgcccggcccaggctgggtgtgggggaagctggtccctgctgtgggtggcgctggggacctaggggctccttctgaggttggccttgtggcctctgggctgtatgcctctggggtgtagggaagaggcgggaggagtcatggggatggggagcggcagggggagagaggggccctcgacaaaggcttgggaaatgaggggaggtggaggcagggcaggggaagcgaagagtcagccttggagagagcaccctggggcctccgtgtcggggtacacccagcactttgcgacc

SEQ ID NO: 111638 - DNA, 415 bp, Homo sapiens
tgcataggaacctcatctttcatttgcatccccacatatatagcttatcggttgatcatcactccagggacatttaaagagcgtattattaaaagtattaccccagaaacaccaacagaaattccttgtggggacatccgcttgaatgctgtgtaacacactcaccgagaggaaaaaggcttctccacaacctcctcctccagttctgatgaggcacgcctgccttctcccctccaagtgaatgagtttccagctaagcctgatgatggaagggccttctccacagggacacagtctggtgcccagactcaaggcctccagccacttatttccatggattcccctggacatattcccatggtagactgtgacacagctgagctggcctattttggacgtgtgaagatgtggatgg

SEQ ID NO: 111639 - DNA, 645 bp, Homo sapiens
  misc_feature (1)...(645): n = a,t,c or g
caagaaactagaatttctgaagaaattactaagaaacagaaacaagtaactcaagaagcagtaagtctgattttctaaatattttgtagtttgttgacaatatcacattacagccagctgcaggtagcttatagtcaaaacccttaaatggagaagtctttggttgtatattttttgttattggtcctctatgtctagtattgaaactcaggatggaaattatgttcacattgcactattttccactcacttgatcagttttcaggagattgtctacagaacagtttagggcacatctatgaactttctagaacatacataaatggatgatagatatcatgccagtccagttacccaccgggacagttggtttcttcgtgcatagcctaagccctcagtcacttagattgtaatgcacaaactttnnnnnnnnnnnnnnnnnnnnnnnnnnnnnnnnnnnnnnnnnnnnnnnnnnnnnnnnnnnnntcagccataaacaccccgaataaatagcgggggaaagtgaggatattcacacatcggagaaagcatatactttctcnnnnnnnnnnnntttttttatttcgggggggaaaaacggggacctaaaaacttttgttgttgttgggccaaaaagctgtgagg

SEQ ID NO: 111640 - DNA, 591 bp, Homo sapiens
acttgtattacttcgttaaattctgcctggaacatatataaataaaatttgctgttagctttagacctatattcctaaatccatttgaatggatttacccatttattccttacattaaagaatcttggagaatattgtgcaaagaatggccagatgggattaacaaagggaggttttccctgagaaagaaaaaggtaagaattatccaatgttaactttacaaagtctgtaaatctattctgaatagctttttttcctcgaaaaattttagttgatgaggaatctggattaaaggattcagaaccagagcgaaaacgcaagaagactgaagactcttcttcaggcaaatcagtggcgtctgatgtccctgagggtaaagttaaaatgacatttttttcttacccatatgaaatttaaaagtcggcttgagccacttctcccagccagaggtatattttagactgttaggttcttatctaatgacttggtattctgaaggattattgaacagttctttgttatccgaagattctccttgggaatctattcaacttggcattataccaaagcagtggcatactggcattccct

SEQ ID NO: 111641 - DNA, 377 bp, Homo sapiens
tgcagatcattcacaaagagatgaggggaatgagtggctgccttgacctcagtcctaggatatgcatgcctaaaacttttgtgtttgtgttttaatttctcaagaattccaagtcaaattctgttccaattatcctggccatcgtgggattgatgctggtcacagtcgtagcaggagtgctcattgtgaagaaatatgtctgtgggggaaggtaaggaacacagaagtcaatccaaggtactgagttcaagccagaaggctgatctagggcatatggctgagtctactcttggcaaaaactaggtacttgcagtactgttcctgaaaaatcaggcccaaatcttctcatgtcgtacatttttcatatgtcaaccatg

SEQ ID NO: 111642 - DNA, 680 bp, Homo sapiens
cccacgcgtccgcccacgcgtccgcggacgcgtggggtcacatgctcaaagtgctttcttacatcagcgtcaggcgcctcactccagcccccgccatcatcttttatggtatcatagcaacgatttatatcatccctggtgacataaactcgttagtcaattatttcagctttgccgcatggctgttttatggcctgacgattctaggactcatcgtgatgagatttacaaggaaagagctggaaaggcctatcaaggtgcccgtagtcattcccgtcttgatgacactcatctctgtgtttttggttctggctccaatcatcagcaagcccacctgggagtacctctactgtgtgctgtttatattaagcggccttttattttacttcctgtttgtccactacaagtttggatgggctcagaaaatctcaagtaagtaccaacagaagggccgcttggcctctgtgaggtgcaggcaggcacggcgtcctcacctgtcctgactccaagacctctgtcacagtgtctcaccctgctggcagatctccctcgtcccaggaggacacatgcccacgccctcactgtacacctctgggtccacccttgattgttttgttcctgtcaattactgtaataaggaggaagggaaagcaccattttcttttctttttggagacacg

SEQ ID NO: 111643 - DNA, 831 bp, Homo sapiens
agagaacaggatgccctgtggcagggtctggagcgagaacaggatgccctgtggcagggtctggagctgctacagcatggccaggcctggtttgaagaccatctgagggaggcacagcgacagcagctgcatctaggggcccttggtgagaattttctaacagatttacactcagagcctggtcgccccccgttagcccagattcaaaaggtgaacatctgtttgcagaatctgattcatgagaagttctccccaagtccactgaacaaggctagttcctgcaccacccaggattcaaaggaaagacgaagggagcagaacttgtggcagcaacaggagttgtcaaggcagcagaaaggagtcacccagccaaaggaggagatggctcagcggggctgcaccaaggggccaagaggccctacccgtgtctaaaccctcctctcactcccctaagcctggtgaaagagtcagaagccccaggctcctttttctgtttcttaactcaacagctaaaaaatggctccaggtagtgagtcaatgaagttcagacatgttggtgtaaagtttctcctctgctcctgaaaacttcatcttcttggtgtctcatgtcctcattctcccctatatgacatgcaaaaacgatctttctttgaaatccctctgggaagaagcatgtttattgaaactgtccttcagccttaaatacaaaaataaaactgaaactgctccagaaagcagctttctccaaaaatgtctttggtttgtttctcatagggttaggaaaagtgcattgtgggaatatccattgccctctatcccagtcttgcaggg

SEQ ID NO: 111644 - DNA, 354 bp, Homo sapiens
ttctagttattcatattctcggggtcaaacaccgggagcgatgaagccaaatattgaacctcctgagaatgtggagtggagtggtgctgaagcctcaatgtttaaagacctcattggcacttactatgacaatttctgtgccattgctaggttaattgggaccaaaacatgtagacaggtaagatatccgataaaaatgttgttaaaagagcttcaaacatagagataaaactgtactcgttgtccaaacaaagaaaattcttggttattactaaggtcctattcatctcctaaaaattatttttttttcttcccaagagggaattgaatgaaaattattctccaggtatgtta

SEQ ID NO: 111645 - DNA, 806 bp, Homo sapiens
  misc_feature (1)...(806): n = a,t,c or g
ctgaatcctcaggatactctgaagaactatgtaccttcttatgacccatccagtccacaaaccagccagtcctggtacctgggctagcttggttcctttccaagtgtcaaataggacacccatcttaccggccaatgtccaaaattacggtttgaacataattggagaacctttccttcaagcagaaacaagcaactgagggaaaaagaaacacaacaatagtttaagaaannnnnnnnnnaaataaaaaaaaaggaaaagaggaagactggacaaaacaacacaaaggcagaaaggaaagaaactgaagaaagaagataatagaccagcaattgcagcacttacaatcactaattcccttaaggttgaaactgtaatgacataaaaagggtcgatgatatttcactgatggtagatcgcagcccctgcaacgtagcctttgttacatgaagtccgctgggaaatagatgttctgtctctatgacaatatattttaactgactttctagatgccttaatatttgcatgataagctagttttattggtttagtattcttgttgtttacgcatggaatcactattcctggttatctcaccaacgaaggctaggaggcggcgtcagaggtgctgggtgacagagccatgagccagccattttataagcactctgatttctaaaagttaaaaaaaatatatgaaatctctgtagcctttagttatcagtacagatttattaaatttcggcccttaacccagccttttccagtgtgtaacccagtttgaaatcttaaaaaaaaaaaaaagg

SEQ ID NO: 111646 - DNA, 380 bp, Homo sapiens
gtgtttcggcttgaaggaaccaacgtccgggaggccgggaagatactcaacatcagcggacttcccattacttcagccattgacctggaggatgcaaccaaaaaggctgtggccagtgttgccaacaattgaagactttgtcctgatccaatggagaaagaaagccatttttccatataaagggatggttcatcattgtgaaagaaatgggtatctcattggggaacaaaaggggagggggaaggcaagaatcactgaaaaaacttaaatctgggctttctggaataagatatctatacagcctaaatctgattttagactttataaaaataatatcttgtgttctcatacttttctgtcactgaaaacctgtccaaaag

SEQ ID NO: 111647 - DNA, 667 bp, Homo sapiens
  misc_feature (1)...(667): n = a,t,c or g
aaagatccagaaagcttttttaaggtattaatgcatcttaaagacttaggactcaatttccacgtgtctgtacttggagaaaccttcacagatgtcccagatattttttcagaggccaaaaaggcattgggatcttctgtcttacactggggctacttacccagcaaagatgactatttccaagtactgtgcatggctgatgttgtcatctcaacagctaagcatgaattctttggagtggcaatgttggaagctgtgtactgtgggtgttacccactttgtcctaaagatttggtttatcccgaaatatttccagctgaatatctgtattctacacctgaacagctttcaaaaaggctccagaatttctgcaagagaccagatattataagaaaacatctctataaggtagttattgagaagagatttacatggtataaatgccatattgaagtacaaagaaaaatcttaaaaaaaaacatttaattaacatactaatgtttaaaggaaacatgctagggagggatattagttgttactctaacaaggattaaataaactggatgccagttgtattaacctaggtcttatgaaatacgtgcacttaatgcagaattccgccgcncttacctagantcttcagttttnggggnnngngggcactcct

SEQ ID NO: 111648 - DNA, 400 bp, Homo sapiens
cttgataaagtcaatcttcaagtatattgtgcatggtctcttctggataactttgagtggaaccagggatacagcagccggtttggtctcttccacgttgattttgaagacctagctagaccccgagtcccttacacatcggccaaggaatatgccaagatcatccgaaacaatggccttgaagcacatctgtaggcaagatggctgagaaatacaggagaggcgtctgcttttggaaaggaaatctgctttggtgatgatctttcaggcaatctcaacttacttctttaatcaacatttaatatcaatggatctgtgattaaaaggtctgaatatgtaatgcctcgtgaagtatttaataatggcctttatttgtatttggatcaatgaggtttttaaa

SEQ ID NO: 111649 - DNA, 749 bp, Homo sapiens
aggaaaaaattcgagactcgtagaccatagtgcgagtggtggaattcacctggcggcggtgttagagtacctgaccgccgagatcctggagctggccggcaacgcggctcgcgacaacaagaagactcgcatcatcccgcgccacttgcagctggccatccgcaacgacgaggagctcaacaaactgctaggccgggtgaccattgctcagggcggcgtccttcctaacatccaggccgtgcttctgcctaagaagaccgagagtcaccacaaggccaagggcaagtgatttgacaggttgcaaaagcttctcatttcagagagatgccaggatcctaagtgcctgccaaacttaccaattctaaggaataagtggatggatggcattactgattcctacattactgattgattctgcatccgcaaattgttttattaaaaacattctacatcatgtgtggggagataaggaggataaaatgaagagaaagaatattattgaggggaagttcttctgaatacaaaatgtgtttaattttttaaataagtattacattcacagggttcaaactatttgaagtaaagagattatatataaagaatccatccctcaacttacccaggtggtcacttttctttttcttgtgtatctgcccagtattcattcctgctgatatcagtcaataatgaatgatacgtgttttcttcacttttttcattcttgtcaggtagcagactgtgtagacttt

SEQ ID NO: 111650 - DNA, 369 bp, Homo sapiens
  misc_feature (1)...(369): n = a,t,c or g
ncgctgccatcaccaccatcagcaccatcagcaccatcacaaccaccctccccaagacttaaaacagctgctttaaatttcttttcatgcagcaagcaatagcttgtaaaaggatgcaaaccagctgaaacatttgacagacagtgttaaataccagggaattcctatcaaccaatttactttaaaaggcgctttgatgttggctatctttcatgtacctctttcatggcacatttataaagaagacggagctgaagtaaatcaagacccaaggtcacgtctagaattacagcactgtaggtacctgatgaaatagggattaatgctgcatgagtagagaataaataaaagcgcctctacccaccaatc

SEQ ID NO: 111651 - DNA, 1118 bp, Homo sapiens
caagtgcagaaatagcttcccaaaggaaaaaaatgggcaacagtaccaaatgctgctgagaggtcaagaaagaagaaggctgagaactgattactgaatttggccacctggaggtacttggggaccctgacaagaggcacagcctccgttgctgtggcagggatcttggctgctctgcgaatcaccaagaacaagctttccaatcacgtgtttgttttccaaggtgcaggcgaggcagctatgggcattgcccacctccttgtcatggccctagagaaagaaggtgtaccgaaggcagaggccacaagaaagatctggatggtggactctaaagggctcattgtcaaggggaggagccacctgaaccatgaaaaggagatgtttgcccaagaccatcctgaagtcaactccctggaggaggtggtgaggctggtgaagcccacagccatcataggtgttgctgccatcgcaggagccttcacggagcagattctgagggacatggcctccttccacgagcgccctatcatctttgccctgagcaaccccaccagcaaggccgagtgcacggctgagaagtgctaccgggtcaccgagggccgagggatttttgccagtggaagtccttttaagagtgtgactctggaagatggcaagaccttcattcctgggcagggaaacaatgcttacgtgttccccggggtggcactgggagtcatcgccggcgggatccggcacatcccagatgagatcttcctcctgacagcagagcaaattgcccaggaagtctctgagcagcatctgtcccaggggagactctacccaccactcagcaccatccgagacgtgtctttgagaattgccatcaaagttctcgactacgcgtacaaacacaacctggcttcctactacccagagcctaaggacaaggaggcttttgtaagatccctggtctacactccagactatgactcctttacactggacagctacacttggcccaaggaagccatgaatgttcagacggtctgaggcagtctcagaggctagtatggggctagatgaagcccagagtaacacccacaatataaatgggttccaaaatggcccaagtgaaa

SEQ ID NO: 111652 - DNA, 2585 bp, Homo sapiens
atctccttcatctctgatgtggtgaacaattcctctccggcactgggaggcaccttcccgccagccccctggtggccgcctggcccacctcccaccaacttcagcagcttggagctggagcccagaggccagcagcccgtggccaaggccgaggggagcccgaccgccatcctcatcggctgcctggtggccatcatcctgctcctgctgctcatcattgccctcatgctctggcggctgcactggcgcaggctcctcagcaaggctgaacggagggtgttggaagaggagctgacggttcacctctctgtccctggggacactatcctcatcaacaaccgcccaggtcctagagagccacccccgtaccaggagccccggcctcgtgggaatccgccccactccgctccctgtgtccccaatggctctgcctacagtggggactatatggagcctgagaagccaggcgccccgcttctgcccccacctccccagaacagcgtcccccattatgccgaggctgacattgttaccctgcagggcgtcaccgggggcaacacctatgctgtgcctgcactgcccccaggggcagtcggggatgggccccccagagtggatttccctcgatctcgactccgcttcaaggagaagcttggcgagggccagtttggggaggtgcacctgtgtgaggtcgacagccctcaagatctggtcagtcttgatttcccccttaatgtgcgtaagggacaccctttgctggtagctgtcaagatcttacggccagatgccaccaagaatgccaggaatgatttcctgaaagaggtgaagatcatgtcgaggctcaaggacccaaacatcattcggctgctgggcgtgtgtgtgcaggacgaccccctctgcatgattactgactacatggagaacggcgacctcaaccagttcctcagtgcccaccagctggaggacaaggcagccgagggggcccctggggacgggcaggctgcgcaggggcccaccatcagctacccaatgctgctgcatgtggcagcccagatcgcctccggcatgcgctatctggccacactcaactttgtacatcgggacctggccacgcggaactgcctagttggggaaaatttcaccatcaaaatcgcagactttggcatgagccggaacctctatgctggggactattaccgtgtgcagggccgggcagtgctgcccatccgctggatggcctgggagtgcatcctcatggggaagttcacgactgcgagtgacgtgtgggcctttggtgtgaccctgtgggaggtgctgatgctctgtagggcccagccctttgggcagctcaccgacgagcaggtcatcgagaacgcgggggagttcttccgggaccagggccggcaggtgtacctgtcccggccgcctgcctgcccgcagggcctatatgagctgatgcttcggtgctggagccgggagtctgagcagcgaccacccttttcccagctgcatcggttcctggcagaggatgcactcaacacggtgtgaatcacacatccagctgcccctccctcagggagtgatccaggggaagccagtgacactaaaacaagaggacacaatggcacctctgcccttcccctcccgacagcccatcacctctaatagaggcagtgagactgcaggtgggctgggcccacccagggagctgatgccccttctccccttcctggacacactctcatgtccccttcctgttcttccttcctagaagcccctgtcgcccacccagctggtcctgtggatgggatcctctccaccctcctctagccatcccttggggaagggtggggagaaatataggatagacactggacatggcccattggagcacctgggccccactggacaacactgattcctggagaggtggctgcgcccccagcttctctctccctgtcacacactggaccccactggctgagaatctgggggtgaggaggacaagaaggagaggaaaatgtttccttgtgcctgctcctgtacttgtcctcagcttgggcttcttcctcctccatcacctgaaacactggacctgggggtagccccgccccagccctcagtcacccccacttcccacttgcagtcttgtagctagaacttctctaagcctatacgtttctgtggagtaaatattgggattggggggaaagagggagcaacggcccatagccttggggttggacatctctagtgtagctgccacattgatttttctataatcacttggggtttgtacatttttggggggagagacacagatttttacactaatatatggacctagcttgaggcaattttaatcccctgcactaggcaggtaataataaaggttgagttttccacaactgtgtgagtgggttccttgggaatttggtaactctgcctcctgcacctccctctgaacccacttcccaacccacttcccatcttccttttttcctgcctcctcattccatttcccatcacctgttttgcccagcattgtgttctgtttctggataatccaggcctttgcctgtggg

SEQ ID NO: 111653 - DNA, 1011 bp, Homo sapiens
ttttttttttttcagacggagtttcgctcttgttgcccaggctgggagggcaatggcaccatcttggctcactgcaacctccgcctcccgggttccagcgattctcctgcctcagccttccgagtagctgggattacaggctccgggcccccacgcctggctaggaaattttttgttgttaatatgacatttggattaatctccagcttcaacagtacttcttttgtccataaatctcaggaatgttttaggcagaaaactggttttaccctgttgataatcagaaggagtgtgctttagggatttattgcataatactattctttaattgcaatcctagggtatgtataggcatgagtgggccttagtgagtttgttgaagtgcacatgtttttcaagagtaaaatttaagattaaaaatatatcctatatatagatatctagaaaacttggtttgtggtgcacagtcaagtgttggatcactaaataaccattgcaggtaccgtttgtgtaacattactcatttctgtatattccttttatgggaagatattttgccatggtaactaaaacttttcagttctacttttatgatgtgaatgaatgctacgttttattaaatattaccaggtcagtactatttttatactttattaagccaacaggggattttaggtttaataggcctcaaaataaaaagttccttaatggaacagttaaaaacaaaacacctaacaatcctttaccgtgaaaatccccccactaatagtggcccacaataatttcctatagaaatatcctaaggtcattcaaatagatttttgaagacggttccttcattgtgtcaggatgacctttcatatcattctcaccaacttgtagtgcccaccgttatttgtaactattaaaccatactaagtatgtttgtaaccagcattgtgatatattctgtacttgtattgctaaaaatgaattattgacctaataaatatagtgttcctgcaaaaaaaa

SEQ ID NO: 111654 - DNA, 558 bp, Homo sapiens
gaggctgaggcacgagaattgcttgaatccggtaggtggaggttgcagtgagccaagatggggccactgcactctaacgtgggcaacagagaccctgtctcaaaaagaaaatattcctgttagccctaaaggctttacatgaggaatggtagaagtggtcttttgtttaaattagttgcattcagcatatatgaattgtcttaaatattttggggatactcccccgccttttaaacagggcataagatctggtaaactctctgtatatcttcctacctttcaaaatcgttcttagggttagtcaagtctggaatataattgctgactataaagttagcaattatgcttttaaggtgttgtcacatcaacctaaagagaaccatctatggaaggtatggttgaaacatctgtaggaacacagaactgggatttcactgagtttaccaaatcaactgtgtgaactgtttctgcactgcttgctaatggtttcatctaataaatgcttacttatctgggcgagctccacctgggggactcactcagccccggggcacaaaa

SEQ ID NO: 111655 - DNA, 1054 bp, Homo sapiens
aattgaattgcatcgacgatttccgcacgacgttttttaagggaccaggaaaagtggtgatggttgcaatttgcatcaatggattaaactgcttctttaaatttcttgcctggatttataccggttcagcaagtatgttctcagaagctatacactcattatctgatacttgtaatcagggtttactagcattgggcatcagtaagtctgttcaaacaccagatccttctcatccgtacggattttcaaatatgcgctatatttcttcgctaattagtggtgttggtattttcatgatgggtgcaggactatcttggtaccatggagtcatgggattgcttcatcctcaaccaatagaatcccttctatgggcatattgtattttagcaggatcattagtatctgaaggagcaacacttcttgttgctgtaaatgaacttcgtaggaatgctcgggctaaaggaatgtcattttacaagtatgtaatggaaagtcgtgatcctagtacaaatgtgatattattggaggatactgctgcagtcttgggagttataatagcagccacttgcatgggccttacttctataacaggcaatccactgtatgacagcctaggttctttgggtgtgggcaccttattaggcatggtctcagcattcctcatctacactaacacagaagcactcttagggcggtccatccagccagaacaagtacaacggctcactgaactcctggagaatgacccatcagtaagggcaattcatgatgttaaagccacagatctgggattaggtaaagtaagatttaaggcagaagtagattttgatgggcgagttgttacaagatcatatttggaaaaacaagattttgaccaaatgttacaagaaattcaagaagtgaaaactcctgaagaactagagacctttatgcttaaacatggagaaaatattattgatactttaggagctgaagtagatagacttgagaaggaactgaaagtaagatgtattcataaaaataacataatgataatggcagctatttttttgag

SEQ ID NO: 111656 - DNA, 375 bp, Homo sapiens
gaaggacccccaggcactcagcgaacacttaaagaatcctgtaatagcacagaagatccagaagctgatggatgtgggtctgattgcaattcgttgatgacttgttcatccccccttcccttcgccctcatgtggaaagaggagctgggaccgcggcgagcagcacggagcggaagggagagcaggggagagaaggcctcatctctctatatttatacataaccccggggaagacacagagactcgtacctgcgctgtttgtgccgccgctgcctctgggccctcccagcacacgcatggtctcttcaccgctgccctcgagttccatgtctctttcccctgcccctagatgctgtctcggctgctctcccatag

SEQ ID NO: 111657 - DNA, 394 bp, Homo sapiens
tagaaccagagccatccttgccgtgggtcgggacgccatcccagattgagctccacctttctccagaaacgcgggtagcgcctgcccgccacctgggaggtcacaggacaagcacccactgcccaccttcgacacagggagcccaggggagggaagcgaggggacagcagccggtaccagggcgacacagccggttgggggacaggggcaggaggccacagggagtgccagccctgcctgcagaccaggagccccacacgcccccaccaacagcagctcggcgcccacaaggaggagcgcggcagcaggactggctcagaggctggcgcgcacaaggaccgcagtcagacccctcacagtcctcagtcctttatcgacaatgtccctattctcc

SEQ ID NO: 111658 - DNA, 450 bp, Homo sapiens
gccgatgattggagcaatcccagcagtgaacccagggatgcttcaaaatacaaagcaaaacaagacaagatcaagactaatagaactttctagaggactgaatgctgtggtcctctctgtgaagaaagattgccttctgcaagtcaaacagagagaactgctttctcccacctgctctgagcgcggcatcacagttattcctagtgcttaaatgtgtattttctctctaccacctggactttcccaaagagtttttcctgtagctactccagatcttccactaaagtagtaactttttaatgacatcttgctgtggtgtgattgatgcctgtcaccgaagagcacagagcctccttacagctcttgtgccctcgtactctccatcttgttatcatagcatctgatgtcttcagtccttccaggattctgtgcgcctttcccattccagat

SEQ ID NO: 111659 - DNA, 403 bp, Homo sapiens
ataccatttctgtataaagttcaaaaagacataccatatattggttaaatgtggtaggccaggcatggtgctcacacctataatcccagcatattgggagactgaggcgggccaattgcttgagcccaggagttcaagaccagcctgggcatcacagcaaaactccatctctacaaatattacaaatcaaaaagtaaattaaaaaaattcatcaagctatacactttatgtttagtttattgcatactttaaacatgtatcatttattgtacaaataaagctattaaacacaaaagccaggaagaggttgaagccatactcttttcccagcctgcccagtcagataagtccgtcttccttccagtccccagattctccctaccccacacacagtccccttctt

SEQ ID NO: 111660 - DNA, 829 bp, Homo sapiens
ctgctttatttataatgctaaatgaaccctggaaattagagcagtacaaaaaataagaaaaaatcacctcaaatcccaatacccagagcccaactgttagcgtggtgaacattttcccaatactttatatacacatctatacttgctgttttataatctccttttaaacttttattgagcaatatgtcatggatgtctttcctggtcagtaaatacaggtttgtattatcgttttttaaatgagtctctagcagttcatcatatgaagactcctactttagtctgtcctctgttgatgaatttccaggttttctcttggtggtgggggtgaggagagttggaataaacaagagtgaagggaacacatctgtacatacattttgtactcatttggttttttctcatgataaatttctataagaggaactgttgaaatcagaaaagagaggtgggtggatggtggatccgtttggtttgattctgtgcaatacagacgggaccccaggagcctttgctgagctgtggttgaagggcatcaaacagtctccttttctaatgacactcccttttatagattggcccggatcctcgttcgcctgccggcactcaggctgatgagctccaacataacagaagaacttttttttactggtctcattggcaatgtttcgatagacagcataatcccctacatcctcaagatggagacagcagagtataatggccagatcaccggagccagtctatagcgcaaaccacacacctctcatgttccaggtgaaaattctgaggtccaaagtctgatgcatgacagaactcactggcaggc

SEQ ID NO: 111661 - DNA, 2067 bp, Homo sapiens
tggggagcccaagcagaaacgcaagctggtggctgaggtgtccctgcagaacccgctccctgtggccctggaaggctgcaccttcactgtggagggggccggcctgactgaggagcagaagacggtggagatcccagaccccgtggaggcaggggaggaagttaaggtgagaatggacctgctgccgctccacatgggcctccacaagctggtggtgaacttcgagagcgacaagctgaaggctgtgaagggcttccggaatgtcatcattggccccgcctaagggacccctgctcccagcctgctgagagcccccaccttgatcccaatccttatcccaagctagtgagcaaaatatgccccttcttgggccccagaccccagggcagggtgggcagcctatgggggctctcggaaatggaatgtgcccctggcccatctcagcctcctgagcctgtgggtccccactcaccccctttgctgtgaggaatgctctgtgccagaaacagtgggagccctgaccttggctgactggggctggggtgagagaggaaagacctacattccctctcctgcccagatgccctttggaaagccattgaccacccaccatattgtttgatctacttcatagctccttggagcaggcaaaaaagggacagcatgccccttggctggatcagggaatccagctccctagactgcatcccgtacctcttcccatgactgcacccagctccaggggcccttgggacagccagagctgggtggggacagtgataggcccaaggtcccctccacatcccagcagcccaagcttaatagccctccccctcaacctcaccattgtgaagcacctactatgtgctgggtgcctcccacacttgctggggctcacggggcctccaacccatttaatcaccatgggaaactgttgtgggcgctgcttccaggataaggagactgaggcttagagagaggaggcagccccctccacaccagtggcctcgtggttattagcaaggctgggtaatgtgaaggcccaagagcagagtctgggcctctgactctgagtccactgctccatttataaccccagcctgacctgagactgtcggagaggctgtctggggcctttatcaaaaaaagactcagccaagacaaggaggtagagaggggactgggggactgggagtcagagccctggctgggttcaggtcccacgtctggccaggcactgccttctcctctctgggcctttgtttccttgttggtcagaggagtgattgaaccagctcatctccaaggatcctctccactccatgtttgcaatgcttttatatggcccagccttgtaaataaccacaaggtccactccctgctccacgaagccttaagccataggcccaggatatttctgagagtgaaaccatgactgtgaccaccttctgtccccagccctgtcctggttccttcctatgcccaggtaccacccttcagaccccagttctaggggagaagagccctggacacccctgctctacccatgagcctgcccgctgcaatgcctagacttcccaacagccttagctgccagtgctggtcactaaccaacaaggttggcaccccagctaccccttctttgcagggctaaggcccccaaacatagcccctgccccggaggaagcttggggaacccatgagttgtcagctttgactttatctcctgctctttctacatgactgggcctcccttgggctggaagaattggggattctctattggaggtgagatcacagcctccagggccccccaaatcccagggaaggacttggagagaatcatgctgttgcatttagaactttctgctttgcacaggaaagagtcacacaattaatcaacatgtatattttctctatacatagagctctatttctctacggttttataaaagccttgggttccaaccaggcagtagatgtgcttctgaaccgcaaggagcaaacactgaaataaaatagtttatttttcacactcaaaacaaaaaacagaaaaggggccgcctc

SEQ ID NO: 111662 - DNA, 521 bp, Homo sapiens
  misc_feature (1)...(521): n = a,t,c or g
gcggaagttnnnnnnnnnnnnnnnnnnnnnnnnnnnnnnnnnnnnnnnnnnnnnnnnnnnnnnnnnnnnnnnnnnnnnnnnnnnnnnnnnnnnnnnnnnnnnnnnnnnnnnnnnnnnnnnncgtcttcagtcacaagtattccctaacaaatcactatagaattcatactgcagagaagccttacaaatgcagccgaatggtngacannaagcatttttagataaatggttcaggccttttacctggcccattctttgtaaatccatactggcagnaacaaaccctttacaaactgttaaatgaaatggtggccaaggttcttcaaattggaaattccacattctttgcggaatcaccccacataggagaagaaaccctttacaaattaccaaaatcacccaccattagaggagaaaccctttaccaaataccaaaccacccacattaatgggagaggaaaaccttacaaaagcccacacatgttggtaaaatgtttttaagtcaccaaatcacaccttgg

SEQ ID NO: 111663 - DNA, 458 bp, Homo sapiens
  misc_feature (1)...(458): n = a,t,c or g
gcagggggggaggggggccaagccggttgcaaaaaggggggcgaggggaggggaccaccccggaaaggggggaagggcacggggaaggggggcgggggaaggagggggggggaaggggaggggacaaaattttttaaaaccaaagattttcaggaattttttccccctttaccctnnnnnnnnnnnnnnnnnnnnnnnnnnnnnnnnttttttttgggagtttttccccattttttccccccccaaaaaaagggttttttccaaaaattcccaaaaaggtttttttaaggcccccttttaggggaaaannnnnnnnnnggaggccgggggaaaattggggccccccggggggttttttaaagggggcccccnnnnnnnnnnnnnnnnnnnnnnnnnnnnnnnnnggnnnnnnnnnnnnnnnnnnnnnnnnnnnnnnnnnnnnnnnncgaacgcgtggg

SEQ ID NO: 111664 - DNA, 1103 bp, Homo sapiens
gtccagcaaggacagcagcagttcagccagttcacagatggacagaggaacagcgtgcagcaagctcgagtctctgagctaacgggagaggcagagcccagagaagtgaaagccacaggaaattcaactccctgcacctcttccctgcccaccacacaccccccctcacaccgggctggtgcctcctgtgtctgctgctcccaaccccagcagagctccacttcccctcctccttctgacgccttgcagtgggtggtggttgaggtatctgggacccccaaccagctcgagacccatagggagctgcatgcccctctcccagggatgacctcactctctcctctccacccctcgcagcagctctaccagatccagcaagtcaccatgcctgcgggccaggacctcgcccagcccatgttcatccagtcagccaaccagccctccgacgggcaggccccccaggtgaccggcgactgagggcctgagctggcaaggccaaggacacccaacacaatttttgccatacagccccaggcaatgggcacagccttcctccccagaggacccggccgacctcagcgcctcctgcaggctaggacactggtgcactacaccccatgcctgggggccgagattctccagcagaaagatgcaatattttttgtttcctttttttccatttttttctctaaggaatcaatatttcaatatgttgagtgtgtgtccaatgctatgaaattaaaatattaaataacatatttatggcattttcttgaagagtgtggttgaagaaatatttctccttttgtttttctttttttttggttgggcactgccacttctttttaggagcaaatctccccaggggtgtacggtatttcttgactctgggaacagctgctacccccaagacttgccacgttgttctgccctcagatggaattaggtgaatgtgtgtagctgctttttcactcgtggacctctccccatcccttgctctgaccccagagctctgtgtatttgcatccagaggccatggaaacattctttgcatttaagagacagatttattccctgtggagagtgggtggattcattgccac

SEQ ID NO: 111665 - DNA, 593 bp, Homo sapiens
agagcacacaccaaaatccaaccttctaataaacatgatggcgcagtcccattccctgcctcgcctgttcccctatccccccccaggcctgggatcttcaggcgtcggtgtggggaggggcccctgccctccttgccttgattttgctcccctgggtccagctggttccaggcctgtgaatgtcagttcgtcgggcactgactccgtctgctcttggccttgggttcatttgacaaatatttgcccagggcctcccaggcccagccccatgccacctgggccccggcatctctttgaggttctgccaatgtgctcttaactgaggacgaaggaggaacacctttctatgagtcttgcaaagtttacctccttcaggccacaaatatttgagtgcacactacgtgccaggcactgtgcagggctgcaggcatagagacagaatgtaatctatctgggccttggaccccatagggagaggggaccactcaggtccatacttcctttggacttggggctttggccttgggaggggcggaggtggcgtggcaagatgaaaaagacatcctgcccccatccacttgggcagagcttct

SEQ ID NO: 111666 - DNA, 378 bp, Homo sapiens
ctttgacctgaacttgaagggacccaaaatgaagggtgatgtggttgtgtctttgcccaaagtggaaggtgatctaaaaggccctgaggtggacatcaagggccccaaagtggacattgacactcctgacattaacatcgaaggctcagagggtaaattcaagggacccaaatttaagataccagagatgcacctgaaggctcccaaaatatcgatgcctgacattgatttaaacctgaagggccccaaagtcaagggcgatgtggatgtttctctgcccaaaatggaaggtgacctcaagggtcctgaagttgacatcaagggccccaaagtggacattaatgctccagatgttgatgttcaaggcccagactggct

SEQ ID NO: 111667 - DNA, 491 bp, Homo sapiens
tgccactggtttcagtgttaagtttgtagatttttatgtgtagagcttagtggcagcaccttggtttctttgggaacagctggctttcagctcagcagaatgtgttacacctaatggatgttccaggatctgtggacgccttgaatttgagctctgtcacatccattccctgccttctgctcagcataaaccaggattaaacgatcctaagaatctttagcagtcttaataatgtatgggtttctctacccccttctcttcttttttcccctccagtttcactctcatcagctgtttcatatctttgtggttgctggagcttttgttcacttccatggtgtctcaaacctccaggagtttcgtttcatgatcggcgggggctgcagtgaagaggatgcactgtgatacctaccagtctccagggactatgaccctaaaccagggcctgcggcacttgcgggcctccctgctggctactgatgccagtacca

SEQ ID NO: 111668 - DNA, 1674 bp, Homo sapiens
ggaaatccgcatccctgtgtcctggatctgaagatggggacccggcagcacggcgatgatgcatcggaggagaagaaggcccgccacatgaggaagtgtgcgcagagcacctcagcctgcctgggtgtgcgcatctgcggcatgcaggtttatcaaacagataagaagtactttctctgcaaagacaagtactatggaagaaaactctcagtggaggggttcagacaagccctctatcagttcctacataatggaagccacctccggagggagctcctggagcccatcctgcaccagctccgggccctcctctccatcattaggagccagagttcataccgcttctattccagctctctccttgtcatctatgatgggcaggaaccaccagaaagagccccaggcagcccgcatcctcacgaggctccccaggcagcccacggtagctctcccggtggtctcaacaaggttgacatccgcatgattgactttgctcataccacatacaagggctactggaatgagcacaccacctacgatggaccggaccctggctatatttttggcctggaaaacctcatcaggatcctgcaggatatccaagagggagaatgaaacttcctgggcttatctggattcttctgggctatagatctcaaatagagacctgttggttgctagggtagtccagacaccccttagatgtcttcataatagtcctatctaccttcaaaaaccatctctatatatggcagactatattaacagctgctgaacaaatcagctctggaggtgattccacatcccctggcattatgctctaatgctgctcatcggagaacagacagccaggataaagtggcaccttctggagtacactggagggggcagcccaagttagaggccagcattgctgacattctggaatatttgcatctaaaaatgtttactcgttgccatgctgcagtccgcacaagctgtgaggcagaaaacttgacttgaagcagccttgaagagtgagttcatgagctcatggtttttctccttgtatggactgctcgctccaagggcaggcagagctcatgaatgcctcttatcttcctaagcggagttttaggtgacacaggatgaagcagaagagatctacccatctcacctgctctgcacccagcttctaagtggacaaagccaagcccaggcatgagctctggcaaagcaagaccccagattctccatttttgcctgtggaaaggagggtccctttacaggctttttttttcctttttttcccccaaaatctcttaaaatgaggaatctcttagcagactttggagttccccattctgccacattctgaccatgagacgcggcttgcagtgggggtgaacgcacataaaaagggaccactgacgtcctgctctactctctgctttctatttatttattttgggggtgggttggggagtcagaagaacctggaggacggaggaaaccaggggcaatgtttacaagactggtggacaagtgtaaatatggaataagaacaaacagttctaattaattccttcttctgcagtatggaaacctattacgatgcccttgagtcaagcactgagatacgttacccaattagggaaataaatttgttaataaaattgctgaggtcaccagtga

SEQ ID NO: 111669 - DNA, 630 bp, Homo sapiens
  misc_feature (1)...(630): n = a,t,c or g
tggtggaattcatttgaaggattgtctgcagacataattgcacttctaatccactggataagttaagaaaatttaaattgtctgaaagaaagtttcattttgtttttcaataggcagttgatgcctccaccagcctttccagtgactggaataaaaacagagtccgatgaaaggaatgggtctgggaccttaacagggagccatggtgagtgtgatatagctgggggaacaggggagtggctaagactggtctaaagctattagttttctcagccgagccaccgtgcccggcccaaagggaaaactcttgtgggaggagcagaggggctcacatctcccctctgattcccccatgcacattgccttatctctccccatctagccaggaatctattgtgtttttcttctgccaatttactatgattgtgtatgtgccgctaccaccaccccccccatgggggggtggagaggggtgcaaggccctgcctgctccactttttctaccttggaactgtattagataaaatcacttctgtttgttcnnnnnnnnnnnnnnnnngggggggccgttttaaaggacccttgggggggccaaagtttacccgggcatgcaacggaatatctttttcc

SEQ ID NO: 111670 - DNA, 381 bp, Homo sapiens
tggactgggctgaatacatccttactgccctggtcagggggcattccctcgtacaattcatttcttaagactgacctatagtgttttcagacgttgccatcatcatggtataagcagcttttatatctcttgctttttatcccacaatttaggtttttaccatatgttggtatgggcaccataataatgaatgactatccaaaattcaaggtaggaatttatgcgagactatatttatttacttcgttaaatatcggagcttttacttatgcaactgtaatcaggcagtcttcttaaaacatgttgccattaataggcctgccgaatatctgtcggtaactacaaattaatgtactcgtttaaagcgccaacacttatatt

SEQ ID NO: 111671 - DNA, 6497 bp, Homo sapiens
  misc_feature (1)...(6497): n = a,t,c or g
caagaacgtcctagccgccagcagcatctatttcaagtccctggtcctgcacgacaacctcatcaacctggacacagacatggtcagctccacagtgttccagcagatcttggacttcatctacacaggcaagctgctgcccagcgaccagccagccgagcccaacttcagcaccctcctcactgccgccagctacctccagctgcccgagttggcagccctctgccgccgcaaactcaagcgagccggcaagccctttggctctgggagggcggggtccactggcatggggcggcccccccgcagccagcggctgtccacggcctctgtcatccaagctcggtatcgggggctcgtggatgggcgcaagggggcccacgccccccaggagctcccccaagccaaaggctcagacgatgaactctttcttggtggctctaaccaggatagcgtgcaaggtctgggccgggctgtctgcccagctggcggggaggcgggtctggggggctgcagcagcagcaccaacgggagcagcgggggctgcgagcaggagctgggcttggacctgtccaagaaaagcccacccttgccccctgccaccccaggtccccacctcactcccgatgacgcagcccagctgagcgacagccaacatggctcgccccctgcggcctctgcccctcccgttgccaacagtgcctcttattctgagctggggggcacccctgatgagcccatggatctggagggggccgaggacaaccacctgagcctgctggaggcgcctggtgggcagcctcggaagagcctccggcactccactcggaagaaggagtggggcaagaaggagcctgtggctggctccccctttgagcggagagaagcagggcccaagggtccctgcccgggagaggagggtgagggggtcggggacagggttcccaatggcatcctggctagtggggctggccctagcgggccctatggggagcccccctacccctgcaaggaggaggaggagaacggcaaggatgcaagtgaagacagtgcgcagagcgggagcgaggggggcagcggccacgccagcgcccactacatgtaccggcaggagggctacgagacggtgtcctacggggacaacttgtatgtgtgcattccctgcgccaagggcttccccagctctgagcagctcaatgcgcacgtggagactcacacggaggaagagctgttcatcaaggaagagggggcctacgagacaggcagtgggggtgccgaggaggaggccgaggacctgtcagcacccagtgcggcctacacggctgagccccggcccttcaagtgttcggtctgcgagaagacctacaaggacccagccacgctgcggcagcacgagaagacgcactggctgacacggcccttcccctgcaacatctgtggcaaaatgttcacgcagcgcggcaccatgacgcgtcacatgcggagccacctgggcctgaagcccttcgcctgcgatgagtgtggcatgcgcttcacccgtcagtaccgcctcacggagcacatgcgtgtgcactcgggcgagaaaccttacgagtgccagctgtgcgggggcaagttcacccagcagcgcaacctcatcagccacctgcgcatgcacacctccccctcctagaagccaaagacccgcgggcgccctctgccaccttgctccccgggaacccatggaaggagaagcgaggtgatgcagcagcaggggcaagaccctgggtccagtggaggctccgggtggcccctctggcccccactgcccacacccagagctttaatggacagtccgtaccaagcagagccgagaggagggaagccaggggtcccagcccgtctacctccccatcccacccaggcccccagctccccgcgggggccaccgcagggcctgtgggctgggtcacgtgggtctcgctgggacctggtccctttgttgcaggcggcttggagaaagggcagtgggacgctggccacggccagggtggtgtcgggagcaggcctcaccccgctggccgtgtctgtgtgtgtgcacgtgtgcttgtgtctgtgcgggcgcgtgcagccctggttctgcagggaaaaggtgctgggggtgcagatccctccctccttgagccagggtggcactgttcactggcgctgggacagtcagggtgaccccaccgcctacctctctacaactaaagagccctctgggcctgtgttgctgttattcctactgatctgttcctctgtttttctttttgatttttgttttttaaaccaaaacagacaatagcttattttctttccgccccctccggggctgagcctgggtctgaagactgaatgtaacaggggccgctggcactcctgcgcgtcccccggctctggcgctgcaggggtgtcggcgcgccacctctccaggccccagaagcccttcttgcccaaaggcttccctggtccctgagccctgcctcggctgcctcaggggagagtgcttttcctgtagtttccaaggaatattctttgtttagaggtacttgttttttattaagagaaaaaccagtgtaacgtttatgtgactgtttgaactggaaggtctggggttccggggggtggggggaggctagactcaatgccggggccgtcggtactcttgttttcatttgtgtgtgcgtgcgtgtgtgtgtgtgtatgtgcgtatgtgtgtgtctatgtgtggtgtgtgccgtatgcatgggcagatgtttcgctttccctccttcctcgctgaacaaggtggagacttctgaccttttgctacctcttgaattcatgacaacgatatgttggtgactggcagtggaagcccttgacactcttgttttccttcgcttagcacctaggaagtcgtgtgcaggagccagcagggcgccaagtggcccagtgcctgcagctcacctgtgggttttccctttgagcctttggccacatccacctcgaggggaccctggcaccccgggcacacaaacctctgtggtataggtgaggggtgtgaggccccagcctggagccatgcactgggtgctgacaggggaaccatgaggagggtggcaggtctttgcagctcccggccagggtgaggcggaagtgagccctcatcctgccactcctatcctccattcctgcaagagttttaagcttgagagagctgaccacagggccccccggggaacagggatggcacttccctgagcagtcctggcccccggccactgtctcggggcccacctctcgcccctcatcttggtaattagccagcctcagatacttctgtgggccctgaagtgggctctcaaggtcagaccaaggttgctgatctcagtcccactgtcttcagccagctgaagctgtcagggctgggctggcagcttctattgtcatcttgcttcaccatttttttttctctctcttttcattctattttaagtttagaccaaaaaaatacagagtcatcccctacccccacccctctagagaccctccacgctaaaaacagagcctgacgttcagggacccaagtggtgagcggcgtctttttgggggtgagggatgcttgggtagatgaggctcctgggctgagccctccctgtggtgatcccagcctaaagatggcccctcttccctcctgggtggggagacagaggactgggaccctggggtcttcaggttccagcaagttcaggctagggacctggggggagggagacccatggacttcacccatacttcagtgagggggctcctgccgtcctggacgccaccccgccccattcagcactttaaggccacatgacacaaagtctgttaccgcacggggaaatgtttcacgcgcctgggccgtgttgcatgggccttcccgggctgttggggcagccgcacctgtgaggtgaccccgtgaaagtaggtgaatcccttgccagaacttccagggacctggggagccagaggccccctcactccaacggacgttttgtgcgacatagtattgtatcccacccttagtattggtatcgagcccttttcctgtgttttaatgaaaaaagcagaacacctagtttccctattttaagaactttaagggtttgtgggggcggggccgggattaacacaacatttggctttgttttctttttcctttgatttcccacatcaggtgtgtgcgagtgtgtgtgtgtggagatgttaagagcctcatcaaggaaactgggttattggaggccaaggcggcttacagttctctgcgttcgtcacttaattcctgaatgtttcagagaaacaggaatcagaaaatagcagatatcatgtaggaaagagaggataaacaaagaaaaaagaaaaaaaaaataagctcatacccaaattcacaaagcctattttttaaaccaaagcacattttgaatgagtatgggaacctccatgggctcaggaaaaaagatgctaatatatttatctcattgtttacataaggcttttacagtttcagacctcaggcagctgtaaggccagtccnggggaaccctcccctgcttgctgggaaacccttcttgagttgggcctggagtggctcacggggcagagaaggggtagccctgggggctggggggagggattgggaagcctccctggagtcacctgagccctcgtccccattcccagggcccctccaagcccagctgggcacccaaagagctttgggccgtgcttgaccagcccccaagggccttctggnccgaccatgctggtcctgaccagcttagcctacgcggggatggccgtcaagttctggccacaggacccgaagtctgggcttgggtccccctgcttgctctgcccgtgacccttggggatggggttgatgcgagggtcccactcaagccaaaaagccgggaccttttgcgcagctctgtcgactcttgggtggtccccatttttggggccccctatacccccccccccaggaagggaaagggctgacttgggtctggtccttaccaacatagacggtggcaaacactcttaacagtgttgtttttgtatcaataatgtttgtgcagtgatgaatgtaatttatttctcagacttggggcgaatgaaccgggtggcaggccgggctccgcaacttgcatgcttcccgccggacgcgagccccagcaagggctcctccaaggattgcaaaaaaaaaggaagagaaaagatgaacctttaagcaaataagaatctcagagactcgcagcatagccatacacctcagcctgtgaaatgaacgatccggaccctcaccaactttccccacctcaggcagccctgtgtgtttaccgttcatcaccactcgggggcaccgggccgcccacccactcccaaaatccgtcagtattcactggacctcaggccctgtgcaggagtgcgatccgggctgggccgctgggcaggctgaccccctgcccttcctgcggccatcctgagttggggtgaggcctgggcagccggagggcagggctcagggagcaggaggctgcatccgtccacccccaggcgtgggggacaaaagccaaaggtgctaggccttagagcagacaagggctctcagccctggcatgccccctaaagggaccaaggtcctcctatttcccagaaccccgttggggcagatgttactgaacctgtgaatcagacgccaggagtgagggctggggagggacctaactggagcctcagtctgacattccacgccggggtgggggtgggcatgagcggtgggaactgaggctgcccaggacccccttcctaggatgccccggcttcagtcaccccactttaactttctaccaggaccccctccccctacctcaccttgctatttattgctgtaatttattgacctcaaaaatgctgcataacagacctcactggggcagggaggatccccatgggctcccaccctccacttggcgggccccgtggggccaggtgcttgatggggatgcctctctaccccacccatcactagcttccctctgccctctcccaccccgggggggacccccaggttgggcacctggctcaattcctcgcaaatncccccgaaggggaggggggagggatggggttatagctgttttgtttaattggaactggaagagggatcatgttttgttttatgcccttcccagaaggggggagggacncccgggatcgcactcctgtacttggccaccgccgctgtcacttgtcacattgagttcatgtcccttgagagtttgtataaattcaggtcagagctgcagctacacagctgcccagtgtcatagaaaagcaattcaccaacgactgatctctccattcagaagtgtgcagtcttaaatgtacagcggataagaaactgttattttatgatcttttcattaaaagcttgattgaaaaaaaaaaaa

SEQ ID NO: 111672 - DNA, 488 bp, Homo sapiens
gaagaattaataatttatcccaagtcccaaagtcatagagttagtaaactgtggagccaacattcaaataccagggaactcttgattacaaaatccatgttcttaaccactatactatattgcttgtaaaaatcagaactccttaggggtcatgttttatacctaaagaattaattttattatggtttatttgaaaaaaataaatgagaaacctgataaggaaaaagtatgagtgggaaattaccatactagataataaaatgcagtatgaggctacattgttcttcttctttatttatttttattttttttgagacagggtgtggctatgttgcccaggctggtctcgaactcctgggctcaagtgatccgcctgccttggcctcccaaagtgctgggattacaggcgtgagccaccgtgtcccgccaaggctgtgttgtttaaaacacattaaatactggcataggagagagttgagtggaatgga

SEQ ID NO: 111673 - DNA, 369 bp, Homo sapiens
  misc_feature (1)...(369): n = a,t,c or g
gacgcgagtagctcggcagggggactcgcttggctttcgtgccatccgtggacacagtcgcgcgggtctttgtgggaagaaacaaatcacaaaagcaattaagagagctcaaacaatggggtttatgccagttacatacaaggatcctgcatatttcagggaccctaaagtttataacatcagatatccggaataaattccatcacattaccaccagtaaacnnnnnnnnnnnnnnnnnnnnnnnnnnnnnnnnnnnnnnnnnnnnnnnnnnnnnnnnnnnnnnnnnnnnnnnnnnnnnnnnnnnnnnnnnnnnnnnnnnnnnnnnnnnnnnnnnnnnnnnnnnnnnnnnnnnnnttctaaagaatgtg

SEQ ID NO: 111674 - DNA, 377 bp, Homo sapiens
cattctacttgagattactgaaaaaagacatgggactttggtgtgggatactgaggtgaagccagtggatctccagcttgtagctgcatcagcccctcctcctttctcagggttactgtggcaacgccaacctttgaatccccctcctgcgcgctgagcggctcgtaaccatggagaccgaagcaggtttcccgcgtccgcctcctcacacagagactgcagccccggcgcccagaccctttggacaaggagatccaagcgggccccacaatgctcagcgggtaaagagctcctccccactcctctcccgccagcagacgaaggaaacaccccgcagcctgcacatgctcagatggagctctgggcccgcgggttct

SEQ ID NO: 111675 - DNA, 671 bp, Homo sapiens
ggcctatgaacagatcaagagggccatcctggggcagcaggagacactgcatgtgcaggagcgcttcgtggctggctccctggctggtgccacagcccaaaccatcatttaccctatggagactctgaagaactggtggcttcagcagtacagccacgactcggcagacccaggcatcctcgtgctcctggcctgcggtaccatatccagcacctgcggccagatagccagttacccgctggccctggtccggacccgcatgcaggcacaaggaagccggtggtcatgccatgagcagccttatggagaggaccatgtggtaaggaactcagccaatagccatgtaactgagcttggaagaggatcttgctgtcctggccaacatctcactgcaattctatcagttgaattccctggatagtccaagctttgtggatccctccaccgaaacaactggatcccagtacctgaatcctgaatcttagactcttatacttcaaacactgatcacgggaacagccggctcagcggctcctgagttcctaatgctcagaatatgggtgagatgataaatgtttgttgtgttaagctgccaacctttggcgggggggtaattcgtcacatggcaacagctggctaatacatatatacctacatgtaaaaaaaaaaaa

SEQ ID NO: 111676 - DNA, 448 bp, Homo sapiens
tcacctattgaggtataatttgcatatgataaaataagcccatttctgtgtgtaatttaatgactgttagtaaatttgccaagttgtacacccatagtgcctcctcttcttcctaacaccatctcatttctctgtttttggcaccccagtgtttgattgcaatcgggtctatgcccctggcttcaaggactctgtggttggcagagacatcctcacaccaccagatttggagagaatcttcgggcttcctggaggggtatgtataagcctagggggtctctcaccatagccttccctctgcaccctcacttcctggctgtgacctctctgctttatcttgtccctccatactcagctttcatcaggaagggaggacagtggcagggaccccggctgagagagggcagagaagcggtcaaaccgagggaatgggggatccctagtgggg

SEQ ID NO: 111677 - DNA, 387 bp, Homo sapiens
cacagacaacacccctgcattccccacacaacacccacactcagccactgcaggcgaggagggcacaaggccaggttcccaagagctcagaaccccaaaagggagattcaaaagatcctggagtttgtggggcgctccctgccagaggagactgtggacctcatggttgagcacacgtcgttcaaggagatgaagaagaaccctatgaccaactacaccaccgtccgccgggagttcatggaccacagcatctcccccttcatgaggaaaggcatggctggggactggaagaccaccttcaccgtggcgcagaatgagcgcttcgatgcggactatgcggagaagatggcaggctgcagcctcagcttccgctctgagctgtgagag

SEQ ID NO: 111678 - DNA, 367 bp, Homo sapiens
tatctcgtatgaagaagcccccaagactgcccagaggaagttaaagctcgtgcgcacaagtcctgagtatgggatgccctcagtgacctttggcagtggccacccctctgatgtgttggatatgcctgtggatcccaacgaacccacctattgcctttgtcaccaggtctcctatggagagatgattggctgtgacaaccctgaatgttccattgagtggttccattttgcctgtgcggggctgacaaccaagcctcgggggaaatggttttgcccacgctgctcccatgaacggaggaagaaatagataagggccttggattccaacacaagttcttccacattccctgacttgagctagagggca

SEQ ID NO: 111679 - DNA, 312 bp, Homo sapiens
gtacaatgcttatcatgccacaaatgtttagcaattattaagtatgggagaaaaaataaaacaccataaataggaattatggccttcttttaaatgcagaaattggttctaaaaatttcagtgcctagattaagctactgttgagttcttaaaagggaaaagaataactcaatctttattaaaatatttattttgggccgggtgtggtgtcacgcctgtagtcccagcactttgggaggccgaggcgggcagatcacgaggtcaggagattgagaccatcctggctaacatggtgaaaccccatctgtactt

SEQ ID NO: 111680 - DNA, 767 bp, Homo sapiens
  misc_feature (1)...(767): n = a,t,c or g
cactgagactggtcagttattggctctttttaaagattgtgttgctttctgcctcaatattaatatgttggaagttaccaagaagttcatgacagatctatttcaaattctggtgaagaaggaagaattggcccttgaaagaatcagtgttttacaataattttgaaagagggggttggtggcggtttgcaggtagcgacacaaggaagaaaacacttatcacggagggaattcagataaaggacaaaccatattttgactgctactgacttgttgaactggcagtcggggtcaacttgggaagacagctgtgaccataaatattaaagaagacaaaaggattctttgtgacactgagaccttctgcagtaccacagtggaggaaatgccagtgtacacaactggcctcatttaattcctgggaggagatagtttgggatgcagtgcttgttgttgctgagcaggcgatcacagcatgcactgtgtttctttctttgagaatatttgaatcctgcctgaatactcgtaacagatgagagacgcaggttttgatagcatagatttacgctgtcattagtcatgagctcttgggacgaaagtaattggttttatcctctttagagttagaccctgtggttgggtatgaaagatgagtgtctgtaaaaaatccttctttaggaaatgttatttcctcgaagactctgtcttcaaaaaaaaaanaaggaatttatttcctagttctgttaaaattcgctatattgagtgtt

SEQ ID NO: 111681 - DNA, 440 bp, Homo sapiens
ccgtggtgacgtggttcccaaagatgtcaatgctgccattgccaccatcaaaaccaagcgtaccatccagtttgtggattggtgccccactggcttcaaggttggcattaattaccagcctcccactgtggtgcctggcggagacctggccaaggtacagagagctgtgtgcatgctgagcaataccacagctgttgccgaggcctgggctcgcctggaccacaagtttgacctgatgtatgccaagcgtgcctttgttcactggtacgtgggtgaggggatggaggaaggcgagttttcagaggcccgtgaggacatggctgcccttgagaaggattatgaggaggttggagcagatagtgctgcaggtgtaaacttgtacactcctttgtcttggaactgtcttattttctgtaaatgtctattgccgtaaattgtta

SEQ ID NO: 111682 - DNA, 881 bp, Homo sapiens
gatccttgggacctttgttgcctgttagcaagagagtctgtgtgtcatttgccactggattcagtggtaagattgcatatttttatgtgtagagcttaatggcagcaccttggtttctttgggaacagctggctttcaactcagcataatgtgttacacctaatggatgttccaggatctgtggacgccttgaatttgagctctgtcacatccattccctgccttgtgctcagcataaaccaggattaaacgatcctaataatctttagcagtcttaataatgtatgggtttctctacccgcttctcttcttttttcccctccagtttcactctcatcagctgtttcatatctttgtggttgctggagcttttgttcacttccatggtgtctcaaacctccaggagtttcgtttcatgatcggcgggggctgcagtgaagaggatgcactgtgatacctaccaagtttccagggactatgacccttaaaccatggcgtgcggcacttgcgggcctccctgctggctactgatgccagtaccagaggagccccaaaactttgacagcctcgtgggctttgtgacggcccaggggctctgcgtggtacatgactgagaagagaaaaacaaaaataactcatacctcaaaggatggagtgcatcaattgggagaaaaggagacatagcccaaaccctggcttattcttgggatctactgattgcgggctctgcaagacccttggcaaactggcttctgatccatatcatatttatttgtagaagatggcgaaacagtttagctggtggttctttcttctccctttctctctctctatgacaataatacaacccaatttaagtgaacatttatctccgataaggg

SEQ ID NO: 111683 - DNA, 361 bp, Homo sapiens
tttatttcgaatgagaaaacagagacatcctcggcgcggcatgtatcagagtcacgccttatcgcttccagctccagctcagattccagctcctcctcttcctcgacgtcgtcttcagacaccagtgattcagactcaggctaaggggtcaggccagatggggcaggaaggctccgcatgaccggacccctataccaccctgccccacctgccccttccccctttgctgtgacactttttcatctcacccccccccgcccccctctaggagagctggctctgcagtgggggagggatgcagggacatttactgaaggagggacatggacaaatcaacattgaattcccagccccattgggg

SEQ ID NO: 111684 - DNA, 756 bp, Homo sapiens
aattttagacaggcagggtcttgctctgttgcccaggctggagtgtagtgacacaattatagttcactgcaggctcaaactcctgggctcagatgatcctcctgccccagcctgccaagtaactgggactacaagtgcatgccactgcacccagttaatttttaaaatttttgtagagacaaggtctcactatgttgcccaggctagtcttgaactcctggggcttaagctatcctcatgccctcagcctcccagtgctaggattacaggcatgagccactgtgtctggctaagttatcttttcttattgattaattttgccaggcgagtgataacctctaccctgattctatcaccacaaattagtttaaaatgttcctttatgctttatgtcctttaaatagttgcctaccccaaaacatgaagacacttctcctgtttcattatttcctttcgcatttaaaccatattccacatggaattgatttttctatatatatggtatcaaggaaggggtctacttttttccccaatacagctatctaattgactgtaccattacaatagtttctctttctcataaatcacagatgacctaaatgtgtggatcaccacgtatacagaattctgttactttgttctattttgttctagtctactttgctctagtctgttactttggtctatttgtctatccttatgccagccaacaacagtgttaattacaactacacttttataatcacagctcgtgcc

SEQ ID NO: 111685 - DNA, 359 bp, Homo sapiens
  misc_feature (1)...(359): n = a,t,c or g
cggcacgaggaaggatatattcggatggcaagaaataaaggaaatcattgtgggattgctagctttccctcttacccagaaatctagaggatctctcctttttataacaaatcaagaaatatgaagcactttctcttaacttaatttttcctgctgtatccagaagaaataattgtgtcatgattaatgtgtatttactgtactaattagaaaatatagtttgnnnnnnnnnnnnnnnnnnnnnnnnnnnnnnnnnnnnnnnnnnnnnnnnnnnnnnnnnnnnnnnnnnnnnnnnnnnnnnnnnnnnnnnnnnnnnnnnnnnnnnnnnnnnnnnnnnnnnnnnnnnnnnnnnnnnnnnn

SEQ ID NO: 111686 - DNA, 570 bp, Homo sapiens
ttttttttttttgaagagagacggacaggctctcactctgtaggccaccctaggatggaatacagtggtgtgtctatggctcactgcagcctcaacctcctgggctcaagcaattctccttcttcagcctcccaagatgctaggactacaggtgcatgtcaacatgcccagctaattggttttttttttttttgtagagacagcatctccccaggttacctatgctggtccaaacacctggtttcaagaaatccttctgctgtgacctcccaaagtgctaggattaaaacatgacccaccatgctcagagtccattttcatttatgatttgagtaattttaaacttttctctttttttcttagtcaatctagttaatggttggcaattctgttgattttattttgaagaatcaactttcggtttcattaatttccctctattatttttccattctccattttatttatatccactctaatccttattatttccctcattcactgtgcttgggtttagtttgttcttctttcatatcctgaagtattaaagtaggttgttgacctgaaaaa

SEQ ID NO: 111687 - DNA, 368 bp, Homo sapiens
catactgcctgtcgtcaaataaatggactctaaaatgtacttattcttttcagaaaaaatttttttttgtagagaggggggtcttgctatgttgtccaggctggtcttgaactcctggcctcaagtgatcctctggcctcagcctcccaaagcactgggattacagttgtcaaccaccacgccaggtctcttttctaaaactttaatttccactattgctcttttgaaaccattttaatcaagtcacatttcttagaaaaaattcactcagggttctgaaggaattagttattttctacaagcaactctgtcatgagtgatagagttgtagctctcttagaagtttttttcctctttcaaagagaatg

SEQ ID NO: 111688 - DNA, 538 bp, Homo sapiens
  misc_feature (1)...(538): n = a,t,c or g
ctgggatatttgaatgtgaactgcatactagatggtaatgctgcattaatgttaaattttctgagtgtgataactgtattgtgcttacgtaggagaatgcccttggatcaatgtatacctcctcctatccttcccctatttttttaaattaaagtttaatttaaacacagtgatatgcacagatcttaggtgtaccatttaatgagttctaacaaatgcatatcaagatatagaacatttccaacacccccaaaagtttccttgtgccccttcctaatcaacccccatttgaaaccacccctctcggccgggcgcggtggagttgagatctataatggagatcgtaaaataaaggtttccaacaccctggaaagccggctggatctcatagcccagcaggtgagtgtngggggtacttcttgggtagttggtctgctgttactttgaagtgggacagagaacacgtgtccattcactgggaattggggatttgttggctgtnttccaggttttggacattttcctcaaaaggattggg

SEQ ID NO: 111689 - DNA, 430 bp, Homo sapiens
  misc_feature (1)...(430): n = a,t,c or g
aagagcaacaaataacaaagtacaggaatagaaaactcatgaaagatgaaatgcaagtcacatatgaaaagcactttaagctgggcacagtggttcacacctgtaattccaatgcttngggaggccaaggtgggaggatcgcttaggcccaggagtttgagaccagcctgggcaaagagcaggacccagtaagagaagtagttcatcctcactattaatcaatgacattaaattgaacacacaataacatttgtgtccactagattatctaagattaaaaataataaaaattttaatgttggtgcagtatgagaaaacagatactgtcatatatttggtgaagatgaaaataggttgaatctttatagcaatctgtatcaattattaaaatgttcatgtactatttacttagaactctaaccaaaagtaa

SEQ ID NO: 111690 - DNA, 1783 bp, Homo sapiens
ttagggcggtccatccagccagaacaagtacaacggctcactgaactcctggagaatgacccatcagtaagggcaattcatgatgttaaagccacagatctgggattaggtaaagtaagatttaaggcagaagtagattttgatgggcgagttgttacaagatcatatttggaaaaacaagattttgaccaaatgttacaagaaattcaagaagtgaaaactcctgaagaactagagacctttatgcttaaacatggagaaaatattattgatactttaggagctgaagtagatagacttgagaaggaactgaaaaaacgaaatcctgaagttcgacatgtagatttggagatactgtgagtttgatggaatgaatcacctgggtggggaccttggaaacaagtttgtccgtccactctacaaagtttcctcctctcctacactgaaagactcagtgccatgcagaagccttttttttaagatgaaggaaatattttatgtaaagagcaactcagcaggacacagaactaaaactactacttacatctaacagacacactacaagttgaatcaatttgaaaatcatgtttttatgcttccatagggaacattttggttatttaaattgttcataatgtcccatatttcacctgttcagtgtatactgtactttgcaatcatctttcctttttccaccattggtaaaaataagtggccatccataggatccatggatttttaatttggttgcctctgaagatttcactcccatcaagatctgcccaatcttcaatattctggctaaatcttggtatgtggtttttaaacagtcactccgtttcaaagtctgtctttccttatagaatgtggaaattatttctccataccttgtgattttgacctgagtgctaagagaatcactctccttacctagttatctacaaatgttcattccagaaatgtttagttactgaattgaatgaagacatctcagtacactcttttaggtcatagtagttgccattttgtaaaatttcttttttcttctttgcttttttccccttatttggtttaatttttctaatgttaggagatatagtcctagatatttccatgggccagtgtgatgactttttttttaaatgaggttcagtaccataatgtttatttactggaagataatgcatttataagcattttaaaattctgtaaagtgggttagaaatatttataattttacaggcaggacagcatttgacttttatttaaaaggcggcactacttatgtaaatctgagctgtgggatatttcttgctttaagagagagacagaatctctcactgaaactcatggtcatgattttgtataatatagttcatactgtgtctgtgagttttcttccagttaccaaatgggccattttagtatagttatattgactataacatgtaagtaaatagctttctactgaccctaagttatcaaggtggaaaaaaaacatgcaattcagtaattgaaaatgtggtgaaaagctgcagctgtcatcatcaaaacaactcataacatactttaaaatgttcaggtagcagtgagcattgttcatatgagaatggcggctgggtgatctctttgctgaattaatgagtttcttaacatgtggacccaactgcctgtgtgagatctgtgtcttaaaacttactggaatgggaatcctatggatttattgcaaattgtaatgctggaaacaaaaaataaatccttggttaaagggttaaaaaaaaaa

SEQ ID NO: 111691 - DNA, 388 bp, Homo sapiens
tgcatatggaacctcatctttcatttgcatccccacatatatagcttatcgggtgatcatcactccagggacatttaaagagcgtattattaaaagtattaccccagaaacaccaacagaaattccttgtggggacatccgcttgaatgctgtgtaacacactcaccgagaggaaaaaggcttctccacaacctcctcctccagttctgatgaggcacgcctgccttctcccctccaagtgaatgagtttccagctaagcctgaagatggaagggccttctccacagggacacagtcttggtgcccaaactcaaggcctccagccacttatttacatggattcccctggacatattaccatggtaaactgtgacacagctgaactggg

SEQ ID NO: 111692 - DNA, 367 bp, Homo sapiens
tttacaggtgtttttacctccggtaagagaggctggcctttttctctctatctttagccggctctgctctcgaaccagggcatggagaatccacggacacaggggtgtgagggaggccataaccacctgtgctcaggtacctacatgctctgttcttgtcaacagagtcttaccagcaaggggtcctgtctgccaccatcctctatgagatcttgctagggaaggccaccttgtatgccgtgctggtcagtgccctcgtgctgatggccatggtaaggaggagggtgggatttggcacattatgggggcaggggatggaacatcacacatgggccttaaggaatctcagagccagagcacagcctag

SEQ ID NO: 111693 - DNA, 421 bp, Homo sapiens
tcgaactcctgagctcaggcagtctgcccacctcagcctcccaaagtgctaggattacaggcttgagccacctcgcgcggcctcctgctccattatttttccagtggagagtagatgatggtgataatgctggtagaaatagtgactattaagtgcttactgagttctaggctctaggtgatgcactgtcttttttgtatgtagggaccatccttattcccatcttacagaggcagactcaggcttgtataacagattgcaactcaagcagtccatctgcagagtctttattcttacctaggatacttgatacagctgaaattcttcattgtgctcagtccttctttatccacagcatcagtgagcctccttcagctcccattctcttccttgggatggaacaagggggggagcctcaacc

SEQ ID NO: 111694 - DNA, 224 bp, Homo sapiens
gataaagttcttccagaatatagaggtgccaaagcagctctacatgacaaggattattcatttagagatggtgacactcttggaaagtatgtaaactgaaataaatcactattgaaatggcatcaacgtgaagctgcccgttccactaaagttctgaaatcattcatcatgtaaataatttccatgtctgtcttttataataaactaatgatatctaaactaat

SEQ ID NO: 111695 - DNA, 377 bp, Homo sapiens
  misc_feature (1)...(377): n = a,t,c or g
gatgccctgggattttcccaaccattgcaaacccaacccagggtgtgaactgcagtggggtgggcagtttacatatgagtgatcaactcaagaggggcaattttctttcccagtttcttgctggtgaaggagagtcaggtggggatggagcagagtgccaaggagcacaaagcagacagccacacagtagaaagagtgcaagctgtactgccttgcctcaaacctggggtcttactctgagctgaatgacgtgtctggggggctcttttgcaggggtcatccacggaggagccctgtcaagcatttgcactcagatcttggcaatggtcaatcaagaacaaaatannagcctgtggattccagcctgcccgctctag

SEQ ID NO: 111696 - DNA, 385 bp, Homo sapiens
ggtgaattcactgaatgtaacaccatgaccctcatcaacttgctacttaaaggccttgggcccatacatgatagaaacctcacattgctcctgctgctgctgcagatcctgggcagagccgtcaccttctccattcgatatcagctcgttcgactcttctatgatggctgagccccttgatcattgtcctttacctcacaggctctaggattcctgactcaggctgacctctctctctgggcccagactgcctccttgcccaggcctctctcactcttcatactcctccagattttggtctcagcattttcctttctctgtgatcattggcatcctgggcgtttcttgccctctactgactactgattggattttacctatggct

SEQ ID NO: 111697 - DNA, 997 bp, Homo sapiens
ccgccgaaggttttctccggttcgggagagagacggagtcccgctctgtcacgcaggctgccaggctggcgtacagtggcgcaatctcagctcgctgcaacctccacctcctgggttcaagcgattttcttgcctctgcctcctgagtagctgggattactggcacacaccaccatgcacagttccttgttcaaaatgccaagaacctggatgactcatagtcaagaccctccaccagtaacatatattggcgagccagccaggagcttggaaccctcggtggacagtgcctaagcacagaggcaaccacaggtttctaacagggccactctctggtgaaactgaaaggtttctgtgtgaaagtgcctgaccaccactgcccagttcagaccactacagtgaaacactccctttattccacctgacttcctacttggctgaatcctcaaccattgaaatgaatttgaccctgataatctaaggaggaaacatttgatattcttttgcaataatacttggccccagtattgtttggaatctggagtttgctgttgaatggggaaagcaggatgacgttgccatgtatccaggctttggtgctgctgtcctaagaagggtcaggcctggtcagcatatggtgctctcctttggtgctatttggctccagtgtctttggagtctgaggaggtttggcctttaaaaatcaaactgcccaccggaaactgctttaaaaatgtttggttcacagccttcactggatttacctattggagcaaacaaagtgtaaccatgtaaaacctgtgagcttgtattgatatctcatggctagagttccaaggtaaaagctattgggatcttcgtttgtgtgtgtgtatacatgtctagatgtgtttatttgtatgtacacttattgttatatgttgtgtcaacccaaatcagcttataaataaaaaagcactcataaattaaataaataagtccaagcaattttcaagtt

SEQ ID NO: 111698 - DNA, 1731 bp, Homo sapiens
gttttgagtcctctatccatgtggtggaattccccgaacgtggtcggttggagcaaatatgtccctccggaggcacattgggaaccctgagaagatcaacccttaaaacatagctccagtgtccattcttccatgaagtctttcttatcacccccagtggatgaacaatctcctttgacattcctccctagagccctccatgtccgtgctgcccacgtggcaccagcatgcacactacatgttgctcaggtcttcatttggcagtatctgatgaaaatgtataccacagaacccaagataccagcatatcagatgaagactggacactggtaacagtatgactaaatatactgagaagctcgaagagattatgaaaaattatagatacaaaagagatgagcttttctagagactaaaagctacaacttttgcccagctgatcatccaagctgcttccctctctgatcaaacactggaagtgacagctgaggagatttaaaggctggaagacaatgattctgcagcttcagaccctgatgctgtaaccactgccaggaccaatgggaaaaggaaatccaggggaccatccgccgagccctgagcagttcataaacaacgcaggagcaggggactccagccgctcaactcttcagagtgtcatcagtggtgttggggaactggatctagacaaagggccagtgaagaaagcagagccccataccttagacaaacgcgtatcctgactgccccttcctgctgcgacatgtgcgtgatagagattcttaccagccgtgccacattgttggagcttacagttacccaattgcaactctgtctagaacaatgaacccttattcaaacgatattcttgaatataaaaatgcccatggcaagatcatcattctgtatgacgatgatgaaaggctggccagtcaggcggtcaccaccatgtgcgagcgtggatttgaaaacctcttcatgctttccggaggtggagcaaggtctaaaagctcctagctcagaaacttcccggaagggactggatttactgggttccctggccagcatcttggccagcagggccccttcctcctgggtctgccccggaaacgatcccagcccccaaagggccacccctaccagctgagaataaatggagatttaccccagaagacttaaaaaagatagaatattatctggaagaggagcaagggcctgcagatcatcctagccgactgaaccaagctaagctcctccggaagagagtccaaggtgcctggtgcccgaagcgctcagaatctgccaggtggcggccccgccagccactcaaacccccgctccctcagcagtggtcacctgcaaggcaaaccctggaagtaaagactttgtctcacttaggcaaataaatgttcttcctcttttcagaacccctgagcatttcccaagttgggtcatttccagaaacttctgcagaggaaagaccatgacatatgtatgggataggcctcttgcctgtccctgtctccagttcctctcccctcaggaggccacctcaggaaggattttgacaggtgaccataaaaaccagaggtgtgacaggctctagtctcctccctgttgtttacagcatatttaagtcttgtgaaactgtataggaaaaaagtatctacgtttttagtttttttgttttgtttttttttaataaggtccagcttgttgggtctctctgtg

SEQ ID NO: 111699 - DNA, 942 bp, Homo sapiens
ttttttttttttcctgattcttcatcattcaacttgagattattctaatcttgatttgattctcatgctcctttcaaaagagcatactagtttggggtggttggttatcttcttaaccttagcaagccagcttatttcctatggaagcagaactggaaacagcagatgtccaccatgcttatacaggacactacacactgtctcgacaagccatgttctttcctccctcttcgtgagcactttctctggtgatgagttagtatggactacttgaacctcaaaactgggcctctcacccaaagccaaatgaagttagcgtatgccaggatggatgtttcttttgggccgttggcagtgagactgctaagcaggctgccttaggttttgctgtggcaatgctagcagattgttccctctttcaaaggggcaaaaaatatcattttggtatgataactgactttctatttacagtttctggcccccaaagacaaaccaagtggagacacagcagctgtatttgaagaaggtggtgatgtggacgatttagtaagtacttttaatatgcacctggtgttctgtgattgaagtcacctgagctgtaaatacagccacaaaggctgattatcttacacttgttgcttatttgtgttttaatttccaatacaccagaagcttcctacaccattatatattgccattataaattcaatcagataggtaatttcataatagaaattcctgtgtttcatggtgtcggctatattgttcattcagattaatcctctcccttgaagggctgaaaaagagctagggaggctattccattagtagcaaaatgttgtaattcactgaaattgctgttaaccaaaaataagtaatacaacatgcagtttgtgtgggttgacaaatgaaacagcccttaaaagggctacttcttaaatg

SEQ ID NO: 111700 - DNA, 357 bp, Homo sapiens
  misc_feature (1)...(357): n = a,t,c or g
ggatgtgggcctgacagaaaaaggagaagctagacccctggacttgaaatatgaaaaataaaaagcgcagcccttggcttcgctctctagtgaggctttgggaaccctgccggagtcggaaggagtagacggagagagagaaaagggcctcctcacacaccctggacccttggcccactcctgccgcgcccccgcctcccacgactggcacccccgggccgccccaatccttcagcaaccggtcccctcccctcgcctccctccttctcgggccccagcttcctctctgccttctgccgcccgcttctctcggcacacacacggnttctctctgctcttcgcaatccccgctgtctc

SEQ ID NO: 111701 - DNA, 355 bp, Homo sapiens
  misc_feature (1)...(355): n = a,t,c or g
ccgcaaccagctactcaaaagcttcgacttccactttggcttctgcatccccagcagcaagaacacctgcgagcacatttacgacttcccccctctctccgaggagctgagtgcgcgggcagggtcttctgggagtggggaagtgggggcgtctagagactgagctgcgggagggagagggacttgtgggtctgatcccatttctccccaccctggggctcttctgtgtctgccaccattcccatatcatccgtagagaaagaggctggggatatttcaggctgtttggctgtccctgtaccccagtcctgaagcccctgcagtggcgggactcaagctcctgacctttgcccgn

SEQ ID NO: 111702 - DNA, 394 bp, Homo sapiens
  misc_feature (1)...(394): n = a,t,c or g
gtctcatcaagtatggacatttaagagtgaatcagaccttcaactggaatacaagtaagtgacattgttctggggagtttctactatatcgaatctaaaaagacaatatagtcgtgtcatnnnnnnnnnnnnnnnnnnnnnnnnnnnnnnnnnnnnnnnnnnnnnnnnnnnnnnnnnnnnnnnnnnnnnnnnnnnnnnnnnnnnnnnnnnnnnnnnnnnnnnnnnnnnnnnnnnnnnnnnnnnnnnnnnnnnnnnnnnnnnnnnnnnnnnnnnnnnnnnnnnnnnnnnnnnnnnnnnnnnnnnnnnnnnnnnnnnnnnnnnnnnnnnnnnnnnnnnnnnnnnnnnnnnnnnnnnnnnnnnnnnnnnnnnnnnnnnnnnnnnnnnnnnnnnntan

SEQ ID NO: 111703 - DNA, 369 bp, Homo sapiens
cagtcatcatgatggtggtggctggcttcttcaccctctgtgccgtgctctcagtcttcctcctgcagcgggtgagtggtgtgggcagggctgacagcaaatgggaggaggcaggcaaccgtttcctgcccttgccacgagatgtttttcaccactgcagttgggcatcctaggcccccaaaggtccagtacctttctccagggatctgggtggggggtcaggcagtgccaggcttctggtgacccctttgggagtataacctggatggctggcttcctggtgggcccaaaggacaggcttctctcaccccacccctcttcgccaggtgcactccctctaccgacggacaggggccagctttcaacagg

SEQ ID NO: 111704 - DNA, 350 bp, Homo sapiens
ctggaagaccacgctcgggtggaaatacgagcatgcctttgagagcagtcagaaatataaggaaggaaaattcatcattgagcttgctcatatgatcaaagacaatggctgggagtaatgtgcgaactttcccttctcctttgaatgctgttttgtgaaagaaactgtgaatgtaatggaaacgtaggagcatctggtgacagcctttcttgccctctgacctcaaaggctagctgcgcatagctcttgacactctcggccatctctgtgggtaaggtgtccctcggatctgtcctcttcgtgtacacagttgtttctgaaaattttcaatgagctttttctaacttctc

SEQ ID NO: 111705 - DNA, 377 bp, Homo sapiens
  misc_feature (1)...(377): n = a,t,c or g
tcagcttgctgggtctgcttggagagatcacctacattgtgctgctggtgcttcatactgtctggaacggcaatggcatgtgggtcactgggcttaccccccatccccttaacactcccctccaactcaggaagaaatgtgtgcagagtccttagctggggcgtgtgcactcggggccaggtgctcagtaggcttcggtgaatatttgttggctgatttattcagaaatnnnnnnnnnnnnnnnnnnnnnnnnnnnnnnnnnnnnnnnnnnnnnnnnnnnnnnnnnnnnnnnnnnnnnnnnnnnnnnnnnnnnnnnnnnnnnnnnnnnnnnnnnnnnnnnnnnnnnnnnnnnnnnnnnnnnnnnnnnnnnnnctata

SEQ ID NO: 111706 - DNA, 389 bp, Homo sapiens
aaaattggtgactggtgtgatagcagtagcccagaagggggtggagggagcagggagcattgcagcagccactggctttgtcaaaaaggaccagttgggcaagaatgaagaaggagccccacaggaaggaattctggaagatatgcctgtggatcctgacaatgaggcttatgaaatgccttctgaggaagggtatcaagactacgaacctgaagcctaagaaatatctttgctcccagtttcttgagatctgctgacagatgttccatcctgtacaagtgctcagttccaatgtgcccagtcatgacatttctcaaagtttttacagtgtatctcgaagtctttcatcagcagtgattgaagtattttgtcctgcccccactcaacat

SEQ ID NO: 111707 - DNA, 1080 bp, Homo sapiens
atggaaagagtctcacttgcagttgtttcattcacaacccaggcgtctgccttaatagcatcacctgtgccgtctgcgtttctagcgtcacctgtgccgtctgcgtttctagcgtcacctgtgccgtctgccttcctagcatgacctgtgccgtctgcctttctagcatgacctgtactgtctgcctttctagcgtcacctgtgccgtctgcctttctagttaaagttgattttaaattaatttgggaaaaacggtgaacaagtggggaaaaacatcaccaaagactccaaacaggtggaacgatgaacttaatgttccctgcaccctccttacagatgcctggactttggcctgtgaatgagccccggggggctgggacagtaggggttttcatggaatggacatggggtagcaggaagtctcagccccagagggcttggcaggagccgccctctctgcggagttcttcccagcgggtgtgcgttggtggctggcggggaccccccacaggaactaggtctcaggctgtggaaagggagctgccccagggcccaggagggccggctctgcattccgcatgttcccagagtgaaagagaatgagaaggagacacacaagtgctgttatgacctgggttgttggttggcaaatacagcatctaatagaaactttcttccatcccagaataccctcctacccatctgctttggtcagggtgccgctcggaggatttaaaagcaacaagaagaaaaccaaacaatgctgatagactcagaaaaggagtggggggcagtcacccactgctgggcgtggcatccgcctttgggcctttctacgacacttctggtgatggccgccctgggggccaggccctcgccatcctccctatccttgttcctcagcaaatggcatctagcagctgtcatcagaagctgtgagggacccacagattttggaaacgacctgggacacactattgggaaggagatgtggacggcctcgtctcctctgcacgggcccaccctaagaatcgtattcttaaacacatgaaaaaaagtatttttcactgataaaaaaaa

SEQ ID NO: 111708 - DNA, 366 bp, Homo sapiens
  misc_feature (1)...(366): n = a,t,c or g
cttgactatctgaagtaagtttgggatacctgtgacccttaggaaatgaaggtttcttctctcggatgaacgtgataactgtatttttgtctctcttccttctcaatctatcaaccttagcattcattaaggcagatctccggagacagaaagcaaacaaagaaactcttgagaacgtgagtatatgggagctttgtggggctgagatcggggtccaaggcttttgatgaggatgtggcaacatagatggggcagggagaactcccacagggactggttttgtcatagctgggagaccagttcatcccttacacatggcatcctaagactttcctcagtgggcatctttggcattgcgttcttgcn

SEQ ID NO: 111709 - DNA, 396 bp, Homo sapiens
  misc_feature (1)...(396): n = a,t,c or g
cgtagacatccgcaaagacctgtacaccaacatagggctatccagaggcaccaccatgtacccgggcatcaccgacaggatgcagaaggagattaacgccctggcatccagcaccatgaagatcaagctcattgtgcccccagagtgcaagtactctgtgtggatcagcggctccatcctggcctcactgtccaccttccagcagatgtggattagcaagcaggagtatgacgagtcaggcccctgtatcgtccaccgcaaatgcttctaaatggactgcgagccgatgcgtagcatttgctgcatgggttaattcagaagtataaattggccctggcaaatgcatatacctcatgctagcctcacgaaaatggaataagccttcgaaaagaaaan

SEQ ID NO: 111710 - DNA, 348 bp, Homo sapiens
catagcccttgatcagctttgccgcccctaccggggaagctccatgctggctctcctcacgggactctcccagaatcgcagcagggagagctatgggccattcaggggctcgcacagggctcctgctttcaacagcatctttcagaatgagaacttccagctgcagctcattcctccacctgggactgaggattgatgactccatgtaacctggcccacgagaaccagagatgatcccgaggcagctggggagaggccccggctctggaggaaatgggctgcaccacctgccacgcttctgagaagaggttccaaaatgggcttttgtgcccagagcgaccacagcct

SEQ ID NO: 111711 - DNA, 653 bp, Homo sapiens
tagcgtttatatatccaatgccgaacctaagcacaatagcaatagacagttagaaagaagtgaaaaaataaacccagattttgaatgcgctggcttgggagcccagagaccaggcctggcttgcttttaaattgttgcatgacccactgcacccagcctactttgttattattatagatgtaaggatacaatgaatttctctgagtttctctttaaagatttaggcctgcttaacttccttggacctttgtttttcaaacctcaactttttctgttcctccttgcccctagttattgttaaaataggccttaccccctttccccatcaggtccctaatcaataccctcacatctgttgcccttggttacctgcaccccattgttcccctcaaactgcatgtctcacacacttcacccactgtacctcacgtccccttcccctccatatttagaaaaatatttccaagtagccagtcaggtcagctcagattgcgcagtctgaccccagctcatgcgggagggacacagaggtagggattgcattaaggatataaaaactgcctggtctcctttgttctttgtgctcttgcaatcttgattgactcaagtggcacccttctgcagaagtaaattgccttgctgagaaaaaaaaa

SEQ ID NO: 111712 - DNA, 351 bp, Homo sapiens
  misc_feature (1)...(351): n = a,t,c or g
actgatctttgaaacagaacccatcaattcatgcggtctacttcccatgctttnnnnnnnnnnnnnnnnngggcaaatccttttccccccaattttcttcccccaacccaaatgcattctttttgggggttcacccaaaacctgtcagcattccgtcgaaaagtcaacgactcatggaaaaattccccttatggggggaataccaatgacttgaggagctgacccctctttggactttacctgaacaaagcagggtccttttggtttggcccaaaggggcgaaaaattgcaggggaaagggccgggctgaacctggtttttttctcacannnnnnnnnnnaaaatggcaag

SEQ ID NO: 111713 - DNA, 539 bp, Homo sapiens
cctggatggggatgagctgaccctggctgactgcaatctgttgcccaagctccatgtggtcaaggaacaagtaccactgaaagggatgatataattccagctcagtcacactgtgtcagagtgatacaatgcaaagatcaggagacccgagttccggtcctgtatttgctgccaactagcaacatgagctgaggcacatcatttaatctttttggaattcatttttctcatgcctagaagaacagaagtggattgtattccttcttgccttcttttcctttcttctttccctccttctttccttttctcttgctcaaacatgtattcactaccactcaaaaaccatttgttgaacaaagcaaacaaatgaatctcccaagccttgggttcatcctgtgatttcctcaattcccacctgccttaaaattacttcagtggaagccctgttccttgggaggaaaatttcagtggggtggtttaacccagaggaaggtgggaggttcaaaaaggaggtgggccatggaaggaacaaggggcct

SEQ ID NO: 111714 - DNA, 356 bp, Homo sapiens
agtaagctggacggcatcaacaggcactccttcaactccttccgcctccgcgtcggtgagcccgggtgatggagcggggtggggagcccctgcctctaggccagtccacccagtctgtgtggcacagctgcacctcgccatctattatgaaaggttttagaaatccctctgatctgacaagctcagcagttggacaattattctgatgttttgcatatagttagcatatagttaccattgagagttttaataatacgtaactacagaaaatggagaaccaaaattattgtctgtaaacaggtgcccttaaaatatagagaaggaagcaaagttagtaaacctaaatagttgcgggc

SEQ ID NO: 111715 - DNA, 392 bp, Homo sapiens
atgaagaaacagcagctatcttgaagaattcaagatttgctcaagattttctgatcacaccaattgcagagaagttgccaacatctggaggctgttctgctttggagttaacggatataatcacacatccatttaagcttgcagaaaagtttgaccctatgaattccacacgagcccctgatgcttcttaaggctgctgtgtatcaaaaaatagctgctgaagccattgcctaccacgtgaccactcaagtgtgcgggaaagcacctcctgagtatgaacccagtttcccccttaccggcagctgtacaacgcaaacgcaccatcccttgagcgcggccataaacgaattatttctcctaggcgtgtgttagtgatgcacaggaattacttg

SEQ ID NO: 111716 - DNA, 405 bp, Homo sapiens
tttcggcacagcacacacacacacacacacacacacacacacacacactcacatctatcccttctgcaggttggtaacattggagctttgtaatttacctgccaagggactttgggaatttattccttggttcattcaaaataagtcaatttgactgagtgcatgccatatgcaaggctctggggaaactaaggctgcttatgacctgaggcttaggagtccagtgagggaagcctggagtatggcatttgtcatgggtgggtaaaattcgtggcagtgggcaggcatgggatgtttgctatggaagcagaggaaggaatctcaataaggccaagggtgtcatggtcactgacaaattattgcatagactgaggttcaaatcctggtatctgcgctgaacgtgga

SEQ ID NO: 111717 - DNA, 385 bp, Homo sapiens
  misc_feature (1)...(385): n = a,t,c or g
cacgatgcttggtgattcagtgatgttttccacttaaagacagtgatagctgtatcaccacagttaatagatgtctgatgtgtcccagtcacagagataatacaaatgtgaggaaataatgctggtgcctgaaagcattggagaccatttgtaagaatgccatttggtagttaaagtgaacatgaaaattgtttagtttttcttggtttcataaacattttttcttcctgtagaactgataaatttcaaacggaagagagtggcagcatttagaaagaatctaattgaaatgtctgaactggaaataaaacatgccagggtaagtgttttctacagatgaagccaacatcttttatgggtttttccaaggtatttcccaagttan

SEQ ID NO: 111718 - DNA, 351 bp, Homo sapiens
cttggctgcagctggagtggagatgggagtttgatgttccagcaagtaccaaagagaaaacaaaaagtcgctatttccctgccttcgaaaaagtgttacagagccatggacaagactaccttgttggcaacaagctgagccgggctgacattagcctggtggaacttctctactatgtggaagagcttgactccagccttatctccaacttccctctgctgaaggccctgaaaaccagaatcagcaacctgcccacggtgaagaagtttctacagcctggcagcccaaggaagcctcccgcagatgcaaaagctttagaagaagccagaaagattttcaggttttaataaa

SEQ ID NO: 111719 - DNA, 358 bp, Homo sapiens
  misc_feature (1)...(358): n = a,t,c or g
cagtcctgatggcaggtatctggcaagtggttcttttgacaaatgtgtacacatctggaacacgcagacaggtgctctagttcacagctataggggaacaggtggaatatttgaagtttgctggaatgcagcaggagacaaagttggagccagtgcatcagatggttcagtttgtgtattaaaccttcggaaatagcgctactagttggaagccatggaccgactatgaatgtgtacatagccaaaatgactgtccctgacccatgtactgctatagtcccacttgaaccatggccagtccactacagccaaatctaaaagaaatatatacatacagtgtatataaacaaaattgccn

SEQ ID NO: 111720 - DNA, 353 bp, Homo sapiens
  misc_feature (1)...(353): n = a,t,c or g
atttcaatatgggataagactgccagggaccaagcggccacagcccgaatccgggacacacttcggggagagcttaacctacctcccaacaccattatgggatacaaaactcacaccgacagcatcaaaatgccaggcaggctgtgcccccaaaagctcctttttcaaaacctctggaagccgcgggtgaatgtgccatgaccctctccctctctggatggcaccatcattgaagctggcgtgatcggagtctcttgttctgttggcgtgctacctggaagatccttctgtcctggacaagaggaattggaagagcattttatgttttaagaacaggctgacacgcaccaccn

SEQ ID NO: 111721 - DNA, 358 bp, Homo sapiens
  misc_feature (1)...(358): n = a,t,c or g
tttcttcattcttgnnnnnnnnnnnnnnnnnnnnnnnnnnnnnnnnnnnatgaaggtttaatgagatagcctcatgccaggcacagagtacacagtaagtgctcaatacttaactattattgttagatgttggtttgcttattcttctggctctgatttttttcccctttactctttttgtttttgtttgcatttcagggtgaaacttcctacatccgagtttatcctgagagaagcaccagctatggttactcacggtctcggtctgggtcaaggggccgtgactctccataccaaagcaggggttccccacactacttctctcctttcaggccctactgagacaggtgatgggaat

SEQ ID NO: 111722 - DNA, 356 bp, Homo sapiens
gactggaaccttgccctgaaccccgaaggaggacccaattgggtgcgaaactttgtcgacagtcccatcattgtagacatcaccaaggacacgttttacaaacagcccatgttctaccaccttggccacttcagcaagctcattcctgagggctcccagagagtggggctggttgccagtcagaagaacgacctggacgcagtggcactgatgcatcccgatggctctgctgttgaggtcgtgctaaaccgctcctctaaggatgtgcctcttaccatcaaggatcctgctgtgggcttgctggagacaatgtcacctggctactacattcacacctacctgtggcgtagccagtg

SEQ ID NO: 111723 - DNA, 373 bp, Homo sapiens
  misc_feature (1)...(373): n = a,t,c or g
gtgttccaagggttttaaaacttnnnnnnnnnnnnttttaaccggccggttccgatttttttttaaaaattttttaaggacccccaagcccccaaatttaccaaaattaaaaccccggggggaaaatttgtttttccccccccaaggtccaaaaaagtttattccaaaccccgcccccttcttaagcagaaaaaaggaaagcccccccccaaaagggttaggatttccagttccttttcccaataaaacaaggcccccccnnnnnnnnnnnnnnnnnnnnnnnnnnnnnnnnnnnnnnnnnnnnnnnnnnnnnnnnnnnnnnnnnnnnnnnnnnnnnnnnnnnnnnnnnnnnnnnnnnnnnnnnctcgaaccg

SEQ ID NO: 111724 - DNA, 375 bp, Homo sapiens
atcggctaggaggactgagcaatcacagcaaaggtgggaactggcgaaccaacctgaacgagatccacggtgaacctcaccttatcctcatcgtcttgcgagacattgcggttgtggaggagcttctgtgggactatggggaccgcatgaaggcttgcattgaagcccaccccaggctgaagcattaaccggtggaccccgtgccctccccgccccactttcccttcttctgaggacaaagggccctgtgagggaaatgaatcttttttttacacacttaatattaccgcattacttctgatgtttttaacacgcacatcaagatgccctctcactgtagtactaaaacacttgttacaggtcttcaaggaggac

SEQ ID NO: 111725 - DNA, 391 bp, Homo sapiens
  misc_feature (1)...(391): n = a,t,c or g
tgtagtataccctcaacttttgaatatgtttgaaaatcttaataattacatatacagcagtaaaagcaataaacgaatgttagaactcctactgttggcaaacataatgtttgaaatgctttactacaaaaaattaagattttctaactttattttaaatttctgtctcctgtttttttgnnnnnnnnnnnnnnnnnnnnnnnnnnnnnnnnnnnnnnnnnnnnnnnnnnnnnnnnnnnnnnnnagttactgttgaccaagtcttcctccaggctctctatttcacttttaagtgccaaaaatggatatttaggcttggtatttgtttacagtttttctgttcataatgacaacatggtagtgaatagctctgggtaatctccagcaaaaa

SEQ ID NO: 111726 - DNA, 463 bp, Homo sapiens
gaccaattatctgcatacatagaatttttcttgtttagaaattttaggtcagacgttctgaggatttgatatttacctcagggatcaagtatttgacctaagagagaatcagtaactagggacccttgatgcttttcgataagacatgatcatatctcttgatatttacttttacttaggtcgctcatcccgtcagtcatcctttattgcaggcgggatccttggggttgttctgttggccattttcgtcgcattattcttcttgactaaaaagcgaagacagagacagcggcttgcaggtttgagccaaatttggtttatctaatatgtctacaggataagggggttcttgtaagacgaaaatattagactcaagtctaatggccagaaagatggactctaaaagaggtttgagcagtttcttcaaaccggagggaaaggcccaggcacagtggctcacact

SEQ ID NO: 111727 - DNA, 2071 bp, Homo sapiens
ggtgacaaagaagctgaagatgggtggtggagagaggtataacattccagcccctcaatctagaaatgttagtaagaaccaacaacagcttaacagacagaagaccaaggaacagaattcccagatgaagattgttcataagaaaaaagaaagaggacatggttataactcatcagcagctgcctggcaggccatgcaaaatggggggaagaacaaaaattttccaaataatcaaagttggaattctagcttatcaggtcccaggttactttttaaatctcaagctaatcagaactatgctggtgccaaatttagtgagccgccatcaccaagtgttcttcccaaaccaccaagccactgggtccctgtttcctttaatccttcagataaggaaataatgacatttcaacttaaaaccttacttaaagtacaggtataaaataagacaaatgtttaaatttagttatgttcacggatagttgtcaattggtctgaaacaaattcgctaggggaatctatttgtgtaggaactaattaatgtaaaaaaaacagaccatctcgtgttgtgtgcactgtgatataatgggtagtatcagtgcaacttaaactaatgattgtacttggatattaagtgttctcaactgaggtaacttttaagtggaaaccaagtttagattaggggagtggtaaaggaatcagcttgttctattgttaggggaagacagtaatttatcattcatggaccagtagattgttgaaagttggtgaatcggattataagcttctagctaacacaaggattcagaattaggtaaacatctgaaggtttagtatattagaaacacccaaaccagtaatatgctaacctgatgcactgctgaaagaaaatgtgaatttttcgtaataattgcattttagtgaattgtacagtgggtggaaagggcatttggagctcattagaatgagacatagtacaccccaatggccctgtttattaaatgtagtggattaagtgtctgtcaacaaatacaccaaaaccatttttttatagaaacagtatttaatggtcactcaatagctttcaaaatacatttttgtattacagcactgcacaagctattctaatagtgctctggcctcatcattcctgcaaagcttgctttgggggagttggataatgtgaaaattttaagtacctaggggagaaagagccatgtaaatatctgtaataaacttgtagcatatgtaaagttttcttggcctttatcttacaaaaatggagtattttagtatgaatttgctgaatgtaagaccgtgggactgttttttataaatatggcctaatttttaaaggtcccaaaattaacttgttttttaaaggtttgccccttgtgccaaaggtgccagtgtatgtatgttatacttgatttggttgtaaactatatttcaaagtaaaccctagtgtaataagttttataactaaaaagggtttaagctgctaaaactatttttaaggagatgtgaaatgcagtatgggacctatctttttttcctcctctaagcccaaaggattaactagagtccctccaaccttatagattgttgggctttcacaatcttataaccctagggatacaggtagtttccgagtatgggtggcccagtgatggttttggtttttggtttgggtccaaggggtagggtgcaacccccaatggacccaccttatgccaaagatgtaaacccctggcataatacattgataacatgttttgcccaacctttaaatgccttaaacataaagcgaaacccagtagtcaagtatgtgggtccagccttaaaaattttgattgttaatgcccctattttcctaatttgggcacctcttgatgccctaagcaggtaagcagatgcctaagctgtatttctccaaataaatccaagatgaagtactgcccaagttaaaatattggatagcctaaagacaagtttatgtagtacttaatgtacatgatatgaatgtgaagcatgaaaattaaataaaatttttccccattggaaaaaaaaaaaa

SEQ ID NO: 111728 - DNA, 312 bp, Homo sapiens
ttttttttttgagacggagtctcgccctgtcgcccagcctggagtgcagtggtgtgatcttggctcactgcaacgtccgcctcccgggttcacaccattctccttacaataccacattgtttctaatagcaaaacactggaaccaacctaaatatccagcaaaacaggactaaacaaattactaaaaagtccctgcaatggaatactcatttcacaaactttgtaagtttaagttatataactttaagatcaaacctgtccgtaacatacaagaaaagaaaattaaatctgatctcattcatgcagaggcaa

SEQ ID NO: 111729 - DNA, 365 bp, Homo sapiens
  misc_feature (1)...(365): n = a,t,c or g
ggctcaataccctgatactaaagccagacaaggacattacaagaaaagaaaactacaggccaataaccttgatgaatatagacaaacatttagccagactaagaaaaaaagagagacaacacaaaatcagagatgaaaaaggagacattacaactgataccgcaaaaattcaaaagatcattagtggctattatgagcaactatatgccnnnnnnnnnnnnnnnnnnnnnnnnnnnnnnnnnnnnnnnnnnnnnnnnnnnnnnnnnnnnnnnnnnnnnnnnnnnatccaaaacctgaacacaccaacaagtaacaagattgaagccataataaaaagtctcctagcaaagaaaagcccaggaccn

SEQ ID NO: 111730 - DNA, 352 bp, Homo sapiens
  misc_feature (1)...(352): n = a,t,c or g
ttcgagacatatcctggaagagttcatccgaggttccaaaagttacccgtccattgtgcgcctcctgcaccgcgacccgagcagtgccggccagttctgagccctgcgcccaccaatcgaattgtagagctgcttgtgttcccttttgattcttctttttaacaannnnnnnnnnnnnnngccaaacaatatcaagggggaggccgccccctggggggtctgatgccccttcttccgggaccccttcagttttttttgtcggggatgcttcggggaaaggcccaaacccccagggggtttggggaaaacatggacaaactctgggggggtaatggttggaggattttaaagg

SEQ ID NO: 111731 - DNA, 378 bp, Homo sapiens
cttctacagacacattagtgtttgggggcaattttttgcatagcttcaacatccctatgcagttaaaaatatacaacattgaagatcggacacgggttccaaataagtttcgctatccattctactatgagatgtgttggtatgtgttggagcgctatgtgtactgcataaccaaccgttcccacctaaccaaggaatttcagaaagagtccctcagcatgggtaagtattctgcctataggagctttgaagacaccgcttaggtctgagggtgaggcccgaaatactcagtaggctgtcactcaatatgttcttgggtttttaattcatctacttggaagtaccaaattcatcactgggattgaataccagttaccg

SEQ ID NO: 111732 - DNA, 376 bp, Homo sapiens
tccagccatactccacagaatcttatcacagtgaaggtgagctcggagcaggggtagagtacccatctaatgagagcagagacagtggtgctccaggaggcaaagggggtctcccagtggggaaggagctcctgggggtggtgtctgtccctgatgcacgcactgagatgctcttctccatctcttccaatacagatggagcaggcctttgcccgatacttgctggagcagactccagagcagcaggcagccattctgtccctggtgtagagcctgggggacccatcttccacctcacctctttgttcttcctgtctcctttgaagtagactcattcttcacacgattgacctgtcctctttgtgataattctcag

SEQ ID NO: 111733 - DNA, 372 bp, Homo sapiens
ccacgcaccagaatctgacttcctacagccaagtaagggtgcccttcccctcccctctaaccgccccctcccctgttcactcagactgagagcttatatcctgcttgggctcaggggcctcagcagcccctgacaagggaccacagggcaggaccaggggctgggaggggctgggctgggctccctgctggccagtggcgtggcagggctctgggcccctcagtgggctggggaggtgctgcttctggtccttggacctgcccaccttagcaggcactagctaggcccagatccggtgtggggtcctgcgtgtcccagcctccaggtgctgttcctgtgttggccgcactgttggcacgatacgctccaaaa

SEQ ID NO: 111734 - DNA, 366 bp, Homo sapiens
  misc_feature (1)...(366): n = a,t,c or g
ggagtggccatgcttttctctgccgggacatttctttatgttgccacagtacatgtcctccctgaggtgggcggaatagggcacagccacaagcccgatgccacgggagggagaggcctcagccgcctggaagtggcagccctggttctgggttgcctcatccctctcatcccgtcagtaggacaccagcattaaatgttcaaggtccagccttggtccagggccgtttgccatccagtgagaacagtcggcacgtgacagctactcacttcctcagtctcttgtctcaccttgcgcatctctacatgtattcctagagtccagaggggaggtgaggttaaaacctgagtaatggaaaagcttttn

SEQ ID NO: 111735 - DNA, 626 bp, Homo sapiens
ggtgcaatcacagcttacagcagcctgaacctcccccaggctcaggtgatcctatcacctcggcctcccgagtacctgggaccagatgcataccaccatgcctggctaatctttttgtgtttttagtagagacgggctttcgccacgttgcccaggctgattaatattcattcaataatttcaaaatcataaaaatacacatttcttcaggaaaataagaactagcgttagactttggaaggaactaaattgttttccttaacagaattacccatttttaactttattaacattacatattgcaatttcaaaagtctaattcattaaatacaattcctcctcaaaacccctagaacagtttttggtagttatagacaagccttcttttaaaaattaacatgggaaaggaacaagccttagaacatcctaaaactgttgaaaaataaggtgaatagactccaccctggcattaagtcagactatgtaggtccagtaatcaagacagtgtgatactgacagagcagcagatactcaaaacaacggaacagaagagaacccagaaacagatttacacaaatatattcaatgctttttcacaagggtgcaaaaagccatgtcagtagacg

SEQ ID NO: 111736 - DNA, 390 bp, Homo sapiens
tggatgtggtctacgcgctgaagcgacagggacgcactctttacggcttcggtggctaaggctcctgcttgctgcactcttattttcattttcaaccaaaggcccttttcagggccgcccacttttttcataaaagagcagacatcttgttatcctgctttgttccagatttttgctgagaagtagttactgtgcacatgtgtagattggcagttctgtggctcctgatggatctgagaagatggacgtggaggatgaaaatctgtctgattattttgaactgatgtttgttgctatggagatgctgcctatatggagatgttgcagacgttaagtcactaacccacagccttgtattccatactcagagaccctgctacttacttgaca

SEQ ID NO: 111737 - DNA, 363 bp, Homo sapiens
gtattgtctggacatctggatgaagttttactaaagtataataatgtcccttgtctcacaggcgtggaagacgaagaggatggggaaatgagagaatagcgtcttttctgggggattttaaaaacatatatttctcgactgtatagatttgtttggctttcaaatatctcaatgactgtatagcaccctcatatactgtcagatcagtaagtcgcttacaccttttggccggcgtttggcattataaatccctatcaacgctcataccctttgattcagggcttttttgacagtacatgctaaggagaccctcaggaaaatatccagggagtacttactgcccagttattgtagaccattaag

SEQ ID NO: 111738 - DNA, 369 bp, Homo sapiens
cggcacgagatgagcttcaataccctggatagaggcgggtggaagacacacgctaaaggaaaaccactcccctcccctgttgctggcctccccaaccctgcgaacccccagacccacctccaatctgcatgagtctgggcctctggcctcccgcatgttcccctggacatggtctcactgctgtgaaaagttcctgtctcttatcgcagcccctcaggacccagcttcttgcttgtctcacccagaggaggtgttaattggtgagggcagaggagactccctcagagctctcttccccttgcctctgcccgggccctacctcccgggccttcacattctcttgggtaagccgaggaagcctgggaggcc

SEQ ID NO: 111739 - DNA, 751 bp, Homo sapiens
tggaagaaaaggattttcttatgtcacagccattactcatggtttcgttcttttggctgggattatcatgggactcctctggcagaagttggttctgggaagatggctctgttccctctccatccttgtacgtctctaactattgagggtaaacacaagctttccatggaatcctgggaaaattaataatgattgtgagaattataaatacagacataaaaagaggagtacaacatactgagaaaagagctccagtaacaaatattgaaaggagatttagtactaaagaacttgaccagatcaatggatccaaaggatgtgcttattttcaaaaaggaaatatttatatttctcgctgtagtgctgaaattttttggatttgcgagaagacagctgccccagtgaagactgaggatttggattagtatgcttcttccaaattctccaagaagtaagagacttgtgagtaagctcatatgaggaaagaggaaactacggtaccagagccaaaccagcttttaaaatgactgtgtatttacattatcagacaaatgaacttgtttaacagaacattctccagttccttgtctgacgtcttctgatttgatgttattattcggtcttaaaattatacctggggacaaaggggaatagccatactatggccctatgattgtctcagaatcatttcactgaatttctttgctttctcaaataaagactcctttctttcattattaaaaaaaaaaaa

SEQ ID NO: 111740 - DNA, 407 bp, Homo sapiens
ggcacgaggaatcacatgttcttcatcgcgataacgaagaaacctgaggttccattttttgggcctctgtttgatggagccatagtgagtgggaagctgctgccaagccttgtatgtgccacgtgcatcaacgccagcagggctgtgaagtgcctcatcccactctaccagagcttctatgaagagcgagctctgtatctcgaagcaataattcagaaccaccgcgaagtaatgacattcgaggatttcgcagcccaagtcttttctccctctcccagctactccctcagcggaacggattaaaacacgtaaaggtctcatttcaatatttgagcaaggggccctggcctccagtctgagtgctgacctcgaagagcccctgagtgaggaggagacagaacaccctc

SEQ ID NO: 111741 - DNA, 861 bp, Homo sapiens
  misc_feature (1)...(861): n = a,t,c or g
ccggagaacatctgccatcaaggcccttaatgctacaggacaagcaaacctcagcctggaggcacttttccagatgattttttaaaaaatgaaattcttgaagagctgcaccttaaaaaataagacaaagtgaaagtattgtattatgttacaaacaatgcaggctccttcctcatttaactttacaaccttgcgaagtgggtccaggagatttggagtttgtggtaaagccagtaatgggcattgtcctgcattcccttcccttcatggtttgcctcgatcctctctaagcttctatcctggcctgaataactcaaagataattggtctcagagatcaagccatatcctcaggccttatttccatcttctcatgattctgccatcatacctttgcttctccgctaatgaaatgagctggcaagacctctgttcattgtgaagtgcttctgaaagagcctaagaaaaaaggctcatctgaaagaaatggagaactctatttcgaaccaagcctgtttgaatgagtgttaaacagaactttgatcatgcgtttccatgtaatgggagactcgttttttataatgtttctaacgttttattgaaaaacctatggccctccttctttctcaatagctactttgttactgctttttgaaaataatatgcaaccaaattatttcttaatgtcacataattaagtaataaaatgtcaaaagaaatgttggcaaggagaataaaaaaatttccaagaaacttnnnnnnnnnnnnnnnnngggctggccgttttaaagaatccaagttaacgcacgcgtgcaggcaacggcatagtttttttatagggccccttaaatacaattcactg

SEQ ID NO: 111742 - DNA, 1353 bp, Homo sapiens
  misc_feature (1)...(1353): n = a,t,c or g
aagcttttaatgataattcatgacagaagggagtttgctaaatttgaaaaggagaaaatgaatgccaaatgggacacggtaagttacaaaacatccaaaaagcaaagtggcttataaagtaaatgtaatactcctaagacttatgtattagctgtcaggctgattattaaagtcctttctaagtattttattcccccaaaagtttcttactcaaggaatttgcatttagtgaaaaacagaaagcatcctaaatatatcccattgaaacaaaacattgattataagcatgtatattctggttcatgtggccgatatttttatttctttaatgattttgatcctaaatctgccttttcatctaatgtgaagtagaatcctaaataatgttatctgtgtagcaagctattcaatgggaaagctgcttctttctttaaaacaaacaaacaaaaaaaaccttcagtggaaagccaaattccaaaaggttatataccaagcttgtccaactcgcagctcgtcggccaggacatgcagcccagaatagctttgaatgtggccccaacacaaatttgtaaactttcttagaaattgtaattattattattatttttttttggtaactttttttaaagctcatcagctatcgttagtgtattttatgtgtggcccaagacagttcttcttcttgccagtgtggcccagggaagccaaaagattggacacccctgctatatactatatgattccatttagaggacattctggaaaagcaaaactgtaggggcaaaaatcagtggttgctaggggctggaatgggggaaagtgttgaccacagaggggcgtaagggatcttccttgggatgacttgattgtgggtggatttatgtatttgaaaactcacagaactatgtactttaaaaagatgtatgttcctctatgaaaattatatctcagtaaactttggcttataaaaatcttaaaagccctaagtgaccgaaaggttatgttagcattgagtgctttgaaatatggagtcagagggtggggtaaccaaatgttggcctttgtgtattcatcttttgatacaagaaagcaatgccaatcttcagtatttttaaattgtaaatgaattttgtagttagttgcactttactacaatttgcttgggtttttaaaaattatcaattttttaaattacaaatttcagaagggtagaaataaaaaaaaagacatttatagtgttcaaacactataaagggannnnnnnnnnctgatgaaatcattaaaaactattttttttactttagcaagaaaatccgatttacaagagtcctattaataatttcaagaatccaa

SEQ ID NO: 111743 - DNA, 390 bp, Homo sapiens
ctaagagggacctttgtaaagcataggtctctgtgtcccgattccatcatgggacaactaatcctaaatgataaatgtattactcaggcagcccctgatatcagagggaagttgcagaaatgggccctggcgtcggggagtactttaggagacctcctgaaagaggccaccttggtcttttacagtacagatagggagacacaagaaagaggcagaagctttaagggtcaccatgcaaacccacaaaccccagaattcctaaggtgcatctgttaactcctacagatgtggcaagaacagttatctctcttctaaaatttaaccacacccatgcaagtcttaatttctttcactaaggtgaaacagctcagggtacaatgttgttagtat

SEQ ID NO: 111744 - DNA, 1430 bp, Homo sapiens
  misc_feature (1)...(1430): n = a,t,c or g
agtgtgttagcttgtattagattcacatatttactcagtaagaattctttcattagagttttattcttcatatataagccttctctgatacttagctaaatcttaagtctattatctcgtgtgannnnnnnnnnncttacagatggcattggagtcaagagagattataaacaggccttgaagtattttaatttagcttctcagggaggccatatcttggctttctataacctagctcaaatgcatgccagtggcaccggcgtgatgcgatcatgtcacactgcagtggagttgtttaagaatgtatgtgaacgaggccgttggtctgaaaggcttatgactgcctataacagctataaagatggcgattacaatgctgcagtgatccagtacctcctcctggctgaacagggctatgaagtggcacaaagcaatgcagcctttattcttgatcagagagaagcaagcattgtaggtgagaatgaaacttatcccagagctttgctacattggaacagggccgcctctcaaggctatactgtggctagaattaagctcggagactaccatttctatgggtttggcaccgatgtagattatgaaactgcatttattcattaccgtctggcttctgagcagcaacacagtgcacaagctatgtttaatctgggatatatgcatgagaaaggactgggcattaaacaggatattcaccttgcgaaacgtttttatgacatggcagctgaagccagcccagatgcacaagttccagtcttcctagccctctgcaaattgggcgtcgtctatttcttgcagtacatacgggaaacaaacattcgagatatgttcacccaacttgatatggaccagcttttgggacctgagtgggacctttacctcatgaccatcattgcgctgctgttgggaacagtcatagcttacaggcaaaggcagcaccaagacatgcctgcacccaggcctccagggccacggccagctccaccccagcaggaggggccaccagagcagcagccaccacagtaataggcactgggtccagccttgatcagtgacagcgaaggaagttatctgctgggaacacttgcatttgatttaggaccttggatcagtggtcacctcccagaagaggcacggcacaaggaagcattgaattcctaaagctgcttagaatctgatgcctttattttcagggataagtaactcttacctaaactgagctgaatgtttgtttcagtgccatatggaataacaactttcagtggcnnnnnnnnnncttttttggaaacatatgtgagacactcaaagtaatgtctacgtgatccagctatctttcttggatccttttggccattatttcagggcgcataagttcttaatgtcaaccatctttaaggtattgtgcatcgacc

SEQ ID NO: 111745 - DNA, 984 bp, Homo sapiens
aattcgctggagcgcttcctgccccagcccttcaccggcgagatccgcggcatgtgtgacttcatgaacctcagcctggcggactgccttctggtcaacctggcctacgagtcctccgtattctgcaccagtattgtggctcaagactccagaggccacatttaccatggtcggaatttggattatccttttgggaatatcttacgcaagctgacagtggatgtgcaattcttaaagaatgggcagattgcattcacaggaactacttttattggctatgtaggattatggactggccagagcccacacaagtttacagtttctggtgatgaacgagataaaggctggtggtgggagaatgctatcgctgccctgtttcggagacacattcccgtcagctggctgatccgcgctaccctgagtgagtcggaaaacttcgaagcagctgttggcaagttggccaagactccccttattgctgatgtttattacattgttggtggcacgtccccccgggagggggtggtcatcacgaggaacagagatggcccagcagacatttggcctctagatcctttgaatggagcgtggttccgagttgagacaaattacgaccactggaagccagcacccaaggaagatgaccggagaacatctgccatcaaggcccttaatgctacaggacaagcaaacctcagcctggaggcacttttccagattttgtcggtggttccagtttataacaacctcacaatttatactacggtaatgagcgccggtagcccagacaagtacatgactaggatcagaaacccgagtagaaagtaagtcagcagaagagcgagttcgcccgtgctgtgaaagatgattttttaaaaaatgaaattcttgaagagctgcaccttaaaaaataagacaaagtgaaagtattggattatgttacacacaatgcaggctccttcctcattgaactttacaaccttg

SEQ ID NO: 111746 - DNA, 379 bp, Homo sapiens
acttgaaaactgtggacaagttcaacgagtggtttgtgtcggcatttgtcactgcggggcatatccttaccttcttagtaaaggtaactaactaaagtttgggctcacaaaccagaagaacatggaacatagatgccaggctctgagtctgtagacttcacagtcaggtgaaaatgtaagtttccatttatggggctacttttctttttttaggggggaaaaacattttgtttaatagctaattttaaaactaagtctcatacacaaaaagagtttatctggaccctatcaagggtgattttactttattttacagttattttctaactttgaaagcttatgttctctttatgataaaactaagctaattttaaaccca

SEQ ID NO: 111747 - DNA, 362 bp, Homo sapiens
  misc_feature (1)...(362): n = a,t,c or g
cctagcagtcagctgggggagatgtccctggaaaaacacagccagtgtgaatgcagacctaaaaaaaaggacagtgctgtgaagccagacagggctgccactccccaccaccgtccccagccccgttctgtttcgggctgggactctgcccccggagcaccctacccagattacatcacccatcccactccagccccaggcccctctgtccacgctggacccatcaccaccatcgccctgaaccccggacctgccgttgacgctgcctacaccctagctttctacgttgtcaagggcggggcttatagctcaacccaaacacctgcaggtgccggaagctgctaacgtgactcatggctttn

SEQ ID NO: 111748 - DNA, 1958 bp, Homo sapiens
cttcttcagcctggcgttctgtgacttctgccttaagtttctgttccatggcttccgttgccaaacctgtggctacaagttccaccagcattgttcctccaaggtccccacagtctgtgttgacatgagtaccaaccgccaacagttctaccacagtgtccaggatttgtccggaggctccagacagcatgaggctccctcgaaccgccccctgaatgagttgctaaccccccagggtcccagcccccgcacccagcactgtgacccggagcacttccccttccctgccccagccaatgcccccctacagcgcatccgctccacgtccactcccaacgtccatatggtcagcaccacggcccccatggactccaacctcatccagctcactggccagagtttcagcactgatgctgccggtagtagaggaggtagtgatggaaccccccgggggagccccagcccagccagcgtgtcctcggggaggaagtccccacattccaagtcaccagcagagcagcgcgagcggaagtccttggccgatgacaagaagaaagtgaagaacctggggtaccgggactcaggctattactgggaggtaccacccagtgaggtgcagctgctgaagaggatcgggacgggctcgtttggcaccgtgtttcgagggcggtggcatggcgatgtggccgtgaaggtgctcaaggtgtcccagcccacagctgagcaggcccaggctttcaagaatgagatgcaggtgctcaggaagacgcgacatgtcaacatcttgctgtttatgggcttcatgacccggccgggatttgccatcatcacacaggggggggagggctccagcctctaccatcacctgcatgtggccgacacacgcttcgacatggtccagctcatcgacgtggcccggcagactgcccagggcatggactacctccatgccaagaacatcatccaccgagatctcaagtctaacaacatcttcctacatgaggggctcacggtgaagatcggtgactttggcttggccacagtgaagactcgatggagcggggcccagcccttggagcagccctcaggatctgtgctgtggatggcagctgaggtgatccgtatgcaggacccgaacccctacagcttccagtcagacgtctatgcctacggggttgtgctctacgagcttatgactggctcactgccttacagccacattggctgccgtgaccagattatctttatggtgggccgtggctatctgtccccggacctcagcaaaatctccagcaactgccccaaggccatgcggcgcctgctgtctgactgcctcaagttccagcgggaggagcggcccctcttcccccagatcctggccacaattgagctgctgcaacggtcactccccaagattgagcggagtgcctcggaaccctccttgcaccgcacccaggccgatgagttgcctgcctgcctactcagcgcagcccgccttgtgccttaggccccgcccaagccaccagggagccaatctcagccctccacgccaaggagccttgcccaccagccaatcaatgttcgtctctgccctgatgctgcctcaggatcccccattccccaccctgggagatgagggggtccccatgtgcttttccagttcttctggaattgggggacccccgccaaagactgagccccctgtctcctccatcatttggtttcctcttggctttggggatacttctaaattttgggagctcctccatctccaatggctgggatttgtggcagggattccactcagaacctctctggaatttgtgcctgatgtgccttccactggattttggggttcccagcaccccatgtggattttggggggtcccttttgtgtctcccccgccattcaaggactcctctctttcttcaccaagaagcacagaattctgctgggc

SEQ ID NO: 111749 - DNA, 1819 bp, Homo sapiens
  misc_feature (1)...(1819): n = a,t,c or g
cgcggccgcgtcgactcggggcgatggctctcctcacagcgtggccctcagcagcagaggcaggtcatcttcctgagcgtttgtggcgctcctcttaaagataatgtccgagttttctttacatacctgtagctgtttttacttttctgtttttgaagtcagtttgtgtcttgacgtgtcccttgcaatatccctatcgttatatatgctgtgtgccttatgaaatgctgggatctggaaaatccaaccaaccaacccaccggctcctcaccgtctccacctctgcctttgactgacacctcaatctgtcaatcggaaccgcctaccatgcgattggtcggatggcgtttcggggggcggtgcatgcagagaagccaacagagcagtaagcgcagcagccggagtgtggaagatgacaaggagggtcacctggtgtgccggatcggcgattggctccaagagcgatatgagattgtggggaacctgggtgaaggcacctttggcaaggtggtggagtgcttggaccatgccagagggaagtctcaggttgccctgaagatcatccgcaacgtgggcaagtaccgggaggctgcccggctagaaatcaacgtgctcaaaaaaatcaaggagaaggacaaagaaaacaagttcctgtgtgtcttgatgtctgactggttcaacttccacggtcacatgtgcatcgcctttgagctcctgggcaagaacacctttgagttcctgaaggagaataacttccagccttaccccctaccacatgtccggcacatggcctaccagctctgccacgcccttagatttctgcatgagaatcagctgacccatacagacttgaaaccagagaacatcctgtttgtgaattctgagtttgaaaccctctacaatgagcacaagagctgtgaggagaagtcagtgaagaacaccagcatccgagtggctgactttggcagtgccacatttgaccatgagcaccacaccaccattgtggccacccgtcactatcgcccgcctgaggtgatccttgagctgggctgggcacagccctgtgacgtctggagcattggctgcattctctttgagtactaccggggcttcacactcttccagacccacgaaaaccgagagcacctggtgatgatggagaagatcctagggcccatcccatcacacatgatccaccgtaccaggaagcagaaatatttctacaaagggggcctagtttgggatgagaacagctctgacggccggtatgtgaaggagaactgcaaacctctgaagagttacatgctccaagactccctggagcacgtgcagctgtttgacctgatgaggaggatgttagaatttgaccctgcccagcgcatcacactggccgaggccctgctgcaccccttctttgctggcctgacccctgaggagcggtccttccacaccagccgcaacccaagcagatgacaggcacaggccaccgcatgaggagatggagggcgggactgggccgcccagccccttgactccagcctcgaccgccaggccccaggccagagccacccaatgaacagtgcaatgtgaaggaaggcaggagcctgcaggggagcagacttggtgcccagctgccagaaagcacagatttgacccaagctatttatatgttataaagttataataaagtgtttcttactgtttgtaacccctggtaccagtgtgtccatctccaggctccttgccttccccttacctgaccttattaataaagtctttcttagcagttcnnnnnnnnnnnngggggggccccttttaa

SEQ ID NO: 111750 - DNA, 1044 bp, Homo sapiens
ggctcacggtctgcagagctcgtcccccagggcgaggatgattctgagtatttggagagagacgcccctgcaggagatgctgggaggtggctgcgtgtcagctttggtttgtttggcagcgtttgggtgaacgatttctccagagccaagaaagccaacaagaggggggactggagggacccttccccgaggttggtcctgcactttggtggtggtggcttcctggcattttataattgtcagttgtcttggagctcttccccagtggtcacacccacctgtgacatcctgtctgagaagttccatcgaggacaagccttagaagctctaggccaggctcagcctgtctgctatacactgctggaccagagatacttctcagggctagggaacatcattaagaatgaagccttgtacagagctgggatccatcccctttctctcggttcagtcctgagtgcctcgcgtcgggaggtcctggtggatcacgtggtggagttcagtacagcctggctgcagggcaagttccaaggcagaccgcagcacacacaggtctaccagaaagaacagtgccctgctggccaccaggtcatgaaggaggcgtttgggcccgaagatgggttccagaggctcacctggtggtgcccgcagtgccagccccagttgtcaaaggagccagagcagtgccagttctcctaaggagctggtggtgctcctcacggaaccttgccgcttggggaacctgacgtctaagtgtccagaaaggaggatgtgggcagggacggggtacagaggatagtgtgggtcagaggtgccagtagtataatattcatctccctggagttatgttgaaggcagagttttcatagggttagattttttttatccttttctagttcagttaattcatcctgttgaattgcaccatcgtgaaagatgggaaaaatcgtgatgatgggtaaggggaaaacttccaggaaggcaatggggcaaggaaaaagaaagcctatgggaaatggctgtgctcccaacatagctttgcgt

SEQ ID NO: 111751 - DNA, 724 bp, Homo sapiens
ggatcttggccagcgctaaacttccgccatgcggcagggcccctacctgcccctggagctggggttggagcagctgtttcaggagctggctggagaggaggaagaactcaatgcctctcagctccaggccttactaagcattgccctggagcctgccagggcccatacctccacccccagagagatcgggctcaggacctgtgagcagctgctgcagtgtttcgggcatgggcaaagcctggccttacaccacttccagcagctctggggctacctcctggagtggcaggccatatttaacaagttcgatgaggacacctctggaaccatgaactcctacgagctgaggctggcactgaatgcagcaggcttccacctgaacaaccagctgacccagaccctcaccagccgctaccgggatagccgtctgcgtgtggacttcgagcggttcgtgtcctgtgtggcccacctcacctgcatcttctgccactgcagccagcacctggatgggggtgagggggtcatctgcctgacccacagacagtggatggaggtggccaccttctcctaggatctccggatgggcgcacctgctgctcagggcagggttgctgagcaagaccacctccctaggccttgcctggcatgggtgccactctctctggcatccacctgtctggggctagtctctggccctcactgctcacggccgggtgaccactct

SEQ ID NO: 111752 - DNA, 1300 bp, Homo sapiens
ggcacgagcaggggcaaagcccctgaaaaaggctgtggtgatgcccctacagctaattcaggagcaggcagcatccccaaatgccgagatccacatcctgaagaataaaggccggaagagaaaggtgaaagtagctgggggcttaggctacacctggagcccagaagtaagggggagtaggctctagggggaggagcgttggccttggggttaaacgaactggatgatggccgccagctactaacagacctcaacttgcttacccctggaatgtggtgatggatggttccttgcagggcatttagggtggaaggcagtgatgtggatgtacctcgcagagcggatgttccactgtgtagcctggcttctaccctctacaagcttaagagggaaaacttagggaactatgacctaagcagtcaagcaagaaaccacacatatgcacatacccagaatcgaacaccactagaactacccaaaaactgagatggttgggggaggtatcatttattcatattactttctcccatgtactttttgaaagacagcttattctttcccttttagagatgagggaccagatttaagagcttattttgtgctttacattcattaactcacttgatctccacagcaactccatgagaagggtgctaatattaccactgggtactgagtagtacctctctttcactagttgcataataagaattaacccagagagtgacctgagggcgggattttggacacacttgacaagagaggaagaggctggagcgcaggaggtagctggtgctgggctcctagtcttggcagaggagcccaaagcacttggctgccctgcgtgtcactcatctccctttgcctcccagctggagtccctggatgccctagagcctgaggagaaggctgaggactgctgggagctacagatcagcccggagctactggctcatgggcgccaaaaaatactggatctgctgaacgaaggctcagcccgagatctccgcagtcttcagcgcattggcccgaagaaggcccagctaatcgtgggctggcgggagctccacggccccttcagccaggtggaggacctggaacgcgtggagggcataacggggaaacagatggagtccttcctgaaggcaaacatcctgggtctcgccgccggccagcgctgtggcgcctcctgaccgtcgtctcctcactccgccttttcaaatttttgtataaccccgtgttgtgtaaatacagtttttgctccggtaaaaaaaatttaaattaaaaaaaaatttttaca

SEQ ID NO: 111753 - DNA, 1149 bp, Homo sapiens
ccccgatggcagccagtccccatatggtggttctggaaactgaggcacagggcttaagtagcagacccaggatctgtccctgggccatctgactcagcccagtgaggggtggcctgggggaccttcctgggcggtatcccgtttttgcccttaagaggtggggtggggtcctctgagcttcaagctgctgggctcagtcttccaccctccacgcagcgagggggataaagtgaagatcgcgcagggtgtctcgggctccatccaggacaaaggatccattcagaagttcgtgccctacctcatagcaggcatccaacacggctgccaggatatcggggcccgcagcctgtctgtccttcgggccatgatgtactcaggagagctcaagtttgagaagcggaccatgtcggcccagattgagggtggtgtccatggcctgcactcttacgaaaagcggctgtactgaggacagcggtggaggccgaggtggtggaggggatgcaccccagtgtccacttttgggcacagcctccctccataactgagtggtccacagatttgcactacgggttctccagctcctttccaggcagagaggaggggaggtcctgaggggactgctgcccctcactcggcatcccctgcagagtcaggactgctcccggggccaggctgccctgggagcccccctccgagcccagccagccaggctctcaggccctgcgcctgcctcaggtctttcttgctgcagcctgctccagcctggcccccaccccaggggcaggcggcccctcctggcttctcctgtagggcacctccctgcccctagcctcccaggaaatggtgctctcctggccctgcctctggcccttcccgggccgctgcccctcagccatgtggcacttctgagctcctgacctaggccaaggggaggtctctgcccccttccccggccctgggctacccttgggtcctgctcctcaggccgctcccctgtccctggccatgggtaggagactgccctggtcatggccgcctgcctgtcattcctgactcaccaccgtccccaggtgaaccattcctcccttctcctcagctgcagtcgaaggctttaactttgcacacttgggatcacagttgcgtcattgg

SEQ ID NO: 111754 - DNA, 400 bp, Homo sapiens
  misc_feature (1)...(400): n = a,t,c or g
cacattggcctgagatccaaaacgcttcgaggcaccccaaattacctgcccctccccggcctacgtgccatccgcgtgacgctaggtcagcgctgccggttctttaccaaatgtgcttgcttctcctaagttatttataaagagaaatcactaatggactctactggtttgagtgcttctgagctggatgaccgaccgcctgtatgtttgtgtaattaattgccataataaactttgatgagtcncaccaaagaaaggagacaatgactgataaatagaaggtaaagacgggcgnnnnnnnnnnnnnnnnnnnnnnnnnnnnnnnnnnnnnggggggagtattttggcggggggcgggggggggtaaataaaaggggggagggaaaaactgtgggggacc

SEQ ID NO: 111755 - DNA, 621 bp, Homo sapiens
atggggtttcatcatgttggccaggctggtctcgagctcctgacctcaggtgatatgcccgcctcggcctccaaaagtgctggaattacaggcgtgacaccatgcctggccatcagaacttgtaatcaagacagtatgttgagaaattctaacattataaattacaaagctttgactattaaagtttttgtgatctaatgatacagttttgattctatagtaatttgtggcttattttatagtttataatgaatacttatttctagactcatacactggaaggggacccggaaaggtaatgtaactcagtgattttaaaacttgatttttttaactgagaactttttttgccccctgcctgtaggttaagtcttacgtgaaatgccaagataattgctgagcagctttggttacccagggcggggtctgggtctgtctgtactttgcctttactctagatggctcctgagacacaggcaggactcccaagcaccgggttgggatctgccctggtcccggcattccagtataagattgcctcagacctgtgtttttcagactgggtttttgctcttcacatgaaatcaagttagatgacaatgactggtgttgaaaaaaaaa

SEQ ID NO: 111756 - DNA, 432 bp, Homo sapiens
tagcttattatggcttccccaatttctttgtagcccctctttagaaaatagtcttaccctccttttgctcacttttctgcagtttcacaatgcccaccagttggccgcctggtgtttgcaccacatctgcaccaactacaacagtgtatgctccaagttccgtaaggaaatcaaatcaaaatctgcaggtgagactgtgtgaggcccccattcatccagctctcctcacctctcatggaagcttttatcttctatgtccctggaaaggaacatggtcagcaggcagctcatggatgattcctcgagactggctggtggtcacatattaatgtgagatgacataaggaattgaaggctgggaattgtctttggagaacttgatgatgaggggagttgggtgggctagagtccaaggtgccctgttgcagagag

SEQ ID NO: 111757 - DNA, 1240 bp, Homo sapiens
gtgaatcgcgtggtggattttccgtggataatgtgcaccataaccctcccaccattgaactgttgcaccgctccaggtcacctatcacgacaaatcaccggccttctcctgaccccgagcagcggcccctccggtcccccctggacaacatgatccgccgcctctccccggctgagagagctcagggacccaggccgcaccaggagaacaaccaccaggagtcctaccctctgtcagtgtctcccatggagaataatcactgcccagcgtcctccgagtcccacccgaagccatccagcccccggcaggagagcacacgcgtgatccagctgatgcccagccccatcatgcaccctctgatcctgaacccccggcactccgtggatttcaaacagtccaggctctccgaggacgggctgcatagggaagggaagcccatcaacctctctcatcgggaagacctggcttacatgaaccacatcatggtctctgtctccccgcctgaagagcacgccatgcccattgggagaatagcagactgtagactgctttgggattacgtctatcagttgctttctgacagccggtacgaaaacttcatccgatgggaggacaaagaatccaaaatattccggatagtggatcccaacggactggctcgactgtggggaaaccataagaacagaacaaacatgacctatgagaaaatgtccagagccctgcgccactactacaaactaaacattatcaggaaggagccaggacaaaggcttttgttcaggtttatgaaaaccccagatgaaatcatgagtggccgaacagaccgtctggagcacctagagtcccaggagctggatgaacaaatataccaagaagatgaatgctgaaggaaccaacagtccacctcagcgggccagcagcccagggaacccctgcccaccaggattgctggaagtgtgacggagcaggcgggctgaggagagtggaaaaggaagcgacccacaaatggcagggacacttctcttgcagaccaagagggaccctggagcaccttagacaaactacccagcacaggcggggctggaattctggcggagggcatgagcctgggactccatgtcacgtttccttctgatttggaatctctccatctgtaattcctcaccctcacccttccacccgtgttagtatcatgggggttttggttttggttttggtttaagaacctgcgagttgactc

SEQ ID NO: 111758 - DNA, 436 bp, Homo sapiens
gttgacccgcgctgcaggaattcggcacgagcggaggtccaagccccgtgtggagccgcttccggagctgggggtggtgtgggggtggacaccggcaaggccaccctgaccgcgagcccactgggtgcatcctgagagcaggggtgacgtatgtagaatgcttagggtgtcctccccacagagcagatacttgaaccgactcaattcctgtgtaaagagcactttgtcctgcttcacggacctccccaaagtgtgcagagttctatataggatgctggattagttcctttgatatttgtaaaaattcccccaagagccgcatatgaatctgccctttaataaagcattattgagattgctggcctattggggaagcctgcgggcacaggagcaggcgtggaatccaatacttgtaaatgaattgaagcgtcaggat

SEQ ID NO: 111759 - DNA, 1465 bp, Homo sapiens
gacgggcattccagaaggcagctgcctgcttcctgctcagcactggggactatgcctgcgccgatggtagtgtccggaaaggcacattcgtcctccgtgaccttccccttcagcattcacctgaggctgcatgccctccaactgctgggactctgttcctgccacattgaggaagggggctgggcacgacatggcatcatactcaggagccttcttcaccagctccttgggacaatggaatatcccagggtggtgacagcagatggagctacttgggggagagctcaagttggtcaggcaacagctggggtgatggcctgtgagccacaggccacatcaggaactttccccactgcctccatgcaaggctgcagagctatggtccctttctccactgcactggagctttgaagacctaagaggctagtggttcctggagctagtggttacctgaacaggtatggcgatgagctacaacatcacctgagtcaccaaagttgggttggcagaggggtgaagggttcaccccattccctgacccatccatgctcttcctggccttttagccctgggttcctcatgccttccagctctgctcctggtctactccttagcccacaccctgtgggtcagcagctggcttccttctaacgtctcattctttgtttctccctttcttttgctgaactccctgtccccccaaccccagaaggcaatgttgagccgaaagcgtgcgtcccagtgtctcacacctgtgctctttaaacacagagacctgccaagacgccctctcgtccaactatgcccaggctgaagtcctcaccctctcttaaagcggcaccaacgtgagagagacaggcagacagacagaaagccagaggcttagggaaactctggaacccagacaagaatcttttcgctgggaaagactcagatatccttgtttgcacaggactggtggaaaatctcccatgcgaccctcggggcccagagccatctgggtctgatgttctgttccattgtacatcgaagagatatatatgcacatatagtatctatattcatacatattatactcttgtgtgtagtgcacgtgctattggtggtttgtcttctttgttaggctgtgtctccctaagcccttgccccacccagagtttcccgtccccttcactgatttctgttgtttctgctgactgtgtgggtggaatgtcccaagaaaagtgcatctgggaattgccagtccagctgggtagtcccaggctcctgtcttggggatgtttcccctgtcagcaagtaacctggtgaagtctattgaaggccagactgccccctagggtcactgcttcactagccgcaccccaccccagattggggttctacctcccaccccacatcctcgttgtggggggacttccaggggctcctctgcagcctcctccactacttcctccacccctgtatt

SEQ ID NO: 111760 - DNA, 347 bp, Homo sapiens
ggcagcactgccccccaggtgttgagtaccagctctccagcccaacaggcagaaaatgaagccaaagccagctcttccatcttaatcgacgaatcagagcctaccacaaacatccaaattcggcttgcagacggcgggaggctggtgcagaaatttaaccacagccacaggatcagcgacatccgactcttcatcgtggatgcccggccagccatggctgccaccagctttatcctcatgactactttcccgaacaaagagctggctgatgagagccagaccctgaaggaagccaacctgctcaatgctgtcatcgtgcagcggttaacataaccgcccagccagct

SEQ ID NO: 111761 - DNA, 354 bp, Homo sapiens
tgactttgtggagatgtactaccggaatgagacgcaccacgagccgtatcccctcatgctacctggctgcagccccacctgtcatttggagaggattgctgatctggttggccctgtgatccctcaatactggtccacggagtgtatgaccacaaacagccatcaagttctaaaggtcatctttgctgttgccttttgcctgatatctgctgtcctaatggtactactgtttatccacaatcgccgtggactctgttggcatagagaattcctatgggaacatctgaacagacagttggataagccaggccaacctcctgtgacacagcatctttcagtggtggcggattctag

SEQ ID NO: 111762 - DNA, 355 bp, Homo sapiens
ggctgcgcctgagcctgctcagggcctggcttcctgcctgctgtgaggaagggtggaggaggggttcgaggcctcaaccatcccttggcccagagcctcaggccaagcagcctccgcctctgcccaggcctgtctcctcccggcctcctgctctcctgtttcctaaagctttcccgctgggtggctcccagttcttccagaaatcccctccaggaaatttgcttgttgccacaaaataatgcaaatctgttcctggggccgcccaggcaacctgcagtctctgtctccccaagacctgaggagggagggcgaggcaagccctgtgcccgtcaggggcccttttacagccatgagg

SEQ ID NO: 111763 - DNA, 373 bp, Homo sapiens
gcccttcccgagagacaagagccccactgcactcagcctgccttccccacagggccctcctccgcccacctgccctccccaaggtctctccagacttcctgtgaccactctgtgacaagggcaacacaaaagtcaaaaacccatcaacacaggcggcacgggccgagagggagttgcttctgggtgggaaagaaagtccccgagtggtgcggaaaggagaggagcaggcgagtaccctgtggacgcgcgtccagctgcgcaggggcccccacgcacccgtttcccgtgggtctgtttcccatgagccagtacctgtggggtctcgtgcggccaggtttctgccctatccgtccaagacacaggatgaagctca

SEQ ID NO: 111764 - DNA, 380 bp, Homo sapiens
  misc_feature (1)...(380): n = a,t,c or g
gcttcctgtttttctgccacaagccctttggacttacccactacctctgagcacactggtaacaaaatgaaatccaccaatgagaccagcctgacacatatggactgctcgacagagcagcctgggagcatcctgggccccaaatgtgccttctgcaaaagagaattttctccctacttcaaaaaggagccggtggaccagctgccctgcggccaccttctgtgccgaccctgcctggatgagaagcaacgctccctgtccatgaggtgcacagactgccaccggccggttgctaaccaagacgtgctgcaggtccacttctgagggactgacctccactggaagagacccattgctggcatgagctgatggggaacagn

SEQ ID NO: 111765 - DNA, 1178 bp, Homo sapiens
ccttgtgatgcttttgcctgaaaccaagggtattgccttgccagagacagtggatgatgtagaaaaacttggcagtccacattcctgtaaatgtggcaggaataagaaaaccccagtttcccgctctcacctttgaggcccccgacaaagacagaaagaaggagctatccaggagctgatcctccttgcaaagctgtgccttgcagagatgcacgtgtgcatttcagctacatcatgccgcgctgttgtaatactgtataaagacctcaatctatccagagtatttttatataatgttggatgagttaggatttgtaatgctgttgaagtttctgggaacacataatatgtagccagtttaacaaagaagctgtcaggtgcacagcccttcctgggtttttttcttgtgttccctgtggtctctgacccattaggctaaagagagacaagagaagcccccaacctgattctcatgacagctccatcaagaatgtgggatgtgccgaccaaggatttgagaaagttgtacagaaatgtgttcatcaaatctggtcaagggactaagctcctagctgaccattcattctgaagattgcatggaggatgaacatctgggaatcctgttaatgagaaggctgaatcacaggcacctgggccaaagggtgtgagcattcatgttctctgctcaccttggtttccgcacaccttcgcaatgtgaacaggtcaggagtccctcccgtccacctcctctgtaacagctggggttccaggcatggtttaggccctgttccagcaataagaaccaatctgctgtacaatctgaggacttggctgtgttatttacaaaatgatgctgtggttctgagattatttgggacatttttggctctcctttagtggacacctagagccacagattcccttctttactaaacaaatcccatggattctgatttctgggtcttaggattttaaaagtgaagggatatttttcttatatttgtgagttcagttccgatggtgcccgtggtcaaaagcgaaaaacatggacaattcctattcattcttagcactttgacatgtcttggggaaaagcttacattttaatttaaaagaaagatcaattatatccatgcttaacaggatcagcaggagctttataaatgactttacagaga

SEQ ID NO: 111766 - DNA, 417 bp, Homo sapiens
ctcgcttggtcatctctgagggtacagggtaaggtgagggccacagaagaggaaatgcgcctggtcttcaatcccagaacacaccctgcccagacttccagagtcgctcagggagagagtcagagaaacagacagagacagacagacagagccagagacggagagggagacggagagggagacagaggagagggtccatcagtttgtctgtctgtctaggggctgggactactgctgatctcagctaacatttattgagtgcctgctgtatgcaagaccttttccttcagtactcagaagaggcacagcccacagtcccttagctgaaactgttggaaccagatgtgtttcagaattcagagttttccagatgtgagaacagtaaacatcccacatgctgagtaacagctgtcatgt

SEQ ID NO: 111767 - DNA, 421 bp, Homo sapiens
acttcggcgcgcgccggaagcacgtgcgcgggctgggcgctctggcggtgtgcgctgaggctcctgagtataacagattggttctgattaaaaccatttcagaggaaagacagtgatcccaggaagcgggaagaaaacagcatcacctgaagttattcctattcgttagatttgttttcttcctgcgaaaaactgctatgtacaagaaagaagtcagtgagctgcagtgatagttagcattattgactgaaactggaccagagatccctgaaacctggacaaggtggtagaaatacaaattatgctgccatttcaaagctgtgggcagttttctactttgtggaaaatgaagacttaagtaggcctttgggaaagacgatttgttttggaaaaaccacccaaagggatcatttggtttgcg

SEQ ID NO: 111768 - DNA, 904 bp, Homo sapiens
tgttaacacccaagggtcgagtgtatgctgagctgactgtttctcaccaatctcctggggagcttcttttaattactggctctggatcagaacttcatgatcttagatggattgaagaagaagcagtcaaaggtggatatgatgttgaaattaaaaacataactgatgagcttggagttcttggagttgctgggccacaggcaagaaaggtccttcagaaactgacccctgaagatcttagtgatgatgttttcaagtttcttcaaaccaagtccttaaaggtttccaacattcctgtcactgctattaggatatcttatactggtgagctgggttgggagctgtatcacagaagagaagattctgtggcgctgtatgacgctatcatgaatgcaggccaggaggagggaatcgacaattttggaacctatgccatgaatgccttacgcctggagaaagccttcagagcctgggggttagagatgaactgtgatacaaatcctttggaagctggactggaatattttgtgaagttaaataaggatcagaatagctgctttgcccattttaaggaggaaaatggctgggtgagcagatgggccatcaggccttattagggtgaatcgtgttcttgtcaaaacctgtcagcaagtagggaaaagaacaatggagtactgaagaactctttcatcacaaagggagacggcgcagtggcccttgcttccttccgtcttggagttggtccagcctccttcccctgctgttggcttatgtgaagttgatacacatgtatcattcattcatccggtcatctagtagacatttattaagtaccgctgattagacaccttgctaacccatagatctaaatgttaaagatatactcctgatggctctcagatct

SEQ ID NO: 111769 - DNA, 1833 bp, Homo sapiens
gaatggagtctccagactgtcacccaggctggagtgcagcggcacggtcccggcccactgcaacctccgcctcccgggttcaagcgacccccctgccccagcctcccgagcagccgggaccacaggcgcatgccaccacgcccggctaattttttttgtagggatagggttgtgccaggttgatctcaaactgctgtcctcaagtgatccgcccacctcggccccccaaagtgccgggacttacaggcgcgagccacggcgcccggccagattttcttgaatgaatatttctccatttgctgtatgcccttaagagaattggcaaatactttaaattacggtattttataatttttactagttaaaatgttgttttgctggaaagagggcatgccagcctccttactccaccatcttagaaatcctgctttggcttgaacactttataagaaaactcaataatctttttgagctaaacttctgatttttttttaacattggtgtttaaaagcaaaggaagaaatataggaaagaccgtacatacatacacacccttaggtaatacactcacttgctttaaagtatcccaagaataagtgaaacaaaaccttaactcctcagtccctctctttccaaaggtgaccactgttaatagtttaatgtgtgtccttaggtattcttcagaacctgcagaaagagagcctcagattaagaaaaagtaagtgatgtatgaactgcttctctgaaaatcactgctgtttctattgtgtttctagtcattcatacctagagaaattccttaccgagcagatgatggaaaggagggaggatgtatggcttccactcatctcctatagaaattcattagtcactgggggtgaagatgatagaatgtctgtgaacagtggaagtagcagcagcaaaacctcatcagtaaggaataagaaaggacgacctccacttcataaaaaacgagtagaaggtaagtctgcctttacactataagaaacaatttgcctggttttaaagagataaagtagtaaataatcttttgaagcaagataatagtatcaggcacatgattttcttgtatattttattcacaatgagatgttaaggcaaaaaggttgaaacagatgaagtaagacagaaaagcatcaaggaaaaagaagttgaggaagcatggagcacaaaggaagacagaccaaaagaggaaaaaattagctaggtctataaaatcaatccccatactatatgcctctaatacattaaaatataaagtaagatagtcacaatgctattctattaaaattcttcctaatataggtgagatacaggtaatttgagggtagatttctgcagcaaattgaatataccagaatagttgttttccagttctaccacttggttggaacagtaagacagtgatggcctccaggtgcggtggctcacatccgtaatcccagttactcaggagaccaaggaaggaggatcaggaaattaaggccagaaattcgagaccagcccgggaaacatagcaagactcccatctctaagaaaaaaaaaaattttaaatgggtggcatgcacctgtagtcccagctacttgggaagccgaggtgggagaatcacttgagcccagaagtttgaggttgcagtgagctatgatcatgccactgcactccagcctgggcgacagaggaagactcccatcatttaattttttaaaaaggcagtaatggctaaatctggttttataaccctcttggactatggggaatgggaagttaaattgtcatgaaaatctgatcaacagtaggtattcctatatgtt

SEQ ID NO: 111770 - DNA, 1073 bp, Homo sapiens
  misc_feature (1)...(1073): n = a,t,c or g
tttcgtgccgcagtctgtgttgcagcttcctacttcaattgctgctggaggggaaggacttacggatgtctccccagaaacaaccaccccggagcccccgtcttccgctgcagcttccccgggaacagaggaacctgctggcgacaccaagaaaaaaagtaactgaatttatttccgggcagagaggcgggaggttcagattgcatccgagtaggggtggcggccagtaaagaagcaaaatttagaggagcgcctgtcctagacctgcattttgaccagtcatcagaagaaaagaagtgtactttttgatttttaaggcctttaagttgagtgttaaaataccatctctgtctatcggtgtagggcctgatacttggctgccacacttatttttatactgtatttttttgagttggccagactgcgagctctttgaaggagggagggagctgagtggggcggggggaggggggtctcggtaattccaggtacttaacacaggagctaattatttgagtaatgttttatggtggtaggggtggtcattggcaaagcctggattagaattcatgccttccaacttaactcgcttttgcttttttccccctcccagttggttgtgaattcactccttaaaccaaaaaccaaattcttacgcagaatgaagactgctaagggaaagctaaaggcatagatgttacctttttaagaaacacattttggaacctttgtgagttatttcattgcttgagtcagctatcctcaaccctttattgcttgagaatgtttccctttgtaaaagagattgctaaaattacgtgttctaaagcactctgtttagagttagagttgcctatgggaaaagcagcatataagcatcctcgattcagagaggctgatttcgtccttagacgttttccccgttctgtcttaagatgacagtggtctcnnnnnnnnnnnnnnnnnnnnnnnnnnnnnnnnnnnnnnnnnnnnnnnnnnnnnnnnnnnnnnnnnnnnnnnnnnnnnnnnnnnnnnnnnnnnnnnnnnnnnnnnnnnnttttgctaaaggctgg

SEQ ID NO: 111771 - DNA, 673 bp, Homo sapiens
aattcgatgctggcatttaaagcgacagctcagctgttcatcctgggctgcacgtggtgtctgggcatcttgcaggtgggtccggctgcccgggtcatggcctacctcttcaccatcatcaacagcctgcagggtgtcttcatcttcctggtgtactgcctcctcagccagcaggtccgggagcaatatgggaaatggtccaaagggatcaggaaattgaaaactgagtctgagatgcacacactctccagcagtgctaaggctgacacctccaaacccagcacggttaactagaaaaatcttctgaataagatcttccctctttgcccgtggaaaatctgaacaatctttgagccatctagaggggaaagaaaagactttgttctgtgtgtttcaagaaattcaccatgtcagcaatatgaaggatgttatggaaggcgtgctaggcattcaattcctgcagaaaccggaaatcttccatgccctgcaatgtgctcatcaaactctcagcatatggacggccagctgtggcccatatcttggtcactctgaagcacaatatttatgaagctatagaacgttaagacctctttcacagcctctccttcctacaaagactcctccaaatcttaaaatgaagcaggaaaacgagcctaagaggactttcataccg

SEQ ID NO: 111772 - DNA, 358 bp, Homo sapiens
gggaacctgaccacacttgtaaaaaggagcatgtcttcatccatgagaggcctcgaaaaatcaatggtatttgcatttctcccaagaaggttgcttgccaaaacctttcggccattttctgctttcagagtgagacaaagttcaaaatgacagtctgtcagctcattgaaggcacaagataccctgcctgcagaattttgggtgtcaccaggtaaacagagccctcagcatctgaatagaaactgaacaggaacagaagagattacactacatctgagatggagacctttcctctgctgctgctcaacctgggcctggttcttgcagaagcatcagaaagcacaatgagaatatttag

SEQ ID NO: 111773 - DNA, 663 bp, Homo sapiens
ggaattcccgggtcgacgatttcgtcctaccctgcctgtgctgctacctgcctacccgtggatgcctccatctgtgccaacagggctatgatagcctccggcgaccaggctgccgctgcaagaggcacaccaacactgtgtgcagaaagatctcttctggtagtgcacccttccccaaggcccaggaaaagtctgtatgaccttccaacaaggtggatccagagcttttctccttctagtccccaacagcaaagcataggcctcatctttggagagggggaggagtgataaactagccaaagttagggcctctcttttgttcctgcagtgtcaggggaatgaccaagtacatcctggtgcaggatgccttgttctttctcacagtatctatcccactcctcttcagtctttacaccctgccagctcagcctttatggttgtcatggcaaattcaggtgatatatgggtatgaggtttgaacactgaggactgacagggccagcaacgtggaggtttaggggctccccaatgtaatacctctcgatgcaggctctgatcgtcactctgttttctgctgtgcctttggaagctttcttataagatggttttcacaggtacatgtggaacagcgttcaaccttccagggaatacgacccctgaatt

SEQ ID NO: 111774 - DNA, 432 bp, Homo sapiens
  misc_feature (1)...(432): n = a,t,c or g
cgaagctccgccgaggtggcacgaggccctcccagtgctcaggcaggcgctgcggcagaagcaccaggaagtccagcaggcctgccggccccataacctgcctgtgcttcaggcggctcagcagcgagaactagaggtactggggacgcaggcagggtggccggcccagctctcctgtgggcaccacctggctctgctgactgggctgagctgaaggggtgtggggggctcaggtgtgggtggctaccctgggcctgagtgggacactggaggcctagtgagtcccaccaggtggctcctcgctgagggtgccaggtgtgctcggactgggtggagggtgagaacccccccagtgctcccttggaggcccataatggccccttgtgggttgggtcttccgcagaagaagtgggcctcaaggggtaccaaagn

SEQ ID NO: 111775 - DNA, 1428 bp, Homo sapiens
  misc_feature (1)...(1428): n = a,t,c or g
aagaggaagatattgagaaatctgcaccaattataaatttcagtgcacagaatagtatgcttccttcacagaacatgacagatggtcagacccaaaccatagatttattaagtgatttggaaaacatcttgtcaagtaatctgcctgcccagacattggatcatcgtagtcttttgtctgacacaaatcctggacctgacacccagctcccatctggcccagcccagaaccccggaatcgattttgatatcgaagagttcttttcggcctcaaatatccagactcaaactgaagagagtgaacttagcaccatgaccaccgagccagtcttggagtcactggacatagagactcaaacggacttcttactcgcagatacctctgctcagtcctatgggtgtaggggaaattctaacttcttaggccttgagatgtttgacacacagacacagacagacttaaactttttcttagacagtagccctcatctgcctctgggaagtattctgaaacactccagcttttccgtgagtactgattcatctgacacagagacccaaactgaaggagtctccactgctaaaaatatacctgctctagaaagcaaagttcagttgaacagtacagaaacacagaccatgagttctgggtttgaaaccctggggagcttgttcttcaccagcaacgaaactcagacagcaatggatgactttcttctggctgatctggcctggaacacgatggagtctcagttcagctctgtagaaacccagacttctgcggaaccacacacagtctccaacttctaaaactaacggtggagtccatgtgtgaaatggcatctaccatttcctctggattaaaactacggactggggacaacagtattaattcgattgaatgtggctgatgatgcagttgcttagcttctttgtgtttctttgccttttgtacttgtaaacagaaatttgcgtataaatgtgagtgtattataaagtttgagatgttgatctaaattgtttttgtgttgcctacatttgccttttcacagctagtcttttcatgttnnnnnnnnnntgtatttcatatctataaaacctatatagccatttagctgaagcccagcttaccaggttcaagggtacaaacttctcaaatcttcaaaacattttagtcaaagtgtaatatacttaaactgcacctaaaatatctttggcactgcttgttagaaattcctgattcctgttactaatcactaaagaaaccggatgctgccaccgtaggatttaagcagtagtgcttccatgctcttaagactcctgctgcctggaccttcgtcagctttgacacctcttttctgatttaaagacaccaaggaaaactacaactgtctttagctttgaagcagttttcatgtaatcattgcca

SEQ ID NO: 111776 - DNA, 444 bp, Homo sapiens
  misc_feature (1)...(444): n = a,t,c or g
cttctccccctcctggggcacaaagaagattcctcttttttaaaccccgcccaaaactttttcccccctattttttggggaaatttttttagtaatattaaaactttgtttttnnnnnnnnnnnnnnntgggggggannnnnnnnnnnnnncccggtcccccgtttgggtaaaaccccccttggtggggccccataaccctgttggccggttccctagcccttttttccccctccctgggggggttaggcccggaaatttcccctccccnnnnnnnnnnnntttccatttaccaatttttttcccctcgcctcccccctggggcccaaaggaaaatccccttttcnnnnnnnnnnnnnnnnnnnnnngatggctatagtcatgcttagatgtagttacgcactgaaatgccaaggataccgttatttacatccaccaagtacta

SEQ ID NO: 111777 - DNA, 685 bp, Homo sapiens
cgctgattacgaattccatgtccgtacctgtacatcgtgccgattgggaataccctggagatacaccactaatgcgtcttgcagataaaataaaatgggaaattctaacacgttcttctggtgtttttgagatatttaaagccccaggtatattagctgttatagacagtcccctactcacaatggtttgacttacaattgtttgattttatggtgcaaagatgatacacactcagtagaaactgtacttcaagtacccacacaaccattgtttcaactttcagtagagcattcactggattacttgagctggtccaccatcttgttgtaaaacagaatttgtgtatactatcattgtgctcaaacttaggctgatccaagtcttctgggcatgttaaagggcaggccaggctatataccatgatgttcgggagggctgcacattttctgacacaatattttttacttatggggggctttattgggatgtaaccccatccttgagtcaaagagcatctatttctaagtctggactgaaaaaattatgggggggccatttaaaaaaagggcccccgggatggggaacccaccctgcctaatacaatggacggaagtcctcccaggcttaaggggacctaggctctcgatgtcatacgcaccctatgccaccccgcttcaagacgcc

SEQ ID NO: 111778 - DNA, 360 bp, Homo sapiens
  misc_feature (1)...(360): n = a,t,c or g
actcagtttggaaaaacaaatgtctaaaataanncnttccgctcccaatgttgttatgatagtgttgggaacataactcagatatccttccnnnnnnnnnnnnnnnnnnnnnnnnnnnnnnnnnnnngtggtttttgctttttctcttaattatcctttcatatgttttatatcaggattctcaatcctaggggtacattagaatgataaaggaataatccaggaatcccacttctgggtatttttctgaagggaataaaatggatgtgtggaaggggtatctgctctctcgtgttcgttaagatgctgttcaccacaagcaacacgcaaaaccaaccttaagcccatcagcagaggccc

SEQ ID NO: 111779 - DNA, 685 bp, Homo sapiens; identical to SEQ ID NO: 111777

SEQ ID NO: 111780 - DNA, 660 bp, Homo sapiens
agcctgggcgacagagggagaaacagagggagaccccatcacaaaaaaaagaagcacacgaaaaagaaaaaagaaaaatgtttgtgtctacaggttttcaactctacctctttccttggtaggaggccaggtgagggtgtagtagcgtgtcttcggatcagaggaagaaagaagcccaggtggcccgatggctgggtgtcgtcacggccatggccttatctgctctgagagcaagggtggtggcgacatgcaggagcaccaggtctcaccacagcgttcacgcggcccacgcctcaagcacacgggacgggaaggagcgtcttcctccctcatcctggccacgcctttcatcggctccagaccgttttcttcctcagctgtctcagtgaagaccccaggagcctgtgaggcccgtgtccttttccattgcgggtgcggggctcgaggccacccctcctgtgtcgagctgggttcgaggcccacacttgggccttggggagggcacttggaaaccctggaggcccacggggtcctgaagcccccagtggttaaatacgaggccctgtgtggtacaaaacatttataatcggacatcagcacagtcttagcacacagagtgatctacgggtacggacattgaattcgtaatgatggttcagg

SEQ ID NO: 111781 - DNA, 512 bp, Homo sapiens
gacgctcgacctgctacggatttctggccgacgctctacaacgacgtgactgggactaccctggcgctacccttattagtgtccttgcacgacaccagcccctttttacatatacttttaatttttggatatacattcttatgactatatataggatgtacagcatatatattttgtgtggagagagagaatttctagtttttaaaggttcagaaaatccattgatacaaatattactgaaaatatttaggggataggacatgagggtagccttcacttcaaaaccttccttgtacaggtgagtgagagccctggagttacaggattatctgggggcagggtggggaggggattatgttgaaatgaaaaccaaaactcccgagtgttcctatcccaaattagcagcttcatgtgaaaatcagccccaaggaaaacccaggcgacagctgggtcctcagccgtgaggaaacagagtcggcaactgggagggcagtccaggacaggccgatgta

SEQ ID NO: 111782 - DNA, 100 bp, Homo sapiens
gaaaccatcaacccggatatctgggcagaagagatcgcctggctgaaagcgcaacaaactgaaaaagcggtagcctgaagatgaataaccgggaaaagga

SEQ ID NO: 111783 - DNA, 285 bp, Homo sapiens
  misc_feature (1)...(285): n = a,t,c or g
agggcgtttatcgcgccaatatgcaatcagagcgcgaacgcaagcgcggtaaacgcattgccgtaactaacctgcgtacacctgacgagatttaatttgcgcctgtcggcaaagggattgttcttcgagtattcttagatgggtatcgccaaggtttttgcagtcacggtgttgtagaacgacgggcagtggcaagctataaggccggcaggtcggctcaagaggctccttgagaaaatcatagtcgtcgccatcctctgntntntgccccaccgancannnnnt

SEQ ID NO: 111784 - DNA, 685 bp, Homo sapiens; identical to SEQ ID NO: 111777

SEQ ID NO: 111785 - DNA, 449 bp, Homo sapiens
  misc_feature (1)...(449): n = a,t,c or g
ttacgagatcaatgtccggtacgcctgacatcggctggacaggtaaaaccctggcgccacccaacgtaattcactcgcctgacaagctgcatggggctgggtcacagggagtggtcagacccgaccttcctccccggctgcccctcccccagctccaagggtgtcttctgcagcaggaggcgtgggaagtgaggagagtggggggctgaccacanancctctcccagctccacctggctctgtggtccctgcagccctgaagcccccacaccatcctgagagcccctgttcctggcatcccaagcgggagcctgcagggagctctgggagccacagaggagaggactcggaggaaaccgggtcagaggggggttggcaggaccttctggcctgggccggttctcagaaggctttggccttcttttggggcaacccccagatgatcaaaa

SEQ ID NO: 111786 - DNA, 241 bp, Homo sapiens
aaatgaagctgcgggggggggcgtaacgcctgccgctgcacaaacgcaagccaatttgccggaacaaaaaccagaaaccacgcccgagccggtgggaaaacctgctgcggacgctgaaccgaaaaccgctgcaccttcccctttgtcgagggataaaccgtaaacatgtctgtagaaaaaactcaaccgcttatcacgcatctgattgagctgcgtaagcgtctgctgaactgcattatcg

SEQ ID NO: 111787 - DNA, 105 bp, Homo sapiens
gcaccgttccttttcccgattattctggcagtaatgggctaaaatttgcgatgcgtcgcgcatttttgatgtatgtttcacgcgctgcataattaatgacattca

SEQ ID NO: 111788 - DNA, 257 bp, Homo sapiens
tagaaaatagcctcaaatgctcaaatctaagaggtagtgcccttaaagaggagatagagagagtgaggttagagtagaaagtttattcaaagggataataacagaaaactttccaaacctagataaagatatcaatattcaagtacaagaaggttacagaacaccaaatagatttaacccaaataatgtctcaaggcatttaataatcggtctcgtaaaggtcaaggataaagaaaagatctccgggtcggacgatg

SEQ ID NO: 111789 - DNA, 418 bp, Homo sapiens
gtttcctgaccaaaaaagggcgctatatccactcccccgacgccggaaaagcgctattccattcgttgccggagatggcgacgcgaccggacatgaccgcgcactgggaatcggtgctgacgcaaatcagcgaaaagcagtgtcgctatcaggactttatgcagccgctggtgggcacgctatatcagcttattgatcaagccaaacgtacgccggtgcggcagtttcgcggcattgtggctccgggcagtggtggcagtgatgataagaaaaaggctgctccgcgtaaacgtagtgcgaaaaaaagtccgccagcagatgaagtcggaagcggggcgatagcgtaagcgacaaggtctttaaggtgggtcgcgtcatggttttaacagtccagcggatctccgggtacggacattga

SEQ ID NO: 111790 - DNA, 363 bp, Homo sapiens
  misc_feature (1)...(363): n = a,t,c or g
anannncgngggcagagacacctgggaacggtcgctggattgcctgcaacgccgcggcttaatggtcagttttggcaactcatcaggtgcggataccggcgtgaacttatgcattctcaatcaaaaaggctcggtgtatgcgacacgcccttccctgcaaggctatatcaccacgcgggaggaattaaccgaggccagtaatgaactgttctctttgattgccagcggtgtgaataaggccgatgtcgccgagcagcaaaaatatccgctgaaggatgcgcagcgtgcgcatgagattctggaaagccgggcgacgcaagggtccagcctgctgattccataaaagaaatagggcttccacct

SEQ ID NO: 111791 - DNA, 424 bp, Homo sapiens
gaggcggttgccgccgctgctgctgacggtgtgacgttctctgttccggtcacaccacatacgttccgccattcctatgcgatgcacatgctgtatgccggtatcacaatgaaagttctgcaaagcgtgatgggacataagtccatcagttcagcggaagtctacacgaaggtttttgcgctggatgtggctgcccggccccgggtgcagtttgcgatgccggagtttgatgcggttgcgatgctgaaacaattatcctgagaataaatgccttggcctttatacggaagtgtggaactgagtggatacgctgtttttgtctgttaaacagagaagctggctgttctcctctaaggagcttaatgctgcaatggggaatatgttgcgctaatgccagggttttcccggtcgggactgttgttgt

SEQ ID NO: 111792 - DNA, 353 bp, Homo sapiens
atgattggtgtggctgctgttggctttgtacctaaaaaagcgattggcgctgccgatggtattaaaggcacctttgcttacgtgattggtggcagctttgccaagttaggtctgggaatgattgccgatgggacgccggtattcggctttaccggctgggcaggcactttagccgcgttggatatccccgcgattggtagtatttgcctgatggcgatagtcatggtaatggaagaacgcaaaatcccccgcgataaaaaaattcagcagttgacagtggcataaacgtaactggtgacattatgagcggcatgacgccgagctttttttattattccgtgccctccagagta

SEQ ID NO: 111793 - DNA, 98 bp, Homo sapiens
acgctgtaagccccatggatgttgcgctggacattggtccaggtctggcgaaagcctgtatcgcagggcgcgttaatggcgaactggttgatgcttgc

SEQ ID NO: 111794 - DNA, 223 bp, Homo sapiens
accatcattacgaattccagcgtccgacccggagatcacgctgcgtggatgcacgagatcaaccacaccggtggctaccacgacgaaaacgaaggcaagctgaaaggcatcctcgattccttcaaagcaacccaatcctggtaacgtctggcggcttgccttatggcaggccgcaaggcattgaggagaagctcatggccggcgcaaaagagatacgtagtaa

SEQ ID NO: 111795 - DNA, 431 bp, Homo sapiens
  misc_feature (1)...(431): n = a,t,c or g
attacgagattcaatgtccggagctgtacaacgacgcgactgggagaaccctggcgccacgctgcttaaacgcgttgctctacacagttcgccactgttaacatttcacccaggagggtgtcctcgggagaccctggcgggagcccgggagccgcggaggggctgaggagccgcccagccctctggcgggttgggagcgaggtccctgcccttgctgacaggccacatgaccttggtctttgatacagaaagccaccatttaatgacagtgctctggcttggaaacttaggtgagtttctagccaataacttttacgacaaatagaaatagggataatgggctggggtcttttctgaggaatctgggggactttaattataaattcccccattattaaagtcaacccgccactttaaaaggcgcccctgan

SEQ ID NO: 111796 - DNA, 342 bp, Homo sapiens
  misc_feature (1)...(342): n = a,t,c or g
gacggttgccgccgctgctgctgacggtgtaacgttctctgttccggtcacgccacatacgttccgccattcgtatgcgatgcacatgctgtatgccggtataccgctgaaagttctgcaaagcctgatgggacataagtccatcagttcaacggaagtctgcgcgaaggtttttgcgctggatgtggctgcccggcaccgggtgcagtatgtgatgccggagtgtgatccgttttcgatgttgaaacgattatcctgagaataaatgccttggcctttatatggaaatgtggaactgagtggatatgctgtttttgtctgttaaacacagaagctgnctgt

SEQ ID NO: 111797 - DNA, 217 bp, Homo sapiens
tctgtgaacggcgggaacaggggcctgcctgcgttgaatcttgcccaacacaggcgctgcagttgcttactgaaagagaactcaggcgagtccgccagcagcgtattgttgtcagcggtgagaatcctctctgaaagaaatctccgcgctgaaaggcgcggagaatctattagattgcccaaccacccgcgtaaaatgcgaccagtgcggcagtaat

SEQ ID NO: 111798 - DNA, 362 bp, Homo sapiens
agagcagccgcaaactacccgaacgcaaccattccagccagatagcggaattgataatcaatggcgctcttaccgcggcgaacccggaaaaacgatggcgcagctgttccgcgaccacggactgcccgctaccgatgtctatgcaatggcgcaggtagaaggcgcgggtaagccgctgagtaatttgcaaaacgggcagatggagaaaatgcgccaaaacgccagcggcgtggtgacgggcttaaccattgataccgggaataatcaacaggtcctgttcacccgccagccggatggcaggtttattcttgcgcggtagatgaagggtcaaccaaaagccagctaaggattgtctctttgat

SEQ ID NO: 111799 - DNA, 328 bp, Homo sapiens
  misc_feature (1)...(328): n = a,t,c or g
ggcacaaantgggtgtcaatgcccgtggatggaggagcaaattcgggatgcctggggaagctgggttctaaaaaatgttgtacgtgaaacggatgaagttggtaaaggtcagatctgccgtccatggaagacgtcgaaaaagtggttatcgacgagtcggtaattgatggtcaaagcaaaccgttgctgatttatggcaagccggaagcgcaacaggcatctggcgaataattaaccattcccatacaattagttaaccaaaaaggggggattttatctcccctttaatttttcctctattctcggcgttgaatgtgggggaaacatc

SEQ ID NO: 111800 - DNA, 423 bp, Homo sapiens
  misc_feature (1)...(423): n = a,t,c or g
aacagtctnnnnnnnnnnnnnnnnnnnnnnnnnnnnnnnnnnnnnnnnnnnnnnnnnnnnnnnnnnnnnnnnnnnnnnnnnnnnnnnnnnnnnggtgaacatcagcgaggggcgttatcatcaggtgaaacgcatgttcgccgccgtgggtaaccacgtggttgagctgcatcgtgaacgtattggcggtattacgctggatgctgatttaacccccggtgaatatcgtccgttaactgaagaagaaattgccagcgtcgcctaacttttcaatgactttcaggagcccgttgtgaccacccgacagcattcggcgtttgctattgtttttatccttggcctgctggccatgttgatgccgctgtcgattgatatgtatctgcccgcgctaccggtaatttcaacgcagattggcgtaccggg

SEQ ID NO: 111801 - DNA, 347 bp, Homo sapiens
  misc_feature (1)...(347): n = a,t,c or g
ctttaatacaagcctggaaggcgaaaatgctcatcctttagaggccattgtcacccgaatgcttttgactaaagtaaaactcgacccgcagaataaagatgtcaatgagccaccccctgaaaatcatgaagaaaaaaatgatgagggtgaaaaaccacagagcattaccagcattatcaaaatcagtttaccggtgctggtgataggttatgctctcggcaaaatcgcgatgttgtttaactaacaatgtgttttttgcgccgatgccggatccagcgtttaacctgcatccggcagccgtgtttatgggatctcaatggctaaataatcgctcgnnnnnnnnnntt

SEQ ID NO: 111802 - DNA, 344 bp, Homo sapiens
  misc_feature (1)...(344): n = a,t,c or g
ntcccctgccctggggtttgcccttctaccccagaggggggcacgacagtctcagtgcaggaccaagccagtgagagttagccctgacctgcgctgagccctgagaagaaagattccttcgcccgcgtcctaccgctgcctgagtcagccaggcccaaggtgtgtcaggtccaaatggggcaggtgcagctgccaacacggccaaactgaaggttcgctcgcaccaggaccactcgtgggtgaactctatgcgcgctctacacgtcaggtagcacagaatctggcctcttggggaaactggggaacctgggaacctgcggaacccgccccnnntgtgctgcaat

SEQ ID NO: 111803 - DNA, 151 bp, Homo sapiens
gcagcggcgaaaccttctgggatttgctggaacaggcggcgacgcaacaggcgggtgaaacaggcagtttccgctaagattgcatgccggataagcctcgctttccggcacgttcatcacgaaaaatattgctgtaatagcggcgtatcgt

SEQ ID NO: 111804 - DNA, 211 bp, Homo sapiens
aaattcgtgccaccgcgcatgtggaatgccgtaaagatgccgaagtgatcgacgaaatcccgatggcgtataaagatattgatgcggtgatggcggcacaaagcgatctggtggaagttatctataccctgcgtcaggtggtgtgcgtaaaaggataaatgatgaaaaggatgattgcgctggatggcgcacagggcgaaggtggcgggca

SEQ ID NO: 111805 - DNA, 428 bp, Homo sapiens
  misc_feature (1)...(428): n = a,t,c or g
tctgattacgtattccatgtccgtcgccgtacaacggcgtgagtggaaaaaccctggggccacccaacttattcgacttgtagcccatgtcattctgccttacagtgggcgtatatgcatataatataatccctcatgcattctgaatggattgcttataacagaacaataagttacaaataatacagcagttattaagaaattatttttaggcagctagaaaaggggaaagatcttagtagaattttcctttaatgaaaagctgccctcnnnnnnnnnnnnnnnnnnnnnnnnnnnnnnnnnnnnnnnnnnnnnnnnnnnnnnnnnnnnnnnnnnnnnnnnnnnnnnnnnnnnnnnnnnnnnnnnnnnnnnnnnnnnnnnnnnnnnnnnnnttttcaaccagaattttacaagcaacccaactaaag

SEQ ID NO: 111806 - DNA, 201 bp, Homo sapiens
tcagcaccgaaatgatcgagcacttcttccgttcgctctcatacaccatgggcgtgacgctacacctgaaaaccaaaggtaaaaacgatcatccccgtgtagagagtctgttcaaagcctttggtcgcaccctgcgccaggccatccgcgtggaaggcgataccctgccctcgtcgaaaggagtgctgtaatgaacgtggt

SEQ ID NO: 111807 - DNA, 466 bp, Homo sapiens
  misc_feature (1)...(466): n = a,t,c or g
cgaaacttttttggggggccaagggggggggttcccgaggtcaggatttccagcccctctgggtttccccggggaaccccctttttttttaaaaaaccccaaatttacccgggcccaggggttccccccctttttcccccccctttggggggctttggcggggggtttttagggtccggggttcaaatttttttgggttacccgggggaaacccgnnnnnnnnnnaaaatccnnnnnnnnnnnnnntttnnnnnnnnnnnnnnnnnnnnnnnnnnnnnnnnnnnnnnnnnnnnnnnnnnnnnnnnnnnnnnnnnnnnnnnnnnnnnnnnnnnnnnnnnnnnnnnnnnnnnnnnnnnnnnnnnnnnnnnnnnnnnnnnnnnnnnnnnnnnnnnttcnnnnnnnnnnngaaagaaaatggaaatggtttctcgctgagggcagagcacgccagtccagaaagcgagca

SEQ ID NO: 111808 - DNA, 165 bp, Homo sapiens
ttggtctggttgccgatacagccaaagccctgcacttcccgctgccattggcctcaacagcattgaatatgttcaccagcgccagtaccgcgggttacgggaaagaagacgatagcgcagttatcaagattttctctggcatcactctaccgggagcgaaatcat

SEQ ID NO: 111809 - DNA, 848 bp, Homo sapiens
gggtggaatgcaaagccagtttcattcctttccgggagtccccaccaaaggtctcactcctgggtgaaatggatagccagtgtcattcctctaccgaagtcccccccaaaggtctcactcctgggtggaatggaaagtccgtgtcattcctctacgggtgtcccccccaaaggtctctctcctgggtggaatgggaaggccgtgtcattcctatacgggagtcaccaccaaaggtctcactcctgggtggaatgggaagcccgtgtcattcctctacgggagtcaccaccaaaggtctcactcctgggtggaatggaaagcccgtgtctttccttaccgggagtccccccccaaaggtctccatccctgggtggaatgggaaggccgggtctaatccttttccggagttcccaccaaaaggtctcactcgtgggtggaatggaaaagccggtgtcattcctctacgggagtcaccaccaaaggtctcactcctgggtggaatgggaaggccgtgtcattcctctacgggagtcccccaccaaaggtctcagctcctgggtggaatggaaagcccgtgtcattcctctacgggagtcaccaccaaaggtctcactcctgggtggaatgagaaggccgtgtcattcctctaccagagtcaccaccaaaggtctcactcctgggtggaatgggagggccgtgtcattcttctaccagtgtcaccagggcagatctgtcccagtcccgttggtactcacctatgcctctgcttctccacatggaaggggacgggcgcttattctccgcctttcgtcccatctgcctagagaaacctaccatcaagaccgttc

SEQ ID NO: 111810 - DNA, 424 bp, Homo sapiens
atctcagtccgttttcactgtatacccagaacaaaatagtgctgacctttaagccgctttatccacgccttcactggcctgaacgctctgcctgtgtattaaaccagccagaatcgtattgttgcctgcatcggggagggcagcaagagggcgtgttacttgaaaagctaaaagctggtgaagttagcgccgaaggtctgcgcattgtgctggaagcgggtattcgcaacccgatgttcatgcgggccaatcaggcgctgtatgcgcaattccaccccataaaagaatccattttctggcgtcaggttgacggcggacataatgcgctttgttggcgcggtggcttaatgcaggggctaatcgacctctggcaaccacttttccatgacaggagttgaatatggcattcagtaatcccttcgat

SEQ ID NO: 111811 - DNA, 3412 bp, Homo sapiens
gtgtggtctggcgcccccggaggactgcgagcacctgcaccacgggcccgacgcgcggccgccctacctgctgagccccgccgacagctgccccggggggcgccaccgctgctcgccgcgcagctcggtgcactcggagtgcgtgatgatgccggtggtgctgggcgaccacgtgtccagcagcaccttcccgcggatgcactacagctcgcactacgacacgcgcgacgactgcgctgtggcccacgcgggcgccaagatcaaccgcatcccggccaacctgctggaccagttcgagaagcagctgccgctgcaccgggacggcttccacacgctgcagtaccagaggacgtccgcggccgccgagcagcgcagcgagagccccgggcggatccgccacctggtacactccgtgcagaagytcttcaccaagtcgcactcgctggagggctcctccaaaagcaacgccaacggcaccaaggcggacggccgggcggacgaccaccaccacgcccaccacgccaagcacagcaagaggagcaagagcaaggagcgcaagccggagggcaagccccggcccggcatgagcagctggtggagctcggacgacaacctggacagcgacagcacctatcggacgcccagcgtgctcaaccggcaccacctgggccccgtggcccactgctaccccgacgcgctgcagagccccttcggggacctgtccctcaagacctccaagagcaacaacgacgtcaagtgctcggcctgtgaggggttggcgctgacgcccgacgccaagtacctgaagcgcagctcctggtctacgctgacggtcagccaggccaaggaggcctaccgcaagagctcgctgaacctggacaagccgctgctgcaccaggacgccaagcccgccctgaggccgtgccactacctccaggtacctcaggatgagtggggagggtaccccaccggtggcaaagatgaggagattccctgcaggagaatgagaagtgggagttacattaaagccatgggggacgaggagagcggagagtcagactccagccccaagacatcaccaaagtcggcaatcctacmagagccgctgctgaagtccatcggacagagaccgcttggagagcaccagacccagacctacctgcaagctgcaagcgatgtgcctgtgggacacagcctggaccccgctgcgaactacaactccccgaaattccgctcccggaaccagagctacatgagggccgtcagcaccctgagccaggccagctgcgtgagccaggtgagcgaggcggagatcaatgggcaattcgagtccgtgtgcgagtccgtcttcagtgaagttgaatctcaggccatggatgccctcgacctcccgggatgtttccgaacaaggagtcacagctaccttcgagccattcaagccggctactcccaagatgacgaatgtattcccatgatgacaccctctgacatcacctccaccatcaggtcaacagcagctgtctcatatacaaattacaagaaaacgcccccaccggtgccccctcggaccacctccaagcctctgatctcggtgacggcgcagagcagcaccgaatccacccaggacgcctaccaggacagccgcgcacagaggatgtccccgtggccccaggacagccgcggcctctacaactccacggacagcctggacagcaacaaggccatgaacctcgcgctggagacggccgctgcccagcgccacctgccagagagccagagcagctctgtgcggaccagcgacaaggccatcctggtgtccaaggcggaggagctcctcaagagccgctgctcctccatcgggattcaggtggaaacggccacagattctgacacggagagcygcggtctgcgggaataccactctgtcggggtgcaagtggaagatgagaagcgacacggacgttttaaacgttctaacagcgtcacggccgccgtccaagctgacctggagctggaggggttcccaggccacatcaccacggaggacaaaggccttcagttcggctcatccttccagcggcactccgagcccagcacccccacccagtacagcgcggtgagaactgtacggacccaggggctcttcagctatagagaagactatcggacccaagtggacacctccaccctgccccctccagacccctggctggagcccgccatcgacacggtagagactgggaggatgtctccgtgccgcagggatggctcgtggtttttgaagctgctgcacgcagagacaaagaggatggaaggctggtgcaaagagatggagagagaggcggaggagaacgacctctcggaggaaattctcggtaaaatcaggagtgctgttgggagtgcccagcttctcatgtcccagaaattccagcagttttattggctttgccaacagaatatggaccccagcgccatgccgaggccgacgtcgcaggacctggccggctactgggacatgctgcagctctccattgaggacgtcagcatgaagttcgacgagctgcagcggctgcggctcaacgactggaagatgatggagtccccggaaagaaaggaagaaagaaaggtcccgcctccaataccaaagaagcctcccaaggggaagtttcccatcacaagagaaaaatccctggacctgcccgacagacaacgccaggaagcccggaggcgcctcatggccgccaagcgagcggcgtccttccggcagaattccgcctccgagcgcgcggacagcatcgagatctacatccccgaggcccagacccggctctgagggcggaggccggcgccttcccctcgtcgcttccgctttcccggacgcttgtgcagcgcggcgccgccctggtggtttctgtctcctcctcccgctgaacacgtcctcgctcccgcgctccccgcgccccggacacagcgggacgcggccggcggcctcagagtccacggagctcgcggcgaggacgacttctgcttttgttgttgttgttgttgttcacgggtggcctggctcacacttggctctgagggacaggtgtggcgagacctgatttctcctgcgtgttctcagaggacggcgagaaatgcctctggagctggaacccagcytacattttgttatttctatttttataaattgtgtgataattagaggtaagaataacaartaactataaacgggtgcatcccaccactccctggaggcattagacacccaagtggaaggtgctacaacctgaagcgcaggaaagaaaggcccattcccctcgcacagccgagcttttactccctgagcacgggccgctccgctcccctgctcctgtctgtctcggacagaaaacacgaggctccttgtgtc

SEQ ID NO: 111812 - DNA, 236 bp, Homo sapiens
  misc_feature (1)...(236): n = a,t,c or g
actatgccgacctgttgttgcgccatgtcggttgttcgcccagcgattaccgtagtcaatgtaaaaactgttatgcggaacaagaaatcctatctgaatttccacacccggtaagtcttgttggataaatctggcggcncagtgtgttacaaggcgacaaagctggcagactactaggttctgatagtccccaggatgacgggtacggagaggaattcgtaatgaggtcgatacta

SEQ ID NO: 111813 - DNA, 187 bp, Homo sapiens
gaaacagattctgctggatacctactacggtcgtgattatgtagaaggtgaaactgcagcgaagaaagaagttgctccggctaaagctgagaaaaaagcgaaaaaatccgcttaatcagtagcgctgtctggcaacatacagacggccccttatgggcaatgccgatcagttaaggattagttgacc

SEQ ID NO: 111814 - DNA, 222 bp, Homo sapiens
  misc_feature (1)...(222): n = a,t,c or g
atcagcggcattggcattcccgtcgataaaaaatgcaaagccctggcccgcgattccttaagcctgcttgcctacgtcaaataatccctgatccctttttgtagaaatattgaccgtgcatccgcggtcaatgttagctattatgttgcgccctttttttccgggtgttaacaaaggaggcatccccctacgccggnttacnnccagggccatcccantcnt

SEQ ID NO: 111815 - DNA, 75 bp, Homo sapiens
aaacaattgatgaaattcagtccaccgagacattgatcgtcctgcaaaacccgatcatgcgtaccatcaagccct

SEQ ID NO: 111816 - DNA, 1085 bp, Homo sapiens
actacgagattcactgtccgtcgctgtacaacggcgcgactgggaactaccctggcgctaccacatattaatggccttggacaaaactggcctccaatattctaaaatatctgatcacctaaaataccattccacttgggttcctctccggcacgcgctgtgtgtccactggtcatgtgtcaggtgcggccagcagctaccacgctggcctgcctaagcgtggaacgtcttcctcatcatgacggctgtgctggcagcgctgtataggacatctcctgcatcacagaggccatcttcgggacataattccctgagtgttctaacacagcacatgaagcagaggactttgatcatgaagggtcttccaggtcttcaaggttgtggggttagcccaacctcgtggagggagattttggaccaaaagcatttttctggaaaagaagctcgtgtgaatgagatgaaagaaactgctcccacaatctacacttcccatggctttgaggaatcgcaaatgtgaatccatcatcgcttttaaacacatgtttaattatccttctacacctggaattctggacaccacttctgaattcaatgcttgaaagtcatttgcaaaccaaacgggaatttgaaaattagcattccatcgtataaggcacaaatacgtaatcaagataaaatatcccttgaatggcaagcattgccattctatttgaatgtaacagccaccacttgcattcattgcactctcttaattagaacttcaaggatgatagcataaaaggaattacagtcatcaagcccatgacttgtctgatgagagaaatgatattggacaaactaaactttcaaggcaaaagattcaacatagaggatcaaagccattttgacactttaattaatgctagtcacaaaacagaagaataaatcagacaggacacagaagtcacatcccacaagcatacacacaatggttttcctgaagttacaagaaattatgtgggtcccacaagttctggggcaacgttgataggttagcagcaaagatgtctattttgatggggtaataacagaaatttatctcaccc

SEQ ID NO: 111817 - DNA, 1055 bp, Homo sapiens
gccaggcctgaaaccgggcagcacgttgttcttggtgcctgaaccactgccatgcattggtcttggtgctggcctcgggttgggtagggaccgacaatcctccccccgctcacgggaaggttcaggtgcctggggtcataggctttcctgtgccggggccaaaaccaaagccggggtatcccgtggccatcccacaccctcactgctttcaaggctgccggcttcctggccccacaggtgtcgttcatgctcagctagctcaaactgatgcttactgatccacataggctctggaaggtctcaagagcaacttccagtcaaaggagcccttgtttaatggcaggaccaaccggcagccctttgaaagggccctttctctaagaccggtggccaaaggccaagtcaggatgtttgggctgtaaattgcaggggtggattcctgtatttgcttgggctgtgaaatgcaggggcggactcctgtatttgcttgggctgtgaactgcaggggcggactcctgtatttccttttccattacggtccccccaagattgagactcactcccatccatagtgtgggtttgggaccttccaaccttctgatcaagctttatgggagacgttgacatgatttaggatatattcatttgactctgaggtgtaagtcagaggtaacacggtcttaactcttgtcagttgcctttgctttattggtttattaattttttaattgaaagtcactttcttattccttagaaataaagtcgttagtaccagcaggtatgcatatctgacggatcaatgtctgcgcactcactatttgccatgtgcatggtaaaaataaactctcatcatcaaataaaataccacccacacaattaaccccctccttggaaaccttggaaagaaaaaatttatttctgatacaccttcagtatagatgtcattcacaattaggggtcccgtggccgcacatgcacatatggagagacacactgactgtgaagatgtgtaacaaaggctcctcctgtcaggtacagaatttaaaaacagggcc

SEQ ID NO: 111818 - DNA, 878 bp, Homo sapiens
ccatggggggtgtatcctctcccaaaggaaggagtgatcccacccccaggggggcggaaccctccccccctatggtggaaattaatccacctggcccccccggggggaaagaccatttgccatggccccgggccaataacccaggaaatttaactgaagctccaagggaccccggtattcccccccgccaacaaaaatgcaacccatatggcccacaaggtcatgcaaaaaaatgttgacaggatcactgtttgtgtgtttatctgaaccttcacctgctcatgacagataaaggttatcatgtgaacgtggggaagacatcgccaaacacccaggggaggtttccctgggagcagacacctcctcccctcgccgtctttttttaacctccagttgcgtgcttctttgaaatgcccctcaagcccggtcaagggactctgctgctctgccagtccactgtgtaggtcttcctgcttctccatttttttccgccaaattataaactcttggaaacaaagattccgccatcacgcatttctttatcactcacagcatctggatgtcctccacaacagcaagtggcacctgtcatattttgttttggggtttttggtgggggagaattgggtttttttgagacggaatctggctttcttgcccagaagggaggcacgggggggacccctgccatagggaggctcccgtgtccggatccagccgatttttcggccccacccctccttataggtggaacaccgggtggttgccaccgcccccgggctagttttagaatcttaggaggacggggttgtacattgtcgggaagggtggccgtggccgcctagatttgggaaaccgcccctcgggggcctgaagag

SEQ ID NO: 111819 - DNA, 217 bp, Homo sapiens
tctgtgaacagcgggaagaggggccagcctgcgttgaatcttgcccaacacaggcgctgcagttgcttactgaaagagaactcaggcgagtccgccagcagcgtattgttgtcagcggtgagaatcctctctgaaagaaatctccgcgctgaaaggcgcggagaatctattagattgcccaaccacccgcgtaaaatgcgaccagtgcggcagtaat

SEQ ID NO: 111820 - DNA, 386 bp, Homo sapiens
gcaccgctgctgctgacggtgggacggtctctgttccggtcacaccacatacgttccgccattcctatgcgatgcacatgctgtatgccggtataccgctgaaagttctgcaaagcctgatgggacataagtccatcagttcaacggaagtctacacgaaggtttttgcgctggatgcggctgcccggcaccgggtgcaagttgcgatgccggagtctgatgcggttgccatgctgaaacaattatcctgagaataaatgccttggcctttatatggaaatgtggaactgagcggacatgctggttttgcctgttaacaaagagactggttgtttccactgtgaatcgtacgatacgttcggaaaactcccattatcgtggagatg

SEQ ID NO: 111821 - DNA, 645 bp, Homo sapiens
  misc_feature (1)...(645): n = a,t,c or g
ccacctgtcctctgcacctcacctgtccccctacacctcacctgtttaccctgcaccccagctgggcctcgcaccccagctgtcccccccgtactccacctgttcccctgcaccccacagcccgctggtgcccaagaagccaaggtagattctgaggaaactgccctaggtccacagacgccctgcccacctgtcccagccccactccccttccatgggcccctgggcactgaaggtgaggtctgagtacccctcccgactgtggccagtaggtcatgttcccaggcagcagtagacgaacttgctgttgtctgatattgattccagtcactaactttggctgcaagtaaaaattctcattgactcaagatgtaacggggtttaattcttttctctgggtaaccataaacctggaacacgccgtggcagtattttagattctggtgcagagtgacttaatgtccatatgggtggaatggctgcaggaggaacaatttcactgttgctgattaataatatagtttgaacacctgctttatagaaaataanttttattcgaaaagagagatgattactggaggttacacgtcatggtattttaaaaacacactttgtcccttgctgtctctcacagcattaatttgg

SEQ ID NO: 111822 - DNA, 403 bp, Homo sapiens
  misc_feature (1)...(403): n = a,t,c or g
aatacacttccctgtcaaccttttattgggagtggaactcatgaggatcagctcgtgccgggcactgtgcggtcactgaagcagatgaaggggctcagccccgacactgacgccacactgagcatgatgcacggcccggggctcacactgtccatggaggaggtggggtcagcccgaggtgggcggatggtggcccaaaacaccaagagcttggttctgggactgtggctcagctgacccgtggcacagctgcacctaaaacatggccctggctaggcgggaacagctcacagtaacgatacattcacaggacacagttggtgtccacaaaagggggctcagaacacagtttctacacaagcacttggcgcccacacgacagagacgtcactctagcatcacn

SEQ ID NO: 111823 - DNA, 571 bp, Homo sapiens
ataaacaggcattccctagcagtggagaacagaagagatctctgttgggttcctttacttgattttctgagtgcgtcaatatgccctcctccagagaggggaagtctgtcacttcagtatcttccgttctcacattaaaccatagtctgggatgtatccaaggtttgggaagagtccatttcttgaggaagacaatgccaagattctgttttcttctccagggaggtccgctcgccctccgagtagcggtgctgcgggggcgacagcggaggcaaaatcctgccggggtgcgcctgcagccaggccttggcctcctcgtcctcctcgtcgtcaatactatccacatgctggggcccgtagtgagagtcgaagtccaactaccgccccgcctattcgtccacatcctccacgaccactacgtcgtccacgttcgccgccgccgccgctgcagcctcctcctcttcctcctcctcctcctcctcctcctcctcctccagctcgaacggccatggcagatcctcaacgaaatcgtcggctcgtggaggatccaagcaaacgtacaggacaatat

SEQ ID NO: 111824 - DNA, 418 bp, Homo sapiens
tttcgtcctaccaccaagacctacttgccgcactttgatctgagccacggctctgcccaggctaaaggccacggcaagaaggaggccgacgcgctgaccaacgccgtgacgcacgtggacgacatgcccaacgcgctgtccgccctgagcgacctgcacgcgcacaagcttcgggaggacccggtcaacttcaagctcctaagccactgcctggtggtgaccctggtcggccacctcccagaagagttcacccctgcggtgcacgcctccctggacaagttcctggcttgtgtgagcaccgagctgacctgcaaataccggtaagctggagcctcggtggccatgcttcttgcccattgggcctgcaccacagagctactccccttgctgcacccatgtattgcggacgctctagagg

SEQ ID NO: 111825 - DNA, 1455 bp, Homo sapiens
atggcctctggggtggaagtcctgcgcttccagctgcccggccacgaggccgcaacgctacggaacatgaaccagctccgggcagaggagcggttctgcgacgtgaccattgtggccgacagcctcaagtttcgaggccacaaggtcatcttggccgcctgctcacccttcctgcgggaccagttcctgctgaaccccagctcggagctgcaggtctccctgatgcacagtgcacgcatcgtggccgacttgctcctctcctgctacacgggcgccttggaattcgctgttagggacatcgtcaactaccttacagccgcctcctacctgcagatggagcacgtggtggagaaatgccggaatgccctcagccagttcattgagcccaaaataggcctcaaagaggatggggtcagtgaggctagccttgtgagcagcatcagcgccaccaagtccctcctccctccagccaggaccccaaagccagccccgaagcccccacccccacctcctctaccccctccactcctgcggccagtgaagctggagttcccactggatgaagacttggagctgaaagccgaggaagaggatgaggatgaggatgaggacgtgtctgacatctgcatcgtcaaggtggagtcggccctggaggtggcacaccggctcaaaccccctggaggcctgggagggggtctgggcattggaggctccgtgggtggccaccttggggagctggcccagagcagcgttccccccagcactgtagccccaccgcagggtgtggtgaaggcctgctatagcctgtcggaagatgcagaaggggagggcctgctgttgattcccggaggccgggccagcgtgggggccacctcgggcctggtggaagcagcagcggtggccatggctgcccggggggcggggggcagcctgggggcggggggcagccggggacccctgcctgggggcttctcaggtggaaaccccttaaagaacatcaagtgcaccaagtgcccggaagtgttccagggcgtggagaagctggtcttccacatgcgggcgcagcacttcatcttcatgtgccctcgctgtggcaagcagttcaaccacagcagcaacctcaaccgccacatgaacgtgcatcgtggtgtcaagtcacactcgtgcggcatctgcggcaagtgcttcacacagaagtccacccttcacgaccacctcaacctgcactcgggagcgcggccctaccgctgctcctactgcgacgtgcgcttcgcccacaagcctgccattaggcggcacctcaaggagcaacacggcaagaccacggccgagaacgtgctggaggccagtgtggccgagattaacgtcctcatccgctagccgcgcaggcgtggaggccaggaggctggggcccctgggctgcgtggaaaaagggctctttggcccaggagaatt

SEQ ID NO: 111826 - DNA, 454 bp, Homo sapiens
ccgtccgagttccggtcacgattcgacatttttttgaataacaacatcagacaagtgtgcattgacccgaagctaaagtggattcaggagtacctggagaaagctttaaacaagtaagcacaacagccaaaaaggactttccgctagacccactcgaggaaaactaaaaccttgtgagagatgaaagggcaaagacgtgggggagggggccttaaccatgaggaccaggtgtgtgtgtggggtgggcacattgatctgggatcgggcctgaggtttgccagcatttagaccctgcatttatagcatacggtatgatattgcagcttatattcatccatgccctgtacctgtgcacgttggaacttttattactggggtttttctaagaaagaaattgtattatcaacagcattttcaagcagttagttccttcatgatcatcacaatcatcatc

SEQ ID NO: 111827 - DNA, 425 bp, Homo sapiens
tttcgtcctgccgacatgaccaacgccaaggccgcctggtgtaaggtcggcgcgcacgctggcgagtatggggcggaggccctggaaaggatggtcctgtccttccccaccaccaagacctacttcccgcactttgacctgagccacggctctgcccaggttaagggccacggcaagaatgtggccgacgcgctgaccaacgccgtggcgcacgtggaccacatgcccaacgcgctgtccgccctgagcgacctggacgcgcacgagcttctggtggacccggacaacttcaagctcctaatccactgcctgctggtgaccctggccgtccacctccccgccgagttcacccctgcggtgcacgcctccctggacaagttcctggcttctgtgagcaccgtgctgacctccaaatgtattgcggc

SEQ ID NO: 111828 - DNA, 252 bp, Homo sapiens
  misc_feature (1)...(252): n = a,t,c or g
ttttttttttttggtagagatggggtttcaccatgttggccaggctagtctcgaactgacctcaggtgattctctcgcctcagccttcccaagtgctgggattacagacataagccaccatgcccggcctgacataagttcttatatttgtatatacaaacctccaattttatccctcagtcaagatttaggtctctacctaaagattattctacgaaatcgtggncccgggaattacggcgcggggccctg

SEQ ID NO: 111829 - DNA, 451 bp, Homo sapiens
  misc_feature (1)...(451): n = a,t,c or g
ttgtctgaagcaccggaccggntnncatcttcgacgatttcgtcggatgctgcctcttacccgtccccgggtactatcttttatccatccccggccaccacctcatacccatcccctgtgcccacctccttctcctctcccggcccctcgacctacccatcccctgtgcacagtggcttcccctccccgtcggtggccaccacgtactcctatgttccccctgctttcccggcccaggtcagcagcttcccttcctcagctgtcaccaactcctccagcgcctccacagggctttcggacatgacagcaaccttttctcccaggacaattgaaatttgctaaagggaaaggggaaagaaagggaaaagggagaaaaagaaacacaagagacttaatggacaggaggaagagatggccataggagaggagggttcctcttaaggcagatggc

SEQ ID NO: 111830 - DNA, 1317 bp, Homo sapiens
  misc_feature (1)...(1317): n = a,t,c or g
tttttttttttcatcataaatcatttattggaaaatgactgtgaattatgaggttctttcttgtcatctaacatatatagttgcttcatgatcatctgtccaccctgttgttcaatatttggaacagtttctttcaactttaaattttagggaaatcttaaataatggatggttctgcatcaaatgattcattttaccgtatttcactaatttctgatagtatggtgggaaaataattctataaaaagataactgagaattcattttcacaattattctaagttatttagcaaatatttaatggcctttcttgcttaggacaaatgtatcataatcatcaagtgtgcgagcttttctgtttaccaatggccagtgaaagttttaggctttatacataccagtgaactctttgaaaggtcaggatacataggcatgtgtatttatccagaagttgatatatatttttaatttcttacagattataccgaaaagaagttctagagaaattaatagaaaaatgtgtttctaaaggctacgtcttccagatggagatgattgttcgggcaagacagttgaattatactattggcgaggtatgcaactgatgctaaatagtgtgtcatgttcctggtaaaggagcagtaaggtttagaatttttataataaaaagtttaactttcataactgctaaattgtggaggtcttctagttgtttagaatattcatgcacaaagggtaaaaattcatattagtacatttgaacagtaagatttaaaacattaacagtcagcattctcttttaaataattaaaagttcctggtactttctcaatcctagccctttcttctaactaatcagcattatggactgagtctctttgcttcttttccttttgtcaccgccaatggccaccatactttaaaatgaatgatgagttccatatgtccattnnnnnnnnnnnnnnnnnnnnnnnnnnnnnnnnnnnnnnnnnnnnnnnnnnnnnnnnnnnnnnnnnnnnnnnnnnnnnnnnnnnnnnnnnnnnnnnnnnnnnnnnnnnnnnnnnncttccgctctttctcgagccagccattttggctagggcaggttcggggactcggtccgaggcgcatgtattgtctgcccggcgccgacgggtccaccgtcccggcacggaccgctacccgactatgctccgaaggtccaggcgcctcctcatgcagcccgacccccttctccgccctgtgagcccacagaggccagctctctgcctggccgcccggagctttgcagctaagggcatcgaattccgacgcaca

SEQ ID NO: 111831 - DNA, 408 bp, Homo sapiens
tttcgtggcagagcagagcgggggccgggaggggccaggagcagagcttctagccttgccactctcccttcccttgtcccctctgtaggaagtgggggtgggccacctttgcccaaaaagccatacccccggggacacagccccgatggcctggtccaatacacttagacccaggaccaagagcaatcgctcttgctcctccagaagaatcagtggggagtgaggagggggctaggccccattctcacccccgaccaccttcaccaactccctttccgtcccgcgcctccttctccccatccgggggactcagctgcaggttctgtcagcaaagagacccttgcttgactgtggtctgaagctgcctgggtttgaaggggccagcgggtccaatcagtgggctgaccc

SEQ ID NO: 111832 - DNA, 406 bp, Homo sapiens
tttcgtatgtgatcaagcgaccactggtgaaaaaccctgtggattacatggacctgcctttctcctcctccccaagtcgcagtgccactgcaagcccacagttttccagtcacagcaagctcatcacgccagccccctcatctctgccccactcccgccgagccctgtcccccgagatgcacgctgtcacctctgagtggatctcactgactgtgggggtcccaggcaggcgttctctggccctgaccccacccttgcctcctctgccagaggcttctatctataacactgaccacctcgccttgtcaccaagggccagtccctccctgtctctcagcctcccccatttgagttggtcagatcgtcccaccccacgatcagtagcttctccactggccctaccttc

SEQ ID NO: 111833 - DNA, 452 bp, Homo sapiens
ctatgttgcctgaagtgctcagcccatttcaactgggcaggtggagagtgtggtcacctggattggctacttttgcttcacttccaaccctttcttttatggatgtctcaaccggcagatccggggggagctcagcaagcagtttgtctgcttcttcaagccagctccagaggaggaactgaggctgcctagccgggagggctccattgaggagaacttcctgcagttccttcaggggactggctgtccttctgagtcctgggtttcccgacccctacccagccccaagcaggagccacctgctgttgactttcgaatcccaggccagatagctgaggagacctctgagttcctggagcagcatctcaccagcgacgtcatcataacaaacagctacctcagtcctgccaccgtgtatgcggccgctgtagaggatccaagataacggcacc

SEQ ID NO: 111834 - DNA, 391 bp, Homo sapiens
aatacatgggctggagtcaactggaaacaggccagtttgatagaaaatgtgtatgtgtgtgcatgtacatgtgtgtctctgtgtgtccacatgtgtgcatgtgggtccatgtgtatgtgtgtggctgtgggtatgtgcatgagtatgcatgtgtatgtgcatgtgtgtgcatgtgtgcacatgtgtgtctcaactctgccactggtgaggtgcactggaaactctggagcctggcatgcagccacagctggactccttcccacctacacaccccctccatgggcagcttcaagtgtgcagagcagacacatttacccagaaggacacaccagggacaaagaggaaaagagagacaggcttcctgaccctccagaaggaagggttgcacggg

SEQ ID NO: 111835 - DNA, 458 bp, Homo sapiens
ggacacttcagagtcccggccttgggctacctggacgtgcgcatcgtggacacagactacagctccttcgccgtcctttacatctacaaggagctggagggggcgctcagcaccatggtgcagctctacagccggacccaggatgtgagtccccaggctctgaaggccttccaggacttctacccgaccctggggctccccgaggacatgatggtcatgctgccccagtcaaatgcatgcaaccctgagagcaaggaggcgccctgacacctcgggagccccacccccgcccttcccaggtggagccaaagcagcaggcgcctttgcccctggagtcaagacccacagccctcggggaccacctggagtttttccatcctccaccccccgcctgtgggatgccttgtgggaggtttttttttattcaataaacagatgctgcagccaaaaaaaaaaaa

SEQ ID NO: 111836 - DNA, 402 bp, Homo sapiens
ttcttgtaagatcaggcccatgaaacgttgggcggcattcgccttatggatcgctgccaagcaggggctccgtctgtatcgcagcctgactgccgtcacccagcgcaaggtggtggcattctgtgacgtggtcgagaacaagatcaggaaaggcttgtattgccccgaggactatcaggaaagactcaagccccgaatccccatcctgcacttccgagccgcccggccacccttcgtcatctgcgtgaagctgcctctccgctattagcagaggagcagaacacttgacaggtggacacaggccacccccaacccctggccctggaggaggctccacagtggcctcctagagccaggagaccggactgagctgaatatgctgctcctaacaggacctgtatt

SEQ ID NO: 111837 - DNA, 392 bp, Homo sapiens
  misc_feature (1)...(392): n = a,t,c or g
ngaaaaggtcaatttttctgtggaaataaatattgtgataaaaaagaaggcttaaagagttgggaagttaattttggttatattgagcatggtgagaagagaaatgcacttgttaaattaaggttatgccaagaatgttccattaaattaaatttccatcacaggagaaaagaaatcaagtcaaaaaaaagaaaagataaaaccaaaaaagactgtgaagagtcatcacataaaaaatccagattattttctgcagaagaggcctccaagaaaaaagataaaggacattcatcttcaaagaaatctgaagattctctacttagaaactctgatgaggaagaaagtgcttcagaatctgaactttggaagggtccactaccagagactgtatt

SEQ ID NO: 111838 - DNA, 423 bp, Homo sapiens
  misc_feature (1)...(423): n = a,t,c or g
ctggtgtatacttcagcagggctatttgaggggtcagacatccattgggatccaattggaaggaaaacacaatggaagggtactctgtgactgtgagcaatgtggagaagtcttcagtgaacactcatgccttaagacgcacgtgagaactcaaagtacagggaacactcatggctgtaatcagtatggaaaagatttccttaccctgtgtgagaaaccctctcctggtgagaagctttatgagtttaatcagagtgaaaaaatcttcagcgtggcaccaaatattgtataccagagacctagcgcacaagaaaagtcatttgaatgtagtcgctgtggaaaatccaacaaaaatgagtcatcccttcaggcacatgtattcgncgcgtgagctcgtacnttaaccgcagcgtcgggccatat

SEQ ID NO: 111839 - DNA, 470 bp, Homo sapiens
  misc_feature (1)...(470): n = a,t,c or g
gcctgccgcgtcgtttgctgggatcctctcgagcggccgcaatacactccctgcttcgcatagatttcattagtcttgatttttcttcttttccaatnnnnnnnnnnnnnnnnnnnnnnnnnnnnnnnnnnnnnnnnnnnnnnnnnnnnnnnnnnnnnnnnnnnnnnnnnnnnnnnnnnnnnnnnnnnnnnnnnnnnnnnnccataggtgagccccgccatgtctggctannnnnnnnnnnnnnnnnngagggagccccgttttgccccccaggttggaccgcaggggcacaatttggccccattgaaacctccccccccgggtttcccgccattttcttgcttaaccctccaaagcagtgggaaccaagggccccccccaccaccccgggccatttttttgttttttaaaaaaaaacggggttcccccgtgtttgtggggttttttttaaagccatatttgtgaaaacg

SEQ ID NO: 111840 - DNA, 1020 bp, Homo sapiens
acaaaatgtcctgcacagaagaaatcctcttttgagaacacagtggtcagaaaagtgtcagtgacactcaaagaaattttcacaggggaggaaggccctgaatccagtgaatttagtctaagcccaaaccttgacgcacaacagaaaattccaaagggacatggatccccaatatctaggaaaaactccaaagataattcagacttaattaaacaccaaagacttttctcacaaagaaaaccttgtaaatgcaatgaatgtgaaaaagcctttagttaccaatcagaccttcttgtacacagtagaattcatggtggagaaaagccttttgaatgcaacaaatgtgggaaatctttcagccgaagtacacaccttattgaacatcaaagaactcacactggagagaaaccttatgaatgcaatgaatgtggaaaagcttttagccggagcacacatcttagtctacatcagagaatccatactggagaaaaaccatatgaatgtagtgaatgtggaaaagcctttagccgaagcactaaccttagtcagcatcagcgaactcatactcaagaaaggccttacaaatgtaatgaatgtgggaaagccttcggtgaccgttcaaccataattcagcatcaacgaatacacactggagagaatccctatgaatgcagtaaatgtggaaaagctttcagttggatctcatcgcttactgaacatcagagaacacacactggggagaacccctatgagtgcagtgaatgtgggaaagtgttcagtcgaagctcgtctcttacagaacatcagagaatccacagtggagaaaagcctcacgagtgtagagtgtgtggaaagggcttcagtcgaagctcatcccttattattcatcagagaactcataccggggagaagccgtacaaatgtaatgactgtggaaaagccttctgtcagagatcaactctgatcagacatcagcaccaatgtattgcggccgctggagaggatcccagcaatcgtggc

SEQ ID NO: 111841 - DNA, 647 bp, Homo sapiens
ccatgaagcttctctgtacctctcagaacttatggagtccgagccaccgggcagcagtgcacagaagctggtgacatctgcgccatctgtcaggccgagttccgagagcctctgattctcctgtgccagcacgtgttctgtgaggagtgcctctgcctgtggctggaccgtgagcgcacctgcccgctctgccgctcggtcgccgtggacaccctgcgctgctggaaggcgggcgccacgtccgcccacttccaggtgtattaggaccgaacactgaggacactcagaaggacgccaagggtcagcatgcccggacccagccctgcgggggcttcctgagaaacaggcctcaagcacttacatcctgcctcttgccctccaccacctctgaccccaaagtcccgcccctgtcttgtccttctgaccttcatcttcctctctcgttctgtggtatagtgcgtgcctccttcccctgcaaaaggggacgtcttcctaactcagacttgatgcccttctagatgcatcttccttctccactccaagtcaaggacctggcaatacatgaagttcccactcgcaggcaaaaatctcgttcaatattcttatcaatacaatctctctctctctgtttccctcccccccatgta

SEQ ID NO: 111842 - DNA, 459 bp, Homo sapiens
agatttggagaatgtgtactgggcaccagccttggcaggtttcacggatctctgcactcatcctttcctgggtggtctcagtcactgccaggggagccagtggcctcaccttaccaatggagaaactaaggggtgcatgcccatggccctgcccgggtgctcccagcatgaaggggctgtccagggctgggactccggtctggcctcattctctctttgtctaccctgctgccctcctccgtctgtgtgtggtgtcctgagctgggactatgccatctgtgtctttggggaggtcccctgcaccctggccaggagctgagggagctttccacctgcagggatccttcactgcgtacccttggctggctccaaaatccttctcaaaaaagcagagtgggagcaggtgccccagtcctgtacgcgcccgctgtgagtatcccagattcgtcgcggcctgcg

SEQ ID NO: 111843 - DNA, 440 bp, Homo sapiens
  misc_feature (1)...(440): n = a,t,c or g
agacggaagcggcttcattctttaaccgcgaggtcatgcagcgctttcgcggttttggcggggtccgcatcgaggagaacgtcgtggtgactgacaccggcatagagctgctgacctgcgtgccccgcactgtgaaagagattgaagcatgcatggcaggctgtgacaaggcctttacccccttctctggccccaagtagagcccgccagaaatcccagcgcacctgggggcctggccttgcaacctcttttcgtgatgggcagcctgctggtcagcactccagtagcgagagacggcacccagaatcagatggcagcttcggcatttgatcagacccccacgtgctgtttcccggggaggaagcacttttaaaattacccttttgcaggctcccacctgtattcgcccgctctggaggatgctcgcctacgagnagtcc

SEQ ID NO: 111844 - DNA, 403 bp, Homo sapiens
cgaggacaattttgatggcgacgactttgatgatgtggaggaggatgaagggctagatgtcttggagaatgccgaagagcaaggccaggagaatgtcgagatcctcccctctggggagcgaccgcaggccaaccagaagcgaatcaccaccccatacatgaccaagtacgagcgagcccgcgtgctgggcacccgagcgctccagattgcgatgtgtgcccctgtgatggtggagctggagggggagacagatcctgtgctcattgccatgaaggaactcaagaggcggcggctcagagaggagtgactcgcctgaagccccgtgatcaatgcatggtggacggaagtacatggaatgccagagccaggctggtgactagtgctggtggtgggggctggtcaa

SEQ ID NO: 111845 - DNA, 5729 bp, Homo sapiens
gcttcatgacagatgttaacagctggctgctcacctttggattccagctacacaacgtgatccctggttatcccaaaccagacatggatgccatggaaccctcctacgagcttatccacacacagatgaaaacgcaggagtgggacaacagcaagtctatcctcggggtacagtgtgaagtacagaagcagctcaaggcctttgtcaccttagaacggtttgaccagctctatggctccacaatcaccagctgccagcaggctccaaagaccaagaagtttgcatccagcggctcagtctttggcaagggggtcaagtttgccttgaaggatggccgagtgaccacagacatcatcagtgtggccaatgaggatgggcgaagggttgctgccatcttgaaccatgcccactacctagagaacctgcacttcaccattgatggggtggatacccattactttgtgaaaccaggaccttcagaaggtgacctggccatcctgggcctcagtggggggcggcgaaccctggagaatggggtcaacgtcactgtgtcccagatcaacacagtacttaatggcaggactagacgctacacagacatccagctccagtacggggcactgtgcttgaacacacgctacgggacaacgttggatgaggagaaggcacgggtcctggagctgtcccggcagagagccgtgcgccaagcgtgggcccgcgagcagcagagactgcgggaaggggaggaaggcctgcgggcctggacagagggggagaagcagcaggtgctgagcacagggcgggtgcaaggctacgacggctttttcgtgatctctgtcgagcagtacccagaactgtcagacagcgccaacaacatccacttcatgagacagagcgagatgggccggaggtgacagagaggaccaaggacttcttgccaaagacagctactcttttgtggccgcatacctgactgtgttgtacttttaaaaaaatgattttttaacaagtgcagaaacaaaaagatactggttgcattgtaactcatgcaacatccttttttttagaaaagaaaaacacagatttggccttcgcacattttttgcaaagaacagaaggtatttttttctgttagtgtgatcacaatgaaaactttattggtcttttgttccctttttccttgaggatttttcccttgtcgtttggggtatgtatctcctctctgagatgcatctcctgggttgtgtcctcgtctgtccctaggtacccagtgtgatgtgggacatgaatgtctgtgctaacttgtctcatgtgcaaccctttcttcttcgactggggtcgggcaggagtaaagggagtgatgggccagtacaacaccccttccaagggggcctgggaggagggtctgtaggacctgaggctccttggcagggctcctgcagaagagtggtggatttcttctcaccttgttctctgcctccagaggatcatagatggcttcatcttgctccagggaatttcatggtgttgttcagcaccttttttaagctgccccaaactcctgttcaagctttctattttgatgctgaatgaaaccccctaccacttttgcaaatcctgtgtagttgtcggtgccacccccatgctgggatagagaaagtgtctcccaggtcctttcccccagaccagtgacataacatcctgggctcagagtcccatcctcccgggagggaaagcacccaggatgcctgtgattggttggtcctccatgatgttcctgttcatctcctcccttctcccaaagccagatgtgagaacgagcactgcacagcaagccttcaatgtgggcaccatgtccacagaacagaaggccacccatggcaaaggcatggcagtggtggcgagggcaccagcctgccttccgaggcaaagccctctctctatgactttgagtatcttccctccaccactcagccgccaccactgagacgtaggaatgtggagggaggtgcttggtggcctttgattctggaaaaatgcttaacaaaaaaagccagccaaagagaggaaggcataagctaagcatccttctaaccagttcccaaagtcccatctgcctccatgtaccagctgatcgcagagctggactggggcaggctgggcttccaggaaattcctgaagttctgaaacagcttcccctctagagaagcccacccaatgtgttttttagtgacaggaagaaaggagggaagagctgatgtggtgtggcctgcccatatcatacaaccccaccaggagcagggcagttcccaaggtgggtgcccgtagatctgggaggccaggctggcatgattcctgtgaagaactgtgcctgtgtcgtcagggagaggcctgagccctctcagaagcagggacagcccacacctgaagagcacgcccaagctgaggcagcagccagcaggctgggggagcagtgagggcagggggagtcacagccagagctgggagccccttgttcaaggattccattcctggttcatccgcctaattaccattgtcattaccactcacaggaggctctgggagatgggaggggaagccaaatgcttccttttaagctgggcttcttagaaaatggaacttttatgggttacatttacattaagtgtggaaaatgaattctgagtctgagctattccccgtggaaaaccttgttggactgataagctcatggcacctctatagccttactcacatagtcttcagaatattacacaagttaatgaaactgagaaggtctgactgcatgaggatcggagcagcatgtagtctgggttctgcctggcagagggaggcaaccaaaacttcttggggagaagagatttcgccttaacgtcatcccactgggattagaggatgtgtttcgctaagtgctcttcctgtttccaaaaaaaaaagccaccctgctgcagcagtgcgctttggcctgcttgtccactggttgcccattgcccctggatccagagctttactgagtcagatacagtgctctgcaggcctgctgtgggaggcatgagctggagatgggggctcccatctggcaggatcattcttggatgagaatggaaaacagtttggcctgaagaacacaagttttgtcctccagaagggacttacgcctctcaaaatgtactcttcataccaagggcccttgggcaaagtgctcctgcccagttgatcagtcccatcctggctgcctgacatcagtgaagacctgctggggatgtctgctcagaggtcaggaacggcatgcggtccacaggaaccagctccctacgcttcccccacgccctgtccctcctccacagccccctccccaaaggaatagggtggacttttagggatcaaaaacagaattattgggtgtttcatttctttttttctttctttcttttttttttcatagagatggggtctcactatgttgcccaggctgttctcaaactcctggcctcaggcgatccaccttggcctcctgaagtgctggggttacaggtgtgagccactgcgcctggactgagtgtttgtttctttaaaggatcttatatttttcctgtgctacataccaccacagcagcccagcttctgtggggagagaagttgaaggatcccgaagctttagaaaaaggatctcagctgtggcacaggcagtgttatgcgcctcactgccacattggtgctgttgtattgaaggtggtgcttctggccttggcccttttgagttggtttccatttgggctgcaggtgactcagtgactccctcctcaagctgtcctcctgctaagaccagcagtcacaaacccatggcaagggtgagtgtgaaggcctaaccctgtgcctatgtaataggctccaagcatcgactcccatcctgagaggaccggcccttttgacactcaccaaccaaatctgttcattcgatagagtgaccaggcctccctcacctgcccaggtgtatgatcctacagttcctgccttctctcctaccccgcacagctgccaactggtcctacatcctcagcccctctgccaccaccttaaataggactttaactgattccccaactttgtttttttgtaggatgagatttcctttttatcccacccccccacaccccaaacagaacattgctggagggcagactggaggaaggggaaggcatgcaggtaaattactgccttgtcagcctctgaccctcatctctcagaattgttggctgagaattaacccaaggaccacaccagtgcctgatttctacttagggagagaggattggaaacgatccctaagaaactgactgagggtgagaatggccaggaggtgtgtgtccaaataaccaggagggggcacagaagatgattgcaagccagaattggcaatttttttttggacacagaacaaagaatcagaatttgaaaaaagaagaaaaacaaatcttcgcagctgcaactttaaagtatcacctttatagatggcagggatttccattatgcaaatggaatctaagatttcaatgtgaaatcttagaatgcagttttaccacttgcagtcttgtatttgtggtggccatgtggtgagggcggtgatgctgagctttctgcccaggaggaatgagctttcaagctctcagcagggtgtcaggcttggggatttgacgcatccactgctcaaagtccaggctattctccagctctcacggcagccactaagcccaggagccagacctggcccagggacacatctcctgagggatcccagaaagaacccagtctttcctttcccttggggttccttgttagaatgaaaacctctctatttaaggcacatcattcccagctaggtttatacacttgtctatattttactggaggaaagggaattaaaaaagaactctggcagttcaaggcccttttcatttaaaccttccaaaaacaggcaaactcatttttaaaaggattcattgctgaggtgataggagaggaaaccttatcctctccaaccttttacattcacaaaaaccatccttgtgtacttgactgccctagacagtggtgactcttaggtttcattaccgaatgtggaatatcagagtgtgggaaggcccaggcgagggccaatgttgtgtttcttaccccctctgggaatgccaaaggcaaggtactaggtgacctcctggtcccccaaaaaaatgtgatttattctggagggcgaacagccaaagggaggactagtctggagcacgctcggccgtcctggcaggagctgagcctcaggtgctctggcggtgccccagcagccctggattcaccccaacaccagaatcccacttttctaaatcccacctgttgttctgagcacctctgaacccgcagcttcggcaaaaggagtctgtacccaagctgcttctggatgaccaacactggagactctggccttaccatgtggaaatcattttcctgaagtctggaactaatctttgagaagtttctctctcaacacttttgtgtttctcaacactgtatcttgactgtgtaaataccaacaaggccgtaaataaatgcagatgtagataccttctagaaaaaaaaaagcataaaaacaaaaccagaagtgatcccgtgtagccttcgttgacaaataaagactattttgtgtttaaaaaaaaaa

SEQ ID NO: 111846 - DNA, 385 bp, Homo sapiens
  misc_feature (1)...(385): n = a,t,c or g
tggagcagaagctcatgtgggccttcagcatgtatgacctggacggcaacggctacatcagccgggaggagatgctggagatcgtgcaggtgggcccctgggcccctcagaatgccaggcacagggcccggcagcttgcacccaccaccccttttgatcctctcagcaggcctcgtaggcatgtggtggcaggggatattcttgcaatcccattttaaaaattgcttttaggaaatatttcccatttaaagaaaagttgagaannnnnnnnnnnnnnnnnnnnnnnnnnnnnnnnnnnnnnnnnnnnnnnnnnnnnnnnnnnnnnnatcagtgtgtgggtgcgtgtgtgcacactagtgagtaacattttcttgctgttctgaag

SEQ ID NO: 111847 - DNA, 232 bp, Homo sapiens
tagtagatccgtcaccagtcccttgacagtcagtctgaaaatgccaccatcgacctaaattctgttctagagcgagaattcagtgtccagagtttaacatctgttgtcagtgaggagtgtttttatgaaacagagagccacggaaaatcatagtatgattcaatccagatatgggttaaattcctcattttacttttaaactggtggtaaagtggaaattgcaaaaaaaaaa

SEQ ID NO: 111848 - DNA, 1599 bp, Homo sapiens
caggaactcatctacaccttcactgccaccttcacccggcgcctggtccccttcctgtggctcaagtggccaggaacacgcctcctgctaagaccctgagccctgacatctgcccccagccccaaccctcagatgcttcacttctttggaattccaggactctcaatggggggacgggatgcctggcctaagcacctggagcaggggaccccatatccactggtagccacctccccattgctgtggccccctgaaatctcactcagtgctgttgctccatctactgccctgaatggggctcgttttcccacctcctgctggtttcccgagggaacttctgaccctggagtccatgagggctcctttcctttttgaccacgaccttggccccagctctgcactctctggaataagggcccgatgcagcattttcttgcccagtgtggcaagacctcagaaaaaccagtcaattacgcctaagatcattttgctgtccttaaaccccccaggttccttcttgcacaaatccactctgctgcccaccttccctggcattttaaacagacctaccccaccccaactcagagttaagcatacatggcaatgctgaaaataaacaaaatccactgaggcttcccaggccatttaaagcctgggagtaccagcgcatatcatctcatggggtccagagtggagtccaggcttctctgaaaccaggggctgagcatatttccatagccaaggaggtggggactccctgggagctatctgtgggtcttaggggaaggatccagacatacatggctttggggtacaagctgttgattcactgatcaattaaatttatctctaggattgggtccttgttgaggggggagtttttaaggattcccagaacatcttgctcttgatcagcacatccaaaaacaccaagacaaacatccatgtggagcagaacctctcctgcctcgggagttctgaccgggttccccagcagggtggttaagcctctgtctctggccttaccaggcatccaggttccacttttcctagggagagagtgggagatggggaagacagggaaaggaaggcagcagggaggccaacaaggcccaccagggtcttcaatgtcaaagagaggggagtaacatgtcttcttcatttgcccacgggacccaaacctctgttccagggtggcccctcattcattcacagttttaacacaagctccccctggctcccaagccaaaattggatctccccagtctttgtcctttacccatttccaagttgttttttgccagcccttgtttcatcccaagttttaaagtcctcccaccctgttcctaagagactgttcccaacggctctggggcctcaaggggtcacttgacccaccatttgtctcagagctgccccactttgtgtgtgtcacatgctgcctgagtcacatgtacatcttatttctgcctctagttttgtaagctcctggagggcggataacatcttatactactcttgtattctcatggcacctagtgcgagtgctgggcacagagtaggtgctcaataaagacttgttgaatgaaaaaaaaaaaa

SEQ ID NO: 111849 - DNA, 443 bp, Homo sapiens
catgaatgtgatgaatgtggaaaattatttagcaacaagtctaacctcattaaacatcggagagttcacactggggaaaggccatatgagtgcagtgaatgtgggaaatcctttagccaaaggtctgcactccttcaacatcggggagttcacactggggagaggccttatgagtgcagtgaatgtgggaagttttttacatatcattccagtctcataaaacaccagaaagttcacagtggatccaggccttatgagtgcagcgaatgtgggaagtcatttagccaaaactctagcctcattgaacaccatagggttcacactggagaaaggccttataagtgcagcgaatgtgggaaatcctttagccaaaggtctgcactccttcaacatcggggagttgtattgcggccgctctggaggatacccgcaaggtcgtagac

SEQ ID NO: 111850 - DNA, 420 bp, Homo sapiens
ttcattcgttccgtccccgggtggtcttcagggatcaccacgctcacctgttcctcaatattttcagtgacatcttagcagtcttcgagtaaagaagccatttccactacagtgagaaagcccggatcccaacagttgtcaaattgattagtttgcctaattcatgttttcacttaaaagtatcagaggtgaatgcacagtcaagggtgatttgtggggagggagcatttttggtggtcttgggggaggggaggggagggaagggctggtgttgattttcctccctgcagagccaatggtgcacattggtttaagcccagagatcctgcttgagccctggactcatcttcggaagggccatgggaggtcctggttagaattctgcccaaccttgaccaaccccagtctgtattgccgccg

SEQ ID NO: 111851 - DNA, 433 bp, Homo sapiens
cctgtttgacttgtcaagccttgatgatgtggaaggaatgagcgtgcgccagctgaaggaaattctggctcggaattttgtcagctattctggctgttgtgaagaatgggaactggtagagaaagtaactcggttatacaaagagaatgaagataaccaaaagtcctatggcgagcggctgcagctgcaggatgaggaagacgacagcctgtgtcgcatctgcatggatgccgtcatcgactgtgtcctactggagtgtgggctcatggttacctgcaccaagtgcggcaagcgcatgagtgagcgtcccatctgccggcagtatgtggtgcgagccgtgcacgtgttcaagtcatgaaacaggctcccctcaccaggacagtcacccccaaactagaaccccaacatttcaatgcacgaatggcgaacgggc

SEQ ID NO: 111852 - DNA, 422 bp, Homo sapiens
  misc_feature (1)...(422): n = a,t,c or g
gctgctttcatccccaccatcaagcccccaattccagatccgaacaacatgagagactttgtcagctacccatcagccggcaacgagcggctgcactgcaccatgaagcgcacagaggacgacccggaggtgggcggcccgtgctacacgctctacctggagtacctgggcgggcttgtgcccatcctcaaagggcggcgcatcagcaagctgcggccagagttcgtcatcatggacccgcggacagatagcaaaccagatgaaatctatgggaacagcttgatttctactgtgatcgacagctgcaactgctcagactccagtgccactgagctgagtgatgactgggctgccaaaaaaactcccaaaatctccagagctgtattcgnccgctgtgggnggcttncttcaggcggtactaa

SEQ ID NO: 111853 - DNA, 370 bp, Homo sapiens
aatacaacccttcatttaatcaacagatggacgtgctctgttgtggattttttctgagtcttgcacctctaagagctgtgttggctggcacaaatgcagcctcagatggcagaggtgcattggcattccaaaagagcgggaaggagcccatgtacttgcccctccaaactcaattccacaggtgacttttgatgcctttggccaactaggcactcacattccctctcccgaatttccctctcctttctgcaccactaccagccccagggctcccagtggcaaggagcctagaggtggcaaagttctttccggagagtccacctgcttctctgcccctgctaggctgcagaaaggaaaccatcagcaccac

SEQ ID NO: 111854 - DNA, 398 bp, Homo sapiens
cattccagccactcggggctgacagcggcgacccgttccaaagtaaaaaggggtttggggcgccgtttagtggaaaagacccatttgtcccctcctctgcagctaaaccttctaaggcctctgcctcgggctttgcagacttcacctcttttggcaatgaggagcagcagctggcgtgggccaagcgggagagcgagaaggcggaacaggagaggctggcgcggctgcggcggcaggagcaggaggacctggaactggccatcgcgctcagcaaggctgacatgcctgccgcctaggcgagggccgtgtgtaggcgggacagggcacgggcgggctccagagagggggcagtgcagatgtctatatatacacacacacaccgtcgccaccgctgtatt

SEQ ID NO: 111855 - DNA, 403 bp, Homo sapiens
  misc_feature (1)...(403): n = a,t,c or g
ccagactctactcagaagatgagctgccggcagagttcaaactgtatctcccagttcagaacaaggcaaagcaatanctggaattgtgactcgagggatagacccctggatgtgactcttctttttaaaaggaaactatgtggaggacgatgcaaaaacatatttatcttagtttgctctgctgtagttctgttatttatacttggtgttgcttgtcatggacaccggtgaacatgccgtaactctgtgactgcattgtaagtgcagtgggggtaagcagtcctgtgagtggcgcatgaacgctggagcttattccgccgcctgccccagtgtggggggacatacctttaccatgaacttacagaattaaagatggcccataaggaattccagaccatgtatt

SEQ ID NO: 111856 - DNA, 403 bp, Homo sapiens
  misc_feature (1)...(403): n = a,t,c or g
ccgattcgggaggccccctggtgtgtctgaacgatggccgcatgactntggtgggcatcatcagctggggcctgggctgtggacagaaggatgtcccgggtgtgtacaccaaggttaccaactacctagactggattcgtgacaacatgcgaccgtgaccaggaacacccgactcctcaaaagcaaatgagatcccgcctcttcttcttcagaagacactgcaaaggcgcagtgcttctctacagacttctccagacccaccacaccgcagaagcgggacgagaccctacaggagagggaagagtgcattttcccagatacttcccattttggaagttttcaggccttggtctgatttcaggatactctgtcagatgggaagacatgaatgcacacatgtatt

SEQ ID NO: 111857 - DNA, 482 bp, Homo sapiens
agttaccccagatccagaaagatggctgccaatgcgagaacgttcttactaccggggaagaaagaagggtaaaaagaaggatcagattggaaaagggacccagggagcaactgcaggagcttcatctgaagtggatgccagtaaaactgtgagcagcccacccacctccccaagacctggcagtgctgcaacagtatctgcctctacaagtaacatcatacccccaagacaccagaaacctgcaggggctccagcaacaaaaaagaaacagcaacagaaaaagaagaaaggtggaaaaggtggctggtgatgagaatattcttgttgcaggggctccagcaacaaaaaagaaacagcaacagaaaaagaagaaaggtggaaaaggtggctggtgatgagaatattcttgttgcaggctgtttttaaactagtgtcagtgacactaggaatataattaaggttaccccagcaagaagcaaaaa

SEQ ID NO: 111858 - DNA, 449 bp, Homo sapiens
gtggctgcacagtgaacgtccccactctggacggcaggacgatacccgtcgtattcaaagatgttatcaggcctggcatgcggcgaaaagttcctggagaaggcctccccctccccaaaacacccgagaaacgtggggacctcattattgagtttgaagtgatcttccccgaaaggattccccagacatcaagaaccgtacttgagcaggttcttccaatatagctatctgagctccccaaggactgaccagggacctttccagagctcaaggatttctggacctttctaccagttgtggaccatgagagggtgggagggcccagggagggctttcgtactgctgaatgttttccagtgctcagacctttagactcattgtaagttgccactgccaacatgagaccaaagtgtgtgactagtcaatgaagtgcgacagcattaaagact

SEQ ID NO: 111859 - DNA, 451 bp, Homo sapiens
ttggataataagaagtactactgtgataccaagaaacttaactaccgttttccaaacatttaaaggagctaggagacatgattttaaaaaaggaatcaatagatgctttgaagaaaataaaacttatacagttgattgaaaacaattacaatgttgaaaacacaccaggagaaaacataagcaagaaactgggaggccaactggcaagatatgaagggaaattccagatccagtcttccatgcttgatgatggtgtccagaaaagaaaaaacctgtttggagttgcacttgtatttcagtttatgtaagtagccgaacttatggacagaatatgaactgtcccatacctctgccacacctagatgatatcaaaaagatttaaacaaaagttgtaccacatgccacacatgtattgcggccgctctggaggatccttgcatcgtacgcatca

SEQ ID NO: 111860 - DNA, 641 bp, Homo sapiens
cgcttcatagtgcatcagagaatccacaatggggagaaaccctatgaatgccaggaatgtgggaagacattcagtcaaaagatcactctggttcagcatcagcgagttcacactggggagaaaccttatgagtgtaaggagtgcgggaaagccttcagatggaatgcaagtttcatccagcatcagaagtggcatactaggaagaaactcatcaatggaacagggctatccgcagttaagccctactgtccctgggccatcctctctcctctgcctcccccaacatacctgctctgccctaagcccacccagggcctcccttatcttcttcacatgcagtggtacttcctccctctgtgcctttcttcctgctgcttccctcatctgaaaaggccaacccttcacctgtccaaatagcacatttttttcaggatctcgcttttcctgggaagtcatcccttcagagcccgaatcctttgtctcactccctgtaagccccgtcacgttctcaaaatcctttgcacctcaagttagggattccactggtctcctgattgtgtctattgatattcctctggtcttgtcttgtataagttgttactgttttcctaacttcattttaaattctcacgcaataagaa

SEQ ID NO: 111861 - DNA, 394 bp, Homo sapiens
tcaggcgtgcaagctggcccagtccaatggttggggagtcatggtgtttcatcgatcggggaagactcaagataccttcttcgctcacctggttgtggggctgtgcactgggcagatcaagagtggtgcccctggccgatctgagcgcctggccaagtacaaccagctcctcataattgaagaggagctgggcagcaaggataagttttccggcaggagcttcagaaacccattggccaagtaagctgtgggcaggcaagcccttcggtcacgtgttggctacacagacccctcccctcgtgtcagctcaggcagcttgaggcccctgaccagcacatgcaggggtccctggtagttagcgacccaccgccgtggagttcgtaccgcgtgtatt

SEQ ID NO: 111862 - DNA, 380 bp, Homo sapiens
  misc_feature (1)...(380): n = a,t,c or g
ngccaacctgagactgaaggccaaggaatatagtttacagaggaaccaggtgccaacagtcaactgaggaaaaaaaataattaaacaggcctaagaagaaatcaaaaaccataagacacctatcctgctctgttatttcttcatctgctggggggaaaaagtaaattacaaacaaacaaacaaagcagaactaaaatattgggaccatggcagagaaaagcaggagaggagcaaaatgaaaattagttaacaaatgttcctcctccctctgggataccaccaccacttgtttctgtgtgtgtttattttgtttttctttcattcatgctttgcttaatgtactccaggcttcttcagctaggttcagcccaccctgtatt

SEQ ID NO: 111863 - DNA, 540 bp, Homo sapiens
  misc_feature (1)...(540): n = a,t,c or g
ggaacctgaagctcaatccctggggaattccnaaaaaaagggcnaagcccccaantgcgcaaaccaanccctggctcccaatgaacttaagctgcaacccctgacaacaaaatgtgtgtgtgtgtgtgcaatgccgtgcgtgtgtgcaatgtgcgtgtgtgccgtgtgtgtgtgtgtgtgtgcgcattttccccaggggacctctcctccttcctgtgaggcaaagtggcctgcaggggcccctgcagagcatacagggaggtgcttccttccctctgcccagcgagcaaagggtggagccttggcgcccccagcaaccccttccaagggtggagccttggcacccccagcccccaccccgcaagggaaaaggggaagctgcacgaggagcaagatttcatttccccagagggcacagcttgggcagattcccatcattctaggggctgtgccccacatctatttctgccaaacaagaagcagacggagggggctcaggggggcgggcctcacaggaacggaagcaccaccccacctctt

SEQ ID NO: 111864 - DNA, 276 bp, Homo sapiens
taaagttaaaactcactatctgtcgagttcctaattctttttccaccttacaactattctccaaaacaatgcatttgtagtcacccagaattgcttgaatttctgggttataaaatgtgtgaatactccccatcccaatttcttgaatttaagaatgccacttctggccaagcgcggtgctcatgcctgtgatcccaacactttcggaggtggaggcaggtggatcacgaggtcagtagatcgagaccatcctggccaacataatgaaaccccatg

SEQ ID NO: 111865 - DNA, 395 bp, Homo sapiens
cgcgagagccggatcttgaggcaagagtgggaaggatgctatgagaaggtggcaagactgcagaaggtggagacagaaatccagcgcgtctcggaggcatatgagaacctcgtgaagtcatcctccaaaagagaggccctagagaaagccatgagaaacaagctagagggcgagattcggaggatgcatgatttcaacagggatctgagagagcgtctagagactgccaacaagcagcttgcagagaaggaatatgaggggtcagaggacaccagaaaaaccatctcgcagctctttgcaaaaaataaagaaagccagcgtgagaaggagaagctggaagcggagctggccactgcccgttcaaacaatgaggaccaaagacgacaccctgtatt

SEQ ID NO: 111866 - DNA, 815 bp, Homo sapiens
ggccagtatgaatttcccaacccagaatggtcagaagtatcagaggaagtgaagatgctcattcggaatctgctgaaaacagagcccacccagagaatgaccatcaccgagtttatgaaccacccttggatcatgcaatcaacaaaggtccctcaaaccccactgcacaccagccgggtcctgaaggaggacaaggagcggtgggaggatgtcaaggaggagatgaccagtgccttggccacaatgcgcgttgactacgagcagatcaagataaaaaagattgaagatgcatccaaccctctgctgctgaagaggcggaagaaagctcgggccctggaggctgcggctctggcccactgagccaccgcgccctcctgcccacgggaggacaagcaataactctctacaggaatatattttttaaacgaagagacagaactgtccacatctgcctcctctcctcctcagctgcatggagcctggaactgcatcagtgactgaattctgccttggttctggccaccccagagtgggagaggctgggaggttgggaggctgtggagagaagtgagcaaggtgctcttgaacctgtgctcattttgcaattttatcagtaatttgacttagagtttttacggaaacctcttttgttgtccttgccccactcctctccaccagacgccttcctctctggatactgcaaaggcttgtggtttgttagagggtatttgtggaaactgtcatagggattgtccctgtgttgtcccatctgccctccctgtttctccacaacagcctgaggttgtccccgctgg

SEQ ID NO: 111867 - DNA, 375 bp, Homo sapiens
ggttcgtgtcgttgcgcgccaagcatttcttgatccgccgcctggagatcgaggcggagaaccattactggctgagcatgccctacatgacccgggagcaggagcgcggtcacgccgcggtgcgcaggagggaggccttcgaggccataaaggcgggcaccacttccaagttccccccgcatagattcattgcggaccggctcgaccatctcaatgtcaccaagaaatggtcctaatcctgagtcgccacccttggattttatggatcacggagctgaccatctttacctggtcctggaactgaaaaactgtagcttgtgtgaaaatgagcctttggaccagcctttattaaaacaaacaaacatgagtagtctg

SEQ ID NO: 111868 - DNA, 402 bp, Homo sapiens
gaacccatcagcgtcagcagcgagcaggtgttgaaattccgtaaccttaacttcaatgggcagggtgaacccgaagaactgatggtggacaactggcgcccagctcagccagtgaagaacaggcaaatcaaagcttccttcaaataagatggtcccatagtctgtatccaaataatgaatcttcgggtgtttccctttagttaagcacagatctaccttggtgatttggaccctggttgctttgtgtctagttttctagacccttcatctcttacttgatagacttactaataaaatgtgaagactagcccaattgtcatgcttgacacaactgctgtggctggttggtgctttgtttatggtagtagtttttctgtaccacagaatataggataatgtatt

SEQ ID NO: 111869 - DNA, 404 bp, Homo sapiens
ggttggcaaagcagtggaacatatttttgagacagaggaaggttccaaaaatgaatggagggggatggtcttagctcaggcacctgtcatgaacacatggttttacattacctatgagaaagatcctgtattatatatgtaccagctcttagatgattataaagatggtgacctccgcatccttcaagattccaatgattctcctctggcagagagggagccaggagaagtcatagacagcctggtaggcaaacaggtggaatacgccaaagacgatggctccaagagaactggcatggtcattcatcaggtagaagcaaaaccctctgtgtacttcatcaaatttgatgatgatttccatatctatgtctacgatttggtaaaaacatcttagaggtatgtat

SEQ ID NO: 111870 - DNA, 396 bp, Homo sapiens
cccaatctcgtccatctagacttaagtgatagtgtcatgctaaagaatgtctgctttcaggaatttttccagctcaactacctccaacacatatcactcagtcggtgctatgatataatacctgaaactttacttgaacttggagaaattcccacgctaaaaccactacaagtttttggaatcgtgccagatggtacccttcagctgttaaaggaagcccttcctcatctacagattaattgctcccatttcaccaccattgccaggccatctattggcaacaaaaagaaccaggagatatggggcatcaaatgccgactgccactgcaaaagcccagttgtgtatgaagtatttattgcaggatagtgtctcttctttagaacagggaatgtatt

SEQ ID NO: 111871 - DNA, 414 bp, Homo sapiens
agagcgagaggaccactcagaacagcctcaagcagaggagcaagtccgcgatcagcagcccccgcagcaggaagagtactcacccaccccggttgctcgtgacacttccattgtgtgtggaaacgtttcctctgaagaattggaacatgtgtggccccaagctcaacacaaaccagttgttcccaatatgccgttaccatcaacgcactgttgcatatgccagccgctgcgcatggttcccattttctatgccaaggtgtattagcgtacggccctctgcccacctaccagagagatagtagggtcacatgcatccaacttcaccacttggctgattgagattggttctgctcttttcatcatttctttccagaactactctttctcaccccaacaccacggccaccctgtatt

SEQ ID NO: 111872 - DNA, 246 bp, Homo sapiens
atccaggccactacatactttctacagaagccagtcccaggttttgaggagcttaaggatgagacatcggcagagcctgcaaccgactagaggacctgggtcccggcagctctttgctcacccatctccccagtcagacaaggtttatacgtttcaatacatactgcattctgtgctacacaagccttagcctcagtggagctgtggttctcttggtactttcttgtcaaacaaaaccaatgcatc

SEQ ID NO: 111873 - DNA, 498 bp, Homo sapiens
ccgaggaagacgtggagagtgtccgccgctgcctggctcacagcctcttcatgagcaccgccgagcttcagccagatggcacttatgccaccacggacaccccccagccagtggccatccacccgtcgtctgtcctcttccactgcaagccggcctgcgtcgtgtacactgagctgctctacaccaccaagtgctacatgcgggacctctgcgtcatagatgcacagtggctgtacgaggctgcccctgagtactttaggaggaagctgagaaccgccagaaactgagccgccccaggatgccgccagaatcactggtccctgggagcttggactacagttgtccttacagcaggcttccaggttggcgcttagagaagccttggaatcagctgaaggtgcctgacttccaggagcgtgaaagcatctttgctcaactcctgggactgaaccatatagacatggacatatcatttgtacctggaaacctcaatgtata

SEQ ID NO: 111874 - DNA, 501 bp, Homo sapiens
  misc_feature (1)...(501): n = a,t,c or g
naggaggaagagctcagatagaaaaggagggagctcctctcagcttgcaagcagtgacagtgcgcagggctctgatatgtctctcacagcttgtaaagtgtgacacacctcccttgtgtgggcatgagaggcaacatttgttcctgcccttcccattgtgacttgaagaaccctgactttgtttctgcaaaggcacatgcatgtgtctgtgttcttgtaggcataatgtgagtagttggggagcccacaccgctcccatgtccaccatgaccctctccccacgctgacctgtgctccctccccaatcatctttcctgttccagagaggtggggctgaggtgtctccatctctgcctcaacttcatggtgcactgagctgtaactttttccttccctattaaaattagaacctgagtataaatttactttctcaaattcttgccatgagaggttgatgagttaattaaaggagaagattcctacaatctgagagacatgtat

SEQ ID NO: 111875 - DNA, 1273 bp, Homo sapiens
  misc_feature (1)...(1273): n = a,t,c or g
gcggacattcagactgagcgtgcctaccaaaagcagccgaccatctttcaaaacaagaagagggttctgctgggagaaactggcaaggagaagctcccgcggtactacaagaacatcggtctgggcttcaagacacccaaggaggtgcggggaacctcagaagaaagaaggggaacctggcgttcctgcacgtgtgcccacgacgagttgccctgcctgcatctaagtggcttctggggctgctgggaattgtagttgcttccctgaggccacgcccctggctcttttaaggaaccgcccgcccaaggctcactcctttatctttcctatcctttcaggctattgaggagcacctacattgacgagaaatgccccttcactggtaatgtgtccattcgagggcggatcctctctggtaagtgcgggagttactggtgtctggggcctgaaatactgaaagaagggtcttggggcccagactcctgggtcctgggtgagaggggtggttaggaatgcaaacttgtaggtccaggtacattggcagatgatgtttgttttcacgatggtcttcagatgcccacgtgggcactgctgagaaagccacttggtaaaactgatgccggaaatggggctttttgggatccctgctcagctgcttctgagtcccagcatgccctgggttacctatggccctctttcccatgggacctgacctatgatcggcccccgctcctaggcgtggtgacccaagatgaagatgcagagggaccatttgtcatccgccggagacttatctgcacttacatcccgcaaggtacaaccgcgttcggagaaagcgcccacaagaacatgtcttgtacaccctgtcccccctgcttcaggggacgtccagatcggtagaacatcgtcacaagtggggcgagtgccggcctctgcagccaagacagtgcgcttcaacgtgctccaaggtcaccaaaggctgccggcaccaagaagcagttccagaaagttcttgaggctgggacatcggcccgcttccccacaatgaaaataaagttattttctcattcccaggccnnnnnnnnnnnnnnnggggggcccgttttaaaggatccttggggggcccaaattttacccgggggggcaagaatatatttctgcccctatgggggggcgaattataagctccttgggaacctttggaagggaacttttttttgggggggggacctttgggcccaacccccccctccgaatttaacgtctttagggg

SEQ ID NO: 111876 - DNA, 501 bp, Homo sapiens
actttacctgtcttctgagtacgaagcagctccaggaagctttggggtttttactgaggatgttcccacctgcaagacatgtgggaagaccttctcatgctcttacacactacggcgacatgccacggtgcacacacgtgagcgaccctatgagtgccgctactgcctgcggagctacacgcagtcaggggacctctaccgccacatccgcaaggctcacaatgaggacctggccaaacgcagcaaaccagatccagaagtgggaccccttctaggggtgcagcctctccctggctccccaacagcagacagacagagcagcagtggtggagggccacctaaagattttgtattggccccaaaaactaacatctaagggagcatgagctgatgctaggctgctcttaccatccttagatggcagctcagaaggttggtggcaccttatcacccctgctgggtgacaagaataaaggctctgcccaggctgaaagttcaaaa

SEQ ID NO: 111877 - DNA, 379 bp, Homo sapiens
caatgatctaataggctgcataattggacgccaagggaccaaaatcaatgaaattcgacagatgtctggagctcagatcaaaatcgccaacgccacggaagggtcctcagagcgtcagatcaccatcacggggaccccggccaacatcagccttgcccagtatctcatcaacgccaggctgacgtccgaggtcaccgggatgggcacgctgtaatcctacccagcacccttcccccgcgtcacccacctgccagagcctaaggcccccggctctcgcactctgtacagcccaccttccctgcctcacagataccaatagagaggttttcttaattaacaaaaggacgtatgccatggagaaacacacccgcgcatgtat

SEQ ID NO: 111878 - DNA, 410 bp, Homo sapiens
atcgacctaatggctgatgaaatcgggctgtgggctgtgtatgcaactaaccagaatgcaggcaatattgtcatcagccaacttaaccaagataccttggaggtgatgaagagctggagcactggctaccccaagagaagtgcaggggaatctttcatgatctgtgggacactgtatgtcaccaactcccacttaactggagccaaggtgtattattcctattccaccaaaccctccacatatgagtacacagacattcccttccataaccaatactttcacatatccatgcttgactacaatgcaagagatcgagctctctatgcctggaacaatggccaccaggtgctgttcaatgtcacccttttccatatcatcaagacagaggatgacacataggcaaatgtatt

SEQ ID NO: 111879 - DNA, 388 bp, Homo sapiens
ggccagtatggttcagtaccacaagtgtcttgtggcctctgcagctcgagacaaggcctggggtgcccaggcccgtgcccgcctgcggctcaagcgaaccagctccatggattccccaggaggtcacatgcccctccccctgctcaaagtacgggttgacggtgcaggggcaacccctcgaaagcggggtgtcttctctcatcgtcatgcatttcggctgaaaccctttttgctccatatgccctaacattatcctggaaaggctgaggaagtaggctatgggtccatgcctaactatgaaccgttatattcctcaaggcctatagcctgtcgctccttggagccttctctgccagtcccttcgatccttgtccacagtgtatgtatt

SEQ ID NO: 111880 - DNA, 469 bp, Homo sapiens
  misc_feature (1)...(469): n = a,t,c or g
cttacatcttcaccattctcaacaccctccagggcgtcttcatcctattgtttggttgcctcatggacaggaagatacaagaagctttgcgcaaacgcttctgccgcgcccaagcccccagctccaccatctccctggccacaaatgaaggctgcatcttggaacacagcaaaggaggaagcgacactgccaggtgagaactaggctttctcaggggcagcgtaagcagggtggattgaggacggtgtggcaaagggcctcctggcaaagtgctggagagaagcctcctctttctatacccagcccacaccaaagggtaggaaacaggtttttctagggtagccattgctagatggctgggagacggtggaaccgtcagagagcagaaaacatagccccttatcttaaattccaagaaagcaagaagtttcaccaccacctgtattagnccggtgggtataccgaggac

SEQ ID NO: 111881 - DNA, 385 bp, Homo sapiens
aggccgggagcaggtggtgcaagacagacctgtaggtggaagaggtttcgggggagccggagaactgggccagacccctcaggtgcaggctgccctgtcagtgagccaggaaaatccagagatggagggccctgagcgagaccagctggtcatccccgacggacaggaggaggagcaggaagctgccggggaagggagaaaccagcagaacctgagaggagaagatgactccaacatggatgaaaatgaagcagaatatgagacaggcaagcaagcagccctggcagggaatgacagaaacatagatgtttttaatgttgaagatcagaaaagaggctccataaatttactagatcagcgtgaaaagcggattcatacctgtatt

SEQ ID NO: 111882 - DNA, 416 bp, Homo sapiens
atgtaacaaatgtcctcgctatgattcttattggtggaaggatgaacatgacattctcaggcttgtcaacaaccaaggtcccatttacgttgcccatccgttttaagcgtatgttacagcaaggaatcgagctactcacattagatgcatcctgggtgagttctgcatcctggtacttcctcaatgtatatgggcatcggagcatttactctctgattgtgggtcaagataatgccgctgaccaatcacgaatgatgcaggagcagatgacgggagcatccatggccatgtccgcagctacaaacaaagctttcaagacagagtgggaagctttggagctgacggatcgccagtgggcagtagatgatgtcgaagaagagttaaagggcaaagacctccacttcgaaggctgtatt

SEQ ID NO: 111883 - DNA, 580 bp, Homo sapiens
aattacgtgggtgaatgcatccgaactgtcccctacacggacccagatcatgccaggaaaaggcctgtctgtggaagcggcgacctggggctgatctcaccacgggcgtcttcaaggagcctgtgtctgtgctgcagaccctcccatcattgtctgccccgccttctgtcggaggtggatgtgttctagaatcagcttgaatgtgatgttaccgttcacagtggaaggcagaggaaattggccctgttcctagaaatgtgctttatcagagaagtgtgtgttttcttaagggattctttataaaactcacttcagtttcctttctttccatattctgatgtgagaccatttaaataaaatgttcattttgctcatttgcctttataatagaaataacctctttctacttcacgagattttaaaaatgccacatgtgcattggaacaagttaagcagtgtggtgctggaagtgttaagattccctccccaccacctctcccttcaaccctgtaatctaagccaactgtttgaaaattgtgcttccttgtgctttttagttttggttaattgaaaagaaaat

SEQ ID NO: 111884 - DNA, 399 bp, Homo sapiens
gtgccgtgcgtgtgaaggagtacgggtatacgcggctgcacatcctcaacgggacccacatccacatccagcaggtgtcggacgaccaggatgggaagatcgtagatgatgtctgggtggtgagacccctgtttggccggaggatgtacctctagggatggcggcagctctcctccagaagcctaggttttgccgccttggctgctgtgaccagaaactgcccaggcctgggtggggagttgggtgggccctgactcccctgccctccagaggccccatgtagggtacatgcagccctatggagctggggcagccgttccctcctggagaggtgggagtcctggctggctgtggagggagggcaggtgtgcgggcacagagtgacacacggcatgtatt

SEQ ID NO: 111885 - DNA, 427 bp, Homo sapiens
  misc_feature (1)...(427): n = a,t,c or g
aatacaaggctgggaatgggtcaacaaccgaatttcagtttaccggcgtatttggacgtggacatggtcagccacctcagtaaaactggtgagggttattttgcattgaataaacttataagcagaaaaaacaaaaataaaaaaaaatttcccagaggtnnnnnnnnnnntttcatcctgnnnnnnnnnnnnnnnnnnnnnnnnnnnnnnnnnnnnnnnnnnnnnnnnnnnnnnnnnnnnnnnnnnnnnnnnnnnnnnnnnnnnnccctttaacnnnnnnnnnnnnntaacttgggagggggggggcccccggaaatccccattactcagaaggctggggaaggaaaatccgttcacccccgcagggaagagtttgcaccacgcacaaaataaccccgttttactttcacctgggggacaaaaacag

SEQ ID NO: 111886 - DNA, 401 bp, Homo sapiens
tacccactttgtgcggtacaggcctttggcatcggtctttctagctttgacagtaagctggcgtgtgaatgagagaacagtcaggcagggagcccttctccccacagagctttcaggagcagacagtggcctccccttcccctccctgccccaggacttaaagagcaatagtttgccccttttggaatgatctctgaatatataaaacgcacacacaaagagcaatagtttgccccttttggaacgacccctgaatatataaaacacacacacgaagagcaatagtttgccccttatggaacgaccccgaaaattaagtattaaaacacacacgaagaacaatagtttgccccttttggaacgacccctgtattgcggccggtgggttgcttaacggacga

SEQ ID NO: 111887 - DNA, 414 bp, Homo sapiens
ctctccacatccacttattgggcgacgagtcagcgtgcatcgcgtacatccgcatacgccagtacgtgaacgctggcggcatcccacgcaccgcccagtcggaggagacccgtgtctggcaccgccgggacgacaaatggcagatcgtccacttccacagatgtggggcgcccaccgtcctgccccactgagggaccaggctggggtcgatgcgttgctgtgccgcagagatccactctgtccgtggagtggagctgctggttctcccaggtggattttgctggaattctcccatgtcatcaccccaccaccgtcacttgtgtacctgcatcaagataacttgcttgctcacaaaagtcatcgcaacttcagagcgagcggccacatctccccacctctcaccccctatgtatt

SEQ ID NO: 111888 - DNA, 426 bp, Homo sapiens
aatacatgttgcctgaaaatcaaaaataatataaaagcaattataaaaataactacaaaaataaaaaaattagcccacgttccagttcaaacttggaaagagtagtctccagattctctctttggaggctagttttcattttttggagggttcaaaactttaataggagtggttttagccacactaaaaagtttcctaatactcccttgtctgttacctctcattgttagaagtattcaatcaactatagaggcaatagtagctagaaaaatcaacactcagctaatagctctgcgtaaatatcaacctttgtgttaaaaaaaacaaaacttgtctcttcaggcaaaactaagtaatagtaatgctttctattaaacttctttcataaaaatcatcaaacgggggaaactgaggcaaaaatttaaa

SEQ ID NO: 111889 - DNA, 432 bp, Homo sapiens
ggattcgaaagccatgtgatgcggggtagcaagtccgagacgcgcaccgtagtaattcaccgcagccacctgatgggcgacgagtcagatggcatcgcatacatccgcatcccgcaatgcctggacgctgacggcatcccacgcaccgcccagtcggaggagagccgtgtctggcaccgccgggacggcaaatggcagatcgtccacttccacagatctggggcgccctccgtcctgccccactgagggaccaggctggggtcgctgcgatgctgtgccgcagagatccactctgtccgtggagtggagctgctggttctcccaggtggattatgttggaattctcccatgtcatcacccccccaccgtcacttctgtacctgcgtcaagaaaacaagcttgatcacaaaagtcatcgcaacttcaggcgaa

SEQ ID NO: 111890 - DNA, 412 bp, Homo sapiens
agcagctgggcggcggtggcggctactggccggtagtggtgctgtttgtcatcgggctcttcgcagcggaagctttcatcctctacaagttcaaaaggaaacggccaggcaggaccgtgtacgcccaaatgcacaacgagaaggagcaggagatgaccagccctgtgagtcacagtgaggacgtccagggcgctgtccagggcaaccactcaggcgtggtcctgagcatcaactcccgagagatgcacagctacctggtgagctgatgccaccccagcatctgtcttttcacccacggagggcacagaaccaccagcaaagccggcggctggactggcgcccctcagagacctgcggaaagccccctccctgagtcgtcaccacaccaggcgacaggcaccacccgtgtatt

SEQ ID NO: 111891 - DNA, 415 bp, Homo sapiens
cgcagaaaatgaggaaggggcttcagagccttcacctggaggcatcaagtggggacacctctttggctcccgaaaagcccagcgggaggcccggcccacaaataggctcccctcggactggatgagcctggacaagtccatgttccaactagtggcgcagacagtgggttcccgccgggagccagagcccaaggagagcctgcaggagccacactccccagccctgccctccagtcctccgtgtgaggtgcaggcactgtgccaccacctggccaccggccctggacagctgagcttccacaaaggagacatcctacgagtgctggggcgagctggaggagactggctgcgctgcagccgtggccccgactctggcctggtgcccctggcctacgtgacattgaccccatgtatt

SEQ ID NO: 111892 - DNA, 733 bp, Homo sapiens
  misc_feature (1)...(733): n = a,t,c or g
gaggcgctttgaaccactgaggnctntctggaccagcgtggtggaattcgctgtccccatcagctgctgagtttccagaatttttttgttgttgttcacagcccagattcacctcttcctttccgttcctgtctagagaggagtgggagggagagtacccctgcaggagaaggcctgcaaggccagccgccacgaggggcgggtgggtccacgagctcaggggcttttcactttgccagcttgtttcagtcccgatggagcccggctcctgaccacggaccagaagagcgagatccgagtttactctgcttcccagtgggactgccccctgggcctgatcccgcaccctcaccgtcacttccagcacctcacacccatcaaggtgagtggcggtgggaaggagctcgcagaaggaggctgtgatcatgaggccggagcaggtctgcccacagtggggaagggctgatgtggtaagcctgccaccccagatcgctcctggcccgagcacagagcatctcttacccattggctctctctcttccttttatcccacttctgccatcccatatggttgagttttctgtctcgctgataagatatttttctgagttttttcagcccagctctgatctcactgtgagaattttctaagatcctgaccctatgtcctgtcttctcagcttcagttacctgtgtacagttgacccacaaaccttcatttttgaattccgcc

SEQ ID NO: 111893 - DNA, 395 bp, Homo sapiens
gagagtatggggtcaggtggtcggacaaacaggcaacctgtacatagtctccagcagctatggcctgctgtgcagttagccgcattctacctggtcccccttcattacaggttggccgttgtccaatgtgttgatgttatctggaactcctacctgtcctggaaggcacatcggctataagcctgcctcactccatcgtttccaccttgcagtgatgcagcttgaccctggaacggtcagacaacctcctcaaagtgggcataccagtttccacggggttgggttgccggtcagagcttaagaggactagcaccctgcaatgcccctcttcactctaaaatgtacactgactgctttagagcccttgataatagtcttattcccaccactgtagt

SEQ ID NO: 111894 - DNA, 463 bp, Homo sapiens
cgcctggtgtccgagtcccagcagtaccaggacgccacggccgacgaacaaggggagttcgaggaggaggagggcgaggacgaggcgtagatgccaccgcgagacgggttagggaaagcggaggaggaaagcgagggggtggggggcttcccgggacgataacctggcagtggaaggaaagaagcatggtctactttaggtgtgcgctgggtctctggtgctcttcactgttgcctgtcacttttttttcctttcttgtaatagtgatgacatcaatgtaacatttgagatatttgtgaattactgttgtaatggataaaatcacataatcgtttgtgtcggaatggtgtcctatcgttctcttcctttttctctttattaacgatttaaatgtaactttctgaacactttgtagtgcgctcgctatagagcatccaagcgtacgtgcgcgtgcataatagat

SEQ ID NO: 111895 - DNA, 452 bp, Homo sapiens
cctaacgcgtctggcattggttggtggggttgcacccattccatgcttcgtaggggaaaattggtggggcagtcaacattcactgcctgttctgcccatcctttgtccctagtacgccccagaaggcgtccagaagatccttattgggaataaggctgatgaggagcacaaacggcaggtgggaagagagcaagggcagcaggtaagtggagggaaaaggcaagtccaccccaggtcctctgctgggcctccagggccagtcatgagcgtggggacctaggggtgtgttccccagtggcaggtcctcccacacgtccccagcaccccaaggccctgggggagtggccatcctcggaaggcttgttgtctgggtttcaggacagaagcccagagattcggggtacatccagaaacaaagacgtcataggcagcaactctcccaagtatgtatt

SEQ ID NO: 111896 - DNA, 473 bp, Homo sapiens
  misc_feature (1)...(473): n = a,t,c or g
ctctgccaccgggtttgtcagcatcggaccccgggacggcaactttttgaacatcccacagcagtctcagtcctggttcctctgataagatcgacaaaagaaacaacaaaatgagaagaagaggttcctcgaaaggggggagaagaaattttgagaatggaaaaatcccccagcccagcccagccccaccgaaaagcaaaaattacacgtcgtcagccactcagcccttctcccctccagcccggggacccccgcgggccccagaagcagcccagttctcagagagcccttggaaggggtctcggtggagctgtgcaccagcagccaagcagaaagaaacacgcgacatggactctgtcaagtagaggacagaaagcaagaaaggatgcagaactgccttcctccccctgaccccgccccggccttctggggaaggaacaaagtccccaaacaaagcgttcagnacatgtatt

SEQ ID NO: 111897 - DNA, 515 bp, Homo sapiens
  misc_feature (1)...(515): n = a,t,c or g
tgctagccatgacacgccaagctnggcacgagggatgagatgatcagggaggctgacatcgatggagatggccaggtcaattatgaagagtttgtacagatgatgactgcaaagtgaaggccccccgggcagctggcgatgcccgttctcttgatctctctcttctcgcgcgcgcactctctcttcaacactcccctgcgtaccccgggtctagcaaacaccaattgattgactgagaatctgataaagcaacaaaagatttggcccaagctgcatgattgctctttctccttcttccctgagactctctccatgcccctcatctgtttcttttgccctcgcctcttgcatccatgggttcccagagccgaggcactcctaacatggaggccctccccagatccgcttggggaggcgatgtgccctctcctccaaggccggagagggacagacgtgcgtttgtcgggtgatggccacgagggcgtgcggctcaagtacttggtgcagagaggacc

SEQ ID NO: 111898 - DNA, 442 bp, Homo sapiens
  misc_feature (1)...(442): n = a,t,c or g
gtgctgccatcttgcacgaggccgccctctcctggtggccgcgtttggcgcctgctctctcaccaggcagtgcaaccaccaagccttccagaagcacgggcgctccaccaccacctccgacatgatcgccgaggtgggggccgccttcagcaagctctttgaaacctgagcccacgcagaccagaagtaaacaggcaccttggacgggggagagcgcgtgtgtgatgggaaaatccggacccacgcgtgtgctgaaggcgcacggtgcttgccagattttcaacttgagcataaattggttgccattgagaatttaagaatctggaatattgcagctcttggttaaacttaatgcatggttggagatgttatggcgacactaaacaaaggattcctgaactttccttagctccttgggaggaaactgggaagacagaaaagn

SEQ ID NO: 111899 - DNA, 443 bp, Homo sapiens
gtgcatccatctgggacgccggcgacatggggtggattcgcgagacgcggacaactcctttgttgttaggcgaggagcagccggagactggcgagagcgagccaatcaggttttgaaggtcaccaaaggcaagtcctttcggcatgagaaaaccaagaagaagcggggcagctaccggggaggctcaatctctgtccaggtcaattctattaagtttgacagcgagtgacctgaggccatcttcggggaagcaagggtgatgatcggagactacttactttctccagtggacctgggaaccctcaggtctctaggtgagggtcttgatgaggacagaagtttagagtaggtcctaagactttacagtgtaacatcctctctgggccttttctgggtcctagttttggacagacttgtttttgagtgttgagtagcagggacaa

SEQ ID NO: 111900 - DNA, 425 bp, Homo sapiens
cacgcaatgcttggaagaggtcgacctcctccagatctttggcatctgcctggcccagaacctcgtgagtgacatcaaggcagtgaaagccaactggtgaggccgccagaggccatggccacatgcctggcctacgcaggcctctggggggccccccaggaccctcctactatactcctgacgggcaaggctgcaggagatgttcctgctgggactgagccttgaggggttcgcctgaaccgctgtgctgtccacccacggaggaagttgctgtgcctccgcctgggcctcttgtcccatatgcgtgtgtacacacacatgcaggcacacgtgtgcacagggagccaccgtctcggctacatttggggtggtggactctccaggggactaggaagggcgcagctcatagggggctggccaagtgg

SEQ ID NO: 111901 - DNA, 475 bp, Homo sapiens
  misc_feature (1)...(475): n = a,t,c or g
gcctgagagcntctggnaccgttnngnnnnaccggcccgacccacgcgtccgggaggccctggggtccttcatctaccatttgtgcattgggaaagacacctaccggctccggggccgggcaacgcggaggcggatcaacaagcgtggggccaagaactgcaatgccatccgccacttcgagaacaccttcgtggtggagacgctcatctgcggggtggtgtgaggccctcctcccccagaaccccctgccgaggtcctcttttcttctttccggctgctctctggccctcctccttccccctgcttagcttgtactttggacgcgtttctatagaggtgacatgtctctccattcctctccaaccctgcccacctccctgtaccagagctgtgatctctcggtggggggcccatctctgctgacctgggtgtggcggagggagaagccaagcttcaaagtggtttctgtggccc

SEQ ID NO: 111902 - DNA, 433 bp, Homo sapiens
atcttacatgtcaactggttccggaaggacaaggaaggcaaattcctctggccaggctttggagagaactccagggtgctggagtggatgttcaaccggatcgatggaaaagccagcaccaagctcacgcccataggctacatccccaaggaggatgccctgaacctgaaaggcctggggcacatcaacatgatggagcttttcagcatctccaaggaattctgggagaaggaggtggaagacatcgagaagtatctggaggatcaagacaatgccgacctcccctgtgaaatcgagagagagatccttgccttgaagcaaagaataagccacatgtaatcagggcctgagtgctttacctttaaaatcattccctttcccatccataaggggcagtaggagcaagagagggcaagtgttcccaaattgacgt

SEQ ID NO: 111903 - DNA, 346 bp, Homo sapiens
ctcaagacagccctatctttatgtatgcccctgagttcaagttcatgccaccaccgacttatactgaggagaggattgtcatctttactgttaaatttgacctaagctttctataagaagttgacttaaacggattgctaaactggtttgttctttttgatcttacctgaactgaaatagtctgtttctttctttaggcggatccctgcatcctcaacaacaatgtgcagtgagcatgtggaagaaaagaagcagctttacctacttgtttctttttgtctctctgactggacactcactttttcagagactcaacagtctctgcaatggagtgtgggtccacctt

SEQ ID NO: 111904 - DNA, 346 bp, Homo sapiens
  misc_feature (1)...(346): n = a,t,c or g
ctcaagacagccctatctttatgtatgcccctgagttcaagttcatgccaccaccgacttatactgaggtgaggattggcatctttactgttaaatttgtcctaagctttctataagaagttgacttagacggattgctaaactggcttgttctttttgttcttacctgaactgaaataatctgtttctttctttaggtggatccctgcatcctcaacaacaatgtgcagtgagcatgtggaagaaaagaagcagctttacctacttgnttctttttgtctctcttcctggacactcactttttcagagactcaacagtctctgcaatggagtgtgggtccacctt

SEQ ID NO: 111905 - DNA, 357 bp, Homo sapiens
  misc_feature (1)...(357): n = a,t,c or g
gtttttgacgtttccaacgctgaccgcctgggcttttcaaaggtggagctggtgcagatggtggtggacggagtgaaactgctcatcgagatggagcagcggctggagcagggccaggccattgacgacctcatgcctggccagaaatgaaggccgggccacacccgacaccagccctggtggttcctaacttattgcctgggcagtgccccccatgcacccctgatgttcgccgtttggcgagcccttagccttgctgtagagacttccgtcacccttggtagagtttatttttttgatgggtaagatactggtgatgctgaaataaactagggttttggcctgccnnnnnnnnnn

SEQ ID NO: 111906 - DNA, 362 bp, Homo sapiens
  misc_feature (1)...(362): n = a,t,c or g
agggggtttttgacgtttccaacgctgaccgcctgggcttttcagaggtggagctggtgcagatggtggtggacggagtgaaactgctcatcgagatggagcagcggctggagcagggccaggccattgacgacctcatgcctgcccagaaatgaaggccggcccacacccgacaccagccctggtgcttcctaacttattgcctgggcagtgccccccatgcacccctgatgtttgccgtttggcgagcccttagccttgctgtagagacttccgtcacccttggtagagtttatttttttgatgggtaagatactgctgatgctgaaataaactagggttttggcctgccnnnnnnnnnn

SEQ ID NO: 111907 - DNA, 394 bp, Homo sapiens
  misc_feature (1)...(394): n = a,t,c or g
gttgaaactagagatggacaggttatcaacgaaacttctcagcatcacgatgaccttgaataaaaattgcacacactcagtgcagcaatatattaccagcaagaataaaaaagaaatccatatcttaaagaaacagctttcaagagcctttctgcagtttttcaggagcgcaagatagatttggaataggaataagctctagttcttaacaaccgacactcctacaagatttagaaaaaagtttacaacataatctagtttacagaaaaatcttgtgctagaatactttttaaaaggtattttgaatactattaaaactgcnnnnnnnnnnccagcaagtatccaaccaacttggttctgcttcaataaatctttggaaaaactcaaaaaaaaa

SEQ ID NO: 111908 - DNA, 427 bp, Homo sapiens
  misc_feature (1)...(427): n = a,t,c or g
ngtggcctcagctctgttggaggcggcagttccaccatcaagtacaccaccacctcctcctccagcaggaagagctataagcactagagtgcgtctgctagctctcggtcccacagtcctcaggcccctctctggctgcagagccctctcctcaggttgcctgtcctctcctggcctccagtctcccctgctgtcccaggtagagctggggatgaatgcttagtgccctcacttcttcctctctctctataccatctgagcacccattgctcaccatcagatcaacctctgattttacatcatgatgtaatcaccactggagcttcactggtactaaattattaatttcttgcctccagtgttctatctctgaggctgagcattataagaaaatgacctctgctccttttcattgcagaaaattgcn

SEQ ID NO: 111909 - DNA, 412 bp, Homo sapiens
cggccatctttgccaagtgcactgggatgatcattctgggcgggggcgtggtcaagcaccacattgccaatgccaacctcatgcggaacggggccgactacgctgtttacatcaacacagcccaggagtttgatggctctgactcaggtgcccgaccagacgaggctgtctcctggggcaagatccgggtggatgcacagcccgtcaaggtctatgctgacgcctccctggtcttccccctgcttgtggctgaaacctttgcccagaagatggatgccttcatgcatgagaagaacgaggactgagcggctgcggtcccaggaaggtcttaccccctcttctatttattaatttgcagacccagcccctcccctactttttggtcagctacgtctctagaataagatggtat

SEQ ID NO: 111910 - DNA, 444 bp, Homo sapiens
tgaagcacgtgggcagccggctctacagcgtgtcctacctgctcaaggacaagggggagtacacactggtggtcaaatggggggacgagcacatcccaggcagcccctaccgcgttgtggtgccctgagtctggggcccgtgccagccggcagcccccaagcctgccccgctacccaagcagccccgccctcttcccctcaaccccggcccaggccgccctggccagccgcctgtcactgcagccgcccctgccctgtgccgtgctgcgctcacctgcctccccagccagccgctgacctctcggctttcacttgggcagagggagccatttggtggcgctgcttggcttctttggttctgggaggggcgagggatggtggtcctgtacacaaccacccactagttctcttctccatcccaaaagaaagagaggttttgcttcc

SEQ ID NO: 111911 - DNA, 443 bp, Homo sapiens
agctaacagacgccaaacgcattaactggcgaacagtgctgatgggcggcagcctctacatcgagatcccgggcggcgcgctgcccgaggggagcatggacagctttgcaggtctcctggaggtcgctgaagagcagatgcgagccgaccatgtcttcatttgcttccacaataaccgcgaggacatagccggcttgctccgaaccttcaggtttttgggctttgagactgtgagaccggggcattcccttgtgcccaagagacccgacgcttgcttcatggcctacacgtttaagagagaggctcccctagaggaggaggagtaaggccgcctcggggctgggcatccggcccctggggccaacccttgtcagccgggtgggtaggaaccgtatactcggtcatctggcctgggtttgaccgcccgttgtaatcgagcggaa

SEQ ID NO: 111912 - DNA, 407 bp, Homo sapiens
ccagaatgcacgctacaggaaaacccattcttctcccagccgggtgccccaatacttcagagcatgggctgctgcttctctagagcatatcccactccactaaggtccaagaagacgatgttggtccaaaagaacgtcacctcagagtccacttgctgtgtagctaaatcatataacagggtaagaacctcaagatccccagaagctttctaacagcccaatcagagaaatgttcatagagcccacccatggaatttaatgccaaaggtgtctaatgacccagcatctgtcgagcatttgtacaggtggggaatacatttctacccattaattaaaagagtcaattgtcttgtgggtatagactggatttattcataatgaggagaataagggtagaggtgacaagg

SEQ ID NO: 111913 - DNA, 437 bp, Homo sapiens
gcgcaaaaggtcagacaccgacatggatctaatggtggattaggtatgtggattataaaacaggaagatgacagggatcgtcatttggcgcaagatcttagcagcgaccgaaacccattatttacataaacctaccattcggtaaccatgtgaaacgatggaccaatatcaaggtgtcggatggactcagtgaaatctgtgatgttactgagatgcggactcccggggagtgacacattcgttgaaccgtggatgagacccacctgcccatgcgttacttgaattgacgctttcctaacctgaggacgccttcagacgttgcaatatgcgagatcattggtctgcttaatcaatgagaagagataaacaaacatcagaggactgtcagacatagaggactggataatacatttgcgtctttctacataatgggcatt

SEQ ID NO: 111914 - DNA, 381 bp, Homo sapiens
cggaagaacggaaggaacgatgggaacagggccaggctgattatatgggagcagattcctttgacaacatcaagaggaaacttgacacttacctccagtagaaacactgcatttttctgtgaacacatccacttcacaagccttgtttctgatacttagtatctagagctgggttgagaaaagtctgttacagttgctagaggttttcattaaaacttatcagatgagaggcttttttaggataagaggtgagaactgggcaaaagttgtgaagcagcaattctgttatatggacagcgctctgctttttaatcctatttagcttgtttcaaaaattctcacttttgttgactgccaacatacaaagtaagggaaactcag

SEQ ID NO: 111915 - DNA, 380 bp, Homo sapiens
ctgcggcttaatttgacccaacacgggaaacctcacccggcccggacacggacaggattgacagattgatagctctttctcgattccgcgggtggaggtgcatggccgatcttagttgggggagcgatttgtctggttaattccgataacgaacgagactctggcatgctaactagttacgcgacccccgagcgcccaacttggacacctgtgccttccatgaacagccagaactgcagaagaaacagttgtgctctttcgagatctacgaagttccctgggagaacagaaggaccctggcgaaatccaggtgtcaagaatcctacggatctgtgccaggccattcgcaccagccacgcaaccactcccaccccctgttg

SEQ ID NO: 111916 - DNA, 374 bp, Homo sapiens
ctgaccaaggccacctgtgccccccagcatggggccccgggtcctgggcctgctgacgccagcaaggtggtggccaagggcctggggctgagcaaggcctacgtaggccagaagagcagcttcacagtagactgcagcaaagcaggcaacaacatgctgctggtgggggttcatggcccaaggaccccctgcgaggagatcctggtgaagcacgtgggcagccggctctacagcgggtcctacctgctcaaggacaagggggagtacacactggtggtcaaatggggggacgagcacatcccaggcagcccctaccgcgttgtggtgccctgagtctggggcccgtgccaaccggcagcccccaagccttgccg

SEQ ID NO: 111917 - DNA, 407 bp, Homo sapiens
cgtgaatgaaacagaaatggatattgcaaagcattcgttattcattcgacaccctgagatgaaaacctggccttccagccataattggttctttgctaagctgaatataaccaatatctgggtcctggactactttggtggaccaaaaatcgtgacaccagaagaatattataatgtcacagctcactgaagcagactgtggcgaatttaccaacacttatgaagatacttacagaggctcatacgcacttaaaaggctttaaggttctctgcgaaacgaccccaaatattaacccggttcctggccgagccgcgcatattgctgacttcatacactgcgaacgccgaaaggagacgcccggcatctgaatcgccatattatgggcgtcttcactgctggatatgag

SEQ ID NO: 111918 - DNA, 448 bp, Homo sapiens
gctgaacctctatgaccgcctgattaacgagcctagtaatgactgggatatttactactgggccacagaagctaaaccagccccagaaatatttgaaaatgaagtcatggccctgctgagagactttgctaaaaacaaaaacaaagagcagagactgcgtgccccagatcttgagtacctctttgaaaagccacgttgagctgtgctccacggcctggcataggggttcagtctgtggatggtaactacttatgatggacgttagccttgcttccggcttcttagatgcccagctgccctaccccagaccactggtcctgcctcaagtgatggacataaccctctcctaggacatacatgtaaatgcacaatgtgactcattctcatacttttttgttcagctctgagcctcaaaagtgatttgtcagcagcgctggcatgcaggctt

SEQ ID NO: 111919 - DNA, 404 bp, Homo sapiens
aaccatccatggatgcaagatgttctcctgccccaggaaactgctgagatccacctccacagcctgtcgccggggcccagcaaatagcagcctttctggcaggtcctcccctctcttgtcagatgcccgagggaggggaagcttctgtctccagcttcccgagtaccagtgacacgtctcgccaagcaggacagtgcttgatacaggaacaacatttacaactcattccagatcccaggcccctggaggctgcctcccaacagtggggaagagtgactctccaggggtcctaggcctcaactcctcccatagatactctcttcttctcataggtgtccagcattgctggactctgaaatatcccggcggcgggggggggagacactagacagtctagaccgacg

SEQ ID NO: 111920 - DNA, 453 bp, Homo sapiens
  misc_feature (1)...(453): n = a,t,c or g
ggnngnncagcggatagcctcaggccggccatacaacccttcaatggcaaagccagatggctggggagtgaccaaaggaacagccgagctgatgcagcagaaagaagccacaactgagcagcagctgaaagagctctttgaaaaacaaaaattcaaatcacagtagcctcgatagaagctatttttgatgaatttctaggtgtttgggtcacagttcctacaaatacggaaaagggggttaaaaagcagtgctttcatgaatgccatcctacacatattattgctattacctgaacaaaatagaattacaaatagcacttgataattttaaagtatgttttagaaattttcttaggagcaaaataagtacaaagtaaatcttgaacaggttcactaagcacccaccctgtgaaaagtattatggaaatcactgcagcacaggaaaagtaattc

SEQ ID NO: 111921 - DNA, 443 bp, Homo sapiens
  misc_feature (1)...(443): n = a,t,c or g
ctcgtccagtgcggcggaattccgcanagcactcattgatacccttttggatggctatgaaacagcccgctatgggacatgtgtctttggccagaatgagtacctacgctatcaggaggccctgagtgagctggccactgcggttaaagcacgaattgggagctctcagcgacatcaccagtcagcaggcaaagacctaactcagtcccctgaggtctccccaacatccatccaggagacatacctcccctccagtcaaaagagtaaacgtgccaagcacttccttgaattgaagagctttaaggataactataacacattggagagtactctgtgacggagctgaaggactcttgccgtagattaagccagtcagttgcaatgtgcaagacaggctgcttgccgggccgccctcggaacatctggcccagccggcccagact

SEQ ID NO: 111922 - DNA, 406 bp, Homo sapiens
  misc_feature (1)...(406): n = a,t,c or g
acgtacgtctagtccagtgcggtggaattcctcatctggaggagagaaccctcatggggtgaaggcagtcaccaagggaaagaggtgtgctgtggctctgtggttcaccttggacccactttatagagaattggagcgaatacaggctgatgaagtgattgcaattctggatcaagaacagcaagggaagcatgaactgaatatcaaccctaaagatgagctataaaaatgagaaagaatgttctatcaaatatttatttaaattgttaatcttatgagaacctttttatttttgtacagagccatggtataaattaacaggttaatgtcagtcatcagatcttccttctcttcctaaggatgcttgtgttgcctcaatctatcaatctatctttcttggtttggn

SEQ ID NO: 111923 - DNA, 895 bp, Homo sapiens
cgccaagcttggcacgaggctcctcttctaccacctctggaggtacttccaccgtcctgcagatggctctgaggtcatgtatgatgcgggctccatcatgaatgctgacattctcaactactgccagaaggagtcctggtgcaaacttgccttctacctgctctccttcttctattacctgtacagtatggtttatacgttggtgagtttctaagggggaagccggccagggagcgagcccagaacggaccggacgcctgtgcacccccagccctgccccttggccgcagaggcttcagccctgggggagggagggggcactggtgcccccagcctctccaacccccaaactgctgctgcggggaaccccccccaccccgccttcagagccctcccccttggactagagcggctgggcagagctctaaacaggggcaggggctccctctgccagcctgtgggcatggcaagtcattcctggaaggggccaggacctccggccttgtccatttcgggggaaactttgggccctgccaaggggcagagcttgaccctggaaattctgggccatccccctccacccccaccctgaggcttccccctgcaggtggggggggtacccgcaccgggaatgagcaggctcagcaggggggcagccccacccctaggctgtcctcctctatcccccaggctgtttttccagccctgtctccatctgccccaacactcagcccaccttgtctcttggacctattttctatgtcgcctaggaggagccggcaccccctccccggccatttgtgacacaatatgaataagctactgcctaagcccaccttgtctcttggacctattttctatgtcgcctggaggagtcccgcaccccctccccggc

SEQ ID NO: 111924 - DNA, 402 bp, Homo sapiens
gtatacaagggcactgtcccccgcctggaccgggtcagcctggatgtggccatagtgtttgtcatctatgatgaagtggtgaagctgctcaacaaagtgtggaagacggactaagcctagagaggccgcaaggggaccgccccaggcaccgccagagtgtcctgctacctttgtctcacatgattccagtgcagtagtgccaaaaggccccttcccacgtccctcgagctctgtagcctggtctgtgcattgtggctgtcaaatccatgtgtcccccctgtggtctgtgtgtgaccccaccactgtgtcccagtgtctggcccagccatggctggatgtgcatatggcttatgaccctgtaaccacttgtccatgtgcttactgtgaaccctgtgcctgtcc

SEQ ID NO: 111925 - DNA, 482 bp, Homo sapiens
cgctcttgcatgagggcagcaggcccctagagcttggggctaagactgtaccctggcgattcgttttgaagggagaagctcttttagcactcagggggccgagcgctgcttcagatgcctcctcgcccagctaccctttggccccattgggccctcgtatgcctctccaggattgtatgtttcaagccttgacctgtgttcctttgtctgacgctctgtgtattgctctttgaatcgagtttggaggaagagttgagttgtatgaatggcggcatgttggtagtgccggacttcctgtttcaagttttctggggcctcgctaattgaatgtggaaagtagcaccacttgacggatacaagtgccgactcctgaattttcccatggtggtctgacttcaagggctggcagccagggagaatgggcccaggggaagcaaagacctctttcctttgccgtttctgtcccacttaactgacctccg

SEQ ID NO: 111926 - DNA, 1718 bp, Homo sapiens
ttttttttttttgagagggagtctcgctctattgcttaggctggaatgcagtggtgcgatcttggttcactgcaacctccacctcccgggttcaagcaattctcctgctttggcctcctgagtagctgggattacaggcacatgcaccaaccctggctaatttttctcgtatttttagtagagacagggtttcaccatgttggccaggctggtctcgaactcctgacctcaagtgatccacccacctcagcctcccaaagtgctgggattacaggtgtgagccactgcactggcctaagattttcattttaacagggaactgttagaacagaaaagaagcttcccaagaggcactcattttaaaaataaattatagcttaaattattactatgtgggattatatcaggcaaaggcagaaaccattaatgttttcctcctttcatggaaccttgtaagggctagtgttgaggtggcttacaaatgtcatataatggactgtaaatcatctgccatattgatcaatcatgtttatttaaggttttctttaacattagagatttttaatgggagtataaaatttagtaaaccaaccatttcattttttctcttcttcgtattctaagccacataaagccagtttaatcccatgacacagatttcagctgtaatttgcaaaaacaatccaagagcttaccacagtccccaaaacttacagaaaacttgccatccacaaataaactaccaaggtaaatgtaaatacagcgtggttctaattttctttcacacaatcccagacaaccccaaataactttataaataccttatgaaaaaaagcaatttaaaaacctatcaaatctatttaaaatatataaatgcagacctctcaaatttccttcaatcaggccagaaattatcacaaaaaattataatcacagttacaaacagaatgagtggaatgtttgtaagtttaggacaaccaaaaaagccccatgtaactttttaaaaatataatcattcactcaaatatactgttaaataggaatggcagtgactcaggaagcaaaaataaacttgcaagtgagatttctagaagctcatgaaaacaatgccatcccatattgcagatacaaaaggaaaaacagttctaatggggttaagagtactctggtcatcttcgttcgtttggtcgtgcaaggtgttaactattttcacttcccatatcacaaagttagtccacaggaggagctggtggatcttgtccattatgaggactggttggctttccaggtaggctggatcctcttagatttaggagggtttcagtaagaacaagatcaatgcaataaccatccaggctaccaagatcattgtaacactgatgccattatcaccagagggtcccggtaattcctgaagacactctgtgtctgtgcagtaggactgggactgccgtaacagattgatcagtcttctcattgcatgttcatgagagcaaacccattcacagggatcaaatccaccttctgccatgattacccagcttgattttacttgactgtttaaatccgcccagacaacaaccgatggggcggggaggatgggggccgggaccgaggctcggcagaaagaccgcctggagcttccagaaggctgcggctgctccggacgctgctgccactgccgtttctggccgccggcttcctccccctcctctgtt

SEQ ID NO: 111927 - DNA, 396 bp, Homo sapiens
  misc_feature (1)...(396): n = a,t,c or g
ggcttctaactacggtccaatgaagagtggaaactttggtggtagcaggaacatggggggaccatatggtggaggtaatttataaaaattgaggttattcagatttttgtgattaaaggattagccttttgtgacttaaagggaagataacatactaagtagtttgtactgtgggcagtgctccatgtacggtcttagtgaaaataaagaaattttgcataaatctccacagaagtactcagcaagcagttatgacatcaaattgggattagggatgttggaggtgggggtgttccccnccttatttttttgagatgcgtcgtgatcaaatatttacctttcgcatccctattcgtggggggcaaaacatgggatgtagggtgtttctaagagcac

SEQ ID NO: 111928 - DNA, 425 bp, Homo sapiens
cgctcattacgcctagattggcacgaggctggaagacggtgtttgacccccaccggccatttgcaatagacatggctggatttgccgtcaacctgcggctcattctgcagcgaagccaggcctacttcaagctgcgaggtgtgaagggaggctaccaggaaagcagcctccttcgagaacttgtcaccctcaacgacctggagcccaaggcagccaactgcaccaagatcctggtgtggcacacacggacagagaagccagtgctggtgaatgagggcaagaagggcttcactgacccctcggtggagatctgagcctcaggatgcaggagcctcctcctcagaccctgttcttggccttccatcctctccccacggctgatggtccctccaaggccgactcctaaggaatcaccatcaccctcg

SEQ ID NO: 111929 - DNA, 456 bp, Homo sapiens
  misc_feature (1)...(456): n = a,t,c or g
gaggaaccttccgccatgcttggcacgagggattcatctgacacagagacccaaactgaaggagtctccactgctataaatatacctgctctacaaagcaaagttcagttgaacagtacagaaacacagaccatgagttctgggtttgaaaccctggggagcttgttcttcaccagcaacgaaactcagacagcaatggatgactttcttctggctgatctggcctggaacacgatggagtctcagttcagctctgtagaaacccacacttctgcggaaccacacacagtctccaacttctaaaactaacggcggagaccatgcgtgaaatggcatctaccatttcctctggattaaaactacggactggggacaacagtattaattccactgaacgtggctgatgaagcagnagcttaacttctttgcgaacgtttgccttttgcacttagaccc

SEQ ID NO: 111930 - DNA, 456 bp, Homo sapiens
gtctggtaagaggaccgcgcgggatggacgagaggaagttcaccgaggccgagagcattatgtatgacctgggatctgagaaccagcagtgcgggggggccacaggcgaggagggcgtgttcgaggaggagagcggaggaggaggtggcctaggctgctaccatcgcttcccacctgtcccctcgaggcttctgacctttgatccgctagccccccatctctgaaccctagagccccgctttccctccaaggctgactcccccctgaccctaacaatacctttggagctcgctttacctctggctacttcatctccgaccctggctcccctttgagccctaatttatctttaacccccttgagctcttccaaccttgacattcccaggaggagccccgcttcaccccttctcactctggaaaccgcacctttaactttgcagaccttccttcaccg

SEQ ID NO: 111931 - DNA, 443 bp, Homo sapiens
cgtgatctcattacgccaagcttggcacgaggcaagagaccatgaaagcagtcaggggagggctcaggtcgtcaggcgtggaggacagggggcctggctcaggcatccggggcccacgtggctgggaggccaccattgggtgggtgtcagctattatggccgtggcaggctagggactctcactgaacgcctcctcccaacaccaacctctcaggcttgggagaactgcccccactgtgccgctggagtcagcgctcccacaggcattcgggggaggccagggctgaaggggaccccagggcccacctccaccttttgcaaggcgaggcaagggtctggaatgctcccaggtggatgtggttgggcgacagcctggggtctgtctcataagctcaggtttggaaaataagaccatccactatctgttagccccgagcagcctt

SEQ ID NO: 111932 - DNA, 448 bp, Homo sapiens
tcgtcatgattaccgatctcctgtccggcgagactgggaaaacaaaacctcctgttctggctggctgtccaagatcttaataaacaacccctacaggatgcggccaagagggtagaagaaatctggcaagagtttctggctccaggggctccaagggcaaacaaactggattctcacagctatgagataaccagtcgaaatggcaaagatggagggagatatacatttgaagacgcccaggagcacatctacaagctgatgaagagcgacagctatgcccgcttcctccggccaaaagcttaccaggatttgctggcggccatcaaaaaggaaaaagggctggcgggcaagcgcctcacgggcctgatgcagtcctcctgaccgttcctaccgcaggtccacgggctgagcccgcggaccccacaggctggcgggggcgctccacatt

SEQ ID NO: 111933 - DNA, 451 bp, Homo sapiens
tgatatgcttacgccattcttggcacgagggccggggcaaaaaccattgctatggctcactaccttatggttctgtctgccaactgggcctatgtgaaagacgcctggcggatgcagaaggatgaagacatcaagtcgaaggaagagcaagagcttcatgacatccactctactcgctccaaagagcggctcaatgcatacacataaatgcatcttcctgttctttctaccatttgaatgcataggggtttaactaagggccatccaaccatccaacctttaaaaaacaaaacgaaagcgcttctcatcaatgatatgtaaggggacttatgaatcacctgagtacaattctttgttggttaccacttaaatttcccaattgattaaattgatggatatcacatcttttctacaagctcctatccaacctttatttggaaattcctcaaag

SEQ ID NO: 111934 - DNA, 418 bp, Homo sapiens
gggtgacccccaggaagtactggagatgaggaacaagattctagaactaaaccgactagatgtgaaggcagcggggcctcagtcccagctcctggcgagcgtcattgccgagaagagccgaagcccggttgagcagaggctgcccctgactggcggggaaacgtgtttgccttcggggtcttctgtgcctggggctgggttgcaggacccctgagtcctcatacccaccttcccctgtgatcttgggtgccggtgctcttgctgcagaatggaggccaacctcacaggggtgctgtgaggaccagggtggaccatgcctgacggcccctgggggcactgggctggagaacaacaggccatcctgtctgtaggagtgatgcgtccggctttcgtacctcctgccatggaaccccacttc

SEQ ID NO: 111935 - DNA, 499 bp, Homo sapiens
actgatacggagcactggccgcggactgggaaacagggcgtatatactatttattcctgcggcgacggctggggaggaaattacggtggccaacaaatggaccccggcggctgggtgcccacccgagccgcccggctggaaccctaactcttcatccgggaagggctcaggaggaaacgcgggctcctatatccccagctacacatcgtgggacccttcagcgcaccaagaagctatgcagcaaccccaacttatgtgagggtgcccgcccgtctccttcttgtctccccggcccaggtccctcccgcctccaggtccatccatcccgtccggaaaagaaggacccagagggaagaaggaacagtggaggcgggacgcctccatctcctcgggccccgcgaggccggcccagcaacttcccggatccgcgctctagcctgaaccctggcctgggccgagcagtggcagcagagagtggcctcggagggaagccactgcg

SEQ ID NO: 111936 - DNA, 438 bp, Homo sapiens
tagtatgacatgatacgccaagcttgcacgaggctacagctttctaggggagaccttcagggacaagctgaggctgtacattgagcagaaaacaaatttgccggccctgaaccgcttctgtcacgctgccctgaaggccgtcattccagacagcaccgagcagtcggatgtgaggttcagcagtgccgtgtagacagccttggccgcatagcccagccagggtgtgactcagggagctgcacacacctgggtggacacaaggcacggccacgtcatgtctctaaactgcggtcagatgtggcttctggctcctcggggcctcgcgagggtcacgcttgcctggtcaccctggggctgcttaggaaacctcacgactggtcaccttgcactcctcacacagaattgctacaatcccaaagcgctcgccccgcaagtcca

SEQ ID NO: 111937 - DNA, 578 bp, Homo sapiens
  misc_feature (1)...(578): n = a,t,c or g
aaactcaagccccaaaatcctgcactgcctgaatcccctttgggggcctccagctggcctcaaacctttgcaagtcctaacaggattgaaaggtccagtgggaaaatgtgaaacagaaaaattaagcaggaaagtcccatcctatccctgctaacccctacctctggacacacggaatgcctcagtgcaagtgggaataggctcccaggaagcccatggaggtagatgctgcacagtgaacagtgaacctggctttatcatggcctttccattaggtcactggcacactgtgctccaaggagccccaggctgtaataagtcacacttgagagttcatggaagcgtctgagaaccatgtatttgagatggaagttcacttgaaataataaattaatgcagataaaaaaatattgggggaattaaagggccaggcaccattgctcacgcctgtaatcccagcactttgggacgccaaggcgggtggatcatggggtcaggagaccgagaccattctggctaacacggtgaaaccccgtctctactaaaaatacaaaaaaantagccgggncgcnacgagg

SEQ ID NO: 111938 - DNA, 436 bp, Homo sapiens
agttatgaccatgcttacgccatgcttggcacggaggaacatggtggagaaggaggtgatctgccaggtgctgcacctggggactgtgaccgactttaagcaaaccgtcaacaaaggctattggttttcagttccgctattgctaagcattgtttccctggtaattcttctcgtcctaatctcaatcttactgtactggaaacgtcaccggaatcaggaccgagagccctaaataagtcacacagcaccctgaaagtgattccctggtctacttgaatttgacacaagagaaaagcaggaggaaaaggggccattctccaaaggacctgaaagagcaaaagaggtgggagcgaaagccttaaggatcccacgactttttactgccatctgagctactcagtgtttgaatcccaagaggaagtcagtttacctctca

SEQ ID NO: 111939 - DNA, 435 bp, Homo sapiens
acatcggtatgacctgactacgcctttttggccgaggcgctgccaaagaacatcaccaagaaaatgatcgacaaactgtataattacagctcagaccgaaaacagtttaacttgatcccagccaaaaccatgtctgtcagtgtggacgcactcacaatccacaaccacctgtggcagcccaagcggcctgcagtgccaaagaaggcccagactcgtaaatgaccccggtgcagctggcgtccaaagggtgacccagactcgtaaatgatgcccttgtggctggcatccagagggtgccacggggcccttatttattgttttcatctatttgggtacgaagtgtgcaaagccacagaccttttgcaaagaggtttctagacagcagaagaatacccctctctcagcgctcatctcacgcaaaagatgctcaggcgg

SEQ ID NO: 111940 - DNA, 440 bp, Homo sapiens
gatagcgaccgcttgacctgatacgcctgcttggacgaggcctatgaaaactaccgcaggaacaagagctactccttcatcgcccgcatgaaggccagggacgagtgtaagtaggcgcccatgccgggagccgcgccggtggccagcggtgccggctgtgggaccttcctggctgactggcagaggaagattgcagtgacagctcagttcttacaccgtctccacttgtggagagccacaggaagagaaggaagaccagcgcatgcccagtgggaacgccgtgctccatggcgtggagggcacgggtgccacccacaaaccacaccaggaggcgctgcagccaccagggccccaggctcgttttcctttatagcgaagcaaaaaacacaagaccctccgcccgagtaaattcttcagccacgaagggatggatgtgcatg

SEQ ID NO: 111941 - DNA, 471 bp, Homo sapiens
agtagcgctcggtccatgcttaccgcattcttgtgccgaggcccaggcctacaagttgagatgcttttcttttcaacaatgtggaatatgctttttaccaagaagcttttttggttttccttttaaggtattacttcgaaaaagcaagcgatgagtttgcctgtggagcggtgtttgaggagatctgggaggatgaaacggtgctcccgatgtatgaaggccggattctgggcaaagtggagcggatcgattgatccctggggtctggctttggtgaactgttggagcccgaagctcttgtgaactgtcttggctgtgagcaactgcgacataacattttgaaggaaaattaaaccaatgaagaagacaaagtctaatgaagaatcggccagcgggccttcgggagggcggggggagggtgattttcatgattcatgagctgggtactgactgagataagaaacgcctgaa

SEQ ID NO: 111942 - DNA, 306 bp, Homo sapiens
cgcacgatgtgaaacggacatgttgaaaattaagtctgaattccagagaaagcacggcaagcccctgtactattatatccagcaagacactaagggcgactaccacaaagcgctgctgtacctgtgtggcggagatgactgaagaccgacacggcctgatcgtccagaaatggcgctcaccatgcttccagctaacaggtctagaacaccagcttgcgaataacagtccccggggccatccctgtgagggtgacgttaacactaccccccacctcattctagttgcctaagcattgcctggccttc

SEQ ID NO: 111943 - DNA, 416 bp, Homo sapiens
atggtatgactggatcttgaggaacatggacgcgtctggtgatttgatagtttaccttcggaccaatcctgagacttgttaccagaggttaaagaagagaggctgggaagaggagaaggtcattccgctggaatacctggaagcaattcaccatctccatgaggagtgggtcattaaaggcagacttttccccatggcaacccctgatctggtgattgacgctgaccaccacatggagaggatgttagaactctttgaacaaaatcgggatcgaatattaactccagagaatcggaagcattgcccataagaggcaaaaggtctatggctcatgtctgaaaaaagcctgctgctgccaagttatctattgggagcaatctggaaaaacttgccccaggaagggcttttggcactcg

SEQ ID NO: 111944 - DNA, 423 bp, Homo sapiens
  misc_feature (1)...(423): n = a,t,c or g
gcaggaggggcctgagatggtagctccaggagctggtctagaggcttctggggacccagaggctttgggctcctggtcctggtcagcgtttggtccctggctggaatggggaggggaggttgacccccagggtggagggatggacgcctgcagggtccagctggaaagctctgtgccccctcctggagcccccggaacggttgttggtgtttttgacaccccacttggttcaccctcatactcacggctgatcctgatcccctggtcataatgaacccatggtggccccccaaccctttttaacaagactgtcacttccaaaacaactattgccttggccataaatgccagacactacacttaggtctctaacgggagctattatatctcacgaacactattgcattggagcaaaagagttcn

SEQ ID NO: 111945 - DNA, 436 bp, Homo sapiens
ggaggtcaaaaagaagggcttcgggtctgggatataagcacagtctcttcagtaaatgaagcatttggaagacgagagaggcttgttcttgggagtgcaagaaattcatctattactggcccttttggcagcaggagctcagatacacccatggagtcttaatgaagatcatctaatttcctgcttaccttaactgggaattctaaaaagttggcctaaaaatgttccatgcgtggcagcaaccatgcggagcgactgagacacaattcatttccgactgacattcctttctgcaactgcggaggcaccacaaatatccggtctttgcgcttgctcttcagatggatggcccgtccggcctgaggtgaccttcttggatgagagcaagtttgagggattattgaaagaactgctatacttcccctaaccgctcacg

SEQ ID NO: 111946 - DNA, 464 bp, Homo sapiens
gtttgagatgcattacgccaagcttggtacgaggggaggcagcctggtggtgggggacttcgagatcgcagccaagtacgtgtgtcggaccctggagacacagccgcaaagcacccccttctcatgcatggacctcacctacgtcagactgctactccaggagttcggatttcccaggagcaaagggctgaagctcactcggaaaactgacaatgctgaaaccagctgggctctgggggccatttttcattacatcgactccctgaacagacagaagagtccagcctcatagcggccgatccatccctgtccccgtcagaagtgtctgtgtgtgtgcataaaccctcctgttgtggacgtgatttcatcctgaggagcggcaaaacatgtcgggctggcactttatgcagactggatctgggagttgctatgccctgggctggccttggatgagacgttacagg

SEQ ID NO: 111947 - DNA, 403 bp, Homo sapiens
ggcgatttccgacgagcttctacctccgcattgtaccctctgaggtggagccttttttatcctgtcccaagattcaggccctgtgctttggagtcctgggagtcctcttcatggccgtcagtctaggctttatgtttgccaactgggccacaggccatagccgcatgtctggacactgatcaggccctgctggcccaagtccctgtgcgcatgcacatgtaggggtcagggccgctccctagggtccctcctgcccaacatgtggaggtggctggttcccatgaacgcggctgtcagaggcggaggacaccagaagctgtatactggtacactttccttatccccagggatgccacaggcatttgtttgcacaattgttgggggccatggccaagttacctgt

SEQ ID NO: 111948 - DNA, 339 bp, Homo sapiens
aacgcagagtctcactcactctgtgacccaggctggagtgcagtggcgtgatctcagctcactgcaacctctgccttctgggttcaagcagttagcttgcctcagcctcctgagtagctgggactacaggtgccaaccactatgcacagctaatttttgtatttttagtagagatggggtttcaccatgttggccgggctggtctcaaactcctgacctcaagtgatctaaagtgctgggattacaggcgtgagccactgcgcccggccttctttcccttttacaagtacagaacaagtggacttcaaaagtccaaagcatttgattaaaaaaaaaaaa

SEQ ID NO: 111949 - DNA, 426 bp, Homo sapiens
gcagaatcgtacacgaggcggcgggtgcctcgctctacggtgcctctggccccttccagcgcgccgcgctgcctgtggcgcccgtgggactctacacggcccatgtgggctacagcatgtaccacctgacatagagggtcccaggtcgcccacctgtgggccagccgattcctccagccctggtgctgtacccccgacgtgctcccctgctcggcaccgccagccgccttccctttaaccctcacactgctccagtttcacctctttgctccctgagttcactctccgaagtctgatccctgccaaaaagtggctggaagagtcccttaatactcttctagcatttagatctacactctcgagttaaagatggggaaactgagggcagagagggttacagatttatcttagagttcccagcggaaa

SEQ ID NO: 111950 - DNA, 455 bp, Homo sapiens
ccgagaatacttggtctacatgctacagggcttgggcattcacacgggtgtgaatctccagaagcttttggaagctggaaactttatctgtcaagccctgaacagaaaaactagctccaaagtggctcaggctacctgtaaactctgagccccttgcccacctgaagccctggggatgatgtggaaataggggcacacacagatgattcatggatggggacatggaaatgagaataggttaaatggtgcaggtacctcatagccagctctacacagaggtctctcctggcagaaagcaggcgaagggcaggaggagctgcttggcagaaggacctcctgcccagacctgaggagtgagaggctttgagggctgaaatctccctttgttacggaccctggcccaggagttgaatgcctgaggacgtgtgggaaccccgttccctacttagcatgat

SEQ ID NO: 111951 - DNA, 451 bp, Homo sapiens
  misc_feature (1)...(451): n = a,t,c or g
ccacgagacataaggtcttgaatgtctcctttgcctttgagctcatgcaagatggagggttggaaaagccaaaaccgcggccagaagacatagtcaactgtgacctgaaatctacactacgagtgttgtacaacctcttcaccaagtaccgtaacgtggagtgaggggctgccctgggcccaccactgcccaagagttcttgctgttggcgtactggaccctcctccgaactgccttaccctgcttattcctgtctcttgcactgtgctctcccacaagtccagctgcaacccagagatagtggaaactgaaattaggaaggaaatcatcaataactcagtgggctgacccatccctcccaggcgctggggaccaacctagcaatgaaggttgggaaggttgttcccttcccggtgccaggtccagatttccctccatgatttgngaacca

SEQ ID NO: 111952 - DNA, 1080 bp, Homo sapiens
atgggattggcctgcgttgtttgtaggcaaatgatggtggcatctggcaatcaattagtagaatgtcaggagtgccataatctctaccaccgagattgtcataaaccccaggtgacagacaaggaagcgaatgaccctcgcctggtgtggtattgtgcccgatgtaccagacaaatgaaaagaatggctcaaaaaactcagaaaccaccgcagaaaccagccctttgcagttgtttctgtaactccagctgtcaaagatccatttggttaagaaaccagaaactaaagtgaaacaagagacaagttttctagcgtttaagagaacagaagtcaagacatccacagttatttcaggaaattcttctagtgccagcgtttcctcgtcagtaactagtggcttaactggatgggcagcttttgcagccaaaacttcctctgctggtccttcaacagcaaaattgagttcaacaacacaaaacaatactggggaaaccttgctacttcgtcagctaaccaggaaacctgtggggtttgactgggtctgggcaacattcatcccaaaggtgggaattaggttcccaaaataggttcccaattaacaggcacttacggcccactgttaccttttaaaaccaccttccacctcttaaccttgggtaaaaactgggctttagtcggttcagtttagttgtggacaatggtcagccaaagtggggtctcccctagtcccaagtagtttggtccccccggaagcagcagcccaacctaagtggggaatgggaaatagtgggaacattcagggaccttagtgggaagtacctacccagcaaaacgtacttcagaatcccagcagctctccctcagcatcccttaaaggcccaacttcacaagaatcacagctcaatgctatgaagcgattacagatggtcaagaagaaagctgcccaaaagaaactcaagaagtaatgtggccaagtaggtttttgtatcatattagcctaaagatgaaaggcttattattatgatataatctgtaatacactgtaatttaataaaagtcttcataatcaaaaaaaaaaaa

SEQ ID NO: 111953 - DNA, 424 bp, Homo sapiens
cacgcgggaagatgaagatgataaaacagttttggatcttgctgtggttttgtttgaaacagcaacgcttcggtcagggtatcttttaccagacactaaagcatatggagatagaatagaaagaatgcttcgcctcagtttgaacattgaccctgatgcaaaggtggaagaagagcctgaagaagaacctgaagagacagcagaagacacaacagaagacacagagcaagacgaagatgaagaaatggatgtgggaacagatgaagaagaagaaacagcaaaggaatctacagctgaaaaagatgaattgtaaattatactctcaccatttggatcctgtgtggagagggaatgtgaaatttacatcatttctttttgggagagacttgttttggatgccccctaatccccttctcccctgcac

SEQ ID NO: 111954 - DNA, 420 bp, Homo sapiens
tcccgagcttgatggacggtaaagccggtggcaaggatgtgtctgcacaggccacaggcaagaacgttttttgcctgcaagaggcgctgcacttggccacttgcttcgcccagctgcgcctcggggatgtaaagaactgattggggaaggaggaggctcccactgtattcatccgtccagccaagagctctttttctgctacaagaacatttgaatcttgggacctttaaagagcccctcctaacccagcagtaactggaacacacttgggagcagccctatgtctcagtgccccttaaatttctgtcctgagccctccacgtcagtgccatcggtctataaccactaaccccgcattgctgttgatcggcacgctcgcatctatagataacggctctccagacctgagctttccgcgtc

SEQ ID NO: 111955 - DNA, 427 bp, Homo sapiens
gacctcattaattcggacgagcagcgggcggcgctgctgctactcttgggactgctgggcttcctggccctccttgccctcatgtctcgcctaagccgggccgcagatgacagcgatcccaacctggacccactcatgaaccctcacatccgcgtgggcccctcctgagcccccttgcttgtggctaggccagcctaagatgtgggttctgtggaggagaggcggggtaatggagaggctgagggcacctcttcactgcccctctccctcatgcctacgacactaagaccccagacccatagcctagtccaccagagtggctgctggccaggcctggagtccccgtgggtcaagcattcgtcatgacttgctatcctcccggagctgcagcctacgacccctcggcccatgaaggagctggcaggtg

SEQ ID NO: 111956 - DNA, 423 bp, Homo sapiens
tctgcagcaattcggcacgagaactatgcaaccagcatggggtctcgggaacagcttgcgattgcagagtttgcaagatcacttcttgttattcccaatacactagcagttaatgctgcccaggactccacagatctggttgcaaaattaagagcttttcataatgaggcccaggttaacccagaacgtaaaaatctaaaatggattggtcttgatttgagcaatggtaaacctcgagacaacaaacaagcaggggtgtttgaaccaaccatagttaaagttaagagtttgaaatttgcaacagaagctgcaatcaccattcttcgaattgatgatcttattaaattacatccagaaagtaaagatgataaacatggaagttatgaagatgctgttcactctggagcccttaatgattgatct

SEQ ID NO: 111957 - DNA, 417 bp, Homo sapiens
  misc_feature (1)...(417): n = a,t,c or g
aattcggcacgagggtgcgctcccggctgctgcttttggacacagtgacaatgcaggtgacagccagaagtttggaggagctgccagtagacatcatcttggcatctgtgggataagaggccagcctgcataggacctcatacccttccccaacactacctggaagttgtgccttcctcatgaaactggcagaaaccccttcccaagcttctgtattgaagaacaattaggaatcattgcagattattttttattatgctgccacctcccacccgggactacttgctggtgactannnnnnnnnnnnnnnnaaaaaaggggagaatgtaatcttgaccgaaaatttagggcccccccttcttgtgaggggaccaccgttaatgaaaaaaacatcctaagcacctcctatatcattcg

SEQ ID NO: 111958 - DNA, 954 bp, Homo sapiens
catgacatgcctacgccaagcttggcacgagggtcctaacgcgggaaacgtgcaccctgactaattcggttttctgtggctacgagagcaggcttggcgggcggaggcgccagcggatgtttcatgcaaggatcgtctctgtggctaagcctcactttccgctccgcccgggtgctctttagagcccggtttttcgagtggcagtctccagggctgccgaatacagcagcgatggagaacggcaccgggccctacggagaagaacgtccacgtgaagtccaggagacgacagtcaccgagggggctgccaaaatcgcctttcccagtgccaacgacggtcttttataacccggtgcaggaattcaatcgggacctgacatgtgctgtgattaccgaatttggtcgccatttagggtggggccaaaggaatccagatcaaggttccaggagagaaggacacgcaaaaagtggtcgtggacttgtcagagcaagaggaggaaaaggttgtaactgaaagagagtgaaaacctggcctcaggagaccaacctcgcacagcggccgtgggggagatctgtgaggaaggcctgcatgtgctggaaggcctggcagcgtcgggcctacgttccattcgatttgccctagaggtgcctgggctcagatctgtggttgcaaacgaatgcctccacccgggctgtggatctcatacgccggaatgtccagctcaatgacgtggcccacctggtacagccgagccaagcagatgcccggtatgctgatgtaccagcaccagagggtgtcggagaggtttgacgtcatcgatctggacccctatggcagcccagccacctttcttgatgcaactgtgcatgctgtgatagaggaaggtttctgtgtgttactggacagacatggcggtgttgccgggaacagcggggaaagttgctaacacaagt

SEQ ID NO: 111959 - DNA, 426 bp, Homo sapiens
gtgctttagctgggggtgtcaatatcccccactcagcccggctgggggataaggtttcaggccccggccaggaaacagtcacaagaccccagccagacccgtggactcatggttgacccccgcaacaagcatatgttaagaggtacccccagtgggccgacggggctgctggtcccatcggggggatggtctccaaatcagattacaagggtccagtaggggctggcccccaccccatctcataaaatccccctgcccctgtagagccccctgggaacattgggtaggtgggggttggggaggcagatgagaggcagggaggacgaggcccccccccacaaacaaggatgtggatgtgcatgaaaaaaaaactccgtgcatagagggatgtcccgttaacaacgatgtaggttcgcccacgcagtt

SEQ ID NO: 111960 - DNA, 1572 bp, Homo sapiens
  misc_feature (1)...(1572): n = a,t,c or g
agttggatcctttagaacggccgccccnnnnnnnnnnnnnnaagagtttctagagtttttattattcaaaatgagtttcatttcaattcaggtacttgaaagaaggttctagtctgttactttgacacagcacaagatcaatagtttattctgatgaagtattccacccaaatgaaagcataacatgcaagtagtcatttatttcaatcactcctatttgaaggtccttatttttggagaacagtcaggcattttattatccactctttccattccttaaaggcttccttccacgggtttcagtaaattcccattatcctcacgactgtgttctggagttgctccaggtgtgccagaagattcatcatcaatccacctcaccagtgccatctgtcaaagaggcctgtccaaagacaaaattccacaagtctcttgggtaaagatcaatcattgttattcccacaacacagaaggcatcttcaggtttcttctttttcaagaacttcaggatgtcccctgcatgaatttgtaggttttgtgtgttctcattgactctaaaggaacaccttgttgtagaaacaggaactggttctagcagttttactctcaagcgatagaaatatgctttacagtagcccgtgagccatttaatatattcttcactgataattctggtgcttcatagagatccaatggaccgtatataaatactgcgtttgtctggagagggtatctttctgtaaggatgactgaagaactgttcaaagtcttggggggcctcagggtgggaggtgatccaatctgatggagaatgcaaggtccaaagagatcactggctggctggaatgcttcattcattaaacgctgttccccagcatctactttctcatactgtgacacaagcactggattctttgagatgacagctatttttagtgtctgttcggaataccgtactatttgcatcttgattaggaaggaaggctcccatggaagcttttatctcacaaggacagacatgtctgggcctggccagaaggaagttgtggagtgtgccttcatctttatattaacgaaggcagtgagaaaagtcaggaggcctccccttgcctcccaagcctaatctagggaagctgcgggagaagatgggcagggggcgcacaatatggtcactgtggtgggctggaggcctgggacgctgtggtcccaaaaccagaacatctcgggccaaccgggagaagttggccaccctagctggttgcctacagcaactcgcactgtgggctctggtccgtgcaggcacaacccaggctccggctgggggtggagtagggcttccccggggactctcgcttcgcctcttcttcccccaggagcctctggaaaggcctccctggctccccagaggcactccgcccccgcagtccccgcggcttccgccacgtccgtccctcctacatcctcatccctctccaccgaccgcgactggcgcccgcctctacgacccggctgccccgcccagctctgacagcacctgcgaaccgccctgacccaacaggcctcgacacgaaa

SEQ ID NO: 111961 - DNA, 998 bp, Homo sapiens
cctcccatgtgccctaggctggctcccactgtagcttttgctcccttctgctcccggcccagattccaaaggctctcccacttcagtaaacccctgcacagacccttgtctcagcccagaagctgggcagccacctcctctgatcccgctgtgccactagttgcaccacccgaccaaaccccaagccccaggcttccccaaaccccatcagcagacgaatatgcccagacacaaagcctggcctcccctcccagcttcagctgggggctcagggacttgagcgaggcccgcagtcctttgtcaaaagtctgctcccccttgcgggctgcagagaagccgaacaggctgggggagggccgaggggcggaaacagggttgggagctgccagtgcatctgctgctggccagcagagaagggacagacacctcacacaggaggggggccagcccaggcagagtcctcttgccacagctggctgtgttggagctgtagccagcagtgctgtctcttgctcggcgagaggcccaaaactaagctgtgcccctctttgcactttactcccccagaaggaccagagctggagccctgggtgtgtaggggcatctctgaaggccttggggacgggactccagtttcaatactccagggggtgaggggccggcctgggctctgccgaagggttgtccgtgctgggtgtgtggggataccgggcacggaaaacccacacctagcccttcaggggatgaaaggaagggaagggaaagcaggaacaacagcaactctcaggcacaactagcgggaaaggaggcagcccagcgggcccccacagcccctcccaagagacagctgacagtcacgacagccagcgagcacaccacgtggagcccatgcgttggcaggaggatgcagacaccttaggtgtggggtgtgtgcgttacctacaaactaacaccgttcagcacgcgacgggggcctggcagacaagttcatgtccccc

SEQ ID NO: 111962 - DNA, 525 bp, Homo sapiens
  misc_feature (1)...(525): n = a,t,c or g
gccnaggaattcggcacgagggctcacattggtaatcccaaacacttcgagagttcaagaccagcctgagccaatatagtgagacctcatctctaccaaaaaaaagtttaaaaattagctgagcatagaggtatgcatcttagtcccaccctacttgggaggctggggtgggaggatcacttgagccccaggagacaagaatttgctgtgagccaagatcattgccactgcattccagcctgggtaacacagtaagaccctttctcaaaacaaaacaaaatatcatatatgcattaatttacttgcatggtgaagtccaacatgtcaaaaatggaaatgatgagctgtattgtccctatgtctacccagtctactactttgtgttttaaggttcataagactttttgagtgctatgtgtcagtagtctatttacagagttcatccaaagaatttattgaattaaaggatggttctaatggaaatctattgtgttttgttattacatgcacacctaaaaaaaaaaa

SEQ ID NO: 111963 - DNA, 1391 bp, Homo sapiens
  misc_feature (1)...(1391): n = a,t,c or g
atattaccttgcaagcccgcgtaaactttggcccccccaaggattctttaaaagggccgccccnnnnnnnnnnnnnnnggatgtacaaaaagaagatattttattgaggaagttgcaatgtttttacatacatgcacaatgcttacacaaattcagcttcgtgataatgcactttcatggagtcaaatttgcaaaaatgcataaaatgaattaggaactttctaaacatctttatacaatttataccttcagtattaaaaatgggactgagggaggccgggcacagtgggctcacacctgttaatccctgactttgaggagggctgagtggggcggatcacttgaggttaggagttggagacctgcctgggccaacatagtgaaaccctgtctgtagtaaaaatacaaaaattaacacttgagccccggggggcggagggttgggagtgagctgaggattgtaccactggcactccagcccgggtgacaaagtgagaccctgtctcaataaaaaataaaaataaaaaaagtatgttattatttcctgttttattgtactaaaatggtactatgaagtgactctgttgtgtttttatgtttcctcaaacccccttaaaaaatataaataaagaattttaaaagaatttttaaaaattattttgtccaagaattatattttccaggattttaatcatttgggattggaattttggggattttggacttcagggattttgatctttcaggatttcatcatttgggattataacattcaagattgtgtcttttgggattatggcccaaacccatgcaatgggccagttctttgaaaggaatagtgttccataactcacgcaaggagaaatagaaaatttgaataggcctatacctgttaaactaaatcaataactaataaccttctataatagaaagcaccaggcttagatgggttcactgatgattgatcaaacatttaagaaataaatctttgacccagaaatatttccttaaaatttttttttctaagaaagaaatcataccaattctctacaatagcttccaaaaaaatagaagctaagggaacacaccctaactgactctaggagaccagcattactctaatactaaaatcagataaagacatgacaagaaagggaaaactacagtctctcataaacatagatgcaaaaatccttaacaaaatattagcaaatcaaatgcaataatgtgtaaaaagaatgatatattatgaccaagtgggatttattccaggtatgcaagactgattcaacatttgaaaatcaattaatgtaacccatcatatcaacatactaaagaggaaaaaatcatgattgtattaataggtacagaaaaagcatttgacaaaatcc

SEQ ID NO: 111964 - DNA, 392 bp, Homo sapiens
  misc_feature (1)...(392): n = a,t,c or g
aaggtctccggggttggcttttatggaatgtcatatagttggtattgcggccttttcaggttatttcacttagtagagtgcatttttctcccatgtctttccatggcttgatggtcgagttnnnnnnnnnnnnnnnnnnnnnnnnnnnnnnnnnnnnnnnnnngcttatcctttcacctgctgaaggacatcatgggtgcttccaagctttttatacacggcctctagtagaattttgaaaagtgtaactactttttatcatgaatatctctaaacataaccagcagaaaacagcaccttctattggaatggtgaaaattcaggacacggacaacaccaaaggctggcgaggttgtggagcaacaggaacgttccttcatcgctggtgggaa

SEQ ID NO: 111965 - DNA, 411 bp, Homo sapiens
  misc_feature (1)...(411): n = a,t,c or g
tcgaaaatatattgaactgaatgaaagggataataaatatgacatattaaaaactatgatgttgctaaagtcttacagcnnnnnnnnnnnnnnnnnnnntttgttatgaaagaacagtttcaactctgctatctaagctttcactgtaagaaactagaaaaagaagagcacagtaaatccaagcaaacagaaagaaggaaataataaaaagtagaaatcagtgaaattgctaacagaaaaacaatagagaaaatcatagaaaccaaagctggtccttggaaagattggtaaaactgccgaaagtgacccctaaaaagaaagagagagaacacctttacttatatcaggaatgaaagaaggaatatcactacctaccctgaggacagtgaaaggatgtgtatgctgaaaact

SEQ ID NO: 111966 - DNA, 620 bp, Homo sapiens
aaaaaaaaaaaaaatcataggaaatgtttaaaaatcctgaggcttgggtcccatgaactgagatttttatttatttgatctagcgtctagctgggccttatgacttttagaaacactccaggtgattccaaggcaccacttggccagtggaaggccatgttaattttatattgaaaaagacctagaatataaatggtttactagtcaactaattttccacaagggcaccaagaggacacaatgggaaaaggatagtctgttcaataaatggtgctgagaaaactgaatttccacatgtaaaagaacgaaattggacccttaacttataccactcacaaaaaatagactcaaaatggataaaagacctacatgtaagatctgaaaccataaaactcctagaagagaacacggggaaaaagctcctggacaattgattggccttgacaggttttttttggatattgcaccaaaggctcaggacacaaaagcaaaagcaaataaatgagagcacatcaaactaaaaagtgtctgcatagcaaaggaaataatcaacaaaatgaaacagcttatgggttgggaaaaaaatatttacaagccatatatatggtaaagggttaata

SEQ ID NO: 111967 - DNA, 430 bp, Homo sapiens
  misc_feature (1)...(430): n = a,t,c or g
ccnnnnnnnnnnnnnnnnnnnnnnnnnnnnnnnnnnnnnnnnnnnnnnnnnnnnnnnnnnnnnnnnnnnnnnnnnnnnnngtaaaataataaaaacaatggtgccatgacaactagatgtccacatgcaaaacaatgacattgcatccctgccttatgctatatacaaaaattaactagaaatggaccaaagacctacatggaaaagcgaaaactataaaactcttagaagaaaacacagggatacatcatgtgacctgagatttggtaatgggttctcagctatgacaccaaaagcaacagcagcaaaaaaaaggataaaccagacttcaccaacattaacaacttgtgcttcaaaaggcaccatcaagaatgtggaaagacaatccagagtggactctcagtggatgctgagaaggtattgcacgaaa

SEQ ID NO: 111968 - DNA, 203 bp, Homo sapiens
cccacgcgtccgacaagatggcggataaggagaagaagaaaaaggagagcatcttggacttgtccaagtacatcgacaagacgatccgggtaaagttccagggaggccgcgaaggtgaggaggctcccgctgtcggtaccccctctttaaaaatttcaaataaacccagcaacagagatgatgaggacgcatgcggaagcacc

SEQ ID NO: 111969 - DNA, 521 bp, Homo sapiens
tgcccagacaaccccgggagacagaccctggctgggcccgattgttcttctccttggtcaggggtttccttgtctttcttcgtgtctttaacccgcgtggactcttccgctcgggtttgacagatggcagctccactttaggccttgttgttgttggggactttcctgattctccccagatgtagtgaaagcaggtagatttgccttgcctggccttgcctggccttgccttttctttctttctttctttattactttctctttttcttcttcctcttcttcttcttcttcttcttcttcttcttcttcttcttcttcttcttcttcttcttcttcttcttcttcttttttttttgagacagagtcttgctttgtcgcctaggctggagtgaagtggcacgatctcggctcactacaagctccgcctcccaggttcacaccattatcctgcctcagcctcctgaatagctgggactacaggcgcccgccaccatgcctggctattcaggaggctgaggtaa

SEQ ID NO: 111970 - DNA, 487 bp, Homo sapiens
  misc_feature (1)...(487): n = a,t,c or g
catcaaaaagctaggttcnnnnnnnnnnnnnnnnnnnnnnnnnnnnnnnnnnnnnnnnnnnnnnnnnnnnnnnnnnnnnnnnnnnnnnnnnnnnnnnnnnnnnnnnnnnnnnnnnnnnnnnnnnnnnnnnnnnnnnnnnnnnnnnnnnnnnnnnnnnnnnnnnnnnnnnnnnnnnnnnnnnnnnnnnnnnnnnnnnnnnnnnnnnnnnnnnnnnnnnnnnnnnnnnnnnnnccctgttagcttaaatctggaagaattagataccccgaatagaccaatagcaagcagcaacatggaaatggtaattaagtccaggatgaggcagattcgcagcaaaattctgccagacattcgaagcattggtctcaatcctgggcaccatatttcacaagataaagaaagagggaacctttcctaaatcattatgtgcagtgagtatcaccataataccaaagcgagatgaaatcgtcgcgacatgattcgcgac

SEQ ID NO: 111971 - DNA, 741 bp, Homo sapiens
aggctgaggcaggagaatggcgtgaacccaggaggcggagttgcagtgagctgagatagcgcctctgcactccagcctgggtgacagagcaagactccgtctcaaaaaaaaaaaagataccatgttggccgggagcggtggcacacgcctgtaatcccagcactctgggagcccaaggcgggtggatcacctgaggtcaggagtttgagaccagcctggtcaacatggtgaaaccccatcactactaaaaatacaaaaaattagctgggcgtggtggcgggcacctgtagtcccggctactcaggaggctgaggcaagagaatcagttgaacctgggaggtggaggttgcagtgagctaagatcgcgccacttcactccagcctgggtgacagagcgagactccatctcgaaaaaaataaaagaacttcccgtgtccgtttttgctttttggatgctgggagtgtcacaactcagctatccaatcaaggcagagctggcctccaggatgccagagccagagctttgtggttcatctctagaggttcaacaggaccctgtggatggcccaagttcgtttctctgcacttacctcttcggggttgtcctcaaaacgttgccgtgtcagctctcacttttcacagcaactctgggcctcctaccttgggactgcgccacttctgtctccttagataacctccattccgcatagctaaattgctgcaccctccgacactggcaaa

SEQ ID NO: 111972 - DNA, 497 bp, Homo sapiens
  misc_feature (1)...(497): n = a,t,c or g
gaattcccgggtcgacgatttcgtcagagcgaaactctgtttcaaaaataataatcttggggggcaggatacctaagtcataatcccggctcttttacttaaccagccgtatgacttggaaaactcgtttcccttctctcggctccagattactcatcttgcagctgggatccagagctctcactccaggagcccagtcacagcaaaaaccaaaactgtacnnnnnnnnnnnnnnggaaaggggnnnnnnnnnnnngccccccnnnnnnnnnnnaagggagggaatttttgttaaaccccaaagagtttaaaccccccgggccaaagggaaccccccgccccaactcccccgggggggggtttttggtcccaccccccaaagggtggaaaaatttttttggggggattttggggcccttccaagttttgggccgggaaaaaaaaaggcgccataaacggccccgggccaaattttttgggggcgaagattttcaccc

SEQ ID NO: 111973 - DNA, 841 bp, Homo sapiens
gaaatctatattatagtcatataattttattatgttttgtggtaagaagtgcagcaacatattgagaacataataaaattatcctgtatttttaatgattatttattaaattcctctcattagagcctgttattaatgattgtaatgtattttctgtataattttactgcaatttattaaattctaatgacttaaattgtctgcttttcatgagtgcacacagttgaatgctgtagatatctaaagaattatttttcggccggttgtggtggctcatgcctgtattcccagcaccttgggaggccaaaggcgggtggatcacgaggtcaggagatcgagacaaccctgactaacatggtgaaaccccgtctctactaaatatacaagaaattagccgggcatagtggcaggcgcctgtatccccagctactcgggaggctgaggcaggagaatggcgtgagctcagtggacagagtttgcagtgagccgagatcgggccactgcactccagcctgggcaacagagcaagaacctgtctcaaaaaaataaaaaacaaaacctctaacatagaactatgcaaatttaaacctaggaggggatgttaaagataatttagtccatttcccaaagtgttgtctgtagacccttagttatgctgggaacaggggtagaggcagaattctatagttaagcttgagcaacttatggattaaacaaaattgagtttcattgcatgaagatttatcagagcctttagtatgctaatgtgttgtgtatcaccgagacgagcaagaatatattgtataatacatcctaaagttatttaactgctgaacctccg

SEQ ID NO: 111974 - DNA, 489 bp, Homo sapiens
tttcgtgggacagtcgccctccgtccattcctttagtgctgcgccgtcagcggtcaggatctcggctttcttgcttcgagagggactaggtgcctccaccagagcttctgtcgctctgtaacctgcactgtgacctacactagtcgcgggagccacgcagaggacgccggaacaccctggaagccgagaaatggacccagtggcctttgatgatgttgctgtgaacttcacccaggaggagtgggctttgctggatatttcccagaggaaactctacagggaagtgatgctggaaactttcaggaacctgacctctataggaaaaaggtggaaagaccagaacattgaatatgagcaccaaaaccccaggagaaacttcaggagtctcatagaagaaaaagtcaatgaaattaaagatgacagtcattgtggagaaacttttaccccagttccagatgacagactgaacttccaggagaagaaagcttt

SEQ ID NO: 111975 - DNA, 263 bp, Homo sapiens
cggattacttgagcccagcaagttgagactatggtgagctaggatgctgagacatctggctgtccacatgcaagagaatgaccctgggcccttccctcagaccacacacaaaaattaactcagaaccaatgacctaaatgtaagagtaaaccaataaacctcttaggagaaaacagagaaatctatcttcatggccttgggttaggcaaagccttctcagcacgctgactcatccaaatcttaaatgtgtcacaggacaccag

SEQ ID NO: 111976 - DNA, 433 bp, Homo sapiens
  misc_feature (1)...(433): n = a,t,c or g
atttcgtnnnnnnnnnnnnnnnnnnnnnnnnnnnnnnnnnnnnnnnnnnnnnnnnnnnnnnnnnnnnnnnnnnnnnnnnnnnnnnnnnnnnnaccacagtggtcttttgcaaatattgtctctcagtctgtgacttgttttctcattctcttgacagtatctgtttcagagcacaagttgttaattttcatggagcccaatttattaactatttcatgattgtgtctttggtgttttatctaaaaaggcaccactaagcctaaggtcctctagatttttccatatgttatcttctaggagtttcatagttttgcattttacatttgggtccacaattcattctgagtgtgtgcatttgtgtgtctatatctgtgtgcatgtctatacttgtgcatgtgtgtatctatatgtgtgtatgtctatatgggtgtat

SEQ ID NO: 111977 - DNA, 369 bp, Homo sapiens
aagcttggcacgaggctggctccgcagcgctcagccccgggcccgcggagacatgaacgccccgcggccccacgcaccccgggcgcagcggcccggccccgcggccccgtgatgggctcctgcgtgtcgcgagacctgttcacaagtgcccacaagaactgccccatgccccagggtgcggaccccttgaacccagatctgccctcgggccgcactcccaccgtggctccagactgtgtcattggcaaggacaaacagatggatttctgttgggatccttggcagaggtgcttccagaccaccaacgggtacctgtccgactccaggtcccgccccgggaactacaacgtgggaggcctgggcacctcg

SEQ ID NO: 111978 - DNA, 490 bp, Homo sapiens
  misc_feature (1)...(490): n = a,t,c or g
actgtcaaaaatgtgcctagtgatggctctggcacagatcccaaggtggcaatggcctctgctgcctcagcccctgccatgctgtccaccagcatcactgtggagaataaggtcagcccctcaagggcaacagaggggtctaggtctggacctgtggctggcggcacaggagccatggtggtgcagaccaggagctgtgtctagcaaggcttatgccctgccaagcactgccaatggagatgtgaagctgctggtggtatccagcatgcctctggtggacttcctgatgtagctggaggattatacacctatgatcctggatgctgtgacnnnnnnnnnnnnnnnnnnnnnnnnnnnnnnnnnnnnnnnnnnnnnnnnnnnnnnnnnnnnnnnnnnnnnnnnnnnnnnnnnnnnnnnnnnnnnnnnnnnnnnnnnnnnnnnnnnnnnnnnnnnnnnnnnnnnnnnnnnnnnnnnnnnnatcgtcgacccg

SEQ ID NO: 111979 - DNA, 897 bp, Homo sapiens
  misc_feature (1)...(897): n = a,t,c or g
actgcactcccagccctggcgacagagagagactcccatctcaaaacaaaacaaaaaaaattagccctacttaaaggcacaactaaatgctttattacctttcttaccactgaacaatttgaggtaaaatcattcacaaggttggcacttcagtaaatccctttaaatagtgttcctaagatatctcttaaatcctcccataggaaatagaattaacaggtaaggtacacccatacaaaaattgtgtcattgaggacaatggtgatctgtaattttagttgagtatgtttatgatttttgaagccatatggtgagtaaatgtaaatatgaaaaaagtgctacataaaacacttcttaaacttttttttttttaaaaactgctccttgtggagcaggactacccccatagggcagtgtaccccaccaataggataggccttttgttgtttgttgtttgttggaggacaaggtctgcgctgttgcccagggctaggagcgcaggggcacaatcaccacacactggccgcttcaatctccgggggcttcaagtgatccttccacgctcagcctcccatgtggctgggactataggtgcatgccaccacacccagctaattaaaaaaatttttttgtgtggagtctatgttgcccaggctggtctcttaactcctaggctcaagtgatcctcccacctcagcctcccaaagtgcttggatgacaggtgcgagccacttacacctgggcccacattttttaaagagacactgttcccactccattcacccagggctgggagttccagtggtgtgatcataggttcactgcttnctccagtttccggggttcaagccntcctnctgcctcagnctccccagtagctggaattacaggtgtgtg

SEQ ID NO: 111980 - DNA, 434 bp, Homo sapiens
  misc_feature (1)...(434): n = a,t,c or g
nnnnnnnnnnnnnnnnnnnnnnnnnnnnnnnnnnnnnnnnnnnnnnnnnnnnnnnnnnnnnnnnnnnnnnnnnnnnnnnnnnnnnnnnnnnnnnnnnnnnnnnnnnnnnnnnnnnnnnnnnnnnnnnnnnnnnnnnnnnnnnnnnnnnngggatgctttcttaaaccccatccctaacccaagccctgggacctccagcttcccttcatgggaactgctggagcctcctctgccctctgtgctttcccctacaggcagagacttggctctctcctctcccctctccaggcccttcctgctcactgccaccatttcaaggatggagctaggcactagttcagacgctgtttacccctatacggtctctccacctcttctcattctccttccttctactccacttctgccatcttggaattccaccgcactgtacg

SEQ ID NO: 111981 - DNA, 392 bp, Homo sapiens
  misc_feature (1)...(392): n = a,t,c or g
cagggtttcaccatgttggnnnnnnnnnnnnnnnnnnnnnnnnnnnnnnnnnnnnnnnnnnnnnnnnnnnnnnnnnnnnnnnnnnnnnnnnnnnnnnnnnnnnnnnnnnnnnnnnnnnnnnnncagatgtttttgaaacaacccccaccagcactggagggagtcaagggaagacaagccaggcatctgagctcctctgtctctgcctttccttctcactgtccccagggtaacccatcaccacccccatcacgaaccccatcatgaacccatcaccaatcctatcacaaatgccatctcgaacctcagcaccagcccctttgtgaaccccatcatgaactgcgtcactaacctgtctttcaagcctattgtcttgctgcnaagtctacttt

SEQ ID NO: 111982 - DNA, 740 bp, Homo sapiens
ttttttttttgagacagagtcttgctctgtctcccaggctggagtgcaatggcgtgatctcggctcactgccagctccgcttcctgggttcacgccattctcctgcctcagcctcccgagtagccaggactacaagcacccgccaccacacctggctaatttttttgtatttttattagagacagtgttttaccgtgttagccaggatggtctcgatctcctgacttcgtgatctactcacctcggcctcccaaagtgctgggattacgggcaagtttttattagagatggggtttcatcatgttggtcaggctggtcttcaactcctgacctcaggtgatccacccgcctcagcctcccaaagtgctgggattacaggcatgagccaccgcgcccggcctggaactctcagttctaacgcagggattcaggaattgggctttcagactccttctgcagtgtcacagtccagactttttttaaatgaaggacaccccgcagtggctcacagtgggtcccagggctagcaggagcgtgctgggggagccggctctgtctttgttcgcagtgggtcccggtgctggcaggagtgtgctggtgagccggctctgtctttgtaaatccttcaggggtcttacggctgactccaaccggacagcccgtcctgggccgtgttaagccccttttgtagaaatcgtatttttattacaacatcaaatctgtgttcctgtaaaaaaaaa

SEQ ID NO: 111983 - DNA, 425 bp, Homo sapiens
  misc_feature (1)...(425): n = a,t,c or g
tcaagtgcggtggaattcnnnnnnnnnnnnnnnnnnnnnnnnnnnnnnnnnnnnnnnnnnnnnnnnnnnnnnnnnnnnnnnnnnnnnnnnnnnnnnnnnnnnnnnnnnnnnnnnnnnnnnnnnnnnnnnnnnnnnnnnnnnnnnnnnnnnnnnnnnnnnnnnnnnnnnnnnnnnnnnnnnnnnnnnggactatcttgtaacatgttagagaattcacaatggaacaagatcttgtgtgttcaggaaatgtgggaaagcagaaattcccacattgcttggcaaatgaaagtcaaccagagaaaggccttttgtagcagatataagaaagcatacagtgaaggcctaacctcattaggcatcagaaaatttacactggagagaggccttaagagttcatggaatgtgctcattgtttaacatggcat

SEQ ID NO: 111984 - DNA, 448 bp, Homo sapiens
tctcaaactcttgtatttaaaattcttctatttgattctcagaatctaagccaaaaactgttagactcagacttgcagttcccaagtcagctggaaacctaggtgatgctgatgacacacaggagccgagaagtagccacagaagttgtgctgtgcttggtgactaaatgaccacactccttccactatgagagctgtctttctccgagcgcctctccacactcccttttttcctgctattcttgcctggagtgatatccagtgagcggtagctaggcggcttctcctcgggccagtgtggggagtgcgagccgcggcggtgggcccgccagctctggggctgcctctccttgtcctcttcagagctccaggaactgaggccggagggcaagggaggagagtagctgcggtgcctgcgtcgtctcccgtgcctcgaattccaccgcac

SEQ ID NO: 111985 - DNA, 447 bp, Homo sapiens
  misc_feature (1)...(447): n = a,t,c or g
gggtcctgggagctttttctgcctgggtcccaccatggtagaccaagagggaacctccacgctgaagccaggggcttcacagggaagtagcctatggcagggaaccgttgaatttgctagaaggctggctggtgtattcattggacatgttgggaaactgtgccggaccatttgctctacccgtttgtccctgtgctcttcctggtcatttcccagctcctgctgctgctggtcccttcccaccacccagatcctggctcagatgtccaggtcctccctgacccctcccctccccagctccctgctcatccctctcactttccccatcttacatcctcacatgccttcctcttccctcataccactcatcactacatagaatttgctcatcannnnnnnnnnnnnnnnnnnnnnnnnnnnnnnnnnnnnnnnnnnngaattccacga

SEQ ID NO: 111986 - DNA, 447 bp, Homo sapiens
  misc_feature (1)...(447): n = a,t,c or g
cctcgtccagtgcggtggaattcggagagggagggtgggggtgaggtgaacatccaggacacacgagaaaaggatgacctgtcttgggggctcagaaatgcagcttatccctggaagaaatgcagagaccacgtggagtcagggacatggagacctggagggaggggaggcggtgagacagggatagagacagtgagagagagaatggggcacgatggggaggcagaaacagagtcagagagagactgagagaagaaagatgagcaaaaacaagacaaagaagggcagagatcaagagatcctgagagacagagttgatgagaatgaatgtgaaagagagggagagagagaatgaatcaggctttgggcttgatctctgctcttctgctcctggatgtcnnnnnnnnnnnnnnnnnnnnnngaaaagggannnnnnnnnnnnaaccg

SEQ ID NO: 111987 - DNA, 484 bp, Homo sapiens
  misc_feature (1)...(484): n = a,t,c or g
ttcgaggagagcaaggtggtaagatacaagttcaatatacaaaaactgattgtatttctatgtactggcaataacaaaccaaacattgaaataaaaataccatttacaacagtatcaaaaacatgaactacttagggataaatctgacaaaagatatataaaacctgtatcctggnnnnnnnnnnnnnnnnnnnnnnnnnnnnnnnnnnnnnnnnnnnnnnnnnnnnnnnnnnnnnnnnnnnnnnnnnnnnnnnnnnnnnnnnnnnnnnnnnnnnnnnnnnnnnnnnnnnnnnnnnnnnnnnnnnnnnnnnnnnnnnnnnnnnnnnnnnnnnccacccatatattgaaaactataaaatattgctgacagaaattaaagaagacctaaataaatggagagtgtgataccttatttatgagttggaagactcaattttgttaaaatgacaattcttttcaaattcatgtacaaattcaacacaat

SEQ ID NO: 111988 - DNA, 453 bp, Homo sapiens
  misc_feature (1)...(453): n = a,t,c or g
gtggaatcccccggctnnncccgcgcnnnnnnnnnnnnnnnnnnnnnnnnnnnnnnnnnnnnnnnnnnnnnnnnnnnnnnnnnnnnnnnnnnnnnnnnnnnnnnnnnnnnnntatctctgtttgcaaagtgacattatcttatatatagaaaacctgaaagactctaccnnnnnnnnnnngcctgttaaaactaataaacaaattctgtaaagttgcagggtacaaaagcaccacccaaaaatcatttacttttttatacactaccaaggaatatctgaacaggaaattaaaaaaacagtcctatttacattagcacccaaaaaagtaaaatacttaggtatgaacttacccaagaaggtgaaagacttgtacactgaaaactgatgaagcaggttantgaagacacaattaaatagaaggacttatgatgttcaaggattgggaaaacttaa

SEQ ID NO: 111989 - DNA, 461 bp, Homo sapiens
  misc_feature (1)...(461): n = a,t,c or g
accggagnaccattaggacagagcggnggaattcttgggtgttatagaccaccccagacccagcttagactttttgagaacccagatggtgctggaggcttcctgtctgtctgctgactgaactaggtgaaggaggcgaggattcctgggatgcacactttaacttcttttaactcatcatttgataatcagaatccaatccagaggctcagtaaatatgagttgaatacataaataaatagaagaaaggaaaagagggagagaggcacaaagaaaagagaaatatcatacacagttggttagagtataaattgatacagccacttaagaaaaccatttggcatctactaaatgtcaatataaattgtaaaatttctnnnnnnnnnnnnngacagcccaagaattcctattttaggattataacctatagatagatttacaagttgtgttaccaaaagata

SEQ ID NO: 111990 - DNA, 384 bp, Homo sapiens
  misc_feature (1)...(384): n = a,t,c or g
nnnnnnnnnnnnnnnnnnnnnnnnnnnnnnnnnnnnnnnnnnnnnnnnnnnnnnnnnnnnnnnnnnnnnnnnnnnnnnnnnnnnnnnnnnnnnnnnnnnnnnnnnnnnnnnnnnnnnnnnnnnnnnnnnnnnnnnnnnnnnnnnnnnnnnnnnnnnnnnnnnnnnnnnacgctaataatgacaagaagatattacaactataaacacacacacacctagtaacagattatcaaaacgtatgaagcaaaactgacagaacagaacggagaacagacaacagtagttggagattcaataccccactctaaataatggatagaaccaccagacaaatggtaaggaagaaaatagaggatctgaacacaacaaatcacctagctctaa

SEQ ID NO: 111991 - DNA, 555 bp, Homo sapiens
gctgtttaagtaggagaggggatctccgggctgacacagtgccaaggggaacatcaagatgattaacaacgtccccaagcaaaaccaggccatggcgaagctgctcggggcttgtgccagccgctcttcccacccagggcgctcctgtggttcacctgtgtgaatttcatgagttttgacagcatgtacagtagtacagccactgccatattcaaggtgcacagcaagggagtcctccattgagacacagtaaaccggccgggcacggtggctcaagcctgtaatcccagcactttgggaggcttaggcgggcgggttcacgaggtcagcagattgagaccatcctggctaacacggtgaaaccccgtctctactaaaaataaaatttaaaaaaatagccgggcgtggtggcgggcgcctatttagtcccagctacttcggaggctgaggcaggagaatggcgtgaacccaggaggcggagcttgcagtgagccgagatcgcgcccctgcactccagcctgggcgacagagcgagatttcgtgtcaaaaaaaaaa

SEQ ID NO: 111992 - DNA, 1500 bp, Homo sapiens
gtggcggaattcaagagccgaccttctgagccctcaagaaagatcagaacagattcatgggtgatttagcctatctgtcccaggccagcgtggctgagtgtgctggctggaggcctctctctctgcttcgatgggtagctgagatccacgcccggaaaccggcaggattatagggtgcaagtgaggagaagctggcatctgtgtccaacctggtcactgtgtttgagaatagcaggaccccagaagcagcacccagaggccagaggctagaggacgtgcatcaccgccctgagtgcaggcctcccgagtccccaggaccacgggagaagacaaatgtcggggaggccgtggggtctgagcccaggtacagtcagcaggaggtacctgaactccctgaagaacaagctgtccagcgaagcctggaggaaatcttgccagcctgtgaccctctcaggatcggggacgcaggtgcctgagggctgaggagccagagaagaagatcgtccaggagctgctggagacagagcaggcctatgtggcgcgcctccacctgctagaccagtgagtgacctgtcgtggcggctacaggtgttttttccaggagctgctgaagacagcccgcgagcagcaaggccttcccagaggatggggtcagggtcatcttctccaacatctcctccatctatcagttccattctcagttcttcctcccagagctgcagcggcgcctggacgactggtgaggtccaccaggagcccctgaggcctcagaccacagccctggccaggtggaggtggggagaccccagggcgctaggttcagccctctatgcccaggcccttattgtgtggccatgcctccctggggctcggtctgtctgcacagtgaagggcttgggtgaatgagctctgagaggctgtgtgtgtgcagactgcttcctggggaaaggggtggatcaggtcctggccaagccaagtgaccaagtgactttgggacagtgaaaatagccagtgccaactgagggcttcctacacgcctggccttgggctttccctctattaactccctcaatcttcacatcagcctgctgtgtgatgacggcatcatggttatgcaagaaaccctcttgttttcacagatggccactaaagcatttaacagtgaagttacttgccttatatagtttggcccgaagtcctaagatgtccttttaagatctttggcaaagaaaaaaagctagtaattgttaaacctagtgatgtattgattgcttaaaacatttataataaactgttgtttttttttaagataataatagccaccatacctggcgcatgcatattttttaagagtacccactggagtctaatatatagcctgggttacctgggatgaagaataaagagagcaaactaccacaaccaatggttgagcccctgtcaagtgccagtcatgatagtagtaataataataataaacatctattgggccaaaaaaaa

SEQ ID NO: 111993 - DNA, 634 bp, Homo sapiens
tttttttgagacagggtaccgcactgtcacttaggctggagtgcagtggcatgatcacagctcactgcagcctcgaaccttctggactcaagtgatcctccttcagcctcttgagtagctgggaccacaggtgtgcacccatcatgcctgcctaaatttttaaaagtttctgttagaagacaggttctcccctatgttgccccaagctggttctcaaactcctgggttcaagagatcctcccaccttgggctttccaaagtgttgggattatgggtgtgagccggctgcactggccccgaccaccttcatttaaagggcagcacgcttcctaaggtatggaggctccatgtgtgtggcttgtgggctggtcccaatatggcttcctcagcacccttctcagccatctgctccccagggaactggtcaggtgtttggggtatataggaagcagcagctgttgacccccggtggacagcccagggggttgtacgggacctggtagaccctacctctggaaggcccctgtgtctcccgggctgcactgggcagccagcatattatcggaagggcagtgggtgggcagggatgcagggagtcggtagatcggcagctacttggaattccaccgcactg

SEQ ID NO: 111994 - DNA, 439 bp, Homo sapiens
  misc_feature (1)...(439): n = a,t,c or g
ggtgcgaattcgcgtgagccactgcgcccagccccaaggcctgtattttcttaattatcttccgttagggtgttctatccattattgagagtggggtattgaagtctgcaactattagtcatggtttgttttttacacctaaaaacaaaccatcaatatcctcatttgtacatttaggtgcataaatgttaataattgatctaatcttcttgctgtatatgactccttttttgtctcttgtaacctttttttaatttaaagacattttgtctgatatttgtaaggccatccctaatctcctttggttacaatttatgtggaatatttttttcaaannnnnnnnnnnnnnnnnnnnnnngtctttagatatagagtctcttatagatagcatataggtggattctgggtttttctaaatccattctgccaatttctatct

SEQ ID NO: 111995 - DNA, 436 bp, Homo sapiens
  misc_feature (1)...(436): n = a,t,c or g
ggaattcgtcttccaactctcatatctatttagatgcaattagagccccgcaaggaataccagatcaatttaaagcttgaaatcaaatagctacaggatttaagtcaatattttggtagatgacagtgaataaaaatgtagattagataaactacatctattacaaccaacagcaaagagcttttcatgagttnnnnnnnnnnnnnnctcatgtcggccccagccctgaggttacctgacctgactttgggaagtctgggggtcnnnnnnnnnnnnnngggcagtgggagttttaactcaaactggggggcactggccaaggccagtggcctatctttcaaaacaaaaagacagggtttccaaaggctggcccccatgtccaagggccctggcagcaatggccctgttaccacaagaagcagataagctaactctt

SEQ ID NO: 111996 - DNA, 400 bp, Homo sapiens
cccacagccaacattatcactagtggtaacagggaaaatgtcccctttgaccccaaccccaagtacagaacatgcaaggacgcctgttctcactgcatgtcttctgtgttgtactgaagctcctagctggtgcagtgaggcaagacaaagaaaggaaatataggtgcactgggaaggaagaagaaacactgcctttattctttaggtgacatgattgtgtgcttttaaaataataaaggaatcaacagaaaagttgcttaacctaatgaatgagtttatcaaagtcacaagatacaaggtcagtatacaaaaatcagttggatttctacatggtagaaacaactgtacatggaaaaatgtttaatagtgtaagatatgtacattggaaactatgaaagag

SEQ ID NO: 111997 - DNA, 469 bp, Homo sapiens
atttttgagaaagggtctcactctgtcacccaggctgaagtgcagtggtgccatcatagatagctcactgcagacccaacctcctgagctcaaacgatcctcctgcctcagtcttccgagtaactaggaccataggtgtgcaccaccacgcccggctaatttttgtatttttggtagagacagggtttcaccatgttgctcaggctggtctcgaacttctggctcaagcaatcctcccaccttgacctcccaaagtgctgggattacaggcgtgagccaccgcacccggccagcccttttaagtttgagccctttaacaggatctaaatctggtgctcaggataaaatgttgcctctggtgctttcttcccataattacagtattacagaggcattcttaatgttccctcttcaaattagaaacagtaagttgaaattgccttcaacttactgttgatggcaatttgag

SEQ ID NO: 111998 - DNA, 635 bp, Homo sapiens
ttttttttttttaggggtggaattcacttttattttttttttctgagatggagtcttgctttgtcacccaggctagagtgcagtggcacaatctcaactcactgtaacctccacctctcaggtttaagcagttctccctacctcagcctcccaagtagctgggattacatgtgcccaccaccacaccaagctaatttttgtattttttagtagagacagggttttgccatctaggccagggctgatcttgaactcctgaccttagggtgatctgcccaccttgggcaaagtgctgggcattacagggcatgaggcattcatgccctgcctgtaggttcacttttaaggtatatttttttaaaagtaaaaaatctggaaggcaggctggccacccaagtgtaggaataggataaattgtgatataatcatagaatgaaaccagacataaccatgaagagaactgaactactgctagacaggacaacgtggatgaatctcacatgcaggatgctgatccggacaccacaagaaaaaacaaaagaaggtgcctactgagttttcttctttccagatgaccaactcttaacttactcatctgtttttttcactgttccggacgcgtgggtcgagccggt

SEQ ID NO: 111999 - DNA, 332 bp, Homo sapiens
caaaaggaaactggatctatagaaatattaagcatttaaccaaagtcgcacagcataaaggtggcaaagtcaagatttgaatgcacgctgtctgacgccaaagtctgaattgtcgagatgctacggttcctctttatgaaagacagaatttttaatatctcgtgaatttaaatattaatcctgactcattacataaaaataaaactaggctgggcacagtggttcacgcctatatatcccagcactttgggaggctgaggcaggcggatcacctgaggtcacgagttcaagaccagcctggccaacatgacaaactccgtctctactaaaat

SEQ ID NO: 112000 - DNA, 424 bp, Homo sapiens
  misc_feature (1)...(424): n = a,t,c or g
atttacttattattttcttcatgtgattgttctccttaattaagaataaaatcattgaaggaaagaccttaannnnnnnnnnnnngtacccttcagggggttaaaagcaccagggccctaaaaaacattaacccgatcccccaaaaatccaagggatctttagagactattttgaccacctttttcccaccaaatgggaacccaaagggaaagggataaattccggaccagataccacttaccaaattgggcccagaacaaaatacaaaccctgaaaagaccacctttgagtaaggagattaactcggcattataaagtctcccatcaaaaaaaagtccaggccctgagggcttcactgctgaattctacggaccagttaaagaaaaactcataccagttttcaaactcatcctgtgagggcgg

SEQ ID NO: 112001 - DNA, 378 bp, Homo sapiens
  misc_feature (1)...(378): n = a,t,c or g
gaaagtcatttgttatgcaccaggtaaatgaacctggtatttttcaggtaannnnnnnnnnnnnnnnnnnnnnnnnnnnnnnnnnnnnnnnnnnnnnnnnnnnnnnnnnnnnnnnnnnnnnnnnnnnnnnnnnnnnnnncaagaagctataataggaataaaacaaataaccaaagattaccttgaaaagggattgattatcccttccaccagtcctaatagtcccatcttcctgacacaaaacctcacaggaaaggatgaagatttatacaagatttgagaactattaatactactgtgattnnnnnnnnnnnnnnnnnnnnnnnnnnnnnnnnnnnnnnnnnnnnnnnnnnnnnnnnnnnnnnnnnnnnnnnnnnn

SEQ ID NO: 112002 - DNA, 493 bp, Homo sapiens
acacataggaaatatttcacaatgcaaagaaaaacatgaaatatagcttacccatattcccaacatattgttttaattaatgttaacttttgctgcccttacactttagattttttaaattgcaggttttatgaaataatttttttataaaaggattatgccctcatgaaaaatgccttcaaccatgagactagtccccaaagttttggggactcagatcctttcagaaagaagaaactctttggaaaaccttgggcattctgcatggctgcttacaaccacccagtgaaagaacaggcctcctcttttctcagctttacctgttttttgagacagagtcttgctctgtcgcccaggcttgagtgcagtggcatgatcatagctcactgcagcctcgacttcctgggctcaaatgatcctcttacctcagcctcccaagtagctgcagttacaggaatgcaccaccgtgcccagctaattgtaaaattttttg

SEQ ID NO: 112003 - DNA, 411 bp, Homo sapiens
  misc_feature (1)...(411): n = a,t,c or g
gannnnnnnnnnnnnnnnnnnnnnnnnnnnnnnnnnnnnnnnnnnnnnnnnnnnnnnnnnnnnnnnnnnnnnnnnnnnnnnnnnnnnnnnnnnnnnnnnnnnnnnnnnnnnnnnnnnnnnnnnnnnnnnnnnnnnnnnnnnnnnnnnnnnnnnnnnnnnnnnnnnnnnnnnnnnnnnnnnnnnnnnnnnnnnnnnnnnnnnnnnnnnnnnnnnnnnagggatagtcagtacagctttaagccttattcgagctgaactctactagatgatcaaatttatgtcattgttatagcctatgcatttgtcataattttctttatagtaatactataattggaggtcttggcaactgattagtcccccgataattggcgcccctgatatagcatttctctgcataaataatatgag

SEQ ID NO: 112004 - DNA, 436 bp, Homo sapiens
  misc_feature (1)...(436): n = a,t,c or g
ctgttccctctgattgaaatactctcctctcactacccccatatccgtgtggccctcaccttctcatcaagagggtctttggcttcagggtcaacccttccctcaccttctctcaccactctatagaagcttctctccggtaccttccttcagctttcttcttggctctcaacattctctggctatattcatgtctgcgagtatgcctacgtctaattccacatccacactcacatctacctgcatttacacctgtatctatcatctacctgtctatccatttatctatttacctacgtatctgcctatctagctatgcattannnnnnnnnnnnnnnnnnnnnnnnnnnnnnnnnnacatagctatctatccatatactctctatgcatcatctatgtatctatcgatctatccggacgcgtgggtcgacccggg

SEQ ID NO: 112005 - DNA, 535 bp, Homo sapiens
cccacatttgtggtgacttgacctgtcctatggagactcctccctgccccactacccctgccaccctctcacccactgcacctcaggaggggccagcagccccgcaaggcagagcagcagtttgtcctctctcatctaaaccatgtctgtcagagttggattaaattggaacatggataagtctatgagcgggatctttgaggatcacaagtgactatacactagaattacctgcaagctctaaagagtttctgctcttggctgggcatggtggctcatgcctcgtaatcccagcactttgagaggccgaggcgggcggatcacctgaggtcaggagttcgggaccagcctggccagcatggtgacaccccatctctactaaaaatacaagaaagctgggtgtggtggtgcgcatctgtagccccagctgctcgggaggctgaggcaggagaatcgctgggactggggaggtagaggttgcagtgagctgagattgtgccatactccagcctgggcgacagagcaagactccgtc

SEQ ID NO: 112006 - DNA, 378 bp, Homo sapiens
ttacaagtactggagggcatcaagtgcaacctggcctcctaagtcctctcttcccattctctagaggtcacaaacacagttaatttctgaggtcatttgcttgatatttctttctaagcatggacagcagcataaacaatatatatttatacaactatacatcatggaccatttacttcactgtcttttatgacagcacaatatcctattgtattcattccttattaaatacattcagcatgctcccaagttttgctgttagaaaacaatgcaggtggctgggtgcagtggctcacacctgtaatcccggcactttgggaggccgaggagggtgaatcacctgaggttagtaggtcaagaccagcctgggcaccatgg

SEQ ID NO: 112007 - DNA, 458 bp, Homo sapiens
  misc_feature (1)...(458): n = a,t,c or g
tacattaaaaagctttgatgaaatggataatttcttaggtaaatactgattcgcaaaattgatagaaaatggaagtttaaacaaaccaatttctatagaagaattagagaaccctattaaggaattattcctcaaaaaagtacaggcccagattatctcatgggtaattctactaaaccttcaaatatcagatggacacaatgttgtgtaaattatttcagagcattgacaatgaaggaaaannnnnnnnnnnnnnnnnnnnnnnnnnnnnnnnnnnnnnnnnnnattaaaaaaatcaaattaagtcgttcctaaaagtttttatgaaatgtaatatttatatctaaaccttatagagatggtgcaaaaaaaatctacagactaatattatttatgaatatccatgagatttggtaccgcgcgcacgggtggctcgatcggaagttccggtccggtac

SEQ ID NO: 112008 - DNA, 466 bp, Homo sapiens
ttttttttttgtatttttagtaaagacgcggtttaaccgtgttatccaggatggtctcgatcttctgactttgtgatctgcccgcctcggcctcccaaagtgctgggatcacaggcatgagccaccacgcccagccgatcttatgtattatttaccctaatgcctagcataagcgcaaagcaggcattcaatgcatatttattggtttaagtaaatgaacaaaggcataaaaataagaacttgttttctgatagcacaaattggactagaaaaatttacattttggcaacatttagcttaatgctcctgaacacaggaaattagtagtctttaaagatttcctaaattctaagattattatatttttggcaattttattcttttcctcttgattcatctcttagtgcccttggcatgtttaatgctctggagtcttgacactgtagtctcttttttctgacatgat

SEQ ID NO: 112009 - DNA, 380 bp, Homo sapiens
  misc_feature (1)...(380): n = a,t,c or g
ttaacaccttaattaccaggattttcaaatgacagattatgaaaccaacttaataggtgtgcaagcctcattttaaaaaaacgaaatggctgggcgtggtggctcacggcctgtaatcccagcactttgggaggcagaggtgggtggatcacaaggtcaggggatcgagaccagcctgaccaacatggtgaaactccgtctctactaaaaatacaaaaattagccaggcatggtgacgaatgcctgtaatcccagctactccagaggctgaggcaagaaaattgcttgaactcaggaggcagagcttgcagttgagccgagatcatgccgctgcactctagcctgggtgacangangcganctccgtctcaaaaaaaaaa

SEQ ID NO: 112010 - DNA, 395 bp, Homo sapiens
gtggaggttgcagtgggctgacattacgcattagcactcaggcttgggcgacagagggagactctgtctcaaaaaaaagacttgagcaagggcgtaatcttcaggaaggtcagtctggtagcatagtgtggattgggttgggggatggggaaggagagcagaaaattattgaaatatccaggtgcataaaagtctactttgattatggagaactacacacttgttcagtcaccctcattggagacgggggatggcatacgaaaagaatgctgatttcaggctgggcacggtggctcatgcctttgatcccggcgctttgggaggctgaggcaggtgaatcaggggttcgagaccagcctggccaatgtggtggagccctgtctctactaaaaatc

SEQ ID NO: 112011 - DNA, 573 bp, Homo sapiens
ttttttttttttgaaactaagccttgctctgtctcccaggctggagtgctatggtgcaatttttgttcactgcaacctctgccttcccaagatcaagagattctccaagtctcagctcccaagtagctggggattacagggcatgtactaccatgcctgggctaaattttcttggtaagttttaagtaggggacatgttgggccagggctgggtgggtgagctcctggggcctcagggtgatcccaccccacctcagtgtttcccaaagtgctggatatttacagggcataatatggtgatccttttgtgtcctggttgcctttccatgttgaatgctaatttttgagggttcgtgccctgttgtagacccacagtcacacactgctgtagtcttcccccatcctcattcccagctgcctcctcctacttgcttccgtctatcaaaaagcccccttgggcccaggttccctgaggctgtgggattctgcactggtgctttggattccctgatatgttccttcaaatccactgagaattaaataaacatgcctaaagcatgacctccccacgtc

SEQ ID NO: 112012 - DNA, 405 bp, Homo sapiens
  misc_feature (1)...(405): n = a,t,c or g
naaaaatgctgttgtaaagttacccttcagaactgatgatgtgccctaaagttcttttcccaaggtaacccagcagaaacacatgcagttgtttggaactttaggtaaaaaaatgggaactttcataccctgccagtaggattaagtggatgctccccctttggaaagccatttggcaatatttatttaggctgaaaatgtgtaccccttatggttcagttgaggccccttgtaaatatatccctactaaccttttttcccatgaggatattaatttcagccttgtttgtaattgtggaaaaaaaatggggcccaccttaatgtcccctgagagnnnnnnnnnnnncagccaagttgtggtatattcacataatgaaatatagcagttaaaaaaattaccctgat

SEQ ID NO: 112013 - DNA, 1564 bp, Homo sapiens
  misc_feature (1)...(1564): n = a,t,c or g
atctgagcaaattatttcttacgtgactttagagaaaacggcgtacctatctgaggccaaaacgacttgaggaaactgtttccacggtcctgctgcagaggggaagcacagtcgtcaagaagagagtggggtcaggatcaaaacacatttagtgtgacttagggaaagaaaacattttccctctttgaacctctctggatacagtcattttgcctctacttgaggatcaactgttcaacctcaatggcctttcaggacctcctggggtcacgctggtgacctgtgggagattccagatccttcagactgtttttgctctcaatcttttgctgttgctaacataccttcatttttatggctgggagaactttcactggcatttcattacctgggccattcgctggctggggtccacatcctggacaatggacactgtctctgacaatggacactgggggccctcagccaaggtggcactcttgagaattctccattcccactggactcaaacatgaggccagagaagtgtccgtccgctttgttcatcctcagtggcagctccttcacctgaatgggaccttccccaacacaagtgacgcagacatggagccctgtgtggatggctgggtgtatgacagaatctccttctcatccaccatcggtgacctgaagtgggatctggtatgtgactctcaatcactgacttcagtggctaaatttgtattcatggctggaatgatggtgggaggcatcctaaggcggtcatttatcagacaggtttgggagaaggttcgtgctcagatggtgttacctccaggtttgcccattgttggcacctgtgcagccttggctcccaccttccctcatttactgctcactacgcttcttgtctgggattgctgcaatgagccttcnataacaaaatacctattatgttaaatagccgagtgggcaaanaaccacagatccccaggcccatgggaattacattgggaatgtgccccctctggtattgcatttatgacccctggcaggcccggcttttgcccattcgagactggcatatcctccagctggtggtgtctgtaccatactttgtgatctttctgacctcaagttggctgctagagtctgctcggtggctcattatcaacaataaaccagaggaaggcttaaaggaacttagaaaagctgcacacaggagtggaatggagaatgccagagacaccctaaccctggagattttgaaatccaccatgaaaaaagaactggaggcagcacaaaaaaaaaaaccttctctgtgtgaaatgctccacatgcccaacatatgtaaaaggatctccctcctgttccttttacgagatttggcaaactttatgggcctaattttgggccttaatctccatggtccaagcatctggggggaacaatgttttcctgttggcagactctctttggtgcagtccatcctcctggccaactggtgttgcaccttgggcactgggggtcagggagagtctccagcagggggagggtgaattgtttgggactatttgttcttcag

SEQ ID NO: 112014 - DNA, 641 bp, Homo sapiens
  misc_feature (1)...(641): n = a,t,c or g
aagattagaaaaaaacaaatattagtacatccctttctccttttggaggatttttaatcttaaattttctcccagtaatgattagaagttagaatgattttttttaaagaaccttatnnnnnnnnnnnnnnnnnnnnnnnnnnttcctacaaggctggaagctctgccttgagacaacacgcctgcctgaaccttatttactttatgttctattttgctgttatttgcctagcatattccaggcaccaaattactgattgattgatggtattagatgataccgttaaagacttggagatcaccgttagcgacagatatgcaccgtgaatccggaattgaataacacagagggaactttacttaacctttttcctgtgaccatagcagagctttagtaacaacaccggaaaagtgtgttttttttgctttcaaaggttaaacaaggagggcgccaaagcttttacgaactgcaagaaaatctgaaccttgtgagagaggagatgcgctaccgcgcgcgcgcgccatgtggactcgcttgtcaggcgtgtgtaccccttcagagacgagcttttccagcgcttgtccgcgcgccttgaggctcttacagagagaggtggcgcccgactggccgagtactctgt

SEQ ID NO: 112015 - DNA, 922 bp, Homo sapiens
tttttttgacacagggtctcactctgtcgcccaggctagagtgcagtggcacaatgaaggcacactgcagctttgacctcctgggctcaggtgattctcccatctcagccttcccagtaagtgggaccacaggtgcccaccaccaagaccggccaattttttgtatagacagggtttcaccatattgcccttacactcctggactcaatctgcccacattggcttcccaaagtgctgggattatagacatgagccaccacacccagcctgtatggctgtctgtgaataatatgctgttatgaacatgggcacactaaacaccattcaacttaaaaaaataatcaaagccttaagaactgaaccaaaatggcttaggtgaaaataaaataccaaactctgctctaagaaaaggaaagaacattcactgaattataccttcagcaataagcacttaatggaacttgtttcatttaaaatgcatcacaatcctgtaaaatggataatcatcataccccaattttatagatgagcatggtattaggcgggacctttttcaaaaaggtccatacagcttagtgacggaatatttcccaaatttttcataacatttcctttttttggagacggagtcttggctctgtgggcccaggctggaagtgcagtggtgcaatctcggctcactggaaggccttggcctcccaggttcacgccattctcctgtctcagcctccctagtagctgggactacaggcacccgaccaccatgcccggataatgtttttgtattttcagtagagacggggtttcactgtgttagccaggatggtctcaatctcctgacattgtgatcctcccgccttggcctcccaaagtgctgggattacagacgtgagccgactgtgccgaggcctaacatttctgt

SEQ ID NO: 112016 - DNA, 2620 bp, Homo sapiens
  misc_feature (1)...(2620): n = a,t,c or g
accgctccggaattcccgggtttgccttttgttttgtttttgatgccgcatatagtgaaggggtgaggatattctatacaaacaaaaattgaataatttattcacagaaactattaagattgtattgtggagctcacagcaaggctcagtgggcagcagctgcaacatctcaccggggaaattattttatttaacgtgagtgatgatgtgggccggagaaggtagctgaagctatttataaaacgttgtgtaccttcttccgagctctctcccctttgtgaagggcgcagcaactatacccttgatggatgggagatttacgcaatgtgttttactgggtagagtgacagaccttgggctgtccctgggagtttgaggaatctgggaccttatttcccagggcagagaccactgttcctcagaaatgggacttctgataatgaaacaggttgtccaacattttctaatacgcattctacagaacacaggttccaggaggcatcaggttggtgtgatgcagactaagggttttgtggtcaaatatccttaagaaacaaagttaagtcagtttcctttctgcaaggacttttcagccttcaatgtgtgctgtgcatggtgaatccccaaaaataatccttgagtctgtagcatttcctgaacttacatgaccaggatactctattttgcagatcaccccacagagctagggttccaccgagtatactttgcttaggttgacttagcatatctgaggtcttcaaggataaaaactgccaccccaacacccttccattaaaaaaaaatacaaaatagcaccacagtctccatctggtttatagcaacagaggtactttatttaatgaagcaatggttctaatcctggatactgccacggactacaattctatccctcccagagggagtggaggaagtcttgggtggtgtggacagaaggaagagaggagagggtgagtggggtatagggcccagggtggctccctactcctcaggctcaaaaggatgctcagtgggaacagatgatctcttgatgagtgcttcttcagtttcatagtttggaatcgttcactgtgtgctttttggggggttttcaatggaaattcacgttgctttgcatttctgtgtccgtctttggtcagttgtgcaagcctgctcactgtcatgtgaagatggcctttcatctggcttctctctcttaagtgagaaagattgtccttcaggggacatgacactcataaggttctgggaaggggggaacttttttcccccgggttgtgctttgtgttcacattttcttttctaatggcattgaaactttaaaaagagagggattcaactgtttttgcaagaatgtaagaaaagtattctgtgtccttggttaaagaaatccacttgtgaagtgtgcctggaaaatgaaagtttgtgttttttaaagaggaatatttgaaactgctttctatgcatgcttagctggagaaaagtacaggcaggcgtcccatctcccagccacttctcaaaggtgctgctgtgttttaaagacccaggttacagccaggggcagtatttgcaaggacattcctgcttactttatccctttgggttgggaaagctctagatgattcccgcagctcctccagaccccgcctccctgccctccccagctgggtntggggaagaggtggtcttgctgacctgtggtattttcagaggggacgttcctcctcctccctgtgcaccaggtgggctgcaccctcctgcctattcaggatgtggatgccacaggagagcagcaggcagtggaaacttcagttgcactggttctcctggtggcaaaggcatgaagcacaggggtcgatttaatccaggctacttagaaagctccagagcaaagtgtgcgggtcccacaggtgcttggctggtggggtctggatcagtgctgagatagagttggcagaagaagcagaggcactctgcttgctttcctagccagtcctcccctacacacacacacacacacacacacacacacacacacacaatctcagctgcgccattctgtgcaatcccagtgaccaaatcccttccttgcccacctctatgtcaggcaggactgaccacatcactcccccgagttcccaccaccagcatttcctccaacctttttccccatcaccaacccggttagacccctacaggcaaacaaaggcctttctagaatccgccttaacccttgggctgataagcaggccaaatttccagtcctgcctacactttgttaggtcccagaaggagctgccccatacctactttccttatgaggcatgcctcagtatgggcatatgggacatgtaatgtcacatctttgtgggagtgtggattttctttttttacatatttgtatggcagtagaggggcctgttgtaggaaaacggttccctgttatcttggctggtactgttaaaagaaagctgaattccacattggccaacaaaagcgtggaaaatgttcatggaaccttcctccaggaaaagccattcaagccatgattatttttgctaagtaacttgcaattaaattgaagaaaaaagaaaaaaaaaaaaaa

SEQ ID NO: 112017 - DNA, 320 bp, Homo sapiens
  misc_feature (1)...(320): n = a,t,c or g
cggcacgagcacgtttgatgacctatttctgatgtttgcaagtcactttcnnnnnnnnnnnnnnnggaaaagggattcccttttggcccccannnnnnnnnnnaggggaaaaaatcggggtaaagggaagnnnnnnnnnnnggggtttgggaatttttcggcctaaaccccggggggaggggggaaaaaggggcccccaacccccccccgggaaatttttgggtgggtaaaaaaaaacggggtttccccggggtannnnnnnnnnnccaaaaaaccggacccggggaaccccccccctgggccccccaaaggggggggag

SEQ ID NO: 112018 - DNA, 341 bp, Homo sapiens
  misc_feature (1)...(341): n = a,t,c or g
nnnnnnnnnnnnnnnnnnnnnnnnnnnnnnnnnnnnnnnnnnnnnnnnnnnnnnnnnnnnnnnnnnnnnnnnnnnnnnnnnnnnnnnnnnnnnnnnnnnnnncaatgagataccaatatatacgaattaggatggccaaaattcaaaactctggcaacaccaaatggtggcaaggatatggagtaacagaaactcattctttgcttgtgggaatgcaacatgatacagataatttagaaaatggtatggttgtttcctacaaaactaaacatgctcttaccatacaacccagaagctgccctctgggtgtttacccaaattagttgaagtctcatgtccgc

SEQ ID NO: 112019 - DNA, 393 bp, Homo sapiens
  misc_feature (1)...(393): n = a,t,c or g
cagttatnnnnnnnnnnnnnnnnnnnnnnnnnnnnnnnnnnnnnnnnnnnnnnnnnnttgttgttggtgatggaggcggctcnnnnnnnnnnnnnnnnnnnnnnnnnnnnnnnnnnnnnnnnnnnnnccccccccgcgggagggggggggcttttataaatcctcacggnnnnnnnnnnnttggggtaaaaaaaaattctcccccctacttttttaaagagggaaaaataaagcccccccccaccacccccctaatannnnnnnnnnnnnnaaagggccagggttttcacttgggtgcccaccttgggaaaaaccccccccctaggggggcccctcccccccccacccccccacctgtggataaaagggccgccccccctccccccccttttt

SEQ ID NO: 112020 - DNA, 1625 bp, Homo sapiens
  misc_feature (1)...(1625): n = a,t,c or g
aactgtgcgaaccagacccggcagccttgctcagttcagcatagcggagcggatccgatcggatcggagcggatcggagcacaccggagcaggctcatcgagaaggcgtctgcgagaccatggagaacggatacacctatgaagattataagaacactgcagaatggcttctgtctcacactaagcacccgacctcaagttgcaataatctgtggttctggattaggaggtctgactgataaattaactcaggcccagatctttgactacgggtgaaatccccaacttttccccgaagtacagtgccagggtcatgctggcccgactgggtgtttggggttcctgaattggcagggcctgtgtgatgatgcagggcaggttccacatgttattgaagggtacccactctgggaaggtggacatttcccagcgaagtgtttttccaccttctgggtgtgggacacccgtggtagtcaccaatgcagcaggagggctgaaccccaagtttgaggttggagatatcatgctgatccgtggaccatattcaacctacctgggttttcagtggtcagaacccttttcagagggcccaattgatggaaaggtttggagatnggtttccctgccatgtcctgaatgcctacgaccggactatgaaggcaagagggctctcaagtaaccttggaaacaaaattgggggaggcaacgtgagcttacaaggaaaggcacctatgtgatgggttgcaaggccccagcttttgagactgttggcagaatgtccgtgttgctgcaagaagctgggagcagacgctgtttggcatgaagtacagtaccagaagttaatcgttgcacggcacttgtggacttcgagtcttttggcttctcactcatcactaacaaggtcatcaatggattatgaaagcctgggagaaggccaacccatgaagaagtctttagcagctggcaaaccaaagctgcacagaaatttgggaacagttttgtctccaatttcttnattgggccagccattcccactcccttggacaaaagccagtttgacctggcctttggaagtcgttctgggcatcttcccacacaaggaccccaagttagctggctaccttcttttggcccccttgcctggaagtccatggtggcctcctgtcccttagggttgtaggcaggaaagggaaaaggattccctgtcccttcaccctttcccccactttccttcctacccagaccccttcctggtgcccagatccctctttctcaaaagctggggatttacagggtgtgaagcataagtgaagaccctttggcggctaccaaaattaaagctgggttctcattccctgttctttccttacacaagaagctgggagccccgtgcccctacccacacatctgtgggagatgccccaggatttgactcgggcctttagacctttgcatagcgagctgctactagctctttgagataaatacattccggaggggctcagttctgccttatctaaatcaccagagaccaaacaaggactaatccaatacctcttggattttatttaatgtcataatgttgtcagaataaagagaaagatgaaataatttcaaaaaaaaaa

SEQ ID NO: 112021 - DNA, 431 bp, Homo sapiens
  misc_feature (1)...(431): n = a,t,c or g
atgacctttgtttctctggtaaactggggcgacatacatcattcctgcatgtactggtacgggcaaggctgggggcaaattcctgcactgaacaggaagctgactggcacagccttccgagtccctgccaccaatgtgatggtggctgacccgacctgccatgtggagaaacctggcgcatatcatgacctaaagaaggtggggaaacatgcattgggggggccccctcaaaggcatcccgggctacattgagaacaagggtatatcctccgcctttggtattaaannnnnnnnnnnnnnnnnnnnnnnnnnnnnnnnnnnnnnnnnnnnnnnnnnnnnnnnnnnnnnnnnnnnnnnnnnnnnnnnnnnnnnnnnnnnnnnnnnnnnnnnnnnnnnnnnnnnnnnnnnnnnnnnnnnnnnnnnnnnnnnnn

SEQ ID NO: 112022 - DNA, 360 bp, Homo sapiens
ggaacgtatgaggctatcaataagctcctagcccagacgccatgggtcatttcacatgaggaggacaaggctactatcacaagcctgtggggccaggggaacggggaagaagctggatgagaaaccctgcgaaggcacctggttgcctacccatggacccagaggttctttgacagctttgagcaacctgtcctctgactctgccatcatgggcaaccccaaagtcaaggcacatggcaagaaggtgctgacttccttgggagatgccataaagcacctggatgatcttaagggcacctttgcccagctgagtgaactgcactgtgacaagctgcatgtggatcctgagaacttcaagcg

SEQ ID NO: 112023 - DNA, 517 bp, Homo sapiens
ggagacagggtcttgcgtcggctgcactcaggctaaagtgcagaggtgcaatatcggctcactgcatcctcaaaccccccaggcccaggtaatcctgccgagtaggagggactacaggcatgcacaaccatgcccagctaattcttatgttttttggagagatgagatatccacatgttgcccaggctggtctcgaactcctaggccccaaagtggatcccagccctcagccctccccaaagtgctggggttttaacaggtgtgagcccaccacatctggcccttttaaacaattttttaatcccggaaaggtttaatacacccaaaactttgtgaagcctttggagaggggtcttacctccagatgacagttttctcactgtaattactaagaatttaaattttcatttttctgaaaaatactacttgaaaaggtcccaaaagcctgttaatgtccatagcgccagaaagaaaaagaactgaaatatccatttctcatttatcactcgtgccacta

SEQ ID NO: 112024 - DNA, 434 bp, Homo sapiens
  misc_feature (1)...(434): n = a,t,c or g
aacctcacaccccgtnagaatnggctactaccaaaaaagacaaagattgggtgttaggatgtggagcaatggcacccttgcacactgttggtgggaatgtaaatcagtacagccattatggaaaacagtatggaggctgctgaaagtattaaaaatagaactcccatttgatccaatgatatagccaaaggatatggaatcagtacgtggaagagatctgcactcacatgttcactgcagtattattcacagtaactgaaatatggaatcaacttaagtatccatccatggacgaatggatcaagaaaacgtagttggtcaggcatagtggcacacacctgtaatcctgcaactttgggaggccaagacagaaggattgcttgagcccaagagtttgagaccagcctaagcaacatggtgaaaccccatctcta

SEQ ID NO: 112025 - DNA, 454 bp, Homo sapiens
acctacgacttcgggtcctcagaccaaccagcccaaggaacatctcatgaatttcaaatcgggaccccactggaaatcggactgtccaacccggcagccactcccagggcccctagaactctggccaaaggctctctgactgactccttccccagatcttctcagcttagcagctgaagactgatgctgcctgatcgccttggaagccccctggaccattacggatgctgagctttggataactcttacagtagaggattcccaactatatgaagacaccctagctggacgatcagttcttattaagaacctgaccccttaaactctacaactctcgatggactggaccctacttagtcatctatagtaccccaactgccgtcctgcctgcaggatcctccccactgggttcaccgttccagaataaagctgtgcccatcggaaaaaaaaaaaa

SEQ ID NO: 112026 - DNA, 375 bp, Homo sapiens
cccacccctcaccacctaggcgcagagattctgaggcctgggaagtggagaggtcagagaccaggaagagacagaaagagacagggggacgcccagaggcctggggctgagagatgctgagacccagagaccttgagcttggagaagagacagagacagaggcagaaagagagagacagagagacagagagagacagagagagactctgagaaggagagacagcagggacaatcctgggggtcccctgacgaggactggggctctagccaggcctggggcggagcctggggtctggacggctgcaggaagcgggagggggcgtcccgggccggggtccctacagcagcgggcgggcgcagagcggagtcgggcga

SEQ ID NO: 112027 - DNA, 342 bp, Homo sapiens
  misc_feature (1)...(342): n = a,t,c or g
tagcaccatgacctggaactctggtatggaccatatagcacagaggttnnnnnnnnnnnnnnnnnnnnncctttccctcccccaaatttggattgccatttcctcttttttaccaaaattggccccctgggggccccaatacttgaagggccccaccccgctgggtgccctcaaagtttccctggattttaacccctaccccaaaaagggtcacccttaacccctgggaaaaaggccccaacataacccgggtaaaaaaatttaccccaccttgggaagggggtcccccccagggcaaagggggcccgggaaaaaagcccttttttataccaaccccaaagg

SEQ ID NO: 112028 - DNA, 665 bp, Homo sapiens
ggcacgagagaacttgtagtttgcatagtatccgacagatgtcaccgtatttaccttgaaaatttaaaatattttgcagcatccttgtgaatttgatgtgatacccccaaggcaccctgagcacacagtttgggaacccattgcccttggaatattaatcatagttaccctcccagagagtgaaattttggataattaaaaaaatttcttttttcttgagatggagttttggtcttgttgcccaggctagagtgcaatggcgtgatctcggctcaccgcagactccgcctcccgctttcaagctattctcccgcctcatcctcccaagtagctggggattacagggcatgcaccaccacggccggctaaatttttttttgcatttttagtaggagacggggtttctccatgttgggtcaggctggtctcgaactcccgacctcaggtgatctgcccacctcggactcccaaagtgctgggattacaggtgtgaaacaccacgtcctgctaaaaagtacacatttaaaatctaagttccattttcccgtcatgtttattaatttgtcccattgcaggatatgtttctgttgtccgcatgggtagagataattttaaaagcttggttaagtaagaactgattttcttaattattgccctttaggtta

SEQ ID NO: 112029 - DNA, 638 bp, Homo sapiens
ttttttttttttctttcaattgttcctcctcctccctgattccttcttcctcctcccttgcctcctctcccagagtatcataaaatactggatctcggatgagcagccttcctctgaaaatgcttagttttggatcctcctttaacaagtacaacttttcttttcaaacaaagtacaacccaaacatgcagtactggtcggcggcagtgagcaggttggcgcttctccaaagctagactggaacatacacaacccagtcgacagaagtcattgttgcggggaggggctcgtttccttatgattgtgtggataggtttagttttgagggatgcttgagctgtaagtagagttgttaaggatacatctgctcgctcttcctgtgatgtatgtccttggttttccttcccaaagtgcacagtcttccaggtccattagcttcacctgagatttagacaaagcctggagggcgacttccctgttgctgttgctgctgctgctgtgcctgccgcaaactaatctgctttggaaatatattttcatccaaagttggcacaacaaagttattcgcctgattttctgagatgatgcctgaagaattcttggtaaccttatctcctagaatcacatgagagtatttc

SEQ ID NO: 112030 - DNA, 540 bp, Homo sapiens
ggaagtgagaacataatggagtgccattctcaagttcctcggagaaaaaagagtcaacctgtaatcctatattcacaaaaaatacttaaaaatgaatttgaaataaatgtttctattcaaaaactgagaaaggctgggtgaggtggcctgtaatcccagtcctttgggaggtcaaagcgggcagattgtttgagttctggagtttgagaccagcctgagcaacatggtgaaatcccttctctacaaaaaatacaaaagaattagccaggtatggtggtgcctgcctgtggtcccgctactcgggaggctgaggtgggaggactgcttgaacctaggaggttgaggctacagtgaaccatgatcatgccactgcactccagcctgggcgacagagtgagaccctgtctcaaaaacaagcaaacaaaaaaacacaaaaaaacctgagaaaatttgctgtcagcagatgtgcatacacaaaaaatactaaagggaattcttcaggtagaagaaaactgatctatgatagaatcacagaaatgc

SEQ ID NO: 112031 - DNA, 316 bp, Homo sapiens
  misc_feature (1)...(316): n = a,t,c or g
ttggaacccagcaagcatacccactggcatctctgtnnnnnnnnnnnnnnnnnnnnnnnnnnnnnnnnnnnnnnnnnnnnnnnnnnnnnnnnnnnnnntttgtaattggaaaggaagacatcaaattattcttcattgtaggagatatggttttatagttggaaaaacctaaagactccacaagaaaactctattagaactggtaaattcagaaaagtagcaggtttcgaaatcaacatacaaaaatcagtagcttttctatatgtcaacagtgaacaatgctgaaaaagaaatgaaaaaaagtaatcccatctca

SEQ ID NO: 112032 - DNA, 652 bp, Homo sapiens
agtagagatggggtttcaccgtgttagccaggatggtcttgatctcctgacctcgtgacccgcccacctcggcctcccaaagtgctgggattacaggcgtgagccaccgcacccggctgagacggagtcttgctctgttgcccaggctgaagtgcagtggcgcaatcttggctcattgcaacctccacctcccaggttcacgccattcttcgtgcctcagcctcctgagtagctgggactacaagcacctaccaccacgcctggctaatttttttgtatttttttaagtagagacggggtttcaccgtgttagtcaggatggtcttgatctcctgacctcaagtgatctgcccacctcggcctcccaaagtgctgggactacaggcatgagccaccgcacccggctacctgtctcctcattcttaaaagatgtaaacccctcccaacactggaagaggaaacagagaccagtgcgctgtgcagtctcacttaactagaatgcacaactcctgcttttatcaccattctgggaaatccccgctggcatttcatggccagggcagcacttcatagtttggaaaaggatggtgtgggactttgccgcagaggccctagagaaggccatcctgtgttcctgctctccttctcatcc

SEQ ID NO: 112033 - DNA, 391 bp, Homo sapiens
  misc_feature (1)...(391): n = a,t,c or g
ccatgagctnnnnnnnnnnnnnnnnnnnnnnnnnnnnnnnnnnnnnnnnnnnnnnnnnnnnnnnnnnnnnnnnnnnnnnnnnnnnnnnnnnnnnnnnnnnnnnnnnnnnnnnnnnnnnnnnnnnnnnnnnnnnnnnnnnnnnnnnnnnnnnnnnnnnnnnnnnnnnnnnnnnnnnnnnnnnnnnnnnnnnnnnnnnnnnnnnnnnnnnnnnctgacaataccaagcggtagcagggatgcagagcaactaaaaccctcataccttcctagtggaatgcaaaatagtacagacactagagaaaacacttttatggtttcataaaaatgtatacatacaatgaccatccaaccatgcaatccctctcctgggtatttcctctaaagaaaaaaa

SEQ ID NO: 112034 - DNA, 397 bp, Homo sapiens
  misc_feature (1)...(397): n = a,t,c or g
ccatgagctnnnnnnnnnnnnnnnnnnnnnnnnnnnnnnnnnnnnnnnnnnnnnnnnnnnnnnnnnnnnnnnnnnnnnnnnnnnnnnnnnnnnnnnnnnnnnnnnnnnnnnnnnnnnnnnnnnnnnnnnnnnnnnnnnnnnnnnnnnnnnnnnnnnnnnnnnnnnnnnnnnnnnnnnnnnnnnnnnnnnnnnnnnnnnnnnnnnnnnnnnnctgacaataccaagcggtagcagggatgcagagcaactaaaaccctcataccttcctagtggaatgcaaaatagtacagacactagagaaaacacttttatggtttcataaaaatgtatacatacaatgaccatccaaccatgcaatccctctcctgggtatttcctctaaagaaataaaaactgc

SEQ ID NO: 112035 - DNA, 516 bp, Homo sapiens
atagtttttgtgtgtgtagaattttccaggtaacgcagaacacttgctgactattattactcaggctatggagattcctaccagttagtggacacatattttcctccaatttcttagtcttcaagaatcctagctccatttgataactatgagtagtgctttttgaataacttcttttggagggatgagactgcagaaagctatagttttggttttggttttttaagagactggttccctcttttgccccaggctgcaagtgcagtggcaaagtcatagctcactgcagccttgaacttctgggttcaaggcaatcctcctaccttaaccctcccagggtagctaggattataggtacatggccaccatgcctggataatttttaaattttttgtagagatgggatctcgctatgttgcccaggctggtctcaaactcctgggctcaagcagtcttcctgcctcagccttccaaagtgttggggttacatggcattggctactctgcctggcccta

SEQ ID NO: 112036 - DNA, 398 bp, Homo sapiens
  misc_feature (1)...(398): n = a,t,c or g
aaaacagtgacnnnnnnnnnnnnnnnnnnnnnnnnnnnnnnnnnnnnnnnnnnnnnnnnnnnnnnnnnnnnnnnnnnnnnnnnnnnnnnnnnnnnngtcaagttagacaagtttctcacaaagctaaacgtaccatacaatctagcaatcatactcctttacacaaatgacttgaaaacatgtccacacaaaaatctgcactcaactgtttagagcagttgtattcataactgtcaacccttaggagcaaccaagatgtccttcagtcggtgaatggataagtaaactaggtacttccagacaatgaacttagcaataaaaagagatgagctatcaagctatgaaaagacatggaggacctttaaatgcatattgctaagtaaaagaagctagtcaga

SEQ ID NO: 112037 - DNA, 351 bp, Homo sapiens
tgagaggtgactggtaaaaccaccccagagagtaatgtgacagtgttagagatgtcgagacacacacataccatattctagaagtttcctgattgggatatatcccaaagacacccacatgtgcacaaggagatgtataacagattgtttatcactttttgtgagcatgaaaaagtaggattttgagacggagtctaactctgtcacccaggctggagtacagtggtgcaatcttgcctcactgcaacatccaccacctgaacgattctcctgtctcagcctcctgagtagctggtaccacaggcgcacgccaccatgcccagctaatttttgtatttttagtagtcgacc

SEQ ID NO: 112038 - DNA, 409 bp, Homo sapiens
  misc_feature (1)...(409): n = a,t,c or g
aacagantccttggttcctgtcaacccaggctgnaaaggcagtggnaacaacctccagctcaactgcaacctcccacctcttgggttcaagtgactctcatccctcaccctcccaagtagctgggattaataggcatgcaccaccacaccaagctaatttttgtacttttagtagagatggggtttcaccatgttggccagtatggtcttgaactgctgaccttgtgatccacctgcctcagcctcccatagtgctgggattataggcatgagccaccgtgcctggggccacagcacgcatttttaagggaaacattaatttcatcttgattttaaatctgggaagagcagagttcgttaattatggataagcttcatgctgacagaaggggagtcccctcgtgccgaa

SEQ ID NO: 112039 - DNA, 1773 bp, Homo sapiens
tttcgtggaggggcaaggcgagtgtgtgtccttatcctatcaattggggcgcgggcctgtgagccagttggagttgcggcggcgggaacgattgggctgagcagaggacgacatgttgcttttcgtggagcaggtagcatctaaaggaactggtttaaatcctaatgccaaagtatggcaagaaattgctcctggaaatactgatgccaccccagtaacttcaattggaactgaaagcttcttggcatgaaatagctagctcatcaggtgctcatctctgagggtaatggcagagctctcataagatatatgtaaagaatatgaagtaatgtattcttcatcttgtgaaaccacaagaaatactacaggcattgaagaatcaactgatgggatgattttacgaccagaagatctgagttaccaaatatatgatgtttccggagaaagcaattcagcagtttctacagaagacctaaaagaatgtctgaagaaacaattagaattctgtttttcacgagaaaagttgtcaaaggatctttacttgatatctcaaagggatagtgatcagttcatcccaatttggacagctgccaacatggaagaaataaaaaagttgactacagaccctgatctaattcttgaagcgttaagatcttctcccatggtacaagttgatgagaagggtgagaaagtgagaccaactcataagcgttgtattgtaattcttagagagattcctgaaacaacaccaatagaggaagtgaaaggtttgttcaaaagtgaatactgccccaaagtgatcagctgtgagtttgcacacaatagcgactggtatatcactttccagtcagacacagatgcacaacaggcttttaaatacttaagaaaagaaagttaaacaatttaaggccaggccaatattggcagggataaaagccatcaatacatttttttgctaagaatggtcatcgaataatgggattttagaatctatagtccaccccatttaaactcaagcacagtatgcctccccagtctttatgcagcctgtatataatcctcaccaacagtactcggtctatagtattgtgcctcagtcttgggtctccaaatcctacaccttactttgaaacaccactggctccctttccccaatggtagttttgtgaatggctttaattcgccaggatcttataaaacaaatgctgctgctatgaatatgggtcgaccattccaaaaaaaatcgtgtgaagcttcagtttaggtcatctggtggttcagaacactcaacagagggctctgtatccttgggggatggacagttgaacagatatagttcaagaaactttccagctgaacggcataaccccacagtaactgggcatcaggagcaaacttaccttcagaaggagacttccactttgcaggtggaacagaatggggactatggtaggggcaggtaagaaaataaagtacctgaaaacctttgataataatgtgatcatcctgaataattgaagaacgtgatcttcataataattaaatgagcatttaattattggtatatggttatattaaataaatacgttattttcagaacatgagttggttgctttttataattattaagaaatagagtgcccatacagaatatagctctgaatcagaggtttataaagttattctgaagttccttatagctcatataagaaagaatagcttagaaaattaacatatccatttgccttatggttttaatttcttccagctttt

SEQ ID NO: 112040 - DNA, 729 bp, Homo sapiens
attttatatacacatagtggaaatttctcaggaagagttaaatagcaaaaataaaaaaaaaccacaaactagctacaactttgttgaaatccttattgctccaggaatttttaacattagtgtttaataatttttaatttctaggaggggcttttacatttctttatattggtagtaaatccttgtgaaaatctctatggataaatggggttattaccacctttattaaaattaccatagtaagcaagtttgtgttgaatttagccatatgcttagctgttgatagaatatgaaaatgatgatgctccagataatctctttagaaaggtacaactatttctcgagtttaaacaaaatgttaagtcgtacagtaaaaatatcaggacatcagagtatacctgaatgaatgtattggaagtacttaccaggtataaaattccttatgccttcgggcatggtggcttaagcaagcatggatggaatcttagcactttggaaggccgaggcaggcagatcacctgagatcaggagttgagaccatcctggccaacatagtgaaaccccatctctactaaaaatacaaaaattagccagacatggtggctcatgcctgtaatcccagctactcaggaggttgaggcaagagaatcatttgcacccaggatgcagaggttgcagtgagacaaggtctcgccaccgcactacagcctgagcagcagaaccagactc

SEQ ID NO: 112041 - DNA, 668 bp, Homo sapiens
  misc_feature (1)...(668): n = a,t,c or g
gatattcgtttaacaaaaaacaaactatattatgaatccgtggtaaaaagaaaaaaagtaggggtatgtttattgaattgatggagagacagcttagcctaaggtggttggaatctgtctacaaattagttaagcctgacgttgatcattggacattcatccccgtttgtcaggcttaaattccaagtgctttggatgctgaatcaaattactgtggtagaaagaggtttaattttttcccctaagaaaaatccttatctatggataagtagaaaccattctctgacaaccttgtaataattttgacagggaatgtaactgctgtgttctgcttttggttaaaggctaaagtacatattagggaaaatttgaggctgggcgcagtggctcacacctgtaatcccagcactttgtgaggccgacggcaggtgggatcacttggaggtcaggaatttggaggaccagccgggcccaacacagttaagccccatctctactaaaaatacaaaaattggccaggcatggtggcgggcacctgtaatcccagctacttggcaggatgaggcaggggaatcgcttgaacctgggaggcagaggttgcagtgagccattgcactccancctgggcaacagagtgagaccctgtttcaaaacaaaacaaaacaaaa

SEQ ID NO: 112042 - DNA, 810 bp, Homo sapiens
ggccccatttctgcccagcacagagactgctatgacccagtgatgacattgtgccctaagaacttccccacattctcttcaactcacagacgacctcagatgtagctgctctctcaggccttcaatgtacgtctccacccaaatgaggaatatttgcattacaaggaggaaaggagggagggaaccatcgggtacctgctgtaccagggcacattatatgctattgtccctgttttccagatgaaggccagatactcctcttatggaagttaaatggactgggttcagtgttaacactggctagtgagcgacagagatggaatttgaacgcacacctgtctggactccacctacgtgtttccttccacatggcccagcaagctctgctgttcccacctcgcacttctgggaaggtggctactcccctctttccaaccccccttttctgggatcttgaccaagggattcctacccctgcccccagctgtcaaaagccctgcagcagctgcccaaaaaacctcaacacaggcatactttggacctacatcatgtgttgatgtcacagatgctgtacccaggcatttgactccttgatctaaagcccaggattcctagccaacatggcgaaaccctgtctctactaaaaataacaaaaattagctgggcatggtgataggcacctgtaatcccagctacttgggaggctgaggcaggagaattacttgaacccaggaagcgaaggctgcagtgagcagagattgtgcctctgcactacagcctgggctatggagtaagactctgtctcaaaaa

SEQ ID NO: 112043 - DNA, 359 bp, Homo sapiens
tttgcattcccaccaacagagtataagtgttcccttttctctgcatccttgccaacgtctattattttatgactttcataataatagccattctgactggtatgagatggtatctcattgtagttttaatttgcatttctctgatgactagtgatgtggagcttttttttttaaagtttgctgggcacttttgtgtcttcccaaagcatttttaaatctctagaatgatctcacgtaattgcagtgctatattatttgggagtagaaatttctaaaggcgaataatgctccttgggacttaaagaatgtttgctcttaaattaggacagtatattaaaaccgaaaatgctttcctgttc

SEQ ID NO: 112044 - DNA, 378 bp, Homo sapiens
ggctttaaatcccccccaaatttttattgtggttatctttgagagattgacatacaggattttcacttttttcccaatatttttatattgtccaaagtctttacagtgagtacatactaatttatagttagaaaaagaataggaatttagaattaataagttactgctattttagagggctttttctttttaacctttctgcttcattcactgaatttattttttatattgcttttattaaagcagagaaatgctttagaagcctaaagaaaaggagcattttggccaggtgcagtgctcatgcctgtaatcccagcaccttgggaggctgaggccggtggatctcctgaggtcaggagttcaagaccagcttggcca

SEQ ID NO: 112045 - DNA, 1454 bp, Homo sapiens
  misc_feature (1)...(1454): n = a,t,c or g
gccgactactactactactaaattggcggccgctcgacttttttttttttgtagatagggagtctaactgtgttctccaggctggcttcaaactcctgacctcaagtaatcctcccacctcagcctcccatagcactgggattacagccatcacctaccactccaagccatgagtttggctttggatttaagaaggttgaggtgttcatgagttgacaagtggaaaaaacaagaaagaagttgagtgtttaagactgctgtttcaaggagaattctagcctcaggacaaaagttcaggactcatcagctgagaaatggcactgaaaattatgtaaatggataagctcagctagcaaacaagtccagagagagcagaaagtccagagagagatagcagcactgggctatgcacctggcctaatgccgccccgctcctcccaatccctgtgttatgctggagagggtccagcctctggtgagtttcaccaaacccccacatctctttcttctgagaccttctctaaaatcctctcttttatacttagtgaaatgggatgctctttttcctatccagcttaagcaaaaacttttgactatgagaagaatgaggatgcatttatgtatctgttctgcatggctaattccatcaaagatttctcattattcatgcctggcagtctcattttcttcttttgcctctaagagcacagtcgtagccttaattactgaccttttcactcttctaataccagcgatttccccccatctcagtttctcaggaagttctgttcgcagaattatctcctgaatcctcacctggagatagaaattgcttctctgtggccatttcttccccctctaattcttatcaaaaaacacagtgatcctctggtgcatcaaattattaaacttgaagctcaaccaggattcatgganttcttggctttgtctctctctccggcctgtggaattagcaggtttggcaacatttgccagagaagaacacccaaattctcaggaggcccagaagtttcccaaaggtactggtcactcttgctctttttctcctgctggaaattcagcactagagagtgttacaccattgcacctgcagaggagttcatctgactctagggcactacagaggagagaagatggacaaactaacaggcattcagaaaatgactaccacaatggggaagaaaatgaaagtcaaaccaaataagcaatggtcaacaaaaaaaaaaaatctagagggcagctgcagtggctcacacgtgtaatctcagcactttgggaggccgaggcaggtggatcacttgagatcaggagttcgagaccagccagggcaacatagtgaaaccacatctctactaaaaatacaataattagccaggtgtggtgccgggcacctgtaatcccagcattttgggaggctgaggtgggtggatcac

SEQ ID NO: 112046 - DNA, 408 bp, Homo sapiens
tcacccattcccaaagccctgcgatctcaccccagagacccacaagtgaaaataatattataatccctgagaaagttttagtggacccaagatggcatgcccatcaagacgctgagaaacaaagaggaagaatgggacccagggggcccagaagacgctggaacccacagtattaaaagctcagagaggctgggcacagtggctcacacctgtaatcccagcaccttgggaggccaaggtgggtggatcacttgagcccaggggtttgagaacagcccgggcaacatggcgaaacccagtctctaccaaaaaatatacaaaaattagccaggcatggtggtgcgtgccctagtaccagctacttgggaggctgaggcaggaggattgaccgaacctgagagcacacca

SEQ ID NO: 112047 - DNA, 507 bp, Homo sapiens
  misc_feature (1)...(507): n = a,t,c or g
tctantnnagagtcttgctctgttgcccaggctgaagtacagtggcacaatcttagctcactgcagccttctccccacggttcaagcaattctcgtgccttagcctcccaagtagcagggactacaggcatgtgccaccatgcccggcattttgagtagagacaggattttgccatgttgggcccagaactggttttaaagctcccttaccctcaaagtgaatctgccctcccttggcctccccaaagtgttggggttacaggtgtgagtcaccgtgcccagcccaacaataatcattttgctgttgactttcttaaactttgagttaggaaggaaatatttgagaccagcagttaaattcaagttttaggactttatggattgtagttatatttccctttagctggggagaattttgattctttacatccatctctctgggccctacaggcacagtttctttacgatcatttaatattttttcttctcctcgtgccgaattcttgg

SEQ ID NO: 112048 - DNA, 2377 bp, Homo sapiens
tttgactttttaaacagctttatgaagatataattcacaaaccatacagttgatagggtggtgcaaccgccaacacaatctaattttaaactatgtttatgctgctacgagaaagcctatacccataagcagtcattttctattccccacccccaaacccactacttagccctaggcaaccacttatctactttctcagaccgataactttagcataggtataaatcgatcacagagcctcaaaatccacccgatatctgggccatgatgtgaaatttggtaggtaatcgtcccacgttatcaacttgtaaagtagaaatggaagtggggaggaaaactcagccgccagtggcgtttgtgaaaagcacctggtaacaggctgtgctggaggggagttcagcccctacaaaagatcacggattatgaattacataagcataggtctcgggcccttttattttggacgcgatcctttcacgggatcgcctccggatgggagccggatgggatcccggacgggatcgtctcgctgggagccatgcgggaaaccgcaagagtcagaaacagccgttgaaggcaggcagcattttccaaaacagctgtgtctcgggagctgccgggctgtagcgtctccccgagtcgcgcgcgcatgacgtggcgggcgcgcgatgaccgaccgtggcgcggtgcacgctgggatatttaagtctccctcccggcgcggagccgcgatgtctccggcggctgcggcggctggagcaggcgagcggcggcggccgatagcgagtgtcagggccggccggggcggcgcttctcggcctgtcgctggtcggcctcctactgtacctcgtgcctgctgcggctgcgctggcctggctggccgtggggactaccgcggcctggtggggactgagccgcgagccccgaagttcgcgccccttgtcctccttcgttcagaaggcgcgacatcggcgaacactgttcgcttcgcctccggccaagtcgacagccaacggaaacctcctagagccgcggaccctgctcgaaggacctgaccctgccgaactgctcctcatgggcagttacctgggcaagcccgggccgccgcagcccgcccccgctccggagggccaggacctgcggaataggcctggccgccgcccacccgccaggccggagccgggctccacaccgccctccccgccgacccatggcgttcaccacttttacccctctctccccactcctcttctccgaccctccgggaggccttccccacgggatcgtggggactttaccagatcggtttgtaataacacctcaaagacgctatccgatccatcaggcccagtattcctgtctgggggtacttcccacagtgtgctggaatggttatcacaagaaggctgtgctgtcccctcgcaactccaggatggtgtgtagcccagtgactctgaggatcgcccctcctgacagaagattttcgcgttcttgcggttaccagagcagattaatcagcttcaaacaattgttcctcaaccatcaagtaatgccccagacccatgtgcaaaggagactgtacttgagtgcctcaaagagaagaagaagaaaaggacagtggaggaagaagaccaaatattccttgatggccaggaaaataaaaagaagctgtcttgtcgacggtctcactgatgcctcttctgcattcaaaagttcctcgacccgggccagatacactccagtttcacagtgggatgtcttccactttgcctaatgactccaagaaacatgatattacattcacctggccacctggaaggttcaccctaggttgaggcagggacccaggtggaactcaacaagggcctgtttccttcaggcaaggcctttccaacaagcttggttcccaagtggaaagggcccggctggacatctgtcaaatgctgtaaacaaaggtgaactgtggcactcccaaaccattccaaggaggcagccctcgtgtccgtgagcccagtggtcccacgtctgcttccctgtaaccgcaggcatgtgacagaagaagcagatgtcacccgtgggggccactgtatcttcctgggacaggagtggtgacccatgaagtagagcagtgggctttggccttctgacaccttcagtggtgctgctggccgtaggcctggctgtggtggagccctgactcgactgctgtaaactggtgtacaccaagtgtccgactgctccacctgtgtgctcgataaagagaaggcaaaaacaaaaaagatttttaacggcccgccttttctttttggggatttagttgggcggcggtttaacaccgggtgaaaaccggggcccattaaattcctgtgcatgctgc

SEQ ID NO: 112049 - DNA, 551 bp, Homo sapiens
taaaaactagcactgttgggaagaatgctgtggaataccacaaactagtttggcaaaggggaaaagaatgtctaaaaagtgctgattgtattttaaacatagtagtgataatacaaggaaagcttttattcctgagcaatgcaaagtacgataaaatggtggaattgctcaatgatatttaggttttcagaaatgtgaaattatatatacagttatcctcgaacagtgtggggtttagtggtgccaaaccccagcatggttgaaaatccacatataacttttgactcctaaaaatcttctgatagcctgctgttgactggaagccttactgataacataaactgacaattaacacataaatagactagtttcttttttgttgttttttgagacaaggtcttgccctcttgtccaggctggcgtgcagtggtgccatcatagctcactgcaaggttgaactcctggggctcaagcgattctcctaccttcccccgcgccaccaagtagctgaaactacaggtgtgtgccaccatgcccagcacatttttttt

SEQ ID NO: 112050 - DNA, 372 bp, Homo sapiens
  misc_feature (1)...(372): n = a,t,c or g
tgctatctcccaaacatttgtgatccagatagggagtgcccttctaggtagcttaagagtgcttttgctcccttctccagctcttcaacttctaccttatttgccttaattctaagttccaggcagtctctcttctttcagnnnnnnnnnnnnngaacccccctttcactttaaaagggtagcccctcccccgccctaaccttggccttacgggggtaacccccctcccccttttttttaaaacccgcattggaccctcccgggttttccccccctctttaacttggggcgggtttttttaaccccacccccctggtttaccccaaagggagagaaataaggggaaaatcccaactcccccctttccctatg

SEQ ID NO: 112051 - DNA, 746 bp, Homo sapiens
  misc_feature (1)...(746): n = a,t,c or g
cggcacgaggataattccttttagtttagctactattttaggggattttttttagaggtaactcactatgaaatagttctccttaatgcaaatatgttggttctgctatagttccatcctgttcaaaagtcaggatgaatatgaagagtggtgtttccttttgagcaattcttcatccttaagtcagcatgattataagaaaaatagaaccctcagtgtaactctaattcctttttactattccagtgtgatctctgaaattaaattacttcaactaaaaattcaaatactttaaatcagaagatttcatagttaatttannnnnnnnnncttttcaacaaaatggtcatccaaactcaaacttgagaaaatatcttgctttcaaattggcactgattctgcctgctttatttttagcgctatcacaggacccagagcctatgcccttttaaacttaccacaaaagcagaagattaattcaatttaagatgatactctcatttgttacgtccnnnnnnnnnnnnngggaaaggggatttttttttggcccccatccgggggggcgggggaaaaaactgggttaatggggccccccatttccggggttaaaggaattttcccccctaaggcccccttaagaggggggattaagggggcccccccccttgcccgggtttttttgggttttttaagaaaaggggggtttaaacatgggggccaagggggccaaaaccccggggggggga

SEQ ID NO: 112052 - DNA, 529 bp, Homo sapiens
agccaacatgctcagacaatgcaaacattcttaacgtaattttagcaaattgaatctaacaaaatagaaaaatgataattcaccatgaccaagtggaggtttattctagggaatgcaagattggtttaatattcaaaaattaatgaatataatcaactatagcagactaaaaaagaaaaacattgatcatctcaatagatgcagtaaaagaatttaacaaaatccaacaccttttcatgattaacaatactcaataaactatgattacaatggaacttcctcaacctgataaagggcatctagggaaaacctaacatcataatgaaaggtgagactggatgctatctccctaagagcaggaataacaataggatgactaatcctaccacttctattcaactttgtactgaaggttttaatcagtgcaataaggctggagaaggagcaggagaaaaaggataagaagaaggaaggaaggatggggaaaggaacaacttaattaaaagactggcaaggtcggtggaggggc

SEQ ID NO: 112053 - DNA, 371 bp, Homo sapiens
  misc_feature (1)...(371): n = a,t,c or g
nnnnnnnnnnnnnnnnnnnnnnnnnnnnnnnnnnnnnnnnnnnnnnnnnnnnnnnnnnnnnnnnnnnnnnnnnnnnnnnnnnnnnnnnnnnnnnnnnnnnnnnnnnnnnnnnnnnnnnnnnnnnnnnnnnnnnnnnnnnnnnnnaaaatttggaaaaggaattttgtttttttccccaggtgggagggtgggggcccctttagggttaattaaaccttggacgccgggggttaaaaggaggctctccctttactttctaaagaagcgggaccaaaaggggggcggggccccccccgcccaatggaaaaaaaatgggggggaaaccatgctaaaagggggcccccttatgtgcccggggttggcttttaact

SEQ ID NO: 112054 - DNA, 372 bp, Homo sapiens
  misc_feature (1)...(372): n = a,t,c or g
aaatacatggcaaaagctgtattacagtgaatttggcagtgatttcctagatttggcaccaaaagcatgacccacaagggaaaaaaataatttggagtttgtggacctttggcatcaaaatgcaatattaacagagtaaatgagtaacccatagaatgggagaaaccatttccaaattatatatctgataagggattaacannnnnnnnnnnnnnnnnnnnnnnagctactaataaatcacttattgtggaataaatgtttatgtccttataaaattttatttatttttccacttccctgatgtggcagtattaggcaatggtttttttgagacatgataaggattaggttagattatgagagtggatcctc

SEQ ID NO: 112055 - DNA, 985 bp, Homo sapiens
ggagacagaatcttgctctgtcacctcgccccgggtggggtgtgggtggcacaatctcagctcactgcaacttccacccttccggatttaagcgattctcctgcctcagcctcccaaagagctgggattacaggcgcccacgaccccggctaatttttcttttttaagcagatacaggctttcaccatgttggccaagctggtctcaaactgctggcctcaagtgatccacccgccttggcctcctaaagtgcctgggattacagggcatgagcccacccacatctgggcattattattaaattttatttgacaattacacatcaggtcaagttatggggatgggggagatgtttattaaaagggggtttcccataagggaaagaaactgaaatgcattgatttgactctgccatgacactctaatgaaatagaggcctgagcccatgcctaggaaaaatggagtttctaggaggcaaacaaaccatgtaggggttgagagtcaggaggcagacacaggggcagatgcccacatttaaacccaaggccatcagggaaacacagatctgagaaatatatacgaggcacaacgtgacagcaagcatcccttcctctaaacttttttataagcttgacccagtcccaatttaaattactatgtatagtacgctatttaattaaattacagattaaattgaggttgtgaattatcatgcgactgtagccaccatttataacagaaattctgttcaaaaaataaaatttataaagctagaaatatacagtaattacctgaataaaatcaataattaagttaattaaatgaaaaagtaacacattttatgtatttttaataccaatgtatttcccagcaattcattaagaacacaattccaaggaatcttttcccctatatttttcattttcatcacttaaatatttattttaatattcgaaaataaaaatatattactgctcaatttttt

SEQ ID NO: 112056 - DNA, 777 bp, Homo sapiens
  misc_feature (1)...(777): n = a,t,c or g
caaaacatccccatttaatagccactcaggaagggtccatcatgcctgtctagatcattaacaggaagatggcacagatacacaccccaccagatccgtgtggcagagttcatgaataagagaatgcccagggggtcaggatgagagttggggcttccagatgcaaccacctctccctacttggagatgctctttccattaccagctcaagaatctggtcttgttgactaaggaaagaggcagtttccttacatgtttgctgaaataaacacacataaagtcctccatccgacaagagttgctgatcttcagtgcctttcttacccaaaagatttttcttacaaatgtcccttctctcctcaaaatctgagcaccatcttgtgtttttttaatccagtaaaaaggtcatccccttacaggtggggctcaggagaagagaggcaggaaatgggaaggtgaattgggaccgaggaaatgggagaagggcagtggaaacttatataggatagggtgaggaaaaaagagtttggagccagactgtgagccccttaggaacaggaatcacctctgattcctttctttcttttagagacagctcactctgtcacccaggctggagtgcagtggcacaatcatggctcactgcaaccttgaactcctgggctcaagtgatcctccaacctcagcctcctgagtagctgaaaccacaggtgtgcaccaccaggctcagttaatttttatttttaatttaatattntaatttttatttaatatttt

SEQ ID NO: 112057 - DNA, 413 bp, Homo sapiens
  misc_feature (1)...(413): n = a,t,c or g
taggaatgatcagaaaaatagaaggattttttaaatccggaagaagaagnnnnnnnnnnnnccgggggacggaaaaaaaataacccctaagcaaaaaacagcctactttttgctacggtataccatattttaaaattcccttttggacaagacatatccccaggttaaccggagtcccccccgggnnnnnnnnnnnnnnnnggttccccccaagggggcccccctttttggccccagtggttaaaaaaaaagcccttggggggagcccaacctnnnnnnnnnnnnngggcccaatggtttgaacggcccgggtgtgaggccccccctttttattggggccaggagcatttccccccggtttccaaaggacccggccaggacccccttgaaaaaggcctatcaccgggcagggg

SEQ ID NO: 112058 - DNA, 508 bp, Homo sapiens
  misc_feature (1)...(508): n = a,t,c or g
taaattattataaggcatcttagaaaaagaaaaagaagaatagcgtgtgggacggttgctctacccaagattaaaattgactgtcaagttaaaatggtgggtattggcatcagaatatgtagataagtggaaacacaatagaaagtctagaaatcaaggctggtattcacaaactctcaactgatgcaggccagccaaaagagaaagttaagaatgtttcacattttcttttcttttcttttgagacttagtttcattcttgttgcccaggctggagtgcagtggactggtcttgactcactgcaatctctgcctcccgggttcaagcaattctgcctcagcttttccgagcagctgggattataggcgcctgccacccatgcccagctaagttttatattttttaagtagagatggggatttcaccatggttggncaggctgggtggtcnaactcctgacctcaggtggatctgcccgtctcggccnccaaagtgctgggattacag

SEQ ID NO: 112059 - DNA, 1170 bp, Homo sapiens
gcaaactgtgactttcaattgcaagcatatctggagctatattgcccccaggcctctggtaaaaagaaatgtatgttcttgcaggaggaacccccaacccaggccttatggaattccagccagcaggatccctagactataagctcatagtggaaaatcacagcacacacaatagaaggggcctcagaagttatggccaaaagaagcacacctgcgaagactcagatgttagaataggaaatgcaaatatgtttaatgtgtttgaagaaacaaaggagaagctaaaaagcataaataagcaagagagtatcacaggctaagcagataataaatgaaccaaatagaacctctaaaaatgaaaaatgtaataattgaaattcaaaacttaatggaagtaatcttgatccctacctcacaccccatagaaaattaactcaatgaatcatagacccaaacatgaaattcaaaactatgaaacataggaaaaaagttttgtgactataggttaagtaaacatttcttagatatgacaccaaaaatagagcctataaaaggaaaaaaattggcaagtcatactttaataaaattaaaccttcttgctatgtgaaaaccattgtttagagaatgaaaagacaagttaccaggagaaaacctttgccagtcatgtagctgattaaggacgtgtaaccagaacatacaaaaaactgtcaaagctcactaatacaaaaacaacttattttgtacagtgggcaacagatttgagcagacactccaccaaagaagctctctaggtggcaaataagcactgtcctctgggaaatgcaaataaaaatcacaatgagaaactactgcacacccgtgagaatgccttaaaaaaaaaaaagacaagaccaaaaccaagtgttagtgagggtgtggaacaacagaaattctcataccttgttggtgggactacaagatagtggagccctctggaatcagtttggcagtttcttataaaataaaacaatcatttactgtatgacccagcaatcctgcccctcattctttataccagagaaatgaagacatatgtccacacaataaccaaatactgtaaccacaatgaaaaatgatgcaagtgttcacagaagctttattcatttacctaaaactgaaagcaaccacctg

SEQ ID NO: 112060 - DNA, 368 bp, Homo sapiens
tttgaagaactttaatgatgaaattttccctaatgaaagcaatagtgtttatccaggttatggattctattgtcttaattccaatctttcaattctataaaaataatagctcatatatgaaaagatgctcaatgtacatccttagtcattaggaaaataaaaatcaaaactgtaacaagataccacttcacaccccctaagatagctaatttttttttaaagatagacaataacaagtgttggtaacaatgtggagaaattacaacctcacaagtggccggtgggaatttaaaatagtgcagccactttgtaaaacagtcttgtatagggttaaatatagagttaagataccatataacccagtgatt

SEQ ID NO: 112061 - DNA, 507 bp, Homo sapiens
ctggagacggggtcttgctctgtcacccgggttgaagtgcagtggcacacagtcatggctcactgcagtctcgacctcctgggagtaagtgatcctcccacctcagcttgctaagtagctgtgactacaggtgtgcaccaccacaccagctaatttttaaaaattttttctagagatgggggtctcactttgttgtccaggctggtctcgaactcctggggctcaagcgatcctcccactttggcctcccaaagtgctgggattacagacgtgagccaccatgccagacacacttttatgtagagtgagctgctactatactccaaagtggtcaggtgaatggccacccaatttgatatcagtatttgttgaataaataaagtgagatggagatttagcagctgaatggtcctttaagtggacagaccccccaagagagttcaagcccaaaaatacccaatgtgttgagttctgctgaatcatgacagcctgctgcatgcagccagg

SEQ ID NO: 112062 - DNA, 923 bp, Homo sapiens
tgcggccgccggccctcgccaccccgcctgcccactcccgccgccgccccgctctcgctttccccccggcctcccctcgccccttcccctcccccttcccggcgcactcggggggctgggaacgagctgccatgtgatgcgcgtcccctccgcgagctttcggtgacccacgaactgcccacctcgccggctgccgggagggggtctgcgagccggtgaagacgcggggaatgagggaggcggtaaaaggtacgcaaagtttctccggtcgagttgcagctgtctgcttcagaaagtgagggctccaggaatgagggagaatcttcaagaacttcctcgcactgtgacatgtctgatcccttgctcccatccctgcagcatgaacaaggtggacactcactgacctgtcacaaggttgccccacaaaactttggggtccatgtctgaatggattgccagagccttctcatctctcccttcgcgcagttccctgcatcgtaagactcgaaggcagcacaggacctggaaaaattacatggtgtgaacggcatgtctgtggatgagaagcctgactccccccatgtatgtgtatgagtccacagtccactgcaccaacatcctcctgggcctcaatgaccagcggaaaaaggatattctctgtgacgtgactttgatcgtggagaggaaggagttccgggcccaccgggctgtgctggccgcatgcagtgaatatttttggcaggcgctggttggacagacaaaaaatgatttggtggtcagcttgcctgaggaggtacagtaatttggtttgtgtgattgttaatgaatgtttattgacttacagaaaactggctgactaggagctagaagatgtactaggtgccatgtccccactcaggagttgatgtccaagtcacatgtta

SEQ ID NO: 112063 - DNA, 1722 bp, Homo sapiens
  misc_feature (1)...(1722): n = a,t,c or g
attcgcgttcatntacnnnnncggtggaattccaggcatgagctactgcgcccagcctgattgtttgacttatgaagtatatacctatctatgaacaagaactgaaggagctttaccccagaatgaagagtttctctggatggaacggcagagtcggaggagaattattcctttaatttttatttctgttgatgttgcaattgtttttatgcagtgcaagnnnnnnnnnnnnnnnnnnnnnnnnnnnnnnnnnnnnngcatgcaagctgtgaatgtttatgcatactcaggaggaagccttctcagggtcactgtttccggaaactgaccttgaaaacagacctgcatttaaatatcacagatgtactttgacgaatgaggaagtaagagacatagaatggtaactaaattcatcagggtattatatattgagcaactgattcttctgggaaagctgcacctgtttcttttttttgaggaaacacctctcttcccccactgtcaggccatgttctctatagagttctggtctcctgagtcatgttaatcaataaattctcatttttgtttaagccagtttggattcgatttcccatcactctccactaggaaatttttactgattcaggatagttagccagctaggaagagccagctctgcagcccactgtgggtgacagcgcctaggtcaggagttcttaccaagcctgcagataggtgcaacaaaaggaagcttggggcaagtggcttcattcataaaggggaagactatcaggaaggcaagcagagcccgtcagaagccagccctggaaaaagaaaaaggctctaggtccagcaagtgaatgtgatatttttcactttgaagatgggagccaggggaatgaaaggagaaaggaagaaagaaatcaaacccatgacataaaaagaatgcctatgcccttctgagtcagacacttacaggtaatccaaaaacttgagaaaaaaattgctgttatacattacccgttatgtcaacaaatccccttgtagctttgaatatactgggtaatttcctctgaggatttcttactccgaagaaattcacgtctgtaattaataaatataattaaaatttaccctagtactgtgatagagctgtcgtatatcacaatgaacatttataaaggcgtattgaattgttgaattttattatacttcaataaaattgccaaaagatttaccacaaaacttaggagaattcccgttattctcatataattatttgttatttctattagtgacaacatgtgtagttatttaaaattaaatcttcaggttagcttttttcttgaaataaaacatgcaatacaatcaaagagtttgatttacagtaaatataggatggagcttttgttttttggaattaagcagtggtgactaaatctagtcgctagggttatatgaaagctactggcagtaaagagaactatatttaaaataataggccagacgcagtggctcacatccaggagttcaagactagcctgggcaacatggcaaaaccccatctccacaaaaaatacaaaaattagccgggcatggtgccacacctctgtagtcccagctactcaggaggctgaagggggaggatcacctgagcccggggaggtagaggctgcactgagccatgatcaggctgctacactccagcctgggcaacagactgagacccagtctcaaaag

SEQ ID NO: 112064 - DNA, 418 bp, Homo sapiens
ccgatctccggtaaccccgcggcgcgattttagaatccaaacccctagagggcttcgtccagtgtcaagaagcggagaagggcagggggcccgagttctactacagacccccgcggccccccaaaggtgcctgctaggtgccggcgcaggagagccaggatgtccacgggagccgcccggcggcgcctttaattggggctccggctaactctgaggacacgcatttggtggacccaaagactgatccgccggacagccagacggggttagcggagcaatgcgcacgactaaaaagcgacctgcaaccgacgattcttctactcaaatcaaaagagccgacagatcagaagaaaatgtttcagacggttccccaaatgccggttctggggagcagacgcccaagaagcctgggctcaga

SEQ ID NO: 112065 - DNA, 589 bp, Homo sapiens
  misc_feature (1)...(589): n = a,t,c or g
ctgaaggcccttcaggaaatacctggtgcagtgattccatgattctactgaactttctgaattagtgtttctccaaaggaattgtgcccctgggtttcattctgagaccatattcattcaacacatgtatattgagtatacctgctgtctacatggcactgcactaggtcctgaacagcagtgagtaaaatggcccctgtccttattggtgttcctttataggtatgggagaagacaataaacagataagcaaataaatacagctgacccctgaacaacacagaggttagcaccaatcccccatgcaatcaaaaatatacatatggtcaggcacagtggctcacacctgtaatcccagcactttgggaggcccgaagtggatggatcacttgaggtcaggagttcaagacaagccctggccaacattggtgatacccccatctctactaaaaaatacaaaaactttagcccggggcgttgggtgggcccacgtcttacaattcccagcttacccggagaaggcttgaaggnaagggagacttgcatggaacccggggaggccagaagggttttcaagttgaagcccaag

SEQ ID NO: 112066 - DNA, 991 bp, Homo sapiens
  misc_feature (1)...(991): n = a,t,c or g
gggtagactgaaggcgcttctcctgctcaaggtccaaggaaccggtttaatgtcggtttcaacaaggcttttcggaagccagcccgttctttcacaagtaccaggccagcatggtccaggtcggccaaagcccagagcacagtgcattcncacagctacaaagagggggctcgatgggtgccactcaactcccacacccacaagtgtttcctgcccctcactgggttctccccccagctctttttttgggccagggtcaggggttttgcagcaaagtcagggagggctgtccctgcactaggtggctaggaggcctctgcactggctggttcaagagctgtccacctatacacagccctccacctgtggtgttcaatacagaagacagtagcccggcttactgtggctactgtnnnnnnnnnnnnnnnnnnnnnnnnnnnnnnnnagtgtgaaaaacgcaacagggtatgaagaggtagtagnnnnnnnnnnnnnnnnnnnnnnnnnngatccccaaagttaattttatctgcttccctgctttttaagaatgccgttgctagaaaaattaacattacatggagccacttaggttccattatatttggacagctttactctagaaaatggtaaacagcctccacctgacttcaacccccacctctcccaggtgtctgtccacacccttctccttcacaactcacagtattagctggttttcactgcctctcctcaagcccagttcgcactgcttcgccctctctttagttccttccgtttagcgcttccctcccccgcactggcttcccagtctcccggccttactgtctgcctccccgagcccagttaagttatcccccccccgctctccccagctccgcccgtgtcccccgctgaccttacagagcaactccctccctgagatgacnccgnncgctgacctctcnccgtgcgttggcctcgtccacgatctgcactaagcacgtgacgc

SEQ ID NO: 112067 - DNA, 396 bp, Homo sapiens
  misc_feature (1)...(396): n = a,t,c or g
tttcgtctaaggaatagggtatgaggagtgaagggaatttcattgtaagctttgtactgtttgaccttttcacttacgtaggtgtattattttcnnnnnnnnnnnnnnnnngaaaagggggtccccctaacccccccnnnnnnnnnnnaagggggggaatcggggcaaagggaaannnnnnnnnnngggataagggcatttttcgggctaaaccccccgaaagggggggaaaaaggggcccccccaccaaggagggggaggttttttttggattttnnnnnnnnnngggggttcccccgggtaaccggggggggctgaaatttttgacccggggaaccccccaatggggccccccaaagggggaagaaaaacggggggagnnnnnnnnnnnnaccc

SEQ ID NO: 112068 - DNA, 459 bp, Homo sapiens
  misc_feature (1)...(459): n = a,t,c or g
ntcaagggaagtctaaacatggaaatgaagggtcaatacttgccatcataanaatgtaagaaagtaaaaaatccacaggtcttgtaaaataattacaccaacgaaactacaaagcaatgtgataacaattaacattactacaggaataaaacctcnnnnnnnnnnnnnnnnnnnnnnnnnnnnnnnnnnnnnnnnnnnnnnnnnnnnnnnnnnnnnnnnnggacgaatttagaaaacaagatccaactatatgctgcttacaataaactcaccttagtggtaaagaaacttacagactgaagaaaggggtgcaaaaagatactccatgcaaacggaaaccaaaaacaagtaggagtagctatacttagatcagataaagctgactttaaatcaaaaacagtaaaaaaatacacaaagttattataaagggaagtcgtcgaaccgggaatcgggacgtct

SEQ ID NO: 112069 - DNA, 397 bp, Homo sapiens
tccgatcagcagggtccagggaccgttgcaggttcttgggcagggggagaaacaaacaaaccaaaaccacaggcggttttgtctttcagatgggaaacactcaggcatcaacaggctcacccttgaaatgcatcctaagccactgggaccaatttgacccacaaaccctgaaaaagaggtggctcatttttttctatactacagcctggccccaatttctctctctgatggggaaaaatggccacctgagggaagtataaactacagtactatcctgcagcctgaccttttctgtaagagggaaggcaaatggagtgaaataccttatgtataagtattcttttcattgaaggagaatacccaacgaaatcgtcgacccgggaaaaccgcagtcgta

SEQ ID NO: 112070 - DNA, 490 bp, Homo sapiens
  misc_feature (1)...(490): n = a,t,c or g
tttcgtggcaaggtggtgactgtgcatctggagaaggtatgtgaggcccagcccttctagcctggggtgttgatggaagtagaagggaggatgtgtgcttagtttactcaggagccatgctgggggcattgtgggattatcttaatccccatgacaacactctttaaagtagatctgtctctattttattttcttaaagacaaggtctcactctgttgcccaggctgaagtgcagtggcaccttcttagctcactgcagccttgaacccttggggcccaagcaattctctcgccttcgtcctcctgagtgggcttgagactacaggtgtacaccaccacggttcggcttaatttttgtttattaaattttttttgtaggagaccggggggtctcactatattttcccaggggntggtctttgaactncccggggcctcaagtgatccttcacaaccttgggccttcccaaagtgcttgaggattaccagg

SEQ ID NO: 112071 - DNA, 617 bp, Homo sapiens
  misc_feature (1)...(617): n = a,t,c or g
caaaaaccnccgcttgtttcccaattnggaancaccaanaaagcntgcacactttggagccgagcagcagatcacttgaggtcaggagttcgagaccagcctgccaacatgttgaaatcctgtctctactgaaaaaacaaaaagtagccaggcatggtgcacatgcctgtaatcccagctgctcgggaggctgaggcaagagaatcacttgaacccgggaggtggaggttgcagtgagctgagatcacgccactgcacttcagcctaggtgacagagtgagactctgtctcaaaaaagaaaaaaggaaanaaaaaaagcaaaaaaaagcattgcaaacattgtgacaaaatgagaggggggaatttactcccttgaaatctaggaggagctatccatactgtaaactcattcttctgttaagtgtccttcaaaaccagaggaaaataatgtgaccaatgaagaagcactggacctgttgctataactgttgaaaggaaggaaggaaggatttggaaaatctggacattcaaaaataccaacgctaaaaatccacactacccagtctggctgtcatactcacttttatttcttctcgtgccgaattcttcagacggtg

SEQ ID NO: 112072 - DNA, 443 bp, Homo sapiens
  misc_feature (1)...(443): n = a,t,c or g
aacgacgccgttgaggaattcggcacgagcaannnnnnnnnnnnnnnnnnnnnnnnnnnnnnnnncaagttctttgctagactgaccaagaaaaaatgaagaaannnnnnnnnnnnnnnnnnnnnnnnnnnnnnnnnnnnnnnnnnnnnnnnnnnnnnnnnnnnnnnnnnnnnnnnnnnnnnnnnnnnnnnnnnnnnnnnnnnnnnnnnnnnnnnnnnnnnnnnnnnnnnnnnntctttcctagaaatatataaattactgaaactgaagaattagaaaatctaatagagcagtaacaaataaggagatttaattaggaatttaaaaacttcccacaacaaaagcccagagccaaatggcttcaccagagatttctaccaaacatctaaggaagaattaacaccattccttcacaaaccgtcccagaaaatagaagagggaat

SEQ ID NO: 112073 - DNA, 463 bp, Homo sapiens
  misc_feature (1)...(463): n = a,t,c or g
gtgcagtgtcgtggaatttctagcacgaaaggtctgaaaatccaaaaacccaaatgcttcctctcgtccaaggtatcacttttcttcgccagcaggggaacaaaactggatgaagaatcattttgacaaatggacagaagtagccttcagaaggtgagtaataacggactcctctgagctaaaggaacacgttctaacaaacagaatgcagggaagctaagaaccttgaaaaaagttagatgaattgctagcaggggtaaccagtttggataacagcannnnnnnnnnnnnnnnnnnnnnngacacagctcaaagatttcgtgaagcatacacaagtatcgatggccaaatcgataaagcggaagagacaatatcggagattnnnnnnnnnnnnnnnnnnnnnnnnnnnnnnnnnnnnnnnnnnnnnnnnnnnnnnnnnnnnnnnnnnnnnnnnnnnngggag

SEQ ID NO: 112074 - DNA, 424 bp, Homo sapiens
  misc_feature (1)...(424): n = a,t,c or g
ggagggagtgggggtttttttttnttttnnnnnnnnnnnnnnnnnnnnnnnnnnnnnnnnnnnnnnnnnnnnnnnnnnnnnnnnnnnnnnnnnaaaacttcacagttactttaatctgcacgggttccggggaactcctctgcccctccccgctccccttcaccagcctcccaccgacctggcgtccccaactcagcccaaggagctgtcagggattggaggcggctgggtcctccggcagaacactaagacgggcccccggggcggcccggctctgcccggggccgaggcagcgacagcagatgcccgaccccgaggagcccactcccagtgcgggctgagggtcagcagccccgggaggtggccccgagccccggcggtcgcagtgggggcagcttgtcctgaattccaccacgctggacta

SEQ ID NO: 112075 - DNA, 424 bp, Homo sapiens
  misc_feature (1)...(424): n = a,t,c or g
naaaaccaaaaaaataaaccggggggggtgggggatcccgttatttcccgggtttccggggggggagggggggggatttctttaaacccannnnnnnnnnnnnncaggagcaaaaaattgggcccttcccttccaggcgggggnnnnnnnnnnnnnnttccttttccnnnnnnnnnnnnnnnnnnngagccaagtaaatctacaattagtagaagtaaagaaataacaaggataagagcagaaatcaatgaatgagaaaagtgcccataacagagataattaatagtcaaaaactggtttatggaatagattagcaaacttgataaaccttggagccaaactaccaataaaaaacaagaagaaaaacacaaatgccaggaacaaaaaggggtttctaattataaaccctacctcgtgccaagca

SEQ ID NO: 112076 - DNA, 763 bp, Homo sapiens
ttttttttttaagagacaaggtttcaatatattgcccaagctagactcaaactcctggcctcaagcaatcctcctgcctcagcctcctaagaggctggtaactaccgacaggtgcacaccactacgcttggctccctgtcctatggcggaggttgcactgaagccagagattgtgcccattgcactcccaccctgggcgacagagccaaaccctgtctcaaacaacaacaaaatccccttaaggctctttccctagcaaccaaacgtttttcccattttgttaggaatgggaagaagagaggaaataactggctaagtaactactctacatcaagcacggttacaaggcattttccaccattatttcaattttaatgaaagctgctcatgaaattaggtttactgggtcacagttttcaagatgaggaacctgggacaggtgaagggacagaattggaacccagttctgtcataccacagatgccccacctgttctacactggcctgtcaagaataacaataataaaaattattattttagagacagagtcttgctctgttggccaggtggactgcagtggcacgacctcggctcactgaaaccttcgactcccagggttcaagcgattctcctgcctcagtctcccgactagctgggattacaggtgcccaccaccacgctcagctaatttaaaaaatatttttagcagagatgggggtttcaccatgttgggccaggctggatctcaatctcctgacctcg

SEQ ID NO: 112077 - DNA, 358 bp, Homo sapiens
gccaaaagatgaaagcttcatgcccatcatggcatttttaataacatcaaactaatggctgcatccaaagtgtcccctcagatgcggcaagtgggagtcatgacacagccactccacgatgccacaggggaaatgtcttgtgatggctgttaggtgaaaaaaaggataaaaaaaaactatgccttctggtattgtaccttcataaagcaaataataatgatgaatactattcctcatgaagtgccaggcatctttttttttgagatgaagtctcgctctgttgcccaggctggagtacagtagtgcgatctcagctcactgcaacctccgcctcccgggctcaagcaattctcctgcc

SEQ ID NO: 112078 - DNA, 600 bp, Homo sapiens
  misc_feature (1)...(600): n = a,t,c or g
taaagcataaggcctggtgcagtggctcatgcctgtaatcccaacattttaggancccaaggccggaggatcacttgagcacaggagttcgaggctgcaggctgcagtaagctatgattgtgccactgcattccagcctaggcaaccaagtgagaccctgtctctaaaagtgaacaaacaaataaatgtaaagcataaagctataatttttagaagataacattggaaaaaatcctcaggacctaaggttccagtgaaaggtttttaagacataaccccaaaagtaccattcataaatggaaaaattgatgttagacttcatcaaaatttaaaattcatgttctctgaaagaccttggtaagaggataaaaagacaagctacagactgggtgaaaatatttataaactacatattcagcttaagggctagcatctagaatatataaagaaccctcaaaattcaacagttaaaaaaagttagaaaatgggcaaaaaacataaagagacatttcactaaagaagatagatgacagataagcacataaaaagatattcaacaatgcatctcagaatgttcctccaaatttgaaaaaaaaaaaa

SEQ ID NO: 112079 - DNA, 1753 bp, Homo sapiens
  misc_feature (1)...(1753): n = a,t,c or g
tcccatctttttatattttctccattttccctccccctgggaacctgggcctggattatctcatccatcttcaggattactgacagtcttatgactaatcctaacagatcctactcttacagatacacccacgtattcgttctcttttttattggtttttctttattttccctttcgctttcatttagtttcatttttgcctttccttagctctatctttgactccctgacacttctcttcctgcctcttttcacgcttatggacctcaggtgcccagagtgagatgaatgacaatcccatgggcagctccttcctggctgtgccaggcatttccatttctaattcagtcgttcatgtgtccattcattctttctgtcattctttcatttcaatacttattcttttatttatggacctcaggtgcacagaattggattaaccataatctgcggttcccggagccttctgcacactggtccgtgtggggctgtcttttgtttgttaatttctccccctggggatttggtgcaggatttatttaactatctcaggaacccagttttgaattagtcataattcttgctgccttctctcctctttttgtccttgcgtggtccactctcccacatatttatgtctttatttattcattcaatatgtttgtattgcttatatacatcctgtcatacgtttccatattctctcctctcttgctttctcttttgggccttgagtgcacaggatagtgaaaatcatccattctcattcgttcggctgaacgaattctattcaggtcactcctctattcaggtatctgtgcttttattgatgaacctcaacgtttactgtttattatatttaatgggtaaaactgtctcattatatttcagtgcttgtccaagaagtgccttttctttcatatgcctacttcacttttcctttcttttcttacatctctccccctctcgttcttccaattttcccattcctcactccttttcttgcatcctatggaatgcacgcatttattctttcattcagtcttacacttgtggtcatttaaaaaacaaacttcagagccacaggtttgaattaatgtggatggcttgtgctaaaccagtcccctttcatcaacttatttgatctaattatttattatctctttcacttccttttttcctattttcattttttcccatcctattgtttctttccaccannnnnnnnnnnnnnnnnnnnnnnnnntggagatctgcacccaggatcaatgaccctcatccctgtctacaatgccctcctcatcggtcaatgcaaatcttttctgtcgttcaatcattcatgcattcaccgtgcatccattcagtctttctttctatgtaaatacttatttttacacttctcgaaggcaggtgcacctaactggatacatcgtaatctgcaactaatgggccctctctctgtggccccactcctccctcccatgtgtatgctttgagccgttccttagttgagtaggtgattgaccataccagcagcactggtgccaattaagcggtctgcttggttcacacagcctttcattcctgttctagcatggctctgtcttaaatctgcatgcatgtatttattccttaatatattacctctcttcctttcttcctttttacatttcttcccattttttattgtttctctctctctcactctctcaatcattctctcttgcactttgtcttcggagctcattgccat

SEQ ID NO: 112080 - DNA, 1443 bp, Homo sapiens
ggtcaccaaggcttctggacggaaacgggtaatgagttacacatcttacaaatacacgttagcatgtgttgtctcaacagtccaagggtttttattattggactacaggtctaatcttctaaagggaattccccaccattaaagagcatctcaagttagatcaccaagagatcacaagctaaaaccagaagtttttttgtcattgtgggggtggaacagttactaattgcctatatttttaaagggaaacatttttttcactgggctgctccgttgaaaaaaatcgaagcagaacacttgcccaaagtcacagtggctcaaactggaaattgcaccaaaacttggcatactggttctgaaatccatagttttagcccttatgtatactggttaactctggacggaagaaatatctacgttctgaagtgcagagtgagtgaaaggaagaattcagtgaatacattgataccttgatattatctccattgtggctacatgttacttttcctcacaagactgatataagtgcaatacagaatgattggactgggagaaaaatggctcagaaaactttgcaaaagtacgactgtatgtaaagataagtattcaacattaaatgggaaggaggagatgcaagcagtttaatatatagaattttataattttaggcctgcaagggaccttataaaacatgagcaatggaacacttttttccaaactaaatttccgtgcagtggaacttggcccgactctgtccttcctctattctaagcaccctactctagcccggctgctctgagttcagtttgttacaaatatggacacgaaagtaccacaggctttgcacagcttaattgaagtttccccttcacaccatggtaaaaaaacatactgggatggaagggcttgtgtctagaacaagaacaagaaataaactcttggtcacttactaatatttcaaaatcacaaagcagaattttgcttggatgttttaggaaaacatccttggaaatttaactgcttgcagcttctacacttcttcattaaatgctgtctggctaataaaaagtgccatgttgcagctttattttattttcattttttggagatagaccctcactgtgtcaacccaggctggagtgcagtggtacaatctctgctcactgcaacctccacctcctgggctcaggtgattgtcctgcctcagcctcctgagtagctggggttacgggcatccaccaccacacccagctagtttttgtatttttagtagagggggtttttgccatgttggccaggctgggcatggtggcatggtaatctcagctacttgggaggctgaggcgggaggatcgcctgagcccatgagatggaggttgcagtgagctgagatcacaccactgcactctagcatgggtgacagagcaagactctgtctcaaaa

SEQ ID NO: 112081 - DNA, 384 bp, Homo sapiens
  misc_feature (1)...(384): n = a,t,c or g
tgcgtacgggctgaggatttttgatgcgtacgctcctgctactgactcaccgctgttcgctctcgacgaggaacacgtcgctcatgaagcccgcgcgcaacagccatggcttttatggataccggaaaaacacccgtggagccggaggtggcaatacaccgaattcgaatcaccctagccagccgcaacgtacaatccttggaaaaggtgtgcgctgacttgatacgacgcgcacaagatgagaatctcagagcgaaaggaccatgttcgaatgcctaccaagactttgagaatcactacctgaaaaactccttgtggtgaaggctctaagacgtgctgatcgtttccacatgagaattcacaagcgactgattgacttgcacn

SEQ ID NO: 112082 - DNA, 375 bp, Homo sapiens
tttttttggacagttatgctcttgttgcccaggctagagtgcaatggcgcaatctagctcactgcaacctccgctacctgggttcaagtgattcgcctgcctcagcctcctgagtagctgggattacaggcatgcaccatcatgcccagctaattttgtatttttagtagagactgggtttctccatgttggtcaggctggtctcgaactcccgatctcagggtgatccacccgccttggtctcccaaagtgctgggattacaggcgtgagccattgcgctcgaccaacacaggaaatttttaaaaacatatttatatacaaggccttgatgccttatctcaaggtatttaaattgaattatttaaagctagact

SEQ ID NO: 112083 - DNA, 353 bp, Homo sapiens
gtaagaagctgcggaacggatttaattactgcaaagtcctgcggttgcccgggatggtgtgcattcacctagagcgcttccggcacgaggtgatgtactcattcaagatcaacaggcacgtctccttccccctcgaggggctcgacctgcgcccctttctttgccaaggagtgcacatcccagatcaccacctacgacctcctctcggtcatctgccaccacggcacggtaggcagtgggcactacatcgcctactgccagaacgtgatcaatgggcagtggtacgagtttgatgaccagtacgtcacataagtccaccagacggtggtgcagaccgccgaaggctacttcct

SEQ ID NO: 112084 - DNA, 418 bp, Homo sapiens
  misc_feature (1)...(418): n = a,t,c or g
gcgcgttggaacgaaccggaattaatgggtcgacccacgcgtgcgcggacgcgtggatggcgaagcgcggcatgaatctttcttgcggcccgggtgaacacggccaaaggattgagtggcgaaaatggaagcaacagaagaaagaggagnnnnnnnnnnntggaaggatctcaagctgatgaaaaaactggagcggcagcgggcacaggaggaacaggcaaagcgcctggaagaggaggaggcaccggcagaaaaggaggaccgcgggcggccctacacactgagcgtagccctgccgggctccatcctggacaatgctcagtcgccggagcttcgcacctacttggccggacaaattgccaaagcctgtgccatcttctgaggggatgagatcgtggggtttgatgaggagggccag

SEQ ID NO: 112085 - DNA, 390 bp, Homo sapiens
  misc_feature (1)...(390): n = a,t,c or g
ctagttctnnnnnnnnnnnnnnnnnnnnnnnnnnnnnnnnnnnnnnnnnnnnnnnnnnnnnnnnnnnnnnnnnnnnnnggttttcgggggggttttttaaaaaacctttaaaggttaaacttttgccataaaaacgggggttgggggggcccccagacccccaaattggaaccccccccctggggggcccagggggggggaacccttcccaaccattttccccnnnnnnnnnncttccccctttaacccccaccgcccagaacctggggggggaagaatcctttatttgatttcggaaggggggggttgggggggacccaaaatttgcccctggccttccaccggggggaaaaaaaccctggtggaaaaaaacctcctggggtttttttn

SEQ ID NO: 112086 - DNA, 387 bp, Homo sapiens
  misc_feature (1)...(387): n = a,t,c or g
annnnnnnnnnnnnnnnnnnnnnnnnnnnnnnnnnnnnnnnnnnnnnnnnnnnnnnnnnnnnnnnnnnnnnnnnnnnnnnnnnnnnnnnnnnnnnnnnnnnnnnccctccgccagtggactgatttttgacaaaggtgccaagaatactaactgggggaaagacagtttcttcaataaatgatacaaaagaaattggatatatatctacaggcagaagaatgaaacgagactcccacttgtcaccctatacaaaaatcagctcaaaatggatcaaagacctaaatgtaagaactgaaacgataaaactaccaggagaaaacaaagatgaaacacttcaggacattggtctgggaaaagattttatgaatgagacctcaaaaactnnn

SEQ ID NO: 112087 - DNA, 604 bp, Homo sapiens
ggaagaattaattgccgattcttaggatcttgagtgttaatccagttctaacactgaccgtcctgaggaaaatgcctatggcccagggtgacctgctggttttccttttcacaccttctctttcatgattaccattctttaaagggaagacatacctttcacctaccccttatcagagtccccaagtagggggataattaaaaatactgctggggcctgcctgggaaaagtgagtgacctcctaatgactgggcaaaaggaacccttttgccaaatgttccccccatttttgcattcagtaaaattggggcagggtggctcatgccctgtaatcccaagcgctttgggaagggctggggcaggcagatccagttgagccccaggagttcaagaccagcctgggcaacatgtcaaatcctcatttttacaaacaaaacaaaacaaaattagctggacgcggtggcacgtgcctgtagttccagctacttggagggcactgaagtgtgggaggattgcctgagcttagggagtttgaggctgcagtgagccatgatcatgccagtgtactccagcctggacaatgtagtgagaccctgtctcaaaa

SEQ ID NO: 112088 - DNA, 383 bp, Homo sapiens
taatggcaacagtcttgggagcaaggtgagacctaccagcccaccactgacggctgaagggaaattttcaaacagcctctggggcccctttctgtcaatcaagcggcctcttccctgtctgggactcggtttcctcttctataaaaagcgagtgccacccttcatgattctagttacagagttgagaagggttacacgaatccagccaatctgggcctctggggctgccctggatggatttagaagggtcagcaaagagttgttttgaaaaaaacagcaacaggctgggcgcagtggctcacatctgtaaccccaacattttgggaagctgaggcgggtggattgcttgagaccaggagttcaagaccagactagacaacatg

SEQ ID NO: 112089 - DNA, 485 bp, Homo sapiens
aagccccctgtgctgttgatctcataaatagaacttgtatttatatttattttcattttagtctgtcttcttggttgctgttgatagacactaaaagagtattagatattatctaagtttgaatataaggctataaatatttaataatttttaaaatagtattcttggtaattgaattattcttctgtttaaaggcagaagaaataattgaacatcatcctgagtttttctgtaggaatcagagcccaatattttgaaacaaatgcataatctaagtcaaatggaaagaaatataaaaagtaacattattacttcttgttttcttcagtatttaacaatccttttttttcttcccttgcccagacaagagtgaggttgctcatcggtttaaagatttgggagaagaaaatttcaaagccttgtaagttaaaatattgatgaatcaaatttaatgtttctaatagtgttgtttattattctaaagg

SEQ ID NO: 112090 - DNA, 1256 bp, Homo sapiens
gggctatccatgttcttattttagggatggaaaagggagggtgggtgggtgagaacacggcagaggtgggatatgcattctgccaatctagatccgcagccctgttagtcccctagtggccatgtgggcttctctgatacacggctcagttgggggatgagggctcgggggtagattcccggcttccgaagaggcgtgagaattctgttcccccacatcaccgcgtcctttcttctgcccgatttccccggaaagtgtagcagaggcgctgtgtttggaagtcccgctatcacggccccccagatggggcctggacgatgcctcctgacggccttgttgcttctgaccctggcgccaccgccggaagcctcccagtactgcggccgccttgaatactggaacccagacaacaagtgctgcagcagctgcctgcaacgcttcgggccgcccccctgcccggaggccggtccctgccaaggggcactgccccctcacacctggaaacccaggcgcccctagctcccaggagcgcagctcaccagcaagttccattgcctggaggacccctgagcctgtccctcagcaggcctggccgaatttccttccgctcgtggtgctggtcctgctcctgaccttggcggtgatagcgatcctcctgtttattctgctctggcatctctgctggcccaaggagaaagccgacccctatccctatcctggcttggtctgcggagtccccaacacccacaccccttcctcctcgcatctgtcctccccaggcgccctggagacaggggacacatggaaggaggcctcactacttccactcctgagcagggaactgtccagtctggcgtcacaacccctgtctcgcctcctggatgagctggaggtgctggaagagctgattgtactgctggaccctgagcctgggccaggtgggggtatggcccatggcactactcgacacctggccgcaagatatgggctgcctgctgcctggtccacctttgcctattcgctgaggccgagtcgctcgccgctgcgggctctgattgagatggtggtggcaagggagccctctgcctccctgggccagcttggcacacacctcgcccagctagggcgggcagatgcattgcgggtgctgtccaagcttggctcatctggggtttgctgggcttaacacccaataaagaactttgctgactactaagcccagtatacaattagcactgaagtacttattgaagtac

SEQ ID NO: 112091 - DNA, 396 bp, Homo sapiens
  misc_feature (1)...(396): n = a,t,c or g
caatttgtttatctgtgctgtgtagatggagatgaattgtttctaatttttagctaatacagataaagatactatgaatattcatgtataagtttttatatggacatatgcattcttttcttttgagtgaattcctgggaatggaatggtaggtagattttttttactttttgttttttattttattttttgttttttatttttttttaagacagagtctcactctgttgtccaggctggagtgcagtggtgcaatcttggctcactgcaacctccacctcccaggttcaagcaattctcctgccacagcctcataagtagctgggattacaggagtgtgccaccaagcccaggtaattttttaaatttnttagtagcaatgggggtttcaccatg

SEQ ID NO: 112092 - DNA, 1331 bp, Homo sapiens
  misc_feature (1)...(1331): n = a,t,c or g
ttttttttttttcgggacacaaacatgtcattcgttttattcacaaaacagcctggtttcctaaaacaatacaaacagcatgttcatcagcaggaagctggccgtgggccaggggggcccaggccgcagggggccccctggggacccactcctccacctagcaggggaccacgcaaaagaagccctttctttctgttgccaattagcaaggcccagaaaaaaaggacttaattttctctaaagaaaagtagccagggattgggaaatatcggagatggggctccccaagatcgcaaatggataaacggaaccagaactttcatttttttttcccaaaatccactgttgggggtggggggatccccaantctcgggaactgtggtgtgcagctccagctgggcctggggtgctccccttccccccttctgtgaagctcccctgctgggcagnttttgcacgccgtggatgggataccggagcggctttctacacggcgcccatcaacattcccctttaatgaacgtgaagtggattccccccaggcaaactatgcactatttccatggtcggaaagaaatcaaaggaagtttaaatgagggtggagttaaactgtgcctaaattacagtagtgccttattagtaactagatttcaaaaggttacagaaaaatttacattctctacacaaaaactgcatctcctgcacagacaacatcgacatcgacacaggaaggaaactgattgtccattctttgccccaggaagtctcgggtactttatagattcgtctttaatctcttttttgttgttgttcttccgaaaaagcagtttaaatttttttctttttctttttatgctagggacgtggagatgttaaaacgacaacaaaaaatatatatataaaaacaggaatgaaatctgtgagagaatatttttgggtctaaagacgggtgcatccgtttgtcttcgcccgaatcccttgctggagaccacacgagcagtgacattgcacggagagggcagctttgggttccgccgccgtcactgaaaccaccggaaggcggctcccgtcggaagcatcaccttctggcgggggcggggagacaaaaacaaggagagagttcagtcagggtccgggtaggcctgggagcaaagacgttcccccatggatggcctcatggcggagggacaggcatggaggaagagcagccacccctcggagctcctgccaccccagccagggccaaaggagggcgcttgacctgctgggctgctggaaggccccgaggactctgaggcctcctgagccactgtgcccaggaaccctcctt

SEQ ID NO: 112093 - DNA, 580 bp, Homo sapiens
tgagcatcccaaatgccacatccccataatgcaaccagacccggtcctcccggatccaggggaagggtcggagctcagtgggtgagcaagaaaagccacgtggaagaagtacgcggccagatggctcaaagacaaactttcccctgctcaggcttgcacccagacacgacaccatgcatctcctcggcccctggctcctgctcctgggtaaggactgtggcctgggctagtactggggttctgggatgtcagtgggcactggaggaggaggaaagacccaggcagagaggcgtcaacatagggtagggcgggggcagcggtgtgtatagataaatgcacatacaaatatatacgtttcccatatatacatacacttctctcattgcatcctgctggctttgtgtatctctgtattcctcccactatctggagagggaattctttagtctttagaaagctctctgctgggtgcagtggctcatgcctgaaatctcagcactttgtgaggctgaggtgggaggatcacttgaggtcaggagttcaaggccagcttggacaacatagcaagacccctatctct

SEQ ID NO: 112094 - DNA, 325 bp, Homo sapiens
ctggagactgcagaacacacagaacatgataaaagtagcattttaaatcagtgagggaatttattcaaagggtgttgggataactgggtagccatctggaaaaaaataaagttggatctataatttatacctccaccagaatgaaatttaaatggatcaaactttaaaaggcaaagtcacaaaagaaatagaactaagcaggggagaaaacttgtatagtttagaatgaaagtttttttttcttgacataaaaccctgaaacaataaaaaaaacaagattcataagttagattgtataaaaaataaaagattttgcatacttaaa

SEQ ID NO: 112095 - DNA, 421 bp, Homo sapiens
  misc_feature (1)...(421): n = a,t,c or g
ggcctaataatttcataaatcaaatccctggatatttgttttgagaaaaccggcaagccattaactaatttactcaagaaaaataagatattacaaatacataaaataagataccaatagaaaaaattataagagaatacattgcagcagtcaagaaagatacaataatagacttgagcaaataggaaaacgtttcttatccttggataaaatgactcaacatcaaaaatatgtccattctcccagttaatttgttgaagtgtcataatcccaataaaattaccaccaagcttttttatagacctaggcatgttgacactaaaggtcatatggaaaaacaaacatgcaagaattgccaggaaaccactggaaagaaaaactaanagagaacattagccttcccagctatgtacgctaaagc

SEQ ID NO: 112096 - DNA, 369 bp, Homo sapiens
  misc_feature (1)...(369): n = a,t,c or g
agagttagagagtagtgtaccctccagtttggggtaagcagggcgttcgtattgactgacttgctttctctttgaagagggcacagggcaggagttatctgctgagggtaaagggaaggaaggagccttccttagggggataaggagaggattttgagcgtaaaagagagaaaagtgaaggtctccctagaatagtccccaagaaagaaagagagaaagagagagaggagacagagaggtagagagagagggnnnnnnnnnnnnnnnnnnnnngaaagaacccaagaaagtgaaagagaaagaaaaagagagctagagaaagaaagaaggacacccaaccnnnnnnnnnnnnnnnnnnnnnnnnnnnnn

SEQ ID NO: 112097 - DNA, 1034 bp, Homo sapiens
gcctgattacgttcactggccgcggctgggaaacaggtctttatcttttttatatgccggcagcgtggttgcttttagaaaaacggtgacatttttacactaccgcattctggggcattatggaaacctggtagctttttttgatggcgggttggtacagttttcaacagggtaagacttcgccttgtggcggagttggggagcagctgtcattgggaacagcttttgcttttctcattatttaaacactgaagtatttcctgtggtataatggacactgttatctataaagtacctcagttaaattgttgaccaaaattaagtctgttgaggcagaataatttgataaaggctaatcaaagccaaatgtgaggattggcctggggacgcaccaacaagttgtatatgtttcaaagtctattacaagttgggacacttcataagtttagggaggccaggtgccgtggcttatgcctataattccacgtacttgggagggagtgcctgaggctaggaatctgggaccaacctgggcgacatagggagacttcatgtctaaaataaataaataaataaattattagctgggcatagtggtgcccaattgtagttcccagtactcagaagtgtgagtcaggaagatcgtttgaatccaggagttcgacaccaacctgggtaacataatgagacccctctcatctcaaaaaactaacaaattaagaaaaatagactggtttctgcaaggggtaaaaacaataagaaaaaataaatttaaaaaccctgagtggacatttttttcaaagaagacatacaaatgggccggaaagccaaatggaaaagggacttaatatccctaatcattagagaaattcaaatcaaaaccacaattacatgttacctcatacatgcaaggatgggtactatcaagagagattagtgttagagtacagagaaaaaggaagctttgtatactgttggtgggaatgtacattggtacagccattgtgaaaaggcgaatatggctggttgatgca

SEQ ID NO: 112098 - DNA, 699 bp, Homo sapiens
gggacatacaaacccttggacaaacacttgtcactgtgtgccaagaagctgaaaaattcttcttgcctcagagccataattacacttttggtagcatattctaaggaagtcatcccatgtccaggaaaagctgcaatgtgtcaggatgttcattccagcaatatttatagtagtgaaaaactgaaagcaaccaaatgcccaagaaaaaaattacagtatatccactggatggaatagtatgaagccatttaggacagattgtgaaaaccctgtggcagtatggggaatgtttgctaagttatatgaaaagatgaggacacaaaatagcataacatacattccccaaggattttagtcagcaaagtctagaatgaagaaaattaggacaaacacccaattcccttaacaaataaaactggggccaggtatggtgactcacgcctgtaatcccagcactttgagaggccaaggcttgtgtccaggagttcgagaccaacctggacaacatggtaaaaccccgtggtctacaaaaaatacaaaaattagttgggcatggtggtgtgtctatagtcccagctactcaggaggctgaggtgggaggatcaattgagcccgggaggtcaaggctgcagtgagctgtgatcgtgccagtgcattccagtctgggcagcagagtgagatcctgtctcaaaaaaaaaa

SEQ ID NO: 112099 - DNA, 1443 bp, Homo sapiens
ttatagatatgaaaagaaggctttattttttttctaacaactcacaggagcagccatttctgattcatacatgtctcttgactcccagtgctcacttttgcaagcttcacttaatgccgtgcaaatcaccccaatctccagggtcttctttcttcccagttctccttacctaaaacacagcttctcaagggcagtcaccctccacaacccatggcttcaattgctttctccattctctgagaacaatagaattttaaatggttttatttcatgtattagctttattttatacaaggtgcctcacctgctgtaaccatagattcaaagttgctccatgaaagtaataaatgaaaaatggtgattttttagcatgtaaattttaggaaatttccccagtttacgcttaaatggcttgatttagtgtgtatgttatttttggaaacatatgttgggatgtcacaagtggacttagcctacagagagtttatattcaacttttgaccagagagttccattttgaatgtggacactgtgagttaaaaaactatcttttcctccttacctatttctcttcctacattctcggccaggaggaaggcactgctacatacccagtcttccccagcagagcctggaggcagctctgttttccttctacttcccctcttctttcacatctcatgaccaagcacttcctattctgtctcccaaatgatcacagactttttcctccacttttgtcactgccactgcccttaggcattactctgcctttaggaggaaagtctcttaattgggtttgggttggctttcctttcagtcttttatttatacaggaccactaacacggcacatctggacagaggacttttttcacctttttatggttcaatgactgaaattcccagaataaaattaaaaccaccccagcatcaaatttgaggtcaaatagaggtggatttgtatcccaggttcatatactatccagcagtatggtctcagaaaactgacctccttaagcctttgtttgtgtatctgcctacactcattgagagttgggactatttcacacatacagtgcctggcatgtagaagggacttaatcaatgttgaaagaaggggaggcattttaaaatccacatcaaaaaaatgttgttctgtttgggagtggtggctcacgcctgcaatcccggcactttgggaggccaaggcgggtggatcacctgaggtcaggagttcgagatcaacctgagcaacatggtgaaaccccatctctactaaaaatacaaacattagctgagcatgggggcgggatcctgtaatcccagctacttgggaggcttaggcacttgaatgagaatcacttggccccaggaggtggaggttgcagtgagcaatgattgtgccactacctgggcaacagagtgagactctgtctcaaaa

SEQ ID NO: 112100 - DNA, 738 bp, Homo sapiens
cgattttcttacccagcgttacctttctgaattcagtatgagaagagctgcggcccaggtgcagcccagaatcctcagcaccgaacacatgttgagaacgggtttcagaaagagctcagacactgacctatgtctgtagatccgcctctcacctgccggtgcaggggaggctgccacaggctcagagcagatttccatggcctccccttctgaccgctctccactgtcccctggggcttctgctgaggctgggcttctgcttttctttggcttatcaaaccggaagtccgcggggtacaggtgcatcctcaccatgtgatccttccggtctctgctggtcttgaacttctctgtgcagccttctaccaagcactgatacatgtcctgcctctcagacaggatctggaagagcgaatcgtgccactccaggatgtgggcgtccagcaggtgtccggaagggaaggcccgcttgcaaaaggagcaaacatttccgtgcagcgtgtggtagtggtgctcgtagtcgtccagggcatcgaacacctggcagcagccggccacctggcaggcaaacgcgggcaccctgggcttctcaggcacgtcggccacctgcatgatcacgtcctggaggtagaggtggcgctgcacgtccccatcctcgaagaactggtgctcccgcgggaagcgcacggggcgcgcaacgaagcgaaagggcgcggccccagccgcgggatcccgctc

SEQ ID NO: 112101 - DNA, 368 bp, Homo sapiens
  misc_feature (1)...(368): n = a,t,c or g
ctttgaaacccccgcgaaaggccctaaccttgggcctgttaaagggaacccaccaaaggtttttcccaaaaaaagcccaccacacacccagcctttttaaccccccggattccaaaaaaagtttttaaaaaaatggccccaaaattggtaaaaacccgggttgcccttattgttatccaggccccccggcccccccctttccaaaaattttttcccccctttttaggttaatttttccaaaaccccccccgggcccttccnnnnnnnnnnnctacccaccctaacccnnnnnnnnnnnnnnnnnnnnnnnnnnnnnnnnnnnnnnnnnnnnnnnnnnnnnnnnnnnnnnnnnnnnnnnnnnnnnnnnn

SEQ ID NO: 112102 - DNA, 535 bp, Homo sapiens
cattaacttgaaactacagaccaggattcttcctgaactagaaataagagagaatttccttatcccaataaaggatgtctacagaaaacctgtggctaatgttctacttagtggttaagacagacataatggagagttggcatattactgaattggaagacaaaaaaatattattctacccacctttatgatagatccaatgcattctcaatatcctaacaggttcttaaaaataaaaattgacagggtggttccaatatttatatagaaatccaaaagaatagtcaaaatattttttaaaatttattaaaatttttatattttttactttttgtttttggaaacaggcgcccactctgtcacccaggttggtacgcagcggtgcaatcatagttcactgcagccttgaactcttgggctcaagtgatccttctgcctccctgtagagatggggtagagcctcctgagtcggctaggattataggtgtgcaccacaccatctggatacttaaatttttttgtttttgtttttgga

SEQ ID NO: 112103 - DNA, 368 bp, Homo sapiens
  misc_feature (1)...(368): n = a,t,c or g
gaggacatgatcttattacttataaagacctaaaaactccaccaaaaaactgatagaacataaaacaaattcagtaaagttgcaggttacaaaatcaacatacaaaaatcagtagcatttatatgtgccaacagggaacaatctgaaaaatcaagaaagtaannnnnnnnnnnnnnnnnnnnnnnnnnnnnnnnnnnnnnnnnnnnnnnnnnnnnnnnnnnnnnnnnnnnnnnnnnnnnnnnnnnnnnnnnnnnnnnnnnnnnnnnnnnnnnnnnnnnnnnnnnnnnnnnnnnnnnnnnnnnnnnnnnnnnnnnnnnnnnnnnnnnnnnnnacaatactactacaaactacttacagattcaatgcag

SEQ ID NO: 112104 - DNA, 409 bp, Homo sapiens
ggcacgagcaacatttcaccaggagtcctaaacaggtagtaagataagaaatagaaaaggtataaagataggaagagaagaaatgaaactgatattattcacaaattatatattagtttgtagagaaaacctaaaataatgttcaagctattggcattaatatcaaggtattaagcaacagttgctggatgtaacatctatatacctcccactcccaaattgaattttgatatagttggttaaatattgttagcaaaaaagttatttacaaatgcaaataacaatataaggtacttgggaataaatctaataataaatgatgggcatcacctttctaaagaaatttatatcatttcattaaaagaaaattaaatcttaaaagtagatttatcattttcatggatagatg

SEQ ID NO: 112105 - DNA, 666 bp, Homo sapiens
tcgaaaggtggtttccccaggttaagagagacggcgtcaccctgggccactccagcctcatgctccctgcctggggaccaggtggtggctacaggtgtgcctcggtttcctcccctgggaagtagagcggccacgaggaccaagggtgatgtccgcggagcgtcccagcagagctgggatgctggaagcacctaggggcccactcacctcccgccagaaggcgcctctggtagagggcacttacctcactaggatggagccccagagagcccccgccccgctggaacctccacacctttctgagaggtaggcagggggcaggctgagggtggctcggcacccccccacctgtagctgccctgaactcctggcccgagctctcctccccagcaccgcctcaggccatgaccctaccacctccaggagcattcgggccggcttggggccacagcaaaatccacaggcctgggagaggcacaggataaatgaagggaacggtggaggaactgagccaaagtcaaacgtccagccctgcggggctgtccaacctctgggtcatggtcacggggaggccacagtggccggactgaggctcctgtggtctcggagtttcctaactgggttaggaaaagcaggaattacggcacatcgattagggtctcagtt

SEQ ID NO: 112106 - DNA, 706 bp, Homo sapiens
ttttggatacaggggtgtcactatgttgtccaggctggccacaaactcctgggctcaagcaatcctccttccttggcctcccaagtagctgagataacacccacaagccaccatgcccagcttcagcttgctcttaatgtgagactgttaaagtgctttaaaggatcacctaaaaatacacataaaccttacaactctgagatatgggaatgcagcctctattagtgaaataactaaatgatatagtttaaaggaaataatacatccaatacttttcaaaggaacagggaggatttcccagagtatttatacagagaggtgaacatgggttagaaacctagtaattacccatttagccaccagatggtgtccctacatcatctacaggcaagaaggtaaaactacattgaacacaaataagaaactgaggaatgattaagcaagtgaagactcaaaatctggcgacacagatgggtatgttgggtatccacagcagattgaagcaaagtgctgccctagtgcaagcccttagaaagttctgttatttatttacttatttatttatttatatttttgagacagagtcttgctctgtcacctaggctaaagcacagtggtgtgaacacaactcactgtagcctcaacctcttgggctcaagcgatccttccacctcagcctcccgagtggctgggactacaggtgtgc

SEQ ID NO: 112107 - DNA, 380 bp, Homo sapiens
atgcaggtgttagccaccacgcctggccaggattattagttttattaatcccaaaaaccatctggtgattccattgatttccagtattcattttctattttctaattcatttatttttatctgatctttatttcctttcttctgcttattttgtgtttcattcgctcttagctgaggtcattaatttgagacctttttcttgtcaaatgaatataaatgtttcgtgctagaaatgtttctgtaattgctatattaactgtatcaaataatttgtttcacattttatttgtattgcattgactttttaaaaatttattatttaattcacagattctttagaaaagtgttatttagtttacaaatatttagagatttcttag

SEQ ID NO: 112108 - DNA, 1277 bp, Homo sapiens
ttttctattttgaaatggagtctcactgccccgcgggctggatcaagccctcagctcaaaaacaaacaaacaaacaaacaaacaaacaaaaaaccttcaaatgaatgtaagaattattattttttaaagtacagctttaaaaatgccccttacaaatacatcagtgttatattaaggcaaacccacttcagaagcacaaagtttaattctttataattccaagaaatatgtgaatgttaaaaaaaacccaaacacccgaaaagggatcaaactcaagatagtttgtaacattttattgcaaaaagaagggcagagaacagtctttttcttcgtacctgttcaccgcagtaatttttagcagctctcctgtgcaaagaagtctaatcaatgaatcagcgtataggccacaaataccttctcagttgcggtttcacctagaatacaagcactcagaagcacaaatttaactgaagtgagaaaaccaggccattttgtagcttcagtttttctcccagtaatatattaatttcttgaaatagcctaataatttagttctactattcaaaacagaaggcccaattctgggagaacaattattatagaagtcaaactaatttcaatcatattagtattaggaattcatattaggcatagcctaataattcatattagtagaggtgggaggattcacttgagcctaggagtttgacaccagcctgggcaagacagtgagactccatcttcttaattcttttttttaaataaagaaattcagagaggagaaggaagcggacttgatatgtgtctatccaaggacaaattttgctgtgcctgtacatacaacacaactatgaaccttccttcacgcagctcacaatctagtagcgagaagaaactacgaaaacatgagcccccacgatgaggaaaaaggcgcatatcagagaaaagaaaaatgctgcgatgatccaatggcaggagcagcgtgcatccactttctttgttttttttgagatggggtttcgctctgtctcccaggctggagtgccgtggcttggatctcagctcaatgcagcctcaacctcccagggctggaagtgatcttcccatcccagcctcccaagtagctaggaactacagggcgtggcaccactacacgtttactttttgttaggaaacagggttttcacaatgttgccaaggctggcatcctgaagggcgggtggggctttcttcctacagagatgaaaggcagaagaagctcagagcccaaagcaaag

SEQ ID NO: 112109 - DNA, 405 bp, Homo sapiens
  misc_feature (1)...(405): n = a,t,c or g
gtcctggaacagcgctactgatcaccaagtagccacaaaatataataaaccctcagcacttgctcagtagttttgtgaaagtctcaagtaaaagagacacaaacaaaaaattctttttcgtgaagaactccaaaaataaaattctctagagatnnnnnnnnnnnnnnngggaaatgcccccctgatttatggaaaaaaatttcttggccccggggggttgttaccccacccggggtaaacacaacccgggttaacccaaaaacggcttttgaccccaaaaggtcttcaagcccttttttggaaaaaagccaaaaaccaggattaattgaaggtttgacccacttaaaaaccctgattttgaatcctctaaaaaaagatgaaagtggggaaattcctgttctcttt

SEQ ID NO: 112110 - DNA, 646 bp, Homo sapiens
cgttctctccctatattccattaaaaataaaaaaaagattcttttcaataaaatccgtaagtaagagaaaaacccaagagacaaagctacaacattttgaaagctggaaaacagatggataaataagaactgaaagtttgtcagtgagagaactgaaaaggctggctcccaggccagtggtaggaaacaagagcagagttaaaagcaggagcagatcgatgtaagacggcggactgtcaaaccagaaaccacccctactcctaatccccctgtgaagaggagaaaacagaatctaatcaggaggttgctaacccagaacactatattaaacatcctctacagaacagatgggcactctggtttttttaaaaaagataaaagcaaaacttgacaagcaaacctgccgctgatctctaagtttgatcctgttgacttttgggctctgtacaaccatatccagttgtctagtaatttaatgtctggctgtgactactcactttttaaggatggtgttgagcccatgtgggaagatgagaaaaacaaacagggaggatgatggttaatttacattgaacaaccagcagagatgaagggccctcaatcacttttggctagagactctactgtgtcttattggaaaatcttt

SEQ ID NO: 112111 - DNA, 1056 bp, Homo sapiens
gtttgcgcttggctgggcatgttccgcggctaccctgcggcgcgccgggcccgggctttccgcaccccgcgaccctagaagccaccgaaccgccggcgggccatggccactctgccgagcgcagagcgccgcgcgttcgcgctcaagatcaacaggtattcttcagcggaaataaggaaacagtttactctcccaccaaaccttggccagtaccatcgacagagcataagtacctctggcttcccctctcttcaactacctcagttttatgaccctgtggagccagtggactttgaaggacttctgatgacacacctgaacagcctggatgtgcagcttgcccaggagctcggggacttcactgatgacgacttggacgtggtgttcacgacaaaggaatgtaggactttgcagccctctttgccggaggaaggggggttgaactggaccctcatgtcagggactgtgttcagacctacatccgtgagtggctaatcgtgaaccggaaaaaccaaggaagtccagaaatctgtggctttaaaaagactggatctcgaaaagattttcacaagacgcttccgaaacagacgtttgagtcggaaaccttggagtgcagtgaacccgctgctcaggcaggcccccgccacttaaacgtgctgtgcgacgtgtctgggaaaggccccgtcactgcctgtgactttgacctccgcagcctgcagcctgacaagcggctagaaaacctcctgcagcaagtgagtgccgaggactttgagaagcagaacgaggaggcccggaggaccaacaggcaggccgagctctttgccctttacccatcagtggacgaggaggatgctgtggaaatacgtccagtaccagaatgtcccaaggaacacctgggcaacagaatattggtcaagttgctgaccttgaagttcgagattgaaattgagcccctgtttgccagcattgccctctacgatgttaaagaaaggaaaaagatctcagaaaattgtcacggtgacctgaactctgaccagtgcaaaggatttctgcgag

SEQ ID NO: 112112 - DNA, 1273 bp, Homo sapiens
ttttttttaggttttaccattcgggattattcttagcagatgctgcagataacgtggagagcatatgaaagacacatgtttgaaccaatagtgacatacaggtgctaagttctgcagtaggggaagggcagagagccatggagaaggcctggcccaatcctggagcctcagaaaaaaagttccttattaaattgctgttttagctaagacttgtgggatcggtagtagttggagatcccagagaggatgtgaccgagtcagccagggaaaaatttggtcctggcacccatggcagagttgagtgatccagtccttctgtctcctctggctggaagtccaccaaatctggggaatgtccagtgggggaaggggggctgacaatgatcatagaaccttcacctgtcctcacatgttcctctgtgtattctgcaaagcctctgcctcagtctcctcttttggaaagtgggattggaaaccaacatctgcttctctcccaggactgctctctgagcttctgtgaccttgtaaaataggctgcattgcaccaaacatgcaggaggaatcccagcatcctcctgtgcacaaggctggtttcttcccatccttttccttgttctgcctctctcctcctctccaagagataaatacatgtggacccagcaggggcctatgtttgcaaaagctctcaggtgattctcatgcagccagcctggctctggcactgagttctttgacacttctgggggcgcatttactattgaggaaggtcactgtgtgctgaaaggcatgactcatcttccattcctttcttccatgaagcaaggcgcatgggtcgactgagctgggagagtccacagtgtcagcctcccccacgcttccctccctccttattccttgtgtgctgtactttgtcttgatttcctgtactctcagcagatagctgtgatccactgcaaaggacatcaaaaagaaaacacagccattgcccatagtagccagaaagctgattcagcagctcaggtctcagcgagactttcagtcacgcctgtaaacttgaagcctacagtctcctttccacagccagatctgcctgacaatcccgtatactcaacaacaacagaaaaactggcttcagatctcagagccaataaaaatcaggaaagttagtagattcttcctgactctggaatcttcataccctgaacttaaaccagttacctacagtctaccacccatttaagaagagcaaagttacctcagctcctccggaggg

SEQ ID NO: 112113 - DNA, 839 bp, Homo sapiens
ttctcatgtacccaactctgtccctttgtcctatgtacattgctttaaatcatatttttctgtcacggtgtacaaggatgataaataggtgccaagtggagcacccaagtgtgatgagcccccttacggtggaatggagtgtagaagctttctgatctcataaattgaaggctatcttcagtcattatgtattttacataaattaatcctcatataaccccaagaggtaaattagtataattatccttcattgggggtgacaaagttgagacacagaagaatcaaaaaactcttccaggatcaaccagtaaaaggcagaccttggattcgaaccaggcaacctggctcaaatatcagttttaattactacactctgtactttccaagatttgtaaacagtttgacaatgcatgccgatttaaaactatgaagaaacaaacacaatttttcacaacacctctcaaatctaatgggtcctcactgtcaagattaaattccaggctgatgacactgtaaggtcacatggccagctgtgctataggcctggtcaaggccagagcctgggtttgcagagaagcatacacacagccaaaccaggagacttactctgtcttcctgactcattccctctacgttgtttttctcctagtccaacctaaggtgactgtatatccttcaaagacccagcccctgcagcaccacaacctcctggtctgctctgtgagtggtttctatccaggcagcattgaagtcaggtggttcctgaacggccaggaagagaaggctggggtggtgtccacgggcctgatccagaatggagactggaccttccagaccct

SEQ ID NO: 112114 - DNA, 369 bp, Homo sapiens
  misc_feature (1)...(369): n = a,t,c or g
gagactcagagaatctaatagttgatatttacagtaaagggattctttgtatatgttggctgaatgtctttaactggaaagttgcttaaaacatacattttcccattttccnnnnnnnnnnngggacgccttttccccccggccggggggcccgggggacccgggggggaaatctagttaactaacgggaaccttggccccccccgtttaggcaaatggggggccttaaccccccaaacaggggaaaatacgggggggaaccccccattttaaaaattttttgggagaaaaagggggttccccattttggccaacccgggtctgaacccctggccccaagggaaccaagggacccccccctttcacccc

SEQ ID NO: 112115 - DNA, 1248 bp, Homo sapiens
  misc_feature (1)...(1248): n = a,t,c or g
gttaagcaggtagtcacccgtgnnagtgggatagtgttatctgaaagtggacttgaattggttgtaaatgtatattgaggaattaggtgtgttctttgttaagcaggtagtcttatttgtgggatagtgggatagtgttatttgaaagtggacttgaattggttgtaaatgttactgaggaattaggtgttttgtttgttaagcaggtagtcttatttgtgggatagttggatagtgttatttgaaagtggacttgaattggttgtaaatgtatattgcaaattctgtggcaactagttaaaaaaaagttttaaaaagagaagtacatgctaagaaagacagggaaaatgtagtcatctaaaatcatcaaagaaaactgcaaaaggcagaaaaagagtggtagacaaaagaatgaagactgaggagaatgaatagaaaacagtaacaaatatagtagatattagtccaatgatatcaataatcactttgaatgttaatggtatgaatgtaccaattcaaaggtagagattgtcagagtctatcaaaagacagacacatcttgtttcactgcactttgctttattgtgttttgtgaccatgtgttttacgtattgaaggtttgtggccaccctgcaataagcaggtctcactgggcaccattgttcctacagcacgtgctcacttcacgtctctgtgtcacatttcggtcattctcacagtattttaagatttttatttattggaatctgttgtgggtgatcttgtaaatccagtaatctttaatggctactgttgtcattgttttggggggaccaccaatcacacccaggataagacagcaaacaattgacaaatgcgtttgttctgactgccccaccaacgggccatttctctttctctctctttttctcaggcttctttttattaatattaaaatgtggcccaattaataacccctacaatagccctcctatatgttcaagtgaaagaagagttgcatgtcctgtcactttaaaccaaaaggaagaaataattaagccttagtgaggaaggcatgctgtaagcaagacaggccagtagctagacctcatgcaacaaacacttagccaagttgtgaatgcaaacgaagtgttctggaaagaaatttaaagtactgctccagtgaacacatgaatgataaaaagctaaacaatcttgctgctgttatgaagaaagtttagttggtctagatagaagatgaaaaaaaaa

SEQ ID NO: 112116 - DNA, 1817 bp, Homo sapiens
  misc_feature (1)...(1817): n = a,t,c or g
acccattcttaccaagggccgggctagacctggggacagtctcagccatctcctcgntgggtcnacacaattccacccccacccccacccccaggctggccctcacggaagaacaacagctgatgtttgagaaactgactctgtattgcgacagctacatccagctcatccccatttccttcgtgctgggtgagttcccccttctggctgttccgggtccctgtggccgcccaggctccagacaggccaggggaggatcacgaggagctgcggcaaggggctggggagggggcgggggaacgccagcggcaggttcggcgcctctctgtagggaaaggtgcggactgcagccagagaaactgaagttagacgttaggtaagacgtcctgccgttagcaatgaaaaccccattttctgagggaagcgctgacatcatggtccctggagcccctgcgcgggaggggagggggtctggcggatttctgggaccagcagggggacccccgggtgacagaacccttggggctctcgcgcctccatgcgaggctctgcctgcctctcgctcccgagcgccttccaggagggctgggggctaggcccgctcgcagcagaaagctggaggagccgaggcatcgccgggcgctgggccctgggctctggccgcagcctggcccctcgcccctcgccccccgcccctcctgcccaggcttctacgtgacgctggtcgtgacccgctggtggaaccagtacgagaacctgccgtggcccgaccgcctcatgagcctggtgtcgggcttcgtcgaaggcaaggacgagcaaggccggctgctgcggcgcacgctcatccgctacgccaacctgggcaacgtgctcatcctgcgcagcgtcagcaccgcagtctacaagcgcttccccagcgcccagcacctggtgcaagcaggtgggcggaccgggagcaacggggaggcaccgggcagagccaggggccgagatgggcgcggcaggaatggaagatgggtggagccaaagtcccccggactcgggggattgggtggagccaggagtggggtgtggtcaagatttgggggtccaattgggcgggacagagtcgggtgtctgaaggtggggcgaggccaggagcccaccctccgagagtaggagtctgaggcagggctaaggacccttgagggataatggaaagaagggtgacggcttgggaactggtgaggtactagggtctacttccctctgcccttgcccctcttgatctccggtttccactctggaggtatgggacattggtctctgacaccccctcagcctggcctgacctggtccctggttaaataagacagaccccnggcctaggccgtggtggtcctccgccctgtaaatccccagtgcctttaaggaggcaaaggtgggaaagatcgcttgagccccagctgtttgaagacgcccctgagcaacatagcgagacccccatctctacaaaaacattaaaaatttagcagggcatggtggcgtgtgcctgtagtctgaggctgagtatcgggaggctgaggcaggaggatcacttgagcccagcagttccaggctgcagtgcgctaagattcgcaaccgctgcactccaacctcggtgacagagccagaccctttctctggaaataaataaataccctgcccacatgctcagcccagaacagcacctagtaggtgctcagaaatttttttgttgttgaaagaaagaggatggcaaaggagtgctgaggttcctataggtcagccctcgtaccaagcagggcgtaatgagactc

SEQ ID NO: 112117 - DNA, 959 bp, Homo sapiens
  misc_feature (1)...(959): n = a,t,c or g
ttttttttttttgagatggagttttcactcttatcgcccaggctggggtgcaatggcgcaaccttgctggtcactgcaacctctgcctcctgggttcaagaaattctcctgccttagcctcccaagtcactgggattacaggtgcccaccaccataccaggctaatttttgtatttttagtggagatgcggtttcaccatgttggccgggccagtctcgaactcctgacgtcaagtgatcttcccgcctcgactcctgatatcaagtgatcttcccgcctcggcctcccagagtgctgagattacagacgtgaacccatgcctggccaggaattttgttttttaggaaggctttctactaatggaattcctggccttgagaggatgttactttcgaaggaaaggatttttttgttattaaaagagccacctaagcttgaagattcccttgagaacaagtactgtcctgcgggtttcatggcctttcttccatttgtggttcttgcgaagtggaatttaaatgacatcttatcaagatggataaaccctagtttcccagtgctggaatatagaaaatggatggccaagtaaatcccactcagcacccatagtccaggcatggggacctcaacacacctgagcaccagacatcacctttcattctggacctaccatgaaagacttctgaatccaggaagagaaactgactgggcaacatgttattcagatggggtcttcttatgttgcncaggttggtctcaaattcctaggctcaagtgattccgnccacctctgcctcccaaagtgctgggattacgggcatgagccagcgcatctggccaccttattttctattactggctcaatgtaatggctccatctcaggaacagccaatgaaagagatgcacaggacaaggtaagtggggaggggcacagagcttccatgccctctgttgggc

SEQ ID NO: 112118 - DNA, 784 bp, Homo sapiens
  misc_feature (1)...(784): n = a,t,c or g
agaaacagagtttcaccatgttggccaggctggagaattgctgtaatagttttccaactggcccctgtccttcctctctcttgctctcctcccatctcatctgcacctagcagccagagtgatcctgatactctcggcctttacttccacctccctcagagcagcagcctgtcaaaacaccagattacaacaaatttagtttaaaggtctcaattagcgttattggcaattctagaatcaggcaacagactcattgaatcaggaacagattcactccataaaatacagagagtgctgcaatgagctgggtagaagaggttagttttatagacaggaaggggctgtcaaaggcagaaagaaatgaagaacaaaaaaaaagattgattttttttttttttgagacaggatctcactctgtcatccaggctgaagtccaatcccacaatcatggctcactgcagccaccacctcctgagctcaagtgatcctcccatctaagcccccaagtagctaggactacaggagcacaccaccacacctgggctaatttttgtattttttgtgggagacagggttttcagtatgttacccagggttgggactgggaaacccttgggcttcaaggcaattttggcctgccttcagccttcccaaagtgtctggggattacagggcgtgacaaccttggcacaggggccagatttcatcattttcaaagtttacttttctattattgcggggcccggaacaggggtngggtttgacattcagttttttttttttt

SEQ ID NO: 112119 - DNA, 799 bp, Homo sapiens
  misc_feature (1)...(799): n = a,t,c or g
gaaggaaaggctcggatcccctgatccccaggaggaggggacccggctgcctcccggttgggaccgcgcgagggcggggcgcggaaggatccgggagggccgtgctccgctacccagtatatatctgtccccagtccccggggccgcctcattccctgtcctcggatcacagtctcttctcactacagtgtcgccgcctctgcctgcgtagccccggccatggctctgtagcctcgacccctttgtgcccccggcccgtctccgcgctcaccacgcctgcgctctccgctcccaccttctttcttcagccgagagccgccgccgcctctccttgctgcagccatgggagtcttccactttcgccttggtgcccttgtcttcgcccacctgaggcatcctcccaaancctcgtgcccaantgctgggtgcaggcttctcctgttggccatcagttgcccagcaactgtgctaacaagccatgttcactcctgggcgaccctgggggctgggagctgggacaggggccctggttcccaggttagtggggctgggatgggcttcgtaagactatgggggaaacttcccccggcccctgcccccctgggttccctatgaggtccttgggggacgcctggagggcgggcttccagtggggggagagcccctggcaggtaagggcaggtggaaggtggagctggggagtggagggcaggggaagatgggggaggaagaactcatccatgtattcaataaataattgagagcctacaatgggccacgccctgatttaggcgctggg

SEQ ID NO: 112120 - DNA, 418 bp, Homo sapiens
acattcagccagcccactagttaactaacatagaatttataaaagtggatgttaaatggagagagagttggcctcaggtcccctgaaatcttgtaggattaacttctctgaggaaaagaaaaatcaggtttgcattttgtattaatattctgcttttaggaagtaatagaaatacaagttgaagattgtctttacttacaaaattatattttaattttttttgagacatagtcttgctctgtcacccagtctggagtgcagtgctgtgatctcggctcactgtaaccaccatctcccagtctctagtgattctcatggctcagcctccctggttgctcagattacaagtgtatgccaccacacccagctaatttttgtattttttgtagagacagggtattgatggtgctagctctct

SEQ ID NO: 112121 - DNA, 393 bp, Homo sapiens
tttgtaactttagtaaagacagggttttaccatgttggccaggatggtcttgatctcttgaccctgtgatctgcccgtctaggcctcccaaagtgctgggattacaggggtgaaccactgcgcctggctctcttcccataaatattctatagttcaatctctcttttattcaaatctgtgtccccaaaatcacttccagagatgacttaaaccactgtgtgtcctgaccactgtgacttaaacatcacacccaggatttctccagttctctctgctttatttctccttataattctaatcctttattgacattattttagagattttagagatctatgtatttgtttgcatgatttcccctttcctccatcagactgcagccctatgaggatc

SEQ ID NO: 112122 - DNA, 816 bp, Homo sapiens
cttgcttcggacgccggattttgacgtgctctcgcgagatttgggtctcttcctaagccggggctcggcaaggagaaagcccatgcttcagttcgaggcgcaaagatcgtaaaggcccaatgcccagcaaaccgtacgagttcgagtccgtcatctctccaggggctctttctggagctgggaaatgaactcgggacctcaaggcttcaggctcagggaacctgaattattacggccagctaaaggaaattggaagttggtgggctggtcggaaagcctattccattaatcttttgttccccgttccctcaaactgaaaacctttccccagaaaaatccccaagtccgggcctagttacgccgaattgggaagaaaaaagttccagtggggaaagccatgtccgtcctttatccgccctcagagggagaattcctgcccctaagcccaacctcggaaaaagcccgtaccaaaaaataagccaaaagccgtcccccaggagcccgtactcttgacaagcttgtgcaccgatgcccatcccttgagggacttggtccttccccaagcgaaatttgtgggcaaagagaatcccgcggtcaaacctagatgggcagcccggctcgataaaggttccattttggacaaatgctacagcagaaccaatgttggaacacaaaggttgaaacctttttcctggtgtcctataaggaagctcacggggcaaggatgttaatttttggaattccccagagttttcaattgttaaacaaaaattgacttaaataaaaaagtaatatattcacagtaaaaaaaaaaaa

SEQ ID NO: 112123 - DNA, 620 bp, Homo sapiens
  misc_feature (1)...(620): n = a,t,c or g
gctgaagccgccgcaaggcctaggggcgggcccgcgtgcacgcgcttggctctttcctgtgtgtgccgccgccgacaggcagaagtgagccctcacctgtgcgcgggaggcggacgcgctgctcacctgtctttttggcttctcccatgactgccggccagtttcctgcacttgtttctctcgctttattgctggacggtgggagaagggcaaagtgcaagacggaatcgaggggcacctctgggtgttctgtacctcttttcttctttgcacttggggaagtggaggacgtgggatggaagaagggcctggacctccctccttcctcctccccaccttctcctaaggagcttgccctgcagtaagccccaactttcccttcctcttttccctctatcagagtcgtcgcccacccccctttcccaccgctcccctacccccgccttcctgccaagccgagggcgacggtgatccccagcttagtaagaaaagtaaataggccgggcgcggtanncacgcctggaatcccagcactgtgggaggccgaggcggcggatcgcttgagcccaggagaccaggttggagaccagcctaggcaacatggcgaaaccctgtctcta

SEQ ID NO: 112124 - DNA, 391 bp, Homo sapiens
  misc_feature (1)...(391): n = a,t,c or g
gagactgcatannnnnnnnnnnnnnnnnnnnnnnnnnnnnnnnnnnnnnnnnnnnnnnnnnnnnnnnnnnnnnnnnnnnnnnnnnnnnnnnnnnnnnnnnnnnnnnnnnnnnnnnnnnnnnnnnnnnnnnnnnnnnnnnnnnnnnnnnnnnnnnnnnnnnnnnnnnnnnccaacccccgccaagatacccaaatgttaaatgttaataaagatgtgagagccatcagggaaccacaaaataaaaccatgagataccacaacacctaccagagtagctaaaagacaaaaagccagaagacaaataccaagggtgagcaagatgtggggcaactggaactctcatacattgatggagggagtgccttttagttcaaatattctggaaaactan

SEQ ID NO: 112125 - DNA, 2159 bp, Homo sapiens
ttttttttttttactggaaaaacgctttatttctattcaatatttaaaagacagttataaacaggatgcattcaatagcaagggggcagatgaacatcaggaaggaacatccatgagcttccatccacggaacctcaccatggatacgcttgtgatcaagggcctggtctcccctcaagacacggtcacagatcagagggcacaccatcctagcagtggagcaggaccagctgggacagggtccttctgtgacacctgctgcatcaccaggctgggtgaacggacacaattgccagaactcacagaatagaagtatcagcaccgaaacctcacagggaaaatgggtaagttctaagtttctccattaatagtaactctcagattaatctctgtcatccatcgcttctccaagaaatgactttttagggtgacgtgccaggcgccatgttggagggctggtggtagcggcttggggaggtgctcactctgtcggtctcactctctcacacgcttcccctggctcccttcgttcccccccaccccacttggcttgcgtgctggagggtgtgcgagggagtgggaggatgtcggggggtggggggaggcgttccggtccccaagagacccgcggagggagacggaggctgtgagggactctgggaagccatggacgtcgacaggctccaggaggcgctggaagattttgagaagagggggaaaaaggaagtttgtcctgtcctgggatcagttttctttgtcatgtagccaagactggagaaacaatgattcagtggtcccaatttaaaggctattttattttcaaactggagaaagtgatggatgatttcagaacttcagctcctgagccaagaggtcctcccaaccctaatgtcgaatatattccctttgatgaaatgaaggaaagaatactgaaaattgtcactggatttaatggtatcccttttactattcagcgactatgtgaattgttaacagatccaaggagaaactatacaggaccagacaaaatttctcagagggagtagaaaagaatgtgatgggttgttagctgtgtttatccttcttcagagaaaaacaattccaatagtttaaatccgaatgaatggtgttatgtttcctggaaattcaccaagctatactgagaggtctaatataaatgggcctgggacacccaggccactttaatcgcaccaaaggtttctttgtcagccccccatgaccaacaaatgggttgcccttgagagcacagacagcaaagaggcaattttgcagcaaaatgaggagaaaaatcacagccgactcttccgacctctggaatcagaagtttcctcagtgagcccctttgaaaaataaacatccagatgaagatgctgtggaagctgaggggcatgagggtaaaaggctcagggtttgacaaagaaggtgaagtcagagaaacagccagtcaaacgacttccagcgaaatttcttcagttatggtaggagaaacagaagcgatcatcttcatctcaggataaagacaaagatagccgttgtacccggcagcactgtacagaagaggatgaagaagaggatgaagaggaagaagaagagtcttttatgacatcaagagaaatgatcccagaaagaaataaacaagaaaaagaatctgatgatgcctcaactgtgaatgaagagacttctgaggaaaataatgaaatggaggaatctgatgtgtctcaagctgagaaagatttactacattctggaaggtagtgaaaacgaaggccctgaaagtaagtggttcttctgactgccgtgaaacagaagaattagtaggatccaattcccagtaaaactggaaagaatctttccagaatcatcccatggataatgatgacgaagccacagaagtcaccgatgaaccactggaacaagactaactatttagaaacatttagatgcagtattttacatacagttctggttttaacactgtataaaacttttgtgtaataaaatggacctttagttttacaagagaagcaggttgtaaaataaagtactttatggataattcctgaaagagttgtacatgtaagaactgtgaatatcagctcctctgggtcctgcttaccttaccgctgacttttctttct

SEQ ID NO: 112126 - DNA, 1133 bp, Homo sapiens
ccaatctgcttccatgggggttggctttctgagtgggagaaatgactctaatctggagacatttgctgagacccttgtgcctggtcacttccgctcccaggatccttgagatgcatcctttcctgagcctaggtacttcccggacatcagtaaccaagctcagtcttcatacaaagcccagaatgcctccatgtgacttcatgcctgaaagataccagtcccttggctacaaccgtgtcctggaaatccacaaggaacatctttctcctgtggtgacggcatatttccagaaacccctgctgctccaccaggggcacatggagtggctctttgatgctgaaggaaacagatacctggatttcttttccgggattgttactggtcagtgttgggcattgccaccccaaaggtgaaatgcagtggcacaaaagcagctcggccgcctgtggatcacaagcaccgtcttcttccaccctccaatgcatgaatatgcagagaagcttgccgcacttcttcctgagcctcttaaggtcattttcttggtgaacagtggctcagaagcccaatgaagctggccatgctgatggccagggcgcactcaaacaacatagacatccatttctttcagaggagcctaccatggattgcagtcctttacacacttgggtttgacaaacgtaggggatcttacaagatgggaaattcctgggtagggacaggttgccaaccaacaatgtttcccagatgtttttttcgttggcccttggggaaggaagccactgtcgagattctccagttgcaaaacaatcaggaagtgcagctgtgcaccatactgctgccaagctaaagatcagtatattgagcaattcaaagatacgctgagcacatctgtggccaaatcaattgctggatttttccgcagaacctattcaaggtgtgaatggagttgtccagtacccaaaggggtttttaaaggaagccttttgagcttggtgcgagcaaggggaaggccgtgtgcattgcaaatgaagttgcagacaggattttggaaaggtttgggctctcactttcctgggggcttccaaaacccacgaatgttcctgcctgacattgtcaccatggctaaaagggat

SEQ ID NO: 112127 - DNA, 426 bp, Homo sapiens
  misc_feature (1)...(426): n = a,t,c or g
aacttatttggnaatcagaattgaattcaaattggaaactaatggcagtaagttaactatgacctcgaggaagttcacttaagctctctgggtctcagttttctcacttgttacaatgagattaataataaaaatttatggctgagcaagtgctatgcctgtactcctagtactttgggaggccgaggaaggtggattgcttgaactcaggagtttgagaccagcctgggcaacatggtgaaaccccatctctgccaaaatacaaaaattagctgagtgtggtaatgcacacttgtggtcccagctacttgggaggctgaggtggaaggatcacctgagcgggggacgttgaaactgtagtgagctgtgatcatgcttctgcactccagcctgggtgacagagcttgactctatcttgggggggaa

SEQ ID NO: 112128 - DNA, 644 bp, Homo sapiens
gatcaattcatgcaagatataatcatattttttaattaagaaaattttttttgtagagatggggttatgctgtgttgcctggctggtctcaaactctgggtctcaaagcggtcctcctgctttggcctcctaaggtgctgggattataggcatgagccactgtgccaggcctgaggatattatcattataaatatatatgtaccccacactggatgacccagatataaagcaaatattattagatttaaagggagaaatagactctaatacaatagtagttgaggacttcactctactctcagcattggacagattttctagacattaaaaccaataaatattggatttaaattgcactttacaccaaatggacctgacatttacagaacattctaataggtgcagaacactctaatagctgcagaacacacgttcttttcatcagcacatggaacattcaccagactagttctggaacccacttcctgccttagtgttctttccaccacagtgcatgataattccgacagaacgccttttatttgtaccttattagttgtagggggaaagctttttcatgtacaaaaatgctgtaattttctgatttaataaagtaattccactgatgtttttatttaaaaaa

SEQ ID NO: 112129 - DNA, 2648 bp, Homo sapiens
  misc_feature (1)...(2648): n = a,t,c or g
acatattaactcttccacccctgtcataatacagcctgaagagatttaccatcaaatactgtttttttctctctcttaacttaatcccgaattggataatttctcttcatcttcactgtcacctctacgccatcactgtcatctctagaccgctctgctgttgagagattgatggaatcatttatgcaaactaaaatagaatgttttatctatcaaattgtatttctttgtcaatagtgttagggcacagtaggttcatttactgctggtaagggtgtaaattgttagaaactttctgaatggcagtttggtaataacaaacaaaaagcttaagtttgtgtccttaaatgccttacttcaatacccaaggcatatggcctcaataaaaaattatggaagcatgcaaagattttgttaacaaagatataatcattgcagggtagaatttagaaatttaagactgaaagatcttttcagtcacctgcagcaagaaaggagtcaaaacctatgtacgatctcaactagtaaaattttctccttgcccagggatcatgctgagtttaaggacagaaatgcaaagtgcagcctgggaaagtgtttcaacacacaaaaatagaaccacctgtatgtagtctttttgaaagcacaaaataaagagcagtcctacagggttcactgctatgtcctgaatgttgatgtcccttccaaaattcatatgttggaacctaatgtcaatgtaatagtattaagaggtggggcttttgggaagcaatggagtcatgagggcttcaccctcatgagtaggataagtacccttacaaaagaggctcagggaggcgctcttgcctcttccaccatgtaaggacacgtagcaggcacccatttctgaagaatgggccctccccagactccatatctgctggtgccttgatcttggacttagcctctaggactgtgagtgacatatttctattgtttataaattatccagtataagtaagatattttgttagagcagcctgaacgaactaagacactctaagcgggaaactcacaaaaaatatttggtagtgaaaaacagtatggtgtgttaatgtatggtgacaagtgtttgtttgcatttaaaaatgcattggagcctcgttttgattaggcagtaaaatttacctttaatacgtaagtttgacagttatatgtaatcagctttttttttttaagatggtgtgattgaggttaatgtgaactgaactttctatttctaagctgtcttcatctaattttacctttctgtggaaaatcaatacaagtcaaccatttttattgcccagttattcaaagttttattcaaagagcaaagatttgacaatgcatagaattaacattggtttgtgggccaccttctgggccagcaccaaagactgaaaaaatattttgccccccaaaagttgttattgagtcttgtcaaatcacattgctctgtcagaaggtaagacaaatcagtgtggactgagagcaaggtcagcaccgtgaanaggccattgcagttcctttaacccactggggaattcatggcagtgaaggaaggcaacacacccatgagggcaaatgggcttcaaacccaaaggaccagaggtttcagggggatatatatatatatttttttaatctgtagagatgggatctcactatcttgcccaggctggtctcgaactcttgggctcatgctgtcctacctcagacttccaagtagctgggttttctttgggctatttttttgtagagatggaggtctcgctgtgttgcccaggctggtctcaaattcctggactcaagcagtccatctgcctcagcctcccaaagtgatgggattacaggcgtgagctgctgtgcctggcagaacagtatgaagtgttaacgccaaaatttgttttagctatcatatataaatcataagcatattatttggttggttggtgttagttcattccttcaatcggatgatttaaaataaatgtttttcaagtatcctctgtgatgtatcccaaaggttagcttagaaagaaaagtacttggtgaaccattcctggtgcggagagccctgtttctgctgggcttctttggcttgggccgtttcaccatctggggtcctaaaaacaaaaaaaaaggtttttttatatggttttgaaaactatgcaagaagcagcttaatacccaccatcttttcagggaaagataactgcttgtttactcttcaaaaacacccaaatggggactggccaacattagtagttggggaacaaattgtaaaggatgggggcttggggagggagtacctaatcctcatttttgaaaaacagaaggttcaccattgttttgggtctccattgttcctttgagacttagtgagttgtagctctaataatgcaggattaaccaaacctacagatcaagagactttgtttttattttttgtgacagagtctccctctgtcacccaggctggagtgcagtggcatgatctcggctcactgcaacctccagcctcctgcgttcaagcgatcattgtgcctcagcctcccggggagctggaattacaggcgcataccaccacacctggctaatttttgtattttttgtagagatgggtt

SEQ ID NO: 112130 - DNA, 361 bp, Homo sapiens
  misc_feature (1)...(361): n = a,t,c or g
ggctgctctctggccagcacccttcnctgtgtcacctctcttgtgtccacagtctaacccatctcttcatttccctcaacctcaggtggagcctccaccaaaatgcagatttttccaaaaatccttacagggacgatcatcaccctagaggttgaacccttggatacaacagaaatatgtaaaggccaatatcaggataaggaacgaattcctcctgatcagcaaagacaagtgactggaagctggcaagtaactggaagatggacataactttctctgactacaacattcaaaaggaatttactctttttatgttgtgttgagacttcatggtagtgctaaaactaggaagaaatcttac

SEQ ID NO: 112131 - DNA, 372 bp, Homo sapiens
  misc_feature (1)...(372): n = a,t,c or g
cagtgaccgtgtctaccacgggctgcctgacgcccgcccgcctggagccgcatgccacggaggttggagcctgcccacccgccttgtcctccaggatcggagtcatcctgaggaagccccgcggcgactcgaataagtgccgcaaggtgtatggcatggagcgccgggacctttggtgcacagcctgccgctggaagaaagcctgccagcggttcctggactaagtccggctcgttcaagaacataagctaccaccttctccctccccaccccctccaggcccggggctgaaacagcccgaggacagccccaggggctggccttcaccagctgcagggtctgcttttacttggggtggggggggcgggctgn

SEQ ID NO: 112132 - DNA, 372 bp, Homo sapiens
ataatatgttaagtatgctttgaaaatgaaagaggaaagacaccccaagaagtcatgagcaggaaataaccaggaatttttacagacaagtaaacatagctaataaacataggaaaagatgatagtaattagggaaacccaaattaagacaatgagagctaattctttatccaagtagattggctaaaatcaaatctggcaataccaagggttcaagaggatgtggctcagtggtaactcttacgtattgactgtatggatgcaaactggtaaaactgctccaggaaataatttggttttcttgaaaagttgaacatggataccttttcagtatctagaaattcactcaggaaatgcttacacataagcccg

SEQ ID NO: 112133 - DNA, 470 bp, Homo sapiens
  misc_feature (1)...(470): n = a,t,c or g
actggacttgcagaagtcccagcaacatcagctggcttcacagtaaatgtttctggggtggtctatgtctagtctaatgggcaaagacagagaagttaatttctgaaatgtgaagcttccctttttgcccttaaaaaaaaattttttttttgagatggagtttcgctcattgcccaagctagagtgcaatggcgtaatctcggctcactgcaacctcctcctcccatgttcaaactattctccngcctcagcctcccaagtagctgtgattgcaggcatgtgccacacacccagctaattttgtattgttagtagagacagggtttcactgtgttgggccaggctggtttcgaactcctgaccttaggagatccacctgccttngccttcccaaagtngctgggatttacaggtgtgaaccactgttgccgggtgggccctttaaaattaattttttgcactgggaaagg

SEQ ID NO: 112134 - DNA, 840 bp, Homo sapiens
ggaggcccaagggtgcaaactatcttcgggtcgtcccgaattccgggttcatccggacacccagccgcctccaccattgccgccgaaagttcgacccccaacgaagatcaaagtcgtataccttgaggttgcaccgaaaggtgaaagtcggtgcccacttcttgccctggccccccagagatcgggccccctggggtctgtccccccaaaaaaagtttgttgatgacaatttcccaaggccaacggggtgacttggaagggccctgaggaattacagtgaaaactgaccccattccagaacaagacagggcccaggattgagggtggtgcccttctgccttttgcccttgatcattcaaaggccctcaagggaaccacccaagagacagaaagaaaccagaaaaaccatttaaccccggtgggaatatcactttttgatgagattgtcaacatttgctcgacagagtgcgggcaccggatccttagcccagagaaactctctgggaaccatttaaagagatccttggggactgccccagtccagtggggctgtaaatgttgattggccgccattcctcatgaccatcatcgagtgacatcaagcagtgtgtgctgtgggaatgcccagccgtaagtgacattttcattgttacagtaggggtgaaaggggggccgcccagtgtattcacagagataagctgggaagttttggaaatggttactggtggggtgggataatccttttaaactttttactgattttttttttctttcccccagagttaagcacaaaggaaaacatttcaataaaggatcatttgacaactggtgaaaaaaaaa

SEQ ID NO: 112135 - DNA, 360 bp, Homo sapiens
  misc_feature (1)...(360): n = a,t,c or g
ctgtgccaagcacttgatacaaacagtgtgaaatgatttgctctgtgctgatttgtggagggcacgcggggaacttgctgggaactcgctgggaacgtgggagctggtttctacattgtcactgtctgcacgtatcagctcttatttctgaatttggcttttttgcaggtccctagctgttggtagtaagtccggttataaatttttctccctttcttctgtggataagctggaacagatctatgaatgcagtaagtgtttgctttatttttccccttcttnnnnnnnnnnnnnnnggtccgctttgatttggaagcaactataaaattcaaaccctggggtggaagcccaaaccccctt

SEQ ID NO: 112136 - DNA, 712 bp, Homo sapiens
caaagcaaaccagtggccaaggccaaagtcagtggagcagggatgttactcttatgggagtgctgtcagttacataggaacaggtgtggatgatgctccttttgaaggaaagtggagtgaataattacaaattgtgatagaatccaccacacatgctaattgaaaataaattaaatagagatgtataatgtttatagtagaattcttccttctgtcttccgtgataatcagtgatgatactttggtgtatgttcaggactgaacccttcttattgtgctaacttgatggtttctttaaaaataatagtcttgccataaattatgaataagacttgtttttttagccatatactcagaagaacactagagttctccaaactgggtacgcttagttcttgctttgcccaggtagtcccacgcttactataatgttcaatttagagttctaagtataaaatatttttacttatttatttatttttgtgacagagtcttgcactgttgtccaggctggagtgcagtggtgtgatctcggctcactgcagcctccacttcctgggttcaagtgatcctcacgcctcaacctcctggagtagctgggattacaggtgtgagccatggtgcctggctaatttttttttctttttttccttttctgagacggagtctcccactgtcactccagtttgggcaacagagtgagaccctgttt

SEQ ID NO: 112137 - DNA, 412 bp, Homo sapiens
aaaacatctgggggcccatggaaaacccatttctgacccagggtgtacatttacgcccaataaagaacaccaatgtggagattgtctgctgaaaacttgctcaccttattgtgcaggtgtggagatggcttgtatgtagggctttccttctcaaaccttagaatttctgaaccaagaaaagcctgttctctctcaggtagcctctatgactcccacgtagcctgaagaccctattctatccaccgcgtgagcaccatttcaatatggctctcagctcccatgtgacggaggcagacagacattcccaagttcaaaatttgtaagcctcactacacgccttcctacaaagatgacaagcactacagcaatggttatcacagcaggcttgcccaacccgtggcccacaggccgc

SEQ ID NO: 112138 - DNA, 990 bp, Homo sapiens
  misc_feature (1)...(990): n = a,t,c or g
tttttttttttttttttcacttttgaattctgtttatatatcaagctataaaaaacctggatcctgttcaacatacatacaaaagcagtactctaaaaaataattattattatattaacaatatcaaacacgctaactcctacacacgtacaaagaccttgggcaatcctttataaccggccacttcctggcccacagtctttgtaaggcaagtacctggggaaaaggggacaagaccccaagagagccggccccaaatcctgactcaggcactgcagaggcattagcccgggctgagtcattgcctgaggatcgaaggggcccccttctcagggctgaggaagggaacttttcagggcccggggagggaggcagagcctttagggggggagcacatgccgaggcaggggaaaacgagcttcacattttccctgggggttaggagccgaggttgnccggcaggacaggggatgaacggagggttgcggtggggcagaaataactgcctcccaaagtatgtccacgtgaacagtccccagagcctggtgactatgttaggttaaacaggccagtgggaaactaaagttgcagatggaacttaaaggtggcttaatccagctgacctgaaaattagaaagacggaccctgggttcttctgggtaggcgcaaatgtgatcattaagcgtcctttaaaagcggtagagcaggccgggtacgagtgactcatgcctataatcccagcacttttaggaggctaaggcttacaagatccccttgagccccaggagttccagacaagcctaggcaacagaatgagaccctgtatccacaaaaaatatgtagctgggcgtgggggattgtctcaggggactgagacaagaggatcacttgaaccaggaggtcccaggctgcagtgagccttgatgccatgaccaggccactgcccttccagcctgggcaacacagcaagaccctgtctcaaaaaaaaaa

SEQ ID NO: 112139 - DNA, 896 bp, Homo sapiens
gggtaggagtgccacgtttggtacaggtaaggtatagtgaaccacatttcgactgtttctcagcagttacatttctgggaacgttatataacttgtggtatagccaaatccttgagctaagaagtagtggtataactgggattactgcaattgttctgagttgaagaaacttctaaaatgtgtagtgtgaaatttggcttgctgaaatcatggccagagaggtgcattttaaaacaaaaccaatagggaaatcttaaatccaaaattgccttacacatgttaaactagtttaaaataaaattttgtcaaaaggaataaaattgtgaaattgtcaaagttttgttatgtgatatcatctaatgtttgtagagatttttaaaatgtaatggtcacaattttgcaaacaatatatagaccagtatttaaaggcacacaaaaaactgttatttaaactagctcaagaaaatgatctgaatataaaacctcctatcttgggcacattataatttaaaaatattatgtatgagagatacaatgttttttcccctaaaagttgcataatttacctttttttaaattcaaaatgtgtctttaaataaaggcctgttttggccgggtgcagtgggtcacgcctgtaatcccagcgctttgggaggccaaggcgggtggatcacctgaggtcaggagtttgagaccggcttggccaacgtggcgaaataccatctgtactaaaaatacaaaaagttagccaggcgtggtggtgagagcctgtaatcctagctacttgggaggctaaggcgggagaattgcttgaactcaggaggtagaggttgcagtgagccaagatcgcaccattgcactccagcctgggcgacagaataagactctgtctcaaa

SEQ ID NO: 112140 - DNA, 343 bp, Homo sapiens
  misc_feature (1)...(343): n = a,t,c or g
cggcacgagaatgtctcttaatagctttttggtggaataattgctttcnnnnnnnnnnnngggtttgggaaagggaaaggaacccccctttgccccccggcgggaggggagggggaaaatttggggtaaccaaaatttccggtccccagggtaaaggaaatccccggcccaaacccccggggaagcgggaaaaaaaggccaaggcccccaaccccaggtaattttgggggtttaaaaagggacggggtttacccaaggaacccaggaggggccaaaactttgaaccccgggaatggccggcccaaaccccccaaagggggggaataacagggaaaaacccccc

SEQ ID NO: 112141 - DNA, 731 bp, Homo sapiens
taaatagagacaaagtctaactatgttgcttaggctggtctcaaactcctggactgctgatcctcttgccttggcctcccaaagcgctggaattacaggtgcaagccgctgtgcccggccaagatggctgttaatagtgtggccttgggagtcactgagtcaaaatcctctttcattttagattgggcagctcacctaacctctctgcctcagtttcctcattcggaaaatgggaacatcgaggggtgcaaatctcacaggctgctctgcagattcaacgaagcaaaaggttgtccagtgtaaatgctagcgttcctcactgtccccatcaatggtggccatgagctggccagagagaaagggctggaggaggagccttttgcaactcaccccatgggccacaggctgtctgctttatctgggcgtgatgagcaagagctatagattgaagacagcaaacaaacagccacttccttcctcacccaggtcatgcgagctgtggctgccgggaggagagttaagcctccgtagctgcttctggagccagctctcagctcccagaccctgccctggtgcctgagggaggccctggagccttgcccccagctcagtggggctctggggcctcaccgtgggtccatgcactgtcgcaaacatcattctcacctccaaaggctccatccctcaggggagcagggggactggactctgtttcttttcccacgcgtccg

SEQ ID NO: 112142 - DNA, 390 bp, Homo sapiens
ccaaggtaggaggattacttgagcttaggagtttgaaaaccaccctgggcaacatggccaaacccccatgtttacaaaaaaaaaatacaaaaattagctgggtgtggtggtacgtgcctgtagtcccagctagtgggaggctgaggtgggaggatcacctgaacccaggaggtcgaagctgcagtgaaacatgatcacatcactgtactccagcctgggtgacagagtgagaccctgtctcaaaaaaaaaaaaaattcttaaatccttccacataagtggacacagggctctgccatcccatgaagcagtttattatgtcatccagctaagcactgctgcatgagttttctaagagaaggcagatacctggcctacatccttttgatgac

SEQ ID NO: 112143 - DNA, 470 bp, Homo sapiens; identical to SEQ ID NO: 112133
  misc_feature (1)...(470): n = a,t,c or g

SEQ ID NO: 112144 - DNA, 356 bp, Homo sapiens
  misc_feature (1)...(356): n = a,t,c or g
nnnnnnnnnnnnnnnnnnnnnnnnnnnnnnnnnnnnnnnnnnnnnnnnnnnnnnnnnnnnnnnnnnnnnnnnnnnnnnnnnnnnnnnnnnnnntgcccagcttcaatgagggcttcttataaatcactggtggaagtgtaaattggtaaaccactttggctttatcttgcgaagctgatcatctccatattctacaatcctnnnnnnnnnnnnnnnnnnnnnnnnnnnnnnnnnnctcccaagcaaggataacaggagacatgtacaagaaggttcgtagcaacactttggctagcaaaacactggaaacaaccccaaggcttatcaacctaaaaatggattaatcagttggggta

SEQ ID NO: 112145 - DNA, 385 bp, Homo sapiens
  misc_feature (1)...(385): n = a,t,c or g
gagaggatacctgatattattttgatttttaaaaatctattgaaatgtgctttgtgaccaagcatattgtcaattttaaagaaagttccatgcacagannnnnnnnnnnnnnnnnnnnnnnnnnnnnnnnnnnnnnnnnnnnnnnnnnnnnnccatttggcagagcccgttttaagtcaagtttctttgatagttttctccttcagtgatctgtttggtgttttctctgggatgtcgaagattcccactattattgtatggctttttattttattttcttagggggagcagcacttttataaatctgagggctctggtgttgggtaatgtatatatttaggatagctcaatcttcttattgggctgaagcctttatcctgtatgg

SEQ ID NO: 112146 - DNA, 367 bp, Homo sapiens
gttgttttttttagtaaaaccaatacagaacaaatgaaagaagtaatcataagtagtagccttgatgtcaacatgagcttcaatcatggtctgccattttttcaccctggaacacattttgtcctggagtaagacccatgccatggaagttaagtcaggcaatttttgccctgaacatctttgataatcagtttgaattttctaaatgcaacttcatcattctgcaagtcaacaaagactcactgcaaacacataacccttgagaccatcagatgcaatttttgttccttggttttggtgattagtgtctttctgatatttcttggacatagcaggagctttcacatcataccaatctttctaagaa

SEQ ID NO: 112147 - DNA, 477 bp, Homo sapiens
tttttttttttgtttgttggtttttgagacagggtctcgctctgtcacccaggctggagtgcaatagcatgatcacgactcactgagcctcaatgtacaaggctcaagagatcctctggcctaagtctccaaagtggctgggacaacaagcacatgccatcacgctcagctaatttttgtattctttgtacagccagggttttgtcatgttacccaagctggtcttgaactcctgagctcaagcaatccacctgcctcggcctgccaacatgctggcattataggcatgagccactgcacttgaggctacctataatatcataaacagaaatttcatttgctattatctttcccctagataaaagacctcattcacattttacaataggaaagcatccaagaatgtaacatgtaatactcaaacattttatttatttatttggatatttgttttatgttaaccaggagaagttctac

SEQ ID NO: 112148 - DNA, 355 bp, Homo sapiens
ataaatgaggtgcgactttgcccttttatattaattagctgttttttcatttgtatactgccagttcttttactttgcttgtttttctatttgaatgttttttctttttctttttaaataagaaaaggagttcaagatatatacacccactgacaatgtaccttgctgcccctccaacagttcatgatgtctcttgcttttttttgagacggagtctcgctctgttgtccaggctggagtgcagtggtgcaatctttgctgactgcaacctccgcctccctggttcgggggattctcctccctcggcctcccaggtagctgggattacaggtccacgacgccacacctggcttat

SEQ ID NO: 112149 - DNA, 378 bp, Homo sapiens
  misc_feature (1)...(378): n = a,t,c or g
ngctgatnnnnnnnnnnnnnnnnnnnnnnnnnnnnnnnnnnnnnnnnnnnnnnnnnnnnnnnnnnnnnnnnnnnnngtcaagttagacaagtttctcacaaagctaaacgtaccatacaatctagcaatcatactcctttacacaaatgacttgaaaacatgtccacacaaaaatctgcactcaactgtttagagcagttgtattcataactgtcaacccttaggagcaaccaagatgtccttcagtcggtgaatggataagtaaacttggtacttccagacaatgaacttagcaataaaaagagatgagctatcaagctatgaaaagacatggaggaactttaaatgcatattgctaagtaaaagaagctagtcaga

SEQ ID NO: 112150 - DNA, 374 bp, Homo sapiens
  misc_feature (1)...(374): n = a,t,c or g
ctcctgcctcagcnnnnnnnnnnnnnnnnnnnnnnnnnnnnnnnnnnnnnnnnnnnnnnnnnnnnnnnnnnnnnnnnnnnnnnnnnnnnnnnnnnnnnnnnnnnnnnnnnnnnnnnnnnnnnnnnnnnnnnnnnnnnntgggcccagggccggggccaaccagaaaaagcggcccccaaggcccccctgggccccccttttttcttttggccacttttgccacatgggccaagggtaaaaggtctggttaaccaccccggctgggggttttaaaaagaaaaaaacagtggggtttaaaaaagggcccccctggggcccccttccccccaagggaaaaccccccccaaatttggccccctgtgggttaatttaaa

SEQ ID NO: 112151 - DNA, 3180 bp, Homo sapiens
  misc_feature (1)...(3180): n = a,t,c or g
ctggaagaattaatcacggagttccagggagaaggaacttgtgaaatgggggagccggctggggttgccggcaccatggagtcaccttttagcccgggactctttcacaggctggatgaagattgggattctgctctctttgctgaactcggttatttcacagacactgatgagctgcaattggaagcagcaaatgagacgtatgaaaacaattttgataatcttgattttgatttggatttgatgccttgggagtcagacatttgggacatcaacaaccaaatctgtacagttaaagatattaaggcagaacatcagccactttctccagcctcctcaagttattcagtctcgtctcctcggtcagtggactcttattcttcaactcagcatgttcctgaggagttggatttgtcttctagttctcagatgtctcccctttccttatatggtgaaaactctaatagtctctcttcagcggagccactgaaggaagataagcctgtcactggtcctaggaacaagactgaaaatggactgactccaaagaaaaaaattcaggtgaattcaaaactttcaattcagcccaagcctttattgcttccagcagcacccaagactcaaccaaaactccagtgttccagcaaaaaccatcattattcagacagtaccaccgcttattgccatttggaaagcagcaaccaattttcagtttacaacctgcacccacttaaggccagacgggttttgctgtctcagccttactgtggtacaacttcaagcaccttggagttcttgccctctgctcagccagtccttgctgttgctgggggagtcacacagctccctaatcacgtggtgaatggtgggtaccagccccttcagcgaatagcccagtgaatggaaaactttccgtgactaaacctgtcctacaaagtaccatgagaaatgtcggttcagatattgctgtgctaaggagacagcaacgtatgataaaaaatcgagaatccgcttgtcagtctcgcaagaagaagaaagaatatatgctagggttagaggcgagattaaaggctgccctctcagaaaacgagcaactgaagaattaaaatggaacactgaagcggcagctggatgaagttgtgtcagagaaccagaggcttaaagtccctagtccaaagcgaatagttgtctgtgtgatgatagtattggcatttataatactgaactatggacctatgagcatgttggaacaggattccaggagaatgaaccctagtgtgagccctgcaaatcaaaggaggcaccttctaggattgtctgctagagaggcacaggacacatcacatggtattatccataaaaacagctacagatatgatcattgctgtttcaaatgacaaagccctgatggtgctaactgaagaaccattgctttacattcctccacctccttgtcagcccctaattaacacaacagagtctctcaggttaaatcatgaacttcgaggatgggttcatagacatgaagtagaaaggaccaagtcaagaagaatgacaaataatcaacagaaaacccgtattcttcagggtgctctggaacagggctcaaattctcagctgatggctgttcaatacacagaaaccactagtagtatcagcaggaactcagggagtgagctacaagtgtattatgcttcacccagaagttatcaagactttttttaagccatccgcagaaggggagacacatttttatgttgtgtcattttcgaagggatcaccctgctgttaccagctgaccacccatgaacaaggaccacaagaccaaaaatgtcaattgtgttccccgcaaataaccataaatgagaatgtgatcaatgggcaggacctacgaagtgatgatgcagattgactgtcaggngtgatggacaccccggatcctcccatatcatataagtttgtcagttcctccttacctccgagatcagcagaggaatcaaaccaacaccttctttggctcccctcccgcagcccacagggggcaacccacgttgttcagccaccatcccctgagttcattacattaggcaccctggcagctatgctgggaaaacttgagcgtggggaccctgcccagacttgaagagcaggttgagcaaaatgctgcttttctgccttgggtgggcagggcaggaggaactgttcgtactagaattcaaggaggaaagaagaagaaataaaagaagctgcctcccatttttccatccatcctaccccatcctatttgggaaagcactggaattcagatgcaagagaacaatgtttccttcagttggcaaatgtagccctgcatcctcccagtgttaccctggtggtagatttttttttctgtacctttctaaacctctcttccctctgtgatggttttgtgtttaaacagtcatcttcttttaaataatatccacctctcctttttgccatttcacttattgattcataaagtgaattttaatttaaggttatgccacacatgcatgttcaaatggtttccactgattcgatttttcattcatttaatgcaaacccattctggatattgtgcttatttgagaaaacacatttcaaaaccagatgagccaaaaacactccaaaaacaagcaaaacaatttggagctttagataaaaggaaaaactcccagttggtaaagtttatctttacttaggatttgtggctcacacctaaacaaagggggtcagggagtgggtacaaatttgagaaaatagaagggtaagggaagggccagtggtggggtttggagagaggagatagctccattaatacacatgtttaaaagatggaaagttcacgcctgtaatcccagcactttgggaggccgaggcgggcggatccacgaggtcaggagatcgagaccatcccggctaaaaacggtgaatacaaaaatactaacggtctctactaaaaaatacaaaaaaaaattagccgggcgtagttgcgggcgccttgtagtccccagctactttgggaggctggaggcaggagaatggcgtgaacctggggaggtggagcttgcagtgagccggagatcctgccactgcacttccggcctgggcgacagagcgagactccgtctcaaaaataaataaataaataaaaaaaaa

SEQ ID NO: 112152 - DNA, 666 bp, Homo sapiens
ggcgtaattcctgcgagggcttggtttagggcttcagctctctgcgttctcggctccgggaggcctcgttgattcatccacagcctctgcctcccgttgctctgtgacctgagggtattggacaatttgtagctaagactcccggataccctgaagtcgggaaatggaactcgtaacattcagggatgtggccatagaattctcccctgaagagtggaaatgtctggaccctgcccagcagaatttgtatagagatgtgatgttggagaactacaggaacctgggtctccctggggttttgtgatctctaacccagacctgggtcacctgtctgggagcaaattaaaaggagccctgcaattttgaagatacatggaggacaggcagccaaacccccagctatatgttctcctttcagccaagacctttcaccagtgcaggggatagaagattcattccacaaacttatactgaaaagatacgagaaatgtggacatgagaatttacaattaagaaaaggctgtcaacgtgtgaatgagtgtaaggtgcagaaaggagttaataatggagtttaccagtgcttgtcaactacccagagcaaaatatttcaatgtaatacatgtgttaaagtttttagtacatcctcacattctaacaaacataaat

SEQ ID NO: 112153 - DNA, 417 bp, Homo sapiens
ttttttttttcaaaaagatgcagtttgttttccactctttaaatctgcacaatctagcttttaattttaacagtagaaaattctactctgttgattaattttcttttcatgtttgtataaggtaagactgctttcttaggccacacgtaaaaaactgacattaaagttaaacttcatgtgagttattttctggcagtcctgatgagactatctatctatctatctatctatctatctatcttatctatctatctatctaatctatcctatctatctatctatctatctaatctatctatctatcatgtgtgtctgtcctcatgtgcaccacaaaagcacgttctggattcagttctcttctttaccatgtgggtcccacatgtgggtcaattcaggttgtcaagcttgagtcgacgc

SEQ ID NO: 112154 - DNA, 529 bp, Homo sapiens
  misc_feature (1)...(529): n = a,t,c or g
taaattatttatttatttttgagacagagtctatntcaattgctcaggctggggtgcacagctcactgcagcctcgaactccagggctcaggtgatcctcccacctcaaccacccaagtagctgggactacaggtgtgtgccaccacgcccagctagtttttttgtagagatggggtctcaccatgctgcccacgctggtctcaaactcctgaccacaagcgatctgcccatcttggcctccccaaagtgctgggattacagggcatgaggcaccacacctnggcctatacccatttctgtaaaggacaaagcatggtattataaatagtatgtcctggttcacgctggagtgtcttgggttcagacactgtggagtctgatggcagggatgatgaaaacttcatttagtaacttcaaaccctagaccactgtaaaagcaggcattacccctttgagagccaacaaaagaggatgccaagaaacaacagccatggtgccttcctccacctagggcaccggttccacgtc

SEQ ID NO: 112155 - DNA, 1097 bp, Homo sapiens
cccactactcggggctccgctcggcttcttcgcgccgagatgcctaagaaggctggtgcgacgaccaagggtaaaagccagagcaaggaaccagagagaccacttcctcccttaggtcctgtggcagttgatcctaaaggatgcgtcaccatagccatccatgcaaaacctggctccaaacaaaatgctgtaacagatttgacagcagaggctgtaaatgtagctattgcagcacctccatcagagggagaggctaatgctgagctctgtcggtatctttccaaggtcctagaactcaggaagagtgatgtggttttggataagggtctctcactttgtcacccaggctggagtgcaacggcgcgatctcggcttactgcaacctccgccccccaggttcaagtgattctcctgcctcagcctcccaagttgctggaactacaggtgcatgccacccacacccggctaattttcgtattttttgaagagacgggatctcgccatgttggtcaggctggtctcgaactcccgacctcaggtgatcctcctgcctttggcttcccaaagtgctgggattacaggcatgagccactgcgcccggcctcatttcttgcttttatgttttttgggctccctttattaatttctccaagatctcttctggaagttgtagaagccaaaaagcttcaccaccttttcacgagatttacccacccttatccaaaaccacatcactcttcctgagttctaggaccttggaaagataccgacagagctcagcattagcctctccctctgatggaggtgctgcaatagctacatttacagcctctgctgtcaaatctgttacagcattttgtttggagccaggttttgcatggatggctatggtgacgcatcctttaggatcaactgccacaggacctaagggaggaagtggtctctctggttccttgctctggcttttacccttggtcgtcgcaccagccttcttaggcatctcggcgcaaagaagccgagcggagccccgagtattgggtgttgcccgaaggtgcctcagcccgctgcggagccgcagcatccccgcctgggaaggc

SEQ ID NO: 112156 - DNA, 371 bp, Homo sapiens
aaaagtatacaaaagggtttaaaaatgtgcctaagtagctctctcctcccgccgtccaagatgccaaaaggaaaggccaagggaaagaaggtggctctggcccctgctgttgtgaagaagcaggaggacaagaaagtggtgaatcccctgtttgagaaaaggcctaagaattttggcactgagcaagacatccagcccaaaagagacctcaccagctttgtgaaatagccctgctctatcaggttgcagcggcagagagccatccctcaataagcggctgaaagtgcctcctgcgattaaccagttcacccaggccctggaccgccaaacagctactcagctgcttaagctggcccacaagtacagaccag

SEQ ID NO: 112157 - DNA, 1065 bp, Homo sapiens
agacgggctcaagacaggggtgggctgcacacatggaccctcctttggacacaggtgttgggggtgagcttggtgggtaaaggcagatgcatcacgatgttcctgctctgcagcttagcggtgccaaggggccctcccatgtacacaggacacgagtacacagtcaggtcggctggggctggcaggtcactggtgcccggggcctgtgtgctgatgctgacgggaggcagagggctgggttggctggaaggactgtcctgcaaggctccagctattgggtcccactccgcatgtaggacctgtagcccgatcagcagcagccctctctctggaaccgtgggatttggaccattctccaccctgaagtgcagagggttgctgttcatctccagacgtttatactggagctgactggagaccgagcctcggctaccagggaaattcgagctgggcacattctggtccagggcagcttccccacgcaatgccagcagcaggcggcgcgggtggcgaaaggctgacaggtggaagacgcgctctggtacatcactgctcgcgtccgcgcccacgcccaagtaacgaaccaacagttgcccacggcgcgacaactgtcgcagccagtgccagggcggctgcggaccggccggcgcatgaggtcgccaaggcaagggtaggcggccagtccatgagagcgtgggccaccgcagcacagcggcgggaggggcacgggggtgcgcccttcagctgctgcaacaggcaatcaaggtcgcgttgtagcgtgcccaccaactggctcagttctagagcctcggtctctaagacgccctccagaggccgccgtgcatttggccccagcactgaccacggggcgtcggactcgtcttggcgaatcacgtgggtcagcagatcctgcagtgactccagcctccggttgacttgcactaggcgttgccgcagtcgcctttccgcaagctgggcgcctcttcgagactcaggaacccacacgggtgaactccgctgcagcgcactcaagagagcgcgactctggcgtcgcaacagccaggg

SEQ ID NO: 112158 - DNA, 910 bp, Homo sapiens
  misc_feature (1)...(910): n = a,t,c or g
acggaaccggctcgcgagcgcagctatggctgctttcgtaccctgtgcgttagacaccagctgctcctccgtcttctcaggagaccagctggtccaacatatccttggaacagaagatcttattgtggaagtgacttccaatgatgctgagagattttatccctggaccattgataataaatactattcagcagacatcaatctatgtgtggtgccaaacaaatttcttgttactgcagagattgcagaatctgtccaagcatttgtgggtttactttgacagcacacaaaaatcgggccttgatagtgtctcctcatggcttccactggcaaaagcatggtttacctgaggtgatgatctttggtctgcgattagagtgtcttgaagatggtattaaaccggcaaaaaggtcaagaatggtgcatcaaacatggctttgaattggtagaacttagtccagaggagttgcctgaggaggatgatgacttcccagaatctacaggagtaaagcgaattgtccaagccctgaatgccaatgtgtggtccaatgtagtgatgaagaatgataggaaccaaggctttagccttctcaactcattgactggaacaaaccatagcattgggtcagcagatccctgtcacccagagcaaccccatttgccagcagcagatagtactgaatccctctctgatcatcggggtggtgcatctaacacaacagatgcccaggttgatagcattgtgggatcccatgttaggatctgggatatttcaaggaattaggccagtctttaccatgggagggagggagatgtgggagatttttgaaaganttttttcaaagtttaaagggaattgaaaggacaagggtttgcgacgttttcctncttgnaggccanggganagttg

SEQ ID NO: 112159 - DNA, 586 bp, Homo sapiens
cttgcccgcctgatgaattcggcacgagcctggctctgttgtaagagtcttagaccatacttgaattggtatggtatcatttgaattagactgtcatgaattaaaaatgtataccataaattctgaagcagccactgaaataacagatatatagttaattaaccaacaaaggaggtaaaatgcaatcataaaaacaactcagctaacccaaaagaaggtagagaaagaagacaactagaacaaagaatagataatatggataggaaactaatagcaagatgactcaactgtatccatgagcacattaaatgtaaattgcccaaatgtctcaattaaaaggcagatgtgttagattgaataaaaaaacaagatgctacaagaaatctactttaaatgtgaagacacaaaggttaaagtaaaaggatggagtaagatatttatatagctactttaattattttcatgattgcctggctagcaataatgaaaataattaaagtagctatatgaatatcagataaagatttcagagccaagactattaccagagataaagaagagtgttatataatgataaagagattat

SEQ ID NO: 112160 - DNA, 382 bp, Homo sapiens
ccctacattggtaatgaaaaggaggcatcactagagattttatagctattaaagggataattagggaatattctgaacaattttatggcaataaactccacaacttagataaaacgtaccaattccttaactcataatttaaaaccttctcaagaaaacacttccatgacaaaggctcccttggtgaattctactaaacatttaatgaagaaatcataccaatattacaaaaactcttccagaaacaagaagaaaacgtttctcaattcattttatgagaatatagtattgaccctaatacaaaaatcagaccaaaacaaactacaagaaaactacagaccatcatactttgatgaacatagatggaaaatatcttaaccaa

SEQ ID NO: 112161 - DNA, 370 bp, Homo sapiens
  misc_feature (1)...(370): n = a,t,c or g
ctctgcagnnnnnnnnnnnnnnnnnnnnnnnnnnnnnnnatagtcagggaaaatacaggaaagtctaaagaaaaaaaaagtaactgataatcctatcaattggagatgatataacattgtcatgcatttccttacaacttttttggtgtatatgagtatatatcttcatatatatatatatatcttcatccatatcttgaatctctatatatctctagatcttatatctgtatgtgtgtgtgtatatccatatcttacaaaattagaaatcacactgtagttaaagccttatttgcttatctttttccacttatattgtgaatattttcccatgtaatagtctgtgaaaagatcatttttaataatttcc

SEQ ID NO: 112162 - DNA, 475 bp, Homo sapiens
caaaaactacattcctaatttaggatttcagtttgtttatgtacaagttaggctacagttccttacagagggactcaagatatacaggaaggctcaggccaaatttagtttaatttatgccaacaaatgagataaatgaaatggccaaactcctagagatacacaaattaccaaaactaactcaggaagaagcaaaatctgaacagagctataaaaagtagatactgaattagttatcagaacccttccctcaaaaaaaagcccaggacacatgatttcaatggtagattctaccaaacatttaaagaattaatagcaattcttcacaaactcttgaaaaaatacaagagaggtgaacacttcccaactcgtttcatggggcctgtattactgatacaaaaaccagattatcacaaaaaaagaaaactgcagaccagcatctcttatgaatatagacacaaaaatccctcgtgcc

SEQ ID NO: 112163 - DNA, 1505 bp, Homo sapiens
gcgttattcgcctgctcctgggcagtggttttgttgcctgacacagggcctttaacatttctgaggtttggagattaagcgggttctgtgcgatttttagcacatccatatcttttctacgttgaatgtctggatctttcctttgtatgtttgtgtctctgtgtgtgtatgtggccaagcgtctgcaggtgagggtggcacatggaacttcacgggtcactgggggcccactcttccagggtcatcgatgcatcctgggctgtgctgaggcagtgctgtctcgctcagtctttccagaccagcggggcagcacctgggaggcctgtctgaagcatgcagttctgtggtgctgctcggggatggactccatgcacagtccacttcttgacacattctcacactgtggctggagacccattttttccatcccatgtggaatgagaatcttgagttgcccacagacagacttgacctttgtgccagaactgtccagagctgtgagttttgttactgaattgcctgtccctgagcttggcctgctggagcatgatgctggaggctgtgtgcgggcaggcttgtgctccccttggagaagggctgctacttaacaaggaagtcctggccacaggagtcccctactggctgcagaggacgaagcaggaagcatgccgtggatcccacatgcactggggcagggcagccaggttccagagcagcaggcatgtgcattatgggtgccaggtggccagtgagggcccgaggaccacgcagcagagtcccccacgggcctgagcctgagagctcacaggattcctgccaggcctcacaactgtgtgtgcggcacagggtggctggcacgagatgtgtgggactgggacgctttctttggggaccagaggaacattaggggccggtcagacacctacggggcagggaggaaacggggtatagtggaccatgcaagctgtagagggtgggccttgggctggtctggggtgctgggtgagcccttccccatgggcctacacaagcactcgggcctccacaagcactcaggccactggcacgttgggccaggcagaaggtccacatggcagggctgcctggaacaccgctgccactgtggctccaggaggcccttgggagcatgaggagagctggactcgctcatctgttcttgcaccaccatccagaatgccccctttgcaaggcctgctgcagtccccagtctgaccagcaagtcccggggtcacccttgctgaaccttgtgctccaggggtcctcctcctctaggaccagcttgccacggtttctcagagcccaggtgccctctgacctgccatgcggaggtgggatttgatactgtacattgtcttgatgcctgtttttttatgttttcattaagggtttttagtttttggttgggttgacactaacttttcttaagatgctgtgagaatcatttcatccaaatgccaaataaacttgtgttccggaaaaaaacc

SEQ ID NO: 112164 - DNA, 214 bp, Homo sapiens; identical to SEQ ID NO: 103856

SEQ ID NO: 112165 - DNA, 679 bp, Homo sapiens
tttcgttgaacttggacaagttatgcagcctcctttctttcctcacctgtacagtggagatcattttcaaaacatctgtctacatgaaaagatgagtgtgaaaattgagtgaaattacacaaataaagcatatagcacagagccaactagtgagagtgcagtaaatgttttatgattgtgtgtgttaatacagtgagaaaaaggccttggatttgagaaacagctgcatgatctcaatggaggaagctgattaataaggcaagagtttccaggcagaggtgacaggcaagcctgagaacgcaaagagcctagtgggtttgaagaactgaggaaaagctgatgtgtctggagcctgatgagagcatctaccaattggtagtgtaggcccagtagagcccgaggaagatttggagactggagttcaccttgaccctgccgtcaaagaagttcagtataatcctacctatgagaccatgtttgctcctgagggaccaagaacagctgagagacctatcttgagtaattgggaagagctgagtcctgctaagtagcgttcgctgccttcctctgttaatattcaatgtctttaagtttggaccagaaaatccctttaggacacagcaaatggctgcccctagaaatatgctttctggatatgccgaaccagctcatatcaatg

SEQ ID NO: 112166 - DNA, 673 bp, Homo sapiens
cagaggagcagtgtggggagtgcccagggtgacagtgacacaccaagcacggggagaaaccagtccagattggggtgggtcaagaataataactgataaatgatgtcatgatcttcagatatgatggggttgaattagtgacaaatagaaaaccaagcaaataaaaatgcaagaggattactttcagggaaaagttccacagtaatctagtctattgtatgactcagctgtgatcactatgacactgtcatatttttaaaaagtttaatcacatcttaataatttgacactgaatatgatctaaccagaattacaatatcagggagatgggtgagaggaagtaaattcatggtgggcaggaggaagagaggattcaaaagataatggtgtccgggtgcagtggctcacacctataatcccagcaggccgaggcgggcagatcactcgagccccggagttcaagaccagcctgggcaacatggcaaaaccctgtctctacaaaaaatacaaaaattagctaggcatggtggtgtgcaccagtatttccagctactcaggaggctgaggcgggagaaccacctgagcccgagaaggccgaggctgcagtgagccatgattgcgccactgcactcccgcctggggaagagcgagaccgtcttaaaacaagcaaacc

SEQ ID NO: 112167 - DNA, 260 bp, Homo sapiens
  misc_feature (1)...(260): n = a,t,c or g
aataaataaataaccagcaaagtgatagactcaaatccaaccacatcaataatcacattaaatctaaatggcctaaacacttcattttaaaggcagagactattagatggannnnnnnnnnaaagtaagactcaattatttgctatctacaagaaatgaactttaaatataaaatctttaaaaagataggaagaagaatatactatgctaacattagtcaaaagaaggttggagttgctgtattaacaccagacaaagtt

SEQ ID NO: 112168 - DNA, 1362 bp, Homo sapiens
  misc_feature (1)...(1362): n = a,t,c or g
tgggcctggcctacacgggcccggacaactccagcatcgactgccgcctcagcctggcgcagctgtcagccttctgagcacccagcgaggaggggcgggggcaggggctgcagcccccagcgctgcctttgcggattctgtttttgagccgcggacttgggttgtaaatttatttgtggggagcgcgtctccattttagagccaccatccctgcccccgttttcccaccggggagtctgtacagagatttttctacgtttttattttttgcctcacagggatgggattggggaggaggggatgggcagcggagggttgggggcatggtctgcaggctcatctgtgtccgcctttcactccactaatgctgtctcagagttttctctctctctctttcgagcttgcactccggtacccgacccggcgccctggcccatcccatgccggggggccagtggaaagaaaacaggccgtccagcccgtgcccgcctgcggcgggggcacccagcaagcccgcccaccgcccgctgcctcacctgcttcgccacagactcttgttcccagccccttggggcctccgtgtttggggtgggggagctgcttaaagactgtgcccgtcctcggccccccaccctgaagtgccagcaccaccagcaccagatcctccgccgccacaccgcactgaggacacgccggccgggccgcctcgtctcaagttgtataaagttgtctccgtgtcccctcctccctctgcccccagagtttcttctgatttttttttcccctttccctccctccctctccgcattcttcccttggttcaacacaggtaaaacgggtcccctccctccctgccttcatggatcaccagctcacgtcatgttgccttctcttttctttgtgcgggcgttaattaaagcaatttttcttcctcctctcccttttctttttggccctccctccctccctcttttgccatgtaactggaggatgtgctatgagtttgcaaaccgctggactgtcaggctgctttttatccaaatgatcctcctctgcctccccttcccctccttatccctccttttcctttcttccttcctttccttggagcactgagcaccatttggaagcttgagagaaaccaaaattaaagagagaaagagagagnnnnnnnnnnnnnnnnnnnnnnnnnnnnnnnnnnggggggggccccttaaaaaaaaccccgggggggcccaaatttaacgggggggggaaaataaaaacttttccccaaaagggggggcatataaaaccccccgggggatttttggaaaggaccctttttttggggggggaaaaaaatggggaaacccccccaaa

SEQ ID NO: 112169 - DNA, 846 bp, Homo sapiens
  misc_feature (1)...(846): n = a,t,c or g
ttttttttttttgggagtccagagtctcgctctcttgtccagggctgggagttgcaatagcgcgatctggggctcactgcaacctccgcctccctgggttcaagcaattctcctgccttgcctcctgagtagctggggattacaggcgtgtgtcacccacgcttcggcctaatttttgtatttttagttagagacaggggtttcacccatgtcaagctgggtcttgggactccctgacgtcgtgatccacccgccttggcctcccaaagtactggggattacagggcgtgagccactgtgcctggctgagttttcttaaagtgagcttaatttctgaactcttagtgattcatatatgtacataaatctgtgatcccatttcttattgcaccattcaggaacactttatataaatgagtgggctttttatttcatattattagtagtatcatgggttccattacaggcctattaacatcatacattgtcattagtctttggaaggaaaaaatatgtaaataatatatgtgtaacatgagaatttctctctaaagcaggggcttaaaatttttttgggaaaagtttgacaaaggcataccacatggaattcaggatttacctcaatgctaaggaattatgtttagttagggaaaaagggaaaggtcattttgacctcaggtaggaaaaataggattgctttggagttttatgtaggctttaggacttttaaaacgttaggattttattcctgttaactaaaaattatttggaaaaattatgcctctgggtttaattattgggtgattacacactctttctcttacccntgtgtattggagcttgtcc

SEQ ID NO: 112170 - DNA, 376 bp, Homo sapiens
gtctttgtgcattttcaagtttgcattgaaaatatttcttcaagtttgattttgtgttgaatttgtgcttatagccaccagccgcacagctttcctccagtgtgaatgaggacgtggggactcaggtgggagtccctgacgaaggtcttatcatgcccttcattgccacaaacaaatggtttctgccttgtgcttgcatgggtctggcttgcaggccttgtggtaattggcactgtgtcgaggagagtggatgaacctcctgggaagtgctatggtcagggtgtgtgaaggtctccctggtctcaagggtcagggaggacgctgcctccaggacacgctgtctatgcattccaccacccagttttacttgtctagg

SEQ ID NO: 112171 - DNA, 1564 bp, Homo sapiens
gaagcaggctatggcaagcgtgcggaacatccaaccccatgcctgtctgagaatcaatggctgggaaggcttggtggtcaagtgattagtcacagcgcaggtctgggttcacctgttcaccttggtgccccggggtcaaacaggcccatctctgcctgcccagaagcaggccgggaagtttctttctcaaaaagagatcagccactgagggagaaggagccttgctgcaaagctccagaaccccttccgagacagtgtgtgtggtcataggatatcttcttccatgcagacctccgaggccaatgagatctgctggggctgccagatctgctggcttctaagggccacttcaggttgagtttatcaaggcctttcgtcattccaagaatccaaggccgttggtcattccaatgacttttccccctttccaagcaagtgaaaaagaagtgccccttctgggaaaggaagaaagttggtgaaatgacacgggtcttgatagacacaacctgacatagactaacagatgggttagtctaactaacagagaggttagtctatgtcatgcattaaactttcctttactctgggtccaaaccttacaaagtcctccatggagtcagagattggatccccacccgactcccctcgctcttcccatcctgttttctctcactggcatggagctgtagtctccaagcccctcagtggccccacacagacccctccccacctttgtggtctggcaagaagcctctgcccacaagaatcaagtgcctccccccgtttctaccccttcagacacagctgggtttgtgttacatgtttttttaacccccgggttcgcaaggtctggacaatatcagtggctctttacccttgaaatgacttagattcccaccgggtctgcccagagggctgggggttggacgcaccacaacctgggcccagccttttcctgcggggaatgccccgcccaatcccatccaaatcccatcggggtgccagcccccaatttcctccagcaagagacaaacttcccggttcccaccctctctttcatgtggagtgattctaacctcctctggaatgaactccatgcttgcagagtcatcttcagaatgagtcagctccgcttgttccaggcaagaagcctcacaagttgatgtgaaatgcggattccctattaagcggaagccaattgcatttctcatcccatcacgaccgtgtgggtctcgttatttcataagaccccccggaaaatgtgaattggaattttatttcctaagtactgttcttggtttctgaccagctgatcccaaggttcacattcctggctggagaagctaaactcaatgctgctgtgtgggaagaagatttgtaaagaaaactcttatggaaggcttcatttggttgggggtaacaaataaaacaacattctgtgccgcggtttggggacccctaagaacaacctcggggctgtcaacctgggctgtggcccggttataaaagggttgggatgggaaaaacccttggcgtacccaattaatccctgtggggaaaaaaa

SEQ ID NO: 112172 - DNA, 1766 bp, Homo sapiens
caaggtgggatccggcatagccccgggcccaccagatgcaaatttcaaaatcaccatctgtgaactcctaataaaaataatgaggtgggcaagaatcagtaacagattccttgaacccattaggcagaaagacagtgaggagctgcacaccttgccacgtaccaaccttccaatttatgtaatttctaaaaagggaaagatgtgtcccttgctaatgagaaaatgaggcttcccaccgtctaactcagaggaagatctttgcgtcatcatagtgggatgtgagccacatgccttctgaggctgtccagtgggaagcacgacaggacgcacctgtgagagactctcgagtaaatatttaacttaaatacatagaactcttgatcaacctgccagtcagcaggaaatacagggaataggaaacaagttaaatgacaccacaaggaaacagactgaattcagacttcaggcattgtcttctcaacaattcaatgctatgaaagaataaaaaaaagtgacaggactattccattgaatgagccttagggcagaaacccaaatgtgtagtcctgaattcaatccggatgtcaactacccacgttggaaaatacatttttcaagtaattggaaaacttatggatatagccagcattagatgatgttagaacctttaatttatgggatgggtagtgggcatggtgggttctacaggaaaaggttgtgtattttttagagattgtgtagagatgcttttagggatgaaatgtcgtcatgtccccagatttacttttaaatccctcagccaagaaagaaagctacatgaggcaaagaaggccaaacgttagcagccgctaaagataagagcatgttactggtccttatttattgtcatctcaacatggctatatgtttgcgaaattttcataataaaaagcaaataataagaagaaaatgatatttggaaagattctattaagagtgaaaaagataaccaggtaggccgatgacatcatagtcacctgctgcccaccctcctcctctgttttgtccacaggggttctcaatggaccgattgccaaagggttggggtggtcaagaattatggggtgtcaagggtaaagaccaaacatgggatttttgtcttaaaagaaaagggttggcccggtagttgtaaaattctttcccaaaaaagggacaagcccgaaccccggtttccggccccaccccgcaaaccagcctttcttttagaaaatggacaaagctctatgcccaaaacaagcccctttggggaatttaaatttgctttccctgacacgactccactttcatcactacccctgaacttaaggggcatccaaacctcagtctcagcaggtttgttttgtgtctgtgtgagtctgtatgtgtgttcgcgtgggtctgtatgtgtatctgtgggtgtgtgtcctggagtgtctcttgtgtgtctgggtgtgtgtctgtgtgagtctgtgtatgtctctgtgggactgcgagtgggtctgagtgtgtgagtctgtgtatgtctctgtggggctggcgcctgtgggcgtgggggtccctcttgtagttgcggggccttaatacacagtcttgcctttgttccccatttgggaggctattgggcacaacacgtttcattggactgtggactttctacgctaaagtatcctcccattcagcctttgaaaatctgtcccgcagggggagcccccgcttaagtcaaatttggtttttgtgaacacaaatcc

SEQ ID NO: 112173 - DNA, 357 bp, Homo sapiens
  misc_feature (1)...(357): n = a,t,c or g
aacaaagaannnnnnnnnnnnnnnnnnnnnnnnnnnnnnnnnnnnnnnnnnnnnnnnnnnnnnnnnnnnnnnnnnnnnnnnnnnnnnnnnnnnnnnnnnnnnnnnnnnnnnnnnnnnnnnnnnnnnnnnnnnnnnnnnnnnnnnnnnnnnnnnnnnnnnnnnnnnnnnnnnnnnnnnnnnnnnnnnnnnnnnngccaaattgaataatatattaaaaagacattcaacatgactaaaggggatttatcccagggatgcaaggatggtttgtgataggcaaatcaatcaatgtgatatatcattcaacagaatgaagggcaacaagcatctgatcatttcaattgatgcttgaaaagg

SEQ ID NO: 112174 - DNA, 354 bp, Homo sapiens
  misc_feature (1)...(354): n = a,t,c or g
ccggaaaggattccattttgtgaggccctgggaaaccatggaccggcttctcacacccaggtgtgaatgcaaaaggaaacgcaaagaccacctgaggcatgnnnnnnnnnnnnnnnnnnnnnnnnnnnnnnnnnnnnnnnnnnnnnnnnnnnnnnnnnnnnnnnnnnnnnnnnnnnnnnnnnnnnnnnnnnnttggacctgcatggaataatatattataaagacattcgacatgactaacggggatttatcccaaggatgcaaggatggtttgtgataggcaaatcaatcaatgtgatatatcattcaacagaatgaagggcaacaagcatctgatcatttcaattgaggctg

SEQ ID NO: 112175 - DNA, 455 bp, Homo sapiens
  misc_feature (1)...(455): n = a,t,c or g
naagttggtaaaggtcagatccggatgagaactgtttttgaacaggccattgatcaacgctcttcaactggtgcctggagaaatgctctttctatttgggaacctgtctgcatgaaaattttcgatcgtctgattaaaccacgctgggagattagataatgaagcgtgcgcctgttttccaaaacatacgctcaatactcaaccggttgaagatacttcgttatcgacaccagctgcccccatggtggattcgttaattgcgcgcgtaggagtaatggctcgcggtaatcccattacttagcctgtatgtggtcgggatgtgaagtttactcttgaagtgctccggggtgatacgtgccgataagccctctcgggtagggccgcgataatgaataagttcagtagcggcatggtttgtcccgctctggatgatgtcagggtacggacattgaatt

SEQ ID NO: 112176 - DNA, 948 bp, Homo sapiens
tgcgcgtacccgtagatcgccgagagtgcaaaaacagggacgctacaccacagttcttaagggaattactgaaaaataagaaagatgattgagaaaaactaaggacacggtacccgcattgtcccttagggggatgaaaaggagtgttcagcagaaatcagtctgatgttcctctacgtgctgtaggtagaggcattggcccagcggagcgaaaaccatgtggaacagggggagtgagaggtaacttagcggaggcgtgcagggcccaccgtttgtaccggctgctcgagcgttacgtatccattaggactcgtacgatcccattctaatcaaccactggccttcctacttgcagcacatacatcctagaaatctgaagagaataaatatttttatataaaacttttgaaatatttgaaatatttcttaaaatggcatggcattctgctgatgtggccccggggaaaaaacggaaaccaagagttatatgattcaggcttccctcaatctctgcagaccacagaacaaaactggggagagatgaaacaaaaagccggcccacccgctgctgcaggaactcacgtttctgagagccttgcccttagtccgcgtagtgggagggaagccttgcaggttcctgagattccatatggctccaggtgtgcattctgtagagtcgggctggcggcctatcaaagaatgcgactggaaggaaaaaaccggggaaaaccggggggaaagccgaagaatgaatccaacaccggacccccgaaacctaggacaggtggcaattgccagggccggaaaagggcggatttggaaaaacttgcccagcccaggggatgccctgcaccagcgaaggttgggacaagcccggggccaaaagagcctaggggccacccggttcccggccagggggagcctcttaaggaaggtcccaggccaaaa

SEQ ID NO: 112177 - DNA, 354 bp, Homo sapiens
  misc_feature (1)...(354): n = a,t,c or g
caataaacaaagaannnnnnnnnnnnnnnnnnnnnnnnnnnnnnnnnnnnnnnnnnnnnnnnnnnnnnnnnnnnnnnnnnnnnnnnnnnnnnnnnnnnnnnnnnnnnnnnnnnnnnnnnnnnnnnnnnnnnnnnnnnnnnnnnnnnnnnnnnnnnnnnnnnnnnnnnnnnnnnnnnnnnnnnnnnnnnnnnnnnnnnngccaaattgaataatatattaaaaagacattcaacatgactaaaggggatttatcccagggatgcaaggatggtttgtgataggcaaatcaatcaatgtgatatatcattcaacagaatgaagggcaacaagcatctgatcatttcaattgatgct

SEQ ID NO: 112178 - DNA, 351 bp, Homo sapiens
  misc_feature (1)...(351): n = a,t,c or g
aanaaagaactgatgggagtgttcctcaaactattccaaaaattataggaggagggaaaatatccannnnnnnnnnnnnnnnnnnnnnnnnnnnnnnnnnnnnnnnnnnnnnnnnnnnnnnnnnnnnnnnnnnnnnnnnnnnnnnnnnnnnnnnnnnnnnnnnnnnnnnnnnnnnnnnnnnnnnnnnnnnnnngccaaattgaataatatattaaaaagacattcaacatgactaaaggggatttatcccagggatgcaaggatggtttgtgataggcaaatcaatcaatgtgatatatcattcaacagaatgaagggcaacaagcatctgatcatttcaattgatgcttn

SEQ ID NO: 112179 - DNA, 367 bp, Homo sapiens
  misc_feature (1)...(367): n = a,t,c or g
aacaaagaactgatagcaatcttcctcnnnnnnnnnnnnnnnnnnnnnnnnnnnnnnnnnnnnnnnnnnnnnnnnnnnnnnnnnnnnnnnnnnnnnnnnnnnnnnnnnnnnnnnnnnnnnnnnnnnnnnnnnnnnnnnnnnnnnnnnnnnnnnnnnnnnnnnnnnnnnnnnnnnnnnnnnnnnnnnnnnnnnngccaaattgaataatatattaaaaagacattcaacatgactaaaggggatttatcccagggatgcaaggatggtttgtgataggcaaatcaatcaatgtgatatatcattcaacagaatgaagggcaacaagcatctgatcatttcaattgatgcttgaaaagcatttgataan

SEQ ID NO: 112180 - DNA, 507 bp, Homo sapiens
attttcaccccctttcatttatttagtgcctcgtgcgatgtcacagagctagtgagtgcggctggcgaggacacatgcttggccgtggcaaccgcgtggcaccaaccagcgccgaaggggctgggggctgagtgcagaccccgaaagaaggactggctcctcggtgctgatggctgtccttctaaaccagaggggagtccaaaagcttcagtgcaggaggaaggcagtgagtgttagccctgacctgcgctgagccctgagaagaaagcttccttcgcccgcgtcctcccgctggctgagtcaggcaggaccctgctgtgcgaggtccatatggggcaagtgccaactggccacacgggcaaacttgatggttcgctcgcaccaggaccagtcgtgggtgaactctttgcacgctcttgacgtcaggtagcacagaatttggcctcctggggaaactggggaaactggcaaactggggaaactggtggtgtttgcagcctttgtcta

SEQ ID NO: 112181 - DNA, 353 bp, Homo sapiens
  misc_feature (1)...(353): n = a,t,c or g
ccgacccagaagggcccgttgttgagaacttgtgttcctaccgtcttcttttaccggtgagaacccagacccagaacggccttcctgtcactcggcccctctgagaccagctcccgatgccgccctctcctcggctctgacccagcccggccgcctccccctcctggtccgtggccctgggaaggccgcaagcctccctcctcctccctgcagagcctccatccctgcccagctcccgcgggcccgaggcccctgctgcttcctcccctgcagcccaggcccgctccgccctatggccccgtcgcttctcaaagcccccagagcctcctctccccggcccgcgtcccntcctt

SEQ ID NO: 112182 - DNA, 1118 bp, Homo sapiens
  misc_feature (1)...(1118): n = a,t,c or g
ctgagtccatgcccttttgaggtattttccagatattccatgaattttgaggttttcctttccagcaactgtgtgcgctgggattattccacgcgagggaatgttgatccacagcatgggggtcatattggccttagggagaaaggagagacaggaagttttatgaaaactgtcaagttcttaacttcattcgttgtattttttttcagttctagaatttctatttgtgttttaatgttttcagaaacccattctaggagaacatctggatgactttctgtatggcaatgactttttagatataacacgaaaggcacaattgatgaaataagtaattgataagccagacatcaataaaaataaatattatctgctctaccaaagacaagatcatgagaatgggaaggcaacccacagactggaagaaaatacttgcaaatatacatctaataaagtacggctgcccgcatnnnnnnnnnnnnnnnnnnnnnnnnnnnnnnnnnnnnnnnnnnnnnnnnnnnnnnnnnnnnnnnnnnnnnnnnnnnnnnnnnnnnnnnncaccattgtgcaatggagagactgcctcgtttaacatggccccacctttcttgggggtcctaaaccccaactctagagcaccagaaacccaccagcagctcttctttgctttatcactactttttgccttttgctcatggagtgctttgaggtgaaacctcgagcctgagattgtgggctttgatttttgaacctccccttcttttcaggatcttggcctttcaaatcctggatgcactgtcaggcccagactccaattcttatctctccagcttcacagtattgcaggaagctctgctgtttccccctgcttctcaacagcggcactctttcctcttccttaccttcaacccagccacaaatcggcaagagcccagagatagaaagtgatgtgcagagagagtgcccacttcaggaagcacaattctcactaggactgggcctcgaaccactggccgctctcacagctctcttgtgtatcatctgtctgtgtggggatccggcaggtttatctcactcctattgatgtcgaggtcgnnnnnnngaattcgagtcagttc

SEQ ID NO: 112183 - DNA, 1530 bp, Homo sapiens
  misc_feature (1)...(1530): n = a,t,c or g
tcttttacccggggaccatttcagtggatgtctatagaatgggaagtgttgaagctactcccatcctccataactgaggatggcgaggtgattctctgggagtctagatgttctgcttttataaaggtgtgagcaggagtgtggcatcctgttcgctaagacagcccatcctcctgcttccctctcttcctccccattcctattgtctggcactctgtgccaggcgatgtgtgaggcactgtctgtggatgataaatgtcaaatgtggccacttcattgaaggagcctaaaatctcaaatgacagcagaggtgcggagctttatgcaagttccatcatcccccagggtatggggaatgccccggccacagaaggctctgtgaggtcaggtagcacagaccctccccacaggcaggatgaagggcagcgcatgtcatgaagatcttcctccagaagaaagagaccaaaggggctcctggtccccagttctctgccctttgcggggactcttgaatctccttttcagtcaccaccatccaccaccttgaccaaatccaaccgcgtgtcaaggcccagcacagtgccaccttctccaggaagccttctgagaatcttcccaggtgaaagcattgctgagacctctgagtttttaagtactttatctgtacttctcttatgacactcaacagtttccacttcctgtacctggtcttctcccactgttaggtaatcagttaggtcctttaccatgtcttactcattgttgcatcatttttgtctatcggagaggggctttgtttcgtcgaaagtaatcaataaatatctatggaatgtagacatcactgagagagtccagaggaggatcctgatggcttaaaaaaagggttaaaacccagaccaaaaccaaaccaaaattcccacccacgaaacccaacataggtttagggggaatataatttggagtcagcaaaaaataaatttttcacccctaccttactgaagaaaaatagtttttcagatgcctaataataaggtaagtgacactgaaatactagatnnnnnnnnnnnnnnnnnnnnnnnnnnnnnnnnnnnnnnnnnnnnnnnnnnnnnnnnnnnnnnnnnnnnnnnnnnnnnnnnnnnnnnnnnnnnnnnnnnnnnnnnnnnnnnnnnnnnnnnnnnnnnnnnnnnnnnnnnnnnnnnnnnnnnnnnnnnnnnnnnnnnnnnnnnnnnnnnnnnnnnnnnnnnnnnnnnnnnnnnnnnnnnnnnnnnnnnnnnnnnnnnnnnaangaacttaaaatcggcgctatggacctcaagcctggagaaaagaagcagaactcctctttttnnnnnnnnnnnncctttttatccctaagaatttggaaaccttaccgtgggattgggggccctaacccgcactcaaattcaattttggtgggaaatttttgggataattaaagaaattttgggaaggcctccggggcggaaaccgggcttcctggggggctaaattacccttttaggatttttt

SEQ ID NO: 112184 - DNA, 394 bp, Homo sapiens
  misc_feature (1)...(394): n = a,t,c or g
annnnnnnnnngattccccccccttattagggccggcccccttatggtttgccaaaaaattaaaaannnnnnnnnnnnnnnnnnnnnnaaaaggagggttcctttttttcccccaggggggaggcaaagggggggttttaaatcaagggcacctcttccccccggggttaaaaaaattttctcgccccacccccccaggaaaggggggttccagggnnnnnnnnnnnnnnngggttaattttttggtttttttataaaaaagggggtttccccctttttaccagaaggtttttattttcccacccccatattttgcccgcccgggcccccaaaaaggggggattccgggggtaggccctaccccccaaccgggcccccttccccnnnnnnnnnn

SEQ ID NO: 112185 - DNA, 1545 bp, Homo sapiens
  misc_feature (1)...(1545): n = a,t,c or g
gaaaaaaatgggttaaaaactcctggggtacctgccgtccctaaaagaagactgctcctggaagcaggaataagccgggccaacggccaagccttggcctaaaggacccatgccacccgggaagggctagtagcgtggcctgtgtgttagacgaccgaatcccccacaggaaaggccaggtgacccgcctgttcttgtaaatgcaccaccgctgccaacggaaaggcaagtgggcatgccctgtcctacagaaatgctgatgctcttggggcccgcaccccaagctccagtttatagaaagccagccttggtgaagaagggtttggtatcagtggatcagttgtcatcaacaaaaccactattctctggcataaggatactgcaaactttacttggatttccccagcggtctgcaggctcctctgggggctgaaccgactggtcacattagtgctctggggatacggcctgacttcttcttttctttacaagcgtcatggagttttcctcaaacttattacctttcgggcagaaacagcaaatgcccattctgccgttctctcttcctttaaatcaaaacatgcgctgtgatgctggaacgcttgttttgctctgctttcctctggtgatttaatatcttgagatgatttttaccactccctgcagttgagtttcacttacaggatccacagactcgcaagcaagttagcagctgccacaaccataacctcccctgtgagtcgaagttaaccattacgctcagggcgcaagggaaaggggggcttctcggtcctttcctgcaaaatctgtggacagggaaatctcacacacttctttctggttctattaaaacaaatctttcttgcttcagacatgaaagcatgtcatcatgtgatcttggagaaactgccttccctctgtctgagggtgctctgcggtgtccggcgtcccacgaagcggagataagcatccagagaagctggcgaagacgggtgcacagtaagggcgctgtcaccaccgggtccccaaacagcactggccgactccaccatcaaaggagagaagaaaatgccagcagcagcttgcaacttggcacccaccccttaattttttaggttgagaaagaaaagtcaccttggagtgcgcatgtgcatgtnnnnnnnnnnnnnnnnnnnnnnnnnnnnnnnnnnnnnnnnnnnnnnnnnnnnnnnnnnnnnnnnnnnnnnnnnnnnnnnnnnnnnnnnnnnnnnnnnnnnnnnnnnnnnnnnnnnnccacactgtgtacacacaggcacacatcccccccacccatggttcaaaccccaaccccaccccaccttttggtaacaaccgggcccaaaatccccccacttacacagggatacacacacccccaccccacattccaacttgtacacacacaggcataccccacactcacacatgtgtacacacacacaccccacactacgtggacacacagaaatgcatcccccaccctcacatatgtacacacgcgcacaccccccactttcaccgtgttag

SEQ ID NO: 112186 - DNA, 784 bp, Homo sapiens
accctttctagtttatttttctacttagattagttaacctgctctagggcgccttacacatgaaatcatgccggattttttttaccgaaatccttcttggtacaatttcagcatttatatttttgaaaaacatatggctttcatctatatttcctaactaatggaacattttttaaaaagtacttttttatgttagcaaatctctctatatctgtaggggcttttgttctatattttgttgatttggatcttacttgcttgttttttgggttgattggtctttttcaagctctactttattaatctttctaagaagtagtggtttttttggctaatctttttgataagcttttatttgtttctggccttatattcattatttcctttcttcttggtggtttcaaatgtattcagtgtttctattcagttttcagatttttgtattgaatattttgttttattttgaagttttcttgcttcctgtaaatacattagaaattataaaatttcttttaagtgctaatttaacattgtttcacaaagtgtgacatttttgtttttattttcatttggttctaaatattttgtaaccctcttctggtttacttttaaacccaagggatatttagtaatgtcatttcctttccaaaaatgtgggtattttaaaacttctatccttttgttatttatttcaaaatttattttactattacattagaacacactttgttgctttagagtttattgtgtttctttcttgctaaatacatttttcatgatatat

SEQ ID NO: 112187 - DNA, 1328 bp, Homo sapiens
gtcgcagcgtatataatagtataagtagggctttcttaccccttggagggtgctctaatttaaccaccttccggtttttaaagccttcgcattttggtgttgctttccattaaatccaaggtttaaataaaaaccccaaacaattgtttaaagatgtttcagattgaacttcatggaaccacttaaccagtgcataaacgctgtcaatgaaatgcgaaggcctttcgccatggcacagtttaatgatgacagcccggaagcgaggaaaataacccggcgctggagaataggtgaagcagcggatttagttggggtttcttctcaggctatcagagatgccgagaaagcaaggccgattccggcacccggatatggaaaattcgggcccgggttgagcaacgtgttggttataccattgaacaaatttatcttagcgcgtgatgtgtttggtacgcgattgcgacgtgctgaagacgtatttccaccggtgatcggggttgctgcccataaaggtggcgtttacaaaacctcagtttctgttcatcttgctcaggatctggctctgaaggggctacgtgttttgctcgtgaaaaggtaccgcccccccagggaaccagcctcaatgtgatcacggatgggtaccagatcttcataattagtgcaaaacacagctcttatgcctctcatatcttggggaaaaggacgatgtcacttatgcaataaagcccacttgctggcctggggcttgacattattccttcctgtctggctctgcaccgtattgaaactgagtataatgggcaaatttgatgaaggtaaccgtgcccaccgatccacacctgatgctccgactggccattgaaactgttgctcatgactatgatgtcatagttattggacagcgcgcgctaacctgggtatcggcacgattaatgtcgtatcgcccccctgatgtgctgacccgttcccacgcctgttgagctatgtttgattaagctggggcacgccagttttttgactatgcttcgtgatctgctcaagaacgcgtgatcttaaagggttcgagcctgatgtacgtatttttgttaccaaatacagcaatagtaatggctctcaattcccggtggatggaagagccaattccggaatgcctcccgaagcatgggtctaaaaaaaataatgtgcgtaacgccaatgaagttggtaaaggtcagatccggatgagaacctgtttttgaacaggccatgaacaacgctctccactggggccggaaaaaggcttttttatttgggaacctggctgcagaaaatattcgacggcagagtat

SEQ ID NO: 112188 - DNA, 670 bp, Homo sapiens
taccaattcgagtctcggacccggggatctcgcgagagctaatgagatgagtacaaatttagtgaggatggcaccaagacattgatgtaggggccacaccagtgacgcagacacctcccaccacaacaatgaccagacacctcccaccacaccagtgaccacacacctctccaccacaccagtggccacgccccttccccccacatcgggtgaccagacacctcccaccacaccggtgaccaagacacctcctaccacaatgaccagacaccttccaccacatcagtgactgcagccacctcccatcacaccagtgacccagacagcctcccatcacaccagggaccaaaacacttcccactaggccggcaccaacactggcgatccaatgtcagcctgaggttttgggggtgtcacaacatccaaacgatatcactggggtatgtctggggaggcaggatgattggcaaaagggcctcagaacaggaaaacctttcctttgggtccaaagcctgtgcacaaccatcaggaaactcatctgttctaagatggagtgttatcgtgactttgattggttattaaaagccatcttgtattcccagcagctatggtagtctcagttgggcagatctccgggtacggacatagaattggtaagcacggtcgggtg

SEQ ID NO: 112189 - DNA, 2111 bp, Homo sapiens
  misc_feature (1)...(2111): n = a,t,c or g
accggttcttcgtggctctccctttttattgcccagaagggcctgccctatcaggcaagctttgtcggatgcgcttttgtctctctctgagtgcctcggtccggctttttctagcttatctgggttttccaaagtccccttccctgatgggtcccaccgtcctgttgaaggaaagagagatttgcagaaatttggaaggtggaaatgaaggagcagctattttttacaggacgatcatctgtgtttattcacaccgtgaggctcaaagagggttgcttccccggctaccagcggaaaagggatgctgcacgaaggaattttaggcagtgacactgtaatggtgggtacgtgtcattctacatgtgcccaaaccagagaacggccaacgccgtgagtggtccgtgtgttacagttgatgaacctgcattggagtatcggagtcgccagtgcgggcatagacatctgcggaaacatcaaacgccggctcttcccctcctaaggggaagcccccccctccatttcttaacggcccagggtttttctttaggggaaagttttaagggttgtagttttagacggcctatttgttcaaagcagagaaagagaataacctctgacaatggcaaaggcatagcaggaggagattggaaccatggtggagatcagcccccaggccaggactgcagaagccgtccctcagtgggagggaccttcctgctcgtggtggtcgcttgcctcatagtgagcactcattcccccgccgggggcggctggcacccatcattgcagatctgtgggtgctcctatccctccagaggacactaaagagcaggggagatgcactttccttccagtccaaaccagcctcctgcccgaaggaagaaggagaaccagggctgcatccaaggaaaacactttcatttctcaaaggaaaccacttaggaaactgagggaagcatacttgccaggtgtgtacctgtacccaggatcttcatctagagcagggctggcataacaaggtcctcacgccaaatcaggtccaccatccatttattttggattctctgtaagctaaccatgaatattatttttttttaatgggccaaaaatgtataaggagaatgacgttttgggacatgtaaaaatgatatgctgtccacgttttcaagtccatcaaaataaaataaactgaacagcaccaggctcatgggtttagtattgtctgcagctgttttacgtgacagcaggagaaaaggtcccacagagaccacatggctcacaaagcctacaagggtaactttctggctcattactggaaaagtttgctgaaccctgactatttttattttattgcactacacnnnnnnnnnnnnnnnnnnnnnnnnnnnnnnnnnnnnnnnnnnnnnnnnnnnnnnnnnnnnnnnnnnnnnnnnnnnnnnnnnnnnnnnnnnnnnnnnnnnnnnnnnnnnnnnnnnnnnnnnnnnnnaaccctccaaggacctgggactgggacagcaggagtgcaacacccacaccaacaccagaccacagccttgacccctgagtttagagcatgcaagaaattcctacaaatcaattagaaaaaacaagcgatttaaatagagaaatgggcaaaagacctgaacaagcactttaccaaagaaaagatcaaaatggctactcaacggatgctcccctgtgttattcatcagtggctgctgcttacaaccacagtgagatatcactacatagcccgcaggacaagcaaagtcaggaaagaaggagccggattcagtgtggtatacagagaaactggaatctcacactgtggggggggaacgtgaactcacacactgcttgggagaactgaactcacttccacacccatggggggagtggactctctctcacccgacttggggggctgggaactcacacaccacaggggggcctgaactcactcacacactactgtgtggaaactgaactcacttgcgcacccctggcgggaaggaactattttgcttggccccttggacaataaccactgaaactggaactgaagcttcattgcgacctgtgttcccccgacagcagaaagctaacatatt

SEQ ID NO: 112190 - DNA, 386 bp, Homo sapiens
aagtggctacccgacgctcgcgctcaccagcgcagttcatcccttgccaacctaacagtcctcaccacacaggcctccgcccgcatccttccccatgcactctccacgccccccctcccccctgagtgctccccgtgctcccagtcatgaccccccattggagtatcgacgtctccagtcccggcatagacttctgcgaaaacatcaagctccgctcatcccctcctagtgggaagccccccctacattcatcaacgccacaggtttctttatgggagagttttaaaggttgtagttttaggctgcctatttgttcagagcagagaaagagaataagctctgaaaatggcaaaggcatagcaggaggagattggaaccatggtgga

SEQ ID NO: 112191 - DNA, 368 bp, Homo sapiens
gaaaatgaccctacccttaatttaattaaaacgagctgtttacccactataatgatacagttaaaaagtttgacaatacaaagtgttggcagggccacagaatcactggaattcttaaatgttgcttatgggagtgtaaagtaatacgctttatttgaaaaagagtttacagtcccttacaaagtaagcacacgacccagaaactctactgctaggtgttcgcaccaagtaataaaatttatgttgtaagaacaagaaaactcttaccagctttattctgtactaccccactggtaacaacacatgggccggtcaacatataaagacattgggctacggtgatacaatcggcttgggccttaagcccg

SEQ ID NO: 112192 - DNA, 570 bp, Homo sapiens
  misc_feature (1)...(570): n = a,t,c or g
natttatgggaggggctataatcgnaaccaggtcgtgctttacaagaaaatgccttggcgttatgccaaagagaacccgctggcatgcaaactagtaactgagctaactgtgagaagatgtgctctgaggaatcactcctgggtggaaagttaaggccctgtgcattcctctaccagagtcaccaccaaagggctcactcctgggtggaatgggaaggccgtgtcattcctctacgggagtcaccaccaaaggtctcactcctgggtggaatgggaaggccgtgtcattcctctaccggagtcaccaccaaaggtctcactcctgggtggaatgggaaggccgtgtcattcctctacgggagtcaccaccaaaggtctcactcctgggtggaatgggaaagccggggcatttcctttcgggagccacacccaaggtcccattccggcttgaatgtggagggccggtcattcctttacggaagccccagcaaagggctcactcctgggtggaatgagaaggcctggttattcctctaccagagtcaccaccaaaggtctcactcctgtgtg

SEQ ID NO: 112193 - DNA, 643 bp, Homo sapiens
  misc_feature (1)...(643): n = a,t,c or g
cgaaataacacctaaacccacagctcaaaattatattaagagtcaccccccccaataanttnnnntnntttnttttggggcccggaacacaaatgggatccccgagctatctatcatctnnnntntnnnnnnnnnnttttccccccaagccaataaaattggggacccccaggtttttcccaccccccgccttgtaaaaaccgggccaagtccaaagattggaacccccccgggtggccttaaagggtttcccagcccccaaaaaagggggccccccccgaagtgtttttttttcggggcccctttctttttttcnnnnnnnnnnnngggttgtgttgaaaagcctttaaaccctccccnnnnnnnnnnccccaatgggtcccttaggtcggcccccccgnnnnnnnnnnnnnnnnnnnnnnnnnnnnnnnnnnnnnnnnnnnnnnnnnnnnnnnnnnnnnnnnnnnnnnnnnnnnnnnnnnnnnnnnnnnnnnnnnnnnnnnnnnnnnnnnnnnnnnnnnnnnnnnnnnnnnnnnnnnnnnnnnnnnnnnnnnnnnnnnnnnnnnnnnnnnnnnnnnnnnnnnnnnnnnnnnnnnnnnnnnnnnnnnnnnnnnnnnnnnnnnnnnnnnnnnnnnnnnnnnnn

SEQ ID NO: 112194 - DNA, 714 bp, Homo sapiens
  misc_feature (1)...(714): n = a,t,c or g
cgggggacggaaagaggggagagaaaattccccgaggaacagaaagaaaaatggtaaggaagtgaggaacatgacgcagacgccgacataacaagaggaagggaagaaggcggagtaggagagcaatgtgagaggagggggagagaggcaaagaccgagaggggaagaggggaggaaggggagagtatgagatggggatgggagagggaaaagaccataagcgagatgtggaagtagcacgggcggcgcaacgtgagagataaggacgaaggaagtagagacaccgacatcctcattgttctcctcctcctcctcctcctcctcctcctcctcctccaattcttgnnnnnnnnnnnnnnnnnnnnnnnnnnnctcttcctcttcctcttcctcttgttgnnnnnnnnnnnnnnnnnnnnnnnnnncttctannnnnnnnnnnnnnnnnnnnnnnnnnnnnnnnnnnnnnnnnnnnnnnnnnnnnnnnnnnnnnnnnnnnnnnnnnnnnnnnnnnnnnnnnnnnnnnnnnnnnnnnnnnnnnnnnnnnnnnnntgccttctatcttctttctctactttcaacacttaaatatttttacccaggtttcagcaggaaatggatggacatgaaagctaagtctgcctgttgaaccagaagcccttgcatctgatccccgggggccgagctcaaattaataagcattgtcatatgcgg

SEQ ID NO: 112195 - DNA, 611 bp, Homo sapiens
  misc_feature (1)...(611): n = a,t,c or g
agggtcctccagccgcccccaacctagcagttgcaaatgcgggcgaaaaaggcgatgtgaaaacctcccacccaaggatccctccccacgattgctgggccagtcaacgggacagagccagcttagggccacccaggttccgcagcccaggggaggcttctcagaagggagggtccgagcccagagacatgagggcacccacggggtgagaagcagacncagccacggtgtcctcgctcaggcgctctgcagactcagacccagagttaagaattcacacggacctgtgtctagggaacagtccccgagaagctaccagtgggggaaagagggggtgaggaaggggaggagcccacacggctgcatctttagggagtcccggcccagctggaccctcagagggttctacagcacgaacttcacctgcccgagacccctcatatcagcccccaggctctccacacgtgagcccctcagccatggatatgggagacccagctctagcaatgggcaaagtgtccccacagcccaaggacagaccccagaccaaagatgaggagggcggctttcaggaaaaaagaaaaaaactgtaggatgggcgacgacacggg

SEQ ID NO: 112196 - DNA, 415 bp, Homo sapiens
  misc_feature (1)...(415): n = a,t,c or g
tttcgtcgtctttcgggttcaagcctgcgcctcgttggcctcagggtcccacgctccgctgacgggctttggggtcgccctgcaggttaaaaccccgaacctgctcattcctctcgcggcgtggccctaagacgttcccaggcccgtcgctccgagagggtctagagatctgcgtccatttcggattaaaatcgatctgaagtgggtactggccccgacctttttgctttagcccacacaatatgacctccgggaggatgcgaggaatatgaactgnnnnnnnnnnnnnnnnnnnnnnnnnngggactgtttacattcaaggatgtggccatacaatactctcaagaggagagggagtgcctggaccctgcccagagggccttgtgcagggacgggacgctggagaactacaggg

SEQ ID NO: 112197 - DNA, 523 bp, Homo sapiens
ccggaatttccgggtcgacgatttcgtgccccgcgccgcgccagaagctcgcgcactcatcaagttgggctgcggcggcggcggcagctgtggaagctcaggcgctgcgcgtgagaggtcccagatacgtctgcggttccggctccgccaccctcagcttctcttccccaggtctgggagccgagtgcggaaggagggaacggccctagctttgggaagccagaggacacccctggctcctgccgacaccgccctccttcccttctccagccgcgggcctcgctcggtgctaggctactctgccgggaggcggcggcggctgtccagtctgtggagagtcctgctgccctccagccgggctcctccaccgggccttgcaggggccgagagagctcggtgccccgcccttccgctcgcctttttcgtcagctggctggagcagcatcggtccgggaggtctctaggctgaggcggcggccgctctataggattccacctttacggccccgagcaatgccacgcc

SEQ ID NO: 112198 - DNA, 406 bp, Homo sapiens
  misc_feature (1)...(406): n = a,t,c or g
tttcgtccgctattcaggcccctccagctggctagtctagggcctgagcgctgcggctcagtgttgcccactccagctttggcggctcagcttgaggacgtgtcagtgaatgcaagacccaccctgcaaccactgtcccccagcgagttccttacaaagtgccgacctatgagggagcctcctcctggggacatggaatgttctttgtgnnnnnnnnnnnnnnnnnnnnnnnnnnnnnnnnnnnnnnnnnnnnnnnnnnnnnnnnnntgtttttaatggatgaattgtatggtttggaaataatgccttgatacagttgggtttttggggggtttttttgttgttgtatgttttgctgctgttgcnnnnnnnnnnnnnnnnnnnnnnnnnnnnnnnnnattcagtg

SEQ ID NO: 112199 - DNA, 393 bp, Homo sapiens
tttcgtggaaccgcccggtcctttagggtccgggtcctttcgggccacggattcaacgcctgagcccgcgtgccgctgtcttctgcttctttccttgctgctgatgctgctgctgctgctgccgaccccggagctggtcccgaaccaggacggagctgaggagaacgagtgggtttgcctgcccatgctatgcgaagagagtgaatatgttgctgcggagctgaagacactcttttaggaaaccgggaagaccaaggaggtgattggcacggtctatggcatgctggaccagaaggccttttggaggcaaaacaccaagtatgacttgcgggtaatcgaagtcactgagaccatttgtaagacgctcctggattataacctgcacaaagagag

SEQ ID NO: 112200 - DNA, 416 bp, Homo sapiens
tatttcgtgttgcttaagttggcgatcgcgcgaggagctgagtcgtctatgcctgtagcgaccgtctgggtttgggaacatggctgctagacatttgtgaatacagagaagcttactgctaacgagatcaatcgaactgtgccaagttagatgccgattacccacttcgagtcctttattgtggagtctgttcattaccaacacagtactgtgaatatatgcctgacgttgctaaatgtagactatggttagagaagaattttccaaatgaagttgcaaaacttactgtagaaaattcaccccaaccagaagctggaattagtgagggtcaaggagcagcactggaagaagatgagaagagacaacagatgagaggtggaaggcgtcatatcaaccaataaagaacaccgtaccac

SEQ ID NO: 112201 - DNA, 429 bp, Homo sapiens
ctcagagacactaaccccagctgcatgaaaactcccccagacccttgaccttgggagtcagtcaaccttttgaggttctttgaagctttcatgaaaacctaactttgtgaacatggaaatgataatgctcggccaggcgcggcggctcatgcctgtaatcccagcactttgagaggccaacgcatgtggatcgcttgagcccaggaattcgagaacagcctgggcaacatggtgaaaccttgtctccacaaaaaatacaaaaattagctgggcatgggggcaacacactgcggttccagctactcgagaagctaaggtgggaggatggattgagcccaagaggtggaggctgcagtgagccgtgtactccagcagtgctgtactcgtgtacagtgtactccaccctgggcaacagaatgagaccctgtc

SEQ ID NO: 112202 - DNA, 537 bp, Homo sapiens
tttcgtccgaagatgacgtcggagcgttctcgaatcccgtgtctctcggctgcagctgccgaaggaacagggaaaaagcaacaagaaggaagagcaatggcgacactggatcgcaaagtgcccagtccggaggcgtttctgggcaaaccctggtcctcctggatcgacgccgccaaattacactgctccgacaatgtatatttagaagaggctggaaaagagggtggaaaaagcacggaggttatgaggcttaataaagaagatatgcacttatttggccattacccagcacatgacgacttctatctcgtagtgtgcagtgcctgtaaccaggtcgtcaagccacaggttttccagtcgcactgcggtaagtggacccctgcaccgtcggccacatctgcagctgccgccctggggacagtcgccttcccctgggctccccgacagggtctcgccatgtcttgtctcagcctgaggctgtgggtaaagtcttcctgggctgctgcctctgctcgcaggctgttttaagagctgtac

SEQ ID NO: 112203 - DNA, 405 bp, Homo sapiens
  misc_feature (1)...(405): n = a,t,c or g
tttcgtagtagtttctaataaataatacataatacatacttgtcatttttccnnnnnnnnnnnnngggggaaggggttttctttttgcccccaaaggggaagcaacctttaccctgggggccccagggatttttgggcccaaatttcctgaaaaggggggaaaaaagggcctttgtaaccccccccaaccgattttttaaaattttaaaaggttgggggaaaaaggaatttggttttttggttagggtggccccaaaccccgggccctaaaggggtcaacgggcctaaccccccaaaattttggaatttatggcctggacctccgggcccaaaatttttttaaccttattttacccggaaaaagggtttaaacggggcccaattttaaaaagaaaggcgggaaaa

SEQ ID NO: 112204 - DNA, 975 bp, Homo sapiens
  misc_feature (1)...(975): n = a,t,c or g
aggtagttttaccccctataccctttaaaattttatttttcccctaaagccttaaatttttgtagggaggttgtcccattatgtcccccccccaaagtaaggtttctttcccaaaatccccaggtgggcttttatttaaccccctaaaaggggaaaaatatacccttgcccgcccccggtaaactttggccccccgaagggttcttttgagggggggccccgttccnnnnnnnnnnnncttttagttaaaccagtcatttttattgcttggagtacaccagaccaaatttatgcgacccagggccagaggctgtaagatgattccatatttcccaattggggagggaggactccgcttggtctttataatatcgaagccaaaacgggtgaatcccggctctcttattagaatccagacgggaatttagcatcccttatcctttctggttcctctcaagagtgctttcggaacagcaacttgctttcccttaatttaaatggtanaaggatcttcaggaaagatcagggagcaaagtccccttggactttacggaattctttaaaattttatttgcctggtcacaaaaacggtacctggtgcnaacacccatgtggaatctccctcaggatttacacccggatctgtggaagggagtaagggcccttccttggcccagtttggtaaatctgctcccttcaccgtcgtcgagaatgtcaaccttcaacacaagtgggggacgctgcgttgaataagggtaaagcccgactggggacagggccccttcccgggggagagaagcagtctcgaaggtgaagtggcggctagtgccagagcagcccagaacatcatcccctcggcccgctgcccacactccctgtcttcctcccaccccccgcccagcaatccggcttgatgccccgagctcacccgggagcatgcatgcgacccatgatggcggcgatcggacgcgtggg

SEQ ID NO: 112205 - DNA, 431 bp, Homo sapiens
ttacgcaattccagtttcgacgattacgccagagctccgggacccagatcccgaggcatctggaggagaatgacctgaagcctatcttcgaacagtttggacggatctttgagctgactgtcatcaaggacaagtacaccgggctgcacaagggatgtgccttcctgacatactgtgcccgggattcagccctgaaggcccagagcgccctgcacgaacagaagacgcttccagggataaggaagttgaggtccagacgggactagtggcttgtccaaggtcgcccagctaatgaacaggccgatccaggtcaagccagccgacagcgagagccgaggagaagaccggaagctctttgtggggatgctagggaagcagcagacagatgaggacgtccggaagatgtttgagcccttcgggaccatcgacga

SEQ ID NO: 112206 - DNA, 420 bp, Homo sapiens
cagagacatcggcggcgggggaagcagcgtgagcagcctttgatcgctgagtcccaatgaaacgggcagccgtggccctgcgcagcccgcagtatatttttggagattttaaccctgatgaattctatcaattctttgtgactcctcgatcttcagttgagcttcctccatacagtggaacagctctgtgtggcacacaggctgtggataaactacctgatggacaagaatatcagagaattgagtttggtgtcgatgaagtcattgaacccagtgacactttgccgagaacccccagctacagtatttcaagcacactgaaccctcaggcccctgaatttattctcgggtgtacagcttccaaaataacccctgatggtatcactaaagaagcaagctatggctccatcgactgccagt

SEQ ID NO: 112207 - DNA, 420 bp, Homo sapiens
tgcattcccgggtcgacgatttcgtgctctgcgttctgtagtggcgctgcttgggcccgtggcggattgtaagctgctggttttgcggctgggaagagcggcgggagggttcggcatttttcgtcgggatccccgcaaggatgagtgctgccagagagtctcacccgcatggggtgaagcgttcagcctccccagacgacgatgtaaataataatggcggagtggctgagggttgaggcctactaaagcctggagtaggccgggaagggtggttggaggaggacgcgcctgaggtggcctgcagcgggagagcccagggaagaaaccagaagaatgagtgggaaatgcctcccttaatctttatgagggtcagaaggtttgaagaggcccacacgctgagagccggagacctgcgtacga

SEQ ID NO: 112208 - DNA, 459 bp, Homo sapiens
  misc_feature (1)...(459): n = a,t,c or g
aagatcaagcgagtcggggccattagaatcaccatcattggccaaagcaggaaaacggaaaggatcgcgtgggcaaatacttcctgaacccgccaagggagtgaccgcaagacgcttggcgggtggtggatcacggcggtaagacaacacaagcgaagaatctaatcctcaaactccattccggcgtccggctcagagcagaaaaagcaagtcctgggagggatgacttaagggaaaaaccctccccctccaggcgagctcggacctttccccccacacgccacatcacccccaaaggcacacccgtatccgcctctcaggggccctccgccacgggggcgaaagaacccccccgcccccccaccagggtccggagtcatcaacacggagcggctggtccatcggtcagcgacgaaatcgtcgacccctgaannncnnnccggtgccgcaggcgaacga

SEQ ID NO: 112209 - DNA, 921 bp, Homo sapiens
cgctcgggattctcgcctggcgcggctggggaaggtgaacagtgtggcccgccatgttcttctccgcggcgctccgggcccgggcggctggcctcaccgcccactggggaagacatgtaaggaatttgcataagacagctatgcaaaatggagctggaggagctttatttgtgcacagagatactcctgagaataaccctgatactccatttgatttcacaccagaaaactataagaggatagagggcaattgtaaaaaactatcccagaaggccataaaagcagcagcttgttcttcccagtcctgggatttaagcccaaaagcagaaatgggtggttgcccatctctgctatgaacagagtttccagaagttttacaagttccctccaaatgagacgtatatggaagttaggcaactttttattacaatggtataatccgaaagcccagtttggaaaagtatcacatttcaagggtctggcactactacaccctggcatgcttccgaaactctggacagcatactggaggccattcagaaaaagcttggaataaaggttgggggagactacacctgacaaacttttcactcttatagaagtggaatgttttagggggcctgtgtgaacgcacccatgggttcaaataaatgacaattactatgaggatttgacagcctaaggatattgaagaaattattgatgacgctcaaggctggcaaaattcccaaaaccagggccaaggagtggacgcttctcttgttgagccagctgggaggctcttacctctttgactgaaccacccaaggcgacctggatttggtttaacaagcaggggctttaatttatatctgcactgtcaatactgtcactacaacaaataaaatatggaacttccaatctacgtaaacttaaaaaaaa

SEQ ID NO: 112210 - DNA, 405 bp, Homo sapiens
tttcgtgcgcgagggttcacgaaggcggtagctgatgggttgaccgacagacccagttgaaggcctttacgaagcgaaaaaggccgggagtcgtgccctacccggttgtagcatgcctgaaagcacaggatatgtgatcgtctttttttaatgaacaagcgaaccatacctgttgtaaacatgggacggacatctacttcttgcgccaagagtggacaatctatgaaccccgctgaccaagcccgtatggaatcccggaaaagagaatgacatatgaacggtgcacagcgcatgatggttcgagctgcaggtctatagatgaaggatgcacaacacgaaatccgagacatggagaaactggatgaaaaggcatgaacccagcgcagagccacagacacatgagaa

SEQ ID NO: 112211 - DNA, 418 bp, Homo sapiens
tttcgtggaggagaagagaagcgcagcgccgcgccgtgctggtgcccatgtggggaggagacggagtcgctgttgccgccgccgcctgtagctgctggacccgagtgctagtgatggggaaacggcaggatgaagttcgccgagcacctctccgcgcacatcactcccgagtggaggaagcaatacatccagtatgaggctctcaaggatatgctgtattcagctcaggaccaggcaccttctgtggaagttacagatgaggacacagtaaagaggtattttgccaagtttgacgagaagtttttccaaacctgtgaaaatagacttgccagaatcaacacattttattcatagaagctccagaagctcagcgcaggttttgctcactttagaatgagcttaagcatcattggagccg

SEQ ID NO: 112212 - DNA, 575 bp, Homo sapiens
gatgcggttgcgcgcgtacgcaagcttggattctgtagagcggccgctgcggcgaactgtccagtgctgaaaacggatgcggcccgtcccgcagagctcagacccaagcctgccgcacccagcggagctcgaaccgagctcctggaagcgctgacgcagagcgcagggagagccggagcggcgagctccaagcctggcatggacctgcagagacccgattcctaccagggaggagctggccctgacttcaacgaccacgtcctgcataagctctctctctattgttcccttccagaccatcctggtgggtgacagtggtgtgggaaagacgtctctgctggttcagttcgatcagggcaagttcattcccggctccttctcggccactgtgggcatcggattcacgaacaaggtggggactgtggatggcgtgagagagaagctgccgatctgcgacacccgctgggaaggaacggttccgaagcgtcacccatgcttattacagagatgctcatggctagtttctgctgtatgaccccaaccaccgtatctctttgttacgactatcggcgctt

SEQ ID NO: 112213 - DNA, 474 bp, Homo sapiens
actatgacctgctggaaattttggatcctctacagcggccgcttacagcctttggatttgccagagtcaggttggttgctggaaagaacagctttcttagaattccgaaaagcgggctctttggtagaaccggccggttacggccctgcatgtgctgtgcccgtagcactgccaggcccaggatggtgagatgtgacggccacaaaccccccacggtgtccccgcctgcacgtgccgcggagtgcacctggtcccactcctgtcctccagctcacagagtcccctcaagccactgccctgaaccctggccaccagccgtcttcctctgagaggccccgcacccctcctgcctctctgcttctgcatgcccacagccttgtccgcccggcgggtctgggagttgtggtgatcgaagtagatggaccggctccagctccacccactatatgccagcccaggcaagtcgcagggcat

SEQ ID NO: 112214 - DNA, 440 bp, Homo sapiens
caacttcacagaaaccgttccccaacgtgtctctgcataggctgcaacagagtcaaaagacaacttgtggcacgtgggagtttgaagatgcatctcagaaggagaaagaagaaacgggacttggtcgcggatcggttaggacacagggagatacagaatgaggagagtcttctagaatccagacaaagacagacagaggaagggagggagaaaggaaatggagaaaagagacagacagaggaagggaaggagggagggaaaggagcagcgagggaggaagtgaggaaggaaatgagaaacagagagagacagaattttaaaaatctagagaaagaagtataaagaaagagagaaagagacatagaaagggaagaaagatgaaagagataaagaataaggaaagaaatagaggaaagccaggaggaaaaaacaaaggaaag

SEQ ID NO: 112215 - DNA, 403 bp, Homo sapiens
ccccgaggctctgctgggggccaggcagagagctcttctccagggaactcaatagtgtctgccatcatcctctcctctcggacttctcttccatagtccaaggagttactttctatcccagggctaggaaggttaccactggaaactctaaagccaagaattaacttctgtatcaataacctctataccaataagtgcagaaaatacatcagacacagtccaatctcattcatgataaaagtgctcaacagactgagaataaaagggaattttctcagcctgatactgagcatttatgaaaagtccacagctcacatcatattaatatttaatcgtgaatgactggatcctttcccactaaaatcaggaacaaaacaagaatgtgtactctcaccactgtatt

SEQ ID NO: 112216 - DNA, 404 bp, Homo sapiens
aatacatgcctgttttcagacctagaagccatcaactgaaggagggaagaggcctccataaggagggaccctgctaaaccacagcaagtatatatagtagtgattcctccagttcttccccaaagggacctatggtcatttattcagataaccttacactaaagagttaggaaaatatccagatctttcaagggttgctggatactagatctaagttaacactgatatctggggacctaaagcatcagcatggtccaccaattggaataagagtacatgtgggtgaggaaataaatagagtcctgacccaggtctgttgtacaatggttccactaggtacatggacctacccagttgtctctcctgttcatgagtgtatacttgaaataggcgtacctagaaat

SEQ ID NO: 112217 - DNA, 771 bp, Homo sapiens
gcagccgctggacccgccgcccttcttccccatctctcccccgggcctgctggttttgggggggagaaggagagaggggactctggacgtgccagggtcagatctcgcctccgaggtgcagctgaacctggtgttttagaggataccttggtcccagagtcatcatgaaggctggagtgcagtggtgcaatctcagcttactgcaatctccgtctcctgagttcaagcagttctgcctcagcctcctgagtagctgtgactacaggcccttgtatgagcctcccctatttgacagtgggcactgatgtgagctgctacatacagaggagccttttgtgaagcccaagattcaagacaggcaaaaagacttgtccaaattcaaggtgacattttagacatgattcccttccaacagtggaaagttccaggatgacccacataaaggggcccacttaaaggtagggagctatttgtggaagtgaagaatcttgatggtgcatatcaggaagctgttatcaataaactaacagatgcgagttggtacactggtagttttttgaatgaccggagatgagaagacactgagacgatcttcactgtgcctgaaaggagagaggcattttgctgaaagtgaaacattagaccagctcccactcaccaaccctgagcattttggcactccagtcataggaaagaaaacaaatagaggaagaagatctaatcatataccagaggaaggagaggagggagggagggagagggagagaggtg

SEQ ID NO: 112218 - DNA, 384 bp, Homo sapiens
  misc_feature (1)...(384): n = a,t,c or g
aatacactggccattgtctatttgcatatttggtctcccagaaccatccacgtcaggagcaggaccccatctggcctggacctagctaaccactcctccttctgtggtttctgtctgccctttcttcnnnnnnnnnnnnnnnnnnnnggaaaagggggttcctttttttcccccacctggannnnnnnnnnaaaaaatttggaatatttacccccccatttttaggggaaagggggggccgccccaccccccccaaaaggggggaaaaaagggggcccccccccggccggggtaannnnnnnnnnnnnaaaaaaaacagggtttacacatgggggcccggggggttcaaaaccccggccccaaaaaaaccccccggcccggccc

SEQ ID NO: 112219 - DNA, 2592 bp, Homo sapiens
ttgagggtgttcggatgtaaagatcggagaattgctggatttcagaagagggaaatttttagtccggactatatcacagtatattttgtggaaaaaggggaggcagcagatattcaaagtagacttttcagtatcagcggagggtgacaatgaagaacaagaaaaattactgaagaaaagctgtacgttatatgttggaaatctttctttttacacaactgaagaacaaatctatgaactctccagcaaaaagtggtgacataaagaaaatcattatgggtctggataaaatgaagaaaacatgcatgtggattctgttttgtggaatattactcacgcgcagatgcggaaaacgccatgcggtaacataaatggggcgcgtctggatcaccgaatcattcgcaccagactgggacgcaggctttaaggagggcaggcaatacggacgtgggcgatctgggggccaggttccgggatgaagtatccggcaggactaccgatgctgggaagaggaggctaatgggaaaactggcacagaaccagtgagtggttgagagctctgtcagtgacaaacactcctttggcctgtttgaatttgctgaagaacatcacctaaagtctgcacacgagcccatttttaccaagatttgagtcagtgtctttactgagctggaagcctctgaaagttattaaaggacagaatccaaaagaatgcctttaattcttgtctgagaatcttggccatgtgtcagattatcagaacaattttgttaccagggtcagaaattgtgttctttgacaacagattggatctgtaatgttgattagtctttagccataaccactacacttttagaaagacagaaaaatgtaagaattttgtttttaccagaatgagtcttaagtaggttcatgatctacattggggcctgggattatttattttaattttaagtttgcatgagatagcctaataaatggaggtggggccaggcatggtggctcacacgtgtaatcccaacactttgggaggctgaggaggaaggatagcttgaggccagggagtttgagacttagactggggcaacattgccaagaccccgtctctactaagcaaaacgaaaaacaacaaatggagttgtgctatgttgtattgctttgcacaaaattaggaacaggtgtttgacaattgaatttgttttctgtgaattctaacctctaaaggcatgcttagaggtcaaggaccttcctgtgtagttggtgcaaaagcaatctccacaggacagcgctgcttccaagcataatacttcaggaaatgaggccagaacttggagtatttactaacacgtttttttcaaaagatgtcagtgttattacctaaagctaaaaaaaaagcaagggtttgtcataggaggggaacctcttaaattaatttcagggggtagggggagatgttgtcaataggaaatgggataaaatatcaagagacaatgaaaacactgccttgacatgaggaccagcaagtttattcttttcattttcagtcgatgttgggaatggactggggttttaaaagggagcttgaagtgggaatgtttgacagtcacagaaggttcctgcagcagatgcctcttttagccatttctcatttttttcctcaaattttacctacttgaggctcaaggcccttcacagtgagctgatggtcctcctacaggggaggggagtctagggaatttatttggtattttgtaaggcaagggggggatttcctctctaatatatctggagttattgctccatttaaaactgttaagtcccagtataattttccctgataatggaaaaaatggtgcatttttttccaccttagcaaccaaagtacccttcctaatttcccaatagtcccgtgaaagttggggccgaagtaccttaagtgtgaatgtctccccctgttaaacctgagtgtagaaatcctgaatttttaaaagagctgtaacctagttgtaagtgccttaggaagaaacttttgccaacatttaatgaggatacactgttcatttttaaaattccttcacacttgaatttaatgtgttttatattctttttgtagtaaaacaacataactcagatttctacaggagacagtggttttatttggattgtcttctgtaataggtttcaataaagctggatgaacttatcattgttgctgcctgtttcctggcctataaagagggttgtgttctggaattcctgtactctggatacacatgaatgagttccagggggattctatgaatagtgtggacaattcgcgtgtccattttgattgactgacagttggaaataactattgctgcgtgtgaagagagcgcacagattttcttgtgaaagtgatcaaataggcaccaagcaacctctactgatggaagaataggttagttttccaaaaaacatgctctggatgattgcaagggaagggaaattgtgggtggattaagaacatcttatgtttcctgggctagagaacactaaatgtgagtctctttactgcaccattctttctcgtgcggaatcctcagagcaggt

SEQ ID NO: 112220 - DNA, 431 bp, Homo sapiens
  misc_feature (1)...(431): n = a,t,c or g
ggtggtctgtacgttagggtggaccctccagagcggccgcaatacattgcttgtacccacagtttactgaggtggaaagtgaggtcctgtcattgaagagagatgcccagggacactcaactggtaagggggcttgaacccagggagggctggctccccaggttgggcttggtgagctgtggggggatcctggggggccagaagagcccccacccccgggcccacactgtatttgagtgtctatgcaacctcagagctggtcacgcctggacgttctacacctgggaagccaggtgagcccacacctgtgtccgtccccaccttgcacctcagtagtctctggtcaccttatttgnnnnnnnnnnnnnnnnnnnnnnnncttctcnnnnnnnnnnnnncctttgaaaacacaagaatttttttggtgcccc

SEQ ID NO: 112221 - DNA, 1312 bp, Homo sapiens
  misc_feature (1)...(1312): n = a,t,c or g
gtggggcctgcctggggaaagcttgtagccggaagagaaaatgagcttcctaggacccctgactcacgacctcatcaacgttggtgctactgcttggtggagaatgtaaaccctttgtaaccccatcccatgcccctccgactccccaccccaggagggaacgggcaggccgggcggccttgcagatccacagggcaaggaaacaagaggggagcggccaagtgccccgaccaggaggccccctacttcagaggcaagggccatgtggtcctggccccccaccccatcccttcccacataggagctccccctccacacagcctccatctccaggggaacttggtgctacacgctggtgctcttatcttcctggggggagggaggagggaagggtggcccctcgggaaaccccctacctggggctcctctaaagatggtgcagacacttcctgggcagtcccagctccccctgcccaccagggacccaccgttggctgccatccagttggtacccaagcacctgaagcctcaaagctggatttcgctctagcatccctcctctcctggggtccacttggccgtctccttccccaccgattcgctgttccccacatctggggcgcttttgggttggaaaaccccccccacaatggggaatagccacctttgcccttgtagaatccatcccgcccatccgtccattcatccatcggtccgtccatccatgtcccccagttgaccggcccgggcacccactagctggttgggtgcaaccacccatcaacctggttgacctgtcatggccgcctgtgccctgcctcacccccccttcttccactccccccagggcgtgcggggctgtgcagactggggtgcccaggcatctcncttccccacccggggtgtccaccacatagcagtactgtataaccccccatccctccctcgggtccactgaacttcagagcagtttcccatttcctggccccgcccatctttttgtgtctcgctgtgatagatcaataaatattttattttttgtcctggatatttggggattatttttgattgttgatattctcttttggttttattgttgtggttcattgaaaaaaaaagataattttttttttctgatccggggaagctgtaatccccagtaggaaaaaccatttttaatcactctaataataactctggnctgaaaacacacctttttttttaataagaaaagagaattaactgattcagaaawgatctaataaatggaaaacctttaaaggaaaaaaaaaaaaaagacacabagcaagtg

SEQ ID NO: 112222 - DNA, 1503 bp, Homo sapiens
  misc_feature (1)...(1503): n = a,t,c or g
ctcggcccggccatcttgtgggaagagctgaagcaggcgctcttggctcggcgcggcccgctgttaatccgggagtgtatcgcgccgccgagccaccatcagtgcctgggcacttacaggaaggcttcggctgcgtggtcaccaaccgattcgaccagttatttgaccgacgaatcgggancccgttccgaggtgctgaaggcagcagagaacaagaaaaaagaagcccggcgggggcgcgtgtgtggggccctgggggccaagagcgcgactcagggccggcgggcccacgaccaactccaactgcggcaggcaaacagcgtgcgcaaggagtcccagaaagaccgcaagaacccgctggccccccagcgttggcgtggttgacaagaaagagggagacgcagccccgccccggtttgggggggggtcccccgggggcccccttcaagaaagaaggaataagacgagttggaagaagacctgatcaaccaacttcagggttgaagggaaaattaatttgattagaagacccagaaaaggccgaccacctcgtgaacgaagatttcgaaaagccactttgaagaaaaagggtgaaaggaggccgaatttttcagtttgatagacccgatttatttgacccgacctatttcgaggttcgtgggtagtcttggaagaggtcgagggggccgtggaccgtggaatgggccgaaggagatggattttgattgcttngtggcaaacgtgaatttgataggccttagtggaaagtgattagatcttcttttttcacattacagtggcctgaagcaccgaggacaaaccgtggaaggtagcggatctcacaactgggggaacttgtcaaaagacgaattaactgactttggatcaatccaaatgtgacctgaggaaacacctgaaggtgaagaacatcatccagtggcagacacctgaaaataaggagaatgaagtttgaagaggtaaaagaggagggtcccaaaaagagatgacttttgggatgagttggaaggctatttcaaaataaggaccgggcaaaaagtagaattttaatatccgaaaacccaaatggaaggtgctgatgggcaagtggaaagaagggatttgttcttcataaatcaaagagtgaagaaggctcatgcctgaagattcgggttatggacccatcattttccggaagcccagccaaatgatataaccgtctcagctggagatcaattttggagacccttggcccgcccaggacgtggcggcaggggaggaccgaggtggacgtgggcgtggtgggcgcccaaacccgtggcagcaggacccgacaagtcaaagtgcttcttgctccctgatgttgaatgacccagaggcattccccagcttctggctttaactgggatgcccataagacaaccctggttccttttgtgaaccccctcctgttcaaagcttttgcatgccttaaggatcccacacaactaagaattaaaaaaaaaa

SEQ ID NO: 112223 - DNA, 2152 bp, Homo sapiens
caaagccctgagagacctatttctttggccaccccaacgtggaatcctggggtcactgggaaatactagggctttctctgtgagattgggaaagacttctaggatggtctggacgctgatggctgaggtctggtcttaaattttacacgtcatttctagagagacgtgaagcctacgaattccagagtgaacccagggcctggggtgcaaatgtcttggaacctgagggcaaccatcctggatgccacagcatagaaacctcttatctgagcatcccagataagacccagagctcatctggaatccaagtgtaccatgactataaagagtccaccgggatgtcaggcttcttaggagaggtgcttgtaggagagagacatgtaggaatgtggacatggccacactgacgctgtttgtcacagattttcattctaatttcttgttgtttctttaaaattgtcaaatgtccctctttctttttttttctcttagtgcttacaaggaaagctgtcagtcttcataaactttcaaagagttacaaaaatacggtattttttaagctacaattcaagattagcatccaaacctacaaacatgatgtacattcggtcacaacaccatacaaccttcacacctgggctacagcaatgttgacttacatcaccattgtttaatacttgtggaaaactttattgtgcaccagtgacatccattccgcccagacttaatgttataaagcagctgagcagagcttctcaaagtaaaactagcccgtgttgctacaaaggggaaattctgggctcttgggcccaactgtttcccatacccaatcaggctaaggtcaggcctcctctctggctttcttttcccattttcaaatgccggggggctttgggcctttgagggaattaggaccagattcagttttaattttacaacactgatctcaactgtatagcaaatatagtgaatttgccctgagagtatcaatacattttacaaatattatgagtcccagtttatgcatgaagaaataggcacagagaggctacattggcttgtcctttgtcacacagaagatttatgttgagtatgaaactttgagcttccgttttagctttccatgtgaaagccccatgtctctccagaggtcacctgggagctctgtgcacaagggccaacccacttgggattctgtttgttacttgtactgccctgtcagtttttctgcccagcactgaatttttccagtacccaaagacttcatccttgatcttctctgctctctctcattcctgctgccttgatgaagtgtgttgcccctaatattttattttacacagtggaatttgtgcccttccagctgcagctgcttttaggtgtggagagaaggacttataaaaaggcgatggacaggcgttcttctttttgaattttagaccaagtggggctcaatattttacagttgtcttacatttgaatgctgctttctttttcttttcttttttgacaggatctcattctgttcaggctggagtgcagtggtatgagctcagctcactgcaacctccgcctcccaagttcaagcgattctcctgactgagcctcaggagtagctgggactacatgcatgcgccaccatgcccagctagttcttatattgttattattattattttttgagaatggagtgtcacattgtcatgtaggctggagtgcagtggcatgatctcggctaactgcaagctccgccttccgggttcacgccattctcctgcctcagcctcctgagtagctgggactacaggtgcccaccaccacgcctggctaatttttcgtatttttagtagagacggggtttcaccatgttagccaggatggtctccatctcctgacctcgtgatccacccgccttggcctcccaaagtgctgggatcacaggcgtgacaattggcactgggcctccaatgctttcgatggaaaataaaataaaataaaggccctaacagtgtggtaatgtttacttctctgccacaacactcagtatgccccctttgatctgggcacaatttaacattaggaaaagacttagacctttacaccccctccagtgagaaaaaaaaaaaatgaccttggctcaacctttccccaa

SEQ ID NO: 112224 - DNA, 592 bp, Homo sapiens
tttttttttttcccgggtgtcctctctttatacagagcacagaaacaagaaactccagtccatatggttagatgtcagtatgctgtcagcctggggtgggggtgggtatgggcatggaccaaaagggggcatgagggggctgctcagtgctgataatgttggttgctcagtctggtgaggcttaaatagatacactcagtttgtgaaaaatttagtgaaccacttaggcaccccgtttctgtaatataaattatacttcaataaaggtttgtgccaacactacattttgggatcacagacatgagccgctgcacctggcctctactctatcttgccagattcattattttaggcttccttgaaaaacttttttggggtgtgggggacagggtcttgctctgttgcacatgctagggtgcagtagaacaatcacggctcactgcagtcttgaccctgtgcataagcgaccctcctgcctcagcctcccaagatgctgggattacaggcatgagtcaccttgcccaggcagattatcttgaaattctaatgcagatttacagttcagtcctgtatgtgcataggggaattatgt

SEQ ID NO: 112225 - DNA, 1027 bp, Homo sapiens
tgaacacggcacgcaatccaaagaggccttcgccatcggtgagagcagcgggggggtgggacctgctgccggacgcctgcctccggctcccctccagtgcctgtggagcaggagaaggaagccgggcaaccgcaggcagcggcagcgggatgggcacctctgggacctatctgtgccggcagcctgcctgttcctcacagagggtctccactcccgccggcaggcttgggagggcggcagtgcctctgggaagaccactgtggccagaatgatcatcgaggccctggatgtgccctggggtgggtctagcctgccatggactccttctacaaggtgggcccccgcccagctcccccgaggacccctttgtcctctccctgaccctggaccccctgcaaaagtaggtccctggtctcagccccagcgtggctgctcctgggaggcctagagcccctgtccgctggcattgggtgagggccctactgtgcccacagctgttccacagcctcccccaccaggtgctgactgagcagcaacaggaacaggccgcacacaacaacttcaacttcgaccacccagatgcctttgacttcgacctcatcatttccaccctcaagaagcttgaagcaggggaagagtgtcaaggtgcccatttatgacttcaccacgcacagccggaagaaggactggaaaacactgtatggtgcaaacgtcatcatctttgagggcatcatggcctttgctgacaagacactgttctgagctcctgggacatgaagatctttgtgggacacagactccgacatccgcctgggttacggcggctgcgccgggacatcagtgagcgcggccgggacatccgagggtgtcatcaagcagtacaacaagtttgtcaagccctccttcgaccagtacatccagcccaccatgcagcctggcagacatcgtggtcctcagagggagcggcaacacggtgggccatcgaccttgattgttgcagcacgtgcacagccagctggaggagcgt

SEQ ID NO: 112226 - DNA, 1397 bp, Homo sapiens
ttttttttttttgcttctctgccccttttccatttcttttgtatttgttttctgtgagagcactgaaatggcggccctggaatctacaatttggctctccactgagcaccttatcttgccaccttagccttaagaatgaatatgaagaaaaatacacagccacctctggtccagggcagtaagaagggctgcaaggaaggggaggatgggggacaaggaaaaggatcagatacctgcttccagtagttgtgaaggccactgtgtctcaggggacttccagggaaggagcagaagagggatcccacgaagttatttttatgcagctggggccagggagggtcagagtggtgccagggtgcaagttaggctaaagaagccaccacttattcctctctcttgcccattgtgggggggcaaaggccatttggtcacccaagagtctttccagggggacccacagatattgccatgtccttcacacgtgcttgggctccttaacctgaaggcaaattgctacttgcaagactgactgacttccaaggaatcagaaatttacctagaaggcaccatgtttttttctatggaccttttcagtccttcaggtcattttaaggtccactgcagggggttagtgaagaaagggtatactttgtgggtatgttttgcttttccctaaataggggacatggaagggaaaccccagcaaatttgcctgttatgtgaaatggccctgtaagaagccagaagtccaaagagcggtgtgctttgccccgactgcctccccatcaggaataggagagtaggacagagatccttccacatccccagggcttcctgctgctgctttaaaagctctgtcccttggagcctcccgctcccctaaagtgtctcgccccctgcacagcactggcctttcggaagcgatcccagtaggggttttctgaggctcgctggtgactcatgccctaattgcaatcctctgcttttatcttgactttgaaggatctaacactgctctctcttccaaaggggaaaaaaagattcatttgttttgagcaataaactaaaaacaaaatgatggccattcatgtgcagctctttgtcaccatgggccggatgagttgtgctcctcctggctcaccatttccccctgctcccccacagccggttctgcacttatcaccgagtcgcccctggaagcagattcccattgagttttccccaccaaggggaccatgcacatggtagaaacattagattctgcattgacagtagcctttccttggcccgggcctgtggtgggaagacgggcaacaagtataccccaccagggcctgagtgactagaggaagaggacgaggccttgttggcactagatttgggtattttctgcatgt

SEQ ID NO: 112227 - DNA, 1372 bp, Homo sapiens
caagcatgaaagttcctgccaaaattcctcctgtcgcgccatatacccctccaggtttagagataaatgctctcccactcagctgcctgagtgagtctgtctccctggctttttctcctcacttccctggcacacccccggggacacgcacaccgcccttccagaatcacagttcaaaatcacggctacattgatcctcacaacagccctgcgaggtaggtgccgcagtcctcccccgtaggcagacttaactccagctctcacagtgactttaaaccacaccagtttgtccagttccagggtcttggcttatgcctactctccttcctctccaatgcaatgaatgacattcagaattccaggttgaacccccaagacctatgcctcacccccgacccaggcagcaggaactcagggagttctcacctggtctgggacctgcaggacagctcggagctgcacccagagtttgcaaaatgccacgtgccttggacacccaggtttgcctatggagtgttctatgcagacccctgcacgggaggtgattcttatcacccacatgagcaatcatctcccgcaattttctctaagcagagctgggcattagctcctcttgaaaggggcaggaatggctccaagatcacctccaggaaaggccagagtgttctaatgacttgaaaacgtgctcccggccagaagcagccactcatcatggaaccccctggctctcattttggcctctggaggatatgggctgtgatttctgagcacccagggaacacagttgggtgattcctaatcaacctagttgtacaggggacaaagtcagaggggcaatcaaactcgcaacagaactcgaatctacaaaccttgaacctgaactccagggatctcgcccttgtcaccgacacacaacaacggccccctttaccaacgtgttcattgttttgtttcaaaaaggcaatgcggcaagcgggtccttgggagccagctctagtatagcactggctaattttttaaaaacgtctgttggctgtgagtgaatgaatgaagggatgaagggatgaatggatgagttacaaccactgccaccctgtggaggaagctgaaaggctgaaagcaaagctcatgggagggaccatgcgccaggcaaggtgaggcctggggaggacttctccgctcatgggtgggagggcttggccccaggctactcttgaccccgaccctgggtcacagtcgtggtgtgtgacacatggaaagcaccatggggaagaagctatgggtgacagtggcagacgagatccagctgggacatgctcagggcagtaaccccggaggaggcagctacaagaaagggtgtttgcttacgaaa

SEQ ID NO: 112228 - DNA, 754 bp, Homo sapiens
gagctcacctggctgtgttcctcctcctcctttcttctgtaaatggcctgtccgggcctcaggccttgaacggtcccttggcaaccttccccatcaacaggaggcagcgggtcagttagatttgggcaatgtagattcccagatttatctccagcccagaccgctctggacctgctcagcccttgtgcccacagctgaggccacatcttgcccatcgggatgtcagtggcacctgtgcccctctatttgcttgctgtctttccggacccttctttctctcacatggcacctctggtccatcaacagtccctgtggttttattttcacagcacgtctcaccacttccctcccctccctgactacctggcggcttcaggccaccagtgtctctcacaggagtctcccaagtggtcccctccttcaccagcccccaacagtctctcgtgagcacagcagccgtgtaatcgccttcagtaatcgccttcagcccgtgtgaggcctcctgctgctctgcgcagagctctgcagggggcgccagggcctctgtgccagccctgccacctctggctccctgctcactgctccccctgcctactgtggcttccagctgctgcctggatgcgcctgtgccctcctgccccggctgtttcacccttgtctcctagggccttgctcagatgttacctcctcagtgcggccttccctgatgccctcgtggaaaatcgtgccccctcctgtgtccccagcctgtatt

SEQ ID NO: 112229 - DNA, 1833 bp, Homo sapiens
  misc_feature (1)...(1833): n = a,t,c or g
gttgtaacagatagcttcatgcacactctgcattttattggtttgtatggaaaatgtcggccattgaattattcatagatttatttcaaatagtttggaaattgttgtacttttgaaaacatgctgttcctgtagttttttgatgagagttatagttgttatatatacataaagctaattttcttttcatttttaagagacaattctttttatcctaaatattttattatctttaaatttgtttctgtattattacatgtgctcctgaagcgagcactctttttaatcctanggatacttcccataataatctcctcctatttaatagcctattggtagttccccaccagaaaaaaacataattctggtgatagaaatttttatttgctgtttaggtttgtgactgaattgtgagaattcagttgtgatttttaacatgcctcagatatatatactaacacgtctaatatatactatctattttattggtttattttgaaaaacatggggtatagaattatttaaatattattttatttattgaaatatttatttaaatatatttatttatttaaatattattattactttaaatattattttaaatatttttggaaatactggtatttttgaatagatgctgtttctataaagctgtgtgatgggtgttataactgttgatatacacactacatataattttgttttcctttttaagagaggattcttttcatcctaaatcttttacctttcaatctttgtatctattattacacgtgctgctgaagggagcatggtttttatctgtgatacttagttaacatatatattacatttatagctatgtagtagttcccctaaattcttgtaaaaataaatttttatttgatatttcatatatgtttgaaatgtgagaattcagatgtaattttttaccttgttttggcatctttgtatgttactttaaagaggatgtgtgttctaaaggaggacatgagctgtgtgttttcaagagaacaatagagtgcgtctcttgtggaaacataataaaaatgaacttttctcaccttcacagcaattgtgatcatattgggcctggattggttattttgctgccccagtgatattttttccttaatggggttgtggttatttgaacatatttattagcctctggaagataatcctgtgctgttttttatgtagaaaaaaacataaggctgggtgcagtgctcacacctacaatccctgtggttttggaggtcatggcgggaggatcacctgaggccaggagttcgaggccagcctcagcaacacagcatctacatctatttttaatttttattttttaaagaaaaacaatagaagagaaggctgatcccaagctacagggtttttttgtttgtttgtttgttttggagacagagtcttgctctgtctcccaggctggaatggagtggcccaatctcaactcactgcaacctccgcctcctgggttcacacaattcttatgcctcagcctcctgagtagctaggcctaacaggtgtgccatcgcaccaggctgatttttgtatttttagtagagatgggatttctccgtgttgaccaggctggtctccaactcctggtctcaagcgatccacctgcttcagccttctaaagtgctgggattacaggcatgagccaccgtgtctggcatatttcttacatttttaatagagacgagggtcttgctatgttgcccaggcccgtctcaaactcctggcctcaagtgatcctcctgctttggcctcccagtgtgctgggattccaggcgtaagccaccactctcg

SEQ ID NO: 112230 - DNA, 382 bp, Homo sapiens
taacctttcggcctcgttccttgtactcggtggtgcccacaggggaaacccaggtttccagccatgtccactaccaccgcctccggcaccaccaatacaaaaatcggttccagtggcatggcagtaagcctggcccagaaaccggagtcccccagtccaggcctcatattcctcggacacagccccagccagagccaccttctcctgatcagcaagtcaccagatccaactcagcagccccttcggggcggctctctaacccacagtgccccagggccctccgtgagccagcccctggcccagttgacgcctccagcatctgccccagtaccagcagtctgttcaacatgcaaaaatccagcctctctgcccgacactgtat

SEQ ID NO: 112231 - DNA, 804 bp, Homo sapiens
acggaggaatacaatgatgatgctgttgttgggagaatttttgtattcagtattttgtatgtacctttttttttaaattggaaagcacaattaggtttaacatttagctttgcttgactccagtgtaagatgaagatgaccttgtcacagctcccctgacctgaagcagagcccttcccatcactgacagtgttgggggttgagagccccccagcagagcccttcccatcactgacagtgtgtcggcagctgagagctcccccagcagagcccttcccatcactgaacagtgttggcggctgagagccccccagcagagcccttcccatcactgacagtgttgggggctgaaaaccccccagcatagccctttccatcactgaacagtgttggcggctgagagcccgtctagcagagcccttctcatcactgacagcgtctggggctgagagcccccctagcagagcccttcccatcactgacagtgtctggggctgagagccctgcctacctgagcccttcccatcactgacagtgttgggggctgagagccccccagcagagcccttaccatcactgacagtgtctggggctgagagccctccctagctcagcccttcccatcactgacagtgacagagatgagagccacccccagcagagcccttgccacgtacagagattttctgtcagcagtttcccagtatttcagactcataatctgtgtttagcactccagkgttctcttgtaatagccaggtctggaaacgacccatggaaagaggggcctttgtattctgctag

SEQ ID NO: 112232 - DNA, 1609 bp, Homo sapiens
cttccagtcaaccgccatggatgacttagatgaggatgaggagccagccccagctatggcccagcgccccatgcaggccctggctgttggggggccactgcccctgccccggcccggctggctcagttctccaactttgggccgagccaaccgcttcctcagcacagcggctgtgagcctcatgaccccacggcggcctctgagcacctcggagaaagtgaaggtccgcacgctgagcgtggagcagaggacccgtgaggacattgaaggcagccactggaatgagggcttgccgctggggcggccccccgaggagcctgagcagcccctcaccgagaactcgctgctggaagtcctggatggggcggtcatgatgtacaacctcagcgtacaccagcagctgggcaagatggtgggtgtctccgatgatgtcaatgaatacgctatggctctgagggacacagaggacaagctccgccggtgccccaagaggaggaaggacatccttgcagagttgaccaagagccagaaggttttctcagaaaagctggaccacctgagccgccgtcttgcctgggtccatgccactgtctactcccaggagaagatgctggacatctactggctgctgcgcgtctgcctgcggaccattgagcacggtgatcgcacagggtctctctttgccttcatgcccgagttctacctgagcgtggccatcaacagctacagtgctctcaagaattactttggtcccgtgcacagcatggaggagctcccaggctatgaagagaccctgacccgcctggctgccattctcgccaaacactttgccgacgcacgcattgtgggcactgacatccgagactcactgatgcaggccctggccagctacgtgtgctacccacactccctgcgggctgtggagcgaatccccgaggagcagcgtatcgccatggtgaggaacctcctggcgccctatgagcagcggccctgggcccagaccaactggatcctggtgcggctctggaggggctgtggcttcgggtaccgctatacacggctgccacatctgctgaaaaccaaacttgaggacgccaatttgcccagcctccagaagccctgcccttccaccctgctgcagcagcacatggcggacctcctacagcagggtcctgatgtggcacccagcttcctcaacagcgtcctcaatcagctcaactgggccttctctgaattcattggcatgatccaagagatccagcaggctgctgagcgcctggagcggaactttgtggacagccggcagctcaaggtatgtgccacctgctttgacctctcggtcagcctgctgcgtgtcttggagatgactatcacactggtgcctgagatattccttgactggacccggcctacctctgagatgctgctgcggcgtcttgcacagctgctaaaccaggtgctgaaccgggtgacagctgagaggaacctgtttgatcgtgtggtcaccctacggctgcctggcctagagagcgtggaccactatcccattctggtggcagtgacgggcatcctgggtgcagctcctgggtgcgtggcccagcctcagaag

SEQ ID NO: 112233 - DNA, 546 bp, Homo sapiens
atggttctcaaggtggatacctctgagtccttatggcatattcagatcagtagaagcagatttcttttggatagtgatgggaaaaggtaagcactggggagcagaggatctagccgtcctattcttgcctcagagttgcttcagggcctccttatcaaggtgttaagttctcattctgtgcagttggaggagatgctaagattagacatttccaattgccttgtcccttctagccaccagagcttgactggaggtaagtggtgaggaaagggaccaagttctcttttttttaaattttttttttgagacagagtcttgctctgttgcctaggctggagtgcagtggtgcggtcttggctcactgcaagctccgcctcctgggttcagaccattctcctgcctcagctactcggggggctgaggtgggcggattgcttgagcctgggaggtcaagactgcagtgagccgagatcatgccactgcacttgagcctgggcaacagagagaagaccctgtctggaaaaaaaacaaaacaaaacaaaaacc

SEQ ID NO: 112234 - DNA, 784 bp, Homo sapiens
ccccgtgagatgagtcgtgaggctgggaacaacagcaggggaccccggccagggcatgagggctgctctgctggcagcgaagaccttgacacactgcagacggccctggccctcgcgcggcatggtatgaaaccacccaactgcaactgcgatggcccagaatgccctgactacctcgagtggctggaggggaagatcaagtctgtggtcatggaaggaggggaggagcggcccaggctcccagggcctctgcctcctggtgaggccggcctccaagccccagccaccaggccactcctcagctcagaggtgccccagatctctccccaagagggcctgcccctgtcccagagtgccctgagcattgccaaggaaaaaaacatcagcttgcagaccgccattgccattgaggccctcacacagctctcctctgccctcccgcagccttctcattccaccccccaggcttcttgcccccttcctgaggccttgtcacctcctgcccctttcagatctccccagtcttacctccgggctccctcatggcctgtggttcctcctgaagagcactcatcttttgctcctgatagctctgccttccctccagcaactcctagaactgagttccctgaagcctggggcactgacacccctccagcaacgccccggagctcctggcccatgcctcgcccaagccccgatcccatggatgaactggagcagttgttgggcagcgccagtgattacatccagtcagtatcaagcggccgctctagaggataca

SEQ ID NO: 112235 - DNA, 428 bp, Homo sapiens
  misc_feature (1)...(428): n = a,t,c or g
cttttcctgacggtgtgcccagggcccatttttcaagtcacaccaatcaattctcaatgagctgcctttgggagggacatgcccagcaaccctggatgagactctccagccttggaggccccagccctgcccgaaggactcttgggtgttccctccttctgcctggttagagagccccttaccctactctgtccttgcccgccttgcgcgggtggaggtggccctcggaacccagggtgcggaacccacagtgcggatccactttggcccagcgccacacccacctgctccagtctgcaggggcgcagtctcgcccccttaacctcgctcctccaatccgctcctccctggcctccgataaaccagtacagtacccgccaccccatgtattgcggccgctgtgaggattcgcctacgtcncgacagtc

SEQ ID NO: 112236 - DNA, 540 bp, Homo sapiens
acacctcctctcttaaactctagttactgaatcgcactttgtcttttccaaaacataatattctgagctcagcagacacttccttatgcgctgttacgcatggtagcgttgctggaattacagtaagaattatcatctgccaggagccagttcaacccatttctgatataaaaagccattttagtactttgggaggcagaggtgagtggattacctgaggtcaggagttcgagaccagcctggaccaacagggtgaaaccttgtctctactaaacatataaaaattaggcttggtggcgcacacctgtattctcagctactcattaggctgaggcacaaggatcacttgaatctgggaggcggaggttgcagtgacccaagatcaccctagcctgggtgacagtgtgagactcaaaaaaaaaagaaaaaaatgaacttttacctcgagagctccaggaagccttgaaagagttttaaggagattgaactgatggggatcattacttggtagttgagcgtaaagtgctcaggggaaggtgg

SEQ ID NO: 112237 - DNA, 701 bp, Homo sapiens
ccctgcaacggtggctcctgacaccaggggatagggagatgtgccagagtccttcctcccctccaaggacaggtagtaggtgccagcctaggggagcttccaaggaggggaaggcaaagccctggcccctgcctgtgtccccttcttggcatgttccacatgctcggtcctgcaggccctgaccctcatcatcttcatctgcttcacggcctccatctctgcctacatggccgcggcgctactggagttcttcatcacacttgccttcctcttcctctatgccacccagtactaccagcgcttcgaccgaattaactggccctgtctggtgaggaaccctgacccctagcccagtttggggcccttccctctcctctaaatgatgcattttcctttcctccccgagcttctttccatttccacaccacagctgggctttgtcccatgctatgccctgcactcaaaggtgtgctttgactcacactgatttcacagctgcagggccacgggcaatcaggaggaccacatccgctagatctactctcccactcagcaaaggtccagccccagccctggcctggcttgacccccccgggctggcatactccagccgctgtcccctgggttccagccccaacgcctggcttctggtcctggttgctctggttcatctgcttccactccctgggtagcagtgtgag

SEQ ID NO: 112238 - DNA, 1167 bp, Homo sapiens
tttcgtggcgccagaggccgccacaacgcaggcgcattcagctaaggaccactccctccccccgcactcctgcctcgccatttcccctccctggccggccggctggccttcttcgctttgcgcacgtaccttttgaggtaacggcccaaagaggtagaagcgcttttcccgcccggccgcggggcgtggctctgcgcgcagcttgatgacgacgttttggcgcggtggcggaatggcggcttccacctctgaagcgggcgacgctatgggtcccacagtggtttgctaagaaggccattttcaactctccattggaggctgctatggcgttccctcacctgcagcagcccagctttctactggccagcctgaaagctgactctataaataagccctttgcacagcagtgccaagacttgattaaagtcattgaggattttccagcaaaggagctgcacaccatcttcccatggctgggtagaaagcatttttgggcagcctaggatggtgtcctcgttggctggaacctccgctgcttacaggggcgcgttgaatcctgtgggagtacagcatcgtgatggaatttctcgaccctggtggcccaatgatgaagttggtttataagcttcaagctgaagactataagttcgactttcctgtctcctacttgcctggtcctgtgaaggcgtccatccaggagtgcatcctccctgacagtcctctgtaccacaacaaggtccagttcagccatactgggggccttggtctgaacttggccctgaatccgttcgagtattacatattcttctttgccttgagcctcatcactcagaagccacttcctgtgtccctccacgtccgtacttcagactgtgcctatttcatcctggtggacaggtacctgtcatggttcctgcccaccgaaggcagtgtgcccccaccactctcctccagcccagggaaaacacagcccctcaccacctcccaggacaccagccataccctttgcttcctatggcctccaccacactagcctcctaaagcgacacatctctcatcagacgtctgtgaatgcagaccccgcctcccacgagatctggaggtcagaaactctgctccaggtttttgttgaaatgtggcttcatcactattccttggagatgtatc

SEQ ID NO: 112239 - DNA, 596 bp, Homo sapiens
ttttttttttggcctgagtctcactttgatgtccaggctggagtggtgcagtggcacgatctcaggtcactgcaacctccgcctcccaggttcaagtgattctcctgtcctcagcctcccggagtagctgggattacaggcatgcgccaccaagcccagacaatttttttgtgttttcagtagagatggggtttcaccatgttggccaggctggtcttgaactcctgacctcaggtgatccgcctgcctcggcctccccaaagtgctgggattacaggcgtgagccaccatgcccggctaatttttgtgtttttagtaaagacggggtttcaccatgttggccaggctggtctcgaactcctgacctcgggtgatccgcccgcctcggcctcccaaagtgctgggattacaggcgtgagccactgcgcccggcctccccaaggagcacttttacagccaaacccacctctttcagctctcactcctgcttatatccctgcaacccaggagactgttttctatttgtaaaattttgccatttcaagacagttgtattaatgaaatccctgtgtgtgtcaaaaaaaaaaaaaaaaaaa

SEQ ID NO: 112240 - DNA, 414 bp, Homo sapiens
  misc_feature (1)...(414): n = a,t,c or g
gcggctcccttatgcgcggttccctcagcagctttgcattgtctcgcgagcatgtcgccgtcaccgacgtgttcaatttcccgtttgcttattaccttgctagactttgagactgaaagttccagggagacagttttgtgtttgctcattactgactcttcggtactcgggatgaggcctggcgcacagcaggcgaatgaaggggccagtgacccgcaagcccagagcgggggtgaaggctggggcagggtgggcccaggctgacctgtgctgcgtccccctagccgcttccacctggaccactgcggggcactcccctacttcagcgagatggtgggataaaacgaaaacatctacatgactcacccctgatgtattcggccgctctggaggctccaagctaacagacgcatn

SEQ ID NO: 112241 - DNA, 375 bp, Homo sapiens
aatacatggccggtattactgtgaacagctaacgttttctttcacccctcatctgtctccaccttagttcagctccagcatcaccctcctggataagttcaattccctctgtcctggtcccctggctcctacccttatcacccagtctgtcctctccacagtacccacgagaggacacctgagagcaagtaagtcaggtcccgtccctcctctgcctacagccctccatggctcccacccaccttggggtcaaagcccaaatcctccctgcaggccacaaggccctgccggacctgccccatcccctccctcactctgcttcagccgcagctgttactccagctttccaggtgtggtcctgccctggggcctttg

SEQ ID NO: 112242 - DNA, 445 bp, Homo sapiens
gcacagtcggttcgtggaccttcgagcggccgcttcgccattcgtgctcctcccacaggcctgaattatgccaatcgcccttggcccacaagcctgacacaggcaatctcactcctcccacaggcctgacacagccaacgctcctcgctcacaggcctgacacagccaatcgccctccgcccacaggcctgacacagccaatcacccttggcccacaggctgacacagccaatcgccctgcgcacacaggcctgacacagccaatggccctccacccacaggtctgacacagccaactgccctctaatcgtcctccgcccacaggtctgacacagcaaatagtgatcggcccacgagcctgacacagccaattgccctccaattgccctcggcccacaggcctgacacagccaagtgccctcggcccacaggcctgacacagctg

SEQ ID NO: 112243 - DNA, 445 bp, Homo sapiens
cacggtcgcctgcttcctgctgaggcccttggtgagtttcacgtacccagcaaggctgtgatagtgaggggcagggtagagctgggtactgtcttgggggatggtgccactctatactgggagccagtgtccacctggcactgggcctcatgatttcctgtttgttgtcccctccagatggggttggggacaggagggggccctgcctggcacaagtgggggccagtttggcctgcacctgctgagggcttactaaacgcaaagccctgagaaggagctgagggagggataaggctgagcaggatggggccccaggcctgcagacagctgccgctggaggccccccagccccagctgcgggccagagccttccttgtttcccacttctcccactgccccaagacactgtattgcggccgctgtagaggatccacgcatgcggagc

SEQ ID NO: 112244 - DNA, 2039 bp, Homo sapiens
gcagggccggacgccgaagcctcagagcgcgtgcctgagggccccgaggcgcccggcgcgggcccgtcccgccccctagagccgcggccacgtgcgagcggcaggcccggacatgcccgatgcctggcagttactgtaaaaagacgtgaacccagcaggaggttcgtcatgagctctgggcagccttccctcaaaaaagtcttaggtccgggaaaacttgaaagtcccccgaaatgggtggaataccgttacaagcctggcacaaggacaagagagcttgctcccctacgaatgagaacttggttctaccacgcgaagctgccttcccacagcgcggccacctggtacctccgggggtggcgactggggcttgggctcctatgtaccagagtatctatgaggggaacgtacagggaaacgggcgtcaatgcccaagccactttcagcccgaggcttccaagagttgtgggcccgcccgggtccctccaaagccctgggaggggcttgaaaaatgggtgggaaaagggaccaagattggccggccgcaaaacttgacaccttcaagggacaaaagagattttgggacagaattcgccggacaggttggcagcctgccaacaaagaagcatttaggaccaaaccatgcttgggtttaattaaatttgcctcattccgtaatcctggtctgggtctcttttttgagtctcttgctctgtcgcccaggctggagtgcagtggcgccgtctcagctcactgcaatctccgccttctgggttcaaatgattctcctgcctcaggcctcccagggtgctgggattgcaggtgtgagccacatgtgcctggtctggtttgggtctcttgattgttcttcaggggcatgaggaagaggcgcttcctcccattcccttgggtgaagggggcccaagggtgattgggtggctgtttacccaggcagccagtcgggccttcccaggtcaaacagttcccatctgggtttttggaggaaggacccaggggcccttgtggctcactcccccacatcctgtctttgcaattgtcagaaagtgagaaacgaaaggatggctgtgagctgtgacctcagctgggcctgggcttgcagaggtggctttccgctggagtaaagtatagaggtcccagggttcatgctcttccctggaaggtagaaaaggacagaccaccagggagcctccaccgcaaactgacctgtgctgcctacacactaactttcctgggcctggggcctgcacaggctgaatggtccttgagccttcactctgcatctgagcggtcttgggcccgctgagtggcagtggcaggaagtcggtggaagcagatccctgcgcagaagttgaattaccaggggcggccacacacgggctgcacaacctttgcagtcgtgcacggcaagtgggatgtggcctccgcccatgattgggcacctggtcaggctgggagatccaaatagcacccagtgggcagctgtccgacccctggaggggcaagccaggaaagaaacttagggcccgctgtgaccagatgtccctcccagttgggaagactaaactggtttggccaatatctcccaggattcccctgtccaaattattcctgggatctgacccatttcctggaaaggggcgagcctgggttttgaagttcaaactagagtttaaatcacaactctgcccctaatcccacgtaaccctgtgcaccttatcctctgagccttcgtctcctcgtgtgtaagcctgctaactcctgatagactggacaagatgccgtggagagccttggctctgagtagctctgctgctggacagttcagttggcagtccccaaccgttaaggcgtaagagtttaagaagtatgggccaggcccagtggttggcacctgtaatctcaacactttgggaggccgagacgggctgatcacctgaggttgggagctttgagaacagcctgaccaacatggagaaaccctgtctctaaaaataccaaaattagttgggcatggtggc

SEQ ID NO: 112245 - DNA, 449 bp, Homo sapiens
  misc_feature (1)...(449): n = a,t,c or g
tcgttcgngagattntgcagagcggccgcttngncattcgtgcttgcatctgctgagcagattggtgcttcgccaccttcttccacgcgaaagcggcccggggatggaggccaggcacgtgggtggccaggctgcagctcctcactccagctctcagacttactctcacctcttcccgacctacacacagggctctccggcacccacatcctcggctgtggctcaaccctcatttccgggctgtttccgcggaagcccacatcctcctgtctgcagtgagcacggttctcctgctgcggctccgcctcactctcctcactgctgctgctgctgctgctgctgctactgctgctttcttcctcttcctggagctccttgttaaaactttctaactgactgatcaaatcccagggacgacggctgaccgggttcaggagatactggccaag

SEQ ID NO: 112246 - DNA, 445 bp, Homo sapiens
  misc_feature (1)...(445): n = a,t,c or g
aattattaaacttgatatccaggtaaaccagaagagaagatatatattgccaatatcaaaatttaaagagaagacatcaatactgatctcatagacattaaaaaggtcataagagaatactatgacctctgttccaagagacttgaaaacttagattaaatgctcaaatttcctgaaatatacaaactaccaagttttactcaagaagaaaaaaagaactgaatagctcaatatctattaaagaaatagaatatgttattttaaatcactttaaaaaagaaaactccannnnnnnnnnnnnnnnnnnnnnnnnnnnnnnnnnnnnnnnnnnnnnnnnnnnnnnnnnnnnnnnnnnnnnnnnnnnnnnnnnnnnnnnnnnnnnnnnnnnnnnnnnnnnnnnnnnnnnnnnnnnntgtattcggccgctctgcgaatcncgcagcga

SEQ ID NO: 112247 - DNA, 437 bp, Homo sapiens
  misc_feature (1)...(437): n = a,t,c or g
aatacatacgctctatccctggggcagctcctgagcctgcattcccccaaccccatcacctggcccttctcctcagctcccccaaatcacatccagtctccaggccccaccgactgtcattctcacccctagttggctgagcttgccccggcccccgggagcaagcacccatggctcagctgcccctgctgggcttcctcctgggccatgtctgtcctttcagccagtccggcctccccgatgggccttcatagcccctcttcccgagcccagctcgttcccatctctccagggcaagtggaattccaggcctctctcctcacccttctctaacctgtccatctcctcctcaccctcccaaattcccacacctctctgtagggcaggggcaccagagcagagagaccatctcccccatctcagtanattaacagaaa

SEQ ID NO: 112248 - DNA, 409 bp, Homo sapiens
aatacagtttgggggtgggagaatgaataggcaggtcacagagaatttttacagtgataaaaatatatgattatgttgtcggcaaagcccgagtcttgtcctctcgctctcctccccggacagcatgagcttcaccactcgctccaccttctccaccaattaccagtcccagggctctgtcctggagcccagctacggttccctgccagtcagcagtgcagccagcatctatgcaggagccgggggctccggttcccagatctgcgtgtcccgctctgccggcttccaggacatggcggcatggggcctgggagcctggcaggaatggaaggcatctagaacgaggagaccctgcaaaacctgaacgacctacctggacgagtgaggagcctggagaccgagaactgga

SEQ ID NO: 112249 - DNA, 851 bp, Homo sapiens
tttgcatgctacaaatggcagaaatgcattcacacagctctggaggccggatgcgaaggtgccacagggctgcgcttcctctgaaggctgagaggaggcccctccctcgccgctctcctagcagcatctggtgtggggtcacagtcctgctttcctcagcttgaagctgcagcacttcgagctctgcctcagttgtcacatggtggatggttaattttatgtcaacttgactgggcaagggggtgcccagatagctggtaaatgtgatttctgggtgtgtctgtgagggcgtttctggaagaagttggcacttgaattagtatagtaaactgcgtacagaagacccaccctcaccagtgtgggtgagcactgtccaatctgagggccttttgagacggggtcgggattctccctcatcccactgctgcttctaagccattcttcggccaccctggagagaaatccgtgttccacccgggcatcatgccgctggtcgcctcacctgggctgagggccagggtcagtccagccagcagacaaaaccaagaaggtcttccccaaagctgggcccggtcaggcaggtggagggctcctctccacagaggcttggcagagcacagtgggaagtgcaaactcccttgggcaatgccgagggtcgggcaggagtatcccctggcccgtaaccaagaagcgagcaaggggaacgcgtcgatggtcacccgcagggatggagaagcagcgccacagggcagcagcggggctcaaaagggggcgtgaggcctcaagaagctcgcagacctccgggagggatgcggcccgaacctccatgcagttcccctctgcccggccct

SEQ ID NO: 112250 - DNA, 437 bp, Homo sapiens
  misc_feature (1)...(437): n = a,t,c or g
cttccccagcagaaatcatgcctccagtgacggtccatgcaggcttctggagcgatgggcaatcttcctcatctgtggacttgctggcctctttccccttggcttctagaggcctgcgctgcatatgatttctctgtctcgggggcctagcatggtcattggccctcccagtgtttcctgcatgatcatcgtgctgttcctgagtcagggctgccattggaggtgacatctgtgactgcaacctgtgcctgaattggtgggcggaacctgctcaatgggccagaacaatgcttccttccactgcccctgcctgaaagtcctcatgggcctcctttgcaatcaaactgctgccaagagacctgaaataaactttgcctgcctctccagaccccatgtattgcgcccgctgtggagtttacaaactacggacntgtact

SEQ ID NO: 112251 - DNA, 861 bp, Homo sapiens
agacgaagagacaccactactcctagcttggcacgaggaagttcatcaggcttccatcggctggagcatgggaccatagcccctgcccaggagccgtaccctcggaccacagtggctctgtatggccaggaactgggactcgagctttcagattctcaactagccttggcaaaacagctgtaggtggcctccctgacaacagacactcagccctccccaccctggctctccttgcatttccccatgctccccaccccctggcaaaaggctggccatgctctgttcccagcagccgcgcaggtttccccactggctgcaatggccctaccaaaagccatgttgcatatccgttgtaagcacgtgccctgtgccctgtccccattccttatgccctaggaggccaagctggtgtctctaggagggcccacacaggcaccctggatcccccagagagtagattggtgtgctcaggccgcaggctgactcagaggtagggcagtgggctctgcaggccacctggctggggttggtgggggtcctctctcctgccccagcttccactcagccaccacagttgccacaccatggggtggagacgtgggtcaccacgggcttgggagcaagcgccttcttgcagcacaggaagccgaagctgggggtcaggtgaggtcgctacccctgggaggtctggcataagggccccaccctcaggtctcctacactggccccattttactttgggggccccaggacacggatgatcaacagcgcctgggtggtcggcgggcccagggcggtgcaaggccgcgttccttgtgtgatggcgtccacttaggaggtgggtgccaagggaagtaaggg

SEQ ID NO: 112252 - DNA, 363 bp, Homo sapiens
ctgaggcaaaaggaggcgcgcgggccgcagcctgacagggacttagcccgcagagatggaccccgcgcgcgtgaccccacacccacccactcagacatctatccactccctgagccgcctgctcccaccctgagcagagccgccgaggatgataaacacccaggacagcaggattttgcctttgagtaactgaccccagctgcagtgctgcaggcacattgttacagggcctctgaggagctcctgatggccctcacccacggtcgaaaagacccggggggcgagggggcggcagggatccttctctctcagctgtaatatagtgggacgagaagctcactgagacccaagacctccctgtga

SEQ ID NO: 112253 - DNA, 430 bp, Homo sapiens
  misc_feature (1)...(430): n = a,t,c or g
tgatgctcgcgtgacataagaggcacctcagggccctgacgggcgtcttgccatgctgctcctgcgcctgctgctgctgctgtccctgctggctggcgcccgcctgctgcggaactggcggaagctccggagcctccacctcccgcctcttgccccgggcttcttgcacttgctgcagcccgacctccccatctatctgcttgccctgactcagaaaatcgggcccatctacaggctccaccttgggctgcaagatgtggcggtgctgaattccaacaggaccacttgacgaaggccatggccaaaaagtgcgcaacacttttgctggcagaccttgaagccacttaccctacaagcctggagtccaaggaaactacccccggaccttgccccttgtgaagaccaaccttccttgctcttggaaaagccn

SEQ ID NO: 112254 - DNA, 1735 bp, Homo sapiens
ttttttttttccttggtggaaatttttttggtgttttttgtgctctgttgcaagctgattcctagattaatggcctcccagcagatttgaaaggaaacctggaagacttcttattttgctgtgccttctgcttcctggtcttgtgtaaagtcccaattcactctcaatttgatccagctctgactggtcaagtagttcaaaagtcatcaccttcttcagtgtctgtgtcctcttctgggatgggggcagcctgagaaagtgcttgctgcacaccctctaactggtctttgatagctgcaagtcactgcagcttgtggataacatccccagccagggtttgcttcatcaggtgaaaaggttttgggtcactggttcagaggaaaggggtgagacccagctgctggattgcgtcttctttgcttgggtcttgtgaccactgtccaacttgttccttctttctcttgagctcagtggggcaaaccaagggttaaatttcatcttcatcatttggttcccatgccatttttctagagatggaaaatctgaaagatctctagagaaaacttcctcactgggtcggtcaagatcatcagaagtgtctgtctgtggagtgtatccttctgaaaggttgaaggtcccattatcagtccaggatacctctgagacgtctgtgtcagacacagataactctttggcagcaaccgtgaggctaatcttaggacaaagagctgaaaagtctaattcactgtcatctttgtgacttttttctttgtctgcttcagatctctcacgtttcttctgattaatatattctccaattccaaaatccagtttcagcagaactgacttaattttgctgtaaattttttgtccaatatcattacatttaaacaatggacacaaaaatgcaacacagtaaacagtagatagctgagtataacccccaggaatggtaacttccccaagatcgtaaaaaaatgtgcaacaacacttacaagacccaggaagacaaaaacttgcccagggctctgctgtttaaaaagagacatttcttgaagaaatatgctgaaattcatccatgattctgcaataccagtggctgagccctgggtctttcatctggtttggaattgataacttcccagcctttcactgaggcttctccacaactgtgcacctcttgttctagacaaaaccatatcctttattatttgcataataacacgcccaagtatcatgacggaaatcaggtgatatactctccatggagtcaatgcaaggaaccagaacagcaggttggcagcgacgaagccgagcagcgtccgcagcggcctcttccagctcagcagctcgtcggcgcggcagcccagccacagcgaccggctccccgagcagccaggttaccgcggccgccgcccggcccgcggcctcctccacctgcaaccccgcgccctccgccgccccagcttcctgcgcttcctcctcctgctgctgccgctctgcgggggatgcctggggcggtggcggcgacggcggcgcctgctcctcggcggcaggagccgggcatccctcctcggcgtgctccggaggcgccgggctcgccatcttcagctgtgcttccaggcagggacggggccgggcgcgcgcgcgggcgcgcctgggtgtgggtgccgccgagggcggggcggcggtggcggcaggtcccggagcggggcgcgcaccgcggggcacaggc

SEQ ID NO: 112255 - DNA, 465 bp, Homo sapiens
  misc_feature (1)...(465): n = a,t,c or g
cggaaacagcaaaaacgggattgatggctggaaacggaaaggtgagtatatgataggaacgtctcaagcatcaaacaagcaggcccaagactgcatgatatcagtgagcagaaaagcaccacgcacggctccaaagacatgcaacgtcatctcccacctgatcaagatccgcctcaagaccaaggtcctcctcaaccacttcatgctgtgcatcagggagctgctgagcgcgcacaaggacaacctgggcaccaccatcaagttggtgatcttcaatgagctctccagcgcccggaacccgaacaacatgcaggtcctctataccgcactgcagcacagctcagagctggcgcccaagttcctggccatggtgttccaggacctgctgaccaacaaggcgaactacctgcgggcctcgcgggccctgcgcgggagatggtcncgtaacagtatccnagaagcaan

SEQ ID NO: 112256 - DNA, 416 bp, Homo sapiens
cccggactcgtggagttgtgaacgccgcggactccggagccgcacaaaccagggctcgccatgaagccaggattcagtccccgtgggggtggctttggcggccgagggggctttggtgaccgtggcggtcgtggaggccgacggggctttggcgggggccgaggtcgaggcggaggctttataggtcgtgcacgaagaggaggcggaggccgccgccgccgcggatgaagaagaataaatagggggcgcttcctttcattctggagcctccttaggccccgggggggcaggagaggcttttagacagaccggcaaaaatgtactggagggctcgttagcatatccattatggacaggtggagtggctacactccctcatgcgaaggctccccagcctactgaaatataaacaagcg

SEQ ID NO: 112257 - DNA, 383 bp, Homo sapiens
  misc_feature (1)...(383): n = a,t,c or g
cgatctcctgagccctgacaccccgatcctcccacaataaaggcttctcaatccgcnnnnnnnnnnnnnnnnnnnnnnnnnnnnnnnnnncaaaaaataaggggggccgttttttctcccccgggtgggggccgcccagcttttctttttctgccccctttttttccttccctgggccctgtttttacacgcgagctgttgaaaaaacgcggggggtgccccttctgggcccccctccccaaaaacncnctgaaacaaaanctatgggggaccgncnganaaacggggncttgcccagccactttaaccgaggctccaagagtgtggcccgccgggtcctccaagccctggaggggctgaaaatggggggaaagggccaanat

SEQ ID NO: 112258 - DNA, 384 bp, Homo sapiens
ctctgaggctctttccaacgctgtaaaaaaggacagaggctgctccctatggcagaaggcaaccacagaaaaaagccacttaaggtgttggaatccctgagcaaagatttcctcactggtgttttggataacttgcaggaacagaatgtactgaactggaaggaagaggataaaaacaattattacgatgctaacactgataacaaagttcgggtcatggcgatactctatgcttaacaagcattgtaaggcatacagagatgattcttctgagcttttttaccatagaccatgaatcccccactatctaatattatccgaatatggaggatgaaccacctgagtatagtgaatctacatatgcactccagctttgtggtgatg

SEQ ID NO: 112259 - DNA, 1340 bp, Homo sapiens
  misc_feature (1)...(1340): n = a,t,c or g
aaaaataatggttgtacggacttctgaccgctcagtatttggcaaaaaacctaataggtgtgaggtagtttcaaattctcaaaaaaaaagtttatagtgtattggggagacaaaccccaaatgagtcatagtgaaggttggagtagaatgggtagagtttgagaggaaggcctgtatcttaccgggggagggattgtagtctggggagcccagcccattcatgtacaggttcattattgacttgttagagagatgactggtgaaatgcctttttttatctacaaaaaaatatttttagatggcgggtgaaaaagtttggaagccagatactaaagaaaaaaaaccccaaacccaaaaaggttgatgcttggtggcaaggtgaaaaagggtaacctcaaagcctaaaaagcccaagaagggggaggccccatttgcagcccgcaacccctgtcctttgttcagaggaaattggccaggtattcccgatcttgccatgtgattccagaaaaggccattttaccaagaggggagtactttcagcccgcttaaatccaagggttgaaaagaaaaaggaaggaggaaggttcttcgcaactttttacaaaaacccagtttggttggtgacaaagaacgggcggttacccggggtggttaaaacttccgcaaaaatgccctagatattatcccctactggaagatgttgccctcgaaaagcttgtttgagcccccgggcaaaaaaacccttcaagtcaagcacgttgaggaaaaacttgccgagcccagcatttaaccccccgggacccattctgatcattcctcacttggacgccaccaggggccaagagggttggtttttcctgaaagcagctgggctaggtgggcttatttacttgtggacctggacctctggtccctcaattcgagttccctcctacgaagaacacacccagaaaatttgtccattgcccacttccaaccaaaatcgatatcagcaattgtaaaaatcccccaagaaaaaaaanaaaaccccattncttactgatgcttactttcaagaaggaaggaagcttgcggaaggcccagaccaccagggaaggtgagatcttccgacacagtaaaaagaggaaatatggagattaccggagcagcgcaagattgattcagaaagctgtgggactcacaaatttttaccaaaaatcaaagctattcctccagctcccagggctcacctgcggatcctgtgtttgctctggacgaatggaattttatccctcacaaactggtcgttctaaactgtcttaagaaccctaattacactagctgactacaaaaaaaaaaaa

SEQ ID NO: 112260 - DNA, 846 bp, Homo sapiens
  misc_feature (1)...(846): n = a,t,c or g
tttttttgagatggagttccactcttgttgcccaggctagagtgcaatggcgtgaatcttggctcactgcaacctctgcctcccgggttccaagaaattctccctgcctcagcctccctgagtagctgggatttccagcatacgccaccatgcctggctaattttgtatttttagtagagaccagggtttccccccatgttggtcaggctggtctcgaactcccgaccctcaggtgatctgcctgccttggcctcccaaagtgctgggattaccaggtgtgagccaccacccccagccgcctctatgctttttgtttctttgatatatctaaacttaaggtcagaacagaaattcatgtgctgaacagaatggattctttttgcagtaccaacccaattgaatcctctttttattttcctgcgtccttaccagtcactttgatagagctaacataacctacactatgggggatattcatgaattaagtatgataaaaaaaaaaaaagaccttgaaaatgttgtgtaccctgtggatttgaggcttattactaccacctggctggataaaatgtcaaaaccttcaatcacttagggtgactggaacttttgtaaaatacacttatgatcctactgggccnnnnnnnnnnnnnnnnctgctttcctaaatatgaggcaatagaaatttataatttgagcctacagtaccccttgttttagctcttatcacagctggcaactggtagtgattttttaagaatgaaaatccgctcnnnnnnnnnnnnnnnnnnnnnnnnnnnnnnnnnnnnnnnnnnnnnnncctnctccccacggcggcggaatattca

SEQ ID NO: 112261 - DNA, 410 bp, Homo sapiens
cccacgcgtccgaaatccacaaagactcacagtctgctgtgtgggcagagaagacagaaacgacatgagcacagcaggaaaagtaatcaaatgcaaagcagctgtgctatgggaggtaaagaaacccttttccattgaggatgtggaggttgcacctcctaaggcttatgaagttcgcattaagatggcggctgtaggaatctgtcccacagatgaccacgtggtttagggcaacctggagaccccccttcctgagattttaggccatgaggcatccggcattgcgcatagcgcaggagcaggaggcgctactgtcgatccaggagacaaagtcctcccgctcttcactcctcctggcgccaaagctgtgcttcgccgactccgtctgatcctactgtcttctatattcc

SEQ ID NO: 112262 - DNA, 834 bp, Homo sapiens
  misc_feature (1)...(834): n = a,t,c or g
ttttttttttttgagacagtctcgctctgtcgcccaggctggagtgcagtggcgcaatctcggctcactgcaacctccacctcccgggttcacgccattctcctgcctcagcctcccgagtagctgggattacgggcgcccgccaccacgcccgggctaattttttgtatttttagtagagacagggtttcaccgtgttagccaggatggtctcgatctcctgaccttgtgatccacccacctcggcctcccaaagtgctgggattacaggcgtgagccacgtgcgctccggcccacattcagttccttatcaaagaaaataaccccagaccttaattcttgaatggatacgatttatgcccccaatatttaagtaaaaaaatattaggaaaagggttaacttaaatagatcttagggcaaaatacccagctgatggaagggcatctggangcccttcatcctgttcatgtcatctccaaaaaccagtagaaataacccacttttggttgggccattatgaaatttttaaagggagtagaatacccaaatgatagaaacagactggcctgaattgagaattttgatttcttaaaagtgtgtttctttctaaattgctgttcccttaatttgattaatttaattcaatgtattatgattaaatctgaggcagaatgagcttacaacgtattgaaataattactaattaatcacaaatgtgaagttatgcatgatgtaaaaaatacaaacattctaattaaaggctttgcgccaccccagaaaaactaaaaagaatttactttgtgttactaaaggcgattgtcttcaggccctcg

SEQ ID NO: 112263 - DNA, 1008 bp, Homo sapiens
tttttgttgttgttgtgactgacagagtgagattccgtctcccaggctggagtgcggtggcgccttctcggctcactgcaacctgcggcctcctagattcaagcggttctcctgcttcagccttccgagtagctgggatgacaggcactcaccaatatgcctgggtaatttttgtatttttaagtacatacaggatttcaccgtgttggccaggctggtttcaaactcccggcctcaggtggtctgcctgcctcagcctcccaaagtgttgggattacaggccgtgagccactgggccctgcctgtaattttttatcagccacaaatccaagcaacaaactgaggattcagcttcataaaacaggtttggtgtcttggtgatctcacataaccaagatgctacccccgtggggaaccacatccccctggatgccctcaagccttgggtttgggctggagtcagggcctgtatacagtattttgaatttgtatgccactggtttgcattgctggtcaggaactctagtgctttgcatagccctgggtttagaaacatgttatagcagttcttggtattagagcaaacttagaagaaaccagcaatcattccactgtcctgccaaggtacacctcagtactccccttcccaactgaagtggtatgagagctagctcttttccaaaagcatttcaagtttgggcttcttgatgtggactcaggatttagggaaccagatgctagatcaaataaggtctggaaaatctgaggaacattgtaggaaaggtttgttaagcatctcttaaagtgccatgatgagcataacagctcggccgtggtggctcacgcctgtaagcccaagcactttggggaggccaaggtgggaggatgacaaggtcaggagttcaagaccagcctgggcccaacatgcttgaaaccttcacctcttacttaaaaatacaaaatttaggctgggcatggtgggcacatgcctgtcaatcccagctactt

SEQ ID NO: 112264 - DNA, 2847 bp, Homo sapiens
  misc_feature (1)...(2847): n = a,t,c or g
gggcattttaggaggaaaaaaaaaaacaatgcacagaaaaagggtaaaacaaaataggttgatgtggtggagacctttgacctcccaggtgcccccacaagcagctggcccaccctggagcaccaaagttgggggccacagccaccactgcctcttggagtccctttttcatggaaatgaagaccccttggtcgtgggccactagtgtacatgggctggaagtggggatgtccatggcccaagagacccctccagcttccagcccctggcaacagcgggagagcaaacccagcaccagggacttggcgtgagccagccgggaggcccccaatcaggctctggggtatcagagcaaccaagttgacgtagtgtgaaaaaatagtattcctttgataaaaaatactgtcccttggtcttctctaagtttgaaacaccccgaattcgggggcagcggcggcagttggcggcttggagagctcgggagagttccctgggaaccagaacttggaccttctcgcttctgtcctccgtttagtctcctcctcggcgggagccctcgcgaccgcgcccggcccggagcccctcagcgcagcggccgcgttgtgaaggatgacctctaggaagaatagtgttgcttttaggttatcatcctggggagattctcggagtcgggaagacatcactcatgaaccagtatgtgaataaagaaattcagcaatcagtacaaagccacaatagggagctgactttcttgaccaaggaggttgatggttggatgacaggcttagtcacaatagcagatatggggacacagcaggacaggaacggtttccagttttttcggtgttggcctttctacagagggtgcagactgctgcgttcttggtatttnttttgggaaaagtactgcccccccaacacatttcaaaaacccctagaatagctggagaagatgaagtttcctcatcccaggcccagtcccccgaagatcctggaaaacttccccattttgtttgtgtttgggaaaaccaagatttgacctccgaaaacaggacaagtgggccacaaaggcggggcacagggcctgggtgctacagcaaaaaacaacattcccctacttttgagacccagtgcccaaggaggcccatcaacgttggagccaggcgttcccagacgattgcacggaatgcacttaagcagggaaacgggaggtgggagctgttacaacgaatttcctggaacctatcaaaactgggacaagaatgaccggaccaaggcctcggcagaaaagctgcagttgctgagggggcagtgagagttgagcacagagtccttcacaaaccaagaacacacgtagggcctttcaacacaattcccctctcctcttccaaacaaaacattacattgatctcttcacatccagctggccaaaaggaaaaccccattcaaacacagtttacaccccacatattcttttcacacacacacacacacggcacacacggcacacacagatcttgacgttaattcaaattccaggccctttgcccgtgatgggttccttgggggttttggcctggccccacccacttgaggcccgcgagtttggggcaggcagggacaaggccagcggtgggaagtcattcttgatatgggagttgggcattgggaagcttattctttttgttgcactgggagagagagagaactgtttacagttaatctgtgtctaattatctggattttttttattgggtcttgtgggtctttttaccccccctttcccctccctcctttgaagggcttaccccttggggaagggctgggtgcccccatgcccccattaccagggttcacaccccagtctgaatcaggctggagtttttgtatgtatctatctggttaatgcttggttactttttaaactaatccagatcttttttaacagtatccaatttaattatggtaatgccttccttagaaaagaatccttatagtaccatgttaatatatgccaaccaatttaaaatgtaataaattaagtgtaaagaaatccctgggattatgtgtttaaagcccctgtaaatgcaaggccctgtaaaggtgggaggggttgaacccctgtttgggattgcaggagtgttacttcaggaattgggggaaatcccagctaggcgggcagttatttctgtaacagtaggacacaaggaattatgtacgcccttttatccaaaagaccttaaggagcccaaaaaagcttttccatcctctccccagggggggaaaactgtcctaggttccccttcctgtgtcctaaatttttcccaaaacgtttgattttgcattaatacagtgggtatgtgccaatgggataaattgcccgttatttccaaaaattaaaattctcattttctttcttttttttccccccctgctcccacacttcaaaactccccgttaggatccagcattcttactacaagagtggaaagggaaaacccttaacaggatctgttcccgggggattttacctttggttcctaggaaggcggctcctttccaggggttggtgggtattccttaggtttagcgggcgttttttcctcctttttccccaaccatcttccccaataattggcccattattaattaacctctttctttgggtgggaacccggggcagttctgcttcccttcctagggatctgccccctgcattgtagcttgcttaacgggggcacttctcctttttccaaaggtctacattctagggtgtgggctgagttcttctgtaaagagatgaacgccaatgccaataaaattgaacaagaacaatgaaaaaaaaaa

SEQ ID NO: 112265 - DNA, 1197 bp, Homo sapiens
  misc_feature (1)...(1197): n = a,t,c or g
ggcacgaggcgctggccgggctggctgcggccgccctgggccgggccccaccggacggcttgctctgctctttacctggggttgctgtcgaggaccctgtgcaagactcggccggtttttctttctccctgatggacagacccaaacatagccgcgcagcatcgtgaagggctggggccttcactcctctgtggctctggaagagcccgattttcctcaggaggcatgtcgggccccaggctcgtcggtgctgagcgggccttcgggagctgaggaagagcaccactgctgaagaggctgctccatggagcacagcgggcatctttggcttcagcgtgtcccgtgagtccagggctctcgtggagggataccacgaaggaacccgaggcccggcgaaggaagaacggcaaaagattactacgtttgtaaccaggggaggtgatgcagcgttgacatagcagccggcgacttcattcgagcattgccgagttcttcgggggaacctgtattgggcacgaagcaaggttggcggtgcaaggccgtgcaggcaattgaaaccgcattctgttgttgctttggacgtgggaccttgcagggtgtttcgggaacattcaagggccacctgatcttgcggccccatcttacatctcttgtgcaagccgcctttcactgcacgttgctggaagcagcgggcttccggcagccgcaacaacttgaaaccgaaggaagagcctggttgaaagcgggcttgctgcttgccccaggcccgaacatggaagagccagcaagggagccccggcctgtttgatgtggtcatcaattaaccgacaagcctggacccaggcctaacgcagagctgaaggaggcgctctctgaggaaatcaaagaaagcttcaaaggaccgggcgccttgaggcttgctgtctgttctcggccnccccggggccnatacaggacccagggcagcgagcattgaaccccccccccttggcaggcgaatacggcaagctctgtgcccttggccagcatgtgggagtgggaggagatgcttgcccctgtggttgggaacatgcctggggggttgaccccccgaccccagccctcgctggccttgttcccctgttccctattttttcactttttggaccccagggtttgacatcctaataaaataactgttggattagaaaaaaaaaa

SEQ ID NO: 112266 - DNA, 436 bp, Homo sapiens
  misc_feature (1)...(436): n = a,t,c or g
atgagtacatatgactggacgaggggctcggtaaaagtcggctgaagaagcacaacctctcctcttcgtctccgccatcagctcggcagtcgtgacgagcaaccatgcgtgagtgcatctccatccacgttggccaggctggagtccagattggcaatgcctgctggtagctctactgcctggaacacggcatccagcccgatggccagatgccaagtgacaagaccattgggggaggagaggattccttcaacaccttcttcagtgagacgggggctggcaagcatgtgccccgggcagggtttgtagacttggaacccacagtcattgatgaagttcgcactggcacctaccgccagctcttccaccctgagcaacttatcacaggcaaggaagatgctgccaataactatgcccgaggcactacaccattggn

SEQ ID NO: 112267 - DNA, 484 bp, Homo sapiens
ggataggaccatgattactccaatgcttggcacgaggggctgaccagtgggcggctgtggcaagaagttcactacggtctataacctcaaggcgcacatgaagggccacgagcaggagagcctgttcaagtgcgaggtgtgcgccgagcgcttccccacgcacgccaagctcagctaccaccagtgcagccacttcgagcccgagcgcccttacaagagtgactttcccggctgtgagaagacatttatcacagtgagtgccctgttttcccataaccgagcccacttcagggaacaagagctcttttcctgctcctttcctgggggtgcagcaagcagtattgataaagcctgttcggcttgaaaattcacctggcggagcattacagggtgaaaggaccatttatttgtgacttttgacagctgcggctggaccttctccagcatgtccaaacttttaaggcacagaaggaaacatgacgat

SEQ ID NO: 112268 - DNA, 471 bp, Homo sapiens
tcgataggaccatgcttactccattctgggcacgagggcagagggggcggacaccccccaagacccccaactctgcagggattggactccgtgggcaggaacctgccctctggtcagggcaaggtcaaggaacagaggggccagtccagggaggcccagcagcgagaagccagcagcctctgcggcccgaacgttccagctgcaggggccaaggtcacagccgccatccacctctcccctcaagcaggagtgtggcccttgttactaggacaacccaagcctggactctgcaccggattctgccactttctagatggggattcacctggtctcatctccccttagtcccagcatgagccccccatgcatgtgggcctgtgtggagagatttgggggcaccctctcccaccccggttaggaggcactgcacagccaggccctcagaaccgccctgggtctgtggaggggcaa

SEQ ID NO: 112269 - DNA, 470 bp, Homo sapiens
  misc_feature (1)...(470): n = a,t,c or g
gaggcaagagctgcccccacatggccaaagaattgggcgtgtgggcctggaanctggggctcatgtggaagctgggtggctcccatggctgcagctcctggccctgcggacagccaggcctggggtctacaagagctgggcagggaagaggacaaacaaggtctcacaggtccattctccccagcctcccagtaggcagctgagtccaacgcagtgcccgagagctcagcccttgtcaaggagagtcctcgaacccagagggggctgggtaagcagcagaagtgcagaagccctgcccaggccctgcctcccaggccaccacccacccctcacggctgccacacccaccagcccatgactgtccacatcctgacccctacctacctcatgacctccccgaccctgatctccacacctgaccccaaagcacattttgttattttgtcctcgtgccaagatggcagtatgag

SEQ ID NO: 112270 - DNA, 464 bp, Homo sapiens
tgagcaactggactccaagcttgtcacgaaggccggagctggagacaggctggaaagagcaggtaacagcccacaaggagcgggggccctggctgtcagactcaacttgcaggaccatcaagggcaggtgtgggtcaagaaccggggccgcttgctctgcggtagcaacggcacataaccgcagcgatgaccagggcagccaagccagcagccgggaccccgggatgctcttggcacatgatccgactcccctgcctttgcgggtcctgtactcccgcgaggtccaggattgtgcagcccctccccaaccggccgttgggaatcttctcagtagcagaacccgctgcctccaggtccgaccagacctgcataggtagagagtccccgcacagggcggccagcagagctacccagctgccccagggcctcgggacccctgggcctgggacccaggccagaccctg

SEQ ID NO: 112271 - DNA, 440 bp, Homo sapiens
agtaggatcattccgcctagcttggcacgaggccggcggcggcgcggagagacgcagcggaggttttcctggtttcggaccccagcggccggatggggaaatcctccctgggggggatcctcaatagccactgcttcgccagagagaaggaaggggataaatcccatcgccaccattcacgccagccgcaccatgccggtcctaagcctgcacagccgcggtggcagcagcagtgatagttccagggtctccctccactgctgaagtaacccgggtccggatcctcggtggtgctcctgatgcccctcacccacccctgaagatcccaggtgggcgagggaatagtcagagggatcacaatctttcagcaaacttattctactccgatgatcggatgaatgtaacagaggaactaacgtgcaacgacaagacgaggattc

SEQ ID NO: 112272 - DNA, 974 bp, Homo sapiens
  misc_feature (1)...(974): n = a,t,c or g
ttcgagtggtggatttcaggtactgcaggagggcgccatgatgatggcctgaagcttgttgcgcccggcgctgtctgtcggctgaaggcagaaacagtcacagcacctgcagcgtatggaaggcgacgactgaaaatctaataggcaccttgatgtcaagtttccaagaccaaaggcaagaacagtcagatcaaacttcggaagagtcagagaaagtgagcatgacctagaggagggagacggtccttccgctgtctcctgcagagcgtctgtcgcacgtatgaggtgaaatccgcactgtcccatgaagactgtgaggggagttgccacccgcacacgggccaggagcgccagcagcttggggaccaccacaggcctcagggtctcttcagtccgacgggtccagctgtcgataaaacctcccggggaaggagtaaaggacaaccaagaacctgaactgcaaaagtatgaaaaacatttcatttccctcgagttctccacactttaggtctgcagcgccttgggggtgactgatggccctccgtgagacgcggtggccatgtgcttcttacaagtgaaaaggagcaagtgtggttagagcctggagtatggacgtcccggggaccgctggcccatggctgggcttggggccttacaggggagcgagctgagtgaatgcaggggagggcccgtctttctacagtgtgtatcttgtttttgagacagactcactctgtcgtccaggctggagtgcagtggcgcgatctctgctcactgcaacctctgcctcccgggttcaagcgattctcctgcctcagcctcctcagtagctgggattacaggcacctgccaccacgcctgggctaaatttttgtattttttttttagtagagatgggggttttcactatgttggtcaggctgggccttcgagctcctggacctcaggtgatccanctgccttngccttcccaa

SEQ ID NO: 112273 - DNA, 445 bp, Homo sapiens
  misc_feature (1)...(445): n = a,t,c or g
acggtatggcccagcacattcctggctcggcacgaggcggaaaaatagaaaaaggggccggcattaaaataaaaaacttttattcttcaaaggacactgtcaaggaagtgaaaagataatccacataatgggagaactatttccaaattgtatgtttgacacaggtctagtacctacagtatataaggaattcacataactgagcaataaacgacaaccacatttaacaatggggaaannnnnnnnnnnnnnnnnnnnnnnnnnnnnnnnnnnnnnnnnnnnnnnnnnnnnnnnnnnnnnnnnnnnnnnnnnnnnnnnnnnnnnnnnnnnnnnnnnnnnnnnnnnnnnnnnnnnnnnnnnnnnnnnnnngcagtaccacttaagaaaactttaatgacaacacatgtttcataagtgatggagaatatggaattctcatatatta

SEQ ID NO: 112274 - DNA, 2679 bp, Homo sapiens
  misc_feature (1)...(2679): n = a,t,c or g
cggttctcactcttgacgttgtccagctccagcaccttggcaactcccccagcttggacggccggcccgccgctccatgggggagtcatctgagcacagctgctggccgcagtctgacaggaaagggacggagccaagatggcggcggccgacggcgacgactcgctgtaccccatcgcggtgctcatagacgaactccgcaatgaggacgttcagcttcgcctcaacagcatcaagaagctgtccaccatcgccttggcccttggggttgaaaggacccgaagtgagcttctgcctttccttacagataccatctatgatgaagatgaggtcctcctggccctggcagaacagctggggaacctttcactaccctggtggggaggccccagagtacgtgcactgcctgctgccaccgctggaagtccgcttggccacagttggaggagacagtggtgctgggacaaggcagtggagtcccttaacngggcccatcttacacgagcactcgccctctgacctggaaggcgcaattttgccggctaagtgaagcggctttgcggacggcgattgggttaacttccggaaccttggcctgacgcctgcttctccggttggttaccccggagttgtcaagtgcgttaaggtggnaacttcgacagtactttccggaacctgtgctcagatgacacccccatggtgcggcgggccgcagcctccacagctgggggagtttgccaaggtgctggaggctggacaacgtcaagagtgagatcatccccatgttctccaacctggcctctgaacgagcaggactcggtgcggctgctggcggtggaggcgtgcgtgaacatcgcccagcttctgcgcccatgaggatctggaggccctgggtgatgcccactctgcgccaggccgcttgaagacaagtcctggcgcgtccgcgtacatggtggctgacaagttcacagagcttccagaaagcaagtggggcctgagatcacccaagacagacctggtcccgtgccttccagaacctgatgaaagactgtgaggccgaggtgagggccgcagcctcccacaaaggtcaaaagagttctgtgaaaacctcttcagctgactgtcgggagaatgtgatcatgtcccagatcttgcccgtgcatcaaggaagctggtgttccgatgccaaccaacatgttcaagtctgccctgggcttcagtcaatcaatgggtctctctccccatcttgggcaaagacaacaaccatcgagcacctctttgcccttcttcgtggttcagctgaaggatgagtgccctgaggtccgacttaacatcatctctaaccctggactgtgtgaacgaggtgatttggcatccggcagctgtcccagtccctgctccctgccattgtggagctggctgaggacgccaagtggcgggttgcggctgtgtcatcattgagtacatgcccctcctggctggacagctgggaagtggagttctttgatgagaaacttaactccttgtgcaatggcctggcttgtggatcatgtatatgccatccgcgaagcaagccaccagcaacctgaagaaagctaagtggaaaagtttgggaagggagttggggcccaatgccacaatcaatccccaaggtcttggccatgtaaagagacacccaactacctgcaccgcatgcantacgctcttctgcatcaatgtgctgtgtaaaggtctgtgggcaggacatcaccaccaagcacatgtctacccacggttctggagcatggctgggggacccggtttgccaatgtccgctttcaatgtgggccaagtctctgcagaggataggggcccatcctgggacaacaagcacctttgcagaagtaaagtcaagcccatccttagagaagcttgacccagggaccaggatgtggacgtcaaataattttgcccaggaggctctgacctgttctgtctctccgccttgatgctggaagaggagcaaacactgggcctctggtgtccaaccctccaaccccccacaagtccctctttggggagacaactggggggccctttgggctgtcaactccctgtgcaatggtctgaccccaggccccttccccctagcaacggttcctcctctccccagcctggggaagatgtctccactgttccaccttcccaacgggctagggtgagcacgggggttggacaggaccagtgacctttgggaggaaaggggctactccgcccacgtcagggagagatgtgagcatcccgggtcactggatcctgctgctgtaatgggaaaccccttcccccatttacttctccacctcccgtcctcccccatcattggttttttttttgtgtgtcaactgtgccgtttttattttattcccttttattttcccccttttcacagagaaaataaaaggtctagaagtgccaaaaaataataaaaaaaaataaacggggggggccgtttaaaagattccttgggggggcccagatttcccccggaagagaacgtattatcttttttcttaaaggggccccttttaaagcttggctggaaatttttgggaggaacctttattttgggggggggccttattgggccannnnnnnnnnggaaatttaagcttttacgggaaaataaaatttttaaagggt

SEQ ID NO: 112275 - DNA, 499 bp, Homo sapiens
agcatgacatgatacggaagcctggacgagggagggaagaaagatgggaggaagtgcagcaggaatagcaccctctccccgggaggccctagcttccgtgagggccatcaccagccattccttggagggggctttctccccttttgcttgagcagggttcccaggagggagaaagagaagacaagagcctgatgcccaactttgtgtgtgtggggacgggggagtcagggccccccaagtcccacaatagccccaatgtttgcctatccacctcccccaagcccctttacctatgctgctgctaacgctgctgctgctgctgctgctgcttaaaggctcatgcttggagtggggactggtcggtgcccagaaagtctcttctgccactgacgcccccatcagggattgggccttctttcccccttcctttctgtgtctcctgcctcatcggcctgccatgacctgcagccaagcccagccccggtgggaaggggagaaa

SEQ ID NO: 112276 - DNA, 1160 bp, Homo sapiens
ttttttctgattaaaaactttattttcagaagcagaactgtttttaacacaaagttcaaggaagcagtctgtccaaaaagcccaaattccacctttctaagtggctgcctctagactaactccctttcaaaaggctctagaactttaaagcaggggtccagaaactaagcatcctggataccaaccccggaagcccatcctttagagctctcttcctggggtttggacgactgccactccaagctcagacttggtgtcccaacttctctcccttctacacctttacgacagttctatttccacaggaaagagacagcccgattctggccttctggaaggaggccgtttccatggggaaacaagagaggaaggggctctgggcaagcagtggaagggcgcctttcatagggcagcaaagccgttttccaccttcctcctcaacattcgtaggattttttcgaatagctcaggagaagcgctgttgcattcataccacctcctcaaggtgcccagggcccggagggcatcagctttggtgggcaggggctcaaaagcaaccctctctgtcccccttctcgtcttcaatgcctatctcctccctttacatactccaagaccttggctcctcaccctcccaggtccacaaagcgggaaaactcctcccagctcagcccgccggggactggtggcatctcagaggttttgtgcgaggacgggggcgttttgccgggagccagcccttcttgaatgaagctgctgaaaatgagctgaggaggcacctttggcccaggcggcagacgccacgtgcagggcgtccagcacgggtgatgcctgcccccggcctcggccagcgaggtgccatccctctcgctttggatggcagccagtttgcccaacagccggtgtcggtaatgggccttaaaggcccggaccactgagctgggcaggggaggcgtggtgctagaggcggccagaggcaagagcttcacgtggtagagcccaggcaggcctgccagctcctccaccactcgggcagccagcagcaaagccacctgtcggccctgctgtcccatgtcccggtcaaactgtgccaaccactctaaccaggggatgcccaggtccgggtggtaggaggcaggcagagcctcactgcggatccc

SEQ ID NO: 112277 - DNA, 459 bp, Homo sapiens
tgatacgtcgtacgctgccacgccatcctggccgagggcctgggagaacttctccatcaagatgttcctgacagtgacacggttgtacttcatcgccgaggaggggggtgagcgctctgtctgcctcacctttgccttcctcttcctgctgctggccatgctggtgcaagtggtgcgggaggagaccctcgagctgggcctggagcctggtctggccagcatgacccaaaacttaaagccacttctgaagaagcagggctgggactgggcgtgagtcctgggaatgggggagggaggcaagggcaggctgggaccctcccagggtcccccaggcaggctcgtgacctggtggtctcctaagcttcctgtggccaagctggctatccgcgtgggactggcagtggtgggctctgagctgggtgccttccttaccttcccaagcctgtgggtggtccacac

SEQ ID NO: 112278 - DNA, 470 bp, Homo sapiens
atgactacgcattgcttggccggagggactgagatggcgtgcttgttggagaccccaatccgcatgagcgtcctttcggaccaggaatgaaagttactgggagataacttcgaaggattttgcaacaaattcgagctgcccgactttgataatggaagtaacagctagcagcctccactatgttgacaggctattcgaccctgatccccagaaagttctacaatgcggcataaacatgaaaaatgctgtaattggaaacaacaagcaaaaagccaatcttattgctttaggagctggtccaagattgctgtacttgcttcagcaagaaacctcaagcacagagctgaaaactgaatgtgcaccggggttggcaattcttgctatgggtactgaaaacaatgtcaagtctgtactggactgccatattatccctgccttattgcaaggactactgcacccagacctgaagg

SEQ ID NO: 112279 - DNA, 440 bp, Homo sapiens
atgtggaggatcctcacacgccaggttggcacgagggctgggaatgaccctcgcacactgagaggcccggtttgttgtgcacctgccactcaatgctctgggcatcataaccaaccgggggcagcattttcacggtcagaacctgaacattttgtacgagaaccaactcgggctctatccctactttggacccaggggcacagctgacaatgggggcatcccccaggctttgccccttgaccgccacccggcactggctgcctaccagatctaccacagcctgagacctggctttgctggcccagcagtgctggattgggaggagaggtggccactctgggctgggaactggggccgccgccgagcttatcaggcagcctcttgggcttgggcacagcaggtatttcctgacctggaccctcaggagcagctctacaagg

SEQ ID NO: 112280 - DNA, 439 bp, Homo sapiens
attccgcacgagatgacgggcaaaaatccgccctcgcaaggggactgaatagaaggtagaacaggtcatcagcctcggacctcacgtggctgaaggagacaacgcatatggtgacagccatatctttgcatccttcaagacacttttgccatgtcactgatctttctggcagagaaaccatctgccgtgtgactggtgggatgaaggttaaggcagaccgagatgaatcctcaccatatgctgctatgatggctgcccaggatgtggcccacaggtgcctggagctggctatcaccgccctacacatcaaactccgtgccacaggaggaaataggaccaagacccctggacctgaggcccagtcggccctcagagcccttgcccgctcgggtatgaagatcgggcggattgaggatgtcacccccatcccctctgacag

SEQ ID NO: 112281 - DNA, 477 bp, Homo sapiens
actatcattacgccaagcttggcacgagggtaacctagtgcctatagctatggcaggtacctgcatccttgtttttgtttagtggatcctctatccttcagagactctggaacccctgtgctcttctcctcatctagtgaccctgaggtgatggagttttcaagtccttccagagaggaatgtcccaagccttcgggtagggtaagcatcatggctggcagcctcacaggattgcttctacttcaggcagtgtcgtgggcatcagatgagtgccttcagccgctacaagagcagaagcagtgggcattggatggagctgagtacaggaccatacaggctaattgcaccggcacaggaatcggatataacatcatccgggtacccatggccagctgtgacttctccatccgcacctacacctatgcagacacccctgatgatttccagttgcacaacttcagcctcccagaggaagaa

SEQ ID NO: 112282 - DNA, 326 bp, Homo sapiens
gtctgggcagagaaaccttgctgaggacagaaaagagaggtccagtgctgttagcacaggcccagccatctaccctccctctacatacctccatctgaatgaatgttgaataaatacttcaggaataactgtttattgctgggacaactgggtttccacatgtgaaagaatgaatctggactcctacctcacaccgtatgcaaaagataactcaaaatgaaccaagacctaaatgtaagagctaaaagcataaaactcttagaagacagcacaagagtatgtcattatgactttgggttaggcaggggtttcttagatatggtttc

SEQ ID NO: 112283 - DNA, 419 bp, Homo sapiens
  misc_feature (1)...(419): n = a,t,c or g
tttcgtgcctgaagttcccagaaggctccgcctggcaaacacctaaggcgcctggaggggcgcannnnnnnnnnnnnnnnnnnnnnnnnnnnnnnnnnnnnnnnnnnnnnnnnnnnnnnnnnnnnnnnnnnnnnnnnnnnnnnnnnnnnnnnnnnnnnnnnnnnnnnnnnnggcctgccagacacctgcgccctcctgcagccaccgccacagctgccagcatgtctggcccagacatcaagacgccgaacgccatccagatctgccggattatgcggacgctaatgtggcccgcaatgtctaggcgggaccatcctgaagatgatcaaagaggcgggcgccatcatcagcacccggcattgcaatccgcagaacggggatcgctgcgtggccgctctggctcgggtcgagtgcaccca

SEQ ID NO: 112284 - DNA, 439 bp, Homo sapiens
  misc_feature (1)...(439): n = a,t,c or g
tttcgtcgcagagccgccagtggggagacgttgaagatcaaatatggatcttcggaatcctttgcatgctgtcgctgctgaacccattgccagccggacctccaggctgaatctgttcttacaggctgtannnnnnnnnnnnnnnnnnnnnnnnnnnnnnnnnnnnnnnnnnnnnnnnnnnnnnnnnnnnnnnnnnnnnnnnnnnnnnnnnnnnnnnnnnnnnnnnnnnnnnnnnnnnnnnnnnnnnnnnnnnnnnnnnnnnnnnnnnnnnnnnnnnnnnnnnnnnnnnnnnnnnnnnnnnnnnnnnnnnnnnnnnnnnnnnnnnnnnnnnnnnnnnnnnnnnnnnnnnnnnnnnnnnnnnnnnnnnnnnnnnnnnnnnnnnnngggaaaccaccctttatgactcaacagcagatgtctcctctttcccgagaagggg

SEQ ID NO: 112285 - DNA, 608 bp, Homo sapiens
gaagtggtccctgtataaccactgtggcaccgcttttctgttgtcgcgcccgtcgagcattgcgttgctgcattgggccccaccgactccactatgttgaagaaattcaacaagaaggatgaggagtcaggtggaggctccaacccattccagcaccttgataagagtgcgggactccaggaggcccgtgtatttaatgaaactcccatcaaccctcggaaatgtgcccacatcctcaccaagattctttatctcataaaccagggggagcacctggtgaccacggaagcgaccgatgccttctttgccatgaccaagctctttcagtccaatgatcccacactccgtcggatgggctactttgaccatcaaggagatgtcttgcattgcagaggatgtcatcattgtcaccagcagcctaacaaaagacatgactgggaaagaagacaactaccggggcccggccgtgcgagccctctgccagatcactgatagcaccatgctgcaggctattgagcgctacatgaaacaagccattgtggacaaggtgcccagtgtctccagctctgccctcgtgtcttccttgcacctgctgaagtgcagctttg

SEQ ID NO: 112286 - DNA, 494 bp, Homo sapiens
tttcgtgtccgaacagagtcctatcctacgcggcggaagagtgtgccctttgacttgcatcgtctacctacctctgccatcctctaccagccgcaactgcgagggctggaggctagagtgcagtggcgcgatctcggctcactgcaacccgcctcccgggttcaagggatttctcctgcctcagcctcccaagagctgggattacaggtgcctgccaccacgcccagccaacttcaggactgattgatcatgacttctataaaggagcaggcagcaattagcaggctcttaagttttttacaggagtgggacaacgctggcaaagtcgcaaggagtcacatcctcgacaagttcattgaaaccaaccaaggcaagactgcccctgaactggagcaggagttttcccagggagccagtttgttcctggtacgcttgaccacctcgcttagaatcacctatatgactgactcatgtttagaaaagcttctcaggtc

SEQ ID NO: 112287 - DNA, 794 bp, Homo sapiens
  misc_feature (1)...(794): n = a,t,c or g
tttcgtcaggttggcgcggaggtttcactgttagccgggtgcggccggagcgcatgaccaggccagagccgccccaagtgatctgggcgtgccggagaaacgagcagggcctgcgggggtccctcatgcggcgaggccgagcaagggcaggggcctgatgggatcgagatctctccggcctcagggacggggaaggccggtccagtcaggtttcccctgcaggagcgcccggctgggtctgagcttgtcgggaggctctcctgctgcagagctgggagggaatttatagtacctcgcaggtggcagccaagagcctcctggcacagcggcaccaggcaggtgacgcctattggaccccagaggtcatcccagctccagacgtggacacattttcttccaatgatgtcnnnnnnnnnnnnnnnnnnnnnnnnnnnnnnnnnnagagacccgttcagagtcctacagtggcagactggtcttctgaggacctctgccctctacacagcggcctcttcaggtgcagggaggaaatggaagcacgttctatgctggttccaccccaggcatctgtgtgcttcgaggatgtggctatggcattcacacaggaggagtgggaacagctggacctggcccagaggacactgtaccgagaggtgacactggagacctgggagcatattgtctccctggctggagcaagaagaggacctgtgcagggcagagcaggaggccccccgaggaacgaggcccagcanaaagcagagacggtacagggccagaaggatctgagagag

SEQ ID NO: 112288 - DNA, 393 bp, Homo sapiens
  misc_feature (1)...(393): n = a,t,c or g
cagacaccatggtgcatctgactcctgaggagaagtctgccgttactagccctgtggggcaaggtgaacgcggatgaagttggcggtgaggccctgggcaggctgctgaaggtctacccttggacccataggttctttgagtcctttggggatttgtccactcctgatgctgacatgggcaaccctaatgtgaaggctcatggcaagaaagtgctcggcgcctttagtgatggcctggctcacctggacaacctcaagggcacctttgccacactgagtgagctgcactgcgacaagctgcacgtggatcctgagaacttcaggctcctgggcaacgtgctggtctgtgtgctggcccatcactttggccaagaattcaccccaccagtgcan

SEQ ID NO: 112289 - DNA, 415 bp, Homo sapiens
aagcttttacaggtttctctgcatgtgggcctctccagagagaaatccgtttcactgtcttctgtgataggtagcctgtgagccccgtgagggcggggaccatgtctattttgtttatcactgtatgccaggattgcaagctcaagtgtgtacagatggctaaaaaaacacaagccaacgaagtttctgggtgagaaaactaacatcagttggcaactgaagcagtagagggtagttgggactgactagtagaaggctgctgggaacagctggttctttctctcctctggcagcattctgattttgtttttttggttttttttgacacagtctggctctgtcgcccaggctggagtgcagtggtgctgcaacctccgcctcctgggttcaagcaattctcctgccttagtcttcc

SEQ ID NO: 112290 - DNA, 363 bp, Homo sapiens
atcagtccaaagcatttattagggaaacttacagagtgctccaacaatcatcaagacaggaacgaaaaggggtgttctaccgaggcacagctgcagctagggggtcaggacatggagttcagatgcacaagtcagcatgtctggtttccattactattttgagtaatgggccacctgctggtctggcaggtgtcagcttgaccaaaacaggattgtggattctttccctgggatgggacgttccacaaccttggttttatatttagattttcttttttttgtttggtttcttttggagacggagccactatgtctcccaggctggagtgtagtggcgtgacctcggctcactgcagcctctgc

SEQ ID NO: 112291 - DNA, 605 bp, Homo sapiens
gcggccgcactagtaccccggagcccatgggcgcgtccgagccgggcgcgggggcgctgaacggcggagcgggagcggccggaggagccatggactgcagcctcgtgcggacgctcgtgcacagatactgtgcaggagaagagaattgggtggacagcaggaccatctacgtgggacacagggagccacctccgggcgcagaggcctacatcccacagagatacccagacaacaggatcgtctcgtccaagtacacattttggaactttatacccaagaatttatttgaaccaattcagaagagtagccaacttttatttccttatcatatttctggtgcacttgattattgatacacccacaagtccagtgacaagcggacttccactcttctttgtcattactgcgacggctagtggaacagggttatgaagactggcttcgacataaagcagacaatgccatgaaccattgtttctgttcaatttcattcagcacggcaagctcgttcggaaacaaagtcgaaagctgcgagttggggacattgtcatggttaaggaggacgagacctttccctgcgacttgatcttcctttccagcaaccg

SEQ ID NO: 112292 - DNA, 433 bp, Homo sapiens
  misc_feature (1)...(433): n = a,t,c or g
gcagaccctagaccacgcggggaaatacggagggctccttataacatgatggactgagcggatgcttgcttttatatttccaatctcaggtgcgcagggcgacatccgaggnnnnnnnnnnnnnnnnnnnnnnnnnnnnnnnnnnnnnnnnnnnnnnnnnnnnnnnnnnnnnnnnnnnnnnnnnnnnnnnnnnnnnnnnnnnnnnnnnnnnnnnnnnnnnnnnnnnnnnnnnnnnnnnnnnnnnnnnnnnnnnnnnnnnnnnnnnnnnnnnnnnnnnnnnnnnnnnnnnnnnnnnnnnnnnnnnnnnnnnnnnnnnnnnnnnnnnnnnnnnnnnnnnnnnnnnnnnnntgcagctcattacggtcagcggacttacagtgtccctccgagcgctcactttcggcggaggaaccaaggtggagatcaaacgtan

SEQ ID NO: 112293 - DNA, 445 bp, Homo sapiens
  misc_feature (1)...(445): n = a,t,c or g
aaccgggggagaaaaaaaggcccgccctnnnnnnnnnnnccttgggtnnnnnnnnnnnnngtttttaagaaggttaagtttgaagaatttttgaacccccgggggtcaaggccccattaaccccggctttggcccccccccttaaaccgggccaaaaggccaaattccttttcccnnnnnnnnnnncccaagaaagaaggaaggaagggacccttatttaaaaaatccagtccaaaaaaaagccagcaagaagtnnnnnnnnnnngctcagcactgtcacaagaaatatatggcaagaaaagctggcaatttctatatacctgtgaaacccaaattgtcacttgccttaaggatcaaatgtatcaatggtgtgagcccaaaactctgttgcaacttcttcactttccccagatcttcaatggcagctntgttaacgaattcccgg

SEQ ID NO: 112294 - DNA, 428 bp, Homo sapiens
  misc_feature (1)...(428): n = a,t,c or g
gtgtgcgttggaattaaccgaaacggtttctgaggagtagaagtgtcctaagtggattggaaattacaaatgctggaaagaacctagggatggaaagcagccctcannnnnnnnnnnnnnnnnnnnnnnnnnnnnnnnnnnnnnnnnnnnnnnnnnnnnnnnnnnnnnnnnnnnnnnnnnnnnnnnacatgatacatttggtgccaaagacccgggtcagtgggactccttttggagaccagtcccctgtcctcaccctcactccgtgaagagatccacctacgacctcagggcctcagaccaaccagcccatggaacatctcaccgattttaaatcacgaccccactaaagattggactgtccaactggcccaaggctctgatcgactccttcccagatctcctcggcttagcagctgaagactgac

SEQ ID NO: 112295 - DNA, 594 bp, Homo sapiens
ttttttttttgagacatagtctcactccatcacccaggctggagtgcagtggcatgatctcaacttactgcaacttctgcctcccgggttcaagcgattctcatgcctcagcctcccgagtggctgggattacaggtgtgtgccaccatgcctggcgaattcttttgtatttttagtagagatggggttttgccatgttggctgggctggtcttgaactcctagcctcatgtgatccacccaccttggcctcccaaagtgtttggattacggtgtcagccaccgcgcctggcctctttatacatttgaatggttctttacacatttgactgaatatttcgatacaagagatttcacatgaaaatctgaaaagtagatagacttggaaacataagcgcagcatccttaaagagctgtgatcaatgggaactgactggctacttactaccccctgaatctgggcagcctgagatctctgtccaccacagagctcactgcccaggttgcccacaatactcacacaggtaaccaccagcccctgcaggcatctggctccagatcaagggtaaaagttcttcatttttctctattatgt

SEQ ID NO: 112296 - DNA, 435 bp, Homo sapiens
tttcgtggaggctgtgtccgcaagccagcggggcgaggcgcctgggccctgcgcgtcaggtcccggcctggggcaccggggctgccagcgtcggaggaggcctgagacctgggaggaagctggagaaaagatgccctctgaatctttgtgtttggctgcccaggctcgccttgataccgaatggttgaaaacagatatacagatggtagtgtcgaaccaagtggaacaaagaaagaagatctgaatgacaaagagaaaaaaaatgaagacgaaactcctgcacctgtatatagggccaagtcaattctggagacctgggtgtgggtcaagcaaccaggaaacggaagcccaaagaggaggggagcttacagcaggccctggactagggattaacacaaaaacaacagcaacaaatctgatttaagcttcacacat

SEQ ID NO: 112297 - DNA, 1524 bp, Homo sapiens
  misc_feature (1)...(1524): n = a,t,c or g
aaaaccaaaaaaaaaaccaaacttgggcattaaacttcattgaggtcaggagatcaaggaccatccntggcttactaaaccccatctctacttaaacccatctctactaaaaatacaaaaaattagccaggcatggtgcgggcccatctactcaggaggctgaggcaggagaatggtgtgaacccgggaggtggagcttgcagtgagccaagaatcgtgccattgcactctagcctgggcgacagagcgagactccatttccaaaaaaaacacactaggcgtaaacaagaatgaagacctggaaccgtagagaaaatactagaaacccctcgtatcacgttgtgcctgaggacaataataaagtagtttactaggcatcagacattcctcagcagtgctgtgggtcacaggcgtgaagcggagctcgaggcaggattgcttgtgttgctgcatgtcctgtctgctgttttagcccgtgtcagtagatggggccattgtactgtttgttctgcacacttggcggagcagcagaggctctcagcacgccttttccctttgtagtattttctgagctaaggaaagtcaggcagaagtagttcataagaaggcatcactgcctgtgatcggggctgcatttagccctgacctgataatggtaggagagttcatttagcctttctgctgcgaagattgtaaatagattaaagaaaacagctgtggccttctcccgtcatacatcattagactgtgtaaactaacattttagaacctctaatattggacttaaaaccaatttctgtcgtgcttaattgaaaatcacaactaaaccaataaaccattattaaatttccattctgcagcagaaggcacctctggacggctcccggcttgtagtttaatgaagtatgtgctccctgctgttaacccgcagccctccccaactctccagcagctttgccaagtcagcctccgggccatctggctgtccttggccaaggcactgttaacggagtgacgttaaccatcttgtattgtgacctgtggccgcttttctggtttaagtccttcactttttcaagaggaatggatgaaattaatgtgcatgcagagtctcacagtgatgccggaaggaaggatgtataggcagtgaatgaatgatctttccttgaaatgctataaaaagcaacctgcattccagtcttttcttcctggttgaagttggcagatttccatttgcagggtatgggctgcgagagtaatcagggtaacattgctgtcatttccaagagaaatcagtaggggaaagcaagggaggtcttttttttttttcttttttgagacggagtttccctcttgttacccaggctggagtggcagtggtgtgaacacggctcactgcagcctccacctcctgggttcaggagaatcgcttggacctgggagcaggaggttgcagtgagccgaggtcgtgccattgcactccagcctgggtgacagtgagactttgtctcaaaaaaaaaaaac

SEQ ID NO: 112298 - DNA, 579 bp, Homo sapiens
acaggttctgaaacttttcttttcttcttttctcttcttttttcttttcttttctttcggagacagtctagctccgtcaccctgcactccagcctgggtgacagagtgagactcaactcaaaaaaaaaaaaaacagaggtgggagtgtgaacacaggcaggagctccaattcctgaccccagcgctgtcctgacccagatggagtgctgctctcacatctcagagacttcgcactcagccctgccctgccctgccctgacaggcagccagtcatcgtgggcagcagggccatctacttcccccactgcggcgtcaggggtggccagagtgtgtggaagtggaaagaacgtcctctcaaaatgcaagaggccagaggatggttcactgctcgtgtgttctgctagctagaattctgtgtaccttgcaatttggggagaggggttagaataaatttgtaaatgaagctgattatcttcaagttgatgcattcttttttcatatttaaaaagtccttgggactgggcgcagtggctcacacctgtaatcctagcactttgggaggcccagggtgggtggatc

SEQ ID NO: 112299 - DNA, 932 bp, Homo sapiens
gcggccgcgctgagcccctagcccgccgggagcgccaggccgttcaggcctgcgccgccgccgccgccgccgtcgccgccgcgccgaccatgtcggcagccaagggagaacccgtgcaggaaattccaggccaacatcttcaacaagagcaagtgtcagaactgcttcaagccccgcgagtcgcatctgctcaacgacgaggacctgacgcaggcaaaacccatttatggcggttggctgctcctggctccagatgggaccgactttgacaacccagtgcaccgggtctcggaaatggcagcgacggttcttcatcctttacgagcacggcctcttgcgctacgccctggatgagatgatgtcttcccagtgactctccttggggcctggggaaaccacaagggagcttggattcattcacccattgctgccttgctgtgtgcctcagaggggctcagaggtggaaaataaatatgaaaaagcatccttgtcttctagaatctcgtcggctgctgggaagaccaaggggccagccatcgcagggagcataagcactgagacaggcacacgtgcctgcccggctatccgtagccaggctggcagccttgcaactccctggggaagaacaatctaggaacattcctggggtgtggagcaggaaaggaagtgtcacatgcaaaaggcaggatcagccaaagcagaggggctgaagaagcagtgattccccccacctaatgtcagaagtaaaatcagttcatggtgaaaatttggggaaacaaaatcatgcagcaaaattgcctattaaaccccacacggaggtaaaaatcggttcatattgtggttatgtatctattctcttatgatgtgtatttatgtgcttatgtaagacctaaaaacaataatttttaaataaaccagttatttttaataag

SEQ ID NO: 112300 - DNA, 440 bp, Homo sapiens
  misc_feature (1)...(440): n = a,t,c or g
attatgtgccctttgtgcgagaacccacagttttnaaaattactaatagccttccataataaataaataactctggaatacaagaataccagaaagaattaatccttcctaatattgtgttccttttttgttgttgttttaagtatcttgccacttcttagctctttgcatttgataaatattttgaaccataatgttccacaaaaatgttgctagtgttttgtttgagtttgcattgattgtgtatatcagtttggggagaatggacttcttctttctttttgagacagaatcttgctgtgtcgcccaggctggagtgcagtggtacaatcttggctcactgcagcctccgactcctggattcaagtgattctcctgcctcagcctcccaggaagctgggactacagatccgccaccacgccgagccctatgcaatctc

SEQ ID NO: 112301 - DNA, 364 bp, Homo sapiens
  misc_feature (1)...(364): n = a,t,c or g
gcaaccagggggggccctccccccccggtaaattttaattttattccattttggaaaaacaagggtccccccaattggcccgggtgggttccaaatcccggggcaaaacaatcccccttcctgggccctcaaaaaagttgggattcaggggttaggcccccccacccccccccggaaaaccctttttccttttcnnnnnnnnnnnnnnnnnnnnnnnnnnnnnnnnnnnnnnnnnnnnnnnnnnnnnnnnnnnnnnnnnnnnnnnnnnnnnnnnnnnnnnnnnnnnnnnnnnnnnnnnnnnnnnnnnnnnnnnnnnnnnnnnnnnnnnnnnnnnnnnnnnnnnnnnnnnnnnnncctatgcagt

SEQ ID NO: 112302 - DNA, 734 bp, Homo sapiens
agcatggcgtcggtggtgttggcgctgaggacccggacagccgttacatccttgctaagccccactccggctacagctcttgctgtcagatacgcatccaagaagtcgggtggtagctccaaaaacctcggtggaaagtcatcaggcagacgcaaaggcattaagaaaatggaaggtcactatgttcatgctgggaacatcatttgcaacacaagcgcatttccgctggcacccaggttcccatgtctgtgtgttgccaggtgggtgttgggaagaataaatgtctgtatgcccctggaagaggggatagtccgctacacctaaggaaggtctaacgtgcctttatcccagaaacaccggagggctgtggatctgatcaaccaggcttgcccaaagggtgcttgtgctcttacaagactttttgttccacgtggtttcctgccaaaccttgagggcacctttcaaacttggtaactaatgctttgatgtcctgttgaggccatcggacagagactggagcccaggtgacaggagattggtgataccagaagtccaagggttggggtggcgacacgcgcctcccgaggaagaaggtctgcttgaatggtgaactctgcaggaagactctgaagtgactgcctgggaaaaccctttgggagacctgacctggggcccaaaaataaagtgagccagcgtcatgaacgcatgctatttagggccccaaaaaaaaaaaa

SEQ ID NO: 112303 - DNA, 376 bp, Homo sapiens
ttctatgactcagatttgaacccaccatggtgcgggggcctgccgacgggaccaacggcaacgccgcctggggtaaggtcggacgcgcacgctggcgagcatggtgcggaggccctggagaggatgttcctgtacttccccaccaccaagacctacttcccgcactttgacctgagccacggctctgcccatgttaagggccacggcatgaaggtggccgacgcgctgaccaacgccgtggcgcacgtggtcgacatgcccaacgcgctgtccgccctgagcgaccttgacgcgcacaagcttcggggggacccgggcaacttcaagcctccaagccactggctgctgggaccctggccgcccacctccccgcgag

SEQ ID NO: 112304 - DNA, 323 bp, Homo sapiens
cggcacgagtttataagtcacaccaaaatattagtaactcagatccagcagtatataatataaaaaggataatacattgtgatcaatgaggattattctgggaatacacggctgggtcaaaatttgagaatcagccaggataatttagtctattactagactaaggaaaaccatatgatcatctctttagatggagaataagtatttgacaaactccagtatactttcatgataatttttacaggccaagcgtggtggctcatgcctggtagtcccatcactttgggaggctgaggcaggagtatctcttgagcctaggagat

SEQ ID NO: 112305 - DNA, 366 bp, Homo sapiens
  misc_feature (1)...(366): n = a,t,c or g
gnnnnnnnnnnnnnnnnnnnnnnnnnnnnnnnnnnnnnnnnnnnnnnnnnnnnnnnnnnnnnnnnnnnnnnnnnnnnnnnnnnnnnnnnnnnnnnnnnnnggatgaaatgttataaacaactttatgccataaataccagttagaggaaatggacaaacgcactaaaagacaagctcactcaagaagaaatagatattctgaataaccgtgtatcattatcaaagaaattgcatttgcagttaaaactctctgacaaagaaaactccctgtgtagatggcttcattcatgaatctcatcaaacatttaaagaagaaacaacagcaactcttaacaaacccctaacagaanattagagaggaagggg

SEQ ID NO: 112306 - DNA, 316 bp, Homo sapiens
  misc_feature (1)...(316): n = a,t,c or g
ttagtnntgacgagatttcaccgtgttagccaggatggtctccatcttctgaccttgtgatctgccctgcctgcctaggactcccaaagtgctgggattacagacgtgagccactgcacccggcctagatctagaagcttcatggatgctggctaaaccatttgggatggcatatttcacaggaagataccacgtaattcctattatatccccacaggagggcacctaatatcagtttcccatttaaggtcaatcagtggggttgagtttcggtcagggtgttaacagcttgttccacccatcataaatatcccca

SEQ ID NO: 112307 - DNA, 496 bp, Homo sapiens
tgatgatcttaagggtgactagccagttctgtggccattggtcatgttttaaagcagagaatgtgccttccacatgcctctgtagtctcatccccagtcactcagtccttaaattcattcacatctttatcatcatcaccaccatcaataagtgatgacgttacatttatctaaccatttcaacacttttttaatagattatacctgatagaatagtagactaaaagttttgtatcctacaggttttaaatttaagttgaaggtctactttttctataagtacttcaccatgaagcccacctgttttataaagtaatatattttattttctcaccccaatgtacctatgtaattttatttgtttttgtttttgctttttttgagatggggtcttgctctgtctcccaggctaaactgcagcggcgtgatcatatctcactgcagtctcgacctcccaagcgatcctcccgcttcagtttcccgggtagctgggact

SEQ ID NO: 112308 - DNA, 383 bp, Homo sapiens
  misc_feature (1)...(383): n = a,t,c or g
aggagccagagtgtagggagaaaagtgggagggaggtccagccccttcacacaccctcccacacccactttggtctccgtgctacagccacacagccccctccccacacatcttgtctaggccgcctccccctatcccagggcctttgcatctgccgcccctgcagcctagagccccatctcccccattcttcacgtggttccttctgttcattccgttctcttcaatgtcacctccttggcaaggccttgccccatgtgaccgttcacccatttcatacctccactgccagcatgggagggcaggggccctttctgtctcatccaccagaatttcatgaattaagcccatttcttggcnnnnnnnnnnnnnnnnnnnnnnta

SEQ ID NO: 112309 - DNA, 508 bp, Homo sapiens
  misc_feature (1)...(508): n = a,t,c or g
ctataattaaagaaactacatcaggtgcttgaaaagatttagtatagttaatgttagccaaatgtgtacaagaaacaagtccttttacacactgttaatgtgagtgcacagtccgaagtttatagagggcagactgacagcattttaggtacatacacttgaaaanggtagccatgatttcctaacagtttcctacatgatacactcccttttataaggtatgacagaagactatgctgcaagtagaattagttagatatctatgcaatagcagtgaaagatctatcagaggtgttaggtagaaaaagcagaaaataagtcttatttatgtagaacgttctattgtattcatatttatgtgttttcatacacaataagtctggaaaaatacaaactatagcagttagcaataaaggagaacattcagaccagacgtggtggctcacacctgtaatcacaacactttgggaggctgaggcaagaggatcgcttgagcccaggagtttga

SEQ ID NO: 112310 - DNA, 470 bp, Homo sapiens
gacaaataattgaactaaatttttaccaaaaatatacacaaatgtgaagaagcatttaaaaagacacaaaattacaatttgtagagaaatgcataaaaatcacaatgaaaaacaaaatcacctatcacccatttagaatggctacctataaattttttaaaaaatccaaaatctgttgatgatgcaataaaaataaaaccatccccaggtaggtacagtggctcacatctttaaacccagtgctttgggaggctgagacaggtgaatcaccataggtcagaagttcgagatcagcccggccaacatggcaaaaccccatctctactaaaaacacaaaaattagccgggcatagtggtgggcgcctgcaatctcggctaccctgaggccgaggcaggagaattgtttgaacctgggacatgagaacaaatcactgcacttcagtctgggtgacagagtgtgactccatctc

SEQ ID NO: 112311 - DNA, 367 bp, Homo sapiens
ttttgttaataaatcctttatgaaaatcatataaatattagccaaaagaaagcaagtggggcctagattaatatcagataaagaatatttaaggcaaaagtattatatctataaagaagttacttctaaataaataaatggtttaattcactaagaagatatgacaagtatgtatcagtatataacctaaggaaatagtccccaaaatgtataaagcaaaatttaacagaacctagcccaggcatggtggcatatacctgtagtccccagctagttgggagactgaggcggaaagatcgcttgagcctaggagcttggagtgtagcctaggcaatataatgagaccctgtctcttaaaaaaaaaaaa

SEQ ID NO: 112312 - DNA, 661 bp, Homo sapiens
tcgactttttttttttgagactaggtcttgctctgtcacccaggctagagtgcaatggtgagattatagctcactgcaatctccagctcctgggctcatgtgatccacccaccttaccctccccaagtagctgggtttattctaacaagtgtgtgccaccatacccagctatttttttttttctagatatcgggtctcactatgttgcacaggctggtctcaaactcctgggctcaagtgatcctcccacctcagccttccaaagtgcagggattacaggcatgagccactgtgctcagccccatccactcctgccagtgcagctggaggaatctattcaaaccagaaatctgagcacatcactcatttgttttagctctctgtggataaaagccaaatccctaatacattctggaaggtttctagttaaactgcacatctactatctgcctggctctgcccacattctgcttcccctcctgctaccatagatgagctcccggccctttgctgaggccgatgcctccatccctgctctgttccacccccctccttcctgaggacctagttcctttctcatttttctctctctcttgcccaatcaacacacactccatgctacattcctttcctgagtgtctcgcccaagtctatgtcgacc

SEQ ID NO: 112313 - DNA, 417 bp, Homo sapiens
  misc_feature (1)...(417): n = a,t,c or g
ggtccctttaagttatcagcccagagaggccctggaataagagcggccgccctccctgccttagagaccgaccgacaccaagtagcaataaatgagcctgacatgccccacgccaggccgtcactcagaccccagagttcaacagccgttgactggtgagtcaatggcggccctgtagacagaggagactcctgacaaacagctgagctaatcaccagtcaacagccaccctgtagacagaggggactcctgacaaacagctgagctaatcaccagtcaacggccgccctgtagacagtggggactcctgacaaacagctggtgtgggtcacacctcgtcnnnnnnnnnnnnnncgtgcggagggttaatggcttggatcgaaaaaaactctaaagggaatgggtcggtgacctctc

SEQ ID NO: 112314 - DNA, 540 bp, Homo sapiens
  misc_feature (1)...(540): n = a,t,c or g
cgggatgtgatggctcatgctataatcccagcactttgggaggcaggggtagggggatatcttgagcccaggagttcaagaccagcttgggcaacatggtaaaaccccatctctacagaaaatacaaaaattagctgggngtggtaggtcattcctgaactatcagctgctcaggaggctgaggtgggagaatcatgtgagtctgggaggcccaggctgcagtgagcccatgattgtgtcactgcacgccagcgtggatgacaagcaagaccctgtcttcaaaaaaacaaaaaaatatggtttcacaaaaatggggaacagcatggggaaacagacagcccctaaatcccctctctgacggtccttcataattcagcagtttcgatgtggcatcctcccatgtttatgtgtttgcatatatatatgaatctaaataactatataaatatatatgtatgaatatacatatagttatatatgtaatatatgtgtgaaattatatatttacataaattgaactatatgcagtgttaaaaaaaa

SEQ ID NO: 112315 - DNA, 468 bp, Homo sapiens
ttgagacagggcctcactccagttccccaggctggagtacagtggcaggatctcagcccactgcagcctcgatcccccaggcttaggtggcttccacctcagcctcccgagtagccggaaccacaggcgtgcatcaccacacccggccaatcttttgtatcttcagcagaaatggggtcccgccatgctggccagcctgatctcgaactcctggactcaagcaatctgcctgcctcgggcctcccagagtgctgggactacaggcgtgagccaccgcgcttggcgttctgctgtattcttagagtgggtaacaattgtttactctcattgttactaattctactagtagtagagctcttttctcactttcttttagtagacatcctgttttggagaatattattcttaacaaaaattctcatttttcaatttctcttgaagtagagatgtagttaagttcccctaacc

SEQ ID NO: 112316 - DNA, 423 bp, Homo sapiens
actctcattcatttactcaagatgaactgaaagacaagcataacatagtgtggccaaggtctttaatttaagaactcctatatcccagtgctatgtccttgcattgcagtttgagaaacaatacatgaaaagttattcacttccagagatcaccctggtacagatacattgccatcataagcagagacagataaaaggattgggtactgattcatttttataagctacccagatgatctccaataggtatatatcaatttatttttagatcaaaatgggaaattcaaaaatgtaataatttctgactgtacttccgagggtctgtggaggtctcgctctattgcccaggggtgagggggcggtctcagctcactgcaacttctgcctcctggggttcaagcgattctcctgcctcagcctccc

SEQ ID NO: 112317 - DNA, 379 bp, Homo sapiens
  misc_feature (1)...(379): n = a,t,c or g
ttttgacaaaacggaaaaggggggaaagatccnnnnnnnnnnnnnnnctgatggggaacaattgacttagctctattaagaaaaaacatcctttcttcacagtcctaaatgtttatgcacttaataatagaacttcaaaatacatgaagcaaaaactacaaagaaataaacaaatacttttgttgaaagatttctacatcccactctcaaaaatcgatggaacagatagaaaatcagtgaaggatttaggagacttgaacaacactaatcaacctacttgacccaactgacatttacagtatgctctacccaaaacagcagagtacacatttctttttaagtgcatgtagaacatttaccagggtaggtgctagctctc

SEQ ID NO: 112318 - DNA, 504 bp, Homo sapiens
tttttttttaagtttaaagatatatgaaaagggttttatttatttaacagacagacaatggaaacaagcaaaacaatgggagcaagtcctttgccaaaaggaacacagagggtcatgatgatgctactcctccaaggatttcagagttcccagacgcctagttttctgtctagttcttctggaagatgttattcttggggagcaataggtcctcgagtttggggctctttcaggttctctctccatttccccattctgcaccatccctgccttggtggagcccccgtgcggaacacaggatccgaagatggcagcggaagctcctccgcggccccgagagcgactgggcagggtggatacaggctccttcactgggtgaaggcggcacaaagaacgggaagaaccatcccgggaggccaccaggcgttcagcttccccttgggacctcaggcggctcgggctgggtcgccgaccggggagtttctggggtctctccctctggct

SEQ ID NO: 112319 - DNA, 1077 bp, Homo sapiens
ccgtccggatttcccgggtcgacgatttcgtagcttgcctgctctcagcctaagctctctctccatctcgtggtggctccttgcgttcctacatcctctcatctgagaatcagagagcataatcttcttacgggcccgtgatttattaacgtggcttaatctgaaggttctcagtcaaattctttgtgatctactgattgtgggggcatggcaaggtttgcttaaaggagcttggctggtttgggcccttgtagctgacagaaggtggccagggagaaggcagcacctccaccacaagcgcagcctcttcctagaacaggtgcacgacacctccttccctgctccttcagagccttctgctcctggctggtggcccccaccaagttcacctgtcccacggcttccagacagaccacccaaggagaagaagaagaagctcccaacaccagctggaggtcccgtgggaacggagaaagctgcccctgggatcaagcccagtgtccgaaagcccattcagatcaagaagtccaggccccgggaagcacagcccctcttcccacctgtccgacagattgtcctggaagggcttaggtccccagcctcccaggaagtgcaggctcatccaccggcccctctgcctgcctcacagggctctgctgtgcccctgcccccagaaccttctcttgcgctatttgcacctagtccctccagggacagcctgctgccccctactcaggaaatgaggtcccccagccccatgacagccttgcagccaggctccactgaccctcttccccctgccgatgacaagctggaagagctcatccggcagtttgaggctgaatttggagatagctttgggcttcccggccccccttctgtgcccattcaggaccccgagaaccagcaaacatgtctcccagcccctgagagcccctttgctacccggtcccccaagcaaatcaagattgagtcttcgggggctgtgactgtgctctcaaccacctgcttccattcagaggagggaggacaggaggccacacccaccaaggctgaaaacccactcacacccacccg

SEQ ID NO: 112320 - DNA, 471 bp, Homo sapiens
  misc_feature (1)...(471): n = a,t,c or g
aagcgaaacctgtaagaagagcaaaagaatatgncattgatgataanggcagtcagcttggcaagaggatggaacaatttnnnnnnnnnnnnnnnnnnnnnnnnnnnnnnnnnnnnnnnnnnnnnnnnnnnnnnnnnnnnnnnnnnnnnnnnnnnnnnnnnnnnnnnnnnnnnnnnnnnnnnnnnnnnnnnnnnnnnnnnnnnnnnnnnnnnnnnnnnnnnnnnnnnnnnnnnngatattgaacttcatctgcactatagaccaaatgggtctaatagatatttgcagaatatttcatccaactgctacagatacacattcttttccacagcacatggattgttatcaagaattgaccagatattaggtcacagaacaagtcttaaaacactcaaagaaactgaaataatatcaagcatcttctctgaccaccaagtaataaaactagccatcaatgaattccaccacact

SEQ ID NO: 112321 - DNA, 420 bp, Homo sapiens
  misc_feature (1)...(420): n = a,t,c or g
gtaattagatctgggagaaaagggtggaaggaagattactgggctattttttttattttgtctctcaaagagaccccctgtaattccacgtcctggctgtcaagagccttatccatcacgggttcctgggtcatctgtctttgcattcactttcttgccgaggtctccagtaacacccttgcaatgccaattctcctccaagaagtttactnnnnnnnnnnnnnnnnnnnnnnnnnnnnnnnnnnnnnnnnnnnnnnnnnnnnnnnnnnnnnnnnnnnnnnnnnnnnnnnnnnnnnnnnnnnnnnnnnnnnnnnnnnnnnnnnnnnnnnnnnnnnnnnccgggcgccggacttcgccatgagcgcggtgctgggtcaccagccgccgttcttccccgcgctgacgaattccaccgcacta

SEQ ID NO: 112322 - DNA, 551 bp, Homo sapiens
  misc_feature (1)...(551): n = a,t,c or g
ttacgccacgcttggcacgagggatgaaagagagagtcatcttttaaacacagccaataatggtgactccggaaaggcagaaaaggaatctctgaagtaggtgtcctggagtcagttgttgaaacaatcctattgacaagtactgtgatagacagaacaagatacatacgccaacaggcatatgaaaaagtgttcaacatcactaattgtgagagaaatgcaaatcaaaaccatctcacaccagtcaggaatgacttattttgggggaaatagccattgggggaaattcgtgggctctaggattttttttttctggggaggatttttcgttttgatggcaggggggtatctttttgtccnttgggtaggnaaagttttcccccaggagccttttggantctggcagtttacttgacttttacccatttgttcccctttccccaaaccctttgccaggggaccccaaagggggggaccaccaagggggttttcttggggagggtgcctaggttantgggntctcctttttaggagcctgggggttttttgcc

SEQ ID NO: 112323 - DNA, 901 bp, Homo sapiens
ggagaatagggcaaatgtatttattttggtgggagtaaaggggataggatgtttcttaatctctttaagcctcagcttcttcatcttgcgttgttggaggattaaatgagatttaaatgagtgcaaagttcaataaatcatacacatcaattctccaacagcatacacatttcaggcattttaggagccccatctcatgaaggaaatccatactactgtggcagatgggggtggggaggcactttccactcaacacctcagttcaactctggccagtggcacctgccggggtggcttggggcttgccacctggaggcccagctccagggacacccttcacagaatatcctgtgggaacggcacccccctccaagcacaacagggccccttgagttttcaggtatcaagacaggagacgacacgacatgagcagtgggctaccattattaagcacttagtgtaaagcccagcatggtacaaaaatctggtagatgggtagtttatctccaatgacacatggggacaagaggataaattatcttgcccaaagtcacacagccagtgagtcgttggaagctggattcaaacccagacgtcagattccagagtccattctcttcaagggtggacttgaccccaccctgaacccaagggcccaaaattgagggctctctttgagcccacctgactttcctccagggtcaaggctggctgggtcccctggagccctctcctccacccccacacccagaggacaggctgcatcaggggtcttcccacccccaccccataccaaggctgctggagaggagcctggcccaaggtggcgctgcccctcttggacctccaagaatgccgcatggagcagcccctcagggctgtagtccctctacacctacat

SEQ ID NO: 112324 - DNA, 335 bp, Homo sapiens
  misc_feature (1)...(335): n = a,t,c or g
cgggactgacgaatacggtccaacgcactgactcaggaagctgagggggcccaatgactcgcaccccagatgcggttttttttatcagcgaaaagcacgccattgcgctccgaccggggctaaagataacctcctactgcactgattgaatttactgcccacttctctgctgtcttcaagagactcacgcggcacataaggactcacttaaacttaaggcaaagggttggaaaaaggtattccatgcaaatgtaccccaaaagctagcaaaagcacgccattcttacatcagacaaaacagactttaaaacaaaaacagttnnnnnnnnnnnnng

SEQ ID NO: 112325 - DNA, 442 bp, Homo sapiens
gcctgcaggaattcggcacgaggtcacaatagataaacaactctggggatgaatgtcttttacaaagctcgagaaacacatccagaacacattggctttttgtaaaagagccatgttcatcccagcctgccccacctagcccatactcactttggagaggagaattgaaagaatttgttattccaggctgggtgtggtggctcatacctgtaatcccagccctttgggaggccgaggtgggttgatcccttgaggccaggagtccaagaccagcctggccaacatggtgaaacgttgtctctactaaaaatacaaaaattagccgggcatggtggtgcgcgctgaggcaggagaattgcttgaacctgggaggtggaggttgcagtgagccgagattgcaccactgcactccagcctggatgacagaggaagactccatttc

SEQ ID NO: 112326 - DNA, 393 bp, Homo sapiens
  misc_feature (1)...(393): n = a,t,c or g
ttacnnnnnnnnnnnnnnnnnnnnnnnnnnnnnnnnnnnnnnnnnnnnnnnnnnnnnnnnnnnnnnnnnnnnnnnnnnnnnnnnnnnnnnnnnnnnnnnnnnnnnnnnnnnnnnnngtcacnnnnnnnnnnnnnngggaagggggttccctttttggccccccggctggaggcccgggggggaaccccaaccccgggaaccccccccctcccggggcaaggggtttttcccgccaaacccccccagggagggggaaaaaagggcctttgccccctgccccggttaattttaaannnnnnnnnnaaaaaaaacaggggtttcaccatgggggccaagggggtttggaaccccgggccctggggggaccccccttttggggcctccaccaagggn

SEQ ID NO: 112327 - DNA, 356 bp, Homo sapiens
acacaggtgtcgtgaaaactacccctaaaagccaaaatgggaaaggaaaagactggatatctacattgccgtcattgcacacgtatattcgggcaagtccaccactactggccatctgatctataaatgcggcggcatccacacaagaaccattgaaaaatttgagaaggaggctgctgagatgggaaagggctccttgcagtatgcctgggtcttggataaactgaaagctgatcgtgaacgtggcatcaccattgatatctccttgcggaaacttgagaccagccagtactatgtgactatcattgatgccccaagacacagaaaactttatcgagaacttgattacagggaca

SEQ ID NO: 112328 - DNA, 393 bp, Homo sapiens
  misc_feature (1)...(393): n = a,t,c or g
gtttcattatttcatcatttcatnnnnnnnnnnnnnnnnnnnnnnnnnnnnnnnnnnnnnnnnnncaccgcacccagaattttattattcatttcaatatttcatttatttcttcatttcatttcatttcatttcacccggcatttcattgttcattatttcatttcatcccatttcatctcatgtcatctcannnnnnnnnnnnnnnnnnnnnnnnnnnnnnnnnnnnnnnnnnnnnnnnnnnnnnncccggcatttcattattcatttcatcatttcatttcatttcacctggcaattcattattcattttattatttcatttcatttatttcatttattctcttcatttcactccatttcatttcgagacagagacttgctctattgccc

SEQ ID NO: 112329 - DNA, 377 bp, Homo sapiens
gggtgaagggtggggtccatgacatttattgagcctctaccaaataccagagagtttataaagtttataggacggttcacaaataccttcatttcataaccccctcctcccacccaaacaaacccttaaaggcagctatcagtgctttacttccacagctgtagaaaggaagtatagacgaaagaggcctgtcgctatggcctggctggggacagcagagctggcagggaacatgcaggcttgcagctgcccaagcctgacacttgtccagttctccagggggtggggagaagagggctggggagggtgtggaggaggacagtgcagaaggaacggaagatcaggatggataggctggggactctgggggagaagga

SEQ ID NO: 112330 - DNA, 385 bp, Homo sapiens
ccaccatagaattatttctgtattgttgaatttcagtaatcaccagggtattttttttggggtgtctattattttggaccaatttttcccaatgggtcccccctactgggtttcccatacaacccactctcttttctttttgcggattcagttcttcctttacttggggaaatttccttatcgtatctcctaatacttacacacacgcacacacacatatatttgagacagaatcttgctctgtcccccaggctggtatgcagtggtgtggtctcggctcactgcaacctccacctcctgggttcaagctattctcccatgtcagtatccaagtaactgggattacaggcaggcaccaccacgcctggctaatttttgtattttt

SEQ ID NO: 112331 - DNA, 429 bp, Homo sapiens
  misc_feature (1)...(429): n = a,t,c or g
tggncccccacaattggcagtgctgtccacacccctccccagcccttttaaaagaattatatagtggttatggtctcaaaaatccacaaagagagattaagaatagaggatgaatgaaaacacaactgtacccaatcctcatgtgactaagtacttctgatctaggattacagagacagtgacagcatcataaatacacacacacatattatgtcttaaatatcgtgaatagaaagtgatagcaaaagttatgcacttcgataagctgtgttgtatggatgtaaaaatagcattagtgggctgggcgtggtggctcatgcttgtaatcccagcactttggagccaagggcagatggatcacttgaggtcaggagtttgaaaccatcctggccaacacagcgaaaccccatctctgctattaaaaaaata

SEQ ID NO: 112332 - DNA, 697 bp, Homo sapiens
  misc_feature (1)...(697): n = a,t,c or g
cagggccttgggttccctgagctgtccagaccccaccatcttccggaccccagggaggtggcccttgccagaagcctgtgggtttctttttagcttgggggattnnnnnnnnnnttctccccnnnnnnnnnncttgagtagacttcagtgaccacactgtggaaaatacctttgcagacgtggcacccgagtgcacacaccgaccgccacatgtgcttttctgccgggaatccctggggtgaacgcatgttttatgggcgtttccaggagcgcgcgtgcacctccagacggggagctggcgggcgggggtggcagcagcagctctagccttggggggacaagcctctctcagctacgccaggggaaaagagagttaaggacactcacccccacccacgcacacacacaaggcagcgtcgggtgggagagagaaggccgtttctccttctgtagcctgggtctcccacgggccttccccgctgctgagcgagacaccagtagccaggtgaagggccacagcgggccaggccccgaccctgttgtgacccacctgggcaccttcccggaccagctccgcctcccctgccctcctctctccaggaaggagccagaaccctcacccctcttccacccttcccaggggtaaccccaggccaagcacagataggtcaactgcgaacctctggctttggggaag

SEQ ID NO: 112333 - DNA, 1448 bp, Homo sapiens
gtcacctcctctgaaacaaaagttaattttgaagagcatcatcatgggctggggtggtggctgcccccaggacatgcaggatttctgcagggggcagcacaggttctgggattgtgaggctgtgagtgaaggtggacaagctgtctggatggcaggtctaatgctcttccgaataaagtgctgaactgtgaggagagaggcggactgtgaggcaaccaggagccagctgcgtccgtgtgtggtctgtcaccacggggcctgcttcttatctgacacagcagctatcacaggctagtggttgtgcttttaagatgctctgataccattgggttaaggggcatattggcggtgggtgtggggcagtgtgaggtagtcctggatccccgccaggggggcccagacgccagcccttccctgtgtggctgcactgatgagggcagggaagagccccctaggggacacacagcttccaggaggagggaatgtcctctatgcatgctcctggcctctcaaggcggcgcttgtctaattattcacttgggaagaatgactagctcagccagcggctctttctgctttgttctggcgactttcctgggcaggcctttccacctggggagctggctcatcctgcacagctgggccgtggtgggcctgtctgcttgattctggggttcagtgtaggtcagctgatggcgaaccatggaggcggcttggcttctgtacttattcttgagttgtgataccacgcagaccttgggtggtgagagcttcctgcacagctctcagcggtctgtggacttggaactgcctgcgtaagtaacggaggggctgctggtcctgttcaggcccgtgctggggacgccgcttagacaatgttgcccagagtcctgtttaccctcccagggttcattcttcccaagaactcaaattcctttctcattggagcctagagaaaccatttgaacgggacctgctggcctcaggaggcaggcagagtttataataaaactttctcatgatttcttgaacatctttccctgtttggtatatacactttgtgtttaatttttcagtagctgcagtatattttttttccaatattcagtataatgcagtgtatttcatcatatgctgtatggagagtgggcagacttctgtggagggcccgatagtaaccatttgaagcttttctggacctgtggtcttagtcccagcgattctgcagagcggccatcggcagcatgtcaaccatttgcatggctgggctccagggaaactactgacaacgacaggtggtgggccatagtttcctgacccctgtgctatgccagaatttctttttcctcttccctatgagtggacctaaatatgttaattccttttcacctttcaaaacggacagccccttgaacattaaaaacttcgcagaccctaaaaaaaaaaaa

SEQ ID NO: 112334 - DNA, 373 bp, Homo sapiens
  misc_feature (1)...(373): n = a,t,c or g
ngggtatctgcaaaaagcctgcaggaaaacatcacgctaacagtgaaacttcaggagcatcccctttaaagtcagaaacaagtcaaggatgcccatcattgccacttctgttgcactcgaggtataagaaaaatgaaatgtatacaacttagaaaggaagaaaccaaaactgtttctcttgcagatgacataattatctatacagaaaatccacaagaatttgtgaactactaaaaatgaaagagttcaaaaaagagttgctgagtgtaagatcaatatgtaaaaccaataatgtgaccatgtaccagcaacaatcagaaaacggaatnnnnnnnnnnnnnnnnnnnnnnnnnnnnnnnnnnnnnnnnnnnnn

SEQ ID NO: 112335 - DNA, 1835 bp, Homo sapiens
aggagctggtggaggtgaaggaggcgctgagccgcgccacgctgcaacgggacatgctgcaggccaagaagaccgaggtggccgaggcgctgaccaaggctgaggctggccgcatggagctcgagctctccgtgaccaagctgagggcagaggaggcctccctgcaggactccctgtccaagctgagcgccctcaacgagagccttgctcaggacaagttggatctgaactgccttgtcacccagctggaggaagaaaaggccatgctgcagggccggcagcggcaggcggacagggaggccacagtggcgccggcagagcaggagtggctggaggagctgtggttggagcaggaggtggcacggcagggcctggagggctcccgtatgagtggcggacgaggccccaggaggcgctggagcaacagctccccacactgcaccatgagctcagttggctgcaggagcagctagcacaggaggcagcatggcgggagctggaggccgagcgggcccagctgcagagtcagctgcatcgtgagcaggaggagctgctggcccggcggaaggcttgagaaggaacagctgagtgaggagattgctgccctgcagcaggagcatgacgagggcctcctcctggccgagagcgagaagcagcaggccttggctctgaaggagtctgagaagatggcgctgtcagagaagttgatgggtacacggcacagcctggccaccatctcccctggagatggagcggcagaaaccagatgcccagagccggcaagagcaggaccgggtaggcctgccgtccgtagggaggcttgcggagcaggagcgccctctctccaccgagctatcccgcggtttccagcatcccatcttcgcggactcctcttcctctctcttctcctactctgggtcttctattcctgggtgttccttgaattgcctattctttccttttgttgcctcgggaaccttttcacgcctgccacaagttaattctttttccttgggtagttcttgaactttaaaataagggtaatggcctgtaaagaatgccataaaattgcttcaataaattgtcatctgtttattatttttcatcagtaaacatcatctggaatcatcagtattggccggcttttaaccagctgcatttttcattgtcccaaatatagtccaccatacatttgaccccattttataattattggaataataaattccgttcctgcctattttaccaatgaaaaaataatgcctgccagagagcatttttggcacatgtatccgtggcagatgtagggccagaggctcttcttttatcccatccctatgggccaacctatggaatgtattacacgttttaatgaggttttggccagcaatcaaagccttcagggaaaatgtccctagctctttactaccatcagatcaaggactctggataattgggcataacatcctgggaatagctgaaacagagatattattctctgctctcctctgttggctttgtcttttcacgtcttaataaaagtgctggtgacaagagtgtaactatgtcagtgttctcctgctgtccttgcctgtgtgggtcttctcccaaacccgactttcctccagcggcttcactgaaaaagaggagggggctgtggggggtgggtcggggagcaaaggaggaaataaactgaatagggaggaagcttctcacaggcccggagagggtaaggaagggagtcaaagacagaattttcttcagcaaacagtaaaaggggaaatctggggatggctaaagttttaaaccctttgctccatcacataaagaaaccg

SEQ ID NO: 112336 - DNA, 577 bp, Homo sapiens
tttggtactccaagcagcaccatggcggttgttaagaacaagtgccttatgaaaggtggcaaaaagggagttaagaagaaagtagttggtccattctctaagaaagatcagtatgatgtgaaagcacctgctatgttcaatataagaaatactggaaagacttggtcgccaggacccaaggaacccaaattgcatctgatggtctcaagggtcttctgtttgaagtgagtcttgctgatttgcagaatgatgaagttgcatttagaaaattcaagctgattactgaagatgttcagggtaaaaactgcctgactaacttccatggcatggatcttacccgtgacaaaatgtgttccatggtcaaaaaatggcagacaatgattgaagctcacgttgatgtcaagactaccgatgggtacttgcttcgtctgttctgtgttggttttactaaaaaacgcaacaatcagatacggaagacctcttatgctcagcaccaacaggtccgccaaatccggaagaagatgatggaaatcatgacccgagaggtgcagacaaatgacttgaaagaagtggtcaa

SEQ ID NO: 112337 - DNA, 653 bp, Homo sapiens
  misc_feature (1)...(653): n = a,t,c or g
aaaagcgtcatggaatacagcagctttctaataatataatttggtatttagaatatacactgtcatgtcatgctatatgtaaaataattaggcaaccattaacaccattattacacagtttgttttgaaaatgtgttaatcctgcctccaacctaaattttgtcaaggggcttctatttctttttttggggggcaggtaatatttctcttggttatgatatgacataatatttaagaactacagattctgtttttcttggcattagtggtgattgggaggaatagaaaagaattacaagcataatattccagcacagttacgtgtgagatgtaaattaaaactgttctataaatttgtaagtttcaaacaagtataactgttaagcaaacacagcaggaaattgtaaactgtttcgtgcaagagggtgttttagggcatttttgccaaggttaggtttcaggctcatagacctactatgtataattatcacaatattttcaagtaaagtttacaagattctttaaatttgggaagtccaaaattaaagacttaattgttatttttttgagacagggtcttgctctggttgcccatgctggagtgcagtggtgtgatttcggcttactgcaaccccngcctcccaggttcnagt

SEQ ID NO: 112338 - DNA, 393 bp, Homo sapiens
tctggaggctagagcgaattaaagcgacctgcccaagatccagcccaaagacccagcccctccctagctcacaagagctcatgacagctgcctgtgtgcgcctcttcccactgtggaagtatttacaccacagaaattggtcaacacggcaaatcaggacctgttattttattttatttatctattttttttgagatggagtctcgctctgtcgccaggctggagtgcagtggcatgatctctcggcccattgcaacctccgactcccttttcaagcaattctcctgcctcagcctcccgagcagccgggaccacagacatgcaccactgcgcccagctaatttttgtatttttagtagagatggggtttcaccatgttgtccaggatggtct

SEQ ID NO: 112339 - DNA, 1989 bp, Homo sapiens
gcccaggctggagtgaagtggcacgatctcggcttactgcaagctccgcctcccgggttcacgccattctcctgcctcagcctcccgagtagctgggactacagaccctatcagatttggatatgtccttcatatttgattggatttacagtggtttcagcagtgtgctacagtttttaggattatataagaaaactggtaaactggtatttcttggattggataatgcaggaaaaacaacattgctacacatgttaaaaggatgacagacttgggacaacatgtcccaacattacatcccacttccgaagaactgaccattgctgggcatggacgtttacaacttttgatcctgggtggacatgttccaagcctccgaaggtgtggaaaaacctaccttcctgctattcactggcattgtattcctggtggattgtgcagaccacggaaaggctgttagagtcaaaagaagaacttggattcactaatgacagatgaaaccattgctaaatgtgcctatactgattcttgggaataagatcgaccagacctgaggccatccagtgaagagaggttgcgagagatgttgggtttatatggtcagaccaccaggaaagggggagtatatctctgaaagaactgaatgccccgaccccttagaagttttccatggtgtagtggtgctcaaaaagaccaaggttacggagtaaggcttccgctggatggcacagtaccattggattaacacaaactcacattggttccaggtctcaacggttcaggcttactcagagatttgattgctcaacatgcataacttgaattcaatagacttttgctggttataaaacagatgttttttagattattaatattaaatcaacttaatttgaatgagaattgaaaacctgattccaagtaagtttgagtatccacaatgttagctttcctaattcccataaaaggacttgggtttttacagtttataatctgacatcaccccagcgccatttgtaaagagcaactttccagcagtacatttgaagcactttttaacaacatgaaactataaaccatatttaaaagctcatcatgttaaattttttatgtacttttctggaactagtttttaaattttagattatatgtccccctatcttaagtgtacagttaataattagcttattcaatgattgcatgatgccttacagttttcaataacttttttttttatgcaaacgtcagtgcaataaaacaaactctaatgtttggcatccttgttgggcaaatgtttcatttaaatgtgtcttatctagctagtatactctgaaaatttgagtatttaatattaggcatatgaagtggttgttgggaaaggagattccttcagaatatttagaatagcgtttaaggctctcaaggcttaggtatttaccatgagatggttgtggtcagttgcacctgataccatgtatccctgaatcatgtgtatttttattagtaatgcagccactaccattgctgatggggtctgtgtcctaagtccctgtgggattggccttctgaagaaaagcacatttatggtacacaaggttgattctcagtttggtaggctctatagttccatcccagctgtctaattctgaagtgctccagtctatattggtgccaaatggggtaatctgtgcctcttccccaaaagcaatgacaggcaccagtgtctccacatttagatatattcccagtctctgtacatttaacagtactctctggggcaagcaataagtaggaccttgtgtgcagtttcattgtagagacatgtatatctgaggaataaaacagcttgttctgtgtcagtctgagatatgtggagattttgttcctatcctatagctcttttgtattctttggcatattttatatcctggtagaagaaaacaagtgcttgtttccaattttcttttttcttatttgctctcaggtagttct

SEQ ID NO: 112340 - DNA, 387 bp, Homo sapiens
  misc_feature (1)...(387): n = a,t,c or g
attatggcctgggttgataaacataatcagcctaatagatgttaagaattttaaaaaatatttttcttcaacttaataggacttagtttcctgaaacttacagaaatgttcaagcctacaaaaaatatatgaactcttgtgtactcatcagctaccttcaaaattttgtaggactttttagtctaattaattttttttgtttgttttgagacagactctcaaaaaagagtctcgctctgttacccaggctggagtacagtggggcgatctcggcttactgcanttccgcctcctgggttcgagcgattcttctgcctcggcctcccgagtagctgggattataagcgcccaccaccacgccgagccctatgcagtctcaaaaaaaaa

SEQ ID NO: 112341 - DNA, 537 bp, Homo sapiens
aattaccttaaagtccccattctgtcttcagcctgctgtaatgtgccattgagaacctctaataatttctccatttcagttaccatacttttcaactctagaatttctatttgactcctttttatggtaactgaaatggaaaaattattagaggttctcaatggcacattacagcaggctgaagacagaatggggaacttgaaggttaattgagattgttgactctgaggaacagaaataaaaatgaatgaaagtgaatggaatctcagagacctgtttgtggaacacatcattcaagcttactaatgtacacataatgagcatcccaggagaagaaaaccagaaaaaaggagaaagaatatttgaagaaatgatggccccaaacttcccaaacatgatgaaaaacaatctgcatattcaagaagctcaaggaactacaagtaggaaaaactgagggatccacatctaaacatactgtaatcaaactgacagaaggcacacgccccaatatcttgaaagcagcaagagaaaagcaac

SEQ ID NO: 112342 - DNA, 390 bp, Homo sapiens
  misc_feature (1)...(390): n = a,t,c or g
gtagagtgtctggatggaacctgagctgggtctctgactcacttctgactttagggtgaagatggagggaatctgataaagacatcttataaattcaacagacacaaaagaatttgatctcccataagcaactgtgaaattacaataacagatcctgggaagttctacaattctaattcagttttttcaagggggaacatggcaaaggtgttcagtttcatccttgttaccaccgctctgacaatgggcagggaaatttcggcgctcgaggactgtgcccaagagcagatgcggctcaaagcccangtgcgcctgcttgagaccccggtcaaacagcaacagggtcaagatcaagcagctttttgcaaggagaatgaaggcccagtcctt

SEQ ID NO: 112343 - DNA, 388 bp, Homo sapiens
ccaaacattaagttagtgttagtcatattgtgttccagaggttggtttatggttggataccaaaacattttttcagtagagagaatattataaggaaatataaatcaaagagagacagcatgtaaaggtctatgacagaaagacaagttttctatttactaaaaggcaggtattgatgccacagcctttggatgttaatgattaagcataggtttattttgcagacttatcagttaccagtttagtgcgtgagttctctatgctgatattctgcatcttctttcaacagggtttttagtctttattaatttgtattgcataaaatatggggcactagcactacaagaaatattttgatggtatacaaccacaagtaagtttgttttta

SEQ ID NO: 112344 - DNA, 586 bp, Homo sapiens
tgttatctgatgggacggttgacagtggtcagggatcctctgtcttccacagaatctacaagtgagcagccaacagacagtttccatatgggttcccaacatgaacaggcaacattctacaggcacagtcccagggcatataccttttactgtccaagcacagtctcagccccatggggtatatccaccctcaagtgtgcagcagggaatacagcagacagcccctcctcaacagacagtgcagtattcactttcacagacatcaacctccagtgaggccactaactgcacagccagtgagtcaacctcaagctccacaagtcttgcctcaagtatcagctggaaaacagagtactcagggagtctctcaggttgctcctgcagagccagttgcagtagcacagccccaagctacccagccgaccactttggcttcctctgtagacagtgcacattcagatgttgcttcaggtatgagtgatggcaatgagaacgtcccatcttccagaaggaaggaatgaaggaagaactacaaaacggcattaccgaaaatctgtaaggagtcgctctcgacatgaaaaaaaaa

SEQ ID NO: 112345 - DNA, 392 bp, Homo sapiens
ggagaattggttggtttgcgtatgaaaggtgtgctccgggggaggttggtggggatagtgcgctctctagccagccctggaaggagtggtctctccaggattagcaaggccccaagatgtcaaagcatcataaaactcagaaaataaaaaacatgacttttttttggagcccaattctcactctgttcctcaggcaagagtgaagtggtgcagtgatagctcactgcagcctcgaacttctgggctcaagcgatcctcccacctcagcctcctatgtagctgggactgcaggcaagcaccactatacccagcttaattacttttttaaaattttttgtagagacggggtctcgttatgttacccagactgaaaaacataataccctccccct

SEQ ID NO: 112346 - DNA, 369 bp, Homo sapiens
  misc_feature (1)...(369): n = a,t,c or g
agtatggnaagcagaaatgagaccaaccaataatccaatgtgatgccaccaatattaatatatgtgcaaagtgctcaggaggcccaggtattgggacactgactttacaacgatggggcagaagtctgagaggtcctgtgtgaaggaaataggtagaaactagttcttcgaggaaacgaccccgagttggggtggtgcaatggaaagcaagtcctcttactagggagttgtttgtttacatctctagtgtttgacccacagagtcagctcctgggttgggtttttgttttccagactttggacaaagtttaccaaatgaaaagcaaacctcggcgatcactgtctgatcatcaacaatcacaattatgc

SEQ ID NO: 112347 - DNA, 367 bp, Homo sapiens
  misc_feature (1)...(367): n = a,t,c or g
aggttcgagcgttatgtgctttgttcttggctgttcaacacgactgcagacccatggacaagagcgcaggcgggggccacaagagcgaggagaagcgagaaaagatgaaacggacccttttaaaagattggatgacccgattgagctacttcttacaaaattcctctactcctgggaagcccaaaaccggcgaaaaaaagcaaacagcaagctttcatcaagccttctcctgaggaagcacagctgtggtcagaaacatttgacgagctggtagccagcaaatatggtcttgctgcattcagggcttttttaaaggcggaattctgtgaagaaaatattgaattctggctggcctgtgaagacttan

SEQ ID NO: 112348 - DNA, 2877 bp, Homo sapiens
ccggtcccttggcgacgggtcttgcatgtgacactcttgccctctagtgcctcaccagcttggtagcagtttgatggctaatattaataagatgttacataacatgagagtactgggccaggactggtgttgctaccacttgtaaagtcaaaaagcctgagccgatggtaacgagtggtactgtttccgtttcttttccatctattgcaactttctcaagcattttcagctctgaactttaattccagactgtattttctgtgagtcctgatcaagtgatacaaatgagctgcaatggtgacataaactcttgacagagattggaaaagtagctggaacaccatcttttcttttaactttttatggtgcttctgttggcatagttggggaaagcacctacaacatgagttttatcatgaagcttcacagacactttcaaagaacagtcattctgcttgccactttttgtatggtgagcattatcatttctgcttactacctgtacagtggctacaaacaggaaaatgaactctctgagacggcttcagaagttgactgtggcgacctccaacacctaccatatcaactaatggaagtgaaagcaatgaagctttttgatgcctcaaggacagaccccacagtcctagtatttgtagagagccagtactcatctcttggtcaagacatcattatgattctagaatcaagtagattccagtatcacattgaaattgcccctggaaagggagatctcccagtgcttatagacaaaatgaaaggcaaatacattctcattatttatgagaatattttaaagtatataaatatggattcctggaatcgaagccttctagataaatactgtgtagaatatggtgtgggtgtcattggattccacaaaactagtgagaagagtgtacagagctttcagttaaaaggtttccctttttccatatatggaaatcttgcagtaaaagattgttgtattaatcctcattctccattgattcgtgtgaccaaatcttccaagcttgaaaaaggttctttacctggaactgactggacagtttttcagattaatcattcagcctatcaaccagtaatatttgccaaagtaaagaccccagaaaacctttctccttccatctctaaaggtgctttttatgccactattatacatgacctggggcttcatgatggaattcaaagggttctttttggcaacaacttgaacttttgggctgcacaagctcatcttcatagatgccatctccttcttatcagggaagaggctgacattgtccttggacaggtacattcttgtggatattgatgatatatttgtgggaaaagagggaacaagaatgaacaccaatgatgtaaaggccctgcttgatactcagaatcttttgcgtgcacaaatcacaaattttacattcaacctgggattttcagggaaattttaccatacaggaactgaagaggaagatgaaggagatgactgtctgttggggtctgtggatgagttctggtggtttcctcacatgtggagccatatgcagccccacctcttccacaatgagtcatctttggtggagcagatgattctcaacaaaaaatttgccttagagcacggcattccaacggacatgggctacgctgtggcccctcaccattcgggcgtctaccctgtacatgttcagctttatgaggcctggaagaaggtctggaatattaaaatcaccagcactgaagaatatccacatctgaagccagctagataccggaggggttttatccacaaaaacatcatggttctcccaagacaaacctgtgggcttttcactcacaccattttctacaaagaatatccagggggtcctaaagagctggataagagtatccaaggaggagaacttttcttcactgtcgtcctcaaccctatcagcattttcatgacccatttgtccaactatgggaatgaccgactgggattatatacatttgttaatctggccaactttgtgaagagctggaccaacctgcgacttcagactctgcctccagtacaactggcccacaagtattttgagctgtttcctgatcagaaagaccctctctggcagaatccttgcgatgacaaacgccacagagacatttggtctaaagaaaaaacttgtgatcgcttaccaaaattcttggtaataggaccccagaaaactggtaccactgctttgtatttgttcctggttatgcatccttccatccttagtaactcccccagcccaaaaacctttgaggaggtacagttctttaatagaaataactaccacagggggattgattggtatatggatttcttcccagtcccatctaatgtcactaccgactttttgtttgagaagagtgccaattacttccactcagaggaagcccctaaaagagctgcttctctggttcccaaagccaagattatcaccattctcattgacccttcagaccgagcatactcctggtaccagcatcagcgattcacatgaagaccctgcagctctgaagtttagcttctacgaagtgatctcagcagggccccgtgcaccctcggagctcagagccttgcagaagagatgtttggtcccggggtggtatgccagccacatcgagagatggcttgtttatttccccccatttcagttgctaattattgatgggcaacaactaagaactgatccctgctacaagtgatggatgaagtacagaagttttctaggaagtcttgccctcattataattactccagaagctttaacggtttgatttctcataaaggtttctgggttgtcagttaactggaagaaagggtaaaacaaaatttgg

SEQ ID NO: 112349 - DNA, 381 bp, Homo sapiens
  misc_feature (1)...(381): n = a,t,c or g
aagcannnnnnnnnnnnnnnnnnnnnnnnnnnnnnnnnnnnnnnnnnnnnnnnnnnnnnnnnnnnnnnnnnnnnnnnnnnnnnnnnnnnnnnnnnnnnnnnnnnnnnnnnnnnnnnnnnnnnnagtagtctttatcagaataacaacgtagacttctctacgtcttctgcccctagagatacagcctctgtggcctgcaggtgttgggagatccacagctaagacaccttgacctcctggaagcctagaaatgggaccagtgacatttatggatgtggccatagaattctttctggaggagtggcaatgcctaaatacagcacagcgtaattttatagaaatgtgatgttaggggccaggcacggtgggttatgcctgtat

SEQ ID NO: 112350 - DNA, 490 bp, Homo sapiens
tttttttttgagatagagtattgctcttgttgcccaggctacagtgcaatggcgccatcttagctcaccgcaatctccgcctcccagattcaaatgattctcctgcctcagcctcccaagtagctgggatcacaggcatgcaccaccatgccaggctaattttgtatttttttttttagtagagatggggtttcaccatgttggtcaggctggtctcgaactcccaacctcaggtgatccgcctgccttggcctcccaaagtgctggaattgcaggcatgagccaccgcacccagcctgcaaccatctttaactctggatttttcacatctctgcccgttgtttgggatctagaagcagtgcttacttggggcagttgtgggtaaaggcggtagattgaacagagaacctttccttctccctctccctcgccacctgctgtcaggccctttctggaaggcccacatagtctggcccctcttcccttagct

SEQ ID NO: 112351 - DNA, 936 bp, Homo sapiens
  misc_feature (1)...(936): n = a,t,c or g
ctggcggccgttgaaaaatggcgactgtggcagagttgaaggctgttttaaaggacaccttggaaaaccagggggtattagggcatttaaaagcaaggatccgagctgaagttttcaatgccctagatgatgaccgtgaaccccgaccatcattgtctcatgaaaaccttctaattaatgaattaattcgagagtatttagaattcaacaagtataagtatacagcatctgtcctcatagcagaatctggtcaacctgtagttccgttggacagacagtttctcatccatgaactaaatgcatttgaagaatcaaaggataatacaatacctcttttatatgggattttagcccatttcttgcgtggaactaaggatggcatccagaatgcatttctgaaagggccttcacttcagccttcagacccaagtcttggcagacaacctagtagaagaaagccaatggatgatcacctaagaaagaaggagcagaaaagtactaacattgaagatcttcatgtttctcaggcagtcaacagataatgctttgtttggggtatcttttgtcttaaaattgtattattaattaaataacttatttattgtcccaatgttaccaaaatgcaccactaatgtttgtagaaattagagtttctacaaaacacccctcatgtttaactacatttgtgaataaaagctaactcttgtcatctagcttattggatttgacttgaaaaaaaaagtattgtttttacaaagtattttttgtttttttgagatggagtctcgctctgtcacccagactggagtgcagtggcacgattctcggctcactgcaatctctgcctcccggattcaagtgattctcctgcctcagcctcccaagtagctgggaaaacaggcctgtgccaccacaccggagtagtttntgtattgt

SEQ ID NO: 112352 - DNA, 517 bp, Homo sapiens
ctctgccaggagaggcaggagagcaagtgctctcctgcctctgccaggagagggcttgtggctccaactctaggaggccaggcaagcatggacaggagccaagggagcagggtcattaactttttcttctttgcaaagtgggcacttggcatcagggtcccaatcaccagaaagcaccaaagcccctggcaccccacccactccatcctacccagggaccccaagtaggcaactgttatggcagtgggtccagcccaggccagcactgccagcctcctctccctgcaggaggcaccagctctacctcccccggcaggcaatgtcctggcttctcagcccagcaccatctgttcccctagacttctcaggggccagcccagtctgggccaccctttgtttccctcatcctcggctcccacacaggtgacagacccagcagatagcttctctctgggaaaggttggatgctgccttacatccccttctagccctcctcccatccacacacacaggcacc

SEQ ID NO: 112353 - DNA, 384 bp, Homo sapiens
ccctttgttcccactgcgaattcctggggacagttatgagttcctaatgacgtcaccacaaagacattttggagtgtttggtaaaggctgtttcttttcagtgattgctggaagcagatgggatcaaataaaaatagaacattgtgggctcccaaggctgaggtggagctggaggatgccggccagactgcggagcagcagtcttccttgtgcacatgcctgaagtccgcgtgggtgtttgaggaagtggggatacagcatttaatgaaaaatttatgcttaagaagtagaaaatggcagtcttcctagataattttcaatggccagaatgtgaatgtattgacgagtgagagaagaaatgttgtggcgtctgttgtgacaggt

SEQ ID NO: 112354 - DNA, 792 bp, Homo sapiens
ggcacgaggagagtgcagggatgtgaaattgtgggcaaagtggaacttgaaggaatgtttgtaggggcagagctgaaatgattagagatggaaatcattcaagccgaggaggccaggagaaaaataggagctattttcttgctgtgtggctcaaactcttaaacatgaagcttctgtgcatctttgggagggtgcgcgaggggtcatcagtttacgttgatactgtggaagtctcctattcaagtggcaggtcatagtttacagaaaaagattttgctcctgataccaaaggggcaatcaggcaatctaatcctcaccaatccctaattgattagctaattaaaaggactgagtttgaagtagagagcagacttggtgacaaagcagagacagaaagaagagggaggtcacaaggccaagtcgcagggccagcactgcagaactgagccagagtgcacagcaaccctcaggatggctctgcctaagggaactctgtgaaagtccactttttataccatcttttacccacctcttttcttaccccaaagttcctttatgtagctcgaaatgccaaagactgtatggtttcctactaccatttccaaaggatgaaccacatgcttcctgaccctggtacctgggaagagtattttgaaaccttcatcaatggaaaagtggtttggggttcctggtttgaccacgtgaaaggatggtgggagatgaaagacagacaccagattctcttcctcttctatgaggacataaagagggacccaaagcatgaaattcgga

SEQ ID NO: 112355 - DNA, 367 bp, Homo sapiens
aattaagtataaagtcaattaaaaaataatttgagttgaattaccatttttaattctctatgccactgcccctctctgcccagaattggctgtccttgggagagctatttctgctatgtggctgacgtatttctccccacgttagaagatgcgacccgattcaagcacctccggaagtacacatacaactatgaggctgagagttccagtggagtccctgggactgctgattcaagaagtgccaccaggatcaactgcaaggtatggaggatgcaggcaggagggacctaaagcccacagctttcccccagccctgttccagcgggcgcccaacacgcgaccttcccggagggtgtgtactgagcaa

SEQ ID NO: 112356 - DNA, 533 bp, Homo sapiens
tttcgtccgccgcctgcactgggcgcgcgagagctgcttgggcggtttctctgcctcgggcctgttgggcagggccggctaaggtgcgcgtgctcgctggttctaacccttctgttgggcgtttctgctgagaggcgggaggcgctgagagtctgtgcggaggtccgtggacagactgctttgctcgttgttgctcttcggaggcggcgatccccgaaggcgagctgaaatacggctgcaggctacaatttgcagccgacgattatggaagacggcaagcgggagaggtggcccaccctcatggagcgcttgtgctcggatggcttcgcatttccccaataccccattaaaccgtatcatctgaagaggatccacagagctgtcttacatggtaatctagagaaactgaagtaccttctgctcacgtattatgacgccaataagagagacaggaaggaaaggaccgccctacatttggcctgtgccactggccaaccggaaatggtacatctcctggtgtccagaagatgtgg

SEQ ID NO: 112357 - DNA, 1277 bp, Homo sapiens
ttttttttttttattttaaaatagaatttattgaataccatagtatattaaatacataaaaaattgttttttttgtcagtattggcacataatgataaagtactgctaaattaacacttcaaaaatttcaaattttaaaacattccataaaaatataaagcctagtagtgttataaaagtattaatttacactaacttacatatcaaagtgttaaaaaagaaattccacacttaaaccaattatttgagaagtaaaaattcaatcatgttttaaaaaatgttttcatttgaacaaaatggccaaccaaggaaaaaaagggggggggggtataaaacaggcaaaaattacctaatttacattgacttgtcctactagaaaatgttgcaggttaactttagacattaaaaagattcatattccaaaggaatagaaaagctgtttgcaatactttttatgcctaatcaaagaaccacataatgacattttgtgggttgctccttaattgccagtaatggaggactactataaaaatttagttttaaaaataatttttctcccaatgaacatttttatatgcagaggctgtcctcaatatggaaagattaaacgaggacatttatacttatgatcttcactataatatggcctatatattaccctgtccaattttttttccactctgaaaattcagtaatcctagcatatgagtattaacagtagaggatcaaattcccaaaaggttgagtaatttgattcagatctcttgaatttacagagtacttttcctcccaggaaatgtataaagttatttattttatgttatatatctatatttctttgagatggcatcttgctatgtcacccaggctggagtgcagtcactattcacagacacaatcacagctcactacagcctcaaactcctgggcccaagggaccctcccatctcagccagtacattccattgtactggtctacactgaattccattcaattgcagactgaagtacagtttttgtttttgaaatttcattggttaagatcaggctgaaattttagagattaagcctaaataaattagttcatatatacatatatatatatatatatatatattttttcttttttttttcttttgagatggagtctcgctctgtcacccaggccggagtgcagtggcgtgacctcgacccactgcaacctccaccccccaggctcaagcgactctcctgcctcagtctcccgagcagctggggttacaggcgagccccaccac

SEQ ID NO: 112358 - DNA, 559 bp, Homo sapiens
cgacttctctggagactctctggtgtgttaaaatttggacacaggagttctgatcgcagcagggtcctgctggaaggtgcagaggccaaagcagtttgaggattgcaggtcctttccagcaaagaacccactgaagctggggactgctgagcagctggggctgcccagaaggagggcaaagccatctgaggaaacgcccagggcagaaggtcctgccaacccccctctgacccggtctcctccgagtcctctcctctgtggctcccagagctccctgcaggctcccgcctgggatgccaggaacaggggctctcaggatggtgtgggggcttcagggctgcagggaccacagaaccaggtggagctgggagaggctctgtggtcagccccccactctcctcacttcccacgcctcctgctgcagaagacacccttggagctgggggaggggcagccggggaggaaggtcgggtctgaccactccctgtgacccagccccatgcagctgcacaggcgagtgacttacctcgcagggcgcccgagcagaagctctgcagct

SEQ ID NO: 112359 - DNA, 786 bp, Homo sapiens
cctcggcgccccgctgggtgtgctcgtggaagtgtcttcgtggtgctgctggcggcgtcagatagggctggatctaaatcgctagctaaggctctgtcctagtgcctttgggtgtgtttcctttaaaaagatgcagcacctggactgcgacctttggctccagctggaactttccagccagtgtgtgcttctggggaacggagtggctatgaatctgcatgtaaagactttgtccctcatgacttggaggtccagattcctggaagagtctttttggtcactggaggaaacagcggcattggcaaagcaactgcccttgaaatcgccaagcgagaacatttttctgcacattgtggacttgtctgatcccaagcaaatctggaaatttgttgaaaatttcaagcaggaacataaactccatgttctgatcaataatgcaggttgcatggtcaataaaagagagctcacagaagatggacttgaaaaaaactttgctgccaatactctgggtgtgtacattctcacgaccggcctgatccctgtgctggagaaagaacacgacccccgagtgaagggacttggcagctgcagttcagttcaaggccttgggatgagaagcgtgtcctggagtatccagataaccgtctcctcaggaggaatgttggttcagaaactgaacaccaatgatctccagtccgaaagaacaccatttgatggaactatggtctatgcacaaaacaagaggcagcaagtgggtctgacggagcggtgggcccaagggcaccc

SEQ ID NO: 112360 - DNA, 419 bp, Homo sapiens
  misc_feature (1)...(419): n = a,t,c or g
actcaatttggaaaaacaaatgtctaaaataatgctatttgctcccaatgttgttatgatagtgttgggaacataactcagatatccttccnnnnnnnnnnnnnnnnnnnnnnnnnnnnnnnnnnnngnggtttttgctttttctcttaattatcctttcatatgttttatatcaggattctcaatcctaggggtacattagaatgataaaggaataatccaggaatcccacttctgggtatttttctgaagggaataaaatggatgtgtggaaggggtatctgctctctcgtgttcgttaagatgctgttcaccacagccaacacgcagaaccaacctcaagcccatcagcagaggcacagacaaagaaaatgtggaatacctactcagtcttaacaagtgagaaaacctagcatttg

SEQ ID NO: 112361 - DNA, 1559 bp, Homo sapiens
  misc_feature (1)...(1559): n = a,t,c or g
accatgattacgagattcaatgtccgtccctgtacatcgacgtgattgattaggccgtgccgttacctactcctaatgcccttgccaccgattgttttgaggaggaggcagccgtggcttccaagtccatgtgacttgccagaagccacagtctggggctgaggttggacttaaacctttggtcttcacacacgatcaggttctcagccctgcctctgacgacacccgaattaatagtctgggacaacaaattcttccgcagtggcttgtatccgctccggctgctggaacaacacgccatggccggggcagtttacgaacagcaaacacttatcctctctgttctggaggcagaagcctgacactcaacaggcatggcttctggtgaggagccctcttcccgggttgatgacggcacctgctcacggtgtcctcacgtggaaggaaggaaggtctggcctcttcctccgcttccaagggcgctcattctcccctgnnnnnnnnnnnnnnnnnnnnnnnnnnnnnnnnnnnnnnnnnnnnnnnnnnnnnnnnnnnnnnnnnnnnnnnnnnnnnnnnnnnnnnnnnnnnnnnnnnnnnnnnnnnnnnnnnnnnnnncgtgtggagcacggacctggctacgggtgttccatgctgtggggcggtgacaaagacgtgcttttgcggtgacgatctgagtgtgtctgctgtcaaagatgctctctgccctnnnnnnnnnnnnnnnnnnnnnnnnnnnnnnnnnnnnnnnnnnnnnnnnnnnnnnnnnnnnnnnnnnnnnnnnnnnnnnnnnnnnnnnnnnnnnnnccccgccccaaaaaaagaaagatgctctctgcccttcggccctgaaagcctccatcgtttcatgctctctgcccttcggccctgaaagcctccatcgtttctgtgcagtgcccctgtcatcgatgattccgtacacgcacttcgacgtccagtttttggaaaagtttggggtcaccttcaggagggaaggcgagacgggcactctcaagggcaccatgctggggacgccggacctgaaacgggggccacccgcccgccgagtggtaccgcgatggtgagtaggacacggcccagacccgggcacacaccaggaggcttttggacggaaatgtcctttaaatgtgggtgtcaatgtggcttttgtctctaccactgggtcagctccagacagcgaaacaaactgagggactgtagaggacttggtggcccaccgttcgccttgaacttcatccaggagaatcctggagagggagaccccgaacctagagcagccacttagagactgagcgctcgtacagtgacagaaagaatgatcttgtgccgggcatggcctgactcacggggtccgggtcgggccagaaagtccgtttctttctacgtttaggagatgcccctgctggctcccagggcacacctgactgtggaagcctagacagcctttccagaagtcgaaaccgaggtccagggaagtgaacccaatcctcgtgtaggttcttccacaacagctcttcccccaa

SEQ ID NO: 112362 - DNA, 361 bp, Homo sapiens
  misc_feature (1)...(361): n = a,t,c or g
ctaaagtgaggccgccccaagagaggatgcacagagtgctgccccgttcaggtcaaaaaaatgtcacaaccagaagtcaaaaatccaattggatggggtgacacaataaaacaggaagncaagcatgtccgatcgtatcgatagagacgtgattaacgcgctaattgcaggccattgtgcggatcctttttccgtactgggaatgcataaaaccaccgcgggactggaagtccgtgcccttttacccgacgctaccgatgtgtgggtgattgaaccgaaaaccgggaacgacactcgcaaaactggagtgtctcgactcacggggattctttagcggcgtccttccccgacgtaanaattt

SEQ ID NO: 112363 - DNA, 512 bp, Homo sapiens
acatctccctgactggcacggaaccatagctgttcccaactaagacacaccgaggcccaggacaactggggggtgatggaggagtccagccggggagacagtgagaggctcgaaggcacaggcccagctcctgcactcctgcagacggtccctgattacacgaacgggctcggtgagcaccagcgagatcctgccaagccctgtgtgacggtactcaaggtgggagaggattctgtggcagtcggggccggggggaagcggtggcccagaggcagggcagttgtggaggagcccctcacaacacaggctttgcagtcaggaaatgggggggggcttggccacaggacagggaacacagagtgtggggggcaggcacacgtggctcctggaagcggaggtcaccgctttgtctcaaggaggcgttttagtgctctccctggccgtttaggtcagttgcggcagtggttgtcacagccgcaacgttgtacaggtacggacattgaattcgtaat

SEQ ID NO: 112364 - DNA, 359 bp, Homo sapiens
cggctacaaaggatgtaaccactacactctccgaactagtgttcatgtgcgcgtagctatgagtggcacacggtgtgtacacgttagagtgcccgaaaccaaaaatgtgtacccattcaatgatctccgacacaaagttcaggaaggcgctcgccaacatattagattattatcgagattatttctgattcgcacgggctcaacgccagaatcagccaggccggaaaaatatcatttttctatcggtatcgctgggccggtaaagcggtaaaactcaatgttggtgattatcctgcaatgagtatcacccaggcaagagagcgtcgccaacaattcagaaactggttaactgagggact

SEQ ID NO: 112365 - DNA, 676 bp, Homo sapiens
ttggtttgttctctgtgagttgtagatcctattaaaagaaaataaaaaccagtgactcagaattctaatgatacttattttgccccttaaaaaggttgagactacaagcgcagtacagcacagaggaacttagtcagtgtctcgtggctaacatagatcgatcgatctatctatttgtgtatctatctatatatgtatttatctatatatctctccttgatgggggtttggtttttctttttagaaaatgaaatgaaatatgataccaataataatgaagaggaagagggagaacagttcgattttgacagtggagatgaaatcccagaagcggacagacaggccccctccgcccctgagacaggaggtgctggagccagtgaagcccctgcacccacaggtgagtttccaggagggtccccaggtgagtccccaggtgggtccccaggtgagtccccaggtgggtccccatgtgagtgagtcaccaggtgagtccccaggtgagtccccaggtggtccccaggtgagtccccaggtgggtccccatgtgagtcaccagtccccaggtgagtccccaggtgagtccccaggtgagtctacagttcaatccgcatatgatgcctatcgccaggtttttgccagtctcgcacgttgtacagcgacggacaatagatac

SEQ ID NO: 112366 - DNA, 396 bp, Homo sapiens
  misc_feature (1)...(396): n = a,t,c or g
nnnnnnnnnnnnnnnnnnnnnnnnnnnnnnnnnnnnnnnnnnnnnnnnnnnnnnnnnnnnnnnnnnnnnnnnnnnnnnnnnnnnnnnnnnnnnnnnnnnnnnnnnnnnnnnnnnnnnnnnnnnnnnnnnnnnnnnnnnnnnnnnnnnnnnnnnnnnnnnggggaaaaaaaaccccccaaaaacccccaaagggcaaaaatttggggggggtttcccccnnnnnnnnnnnnnncccccggggtttaaagttttaaaaaaaatttttggggaaaaaccccctttttcaaaaaaggggcaaaaaagggaaaaaaattgnnnnnnnnnnnngggtcccccccctttggggggcaaaccccttcggggggagaaaaaaagggcccaatagagggcccaaaa

SEQ ID NO: 112367 - DNA, 392 bp, Homo sapiens
  misc_feature (1)...(392): n = a,t,c or g
gcctgattacgttanggagctnggccgccggggatcgggggagggaaacagcacccggtgctctttaagcaggtagcgcatcttctgatgccggtggcgatttgttaaacacccccgtttaagaggctatcatggcaattactgaagttttcacacataaccagccgctcggtaacagcgacccggcgcacactgcgtatggtcctggcgaactgacggcttccactccagccatgacgccgctcatgctggatgccactttggcaagctgaccgtctgggatggtgctcatgctggcgcggcaatgggcatcctggctgtaaccgcagaccagaacagcgcggaactggcatattacaaatctggctcttttcgtattgaagatgtcctct

SEQ ID NO: 112368 - DNA, 595 bp, Homo sapiens
cgatatcaaaacatataaagatatactaaataattacacagataagcgataccgttagctaagcagaacgtcagcaacataaatgtcaaagaattacatcgataacgcagaatgcatagaaatctcaataatataaagtaaacatacgaacaccacaatataatacacgacacatcaagaaaaacatcttatacagacgtcaaagaatatacgaatagcgtacagatctataattcacttaaaatgaatgaccgctcacaatttcctgatccaacagcaagtgttagctcccacccaatccaatacccactaccagtccactgtccaccaccaagtgtggactcccctccatcccaggacccctcacagctccctgtccattttccagtgtgggctcccctccatcccaggacccctcacagctccctgtccatcttccagtgtgggctcccctccatcccaggaccccctcacatctccctgtccatcctccagtgtggtctcccctccatcgcaggacccctcatatctccctgtccatcacccagtgtgggctcccctccatcccaggatccctcacagctccctgtctctc

SEQ ID NO: 112369 - DNA, 359 bp, Homo sapiens
tctcacatagggtgtggggtcattccgtggagtcgagagtgacaccgggtagctggtcagcctcctacaggtgtcaagacatcgctgggcctaggtcaactggtcctgggatgacacaggaagcaatgtggggtttttgctgccagtaagctcccggtctagaagaaaaagaagaagctccttatctgtgtttcccaggtacgcgtgccaattatatgtcggtatccttatctgtgtctacatatacacctacatctacatctacagtcatatcaatatctatacccatacccatatctctatatttctacatctatacccatatcacagctgtgtctatatctgttaagtcattcgtg

SEQ ID NO: 112370 - DNA, 673 bp, Homo sapiens
  misc_feature (1)...(673): n = a,t,c or g
cgcacgctcggttgttctcacctagggcgggggggtacttccgtggagtcggagagtgagaagcggttaggtggttcaccttcctgacaggtgctcaggacctccggtgtgtgctaagggcagctgtgtcattgggatggccccgggaacaatgtgggttcttcctgccagtgagtcccggtctagagaagagagaggaagcatctttatctgtgttatcccaggtacgcgtgccaattatatgtctgtatccttatctgtgtctacatatacgcctacatctacatctacagtcatatcaatatctatacccatacccatatctctatatttctacatctatacccatatcacagctgtgtctatatctgttaagtcattcttgnnnnnnnnnnnnnnnnnnnnnnnnnnnnnnnnnnnnnnnnnnnnnnnnnnnnnnnnnnnnnnnnnnnnnnnnnnnnnnnnnnnnnnnnnnnnnnnnnnnnnnnnnnnnnnnnnnnnnnnnnnnnnnnnnnnnnnnnnnnnnnnnnnnnnnnnnnnnnnnnnnnnnnnnnnnnnnnnnnnnnnnnnnnnnnnnnnnnnnnnnnnnnnnnnnnnnnnnnnnnnnnnnnnnnnnnnnnnnnnnnnnnnnnnnnnnnnnnnnnnnnnnnnnnnnnnnnngcaaagccacgag

SEQ ID NO: 112371 - DNA, 644 bp, Homo sapiens
  misc_feature (1)...(644): n = a,t,c or g
aggtggtgggtccatcacgtggaggtggaggagtagcaacgggtagctgtgtcagcctcctgcaggtgtcaaggacatcgctgtgtgctaggtcagctgtgtcctgggatgacacaggnacatgtggggttttgccggcaggaggctccgtgtatggaagaagagagagnaagctctttttgtgtgttatcccaggtacgcgtgccaattatatgtctgtatccttatctgtgtctacatatacacctacatctacatctacagtcatatcaatatctatacccatacccatatctctatatttctacatctatacccatatcacagctgtgtctatatctgttaagtcattcttgnnnnnnnnnnnnnnnnnnnnnnnnnnnnnnnnnnnnnnnnnnnnnnnnnnnnnnnnnnnnnnnnnnnnnnnnnnnnnnnnnnnnnnnnnnnnnnnnnnnnnnnnnnnnnnnnnnnnnnnnnnnnnnnnnnnnnnnnnnnnnnnnnnnnnnnnnnnnnnnnnnnnnnnnnnnnnnnnnnnnnnnnnnnnnnnnnnnnnnnnnnnnnnnnnnnnnnnnnnnnnnnnnnnnnnnnnnnnnnnnnnnnnnnnnnnnnnnnnnnnnnnnnnnnnnnnnnnnnnnnnccacgag

SEQ ID NO: 112372 - DNA, 622 bp, Homo sapiens
  misc_feature (1)...(622): n = a,t,c or g
agcgtttaatctatgatgatataactcattantnntcatgcacttaaatcataactaagataaatgttagtgtaagcgattacactgatgtgattgcttcacttctttgtacgtcgtactcacctatcttaattcacaataaaaaataaccatattggagggcatcatgcctgacgctaaaaaacagggccggtcaaacaaggcaatacgtttttcgtctgcttcctcgccgctctggcgggattactcttgagcctggatatcggtgtaattgctggcgcactgccgtttattgcagatgaattccagatttcttcgcacacgcaagaatgggtcgtaagctccataatgttcggtgcgccagtcggtgcggtgggcagcggctggctctcctttaaactcgggcgcaaaaagagcctgatgatcggcgcaattttgtttgtcgccggttcgctgttctgtgcggctgcgccaaacgttgaagtactgattctttcccgcgttctactggggctggcggtgggtgtggcctcttataccgcaccgctgtacctctgtgaaattgcgccggaaaaaattcgtggcagtatgatctcgatgtatcagttgatgatcactatcg

SEQ ID NO: 112373 - DNA, 607 bp, Homo sapiens
acagactcacaggcaagtcacaagtgtgagaccaaacctcccctgtgaaccgaagttaaccattacgctcagggcgcacgggaaaggggggctgatcgggcctttcctgctaaaacggcggacagggaaatatcacacacttctttatggatctattaaagcaaaccttcttgcttgaaacatgaaagcaggacatcatgtgaccacggagaaactggcttccctctgtctgaaggcgctttgaggggctcggcgccccacgaagcggagataagcatccagagaagctggcgaagacgggtgcacagtaagggcgctgtcaccaccgggtccccaaacagcactggccgactccaccatcaaaggagagaagaaaatgcccgcagcagctgcaaacttggcaccaccccctccttttcttcagtatgagaaaagaaaagccaccttggaaggcgcatgggcatggacacacacaactaaaccccaaaattaaacgtgtacacacacccagtcataccccacactcacacgtgtacacacaggcacacattccccacacttacacatacacacacacaccccccaactgtgtacacacaggcacacg

SEQ ID NO: 112374 - DNA, 507 bp, Homo sapiens
gaaggaggtcccccacgggcccttcaggactgaaagctgcggtgctgaccttggccggtgctcttcctgacggggagccaggctcggcatttctggcagcaagatgaacccccccagagcccctgggatcgagtgaaggacctggccactgtgtacgtggatgtgctcaaagacagcggcaaagacagcgtgacctccaccttcagcaagctgcgcgaacagctcggccctgtgacccagggagttctgggataacctgggaaaaggagacagagggcctgaggcaggaagatgagcaaggatctgggaggaggtgaaggccaaggtgcagcccttacctgggacgatttccagaagaagtggcaggaggagatggagctctaccgccagaaggtggagccgctgcgcgcagagctccaagagggcgcgcgccagaagctgcacgagctgcaagagaagctgagcccactgggcgaggaagatgcggaccacgccgcgcccatgtgg

SEQ ID NO: 112375 - DNA, 455 bp, Homo sapiens
  misc_feature (1)...(455): n = a,t,c or g
tatcctccttaattccagggnngggatttcgtctcgagtgcagctgtgaacaagctatgaccttttttttgtatttccccacgtgcattctggctgagaggtggagctctacaacatcatgcctgagcaaaccatcgattaccgcatggccgtgttctgggctgacggtgttgagcaagagctccctggcgttgaggtttgtgaaaggcacattccgtgagagctacatcccgacggtggaagacacctaccggcaagtgatcagctgtgacaagagcatatgcacattgcagatcaccgacacgacggcgagccaccagttcccggccatgcagtgtctgtccatctccaaagggcacgccttcatcctggtgtactccattaccagccgacagtccttggaggagctcaagcccatctacgaacaaatctgcgagatcaaaggggacgtggaa

SEQ ID NO: 112376 - DNA, 835 bp, Homo sapiens
tttcgtcccaggcagcttgtggcggcgaagccatcggtgttcgctgatgtccagtctatggagtcagttggtaccggtggcggcgcggaggcagaaggcggtgtccgtagtaggggcctctgccccaccaggatgttaccgggcttggccgccgccgcggcccacagatgtagctggtcctccctgtgccggctccgtctgcgatgcagggcggcggcctgtaatcccagcgaccgccaggagtggcagaatttagtgacatttggaagcttttacaaacgtggttccctgtactcatccatatattggtaccctgagtcaagaaaagctgtactccacaaatgttcacaaagaaggacagggatcacacacactcagagaggaaaaagtaccatccatttgaaacagcagaaggtataggcgcagaactcaaagctccacttaagcaagaacctctccaagtaagagttaaagcagtcccttaagaaaagggagtatggctcaaaagtacactcagaataatttcatcactggaatcaaaagcgataaatgagttctgcctcaaatccagcgatctagaacaacttccgaaaaatcagacgacgaagtcccccatggaagatactggagtccttttactgtatactttgagattcagattgttggaagccaaatcctttgggaagtttggggggaagccctgaagctccttgccagagagaaaaaaattgcgtaaggaagcagaaataggaatacagagaaaggctatttaggaaaccaaaaaatattaaggagaatacagagatttcttggggaattacccaagccacgctcc

SEQ ID NO: 112377 - DNA, 1204 bp, Homo sapiens
gcttcatatgtacgttgctcctgatgtacagacatccaggcttagcacaaaacagcagcactccctgtgcactcccactcaggggtgcgcgtctttgggttttatgcgtgttaatgcatttcaccctcctcacaagcctattttcagaaggctcaaaaagctaagaggcagaaacaggactcaaatcttggtcatctacctttaatgtttggtcttaagtcttataaacacatatcatttaatataaaaaaaaaaggatactcacctgaccctttcagatgtttaacgattcgtcttcctcctcggggatgctttttctgaaggatgctggcctggggaaaacagaaccggaagggtaacacctgccatacctaataaaaccaatgagaaatacgaggccccgagatggagtttctgggagattcctgaagagcacgctgtggcgattgagatgatgaagcgtggagctgcccctctccctgtctcccacatcagggacctgtccctctacaggaggaattctactcctgaggccaccgtctcctgtcactcaggcgccctgagtggagagcacttctagctctgaaagcgtcacctcatggctgtttctgccttcttgttggtgaatttcctggcagggctcaggcactcccgtccttccgcggcccttgttctcaggcaggtaccgcttggttaggaggtgaaggcaggggaagcagcagagacgctggagctacaggttgtgctgtcacacacacctgcgtcacccagaaggcccgatcatccatcccagcacagagaagctggagctacaggttgtgttgtcacacacacctgcgtcactcagaaggaacgatcacccatctcaagcacagagacgctggagctacaggttgtgctgtcacacacacctgcgtcacccagaaggcccgaccaaccatcccagcacaagcctgcactgacggctcagcctcaccacagcacacactggcctgagacacatctgcgcccctcatacccactaacgcccagcacggccacgctgccggccccgccactccacacagtgcaaaggcacatccgtgggccacggagacccgtcctgatcgccgcccccacatatcccccagagcgcacctcacagaacagagtcccggggacgcactgccgaggttcacaggtgcgggttccgcggacgcgtggg

SEQ ID NO: 112378 - DNA, 400 bp, Homo sapiens
  misc_feature (1)...(400): n = a,t,c or g
aaaattccaaaattatttggggaccggcccaccccccttgtcttaagttcttcggaaggccccgccaaaaaaccgcttcaaccccccccggtcacgcttccactccctaaaatggnnnnnnnnnnttcccgctgtgaaaccaaatgcaattccctttccnnnnnnnnnnngtatatgcctcccccagggacacaaaacttgaaagtctggaaaccactggggtaagcagccgccttcgtagaagcagcacccgagctcctggcatcggtccctggagacgttgtagtcacaaatgtcatacagaggaacgtcacacacagcgccaggctcgcgttgcccgcagtctccaccccaccagacaggctcacactgcccgcagtctcctccaccccagacgaaa

SEQ ID NO: 112379 - DNA, 444 bp, Homo sapiens
  misc_feature (1)...(444): n = a,t,c or g
gacgactgactnatnggnatggaagtaccgggccgacgattttgtcccgggattcggcctcagcagcgatttggtttcggcggctgcggaggcgcacgcaccaactgaggcagtggcaggctcaagtgcagccgctgctcaaagaaaatgaacggcaccctggaccacccagaccaaccatatcttgatgctatcaagatgttcgtgggccacggtccaaggacctggtctgaaaaggacttgcgggaactcttcaaacaatatggagctgtgtatgaaatcaacgtcctaagggataggagccaaaacccgcctcagagcaaagggagctgttttgttacattttacacccgtaaagctgcattagaagctcagaatgctcttcacaacatgaaagtcctctcagggatgcatcaccctatgcagaaaaacctgctgacgggg

SEQ ID NO: 112380 - DNA, 391 bp, Homo sapiens
cctgaggtaattttcttaccaaatgtacacattcgaatgtagtattgcctgtggtttttttattcattgatggtgtacctccctgtgtgacctcagttggcatgtgcattaaagattgaatgtactcttttctttagaagtataatggtttcgtaattttttttcagtctgtacaatttgttcaaggaatttttgtagaaaaatacgctcctgcgatagaagattcttatagaaaggtatatcttactttggaaggccttatgctgttgattttaatatataatgcctgttttagctttataattattgaatgttttatacaaaggatggaggcagagttagtttataaaattagtgggaaaagtttacactttctggcatggcaacgaaa

SEQ ID NO: 112381 - DNA, 548 bp, Homo sapiens
tttcgtgtgtgacgttccaggagctagtggcctcttcaccctggtgacctctgttccgtattctgtcactgagagacgccctgggacatctgtggtggcttttgtcgcgctgggacctaccctgactacgggagttgggaggacccgggacaccgcacagccgggaaatggccctgtgttatggaactttctggggctaccctaagatgctggaagctgccaatctcatggagggcctagtggatatcggcccttgggtcactcttcccagaggacagcctgaggtgttggagtggggcctcccaaaggatcaggactcagtggcctttgaggatgtggctgtgaacttcacccagggaggagtgggctttgctgggtccatcacagaagaatctctacagagatgtgatgcgagaaaccattatgaacctgaactgtataggaatgaaatgggaaaaccagaacattgatgatcagcaccaaaatctcaggagaaatccaaggactcagtgacctttgaagatgtggctgtgaacttcacccaggag

SEQ ID NO: 112382 - DNA, 419 bp, Homo sapiens
  misc_feature (1)...(419): n = a,t,c or g
tttcgnnnnnnnnnnnnnnnnnnnnnnnnnnnnnnnnnnnnnnnnnnnnnnnnnnnnnnnnnnnnnnnnnnnnnnnnnnnnnnnnnnnnnnnnnnnnnnnnnnnnnnnnnnnnggccccaggggcccggggggggcccgaggccctttgaaacccaagaaaggtcctttttttgaaaaggcaaaaacccccaagattcctgccnnnnnnnnnngttggggggnnnnnnnnnnacttggggggcaaaaggggggttcccaaaaaaggccccccctggggggggcccggcccaaacccaaacctttaaagggatggggccaaaaaagccccccccctnnnnnnnnnnttcgccttttggaaccaagaaaaaaggcccttcttggttgggccccccccaaaagcaagttttggggggccccc

SEQ ID NO: 112383 - DNA, 824 bp, Homo sapiens
gaaggccaggagtcggaacattggcatcttccatccatccttcaacttaagcaagttcctccgacagggtctctgcaaatgcctcccggccaatgtccaccagctcatctccggcaaaataggcatctctcttaccagagtgtctgatggggaaaacgttctggtgtctgactttcggtccaaagacgaagtcgtggatgccttggtatgttcctgcttcatccccttctacagtggccttatacctccttccttcagaggcgtgcgacatgtggatggaggagtgagtgacaacgtacccttcattgatgccaaaacaaccatcaccgtgtcccccttttatggggagtacgacatctgccctaaagtcaagtccacgaactttcttcatgtggacatcaccaagctcagtctacgcctctgcacagggaacctctaccttctctcgagagcttttgtccccccggatctcaaggtgctgggagagatatgccttcgagggatatttggatgcattcaggttcttggaaggagaaggggcatctgcaacaggccccagccaggcctgaagtcatcctcagaagggatggatcctgaggtcgccatgcccagctgggcaaacatgagtctggattcttccccggagtcggctgccttggctgtgaggctggagggagatgagctgctagaccacctgcgtctcagcatcctgccctgggatgagagcatcctggacaccctctcgcccaggctcgctacagctatgatattggaaatggacatgtcttttcaaggaaaataaaagcaggctttctggaaaaaaa

SEQ ID NO: 112384 - DNA, 769 bp, Homo sapiens
atgtagggataatctttatagatgcaatttagccctgccaaaagtctgtttataatgatgaatagtaaatgaagaaacttacattttgcattaccgaatgagcttgactttctcttttcccctgaataggaagggaaaaggccgaggcatcagcgtgtgaagaccgcaaagacgatcccgagtacagttgtgaacagcattgctgctaggctcctcctgcagatcatctgaaatgaacctctcttattgatttttattggcctagagccagggagtactgcattcagttgactttcagggtaaaaagaaaacagtcctggttgttgtcatcataaacatatggaccagtgtgatggtgaaatgagatgaggctccgcaatggaactgtagccactgctttagcagtttatcacttccttccttactttgtcttggtatactacatggcaaaatgggaaaggtaaggaaaatgcctcggaaaatgtgcatgaaatgtactagggtttttgcttggttaaggtgcctaaatgcttaggtcaaataccctgggcaatctgcatgttacatgctatctgctggcagtttctttctgatataaaaatgaaacagtattcttggacagaggacacagaatttctaattccagtggggcttgttttgttttcagtttcttataattgtacttggagaaacagatactgatcagtgttttatattctaaaagacagccaagttgaataataaagactttcgttttggcaaaaaaaaa

SEQ ID NO: 112385 - DNA, 549 bp, Homo sapiens
aaaacagaaacaagctgagctgctgttttagttttgaacaagatggcggcgccgaaggggagcctctgggtgaggacccaactggggctcccgccgctgctgctgctgaccatggccttggccggaggttcgggggaccgcttcggctgaagcatttgactcggtcttgggtgatacggcgtcttgccaccgggcctgtcagttgacctaccccttgcacacctaccctaaggtagggcccgtccggagcgggctgcgacccttcccttgcagcccatttctcggctccccacacgtatgtcggctctggcaacctggctgttaaatcggcccttcaatcgctgtctcccatctgtgtagctcctgttttcctccctaatcctgcctgcaccccatttctgctgtcattaccggaagtttgtcctgcactaccctgtgataggctgggggacacaaagatgagaaagacgcgatccctttcctctgggagcttgccgggctgcaggggagtcgagcactcggaggaggataggggaggatatggatgat

SEQ ID NO: 112386 - DNA, 877 bp, Homo sapiens
atccttaattaaattaattttccccccccgctgtcccggccgcagccccacgccggctgcagctccgcgagccgagccggatctcgagcggggtacacgggctgaggcggcggcggcggccccgccccggggctccattgttaaggcggctgcggctctgtcggctgttcagctgcgctccagtcggcccaggcgccgcggcgaggagcgagcgctgcgaggtggcggcctgagcaatggaagagttaatagttgaacttcgtctctttcttgaactcctggaccatgaatatctaacctcaactgtcagggagaaaaaggcagtgataaccaacattctgctaagaatacagtcatccaaaggttttgatgggaaggccccaagcccagaagccaggaggccgggtatacagcccgccagcccctcctcaggatgcccctgccggagatccctttcagccttgcttgcctcctgacagtggggcctccaaccattgccacattccctccctcccagaaggttattatgaggaagctgtgccactgagccccggaaaagctccggaatacatcaccatcaaattatgattccgatgcgatgagcagctcttatgagtcgtatgatgaagaggaggaggatgggaaggggaagaaaacccggcaccagtggccctccgaggaggcctccatggacctggtcaaggacgccaaaatctgcgccttcctgctgcggaagaagcggttcggccagtggaccaagttgctctgcgtcatcaaagacaccaaactgctgtgctataaaagttccaaggaccagcagcctcagatggaactgccactccaaggctgtaacattacgtacatcccgaaagacagc

SEQ ID NO: 112387 - DNA, 406 bp, Homo sapiens
tttcgtgccctgcacactcggcccagcgctgttgcccccggagcggacgtttctgcagctattctgagcacaccttgacgtaggctgagggagcgggacagagtcagcggcgaacgaggcaggccccgcgcggggatctcggaagccctgcggagcatcatgaagttccagtacatggaggaccatccctttgagtatcggaaaaaggaaggagaaaagattcggacgaaatatccggacacgggtccccgtgattgtagagaaggctccaaaagccaaggtgcctgatctggacaagaggaagtacctattgccctctgaccttactgttggccagctctacttcttaatccggaagagaatccacctgagacctgaggacgccttattcttctttgtcaactac

SEQ ID NO: 112388 - DNA, 447 bp, Homo sapiens
agctcctgcccatctgcagcacattcggcatctgcccctgccatgaccactgtggagaacaaatccaagattagcgcaggaacaagacgaggatgcccgttctcaccacttttattagacatcacacaaatatgcaagagaaaaaaataaaagccgcccacactggaaaagaggacatcaaattatccttgtctgatgaagatgtgatcttggatttacaaacatgtaaagcctccaccagaaaactgtagacttgataaataaattaatacagtcatttgcaggatacaaaatcagcatacaaaaatcagcagcgttttatacaccaataatggtctaggaaagaaattaaggaggcaatcccatttacaatagcaacaaaatgaaaaatgatatgccacaatgtattgcggccgctcgagaggatccaagcaaagatacgcttca

SEQ ID NO: 112389 - DNA, 909 bp, Homo sapiens
ggaattcccgggtcgacgatttcgtggatgaaaggagggaacgcagacagctggcagagatagatatttggctagcatggaatcaccagaggagcctggagcatccatggatgagaactactttgtgaactacactttcaaagatcggtcacattcaggccgtgtggctcaaggcatcatgaaactgtgtctagaggaggagctctttgctgatgtcaccatttcggtggaaggccgggagtttcagctccatcggctggtcctctcagctcagaagctgcttctttccgatccatgtttcacttccaacctgaaaggaggcccacaaccggggtgattgtgcttgcaaggatttcagcgagtctgttttccagctcctggttgattatatctaccatgggactgtgaaacttcgagctgaggagttgcaggaaatttatgaggtgtcagacatgcattcagctgacatctctttttgaggaatgctttcggtttttggcccgcacagtgcaagcgggaaactgccttcaggtgatgtggctggcagatcggcacagtgatcatgagctctatacggctgccaagcactgtgccaagacccacctggcccagctgcagaatacagaggaatttctccacttgccccgccgcttactcacacatatcatctcgggtaagtttagggaggggacacaccatacccagttacttggctatgatgttcagtgaatgttctagtttaggagaaaagaaccctcaagcttcctggtgttagtttacattattattcctgcattcttcctgagatatcctgctgagaaagattgaggtgagattcagtgtaattgctgtcagagactgtattgcgtccgctctagaggatcaagcttcggcgcgtcatacgcatgc

SEQ ID NO: 112390 - DNA, 519 bp, Homo sapiens
cgtctgtggctttggggtgtcctgggctccccatctccttctggcccatctgcctgctgccctgagccccggttctgtcagggtccctaagggaggacactcagggcctgtggccatgcaagggcggaggcctgctgctgctgatgcctctaggggactttacaagatgcccccctacacacctttctttggaacgaaggctcttctgtcggtgtccctcccacccccatgtatgctgcactgggttctctccttcttcttcctgctggcctgcccaagaactgagggtctccccggcctctactgccctggctgcaagtcaagtgcccagggcgaaggaatgtggccaggggatccaggacctgggatccagggccctgggctgggacctcaggacaggcatggaggccacaggggccaagcaagcccaccctttcctctccccactgcctcctctcccttcctacactcccagctctgtattgcgggcgctctggaggatacacgcatacgtcgctc

SEQ ID NO: 112391 - DNA, 1386 bp, Homo sapiens
gttcgactagtggctgcacagatttatatacagacatacccgcccccacaacaatactcaaatacatcacattaatagacaaatatacagatgtgggcaaaaatacctgcccgcacattcacagaacacactaaacagtcacaaagacacccaggagtcccttttccatccccataggagtcagtcctagtcctcccccatctagatctgccctctacttgaacccagtctcgggactgggggagtacggggtctgcagcccggacagggacgacgggtcgctggcccacaggcctcaggcagcgccttcagctatgtctgcaatttcctctccccctttcctcctcctctctaaggctcccgccaaggcggcctccccctcattctagctccagcaagggaggggaggtccatgatgggggggccccgtggagacagggcagaaggaagccccccgccacacacactgatcacacaccacattgcatgcacaagcccaggtgggaaatgcgtgtgtgagcacaggcaggtttagccttggggtgggggacgggatggggtgggatctgccacaagccgccacaagctgcttggtgcacaagagcgcaggagctcgcaggcacagaggccccacgctggggtctgcgagactgctggccgggccctggctcaaagctggagtccaacaatcattaaccctgcgtgactagaccagagctcggccaggggacacattcaagcctgggccctggaaggaggggtggacagtcccctcccttccagtccagcatgggtctggggaagagaagcagctttgcctggaaggggcctcctaggagggggagcggtggtttctagctcaggctttaggatcagagagcagcagattcaaatcctgacggttttggtaaagtcaattcaatctctccaagactccgtttatttgatctgcgaagtggggataatggtatcacgtcgcagggttgtcaggcggagtaagtgaaagaacctgtccaaggtttagcccttggcccgcacgcaggcagagctccagcctctctgttgttgctgttagtggcctgggggcgggtccctgccgcggcctccccggcggtttcctgtgggggacggacggcccgcgggccgggctctccctcctcccggctgcccgctcctctccccttcctctccaagcccttttcctccccgcctccccgcccgccccgccccgccccgtccctcctctttcctcggaggaaactttccgccggctggtccctcggtccgtgtcccgcccgtgctgccgcggcctgggagcccagcggggccggaggggcggcgggacccgagcgggcgggggcggccggacccagtgtatgcggccgc

SEQ ID NO: 112392 - DNA, 615 bp, Homo sapiens
ccagtatctgcaaggaggccagtatgcacccagcaccgcccagtttgcgcccagccctgggcagccccctgccccctccccttcctaccttgggcacaggctgcccctgcagcagggcatgacccagtccctgtccgtgcctggccccacgggactgcattataagcccacagagcagttcaacgggcagggcgccagcttcaacgggggcagcgtcagctacagccaacctggcctgagtgggcctacccgttccatcccgggctatcccagttccccactgccagggaaccccacgccacccatgaccccaagcagcagcgtcccttacatgtcaccaaaccaagaggtcaagataacccaacttgcctgatctcaagcccaacctcaactcctttcactcatcgccctctggaagcgggccttgtgacgagttgcggctgaccttccctgtgcgcgatggggtggtcctggagcccttccgcctgcagcacaacctgggctgtaagcaaccatgtcttccagctgcgagactcagtctacaagaccctgataatgaggcctgacctggagctgcaattcaagtgctaccaccacgaggaccggcagatgaac

SEQ ID NO: 112393 - DNA, 383 bp, Homo sapiens
tctctctgcctgcctgtccaaatgcttttccacctgtgcagatccattcctgcctgtccagctgtctccacacctgacccctacttacctgatcaactgtctcctccacgggtcccattgcggtcccaccacttccaaattcttcctagctacccaactgtttctcctgcccgccagccccatatactgcctatccatccatctgtaccctctactcttccaaagacctttgcaccagtcccattactgccttacccaattaaatatcatccttgtcctccaaccccggctacttccagcatttctagcagtttccctcgtctaccagcaccaattccttcttgcccacctggccatccaccccacgcaccccagagtgtatt

SEQ ID NO: 112394 - DNA, 668 bp, Homo sapiens
ctcgaacttctgacctcaagtgatctgtcctcagcctcccagagtgctgggattacaggcgtgagctacttgcccggcctattcccttgggcttttaaaaagcgtcttggatggaggtggtgcaggtgctcaccaagcccgcaggtaacccaagttgcatgtatccccaggggcacttttgtgattcccctgcttgtgactgcacaccgggaccccactcaattcaaagacccagactgcttcaaccctaccaacttcctgggacaagggcaagttccaggggcaatgatgctttcatgccctttgcctcaggtgcaggcagaggaggaaggggaccagcctgggacttggctctggggtacctgggtggcttcactgttgcacctgtgttacccgggcaaagcagatgtgcctgggcacaggcctggcccactcgggtatcttcctattccttacggccaccttacagaggttctgcctgctccctgtggtacgccctggcaccatcaacctcacctgcagtgcactggcctgggcagtgtccccccagacttccagctccagccagtggcctgctgaggtcaggctccactatggtgggctcactggccctcaaacctccataccctcctcggtcaataaaggccctaaattgcaaaaaaaaaaaa

SEQ ID NO: 112395 - DNA, 399 bp, Homo sapiens
caggccagcgtggaattgccggttgtgcctggggtgtggcctcctagagggagtcagtgtgcagatgctcgtgtgcctggggtgtggcctcctggagggacccagtgtggagatgcaccgtgtgcctggggcgtggcctcctagagggagtcagtgtgtagatgcccgtgtgcctggggtgtggcctcctggagggacccagtgtggagatggccgtgtgcatggggcgtgccctcccggagggagtcagtgtggagatgtccgtgtgcctggggcgtggcctcttacagggagtcagtgtggagatgcccgtgtgccttgggcgtggcctcctgaagggagccagtgcggagatgtaagtgagcctgtggcgtggcctcccggaggaaatgtattcgt

SEQ ID NO: 112396 - DNA, 418 bp, Homo sapiens
cgcctccgctgagagggaaaagggacggaaaatttcttccgcaggattctgggggtgcaggacactgatcagcccctttgtgagagatgcttggggggaagatggggaaacagctcgttctttcctcatgaactcttcgtgcattcagggttatgagctgatgggggcctggccactcgccaactgagcctggccttggctgaggtcgtcatcgctgtgtgtcgcgggctgccggcctgcctgttatctgcagtgcacaggtgtgcatgtgtgtgcataatacacgccacacacataccatgcccacctcacacacaccacacgcataccccatacacgccacacacatatcatacccacctcacacacaccacacacaccacacacataccatgcctacctcacacacacctgtatt

SEQ ID NO: 112397 - DNA, 402 bp, Homo sapiens
aggagcagaccaaggcagcgcagcagggtgagccccacccggagttcagcgcggactcccccagcccaggttctgctgtgacactacttgctcgtgagcatctccaggtgtaaacagcatcagcttcccccattttcctttaaaatcgcacatgtggacggacaccacggggaccctggaccctggggagccccgtcctcacccttctcaccaggatggctgcttggtagagaggctgaacatggagctggaagacattgcaaagctgaagatgatcctgctgcgcctggagggggccatcgatgcggttaggaggtctgcctggagacgacagcaatgtcaccaagccagggagagtgtattgcggccgctctggagggttcctctccagcgaacgctacc

SEQ ID NO: 112398 - DNA, 736 bp, Homo sapiens
caaggtgggccccctcccattgaccagaatgcggggctggcagccggggctaccgggtcagcctccggccccctgagcccctcgctttcctccggcgagggtcactttgtatgcctggtctgcgggaagaggttcagccggtggtcgtccctgaagatccaccagcgcacccacaccggggagaagccgtacctctgcggcaagtgcggcaagagcttcagccagaagccgaacctggcgcgccaccagcgggcaccacacgggcgagcgacccttctgctgccccgagtgcgcgcggcgcttcagcccagaagcagcacctgctcaagcaccagaagacccactcccggcccgccacccactcgtgccccgagtgcgagcgctgcttccgtcaccaggtgggcctccgcatccaccagcgcgcgcacgcccgggaccgccagggctcccgcgccggcctgcacgagctgattcaggacgcggcggcgcgccgggcctgtcgcctgcagccggggccgccgcgggggcgccccgagtgggcctggctggggctctgccagggctggtggggccagcccggggcccgggccgcggtctccggccccgaggggccgggcgagccgcgccagttcatctgcaacgagtgtggcaagagcttcacctggtggtcgtcgctgaacatccaccagcgcataccacactggcgagcgcccctatgcgtgccccgagtgcggcc

SEQ ID NO: 112399 - DNA, 662 bp, Homo sapiens
caaaggcctagcaccccacaccccacacacacggcgcagccttggccctgaatgtggtgctccctctgtcgcccggcctggccgccctcagccctccccgctgctaatgactcctgtccctgcctttcttcagtgtcttcgagagaactctgacgtgaagacgcacgggccttttgaggccgtgatgcgcactctctgtgaatgcaaggagacagccagcaagaccctcagcaggtttgggattcagccgtgctccatctgcctgggagatgcaaaggaccccgtctgtctgccctgcgaccacgtgcactgcctgcgctgcctcagggcctggtttgcctcaaagcagatgatatgcccctactgtttaactgccttgccagacgaattctctccagctgtttcccaagcgcacagggaagccattgaaaagcatgcccgcttccggcagatgtgcaacagtttcttcgtagacctggtgtccaccatttgcttcaaggacaacgctccgcctgagaaggaagtgattgagagcctgctctctctcctcttcgtccaaaaggggcgcttaagagatgctgcccagagacactgtgaacacacaaaatctctctctccattcaatgatgttgtggataagactcctgtcatccgctcagtga

SEQ ID NO: 112400 - DNA, 406 bp, Homo sapiens
catccgcttgaacaccaaagaagacaaaaatggtgtccccgacttagtggccctgctggctgtgagagacaccccggacgaggagccggtggacagcgacacttcggagagcgactcgcaggaaagtggggaccaagaaacagaggagttggataatcctgagttcgtggccattgtggcctataccgacccgtcggacccctgggcccgggaggagatgttgaaaatcgcttctgttatcgagtcgctgggctggagcgacgagaaagacaagcgagaccccctccgacaggttcttgtccgtcatgtccaaggacactaacgggacccgcgttgaaggtgggaagaggcgggccgcgaaggttgggacgccgtggttcctgcgcaaggccggggattgacgggg

SEQ ID NO: 112401 - DNA, 512 bp, Homo sapiens
gccttctcatgatcactccaagcttggcacgagggcgtccgggaaagtcatccttcatggagaacatgccgcggtacatggcaaggtagcactggctgtatccttgaacttgagaacattcctccggcttcaaccccacagcaatgggaaaggggacctcagcttacccaacattggtatcaagcgggcctgggatgtggccaggcttcagtcactggacacaagctttctgggtggaccaaggaggatttggagctaattaacaagtgggccttccaaggggagagaatgattcacgggaacccctccggagggacaatgctgtcagcacctggggaggagccctccgataccatcaagggaggagttcatccttaaagagggcgccagcttgtcagatgctgctgaccagcaccagagggcgctcgcaatatcagggcccttgtgggtggggggagaaacaggcttgctcgaggtgccagatatggggggccccctcctgctctcatggg

SEQ ID NO: 112402 - DNA, 445 bp, Homo sapiens
atcgcaagcttgtgacgaggcagctcggcaggcgcgaagcagcaaccatgcgtgagtgcatctccatccacgttggccaggctgccgtccagattggcgatgcctgctgggagctctactgcctggaacacggcatccagcccgatgggcagatgccaagggacaagaccattgtgggaggagatgattcctgcgacaccttgttaacggatacgggggctggcaagcatgtgccccgggcagtgtttgtagacttggaacccacagtcattgatgaagttcgcactggcacctaccgccagctcttccaccctgagcaacttatcacaggcaaagaagatgctgccaataactatgcccgaggcactacaccattggcaaggagatcattgacctcgtgttggaccgaattcgcaagctggccgaccagtgcacggttctccag

SEQ ID NO: 112403 - DNA, 356 bp, Homo sapiens
  misc_feature (1)...(356): n = a,t,c or g
gcccnnnnnnnnnnnnnnnnnnnnnnnnnnnnnnnnnnnnnnnnnnnnnnnnnnnnnnnnnnnnnnnnnnnnnnnnnnnnnnnnnnnnnnnnnnnnnnnnnnnnnnnnnnnnnnnnnnnnnnnnnnnnnnnnnnnnnnnnnnnnnnnnnnnnnnnnnnnnnnnnnnnnnnnnnnnnnnnnnnnnnnnnnnnnnnnnnnnnnnnnnnnnnnnnnnnnnnnnnnnntttggtgccatgactcggatcgggggacctcccttgggagatcaataccctgtcctcctgctctttgctctgtgagaaacatccgactacgacctcaggtcctcagaccgaccagcccaagaaacatctcag

SEQ ID NO: 112404 - DNA, 390 bp, Homo sapiens
ctgattgccgggatccacccacgcgtccggcttggtctgtctccccacctctaccagtttttgctgagctatgagccaaaccagggatttacggggaggaaaagctttcggactgctgaaggcccagcaggaagagaggctggatgagatcaacaagcaattcctagacgatcccaaatatagcagggatgaggatctgccctccaaactggaaggcttcaaagcagatggttggcaaccccttcctcagtccccggctgaaaaccctccagtcagcgcttatcccttctgctctctcccctcacccagagaaatacatggagcttgaccttaatggaaatggcgatattgatatcatgtccctgaaacgaaagctggaaaaacttggag

SEQ ID NO: 112405 - DNA, 696 bp, Homo sapiens
  misc_feature (1)...(696): n = a,t,c or g
ggcgtccnccccnccncnagnaccccggcctccncacagaggcgggagacccgggagcagcagcagaggcaggaggactaggaggaggaggaggagccgtcgcaggatgaaggatcggactcaagagctgcggaattgccgaaaagacagtgatgatgaaacaggaggtggtcccacgtggatcgggacccacttcatggatgaagttctttgaacaggtggaagagatccggggctgcattgagaaactgtcggaggatgtggagcaggtgaaaaaacagcataagcgccatcctgggccgcacccaacccagatgagaagaccaaaccaggagctggaggatcttcacttgcagacattcaagaagacggccaacaaggtttcggttccaaatttgaaagcgattcgagcaaagcatttgaacaggaggaggggttgaaccgttcctccgcggacctgcgcatccgcaagaccgaagcactccacactgtcccggaagttcgtggaggtaatgaccgaatataacgcgacccagtccaagtaccgggaccgctgcaaggaccggatccagcggcaactggagatcactggaaggaccaccaccaacgaagaactggaagacatgctggagagcgggaagctggccatcttcacagatgacatcaaaatggactcacagatgacgaaggcgaacg

SEQ ID NO: 112406 - DNA, 456 bp, Homo sapiens
  misc_feature (1)...(456): n = a,t,c or g
cacccgcactgtaagttccgggccagacccacgcgtccgcgcctgtcgccgcggtagcagtcgctatctctgtgagtccgcgtgagcacccggtccccgcctgccgcaccatggagagctaccacacgcctgaccaacacaatctgcaggccttaaacgacacggccaaccgactacctatcagatccatccaggccacacactgcggcggactctggccaccccacgtctatgctgcagcgccgcagagatcaaggctgtcctctttgtccacaccatgcgctacaagtcccaagacccccggaatccgcacaatgaccgctttgtgctctccaagggccatgcagctcccatcctctacgcggnctgggctgaagctggtttcctggccgaggcggagctgctgaacctgaggaagatcagctccgacttggacgggcacccggtcccgaaact

SEQ ID NO: 112407 - DNA, 430 bp, Homo sapiens
agcagcctctttcgaaggccgccgcgacctcttcaagggcgcgtagacgggaaggaaaaggccccggctggggatccagggcgccgttaacgttaaccggcgccttgcctgtcctctaaccgtcgctccctcctcccctagaaagaagttctcgtccgtggcgcacctggcgcgggcgaaccccttcaacacgccacatctgcagctggtgcacgatggtctcggtgacctccgcgcagctccccagggcccacgggccagccccgccgccctcgcaacctggcagacgccgccgtggaagagtacagttgcgaatttggctccgcgaagtattatgcactgtgtggctttggtggggtcttaagttgtgagctgacacacactgctagggatcccctggatttaatgaaaagccgtatgcagaaggacc

SEQ ID NO: 112408 - DNA, 897 bp, Homo sapiens
  misc_feature (1)...(897): n = a,t,c or g
tatttttttcctaaaattttgggccaaaaaaaatggcgcctattttggcccttaaaaatttttaaaccgagggtccctgcccaaaattgactttaagggggtttggtccctaaaaaaaggcccaaccgtgttttaaattaaaaaaatttaaatggggcccaatgcccccctataagggaccctccgggggttttccgcgttcagcgtttaaaaaattggggattccgggccggggcgagctannnnnnnnnncttgtaacaaggcattttatttgggatgaggaaaggaaattgagcagaaggtacaggagtaatagcaattccctgtagctctcaaagtcaaatttggagctcatttttctttttctgcaagctcagcagcaggaatgccccaaagtcttcccctggtaagatgcaggttccataagcgacgttcctcctgcaatgcacgctggtattctgcaataagcaggccatgttttttccttgagcctgggatgctttgggagccaaagcttttggtcccatgcaaggggaaacaacccacttctggggatgtcccgctgcaatctgctccgggggctgcagcaacctcatgcagctctttcctggggacgcggctcaagcctggggcctgcagggcccaccaggggagaattggcagcaaggagtggcgagggtcctcatgggctgggggtcacagatcctctagctacgccagggtgaccagagagggcagacagcagtcctctgtcccaggtcttctatagcaaggacctgatggagaaggtcaagagcccagagcttcaggccgaggccaagtcttactttgaaaagtcaaaggagcagctgacacccctgatcaagaagctggaacggaactggttaacttcttga

SEQ ID NO: 112409 - DNA, 381 bp, Homo sapiens
atcttgtgggagcaaaagcaacgcctggctcgtagcagcagcctctgaggtgtccctggccagtgtgcttccacctgtccacaagcatggggaacatcttcgccaacctcttcaaaggcctttttggcaaaaaagaaatgcgcatcctcatggtgggcctggatgctgcagggaagaccacgatactctacaagcttatgctgggtgagatcgtgaccaccattcccaccataggcttcagcgtggaaaccgtggagtacaagaacatcagcttcactgtgtgggacgtgggtggacaagacaagatccgagccctgtgttgccacttatttgataacacacaaggcctgaaacttgttggtgtcaggaattgaccgagag

SEQ ID NO: 112410 - DNA, 378 bp, Homo sapiens
gagaacccaccatggggctgtgtcctgccgacaagaccaacgtcaaggccgcctggggtaaggtcggcgcgcacgctgacgagtatggcgcggaggccctggagaggatggtcctgtccttccccaccaccaagacctactttccgcacttcgacctgagccacggctctgcccaggttaagggccacggcaagaaggtgggcgacgcgctgaccaacgccgtgacgcacgtggacgacatgcccaacgcgctgttcgccctgagcgacctgcacgcgcacaagcttagggtaggacccggtcaacttaaagctcctaagccactgcctgctggagatcctggccggccacctgcccgacgaggtcacccctgcggag

SEQ ID NO: 112411 - DNA, 439 bp, Homo sapiens
  misc_feature (1)...(439): n = a,t,c or g
agtaccataggccagngcggtggaattcctgcgtctcggggtggtgactgggtccagaatggcttcggattcggggaactttggttccctctgcacgttggagttcgcggtgcagatgacctgtcacagctgtgtggacgcggtgcgcaaatccctgcaaggggtggcaggtgtccaggatgtggaggggcacttggaggaccagatggtcttggtacacaccactctacccagccaggaggtgcaggctctcctggaaggcacggggcggcaagcggaactcacgggcatgggcagcggtcagttgcagaatctgggggcagcaatggccattctggtggggcctggcaccgcgcatggggtggtgcgcgttctacagctgtcccctgagcgctgcctcatcgaggaactaatgatggcctggagcctggactgaatg

SEQ ID NO: 112412 - DNA, 440 bp, Homo sapiens
agttcattaggccagtgcggtggaattcggcttctatgacttttatggcccgcttctcccggagtagctcaaggcctcctgttctaactcgagggaccctggaggagatgccaaccgttcaacatcctttcctcaatgtcttcgagatggagcggctcctctacacaggcaagacagcctgtaaccatgccgacgaggtctggccaggcctctatctcggagaccaggacatggctaacaaccgccgggagcttcgccgcctgggcatcacgcacgtcctcaatgcctcacacagccggtggcgaggcacgcccgaggcctatgaggggctgggcatccgctacctgggtgttgaggcccacgactcgccagcctttgacatgagcattcacttccagacggctgccgacttcatccaccgggcgctgagccagccaggt

SEQ ID NO: 112413 - DNA, 417 bp, Homo sapiens
  misc_feature (1)...(417): n = a,t,c or g
gtagcacgacacgctagcttggacgacgggcagaaaaaaaggcgtgtaactacccctaaaagcgatantttgttggaggacaagacacactatcaacattgtcggtttttgggcacgtagatggcgggccagaccaccactactggccatctgatctataaatgcggtggcatcgacaaaagaaccattgaaaaatttgagaaggaggctgctgagatggcaaagggctccttcaagtatgcctggctcttggataaactgaaagctgagcgtgaacgtggtatcaccattgatatctccttgtgggaatttgagaccagcaagtactatgtgactatcattgatgccccaggacacagagactttatcaaaaacatgattacagggacatctcaggctgactgtgctgtcctgatt

SEQ ID NO: 112414 - DNA, 379 bp, Homo sapiens
tctgtcttggtgttcagccatgttcccatgctcactcccaaagtgactctgggaaggtctcagcctttttgtcttcccagttaggatgggcccatgcccctgctaccatcagacttggtaagtttcccaaggagactctgcaagaggcactgttctggatggtggaggagagactaattgttctgctctcctggccagagtgggtgcaatggaccccatcatggagaaattcaacacattcagcctacgaccagcacctgtgggaggtggatattcaaggcagcagagcctacagccggggcatggagaaggcagggctcctcgcaaggccgagatggatggttttacgttgaactaattatatactcaagtgctgttt

SEQ ID NO: 112415 - DNA, 1471 bp, Homo sapiens
  misc_feature (1)...(1471): n = a,t,c or g
ttttttttttttagtccaaagatttttaaagcaaaaggaatcctctactgccacctcggattttatttattttaaataatccccctccccccatcctcaagcgccaaaagtgactgggtggaaacagtcacttggagagctaatggaacctggtgctaagtcacccccgtaggcaactgtgtcggctccagagattggctaagcatttggaagcaggcctagtggagaaacaagcaagcagcagctcttcacacactgcaggcactccaggggtagggccctaaggcttggggaaggaggggaatcagaacccttcagggtcaacccacctctggcatttttacccccttcagggggagttgagtggggggtgcgggggttncaggggatggaaacagagcctggggtattgaaggttaaaaatgtctccaacagcaccatttacccatccatctctggtccctgagcagagtctgacaggcatggggtagtcctcacagttctctgagctctgcacaggcccacattattcggatctgtaactcctcagggttcacgggaaggtgggccaaaggtgagcagagcacctgaagaagtgcacatggtaggttaccctggaaacaattctcctaggaggaaaaaggaggaggcccagagtaggaagcatctgaaggccaagtcataaaacaggaatggagaaaaacaaaattaagaaatgcaaaattaagaaggccgctctcctcttacagtcaacctttggagtgggtagtcacagatactcagggctccaagagccacaccatggtgagaaaggacatgggtagcttctgaggagcatggtctcgtggatcttgtgtatgtgccaacaggctgtaagggttagaagttagtgtgttaatttggaagtagggtgaggaggggagtgagaagaaaatcaaaaagctcatccccttcctgcactatttagaaattaacagtcatcagagaagcacagataaatttattcttaagggcaggaaaaaactaatgtaaaccccaggaaagcagcagcaaaggtttcaccttacctaaaaatctattatataggaaagaaaattatttgtcccacaggggaaaaaaagtaatcaaatcatgccagttagagactttttccaagttaagattttctaagaccttaggttttcattctctagtgccataaaaaaggaaaagaaaaaaaaaaagagtagaataatgacttccaaggcctgagaaggttcaggctaaggtaagaaacatatatgtgtgagcagcaatgaggtacagatctgaattaatgagataatggcaagagaaacttagtgaagcaaagttttcttttcttttctcttttttgtgagatggagtcntactccgttgcccagggctggagtgcagtgtcgtgatctcggctcactgcaacatccgcctcccaggttcaagcgattctctt

SEQ ID NO: 112416 - DNA, 889 bp, Homo sapiens
  misc_feature (1)...(889): n = a,t,c or g
tggcacgaggtgagatttgaattcaagccactctgactcaaaagccatggttttctcactcttttgttcattttctcaataagcttgcaaatgcttttaacctctgatgcctgcagccagcatgtacctcaatattgtctgctagtcacatgtaggtaatatttcatcatgtggttaatactaagagggctatgacctcttaataatgatgcatcttaataatgatgctattattgggactttgatttcagaagtaatgcaagatctgcctaaatcctaattatccagcttggaagagtccctgacatctgaatttacaccttttcttccctttttttttttttgagacggagtttcgcttttgttgcctaggctggagtgcaatggcatgatctcagctcactgcaacctccgcctcctgggttcaagcaattctcctgcctcagcctcccgagtagctgggattacccgcacatgcaccaccacccccagctaatttttgtgtttttagtagagactgggtttcaccattttggccaggctagtcttgaactcctgacatcaggtgataacgcacgccttggcctcctaaagtgctgggattacaggcatgagcgcaccgcacctggctggcattttaattcttttagagacaatgtcttgttatgttgcccagattgggctcaaactcgggctcaagctatcctcttgtcaagaccattttgcccaggctggtcttgaactcctgagatcaagcaatccatctgccttggctttccaaagtgctgggattatangtgtgagccaccacacttggctccattcagtcttttaccattaaatataatattcagttttagcgccatgtctgggatattagagacaaaaa

SEQ ID NO: 112417 - DNA, 664 bp, Homo sapiens
  misc_feature (1)...(664): n = a,t,c or g
atttgagaactganggacatgcaaacgcccagcnnggcacgagggatgatgctgtcataactatgcccgagggcactacaccatttttaagttttatcattgacctcgagttggaccgaattcgcaagctggccgaccagtgcacgggtctaccagggcttcttggttttccacagctttggcgggggaactggttctgggttcacactcgctgctcatggaacgtctctcacttgattatggcacgaagtccaagctggagctctctatttacccggcgccccaggtttccacagctgtagttgatccctacaaattcatactcaccaggcacaccagcctggagcactatgattgggccttcatggtatacaaagaggccatctatgacatctgtcgtaggaaacctcgatattgagcgtccaacctatactaacctgaataggttaataggtcaaattgtgtcctccatcactgcttccctgagatttgatggagccctgaatgttgacctgacagaattccagaccaacctggtgccctatccccgcatgcacttacctctgggcacatatgnccctgtcatctgtgctgagaaagctaccatgaaacagcttttgtacaaaaaacaacatgcttgggttgacccagccaacagatgtgg

SEQ ID NO: 112418 - DNA, 499 bp, Homo sapiens
  misc_feature (1)...(499): n = a,t,c or g
cagcatgacatgatacgcgcagcttggacgaggggcggctctgctgcgccctgtcctccgtcggctctgcgggctcccgggcctacagcggcctgcggcagaaatgcccctccggctaggagcgacggcgccggcccgctatactcgcaccacctccccacctccccgctgcagaaagcgctgttggccgccggctccgcggcgatggcgctctataacccctaccgccacgggagcgtccccggatttcaacatccaccctcgacctgggcaagctccagagcctgccggaagctccctcggtcgcgagtatctccgtttcctggatgtgaacagggtctccccagacacccgagcacccacccgcttcgtggatgatgaggagctagcgtatgtgattcagcggtaccgggagggcacgacatgcttcacaccctgctggggatgcccaccaacatcctgggggagatcgtggtgaaatggtttgaggctgtccagn

SEQ ID NO: 112419 - DNA, 439 bp, Homo sapiens
attactgatttcactgcacgcgtgactggaaacagggtctgatttattaatccccccgtttctctttgttcttgcaaggagggctgggtcacattttagggcccgatcagattttacaaagaccgtctggtatgtcacggtcaaggtgtggcccaggccagacccaagacagctgtagggggcaggccggcagcctctgtgccttcccttggagaagccagcatggcctccttggcccccaggaacctggtcattcctgtgcccctgcccacccatggctcaggcactctggtacttcactgagccagcaaaccccatcccagctcaaacaagcccccggccccaagccaggcccaagtgccttcgcagcctgcagactccaagcccgttcaggccctttccagctgttgacattgctgaggggccttgcgggacgtga

SEQ ID NO: 112420 - DNA, 427 bp, Homo sapiens
tctgtatgaccatcattacgcctttcttggcacgacgaccccttataaaagtaacgaatgtggcaaggtcttcactcttaattcacaccttgtaagacatcgaggaattcatactggagagaaaccttacaagtgtaatgagcgtgggaaagcctttagagctcgttcaagcttagctatccatcaggcaacccacagtggagaaaaaccttacaaatgtaatgaatgcggcaaggcctttactcacaattcacaccttacaaatctctggagaattcacactggagagaaaccttacaagtgtaatgagtgcggcaaagcctttggtgttcgctctagcctagctattcatctgggaattcacaccggagaaaagccttacaaatgtcatgaatgccggcaagggctttaggcgcaaatcacacct

SEQ ID NO: 112421 - DNA, 1667 bp, Homo sapiens
tttcgtaccgtcgtcaccgccgccaccgcctcctgggactcggaacgcagcgctcggagccatggcctcggcccccgcggaggcggagacccgacagaggctgctacgcaccgtcaagaaggaggtgaagcagatcatggaggaggctgtgacacgcaagtttgttcacgaagacagtagccacatcatcttcttctgtgcggctgtggaggcctgcgttctgcacgggcttcggcggcgggcggctggcttcctacgcagcaataagattgcagccctctttatgaaagtgggcaagaacttcccgccggctgaggatctgagccgcaaggtgcaagacctggagcagctgatcgagagcgcgagaaaccagattcaaggcctccaggagaatgtgcggaagctgccgaagctgccttacttgtccccacttgccatcaagcatctgtggattcgcacagccttgtttgagaaggtcctggacaaaattgtgcattaccttgtggaaaacagcagtaaatactatgagaaggaagctctcctgatggaccctgtggacggccccatccttgcatctttgttggtggggccctgtgccctagagtacaccaagatgaagactgcagatcacttctggaccgatccctcggctgacgaacttgtccagaggcaccgcatccacagctcccacgtgcggcaggactcgcccaccaagcgtcctgccctctgtatccagaagaggcattccagtggcagcatggatgaaccgggcatccctctctgcccgcgactacgtggagtccctgcatcagaaactcccgtgccacccttctctatggcaaaaacaacgttcttgttcagccgagggacgacatggaggctgtgccagggtacctgtccctgcaccagacggctgacgtcatgaccttgaagtggacacccaaccagctgatgaacgggtctgtgggggacctggactatgagaagagcgtctactgggactatgccatgaccatccgcttggaggagattgtctacctgcactgccaccagcaagttgacagcggcgggacagtggtattggtcagccaggacgggatccagaggccgcccttccgcttccccaagggcgggcacctcctgcagttcctctcgtgcctggagaatgggctgctcccacatgggcagttggacccgccactgtggtcccagaggggtaagggcaaagtgtttcctaaactgcgcaagcgaagccctcagggttctgccgagtccacatcttcagacaaagatgatgatgaggccacggattatgtgttcaggatcatctaccctggcatgcagtcggaattcgttgcccccgacttcttgggcagcacttcctccgtctctgtgggccctgcctggatgatggttcctgcaggccggtccatgctggtggtggccagagggagtcagtgggagccagccagatgggacactactctccccacgccaagcccgaaggagcagccccccagtaatgtctgggatctccccgtccccaggggctgggtgccagccacctctgccatgttgtcaattgagttctggtcccaagggagatggaggcaggaagggagatggaggcagagggattgatgccctcctgctgtccagcctccact

SEQ ID NO: 112422 - DNA, 849 bp, Homo sapiens
gaaacagaaaatatatagagatataaaattatattcacagtttatctacagatttttcgtaacaatctttcttttccagtttgatactgtaaatctatcagagcagagccgggggcacgggcacaggtgggagttgggagcaaagcggaggcccgggctgcccgccgtcccccttcatctccccacggactgtaccaggcagctgggccccgcaggacaggccgcagcgggtggccggttctgtcccgtcttggggttcttggtgtccacgtcttgtgggccgtgggccttctacctgcccttggcctgcagtgctttgctggagaagggactccctggtccccagggtgggaccggaaccgctgtcaaccgccccagagctggcccgggggtaagcacgggtgtgttcctgctttgccttttccagattgttgaaatttcattgtcatgatttaatatatggatttttttatttaagaaaaagacgagggactctttgtcacgtgggtttgttttctgtctccgtgcctccggcttcccaaaagagatccaggtctttgcgtttccagggcgtggggaccccggcccccgtatgccgccacgccgccacaccgcctcaccctgggttttgtgctacttggcagttccatttcattatttatttttttgtgctgctttttatcatgatataaattattgaaaacagatcacatgtgggcccgtgtttggccgccgccgccctgccccgtccctgcggccaccacctaatttattgccgtgggtcctgctgctgtgactgcttttgtacctttgcaataaagaattttttggtttcagaaaaaaaaaaaa

SEQ ID NO: 112423 - DNA, 408 bp, Homo sapiens
aattcttgaagctgcagcagaaatggagttataaacacaaacatcaaaggcctatgaatggcttcaaggcccatatgtgttcggtggtattcatggctctaacagaccccagcgcccagtattcagcttgttggcatccgtacgctgacagtcttgggtgcccagccagatctcctatcttatgaggacttggagctggcagtgggtctcctgtacagactgagcttcctgaagaaggattcccagagttgcagggtggcagcactgaaagcatcaggaaccctggctgctctctaccctgtggccttcagcagccgcctcgtacccaagctcgctgaggagctgcgtgtaggggagtcaaatttgactaacgccagatgcctcgtgccgggctgtgcgtgatcatag

SEQ ID NO: 112424 - DNA, 447 bp, Homo sapiens
ctgttagatgcattccgccatgcttggcacgagggtgaatttgtacgtctccgacttctggagagtgatgatgcggctgtgctggttggtgagacaggacagccggcaccagcgaatcaaacttccacatttggaagcagttgtgattgggcgtggcccagaaaccaagatctctgataaaaaatgttctcgacacgcaagtacggttgaaagcagagtgtaacaagggatatgtcaaggtaaagcaggtaggagtcaatcccaccagcattgactcatgcgtaattgggaaggaccaaaatgtgaagctgcggcctggccagggtctccacatggtgaatgaactttatccatatattgtagagtttgaggaagaggctaagaaccctggcctggaaacacacaggaagagaaagagatcaggccacagtgattctatagaaaggg

SEQ ID NO: 112425 - DNA, 774 bp, Homo sapiens
gatacagttctgaccatcattacgccaatcttggcacgaggggaagatggcggagtccggcggtagcagcggtggtgctggtggcggcggcgctttcggcgcgggcccgggccccgagcgcccgaacagcacggccgacaagaacggggccctcaagtgcaccttctcggcacccagccacagcaccagcctcctgcagggcctggccaccctccgcgctcatgggccagctcctcgatgttgtgctgactattaacagagaggcctttcctgcacacaaggtcgtcctggctgcctgcagcgactacttcagggccatgttcaccggcggcatgcgggaggcaagccaggacgtcatcgagctgaagggcgtgtcggccagtggcatgcggcacatcatcgacttcgcctacagcgccgaggtgacactggacctggactgcgtgcaggacgtgctgggcgcggccagtgttcttgcagatgctgcccgtggtggagctgtgcgaggagttcctgaaggcggccatgagcgtggagacctgcctcaacatcggccagatggccaccaccttcagcctggcctcgctgcgagagtcggtggatgccttcaccttccggcacttcctgcagatcgccgaggaggaggatttcctgcgcctgccactggagcgcctggtcttcttcctgcagagcaaccggctgcagagctgtgccgagatcgacctgttccgcgcggccgtccgctggctgcagcatgacccggcccggcggccg

SEQ ID NO: 112426 - DNA, 502 bp, Homo sapiens
  misc_feature (1)...(502): n = a,t,c or g
aactcnggtaaaattggtcccggaacaaaatcattaaccctaatnagaaagacaacatcagttaacccaaaattccccaacccatttctcttctggcaatactgttgcttttcccaagtcagcaaaatatttgtcttatgaataaaatttaaaattatcaaatgcttacatgtaaaattaaagttgtacaaattctgcgacagtgtgccagtgtcagcagcatcaattttagttttgtttttgagacagggtctcactctgttgctcaggctggagtgcagtggcatgatcatagctcactacagcctcaaattcctggactcaagcaatcctcccacatcagcctcctggcataaatcaccacacttggctaatttttaattttgttgttgttgttgttgttttggtagagctgagttcttactatgcttatgctggtttagaactggtctcaagtgatcctcccaccacccaaaatgctgagattataggcatgagctac

SEQ ID NO: 112427 - DNA, 422 bp, Homo sapiens
tgcgctcatgaattcggacgagccaaatgcagattttcggaaaacccttacggggaagaccatcaccctcgaggttgtaccctcggatacgatagaaaatgtaaaggccaagatccaggataatgaaggaattcctcctgatcaccagagactgatctttgctggcgagcagctggaagatggacgtactttgtctgactacaatattcaaaaggagactactcttcatcttgtgatgagacttcgtggtggtgctaagaaaaggaagaagaagtcttacaccactcccaagaagaataagcacaagagaaagaaggttaagctggctgtcctgaaatactataaggtggatgagaatggcaaaattagtccccttcgtcgagagggcccttctgacgaatgtggggctggcgcgcctatgg

SEQ ID NO: 112428 - DNA, 2089 bp, Homo sapiens
cctcgtgccaatgtttttgtattttgataaaattttagcatacagtctatcctcattatttgtggattctgtatttatgaattcacctacttactaaaatttgtctgtagccctcaaattaatacttacaatgcttttgtggtctttggaagacatgacattttttcacgtgaaaaattttagttgcctgatgcacatgttctcaactgaagtcaaacaaggtgacactgccttcttgtcaactctcatattgtaagcaaatgtcatttttgcagtctttggtgctacatttttctcatctttgtgctttttgtcggtgattccactgtttgagatagcccccaagcatagtgctgaggtgcttctaaatgcaagaagattgtgatttgtcttatgggagaaaatatgtgtgttaggttaagctttgtttagggcatgagttccagtatttaatggaattactaatgtatattcagtaagtgcctttaaacataaacacacataaaacatgattatgtattgattggttgacaagaatgtgcccagaggctttcaggaacctgtttccccaaggaacagtggttctgtgttggataatttagtgtctgtagcgacttcatagaacataattgttgtgaataatgagaacctactgtaattggtttcatttctaaacctgtgtattttctgtaaagacatcctgagcctgagtctggtggctcatacctgtaatcccagcactttgggaggccaagacaggaggattgcttgagcccaggagttcaagaccagcctaggcaacatagggagaccccatctctacaaaaaattaaaatatccagacatgttggcacgcacctgtagtcccagccactcgggctgaggtgggagcaagacttggcctgggaggttgaagctgcattgagccatgattgtgccactgcactccagtctgggtgatggagcaagaccctatctcgaaaaaaaaaagtccgccaaagggggtctttggcacacacaaagaaataagaaccattagcccttaatgtagcctgagaaattagatctatcctttttttttattttttatttttattttttaagatggagtctcgctctgtcacccaggctggagttcagtggcacaatctcagctcactgcaacctccactgcctgggttcaagtgattctcctgcctcagcctcctgagtagctgggattacaggtgtgcgccactacacccagctaatttttgtatttttattagagacgtggtttcaccatgtcagccaggatgttctcaatctcttgacacgtgtctccctccagcttctgcccttatttacctgcctgttggctcttaaaggcatttttggttgagacttttgcatgtaaaataagaactttgccatctttggattcccccatgtttgtttgtttgtttttaataaataatatttaatattaaaaggagctgtggtttttttctctctaaagagcaggaaaggacagagactggtcgctctctgcagtcacacttgaggtgaagaaaccatgggatagaattagctgttagttgagtccctaggttcagaggaagaaagaagaccataccacctggtagggagtgcgaaggaggttccagggactgatccatagaagggtgtcagaacaacttcataataaagagttgccttattttcttggtcaaggggaacttcctgtgtgccttctatcctgatgacaccccctcactgaaatcctggtgttgtttccacagagctgtctggccttttgtccttgatccttggttaaggaaatgaccaaccaggtaagacctgtgttgaagggaaaaacatcaattggtctctttgccaagttcaagtccagtaggttttctggatgtgtagtcaagaaactagcatctcattcttgcccggctcctaaagagctgggtgaccctgggtacctagtcaccacagtgttaggtgggactagtgaaatgcaaatactgagaggaggattggttcatccaagtctttaccacaatttagtgagtaatagaagaagcttaaaagatgttgtaca

SEQ ID NO: 112429 - DNA, 505 bp, Homo sapiens
  misc_feature (1)...(505): n = a,t,c or g
cggacgcgtgggcggacgcgtggctgggttttgcatccagactgagtttccttccctcacccacatgaagtgtctaccttctgcagactccaatggctcaggaactgggaatgcagtgccaggctcgtggtatcctgcagcagatgtggggagttttccttctttatgtttccatgaagatgggaggcactacaggacaaaacattgaccagcccactgagatgacagctacggaaggtgccattgtccagatcaactgcacgtaccagacatctgggttcaacgggctgttctggtaccagcaacatgctggcgaagcacccacatttctgtcttacaatgttctggatggtttggaggagaaaggtcgtttttcttcattccttagtcggtctaaagggtacagttacctccttttgaaggagctccagatgaaagactctgcctcttacctctgtgctgngaattaactgacagctgggggaaattgcagtttggagcaggg

SEQ ID NO: 112430 - DNA, 313 bp, Homo sapiens
ttccaagaaaaccccaaatggtagatggccctatggcagcaggagggcccaaaagcctggaatgggaaaccatggaagctttgtcagcagcttttggggctaggattgtggccatagtcagggcaggggctgaggctgcggggagctttcagaggcaaggtccaggcaaaggagtggatgcccctccccaagctgggctgcctggtcaaggacatgaagatcaagtccctggaagagatttattttttttccccgcccatcaagtagtttgagatcattgactttttcctgggggcctctttcaaggatgagg

SEQ ID NO: 112431 - DNA, 134 bp, Homo sapiens; identical to SEQ ID NO: 104648

SEQ ID NO: 112432 - DNA, 187 bp, Homo sapiens
tagacccgctctgcagaattcggcacgagggaccaggtccctcctccgtagcttttgtctctctattgcctgcgccgtgtcctggactgctcacgggagttctgcaggagacgccggaatatctggaagctgaaaaatggaaataaatggaaagaccagaatattgaagatcactacagaaatctaa

SEQ ID NO: 112433 - DNA, 456 bp, Homo sapiens
  misc_feature (1)...(456): n = a,t,c or g
gcccggaatctcccgggtcgacgatttcgtgggcgaaggaggcaggacagagggcacgcagcacggatctgtggatggaaggggctgtggaaacagcttcctccccagcccccgcagttcctcggctcccccaaaattgcagccaggggaaggagccttgaaactctccagccccgacgccccagcctcattggctccctcccccgctgcagcacctgggnnnnnnnnnnnnnnaacccccggatgggcggggggccccaaaaaatggtgcccgggggggttgacataatcctggaaaaccgggtttgggggggnnnnnnnnnnnnnngaacccttgcctggggaaaacggaaaacccttgaaagccccccccctcatttccccaaatggggatctgccccgcccccctttaaggacaaaggggggcggagggctcttttcctcccctgccctggg

SEQ ID NO: 112434 - DNA, 371 bp, Homo sapiens
gccaagtcagtttgggtctcgactgttggggttgtcatccagcattctaattattgatgtgaaggtgtttcattgcagcccgaccattttccttatggtcgcattcttaggaacttgaattgtgatctgcctagattgctttagtagtgtgtagtaattggtagtattaagggtgtacatatattcaaatatatttgtgattagcccacttgtgggttttgttttgttttgttttagagggagtctcactcttgttgcccaggctggagtgcagtggcatgacctcagctcactgcaacctctgccttccaggttcaagagattctcctgcctcagcctcccaagtagctgggatgtacaggcgcccgcca

SEQ ID NO: 112435 - DNA, 453 bp, Homo sapiens
  misc_feature (1)...(453): n = a,t,c or g
tttcgtcatcatcagaggggtaatttgggtgtaggtattagaaatacctaggaatctactatgatgtagttcatgttaagccattttatctacactgaagtctttttttttctttcnnnnnnnnnnnnngggaaaaaaaccttgcttttgtccccggccgggggcccggggccccaagcccccccccgggaatccccgaccccgggggtaaacggaatccccgggcttaaccccccaaaaaggggggacaaagggggggccccaaaagccccgggaaaattttgggggttaaaaaaaaaggggggttcccccgggaaccccgggggggcccaaacccccgccctggggaaggggccggttaaatcccccaaaggggggggaataccaacgggggcccaccccccgggcccccggggggtttaaggaaggccctttccggggggaaccggcctt

SEQ ID NO: 112436 - DNA, 410 bp, Homo sapiens
  misc_feature (1)...(410): n = a,t,c or g
tttcgtgatcattaggcagagttgcttcattgttggctagctacctcacatgagcacccataggtaggaagattgcagtcatgtgtgatctagtagtggttctannnnnnnnnnnnnnnggaaagggagtttggctttgtcccccaggcgggagggaagggccccaatttaagttaagggaaggnnnnnnnnnnggggttaaggcctttttcgggttaaaccccccaagggggggggaacaacgggcatnnnnnnnnnnnnggggaaaagggttgggaatttaaagaaaaaacggggttcccccttgtaacccgggagggtttggacccccggatttgggagacggccggcctggccctccaaagggggggaataacgggcgggacccacggccctggcccaatatttag

SEQ ID NO: 112437 - DNA, 389 bp, Homo sapiens
  misc_feature (1)...(389): n = a,t,c or g
gggtgggggcggggggtcacgcccgttatttccaccgttttggagggttaggcgggggggtccccttaggtccggaggtccaaaccagtttgggccatttggttaaacccccttttttcttaaaattccaaaattagctgggggggatgggcatcctttgttattccgggttctccggagggttaggcggggttattgttttaaacccggaggttaagggttccattaacccaaatcctggccctgcccttccgccttagtggccaaacgaggctccgggtccnnnnnnnnnnngtacttaggatatgtacacttcaatttaactctattataatattacaatggattaataaaatttttctttttatttaataaaagagtgcacgaaa

SEQ ID NO: 112438 - DNA, 418 bp, Homo sapiens
  misc_feature (1)...(418): n = a,t,c or g
tttcnnnnnnnnnnnnnnnnnnnnnnnnnnnnnnnnnnnnnnnnnnnnnnnnnnnnnnnnnnnnnnnnnnnnnnnnnnnnnnnnnnnnnnnnnnaaataacnnnnnnnnnnnnnnnnnnggaaagggaggccaactttgtattccagcctgggcccggaannnnnnnnnnnaaatttaagttaatggaacctttggcctccgggataaaaggaattttctggcctgggcctccaaagaaccgggaatggaaaagggggccaacaagcccgggaaaatttttggtatttaaggggagaggggatttcccctggggggcggggcgggtttaaagctccggacctggaaggaccccccgggttgggcctccaaaagggtgggaataacggggggaaccacttgggccgggattgtttaaaa

SEQ ID NO: 112439 - DNA, 423 bp, Homo sapiens
  misc_feature (1)...(423): n = a,t,c or g
tttcgtgctcaagctccaccaggagccgtcgttcttttacaaagaggggtggaggttccagtggaggctgttgttgccttgnnnnnnnnnnnnnnnaaaaaaannnnnnnnnnnnaaaattgttgaattgggccaagttgccggggtggacccccccccaacccggggagggggggcccaaaaaaaaccaccaaccccaaaagggattctccctttaaaccccggcccgggggaatttggcttaaaggnnnnnnnnnnnnnggttcccccaccagagggaaagggcggctttttacttagggaaaaaacacctcccagaaaaaaaaggcccggaggttaaaggcccccggggaaccagctcccgatttttccaagggggggcgcgataaatccaggggggaaaatccaaaaaaattcaaaacg

SEQ ID NO: 112440 - DNA, 445 bp, Homo sapiens
  misc_feature (1)...(445): n = a,t,c or g
gactcgccttnggcattnccgggtcnnacacgcgtccgcggacgcgtgggctaacgcagccatggttcgtggtcccaataagcatctgaagcgggcggcagctccgaagcgttggatgctggataaattgaccggtgtgtttgctcctcgtccatccaccggtccccacaagttgagagagcgtctccccctcatcattttcctgaggaacagacttaagtatgccctgacaggagatgaagtatagaagatttgcctgcagcggttcattaaaatcgatggcaaggtccgaactgatataacctaccctgctggattcatggatggcatcagcattgacaagacgggagagaatttccgtctgatctatgacaccaaggggcgctttgctgtacatcgtattacacccgaggaggccaaggacaagctgtgcaaagtgagaaac

SEQ ID NO: 112441 - DNA, 396 bp, Homo sapiens
  misc_feature (1)...(396): n = a,t,c or g
taaaacatgtaaagggcnnnnnnnnnnnntccttccctccatttccaccccttgggggggccaagccggggggttcttaggtccggaggtttaggcccacctggcccacccgggggaaccccctttttttttaaaaaaccaaaaattactgggggtggggccgggggcccgttgttcccccttctccggagggccaggccggagaattgcctttaccccggagggggagggttccattagcccaaattctggccctgccctcccggctggggggcaaaaggggactccgtttcaggnnnnnnnnnnnnnnnnngagacatgtagagaagtatgcacaacatgattacattatcaatgttctgtgtgttgtatgtgtacatataaaatggctatcgc

SEQ ID NO: 112442 - DNA, 389 bp, Homo sapiens
  misc_feature (1)...(389): n = a,t,c or g
ggcacgagaatatggcatcttccatgaggagcttgttttctgaccacgggaaatatgttgaatctttccggaggtttctcaaccattccacggaacaccagtgcatgcaggaattcatggacaagaagctgccaggcataataggaagataccagaattgctgttaacaaataaaatactnnnnnnnnnnnnnnnnnnnnnnnnnnnnnnnnnnnnnnnnnnnnnnnnnnnnnnnnnnnnnnnnnnnnnnnnnnnnnnnnnnnnnnnnnnnnnnnnnnnnnnnnnnnnnnnnnnnnnnnnnnnnnnnnnnnnnnnnnnnnnaacaaggcggcatgcacatgctactccagacgctgaagtgggaagatcacttaagtccgagagatcgg

SEQ ID NO: 112443 - DNA, 430 bp, Homo sapiens
  misc_feature (1)...(430): n = a,t,c or g
aacaaaagccatagtgttttcatttgtcttttcttcaggatacacggtagaagtcagagaatctttgatacttttatttggtgcaataatcaaggccatgcaacaacccaaaatcaagcattttggttcaagtcaggatgacatgagtggggacagaagctgtggcagtcattcaataatctcatgggtcctgaggaaaagacaggagttaacgtattaagtttctactatatgcaggaactgtgttaaatattttacataagttttgataatagctaacattagctgagcacaaaatttgggccctgatttgtgctgagtatctttcacagattactgcttttaatcagcagtccttgnnnnnnnnnnnnnnnnnnnnnnnnnnnnnnnnnnnntacagatgagattctgaggcacaaagaggctaagn

SEQ ID NO: 112444 - DNA, 392 bp, Homo sapiens
  misc_feature (1)...(392): n = a,t,c or g
aaacttcacagtgccaataccatgaagaggagctcagacagctcttaccacatgatacaagagccggctggtggaagagtggggaccagaaagagaatttgctgaagaggagaaggnnnnnnnnnncaccnnnnnnnnnnttaaaaaattnnnnnnnnnnaaaaaaacctgcccgtgaggggggagaaaaaccagggccttttaaaaaggcaatcacaacaacttttgttgccagaatgcctttgttttggttgaaagaatttttgttggcaagttgctgaattatagggaggagttcccccaccccaggatccaaggggcacagcgcggcccccgattgtccgtcctgtgcgctggccgccctcccaaaggatgtacccaactttcagccn

SEQ ID NO: 112445 - DNA, 384 bp, Homo sapiens
  misc_feature (1)...(384): n = a,t,c or g
ggctgactcctnnnnnnnnnnnnnnnnnnnnnnnnnnnnnnnnnnnnnnnnnnnnnnnnnnnnnnnnnnnnnnnnnnnnnnnnnnnnnnnnnnnnnnnnnnnnnnnnnnnnnnnnnnnnnnnnnnnnnnnnnnnnnnnnnnnnnnnnnnnnnnnnnnnnnnnnnnnnnnnnnnnnnnnnnnnnnnnnnnnnnnnnnnnnnnnnnnnnnnnnnnnnnnnnnnnnnnnnnnnnnnnnnnnnnnnnnnnnnnnnnnnntgatgctgaattgtattgaatgcagaaatccttgacaaaatactagcaaatcaaatctaacaggacatcgaaaagataatacaccataatcaggtgggatttatcccaggaatgcaaggatgattcaac

SEQ ID NO: 112446 - DNA, 449 bp, Homo sapiens
  misc_feature (1)...(449): n = a,t,c or g
ggatgggtctcttgtcaaaatcagnnnnnnnnnnnnnnnnnnnnnnnnnnnnnnnnnnnnnnnnnnnnntatgacctctnnnnnnnnnnnnnnnnnnnnnnnnnnnnnnnnnnnnnnnnnnnnnnnnnnnnnnnnnnnnnnnnnnnnnnnnnnnnnnnnnnnnnnnnnnnnnnnnnnnnnnnnnnnnnnnnnnnnnnnnnnnnnnnnnnnnnnnnnnnnntggagttcaaagtggaaacaggtgtgagagggttcaacagaagaaaacatagctgccaagtgtttgagtccatcggcaagtttggactggccttatctgttgcagaaggcatggtgaactctgccttatataacatggatgctgggcacagaactgtcatctttgaccgattctgtggagtacaggacattgtggtagggtaagggactcactttctcataccatgggn

SEQ ID NO: 112447 - DNA, 520 bp, Homo sapiens
  misc_feature (1)...(520): n = a,t,c or g
agaaagccttttcnaaaaagtttttgaatccttttctgcaacaagctttnaaaaaagcanagcttttactcaactgttctcaactccatggcaaaacttacatgcaaacaggcataacaccaggcttcagctcaggagtcaatcagtaggtggaaaggagaaggctgcaaacagttgggtgagaagctgcgtcctgtcgtcatggagagcttctaactgcagatgccaggggttgctctgccgccttactcctgcttggcagagagaaggacccagtaccaggcacctggttttttctgtgaaagctgcaggaagggaaaactgtgaagttatggattagaaagtaagccatcatacttttagtttccttctcttaaagtaatcctatactttagagtatataatgtattttgtgtccaggtgtggggctcatgcctataatcccagcaccctgggaggtcgaggtgggaggatcgcttgacaccaggagttcaagatgagcctgaacaacaaaggagac

SEQ ID NO: 112448 - DNA, 443 bp, Homo sapiens
  misc_feature (1)...(443): n = a,t,c or g
ggatgggtctcttgtcaaaatcaggnnnnnnnnnnnnnnnnnnnnnnnnnnnnnnnnnnnnnnnnnnnntatgacctctnnnnnnnnnnnnnnnnnnnnnnnnnnnnnnnnnnnnnnnnnnnnnnnnnnnnnnnnnnnnnnnnnnnnnnnnnnnnnnnnnnnnnnnnnnnnnnnnnnnnnnnnnnnnnnnnnnnnnnnnnnnnnnnnnnnnnnnnnnnnntggagttcagagtggaaacaggtgtgagagggttcaacagaagaaaacatagctgccaagtgtttgagtccatcggcaagtttggactggccttagctgttgcagaaggcatggtgaactctgccttatataacatggatgctgggcacagaactgtcatctttgaccgattctgtggagtacaggacattgtggtagggtaagggactcactttctcatacc

SEQ ID NO: 112449 - DNA, 466 bp, Homo sapiens
  misc_feature (1)...(466): n = a,t,c or g
acgccacgcttggcacgaggatgggtctcttgtcaaaatcagnnnnnnnnnnnnnnnnnnnnnnnnnnnnnnnnnnnnnnnnnnnnntatgacctctnnnnnnnnnnnnnnnnnnnnnnnnnnnnnnnnnnnnnnnnnnnnnnnnnnnnnnnnnnnnnnnnnnnnnnnnnnnnnnnnnnnnnnnnnnnnnnnnnnnnnnnnnnnnnnnnnnnnnnnnnnnnnnnnnnnnnnnnnnnnntggagttcagagtggaaacaggtgtgagagggttcaacagaagaaaacatagctgccaagtgtttgagtccatcggcaagtttggactggccttagctgttgcagaaggcatggtgaactctgccttatataacatggatgctgggcacagaactgtcatctttgaccgattctgtggagtacaggacattgtggtagggtaagggactcactttctcataccatggn

SEQ ID NO: 112450 - DNA, 291 bp, Homo sapiens
ttttttttttttgtatttttagtatagacggggtttcaccgtgttagccaggatgatctcgatctcctgacctcgtgatccgcccgccttagcctcccaaagtgctgggattacaggcgtgagccaccgtgcccggccttccccagatatcttcaaagcaactgctagtcctgcttttgcacattacactctacattctcattgccccacttaactaaccctccctcatgtccttttctaaagatgtagaagactccgaaatagcataacatttaaatggtcacgtcgacc

SEQ ID NO: 112451 - DNA, 379 bp, Homo sapiens
  misc_feature (1)...(379): n = a,t,c or g
atttttagcagagatggggtttcaccctgttagctaggatggtctcgatctcctgacctcgtgatccacccgccttggcctcccaaagtgctgggattacaggcctgagccaccgcgcctggccaagcacagagtgccttctgaggtgaggcctgtggccagcccagcaaccacacttagtgtgtcgggcaggactagggccatagcaggtacataggcagggttgtgccccagccgaagctgtctgcctgcctgtctgtccccataggcctcaagccaggcaccaggtggngggcttttattgcagcctaggatggcagaggcattgtgggagcccatcaaggaagaggtctagagactgggcagtgagaattccacc

SEQ ID NO: 112452 - DNA, 443 bp, Homo sapiens
  misc_feature (1)...(443): n = a,t,c or g
atctttgttttttgtttttttatcttggctccctgtagcctcgacttcccagcaatcctcctgcctcgcctcacannnnnnnnnnnnnnnnnnnnnnnnnnnnnnnnnnnnnnnnnnnnnnnnnnnnnnnnnnnnnnnnnnnnnnnnnnnnnnnnnnnnnnnnnnnnnnnnnnnnnnnnnnnnnnnnnnnnnnnnnnnnnnnnnnnnnnnnnnnnnnnnnnnnnnnnnnnnnnnnnnntctctgtcttttaaatgagggtgtctgcatcgtttgtttcacatggttatttaggactaactctatcattctgctgctcagtagttttgtttgtccaggctgccctttgttctttttctgctttcttttgtattttatgatttgattttatttcctttgttggcttattaacaataacttttcgttttgttattttagtgactat

SEQ ID NO: 112453 - DNA, 960 bp, Homo sapiens
ttctggaaataagctatttattaccgtcttcctttatccatctgccattcacatctcattccaacaacattcaaaatcttaaacaacctctcccaagggtccacgatctgggatgatgtttccgtcagcccctctattatgtacctctgagagctacgtgtgctaggtgacattaaatgcagatgtatcctgggcgccgtgatgctgatgtctctatttgagtagacctagtgacataattgatatagaattcagctgctttgttcaagtacttatacaataaattggcaggtaatcgaacatcatgagttgttaattattagaggaaggacatcacaaacaaataattttctaaagcagttcactggagattcttgttcttcaatagtttcagcctctaatagtgcctccccaaggccaaccccatgctgcaccaccgtttcagggaagcgcctcaaaagtagaagcaacatttctgatcgttctaacgtgttgaagcattgttccgtgacctttagtaacatttcacactggacccgaccaggaagagtttcaaataaacttcttaaaaattgggtttgtttgtcctgtgaatcgttccttaatgctgatgtaataatgctgatttctctccacaccaccggctggtctgggaaattcacaaacatgtcgtacagcagcctcccggcggtggcggtccgctctgcattccgctcgatggtgtacatctcatactggatgttaaagtctgccgggtagaggctgcgggccgtgatcagccacgccttggctgcccacaggtcttgcggcaccaactcccgggctcgctgcaccaggaactcgcagtccccctgggcagacatgacccgagcgctctccagccgccagcccgaagcggccggaacgtccggctcaggactctcagccgccacggcagccaccgccgccgccgccacgaaa

SEQ ID NO: 112454 - DNA, 784 bp, Homo sapiens
ttttttttaggagaaaaataatttatttatttaatttaaaacagcaagacttcagcttccacccagtcagggcttgcattacaattttgcaggtgcaaaaactcacacttttgatgccacaactagaagtttgtaaaaaactattttccttgtccgtggaacacgtgaaaaagttcctgtttgcaccctcaccctgggccaaataatcatctttatttaaaaacaaaacagaacaaacaaacctgaaataccctcaagggcacaaagagggcagaaagcggctgggtaaacctgggttaaaaggaccaaagttcagaaagtgcatgggagagggacgctgagctgcggacaccgttccggcctgcagtacgtgttatggctgaggttacacttgggtgactcagggatgcaggcagatgaacattaaccacactaacagaggagaaagaagcccactggggctgtgcaaaagtgtcccaaggagcacagccccttttgccctgaatcaagatgtaacagcccctcgcttgaagatctgactgggcaacatggcaaaaccttgtctctacaaaaagtcaaaatttagccaggcctgtggtcccagcttctcagggagctgaggtgggaggatcgcttgagcctgggaggtggaggctgcagtgagccatgattgcatcactgcactccagactgggtatgatgctccagacagcaaaaccctgcctcacaaaaataaataaactaaaaagaagtaacagcccctcctggacttgttttatttttt

SEQ ID NO: 112455 - DNA, 521 bp, Homo sapiens
tggaaatatgaagtcatacttttttatgagttatttaattttttagtaaatttgttttagaatgggcagtgagttgaataatttgggatattttaaatgttattttcaaatttagtgaatttgagattctcaactctgttgtccatatgttaaaatatttaaaaatacctcagtgaagcacaaaattaataactgtgctcacattgaaaaaaatggcccaggcgcagcggcacatgcttgtaatatcagcacgttgggaagctgaggcgggtggatcatttgaggtcaggagttcaagaccagcctggccaacatggcgaaaccccatctctactaaaaatacaaaaattaacaaggcatggtggcgcgtgcctgtagtcccagctactcgagaggctgaggcaggagaatcacttgaacccgggaggcggaggtttcagtgagccaagatcacgccactgcactccagcctgggcaacagagggagactccatctcaaaaagaaaaaaagaaagaaaaga

SEQ ID NO: 112456 - DNA, 399 bp, Homo sapiens
cactgaagatcctggtgtcgccatgggccgccgccccgcccgttgttaccggtattgtaagaacaagccgtacccaaagtctcgcttctgacgaggtgtccctgatgcccagattcgcatttttgacctgtggcggaaaaaggcaaaagtggatgagtttccgctttgtggccacatggcgtcagatgaatatgatcagctgtcctctgaagccctggaggctgtccgaatttgtgccaataagtacatggtaaaaagttgtggcaaagatggcttccatattcgggtgcggctccaccccttacacgtcattcgcatcaacaagatggtagtctgtgctgtggctgacaggctcctaacaggcatgcgaagcgccttctgaaagacccagggcactgg

SEQ ID NO: 112457 - DNA, 427 bp, Homo sapiens
  misc_feature (1)...(427): n = a,t,c or g
attatatttctaaacattttatgatgtttaaaaacaaaacaggctgttgtnnnnnnnnnnnnnnnnnnnnccttcggaatatcctttgggttccaaaagccccaaaaaaaattttacttttaccgggggaacccccttgcccggggcccactttggaacggggttaaaaacgttttggttttttaaaaagggataaaggaccccccagaaaattcgggaggttgccgggcctattggaaaattaaaggcccttaggacctttccctaatggggagggaggcggggctgatttttaacaaactttggaaaacagaactttcttgggccccctttgctttggccaggggaccttgcccagcccccacctgggaccaagcccaggtttcttgggttggtttgaacccccctgcccccacagggtctgaan

SEQ ID NO: 112458 - DNA, 397 bp, Homo sapiens
  misc_feature (1)...(397): n = a,t,c or g
aacaggaaggaaccagaagctgggaaagttgtttacctctttgtcccagagttagacctcatcctcccctagcttagctgtctcagagatatactggccctcccttctcttctctttgctgctggtgctaaaactgctctgtaggtcattggccactgtctccactcacaacccctgctccagtcctggagggagtgggttaaacacaaatagaacattccatttgaagcagtgattcnnnnnnnnnnnnnnnnnnnnaaaaaaaaggccttggacttttgaaacccccttgttttggcctttgaaaagggaaaaaaggcccgcccccagggccccccccttgaacccccaccctttaaaacccttgggggccggggtttggaacccccccggccca

SEQ ID NO: 112459 - DNA, 641 bp, Homo sapiens
ctaaactatttaactcatcacattyagatacataaaaataagcattatgttacaacttgaaatgggttttccttcagaattgagaatcatctaaggctratttgtatagtagtagtttattccttttaatttttgagttgtattacacaatacggaaataacagacttatttaactgtttacctggtgaataacatgtgagtggttcccggttctggactattacaaaataaaatttctgtgaaacagtcaagtgccaggtttgggtcctacacataaattttccatttcctatgaaaataggcccatgacagcaattgcctaagccctaactaactmgtatgtgtgtgtttagctttaaaaggaattgccaaattattttccaatgtggtatacagttttatattcccatcagcaataaagattcaattttttctgcatgcmmvbmcagcctttggaatcattatgttttaactawtttcagctactgaaaataaaatctgctgtaggcccaggttgtgggtggctcacacctcttaattccagcaccttggggaggctgaggcaggtggggtcacctgaggtcaggagtttgagaccagcttggccagcgtggagaagccccgtctctacaaaaaatac

SEQ ID NO: 112460 - DNA, 412 bp, Homo sapiens
ctgggatatataaggttggtggcacatgagataattaaacaatgaatgatgcaaatactcaccataccattactttataattcattctgctcgtttgagtccactcagggcttagggaagtgcaaaacagtatcacatggcagatgatgttgcccgatgctgggactgcatgtgaacttcacagcggccccacgggccaagcacaggaagaggcgagtcccacttccgactgccactcagaagggggatgaaagcccccatcacgtggccctccgtgatctggtttgcttctttttagaaaaagaaggtgtggctaggagcggtggctcacgtctctaatcccagcactttgggaggccaaggtgagtggatcacctgaggtcaggagttccagaccagcctggccaacatg

SEQ ID NO: 112461 - DNA, 382 bp, Homo sapiens
  misc_feature (1)...(382): n = a,t,c or g
cttaatgaagcccactttatccattttttctttcggcacctgtgctttcggggtctcttctctttttttgtgcttgctctttaattcatcttcatctaccnnnnnnnnnnnnnaaccccataaagggttacccaaacatatttcccaactcagcctgggttaaaaattaacgggggccctaaaaatttcaaaagggaaaaaaatttttgcttccctggctaggctctgggggcctggagggccaaaaaaaaaggctgtggggaatcccaaaaagggtgggggaggtttccaaagggggccctaggctggctgggggggcccagcaggcgggctacattattctggggccaaccttttacaaagggggggcccctgccccgcc

SEQ ID NO: 112462 - DNA, 516 bp, Homo sapiens
atggagtattactcagtctggaaaaggaaggaaattctgacacactctgcaatgtggatggcgcttgaggacatgatgcttagtgaaagtagccagacaccaaaaagggagactgttacacgatcccgctatctgaaatagctaggaaaggccagttcatcgaggtagaaagcagacgaaggctcgtcgcggctgggaaaggccagttcatcgcggtagaaagcagacggaggctcggtgtggtggctcacgcctggaatcccagcactttggatggctgaggtgggcggatcaccttaagtcaggtgttcgagatcagcctggccaacatggtgaaaccccatctctaataaaaatacaaaaattagccaggcctggtggcgcacacctctaatctcagctactttggaggctgaggcaggagaatcacttgaacccgggaggcggaggttgcagtgagccaagattgcgccactgcactccagcttgggtgacagggcgagactccatctcaaa

SEQ ID NO: 112463 - DNA, 563 bp, Homo sapiens
ccgccatgtttatataatgtgatcatacaaaaatccaaatatcttatttctaattatttgtcagtaatttgtgacttttacctagtaatttagcacctgaatttctacatatgaaatatgaatataagatacaaattttcaagccaggcatggtgactcacacctgtagtcccagctacttagggggctgaggtgggaggatcagttgagcctaggaggtcgaggctgtagtaagccgtgatcaaaccgctgtattccagcctgggtgacagagcaagaccctgtcgcaaagaaaagatacaaatttgtatcttatatattatctggaatgactttttaaacataataaaagtattttaggtattttataagtacttaaaggtaattctgaaaatttcttagaccatccccgttaatttcagctagaaaagtgatgatataagttcactttgttatgctcattcccttaaatatgaaatgcattttataggcttcttttaccaagttatttgactcttcttcttgatatttcactggtgaagtttttcatgatgactgaatct

SEQ ID NO: 112464 - DNA, 1059 bp, Homo sapiens
tttttttttttttttttggatttacattttattcaaaggataaatacaaaattaaagaaagagtttcaaattcaaagtaaatacagcttgatatttcaaaacaattctacatacaaagtacaataggaaaaaaccaaaagcccccataaattagagtggctagacacattcaagtctagcagaaaagaaaactgaaatttaatgcaacgttatttctcttgcctagaagctaaagccttaattgtctcaaatatcttccatctccttatggggcattacttgaaggataacaatgggaggcaagctttttaatgaacttgccatagtgaaaaaccaatgacagatgcgacactggaaagaggacaacaatgttaaccctaaaaggggagctactgggcagaaataaaaactagtggatactggataacatcctagacctttgcagacgtttagagtactgtacaatccttaaattattgtttatcaacctttgggtctcacagattaagaatgtacttagttaagaaccagggagttataccccagttccacaatactgtttcccttcacttgccctttagatataatggatctggaattcctccaatgagtgttacatggtcctggcaattctggcaattttccttccaagaccaaacaatacttatctccatttcaaaatatacaaagctgagtgacagaggcaaaaattaattcctaaagatccaaagggtacacaatacctgtcaaatttcgtatgtctgggcaggacacggtgactcatgcctgtaatcccagcactttgggaggccaaggcgggcagatcacttgaggtcagggagttcgagactagcctggggccaacatggtgaaaccccgtctctactaaaaacacaaaaattagctaggcatggtggcacgtgcctgtaatcccagctaatccagaggctgaggcaaaagactcgtgtgaacacgggaggtggaagttgcagtcagccaagattgcagcactgcatgccagcctgggcaacagagcaaaactccatctcaaaaaaaaaa

SEQ ID NO: 112465 - DNA, 366 bp, Homo sapiens
tttcgaggtcagtgccaatatcccacaaaaggaagattgtcgctgatggcatcttcaaagctgaactgaatgagtttcttactccgtagctggctgaagatggctactctggagttgaggtgcgagttacaccaaccaggacagaaatcattattttattccccagaacacagaatgttcttggcgagaagggccggcggaatcaggaactgactgctgtcgttcaaaaaagggttggctttccagagggcaatggagagctttatgctgaaaaggtggccactataggtctgtgtgccattgcccaagccgagtctctgcgttacaaactcctaagagggcttgctgtgcggaaggcctgctatg

SEQ ID NO: 112466 - DNA, 383 bp, Homo sapiens
gaggttatcaataagctcctattccagacgccatgggtcatttcacacaggaggacaaggctactatcacaagcctgtggggcaaggtgaatgtggaagatgctggaggagaaaccctgggaaggctcctggttgtctacccatggacccagaggttctttgactgctttggcaacctgtgctctgcctctgccatcatgggcaaccccaaagtcaatgcacatggcaagaaggtgctgacttccttgggagatgccataaagcacctggatgatctcaagggcacctttggccagctgagtgaactgcactgtgacaagctgcatgtggatcctgagaacttctagctactgggaaatgtgctggtgaccgttttggccatt

SEQ ID NO: 112467 - DNA, 371 bp, Homo sapiens
ggaacttctgaggttataaataagctcccatggcagacgccatgggtcatttcacagaggaggactaggctactatcacttgcctgtggggcaaggcgaatgtgacagatgctggaggagaaaccctgggaaggctcctggttgtgtacccatggacccagaggttctttgacagctttggcaacctgtcctctgcctctgtcatcatgggcaaccccaaagtcaaggcacatggcaagaaggtgccgacttccttgggagatgccataaagcacctggatgatctcaagggcacctttgcccagctgagtgaactgcactgtgacaagctgcatgtggatcctgagaactttaagctcctgggaaatgtg

SEQ ID NO: 112468 - DNA, 398 bp, Homo sapiens
ggaacgtttgttgttatcaataagctcctagtccagacgccatgggtgatttaacagaggaggacaagggtactatcacaagcctgtgtagcaaggtgaatgtggaaaatgctggaggagaaaccctgggaaggctcctggttgtgtacccatggacccagaggttctttgacagctttgtgaacctgacctctgtctctgccatcatgggcaaccccaaagtcaaggcacatgggaagaaggggctgacttccttgggagatgccatatagcacctggatgatctcaagggcacctttgcccagctgagtgaactgcactgtgacaagctgcatgtggatcctgagaacttcaagctcctgggaaatgtgctggagaccggtttggcaatccatttt

SEQ ID NO: 112469 - DNA, 446 bp, Homo sapiens
  misc_feature (1)...(446): n = a,t,c or g
ggctcatgcctgggtaatctcagcactttgggaggacacgatggatggatcacctgagctcgggagtttgagaccagcctgggcaacatggtgaaatcccatgtctacaaaaaatacaaaaattccctgggcacagtggcatgattacatgattaatttgaagttgtttcttggttggctgccagttttagctattttgtctctactaaaaaggggaaaaaaattagcacctgccagagattaaataaggaatgtatttcagcttattgatttattttattagggagggtgaaatttttcaggtggttaggtaagggtgactttgggagtcactctttggattttgagtccctaggctttgtccattttacccagcttttgtggacccccggggccggactaacccaagtcttgtnccacactnaggggncagttattaccncttt

SEQ ID NO: 112470 - DNA, 338 bp, Homo sapiens
  misc_feature (1)...(338): n = a,t,c or g
ggttttgccggtaatcccccccctttgggggggttgggcaggccattcccagggtcaaaaaattcagcccctccgggggtccatggggaaaccccggcccttttaaaaacccaaaaattagggggggagggggggaggggcctttaatccccgctccccaggggggttaggcaggaaaattcctttaacctgggaaacggaaatttgggttaaccaaaattttgccccggnnnnnnnnnnggggggcaaaagggggccccctccccaaacccaaacccnnnnnnnnnnnngaaagaaattattacaacaaaaagatattaagagacattctcgtgccg

SEQ ID NO: 112471 - DNA, 406 bp, Homo sapiens
  misc_feature (1)...(406): n = a,t,c or g
nnnnnnnnnnnnnnnnnnnnnnnnnnnnnnnnnnnnnnnnnnnnnnnnnnnnnnnnnnnnnnnnnnnnnnnnnnnnnnnnnnnnnnnnnnnnnnnnnnnnnnnnnnnnnnnnnnnnnnnnnnnnnnnnnncgacacctagttttaaagggccccnnnnnnnnnnnnnnnnnnnnnnnnnnncagctgcccagtctggcgggctcagtcccgcgttgccatgtgtgggagaccgcgtcgcgtaagcgctggatgtggcttcgctgatgcacattggaccgggctctggactgggctaggggaagggcaggagggcggaattgggcccgagggccaggcctcgccgacccccgactgcgcctcccggtggccccgcagcgcctcccggtggccctggagtgcaagtct

SEQ ID NO: 112472 - DNA, 741 bp, Homo sapiens
atatcaatttggaaatacgagagtatattatatggatgtgacttaaaatatgaaaagagcaaatgatgcttttagtattatgtgtaaatacaagtaccacttctctctttttcccacaatcctctaggcaggatgtagccaatcaaatgtgcaccaagaccaaggaggagtgtgagaagcactatatgaagcatttcatcaataaccctctgtttgcatctaccctgctgaacctgaaacaagcagaggaagcaaaaactgctgacacagccattccatttcactgtaagtgcctccctatcttgataagatatacttagctcatccttgggccctgtttcagttaccagaataaagagtgaatttgaatgaccttggaacagcctaatgatatcacggaagataggaggagttagtatggcagcctattgagagtcaggatcgaccccggccatggtggcttgtgccctgtaatcccagcaccttgggaggctgaggcgggtaaatcacttgaggcccaggagttcaagaccagcctggccaacatggcgaaaccctgtctcaactaaaagtataaagattagctggacgtggtggcagacacctgtaatcccagctactggggaggccaaggcaggagaatcacttgaaccgggtaggcggagattgcagtgagccaagatcacatcactgcactccaacctgggtgacagagtgagacttcatctcttaaaaaaaaaa

SEQ ID NO: 112473 - DNA, 622 bp, Homo sapiens
  misc_feature (1)...(622): n = a,t,c or g
gttttgttttgttttttaataggataccatggcagctggagtagaaaacatactaaaggaaagtatgattcaagtcagagaaaccagttaggaggctattgcaataaaatccaggtgagatgccgggcgagactgtgcctgagtctacctcctggtgtacaggatgagtattccttattcaaaacacttgggaccagaactgttttggattttggaatatttgcattatacctactagttgagcatcacaaatctgaaaaaccaaaatttttaaatgctccaatgagcatttcttttgaaagtcacatcggcgcacaaggtttcaggttttggagcattctgaatttcagattttcagatttgagatgctcaatctgttccaagatcactgggccaaaattagagtgtaaattccagtcctaaccaagcaaagtacaatcccttgctgagtactccttaagatgatctcacccaagggccacatgcagttgggacgattttcttgagacggagtcttgctctgtcacctaggccggaatgnagtggtgcgatctcggccngacacaacctctgcatcccgggntcacagcattctcctcctcagcctcccctgtgccgaact

SEQ ID NO: 112474 - DNA, 493 bp, Homo sapiens
aacctcggctcactgcaacctccaactccctggggtcaagcgattcacctgaggccaggatcttgagatgctgtgtgcctgtagtcctagctacttgagagaaactaagatgggaggatcttttgaagcccaggagttccaaggctacagtgagctcatgatctcaccccatgtataccagcctgtgtgacagagcaagatcccgtctccaaaaaataacttaggagagacaacaaaaatatgggcaaaataaggagttaaaatggaggacaatacaaatggtatatacatacatgcccatacacatatacctataatctctacacacgcatgtatgtatatgtgtgcatgtgtaacttttgcttatctttcattctggcaaaaatgtaaatgaccaggccaggtgtggtgactcatgcctgtaatccctgtactttgggaggccgaggcaggcggatcaactgaggtcaggagttcaagaccagcaatccgc

SEQ ID NO: 112475 - DNA, 634 bp, Homo sapiens
gtgaaacttttttgttggtaatcaacagcttcaaatattggtttttatcaacgaattataaatacctttttataaaaggccaaaggcacagtaaaacaatgagtatttgtactttaccattttagagctcaaaataattcagaacacaaaataattcaggcgaccagcacctaatctgtcctgtaggtggcaaaattatcataaaaggaatccaggcacaggagtcagaattgctgcactgaggttaaatagtgaccagatgacttaaagctttatccgacatacaatttttaactttttcaagttttatagattcaaagtgccttttgtatcgctctgaattaacaaaagtttgtctgcatggtcaacaccaatgcttaaaaatatgttttcagtttctcaggctctggactttcagtctgatgatcatttctttttatgattattcctgaaaaattcctctcctttttctcgtttcccaacagattttgctttatttttatttatatttaattatttatgtttttggagacagggtcttgctctgttgcccaggctggagtcagtagcacgatcatagctcactgcagtgttgacctcctaggctcaagtgatcctccaacctcagcctccc

SEQ ID NO: 112476 - DNA, 635 bp, Homo sapiens
ttgtaaattatttaaaattaaacttcgatattgctccaaacaaacatttaaaaggtaatgttttcacatcataaagcagattcctgcctcgttatcaagttactcagctccattcctcttacttacctaccacaagcaaaaggcctttttcctgctcagcaatattggaggtaaaccctagagtctctcctccccttcagtatttcactaaccagggtgtcagaaaaaacctgggtttcacagggtatgctgcaaagaaggatgcattctatccctaggctccctgccctctgccagacccaggcagggatcccatgcccttccctcggggacttcgggcgtggagcatgacccaaaaccacgaaagtctgcagctccctaactaaaagtacctttcctgtaggaggtgttacaaccattccctggtgctggactcttcttcctcatgggtcaatgggtacaattaagccatgcaataaaaagtttgggtttacactttgggaggctgaagtgggaggactgcttgagtttaggagttagagaccaccctgggcaatatagtgagacctagcctctacaaaaaataaacaaacttagctgggcatggtggcgtgagccttcagtcccagctactt

SEQ ID NO: 112477 - DNA, 369 bp, Homo sapiens
  misc_feature (1)...(369): n = a,t,c or g
ggtagagaaaaaaggttatataaagatcaaattgtgaaaggccatcacatagataacnnnnnnnnnnnnnnggaaaaaaatttgggggcccgggaannnnnnnnnnnnggggtaaagccgttttggggccccacccctccggggaggggggaataagggggggccccataacccccgggaaatttttgggattttaaaaaaaacccgggttttccccggggggcaaggggggcccaaaaccttgggccggaaggggacggcccaaaaaaccccctagcccccaaaaggggggggaaaacggggggggccccccctgccccgccctaaaaaactttaaattccgtttggctatagggccgggaggggggg

SEQ ID NO: 112478 - DNA, 370 bp, Homo sapiens
  misc_feature (1)...(370): n = a,t,c or g
tttttctctaatcttggcttcacaccttattgcagttagagccgatgcttcaatctctgatatactttcttctgctcgatcaattttgctattgatacttgcgtatgctatctgaagctctcatgctgcgttctgcacnnnnnnnnnnnnnnnnnnnnnnnnnnnnnnnnnnnnnnnnnnnnnnnnnnnnnnnnnnntcctttcttcaagggtcttgccttccttgcattgagctaaaacatgctcctttagctcaaaggaaatggttattacccaccttctgaagcctacttctgtccatttgacaagctcattctgagcccagtactggtcccttgctggcaaagacttgtgatgctatggagaagaa

SEQ ID NO: 112479 - DNA, 370 bp, Homo sapiens
  misc_feature (1)...(370): n = a,t,c or g
ctttcatttcttctaaaaagaattagcctgaccgtaggctaggtgctagagcatgacacatgtgattccatggtatttgcctcctcaaggaacttattatttgtttggggaaaaagaccactgaatttgaagaggccagtaaagcattgttcaagagtttgaacaacctgggttcaaatcccagcttttgttagctatatgatcccgtgtaagttaactttcttgtgcctgagtgtattttttaaaaaattattttatgggctgggcgcggntgtcacgcctgtaatcccagcactttgggaggccgaggtgggcggatcacttgagatcgggagtttgagacaagcctggtcaacatgctgaaaccccg

SEQ ID NO: 112480 - DNA, 358 bp, Homo sapiens
  misc_feature (1)...(358): n = a,t,c or g
cggcacgagtgccactgagggcgcatgcagcctctagaccacaaccaaacagtgacccagactgctacagccaccttctgggcaccatatcacagagcagggaccccaggctgtagggaaagagcttgcagggctcctggatagaactgtactttagcaatgataggaaggggaacagtgctccaacatcagtttctgtttataatggtgacatnnnnnnnnnnnnnnnnnnnnnnnnnnnnnnnnnnnnnnnnnnnnnnnnntccaaagtgcttccttgaattcaaagaatcctctgccttgcttcccagagaaaggctgcagtaagcactgttcatgctgctgctctcccagctaa

SEQ ID NO: 112481 - DNA, 297 bp, Homo sapiens
tgcacaatcaaacagaaatagacctgtccttgatggttaacggaaataaaaggcgcttgtcccagaagctcaggtgaggcaccaccctgattatgggaatcacctgggaacatatacccagacctaaaactcagatccacttcccaggctgtggttatatagtcaggggggtgcagtatgggtattaggattttttattttttagttataaagatttttttttggtttgtttttgagacagggtcttgctctgccgcttaggctggagtgcagtggtgcaatcatagctcactgaag

SEQ ID NO: 112482 - DNA, 492 bp, Homo sapiens
  misc_feature (1)...(492): n = a,t,c or g
atttgtttcaatattttcgaatgaatatttcagngaattttcattcatactgtcattgaattattcaacatattttcattgaattagagacccaggtccgagaagtgccagtgagtgcctacannnnnnnnnnnnnnnnnnnnngcaagcattttaatggcctagatgggttaaatttttctaacactgtaaccaatggagtgctactgtgggttggcctaagccttatataataaagttgttttttgttttatgactttcgactgtttgtaattgaatgctttatttcctacacgattggattttttaactttgtgttgttcagcttcagctttttgttgtttattaattcttgttgatattttgtaattttccttattttttagtggtttataatatatacccgttatatttccgttttgtttgttttgatatttcttcctattatttatgggtcatcacttgtatctataaattctcctatctttattt

SEQ ID NO: 112483 - DNA, 407 bp, Homo sapiens
ccagggcaacagaatctgcttctcactgtgaccatggtctggaaggaccatgaggaattctccagtgctgtcggggtttccgatactgacacagacaatttagtaacagctttgacaccttttggtaataggacaaagttaacactcctgccactatcctgtgaaggccaaccttcctaggccccataggaaacttttggaatgtctttgttgggttgagaaactggggcaaagtagtacccaattttttcatgtcaatatcaaaatgtaatcatttcaggtacacagagttccgcactttcagattagtcttaaagaaaagaaaatcgccgggaacggtggctcgtgcctgaaatcccggcactttgggaggccgaggcggacggatcacctgaggtcaggagttc

SEQ ID NO: 112484 - DNA, 890 bp, Homo sapiens
aaaaaaaaccctcaataaatatgaaacaaccattcaaaattaattcatcacaataaatcagtatttaagaaaattgaagccttccaactacttgtcttaatacacgtaaaaggatttaatgttgatacatagaccagcagcatcagcattgtcctggagtttcctggaaaatgcagactcttaggtcccatcccaaactactaaatcagatctgtgttaacagtactcccaggtgattcacatgtacattaatgtttgagaagcactgtcctaaaaaattagatcagagagacaatgaaatatataaccaatgacttagtaataaaatagaggcaaggctatataaactgcagtatttctatacgatggaatttatgtagtgactttaaagactatggtccaggtgtggtgactcgtctctaatcccagcaatttggaaggctgaagcggcagaatctcttgaggccaggagtttgacaccagcctggacaaaacagcaagacccccatctctaccgaagattttaaaaaattagctgggcatggtggcacatgcctgtattcctagctactagggaggccaaggcaggaggactgcttgagctcagtaggttgaggctacagtgagccatgatcatgtcactgcactccagcctgggtgacaaaatgagaccctgtacccaaagcaaaaaagaagcctatgtaaaaatatactgtttaaaattttgtgaaattaaaatgagtctataaaatattcttccaatatgtaggggaaaagacatatgaataagacaaatgaaaaattgcatatggtggggaaattatcgctaaaataatattttaaaaatataacttattttcaataaactttaaaaatgtaaaaaaaaaaaa

SEQ ID NO: 112485 - DNA, 489 bp, Homo sapiens
  misc_feature (1)...(489): n = a,t,c or g
gggatattcatactccatgtagacattatttaatatctgccagtctttgaatctcaactatttttgagtatttatagtttccatcaattcttaaaagaagctgtatgtacaattcaagttcaccatcgttactggcatttggtctgataactggctactgttaatagtggcaaacagacttaaatacaggatactttacatatgacactttacctgcctcttttaaattttaaaattattctatttaaaataatctgacattataaatttctatgagtaaattatagaatggtctattaatttttcctttagtttgttgtgctttctgtggtcacagaaaatgctttagaaaaaataaaattattctagcccaggcacagtggctcatacctgtaatcccagcactttgggaggctgaggtgggcagaacacaaggtcagggagtttcaagaccngcctggccagtgatggtttanacttattcnctta

SEQ ID NO: 112486 - DNA, 406 bp, Homo sapiens
  misc_feature (1)...(406): n = a,t,c or g
acgcccacgcgtccgcccacgcgtacgcatgcacacccattaaaaatagtacatgtcaggattttctttagaaatacactggtctggtctaaagaaaatcctgacatgcacacccattaaaaatagtacatttnnnnnnnnnnnnnnnnnnnnnnnnctttagaggaacaacgattacgcacgcggactggcaaaacataaacttttttatggggcgcctgatgtaaaatacaggggccgagtttttaaaaagtgggcaggggaaaaaccctggggtcacccaactgagcccctttggacgagaaatctttttcagtcagcctatcctactagaacttggagcaccactcagaatatgtggtggcattcctggacaatactatgatttggtgcgacttttagaaaa

SEQ ID NO: 112487 - DNA, 491 bp, Homo sapiens
agtgagaagactccgtctaaaaaaaaaagttaaaattagcgccaaacgctttacaagtaaaaaaagtttttagctgcatatgtttaagtaactttttagattataagaaatacgcatgcaaaatggaaaggcacaaagaagagagcaaaaagtgcatgagatctcacatccaaggataaccgctgagaacatgaaagtgctgactcttccagccctttatactatacacatttaggcctgttgttttgttttcataaaactgtaatcatataatacagacagttttataatctgctttttaaacacgacaattatataacatttagctgtttcatttgcattcaaattcataagggtgccagtaactcatttatcagaaaaccaagagaaatattctcataaaaatataagtacataaggtcaggcatggtggctcacgcctgtaatcccagcactttgagaggccgaggtgggcggatcacctgagggca

SEQ ID NO: 112488 - DNA, 442 bp, Homo sapiens
  misc_feature (1)...(442): n = a,t,c or g
nnnnnnnnnnnnnnnnnnnnnnnnnnnnnnnnnnnnnnnnnnnnnnnnnnnnnnnnnnnnnnnnnnnnctttaacagagagagagagaagagaatnctctatccaagnnnnnnnnnnnnnnnnnnnnnnnnnnnnnnnnnnnnnnnnnnnnnnnnnnnnnnnnntgggatggctacaataaaaaagatggataacaagaagaattggcaagaatgtggagaaactggaacccttgtaaactcctggtggggacgtaaactggtacagtcaccttggaaaaaagcctgacagttcctaaaaaggttaaacnnnnnnnnnnnnnnnnnnnnnnnnnnnnnnnnnnnnnnnnnnnnnnnnnnnnnnnnnnnnnnnnnnnnnnnnnnnnnnnnnnnnnnnnnnnnnnnnnnnnnnnnnnnnnnnnnnnnnnnnnnnnnnnnnnnnn

SEQ ID NO: 112489 - DNA, 453 bp, Homo sapiens
  misc_feature (1)...(453): n = a,t,c or g
tttcgtggannnnnnnnnnnnnnnnnnnnnnnnnnnnnnnnnnnnnnnnnnnnnnnnnnnnnnnnnnnnnnnnnnnnnnnnnnnnnnnnnnnnnnnnnnnnnnnnnnnnnnnnnnnnnnnnnnnnnnnnnnnnnnnnnnnnnnnnnnnnnnntggtggttatgtcaagnnnnnnnnnnnnnnnnnaaaaggaaattttccttttttcccagggggaaggccagggggcaaactttgtttaacaaaaactttggcttccaaggtaaaagaaattttctggcctaaccctccaaagaggggggaataaagggcccccccacaaaccggggtaaattttggatttttaaaaaaaaagggggttcaacaaggtggccaaaaggggtctaaaactccggacctaagggaacccccccccttggccctccaaaggggttagaataacgggggggacccc

SEQ ID NO: 112490 - DNA, 443 bp, Homo sapiens
  misc_feature (1)...(443): n = a,t,c or g
tttcgtagaattacaagtatcttgaatgacttggcctcctattttctattgttaaagtagcattattgttttatgagtcaaggaacatgagttnnnnnnnnnnnnnnnnnnnnnnnnntctattcnnnnnnnnnnnnnnnnnnnggaaaggggctttgcttttgtgccccggctggagggcagggggggaaatttggctcaagggaaccctggcccccggggtgaaaggaattttccgggcttaaccccccggggaggggggaataaggggttgggccccccggcccggggggttttttggttttttaacaaaaaggggggttcccgggggtaaccagggggggcccaaccccccgccctggggattggccggccccacccccccaannnnnnnnnnttacgggcggggccccccccacggnnnnnnnnnnnnnnnnnnnngg

SEQ ID NO: 112491 - DNA, 450 bp, Homo sapiens
  misc_feature (1)...(450): n = a,t,c or g
gcggtattccgacgagtagattccacgagcagcagcctgtggcacccgctgggcgcgggcagcagggaagagggagcaaggcattgtccacagactgctggggtcacttctttgcccacgggctccctgctcccccagttttttttctctctttgttaacaaatgtgtctgagtcttggaaaacaccccaaccccggaaatgtgtgggaaaaagaaaacaaaaactttccnnnnnnnnnnnnnnnnnctcctttttaagttttataaaaccctcccccctcggggggggccccgaccccaattcccccttaaggggggcagtataaaattcaacggccctgcgtttaaaaaggtggggactggaaaaacctgggctgccccaaattaatttgcttttggcgaanattttnttngtatggataataatgcagccactattacatgcctcag

SEQ ID NO: 112492 - DNA, 241 bp, Homo sapiens
  misc_feature (1)...(241): n = a,t,c or g
agtacagatctttgattgatgagaaatatacacctacgatatttggtcctcacagcagccagcccaatgaacatctttgcaattttaaatcggatcttctcagcttagcggctgaagactgatgctgccagatgactttggaagccccctggaccatcacagatgcccagctttggataactcttacagtggaggacaggaatannnnnnnnnnnnnnnnnnnnnnnnnnnnnnnnnnnnn

SEQ ID NO: 112493 - DNA, 419 bp, Homo sapiens
  misc_feature (1)...(419): n = a,t,c or g
agcggtggannnnatggactcttctcataggatgcacagtcaagtcacgtgacaggaatacataatgttaatacatttgaggaataatcctaacacatcaagttaaagtaagctgcttttgatcccccttttgaaaaggatgccagtttagttgttacataccaagtgccagaggctgagnnnnnnnnnnncctggggaaaatattgcattcgttgaaaacaaaaccacactgagttaccatttcatgttcactaggatgactgcagtcaaaaagatggaaaattacaagtgctgttgaggatgtgaaacaattggaagcttcatacactactggttggaaagtaaaagggggcagtcactttgggaaagttgggcagttcttcaaagggttaaacgtaaagctactatatggcctact

SEQ ID NO: 112494 - DNA, 656 bp, Homo sapiens
acgtgagccactgcacccggctgacctgtgcccctccttgaagctgtcatccactgatctccagcagcctggacagtcacaggggactttgacacctgactcagttctccccacccccactcctgctaccctcccaggtgaagtcaacagacatataacggtccacccaagacggcctctcggttccttgagggctttgtcatcatccactgtttcttcacatcacaaacacatcacccctctgtggccacctcctgttccttcggggtgctcaggacctcaccttcctgatcatggtcatttggctttattaaaattaaaaaacaaaaacaaaaatgggtcctcactttgctacccaggctggagtacagtagtgcgatcatagctcaccatagccttgagctcctaggctcaattgatcctcccgcctcagcctcccaagtagctgggactacaggcatgccacctgggtaatttttttcatttttgcttgttgtagagatggggtctcactatgttgcccaggctgatgtcaaactcctggtttcaagcgatcctcctgcctcagcttcccaaagtgctagggtcacaggcatgagccactgtgcctggctggcctcttaattttagagagacctccagggtcttgatctttc

SEQ ID NO: 112495 - DNA, 446 bp, Homo sapiens
  misc_feature (1)...(446): n = a,t,c or g
nnnnnnnnnnnnnnnnnnnnnnnnnnnnnnnnnnnnnnnnnnnnnnnnnnnnnnnnnnnnnnnnnnnnnnnnnnnnnnnnnnnnnnnnnnnnnnnnnnnnnnnnnnnnnnnnnnnnnnnnnnnnnnnnnnnnnnnnnnnnnnnnnnnnnnnnnnnnnnnnnnnnnnnnnnnnnnnnnnnnnnnnnnnnnnnnnnnnnnnnnnnnnnnnnnnnnnnnnnnnnnnnnnnnnnnntaccctttcacaataaagcactcaacaaagtgggcataaaaggaaattacctcaacataataagggccatgtgagaaaagcacacagctaatatattcaatggtgagactgaaagctttcctgtaagatcaggaacaagactatgcctgcttttgctacttctattcaacacagtatgggagttctcctcgtaacaagcatggcgtaatgcggt

SEQ ID NO: 112496 - DNA, 439 bp, Homo sapiens
cacttacattttctttatgtcaacttatttcatgtaaaatacatttatttaaaacaatgttatttaaaaatgaaacttgctatcatattttagatggaaaacctgtagtataaactatcagaaaatacaattaagacaatactgttttagttagatgtttgttttgaagctgaagcctgttctatttttgttcaaaggggagattagtaatttttaggtattaaagatacactcaaccaaagggacagaatgggaaaggctgaaaggggaatgaataacgttctcatcgttcaagtcattgccggtgccacacccagagaaaaacaagcaccacaccagacagcctttcagcaagccgaaagaaaagaagaaattgatcagggattttgatgaaaagcaacaggaagcaaatgaaacgctggcatagatggaggaggag

SEQ ID NO: 112497 - DNA, 437 bp, Homo sapiens
  misc_feature (1)...(437): n = a,t,c or g
gagcacagctcgagccgcattcggcacgagcattggatgcatacatttaaagaaaacccaaaactttggaatctttaccaaggagggtatcttttgaaaaggacaggctggaacaagaacttgataaaatagaagtaaaggttgacacnnnnnnnnnnnnnnnnggaaacaaatacccttttgccccccggcctgaaggggggggccaaaatttggcctcatgggggcctggccctttggggggcagggggttctgggccctaaccccccaaagaaccggccccggggggcggggcccccaagcccaagctatttttggggttttgggaaaaaacggggtttaaccgggggggtaacggggcccggccctccggccctaggggagcccccccaattggccccccaaaagggaaagcgggatttacaacccttgtacg

SEQ ID NO: 112498 - DNA, 473 bp, Homo sapiens
gcgtcgactttttttttttttttttaatatcaattgagatttagtacaagttactaagctccaaggcacattacagtgttctgttaactacagaaatgtatagaaggacaaacggagcagaggctccatgtctagcatttcgctctactgttcaaaagcatccgggcagcaataaagcagaaacaaagacaacacgtgtagatccaacacattcaggtcagtagaaacaaaccaaaacattttcccccttcacaaacttgcaacaaaatacaccccatcccccccgacacccccttaccattttgcaaacaaaacagaaaaacaaaacaaaacagaacaaaataaagtgaagacttcaacacttggggcagtttaaaaggaagctttcaccattttataacatttttttttttttttttttttttttttttttttttttttaggcagcaacactggccttggcaaaaaaaaaa

SEQ ID NO: 112499 - DNA, 394 bp, Homo sapiens
  misc_feature (1)...(394): n = a,t,c or g
gtccgggggggcccttggcccccactgttaaataaaagggggccaacccccccacaagggggggggccccgcttcccgggaaaaatgcaaaaaaggcccttatgtgggtttttgaaaccaaaaaaaaaggtccccaaaagcccggggttaaagcctttagaagaaaaggagggcccaaattttttttgttttaatggggcccctttgtaaggaccaaaaggcccnnnnnnnnnnncccccggaaaaatcaggggtggggccttcccccccccannnnnnnnnnnnnnnnnccccgtcagtcaatcttatctggtaatgggatcactactgttatccagtgtcaatggtctcagtagtatttccattcaaaaataatttagcttttagattaagg

SEQ ID NO: 112500 - DNA, 400 bp, Homo sapiens
  misc_feature (1)...(400): n = a,t,c or g
cggacgcgtgggctagtgtgtcacgaaatcaatttaataggttgcaaccaacatttttttgnnnnnnnnnnnnnnnnnnccccaaacaaggggcctccccccaataaccccaccctttgggaagcccggggcgggggaacaattgggggcaaggatttaaaaaccacccggcccaaaaggctaaaaccccgtttttataaaaaaaacaaaattaacttggccgaaggaacaaacccctgaatccccacctcctgaaaaggtggggccccaaaaacccttgaaccccaggagccaaaggttgcagggacctaaaacccccttgtggccctccacccgggggaaaaaacgaaannnnnnnnnnnnnnnnnnnnnnnnnnnnngttaaaaacccgaattaata

SEQ ID NO: 112501 - DNA, 400 bp, Homo sapiens
  misc_feature (1)...(400): n = a,t,c or g
cggacgcgtggggacagagcgagattccatctcgaataaaaagnnnnnnnnnnnnnggtttttattgaaggtcggccgcagggcnnnnnnnnnnnnnnnnnnnnnnnnnnnnnnnnnnncctgaccaaatcacatgaggccgggagttcaaaacggccctgcccaacttgttaaacccccgtttttgttaaaaatccaaaatttacccgggcggggggctgcataactgaaaccccaaattnnnnnnnnnnnnnnnnnnnnnnnnnnnnnnnnnnnnnnnaaaaaaggttgcagggacctgaaataatcccactgccctgaaccctgggcggaaaaatgaaactccttttnnnnnnnnnncccaaaaattttttatggcggtggtttttgtaaccggaaa

SEQ ID NO: 112502 - DNA, 584 bp, Homo sapiens
ttttttagtcaccatttttactttctactgttgagatatatatatcacctctcattagtcccttaatacatacatttacataatcattgccctccttccaatttaatattccaaatctttaaaatagccaagattattctattattgtttctccgctaaactaggaaaccttgttgattccaaagagtcgtgaatacaatgctgaattcagggatggctggaagattaactcaataaatatttataaattacctattatctaataactcactgttataagtactgggaatgcagcagtaaacaaagaccctacccttatgaagtttacattctagtggggattatataaagatatttaacattttacctgagtgttatcacttgctgataagggatataggctgttttatgaacctcaaattataattaataggcactactactaagtctgtattccttattgactactaaagaaagaaaactagtcaggcatggtgatccacatctataatctcagctatatgggaggctgaggtaggaggatcacttgagcccaggagttcaggtccagccttgtcaaccta

SEQ ID NO: 112503 - DNA, 738 bp, Homo sapiens
tttttttgatagtgattctatccaaattggctttttatttattaataataaagtctactgacacatactgcttgcaaatagtatagacacaaaaattataaaaataaaccagtagatatttagggcagatgcaaaaatttgcacattaggtcattataaactagatatattaagcaaaaaaagcaaggtgcaaaccagcaagtatggatatattacccaattgtgtttttaaaagggggaaaggcaggatacttttaccatatgcatagacgatatctggaagaatacttaagaaaatgctatcagtggttgcctaaagaactgggtggatcagggagtgggcaggaaactcactttcactgaatatccttgtggtagtattaaaaaaatttgtgtaaatctcatttatgtacaaatttgtttaaacattttgactagaggttatatttaagactaagcccttggccaggcatagtggctcacccccgatcccagcgctttgggaggccgaggcaggatcacttgaggtcaggagttcgagaccagcctggccaacatggtgaaaccccgtctctgctaaagattcaaggactggccgggcgtggtggcgtgtgcctgtagtcccagctcaggaggctgaggcacaggaatcgcttgaacccaggaggcggaggctgctgtaagcttagatcacgccactgcactctagactggatgacagtgcaattccatctaaaa

SEQ ID NO: 112504 - DNA, 296 bp, Homo sapiens
tgaatgctgtgggccaagctggagatgcagggcagtgggagtgcagactgaaaaaatgcagacccctggggcactactcatttctcaggctctgatctgctgtagtactaggggtttactcaggtctgtgtctgcctcctttctgaataggccaaataatttatccaaacagctttcctacggcagctctccgctccacgtggccagataggagttccagaccagtgttgtctcctgggacattgacacagcagccaagtttattgatgctggggcaatcacaattggttggttgg

SEQ ID NO: 112505 - DNA, 469 bp, Homo sapiens
  misc_feature (1)...(469): n = a,t,c or g
aagcccttctgacctggaggggttctggcccacggaaattaccctgaaggaggggcaggaggtgnagaaagatggggaaaaaagaacaagtctaaaagaccaatttcnagaaaacaagaaggccatttgctcccctggccacacatgtacacatttgaagaccagtgcccaagaatataaaacttaaaaaaacatttaaggaatacatgtacatagttatcagcatgtaacacctgagaggcctgtggggaggggaactgggtgctgaggataggacaggagagagaatctcctctggtccattttttttaatattggaatcatgctaatactttacataaaaaaaaaattaaattggggacaggtgctgtggctcatgcctgtaatcccagcattttgggaggccggggcgagtagatcacctgaggtcagcagtttgagaccagcctggacaacatggtgaaatctc

SEQ ID NO: 112506 - DNA, 369 bp, Homo sapiens
  misc_feature (1)...(369): n = a,t,c or g
ggggccccccccggtatccccccccttttgagggcccaaaggggggggccccctggggtttaagggccaaaacccccccggccccaaggggaaaccccccttttttttaaaaattaaaaacccccccnnnnnnnnnnnnnnncccctttaccccccgtttcccnnnnnnnnnnnncccaaaaaccctttaaccccnnnnnnnnnnnttttattgcccccaaatttggcccctgnnnnnnnnnnnnnnnnnnnnnnccccccccttcccnnnnnnnnnnnnnngaaaaagaaaaaaaagaattaaagttagcctttataggagatggtcaaaagagaataaaatcaggttctaccagtatcatataatca

SEQ ID NO: 112507 - DNA, 405 bp, Homo sapiens
  misc_feature (1)...(405): n = a,t,c or g
catcaaaggtaattagatataaaaggtgcggagattctctctaaaataacttagcaggattcttgcntaatggcagaccaaggtcatgccctggttaagcagaatgctcagatgagcccaattaaagtttggtcaaggaagtnnnnnnnnnnnnnnnnnnnnnnnnnnnnnnnnnnnttaagattgggctgctttgcagatgccgctgacacacagagacctctgccaccagccacagtcaaactcaccatgttcttcaacatcgccacccatggtgagcccttgggctgcatcttctaactgtttgtagacaaagttccaaagacagcagaaaattttcatgctctgagcactggagagaaataatttagttataagggttcctgctttcacagaattcttcca

SEQ ID NO: 112508 - DNA, 392 bp, Homo sapiens
  misc_feature (1)...(392): n = a,t,c or g
nnnnnnnnnnnnnnnnnnnnnnnnnnnnnnnnnnnnnnnnnnnnnnnnnnnnnnnnnnnnnnnnnnnnnnnnnnnnnnnnnnnnnnnnnnnnnnnnnnnnnnnnnnnnnnnnnnnnnnngtcttagtcaatcctatcccacctcttcttccaccagtcccctcacctgatggtcccaacatttcatcatccaccacctcctggagggggtaccccgaggtgctccgctggggactctgctcattctgggggtgcggttgacggctggtcgtgatctttcccgtaatctgtcccctcttacggaacctagtctccgttctgtccatggccatcttctggacactgctaggatccagaagagtatgttatcaattctcaagcctaggagaagtg

SEQ ID NO: 112509 - DNA, 400 bp, Homo sapiens
cttgttccatgtgctccgctggctgcggacgcctgggagctgccgccagggccacgaggggagcggcacctggaagatgcgcccattggctggtggcctgctcaaggaggagttacgggtcttcgcctccttgtgtgcctggtattccgggtacctgctcgcagagctcattccagatgcacccctgtccagtgctgcctatagcatccgcagcatcggggagaggcctgtcctcaaagctccagtccccgaaaggcaaaaatgtgaccactggactccctgcccatctgacacctatgcctacaggttactcaacggaggtggcagaagcaagtacgccaaaatctgctttgaggataacctacttatgggagaacagctgtgaaatgttgccagagga

SEQ ID NO: 112510 - DNA, 359 bp, Homo sapiens
  misc_feature (1)...(359): n = a,t,c or g
gcgggacnnnnnnnnnnnaaaactgaccggggggcagttgcggaccatgtcaaccccggcccggaggaggttaatgcggaatttcaagcggttacaaaaggacccacctgggggggtcaggggcgcaccatttgaaaacaacatcatgcaggggaatgcagttatatttggaccaaaagggacaccttttgaaaatgtgtatgctgatggaaccatatgttaaaatatccttcaaaatcgagggagcccaacatatgaggtattttttattttaacatcaattcagtctttgttggatgaaccgaatcttaacagtccagccaatagccaggcagcacagttttatcaggaaaacaaag

SEQ ID NO: 112511 - DNA, 369 bp, Homo sapiens
atcggttcgaggattagcttcaaaaccctgggcaagaggcgccccctgtacgggcctgcggcagacttactttgcagaacaacgggccaggccccttccctctggccccgggggcttgaagtctagccccatcctggcccaatgcgctcttggtagccacctttcccagttgcccggccgccgccatgccgaccttactgcccctgcgcctgtgccggctgtggtcccgcaaccctccctcccggctcctcggagcggtcgccgggcagcggtccaaacccagtacttattatgaactgtagggggcgcatcctggtgccagcactgaggaaaataaacgagctttcttttccaagaccaaagagctgg

SEQ ID NO: 112512 - DNA, 359 bp, Homo sapiens
  misc_feature (1)...(359): n = a,t,c or g
nnnnnnnnnnnnnnnnnnnnnnnnnnnnnnnnnnnnnnnnnnnnnnnnnnnnnnnnnnnnnnnnnnnnnnnnnnnnnnnnnccaccacacccggcccccattcgactttctgtaagtgtggcaagcccacaaagcgacacggcacaaaagggcacggattctctgtatgcccgggaaggtggcgttaggacaggcgcccggggaaggtggcgttacgacaggtgcctgggaaggtggcgttaggacaggtgcccggggaaggtggtgttaggacacgaagcatagcggctacggtgggcagactaagctgattttccgggaaaaggctagaactacgaagaagcttgtactgaggcttg

SEQ ID NO: 112513 - DNA, 626 bp, Homo sapiens
  misc_feature (1)...(626): n = a,t,c or g
caaaaaaatattttttnnncccccttatcttttttattttttctaggtgcaaatgtactgtatttttaacttttatttagaacagaggtctcttggactctcagccccaggcttgactactttgtgccactgggagtactccctttcctcttcttcacaccatcaggaaaggcaggctgagagttacgctgcttgactctgcctcggtctatcccacaggtgatcacttactccagtcgtcatgtctacaataacttgactgaggaacagaagggccgagtggcctttgcttccaatttcctggcaggagatgcctccttgcagattgaacctctgaagcccagtgatgagggccggtacacctgagacaggctcttggaaccacaaggccccacatatccgcggccatgcacaacattgcacaattcaaaattctaggcaccattgttttgtgcaccagctcagtcacgttttcaaagcgtcggtatggtctgtcgtttaatttttgatgaaagtcaaaccaggaaagatatcccctcatgttacttcgcagccattttgtcctcgctccacttccgtcttctcctgcccggctcccgcgcccaaaccctcgtgccgctcgtgcc

SEQ ID NO: 112514 - DNA, 355 bp, Homo sapiens
  misc_feature (1)...(355): n = a,t,c or g
ccnnnnnnnnnnnnnnnnnnnnnnnnnnnnnnnnnnnnnnnnnnnnnnnnnnnnnnnnnnnnnnnnnnnnnnnnnnnnnnnnnnngcaaaatttttaaacatcctatctcaacagaatctaaagacaataaaaggataataagggaaaattatgaataactttactgttatgaattcaacaacttagcaaaactaatcaatttcttaaaaaaacacaaactgcccaatctcaggcaagataaaacagatcacctaaatagttctataactactaaagaaataattctgattttgtcattaaatatcctgaaaaagaaatgtccagaccaaggtggttttattatgggattttgcc

SEQ ID NO: 112515 - DNA, 493 bp, Homo sapiens
ggagtgcagtgacggaataatagctcaactgctgccttgagctcctgagctgaaggaatcctcccacctcaagccctgcgaagtagctgggactaacaggcatgtgcccactgcatcccagctaattgttaagattttttgtagcggatgaggtctcactatgttgcccagactggtcttgatctcctggcctcaagcagtcttcccgctttggacctctgaaagtgctgggattacagatgtgagccacccatgccccagctaaagttcatgttttaacccataaaaataggtaatgctttagtacacatgtatgtaaataaaaatttagatattgccaaaatgaaattaagaatcttaaacaaggaccagctaagacctgcggggacatggtttcgcaaataattggaaacattaagtcatgtaaaagtagttggaaaagtatttttataatgttgaatgagtttattattactctgtggaaaaaaaaaaa

SEQ ID NO: 112516 - DNA, 377 bp, Homo sapiens
cggtaccagccacagactcagagagaacccaccatggagctgtttgctggcgacaagaccaacgttaaggccgcctggggcaagggcggtgcgcacgctggcgagaatggagcgaaggccctggagaggatgttcctgtccttccccaccaccaagacctactttccgcacttcgacctgagccacggctctgcccaggttaagggccacggcaagaaagtggacgacgcgctgaccaacgccgtggcgcacgtggacgacatgcccaacgcgctgttcgccctgaacgacctgcacgcgcacaagcttcgggtggacccggtcaacttcaagcttctatagctgctggtcctacccactctttgcatacaaaaatg

SEQ ID NO: 112517 - DNA, 759 bp, Homo sapiens
atgtgtttttcatatcaagtgtagcagaccgaaccatgagtttctgtcaaatcattcagatttaaacaggtgttgattgccgttataaccttgtttcaatatattgcccggaacaacaacaacacaccgcggccaacaacatcatcaaaaaggtgtgttaatgagggaaggagagtggggaggaataatgtaagccacaaagaggagagagataaaagagagtggattcacccactctgaaaagtgtcccagcctgtggaagaaagggatgtccacaggcttccctggtcctctccttttccccggggaggcacaggctagagcaggcatgtgaggaagatgtcctcaggaggccaaggccctttctgagcattccaacagccaatgggccaggaacattccaatcaaaaagcaagaactaaactggaaaaactggactcctcagttaagcatgccctgccccatattcaaaaatgcctaaaatgtttttcggccaagtcacagggcaggcaccttgggtgcttctgcaagcctcaagaaaggtgtcaggttgggcgagggggctcaagcctataatcccagtgctttgggaggcaaaggaggtaggatcacttgaggccaggagtttgagaccagcctgggcaacatagcaagaccctatctctacaaaaattttttaaaattaggtgggcatggtagcaggcacctgtaattccatctactctggaggctgaggtgggagaatcacttgaaccctgg

SEQ ID NO: 112518 - DNA, 964 bp, Homo sapiens
cggcacgagcggtacgagcatcctgttacccctttatctctccaacaaatgccaaatatttaccgagactatattatattccacatgacactatgtagccaatgagatttatccatgacccttcatttctcaaattgatttaagaaaattctagtattttttctcagcaagaagaaagatgagaaaactgtaatagtaaaggcatatgtctcagtatgtgtttgtgtatatagttatctgctttctgtggctgggaaggtcatactactgaatcctatgacagtttatcacaatgagagagctatataaaggattacaaagaattagtgaaaatgtagcattttgttgctttttaaatagaacattttctgaaagtgtgtgtgctgtgttattcacttttaaagatggtatccatttttaagaactgacattgaattagaattttaagtctcctaaatttttctttatttttgtcatttaaaaaaccaaaacctcaagcacagcttgtagcacattgagttattggtagggtcaaatactgaaaatagaacctggcagcactttttatccctaagatggtattccatccttgtgttaggttatttattacccattatgtcaaacaaatatttcctaaggcatttaaaagttcattggtatataaacaaaatacaaacatatgggccaggctcagtggctcacctgtgtaatcccagcactttgggaggctgaggtgggaggatagcttgagctcaggagttcgagatcaaccctgggtgacattgcgagaccctgtttttgttaaaaagaaagataggaagatttgtgtatgtataacatgatcacaatcaatcatatggtcattttcagataatatagaccttcacatatacatgactgattacctgtaatgctgtatttctcacctaaaaagagacaagaaacaatttttaaaaaaaaaaaa

SEQ ID NO: 112519 - DNA, 826 bp, Homo sapiens
ttttttttttaattttttatactttggggtttcacttccaatctctaatactgaaataacccatgaatgacgtgaaatagtttagtccagaatttttaccagagggataccttctatttttatcattatttggggtttgaaaaattttttttttacacccttctaatttctttatttctcaaagccagataattctggctgtgtgaaaatgttttcttttttaaaattaagggttaaaattcccttttccaaaatcatgtttgattttgcctctttgcctttttccgttgtcctgaaaaattgttggcgtaggatttggcttctggtatggtgtttctgattgcttcctgttgagcacaaagtgagagccggccactgaggcagcccctgcccaggggtgctgtttttccaggctggggcatcggccgggcggccttcccggcaaaccaagggctggggggcaaaggggcatgatccagggtcccccagggtgggctcagctccagggagaggccacccacgtggcagccccacctcttgagagcccccagtgccggagcagaaaggaccctggacccagaggcagatactgcggggtggtagaaaaggtagagtaggctgtggcaatggaataaaacacgattaaaaacgttaaaaaaaaaaaaaaagggggggccgttttaaaggatccaagtttacgtccgcgggcttgcaacgtaatagtttttttatagggccacctaaattaaattcacgggccggggtttaacaacggggggacgggaaaaaccctggggttacccaatttaatccctttgaggaaaaa

SEQ ID NO: 112520 - DNA, 680 bp, Homo sapiens
agactcttgcctcaatgcatacccttctttaacaagagacttccattcaataaaggccaaacctcagataagagtaactatcatgtaaagactgtggtttctgcttctgggccctctccacaatcaacgtactaccagaaaccaacctgatgttatacaaaccttatacactgaaatgcttaaggattaaagaaaacactaatgtctaaaatgccactcaaagcagaataaatctgcagctggaaaatctgacctttagccctgaatctgcctctaataagctgtgtgatctggggctaagttagtaagtcactctgaatccccaatttctttatcagccatttggacttcctacttggggtgcctatctctcaataggcagaaagtgaggtagaatgagattaaggatgctgggcacagtggctcacgtctgtaatcccagcacttttggaggcaagggtgggtagattgtttggagaccagcctgggtagacatggcaaaaccctgtctctacaaaaaatacaaaaattagccaggcatggtggtgcaggcctgtagtgccagctacttgggaggctgaggagggaggatcacttgagcccaggagataaaggttgcagtgagctgagattgcactgctgaattccagtctgggcagcagagggaaaccctgtctcaa

SEQ ID NO: 112521 - DNA, 378 bp, Homo sapiens
catgaccctgctgaaaatctgtgaccctttctagtctaacctaccattaggattcattgaccttatctagcccctgcataagctctgctcagccctgccccaacttcctgtgcccagggcctccctgcagttcctaagcacactcactcctgccccaggccctttgcatcactgctccctctgcctaagaacagtctcctctggcatcttcatccaccagacttcagcccttcagtcagatctcagttcagctgtcacttcctcgggtggcagcaccgtcccccacacccaccccatccaccctccatccattcatgctcctgtactttctcaaaagcacttctgaacttgaacatgcactgtgctacccactctgtc

SEQ ID NO: 112522 - DNA, 630 bp, Homo sapiens
gaagccatcttttctgcttaactttcagaggcatccagagcttttgcaaccctatgaccctgaaaagaatgagttgaatttacaaaatcaccagccttctgagagtaattggctaaaaacgttgacagaagaaggcatcaacaataagaagccttggacttgctttcccaaacctagcaattcccagcctaccagtccctccttggaagacccggccaaatctggtgtgacagctattcgtttatgcagctccgtggtcatagaggaccccaaaaagcagacctcagtgtgtgtaaacgttcagagctgcaccaaggagagggtgggagaggaggccgtgcatgtgttcagaaaggctgctgatgacacctgggagccatttgcctctgggtaagttgccaaagaaccctcccacaggacttggttttatcttcccgtttgcccctcacttggtagagagaggctcacatcatctgctaaagaatttacaagtagattgaaaaacgtaggcagaggtcaagtatgccctctgaaggatgccctctttttgttttgcttagctaggaagtgaccaggaacctgagcatcatttaggggcagacagtagagaaaagaaggaatcagaactcc

SEQ ID NO: 112523 - DNA, 403 bp, Homo sapiens
  misc_feature (1)...(403): n = a,t,c or g
ccacagtgattcggccgccgcgccggggggtgggggggctgcgcgggacnnnnnnnnnnnaaaactgaccgcggggcacttgcggagcatgtcaaccccggcccggaggaggctaatgcggaatttcaagcggttacaaaaggacccacctgggggtgtcaggggcgcaccatttgaaaacaacatcatgcagggaaatgcagttatatttgaaccaaaagggacaccttttgaaaatgtgtatgctgatggtaccatatgttaaaatatccttcaaaatcgagggagtccaacatatgaggtatcttctatcttaacatcaattcagtctctgttggatgaaccgaatcctaccagtccagccaatagccaggcagcacagttttatcaggaaaacaaacgg

SEQ ID NO: 112524 - DNA, 374 bp, Homo sapiens
ttgatgggtcgcctgtgagccagctcagcccaagcccaagcccttacaccatgcaccagcatgtccaggcctctcaacggcaggggcacacatgggggctccctcagctggggatctctcaggcttttttcactctccacaagtggcaggttcattcactcattcctctgtgtgtgcattcattcactaattccttgatgtgtacattcattcctttgtgtgtattcattcactcattcctgtgtgtgtgcattcattgactaattccttggtgtgtacattcactcattcattcctttgtgtgcattcattcattcactaattacttggtgtgcacattcattctttctttcgtgtgcattcattcactcact

SEQ ID NO: 112525 - DNA, 361 bp, Homo sapiens
  misc_feature (1)...(361): n = a,t,c or g
nnnnnnnnnnnnnnnnnnnnnnnnnnnnnnnnnnnnnnnnnnnnnnnnnnnnnnnnnnnnnnnnnnnnnnnnnnnnnnnnnnnnnnnnnnnnnnnngggctaagcccaaaaacccaaccattttggaaggttaaggcagggggtcaaattgaggccagaagttaaaaacaacccgggccaaaagggaaaaaccccccctttnnnnnnnnnncaaaaataacccaggcggaagggcttgcccctgaagcccaacttatttggaaaacaaaagggaaagaataatttgaccccagaaggccagggttgcagggacccataattgccccattgctttccaccctggccaaaaaacaaaaaccct

SEQ ID NO: 112526 - DNA, 336 bp, Homo sapiens
catcagaagtataattcaaggcaataactgtctcattttctgccctcagagctgtgtttgctacttaaaatatctgtgaaccaatgaaaatttcaaatgagcagcaggatgtaaagcaaatgagaaatttaagctgtgctcccagaaggcaattattattaaatatatgtaccacagcattatcatcatcatacacatgaaatcaattatcaccctaagcaaccacaatttcagttaccttattttccttaggaagtctaccatcacttaccagatttttacctaaatgaattattattcatgtcaaagaacaatagtttattataccaacatttg

SEQ ID NO: 112527 - DNA, 360 bp, Homo sapiens
  misc_feature (1)...(360): n = a,t,c or g
cctttatggtaggcggcggcggggtcggcggcgggctcctggataatgccaaccccctcatctaccaacgctctggggagcggcctgtgacggcaggcgaggaggacgagcaggttcccgacagcatcgacgcacgcgagatcttcgatctgattcgctcctgagcctggcctttgacccctcagcctgcatactggtatcctggtcccagctcctggcagggctgttaccggtgttttcttgaatcactcacaatgagaaactaacattttgctttttgtaataaagttaatttatattcnnnnnnnnnnnnnnnnnnnnnttttttattaaggggccgcggacttattcctttttggg

SEQ ID NO: 112528 - DNA, 375 bp, Homo sapiens
  misc_feature (1)...(375): n = a,t,c or g
nnnnnnnnnnnnnnnnnnnnnnnnnnnnnnnnnnnnnnnnnnnnnnnnnnnnnnnnnnnnnnnnnnnnnnnnnnnnnnnnnnnnnnnnnnnnnnnnnnnnnnnnnnnnnnnnnnnnnnnnnnnnnnnnnnnnnnnnnttttgcaacaaaccttaaagtgcggataaaattaagacattcatagaaaaacataacttttctaactcacagaactaaaaaatgtgaatggtcctataatgattaaagaaattaaatatgtaatttaaaactttcctataaagacagtttcaagcccagagggctttaccagaaaattctattaagcacataaggaaaaaacaataatcttttcaaaatttttccagaaaatacaaca

SEQ ID NO: 112529 - DNA, 367 bp, Homo sapiens
gtgccgcccgcctatagggagtggagcgagagcctacgactagatttgcatctttacgtcctgcacggaggctgctacacacatgcagaagtcatgctggtggcctggacagtgaagggagagaagtggatttgggagacatttaggagatggcaccaaaagcgaaggaagctcctgctcatcctaaagccgaagccaaagcgaaggctttaaaggccaagaaggcagtgttgaaaggtgtccgcagccacacgcaaaaaagaagatccgcatgtcactcaccttcaggcggcccaagacactgcgactccggaggcagcccagatatcctcggaagagcacccccaggagaaacaagcttggccat

SEQ ID NO: 112530 - DNA, 403 bp, Homo sapiens
  misc_feature (1)...(403): n = a,t,c or g
aataaatattgcctaactttgttctattaccaaacttgtggcaactttactgtgacgagatttgaggagaaagataaaatttaatacccaattgaaaatagaggggtaaacaaacaagcaaaaattattattattattttattattttttgagacacgatctctctgtatcatccagggctggagtgcagtggtgcaatcatgggctcactgcagcctcaaactcccagggctcaggtgatcctcccacttcagcctcccaagtaactggggcctaggagacatggcactaacacacctgggcttaatttttgtatattttggaggaggacaggggttttcaccatgtttcccctgggctgggtcttggaactcctnaggcttcaggcgttccaccccncctc

SEQ ID NO: 112531 - DNA, 382 bp, Homo sapiens
  misc_feature (1)...(382): n = a,t,c or g
cgtttctagtgccactgagggcgcatgcagcctctggaccggaaccaaacagtgacccagactgctacagccaccttctgggcaccatatcacagagcagggaccccaggctgtagggaaagagcttgcagggctcctggatagaactgtactttagcaatgataggaaggggaacagtgctccaacatcagtttctgtttataatggtgacatnnnnnnnnnnnnnnnnnnnnnnnnnnnnnnnnnnnnnnnnnnnnnnnnnttcaaagtgcttccttgaattcaagtaatcctctgccttgcttcccagagaaaggctgcagtaagcactgttcatgctgctgctcttccgcctagacacaaagcgagaaccttttttaa

SEQ ID NO: 112532 - DNA, 372 bp, Homo sapiens
  misc_feature (1)...(372): n = a,t,c or g
cttttttaaccagtacatatagatttgatttttatggataattctagccttaaaaatccnnnnnnnnnnnnnnnnnnnnnnncgggggcaaaccccaaaacccccaccctttgggaaacccagggaaaagggccccctgaccggggagcttgaaacccacccgggccccggaaaaaaacccccaaacnnnnnnnnnnnnccccgggtaaacaaaccccccccaattaaatttaccggggtttttttttaaaaagaaaccaaccggggggaatcccnnnnnnnnnnnnnnnngggggggggaaaacctgtctcccccccaacacccttgaagggggcgaaaaaaagggaaatccgcgggggggggccccccag

SEQ ID NO: 112533 - DNA, 384 bp, Homo sapiens
caaacaccaaaactgccattagtttggatattatggatttggtttctggaaaagtccattgtgatgccagcatggtacaggggattccctctcgccttgtcctaagcctgtcatcctgcagaacccatcttacagtactgtgaagttccagaccataccaaccaaccctcgccaataggcatttgtggcaataggaagaaaaagctgatggagggctcatctgtatttggtttctctctcctatctcctgcatccttaccaggcaaaagtagaagaaaagatccaagaggtcttcagttcttacaagttcaaccaccttgtaccaaggtaagctgtggttaggagtttgaggggatctgggagaacaccaccatgcagcagcct

SEQ ID NO: 112534 - DNA, 712 bp, Homo sapiens
  misc_feature (1)...(712): n = a,t,c or g
catcgtcacccctcaccaggtgcccagcttcccatccacccacgtgacccgcaggtgtctgaaaatgcacaaaatgtccaaataggaccacaagaagatcttaaagacacaaagaacattctacatagtttgtcaaatccagcatttgacggtcctctgggtgacccggagaacaccaaggctgtgagaaatgggaggcctcctggcagctccactccccagacccgcctctgccagggctccaggctcagcaggcgcctgtgcgggacagggcgacggttcaagaccaaagtccggctttttagaccagaaccctccaaatccaggcgggcctccctgctggggtcctgtgcggtcaggagtcccagggcattcccagggtggctgtgcaaaccctttgttccccaaaagatattgggggcttgtccccccnagcttagccttgccccatgcggtggccacagcctcggggtgagttccggttccaaaagtaccggctctcccttacgatcaagtgttcgaatgtgcttgaagcattccagacacaccaaggcctggacctgacttcattgacgcctacttaggaaaaattgaggcagtctgccaagctttcagcaactgcttaaaaagctcaaaatggcaagtttttcctcgtgaacgtccttgtcttcagaagtctttttttagactatctggaaaagcaggcgatgcg

SEQ ID NO: 112535 - DNA, 383 bp, Homo sapiens
  misc_feature (1)...(383): n = a,t,c or g
ngctgcttcaatcaaagttgctgtttaccaccaccagctcacccttgaattatttcccgggcaaagccaagaaccttcccaggataagtcccaatttgggggcttacctgtcctgcatcactggggaaaggcaggaatcgggggtggcaagagctcctcagtagcaggcaagagggcctcagcatggagctgtgtgattggtgacttctcttgagatgctgtggcacctgcatccttggcaaaggctggtggaacagactgtgacttctgaagcaatagctgcctaaaatgaaggtgcaggctccagaattctagtcatttgtcacagaaagattgaagagcttgacagaattatttgttaaagagaatcgtgaattcagaat

SEQ ID NO: 112536 - DNA, 998 bp, Homo sapiens
ttttttttttgagatggagtcttgctctgttacccaggctgcactgcagtgagctgggatcgcgccattgcactccagcctggctgacagagcgagactgtctctaaaaaaaaaaagactcaagtggaccctacaatgaaccctacacatcccaatagaagcccttttttatgctgggggaagcagccctcaaaacatgatagcttgtatcacagcagagtggcacgtgctggcacacctcacagaagcaccctggccctggatgcctgcaacctcagaagagtgcagctcccagagggaggcagccatccatctgggatgggcctaagcatggaatcctaactcctgattccgtctcctatttcttgcttggctacgccagttcccaaatctggtagatgtccatgcccatgtgctcctgctgggactcaattcaggctatgtatgactatgaagtcaggcctcatctgcttactggctgtgtgaactttttgtatcttggttttcttcatccatgaaatccaagtaatactacctaattgttactgtggagattaagttcaaatgcaatgtatagtaatattaagcaatttcttagttattattctagccagtaatgggacttcagaatcttttattacacaatataagaatatgtatgtaaagacattttggaatttcctggatgagaaggaagtcatgggctgggcactggtggctcacgcctgtaaccctagcactttgggaaatcgatgcggagtggatcacttgagctcgggagttcaaggccagcctgggcaacatggcaaaaccccatttctacagaaaatacaaaaattagctgggcgtggtggcacccgcctgtggtccagctacttgaggctgagacgggaggatgagggaggtcggggctgcagtgagccaaaataacgccactgcactccaacacaatgggcgacagagtgaacccaatctcaaaaaaaaaaaaaaaaaaagtc

SEQ ID NO: 112537 - DNA, 392 bp, Homo sapiens
  misc_feature (1)...(392): n = a,t,c or g
ccaaacactaaataaatcaagggtcttaaaaatcttagaaaaaggttcaagtaatcatggaaggcaataaataaataaccataaacagaagacagaaacagaaaacaaataataaaatggcagacctctccctaacatatcaataattaccttaaatataaatggtctaaataaaaaaattaaaaggcagagactaacagtttttattaaaatgacaactatatgctgtttacaagagattcgtttcaaattcagcaacacaggatgaaagtaaaatgatagtaaaagacagatcatgcaaacattaatttaaaaaaaaacaaatggttacactcatatcagattcagagcaaagaaaatcgcaaaacnnnnnnnnnnnnnnnntttttatt

SEQ ID NO: 112538 - DNA, 367 bp, Homo sapiens
gacagacggacggatctaacctctgttggatcctccaggcatgaagatagctctgggggccgatctgggcatccaacttcttcaccttatctctgcagaaccccaggctgctcttgggctctccttctgcggttcatccggacgcccccctatcggggggggcgcagctactagatgtgccccgaggacagggaatggagggatcagagatcctgagaaacccatttggaaataatgtcccctgctccccacaggtggacttcacccttatctcaaaaagagacttcgcactcctcagtctccaggggcccttgaaagatgcgaagagctgaggcctccatcaactcctcaaaggccctgaggtcca

SEQ ID NO: 112539 - DNA, 433 bp, Homo sapiens
  misc_feature (1)...(433): n = a,t,c or g
naaaggccagccattaagttaagggaccnaccnnnnnnnnnnnnnnnnnnnnnnnnnnnnnnnggcacttaggtttaatcagtgattggtgccatacatctggtacggtttgatgagaaacacttggcgcgaacttgcttgcctgctagtgcatagctgatgcgtaatttcaattggcaagaaaagtgtgcagagcacgctatacagaactgtgctgctggaaacggagacattacagaggatatgctattgggtaatggcccttattcagacctggaacgtcaaatggcactcccagacgctgtttatcagcagtgcgcataggccactaaatgcacttgggccacaattcctgaagagggagtcccagaacaatcctttttacatatcatgctagggtcataggaaccctatgcacagtttcttttcagat

SEQ ID NO: 112540 - DNA, 370 bp, Homo sapiens
  misc_feature (1)...(370): n = a,t,c or g
cccatgtaagaagtaactgatcaactgctcttgattaaagttataaacacttttactctgcaaaagaccttgtcaagagaatgagaagtcactccacagagtgttttgcaaaagatattttgatgaaggattgtnnnnnnnnnnnnnnnnnnnnnnnnnnnnnnnnnntattaacacaatgagnnnnnnnnnnnnnnnnnnnnnnnnnnnnnnnnnnnnnnnnnnnnnnnnnttgggggtggggatgaaagggttgattggatgaagtcctccctattttacaaaccgaataactaatctctacaattcactattcgaatatcacaagagcaattacgattctcattcgttgaccactaatataatggaa

SEQ ID NO: 112541 - DNA, 434 bp, Homo sapiens
gggctttgctccttccttctccgcgccttggagccggatccggccccggaaatccgacctgcagacgcggcacctctactgcgtataggccgtagctggcggaaggagagaggcgggcgtcctgtcaacaggccggtggaagccgtgctttcgcggctgcccggtgcgacactttctccggacccagcatgtatgtgccgggcgactgccatgaactccggagccatgaggatccacagttaaggacatttccagggtggaatcctagtctgagatgagaaacacagaccatctctgatagctgtgaaaactgagaacaggccagagaaatccaaatgtaagccactttggggaagagtattttaccttgacttaccttctgtcaccatatctgaaaaacttcagaaggacattaaggatctgggagggcgagg

SEQ ID NO: 112542 - DNA, 414 bp, Homo sapiens
ttcactttaacaaaggcagaactttctaacaaagagctgattgggtagtttggagaggcagtgagctcccaggacctttaggacccactaagcagagatactgtagaggggttggcaggttgaagctgatgatctgtaagaattgttctgacaagtttttattccatgagctttgctcgtcgtggtctccccaaatttcatttctcagacccagtgcagtctttgaccacccagatcctctgatttctatgtctctgccccgtctgtgtccccagtgccccaggtgctaaagagctgtgcataatttgtggaggagtatggagtggtggatgggatctaccgcctctcaagggtctcctccaacatccacaagcttcggtgagtcaaacagagtgggagggctctgtgaccagg

SEQ ID NO: 112543 - DNA, 414 bp, Homo sapiens
aactggaagaatattatagaaaacttggaattcatccataatacaaatatgaagctaaactattaagagtagatggaatcaacaatgaaactagtattttgaaggcagagatcggacataagatatcctaaattcagcctaccaaaagcgggtacctctaggaaccatctcaggattaaggaaataccacagggccctttggtaattttttaaaattaaagtttaaaaggcttcattactactttggtactgtgagttgaatatcccctgtttcaaaaatccaaaatgcagctgggtgctacttgagggactgaggcgggaggatcagttgagccatggaggtcacagctgtagtgagccctgatggcgccactgcactccagcctgggtgacagaacgagaccctgtctcgaa

SEQ ID NO: 112544 - DNA, 397 bp, Homo sapiens
  misc_feature (1)...(397): n = a,t,c or g
ntaattagatataaaaggtgcggagattctctctaaaataacttagcaggattcttgcctaatggcagaccaaggtcatgccctggttaagcagaatgctcagatgagcccaattaaagtttggtcaaggaagtnnnnnnnnnnnnnnnnnnnnnnnnnnnnnnnnnnnttaagattgggctgctttgcagatgccgctgacacacagagacctctgccaccagccacagtcaaactcaccatgttcttcaacatcgccacccatggtgagcccttggactgcatcttctaactgtttgtagacaaagttccaaagacagcagaaaattttcatgctctgagcactggagagaaataatttagttataagggttcctgctttcacagaaatctaaca

SEQ ID NO: 112545 - DNA, 465 bp, Homo sapiens
tgcgcaggcgtttgtagccacttttaagttttatcagctagttcatgcttgcgttgaaagagtggtcgtttgcgctgggtcatcactgtgtagtattggggatacttaggtgagaaaaaaacttaacgctagagacgttcacgcactagtggagaagccaggattgttgccctatagttacagtagataaaagtacctcagagaactgcgggggctcccaacctggacgcttgcaccggagtattaaatccagctagagaatggcatgtgcaaagatacagagcttttagaagttgcctgcattccttgggcccttcctcacatcattccaaccaacttccatccttacaatcgattactttcctgtaatagctacagtcaaatgggcagctgaagatgatgatgatgatgatcttgacaccgagaagtagaagaccaatgaagatgaccagactgcaaataagg

SEQ ID NO: 112546 - DNA, 443 bp, Homo sapiens
  misc_feature (1)...(443): n = a,t,c or g
gtactctgcttatctaaattggcacatgatgcctgcccaccatctctcagaaattgtgagaggtactgctcatccatcaagccccacctaacagcctgggaggcacaaggaggatatttctctttctctgctgcctgttcctcaccaaactgaatcagcatttcaaggagctcaattcccattctgaaaggtaataccttctaaagatggggacggcagcacttatggaaattctaacccatcagctgaaagataggcatgtgaaagttagagagttaccccacagtaacctccccaaaagctctccatttgaaaaaaatttaattttacatatatgtgtatatacacccacacataaacacacatacatacacatatatgtgtgtatatctatgtacatgcatacatgtatgtgtatatgtgtgtatatatatgcatatatn

SEQ ID NO: 112547 - DNA, 586 bp, Homo sapiens
tggggtctcatctttgctgttctccagcactctctggtgacatcttcaggtgtgggagggacccagataagtagggcttgaagtgaatccccagcaaactgcagcagccctacagaagaggtgcctgactgttcaaaggaaaacagaaagcaacaacaacatcaaccaaaaagtccccacgaaaacctcatctaaaggtcagcagcctcaaagatcaaaatgagacaaactcatgaagatgagaaaggaatgaaaaacccctcacaactcaaaaggccagagtgacttgtttactccaaatgatcacaacacctctacagcaagggcacagtcctgggtggaggttgagatggatgaattgacagaagtaggcttcagagggtgggtagtagcaaacttcactgagctaaaggagtacgctctaacccaacatattggaacgaatcccagaacttaaagattggttctctaaaataagaccgacaaaaataaaaaagaatataacggaaggaagaaaacctccaataagtatggggttatatatagaggccaattctacaaaacactgccttccctgaagggaggg

SEQ ID NO: 112548 - DNA, 350 bp, Homo sapiens
ggagcttcatatagacagcgccggcgcacgtgaaagccgaacgggcactgtgcgactttgtgcctcactgaggaaaaataactaaacatgggcaaaggagatcctaagaagccgagaggcaaaatgtcatcatatgcattttttgtgcaaacttgtccggaggagcataacaagaagcacccagatgcttcagtcaacttttcagagttttctaagaagtgctcatagaggtggaagaccatgtctgctaaagagaaaggaaaatttgaagatatggcaaaggcggacaaggcccgttatgaaagagaaatgattacctatatccctcccaaaggggagacaaaaaagaa

SEQ ID NO: 112549 - DNA, 420 bp, Homo sapiens
  misc_feature (1)...(420): n = a,t,c or g
agtgccctcaacttggcagctgaggctctgcttctgcaggagtgcaggtagatggggtccggctctgtcctctccctcccagggcagatgaggctctgctcctgtgggtgtgcaggtgggcggagtcctgctctgtcctctcccacccaggacagctgagggtctgctcctgcaggagtgcaggtggacggggtttggctctgacctcttcctcccagggcagctaaggggtctgctcctgtgggtgtgcagctgggcggagtccggctctgttctttccctcctagggcagtggatgccccaggcttgtctgttcccgctgagtcnnnnnnnnnnnnnnnnnnnnnnnnnnnnnnnnnnnnnnnnnnnnnnnnnnnnnnnnnnnnnnnnnnnnnnnnnnnnnnnnnnnnnnnnnnnnng

SEQ ID NO: 112550 - DNA, 429 bp, Homo sapiens
  misc_feature (1)...(429): n = a,t,c or g
ctccattcaaaaaaaatacgttatatcgccgtatgataagtttggtgattaataacgcacccacaatcttaaagaaaccgtaagttggtaaagtttttaaagtttatgcaatatcctgccgcttcgctgcttttggtgtcatttttgtgccagctgttgcttaaaagttaactttacttcaccatcggagtcctgttcagcctgtggctgcctgtcgcaaaaggggtgagtatgattacgctgtggggtcggaataattcaactcacgtaaaaaaagtattgctgacgctcgaagaactgtatctaccttatgagcaaattctcgcgggccgtgagtttgggatccctcncnntnnntnttttgtgccgcaaggcgattagttggtaacgcagtggtcccagtccgacgtgtaacgcggcagtaatccg

SEQ ID NO: 112551 - DNA, 1020 bp, Homo sapiens
cgtgcactaatacgactcctccccccaaagtccgatcaaggtggggaaacggccaagggttttttccaagtcacccccgtgttaaaacccccggccagggcccaaggctggcaatgcccgccggtcggccttatagggttaaacgggggcggcatcctgcgaccgggccattggactgggttcgaaagccaaaggtcattacgccccagggtaaatctcgcaagttcattaagggcgctatagaccagtcgaagacagtcaggcggcagtagtgcattgaacattcagcaccccgtcaccgcctgattgctcaggacctctatatcgacgaaatggagttcatcatatgactcacgctcgcgacgacatcagagtaggcacactgtgcctccccttcattggtaactgctggctaataccatggggtgaagtggtcagcaatccattaaaggcgcagcggctcgctgaggaatatcgggaaaggcaggaggcagcatgagatccggatctgtttgcagtggagctgcggcgatgcccatagaagaaccggcgctgcgcagctggcagcgcccgttccttaaatgggctggcggcaaatattcgctgctgccggaactggatcgtttgatccccgcaggtaaacgccttattgagccttttgtgggtggcggctcggtgttccttaactcagacaagcacgaacgcttccttctggctgacgtcagcgctgacctgattaacctgtatcagatgctggcggtggtccccgattcggtgatctatgaggcaatgaaggcattcaggcatcttaatgatgccgaaaactatacgttaattcgtgaagcattcaacgcgcagcggctggatgcggtcgagcgtgcagcagcattcctttacctcaatcggcactgcttcaacggcctgattcgttacaacctggacggtttttttcagcaaggccattaagaaagataacgccaggtttttcccagacaaagcgttgtacagcggacggacagt

SEQ ID NO: 112552 - DNA, 274 bp, Homo sapiens
  misc_feature (1)...(274): n = a,t,c or g
atannnnnnnnnnnnnnnnnnnnnnnnnnnnnnnnnnnnnnnnnngnnnnnnnnnnntttacccnnnnnnnnnnnnnnnccnnnnnnnnnnnnnnnnnnnnnnnnnnnnnnnnnnnnnnnnnnnnnnnnnnnnnnnngcaaactttgtagggacccaaaaccttttaaagtcaacctgcgggcttgcaacctgggcactggccgccgtttaacaacggggggacgggaaaacccctggggttacccaatttaatcgcttggcggcacaaannnn

SEQ ID NO: 112553 - DNA, 381 bp, Homo sapiens
  misc_feature (1)...(381): n = a,t,c or g
gnnnnnnnnnnnnnnnnnnnnnnnnnnnnnnnnnnnnnnnnnnnnnnnnnnnnnnnnnnnnnnnnnnnnnnnnnnnnnnnnnnnnnnnnnnnnnnnnnnnnnnnnnnnnnnnnnnggaatttnnnnnnnnnncggggttcccccgggtaccccagtaggacctttaaaagtcaccctgcggccatgcaacttgggcatggcccgtggttaaacaacgacgggatgggaaaaccccgggggtaaccaaattaaaacgcttggcaacacacaatttaagacccttaaacgggctggaatattggctgtggctccaaccgaaatttttccgcactggtaaggttaaaggaaagggggcaaaatacaggaggcccggttttttgg

SEQ ID NO: 112554 - DNA, 336 bp, Homo sapiens
  misc_feature (1)...(336): n = a,t,c or g
tttggtttttaggccccctggccaaaaggggattttcttccaggccatttaattgggtaacccccgggtttttcccctccccccgttgttaaaccccggcccgtgcccagcttgcaagccctcaggttggctttaaagggtcccccccccgcccccccgcttggggggccaaacttgaccccgtttccnnnnnnnnnnnnnnntgtgagaaatcattctgctcgtggcgtcatggcggaatgggaagcggagcaggcatcccatgccaagaggaaaaaagccataaagagggacagagagagaggaaaggagctgccaggctctttttaacaatca

SEQ ID NO: 112555 - DNA, 186 bp, Homo sapiens
tgtcatggcggaaacagcggttatcaatcacaataaacgttaaaatagcccgcgaatcgtccagtcaaacgacctcactgaggcggcatatagtctctcccgggatcaaaaacgtatgctgtatctgttcgttgaccagatcaaaaaatctgatggcaccctacaggaacatgacggtatctgtga

SEQ ID NO: 112556 - DNA, 572 bp, Homo sapiens
  misc_feature (1)...(572): n = a,t,c or g
cgtccctttccattttgggacgaaaatgggacgggtgtgacgtaacaatattgtatacaaacaagaccattttggacttcctaaaaagcgttcaacgccccaaaaaaggaaaagaaattagggttgtctcctggccccgaccacccgaagcaggttttaatgggaccggtatgtgagttagagcaaaaaacaatacgcgccatcctcgcacacatacacatacacacaggtacgcgttcacacagacacatacatactcgcacacatatggtgacatacacacacactcacatacactcttgcacacacaggtgagccctttcagaataaaccaccatactgtcactcgagcccagtgcttcagcacatttctcttaaaaacataaacnnnnnnnnnnnnnnnnnnnnnnnnnnnnnnnnnnnnnnnnnnnnnnnnnnnnnnnnnnnnnnnnnnnnnnnnnnnnnnnnnnnnnnnnnnnnnnnnnnnnnnnnnnnnnnnnnnnnnnnnnnnnnnnnnnnnnnnnnnnnnnnnnnnnnnnnnnnnnnnnnnngcgngcatacaatagcaagct

SEQ ID NO: 112557 - DNA, 1429 bp, Homo sapiens
atttcataggatcccttataaaggcacgaatccctcatcctgccgccagacaatccacaaacccacgggtcacagacgtcgggcatctcttccacaattcatgtcactgcacaggcccaaagccttgtgccgataaggcagattagttttaaataacccgggggtggtacggtccaacacaagcttcaataaatattggttcaacgtatgagtgagtgatttgaaaatctaccagttgataagctctttaattcccttttctattgagagtttgtcctaacttagaggactctgacgtttaagttataaactcccttgtgctcggctgttagccttggcatcgacttgagcctttttctgtagagttcctttctgaggacaatacttactcaggggcacccatgcatccttatcagatgttctatgtggacatgattcaattatctataaccgacatgtgcaagaaataacatttttttttaaatcaacttccctttttaagttcccacccctcctgcgtggtgtactgtgaaattcagcctctgtcatttcaggttaaacccaaggcaatctcaaaaccaggcctcccaggaggtttggaggcatctgggaagcctcctggtcatagaccattggtcccctcattggtcccctccggctgttatgagatccccaggtccccttctgcatgcaggattcgctcaagtctgcagaccttccctggggcatgatcaggacaggggccgtgttctgcagctgctcagagacccgcaggtccccttctctggctgtcatcattcccagcttccggcctctttcctcctctccctgagcccctggtcccctacagtcatgtctgttgggagtccacagctgttgtcacagtcatggtgatctttgccaatggagaggatatcgtggggttggcttcctcccatagaaatctctgaaaagaagaaccgctgatctcacttgaaatgggaagaattgtggggaaaacctacaaatcctatcacaaaggtttattctgcaacgtgagtggagtgcaggcgtttcccagatcggcagccaccacgagggccttcctggatggggggctgacacacatggctggggaagaggtccggaaggggcccaaaaaaacattgcctgggacgccttcaaaatttaactttattcctcccgaaaggagaaaaaattatccaggggggacccctggagattggaaaaacggcctttcccaaagggcttaagaggcccaaaggcccaggcctttttatcaaaaatatttttaaactggagccaacgccccacccggaaattcttttgtttctctaagttccgacacttataccccagggttaattcttttggtttttaagctccaaatactcatacggggggaaattttttgttctaaagtaccaaa

SEQ ID NO: 112558 - DNA, 646 bp, Homo sapiens
  misc_feature (1)...(646): n = a,t,c or g
ccccctctttggagcccccacccggggttccttttagtggaaaaattaaaacaccctgtgccacaaaagaaaaaccctttttttaaaaaaaacaaaaataccccggcgggggggggcccccccttaacaccccctttttggaccccaacggaaaaatttttttccccctaaagcgggggtctcctgtgtgtaaattnnnnnnnnnnntctcaccgtggggcaaaagaaaaaattcctttttaaaaacccccccaaaaatttttaacccccaatttttgggggaaattttttgagnnnnnnnnnnnccttggtttnnnnnnnnnnnnnnntttggggggaannnnnnnnnnnaaccccgtcccccgtttgggaaaaaaccccctggggaggcacccaaaaccccattggccgcacccaaaacccttttttccccccccctggggggcttaggcccaaaaatttcccttaccctgggaagggggggtcccattaaaccaaattttacccccgccccccacaggggggnnnnnnnnnnnntcccctttttnnnnnnnnnnnnnnnnnnnnnngatggctatagtcatgcttagatgtagttacgcactgaaataccaaggataacgttatttacatccaccaagtacta

SEQ ID NO: 112559 - DNA, 660 bp, Homo sapiens
  misc_feature (1)...(660): n = a,t,c or g
nnnnnnnnnnnnnnnnnnnnnnnnnnnnnnnnnnnnnnnnnnnnnnnnnnnnnnnnnnnnnnnnnnnnnnnnnnnnnnnnnnnnnnnnnnnnnnnnnnnnnnnnnnnnnnnnnnnnnnnnnnnnnnnnnnnnnnnnnnnnnnnnnnnnnnnnnnnnnnnnnnnnnnnnnnnnnnnnnnnnnnnnnnnnnnnnnnatatttcttaacatcagannnnnnnnnnnnnnngaaacggatgttacttttttttccccaatttgaagggcaggggggagatttgggttaactgcaacctttacttctggggttaaagcaatttttttatttgaccctcttgtgaacttgaaagtggaaactcgttccaccacgccaagtaaattttgaatttnnnnnnnnnncggggtttcaacctgttggcccggttggctttgaattcctgccccccgggggaacgtttccccttgccccccaaaaaggcttggaggggggggctttgcccacccgcccccccccgaatatattttttacttgggaaatccgtgggttaaccggttagggcgccttaagaaaatttctttgaaaggggnnnnnnnnnnnnnccccgctctgggcatgggttttattaaattacccaccccctgttttggggaaaagcatctct

SEQ ID NO: 112560 - DNA, 673 bp, Homo sapiens
  misc_feature (1)...(673): n = a,t,c or g
tgaatccgtttttaggcctagagatgggggagctcatgagggcagtacgtctccagatgagactgatatgtggatagacatttcaacaggtaagactacccagttaccaacttcaaggagtggtagttctcctggtttaaggtctgctgtgggaattagatagggatcaaaatttaggtcttcatactctgcattttaatagcttcagtataatatttatgnnnnnnnnnnnnnnnnnnnnnnnnnnnnnnnnnnnnnnnnnnnnnnnnnnnnnnnnnnnnnnnnnnnnnnnnnnnnnnnnnnnnnnnnnnnnnnnnnnnnnnnnnnnnnnnnnnnnnnnnnnnnnnnnnnnnnnnnnnnnnnnnnnnnnnnnnnnnnnnnnnnnnnnnnnnnnnnnnnnnnnnnnnnnngcatgtgatgtccttttatatgccttatttgccttctggatattttcttgatgagggtgctccttatgtcttcatcnnnnnnnnnnnnnnnnnnnnnnnnnnnnnnnnnnnnntgggcgtctggtctggcccccagctgggagtggcaggatggaacttggccactggaacttctcctccccggtgaaacgatcttccgctcaccctttcgagtgctggacatcgttacacccccatgccggctttctttgtaatttgtagag

SEQ ID NO: 112561 - DNA, 399 bp, Homo sapiens
tttcgtgggctgcctgctggctgagagcgtcgagctgtcaccatgggggaacacgcttgcagcttcctataggacttactggccgggggcgtccgcgctgacgtcttcaagaccgcggtcgcccccatcgagagggtcaaactgctggtgcaggtccagcatgccagctcacagatcagcgctgagaagcaccaccaagggatcattgattgtgtggagagaatcgctaaggagcacggcttcctctccttctgtaggggcaacctggtcaacgtgatgagttacttccgaagcgcagctctcaacttcgccttcagggacaagtacaagcagctcttcttagggggtgtggattgggatatgcaggtctggcgctactgtgctgacaatcttgcgtct

SEQ ID NO: 112562 - DNA, 399 bp, Homo sapiens
tttcatctgcggccggacccagactggtagtgaggctttggaccccgagccgctgcaatgccgctggagctggagctgtgtcccggccgctgggtgggcgggcaacacccgcgcttcatcattgccgagatcggtcagaaccaccagggcgacctggacgtatccaagcgcatgatccgcatggccaaggagtgtggagctgattgtgccacgttccataaaagtgagctagaattctagtttaatcggaaagccttggagaggccatacacctcgaaacattcctgggggaagacgtacggagagcacaaacgacacctggagttcaaccatgaccaatacagggagcttgctaggtacgccgaggaggttgcgaatgctcatcactgcctgtggcac

SEQ ID NO: 112563 - DNA, 446 bp, Homo sapiens
cggtcccgtattcccgggtcgacgatttcgtggcgccgtggggtgggtgctcctggtgagaggagtccactccgtgcgtgctggcggaggccggcccccgagagccgtcgacatgaagaatgacgtgcggatcctgctggtgggagaacctagagttgggaagacatcactgattatgtctctggtcagtgaagaatttccataagagggtcctccccgggcagaagaaatcaccattccagctgatgtcaccccagagagagttccaacacacattgtagattactcataagcagaacagagtgatgaacaacttcatcaagacatatctcaggctaatgtcatctgtatagtgtatgccgttaacaacaagcattctattgataatgtaacaagtcgatggattcctctcatagatgaaagaacagacatagacagcagatgga

SEQ ID NO: 112564 - DNA, 437 bp, Homo sapiens
cggaccgaccacaggtcccgaattgacgagtcgacgatatccactgcacagcggcttgaggacgtgctactcccggttcgggcacatcattgccaggcaccctgtcttcttcgcctcggcgccggtgctcatctccatcctgctcggcgccagcttcagccgctaccaggtcgaggagagcgtggagcacctgctggcgccccagcacagcctggccaagatcgagcgcaacctcgttaacagcctcttcccggccaaccgctccaagcaccgtctctactcggacctgcagacccccgggcgctacggccgggtcatcgtcacctccttccagaaagccaacatgctggaccagcatcacaccgacctgatcttaaagttgcatgctgctgtcaccaagatccaggttccaaggcctggttttaattacacgtttg

SEQ ID NO: 112565 - DNA, 414 bp, Homo sapiens
tttcgtgggaagatggcgtaccatagcttgcggttttagtacctgcagataccaccggtcagccgcgcctacaccactgcctgcgtcctcaccaccgacgtcgtggtgagcagctgcagtgccaccttctcattatctgggctggatatgactgggtcttcaggaaactggggtttgggcctcggggaggcccacaggggctggtcccggtgatgggaggaggcgtacagggattactctggggttcgagttggcgccaagaatgcttatccagtgacgcgagaagggagtgctgcttcatggggggtcaggtcagtttctaagagatgagcgccggacctatatcgggttatggttgcgggagcctcccacccaagaagtgtgttcgagagctctgccaatggccacgtgggc

SEQ ID NO: 112566 - DNA, 415 bp, Homo sapiens
tttcgtggttgttggaccgccgaggaacaagaatcatttttgctgcgctgctcgtgctgctgggattcgcgctgctgggcacccacggagcctccggggctgccggcacagacttcactaccgcaaaagaccttggctcccagatactcctcacctgctccttgaatgacagcgccacagaggtcacagggcaccgatggctgaacgggggcgcggcgctgaaggaggatgcgctgcccggacacaaaacggagttcaaggtggactcggacgaccactggggagagtactcctgcgtcttcctccccgagcccatgggcacggtcaacatgcagctccacgggccgtccagagtgaatgctgtgaagtcgtcataacacatcaacgagggggagacgggcatgctgggctgcac

SEQ ID NO: 112567 - DNA, 392 bp, Homo sapiens
tttcgtggcgagcgaccgagcgccgcgacgcagaatttatttgcgtgcgggctgcagcgcagaccccggtccggccccttcgagagcgtcctgggcgctccctcacaccttgccttcaagccttctgcctttccaccctcgtgagcggagaactgggaccggccattcgacgacagtgtggcgtaaaggaattcattagccatggatgtatccatgaaaggactttcaaaggccaaggagggagttgtggctgctgctgagaaaaccaaacagggtgtggcaaaagcagcaggaaagacaaaagagggtgccctctatgtaggctccaaaaccaaagagggagtggcgcatggtgtggcaacagtggctgggaacaaccaatagccagtggg

SEQ ID NO: 112568 - DNA, 412 bp, Homo sapiens
  misc_feature (1)...(412): n = a,t,c or g
tttcgtcgtatgcaaatacgcatgctgacgttacagatcatgtgggttttggcgtagattccccactgatcgaggcattttttttccctttttttttccnnnnnnnnnncctttaaaaaatttgggcccccgttttccgaccgggggctttttttgccggcctgccgggcgggcgggctggttttccccctttttcccccggaccccaacccggccccccggtgggaagggggaaggggttgggggaacccaccaaaattcctttttggaaccccggggccgggtatcccggttcccaccccgggcccccggtttaacagccccagccaagttttggatttcccaccggcttttgggaaaaaaaagattcccgggttgtgacaaacctcggtcccgggggctcccctcgtct

SEQ ID NO: 112569 - DNA, 379 bp, Homo sapiens
tttcgtccgaggaacaagtcgtacaggaagcccgcgcgcaacagccatggcttttaaggataccggaaaaacacccgcggagccggaggtggcaattcaccgaattcgaatcaccctaacaagccgcaacgtataatccttggaaaaggtgagtgctgacttgataagaggcgcagaagaaaagaatctcaaagtgaaaggaccaggtcgaatgcctaccacgactttgagaatcactactagaaaaactccttgtggggaaggttctaagacgtgggatcggttccagatgagaattcacaagcgactcattgacttgcacagtccttctgagattgctaagcagattacttccatcagtattgagccacgatgtatt

SEQ ID NO: 112570 - DNA, 434 bp, Homo sapiens
tcgtcgccctatgtcgcgaaccaccatttcgtgagtcttctgacagctggtgcgcctgcccgggatttttctcctggactcaatcatggcttgtggtctgggggccagcaacctgaatctcaaacctggagagtgccttcgagtgcgaggcgaggtggctcctgacgcttagagcttcgtgctgaacctgggcaaagacagcaacaacctgtgcctgcacttcaaccctcgcttcaacgcccacggggacgccaacaccatcgtgtgcagcagcaaggacggcggggcctgggggaccgagcagcgggaggctgtcttttcctttcagcctggaagtggtgcaaaagggtgcatcaccttcgaccaggcccacctgaccggcaagctggcagaaggataccaaattaaggttcccaacccggcagaacgcctgg

SEQ ID NO: 112571 - DNA, 396 bp, Homo sapiens
cttcgtcgctctgcttggcctcgccatgccggaggacctcagttagtggtccgggcccttgagcctgcaagaagtggacgagcagccgcagcacccgctgcatgttacctacgccggcgcggcggcggacgagctgggcacagtgctgacgcccacccaggctaagaatagacccaccagcatttggggggagggggttgattcagggaagctctacaccttggtcctgacagacccggatgctcccagcatgaaggatcccaaatacagagaatggcatcatttcctggtggtcaacatgaagggcactgacatcagcagtggcgcagacctctccgattatgtgggctcgtggcctcccacgggcacaggcctccaccgctatgtctggctggg

SEQ ID NO: 112572 - DNA, 444 bp, Homo sapiens
  misc_feature (1)...(444): n = a,t,c or g
gtcatcgccgagcatttnnnnaacatcgggacacatttcgaccccgcggctggacggaacctggtttttttttgtcccgacaagcagcctggctcatggctgtgtgcggcctggggagccgccttggcctggggagccgtcttggcctgcgcgggtgcttcggcgccgccaggctcctgtatccccgtttccagagccgcgggcctcatggcgtggaagacggggacaggccacagtctttctcgaagacacccaggatccccaagatttacaccaaaacgggagacaaagggttttctatttccttcacaggagaaaggagacccaaagatgaccaagtgtttgaagccgtgggaactacagatgaagtaagctcggctattgggtttgctctggaattagncacagaatagggtcttacatttgccgaaaaactttagaaac

SEQ ID NO: 112573 - DNA, 389 bp, Homo sapiens
tttcgtgccagcgctccagcggcggctgtcggctttccaattccgccagctcggctgaggctgggctagcctgggtgccagtggctgctagcggcaggcgtcccctgagcaacaggagcccagagaaaaagaagcagccctgagagagcgccggggaaggagaggcccgcgccctctcctggagccagattctgcaggtgcactgggtggggatgatcggcgggctaggttgcaagcctcttatgtgaggagctgaagaggaattaaaatatacaggatgaaaagatggcaatgttgcctcccccaggacctcagagctttgtccatttcacaaaacagtctcttgccctcattgaacaacgcattgctgaaagaaaatcataggaacc

SEQ ID NO: 112574 - DNA, 802 bp, Homo sapiens
  misc_feature (1)...(802): n = a,t,c or g
ggcccgagcggagccggccgcgatgagcggggagccggggcagacgtccgtagcgccccctcccgaggaggtcgagccgggcagtggggtccgcatcgtggtggagtactgtgaaccctgcggcttcgaggcgacctacctggagctggccagtgctgtgaaggagcagtatccgggcatcgaaaatcgagtcgcgcctcgggggcacagggtgcctttaagatagagataaatggacagctggtgttctccaagctggagaatggggggctttccctatgagaaaagatcttcattgaggccaatcggaaagagccaataatggaagaaacccctagaaaaggatcaccaaacaagccggtcctccctggcgttcattccttgttgaattgcacaggactnactctggggttccctggctctggttctggggggtcccaaacctttggtcttccctttgggtcctgcttgggagcttccccctgccctctttccccctacttaagctcctttagcaaagaagaacctgggccttccacttttgcccttttggggtacaaaagaaggaattagaagattccgtgggcctttgggggcaaggagagagacactctccatgaacacttctccaagccaccatcataccccccttcccagggtaagtgcccacgaaagcccagtccactcttcgcctcggtaatacctgtctgatgccacagattttatttattctcccctaacccagggcaatgtcaagctattggcagtaaagtgggcgctacaaacactaaaaaaaaaaaaa

SEQ ID NO: 112575 - DNA, 459 bp, Homo sapiens
  misc_feature (1)...(459): n = a,t,c or g
aggatctccgaatttttgnnnnttgacgnctgccggagcctgcgagccgagaccgagccatgtggcttgttttcctcctcacttcagcgctgggctttgccatctagtggttcatctcccgggacaaagaggaaactttgccacttgaagatgggtggagggggccaggcacgaggaccgcagccagggaggacgacagcatgcgccctttcaaggtggaaacgtcagatgaggagatccacgacttacaccagaggatcgataagttccgtttcaccccacctttggaggacagctgcttgcactatggcttcaactccaactacctgaagaaagtcatctcctactggcggaatgaatttgactggaagaagcaggcggagattctcaacagataccctcacttcaagactaagattgaagggctggacatccacttcatccacgggaagccgccct

SEQ ID NO: 112576 - DNA, 492 bp, Homo sapiens
  misc_feature (1)...(492): n = a,t,c or g
aattaaagtgacgtctgcnnnnnnnnnnnnnnnnnnnnnnnnnnnnggtgaaaaatgatgattgtggcttccttgctaactgggttagagaagtgatcaagtgtgaaccgggacttgaatgagaggagtgacttagcatttggtgactgtccttaacgaagaactgtgcgctcctggacgaagaaacaatgatggagcatgaaatgacccggttacatcggagagtgtcagaggtggaggctgtgcttattcagaaggaggtggagctgaaagcctctgagactcagagatccctcctggagcaggaccttgctacctacatcacagaatgcagtagcttaaagcgaagtttggagcaagcacggatggaggtgtcccaagaggatgactaagccctgccgcttttccatgatatcagagagcagagccgtaagctccaagaaatcatagagcacgaggaccaggctcaagtggaagaaatggaggtggtga

SEQ ID NO: 112577 - DNA, 450 bp, Homo sapiens
  misc_feature (1)...(450): n = a,t,c or g
gatcatcgggacgancgctnggatcctctacagcggccgcaatannnnnggaagtcagtcccactattatcctatgtgggttcacagatgaaaactcaaggcccaaaaggtaatgagtgggaagttaaggagaaaagcacatatactggaggcaggacttgggcattcagcatctccttaaatctttacaatgaccttaagagggagctgtcaccacaaatgaggacactgaggctgcagagttcacagagcaagcagcattcctgttctctgccaggatgaagccactgagagttcgtaagtacatccatccctttccgtaaaacttgatgaaagaaagctagcaaagatctgaaaacatggagatacacgcagtgctcagtgactgcaaaactcaatataataaagatgtcaattttccccacagttatctatggatttaacataatt

SEQ ID NO: 112578 - DNA, 445 bp, Homo sapiens
aacgcacgcgtccgtttgcttgtatcctctcgagcggccgcaatacatttggtgggagggagaagtcaggccagtctgtcaggggaggcatccgtgactgctccagaacccaaggggtagcctctgtccctgcagagggaaaaccagggatgcaggtttgccccttggtcagccgctggtgcacccaggagggcctggaaggagcacaggaaggctgagggctggcactgtggaaatgcaagtccagcaactcctccccagccagggaggtttacgggaatgccacagaggcccccggcgctagaagaagggctaccccagatcagcgatgaccctcagcctgggatgtttgaagctgttgggcagcagggaacgctcatggtgtgaaggtggctgcagggccacagacctggctggcccaaccttcccacccttctctgaaagg

SEQ ID NO: 112579 - DNA, 401 bp, Homo sapiens
actacaaggggccacaatgaggactaatgtacacagtgcctggcacagtgcaggtgctgccaaggccacatggctgcaaggttctatgggaatgtgatcctgaagtgtgccccagagagggagagagaagagggtgagacagagcaggaccagctgttcctgactctccctcaacagcccacaatggctcccactggccccagaatagagctcacaacccaacctgtggccctagaacccctctctccctctctaagctcacaccccaccatgtcccctcgcaaccctatggaattgagggcacgcccacacccatatccaccaggccgttactcaccagcgattagctggtactaaccctgggacccattcccacctgtccccatcccctgggccgagag

SEQ ID NO: 112580 - DNA, 443 bp, Homo sapiens
  misc_feature (1)...(443): n = a,t,c or g
gtttgcgacgtaggcgagaaacntctacagcggccgcaatacattgccctaattttttggataaattttatttcaaaaacttcccaccagctgtgcggggggtaaggagaacaccatctttggtgcagtttggatggagtaagtggaaaatggtaggaaagtggcagaagggcaaaggcccgggcgaaggcgctgaagaaatctcagggggaaaagcccctgtggccaggttggccctcacctcggaaggacaggatgtctccggaaagtggggtccaggtcccacatttaccacttgtctgagtttcttcatgcaaggcttccccgcccgaggggccctgtcagagctgcagtgctgagcctgaggccaccgccatttctccctcctcctcttcacacccttcttcttgggccatgcctcctccgcccttgggtgcctgtcg

SEQ ID NO: 112581 - DNA, 427 bp, Homo sapiens
  misc_feature (1)...(427): n = a,t,c or g
tttcgtcgttacgtggagggaacagagcggacgggacacaacggtctgatgaatgaactcactatttttttttgatgcaaaatcgatggacacaaacaggggcgggtgctgtacaccaccaatgaccaagctgagattcgaatcgagaactcaaccccttttacaacagctgnnnnnnnnnnnnnnnnnnnnnnnnnnnnnnnnnnnnnnnnnnnnnnnnnnnnnnnnnnnnnnnnnnnnnnnnnnnnnnnnnnnnnnnnnnnnnnnnnnnnnnnnnnnnnnnnnnnnnnnnnnnnnnnnnnnnnnnnnnnnnnnnnnnnnnnnnnnnnnnnnnnnnnnnnnnnnaaaagcaatctacagggccagggtaattcccatcaaaatactatgatttttcacagaacagaaaatcctaaaatcctttttt

SEQ ID NO: 112582 - DNA, 395 bp, Homo sapiens
ccctccctcaaacgtttcatgggtggctccccagggacggcagggctgggggcttctctccagggagctgctgctgaggcctgtgtctcccgtggctcctatgacaggtcccgcctgactccgctatggaaagtccttttgaagaaatggccctggtgaggggcggctgactgtggagacagagctccatcctccgccgctggaagcggaactggtatgccctgtggctggacgggaccctgggatactaccccgatgagacagcgcaggacgaggaggaccgtgtgctcatccacttcaatgtccgtgacataaagatcggcccagagcgccatgatgtgcagcccccagagggccggagcaaagatagcctgctgactgtgaacctacggtaa

SEQ ID NO: 112583 - DNA, 3377 bp, Homo sapiens
tttcgtatccagtctgaactaaggcctgagctgtggataccatggcgcgtgagttagatgtggtccctgccctcatggggctgacagtcctaaaatcaagtgctaggacacagtggccattgagctgggagcattcttccctctaccgcttaagccactgatggctgcgagcttgaagagagggattctgagggagagcttggtccatctggtcaccaaggctgggcgggacagagcagtcaagaaccacggtgtggcttgagaaacagtcctgcttcctgagcctctttgctctgcctcttggggcaagctccttaacctgtctgtatttttatgcctctgtctcccattcagttcctccttgaatacctctttctacagagaggcacgggctcccctgaaggattgtcgaggccaggggttcgggaagtacacttgccatcggtcaggggacagcttgcctcccacctttgcctggggtgatgggtgaatggggattcatcttttccttgccttgctttttgagggagatggttgaatttaaagcttaacagggaaagccaaaccagcaccctcctttgtgctctgagaggttggagacatctggtccaccccattgcccctgcccctggcaagccctgaagtcgggagaggtgaccacaggtctggaaaatcagccagtgccaacattgcttgccctgcaagtggcaactgagcccacatagcgcattcatagtttccctggaccacagccttggggaaggacggtgggaaacccgaggatgttgtggggttttcccagcttaacgggacaagttcccttgccacacccagtgcccacgcatgctcacatacatacagcagaccacaaccctgttgccaagcagtgcttccaagggatagcgatccagattccaacattgtcttggagagggttagtccacatccaagttgcgtgagataagatgcaaagggctctgtgtggatgaggaacgcaccttagaggagtgggaaaggccaccagggttgggccctgtttaggtaattcctgttggcagcacctagagagagcatctgagctgaaggagtgggaaactttgcccaagcaatggcacgggcagcgggctctttctggcgccctgtgctggagcagggccaagtcttagggcatcacaaacagcccatttgatggagggagcagggacatagcacatttttgtctgtctttgtgaggctgctttgctaactctctgaggagaggaagccctctcgggctttccgtcggctggggctagtgccagagaatcccttctcagtggccagcaggttcctgggaggccggcacaaggcaccgctccccactcatgacaccttggtgcagagtgacctcctgcccagtgcaccactccggccagccccagccaaacacacaaaagcccatggttgcggttgcatctacaccgttagttggcaaaggatcctgcttgagctctgcgtggtggccaaggagtagcatggaggagggccctgattttaaaaaggaaaaatagagaggcctcaaaacaatgaaacaaagagcttgatatgtcaagaggagaccaaggccctgggaggcataggcaagccgggcagagtcagaccagtgccctcccttgaccatctcctagcattccttaacctagacaggggctaccccatgtgagtccaagccagactttgtggctgtccccagcctgcacagcccaagcccaggtgaagtgtcctttctttcccttccttactaataatgggccttcctgagacacattcagagaaggatcagagagaaaggagaaccatccaggagagccacaagcgtccaccaaacagtgtctcaggcctcacctgaagctgctgttcctcctatcagcacactagtattaaatgggtgttccataatgaggagaatggaaataggtacaaggcatctagcttaggacagaatcggatttcggcatgtgaaggaatcccagagctgatctcattgaaatgatctatcgtacagacaaggatatgcaaatccacagaagtgaagggatttttgctcaagatcacatagcctggcaaactaaggtaagggtagggcttgtacttgggccttctgactccttgtccagtcagtgttctttcatctcaccacagctgcctcctttgaaacagaggtattaagaatctgtccttctggttcaccctctcatacctctttactgcctctcccacatcccccacatgcctcccaaaatgaaagacaaacaggattgtttctgaggaccaagatcagtctgtctgtgatcagcctgtgtgtgggttcacccagtcatggcaattaaggggcagatctggggccagtgggaataggatagctgattggtgtttgttactgtgaaccctaaaccgtaccccgtagaatggtgtctcttgctttgtaacacatcgtgccttcagtgtgctgtattcctcaaaagtgagggcatctcggtccattctgtccatggccacagggtgcttataggctgcttagtcccatggcaaggttgccaccctgggatttgctgggctggagttcaacagatgtaaagacttcagtgaagcaataaacacaaaactctgggagaagatatccagaattttgtacattactctgtttctttttcaaaaatgaggcagatcagatgcccctgagctgcccctttttttctgattcccaactgcaatgtcctcagtcagtgttgtccctctcgcccggctccccagctctttgccaacctcttcacactccccttgagctgagcatcagtcgcctgtgacgtggccaccttctgtcctgctcccactcccgacccatgctggaccccggaggacctcctgccccgcccccaccacacacccatatcccccaccattccaatttgttctttcccgtggggaattttttttttcccagcgtctcccacccctccgtacaaatcccacacacacacaaattgggtctgatccttttttcccattggttaaacatttaactcccatgcccagaccttgttttaaccccctctcacatcatgttctttcccttttttgcgagttattttgcattaacccaactttgtcagtgacagatgccgtatctgagggtggtcaaaacacgaacttcagcagggaagacttctgggccatggagggccgtctaatacatggacttataaactgactgcatgagcaatgaaaaggccaaattattctgaatttttttttgaatcactgtaaaaaaaactgatttcttttgtatagagaacactaaacgtataataaaagttgttcaaaatggaaaaaaaaaa

SEQ ID NO: 112584 - DNA, 383 bp, Homo sapiens
agcggctggaggaggagctagcggttcgttgagcccctctcacaccgcgatcccggccgggatggaggcggatttgagccagctgagcgaagaggagaggagacagatcgccgctgtcatgtcaagggcgcaggggctgcccaagggaagcgtccccccggccgctgcggagtcgccttccatgcacaggaaacaagagttggatagtagtcatcctccaaagcaatcaggaagacccccggaccctgggcgtccagcttaacctggtctcagtaaaagtagaactacagacactttcaggtcagagcagaaattgcctgggaggagtccttccactattagcttgaaagaatcaaagtccagaactgatttaaaggaagagc

SEQ ID NO: 112585 - DNA, 421 bp, Homo sapiens
accgccgcgtacgtagctcgatcctctagagcggacgcatacagcgcggaagttcctgggggaggaagccaggggctgaagagggccgtgagagggtgacggcagcccctgcccacctagcccccgtcgggtcaaggctctactctcaccccttcggtgtgggaagccagagctctccctggctcctggcaccacctcccacccaaaggcaaatcccacccagtgctcttcccgcgacagccttccagggctccccttcaactccagaacaaaggtgcagtgcctggcgctctggatcaagcctcctcccgagctgcattcccaggctctgaccttccgtcctcgcccgggacttacgccctgagcctccacgcccatgtggcaaaggatccagcctgcctgcgctgcagcagagcggagc

SEQ ID NO: 112586 - DNA, 394 bp, Homo sapiens
ggcggcggcggtcggtaaggagcatcatatatgaagaagaagagacagtctttcgagaggaggtcaggtattccccggaccccctgccagttagatattatgacaaggacaccaccatacctatcagattttacttgttttcgctggaggagctcttggcgtggaagccccgcttggaggacggctttaatgtggccctggagcccctggcgtgtccacctccccctctgagcaagcagaggccccggactctggtgtgacatgacatgatgggcggttacctggacgacaggctcattcagggctcggtggagcacactccctatgctttctaccactggcagtgcattgacgtgtttgtgtacttcaggcaacacacagacaccattacccg

SEQ ID NO: 112587 - DNA, 397 bp, Homo sapiens
  misc_feature (1)...(397): n = a,t,c or g
aatacagctgggcacagaggagtttcgcttaacatacgtgtggctggagactatgagttcagaattcctgttttgaacatgcggagaaggggctgggggccgtcaggagggagggcagccccaggcagctccccagggaaggccaatccccacagcctcaccagagtctcctggtcccagactcactgggagtgacccagggtgggaggtgcccagcactcagcccatgcttcctgcaggaggggtgggatnaggtgctaggagcccacagggtaggagccaggcctggaggccctgaggcggaaatctcactctcacaagcacatctaagcgctggactgctncaagctgggcttggcacaaacttcgggctcatttttaagaaggagcagggggt

SEQ ID NO: 112588 - DNA, 440 bp, Homo sapiens
cgacgtacgcttgatcctcatagcggacgaatacattcgggctcccgtgaggtcaaggagggctatggaagctactttctccgctgccatcctctcatccaagaacaggctcagagagctgccctgcaagttcccgcggcagctgtcccaggagctcgagctaagctgcctcccgccaggcagcatgtgctgcttgaactccaaagacccctccatggtgggggtaccctttgcatcctgggggtccctcgtctcagccagctgtgctcctagcccctggagtccagagggcctccactgaaaggatgtcagcgagctgccagctctcccgggcttcagctcctgaggctgcagcaggagctcctgttccatcttggggagagggcttggtgcgcaacgtgagccatgtcagagagaaccagcacacctgagggtaccgt

SEQ ID NO: 112589 - DNA, 429 bp, Homo sapiens
  misc_feature (1)...(429): n = a,t,c or g
cagactctttggtggaaagcgtaccaagcaagtgtccatcgccacagctgaaagcatgaaaaattcggtggtcatctccaatcctcatgccaccatgactcagcaaggtaacctagactccccgtcaggcagtggcgtcctgagcagtgggagcagcagtcctctctacagcaagaatgtggacctcaaccagtctccgctagcctccagccccagctcagcccactcggccccttccaacagcctcacctggggcaccaacgccagcagctcctccgcagttagcaaggatggcctgggctttcagtctgtcagcagcctccacaccagctgtgagtccatcgacatataacctcaacagtggaggggtccccagccacatgtattgcggccgctctgtagnctccatncttacggctcctgcattaa

SEQ ID NO: 112590 - DNA, 384 bp, Homo sapiens
  misc_feature (1)...(384): n = a,t,c or g
agcgagtggcgagtaatggaaacgttgcttctgaggggagcccaagatgaccggttctaacgagttcaagctgaaccagccacccgaggatggcatctcctccgtgaagttcagccccaacacctcccaggtcctgcttgtctcctcctgggacacgtccgtgcgtctatacgatgtgccggtcaactccacgcgggtcaagtaccagcacaccggcgccgtactggactgcgccttatacgatccaacgcatgcctggagtggaggactaaatcatcaattgaaaatgcatgatctgaacactgatcaataaaatcttgttgggacccatgatgcccctatcagatgtgttgaatactgtccagaagtgaatgtgaaggtcan

SEQ ID NO: 112591 - DNA, 518 bp, Homo sapiens
tttcgtggaaagcggaggatccggtttgctctggtctggtttggaagcagagccggccgagggagcgccggtgccctgggctgcaggaggttgcggcagccgcggcagcgtggtggggccgcagaaggagcagagctggatccccaagatcttcacgaagaagacctgcacgacgttgatagttgactccacagatacgggtagggaccttgtgccagtgtgggcgcccccggaccgcccaccccgcagtggccatggacgatgccttcggggcagccgtggtgaccgcgtgggacagcgatgcacacaccacggagaagcccaccggtgcctacggagagctggacttcacgggggccggccgcaagcacagcaatgtgaggcgggcctctgtgggcggggcccgggcaccaaggggcttgatgctcggggcttcagagtggagccgggacgcccgccctgaacccttgcccctccgcccatccctggcttgggtctcttttgcccctccggcccac

SEQ ID NO: 112592 - DNA, 397 bp, Homo sapiens
aatacattggtcatgattttgttggtagatttatctttatggaattgtagtattttcttgctctaaaaccctcagtttaaccccttcttttttctgtctcacatttttgcctccagcgatatgaaaatgaaccttggagaatgggagggtcctgggggaggggggctgaggggctcttcaccaggcagagatgaaccccagtgctgacacaagccctttccttttcctggtttctcttgccctggagagtgacaggcagaaagggctttttgtctctttggaccatttctgtatccctgctgcctcaaacgaagcctggcctggggcgaactcaatcaatgactctgacgggagacagggctccggcccactggggtgatgggctaaagaggggatt

SEQ ID NO: 112593 - DNA, 498 bp, Homo sapiens
caagcaccagaacccgcatggggctctgcaatataatctgatccacagaccatagtcagattttgaccatttccacaataccgtcctctatttttttccccgttgaggagccagcccagcccagggttatacactgcacttagtcatcgtgccccggtatttttttaaaatccgcacagtgagaactgagagcttttcaggctcattggtgagcagcccgccgcccctccacttccttccactgaacaaggaacgtggaggcccaggaatccccctgccctgtccgcagctgttgcaggtgctgggtggcaccagcctgccccccgttcgttctatgccagacacctctcaggacaagtggcctctccacggagtaccaccaggccatgtctgctcctaaccccttgctggtgatggggcatggccaccctctccccactggatccccctcaacacagggacctccaaaagtcttcagccagctcccccatgtgtatt

SEQ ID NO: 112594 - DNA, 384 bp, Homo sapiens
tgtaactaaaaaagctagttggtctaacttgtgtgtctttgtcctataagcctctgcaggtgtgcgagcaggattgcttctgcaacaaaagcctccacccagccacatcttgtgaaaagaatggccacttcttggggcacagtctttttcatgctggtggtatcctgtgtttgcagcgctgtctcccacaggaaccagcagacttggtttgagggtatagtcctgtcttgcatgtgccccatcaatgtcagcgtcagcacctggtagggaattatgtcggatgcagggagcactgaggctcgaattcaggtcaacacctcggcgcagtaaatgccaggtaagtgcaggtggaaccggtagtagagtcggtaacggcccggtatt

SEQ ID NO: 112595 - DNA, 390 bp, Homo sapiens
  misc_feature (1)...(390): n = a,t,c or g
nnnnnnnnnnnnnnnnnnnnnnnnnnnnnnnnnnnnnnnnnnnnnnnnnnnnnnnnnnnnnnnnnnnnnnnnnnnnnnnnnnnnnnnnnnnnnnnnnnnnnnnnnnnnnnnnnnnnnnnnnnnnnnnnnnnnnnnnnnnnnnnnnnnnnnnnnnnnnnnnnnnnnnnnnnnnnnnnnnnnnnnnnnnnnnnnnnnnnnnnnnnnnnnnnnnnnnnntgaatagaattcagcaatatatgaaaagaattatatactatgaccaggtggggattattccagggatgcaaggctaagtcaatattcaaaaatcaatcaatgaaaaaaaatcaatcaatgtattccaccctgttaacaggctaaagaaaaatcaattgacagagaggttgtatt

SEQ ID NO: 112596 - DNA, 416 bp, Homo sapiens
agcgcgagaagcagcgggggggcaggcgatcgaagcctctataagaccagcattctcgtgattatggaggcccctctgtcttttctgtgacgggagcattgctgacctcggtttcctggacccattccgactcaggagccttcacgtaaatgggtccagtcttgcctcccagtaggaagccagaatgctcaggaattagtgtctccagtggactgagtcagtgttacgggggcagcggtttctccctggcccttcaggaagacgacgacctcgacttttgtctgcctgacatccgactataatatggggggcgtggaacaatacctcccccgccctgttcggactgctatccctgattgtttttaccaggggggaagagcttttatgttctcctcccctcgaaatatccccacccg

SEQ ID NO: 112597 - DNA, 398 bp, Homo sapiens
caaggtggggccggcggccccgattaaaactagcagcgttctggatctggggaaagtaggtaatcaaggcacatgggcaccagtagtactggtaacatgatccgaaatgacaatgcgtgtttgcctccaggtagggtatttcaatgagtgcttttatgtaggtaaagagatcacacacatgtgatctctcagacgcacacacacaccctcgggcgcactagcacatgctcacacatgacactcagtctctctcatgttcacccagctgcttccacactcactgtcacacactctaacctttacacacaggcacgcacacacacgacggtgaggcctggcattgcctacaggcatgcacacacacaacggataaggcacgcacacgcacgaatggcgaa

SEQ ID NO: 112598 - DNA, 395 bp, Homo sapiens
  misc_feature (1)...(395): n = a,t,c or g
tcaacgcagcgngatactccgagcggccgagtacacctgtgagaatttttaagtacagttccagcttttacttgcaggtaccccacctcaaccctagccgcgcttcccctcaactcccagaggctggcctccctggaaaggcacccccagcccattgttctctgctgccccaagccccaggcggcctttagagcttccaagattctcagatataaaccacttgcctggggagggaaggagaggggagaaggcagaaaccttgagtctgcagtacagacgcaggagaaggttccgcaagggtggagccaaggacccaatccgagggccctcctgggcctccacacgggccccatccctgagccacctgtgggcatcatacctgtgcccccgaaacg

SEQ ID NO: 112599 - DNA, 892 bp, Homo sapiens
gagaaagagacttcagcgtgacggcgagtcggagcaatagaagccgggcccggcctgtgcggggcggggtcccaagaaggcggggcgggcggaggctggaggagccgccgagcggagacccgggagcaggagctgggcctaggtctgcgccctggagggaggtgtagaaagaggtacatggagaacaagtttgtcaatccgtctgaacttcagttgccttacctgtaagaattagagcccattgggaacgatgccaccaccgtcagacattgtcaaagtggccattgagtggccaggtgctaacgcccagctccttgaaatcgaccagaaacggcccctggcatccattatcaaggaagtttgtgatgggtggtcgttgccaaacccagagtaaaataccctccgttatgcagatggtcctcagctgtacatcaccgaacagactcgcagtgacattaagaatgggacaatcttacaactggctatctccccgtcccgggctgcacgccagctgatggagaggacccagtcatccaacatggagacccggctggatgccatgaaggagctggccaagctctctgccgacgtgactttcgctactgagttcatcaacatggatggcatcattgtgctgacaaggctcgtggaaagtggaaccaagctcttgtcccaattgcagggtatgtaagccagcccatggtggacgtgtcaatccttcagaggtccctggccatcctggagagcatggtcttgaacagccagagtctgtaccagaagatagccgaggaaatcaccgtgggacagctcatctcacacctccaggtctccaaccaggagattcagacctacggcattgcacttgattaatgcacttttttctgaaaggctt

SEQ ID NO: 112600 - DNA, 389 bp, Homo sapiens
aatacagtgtggggtgaggggcatcgtcctctggaggtgagtggaagcgagaactccaaggcgcgcagacagccctagtccttgagagattctacatcctcagaggcagccccactcctttacctctccatccctgcaccccaccccagcaggctcagcccagcagatgcagaaggagccctgaaagcgccctgccacacagacaagcacctcgcgagtgcccccagggagagctggagctgtgggggtcccagaaatcccatcggaattatatgggggccccctttcctgggccccaccccaaggggtgacctcaaagccgcaggcatccacgacagagacggagccaatgctgcctccctcccctggtggagccagccgcgccttgg

SEQ ID NO: 112601 - DNA, 408 bp, Homo sapiens
  misc_feature (1)...(408): n = a,t,c or g
nnnnnnnnnnnnnnnnnnnnnnnnnnnnnnnnnnnnnnnnnnnnnnnnnnnnnnnnnnnnnnnnnnnnnnnnnnnnnnnnnnnnnnnnnnnnnnnnnnnnnnnnnnnnnnnnnnnnnnnnnnnnnnnnnnnnnnnnnnnnnnnnnnnnnnnnnnctagtaggcataattttaaatatttgaagatgttgaattaactgagtgagacttaaaaaaaaattttcaggaaatttcagaatgctctatgtcctcgttgccattgcggctgcctttctcaagaatgcctggcctaaggagcgggtgctggtcctgttcctcaccatcgggggcctagctataaatctgaccccagtctgcccctataccatgtactcctccaggatcaactaggccacgccccacaatgtatt

SEQ ID NO: 112602 - DNA, 424 bp, Homo sapiens
atgcaatcgcgtgcgggacgaggacggagggaagatggcggaggtgggggagataatcgagtgctgccgcctacccgtgctgcggcggaaccaggacaacgaatatgagtggcccctggccgagatcctgagcgtgaaggacatcaatggccggaagcttttctacgtccattacattgacttcaacaaacgtctggatgaatgggggacgcatgatcggctggacctaaagaagatccagttccccaagaaagaggccaagacccccactaagaacggacttcctgaggaccgtgctggctctccagagagagagatgccgggctcggcacaggccagcgggaagaccttgccaatcccggaccagataacactccgcttcaacctgcccaaggagcggtaggccattcccggtggcgagccg

SEQ ID NO: 112603 - DNA, 433 bp, Homo sapiens
  misc_feature (1)...(433): n = a,t,c or g
cccacgcgtncgcccacgcgtncgggagccagcgcggagcacctgcgcccgcggctgacaccttcgctcgcagtttgttcgcagtttactcgcacaccagtttcccccaccgcgctttggattagtgtgatctcagctcaaggcaaaggtgggatatcatggcatctatctgggttggacaccgaggaacagtaagagattatccagactttagcccatcagtggatgctgaagctattcagaaagcaatcagaggaattgcatttctctagaatatgacaagaactggaatttccacattgatggggatgcttctcttcaaatcaactagaaattttgccatactgctctctgaaatgaatgcagaaattagcattcctttcagcaatgtacaagacttccttttgctccatattctcaccaacacttgcta

SEQ ID NO: 112604 - DNA, 433 bp, Homo sapiens
  misc_feature (1)...(433): n = a,t,c or g
taacaattgaaggaaggaacaccccgcgnnngnnangaagacgcggacgcgtgggtttctctttaaggagtgcttgtggagatcggatcttggctccagcaattgggggaaagaaggctttttctctgaattcgcttagggtaaccagcggcgtatattttttaggcgccttttcgaaaacctagtagttaatattcatttggttaaatcttattttatttttaagctcaaactgcttaagaataccttaattccttaaagggaaataattttttgcaaaggggtttcctcgatttggagctttttttttcttccaccgtcatttctaactcttaaaaccaactcagttccatcatggtgatgttcaagaagatcaagtcttttgaggtggcctttaacgaccctgaaaaggggaacggctagggcgagaagt

SEQ ID NO: 112605 - DNA, 196 bp, Homo sapiens
cgacatgatggtggtttgggagaagaagaaataggagagcatgttggacttgtcctaggacatcgacaagacgatccggttaaagttccagggaggccgcgaacccagaggaatcctgaagggcttcgacccactcctcaaccttgtactggtcgtcagggtctcgcatgtactcaaaggcgcgacgacgcggccg

SEQ ID NO: 112606 - DNA, 416 bp, Homo sapiens
gcacaagcgagaaagcaaaagaacaaaggctcgtatgattggaatccacggtgttgtcgttgggcaccggagagggtacgagacctgcctcgaacctggtgttgctccacgactgacactgctcctcctcctctgtctgtctcccctctctatttactcccaacttgaagggtcttcctgcctcccttcctgagtttttcagatgagcccccagcccagcccagccccaccccttctctacccttctccatagcccccatgcctgcctcagtctccctttccctcctttgctcagatacgtcctcgtgtcccgtcccactctgccttctgcctatccagatttggctgtaaggtcagagtttcctgtgtggatcttaactgggttctttctaactgagatcaatgccccaccgaaa

SEQ ID NO: 112607 - DNA, 456 bp, Homo sapiens
ggtgcggtaccggaccggaattgccgagtagacgatttcgttctgccgggtgcttcagatcaatggatgagttccactcgttcatcgaggcactgctgcctcacgtccgcgctttgtcctacacctggatcaacctgcacgcgcggaagcgcatgtacttcaagaagcatgaaaagcggatgtcctacgacgaggagcggtcggtgaatgacgagctgctgggcgagaagcccgagatcaagcagaagtgggcatcccggctgctggccaagctgcgcatggacatgcggcccgagttccgcgaggacttcgtgctgaccatcacgggcaagaagcccccctgctgcgtgctctccaacctcgaccacaaaggcaagattcggcggattgactgactgcgccaggctgacaaggtgtggcggctggacctggtcatggcgattttgtttgacggga

SEQ ID NO: 112608 - DNA, 439 bp, Homo sapiens
cagtcactgagagaagaacctctcataccctcggtgctccagtccccagctcactcaaacacacacaccatgtgcgaagaggagaccaccgcgctcgtgtgagacaatgtctctggcctgagccaggcaggcttcgcaggagatgatgccccccgggctgacttcccctccattgtgggttgccctcgccaccagggtgtgatggtgggaatgggccacaaagacagctatgtgagggatgaggctcagagcaagcgagggatcctaactctcaaataccccattgaacacggcatcatcaccaactgggatgacatggagaaaatctggcaccactccttctacaatgagctgcgtgtagcacctgaagagcaccccaccctgctcacagaggctcccctaaatcccatggccagcagggaaaagatgacccagatcc

SEQ ID NO: 112609 - DNA, 382 bp, Homo sapiens
ctctcctacccccaaggaggtgaaagctgctaccacctctgtgcccccccggcaatgccaccaactggatcctacccgaatttatgattcctacagcagaaaaacgagaaacgtctgttattatttttttttcgcgcttaaggctggaatcctctgcgagccatggccgaaaaaaatgatgatgtccttgacagctttactggtgatcctgcggttttagttaacctggactggctgccccctccccgaggtggggcacgatcctggaccactcttggctccagaggcagccaaaggttctctcagctgcacttactgcatcagtgcttttcaatacttcatgtgggacagacagtattccagacaaggccctgagttgctc

SEQ ID NO: 112610 - DNA, 395 bp, Homo sapiens
cggtaagggtacagaactgaagcacagaagtaatcaaaggcctgaaggctcataaaaagaaaagggaggagcagatccagattccgtaaggcaagaggtaatcgcgcaaacaataaacaccgtatccgaagcaaggcgtccaaagaaacgaccctcctggcgctccgcataacattgtaggccacacccctacaccgcccctcggctctcataggcctctcacgccttccccaacctgcctcacgctacttccctccctgcaaacaccgccccccgacgggtttagaacagcttctttacaatcacggtccaaatacccagactcggccctttcatctccacgccccgccccccctcactgcctcgagactcccaccagctgctctcctgcctcc

SEQ ID NO: 112611 - DNA, 417 bp, Homo sapiens
  misc_feature (1)...(417): n = a,t,c or g
atgcgtaggcccggccgtaatttcgaactcccacgttcgaaaggagggaggagccgcaaactcacggcgcgatttttgttgtcccagcggaaagatggaagagttgagtcaggccctggctagtaccttttctgcgtctcaagatctgaacagcacagctgccccacacccccgcctatcccagcacaagtccaagtacagttccttggagcagagtgagcgccgccggaggttactgcaactgcagaaatccaagcggctggattatgtgaaccatgccagaagactggctgaagatgactggacagggatggagagcgaggaagaatataggaaagatgatgaataaatggacattgacactgtcaagaagttaccaaaacactatgctaatcaattgatgctttctgagtggtn

SEQ ID NO: 112612 - DNA, 440 bp, Homo sapiens
catgacatgattacgcaagcttggacgacgcgactgggcaaagaagaggtggctgcaccctgtcatcagtatgcagcgagtgctctttccgccgtagagggccttgaaggggaggcagtatctgccgctcctggctcctagggcagcgcctagagcacagtgggaatgcatcaggcgccctttgaggccagggcaatacagcaccatctctgaagagctttgaatctggaaggggacagtgtcccttccctcaaaggctgctgagcggggggtgggccgatggctcctggtctgcagtggaacagaggctggtgcagttattcttggtggagtaactagggtgacagagtctggcctctcgatggtagattggcatttaataaaggagatgaagccacctacaagccaagaggaatgggaagcagaaatccaaagatacc

SEQ ID NO: 112613 - DNA, 454 bp, Homo sapiens
  misc_feature (1)...(454): n = a,t,c or g
gacgnttccctcaccttgtccgaggatcgaccgcctaagagtcgcgctgtataagcaacaacctctcctcttcgtcttcgccatcagctcggcagtcgcgaagcaccatccatgcgtgagtgcatctccatccacgctggccaggctggtgtccagattggcaatgcctgctgggagctctactgcctggaacacggcatccagcccgatggccagatgcccagtgacaagaccattgggggaggagatgattccttcatcaccttcttcagtgagacgggggctggcaagcatgtgccccgggcagtgtttgtagacttggaacccacagccattgatgaagttcgcactggcacctaccgccagctcttccaccctgagcaacttatcacaggcaaagaagatgctgccaataactatgcccgagggcactaacccattggcaaggagatcc

SEQ ID NO: 112614 - DNA, 454 bp, Homo sapiens
gaaaaaccctactgcttacgccaagcttggcacgaggcgggcggctccgggagccaacatgcctcggtatgcgcttctggtcttgggccccgcgggcagcgggaagagcacctactgtgccaccatggtccaccactgtgaagccctcaaccggtctgtccaagttgtaaacctggatccagcagcagaacacttcaactactccgtgatggctgacatccgggaactgatcgaggcggatgatgtaatggaggatgattctctgcgactcggccccaacggaggattggtattttgcatggagtactttgccaataattttgactggctggagaactgtcttggccatgtacaggacgactatatcctttttgattgtccaggtcagattgagttgcacactcacctgcctgtgatgaatcagctggaccagcagctctagcagcgagagttt

SEQ ID NO: 112615 - DNA, 394 bp, Homo sapiens
ctgcaaaacaggccctcagcgtgggcacgaacgtgtggcagggcttcttccccagggcagggcctgtaagacacaacagaggctcctgtgcacggccctcaggagacgggaggaggccccatccagcacaggccccaggctcaggcgctcccacctgggagaaggcactatcggccaccacctccccgcttcctctttctcaatcagtaaggtgattatcacagaaaagcagcagaaaattttaaccccccaaaatcacgtttttccatatgaaaacctatttggtcaggcatggtggctcatgcctataatcccagcactttgggaggccaaggagggaggatcacctgaggtccagagtttgagaccagcctggtcaacatggtgaaacccc

SEQ ID NO: 112616 - DNA, 442 bp, Homo sapiens
  misc_feature (1)...(442): n = a,t,c or g
nnnnnnnnnnnnnnnnnnnnnnnnnnnnnnnnnnnnnnnnnnnnnnnnnnnnnnnnnnnnnnnnnnnnnnnnnnnnnnnnnnnnnnnnnnnnnnnnnnnnnnnnnnnnnnnnnnnnnnnnnnnnnnnnnnnnnnnnnnnnnnnnnnnnnnnnnnnnnnnnnnnnnnnnnnatgttcaggacttcaacacccctctcagcaactgacagaaatgctggacagaaaatcagcaaggacatagctgacttgaataacaatgagcaggatcatagagacatttatagacgctccccccagtaacagcagagcacccattcttttcaagcagctatccgaagcaaaataggtactatcgtgggtcataaaacaactgctgtcgccgtgaagcataaagtgtacaagcgtctgtcttcctctagtccgacgtccaatgaatgcgtaag

SEQ ID NO: 112617 - DNA, 541 bp, Homo sapiens
tttttttttttgccagaaacaggattttatttaaaatttattgtaatggggtccgcgcaaaagaaaagggtgaagggtggggtacaatgcaggggacacaagggacacgatgaacaatgccagggccacaactttcttctgtcgtggggaagagggatgaaaagacaaagaccagggctggagctggggtggaagaggggagggggaccactggctgcattcctcccgcccccaggaagcacctttaggccctggaacccttcgctcaccctggccccctaagactccatgtcttctctgcctctggccctacctggctctttcctcctgctccccttgactttttcccctgacagattcttaaagtaggagcgatgttaagggcctgaccccaaccccccgataccaccttatgaaggttacaaccctttgccggcccttgcttctgccccctccttcaaaccttaaccggctttccctcttttggacagctctgatccccctccttcctctcctccctcccccctggaaaaaaaaaaaa

SEQ ID NO: 112618 - DNA, 447 bp, Homo sapiens
actaggcttacatctgcgctactggaacggcagattttgcgatctctgctgggcactttgagtaaagggtctgccataatgcatccccagtggaggctctgaaaggtctggtggataatcttcaagcgttaaccggcaatgaaggccgcgtgtctgtggaaaacatcaagcagctgttgcaatctgcccacaaagaatccagctttgacattattttgacaggtttagtcccaggaagcaccactctgcacagtgctgagaatttggctgaaatcgcccggatccttcgggctggtggatggatttatctgaaggagccaggaaacacagctgtacataacaataaccctgtgccaaccgcataataactgtgttgagacctgactgtttctgagcctgacggcgtgaaccaattccctatgaactcctggcctcctggagggtacc

SEQ ID NO: 112619 - DNA, 469 bp, Homo sapiens
tttgagaaggatcgccatgcttggcacgagggcgtccacgtggcggtggcgtggggactccctgaaagcagagcggtagggcgcccggaagtcgtgagtcgagtcttcccgggctaatccatgccgggttggaggctgctgacgcagggcggcgcccaggtgctgggtcgactcggggacggcctgggtgctgccctgggcccggggaacagaacacacatctggctttttgttagaggtcttcatggaaagagtggttcatggtgggatgagcatctttctgaaaaaaatgccccattcattaaacagttggtccctgatgaaaataaagcccaattaccaagaaaactgtgtcctctgaaagatgaaccatgggctatacttccttgggaaaccggttcctttaaagtttggcttatttgacttgaaggctgggcatgttggcctttctgtagccacggtatgggcc

SEQ ID NO: 112620 - DNA, 629 bp, Homo sapiens
ctgaccccaagaaccccaggagaaacttccagcacgaaccagctcgccacctgctggaagcccaggctactacgtctaggctgtgtggcaagggctgggaggacccggcagaggtccctgggcctgggacagtgcggctggcagggggagctgggacctgctctcggctccacactaactcccctgccctaaggatgggggcagctgagacccctgccctgtgagcccttctatccccacaagttgtcaggacaatcccttgtggttagggggaggggcggggagagagctctatttctcagccagtgccaagctaccctccctcctgggctgtgatttcatttgtgcaatgggggtgtgcaggagtcactagcttctcggggcctgtcccgcacatacacgcacttatgcgacatccagacatttgatacattttccaagggcttggcctctcccctccagcctccagaagggagggcaggacacagctgcccttcgctcactgccctgatcccagcctgtgcccaggggccttaagccccctctctgcccaacccttcagtccccctctgtacccagggtggggagggggcagaatgggatggcgaggaggagggcatctgggcgat

SEQ ID NO: 112621 - DNA, 429 bp, Homo sapiens
ggggaccatggaggccgcaaggcccttcgcccgggagtggagggcccagtccctacccctggcagtagggggcgttttgaagctgcggctctgtgagctgtggctactgctactgggttctaatttgaacgccatatttttgccagacgaggaggacgtaaactttatcaacgagtacgtgaacctccacaatgagctgcggggcgacgtcattccccgagggtctaacttgcgcttgatgacttgggatgtagctttatcacggactgctagagcatggggaaaaaaatggttgtttacgcataatatttatttacaagatgtacatatggtccatgctaaattttatggtattggggaaaatatgtgggtaggccgtgaaaatgaatttactgcaagtattgttatcacaagttggcatgcaaagag

SEQ ID NO: 112622 - DNA, 1472 bp, Homo sapiens
tttcgtgtggattacctttatggagagtgggtgattatagtggaggcatctccattaactttacatgggatagctctttttcaaactaccctcatttaaaaagtctatcaaggcaatctaaacatagactttcctcaggccctcaagagtattgagtatctggaggaggatgcccagaagtccgcacaggagggggtgctgggaccacacactgatgctctgtcatcagactctgagaacatgccgtgtgatgaagaaccatcccaattagaggagctagctgacttcatggagcagcttacaccaattgaaaaatatgctttaaattacctggaattattccatacttctattgagcaagaaaaggagagaaacagtgaggacgcagtgatgactgcagtgagggcatgggagttctggaacctgaagaccctgcaggagagggaggcccggctgcggctggagcaggaggaggcggagctcctgacctacacgcgagaggatgcctacagcatggagtatgtctacgaagatgtcgatgggcagacagaagtcatgccgctctggaccccacccaccccgccgcaggacgacagcgacatctacctcgactcggtcatgtgtctcatgtatgaagccactcccatcccagaggctaagctgccccctgtgtacgtgaggaaggagcggaagcgacacaaaacagacccctcagctgcaggcaggaagaagaagcagcgtcacggggaggcggtcgtccctcctcggtccctgtttgaccgcgcaacaccaggacttctgaaaattcgcagagagggcaaggagcagaagaagaatattctgctgaagcagcaggtgccattcgccaagcccctgccaacttttgccaaacccacagctgagcctggtcaagacaaccccgagtggctcatcagtgaggactgggcgctgctgcaggctgtaaagcagttactggagctgcctttgaacctcacaatcgtgtcacctgctcacacacctaattgggatcttgtcagtgacgttgttaactcctgtagccgaatctaccgctcttccaaacagtgccggaatcgctacgagaatgtcatcattccacgagaggaggggaagagtaaaaacaaccgtcctctccgtacgagccagatctatgcccaggatgagaatgccacacacacccagctgtacacgagccactttgacttaatgaaaatgactgctggcaagaggagtcccccaatcaaacctctgcttggcatgaatccctttcagaagaaccccaagcacgcgtctgtgttggcagaaagtggaatcaactatgacaagccgctgcctcccatccaggtggcatctctccgtgcagagcgaatcgcaaaagagaaaaaggctctggctgatcagcagaaggcacagcagccggccgtggcccagccacccccgccccagcctgtatt

SEQ ID NO: 112623 - DNA, 1490 bp, Homo sapiens
acgccagcttgcacgaggacgtgaggaaaaggtccctcgggctggaggacccgtcccggctgcggagtcgctacctgggaagaagagaatttatccaaagattaaaacttgaagcaacccttaatgtgcatgatggttgtgttaatacaatctgttggaatgacactggagaatatattttatctggctcagatgacaccaaattagtaattagtaatccttacagcagaaaggttttgacaacaattcgttcagggcaccgagcaaacatatttagtgcaaagttcttaccttgtacaaatgataaacagattgtatcctgctctggagatggagtaatattttataccaacgttgagcaagatgcagaaaccaacagacaatgccaatttacgtgtcattatggaactacttatgagattatgactgtacccaatgacccttacacttttctctcttgtggtgaagatggaactgttaggtggtttgatacacgcatcaaaactagctgcacaaaagaagattgtaaagatgatattttaattaactgtcgacgtgctgccacgtctgttgctatttgcccaccaataccatattaccttgctgttggttgttctgacagctcagtacgaatatatgatcggcgaatgctgggcacaagagctacagggaattatgcaggtcgagggactactggaatggttgcccgttttattccttcccatcttaataataagtcctgcagagtgacatctctgtgttacagtgaagatggtcaagagattctcgttagttactcttcagattacatatatctttttgacccgaaagatgatacagcacgagaacttaaaactccttctgcggaagagagaagagaagagttgcgacaaccaccagttaagcgtttgagacttcgtggtgattggtcagatactggacccagagcaaggccggagagtgaacgagaacgagatggagagcagagtcccaatgtgtcattgatgcagagaatgtctgatatgttatcaagatggtttgaagaagcaagtgaggttgcacaaagcaatagaggacgaggaagatctcgacccagaggtggaacaagtcaatcagatatttcaactcttcctacggtcccatcaagtcctgatttggaagtgagtgaaactgcaatggaagtagatactccagctgaacaatttcttcagccttctacatcctctacaatgtcagctcaggctcattcgacatcatctcccacagaaagccctcattctactcctttgctatcttctccagatagtgaacaaaggcagtctgttgaggcatctggacaccacacacatcatcagtctgataacaataatgaaaagctgagccccaaaccagggacaggtgaaccagttttaagtttgcactacagcacagaaggaacaactacaagcacaataaaactgaactttacagatgaatggagcagtatagca

SEQ ID NO: 112624 - DNA, 450 bp, Homo sapiens
  misc_feature (1)...(450): n = a,t,c or g
gggacaacggnttgatttaggggaacgacccacgcgtccggcggccatggacgactccgagctgcatttgtttgagcagcggatccgcagcttccccgagttgggcaccccaggcgtggtattcagggacatctcgcccgtcctgaaagaccccacctacttccgcgccgccatcggtctactggcgcgacacctgaaggcgacccacgggggccgcatcgactacatcgcaggcctagactgccgaggcttcctctttggcccctccctggcccaggagcttggactgggctgcgtgctcatccgaaagcggaggaagctgccaagccccactctgtgggcctcctattccctggagtacgggaaggctgagctggagattcacaaagacgccctggaaccaggacagagggtggtcgtcgtggatgatctgctggccactggaggaac

SEQ ID NO: 112625 - DNA, 844 bp, Homo sapiens
ggcggcttaccgggaggggctttttcgcctatacctactgtagcttctccacgtatggaccctaaaggctactgctgctactacggggctagacagttactgtctcagctctaggatgtgcgttcttccactagaagctcttctgagggaggtaattaaaaaaacagtggaatggaaaaacagtgctggagtcatcctgtaatatgctccttgtcaacaatgtatacattcctgctaggtgccatattcattgctttaagctcaagtcgcatcttactagtgaagtattctgccaatgaagaaaacaagtatgattatcttccaactactgtgaatgtgtgctcagaactggtgaagctagttttctgtgtgcttgtgtcattctgtgttataaagaaagatcatcaaagtagaaatttgaaatatgcttcctggaaggaattctctgatttcatgaagtggtccattcctgcctttctttatttcctggataacttgattgtcttctatgtcctgtcctatcttcaaccagccatggctgttatcttctcaaattttagcattataacaacagctcttctattcaggatagtgctgaagaggcgtctaaactggatccagcgggcttccctcctgactttatttttgtctattgtggccttgactgccgggactaaaactttacagcacagcttggcaggacgtggatttcatcacgatgcctttatcaggccttccaattcctgccttcttttcagaagtgagtgtcccagaaaagacaattgtacagcaaaggaatggacttttcctgaagctaaatggaacaccacagccagagttttca

SEQ ID NO: 112626 - DNA, 406 bp, Homo sapiens
tgtgctgcaaccatgtctctagtgatccctgaaaagttccagcatattttgcgagtactcaacaccaacatcgatgggcggcggaaaatagcctttgccatcactggcattaaaggggtgggccgaaaatatgctcatgtggggttgaggaaagcaaacattgacctcaccaagagggcgggagaactcactgaggatgaggtggaacgtgtgatcaccattatgcagaatccacgccagtacaagatgccagactggttcttgaacagacataatgatgtaaaggatggagaatacagccaggtcctatccaatggtctggacaacaagctccgtgaagacctggagcgactgaagaagattccggcccatagagggctgcgtcacttctggggccttcgtgtcg

SEQ ID NO: 112627 - DNA, 384 bp, Homo sapiens
  misc_feature (1)...(384): n = a,t,c or g
nnnnnnnnnnnnnnnnnnnnnnnnnnnnnnnnnnnnnnnnnnnnnnnnnnnnnnnnnnnnnnnnnnnnnnnnnnnnnnnnnnnnnnnnnnnnnnnnnnnnnnnncacttgcttcttatccttacactcccccagccccagagaaactgccacatacaccacaaaaaccaaacatcccccaatgaccttagccccattgctccattcactcccaggtgagaattcaggcaaacgtccacaaaggtcacaggcagcgtacatacggttctgttataccccatatattaccccttcatgtcctaaagaagacattttctcttagagattttcattttagtggatctttaaaaaaaaatcttgtggtaacttgcctccatcttttttg

SEQ ID NO: 112628 - DNA, 284 bp, Homo sapiens
caattcattccagcctggcaaaagaatgagactccgtctcaaaaaaaaaaattaactcaagatagattaagaattcattactaagtcctcaaaagcaattgcaaaaacaaaaaatgacaagtgggccctaattaaacttaagaacaagagaaactatccacatttcaataaacatggtgtttttcactaacatttaggctaagagccaaatcaagaacatcattctctcggtatctttatggagcaaaatgtttatggtagagacaggtgaccttggcagctag

SEQ ID NO: 112629 - DNA, 365 bp, Homo sapiens
cgccggtgccgggcgaacatggcggcggcttccgtaccctcgttttggctggggaatgaaggcctgaaggtgccgctggcgctctttgccttgaaccggaagcgcctgtgtgagcggctgaggaagaaccctgctgtgcaggccggctccatcgtggtcctgcagggcggggaggagactcaccgctactgcaccgacaccggggtcctcttccgccaggaggccttttttcactgggcggtcggcggcactgaacccagctgctatggtgtcatcgatgttgacactgggaagtcgaccctgtttgtgcccacggtttctggcatccatgccacctggaagggaaagatccattgcaaggagcg

SEQ ID NO: 112630 - DNA, 753 bp, Homo sapiens
cggccgcgtcgacggccaccatggtaccatccgtgttgtggcccagggcctgctggactctgctggtctgctgtctgctgaccccaggtgtccaggggcaggagttccttttgcgggtggagccccagaaccctgtgctctctgctggagggtccctgtttgtgaactgcagtactgattgtcccagctctgagaaaatcgccttggagacgtccctatcaaaggagctggtggccagtggcatgggctgggcagccttcaatctcagcaacgtgactggcaacagtcggatcctctgctcagtgtactgcaatggctcccagataacaggctcctctaacatcaccgtgtacaggctcccggagcgtgtggagctggcacccctgcctccttggcagccggtgggccagaacttcaccctgcgctgccaagtggaggatgggtcgccccggaccagcctcacggtggtgctgcttcgctgggaggaggagctgagccggcagcccgcagtggaggagccagcggaggtcactgccactgtgctggccagcagagacgaccacggagcccctttctcatgccgcacagaactggacatgcagccccaggggctgggactgttcgtgaacacctcagccccccgccagctccgaacctttggtgagagaaggggcttcagacggtgggtgacgagctgagccagggtagacggtgccctgaccttggggttcctgagagtggggtaccccggac

SEQ ID NO: 112631 - DNA, 396 bp, Homo sapiens
  misc_feature (1)...(396): n = a,t,c or g
nnnnnnnnnnnnnnnnnnnnnnnnnnnnnnnnnnnnnnnnnnnnnnnnnnnnnnnnnnnnnnnnnnnnnnnnnnnnnnnnnnnnnnnnnnnnnnnnnnnnnnnnnngnnnnnnnnnngatcacacaggaaaacagaagttcgattttacgtcgaacactgctgtaatttcagcacatgtggactcgtgtaaccaacaccataaccttccatcacccctgaaactccctcccgccagccctttagggttgcccctccccccgaaccccaccagcccctggggaccactgatctgtcctccaacccatagtgtttttccgggaatgtcacaaaaacagaagccgaccatgggtcacctttctggcgcctttctccccgcacaaagtctttgtccttgg

SEQ ID NO: 112632 - DNA, 815 bp, Homo sapiens
  misc_feature (1)...(815): n = a,t,c or g
ttaaaaagtctaccggcagataccngtaatgtcctagtccttggcattctctcacaactcactcactgatgcaccccngaaatncagtcccacaagctccattcatggcaagtatcttataccggtgtgcccattttttaatattttataccagtatttttactgtacctttgctatgtttagatacacaaacaccactgtgttataaaatgcctacagcattcaatacaggtatgctatatgctatataatatgctatacaggtttgtagcctaggagcaataggctataccatataacttaggtatgtagtaggctaccccattgctgtttgtgttagtgtgctctatgatgcttgcatgatgcaatcacctaataacacatttctcagaatgtatccctgtagtgacaaatgtatatgcaaattcctaatgacctgctcttttatgactgttacctatctcctgccatatacactgttttgaggcctattatctgatactactatagccatgccaactttcttatacttaatgtgtatctttttcttgaccaattttaagtagctttctcagcttagaatttctaattcacacgtgtagtattttttttttttttaaacggagtctcactttgtttcccaggctggagggcaacaaagcaacattttttttcaaaaaaaaaaaatttcccccccaggggggggcggggcttatgccttaaaaccccacccttttggggggcgggggggggggaatcacagggccggaaaatcaaaaccttctgggcaaaccggggaaacccctttttttaag

SEQ ID NO: 112633 - DNA, 488 bp, Homo sapiens
  misc_feature (1)...(488): n = a,t,c or g
nnnnnnnnnnnnnnnnnnnnnnnnnnnnnnnnnnnnnnnnnnnnnnnnnnnnnnnnnnnnnnnnnnnnnnnnnnnnnnnnnnnnnnnnnnnnnnnnnnnnnnnnnnnnnnnnnnnnnnnnnnnnnnnnnnnnnnnnnnnnnnnnnnnnnnnnnnnnnnnnnnnnnnnnnnnnnnnnnnnnnnngcgtgtcaaaaaagaataacttgaggaatgactgtgggctattgtaaacataatcagatagttattctaattgtagctgctgtaccagatgtaatatgcttgctggaacaaatcaacagaatctggtattggtatgcagctattaacctgcctaatgcctttttctccatatcaattttcaaggaccaccagaagcagtttgcttttaattggcagacccaacagtataccttgagagtggtatttccaggctacagcagttctcctgctctttgccccaatattgacgaaatgtcgaccggaat

SEQ ID NO: 112634 - DNA, 274 bp, Homo sapiens
ctggaaactgttcttcaggaagaaacccattagtttggaactggagaattcctttgcatcagatactaaaatgaaagaaccacttttaggtggtgagtgtgacaaggcagtggcatcacagctggggctgctagatgaaattaagacagaacccgacaatgctcaagagtattgtcataggcaacagtccagaactcaggagaatgaactgaaaataaatgctgtgttttcagagagtgcttcacagttgactgcaggcattcagctttctctg

SEQ ID NO: 112635 - DNA, 401 bp, Homo sapiens
ggtcgacgatttcgtcttacttgtctggccccaaaaatactactgaaatagaagaggtttctgtcatgatttgaataaaactcttgacatcatgcaccactgtcctaggatgctatttttcagggactcagaacccataatgctgaggccagattcatttgcatcttctgaccacagaagatgatcccaccaccaagataaccaagtacatgagacatacatgagtgtaagaacaaagggaaagacagaacaaggaagcagccaacactggcttagaacaactcagcacatgacagcagacaggaaacaatattacaaaaagaatttctgttttttgagacggagtcttgctctgttgctcaggctggagcgcagtggcacaatctcggctcactgcaacc

SEQ ID NO: 112636 - DNA, 471 bp, Homo sapiens
  misc_feature (1)...(471): n = a,t,c or g
cccgggtcgacgatttcgtcctaaattgagctgtcaggcacttggctgcgtaaccatgctttctggattgtggtgttgaaagtgccatcctgtgtgttctctccggatggctgtcacatacttgcgtctgagaacagtgtatggacctgcatgagcactaatcagtcttcctagcagacttgctctttctctggtcgtatgccgccagatcctctgagaagagagtgggcctttcccctcaatgggcaaagaaccagcttccattttaaaagctctcagaaaaaaaagaaagnnnnnnnnnnnnncccccaccacccaaaagcctgggtttattgaaaaaaggggcaaaaccgaaccctttcccatcccaaatggggccgggaggaggaaaaaaaaccggaggggccgggccactgactctttgccaggaaagtttgaaaattttgccaacctgacctctgaattggttgg

SEQ ID NO: 112637 - DNA, 349 bp, Homo sapiens
cggacgcgtgggcggacgcgtggggttctgctatgatctctgttgtaattaccaatttggttcaagtttgttctttaaatgaatatgcttagaattcacatatgttctggatgtactggaattaaaaggatttaagagatcatggtgtgcatgttctaggataaataggatttaccaatccttggatgaagtgcttgggaagtctttaagtgccataatcatctgccatttcaaagaatatagatggttttgaaaagttcatgctgtcccttcattgaattttagaatgattgaagatagtgggaaaagaggaaataccatggcagaaagaagacagctgtttgcagag

SEQ ID NO: 112638 - DNA, 822 bp, Homo sapiens
cggcacgaggaagcgcaggcgagtagggccagacatggtggctcatgcctgtaatctcagcactttgggagactgagatgagaagatcacttgaggccaggagttcgagaccagactggcaacatagtgagaccctgtctctacaaaatgctggccaaggagcagggcctgcgccccgtggtctcatagagcctggcctgttctggaagagcacccagttgttccttctaggctgcccaagccccactgatgatggctgagagggaagaggactgactacactgaggaagcctggatgcagctacggcccacagaacccttgccttcccagtgctgcggcagtggctgctcaccctgtgtgtttgacctctatcaccgagatctggcaaggtgggaggcagcccaagccagcaaggacaggagcctgctgcgtgggccagagtcacagagctgcccctccaagttgaacccagagaccttcgtggccttctgcatcattgccatggacaggctcactaaggacacctaccgtgtccggtttgctctacccgggaacagccagcttggcctgcggcccggccagcacctcatcctacgagggatagtagatgacttagaaattcagagagcctatacgcccatcagccctgccaacgcagaaggatactttgaagtgttaattaagatgaagaaactgaagctcaaaaagatgacatcatttgtctcaaggcctcttgggtaatatgatccaaatggaaggacaaaagttcagtgtcagttctgtttaacaagtatgtattaaacatttactctgtgccaggc

SEQ ID NO: 112639 - DNA, 445 bp, Homo sapiens
  misc_feature (1)...(445): n = a,t,c or g
tcgacgatttcgtnnnnnnnnnnnnnnnnnnnnnnnnnnnnnnnnnnnnnnnnnnnnnnnnnnnnnnnnnnnnnnnnnnnnnnnnnnnnnnnnnnnnnnnnnnnnnnnnntgggattgcaggcttgagccacgctgggattggagacgtgggccacgctgggattggagacgtgggccacgctgggattggagacgtgggccacgctgggactggagacgtgggccacgctgggattgcaggcttgagccacgctgggactggagatgtgggccacgctgggactgcaggcgtgggccacgctgggactgcaggcgtgggccacgctgggactgcaggcgtgagccacgctgggattgcaggcgtgggccacgctgggattgcaggcttgagccacgctgggattgcaggcttgagccacgctgggatcggagacgtgggccacg

SEQ ID NO: 112640 - DNA, 385 bp, Homo sapiens
  misc_feature (1)...(385): n = a,t,c or g
gttntaagccctaaatgcctggtttcagttgccacatatatactgaggacgtccagtttgctgtgcccgggtctgacttatgtggatttcagtcttgccggccttctttttgtttctcaagtgcatcaagttctttcctaactcagagtttttgcatttgctgtttcctcttccaggaaggctgtctttttctcatcctttagtctctcttcaaatgtcatttcctcgcgtgtcctccctcctcgctgtcctctggctcgcaggtcatggcagcgccaggcggcaggtcggagccgccgcagctccccgagtacagctgcagctacatggtgtcgcggccggtctacagcgagctcgctttccagcaacagcacgagcggcgcct

SEQ ID NO: 112641 - DNA, 448 bp, Homo sapiens
  misc_feature (1)...(448): n = a,t,c or g
taaacaaaaaattgcagggggaccccaaccctttttccaagttggctttgcaaaaggcccaagggttgggcaagaacctggcaaagtgggttctgtggccccctcctccccctccctgtttttggggtgatggaatgcccctccctggattgaaaaaatgggttaacctttattctggatgttcccccttgggccttccctgctttggagggggcaggaggcccccttttctattcctggaggtgcaagggcccccggaggggcaggggccannnnnnnnnnnnnnnnnnnnnnnnnnnnnnnnnnnnnnnnnnnnnnnnnnnnnnnnnnnnnnnnnnnnnnnnnnnnnnnnnnnnnnnnnnnnnnnnnnnnnnnnnnnnnnnnnnnnnnnnnnnnnnnnnnnnnnnnnnnnnnnnnnnnnnnnnnnnnnnnnnnnnnnnnnncgaaa

SEQ ID NO: 112642 - DNA, 695 bp, Homo sapiens
gccgggcggtcctgcacgagctgtgagggcaacggaggggatataatggggaacggatccgaaggtgccccagtggtcgatgcgagacctcggcgccgacatcgcgacagcgaagcgctttgcacgccaggaaggtcccctctatgtgctgctgagccggtcctggacgcgacgagcccgccctcggtcttcggagcagaaatcgcaaaaacggaaggactggaaatggcagaccatatgatggccatgaaccacgggcgcttccccgacggcaccaatgggctgcaccatcaccctgcccaccgcatgggcatggggcagttcccgagcccccatcaccaccagcagcagcagccccagcacgccttcaacgccctaatgggcgagcacatacactacggcgcgggcaacatgaatgccacgagcggcatcaggcatgcgatggggccggggactgccccatgcccatgcggggggcagggtgatggtgcaccccattggtgccgtcggggaagcgcccgcggttcatggccatcatatggtctgccatttccagtccttccgtttttgcgatttctgctcccaagaccgagggcgggctcgtcgcgtccaggaccggctcagcagcacatagaggggaccttcctggcgtgcaaagcgcttcgctgtcgcgatgtcggggccgaggtctcgca

SEQ ID NO: 112643 - DNA, 397 bp, Homo sapiens
aaaagcgagtgggatatcccaatctttggactgcatcctgggtgcctctactggggtcaccttggggaagaaatgtcttctgtaaaaagaagtctgaagcaagaaatagttactcagtttcactgttcagctgctgaaggagatattgccaagttaacaggaatactcagtcattctccatctcttctcaatgaaacttctgaaaatggctggactgctttaatgtatgcggcaaggaatgggcacccagagatagtccaatttctgcttgagaaagggtgtgacagatcaattgtcaataaatcaaggcagactgcactggacattgctgtattttggggttataagcatatagctaatttactagctactgctaaaggggggaagaagccttgtt

SEQ ID NO: 112644 - DNA, 851 bp, Homo sapiens
actccgtgctctgcagacgatgcgctggcagagagtcctattcttcaatcaggcaggcctaatggccatctacacactgacccaacatcttcactgctggacttctacccatgtggttcatagaatgcccccttctttaacacagggaactgtcctgggccaggtcaaattaagccagtcaggtccttcctgctcaggggcccccaatttatctgggagccccactttacaggttcagcctactctagacatagcccccccctgtaggcctagcctcagaggcttcctgaggacacagccaataaggccagcggccctgacctggctttctgcctgccaaggaaagagcttttccaggcagtaactctccctccgagcaggctgctcctaagcctggccagctctgtagaccgcagaggccagggcaagcacacactggccagacaccctgcccaggctcccaagacctccccttgccctctagagacacagcatgggtaccagagaggcaggagagccagtcttgcaggcatgctgccaggtccgcatccatgaggacagaggaggcagaccacacctggcatgccagagccctccctccctgccagccactcacagcccacaccctcttcctgacagggctggcaagaggagatcctcacctttctgtcattagcatctctggacctgccagagaacccacctgggcagtagctactcacccccaccccaacccaaagagatcacaagccaagagcaaggcaggctgcccttgcccatccccagtctctctccagccacgggaaggaaagattaagatttaacccgcagggaacagtggctcatgccaa

SEQ ID NO: 112645 - DNA, 431 bp, Homo sapiens
  misc_feature (1)...(431): n = a,t,c or g
cccnnnnnnnnnnntccaggccgccaatcccacccctttggggggccagggcggggggcccccaagggccaggggttcagacccacccgggccacccgggggaaacccctttttttttaaaaatccaaaaaaaattcgccgggcaggggggccccccccgttattcccggttcttgggagggttaggccaaaaaattccctttacctggaaaggggaaggggccattaacccaaattccccccttgcccttccggctggggggccaaaagggggctttctttccnnnnnnnnnnnnnnnnnnnnnnnnnnnnnnnnnnnnnnnntgcctctctgcggtccatttcacttgtaagaacaaaactgacaaaaaatatttattactctgagtagttctgaaaatgacccatggtttcactttcggacgcgtggg

SEQ ID NO: 112646 - DNA, 388 bp, Homo sapiens
  misc_feature (1)...(388): n = a,t,c or g
cacattatgaaacctgtgaacatgttcaattattttctccttttaaaatctttttctagtatgtgaggctatcatatgacaccaaacctgaagtcattctgcaacttctgcttaaagaatggcaaatggagttacccaaacttgttatctctgtacatgggggcatgcagaaatttgagcttcacccacgaatcaagcagttgcttggaaaaggtcttattaaagctgcagttacaactggagcctggattttaactggaggagtaaacacaggtaatgtgatgattataccaattttatttagtgtgttttaannnnnnnnnnnnnnnnnnnnnnnnnnnnnnnnnnnnnnnnnnnnnnnnnnnnnnnntgcttccaaatgaagata

SEQ ID NO: 112647 - DNA, 570 bp, Homo sapiens
attttcttctcatagctttaatttagtttaattttttgagacagagcctcactctgtcgcccaggctctgttgcccgggctggagtgcaatggcacaatctcggctcaccgcaacctccacctcccaggttcaagtgattttcctgcctcatcctcctgtgtagctggcatgacaggcgtgtgccaccacacttggttaatttttgtatttttagtaaaggcagggttccgccatgttggccaggctggtctcaaacttctgacctcaagtgatctgcccgcctcggcctcccaagttgctgagaccacaggcgtgagccactgcacctggcctcatagcctttaaaccacctcagagaccttaatctggtgtcgaaaattcaaacaacttattaccactgatctctggaaagttcatgatattttatcaattgaaaataatcacccatgcatcagcctattgtttttataaaagaagcttatttagcacaacctatgcctgaacatactcccaaggagatgtacagaaaaataaggtatctgtcttcaaacaaactttacctttacatt

SEQ ID NO: 112648 - DNA, 437 bp, Homo sapiens
  misc_feature (1)...(437): n = a,t,c or g
ggnnnnnnnnnnnnnnnnnnnnnnnnnnnnnnnnnnnnnnnnnnnnnnnnnnnnnnnnnnnnnnnnnnnnnnnnnnnnnnnnnnnnnnnnnnnnnnnnnnnnnnnnnnnnnnnnnnnnnnnnnnnnnnnnnnnnnnnnnnnnnnnnnnnnnnnnnnnnnnnnnnnnnnnnnnnnnnnnnnnnnnnnnnnnnnnnnnnnnnnnnnnnnnnnnnnnnnnnnnnnnnnnnnnnnnnnnnnnnnnnnnnnnnnnntccaccctgctagagattgggaaaaagagtttttccattagagtgcacaaatttcaaatctgcgggcattaaagaaggattttttaagttctcccccaaaaaaacatgtccgttttggtggaactgagacagaaattttgctgagatccaccaggggtgaaacaagagactttgagttgttgaaaa

SEQ ID NO: 112649 - DNA, 437 bp, Homo sapiens
  misc_feature (1)...(437): n = a,t,c or g
caggaattcggcacgagnnnnnnnnnnnnnnnnnnnnnnnnnnnnnnnnnnnnnnnnnnnnnnnnnnnnnnnnnnnnnnnnnnnnnnnnnnnnnnnnnnnnnnnnnnnnnnnnnnnnntatcggtgtgggtggtgccccacaaccatctgtacagtttgaattaatccaagcatcatatgatgtgttgagtgaccctcaagaaagagcatggtatgataatcatagagaggccctacttaaaggtgggtttgatggcgaatatcaagatgacagcttagatttgctacgctatttcaccgttacctgttattctggttatggagatgatgaaaagggattttacacggggtatcgtaatgtttttgaaatgattgccaaggaagaactagaatctgtgttagaagaagaggttgatgatttcccaacttttggagac

SEQ ID NO: 112650 - DNA, 378 bp, Homo sapiens
  misc_feature (1)...(378): n = a,t,c or g
attagtcgctttgaataaatactcccttaagtagttaaatataggaggagaaagaatacatcggttgttaaagcaggagaggaagagagacctgccctgtagcgtgactcctctagnnnnnnnnnnnnnnngccggggtatttaactacccccctaaaaggccgagatttgtacaaaattttaccaaagcatggtctaaaaagggggcttctcatttccaaaaagcatttcggcaaaagctaaaattttttgtgaaaagggaactagaaaaaatactccccccggcatcttcactggattttgagcaccccaaaaaagaccggggtggttttggaaagctatttcataaattttggcaaaaaaggggcccttctgtgg

SEQ ID NO: 112651 - DNA, 457 bp, Homo sapiens
  misc_feature (1)...(457): n = a,t,c or g
nnnnnnnnnnnnnnnnnnnnnnnnnnnnnnnnnnnnnnnnnnntccagnnnnnnnnnnnnnnnnnnnnnnnnnnnnnnnnnnnnnnnnnnnnnnnnnttactttcttcttcttcnnnnnnnnnnnnnngaaaacggggggccggggggaaaattgggtcaaaaaaggccttgggccccgggggaaaggggattttttgggttaacccccccggggaggggggaaaaagggggggggcccccgggcccagtaaattttggagtttttaaaaaaaaagggggtttaaaaggggggccggggagaaccaaattctggggcctggggaccccccttcccgggccccccaaatgggggggaaaaaggggagggccccggggccccacccccttaatttttaaaaaaaagggccctcgggggannnaaannnnnnnnnnnnnnnnnnnnnnnnnnnnnnnnnn

SEQ ID NO: 112652 - DNA, 379 bp, Homo sapiens
gacgctgcagaatggctcccgcaaagaagggtggcgagaataaaaagggccgttctgccatcaacgaagtggtaacccgagaatacaccatcaacattcacatgcgcatccatggagtgggcttcaagaagcgtgcacctcgggcactcaaagagattcggaaatttgccatgaaggagaagggaactccagatgagcgcattgacaccaggctcaacaaagctgtctgggccaaaggaataaggaatgtgccataccgaatccgtgtgcggctgtccagaaaacgtaatgaggatgaagattcaccacataagctatatactttggttacctatgtacctgctaccactttcaaaaatctacagacagtcaatgtgga

SEQ ID NO: 112653 - DNA, 373 bp, Homo sapiens
  misc_feature (1)...(373): n = a,t,c or g
cgggtgagtgagagagttggttggtgttgttccgtatgaaagcggcaagactcatcggagcgtgcggatttgagccgccgcattttttaaccctacatctcgaaatgcatcgggattcctgcccattggactgtaaggattatgcaggccatcttggaaacaatggcaacaagacggaattggaacgggcttttggctactatggaccactccgaagtgtgtgggttgctaaaaacccacccggctttgcttttgttgaatttgaagatccccgagatgcaactgatgcagtccgagagctacatggaagaacactatgtggctgccgtgtaatagtggaactgtcgaatggtgaaaaaagaagtcaaaatan

SEQ ID NO: 112654 - DNA, 423 bp, Homo sapiens
  misc_feature (1)...(423): n = a,t,c or g
ggatgggtctcttgtcaaaatcagnnnnnnnnnnnnnnnnnnnnnnnnnnnnnnnnnnnnnnnnnnnnatatgacctctnnnnnnnnnnnnnnnnnnnnnnnnnnnnnnnnnnnnnnnnnnnnnnnnnnnnnnnnnnnnnnnnnnnnnnnnnnnnnnnnnnnnnnnnnnnnnnnnnnnnnnnnnnnnnnnnnnnnnnnnnnnnnnnnnnnnnnnnnnnnntggagttcagagtggaaacaggtgtgagagggttcaacagaagaaaacatagctgccaagtgtttgagtccatcggcaagtttggactggccttagctgttgcagaaggcatggtgaactctgccttatataacatggatgctgggcacagaactgtcatctttgaccgattctgtggagtacaggacattgtggtagggtaa

SEQ ID NO: 112655 - DNA, 409 bp, Homo sapiens
  misc_feature (1)...(409): n = a,t,c or g
cggaggcggnggatttctggtaggtcctactttaggacaagatgtggtaccgttgaagcgtcagtctttgattcacagacagttgagcttttcagctgggaagcctttccannnnnnnnnnnnnaacggctttctgaacctatgaaaccatggcaaaaggagagacagagtcccctgggcccaaaaaggggggcccatatatttcatctgtcactacccaaagggggaacttgatgattcgaggagaagggctattttttatgggagaatttcttgcattagggttaaatttacttcaaattcaaagaaaggggacgctctttccacctgaggggatggcaagcatctttttttctgcagggggggtacccccatgctggggcacggcttcaactgggattgggttata

SEQ ID NO: 112656 - DNA, 453 bp, Homo sapiens
  misc_feature (1)...(453): n = a,t,c or g
cattgtgcgagtcgtgcaattnnnnnnnnnnnnnnnnnnnnnnnnnnnnnnnnnnnnnnnnnnnnnnnnnnnnnnnnnnnnnnnnnnnnnnnnnnnnnnnnnnnnnnnnnnnnnnnnnnnnnnnnnnnnnnnnnnnnnnnnnnnnnnnnnnnnnnnnnnnnnnnnnnnnnnnnnnnnnnnnnnnnnnnnnnnnnnnnnncaaaacggggagttattagcccnnnnnnnnnnaggatattccataaccggacccatccggccctctttttgcatggcagggttccccctgtctggaaaggaaacatctttggcccttgaaaccggcctgttgatttggtgggcccgggggctaggggaaatggtttgggttgggcccaaaaaggctgaaaccaagttggagccgggccccttcttccttttccggtggcctctaatggggtggaactcagctta

SEQ ID NO: 112657 - DNA, 477 bp, Homo sapiens
  misc_feature (1)...(477): n = a,t,c or g
ntatctcctcaacatttcnnnnnnnnnnnnnnnnnnnnnnnnnnnnnnnnnnnnnnnnnnnnnnnnnnnnnnnnnnnnnnnnnnnnnnnnnnnnnnnnnnnnnnnnnnnnnnnnnnnnnnnnnnnnnnnnnnnnnnnnnnnnnnnnnnnnnnnnnnnnnnnnnnnnnnnnnnnnnnnnnnnnnnnnnnnnnnnnnnnnnnnnnnnnnnnnnnnnnnnnnnnnnnnnnnnnnnnnnnnnnnnnnnnnnnnnnnnnnnnnnnnnnnnnnnnnnnnnnnnnnnnnnnnnnnnnnnnnnnnnnnnnnnnnnnnnnnnnnnnnnnnnnnnnnnnnnnnnnnnnnnnnnnnnnnnnnnnnnnnnnnctcccctccctgccacacacacctccacatgcacacacacacctccatatacacacaccttcacatgtgcacacacacctccgcatgcacgcgtacactttccccgacacttcacta

SEQ ID NO: 112658 - DNA, 799 bp, Homo sapiens
tgtttactaaataagtatttattacattattgttaggtatgacaaacaattggggaaaatcctaaatgttaacagaaaattgaattatgtttgcagaattgtggtacactcgcttaatggtatattatgcagccattaaaagttacaaatacattaaagttacaaagcaagatacagcactgcctattattaaagggagaattgcatacaaaatgaactcaaccatgtgaaagaaaacaaatagggaagtaaatagagatagaaaaatatatcaggaaggcatccatgctcacaatgatggaagctataaaaatatttctactttctatatctttctgatttttattataaagaagatgtgctggctacatttctttgatatttttaagagcgatttttaaaatatttaagttggcttattttagatatgaaaagactaagagccatacagctaaatataytggctsacatacttcttaaaagtcatcttataaataaccggggttaactgaatatgggctaggtattatagataatattagggaattatttttggagatatattagttgaagcagttatagctgctttttagaaaaatcaataatttaaaacaaatagctctgaagacatttaacacatacatcttaacttatacttccaaatgaatattgcccttaagataattccctggccaggtgcggtggctcactcctgtaatcccagaactttgggaggccgaggtgggtggatcacccgaggtcaggagttcgagaccaacctggccaacatggtgaaacc

SEQ ID NO: 112659 - DNA, 415 bp, Homo sapiens
  misc_feature (1)...(415): n = a,t,c or g
cgctctgccagccagaaataatggaagaattgcatagcctggacccacgacggcaggaattattagaggccaggtttactggagtaggtgttagtaagggaccacttaatagtgagtcttccaaccagagcttgtgtagcgtcagatccttgagtgataaaggagtagaggtaagaagctatgttcatggcaggacttttcatacttgtactttnnnnnnnnnnnnnnnnnnnnnnnnnnnnnnnnnnnnnnnnnnnnnnnnnnnnnnnnnnnnnnnnnnnnnnnnnnnnnnnnnnnnnnnnnnnnnnnnnnnnnnnnnnnnnnnnnnnnnnnnnnnnnnnnnnnnnnnnnnnnnnnnnnnnnnnnnnnnnnnnnnnnnnnnnnnnnnnnnnnnnaagatcgtttgcacccagga

SEQ ID NO: 112660 - DNA, 416 bp, Homo sapiens
  misc_feature (1)...(416): n = a,t,c or g
cnnnnnnnnnnnnnnnnnnnnnnnnnnnnnnnnnnnnnnnnnnnnnnnnnnnnnnnnnnnnnnnnnnnnnnnnnnnnnnnnnnnnnnnnnagggaggtgaaactttacaggctccaagactagtgtccctggaaggcagaggagccttgggctgctctgttgggttctgggcccctggccgcaagtttctgtatttcctgatctctagtactctgatcccgggtgttccagcttgacggctctgctctgatgctgggtccaatgcctctgatcgtatctctgtccatccttctcattcccacccaggtactatcgtggtgcagggggggccctcctggtgtttgacctaaccaagcaccagacctatgctgtggtggagcgatggctgaaggagctctatgaccatgctgaagccc

SEQ ID NO: 112661 - DNA, 445 bp, Homo sapiens
  misc_feature (1)...(445): n = a,t,c or g
cgccaccactgagaccttcgtanagngcggcggaattctgagactacctttctgcgatcacaggattcccggcggtgacttgaccccggaagtggggtgtgaagctccggtgctggtgcggcgggggactgcggggccagcctcaggtagcagcagcagcagcagcagcagcagcnnnnnnnnnnnnnnnnnnnnnnnnnntgtttcacttcttcagaaagcctccggaatctaaaaagccctcagtaccagagacagaagcagatggattcgtccttttaggagatacaacagatgagcaaagaatgacagcaagaggcaaaacttcggacatagaggccaaccaacctttggagaccaacaaagaaaattcatccagtgtgactgtatcagaccctgagatggaaaataaggcaggccagactctggagaacagctcattaat

SEQ ID NO: 112662 - DNA, 451 bp, Homo sapiens
  misc_feature (1)...(451): n = a,t,c or g
gtgcacttttgntttgggccctacaactgcaccctgagccggagctgcccagtcgccgcgggaccgtggtttctggggtctggacgggggtcgccatgatccgctttatcctcatccagaaccgggcaggcaagacgcgcctggccaagtggtacatgcagtttgatgatgatgagaaacagaagctgatcgaggaggtgcatgccgtggtcaccgtccgagacgccaaacacaccaactttgtggnnnnnnnnnnnnnnnnnnnnnnnnnnnnnnnnnnnnnnnnnnnnnnnnnnnnnnnnnnnnnnnnnnnnnnnnnnnnnnnnnnnnnnnnnnnnnnnnnnnnnnnnnnnnnnntccggaactttaagatcatttaccgccgctatgctggcctctacttctgcatctgtgtggatgtcaatgacaacaacctggcttacctggaggc

SEQ ID NO: 112663 - DNA, 480 bp, Homo sapiens
  misc_feature (1)...(480): n = a,t,c or g
actcctcgtaattcggcgtgtactaaaagaaaagcccactccagttctgttggatttagctttactggtgcccttgctgcccagctcacacaagctcttctctgggaaaagggagagcttgtcctttgtttgtttgtttgttttaactgatggtttcgttttgtttttttttaagatggagtctcactctgtcgccaggctggagtgcagtggcgcaatctcggctcactgcaacctccgacntccctgttcaagcgattctcctgcctcagctacttgggagctaaggcaggagaatcacttgaacccaggaagtggaggatcgcttgagctcaggagttaaaagaccagcccgggcaacacagagaaaccccccacctctacaaaaaactttaagattacctgggcacagtggctcacacctgtaatcccaacactttgggaggctgaggcgggaggatcatttgagcccaggaggcc

SEQ ID NO: 112664 - DNA, 423 bp, Homo sapiens
  misc_feature (1)...(423): n = a,t,c or g
ggggctgcgtagaatccngacnnnnnnnnnnnnnnnnnnnnnnnnnnnnnnnnnnnnnnnnnnnnnnnnnnnnnnnnnnnnnnnnnnnnnnnnnnnnnnnnnnnnnnnnnnnnnnnnnnnnnnnnnnnnnnnnnnnnnnnnnnnnnnnnnnnnnnnnnnnnnnnnnnnnnnnnnnnnnnnnnnnnnnnnntattgccaagtggagagaccatcaccaagcggtgagactatcacctatcgccaagtggcctgattcagcaggaagcatctcagacaccaaccactatgctgtcagcagttgcccggggctaccagggctggtttcatccctgtgctaagctttctgtgaggatgagcagcaccgggatagacaggaagggcgtcctggctaaccgggtagccgtggtcacggtgtccaccagn

SEQ ID NO: 112665 - DNA, 383 bp, Homo sapiens
  misc_feature (1)...(383): n = a,t,c or g
tgtggcggaatnnnnnnnnnnnnnnnnnnnnnnnnnnnnnnnnnnnnnnnnnnnnnnnnnnnnnnnnnnnnnnnnnnnnngttaaccttctgtcgaacggtttatatctggaaaggtgggtgaggaaagggtgacctaggggattgcaaaatagattattgcagatcctacctttgtgagctttttgaatgaggctataaaggaatttaaaaatcagattcaacactaattccgaaacccctcacttcattcagggtgtgggccgaagatatgctcatgtggtgttgaggaaagcagacattgacctcaccaagagggcgggagaactcactgaggatgaggtgaggacaaggaagggggctgggggtggggtcagcctcaga

SEQ ID NO: 112666 - DNA, 414 bp, Homo sapiens
  misc_feature (1)...(414): n = a,t,c or g
tccagcctttttcctttttaaaattcggggggcaacaaattttccccccccaccccccccgtttgtttgggcccccgggggtgggtcccccccgggggaaaattttttggggannnnnnnnnnnnggaaaaacccctcccccctttttgcctgggggggttttcaaccctttgggccaaaggttnnnnnnnnnnnnnnnnnnnnnnnntgggggtccccttttttttccccgggcccggcccnnnnnnnnnnnnnnnnnnnnnnnnnnnnnnnnnnnnnnnnnnnnnnnnnnnnnnnnnnnnnnnnnnnnnnnnnnnnnnnnnnnnnnnnnnnnnnnnnnnnnnnnnnnnnnnnnnnnnnnnnnnnnnnnnnnnnnnnnnnnnnnnnnnnnnnnnnnnnnnnnntngaattccc

SEQ ID NO: 112667 - DNA, 492 bp, Homo sapiens
  misc_feature (1)...(492): n = a,t,c or g
ggcggggggtcttgcctgtaaccccaccccctttggaggccccgccgggtgggtcatggggctaggaaatcaaaacccttttggcccacctgggtgaacccccttctttccttaaaataccaaaaaatagcnnnnnnnnnnnnnnnnnnccgttattcccgccctcacagagggtaaacacagaaaatttccttaaataaggaaggggagggttccattaacccaaaatagggccccgcccccccacccgggggcaaaatgagaccccctctccnnnnnnnnnnnnnnnnngattaaggagtaaggcttggtgctctgaaagcactcatgttctgacttttgggtagaagtaagtggatattgtcagatggttccattgatctcattcatttgtccacagtgttgggagaatggcattatcttgtgccggaagattgcagagcagtatgagagttattatgactacagaaacctgaggaattccgcgacact

SEQ ID NO: 112668 - DNA, 414 bp, Homo sapiens
  misc_feature (1)...(414): n = a,t,c or g
nnnnnnnnnnnnnnnnnnnnnnnnnnnnnnnnnnnnnnnnnnnnnnnnnnnnnnnnnnnnnnnnnnnnnnnnnnnnnnnnnnnnnnnnnnnnnnnnnnnnnnnnnnnnnnnnnnnnnnnnnnnnnnccccttcccnnnnnnnnnnnnggattcatggaaggttctgcataggaaactttaatctcacttgctcttaggcaagaatagaattcatttctgggcaaaattctttcaataaatattaactgagtaaagctgaaagcaaaagggtgcaccagcacctgtactggacccacccgcgaaaattcggccagggttcttgctcttgtcgggcttgtacaaacgggaccgggctgatccggaaatatggccttaatatgtgccgccagggtttccggcagaacgcgaaggaaa

SEQ ID NO: 112669 - DNA, 410 bp, Homo sapiens
  misc_feature (1)...(410): n = a,t,c or g
nnnnnnnnnnnnnnnnnnnnnnnnnnnnnnnnnnnnnnnnnnnnnnnnnnnnnnnnnnntcaatttcttatgtagctagattctccaagaccaccagttccattctccctgtgaatcttaatggtgacttgatgaatatgaatttatcggttgatttagggaccagtgacttttgaggatgtggctgtgcttttcattgaggcagagtggaagagactgagccttgagcagaggaacctatacaaagaagtgatgctggaaaatctcnnnnnnnnnnnnnnnnnnnnnnnnnnnnnnnnnnnnnnnnnnnnnnnnnnnnnnnnnnnnnnnnnnnnnnnnnnnnnnnnnnnnnnnnnnnnnnnnnnnnnnnnnnnnnnnnnnnnnnnnnnnnnnnnnnnnnnnnnnnnnnn

SEQ ID NO: 112670 - DNA, 406 bp, Homo sapiens
  misc_feature (1)...(406): n = a,t,c or g
gcggcggcggcggaagcggaggccttggatgtcttccagtctcctcggctcgccctttagccggcaccgctccnnnnnnnnnnnnnnnnnnnnnnnnnnnnnnnnnnnnnncttccctttttcccttccccgccggagagcggcgggggtggctccagcaacggctgggcccaagctgtgtagaggccttaaccaacgataacggcggcgacggcgaaacctctgagctcgcagggcgggggcaaggcccgggccttggagatggagaattctcagttgtgtaagctgttcatcggcggcctcaatgtgcagacgagtgagtcgggcctgcgcggccactatgaggcctttgggactctgacggactgcgtggtggtggtgaattcccagaccaagcgctccctgt

SEQ ID NO: 112671 - DNA, 756 bp, Homo sapiens
  misc_feature (1)...(756): n = a,t,c or g
caaatggcacagcccaccaaagtggcagcagggcctccttcacccaggcctgacctggcctgattgatttgagggacctatccctgggtgactgctgcccccaggcccagttaagctaagctggctgtaccaccacaaggccactagcagaggtaatggagggagatggtgaggcgccgactcaggtccaagagtgtactggagttatggctgtagttttaggtgcaaagttcaggcacaaatataagtttttaaaacattccctgccnnnnnnnnnnnnnnnnnnnnnnnnnnnnnnnnnnnnnnnnnnnnnnnnnnnnnnnnnnnnnnnnnnnnnnnnnnnnnnnnnnnnnnnnnnnnnnnnnnnnnnnnnnnnnnnnnnnnnnnnnnnnnnnnnnnnnnnnnnnnnnnnnnnnnnnnnnnnnnncgcctgcctgcctgcctgaaacaggtatagaaattcctaaggtcactgagaacctgaaccaaagtggctgtgggtcagtgaccggccgtgactcaggtgttaggggaacgacataaagatcccagtccctggcaaagcccaattccagcaggagctgcgcagggcagctcgaggcccagcctggggacctgtggccgcacagacccatggtgccctctgggggccactaggagggggcgcactcccccacaccatcttcctgtgcagtggcccaagacggtggtggagcgggctgtccgtccccagcacttggaattccaccagactgt

SEQ ID NO: 112672 - DNA, 401 bp, Homo sapiens
  misc_feature (1)...(401): n = a,t,c or g
gctggttggaggaggtagatcaccctttctgcgggggacgatttcgtcggtggtaggctgctaccatgaggttgaatcagaacaccttgctgctggggaagaaggtggtccttgtaccctacacctcggagcatgtgcccaggtatctttcccgcttgacatggggtgcgtatcagcacccagagctgtgtaaggtacagccccagtctcagggctatttcccctaagaagaaacattggttgtgagaaataattatatatgaggggggnnnnnnnnnnnnnnnnnnnnnnnnnnnnnnnnnnnnnnnnnnnnnnnnnnnnnnnnnnnnnnnnnnnnnnnnnnnnnnnnnnnnnnnnnnnnnnnnnnnnnnnnnnnnnnnnnnnnnnnnnnnnnnnnnnnn

SEQ ID NO: 112673 - DNA, 427 bp, Homo sapiens
accctttatgccacgaaccacccacgcgtccgagctttcccagctgatctgaagctcctgttcattctcagcccaacaccatgacctcttcctacagcagctcctcatgccctctgggttgcaccatggctcctggagcaagaaatgtctctgtctctcccatcgacattgggtgccagcctggggcagaggccaacattgcccccatgtgccttttggccaacgtggcacatgccaaccgagtccgtgtggggtccactcccctgggccgccccagcctctgtctgccgcctacctgccacactgcttgtcccttgccagggacctgccacattcctggcaacattggaatctgtggggcctatggtgaaaacaccctgaatggccatgagaaggagaccatgcagttcctgaatgaccgcctggg

SEQ ID NO: 112674 - DNA, 404 bp, Homo sapiens
  misc_feature (1)...(404): n = a,t,c or g
acgatcgcaggttacgttcgcatccatgctnnntcctatctgttccatcgtgtccactaccttcaattctctgggcgtccgttgacaacactgtcaccgggataaccttgcccttgcgcaagttattgaccttccagcgcacaatggtttggaaagtagctgtattcctcagtgtggccctgggcattggtgccgttcctatatatgatcctgaagatggaggcaagcactgggtggtgatcgtggcaggttcaaatggctggtataattataggcaccaggcagacgcgtgccatgcctaccatatcattcaccgcaatgtgattcctgacgaacagatcgttgtgatgatgtacgatgacattgcttactctgaagacaatcccactccaggaattgtgatc

SEQ ID NO: 112675 - DNA, 438 bp, Homo sapiens
  misc_feature (1)...(438): n = a,t,c or g
aaaagcagatcccccnnctantgngaggannccnccacgcgtncgcacaacctcactatgncttnnnnaaactattgttcgggaaactccaactcaggatctctaggggctcccgccatattcctctcacctacatcgacctctgccctaccagcgtgagctgtggagatgtcctctacttacccactagctctcaagaccatacctgggtcacagacaactgccaagagacctgcggtgaaccaaccagctgccagccggtccactgtgagaccggcaatcttgaaacctcttgcggttcttccactgcttactacgtgcccaggccttgccaaggaagcagttttcttcctgcttctttcttctccagttcctgccttccagtatcctgtagaccacagaggtatgtgtccagcggctgtcgtccactgatgccgt

SEQ ID NO: 112676 - DNA, 549 bp, Homo sapiens
  misc_feature (1)...(549): n = a,t,c or g
attcccggggtcgggcctcagtttaaaatgtgtggtacagtaagatcatagacaggcagtctgagacagacccaagtaccgatgggcattcactgtctgaccaaggcagccccttacatgaacagggtaaagatagacttgtctaaaaatggcattaggcacctgaggagccatctggaaaaagatgaagtcagatgcaaacctcactttgtatactagataaggatccaatgtagtaaatatttaaatgctagtgctagacccaaaataatattagtgtcaagcatgaccttttaactgtgactcaaattccagaagccatacaaaagacatgttttttcttgtcttttttttttctgggacgaagtttcactcttgttgcccaggctggagtgcagtggtatganntnggctcactgcagcctccacctcccgggttcgggcgattctnttgcctcagctacttngcagactgaggcaggagaattacttgaacccggggggtggaggttgcggtgagccgagattgtgccattatactcccagctt

SEQ ID NO: 112677 - DNA, 675 bp, Homo sapiens
gatgcaactaatgcaattatttgcatagcaatttattaatttataatcaggatagtgtttcaaggccataaaatatcaatgtatcccatccagaaaagccccttccctgtcctggaggacaaagaaatcattagcaagtagcttggtagacatggagtccgtcttgaggaccatttccctgggccacggtaaagtctggcgaacaccactgtgctaagcagactcctaccaaatggagcatctggcaatctctgctttttttttttttaacctctgcatttttgaacgtcctttttttagggtcttaattgaccattcttctttgattcacatcatctttatgttgcccacactccaattctctgcctacttactcagttgtaatcacaatccagtcctgccttcctcaagtttcactggctcaccatggtagcaattcgtgtgtggtcccaaattcttccaagcgtccactacatcctgccccacctgggagctgacctcactcttcctgtatgggcttgactagttaatccacagaaacagccatgtttccctaatggtcaagttcttgggcagccttcatagacactatctatctatctatctgtctatttatttatttatttattttttaagacggagtcttgctctgtcacccaggctggagtgcagtgg

SEQ ID NO: 112678 - DNA, 415 bp, Homo sapiens
  misc_feature (1)...(415): n = a,t,c or g
tttaataggtatatgttttttgttttacgagatgaaaagagttgtggagatagatggtagtgatggtttacaacattttaaatatatttaatatcactagactgcacacttaaaaactgttaaggcagggcacgcacggtgntcacgcgtgtgatcccagcactttgggaggccgaggtgggaggctcacttgaacccaggagttccagaccagcctgggaaacatggtcagacttcatctctacaaaaattaaaaggattggctggttatggtggcgtgtgcttgtggtctcagctactcgggaggctgagggaagagaactgcttgagcccgggaagtcaagactgcggtcagctgtgttcgcaccactgcactccagcctgggcaacagagagagaccctgtctcaaaaatt

SEQ ID NO: 112679 - DNA, 372 bp, Homo sapiens
gctatcaataagctcctagtccagacgccatgggtcatttgacagaggaggacatggctactatcacaagcctgtggggcacggtgaatgtggaagatgctggaggagaaaccctgggaaggctcctgattgtctacccatggacccacaggatttttgacagctttggcaagctggactctgcctctgccatcatggtcaaccccatagtcaaggcacatgggatgaaggtgctgactttcttgggagatgccataatgcacctggatgatctcaagggcacctttgcccagctgagtgaactgcactgtgacaagctgcatgtggatcctgagaacttcaagctcccgctaaatgtgctggtgaccgact

SEQ ID NO: 112680 - DNA, 373 bp, Homo sapiens
cagcactgcaagcaccaagtgtgtcttgagctcagggagtactgggtatgtgtcacattgccaaatcccggatcacaagtctccatgaactgctggtgagctaggataataaaacccctgacatcaccattccagaagcttcacaagactgcatatataaagggctggctgtatctgcagctgaaggagctgaccagccagctgacccctcacactcacctagccaccatggacatcgccatccaccacccctggatccgccgccccttctttcctttccactcccccagccgactctttgaccagttcttcggagagcacctgttggagtctgatcttttcccgacgtctacttccctgagtcccttctacc

SEQ ID NO: 112681 - DNA, 370 bp, Homo sapiens
  misc_feature (1)...(370): n = a,t,c or g
tttcgagccaccatggngctgtctcctgttttttatagaacaacgtcaaggccgcctggggtaaggtccgctcgcacgctggcgagtatggtgcggaggccctggagaggatgttcctgtccttccccaccaccaagacctactttccgcacttcgacctgagccacgggtctgcccaggttaagggccacggcaagaaggtggccgacgcgctgaccaacgccgtggcgcacgtggacgacatgcccaacgcgctgtccgccctgagcgacctgcacgcgcacaaacttcgggtggacccggtcaactttaaactcctaagccactgcctgctggtgaccctgggcggccacctcccgggcgagtcacc

SEQ ID NO: 112682 - DNA, 408 bp, Homo sapiens
cacagactcatatataacccaccatggtgctgtctcctgccgacaagaccaacgtcaaggccgcctggggtaaggtcggcgcgcacgctggcgagtatggggcggaggccctggagaggatgatcctgtccttccccaccaccaagacctacttcccgcacttcgacctgagccacgggtctgcccacgttaatggccacgggaagaaggtggccgacgcgctgaccaacgccgaggcgcacgtggacgacatgcccaacgcgctgtccgtcctgagcgacctgcactcgcacaagcttcgggtggacccggtcaacttcaagctcctaagccactgtctgctggtgaccctgttcgtccaccttcccgccgagttcacccctgcggtgcacgcctacctggacaagg

SEQ ID NO: 112683 - DNA, 380 bp, Homo sapiens
ctgaaatgccatgtttgcattggtactcatccgcctccttgttcgccgcagccgcctccgccgcgcgcctactccgccgtcgcggactccggcaggtttatcgccagagtccctgaactctcgctttctttttaatcccctgcatcggatcaccggcgtgccccaccatgtcagacgcagccgtggacaccagctccgaaatcaccaccaaggacttaaaggagaaaaaggaaggtgcggacgaggcggaaaatggaagagacgcccctgctaacgggaatgctaatgaggaaaatggggagcacgaggctgaccatgaggcagacgaacaagaggaagaaggtggggaggaacaggaggaggatgaagaaggtgatggt

SEQ ID NO: 112684 - DNA, 378 bp, Homo sapiens
  misc_feature (1)...(378): n = a,t,c or g
ctgggctcaagcgattcgccacgtcaacctctgaagnnnnnnnnnnnnnnnnnnnnnnnnnnnnnnnnnnnnaggttcttcagaagaggatgaggtcattcaaccaggtttcatcagccccaggcggggctagcaaaggtggtggagaagagcccgggaagctgccggagccggcagaggaggaatcccaggttttgcgcggaactggccactgtaagtggttcaatgtgcgcatgggatttggattcatctccatgataaaccgagagggaagccccttggatattccagtcgatgtatttgtacaccaaagcaaactattcatggaaggatttagaagcctaaaagaggagaaccagtggaattcacatttaaaag

SEQ ID NO: 112685 - DNA, 337 bp, Homo sapiens
accgtttgcgggatctgggaccgggttacatggaatgtcaattgggggaaggtttaattttgacgacggagggtcctactgtggaggctgggaggacggcaaggcgcacggccatggcgtctgcaccggccccaagggccaaggcgaatacaccggctcgtggagccacggcttcgaggtgctgggcgtctacacctggcccagcggcaacacgtaccagggcacctgggcgcagggcaagcgccacggcatcggcctggagagcaaggggaagtgggtgtacaagggcgagtggacgcacggattcaaggggcgctacggggtgcgggagtgcgcg

SEQ ID NO: 112686 - DNA, 380 bp, Homo sapiens
aatttgtatctagtagttactggtgtacgcacctgacaaccaacaactccaatcctagatgtataattccagagaaattcttaccctttgaagaaaaacatggatgaaacttagtaactaatttaaaaagttgcaggaaaaaaagtccacatagcatgatgccatttatataaagtttaaaaatatgcataagcaaacaatattttggggggatatacatatacaacgtaaaataacattatcaagaaagcaggccaggcgcagtggcttatacctgcaatcccagcactttggaaggctaaggcaggcagatcacttgaggtcaggagtctaagactgtcagcctgagcccaagctaagccaacatatcccctgtgacc

SEQ ID NO: 112687 - DNA, 420 bp, Homo sapiens
aatcaatggttatgataaagcctcctcgaaggtgaatggcatttttgaagaataaatagatattggactggtgttctgggttggtagccacttgtataaagaccccaagatgttggaagaactcaaagctgacaagtaattagaatttagaaagttatgagccagagatctctaagggcaataggaatccattaaaagttttaacactggtgtggtgttaatcagattggcattaaaacacacacacatgccgggcacagtggctcacgcctgtaatcccaacactttgggaggccaaggcaggcggacctcttgagctcagaagttcaagaccagcctgggataacatagtgagaccccatgtctacaaatacaaaaaaattggtctgggcacagtgggcacacacctgtagtcccggg

SEQ ID NO: 112688 - DNA, 437 bp, Homo sapiens
  misc_feature (1)...(437): n = a,t,c or g
actgtaactccancctggtgaatgagcgagaaccctacagggccctttgtaagaggttgtttcttcaccccagggaacaccctggatcatccatacttccatccaattaattgctctcatccttcagctttcatcttacaagattttcttttcttatgcttgtaatctcagggttttgaaaggccgagacaggaagtttgcttgaggctaggagtttgagaccagcctggggcaacacggcaagctcctgtcctgttggggagcgtgcggagaaattcgaacgcttgcgtgctgctggtgggaatgcaaagtggcacagctgcttgttacatatggtgaaatcaaggcatagaccgaagtgctgtggttaagagctgatactctccgaagtcaggcgatctgggtacaaatcctggctctgcctaacccttgccacg

SEQ ID NO: 112689 - DNA, 1145 bp, Homo sapiens
tgccgtatcttgaattgagtgtatattagcgtttgcattgtctttttcttaagagacagggttttattgtcacccagtatagtggcatgatgatagctccctgcaacctcaaactacagggctcatgcaatcttcccacttcagtctcccaagtatatgggactactgtggtgtgccactgcgcctggcagcagttgtatgttttatacagataactttctaaaaacataagcagaaatcaaaataaaagataaaatttgcccacagtcctgctatctgcaaattaaattgttcatgtaaaattttttagtgtttttgtttctatgaatttaaaatatgaacatgtcttatatctgaaggtcagatacagaagttatttttctagggtaattgtcctctgaatatatgaagaaataatgttatttgatgtttcctttaaaaaggaagtctgaagctgggcgtggtggctcctcacacctgtagtctctgctactcggaggctgaagcaggaggactgcttgagctcaggagtttgagaccagcctggccaacatagcaagacccccttctcaaaaacaaaaaaaaatagggcagggggagtctttgctaacaatttagagaaagaggtgccaggaattaaaataactataggaagtaagataaccatagggtgtgaaggcaccttggcacatagtgaagctgttagtccttccaaaaaggagaagactccatttctgtgcatggtgaaggggatgttcagggctggtttcctgagggcctgggcctttccatggggcaaccatgcaggtcacactcctcctcaggccaggtgggatctgggggctctctttagtgcccctactggacatgtctccagagccctagaaggctaaactcaactgcataggacacttctgttccccttcctaccacagttgagagcccagtactctggtattacctgctgtgggcaaccttgggggatcaagccctttcagaaagctgtttttgaaaaacagtgtgaattgttcaaccaagtctcttctttcttctcaggttttgcaagcagtgcagtggctggtttcccactgcccccattcccctgacctctgctgccagactctcattcagtacgtcgaagacgg

SEQ ID NO: 112690 - DNA, 438 bp, Homo sapiens
  misc_feature (1)...(438): n = a,t,c or g
tttgnaaaggtncatgtgnacattaagatgagaaaacatacataaggtaccttacctatagccacaggttgtgaagtccatttaaagaaacattgtaaaataaattaaataagtaataaagtggatatacagagtggtgaaaatccatgaatgtgaagaccctaaacaaaggctttaaacataaaaccatttaatgagttattataattaaagtattgcataagttgtacaacgctaaaaagaatgtaggctccataagagtaggaactatgtctgatttggtaaccactgcagcccttggcataatatctagcatgtagtattaactttttggttttgtttgtttgtttgagacggagtcttgctcattgcccaggctggagtgcaatgatgcaatctcaggtcactgcaacctccgccttctgggttcaagtgatt

SEQ ID NO: 112691 - DNA, 417 bp, Homo sapiens
aacactcctgggttgccccaaaagagggggaaacaaaaagttgccccctacccactccagggagactgttaattaaagtaccctatcttggttttggcctttagtttagagtggaaaacaaatgaaaagtccttcccctggataattcctttaactcaaagcccccctaccctaatcagggttagagccctaaatttatacctacctagtgtgatcccccccaaaatcaagacaaaaatgcagtttaggtgggcttatgttggtggtgcctgtaggcacctgaaggaattgaatgcaaattcttctcagaagagacactttataaaagaaagtgtccatcctagaaaaactggagacccatctcatatgcagagacacacacaggctcaaaataaagggatggaggaagatctacca

SEQ ID NO: 112692 - DNA, 472 bp, Homo sapiens
agctgaggcaggagaattgcttgaacccgggaggcagaggttgcagtgagttgagatcgcgccattgaacttcaacctgggcaaacagagcaagactctgtctcagagaaagaaaaaaaaaaacctatcagttgaataacaaaaccctttccttccttgctttaagtgaatctgaagatccagggagctgtgctgcaggtaccctctatgttgggtacccctggtttaggctgactagtacagtgtggttggctcatgtaggacagcaggaccctttattttaggatacaacttttttccctttttcttttattttttttgagacagagtcttgcttgtcacccagcctggagtgcagtggcgtgatcatggctcactatagccttagactccctggctcaagtgatcctctcacctcggctttcctagtagctgggaccacaggtgtgggccagcacccctggctgattta

SEQ ID NO: 112693 - DNA, 407 bp, Homo sapiens
agaatcagctcagagagaagattaagagatcataccctggtcaaagccaacagtgaagcaatggcaataccaggtcaggctctacttcactcatcatcgcatcgctgcatttcatctccttgtattacctaagagcaacccagtgccctagtttcacatccaagaaaacataggcttacctatgaaaaaaaataaagccttctattcaggtaagtttcaaccatgggtttctaattaatatttctttctttcttttttttttaagacagggtcttactctgtcacccaggctggagtgcaatggcctgatcatggctcactgcagtctcaacctccccaggcccagacgatcatcccacctcagcctcccaagtagctgggaccacagtcacaggccaccatatccg

SEQ ID NO: 112694 - DNA, 582 bp, Homo sapiens
ggtcatcttgtagaccattctgtgctttcactggcctggtcagcctcccctgtctttcttttgtcgtggatgcggatggcctgtggctgaacaagaatctggatttttaggaaccagtgacctttgaagatgtaacactgggttttaccccggaagagtggggactgctggacctcaaacagaagtccctgtacagggaagtgatgctggagaactacaggaacctggtctcagtgggtaaggctggcctccaggtcaagaaggatctgtgctttgtagcacaaatgtagcacctctgaagtatgtgtctgcttgggctcagactgcaggggcaccagtaggaaaagggcagcttttcagtatgacttctgaatcattgcctagtccatccctccctgaataccagggagatgggtctgtcagggatgttttcagctgcagtagtggatgcttattgttcttgcaacaagagttccggccagagcatggtggctcactttaggagactgaagcaggaggattgcttgagcccaggagtttgagaccagcatgggcaacatagaccgtgtctctattaaaaaa

SEQ ID NO: 112695 - DNA, 584 bp, Homo sapiens
  misc_feature (1)...(584): n = a,t,c or g
gcattcttatccaatggacatggaaaacatagttctctaatatcttcttgaaaactatattgcaatgaaatgcagccaatgaagagatgaatcaaaatggagaacttgccgagttggatggatcacttgaggtcaggagttgaagaccagcctgggcaacatgggtgaagccccagtctcctactaaaaatataaaaattagcccaagtgtggtgggcacacacatgtggtccccagctactcgggaggctgagggcatgagaattgcttggacgcaggaagtggaggttacagtgagccaagacccacaccactgcacttccagctttgggccaagagagcgagactctgtcatctctatgcaaataaactagaaaatctagaagaaatggataaattcctgaacacatgcaacctcccaagactgagccagggagaagtcaaatccctgaacaggtcaataacaagttctgaaattgaggcagtaattactaaccaaaaaagcccaggaccagacagattcacagctgaattctaccagaggtacaaagaggagctggtaccatttctactganacnantcc

SEQ ID NO: 112696 - DNA, 411 bp, Homo sapiens
  misc_feature (1)...(411): n = a,t,c or g
cttagctatggaaactctataagagagatccagcttgcctcctcttgagcagtcagcaacagggtcccgtccttgacacctcagcctctacaggactgagaagaagtaaaaccgtttgctggggctggcctgactcaccagctgccatgcagcagcccttcaattacccatatccccagatctactgggtggacagcagtgccagctctccctgggcccctccaggcacagatcttccctgtccaacctctgtgcccagaaggcctggtcaaaggaggccaccaccaccaccgcnnnnnnnnnnnnnnnnnnnnnnnnnnnnnnnnnnnccactgcctccactaccgctgccacccctgaagaagagagggaaccacagcacaggcctgtgtctccttgtgatgattttct

SEQ ID NO: 112697 - DNA, 499 bp, Homo sapiens
  misc_feature (1)...(499): n = a,t,c or g
cnnnnnnnnnnnnnnnnnnnnnnnnnnnnnnnnnnnnnnnnnnnnnnnnnnnnnnnnnnnnnnnnnnnnnnnnnnnnnnnnnnnnnnnnnnnnnnnnnnnnnnnnnnnnnnnnnnnnnnnnnnnnnnnnnnnnnnnnnnnnnnnnnnnnnnnnnnnnnnnnnnnnnnnnnnnnnnnnnnnnnnnnnnnnnnnnnnnnnnnnnnnnnnnnnnnnnnnnnnnnnnnnnnnnnnnnnnnnnnnnnnnnnnnnnnnnnnnnnnnnnnnnnnnnnnnnnnnnnnnnnnnnnnnnnnnnnnnnnnnnnnnnnnnnnnnnnnnnnnnnnnnnnnnnnnnnnnnnnnnnnnnnnnnnnnnnnnnnnntgctcccaacatttattcttcattatatggatggtattttaattgctgcccccactgataaagaattaattgactgttctcaaagtttgagaaaacaagatacagaggctggattacacatcgctcaggataaatatcac

SEQ ID NO: 112698 - DNA, 363 bp, Homo sapiens
acggagaccccagagggtgtgttgctattttctctaagccatgcactgccatgcgcaggggtgcagtgacacacgctctcgccgtcgccatgactgagcagatgacccttcgtggcaccctcaagggccacaacgggtgggtaacccagatcgctactaccccgcaggtcccggacatgatgctctccgcctctcgagataagaccatcatcatgtggaaactgaccccggatgagaccaactatgggattccacagcgtgctctgcgggggcactcccactttggtagtgaagggggtatctcctcacaagggcagtttgccctctcaagctcctgggatggaaccctgcgcctctgggaat

SEQ ID NO: 112699 - DNA, 371 bp, Homo sapiens
  misc_feature (1)...(371): n = a,t,c or g
nnnnnnnnnnnnnnnnnnnnnnnnnnnnnnnnnnnnnnnnnnnnnnnnnnnnnnnnnnnnnnnnnnnnnnnnnnnnnnnnnnnnnnnnnnnnntggggggggccctttaaaggaacaaactttctcttcccgcggatgcaacgttacannnnnnnnnnnggggccccaaaacaaacctactgggcgcgggtttcaaccccggggaaagggaaaacccctggggttcaccaatttaaccccttttgaaagagaagaggngctgcaacaaagaatcgaggagatcatctggcccgaccaggggagccgtaccaccccaagctacctggctcttacggtctgcgagcgcctcatcgacgatgacctgaagaacc

SEQ ID NO: 112700 - DNA, 422 bp, Homo sapiens
  misc_feature (1)...(422): n = a,t,c or g
nnnnnnnnnnnnnnnnnnnnnnnnnnnnnnnnnnnnnnnnnnnnnnnnnnnnnnnnnnnnnnnnnnnnnnnnnnnnnnnnnnnnnnnnnnnnnnnnnnnnnnnnnnnnnnnnnnnnnnnnnnnnnnnnnnnnnnncgannnnnnnnnnnnnnnnnnnnnnnnnnnnnnnnnnnnnnnnnnnnnnnnnnnnnnnnnnnnnnnnnnnnnnnnnnnnnnnntcaatttcttgatattactctttatagctcaaaagttttcaattttgatgaagtctagtttatttccttcctttgctgcttatgtgtttggtgtcatatctaagaaactactgcctaatccaaggtcacaaagatttactcctatatcttattttgaagagatctatagttttagctcttacatctatgtctaccacccatttt

SEQ ID NO: 112701 - DNA, 389 bp, Homo sapiens
  misc_feature (1)...(389): n = a,t,c or g
tatgttgactgtattatacactgctactaaggaattgaagccgatgtataaacattgtggctacacattatactattttatgattattgtatggaactttataatacaaaatttctttgcagtacaattttgagaaataggttaactctattttaacttaaaagtaccctaaaaattatttaattgtttattagtgagtaacaggctcaaatacagcaggnnnnnnnnnncttttagaattgctttgcatcctctaggcttgaatggtataaacactgggttttgacttcttattcaattttagattaccaaagaagattttgccacatttgattatatactatgtatggatgaaagcaatctgaggtaatcctgtttttgaagaatat

SEQ ID NO: 112702 - DNA, 394 bp, Homo sapiens
  misc_feature (1)...(394): n = a,t,c or g
ttatcttcagaaataggataagaaataaataccatttatcagtgttattattatcccccatccagatttaagagctagctaagcacttagtatattacttataacaagtgcttttatgaatctactctttatcctaaatccctcagacnnnnnnnnnnnnnnnnnnnnnnnnnnnnnnnnnnnnnnnnnnngtcatcaagattaagtagaattgtaacatggtgaaacagttttggaaaactatctggcaattctacaaaagggtaaacatagagttactacattatccagtagttccactcctgggtatatgcctaagagaagtgaaaacatgtgtccccagaaagtgggtacacaggcaaggtgcaatggctcacgcctgcggacgcgtggg

SEQ ID NO: 112703 - DNA, 705 bp, Homo sapiens
  misc_feature (1)...(705): n = a,t,c or g
cccacgcgtncgcccacgcgttcgcccacgcgtccgtatgccagatagtaaatgttcttggactttataggccatgtggtcacctctgtcttaattacaaaagcagcccataaacaataagtaaatgaatggttgtgctatgttcccaataaaatgttatttgcaaagaaaaaaaaaatgattttgcttggggccataatttgccaatttcttctctacaaaagaagtttagttaatagtaatttcccaaatggaattatttaaatagttgccattcccaagtgtcttatttttgttcaaatttatgtttttctttatttgtttattttgaaataggagcacctaggctaaaatgtcaagaactcttaaattatatcatggatacagtgaaagattcatctaatggtgctatttacggagctgattgtagcaacatactactcaaagacattctttctgtgagaaaatactggtgtgaaatatctcagcaacagtggttaggtatgttttgaaggttgttgtttgtgaatttttcctcatgaaatgaaacttcaccaaagaaagcactctgtctgtatctgtctatatcccccaagtgacctgacagtttaacagtactttagtaaaattatatggttatcgaactgacccttaatttttatttattatgtagcttttgaataaagtcatgaataataaaaaaaa

SEQ ID NO: 112704 - DNA, 411 bp, Homo sapiens
  misc_feature (1)...(411): n = a,t,c or g
ctttaacaggagagccaatttaccggcccactaggaaccaataccatctgaagggcactggggatagtgctaacgggaaagggtctcaagccatcctgcccctcacctaccgaccccacaatcaccctcacatcctttagcctcctccttccctctcggtctctcaatgtccccaagcatattntgntcntcacccacatcccccacacatcctccccaacccggtaggctgaggggaggggagagaaagtggagggggtgctagaaggcacatactacaagcaagacagccactcagcttatctcaagcgaccccacagcatccccagggcataggcctcctccccnnnnnnnnnnnnnnnnnnnnnnnnnnnnnnnnnnnnnnnnnnnnnnnnnnnnnnggcaccaagc

SEQ ID NO: 112705 - DNA, 417 bp, Homo sapiens
  misc_feature (1)...(417): n = a,t,c or g
tttcgtcgtggtggnnnnnnnnnnnnnnnnnnnnnnnnnnnnnnnnnnnnnnnnnnnnnnnnnnnnnnnnnnnnnnnnnnnnnnnnnnnnnnnnnnnnnnnnnnnnnnnnnnnnnnnnnnnnnnnnnnnnnnnnnnnnnnnnnnnnnnnnnnnnnnnnnnccccctcccactcatcatctcactctgtgcgccctgcctcacacctctatccctagcactgatgctgttctagtgccccgcaatgtttcccacactcacccagcctaccactctcacaaggagatcacctccgaccgtggcgccctctctactcgctatataacatacattctagcagatgtccctagccccccatacactgagccccagaccctctacccccatggggccccccccgttccagacttgccccctcg

SEQ ID NO: 112706 - DNA, 442 bp, Homo sapiens
  misc_feature (1)...(442): n = a,t,c or g
cggaggaggaagagaggcggnnnnnnnnnnntgactaaaaaaaaatggaatattattaatgtgggatttttggctcaaggtgtggtggcccttttctaagggtggcgaattcttcaatgtacggaaaactcgccaaggctatcccatatataagcaaactgtgggttcatctatataccgacacataacacctaaagtggcttcctcctgcccctctctcccttttctccactcacccctccttctcccccttccccctctccaattggctgtatagacagaaagagtaaatccaatagaatagaaaaccacataaggcaagatgagtgaaggccccgtcaaattcgaaaaaaataccgtcatatctgtctttggtgcgtcaggtgatctggcaaagaagaagacttttcccgccttatttgggcttttcagagaaacgaaa

SEQ ID NO: 112707 - DNA, 996 bp, Homo sapiens
ctcgcggtcacctcttgttactgttttcattttccctttcaatgaaatggtgtgaagatgggaggcacaagagagggatcctgttttttctgcgggacacgtcttaatcccatcatgcgtgtttcttcagctatgtattctaataatctgctaaagtagaaagtaaaagacctgctattttatctcattgggaccgtacgttttagagatcgggaagtaaacagtccactaaccctgccgataactatcatctggcccggaggagaaccctgcaggtggttgtgagctccttgctgacagaggcagggtttgagagtgccgagaaagcatccgtggaaacgctgacagagatgctgcagagctacatttcagaaattgggagaagtgccaagtcttactgtgagcacacagccaggacccagcccacactgtccgatatcgtggtcacacttgttgagatgggtttcaatgtggacactctccctgcttatgcaaaacggtctcagaggatggtcatcactgctcctccggtgaccaatcagccagtgacccccaaggccctcactgcagggcagaaccgaccccacccgccgcacatccccagccattttcctgagttccctgatccccacacctacatcaaaactccgacgtaccgtgagcccgtgtcagactaccaggtcctgcgggagaaggctgcatcccagaggcgcgatgtggagcgggcacttacccgtttcatggccaagacaggcgagactcagagtcttttcaaagatgacgtcagcacatttccattgattgctgccagacctttcaccatcccctacctgacagctcttcttccgtctgaactggagatgcaacaaatggaagagacagattcctcggagcaggatgaacagacagacacagagaaccttgctcttcatatcagcatggaggattctggagccgagaaggagaacacctctgtcctgcagcagaacccctcct

SEQ ID NO: 112708 - DNA, 409 bp, Homo sapiens
  misc_feature (1)...(409): n = a,t,c or g
ttgagcccccatntccttgtcgacgatttcgtaccgcagcggggctacgggcataccatggagttctttttccgccacctctatgtgtttgggggggcgggcgacaacacgctggccaacgagctgcactgctatgacgtggacttccagacctgggaggtcgtccagcccaactccgacagcgagggtggtggggctgaagtgcccgaacgagcctgtgcttccgaggaggtgcccaccctgacctatgaggagcgggttggcttcaagaagtcccgaaatgtggttggcctggactttggcaccaccactcggccgtcgtctatgggagcagcatagtttgcttttggggttacactggcgacatttattccaattctacttgaagaaaaaaacgacctctttgaan

SEQ ID NO: 112709 - DNA, 376 bp, Homo sapiens
tttcgtcctagcggagccgggactggagcaacatgaaccgtgaagaccggaatgtgctgcgtatgaaagaacgggaaaggcggaatcaggaaattcagcagggcgaagacgccttcccacctagctctcctctctttgcagagccatacaaagttactagcaaagaagataagttatcaagtcgtattcagagtatgcttggaaactacgatgaaatgaaggatttcataggagacagatctataccaaagcttgttgcaattcccaagcctacagtaccaccatcagcagatgaaaaatctaacccaaatttctttgaacagagacatggaggctctcatcagagtagcaaatggactccagtaggacccgcacc

SEQ ID NO: 112710 - DNA, 404 bp, Homo sapiens
ccttatctctgtgcttcgtgaagctaatcaagcaattaatcccaagttgcttcagttggtcgaagacagaggttcaggtaaggatgactgataggaaatgttggtagttacgagtcacatcgttgtctacaaatccatttaaatggtattggagggtgagtaaacccttgaatgtgaaaacttaagctgaaaaattgtaaaaacatttcacgcctaccatgaatagatctgtttctttctgtccacaatgatttgtgtcatagacataattgatcaatttgcaattgttttcttgacaggtcgttccaggggtagaggaggcatgaaggatgaccgtcgggacagatactctgcgggcaaaaggggtggatttaatacctttagagacagggaaaattacgaaa

SEQ ID NO: 112711 - DNA, 533 bp, Homo sapiens
gtaccatcgaatttttcgggtcgacgatttcgtgggccaagcacgaagccctttcccacccgtcgttcttctgggttcccgccagccgatttccaggcgtgggggtcacgccactcgctggaaaccctgaactctgtgccccccaagccctgggccccctgcgggaatgttcaaaaatgagtaccagggaggtgcatttgttgaaattttcagtgctcaaggaaaaaatcctggagcaaaatggaagatccttggtagtccatctgtgatttggaaagagtttgataaagaagttaaaagttttgtgtttgtcctggaaggcagcagccaaacaaacaaaattcagttaccaaaggagaataagcaaagccttggattgatccagaggtttcttgtacttcagatttacgtacccctgggacaagacttctccactgaattgctaattactgatttagggaacatcaaaagaagattatatttatcaacggtccataaggaactatcctccacccctcttcatgcaaaaattc

SEQ ID NO: 112712 - DNA, 418 bp, Homo sapiens
  misc_feature (1)...(418): n = a,t,c or g
atggcacgtaatntcccggtcgacgatttcgtgttaccacctaagaaatgaaacaactttctgaaagcccgggaaggagatgctctcctgagctcctcatgctccacaaggaggtcaaaatcaccaccctctttcagccactattttaagtttgaaataaacagcaagcttcctgccaccttgagtcttcctttgatgtgcactccctgcaagcagtttcaggcggcagcagaacactcaagagatgccttggaatgtgagaatgcaaagccccaaacagagaacatccagatgctgggatcaccatatcgctgaagggtgtttctgccttccatggaaaaaaatactcatttttgaaaagaggcaagattcccaaaacgaaaatgaaagaatgtcatctactcccatcccagacaag

SEQ ID NO: 112713 - DNA, 457 bp, Homo sapiens
  misc_feature (1)...(457): n = a,t,c or g
cctgaggaattcggcacgagcagacacctcatagaagagagctccggctggcatcagatgggtgtccctctgggatgaagcttctagaggaaggagcaggtagcaatctttgnnnnnnnnnnnnnnnnnnnnnnnnnnnnnnnnnnnnnnnnnnnnnnnnnnnnnnnnnnnnnnnnnnnnnnnnnnnnnnnnnnnnnnnnnnnnnnnnnnnnnnnnnnnnnnnnnnnnnnnnnnnnnnnnnnnnnnnnncaaatagaacccccacacaaaaaccccatccaaaggtcattagcatcaaaaatcaaaggtagaaaaatccacgaagatgaggaaaaaactgtaaaaaggctgaaaattctcaaaaccaaaatgcctcttctcctccaaataatcgtagctcctctccagcaagggcacaaaactggatggggaataagtttgatgaattgacagaagt

SEQ ID NO: 112714 - DNA, 432 bp, Homo sapiens
  misc_feature (1)...(432): n = a,t,c or g
ggatctctgcacgagnnnnnnnnnnnnnnnnnnnnnnnnnnnnnnnnnnnnnnnnnnncccaagccgcggagccagcaccttctccagtcggggtcgcccgctcccgggcgttgagccaccgccgccacccgggagtgtgtcccgctgccccaatccgtcttataaacaagcgcctggcacactcagacaggcccgcgggcatctggtgcgtgtcccgctccggtctcagtgccctcgccgccgccggcactgtctatatgttccagctgcccatcttgaatttcaccccccagcaagtgggcggtgtatgtgagaccctgaaagagagcggcgatgtggagcgcctgggtcgctttctgtggtctgtgcccgtggcccctgcggtctgcgaggccctcaacaagaatgagtcggtgctacgcgcacagacc

SEQ ID NO: 112715 - DNA, 897 bp, Homo sapiens
  misc_feature (1)...(897): n = a,t,c or g
gagccgcacttgccgcgtcgacccacgcgtacgctcacgagcacccgagagggtcaggagaagagcgtatgaagctgtttaggccctgaggggctctcggtaagccatcatgaccacccggcaagccacgaaggatcccctcctccggggtgtatctcctacccctagcaagattccggtacgctctcagaaacgcacgcctttccccactgttacatcgtgcgccgtggaccaggagaaccaagatccacggagatgggtgcagaaaccaccgctcaatattcaacgccccctcgttgattcagcaggccccaggccgaaagccaggcaccaggcagagacatcacaaagattggtggggatcagtcagcctcggaaccccttggaagagctcaggcctagccctaggggtcaaaatgtggggcctgggccccctgcccagacaggtacctgttggagccatggtaacacggcctccatggctgagtgggggactaggaagggtaaaagtggggttttggggttttgcactcactcctgctgtctcctacttactgtgatagtcctggtcccagctcctggaaagctctttgctcttagaagatctccctttcctccagcaaaatgtcatctcgccnnnnnnnnnnnnnnnnnnnnnnnnnnnnnnnnnnnnnnnnnnnnnnnnnnnnnnnnnnnnnnnnnnnnnnnnnnnnnnnnnnnnnnnnnnnnnnnnnnnnnnnnnnnnnnnnnnnnnnnnnnnnnnnnnnnnnnnnnnnnnnnnnntcacttcttctgaagccttttccagttccccatgtcacaatcagctgctctgtgttctcctaatactttgcagcacttcttttataacatgtatataccttggcttgaggctgg

SEQ ID NO: 112716 - DNA, 443 bp, Homo sapiens
  misc_feature (1)...(443): n = a,t,c or g
gtnnnnnnnnnnnnnnnnnnnnnnnnnnnnnnnnnnnnnnnnnnnnnnnnnnnnnnnnnnnnnnnnnnnnnnnnnnnnnnnnnnnnnnnnnnnnnnnnnnnnnnnnnnnnnnnnnnnnnnnnnnnnnnnnnnnnnnnnnnnnnnnnnnnnnnnnnnnnnnnnnnnnnnnnnnnnnnnnnnnnnnnnnnnnnnnnnnnnnnnnnnnnnnnnnnnnnnnnnnnnnnnnnnnnnnnnnnnnnnnnnnnnnnnnnnnnnnnnnnnnnnnnnnnnnnnnnnnnnnnnnnnnnnnnnnnnnnnnnncattatcatcatcatcatcatcatcatcatcatcatcatcatcatcatcacgtggactggattccctaatggaggggagggggaaaaaatcctataaagaacattactggctgggtgtggtggcctcgtgccgaattcctcag

SEQ ID NO: 112717 - DNA, 415 bp, Homo sapiens
  misc_feature (1)...(415): n = a,t,c or g
cgctctgcaagaattcggcacgagnnnnnnnnnnnnnnnnnnnnnnnnnnnnnnnnnnnnnnnnnnnnnnnnnnnnnnnnnnnnnnnnnnnnnnnnnnnnnnnnnnnnnnnnnnnnnnnnnnnnnnnnngttccatgacttctgacacgcgaaaccaccaggctagtctccccccgagttcaagaagtcctctcctcccaaaagtaccctcctgcccctctgcagctaacccctcacctcccctccgccctggttccagacaactgctcctctgatttctgtcactgccctttgcctctctcgcaattgcatgcaaggagaaccattcaccgtgtggtcttttgtgcctggctttcttcgcttggcaccatgcagctgagcgtcgcccgtgtggcgtgtgtgtgttgtattttcc

SEQ ID NO: 112718 - DNA, 440 bp, Homo sapiens
  misc_feature (1)...(440): n = a,t,c or g
nnnnnnnnnnnnnnnnnnnnnnnnnnnnnnnnnnnnnnnnnnnnnnnnnnnnnnnnnnnnnnnnnnnnnnnnnnnnnnnnnnnnnnnnnnnnnnnnnnnnnnnnnnnnnnnnnnnnnnnnnnnnnnnnnnnnnnnnnnnnnnnnnnnnnnnnnnnnnnnnnnnnnnnnnnnnnnnnnnnnnnnnnnnnnnnnnnnnnnnnnnnnnnnnnnnnnnnnnnnnnnnnnnnnnnnnnnnnnnnnnnnnnnnnnnnnnnnnnnnnnnnnnnnnnnnnnnnnnnnnnnnnnnnnnnnnnnnnnnnnnnnnnnnnnnnnnnnnnnnnnnnnccaatttttgaccccctgcccattttcttggcaggcccagccccagcccaggggacccaaaacgtttccagggccttgaaaaacctgaaggagtttgaaaccacactggaggacag

SEQ ID NO: 112719 - DNA, 616 bp, Homo sapiens
  misc_feature (1)...(616): n = a,t,c or g
gggctgccagaggctccggaagccgggtgcctcaggccgtggcagttccgtcactctccaacgcctcccccacagacttctttttgctaaatggtatcaagattttctcgttgttgtcagcaagagagttggttttctaacatctcatcgaccatggctggaggtcaaatcgatgttttaaacttgctggaaataaacggttcctttcttgcatggctcgatgagcaataaggttcctctgtgtcattttgtttacgatttttaggattgctttttaannnnnnnnnnnnnnnnnnnnnnnnnnnnnnnnnnnnnnnnnnnnnnnnnnnnnnnnnnnnnnnnnnnnnnnnnnnnnnnnnnnnnnnnnnnnnnnnnnnnnnnnnnnnnnnnnnnnnnnnnnnnnnnnnnnnnnnnnnnnnnnnnnnctcatacacgcactgagggttgaccctggtgttcttgccttctcagattcttctggagctggagatgaactcggacctcaaggcccagctcagggaactgattattacagcagcgagggaaactgaagttggtggtggtgagaaagttatcatgggcaggtcagcagctccggattccccgcctggataga

SEQ ID NO: 112720 - DNA, 531 bp, Homo sapiens
  misc_feature (1)...(531): n = a,t,c or g
aatatatccggcctatcctcttataattattaatttgacctggaacttccatgtcctgattcttagatcttgcatgattatgcacgtgttatctaattgatgaatttcaaatatgatctatttcaacagttaaatggctgaacagtcattaatttcaggtggtcctaaacccaaatcagtaaattctttgaggtggataaacctacatttcatttgtagtttaaaaagaaaaagtgaaaaaagtatttaaagtcctgggtcatggaaggcggagcttgcagtgagccaagtttacaccactgcactccagcctgggtaacagagcgagactctgtctcaaaaaaaataaaaaataaaatgggactgacaaattatttaataaagtctgataacactattagccaaggtggaaggggtggatactctcatgcacgctagtgagagtgctagttgatttgttgatttgacccatgcagagagtatggtgaaggaaagaagtccttagtacatgnggctggtgataggcccgat

SEQ ID NO: 112721 - DNA, 443 bp, Homo sapiens
  misc_feature (1)...(443): n = a,t,c or g
tgcaggagccgtaattctttatgggctgtaactatctgtatatcagctagtaagctccttggcatgttgtaatgtattttatagcttaaggatgtgccgtggtgttagatatagtgaagactttatggaatccatctatgcaaaatagactttggtattctgtacttgtattcagtnnnnnnnnnncttgtgctttgtgttttttaactgactgatttatgcatggatctgtcctcttccaggatgctggctatggtgagaaatccttttttgctccagaagaagaaaatgaggaagatttccagatgaagattgatgatgaagtaaggctttatactagtttgtattagtcattaatacatctcatttatccttttaaaagagacagctntattgagataacatanaatanactgtacacattttaaagtatacttgtagat

SEQ ID NO: 112722 - DNA, 402 bp, Homo sapiens
aaaagaagagagcaccgcttcgtaataaatattttatcggcacgcatcttgacgatgattcattgatcctgattccgcatcaatcgaggtgaacgatgaagcttgccaacagacagtgacgcaatatgggaattgaacatgtcgtatctgtgcctggcgcagcggctgctgcagtcggatcgcgagatcggcatgtttcgtctgggcgtaagcgccgacgtcgccgttgcgctggcggcgttgtcggtaaagcacatgaacgatctcgcctcggcggggcagctcatctgcgcattgcggccgggccgggacggcgtgatatcggcgctgacccggccgacgccgccggtcgacatcgtgcgtctccacacagcgatggcgctggccggtcttgcgctgccc

SEQ ID NO: 112723 - DNA, 1280 bp, Homo sapiens
ccatgactacgccaatcttggcacgaggatgaaatacaacagggcattattaaacactaggcctctggggaaagtgacaatgtttgccagtaaattcttcaagccacctgtgagtgttctgacctctcctgcctctgcttttggcctgtgttccttatccagctgcttacgttggtgcactttgttgctccaggaagagacgcttagagaagacctggtgttggccacaagtctcagtaatggaaggcgtgtggtcccttttgcttctttgattaaaaataaagtaaaactcattggagatgattgtgggtatttcagcaacccaagaaggacacttaggtactgtaagtaatttgaaaagtaagatacttctaggattaagagccgccatggccagggcatgaacaggagacctgtgatcatgtaactgtaattggtaataagggctcaagacccattcagattttttagaccagatgctcaaagcagtcatctctctctagtttgtactgttatggggggactttgtgagagaaggcaggtaatgaaatgacccctaagtgtacctctttctcacagctcctcgggtttctgtattttcctacaggatccttcctgatcctctgtaactgtaaggcattatgcattttagcatcccctctctttggtaacacagcaaccatttcctaggcttctactgggtgggaagcccatgctaactcctgggcaggaagaccttcagtaaaaggcttagaaatggagtttatcctatcaacaaaagagagcaaggaaatgatgtaaaggcagtctattttcagagccagagaggaactgggagattgtagatagtttgtggttttcaattagaggcactgaaattgggggcagttggtgtcacaatcctaaaagaagttgtgagaagtgtttgtaggttagtcaggtagagtagacattagtagattctcttaataagttagaaaatgtttagctgaaacaggtatctttctgagtgctgacaggcctttaaacctgaactttttctttttcctcattttaagttcttgtgggtctaagtcttgggtgctgaaacccatacctcacaggctcccgtccccagggaaggccgccctacctgctggattgttgggcaatgacgcagtccctgatttttgccaggtggggtggaactcccagccaacacgagctgtgatcttcgaagactgtgctgtccctgtggccaacagaattgggagcgaggggcagggcttcctcattgccgc

SEQ ID NO: 112724 - DNA, 333 bp, Homo sapiens
  misc_feature (1)...(333): n = a,t,c or g
ccgcctgaggattcggcacgagnnnnnnnnnnnnnnnnnnnnnnnnnnnnnnnnnnnnnnnnnnnnnnnnnnnnnnnnnnnnnnnnnnnnnnnnnnnnnnnnnnnnnnnnnnnnnnnnnnnnnnnnnnnnnnnnnnnnnnnnnnnnnnttttacaagccaaatatctgctgtcttcaagagactcacccaacacataaggactcacttaaacttaaggcaaagggttggaaaaaggtattccatgcaaatgtaccccaaaagctagcagcagtagccattcttacatcagacaaaacagactttaaaacaaaaacagttnnnnnnnnnnnnng

SEQ ID NO: 112725 - DNA, 344 bp, Homo sapiens
aacttaagttcccaagaagggaagtaagctgaacccctaaagcctacccctagtcggaagagaatatggttttatgacttgcccactactatgacaagcaagttcttgccctcaggcctagattctggaaaagccagtgcttctaggatagaaagcctgcaggaattcagatcccgaggaatctggatgaaagtacatgttgaatgaaagaggctggcgggcccacacttacaggctcacacctgtaatcccagcactttgggaggccaaggtgggcagatcacttgagctcaggaattcgagacccagcctaggcaacatagcaagatcccatctctacagaa

SEQ ID NO: 112726 - DNA, 405 bp, Homo sapiens
  misc_feature (1)...(405): n = a,t,c or g
ataatgcctctaatagccctgcctggtacgatgnnnnnnnnnnnnnnnnnnnnnnnnnnnnnnnnnnnnnnnnnnnnaggcgcccaagtgcacacagcggctggtaaggacagctgggacctgaccccagatccttctgaccctggttctcctgctgtctgcagggttggccgtgagtcccctccttgtaactgtcagcttttatgtgtgtgtgcattctcgtgtgtgtgtacattctcatgtgtgtgtgtgtgtgcacatgtgtaccatgtgcatgagggtttggctgtgtgtgacacnnnnnnnnnnnnnnnnnnnnnnntgcctgcctgagctcagagagagccaaacccccagagaagggtgccccctccaccaaccaggtgagctccttgcagaggcctg

SEQ ID NO: 112727 - DNA, 535 bp, Homo sapiens
attcccgtttcgaccctttcgtctgcgtttctaggagcttcgctatgcggctgctttaagattctagggttgtacaggcccacgccagacacgacgtctggcaggaacctcggcctcagagatggctctgagtaaatcaatgcatgcaagaaatagatacaaggacaaacctcctgactttgcatatctggcatccaaatatccagattttaagcagcatgttcagataaatctgaatggaagagtgagccttaattttaaagaccccgaagcagtcagagctctgacgtgtactctcctaagggaagattttggactttctattgatattccattggagagactaattcccacagttcccttgagactcaactatattcactgggtagaagatctgatcggtcaccaggattctgacaaaagtactctccgaagaggaattgacataggcacgggggcatcttgcatctaccccttacttggagcaaccttgaatggctggtgtttcctcccatcagaagtggatgatatgtgt

SEQ ID NO: 112728 - DNA, 518 bp, Homo sapiens
ggcacgaggaaaggctttgattttcctggttcagcacgaattcatgaaggagctcacactctagagaaaccctatgaatgtaagcaatgtgggaaattgttatctcatcgctcaagctttcgaagacacatgatggcacacactggagatggccctcataaatgcacagtatgtgggaaagcctttgattctcctagtgtatttcaaagacatgaaaggactcacactggagagaaaccctatgaatgcaagcaatgtgggaaagccttccgtacttccagttcccttcgaaaacatgaaacaacacacactggagagcaaccctataaatgtaaatgtggaaaagcttttagtgatttattttcctttcaaagtcatgaaacaacacacagtgaagaggagccttatgaatgtaaggagtgtgggaaagcatttagttcttttaaatacttttgtcgccatgaaaggactcacagtgaagaaaaatcttatgagtgtcaaatttgtggcacagcctt

SEQ ID NO: 112729 - DNA, 419 bp, Homo sapiens
  misc_feature (1)...(419): n = a,t,c or g
gcatttcggnngatttgtcgaccgacccgcgcggcgacacggttgtttcttgaaatctggcgttgggaatggtcatgtggaacaggccatgccagaggggggctcaacaacctgtggtaggtgagcccactgcagagggggagccacacctgcccacgggccgggagctgactgaggccaaccgcttcgcctatgctgccctctgtggcatctccctgtcccagatatttcctgaacccgaacacagctccttctgcacagagttcatggcaggcctggagaagtggctggagttgtctgaaactgtcttgccaaccatgactgcttttgcgagcggcctgggaggtgaaggaacagatgtgtctgttcaaactttactgaaggaccccatcttgaaggatgacccgacggggatcacc

SEQ ID NO: 112730 - DNA, 274 bp, Homo sapiens
cggacgcgtggggccagcaccgtttttgtggttagcttcttcttgccaaccaaccatgagctcccagattcgtcagaattattccaccgacgtggaggcagccgtcaacagcctggtcaatttgtacctgcaggcctcctacacctacctctctctgggcttctatttcgaccgcgatgatgtggctctggaaggcgtgagccacttcttccgcgaattggccgaggagaagcgcgagggctacgagcgtctcctgaagatgcaaaaccagcgt

SEQ ID NO: 112731 - DNA, 595 bp, Homo sapiens
ctgggaagggagaatggcggcgcccgggctgcggctgggagcgggaagactctttgaaatgcctgcggtgctagagcgactgagccgctataatagcacgtcccaagcttttgctgaggtgctgcggctgccgaagcagcagctgaggaagctgctgtacccgctgcaggaagtagagcggttcctcgccccctacgggaggcaagaccttcacctgcgtatctttgacccaagcccggaggacatagccagggcggacaacatcttcacggccactgaacggaaccgcatcgactacgtcagctccgccgtccgtatcgaccacgccccggaccttccgcggccagaggtgtgttttataggcagaagcaatgttggaaaatcatctctaatcaaggctttattttcactggcccctgaggttgaagtcagagtctccaaaaaaccaggacacacaaagaaaatgaattttttcaaagttggaaaacattttacagtggtggacatgccaggttatggctttagagcacctgaagattttgttgacatggtagagacctatctaaaagaacgaaggaacttgaagagaacattt

SEQ ID NO: 112732 - DNA, 392 bp, Homo sapiens
cttccctttttcccttccccgtcggtgagcggcgggggtggctccagcaacggctgggcccaagctgtgtagaggccttaaccaacgataacggcggcgacggcgaaacctcggagctcgcagggcgggggcaaggcccgggccttggagatggagaattctcagttgtgtaagctgttcatcggcggcctcaatgtgcagacgagtgagtcgggcctgcgcggccactttgaggcctttgggactctgacggactgcgtggtggtggtgaatccccagaccaagcgctcccgttgctttggcttcgtgacctactccaatgtggaggaggcggacgccgccatggccgcctcgccccatgccgtggacggcaacactgtggagctgaagcg

SEQ ID NO: 112733 - DNA, 794 bp, Homo sapiens
ggggctgaagagaccggttgccgccatgatagaacagcagaagcgtaagggcccagagttgccgctggttccagtcaagcggcagcggcatgagttgctgttgggagcggggtctggcccaggagccgggcagcagcaggcgacgccgggagccttgctgcaagcgggacctccaagatgttcctcccttcaagccccaatcatgctgctctctggacatgaaggggaagtctactgctgcaagttccaccccaacggatccaccttagcatctgcaggatttgaccgactgatattactgtggaatgtctatggtgactgtgataactatgccacactgaagggacacagtggagcagtgatggaattgcattacaacacagatggcagtatgcttttctcagcatccacagataaaaccgtggctgtgtgggatagtgaaacaggtgagagggttaaaaggctaaagggacatacttcctttgtgaattcctgttatccagccaggagaggccctcagcttgtctgcactggcagtgacgatggcacagttaagctttgggacatccggaagaaagcagccatccagacatttcagaacacgtaccaggtgttagctgtgaccttcaatgacacaagtgatcagattatttctggtggaatagacaatgatatcaaggtctgggacctgcgccagaacaagctaacctacaccatgagaggccatgcagattcagtgactggcctgagtttaagttctgaaggctcttatcttttgtccaatgcaatggaca

SEQ ID NO: 112734 - DNA, 537 bp, Homo sapiens
  misc_feature (1)...(537): n = a,t,c or g
tttttttcactcaacaaaccatttattgagtacctgattgggcgccaagcaatctggaattacaggacttatcctataaatctcgggaaaaaatggtttttctgcatcatgaactttgggcaacctgcttctaactccaaaggactggagttaggaactggggacttggtggtgaataagcccaagtctctgtcctcatgaagttcatgttctagcaggagagaaagacaagaaatagtcgatatgtattgttctgtataaaaatgtgtgtaattttcatgacacattagatgtgattaaacatccctccctagggngcaagtcaacttcccctcctccaccacacacacttaggagactgcagggcatttttccattcatgagtaagaattgcttttccttagaaagtagaagagacggtgaactgatctccagatttagttttgaataatttatggctgtaccccatatatatatgtacatgtatatatatatgtatatatatatacacctactattagtatatacccacaaatt

SEQ ID NO: 112735 - DNA, 317 bp, Homo sapiens
tcccgggtcgacgatttcgtgtcgcgggcccggaggcacctgcgcgcccttggccgactcggaggaggtggagatggacgcccgcgggtcccctggagatgcagccggcggcctgcgctggtgagggagccgggcccccggcgccgcgtcctacaacaaactccaggcgacaagagtcaagactggggcaagagtgacgagaggctgctacaagccgtggaaaacaacgatgcacctcgggtggccgccctcatcgccccgcaaggggctggtgcccacgaagctagaccccgagggcaagtccgcgttccacctgg

SEQ ID NO: 112736 - DNA, 388 bp, Homo sapiens
aaagaagttaaacaatttccccagttacctggctagtaagcagcaaaactgggattagaaagcagtggtatgactctagagtctaggtatagggtacattgtgggtttgtagtaaatatttgtctattttattagcacactttggttaatttgagattattaaattatgaatcagtctaaccccattttccattttagaatttccttatgaaaataactatatgattttggttttgcagatcaccatcaactgtactagttcatttattttttattttattttttatttttggagacggagtctctctcagtcgcccaggctggagtgcagtggcacgacgtcggctcactgcaaactccgcctcccaggttcacgccgactcgtgcc

SEQ ID NO: 112737 - DNA, 384 bp, Homo sapiens
aacgagaaagagaaaaagaaaagcattttttttatttccaaaactaacacattgcttggtgtgtcagaaattaaagatgtgcagggatggtgccattgacttctctcatgaaaagaggaaatgcctggactctgctctgagagaattgaatagagatgtgatgttggagaactataccaacttggtatcactaagtaaggaatctagccttcatatttcaggatctacctttggattggctgctttctctgctgtgatttcaaatttcctttttaagtaattaactgaatttcttattcttttcttaggaggagtgtgaaattactggaagtagacatggtttctcagggcacctttatcttttccatccttcaaaaagccttg

SEQ ID NO: 112738 - DNA, 371 bp, Homo sapiens
aaagaattacattgggcaaccccctccataatggttatagccaatgatacagaggagtcatgactaaccctggtcaattccagtgtctgtcctgcacccaacaaaccatccaaccaaccagtcaaccagccaacaaacagccaactaaccaatcatgcatcaatcatgcaatgcaaccatcaaccaaccattcagccaacaaaccagccagtcattcaaacttctaatcagccacctattcagtcaaccaataaaccagccaacctaccaaacagccaaccaactatgcaacaaaccaaccaactgacaacaaatagtcaaacaatttaacttctaaccagcccacctaccaaataatcaaccatcttacg

SEQ ID NO: 112739 - DNA, 265 bp, Homo sapiens
ttttttttttgtattttttttagtagagacagggttttgccatgttggccagagctggtctcgaactcctgactcagggtgatccaccttgtgttggcctcccaatgtgctgggattacaggcgtgagccactgcgcccggcctctactgaaaattttaaaatcatccaggcgtggtggctcacgctttgtagtcccagctactcagaaggctgaggtgggagtttcacttgagctcaggagtttcaggctgctgtgagctatag

SEQ ID NO: 112740 - DNA, 445 bp, Homo sapiens
ccggaattgccgggtcgacgatttcgtggcgaagccgccgggcctctgggctcagcacggagggagcgacggggccttcggccgacacctccgggtcggagctggacgggagatgttcccttcggagaggcagctccttcacattcttaacacctggccccaactgggacttcactttggagccaagcaataaaagagttcgacctctggctcgtgtcacgtccttggcaaatttaatctctcctgtaagaaatggagctgtcagacgttttggtcaaacaatacagtcatttacccttcgtggtgaccacagatccccagcctctgcccagaagttttctagcaggtcaacagtcccaacacccgccaagagaaggagcagtgcactgtggtcagagatgctggacatcaccatgaaggagtctctcaccaccagggagatcag

SEQ ID NO: 112741 - DNA, 1003 bp, Homo sapiens
cccacgcgtccgaaataattttatccgttttcaatgggaataagaaaaaataattttaataaatagctttgataccttttttgtattgctcaattaaataacttaaaaataggatttttgaacattatctttgcatgaatttgtgtaagtaacttatgtgttggtggaaagaaatgtataccatctttgcctgttttcctttagggtaattcctctcctgcaattacttttggatggaagtatgcccctttctcagtagaagatggtaatcttggagaatgaccatggagaaggggatgagttctggagaagggctgccttccagatcatctcaggtttcggctggtaaaataacagccaaagagttggaaacaaagcagtcctataaagagaaacgaggaggctttgtgttggtgcatgcaggtgcaggttatcattctgaatccaaagccaaggagtataaacatgtatgcaaacgagcttgtcagaaggcaattgaaaagctgcaggccggtgctcttgcaactgacgcagtcactgcagcactggtggaacttgaggtgtacacacacagttacacttcatggagttgcatccagccaagtatccatgtccttcttgtgaagaggcagagaaaatcacctctcccaagaatttccaccttctgaacaagggaaatgtatcctgaagagctgtacgcagatgggaggcaacttgtttgcttgttctgctgctagagcattgatttaattagaagacaggctgtgggtggccatgtgcagacaaagaagcaccagacagagcccatttagcctgggacagtaaaaatgcctttacaagccccctccagatgtggttcatggagaatatgaagttaagcagctgacggagttcatttacactgagtcaaacaagctttaaccctagaaagcatcctgcatgtttgatggcacaggtggctgacatgcttgcaaatatgacctgtctcacctttcagtgtgtt

SEQ ID NO: 112742 - DNA, 371 bp, Homo sapiens
ggttggtgcgagcttccagcttggccgcagttggttcgtagttcggctctggggtcttttgtgtccgggtctggcttggctttgtgtccgcgagtttttgttccgctccgcagcgctcttcccgggcaggagccgtgaggctcggaggcggcagcgcggtccccggccaggagcaagcgcgccggcgtgagcggcggcggcaaaggctgtggggagggggcttcgcagatccccgagatgccggagttcctggaagacccctcggtcctgacaaaagacaagttgaagagtgagttggtcgccaacaatgtgacgctgccggccggggagcagcgcaaagacgtgtacgttcagctctacctgcagcacct

SEQ ID NO: 112743 - DNA, 479 bp, Homo sapiens
attgcatcgcctgtcggaattcggcacgagcggacttctcccaagttcctaggcattatcttctggaccctatcctgcagaggtgaagcgtccctttggggactctcgctgggaggcggcgacggcggcggcggggggagaggaagagaaagaagcgtctccagctgaagccaatgcagccctccggctctccgcgaagaagttccctgccccgatgagcccccgccgtgcgtccccgactatccccaggcgggcgtggggcaccgggcccagcgccgacgatcgctgccgttttgcccttgggagtaggatgtggtgaaaggatggggcttctcccttacggggctcacaatggccagagaagattccgtgaagtgtctgcgctgcctgctctacgccctcaatctgctcttttggaatcatcacattccacttctaaaaggagctttaaagatggcctgggtgaacgtccttccttt

SEQ ID NO: 112744 - DNA, 388 bp, Homo sapiens
cctgtattaactatacattgaaactctcgcagttaccattgttcctggcacagacttcaacccagctgttcaccttatacctagcaccaaacctgaacctcatgactgtatctctcaatccatatggcatcctccacatttccccatatttccctctttcctgttcctaatccagaccacacgtggtttattgatggtagttcttcaaggccaaatcgtcagtcaccggcaagggcaggatatgttgtggtgtcttccacatcggtcactgaagctactgccctgcacccttccattacctctcaacaagccgaactcattgctttaacccaagatctcacccttgtaaagggactatgtgtcaatatctacactgattccaagtatg

SEQ ID NO: 112745 - DNA, 801 bp, Homo sapiens
attcctaatttgaacagaaaaataaggattctgtgaaactgggttcaagtggtctttattagatccacataagaatctagaaaatgataaaatatcacaaaacacagcacaatgtgggttcaccaataatgaaatatagagagaggatcttatgttttaaatttttgtaacatatagtccaaaacaaatagataattatacattctgcaatagatgaggacattggcagggcatataaaattagactcttgggcttcaaatgactaagttggaagcattagcaaactcaaggaagggacaattcagaggctataatgggcttaatgctgctatttaaagtaatgaagcattttctctgctttctggattcatttcaccaaacgatttcctcagcaggtcagatatagatttgcagcaaaatgaaaaacattttccaggaataaaacaactgatccctgcaacagctgacttaacttttctgaataataaatcttcatctgacatgcccagatgcctcagagtactgtcactgatattcttaacctcttcctaaccttgccagatccttgtatttcatatttgccaaacataattactgagagggggtaactgcactagctgtgtgatcttaaacaagttatttaacttctttttttgttgttgttttgttttgtttttgtttttgagatggagtcttgctctgtctcccaggctggagtgcagtggcatgaccttggctcatcacaacctccctgtcgcgggttcaagcgattctcctgttcagcctccccggacgcgtgg

SEQ ID NO: 112746 - DNA, 396 bp, Homo sapiens
gagaggctgccagggtgggaagagtgaagggaggcctggccagggaggtccgatgtggaggctgcagctgcacccagctcggactccaactttcgggagccactgttgctcgtgaagttttaggcctgaggcaggacagtctagagacaaagagtgccttccagtagcagctcagttgccctccagggtacccgtccccatctctgcctctcagtggccacaacagctgggtgtggcacacagggtggagaggagtcctgttgcctctctcacgtggccccacatagcctgcccgacatctcttgcctgcagtctgcagccctctcacccgtcccctctcctctgcagaactatgaacacttatttaaggtgaatgataaatccgtgggtggctcc

SEQ ID NO: 112747 - DNA, 407 bp, Homo sapiens
cagcaccaggtcccacctctttttcaaaaagcactgggccaccattcagagtcaggggctctgggtgggcagtgggcttctgacagataggtgcagcccacgtgactcagaaatagagaagaagggagctgaggaaccaaatctgcgtgccctgaatggaaggctgccttaggccacctttacggtcctattcaactgcagcattttaaaagccaaatgagactgtcctggggatttttttttgtccaaaggcacatatatatttgtgtgtacctgtgtgtgtacacccacgtatatgcatggatatgtatcatacaatatatgtacatatatcaaggtctttacctatatctattactgtgcatatatgtgtatatatgtatctatatctatcacttctaccaacc

SEQ ID NO: 112748 - DNA, 359 bp, Homo sapiens
aagtcaggggctctgggtgggcagtgggcttctgacagataggtgcagcccacgtgactcagaaatagagaagaagggagctgaggaaccaaatctgcgtgccctgaatggaaggctgccttaggccacctctacggtcctattcaactgcagcattttaaaagccaaatgagactgtcctggggatttttttttgtccaaaggcacatatatatttgtgtgtacctgtgtgtgtacacccacgtatatgcatggatatgtatcatacaatatatgtacatatatcaaggtctttacctatatctattactgtgcatatatgtgtatatatgtatctatatctatcacttctaccaacc

SEQ ID NO: 112749 - DNA, 714 bp, Homo sapiens
cgtgaagaagagacggggcttacacgaaatggccaaggaagacagcaaaggtgaggacatagaagtgcgaacgaggcggccataccaaagtgtttcgagctcaagggcgtgaggccacgcgccggggtaacaaggcaatcgaagttcgtcgcgttagatccctcttgcccagcacaaagtattatagaacaaggttttgaaaatggctgaagacagcaggaaactcgtcttcaagcctgaacagtgggagtcagcacgatcgccacgccctcaactcaagtcccctcccagatcttgagttcttccctctgagagtgggggaggacggcggacgggaacaaggcgccccgacatggtgtgccttttggcaccggcgatgagccttgctccgccatcggccgccggggttttccagtcagcctgtctcctgattctcttcccctgcccggcgcagcggtccggccgaatctcgccggggtctcctcttcccctgcaccagccagcgcctcctggctggccagtcccaccctggctcacccttcccgaagagcctgccgagaccactcatcgcgagctcgcctctcccgcctccgcccctcagcgtcctccagacttccgccttgctcctgggagggtgatgtctcatcacacagggaccagccttgcccaatccgtcctcagggcgccgccgcgacatcaagaggcgcaaacgaa

SEQ ID NO: 112750 - DNA, 451 bp, Homo sapiens
tcggctccgagagctctggcttatcaggactccatagttctccaacagagaaatcttgaaaaggactgaccagtttttgcagttctaaaaccatggcccatggttcagtgacattcagggatgtggccatagacttctcacaggaagaatgggaattcctggatcctgctcagagggacttatatagggatgtaatgtgggagaactacagcaacttcatttcactagcaggaccttccatttctaaaccagatgtgattaccttattggatgaagaaaggaaggaacctgggatggttgtgagggaagggacaagaagatactgccctgtattttctatttgagattggttgaatctgcacatatggagggctggctataaagggcaccacaaggaagaagccaaacagacccagaatgtgtgaaattctacagagcaaattacctgatt

SEQ ID NO: 112751 - DNA, 373 bp, Homo sapiens
  misc_feature (1)...(373): n = a,t,c or g
ggctagcaccatggacccccggggaaacgcgccggcggcgaaggagccgagccccatcttgatgtggaagaaatggaggactcaaaaccaaggatttccaagggatttcttccaaagcacaggaatctcactctgttaaagctggtctgttctaactgagatgacagtcatgtccctttccagggacctcaaggacgactttcacagtgacacgggactctccatcttaaatgagcagcgcattcggggcattttatgcgatgtcactatcattgtgggagataccaaatttaaagcccatagcaatgttctggcagcttcaagcctgtattttaaaaatatcttttggagccatacaatctggatttccagn

SEQ ID NO: 112752 - DNA, 374 bp, Homo sapiens
  misc_feature (1)...(374): n = a,t,c or g
ctgttacataatttgaaatcagctcttggagatgaaatgattctctaagtcattgtggtgtctggnnnnnnnnnnnnnnnngggccgcccgggggccccttccttgaatccccaccttttgggggggctnnnnnnnnnnaaccccnnnnnnnnnnnattttgaaccccccctgcccacctgggggaacccccnnnnnnnnnnaaaaaaatccaaactttacttggttgtgggggggcgcccctgaacccccacctcctccgggggttggggcaggaaacccgttgaatcccagggggcgggggttccagggccccaaaatggcccccttcctttccaccctaaaaaatttttttaaggcccgggaccagcttgc

SEQ ID NO: 112753 - DNA, 354 bp, Homo sapiens
ttttggaagaggaatgactcaggcatcaagccccaaggaattctgttctgttcagagaatattgtgagtttacagtaccattgctttgtaaaaataccagaatgattctctgggtgcgattataatcagctcagttgacaatttacttgaaaacaaacatgccaaatatcatgcaggttccactttctgttttgacttgcacttcagtttgcagcctctgtcctggatgacttttacctttctgctgaagaagttgcaacggagatttcaagatcccttcaaattgcacaattctgtttttaggtccatccagaaccacccactgcatgcagagaaaaacagtacctaataaac

SEQ ID NO: 112754 - DNA, 549 bp, Homo sapiens
gaaggaaatttcttaacttacacatcaccagccattctttctaggttgtagaatgacaccagtgtgggttgtgggtttttgttttttgttttgggggatattttctgtccatttatgtcacttttacaattaaagaaacacgatagattcacttatgttatgaatctatattgtctgaaacttttttcttaaaaaaatgattttcttaggcttcttcactctctctgactttactagctctagtaattgacgtacttttcataacagttttaagtaatcaaacagttatatcacttcagaagtgaaaaactctttgtcttcaaagacatctctttgataatagacttaccagttgctgatcctgaacaactggctaggcctgttcatttgttttttgtttgtttgcgagatggagttgctcaggttggagagcggtggcacaatctcggctcactaccgcctccatctaccaggttcaggcaattctcatgcctcagcctcccaagtggcagggattacaggcgcatgccaccgtgcctggctaattat

SEQ ID NO: 112755 - DNA, 381 bp, Homo sapiens
gtgtgcaccgcgtctccagcgatcccggatccactgcgctgccaggggcctgggggtggggctcttgctgtctctgcgacgacatccttacgtttcggcactctaatgctgggtttgtgcgggcgtgtctgcttagcggtctagcgggctgttaggctccctcgcccccagctccttggctcgctcagctcctccaccgcagcccagcagtgagacgcgcgcgcagccagctccccacgagatggaacagaccgaagtgctgaagccacggaccctggctgatctgatccgcatcctgcaccagctctttgccggcgatgaggtcaatgtaaaggaggtgcaggccatcatggaagcctacgagagcgaccccaccgagtg

SEQ ID NO: 112756 - DNA, 760 bp, Homo sapiens
cccacgcgtccgcttcaacagcaggaccacaagcctttcttcctagttttttgaccctccaccccaaccaaaatcgcctaccccttctggctgccagggttgaaggcccttcttgccaactctccttctaggacaaagccctgactccacagccactgtttgggccaagccctcatggatcatggtaaatgcctggaggaagaggaagaggatgcctggacagatgtcaattctggtgacacaaagacatctgtatgtgctgtcagcaaaggctaaccccgttctttctccagccttatgagatcaagagttcttccttgaagactgctaggtaacgacattggtgctacttatcttaaaggaggctctccgctgtactttttaataaggtgccagaaccctgtggagcatcatgaactgggaagagtagctgagccccagagcctctctggaagagaaaggaagagccagcagttctttctcccagtgtccgacctcactgtccagcgtcttcctctgcccctgctctgccctccctggctcctggactagagcccggcttccagcaggacgtttccccaggggatgggcgactgttgaaggggatctcaccgccagggctcagttggccacatcatgaacctccaggcccagcccaaggctcagaacaagcggaagcgttgcctcttcgggggccaggaaccagctcccaaggagcagccccctcccctgcagcccccccagcagtccatcagagtga

SEQ ID NO: 112757 - DNA, 674 bp, Homo sapiens
caaatgggaaaatcagtcttaacagtcttcaaataaatgcaaatgaagtgactgatatagtgactggagcctactgtaaagagtagttttgcttgcacagacttttcacacagatcgaattcaaatcccaacatcaccatttggaagctgtgtgaccttaggcctgctacttggcttctctgaaattcctcatgtgttgaatggaattcctattacctgctctgcagggttattaagagaattaaatcaaatactggaatgtgtttagcacattgcacagtacaatgagctcaaaaaatggtagttactgctttttaattataagttgatacggagctgggtattttcatatgcctttcttcatttaaatcttccttaatgtcttcacatccttaaaaatgaaaggagctaattctttgttcacttatttcttttttctttttttgagacggagtctcactctgttgcccaggctgaagtgcagtggcaggatctcggctcactgcaagctccactttgggttcacgccattctcttgcctcaggctcccgaatagctgggggtacaggcgcccgccactaggcccggctaatttttttgtatttttagtacagacagggtttcaccgtgttagccagggtggtcttcatctcctgacctcgtgatccgcccgc

SEQ ID NO: 112758 - DNA, 394 bp, Homo sapiens
ccagccttgtctcggccacctcaaggataatcactaaattctgccgaaaggactgaggaacggtgcctggaaaagggcaagaatatcacggcatgggcatgagtagcttgaaactgctgaagtatgtcctgtttttcttcaacttgctcttttgggtaagtgtatctcttctgagcacgggttagctcacctttacccagctaagctctcctcattcctctactgaagaggctggtgtggggtaaaatgcatgcgtgtttgggtcatgtccagcacaaccatcctagaaacaaaagagtaataatttttcccctcttcctgccacagaataaacctgcaaaattgaaaggtaccagtgcagttattaatggaggtgctgtttctctctgagggg

SEQ ID NO: 112759 - DNA, 1096 bp, Homo sapiens
  misc_feature (1)...(1096): n = a,t,c or g
agcggcggaattcggtttgttcaacatctccacctgtaatcctgtggccaacaccaatgccccaaccttcccccacagctatcttcactctctgccttccccatctcagatactgtcaactccatccttctgtcaggccaaaatccttggagccatcctcaactgctctttttgtcttacatcccacatccagtttgtcagaaaagcctattagagataccttgaaaatgcacccagaattctgggccggtttctcggcacctccaccattgcccccggcctaagaagctctcttatcttgcatcttgggctggactcctacaacagccacaacctccctgctggtctcccagctctctagccttcccccatctcctgtcgttttcgacacagcagccagaaggatcctttaaaaacagaggttgatcctgtcgttcctcaaaatcctccaatgcttttcctactgcactcagagtaaaagccaagtctctggcttagatgctctgggatcctgtaccngtaccccctttggtctcatgtcctacaatctggaattctggggcataaatgggtcttcctctgctggttccttggaacaattccaagggaacaatttcccccattcccctcgtgggccttcaggattgggcttgtttcctttggtatgctattttgatacacactaagcaccctccctccacctgttaataaaaaaattcgctgggaaggcccaataggctgaaatggctcctgcgactttggggttcctaagtcagcaaactgaaactcaactcagagtgaaagtgttgtgtgtaaccttgggagcaggaaacttcagccttaaccaagtcagaaactaccgactaacctcctaacaagagatttatgggtcaagttaacctcttaaattatggacttttccattttacccaatcaaaatagtttctttgtcttgctcccagagacaccttgtaagtgtcccctctggtttcctcggtggtggcgccctggaactgctggcgggtctgccactgcctggattggttaaaattgctgaatgcttcaaataaaacctgttaaaattgtaaaaaaaaaa

SEQ ID NO: 112760 - DNA, 525 bp, Homo sapiens
actgtttctagaggcattttcctgatcttgcctaacaggatttctttcctaggctgtaaaaatccctgcacatttcaatcagagaaagagtaagacgccacagatagagaaggaagaagagttttgcaacggtatagttgagggttctctgccacacacccagaacaggctattggaggctgggtctggtccagaggcctttgaatcatgccagtatgtcccctggccagaaattctcagttacctcagaacttttcccagcctcaagcgatgaaaagaaactagttcaaaacatggccaacattcccagtactcatgggtattggggggttctccatgttctcaccagcaagcctcacatctgagtctttagtacagcagccaacgctgtgtatgtactaggctgatgcatgcccgttcctagagaaatacaaatgcttgctcgtgactttttggatgaatatatctttttggctgtaggcagagtaggctctacatctgagaatatcacacagaaagtagttt

SEQ ID NO: 112761 - DNA, 368 bp, Homo sapiens
aaatacatacctaaatcaatgacataagtcaataagtgaaccacgcagggtccttccggggggtgaccttcagctggccattcgggatgatggactttccatcccagaaccatggctccatttgtccgtaaccttgtggagaagaccccagcactggtgaatgctgctgtgacttacttgaagcctcgattggccgcattttggtactacaccacggttgagctggttcctcccacccctgctgagatccctagagctattcagagcctgaaaaaaatagtcagtagtgctcagactggtagcttcaaacagctcacagttaaggaagctttgctgaacggtttggtggccactgaggtggcgacgtg

SEQ ID NO: 112762 - DNA, 358 bp, Homo sapiens
ccatgtgcacttcgggagttccgcaggctgggatgagattcttttaagcagagctctggatgcagcccccagcggtgccctcggctcacaggaacccgtccccttgtgcagctgttcctgccccaatctgccctcactccagatgccagctgtgggcatgggcaggtgctcactgtggcagctccctagggttgcaggggccatgcccaggctgtgctttctgggccccagaccctgcagctctgaaactgccccctttcttgggcccaggctctgccctggctcccagggccttgtggccagctgcaggcctcaccccgcctccaggagacacccagcctcggcgttccctcgtgcc

SEQ ID NO: 112763 - DNA, 371 bp, Homo sapiens
aaatgagaattatgtagcaaattggtcgctgagaagtgagagctcaagctgaagaggggacagggattgcaaagaggtcagagccatggtggatatgggcaagcttaagttaggagtaagatgaaattaccataaggtcaaccattaaagccattgcaaattccaagcatttctcttgtcctttcctgtgagctgcaaaataagcctgcaagcagtccttctgtgccctcttcctctcctcccaaattctgtgggtcctcacaacctgtccagcactccccaaggcctcttcctgtctctccacctccacctacatctaaggcgctgttactgtctctccccttagccaggtttcttccagtctcgtgccg

SEQ ID NO: 112764 - DNA, 591 bp, Homo sapiens
gcggccaacgggcgacaaccgaacctcccgcgcgtcgccgcgccgcgagcactgcctgcgcacttccgactatgcgccaggagcacttccggggcagagcctgagagcgcgcgcgcacgtggggccggggcggagagaggcgagcaccgggaaggggagcgtggggccgctggaatgggtgaatttaaggtccatcgagtacgtttctttaattatgttccatcaggaatccgctgtgtggcttacaataaccagtcaaacagattggctgtttcacgaacagatggcactgtggaaatttataacttgtcagcaaactactttcaggagaaatttttcccaggtcatgagtctcggactacagaagctttgtgctgggcagaaggacagcgactctttagtgctgggctcaatggcgagattatggagtatgatttacaggcgttaaacatcaagtatgctatgggatgcctttgggaggacctatttgggagcatggctgcccagccccagtggctcttcaacttttggttggttgtgaagatgaatctgttgaaactattttcaaattaccccagacaaaatccaaat

SEQ ID NO: 112765 - DNA, 385 bp, Homo sapiens
tagtggggttgttttatgagctttctggctggacatatcagaaaactattttgtatccagtgtgagaagaagcctaacacttactataagcagcatacaatattatcacctgtcatgtccctggttttcttaccatccagatattatctaaccaataagagtgctccctaatgccctttttatttcatttatcattttagcagcgccaccctttacaccaaaaagctggcgggcactatggggaaaaaacaaaacaagaagaaagtggaggaggtgctcgaagaggaggaagaggaatatgtggtggaaaaagatctcgaccgtcgagtggtaaagggcaaagtggagtacctcctaaagtggaagggattctcagagtaagttt

SEQ ID NO: 112766 - DNA, 730 bp, Homo sapiens
  misc_feature (1)...(730): n = a,t,c or g
tttcgtgacggctcgctgttgccctgaaggcaggcgagccagctgctcatgaaaggtggaaagtggtagaagctgacccctgagccctggcaggtaggtgggcgctgaccggtgtgtgagcagcaaagggcaaagaccagagcgggtgtaggactggatacacaccctttccagatacacacccgtttagtgcgagaaatggagcggttggggagaggatctcccgagggggctggattgagaatgggtaccatttgagatctcctaggaggccggccatcgggcaatgtctgatggagtccagccggtggaggagactgaaaggaaacagcctgcttcctgcaggtccgcgggagggaggtctttaagtgcgtttgtgcagccgatttcaaggctaagagagaaagactgcctctgatccctgaaggaagnnnnnnnnnnnnnnnnccgggaaaaaacctcaccttggaaaaggcccccaaggaaaacaaagttggggaaaaggccccagggcaaaatgaaccccccgttttaggaggggggaaatcccaggaccctggagaaattgttaagggggtttggcctccccctgccccggtttttgaaaaggatgtccccaataggtttggcaataactttgatttgataaagggaaatggaaatgatttggaccggttcttgggggaaatgaaaaagctaggggggaaatttagggaacttcagttgaggg

SEQ ID NO: 112767 - DNA, 1129 bp, Homo sapiens
aaattcaaaaccccagcgtgccagttagtattccaaaaagcaaagaaaaacagggacgtccacccaggtgcattggtgccagcatcttcactgaaaggaggtaatctgggctctatgtcagtccgttctaaattgccaaattctccagcagcatcttctcatcccaagctcaagtcttcaaaaggcataacgaaaaaaccgggggctccttcaaacaatgcatcatcttcacttgcttcattaaatccagtaggtaaaaacacttcttcaccagctttaccaagaactgcaccttgtatatctgagtcaccgagaaaatgtatttcatcccccaatacccccaaggccaagggtattccagcccagaattcagcagatctgcccgagtccacacttttgccaaataagtgttcaggaaaaactcaacctaagtatttgaaacataatcatatttcttccagagataatgcagtatctcacttagctgcacattcaaattcatcctcaaaatgtcccaagctgcctaaagcaaatatacctgtaagacctaaaccttctttccagtcctctgcaaaaatgacaaaaaccagttccaaaaccatagccacgggtctaggaacacagtctcaaccatccgatggagccccacaagccaaagcccagtcccagcacagaaacttaaatcggccttgaatttaaatcagccagtttctgtgtcctcagtttctcctgtaaaagcccacacagaaatcaaaagataagaatatagtttcagctaccaaaaaagcagcctcagaataaaagtgcatttcagaagacaggacccagctccttgaagtctcctggccgtacccccactgtccatcgtgagcctaccccagtcttctaccaaaacacaaactgcaccgaagtcagcacagacttgttcgcttaagggccagcattcaactaaaggggcctcccagaagtgggcaaaaccccagcttcaatcaggaaaccaccctcatctgttaaggatgcagatagtggagataaaaaacctactgcaaagaaaaaggaagatgatgaccattattttgtcatgactggaagtaagaaacctagaaaataaatacatactcattataaa

SEQ ID NO: 112768 - DNA, 373 bp, Homo sapiens
  misc_feature (1)...(373): n = a,t,c or g
nnnnnnnnnnnnnnnnnnnnnnnnnnnnnnntgtgtgtgttgcctaaatctcccnnnnnnnnnnnnnnnnnnnnnnnnnnnnaatggctaaatccccctagatcaaagtccttggaaccagatgtaccagcatcctatctaaacacaggcccctcctgactatcattgttttatcaccctttttccgtctacctttctcttcctcataaagcctagttttcctctgtttccctgccaaatggaagagttttccctaactacattcttctgcaggatgtgggggctcaaggttctgctgctacctgtggagagctttgctctgtaccctgaggagatactggacacccactgggagctatggaagaagacccac

SEQ ID NO: 112769 - DNA, 568 bp, Homo sapiens
tcgaagcctagagtctctgcgtctttccctcttccgctgcctcattcctttccttcctagccttggtcgtcgccgccaccatgaacaagaagaagaaaccgttcctagggatgcccgcgcccctcggctacgtgccggggctgggccgggggaagcaacgggctttggggtcaggacatacctgtgtgtgcaccctgcttgccgcctagatgtgacacattgactctcagcccagtgttttggtctgtaagatgggtaatgctgtatacggtctgcagtgaggagtagaggaatctgacgtgtagtggaaacacgcgaccaccttcctcaggtctttggccggcggcagaacaagcccatggagtccctggacttgaaggacaagaccaaggtatgggctgggggtgcgggaggccatttgcgacaggcagaacaagcccatggagtccctggacttgaacgaccacaccaaggtgagggctggggctgcgggcaacctgcaagtgtggggagttctgagccctgggagctgctctcactttgtagcagcgaattactaataaagaat

SEQ ID NO: 112770 - DNA, 374 bp, Homo sapiens
  misc_feature (1)...(374): n = a,t,c or g
nnnnnnnnnnnnnnnnnnnnnnnnnnnnnnnnnnnnnnnntgaaattctacttttaaagctgataacctttttctgctagagatactcagtcctgcctcttgccacaagctgctgagggctcggggttccatctgagctccaggagattcgtgtgctgccactgactgtctgtccctcctctgtcccaccccagtatgagaatgagtcggccctgaacctttatgagacttgcaaggtgcggaccgtgaaggctggcacgctggagaagctggtagagcacctggtgccagccttccagggcagcgacctctcctacgtcaccatcttcctgtgtacctatagagccttcaccaccacccaacaggtcctggac

SEQ ID NO: 112771 - DNA, 392 bp, Homo sapiens
  misc_feature (1)...(392): n = a,t,c or g
tgcaattgtttcagaaattatgtaattctttttgcatgcttttgattctatggatcaataaaagaagactgaagaggaacagaatcactttgttaaagtcatgctgtgaatttagtagcagagcttgagctgaaacgcacttcctttgatcttagatcaatattctttctctcctcacctcttttatggataatgtttgggacctaatatattatgctgctgagaacattttcacgttgaattataaaagcaggaagatgtagaattaataagaaataaaatcattaatgtctatatatatatannnnnnnnnnnagtgcgcaacttgctttggtgtttgctggtttattgccacagatgacattactgaactatactcaactctggaaagg

SEQ ID NO: 112772 - DNA, 629 bp, Homo sapiens
  misc_feature (1)...(629): n = a,t,c or g
gaaatttatttctcaatgaaaaaaagtgattctattatgtaacttttagatttaattttatttggctggctggaattacaaatataatcaggagttgacacaaagcaatgagggcctaaaatttgagagttgtcctaggaatacaaggaagggagaagggtaagacacaaaccacagattgaataaatagggatttagcatctttacgtggagtgtgagagtttagggcaagaaagtcattaaaagttgtataatgaaggttttaatggagagaaacatgacagacatgttgattttgagacaatgagaaaaccacctcttttttaaaatcttcagacacatacctgtggccactcatttcctaactgccaaccctacttcactcaatattatgacttgtacttttaggggacgtataagaatcttgaaaaaagaagaaaggattcaaactagggtttgctaactccagcctttcccactgcaccaaggaaactaccatgttcacatccatttattattatggatgtgttattatgggtatttttgtttaggaattttttttttgggataggggtcttgnctttgctgcccgggctgggacttccaaactcctgggggctccaagtgga

SEQ ID NO: 112773 - DNA, 1287 bp, Homo sapiens
ttttttttttttgcttcttttttataaaacttttattattgctagcaataataatcgtgtgttaattttaggaatatagaaaatacaaacaagcaaaaggagaaaaatcattcataatcccaccaccgaagaggctgtaccttccttccacccttcacaagttatcgtccatatatggtaatatacaaatgtacctttttaccctttccaaaaaatatgatattcacatattacttagccctttttcccattttatatccttacccaagaacctcttttttacaaatgtgtaaaagttcttttattaaaacgacagaggacttgtaggattgggttcaaaatacaataaacaatggagattgcagataacaagagatacatctaaaaccattaattagcaacaggttataagtagaaatatgggacaaaggaatatccaggaaatgcctaataaaaagcaagcctatatgggtattggttaatatcaaataaaaatcaagggtaaactacattaaagtaggggtaaggatgggtttcggattaaccttccaacgcatcactaataagtttgtttctgactctccttatctcatctatttcatccacttgtctaaacatatcttcaattgcttaaatgcctgttgtgtaaatcttcctttaaaactccctgggagagattggaatcaagccttttcttctaaaagttcctttttgctttgcgcctcctcctctaagcttctcctcctcttcgtggctttttcctcaaggctttgggctcttcctcatgctttgggttaactcctcattttcctggttttccttcccattttttgacgaggatttcatcttgtatctgtctacctctcttccttccttcttttctttcttgcttattcttctttgaatacaattgacttctggcaactgatcggggtcagtttcttcctcctccttttctagctttgggtcttgctggaaacaacagccctgcagataaactgcaaaattcccgcaagtttgactccttccacgggcctcagggaccaaccgcctgcgctgctgaaggaagctggtatccagacgggaacaaggacctgcagcatcgtctagatgaggccgagcagctggcgctgaagggcgggaagaagcacatccagaaactggagaccaggatccgagagctggagtttgaacttgagggagagcagaagaagaacacagagtctgttaagggcctgaggaagtatgagcggagggtcaaggagctgacgtaccaaagtgaagagg

SEQ ID NO: 112774 - DNA, 396 bp, Homo sapiens
accctggatactgccaaaggaacccgaaaatccagcagacaatgctagctattcctgtgaacctctagaggatctgcgcctgctcttcaggcgacaaccgtgaggaaagtaactagaatcgtagatcctcttggccctcccttgtcatatttttctttttactggtctcttaccccctttcactctcactgcaccccctgtatgctgctgtactaccagtagctccccttaccaagagcttctatggagaatgtggcttcctagaaatattgatgccctattgtatcggagtttttctaaaggaaaccccacttgcaccgcccacactcatatgcccctgcacttcaggccggacatttcaatccttgtatctttaaccctccttgtacgtttgct

SEQ ID NO: 112775 - DNA, 361 bp, Homo sapiens
  misc_feature (1)...(361): n = a,t,c or g
gaggttatcaataagctcctagtccagacgccatgggtcatttcacagaggaggacaaggctactatcactagcctgtggggcaaggtgaatgtggaacatgctggaggagaaaccctgggaaggctcctggttgtctacccatggacccagaggttctttgacagctttggcaacctgtcctctgcctctgccatcatgggcnnnnnnnnnnnnnnnnnnnnatgtaattaaaatgtcggaaacataaaataatacaagnnnnnnnnnnnnngtggggcggcggtttttcttttttagggggggnnnnnnnnnnannnnnnnnnnncgggttaaaaacctgcggaggtggggaaaacctg

SEQ ID NO: 112776 - DNA, 390 bp, Homo sapiens
gcagagtgtctggatggaacctgagctgggtctctgactcacttctgactttagggtgaagatggagggaatctgataaagacatcttataaattcaacagacacacaagaatttgatctcccataagcaactgtgaaattacaataacagatcctgggaaggtctacaattctaattcagttttttcaagggggaacatggcaaaggtggtcagtttcatccttgttaccaccgctctgacaatgggcagggaaatttcggcgctcgaggactgtgcccaggagcagatgcggctcatagcccacgtgcgcctgcttgagacccgggtcaaacagcaacaggtcaagatcaagcagcttttgcaggagaatgaagtccagctccttgat

SEQ ID NO: 112777 - DNA, 604 bp, Homo sapiens
aaggactctctgtataagagtttaagaagtaaactcccaggggatgggagtgactctggacatgggagtgacatgatagtgactctggaccctgcagtggtgggacacagcagcatctctgtctctgtgaggccaggcgcagcatcagcaaggaccccagaatggtggagcactactgtggcttgggccctcgggggcagggaccaatgcagcaactacttctctccctggggaggcaggtgcctgggcaactcacattctccagagctagtccaagtccaaggaagcaaggttctacagctgtttgtcctgaagggcaaggtaccccagctcagccaatgccgttttcctgggatatgggggtgccatgttggctcatccctggcaggtgtggctgctcagctcagccaagacactgattccctgtgaagcagggcagtgcttcagctctcgtgcagtggggggtgtgactgcttagactggccaagacactgattccctggaaagcagggcaccaagtcagctcaggctccaaggggcagggcacaatggcagctgggaggggaggggcacagcagcgtggccccgcaggtggggtgtatgc

SEQ ID NO: 112778 - DNA, 373 bp, Homo sapiens
  misc_feature (1)...(373): n = a,t,c or g
cacaaaggtgacagcatttaacaaagcttagagaaacctccaggagactgctaccatggcagagaagcccaagctccactactccaatatacggggcagaatggagtccatccggtggctcctggctgcagctggagtagagtttgaagagaaatttataaaatctgcagaagatttggacaagttaagaaatgatggatatatgatgttccagcaagtgccaatggttgagattgatgggatgaagctggtgcagaccagagccattctcaactacattgccagcaaatacaacctctatgggaaagacataaaggagaaagcccttcaacctgaggaacaagatgccaagcttgccttgatccaagagaan

SEQ ID NO: 112779 - DNA, 417 bp, Homo sapiens
  misc_feature (1)...(417): n = a,t,c or g
atcaaatcctcacctaagctttcagtgtatccagatccacatcttcactcaagccaggagagggaaagaggaaaggggggcaggnnnnnnnnnnnccccaccaccttaccggaaacttttcaaaaaaggctccaaaactcaccagggcttttggggctggggatcagggcttttgcaccccatgaggcggaccaaaatgactttgtgacccccaggaaatcccgagggggggttcaaaactcaggtaagcagcaaacccaaaagcggtttttcccccaaagagctgccctcatttgcctctcctttttgcaacggggtctgggacggctgatcttgataataaaggggcttcatgcctgagggcaataaactgccagggtaatccaatacccttaggcaggggagctcctttgttta

SEQ ID NO: 112780 - DNA, 465 bp, Homo sapiens
ttattaggtcgctccagagaaagcttgaaagcaaggcctgtactccacttgaaaagattcataaaatagatttgtaaattattattcagcgcatgaatttctcaagtatatgattatactaaattaatattcatatgttgcaggaagttggtgaaccatctaaagaagagaaggctgtggccaagtatcttcgattcaactgtccaacaaagtccaccaatatgatgggtcaccgggttgattattttattggtaggattatatcagtaaaatcgtattagtgtacatatgttatgaagttaacctacatttggggatatgtaggaagttttaaaagtgctttccaaatgtgattgttctgggtgatgggacatatgggcagttgattattctgttcttttcttttatggattggaaaatgtctataataaaaagataacatgttttctaataccaaaaaaaaaa

SEQ ID NO: 112781 - DNA, 369 bp, Homo sapiens
ttttgtttttattaatgcaaattataattattcaggattccttcctttttttttctttgacaattttaagccttgtcctaggttaagactgatgaacaggagccaaagaagagctttgttgcaaatgtatacactttttcctaaagtgattttccatgacctgatacttggtcactgagcaccttgacaaataatgactgggtagttttattaagccagttttttgttgctgttgtttttcccgctctctgtcttcttcttcttcatggagctcagtcccagttccagaatgaggaagctgcctcagggtcgccctgttcctccccttggacctgagacaagagtttctgtagtctgggtggaacgcta

SEQ ID NO: 112782 - DNA, 458 bp, Homo sapiens
tttttttttttttctttggaggtgtaatggctagaaatcttagacattcttattcagtagatctggggagaggtctcaaggatgcccctgggtgcttttgaattgaacaggatcctggccaccaaccttttgagtccatggagtggtggggcccaggacggggtgagggcaagagtgggaaggctggctgccagctgttgcagccttccggcctgaagggagctaggatgcctcgcctcttcctttccctccccacttcccctttcccccatggggtcgctaatggcattgccgcagtccaagggctccttcctgttactgactcactgtgtgaatcggggggtctgcagcaggatggagggagtagagctgtagggtgggctggggcccccttccctatccggctgctggagccctgtgctctgctcacctgtaccgctcaccacattgagaagtgg

SEQ ID NO: 112783 - DNA, 674 bp, Homo sapiens
aacaatgctgctatgaacattcgtatatgggtatctgttcaggtctctgcttccagtttcttttgggtctgtacttagaagtgaaattgccgaatcgtatggtagttttgtgtttaactatttaaggaactgctgtaaatcctttgaagccattaacagttttgaagaaatttagcaaatttatttatttagcaagtgtttattaagtgcccaccacgtcctgtgcacatcatgttctaggcactttgccaaaacatttctccttgtcttctgcgcagaaagacgatgccaactgagtgtgttctccactgagtggcacagaggcttttaacacatggggcagcataatgacacagggaagggatgactgtcttcggagacattcactcactgcggttgctgttgacaagtcaggtgattctcctgctcgggggtgttcagggacagatgccttagttactaactagaaggggaagatcctgtttctgaatactgacttgggtttcattgcagtgttattaaggaaaagcgggatgcctatgtgagccgcctgaatgccatctatcaaaacaatctcaccaaggtgtgtatgctgggtttttaactttgagaaagagctgttcccttcttgagtactcagctaagtcttgccagactgtagccctggttagttg

SEQ ID NO: 112784 - DNA, 662 bp, Homo sapiens
caggtatttctgtatcacaatgtgagatggactaatacactcatgtttcacaactcttatccacaggggatgtcagcttccacttgagctcacacgcttcatctcctctctcagggagttatttcttcagccttcacctatggcccaatttttcttttcttgtacattaacaattagcttctctacaacttaaaatttctttccttgagctcctgctgtcagataatactcccaaatccctactaactcagaagatgggctgggggaaagctctttcccatggacaaatatgatttagaagagaaggaaatgaatgaagaacaggtttccagatcccgcaggtgttgctgtgaggatgtcaggtgctggcgcaggtgttgctctgaggctgtcaggtgctggcataaacagctgcaattaggggtgctgttcattgagcgtgcctggccctcataactatgacttctatactcgtctctctcaggggactgtgaccctcctgggaatccagttcatggctattttgaaggaaataatttcaccttaggatccaccattagttattactgtgaagacaggtaagtgaacacagcctgtcaaatgccagatcttgccccttggcagcattgttttggggaataacccagtctgtgtccacctgg

SEQ ID NO: 112785 - DNA, 373 bp, Homo sapiens
acacagacgtccatgggagactgagccagagtgtagttgtatttcagtcacatcacgagatcctagtctggttatcagcttccacactaaaattaggtcagaccagggcccccaaagtgctctataaaattagaagctggaagatcctgaaatgaaacttaagatttcaaggtcaaatatctgcaactttgttctcattacctattgggcgcagcttctctttaaaggcttgaattgagaaaagaggggttctgctgggtggcaccttcttgctcttacctgctggtgccttcctttcccactacaggtaaagtccatggttccctggcccgtgctggaaaagtgagaggtcagactcctaaggtgagtgaga

SEQ ID NO: 112786 - DNA, 425 bp, Homo sapiens
aaaaaagcttatgtcacctgcgataagtgcacgttggccctcttccgtggtgtctcggaggtgttcagctgcttcaagatgaagctgaacatctccttcccagccactggctgccagaaactcattgaagtggacgatgaacgcaaactttgtactttttatgagaagcgtatggccacagaagttgctgttgacgctctgggtgaagaatggaagggttacgtggtcggaatcagtggtgggaacaataaacaaggtttccccttgaaacagggtgtcttgacccatggccgtgtccacttgctactgagtaaggggcattcctattacagaccaaggagaactggagaaagaaagagaagatcagttcatggttgcatcgtggatgccaatctgagtgttctcaacttggttattgtaaaaaa

SEQ ID NO: 112787 - DNA, 405 bp, Homo sapiens
gatatgaaggcagcaggggccacttcaagcttgcgctgcttcctaagcttaggttgtcagaagcctttttagagatacatttttagaaaaagaaaaatagtgtggtaacagtttactacttgcttctttttttttggttggttaaaagaattttatagaaatattactatagctttatgtctagctaaccaaataaggggggaagggggccccaaaaaacgctgttactgtaaaaacgggttttacccgcaatttccactcttgggatccaaggagggatcaagccctcgaggctttgtcggttttattgggcaccgcggaggcaaaacctgagctcgacctccgttcaattaaggaagcccttgaggataaagaggggaaaccccttttggccgaggctgaaag

SEQ ID NO: 112788 - DNA, 354 bp, Homo sapiens
cagagagcaagctgacctcatgataaacactgcatgtgctgcaagcctcgtttattttcgtttctcccccctcttcttccccgatgaatttcatacagtttatagggacagtttcaaaataacagattaacaggagggaaaaacagtttatttacatgtgcaatgtgcatacacatggaagaactcagtggtgggtaactcaaaggagtagttagttagaatttggggccaatatgctatctaactcattctacaaagccagtctcaccctgatacccaagccaggaaaggacacaaccaaaaaagaaaacttgcgaccagtaatcctgatgaacataagatgcaaagtccctt

SEQ ID NO: 112789 - DNA, 355 bp, Homo sapiens
catatgtggccccaaaatttcaataaaagctgtataggaaagcactttgtaaaatagtaaagcaaatacaaataaatgttacctcacaattgttgaacagtatctcggcttcattaagtcgtatgcaagaagactttataaatgaagcactttccattctagcccatgatgatgccatttggtcagttgcttgggggacaaacaagaaggaaaactctgagacagtggtcacaggctccctagatgacctggtgaaggtctggaaatggtgagtgcctctcccctaacatacagccttggaaaattgggggctgaggttttgcttctgaactctccagttgcagtccgggaaaaa

SEQ ID NO: 112790 - DNA, 345 bp, Homo sapiens
cttcagtttcttagagaacccaccatggtgctgggtcctgccgacaagaccaacgtcaaggccgcctggggtaaggccggcgcgcacgctggcgagtatggtgcggaggccctggagaggatgttcctgtccttgcccaccaccaagacctactttccgcacttcgacctgagccacgggtctgcccaggttaagggccacggcaagaaggtggccgacgcgctgaccaacgccgtggtgcacgtggacgacatgcccaacgcgctgtacgccctgagcgacctgcacgcgcacaagctttgggtggacccggtcaacttcaagctcctaagccactgcctgctg

SEQ ID NO: 112791 - DNA, 345 bp, Homo sapiens
catggccgggagcagcgaggaggcgccagactacgggcgaggcgtcgtgattatggatgattggccagggtatgacttgaatttattcacgtacccacagcactattatggagacttggagtatgtcctcatccctcatggtatcattgtggacagaattgagcggctggccaaggatattatgaaagacataggatatagtgacatcatggtcctgtgtgtgcttaaaggaggttacaaattctgtgctgatctcgtagaacaccttaagaacatcagccgaaattcagatcgatttgtctcaatgaaggttgatttcatcagactaaaaagttacaggaatgg

SEQ ID NO: 112792 - DNA, 362 bp, Homo sapiens
  misc_feature (1)...(362): n = a,t,c or g
nnnnnnnnnnnnnnnnnnnnnnnnnnnnnnnnnnnnnnnnnnnnnnnnnnnnnnnnnnnnnnnnnnnnnnnnnnnnnnnnnnnnnnnnnnnnnnnnnnnnnnnnnnnnnnnnnnnnnnnnnnnnnnnnnnnnnnnnnnnnnnnnnnnnnnnnnnnnnnnnnnnnnnnnnnnnnnnnnnnnngccatttaattttttccgctttttttgaacggggcccccatgggaaacttgggttttttatcctggcggaatttttccaaaactggttggccccaaagggagggatggttgccttattataaaaaccccaaaaacaaaggggggccctgggttttttggatccccagggggcccaggtccc

SEQ ID NO: 112793 - DNA, 362 bp, Homo sapiens
gcggaggcgacctcgcgacctgtgtcagcagagccgccctgtaccaccatgtgcatcatcttctttaagtttgatcctcgccctgtttccaaaaacgcgtacaggtaaccccctcgctctgcatctgctgcgcctgcagggtcctgggtgcccagccagttctcatgccacccaagctgctgtgtgcaggaaggtgtgtgggccaggacggggctgcacaggcctggcactgccctccaggacagggtcactcagtgtgggatgctgtcagaatgcctctcggggcggggactccagtcaatgtacaaagacgtgaagactcagccacagaaggcagccacaggctcatcttggcagccaac

SEQ ID NO: 112794 - DNA, 383 bp, Homo sapiens
tgggacactgtggaagcccagagaatctgatcccgggtcccacaacttcacatatcgcgagcctcctgtccctgcctgccctgggtgctcatggaactagctgctgccctgcacttctcccggccagcctccttcctcctcctcctcctcctcctcctcagcctgtgtgcactggtctcagcccaggtcactgtcgtggggcccactgatcccatcctggccatggtgggagaaaacactacgttacgatgctgtctgtcacccgaggaaaatgctgaggacatggaggtgcggtggttccagtctcagttctcccctgcagtgtttgtgtataaggatggaagagagagaacagaggagcagaaggaggagtaccgaaggaa

SEQ ID NO: 112795 - DNA, 358 bp, Homo sapiens
cgctgcctggagcggaactatgagctgcacctgttcgcgaggtcagctacctgttttcttcgctgaaaaggtgagcctcctgttcaagaactggcaccgcttttgcctgaaatgtgagcgctgccacagtatcctgtcccctggtgggcatgcaaagcacaatgggaggccatactgccacaagccatgctatggggctctctttggacccaggggggtgaacattgatgggggaggctcctacttgtacaatccccccactcccaggcctggctgcaccactcctctcagccccagcagcttcagccctcccaggccaaggactggccttccccaaggcaagaaaagccctccccat

SEQ ID NO: 112796 - DNA, 362 bp, Homo sapiens
cacacacaccactttatggcaattcttaactgacattcaatgacttacttcttttcttagaaaatttccaccacatttctatccccaagccaacatacaatgtgaaatgaaagccagtgcgtggagtgcagctgctaaaaattttcagcacagggctctttctgactctgctcatgagatggtatcagccacccaatgactggcgtatcttggtcctgtgtctttcttcttacgctgtgttaatgtgtttactttccatttggcagagagacaagagagacacctccaacttcgacaaagagttcaccagacagcctgtggaactgacccccactgataaactcttcatcatgaacttggac

SEQ ID NO: 112797 - DNA, 368 bp, Homo sapiens
  misc_feature (1)...(368): n = a,t,c or g
nnnnnnnnnnnaaactaaaatggaggctggtttcttgccttaaggagcccattgcctttcccgctgaagtctaaatgttgacatgtaataaagcggccagcaggatggtgggggatgcggccaactccaatgggcctttccagcccgggggccttttccatattcaagttgaggctgtgaagctgggcagggtttcacctgagctgaggttggaagtccctgaccttcagctgtggccgcctacggagcagcagggagagcaaacccatggagaaccccgcggcccccaaagcatggacggagctgccagccttctcccctgcccttcttcctctactcccgacctgccagccttctcccctgccctt

SEQ ID NO: 112798 - DNA, 520 bp, Homo sapiens
ctgcacaacccctaccatgccccatttcagcaggaagcaggtagagcggtcgtcagtcaacctccccagcagcacttggggttttccctgttgagagggggtacctgagagacagggactagctgggatttccctaggccgactaagaatcccctaagcctagctgggaaggtgaccgcgtcccacctttaaacacggggcttgcaacttagctcacacccgaccaatcaggtagtaaagagagctcactaaaatgctaattaggcaaaaacaggaggtaaagaaatagctaatcatctactgcctgagagcacagcaggagggacaatgatctggatataaacccaggcatttgagctggcaatggctaccctctttgggtcccctccctttgtatgggagctctgttttcactctattaagtcttgcttctgcagtcttctggtccatatttgttacggctccagctgagcttttgctcgccgtccacccctgttgtttgccgctgtcgcagacccgc

SEQ ID NO: 112799 - DNA, 439 bp, Homo sapiens
  misc_feature (1)...(439): n = a,t,c or g
aagcagattgcttgagcacgggagttcaagacccacccctgggcaancaacagggaaacccctgtctttacaaaaaatacaaaaattagctgggcatggtggcatacacctgtagtcccagctactttacttggaaggctgaagaaaaggatcacttaagcccaggaggcagaagttgcagtgagctgagattgaaccacntgcacttcggcctgggtgacacacaacacaaagacatggagaggctgaatggataaaaatgcaaggcccaatgagctgttgcctaaaagaaacacacttcatttataaagatacaaatagactgaaaataaatgaatggaaaaagatatttcatgccaatgaaaacaaaaaaagagcaggagtagctatacttatatcagatgaaataggtttcaagagaaaaactgtaagaaaacac

SEQ ID NO: 112800 - DNA, 439 bp, Homo sapiens; identical to SEQ ID NO: 112799
  misc_feature (1)...(439): n = a,t,c or g

SEQ ID NO: 112801 - DNA, 378 bp, Homo sapiens
acaaattctatcttattgatcaatttatcctacttttgggcccatttaagacgttccatcatagaagctcaatttttagaagttgtcttctactttcacctactagcacttttctgcatttgaccccttcaagccccatcctatgggtcttccgcaagaactccatcaaaaataaatagttacataaatggaaggacaggcagatattttaaaatatctctgtagcatatgcacttgaaggattctaccatttctacttcttttccaggttatgaaacttggaaatcccgagattgccaggagactgctacttagaggtgctaatcccgatttgaaagaccgaactggtttcgctgtcattcatgatgcggccagagc

SEQ ID NO: 112802 - DNA, 387 bp, Homo sapiens
cttgttatgggtctagcagcctctgtggcatctcctgtcacattgggaaaatgaagaattccaggacatgggcttggagggcgccggtggagctatttcttctctgtgctgccctgggctgtctcagtttgcctggctccaggtaagtgacagttaccaataattccctgatcaataatatgacagggaaggtgcagccacatgatgctgaccatctctttgttgcatgcctattgaatgaggaacgtctcttaaggcaatttgcatgcatctgataacatactatcaacaactcttttcaaattattgtggaaccaagtagctgatttcaacaaaagttcctgtaagaaactgacaggtttaaatgtattttgtcatgctgagaaa

SEQ ID NO: 112803 - DNA, 350 bp, Homo sapiens
agagcgccagagagagaagatcggggggctgaaaggcatcttgatcctaccgctccgcccgtgttggtggaatgagcgttgcatgtgtcttgaagagaaaagcagtgctttggcaggactctttaagcccccacctgaaacatcaccctcaagaaccagctaatcccaacatgcctgttgttttgacatctggaacagggtcgcaagcgcagccacaaccagctgcaaatcaggctcttgcagatgggactcactccagccctgtcccaggatctataggagttgcaggccgttcccaggacgacgctatggtggactacttctttcagaggcagcatggtgagcagctt

SEQ ID NO: 112804 - DNA, 863 bp, Homo sapiens
tttcgtctcgcgtcgccgcggcctcctccccctcggcacatggtcgcccgccccttcctgcgccgcgctcggctcccgcgcctcgcctggcctggccgctgccgcgggcgagcactgtgcgctgggcagccccgggcccgcgcctcccgcccagccggcgcttcccggtcgcagttcgctttcccacccgagagccgcgagcgcccggccgaacccgcgatggaataatgcccagcggcccgccaggtcccggtcgttttctgatgtgacggctgagacatgagatcttcagcctccaggctctccagtttttcgtcgagagattcactatggaatcggatgccggaccagatctctgtctcggagttcatcgccgagaccaccgaggactacaactcgcccaccacgtccagcttcaccacgcggctgcacaactgcaggaacaccgtcacgctgctggaggaggctctagaccaagatagaacagcccttcagaaagtgaagaagtctgtaaaagcaatatataattctggtcaagatcatgtacaaaatgaagaaaactatgcacaagttcttgataagtttgggagtaattttttaagtcgagacaaccccgaccttggcaccgcgtttgtcaagttttctactcttacaaaggaactgtccacactgctgaaaaatctgctccagggtttgagccacaatgtgatcttcaccttggattctttgttaaaaggagacctaaagggagtcaaaggagatctcaagaagccatttgacaaagcctggaaagattatgagacaaagtttacaaaaattgagaaagagaaaagagagcacgcaaaacaacatgggatgatccg

SEQ ID NO: 112805 - DNA, 373 bp, Homo sapiens
  misc_feature (1)...(373): n = a,t,c or g
cagctacagtgagagcacttacaccgcggaaaggcacacactacaaaccagggtctgcttttctctgccaagctggctgataaacggttaccagcacatcactatctctgtgtcacccccgtagcctctcgaagtctccgtccccatccttccatttccagcccccatatcttgaagggtgagacaggaaggtgaggcctctgagtctaggagtacaaaggcctagattatagcccagctctgctaggcagaggcgtcgttcctggcccattctcttccaccccaggtctggaggagtgcgggcacatcagtgtctcagcccccatcgtccacctgggggatcccatcacagcctcctgcatcatcaagcagn

SEQ ID NO: 112806 - DNA, 358 bp, Homo sapiens
ttccactagaatgtgagctctatgatggccaagcctctggctgcactgtgccccgtgtgtccccagcatcctggtggggctcaatacacagagagctcataagtagcatttgaatacatgaatcaaagtatggaatggcccagtttactgcagcctttttgcaggtgcaaaagatgatcttttagaaagcagaaacagggggtctggtgcatgagatctttttctcaatgtgactgtgctgtgcagaccttcacgtggtgtcttgtgaaagactttgaccactgtgtggactttccttcagtgtatctttcagagtgcaagactgggaatggaaagaactacagagggacgatgtcca

SEQ ID NO: 112807 - DNA, 392 bp, Homo sapiens
  misc_feature (1)...(392): n = a,t,c or g
ncagacctcatggcattaactttgctggaactggtggcaaaactttaacatctcccactacatcacattgcaattcaatctcaatctgctgcccaaattgcttgacacagcacatgctttagctcacctttgcctcaatggcattatcaaggaaagagaggtccaattcaggagtcaatatggaaagcagcactcccatttatgaatggcagcatttggattgggacactatccaataatagtaattgtgctaaacacagttttaatgttacccttgtagaaaatattaccactcaatttacaatttgtttttaatccttatattttcttagcagcaaaaaaaacccacctccaggtagatgatgcccaattgacttgtgattcctgtcaac

SEQ ID NO: 112808 - DNA, 357 bp, Homo sapiens
gtggtgcagtgtaagcaggtaaagaaaagccaggtcttccacatgtaaactacttgaactccatttcatcttttttcataccatctctaagattgctgccgcatttgcttgttaaactgaaagcatgtttcttgcaaaggctctattggaaggagcagatcgaggtcttggagaagctcttggaggcctctttggaggaggtggtcagagaagagaaggaggaggaagaaatattggagggatagttggaggaattgtgaattttatcagtgaggctgcagcagctcagtatactccagaaccgcctcccactcagcagcatttcaccagtgtggaggcctcagaaagtgaggaagt

SEQ ID NO: 112809 - DNA, 360 bp, Homo sapiens
  misc_feature (1)...(360): n = a,t,c or g
gtggattccgccggtgaaggctgaaagcaggtaccttaaagatgccgggatccgcagcgaaaggctcggagttgtcagagaggatcgagagcttcgtggagaccctgaagcggggtggtgggccgcgcagctccgaggaaatggctcgggagaccctatggttgctgcgccagatcatcacggaccaccgctggagcaacgcgggggagctgatggagctgatccgcagagagggcaggaggatgacggccgctcatccctcnnnnnnnnnnnnnnnnnnnnnnnnncggagagtgctcaagattatccgggaggagtatggcagactccatgggcgcagcgacgagagtgatcagcagg

SEQ ID NO: 112810 - DNA, 369 bp, Homo sapiens
ccggtctctagtagtgcagcttcggctggtgtcatcggtgtacttcctccgctgccgcccccgcaaggcttcgccgtcatctaggccatttccagcgacttgtcgcacgcttttctatatacttcgttccccgccaaccgcaaacattgacgccatgtcgggttattctagtgaccgagaccgcggccgggaccgaggggttggtgcacctcgatttggaggaagtagggcagggcccttatctggaaagaaggttggaaaccctggggagaaaatagctaaaaagaagtggaatcttgatgaagctgctaaatttgagaagaatttttatcaagagcaccctgatttggctaggcgcacagcacaaga

SEQ ID NO: 112811 - DNA, 533 bp, Homo sapiens
cttcatacaacaagaggaagagtctgcacgcagaagcaccaccttctagggataaataaagggtcaagctaaggaagggcagaacaaacttcagacactcacttctttgcctcaacttcagcctgctctcacaacctcactatgtcttgccccaactactgctcgggaaactccaactcaggatctctcagaacctcccgccatattcctctcacctacatcgacctctgccctaccagcgtgagctgtggagatgtcctctacttacccactagctctcaagaccatacctgggtcacagacaactgccaagagacctgcggtgaaccaaccagctgccagccggtccactgtgagaccggcaatcttgaaacctcttgcggttcttccactgcttactacgtgcccaggccttgccaaggaagcagatttcttcctgcttctttcttctccagttcctgccttccagtatcctgtagaccacagaggtatgtgtccagcggctgtcgtccactgaggccgctgctcaataa

SEQ ID NO: 112812 - DNA, 396 bp, Homo sapiens
atatagcagattcttagaggagagatgcgaatacatgtctttggaataatttcctagcagtgggaatactgtgtagtttacttttggtagatgtggctcctgttaactctgagaatacctcacatgtgctccagccatgaggtcatattgccagcttctgagtatactgataggtgagcctgggtttctccaaaagtcaacaagtagcttacgaaatgtacctgaccaaccagagcattgttctgataatccctccgtgacatcactccccatctccaggcattgggatcccgtggcagttgcagcactgaagtggagaaggagacccaggagaagatgaccatcctccagacatacttccggcagaacagggatgaagtcttggacaacctcttg

SEQ ID NO: 112813 - DNA, 1062 bp, Homo sapiens
  misc_feature (1)...(1062): n = a,t,c or g
ggtggaagtgcacctgaggaaagctgctgcatccaggatttgtgatcttgctttaaaactcacgccatcatactctctgagcctggattacgaggaagaaaagcaaccctcaacccccaggaatggaggaagggacagtagttgtttgctgtctgcaaggagcaggagatggcacaagagcatggggcctgggggcagcagaggcagccgtggagattaggagggtctgccccacccacagctggggcagctgggggagctggggcccaggcccaggatgccctctcctccccagatgtgccggcttccgagctgcacgagctgctgagccggaagctggcccagtgtggggtgatgtttgacttcttggactgtgtggccgacctcaaggggaaggaggtgaagcgggcagccctcaacgagctggtggagtgtgtggggagcacccggggtgtcctcatcgagcccgtctacccagacatcatccgcatggtgagcacctgccacccaggctccgagggccggccgagagggcgtgtgagccccgtttcctgtccgcaggacccctgcgtggagaataaccctgtactcatcggcttggcctcagtccacgacttccttccccccgacctgctgctgcccaacacccactgaatgcctccgggcctgccccacgtccacacctttgcttatgcttgcctgagacctggagtgccctgccccacaccccataccatccatggcctggctcaggtgccgcctctgccaagaagccgctgtcaataaccaagctggaaatctctcttttcctgcccgtagacctcacagcttctagccttgttctccccactggattgcacctgcctagaaggcagggatgtgtcccattcactgctgggttcccagcccctggcccagggcttgcacgaactaggcgttcaggtgatgattgcccaaggaatgaactgcttgctggggcagatgctgaaatcaacccattagaactttgaatgannnnnnnnnnnnnnnnnnnnnnnnnnnnnnnnnnnnnnnnnnnnncaa

SEQ ID NO: 112814 - DNA, 954 bp, Homo sapiens
aatagaaacgcgctgtacgccgcgctgcaggaattcggcacgaggggagtcgttagtgaggatgacgcggcatggcaagaactgcaccgcaggggccgtctacacctaccacgagaagaagaaggacacagcggcctcgggctatgggacccagaacattcgactgagccgggatgccgtgaaggacttcgactgctgttgtctctccctgcagccttgccacgatcctgttgtcaccccagatggctacctgtatgagcgtgaggccatcctggagtacattctgcaccagaagaaggagattgcccggcagatgaaggcctacgagaagcagcggggcacccggcgcgaggagcagaaggagcttcagcgggcggcctcgcaggaccatgtgcggggcttcctggagaaggagtcggctatcgtgagccggcccctcaaccctttcacagccaaggccctctcgggcaccagcccagatgatgtccaacctgggcccagtgtgggtcctccaagtaaggacaaggacaaagtgctgcccagcttctggatcccgtcgctgacgcccgaagccaaggccaccaagctggagaagccgtcccgcacggtgacctgccccatgtcagggaagcccctgcgcatgtcggacctgacgcccgtgcacttcacaccgctagacagctccgtggaccgcgtggggctcatcacccgcagcgagcgctacgtgtgtgccgtgacccgcgacagcctgagcaacgccaccccctgcgctgtgctgcggccctctggggctgtggtcaccctcgaatgcgtggagaagctgattcggaaggacatggtggaccctgtgactggagacaaactcacagaccgcgacatcatcgtgctgcagcggggcggtaccggcttcgcgggctccggagtgaagctgcaagcggagaaatcacggccggt

SEQ ID NO: 112815 - DNA, 447 bp, Homo sapiens
acatggcgtcctcgacttggtctgagacgtgataggcctgccttctggttgaagatgtggcgagtgaaaaaactgagcctcagcctgtcgccttcgccccagacgggaaaaccatctatgagaactcctctccgtgaacttaccctgcagcccggtgccctcaccaactctggaaaaagatcccccgcttgctcctcgctgaccccatcactgtgcaagctggggctgcaggaaggcagcaacaactcatctccagtggattttgtaaataacaagaggacagacttatcttcagaacatttcagtcattcctcaaagtggctagaaacttgtcagcatgaatcagatgagcagcctctagatccaattccccaaattagctctactcctaaaacgtctgaggaagcagtagacccactgggcaattatatggttaaaaacatcgtc

SEQ ID NO: 112816 - DNA, 737 bp, Homo sapiens
agtgtttgtagcgccactttactgccaatagctgacattgccctgggttaggggagaataaataaaatctgtggcatcagacaggtattaccgaggcgaagagtggactgggctttcgtgggcacttaccctgggaagggggtatgaggtggctggagaagtgttcatggagagtgtctctctcctgcccccaaggccacggaatcttctattccttctttgtacccaaagggcaaagtggaggccagggtctctttgctaaggagctaagtaggggaaagaggcagggggagctcccagcaggaccaaagggagaccaaggtttggaccccagaacagagcaggaacccagagtcctgtgcagtcacaggatgacgcagggaggacggctgttggtgatcttttctagggtttctccattactggctcttcggatggcctcaatgagatctttctcatagggaaagcccccattctccagcttggagaacaccagctgtccatttatctctatctcaaaggcacctgtgcccccgaggcgcgactcgatctcgatgcccggatactgctccttcacagcactggccagctccaggtaggtcgcctcgaagccgcagggttcacagtactccaccacgatgcggaccccactgcccggctcgacctcctcgggagggggcgctacggacgtctgccccggctccccgctcatcgcggccggctccgctcgggcccct

SEQ ID NO: 112817 - DNA, 402 bp, Homo sapiens
ccgctgcttatttgggtgcagtagacagccggagtcgctgggggagctccgcgccgccggacgcccgtgaccatgtggaggctgctggctcgcgctagagcgccggtcctgcgggtgcccttgtcagattactgggcactcctccccgccagtgctggggtaaagacactgctcccagaaccaagttttgaagatgtttccattcctgaaaaacccaagcttaaatttattgaaagggcaccacttgtgccaaaagtaagaagagaacctaaaaatttaagtgacatacggcgaccttccactgaagctacggagtttacagaaggcaattttgtaatcttggcattgggtgggggctacctgcattggggccactttgaaatgatgcgcctgacaatcaac

SEQ ID NO: 112818 - DNA, 473 bp, Homo sapiens
gtcccggatcgacccacgcgtccgccacgcgtgcgcccacgcgtccgcattttgtgagcgctggtggcggagttaaagtcaaagcaggagagtaattatgaatagcgcagcgggattctcacacctagaccgtcgcgagcgggttctcaagttaggggagagtttcgagaagcagccgcgctgcgccttccacactgtgcgctatgacttcaaacctgcttctattgacacttcttctgaaggataccttgaggttggtgaaggtgaacaggtgaccataactctgccaaatatagaaggttcaactccaccagtaactgttttcaaaggttcaaaaaaaccttacttaaaagaatgcattttgattattaaccatgatactggagaatgtcggctagaaaaactcagcagcaacatcactgtaaaaaaaacaagagttgaaggaagcagtaaaattcactatcgtaaagaac

SEQ ID NO: 112819 - DNA, 408 bp, Homo sapiens
  misc_feature (1)...(408): n = a,t,c or g
catggcttccgaaacatanttttatttttagactagaatttgctgcctcctgaatatagattgtgtcttttgccttttcaataaatggtagtagctagaattcggttatttaactataacacaatctttcttcttaaagaatggatgacaaaggagaagtgaagtgcattaagttttccttagaaaataagatattggctgttcagaggacctcaaagactgtggtaagacttatctttaaaatacagcattaaagggcattagaaatacatttggaagagaaggaatcgcaaattttcagtgttaaaggaaacttttattatcttactgttgtgaaaggtatagttatgttgcattgtattagagccttcaaaaacgaaaaagacatttgagtgggttaaaaaaatg

SEQ ID NO: 112820 - DNA, 564 bp, Homo sapiens
gagagctgtaagggggggttggtggaggccatatgtgtgtttccaccccacagcacccctgtgtgacccctactaaagatacaaccaagttcctctttcaacctcgcaatccagtatcctctccccagctgatggtcttgcatttggagttattacctggacttcctcaatccaatctggcttcccacaccgttttctacttgtattctaatttttgaaaaatcattatttatagactcatagggctgaaaaatgccttttagctcaaagtatcttgaaaccaaggcagacttctgctcattgcgggttccaagaagttaggagaatgctcaaccatacatgaattctgtccttaccaaggccctggaattgttctgctagtaaaacaagtaaaatgtagtgttgttaacatcaaatgcactacatttgatgaagttctgtgtgatttttctatcagtacagttatgctttcttgccaatttcaggaagagggtgatcaagtaactctttatagctataaagaccacgctactattacttctcggatggccaccaccatgatcc

SEQ ID NO: 112821 - DNA, 403 bp, Homo sapiens
gcccttagggtttatgtaggtctgaaatggcagttgggcctgcccacatcctgtcagcttgaagtcagccttacctcctctcctcagcagcctggattatctctcagccactctgataaagcccactgtgcctcagagaaacaggttcagagaggggcgtccctgaggttgccaggtcaccacccatgttcctccagttaggggcctctcccaatgccaccgttttcttcttggcctctgcccatcgtatttgttttgctacctgagaccatggacaccttcaacttataaaattcctttcttcctgcacaggggaccctcacaatgatcccaatgctcagggggatgccttcaagactctcttcgtggcgagagtggtaagtccccagctcctagctcctgg

SEQ ID NO: 112822 - DNA, 526 bp, Homo sapiens
  misc_feature (1)...(526): n = a,t,c or g
aagtgataaacaagggaacaacacacttagaaatgacagtacctctttgaagaggactttagaactactaagtggctcatgttgctcacaattctagcatttctgatggatttcacaattatttttaacggagagaatttttccatttttctagaaaacttatgcttactttgttcacaattcagtgtattttctctttttttgaccatcatatcattgacattgtcagcatacatttttaaccttaagaaatgcacattatatctctgtatattcattcacaacaaatttaaccattcataaaaggattttttccccaatttgttctgtgcctatgctactttgaatcacctttaagacannnnnnnnnnaaattaacttttgataggatgattatactttgttctgtgattaattggttttcccattctttaagcttcagcagatccttcaaacttttcaacagcctccaaaaccacagactcctgcccttgacaatgctgtgatggctcaggttcaggctatc

SEQ ID NO: 112823 - DNA, 617 bp, Homo sapiens
aagaatgacttctgttaggttttcctctgctggtcttccttgcagcctcgaaaacctcaccagagtcgcctctgctggtctcttactgtgctgctctgtcagagatgggcaagtaagcgaactgcagagtgttgctgtgtgtgcttgtgatttgtattttatttgatgtaaacgtgaaggcagagtattttctaacactgtaattcaactaggttttgtgtctcctggatctatttttttttcttgttgttctgaggagctgatatacttggaaatattaggtttaagatatgcagatgtccaacttatatacatagtcaagggtttagagtctggagacaggaggctggcaatttcaactaggaggcagtaaattcagggcaagaagcgaaaccctggccttaaaattccaaaagaagcatttgaacaacctcagaccagttccacaccacctagagatttagactccaaggcttgcatttctattggaaatcagaactttgaggtgaaggcagatgacctggagcctataatggaactgggacgaggtgcgtacggggtggtggagaagatgcggcacgtgcccagcgggcagatcatggcagtgaagcggatct

SEQ ID NO: 112824 - DNA, 425 bp, Homo sapiens
  misc_feature (1)...(425): n = a,t,c or g
atcaaatcctcacctaagctttcagtgtatccagatccacatcttcactcaagccaggagagggaaagaggaaaggggggcaggnnnnnnnnnnnncccaccaccttagcggaaacttctcaaaaaatgctccaaaactcaccagggcttctggggctggggatcagggcttctgcaccccatgaggcggaccaaaatgactctgtgagccccaggaaatcccgaggggcggctcaaaactcaggtaagcagcaaacccaaaagcggtttctcccccaaagagctgtcctcatttgcctctcccttttgcaactgtgtctgtgacggctgatcttgataataaatgtgcttcatgcctgagggcaataaactgccagtgtaatccaatagccttaggcagtggagctcctttgtttaataaatgc

SEQ ID NO: 112825 - DNA, 422 bp, Homo sapiens
cgtcggaaaagagaagaattaaagaaaggccaatttgttatctgttcacctgaccctcctcctcagaccagacctaagggaaagatccagcatccgcatcggaaaactgtggctccctctcccgctcggctcgcagccccccaagctcccgctccatccctgaagtgcggccggcgcagggtccattgtaaacaagccctgggaacagagcccctcggcggcggcgccgcagcggcagcccccgtgtcaggagtgagaccccagcacagccacactcggctcgcacacacgaacacacacacgcacggacacacgcgttcacacgcagccacacgctcccacacacatgtagagaccgaagaatattcaccttggctgtggattattgtggtgttgttggtgggtgatggagatggtggtgg

SEQ ID NO: 112826 - DNA, 376 bp, Homo sapiens
  misc_feature (1)...(376): n = a,t,c or g
aagccagaaagcancagcacaaccatgaaaaaaaaagaccccacaaaaacctcattcagaggtcagcaacctcaaagactgaagatagatagcccccaaagatgagaaagaatcaatacaaaagcactgaaaactcaaaaagtcagagttcctcttctctaaatgactgcaacacccctccagcaagggcacagaaccaggctgaggtggagatggctgaattgacagaagtcggcttcagaaggtggataacaacaaactttggtgagctaaaggagcatgttgtaacccaatgcaaagaagctaagaatcatgatcaaacaatacaggagctgatagccacaacagccagtttagagaggactcgtgccgaatt

SEQ ID NO: 112827 - DNA, 417 bp, Homo sapiens
  misc_feature (1)...(417): n = a,t,c or g
ttctttcattaagcaacnaccnagggannnnggncctgnnattatgacggtttatttgttaacatgccagaagatgccaccacggaagggggttatctttagatatttgatcaagccccttgcaaagcttgctcaaaccagcgatgtgaataaaatgactcccagcaacattgcgattgtgttaggccctaacttgttatgggccagaaatgaaggaacacttgctgaaatggcagcagccacatccgtccatgtggttgcagagattgaacccatcattcagcatgccgactgggtcttccctgaagaggtggaatttaatgtatcagaagcatttgtacctctcaccaccccgagttctaatcactcattccacactggaaacgactctgactccgggaccctggagaggaagct

SEQ ID NO: 112828 - DNA, 888 bp, Homo sapiens
cccacgcgtccggggtcggttctggcaggtctgagcgctccgacttccagaggagcgctgtgcacgtggagaagagcggggactcggcgaccctgccctcccgaccctcatgttcgaagagcctgagtgggccgaggcggccccagtagccgcgggccttgggcccgtaatctcacgacctccgcctgcggcctcctcgcaaaacaagggctccaagcgccgccagctcttggccacattacgggccctagaggcagcatctctttcccagcatccccccagcctatgtataagtgactctgaggaggaggaggaggaaaggaagaagaaatgccccaaaaaggcatcatttgccagtgcctctgctgaagtagggaagaaagggaagaagaaatgtcaaaaacagggcccaccttgcagtgactctgaggaagaagtagaaaggaagaagaaatgccacaaacaggctcttgttggcagtgactctgctgaagatgagaaaagaaagaggaaatgccagaaacatgcccctataaattcagcccagcacctggacaatgttgaccaaacaggtcccaaagcctggaagggtagtactacaaatgatccaccaaagcaaagccctgggtccacttcccctaaaccccctcatacattaagccgcaagcagtggcggaaccggcaaaagaacaagagaagatggaagaacaagtttcagccacctcaggtgccagaccatagaccaagtagttatagcaaaagagagtttctaaattactcacaacagaacttccattcttaaactagtcttttgctttaatccactggtacccaatccttagcagttataaaccaaactcatgagctatgaggggaaaatgaccatgg

SEQ ID NO: 112829 - DNA, 489 bp, Homo sapiens
  misc_feature (1)...(489): n = a,t,c or g
caccctttcctggtaaaacactccaaaaccaggaaaagaaggaatgtacagcaacaaaataaaggccagtcatgcaaggcccatggctgaaagtctttcagtcattttaggtgaaagactgaaatctttgcctccaagatcaggaataagagaaggatgcccgatctcactacttctattcaacacaggatttgaagtcnnnnnnnnnnnnnnnnnnnnnnnnnnnnnnnnnnnnnnnnnnnnnnnnnnnnnnnnnnnnnnnnnnnnnnnnnnnnnnnnnnnnnnnnnnnnnnnnnnnnnnnnnnnnnnnnnnnnnnnnnnatnnnnnnnnnnnnnnnnnnngatttggaggccttacccaaaccatttgggcatttgggcgggggaaaaaagggcttttattttgaaagggaccacccaaatggttttttgttggcgggggacaaaattttttttgtaaaaatccctagttttggcccaaatttcccg

SEQ ID NO: 112830 - DNA, 489 bp, Homo sapiens; identical to SEQ ID NO: 112829
  misc_feature (1)...(489): n = a,t,c or g

SEQ ID NO: 112831 - DNA, 437 bp, Homo sapiens
accagggagattacaggatgagaagtgttcatgactcatagctcacttaggtatatgggagcattccacaggaatattagctcttctgcctggtaccccactgggatactcttaagacccttggctgctgtgccctaccctgcacctggctcttatttttccttccttttcttctttttaccttgtaccctgccttttatgatcccaacctctgcatatcacttattcctgagagggatcataagcctaaaagagttatttccattctttctgcccattcctcatgtagaaagactgagtctggcttggcttaaacctcctcccctccgagctctctgtgctttctgtctttcagtgacatctgccatgagctgttgggacatgtgcccttggtttcagatcgcagctttgcccagttttcccaggtaaggaatggt

SEQ ID NO: 112832 - DNA, 312 bp, Homo sapiens
  misc_feature (1)...(312): n = a,t,c or g
caggggagcattcatggctcattgcagcgtgggannnnnnnnnnnnnnnnnnnnnnnnnnnnnnnnnnatgcgccaggacaacatatttttatttggtgttgttctgtaaaatgcaggtccaaagttagcgaccgtagcgtgctcggggtgatatgatagcgcagttcagtctcacaaaggtttttatttaggaaaacaaggatccatgcgcccgggcgtgaagagtgctttctcgcctacgggggaaatacccataagtgtatcggctggcgtcagtccccggaggttgcgcaaactccccgcccntttnt

SEQ ID NO: 112833 - DNA, 327 bp, Homo sapiens
  misc_feature (1)...(327): n = a,t,c or g
tgccaagccctgtgtgacggtactcaaggtgggagaggattctgtggcagtcggggccgggggaaagcggtggcccagaggcagggcagttgtggaggagcccctcacaacacaggctttgcagtcaggaaatggtgtggcctgggccacaggacagggaacacagagtgtggggggcaggcacacgtggctcctggaagcggaggtcaccgctttgtctcaaggaggcgttttagtactctccctggccgtttgggtcagtagctgcatggttgtcactgcagcaacgttctacgggtnnnnnnnnnnnnnnnnnnnnnnnnnnnn

SEQ ID NO: 112834 - DNA, 230 bp, Homo sapiens
  misc_feature (1)...(230): n = a,t,c or g
tgtcatggcggaaacagcggttatcaatcacaagaaacgtaaaaatagcccgcgaatcgtccagtcaaacgacctccctgaggcggcatatagtctctcccgggatcaaaaacgtatgctgtatctgttcgttgtgcannnnnnnnnnnnnnnnnnnnnnnnnnnnnnnnnnnnnnnnnnnnnnnnnnnnnnnnnnnnnnnnnnnnnnnnnnnnnnnnnnnnnnnnnnnn

SEQ ID NO: 112835 - DNA, 429 bp, Homo sapiens
  misc_feature (1)...(429): n = a,t,c or g
ctggaaggttaagccagaaaattggtttaaacccggaagccaagggtgcccttaacttagattgccccccttcccccccggccgaagggcaaaagtgaacccccctttccnnnnnnnnnnngaaaagaaaatttctcattctcttgcatactcattactgtacagtcctaatcaaggagggggattcaggttggtgggaccaaaggaaagcaaaaggataagctgtgagtctgcctttcttcattgtccaagacacacaggccccctgcacaaataactcagtcttcctgtgcccagcaatcaccagaccttcgctgatacaaaaatcgcaagttagctccctgcaactgtgccgcaagaaaaataagttgggtccctccagggttctcccagtcagcatgttgtacgggtacggacattgaatctcgt

SEQ ID NO: 112836 - DNA, 436 bp, Homo sapiens
  misc_feature (1)...(436): n = a,t,c or g
cgnnnnnnnnnnnnnnnnnnnnnnnnnnnnnnnnnnnnnnnnnnnnnnnnnnnnnnnnnnnnnnnnnnnnnnnnnnnnnnnnnnnnnnnnnnnnnnnnnnnnnnnnnnnnnnnnnnnnnnnnnnnnnnnnnnnncacgctggtacaggttcaaggtggtgcccatgcgtaaaccatcccgccgtaagtgcaaagtatgcggtgaatacttcgtgccgaaattccacgacatccggatccggtggtgcagcccggagcatggcgcaatcctcgcaatggaagaacgcaagaaggagaaggtgaaagccgcggctaagcgcatcaaggagcaaaaagaggctgaaaaggacgggcgcaaacgccgcaaggagcggctggcagagctcaggccagacggatactacaaggctcaggctcagaaagctttcaacgccttt

SEQ ID NO: 112837 - DNA, 363 bp, Homo sapiens
  misc_feature (1)...(363): n = a,t,c or g
cgaaaagcgcaacagggcattttcgtgaataattacccattcccatacaattatgttaacaaaaaaggggggattttatctcccctttaatttttcctctattctcggcgtagaatgtgggggaaacatccccatatactgacgtacatgttaatagatggcgtgaagcacagtcgtgtcatttgattacctggcggaaattaaactaagagagagctctatgaatcctgagcgttctgaacgcattgaaatccccgtattgccgctgcgcgatgtggtggtttatccgcacatggtcatctccttatttgtcgggcgggaaaaatctatccgttgtctggaancgccnccggnncangatat

SEQ ID NO: 112838 - DNA, 354 bp, Homo sapiens
  misc_feature (1)...(354): n = a,t,c or g
annncngnnccgggggtgggttatcgccagtcttgtgctgcccacgctacggacagnacaagatgtgcattcagcctcgccgttttgacggggctgtgttagcattaccccttcgtgaatccaccttccagcgtttcagagcctgccaatgagttatcaggtcttagcccgaaaatggcgcccacaaacctttgctgacgttgtcggacaggaacatgtgctgaccgcactggcgaacgggttgttgttagggcgaattcatcatgcttatcttttttccggcgcccgtggcgtcggaaaaacctctatcgcccgactgctggcgaaggggcttaactgcgaaaccggcattgg

SEQ ID NO: 112839 - DNA, 432 bp, Homo sapiens
  misc_feature (1)...(432): n = a,t,c or g
caatggccgtcgccgcacaacgacgaggctgggaagaccctggtgttaccccacttatttgtcttgttgcccacgaatcgtccagtcaaacgacctcactgaggcggcatatagtctctcccgggatcaaaaacgtatgctgtatctgttcgttgaccatatcagaaaatctgatggcgccctacaggaacatgacggtatctgcgagatccatgttgctaaatatgctgaaatattcggattgacctctgcggaagccagtaaggatatacgggatgcattgaaaagtttcgcggggaaggaaggggttttttatcgccctgaagaggatgccggcgatgaaaaaagctatgaattttttccttggtttatcaaacgagcgcacagtccatccagagggctttacagagtacataatcattcatatctcan

SEQ ID NO: 112840 - DNA, 347 bp, Homo sapiens
  misc_feature (1)...(347): n = a,t,c or g
ccgcaaggttgaggaactcacgtttcgagattttcccgtgagcgtaatagtcatagtaatccagcaactccagtgggaaatcagtggcggttaagcgcggcatcgtcgcactcctcagttggtgtttttttaagcaaagcataagcacgtatttttgcccagtttttcgtcactctgtgagccagaatacgggatacgcgctggcgaatcgctaaactagaaacattgtttcgaaattgaacggtggaaaggagaggtcatggtctggttagcgaatcccgaacgttacgggcagaagcaataccgctattgcggaaaaagtcctttccccctgnccgcgntntcnc

SEQ ID NO: 112841 - DNA, 154 bp, Homo sapiens
cggaccgaaagaatacatgaaattatcccccttagtcgaagcgctagacaacgttgatttcagcctgcgccgtggcgaaatcatggcgctgctcggtgaaaacggggcgggaaaatcaacgctaatcaaagcattaactggtgtataccacgcc

SEQ ID NO: 112842 - DNA, 342 bp, Homo sapiens
  misc_feature (1)...(342): n = a,t,c or g
ggggttggagccgcaggacccagaaacctcctcttccggaggcaacttgagtttaggtaattggcatggaatctcgccaaatattaagtggtcaaatattgagcggtggtctcctgccagcaggacgcatggggaggatgatgtggtcaggtttagaagcctgcagatccgctgcaatgccgatgagcaggcggcacaagccgttctggagttagcccaatgatcgaatttgtttatccgcacacgcagctggttgcgggtgtggatgaagtcggacgcgggccgttagttggcgcggttgtcaccgctgcggtaatccttgacccgaagccccccattncc

SEQ ID NO: 112843 - DNA, 346 bp, Homo sapiens
  misc_feature (1)...(346): n = a,t,c or g
ccaccgtcattaaagggagtaatacacatagaaaaattcgcagcagtaatcacagtaatggccctgtgcagcgcgccggtgatggcagcagagcagggcggtttttctggcccatcggcaatgcaaagtcaggccgtagtattccaggggccgaccggcagcgtagcgactgtagaaagcgcaaaatccttgcgtgacgacacctgggtaaccatgcgcggcaatatcgttgaacgcatctctgacgatctctacgtgttcaaagatgccagcggttctatcaatgttgatatcgaccacaaacgctggaacggcgtgacggtgaccccgccagatacgnttnnnt

SEQ ID NO: 112844 - DNA, 138 bp, Homo sapiens
tgtcatggcggaaacagcgggtatcaatcacaataaacgtaaaaatagcccgcgaatcgtccagtcaaacgacctcactgaggcggcatatagtctctcccgggatcaaaaacgtatgctgtatctgttcgttgacca

SEQ ID NO: 112845 - DNA, 357 bp, Homo sapiens
  misc_feature (1)...(357): n = a,t,c or g
cccagcttcccttatttttggggggccctggctgcttttccccccttcagttttttggttccaggctgtggttttgtgcccccgtggccttgtcaacaagaaaaaagttcccgggttaaaggcaacctcggtgaccccaaaaagtcagttttgtttgtgatgcttttgacaaggattttttgtaaaatcctccccccccaacctttggagtaggtggggccccaggtcccccccttccccccagggtaatttttggacccnnnnnnnnnnnnnnnnnnnnnnnnnnnnnnnnnnnnnnnnnnnnnnnnnnnnnnnnnnnnnnnnnnnnnnnnnnnnnnnnnnnnnnnnnnnnnnnnn

SEQ ID NO: 112846 - DNA, 408 bp, Homo sapiens
aaaaccgatcttgatgctgaactgcacaaccagttccttaaagagttcgagacaggtttgtacggttatacttatcttgaagatgagtaagtcctgtgttacttgaatccgcttaatttagcggtgataatccgccacaatttattgtgacaaatccatcccttcctcgtcgggcctaaaaacgcggaagggtttttttatatcgactttgtaataggagtccatccatgagcgcattaggtcatcaatacgataactcactggtttccaatgcctatggttttttacgcctgccgatgaacttccagccgtatgacagcgatgcaaactgggtgataactggcgtcccgttcgataaggccaattatggtggtacgggtagtcttctcgctccggcagcgatctcga

SEQ ID NO: 112847 - DNA, 330 bp, Homo sapiens
ggcgttagttctcattaatgaggacaatgcacaaagcgaagatgttgtacagctggcgcatcatgtaagacagaaagttggtgaaaaatttaatgtctggcttgagcctgaagtccgctttattggtgcatcacgtgaagtgagcgcactggagacaatttcatgaaggataacaccgtgccactgaaattgattgccctgttagcgaacggggaatttcactctggcgagcagttgggtgaaacgctgggaatgagccgggcggctattaataaacacattcagacactgcgtgactggggcggtgatgtctttaccgatccgggtaaa

SEQ ID NO: 112848 - DNA, 357 bp, Homo sapiens
  misc_feature (1)...(357): n = a,t,c or g
ggttttctttttagaaaatgaaatgaaatatgatcccaataataatgaagaggaagagggagaccagttcgattttgacagtggagatgaaatcccagaagcggacagacaggccccctccgcccttgagacaggaggtgctggagccagtgaagcccctgcacccacaggtgagtttccaggagggtccccaggtgagtccccaggtgggtccccaggtgtatctccaggtgggtccccagtagagtcaccaccagagtcaacaggtaagtccccaggtggtcctcaggagagtctgtcaggtgggtcccagtggttgtcacccgcaaagtccgtaaaaaaccccccnnnttnttt

SEQ ID NO: 112849 - DNA, 264 bp, Homo sapiens
  misc_feature (1)...(264): n = a,t,c or g
angaggatcanactatgagcgtgagactacgattccatcaatgcctgtcaagggcaagtattgacatgtcgtcgtaacctgtagaacggagtaacctcggtgtgcggctgtatgcctgctgcggattgctgctgcgtcctgcttatccacaacattttgcgcacggttatgtggacaaaatacctgattacccacgccgtgccggcacgttaaccgggctgcatccgatgcaagtgtgtcgctgtcgacgagctcgcgagctcg

SEQ ID NO: 112850 - DNA, 440 bp, Homo sapiens
  misc_feature (1)...(440): n = a,t,c or g
gcccagacactgataaacatccacaagcatcaagaccatccatgaaaacatgacctcaccaaacaaactaaataaggcaccagggaccaatcctgcagagacagaggtatatgacctttcagaaaaggaattcaaaatagctgttttgaagacactcaaagaaaattgaaataacacagagaaggaattcagaatcctatcataaatttagcaaagagattgaaataattaaaaagtccagcagaaatgttggagctgaaaatgcaattgacatactgaatcatccactggagtctcttaccagcagaactggccaagcggaagaaagaattagtgagcttgacaacagactatttnnnnnnnnnnnnnnnnnnnnnnnnnnnnnnnnnnnnnnnnnnnnnnnnnnnnnnnnnnnnnnnnnnnnnnnnnnnnnnnnnnnn

SEQ ID NO: 112851 - DNA, 101 bp, Homo sapiens
tgtcatggcggaaacagcggttatcaatcacaagaaacgtaaaaatagcccgcgaatcgtccagtcaaacgacctcactgaggcggcatatagtctctccc

SEQ ID NO: 112852 - DNA, 102 bp, Homo sapiens
tgtcatggcggaaacagcggttatcaatcacaagaaacgtaaaaatagcccgcgaatcgtccagtcaaacgacctcactgaggcggcatatagtctctcccg

SEQ ID NO: 112853 - DNA, 138 bp, Homo sapiens
tgtcatggcggaaacagcgggtatcaatcacaagaaacgtaaaaatagcccgcgaatcgtccagtcaaacgacctcactgaggcggcatatagtctctcccgggatcaaaaacgtatgctgtatctgttcgttgacca

SEQ ID NO: 112854 - DNA, 259 bp, Homo sapiens
aggaaatgacgatcaggagttacataaacttaaatctggtcagggcaaatatcgagactgaatccagacaattcattgaaaataaaaactattcaatccaatcaattggtcctatgccagggtcaagggctgggcttcgggtcggatttaccagaccaggggttaacttggcaactgtggacattttttataacggggacggttcgactacaattcaatatctcactggagccaatcgttctctgggccaagagttagc

SEQ ID NO: 112855 - DNA, 326 bp, Homo sapiens
ctcggcacgttggtggctgtattcaacgtagggaccgcccgaattatgaacatcccccagtttttgcttatttggacctgagttattgcctcaacgatcctatcctgcacactgacgtgcatccgtctaaactggacgcggagtacggcgtccgggtttatgcccttttgttcttaactttgtgctgggaaaccgccctgggggtaacgccgtttttaccgggtgattcattgctgtttgttgccggagcgttggcatcactggaaaccaacgatctcaacgtccatatgatgggggtgctgatgctgatccccgcgatttgtggg

SEQ ID NO: 112856 - DNA, 138 bp, Homo sapiens
tgtcatggcggaaacagcgggtatcaatcacaagaaacgtacaaatagcccgcgaatcgtccagtcaaacgacctcactgaggcggcatatagtctctcccgggatcaaaaacgtatgctgtatctgttcgttgacca

SEQ ID NO: 112857 - DNA, 373 bp, Homo sapiens
  misc_feature (1)...(373): n = a,t,c or g
ggangcgacaaattgccctttcagtgggacaaatcaccctgaaatgacagtcctgtctgtgacaaattgcccttaaccctgtgacaaattgccctcagaagaagctgttttttcacaaaggtatccctgcttattgactcttttttatttagcgtgacaatctaaaaacttgtcacacttcacatggatctgtcatggcggaaacagcggttatcaatcacaagaaacgtaaaaatatcccgcgaatcgtgcagtcaaacgacctcactgaggcggcatatagtctctcccgggatcaaaaacgtatgctgtatctgttcgttgaccagatcataaaatctgatggcaccctacaggaacatgacggtatctg

SEQ ID NO: 112858 - DNA, 374 bp, Homo sapiens
atgttttgctccgctcatgtgtaatcaacaccatgttaattcatggcgtggattaaatcaccattatggtgatggaaaaaatccacatgttgtttaccatgcatggagcggagggttttatgagcagcatttctgaaagaattaaatttttactggcaagggaaggcttgaagcagcgggatttggctgaggctttgtcgactagcccacagaccgtcaacaactggataaaaagagacgcgttaagtcgtgaggcggcgcatcaaatatctgaaaaattcggttattctcttgactggttattaaatgaagagggttctccaaagaaggatctccgggtaccgacctgggagtcgtaatcgcgataatccaat

SEQ ID NO: 112859 - DNA, 102 bp, Homo sapiens
tgtcatggcggaaacagcggttatcaatcgcaagaaacgtaaaaatagcccgcgaatcgtccagtcaaacgacctcactgaggcggcatatagtctctcccg

SEQ ID NO: 112860 - DNA, 101 bp, Homo sapiens
tgtcatggcggaaacagcgggtatcaatcacaagaaacgtaaaaatagcccgcgaatcgtccagtcaaacgacctcactgaggcggcatatagtctctccc

SEQ ID NO: 112861 - DNA, 101 bp, Homo sapiens; identical to SEQ ID NO: 112851

SEQ ID NO: 112862 - DNA, 85 bp, Homo sapiens
atcaatggatgccagtaatgattagcggcgtgctgtacgccctgttagcagggttgatgtgggggcttatttttgtcgggccgtt

SEQ ID NO: 112863 - DNA, 102 bp, Homo sapiens; identical to SEQ ID NO: 112852

SEQ ID NO: 112864 - DNA, 101 bp, Homo sapiens; identical to SEQ ID NO: 112851

SEQ ID NO: 112865 - DNA, 358 bp, Homo sapiens
cggctacaaaggatgtaaccactacactctccgaactagtgttcatgtgcgcgtagctatgagtggcacacggtgtgtacacgttagagtgcccgaaaccaaaaatgtgtacccattcaatgatctccgacacaaagttcaggaaggcgctcggcaagaaaagagatgatatcgagattatttctggttcgcacggggtcaacgccagaatcagccaggccggaaaaatatcatttttctatcggtatcgctgggccggtaaagcggtaaaactcaatgttggtgattatcctgcaacgcgtatcccccaggcaagagagagtcgccaacaattcagaaattggttaactgagggctt

SEQ ID NO: 112866 - DNA, 101 bp, Homo sapiens; identical to SEQ ID NO: 112851

SEQ ID NO: 112867 - DNA, 101 bp, Homo sapiens
tgtcatggcggaaacagcggttatcaatcacaagaaacgtaaaaatagcccgcgaatcggccagtcaaacgacctcactgaggcggcatatagtctctccc

SEQ ID NO: 112868 - DNA, 102 bp, Homo sapiens; identical to SEQ ID NO: 112852

SEQ ID NO: 112869 - DNA, 101 bp, Homo sapiens; identical to SEQ ID NO: 112851

SEQ ID NO: 112870 - DNA, 219 bp, Homo sapiens
gctggtggtagaaaaactggtgtcggcacacagtaaaaacctgaccggtttttggatcatgccagacaccggcttcagctttgaagacgcggattcgcaataagcaccgcagggagtggaatgcttaattacgttatcaaacgcttactggggttgattccgacgctgtttatcgtctcggtgctggtgtttttatttgtccatatgctgcccggcgat

SEQ ID NO: 112871 - DNA, 427 bp, Homo sapiens
cccagatagacaccctttgctccatacctaattattcggacacagaggtccgatccattcaacaaacagaacattggggcatccgacaaagcctcgcggatgatagggtcacggcccttttagcgccagaagacataggggcaacccagcggaaggacccgcgtgcctggcgggaggctctttgaggacgagagaagatgaaaactcgggaaggcagctccctaggcaggtcttccgtgatatgcaggaactatcccggctgggaatgtgacggtgagacgtgacaccgcgaaggatggcagcacgtgcacaaataaggggtgaaggtcaagggtgaggtctggaaacgggctggcgtggccgggagggggacttcctggaggaaggtgcagggcaggaaatgggagcagggcccctggatggggcc

SEQ ID NO: 112872 - DNA, 102 bp, Homo sapiens; identical to SEQ ID NO: 112852

SEQ ID NO: 112873 - DNA, 155 bp, Homo sapiens
ctcataacggttgtcgtccgccgaaaaaacgtcgcgtataacgcctcgttttccaggtttgttggagaagagaaaatggcaagatatttgggtcctaagctcaagctgagccgtcgtgagggcaccgacttattccttaagtctggcgttcgcgc

SEQ ID NO: 112874 - DNA, 407 bp, Homo sapiens
ccggctggacctttgaccgtaaacgtcccgttttaggccgtcattgattctgaagaaggacataagtgtgagttctcaatttacgacgcctgttgttactgaaatgcaggttatcccggtggcggaacatgacagtatgctgatgaatctgagtggtgcacacgcaccggtctttacgcgtgatattgtgattatcaaagataattctggtcacactggcgtatgggaaattcccggcggcgagaaaatccgtaaaacgctggatgatgctaatccgctggtggtaggcaaaacgctggctgaatacaaaaacgctctgacgctggagcgtaatacttttgccgatcgtgatgctggtggacgcggtttgcagacatttgacctacgtaccactatgcatgtagata

SEQ ID NO: 112875 - DNA, 344 bp, Homo sapiens
  misc_feature (1)...(344): n = a,t,c or g
nnnnnnnnnnnnnnnnnnnnnnnnnnnnnnnnnnnnnnnnnnnnnnnnnnnnnnnnnnnnnnnnnnnnnnnnnnnnnnnnnnnnnnnnnnnnnnnnnnnnnnnnnnnnnnnnnnnnnnnnnnnnnnnnnnnnnnnnnnnnnnnnnnnnnnnnnnnnnnnnnnnnnnnnnnnnnnnnnnnnnnnnnnnnnnnntatgaagatggccccaacaaaaagaaaaggaagttgtccagggtcagctcccaaaaaaccaaaggaaccagtgcaagtgccaaagctcgtcataaaaggaggaatagaagttctaggagttaaaactggagtatccagcttcnctnagttnt

SEQ ID NO: 112876 - DNA, 102 bp, Homo sapiens; identical to SEQ ID NO: 112852

SEQ ID NO: 112877 - DNA, 134 bp, Homo sapiens
acgtaaagattgggggaaagcataatggctaatgttacggcgacttttactattaccgaattttgcctgcataccggcatctctgaagaggagttgaatgaaattgtcggtttgggggtggttgaaccgcgtga

SEQ ID NO: 112878 - DNA, 685 bp, Homo sapiens
gttgggtggaaaggcaagaattaattggcctttgcgacccccttttaaatggcggccgggtaaaaaaacctcctttaggtatttgggtaaaaagtcctggtttccggtttttttttccttataggtaattaaagcgatattctgtttccctttttaaaaggttaaggccaaattaattgcgccaaagttaaccaatttcccaataacccaaaaggggcccctttcccctgaaaagggtcccggaaaaaccgagcgcttcttgccaagaagcaagcttcaaaatctgcctcggaaacgtggctgaagtcatcgcatttccaaacgcccaagccttggctggtccagggcagctggcgcggaagacccggaacgccctgtgggcagggccagctgcggacggagggacgggggctcaagggcgggtcgggtggggtcccgactccccctcctcggctgggcgcaccccgggtgtccgcagggaggggcgatgttctgggggggggagcgtctgcccgacgccccctccctcaggtgagctcagcccgtgggggtccgcagaaagggcggtgctctgggagagggtcaccgctctgcccggcgctccctccccaagggtaacatgtgtaaccccagggctgtctctgctcgggacgttgtccgggtacggcccgtgaatccgtaatga

SEQ ID NO: 112879 - DNA, 558 bp, Homo sapiens
gcaggcgggtaaatactacggcggcgccgttttcgcgccggtctttggtgccatcatgggcggggtattgcgtaccatgaacatcgagccggatgctctgacatcggtcgataaaaatgaatttgtgattaatcacggcgaggggacaggtggcagatcgtaatttgcgcgaccttcttgctccgtgggtgccagacgcaccttcgcgagcactgccagagatgacactcgacagccgtgtggctgcggcggtcgatctctttgtagctagaataggtcatcaggcggacgggcgtcgatatatcccgcaggcgatagcgcaaggtgtggctgccattattgcagaggcgaaagatgaggcgaccgatggtgaaatccgtgaaatgcacggtgtaccggacatctatctcagccagcttaacgagctgttatctgcactggcgggccgctgttaccatgaaccctctgacaatttacgtctcgtgggcgtaacgggcaccaacggcaaaaccacgactacccagctgttggcgcagtggagccaactgcttgtgtgca

SEQ ID NO: 112880 - DNA, 614 bp, Homo sapiens
atgcgaatgaatgcggctttccactcttgagtcgggtatccccctttcagatctcaccccaggtaatcgccctattgctgggtaaaaaaaaactttccgctggggcccaacgccccagtggtttccgggggaagctaaaggataatgtggggtgcattggccaattgggtcaggcaattgggctttcccttatgtctcttgccgataaatgtatgcacgttctcactgtaattatgccatgtgatatcgctctcctatggagaattagtgtctcgctaaaactatgtcaacacagtcacttatctttaagttaaaaggtaatgctctgttttccgagtaattcagcgaatgtcattcgtttttgccctacacaaatcgccactaaagctgtagagagccatgcccaaatttaataaagccctggcagccattggtctggcagccgttatgtcacaatccgctatggcggagaacctgaagctcggttttctggtgaagcagccggaagagccgtggttccaggccgaatggaagtctgccgataaatccgggaaggatttagggtttgaggttattaagattgccgtgccggatggcgaaaaaacattgaacgc

SEQ ID NO: 112881 - DNA, 621 bp, Homo sapiens
  misc_feature (1)...(621): n = a,t,c or g
cgttcaacctcaaaagtaccctcagtgtccccctgcccgacccctttgcagctgaccccgccgcccatagcccctccagatatgcccccccataactttgaaaaccccgtgtcataccaaatctttgcccttccgtttccgaaggttataaaccccccttcttcccccccaaccagcgaaaataaagttccttttgganaatngatangtnggnnnnnnnnnnttttcttcacaggccctttatttgggtaccccccgggtttttnnnnnnnnnnnntttttaaaaaccgccccatgcccaatttgcatccccccagggggcctttaaaggttttttcccatttccaaaaaatttccccnnnnnnnnnnnnnttttttcccctttttttcccaacccttccaaaaaaactttttgaaannnnnnnnnnnnnaaacaaacccttttttttggggttttgcccaaattttaattggttttaaaaaaaaacccgggggttttttctttaaagcccccccaaaccccccctttttaatggggggggcttttaaacccccnnnnnnnnnnnnnnnnnnnnnnnnnnnnnnnnnnnnnnnnnnnnnnnnnnnnnnnnnnnnnnnnnn

SEQ ID NO: 112882 - DNA, 462 bp, Homo sapiens
  misc_feature (1)...(462): n = a,t,c or g
aagtagtaatcgctnggaattnccgggncgaccaccgcgtcgagaggggaggccggggtgacgccgcccgcttcggtttatcccaaaagaccggctgccgcctgctgccgggagaagggcactcgtctccgtgggtgtggcgcagcgcgcggtgcatggaatgggctatgtgaatgaaaaaaggtatccggtatgaaactttcaaaaaaacgaactacatttttcagccgcagcacggtccttggcaaacaaggatgagaaaaatatccaaccacgggagcctgcgggtggtgaaggtggcataccccctggggctgtgtgtgggcgcggtcatctatgatgcctacatcaagtggcaccgggccagcgccacccaggccttcttcagcatcaccagggcagccccgggggcccggtggggtcagaaagcccacagccccctggggacagctgcaaacgggg

SEQ ID NO: 112883 - DNA, 394 bp, Homo sapiens
tggtaaaagaccggctcccgcatgctcgccgaaaaagcgcactcgtctccgtgggtgtgccgtagcgcgcggtgcatggaatgggctatgtgaatgaaaaaaggtatccgttatgaaacttccagaaaaacgaggtacatttttcagccgcagcacggtccttggcaaacaaggatgagaaaaatatccacccccgggagcctgcgggtggctaaggtggcataccccctgggcctgtgtgtgggcgtgttcatctatgtcgcctacatcaagtggcaccggccccccgccacccaggccttattcagcatccccagggcagccccgggggcccggtggggtcagcaggcccacagccccctgggaacaaatgcagacgggcaagaatggccgc

SEQ ID NO: 112884 - DNA, 446 bp, Homo sapiens
  misc_feature (1)...(446): n = a,t,c or g
cttaccgnntnagagttaccgggtcgacgatttcgtgcacgatgacctttccgaagcggcgttatgttgaaagcgcacgcttatgagagcttcagacgggctttcctcttcctccttcacgaccagaagcggaaaggtgctgccggaccgaaagggaaagaaagtccagcactggcccgcttgggaaggcacccacaaccagtctagggactaggggtaaggccggcggggagcccacgaatgacctgggctgacatctcttcccctccttacacagaacagaggcttctcccgaaaaagccacacattcctgcccaagatcttcttccgcaagatgtcatcctcaggggccaaggacaaacctgagctgcagtttcccttccttcaggatgaggacacagtggccacgctgctagagtgcaagacgctcttcatcttgcgcggcc

SEQ ID NO: 112885 - DNA, 453 bp, Homo sapiens
  misc_feature (1)...(453): n = a,t,c or g
gtactcttcctgnaaggcnnnnnnccgcgagtttcgtccgacctcgagcagccgccgccgccgccgttgtatctactgccgcagcggagttcacagggcccggaggggggagacttcccacacggtgactgagatgtcgtccactgcggctttttaccttctctctacgctaggaggatacttggtgacctcattcttgttgcttaaatacccgaccttgctgcaccagagaaagaagcagcgattcctcagtaaacacatctctcaccgcggaggtgctggagaaaatttggagaatacaatggcagcctttcagcatgcggttaaaatcggaactgatatgctagaattggactgccatatcacaaaagatgaacaagttgtagtgtcacatgatgagaatctaaagagagcaactgggggcaatgtaaacatctctgatctcaaatactg

SEQ ID NO: 112886 - DNA, 451 bp, Homo sapiens
tgccaaccatgatcaccttgtggagggccaaggagctctggcccttactcttgttggcagccatctcgctggccttctgaggctgtgacacacagatgacccactgaagagctgataagaacaccaaagttccaacgtttctcgttggaaatgagcacagagaggacactgctcacacaagcagtgtggacgcagcaagctccgcgccccgcaaccctgcaccgagcacggttaacctcacactcccacaggcggcgagaaccgggacggcgatgcccagtccaggcgcttccccttagaagccccttcgccgctggcccctatcagaaaggaaaggggaggaggcagggaccagtcccgccgcctccgccgtccgcacccggaccgcagctcttaaacgcgccccgccccctccacgaaatcgtcgacccggtaactccagcgcgagtgg

SEQ ID NO: 112887 - DNA, 596 bp, Homo sapiens
aatttccgggtcgacgatttcgtacaagatggcggagggcaagtagcaagggggcggggtgtgtccgccggaagcctagccgctgctcggggggggacctgcgggctcaggcccgggagctgcggaccgaggttggctcgatgctgttcccaggtactgttgttggctgttggtgaggaaggtgaagcactcagttgccttctcgggcctcggcgccccctatgtacgcctccctgggctcgggtccggtcgcccctttgcccggctttctgtacccacccttcagttcctcgggtcctggaagcaccggcgccagcaggagctgcgtcccggccaggagacgaagagcccgggcggcgctcgtacttctggccactgggcgagcgtctggcaggtccaagggtagccaaggatggctgcagcttcatatgatcagttgttaaagcaagttgaggcactgaagatggagaactcaaatcttcgacaagagctagaagataattccaatcatcttacaaaactggaaactgaggcatctaatatgaaggaagtacttaaacaactacaaggaagtattgaagatgaagctatggctt

SEQ ID NO: 112888 - DNA, 444 bp, Homo sapiens
  misc_feature (1)...(444): n = a,t,c or g
atcgaccgccttgatgttaacggcccgacattacgtctccgcggcctcctgctccacgacgtgaccatggtcgggctgcaggagctgcgataccctgaggagaagccgatgctccggggccaggacgccaccgagctggagagctacgatgccttcctcttggctgcagacacagactggaaggaacatgacatcgagacaccctacggccttctgcatgtagtgatccggggctcccccaaggggaaccgcccagccatcctcacctaccatgatgtgggcctcaaccacaaactatgcttcaacaccttcttcaacttcgaggacatgcaggagatcaccaagcactttgtggtgagtcacgtggatgcccctggacaacaggagggggcgtcgcagtttcctcaagggtaccagntcccctccatggagcagctggctgcg

SEQ ID NO: 112889 - DNA, 454 bp, Homo sapiens
agcatttgttcagcgagtaactattttcttctttggaatgatggcggccagaataccagaaagatggggacttaaaggggacagaaaaattaaatctataaggaacaagcgggatggagtaaataaatctataaggagcaagtgggtacgtaggcttttccataaacccctctaacccagaagccggggctgctcggctagggggaccaggccgacctggctgccgcctgtcgtggcgactgggactccagtgggctgccgcttggagtgcgcgacccccggcgaagcaggacaatagcttggaattcggcctcgtgtttccggtgaggcagcctcgcgctgggccggtgaggcctggggtgggggctccgagccgggcccacggcgaagaaggcgcagcccgttgggctccagctgccgccaccaccgcctcccccgacgccgtcgctccgcc

SEQ ID NO: 112890 - DNA, 428 bp, Homo sapiens
cccaccgttcctggaattcccgcgtcgacgatttcgtgtcggacggttccgaggcgttgccgggagtccgtcgcggctctgtgtggactcggagaaacgcggggcgtctgcctgagcccgcttttctacaagatgtggggatttttgaagcgccctgtagtggtgacggctgacatcaacttgagccttgtggccctgactgggatggggttactgagccggctgtggcgactcacctacccgcgggctgtggtttttgacgaagtatattatgggcagtacatctctttttacatgaaacaaatcttcttcttggatgacagtgggccgccatttggccacatggtgctggccttgggaggttatttaggaggattcgatggcaattttttgtggaacagaattggagcagaatacagtagcaacgg

SEQ ID NO: 112891 - DNA, 416 bp, Homo sapiens
ggcctagggctgctcacatattctggaggagcctcccctcctcatgccttcttgcatcttgtctcttagatttggtcgtattgggcgcgtggtcaccagggctgcttgtaactctggtaaagtggatattgttgccatcaatgaccccttcattgacctcatctacatggtttacatgttccaatatgattccacccatggcaaattccatggcaccgtcaaggctgagaacgggaagcttgtcatcaatggaaatcccatcaccatcttccaggagtgagtggaagacagaatggaagaaatgtgctttggggaggcaactaggatggtgtggctcccttgggtatatggtaaccttgtgtccctcaatatggtcctgtccccatctcccccccacccccataggcgagacgaaa

SEQ ID NO: 112892 - DNA, 413 bp, Homo sapiens
  misc_feature (1)...(413): n = a,t,c or g
tttcgtcacgcccgggctcctgcaggcggggcgctgtgcgcgccgcgatccggtacgtgcgcctccgggctgtcccctctgggggcggcgagcctccctccggagccccccttcaaccctcctggaagtgagcatttgcacgaccagggatgctgcgctgctctcccatgagccaggcaccgagtcggtctgctgcagtcctttttgaacctctggccgagtggatgctccactgtgcttgacaagatgaagtgcgtcttggtggccactgagggcgcagaggtcctcttctactggacagatcaagagcttgaagagagtctccggctgaagttcggccagccagagaatgaagaagaagagctccctgccctggaggaccagctcaacaccctcctagcctcggtcataan

SEQ ID NO: 112893 - DNA, 420 bp, Homo sapiens
  misc_feature (1)...(420): n = a,t,c or g
tttcgtagaagacagacggacagacaggtagtgggacttctcagggcttggacaagccccaccccacgcttggggtggggtccaggactacagtgcccgcccagtttgcggacagtgnnnnnnnnnnnngtaccgttccaaaccagaaccttaggcagccgaaagggggcccaaccttgagtttgagttgcggccatttcaggacctgaaaggaccagaatgaacctgcgggatccaaaaatgaagggacccttcctttgggatgctgggggctacaggcaaaaacgggagggtttcttgcccagtcggggtcttgttcttggaagcaagccggtcaagttcatggatttcgaggggaaaacatcgttggaaatgtcaggggtaaacttaagcaccgccttcttgggcagcgggttcttg

SEQ ID NO: 112894 - DNA, 482 bp, Homo sapiens
tttcgtagcggaccagggccaggcttgtgttcgcagccttgccggggctggggttccgatgtggtccccggagcgggaggccgaggccccagccgggggagacgccggcgggccttctgccccccgagtgggaggaggacgaggagcgcatgtccttcctgttctccgctttcaagaggagtcgcgaggtgaacagcaccgactgggacagcaagatgggcttctgggcgccgttggtgctgagccacagccgccgccagggggtggtgcgcctgcgtctgcgggacttgcaggaggcctttcagcgcaaggggagcgtcccgctggggctggccacggtgctgcaggacctgctgcgtcgaggggagctgcagcgggagtcagacttcatggccagtgtagacagcagctggatctcctggggggttggggtctatccgctgaaaccctctcacgcgaactctttactaacatgcgtgggg

SEQ ID NO: 112895 - DNA, 405 bp, Homo sapiens
tttcgtcgcctcgctgggagcacccgggccgaggctctgattctggggggaggccgactccaccctggctggaggaactgggtgctcctgcccgctggcccctcgcgcgtgaggatctatctcaggctaagaaatggcatttcaaaaggcagtgaaagggacgattcttgttggaggaggtgctcttgcaactgttttaggactttctcagtttgctcattacagaaggaaacaagtaagtaactgtacttgtgttgattacagtatgcaacttaaatctgctaaagagctgtctatggggaatgtgtgcactaacggttttgtttagaaattacttgtgaagtttctcagtttgatctgaaagatactaatttagaacagtgccttaatgatcctggagaactg

SEQ ID NO: 112896 - DNA, 406 bp, Homo sapiens
tttcgtgctgggtggtcgggcgcttggtccggtagttggtcggtggaccagcggcccgtcgctcgcttctggtctctcatgtttgaaggtgggagggacacggcagcgggccgctcacctgagccgtccggataggagccttggccccgtacccagtaagagtaggatgaggccatgcgggcataaggagttatggcttctgatgctagtcatgcgctggaagctgccctggagctgatggacgggatcattgcatgcactaaaacaggtgcagatcttagtgatggtacttgtgagcctggactggcttccccggccttctacatgaaccccttcccggtgctccatctcatcgaggacttgaggctggccttggagatgctggagcttcctcaggagagagcag

SEQ ID NO: 112897 - DNA, 402 bp, Homo sapiens
tttcgtagagctcagaacatgaggtgatcaatgggacgagtaacgaaggcgggttgggagaggggcgattgggcaacccgcctgcacaaacacggcaggtcaaagattgcgcccagcccgcccaggccgggaatggaataaaaggacgcggagcgccggacgctgcacagaagcgagtccgactgtgctcgctgctcagcgccgcacccggaagaagaggctcgccgtgggagccctgctggtctgcgccgtcctggagctgggactggctgtccctgataaaactgagagatggagtgctgtgtctgagcatgaggccactaatggccagagtttccgcgaccatatgaaaagcgtcattccatccgatggtcccagtgctgcttgtgtgaagaaagccgg

SEQ ID NO: 112898 - DNA, 424 bp, Homo sapiens
tttcgtgacgctttgtgagatggggattgatgcgccccatatctggacccagaagggacttccctgctcggctggctctgcgggtctctgctttcctccggagaaataacagcgtcttccgcgccgcgcatggagcctcccggccgccgcgagtgcccctttactttctggcgctttcctgggttgctgctggcggacatggagtcgctgcagcactccttctccgatgactgcgaggagccgccaacattcggagctatggagctcattggtaaaccacaaccctactatgagattggtgaacgagtagatcataagcgccaaacaggatacttgtatatacctgctcttgccacccatactatttgtgatcggaatcatacatggctacctgtctcagatgacgcctggtatagagaaacat

SEQ ID NO: 112899 - DNA, 481 bp, Homo sapiens
gggagtagggctggactgtgaccactgccctggagagaagacagaaacaggacagaggatcccggctgcagccagcgtgaggaaagctctgctccctgccagaccggccagctgtggaaacccagcggggcttgcagcaaagcggaggggcccaccccgttcttcctcatttcccacccctggtgtgggatttggggggctcctgggcagagtgcgaagctccggagccgaggccactggatccccagtgactgctcgggggggtcccgctgcgtggagatgccggcagcacgtcggttccctggcctggagctctccttccctctcctggccatactgcgactacgtctcgttcacaatgctgggaggctggtacaatgcactcagaggagggcacatgctggctgctggagctgctgtccgaggtgcagctgcaacagtacttcctgcggctacgagatgacctcaacgtcacccgcct

SEQ ID NO: 112900 - DNA, 404 bp, Homo sapiens
tttcgtcgcaggaacggtgatagcgcgtgactagagtgcatagctccgcgacgtggatccctcccgtggcgatgggcgcacagcaggaagaggagcggttagacggcatgttggtggccatggctcatcttcacgaggtcggccttctggagcttgtgaacaccttcttcaacttgcttccacgcaaaacagactttttcattggaggagaaaaacggatggcagagaagcttatcacacagactttcagccaccacaatcagctggcacagaatacccaacgggagaatacatgccgctccgtggccgaacggcgggagaaggcggaccggccggacagactggccaaggaagccaagtcagagacctcagggccccatatcaaggagctaactgatgaagag

SEQ ID NO: 112901 - DNA, 404 bp, Homo sapiens
tttcgaagctcctctgctccctgccagaccggccagctgtggtaacccagcggggcttgcagcaaagcggaggggcccaccccgttcttcctcatttcccacccctggtgtgggatttggggggctcctgggcagagtgccaagctccggagccgaggccactggatccccagtgactgctcgggggggtcccgctgcgtggagatgccggcagcacgtcggttccctggcctggagctctccttccctctcctggccagactgcggcgacgcctgtacacaaggctgggaggcggcagaatgcagccagaggagggcacaggctggctgctggagctgctgtccgaggtgcagctgcaacagtacttcctgcggctccgagatgacctcaacgtcacccgcct

SEQ ID NO: 112902 - DNA, 441 bp, Homo sapiens
gggtcgacgatttcgtgaacaattgcaactgaaggcacattgttatcatctcgtctttgggtgatgctgttcctcactgcagatggataattttccttttaatcaggaatttcatatgcagaataaatggtaattaaaatgtgcaggatgacaagatggagcaaacagtgcttgtaccaccaggacctgacagcttcaacttcttcaccagagaatctcttgcggctattgaaagacgcattgcagaagaaaaggcaaagaatcccaaaccagacaaaaaagatgacgacgaaaatggcccaaagccaaatagtgacttggaagctggaaagaaccttccatttatttatggagacattcctccagagatggtgtcagagcccctggaggacctggacccctactatatcaataagaaagtgagtgttttttatcatgcat

SEQ ID NO: 112903 - DNA, 442 bp, Homo sapiens
gggccgacgatttcgtggggcgcgcgcccgacggctggggctcccctctgagcggctgcggctcctgcacctccccggggagccgccccgtcgatgccactaaggccaaggacatatagacggtctgccctcccccactcaaaccgggatcatgacggtccccaaggagatgcccgagaagtgggcccgggcccaggcgcctccctcttggagccgaaagaagccctcttgggggacagaagaagaaaggagggcgcgggctaatgaccgagaatacaatgagaaattccagtatgcgagtaactgcatcaagacctccaagtacaatattctcaccttcctgcctgtcaacctctttgagcagatccaggaagttgccaacacttacttcctgttcctcctcattctgcagttgatcccccagatctcttccctgtcctgg

SEQ ID NO: 112904 - DNA, 462 bp, Homo sapiens
agctgcgttggctgtagaagagaacggacggcgatggcgacggtcgcagcaaatccagctgctgctgcggcggctgtggcggcggcagcggcggtgactgaggatagagagccacagcacgaggagctgccaggcctggacagccagtggcgccagatagaaaacggcgagagtgggcgagaacgtccactgcgggccggcgaaagctggttccttgtggagaagcactggtataagcagtgggaggcatacgtgcagggaggggaccaggactccagcaccttccctggctgcatcaacaatgccacactctttcaagatgagataaactggcgcctcaaggagggactggtggaaggcgaggattatgtgctgctcccagcagctgcttggcattacctggtcagctggtatggtctagagcatggccagccacccattgaacgcaaggtcatagagctg

SEQ ID NO: 112905 - DNA, 398 bp, Homo sapiens
tttcgtcctgtcaccgtctcttctggcgccgctgctcccggaggagctcccgacacggcgacgggttctcggacctccacgttactgcgggacgaaaagctcgaggagatcaagaaggagaccgccttttcccacagccaaatcactcgcctctactgtcgggtcaccagcctggacgaaggagagaatgggactctcatccgtcgagatttccacaggagtccagaacttgccatcatcccactggcggaccggatcatcaatgccttctttgcagagggagaggaccaggtaaaccttcgtggattcatgcgagctttgcctgatttcctgcccattgcggatcatgaaaagagcctacatgcggacggaccgcaaccactcaacaggccaagcag

SEQ ID NO: 112906 - DNA, 480 bp, Homo sapiens
attggatcggaagtcccgggacgacgatttcgttgaagggcctgtagccggggggttcctgtctcggatcccggtctatctccttagcccagactcgttccggaccccagcccggcccggaacactctgggcgagacggcggtggcaactctccccttgccgccatgcacgacgctttcgagccagtgccgatcctagaaaagctgcctctgcaaatcgactgtctggctgcctgggaggaatggcttcttgtgggaaccaaacaaggacatcttcttctctataggattcggaaggacgttggttgcaacagatttgaagtgacactagagaaatccaataagaacttctccaaaaagattcagcagatccatgtggtttcccagtttaagattctggtcagcttgttagaaaataacatttatgtccatgacctattgacatttcaacaaatcactacggtttcaaaggcaaagggag

SEQ ID NO: 112907 - DNA, 413 bp, Homo sapiens
  misc_feature (1)...(413): n = a,t,c or g
tttcgtcgggcgcatcctcattgcagtgcggcggccctacctcggccctggcctgaccccggcggccctgcccgcccctccctccagcatcatggccagcccaagaaccaggaaggttcttaaagaagtcagggtgcaggatgagaacaacgtttgttttgagtgtggcgcgttcaatcctcagtgggtcagtgtgacctacggcatctggatctgcctggagtgctcggggagacaccgcgggcttggggttcacctcagctttgtgcgctctgttactatggacaagtggaaggacattgagcttgagaagatgaaagctggtgggaatgctaagttccgagagttcctggagtctcaggaggattacgatccttgctggttcttgcangagaggtacaacagcaaagccg

SEQ ID NO: 112908 - DNA, 510 bp, Homo sapiens
tttcgtccgaaaccaaaacacaacaggctgtggaagagctgcgagcggcgcggcggggcgggcgaacttcggcgcggcacagagcctcgggaggctgatgcaactttccctttaagaaagccacctgggcgcaccgcggtgcggacccagcacgcctgggccgggggctgcagcatgctcttgagatctgtggcctgaaaggcgctggaagcagagcctgtgagtgtggtccccgtcaccagagccccaacccaccgccgccatggtaggaaaaggtgccaaagggatgctgaatggtgctgtgcccagcgaggccaccaagagggaccagaacctcaaacggggcaactggggcaaccagatcgagtttgtactgacgagcgtgggctatgccgtgggcctgggcaatgtcaggcgcttcccatacctctgctatcgcaacgggggaggcgccttcatgttcccctacttcatcatgctcatcttctgcgggatccccctcttcttcag

SEQ ID NO: 112909 - DNA, 401 bp, Homo sapiens
  misc_feature (1)...(401): n = a,t,c or g
tttcgtcctatgtttataagatatacatgaaacataaatgaatttcatgtttagaattgggtgccatccccaagatatctttttacgtatatgaaactatttcaaaatccaaaannnnnnnnnnnnnnnnnnnnnnnnnnnnnnnnnnnnnnnnnnnnnnnnnnnnnnnnnnnnnntactattaaaaaatagtcatggattgcgtctcccctgcacttcttggtagtctgttagtgggagatccttgtcaccagcccttcacctcctccagtgccaaggagccctataagtccccatcatgcatgagtacatctccatccacatttgctgggctggtgtccagattggcaatgcctgctgggagttctactgcctggaacacagcatcctgcctgatgacg

SEQ ID NO: 112910 - DNA, 563 bp, Homo sapiens
ttacgccaagcttggcacgaggatcgcggtgcgacgaaagagtaggtggtgggatctcaccgtgggtccgattagccttttctctgccttgcttgcttgagcttcagcggaattcgaaatggctggcggtaaggctggaaaggactccggaaaggccaagacaaaggcggtttcccgctcgcagagagccggcttgcaggtcagtagttgttcgtgcagtctgggagtcatgatgtttttctttgcatttccttttttgttattcatcgctctcgatgggcgttttgtgtatgcgtgggtgatgcggtgtcgcgacttgggctgcccatacgataaatatgggggggaggaatcacgtgtttcgatgtcgggacgcgttgctgcgcccgtgccccttgctttggcgcgcatataatttccccatctctagttctcatttttgtgcatttatgtttgtgtatgcttataatttaagttcccagggggccggattcatcgacacctaaaatctaggacgaacagtcatggacgtgtgggcgcgactgccgctgtgtacagcgcaa

SEQ ID NO: 112911 - DNA, 458 bp, Homo sapiens
  misc_feature (1)...(458): n = a,t,c or g
ccggcctcaagtcccgggtccacgatttcgctgttagatgccttcaaaaagaatcatggagatagtatgttatactacagaagattggagaaggttcatttggaaaagccattcttgttaaatctacacaagatggcagacagtatgttatcaaggaaattaacatctcaagaatgtccagtaaagaaagagaagaatcaaggagagaagttgccgtattggcatacatgaagcatccaaatattgtccagtatagagaatcatttgaaggtcagataaattatgcgagagagttaaaaaatcctaagacattaataaatctttttgtgaatgcattcttaggaaaaagataccatttttgtttaaaaacatacgcctatgaatatcagcttgattcaaggacaatactgatatcatgcctgcannnnnnnnnnnnnnaaattgagacaggtctcttn

SEQ ID NO: 112912 - DNA, 292 bp, Homo sapiens
tttcgtggatctgtgaccccagccatgaggaccctcgccattcttgctgccattctcctggtggccctgcagggccaggctgagccgctccaggcaagagctgatgaggttgctgcagccccggagcagattgcagcggacatcccagaagtggttgtttcccttgcatgggacgaaagcttggctccgaagcatccaggctcaaggaaaaacatgggctgctattgcagaataccagcgtgcattgcaggagaacgtcgctatggaacctgcatctaccaaggaatgtatt

SEQ ID NO: 112913 - DNA, 400 bp, Homo sapiens
  misc_feature (1)...(400): n = a,t,c or g
tttcgtgggccgcgtctcctttgagctgtttgcagactttgtcccaaagacagcaggttggtccattttctaagtttaacaaagatgttccaattgtgacagtttgtgtgtgtgtgtgtatatatatatttttatgtatgtatatatgtgtttaannnnnnnnnnaaacagaaaattttcgtgctctgagcactggagagaaaggatttggttataagggttcctgctttcacagaattattccagggtttatgtgtcaggtacgaaatttactgaattttattttatttgggttgctcccttcatttgggattgagccagaatatttcaggatacacatatctgaactgttactctaccatttcgggtctatttaacccttctattcagtttgaacttg

SEQ ID NO: 112914 - DNA, 436 bp, Homo sapiens
  misc_feature (1)...(436): n = a,t,c or g
nggcagctgcaaaccctcggaatnggggaaagaagaccccgagctgtgtgtggggggggtggtcttaccctgggggaggactcagactgccctcagcagctttgaattgccttccatatcattcttgaaggccttcccgctgatgggggagacacaagagcgtgagcgggtccacacacacttctcccgccggtactgccacagcaaccctgatgacagcacttcggaagggatggccccttgcccactctgcctgaccctccccacccactcagccaggccctggtcccctcccatcctggtccacctggcacttcggtcctgttgacaggcccagatggcttgtcctctctggcatgcagtaagtgctcaatgaacgctaattgaataagctatgggacacggtctgcctgcttatcaaggcgcagtctttgcc

SEQ ID NO: 112915 - DNA, 524 bp, Homo sapiens
cggcacgagggggactgaaccgagaggtgccgaaggaaccggcgggccgcttgatcccgctgcagacgtaggagatgcctgggacaaggaggccaccttctcagggcaaaagaaaaagaaggtgacaggcgttgagaccaccgaagggaacccatggctaggatcagtttttcctacctctgcccagcctcctggtacttcactgtgcccacagtgagtccatttctccgtcagcgggtggcattcctgggactcttcttcatatcctgtctccttttacttatgttaatcatagactttcgacattggagtgcttcattaccacgagataggcaatacgaaaggtatttggctcgagtaggggagcttgaagctactgacactgaagacccaaatctgaattatggacttgttgttgactgtggcagcagtggttcccggatttttgtttatttctggccaagacataatgggaacccccatgacttgctggacatcaaacagatgagagaccggcgcggccg

SEQ ID NO: 112916 - DNA, 423 bp, Homo sapiens
ggcccacactcccatctggacgctggtaaggactttggattaaaaagtttaccttcagtatttgagcaggtgagcactttgtgcgagaggtgataaacttatgactgagcaggttggagaactagcggcgtgttttcagtgccggtagaaactggtactagaagcctcatccgctgttagaatcttaggcacctgctctgaaagccaagcctctgtgcacagagtgctctgtaaaggggcagcctcgggtggcattctgcacgttcagcctggctccgtgtggctttgcccgtccccaggtgagtgtcggcgcagcttgggtctaacttcctgtgtgttttgcagacagctggatagaaaacgacagcctgtcagtagacaagcacggggacgaccagccggacagcagcagcctcaagagcc

SEQ ID NO: 112917 - DNA, 459 bp, Homo sapiens
  misc_feature (1)...(459): n = a,t,c or g
agttcggaaattcacgggnagattannnnnatnnnagagggagcggagcggacctggacttgttcgcctccaagccgtcggaaccgagtgctttaggccgctcgaaagagagttgctccgacccgggaaaaggagacgatgaaggaagccaaggatgcccgctataccaatgggcacctcttcaccaccatttcagtttcaggcatgaccatgtgctatgcctgtaacatgagcatcacaggcaaggaagccctcatctgcccatcctgcaatgtgactatccacaaccgctgtaaagacaccctcgccaactgtaccaaggtcaagcataagcatcagaaagcggccctgctgaagaacaacaccgccttgcagtccgcttctcttcgaagtaagacaaccatccgggagcggccaagctcggtcatctacccctccgacagcttacggcagtacctc

SEQ ID NO: 112918 - DNA, 427 bp, Homo sapiens
tttcgtgtttggcgggaagttggcttagctcggctacctgtggccccgcagttttgtagtccccgccttggttctccccagaggcctctcaatcctccctccatgatcttcgcatagagcacagtaccccttcacacggaggacgcgatggctcccaagaaacgcccagaaacccagaagacctccgagattgtattacgccccaggaacaagaggagcaggagtcccctggagctggagcccgaggccaagaagctctgtgcgaagggctccggtactgcctgtcctagcagaagatgtgactcagactgcctctgggtggggctggctggcccacagatcctgccaccatgccgcagcatcgtcaggaccctccaccagcataagctgggcagagcttcctggccatctgtccagcaggggctcc

SEQ ID NO: 112919 - DNA, 415 bp, Homo sapiens
  misc_feature (1)...(415): n = a,t,c or g
tgtacccccggttcgacgacttcgncgcggcggaggaacctcagagcataagcaggaacctttggtttcgactccgaaggtgttaactgtctggcctatgatgaagccatcatggctcagcaggaccgaattcaacacgagattgctgtgcagaaccctctggtgtcagagcggctggagctctcggacctatacaaggagtatgctgaagatgacaacatctatcaacagaagatcaaggacctccacaaaaagtactcgtacatccgcaagaccaagcctgacggcaactgtttctatcgggctttcggattctcccacttggaggcactgctggatgacagcaaggagttgcagcggttcaaggctgtgtctgccaagagcaaggaagacctggggtcccagggcttcactg

SEQ ID NO: 112920 - DNA, 415 bp, Homo sapiens
  misc_feature (1)...(415): n = a,t,c or g
cgcactcccgttagacgacttcgccgaaagcggncaagtagagctccgtcctgacgcgctttctttcgtgggctccggccggctaagccgcggcggacaactatgctgaaagccaagatcctcttcgtggggccttgcgagagtggaaaaactgttttggccaactttctgacagaatcttctgacatcactgaatacagcccaacccacggagtgaggatcctagaatttgagaatccgcatgttaccagcaacaacaaaggcacgggctgtgaattcgagctatgggactgtggtggcgatgctaagtttgagtcctgctggccggccctgatgaaggatgctcatggagtggtgatcgtcttcaatgctgacatcccaagccaccggaaggaaatggagatgtggtattcct

SEQ ID NO: 112921 - DNA, 422 bp, Homo sapiens
  misc_feature (1)...(422): n = a,t,c or g
gcattcccgggtcgacgatttcgtggggaatcccggccgtagagggacagtggataggtgcccgaggcctacagctggcctggggctcgtgtctgggcttcggacgttggggcccggtggcccaccctttccgtagttgtcccaaatggagctggaattggatgctggtgaccaagacctgccggccttcctgctagaggaaagtggagatttggggacggcacccgatgaggccgtgagggccccactggactgggcgctgccgctttctgaggtaccgagcgactgggaagtanatgatttgctgtgctccctgctgagtcccccagcgtcgttgaacattctcagctcctccaacccctgccttgtccaccatgaccacacctactctctcccacgggaaactgtctctatggatctag

SEQ ID NO: 112922 - DNA, 458 bp, Homo sapiens
  misc_feature (1)...(458): n = a,t,c or g
gtgtacgttgcacnggnnctaattcccgggtcgacgatttcgtcgggcaggttcgctgtggcgggcgcctgggccgccggctgtttaacttcgcttccgctggcccatagtgatctttgcagtgacccagcatcactgtttcttggcgtgtgaagataacccaaggaattgaggaagttgctgagaagagtgtgctggagatgctctatgaaaaaattgaatagtgagacgagttccagcgcaagggtttctggtttgccaagaagaaagtgaacatcatggatcataacaacagcctgccaccttacgctcagggcttggcctcccctcagggtgccatgactcccggaatccctatctttagtccaatgatgccttatggcactggactgactccacagcctattcagaacaccaatagtctgtctattttggaagagcaacaaaggcagcagcag

SEQ ID NO: 112923 - DNA, 389 bp, Homo sapiens
tttcgtctaacgttggcacggccctttgttgccgcaatgggttggaggggccgctgcggagccagctccgttcggatcactccctggccgacccgactcgctcatcctgcaggagctgttgctccaagatgagtggagaggataacccaaccacctctcccaccccggtgcaggacgtacagggcgacgaacgctggatgtgcctgcaccatcagatcgtggctgacagcgtagatcaggaacccctagtcgtgttcattggcgacttcttggtccagctcatgcaccaccgcgagaactggcgcgagctcttctttcctatgaatgcactttactttggcattgttggtgacggcgcacaccatgtactgtggccgatggagaatggg

SEQ ID NO: 112924 - DNA, 389 bp, Homo sapiens
tttcgttgaaaggtgaggggaacagctgatccgtctgttgttaggacagatatctcaaggccaggatggaagaatcaccactaagccgggcaccatcccgtggtggagtcaactttctcaatgtatcccggacctacatccccaacaccaaggtggaatgtcactacacccttcccccaggcaccatgcccagtgccagtgactggattggcatcttcaaggaggaggctgcctgtgttcgggattaccacacatttgtgtggtcttccgtgcctgaaagtacaactgatggttcccccattcacaccagtgtccagttccaagccagatacctgcccaaaccaggagctcagctctaccagttccgatatgtgaaccgccagggccag

SEQ ID NO: 112925 - DNA, 386 bp, Homo sapiens
tttcgtctagcgttgggacgggcctttgttgcctcgaggggtacgagtgggcgtggcggacccagctccgttcggaacactcccgggccgacccgactcgctcatcctgcaggagctgaggcgccaagatgagtggagaggaaaacccatgcagccagcccacgccggttcacgacgttcagggcgacgaacgctggatgtccctgcaccatcggttcgtggctgacagcaaagataaggagcccgaagtcgtcttcatcggagactccttggtccagctcatgcaccagtgcgagatctggcgcgagctcttctctcctctgcatgcacttaactttggcattggcggtgacggcgcacagcatgtactgtggcggctggagaat

SEQ ID NO: 112926 - DNA, 524 bp, Homo sapiens
ggaattcccgggtcgacgatttcgtggcggccggcggcggcggaggcagcagtaaggcctcctcctcgtcggcctcttcggcaggggctctggagtcctcgttggatcgaaaattccagtcggtaaccaacaccatggagtccattcaaggcttgtcgtcttggtgtatagagaacaaaaaacaccacagtactatcgtctatcattggatgaagtggctccggagatctgcatatccccaccgtttgaatctcttttaccttgccaatgatgtcatacagaactgtaaaaggaaaaatgcaatcatattccgtgaatcatttgctgatgtacttcctgaagcagctgctctagtgaaggatccatctgtctctaagtctgtagaacgaatctttaaaatctgggaagatagaaatgtatacccagaagaaatgattgtggcattgagagaagctttgagtaccactttcaaaactcagaagcagctgaaagaaaatctgaacaaacaaccgaataagcagtgc

SEQ ID NO: 112927 - DNA, 460 bp, Homo sapiens
  misc_feature (1)...(460): n = a,t,c or g
gggtagacagctccggaantnnnnnaaagacatcttcgggctcctgggatttctgtccgcgctcctggccctcgtctcttcgcgccagatcaggttcgcaaactcctgagacccttctgctcccggccggcgttttccgccggagcgagacccccatgtttaaaatgagcctgtttggaacaacctcacgttttggaaccagtgggaccatcatgtttggcagtgcaactacagacaatcacaatcccatgaaggatattgaagtagcatcatctcctgatgatagcattggttgtctgtcttttagcccaccaaccttgccggggaactttcttattgcaggatcatggcctaatgatgttcgctgctgggaagttcaagacagtggacagaccattccaaaagcccagcatatgcacactgggcctgtgcttgatgcctgctggagtgaccatcggag

SEQ ID NO: 112928 - DNA, 463 bp, Homo sapiens
  misc_feature (1)...(463): n = a,t,c or g
caggatccacctccgtatntnnnnnacgacgacttcgtaacagcggcagctacagcggtgacgcgagcggagcggttacggtgtgggaggtagtctcactcttaggaaaactgctgggcaccgtcgtcgcgctgaaggtggttctgtacctgctccgagtgtgcttagcgatggcctggaaatccggcggcgccagccactcggagctaatccacaatctccgcacatgcatatgcgctagaacttctatttgatcagttgcatgaaggagctaaagctcttgatgtaggatctggaagtggaatccttactgcatgttttgcacgtatgggtggatgtactggaaaagtcataggaattgatcacattaaagagctagtagatgactcagtaaataatgtcaggaaagacgatccaacacttctgtcttcagggagaatacagcttgttgtgggggatggaa

SEQ ID NO: 112929 - DNA, 455 bp, Homo sapiens
  misc_feature (1)...(455): n = a,t,c or g
cgtcccgggttgacgacttcgtgtnnnnnctggagctgtcctagcgcctagttctctccctgccgcatagctggccgcccagggggagtcccagagtttggaagatctctctaacacctctcggccaacttcagaagtgtataagatcagctttatctttccaaatggagacaagtatgatggggactgtacaagaacatcttctggaatctacgagagaaatggaataggtattcataccactcctaatgggattgtctacacaggaagctggaaagatgacaagatgaatggttatggaagacttgagcatttttcaggagcagtatatgaaggacaatttaaggataatatgtttcatggactgaggacttacacattcccatatggtgcaaagtatactgggaaattcaatgaaaatagggaagcttataatacaaaaaaatcactgcgtt

SEQ ID NO: 112930 - DNA, 424 bp, Homo sapiens
  misc_feature (1)...(424): n = a,t,c or g
nnccgtcgcgcggctcccgttcgcggagcacacatcccggcgcgacgaggttccttcggagagcgagcgggagtcggtgctcggcctcctgcggggagcagcccgaggcctggtctcagagaacacagtagatgtgtagtcagtttgttcaataaatatgcttgatggagcttcaatacccacctccacccccttctcccagaatctgcagggagaggtcgggaggtgacaacgccagcatgccagtgctatcggaggactctggtttgcatgaaaccctggccctgctgacctcccagctcagacctgactccaaccacaaggaggagatgggcttcctgagggatgttttcagtgaaaaaagcctcagttacttaatgaagattcatgagaagcttcgctattatgaaaggcaaagtccaac

SEQ ID NO: 112931 - DNA, 440 bp, Homo sapiens
  misc_feature (1)...(440): n = a,t,c or g
gcggaatctgccggaatttnnttggntagaagatcttcgccgcgtccaggggagggtgggggcgtttgtgttgacacttcctttccacgttacaatggagatactgtctctgacctcatgggccagtttggaaaaagattactgagttggagccgtctcaaatttgcagggagggacggggtggggggtggggggaccccggttgtgcagtttgatattgagggagcccccacctactcgctggggctgcgtaatctggacgtttccaaactgaagcgaaggcgtcgggagactaggcctcagagaaccatggctactgccaagggaatcgccataggcatcgacctgggcaccacctactcctgtgtgggggtgttccagcacggcaaggtggagatcatcgccaacgaccagggcaaccgcaccacccccagctacgt

SEQ ID NO: 112932 - DNA, 437 bp, Homo sapiens
  misc_feature (1)...(437): n = a,t,c or g
cggaagcgntcgaatttnngggacgacgacctcgtcggctgtaaggaggtggcagggacaaccacaaccacatttgccgggggaggagaaggcggcagcggcgattctaggcggcccaggcggcggggaggaggagaaggaggagggtggcggccgggcttggcttcagctccttgaggagtaggcggcggcgcgacccggggaaccggcattgatgtccagctcgccgctgtccaagaaacgtcgcgtgtccgggcctgatccaaagccggggtctaactgctcccctgcccagtccgtgttgtccgaagtgccctcggtgccaaccaacggaatggcccagaacggcggtgaagcagacatagacgagggcctttactcccggcagctgtatgtgttgggccatgaggcaatgaagcggctccagacatccagtg

SEQ ID NO: 112933 - DNA, 431 bp, Homo sapiens
tttcgtcgggatgttttcggttgtttgaccgagagagttgtaggcgcaaagctgaggaaaggagagtgtggagaggggcctggtgtggtggggcccggtgtttgggaccggagggtgttgacggctgatgagttccttgggtttgctctttcttcacctgaaaagaagactccaggaagggcagcacatgccggagaaagatgaattccagcttgaccgcccagaggcgcggcagtgacgccgagttgggaccctgggtgatggctgcgaggtccaaggacgcggcgccgtcccaacgcgacggacttttgcccgtgaaagtggaggaagactcacccggaagttgggagcccaactatcccgcggcttcgccggaccccgaaacttctcgactgcactttaggcagctgcgttaccaggaggtggctggg

SEQ ID NO: 112934 - DNA, 441 bp, Homo sapiens
ggtacacgacaggaatttctgggtcgacgacttcgtgaaccaggggtctcggatgaatggggagtgaggttgcttttgttgagcggtgcgattaaggcagatttcctaaacacgcctgtgaccagctgactccactcagcgtttccgtgtgagcccaggatggcggaccaagtgactttggaggacgcgctgtccaacgtggacctcctggaggagctgcccctgcctgaccagcagccctgcatcgagcccccggcatcctcgctgctctaccagccaaatttcaacactaactttgaagacagaaatgcatttgttactggcatcgcaagatacattgaacaagccaccgttcactctagcatgaacgagatgctggaggagggccaagaatatgctgtcatgctgtacacctggaggagctgttcccgggccattccc

SEQ ID NO: 112935 - DNA, 402 bp, Homo sapiens
tttcgtagcggcggcaactgctgcggtgaaggaggaggaggagccgatcgggcgctggcaccgaggcctgaccatggacgaggaatacgatgtgatcgtgctggggaccggtctcaccgaatgcatactgtcgggcatcatgtctgtgaacgggaagaaggtgctgcacatggaccggaacccctactacggtggcgagagctcctccatcacacccctggaggagctgtataagcgttttcagttgctggaggggccccctgagtcgatgggccgaggccgatactggaatgttgacctgattcccaaattcctcatggctaacgggcagcctggtaagatgctactgtatacagatgtgactcgctacctggacttcaaggtggtggagggcagctttgc

SEQ ID NO: 112936 - DNA, 262 bp, Homo sapiens
  misc_feature (1)...(262): n = a,t,c or g
agccatggctcgtggtcccaagaagcatctgaagcgggtggcagctccaaagcattggatgctggataaattgaccggtgtgtttgctcctcgtccatccaccggtccccacaagttgagagagtgtctccccctcatcattttcctgaggaacagacttattgacaagacgggagagaatttccgtctgatctatgacaccaagggtcgctttnctgtacatcgtattacacctgaggaggccaagtacaagttgtgcaaa

SEQ ID NO: 112937 - DNA, 882 bp, Homo sapiens
aagaagcagaaaaacaaagaagaatctggggaagatgggcataaatctccaccaagtgctgccaaggcttcccaggcgaggctgctgaaaagaccctgtggaggggagcggcaggacctgccaaggcctgggggagcccgccagcctgctgagttctactgtacaaacagttggggagggggcgctgtctctgttaacttgaaattccccgatcagtaaacatgccaatttaaagtgtaattaactcaggccggaaaaaattcagatttggactgcttttcacagttgagcggctgctctgccctgggataaacacatttcaagagtctcagtccccgctttgccaccatctcctcctctgatctcctttcctggttcaaaagactccagaatacctctcgggtctcagagaaggctgaatccacctatggacctagtggggagcaccctgtgccgaaaactgtttaccttctggtccccggagccatggggtcacgacctgggcctcatgtaggcccgctcctcagcagaccccaatctgcggcttctcccacctcactggggaagaaggagagccctggggatgtggagaagccaccccccaccccgccacatcccccacatcttacagaatctcgattgaatccccgggggcacatccctcagcaggacagcaacagtctttgccgcggccctggggaggtgctgtgctggggatgagcgccgagtgcgccgtggactaagtgaaggaaatgaccatgctcttttcccagctggatggcgaggccgggcaggacccgcggaattcctgctcttcgttttcagacactttgctgtcaagctatttgaataataaatacacattataaaaatgtaaaaaaa

SEQ ID NO: 112938 - DNA, 387 bp, Homo sapiens
aatacagcgcccccccgggctacgtgatcgccttggtgcgggtgtctgatcgcgactcaggcctcaatggacgtgtgcagtgccgtttgctgggcaatgtgccctttcgactgcaggaatatgagagcttctccactattctggtggacggacggctggaccgcgagcagcacgaccaatacaacctcacaattcaggcacgcgacggcggcgtgcccatgctgcagagtgccaagtcctttaccgtgctcatcactgacgaaaatgacaaccacccgcacttttccaagccctactaccaggtcattgtgcaggagaacaacacgcctggcgcctatctgctctctgtgtctgctcgcgaccccgacctgggtctcaacggcagtg

SEQ ID NO: 112939 - DNA, 703 bp, Homo sapiens
  misc_feature (1)...(703): n = a,t,c or g
ttcggggacaccatcaggctggagctcagggaggatatgaagctatgaaacccacgtagtcggacaccctgatgcttctcctgcagggcgtgtgatgaggaggtgagcttggctttggagtgctgggaacctgaggaattgccaaggacccagagcccagccctgaccacccagagagcccaaaccacaatgaacaaattgaatttccacaacagagtcatgcaagaccgccgcagcgtgtgcattttccttcccaatgatgaatctctgaacatcatcataaatgtttggtattttcctggggtgatggtgactttggaaaattgggccggggcggaagtgaaggctgcaacattccccagaacattgagagactaaatggacagggggtgtgccagattgagtgtggagctcagttcctactggcgctcaccaagtctggagtggtgtggacatggtacgtaaacgtcctccccgtcacagtgtgtgtgcttgtgccggcgcgtgcagggaacttgggcctcgccccaggaccaccccggcgtgattgtgacctgtcatatttttaataaagcatgcataaatgtcctttaaaggatattgagtcgggattagtgacaatagtacaagaanaaatttcctattgtaactgggtcattttgaaaatactanaaaaattttaggccacttacctttcctgttt

SEQ ID NO: 112940 - DNA, 433 bp, Homo sapiens
  misc_feature (1)...(433): n = a,t,c or g
ccagatgtgctctagcctcttgctannnnnnnnnnnnnnnnnnnnnnnnnnnnnnnnnnnnnnnnnnnnnnnnnnnnnnnnnnnnnnnnnnnnnnnnnnnnnnnnnnnnnnnnnnnnnnnntatatgattttaacaagatccccaggtgatttatgtgcacagtaaagtttgagaagtgctgaagacagctttattgaagtaaaagaaaaaatagacttttattggatgctagtgtttttctctagggtggactcagggtgtggggtgtggagactagttctcagcaaatctctggagcactcctctaagtctcttttccctctccctgctttcagtttatgggcccatacacatacatgcaaacacccatgtgcacacacacaatcacacgtgcatgcatccatacatctacgttttcacacacactgtatt

SEQ ID NO: 112941 - DNA, 472 bp, Homo sapiens
  misc_feature (1)...(472): n = a,t,c or g
ttacgcactcaggacagtanaatcacaaagttttagctaaggaaggagaaatcccttctgcctgtataataaatgttgttttgacccaactacactgtttcttgtgataaaaatatgtcacttaaggtttcctgcatctgccatttgtgaacgtacagttgagcgacattagttggtgccatctgtgagtgcacagtgcagcaactttagggggttcacaatgttccgcagccatcaccgccgcccagcactggcatgtttcacagtgttccgcagccatcaccgccacccagcactggcatgtttcacagtgttccgcagccaccaccgccgcccagcaccggcatgtttcacagtgttccgcagccaccaccgccacccagcaccggaatgtttcacagtgaacaacagccatcaccaccacccagcttgtattgcggccgctcggaggttccctgcatcgacgcaatca

SEQ ID NO: 112942 - DNA, 448 bp, Homo sapiens
  misc_feature (1)...(448): n = a,t,c or g
acggacagcgcccgatgcttgtatcctatagagcggccgcaatacatgccctctctgctgcgcctgccacagcgttatagccctgcacgtaagcccggccatgcccacagcattcacagtgcctgcatcacaccctgcactgcacccctgcaccctgggcttcacagtcagagccctcctcacaccactgctgagctcaggcaagtgcacaaggaaagctgtggctcactgctcggctccagcagaggtggtcccatggaccacctgttgctacagaggggtcggcagccctgtcactcaaggcagggtttgctctgcaagctgccccagcctggcgccttctctacgccacccccccagctcctcctgcagctcctgttgctcctttccaggcctacccggncatacctcatgcctcaccctgcccttggcctttacagatggtggg

SEQ ID NO: 112943 - DNA, 403 bp, Homo sapiens
cgagagcaatgctttcatcgaggagagtcgccagctgctttcatatgccctcatccacccagccaccacactggaggaccgcaacgcactggccctctggctgagccacctggaagagcggttggctagtggcttccgctcccggccagagccctcctaccattcacgtcaaggctcagatgagtgggggggccctgcagagctaggccctggggaggcagggccaggctggcaggacaagccaccccgggaaaatggacacgtgcccttccacccatccagctcagtgccgccagccatcaacagtattgggagcaatgcaaacacaggtctcccctgccaaatccaccctagcccactgaagcgctccatgtcactcatccctacaagcccccattgtatt

SEQ ID NO: 112944 - DNA, 662 bp, Homo sapiens
gctaaagaacagctctgagtggcaacgagcaggaaaagcagctcacagagcagcctccaggcaccaagaccgtgaggccacatcgcctccagggagcaggtcccacagcacccctaccccagggcaccaggactgggttattccgggatttcgcagtgctgagaactttggagaacaaaatccccggcagctgcctgaacgctgaacggaggtggcgcgatccgcctgatgaatcaggctaattacacagaagccacacaggttttgcttcctccaggaaaactgctttccctctttaatattcactatcctcttctcacagcctgtaagcctcgctcaaattagggtgcagctgcaacccaaacccaaaattaaatgcccaagcacgcgacagggacacacacggctccagatacaccggccccgcccgcctcctctccacagcctgggtgctagcaggcaaagaagtcagggaagatgctctccacctcgtccttcagggccaggcctgcacagtccacatccaggccccacggctccagagggctgtcctggagctcctgggagccaagctcagggtcccctaggaagcctggctctccaacatccagtggactgctctcagctggggcccatgcagggccactgtctcctcgaccctt

SEQ ID NO: 112945 - DNA, 420 bp, Homo sapiens
aaggagaccgcagttccttcctgagtcccctctccttgggaaaaagtgttcctactctctgggtgagcgtctggtccgaatcgttggcttggagatgattttacgggctctttctggagaacaaaagtaaaaccttagtgttccgatgagacacagtaggcagtacttgggagggtcttatagaccccaccctgtggaagtgggtctcaacattacacaaccccctctcgggcccgtggacagttgctgtcctctctgttttctctctttgtgcctgtgccaccctcagagaagaagaaaggagctgaggaggagaagccaaagaggaggaggcaggagaagcaggcagcatgccccttctacaaccacgagcaatgtattgcggccgctgtagaggctcccgcatacgtgcacgtactc

SEQ ID NO: 112946 - DNA, 523 bp, Homo sapiens
cggccgcagccaaccgcaaacgcgcggcctactacagcgccgcggggcccaggccgggagccgaccggcacggcaggtaccagctggaggatgagtctgcgcatttggatgaaatgccactaatgatgtctgaagaaggctttgagaatgaggaaagtgattaccacaccttaccacgagccaggataatgcaaaggaaaagaggactggagtggtttgtctgtgatggctggaagttcctctgtaccagttgctgtggttggctgataaatatttgtcgaagaaagaaagagctgaaagctcgcacagtatggcttggatgtcctgaaaagtgtgaagaaaaacatcccaggaattctataaaaaatcaaaaatacaatgtgtttacctttatacctggggttttgtatgaacaattcaagtttttcttgaatctctattttgcagtaatatcctgctcacagtttgtgacagcattgaaaataggctatctctacacctactgggctcctctgggatttgt

SEQ ID NO: 112947 - DNA, 291 bp, Homo sapiens
acaaaagtgtcattgtttaatcttgatttgaaagaactttacgtatttaaaacattatgtggttcttttgtgcaagcgctttatccctaactcgtttgattatccagggttgaaagcaactctctctgacttctgcactcagaaagcgcttgggctaattgtggtctccttcctgtgtcttaccttcacaggataatgctactgcctgtgggtgtatcacaagtacttgagaatggctcctcagttttggtctgtttggaggaaggctgggacatcactgcacaagtacac

SEQ ID NO: 112948 - DNA, 501 bp, Homo sapiens
ggcgggcactgaaatcatcagggcacttactgagtaccatgcaccctcattcaaagtgaggaacaagacgttgaggcccaggcaggtcagcaaaggaaccacaaaaaggatctgccccctgaagcaagtatcgaacacccattccctgcctccttcaagggttccaggtagatctccagcctcttgtaggagagaaccaagttgaaaaggtcaaacgctggggacttggtaggaaaaggtggagactccaggggagcctcgggcatcacgctggggctcagctccggcccactcccctcacgttctgatgtctgcattccggccgctggctccgtgagggaggcggcagggtcgggcaggagcaggggtagagccactgggccccggagcgtttcttcaggcctcccccggctgaacgccgctcctcctgccagggttgttcgaaagtcgcaggtccgaaaatctcctccgcctacgccgcggcacgagatcgtcgaccgt

SEQ ID NO: 112949 - DNA, 500 bp, Homo sapiens
cgcatcaccatggcagcgggaaagccgcggtaaagccagagcactggcaggccgagctcaggagggctggggacagagatgctgaaccagacggacccatcatttaagagatggccctgattcgtctcttctagggactcttgaagatggggacccaagtggttatgagattcaataactccttgctgccaacagagccttctcaacagctgcaggcctatgtggcctgggtgaatgcacagctgaagaagaggccagcagtgaagcctgtgcaggacctgcgacaagatctccgggatggggtgatcctggcatatctcatcgagattgttgcaggagaaaagctgagtggggtacagctgagtcccgcgaaccaacaggagatgaagaataatgtggagaaagtgctacagtttgtggcctctaaaaagattcgtatgcaccagacttcggctaaagatattgtggatggaaacctgaagtccatcatgagggtggtc

SEQ ID NO: 112950 - DNA, 405 bp, Homo sapiens
  misc_feature (1)...(405): n = a,t,c or g
caaagaaatcttagcagggatttagtgcaagaagaagaacagttgatggnnnnnnnnnnnnnnnnnnnncacgacaagaaaaagaaggaagctgctcaaaagaaggccactgaacaaaaaatcaaagtgccagaacagataaagcccagtgtaagccagcctcagcctgccaactctaataacggcacttccacagcaaccagcactaataataatgccaagcgagctacagccaacaatcagcagccannnnnnnnnnnnnnnnnnnngcagccgcagcagcagcagccacagcagcagccacagccgcagccgcagcagcagcagccacagcagcagccacaggccttgcctcggtatcctcgtgaagtacctccacgatttcgccaccaggaacactgtatt

SEQ ID NO: 112951 - DNA, 402 bp, Homo sapiens
ctgagctctcttagagtccacacctccctttgccccttcctcaagtactcgccgactacttgggactccgtcacaccaagcgatgggctatgcttctccattactggcgctatgccccaaccacagcctccagccccacgtggcaggttgcctggcaacaccttaaacacaggccctgcctgctgggagggcccaccaggggcggcgcggccccactccgggctatgagctctggcctcctcattcctcctgagcatgatgggccctctggctctctttccccaggcctaggatccctgtcaccctcaacatgaagatggtgatgccctcctggtttgacctgatggggctgagtccacatgccccagaggacgaggctggcatcaagaaggcagctgtatt

SEQ ID NO: 112952 - DNA, 402 bp, Homo sapiens
cttaaggacgaaaccaacatgagtgggggtgggtagcaggccgacatcctgccggccaactacgtggtcaaggatcgctggaaggtgctgaaaaagatcgggggcgggggctttggtgagatctacgaggccatggacctgctgaccagggagaatgtggccctcaaggtggagtcagcccagcagcccaagcaggtcctcaagatggaggtggccgtgctcaagaagttgcaagggaaggaccatgtgtgcaggttcattggctgtggcaggaacgagaagtttaactatgtagtgatgcagctccagggccggaacctggccgacctgcgccgtagccagccgcgaggcaccttcacgctgagcaccacattgtggctgggcaagcagatcttggagttc

SEQ ID NO: 112953 - DNA, 619 bp, Homo sapiens
  misc_feature (1)...(619): n = a,t,c or g
cgagtcggtctgcgcagcctcctgcgttttctctcttggatcttggcactgagaggcggtggccggcgggaatggagaaaagtaggatgaacctgcccaaggggccggacacgctctgcttcgacaaggacgagttcatgaaggtgcgcgcggcgtccgctccccggagccgggccatgagggtgcctctgccctgtgccctctgtggccgtctcttcggtcggctgctcctgcctgcgcacgctcagtgtcaggtcctccgccgagacctcgctgcacttcgcaatgagtcttttggcgtcaggtttggcgggtgcagcctggagaaagcacttctgtaaaatcgtgcggtgttacatggaaaggcctgaaagttctgggcaagtggttttgagctgcatgtcaaagccactgttacccgttcctgtaccatgcagtgcagtcagattgccagtccccttgtcggaaagaagcttgtggacccgggcctttgagctcattaagtgttgtgtgaataatctncagcccacgtacttncttaggactcgggtcgaaagaaaaagaacttatctgagttttgcttacatcagctnagcttcagatggatattagagcttaa

SEQ ID NO: 112954 - DNA, 424 bp, Homo sapiens
  misc_feature (1)...(424): n = a,t,c or g
agttggtgttataagtagtatcttggtaattcagagagatactcatcctacgtgaatataggctgagataaatccagtaaagaaagtgtagtaaattctacataagagtctatcattgatttctttttgtggtaaaaatcttagttcatgtgaagaaatttcatgtgaatgttttagctatcaaacagtactgtcacctactcatgcacaaaactgcctcccaaagacttttcccaggtccctcgtatcaaaacattaagagtataatggaagatagcacgatcttgtcagattggacaaacagcaacaaacaaaaaatcaagtatgacttttcctgtgaactctacagaaaatatacatattcatctttccccgccggggtgtatgcggccgctctganntcaaanctacgggtcatcctttn

SEQ ID NO: 112955 - DNA, 399 bp, Homo sapiens
  misc_feature (1)...(399): n = a,t,c or g
aatacatgctccctgccacaagtcctgagtccatccaagctgtgctcctactgctccgggcgcttgttaagaatccagtgtttttatatgtcccaaataggaattgagaggtcaacaagggagactttggtccttgcttttacagacaaacacaggcacacaacacaaaactacacacatttcctccactacagagaaaggagactcaacagaaccggggaggccctgggggaggactgtcagcacgagcagctctccagatttaccccggcagtcccccggagggcgagtcagagaagagacaacctcgacacagcgaaacgcaatccccgccagttacaaaaacacgtcgtgaaacaagccgaaagacagagaggcccttgaccaggctcttggggn

SEQ ID NO: 112956 - DNA, 450 bp, Homo sapiens
ttctcgaaggtcctgggggcgttgaacgtggtaggggggatcccggggcctgcggtgggccaagggacgtcaccattcctcgaaagagggcaagggaattacgtttattctcttcttcctctggaaataaaaaaagagagcaacatcatctaactgccctacagatctaatagtatctcgcccggaggtctcagcgacctcggggtggggcctctctgaggctctggctcccccgggagctgtgcgagtccctcccccctccccgcccggaggactttttcggccaccgcaaccttcggccatcccagctttcccgtcccctaattccccagactccgactcctcgcaagcccgtgtcccttcttagatgctggcctcgggagcgtgaggcctggggccagcggaatggcagtgtcagcgtgtttgattcaattttgcttgagttccgtg

SEQ ID NO: 112957 - DNA, 453 bp, Homo sapiens
cattctgtgatgctatacagcggacgcccaatcccccagcgcctctgacatggctgcactgcctccccgtggtctgggggcccagccacggatcctgcatcaccccaccctgatcctctccctcataggcatggggactcttccctgccctgcaccccttctctgggaagaccaaccccttctctgagccccagaagacgctggtgtggaggagctgctctgatgcggtgccatcacagacgccaccctcaccatgttcccgccaccctcagcgagtccctgccaccctgcaatctgcaaaggcaggggcctccctccagcctgcgggacccacacaggcagcacaggaagcctgcagcccctccacagggggctcggagacagtccacatcaagtgccaagtgcccactgtgcttagttggcaaaacagagtctggtgggccctgggactct

SEQ ID NO: 112958 - DNA, 397 bp, Homo sapiens
ggcccttcccctcctttagcatgttcatgggtgctggggatgccccactgggctctcggcctggccacccccattcctcatctcaggtgaaaagcaagctccaaattggccccccttctcctggggaagctcagggaccccttctgccctctccagctaggggtctcaagtttctaaagctgcctccaacctcggagaagagccccagcccaggaggcccgcagctcagtccccagctcccccggaactcgcgaatcccctgtcggaacagtggctcggacggcagcccctccccactgttggcccgaaggggtctgggtggaggagagctgtccccagagggggcgcaaggcctgcccaccagcccatcaccctgctacacaaccccagactgtat

SEQ ID NO: 112959 - DNA, 435 bp, Homo sapiens
cccaaagcaaaaaattctcaaatgtgtgtgaggggtcagaagaatccccactgacttacacaaataaagaacatgtgtgttctaggaggggtattcttgggttaagaaacttccctaaggggaaatatgaattgttagttgagtgatcttcctctcaaggcacccaaagcagtaattgttgtctgccgtgttgggaggttagccacctgcctattgtcttttcttttgaaaactttttctctgagaagtgaatgtactgagtggtaaaagactttaaattatttgctaacttttcagagtcaaacagatgaaatccctgtattgacattaaaagataattctaagtatggtacaatagttaatgaggaaaaaatgcagaatggcgaagcggccgctgtagaggatcccagaatacgtacgggtgcatgcgaaggc

SEQ ID NO: 112960 - DNA, 714 bp, Homo sapiens
  misc_feature (1)...(714): n = a,t,c or g
acaatgctcagatcgggaggtggagccaatcaggtccaaccaagaggaggggacaccggcactccactagcaggaaaacgggccgagggaccgcaagcagggggtgcctagtcctcgtcccccaaagaccaatcgtaagccagatacaggcgagtgactgtcaagaaggccaattagagcctccgaagggaatctggacctgcctcttctctgagggacggctctacctaccaatagcatgggcgagaaggcggtccctttgctaaggaggaggcgggtgaagagaagctgcccttcttgtggctcggagcttggggttgaagagaagagggggaaaggaaatccgatttccatccagttgttccccccagagctggtggagcatatcatctcattcctcccagtcagagaccttgttgccctcggccagacctgccgctacttccacgaagtgtgcgatggggaaggcgtgtggagacgcatctgtcgcagactcagtccgcgcctccaagatcagggttctggagtccggccctggaagagagctgccattctgaactacacgaagggcctgtatttccaggcatttggaggccgccgccgatgtctcaacaagagcgtggcccccttgctagcccacngctaccgccgcttcttgcccaccaaggatcacgtcttcattcttgactacgtggggaccctcttcttnctcaa

SEQ ID NO: 112961 - DNA, 412 bp, Homo sapiens
ctcaggccctttttgaaaggagccccctttggggatccagccaccctcatattatggatgtgtatgtctacgtccgcaacttagccttttgcacgtgacttgcctggtcgttgccatggaaactcctccatttctcagcctccctctttctcctgcccattcctcacctccatatctcctcccctccccccaatatggttgcctagatactggttatccctggctaggagacctagatatctggctcctacacccaattgcagtggccccttactcacaccacccacttcacacacactgcacatcaccaacaccacaaacacatacagacatataccacactacgcaatcaacacaccctcacactcacaccacacatacatatacatcatacctatacacacaatgtatt

SEQ ID NO: 112962 - DNA, 387 bp, Homo sapiens
agcagagctgctttccgcctctttgagaccaagatcacccaagtcctgcacttcagtatgaagcaaaccggagaggcgggcagggctggggggagacagggaggctgaggtgtggccgaggacctgaccatctggaagtgtgaaaatccccttgggctgtcagaagccttgggcttggccataaatagggaggcagtggcacctctccatgggggtggcgaaggtggaatgagaggatctacacagagtccccagcctgggctcaccctgcaccttctcttcccctctgaccacttttgcgcacgtcatccccgcagccaaggatgtcaaggccgctgctaatcagatgcgcaacttcctggttcgagcctcctgccgccatgtatt

SEQ ID NO: 112963 - DNA, 723 bp, Homo sapiens
agcggccgccgcgagtgtgaggaggcagggcctggtggggcctgggtctgggccttgaccaaggaggcagagaaaggtggcccaaggagggccctggggtgagtctgagcctggtggcagcgctgacccagcaaccaggggcctgtgcagcgggatgtcctgagtggggtctggccaggacctcgtggagtgcgtcagcaatgcttcactctcagacgcttggcggaggccacaggcggcctgacgtgcggaaaccacggcccgatgttctcaaagccctgctcgccgcaggtggttctggagcagccgggcggaggaagggctggtcggatgtttgcctgtcaagctcaaagcgacagattccactttccactcgtccactcctgagtgatcagggacacgaccgcagcctcgaggcctcaccgtcagccagctcccgggccccacaagctcagatgaaacctagccacggagccaccaatcatggtctgtgccaggctccacggctgggcaggtggtcagatcatggagcgcacctgtgtcaagcttgagttaaaccactgctgctgtggtcagaccggcatgagggtgggagtggccacaagcccacatgtgtgacacatgctacaagtgctgctgatgtcggacaacaatgtagttgatgagtcgacggacatcgataagcagttccatatagccttctatacggtgcgagcttacctt

SEQ ID NO: 112964 - DNA, 565 bp, Homo sapiens
gcggcaagtcagttctacatctacagattttgattctgtttaaccaatgagcttaccaggtgatgaccattacatcaaatttcagatccactgacttaatctgttacctttatcacaatcctcataatctttatgttctgctgttactctgtgagctctctttatctttcatgacagtattttaaccaattcatgtatatggtgaattattcttaaattgtctcttctttctataactgttttatttttgtagtacatgaaaattattttttcctttctttcagatttggagcccaggaatgagactaagcatttatctgtccgaaaagatattattcaaaacactggttctcagtgggaggtaatggaaagtaccaagttatgtggccttgaacgttccattttcataaatgactggccaagcaaaagcaagattgacttacaaggacctgaagtgggatatttcagtcaaatgaaaatcatctctgaaaatgtgcccagttacaaaactcatgaatctcttactttacctcggagaactcatgacagtgagaagccctgtatt

SEQ ID NO: 112965 - DNA, 847 bp, Homo sapiens
gcggccgcgccctcgcacagatcccagctgggtcacccgcactgagtcaacagactgagcgcgtccaggcctgacagctctgcggctcgggccctgaggtttattcagaaaacatgtccactgcaattagggaggtaggagtttggagacagaccagaacacttctactgaagaattacttaattaaatgcagaaccaaaaagagtagtgttcaggaaattctttttccactattttttttattttggttaatattaattagcatgatgcatccaaataagaaatatgaagaagtgcctaatatagaactcaatcctatggacaagtttactctttctaatctaattcttggatatactccagtgactaatattacaagcagcatcatgcagaaagtgtctactgatcatctacctgatgtcataattactgaagaatatacaaatgaaaaagaaatgttaacatccagtctctctaagccgagcaactttgtaggtgtggttttcaaagactccatgtcctatgaacttcgtttttttcctgatatgattccagtatcttctatttatatggattcaagagctggctgttcaaaatcatgtgaggctgctcagtactggtcctcaggtttcacagttttacaagcatccatagatgctgccattatacagttgaagaccaatgtttctctttggaaggagctggagtcaactaaagctgttattatgggagaaactgctgttgtagaaatagatacctttccccgaggagtaattttaatatacctagttatagcattttcaccttttggatactttttggcaattcatatcgtagcaaaaaaaaa

SEQ ID NO: 112966 - DNA, 396 bp, Homo sapiens
cccggggagcgtaaagagcccatttggtaccccttgaccccgaagcttctctacacatccagttggcagaggccctcaggccatgaggactggccaaagacaaggtcttctgtgggaacaaagggtttgaagcgctgagaatgggaccctcaggagaggaagactgtgagaggacgtgcaagggtaaattcctgagccccgcagtcttatttcctgccctgacgtccctgcataccagcccaagggttaaccgtaagctgatgcctgtatggcggccttactgatgccacgcaggaacaaagggatgaggactcgactgggatgcctgtctcacaagtcagactcgtgtagtgatttcacagctattcttccagacaaacccaaccgcactgtatt

SEQ ID NO: 112967 - DNA, 403 bp, Homo sapiens
  misc_feature (1)...(403): n = a,t,c or g
cttccttgaaagattcttgtgtttaattagaattaattgaacacactgtgcttaaaacagagaatgatgttagaagaaagccttggaacgatgatcaacataagactacacagtatgtgggataaactattccaacttacagcatttttgttttttgtattgccagtgctacagctagaatgaagcacatcaacctatcatttgcagcgtgtggatttctgggcatttaccacttgggggcagcatctgcactttgcagacatggtaaaccctcctctaacgccttcaaacaaatctctgtcgtgtgagngtggcgctatctctcgcctggagataaatataaccccacagtccatcacccacacccatgtattcgtcctgtctgtttnctcacgaaactaaa

SEQ ID NO: 112968 - DNA, 392 bp, Homo sapiens
  misc_feature (1)...(392): n = a,t,c or g
gggccccttcacggcaccaagcggctggggggccttcaccaccacacngtcggcatcattgtgaagccagagaatgccactgcccccagctcttgccccagagggagtntggttcctgtcccaagcctgcccccttccattcccagctcttgtgccagcatcgagaacaccagcactttgcaaagaaagactgtccaatcacagataggacctccgttgacagattcaaggccactgggctcacccccaaacgccacccgggtgctcactcccccgcaagcagcaggagatggtatcttggccacaacagccaaccaacgattcagctcaccagcgccatcgtcagatggcaaggtcagccccggcacgttatccataggaagcgcatgtat

SEQ ID NO: 112969 - DNA, 409 bp, Homo sapiens
  misc_feature (1)...(409): n = a,t,c or g
cagaacctttttaaaacacagattcccagaactgctactgaatcactttctgggcccaagaaccagttttgaaaaccttaatatttggtaatgccctctaaaccttccacaaatgattggtagtttctccccgcaagacgcagccctagtaagaaagcaaaaagcttacctgtatacttttggggaaataaagagcagtggtcttttaattgggagacatctctctctctctctcnnnnnnnnnnaatgccccgatacaattcttaagcttaaaattatattttcctttgtagctttgccaatttgagaatttacccacatggattggtgttgctggaccttcaaaaatatgatggtgatgcgcaaggcatgtattcggccgctctggaggctcaacctaaaggccgat

SEQ ID NO: 112970 - DNA, 475 bp, Homo sapiens
cggcagtagttcctggtccggtttaaaccaaatttctttgcccgttctaaaggaaagttgaactaagggctcctctaccctgagtattctttgttaagcatcctgcctgggataaggaattcgcaattagaatttctctttttattctgtgcagagttcaatgaaagtgttttctaaggtcatgtagaatgcgccccaaccaagcctaatatttcttattttctcttttaaatttgaatttccaggtccgataaaagtgaaggatgtaatagatcgtggcccttcaatttagaagagattaaggtattgacttttaattatatttctactgcagagtgttgacctagattaactcttttcttcacaagcgtaccttcaaagtcatctttaaaattaaggggtcatgaatgtattcaccaggattgagcccttgctgctgaaatagtaagtattgttatctcgaccccacatgtat

SEQ ID NO: 112971 - DNA, 335 bp, Homo sapiens
ctggagacgaggtgcagaaatggcacctcgaaaggggaaggaaaagaaggaagaacaggtcatcagcctcggacctcaggtggctgaaggagagaatgtatttggggtctgccatatctttgcatccttcaatgacacttttgtccatgtcactgatatttctggcaaggaaaccatctgccgtgtgactggtgtgatgaaggtaaaggccgaccgagatgaatcctcaccatatgctgctatgttggctgcccaggatgtggcccagaggtgcaaggagctgggtatcaccgccctacacatcaaactccgggccacagggggaaatagggccc

SEQ ID NO: 112972 - DNA, 478 bp, Homo sapiens
gagcgtagtctaggcccggtaatttaggtcgacccacgcgtccggacagaaccttctcttagtttacacaatggttatttaggtttatgtccctcgcttcggaacgcaagagagcattacttttccaaagagctacgcggatcatactgaaggacgatatgataaattttcactttttgtaaaaacttgtactctgagagggccctctaagaccaactccagcagtcaaacattcaaaaacgactcactttgagattgaaatatttgatgctcaaacaaggaaacagatatgtattctggataaggagacacaatcatctactattcatgatggtaagcaaaaggttcacaaagcatgtccaaagtggtacccttctcgagttggtctgcagctaaaatggggcgggccttttttgaaggactacattaccattcaaagtattgcagcttcctccattggcacactggaggctacgaa

SEQ ID NO: 112973 - DNA, 469 bp, Homo sapiens
  misc_feature (1)...(469): n = a,t,c or g
naacaaccagtctaggaccccntgggtttangcacgcgnncgcgccggtttgcagacagatccgagtcgggtgtgcgccgttgcttttgttgcctctgtcttcgcgccaccacagaggcaagatttgggttcatatcgcggcatccggctcccgcccgtcttcaggagagaaagaatatataaaatatacttggggaagttgtacctgccagaattaccaagagctttctttaagaagacattcgtcaaactcaacaaattgaaggttaacaccttaagaggtgtagttactgaccataaatatggacagacttcttacacttggaggaggaatgcctggactgggccaggggccacctacagatgctcctgcattggacacagtagaacaagtctatatctcttccctggccctggtaacaatgttaaaacatggcccggctggaggtccaatggaaagtatgcgttt

SEQ ID NO: 112974 - DNA, 430 bp, Homo sapiens
aaggagtgcttgtggagatcggatcttttctccagcaattgggggaaagaaggctttttctctgaattcggttagtggaaccagcggcgtatattttttaggcgccttttcgaaaacctagtagttaatattcatttggttaaatcttattttatttttaagctcaaactgcttaagaataccttaattccttaaagggaaataattttttgcaaaggggtttcctcgatttggagctttttttttcttccaccgtcatttctaactcttaaaaccaactcagttccatcatggtgatgatcaagaagatcaagtcttttgaggtggtctttaacgaccctgaaaaggggtacggcagtggcgagaaggtggctggccgggtgatagtggaggtgcgcgaacttactcgtgtcaaagccgttaggatcct

SEQ ID NO: 112975 - DNA, 437 bp, Homo sapiens
  misc_feature (1)...(437): n = a,t,c or g
cccgccctaatgnagggaccacccacgcgnccganggcgtcgctcttggatcggtggacgttttatttttagacagttcgcgtgcgtttccttcgcctagttggcctacatgccttctgcccgtgaagcgatgtttcccctcgaaaggccgtaggctacgccgtcagaatcggtttttcagtgagttttgacccctccgacgctccgtcgcctgacagaatcgcggcgttcttcgtacccgcccatcctccgcggacgcccgctgccatggcgactctgctgcgccctgtcctccgtcggttttgcgggctcccgggcctacagcggcctgcggcagaaatgcccctccgggctaggagcgacggcgccggcccgctatactcgcaccacctccccaccttcccgctggaaaaagcgctgttggccgtcgtgttcct

SEQ ID NO: 112976 - DNA, 278 bp, Homo sapiens
gccacactgagttcactatcactgcttaacagacacaatggtgcacctgactcctgaggagaagtctgccgttactgccctggggggcaaggtgaacgtggctgaagtcggtggggaggccctgggcaggctgctggtggtctacccttggacccacaggttctttgagtcctttggggatctgtccactcctgatgctgttatgggcaaccctaacgtgaaggctcatggcaagaaagcgctcggtgcctttagtgatggcctggtcgacgcggccg

SEQ ID NO: 112977 - DNA, 313 bp, Homo sapiens
cggccgcgtcgaccccgagtttcccatcgcactgagccctgagatcctgctggaagctctcccgcagcatgagctccgcagccgggttttgcgcctcacgccccgggctgctgttcctggggttgctgctcctgccacttgtggtcgccttcgccagcgctgaagctgaagaagatggggacctgcagtgcctgtgtgtgaagaccccctcccaggtccgtcccaggcacatcaccagcttggaggtgatcaaggccggacccctctgccccaccgcccaactgatagcctcgttgaagtcgacgcgaaacca

SEQ ID NO: 112978 - DNA, 375 bp, Homo sapiens
ctggccacggccgagaagatcctcaatgggctcttctggtatttctcggcctgcgagaagtgtgtgctggcccaggtgtgcaaggcctggcggcgcgtgctgtaccagcccaagttctgggcaggcctcacgccggtgctgcatgccaaggagctctacaacgtgctgcctggtggcgagaaggagttcgtgaacctgcagggttttgccgccagaggcttcgagggcttctgcctggttggcgtctccgacctggacatctgtgagttcattgacaactatgcgctctccaagaagggtgtcaaagccatgagcctcaagcgctccaccatcacggacgcaggcctcgtcccgggcattccgcgcagggtcctc

SEQ ID NO: 112979 - DNA, 616 bp, Homo sapiens
ggaccttcttcgcaacgctccaggtcgtgaaggagcaacttcaccatcgccgcctacagacgccactgggagcttgggagagtgggacgtggacaggaacgtaaagaccgaagggtgggtttcgaaggagcggatttcgaagctgcaccggttgaggatggctgacattctctctcagtcagagaccctggcgtcgcaagacctcagtggggacttcaagaagccagctctgccggtgtccccagcggcgcggagtaaggccccggccagcagttcttcaaaccctgaggaggtacagaaggaagggcccactgcgttgcaggacctccaatttcttgggagcccgacatccctcctcctcagccggactgcggtgattttaggagtctacaggaggagcagtcgcgccccccgacagcggtttcttcccctggcggtccaggcccgggctcccccctaccaagagccttcatggggtgatcatgacacagacgcctacaggttacagacccttgaagacggtgctattcttgagacccgtagcttgaaagggacgagttactgccttttcgggaggctgtctggctgcgacgtgtgcctggagcacccttcggcg

SEQ ID NO: 112980 - DNA, 460 bp, Homo sapiens
tgcgaccgtccggaatttctcgggtcgacgatttcgtcaggcggcgcgcgtggactacatcgctccctggtgggtcgtgtggctgcacagcgtcccgcacgtcggcctgcgcctgcagcccgtgaacagcaccttcagccccggcgacgagagttaccaggagtcgctgctgttcctggggctggtggccgccgtctgcctgggcctgaacctcatcttccttgtggcttacctggtctgtgcatgccactgccggcgggacgatgcggtgcagaccaagcagcaccactcctgctgcatcacctggacggccgtggtggccgggctcatctgctgtgctgcggtgggcgtccgtttctatggaaacagcgagaccaaccatggggcgtaccagctgatgtactccttggacgatgccaaccacaccttctctgggatccgagctcttgtttccgggacg

SEQ ID NO: 112981 - DNA, 458 bp, Homo sapiens
tatttcgtggcgacggtcgcagcaaatccagctgctgctgcggcggctgtggcggcggcagcggcggtgactgaggatagagagccacagcacgaggagctgccaggcctggacagccagtggcgccagatagaaaacggcgagagtgggcgagaacgtccactgcgggccggcgaaagctggttccttgtggagaagcactggtataagcagtgggaggcatacgtgcagggaggggaccaggactccagcaccttccctggctgcatcaacaatgccacactctttcaagatgagataaactggcgcctcaaggagggactggtggaaggcgaggattatgtgctgctcccagcagctgcttggcattacctggtcagccggtatggtctagagcatggccagccacccattgaacgcaaggtcatagagctgcccaacatccagaaggtcgaagt

SEQ ID NO: 112982 - DNA, 457 bp, Homo sapiens
ggcacttccgggtcgacgatctcgtccggtgggcccgcggaggaaagatactggggagggggagccgcggtgttcagagcgatgattcccccacaggaggcatccgctcgacggcgggagaatgaggacaagctgaagcaggaggaggagactctgtccttcatccgagacagcctggagaagagcgaccagctcactaagaacatggtggctatcgtatcatcctttgagagccggcttatgaagctggagaactccatcatccctgtgcacaagcagacggagaatctgcagcggctgcaggagaatgttgagaagacgctgacctgcctggaccatgtcatcagctactaccatgtggccagagacactgagaagatcatcacagagggccccacaggtaggctggaagagtacctgggaagcatggtcaagattcagaaggcagtggagtatt

SEQ ID NO: 112983 - DNA, 421 bp, Homo sapiens
  misc_feature (1)...(421): n = a,t,c or g
gctttcgnnnnnacttgttagcccgcgtccggatgcgggtcacggcaccccgaaccgtcctcctgctgctctcggcggccctggccctgaccgagacctgggccggctcccactccatgaggtatttccacaccgccatgtcccggcccggccgcggggagccccgcttcatcaccgtgggctacgtggacgacacgctgttcgtgaggttcgacagcgacgccacgagtccgaggaaggagccgcgggcgccatggatagagcaggaggggccggagtattgggaccgggagacacagatctccaagaccaacacacagacttaccgagagagcctgcggaacctgcgcggctactacaaccagagcctacctggagggcgagtgcgtggagtggctccgcagatacctggagaacggga

SEQ ID NO: 112984 - DNA, 388 bp, Homo sapiens
cgccgagcggaggaggcaggaaccggagcgcgagcagtagctgggtgggcaccatggctgggatcaccaccatcgaggcggtgaagcgcaagatccaggttctgcagcagcaggcagatgatgcagaggagcgagctgagcgcctccagcgagaagttgagggagaaaggcgggcccgggaacaggctgaggctgaggtggcctccttgaaccgtaggatccagctggttgaagaagagctggaccgtgctcaggagcgcctggccactgccctgcaaaagctggaagaagctggttgaagaagagctggaccgtgctcaggagcgcctggccactgccctgcaaaagctggaagaagctgaaaaagctgctgatgagagtgagagag

SEQ ID NO: 112985 - DNA, 426 bp, Homo sapiens
cccatctggagcatttccaattctggttttgctgagcatcaggtctgagcttgtccggcgagggtgggagttggtcccggcggagatccagtgggaagagccggcggctgcccggtcaactcccccactggaaaggattctgaaagaaatgaagtcagccctcagaaatgaagatgactgcctgctggctttctgttgactggcccggagctgtactgcaagacccttgtgagcttccctagtctaagagtaggatgtctgctgaagtcatccatcatgttgaagaagcacttgatacagatgagaaggagatgctgctctttttgagccgggatgctgctataaatgcggtaccacctaatggcaggaaccttctggatatttttacggtgaaagaggtgtgctgtctgatcgtggacttgaccg

SEQ ID NO: 112986 - DNA, 471 bp, Homo sapiens
ggacgatgcgtacggcattccagggtcgagccacgcgtacgcgcacgctgaaagccaacagtatcattgtacttcccgtgctgctcatcttggagaaacaagcaactgtgatgggacagaaaggaggatcaaacggccgattaccaagtgaattttcccattttccacacggacataagggccggcactattctggacagaagggccagcaacatactgactccagaggcagtttttctattcaatacacatatcatgtagatgccactgatcatgaccagtcccgaaaaagtcagcaatatgatttgaatgccctacataagacgacaaaatcacaacgacatctaggtggaagtcaacaactgctccataataaacgggatggcagagaccatgatacatcaaaaggtcattttcacagggtagctatacaccatataggaggcaaagctcatctgggcacacaaaatc

SEQ ID NO: 112987 - DNA, 381 bp, Homo sapiens
  misc_feature (1)...(381): n = a,t,c or g
ccctcctctcctgcagctccagctttgtgctctgcctctgaggagaccatggcccggcctctgtgtaccctgctactcctgatggctaccctggctggggctctggcctcgagctccaaggaggagaataggataatcccaggtggcatctatgatgcagacctcaatgatgagtgggtacagcgtgcccttcacttcgccatcagcgagtacaacaaggccaccgaagatgagtactacagacgcccgctgcaggtgctgcgagccagggagcagacctttgggggggtgaattacttcttcgacgtanaggtgggccgcaccatatgtaccaagtcccagcccaacttggacacctgtgccttccatgaacaggcagag

SEQ ID NO: 112988 - DNA, 425 bp, Homo sapiens
ctttgaccaacggacttcttgggcgaaccacgcggccgggcaatcatgcgctttgcaatgaaatctcgtatgttacctcatgtccctgtgggacacaatgcccccgaggacttgaaagaggagattgatattcgactctccagggttcaggatatcaagtatgagccccagctccttgcagatgatgatgctatactactacaactggaaacccagggaaatcataggtgctacaactatctgtataggatgaaagctctggatgccattcgtacctctgagatcccatttcattctgaaggccggcatccccgttccttaatgggcaagaatttccgctcctacctgctggatctgcgaaacactagtacgccttttaagggtgtacgcaaagcactcattgtaaccctttttgatggctaatg

SEQ ID NO: 112989 - DNA, 382 bp, Homo sapiens
cgctcagactccatggggaaggtgaaggacggagacaacggatttggtcgtatagagcgcctggtcaccaaggctgcttttaactctggcaaagtggatattgttgccatcaatgaccccttcattgacctcaactacatggtttacatgttccaatatgactccacccatggcaaattccatggcaccgtcaaggctgagaacgggaaacttgtcatcaatggaaatcccatcaccatcttccaggagcgagatccctccaaaatcaagtggggcgatgctggcgctgagaacgtcgtggagtccactggcgtcttcaccaccatggagaaggctggggctcatttgcaggggggagccaaaagggtgatcatctctgccc

SEQ ID NO: 112990 - DNA, 388 bp, Homo sapiens
cgcaggagccgcagggccgtatgcaaccatggtgcccagccggaatggcatggtcttgaagccccacttccacaaggactggctgcggggcgtggccacgtgggtcaaccagccggcccgtatgatccgcagacgtaaggcccggtttgccaaggcgcgccggatcgccccgcgccccgcgttgggtcccatccggcccatcgtgcgctgccccacggttcggtaccacacgaaggagcgcgccggacgcggtttcaacctggaggagctcagggtggccgccattcacaacaaggtggcccggaccatcgacatttatgtggatccgaggaggcggaacaagtgcacggagtccctgcagaccaccgtgcaggggctgaaggagtac

SEQ ID NO: 112991 - DNA, 399 bp, Homo sapiens
aaatccaacgcctggctcggaacaacagcctctgaggtgtccctggtcagtgtcctttcacctggccacattcatggggaacatcttagccaacctcttcaagggcctttttggcagaaaagaaatgcgcatcctcatggtgggcctggatgctgcagggaagaccacgagcctctacaagcttaagctgggtgagatcgtgaccaccattcccaccataggcttcaacgtggaaaccgtggaggacaagaacataaccttcactgtgcgggacgtgggtggccatgacaagatccggcccctgtggcgccactacttccagaacacacaaggcctgatattcgaggtggacagcaatgacagagagcgcgtgatcgaagcccgtgaggagctgatgag

SEQ ID NO: 112992 - DNA, 433 bp, Homo sapiens
gagtactctagtgcggtgcaattcgatgtcacagcctccagcggtggctacagttgaaaccctcacaccacgcaagaagagtgtttcatcatgtcggacgatttcttatggtttgaaggcatagctttccctactatgggtttcagatccgaaaccttacgaagagcacgtgatgagttcgtgatttgggatgatgatgtaataatattgacttaccccaaatctggaacagactggttggctgaaattctctgcctgatgcactccaggggggatgccaagtggatccaatctgtgcccatctgtgagcgatcaccctgggtagagagtgagattgggtatacagcactcagtgaaacggagagtccacgtttattctcctcccacctccccatccagttattcccccagtctttcttcagttccaaggccc

SEQ ID NO: 112993 - DNA, 454 bp, Homo sapiens
  misc_feature (1)...(454): n = a,t,c or g
tggaagtgcggtggaatttcggcgaaagagaccannnagacgctgcgcacaacatgggcaaccacctgccgctcctgcctgcagagagtgaggaagaagatgaaatggaagttgaagaccaggatagtaaagaagccaaaaaaccaaacatcataaattttgacaccagtctgccgacatcacatacatacctaggtgctgatatggaagaatttcatggcaggactttgcacgatgacgacagctgtcaggtgattccagttcttccacaagtgatgatgatcctgattcccggacagacattacctcttcagctttttcaccctcaagaagtcagtatggtgcggaatttaattcagaaagatagaacctttgctgttcttgcatacagcaatgtacaggaaagggaagcacaagttggaacaacagcagagatatatgcctatcgagaaga

SEQ ID NO: 112994 - DNA, 403 bp, Homo sapiens
gccgttcgtctagtccagcgtggtggaattccgaataaaaacaagaaggagaaagaatcaccaaaagcagggaagagtggtaaaagttcaaaagaaggacaagacacagtagaatcagagcaaatttccgtcaggaaaaacagccttgttgctgtcccgtctacagtatctgctaaaataaaagtaccagtctctcagcccatagtgaagaaagacaaacggcaaaattcttcaaggtttagcgcaagcaataatagagaacttcaaaaactaccatccttaaaagatgttcctcctgctgatcaagagaagctttttatccagaagttacgtcagtgttgcgtcctctttgactttgtttctgatccactaagtgacctaaagtggaaggaagtaaaacgag

SEQ ID NO: 112995 - DNA, 433 bp, Homo sapiens
aacagtaagagcggcggaattagcttattcctgcgccggatcttcatcggcacaggggccactgagacgattctgcctccctctttcttcctccgctctttctcttccctctcgattagtttgcctggtagcttgaaaggagaaagcacggggtcgtcccaaaccccttctgcttctgcccatcacaagtgccactaccgccatgggcctcactatctcctccctcttctcccgactatttggcaagaagcagatgcgcattttgatggttggattggacgctgctggcaaaacaaccattctgtatagactgaagttaggggagatactcaccaccattcctaccattggttttaatgtggaaacagtagaatataagaacattcgcttcacagtatgggatgctgggggtcaaaatagaattaggcctctg

SEQ ID NO: 112996 - DNA, 469 bp, Homo sapiens
gcctcccttcggtacagccatcaggacggctgcgctgaggatctttgctcttccatccgcctttgatcgtctttctcttcagccatccaggtaagccaagatgggtgcatacaagtacatccaggagctatggagaaagaagcagcctgatgtcatgcgctttcttctgagggtccgctgctggcagtaccgccagctctctgatctccacagggctccccgccccacccggcctgataaagcgcgccgactgggctacaaggccaagcaagggtacgttatatataggattcgtgttcgccgtggtggccgaaaacgcccagttcctaagggtgcaacttacggcaagcctgtccatcatggtgttaaccagctaaagtttgctcgaagcccttcatccgctgcagaggagcgagctggacgccactggggggctcttagagtcctgaattcttactgtgatggggaa

SEQ ID NO: 112997 - DNA, 400 bp, Homo sapiens
  misc_feature (1)...(400): n = a,t,c or g
gtgtaaaagcagcgctgtaagaagcaacaacctctcctcttcgtctccgccatcagctcgggaggcgcgacgagcaaccatgcgtgatgcatctccatccacgttggccaggctggtgtccagattggcaatgcctgctgggagctctactgcctgggacacggcatccagcccgatggccagatgccaagtgacaagaccattgggggaggagatgattccttcaacaccttcttcagtgacacggtggctggcaagcatgtgccccgggcagggtttgtagacttggcacccacagtcattgatgaaggtcgcactggcacctaccgccagctcttccaccctgagcaacttatcacatgcaaggaagatgctgccaataactatgcccgagggcacn

SEQ ID NO: 112998 - DNA, 994 bp, Homo sapiens
cgtacctacaaggcacggttgaacacattcaagggtgtaagcgccccagggtggtgtcccattccttgggtccagtgtaaaagcgcgcccaaaggcatgaggctgtcttccctccatccttggaggcggccacaagtgctgctgtccgcagccatgtcctggactcggcacttatcagcacttttgagctgtcttctggggtcctggtaaaaaggattgctttgcctgcctgattcaagacaagggacccccttcccaacagcacctccgccccttgccgtgcaacccagtggtctccagtcaccccaccacatcgtcccctctgtaacctgacggtctccagttcccccaccaccttcccccagaacctgttggtctccagtccccaccccatcaccaccaactcccatctccccacttggaacccagcagtctcgtatctccatcagtgaggacagtgtgagaaatggtgtctggctcaggcacttggcagcagcttgaggggtcctcagatgtctcctgcccagcaaggatctgactaaagcagtcgtgggtgtgggaggggcctgcaggcatgcctggggttgggggcagctggccctgggcaccctggtgcaggtccagtctgccctctggatggcccctcctcttccccagattactactttgtaaccagggaggtgatgcagcgtgacatagcagccggcgacttcatcgagcatgccgagttctcggggaacctgtatggcacgagcaaagtggcggtgcaggccgtgcaggccatgaaccgcatctgtgtgctggacgtggacctgcagggtgtgcggaacatcaaggccaccgatctgcggcccatctacatctctgtgcagccgccttcactgcacgtgctggagcagcggctgcggcagcgcaacactgaaaccgaggagagcctgatgaaacggctggctgctgcacaggccgacatggagagcagcaaggagcctcgaaa

SEQ ID NO: 112999 - DNA, 462 bp, Homo sapiens
  misc_feature (1)...(462): n = a,t,c or g
tgatctgcttacgccntgcttggcacgaggatcatctgtttttagaatcttgaaagaattgaaattagttttctggctgattcccttcccttccttcctagaaaagacaactggcagtgcagagtttagcatttaatttgaaagataaagtcttttgtgaattatttcctgaagtcgtggaggtaagaaagacggaagtgggtttcgccttcccctgcgttaaaacacttgagtttcacctctttccaaagagtaaaatctgtgtcctgaagctgcagacctccccaggggatggctcctctcccccaggagccccgaggcaggggaggcagaaagcctgggctctggggggtggcctgcggacagctgtgctggtgggccgggggctgggcctgtcccacaggggcgtggagcctgtggttctgagcagccagctggggggtgtctggggatagctgggaa

SEQ ID NO: 113000 - DNA, 457 bp, Homo sapiens
  misc_feature (1)...(457): n = a,t,c or g
gctcgcttaggaaaacggaccgcngggagngcggtttncatggtattgctgggcgccggtttgatgagcctgtccagggggctgagcccaaccggggaagcgctggggcatccagaagattcctgactgttcaagaaccagaggcaaaagagacctggaagttccagcatggggacctgaaccccccacccagcctcatagttgggaaagtagccagcttgcctgccccatcaattgcagggatgcttaaggaaggccccgcccagtatgaaagctgaggattgcctctgctgaccctcagtctgctcccctgccctctacatctgccctcaggtgggtccatcatgcaatgctgagcactggggtggcgagcttcttctccctcaagtcggactcggcgcccccctggatggtgctggctgtgctgtggtgctccatggcacagacgctgctgctg

SEQ ID NO: 113001 - DNA, 410 bp, Homo sapiens
gggcgcgttcccggtggcggcgccctggactcccgggcccgcgcatccccgccagccttccttaaggcggatgggggggccccgagacctcgtcggacccatggtttccagtgcagcgcggagtgggcgatgccaacgtgccaggagccatgtctgtccaggacgtttggaagatcatattcatgccacaagctcttgtgaggagatgagttggtaaagagagaggctgggatgaatatgctgccaggagtgggcgtgtttgggactggcagctccgcccgagttctggtcccactgctgagggcaaaagggttcactgttgaggccctgtgggggaagactgaggaggaggcgaagcagcttgctgaggagatgaacattgccttttacgccaaccggactgatgactt

SEQ ID NO: 113002 - DNA, 412 bp, Homo sapiens
gcatgtacggagcactgccgcggggtggaaaacagagcgttggtagcatggggcggatggtggcttttcgggagatgtagtctggagctcataacgggggggtcagcaaaagcacaacatctggggaggagctagtagtccaggttcccgtagtggatgtgcaaagcaacaacttcaaggagatgtggccatccctcctgctagccataaagacagctaatttcgtggctgtggacacggagctgagtgggcttggggacaggaagagtttgctgaaccagtgcattgaggaacgttacaaggccgtgtgtcatgctgccaggacccgttctatcctttccctgggcctcgcctgcttcaagcggcacgcagacaagggtgaacattcctatctggctcaagtgttcaatct

SEQ ID NO: 113003 - DNA, 416 bp, Homo sapiens
tacgattcactgccgcgtgactgggaaaacagggtcatacactttaaactttccggcctgaccttgggtgggaaagcgaggggggtaaaaatttacacacgggacgcctttggccctggcgaagggataacttttcctttcagacagaggaacaaagcggccctgccaatatgcccctccaccagatttccgtaaacccagcacgggagactgccagcaatgggagaaattcaatgggcagaaacaaagagaagaacaaggaagtcgagaatgaaaaatccccagggcgatctgcaagtcgatcaagtaacatttcaaaaaatctgtcactgcgaaggggatgaagagagccccctcatcacaccctgtcgctgcactgggacactgcgctttgtccaccaagtcttgcttcaaca

SEQ ID NO: 113004 - DNA, 425 bp, Homo sapiens
gcgttggacatgctactggtactggcccacgggaccgggaaaacatctgcaccactgcccgtacccttacccttccctccacctgcttgctaccccactcttgaaaccacaggtgttggcaggggccccagcttatgccagcctcatctactttcttgctagcccccaaagggcctccaggcaacatggggggcccagtcagagagccggcactctcagatgccctctgggtgagttggggggcagctctgggggccggggcttgcgccatggctctgctgacccaacaaacagagctgcagagcctcaggagagaggggagccggctgcaagggacaggaggcccctcccagaatggggaagggtatccctggcagagtctcccggagcagagatacgatgccctggaagcctgggagaatggc

SEQ ID NO: 113005 - DNA, 472 bp, Homo sapiens
  misc_feature (1)...(472): n = a,t,c or g
accgtaggactatgcttacggatatactggcacgacggcatggnaaaacaaaaactacccctaaaagccaaaatgggtataggttaagactcatatcaacattgtcgtcattggacacgtagattcgggcaagtccaccactactggccatctgatctataaatgcgggggcatcgacaaaagaaccattgaaaaatttgagaaggaggctgctgagatgggaaagggctcctttaagtatgcctgggtcttggataaactgaaagctgagcgtgaacgtggcatcaccattgatatctccttgtggaaatttgagaccagcaagcactatgtgactatcattgatgccccaggacacagagactttatcaaaaacatgattacagggacatctcaggctgactgtgctgtcctgaatgttgctgctggtgttggtgaatttgaagctggtatctccaagaatgggcagact

SEQ ID NO: 113006 - DNA, 437 bp, Homo sapiens
atgcaacgccattttggtcgaggccacccccacaatctgacccccaccaactgcagctgatggcccatctcctcgctggagagcgatgcggccaagccagcggaggcccccgacgctcccgaggcgggcagccccgcccattggcccagggagagcctggttctgtaccactggacccagaccttcagctcgcaaaaagtgcggctggtgatcgccgagaagggcctggtgtgcgaggagcgggacgtgagcctgccacagagcgagcacaaggagccctggttcatgcggctcaacctgggcgaggaggtgcccgtcatcatccaccgcgacaacatcatcagtgactatgaccagatcattgactatgtggagcgcaccttcacaggagagcacgtggtggccctgatgcccgaggtgggcagcctgcagcacgc

SEQ ID NO: 113007 - DNA, 491 bp, Homo sapiens
  misc_feature (1)...(491): n = a,t,c or g
nnnnnnnnnnnnnnnnnnnnnnnnnnnngactgtggaaacatgcttggcctgcgcacccggacctagaagccgggacgagccggggcagaccaaggcgcgcggaagtctgaaggtgccctccagacacggccccgatgactgaactacagcaagatgtggaagacacaaagcctgcgaaagtgctcgggaagagggagagcaaacttggctcagcccactcagaggctgagaatggtgtggaggagaaaaagaaagcctgcaggtcgccaacagcccaatcccctaccccatctgtggaggcggactccccagaccagaagaaaatcattagcctatggtcaaaatccagttttgatggtgcctctttagcaagtgataagaacgactgtaaaacagaaagcaaaaatgaccctaagactgaaagaaaaaagtcttcatcttccagccagtacaaggccaatatgcactttcacaagttgtttcttagtgn

SEQ ID NO: 113008 - DNA, 442 bp, Homo sapiens
tcatcctacgcatgcttggccgagggactggaataactctctgccccactacctgggcgctctggagcgtttgttctacccccgggccaggatggtcctctggggtgccacggaccacaatgtggacaacaccacatagatgctgcaggagtggctggcggctgtgggcgatgactatgctgctgtggtctggaggcctgagggcgagcccaggttttacccagatgaagagggtcccaagcactggaccaaagaaaggccccagtttctgatggagctgaaacacgaagccctcacctttgccaggaactggggggccgactatatcctgtttgcggacgcagacaacattctgaccaacaatcacactgtgcggcttctcatggagcaggggcttccaccagggggcccagtgctggactccccgacctactactcctgc

SEQ ID NO: 113009 - DNA, 457 bp, Homo sapiens
gcgattacagtttcgacctgattacggttcctggccgagggaatgggagaacagaatccgggagcgagcccaggcggctgtcttgattcccttttggccagcagtttttaggcctgtcagtactgcactgcaagaatggcagattttgggatctctgctggccagtttgtggcagtggtctgggataactcatccccattggaggctctgaaaggtctggtggataatcttcaagcgttaaccggcaatgagggccgcgtgtctgtggaaaacatcaagcatctgttgcaatctgcccacaaagaatccagctttgacattattttgtcaggtttagtcccaggaagcaccactctgctcagtgctgagattttggctgaaatcgcccggatccttctgcctggtggatgcctttttctgaatgaaccagtagagaccgctgtatataacaatatcc

SEQ ID NO: 113010 - DNA, 406 bp, Homo sapiens
acggagggtcagtgaaacacttagagcagtttctggcacatggtagaattgtgctatttgctgaagcttcttggtggcccttgctagcccaggaagaaacttacattttgatttttttgtaccatggctttggttcacaaattgctgcgtggtacttattttctcagaaaattctctaagccaacttctgccttgtatccatttttgggtattcgctttgcagagtattccagtagtcttcagaaaccagtggcttctcctggcaaagcctcctcacagaggaagactgaaggggatttgcaaggagatcaccagaaagaagttgctttggatataacttcttctgaggagaagcctgatgttagtttcgataaagcaattaaagatgaagcaatataccattttt

SEQ ID NO: 113011 - DNA, 406 bp, Homo sapiens
  misc_feature (1)...(406): n = a,t,c or g
gatacgccagcttggccgaggctgagacaccaaccatgtggacccaaggagctgtgtgattactttgtggaccacatgggtgactatgaggatgtcctggcctccctggagaccttgaatcactctgtcctgaaggccatgggttataccaagaaggtatatgagggtgggagcaacgtggaccagtttgtgacccgcttcctcctgaaggagacggccaatcagatccagtcgctgctgagctcaatggagagtgcggtggaggccatcgaggaacagaccagccagctccgacagaaccacatcaaacccagccacagcgcggcacagacctggtgtggaagccccactcccgcctctgcccccaaccacaagctcatggctatggaacaaggcaagacccttn

SEQ ID NO: 113012 - DNA, 456 bp, Homo sapiens
gatgcaatgctgacgccattctggctgagggccggggccgatgggcccgcctggccctgggcgccgcgccgcacgagcacctacctagagccaggactgaagcttcaagatggctgaccaggaccctgcggtcatcagccccctccagcaaatggtggcctcaggcaccggggctgaggttacctctctcttcatgacacccctggacgcggtgaaggttcgcctgcagtctcagcggccctccatggccagcgagctgatgccttcctccagactggggagcctctcctataccaaatggaagtgcctcctgtattgcaatggtgtcctggagcctctgtacctgtgcccaaatggtgcccgctgtgccacctggattcaagaacctacccgcttcactggcaccatggatgccttcgtgaagatcgtgaggcacgagggcaccaggaccctctg

SEQ ID NO: 113013 - DNA, 458 bp, Homo sapiens
  misc_feature (1)...(458): n = a,t,c or g
atgacatgctgacgcccttctggctgagggcccgngacaagctgggcacgagggcgtgatgtctcacagaaagttctccgcttccacacatgggtccctccgcttcctgcctcggaagcgcagcagcaggcatcgtgggaaggtgaagagcttccctaaggatgacccgtccaagccggcccacctcacagccttcctgggatacaaggctggcatgactcacatcgtgcgggaagtcgacaggccgggatccaaggtgaacaacaaggaggcggtggaggctgtgaccattgcagagacaccacccatggtggttgtgggcattgtgggctaccaggaaacccctcgaggcctccggaccttcaagactgtctttgctgagcacatcagtgatgaatgcaaaaggcgtttctataagaattggcataaatctaacaagaacgcctttaccaagcact

SEQ ID NO: 113014 - DNA, 353 bp, Homo sapiens
tgcacgaggctgcgcgctgccatggagcccgacgggacttacaacccgcacttcctggggattcgcttctgccaggaatgtaccgacatgctgtaccccctggaagaccaggagaaccgcattctgctctacgcgtgccggaactgggattaccagcaggagggcgacaacagctgcatctatgtcagcaagatcacgcacgaagtggacgaactgacccaaattatcgccgacgtgtcccaggaccccacgttgccgcggaccgaggaccacccgtgccaaaagtgcggccacaaggaggctgtggtcttgcagtcacacagtgcgcgggccgaggacgccatgcgccttta

SEQ ID NO: 113015 - DNA, 436 bp, Homo sapiens
accatgttttccattctcacgcgccatggctaagaatgtgctgttaacagacgaggatgcctacattggaagccacacggtgctggagctgttggaggctggctacttgcctgtggtcatcgataacttccataatgccttccgtggagggggctccctgcctgagagcctgcggcgggtccaggagctgacaggccgctctgtggagatagaggagatggacattttggaccagggagccctacagcgtctcttcaaaaagtacagctttatggcggacatccactttgcggggctcaaggccgcgggcgaggccgcgcataagcctctggattattacagaaataatctgatcgctaccatccatcttctggacatcttgaatgaccgcctgttggccaacctgggggttccctagttctgcggccgggaccgg

SEQ ID NO: 113016 - DNA, 440 bp, Homo sapiens
atacgccagcttggacgaggcccagcaccaagtccgcttccaggctttcggtttctttgcctccatcttgggtgcgccttcccggcgtctaggggagcgaaggctgaggtggcagcggcaggagagtccggccgcgacaggacgaactcccccactggaaaggattctgaaagaaatgaagtcagccctcagaaatgaagttgactgcctgctggctttctgttgactggcccggagctgtactgcaagacccttgtgagcttccctagtctaagagtaggatgtctgctgaagacatccatcaggttgaagaagcacttgatacagatgagaaggagatgctgctctttttgtgccgggatggtgctatagatgtggttccacctaatgtcagggaccttctggatattttacgggaaagaggtaagctgtttggcgcg

SEQ ID NO: 113017 - DNA, 417 bp, Homo sapiens
gggtgaaagaatcattttcccctgtgtggaagacacttagcggcatatttaaattataagtccacggatcaaaaagctttttgatttcccaaaggagggacataccactatatcagataagcttgacattacagccaagatggtgctgtcccagagacaacgagatgaactaaatcgagctatagcagattatcttcgttcaaatggctatgaagaggcatattcagtttttaaaaaggaagctgaattacatgtgaatgaagaattaaataaaaagtatgctgggcttttggaaaaaaaacggacatctgttattatattacagaagaaggttatggaattagaatcagagctagatgaagcaaaagaagaatttacgtcaggtggacctcttgggcagaaacgagacccaaaaga

SEQ ID NO: 113018 - DNA, 404 bp, Homo sapiens
cgccctgcaggaattcggcacgagggcagcccgagccgccgccgtcggtgtcgccgccaccaccaccatcggagtcacgagtcccgcgtctgtccgaagtcgccgctctcgggctgctcacgtctcttcggagagcgcgcacatggcgactcaggcgcactccctcagctacgcagggtgcaacttcttgcgccaacgtctggtcctgtctaccctgagcgggcgccccgtcaaaatccgaaagattcgggccagagacgacaacccgggcctccgagattttgaagccagcttcataaggctattggacaaaataacgaatggttctcgaattgaaataaaccaaacaggaacaaccttatattatcagcctggcctcctgtatggtggatctgtggaacatg

SEQ ID NO: 113019 - DNA, 439 bp, Homo sapiens
  misc_feature (1)...(439): n = a,t,c or g
cctcgctnnnnnnntcggcacgaggctgagccagcgacgccctccattcactctacgcgcccgttctccggctgtactcccgttccgctgcccgccctgccaccatgaaggaacaggccatctacttcgccaaagacttcttggccggaggcatcgccgtcgccatctccaagacggccgcggctccgatcgagcggaccaagctgctgctgcaggtccagcacgccagcatacagatagccgccgacaagcagtacaagggcatcgtggactgcattgtccgcatccccaaagagcagggcgtgctgtccttctggaggggcaaccttgccaacgtcattcgctacttccccactcaagccctcaacttcgccttcaaggataagtacaagcagatcttcctggggggcggggacaagcacacgcagttctggaggtc

SEQ ID NO: 113020 - DNA, 435 bp, Homo sapiens
  misc_feature (1)...(435): n = a,t,c or g
ctgcctcnnnnatctatcgaggcggagactcgctgaggcgagttgcacttctaattgggcgtgaggtcttgtcaatccccaagttcttccaatcagaagtccggtccatccagccttccgctccccattggcctgtgtggaggaagaggggtgggtaagccgaagtcgctgcgctcagtgcgcaggcgcgaagaagctggcaggggcacgagccgggggcggggttgaagacgcgtcgttgggttttggaggccgtgaaacagccgcttgagtttggctgcgggtggagaacgcttgtcaggggcccggccaagaaggaggcccgcctgttacgatggtgtccatgagtttcaagcggaaccgcagtgaccggttctacagcacccggggctgcggatgctggcactgtcggaccgggacgatcattctggcgcc

SEQ ID NO: 113021 - DNA, 420 bp, Homo sapiens
gccgaggatatgttgtgatggcggctatagctgcatccgaggtgctggtggacagcgcggaggaggtgtccctcgctgcggcggcggagctggccgctcagaagcgcgaacagagactgcgcaaattccgggagctgcacctgatgcggaatgaagctcgcaaattaaatcaccaggaagttgtggaagaagataaaagactaaaattacctgcaaattgggaagccaaaaaagctcgtttggagtgggaactaaaggaagaggaaaagaaaaaggaatgtgcggcgagaggagaagactatgagaaagtgaagttgctggagatcagtgcagaagatgcagaaagatgggagaggaaaaagaagaggaaaaaccctgatctgggattttcagaatatgctgctgcccagttacgccagt

SEQ ID NO: 113022 - DNA, 448 bp, Homo sapiens
gcctgtggccagtccaggcgcccgctagcttcggcggcgacccacacggggaaagcggaaggaatgtcgcgtgcaagcatgcagctggtgtggaagaatggcggtgagccattcagtgaaagagcggaccatctctgagaacagcctgatcatcctactgcagggcctccagggccgggtaaccactgtggacctgcggtatgagagcgtggcccacggacgcatagacaatgtcgatgctttcatgaacatccgcctggccaaagtcacctactcggaccgttgggggcatcacgtcaagctggatgacctctttgtgacaggccgcaatgtccgctacgtccacatcccagatgacgtgagcatcacctcgaccattgagcagctgctgcagattatccatcgggtgctacactttggtggcaagggcccagtgcggggggaattt

SEQ ID NO: 113023 - DNA, 453 bp, Homo sapiens
ctcgctgaggaattcggcacgagtcttcggagaggtggtgaaggcgccgtgccgagctgggactgaggacgaagaggaggaggaggaggggcggagggagacgcccgaggacagggaggtgcgtctgcagctggcgcggaagagggaagtgcggctccttcgaagacaaacaaaaacatctttggaagtttctttgctagaaaaatatccgtgctccaagtttataattgctataggaaataatgcggtagcatttctgtcatcatttgttatgaattcaggagtctgggaggaagttggttgtgctaaactctggaatgaatggtgtagaacaacagacactacacatctgtcctccacagaggctttttgtgggctttatcatctaaaatccaatcccttcggttttctctgtcagtgcagttgctatgttgcaaaagatcaacagtatcg

SEQ ID NO: 113024 - DNA, 418 bp, Homo sapiens
attcggcacgagcgccgttgggcaccacgctcggagaaggacaggacaatggcggccttagggtccccgtcgcacacttttcgaggacttctgcgggagttgcgctacctgagcgcggccaccggccgaccctatcgcgacaccgcggcctatcggtaccttgtgaaggcttttcgtgcacatcgggtcaccagtgaaaagttgtgcagagcccaacatgagcttcatttgcaagctggcacctatatctgcctcctgcgtagcatacggagacatgtggccctacatcaggaatttcatggcaagggtgagcgctcggtggaggagtctgctggcttggtgggtctcaagttgccccatcagcctggagggaagggctgggagccatgaacatggagaatatccttggatgctgcat

SEQ ID NO: 113025 - DNA, 2144 bp, Homo sapiens
  misc_feature (1)...(2144): n = a,t,c or g
acagtaccatgcttacgccaatcttggcacgagggagcccggctgcggatctgggaagcgcctcttcacggcactggggatccgcatctgcctggggatcatcaagccctagaagctgggtttctttaaattagggctgccgttttctatttctccctcgggctgcggaaagccagaagattttatctagcttatacaaggctgctggtgttcccctctttttttccacgagggtgtttttggctgcaattggcatgaaaatcccaatggtggtagaccacgtggcgatggatctaggagtttaccaacttgagacatttttcaatttctttcttgtcatccttgctgggggactgaaaaccgctttctgtgagacttgataatagctcctcttggtgcaagtgtgggtagctatttgacaacaaaattcggagcaagctatgggatctagttgaaaagccattttgatgttatggcggtcagagaaggaagtgggaggtcctcaaaggggcaaatcaaagaacctaatagagaaaaattcccagcttgagcaggagaacaatctggctgaagacactggccagtccttgagcagctttgcccagtttcaggcccaactgcaaactggctttcccccctgccacacacccatccacagggcaccacacagccccccgcccagccaggcattcgcagggcttcagggaccaaccgcattagcttgccttattgcccccgcaggaactggctgttgcgtgttgaacttgaacagacggagaagatgtgctagggagaatctgcctccacagtcacccatattcattgctcgctgcgaaagagacgtgagacctgacatatgccattatctcttttccagtattaaacactcatatgcttatggcttggagaaatttcttagttgggtgaattaaaggttaatccgagaattagcatgggatataccgggacctcatgcagcttggcaggatatctgaggaaatgggtttaattcatgctcagggagctgtgtgccttttccatcccttccgggctccctaccccttcacttccaaggggttcttcttctcctggcttgcgcttaggtgtcctacatggggggttgtgaagcgatgggagcttcctcactgggactcgcctctctcctctcctccccccaaggaaggaacttggaaaagggaggggtaaaaagactaaaatgaggggggaaccagagtttcactggtacaaattttgacaacttgtcacccaaaattccataaaaaacaaatagtactgtgcctcctttcttctcaaaacaatgggatgacaccaaacttatgagagtgacaaaatgggtgacaaggtaagctgggacctaggcttatcttacccatgaaggttgtttttgctttattgtatatttgtgtatgtaggtgtaacctatttggtaccaatagagggactgtaacctacctattttagggttgtaccagattggaaaatttaggttggtttccaattggcctggtctggagggagggtgtgggacctttttattattattagatcttaccattaaaaactgcttaccatgacaaaaacccacaccctaaaggaaattttcaagaatttggncaccagttacctcacttttgtgtaatcctgaaatcctagcctgcctgaatacggctggaggtaaatccttggttccactggaagtctttccaattggagcctgggttggaatacttttggaaaaatgcctcagttcctaactaaatgaaatggattttcccaagtaggggttttctgcatatcaccctggtatagtaagttatatgccatatgttttctgtgcatgttcttctacacaattgtaagggtgtcactggtattttaacttgttgcacttgtcaactttccaataaagtcatataaatgttgataaacaagtgtttttcatatgaccctgttaacataatggcagtcatttccacaactgtttccaggtaaagttaacaatttgactagtaaaatcctgaagggcagtgggaatgattgggaaaagtaggggggcgtgatttgactgcatggaaggtaaaagggaaattgacacattgagttgttcagcaggtaagagaaga

SEQ ID NO: 113026 - DNA, 759 bp, Homo sapiens
  misc_feature (1)...(759): n = a,t,c or g
gcggcccttttcaaacactgtcaggggttgcgtcaccggcaaatgcagcagtgctatgagatccctcttggggtctcgccatcttaagaatcctagtacttttcctctggagaagagctagcgattttactgggaacagcaagaagctgactggtaaataaatttgaggannnnnnnnnncccttaacgccctccttccctgtttctggcaaacccagtggtgtgaaggcaatgagtcaccagcaagaaacacatgcctttccccgtagcagggggctcccgaagcaccctgccggccctgaggctcccaatagagccaagaggaggaggaggaggcagggggagggagcgtggtcttcaggaaggtggtgaacactgggagtcacagatcagcacgctacacacacccacactcacgtatgtgcacaccatacacacagcacgcacacacacaccccgagctctaggccctacgtctaacacacagcgaagacacagcaaaaggctacaacgagcactagcgcgcccacacctagcaagcacacagccccagctcagcccctcccgctggggcctggcccagccacacgctacaaaattaaaaatatatcaaatatacaatgaaaatagatctgtacagcactgaggatgaaaatagtccaccagccacagtataatattgggtttgtcatttaacagcatttacacccacatgtacagagtgaatatacaatagaaacagaatcctcgtgccaagca

SEQ ID NO: 113027 - DNA, 455 bp, Homo sapiens
accatgcttacgccattcttggcacgaggggttcttggttgtggatcgctgtgatcggcacttgactttgcatttcttcgtgaagactctgactggtaagaccatcgccctcgaggttgagcccagtgacaccatcgagaatgtcaaggcaaagatccaagataaggaaggcatccctcctgaccagcagaggctgatctttgctggaaaacagctggaagatgggcgcaccctgtctgactacaacatccagaaagagtccactctgcacctggtgctgcgcttgagaggggggatgcaaatcttcccgattacactcactagaaagaccattgcccttgacgtggaacccagggacaccattcccaacgtccaagcaaagatcctttactgggaaggcattgatcctgacagcaaaaggtgaacattgcgggaaggcaaatggcctaaggccg

SEQ ID NO: 113028 - DNA, 1530 bp, Homo sapiens
  misc_feature (1)...(1530): n = a,t,c or g
tgcgggggcaattcccagagcctgtgctgaggtccagggagtgtggagagctcctggtgtcgaggactgagactgttaggttagccccctccatctggcccccttccctttccgcactgtccgctttgtgaggctcagaggaaggacagtctgtatgttctgtctaggaggtccatccccagcaaatggtttggaggtccccccagagagcagagtgggccatggcagaagtagggggttggttggacctgtcacatgaaatggatcagcacttgaatggggagaagtggagggagaggccctgggcctgtcgcctgcggggaaatcttttatggaagaagggctggacccactttacctgcagtttcttcccagctcgggcagatggcagaagggaccccttggactttttctcgccatccctccccccagcgcaggggcacaagctgagcttgtaaaagcccacagatgttgggggctggagaaggggcatgagagcatcacactcagccccagcctcctcaacctcttggggccccgtgatggggaggagagggcaggtgcggtgaggctctggccttccttggtgccccgccctttgtttgcactattggacttatgagtgccgagggtggggagatggagctgcccgactcannnnnnnnnnnnnnnnnnnnnnnnnnnnnnnnnnnnnnnnnnnnnnnnnnnnnnnnnnnnctgcctgtctctctcctcctggacccagggcagccaagggcagggataggcgcagtggtcatatgaagcagcgccagagaggggacctcccagctcttatttgcaccctccccacctcaccaactttggtccctctctgggggcatgaatggttaacaaacaccagagcagtactccaatattggagagtctctgggggcagcagggctttgaagcagggtagtatcctgccttccctcccctgaccccacatgggctcagggcccccttagggccccctaccccactgatagcttcctccttctctggcacaaggggagccccagggcttgggggagggcgtaaggtggggggaaatgccactgcttttagcaaaagcctccctcccagaattagccagcttgcctcctgcaccccacccccaccaaccaggggagccactaagctgactaacaactgtcccctcacccaccagctatttccccagggaagagtgggcaattctcaccttcagagagtccccgcctgcccaggcctttggcacagaggctgagtggacagtcaggagagaggcgagaggcaaggcgaagcctgtgtccctgtttcagttgcactggggttggagcccagggtaggggtttccagcttccccagggctccggccttgtcagtctctttgcatgtgtggatttttctgtgtgtgtttctgtttgggtttttgttgttgggnnnnnnnnnnnnnnnnaataaagaaaagaagatgttgtttatttttgcaacgacagacacggagggcaaatattttttgggtgg

SEQ ID NO: 113029 - DNA, 1280 bp, Homo sapiens
ctcatgtgacaagttccaatttcttttcaagtcaattgaactgaaatctccttgttgctttgaaatcttagaagagagcccactaattcaaggactcttactgtaggagcaactgctggatctatcacaatagaaacggctggtttgtgtgctcttggtgtgctcctctgcaggggcacagttgcataaagatcctaccctggatcaccactggcatctctggaagaaaacctatggcaaacaatacaaggaaaagaatgaagaagcagtacgacgtctcatctgggaaaagaatctaaagtttgtgatgcttcacaacctggagcattcaatgggaatgcactcatacgatctgggcatgaaccacctgggagacatgaccagtgaagaagtgatgtctttgatgagttccctgagagttcccagccagtggcagagaaatatcacatataagtcaaaccctaattggatattgcctgattctgtggactggagagagaaagggtgtgttactgaagtgaaatatcaaggttcttgtggtgcttgctgggctttcagtgctgtgggggccctggaagcacagctgaagctgaaaacaggaaagctggtgtctctcagtgcccagaacctggtggattgctcaactgaaaaatatggaaacaaaggctgcaatggtggcttcatgacaacggctttccagtacatcattgataacaagggcatcgactcagacgcttcctatccctacaaagccatggatcagaaatgtcaatatgactcaaaatatcgtgctgccacatgttcaaagtacactgaacttccttatggcagatatagatgtcctgaaagaagctgtggccaataaaggcccagtgtctgttggtgtagatgcgcgtcatccttctttcttcctctacagaagtggggtctactatgaaccatcctgtactcagaatgtgaatcatggtgtacttgtgggtggctatggtgatcttaatgggaaagaatactggcttgtgaaaaacagctggggccacaactttggtgaagaaggatatattcggatggcaagaaataaaggaaatcattgtgggattgctagctttccctcttacccagaaatctagaggatctctcctttttataacaaatcaagaaatatgaagcactttctcttaacttaatttttcctgctgtatccagaagaaataattgtgtcatgattaatgtgtatttactgtactaattagaaaatatagtttgaggccgggcacggtggc

SEQ ID NO: 113030 - DNA, 396 bp, Homo sapiens
  misc_feature (1)...(396): n = a,t,c or g
aaatatcttggcatcttgtggtcaccattttactctttacttcaatgagatttgttatttatactttaagtgtaggtgaaatcgtgaaatactaannnnnnnnnnnnnnnnnnnnnnnnnnnnnnnnnnnnnnnnnnnnnnnnnnnnnnnnnnnnnnnnnnnnnnnnnnnnnnnnnnnnnnnnnnnnnnnnnnnnnnnnnnnnnnnnnnnnnnnnnnnnttacttattaggggttgagtgttgcaaacaacatagaagtgcaaactttccttcattgggattttattcattttggatgtatatttaatagtgcaattgctgtattatatggtagtttgattttaaattttttttgaaaaatctctcttttgttttccaaaagggcttgcctcattt

SEQ ID NO: 113031 - DNA, 2734 bp, Homo sapiens
cgtccctctttctccaccccgccgagcctaaactagtgacggggagggagacgggatagtgtttctgtttccgtggtctttgaatccacaacctctagtctgaacacagagaacacaaatttgtcgattacttcaggaagcccagggggaaccgcgccccgctgaagggctcggggaaggcgcgctcccgcgtcccgccccctcctcccccagcactcacactgtggtagcggcggagggcggagggatccggaggcggcggagggagacgtcattgcagggttgtttgtcagtctcggcggcggcggcggcggcggcggcggcggcggcgatccacagtgattcggccgccgcccaggggggagggggggctgcgcgggacttttttttttttcagactgaccgtaggggcagctgcggacgatgtcgaccccggcccggatgaggctcatgcgggatttcaagcggttacaagaggacccacctgtgggtgttcagtggcgcaccatctgaaaacaacatcatgcagtggaatgcagttatatttggaccagaagggacaccttttgaagatgggtaccttttaaactagtaatagaattttcggaagaatatccaaattaaaccacccaactgttagggtttttatccccaaaatgtttccatccccaaatgtgtatgcctgatgggtaggcatatgtttaagatatcccttcaggaatcgatgggagtccccaacatgatggatgtatccttcctatccttaaccatccaattccagtcctcctggctgggatggaacccgaatccctaacagtcccagcccaataggccggggaggcacagttttattcagggaaaacaaacgagaattatgagaaaagagttttcggcccattgttgaaccaaagctggaatggattcataatagacaactgggtctgttaatccttttcatcattggttgggtataattttacctctcatttagaaagggctaacaaatttttaagtgccacaggttttaaggattctgcggaaaaaaaaggaaaaaagtccttcagtttaggaacctacaaaagcttgtgtatcttgattaatgtactttttattgcatgggtgtggagctaagttattgctggcataaatttgttaatatatcctgtttgtatttttttcccagtgtataatgttgggtgtggggagttttccaggacaggattataccacattttgtaaaatctgtactttttttcaaatattgaacgccttatttttcgaatcctttaaatttttaattcggagaaaagcacttaaagttttttatatatgaatattacatgtaaagctgttaaaatacataacttcagtgcaagagactttgtcacttatttccttatgtgtgtaggggggggttaataagtctctagctctccatctatttgatagtttcatttacaatttcaaaagaaccatcctaatatttaaccaaggagtcctccaaatttgattcctaaatagcgattataaatctccaactttattttggaatgtacctctattagtttcaattgaggtaattctaagacataactggtttgactctgtccaactctgtatttaggcccataggttacagtttcttccagccatcactaactgataaaactgtaccttttgcgatttcacaagttgggcaccttcctgccatgaggcagaggaactgatgtcgacttgttttgctggcttgggtagcccctttaaaaaatttttttggattaatggagggaaggtaaaacccataaaacatttgcccaaaaattccatgcccccagtattaggcaatggaattaggttgcattggtttgagaaaggcacatattggagggaaatcttggtgtaacttaaatatttgaaaattacctttaatgcaatggcaaaacctgtttattctgggaaatgttttaatgccagggcctgctgagttgcttcttcttgtggagatttttttttttaatctcctgagttgtataaaagttgtacttgcatcttagtttactggataaatttaaaacacagtattgtagaaagctaatacaaaactatcctatgaccttcaatcgctatagaacatggaacatactgaagttaattctgttgaaccacctgtgtagtctctctagtagttaaaacagcctatcttagtaaccccaagagtttcttctcatatccataaaaatggattgccagttatggcaaatatcctacagccttcctattccattatgccaaacgtttaaacattgaattgggataaaaatgccttaataggctgggccccaggtggctccccaccctgtagtcccccagcacttttgggaggcaaaaaggcgggggggatcacttgaaggcccaggactttgaagacccaagccagggcaaccataaataaagacttttctctactttaaattttttaaaaaaattagttgggcatagtggcacttgcctgtagtctcagctacttaggaggctgaggtggcagaatagcttatgcctaggaggttgaggctgcagtgagctgtgattatgccattgcactccagcctgggtgacagagcaataccctgtctttaaaaataaaagctattacttggcaaaaaattccgcactatataattcgcacacattaattagggtttatgtaccatacaaaaaaaaattaattagggct

SEQ ID NO: 113032 - DNA, 1336 bp, Homo sapiens
tcaaaatgcctgtttacatcctgggacagctttagaccatggcataagagaagacccatgtgcatgacgcccctggctctgcaggtagattggccactgctgtttctggcagtctgaattcccctaccccaagctgtataagggagcgagccttgtgctgcatggaatcatcatcaccgtgaccctccctttccaccctgaactcatcagtctctctctgtttcaggataggatttttgggccttggtctcatgggaagtggaatcgtctccaacttgctaaaaatgggtcacacagtgactgtctggaaccgcactgcagagaaatgtgatttgttcatccaggagggggcccgtctgggaagaacccccgctgaagtcgtctcaacctgcgacatcactttcgcctgcgtgtcggatcccaaggcggccaaggacctggtgctgggccccagtggtgtgctgcaagggatccgccctgagaagtgctacgtggacatgtcaacagtggacgcttgacaccgtcacttgagcttggcccaggtgattgtgtccagggggggggcgcttttctggaagcccccgtctcagggaatcagcagctgtctaatgacgggatgttggtgatcttagcggctggagacaggggcttatatgaggactgcagcagctgcttccaggcgatggggaagacctccttcttcctaggtgaagtgggcaatgcagccaagatgatgctgatcgtgaacatggtccaagggagcttcatggccactattaccgaggggatgaccctggcccaggtgacaggccagtcccagcagacactattggacatcctcaatcagggacagttggccagcatcttcctggaccagaagtgccaaaatatcctgcaaggaaactttaagcctgatttctacctgaaatacattcagaaggatctccgcttagccattgcgctgggtgatgcggtcaaccatccgactcccatggcagctgcaccaaatgaggtgtacaaaagagccaaggcgctggaccagtccgacaacgatatgtccgccgtgtaccgagcctacatacactaagctgtcgacaccccgccctcacccctccaatcccccctctgaccccctcttcctcacatggggtcgggggcctgggagttcattctggaccagcccacctatctccatttccttttatacagactttgagacttgccatcagcacagcacacagcagcacccttcccctgaggccggtggggaggggacaagtgtcagcaggattgggcgtgtgggaaagctcttgagctgggcactggccccccggac

SEQ ID NO: 113033 - DNA, 422 bp, Homo sapiens
cgacccacgcgtccgtcttttttgaaaaactagaaaaatgagtcaaaattttttggtctgatacttaggatatatagattaatgatggcgtcctatgttttggtgagactgtaacctgatagaaaaattttggaagataatttggctttatcttgtaaaggtgagtattagcagtttcattcctcttttatatatattctagagaagtaaattcttgtagtcatgctcaaggagatggtgcaagtaagtttgtagctgtattactcatgatagcaaaaatgtggaaacagtatcaatacttattaactggagagtgaatccatgaagtgtgatataatcatatagtggaattagtggaaaatgaatgaaccttagctacaaactttaaaacatggatcaatttttaaaacaatgttaagtag

SEQ ID NO: 113034 - DNA, 769 bp, Homo sapiens
  misc_feature (1)...(769): n = a,t,c or g
ccctctctcccttttttatattatccaaccctattttaaaccctgctccaccgtcttaaacaggagtcgtggaaagatagccaggataacgtcctatattaaccccccccttggaattatcccacgcccttacgattcccattaaaagnnnnnnnnnntcnnnnnnnnnnccttttttttctttttttcnnnnnnnnnnnccgaaaccactcgccctccactgactgcccctgtaccacatcaaacagtctcctctcctccacgcctccggggtctgggaagtctcacctcactgatttcacgtagaaaagaaggcggaggcccagcagccgccgccgccagctccccaacgtgcaaatccatttcagtttgaccgtgaacccccttccagttcgtgtcctcctccgcccccgcccctagctcccgctgctgcgcttccaacggggttctcgggtcatttcctagcgccggtcacactggctggcctcctcccctcaacatctcctcctccggctgcagagggggcaaggggaaaagagggaggaaaaaaaagccccaaacgggaattcgcctgcgtggagtctctcagtcccggcgttcccccaaaacatctgccatcggccaaattcgtcaccccggagccttctgtcttcatcacgcgtttaaaaaaaagggggggaggggtgcgctgggttctcccctcctttcttggccaagaagcaaaataaaacaaaaccaaggtggtgatgcaggaagggggagactcctt

SEQ ID NO: 113035 - DNA, 815 bp, Homo sapiens
gagcatcactggtactcacccctggtccctgcagctccctgggccccagagacaggatttcgtgttagcctccctcgtactgtgctggggtgatgataaaactaacaaccccaggctggaacgcagtggctcacacccgaaatcccaacattttgggaggccgaggtgggtggatcaactgaggtcaggagttcgagaccagcctggccaacatggcgaaaccctgtctctactaaaaatacaaaaattagccaggcatggtggtgcatgcctgtagccccagctactcaggaagctgaggcagaaaaatcgcttgaacttcgggaggcagaggttgcagtgagctgagatcgcaccactgcactccagcctgggcgacagagcgagaatcttatctcaaaaataaaaaagttacttgtgataaatgaataatttgggaagaagaaatcctgagttttatgatgcagaaggtatttctttatcatgtagacacttagagggcttcaattttggtagtaaataaccttcattaaaaaagttaatttttttgttttaccttcatatgagccctgtaatagtacttctaatgacatcatactcataaaatgacttttttgtttcctgatcaacagtggaaaggtttatgatgtgctatgtaatagtatgtgcaaacatcgcaggcacaatattaatagatgcacatatatgtgtgttacacattaaatatttcccattcacacatgtatgcattctttccttttacataggaggcctagagaagttgacctccctaaaggataagttctaaaaggcac

SEQ ID NO: 113036 - DNA, 1790 bp, Homo sapiens
  misc_feature (1)...(1790): n = a,t,c or g
tttcgtgaggaggcatcgtccccggggctgggctgcagcaagccgcacctggagaagctgaccctgggcatcacgcgcatcctaggactgtgaagatgatgagataccacaccttgattatgttacattaaatggcaaaagcaagattatccagaatcttccccaggtgtgactgaagtgaccatcatagaaaagcctcctgctgaacgtcatatgatttcttcctgggaacaaaagaataactgtgtgatgcctgaagatgtgaagaacttttacctgatgaccaatggcttccacatgacatggagtgtgaagctggatgagcacatcattccacttggggaagcattggcaattaacaagcatctcaaaactgacttcagcttcacccagtcttccatgtatttcactttcctaattgcacccactcttgggcagacctgggaggacgatacacatggaagccagtggatgattcagccagagaagcctcactttggacttttcgcagtgtgataatttgagctggattcatgcaatggcagtgggaaagtttgccttgtctacaaaagtggggaaaccagcattagcagaagacactgagatctggttcctgggacagagctgttatactggcattttctcacagacacctttactgcctattaccggtctgctcatcaccccacctgggcnctgccccaggtgggcaatattgcctttcaccagctatggcattagcccacaggccaagcaatgggttcagcatgtagtaaacctattcaccttacaacacaaacctggttcacagaaggagaccgattccttttgtggaattaagctagatcccagcaaagtgttttaaggaggcaagaacaagatcgtaatcccaaaaaagaaagggcctgtgcagcctgcaggttggccagaaagggccctcaggaccctccggtccctccacttcctccacttctaaatcctcctctggctctggaaaccccaccccggaagtgagcacccctccctccaactccctatcagctccagagtggtggtttccatgcacagatggccctaggggtgacctccagttttgcgtgtggaccgtaggcctctttctagttgaatgaccaaaattgtaaggcttttagtcccaccgacattagccagggttcgtaagtgaggcctccagagcaggttgtgctgtcccctgcctctggaagcaatggggaatttggaatcttgtgtaagtgcccaaataagtctgaagtgctttcctcttcttcaacactcaaccctcaaatccctttagcactgattgattagagaggtcccccaaaagaaaccactggttttggacccatggaagcattaggaactgcatttgttcatttcagggagccattagttcacatatggactattttaaattttaaagtaaattgtatgaaaaaaatccaattccttcaattggcattagcccacattttgagtaattcatgtggctggtagattctgtattagcacaaaggatatggaacattttccatcacccacagaaagttctgttggacagccctgcaatagaaatattttcatactgctcttcctcaaattaatttttgttgttaatgttgatgtcttctattggatgggtcataatgttccatgaaacctctcaaggtacacaattgtatgttctttgtatcccttaccacaaatatcttctctctgctcatttcttttgcagcttcctataaagtttgtcttcctcatcaaaaaaaaacaaa

SEQ ID NO: 113037 - DNA, 435 bp, Homo sapiens
  misc_feature (1)...(435): n = a,t,c or g
tttcgtcgtttctggtgtcttcctggtgtgtttggatttgtgcttcttcacgtccgcacgtcacttctgagcccagtgcggtggcccctgagctcctgccggtcacgggctgtgtgttgtccccctcacaccagagacagtcgtttcttctcttaactcttaagccctcctcagtcactcggatgaactgattaaattctgtgcttttaatactaagcattnnnnnnnnnnnnncttttgagggaagcccctgccacccaggcccatgtttttgttttaagccttgggccctcccccgggggcccctccaaagggcatgaacctgtggatgctgtgcctgtgcctggaggctttggccctcccacccctggtggggctccagctttaggttggttcagcacccaactcaaagcagccgaggttaaggggggcatc

SEQ ID NO: 113038 - DNA, 1260 bp, Homo sapiens
ttttttttttttgagacagagtttcgctcttgttggcccaggctggagtgcaatggcgtaatctcggctcactgcaacctccacctcccgggttcaagcgattctcctgcctcagcctcctgagtagctgggattacaggcgcgcgccaccacgcccagctacttttttttgtatttttagtagagatgaggtttcaccatgttggccaagctagtctcgaactcctgacctcaggtggatctgcccacctcagcctcccaaagtgctgggattacaggcgtgagccaccgtgcccggccatgtatatatataattttaaaaattaagatgaaattcacataaaataaaattagccattttaaagtgtacaatttagtggtgtgtggttcattcacaaagctgtacaaccaccaccatctagttccaaacattttctttttttctgagacggagtctcactctgtcacccaggttcgagttcagtggtcttgaactcctgatgtcaggtgattctcctagttccaaatgttttcattatctctcccccaacaaaacccatacctatcaagctgtcactccccataccccattctctttttcatctcagcccctgtcaatctggtttttgtccttatggacttaccaattctgaatatttcctataaacagaatcacacaatatttgattttttttttaaaactaagccttgctctgtctcccaggctgggagtgctgtggcgtgattttggttcactgcaacctccgccttccaagttcaagagattctcctgcctcagcctcccgagtagctgggattacaggcacccaccaccacacctgggctaattttcttgtatttttagtagagacggggtttcaccatgttggccaggctggtcttgaactcctgacctcaggtgatcaaccctcctcagcctcccaaagtgcttgggatgacaggcgtgacaaaccgtgcccggccaagatgaacattttttaaaaccaatttttcaggtataacataagatttctagccaaaggaaaattttgttgtattaattctaacatttgctgtgatttggtattatgtggtatttcttttgtgctctaaccaaaatcatgctagatttagatgccaataaatgcacaatttgaattgaaaacagtctttttccctcccaaataatttatgccacaaagtgactgacctccagccatagccaagatatcactttcttttttattttttatttatttt

SEQ ID NO: 113039 - DNA, 1709 bp, Homo sapiens
  misc_feature (1)...(1709): n = a,t,c or g
tgagctgccgaggttgatgccgttgatnactgtgactgatcccntaggactgggccgacccacgcgtgcggaagaatttctctttagttctttgcaagatggtagagatattgggaaggtgtgtgaaggacttgtgaaatacataggcgaggaaaaggtatgcacaaggccgtgcattggaaaataaactccctaaggctggggtgaaacctgctacggtctgcgcaagttgactgttaatgaatttgattctcagacactttttcaaaaatggcaatggtatcagaattcctcaagcaggcctggtttattgaaaatgaagagcaggaatatgttcaaactgtgaagtcatccaaaggtggtcccgggatcagcggtgagcccctatcctacctttcaatccatcctcggatgtcggctgccttgcataaggccataatgggttaaaggtgtggatgaagcaaccatcatttgacattctaactaagcgaaacaatgcacagcgtcaacagatcaaaagcagcatatctccagggaaacaggaaagccccttggatgaaacactgaagaaagcccttacaggtcacctttgaggaggtttgttttaagctctgctaaaaactccaggcgcaatttgatgctgatgaacttcgtgctgccatgaagggcccttggaactgatggaagatactcctaattgagattttggcatcaagaactaacaaagaaatcagagacattaacagggtctacagagaggaactgaagagagatctgggccaaagacataacctcaggacacatctgggagattttcgggaacgctttgctttctctttgcttaagggtgacccgatctgagggactttgggtgtggaatgaaggacttgggctggattcaggatgccgggggccttggtatgaaggcaggagaaaggagaaaggggacagacgtaaacgtgttcaataccatccttaccaccagaagctatccacaacttcgcagagtgtttcagaaatacaccaagtacagtaaggcattgacatggaacaaagttctgggacctgggagttgaaaaggttgacattgaggaaattgccttcacaggctattcgtggaagttgcggccacaaggcaaaccagctttcttttgcagaggaagccttcatccaggcccatggaaagggtgtgggaacttcgccattagggccatttgatccagggattatgggtttccccgttctggaaattggaccatgaaggatatccaaagcattccctatccaggaaggatggtatgggtatctccccctttggcccaagcccatcctgggatgaaacccaaaggagattatgcagaaaatccctggtggcctctttgtggggggaaacctaaacattccccttgatgggtcctcaagcctatgatcaggaagactttaattatatattttccatccctataaagcttaaatagggaaagtttccttcaacaggattacagtgtaagctaccctacatgctgaaaaaatatagcctttaaatcgatttttatattataactctgtataatagagataagtccattttttaaaaaatgttttccccaaaccataaaaccctatacaagttgttctagtaacaatacatgaggaaagatgtctatgtaggctgaaaataaaatgacgtcacaaggaaaaaaaaaaaa

SEQ ID NO: 113040 - DNA, 1382 bp, Homo sapiens
aattcgacagacgtacgctgtcagggagtgtttacttcgcctccacttctgttcctccccgccctggtgctgctccgggtcacatactcgtcctgagccggcttcagcctctctgcgcagaagtgtcccggagccatggccgagtaatcttatgcgaagtctaccaagcttgtgctcaagggaaccaagacgaagagtaagaagaaaaagagcaaagagaagaagagaaaaagagaagaagatgaagaaacccagtttgatatgttggaatctggtgaacagtaacaaactttgatgaaatttcaggaaccatagccattgaaatggatgagggaacctatatacatgcactcgacaatggtctttttaccctgggagctccacacaaagaaggggaaaatggctttgttggcctcaaatggctgctttattagatgcaatgaagcaggggacatagaagcaaaaagtaaaacagcaggagaagaagaaatgatcaagattagatcctgtgctgaaagagaaaccaagaaaaaagatgacattccagaagaagacaaaggaaatgtcaaacaatgtgaaatcaattatgtaaagaaatttcagagcttccaagagcacaaacttaaaataagtaaagaagacagtaaaattcttaaaaaggctcagaaagatggatttttgcatgagacgcttctggacaggtagctatttatttacttattttcactgttttcagtagccaatagaaatggcatgtagaaaacctatattctcttaaattactgtagttttcacatttttgtcttcatttctaatttatgagtgtggcaatattacctagagaggacatcatgagtttgggaaaagactgtcaacaaagaatatctaaaaattataaccgattctaagtatatactttaagaaattcaggtttgactgtatctacttcataaatttatcattatctttttataactattagaaccagagttagaaagaagcagtttggctaatataaaaattatgtggattctgttagagtagttcagcttccttaaaataagcatatatcaactaacaaactaaatataaaagctaaacaagtgaaactgaagcagatttattgtaagatttggaagagtgcaggatgtttatcatagcacattattaatatttattattcttcctatgtagataagtaatgtcctagatttataccatagaaaaacaggtagagacgtttagctgtgagtgtacaagtataaatcaattaagtgccagattttgatcatcaccagttgctcattcaagtcctatgttgcaaagttactcttacccttttttacattacttgataaaggcaatgtttaattacatatttg

SEQ ID NO: 113041 - DNA, 839 bp, Homo sapiens
gcagatgccagtaccatgcttcctgtaaagcctgcagagccatgagccaattaaacctcttttctttacagattacccagtcttgtggatcatgagttcaggagatcgagaccatcctggctcatacggtgaaaccccatttttactaaaaatataaaaaattagccaggcatggtggcgggcgcctgtagtcccagctactcgggaggctgaggcaggagaatggcatgaacccaggaggtggaggttgcatagagccgagatcgcgccattgcactccagcttgggcgacagagcaaggctccgtctcaaaaaaaaccccaaaaaaccaaaaaaccaaattacccagtctcaggtatttctttatagcaatccaagaacggcctaatacaatgggctcccaacacataaaacatacagcagccacaaaataattagaaacaatgttaagtaatgcccactaaattttgaatagcaaaatatagcatagaagtataaaacaaatgtatttcattatccctacaaaaaaaggggcatctttttggttttgttattgctgtttgtataaaaactatggtgtgtgcatgtgggtgtatgtgtattcccttatagaaaacttgaaaaatacagaggtaacttagaaagaattaccttcccctaccagcctcaggatctcctgataccaattcaataaccacttaaaaacccacaggccaaacctctctttaggctctcaaatatctctactgttgcctgtctcccaggatgacacctagggctattaaggctatgactctaatctaaaactttttgttcttccaattttacccacgcgtccg

SEQ ID NO: 113042 - DNA, 3712 bp, Homo sapiens
  misc_feature (1)...(3712): n = a,t,c or g
tttttttttttattttgcttccaaagtttatttctcggaacaccataagatttgtataaagtatggtaggttgtttatcaaatcattttgtttgcaagaactcaccattagcagctgatatggccagatatacagatgtaatggcatcacaacaaccaaaaatagggctaatgagatggtgaccgtttctcctctgctatgctcctgtctcagttcttgtagccttcaactcggtacgttagtatttgatgaagttggattctttcaaactagtgatgtctccataatggtaagtgttactattcacagaataattacaatacttctcatttcctcaactgatttttctaggggattatgggattccaaaaaacatacatttcctaagaaatactgggagggaattcccacatggaaacactggtctgtgtcctagccctagcctctgcagcatcattctgggatgacagtttgtaatagtgaccaaaacatgtaagttggagttaaggcagatcctagagatcagtgaactcctgcagatctgtggtgagtagtaaacaatatatatatatatatatatatatatatatattttagacagagtctcgctttgttgccaggctgtagtgcagtagcatgatcttggctcactgcaacctctgcctcctgggttcaagcaattctcctgcctcagcctcccaggtagctgggactagaggcatgcgccaccacacccagctaatttttgtacttttagtagagacggggtttcaccatgttggtcaggatggtctcaatcttttgacctaatgatccgcctgcctcggcctcccaaaatgctgggattacaggtgtgaaccaccgtgcctgggaaacaatacatttttaagtgccagaccaacttaccacatagatgttttaaaaactaacaacttcattgttggctacggcagcttctctggatcttcagcctacaaagaactgactgaacctctgaatgaaagagtgagagcattaggtttacaatcagagttgggttcacatcctaactctgccaatgtactttatgtgntaacatgttctttggtctcaggtttcatctgtaaaaatgaggaataacattgcattataaggattaaataatgttaagaacctaggacaatgcgtggcagaaacggccctctgggctcccagggcctataacagtcaaccttgacaccagggaagaggaaggccaccaagagctttctggtaacagaaaaccactcaatgaaggccacacacagaacactctcctttggaattcatctcactttaagaatattcaaggaaaaaagttgaattttgccaattcataaatcaaaagtgagtatatactgtagagagagctttagttatttaaatacttaaaacatcaatttgccaaacaggtgcaagagattaaatagattcagacatgcccctatcctcaagtagcttacaagctaggaatacaaagctgactgtgatgcacaaagatgacaggaataccacgaaagatgagattcctgccaaccacggaagccaggccatactaaggagcaacaacatttcacaggcattcatgcagaagggcattccaggcagaggggatggcatgaacatagcaataaccatcacacagtatagtgcagccatcccatttcccagcgtgggagaggagatggaggggatgatgacgcaaaaggtgagctgaagcaaggttataaaaaccagagctagaaattggcctttatcgtggaagcaatacaggcagtccatcttgggtccccagtacattttaggtagggtttcctttacacagttttgcatatatatcagaacatgatctgttgtaaaaagcagggacatcaccattatcattctctttgttgttcttctgagtcagtccctcaaaatctccattggaatcctctggaattttccgaaggccccagcctaaagtccctacaagatctttgcaaaggactctcagagatcctcttccatttggtatttgggagcacaaagatccaagtagtacagtagttatcagcactacagcctgcactacccactttctggatctctgtgcagttcagttccctgaataatctataaaatgaaaacaggctcagaggagtggtttacaaacctttaacaaaggaagctttttaaaaatccccatgcaggcagtctccaaggcacctattgtcaaacccctggggctctgtgaagcaaacctgaaagacacgggtctgtccgattcccggggctgtttctgtgctcaagtgaaaatgattagttgggtgggctcagaatctacatcttcatggacaaagcaccagaatgatctgatgtctgtcattcaggctagggaagagccaagacttactcccaacccatgtagctgtgccaaagtcctaatattccctgagtcatacacaggctcatggagcccattcctagtcccacctcctcagaattcaggaccaacaaaatcctctttagcaaggagaaataatcctgctgataccacgaaatgccacaattagcaatttatccttttgctaaagcacttgcgagtccccataggaggaggcattcatcccacactcttccaggtaaacaaggtcatgagggccactcctccccatgagaagcagcagagcaattacatcctaggcacctgaggccaggccttactgacttcaaggaagatgggcaagtcttcatcttcactggctttcttccccttcagtctgttacatattaaccattccttcatggccctttgtggcctgcttagcccccttaaccatgaagcactcagagacaagttacactgtgttcttgcttggcctgactggcccagccttttcttccagctttaggagcctcagaccttcagcctctacaggccatttagctcctctgtgctgacaggaacatgaaatccagagatgctgggaggtagaaggcagcctcctcttccccagagtgcagctgatggaggctggaggcagccgctggaggtagccagcagcatgcacaaaaagctttccccactcagtcctcttccatgccttcctgaagccactttaaatactgcacatctccttaatccacagggagactgaagatctctgggatttcaaaaggatgtacagcagtgaagatgccttgagtaggatgttcacagaggcagccagctccttatccagcatggcccttcacctaaatgacatcctcttcttcatgtcttccttctctttcttcaagtcctttgctttattttcgaaggttcttttcgcatctcttcataggtataagcaatttattgaaaccttttttaaaagtcaggcttcaatccaggaaaggatccatatgaattgtagcatcagacagcattcaatttcctctgcaaagacttcttcctatggaaatagactctcagtgatgaccaaagacagaaacttgagtagctcattaatttcactttccctaatatcaataaatcttaaacccacctgttttgcagacactaagattttttttaacttcttcattagctctagggaaatatgcatcattcacacatcctcccacagtttccagcaagcttaagagtggctgattttatatcacccatcacctcttttatcactaccaaagcatcggcaatattgtactg

SEQ ID NO: 113043 - DNA, 397 bp, Homo sapiens
  misc_feature (1)...(397): n = a,t,c or g
caaggggttttttttcccccccccaaaaaaaaccaaaaatgttgccccccctgggggaaaaaaggttttttgtttaaaaaccccccctttaccggggtttccccccaaggtcccccaggtttttaagacggcccttggttggnnnnnnnnnnnntcccgggtgcccccaaaagggccctttttaggggggccccaggnnnnnnnnnnnnaaaaaaggggccgcccggttttcagtccctcccaattgttacactcccccttcccccttgttttttttggtcccaatgggttctttaccccaaagaacccctcctttttgggttcccccaagcccggggggtttttttcccggggggggccaannnnnnnnnnnnnnnnnnnnnnnnnnnnnnnnntc

SEQ ID NO: 113044 - DNA, 444 bp, Homo sapiens
  misc_feature (1)...(444): n = a,t,c or g
ctttaagtcgaaaaaatattgggacgggcgaaaagggccaaaaaacaaagggggttacacatttcccccctccaaaaaggaattttaataacccgtccggaaaagggcaaaaaggggccccttatatttactattttaggggacctttcccccgcctgggaaactccttgtgccaggtgcaacccactccccccttccaaaacccgggtccctttttcacaagggttcggggctggnnnnnnnnnnnnnaaggctcgcctaaactttccccccttctcttgttcctcagcgactggtggttcccccctccccctctgggtggttgcacggactgcagcagcaaagactggaacaggcaccgccgccggggctgtagctactgttgctcttgctgatgctgtagctcccgctgctcctgccgcggccgctgcagccgcttctccc

SEQ ID NO: 113045 - DNA, 1120 bp, Homo sapiens
ctcgcggccggagtgcggcgctgggcggaacctaccatggcggccgagagaaagacaaagttgtccaagaatctgctgcgcatgaagtttatgcaaaggggactggactcataaaccaagaaacaactagaagaagaagaaaagaaaatcattagtgaagagcactggtacttggatttgccagagcttaaagagaaagagagtttcataatagaagagcagagtttcttactatgtgaagatcttctctatggaagaatgtcattcagaggatttaatcctgaggttgagaaattgatgcttcagatgaatgctaagcacacagcagaagaagttgaagatgaaacagtagagctttgatgtgtcagatgaagagatggctagaagatatgagaccttggtggggacaattgggaaaaagtttgccagaaagagagaccatgccaattatgaagaagatgaaaatggagacataacaccaattaaagcaaagaagatgttcttaaagccccaggattaagatggatgccttaagcgatggcccaggggtgcttggtggaagtcagcagggcatctggagctcatcccaatggtcgtctctatagttattaatactgtaaccgtttacctgtaaagagattatccattttaggaaacatgctgtttttgaaacagatgtgtgaatggatgttgtacatccctttgccttccttggtattcattccagagtggatttttaagcccctgatcctacaaaatgtacaattgttacagggctgcttccctaaagattttttttaccctcaggtttccccttaatatagttctccagtcactgaccttgaattgacttacataaactactgccaatgtttaaattgcccctatgtttatggttattatgtccaagccaattcgtacatacaactttggaatccaagtgtcataaagaatttattatataaatttatcaagaataaaaatgcctctccagccttaagtatttacatgctcccaggtcattgtcagtttatggtattatgttgttttatttaaagcattgaattgatagaaaaatttgctctgtaataaaaatctactttcacataaaaaaaaaaaa

SEQ ID NO: 113046 - DNA, 431 bp, Homo sapiens
cggcacgagaacgttctatgtttcactgaagctaggactatcggctgcagcatgaaagactctgccgaccttctgtgactgctgctcataacagccaccttcattctccaagggctcggtcagtcagatgcagagcaatgccccaatcacctgctgctataacttcaccaataggaagatatcagtgcagaggctcgcgagctatagaagaatcaccagcagcaagtgtgccacagaagctgtgatcttcaagaccattgtggccaaggagatctgtgctgaccccaagcagaagtgggttcaggattccatggaccacctggacaagcaaacccaaactccgaagacttgaacactcactccacaacccaagaatctgcagctaacttattttcccctagctttccccagacaccttggtttattttatt

SEQ ID NO: 113047 - DNA, 1203 bp, Homo sapiens
ttttttttttttttaaactcattctttcattaggtcgctcttattcatcttcacctaacaccaagcagcaataataactacaaactcaatttttcttctctgggcaccagatctgacaacttttcaattgttaagtattaatttaataaaattctatctatctatctatctatctatctatctatctatctatctatctatcaatcgactgactgagggtcccgctctgtcacacaggctggagtgcagcctggtgtgatgatagctcactgcagcctcaaactctggggctcaagctaatctcccgcctcagcctctccagtagctaggactacaggtgcacagcactacactcagctatgattttattttattaagtgttctttatattcattatatatctttaacatactatatatcatagattctaagatgctttggtgctggtactgtttgtcacaactatgacttgaagtcaccatcagctgtaagatgcatcctgacttcagagagagaaacatgttcaataatgtgcccccttaccaataaaagaaaggaaattccgtttaactgtttatttccaatttcaattttattgcagtataaaagaaaaagtattatctgaatccggttcattctaaatggaaatatccttagtgattcatttgtttctgtttataataagtagtttgtattttaaatactctgtattatgcagaaatccttggtgaattatcaagtaggtgttgagtcccttagctatatctaggaaattgtttagggtcttaagtgggctggaaattatgatttttcctactcaaaataataaaatatggggcaccactttccaaaaaattgccacacaatacataaaaaaagatgtacctcaatatactgaaaaacatatatgtaataagttataaaaatataaagaatgaaacacaaaattaaaactattgattacttctggggaagagggcagaggaaagaatgggaaacggaaatagctccattaagtacaatgcagaaaaatacacatttgttagagacaaagacaatgaatcacatctacactatatagtcactagtaaagatctgaagaggtacacaccaaactgttaagaagtaaagttgtcaaggcaaactttcacactgtattttatattccgtatttttcttcaacgttttggtaataggcatctg

SEQ ID NO: 113048 - DNA, 1377 bp, Homo sapiens
ccccctcccgcacgctgggttgcagctgcacaggtaggcacgctgcagtccttgctgcctggcgttggggcccagggaccgctgtgggtttgcccttcagatggccctgccagcagctgccctgtggggcctggggctgggcctgggcctggctgagcagggccctccttggcaggtggggcaggagaccctgtaggaggaccccgggccgcaggcccctgaggagcgatgacggaatataagctggtggtggtgggcgccggcggtgtgggcaagagtgcgctgaccatccagctgatccagaaccattttgtggacgaatacgaccccactatagaggtgagcctggcgccgccgtccaggtgccagcagctgctgcgggcgagcccaggacacagccaggatagggctggctgcagcccctggtcccctgcatggtgctgtggccctgtctcctgcttcctctagaggaggggagtccctcgtctcagcaccccaggagaggagggggcatgaggggcatgagaggtaccagggagaggctggctgtgtgaactccccccacggaaggtcctgagggggtccctgagccctgtcctcctgcaggattcctaccggaagcaggtggtcattgatggggagacgtgcctgttggacatcctggataccgccggccaggaggagtacagcgccatgcgggaccagtacatgcgcaccggggagggcttcctgtgtgtgtttgccatcaacaacaccaagtcttttgaggacatccaccagtaccagggagcagatcaacggggtgaaggactcggatgacgtgcccatgggtgctggtggggaacaagtgtgacctgggctgcacgccactgtgggaatctcggcaggcttcaggaccctccggccgaagcttacggccatccccctacattcgagaccttgggccaagacccggcagggagtggaggatgccttctacacgttggtgcgtgagatccggcagcacaagctgcggaagctgaacccctcccctatagagtggccccggctgcatgagctgcaagtgtgtgctctccttgacgcagcacaagctcaggacatggaggtgccggatgcaggaaggaggtgcagacggaaggaggaggaaggaaggacggaagcaaggaaggaaggaagggctgctggagcccagtcaccccgggaccgtgggccgaggtgactgcagaccctcccagggagggctgtgcacagaactgtcttgaacatcccaaatgccaccggaaccccagcccttagctcccctcccaggcctctgtgggccctttgtcgggcacagatgggatcacagtaaattattggatggtcttgaaaaaaaaa

SEQ ID NO: 113049 - DNA, 577 bp, Homo sapiens
  misc_feature (1)...(577): n = a,t,c or g
ggnnnnnnnnnnnnnnnnnnnnnnnnnnnnnnnnnnnnnnnnnnnnnnnnnngcgtcagccttttaannnnnnnnnnnnnnnnnnnannnnnnnnnnnnnnnnnnnnnnnnnnnnnnnnnnnnnnnnnnnnnnnnnnnnnnnnnnnnnnnnnnnnnnnnnnnnnnnaaaaaagtttttttgttaacccccccaagaagcgggaataaagggccccggccccaaggccaagaaaattttggaatttggagaaaaaagggtttttccccatttggcccaggggggccttaaacggcgaaccttggaacccccctgcctgggcccccttaaggacaaggataacgggggggaacccccatgccgggccnnnnnnnnnnnnnngaaaaaaaaattatatttttttttaaagggggannnnnnnnnnnaaaatttgttcaaaacacccctccctttttaagggggaaaggggatttccggccccaccccccccaaaggggggggaaaaaggggggcaacccccacccggggtattttttttattttataaaaaagaggagttttccctttttccccccgggg

SEQ ID NO: 113050 - DNA, 1205 bp, Homo sapiens
  misc_feature (1)...(1205): n = a,t,c or g
gagttctgagccaaatttggaaggagatcaccaaggagagaacattactgtgcaagctgtgaagggtggagtttttggatagctggtttgggatacatccaggaggaagtgggctacaagctaaaattgatctgtgccctctgccttggttctctgatgctttgccttcaattagctttcaaatgaaagagatgtctttttatccctagatgatgaacaatggcctcctccaacagccctctgccttgatgttgctcccctgccgcccagttcttacttctgtggcccttaatgccaacttttgtgtcctggaagagtcgtaccaagtacaccattacaccagtgaagatgaggaagtctgggggccgagaccacacaaggccgaatccgggtgcatggtattgggcgggggccacaaagcaacgttaatcgaatgaattgactttctgcggtttccggcctgaggagaccaagtcaggacccttttgagggagaaggtttattccaagtccgttatgatccctgtaaggtcagcagacatagctctggttgctggggggnagccggaaacgctggatcatcgccacagaaaacatgcaggctggagatacaatcttgaactctaaccacataggccgaatggcagttgctgctcgggaaggggatgcgcatcctcttggggctctgcctgtggggacccttcattcaacaaacgtggaaagtgagccaaggccggggtgccccaatatatccgagctgtcagggaccgtgttggtgtgctactgcgggaaggtgaatggcacagccccattatccagcttgccctctaagaggcagatgcaggtgcttggaaacgtgcgtagcaacagtaggccgagtatccaacggttgatcataacaaacgggtcattggcaaggcaggtcgcaaccgctggctgggcaagaggcctaacagtggggcggtggcaccgcaaggggggctggggctgggccgagagattcggccactacccccccatgaagagttacgtgaagctgccttctgcttctgcccaaagctgatatccctgtactctaataaaatgccccccccccccgttttaatctgttactgtggttttgttttgggtgttttttgttttttttgttgttgttttttttttgcgggggaggggatggtacagactaaacgtggggaaaagaag

SEQ ID NO: 113051 - DNA, 903 bp, Homo sapiens
  misc_feature (1)...(903): n = a,t,c or g
ttttttttttgagctctgatctttctcagcactgattagggttgcataaacagacgcttatttgccatggtgggattaagccacccatggacaattgtacaattggatacagtaagtgacatatttctaaaagttctgttgtaattaacaaattctcattcaactgtgtgatgtaattcacacatcagatgagcaagttgaacctcttgtggactctgagggactggggcacaggacagggaagtttttattggaaggcgagagaaatctgaacggggaacaaaacaggttggaagcacaaaacaattaaaggggacttcgaaattgcttaattggggccactgggcctccttgctcccttccagagagaccctgtaagtaggcccactgctttgcaaacagggaaggtcagacatgggaaaacaatggaggaaaggcaggcagggtcaactgctgggccacagcctggaaaggtcccagggttacccaatcaagtttctgtacaactccaggcagctattgtctgtacctgttttcccgtttttttgttgttgttgttgttttgttttgagactgcgtcttgctgctttgtcacctaggctggagtgcagtggtgccatctcagctcactgtaacctctgcctcccaggttcaagcaattctcctgcctcagcctcccccagtagctggggctataggtgtgtgccacctcacctggctaatttttgtttttagtagagacaggtttcaccaagttggccaggctggtctctaattcctgacctcagtgatccacccacctcagcctcctaaagtccttggattacagttgtgagccaccgtgccaggccttcaccctgttgaaattattccttttanacctccaggagggagaacttactc

SEQ ID NO: 113052 - DNA, 1521 bp, Homo sapiens
tttttttgaggaaataaaacgtttattgagtaaatgtttatttagtaacagcaacacatagtttctcaagaagaggatgaactgaaaactcctctaaggcaggacgaagcaactttccattattcttagtttagaccagaatctttaattttatattctcctttaataactgtcaaaatacaccaaatacttagaggaaaatattcacagtataccaaaacattttaagataaagagcagtgtaagagtagtattctctacataccacaggtatacaatgatgccttcctgcaggtttagaactattactacttcaaaattttaatacatttatggcaaaatggattggagaaaattgaaatacctgcaaccttttccagtttgacttcaggaacaggtgcaaaccaccatcctcttcacagatcttctggttacggcaaccatccaaaaaccattgggttcagctctcaaatactgatgacaatgcatgtgatgcatgcgtgctctgctaagttttgaacagataacatattctacagcaatgctcaagccctggattatttttgcctgacaaaaataatattccaatattccctgaagaggtttataaaaagggttgaaaatggctgtttttcatagtcaaaagccaattccctttatttttggagacagggtctcgctctgtcacccaggctggagtgcaatggtgcaatcttggctctctgcagcctcaaactcttgcactcaagcaatcctcctgcctcaacttcctgtgtagctaggaccgcaggcaaacaccaccacatctggataattttttaatttttttgtagagatggggtctcactttgtcacctaggctggtctcaaactcttgggctcaagcgatcctcctgcctcgggcctccccaaagtgctggggattacatgcatggagccacccacaccccagccaatttactttttaataggaatatacactggttggaattctatcttcatggattttttacaagaggttgctatagtgtgctatgtgtgtaaatattcagatcctgtatataaactaatcaaaggctccatgtcagttcttaagtttgatatttaaatgtctgaccagggaccctccaaatagtattcacagtattaaacggtgagataaattttcatttctattttttcctatcttttcaaagtcccattaaacatctgaaattattggtagaaatgaggtgataataaatattttctatttaagtctgacattgatttgcaatccattttaaactgttacatctaatatgctattctgtttttctcatgagtctttaattgctggatatttgaataacacattaattttttaaaaaaaaattttctggtaccatttttagacttctgtctttatataatttagtttgtaaaacctagtttcatgtttaatgaattaagaaacaacatcagaacagtttagccagattttaataggcaaaaaagggttgctttggcaatggataaaag

SEQ ID NO: 113053 - DNA, 450 bp, Homo sapiens
  misc_feature (1)...(450): n = a,t,c or g
gataggacgtggaattnnnnnnnnnnnnnnnnnnnnnnnnnnnnnnnnnnnnnnnnnnnnnnnnnnttccacttccagccagngaacatctttaggcctgtgaattgaacaatttagatgaaatggaaaatttatttgaaaaacactgactaccaaagctcacttaagaagaaatagataacttgaatacccctgtatttcttaaagaaattgcttctgtagttaaaaattttccaatactcccatcccagatgacttcactgttgaattttgccaaatatttaagaaagaaataataccaattcaacacaagtcttctagaaaagagactattattacccacattttaaaaacttgataaagacactctaagtgaagaaaattgaacatcactatctttcatgaatataggttcaaaaattgtaaacaaaagtttggaaaatcatgtct

SEQ ID NO: 113054 - DNA, 442 bp, Homo sapiens
gccacagtcaaagatggagaatccatggtgccactttcccggtgatcccggtgggggaaggggttgccgcccggcagagattcagtcccgaatcccgacagcgaagagacttgtatgccacctgcaggccggggagcggggcgcgctggggctgcaccaccccgaactttgtaacaatctagagcaccacagagtgtttccaggtcggcacaaaagcgaacgggacagggcgccctgggcggcggcagcttggccggcccgctgcctaacgcgcccccgaggggcggtaatggaacgtacctttggctgaagaaagagtgctcccggccagcgcggggtcgcctagggggttccgcgctgcctaatgcaaaggatggaaaagttacagaagcaggtcctgacaccacctatgtctagagatgggtttcagtagcccaggctg

SEQ ID NO: 113055 - DNA, 1210 bp, Homo sapiens
  misc_feature (1)...(1210): n = a,t,c or g
ttttttttttgagacggagttttgctgttgttgcccaggccggagtgcaatggcacgatgctcaactcaccgcaacctccgcctcctgggttcaagcaattctcctgcctcagcctcccaagtagctgagattataggcgcatgccaccacgcccggctaattttgtatttttagtagagaatggggtttctccatgttggtcaggctggtctcaaactcccgacctccggtgatccgcccgcctcggcctccccaaagtgctgggattaacaggtgtgagccaccncgccccagccttgaaggtggccatgttttccaaagaaccatggtgccctcagtttgtagacacacagggaactcaaaatacaatcattttccctgctgcctaagtaatgcttgggtgggctgctctggttgcagatatgtgaagttagggtagcctttcctgttaacccatggttccaaggcactctctcttaacaatcattcctactgtgaattttctacccgggaaaagcccaggggtgggcaataacaattaagatcatttgggtttctaaaagtccttccctctctgggaaagcagaaacttatacaagtggggtggcatcctgcagattctagtttacatttgggaaaggtgtacgcctcttgcactttcagaggaacaagtcaaaaagtaattgcttaaaaaaaaaaaagtgctagcaattcacagcctattcctgcccgctgaacagaaattgtgatgccttgatttaccccctagcagctacatattcttgagccaagtcattaacccttattgtgcctcaagtttctggatctgcaaggagtgttgcctgcataaatggtttgtttaggaacttagtaaaaatgacatacttccttctctctgctcttaagaaggccatgagccacctgcagctcatatcaatcagcatgggcttgaccagagtcctttcctcttccaagaaaaagcaaggaaaagcagcaagcatgcagacataccaggtcaacaggagtgatctatcattggctacgaggcctcaaacagagcggcaaatgctgtggcttcagcgccttatccccaaatgccacaagccagacatggaagccatgcaagagtgactatctcactcccacacaggcacagacagagttccaccaagcaaaaagggggctaatactgcgaattcaccgcacgga

SEQ ID NO: 113056 - DNA, 2350 bp, Homo sapiens
ccgggtcgacgatttcgtggagggggtcgagggaccgcgtcaacccttttggcctatcgcggaggggatcccccaccccccctacatctggaaggggtggcgaaggatggagagctgggggaggggaatccctccagctagcacggggcgccgcccccactgctacctgaaggagtgactccccccacgcacattcgggagggtcccaaatagggtgtctgggtggactgaacatcacaagaagttgagtgggatgaaagggagtcacgccgatgggggagagggtcttatggcccctgagagctggccagcactggcgtcaccggcccctccccgcagggcttcaagatgggctgcgctccagttccaacagccgcaacgggagccgggagcggcgagaggaacagaccgacacctcggacggggagtctgtgacccatcatatccgcaggcttaaccagcagccttctcaggggcctgggtccacgaggctacgacccaaatcgataccgactgcatttttgagagagacagcagggaggaggtagagaggagaaagagagcagcccgggagcaagttctacagccggtcagtgctgagttgttggagctggacatccgggaggtgtatcagcctggctcagttctggactttcctcgacgtcctccttggagctatgagatgtccaaggagcaactaatgagccaagaggaacggagcttccaagactatcttgggaagattcatggggcttactcctctgagaaactcagctactttgagcacaatctggagacatggaggcagctgtggcgggtgttagagatgtctgacatcgtcctgcttatcactgatatccgacatccagttgtgaatttcccgccagcactttatgagtatgtgactggagaacttggactggccctggtgctggttttgaacaaggtggatctggccccgccagcctcttgtggttgcctggaagcattatttccatcaacactatccccagctccacgtcgtccttttcacctcttttcctcgggacccccgcaccccacaggaccctagtagtgtcttgaagaagaagtcggaggcgggggagaggatggactcgggccctggggccagagcagttgctgagagcctgtgaagccatcactgtggggaaagtggacttgagcagctggcgggagaagattgctcgggatgtggctggggcccacctggggtaatggctctggggaggaggaggaagaggaggatggcccagcagtcctggtggagcagcagcagactgattcagcaatggagccaactggcccaacccaagagcgctacaaggatgggcgtggtgaccatcggctgtgtgggtttccctaatgtgagtgtgagtcctcgctgatccaatggactggttgggcggaaaagtccgtgagtgtctccagaaccccgggccatacccgatactttcagagctactttgcttaccccctctgtgaagctctgtgactgcccaggcctcatcttcccatctcttcttgcctaaggcagtttgcaggttctggcaagggatctaccctatccgcccagatccaggaagccctacactgctcgtccggctacctgggccttcccgaatttcccgtggcagggccctgcttccacctggcgccacccaggagggttgagggacccctcagcggggaacaccgaatggtgttgcctgggggacatctgttgaagcctggggcagagaaaacgtggttaacaaagacagccaaggcggctcggaatgatgtgtacagagcagccaacagtctcttgcggctggcagtggacggccgcgtcagcctgtgttttcatccccccaggctaacagtgaacaggaaggccacctggaagtcccattccagaagaccacgggagctggtggttttgcaggggcagggtggggcccagcaggtgacgaaggagggaggaggaagaaggaaagagctgagcagctcctgtgaggaggagggagaggaggaccgggatgcggatgaggagggagaaggggatgaggagaccccaaacctcgggctcccaggggtccagcctggctggccgaaacccgttagtgccctgctgggtgaggatgagtgctgagttcctgcgcccagcgccatcttccctcccagtatctttgcttttgggactgacttgggggtatctcccctctgccaccccaattgtgaataaagattgtttgctttgtagccccttccccagatgaactgaggtgagagcggctgttccaggctaacagctgtgggaggcttctctcctcttctcccttcttttttt

SEQ ID NO: 113057 - DNA, 447 bp, Homo sapiens
  misc_feature (1)...(447): n = a,t,c or g
tcaggcttccacctgcaagctgtgaaacatataattaaattgctgtcnagccagccaggtcccctttcctttgaagaaaatccttccaggtccctgaaggcttcccatctgcccagccatgggcccatgacttcctctcctaggggtcagcaaactttatctgtaaagggcccagtaaatattttaggctttgcaggccatatggtcttgagactgttaaattctgctgttgtagcttgaaagcagcctttgacaatatgtaaatgaatgaccatggctgttacccagtaaaactcaatttaaaatacaggtgaggccaggcgcggtggctcacgcctgtacccccaacactttgggaggccgaggtgggtggatcacctgaggccaggagtttgagactagcctggccaacatggcggaacctgtctctaataaaaatacaaaaat

SEQ ID NO: 113058 - DNA, 456 bp, Homo sapiens
  misc_feature (1)...(456): n = a,t,c or g
aggcccggcccgggggtcccctttggtatnnnnnnnnnnttttgggccccaggtggggggctcccctaggtccgggggttcaaatccaccctggcccccatggtggacccccccctttcttaaaaaaacaaaatccccnnnnnnnnnnnnnncccccttgtattcccccgcccttgggggggtaggtcagaaaattcccttgaaacccggggccgagggttctcaaaaacgtttttgcccccctttccctccaccctgggggggaaaaatgaactttcttttcccnnnnnnnnnnnnnnngaaagaaagaaaaaaagaatatagagcnnnnnnnnnnnnnnnnnnnnnnnnnnnnnnnnnnnnnnnnnnnnnnnnnnnnnnnnnnnnnnnnnnnnnnnnnnnnnnntattcaaggaattccnccgcnctgtgctatggtcatcagttttccggaga

SEQ ID NO: 113059 - DNA, 653 bp, Homo sapiens
gaggaaccctgcagcagacctcgaataaaatgtgacttbgatgtttgttgccacttcctcaacttggttagcaaattcaagttttgaaagacgattcgtctcagagaagttgatcctgtaacctccacgtcacattttagttcggtttgctattaggtgggtaatgcctaataacatgggttcctcaaatcacaaaggagaatgctctcaagtcctcatgttaactttagtaagtcagttaactttacagcaactaaagagatcaattaaaaagaacccttaagtctgactgtcccaggtaactttacttgctgtacagatagtgcacagatatggatgagggctgcacatggctgatttgaaaacccatgtggggccgggtgtggtgctcacgcctgtaatcccagcactttgggaggccaaggcgggtggatcacgaggttagttcaggaccagcctggccaagatggtgaaaccccatctctactaaaaatacgaaaattagctgggcttggtggcagatgcctgtaattcctgctactcgggaggctgaggcagagaattgcttgaacccgggaggcggaggttgcagtgagccgagattgcgccactgcactccagcctgggcgacacagtgagactctcctcaaaac

SEQ ID NO: 113060 - DNA, 546 bp, Homo sapiens
aaacggaaaggttcggaatttgcctctgcgccatctatttttgcctgttacctgtgacgtccttggaagcagaatctgaaactttctgaggagagcatttgagcttcagatttctaacagcctctttgcaacaaaatagaccagtagctgaaggcaactgcaatccttcatgatgtttcccttggccagaaatgcactaagcagtctcaagattcaaagcattctgcaaagcatggcaagacaataagccatgtaaaacactttcaccagattttcatgataaatatggtaatgctgtgctagccagtggaactgcctttctgtgttgcatacatgggtgtttacagccactcagattggaatagaatggaacctatcccctgttggcagagttaccccaaaagagtggaaacatcagtaaccatcacagttgctgtaatgacagaattgtttaaaaaaccaacttgtcatgtaagcactctactgcttattaaaatatagcacaattgaaaaaataaaatgtgttttaaatctttaaaaaaaaaa

SEQ ID NO: 113061 - DNA, 787 bp, Homo sapiens
cgcccattctgtgcttttgtggagggcaagaacccccccaccccttctccatgtctctactcttttctctgggcttgcctccttcactatgggcaagcttccaccttccattcctccttcttctcccttagcctgtgttctcaaaaacttaaaacctcttcaactcacacctgacctaaaatctaaatgacttattttcttctgcaatgccgcttgaccccaatacaaactcgacagtagttccaaatagccagaaaacagcactttcaatttttccatcctgcaagatctaaataattcttgtcctaaaatgggcaaacggtctgaggtgcctgatgtccaggcattcttttacacatcggtcccttcctagcctctgtgcccagtgaaactcatcccaaatcttccttcttcccctctcgcctgtcccctcagtcccacccccaagcgtcgctgagtcattctaatcttccttttcgacagacccatgtgacctctcccctcctccccaggctgctcctccgcaagtcactccccgccaggctgaatcaggctccaattcttcctcagcctctgctccccaaccctataatccttcaatcacctcccctcatcacacccagcccagcttacagttttgttccatgactagccctcccccacctgcccaacaatttcctcttaaagaggaggctggagctaaagacatagccaagtttaatgctcctttttctttatccaacttctcccaaatcagttagtgtttacactgtttttcatcaaatat

SEQ ID NO: 113062 - DNA, 602 bp, Homo sapiens
aaataaaataccttcatcaaataaacccactgcttctttataccctgaaatgcatgttgagcaacatgagacacattctaactctatagaattattgcttctttgataattcaagaaaagacaaaggcactgatcaaacttgtttggtgccatttctatataatctaataaggttgttgttgttgttgttgttgttgttgttttgaaatggagtctcgctctgtcgcccaggctggagtgcagtggcgcgatctcggctcactgcaagctctgccttccaggttcatgccattctcccgcctcagcctcatgagtagctgggactacaggcgcccaccaccacgcctggctaattttttacgacgacattcttactggcactcgggccaaaaacctgagtcactccgatgactcttttgctctcatattctgcgtccaattcatcaacacatttgatcagctctacttccccagtacatccacgttctaagcacttctcagcagcaccactctcactccagtctcagtaccagtttctctcacctgagttgaatacaataacttcctaactggttttcagcttccacagataaccagctaca

SEQ ID NO: 113063 - DNA, 3366 bp, Homo sapiens
ggtttagaagccacctgaggctgttgactccctcccaaatctgtgtcaagtccctgctggtgcaggtttgtctggtagcaccagtgaggtggcccccacccatcgccatcccagaaaccctcccttggacacacctggaaggtgctaagtgcaccgggcagaggaggcccctcctggccagcatgaccgtgcaccggcctgagtgggctcgggtgggaggcgccttcacagcactcagaccaggcttcccccaggcttgtgggtggtacatccacagccttgcttgggtggggcaggggcgctggtgggggctgtggagaggctgcctggggcccctggcacagggctggacccatcccgtatgccagccacccaaggcaccttagcccttggagctcagggtgaggctgttttcccgtggatcagccaggggcagaggccagccttggtgctgatgcccaggaggaggaatggccagtgggcccatgccaggcctcctccctgtgtctcatggggacactgaagcccatggcaggagctggctcttcgccacagctgtgtggcccagacccctccctacagaaaggatctggggtgaccacaggcaaaaccctgcctcgaggggcccccacagcagcgcctggcagccccacaggggccgcagctgagcggcagcttcaccacattgtggcctcaggccctgctggctccacagctccacaccctcgtgggtcgcagcagctgagctggtcagcacagcacacctcatcctgctccccggaatgcctgcctggcccgtgccccccctgctgcagccctccaggtttccagccctggccgtggagccgtgcgtgcagcagcgggcagggctgtcctgacgcctcctggctgcatctcctgcgaggccgctccccgggaggccaagggggaggctgccctcatcctggagtgcgggaggccacgggagaagtgccaaggtggggctggggccaccttcaccgcgcagaaccacccgccgcagactccgcttctgggacctggggcggccctttctaagcctgtctgtctcgggccagggccaaggggcccgtcgcccatctgtctctgaaggtggcacccacaggcagtctgtcagtgtccgagggcagcagttgccccaggaccagtgcctaactttggtgatgccgccactgggagcccaggcccctggcggaagcctcccaggtcacatcttgccttgtttccccacagggcagctgtgcggagggtagtggcagccatgaaccggatggaccagaagaagcacgagaagttttcaaaccagtttaactacgcactgaactagagagcggggcccagtgcactggccatcagcactttctccctctgccagtgtctcaggacagcagagtgggcgtgggtctgggcagtaaccatgctttgtctattactgtgtttgatgtaaagaaatggtgtgttgcaatgccctgaaggtacggccgctctgctgctacagggttcggcatcgtctggtgatgggtctggcctcgcagaagaggccctcgggcctggagatgtgaacacaggcagcgaccctgttccagagggcttctgcgagtcctcgtgaggccagtgcttgtcgtggtgtggggttcagcacggacggaatgtgtgtgcagctcagccttcagagcgtgcattccccagccaggaggcgaccactcagaggaactctgggaaacccacttttgtgcaaatgctgtttttaacacaaacacaaaggctagtgaaccgttcagtcatctgctttctgtttctggatgtgccttttcatacatgtgtcctcttgtccctggcttcttacacttggcgttgtttttaaggtttatccatgcagttcccctccaatgtataaaacaaaggaggtgaaaacctgtccatgcggaagcttgtgcacccatgttcacagcagcattggagaaggataccgaacatcttctcgtgggcttactggccatttgtgtatctcctttggagaggagtctattcaaacctcttgcctatttttaattgaatgatttatcttgagttgtaacagatgtttttttttcgtctttccttttaaagatgggcttttgctcttacccaggctgagtgcagtggcagaatcatagctcagtgcagcctcaaactcctgggctcaagccatccttccacgtcagcctcccaggtagctgggactacaggcacacaccacaacacctggctaattttttaaattttttgtagagatgaggtctcactgtgttgcccacggtgatctcgaactcctagcctcaagcgatcctcctgcttcggtctcccaaagtgttgggattacaggcatgagccaccactcctggccaggagtttatatgtatactgtggatactagatcctcatgtgatttgcaaaaactttatttatttatttatttatttttgaaatggaatcttgctctgtcgccaggctggagtgcaatggcgtgatctcggctcactgcaactaccacctcctgggttcaagcgattcgcctgcgtcagcgtcctgagtagctgggactacaggcgcgcaccaccacgcccagctaatttttgtatttttagtagagacgggatttcactatgttggctgggatggtcttgatctcttgacctcgtgatccacccacctcggcctcccatagtgctgggattacaggtgtgagccaccgcactcagctgatttgcaaaaactttcttccatactgttgtttcactttctggatagtgtcctctgaagcacaaaagttaattttgatgaagtacagcaatttatctgtttttttcttttgttgcttatgcttttgctgtcacatttcagaagccatcacctaatccaagatcacagagatttacacctagtttctaataaggcattttataatttcagctcttatgtgtaggatctttggatccattgtgaattaagttttgtgtgtgggtgtaaggagcccacattcttttggcagtggggtattccagttgttcccagcaccatttgttggaaaacattattttttccccatggaattatcttcggcaccattattggataatcagttgacccaaaaatgtacagggcttatttctgggggcacttggactctattccattggacctgtttaaccttatgccagtgccacagtgccttggatcagtgctgctttggttgtgaagaagttttactttggttctgcttcaagggcggttttgactcctctggcatctcctggcatttccaaatgaattttaaggatccactcatcagtttcttcaaaaaaaaaa

SEQ ID NO: 113064 - DNA, 417 bp, Homo sapiens
ttcaaaaagcccttttgagaaagagttctgaaaattgcattgggtgttgcccacgtcatcaagtctctgtttgtcattttataaatacctctgcaatatctcgactgttcctaaggcttggccaactcccatgctgctagctgaggttagagattcccagaaagagtttcagaaggtggcagctgctcttatatcctgtgagtctgtatctcactttcaaggcaaatccaaagcacatcatctctggagagtaagaattatagtcataagctgggctctggtgctcagccagtagtggtaataccagctacttaggaggctgaggcaggaagatcacttgagcccaggaggtcaaggctgcagtgcaccacgatcatacctgtgaattgccatgcactccagcctgggcaacatggc

SEQ ID NO: 113065 - DNA, 1162 bp, Homo sapiens
acagatcggtggaattcctctgagggggtagcagtcttggggccatcaggcagtggtcaggagtcttccggtttgctgctctgcaagggaatgggggagatggcagattgcacagagctgtggtgaggacatggagcaagactagcggcttgttaaagaagttgaagaaacagtcatggaagggaggagggaagctggacagcagctagagggaaccggttcaatgcttttgtttttccctgaaaataaagacttacacagatttgaaggcagaactggggcttgggcacagaaagaatataaataaggcccccgaggagaaggccccttcctggcataggatagaagaataactttgtgtttggagacatggtgcaggaatggtggaggagctgctctattattagctctattaacttaaggtagaaaggtgtcatttatcagggttgggtggcggcagggccagagccagcagtggaggctcatgagcgtggagaagatgtggaaaggctgaggaatttctcagagggtgacggactgccagctgccctgaggttgctcttacttgttacagtggacaagctgctttgctagcgtgcagatggagaaggcgggcccgggaggcttggagtttggcccaggagctggcaggtgcccagcagcagtttcactgcccgcttcaggcgactctccactggcttcctgggagccttccgttaggagactgctctctcaagatccccgtcaccagggctttctggttggaatgaggcaatggacctgctttacacggtgcgccccatttacccaacagcgtttcctgtccttgctggccacagccatcacaagtggggctgtcatcagccactttaaacaaggcaaaacgtatttacctgtcagggaaaataccaagatcacaaaggtggttttcccagggcaaggttcgtccattgcactccagaatgtgctgacccctgcgatttcttcatatgtggggaactgccaactcacactctccccagcaatacaaataaataagtaggctgggcacagtggcccatgcctgtaaagcactttgggaggccagggcagtaagatttgcttgaggccaggagttgaagaccagtgtgggcaacatagcaatacctcctctctaccaaaa

SEQ ID NO: 113066 - DNA, 3435 bp, Homo sapiens
cgagtttgaggcagcgctagcggtgaatcggggccctcaccatgagttcctcgcctgttaatgtaaaaaagctgaaggtgtcggagctgaaagaggagctcaagaagcgacgcctttctgacaagggtctcaaggccgagctcatggagcgactccaggctgcgctggacgacgaggagggccgggggccgccccgccatggagcccgggaacggcagcctagacctgggcggggattccgctgggcgctcgggagcaggcctcgagcaggaggccgcggccggcggcgatgaagaggaggaagaagaggaagaggaggaggaaggaatctccgctctggacggcgaccagatggagctaggagaggagaacggggccgcgggggcggccgactcgggcccgatggaggaggaggaggccgcctcggaagacgagaacggcgacgatcagggtttccaggaaggggaagatgagctcggggacgaagaggaaggcgcgggcgacgagaacgggcacgggggagcagcagcctcaaccgccggcggacgcagcagcaacagccccaacagcagcgcggggccgccaaggaggccgcgggggaagagcagcggccccacctcgctgttcgcggtgacggtggcgcccgcccggggcgaggcagggccagcagcaggcgggaggggacggcaaaacagaacagaaaggcggaggataaaaagaggggtgttaaaagtaccacgagaagatcatggccgtggatattttgacgtacattgaagagaacaagtatagcagatccaaatctcctcaagccaccttgtttgaagaagaagattgaacacttccgattgacacagtggtttgtctttgatactttataatttgttgatctacattttaaaatatcaagagatcgtctcagtgcttcttcccttacaatggagagttttgcttttctttgggctggaggaagagcatcctatggtggtgtcaaaaggcaaagtgtgttttgagatgaaggttacagagaagattccagtaaggcattgatgtacaaaagatattgacatacatgaagttcgtattggctggtcactaactacaaagtggaatgttacttggttgaagaagaattttcttcatgggtattctctaaaagggaataaaaaacatgcaactgtgagactcgaagaattattggccacgaaaagttttgattgaaaatgatgtgattacatgttttgtctaactttgaaagtgatgaagtagaactctcgtatgctaagaatggacaagatcttggcgttgccttcaaaatcagtaaggaagttcttgcatggacggccactgttcccgcatgttctctgccacaactgtgcagtttgaatttaattttggtcagaaggaaaagccatattttccaatacctgaaggagtatactttcatccaggaacgtccccttagagggtcgagttaggagggacccaaaggggcctgaagagaaaaaagattgtgaagttgggatgatgattgggcttgccagggaagctgggaaaaactaccctgggttaactaaacatgcagcagaaaatccaggggaaatataacattcttgggcacaaatactattatgggataagatgatgctggcaggttttatagaagcaaatggcagatactggaaaactgaacaccactgttgcagagagcccccccagtgtcttggggaaatttattgagattgctgccccgaaaagaagcgaaattttattctggattcagaccaatgtgtcctgctgctgcccagaggagaaaaatgtgcctgtttggccaggcctcccagcgaaaagctgttggtagtttgcccccaaaagatgaagacctataagcaaagaacacagaagaaagcagaagtagaggggaaagacctaccagaacatgcggtcctcaaaattgaaaggaaacttttaccctcccagaggtaagctggagtgctttggatgaaataacctatgttgaacttcaggaagggaaggaagcccaaaaaacccttggaggcaatataaggaagaaagcaaaaaggctccttccaccagaaaagaaacagaacactggctccaaagaaaagcaataaaaattagatgtgccaagaacagttttatcagaggtggtggccatagaggacgtgggaggattcaatatgccgtggtggaaatttccagaggaggagccccctggggaatccgtggccggatataataggaggggcaacattgccacatgagaaggtggtggccggtgggaggaagtggtgggaatccggctatccataccctcgtgcccctgatttttcctgggccgtggtagttacttcaaacagagggaacctccaccagaggtgggaattccccaacagaggggaacttaccaaccagaacttcagaaggacgaggaaacattcgtggctacaaacactcaatctcagggactacaaccaagtggcaagcaagggtcaatttctgggggtcagaagccaatggagtccagcattatcaccaaggatattattgcaatacccaaataaaacgtaactgatacatattttctccaaaaccttcacaaagaagtccgacttgttttctttagtaaggctaactttttaaacattccacaaagaggaagtgcctgcggggttccttttttaggaagctttgtggggttgattttttttttcttttctttttttgtacatttttaattgcagtttaaaaagtggaatcgtaagaggaacctcaggcattgtgcacggataagaggaatgtgtcagtatttcaggggttctacattttatccggtaaaatgtgactttbttbbbbbbbtttatcacaacaggaaggtaaaatgttgctttgtacccggggggtcttttattaaggaatttactcccccccattttctcacagagaataacagtccgggaagtcattgtcaccaatattaataggaaatgttagccaacccagattccatgtaaaggactaaagtggtcctccatggaattgccattaagacccctgtactggctcatattacactccatcctctctgtaagtttgctggggtagtggagggggggtaaggctaaaatccatagttttctggacattaactgggggaagggtttttcttataataacaatgggaattggtataattggggattgaaaacctaaaacttggaactaagatagagaagatggagtgtatgtagaagggctgttaaaaatgtaaaacttggttgcattatttgtggaggctcaaacttgtgaaggttaataccataatttttccatttgttctgcattttgattctgaaaagaaagcctgctttgcccatttcttattaaaaaaacttgttgtaaatccgaaaaaaa

SEQ ID NO: 113067 - DNA, 1540 bp, Homo sapiens
ttttttttttaaatggagatagggtcttaactcttgtccaggctggaggagtgcagtcgtacagtcatggctcactgaagtcttgaccccgctgcctcagcctcccaaataactggggccacaggtgtgcaccacaactctcagctaatttttaaaattttttatagaggtggggttttactatgctgtccagactgggtcttaaactcctggggcttcaagtgatccccctggccttgggcctcccaaacctggtgagattacaggcatgaggccaccacaactgggcctgaaattcttaaaggatgggagtgtcgatgacagcaccttggcatcgttgtgcctaacctgggagacggaagaagcacgccatgggaagtgtttacacttgcgggaccagtgctaagtattgtggaagccatagccccttgaagatagatggctactttgcctttcttcttgaactgtcttgcagaatgtgggatttggggtaagtggtcttgaaggattcatttagtcacccttcaaatttaagatttttacttcatctttcttggggcctgcacctccaagataacaaagaagaagcaatggtcgtgccaaaagaggtccacaaccaggtgtgcactgttcactgcagcccattcgcatgtatgaactgtggtcgtagtgggccccaatcacaaaggctactaagaaattcatcatttgaaacgtagaggccgcagcagtcaagcgatgtttctgaaatgagcaatccttgacgcctgtgtacttcccgggctgggatgtgaagctaacattacccatgtgagttgtgccatttcaccagcacagtgggtgagggaatttgaggctcatggaagcagggcaagggaccgaacacctccacccccaacgtagacctgcagggtgctgccacatgccctccacccaaagcccatataaggagcggagttgttaaggactgaagtaaaaacttctctggagaaaaataaaatcgcatttctacttaaaaaaaaattttttttttttttacttccataggcccaggcttgaaagttcctgaacactttgaaagtccccccaattatgagagatcccagtcctaaaccctctggcctgcctaattagcaataagtgctttatttgggaaaggagggagtcatcccactcttggagccactgcagtgaagttacttgatcctcagtctgggggaaaacacttcaatagctaaacattcctagctttgatttttctgaagggaatacacttgttttcaattttggggtttttctttggggcacttgccttgaccctgtatgaacttgtgatccaaggaaaaaggagaaagaacagtgttggcttttaaaatcaggatggttttatgtttgctacgaaataaggcaagaataaaaaattcttattttcatttatttatttattttttgagatagagtctggctgtgttgcccaagattgcaccattgtactccagcctaggcaacaagagcgaaactgtctcaaaaaaaaaaaaaa

SEQ ID NO: 113068 - DNA, 867 bp, Homo sapiens
ttttttttttgagagagtttcacccttgttgcccaggctagagtgcaatggcaggatcttggctcaccacaacctccgcctcctgggttcaagcgattctcctgcctcagcctccggagtggctgaattacaggcatgtgccaccacgcccggctaattttgtatttttagtagggacagggtttctccatgttggtcaggctggtcttgaactcccgacctcaggtgatccgcccacctcagcctcctaaagtgctgggactacaggcatgacccatcacgcctggccttttttctctgagacagagccttgctctgttgcccaggctggagtgtggtggctccatctcagctcactgcaacctacgcctccttggttcaagctattctcctgcctcagtctcctgaatagctgagattacaggtgtgtgccaccatgcctggctaatttttttgtatttttttttaagtagagatgggtttcaccatgttggcaaggctggtcttgaactctgacctcaagtgatccacctgccttggcctcccaaaatgctgggaatacagatgtgagccgctgcacccggccagactttgacttttccaattttttcaatgataatcttttttcctgataatatgttcacaatcaagtaataccagggactgctgagaagtggatgatgaagggtgataagatatagactgtgcccttctctttgcagctcctgagaggggatgggaagggattttgggagggtgagaaacagctttgtctgcccagagcagctctgaaggtggcccagtgcagaacaggatctctgaagggcagagcggggacacccatttctgggggatgggaaagagggg

SEQ ID NO: 113069 - DNA, 530 bp, Homo sapiens
tactacactccaaccacatttcctctgaacattatttacacaccaaatttcactctggtagcaactaaattttggcacagatgagattaaccactaaaggccacatttgctggtccagttccctagaaagcaatgacacaacaaatttgttaggaagacttggttcaaggggaaaaactgatagcaggagatactttggaaaaagagcacactgacagagtgtctctgccccaaagaactctgcagtctggtattgaaaagtaaattttcaatgaggctgggcgcggtggctcatgcctgtaatcccggcactttgggaggccaaggcggacagatcacttgaggtcagtgtgagaccagccgggctaacaccgtctctgctaaaaatacaaaaattagctgggcacggtggtgcgcacctgtcccagctcttcaggagactgaggtgggagaattgcttgaacctgggagatggagctgagatcacatcactgcactccagcctgggccaaagagcaagactccatctc

SEQ ID NO: 113070 - DNA, 656 bp, Homo sapiens
  misc_feature (1)...(656): n = a,t,c or g
aataaatnaaanaatccagaaaaagcagtcataacttgttgtagacacttaaccattccctaactgcaggaagagcaagcagagtaacttgttccagagtacaaatgcgatgcaaggcatcagctaccaggaaagcaggccgcttgcacccactcccaagatttagccgtcatctgcattaagtatttattgcattaatctaacgcttactcctataaggctgcaaattttactataaagtatgtgtttctttataaagtgccttgcctccgagaaagatgccaaatggcctgccaaagttccacaaatactttgttgtttgaggcaaggctgggagagcatccattttaatgggtctaacttaggataatatgggggttccaataaggtggaacgtattttaaaccttttgttactctcttcttctttctaccttttgcccattttactatgcagcagtgctgttaccagaatatacatgaagagaatcagaaatttaatcatttcaaaatgttgataaagaaatataatggtcgggcaacagtgtttcacaccggtaatcccagcactttgggaggccaaggtgggcagatcacctgaggtcaggcatttgagaccagcctgaccaacatggtaaaaccccgtctctactaacg

SEQ ID NO: 113071 - DNA, 1583 bp, Homo sapiens
ggcgcgggcgggctgctgaggtggctgtcgccggctccgagctgcggcttcccgggccgagcccccgatggaggccgaggttcgttgacgctcccccgggcggggttgagtcggcgctcagctgcttctctttcaaccaggactgcacatccctagcaattggaactaaagccgggtataagctgttttctctgagttctgtggagcagctggatcaagtccacggaagcaatgaaatcccggacgtctacatcgtggagcgcctcttctccagcagcctggtggtggtagtcagtcacacaaaaccacggcagatgaacgtgtatcacttcaagaaaggcacagagatctgtaattacagctactccagcaacatcttgttccataaggcttgaaccggcaaaggctgctggtttgcctagaagagtccatttatattccacaacattaaaagacatggaagctgtttgaaggaccctcctgggatattcctgcaaacccaacaggtctatggggtctcttctatcaaccattccaattcttacctggcctatcctggaagcctgacttcaggggagattgtgctttatgatggaaactccctgaaaacagtctgcactattgctgcccatgagggaacactagctgccatcaccttcaatgcctcaggctccaaactagcaagtgcgtctgaaaaaggcacagtcatccgggtgttctctgtccctgatgggcaaaagctctatgagttccggagagggatgaaaaggttatgtgacaatcgcttctctagtgttcagtatggattcacaattcctctgcgcctccagtaacaccgagacggtacacatctttcaagctgggaacaggtcaccaacagttcgaccagaagagccttcgacctggagtggctacatgggaaagatgtttatgggtggtaccaacttacttccctacccaggtgtcagacatgatgcatcaggacagggcttttgccacttgcacgcttgaacttctccggacagaggaacatctgtaccctctcaacgatccagaagttgccacggctgctagttgcgtcatccagtggacacctttatagtgtacaatttggatcctcaggatggaaggaagaagtgtgtcttaatcaaaacccacagcttggcttgggctccaggaacaacaggaagagaataaagaaaattgacctcagaccttccttacctcagtcttatgcagcgaccgtagccagaccaagtgcatcttcagcctccacggtgccaggttattctgaggacggcggggcgctgcgaggagaagttattcctgaacatgagtttgcgacgggaccagtgtgtcttgatgatgagaatgagtttcctcctataatcttgtgccgtggaaatcagaagggcaaaacgaagcagtcatgatgagaagcacacctcagaaatcaggacatcccccctatcaggtggttttggagaaaacatggaaggcggaagaatgtagtgcaattgtgtgatcctaaaggggggcaggaatcccgggtgctccactgcttaaaccacaggacctgggtt

SEQ ID NO: 113072 - DNA, 1213 bp, Homo sapiens
  misc_feature (1)...(1213): n = a,t,c or g
aggagtnnnnnnnnnnnnnnnnnnnnnnnacaaacttccaggactctagccttcctggcaacgccccccgaggccggacttccaggatccagcctgtattgaggatttgatgcgacggcctcacggggctttggaggggaaagaggcccagagtagagagagagagagaccgacgtacacggtatggctacgggaacgcgctatgccgggaaggtggcggtcgtgacacgggggcgggcgcggcatccggagctgggatcgtgcgcgccttcgtgaacagcggggcccgagtggttatttgcgacaaggatgagtctgggggccgggccctggagcaggaagctccctggaggctgtcttatatccttctgtgatgtgactcaggaagatgatgtgaagaccctggtttctgagaccatccgccgatttggccgcctgggattgtgtttgtcaacaacgctggccaccacccacccccacagaggcctgaggagaccttctgcccatggattccgccagctgctggagctgaacctactggggacgtacaccttgaccaagctcgccctcccctacctgcggaagagtcaagggaatgtcatcaacatctccacgcctggtgggggcaatcggccaggcccaggcagttccctatgtggccaccaagggggcagtaacagccatgaccaaagctttggccctggatgaaagtccatatggtgtccgagtcaactgtatactccccaggaaacatctggactccgctgtgggaggagctggcagccttaatgccagaccctagggccacaatccgagagggcatgctggcccaggtagaagtggggttcagatccagccactgggccgcatgggccagcccgctgaggtcggggctgcggcagtgttccctggcctccgaagccaacttctgcacgggcatttaactgctcgtgacgggggggtgcagagctggggtacgggtgcaaggccagtcggagcacccccgtggacgcccccgatatcccttcctgatttctctcatttctacttggggcccccttcctaggactctccccaccccaaactccaacctgtattcagatgcagcccccaagcccttaggactcttaaggcccagtttaggcaaggttgccgggttcacccttgcaggtttcccttaaaaacgattttggcagccaggaaaaaaaaaaaa

SEQ ID NO: 113073 - DNA, 2039 bp, Homo sapiens
ttttttttttttttcagaaaactttttttaattaaatgtgtaaaaagcagttctcatcttaccaagctcaaaatcaagacgaatgtatgagggtgtataattgttatatttataaactgtatcacccaaaaactcaatgaggacacaatctatattacattcaacatttgcatatttacatcgatacttactgcaaaggtaaataccaaaatgaactcccccaccatttagttccagaacacaggtgataataatttccaaaacaaaggcaattttttttcaaccaaaagaacagaagtctccccaagtacccaattcaactattttgccagaaaaatacaacactgaattataagatttcccattccagtttaggtcagtaagatacgttgtttgtttgtttgtttgtttgttttgtttttagaaacagggtctcactctggtcatacggggctgggagtttcagtggtggcgatcagaattcactgcagccttgaactcctggggctcaaagaatcttcccaacctcagcctcccaaagcactgggattacaggtgtgagccatcacagtctagtaaggtatgtttttgttactgaaatacagctaaagttttggattttaatcaccaaaataacagtacttctggtttacaattgactttaaaataaaggatactaatatatatttattttcacattttttttaaatcttcaaaactgaaatacaattctgaaagtatttgtgccttgtcatttgttcaataaatttgatttgtttttaaacaggtcacaaaagttcaattagctaaccagaattctatatcgtagttgcctgtcgtactggggttcagtcttaagtctgactatatcaaaagcagcagctccagaatttatttcataaaattaatccccaagagttactgggtagcttttaaagtatttcatccgcttataatacaactcactagatacgatagtctatactaagtgactcggtgacatcaaaattatctggagaagttttttaaaaaatacgtaaggatccacatcataactacactaagaatcaagaatgtctgtattttttttaacgttcccaggtttataaatgctatgcagcctagcgtgggaaaccccaacgtaccacttaagcctgtggttctcaacttttcaggtgccactggaatcactgggggaaactttaaaaacaaaaaagcaaagcaaaacaaacaaagaaaaacagatgtgcttcagtaggatagagaattgtgtgcagggaaccagcattttaaacaaccactgcagttggtcccaaatgactcagaaacgctgtactacctttgtcagatatcatattataatgagtacattcagcaatttaggtgacattgtctgcaagccctaatgaactcctgccctaggcagttttaagccaagtgtttggggggcaacactccagccttttcaaataaaatatatttaatattccttaaatattagggtcaaagtccaactgaattggtgagacccaccattcattgaaagaaggcaaatgcctcttttcccaacaattttaaacctttaaacaaacccagttccttagcccctcaacttaaaccctaatgcctttcctcctatcgttagcctgatatgtgatcagaggtagtgattcccatcttaccagaaatgtattgtggattataaaagatcccattcatacatcttcacaggctctgtacagtccctatgtaatggagattggagaccagttggatattaaataatactgtaaaacaggtaaacaatacactcttgattttaaacaatgaaacctcgtatttccctcaaacaataaattcttacatataatatccagaaaaaaattctagaaaacactaaaggtatcacgctgcctcttttgtgaagctatttactaatttttcaccatccctgtaattatctataaagtgggtatttggtgtacatcattccacttcaagaaatttttttttcttttttttggagacggagtcttgct

SEQ ID NO: 113074 - DNA, 1815 bp, Homo sapiens
gaccgcagaccctgattacgtcaagcttggcacgaggcctcgactcttagcttgtcggggacggtaaccgggacccggagactgttctctgtcgccttcgcctcctgaatccctagcgcactatgcgtgagtgcatctccatccacgttggcgcaggctggtgtccagattggcaatgcctgctgggagctctacgcgcctggaacatcggcatccagcccgatggccagatgccaagtgacaagaccattgggggaggagatgatttccttcaaccccttcttcagtgagacgggggctggcaagcatgtgccccgggcagtgtttgtagacttggaacccacagtcattgatgaagttcgcactggcaacctaccgccagctcttccacccttgagcagcttatggacaggccaaggaagatagctgccaataactatgcgccgagggcactacaccattggcaaaggagatcacttgaccttttgttggaccgagattcgcaagctggcgcgaccagtgcacgggtctccaggtcttcttggtttttcacaggctttggtgggggaactggttctgggtatcacctccctgctcattggaacgtatctcagttgattatggcagagaagtccaagctggagttctctatttacccggcgccccaggtttctcacagctgtagttgagccctacaactccatccctcaccacccacaccaccctggagcactctgattgtgccttcatggcagacaatgaggccatctatgacatctgtcggaaaaacctcgatatttgagcgcccaacctacactaaccttgaatagggttattagggcaaaatggggccctccatcactgcttccctgagatttgatggagcccctgaattgttgacctaacagactctccagaccaacctgggtgccctacccccgcatccacttccctctggccacatatgccccttgtcatctctgctgagaaagccctaccatgaacagctttctgtaggcagagatcaccaatgcttgcttttgagccagcccacccagatgggtggaaatgtggaccctcggccatggtaaaattacatgggctttgcttgccttgtttgttaccgtgggtggacgtgggtttcccaaaaggatttcaatggctgcccattgccaaccattcaaaaaccaaggcgcagattcccagttttgtgggattgggttgccccattgggtttcaaggttggcattcaatacccagcctcccactggtggtgcctgggtggagacctggccaaggtacaagagagctgtgtgcatgcttgagcaacccccacaggccatttgctgaggcctggggttcgcctgggaccacaagtttgacctgatgtatgccaaacgtgcctttgtttcactggtaccgttggggaggggatggaggaaggtgagttttcagaggcccgtgaggacatggctgcccttgagaaggattatgaggaggttggtgtggatttctgttgaaggagagggtgaggaagaaggagaggaaatactaaagttaaaaggtccccaaaggtgtggctttaccagggaagcttattctgttttaaacattgaaaatgttgtggtctgatcagttaatttgtatgtagcagtgtatcgctctcatatacaattagctgacctatgctctaaaacatgaatgcctttgttacagacccaagctgtccatttctgtgatgggttttgaataaagtatttccctgtcttacatgaggcacgaataacaaaacatccttgtccttcaaaaaggggg

SEQ ID NO: 113075 - DNA, 2210 bp, Homo sapiens
atctatgacaacagaggccacggcattatcaccaagggcgacagcaccatcgtcattgaaaacgatatcattggcaaccggggcagcgggctgcagctgctgcccaggtccgacactaaagtaataaagaaccggatccactcgttccgggcctacggcatcgccgtgcggggccgtgccaaggccctggtgcaggaaaacatcatcttccagggcaaaaccagtaagaccatctttcagcagatctcaaacaaccgagaatgcatcatgcaaaacaacaagttcctggtcttcaagaaaaagtctgatacgtggcgcctggtgaacccaccagcacggccccaccttgaaaattctctcagacgtccctcggcatgcccacaatgggcagaaggtgacagccatggcaacgaggatcacagcccgggtggaaggtggttaccacagcaaccgcagtgtcttctgcaccatcctgtgaggacacagacctgcttcagggccaagcctggatgggtgctcagaggagctaaggtggaaaatactgcctgaaaagactccgcccctccccctccccctcgaacaaatggggtcccgggcctccaaaacacggtacctccagaacacttcagctccacagcccatagcaagaaggaaagtgggcaatgtttttcagggagaagggatagaagctggtgggtttccagtcacttcgaagtctattaaagattgttgaaggagcggggggaaggttcaaatgctggaagcttttggttcagggttttcttttgagttcttaagggaactgtgttttacacacaccaaacccagactcttctcaggaaagagcagatttacttctgatggcgggaagtgattctagtgaggtggagagagacaactgctccagaattttcccctttgctagagctgtctccctctcaatccctccagggaccccaccacaccctcccagctgtctctggaggctggaggagttgagtttgggttgacttgaggacttggacatggacctgggaggaaggaaggacctgggagcaacaggagaccccatggaaaggctgccccagggatgacaagagggacatgctgaaacaggtggggctgcagcgtgcaggcaagatgctaggctgggtggggcaagggatgcacaaggctctactccatcccccagaagagctccccaaatgcagaagggatttaaaaccccatgtgagcgtgcccacaccagccgcccctcctgagcatcagcctgttcagatgagggtacctggggcctctcgttcgcatctgtgttctcatggatgagcgctggtctttactgaccctcccaagcctccccactctgtgccttggctcatgctctttcctcctcccgggcatgcccttctcccccattttccgtgttcctcgtttcctcaagggttttaggccgaggacactggccaccttccacatagggttcttccctggccctcttttcccctctgggcctcagtggcctttctctgctccctctcagggtactgagcactttctgccttgtcctggagctatctgggtccattgcctgaccccccactcacctgtgtgctccccgtaggtagggcccacttctgactgtgtgtcccccagatccagcctggggttggggtaggattagtggcctgagtgaggagaggaaggccagctccccagaggactttactgaaccgtaactgtgaaatatgtccaaagtcccaaagcccaggtgaaggtcagaccccccactgccctgaaggaagaggggctgggatgcagggccagcttcaacctgaacaatcccctcccaactcggcctttccctgtggggccttcacccagcctgctgggggtcactgtcgtgcacttggctgcgtggcttggttctaattggccctaggtgctgctcctgttgggtgggaatgggaaggggggtaaaagggagcccaggagcactgggttctccctgagaacactgggcacaagagtactggcctcttctatccctggcactgtcctttgcacttgtttggtggccccaatgtgagtcgctgtaaaaaagtgctgccgttactattttctaagaaactgacttttctgtgaaccaacagtaacaaaaacctcagtaaccaaaataaagttctatattttaaaaaaggcaaaaaaaaaaa

SEQ ID NO: 113076 - DNA, 1836 bp, Homo sapiens
  misc_feature (1)...(1836): n = a,t,c or g
ttttttttttgtctttaatgtctttgtttagttattctcttctcctgtctctcctgcacgctcctccctttccacttctttcttctctcttcggtcctccccgtgggaacctaatgtatacgaaaatctagtggtgcctccagttgtattttcccatgaatcgctttattgactttgcttcaagcctttcaaatgggcatctgggtgcttacctgtgagacatcccacctgacctgccagataaaagacgatttaaaccctattttgaaaactgaggataaaccggggcttgggaaaagtttaccttcccccaaggttctcagcacttaagtaattttaacctaggactcgaaccccagggcaggcgactccctgactgctttaaagacggcatggtaaagaaagccaggtcccagaaagtcgagagaacctgggtgtgcaagttcctaggggatgcttaagaacgagagaagggggagcaagtgtctctgtgaagggagtgtaaagacacagaagtgaaccggagccgcagagccctgtgagagaaggcatgaaaatgtgtccttgtgtccatgagccgaaaacatgacaaggattaagcccacagaaaagtctttacctttgtgaagcgtgcttccacggagtagagcgagtcaggaaaccagtgggttgaaagaggaaaattggaggttaggaaggaagaccagcaagtgtagaccaggcctttccaagaagcttggctgtgaaaggaaagacagagactgtagtggcttagaaaagatgaacagcagggaccctgggaggctccccaggctgccnggcacagccaaaagtcaagaaatgccagagggaggcccttcctggaaggtggcccgggaactgaaaacaggtaacaatccttccctcctaagaactccagggaacaggggttcaatgatccagtggggccccaatctgtggagcctcttgaacagcctctgtttccctgggagtggcagtggccggccctggctcaggacagggagttgtgaggatcaaatgaatggacggttgcaaaaagtgacaggaacattcactaccattactcactgggagcaggactctcgattttacagcccactcgaatctcactggggcctggattttcactgacccataaattattcgtcctgaacattaaggatgtaaaaaaccactggtaaaaagctccctgccagtctctgggaagacaaaaaggtcccctccctaaatagccctggattaacttcaaagccaggtctccgccccacttcaatttgtcaccgtcccaagtcatccttgcacctccatttgccacataatccaatcagcccctttcagaggctgggcagctattgtctacactgagctgggcttctctaaagcagcccaagttgtttttgtcttgtccggacaaaactggttggcttaaaacgggacgaaaaaaaattcctggtcaaatgaggaccccaattaggttccaagagactgttttcataatctttgtatcagatacctagcctggtgcactgggcagattgtcggtgccccagaaaatgtttgttgaattaattcatttttatttattctggaatttcttaattgaacacaaacacacacagcacctactgagtgctgttctcactaagggagaattgggctggacatgtgagcaaggagggacagcctcgggtgcttgagtagctcacactttccacagcaatttacaaagcactttcatagtagttacagcatttggtcttcaaaagcgccctgtggggtagatacacgagggtgtgtgtgtgtgtgtctcgtgcc

SEQ ID NO: 113077 - DNA, 789 bp, Homo sapiens
  misc_feature (1)...(789): n = a,t,c or g
cattgatagccgtcctggaggcccagaattcggaacgtctgaggctatcaataagctcctagtccagacgcgcatgggtcatttcacatatggaggacaaggctactatcacaagacctgtggggcaaaggtgaatgtggaagatgctggaggagaaaccctgggaaggctcctggttgtctacccatggacccagaggttctttgacagctttggcaacctgtcctctgcctctgccatcatgggcaaccccaaagtcaaggcacatggcaagaaggtgctgacttccttgggagatgccataaagcacctgggatgatctcaagggcaccttttgcccagctgacgtgaactgcactgtgacaagctgcatgtgggatcctgagaactttcaagctcctggggaaatgtgctgggtgacccgttttgggcaattccattttcgggcaaagaatttcacccctggaggttggcaggctttcctggcataagagaagatggcagaagatggtgacttggnagtggccagttgccctgttcctcccagaataccactgaggctcactggcccatgattcagagcttttcaaggataggcttttattctgcaagcaattacaaataataaatctatttctgctaagagatcaccaaannnnnatnntnnnnnnncccccggattttttatttagcgggccgcacctttttccccttttagggggggtaaatttatattgggccttgggccggggttttcaaaagcggggggannnnnnnnnnaaagagccc

SEQ ID NO: 113078 - DNA, 2220 bp, Homo sapiens
  misc_feature (1)...(2220): n = a,t,c or g
tccatattgtgcttccaccactgccaataacaaaataactagcaaccatgaagtgggtggaatcaatttttttaattttcctactaaattttactgaatccagaacactgcatagagacgaatactggaatagcttacatattggatgcttaccaaaggactgcagagataagtttatctgacctgggctaccatattttttgcccagtttgttcaagaagccacttacaaggaagtaagcaaaatgggtgaaagatgcatttgactgcaatttgagaaacccacttggtggattgaaccagtcttcaggggtgtttaggaaaaccagcttacctgcctttctgggaggaactttgccatggaggaaaggaaattttgggaggaagtacgggacatttcaggacttgctggcagcccaaagtggaagaggggaagacataactgttttctttgcacacaaaaagcccactccagcatcgatcccacttttccaagttccagaacctgtcacaagctgtgaagcatatgaagaagacagggagacattcatgaacaaattcatttatgagatagcaagaaggcatcccttcctgtatgcacctacaattcttctttgggctgctcgctatggacaaaataattccatcttgctgcaaagctggaaaatgcagttgaatgcttcccaaacaaagggcagcaacagttacacaagaattaagagaaagcaggttgctaaatcaacatgcatgtgcagtaatgaaaaattttggggacccgaactttccaagccataacttgttacttaaactgagtcaggaagtttaccaaagttaattttactggaaatccaggaaactagtcctggggntgtgggcccatgttacatggaggcacttgtttgcaggggggaggtgttgctgggattgtctgcaggatggggaaaaaatcatgtcctacatatgttctcaacaagacactctgtcaaacaaaataacagaatgctgcaaactgaccacgctggaacgtggtcaattgtataattcatgcagaaaatgatgaaaaacctgaaggtctatctccaaatctaaacaggtttttaggagatagagatggttaaccggttttcttcagggggaaaaaaatatcttcttgggcaagttttgttcatggaatattccaagaaggacatcctccagctttgctggtctcagtaattctaagagttgctaaaggataccagggagttattggagaagtgtttccagactgaaaaccctcttgaatgccaagataaaggagaaggaaggaattacaggaaatacatccagggagagccaaggcattggccaaagcgaagctgcgggccttctttcccaggaaactagggaggatttttactttaccaaattgcgttttcttcgtttgctttaccaccaaaggaaagccccccagctggacctcgtcggagcttgatggccatcaccagaaaaaatgggcagccacagcagccacttgtttgccaacttcagtgagggacaaactattggccctgtggcgaggggagcggcttgacattattattcgggacacttatgtatcagacatgaaatgactccaggtaaacccctggtgtttggccaagtgcctgcacctccctccatatgccccaacaggaggccccatgcctccagccagcttggtggtggatggaaacatatggtcccctccctgcattcctctgatgaccaagttccatttttccccataaagggatcctggtggcccaagcctccaggggtggtaagcgcctgccaaacggatgaaggcaaagagttttcctcaattaacctttgtggaaggcaaaagccccacaaatacccggggggaacaaccttgaggcctgtccattgccagatttcctcaggccctgttggagaaatgcctgccaaggccccaggaacaggaagtcctgctttgcctgaaagaggggacaaaaacttgatttcaaaaactcgtgcttgctttggggagtttaaaattactttcagggggaagaggaagacaaaacggagtctttccatttcggtgttgaactttttctctttaatttttaactgatttaacacctttttgtgaattaatgaaatgataaagactctctatgtcgcagatttcctatatcacacgaaataaaatatctcccaaatgttaaaaaaaaaa

SEQ ID NO: 113079 - DNA, 2168 bp, Homo sapiens
cccacgcgtccggacccacgcgtccggtttcttggagcgttccacaaactttaaaaccatgaaacatctattattgctaactatggggtgtttttctaagttaagtcccaaggtgtcaacgacaattgaggagggtttcttcagtgcccgtggtcatcgaccccttgacaagaagagagaagaggctcccatgcctgaggcctgccccaccgcccatcagtgggaggtgggctattcgggcttcgtcccagccaaagcagcttgccacttcaaaaggaaagttaggaaaggaaaagcccctggatggctgggaggcttgttctttcacggttggaccccaggacctggggggttgtttgttgttccttacagggatgttcaagtttgccaaggagggtttttcttaacaaccaggggaaagggcccattccaggaattagttgttttgatggagtttaaattaaaccattgttgggaaggttgtttttccccaggacctccttctttcttccttttcagttacatgtattttgcttgaaagacctgttggccaaaaagagggcagtagcaagttaaaaggttaatggaaaatgtagtcaatgagtactcctcagaactggaaaagcaccaattatatatagatgagactgtgaataggtaatatcccaacctaaccttcggtgtgcttcgttcaatcctggggaaaacctgaggaagcaaaattccaaaagttaggaatcttgatgtctcaactcaaatggaatattgtcgcaccccatgcactgtcagttggaatattcctgttggtggtcttggcaaagaatgtgaggaaattatcaggaaaggaggtgaaacatctgaaatgtatctcattcaaccctgacaagttctgtcaaacccgtatagagtatactgtggacatggaatacaggaaatgggagggtgggacagttgattccaggaaccgttcaagacggtagttgtttgggctttgggcagggaaatggggatcccttattaaacaggggttttgggaaatgtttgccaacccaaccacaggtgggggaagaattactgtgggcctaccaggtgaatatttggcttggaaatgataaaattagccagctttaccagggatggggacccacagaacttttgatagaaatgggaggactgggaaaggagacaaagttaaaggcttcacttatgggagggattcacttgtacagaatgaagcccaacaaatacccagatctcagtgaaccaaatatagagggaactagcccggtatatgccccctcatgggatgggagcatcctcagcctgatggggagaaaaaacaggacccatgacccattccaccaacggccatggttccttccagccaccgtatggaccagaggaccaatgaccggcctggttaaaccatccagatcccccagaaaaaccagtggttccccaaaagaaagaccggtggtggatgggtgggtataaataagatggtccatggcagcccaatccccaaacgggcagatacctacctggggtgggacagtacacccctgggaccatgggcaaagccatggccacagatgatggtgtaagtatggatgcaattggaaggggtccatggtcacccaatgagggaagatgagtatgaaggatcaggcccttcttccccacagcaatagtcccccaataccgtagattttttgctcttctgttatgtgacaacatttttggtaccattatggtattggggaattttcccttccatacattatatccccctccaaaacctcctcaagcagaccgtgagtgtgaccttttggaaaaaagtatagggataaattacattaaaactagctcatgattttccttttgttttccttcatttcctcttgctcacccaagaagtaacaaaaagtatagttttgacagagttggtgttcataatttccagttctagttgattgcggggaattttccaaataagggaagaggggtcttttattccttgtcgtaggaaaaccatgacgggaaaggaaaaactgatgtttaaaagtccactttttaaaactatatttatttatgtaggatcatgtcaaagaaaacttccaaaaaggatttattaattaaaccagactctgtttgcaataaaaaaaaaa

SEQ ID NO: 113080 - DNA, 490 bp, Homo sapiens
agtgataagtgtaacaaatacatacacacacacacacacacatatgtatacatacgtattttttgagacaggatctccctctgtcacacaggctggagtgcagcgtgaacacaggtgactgcagcctcaacctcctgggctcaagcgatcctcccacatttgcctctcaaagtgttgacattacaggtgtgagccactgcacccagcctatattttaaatataatatattgaaaacgcccccaaaagtgtaaatgcacctgaaaaagaggttagagaaattcatagataattagaaatattctcttcagtggctttagtgcttcaaaaagttgcaaatgttttatatgactcccataaaccctgtcatgtaatcagagcaggagttataatctaaagtgacagaagaggagtttccagagacttcaagacttgaacgggacttcacaaggtcacaccagccaatcagtggtcgacgcggccgcgaattta

SEQ ID NO: 113081 - DNA, 1866 bp, Homo sapiens
  misc_feature (1)...(1866): n = a,t,c or g
tgggagaccattctcctctttacagctcagatggtggtagagccggtagacatctagtatagcccagtggggcctcctgacctctagtggggagggcagggaggtgaggtgaggggaagcagtcagctaggtcttcagtgaggccagagggaaagatctgtaatttaagaaggacacagcgggtgacggcctctgaactaactcagtacttctcatttctcccttacagttggaggtccccctccccacttaagtgcctctttgcatagcaccagtccccacacgcacgctctctgggaccactaacagctgggacggggcaatggcggggccgcgggaggcgcagcacgacccaactggaccagctgcatgggaacaagatctgtcaatttaagctggttctgctgggggagtctgcggtaggcaaatccagcctcgtcctccgctttgtcaagggacagtttcacggagtaccagggagagcacaattggagcggccttcctcacacagactgtctgcctgggatgacacaacaatcaagtttgagatctgggacacagctggacaggagcgggtatcacagcctgggcccccattgttattattcggggggcccagggttgccattcgtggtctattgacattcaccaacacagcatacatttgcacgggccaagaactgggtgaaggagctacagaggcaggccagccccaacatcgtcattgcactcgcgggtaacaaggcagacctggccagcaagagagccgtggaattccagggaagcacaagcctatgcagacgacaacagtttgctgttcatgggagacatcagcaaagactgcaatgaacgtgaacgaaatcttcatgggcaatagctaagaagcttccccaagaacgatgccccagaatgcaactgggtgctccagggncgaaacccgaggtgtggaccttccaggagaacaacccaagccagccggagccaagtgctgcagcaacttgagccccccttgcctggcccgctgcccccgcctcctcccgcctgaatgacccgacttggaatccactctaaccaatcgcacttaacgactcggggcaccactgggggggcaagggggaggggttccaccatgatttctccatataattttgatcataggccggagtgagtcattccacctgcacctttctgtacaaatactaattcaattttaagtcttaagtcacttttttaatatatatgatcttctgctcttcccacttcctccccttttctaacttgctctcccatttttcccttggctggggagtaggccacatgctcttgccccccccaacccttggtatatgggggacagtgggggtcagtgcagctacccttttctttccccttctgcggaaacaacggaccccaagcaaagagcattccaacatccttcacttttgttccggagtggtcttttggtttgggcgggtgggggcagacctttggggaaaggggctttaggaagggagaggcagctcttcccttcagctggctctcatccaggctgcagccccctccccgctccccaccctccctgctgggaaacccacagcattatcacagcattattgtgacagcccacgaaaccccattgccacaaaccccctccaccctcgggtcacccccaacctctgggctctgagccctgttctgaccaaatctatgatgatgagtatttgggggtgggtgggtaagggggggattggcaggggacggtaaccaactttttctgtattttgtattgtatgttttcttcaacatgtaaccaatcagtatcttgtcaatatagtcagccgatcgatcgacctcaaaaaaaaaaaa

SEQ ID NO: 113082 - DNA, 459 bp, Homo sapiens
aaaaaactccgtctaaaaaagaaaaaaaagagaacaactgccccttctagcagcagcccagatggagacacccatagcagggcgccggatccaatctcttcctctcctccctcggccttcctctccccacaaaccccagggtctagaaagtagaaggttctcccctcttctctccttcctcataatgaactcgatggagctggcccgagtgcagtggtggttacagttaattgatcacaacgacttacagatttttttgttccttctccactcccactgcttcactggacgagccaaacacaaattaaataaataggcaggtcacagtggctcatgcctctagtcccagtgctgtaggaggccaaggtgggcggatcactcgagcccaggagttcgagaccagcctgggcaatgtggtgaaatcccatctctaccaaaagaagagaagaaaagtcgacg

SEQ ID NO: 113083 - DNA, 1934 bp, Homo sapiens
  misc_feature (1)...(1934): n = a,t,c or g
agtgtgcctctgtcctttgccacaaacatgaggttcacattccctctcatggctatagtcctggaaattgccatgatatgttttatgttggattattgtgttgagtatgaaaccggacccagactgttctcgagctagctcaacatcaccaagccaaccagagcatgggcatattctttgagttatatcctctgttccaagatgtacatgttatgatatttgttgggtttggcttcctcatgaccttcctgaagaaatatggcttcagcagtgtgggtatcaacctactcgttgctgctttgggcctccagtggggcactattgtacagggaatcctgcaaagccagggacagaaatttaacattggaatcaaaaacatgataaatgcagacttcagtgcagccacagttctgatatcttttggagctgtcctgggaaaaacgagccccacccaaatgctgatcatgacaattttagaaattgttttctttgcccacaatgaatacctggttagtgaaatatttaaggcctctgacattggagcatcaatgacgatccatgcctttggggcctactttggcttggctgtagcaggcatcttgtatcgatctggactgagaaaggggcatgaaaatgaagagtccgcatactactcagacttgtttgcaatgatttgggactctctttctgtggatggttttgggcccagctttaactcgggccattgctgaacctggagacaaacagtgcagggccattgtaaacacgtacttctctctcgctgcctgtgtgctcacagcctttgccttctccagcctagtggagcaccgaggcaagctcaacatggttcacattcagaatgccacccttgctggaggagttgctgtgggcacttgtgcggatatggcaattcacccatttggttctatgattattgggagcattgcaggaatggtctctgtgcttggatacaagttcctgactccactttttactactaaaacttgangattccatgatacatgtggggtccataacctccacggcttacctggtgtagtgggaggccttgcaggcattgtggcagtagcaatgggcgcctccaacacgtctatggccatgcaggcagctgcactgggttcctctatcggaacagcagttgttggaggtctgatgacaggtttaattctaaagttgcctctctggggacagccatctgaccagaactgctatgatgattctgtttattggaagggcccctaagaccgagataacttgacaaatcagttccatggacatgggtgaccacaagccagcttgggaacctgaaagtctaaacaccattcctggctctccagcttcctttcccattatccagaatcaagtccaaataaacaaaaagggagtaaccaaagagagtatggaccagagtgaatagatcctaagtcccaaatggccagtgtaaaaatgtccttatgtctgatgctgtcctcttgctcttccaataattaattgaggggatgttactcataaaacagataatccaaatagatcttctcccaggattccccaaaaagcttttggccagtgagtaaataccagagtaaacatgtcgagtttcttaatgtagacactatgtcttcaatccccccaaaaattataaaactgaaaccccctgaagcaagaatagatgtgagaaatcctatgtaaaaaaataattaaagaaatgcatgtgtgtaaagtagtaatatgatggatttttaggtagtgctttttattttaaaaatagtctagttagtaatgttgtatccttgcatgaatattattcttaattccttttgcatgttgactatttgcaacgagctcaaatgctatctgatccaaagtctattttgcataaaatgtccaataattaaatattgttataaaataaa

SEQ ID NO: 113084 - DNA, 863 bp, Homo sapiens
  misc_feature (1)...(863): n = a,t,c or g
gggtggggcccctatctctcctagactctgtggtcagactctggccaacaccccctgtaaggccacaggagaggaacaggagtgatagcccccaaaccccagtcccaccaggccctgagggcccctttgtcactggatctgataagaaacaccacccctgcagccccctcccctcacctgaccaatggccacagcctggctgggcccagctccctgtatataaggggaccctgggggctgagcactaccaaggccagtcctgagcaggcccaactccagtgcagctgcccaccctgccgccatgtctgtgaccaagactgagaggaccatcattgtgtccatgtggggccaagatctccacgcagggccgacaccattcggcaccgaggattttgggagaggctcttcctcagccacccgcagaccaagacctacttcccgcacttcgacctgacacccggggttccgcggcagttgcgcgcgcaacggctccaaaggtggttgggccgccgtgggcgaacggcggtgaaagagcatcgacgacatcgggnggcgccctgtcccaagctgagcgaagctgcacgccttacatccttgcggcgtgggacccggtcaatttcaagctcctgttcccactgccttgctggttcaccctgggccgcgcgcttccccgccgacttcacggtcgaagcccacggccggctgtgacaagttcctatcggtcgtatcctctgtcctgaccgagaagtaccgctgagcgccgcctccggtacccccaggacaggctgcggcccctcccccgtcctggaggttccccagccccacttaaccgcgtaatgcgccaataaaccaatgaacgaaaa

SEQ ID NO: 113085 - DNA, 1373 bp, Homo sapiens
cgtggaggccggggcggggcgggcgcagccggcgctgagcttgcagggccgctcccctcacccgcccccttcgagtccccgggcttcaccccacccggcccgtgggggagtatctgtcctgccgccttcgcccacgccctgcactccgggaccgtccctgcgcgctctgggcgcaccatggcccgcggggctgcgctggcgctgctggctcttcggcctgctgggtgttctggtcgccgccccggatggtggtttcgatttatccgatgcccttcctgacaatgaaaacaagaaacccactgcaatccccaagaaacccagtgctgggggatgactttgactttaggagatgctgttgtttgatggagaaaatgacgacccacgaccaccgaacccacccaaaccgatggccaaatccaaaccccaaccacccttagttcctccggtagcttttcagatgcttgaccttgctggatggcgtttcacgtggagaagggaaaaaggaggcaggtggattggtgggagcagccacaggaaaagaagggggaagaaggccgactgccccaggtgggatccccggggattgtgggggctgtcgtggtcgccgtggctggagccatctctagcttcatttgcttaccagaaaaaagaagctatgcttcaaaagaaaatgatggctgaagacctagggaacaaggggaggtggacatggagagcccaccggaatgcccaacgccagaagccagctgttcaagcgtactcttttagagaaaatagaaagattgtcggcagaaaccagccccaggcgtttggcagcagggttagaaccagcctgcctgagggctccctccctgaaggacaccacgcctgagagccagagattggaggccttctgtttcaccggcggattcttttgttttaatccttgcgatgtgctttgcttgttgcctgggcgggatgatgtttactaacggatgaattttacaatccaaaaagggggataaggcacttgggacccccatttctccaaaggcccggggggggcgggttttcccatggggatgttgaaaggctgggccatttatttaagtccctgttaactcaaaatgtcaacccccaccgagggcaccccccccgtccccccagaatcttgggctgtttacaaatcaacgtgtccatcgagcacgtctgaaacccctggtaagcccccgactttctttttaattaaaataaggtaagcccttcaatttgtttcttcaatatttcctttcatttgtaggggtattttgttttttcatatcagactaataaaaagaaattagaaacccgcccctatcttgggggggggaaaaaatttgcccaaacaactcaaa

SEQ ID NO: 113086 - DNA, 941 bp, Homo sapiens
gtggactaggcgggggagaaaggaagcctttctgagagcgggctaggccggcactggagaggccggagcctttggaacaaaccgtgcggaacggtccaggggccttcccgcccagcctttgccagatctctcgtgcggttcgggcaaagccggggtagacctgggctatgctcagttaggggttgcgggatccccgacgtgtgggcggcactgggacaccctttggcctctgtttgatccctttccagacctccaccccacccctggagcccagcctgggagcgcaaaaaccaagaagcggccagaacgcacctccggctccggcggacgcgcgaccggtgtgcaccaccagggaccgccgcgcctactctgcacgggagcagggacagcgctatgatttcgtgtacaaaacctgtgtacccctctatatatatgttacatagaatgtatatatgttgggaacatgctcgcttctcccgtgtgtcgccgccgtgcgtcgtggcgcccgcaacagagccccaacctggcactttgcagggtataggggctaccggcgacgccatcttgtccacgcagccaccaccgggcccgggccagtccctgccagtccgtccgcctgtccgtccgtgtcctcagctctgtccacgcttcgataggcctgacgcagcccccagcccaaggcccgccctagcaacttccctgtacatatgactgtaaaatggttaaacgtgtgtattatatctggcctcgttatatagtgtatatatatgtatacatatacatatatataatatatatgaagactgtaaatgttaagacgactagtgttcttattagtatattgcttcacactgaagattgtgtgtatcgagctgtttctaaaagatgtttattttccttaagagtaaaaaaacaaacaatgcattcagaaaaaaaaaaaa

SEQ ID NO: 113087 - DNA, 853 bp, Homo sapiens
gctgttctcactgatttgaatatttctgggaaattggatactacagtgcacaaataggaacagtaaggcctatagaagtttttcagggagtaaatattttctatggcagtgtcctgaattggttctcccttgcaagactgaactgtaggaacttagtcctagtttatgatacagccaagtaacatagttcacatgggaaaaagagcttgagttcagatttcttaatgtgtgttgttaacttggtagaacattgagaattatttaagtcagagaacgatctgttactggggcagaaattctcaaccttttcagttctccaaaatttaagatacttgatttcttaggtaaaatgtttttgtttttgttttggagacagagtctcgctctgtcgcccagggctgggagtgcagtggcgcgatcttgggcttcactgcaaactccgcctcccaggatttcaagcaattctggcctgagcctcccaagtagctgcgactagaaagcgcatccaccacgcctggctaattttttgtattttagtagagatgggggtttcaccgtgttgcccaggctggtctcaaactcctgagcttaggcaatcctcctggggcagcctcccaaagtgctaggattacaggcgagccatggcgcctggccagtaaaatgttttctatctagaatgaatcaaggtattttccttgctcagtagcttctagaataagaaaaaaatagcagcaagatctgattcagaaatagttgggagcagaaagttaatatgaaaggagttgctacttgttaacagccttagagttgagatcttagaagattattacctttttaaatttgtgattgaaaa

SEQ ID NO: 113088 - DNA, 2909 bp, Homo sapiens
agagagccgagctctggagcctcagcgagcagaggaggaggcgcacggccgacggccgagtactgcggtgagagccagcgggccagcgccagcctcaacagccgccagaagtacacgaggaaccggcggcggcgtgtgcgtgtaggcccgtgtgcgggcggcggcgcgggaggagcgcggagcggcagccggcctggggcgggtggcatctgtaggcccatggacgagaaggtgttcaccaaggagctggaccagtggatcgagcagctgaacgagtgcaagcagctgtccgagtcccaggtcaagagcctctgcgagaaggctaaagaaatcctgacaaaagaatccaacgtgcaagaggttcgatgtccagttactgtctgtggagatgtgcatgggcaatttcatgatctccatggaactgtttaggaattggtggcaaaaccacccagattacaaaatttactttgtttatgggagattaatgtttgacagagggatatttatttcagtttgaaacagtttacactgctttgtagcatcttaaggtttcgttaccgtggaacggcatcaccattcttcgaggggatcatgagagcagacagttcacacaagtttatggttttctatgatgaatgtttaagaaaatatgggaaatgccaaatgtttgggaaatattttacagatctttttgactatcttcctctcactgccttgggtgggatggggcagatcttctgtctacatgggtgggtctctcgccatctataggatacactgggatccatatccagaggcacttggatccgcctacaargragttccccatgagttattttttagggtccaatgtgtgacttgctgtgggtcagaatccatgatgaccgtgggtgtgttgggggtatatctccctcgatggaagctgggttacacctttgggcaaagatattttctgaggacatttaaatcatgccaatggcctgcacgttgggtgtctaggagcttcaccagcttaggtggatgggaggggatataactgggtgccatgaccggaatgtagtaacgattttcagtgctcccaaactatttgttattcgttgtgggtaacccaaggctggcaatcatgggaacttgacggttactctaaaatactcttttcttgcagttttgacccaggcaccttcgtaggggccggaggccacatgttactcggtcgtacccccagactacttccctgtaatagaaattttaaaaccttggtaccagtaattggccatgaacccataatatccgaccctaatgggaaatggggaagagcaacaagtaacttccaaagtggtcagaaaatagttaacatttcaaaaaacttgttttccacatgggaccaaaagatggtggccatataaaaatacaaagcctctttgtcatcaacagccgtcaccagtttagaatgtaaccagttcattggcatgctgaagcgacattgttgggtcaagaaaaccagttttctgggcatagcgctattttgtagttacttttttgctttctcctgaggagacctggcaggataattaaagatgttaaacatttaacacctcggtgaatacaattttaactttccatttaagctatagcttttactcaggcatgactgtaggataaagggataagccaggccaaaccaattccatttggagctttaatggaacattttttaaaaaattaatttaccaaggccctaccctcctacttgtggagttttggaaattgttctttttattttccaggggatacccgtttaaatttaaattaatatgatttgccctgcacctcagtttattcccctactcaaatcctcagcccccatggtgtctctcgggttattgtcagaacctggtgagttgttttgaacagaactgtttttttccccttcctgtaagacgatgtgactggcccaagagcactgcagtgtttttccataaataaacctgtgaaactaagaactgagaaggtccaaatttttaattgtatccaatgggccaagactggtgcctgtttaattaaaaaagttaaatccaattgagtaaattttagaatttgtagacttgtaggtaaaataaaaatcaagggcactacataacctctctggtaactccttgacattccttcagattaacttccaggatttatttgtatttcacatattacaatttgtccacattgttggtgtggcactttgtgggttccttccctgtatattaacttgtttgtaagaaaggaaatctgtgcctgcttcagtaagaccttaattgtaaaacccatataacttgagatttaaggtctttgggttttgttttaataaaacagtcatgttttccaggtagagcttaaactaaatgatgtgtttacttagtgcagtttctggttatgaatattatattgctatgtgtatattatatggactctttaaaatgattgacagattggcaaattcttaaatctttgtacattgttgagtccatatgttccttagagttaaatttgtcctcagataagaaagtgtttaaagcattagccctgtgtccaagttcctttgagtgatactagtgaaaccaaatagaaaactattgttggatcatgatttagtcttatgtacattcacccgaagacaaaaatggtacttaaagtggcagtgttcaacatttaatgagtttttccccttttatccttcgaataggattagatgtttaaaaaaaagttcttctgtgggaactaatatttgatattttaacctaccagagtaaacaggaacacttaatcatacttgtgagtgtagtaaataaaagttttcttgctttgtgctgtgttgaatctggaaccaacagggaagttatagcatatcccctttt

SEQ ID NO: 113089 - DNA, 1245 bp, Homo sapiens
gccaccaccgcccgccgccggggggccccaggtacccccagccttgccgcagaagggaatgggctcagtgcccgcgtggacgagggcgtggaggaattcttctccaaaaggctgatccagcaggatcgcctctgggcccccgaggaggacccggccactgaggggggcgccactcctgtcccccgtacactgcgaaagaagctgggcaccctctttgccttcaagaagcctcgttcaacgcggggtccacggactgatctagagaccagccctggggcagctccccgaacccgaaaaactacatttggcgacctactgcggccgccaacccgtcccagccgtggtgaggagcttggtggggctgagggggacaccagcagccctgaccctgccggcaggagccgacctcgctacacaagagatagcaaggcctactcgatgatactgctgcctgccgaggaggaggcaacgctgggtgccagacccgacaagcggcggcccctggagcggggagaaacagaactggctccatcctttgaacagcgggtacaagtaatgctgcagaggataggcgtcagccgaggcagcgggggtgccgaaggcaagaggaagcaaagcaaagatggcgagatcaagaaagctggctcagatggtgacattatggacagttccacggaggcccctcccatctcgatcaagtcccgcacccactctgtgtctgctgacccttcctgcagacctggcccagggagccaggggcctgagtctgccacctggaagacactggggcagcagttgaatgcggagctcaggagccgtggttggggccaacaggatggtccaggccctccctcccctggcaaaagcccaagtccctgcagaaccagcccctccccagacagcctgggcctcccagaggacccttgcttgggccccagaaatgaagggcggcgagcagtgtctgtgcatgaggaccagctccaggcccctgctgaacggcccctgaggctgcagcgctcccccgtcctcaaacgcaggccaaaactcgaggcacctccatccccaagcctaggatctggccttggaaccgagcctctgcccccacagcccacagagccctccagccctgagcggagcccaccctccccagccacagaccaaacgaggcggcggccccaatccctgatcctctcctctcctgccgcatgagattattttattaaaaaactcaaaggaaaaaaaaaa

SEQ ID NO: 113090 - DNA, 1750 bp, Homo sapiens
  misc_feature (1)...(1750): n = a,t,c or g
tccccccccaaaaaaagggttttttcccaaaaacccccaggaggtttttaaaacccccccccaaaagaaaaaaatttttattttccaaccccgggaaaatttgggccccccaagggattttttaaaagggccccccccnnnnnnnnnnnnnnnnnnnnnnnnnnnnnnnnnnnnnnntaggttgcaagtcctgtattgttatttttcgtcactacctccccgggtcgggagtgggtaatttgcgcgcctgctgccttccttggatgtggtagccgttactcaggctccctctccggaatcgaaccctgattccccgtcacccgtggtcaccatggtaggcacggcgactaccatcgaaagttgataggcgcagacgttcgaatgggtcgtcgccgccacggggggcgtgcgatcggcccgaggttatctagagtcaccaaagccgccggcgcccgacccccggaacccaaagactttggtttcccggaagctgcccggcgggtcatgggaataacgcccgccgcatcgccgagtcggcatcgtttatggtcggaactaccgacggtatctgatcgtcttcgaacctccgactttcgttcttgattaatgaaaacattcttggcaaaatgcctttcgctctgggctcgtcttgcgccggtccaagaatttcacctctagcggcgcaatacgaatgcccccggccgtccctcttaataatggcctcagtttccgaaaaccaacaaaatagaaccgcggtcctattccattattaactagctgcggtatccaggcggctcgggcctgctttgaacactataattttttcaaagtaaacgcttcgggcccccgcgggacactcagctaagagcatcgagggggcgccgagaggcaaggggcggggacgggcggtggctcgcctcgcggcggaccgcccgccgcgctcccaagatccaacttccgagctttgtgcccgcagcactctttaatatccgctattggagcttgaaactaccccggttgttggcaacacacttgccctacaatggatcctcgttaaaggatttacaagtgcactcattccaattacagggcctcgaaagagcccctgtattgttatttttcgtcactacctcccccgggtcgggagtgggtaatttgctgcgcctgctgccttccttggattgtggtagccgtttctcaggctcccctctcccggaaatcgaacccttgattccccgttcacccgtggtcaccatggtcggcacggcgactaccatcgaaagttgatagggcagacgttcgaatgggtcgtcgtccgccgccacggggggctcgcgaatcggcccgaggttatctagagtcaccaaagccgccggcgcccgccccccgagccggggccggagagggggctgcccgggtcgcttttgatctgactcaatgcccccatccccccccgcgaagggggtcagcgcccgtcggcatgtattagctctagaattaccacagttatccaagtaggagaggagcgagcgaccaaaggaaccataactgatttaatgagccattcgcagtttcactgtaccggccgtgcgtactatagacatgcatggcttaatctttgagacaagcatatgctactggcaggtctgctcaccaggtggccagataccgcccacgtgcccccatcattgctgtgacccggaatccccagacagctcgtcaggcccacctgtaccgtggcatcttccct

SEQ ID NO: 113091 - DNA, 650 bp, Homo sapiens
cccgaggctctgcatcggcgcagccggtgtcatctagcggccggcagttccgagcgacttggggtccttgtgcctcggagtggcgtctgggagcaaaggcggcggaggcaaccccgcagttgaggacagtaaggatcggtggctttggaccctgcccacggatacctggggccccatgccccgaaggaatggtgccttctgccctcccccgcccccccaacatccgccacctcaccgaagcgcccggcaccttagcctcctctccaggaaagcggacgccttttccgacctggcacaccgcggattcccggacccccaacaaaggcgccttggaccttcaggacacccctcttttcagaacttcatgagtcccaggtgctagactcatgtctgcggaggcctttcccgtgcctggtctttctttcttttttaaaaggagttggacctctaaaggcccttctaattctcaaggtagctacccaggttatggtactactatcagtaggtggagcgtttagaagggtagtttggtcgacgagtgaactttggaatttacttctacgtcagtcttcactgattctttctctaaactattagcactgataatctgccctataatttcacacttaattacattccagtgtagtaaa

SEQ ID NO: 113092 - DNA, 974 bp, Homo sapiens
gcagcgggagggcgcgcggccgagcggaggcggagtcggcgccgagaacatggctggaggcaaagctggaaaggacagtgggaaggccaaggctaaggcagttatctcgctcacagagaagctgggctacagtttcctgtgggccgcatscacagacacttgaagactcgcacccacaagccatgggaggggtgggtgccactgctgccgtgtaccagtgctgcgattctgtgagtacctcactggcagaggtgctggagctgggcaggttatgcttcctaaggatcttcaaagtaaaagcgtatcactcccgcgtcacttgcagcttgcaattccgtgggtgattgaagagttggattctcttatccaaggcttaccataagctgggggtggtgtgatcccctcacatccccacaaatcccctgattgggaaagaaggggacagcaagaaaactgccttagaggggatgcttttaacccaacccctctccctcccccgtcatttgtactgtaactgggacaaaaaaaataatggggatatgtggaattttttaccaccagttaaatggaaaagcatagacaattactgtagacatgataaaagaaacatttgtatgttcttagactccgaagtttgataaaagtaccttttcatgtggtgacagttgtggtgttgattggctaggtttctccccgtgtgttttatacaaaaatggaattgataaaccattttattacaaaattaatttgtctcaaaactgttctgttcatggtgtattagaaatattttactcagactttaaatattttaaatctcagattggttattcagagtaaccttagaacagaaattgggaatatatctttacaatgattgataccatggtatattgactcttagatgctattgatctgtagcaccattttttacaaacgactaaggaaaaaacctgccaattaaatcatgatatgcc

SEQ ID NO: 113093 - DNA, 5577 bp, Homo sapiens
attcaccaagtttcacgcatctgctggcctccccctgtatttcctctaagccccagcctcagtttctctttctgcccacatactggccacacaattctcagccccctcctctccatctgtggtctgtgtgtatctttctctctgccctttttttttttttagacggagtctggctctgtcacccaggctagagtgcagtggcacgatcttggctcactgcaacctctgcctcttgggttcaagcgattctgctgcctcagtagctgggattacaggctcacaccaccacacccggctaatttttgtatttttagtagagacgagctttcaccatgttggccaggcaggtctcaaactcctgaccaagtgatccacccgccggcctcccaaagtgctgagattacaggcctgagccaccatgcccggcctctgcccctctttcttttttagggggcagggaaaggtctcaccctgtcacccgccatcacagctcactgcagcctccacctcctggactcaagtgataagtgatcctcccgcctcagcctttccagtagctgagactacaggcgcataccactaggattaatttgggggggggtggtgtgtgtggagaatggggtctggctttgttggccaggctgatgtggaattcctgggctcaagcgatactcccaccttggcctcctgagtagctgagactactggctagcaccaccacacccagctttttattattatttgtagagacaaggtctcaatatgttgcccaggctagtctcaaacccctgggctcaagagatcctccgccatcggcctcccaaagtgctgggattccaggcatggggctccgagcccggcctgcccaacttaataatacttgttcctcagagttgcaactccaaatgacctgagattggtgcctttattctaagctatttttattttttttctgctgtcattattctcccccttctctcctccagtcttatctgatatctgcctccttcccacccaccctgcaccccatcccacccctctgtctctccctgttctcctcaggagactctggcttcctgttttcctccacttctatcttttatctctccctcctacggtttcttttctttctccccggcctgcttgtttctcccccaacccccttcatctggatttcttccttctgccattcagtttggtttgagctctctgcttctccggttccctctgagctagctgtcccttcacccactgtgaactgggtttccctgcccaaccctcattctctttctttctttctttttttttttttgagacagagtcttgctctgttgcccagcctggagtgcagtggtgcaatcttggttcactgcaacctccacttcccagattcaagcaattctcctgcctcagcctccagagtagctgggattacaggcgtgtcccaccacacccgactaatttttgtatttttggtagagacaaggcttcggcattgttggccaggcaggtctcgaactcctgacctcaagtaatctgcctgcctcaccctcccaaagtgctgggattacaggcatgagccacctcacccggaccatccctcattctccatcctttcctccagttgtgatgtctacccctcatgtttcccaacaagcctactgggtgctgaatccaggctgggaagagaagggagcggctcttctgtcggagtctgcaccaggcccatgctgagacgagagctggcgctcagagaggggaagcttggatggaagcccaggagccgccggcactctcttcccctcccaccccctcagttctcagagacggggaggagggttcccaccaacgggggacaggctgagacttgagcttgtatctcctgggccagctgcaacatctgcttgtccctctgcccatcttggctcctgcacaccctgaacttggtgctttccctggcactgctctgatcacccacgtggaggcagcacccctcccctggagatgactcaccagggctgagtgaggaggggaagggtcagtgtgctcacaggcagggggcctggtctgctgggcctgctgctgattcaccgtatgtccaggagctggagcagcaccctctcagagcctcagtttccccagatgtcaatgagagaatcagcatcagccacatctcccacctgaagaatcgaaccttgagttctcacctttaagaattttttttttttttgagacagtgccttgctcagtcgaccacgctggagtgcagtagcacgatcatcaatcactgcagcctccaactcaagcaaccctcctgcctcaacctcctgagtagctggggccacaggcacccaccaccatgcctggctaattctttcttttttgagatggagtctcactctgtcgcccaggctggagtgcagtggcaccatcttggctcaccgcaaccctgccccccgggttcaagcaattctcctgcctcagcctcctgagtagctagaattacaggcgcacaccaccacaccaggctaatttttgtatttttagtagaaacgaggtttcaccacggtggtcaggttggtctcaaactcctgacatcaggtgatccacccgcctcggcctcccaaagcactgggattacaggagtgagccaccatgcctggccatattttaaacttttttgtagagatggggtcttactatgttgcccaggctgatctcaaactcttgggctcaagcagatcctcctgccaaagcttcccaaagtagttggattacaggtgtgagccaccacgccccaccaacctatgaagatgtctaagcagacagggtgccctacctcaccacatccccagtcagatccagaggtgggacaaggatgggaaggaggttccagaacaaaggctggcagggagtcgtatgggacaggagctgacccagcaaccatccacagagacatcctggagcctgggaaggagaaggacaaagagcccccttttttaaattttttttatgtttttgagacggagtctcactctgtcacccaagctggagtgcagtagcacaatcttggctcactgcaacctccacctcatgggttcaaacgactctcctgcctcagcctcctgagtagctgggaccacaggtgcacaccaccatgcctggataatttttgaatttttggtagagacggagtttcaccatgttggccaggcaggtctcgaactcctgacctcaagtgtccgcccaccttggcctcccaaagttctgggaatacaggcttgagccactgcaaccagccagtagcccccatctttgcccctcgctgagccctactggatgttcttggttatgcgacagtttccccatctattaaagagaaacccctatagcagaggggaggatgaggttggaaaagcaggagcattgttatgctattcttgtggggtctgggaagcagacatctgggtggatgtttggggggtgctgggcttagttggggaagtaggggggccccctggggcttacagggactggaagctctgagctggccagagggatgttgcaatcctgccagggtcttgtctatgctgtccttttcacaaccatccccctactgccaggctgacacgtggttgcgggggcacaaggccagccaacctagagtctgaggctaggcggaggacaccctccccaccagctgccagggtcactggcggtcaaaggcagctggtggggaaggcattggactccagccttgggggacggatgtagtgatggtgggaagcaggcttggtgccaggaggggcgtcagagggtgaataagagcagatagagtgtttgggggaggtagccaaccaaagggggtgaggcccggtggaagggaagaagggacatacacgcagagctttgcagctgagggttttaattttttgagatggggtctctgtcccaccaggctggagtgcagtggcacaatcacagctcactgcagcctcgaactcctgggctcaagcaatcttcctacctcagcctcttgagtagctgggactacagcatgcgccaccacgctcggctaatttttgaattttttgtagagatgaggtctccctatattgcccaggctggtctcgaactcccacgctcaagtgatcctccctcttcagcttcccaaagtgctgggattacatgcatgatccaccatgcctggctaatgcaggtgaggtttttgcagtgtcatccagctaaggcgacccgttcccctcccaaaaaagggagactgagaaccatgaagttaagagcccagagaatatcacggtggtctggggtgcttcaagggctggtctggaataaattggaggtggcacgcagggtaggagcgccgggccaactgggagacccagcaacataaaggaaaagttgttggggctgaggaggcttgctgagagaggggaagtgagggaaagaggtgatctagggacacggtgtgaatgagggggggatgagatcacagggttattactgggagacccctgagggaaggtggccacagggacaggacaaggctgtcttcttaagggaggagaccacccctcatattgtcttatgcccaatttctgcctccaaagaaagaaaaagtaaaaactaaagggcagaaatgacatccacaagcagacaccccaggtgccacaccctgggcctggtggttaaagattgacccctgacctaatccgttaggttatctatagattacagacattgtatagaaaagcactgtgaaaatccctattctgttttgttccgatctaattaccggtgcatgcagcccccagtcacgcatcccctgcttgttcaatcgatcacgaccctctcacgtgcacccacttagagttgtgagcccttaaaaggaacagggattgctcactcggggagctcggctcttgagacaggaatcttgcccattccccgaacgaataaaccccttccttcgttaactcagcgtctgaggaattttgtctgcggctcctcctgctacattctgagtggggaaagggactaaggtggtctgaggaccccacagagtcaggaagattgagaggtgagagtgctgaacggggaggggctttggggctaagggaagtgcccgggaccccacctgaccccaacgctcacgggacaggggcagaggagaaaaacgtgggtggacagagggaggcaggcggtcaggggaaggctcaggaggagggagatcaacatcaacctgccccgccccctccccagcctgataaaggtcctgcgggcaggacaggacctcccaaccaagccctccagcaaggattcaggttggtgctgagtgcctgggagggacacccgcctacactctgcaagaaactcaaaaagggagatgaggggatcgtgggagggaagtagggagggaggagggtgccactgatcccctgaacccctgcctctgcctccagagtgcccctccggcctcgccatgaggctcttcctgtcgctcccggtcctggtggtggttctgtcgatcgtcttggaaggtaaaagtgggatgggaga

SEQ ID NO: 113094 - DNA, 1443 bp, Homo sapiens
cctgggtggatcttcttttgagggttttaataatatgaaagtcctattttagaacaatgggaggaaccaaaaggggaattaaaaaattggttaacgtgtgcttgaagcatccaaaaaacaccagtttatcacaacaattggtctttgctaaaattaacaaaattttaataagcaagacgacaaaaagtactaatttaaaaggcttgaaatgcctgccaccattgtcagtatccatccatccaaccttcatttactacaagcacaatactactttggaggatagtttttggaaacttaattttggacttttttcccctataggaaaaacaaagacccaagcttttgaaggaggaggacctggggaatcctagtttaaaatgtcctacatcccaaaattaatatccatcctttgccgcattccagttgactttttaaaatttaagaatacatatacaaaaagtacttatggaatacatattctaccagcataccatatttgaagaattagttacgctttaaaaattaaaacacttgcaaagtattttttaagccagtgccatggaatcattctatgtgagcccagattatctggctacttagatgatagtcttcctgttttcaattagtttgaaagattctaatatagattctaacccaacagtttatatggatattttcctgctttaaaaagctgcaacaggctaggcgcagtggctcatgcctataatcccggcactttgggaggctgaggtgggcggatcacttgaggtcaggagttcgagtccagcctggcccaacatggtgaaaacccccatcctctactaaaaatacaaaaaactggcccaggcatagtggtgcatgcccagtaatccccagcctacttgggaggcccaaggtgggagaatctattgaacctgggaggtggaggttgcattgagcccaagatcacaccgctgcactcaagcctgggtgacagtgagactctgtctcaaaacaaacaaaacaaaaaagctaaaacaatgataaactatttttaatagatattttcattctatatctttatggagaatgtcagtatcaactgatgttaacaagtaaagctttgtcaacaggaattacaatgtgattcacagatcccagaatgacaaggaagggaccttaacccaataaatgattctcccattcaatgtttaccccctagatacttaacaattcaagcatggaactgtttcatgtttacccgttctacatttaaaggatgcccttttactatatatgtgctttctagaatattagtgattcttacatatctttaaaagttggatatttgtaatagcttaaagtacagtaacacttattttgtgtaatctttcttaatttaaaaacaaaaaataaatgaacaagtcagttccaatgatctcctttgagatttttcagttttag

SEQ ID NO: 113095 - DNA, 653 bp, Homo sapiens
tttttttttcaatttacaaaagaaagaggtttaattcgatttacagttccacatacgctgaggaggcctcacaatcgcggcggaaggaaaggaggagcaggtcacatcttaagcggatggcggctaggcaaacagagaatgagtttgtgcagggagacacccctttttaaaaccatcagatctcgtgagacttattcaccatcacgagaacagcgcagggaaagacatgccccccacaaatcagtcaccctcccaccgggtccctccccacaacatgtgggaaatttcaaggatgagatctgaggtcaaaccatattcaccattacaatttcaggcatttgtgctcctggggcatatatcccaggaggaattttaaaactgatttttcatggcaggggacactttgttacaaattttttatagtactttattttgtaataactaaaatccgggaaactgcacatttctttcagtgactgaatggttaaacatcagtaccatggaaccctactcagcaataaaaagaaaaaaactattgataaatgcaacaacttagatgaacatcaaggaaattatactgagtgaaagaagccaatccccaaaagatacatatggcataattcaatttattgaattattattattaatttcat

SEQ ID NO: 113096 - DNA, 393 bp, Homo sapiens
ggaacattctttagaggcatttttccgcagcaacacagttattcacgttggttaaatttactctcttcaatggttcaatttccatggtatccagtagaatttacattgttatataatggtcttctctaatttaatctctttttcttatggaggatttctctttactagtagtaccatcccatttgatagcacttaaggttgatctagctcacaaataatcatatgctagtcaaaagttaatagaatggctgggagcagtggctcacatctgtaatcctagcacattgggaggccgaagcgggtggatcacttgaggtcaggggttcgagaccagcctggcaacatggtgaaaccccgtctctactaaaaatacaaaaactagccagaaatcac

SEQ ID NO: 113097 - DNA, 7502 bp, Homo sapiens
  misc_feature (1)...(7502): n = a,t,c or g
gcatgctcgacgcgccatgtgatggatatctgcagaattcggcttactcactatagggctcgagcggccgcccgggcaggtcgccagtatgttggagttggtggtggcttaagttttgaagggaggtagcatccgttggatatccacaccatccttctcgctgcaggctttcttggactccgtactgttggtgtaaccaaggcctggaggtctgggtggctcaggtttcctgcagccatgtttctgtacaacttaaccttgcagagagccactggcatcagctttgccattcatggaaacttttctggaaccaaacaacaagaaattgttgtttcccgtgggaagatcttgggagctgcttcgcccagaccccaacactggcaaagtacataccctactcactgtggaagtattcggtgttatccggtcactcatggcctttaggctgacaggtggcaccaaagactacattgtagttggcagtgactctggtcgaattgttattttggaataccagccatctaagaatatgtttgagaagattcaccaagaaacctttggcaagaggtggaggccgtagcatcgttcctggccagttcttagctgtggatcccaaagggcgagccgttatgattagtgccattgagaaacagaaattggtgtatattttgaacagagatgctgcagcccgacttaccatttcatctcccctggaagcccacaaagcaaacactttagtgtatcatgtagttggagtagatgtcggatttgaaaatccaatgtttgcttgtctggaaatggattatgaggaagcagacaatgatccaacaggggaagcagcagctaatacccagcagacacttactttctatgagctagaccttggtttaaatcatgtggtccgaaaatacagtgaacctttggaggaacacggcaacttccttattacagttcctggagggtcagatggtccaagtggagtactgatctgctctgaaaactatattacttacaagaactttggtgaccagccagatatccgctgtccaattcccaggaggcggaatgacctggatgaccctgaaagaggaatgatttttgtctgctctgcaacccataaaaccaaatcgatgttcttctttttggctcaaactgagcagggagatatctttaagatcactttggagacagatgaagatatggttactgagatccggctcaaatattttgatactgtacccgttgctgctgccatgtgtgtgcttaaaacagggttcctttttgtagcatcagaatttggaaaccattacttatatcaaattgcacatcttggagatgatgatgaagaacctgagttttcatcagccatgcctctggaagaaggagacacattcttttttcagccaagaccacttaaaaaccttgtgctggttgatgagttggacagcctctctcccattctgttttgccagatagctgatctggccaatgaagatactccacagttgtatgtggcctgtggtaggggaccccgatcatctctgagagtcctaagacatggacttgaggtgtcagaaatggctgtttctgagctacctggtaaccccaacgctgtctggacagtgcgtcgacacattgaagatgagtttgatgcctacatcattgtgtctttcgtgaatgccaccctagtgttgtccattggagaaactgtagaagaagtgactgactctgggttcctggggaccaccccgaccttgtcctgctccttattaggagatgatgccttggtgcaggtctatccagatggcattcggcacatacgagcagacaagagagtcaatgagtggaagacccctggaaagaaaacaattgtgaagtgtgcagtgaaccagcgacaagtggtgattgccctgacaggaggagagctggtctatttcgagatggatccttcaggacagctgaatgagtacacagaacggaaggagatgtcagcagatgtggtgtgcatgagtctggccaatgtaccccctggagagcagcggtctcgcttcctggctgtggggcttgtggacaacactgtcagaatcatctccctggatccctcagactgtttgcaacctctaagtatgccaggcctctcccagcccagcctgagtcctttgtgtatcgtggaaatggggtgggacttagaagcaggatgagctgggtgagaggggctcgattggcttcctatacctgaatattgggctacagaacggtgtgctgctgaggactgtcttggaccctgtcactggggatttgtctgatactcgcactcggtaacctggggtcccgtcctgtgaagctcttccgagtccgaatgcaaggccaggaggcagtattggccatgtcaagccgctcatggttgagctattcttaccaatctcgcttcccatctcaccccactgtcttacgagacactggaatttgcatcgggttttgcctcggaacagtgtcccgagggcattgtggccatctccaccaacaccctacggattttggcattagagaagctcggtgctgtcttcaatcaagtagccttcccactgcaggtacacacccaggaaaatttgtcatccaccctgagagtaacaaccttattatcattgaaacggaccacaatgcctacactgaggccacgaaaagctcatgagaaagcagcagatggcagaggaaatggtggaagcagcatgggaggatgagcgggacttgggccgcagagatggcagcagcattccctcaatgaaaacctccctgaatccatctttggagctcccaaggctggcaatgggcagttggcctctgtgattccgagtgatgaatcccattcaaggggaacacacttggaccttgtccagcttggaacagaattagggcagctttttagtgtggctgtgtgcaggttttccaacactggtgatgactggtatgtgctggtgggtgtgcctaaggacctgatactaaacccccgatctgtggcagggggcttcgtctatacttacaagcttgtgaacaatggggaaaaactggagtttttgcacaagactcctgtggaagaggtccctgctgctattgccccattccaggggagggtgttgattggtgtggggaagctgttgcgtcgtctatggacctggggaaagaaggaagttacttccgaaaatgttgagaattaaggcatattgccaattatatcttctggggatccagactattcgggacatagggtaattgtatctgatgtccaagaaaagtttcatcctgggttccgctacaagcgtaaattgaaaaccaagcttatcatctttgctgatgataccctaccccccgatgggttcactacaggccagcctcctgggactatgacactgtgggctgggggcaggacaagtttnggccaacatatgtgtgggtgaggcttcccaccttaacacccattgatgaagtaagaatgaggatcctacaggaaacaaaagccctgttgggacccgtgggcttgctcaaatggggggcctcccaagaaaggcagaggtgatcattgaacttacccatgtcgggggagacgggtgctgtccttgcagaagaccacggttgatccctgggaggcttcagaattcacttgtcttattaccaccttgttttggaggaattggccatccttgttccatttcacgtcccatgaaggaccattgacttctttcagcattgtggaaaatgcacctgcgggtctgaacatcccccttctctgtgggggcggggaccaccttcagctttcgctccttactactttccctgtgaaggaatgtgattgatgggagacctctgtgaggcagttcaattccatgggaacccaacaaacaaaaggaacgtcttttgaaggaactgggacccgaacccccaccccgaagtgttccaaggaaattcgagggatattccgggacccgttacggcttctgaaaccctccctttcccggtggggcttgcccagagaactgtgtgttttgtttccccccacccacccatacaactgcaccctggctttctgccatgtgggcaggaagggtgaactggaaaaattaaagaactgccatttatgaaaagtccaacagctcctttcccccctcagctccttctccctggaatggactgggcttcccccctcaaattggcaacttgagtattggctacacttcctccccacctggtacatgatacatgaccccccagggttccagtgtagaaccttgagtcccccaattccccaaagccatgccctgcatgtgatatgtcttgactctcctgtcttactttttgcacacaccccttaatttttaattgggttttcctgtaaatacagtttttgtacaatgtttatctctgtgggaggaaggaggcaggctgtggtgggactgggtagggtatagtatcactcctgagttccactgctctagaatctaaccagaaatagaaacctagtttttaaggtgactggcatccatgtgtcttgttctggagatgaggatgtaggtgggaggtttgaacccaagttagagcaggaagaactgagtagactccttccttccagataccgacttggacttgcggcactctgtggctccccacccccaggtctgtggtggtttctttgttttttcctggttctttttgctgtgctgatgaaacatgacctcaataaccatgtgtatacccacccctcttcccactgggtattgaggaagggtggctgattcttcctcctcttctactctgaggatgttagtatggggattttagcatgaattccagctggggagtcttaacagatgccccttttactgatagagcacctaaagcgatctttggctccataggaccataggaagggtcagtacagaagaacctagatactgccctgcccctgagaactgtgtatatgtggggcctgtctgcagcacccatctcaggtgggttccagagggcctttagggtataatgagagcctgttaggtggaagaggcccagttccagaaatgttccagcccacccctgagaattcctcctgtttagttgtgtgggaagccctcgtcttccaggctgtccttgcgccttgaacctggagaagtgagctcactgttctcaatacttcacaaatgtaaaactttctttcgtctgcatgtgctcagccatctaaattgagcaaatgatctggtgagcactgggttagaatcaggaatggtggaatacaatctgaacctctcagagcccagaacagagggttcctgacactgtgacactgtctcctggaactaagtatctcttgaatcatgacttggttttagatcagtcaagagagacccaggttttgccaggaatcgaatccctaaataacatgtttttttctcacttagctcatgaatttgcatagtagacagtagttctgaattagattttgaaaacctaatttcagggctcattttttccctgtgggccctaaaacccattctattcaaattgtgtggatactggacatggcagttcatctgagggaacttcagcgtaggataacttggaggcagctcctcggcctcttttctaactcaagtttgactaaaatacatacactccgtacagaaggtagggggttatgtaagaaaggaaaacctaatctatggaatcaggagttgtcaccaccgagcttcctctggaagtctgcccatcagcttgcttgttctctgttaagaggaagggctaggacaaggatttgggcttgaatatgtggaaaggaattttcatagttgttgctgcaggacctacaaaagtttaaaattagattggatgtgactcaatgacaagtcccatctgtgtaattgttaaggggacctgattgactcctgtggtttgattgagcaaccaggtaaatagagacctctctccagctttggcaaaacccatcagaggctgctgcagaactcagacagagggatctgcccttgggtttgcttccatcctgttccattgctaagcccttgtgacttggatcctaggactgaaaagtttttagctgcctcagctttcccctgaccttactggcagaggttctgcagatgtttcctttggaagatctcttgccaagaatagcattcctttggaggaggggggttctagttggaatgttgcttttcttggttagtgtaaatgtattgctagtgagacagctgccggcgctggaaaaggctcgtctcacagggagagtgctggtccccagaatgtgtgctgttcccacgctgctgcctttcttgagcttgttagaggaaagccagaaaggcattcagatgggatcagtctggctttcaaattttttttaattcctaagttctgttttattttttaattttttaaaaaaaattttattagagacagtctctctctcttgcctagctgggagtgcagtggagtgatcatagctcactgaggcttgaactcctgggctcgagcaatccacctcagcctccagagtaggggagactacagatgtgtgccaccatactcagctagtttttaaactttcgtagagacagggtctccctgtgttgcccaggctggcctcgaactcctgacctcaaaaaatcttcctgccttggcctcccagcgctttgagaggctgaggcaggaggatcccttgagcccaggagtttgagaccagcctgggcaacatgacaaaaccccatctctccaaaaatacaaaggttggccaggcagtggtgagtgcacacttcgtagtcccagtaattagggggctgagacaggaggatcacttcagcctatgagtttgaggctgcagtgagctgtgattgcgccactacactccagcctggatgacaggacgaaacctgtctcaaaaacaccaaaaaacaaaaaccggtctcctggggtcatggtagcacaaacgcacatgactgagtgctcaggggttctgaggcttgtccgctgacctggggctctggccctgggagatctgggggacctgctgtccctaatatgtgatgcctttgaaaagaaaggggcatcattcccaaacccaagagggccccaaagagggcaccgtgggggtgttccaggccttctgtgaggccccagtgagatccctgtggctgtgcccccatcacctccacccactctgccctcccactaggtgcccaacggatgaatcaacgccttggcagagttttccagcagggccttgcagagagtgtgtgtgacctgtgtggccactgccttggggacgggtgaggagttagcctggaacattcccagcgtgggcattattgtcctgttgcaagttcagggcaaaaccaggaatccagttttgtcgatccaattgagaaaacatttcatgaacaactacttgtggcatgcattggcactcggaataaagcgcactattgtcactaggaaaaaaaaaa

SEQ ID NO: 113098 - DNA, 884 bp, Homo sapiens
  misc_feature (1)...(884): n = a,t,c or g
aggcggcttgggaccgcggggcgaacgggagccagtatgtccgctctgactcggctggcgtctttcgctcgcgttggaggccgccttttcagaagcggctgcgcacggactgctggagatggtggagtccgtcagtagatcctgaatgaataatataatttgtatatgaggacattacggaaacagtatgctacgtcattcaagttgtaaagtcgcgatatttgtgccggtggtggtgtgcacaattgagccccgggtatagacagttccccccagctgacccagatccccaggtgttcccagagcgagttctttcagcggactcatgtggttctgggattctctgggcgcttttggcatgactcagaagaggtgctggggtcattttccgtatcctgatccttcccagtggnacagatggaagaattaaggtatccctcctgatgattgaagacttgaaggtgttagactcagcctcactctgtacaaggtctcattctgtcatccagactggagtgcagcgtgatcatggctcactgtaaccccaacctcctgagctcaagtgattctcccgcctcagccttctcagtagctgggactactactcttggctaatttttgtatattttgtaaagatgaggttttgccatgttgcccaggctgatctcaaattcttggactcaagtgatccacctcttggcttcccaaagtgttgggattacaggtgtgagccagtgtacctggccaacaaatttgttttaatgactggactgtaaacccttgagagaggaagggtgattttgcttctcttgtctacaaggctgtcacatgatcagtgctcaataaatacttgaataattgaataaatgaattatggatttgaa

SEQ ID NO: 113099 - DNA, 377 bp, Homo sapiens
caattgattaggtgctgtcatgtaggaaagtatgcttttgtatgaaagtaataatgtcatttgttcatttttaatattagtaccaaggagaaaaccaaaaagggttcattaacaaatatagcaatatagcatatgcaataataataaattcaaatggtacaaaaagggataaaacaagaagtgaatgccttctttcctctttctagaagtttctctctccaaaggttcttgtggttgtttctagaaaaaagtatttcatggccaggcgcaatggctcatgcttacaatcctagcacttggggaggcccaggtggatggatttcttgagcccaggagttgagacccccctgggcaacatggcaaaaccccatcaatat

SEQ ID NO: 113100 - DNA, 673 bp, Homo sapiens
agaaatggaagatttctgttaggaaggtagaagtcagttttgtccgtatgtgggccaaactattaaaaataataaggcctggggattcctatgttcttagatgctcaataaacatttcagttcatcaaactatgaccaacttacaagtctgtggcattgtgctagttcactggaccctgggaaagtcttttaaatccaaatgatactttttgttttttaaagagacaggattttgctctgttgcctaggctggagtgcagtggcatgtgatcacagctcactgtaaccttgagctcctggggctccagtgtcctacctcagcctcttcagtagctagggactaaggcacatcccaccacacccggggcaattttaggaattttttgtaggatgggctctttactatggttggttcaggctggtctcttactccggggcctcaagtgatcctcctggcctcaggcctcccagtgttgggactacaagcaccagccactgcccccaaccctgcattatgttcttaaaggcagacctgaatcctgtgcggtgtcaattcaggtgtgcactggcccctgagccttacatacaggacccgttccttagggatgacgttgcgttcccttgcttaggagcctcagcaccatgggcacctggctcttccccgatgcctggg

SEQ ID NO: 113101 - DNA, 528 bp, Homo sapiens
  misc_feature (1)...(528): n = a,t,c or g
tgcactttttatttaaaacactcaacttttaagaactctttttatatatactaactgaaggtttggtatcttacagaaatttctattcagtcctacttagtaacaaagagcatttgattgtgggtaacgttgacatactcaactattctaatgcacttaatcttcaaaatattttcttcagtaacatctttactgagggaggaaaaagttaacggttcttcatacacacacacacacacacacacacacacacacacacacacactagtgcccacttatccacaggggatacattaccagaccccttccctcccactggatgcttgaaaccacggatagcacctaacccaattttcatcaatttgaacatgtttctgttcatgtctcccactcacaaatgttaacgccttttccctctttaactaaggcaccttgaacatggcacctgtgggcttttaattttgcgggttgggggtgtggacagttaaaattggctggatttntttgtccntcacatttncggggtgg

SEQ ID NO: 113102 - DNA, 608 bp, Homo sapiens
gagtatttggatgaaagaaacagaagagctcattaaacctgcaaaactctattccaatggtgaccagcattacttcacctgggaaatcattgaaaaacaattactgtgagactggattgacagagtcatgctctgctgccaaggctggagtatagtggcactatctcaactcactgcaaactccacctcccgggttcaagtgattcttctgcctcagcctcccgagtatctgggacttacaggctctcttttttgcctgctggccatccaatgtaagacgcgacttgtttctccttgccttctgtcatgattgtgaggcttccccagacacttggaactgcacaaaaacgtgttttgaacctactctaaccaactgtcaaaaggctgtgttaagtgattctctgacaaggcccaggagcttcaaattgtcttgggacctcaagaggagaggaatttagccaaatcatgcagaaccttggccattctgatgtttaaccaagagttgagctgagtggctctgaccagcgtggaagatgagagcagcctgaacttacactgtgaaaatgtacccccagaatccagattgcagctacaggccctcctgatga

SEQ ID NO: 113103 - DNA, 693 bp, Homo sapiens
  misc_feature (1)...(693): n = a,t,c or g
ttttttttttgagacagagtctcactctgttgcctaggctggaggacagtgggcacaatccatggctgattgccagccttggacctccttggactcaattgatccctcccatctcagccctcccaagtaggctagggactacagacatgtggcaacccatgtttgggctaatttttnttaaatgtttttttgtagagatgaggtcctaattatattgtccaggctggtcttgaattccgggggctcaagcttcccaagtagctgcaacaacaggcacacacccacccaggctcaactaattttaatntcctattttttgtaatagacagggggcttggctanaggtgcccccaggctgggtctgaaaccccttgagcctcaaggtgatcttccccacacccagcctccccaaaatactggggattaccaggcttgagcctcccatgcccggccccaggtaacatgtttattgagctgtacatgcatatgagaaataagaaactttttttttcctactatcatctcttaaattttgttttctttttcttttgcttcctcttctgcttgtcctattttttataaatatcatgcacaactataacctatgggaatgatgtagtaacacatgattattcatcttgttagagttgtattaaaaataaacaagcatttcaaattaaagcaataaagaac

SEQ ID NO: 113104 - DNA, 507 bp, Homo sapiens
tagaggatactctggggacattcttgagttttctttgtttattcctttccgtttaaggaccagaagtaatattcttgaattttcatttgttcagatctttgctctgtaattaagattgcgtgagagtttgttgtttgggcccagttaggctgttgaaatttcttgggaatgtggtttcaggcattttttggtccctttgattatatcattgtatctggaactttttttgagagagagagttttgctctgtcacctaggctggaatgcaatggcgcggatcttggctcaccgcagcctccgcctcctggattcaagcagttctcctgccctagcctcccaagtaactggaattccagtcctggccaggaactttttttaaaaaagaggagcacgatcataaaattaagtcagattctttcctaatcctatctctgatttgtttttaattgctttacctgtttatctcccctcacccttttgttgttgttgtttgagattccgcctgag

SEQ ID NO: 113105 - DNA, 509 bp, Homo sapiens
ccagagaattgggcttgaatctcaggcctgccacacattggttttgtgaccttggaataggtaacttagcttttgagcctcagtttccctttttttattggtaacatatatacttcaccaaggatgtgatgagaatttaatgaggtagaaagtataaagcaggggaaataaaaaaaagctccatagaatacccgtacaaaccttattggtatttgaatggtgttgaacttgggtggtttacaatatgctgaacttcagcagaagcgacagatttattcataccagtttttcgtttcttggtgattaattttcctctgaggaaaaattaccaccctttgttgttgttgttgttgttgtttttgagacagagccttgctctgtcgcccaagctggagtgtggtggcacaatcttggctcactgcaatctccacctcctgcgttcaagcagttctcctgcctcagcctcctgaatagctgggattacagcacccaccacctcgcctagctaa

SEQ ID NO: 113106 - DNA, 676 bp, Homo sapiens
gcatgaggctgttttttacattttacagttacagtttcagagaaagtttgatatttatctaaaatttttcaatgtatgaactttttcatttgacaaaccataattgtacatattcttgggatacagagtgatattttctttacatgtatagaatgtgtagtgatcaaatcagggtaatttccactaatttaaaatgccacctttatgttattgtaatttatatatatactatatatatacacacacacacatatatatatatatacatgtccacatacagtgtgtgtgtgcacatgtacacacatgcatatgtgtatataatgcccagtataagcaatgtgcacaaataaaattagctaacagagatagtatagagtgagaggagaggcagattaatctttggaggaaaagcacaattttatagctgaatggagaaagctgaggtggtttctaagatggagaataagacgaaaaaatggtaagtacgttgtttgactgaactcaagaaagaagggtaaaagagaagaaagtagtggtcttatcattaaatgccacagagaggtaaagataaaaacaacatattgttttgggtttagtaatttcaagggttaccaaattccgttttggaggaggaacagattccatgtccactagaatggaatgaacgagaaatgga

SEQ ID NO: 113107 - DNA, 364 bp, Homo sapiens
  misc_feature (1)...(364): n = a,t,c or g
tggttcctgaagtaggggctagtaacccaggggggttccccctggggaaagtccctgaaccgtaaaccttggggacctttccggaaatatgtccaaccgtaaattttaaaaacccggccaacccggtccggaggcttgcccctgttattcccaagggcccggagggttaaatgggagggtccccttagcccccgaattccaaacccgcccgggggacaaaaccaaacccccctttttcnnnnnnnnnnnnnnttcnnnnnnnnnnnnnnnnnnnnnnnnnnnnnnnnnnnnnnnnnnnnnnnnnnnnnnnnnnnnnnnnnnnnnnnnnnnnnnnnnnnnnnnnnnnnnnnnnnnnnnnnnnnnn

SEQ ID NO: 113108 - DNA, 1479 bp, Homo sapiens
caaagggctcccaatgagaagtgctgcatagtccaagcttacatgtcttataaacaagttcataaatgtattttctttttatgagagtttgactaaaacttatcagaatgttgttcttcatgaattactactatactaattactatactaatagtgctcaaaacaatattttgaatatccttattggtgtcaagttctgccttttaataagtagatgtgatcttcagttactgccaaaaattattaggagactcatttgattaataaggcaaggaatcaaactaaacatttaggagtaagtttctttcattttcttctgtggttcagtaaagactgcatttatagcatcactggtacaatatgtaacttcccttaaaggttactaccaataattcaaacatactgaaagaatatatttgatatggtgtagtcccacttcttaattttaaaagcaactaccataaaacagaattttacatgtctagatctatttgatttgaaattcaccataaggttggataccaccactggtttgtttccgtcagtaagtaaaaagggcagaatttgccttgttaaagtttggcccctattgaaatcagcccatacctgtaaagatgacctctttgcttcttctacagtcacattagcaaagggttcccagaaaatacctttttcctgtatcacacgttccactttggcagcttcagtttcatctacaaacccagtctgccagggaccatgaaaaaccaagcacatagcaacatgttagcactctactagatatgaaatggccacataatttaagtgctgagtgttcaaccatactaagcaaactctggaagtcacatggactgatctataaatactcttagtataatctggattaaatcactctactgtgttcttccttacaaaatagttagttatagagttgtctttgcaggaaaaaatgatagtctgctaacctttactgtataagctaagaaactggcaacagcagtgtatacacatgtacttaaaatccagcttagatgtaatataagtaggcccagtgtggtggctcatgcctctaatcccaggactttgggtgggagaaatgcttgagcccaggagtttgaggttatagcgagctatgatcacaccaccacactccaatctgggcgacagagcgagactctgtctaaaaaataaagttcagtgagtcaagtgggcccatttcacctaaaaaaatatatatgtaatatatgtaaaatatataacgtgcatcattacatgtaatatatcaaataattcagtttctcctggtagtctaaaatttgtggtttaacagttccactagtatttcaattaactattatttcctcacactaagttcccaagtatgcatagacataggaaccttgtgattcaaaattttggttttaattgtaaaaacaggtcttggctgcaaagagaataaaaaagccatgccaaaaaaaa

SEQ ID NO: 113109 - DNA, 1147 bp, Homo sapiens
ttttttttttttgggggaattaattactcttttattagcacaaaataacagcaacctagcagccgcacggcccgagaataagttaaggcacagagcaggcgacgggcggctttcccagggccaggcctgcatgccccgaacttcctgagcaaactccctaaggggcttggggtttcgagggtcctgggagggccttttcccttgagatgaggggaacggaacatgggccaagacgtgacgccccatgggcgcaaggggttccacgctgcgccgcgattcacttctcgaagtaggggcaggtagaagaactggaagccccggtggcccttgaccgcgcagtagatgaagatcacgtgattagactccaggcaccaacaacaggaaagcccggcacgaagaagactggcgctggagacacctggagagggggtcgcctccagtcccacgccgaccaggatcagcactgcacacagacggagccgcgggggtgggggcaggagcagtggtgagggcggggctcccacccccagcccggctcacccaccacctgagctgaaggtgccctaggcagagaccctccccaggaagctcaccaagctctgtttccagagcaaggcactgagcaggccctgggaagtgtgtgaaaggagagatttttctttgttccttggggtgggcttttagtcattcagcaaacatttatggaacacctactgcgtgcctggtactgggaaatgtccccctgaagggcagataaggtccctgcccctcatggcccgtccttaagtggaggaaccaataaagaacctgaaagctaacagtacaggtgattgggatatagggggtcaagaaacagggccagtgccaggagtccctgggtccccagttagaagagtgatgggggaatgaggagctggactttgggctctgcaacaaggggggtagtaagcctgggggactggggggccaccatggactgctttgtgcattgcccagactacttcaaaaagggtgggccaggtgtggtggctcatgcctgtaatcccagtgcttcagggagccaaggcaggaagatcgcttgaggccaggagtttgaagccagcggtgggcaacataccaagatggcccatctctataaaaggttaaa

SEQ ID NO: 113110 - DNA, 597 bp, Homo sapiens
ttttttttttaagccactgctttacttcttcaggttagcaaaatgcttaggtaaatttgttggccatcacaaatgtgattgaggccaccggtttctatcatcaaatgaaatcacaatgacaggtttctgacaataaactcaacctaaggggagcgctaataaattcccttcccagcctcttcttgggtgtgtggtatgtgtgctgcctcctgaaatgcccaggatggccaccctcccacacgggatattcctaagccgctgacaccatctaacttttctgaaagaaattaacaactcagccgatctttaccaggctaaaatcacagaactgggtcccctgaaagccaggctttcatgccacatccacagccactgctgtctagccaagtctataacatcttcttgcccttattaatacatatgttacataggtttacgtatgttaatccctaatgacttgacttaaccttgtcacagccaggcgcggtggttcatgccctacaatcccagcactttgggaggccaaaatgggtagatcacctgaggtcaggagttcgagaccagcctggccaacatggtgaaaaccccatctctact

SEQ ID NO: 113111 - DNA, 2009 bp, Homo sapiens
gccgcgggcggcgggcggcggaggtgcggggcctgctcccgccggcaccatggccaagaccgtggcctatttctacgaccccgacgtgggcaacttccactacggagctggacaccctatgaagccccatcgcctggcattgacccatagcctggtcctgcattacggtctctataagaagatgatcgtcttcaagccataccaggcctcccagcatgacatgtgccgcttccactccgaggactacattgacttcctgcagagagtcagccccaccaatatgcaaggctttaccaagagtcttaatgccttcaacgtaggcgatgactgcccagtgtttcccgggctctttgagttctgctcgcgttacacaggcgcatctctgcaaggagcaacccagctgaacaacaagatctgtgatattgccattaactgggctggtggtctgcaccatgccaagaagtttgaggcctttggcttctgctatgtcaacgacattgtgattggcatcctgggagctgctcaagtaccaccctcgggtgcttctacattgacattggacatccaccatggtgacggggttcaaggaagctttctaccttcacttgaccgggtcatgacggtgtcctttccacaaatacggaaattacttcttccctggcacaggtgacatgtatgaagtcggggcagagagtggccgctactactgtctgaacgtgcccctgcgggatggcattgatgaccagagttacaagcaccttttccagccggttatcaaccaggtatgtggacttctaccaacccacgtgcattgtgctccagtgtggagctgactctctgggctgtgatcgattggggctgctttaacctcagcatccgaggggcatgggggaatgcggttgaatatgtcaagaagcttcaatatccctctactcgtgctgggtggtggtggttatactgtccgaaatgttgcccgctgctggacatatgagacatcgctgctggtagaagaggccattagtgaggagcttccctaatagtgaatacttcgagtactttgccccagacttcacactttcatccagatgttcagcacccgcatccgagaatcagaactcacgccagtatctggaccagatccgccagacaatctttgaaaaccctggaagatgctggaacctggcacctagtgttccagattcatggacgtgcctgcagacctcctgacctatgacaggactgatgaggctgatgcatgaggagaggggtccctgagagaactatagcaggcccagaggcacccaatggagttctatgatggagaccatgacaatgacaaggaaagcgatgtgggagatttaagagtggctttgggatgctgtgtcccaaggaatttctttttcacctcttggttggggctggagggaaaaggagttggcttcctaggagtcctgggggtcaccccaggggcttttgctgactctgggaaagagtgtggagaccacatttgggtctggaacgcatctacctgtttttcctctctttcccaaggccctgaccaattggtacctattagggatgagaatacaacacacaggatagctatctgggaacatttattggcaagtgggccccggaaggccaagccccctagcccccccttgcccctaatttccttcccctgccttcccctcgaaccccagagattttttgagggatgaacggggtagacaagggactgagattgccttctgacttccctccctcccctgggttcctgacttctttcctccccttgccttcccagggaagatgaagagagagagatttggaaggggctctggctccctaacacctgaatcccagatgatgggaagtatgttttcaagtgtggggaggatatgaaaatgttctgttctcacttttggctttatgtccattttaccactgtttttatccaataaactaagtcggtattttttgtacctttgatggtttagcggccgcgc

SEQ ID NO: 113112 - DNA, 2696 bp, Homo sapiens
attaaaaagtgcattttattataaatacattttagttgtagcagtaaaatacattttgttaccatgaatctttgaaaacaaaagaacttcactgagacaatgagcacactgtaggaactgtagaccccaagttgaaaacttgttctatggaaccaaagtagctaacgtaattccaaaactaagttagaaaaggataaagacaaagaaagaagaaaataaaaaccctaggagagtgggctttgggcgttattttatgggaccaaggcccccttttacttttaaggataaactctttaggtattagagcctcttagatgaggtatccgtttactggcaaagaaaaaaaattggttataattttggccaaaaggttatggcccatttagatgggctgtataactgggtactttggaagagatgaacctgacccacctccagttttgtacagcttccctcaggaagacttcccaaaataagactcagtatgaatttgctaagtaactgatctatgaagttagctgaacaagtttagataagaactatatgtatgaagcattaaaaaaaaaatcctgtgtctctaacaacaggaccctttaataaaatgcaaaactcattatctttataatttagaagagaagtattttaatcgccatatttacgtaggatggtcctactacatatagccagtacctttatggggtttaaagaatcaggtcagatgactggcacagaaatcagatacagtacaatgtcatatacatggatttataggaagcaggcatggtctggatttatgaaaatccaggacccttcctctgtaaagggggaggctgagaaacattctcagctgcactgacactttgggacttcaaccaggacaaagagccctctgacctactgaaagatataaagaggtcttcgcatacaagttatcgtgcaaagcaaagtgtaaataaaccgaagctcccctctaaggttgggactgcataaaggaacccaggctgaaaatataaacaaaccctctccaaaggtgagcaagccttttcagtaggaaggactgtgtcttaagaaaactccaaagctgtatattctacgatggtcttcacgtgtacttttacacctaagtcattctgtattctattaccataaaaatagcttttttttgtctttctagtagctcagtaaattcaaaggcaaactaaaaaccagaagcagagcccagtaccccccaagatgcagtccagataaaacagcaacaacacacaaattaaacaatacccaaagacctgacaggtttattatattataggcagtttctttctcaaaaataacttgctcatacatgtgcacctatgacttatgaataattcatgctgtgtaggtggtagatccccctaggctgttttgcaaacacatatagatttttttaaaggtagcaaagtaatcagagacatttattttctgccatatgtaacacttcaggctctctctaacacctgctggcatggcagagaatctaaaataactttgttaaccctgagaaaccacataatttgaaaaacaaatcctttgccctcaccaccctccccccaccaaaaaaaaaaataataataaccataaaaactaaaacatttgccaggcgcagtggctcatgcctgtaatcccaacactttgggagcccgaggcgggcagatcatgaggtcaagagatggagaccatcctggccaacacggtgaaaccccggtctctactaaaaaatacaaaaattagctgggcgtggtggcgcatgcctgtagtcccaactacttgggaggctgaggcaggagaatcacttgaagccgggaggcggaggttgcagtgagccgagatcatgccactgtactccagccagggcaacagagcgagactctgccccgaagaaaaaaaaacaaaactagtattttattatttaaggattatctgtggttttcgatgctccatgtcactgccatcttaggacagggactcctgcacttagtgcctcgatacatgctaggtgcactctcatggcattctgatggcttctttccaggattctcacttccatgcatgtggatcaagattgaccctaagcacaccaaacaaatgcacagcttcccagactgatgtcccaggcagcagcgtcacacaaaagcaaactcacccctaaaaaccaaagagctcccttcaccctactgcggaagagccagtgccaagaccccagcaggggtgagagtgaggaggggtggtggccaatccaaagggcctgtcgctccatggagacctttctcccacaaatgttccagtcatggcaccagatttataaaaatgtctccagagatcagttttttacactgagtaaataaatacatggttgaaaagacgttcagactctgaaggtctctgagactttcaaactgcgagaatcagacccagtgattttcaaagtgtggttcctggactggcagcatcagcatcgcctggaaacttgttggaaatgcaaatcatcaggctccagaccaaaatcagaaatgctgggggtgggtccagctatctgaattttaacaagacctcgaggcaattctgatactggctgaagtttgagaaccattgctccatcctgttcacaattctcaaatcttaaaacaggacagatctgtaaatagtaccggacgcgt

SEQ ID NO: 113113 - DNA, 500 bp, Homo sapiens
  misc_feature (1)...(500): n = a,t,c or g
tcctcctctcccatgataaccccctaatccattaaaccattaatccatgaatgggtaatgagcatagtgagcacgggataagtcttcaatatccttttattacgattctcaccccatattttcaagccaagtccaaggattaagatggggccaagggtaccctccaggagcgcatcctgaaacacacataacaatttcgatcctactgaggggtgataatgatagctaaaatgcactgagtggtaggatacagtggctcacacctgtaatctcagcactttgggaggccaaggcnggtagatcccttgagtccaggagttcaagaccagcctgaccaacatggcaaaaccccatctctacaaataatataaaaattaaggctgagcgcgcgggctcacacctctaatcccagcactttaggaggcttaggggggggtggatcatctaaggtcaggagttcaagaccagcctggccaacatggcaaaacctcgtctctact

SEQ ID NO: 113114 - DNA, 402 bp, Homo sapiens
  misc_feature (1)...(402): n = a,t,c or g
cggggggcataggatattggcccgggtggtttcaaaatcctgggatccaaccatcctttggggtttgcccccccaaaaaccggggatatagggctgagcccccccggtcggggtgnnnnnnnnnnnnaaaaaacaaggnnnnnnnnnnnnggcccgggcttaaaaccaggaagggattaaaagcccccggaaccccgaaatcctgagggccaaccctccccccgccccaggtttccgaggaagtagggccatagggggcagccccccagcccggcccnnnnnnnnnnnnnnnnnnnnnnnnnnnnnnnnnnnnnnnnnnnnnnnnnnnnnnnnnnnnnnnnnnnnnnnnnnnnnnnnnnnnnnnnnnnnnnnnnnnnnnnnnnnnnnnnnnnnnnnnnnnnn

SEQ ID NO: 113115 - DNA, 408 bp, Homo sapiens
ggcacgagctcactctgtatatacacacatatatatttttgagagacagggtcttgctctgttgcccagactggagtgcagtggccagtcacagctgactgcagcctcaacctcctgggctcaaacaatcatccgacctcagcctcccgagtaacaaggactacaggtacacaccactacactcggctaattttttaaacgttttgtagagatgggggtctcacgccacgttgcccagggtggggactttgtattttaaatttaatctttggtttttaataggatgacttttgtgtatattatgacttgatctacatgtattatggacttgatattatttggaacttcttttagggttggaaccattatggaaattggatattcaaccacttttgacctacgaaaatg

SEQ ID NO: 113116 - DNA, 481 bp, Homo sapiens
  misc_feature (1)...(481): n = a,t,c or g
cggcacgataaaatcagctcacaaaattctgaaataaattgtgtatgaaaatattctctacttcaagattgctctaaaggtttagtaattaagacagtgccatttcccaaggataaaatagaacaatggaacacaatagagtccagaaacagatcactgtataatatggacacctgatttatggctgtgatgccaccacaattgagtatgagaacaatcattttatcaataaacagtggtgaatcacgtggatacctttatgggaaaagaaatgaacttgactccatatacaagttaatttgattgttgagcatggtggcacacacctgtagtcccaactacttgggaggctgaggtgggaggatttgattgagcctaggagtttgagaccagcctggggcaaaatgttcaaganccctgtnctgtgaaaggnttaatgattaattttcaganactccctttngaccattgnctgaaggat

SEQ ID NO: 113117 - DNA, 498 bp, Homo sapiens
  misc_feature (1)...(498): n = a,t,c or g
gttgaattgaattccttggtaggtagctataaacatagcagatacactaaggctttctctatgcaatataaaatgtctctcagagaaattcatggcactaaaagcatatataagaaaagaagaaaattatcggatcaataatctaagctcacattcaagaacctagaaaaagcgaataaaataaacacaaagcaaatgaaggaaatataacaaagggcagaaatcaatgaaagtgaaaaacaaagaatagagaaaattaacaaaactaagnnnnnnnnnnnnnnnnnnnnnnnnnnnnnnnnnnnnnnnnnnnnnnnnnnnnnnnnnnnnnnnnataaaagacacaactttctaatatcaggaatgaaataggagataccattacagaccctgcagacatctaaaggataataaaggcatactataaacaactctatacacataaatttgacaacttagtttaaatagagcaattcctttgaaaatgcaccacaagtn

SEQ ID NO: 113118 - DNA, 5118 bp, Homo sapiens
  misc_feature (1)...(5118): n = a,t,c or g
tgctggagggggagccgtgggtgcggggcaccgtgggggccgaggccccgggacgcccgcccggccccaggccccgctcagcccgggcgcccccacgggtgccccccccttcttggtccgagcagtgtgagtgtgccagggagcccggcggcggcggcggcggtggtggcggcggtggcggcggcgtggaatccggcgtgggctggggggtccgagccgcggggggcagtgccatgcacaagcaccagcactgctgtaagtgccctgagtgctatgaggtgacccgcctggccgccctgcggcgcctcgagcctccggggtacggcgactggcaagtccccgacccttacgggccaggtgggggcaacggcgccagcgcgggttatgggggctacagctcgcagaccttgccctcgcaggcgggggccacccccacccctcgcaccaaggccaagctcatccccaccggccgggatgtggggccggtgcctcttaagccagtcccgggcaagagcacccccaaactcaacggcagcggccccagctggtggccagagtgcacctgtaccaaccgggactggtatgagcaggtgaatggcagtgatggcatgttcaaatatgaggaaatcgtacttgagaggggcaactctggcctgggcttcagtatcgcaggtggcatcgacaatccccatgtccctgatgaccctggcatttttattaccaagattatccctggtggagcagctgccatggatgggaggctgggggtgaatgactgtgtgctgcgggtgaatgaggtggaagtgtcggaggtggtacacagccgggcggtggaggcgctgaaagaggcaggccctgtggtgcgattggtggtgcggaggcgacagcctccacccgagaccatcatggaggtcaacctgctcaaagggcccaaaggcctgggtttcagcattgctgggggtattggcaaccagcacatcccaggagacaacagcatctacatcaccaagatcattgaggggggtgctgctcagaaggatggacgcctacagattggggaccggctgctggcggtgaacaacaccaatctgcaggatgtgaggcacgaggaagctgtggcctcactgaagaacacatctgatatggtgtatttgaaggtggccaagccaggcagcctccacctcaacgacatgtacgctccccctgactacgccagcacttttactgccttggctgacaaccacataagccataattccagcctgggttatctcggggctgtggagagcaaggtcagctaccctgctcctcctcaggttccccccacccgctactctcctattcccaggcacatgctggctgaggaggacttcaccagagagcctcgcaagatcatcctgcacaaaggctccacaggcctgggcttcaacatcgtaggaggagaggatggagaaggcatttttgtctccttcatcctggcaggaggcccagctgacctgagtggggagctgcgcaggggagaccggatcttatcggtgaatggagtgaatctgaggaatgcaactcatgagcaggctgcagctgctctgaaacgggccggccagtcagtcaccattgtggcccagtacagacctgaagaatacagtcgctttgaatcgaagatacatgacttacgagaacaaatgatgaacagcagcatgagctctgggtctgggtccctccgaacaagtgaaaagaggtccttgtatgtcagggccctgtttgattatgatcggactcgggacagctgcctgccaagccaggggctcagcttctcttatggtgacattctgcatgtcattaatgcctctgatgatgagtggtggcaggcaaggctggtgaccccacacggagaaagtgagcagatcggtgtgatccccagtaagaagagggtggaaaagaaagaaagagctcgattgaaaactgtgaagttccatgccaggacggggatgattgagtctaacagggacttcccggggttaagtgacgattattatggagcaaagaacctgaaaggacaagaggatgctattttgtcatatgagccagtgacacggcaagaaattcactatgcaaggcctgtgatcatcctggggcccaatgaaggaccgagtcaatgatgaccttgatcttccgaatttccactataaatttggaaccgtggttccacattctaccgcgcccgcgctgtgatattgggttggttggaccagatctacactttgcgtgttccgtggtatattgtgtgatagattatcaggactaccagtttcatcgagtgggccaattttaaatgataacccnctatgggacccagcatcccagtcagtgcgggcagttgcagagaggggcaagcactgcatcttaggatgtttccggcaatgctatccaagagactgcagcaagcacaactttaccccattgccattttcatcaagcccaagtccattgaagcccttatggaaatgaaccgaaggcagacatatgaacaagcaaataagatctatgacaaagccatgaaactgggagcaggaatttgggagagtactttacagccattgtacagggtgactcactgggagagatttataaccaaaatccaaacaaatcatttgagggaccagtctgggggcactacatttgggtcccatcccctgataaaactctgaagggaatcccctccaaccattctcttgtgaacagaaggaaatcaagtccctcttccctcctccctcttcattcctgtccccatggggagaacaaatgctactgttcttgtccccttttttagatatgtcatgtcaaaaaaaattaagttttctagtcctgttcttttttttttttttaagtttttgtttgtttcagtttattttttgggatgatgccatctcattcatcatgtgactgtgcccattcctgcatgggacctttcccaagcgctagaccaggtgcaaaatccattcagaggccattgttttcataaaaaccaagcagaagtgaaggggaaaagggggagggactgatgggaaaggacaggactctgggacaggctggcacgggtttgttgaaggtgaggcttaaatggcaccacatgatgagatgctcctgggcatttctccctatctgtactgctgtcttgcagctctgaacggtgcaacgtaatggcgacagaaagtatcttatttatatatagaatatatatatgtaatttatataaaatatatagaaattattatatatatatattatacactctcatataatatatatatattcacacacattggggttagaaaatctatggagacttcatcaatggtactatgttattagagaaatgctttaaaatttccatattcccaatcagatggcatccttcctatccccagctggttgggaagggattgaagatggtagcaagtgctgcactaagggcactcgcattttggtcattctcttgagagctaggaggggtcagcctgaggccggagaggaagggcttttgcctggggtgagagggtgagagacttgacctgaaagcaggcntcggcccctgaggtgcagccagagtcctgtgtgcggacagagagagagatggctaatgatgctccgcgtggaattgcctattgttttatgccacctgatgtgttctgcatgagaggtttcctttttgttcctttttaagctgctgttaaaccaaaaccatgttgtggtactgtgtcagccttttcattattgcaaattttacttttactatttaagtgaatgcatagaatccaatttgccaaggttctaaaggcttatgaggtcctgaaggagccaggccttgtgatggagtaggtgacacaggcctggttgtcctgtcagcagaagggaaagcaggggctgggctgagaggaggacacggagggctctgctgaggttccttcctgggttccaccaacagggacagggagtcacttgccttccagttctgtgctgggatggcgggacagcacttggcttgcttggccagctgcgtcatgagtttgatttggtttttttttttttgcagctgcttcatatgctctgctccagcccctccccaacagctggtagcttatggtttcttcaagaggaaagtagactttatgctgtacatttgagctgtagagctaagattcgcttactggtgagctgtgaaaccttgttgctttttcccagagtctgatggcagtgactgtgatcaagggaatcttcaccgccacaagtgcaggcagcaggtgtggttcaggtccccccccaccccactgtggctcctttgaagccaacgtgcctccctcgcctccataatggagggacgacgcaggggagaacagagaagttgcttggcccctagggattgaggcacttgtttccctagcccgctgggttagggctgggtgcaagcgaggccaatgttgaggatgcctttaagccacctacccagcccgaatcccgggaactcctgttaaacagttgtcccaacccagccagaatgaggcctaactgtattaaagccatgggagcccaggatgaggataaggaaaggacagcggctttccctggggcagtacaatggcttgaaggcaaaaagggataaagtgacagccgactgtgactctggtgaggaggggtgagcagggaggttgattctctgatgttaactaagtggcaaagtctcataactgctcagccctgcccctcccagggaagagaaacaaagattcaaagtaagcatgatactagtgggtttaccagtgtttcttccaacggagacatatatttttttaataaacgatagttgcaatgaactgtggctcagagaccttcttaaagtagttgagaagggagggcgtgggcaaagcagtgggaagaacatcccaaacttttgggggccagagggctctctccttagtgatgatcagctagccgagctgggcccgtcctggggatcggtacagctccctggggtggtgacaggccctttgtgaaagttgtgtgcttggtcttccaccccagccccagacactgcttcaaatagcaccaaccagatgggag

SEQ ID NO: 113119 - DNA, 5299 bp, Homo sapiens
tttaattataataacattcaaatcatcatttattattatgcttagtttattcctataactgttaaatatgacattaatataccgattcgttgatgaactgagattatctgtaattattttcactagagtctagacaactactttacaaacagtattctacatcattgcataatgcattcttgaaaacatgacagaagtcaagaacaaacgacagacttacacatttttaaagactttcaactcttaagagcagaacaaatgtaataaaatcccccattaacacccatggtgctgcttgtaaaatggctccccatgatgcagcctcctggacagtcatgggttttgtccaataaaccatggttctggatcaatttggagcctacctaatggatttgtttttaactatgtcaattccatgattagattataaagacttccatgttacttgcatttgctgcagcttgtcttgcttgcttgccctaatgaagcaagctgctgtattgtgacttgctccataaaaagggctgcatggcaagaatgcactatagtagatgggtgaagaaataagaccaagaatcgaaaaggaacttaattctgccaataatcacctgagagatctcagaaccatactcagtcaatctttcagttgatgacaaacacatgaaaaacctgattacagctttgaagagatactgaaccaaaggacacagctaaatcatgcctgtattcaaaataaattgtgagataaaaattgttatcttaaaccactacagtcaggataatatgtgacatggcttggatccatgtctccaccaaccctcatgatgaattgtaattcccaatattagatggaggtggacctggtatgagatgactggatcttgaggatggctccttcatgaatggttcagcaccatacccttggtgctgttcttctgacagtgagttcttgcaagatctggtttttaattttaatttaattttattttacttttaaggcagagtcttactctgttcacccaggctggagtgcagtggtgcaatcttggttcactgaaacatctgcctcccgggttcaagcaattctcctgcctcagcctcctgagcagctgggattataagcaggtgcaaccacacccagctaatttttgtacttttagtagacatgaggtttcaccatgttggccaggctggccttgaactcctgaccctcaggtgatctgcctgccttggcctcccaaaagtgctgggattataggcataagctgctatgcctgactcagatctggattattaaaagtgtgtagcacctcccgcttcactctttcttgctccctgctcctgccatgtaagatgtgcctgcttcccctctgccttgtgtcatcattctaagtttcctgaggcctttccagaagccaagcggattccagaatcatatttcctgtacagcctgcagaatcatgagccaataaatctcttttatttataaattagccagtatccaatatttctttatagcaatacaagaatggacatatgttatctagcaataaatgcctaaaacaagacatcctatataatgttaaacatattttctgcacttaatttttccattttaatcatttcattcaccgttaaacaaagctatccaaaataatcaaagaacacaactaaactcagtaagattaagaactcacggattccctatgacttatcagttcctttacctacatgaaaatccccacttattactagtaccattacttccaatttttgtttttcattcatcctatcaactgaccttccaaaatacttgtatacaaatacagcagagatctcaaaactgaagtgctctaaggccaatcataccaccataaaatacaaggaaatctctcgtcagcttctgtaaagactgaactggaaataagaaaagaagttgtcaacacaactatattgtcaatacattaacacataaaagaaaatggactctgtaccaacttcaaatgtatcacaactgaaaacaagctaatattttcaaaacaaattcatctcacaaatcatttttttttttttgagatggagtctcattctgtcaccagactaaagtgtagtggcatgatctctgctcactgcaacctctgcctccccaggttcaagcgattctcctgcctcagcagcctcccgagtagctgagaccacagccacatgccaccacatccagctaatttttatacttttagtagagacagtgtttcaccatgtttcccagaatggtctttatctcctgacctcatgatccgcccacctcagcctcccaaagtgctggcattacaggcattgaaccaccatgtttggccttaaattttattaaagggaaagggatactggaatggaaaggggctggcctggttgcagtgggcttatgactgccctggctgaggaggaagtctactcaggatgactggttgggtggggagaaggtgccttagagttttagttttggcttgcatcacttactaaactgaaaaataatccaactgatgaaaactttgacacaacacactaatctggtaataatcagcatcaaaatgttcatgacagcatattcacaatgacaaaaaatattgtagacaacctaaagacaacaaaggagaaactaaagaaatcttgatacatcaatataatgaagtattaccaaaattcctacttagggaaaacttaaattagaaaaaaaaagatgaaagagagaagcctctagcttaaactatttttatctaatttttaaaaatgaacacaaaaaagtaaaaaatacataaatattatgattgccattatagcatggtatcatgggaggtagaatgtttgtagtttttcccattttatttctcttctctggcctctaaacctcttgtattgatcaacaataacatgcataactttcacacaaaaaatatatatgcccaaacatacaaagggacatatgtcctcccacaaacatatacacagagaaaggaatgtaacataaaaattctctaccactacttcttgggagactgagatgcaaagatcacttgactgtaggacttcaaggctagtctgggcatggcaagatcccacctcaaaagacaaacactaaaagctctccattaaataataaacagccaggttaaattaaggttaaaccaggtttaaccatttaaaaaaacctaaagctggaagcaatgtaatcccagcacttcggaaggcccaagctggaggatcacttgaacctaggagttcaagagcagcctgggccacacaggcaaagcccatctctacaaaaaaaattttttttaactagccaggtaaggtgtcatgtctgttgtccaagcacccaggaggctgagatgggaggatcacttaagccaggaattcgaggttgcagtgggctatgattgcccccacagcactctagcctaggcgacaaagccaagatcccatctctaaaaattaagtaaaatttggttttcatttacaaagaattccagctctgtggacaaaacgtattttaaatattctatttaagcaggctatgtacctcatataatttttatgctctcttgtgcccaagttaaaaataagtttatctacttaagaaaaaagaccagtgaaaagaaatgtaatcaatgttacaaggttcaatgaccataaaccatcataaataaaacaggtatgtgaaaagaaaataaatctcaggactccaaaatgactaagccaaaggaagtcaagcaggcaactgactcaggcaaacctgcctcccattttatttctaaataaaatagctccaaacataaaaaagctacatccctccctcagaatttgcccacaaggaaattcctgtggacaaaaaacacagagaactcgaaatcatccctctgatgctcaggtgagagaaatgcatatctgatggaaccctaaaaatttaggacaggtctcagttaatttaaaaagtttattttgtcaaagttgtggacacaaacttgtgacacagtctcaggaagtcctaacgacatgtgcccaaggtggttggggcccagcttagttttatacattttagggagacatgagacatcaatcaatatatctaagaagtatgttggttcagtctagaaaggcagggataaagtgaagcaaaggcaggaagactcaaacggggaagggggcttccaggtcatagataggtgagagacaaactgctgcattcttttgagtttctgattacaatcagatatgcatctaagtgagcagaggggtgaatttgaatagaatgcaaggtaagttggccctgaacagtttctaacttgacttatcccttgagcttagtgatttgggggccccaagattcattttcctttcatatcccactccccccagccttttcttttataaaatcttttggagaaactattttgaaacaaatgagtctctctggtctcaggtttcatctgatctctcatggctaggatggtttattcctatatgggtaggtcctgaaagctcatttttagcaggttgtgaagtctcacatcctgtaaagagaaaataggaggaattgagaaaaaacaacacacaaaagaatactcctggaaaatcgatacaggccacattactctgaagtctatacaacagtaggcaggtatgaaagtggcatatgtatataaatagcatgctgatattctcttatgaggtataagttgtctggcttcagttcgcaggactttaggaaagcgcagcttagttttcagtgactcacaggtcagaaaaccctgtacagggactgtgtacacaaaatatgaggccagtttttccaagggctttcttggctccatacgtcaagtttgattcccttgaatcaccaacggcaaatactttaggttttctttcttcccaaactgttttggcctcgctgctagggctgtcgccgagcttacacggactccaggtgatgagtttttcttgagtcactgcaaaggcagtttcactaggcttcacttttctttctcgcggttttcggccaggtctctcctgagacactcctatctcccggtcccgacaccagcaccaagcgctcaggtaaacgtcccaagtaagacaaaggcaatctacatcagggcctgatagcggcgtgaaggagggagggactcagagcatcaaagtcagtccacaacgggcggggttcagttaaattgtgtctccagcgatctattagacccgtcctcttcaatatggcgcattgaacccggctgacaaaaaaaaaaaa

SEQ ID NO: 113120 - DNA, 2039 bp, Homo sapiens
cctcggatgtttaatcgataagcttgtttggggagggcgggtcgtggtgggaagccgtcaaggccggagtagaaattggtatgcttagaagcagattctaaaagcaggttctcttcagaaaattttttttcataccacttgataagcatcttgaaacaccatgggctgtagctgcagtaaaaatgggtgatgtcaaaggagaactatcttgaaacatttatttccagtccaaaatggagctttatattgtgtttgtcataaatctacgtattctcctctaccagatgactataattgcaacgtagagcttgctctgacttctgatggcaggacaatagtatgctaccacccttctgtggacattccatatgaacacacaaaaccttatccctcggcccagatcctgtgcataataatgaagaaacacatgatcaagtgctggaaaaccagattggaagaaaaagttgaacaccttgaggaaggacctatgatagaacaacttagcaaaatgtttctttactaactaagccccgggtgggatcctcatggacggtaatcacagatgtcgtaagaatctggaatcctccaaaagacagatgatgcggaggttcctgggggaatcaaagagaaatgtgcctcatttgccatttgagaaaaatgcagtctggtgtattcagtaatatatagtaaagtaataatgataaaatatcttttcatatattagaatgtgtacttttatataaagtaattctggatttgacattctcatttagagaaacctattttcttttttctttttctattttagtgtttccatttatgtgcggtctcccaatttaggacttttccatagtgccaaagccatacatattcagtagaacatcaataaattacatcagaaattcaacactttattataaaacgggcttcgtgttagataattttgctaaacagtaggctactgtaagtgttctgagcatatttaagacaggctagcattttcaatttacaatattttcaactgatagtaggtttattgggatgtaaccctatgataagttgagaaacatctctttttgtgtgtctactgtgatttaagtatttttaatcatcagccaagcattgttagtagtataaatatgattaataaaaatgtgcatggctttcctgaaggagatttttttaattgcctttgagaataaactcataaggtctaccaagaaaataaatgttatgatgtttcagttggcttctaggaaataattaaattagtgatattttaatcaggttttactatctgctaggccccttccatcaattcttattaaattctcaaaataatcctttgaaaagggagtataattacattttacagtgactcgaaccttacccaaacaagtgggagagccaggagccaaactatcagggctccaaagcttttttttagtgcatcacaatgacaaaggggtggttttctttcacccaagaatgtgctttcctggaaatttttctagatagaatattatgtaatttgttttgaaggttttttttcctgactgtcttaaagattatgctagctttagaacacatgcaaacagctgcagctctgtgattaaaatgttaaggtcactagaatagtgttaggaaaatgttaatagataattctgctgcctctattagcttatgtatgatccttaatagcattgcttccccttcagtttctatttaggaggtgaagaatcttttaataaggtagaaagttgctttatttaaatttgtactgtagaatgtttgtgatacagtatttgtaaaattgatatgaaaaataatttctcaaagtctattgtttgatctagttattttaataaagggactctagaagtttcaagtggccagtgaagtgtgaggaatagagagtaaaggaaataattaataatggtgaccctctgttaagtggtttactttttccattaatataaatttcatttggaaagattaaaaaaacaagtttgattgaacttgataaatcagaaatattt

SEQ ID NO: 113121 - DNA, 575 bp, Homo sapiens
gcacgagcaggaacgctggaaagtgacattgtgtacacgctgcagcttgggggttttttctttgtattgctgtttattttatattttaaaaatatttaaaaaaatgtcgagatggggtctcactatgttgtccagactgaatctcaaactcctgggctcaagtgatccacccaccttggccttccaaaagtggtgggattatgggcaggagcctccgtgccccaagctgctgccaattttcaaatttcctccctgcctcatgtgagaccacagggtttggagaagcagttggaacccacgtgtggtgatgcctcccacatcggcctgcttggggttctacaggggttgagggaccaggcctggccgagactgatggacagtggggactttccttctctccatgatggctttgcaaggggctccatggtccttctctctgtgatgggtttttgcacggagtgtgctctgccactgtggtggggtgggtggatgctgcttctgttgcctccagacctcggtgcccacagccttgaggatccttccaataaaggtgtcaagagctcaaaaaaaaaaaa

SEQ ID NO: 113122 - DNA, 811 bp, Homo sapiens
gtcaggctggtcttgaactcctgacctcaggtgatccacctgcctcagcctcccaaagtgctgggattacaggtgtgagccaccgtgcctgacctgtgtgattgttaacatccccatctcccaccaaacactggacttccctccttgggcctgtgtctctcttttctgttcatgccatctccctcagcacccagcatagtgccagtgcttcacgggtgctgggttcatatttgtcaagctgatgtttatcacacacttttaaagggttttttgtttttgtttttgagacagagtcccactctgtcacccaggctggagtgcagtggtgccattttggctcactgcagaggtttctgcctcccgggttcaagcgattctcctgcctcatcctcctgagtagctgggattacaggcacctcccaccacgccaggctaatttttgtattttcagtagagatggggtttcaccatgtttgccaggctggtctcgaactcctgacctcaggtgatccacccgcctcagcctcccaaagtgctgggattacaggcatgagccaccacgcccagccccctgctcagatctttataagtggggccttcatgagagtctctgagttgatttttgtttcctgccagaccttgctaacctaccgaaccacgatgaccatcccttcaggagatggtctgtgaaaatgcttaaagggaatggtccaaatgggaggcagctttgggtatggccccaaaatgactctgctcctaagttgtaactttgaaactctggttggactaagtgaattcaaatgtagatcag

SEQ ID NO: 113123 - DNA, 572 bp, Homo sapiens
agctcctccacctgcctcctcagggctgcgccctgcaccgccctggtccagggtcctgtggaggggcggggcgagacggccagacagccagccacctgctctgcctggactggcatgctggccctggcggagtggcaggagctgccctgagagtccctgagagaacggcaggaaaatgctgcgtgtcacggctcccttcatactgtaatgaggaggggcagggccagctcacacagcgcctgcaggggaagacagagatgcgagaggcagcccggccacccccctcactccagtgcaccccacggagcagataaaggcccatcttcccctctagggggcccaccacaaaatgcatccagagtagtccagttagggctggttttgaggcagaaaaagctgaagccctacggggatcggggaagtcctactccttcctctagaacgaggactggagtctggggaagaggaagaaaacccaaaatgaaacaggttatccggaacctctgtcccgataaccttcctcacagttttggttattaggtatttagctcaaggaaaatgctgactttcta

SEQ ID NO: 113124 - DNA, 1141 bp, Homo sapiens
ttttttttttttaagccataaaaaaatatttattgacatggaaaatgttaacaatatacttctatatgaaatatgtaggctacaaaacagtatatacagtttaataccatttttatggaaagaaaaataaccatatatacaaaatcatgcataagaaaaaaataatataaggatgtacatacccaaattattaataataatggctatctctggatcgtggaatcagagggattatgtaattttcctgataaattttcctgtcctccaaacagcatccgcttcatactattatttcttgggttgtaaattaagtttgaatattaattctcttcaggaaagggctctgtttcactatatatacccccaaaggcatacttttggatggcggctttctgcaatttccccatcctaaaaaggtagataacacttggcccctaaaattctggggcatatggaagactatttggtaattaacacactataaaatatgtcaaagcagcgccaggcatggtgggctcacacctgtaattcccaaaccttggcaggaagatcgattgaggcccaggagctcaagacgagcctgggcaaccatagaaagacccctatctttacaaaaaaaaactttaaaaaattagcccaggtgtaaatagcacatgcctgtctgtaatcccagctacttggcaggctggaaggtcaaaggctgcagtgagccatgatcatgccactgcactccagccgtaggtgacagagcaagaactcatctctaaaaaaaaatttttaaataaagcaaaatatgccccacgccatagaatccgattgtaagaaaattaatttatatggagaaactgaaaaatctccctaatcaagacaaaaattttaaatagaggaaaaaaatactatctaccatttagttcaagtttccattaagagtagagtgtggaagtagctccaagttcagagctggagaattttgcatctctccctcttaccagccaattgactttaggtaaagaatactagagttttttagttagtaaaatatagttaataattctgtataaaggagcaaaagtaagtttctcattgtttcctatctcccttcaataggtttgacatgttgaaattgtgaaattatttaatg

SEQ ID NO: 113125 - DNA, 913 bp, Homo sapiens
  misc_feature (1)...(913): n = a,t,c or g
nnnnnnnnnnnnnnnnnnnnnnnnnnnnnnnnnnnnnnnnnnnnnnnnncgacaaattccttgaatcaagttgtgacaggcactgtccccattctctcagctcccgaacacctggcctccatcctcaatggccagtttttggctggatgctatggcccgctctcgggctgctggtaaccccctcggctccatggctggagcagcggcctcctgtcctggctcccacaccaccgcctctctgtctctcccgcagcttcctcagcctcttccctccccatgaatgttggtgctcctgggtcctttctagccctccgtgttagccagggctttttactctctgcattccaatgctttcacatcttggggccttgctgaccctggagagacaaaccctgtaccccggggccagccaatccctagagacagaaaaaggcctgaagggagcacactgttcagaggcaaggcagccaacccaatgcctgcacccccgacctccaccacctgtctggggctctcacactccaggcccctatgcccctgcccttgtcaagcagtaccaggtaccaggcccctaaagacagcccctctgccccagagcctgcatgcccccctcccgttgatgcttctcgtggaaaccacattcaaggtcttgcccacgctctcctgaccctccctctgcctgctgaccagccctggntctcccctggctggcctgggtggcagagtgtgccccctctcttgggaactgtgagtaacgaactgtcttttcaatggtgcctcggccgctgaatctgttggccctcatcatacctgggcccacgaaggctggagaaccacttctacccactggggtccccaacaccccagaacccacacgtggtgaaatgtggaaatgaaattgggaaagaagaat

SEQ ID NO: 113126 - DNA, 566 bp, Homo sapiens
cttcgtctccgtccctagtccgtgtggtggaattcgggaagccgagcatgggcaggaagtaggggagggcggtgctccgccgcggtggcggttgctatcgcttcgcagaacctactcaggcagccagctgagaagagttgagggaaagtgctgctgctggggtctgcagacgcggatggataacgtgcagcccggaaaataaaacatcgccccttctgcttcagtgtgaaaggccacggtgaagatgctgcggctggatattatcaactcactggtaacaacagtattcatgctcatcgtatctgtgttggcactgatacccagaaaccacaaacattgacagttggtggaggggtgtttgcacttgtgacaagcaagtaatgctgccttgcccgaccgggggccccttatttacccggaaacttctgttcaatccccagccggtcccttaccagaaaaaagcctgtgcatgaaaaaaaaagaagtttttgtaattttatattaccttttaagtttgatactaagtattaaaacatatttctgtattcttccaaaaaaaaaaaaaa

SEQ ID NO: 113127 - DNA, 413 bp, Homo sapiens
  misc_feature (1)...(413): n = a,t,c or g
tcatcataaaatggaatcgaatggaatcaccatcaaatggaatcaaatggaatcattgaaaggaattgaatggaatcttcatcgaatgaattgaatgcaatcatcgaatggtctcgaatggaatcgtcttcaaatggaatggaatggaatcatcgcatagaatcgaatggaattatcatcgaatggtatcaccatcaaacggaaaaaaacggaattatcgaatggaatcgaagagannnnnnnnnnnnnnnnnnnnnnnnncatctnnnnnnnnnnnnnnnnnnnnnnnnnnnnnnnnnnnnnnnnnnnnnnnnnnnnnnnnnnnnnnnnnncatcgaatggactcgaatgcaataatcattgaacggaatcgaatggaatcatcatcggatggaaacgaatctcgtgccgaa

SEQ ID NO: 113128 - DNA, 912 bp, Homo sapiens
  misc_feature (1)...(912): n = a,t,c or g
caggaattctgcacgagcctcnnnnnnnnnnnnnnnnnnnnnnnnnnnnnnnnnnnnnnnnnnnnnnnnnnnnnnnnatgtgcatgaaatttggtgccgtgactcggatcgggggacctcccttgggagatcaatcccctgtcctcctgttctttgctccatgagaaagatccacctacaacctcaggtcctcagactgaccggcccaaggaacatctcatcaattttaaatcaggagcttgctacacgtgccggaaatctggccactaggccaaggaatgcctgcagcctgggattcctattaagccgcatctcatctgtgtgggaccccactgaaaatcggactgttcaactcacctggcagccactcccagagcccctggaactctggcccaaggctctctgactgactccttcccagatcttctcggcttagcggctgaagactcacactgcctgattgcctcggaagccccctagaccatcacggatgctgagcttcgggtaactctcacagtggaaggtaagcctgtccccttcttaatcaatacggaggctacccactccacattaccttcttttcaagggcctgtttcccttgccttcataactgttgtgggtgttgacggccaggcttctaaacctcttaaaactccccaactctggtgccaacttagacaatactcttttaagcactcctttttagttgtccccacctgcccagttcccttattaggctgagacactttaactaaattatctgcttccctgactattcctggactacagccacatctcattgccacccaccttaacccacaagtagaagatacctctattccctccttggcaacctatcatgcaccccttaccatctcattaaaacctaatcactcttacccctctcaatgc

SEQ ID NO: 113129 - DNA, 443 bp, Homo sapiens
  misc_feature (1)...(443): n = a,t,c or g
ttctcacgtnnnnnnnnnnnnnnnnnnnnnnnnnnnnnnnnnnnnnnnnnnnnnnnnnnnnnnnnnnnnnnnnnnnnnnnnnnnnnnnnnnnngggacatgcatgaaatttggtgccgtgactcagatcgggggacctcctttgggagatcaatcccctgtcctcctgatctttactccatgagaaagatccacctacaacctcaagtcctcagactgaccagcccaagaaacatctcaccaatttcaaatccggaccctactgaaaatcagactgttcaactcacctggcagccactcccagagcccctggaactctggcccaaggctctctgactgactccttcccagatcttctcagcttagcagctgaagactgacactgcccaatcgcctcagaagcctacaggaccatcacagatgctctaggtaactctcacaggg

SEQ ID NO: 113130 - DNA, 1109 bp, Homo sapiens
  misc_feature (1)...(1109): n = a,t,c or g
cagtgtggcggaattcggagaacaggacccgtcgccatgggccgtgtgatccgtggacagaggaagggcgctttttctgtgtttcgcgcgcacgtgaagcaccgtagaggcgctgcgcgcctgcgcgccgtggatttcgctgagcggcacggctacatcaagggcatcgtcaaggtgcggaacgctggccggggcgggaggggaagggacgcccggccggaacgccgcactcacgccgcctctgcccacaggacatcatccacgacccgggccgcggcgcgcccctcgccaaggtggtcttccgggatccgtatcggtttaagaagcggacggagctgttcattgccgccgagggcattcacacgggccagtttgtgtattgcggcaagaaggcccagctcaacattggcaatgtgctccctgtgggcaccatgcctgagggtacaatcgtgtgcttgcctgaagtagaagcctggagaccgtggcaagctggcccgggcatcagggaactatgccaccgttatctcccacaaccctgagaccaagaagacccgtgtgaagctgccctccggctccaagaaggttatctcctcagccaacagagctgtggttggtgtggtggctggagggtggccgaattgacaaaaccatcttgaaggctggccgggcgtaccacaaatataaggcaaagaggaactgctggccaccgaatacggggtggtggccatgaatccttttgaagcattctttttgaggggggcaaccaccagcacatcggcaagccctccacccatccgcagagatgccccctgctggccgcaaagtgggtctcattgctgcccgccggactggacgtctccggggaaccaagactgtgcaggagaaagagaactagtgctgagggcctcaataaagtttgtgtttatgccnnnnnnnnnnnnnnnnncttgggggggggcccgggggggggcgccgggcccccaattcccccttaagggggggggaataaaaatcccggggcggggttttaaaaacgctgggggggggaaaaacccggggtgacccaatttaatgcccttggcaacaaaaaactaaataatcttagtgag

SEQ ID NO: 113131 - DNA, 1946 bp, Homo sapiens
  misc_feature (1)...(1946): n = a,t,c or g
tcatatcaaccagcacaacacgggatggcgcccaaactccggcgttcacaagaggagacgtgacgtggtgggctgaggttaatcagggaaggtttcctgggggaggtgatccgtgaactggctcccggggaacattcagagcatgattggtagacagaagggtgcagaggcgcccaggggagtacattgccccgtgcaaagcaggggcattggggactgtcttgagaccctgagggggtcaagcccctccttccccagatgcccctccttctagaacctctgcacatctagcctctggccctcctcttcactgcctccacctgctcccgcttgccatccctgtctcctccatcctggctgtgcagtaggaattccaggctcctccctgtgtctttgctgttcttcagactccatttatagagaatgagggctgataacaggaatacagtggcaaagattagactgtggaaagggttccagaaatctttttttcttttttaattaaaaaaaatatttgcagagatgagctcttgctatgttgcccaggctggtctcaaactcctgggctcaagcgatcctcccatctcagcctcccagagtgctgggattacaggtgtgagctactgcgcccagccccagaaatctcagtgctgtttggagctccatttctcatttgatgacttgctctgcgtggggaggtggggtctcattcccccaacttcctcagggaggacccctgccctccgctgctcctctgtcctgctagccttcctccaggaagcacactgggtgcagataatcaggacattccagagatccccaatttaagagggtcatttccatcttatggggactcccggatgggtggtttccgctctcaatagcccctcttgtttttaccaggaaagatcccagttaaaatcacccactggaggtgaacagctcattagcggggagagagatggagcatcgagtgacactgggccatccaggcggctctgctcccaccagacaggagataggcctcactggcaggggggctgcccacagccttttcaggggctcgcttggcgggtgacggggccgcagccaggccttctctccctgccccttggtgaccccgtggcttcctgtctgctggcctctcctgctacttatcacttcaccacgaactctctgcctgagactggggaagtaagcgggtatcttctcagtgagcataggttggggactgtgatcttgagaagccatgggccagcaatacctgctttttttgaagcccccaaggagggctctgacattctttttaaaaacaccacaaagcaaaattcccaggacatgtgtagttttgtttgttcagtatcccacaacttaaggctgggagatggaactcttggttaaggtcgatttttctgtctggcttctccgcaccttccacttgctctctggatcaggcagatataaactttctagcgcattttgagagagggctttcttgggtgagggagcatggcaaagtcggtttctctctggactgtttacacttcaaggcggtggatttagaggaatcctggctttcattttcaatgccagtctgagacatgttcccaagccggggctcttgttcacaccacttactctggccaccaacaacaacccaggccagacagagcatctcnnnnnnnnnnnngaaaaaaaagtttttgtcccccaggttggaacccaaggggcaaaatttggtttaataaaaccttccccttccggggtaaaggaatttttgggcccaaaccccccaaagaagtggaaataacgggcccggccaacaagcctggttaatttttggattttaagaaaaaaggggtttaaccattgtgccccgggtgggtctgaacccctgaagttagggaggttacccaccttaaccttccaaaggggttggaattacg

SEQ ID NO: 113132 - DNA, 397 bp, Homo sapiens
aaatcacactaaatttttttattttttactattaaagtcagtcacatcatttcttaacctgcctcaagcccctcaataacttcccatctcgctcaatagagtccttccaggccctaaaggaagtgtctgtcctttgcctgcccccctctctcccctcacccactgctgcccctcctcagccccccaggcctccgtactgctccccagacaagccaagagtgctcccacctcagggccttagtgcctgccatgcccccagcctgcggtgctcctcccctagatatgcctgctcactccttccttcccctcttccagtccctgcccagacatcaccttctcagggaggccttctccaaccttctctggccacctgattgattgattgatcgatcgatca

SEQ ID NO: 113133 - DNA, 2146 bp, Homo sapiens
gggagtgacctccccctctccctgccctctaggagcaggatactgccatgtctaacaccaggggacacctggcaggaccccgacagacctgcagacagaagctctagaaagacccctccccggcattctgcagagctcactgctccccagcagccccaggtaaggcacacaggctatgtgtgggcgccagcactgcagaaagcccatctgtcccctgctaccttgagctcctcttgtcttctgtgatagtacagcatcagctgcttctgctcctcactgctaataataggctctcgggctggagctccctgtcccctctgcaaagaggagagcagagcaaattgtggattaaggtgttcttagagtgacaatcctgaagttacaacaaatgttttacgattgcctttgccggctactaaagataaacaggtcccccatgtctgatcacccgaagtgaagcatcaagggaagccttggtcttgagcagccctgagccctggactctcactgtgtggagaccagaggctgcacgataccatctctgtcttgaccattcccaaggcagacactgcaggcaggtccagtgggaaagggaggatgctcagagccacggactctggatctacataaggtggagggccccatttccccaaaatcacagcctagtgacgtaggagcacccacaaaaccaaggcggcccctcaggttacagcgctacacgatgtccttcaaaggtctcgaacctttcctcctccccctcctgtacacagcatcagcagtttgaaaaagcctgaaatcagtgacgggcgaaattttacatttcaaggaacatatctgtttacttgcagccctatttttacgcttgaaattaacatagtatatttcctctcccccacatattaaaacaaactctagatattggtactcaatccatattttcttccagtttttgttggtgtgcaggaagaggatatttttagtttaaacccgagccaataagattaaaatatttgtaccagtagtttaaatctttcggattcactgtacatttttatcagtttgaagggaaataacaaaaactactgacacattaaagcaaaaagtacttacttgctgaatcttggcgataattttggttttttcattcttccccacgtagtctgaaagcttcttcgttcttctcagctccttggctgcccaccacagctgcgcctctgcctctttaatgacgttgagccctgcctgtgttcccgacaagtcttccttattttcaaactccatgcggatgggatcatacggtggcaaccccatggggtaaacaatcatcaccgcgcctcgaagctggtccaaggcatctttcaccatctccatggtaacacagacaccggcttccacttgtttcttagatattattgctttggcttcttctatagtcttctttaacacttgcttcatcttctcatttggagcttgcccattccttcgtccaatatcatcctttttaaacactgcacctccgctgggtacgcatttttcaccccattcatccttcaatttcaattcttcaatctgatcatcggtcagtccttgcatattaggagggagaaatatgccatgttcggctaattcttccatttctgagcagaggcgctgcaccttgagccgcccattatagacccgggccacctgcaccgtgagctcctccagctcggtactcccaggcgcctgcagcaggaactggctctcgtcgccccgcttcacgtgcagcagaaccatggcggtcccgccgaggtactgaggcgttgagaaggccccggctgcgtggcccgcgggtcctgccggccgagggtcgccggatcgccagcagctgcgacgcactaacagccgctcacagtccggaatcccacgctccctagcccgcggtgagcgggggaaacggcactcgctcccggaagtggatgttgccaagagcaacagtgaagcagagttaaagagccgccagctcaagctcagaacccgagtgggggaggctggggtgcaccgaggcccagcaatccaagcccgtacggagctgcggccggggaaaccacccacacagtctgagaggacagctgattctgagcggaccgacggaaggagattcgcc

SEQ ID NO: 113134 - DNA, 471 bp, Homo sapiens
  misc_feature (1)...(471): n = a,t,c or g
tttacccttcgaanaactgatgacgttggnagtcacccgccttcttggccgaggccttaaccaacctgacgtccaagttatgagtgttctgccactccagccctaaatagcggtatgactgagatggcggtgaggacagtctttcccttagcatcatttgcagaagacactgcctatcagctgtctctgcacagaactgtttacacatctttcatcacaagcatttctgcccctcttctgatcacagaacccatacagaaaaccacacacacacacacatcacagacactgctactgacctcttatgagatcaaagccaaaatatgagtctgccttgtgaatgacagaggagaactcacactggaggtgtgtgcatgtgnnnnnnnnnnnnnnnnnnnnnnnnnnnnnnnnnnnnnnnnnnntcgcttccttcttaggaggtgagaactgagagattattctcttttggtt

SEQ ID NO: 113135 - DNA, 450 bp, Homo sapiens
  misc_feature (1)...(450): n = a,t,c or g
cgcccccatgaaaccgatttgaccaccattacgcacagcttggcacgagggtcaagtgccagcaaagaactttaaaactgtaaagctgcgtatttaactgttttgtgtagcatggaaatattctgtcagctttttggaggcactaaatgttcttgattatcagcttgaaggtatttttgtattacaagttgacagttgctgggtgtagtggctcatgcctgtaatcctagcaactcggggctgaggtgggaggattgcttcagcccaggagtttgagaccagcctgggcaacatagcaaaaccccatctctacaaaaataaaaaatatgtctgggcatggtggcccaagtctgagtcccagttacttgggaggatcacttgaatgtaggatcacttgagtctaggagttcggggctgcagctatcatctgnagctattaatcatagctca

SEQ ID NO: 113136 - DNA, 1606 bp, Homo sapiens
aaatgaagactaggacgtgcaccgtccggaatcccggcgacccacgcgtccgacgcctctgggcgcaccactggcattgtcatggactctggagacggggtcacccacacggttgcccatctacgaggggctacgccctcccccacgccatcctgcgtctggacctggctggccgggacctgaccgactacctcatgaagatcctcactgagcgaggctacagcttcaccaccacggccgagcgggaaatcgtgcgcgacatcaaggagaagctgggctacgtcgccctggacttcgagcaggagatggccaccgccgcatcctcctcttctctggagaagagctacgagctgcccgatggccaggtcatcaccattggcaatgagcggttccggtgtccggaggcgctgttccagccttccttcctgggtatggaatcttgcggcatccacgagaccaccttcaactccatcatgaagtgggacgtggacatccgcaaagacctgtacgcccacacggtgctgtcgggcggcaccaccatggatccgggacattgccgacaggatgcagaagggagatcaaccgccctggcggccccagcaccatgaaaaatcaggaatcatcgcacccccagagcgcaagtacttggtgcggatttgtgtgtttcatcctggcctcactgtgcaccttgcaggagatgtggattagcaagcaggagtacgacgagtcgggcccctccatcgtgcaccgcaaatgcttctaaacggactcagcagatgcgtaacaattgcttgatggggttaattgagaatagaaatttgcccctggcaaatgcacacacctcatgctagcctcacgaatctggaataagccttcgaaaagaaattgtcctacaatccagtgctgatatcagatacaagcactggattgtagaacttgttgctgattttgaccttgtattgaagttaactgttccccttggtattaacgtgtcagggctgagtgttctgggatttctctagaggctggcaagaacccagttgtttttgtcttgcgggtctgtcagggttggaaagtccaagccgtaggacccagtttcctttcttagctgatgtctttggccatgaacaccgtgggctgttaacttgccttgagttggaagcggtttgcatttacgcctgtaaatgtattcattcttaatttatgtaaggtttttttttgtacgcaattctcgattctttgaagagatgacaacaaattttggttttctactgttatgtgagaacattaggccccagcaacacgtcattgtgtaaagaaaaaataaaagtgctgccgtaaccctttaattaaaaaaaagaaatttttttacggggggggccctttttagaaaacctttggggggcccaaatttaacgggggcttgcaaggtaaaatttttttccttatggggggggattttaaaacctaggccttggccgggttttaaaaacgccggaatgggaaaatttgctacttgggaatttttggaaggaacctttattttggggggggaacatattgggacaaattccctacgaaattttaaggctttaggggaaataag

SEQ ID NO: 113137 - DNA, 1394 bp, Homo sapiens
  misc_feature (1)...(1394): n = a,t,c or g
gggggcgtacgtcaagatggcggcgtctgtattaaacaccgtgctgaggcggcttcctatgctatctctcttccgaggttctcacagagttcaggttcccctccagactctttgcaccaaagctccctctgaggaagattctttgtcctcagttcccatttctccttataaggatgagccctggaaatatctggaatcagaaggtacctctaaagggggaaagggagggtcagataggatttgagataagtggacagagccacccactacactcccacccaggaataacttgtatgatctttcatttcagaataccaggagcgatatggttctcgccccgtctgggctgactaccgccgcaaccacaagggtggtgtacccccacagcggactcggaagacatgtattgtgagtttctgagagtgggatgtggagtgcggggaggccacaagtaacagtaacagcagcactttttctgacgtgtttgaacatccttaactgctgttttttttctctctacagcgtcggaataaaagttgttggggaatccctgccccatctgtccgaagatcacaaagtttgcaatgttggacttttagggaacgtggaaggtttttgggagcaattttgttttgcggcccacaccggggtaatcatctttttatggttcccntacacagggagtctgttgttgaaggcaggcacaagcgggtttgacccaggcccattccagaaaagccaggggattcatgggtctcctcattttaccacattcccccaggtttgaacccacggggaccttgacttcacgtacctatcatggggctgtgagtgctacttccgccagcccccaccctgtcttcaggtgaccccttgtacccatggttacaactgaaacagccaccggagagagaactgttcttcccttcgcccggctttacccagggtcatctccaaagaagagagtggcccccccaacctgagtcaatgcccaagatgccccctaagaacaccagcggaagcctcctccactgggcaagacaggccctcagagtgctctgtaggaagctgtagactgggaaagagagcccccagccgtggtggctaactccctgtaatccccagcactttgggaagcccaaggtgggctgatcacctttgatccccaggagtttgagacccagccctgggcacccatggtgaaacctcggtctttacccaaaaattccaaaaattagctgggtgtggtggtgcacacctcgtagtctcaacttattggggaggctaaggtaggatcacttgatcccaggaggcggaggttgcagtgagttgcagtcacaccccctgcacttccagcctgggtgaacagctaagaccctgtctcaaaaaaaaaa

SEQ ID NO: 113138 - DNA, 1768 bp, Homo sapiens
tttcgtaggcgacagagctgagccaagcgtttactgggcagctgttacgctcagattccaaatgaaaatgtttgagagcgctgactcttacagccacaagatctggccaggatctctgggctgaaatttgttcctgtctgccaaatcctgaacaagaagatggtgccaacaatgcattctcagactcctttgtggattcttgccctgaaggtgaaggccagagggaggtggctgactttgctgtccagccagctgtaaagccttgggctcccttgcaggattcagaagtgtatttagcatctctagagaagaagctaagaagaatcaaaggtttaaatcaggaagtgacttccaaggacatgcttcgaactctggcccaagccaaggaaggaatgctggggatcggttcctccacgagaaagttagctttcagagtttctttgtgggatgggacttgattctgatgagagcaccttggaacatttcaagaggtggctccagccagataaagtagccgtcagcacagaggaggtccagtatctgattcctccagagtcacaggttgagaagccagtggccgaggacgagccagcagccggggacaagccagcagcagcagaacagtaaattacacacacacacacacacacacacacgccggagcagctgtctcgggtccagagcgagcagcgtggagctcagtgacagcagcagggagaaatccactgaaggaaaaaacccaaatttccactccacaaagaaaacagctgcaagcccccagggacttacctggggctggcatgtgtgaccgtctcggatgaagtgactgacccagtgcacactggatcaaaatgctgctttcctctgtgtctcacagcttggctgagctctgtctctgcaggttagaagtctgctaaagatcaaatgtgaaagtacttggagaaactgaggcctcttatgtgtaatgtgtaagttaagtgagccatatattttcttgcctctttccggacattcatgcttgtgtcccaagcattcccttggtgaattgtcacgtgagtggggcccagtaaagagtgaagtctgctccttgaatccccaaaccccatctggggcttctcttaacaaatctgtagtaagtatacggactcccagggagagaggctgggcttctctctctcatttgttccttgtggaacaaatgggcaaaaagaagtgtgaaaatgtgggtgtttatgtctgtgtatatgtattttttacttcatgcatggcttctcctccaacttcctcctgcacttaaaaagggcccaggttccaaaattagacttgtaaatatggtgttagtgtttgacactactcctggatagttccaaacatcttccttgtggcaggtttcctggctgagcccgagcttccctccctgtttattatgttcatgatcagtatgtgtttccatataaaactttttctcaatggaatagcagtgtctgtggtgctgttgactcgattgctcctggaaggatgttcccaggcagcaggaggtaaagacaaatgcatgcaaaggcatgggatctggccactttgccagcctcctgttattagcatgtgccctcagacagtccagactttggtgttctgaggccttagctccatgggccttcttcctgggtaatagtttacaaatccctaaagatcagtagggtggctgtaaaaatcttccgatcgagagaggagctaaaagaaaaaatagaataaataaatcttctgaaaa

SEQ ID NO: 113139 - DNA, 573 bp, Homo sapiens
aacaagttccacaataactgttaccggtgagtgctccctgctgggctgaggctgcccccttcctgcactctctgcagcctgatctcagctccagtgcagccatgggcccacgaggcctcctttcccctcatgatcttgaggttctgggaatactggttcctggataaaagttgttggagaatgaggagagaggtttaggcaggagagagaagagagatagggacagtgatgtccccaggggtctgtgaggactcaggcagctcaggctcctttaaaaatgccccagaacagaccagaaaaggagttgggggccagggttcagttgctttcacgccgtaatcccagcactttgagaggccaaggcgggaggatcacttgagccccaggaattcaagacaagcctgggcagcatagtgagaccccatctttctttataaaacatagaaaagaaaattagctgggtgtggtggcacacacctgtagtcccagctacttaggaggctgaggtgggaggattgcttgagaccaagaggtcaaggctacagttagctgtgatagcgccattgcactcca

SEQ ID NO: 113140 - DNA, 1818 bp, Homo sapiens
  misc_feature (1)...(1818): n = a,t,c or g
ggcacgagggtccgggggtttgtgggagctgccttgacctgcagctccgtcaccgcggacccgccttctggccctcagcagcagaacgctctgtcccgcccgggncagctctgcgaggcagcggctggaggagggaaccatggggactgtgtcacgcccggagtttggagcctcttccatcaagtggacctgattttggaggattaggagaagaagctggaatttgttgaagttgagcctgaagctaaacagggaaattcttggaaaacaaaggatgtggttgttcaacatgttcattttgatggacttggaaggactaaagatgatatcatcatttgtgaaattggagatgttttcaaggccaaaaacctaatttgaggtaatgcggggaaatctccatgaagcccctggaaaaattgctcccgtctttggaatttttagaccagtggatgtttttgattgacacatgtccaagtgatgacgcacttccaaatgggttagacgttacctttgaagtaactgaattgaggagattaacgggcagttataacaccatggttggaaacaattgaaggcagtatggtacttggcctcaagcttcctaatcttcttggtcgtgcagaaaaggtgacctttcagttttcctatggaacaaaagaaacttccgtatggcctgtcctttcttcaaacccacgggcccgggaaaccttcgaaagaaaattttctctggtaaaccttatataaagtttacctggacagttccctttggaggctcacttccggggagacggacagaaggaatgtcagctgagtacagttttccccatattgaagaccagccacacttgtcaagtggggaaggtcgtatggcgagaactgggctgcctctcaaggacggcgtcatttgctgttcgaaaagaaagcggacattcacctgaaatcatctctttcgcatgccatggtcatcggattctcgggaattctttccatctttaccaagggagaggtgcctttgcctgaaagttaacccaggaacttggcaaggctacacttggccggggatgtgagcttcatcaaagaagatttttgaacttcagttgaaccaggcaactcatattttggatttcaggtttttttcaagcggtctttcttgggggcgggaaatgttgggtacccatttggttgataaagcccgtcaagcatttgctggataaggttttaccttgggggacccacaagcgtccgcgtgattcagcatgcacagcatcggggccacaagagcggaaggagacttaccttaggtggagaaagcgtaacttgggccggcggcctgcaacctcctaaaaccccatttaccttttccggcccaggccgaggggtggctttggagaaactttttccgaaacacacttcctttcctcaacgcaggaaaacctttttgcaaaccttcaacttatggggagggccccccaaagctcactatatcgtaaagcttggcttgaagttcatccgcttggtccgtacggggcccgggatttgtcctcaaggcttggcaacatcgcctccggttggaactttaatttacttgcggtccccatgggagtacagacaggtgacaggatatgtgatggcgtccagtttgggagttgggataaggttcctgtagccgacacccctacaggagaagctctgggactggggcagcagcaaggcgcccatgccacacaccgtctctcgaggaaacgcggttcagcgattctttgactgcggaccctgtgggaaaccccgttcaataaatgttaaagacacacaaaaaaa

SEQ ID NO: 113141 - DNA, 1387 bp, Homo sapiens
aattaatagtcctaagatgatcctgaagagttaattaatagactaagattatctgtggtctatttattgaccacaccttataaacaggataggtttttcctattttgagactttacatgtctcagtactttctaaattgaaatcagagcattaaatcaagggaattgatgtggacaaaaccagctgccagcatgatagtgtttgtgaattatgtacctctcttaggacataaactcttaggacataaactcataaaattctgttcagaacactgaacagattttagatttacccatagccaataaaatttggatttagggggggggtaagtctcagcattttcatggaatcctggagatgcccaaatctctggaaacttcctatttcctgttttactatctttttccttttatcaaaatgggtgccatgagggtcccagaccaaaactcaccatcctggaaaaacaaaagtctggggagagaactcctgttttattttcagatgatatatttgcctaatcatagaataagttcagatcataattataaataggatttctctgaagcaatcaatctgtatttttaaagcttctccttcagacctccagtatctagtcatcggaagtaacttgggtttatttattgagacaaaggtcttgctctctcacccaggctggagtgcagtgacacaatcacggttcactgcagcctcgacctcctgggctcaagcaatcctctggcttcaccttcccaagtgtctaggactacaggtacgtgtcaccatggctggctaatttttaaaatttttgtagagactgggtcttactatgttgcgtaggctgggcatggatttattaatggcttttgaattaactaaataattaatgaacatgggcttaatctctaagtatgcaaatctctaaatgggatatacttgtgatcttcaacttggccttggatatctgtgtgactgatttaacctttgactcagtcttttgcagtgccaaagtcattgttgatgaataatttcatttcttgtggatcctatggttgctactaactcttaggaaaatagtaggctctggagaaggagtaaaaaccctacaaatatgtaaagccaggaaggaaaaggagaagcaaggatgttaaatcaatctgagttggaggaacagatctctgtttttctctgaagcgttgtcacacaatctcatgtgctcactgcttcaggccaagggtgtgtcagcaaggctttcttgcactgcaccagggacactgacctgaaaccctggattttacctagatcatgagaggtcttagaaaccttttaggccaacctacttatttaacaagtaaggaacctgatggccagagtttaaaagactcatccc

SEQ ID NO: 113142 - DNA, 500 bp, Homo sapiens
ctttttcaactgtaaatttatgaaatctaaatcaatgaaatatttttgatgaaaatttagtgtccaaattaagatgtgctgttgtttcaaattcaagcctaggttttgaaagaccttagtatgaaaacaaagaatataaaatacttcactgatatgttcatattgatgttttggatgcatggggttaagtaaaatatattattaggctgggtgcagtggctcacgcctgtaatcccagctctttgggagccaaggcgggctgatcctttgagccccaggagtttcagaccagcctggtatcatggtgaaatccgtctctaaaaacaaataggaaaattagccggggcttggtagtgttgcaccccttagtccccagcttactccggggaggctgcagtgggagaatcacttgagcctgggaggtcaagggctacggtaagccttgtgatcacgccactatattccagcctgcgagacaaagtgagaccctgttgcacaaa

SEQ ID NO: 113143 - DNA, 3105 bp, Homo sapiens
  misc_feature (1)...(3105): n = a,t,c or g
cggacttctcgtcctgggacactgtttactggagtctggccggctctccgtgctcctcttggtacctcattttggggagaaccttaaacccactcgagcagataatctccgccttgaccggtgccaccaaagaagccttggaaccaccttttatcggtggggaagtgcagtcgcggtgggcggctctgggggccagcgaaacgggaggccatctaaatctttaggtggggcccttttggggcccaaccttttggggncccccccncctgagaagccgcactcttgagtccgaggccatcttttgttggagaaggcgtcggcgttggcgttttcccgaggttgggctgtacagtgtctccgtccgcggaaaaagaagcctcttgaacccgcgccggccccgcagcccccgtgcccttccggccgctgctcgccgtcgcccagaggctaaggccaacgttttcccccagttgccgaggtgtttctgtgacccctccctccactcccatttcccttctgaaaaggcacctgctcttggttgagaaaaaaattatagcacgaagagccagtatcagaagagtatccatcacccgcagcaaccgctcagggaacaccatcaaaaaagaaaaaaagggaatatctggatttcctgggcgaggaggagcgagtctgctcgggagctgttccagcagagcgattttttaaatactgctttctacggcctatacaaacttggcttcacaaaacctttacactaactcttatatgatttttaaaaactggtctgatcggacttctcgtcctgggacactgtttactggagtctggccaggctctccgtgctccgtcttggtacctcattttggggagaaccttaaacccactcgagcagataatctccgccgttggaccggtgccaccaaagaagccttggaaccatgtgggacttttctgggcattgccacctttcaccctatttttataagaagttcgggggacttcatcactttgggccaacagggaggtcctggttggtgcgtgctgggtgttcctctcgctggggccgggggcttctcctaccgctgtcgccaccagaaacgggggtctcctcgggcgccagcagagcggctcccagttcagccctcttctcggatattctctcaggcctgcctttcattggcttcttctgggccaaatcccccccttgaatcagaaaataaggagcagctccgaggccaggaggcgcagaaaaggaaccaatatttcagaaacaagcttaataggaacagctgcctggtacatcaacatcttctcagaatgacccagaagttatcatcgtgggagctggcgtgcttggctctgctttgggcagctgtgcttttccagagatggaagaaaggtgacagtcattgagagagactttaaaagagcctgacagaattagttgggagaattcctgcagccgggtggttattcagtttctcaaagaccttggtcttggagatacagtggaaggtcttgatgcccaggttgtaaatggttacatgattcatgatcaggaaagcaaatcagaggttcagattccttaccctctgttcagaaaacaatcaagtgcagagtgggaggagctttccctcacgggaaggttcatcatggagtctcccggaaagcagctatgggcagagcccaatgcaaagtttattccaaggtgttgtgtttacagttattagaggaagatgatgttgtgatgggagttcagtacaaggataaagagactggagatatcaaggaactccatgctccacatgactgttgttgcagatgggcttttctccaagttcaggaaaaggcttggtctccaataaagtttctgtatcatctcattttgttggctttcttatgaagaatgcaccacagtttaaagcaaatcatgcctgaacttattttaggctaaccccgagtccagttctcatctaccaggattttcatccagtggaaactcgagtacttgttggacattagaggagaaattgccaaggggattttaaagagaattacatgggttgaaaaaaattttaccccacaaaataccctggattcacctggaaaagaaccattcttagaaggcccacttggcaattcctcactctgaggtccatgccagcaaagacttccttcctcctcttcatcagtgaagaaaacgaggtgttcttcttttgggagacgcatataatatgaggcatccacttactggtggaggaatgactgttgcttttaaagatataaaactatgggagaaaactgctaaaagggtatccctgacctttatgatgatgcagctatttttcgaggccaaaaaattcatttttactgtgcatagaaaaacattctcattccttttgtcgtgaatatccttggctcaggctctttatgaattaatttcttgcaacagatgatttccctgcatcacctaagaaaaaccctgttttttttatttcaaacttgggtggcgaatgtgttgcgggtcctgttgggctgctttctggtattgtctcctaaccctctaagttttaattgggacacttctttgcctgttgcaatctatgcccgtgtattttgcctttaagtcagaaccttggattacaaaaccctcgcgccctcctcagtagtggtgctgtattgtacaaaggcgtgtcctgtaatatttccctctaatttactccagaaatggaagtatagggtcccattaagccttaaagggggaacccatttgtgaaatgaatattgggaaccttacccaagtccctaagagacttttggaagaggatatatatagcactagtacccatacccacttataaaagtggaaactccttggacccaagatttggattaatttgtttttgaagttttttgtatataaatatgtaaatacatgctttaatttgcaatttaaaatgaaggggttaaataagttagacatttaaaagaaatgattgttaccataaattagtgctaatgctgaggagaactacagtttttcttttgaatttagtatttgagatgagttgttgggacatgcaaataaaatgaagaatgaaaaaaaaa

SEQ ID NO: 113144 - DNA, 364 bp, Homo sapiens
tgtttatccagctcataatggattacaaacctaaatttcaacttaactataaaccttctagaagaaaacaaagcagaaaatttttgcaactgtaggttaggcagaagatttcttaggtggacactaaataacacaattcataagagaaaaaaattggtaaattggacttcaacaaaatttcaaaactactgctcatagaaagactgttaagagaatgaaaaggtaaaccatagattgggagaaaatacttgcaatttgtagatctgatagagaacttgtatccaggaatacatcaagaactctgaaaattcagtaataagaaaacaggccaggtatggtgcgtcatgcctattatcccagcagg

SEQ ID NO: 113145 - DNA, 717 bp, Homo sapiens
  misc_feature (1)...(717): n = a,t,c or g
caaaattgcaggggttcacggcctgcactcattcccatgaatgcagttaatagccacagaaatgtcacattaagcaaagcagccagggtctcatcgtgttgagactcgagtctctcagaccttggattcattccctggtgtctttgagcctcagtttcctcattggtaaaagagaagtgaagcagtgtctcacagggtcattacagagattaaatgaaataaatgaaataacatagaccaggagggcgtggtgtttaaaagtcacagatggggcaccctcgggccatccagcccagtgttttctttagcccctatgatgttcattttttgttatatcccattaggtgcccatatttaaaaattgggagatttcacataaaattaaaaggtctgcattttcttttttcttttcnnnnnnnnnnnnggaaacacagtctccttttgcccccaggttaaagggcaggggcccaatttaagttaattgaacccttggcctccagggtaaaagaaattccccgccctcacccccccaagaggtgggaataacgggcgcgtgcccccacccccagttatttttggttttttaaccaaaaagggggttcccccacttggcccgggaggatctcaatctcaccctgggaannnnnnnnnntgggcctccaaaagcgtgggaataacaggggggaccccccgccccaacccagggtctgttttttt

SEQ ID NO: 113146 - DNA, 539 bp, Homo sapiens
ttgagacagactctcgctctgtcacccaggctggaatgcagtggtgcagtcttggctcactgcgcctccccaggaaggtgaagctcctggtgagctcagctcacctccacctccccaggaagcccttcttgataccctccacaagtaggcatggatcctccctcccctaacctcctcctttacggatcccaactagatagagggtatgttgtgaattatcaccatgcctcatccccacccccccatcactgcccacctgacacacacatgcatgcaccagcctctgctccataaaatcaataccaccagtggtgtccagggagcgacacgggtctgtccacgccaccccttactgatatataaaatgagagatccctgtcttgcttcccactccacaggttcaagggcagcagaaacgatgctggaaagggatgcaactgggcagtgcagggaagggacatgcaggagctgaagagaaaaggctgtgctttttaatcctgcgcgcttgtcacacacgggaaagaacaggccccacgcgt

SEQ ID NO: 113147 - DNA, 535 bp, Homo sapiens
ttttttttttttttatttatttatttatttatttattttttagatggagtctcgctctgtcacctaggctggagtgcagtggtgtgatctgagctcactacaacctcctcttcccgggttcaagcgattctcttgactcagctgggattacaggcgtgcaccaccacgcccggctgtttttttattttttatttttagtagagacagggtttcgccatgttggccaggctgagacaagagaatcgtttgaacctgggaggtagaggctgcggtgagcagagatggtgtcactgcactccagcttgggcaacagagtgagactctgtctcaaaacaaacaaacaaacaaacaaacaaacaaacaagcatggtagggaatgactcccagagtaggtgatattgaagttgagaactgaaggaaaaataggattttaaagatctgaactgatttgaagtacttagggtatttattgtacatcctatataatccctccatactcctaaagaaacctgttttattaaggaagggagaatag

SEQ ID NO: 113148 - DNA, 372 bp, Homo sapiens
ataataggctatgtgtacaccaggaagaatgaactttactaggtaaaactgattcttcctgcagttggtaaggaggctgaagactgcgactgaagccccatctcccagtgctgcagcctcctcctgggcctccctgcctctactttctccaccaccctagagctcgtcctccacagcggcaagagtgatccttcaaaatgtcaatcatgtcaagccactgtgctgacaaggctctccattccaacaaaagaaaacccagacaccttcccagggcttacggtctcaacacctcctgcccacgcccccccgaaggtcccacctcccgccttcctctctgctcctgtccctacccactctttgctacaataaaag

SEQ ID NO: 113149 - DNA, 1350 bp, Homo sapiens
  misc_feature (1)...(1350): n = a,t,c or g
cggtgattcactccctccttcgccccggggcccccttcccggccagacggcgggcaagacagctgggtgtacacgcgtgcctcgaaactctcgagcaagtgagcagatcctccgaggcaccagggactccagcccatgccatggcggattctgagcgcctctcggctcctggctgctgggccgcctgcaccaacttctcgcgcactcgaaagggaatcctccgtgtttgctgagattatattatgcctggtgatcctgatctgcttcagtgcctccaacacccaggctactcctcccatgtcggtgattgagaatgatccttgctgctattttcatttgtggtctacatgtgtgaccttgcacaccaagataccattccatcaactgggccctgggagtgtatttcttccgaacccttgatagcgggcaaatcctctacctgatcacctccaattgttgtcctttgttgagagaggaaaccacctccaaaatcgtcgcaggggtactgggcctaaatcgcaacggggcctcctttggctaatgaatgcctatgttcacctttccccgtttcggcagcaaagaaattacagcagcccccaactgacccccgcagaatggccccggtgtaaggcgaaacttcccctcaatttctctctgcaaatctgcaaataacctccctcccatggaaaataactccctccccaacccccaacaacaacattccccagcagacccaactccccacccccctctttgagggtaaaaggtgcctttagttgggaggactttttgtcttcccagccctgccaaaatccaaccctcccctgggtngtgggccaccccatatgtgtgtgccctaggtcctccttctgcacgattccaataggagacacccagttcttgactggaaccatgcccccacctaaagtcacaaaattgaagggaagttgggggagttagattttcagaagtccaggcccctagggttgggacccatctccaaataatctcctcggtgtgggtggtggttctatagagggataaatgaataataaacattgttaaaatataccgataatgaataaagtaatcctttcatcaaatgtgggtaaatttcaagcatcaggagggggaaatggagtggaaacagctgggggcaaggaggcaaagaagccaggcctgttttacaacaaatattaaattacttcaataatacaaacgaaaggcccggggcgggggctcatgcctgtaatcccagtcctttgggaggctgggggaggattgcttgagcccaggagttttaaaccagcctgggcaacatggcaaaaccccatttttaccaaaaaatta

SEQ ID NO: 113150 - DNA, 639 bp, Homo sapiens
tgggcaagttacaaataacttaagccgtttccccttcggtttggaatctgagtttaatctatttatttcctgagacagcgtctctctctgtcgcccaggctggactgtaatggtgcgatcacaggacactgcagtctccacctcccaggttcaagtgatcctcccagcttagcctcccaagcagctgggactacaggtgtgcaccaccatgcccagttaattatgtttttgtagagatagggtcttgctatgttgcccaggctggtctcaaactcctggggctgataagatcatcctgcctcggccttccaaaatgctggggattacaggtgcgagtcccgtacctgggccctgagttattttttgacaacgtatctgtcccatgggtgcttgacctgagcttgagcgcttaacctggggcccgatgccagcttgggacttagcagcagcagcatcccttgctggactcaccctgctaggacagctctccaacttgccagctgagaggtgagagcaaggctccataagcctccttggttccatgagagcactggcataaggggggggcacgtggcattgagccaggcccaaggtgaggatgacaagtcccgacccttgaactcagaaccgaattctgcg

SEQ ID NO: 113151 - DNA, 1752 bp, Homo sapiens
  misc_feature (1)...(1752): n = a,t,c or g
tttttggttaaagagccccatttaaattgtttaaatgaaataaatacatccaaagtaaatgcacggtgaaaaatacattttaaggccaaaagttttgaatattggcacttagaaagttatttacaatcaattttactataccctttgtgaataaagagataattatgtacgtgtagctacctatagttgtttctttccaactcaaacaccataactatgtggaaaaagggtaagagttaaagctgctgcagctcaaaatcattacaatcaacttagattctgcaaattttcccaggggtggaaaaatgctgggttaaatcaggacaaaagaggagggcaagtgaggtacaccccactcctctcccattttacggtgtttgctcccttactttaacccgggcaaaggacctgcaccctgaatttcttagggacaatttccatatacaacaggcctcttattatgggtccatagccagatggtttagggtagatgttttaaagatatcaatgctaatggccctacccaatgactttccatgacctccccaatattccgttttaaatggtagtcaagagactatcaagcaggaagcctgatctcgacatgtttcctctgcggctttggtgaagctgactatctgcagtataaaatcttatggtttgatcgaagtctcatttttgactagaaacagtaaagagcagctttattaagatcaatggaatggttctgaatgcctgtttgctacagaaggattaaattaaaattttttcttttttttcttttttgagacagtctgtactctatcacgcaggctggagtgcagtggccagtgctcggcttactgcaatctccacctcccgagttcaagcaattctcctgcctcagcctccccgagtagcctgggattacaggcatgcacccataacaccccaactaatttttgtataatttagtagagacagggtttccatcatgttgggccnaggctggtcctgaactccctgacctcaagtgatcccatcccactcaggccttccaaaagtgccgggattacaggcatgagccacccgaaccgtggcctaagatgaaaagtttttaaaagcctggggctaataaaatcatccaccaatcatttttcttatggggtaaagcagccaaaaagctgtcacagcatttttgagatgagaacataaggcttgtgtgggctttatgatagatgctgttagtcattttatttgattaagcccttggtcagtcatctataccttaattaatattttgttcttatagaaaaatacaatccattttatgagtttctagaaataaataatggagaaaaatagatactacctgttcctaatggtctctctggaaattacagcttttgcctaggaagatacacatatagaatataatttaagttcaaaatatatttcattatattctatccctcttannnnnnnnnnnnnnnnnnnnnnnnnnnnnnnnnnnnnnnnnnnnnnnnnnnnnnnnnnnnnnncattatacagttcttacacaattgttggagcttgctgaacactctgtgtaaggctgttgcttctgtgtttggaggtggggccttaagtcagcagcgcaggcagtctgttcctaatggtctctctggaaattacagcttttgcctaggacgatacacatatagaatataatttaagttcaaatatatttcttatattctatcctcgtgccgaattcttgcctcgaggccaatt

SEQ ID NO: 113152 - DNA, 855 bp, Homo sapiens
tcatactcgatctaaagacttccatgtttagaactgttcatttatgctttcaatataattcagagattataccctttatagtcacatgtattaatcttttccttgtgcttttttggttttcatttttatatttcaatactgctacaattattagtgctattcatgaaatattttcagttctcttctcaggtacaaagttgaactgtacacccttggccctttgaaagataagtgtgtccaagtgattgaccatgtgatcttaaccaatggaatatgaataaaaaggatctgttgctttcagagaacaagtttaagagccaacatggcaattccccagtctctcttttccatctgcccaaggagactggcaatcttctagagagtagagataatcactgggatagaaaacctactatcccacccaacaatgtatgtgtagcataactactaaacatttttttaagggacagggtcctcactatgttgcccaggctagagtacagtggctatgcacagacgtgatcatcaccactacagcctggaactcctgggctcaagcaatcctcctgtctcagcctcctgagtagttggtagtacaggtgcacacaaccacactcagctaagccactgaaatttagggttgttactgcagcaaaacatagcttatccaggactaatatgattctgagagttgtttagtttggtaagtagtgtgtaaatggatctatataaatcattttcattgtattttggagctggttataactagtatatggttttactactaatgttcacagatttatcttatatccagccacaatgttaaaatatcatctctgattttagatacctttg

SEQ ID NO: 113153 - DNA, 768 bp, Homo sapiens
  misc_feature (1)...(768): n = a,t,c or g
agaaccaagaggcactaaggtggcagtgtgggcagctgcccacacggcaagtgccctgtgtggggccacagctccaggtgagctcctttgctggctgtcacgtagcctgcccataccagacccaacttcccaccactgaattagttctagggatcgttcctgatattgaccggagaagatgggagcctggtttgagggcagggaggaaggagggagtagggctagttttcaatggcttttacccttaagggctaacgaatcagataaacttgttgttgttttgggagataccctgtttagcctgaaaggattgagatactgtaattgctatgggggaggggatggatagaaggaaggaggatttgaaggtggggaggggtcctcggttgaccacctaagaatggtgatagtggtttcggggcggtgaactggactttggctttggctttggctgggttggtcaggtgttgttttaagccctgggaagctgctccaaggtgcaaggttgatggttgatgcctatttaaagaagttctccaaaaagtaaaaacaaaacaaaactcttaaaaaggctacattaggctgggtgtgatggctcacacctgtcatctcagcactttggggaagctggaggtgggtggatttgctttgagctcaggagttaggagaccagcctggggccaaaaaaaagaccccccgcccccacagctctaccaaaaatacnnnnnnnnnnnnnnnnngtttttttattaaggcgcccgaagtttt

SEQ ID NO: 113154 - DNA, 786 bp, Homo sapiens
cgaattcggcacgagcaaccccttttcccacttttctggaaggtaagaaccccccaccccttctccgtgtctctactcttctctgggcttgcctccttcactatgggtaagcttccaccttccattcctccttcttctcccttggcctgtgttctcaaaaacttaaaacctcttcaactcacacctgacctaaaatctaaatgacttattttcttctgcaatgccgcttgaccccaatacaaactcgacagtagttccaaatagccagaaaatggcactttgaatttttccatcctgcaagatctaaataattcttgttgtaaaataggcaaacggtctgaggtgcctgacgtccaggcattcttttacacatcagtcccttcctagtctctgtgcccagtgcaactcgtcccaaatcttccttctttccctcccgcctgtcccctcagtcccagccccaagcatcgctgagtctttctaatcttccttttctacagacccatctgacctctcccctcctcgccaggctgctcctctccaggccgagctaggtcccaattcttcctcagcctcggctcctccaccctataatccttttatcacctcccctcctcacacccggtctggcttacagtttcattccgcttctagccctctcccacctgcccagcaatctcctcttaaaaaggtgtctggagctaaaggcatagtcaaggataatgctcctttttctttatccaacttctcccaaatcagttagtgtttacactgtttttcatcaaatat

SEQ ID NO: 113155 - DNA, 684 bp, Homo sapiens
taaactttcatgctttggctccctccaacacacattacaataatgggaaccatgtggaaatgagggcagatccatgaggtgtaaggaccctgggtccctgaatcaccaatcgatggcgtgatgtctgctggtcaggaaaacctcctctgaacaaggaatgaacattggtttactgtaaaattttcaaataatgcaatattctttcccatggttcagtctacattttgagaggtctcttctttaagtctttaatgtgtattattttaaacattttcccatgctttagtgtatgtctctatatatattctcacacatacacatatctataggtttttaagtgaatgagaaagcacagtatcaatatactttgtttcctcacttcacattttgtgaaaattttgcttatggtaatattagtttatatgttaactgtacattaatatctaattagatgttaatatactagtaaaacttatttatattaagagttgcatatttcattgtatatatttgcaatgttttatttaataacctcactattgatattaggttatttatcaatttacaagtattgcttctgcttaaaatatatgtacatgtatatatttatgcatatgggaatatttctgtaggatatgttcttagaattgaaattgctgcatcaaaaggtatgcacattttatt

SEQ ID NO: 113156 - DNA, 3350 bp, Homo sapiens
gcggccgccgctgcaccttcaccgcgtacccgggacctctctcgcccgcgggagaaatgttgctgaagtgctgctgaaagggccagagatgcaaggatttgggatacattttgaacctttaagctgtctgacattgacctcctttcattattaataaagaagaatcaggagcttaggatgtattaacaccaactcattaatatactaaccggacaatgttctacaaacaattctacattgtaaaggactggattggcacaaaataaaataattttattttattcagcttataatatgactcgatggaggaaaatttgataagcatgagagaagaccattcttttcatgttcgttacagaatggaagcttcttgcctagagctggccttggaaggggaacgtctatgtaaatcaggagactgccgcgctggcgtgtcattctttgaagctgcagttcaagttggaactgaagacctaaaaacacttagcgctatttacagccagttgggcaatgcttatttctatttgcatgattatgccaaagcattagaatatcaccatcatgatttaacccttgcaaggactattggagaccagctgggggaagcgaaagctagtggtaatctgggaaacaccttaaaagttcttgggaattttgacgaagccatagtttgttgtcagcgacacctagatatttccagagagcttaatgacaaggtgggagaagcaagagcactttacaatcttgggaatgtgtatcatgccaaagggaaaagttttggttgccctggtccccaggatgtaggagaatttccagaagaagtgagagatgctctgcaggcagccgtggatttttatgaggaaaacctatcattagtgactgctttgggtgaccgagcggcacaaggacgtgcctttggaaatcttggaaacacacattacctccttggcaacttcagggatgcagttatagctcatgagcagcgtctccttattgcaaaagaatttggagataaagcagctgaaagaagagcatatagcaaccttggaaatgcatatatatttcttggtgaatttgaaactgcctcggaatactacaagaagacactactgttggcccgacagcttaaagaccgagctgtagaagcacagtcttgttacagtcttggaaatacatatactttacttcaagactatgaaaaggccattgattatcatctgaagcacttagcaattgctcaagagctgaatgatagaattggtgaaggaagagcatgttggagcttagggaaatgcatacacagcactaggaaatcatgatcaagcaatgcattttgctgaaaagcacttggaaatttcaagagaggttggggataaaagtggtgaactaacagcacgacttaatctctcagaccttcaaatggttcttggtctgagctacagcacaaataactccataatgtctgaaaatactgaaattgatagcagtttgaatggtgtactccccaagttgggacgccggcatagtatggaaaatatggaacttatgaagttaacaccagaaaaggtacagaactggaacagtgaaattcttgctaagcaaaaacctcttattgccaaaccttctgcaaagctactctttgtcaacagactgaaggggaaaaaatacaaaaccgaattcctccactaaagttctccaagatgccagtaattctattgaccaccgaattccaaattctcagaggaaaatcaagggcagatactattggagatgaagggttctttgacttattaagccgatttcaaagcaataggatggatgatcagagatgttgcttacaagaaaaggaactgccatacagctttcaacaacaacttcttccactcccccttaaaatgatgctaaaaacatcatctgttcctgtggggatcccccaacacggatgagtttttagatcttcttgccagctcacagagtcgccgtctggatgaccagagggctagtttcagtaattttgccagggcttcggtctaacacaagacagccagtcgggtacttagccacctggatgactaatgacaacaaagaggctgatgaagatttctttgacatccttgtaaaatgtcaaggatccagaattagatgatcaaagatgtgctccaccgcctggctaccccaaaggggtccgacaggtacaagatgaagactttttcagcccttatttttcggttcccaggaaaagagaatggatgaacagagagttcttttacaaaggagatcaaaccagagactctgactttgggctaaaggactttttgcaaaataatgctttgttggagtgttaaaattcaggaaaaaaatcggccggccattaggtactagggatttaatttttttccctttcaaacacggtaaggaaacaatctattacttttttccttaaaaggagaatttatagcactgtaatacagcttaaaatatttttagaatgatggtaaatagtttaacctttcccatagtctattaaggcattaatacttctcttggacatgcggcgtttgagggtggagggggtcctgtaagagtcttccatcgttttgtgattactgccttgggatgtgttctttggcagcttgtgagattactttacctagtgtttataaagtaggaagttaagtgaatcatagattagaatttaatactcttatggaaataattttttaacattttaattgccaatggcggttttttatacataaccatggatgtagtgggaacacaatgttgtttggtaaaaataatgtactataaacaatgtacaaaagtatataaaatagtcttactaaaaatctaggtttttttttcctccatgaaaatctgtttttttaggccaaagtcagtataaaagaaactctacttcttgggctgggcatggtggctcattcctgtaatcccagcacattgggaggctgaggcaggaggatcgcttgaggctaggagttcaagaccaacctgggcaacatagacccccgtgtctatgaaaaataaatcagcagccaggcgcagtggctcacacctgtaatcccagcactttgggaggccgaagcgggcggatcacttgaggtcgggagtttgagaccagcctggccaacatagtgaaaccctgtctctactaaaaatacaaaaattagctgggcatggtggcatgcgcctgtagtttcagctacttgggaggctgaggcaggagaatcacttgaacccctgggaggcagagattgcagtgagctgagaccaagccactggactccagcctgagtgacagagcaagactctgtctcaaaaaaaaaaaa

SEQ ID NO: 113157 - DNA, 1003 bp, Homo sapiens
tagtgcagtaactttaaatgtagatagttcaaacattcttagcacctcaatctagtatgtttaattaaaatttgtataaatgtaaattagtgtaagagggtaaaataataatcaagttatttttcaaaagattgcaataagtttttggtctaaacttaaactttgttcattttgtacatactctgtgttaattctaattgcacctttgtgatgtgtatttatatacagtgtgcagaaaatgttcgtgaaattttgattacaattgtagattatgtatgatggcattgcttacgaatgttttgcttgtaaaaaaatttcaaggtgcaatcaaatgctactagtttttctgattttcaaaaatctatctatctaaaatattaagcccttttccttcctgtgtagtacttactaaataactttttgtattcaggcatttgcatcaaattgctgaacaagatgaatagcccacattaattcaatgattttaaaagactatttggggagggttgggtatataattttttagctctatttacatcccaaagtagaaagattaaatttatatttactagagctattcaaagaatacacttttctatattgtaaaaacaggacagcaaagtaaatcatacagaaaataaacatttatactattctgtaaaaaaggttttgcattttttctttagtataataacaccactttattaaccatttaatatgcaaaaaaccttttaaattatctgaagtaaatttgacattacttctgaaaacacacaactaaaaaattctatcattttgctcagttattactaacataaattgctttgaaatgagaatatgtcttctttttttccccactgtttcttttaagagcagaaactcagccgggcatggtggctcacgcctgtaattccagcactttgggaggtcaaggcgggtgaatcacttgagtccaggagttctagaccagcccaggctacatggtgaaaccctgtctctacca

SEQ ID NO: 113158 - DNA, 1112 bp, Homo sapiens
  misc_feature (1)...(1112): n = a,t,c or g
cggcaaatggcaaagctggcattcaaacgcaatctgacagcgctctttacagctgcttcccaggagtaggacccagatattctagcaaccagttctccttttacttcatcatgcctgttttttaaaacataccctccgtgggatatgtactgtctaaatcatgagtgccagcagatttcacttttagggtgggcatcctttaatttgttatcagaatagggttgccatatttagcaaatacagaacctacttaacactacaaaaaaaatccttgtttatctgaaattcagaattaactgtgtgttccatgaacagatttgataacataaggattataatttgatccaataagttggaataaactgaatgaattaaactgtttcaagaaacagttgatttgtgncttcaactaaggatcaatgtactcatctttagtcaaactttgttgttgttttagtgagattttaattatatgtttcgtttttagattcatccccaccgggaaaaatgtttattctttcagatggagaaggaaaaattgggaaccatccgagttgatgggaaccccttgatagaaggaatcctctggaacttgtggaagttggttggaagcagtaaaccccaaaggccaccatcattgtgtacatctttatggtccagttttaaaggaaggttagccatccttttggattctttgggacttttacaatgaagctgtgaaaattatccatgacttccctcagttttatcctttagggattgtgcaacatgaatggatcttgatggattttcatacgattgtaaatgagcctatattaaagtctaataaagggaggcctttcttggtttgagggagagatttctgtgctttctcatatttaatttgctgtttttaagatattccaacctagagtttttgatggaactgatatattgacagttctcaccgaagtccttttataaagaattgctactccaatatatggtcagattagatgcaagaataaagcagttgtccgagtcataagtttctattttattaataaaaactaaaatggtacgtactatcggtcatttcattttcattcttttaatcatgtattcaagcacaa

SEQ ID NO: 113159 - DNA, 2579 bp, Homo sapiens
tttttttttgcctgctgctatatctgaggttgtacttttgttctgatctttgtaacacctcaaaaaaaaaaaatgggttaagagaaggatgaacagaagaatggatatgagacctatctgataaggcaagcagattaatagacgaatggaggaatgtttggatgtatatgtatatgtgttcattgcagttttcaactttttgtgttgaaatttttataaaaagaagttggagaaataaaaaacaagaaaacagaaccataagatttttatttaacatttttgattaaaggaattgtattgcaaattatgactttttaattttgccaacatccttttaatggtgttctttctttgtccttctctttctcttcctctctctctccctctcttccctaaagctccattccgacttagacaagggagagggcactgcgaaatacaccctctcaggagatggcgctgggcccggtttttaccattgatgaaaccacaggggacattcactgcaataagggagcctacgatagagaagaaaaacctttctacactcttcggtgctcaggcttgtggacatagaaaccagaaagccacctggagcctgaatcagaattccatcatccaaagtgcaggatatttaatgataatgagccaaagttttggggatgggaccttatggttgctactggtccccagaaatggtcccctgtggggtgagtagggcaaatcaaaattctgtgagatacaatgagacctcttcaacattgactttttgcaggttgatgtaaacatcttattctatcatctaaaagaattatttttcaattctagaaaatacagttcttttcatttatttttgtaacttttttgtttttctttctgcttcattatgaagataactacaggaatatataacattagttcctgttttccaccctgtgaatttacctgaattcatagaatccttgcgtgctttaagcaaaaaatgtattatgtatagaaaatgattcttatctcaattccagacacatatacagtgctggagacacctaccttacaccacgaaatgccagacagtaattcctagatcaaagtaaatgatctaaagcatgcatcacatctgatctggaagtggtccagaaacaggtgtgttgcatcttctgtagctgtaaatagagattctggaagggtgatactgtttccttttcagggtaaataacccatacttgttattgccatcaagccaagcagcaaatgaataatgtcatgaaaatattattagaacaaattaacaaattacaattacaattatcaaattaacaattagaatatagtagcaccatcattctaaaaatttaaatttggatataaatatacatttccatatcagcctaaatttacaaagtcctataatatgtaggatataaggtcaataagttaagaattccagccttaaggacaattttaaattataatttttattcctcagtcaccactgctaatccttcaatttatttcaaagtaacttctggtttttattacatttggaagataaagcaacttatcacatgtaggttacaacttaaaattcgtgtatgagccattgcttatattttctaaatctgacatgcacccagggggtttctactgctcctaccaccacccagaacatgcgatgaagattgtgcacgctaccgtgagggcagaagcaggttagtagctgtaggagctgtcacatggatttactaataatgcacttgaaaattgtgtatgtgcccttatcaggcatttaaggaccataatctctccttgtcataagaaatcagctagaagtaattcacttagatttcaaattttaatgtggatacccaaggctgcaaatctgttattcagtacctgctacacttttggggttgcctcttttatgcactgttagaattgctagaaatttagaagtccaattggaaagaagcatatcttgttagaaagtattcccagaaaatgaggaaggctaccattttaactgtgtcttgattttacagggagaaaaataaagttaatattttgaggaaaaaataaggcttttaagatgaccatgctatatagtagacaaatagtttaactcggtgcctacttcatgtacactggatgtgttaacatgaatttatgaccttcagtgactttttattaccaaaacagcttccttaaagcaaacacacacacatgcctctacagtattggaaaattccgtctccttagataaaacaattaggatttttcttgggccaactagaataattagggctgcagagttggagcctttatataaggagtttgcagctcatatccgaagagagaaatgtatttggaaagtcaaaagtgtaggtaagtgagaaagcagagtagtttcagcttttgcagttggagtgggtataatttactgtgttgtcataagatactggaaagatctttggaagaataggttcttaaagtgttttctcatgtgcccttactgacatttcccattgggccttcaagacaactccgagtaaatacttaaattgattttcagtgcacgtgct

SEQ ID NO: 113160 - DNA, 1574 bp, Homo sapiens
  misc_feature (1)...(1574): n = a,t,c or g
tttttttttttaaagttagctaaattatctttattttttttttagaaacagggtctcactctgttgcccaggctggagtgcagtggcatgatcttagatcactaaagcctcagactcctgggctcaagtgatcctcccagcctcaacctcctaagtagctgggatcacaggtgcgtgacactatggcgtggctcaaaatcttttttacttttggaaggccctgcttaggaaacttgctgctgctcttaattcacggacttgggagagacaaaacctaaaaaagctgttgctggggttcagggtgctgtggggaggaacccgcaaaaaatgggtctggaacttgaaaatcttccatcttccattcggccccgattttcgaacagggtgttatttattcccaaagggaaacttgggagtttgtttacctaatggggaagccaagaacaccagactggtgcaattcatgggatgggttcaaggggtgccttcatgggttaggcaataggtgatgtttcgtagccntaaaggctatccatagaaggccttgggagcttttgaataactgaacgattgcgctccataagtttcctccagagatgtcactgaactttttcttgtattcttctaagtactttcttcatggaggtaacctcccctttcatagaggtcaattctacatccttgctttgtatttgctgagtatatatctcctccatctgtttcaagatggccctcagccttgcctgaaaattgtaatccttgaatagaagacgttccctgaatgtacctgaatatgtcccagaaggcccagcgcctcgggagcctaatgtcccaacacgatctctggtccgcagtcctgcccaatacccatagctttaaaatnccccctgatggaactgagttcctgtgcggnacaaatatcctagcctttcccagaaagggtactgttgcaggccaggacagataagctggtgagcgactaaactcacccactgcccatgctgatcacagaagatgtgagagcaggcagtgacccaatgcatagccaggagagtttgatgcgacactttcggataattacaaagcagcatgtcttcacacaaaagccatattaggatagtgaggtctccagaagctgaaagagaggccataaaagaaaaacgcagtactcatctacagtatatccaggatttacagcaccaaagaggtccagactggaacagcgaaactcagatctggtttcagtctcttgaaattttactcctctggcatcacatgaatccagcttctatctagaaatccagttgaaccacaggatctatcaattatctaggatcatttgtgtaatgaagagaacttaaggccagcttatcttggtcgaaaattcaaagtaccaggctttaggtaccatcagcctttaaccctttctgttgagaatatccaaatccaagcccatatgattttcagggggtctacagatgggccagttatggactggcacacagggtgctggacttccctcctcagtggatttcatcttcaaccagcctcgtgcggaattcctgcaggacgtc

SEQ ID NO: 113161 - DNA, 921 bp, Homo sapiens
  misc_feature (1)...(921): n = a,t,c or g
gctcgctgaagacttcggcacgagctatgccccgccccctccccagccccagacacggaccccgcaggagatgggtgcccccatacgcacactgtcctttggcccaccggacatcatgcctccaaagaaggatgtttccgtgaagaaaccagcaggggccttccatctccaaaccctgctgctaagccagcagcagcaggggctcctccagccaagaccaaagctgagccagctgtcccccaggcccctcagaaaacccaggagcctccagtcgatctctccaaagtggtgatcggagtttaacaaggaccagctggaggagttcaaggaggccttcgagctgtttgacccgagtgggggatggcaaggatcctgtacagccagtgtgggggnacgtgatgaggggccctgggccagaacccccacacaacgccgaggttgctcaagggtccttggggaaacccccaagagtgatgaagcttgaaagtcgcggccgttgtggaacttttgagacttttccttgcccccattcttcccaggccagtggcccaagaacccgaggccaaggccacatatgaggactactttggaggggttttcgtgtgttttgacaaggagggggaacggccaaagtcatgggagcagagctcagacatgttctccaccacccttgggagagaaagatgactgaggaggagagtggagacccgttcttggccaggacacgaggacaagcaacggctgcatccaactacgaggccttcttgaaaccacatcctaagcggtctgaagtgctgcaagatccaagtgggggtccggaacactggggccccagcaggcgaaaagcgacgttccaagccaccagaaaggccaccccatttgtttcaaaataaagactgggtcttcccccaaaaaaaaaaa

SEQ ID NO: 113162 - DNA, 2123 bp, Homo sapiens
acaaagcagagggctcttttagtaatgtgctagaaatccagagacacaatgggttttctaggaaacaaaccaccagtgtacaaaaccgtaacaacattgctcccttgaaccgtaaaaaatgaatgtcccgcatggtggagtaaggctggggctgtgggaagggaaaccgagaagttgaggaggggcaaaagttctaattgcaacaacaacccaggctgtgccccctggccgcccagtgggtgcccacttgggtgcactcaactatgacatcaaggatgaagagggcatctgagctaagatcatatccccaggggcccacagagctcacagcctgtgggggggacccccaactcccctgctggggtggggccaggcataaccctgggggatagcctggcccctaaccttcaatgacaaggggcacccaccctgtgctggactccacgtctgttgaacactgctgcccattgggtaatttgtcaaggtcctggccaaaaccaggtcctttctcaggacagggttgggcagatggacacattaactcgctctggaccagggccgagatcccactcctcctggaataggcccccccacctcggggccttgactcccctgggcagaacccgggggtggctgcttgggccctccacgtttccacccctggggaggaagaagcggccgaggcgatggcccagattgctcaggtcagagactcacacctttagaagctgtcccctgacccttgcttccaaaacgcccatttcaacacacaaaagttaaaaggcacccaattgtgcaataaagttccctctctgtgaaagggagggggttctggcctggggctcgatgtggagctcctgctgatggcacatggccctccagagaggaagaggtcaaagccagtccgatctcccgggggaatcacagtgagtctcaataatgtgttccttttcccaaaagggctgtgcttttaaaaaacaaaacacctgcctacttgtccaactcccctgaccctgggaaggggggaaggggagaaccatgccgttgctggctatgggacccaagcttggccttggaggtggttgggaggagggggtgaaggacacaggtactgctcccctggggttgggtgccaaccctgccccgttctgtggctgggaagaggacaaggccagagggaggctctgtccaacctgccttctgaagtcacaggaaagcaggcaccagagggccggggctgggcccaggaaatgccccagcagtgcactcccttgccccttcgcaccctcccatcctgccactgcggctccctgctgcagaacctatgctgtgttccgttctgtggcccagggaagcggaaccaaagcgacccttctgcactgaccctgcctctgtggcagggtcactgcagctggcaaccctcctacctccaccacgctcagatgtcatacagggctcctacagggtaccatggtgggaggaggggtggcgacgttaactgaggttcatctgaacctacttctgcaccaaccgctcctgctatggaaatctctggtgtgagcagagccagggagggtggctgggaactgggccggggccacggggctgctgcgtcccacagggagcgtctctctgtgctgttcgctcctgttcctagtgcacacgtgtgaaggacctggtatcggctttagcacaatccttagttaaccaaaacgttgttttgcttgaacgggtaaatcgcaaaaaaagggatttggtcaagagcccattccacgaagtggtctgggttgcagacatcggccccacttcctgcctcatgccccttcctccgggttctgggtccccaaggaggccactgtggaaagagttttcgccaacaagggttaagccagagaaggctgggtgggaggcttgcagagccaagggaggagattggtcagtgtaatctgtggccgcccggcactggctaaactgagctctggccacatgggcccagttgccccaattccgcttccattagatcctgggcactggtccccgaagaggtgttgcgtgacattatcacagacactgaaataccaccctggagaccgggagttctttccttcctaagtggttctgtc

SEQ ID NO: 113163 - DNA, 1568 bp, Homo sapiens
gggagctggacgagtccgagcgcgtcacctcctcacgctgcggctgtcgccgtgtcccgccggcccgttccgtgtcgccccgcagtgctgcggccgccgcggcaccatggctgtgtttgtcgtgctcctggcgttggtggcgggtgttttggggaacgagtttagtatattaaaatcacccagggtctgttgttttccgaaaatggaagattggcctatacccagggagagcggatcccccagacgtggctgccattgtcccatgggcttcctctgtgaaagaaagacctttcttggccaggactcgcagtgggtaacctgtttcatcgtcctcgggctacccgtcatgggtgatggtgaaggggagtgaacaaaacttggctctacccccagggcagtgtcattttcgtaccctttggaagaatgcagttccttttagtcttgaccagtgtttgcaaattcccattcacttccttatttttctggaggaaacctcctgtttgtttttgcagttgggcttcccagtgagggaaaagagttgtattatggttagggaaggcaaacttcagtgtttgaaggaccttttcagtcaccttggcgccagctccgtaaattcgcctggttttcaaggaaaactctgtttcttcagtttcactccccctcaaattctcctgagtaggaacaatgaagttgacctgctctttctttctgaactgcaagtgcgtacatgatatttcaagcttgctgtctcgtcataagcatctagccaagggatcattctcctgatttatatttcactgggagctgggcaggtttgggatgaaattggggaaggcgttattgggggaagactctgaacaattcagagatgcttctaagatccttgttgaccgctctgcaaaagtttggcagatgaccatgtaccagtctttatggtgggaaatccagtggtaggagttagtcaactgtccaagtccatttgaacacctccctccattagggaaggacaagggacttattccttggagggcaaaacaagcgcaggaaccccagcaagtccctataaccttgcatataaagtataattttgaaatattccgtggtttttcaacatgggtacttttggataatgatcgcctttgcctttggctggtgattatcacctcttacaatatttgggaacatggatcctgggatatggatagccatccatttatagggatggacaaaccagaagatttccgaatgggattgaatgttacctgtggcccagaattagaaggagggggaaaaagccattttgttttgaaaattaaatgacatatttcagaagccatgaaatgagaatacatacattcataaaagataaatgattggtgggtgataggggatgctattaatcatatgtctgtctatcactaggttcatgtctttttctctgtgtttgccttgacaggaatcttgatcttctggcagaaaactcttccaaaacattcctatgtgacactgctcatgtataggtgctccaaaccaaatgtccagttgcttccaccattgtgcaaaaatgg

SEQ ID NO: 113164 - DNA, 4226 bp, Homo sapiens
  misc_feature (1)...(4226): n = a,t,c or g
aaccacaagtcaaatagaaagaagttaaaagaatgtttatgcaaacacatgagaaaagaagggtgcagatgagaataggggtgtggttaacaactcagaggaggagggagaatctaacctgtcagcccttttactcagccacagcctccggagccgttgcacacctacctgcccggccgacttacctgtacttgccgccgtcccggctcacctggcggtgcccgaggagtagtcgctggagtccgcgcctccctgggactgcaatgtgccgatcttagctgctgcctgagaggatgtctggggtgtccgagcccctgagtcgagtaaagttgggcacgttacgccggcctgaaggccctgcagagcccatggtggtggtaccagtagatgtggaaaaggaggacgtgcgtatcctcaaggtctgcttctatagcaacagcttcaatcctgggaaaaacttcaaactggtcaaatgcactgtccagacggagatccgggagatcatcacctccatcctgctgagcgggcggatcgggcccaacatccggttggctgagtgctatgggctgaggctgaagcacatgaagtccgatgagatccactggctgcacccacagatgacggtgggtgaggtgcaggacaagtatgagtgtctgcacgtggaagccgagtggaggtatgaccttcaaatccgctacttgccagaagacttcatggagagcctgaaggaggacaggaccacgctgctctatttttaccaacagctccggaacgactacatgcagcgctacgccagcaaggtcagcgagggcatggccctgcagctgggctgcctggagctcaggcggttcttcaaggatatgccccacaatgcacttgacaagaagtccaacttcgagctcctagaaaaggaagtggggctggacttgtttttcccaaagcagatgcaggagaacttaaagcccaaacagttccggaagatgatccagcagaccttccagcagtacgcctcgctcagggaggaggagtgcgtcatgaagttcttcaacactctcgccggcttcgccaacatcgaccaggagacctaccgctgtgaactcattcaaggatggaacattactgtggacctggtcattggccctaaagggatccgccagctgactagtcaggacgcaaagcccacctgcctggccgagttcaagcagatcaggtccatcaggtgcctcccgctggaggagggccaggcagtacttcagctgggcattgaaggtgccccccaggccttgtccatcaaaacctcatccctagcagaggctgagaacatggctgacctcatagacggctactgccggctgcagggtgagcaccaaggctctctcatcatccatcctaggaaagatggtgagaagcggaacagcctgccccagatccccatgctaaacctggaggcccggcggtcccacctctcagagagctgcagcatagagtcagacatctacgcagagattcccgacgaaaccctgcgaaggcccggaggtccacagtatggcattgcccgtgaagatgtggtcctgaatcgtattcttggggaaggcttttttggggaggtctatgaaggtgtctacacaaatcataaaggggagaaaatcaatgtagctgtcaagacctgcaagaaagactgcactctggacaacaaggagaagttcatgagcgaggcagtgatcatgaagaacctcgaccacccgcacatcgtgaagctgatcggcatcattgaagaggagcccacctggatcatcatggaattgtatccctatggggagctgggccactacctggagcggaacaagaactccctgaaggtgctcaccctcgtgctgtactcactgcagatatgcaaagccatggcctacctggagagcatcaactgcgtgcacagggacattgctgtccggaacatcctggtggcctcccctgagtgtgtgaagctgggggactttggtctttcccggtacattgaggacgaggactattacaaagcctctgtgactcgtctccccatcaaatggatgtccccagagtccattaacttccgacgcttcatgacagtctagtgacgtctgcatgttcaccgtgtgcatgtggtagatcgtgagctttgggaagcagcccttattatggctggagatcaaggatgtcgtcggggtgttgtagaaagcagcacggctgaacaagcctgatatctgtccaccggtcctttataccatcatgacccgctgctgggactacgaccccagtgaccggccccgcttcaccgagctggtgtgcagcctcagtgacgtttatcagatggagaaggacattgccatggagcaagagaggaatgctcgctaccgaacccccaaaatcttggagcccacagccttccaggaacccccacccaagcccagccgacctaagtacagaccccctccgcaaaccaacctcctgggctccaaagctgcagttccaggttcctgagggtctgtgtgccagctctcctgacggcttcaccagccctatgggagtattccattcttcccgttaaattcactggcacaccccacctgtccaccgggcacaatgttttcaaacgccacagcatgcgggaggaggactttcatccaacccagcagccgagaagaggcccagcagctgtgggaggctgaaaaggtcaaaatgcggcaaatcctggacaaacagcagaagcagatggtggaggactaccagtggctcaggcaggaggagaagtccctggaccccatgggttatatgaatgataagtccccattgacgccagagaaggaggtcggctacctggagttcacagggcccccacagaaacccccgaggctgggcgcacagtccatccagcccacagctaacctggaccggaccgatgacctggtgtacctcaatgtcatggagctggtgcggcnccgtgctggagctcaagaatgagctctgtcagctgccccccgagggctacgtggtggtggtgaagaatgtggggctgaccctgcggaacgtcagtcgggagcgtgtgatgatctcctgccttccttgccgtcatcttcacggacagagatcgagggcacccagaaactgctcaacaaagacctggcagagctcatcaacaagatgccgctggcgcagcagaacgccgtgacctccctgagtgaggagtgcaagaggcagatgctgacggcttcacacacccatggctgtggacgccaagaaccttgctcgacgctgtggaccaggccaaggttctggccaatctggcccacccacctgcagagtgacggagggtgggggccacctgcctgcgtcttccgcccctgcctgccatgtacctcccctgccttgctgttggtcatgtgggtcttccagggagaaggcccaagggaagcaaccttcctttgccattttgcacgacgccctctccccacccctacccctggctgtactgctcaggctgcagctggacagaggggactctgggctatggacacagggtgacggtgacaaagatggctcagagggggactgctgctgcctggccactgctccctaagccagcctggtccatgcagggggctcctgggggtggggaggtgtcacatggtgcccctagctttatatatggacatggcaggccgatttgggaaccaagctattcctttcccttcctcttcggccctcagatgtcccttgatgcacagagaagctggggaggagctttgttttcgggggtcaggcagccagtgagatgagggatgggcctggcattcttgtacagtgtatattgaaatttatttaatgtgaggtttggtctggactgaacagcatgtgccctcctgagggaggacctggggcacagtccaggaacaagctaattgggagtcccaggcacaggatgctgtgttgtcaacaaaccaagcatcagggggaagaagcagagagatgcggccaagataggaccttgggccaaatccgctctcttcctgcccctctttctctttcttcctttactttcccttgcttttccctcttttcttactcctcctctttctctccccaacccccattctcatctgcacccttcttttctcatgtgtttgcataaacattcttttaacttctttctatttgacttgtggttgaattaaaattgtcccatttgcttg

SEQ ID NO: 113165 - DNA, 4679 bp, Homo sapiens
gtttagaggtttgaattttctcggagaaagacaggccggccacgaggaaaacagaaacaagccgcagcaacatctaagcccttgaaaggatcctgagagaggggggaaagggaaaacagcagccaccagcccaaccacttgtgtcttctgcgcccttcccacctatcttgcccaccacaccagactacgctgctcgggacttgaaatctgtggccgaaagaccggtcactacatatcttctaaaataatcaaccaccctcccttcccaaaccacccaaaattcactcatccagcgtttacttttttgaatccactcagaacttttttctgcgaaccccccttcccttaaatgggagttgggtgggggggaaatgaatactggagttgggcctttattttttaaaaagactttttgaatccaatgaggccccctaaataattgagttttgggtcctggttggttgttttattttttttcctccaaaattttaccccctcccccctgagcccgaggtgctgacgtcgcaaaaaaattggataaaaccaccatcatgggttcgggtcccatagaccccaaagaacttctcaagggcctggacagcttccttaaccgagatggggaagtcaaaagtgtggatgggatttccaagatcttcagtttgatgaaggaagcacgaaagatggtgagtcgatgcacttacttgaacattctcctgcagacccgttcaccagaaatattggtcaaatttattgacgttggcggctacaaacttcttaacaattggctgacgtattcaaagacaaccaacaacattcccctcctccagcaaattctactgaccctggcagcatctaccgctcactgtaggaccatctcaaggcaggaacaacacaggcttaaactgggtgaaggcaggctggaggcaagttcaagtgaggatgaagagctcccgaaattggcctcagtccttgtcagcgactggatggctgtcatccgcttttcagagcagtacccagccttgctgagaaaagataagaaggaaacgtaaagatgaaggaaaaagtcgaactaccctttccttgagcggaccttttgacaagaggtgaaggcttgagccccggggttgaaggaggcccccagagaagaagagggagaagccccaagtctcttcggatccacagcaccccagtcatgccaagttccgtttccacttggacttagagctggagacaccatcccttggtgccctgtgaagaagaatgccagcacagtggtggtttctgacaagtacaaccttaaacccattcccccttcaaacgtcagagcaacgtagctgctccaggagatgccactccccctgcagagaagaaatacaagccactcaacacaacacctaatgccaccaaagagatcaaagtgaagatcatcccgccacagcctatggagggcctgggctttctggatgctcttacattcagcccctgttccaggcatcaaaattaagaagaaaaaaaaagtactgtcacctacggctgccaagccaagcccctttgaagggaaaacgagcacagaaccaagcacagccaaaccttcttccccagaaccagcaccaccttctgaggcaatggacgcagaccgtccaggcaccccggttccccctgttgaagtcccggagctcatggatacagcctctttggagccaggagctctggatgccaagccagtggagagtcctggagatcctaaccaactgacccggaaaggcaggaagaggaaaagtgtgacatggcctgaggaaggcaaactgagagaatatttctattttgaattggatgaaactgaacgagtaaatgtgaataagatcaaggactttggtgaggcggctaagcgagagatactgtcagaccgacatgcatttgagacagcgcggcgtctgagccatgataacatggaggagaaggtgcccttgggtgtgcccccggcccctggttctgccctcacctcttgtcacccctggaagcaatagtcagggagcgatatattcaggctgagccgggagaaagggaatcctttcaaggagctctttctgaaccaaggagagtccttcatgagcctgatcctgagcccttcgagcccataccccctaaactcatccccctagatgaggagtgttccatggatgagactccgtatgttgagactctggaacctggggggtcaggtggctcacctgatggggcaggaggctccaagttgcctccagttctggccaatcttatgggaagcatgggtgctggaaagggcccccaaggccctggaggaggaggcattaatgtccaagagatcctcacctccatcatgggtagcccaaacagtcatccttcagaggaactactgaaacaaccagactattcggacaagatcaagcagatgctggtgccacatggactcctaggccctggcccaatagccaatggtttcccaccagggggtcctgggggccccaagggcatgcagcactttccccctggacctgggggacctatgccaggtccccatggaggccctggtgggccagtgggtccacgtcttctgggtcctccaccccctccccggggaggtgatcccttctgggatggcccgggcgaccctatgcggggtggcccaatgcgggggggtccaggaccaggtcctggaccataccatagaggccgaggtggccgaggaggaaacgaacctcctcctcctcctcctccattccgaggcgccagaggaggtcgctctggaggaggacccccaaatggacgagggggccctggtgggggcatggttggaggtggtgggcatcgtcctcacgaaggccctggtgggggcatgggcaacagcagtggacatcgtccccacgaaggccctggcggtggcatgggaagtgggcatcgcccccatgaaggccctggtggtagcatgggtgggggtggaggacatcgtccccacgaaggccctggcggtggcatcagtggtggcagtggccatcgtccccatgaaggccctggcggaggaatgggtgccggtggtggacatcgcccccacgaaggccctggcggaagcatgggtggaagtggtggacatcgtccccatgaaggccctggacacggggggccccatggccaccggcttcatggatgtccctggtcaccgaggccatgaccattcgagggccgccacctcatgagcaccgtggccatgatggtcctgggccacgggtgagggggccaccgagggcacgattggaaggccacaaccttgggaggagacatgtcaaaccgccctgtctgccgacatttcatgatgaaggtcaactgccgctatgagaacaactgtgccttctaccacccgggtgtcaatgggccccccctgccctaaggaccatttgcctgccctgttcacacaacccctgtggactgcagcctcgctctttccaccctgttatggcttctgtgaggcccattttcccttttccccagctgatgaggagccggccccctcagttcccacttgcttggggttccggggggttttctgatcactgggtgcgcattgatgtacatatttttcctccagtctgggggaaggagagagactgggaaacgttcctgggattgttgaagaggagacccagtttggcttcactttttgagaagattcgccctgtaaccccaaacccctttccagtattaacccttaaatgcttggaggaacctaaaagctggttattcctgggcgaaacacccctacccttcttatttgcggggttccccacatggcacacagaactcttgacacaggattcagctggcatttaaaggaaatcattcccaggttaagtttcattatttccctcatgggggtgggggaagatggttgaaaggggtattgtatatcccactgcactgagagggctcaatcagctggatttgagttcttgggaacacacattatccccaccccctcccccaagcgtgggctcaccattcttaagtcctttctcaagtgggaccttcaacttttctgtgaacacccagtctggcgtccttggggtctgctagggttcgatgaatggcgaactcgtaatctggaatccgggtgcaaagttttaagcttggcagaaggtgaagacccggtgggtgctggtctggcctttgcccaactattaggccagtcttggagactttgataaaatacttcagtgagacccagcttctcatcaaacttggggccccggccgtgctgggccctgaaaagtcaacacctaacatgcactgccctttggggaagtccagcctcactcccctgcctccccacccggaacccttgcccagccgtgaaggaggccttccccggtacttcacccctgtcaacccacctctgaatcccccacccaggcgccttccctgggtggattcaacaagatgattttgccctttacccagttctctccttcactttggcgatcagttgttttctatgaaaacagtggattggttgggttttgtgcagggtcttgggttagagccaaaatggatttgaggatgagtatttttttttttttttggttttgtatattttgtacattaataataaatcagtggaaagagaagcagcttatttaaaaaaaaaa

SEQ ID NO: 113166 - DNA, 2617 bp, Homo sapiens
  misc_feature (1)...(2617): n = a,t,c or g
acgcttgcgaatttccgggaagcccacgcggcggcaaagtgagcagtagccaacatgtcaagggtgggagtcatattacaaaaccgagggcgatgaagaagcagaggaagaacaagaagagaacccttgaagcaagtggagactataaatattcaggaagagatagtttgatttttttggttgatgcctccaaggctatgtttgaattctcagaggggaagatgagttgacacctttttgacatgagcatccaagtgtatccaaaagtgtgtacatcagtaagatccataagcagtgatccgagatctccttggcctgtcggtgttcctatggtaccgagaaaagacaaaaaattccagtgaattttaaaaaatatttaccgtcttaccaggagctgggataaatccagggtgcaaaaacgaatttctagagcttggaccagttttaaggggccagcagggaccaaaaacgtttccaagacatggatggggccaccgggatctgactactccactccagtgaagtgctttcgggtctgtgccaacctctttaggtgatgtccaattcaaggatgagtcataagaggatccatgctgttcaccaatgcgagacaaacccccatgggcaatgacagtgccaaacccagcctgggccaggacccaaagccggtgatcttccgagatacaggcatctttccttgacttgatgcacctgaagaaacctggggggctttgacatatccttgttctacagagatatcatcagcatagcagaggatgaggacctcagggttcacttttgaggaatccagcaagctagaagaccttgttgcggaaggttcgcgccaaggaagaccaggaagccgagcactcagcacggttaaagctgaagctcaacaaaagatatagtgatctctgtgggcactttataatctggtccagaaggctctcaagcctcctcccaataaagcttctatcggggaaacaaattgaaccagtgaaaaccaaggacccgggaccttttaattacaagttacagggcggttttgcttctgccctaggcgattaccaagagggtctcagatctatggggagtcggtcagatttatactgggagaaagaaggaaacagaagagctaaaaccggttttgatgatccaggttttgatgctccatgggtttcaagcccgttggtacatgctgaagaaaacaccattaccgtgaggccctcccatgttcgtgtacccaagaggagtccgctggtgattgggagctcaaccctgttcagtgctctgctcatcaagtgtctggagaaggaggttgcagcattgtgcagatacacaccccgcaggaaacatccctccttattttgtgggctttggtgccacaggaagaagagttggatgaccagaaaattcaggtgactcctccaggcttccaagctggtctttttaccctttgctgatgataaagggaagatggccctttactggaaaaattcatggcaactccatgaggcaggtggggcaagatggaaggcttatcgctgagaagcttcgcttcaccatacagaaggtgacagctttgagaacccccgtgcttgcagcagtaagtacttcaggaacctgaggggccttggccttgcgatttgatggagccggaacaagcagtggacctgagcggtgccccaaggtttgaagccaatgaataaaaagactgggctccttggtcggatgagtctaaaggagcctctctaccccaaccagattaccaatccttgaagggaaaagttacccaaagaggaaaaacacgaataaatgaaagggtctgggaaagaaaaaaaggccccaaaggtggaagtaattcaagaaagaggagcttgaaaagaccccacattcagccaagggttaccnctggggcaaagttcaacttgtgccccatggctgaaaagaaggcctgccggcgctttacgggggctggaagagtggacttgaaagaaggcagggagcttgcttggaagcccctcaccaaagcactttccagggacttgaccagaggcccgcgcgtccaggctgcccttcccgcagtgttggccaggctgccctggcctttgtcctcagcccagttaaaatgtgtttcctcctgagctaggaagagtttacccgcacataagtcgagggactttatgtttttgaggcttttctgttgccatgggtgatggtgtagcccctcccacttagggctctttattcaggcagtaaagtaaggaacagcaaagtgggagggctacaccatcaccatggcaacagaaagcctcaaaaacataaagtccctcgacttatgtcgggtagactcttcctagctcaggagaaacacattttaactggctgaggacaaggccaggcagcctggccacactgcggaagggcagctggacgcgcggcctctggtcagtcctggaagtgcttggtgagggcttccagaaccttcattatcgtgttttctcttggtaactttcccttcaggattgtaatctggtgggtaaacaagctccttaaactcatccaccaaggagcccagtcttttattcattgcttcaaccttgggcaatgtcaggtc

SEQ ID NO: 113167 - DNA, 417 bp, Homo sapiens
  misc_feature (1)...(417): n = a,t,c or g
gcttcttcgcttctctcttggaaagtccagtctctcctcggcttgcaatggaccccaactgctcctgcgccgctggtgtctcctgcacctgcgctggttcctgcaagtgcaaagagtgcaaatgcacctcctgcaagaagagtgagtgtgaggccatctccatggtctggggctgtggctaaggctgctgctcctgctgccccgtgntgctagcaagtgtgcccagggctgtgtttgcaaaggggcgtcagagaagtgcagctgctgcgactgatgccacggacaacctttctcccagactgtaaacagagagacatgtacaaacctggattttttttttataccaccttgacccatttgctacattccttttcctgtgaaatatgtgagtgataattaaacactttagacctgatt

SEQ ID NO: 113168 - DNA, 693 bp, Homo sapiens
gaggtaatcgaatcatgggggcaggtttttcccatactgttctcgtgatagtgaatacatctcactaaatctgatggttttataaagggcagtttcccctgcacgtgctctcttgcctgctgccagggaagacatacctttttgctccttcctttgccttcccaccatgattctgaggcctctcccagccttgtggaactgtgagtacattaaacctctttttctttataaattacccagtttcccagtatttcttcatagcagtatgaaaagtaactaatacactacccgagacatcttaggagatttgtaatagctgtaatgccaggtccaccatatttttagcataaagcaaatgtttacgcgtgatatgactgcacgggctttctttcagctggagccatagcaactcaagtagtaaccctatcttagtctgattaaaagtaaatattagtctgggcatggtgggacatgcctgtaatcccagtactttgggatcacaggagtgagccacggtgcccctcatcctttactttcttaataaacttgctttcacttcacactgtggcatcaccctgaattctttcttgcacaagatccaagaaccctctcttggggtctagattgggacccctttcctgtaactatcatgctactgcactccagcctgggcaacagagcaaggccctgtct

SEQ ID NO: 113169 - DNA, 2734 bp, Homo sapiens
gggctccggcaaccgctccggcaacgccaaccagctccgctgcgcgcaggctcgggctgcaggctctcggctgcagcgctgcggctggtgtgcagtggtgcgaccacggctcacggcagcctcagccacccagatgtaagcgatctggttcccacctcagcctcccgagtagtggatctaggatctgggcttccaactatgtggcacgctctgggcctccctactgctgcctgctggtagttggcgcaatgcccgggagcaggcccttctatccatcaccctgtcggattgagctggtcaactatgtcaacaaacgggaataccaccgtggcaaggccgggcacaacttcgtacaacgttggacattgagctactttgaagaaggctatgtgggtaccttcctggggtggggcccaagccaccccaagagaagtttatgtttaccgaggaacctgaaagcttgccttgcaaagctttcgatgcacggggaacaatggccacaagtgttcccacattcaaagagattcagagaccaggggctcctgtggcttcctgctggggctttcggggcttgtggaagccatctctgaccggatcatggatccacaccaattgcgcacgtcagcgtgggaggtgttcgggcggaggaccctgctcaccctgctgtggcagcatgtgtggggacgggctgtaaatggtggctaatcctgctgaaagctttggaaacttctggacaagaaaaggcctggttttcttggtggcctctatgaatcccatgtagggtgcagaccgtacttccatccctccctgtgaagcaccacgtcaacgggttccgggcccccatgcacgggggagggagatacccccaagtgtagcaaagatctgtgagccctggcttacagcccgacctacaaacaggacaagcactacgggatacaattcctacagcgtctccaatagcgagaaggacatcatggccgagatctacaaaaacggccccgtggagggaagctttctctgtgtattcggactttcctgttctacaagtcaggagtgtaccaacaccgtccccggagagatgatgggtgtccatgccatccgcatcctggggctggggaagtggaagaaatggcacaccctactggctggttgccaactcctgggaacattgattgggggtgacattggcttcttttaaattattcagaggacaggttcattgttggattcgattcagaagtggtggctggaattggaattccacggcacccgatcagttattggggaaaagatctaatcttgccgtgggccttgttcgttgccagtcctggggggcgagatcgggggtagaatggcattttattctttaagtttcacgtcaagataccaagttttcagacagggtctgaaagggactgggatttggccaaacatcaagacctgttctttcccaagggaggaccaagttcctgggctacatcccaggcctgtgggtttcagttgcaagacaggccatgtgatgcccaccgctgccaagcacagaagcggtcctttccccctgttagactagtgcccgtagggagttacctgcttgccccaggctggattgtgggccccctccgtgattccatccattttccaggggaagcaagaccagagacccagggaatggaaaagcgggagttccctaacaaggatgaaacttcccccatcatccccccatcagttcccccccagtaccttccaagccaagtagctttccccacatttgtccacagaaaatccagaggagaagacggtgttgggaagccccttgggaagaaacggcccagtctccccccaggcccccctggcatcctatcgaagtttgccaatgtccacaaccctcctctgatcttgtggcttcagccatggatttcttttaataggaagtttttaatttttttcgtgcacttctggcttaattcatgtggggtggaggccagtgggaacagcggggagaccctgtggcttagttttaacagatttgcctcctttatggacggcgggcttcaaaagggaaaccaagtggttcagggagtttgttttctggaccccactggatctcctacctacccacaagggaaaaataagtttagggagaaaccgagcttttaactggttttttgaaaaaattacagctttcaccctgttcaagtttaacaagggaaatgcctgttgccaattaaaaggtttctccaaacttggaagtctactctggatggggatctccagatcctttgtcaactgccctatagacttgtaagctgctgtctctctttgtccctgccagagaatcacgtcctggaactgcaatgttcttgcgactcttgggacttcatcttaacttctcgctgccccgagccatgttttcaaccatggcatccctcccccaattaagttcccttgtcaatccttcgtcaaccttctctgtaagtgcctggtaaagcttgcccttgcttaagaactcaaaacatagctgtgctctatttttttgttgttgttgtgactgacagagtgagactccagcctgggggacaagagtgaatctgtgtctcaccaaaaaaaaaaagaaaaagaaagatgcttaacaaaggttaccataagccacaaattcataaccacttatccttccagtttcaagtagaatatattcataacctcaataaagttctccctgctcccaaaaaaaaaa

SEQ ID NO: 113170 - DNA, 1674 bp, Homo sapiens
agcggccgccggccccgggactgaccggcctcgccgcacctcccgcaccgactagcgctcccgggcgctcctgcgcccgactcgccctcgcccccactccccggcggggtggcggcggccgggcccccacggcggcggccggagcagcagcagcagcagcaggagcccgcctctatgatgaagttcaagcccaaccagacgcggacctacgaccgcgagggcgttcaagaagcgggcggcgtgcctcgtgcttccggagcgagcaggaggacgaggtgctgctggtgagtagcagccggtacccagaccagtggattgtcccaggaggacggaatggaacccgaggaggaacttgggcggtgctgccgtagggggaagtttatgaaggaggctgggagtcaaaggaaaacttaggcagacttcctgggcatatttgagcagaaccaagaccgaaagcacagaacctattggttagtgttctaccagtcactgaaatattagaagattgggaagattctgttaatattggaaggaagagagagtggttcaaagtagaagatgctatcaaagttctccagtgtcataaacctgtacatgcagagtatctggaaaagctaaagctgggttgttccccagccaatggaaattctacagtcccttcccttccggataataatgccttgtttgtaaccgctgcacagacctctgggttgccatctagtgtaagatagagagaactgggtaggcctctcccaccatgtggcagtctcatgggggagagggcttcttttcgttttccttcgttcaaacatctgattgacgcttgcaaactgtctgaatttgccatgcaaggttttcaaacaatttgcatgtttttcagatgctttcaaatctttttttaaaaaaaatagtgtaaaatattttaataagccaaagccatgtggaatttttgtttagatgccttaactgtgccacaccccacaaccccctatattattttggttgtctatttctcacagcatattttcagttttttgtccatttgacatcagtctgtggtttattttgtcatcagattacttgggggtatacctaccccaaaattgttttctcattcacaggcattagcatattcagcaaatccatctagtggtgggaattaaaaatattattggtattaaagaaatccattcacccccaaaacttgttttacaggattacaattttaattcaaaatttccagatttgggctatttctgtatgatccaataacttattttgtcacagggcttaatttgccatttttggggatttttcgactcattttgtctgaattttcacaactggtattatgtcactagctacctgatatggctatttcccttataactcaatagtaccttaacacaaagtataactctgtagagttggtgaatattttagggaaatattagcaaaatgcatgtagtaaagacatcttatgaaaactgtattcatggaatttgatttagcatgctcagttgccagttcccattatcgatactctttctttgcagaataccttaggaaccgttatttccctcagtgtaggattgctcttaaaatgtattcagttatttagtgggcccccacagggagtgggagtcttggaaatctaattctaaatgccagtca

SEQ ID NO: 113171 - DNA, 1650 bp, Homo sapiens
gcgccgccatcttggggctgctgggactcgtcgtcggttggcgactcccggacgttaggtagtttgtctgggccgggttctgaggccttgcttctctttacttttccactctaggccacgatgccgcagtaccagacctggggaggagttcagccgcgctgcccgagaagctttacctccgctgacccctatgaaggcacgtgttggttctcaaatataggcattctcgatcgggaacttgtgtgttaaagtaacagatgatttaagtttgtttggtgtataaaacaagaccaagcctcaagattgtaaagaaagatttgaggaaattccaccagtcaacttaattgcgactttatgggtagcccaagggaaagcccgcaaatggttaccatgggaaacctgaagttgaatgggttttgaaaattgaagacttttgtcgttgttactttagggaagttaaatattctttttgaatttaggaggaaaagtgtttggggacaggaaagttacctttatgttaactaaagtggggctgtttcagaagccttaggaggtcatttttttgtaatttttcctttttaatttactttaggagagctaggggatgccaatgttttccagttaggaaagcctttatttactttttggaaaattgaacaaggaaatgcatctgttctttaggaacttggaggtttatttgatgttaggtaaaaccatgtaattgttttccctggcaaaatttgtatccagtaatttgaaaatgagatattaggaaaaaccaattcctccttaaatttagttccatcccttccttttaaaaagaacattaaatgtaaccattttggtcagatcccatgtattttgggagccataaaatggtatgccggttggtgaccaataaatattaaatatggtaattggaattaaactccccacacccatagtatgccattggttaataccatactgtgtaccctaattatgtaatagccagtgtagtccccaattatatcctgaaagtaattgtgacctaacaagtatgcctttgcccttatttcccacatttaaacctaccctgttaatataaggggatttttagtatccagcttgttggggcaatggactttgaatctaggtttccagtgatcagaaggcagccagttatttggagtgtatggaatgggaatgatggatccactgtgcctataatggtactgaacccaccatattacaggaaatatttacttacatattttcccatctggtagtttctccaggaagggcttatgggattagtttggaacctgtcaaaccccttggcatacttcctgtgacaccccccgcccccattttcctgtcttttaattacccccaaggtgttagggtgtgacctgtccacaactgttaatgttttccacgtaaactacgaagtatgatatttgataattatatttgtatttcacccaccctaaatgtaatgttgattcctcaaagaaatgaaatgaaggcactaccattgaaatatgttttgtataaatttgtcatgttgaacagcattttagcatgggtaagttcccttagctatatgaattttggcatgtttcagagagatcagtaaataaaaatattagataaaatataaaaaaaaaa

SEQ ID NO: 113172 - DNA, 1058 bp, Homo sapiens
ctggagaacgggggccttcccagagagctgctgctttgagcctggacacagtaatgagaaggagagtgacggggtgagtggaaggcaagggcaggagaggggcttcagggaagaattaatgaactcgtggactagcgcttcctgccaacagaataactgccccatccctgagccaaaaccccgaacttacatggacctaagggcagtatcaaaagtgagatttctaggatacatgtacaacaaaagaaaaaataaataaaaattggacatcatcaaaattaaaagctttagtatttcaaaggacatcatcaaggaaatgaaacagctcacggagaaaaattttataatcatataccagttaaagggacttgtgccaggctataaaaggactcttacaactcaataataaaaagacaaataacccaattaaaaaatgagcaagtgatctaaagatagctgtcctaagaagatatgcaaatggccaataagctcatgaaaagatgctcaatatcattcgccatcagggaaatgcaaaccaaaatcacaatgagatgccacattacccctactaggatggctaagttaaaagatagataataaaaagcactgagggatgtggagtcatcagaaccctcatgccctgttgatgggatataaaattgtgtcaccacattggaaaacagtttgggagtccctcaagggttaaatagagtttcatatgatccagcaaatctgctcccaggcatataccaaagagaaatgaaaacatatgtccacacaaaaactcatacacaaaagttcctagcagcattatgtataatagtcaagaagtagaaacgatccaaatgtccaccaaccgatgcatggataaataaaatgtagtactaccatccaatacatgggattattccccgtggaaaaattaaggtggaacacatgctacaacagggaggaacttggcttataggaccattgaaaggaaaatcccaaaggaaaaatgagtttaagcccaaattttttttaaggaggcctagcctgctcaagttatcctgttaaaa

SEQ ID NO: 113173 - DNA, 2240 bp, Homo sapiens
  misc_feature (1)...(2240): n = a,t,c or g
tttcgtgcgggcgcggccggacgggagttccccggagaaggatcctgcagcccgagtcccggtgagtgcgagaggacccgcgccccctgtcacccctcacttctcctgagtcccaagtaaggaacggagccaaccctggggaggacccccggtcccctctcccagagtatacggagcctgaacctccccacttcccccaactctgttcgcggatagggtctagttgcctgctctcggacatccgttcagcagacactacctcttcgtcaccccctgcccaccctgacccgcctttacctcgcgtctagaggacacagccagggatcatcccgcagccccgaactccttcacagacccccactagccggggacgcagctcaggccccctacccccaacacaaacacttctctcctgtagaggataaagcttggggttcatcctccttccctggatcactccacagtcctcaggcttccccaatccaggggtatctcttgccgggacgctgctatggacgacattttcactcagtgccgggagggcaacgcagtctgccgttcgcctgtggctggacaacacggacaacgacctcaaccagggggacgatcatggcttctccccctttgcacttgggcctgccgagagggccgctctgctgtggttgagatgttgatcatgcggggggcacggatcaatgtaatgaaccgtggggatgacacccccctgcatctggcaagccaagtcattggacaccgtgatattgtacagaagcctatttgcaagtacaaggcagacattcaattgcaagttgaattgaacaccgggaaattttgccccctgcactaatgcctgtttttggggccaagatcaagtggcagaggacctggtggcaaatggggcccttgtcagcatctgtaacaagtatggagagatgcctgtggacaaagccaaggcaccccgtgagagagcttctccgagagcgggcagagaagatgggccagaatctcaaccgtattccatacaaggacacattctggaaggggaccacccgcactcggccccgaaatggaaccctgaacaaacactctggcattggatttcaaacagctttaactttcctggacgaagctccaacgaggaatcactctggagagctatggaagggccgctggcagggcaatgacattgtcgtgtgacgcgctgaaggttcgagactgggagttacaaggaagaggcagggactttcaatgaagagtgtccccggctcaggattttctcgcatccaaatgtgctcccagtgctaggtgcctgccaggtctccacctgcctcctcatcctactctcatcacacactggatgccatatggatccctctacaatgtactacatgaaggcaccaatttcgtcgtggaccagagccagggctgtgaagtttgctttgggacatgggcaaggggcatgggctttccttacacacacttaggagccccttcatcccacgacatgcactcaatagccgtagtgtaatgatttgatgaggacatgactgcccgaattaggcatgggttgatgttcaagtttttttttccaatgtcctgggtcgcatgtatgcacctgcctggggtagccccccgaagcttttgcaggaaggaagcctggaaggacacaaacagacgctcaagcagacatgtgggagttttgcaagtgctttctgtgggaaactggtgacacgggaaggtacccctttgctgaccttctcccaatatggagattgggaatgaaaggtggccattgtggccatttggaatgtcgggcctacccatcccaaccaggttatttcccccctcattgtgtgtaaagcttcatgaaaaatctgcatgaatgaaagacccttgcaaagcggaccccaaatttgaccttgattgtgcctattccttgagaagattccacgacaagttaggacttggaaggtcctttgcctgaactccagaggtgtccggacaatgggttgggggaatgcacctccccaaagccagcaggcctctggttgcctcccccggcctccagttcatggtactaccccaagccatgggggtcnaattccccttcccccatccctaccactgtggccccaagaggggcgggctcagagctttgtcacttgccaccatggtgtcctcccaacatgggagggatcgagccccgcctgtcacaataaagtttattatgaaaaaaaaaa

SEQ ID NO: 113174 - DNA, 1825 bp, Homo sapiens
acgccctgagatttgggcgggtagcgattgggggaaaacaggcaacctaagagttattaccgttagcagcgaagactgcgactaacgtcaacgacggagactgcgtctgccttcgcttccgcctcgtagccccgggaaccggaaatccgtctgccccgggtcacgtgcttaggagccatattgtcgctagtggccgctggggctgggaggggtgtgctagagaggcgcagcttctctgggcgtggtttttatcctgggggaaggatcggtggaatgtgaggggaggtggaggagatggcggcgacagcccggtgaagatggcgccagcggtcaagagcgaggtcagcggggctgcgagcactatgacagaggatgtctcctaaaggcacctctgctgtgacaagctttatacttgccgcttgtgtcatgataacaatgaagatcatcaacctagatcgctttaaagtgaaggaagtgcagtgcataaactgtgaaaaaattcaacatgcccaacagacttgtgaagaatgtagcacattgtttggagaatattattgcgatatatgccatttgtttgacaaagataagaagcagtatcactgtgaaaactgtgggaatttgtaggaatttggtccaaaggaaggttttttcccttgtttggaaatgttaacttatggcctagctatgaatcttcaaggaagacacaagtgtattgaaaatgtgtcccgacagaattgtccaatatgtttggaggacattcacacatcccgtgttgttgctcatgtcttgccatgtggacatcttttacatagaacgtgttatgaagaaatgttgaaagaaggctacagatgtccattatgtatgcactctgctttagatatgaccaggtattggagacagctggatgatgaagtagcacagactcctatgccatcagaatatcagaacatgactgtggatattctctgcaatgactgtaatggacgatccactgttcagtttcatatattaggcatgaaatgtaagatttgtgaatcctataatactgctcaagctggaggacgtagaatttcactggatcagcaatgacgagcctacacagtactggagaacttggcattttctgatatagaaaaaggctttccttggtatcgtgttatccatgtgtcgtcatctatgcattagagttgatgtgttttgtactagtgtccccagccataaaatccatattacaagtacgtaaggattccagggtctcttgatagactttatcatagctctatattgaatgaaagcccactgtgcttgtgttttgattggaaattcctttagtgtcagttttttggaagccaatgatgtttgccactgatacattcatagaagtgtattatattttcatgaagctttgctttaagtgaccactacgcgttcatttcatttctatttcttgatatgtactgcacttaattttcgagtagtagtcttgactttttaagggctgtgttatattaagttctcccttactgttaaaacctaattaaatatgctttagaatttttctaagacagtcctctggatcctactaaatgtgaattttgatgtaataactgctaataaaattatattgaaacagtgctttatagaaagttttttccaaagttttctatgtttggctcaattagggcagtatcatcagttctataatgtaaaagaaattttctttcttttgaggtattccataaaagtagttgggaaaattattatgtaaaataataagactcttccaaagccttaataaaaacatcaacattgaaaacaaaaaaaa

SEQ ID NO: 113175 - DNA, 1481 bp, Homo sapiens
tggcacgtggggattcttccatgcagcagcatggtcagccacagcagaggatgagccagttttcccaaggccaagagggcctcaatcagggtaaatccttttattgccacctcaggacctggccacttgtcccacgtgccccagcagagtcccagcatggcaccttccttccgtcactggttcagcaagttccatccacccacccctctactgctctccattggagaatccgttgcccacagtcccaagattctccccgaatcctccccaacaaggggctgttaggccgcaaacccttaactttagttctcggagccagacagtcccctctcctactataaacaactcagggccagtattctcgatatccttacagtaacctaaatcagggattagttaccaatacagggatgaatcaaaatttaggccttacaaataatactccaatgaatcagtccgtaccaagataccccaatgctgtaggattcccatcaaacagtggtcaaggactaatgcaccagcagcccatccaccccagtggctcacttaaccaaatgaacacacaaactatgcatccttcacagccctcagggaacttatgcctctccacctcccatgtcacccatgaaagcaatgagtaatccagcaggcactcctcctccacaagtcaggccgggaagtgctgggataccaatggaagttggcagttatccaaatatgccccatcctcagccatctcaccatgccccctggtgccatgggaatcggacagaggaatattgggccccagaaacatgcagcagtctcgtccatttataggcatgtccctcgggcacccaagggaattgacttgggcacatgaggccaaaatggttgtccctggtgttggccttggagacccacaagcaatccaggaacgacttgatacctggccaacaacatcctgggtcaacagccatcttttcagcagttgccaacctgtcctccactgcagcctcacccgggcttgcaccaccagtcttcacctcccacaccctatcaccagccttgggcacagctctcacccatcaccccagaacaccccgcagaaagtgcctgtgcatcagcattccccgtcggagccctttctagagaaaccagtgccggatatgactcaggttagtggaccgaatgctcagctagtgaagagtgatgattacctgccatcaatagaacagcagccacaacaaaagaagaagaaaaagaaaaacaaccacattgtagcagaggatcccagtaaaggttttggtaaagatgacttccctggtggggtagataaccaagaactaaataggaactcactggatgggtcccaagaagaaaaaaagaaaaagaaaaggtcaaaggcaaaaaaagacccgaaggaaccgaaagaacccaaggagaaaaaagagcccaaggaacccaagaccccgaaagcccctaagattcccaaagagcca

SEQ ID NO: 113176 - DNA, 9209 bp, Homo sapiens
  misc_feature (1)...(9209): n = a,t,c or g
tttcgtggcgcagtcggagcccgttgcggcccctgaggaagcgaggaggcgtcggcgtcggctgaggcgggcggaccggcgaggcgaggcggcggccccaggcccgagggactcgggagctcgagcagcggcggcggcaagacctctccccctcggaggcggcgggcggaggcggcgggagcggtggtggccccccccgggccacggggccattgtaccaccggatcgggctgccgacgcccngggggccgcgggcaccacgggctacgtcaggcgcaacctgtcccttggtgcggggccgccggggtgagcggcctgactacaagggagaggaggaactgcggccgcctgcaggctgccctggtgaagcggcctaatcctgacatcctggaccaacgagcgccaagccgccccgtcgagctgcgaatgcctcgagcttgagggaaatgatggaagagccagggtacgaagaacagcaaattcaaggaaaagtggcgacccttccaactcatgttgctggagaaggatgtgaaccctgggggcaaggaggagaccccagggcagaggccagcggtcacggagactcaccagttggcagaattaaatgagaagaagaatgaaagactccgtgctgcctttggcatcagtgattcttacgtagatggcagctcttttgatcctcagcgtcgtgcccgagaagctaaacaaccagctcctgagcctcccaaaccttacagccttgttcgggagtctagcagttctcgctcaccaaccccaaagcagaagaagaagaaaaagaagaaagatagaggacgcaggtcagagagcagctctcctcgacgggagagaaagaaaagctcaaagaagaagaagcacaggtcagaatctgagtccaagaaacgtaagcataggtctcccactccaaagagcaaacgtaaatctaaggacaaaaagcgaaagcggtctcgaagtacaacaccagcccccaagagccgccgggcccaccgttcaacttctgctgactctgcttcctcctccgatacttcccgcagtcggtctcgaagtgctgcagctaaaactcatacaactgccttggctgggcgaagtccttcccctgcttcagggcgacgcggggagggagatgcgccttttcagtgaaccaggtactaccagcacacaacggcctagtagcccggagactgctacgaaacagcctagcagcccttatgaagacaaagataaagacaagaaggagaactctgcaactcgttctagcccctctccggaaaggagcagcacaggcccagatccacctgctgccactccgctccttgctgagcgacatggcggctccccacaaccccttgcatccacccccttaagcctggacccagagaaccccccatctgaagcctctccaactcgggaccgttcaccacctaagtctcccgagaaacttccccagtcttcttcctcagagagcagcccaccattcccttaacctaccaaagtttctcggcatgccagctcttccccagaaagtcctaaacctgctccagctccaaggtcccaccgagagatttcttcttctccccacatctaagaatcgctcacatggccgagcaaaacgggataaatcacattctcataccccctcccgtaggatggggaggtcccgtagccctgccaccgataagagagggcggatctcggtctcgaacccctaccaagagaggtacattctcgatcccgatctccccagtggcataggtccaggtctgcacagaggtggggaagatctagaagcccccagcgacgtggccgctctaggtctcctcagcgaccaggctggtctaggagcagaaatacccagagaagaggcaggtctaggtcagcaaggcgagggaggtcccactctagatccccagccactaggggtagatctcgttctagaacaccagcccgccggggcaggtcccgctctagaacacctgccaggcggagatcacgatccagaactcccaccaggagtaggtctcggtctagaacaccagcccggaggggcaggtctcggtctagaacacctgctaggcgcagatctaggtcccgatcaccagtacgacgcaggtctcgtagtatatcaccagccaggagaagtggcaggtcacgctctagaaccccagctagacgtggccgctcacgctccagaaccccagccagacgtggccgctcacgctctagaaccccagctagacgcagtggtcgctcgcgctccagaacaccagccaggagagggaggtctcggtctaggacaccaagacgaggaagatcccgcagtagaagtttagttagacgtggaagatctcactctagaacacctcaaagaagaggcagatctgtctcatcttcagagcggaaaaacaaatccagaacatctcaaagaagaagcaggtccaattcaagcccagaaatgaagaaatctcgcatttcttcaaggcggagcagagtctctctcttcaccacggtccaaagcaaaatctcgcttgtctttgaggcgcagcctttcagggtcttccccatgccctaagcaaaagtcacagacaccacccaggcgcagtcgctctggatcctcccaaactaaagctaaatctagaacgccacccagacgcagtgcttccagttcttctccgccacctaaacagaaatctaagacaccatcaagacaaagtcattccagttcatctcctcatcctaaagtgaaatctggaacaccaccgaggcaagggtccataacaaagtccccaggccaatgagcaatctgtaacgccacagagacggagctgttttgaatcatcacctgaccctgagttgaaatctaggaccccttctagacatagctgctcagggtcctctcctcctagagtgaaatctagcacacctcccagacagagcccatctaggtcatcatctccacaacccaaagtgaaggcaataatatcaccaagacaaagaagccattctggctcctcttctccaagtcctagtagggtgacgtcgagaacaacatccacggcgaagcagatcagtatctccctgctccaatgtggaatccagattgttgccaagatacagtcattctgggtcctcctcaccagataccaaagtgaaacctgaaacaccgccaagacaaagtcactcagggtctatttcaccataccccaaagtaaaggcccaaactccaccggggccaagtctttctggatcaaagtcaccatgtccccaagagaagtctaaagactcactagttcaaagttgccctggatccctctctctctgtgcaggagtaaaatctagcacaccaccaggcgagagctattttggtgtctcatctctgcaactgaaaggacaatctcaaacttcaccagaccacagatctgatacttcaagtccagaagtgagacagagtcattcagaatcaccatctctgcagagcaaatctcaaacatcacctaagggaggtcggtccaggtcttcatctccagtcacttagcttggcatccagatctccaataagacaagatagaggtgagttctcagcgagtcctatgttgaaatctggaatgtctcctgagcagagcaggttccagtctgactcttcttcatatcctacagtggactcgaattctctcttggggcagagtagattggagactgctgaatcaaaagagaaaatggccttaccccctcaggaggatgctactgcatcacctcctagacagaaagacaaatttagtccctttccagtacaggataggcctgagtcttcactggtattcaaagacacacttagaaccccgccaagggaaagaagtggtgctgggtcatctccagaaacaaaagagcaaaatagtgcattgcctacgtcaagccaagatgaagagttaatggaggtggtagagaagtctgaagaacccgcaggccaaatcctgtctcatttgtcttcagaacttaaagaaatgtccacaagtaactttgaatcatctcctgaagtagaagaaaggcctgctgtgtctttgactcttgatcagagccagtcacaggcttctttggaagcagtagaagtcccttcaatggcctcatcttggggtgggccacatttttctccagaacataaagaactgtctaactccccactcagggagaacagctttggatcacctttagaatttagaaactcaggcccacttggtacagaaatgaatactggattttcttctgaggttaaagaagatttgaatggaccgtttcttaatcagctggaaacagatccatctctagacatgaaagaacaatcgacaagatcctctggacacagcagttctgagttatccccagatgcagtggaaaaggcagggatgtcttcaaatcagagcatctcttcacctgtgcttgatgctgtacccagaacaccctcgagagaaagaagtagttctgcatcttctcctgaaatgaaagatggtttacccagaactccatcaaggagaagcaggtctgggtcttctccaggacttagagatgggtctgggactccctcgaggcacagcctgtctgggtcctctcctggaatgaaagatatacctagaacgccatttagagggagaagcgaatgtgattcttccccagaaaccgaaagctttgcctcagactcctaggccgaggagtcgttctccatcatccccagagctcaacaacaagtgtcttaccccccagagagaaagaagcgggtcagaatcatcagttgatcagaaaactgtggctcggactcccctggggcagagaagtcgttcgggatcctctcaagaacttgatgtgaaacccagtgcatcccctcaggaaagaagtgagtcagactcttctccagattctaaagccaagacacgaaccccacttcggcagaggagtcggtctggatcatctccagaggttgacagcaaatctcgactatccttttggcgcagtaggtctggttcctcccctgaagtgaaagataagccaagagcagcacccagggcacagagtggttctgattcctctcctgaacctaaagctccagcccctcgggcccttcccagacgaagcagatcaggttcatcaagcaaaggcagaggcccttctcctgaaggaagcagcagtaccgagtcctctcctgaacatccgcccaaatccagaactgctcgcagaggttccaggtcatcaccagagcccaagaccaagtctcgtacaccacctcgacgtcgcagctctcgatcatctccggagctaacaaggaaggccagactgtcccgtagaagccgctctgcctcatcctcaccagaaactcgctctagaactcccccaaggcaccggagaagtccctcagtgtcttccccggagccagccgaaaaatcgaggtcttcacgccgacggcgctcagcttcatctccacgcactaagacaacctcaaggagaggccgctctccttcgccaaagcctcgtggactccagaggtcccgttcccgctcaaggagagagaaaacaagaacaacccgacgtcgagataggtctggatcttctcagtcgacctctcggcgaagacagcggagccggtcaaggtcgcgggttactcggcggcggaggggaggctctggttatcactcaaggtcacctgcccggcaggaaagttcccggacctcctctcgacgccgaagaggccgctctcggacacccccaaccagtcggaagcgttctcgctcacgcacatcaccagccccgtggaaacgctctagatctcgagcctctccagccactcaccggcgatccaggtccagaacccccctgataagccgacgtaggtccagatctcgaacttcaccagtcagccggagacggtcaaggtccaggacttcagtgactcgacgaagatcccggtcaagagcatccccagtgagcagaaggcgatccagatccagaacgccaccagtaacccgccgtcgttcaaggtctagaacgccaacaacacgccgccgctcccgttctagaactccaccagtgactcgcagaaggtccagatccaggactccaccagtaaccaggaggcgatctcgaagcagaacttcgcctatcactcgcagaagatcaagatccggaacatctctcggtcacccgaaggagatctcgatctcgcacatctccagtaactcgaagaaggtcccgctctcgaacctcaccagtgacacgccgccgctctaggtcccggacaccttcagctaatccggggccgctctagatctcgaacgccactgttaccacgcaaacgttctcgaagtcgctcaccacttgctatcccgccgccgctccagatcccgtactccacgaacagctcggggtaaacggtccttaacaagatctcctccagccatccgcaggcgttctgcatctggaagtaattctgatcgttcacgatctgctactcctccagcaacaagaaatcattctggttcacggacacctccagtagcactcaacagttccagaatgcctctgcttcagtcgtcctagcatgtccccaacacctcttgatcgctgcagatcacctggaatgcttgaaccccttggcagctctagaacacccatgtctgtcctgcagcaagccggcggctccatgatggatggtccaggtccccgaatacctgaccaccagagaacatctgtgccagaaaatcatgctcagtccaggattgcacttgccctgacagctatcagtcttggcaccgctcggcctcctccgtccatgtctgctgctggccttgctgcaagaatgtcccaggttccagccccggtgcctctcatgagtctcagaaccgcaccagcagccaaccttgccagcaggattcctgcagcctctgcggcagccatgaacctagccagcgccaggacacctgccattccaacagcagtgaacctggctgactctcgaacgccagctgcagcagcggccatgaacttggccagccccagaacagcggtggcaactttcggctgtgaacctgggctgaccctcgcactcccacagccccagctgtgaacctagcaggggccagaaccccagcttgccttggcagctctgagtctcacaggctctggcacaccaccaactgctgcaaactatccctccagctccagaacaccacaggctccagcctctgcaaacctggtgggtcctcggtctgcacatgccacagctcctgtgaatattgccggctccagaaccgccgcagccttggcccccgcgagcctcaccagtgctaggatggctccagcattgtctggtgcaaacctcaccagccccagggtgcccctttctgcctacgagcgtgtcattggcagaacctcaccaccgctccttgaccgagctaggtccagaacaccaccgtctgccccaagccaatctaggatgacctctgaaacgggctccctcccccttcctctagaatgggccaggctccttcacagtctcttctccctccagcacaggatcagccgaggtctcctgtgccttctgctttttcagaccaatcccgttgtttgattgcccagaccacccctgtagcagggtctcagtccctttcctctggggcagtggcaacgaccacgtcctctgctggtgatcacaatggcatgctctctgtccctgcccctggggtgccccactctgatgtgggggagccacctgcctctactggggcccagcagccttctgcattagccgccctgcagccagcaaaggagcggcggagttcctcctcgtcgtcgtcgtcctctagctcctcctcttcttcatcatcgtcgtcgtcgtcgtcctcctcctctggctccagttctagtgactcagagggctctagctcacctgtgcaacctgaggtggcactcgaagagggtccccagccccaccccagccccaaaggagggtgttcgagagggacgtcctccggagccaaccccagccaaacggcaagaggcgctctagcagttccagttccagctcctcctcttcatcttcctcctcctcctcctcctcctcttcttcctcctcctcttcctcttcttcttcttcctcctcatcttcctcctcctcgtcgtcttcctccccttcccctgctaagcctgggccctcaggccttgcccagacctgcaagccccaagaaggccaccccctggcgagcggaggtcccgcagcccccggaagccaataaactccctcagggactctcggtccctcagcatactcgcctgtggagcgtcgccgtgcctcgccccatccctcaccacgggaccagcagagcagcagcagtgagcggggttcccggagaggccagcgaggggacagccgctcccccagccacaagcgcaggagggagacacctagccctcggtccatgagacaccggtcctccaggtctccataaattgtctttgggggattccaccacacccaatgctctggagccacaaggagtgtcccttcttccccagcagaagccgtgggagggtccttgtcttgctctcctttgaaccttgggcagccctttggatggagggctccctttccctccccttttttttttttctttgttcctgtcgaaatgaaaagttaatctccgtgaagttcttccctggttcatgtgttcctggggggtttggggtgggagggaatgccagatggggagttgggggaggggcaggatacagttcatggataccccagccctggagtcagggcccagggaaggcatggcccccacttgttattccagaagttcccccagggggtgattgtgatgggggtttgggactgggaggttgtataaggttgttcttggaaggaaaggggcaaggagttggaattagttggtccccactgtcccccatgaggttgtgaaccccctccccccaacttttcatgtttcttaaagggcattttggtttttttaaaatctgtacagcaacagcaactttttctgtcaaataaaaatgagaaatgccctacccaaaaaaactaaaaataaaatgggggggggcctttttaaaaaattctttggggggcccaaatttaacgggggttggaaaaaaatattttttttctttatggggggggatattaaagcctcttg

SEQ ID NO: 113177 - DNA, 1787 bp, Homo sapiens
tcattacgccaagcttggcacgaggggcggcggactcggcttgttgtgttgctgcctgagtgccggatactgtcctgctgctgccgcagatcctgccagctgtctcgacaatgtcttcccacctagtcgagccgccgacgcccctgacacaacaacaacaacaactgcgaggaaaatgagcagtctctgcccccgccgggccggcctcaacagttcctgggtggagctacccatgaacagcagcaatggcaatgataatggcaatgggaaaaatggggggctggaccacgtaccatcctcatcctccatccacaatgggagacatgggagaagattctttttggatggcacaacatgaatcaggacagagtagttccagaggcagtttctcacttgtggacagccctttcgccacaagaaggatggggcagattcatgttttgattgtgggaaatggcacacccagtcaggggacccttaggtttttcagtttcaggaaggaaggaagttgttagaaaggagagaagggaagtccgaaggcttttgaaggaaaaagttgccggacttgggtatcagtctgggtccagttagaccccgaaaacattccaccccaagggagtttccactttcaggacacccttaaacgtttctgtgtccttaaagcatgagggaaaagtggagccatggaagaaaggggggtatttttctccgcagaatttctggaaggtggtttcattcccatctctcttcctttcctcatgttttgggctttggggctaggccatctatattggaaagcgactgagcacaccctctggccaggcacctactgagggaaaggaaaagcccctggaaatgcgtgtgacctgtgaagtggaatataatcacagtagcttatttggaccttaggcccatggtaagcatgacccaacctacccaccctgttttttacatatcccaattcccagtaactctcaaattccaataattttaattcaaaaccctgttgggggcattttacctaacccttatacccctttttggccctgaagacattttagaatttccctaacagagtttactgttggtttagaaatttggcaaggggcttccttttcccgcaaatgcccacccagcagattataattttgtccagcaatgcctattatctctaattaggtgccaccagactagacctgtatctattcatggtataaattttactcttgcaacataactaccatctctctcttaaaacgagatcaggtttgcaaatgatgtaaaagaagctttattgtctagttgtttttttttcccccaagacaaaggcaagtttcccctaagtttgagttgatagttattaaaaagaaaacaaaacaaaaaaaaaaaggcaaggcgcaacaaaaaaatatcctgggcaataaaaaaaatattttaaaccagctttggagccacttttttgtctaagcctcctaatagcgtcttttaatttataggaggcaaactgtataaatgataggtattgaaatagaataagaagtaaaatacttcagcagattttcatactagaatgtggaaaggctgccttttttatggggaaaaatctttctttctgataaggaacgtctccaggcttagaaatatatgaaattgctttttgagatttttgcgtgtgtgtttgatattttttacgataattagctgcatgtgaatttttcatgaccttctttacattttttattttttatttctttatttttttttctctaagaagaggctttggaatg

SEQ ID NO: 113178 - DNA, 2438 bp, Homo sapiens
  misc_feature (1)...(2438): n = a,t,c or g
ttggtaccgagctcggatccactagtaacggccgccagtgtgctggaattcggcttctggttcggcccacctctgaaggttccagatcgatagtgaattcgtggttttttccgcggtagtcagggcagtttctaccgcaggcttaaggaggcttcgggctcctgggatttctgtccgcgctcctggccctcgtctcttcgcgccagagcaggttcgcaaactcctcagacccttctgctcccggccgccgctttccgccggggcgagacccccaggttcaaaatgagcctgtttggaacaacctcaggtttttggaaccagtgggaccagcatggtttggcagtgcaacttacagacaatcacaatcccattgaaggatattgaaagtaacattcattttccttgatggatagcattggtttgttcttgtctttttagcccaccaaccttgccggggaacttttcttattgcaggatcatggggctaatgatgttcgctgctggggaagttcaagacagtggacagaccattccaaaacgcccagcagatgcacactgggcctgtgctttgatgtctgctgggagttgacggtgggagcaaagtttttacgggcatcgtgtggttaaaactgccaaaatgtggggacctcaggcagtaaccaaggcgattacagatcgcacagcatggatgctcctgtttaaaaccatccattggatcaaagctccaaactacagctgtgtgatgactgggagctgggataagactttaaagttttgggatactcgatcgtcaaatcctatgatggttttgcaactcccctgaaaggtgttactgtgctgacgtgatataccccatggctgtggtggcaactgcaggagaggggcctgattgttcttattcagctaggaggattcaaccttctgaattcaggaggatagaatctccactgaaacatcagcatcggtgtgtggctattttttaaagacaaacagaacaagcctattnggtttttgccctggggaagtatcgaggggagagttgctattcactatatcaaccccccgaaccccgccaaagataacttcacctttaaaatgtcatcgatctaatggaaccaacacttcagctccctcaggacatttatgcggtaaatggaatccgcgttcccatcctgttcatgggcaccctgcaaactgtggggatcttgatggtagattcagcttttgtggacatagtatgccagaacaaaacttaaaaactttcgggaacagttagatcagccccatcttcagcttgctgttttcaatcaccaatggaaaacatattttgccatacgctttccagctacgactgggtcaaaagggaccatgaatttttataatcccccagaaaaaaaaatttacatttttccctgcgtaaatgcaggccgaagagctaaaagccccaggaaataaggaagtagtgggcttggagactctgggctcagaccagaagttgtttcctctcccactctggcctcatctctgtacgaatttggggtccccagccttgttggggttgtcagcccatggacgatggagtttcaaccccctggaagaaaaacgatgtcattgttcaagcagctgagagccccaggcgtcccgcgggcgacttgccggtcttctccattccactggcctggttgcagaagttttttctggtaaacctaaaggggggttgaaggttattggtagacgttagattgcgggcaccgcccagggatttttgcaccgcttcagtgtacgtgttagcctttattcgaaaatacagcacggggctcacagacgcttttccaatattctctaacacgtacactgaagcgctgcaaaatccctggcggtgccgcaatctaacgtctacaataacctcaacccccttagttacagaaaaactctgcaacaggcagtggaatggagagacggcaagtcgccgcggacgcctgggctctcagctgctgaacaatgacatcgttttctccaggggttgaaatccatgtccattgtgattgaaacagcaagctgagatgggctgatctaactgttccgaagtttttagttttgttctggcatctttgtcccagaagctgaatctaccatcagatcccacagttgcaagggtgccatgaacaggatggaacgcgattccatttaccgcataaatgtcctgaggagctgaagtgttggttccattagatcgatgacatttaaaggtgaagttatctttggcgctgaaagacaaaggttcatgtaagtcttcctttgttaaaaaaagtccagtgaaatctgcaagctgacagagtcacacttacgggttcggggggttgatatagtgaatagcaactctcccctcgatacttcccagggcaaaaccagtaggcttgttctgtttgtctttaaaa

SEQ ID NO: 113179 - DNA, 1381 bp, Homo sapiens
ttttttttttttcttttctttttactttttttttttgcccgcccctggcaaagctcttggcggggagggaaggggagagggaaatataaccctgaggtggggatggttcagctcccaaccccggaacccctggtgtgtacagggtcaggcagacacatgtggcttgggcggctgggcttggggaggggacagccgccacttgaccagcagagcgtggaagttcggtgcgttttcagtgcctgcctgaaagcttggggacaggagggctgtccacaaggtggtgccccccggcggccgcttggccgcttcctcctgtgggggcccgcatgaccctctgctcgggctttgggaagaaatggagcctaccaggttgctggggttgcaaccccgctgcccggttgtggaaccccaagtctagatttaaggcacccctttgctttctgtcttttattttttatttattttgagacagagtttcgctcttgttgcccaggctggagtgcaatggtgcgatcttggctcaccgcaacctctgtctcccgggttcaagcgattctcctgcctcagcctcccaagtagctgggattacaggagcccgacaccatgcctggctaattttttatatttttaaagtagagacagggttttgccatgttggccagagctggtctcgaactcccaacctcagggtgatccaccttgtgttggcctccccaaagtgctggggattacaggcgtgagccatcacgcccggccccaaccatttctgtagtgggtatcttttatcctagaaaaatttagaacatacagaaataataaaagccattactgtgtaccagtaaagcccactgatttagtatttttgcgacaagtttaggaatacgttttgtactgagacaatctatgtatattttgcatatcaagtatgtgttagacttcaactgtaatcaagtaactggttttcagattcactaattctttttttttttttgagacagagttttgctcttgttgcccaggctggagtgcaatggtgtgatcttggctgggtgacagagtgggattctgtctcaaaaataaataaataaataaaaataaataaaaaaattaaagggacaagtcagcaagggacagaggggaggtaaggactgcaaacaggaagatgaagtcaaagtctacagaaggagtcattcaacccccaagtccccacttccctccttgtagagggcagcacccctcaccacccccattgagagagattgaaccagggggctcagaaagtggggtcaccagaccacagtgggagggttgctggattgcaaagagggtcagaggtgaaagtttccatactgaaaggtggcaccccagttcccttccctcc

SEQ ID NO: 113180 - DNA, 920 bp, Homo sapiens
caagaacgtcccagtgcccttggctcctttcggagtgtgaccccgtgcttgcacgggacacgttacccagctcgggtgagaagggtatcttccgggaacctcgcctttaatagcacaacgagcgcagagtccactggatctgcgagaagaaaccgcgctaactagtttgtccctacggccgcctcgtagtcactgccgcggcgccttgagtctccgggccgccttgccatggctgcccgtggtgtcatcgctccagttggcgagagttttgtcgctacgctgaggtaccttgcagcccctcggccaaacggccagacgccgacgtcgaccagcagagactggtaagaagtttgatagctgtaggtcagggtgttgcagctcttgcatttgcagggtcgctacgcattaacggatctggaaacctctagaaacaagttatcacagaaactgccaaaggaagatttcaaactcctaggttttcatcctactgataaggaggatccttaacataatatgacttaggcgagaagctgcgtcttattttaggtgtaagcccagtctgctggcaaggctaagattagaacaagctcataggagcagtcatgattttggaatcaccccagataaagggtggatctccttacgtagcagccaaaataaatgaagcaaaagcctttgctagaaacaaccaccaaacgattgatgcttaaggaccacactgaaggaaaaaaaaacgaggggacttcaaaaaaaaaaaaaagccctgcaaaatattctaaaacatggtccttcttaattttctatatgggatttgaccacagtcttatcttccgaccattaagctgtataacgaataaaatgttaatagtcttgctttttattatcttttaaagatctccttaaattctaaaaaaaaaaaa

SEQ ID NO: 113181 - DNA, 1802 bp, Homo sapiens
  misc_feature (1)...(1802): n = a,t,c or g
aaaaaatattttctctaatagggaaaagattgtggtttcattctgtattttgtttttgtcttaaaaagtggaaaaatagcctgcctcttctctactctagggaaaaaccagcgtgtgactactcccccaggtggttatggagagggtgtccggtccctgtcccagtgccgagaaggaagcctcccacgactgcccggcagggtcctagaaattccccaccctgaaagccctgagctttctgctatcaaagaggttttaaaaaaatcccatttaaaaaaaatcccttacctcggtgccttcctctttttatttagttccttgagttgattcagctctgcaagaattgaagcaggactaaatgtctagttgtaacaccatgattaaccacttcagctgacttttctgtccgagctttgaaaattcagtggtgttagtggttacccagttagctctcaagttatcagggtattccagagtggggatatgatttaaatcagccgtgtaaccatggacccaaaatttaccagaccacaaaacttttctaatactctaccctcttaggaaaaaccaccaccatcaccagacaggtgcgaaaggatgaaagtgaccatgttttgtttacggttttccaggtttaagctgttactgtcttcagtaagccgtgattttcattgctgggcttgtctgtagattttaggaccctattggctgcttgagggcaactcatctttagggttnggcaaaaagggcagggtgggccggggcgcggtgggcttcacgcctgttaatcctaggcactttggggaggccaagggggggaggattgcttgagctcagggagttttgagaccaacctgggtaacatagttgagacaccatctctattatgaacaataacagttaagaaaaaaaaaggcaggcaggcggttatggtggttccctcccatcccaccacataaagtttctgagacttgagaacagcaaaatgctgttaaagggaaatattaagaatgagaatctgcagtaagggtgattctgtgcccacagttcttcaattcttgtataccgttttacccacatgtggtgttaccaaagccgggcagaaccatgctagcggaagatgtgaaatccagatagctcattattgccaagagcttaggcagctttgatctccaaattgttattgctttcatttttattgtaatggaattgctttgttttgtttttttgtttttgtattgaagagggttgttttccctttatttttcataagctaatgtaaatgaagaaaaaatgtcttctctggggctgtagggctgggcttcagccgtacacaggtatacatcctaagctctctatgttctctaatctgtggtgactgaacatgtgtctcaatgcacggggcatttctacctgtgtttctgcagcacccccactgccttgagtccaccagcagtgctgttatttgcctaacacctgtagccatctgccacgcagccagacgtgaaacgctgagacagagaccatttaggttaaatacgacagcttatcctgctgggctgtngntggggaaagtaaaaaataatgctggttcaaggcctaaagtaaaatgatcaataatgtttgtaggcattaatgaaattattttcaaggaatgtgtccagggggtaggcactgggctatgttggacggagggcctttnggtaacttcaggaggagctctttggcccttgatgggggactttgccctttacggttttcttttattcagggtcntgagtttcacacggngcctttgggaa

SEQ ID NO: 113182 - DNA, 2797 bp, Homo sapiens
ctctcaagatcgtgtcctcgaccactcttatcccttaattaaacacacacaaactggactatgggggaggctccgatcatgcctacaaacacaaactaacctgtcaggggcacagccgactccgcctccactcgcttacttcccagccccctccgggagtctgcctgtcagggacaccccttcaccccgcctggagggacttcccggtaggctcaggatccccctccctgctctcccctcccccatcttcaccactgctctcccagaggtccaggtccgggagatgacagtggctcccagaaagcccaggattcaatcgctgagagagtgcttaggcccgaatgccggcccaaatcgttctactcaccgtgtcggaggccgagagcgatgagagtacagggaagtgaggaagagggggtggccgccaggctcctccgcttccctgggtccaccgcggatccctcccgcttgtcaggaggcgccacggtctcaggacgggcgcttggagcggcccaggagcgtgtgtcggtcgcctaatctggagaactagtcctcgactcacgagatgaagttttaccatgttggccaggctggtctcgaattcctgacctcaagtgatctgcccaccttgacctcccaaagtgctgggattacagtgcaaggatgatgctgaaaggaataacaaggcttatctctaggatccataagttggaccctgggcgtttttttacacatgggggacccaggctcgccaaagcattgctgctcacctagataacccaggttcccagttgagaagtccgagaagctatttccccgcaccaaatgaagaatgaccccggcccaagcatgggggatcaagcacgagggtcaagcactacaacatctccccccaaggatttgggaggattgttttttccccatgggccttccctccctcgcttttgtgaatgcaggtggaagacatttcagtgaagctttgccttgatgggtaagggaaaccagccctaggaacttcttgcatttacctggaaaaacaccattttttgtttattccagctattacggtatcttctgttatggggagagaaggggaacagggaaaaaccctaaagtctttgccatgttattcatttctgtggcaaaacaggactgggctgatactacatattccagatgctcatctttgggtgaaaaaattgtcgggatcttctgcagtccagctacaacaaacagcgctttgatcaacctttagaggcttcaacctggctgaaggaatttcaaaactacaaatggagcgcttcctggaaccagataaaagttccaagagaagtatgtcctgggaataagagaggaagcactgagaaagggagtcttctgggagaagtggtttgacagggcataacacggttgaaggaacgcacaaaatgcagttggaaattgtgctgaaagagctaaacgaggcaaagttccttggggtatggtttcacctcctacgtggccgtggatggaatcaatgcccctctgggggaagaaccactctgaaaagagaagataaaagcccgatttgcccccgagggaattagcactttgtttcacaactttgagggaaattgattgaaaattgatttggcatgggaggcgcccattgtgtccggctttggagcccgattgggttctctctttaaagccccggaaaagcctatctgcccccagggagttgcctgggattacaggaaggatttgatgcccctggatcccctttattccccatcctgggttttccaacctataaccccaaagggaattttgaaaagttgtattccagtatttatttggaaaaacaattggccttccaacatgaagaaaagcctccctacagaaagaaggggaaaaaaaggagctgcctgttcccctaagtaaaacgcgaacccccctcgcctgcctggaagcggcactgtgccctaccctcctaagcccaagatccacagcattgtgagggaagacagtggacatcctgcctttatgcctggaccccagtaagattgagggaagtcgggcagttacacagggaaggaggagcccaggcccttggtaccctatggggattttggacaggactgccagttgggttctgggacctggcatttaaaatgggttttcactggtgaatgcggtgacaataagaatattcccttgttcctaaaactttatatcagtttattggatgtggtttttcacattttaaggtaattatggctcttttcctaaaaaataaaatatctttctaaagtgttgtgttagattaataatatggaaggagtctttagattggccaaattgcatttctctgatattcctcttgttgcaggtcagaagagatcaatttctaccagaaatttcccagtggttcatgttgaggcttttatggaaattcagcatgtccaaaattcacagctggctgggccacagtggctcatgcctgtaatcccaagcactttgggaagcccaaggcgggcagactgcttgagttcaggagtttgcaaaccagcctgggcaacatggtgaaaacctgtctctactaaaaatacaaaaattagccgggcacggtgtgcatgcgcctgtagtccaagctacttgggaggctgaggcaggagaattgcttcaacttgggaggcggatgttgcagtgagccaaaattgcaccactgcactccagcctgggcagcagagcaagactccgtctcaaaataaataaataaataaataaataaataaataaataaataaataataaa

SEQ ID NO: 113183 - DNA, 1523 bp, Homo sapiens
  misc_feature (1)...(1523): n = a,t,c or g
cggacgcgtgggcagcgtcggaagtggaagctgaacctgattgcagagttggagtccagagttctggctgagcctgtccctctgccagccgagtgagtgcatggctgcccccctagggcctgttttacttgagttcaacagcagagccctggcttctgctggccagcttgccccttttggtgggacttttagtcactgccttgacctcaggtgggagctctcattatcagtcatctgttgggcttgctgttgacacctgactgcccttgtgaagctacctgagaccgcctcctgacatatggaggaaagtcttattttgagtcctgggtgtcacccttttttcaggtatagtaaacttatcctccacagggcccaaggccctgtggctgagggcagataatgtaggtctcaccgtgaggtggtcgtttgaaaaagtgccctgaatgatttgtctgctctctccctagaatatgccctacagagataggtatattcagccacattttccattcagggtagcaaacagtatgccagatttggcttgcagatggggttttggcccacatattttttaaaatttcacataaaatattcattgaggagtccagatttttagcctctcttgtaaagttggactctggcagtgcagatccacattcccacatggcatcaaagttcccctttgaagagcacgccctttgcctttctccttcacttgtctggccctggtgggctgtgtagtctgccaccctcaggggattcgttttccagccaaaccttgctcggccactgttcttatctccatgcagcccaatggaactgaaaaatctggacgtataggccacgtgaaggtcagggggtgctttgaccattccaaggagctgtatatgatgcccccgaaccatgggtggaccttgtcggggaggcccgggagggcggcctcatctcctcctcaactcagagtggggcctatgtggtcactcccttccactgcacccgaccttgggagtcaccatcctggtaaaatagaggggttcgttccccaggaagaaagtgaatccctgaaaccccggcagaaaggcccagattgagggagaagtggaccctcattgggatggtgaggcttgacagtaaaccagggcagcctttttgtccctgagaacaatccagaaaggaaccactggccttatcgatacctggatagctatggccaagaatcacagggngcagagcccatcttcattgatgccaacttccagagcacagtccctgggaggacccattggagggcaaaccagagttactctgagggaacgagcatctgcagtacatcgtgacctggtatggactctctgcagctacgatcctacctgtggtttaagaaattcctacgtgggacaacttggtgtgttgacagatcagctgctgaagccctgtccctggataattgcagtatttcaagactgcctttatgctggatcatgtgctactgggtataaagttctggccttctaccttaaaaa

SEQ ID NO: 113184 - DNA, 364 bp, Homo sapiens
aactgcctgactgcatgctcgcctcactggggggagctccagcatcccctttgctcgaaatggaccccaactgctcttgcgccaatggtggctccttgcacatgcgccggcttctgcaagtgcaaagagtgcaaatgcaccttctgcaagaagagctgctgttcctgctgccccgaggactgtgccaagagtgcccaggtctgcgtatgcaaaggggcatatggagaagtgcagatgctgtgcctgatgaggaaacagctcttctgccagaggtaaatagaacaacctgcacaaactggatttttttaaaaatacaacactgagccatttgctgcatttctttttatactaaagatgtgactgg

SEQ ID NO: 113185 - DNA, 2095 bp, Homo sapiens
cggccgcgtcgacgccgtgtgcagacccgcgtgtggcgcaggcaaggaccctcaaaattaaacagcctctaccttgcgatgccgtctttcccaggcctgcgtccgagtctccgccgctgcggggcccgctccgacgcggaaagatctgactgcagccatgagcagcaatgagtgcttcaagtgtggacgatctggccactgggcccgggaatgtcctactggtggaggccgtcgtcgtggaattagaagccgtcgcagagggtggttttacctcggatagaggtttccagtttgtttcctcgtctcttccagacatttgttatcgctgtggtgaagtctgggtcatctttgccaaggattcgtgaatcttcaaggaggatgaagcctgcttattaacttgcggtagaaggttggccacatttgccaaggaatttcaaaggagcccaagaagaagagcgagacaaattgctgctacaactgttggcaaaccagggccatctggctcgtgactgcgacccatgccgatgacctgaaatgctattcttgtgggagaattcgggacacattcaaaaaagactgcaccaaagtgaagtgctataggtgtggtgaaactggtcatgtagccatcaactgcagcaagacaagtgaagtcaactgttaccggctgtggcgagtcagggcaccttgcacgggaatgcaccaattgaggctacagccctaattaatttccctttgtcgcccctcctttttctgattgatggttgtattattttctctgaatcctcttcactggccaaaggttggccagatagaggcaactcccaggccagtgagctttacttgccgtgtaaaaggaggaaaggggtggaaaaaaaaatcgactttctgcatttaactacaaaaaaaagtttatgtttagtttggtagaggtgttatgtataatgctttgttaaagaaccccctttccgtgccactgggtgaataggggattgatgaatggggaaggagttgagtcagaccagttaagcccgtcctgggggttcctttgaacatgttccccatgtagggaggtaaaaccaattctggaagtgtctatgaacttccataaataaactttaattttagtatatatgatggtcttggattgtctgacctacagtagctatttaattaacctcaggtaacatctgtatcaggcgcctcctatgaaccatacagttggagtggggagttaaacaaaaaggttaaacatgacgtgttaatggctgttcgagcgaactcgggaataaaagcctaacagagaacaactttcatcacagtgttgatgttgggacacattagatggtggatgggcaaaggttttagaacaccattattttcaaagacttaaaattctaaaaccccagaggtaaacatccaatgcctcagagttagcataatttgggagctattcaaggaattgcaagagaaaatgcattttccacagaaatccaaggatgttaatttttttgtattactataatcacttagacgagcggtgtttcatttgcatgtaatccagtttttaaaaagtcagatggaaagagcatatttatgttcctaaaaaatagaaatggtaattttaaactattcaaatacagctggaggaggaaggggagttttgactaaagttctttttgtttgtttacaaattttcattaatggtatatagtgcaaaataccatattaaagaggggaatgtggaggactgaaagctgacagtttggacttttctttttgtacttaagtcatgtcttcaataatgaaaattgctgttaaaaggatgtatgggatttagatacttttgcaaagctatagaaaattcactttgtaatctgttataataatgcccttgagttctgtgttcagtctgaacaggttttttggtggtggcgccttattccttagtgtttcttaaaaaactttgagagagaaaataaacaaactcttgactacatttttacttttgaagtacaaaaagcagctttcgctttcaacgaaagtgaaatttacatgttgaaccaccccgccctgtgtgaaataacttttccttttt

SEQ ID NO: 113186 - DNA, 4354 bp, Homo sapiens
gcgcctttggagaatcggcgggctgcgctccgctggggctggtcgcggagggggggaggggatgtcggtcagtgcgagatccgctgctgctgaggagaggagcgtcaacagcagcaccatggtagctcaacagaagaacccttgaaggctattgtggggatttgccaatctcccaaatcaagtatacagaaaatcggtaaagagaggttttgaatttaacgcttatggtagtgggtgaatctggattgggaaagtcgacattaatcaactcattattcctcacagatttgtattctccagagtatccaggtccttcttcattagaattaaaaaggactgttacaggtgggacaatccaaagtttttaatcaaagaaggtggtgttccagttgctgctcacaataagttgataccccaggattttggagatgcagtggataataagtaattgcctggcagccctgttatccgactacattgattaggaaattttgaggacttacctaaaatgcagaatcacggagtggaccagacgtcagatgcctgattaacaggggtgcagtgttgtttatacttcattgctacttcaggacatggactttaaaccattggatattgagtttatgaagcgtttgcatgaaaaagtgagtatcacccccacttattgccaaagcagacacactcacacccagaggaatgccaacagtttaaaaaacagataatgaaagaaatccaagaacataaaattaaaatatacgaatttccagaaacagatgatgaagaagaaaataaacttgttaaaaagataaaggaccgtttaccctcttgctgtggtaggtagtaatactatccattgaagttaatggcaaaagggtcagaggaaaggcagtatcccctttgggtgttgctgaagttgaaaatggtgaacattgtgattttacagttttaagaaatatgttgataagaacacacatgcaggacttgaaagatgttactaataatgtccactatgagaactatgggaatcagaaaactgggcagctgtgacttatcatggagttgataacaacaaggaataaagggcagctgattaagagccctctggcacaaaatggaagaagaaagaagggagcatgtagctaaaatgaagaagatggagatggagatggagcaggtgttttgagatgaaggtcaaagaaaaagttcaaaaactgaaggactctgaagctgagctccagcggcgccatgagcaaatgaaaaagaattttggaagcacagcacaaagaattggaggaaaaaccgtcgtcagttccgaggatgagaaagcaaactgggaagctcaacaaccgtatttttagaaccaacagaactcttcaagaaccttggaaaagaacaagaagaaagggaagatcttttaaactctctattgaccacccagttaacgtattagttgccaatatgccagcttggcacatcagtgtttgttggatccgtttgaccaattttgcaccaagttttatcccataatggatgggttttaacagcatgacaaaaattattttttttttttggtccttgatgggagattaaggatgccttgaattgtctaggggtgttctgtacttaggaaagtaaggagctctaaggtacctttcctacattttctttttttattaaacaggatatcttcagtttaatgccagaggacattttactgttgtacaatcatgtccgggtgggtttggattgtttacagggtatttcccaaattaaaagggcttctgggaggattttccattgagggataaattgccataatatgatgcaaactgtgcttctctatggataattacaatacaaaggttcccttcagtgcagcattatacaataaatggtaatttagtctaacacagttggaccctatttttttgacaccttccattgtttaaaaaatacaccatgggaaaaaaaaaaacccctatatggcttactggggcacctagaggcttttttattaacaacgtctttttgtttgtttgttttgggattctttaaaatatatattattctccatttaggtgcccctctttagcccagaatctccattactgccttccatttttggtaaataaaccatttaaatttaggatattttcccccatataattgggcacctgcctaaaatagaatataggccatccttccatatggggagggaccccaacaagggaaacctttccctttaacctcccctttttaccacttttatggtaaagtagcaggggggggaaatggcattttataggatcattttctagggcaaaaattggtgaggctaatggcccaacctgtttctacctatatgcagtctctttattttactagaaatgggaatcatggcctcttgaagagaaaaaaagtcaccatttcggcatttagctgtattcatatattgcatttctgtattttttgtttgtattgtaaaaaattcacataataaacgatggttgtgatgtaatattgtgtgaggtcttaaatatcctacagtcgatgtacaagagtagagtatgtttgggaagaaacttttcagcttaagtttgcctcctctacaatgacatcttttatatgcttgtctcatttagaatgcatatgtgctgattttctaatttaagagatattcatatctctctattcatttctatctctcattgggatgcttatttttctgaggaacattttttttttcccccagacaggggtcttgcttcattgcccaggggtgggagtgcggtggcacaaacacgactcgactgcagcctcaaccctctgggctcaagcagtcctcctgcctcagccccctgagtatctgggattgcaggcgtgcaccaccacggctgggctaatttttgtattttttgcagcctcccaaagttctggggattacagggcatgagccgtcatgcctggcctctgagaacagtttctgactcattcagattaggcatactctcaagtccctggaaactgaaattttttttaactgtaaagagggtagtgcccatttcttttcttaaggtcaagtgacatagattttaatgtaatgcataatttaggtaagaaattaatttatgtaagcctagtttattatcttgaaatgttttaccctatttactttttaaaattaatgacctaagcggagggaataattataagtcaatagcagagagattgttgtttgggtgtttatttttttcagtttttgttttgagagattgggttaacacctctagccaaaattgtttggttttagggaggctaacaataacctactgaatttggaaaatgcaaaggtaaaaaatgtatatagactgcctgctgaactggttaagtactactgcttctggggaaatactatttcaaaattctatggtattataataataaatttggtaaggacattcattattctaccctcctaatggaaaactttcagaagtctttctttatccatggcatgcccagggttttacctgaatctgatacaggatctatataactttactaggacttttgattgttgactccaggcttaggtatatcagaaggttctttttgccatttggcctgtggatgtctgagaagatcattcacaatacatgtaaaattcaggtaggcctaaggaaaggccagcctgtagaaagcaaaatggcagtgtctgttctccactgttggagggcattatgttaatttaagtatcctgttaggccactgtctttctggcttaattaagtgggggctggaacaagtaagcactaataataccagtgaaccacttgggcaccttgtgggtagagttttgctgccacctagtggaatgggatatcattgcttccatatcaggttcacaagcaagttaagtgggcacagtttatttctgtgtagctcaggctgtaatcttgaaagctgaggagatacccatgcctctcagactcattagctgggtgtcacattaccccacctgccacattcctgaccccaccgcaccctaaatatgttttgtccctcttggagaaaccagggagtagaagtccaggatatggtaggtaagggggaaaaaggaaagacggcttgatagctatgaatgtcatgaggagccgaaatgttgacctcagttatcctagatcatggtctcccaaacctgatgtctatttccttacaaaaatatttgttgagcatgtgtccataattatatgtattgaacaatgaaaatatgtgtcaacaaatgtactgctacactaatgtgaacattatggaacaaaatttgaaagagtgaaataaaaggtttacactttca

SEQ ID NO: 113187 - DNA, 368 bp, Homo sapiens
  misc_feature (1)...(368): n = a,t,c or g
aagagatagggtctcactctgttggccaggctccagtgcaatgctgcaatcatagatcactgcagccctgaactcaggctgtagtgatcctactgccttggcctcccaaagtgctggaaatacaggtgtgagtctgtgacttcatatgagggtagctgaagatacactgagtgtgaatgagatcactcaaagtgtatactggctggatatcaactctattccatgttgtacatgtttttctttttttcttttttttgagacggagtcnaactctgtctcccaagccagagtgacagtgaggactccgtctcaggaaaaaaaaaatatatatatatggaattaggatgggacatgggtgggcacgtgcc

SEQ ID NO: 113188 - DNA, 1780 bp, Homo sapiens
  misc_feature (1)...(1780): n = a,t,c or g
actagttctagatcgcgagcggccgctcgcgatctataatgcctcttctgaagcagccatcccggcctcttggtactgctgaccccagccaggctacagggatcgattggagctgtccttggggctgtaattggccccagctgagcagggcaaacactgaggtcaactacaagccacaggccccttccccagcctcagttcacagctgccctgttgcagggatggcggtggcctttcttgttgctagaccgaagcctgtgggatataccaaggcagaggagcccatagccatgaggagcctcggggccctgctcttgctgctgagcgcctgcctggcggggagcagcatgtcctgtgccaacgccggccgaaaacatccaagtgcaggaaaacttcaatatctcttcggatctatggggaagtggtacaacctgggccatcggtttccaccgtgcccctggctgtaagaaagatcatgggacaggatgacagtgagcacgctggtcttgagggagagggcgcttacagaggcggagatccagcatggaccagcactcgttggccgggaaaggtgttcttgttgaggagacgtctttggagctttattgaagaaaaacagatacttgattggggaagttttctcttatcacaaatccaaatggaacataaccatgggagtcctatgtgggtccacaccaactattgatgagtatgccattttccttgaccaaggaatttcagccgccatcatgggacccacctttattgccaagttttacgggcgggcgccgcaggctgagggaaactctcctgcaggactttcagagtggttgcccaggggtntgggcattcctgaggactcccttcttcaccatggctgaccgaggtgaaatgtgtccctgggggagcaggaaccaaaaagccatctttaatcccgagagtccggaggcttgttgcttaccccaagaaggagggaaggatccaggggggtgggcaaactggtaaactgaaagtccccaagaaaagaaggatttccttgccagctgggcttacttcggccggtcccctgcaatgggaaatgacccagcaggtaatttcctaataatggtaacatcccatggccctgtgaagaactttcccagtacggcggctgcatggggcaacgggtaaacaactttcgtcaacaagaaaaggagtgtctgcagacctgcccgaacttgtgggcggccctgcaatctcccccatagtcccgggggcccctgccgagccttcatcccagctctggggcatttgatgctgttcaagggggaagtgcgtcctgcattccccttacgggggcctagccaggggcaacggggaacaagttctacttcagagaaggagtgcagagagtactgcggtgtccctggtgatggtgatgaggagctgctgcgcttttgccaactgacaactggccggtctgcaaagtcagaggatggccagtgtctgtcccggggtcctgtggcaggcaagcgccaaagcaacctggggtccaaataaaaactaaattgtaaactcctgtgnnaaggnngaccacnnaanaaaagggggggggccctttttaaagaacccttggggggcccaaattttaccggggatggcaaggttttatttttttccttttgggggggctttttaaaaccatcctgggattttttggaaagaacccttttttttggggggggacaaatttggccaacctcccctccaaaatttaaacccttaagggaaaattaaaatt

SEQ ID NO: 113189 - DNA, 2332 bp, Homo sapiens
ggcacgagggccattaaagcgaggaggaggcgagagcggccgccgctggtgcttattcttttttagtgcagcgggtagagtagcgggagtgtcgcgccgcgcgagagttgggaggcgaagggggcaggccagggagaggcgcaggagcctttgcagccacgcgcgcgccttccctgtcttgtgtgcttcgcgaggtagagcgggcgcgcggcagcgcggcggggcattactttgctgctagtttcggttcgcggcagcggcgggtggtagtctcggctggcacgggccgagacactagcactatgtcggaggaagcagttccggcggggacggggcggcggcacgggcaaccggcgtgcggtaggcggctcggcgggcgagcagcgagggagcccatggtggcggcgacacacggcgcacgcggcggcgtctgggaagcggacgcggcgaccggcggcggaaccgcgtctggaggcactcgaagggggcagcgccgagctcggaggggggcgaagatttacgccagtaagaacgaggaggatgaaggccattcaaactcctccccacgacactctgaagcagcgacggcacagcggggaagaatggaaaatggttataggaggccttagctgggacacttacaaagaaagatctgaaggactacttttccaaatttggtgaagttgtagactgcactctgaagttagatcctatcacaggggcaatcaaggggttttggctttgtgcctatttaaagaatcggagagtgtgagataaggtcatggatcaaaaagaacataaatttgaatggggaaggtgaatgatcctaaaagggccaaagccatggaaaacaaaagagccggttaaaaaaatttttgttggtggcctttctccagatacacctgaaagagaaaataagggagtactttggtggttttggtgaaggtggaatccatagagctccccatggaccaacaagaccaattaaagaggccgtgggttcctgcttttattacctttaaggaagaagaaccagtgaagaagataatggaaaagaaataccacaatgttggtcttagtaaatgtgaaataaaagtagccatgtcgaaggaacaatatcagcaacagcaacagtggggatctagaggaggatttgcaggaagagctcgtggaagaggtggtggccccagtcaaaactggaaccagggatatagtaactattggaatcaaggctatggcaactatggatatagcagcccaaggttacgggtggttatggaggatatgactacactggttaccaacaactacgtatggatatggtgattatagcaaccagcagagtggttatgggaaggtatcccaggcgaggtggtcatcaaaaatagctacaaaccccatactaaatttattcccatttgccaaccttatcccccaacaggtggtgaagccagtattttccgaatttgaagattcaatttgaaaggggctcctgcccacccgcttaattagcagttcaaacctaaattttttggtatcaagtcccctgaaatggaagtatgacggttgggtccctctgaagtttaatttctgagttctcattaaaaagaaatttgctttcattggttttaattctaaattgccatgcttcagaatcaatttgtgttttatgccctttcccccagtattgtagagcaagtcttgtgttaaaagcccagtgtggacagtgtcatgatgtagtagtgtcttactggtttttttaataaatccttttgtataaaaatgtattgggctcttttatcatcagaataggggaaaattgtcatgggtttcaaggttatttaaaagcataagtttggaagacaggcttgccgaaattgaggaccatgattaaaattgccagtgaagtttgaaatgtttttagccaaaatcctaatttttgcccataatgtgtcctccctgtccaaattgggaatgacttaatgtcaatttgtttgttggttgttttaataatacttcccttatgtagccattaagatttatatgaatatttcccccaaatgcccccagtttttgccttaatatgtattgtgcctttttagaacaaatcctggataaatgtgcaaaagtaccccctttgcccgagatagttaatgttttatgcttccattaaataaaaaggacttaaaatctgttaattataatagaaatgcggctagttcagagagatttttagagctgtggtggacttcatagatgaattcaagtgttgacgggaggattaaagaaatatataccgtgtttatgtgtgtgtgcttaaaaaaaaaaaaaa

SEQ ID NO: 113190 - DNA, 702 bp, Homo sapiens
tttttggtgagatagggtctctttctgtcacccccaggctggaatgcagtggtgtgatcacagcttcactgcagctctgacctcccaggctcaggggaatcctcccatttcaacctcctgaggctaggacacaggtgtgcaccaccatattcagctaattttttaattttttggagagacagggtcttcgccatgttggccaggctggtctcaaactccgggctcaagtgatcctcctgcctttgtctcccaaagcctcggattacatgtgtgggccaccaagcccagcccctttctttttctggagacatgattagggacttttgaaggaacactagtgatttttatggtagggataggagtgggaagaacatcttaggattgtgaatcacaggctttgcatttcttgctaatggctaaggattgataattaaaaagcagcaatgtgaatttccaagaaaagagggaaaatagtatgtaaatgcatggatatacatgagtataaaacattcatggaatgtcaactttagtcccttacagttgacaaactgtcacctttgaatactgcatttaaaaattgaaatcaccgtaatatatcttattccgactttcagctgacttagaaatttcagtcttcaagatcactcagatattaagatgagactataacccatgctcatttccacttctcaaaaaagtctc

SEQ ID NO: 113191 - DNA, 1974 bp, Homo sapiens
  misc_feature (1)...(1974): n = a,t,c or g
ggaaattgaatctgaagagtgctgcccgaaatctgtaggaagttggtggcaagggacagcactcacactcttctggtcatgatctctgatctccacctgaaatgacaataaaaaaactggtccaacgaagatctgtgctcagcacttcagccatcaggactaatccatcgatgactggaaaagaggctagctttgaggaaaacagcctgggctcttgggagcagagtccagcgggtgtgagtgaggctgacttgccgacggtcggcaggtaatggctctcagccggcgaggcggntcccacagctctcctcccagggcagcctgaggaggaggaggccgggtgccctgtttggtggcagctttcaaacctagggatacctgaaagctgtttgagcaacacctttatgaaatgttgccagagcagcaacacttcccatgtgggcacagccccgggaaaaccgggtaccaagtgagcaaggtggcaggacccacccaagcctgatacgcatctgggcccgccgggctcagccaggggaggctgctacggctgcccacttcccagcaccgtctgtcaggcttgaacccctctgtgctgttcccttcctgggctaatagggagaccctttcgcagggcacccactgtttcaacttgaccctcccaccccctgctactctcctccacacacccctccgttccgctagcctaccctgtcagcctttcaataaaagttatggcacaaatgtgaacacctgagatggagctgaacatttcttcactttgttctttttctgaagtcaaactcttatcaaatgccctaaaattattaccacccaagaggaaacagggaaaaaggttacatgtttttgtttactgagagtaagatcacctggcatctgggaaggacggggctgggtaaattgggtttgggctacaggaacaggaaaggaaaacaaaaacaaacctcgtaagggaagtatcgcactcagacaccaccacttcctagagccaaatgagcaatcccaaactagcaagtgccgtaagtgggcctgtgacgttcacaccgcccggcccgaggtatcgcattgtgcggggggaggtccacactacagctgtcctctcgtctagaaggcaccacctcgctttcatgtcccgtgtgttttgggaaaagcagtatggtgtgtcatgtctaagcggcgaacacttccctccctctgtccttgaggttgtaatataaaaactgtggtttctgtacgtgtggggttgggaattctctgacgggttgctcgttcatatgcacaagcttaacgcttgagttgctgaactgtcgttcacagctgcgtgtctgcatggtgtcgcatctgttgtacctttggggaaaatttgtatgtaaatgtacagaaataaaaacgttgccgcattaacagatttcctctggaatgtcttcccttacctcacctgatgggtatcccacccgaagggcattttcacctacccattaatgggtgagtaataaaatcctccgtgttcaattcaagaccctcactgcgtcacctactttgaaacgccccctgtaaacctgtgtccttccactcggccccccgaggtggggtgggagggaggcccctcctcacctcctgccttcgaagcccctggtcttaaagggtagtcagaggcaagagcctggattaaacacacactgtttacccaagtgcccactcctcagacccacctgagagacggggggcccatcagtaaaattaagaggaattttttttcccttgttcgtgtatgttctgctgatccgtggcctgaaggttcctagagacgtcaagaaatgaatatcttacactgtgattcttgtgaggaaagactggtaacccaaaacttctcttctctaatgtatttttctaccgcaaatgacaatatttctttaataaacgtattctataccaaactcttctctccataaaaaa

SEQ ID NO: 113192 - DNA, 983 bp, Homo sapiens
tccatgccctgttaatccccagcactttgggaggcccaaggaatggtggatcacctgaggtccaggagttcgaagaccagccctggccaacatggcaaaaatataaaaattagcccggcatggtggggggtgcttgtagtcctagctactcgggaggctgaggcaggagaatcgcttgaatccgggtggcagaggttgcagtgagctgagattgagccactgcactccagcctgggtaacagagcaagactctgtgtcaaaacaaaacaaaacaaaacaaaaaaggagggactcagagagccagggaccagggaaggatatgaggcagtgttctgaggacagagagagggaagaatggggaggggaaaggagcggcacatggggttgagcagaggaagaaaatcagaaaagatggcttagaagaagtcagcagtctgcgagtctggggaggatggagagtggtttggggttttgggtcggggtctaaggtgatcagatgcagaagcattacacggtggcctggtttctttactcagcccctggggtagatcccagccccccatgtaggtcccttggctggaaaaggaagagggagtggtcagatgaatctgaggagtcgttggaggaggagccacggaaggtgctcgcccctgagcctgaggagatctgggtggcggagatgctgtgtggcctcaagatgaagctgaagcgacggcgagtgtcgctcgtgctccctgagcaccacgaggccttcaacaggctgcttggtaggaggacaccccagagagcacctccaatcctgttctttccaaaaacaggaaacttccaataaccacacttttccaatgggaaaaataggccccagtgggtgagctctccatgtgggaggaatgtgaagtgatcactcatgagggacacttaggagatgataaaggattaggtcaacttgataaaggtcagcgcttgggataagaaagcttggt

SEQ ID NO: 113193 - DNA, 2328 bp, Homo sapiens
tcgcgctcccggaagtggagggtctacacgaagcgccgctgggtctgggtgcccgttaggcttcagcgttcgcggagttcgcccgctggcccccgatcaccatgtcggctttggacaccaaccccttcgcggacccagtggatgtaaaccccttccaggatccctctgtgacccagctgaccaacgccccgcagggcggcctgggcggaattcaaccccttctcagagacaaatgcagcgacaacagttcctgtcacccaactccctgggtcctcacagccagcggttctccagccatcagtggaaccaacccagccgaccccccaggccgtggtgtcttgcagcccaggcaggcctgctccggcagcaggaaagaactgggacagggaaagctgccgagctgggaacgcaaggagcgggagctgcagaacactgtagccaacttgcatgtgagacagaacaactggccccctctgccctcgtggtgccctgtgaagccctgcttctatcaggatttctccacagagatccctgccgactaccagcggatatgcaagatgctctactatctgtggatgttgcattcagtgactctgtttctgaacctgcttgcctgcctgggcctgggttctcgggcaacagctccaagggagtgggactttgggccttttccatcctgtgggtttctggatctttcactccctgtggccttccctttgttgggtaccgaccccatctataaagggcctttagggtccgaacaactcttttcagcttctttgtgttcttctttgtattttttttgtcaaataggggatcttacatcatccagttggttggcatccctggcctgggggacaacgggttggattgcagccctgtctacactgggataatcattccctggcccatatcaagtcatcatgatggtggtgggctggcttttttcaccccttttgtgccggtgctcttcaagtcttccttcctgcagcgggtgcactccccctctaccgaacggacaaggggccagcttccagcaggccccaggaggagttttcccccaggggcatctttcagcagcagaacctttccacagagctgcttcatctggctgcccaaggagccttcccagggggaattaagtcctcctctcttactctccccctcagcctttctctcgcctgccttctgagctgcactttccgtgggtgccttatgtggtggtggttttgcccagcacagacctggcagggttcttgccgtggctcttcctcctccctcagcgaccagctctccctgggaacgggagggacagggaattttttccccctctatgtacaaaaaaaaaacaaagctctctttcctatctctggtgatggtttggtaggattcttttgtctctggaagcagtgggactgaagttctcttcgtcctgtgcacacacagacacccccacacagttgggatcacaggctgacctgggcccatcccagctggagctttctgtcagggtcctgggccttgactcccccaccctgcaggcctggcctgaagtctggcttcttagacacagcccagtccttcctgcctgggctgggaataaagcctcttcacaggttctggtggacagatctgttccccaggtcactccagtgggtctccaggcttccagaagagggctggtggcctcaagctcttctctgcctcataaacggatccaagaggaaggctggttgcctttaagctcttccctgcctcggtgttcctgagaaacggattaatagccctttatccccctgcaccctcctgcaggggatggcactttgagccatcatggagcccatccccattgctgagccttactcttcttcaagaacttttctgaatgtacaatgccgtttggttgggattttggggactggaagggaccaaggacactgaccccaagctgtcctgcctagcgtccagcgtactttctagggagggtgggggtctgcctgtcctgggtgtggttggtttgggccctgtttgctgtgactacccccccccctccccgaaccgagggacggctgcctttgtctctggcctcagatggccacctggccccgcccatgcttcccaatcagcaagcatccagactttcaggaagggcagggcaagcaagtccagaaaccgaatccctcagcaagggactgataagccaatctctcggaagggccccctaatacccagtggagtctggttcacaccctggggggtgtgcactgtgatgggacacgtaggagtccaccctttaaaccagcaccctgtccctcgaggctgccgagg

SEQ ID NO: 113194 - DNA, 2755 bp, Homo sapiens
tgttaagaccatcccaaaatgcttcaagtaaaaaataacaagtttaaggggttaagcacttttaaagtctgattaagggggtggggggaaaaaagagtaactaccagccatttctccaatggacatcttgttccacagacctcaacgtgaagaaactgcccctagtttcctataaactggtaaaccctgtggggggtctgattatccctgatattgggattttccttggttttcctggttacacccttgagtcatttgccctttagggattcctagacagaccctaagggaaaaagaactgaaaacatattttgcccccacccccacaaaaaaaaatactgaaaactcccccccgcctcagttacacatccaaactctacatttacgaaaacgaattcagggtgaggaagtaaaaacaggtcatctattcacaaaactgaaatacttcattaccccaacttaaacatacaaactgcttacagatttgctgaaattgtctcaatttggctatcaaattccatttggttttccatcaaattcgtgtaaaaaaaaaaaaaacccacaaacttgccatctactatttctccaggacttggcagtctgccctcaaaagcttcagacaagattcatgagtataagcctgaaaaagagaaacctacaacacccggaaatcggcctacgtccccttataaatccctttacacctcagtacgaaactcccccattatattagaaaataaataagagggtaccataagtaaggtcccagaaaaacaacatattgccgacctacacggatttttaccaaaccactcgctttcccctgtggccttggcacactggcatgctggtctaggatcctctacgcacaacgcctggctcgcctcctcccgtgtggttgccaagccaagccgcctgctacccttcatcaccaaatcataaaattgcactcgctccttcctggaatccttttttcctkyagcttcaccaccdaaaatcgttagcgctccttccttcttcctagcttccttcaccaaattcggcactggcttcctggactctttttcctatcttcacccacgaactgctgctggctcggcttgctcctcagtcctaggcttcatcaaacactggttcctggaatcctcgtctgctgctgtcttcctaagaattcactgaatccacttctgtgtagcacctgggtcaagctgtcaattaatgctaagtgcctcagggatttaaaaaaacaatcttaaactcaaagtcccaatggcaaaaaacattaaagttggtaattactcttggatcttgaattacttccgtgtacggaaagtccttcacattttttcaaactaagctactatatttaaggccttccaaattctttctaactccttccaaaagccttctgccttaggttttttttaaattacaccagtccttttagtagctttttgatgtgatttttaaccaacttccccttctagctttcaagtgattcttcttaaattgggtactggtctacgtaaacaccctcatcttctcaaagctttaccttcctaacttctgcaccaccagaaattaaattgcatgggcttttaaaataaattggttaccaataattttcctcatttttttcagtgctattttatccaatttttggctttaatatttttctatcttctatacttctccaatacttgtcttagcttgtttttccattttcatatctgaaactcttgacaatattttcattttctatcttgtttctaacctccaaattgtcttctaaagtttgtacattttgcccttagctttttgtttcctagcttgtctttttttcttctgcttcctacttttcaggtttaaatttatctttttttcttctaaaagtatgtttttatcttctaatttccctatcttctcatattcttttcttcgccttccgcgtacttctgtcttccagttttccactgtcaaaccttctatcttctccaaattggtttcatccttaccactcccaattaatctttccattttcgtctggcgtttaggtaaatgcgttaaattgggcctttaaatgacggcaattctccctgcggtcatggggatttcaaggtcttttaatcacccttcggggtttaatctcttttttaaaaggatcgggccttcaaattattttaatcaccctaccaaccttttaaacctaaactttaagctgtttaagtcaccttcattttaatctaaaagcattgcccttctattggtattaattcggggctctgtagtcctttctctcaattttcttttaaatacattttttactccatgaagaagcttcatctcaacctccgtcatgttttagaaaccttttatcttttccttcctcatgctactcttctaagtttgtacattttgcccttagctttttgtttcctagcttgtcttttttcttctgcttcctacttttcaggtttaaatttatcttttttcttctaaaagtatgtttttatcttctaatttccctatcttctctattcttttcttcgccttcccgtacttctgtcttagttttttttaaattacaccagtccttttagtagctttttgatgtgatttttaaccaacttccccttctagcttcaagtattcttctaaattggttctggtctacgtaaacaccctcatcttctcaagctttaccttctaacttctgcaccaccagaaattaaattgatgggcttttaaaataaat

SEQ ID NO: 113195 - DNA, 733 bp, Homo sapiens
tttttttttttacctatttataagtatttattaaaatgttttaatgctttaaggaatatcaaaatttgtgaacagccaaccagtctaaaacgaaaagggctgctaacagtgttatgaatggtgaacaactaaaactctcatacattgctggtaggagtgtaaactggcagaatttactaaagctaaacagaaatataccccgtgactcagcaattccattcctgtatatatacccaacagaaaagataagaatgttcttagcagcattatgcttaacagccccaaactggaaataattcaaatgtccattaacattagaatggatgaataaattctagtatattcatacaaatgcaagagcaatgaaaatgaactcctgctatacataggaacaaagatactacattataaaattaaaaaataatctgcgacgatggggtgaaaacagtggggacctctggaggtggtgagggtcatgggtatcaactgggaacagacacctataggaagccttctgtggcaatggaagtgttctctaacttgatccgggtggtagttacacaggtgaacactgtaaaagtttacccagctgtgcacttaagatttgtgcacctgtattacaacaaagtgaaggaaaattgcaacaagaaaaaagaaaacttgtgaacaactgtattaaggctatgccaacagcatgtacagccacaagacaaaaagcaaactgataaaagtc

SEQ ID NO: 113196 - DNA, 626 bp, Homo sapiens
acatgagtgcattctttataagggtcaaaagcacgtcttcttcactgacccagtgacagattacctgatttacaacagaatctataacactttggctgttggtgtagaatagaacccctaaaggaatacttttaaaatactaaatgaatgctaaataaaatttagggaaggggttcttccagcatggtgtccatttgcttaataagggaataaggcagagagaggattgtgcctttgttctattaaggctgttcatcattaagattattattctctcctactaattcctgagttgtttgtagcactttataaacttgagccccagagaatgtgtgatttaataaggacacaaataataatttttaaaaatagaggctgggcatggtggctcatgtgtgtaatcctagcactttgggaggccaaggctggacagtcgcttgaggcccagagttcaaggccggcctggacaacataggaagaccccatctcaacaaatagttttgaaagttggccagtgtggtggtacgcacctatagtcccagttgctagggtggctgaggtgggaggatcacttgagccctgagcccaggagggtgaggctacagtgagccatgatggcaccaaaa

SEQ ID NO: 113197 - DNA, 400 bp, Homo sapiens
tgtccgaggggcgaggcccacagcatctgggattaatgcccaggaccctgtccgggtcagataaagatgttcataagggagcagtctcttcttctggggtgtgctgagcccacagaggagaaaagttcatggccacgtggctctggcacagggctctccagcctcctcagaagtgccccctggactgtggggacccactgatgtggcctctgccgtgagactgggttcccatgtcctgtcctccaggcccagccagaatgcgctacagggttaaagagctttagaaaaggtttcagggctgggcaccgtggctcacatctgtaatcccagcacttttgggaggccgaggcaagaggatcacttaagtccaggaattccagaccagcctgggcaacatggt

SEQ ID NO: 113198 - DNA, 1064 bp, Homo sapiens
cggggccgggtgcgatggcggcggtggctgcgttgcagctggggctgcgggcggcggggctgggacgggccccggccagcgccgcctggaggagcgtcctcagggtctccccgcgcccaggggtggcctggaggccaagcagatgtggcagttctgcagcagaagcatctgccacaaaagcggaagatgactcctttcttcagtgggtcctgctcctcatccctggtgactgcctttggcttggggacatggcaggtccagcgtcggaagtggaagctgaacctgattgcagagttggagtccatagttctggctgagcctgtccctctgccagccgacccaatggaactgaaaaattctgagtattggcccagtgaaggtccaggggtgctttgaccactccaagaggctgtatatgatgcccccgaaccatgggtggaccctgtccggggaggcccgggagggcccttcatcttccttccttcaattcagagtggggcctatgtggtcactcccttccactgcacccgaccttgggagtcaccatcctggtaaattagagggttcgttccccaggaagaaagtgaatccctgaaaccccggcagaaaggcccagattgagggagaagtggaccctcattgggatggtgaggcttgacagtaaaccagggcagcctttttgtcccctgagaacaatacagaaaggaaccactggcattatcgagaccctggaagctatggcccagaatccaccaggcgcagagcccatcttcattgatgccaacttccagagcacagtccctgggaggacccattggagggcaaaccagagttactctgagggaacgagcatctgcagtacatcgtgccctggtatggactctctgcagctacgatcctacctgtggtttaagaaattcctacgtgggacaacttggtgtgttgacagatcagctgctgaagccctgtccctggataattgcagtatttcaagactgcctttatgctggatcatgtgctactgggtataaagttctggccttctaccttaaaaaaaaaaaaaa

SEQ ID NO: 113199 - DNA, 372 bp, Homo sapiens
atattaggctatgtgtacaccaggaagaatgaactttactaggtaaaactgattcttcctgcagttggtaaggaggctgaagactgcgactgaagccccatctcccagtgctgcagcctcctcctgggcctccctgcctgtactttctccaccaccctagagctcgtcctccacagcggcaagagtgatccttcaaaatgtcaatcatgtcaagccactgtgctgacaaggctctccattccaacaaaagaaaacccagacaccttcccagggcttacggtctcaacacctcctgcccacgcccccccgaaggtcccacctcccgccttcctctctgctcctgtccctagccactctttgctacaataaaag

SEQ ID NO: 113200 - DNA, 1238 bp, Homo sapiens
gcttgcggccgcgccatccagatcgccgccgcctcgtcccgcttctcggctgaggcgccgcgcggccagcgcagcgggctccacggccgtcagccgcagcagccctaggggcctaccgtgggctactccgggctcagcatgcccggggctgaaactgaccacccaggcctacttgcaagatggtgctgcacggcgccaagtacccgcactgcgccgtcaacgggctcctgggtggccgagaagcagaagccgcgtaaggagcacctccccctggggcggccccggcgcagcgcgacaccctggttcgtggactgcatccccctttttcaccggaaccctgggcctcgcccccatgctggaggtggctctcaccctgattgattcatggtgcaaagatcatagctacgtgattgctggttattatcaagctaatgagcgagtaaaggatgccagtccaaaccaggttgcgagagaaggtggcctccagaatcgccgagggcttcagcgacactgcgctcatcatggtagacaacaccaagtttacgatggacttgcgtagcgcctacgattccacgtgttacgaggcaccatgaggaacagatgggcggtgcaggaggacccacaccatgacttactgtgaaagacttggccagaggcacaagaggattttcagcctcgctcgctggacagccgggtcctacggagaccgctcgtggatttcgataaccacctggatgaccattccggaattgacctggacaaacccccagagatccaataaaggcttgtccctaacaacttgtgcctaggccaggccacccgctgtggactgggcttccgggccctttcccactacgttgaaggaaggaaaacctattttttaaatgtaaataaaatatctgggtagccctgtgtggaaagctgacccgttttaagaagtggcatgtgcctttgaaagggggcagaatgttcagtcgggtcggtgtttttaacacaagagtctcttagaagaggtgcagacattcccgtctggcttgtccctgtggacttctcttcaatttgtaatgttgctataattcctccaaatcaaagctctttctgctttgtgcaagattgttcctattaaacagttttaactaaaccttttataatctggagagaataccttttataggctttcgaactatcttttttttaaaaaaaaaaaaaagcccacatcttatactccaaaaaaaaaa

SEQ ID NO: 113201 - DNA, 1316 bp, Homo sapiens
cggacgcgtgggctgaccagcaccatggcggttggcaagaacaagcgccttacgaaaggcggcaaaaagggagccaagaagaaagtgtaagtcgcgactgtcgtggcgtcttgctttttgggggtctgctggaatcggcgggctggtcctagatcgcggcgtaggccggatggcgaggattccagtcggattgtgcgggccgtggcgggttggtgcacccaggaacgcggcctggagggtcggtgttgagtagcggcagggttgatccagttttctaggaaagattgggtatgatgtgaaagcaccctgctatgttcaatataagaacatattggaaagacgctccgtcaccagggacccaaggaacccaattttgcatcctgatggtctccaagggtcgtgtgttttgaagtgagtccttgctggatttgcagaatgaatgaagtttgcattttaggaaaattccaagctggatttacttgaagattgttccaggggtaaaaacttgccctgacttaactttcccatggggcattgggatcctttaccccgtgaccaaaaatgtgtttccatgggtccaaaaaaatggccagaccaatgattggaagctccacgtttgatggtccaagacctacccgatgggttactttgctttcgtcttgttcttgttgtttgggttttacttaaaaaacggcaacaatccagattacggaaagacctctttatggcttcaggcaccccaacagggtcccgccaaaatccgggaaggaagatggatgggaaatccatgacccccgagaggtggcaggaccaaatggacttggaaaggaagtggttccataaattgattcccagacagcatttggaaaaagacctagaaaaggcttgcccaatcctatttatcctcttccatgaatgtcttcgttagaaaaagtaaaaatgctgaaaaaaccccaagttttgaattgggaaaagctcatggagcttccatggttaaggcagtaggtcctggaaaagcacctggggacgagacaggtgctaaacgttgaaccgagctgcatggatatgaaccacacagtccaagaatctgtttaaagttcagacttcaaatagtggcaaataaaaactgctatttgtgaaaaaaggagaaagaaaaaaaaaaggggggggccctttttaaaaaatccttggggggcccaaatttaaccgggggtgggaaggcaaaatttttttctttttgggggggggtttaataccctccttgggaattttggaaaggaaccttttttttggggggggaaaaaaatggaacaacc

SEQ ID NO: 113202 - DNA, 3394 bp, Homo sapiens
  misc_feature (1)...(3394): n = a,t,c or g
cgctaccttgaaagaagaaaaggttcgtgttcagagcagggcatttagtcccaagccaggctagtcccacaagcaagagaccaaagccattctctctgattcccaacccctaccttctctcctaattcccacttttaatagaaaagttggttataactttttaagaaaagtttccaccacgagggaaagtcctaacctcgctctcgcggcctaccctttacccgcccgcctgctcggcgaccaagaacaccttccaccatgacccacctcagccaagtttcccacttaaaataagaggcatccaagcagggtgtacatgtccctgcctcagggttgaaaaaagtccaggccatgtatatctggatcgatgggtactggagaaggactgcgctgcaagacccggaccctgggacagtgagcccaagtgtgtggaagagttgcctgaggtggaatttcgatggctctatagtactttacagtctgaagggttccaaacagtgaacatgtatctcgtgcctgctgccatgtttcggggaccccttttcgtaagggaccctaacaagctggtgttatgtggaagttttcaggtacaattcgaaggcctgcaggagaccattttgagggacaactgttaaacgggataatgggacatggtgagcaaccagcacccctggtttggcatggagcagggagtataccctcatggggacagatgggcaccccctttggttggccttccaagggtcttcccagggccccaaggtcaatatttactgggtgtggggaggagacagaagcctatggcagngggacattcgtgggaggcccatttaccgggcctgcttgtattgcttggagtcaagattgccggggactaatgccgaggtcatgcctgcccagatggaagtttgggattggaccttgtgaaggaatcaagcagggaggactatcttctgggtggcccgtttcatcttgcattcgtgtgtgtgaagacttggggagtgatagcaacctttgatccttagccccactcttggggaactggaatggtgcagaactgtcataccaacttcagtaccaaggtcatgcgggaggagaatggtctgacgtacatccgaggaggccattagagaaacaaagcaagcggccacaagtacccacatcccgtgccatatgatccccaggggaggcctgggacaaatccccaaggtttaattgaattccaataaaccctcccaacatcaacgatttttctgcttggtgtagccaattcgtagcgcccagcatacgcctttccccggactgttggccaggagaaagaagggttactttgaagaatcggtcgcccctcttgccaactgcggaccccttttcggtgacagaagccctcatcccgcacgtgtcttctcaatgaaaccggcgatgagcctttccagtacaaaagtttaagtggactagacctccagctgttgagcccctcctagttcttcatccctgactccaactcttccccctctcccaagttgtcccgattgtaactcaaagggtggaatatcaaggtccgtttttttcattccatgtgcccagataatccttgctttcttttgtttggctgggatagaggggtcaagttattaatttcttcacacctaccctcctttttttccctatcactgaaagcttttttagtgccattagtgggggagggagggtgggggagaccataaccactgctttcccatttaatgggggtgccaccctgtcccaataggccgtagcctatcccggaccagaggcacgtttgccagaagggggtcctccttcctccccaggtagctgaaagggggaagaccctgaccgtactctggtttaggttagggactttgccttcgtggtgggaaactttttctttaaaaagtttataaccaacttttctatttaaaagtggggaattaggagagaaggtaggggttgggaatcagagagaatggctttggtctcttgcttgtgggacttagcctggctttgggactaaatgccctgctcttgaacacggaagctttagtataaactgatggatatcccttaccttgaatgagtaaatggttccttactgctttggtccttgatttatcacacaaagcagaatagtatttttatatttaaatgtaaagacaaaaaaactatatgtatggttttgtggattatgtgtgttttggctaaaggaaaaaaccatccagggtcacggggcaccaaatttggaggacaaataagtcgggtttagaaataaagcatcgcatttttgagtagagagcaaggggaagtggttcttaagatgggtgatctggaatcaggcccccaaggacccttttgggttttcttgccctgccccacccctcctggaagaagggtggggcactgggattagttaaccagaccgacacgtttactaagcagtcacttgatctccgttggctttggtttaaaagacacacttgtcccccataggtttaagacgataagagttggctggtcaacttgagcatgttactgacagagggggtattgggggttattttcctggtaggaatagcatgtccactaaagccaggcccttttgatattaaattttttaaaaaagcacaattatacgaagtttagattttaaatcaaaatttgtagggtttcctaggtaatttttaaccagaattgccttggtttgccttcaactgtcccccctaccctctgcctcttgggagggagatgggggaccaggggctggaggtcaaaaaccacttgtaatttttgtatccttgatgtcctttgttaagactgcctgaagaaataattttttttcttttaatcataaggaataaaccccccccctttatctccttcatttcatctaccgattttctggttcttgtgttggctgtggcaaggccagcctggtggttttcttttgccatgaccaactctctaattgccatgtacaagtatgttcaaagtcaaataactcctcattgtaaacaaactgtgtaactggcccaaaggagcacttattaaatcagcctaacataagatctctctgatgtgtttgtgattctttcaaatccctatgtgccattatatttctttatttcctaaaacaggcaaaataagctcaagtttatgttactctgaattttttaaaaacactggagtgatgttgctgaccagccgtttcctgtacctctctaagttgggtatttgggacttaagggattaagtttttcacctagacttagttacacacaatcttggcatttcctagcctataggtttgtagcagggtacaagccccactcctcccccttcctttgctcccctgagtttggttttggcttaccataac

SEQ ID NO: 113203 - DNA, 3074 bp, Homo sapiens
  misc_feature (1)...(3074): n = a,t,c or g
tttcgtgcaacagcgagcgtgccggtcgctagtcgcgggtccccgagtgagcacgccagggagcaggagaccaaacgacgggggtcggagtcagagtcgcagtgggagtccccggaccggagcacgagcctgagcgggagagcgccgctcgcacgcccgtcgccacccgcgtacccggcgcagccagagccaccagcngcagcgctgccatggagcccagcagcaagaagctgacgggtcgcctcatgctggccagttggaggagcagtgcttggctccctgcagtttggctacaacacttggagtcatcaatgccccccaagaaggtgattcgaggagtttttacaacccagacatggggtccaccgctatggggagagcatcctgcccaccacgctcaccacgctctggtccctctcagtggccatcttttctgttgggggcatgattggctccttctctgtgggctcttttcgttaaccgctttggccggcggaattcaatgctgatgatgaacctgctggccttcgtgtccgccgtgctcatgggcttctcgaaactgggcaagtcctttgagatgctgatcctgggccgcttcatcatcggtgtgtactgaggcctgaccacaggcttcgagcccatgtatgtgggtgaagtgtcacccacagcccttcgtggggccctgggcaccctgcaccagctgggcatcgacgacggcatcctcatcgaccaggtgttcggactggactccatcatgggcaacaaggacctgtggcccctgctgctgagcatcatcttcatcccagccctgctgcagtgcatcgagctgcccttctgccccgagagtccccgcttactgctcatcaaccgcaacgaggagaaccgggccatgagtgtgctaaagaagctgcgcggggacagctgacgtgacccatgacctgcaggagatgaaggaagagagtcggcagattgatgcgggagaagaaggtcaaccatcctgggagctgttccgcttcccccgcctaccgccagcccatcctcatcgctgtggtgctgcagctgtcccagcagctgtctggcatcaacgctgtcttctattactccacgagcatcttcgagaaggcgggggtgcagcagtttgtgtatgctaccattggctccggtatcgtcaacacggccttcactgacgtgtgggtgtttgtgggggagcgagcaggccggcggaccctgcacctcataggcctcgctggcactggcgggttgtgccatacttcatgaccatcgcgctagcacttgctgggagcagctaaccctggggatgtcctattcttgaggcatcgtgggccatctttgggttttgtggcctttctttgaagtggggtcctgggccccatcccatgggttcatcgtgggcttgaactctttcagccaggggtccacgtccagcttgccatttgccgtttgcaggctttcttccaactgggaccttcaaattttcattgtggggcatgtgcttccagtatgtggagcaactgtgtgggccctacgtcttcatcatcttcactgttgctcctgggttctgtttcttcaatctttcacctacttcaaagttcctgagactaaaggccggacctttcgatgagatcggttccggctttccggcagggggggagccagccaaagttgacaaggacacccgagggagctgtttcccatcccctgggggcctgattccccaagtgtgagttcgccccagatcaacagcccggcctgctcccagcagcccttaaggatcttttcagggaggcacagggcagctgggatggagaatttccaaacctgaacagatgttcagcccgagccgggcctgggggttcctttctccagccagcaatgatgtccagaagaattattcaggacttaacggctccaggattttaacaaaagcaagactggttgctcaaatctatttcagacaagcaacaggttttataatttttttattactgattttgtttattttttatatcaggcctgagtctccctgtggccacatcccaaggcttcaccctggaatggttcacatgcctgagggtgggagactaagccctgtcgagacacttgccttctttcacccagcttaatctgtaggggctgggacctaatgtccttaagggacaccacttaattcggaacttatgggaacttacaaagctttcttatccccagggagggtgggctatgggccccccgtttcttgctgggcctggggatcttccccacttttagggggggtcagggttcccattagggttttgccccccttcccccatctccttccctaccccaacccacctcaaattaatcctttcctttaccctgagacccagttgggaagcactgggagttcaggggagggagagggggaagggcccagtcttgggctgcccgggttcgtagtctcctttgcaactgagggccaccactattacccatgagaaagaaggcctgtgggagccttcaaaactcccttggttaagaaagcaatggaaactccctgcccctgttgttgtatagatgcaaagatatttatatatatttttgggttgtcaatattaaattacagacttttaagttatagtatactcctggacaagccaacttgtaaatccaccacctcacatcctattacttaccctaaacagatataaatgggctggtttttaggaaacatgggttttggaaatgcttgtggattgagggtagggaggtttgggatgggagtgaggacaggaagtaagtggggttgcaacccactgccaacggcttagacttcgactcaggaatccagtcccttacacgtacctctcatcagtgtcctcttgctcaaaaatctgtgttgatccctgttacccagagaatatatacattctttatcttgacagttcaagggcatttctatacacatattttgatagttggtgttcaaaaaaacactagttttgtgccagccgtgatgctcaggcttgaaatcgcattattttgaatgtgaagtaaatactgtacctttaaaa

SEQ ID NO: 113204 - DNA, 2557 bp, Homo sapiens
  misc_feature (1)...(2557): n = a,t,c or g
ccgcctcagccgcctcgcacatttagtcttgccgggagtggtgtgattcccgaccaagatggcggccgtggggcgagtcggctccttcggttcttctccgccgggattatcctcgacttacactggcggccccttgggcaacgagatagcgtcgggcaacggtggcgccgcggcaggcgacgacgaggacgggcagaacctttggtcctgcatcctcagcgaggtctccacccgctcgcgcctccaagctccctgcgggatagaacgtgctactgctgggtgaagatggagctggaaaaacaagcttaataagaaaaattcagggaatagaggagtataagaaaggaagaggattggaatatttgtacttaaaatgtgcatgaatgaatgacagggaatgatcaaacaagatgtaatggtttggatcttagatggagacctatatcacaaaggcctccttaaattttcactggatgccgtatctctgaaggatactctagttatgcctggttgctgacatgtcaaagccttggactgctttggattatttacagaaacgggcaagtgttgttagagaacatgttgacaaactgacaatccctcctgaagaaatgaaacaaatggaacaaaagttgattagagagttccgaagaatatgtagagcgaggagaagacttcccggcttctccccagagaagaaatactgcgtcacaagaagacaaagatgacagtgtagttttacctctgggtgcggatacacttacacataacttgggcattccagtactagtagtttgcacaaagtgtgatgccattagtgtattggagaaagaacatgactacagagatgaacattttgattttattcagtcacatatccggaagttttgtttacagtatggcgcagcacttatttacacttcagtaaaagaaaacaaaaatatagacttagtatataaatacatcgttcagaaactatatggatttccctataagattcctgctgttgttgtggaaaaggatgcagtatttattccagcagggtggggataatgataagaaaatagggaatattacatggaaaattttcaaacatttaaaaggcaggaggataatttttggaaggacatcataactaaaccacctgttcgaaagtttgtacatgagaaggaaattatggcagaagatgattcaggtgtttcttatgaaggttccagtcccttttaagcaaaagcaaaccacccaaactgaagctggaaggcctgtggatgccctcacccaaggagtcccagggaggctccccaccgaacaccaaaatagaatctgtatcatcttaatgttgccaagcgtgtcaccccattccctgctggggtcaaaaaaaaattgatcccaacccatgcaaagctgggagcttacaagtggaagggcgtttctgggcaaattttctttcaacagttttgtttgagtaaaaagactgggctctcccaggaggcccctggtggtgagtggtgggtaggccctgcagggtggggctgggaggtgggaagcagtggttttaccaccaatccaccaaaaaggttcaggcccanaagcctgtctttagatgttcaatgcagaactagacagaatttacacgataaccagtttacagtttcttcccacaacacctacatcttcctacgggagggagaagcttccttgaaggttaccaattaaagcccttttattctgttttctgggataatgtaaacatgcctctgccttttccttcaaaagtgggaattagaaagctgggagtgcttcttcagatggactaaatttatgtcgtgtgtgtgtgtgtgtgtgtgstgtggttacccattttttagaaggagccgtacagaagaaaaattattctacattatgtaggattgctgtttgcattgccattttgcataagaaagtaatttttgattttgaaaatctcaaaacttttagatctgaaatacagccatgtgaktgcgtcatattctaaaggctatttaaaacatgtaaaaggatttggggaaccggcagaaaacatgccagttgggccatttgactgactgggaagtctaagcttattttagttataactattaaaatccatttttaaaaaatttgttagttttgccggacagagaaaaatccgtccagttgtccagattttggcacacccacaataaatgtacccacccacacacggaatatgcctaagaaaactatcagatagccgtttgatacacttagtcattgtctcaatcactgatcctgtaagttgtcatcaaaatatgatttagaaatattggcccaaggtgttgctttaactgaggagaaaagaaagcacactgcctaaatgtgtaaaagaaaaatgcagaggttattaaaatgtaaagaagtaacaatctttggatttgtctatacatatatatatatatatatatatgctttgccttaatatacccccttttttgtttgtgactttcaactgtaatcagttaataaagtatttattctctgcattcaggttcaaaaaaaa

SEQ ID NO: 113205 - DNA, 1280 bp, Homo sapiens
  misc_feature (1)...(1280): n = a,t,c or g
ggtggtnnaattcccggctgcatgattcggacgagctcctgcctccctgcagggagctgcttatgggacaccgcttcctgcgcggccttcttaacgctgctgctgccgccgccacccctgtatacccggcaccgcatgctcggtccagagtccgtcccgcccccaaaacgatcccgcagcaaactcatggcaccgccctgaatcgggacgcacaatggcaccttccactgcgacgaggcactggcatgcgcactgcttcgcctcctgccggagtaccgggatgcagagattgtgcggacccgggatcccgaaaaactcggtttcctgtgacatcgtgggtgggagtggggggggcgagtacgacccttcggagacaccgatatgaccattcaccagaggtctttcacagagaccatgagctccctgtcccctgggaagccgtggcagaccaagctgagcagtgcggggactcatctatctgcacttcggggcacaagctggctggcccagttgctgggcactagtgaagaggacagcatggtggggcaccctctatgacaagatgtatgagaactttgtggaggaggtggatgctgtgggacaatgggatctcccagtgggcaagagggggagcctcgatatgcacttgaccactaccctgaagttgcaccgagtttgctcgactttaatcctaccttggaaccaaccccgacccaagacactgaggcagggttcaagcgtgcaatggatcttggttcaagaggagttttcttgcagagatttagattttttaccaacacagctggctgccagcccggggccttggtggaaaaagccacttgccccaagcgattcccaggtggacccaaagtggaaagattgtggaactggcgaaaaggtgcatgtccctgggaaggagcatctcttaccacctgggaatctggggctgtccccctccaagtggcccatcttctttgttatctacactgacccaggctggacagtggcgaatacagtgtgttgcccaaggagccccactcattcccaaagccgggctgcccctgccagagccatggcggggtcttcgggggacgaggccctggacgtgattcagtgggatccctggctgcatcttcgtccatgcaagcggcttcatttggcgcgcccccgcgacccgagagggtgccttgagcatggcccgtgccaccttggcccagcggctcatacctcccacaaatctcctagtctaataaaaccttccattctcatactgacccaaa

SEQ ID NO: 113206 - DNA, 3103 bp, Homo sapiens
  misc_feature (1)...(3103): n = a,t,c or g
tttcgtggcacgtgggccccctccgcctccggctccgttctcctcaggctccctccgcctccggctccgtcctcctctggccccctccgcccccggccccggccccacggcgggatgcgggacaacaccagccccatcagcgtgattctggtgagctcggggagcaggggcaataagctgctgttcaggtaccccttccagagaagccaggagcacccggcgtcccagacaagtaagccgcgtagcagatacgctgccagcaacacgggcgaccatgcctgatgagcaggacggcgattccaggttttcagatgttattctggcaacaattttggcaaccaagtctgaaatgtgtggccaaaaatttgaactgaagattgataatgtgcgatttgttgggcacccaacactgctacagcattgctctggggcagatctccaaaacagatccttccccgaangaagggaaagcaccctactatgattcttttttaatgttggttgtttgcactggagggccaacgcagacccgtcagttgataaactgtctgcataacctgtcccgtcgtatcgccaccgtgctgcagcacgaggagcgccgctgccagtacctcacccgggaggccaagctgatcctgggcgctccaggatgaggtgtccgctatggctgatggaaatgaatgatcctaagcccccattccatcacatcctgcgccaagtgcaagctggccagggacctcaaggaagcttatgacagcctgtgcacgtcgggcgtagttcggcttcacatcaacagctggctgggaggtgagcttctgcctgccccacaagatccactatgcggcctccagtctgatccccccagaggccatcgaacggagcctgaaagccatccgcccctaccatgccctgctgctgctcagtgatgagaagtccttgctgggtgagcttcctattgactgctcccctgccctagtgcgggtgatcaagaccacatctgcctgtgaaagaacctgcaggcagctagcccaagatgcggacctggccttcgctgcaggttttccagcttgcagctcatctgggtgtactggggcaaggccatcatcatctacccgctgtgtgagaacaacgtctaccatgctgtctccccaatgccagcgtatgtctgtactcccccgctgggccgagcagttcttcccaccagtttccattctcatggacctggccgtccgtttcttggccaagttctccttgccggttttcctttgtcagaattttaggaatcccctggccccccgctgtgccaggagaacccagcttcattccagatggtggtgtggaatgctgcagcgccgggcttctcatccagctgcaacacctatgtcctgcctgatggcctcacccagcgaaggaggagccccgtccgcgaagaggacgacgtccccttcacttgcccgggtcggcggtcgcaagcctcagcacgcccaaacgccctcaagctttggctccccaaccaagcagcgatgacatgaccctcaccaagccccaagcatggacaactccaagcgcagagctacttcccagcggggactcgccacttgaaccagaggatgacggagaacctgtttggcctagcctgtcggagcatgaacgcgcagccatcctcacgcgtacccgcagcccagaaccctgaggacaaaaacatgtttgcccaggcatccttcactacttccgcggccgccaccacctggaggagattatgtacaacgagaacacgcggcgctcccagctgctcatgctgtttgacaagttccgcagcgtgctggttggtgaccacccacgaggaccctgtcattgccgtcttccaggctctgctcccctgagcccaggcggagggcggaaggctcgctggggtgcgcaggtgggcgctcgcgtctccccaccccagggctccccccgtgctgaggctgagccctcttggccctgaggcctggcattgggtggatgcgggctggccgtggcccactgaagcctgcagagccccggctgtccttgcccctggtggttccgctgtggggctgctgcctgctgtgttcctacgcttccctccagtccttgccgcacgcgtaggcatctccacgctggaggggggcctgccaggactcctgtctctgggtgaggccgcatccttcaaggcccatgtgggctgtgcgtttctcagaccctccttctgtccctacacctgctccttggaccccccagtctgtggccaccctgaagaatgtgcagaaacacttgtgtggcctgtccctgtctctctgacagccttccatttgtgaagtgccctgtggccccctccccagcacctctgtctgccatgcgctttcttccttccccagggcttacccttgagcctttcctggcccaagtccttcacccacagtccacagaagccacaaaacaggctcatagccaagctgtgacctggtcctgaccatctgggcacggagggcctgggctggccctgctaggctggagaagccctgtcacctgtgcacatcttgctggtggaggcatggcccactgtgcaggaccccaccctcggggagctttcggctcccacactgatgattctccccagcatccacaccgggcctggcgctacgtactcaggcccccagctctcgtgtcctggaggaagagctagctccagacatgggttgatcacctagaggagctctggctaaggcacagttttctagaaataaaacatttattcgggtttggaaaggccccttggattcctggctggggacaatgatgacctggaccctggccagaagagccctggccctccagcaaggcagcacctgctctgatgcacctgtgcacccctggccctcccagccacctgggagcccgaagcttagcctgtaggtggccaagccagtccctactcttgggctgcggccacgtgaggctccgcatcagcagccaggggcgagcactagtggacaaagccagcaaatgcggcgttcctgtgagcagataccctcaaccagccagctgtcaaaagtatttcaagataaaatccaggccaagc

SEQ ID NO: 113207 - DNA, 2858 bp, Homo sapiens
  misc_feature (1)...(2858): n = a,t,c or g
cccacgcgtttttgacgcgcgcgatttaaaaccagctcaggagacgccaaggaaagatgggacctcccggcccagcactgccagccacaatgaataactcttcttcagagacgcgaggacacccccacagtgcctactctccttcagagcgtgtgttcccgatgcccctgcccaggaaggcgcctgtcaatattcctggcaccccagtcctcgaagactttcctcagaatgaccatgagaaggagcggctgcagcggaggcgctcgagggtctttgatctgcagttcagcactgactcacctcgcttattggcctccccctccagcaggagtattgacatttcagctactatccccaagtttacaaacaccgcagattaccggaacattactccacctgtatcaaactgtccactgaaaataaaatcactaccaagaatgcttttgggtttgcacttgattgattttatggtcagagattcttaaaacagaaagacaccgaaccaaaccaaactttaaagtggctgcgggtaactctggatgccagcaccaagatctatggctgtgcgcgtggatgccgtccatgccgatgtatacagagttccttgggggggctggggcaaagatgcaccgtcttttggaagaagtagaaggccatgttgctgatggaagtgctactgaaatgggaacaaccaaaaaggctgtaaagccaaagaagaagcacttacacagaactattgagcagaacataaacaacctcaaagtgtctcgaagcagatcgaaggtgtgagattgatcccatgtttcaaaagacagcagcctcatttgatgagtgcagcacagcaggggttgtttctgtccactctcccctgccaggactacaagaagtgaactgctgttttccctctgatgtccagactctctcccacggaagaacctctcgaggttgccagagttaggttgtgtagaaatgacagatttaaaagcgcccttgcagcagtgtgcagaagatcgccagatctgccctttccctggccgggttcccagtttacacagtgggacagtgaaacacataatgagtctgtgtcggccctggtagacaagtttaagaagaattaccaggtatttgacatcaatgctgaagttgacgagagtgactgtggagacttcccgaatgggtccctgggggatgactttgatgccaacgatgaaccttgaccacaccggcagttggggatcatgaagagttcaggagctggaaggagccctgccaggttcagagctgccaggaagaaatgatttcccttggggatggagacatcaggaccatgtgcccccttctgtctatgaaacctggagaatattcttatttcagtcctcggaccatgtcgatgtgggctggcccggatcactggcgctttaggcctcgacgcaaacaagatgctccttcccaatcagaaaacaaaaagaagagtacaaaaaaagattttgaaattgactttgaagatgatattgactttgatgtatattttagaaaaacaaaggctgctactattctgaccaagtccactttgggaggaaccagaattgggaggagcttaccacccttcctacagattttcaacttacaatgttggacactctgggtccagctttcaccttcaaaccaggcaccaggttacttaagatggcccagggccatagggtagagactgagcattatgaagaaattgaagactatgattacaacaaccctaacgacacctccaacttttgccctggattacaggctgctgacagtgatgatgaagatttggatgacttatttgtgggacctgttgggaactctgacctctcaccttatccttgccatccacctaagacagcacaacagaatggtgacactccagaagcccaaggattagacatcacaacatatggggagtcaaacttggtagctgagcctcagaaggtaaataaaattgaaattcactatgccaagactgccaaaaagatgggacataaagaacctaagcagaggcatgtggagtctgcttacaagcgctctcctgaaaggaagcagatgcaagagccaaccacagggaaagctggaaaagtagcgggccctggcagaaagtggctgacgagaagatgcttagcgggctcacgaaggacctgcagaggagcctgccccctgtcatggctcagaacctctccatacctctggcttttgcctgtctcctacatttagccaatgaaaaggtaggtaattaagaatctaaaactggaaggaacagaggacctctctgatgttcttgtgaggcaaggagattgagttcactatggagaagtcagcagcaggaggcccatcccttactcagttgccgggacatccccagtctcgggggaagaagatgccatgggcttatacccaggctgtagccaaaaaanctaccaacngtgcctgtttgtttgttgctctttccttctctccatcatagtcctgggtgcccagcgcccctgaagcccccgtgctcaactgattaaactttacctgcccctatggtgacccatcctaggagaggggagggcagagggggtgagggtactattctgggattgagaaaacctatatcccattcttttatatcaatgtattagtttttagtctcctaaattgatctgttattttccaaactattctcttgtagaaaattttccacgtgggcacttaatggtgcccttgaagaacttcctaatccatgtacataaaatacatcatatgtacacttataaatgtatatagaatgctcaaaaataaaattcttaataatagaactggcaaaataaaaaaaaaaa

SEQ ID NO: 113208 - DNA, 747 bp, Homo sapiens
atttcgtcgtgaagaaggtgaagatggcggtggccagggccgtgtgtcttgggagtccaagtggctgcaaagggcatccccggaacgtgatgccggctgggcggcacggacagactcccaacatgaccaaggacatgttcccggggccctatcttaggacccccagaaaagaacgggccggcgcccgccaaagaagtaataatatgcgtgtgaaagactacgaaccttaccccggatgatgcgcatggggtatggcggactacccggaagcttcccttgacccggcttcacagccatgaggagaagatccatggttatagcttggggaccaagccggggcctggagggttgaaactgggggtgaaaccgatgcaactgggcaacctagacatgctacaacaggaaccggtgtggatacatccccccacaccttgtttcttggcaatgtcatgtgtatgcagcttcttcggtttccttggcttttcatgatattccatgtgctgggtggggggacgtgtaccctggtctaaccagcctgtgggaccaaaaccagtatccttaacaataatctggtacctgggaacgaggcggtgatccctccaaagaaaccagagcgggtggttcactatgagatctgaggaggcttccgtgggcttttgggtcctctaactaggactccctcattcctagaaatttaaccttaatgaaatccctaataaaactcagtgctgtgttaaaaaaaaaaaa

SEQ ID NO: 113209 - DNA, 2555 bp, Homo sapiens
gccgtgcgggtccgggattcccagccatggcagattcctccgggcagcagggcaaaggccggcgtgtgcagccccagtggtcccctcctgctgggacccagccatgcagactccacctttacaacagcctcaccaggaacaagtgtttcttgcatttcttgtgatcgtcattccttcattcctaacaaaggaagtgttcatacctcaagatgggaaaaaggtgacgtggtattgctgtgggccaaccgtctatgacgcatctcacatggggcacgccaggtcctacatctcttttgatatcttgagaagagtgttgaaggattacttcaaatttgatgtcttttattgcatgaacattacggatattgatgacaagatcatcaagagggcccggcagaaccacctgttcgagcagtatcgggagaagaggcctgaagcggcacagctcttggaggatgttcaggccgccctgaagccattttcagtaaaattaaatgagaccacggatcccgataaaaagcagatgctcgaacggattcagcacgcagtgcagcttgccacagagccacttgagaaagctgtgcagtccagactcacgggagaggaagtcaacagctgtgtggaggtgttgctggaagaagccaaggatttgctctctgactggctggattctacacttggctgtgatgtcactgacaattccatcttctccaagctgcccaagttctgggagggggacttccacagagacatggaagctctgaatgttctccctccagatgtcttaacccgggttagtgagtatgtgccagaaattgtgaactttgtccagaagattgtggacaacggttacggctatgtctccaatgggtctgtctactttggatacagcggaagttttgcttctagcggagaagcactcctatgggaagctggtgcctgaggccgttggagatcagaaagcccttcaagaaggggaaggtgacctgagcatctctgcagaccgcctgagtgagaagcgctctcccaacgactttgccttatggaaggcctctaagcccggagaaccgtcctggccgtgcccttggggaaagggtcgtccgggctggcatatcgagtgctcggccatggcaggcaccctcctaggggcttcgatggacattcacggaggtgggttcgacctccggttcccccaccatgacaatgagctggcacagtcggaggcctactttgaaaacgactgctgggtcaggtacttcctgcacacaggccacctgaccattgcaggctgcaaaatgtcaaagtcactaaaaaacttcatcaccattaaagatgccttgaaaaagcactcagcacggcagtttgcggctggcctttcctcatgcactcgtggaaggacaccctggactactccagcaacaccatggagtcagcgcttcaatatgagaagttcttgaatgagtttttctttaaatgtgaaagatatccttcgcgctcctgttgacatcactggtcagtttgagaagtggggagaagaagaagcagaactgaataagaacttttatgacaagaagacagcaattcacaaagccctctgtgacaatgttgacacccgcaccgtcatggaagagatgcgggccttggtcagtcagtgcaacctctatatggcagcccggaaagccgtgaggaagaggcccaaccaggctctgctggagaacatcgccctgtacctcacccatatgctgaagatctttggggccggtagaagaggacagctctctgggatttccggttcgtatgggctggtaacatgcctcagtttcgaggccacagtcatgcctaccctctaggtgtaatcaggattccgagaaggagtgcgggaagattgcccgagcagcaaaaagtccttgagattctgcagctcagcgatgccctgcgggacaacatcctgccccgagcttggggtgcggtttgaagaccacgaaggacctgcccacagtggtgaaacctggtagacagaaacaccttattaaaagagagagaagaaaagagacgggttgaagaggagaagaggaagaagaaagaggaggcggcccggaggaaacaggaaccaagaaggcagcaaagctggcccaagatgaagattccccccccagtgagatgttccttgtcagaaaccgacaaataactccaaagtttgatgaaaatgtaagcatggtctgccccacacatgacatggagggcaaaagagctcagcaaagggcaagcccaagaagctgaagaagctcttcgaggctcaaggagaagctcttacagaggaatatctgcagatggcccagaatggaagcttccagtgaggggggcacaggactgactttttaaaaccattgtggactagtggctgctgtctgcctcagtgacaatgtcccagcgctcctatcatgtttacagtcacccttggggtcctaaattaagagttgtgttcatgtaggttcgtgtcgtccgttggctctgagacattgataataaatttttctcaacagtgaaaaaaaaaa

SEQ ID NO: 113210 - DNA, 2401 bp, Homo sapiens
  misc_feature (1)...(2401): n = a,t,c or g
gtttttatgaggatttatcaacagagttatttaaggaggaatcctgtgttgttatcaggaactaaaaggataaggctaacaatttggaaagagcaactactctttcttaaatcaatctacaattcacagataggaagaggtcaatgacctaggagtaaccattcaactccaagattcattttcattatgttattcatggaacacccggagccagctcggaggcggttgaataatagctcttcaagtctgcaataaaaaaatggcctccaacatgaactacattgcagaaaatgggaaaaaaaacagaatggaaaagagtaaaaaagttcaagcaggcagatcctcgaagaatttgtccgtggaaaaagtactagatcgacgtgttagttgaatgggaaagtggaaatatttccctgaagtgggaagggatttacagatgctgacaatacttggggaaccctgaaggaaaatttaggattgtcccagaattggattgaagccgtttcttaaacttctccaggaaagctgggcaaagaaaaaagattggtaccaaaaaggaaaatcttttatctgaccagtgaatctggattgaccagccaaattcatagaagaaaaagagatgctgctgaccaacccaaagaggatttgccccggaggtcttgatccctgaaagaataatttgggtgcccccagacagccagttggagaatttgatgtttctcatggaaatggaaaagattccagatgaggcagacttggtgcctgggcgaaaagaggcacatatgaagtgtcctcaaatttgtaatttgctttttatgaagagagactaacttgggcattcttgtccgagaagatgaagctcaataattgttcacattgttcttttatatatatttatatatatatattaaaaattgggtcttagattttgatttactagtgtgacaaaataactacatcctaatgaaaatcaagtttggatatgtttgttttgaaagtagccgttggaagagttgttggtgggttttttgcatccatagcactggttactttgaacaaataaataaaagctttctgtagttgcttcctttatcaggaaaaggaacatttggataccatggtattatccatttcctcttccattaaaggaacagcttttctaaatgttgggggaaatgtccatagtcattactcagtcaaaacttgtgttctcatggagcctaaggaccattctagatttattacgtgttttttgtgtgtgtgtgtgtgtgtgtgtgtgtgtgtgtatccataaaatgcatatgtaaattttttttttgtttttaagcattcacccaaacaaaaaaatcacaggtaaacccatgtttctgagatgccattattccaagcaaaataagagataatcccttcaagttaaattgaaaattttcctgaaaccatacatttcaagtgaaataagtaattctagataggacaatttaaattggataattttaaagtgtctataattgccagtggtttatttgcaaaattccctaaaaggggaaaatttttatccactgcccatcacagccaggttccctccatcccagatggaggaaacctaggacaaaatgccaagtgtgttttaactagcttaaacaaaaactaaagttaaaatggaacatttaaaaagttttccctagcgggggcccattcccttagccaaaaatgttgggaatccccctgtggcctacattgaacctaaaagggtcatggatgaatgggaaatatgtaaagactttgggctcattagaaaccttaaatcagatgggttagagggtgtttggcagtttagggacctgctggtcataaatgtgtgaacaaccttttggtaaccttaacctattggacctggcatgtttttttctttacccccaattcattacgatggaggctcaaatcttgagtttgctttactggttcagcaaaagccagggaaggaacaactttgtagtaatccaaaatgttatccaactggtatattgtttacgtttattgtaaatactgggtgaacaagtgggttaataaatagttttatattcctttatgcnnnnnnnnnnnnnggccttcccccaggggttttttttgttgccacccttaggggaccaaaaaagggccccctgggggttaaacaaaggccctggtgaaagggatccaccccccccgccctttggggaaaccctggggaacggggccaaaaaaacaggggccccaaacccccaaggggcgatttttaatttggggcccgccccccagaaccggggggccccaaggggcccctttttcctggttccccggggggaaaagggaaaaaggaattcgggccctggggttttcccaagaaaagttgcagggacaa

SEQ ID NO: 113211 - DNA, 934 bp, Homo sapiens
aattcggaacgagagcttttaagtgctgttttgtagatgaaatatgaaagagaaacaagggcttaatggtaaagatgacatatgactatattaagaaactgaatggccctttgtccacaaacagtaacccacacagcattgctactgtggcatgcccactgctctgcactgacctcatggagcagagaacctccttcagacacctcacgcaccccctgaggagctaatgtttcttcccaacatggaaaaattctggaaagacggcctaattctttcacaggttgtcactttctcaattttggaaaggaatatgcgcccaaccctttaatctcccgaggcaaagtgtggcgaaggagggtctttggggttccagctggttcccagcagaggtgggtgaaagttcaacaacaggggcactgggacacacataggaaatgtggacccacagctatgggttttgcaaatacagttctttcaaggaagtcctgccatgctcctaaatggcccaaatcccttgtcctcccatgattcttctcctcaaaggaccttctgctggacgccgccccctccctctccagccccaccagggccctccccgccatcctcttaggccacagcagccaataaagagtgtttttattccatgatctgtacccccaatgaatccataatccataagtttcaaatgtatttaccaaaaatactaacattatctggaatgaatgaatgaatgaatgaatgaatgaatgaatgaataaatattatatatttatacattcttattcttccaaagtgaaccccactatgccagttttactccatactcagtgttctgggaaagcccatattctttctaaatttttcagcatttttttctatttttgtactttaccaaaattaatttacattggaataaactctcttccttctgaaa

SEQ ID NO: 113212 - DNA, 1518 bp, Homo sapiens
taaaggtacgcgccgcggccaaggccgcaccgtactgggcgggggtctggggagcgcagcagccatggcaagccgggtcctggtgcaacaacggcgccaagatgcccatcctggggttgggtacctggaagtcccctccagggcaggtgactgaggcccgtgaaggtggccattgacgtcgggtaccgccacatcgactgtgcccatgtgtaccagaatgagaatgagggtgggggtggccattcaggagaagctcagggagcaggtggtgaaagcgtgagggagctctttcatcgtcagcaagctgtggggcacgtaccatgaagaaaggggcctggttgaaaggaagcctgccaagaagacacttcaagcgacctgaagcttggacttacctggacctctaaccttaattcactggccgactggctttaagcctgggtagggattttttcccattggatgagtcgggcaatgtggttcccagtgacaaccaacattctggacacgtgggcgggccatggagaagctggtggatgaagggctgggtgaaagctattggcatctccaacttcaaccatctccaggtggagatgatcttaaacaaaccctggcttgaagtataaaccctgccagtttaaccagattgagatgtccacccatatctcactcagggagaagttaatccagtactgccagtccaaaggtcatcgtgggtgaccgcctacaggccccctcgggctctcctgaacagggccctggcccaagccccgagggacccttcttctcctgggagggatcccaggattcaagggcgattcgcagccaaagcacaataaaacttacagccccaggtccttgatccggggttccccatgcaagaggaacttggtgggtgatccccaaagtctgtggacaccaggaacggcattgctggaggaactttaaaggtctttgacttttgaactgaggcagccagggatattgaccaccttacttcagctaccaaccaggaaactggaggggtctggtgcccttgttggagctgtaccttcccaccaaggattacccccttcccatggaagagtttttgaaaagcctgtggttgcccctgcctccgtccccccaagtgaccctataccctgtgtttccttgccctcaaattttatcccttgcaaaatgtaagtatggccctggtgtcacttcagcagtggggacagcaaccctgtaggagttgggccagcgaagggcgtgtcttaggttgatgttgggatctcaaggagccctgttcagtaggagtaggaagtctccttcccagttttgctttgcccttctttcttaccctgctggggggaaagtagcaacctgaatacccttttcttgaccaaaaaaaagcaaaatttaccaggtcaaaaatagtgccactaacgggttgagtttttgactgcttggaactggaatcctttcagacaagaacttctctttgcctcccaaccaaaagtgcttttgtgaaaaaaaaaa

SEQ ID NO: 113213 - DNA, 1559 bp, Homo sapiens
  misc_feature (1)...(1559): n = a,t,c or g
aacaggtgagagaggatgtgtgctgggccttggaggaagggggccgagaccgggccttacttctgtaacgatactgtgaggcatcggaaggccagcctgttgtgtccgttttgaaggatgcccctgtcccgctggttgagatctgtgggggtcttcctgctgccagccccctactgggcaccccgggagaggtggctgggttccctacggcggccctccctggtgcacgggtacccagtcctggcctggtacagtgccccgctgctggtgccaagcgtggacagaggaacctcgagccctttgctcctccctcagaatgaacgggagaccagaattcagatgtttatgcccaagaaaagcaggatttcggttcagcacttctcccagatcgttagggtgctggacttgaggatgagatggggcacccagagataggagatgctattgcccggctcaaggaggtcctgggagtacaatgccattggaaggcaagtataaccggggtttgacggtggtaagtaagcattccgggaagctggtgggagccaaaggaaacaaggaatgcctgaataagtcctccaagcgggccttggactgttgggctggtgtgtggaactgctgcaagctttccttcctggtggcagatgacatcatggattcatcccttaccccgccggggaacagatcttgctggtatcagaagccgggcgtcgggtttggatgccatcaatgatggtnaacctccctggaagcaatgtatctaccgccgtgctgaagctcgtattgcccgggaagcagcccgtattacctgaacctgattcgagctcttcctgcagagggttcctatcagacttgagattggggcagaccctggacctcctcacagcccccccaggggcaatgtggatcttgtcagattcactgaaaagtagctacaaatctattgtcaagtacaagacagcttttctactccttctaccttccttataggctgcagccatgtacatggcaggaatttgatggcggagaaggagcaacgccaatgcccaagaaagatcctgcctggagaatgggggggtttctttcagaattcagggatgattacccttgaccctctttgggggacccccagtgttgaccgggcaaaaattggcacttgacatcccaggacaaccaaatgccagcctggcttggtgggttcagtgtcctggnaacgggccccactcccagaacaggtaccagattcctggaaggaaaatttacggggcagaaggagggttaagaaaagtgggcccgggtgaaaggcgctattatgagggagctgggatcttgccagcagtgttcttggcaatatgagggaaggacagtttaccagccacattattgggntcttccatttggaacagttacggcaggcaccccttggccccccagcccgtttttgctgggggctttgcggcggcaaaatcttacaagcggagagagagtgacctagagattgcaaggggcggggagaggaggctctccaataaatatatcgtgtaaccttaaaaaaaaaa

SEQ ID NO: 113214 - DNA, 3696 bp, Homo sapiens
  misc_feature (1)...(3696): n = a,t,c or g
acttcctgccgggctgcgggcgcctgagcgctcttcagcgtttgcgcggcggctgcgcgtctctctcggctcccgcttcctttgaccgcctcccccccccggcccggcggcgcccgcctcctccacggccactccgcctcttccctcccttcgtcccttcttcctctcccttttttccttcttccttcccctcctcgccgccaccgcccaggaccgccggccgggggacgagtccggagcagcagccagcagcagccaggtggagttttgctcttgtcgcccaggctggagtgcagtggcgtgatctcggctcactgcaacctccacctcccaggttcaagcgattttcccacttaagcctcccgataagctgagattacaggagtttattaaccacttaacctctcagaactgaacaaagacaacattgttcctggaacgccctctttttaaaaaagaaagcataacccctactgtagaactaaatgcactgtgcatgaaacttggaaaaaaaccaatgtataagcctgttgacccttactctcggatgcagtccacctataactacaacatgagaggaggtgcttatcccccgaggtacttttagcccatttccagttccacctttactttatcaagtggaactttctgtgggatgtcatttatttaatggcaaaggaaagacaagacatgcctgcgaaacacgatgctgcctgcccaaagcgttgaggatcctgcagaatgagcccctgccagaagaggctggaggggaatggaagagaatccgaagaagaaaatctcaataaatctgaaataagtcaagtgtttgagattgcacttaaacggaacttgcctgtgaatttcgagtctttccctctgaaacaggtggcccgggagagtggcccaccccacatgaagaactttgtgaccaaggtttcggttggggagtttgtgggggaaggtgaaggggaaaagcaaagaagatttcaaagaaaaatgcccgccatagctgttcttgaagggagcctgaaagaagttaccgcccctggcctgcagttgaacgaagtaaagcctaggattcaaaaaggaaaacaaaacccttagttcaagccacagacaagcccagaataatatggccaggggatcaatccgattaagccggactgggcccaagatccaagcaggcaaaaaaaggaagaaggagccaggagtacacgctcctcacagaagcgaaggcctcccgcgccgcagggagtttgtgaatgcaggtgaaagggttgggaaaaccacactgcaagaaggaacggggcaccaacaagaaggtggccaagcgcaatgcagcctgagaaccatgctgggagatccttggttttcaaagtcccgcaggcgcatgcccaccaaacccgcactcaagtcagaggagaagacacccataaagaaaccaggggatggaagaaaagtaacctttttttgaacctggctctggggatggaaaatgggactagtaataaagaggatgagttcaggatgccttatctaagtcatcagcagctgcctgctggaattcttcccatggtgcccgaggtcgcccaggctgtaggagttagtcaaggaccatcaccncccaaagaatttacccagggcaacctcccgaatcctgccaaggccacggtaactgccatgatagcccgagagttgttgtatgggggcaccctcgcccacagcccgagaccattttaaaggaataacaatctcttcaggccacgtaccccatggaccctctcacgaggaccctctgagcaactggactatctttccagagtccaggggattccaggttgaatacaaagactttccccaaaaacaacaagaaccgaatttgttatctcttatcaattgctcctcttcagccacctcttgatcagccatgggtatcgggcaaggatgtgggagtcctgccatggatatggctggcgctggaacatctttaaagtttgctgtcttgagttggggacccaacaaagttacaggaggntggccaaggaacaggggaaacgggaccaatgtctgtgtgtgggaggtgctgaaccttttctggccatgaaccattataaaatcccaacatatatactgaaaatactgaaactgctttgaaaatttggaatttctgatacctccagtgggcctgagagacacggtgggtaaaggatgtgggcagcagcagggaagacaacagaaacacaaggaggcggctgtggccgcgcctggactgtgctggggtttgttgtgatggccactcggtgacctgggcggtccctaacgcaaatagcagctgcctgtgggggaaggaagggctgcccaagccaagcttggttctcccgggacaccaagcaagatccacaccctgggggcaccttccgtgttttgggtcttttttttttcccctgtgttgaaaggaagaaacggcacgacccctttcttaagcttggttcactcagacggcgattgggacaaacccttggacagccatgccagagagaggcctttgaccggccccagaagctaaaaagcaccagagaaaatcaaatgcttcctactcagcgtgacccaacttttctagtgtgccacggccccaccacctcctgcagtacccacaccatcaccactgctttctcttccaacagtgatctgtattcttagtttcattattttcttttgattgatagagacactatataaaattttcattttgagattttctcaattgtatctagttaaatattttcttgtttggaaacttgttctgagactgactttatcaataatctaaccgacaaggatcatatccatgtgtatgttggttagacatttttatttcattgactaacccaggacagtttcagtgatgcaaattgtgtgccctcttgttcaactgaaaccagtcctggacttttcaaaaacctggaataagtctcccacagttgtataaattggacaatttaggaattttaaactttagatgatcatttggttccatttttattcccatttttattttggttaatgccaaacaggacttaaaatgaaactttgatctctgttttaaagattattaaaaaacattgtgtatctataccatatggccccttgaggacttagccttcactacacttacaggatatggatctcccatgtagtcccatataaacctgccagagtgattttccagagtgctcgaatactgttaattacatctcccattagggctgaaaagaatgaccctacgtttctgtatacagctgtgttgcttttgatgttgtgttactgtacacaaaagtggtgtgcactgatggctctgacgtgtggtccgtatggaaagccctggtagccctgcgagttaagtactgcttccattcattgtttacgctggaatttttctcccccatggaatgtaagtaaaaccttaagtgtttgtcatcaataaatgagtaatactaaatttttttgttaatttattctcaaatgccgactactgctaggttggtcccctccccaacttgccccaatcctttttttatttttaaaggaaaaaaactttgtaatgcttgtgattccatctgggcaaaagtctgaagaatctgaaataactttatatcaaaccattgatcaataaacagctactaatgaaaaaaaaaa

SEQ ID NO: 113215 - DNA, 1779 bp, Homo sapiens
tttcctcactgactataaaagaatagagaaggaagggcttaagtgaccggctgcctggctgacttacagcagtcagacttctgacaggatcatggctatgatggaggtccaggggggaccacgcctgggacgagacctgcgtgctgatcgtgatcttcacagtgctcctgcagtctctctgtgtggctgtaacttacgtgtactttaccaacgagctgaagcagatgcaggacaagtactccaaaagtggcattgcttgtttcttaaaagaagatgacagttattgggaccccaatgacgaagagagtattgaacagcccctgctggcaaagtcaagtggcaactccgtcagctcgtttagaaaagatgatttttgagaacctcttgaaggaaaccattttctacagtttcaagaaaaagcaacaaaatatttctcccctagtgagagaaaagaggtcctcagagagtaggcagcttcacataactgggaccagaggaagaagcaacacattgtcttctccaaactccaagaatgaaaaggctctgggccgcaaaataaactcctggggaatcatcaaggagtgggcattcattcctgagcaacttgcacttgaggaatggggaacctgggcatccattgaaaaagggttttactacatctattcccaaacatactttcgatttcaggaggaaataaaagagaacacaaagaccgacaaacaaatggtccaatatatttacaaattacacaagtttttcctgaccctatattgttggatggaaaagtgctaggaattagttgttgggtcttaaagatgcagaatatggactctattccatctatcaagggggaatatttgagcttaaggaaaatgacagaatttttgtttctgtaacaaatgagcacttgatagacatggaccatgaagccagtttttttcggggcctttttagttggctaactgacctggaaagaaaaagcaataactctcaacagtgactacttcaagttttcagggatgatacacgtatgatagatgtttccaaaaaatctggccaaaccaaacaaaacagaaaccagaaaaccaaaaaaccctctatgcaatctgagtagagccagcacaaacaaaaaattctacaacacacactgttctgaaagtgactcacttatcccaaagaaaatgaaattgctgaaagatctttcaggactctacctcatatcagtttgctagcagaaatctagaagactgtcagcttccaaacattaatgccaatggttaacatcttctggccttataatcctactccttggtaaagactgtaggaaggaaagcgcaacaatccatctcttcaaggtaggtgtattcacagtaggtaggcctccagggtttcctttaagggggacaacctcctttaaggttcaaaagagaggaggagggcacccacttaaaagatcggcagtttgcctggggtgcagtgggcttcacacctgttaatcccaacattttgggggaacccaaggtggggtaggatcacggagatccaaggagattcaaggaccatagttgacccaacatagttgaaacccccatctctactgaaagtgccaaaattaagctgggtgtgttgggcacctgcctgttagttcccagctacttgagaggctgaggcagggagaatcgttttgaacccgggaggcagaggtttgcagtgtgggtgagatcatgccactacactccagccttggcgacagagcgagacttggtttcaaaaaaaaaa

SEQ ID NO: 113216 - DNA, 588 bp, Homo sapiens
cccggatattcaatattttgtattctaccttgtttggtgctggatatttttgtaaacctatacatatctttgcatttgtttctcgaatgtgattaagttacttggaaactgtgtggtccttttttttcaggcagggtctcactgtgtcgcacgggctggagtgtagtggtgtgatcttggctctctgcagtctcggccccctgggtccaaggtgattctcccacctcagcctccccaatagctggggccacaggacggcatcaccacattgggcgactttttgggatttttgtaggagatgggggtttcacccgtgttgctcaggctagtctcgacctcctggggctcaactggtctgcctgcccttggcttcccaaagttctgggattacaggtgtgagcccccacatctggctctgggtcttgttattcagtggtgtttggtgggacctgaactgtatttagtctcgtgttgatgcttccctactacggggtgagaacttcttcctgctctaacgatgcttccccactctggctgctgagcacaggcactattcccagccctgcatgggctctgatcctgggtggg

SEQ ID NO: 113217 - DNA, 513 bp, Homo sapiens
taaatttacaacatatattacttaagatctgtggtagcttcttctatatttcattttgcatgccccctcactaatatggcaaaggttgttttagcctcccccaaaaagcccccttattaaccccagaaaaagacaaggtgaggcctcacattgcccccaaatgtgggacaaatattaataataccttaaactttatgttgataaaagattgggggaaaagctttcctcatatagatcaagaagaatttcaaaagattctaggagaaggcccaggcacagtggctcacacctgtaatcgcagcactttgggaggctgaagcaagagattgcttgagcccagaagtttgagaccaacctaggcaacaaagtgagaccctgtctctataaaagtaaaaactaaaaaattagctgggcatggtggtgtgccctttggtcccagctactcactcaggaggctgaagagggagaatcacttgagccaaggaggttgagacagagtaagaccccctctca

SEQ ID NO: 113218 - DNA, 492 bp, Homo sapiens
ttcgagaaaaattaaaaatgcttcgcatgtttattaaaaaaattcaaaagcgtagattattttaagtaaaacttgatattccccaaatagcactcttttctggccagtttagtgtgattccatacatacaagtaaatgtgacatgaagatgtagataccatgttgatatgtgtgtgcacgtgtgtgtatgtatataaacatgtaaaatacaggaaatacctttacatatttatgtgtaaccttttttcaaaatgtaacatgggtgttaattggaagcatttgaaacattgagtacggagaaggatttggtgacgcctgtaatcccagcattctgggaggccgactggggtggatcgcttgaggtcaggagttcaagaccagccttcatggcgactccctgtctctactataaacccaaaaattagccgggatcgtgggtatcatgcgcttgtaatccagccactttgtgaggctgaagcaggagaatcattt

SEQ ID NO: 113219 - DNA, 1382 bp, Homo sapiens
tttttttttttttacatttatgtagtattttatagttaattaagactttataatactgatgtgaaatgaggagttggaacaaatggtttctaagatactttccagctctgaaatgtgcagcttccttctctagggcaagtcccacctattcaggcccagctccagtgccatccatcctctccaggaagccttccccatattctagctcccactgatgtctcttagctgaaacctgaattggcactgccctcaaaagacaactcttgtctccccaagtaatttgcaaacctcttgagaacagggtgtatattttcttattcatattctccattgtacctggcatagggctaggccactaggttgtgttggctgcctggtgttgggggtgcaggggcccagggtctagtcatgacttgtgactgggttcactacgagacctccagaaggtcacgacactgtggcctcagttttatcatccatccagtgaggcatttatgcaccccctcctaatgttattgggggatgggactccatgaagaaattcaaggaaagcagttcatgcttcccaagggaaccctggtggtaggggtggtttctgatgggtctagctagtgagagctccacaccttgccctttccctggagaggcaaagatgcacacactgcctcccttcccctcctgccctgtatacaggaccatagcaggggagaaagggaagggttgatcttgcctttcccttcaggattgtgtggctgacatgctgaccggcagatgactccaggcttgctgtgtgtctggcggtcagggccagaattcacattattgacccgcattccaggatttgggtaggtgaggcagaaagggtagagggcttcctgagatagcttcaggctggggagtaggatttgatctgggcaaaacaaagttgggtgtcacccttgcagagttccgtgcccctctgtgcagctgtggcaggggatcatagcagcaggctatgggaacggacaagtgcatctatatgaggccacttacaggaaatctacatgtccagatcaatgcccatgcccgggccatctgcgccctggacctggcttctgaggtgggcaagctactctctgcaggtgaggacacctttgtgcatatctggaagctgagcagaaacccagagagtgggctacattgaggtggaaccctgtcatggtgagtgtgtcgccgacacccagctgtgtggtgctcgattttgtgatttcccaaggcaactcctttgctgtgactggctatgaccttgcggagatccggagattcagcagtgtgtgagaagagcagccttcctttgtccctgtggtattcataaagtacccgctccacccaaaaaaaaaaaa

SEQ ID NO: 113220 - DNA, 1466 bp, Homo sapiens
tctcgtccgcattccggttacgacgctttcgcggccgcttctagtagtttccaggcgctgccgggcggctggcactaagcggtcctgaggctgtggctacggctgctccggagctaggtggcgccgcgataggagagccgatggccaagtggggtgagggagacccacgctggatcgtggaggagcgggcggacgccaccaacgtcaacaactggcactggacggagagagatgcttcaaattggtccacggataagctgaaaacactgttcctggcagtgcaggttcaaaatgaagaaggcaagtgtgaggtgaccggaagtgagtaagcttgatggagaggcatccattaacaatcgcaaagggaaacttatcttcttttaatgaatggagcgtcaaactaaactgggacaggtacttctaagtcaggagtacagtacaaaggacatgtggagatccccaatttgtctgatgaaaacagcgtggatgaagtggagattagtgtgagccttgccaaagatgagccctgacacaaatctccgtgggcttaatgaaggaagaaaggggtgaaaccttctaagagaagcaatgggaatttacatcaaggaccctcaaaacagagttcaccccagggcatggatcttaccctacaaatgaatggaagagtcagtagaccccagtggggcaagcccagcacctgaaacttaggagccgccagggttaaggcttgctcccttcaaaaacccaggccagacctgtttggagtcaaaagtccccacttgtaagatcactcttaagggaaaccttccttgaccgtcaaccagaggaagctctatagagtgtttaccacccaaagagcttggtgcagggccttttaccccatgcttcctggcaacattaggaaggcaggacagaggtgggaaagtttccacatgggtaggatgggcaaccgtctctggggggattttacttgatcttgggtcccctgagaaacatattgtgattgaagtgggaggttttaaatcttgggccagaggggacactttgccacccatcaccttgaccttcatcgaacaagaacggagagacttgagctgtgccatggaaaggtcggaggcatccctgctccctgaggaagcagcggacgcgacagggctggcaagcgcgtacctactttgagggcatttaaacagacccttgggctatggcgcacgcttattttaggggccagcggcaggggacctccagcctggtaggcaaattcagtccagctctctcctggactgggggcttgcgactcacaggattgcatcgtcccagctgctaagcttggggccggggcccctcccttccacatataccttgggtttgtgcatgttttctgctggggtgggttcagagggcaatttctcttttatgtgtacatatgctaaataaacataatttaaaaaacatgaaaaaaaaaa

SEQ ID NO: 113221 - DNA, 1969 bp, Homo sapiens
gttacactccaaaatttttttttttttcttttgtgagcatggggctgtattttaatacaagaaagacattgctctagaacatggctcagcctttgcttcagggcctgagcacgtttattttagccataagggtaagggagcaggtcagaaatgacttttagtgtaatcctatctgtaattaaaaatacaaatgctgtcataagatcaaatgttatcaaaaatcagtatttaaaattaaatttacccccaaatttcatttcaaaaaaaatttgtaatgttctttttcagtgaagccctttgcactgctagagctgaagaatgtgatccaatcggcttgttgaataatccccgcaccagtaggtattcccgcttgaagcccaactctagcctggggggctccgagagccgaaagacacagatggggcccctgccgccccctccgaagagtccggatggggcgcgccccgtccccgggtgcatcaaagaggctggcccggccaggggccgaagccggctggcaccgaaccccggcgcacttcgccgcggggggggctgggccgttagtcggctcgaatttaaggcttggtatccaaagctgcggccggtcaggcgaggcgaggcgaggcgaggcgaggcgacgtgagcgaggggtgctttagggagaacaaccgctggcagcttcaatgctgggtggctaacgctcgacggtgcccggcagcaacccggccgacaaaccccgacgcggatcccgagctgcgtcgcggacaatgctgcgggcccgtcccggactacgactcccgacgggctctgcgaccgctccggggcggcccagcgtgcactgcgccggccagttttgacagccgggcgccctactcggctagctctgctcccagcgagggacgctggccttctcgcggctttcccccgatatctctctttattcccagctgcctgaaactcggtcccacgaatggcaggcagcgtccaaaattcaaccccgtaaagccagcaccagccaataaagcgcacggatggaggccacgtgacagcagtgggccggccctccggctgagccctgatctctatggtttccgcggctcgctagaaggagtgtggtccaccggaggactccctacattcttcctccattacctcactgcctccggtggctgctgggataccggaggactcgggtcccggctcgactcagtcctccagccgcccggggaatacctctagtttttcccggccgccgccgccgccgccgccgccgccgccccgccgcttcctcctccgcctgccggcctcgcttcgccgcgccccgtccgcgcacgtcgtccggcccgcccgcaggccagcttctctcgggagcctccacccaggcgcatggctccatgaagcaagaggaggaggcagagcgcgagagatcccgtccgccccagccgcgtctgggccaggagaaaagcaaaaccatattcctgctgctgtcagttttgatgcactgagaaaacttcagagacctaagctttttccagaagaagagaagctttactggtgttccagccctaagaaacctttgttcaagaaaacggcagatgctctgttgaatccactggagattgtcctgatactaaggacaagtatcaaccatctttcctgtgaaaaattccctctcgtactttagttctgtggatccaaaatttatagcattcttctaccaccacaggggctcatatgacatttaacagacaagacacttttcagaaagacaggttgttcttttgggccacatctaagaaatctttgtctagccaaaagccacaaataatttctcattttttggcttctggaagatgtacagttaaatgttatatttgggactgttatctaatttgattaaattgcactctacaatatgatatttgaattgatgaaaaattagtaaatgttaatattttttaaagtaaac

SEQ ID NO: 113222 - DNA, 5080 bp, Homo sapiens
atgggtggaaacatgattcaaacttacacaatttttcttgctatttttcaaatatgaatcttactatatattctcggtgaacaccaggagactattaaagaggtctgctgttaactgtaaagaaaaaatgctcgtagctatttgcttcctggtattggagcagttcagttgtttagtttataccattggattcaattcattgcaccatggttgccaaaagtgcctgaggtcataatggattgttaaaataactaaattccagtggttggaaactctaggtttgtaccattttttctgctgtgggaaaaaacaacaacaacaacatgatcaaggtaacatcacatttgatgtataatattatactattaatggaatatcagtagacaactgttaacccattagtagcatgagtataaacagtacacctgaataaattggagacattagccactaggtttaacagtggaatcttgatttgcctaggtgacttctgggattactgtttgacaaataagagtaacattttatttcatttcagaatttacgtcactttttagctacaagagtaggaagaaggtaatcggcaaggcagaagagtatactctttgccttaggatagcgtaaactcaggctgagacatacccggcttatagagttcttctagatgtgtagactgtaaatgcccaaatcctctcaactaaagttttagtgattccacaaagcctctcatgtaaatttccagtgattccaccattgcacttgtgaatatgtatccttgttagtacccagggatgtcctcgagcaccagttttattttatctgccattgcatctggattccattacagcctctcagctgttactgcctgtggacagttacttctgcttactgcctgtagagagttacctaacttctcttctcagttcttcctcaggtcctggctattttggcctcagttgaagggagtcttgctctcatctctgagggttttaagtttgtttgatcccattgttgtcttttctagctttgagcatgtttttcagtattcatattttaacttactgagaacattaaagggaaatgataaactcgtggtggggatatggcagacaggtgcttgtttgtttgagagaagtagcagaagagataaaatacaaagtgctatatgtttcagctggagaggaaagagagagaatttattagattatatacttgtcccatggcataccacgtatatgtttaaatagggacacatctccctatgtttaactatacttataaacaactttgatacacattgcgtcttttattctgtcacctgatattttagtgtatctcaagttacagattacatgtgtccttaaactatttctgaatttggacttagttccatatacagaaagaactttagaaaattcattaatttggatcttctattgatagccataaatattatgtttatgtattctaaaacctctttgtttagttagtactgttcatgaatgtaacaagcttcaatttctcatttgtgagtagtacatttgctttttgtttgtttgtttgtttgtttttgagatggagtctcacgctgtcaccaggctggagtgcagtggcgcgatttcagctcactgcaacctccacctcccaggtgcaagtgatgcccctgcctcagcctcccgagtagctgggactacagacacccgccaccacacctggctaatttttgtatttttagtagagacggggtttcaccatgttggctaggctggtctcaaactcttggcctcgtgatttgcccgcctctgcctccccaaagtgctgggattacaggcgtgagccaccacgcccagccgtacatttactttttaaagcagcagactaggtacactaattctcactcaaatattttcatgggaatgtagttatcaccaagtcctaaagtattatttatgccaaaaaaaatttcattttaaggactacaaaaatgattctaattaaacattttataatcaatagtaggttgggtctttagccattatatgtgtatatatacagacacatatgtatacacttacattttgacagggtcttcattgagtcttgatgcactttaaacccagctggctaccagagatgcgaaggtgggctctttgaagattagcaatggacgtttctgtcacttgagaaaaggaaagttctttgcctttaaattacacagttttcatcatgcccacaatctatattattggctggttaaacagcactgccctattagcaatgttaacaaaaatgaaattatttattggcggttatagattatctaattcaggaaatttctgagctcaacttttacagcaactgttatgccttctaatttagcaattgagttatgagtaagttttgtgcttaactcctagaccctattgttgataaccagatcaaatatagtctgtacagaggaaaacactgggaacatttagtatttctaaagcctcctttggagttactactgattgtaatttggaactgataataggtagagattgctaacactgttttttttcctggatcttttttatgccagaaattaaacaggttctgctaactcttttttttctcttggttatcaccagaatgaaaatatttaaagtgatgactctagaaaagccatctgtgcctggttaacattgagtttgagtctcttcaatatatattgatcatgtattgattaatctttattttttcatattttggctagacaaattcagatctatataatggaataccccttcttgagtgaactatactactaatctacatgattatatagtaaggaaaaaagaagaaataactgtaataggcatagtgtttgttgttggttgtcttgtcattcatgtgatactactcatttccaaaattcacacaaacttacatgaggtggattatttgttttgttcattatttagttcctatatgttttttctttagaaacagagtctcattctgtcacccaggctggagtccaatggggcggtcatagttcactgcagccttgaactctttggctcatgtgatcctcccatctcagcctcccacagcaggtgagactacaggtacatgccactgtgcctgactttttaatttttttgtagagacgaggtttcagtttgttgcccaagctgatcttgaactcctggtttcaagcgatcctcccacctcggcctcccaaagtagtgggatttcaggcatgaccacctgggcctagttcctatacttttcttaattcttcagacttctcacatttagtatagtgcattcatttcatcttgctgtttattagcaccctttgtgggccaagggaaataaaaggtgggtaaaattcagttttcagtttagttcttggaaagctctggggaaatgggagggaaacacaaaactatggaatttaaactagggggctgtttgattttctggaacccccaggataaaatcagtttggacccacattttccattttagggtgttagggtccaaattagcataatgtcttgcattattattagggttcagtgtggaaactttacagtgctgcatttgaagtttagtaactggttattattaatcatttgggaaaaatgaaaatgtgttgggactttctatgactaggcatttgttgattatttttcatgattgctttttgttttctcattgtgtaggatttgtgaacttgtatattacaggaaacaagatactttgtaaaatttactggggaaaatccatttggagtgcatgacatttgccaggataagaaagcagtaatatgtttgtattataaaattacaccctgccagaaaactttctttcctagtaaggtaaatgtagaagggacttttacagcatagtaagttgattaggagccaaaattttattccagtttttttttgaactaagaatgttttaaattctgtaatgaacttttatgtttacccattactcatgcattctttcacaatatgtttaatagcctgaggaaataggaaagctgtgaagctactaccattctttacttttaataagaataataggaaagaaaagtcaggtcagtaatccaaatccaaatatgtaatactgcaaatgctcaaggaagtcacattttttgataaatcgtattgagtacagaagaacttatatgaatttattatctgttaataacttagttttgacaacagaataacatttggaaattgtgagaataatcaagctgtttttccattaacagtgtaaattcataacatgtccttcaaaagggtgatattctaagctgtcttaattgtctacggttggataacttttaaattaaagtacgggactttctggaagtgtttggggcagttatggctgcccaaaaacaatctgtgttttgaaatacccaattaatcagttaatttctgaaggactttgtataggggcctggatatatgagtcagaatctgtctgtactcattctgtacattgtaactttgaacacttatgaaaaactgtatctgttggtgtgttttgattagttagtgtagatttgtttgcgtatttgaattccgattttacgtttaggaagactaaaagtagcccattttggtaaagttcatatgctattttttaatgtcatttttgtttttaatatttataccaatagtgatgttacctagtaaaaaatgtttaatagataacaccgtagagcctattaactggttcaaaagccctacatgataggcatattttgtatttcgtgttgcactcgttcctgtttcatattggactttttaccatccccctttttagcaaaaaaaaagagacacatttgaattcctctttagcataaagctgtgcattggaaactatgtgactgtatcccatacggttagcaaaatactctttgccaccaaaggtaaatgaaactgtaaaatacctctggatatttgtgccaatgaacttttcttagcatattaggattaaagcaaaaataatcttttcagtatgtttcatctaggacttacaataaatgtttaaaccatgaaaactt

SEQ ID NO: 113223 - DNA, 2971 bp, Homo sapiens
  misc_feature (1)...(2971): n = a,t,c or g
tgagaaaaggagggaagctgggcttgcttcagttggcaccgtgcagattttccatttaccacagggcctaccctccgggcttcaatatcactatttggccacatgccctaaaccgttcctccattcccttctccccttatcagcatctgtctcaagtaaaatgggtattgcaaggcttatcataagacacagaagaataagatatatttaagaggatttttttgaaaagggctaaaatttagaagggactgctttgatttaaactttgcattgttcctaatctatacaacatggtgtccagatgggaggcatgagcatatggcagtcaagttccatcactcatgactgtgtgacctcaagcaggtcatttaaactcatgtgcaaaatggggttgagaacccttcctgtatgtttagaatgtgagctactgggaaaacagtgaggtatggtggtgtgccttacttgagaggcggaggagagcttgtgggagccaaggagcaccttcgacatctggagtctggcaggagtgatgacgggtggaggggctagctcgaggcagggctggtggggcctgaggccagtgagtgtttgtggattatgcgcccaggcatcgagcagacggggcgacatcagctggggacgatgggcctgagctagggctggaaagaagggggagccaggcattcatccccggtcactttttgttaacaggacgtggcagctggttggacgaggggagctggcggggcagggtttgatcccagggcctgggcaacggaggtgtagctggcagcagcggtggcaggtgagttccccatctgccgggcaggtgagtcccttccctccccaggcctcgcttccccagccttctgaaagaaggaggtttaggggatcgagggctggcggggagaagcagacaccctcccagcagaggggcaggatgggggcaggagagttagcaaaggtgacatcttctcggggggagccgagactgcgcaaggctggggggttatgggcccgttccaggcagcaccgagcaagagggcagggagggagcacaggggtggccagcgtagggtccagcacgtggggtggtaccccaggcctgggtcagacaaaggacatggcaagggaacacaggacagtagggttccccagcttccacctcacccaccgccaattcatttagttagcaggcacaggggcaagctccggcacggctttctcaggcctatgccggagcctcgagggctggagagcgggaagacaggcaattgcttcggggagttgcagcatgtacgtcaccatgagggcgaagcggcccacgggaggggggcccacggaacattgcacagcaaggaggctgcaggggctcagcctgcgggcgccggtcccacggaggcactgcggcccagggtctggtgcggagagggcccacagtggacttggtgacgctgtatgccctcaaccgctcagcccctggggctggcttggcagacagtacagcatccaggggagtcaagggcatggggcgagaccagactaggcgaggcggcccggggcggagtgaatgagctctcaggagggaggatggtgcaggcaggggtgaggtagtgcatcgggcggcgagcgtttatgcactgggcctccagaagcccgtggccaaggcgggcctcgcgggcggcgacggagccgggatcggcgccttatcgttcgggctggagactaggcctggtctccagctggggtggacgtgcccaccagacttccgaaggccaaggacgcccaggtccggtggacgtgacaagcatgacattgacatggttcggtgtgacggcgaggacagatgaggcgccgtcgggccttcctgaacaccttaggcttggtggggctgcggcaagaagcgggctctgattctttacttcctccacggagtcggtcacactatggcttgccctcttggttccccaagaacccacaacatgaaagaaatggtgctacccagctcaagcctggggcctttgaaattccggacacaaaaccctctagccttgggaaatgaatatgcttggcactttacaaccacttgcacttaccttgacttcaggaattcggctcttgggaaggttgaagcttaggaggaaccagaccttcattcagcccaacattcaaaagacaccattcgggaacaggcaggcgcccgcaggcacccaccccggcaccgggcgaacttccatctttcatgggccaccccctggcgggcgggacggtttgaaccaccaggccaccacattcattccccaggaggttgaggtttctttcaggcggggattgacggccgttccccaccaccttccctctttcttcttttttcatccttcggccccttggttccgaaccttctcttctttgtttctgagctttcctgtctttccttttttctgaggaggatttcaaaggctttccaaggattttgtttttcccccgttccctttttggaattttaaattttggcaattaaggtcaatttggcattgggttggggagtttgtggggagacgggccttggagttttcaggtacggagtgtggcgtggagtgttggaggccacctttgggcaaagtggctggtggcagggggcccgggccgccctnccattttggggccggggtgaattgggggcggccggttgttgttgcccgagggcttcaaccctgccctcgcctagtctggaagctccgaccgacatcacggagcagccttcaagcattccattacgccccatctcgctctgtgcccctccccaccaggggcttcagcaggagccctggactcatcatcaataaacactgttacagcnnnnnnnnnnnnnnnggggggccgtttaaaaggatccctgggggggccaaagttaacgcgggcaggcaaggtaaaatttttttccttatggggggccgaataaaaaccaacc

SEQ ID NO: 113224 - DNA, 1329 bp, Homo sapiens
actgcacgcactggatcggaattaccgggtcgagccacgcgtccgatggtaagaatggtgcctgtcctgctgtctctgctgctgcttctgggtcctgctgtcccccaggagaaccaagatggtcgttactctctgacctatatctacactgggctggtccaagcatgttgaagacgtccccgcgtttcaggcccttggctcactcaatgacctccagttctttagatacaacagtacagacacggaagtctcagcccatgggactctgggagacaggtgggaagggaatgggaggattgggaagccaggacaagccaactttcaggaaggccagggggagggacattcttttatgggagaccctggaaagacattgtgggagttatttaccaacgacagtaaacggggtcttcacgtatttgcaggggaaggtttggttgttgagatcgagattaacagaagcagcggcatttcttgggaatttttactatgatggaaaggactacattgaatttcaacaaaggaaatcccagcctggggtcccctttcgacccagcagcccagataaccaagcagaagtggggaggcagaaccagtctacgtgcagcgggcccaaggcttacctggaggaggagtgccctgcgactctgcggaaaatacctgaaatacagcaaaaatatcctgggaccggcaaagatcctccctctgttggtggtcaccagccaccagggccccagggagaaaaaagaagaaacttgaagtgcctgggccttacgactttctaccccaggggaaaatttgatgttgcactgggacttcggggccgggcgaggttgcagggagccttgagtttacgggggagatgttctttcacaatgggaaatgggcattttacccagtccctggggttgttgttggcagtgcccccccgcaggaacacagccccccctactccctgcccacgtgcagcacagcaagccctggcccagccccttcgtggtgcccctggggaggccaagctaggaagcaagggtttggaggcaatgtgggatcttcagacccagttagcttgccctttccttgccttgatgttggggagctgaacccacagaaatcacagtcaatgggttccacaaggcctgaaggagcagtgttggggggacagacaggaggttggatttggagaccgaagacttggatgcctgtcttgagtagacttggacccaaaaaaatcatctcaccttgaggcccagccccaccccattgtcttaatctgttaggaagcttaataaataattcatccctcccttgcctagcataaaaaaaaaa

SEQ ID NO: 113225 - DNA, 1948 bp, Homo sapiens
tttttttttttgtagagagaaaaatttattgcaaggcagccaagcaaggacacaggagtctggcccaaatctgtctctccaagttggaggctggggcagattttatatacagagggtagtgaggcatgatatgattggatcttgtaatgaggggattcaggaggcttgatctgactggatcacgccagggctcaatctgattggatcaaggatcatgccacgtggtgtccacttcttaactcagtccctgttcctcagtctgagcacttaggttccacgtggatttgcacgcttcgttcatctggacatgcccagggtatgtaacttgcaacctgggggtccacgacaactgaaaaacaactcgccattttattacacaaagttgaaccagattgggctgaatctgcggttacaatgtttaccagtttattataaaggatacaactagaggggcggggcggtgcccgcaagatggctgcgcccgaaaaggtgacatttccagagaaaccaagccacaaaaagtacaggggccgccctgaagaaggagaaacgaaagaaacgtcggcaggaacttgctcgactgagagactcaggactctcacagaaggaggaagaggaggacacttttattgaagaacaacaactagaagaagagaagctattggaaagagagaggcaaagattacatgaggagtggttgcttgagagagcagaaggcacaagaagaattcagaataaagaaggaaaaggaagaggcggctaaaaaacggcaagaagaacaagagagaaagttaaaggaacaatggtatgatcagcagaggaaagagagagaagaggaggagcagaaacgacaggagaagaaagaaaaagaggaagctttgcagaagatgctggatcaggctgaaaatgagttggaaaatggtaccacatggcaaaacccagaaccacccgtggatttcagagtaatggagaaggatcgagctaattgtcccttctacagtaaaacaggagcttgcagatttggagatagatgttcacgtaaacataatttcccaacatccagtcctacccttcttattaagagcatgtttacgacgtttggaatggagcagtgcacggagggatgactatgaccctgacgcaagcctggagtacagcgaggaagaaacctaccaacagttcctagacttctatgaggatgtgttgcccgagttcaagaacgtggggaaagtgattcagttcaaggtcagctgcaatttggaacctcacctgaggggcaagtatatatgttcagtaccagtcggaagaagaatgccaagcagctctttctctgtttaacggacgatggtatgtacgcaggacgacagcttcagtgtgaattctgaacaggagatcggtggaaaatggcgatttgtggtttatttgaaatacaacaatgtccaagaggaaagcactgcaactttcttcatgtgttcagaaatcccaacaatgaattctgggaagctaatagagacatctacttgtctccagatcggactggctcctcctttgggaagaactccgaaaggagggagaggatgggccaccacgacgactactacagcaggctgcggggaaggagaaaccctagtccagaccactcctacaaaagaaatggggaatccgaaaggaaaagtagtcgtcacagggggaagaaatctcacaaacgcacatcaaagagtcgggagaggcacaattcacgaagcagaggaagaaatagggaccgcagcagggaccgcagccggggccggggcagccggagccggagccggagccggagccgcaggagccgccgcagccggagccaaagttcctctaggtcccgaagtcgtggcaggaggaggtcgggtaatagagacagaactgttcagagtcccaaatccaaataaactagttttgttcttaaaaa

SEQ ID NO: 113226 - DNA, 1308 bp, Homo sapiens
  misc_feature (1)...(1308): n = a,t,c or g
tttctatttttgagatagggtctcactctgttttccaggctagagagcaatagtgcaatcacacctcactgcagcctcagtctcctgggctcaggcgatcctcccacctcagactcccgagtagctgggaccacaggagggcaccaccatacctggttttaaaactttttgtagagatggggtctcactatgttgcccaggctggtttcaaccttctgggctcaagtgatcctctcacctcaagcctcccataagtgctgggactacaggcatgagcccacacctagccccaatttagtgaattttaaggaaggcattttaaaaaaatgaaaactaaaacataggagggatatccgagggttctaagggttaaggaattttctttatgaaacctggcttgggaacacagttgtaaacaaatgggactgatttatgatggaaggcacgtttcttgctgcagatcatggtctgaagtttgaaagccaccagccctagagggttctgaaaacttctccttcctaacacagctgaaggaaaaggggtgggtaggggccggaggcacagggacatctccagggtttgggacttttccaacatgatttgcagaaggcacttgattctgggaaagtaggacctttgggcatttcgaccctcacccacactcccacacccacttctggcacagatcggtgggtgcatcccgagggcaggggctgagttaggaacagggacatccctaggacttcgggcgggcagtggactatttatttcaggaaatgggccacatcaaggggcccgcctgcccttcatcctgcaaggggtacttgggcatgtggaggcccctttctcccctggtgttgcaactggagaggagtcggttcctgaagaacagatgggagagtgctggggccaggtaccctgggagagaggagggaaatgcaatccggcacaggggctgcggggatcggggcagtcaggaggcggcaagtgcggtgcaagggcccccccacgcggccagctgtggaacttccaccacgactccctgtcctctcctgagcccgcccatcacgtgtagaagctcagatgctgggcgccaggagggcggcttcctggctctgggcaccgtggttctgtcctaacgaggggcgctctctgggtgtaaaaacagatgttctggctgggcgcggtgctcacgcctgtaatcccagcactttgggaggntgaggtaggtagactgcctgagctcaggagttcgagactgcagtgagctatgatctgagccactgcattgcacccgacagggaggcc

SEQ ID NO: 113227 - DNA, 2278 bp, Homo sapiens
tcccgaccggcccgcggcagcctgcgccgcgccatggccacctccccgcagaagtcgccttctgtccccaagtctcccactcccaagtcgcccccgtcccgcaagaaagatgattccttcttggggaaactcggagggaccctggcccggaggaagaaagccaaggaggtgtccgagctgcaggaggagggaatgaacgccatcaacctgcccctcagcccaattccctttgagctggaccccgaggacacgatgctggaggagaatgaggtgcgaacaatggtggatccaaactcacgcagtgaccccaagcttcaagaactgatgaaggtattaattgactggattaatgatgtgttggttggagaaagaatcattgtgaaagacctagctgaagatttgtatgatggacaagtcctgcagaagcttttcgagaaactggagagtgagaagctaaatgtggctgaggtcacccagtcagagattgctcagaagcaaaaactgcagactgtcctggagaagatcaatgaaaccctgaaacttcctcccaggagcatcaagtggaatgtggattctgttcatgccaagagcctggtggccatcttacacctgctcgttgctctgtctcagtatttccgcgcaccaattcgactcccagaccagtgtttccatccaagtggttgtggtccagaaacgagaaggaatcctccagtctcggcaaatccaagaggaaataactggtaacacagaggctctttccgggaggcatgaacgtgatgcctttgacaccttgttcgaccatgccccagacaagctgaatgtggtgaaaaagacactcatcactttcgtgaacaagcacctgaataaacttgaacctggaggtcacaagaactggaaacccagtttgcaagatggggtgtacctggtgctgctcatggggctcctgaagggctacttttgtgcccttgcccagttttttcctgaccccggacagctttgaacagaaggtcttgaatgtctcctttgcctttgaagcttcatgcaagatgggagggttgggaaaagccaaaaccgcggccagaagacatagtcaactgtgacctgaaaatctacactacgagtgttgtacaaacctcttcacccaagtaccgtaacgtggagtgaggggctgccctgggcccaccactgccccaagagttcttgctgttggcgtactggaccctcctccgaactgccttaccctgcttaattcctgtctcttgcactgtgctctcccacaagtccagctgcaacccagagaaaagtggaaactgaaattaggaaggaaatcatcaataactcagtgggctgacccatccctcccaggcgctggggaccaacctagcaatgaaggttgggaaggttgtttcccttcccggtgccaggtccagatttcccttccatgattttgggaaccaggttaggcaaaggagtccccacaagttgaaattaaggatcctagttaccattcaaaggatgctaactgtgtgtcaggccccacactaagtgctctgctctgatatactcaaggccattaatcttcaggactcccattgacgtaggtgtttcattccccttttacagatgaggaaactaaggcttggaggttaaatgacttgccagaagttggaatttttttcctctttgaacataacctctcccttctccctaaaggtaaccactattctgagtccaatcatcaaggttttgcttttctttttagctaagtatgcattcctcaatagtagacagtacaacatgtttataacaagccaattacattatgttctttgcatgttctaaagtgtgtgtatgttgtgtgcacatctggagcacgtgcacatgtacacctgagccaaaaacacagagaacccactgatctcaccactggggcaagctaggtcagagcttagtgattcacactgaaattggcaaattggatttaacccaattaatagtgtgtgtgtggcaggagtcatgtccctccacatccctttgtacaaatggagaattactcttaattcccttccagaatttataataactcctgttactttggtttcagggtgacatttggggaaggattttgtttaggaattaatgggagtgggcacattttgcagcctttttgcttggattgcatgtaatgggaaatgccctatattttcctggcaaaataaggtactaaatttcatttattcgttaaggcaaatgtaccattttgctcagggcaccggag

SEQ ID NO: 113228 - DNA, 2009 bp, Homo sapiens
gtggcaccgagaggcaggggcaggataggagagtctttgagacaccaggtccgcgccggcgtctcgggggtaaaatgtcggttccaggaccttaccaggcggccactgggccttcctcagcaccatccgcacctccatcctatgaagagacagtggctgttaacagttattaccccacacctccagctcccatgcctgggccaactacggggcttgtgacggggcctgatgggacgggcatgaatcctccttcgtattatacccagccagcgcccatccccaataacaatccaattaccgtgcagacggtctaccgtgcagcaccccatcacctttttggacccgccctatccaaatggtgtggtcttccctgcaccaggatgatcgtgagtcagctgtcctattaacgccggtgctcttgacctggctgtcctgcggggagccttgttgccttgctgggggtgcataggcggggttgttgtttcatccccttctgcgtggatgccctgcaggacgtggaccattactgtcccaactgcagagctctcctggggcacctacaagcgtttgtaggactcagccagacgtggagggagccgggtgccgcaggaagtcctttccacctctcatccagcttcacgcctggtggaggttctgccctggtggtctcacctctccagggggcccaccttcatgtcttcttttggggggaatacggtcgcaaaactaacaaatctccaaaccccagaaattgctgcttggagtcgtgcataggacttgcaaagacattccccttgagtgtcagttccacggtttcctgcctccctgagaccctgagtcctgccatctaactgttgatcattgccctatccgaatattttcctgtcgaccccgggccaccagtggctcttttttcctgcttccatgggcctttctggtggcagtctcaaactgaggaagccacagttgcctcatttttgaggctgttctccccaggagcttcggctggaaccaggcctttaggtggccttaccatttatctctatatccggctctttcccgttccctggatggacaaaaatcttgcccttgacaggactttaacagggcttgggctttgagattctgttaacccgcaggacttcattaggcacacaagattcaccttaatttctctaaatttttttttttttaaaataccaagggaagggggctaattaacaacccagtacaggacatatcccacaagggtcggtaaatggcatggctaggaaaaataggggccttggatcttattcactggccctgtcttccccttggtttctcttgtggccagatctttcagttgccccttttcccataacaggggattttttttcttcataggagttaattattatgggaacagttttttatggacctcccttttggtctggaaataccttttcgaacagaatttctttttttttaaaaaaaaacagagatggggtcttactatgttgccccaggcttggtgtcggaactccctgggctcaagcgatccttctgccttggcctcccgaagtgctgggattgcaggcataagcttaccatgctgggcctgaacataatttcaagaggaggatttataaaaccattttctggtaatccaaatgattgggtggtcatttttcccatttgccaaatgtagtctcactttaagaaaaaaaaagcgaaaaagaggggggtaatttgcctcccggcctttacttggggttaaggggattcttaaacaccttcatcatggaactctcaaaggggggcccgttttggtttcctgggggggggttttgaaaaataagggaaagcccattttgaccatgtctggaaaccatggggcggatgcttggaaaccaaaactgtttcaaaggaatctaaagcctgattttagttttcaaaaacaaagccggttgcaaaacatgaaaagactggatttttagaactcaagcagcaagccaggattctaggta

SEQ ID NO: 113229 - DNA, 683 bp, Homo sapiens
gaacaacttgaagtcactggaggctcaggctgagaaggtaggccaggaggatggtgtgggggaaaggcatcttttaagagctgctcaaaagaggccctgccagaaagcaacacttacagtagacattttagtaaaatggcaatattgtgaggtgatttttggagagttactagataacaaattcttttttttaactagagaatttattttatgttagggatatgaggcatcaatttaatttaaaccaagtgccaagtggataagttatcttgttgttatcccatgtaaaacaataggcaagaaagcatagaatgtattgcagtgtgccatttgatatcagaggttccattacctcctaagagatccttaacatctgttggctgagctggcgagttctttgcatgagaagccatgagtagattgagctgcagcctgacatctggaatgctctttctaattacagcactcgcacaaggaagacagatatgaggaagagatcaaggtcctttccgacaagctgaaggaggtaatatgagagctgtggatgaagccaactggattttaaatgagtttgttttcatggaaccggtcagggccttttcattttaaagttccaatgatccaagtcaggaatattcaaaggtcgccttggaagttatgactgtgctaactgccatttctca

SEQ ID NO: 113230 - DNA, 989 bp, Homo sapiens
gaaaagattgcgcgaagcgaggctagcagtcggacctagtctccgccccttcctgctgtgttcaccatcccagcgtcccctgtcccctccacccgaagcgatgggtggttccgtcaggcgcttcccgcaccttcccgctccctgcttgcaaagtggttgtgccccaaggtccgcctccaggccacgtgggtgctgcgggccaagctttcccttcctttgagagaggtttccgttgtatggagcagagcttccgggctgcgctcttcgttgcccagtttccgctcagtggtcgcgtctccgccccccacccaccagtcccgctgcattctcggccgggctctaggcgccatggctccccgcgggaggaaagcgtaaggctgaggccgctggtggtcgccgtagccgcgaagcgagagaagctggcgaaacgccgggaagggaatggaggaggcgaccgttgttatcgagcattgcacttagcttgacgcgtctattgggcgcaacgccgcgggccctggagccagggcgcttgcgcctggaagggccccagagccttccagtaaaaggtgaaacccgacagaagccccggaggggccagccttgcgagggttgacgcttgtgcccccgggacgggcagcaagtgcggagctcttgggactgggattaagaaggggccccccacgcaaacttcaaattccctgagccctcaagaggtggtggaagagttgaagaagtaccctgtccgtaggggagattttgggtagaagccttcatgctgagcttttgtgttccctgggtgatgtttggaacatttaattgatgggaacatgggccaaatttcattcattgatccttgaaggccatggtttcttccctgccagaaatgaaggttcagttatgaggcaaccactctagtaagggcattgataaaagttacctggatttggtttaataaaagttgaaataaagtatttgagtaatagagtaaa

SEQ ID NO: 113231 - DNA, 1184 bp, Homo sapiens
ttcggcacgaggaagcaccgtggctgctattatctgctctccgcgcctgacccctcccaggactcgtgatgccaaggccgcgtgcgagcgcttacgaagagtcggggttgagccccagctgagccgagggctcgcactcttctggtctcccaggcccaacccacctgaagaaatgagtggtggattggctccaagtaagagcacagtgtatgtatccaacttgcctttttccctgacaaacaatgacttgtacccggatattttccaaagtattggcaaaagtttgtaaaaggttaccaatcaatgaaagagtaaaagatacccaggaaagaagttaaaggggttgcatttattttatttttggataaagactctgcacagaaactgtgccagggccaataaacaacaaacagttatttggtagagtgataaaagcaagcattgctcattgacaatggaagagcagctgagttcatccgaaggcgaaactactttgataaatctaaagtgttatgaatgtgggggaaagtggacacttaaagttatgcctgtccaaaaaatatgctcggagaacagtgagcctcccaaagaagaaagaaaaaaagaaaaaaaagaaagctcctgaaccagaagaagaaattgaggaagtagaagaaagtgaagatgaaggggaggatcctgctcttgacagcctcagtcaggccatagcattccagcaagccaaaattgaagaagaacaaaaaaaatgggaaacccagttccagggagtcccctcaaacatcaggatgattccaagacgcacaaggataaagaaaagcacatatttccagtgatgaggaagaacttagtgattaaaatcttgccccagcacagtaataaaaatcaagatttgttagtaacaatcttgaagagctaattttaataaaaataagaaaaattaatactatcatgttatatactattattgtcatcccaagaaaaaagatattttaaaaatttatttgaaaagttcgattataagggctttattcatgcctgatttgtttacatgaggacttctgaaattaatccttaaaacaaacttcctgaagaccgaaaagttgaatgatttattgttacttatattaataaacttttcaagagaattttgtctttaaatatgggtgttttgtcatcatatttct

SEQ ID NO: 113232 - DNA, 2801 bp, Homo sapiens
  misc_feature (1)...(2801): n = a,t,c or g
acccgaggccgcggctgccgactgggtcccctgccgctgtcgccaccatggctccgcaccgcccccgcgcccgcgctgctttgcgcgctgtccctggcgctgtgcgcgctgtcgctgcccgtccgcgcggccactgcgtcgcggggggcgtcccaggcgggggcgccccaggggcgggtgcccgaggcgcggcccaacagcatggtggtggaacaccccgagttcctcaaggcagggaaggagcctggcctgcagatctggcgtgtggagaagttcgatctggtgcccgtgcccaccaacctttatggagacttcttcacgggcgacgcctacgtcatcctgaagacagtgcagctgaggaacggaaatctgcagtatgacctccactaatgactgggcaatgagtgcagccaggatgagagcggggcggccgccatctttaccgtgcagctggatgactacctgtaactttccggggctggcaggcaccgtgaggtccagggncttcgagtcggccaccttcctaggctacttcaagtctggcctgaagtacaaaaaaggaaggtgtggcatcaggattcaagcacgtggttacccaacgaggtggtggtgcagagactctttccaggtcgaaagggcggcgtgttgttccgggccaccgaggtacctgtgttctgagagagcttcaacaatgggcgactgcttcatcctgggacctgggcaacaacatccaccaagtggtgtggttccaacagcaatcgggtatgaaagacttgaaggccacacaggtgtccaaggggcatcccgggacaacgaagcggaagtgggccgggcccgagttgcacgtgtctgaaggaggggcactgaagcccgaaggcgattgctccaggtgctgggccccagatgtcgctctgcctgcaggtaccgaggacaccgccaaggaggatgcggccaacccgcaagctggccaagctctacaaggtctccaatggtgcagggaccatgttacgtatccctctgggctgatggagaacgaattcacccagggggcccctgaagtcagaggactgcttcatcctgtaccactgcagagatgagataatctttgtctggaaagagcaagcatggcaaacacggaggagaggaaagctgccctcaaacagcgctctgacttcatcaccaagatggactaccccaagcagactcaggtctcggtccttcctgaagggcggtgagaccccactcttcaagcagttcttcaagaactggcgggacccagaccagacagatgggctgggbttttcctaccttttccagccatatcgtcaacgtggagcgggtgccctccgacggtcgcaccctagcacaccttcactgccatggccgcccagcacggccatgggatgatcggtggcccaaggccagaaaacagatcttggagaattgaaggtttccaacaagggttgcccgtgggacccttgccacatatgggacagttctatggagggcgacagctacatcattctgtacaactaccgccattggtggccgccaggggcagaataatctataactggcagggtgcccagtctacccaggatgaaggtcgctgcatctggccatcctgactggctcagctggatgaaggatctgggaaggtacccctgttccagagccgtgtggttccaaggcaagggagcccgcccaccttatgtagcctgtttggtgggaagcccatgatcatctacaagggcggcacctcaccgcgagcggcgggcagacagccccttgccagcacccgcctcttccaggtccgcgccaacagccgtgtgagccacccgggctgtttgaggtattgcctaaggctgggtgcactgaactccaacggatgcctttagttctgaaaaccccctcagccgcctacctgtgggtgggtacaggaaccagcgaggcagagaagacggggggcncagggagcttgcttcagggtgctgcgggcccaacctgttgcaggtgggcagaaggcagcgtagccagatggctttttttgggaggccctgggcggggagggctgcctaccgcgcgagtccacnacgggtgaaggacaaagaagatgggatgcccatccctccttcgcctcttttggcttgttcccaacaagattgggacgtttttgttgattcgaagaggtttcctgggtgaagctcatgcaggaagaccttggcaactggatgaccgtcatgcttctggacaacttgggaccgaggtcttttgtctgggtttggaaaggatttctcaagaaggaggaaaagacagtaagccttgactttctggctaaagcgggtaccatcagagacgggaccccagccaaatcgggcatcgggcggacgcccaatcacccgtggtgaaagcaaaggctttgaagcctccctccctttgtggggctggttccttgggctgggaatgaatgattacctggtctgtgggacccccttgggacagggccatggcttgagctggcttgcctgaggaggggcagggccaccccattgttcaccggtccagtgcctttttggaactgttccttcccttcaaagaggcctttagaagcgagcagagcagcaactctgctattgagtgtgtgtgtgtgttgtgtgttgtgttgtttcttttttttttttttttacagtatccaaacaatcgccctgccaaaaattccgcgtcctcgcaaaattgtctacactgccactgttcgggaaattaaatccagacaaaaacattttgaagtgtgaaaaaaaaaa

SEQ ID NO: 113233 - DNA, 866 bp, Homo sapiens
actatagcatgttgttatcaaaactttgccacttccacctccattaagatccagagtacagggtgcctcgtttgctgttggtggaatgcaaaaccggtgcaggcactttgaaagccagttggcagttgtctcataaacataaatattatactgaagctattaaaatgcagagtatgaagacgtaaattttgatccctatgataagtcccacagctgaccttaccccacgaaaactacctcgtccttgaagttggtaactgggtagtcttacctggtgaaatgtctatccacatcaccagtctcatctggagacgtactgccctcctgagctcccccatctctaggccataaaaacggattcagatccaggacttttagatagagcatggtctcacatcgttatttttccggcctggagcacggacagtgcttgagacatttgtagttgaactttccattcaacccaggaattgtgctccttgggtgtctccacaaagaggttaaaaacttgtgtccacacaaacacctgcatagaaatgtttacattcataattgccaaaacctggaagcagccagaaatgtcaatatgtgggtgaatgatacgtggagccaccttgtacttaccctcgtctttctctagaagtgcccgcacgcgtgtgtactgttgattttgacatcttctcatccaccgttcctgtgtagaagtagttcgcggtgctctctatcgagtgcggggccggtgcagaggctatgaatggcttcgacagttgtttcggacgtattctgtcgcgtgactcattgtggtaacgaggtgtgtggttctagcgcccttctgttggttcgggcgcttttgttgtgggtgttcc

SEQ ID NO: 113234 - DNA, 889 bp, Homo sapiens
  misc_feature (1)...(889): n = a,t,c or g
aggcacgtttaatcattcgtttttacggcatatgtactataatacctgtgtgttgcaaatcctggtatttaaaagtctttttgtgtatttgagcatgtaagtttatttggtccaaactgctggtactagtaaagacaagtccagggcataagtaggacttacagcaccaagttccgtcttttttttttgagacagagtctcagttcggtcacccagggctgggagtgcattgggtacagtctgggctcactgcaccctccacctcccgagttcaagcgattctcctgcctcagcctcccaagtagctggggattacaagtgtgtgccgccacgcccggttaatttttggtattgtttagtagagatggagttttcactaatgttngggccaggctgatccccgaccctcaggtatgtgccccaccttggtccccgaaagtgctgggattataggcgtgagccactgcgcctgacctccaagtccatctttcaaaggctctgttgataattgactcttgagagtcattacagtccatcaacagcctgtattctgaatatttgtttttaattctaagacaatgctaaatagccattccaaataaggtgagaactgagactttagggcctgtattatcagctgtacactgacaagctctgaactctattgctttttcaaatcagagaagaaaaatgagtaagaaaagaaaaatatggatcacttaggctttgatgcctcctctgagtttatagtggttaccttctgtattacttaggtgatcctctctaatggcattttaaatctctgttgatacttgtcttacttatgtatctgtttttttttcctctatagnagatagaatttatagatatatatgtattttaaagtaag

SEQ ID NO: 113235 - DNA, 859 bp, Homo sapiens
  misc_feature (1)...(859): n = a,t,c or g
gcggcccccggacacctctccctcctggatgatgtcccctctctggctccaggcctcatactcctcctggctcaagtactctacagcactgggagaagctcttcttaggatgtccactttacaaacctgaccctgcacaccccgctctgtgccctgcacctccatcctgaactatctggacacannnnnnnnnnnnnnnnnnnnnnnnnnnnnnnnnnnnnnnnnnnnnnnnnnnnnnnnnnnnnnnnnnnnnnnnnnnnnnnnnnnnnnnnnnnnnnnnnnnnnnnnnnnnnnnnnnnnnnnnnnnnnccgagcccctcttccagcccaccccagtggggtccaggcccctccctggagcctcaccttgcgggtcacggtgcactgctgagtcatgtcctggatgagggctatgagctgctgctgagccctgcagagaccagcagaggccctgacccagctgcctcctgccagacaggcagcagaagccgtccaccctcctgagaagccccacggcctcctccagggtcgtgtcctccaggactgccttgaacaagggctctgaggcttcgtaatcaacctgagggcaagtcgagaaggtcagtctctttcccccgggactctgaatccagccagaagacagaaggcgctgagggcactgaggcgaggcgcgggccagccctgccgtaggaccactgcctgcacgccttggtcaaaacaaagccacacaccagagcctctgtggggccttcacacctctagtgatgcgtgctacacatagtgctggccagagagtcaactgccaacccttccccagtcgagatcgggggttctttgtgataagcactttcctgtcttg

SEQ ID NO: 113236 - DNA, 1225 bp, Homo sapiens
  misc_feature (1)...(1225): n = a,t,c or g
ttttttttttgagacagagttttgcttttgttgcccaaggtggagtgcaatggtgtgatctcggctcactgcaacctctgcctccctgggttcaagcaattctcttgcctcagcctcccaagtagctgggatcacaggcatgcaccaccacatccggccaattttgtattttcagtagggacagaattttcctcccatgtttggtcaggccgggtctcgaactcctgacctcaagtgatctgcctgcctcagcctcctgaagtgttgagattacaggtgtgagccaccgtgcccagcctaagctggcatgttttaaggcagtnccagtttacatctcttaactttgattttacccagctatgctttgaggggtccaaagggaggccaaaattgcagccaaaacttgattctttaaaggacccagggaattagaatggtcaagcatgtttccaagtttaaccttaggcctgggcacattccttgccaattgctccagatggcaagtgaggggcaactaagtgaaaagattagcaggaagacccacttggggtggacactgatgaaaaaacacaagcagtatcagactcactgttttcaggatttaaattcccccagatgccctgttattgggtctatgtcacttaccagtaggacaaaaggcaatgcttctgaagactagaatatgcaaggaaaaaattaaggtgcctgcctgcctggggcctaacgagccaaacaagtgctaatttcatccatgccaaacaaaattgttcattccttgctgatttgggttttaaggaaccatgctgatcatcagagaaaccaggcaattctattctgaagccccaggggaagaaatggtggggatttctgagttacagatggtgcaggggttaacactatctgccaactaatgaagggaaaaatctatcttggtaaactttggtcttcccataggacatggaaccagagtagcaagatcagggcctgcgtgaccgatcctgattgagcaggacttcctcacataaggtacacaagagctgggcgcagttgctcatgcctgtaatcccagcactttgggaggcccaggcttgtttccatcttctatttgtaagttatttctagcctttcaacatttaacacttagtttcttcccagatagttttctaaatcagtagcattggagcgtacgttctcagggccttctgagactgtgtcacaagtcatg

SEQ ID NO: 113237 - DNA, 387 bp, Homo sapiens
cctgcaggagtctgaacatgagccctcacccacagctccccagcccttccctggtgaccagggaggccctctgcctgctccctccaatgcctgggtctgaggctacctcagtgtcactatcaccagcccactggcatcctgacagcaacctccctaccccggcctctgacaaagcccaatatctgctccccgggccccatgggccccctccagccccaggtacagtctccctgggtccctgggggtcccctgcgggcagcatccctgccccggtgtcagctgcaggctcctgaggagctgtgagcctgggaagcggctctgctgatgtcaggtcacttaaaatagaattccaaatgagcggcttcattagggggaatctaaaattag

SEQ ID NO: 113238 - DNA, 532 bp, Homo sapiens
  misc_feature (1)...(532): n = a,t,c or g
aaaaaannntctcactctaccactcaggctggagtgcagtggtgcaatcatagctcactgcagacttgacgttccctggctcaggttgattctcccacttcagccccccaagtagctgggaactaatgggcaataacccacccatgccccagcctaaatttttgtatttttttatggagtccagggtttcgccatgctgccacaggctgtacgcctctttatgagaagttaacatgaatccattcccctcagtgacaggtaaattaaaatgttaatatgttaacatagtcttaaaatgtaaaaaggttgtcaaaaccaaaacagggctcatatttttattaaataccggggtttttctgtcacggaaagttaataagaccttattccgttatactggacaattcagcatctagaaggttctcactggtatctcgttaagtttattttttgagtacctaaaaagaatatgccaggctagctgtagaagaggacaaagtagtctaaggtgtatctctatggtgtcaataatgtg

SEQ ID NO: 113239 - DNA, 464 bp, Homo sapiens
cgtggaaaagggttgggtcccctgcagtagattttgggtacatagtgggctaaatgctggtgcacttctctagtgaggtcagttgcttgcagccatttccccgcaatctcctcggccgaacattccagcaaactccggtcgatggcctgcacctctggctctagctccgacgccatcttctctcctcctcctccccagcgctaccgccgcccggagagctgcagcctcacctcggccccggcggcctcgactgccacccctgccccaggcaatcagtcccggagccgtccaagtggctgcaggtggagcaacagagggagagaagggtgacgtgaaccggaaaggaaggacagcggcctcctgcgctccctcccaagcttagcgcccaagagtcaagtcactggctcgtccctgacccagggaaggacacagaaaaccccaggcctgacactctcgcgaattcc

SEQ ID NO: 113240 - DNA, 2456 bp, Homo sapiens
cccacgcgtccgcccacgcgtccgagcggagcagccgagcgagttagtgtcagccgagggcccaaaaccggaaggcgggtgctgtgccaacgttgcggctcccgggtgctgcagccagggaccgctatcttctctcgccgacagctttttctttccctcatgagaaaagaagccagctctgtctgaccgccagcaatcctgcgggcgattctccctcaagaacactggctggttgaggaccatgttcattttttaaaatgttggctttccccaagaagttggccaacatcaagttttctggtctgcgcagactgtgaaattgggaccaattggctggcatttgctatgatgacaagaacagtttctatgtggccttggaacgagtttcccatgagtaactgaggggagggggtactcagctccatctccaaagataaacctactccccacaagaactggcctttaatgtggtataactgttccgctgccttcttgtctgtgtgctaatataaatactgagtaccagcatgtcccatttgaacatgcagagggttaatccctgtttcctaaagcctcaagtacatgcctcctgcttagttcactttgtatcacatttcctaagctcccttttcccccagttttgggacactgtgcttacctccaaaaatctcatctcttccctggcattctccctaggctctgttttgcccaggggctcccgctttttcttgctctagaggagcagtattcaaccttttagctatgatgacacataacaaaagatgtttatgtactaatagttgaaatctgcctttttctcattcaagaaggcatacaaatatctgagagtgactttgttgtatggctacccttgtgatctacagtaatttattctttctaaaagtaaagcattttcaaaactcagtatttaaaccactaaccagaaacattactttggatgcatctctaataccatgtttgagcacctctgctctaggttgagaatgacattttattgtgaagatgggtgtggtccctcttcccttgaaaatcttgtagtttctttttatattagctcctcactgctacagcctaggaagggtgaggaagcaggattttaaccccatctgggcagccattcaagggaaaacccagccctggctgtttactcaggctctcttagaatgagagtggagggtgtaggatatgagggttaggcctttgccacattatacaaaagtctataatttgccacatctggacaagtaactttcttcttttgttcataggcaagacttctttaatggatagtatcatttactgaacctactgggcatggtcctcatggagttttggttcaactggaatctctgtgccaacccaggatacaaacttccatccagatgcatggatacaaatttccatagctccggggctgctctaacagtttgatatcagcagacgtgtttaagccttcaacttgatttccaattattccatcatttctattctgaaatgactcactgtcgtagaaggaagtttattatataaccaaggtttcaggtatcctcctgtcaccacctctactattcaggaggcctaaaattgaaataagtactaaacagaaaccttaccatctgaagtcccttccattgttttctagttggcttcctcattcctttacccccaaacttttcttaaggggctccccgactgcagtggcaaggtggccttgggcacagttttgcaaccaacctactcccctggaaagatggcttccttctccaattagcctgaatgagctttagtaagcaattgagagaactgtgtttttccgacaaacggtcacatgtccatcgttatggcatgtgcagaaaaacagagttatccacacaagtcaggagcaaaacccaagtagatgcctctaggggcatatggcccctcacatcacaagccagaacctaagctaagcattttttaaatttgagtttgagactagcctgggcaacatagtgagaccccatctctatttaaaaaatgaacaaaattacctgggcatagtggtgtataccctgtagtccctgcctacttggggaggctccaggtgggaggatcaccttgagcccccaaagatggtggcctgcagtaagcccaagatcacacccactggcactcccagccctgggcaacagagtgagaccctgtctcaaacaaacaacaacagtaacaacaaaaaaatatatagcgacttgaataggaaaccatagtatttcattgttttaatttgcgatttattttatttctagtgaaacttttatatacgtatcggtcatttctatttccttttttgagaactgccaaatgttgccctagtagccaaaaatatcaggttgctattctgccttttcagtttgatctgaaagaaataaaggcatttaagcaatggaaaaaaaaaa

SEQ ID NO: 113241 - DNA, 757 bp, Homo sapiens
cagcattgaacaaaacaaagtctgaagactgacttgtggttcttatttccagacaaagccctggacttccctgggttcctggacatgatggcacctcgactcaggccgatgcgtccaccacctcccccgccggctaaagccccggatcctggccacccagatcccctcacctgaaggccagggaagccttgacccccagtgatgctgctgtccctatcttcaagctgtcagaccacaccatcaatgatccagagcaacacagccaaaagctggaatcgcccttatttccaccctcacctccaagggtggaaacttgccccttcccatttctagagctggaacccactcctttttttcccattgttctatcatctctaggaccggaactaccttctcttctgtcatgaccctatctagggtggtgaaatgcctgaaatctctggggctggaaaccatccatcaaggtctctagtagttctggcccacctctttccccaccctggctccatgacccaccccactctggatgccagggtcactggggttgggctggggagaggaacaggccttgggaatcaggagctggagccaggatgctaagcagctgtaatggtctgagcggatttattgacaatgaataaagggcacgaaggccaagccagggcctgggcctcttgtgctaagagggcagggggcctacggtgctattgctttatgggcccaccacgggcaggggcctgctgccagctgccacgct

SEQ ID NO: 113242 - DNA, 652 bp, Homo sapiens
cggtccatctcattacgcattcgaggtcggtacccggagatccttccctacctcaacaccacccctggacccataaaccgccttaatccttccccacctcagcatcgcctctggcctcatcaaatccgaggtacctgttccgcctccatcacatgtcccctcctggcttccctctcgcctctgttgcgcggctcctcttccctccccacatcgaaaactgaggtccccagcagccccttctcagccatcacacagcgctcatgctgccttcgccttagcaacctccatctatgtccaggagctccctccacagtaacagactcccacatctttctgaggccacaacattctcccaacgttccggatatcccactaggtatgctggcccacattcgctgcgatcattacttaatgtaccccaaccactcctggttcctccaccagaggcttacgggctcccacacacacggcccaggccccacaccgtgctgtcttccgtgttatctgtccaccactcccatatctgactcttaaagcgacaacaaaatcctagttaacagaaccggaattgcggtcaaggcgaataagccatctagcgccacgctctatcccagtcatcccgatgtacagcgacggacagtgaatctcgtaa

SEQ ID NO: 113243 - DNA, 1222 bp, Homo sapiens
  misc_feature (1)...(1222): n = a,t,c or g
attggggaagggaagctaccgctttgtttgtaagtttccttaaaccacagggccttttcaacagtctgcggaatttctggagagtccactccaaacccttttgcctagatttctccacggaagcctccaaacaaccaaagattccggccttgttcctcctttggaattcctcatccaaaggacgcacccccccaaatgccagccagagttctcctgttgcataaggtgtctgtcgccccttgctgggaggtatctcccagtcaggaggcaaagtnnnnnnnnnnnnnnnnnnnnnnnnnnnnnnnnnnnnnnnnnnnnnnnnnnnnnnnnnnnnnnnnnnnnnnnnnnnnnnnnnnnnnnnnnnnnnnnnnnnnnnnnnnnnnntgaagctgcacccacagccaccccttcccccaggtgctctgtccctgggagatgggagttttgtttataagcccctgactggggctgctgcctttctttcacagatgccctacacagagaggaggaatctagagaggcagtctggctacagcggctttgctgagctgtggagggctgtgcccagttggatctttcccggcatctttgtttacactgtgaggggaaaacggcccactcaagcctcagtaatgggagatgcccttccccccaccaagctcgagcctcccaggttgacttcagactgctctgctggccacgagaatttcaagccagtggatcttagcttgctgggctctgtgggggtgggatccactgagctagaccacttggctccctggcttcatccccctttccaggggagtgaacggttctgtcctgctggcagtccaggtgctgctgggtatgaaaataaactcctgcagctagcttggtatctgcacaaatggccactcagttttgtgcttgaaacccagggccctggtggtgtaggcacccgagtgaatctcctggtttgcagattgtgaagaccatgggaaaagcatagtatctgggccagagtgcaccattcctcaagcacagtccctcaaggcttcctttggctaggggagggagttccctgaccccttgcacttcccacctgctccccaccctgcttcagttcgccctccatgggctgcacccactgcctaaccagtcccatgagatgaaccggggtactcagttggaatgcagaaatcaccaccttctgtgttgatctgctgggagctgcagactggag

SEQ ID NO: 113244 - DNA, 352 bp, Homo sapiens
gggagtttagaataaaacacccaaatccatgtgtcaactgcgctcaccatgtagccagaaattgggggcttttgcaacagtcagaggtcatacgcatcctcagggacatctggggccatttcaatatggtatgagcatcggctcctagcaccccatgccagccagcaccgtttcggctgccatccatcagggctgaaccctgccggcacccagcaccccatgccagccagcaccgctacggctgccatccatcggggttgaatcctgccggcacccagcaccccataacaaccagcaccgatacggctgccatccatcgggggtgaaccctgccggcccccagctccccatg

SEQ ID NO: 113245 - DNA, 815 bp, Homo sapiens
gcacggctcctgtgcttactccacctaccggagtgagaaagaagtccaggccttcttggcgcaggtgcgcacaggccaggccggaaccacacgggagaaggaggggccgtccccgtggagcaggtcgagagagcctccccaaggaggaggtgtcaaagtccgggggcaaataacaccccaggctctgggaggggctggcgcagatttctaaggagggaggaactccaatagcagcactcagagcagagagaacgggggtggttggagggcagaatgccttgtgagcaaggaacaaggactggagggactggaattctattataagtgcactggggactctcctcacaattttcagcgggggggcgggcagggtaaaacccttatgcacagtttaaagagctcaatagcgaatctttggagaatgtatcagtagaagcggaagaatgaaggcgaggttacgctcccatccaggcggaagttggcaggtgtggcccaagggtggtaataatgggggagtgagctgggacatggtctcggggtacaagaacaagtggtggatggcctgggaaagatatcaggacccgccaaggcgtcgctcccggccgtggggagggtggtgcagggcaactttcggtgagggaagccctgcgtgttccactccaggatggcagctccgagactggctgggatccagctggggctcggcacccctgcgctcagagctgagtgaggggccaggagagcagcctcagccagcaccaagtaagctgcaaggaaagccccgtgcccagagctcccgcaatcaccgtcggcca

SEQ ID NO: 113246 - DNA, 1459 bp, Homo sapiens
aaattaatagcctcaggacaaaaaatctcgtcggggttccttaaggggacggattatgtagccaaggcccgaccacctaatgaacccggaccctgatgtggtttgtccttttacagccagtagtgctccccgcatttgaaccgcaagggacaagccctttaatgagccaaggaagccccagggaacagcacttataaatttcgctttccacccgatgcctgaaaaaactttcccttgggggtaacccccttatccacggggatatttttataattattttttttatagtttttagatcttcttttttagagcgccttgtaaggcctttatccatgttgtttttagagaaaggtgttgtgacaaattgcccccttccagtggtgccaaaatcaccctccaaatgaccagtcctgtcttgtgaccaaattcccctttacccctggtaccaaattgccctcagaagaagctgttttttcacaaagttatcccctgcttattgactcttttttatttagtgtgacattctaaaaaacttgtcacactttcacatggatctgtcatggcggaaacagcgggttatcaatcacaagaaacgtaaaaataggccctctaatcgtccagtcaaacgacctcactgaggcggcgatatagtctctcccgggatcaaaaacgtatgctgtattctgttcgttgaccagttcaaaaaatttgatggcaccctacaagaaccatgccggtatctgcgagatcccatgttgcttaaatatgttgaaatatttcggattggccctctggcggaatccagtaaggatatacggccaggcattgaagagtttcgcggggaaggaaagtggttttttatcgccctgaagaggatgccggcgatgaaaaaggctatgaatcttttccttggtttatcaaacgtgcgcacaggtccattccagagggcgctttacagttgtaccatatgcaacccataaatcctcattcctcttctttatcggggtacagaacccggttaacgcagttttcggcttagtgaaacaaaagaaatcaccaatccgtatgccatggcgtttatacgaaatccctgttgtcagtatccgtaagcccgggatgggctcaaggcattctcctcttttgaaaatcgactggatcataaagcggtaccagctgccctcaaagttaccaagcggtaggcctgactttccgccgccgcttcctgctgggctggtgttagtggaatcaacagcataactccaatgcggcctctcattactttggaaaaaaagaaaggcccccagaacactcatatcgcattttccttccgcgaaatcactttcatgaccacaggataggcttgagggtatcttgtccagattggagggggttcgccaatggtttgactacggagggaattgcccagtttggtggttcttacccgcgggatttttcatcg

SEQ ID NO: 113247 - DNA, 1039 bp, Homo sapiens
catcgatacctattcgagtctcggacccggggatccggccccatccaggggccctgctcccatttcctgccctgcaccttcctccaggaagtcccccctccgggccacgcaagcccgtttccagacctcacccttgaccttcaccctttatttgtgcacgtgctgccatccttcgcggtgtcacgtctcaccgtcacattcccagccgggatagttcctgcatatcacggaagacctgcctagggagctgccttcccgagttttcatcttctctcgtcctcaaggagcctcccgccaggcacgcggctccttccgctggctctcccctctctctttttgtcactagaaggggccttgaccctatccagggtcgagccctttgtgggtaaaacggcaattgttcttctcttctgaatgggttctgtaccgcgtttctcttaaactaaatcgggggttcttaaaagttcccctttccctggaagggttccaacgtcccctgtgggagaaaagaagagattttgccgaaattttgaaaggtggaaatgaaagagcagcctttttctcctaggggaagatcattgggtgtttttacacccggtgaggcttaaaagaaggtgttcccccccctacccgcggaaagggatgctgcacgaaagaatttttaggcagtgacactgtaatggtgggtacgtgtcattctacatgtgcccaaaccagagaacggccaacgccgtgagtggtccgtgtgttacagttgatgaacctgcattggagtatcggagtcgccagtgcgggcatagacatctgcggaaacatcaagccccgctcatcccctcctagtgggaagccccccctacattcatcaacgccacaggtttctttatgggagagttttaaagggttgtagttgtaggctggctatttgttcaaagcagagaaagagaattgtctcgcaagacgactaaggcggatcacgccagggttgtccccgtcgtgacgttctacagcgacggacatagaatccgtaagcatggtcatg

SEQ ID NO: 113248 - DNA, 986 bp, Homo sapiens
ctatcacatcattcgaattcagctcggacccgggatccacaggttccctctcatcccagacgacaggggagtgaggtgggagtgcacagggtccacgtaagccatgcgtgggacaggtccacataagccatgcatgggactaggcaggtccacttaaaccatgtgtgggacaagtccatgtaagccatgtgtgggactaggcaggtccacgtaagccatgcatgggacaggtccgagtaagccatgcctggcactaggcaggtccaagtaagccatgcatgggagtaggctggtccacgtaagccatgcatgggacaggtccacgtaagccatgcgtgggactaggcaggtccacgtaagccacgcatgggacaggtccatgtaagccatgcatgggactagacaggtccaagtaagccatgcatgggactagacaggtccaagtaggccatgcttgggacaggtccaagttaggcctgtgtggggactagccaggtgcaaagtaaaccaaggctggggaccagggtccaattaaccccatcagtgggactagccaagtccaagtaacccatgcgtgggacaggtcagtgtaagccatgcatggggctaggcaggtccacataaaccctggcttgggaacaggtcccattaggccttgtgggggactagacaagtccaagtaagccatgtttgggacaggtctgtgtaagccatgcatgggactaagccgggcccacttaagccattggcggggacaggtccatgtaagccatgtgtgggactaggcaggtctgcgtaagccatgcatgggactagacaggtcccagtaagccatgcatgggactaggcaggtctgcataagccatgcatgggacaggtccatgtaagccatgcatgggaataggcaggtccacataacccatgtgtggtactacacgggtcttagtaagcctcgcgtccaggtttttgccaatcagactgatgta

SEQ ID NO: 113249 - DNA, 542 bp, Homo sapiens
caggagtatttatccttggaggaatggtcccctcatatttcagccagggattgcacgtgtagcggcttactcatcgagctccccagcacgggcatttttgtgtacggggctgtcaccctgtatcgcgcgcctttccagacgcttccactaacacacacactgattcaggctctgggctgctccccgttcgctcgccgctactgggggaatctcggttgatttcttttcctcggggtacttagatgtttcagttccaccggttcgcctcattaacctatgaattcagttaatgatagtgtgtcgaaacacactgggttaccccattcggaaatcgccggtaataacggttcatatcaccttaccgacgcttatcgcagattagcacgtccttcatcgcctttgactgccagggcatccaccgttgtacggttagtcgcttaacctcacaacccgaagatgtttctttcgattcatcatcgtgttgcgaaaatttgagagactcacgaacaactatcgttgttcagtgtttcaattttcagctt

SEQ ID NO: 113250 - DNA, 2268 bp, Homo sapiens
tatataaaagggggaggtagggttttcttctcctttgaagggggttctatttaacaactttgcgttttttaacacttgcgattggtcgtcctttccagtaaacccaaattttataaaaaaccgcaaacaatttttaaaggatgttcagaatgaatttcatgaagcccttaaccagtgcataaccgttggtcatgaaatgtcgaaggctatcgccattgcgcagtttaatgatgacagcccgaaagcgaggaaaataccccggcggtgaagaataggtaaagcagcggatttagttggggtttcttctcaggctatcagagatgccgagaaagcagggcgactcccgcacccggatagtggaatttcgagaccgggttgaccaaccgggttgtttctccatttggccaaattattctatatgcgtaatgtgtttggtccgcgattgccacgtgctaaagacgtatttccaccggtgatcggggttgctgcccataaaggtggcgtttacaaaacctcagtttctgttcatcttgctcaggatctggctctgaaggggctacgttgtttgctgtggaaaggtaccgcccccccagggaacaccctcaatggtatcgcgggagggggacccagctcttcataattagtgcaaaacacagctcttatgcctctcatatcttggggaaaaggacgatgtcacttatgcaataacgccccacttgctgcccggggcagtgccaatttcccttcctgtctggctctgcaccgtattgaaactgagttaatgggcaaatttgatgaaggtaaactgcccaccgatccacagcctgaggctacgactgggccattgaaactgttgctcatgactatgatgtcatagttattggacagcgcgcgctaacctgggtatcggcacgattaatgtcgtatgtgctgctgatgtgctgacccgttcccacgcctgcttgagctatgtttgattacacctccgcactgcagtttttcgatatgcttcgtgatctgctcaagaacgcgtgatcttaaagggttcgagcctgatgtacgtatttttgttaccaaatacagcaatagtaatggctctcaattcccggtggatggaggagcaaattcgggatgcctggggaagcatgggttctaaaaaaaataatgtgcgtaacgccaatgaagttggtaaaggtcagatccggatgagaacctgtttttgaacaggccattgatcaacgctcttcaactggtgcctggagaaatgctctttctatttgggaaccgtgtctgcaactgaaattttcgatcgtctgatttgaccacgctctgagattacataatgaagcgggcgcctgttattccaaaacatacgctcaatactcaaccggttgaagatacttcgttatcgacaccagctgccccgatggtggattcgttaattgcgcgcgtaagaagtaatggctcgcggtaatcccattacttagcctgtatgtggtcgggatgtgaagtttactcttgaagtgctccggggtgatacgtgccgataagccctctcgggtatggtcaggtaatgaacgtgaccaggagctgcttactgaggacgcactggatgatctcatcccttcttttctactgactggtcaacagacaccggcgttcggtcgaagagtatctggtgtggtagaaattgccgatgggagtcgccgtcgtaaagctgctgcacttaccgaaagtgattatcgagttctggttggcgagctggatgatgagcacatggctgcattatccagattgggtaacgattatcgcccaacaagtgcttatgaacgtggtcagcgttatgcaagccgattgcagaatgaatttgctggaaatatttctgcgctggctgatgcggaaaatatttcacgtaagattattacccgctgtatcaacaccgccaaattgcctaaatcagttgttgctcttttttctcaccccggcgaactatctgcccggtcaggtgatgcacttcaaaaagcctttacagataaagaggaattacttaagcagggggccttttacccttattgaccggataaaagctggggtgatatttgaggctgacgaaagtatcactcttttacttgtgtgcttaaaacgtcatctgcatcaagaactagttgaagctcacgacatcagtttgctcctggagcgacagtattgtattatcgtcgataaaatggtgcttcaacctggacaggtctcgtgttcctaactgagtga

SEQ ID NO: 113251 - DNA, 694 bp, Homo sapiens
agaacgaacgtgcttaccaattctatgtcggtacccgcacatcgcgcgagagctaatgagatgagtacaaatttagtgaggatggcaccaagacattgatgtaggggccacaccagtgacgcagacacctcccaccacaacaatgaccagacacctcccaccacaccagtgaccacacacctctccaccacaccagtgaccacacacactcccaccacaccggtgaccagacacctcctaccacaccggtgaccaagacacctcctaccacaatgaccagacacctccccccacaccagtgacccagcaccctcccatcacaccagtgacccagacagcctcccatcacaccagggaccaaaacacttcccactaggccggcaccaacactggcgatccaatgtcagcctgaggttttgggggtgtcaaacatccaaacgatatcactggggtatgtctggggaggcaggatgattggcaaaaaggcttcagaaaaggggaaaacttttgctttgggtccaaaacccggggcccacccattaggaaactccatttggttctgggggggttaaacttggacttggattgggtattaaaaaccatcttgaatctcagcagtttgggagggtgagggggcagaacttttaagatgacctgtaggcatgcaagtttgccttggcctttttaaacgggg

SEQ ID NO: 113252 - DNA, 596 bp, Homo sapiens
  misc_feature (1)...(596): n = a,t,c or g
ntttgtgcgctcaaaacgcaggataatagccgataagcagtagcgccccagaaagaccgcaacccatggctgattacgcgataaaccagaaaagcaagcgttcgcttgggatcccgattctggtattcattaccctcccggctgggccagggcaaggtacaagttagggcattgcgacagggttccccctgccaacaaagccaagcaccgcgtcgtgccctcaccggtcttttacgcgctggataccttcacggtcaatttgggcgatgcggatcgcgtactttatatcggcataaccctgcgcctgaaagatgaagctacccgctcgcgtctgagtgagtatttgccggaagtcggtagtcgcttgctgttactgttttcgcgtcagaatgctgccgtactggcgacagaagaaggcaagaaaaacctgattgccgagattaaaaccactctttccaccccgcttgttgccgggcagccgaaacaggatgtcaccgacgtgctgtatgccgcttttattctgcgataacagacatgggcgatagtattctttctcaagctgaaattgacgcgcagctgaatggtgacagcgaagt

SEQ ID NO: 113253 - DNA, 659 bp, Homo sapiens
  misc_feature (1)...(659): n = a,t,c or g
atccggctcgggcatggtcttcgttcctgaacaatcaggacgtagggtcagcgctgattcatcaacagaattccgggagcagggcgggtcccgccatcaagtttcccaaaaagcatcaacagggcgggcccagaactttttcgctttatggaaaacccctttaactccgtatagtaccggaagaacgttaaaaaatgaccccgccattcatggctgttcttcctgttgagtttcgtacacgcctggcgccgcagaacgccaccatgtcgctgatcgcatctgccatgaaggaatgttcagaagcaaagcaagccgttctcctgaacgcgcctgagcaccagaaaatgaaggaggtaagcgagggcatagcgtcattgtttcgcctcatgccggagcaggtaggaccgctgatgacgatggttacatcgatgctgggggttatatgagaggcacaagaaaagaaaaagcccttgaagcggtaacttcaaaggcccttatcacactgtgttacggcaagtaacgggagtaagtatgtcaaaccccgctgaaataatcaatttcccaaataaaaccgaacanctgggaggtaataagattaagctgggtaacggcatggccatcccagtcacggcgatgtccgggacggacaactgaattca

SEQ ID NO: 113254 - DNA, 657 bp, Homo sapiens
ccgcattttcctaggccccttcacagagagcccaccagacaaaaccccgttggttttctcttggcccttcccggggaaagggcccccccccaccctttagtggttatgacccaccccggagtctggtttcgggggaaaaattcccggccccccccaaaattttttttaaggtaggggaccattagggttaaagtgttgaaatttcttaaactggcgccggaatttaattgaagcctcccgaattaagcccccagataaaggagttcctccccataaaataaagggcatttctgggaatggggtttccagcagccccaccttgccatggcatgagccccccccatcccccttgttgcaaaaatgaatcattccccctaccttccccagctctgccccaattccaggtcaggctaatgtgctccagaaatcctttacgggttttccacataatgcccatgtcaatttagcgtctcttcccaacatcagcatcaagaagctacataaaatgcgtggatgttaaatctacagtgagagctcctggatagctccgtgccccagattcgttaatcagcctgcaaaccattcgcacgcaccctttcgtttacaacaagagcttacattttagcatgaggcagaaagacaagaaactctcacacc

SEQ ID NO: 113255 - DNA, 615 bp, Homo sapiens
  misc_feature (1)...(615): n = a,t,c or g
tgnnnnnnnnnnnnnnnnnnnnnnnnnnnnnnnnnnnnnnnnnnnnnnnnnnnnnntgggttttgtttttctttcnnnnnnnnnnnnnnaaaaaaaatttacttttttgcccccagggggaagggaaaggggggaattttggttaaatgaaaccccccccctcggggttaaaacaatttttttggctaaaccccccaaaaagggggaaaaaagggggccggcccccaggccgggaaaattttttatttttnnnnnnnnnngggttttaaccgtttgggccaggggggttcaaaacccctgatttagggggatgggccccccctacccccccaaagggggggaattaagggcttggccccccgcccccccccgggaaggaaaaattttcaaaaccccccttgggaaaccccnnnnnnnnnnnnnnnnnnnnnnaaaaaataaaaacaaattctctgaccccttttggaaaaaaacnnnnnnnnnntgaacctttggcgggccacccccccctatttttgattttataaaaggggaaaattccctttttctaagaagataaaagtcccccccgtaaaaccnnnnnnnnnntttggcgtacaatgggggaggggcccg

SEQ ID NO: 113256 - DNA, 1857 bp, Homo sapiens
ccctttccgagtctgtgagtttgtgagtcccccaacctgttgcctagatcccacggaggcccaaacacaaaattgcgcctgtcttccttggattctcctccagagagcaccccaccagatgccagccagagctctcctgtatgaggtgtctgttgtcccctctgggaggtttctcccagtcaggatccccaagggtcagggacccaagttgagaagcaagtctgcgcccttagcagagacttgagtgctgtgctgggagatctgctgttgtttttccaacccttcaggcaaaaagcgtttaatttttgggaaaagttgccccccacacccgcccttttccctgggtgcctctgtcccaggtagatggcggttttatctacaagcccctgactggggctgctgcctgtttttcaaacatgccctgcccacagaggcggagtctagagaggctgtctggccacagtggccttgctgagctgcggtgggattgcccagttcgaacttcccataggctttgtttacacggtgagggtaaacctgccttatcaaaccctccaagtggtgggcacccctgcccgcaccaagcttgagcatttcaggttgatttcaggttgatttctgtgctggcagcaagaatttcaagccagtggatcttagcttgctgggctcattggtaggtgggaccgcaccgagccagaccacttggctcccttgcttgcagccccttttccaggagagtgaacggttagcggcttatcagttttattgatgtacgggtcgcgctggcttttgattacattatttttctctgtttcctattctcaattgtattgatttctgctactaacttttattattccatttgctgagcttactttggatttgactgcctcctaagatggatatctaaatgattgcttttggatcattcttttctaatacaggcattgaatgctatgcatttcttccaggcactgcttttgctgcatctcacaaatttacatatattgtgttgttattttcatttagtttaaatatttttaaatttcttttgagacttctttgtagatccatgtggtattagaagtgcattgcttaatctccatgtgtttggggattttccagctatctttctgttactgatttctagtttaactcccgtatggaattgagaggtcatacccatggaaggacctatattctttaacttctgttagcgggtgtttcatagcccagagtgtagcttgggaagcatgtgtgttctgctgtagttggatgaagtagggtgttaggtgttcattatagctaggtaaccagcggggcctcttttacctttggtaaggggtgtttcaaccccgaaaggtagcctgggaaaccttgttgtttcgcctccagttggaaaaagtaagggttttagggttccttaaaagttggtaaccaggtggtgttttttttccattttaaaagtgtgtttcatagccaagattgtagcttggcaagcatgtgtgttctcctgtagtgggatgaagtagggtgttaggtgttcattatagttaggtacccagtggtgcttcttttacatttttaaagtgtgtttcatagcccagagtgtagcttgggaagcatgtgtgttctgctgcagttggacgaagtagggtgttaggtgtgcattatagctaggtaaccagtggtgcttcttttacatttttaaggtgtgtttcgtagcccagagtatagcttgggaagcatgtctgttccactgtagttggatgaagtagggtgttaggtgttcattatagctaggtaaccagtggtgctgttgaggtcagctatgtccttgctgattttctgctggct

SEQ ID NO: 113257 - DNA, 660 bp, Homo sapiens
cccgcagagcctgctcccggctcagagctgcgccccttggggagggtgcgccgggcagaccctaaccctctcccagagcaccgccctttctgcggacccccacgggctgagctcacctgagggagggggcgccgtgcagacgctcccccccccagaacatcggccctccctgcggacacccggggtgcgcccatccgaggagggggagtcgtgaccccactcgacccgtccttgagcccccgacccttcgtgcgtagatggccctgcccacagggcgttgctggccttccgagccagatgtcctggaccacccaagggttggacgtttggaaatgccatgacttccccccactttacggtggaggtttgaaattttccttttcccccgagaacaacccctttttcaccgtaacattgggagaacgcccccccatcctaaaaaatgccaaatggggccatacggcctctttaaactccgcctctttgggcagggcatcccttaaatactggcccatcccccatccaaggcttggcgaaaaacccccacttacttggccagaacacctggggagggggcgtttggcgggcggcttccctaaaataagccctctgcctgaggttggtagaaatcgctaattttccatctagcctcagtttgtg

SEQ ID NO: 113258 - DNA, 2983 bp, Homo sapiens
  misc_feature (1)...(2983): n = a,t,c or g
ccgtgtcgacgatttcgtcccaggccctagggaatcgtggggtcgtatcccgcgggtggaggccggggtggcgccggccgccgcgggggaccctttaatattcggctgccgcctgctccccggaaaagggcactgcgtctgcgtgggtgtggcggagcgcgcggtgcatggaatgggctatgtgaatgaaaaaaggtatccgttatgaaacttccagaaaaacgaactacatttttcagcagccgcagcacggtccttggcaaacaaggatgagaaaaatatccaaccacgggagcctgcgggtggcgaaggtggcataccccctggggctgtgtgtgggcgtgttcatctatgttgcctacatcaagtggcaccgggccaacgccacccaggccttcttcagcatcaccagggcagccccgggggcccggtggggtcagcaggcccacagccccctggggacagctgcagacgggcacgaggtcttctacgggatcatgtttgatgcaggaagcactggcgcccgagtacacgtcttccagttcaccgcgccccccccagaagaaacatcccacgttaacccacgaaaccttcaaagcactgaagccaggtctttctggcctatgctggacgatgttgaaaagagcgctcagggaatccgggaactactggatgttgctaaacaggacattccgttcgacttctggaaggccacccctctggtcctcaaggccacagctggcttacgcctgttacctggagaaaaggcccagaagttactgcagaaggtgaaagaagtatttaaagcatcgcctttccttgtaggggatgactgtgtttccatcatgaacggaacaaatgaagagcgtttcggcgtggatcaccatcaacttcctgacaggcagcttgaaaactccaagacggagcaacgtgggcatgctggacttgggcggaggatccactcagatcgtcttcctgacacacgtggaaggcaccctgcaggcctccccacccagatacctgacggcactgctgatgcttaacagagacctacaagctctattcctacagctacctcgggcctcgggctgatgtcggcacgcctgggcgattcctggggncgggcgttggaggggcagcctgctaagggatnggaaaggagttggtcagcccttgcttgtcttcccagtttcaaaggagagtgggaacacgcataagttacgtacagggtttcagggcagaaagcagcggcaagcctgcacgagctgtgtgctgccagagtgtcagaggtccttcaaaacagagtgcacaggactcgaggaagtgaagcatgtgggacttctatgctttctcctactatttacgaccttgcagctggtgtggggcctcatagatgctgtagaagggaggcagcctggtggtgggggacttcgagatccgcagccaagtacgttttgttcggacccttggggagacacagcccgcagagcagccccttctcatgcatggacctcaccctacggtcagccttgctactccagggagttcggctttcccagggagcaaagtggctgaagctcactcggaaaatttgacaatgtttgagaccagctgggttttggggggccattttttcatttacattcgactccctgaacagacagaagagtccagcctcatagtggccgagccatgccctggtccccgttcagcagtgtctgtgttgtctgcataaaccctcctgtcctggtacgttgacttcatcctggaggagccacagcacaggccgtgctgggcacttttcttgcacactggctctggggactttgcagaaaggcctgggtgctgccctggcatcagcctgcttccagtcacatctggccagagggctgtctggaaatgagtaccctgctcaatgccacctgtctgcctggggctccaagtggggcaggaccaggacaagaaccacaaggcacacacttgaagggggcagtgtggcttccctgcctgtcccattccccatggccccgtccgcggggctgtggctgctgctgtgcatgtccctgcgatgggagtcttgtctcccagcctgtcagtttcctccccagggcagagctccccttcctgcgagagtctgggaggcggtgcaggctgtcctggctgctctggggaagccgagggacaacccataccacccccgggacagtaggtttgggcggcaccactgggaactctggacttgagtgtgtttgcctcttccttgggtatgaatgtgtgagttcacccagaggcctgctctcctcacacattgtgtggtttggggttaatgatggagggagacacctcctcatagaccggcagggtgccccaccttttcagggggagtttccaagcatggggcgggatgccggggcatggagcatgctgtaaaactaattgtgggctgtgcctgccttgaaatgaacgtctctgtccgtgtggggttgcccaaaatgcttgtggtaagaaaactgtgttcctgaaaccccccttttcctggaaaacccaactgtgtccctgtgaaatgtaatcgcctactgtgaagccgttccccgccctaacccagggcccatgtccttaggtgcaagctgtgcccacgggtgcagctgagcccacagtcccagaaccaagctctcggtgtctcgggccaccatcccgcccaccttggggttgaccccaccctcctccatgggacagtgtgagccccgggccgtgcatcctggttcagtgttggcgtcagtgtcggctgctgagccccaaaagaagattcacgtgaatgtaacagttgcccggccacgagctgaacctacatgtgttccaactcaccaataaaaggttgacaggggcttctccttctctgggattcctctcgttgagcgacagtagcatttgcccacctggcacctgagatccctgtttactaaaccttagaaaagctgccaaa

SEQ ID NO: 113259 - DNA, 1925 bp, Homo sapiens
tgtcccggtcggatttcccggcccgacgatttcgtggcgccgacggtttcccggccctggcctgttgcttggaggagaagctgagcctgtgcttccgcccatcggatccgggcgccgagccaccgaggacggccgtgcggccccatcacggagcgcagcctcctgcagggggacgagatttgaaatgccctgacagataaattatgggaatgtgatgcctgtagactggaagtcatcgcatactaggaccttgcacttgcttactctgaacctctcaaaaaaaggggtaagtgacagtttgctctttgatacatcagatgatgaagagctgagagaacagctggattatgcactcaatcatcgtctcctgtggtaaggagtgaaccgctcttcacggcagacccaggttattgaagaaaattgaagaattgatgcaggaatcaccggacccagatgattatgaaacccctacaccagtcagatcggctttcaatgctttcccaggaaattcaaactctcaagaaggtctattaccggcagttatgaagagagagtgaaaaggctctcagtgtctgagttaaatgaaatcctggaagaaactgagactgccattaaggagtactctgaggagctggtgcagcagttggctttacgagatgatactgtagtttgaaaaggaagtgaaaaacagctttatttctgttcttattgaagtgcaaaacaaacagaaagagcacaaagaaacagcaaaaaaagaaaaagaaactaaaaaatgggcagctctcagaatgggaagaatgagagaagtcatatgcccggcacatatttgactacagtcattccttatgagaaaaaaaaacggaccaccgtctgttgaagatcttcaaatattaacaaaaattctttgtgccatgaaggaggacagtgaaaaagttccgagcttgttaacctgattatattcctgaaagttctgtgtcctacatagagcagcaactttatctgccggtgggctccaagctagatttcccgacagcattattcctgagagctggctaccattacccttcttgctattggaaactcagcacatttgaacttgggtttgattcagtattaacagatcttgactacactaattctttatattatagaaccaacggaaatatgggcactatttttggaattctagagatgggtttttgttaaatctacttaataaactgttctcttagtagattaagagagagtaatattaattgtgcatgtgcggttgtatttctcattaactgacagtatgcccatttgtttttatggctttcttatctaaactgcactgatgaactagattaaagccttgggagatttatactataaattcagtgatggcaagaaccaacactgtttttttgtgagaattgtcagtgtaactattacctaccagtattgttcagagagattgaaacagaataaacgggctgttcttgaagaagccaaaccccaatatagcattcccttggggtttaatacttagtgcttaacattgaaactgttggtgtgtgatggattttgtagcttgctgcttgtttcaccactggtcaaattttaaccattaaaattgccattcacttttagaatcttgtatttaagtaagttttgattttcaaatgttctgcttcatgtgtctgtgaagaattgtacttttttaaaaagtgtggtgtcctctgaggtgcttgagaaagtgtacactggcagaactgcccattctcattactgtgtcctattttaattcatgcctgtgtgtttttcttaagtatgaattctagatacagctacttatgggattcatcaatatcatgagcacttttgctggttccagtcaaatcaatggcatttaataaattttattaagaagtaaaaaaaaaaaa

SEQ ID NO: 113260 - DNA, 2779 bp, Homo sapiens
gacaagctctcgcgagacgagccgtgcaggctgaaaaaatggcgccacccagtacccgggagcccagggtcctgtcggcgaccagcgcaaccaaatccgacggagagatggtgctgccaggcttcccggacgccgacagctttgtgaagtttgctcttgggtccgtggtggcagtcaccaaggcatctgggggcctaccacagtttggcgatgagtatgatttttaccgaagttttcctggcttccaagcattttgcgaaacacagggagacaggttgcttcagtgcatgagcagagtaatgcagtaccatgggtgtcgcagcaacattaaggatcgaagtaaagtgactgagctggaagacaagtttgatttactagttgatgccaatgatgtaattctggagagagtgggtattttactggatgaagcctcaggtgtaaacaagaatcaacagcctgtcctccctgccggcttgcaggtccccaaaacggtagtgtccagctggaaccgtaaggcagcagaatatggcaaaaaagcaaaatctgaaactttccggctgcttcatgcaaaaaatatcatccgacctcagctcaagtttcgagagaagattgacaattccaacacaccatttcttcctaaaatcttcatcaaacccaatgctcagaaacctctccctcaagctctctctaaggaaaggcgggaacgcccacaggatcgtcctgaggacttggacgtcccccctgcactggctgatttcatccatcagcagagaacccagcaggttgagcaagacatgtttgcacatccttatcaatatgaactaaatcactttaccccagcagatgcagtgcttcaaaagccacaaccccagttatacagacctatagaagagacaccatgccatttcatatcctccctggatgaactcgtggaactcaacgaaaagctcttgaattgtcaggaatttgcagttgacttggagcaccactcttacaggagcttcctgggactgacctgcctgatgcaaatttctactcggacggaagacttcatcattgacaccctcgagcttcgaagtgacatgtacattctcaatgagagcctcacagacccagccatcgttaaggtctttcatggtgctgattcagacatagaatggctacagaaagactttgggttgtatgtagtaaacatgtttgatactcatcaggcagcacgccttcttaacctgggcaggcactcactcgatcatctcctgaaactctactgcaacgtggactcaaacaagcaatatcagctggctgattggagaatacgccctctgcccgaggagatgctcagctacgcccgggatgacacccattacctgctatatatctatgacaaaatgaggctggagatgtgggagcgcggcaacgggcagcccgtgcagctgcaggtggtgtggcaacggagcagggacatctgcctcaagaaattcatcaaacctatcttcacggatgagtcctaccttgaactctataggaagcagaagaagcaccttaacacacagcagttgacagcctttcagctgctgtttgcctggagggataaaacagctcgcagggaagatgaaagttacggatatgtactgccaaaccacatgatgctgaaaatagctgaagaactgcctaaggaacctcagggcatcatagcttgctgcaacccagtaccgccccttgtgcggcagcagatcaacgaaatgcaccttttaatccagcaggcccgagagatgcccctgctcaagtctgaagttgcagccggagtgaagaagagcggaccgctgcccagtgctgagagattggagaatgttctctttggacctcacgactgctcccatgcccctccggatggctatccaatcatcccaaccagtggatctgtgccagttcagaagcaggcgagcctcttccctgatgaaaaagaagataacttgctgggtaccacatgcctgattgccacagctgtcatcacgttatttaatgaacctagtgctgaagacagtaaaaagggtccattgacagttgcacagaaaaaagcccagaacatcatggagtcctttgaaaatccatttaggatgatcagcaacccgttggaagctggccccaggtacaagtacaaaaagactctaaagaagctttttcaagaagaaaggcacttgggcaaacagcttgccggggaaccggccaaaggaggccctgcaaagctgcagcagaacaggcccatctccgtcccgacagcaggttcgctgctagaaaatgctgccaaagaagagagagcgaggcaacaagccgacccaaggaccacagaacagaaaccaaggaggaggaaccgactcaaaaattttccaaagaagccaaaggaccccagggccccacccagaaaagagggtttacggccttacggactacagcccagtcaagacttcaaaggcttttgcctggaaacagcaaatcccaaagtttcttcctcagtttgatccaaattaaaccagacccccgtctgggcaagaaatgcattgccagccacaaaaaattataacacgtcggtggggagaacaaaaagcgatgtcctttccaactggaaagtcagacagaggcttcaggtacaactggccacagagatagtcctggaagacacgtggcgcctgtggaccgggaacgaccgaaatgctggggctgcttttggacaaacatattttttaacccattaaaattcttcctgaagaaaaaaaaaaaa

SEQ ID NO: 113261 - DNA, 972 bp, Homo sapiens
aggggccacccgaacagtctctcctcctcacagaagcctggagctgggcatccaagaagaagcagcctcattrtstrttctggtgtcatcgtaggtggccacctatggcttttgggcttctcacctggggcgggtgggttctgcaccaccctcccaccctccttcctccgtgtggacgatagagccacatccagcaccacggacagctcccgggcgatcccatgggagtagaagaggtgtgagcaggttgcccagctggttagcggaaatgccaagatccaggctcctgaatttcagcctggccctttctatctgtctgatacctcctttacgagtctctctgcctgcgttgtgtggagcgggcctgcttgctggttgggggagtttgcaggttgcccctatgcaaaaaaggacaggatgcatgactggcatgtaaggtgttcaggaaaaccaggaaaagccttcatctcctcgtcctccaggcagcacaagccattgtggaatctccaccaggtgtacagaaccggtgcctctgcgtcctgccactcaggacctctcaagtccccgatgtgatggctcctcagcatgattcaggaaccaaaaagaagaatgtacttccatctggttgggcttggattccctcttgataagccttccccagtttgactgaaagatgagggctaggctgtggcaaagttgaaghvcaaaccagctccttcaagatagctttgagcagaatgaagtggggaggaccccagcttccagcccagggaagcccactgtgacctgggagccatctggggataaagacttttgacccatgactcccatatccacaagcctgtccatcctaggcccatcccagtttatcctgtatcatttgagctgggattcccacatcctctgagttggaagtccctttctcaagttttcaataaagacttttgaatattgaatcccaaaaaaaaaaaa

SEQ ID NO: 113262 - DNA, 1720 bp, Homo sapiens
  misc_feature (1)...(1720): n = a,t,c or g
cggacgcgtggggttcgcgtcgactgcccagagtccgcgaatcctccgctccgagcccgtccggactcccccgatcccagctttctctcctttgaaaacactaagaataatgtcactgcatcagtttttactagagccaatcacctgtcatgcctggaacagggatcgtactcgaccagtctgtcttgattactatagcttggtggtaagttttgaaatcaagaagtagattgccctcagtcccaaataatcacgaagtgcacatctataagaagaacngggagccagtgggtgaaagctcatgaactcaaggagcacaacggacagcatcacaggtattgactggggctcccaagagcgaccgcatttgtcacttttgggggcagaccgcaattgcctaatggtctggagttcagaaagatggtgtttgggaagccaaaccctggttgattcctgaggaatttaattgggggaggtaactttttgtgaaagtgggtcccccctagaagaacaaaatttggctgtgggggaagtggagcacgactcatttctggttggtactttgaggctgaaaatgactggtgggtgagcaagcacattaaaaagccgattcgctccacagtcctcagcttggattggcatcccaacaacgttttgctggcagcaggatcatgtgacttcaaatgcagagtgttttctgcctacattaaagaagtggatgaaaagccagccagcacgccctggggcagcaagatgccttttgggcagcatgatgtcagagtttggtgggcagtggcactggttggctgggtccacggggtaagcttctcctgccagtggggagccgcctgggctggggttcagccacggacagcacccgtgtctgttgcttgatgcctccaaaaagttgtgcaggtctcgactctgaagacaagagttccttgccgctccctaagtggtgtcatttgtctcaagagaaccagcgtcggggctgcctgcccatgactgcttgcccaatgctctttaactacggatgaccgcgggctgccctgacctttcgtcttccaaagttagatattcccaaaacagagcatccaacgcaacatgtctgcccatgggaacgctttcggcaacatgggacaagagagccacaactgaggacccgcaacacggcccttggagacgctgcacccagaatagcatcactcaagttctctatttattgaggtgggacaagcaagatttgtcgcaaattttgcacttactggcatcggatggagcccatgaccaattggggatttccaagaccctcggagtcttccatcccagggcctccggataatgtgaaaaaaaaaaaaaacccccccgcccatcccagcatgaacaaacctgtggcccgacccgcagcctgtgcccgtggcacgatggccgaggaagcccagcccccaaggaaacacttgaaaaacacataatcacgcccaatgcccgtgtgggttttgtttgaatataaaattggtgaaagtgttggttttttttaaggccagtaatttttttgtttgttttttttgcgatttcattccattcttgaccaaaagcttctctttaagtagtttattatggaaaattgtcacactaacttgaaaagacagggtgagggagatatgtaaattgtnccactagaaaattaaataaaagaactgaatgtggtaaaaaaaaaaaa

SEQ ID NO: 113263 - DNA, 2489 bp, Homo sapiens
  misc_feature (1)...(2489): n = a,t,c or g
atatacacgtttggagttaccgggacgacgatttcgtggcggcggtggcggcggcgactgctgcggtgaaggaggtggaggaggagccgagcggggcgctggcaccgatgttctgaccatggacgaggaatacgatgtgatcgtgctggggaccggtctcacacgaatgcatcctgtcgggcattatgtatgcgaacggaaataaggtgctgcacatggaccggaacccctactacgggggcgagagctcctccatcacacccctggaggagctgtataagctgttttcagttgctggaggggccccctgagtcgatgggccgaggccgagactggaatgttgacctggattcccaaattcctcataggctaacgggcatgctggtaaagatgctacttgtatacagaggtgactcgcctaccttggacttcaaaggtgggtggagggcagctttgtctacaaggggggcaagatctacataagtgccgtccactgagactgaggccttggctttcaatcttattgggcattgtttgagaaacggcgctttccnaaagttccttggtgtttgtggcaaacttcgatgagaatgaccccaagacctttgagggcgttgacccccagactaccagcatgcgtgacgtctaccggaagtttgatctgggccagggatgtcatcgatttcactggccatgccctggcggttttaccgcactgatgactacctggtaccagccctgccttgagaccgtcaaccgcatcaagttgtacagtgagtccctgggcccggtattgcaagagcccatatttataacccgctctacggcttgggcgagctgccccagggttttggcaagatttgagtgccatctatggggggggacatattatggttgaacaaacctgttgggattgacatcattcatgggagaacgggcaaggtggtgggcgtgaagtctgagggagaggtggcccgctgcaagcagctgatctgtgaccccagctacatcccggacccgtgtgcggaaggcttggccaggttatccgcatcatctgtatccttagccaccccattcaagaacaccaacgacgccaactcctgccaaataatcattcccccaagaacccagggtcaaccaggaaagtcagacatcttaccgtgttgcatgattctccttatgcacacaacgtgggcgggcccaggggcaagtacatagctatttgccagcactactgtgggaggaccacgggaccctggaaaagggaggtggaagccggtctctkggagctgtttggagcccatttgaaccagaagtttgtggctattcagtggacttgtatgagcccattggttgatggttgtgaagagccaggtgtttctgtttcctgcttccttacggttggccaccacacattttgaggacaacctggcaacgacattcaaagacatcttacaaacggcatggcttggcacggccttttgactttgaggaacatgaaaccgcaaacagaacgacgtctttgggagaagcttgagcagttgattgtgggccgccacccagccccttgctggccccagccttgtgtcttgttcttcctcgaggggttccagcatcctcttgcttcccccaccacggttcccatcacccacctccattgatccacctgaccaaatcctttaaccttaggcgatggcttggggagatgggggggttgggataggcattcctctttcttgggcccttccttattcctagggaaaagaggggtttcctcttccttgttgtgtgtctcttccccccacccctaattcttctggctctgtttggggaaggacgtgggagggaaaaggtgacttcttgccccccacccgtttttaacccccaatgtaagtggggcctttgggagaatggcccccaccttcccccccaccaactctcgccgtgttggaaaaaaaggggggcctccccaagcaacaaaagttgcaatccctccccccccctaaatttaaatcctaaatttaattaaactttggaccccccacccccttcctgaagcctgcaagccccttcccccgtgtggcccctgaagggcctgtccgaagtgaagcctgccccccagccccctccccagccccttgccccagccctgggggaagttggggaagggcttggggcatggcccccgttggaaggttgattttgctgtttttgtttcttgtcctttgtgttcctgtggtacttgcctgagagaaaaggaaaagtgagcccaagcagaagggaggtgggaaaacggacccaaaccccgagtgtgccctgccccatgcctttccttttagtggtgggaaaccctttatcttgcaaagtgaatgtgtcccctttccccacccttcttagtgtattttcacagaaaacaaaacctcccaataaaaacgggttgaaacctgtgacttcatctnaagatgggatcagggtgtgtctctgtttcc

SEQ ID NO: 113264 - DNA, 2649 bp, Homo sapiens
  misc_feature (1)...(2649): n = a,t,c or g
catgagactgtcttttatgcggggcgagataacgaggcatggacgtgttgtgagcggaggcctagcctgttcaaggtctgaatttttacccctagaatgtaagaagcatgggagcagggactttgttttgctccctgccatatccacagccctagaaaaacgtcgggccattgatagctctcagtaaatgcttgacaagtaagtgaatgaacgaatgcacaattaatgaaatgagggctgcgtcaatgaataactgggaatctgactcctgcagggagccttcagcccacaggtgtatgtaagacccgccccgcctctcatccttcgggctcccacccccgccgttaggctgcggttcgcgccgcggtcgccagagggcgcggagcggcggggcttcccgcacggagggctttgcgtgaggcaccgcgtggggcggggctgcgggcgggctcccagctgctgggccctcatctgctgggccctcatcggctgggcctcgtcgaccggcaagcggaacgcggcagcggggctgggcctgtgcggcggccgccggagcgctttggaaggcgcacggggcgaagatgggcggcggagcgacaggaggcgctgagggagttcgtggcggtgacgggcgccgaggaggaccgggcccgcttctttctcgagtcggccggctgggacttgcagatcgcgctagcgagcttttatgaggacggaggggatgaagacattgtgaccatttcgcaggcaacccccagttcagtgtccagaggcacagcccccagtgataatagagtgacatccttcagagacctcattcaatgaccaagatgaagatgaggaaggaagaggaaggccagaggagcaggttttattgctggggggctcagagagaagtggacagcagattgttggccctcccagggaagaaaaggtcccaacgaggctgggtggatgatctcttttaaaggtgccaaagagcattggagctgtagcttgttggaagcgagttgacccaagagccctggaggagaccagtagcccgagaccatttgcaggaggtggctaccgccttggggcagcaccagaggaagagtctgcctatgtggcaggagaaaagaggcagcattccagccaagatgttcatgtagtattgaaactctggaagagtggattcagcctggataatggagaactcagaagctaccaagacccatcccaagccccagtttctggaagtctatccgcagaggggaaggtgccagcagaactttcggagggctagcctcacgggtggacaggtgaactttggatatgggaggaccatccgggaccgaggacttttgtgaagcccaaaggagcctttcaaaagcctttcacttggcgaagggttcagaaactgggcagcactgcccccccagggtgttgagtaccagctctccagccccaacaggcaggaaaatgaagccaaagccagctcttccatctttaatcgacgaatcagagcctaaccacaaacatccaaaattcggcttgccagacgggcggaaggctggtgcaagaaattttaaccacagccaacaggattcagcgaacatccgaactccttcatcgtgggatgccccgggccagccatggttgcccacccagcttttattccttcatggattactttttcccgaacaaaggagctgggctgatgaggagccagacccctgaaggaaagcaaccctgctcaatgcttgtcatcgggccagcgggttaacattaaccgcccaagccaagcttgcctgggcctccctccctgtgttttcccatgggccagtgcgccatgtcccccatggggattcgcccctccttgccccccttggtgcacacccaagcagtccagttgcaacgttcttcctccatagctctgggttcttagatcttggttggacgttttttttctccttagttgcatttcctgggtttttgtgatgatcaatggactttaatgaaaaaaaaaataaaaacaaccgaaaaaaattgaaggaatatcaccagcatgttgtacggaaactctcccactgaagcaggctttaattgctttaaaattatatttatcttggggcctgtgggaggaaacttccttccatcttctctgcataaaaacttgtgggcacacaatgcttattcactagtgtgtcccacccgccagccccacagatgactggaggaaggaggggaaatgtgtaggaaagaggcttcgccaccacttgttcccacgagaatatgttcacttgcccagataaaactgggcggccagaagtttccctggaagtggggaagtcagagctacatggcacacagtgtcttcagaaggtgaaaataaatatttccctgtgctccttttactcaacccctgggggtattcttaatcttggccaggtcttgggccagtttgaggattctgtttccacctggcctgcctgggncctttcctccattaccatccagactgctcgcctcctgggggattctcaggggctccattatggcttgatttactccacgtgcagaagtcttggagtggacctaggaggtagggtgggatattttttttcactaggatacagctcatgccaacccatcctaagtgagttcaga

SEQ ID NO: 113265 - DNA, 3296 bp, Homo sapiens
  misc_feature (1)...(3296): n = a,t,c or g
gagttcccgaatcgacgatttcgcgaggtctgtaaggagccctcaagaaaggtctgctgacgaggagaagaggacaaagatactcagagagaaaaagtaaaagaccgaagaaggaggctggagagaccaggatccttccagcctgaacaaagtcagccacaaagcagactagccagccggctacaattggagtcagagtcccaaagacatgggcttgttagagtgctgtgcaagatgtctggtaggggccccctttgcttccctggtggccactggattgtgtttctttggggtggcactgttctgtggctgtggacatgaagccctcactggcacagaaaagctaattgagacctattttttccaaaaaactaccaagactatggagtatcttcatcaatgttgatccatgccttccagtatggtcatctatggaaactgcctcttttcttttttccctttattgggggccctcctgctggctgagggcttctacaccaccggcgcagtcaggcagatctttgggcgacttacaagaccaccatctgcgggcaaggagcctgagcgcaacggtaacagggggccagaaggggaggggttccagaggccaacatcaagctcattctttggagcgggtgtgtcattgttttgggaaaatggctaggacatcccgacaagtttgtggggcatcacctatgccctgaccgttgtgtggctcctgggtgtttggcctgctctgctgtgcctgtgtacatttacttcaacacctgggaccacctgccagtctattgccttccccagcaagacctctgccagtataggcagtctctgtgctgatgccagaatgtatgggtgttcttcccatggaatgctttccctgggcaaggttttgtgggttccaaccttcttgtccatcttgcaaaaacagctggagtttccaaatgaccttccacctgtttatttgctgcattgtgggggggctgcagctacactgggtttcctggttcaccttcatgattggtggccatttacaatttggccgtccttaaactcatggggccgaggcaccaagttctgatcccccgtagaaatccccctttctctaatagcgaggctcctctaaccacacagcctacaatgctgcgtctcccatcttaactcttttgcctttgccaccaactggccctcttcttacttgatgagtgtaacaaggaaaggagagtcttgcagtgattaaggtctctctttgggactctcccctcttatgtacctcttttagtcattttgcttcatagctggttcctgtttaggaaatggggaaatgcctaaggaaggatggacttccccaactggcaaggccaccaaagggaatgggagggctcttaattggaatttttcaaggcattctcctggagggatcaggaaagtaaattttctttcttcaaaggggtacttccactgatgggaaacaaagtgggaagggaaagatggttcagggtacagagaaggaatgtctttggtcctcttgccattctatagggggccaaatattattctctttgggtgtacaaaatggggaattcattctggggctctctatttaccactggaaggataggaaggaaaaaagaatgttcaggaaaaacaataaggagcgttttgcccaaatcttgcctattgccngctggggagaagggggtcaaaggcaagggttcttttcacccacaggaaaggaggagcacttgaccccgatgggcgatgggacttacttgaaggcccttaacttcaggcccaacctttactttacagcataaggggagcgtagaatctgtgtaggacgagggggggcntttgggcctttacacctcgttagggaagagaaacaaagggggtagcaggatattctcactcccttcttcttgataacaagctaccatgacaaccctgtggtttccaaggaagctgagaatatgagggaaactagctttacttgaaaacagactggcctgaggagcagcagttgctgggtggctaatgggtgtaacctggagatggccctctggtaagacacaggaaagataacctttttggatagcatgtcttttttttctgtttaattagtttgtgttactctgggcctctgtccatatctttccacaagggtgctcatttcatgggggtattatccattcagtcatcgtaggtgatttgaaggtcttgatttgtttttaggaatgatggcacatttcatgtattcccagtttgtttattacttatttgggggttgcatccagaaaatgtctggagaaataattcctttggattatgactggttttttaaaacctaggaaaattgggaccattaaagccatccacaaatgaataattaaaaaattgggcctagttgaaatcctattgggaattttcctacaagtaattccgccctttgccagaaacagatttggtgaaatttgaaatcctcaatttgaagtaatcctgaatcgttcctttcctagcctaatgggaaaatgattttacttagccaatgttatcttgggtgtgttaaggagttagggtttaacatcgaaggttattttctcctgatatagatcacataacaggaatggcaccagtcatcaggctattcagttggtaaagcttcccaggaaaaaggacaggcagaaacgagtttgagacctgaataagctcccagatttcagtcttttccatgtttttgttaacatttgggttaaaaaaaaaaaaaagtctgattgggttttaattgaaggaaaagattttgtactacaagttctttttgttgtaaaggagttgtgttgttcttttcccccccaaagtgggtttccagccaatattttaaggaggatgtaaagagcttttaccaaaaagacaccttgataccttgttttccaaccccagtatacaaggataagcttcccaggctgcataggaaggaggagagggaaaatgttttggtaagaaacccaatccaagataaaggaccagtgaagttaatccgtaccctgtgttttgttttgatttaataacataacaaataaccaacccttccctgaaaacctcacatggcatacatacaccatatatacacgacgacgaaagagagttaattcaactgaaagtggttccttcattttctgatatagaattgcaattttaacacacataaaggataaactttttagaaacttatcttacaaagtgtattttataaaattaaagaaaataaaattaagaaatgttctcaatcaaaaaaaaaa

SEQ ID NO: 113266 - DNA, 560 bp, Homo sapiens
cgcagctagaccgcggggtagtcggcgcgaggcggagcttggcagttccgtccacttcagccgcagcgtccctcgccgggtgtctcgccgcagcctccggagaggaacagaccctcactctctctgtcagaaaaatgtctgctccagctcagccacctgctgaagggacagaagggactgccccaggtgggggtccccctggccctcctcctaacatgaccagtaacagacgactacagcaaacccaggcacaagttggaggaggttgtggacatcatagctgtgtgaacgtgggacaaggtcctgtgagagggaccagaagctgtcagagctggatgaccgagctgatgccttgcaggcagggagcatcacaatttgagagcagtcctgccaagctaaagaggaagtattggtggaaaaactgcaagatgatgatcatgctgggagccatctgtgccatcatcgtggtagttattgtaagtaagtatcgctgaagttgctggtgggataagaggtgggaaggtcctggagtcttctccctgcctgcctgcctgcctggg

SEQ ID NO: 113267 - DNA, 966 bp, Homo sapiens
agcgccgtgcgctccctccctcgctgattgacagttccctgtccctttccagaagtaaggctccttaaaacgaaaggcgctccggggccgcgcgtattccgcgtcccagccaacccgcctccggcccgtcagcgtttctcttttgcttaggtgcggcttggcgcgccccgagcgctcaacgcggtcctgggcgctgcgggcttctcgcggacacttggaccgcccgtaggggctccgagctcccgacctcccgttgtgccgggagcaacttgaaagtccgtcgtgcactgtccgtgttccctcgagacaacctccaaagtgccagggaagctaaggaagcgtttctgacgctctggcgcctggacttcctctcaccctcgcccccacatcaccccgtcgccaccgggagctgcacgagtgcgacacgcaagggagcgcaggtgtcctcgcggtcccgcatcacatccgcaagccgatttccccagctcgggggctgttatctggcccggattccgcaggatggcgggtccaccccagcgcccccactccccgccctccttcgggtcgccaggccctcgggtgattcagaaattcatcaaatccaaatggcagcgggctctctgtcaggcaggaaacaagccgcaccgaaggctcggcaggttcctccttgctgctgtggtaatggaaaaggagccgccgagtggagctaacgaggaaggaaggaccctccgtctggcgcgcctctttcccgcgcctcccgccctgtacgtgtgatgtccccagctgtctctctgtttctccaagtgccaaccacttcacagattcaggcgtcctcaagtggagaaaaccactgggcacccggcttccggcccggccacttagtgtcgttatggcgctgcctcttacaggtggcggtaaagggcgactgtaaatagccgattaaacagatgtaaatgtaaaaaaaaa

SEQ ID NO: 113268 - DNA, 1498 bp, Homo sapiens
  misc_feature (1)...(1498): n = a,t,c or g
accggccctgatatccgtcgcgacccacgcgtccgagcgtcgcgcagggtcggggactgcgcggcggtgccaggccgggcgtgggcgagagcacagaacgggctgcctgcgggctgacagcgaccagctggcaccatgggtgatcacgctcgcagcttgctaacggactgactggccgggggcggcgccgctgccgtctgcaagaccgcggtcgccctccatcgagagggtcaaactgctgctgcaggtccagcatgccagcaaaacagatcagtgctgagaagcagtacaaagggatcattgattgtttggtgagaatccctaaggagcaagggcttcctctccttctggaggggtaacctggccaaccaacgtgatccgttacttccccacccaaagctctcaactttcgccttcaaggacaagtacaagcagctcttcttagggggtgtggatcggcataagcagttctgtccgctactttgctggtaacctggcgtccggtggggccgctggggcccccttccttttgctttgtcttacccgctgggactttgctaggaccaggttggctgctgatgtgggccaagggcgccgcccaggcgtaagttccaatggtctggggcgactgtatcatcaagatctcaaagtttttatggcctgaagggggctctaaccaaggggntttaaacgtctctgttcaaaggcatcattatctatagagctgcctacttcggagtctatgatactgccaaggggatgctgcctgaccccaagaacgtgcacattttgtgaagctggttgactgccacagagtgtgacagcagtcgcaggggctgggtgtcctaccccccttttacactggtcgtcgtagaatgatgatgcagttccgcccggaaaggggccgatattatgtacacgggggacaagttgactgcttggaggaaagatttgcaaaagcacgaaaggaacccaaggcccttctttcaaagggtgcctgggtcccaatgtgcctgagaggccatgggcggtgcttttggtattggtgttggtatgatgagatcaaaaaaaatatgtcttaatgtaattaaaacacaaagttcacagatttaccagtgaacttgatcctacaagttcacagatccattgtgtggtttaatagactattccctagggggaagtaaaaagatctggggataaaaaccagactgaaaaggaataccctcagaagagatgcttcattgagtgtttcattaaaccacacatgtattttgtatttattttacatttaaattcccacagcaaagagaaaataatttatcatacttgtacaattaactgaagaattgataataactgaatgtgaaacatcaataaagaccacttaatgcacgctttctattttattgaactcttattaactgtaaaatgcatttttaaaagatcaaaaatgcatattttctagcatgattcatgtatcagtcagcagccgtgtatt

SEQ ID NO: 113269 - DNA, 2195 bp, Homo sapiens
gggggcagagctcacgttgcattgaagacgaaacctcgggggaggtcaggcgctgtctttccttccctccctgctcggcggctccaccacagttgcaacctgcagaggcccggagaacacaacgcctgccgagaagcccaggtaccagagccaaactccgtcactgagcccccagtaccaggcgcccatccactcgcgaccgctaccatggccgaagagctgcagagcatgcgcaatgagctggaggagatgcagcgaagggctgaccaagttggctgatgagtcgctggaaagcacccgtcgtagtgctgcagagctggttgaagagagtagaagatgctggtagtcagggactttgggttatgtttggatgaacaagggagaacaacttgggaacgcatttgaggaagggatggaccaaatcaataaggacatgaaagaagcagaaaagaattttgacggacctaggaaaattctgcggggcttttgtgtgtgtccctgttaacaagctttaaattcaagtgatgcttacaaaaaaagcctgggggcaattaatcaggacggagtgggtggcccagcccagcctgcatcagtgtagtggacgaacgggagcagatgagccatcaagtggcgggcttcattcgcagggtaatcaaatgatgcccgagaaaatgaaatggaatgaaaacctagagcaggtgagcggcatcatcgggaacctccgtcacatggccctgggatatgggcaatgagatcgatacaacggatcgcccagatccgacaggatcatgggagaaggctgatttccaacaaaaccagattttgattgaggcccacccaacgtgcaacaaaggatgctggggaagtggttaagtgtgccccacccgtgttctcctccaaaatgcttgtcgggcaaagattagctcctttcatgcttttcttcatggtattatctagtaggtctgcacacataacacacatcagtccacccccattgtgaatgttgtcctgtgtcatctgtcagcttcccaacaatactttgtgtcttttgttctctcttggtctctttctttccaaaggttgtacatagtggtcattttggtggctctaactccttggatgtcttgagtttcatttttcaattttctcttcctcggtgggcaattgctggaataacaacaatttagggaatgctcaaatgtgctgttgattctttcaatccacagtattgttcttgtaaaactgtgacattccacagagtttactgccacggtccttttgagtgtcaggctctgaatctctcaaaatgtgccgtctttggttcctcatggctgttatctgtctttatggatttcatgattagacaatgtgggaattacataacaggcattgcactaaaagtgatgtgatttatgcatttatgcatgagaactaaatagatttttagattcctacttaaacaaaaacttttccatgacagagagcatacttgatgagaccacacactccacacactaaaacaacagctacaaccaacagaacaacaacaaagcatgctcagtattgagacactgtcaagattaagttataccagcaaaaagtgcagtagtgtcacttttttccctgtcaatatatagagacttctaaatccataatccatccttttttaaaaaaaagaattttaaaaaaagatggatttgacacactcacccatttaatccatttccagccaaataatatgttgggctgcaaataagctcaaatggatgtaatatagggttttgtttgcctgcttttgaatgggctacggttttggagagagcaatccttgctgtgaaaacagtggtggatgtaaattttatgagggctgactccttactaacccacccatttgcccctgtggtttgttatcagtacaattcctttgttgccttaatcctagagctatgcacaccaaattgctgagatgtttagtagctgataaaagaaaccttttaaaaaaataatataaatgaatgaaatataaactgtgagataaatatcattatagcatgtaatattaaattcctcctggtctcctctgtcagtttgtgaaagtgatctgacattttgtagctactttaaaattattaaaaattatagactccagaatgtattgcggccgctctacagaatccaagctgacgtacgcgagc

SEQ ID NO: 113270 - DNA, 2220 bp, Homo sapiens
  misc_feature (1)...(2220): n = a,t,c or g
gacgtacgaccggnttggaattaccgggtcgacgatttcatcagcccgcccgcgcccgtccgcagccgcccgccagaccgccgcccagtattgaggggagaatcgtgcacatccaggccggccagtgcgggcaaccagatcggggctcaagttctgggaagtcatcagtgatgagcatggcatcgaccccagcggcaactacgtgggcgactcggacttgcagcatggagcggatcaacggttaataacacgaaggctttttttaacaggaacgggcctcaagccattctgggggacctggaaccctggaaccatggacagtgtccgcttcaaggggcctttggacatctcttcaggcctgacaatttcatctttgggtcagaagtggggccgggnaacaactgggcgcaagggtcacttacacggagggggcggacttgggttggattcggtcctgggatgtggttgcggaaggagtggggaaactggcgactggcttgcagggcttttcagctgaccccactcgctgggggggcggcacgggctccggcattgggcacgttgctcatcagcaaggtgcgtgaggagtatcccgaccgcatcatgaacaccttcagcgttgggccctcacccaaggtgtcaagacacggtggtggagccctacaacgccacgctgtccatccaaccagctggtggaggaacacggatgagacctactgcatcgacaacgagggcgctttacggacatctgcttccgcaccctcaagcctgcccacgcccacctacggggacctcaaccacctggtatcggccaccatgagcggagtcaccacctccttgcgcttcccgggccagctcaacgcttgacctgcgcaagtgggccgttcaacatggtgcccttcccgcgcctgcacttcttcatgcccggcttcgcccccctgaccagcccggggcaagccagcagtaccgggccctggaccgttgcccgagctcacccaagcagatgttcgatgccaagaacatgatgggccgcctgcgacccgcgccacggccgctacctgacggtggccaccgtggttccgcgggccggcatgtcccatgaaggagggtggacgagcagattgctgcccatccagagcaagaccagcagctacttcgtggagtggattcccaacaaacggaaaggtggcccgtgtgtgacatcccgcccccgcggccctcagaatgtcctccacctttcatcgggaaacagcacggcccatccaggagctgtatcaagcgcatctccgagcagttcactggccatgtttccggcgcaaggccttacatgcactggtacacgagcgaggggcatggacgatatcggagtttcaccgagggcggagaagcaacatgaacgacctggttgtccgagtaccagcagtacccaggacgccacggcccgaggaaagaaggcgaagattttacgaagacgacgaggaggagtcggaagccccagggccccccaaagtgaaaactgcctccgcaagctggaagtgagaggccaggttggcggccaggggccgaaagccagcagtgtcctaaacccccgggagccatcttgctgcccgacaccctgctttcccgctcggccctagggctcccttgcccgccctccctgmcagtatttatggcctcgtcctcccccacctaaggccacgtgtgagctggctcctgtctctgctcttattgcaagctccaaggcctggacgttttacgggttttgttttttactggtttgtgtttatattgccaaacccccggagcccttttgttgtcgacaccccgctttccccctggcctagggctcccttgtcgcccccccgcagaatatatgggccccgnnnnnnnnnntaagccaccggcgagctgcccctgtttctgtcttattgcagcctccacgccctgcggtttacagcttttgctcactaccgggcgcgcctatactatcgcgcagacctcctacagcccccctccttcgtccgccctacgacccctcccgcctcagctatccatcctcccacgcctcacccctcgccttccacctcccccataatttcttcgcccggaaacaccccctctcttacctttcctccancactccccctctacccatcccccccccacccccgccctcccctcgggggccttcaccctcccccccccaccgctactccagac

SEQ ID NO: 113271 - DNA, 1457 bp, Homo sapiens
ttttttttttttgagagttgaccatcaggtatattggggaagggagagatggaggcaccttcatgagtgcctcccaagggcagtagcctctgcaacttgctgggggttcaggggaagcagggagttcatggggatcctccagcaaagatgagctccagggctgcttggatgtcccccacccggttgcccgcagggccgacaggcttcagctcatcgtcctgggatgcccatgtcacgtaggctgctgcagcctggggctccaactggctctgaaggctgggctgcccagaggcctgaagggcatggctgtaggggcttggctgaagagatcattggtgaatggggcgtccctgaactgggacaccagaggacatttgggtgaggtccctgaggaatgacccctgggtgcccaggagtcggtgtgtgagagctgctctccggaagtgctgcccagggccaaggcggtggcccagctcactctgggtgaatggccggggcccagcagctccactgtaccccagggaggctgggcgggagctgggagtactgctagagggtgtggacctggtgtttgggtgaaagtcatcctcatcatctgagagcccttcaaacaggaagccacctggcatatcccggtatgagctggagggcatgctccgggaagaggagtcagtcccaggcattggggcactgcctgctacggagtgcagaaccaggacaatggcattgacgagggctgggtgagcaggcaccaacgtatcaagcatattgggatcagcgaagacagatatagaggtccttgtcctgtagaaccccaagagcaatagggtcactggctgaggacctggggtggccacaatgatctgatccagagactccttattgctgagcatcttaaaaaccggccctccctgtaaagaggaagctgctgtgccagggcaatgtgcaaacacccggaaactctcctcaatggcaagcccactttgtcccacaggttccggtttctgatcaggttcaggcccaggactttcgcagaacatggacagtggaccccaggttgaatgcccattagaagtcaagtgtctggtcatcttttagcttccgaccacagtagatcagatcaatcaagctcagggtctggaacagactcctggacgtttgccagcaataagctgcttcagaaatgaaatactatagccccctagcgagtattctcccagttctgtctctggcaaccgaagaatagactttggagtaagtggctggtcagccagcttcaccgccaggtgccagtctgagagagacatcctctctctttcgcgctctctctttctcccgctccagtgggaccagctacttggctgacacacatcgagcccgcgctgcccagggccccagcgccctcacccgtcccgcggaaggaacccggccgcacacgaaatcgtcgacccgggaat

SEQ ID NO: 113272 - DNA, 1106 bp, Homo sapiens
  misc_feature (1)...(1106): n = a,t,c or g
actgaaacccctgaagaacatctgaccagncnggnggaattcaccagggcggcgcgtggtctacgcacgatgtgacagagacgctcaggcatgtgtttctcaggatgaccgagtgggagacagcagcaccaagcggtggcaggagaccccagacatcaagctctttggggaagtgaagcaccgatgatgttgcaagatcaatgaacatttccctgtcaggaattacattgccagttgaaggagaaagttatgcccaagttacttgccttcacagttgccaaggcggttatgccgccaaaacgctttccgcaaaagctcagtagtmcacwttgtggagccgccttcacttaacttccatggatggattgcacggccggcaaacaaacggcaaaggaagcttcattgattgttgcgcattcgtcaaagcattgcctttccgagaatccattacaaccttgctcaacaaggccgagaaaccctcttgcagggtcccctggtgaaacgccccatcatcaaaacaagtgggtccccgggggagggacttcccacacgccatttggggcgccgccgggaactgttgagacgacaaggcttgtggatgtgtccccccctgcgcccgtgtgaacccaggccattttgggttgcttgttgcacaaggcggctcgttaaaggcttggcctttccgggaacatttaagaccattgcttgaattgcctggcaagattgagcttcttcaatgcttgccaaggggctccttcgaacttcctatgccattaagaagaaaggacgtgtggccttcttggagccgtgtgggccaagtccaacccgctggatttttcccaagctgcttgcccaataaaaccctgctcttgccctttggggcagcccttaaagtaaatattttcagaaacaataggttaggtgccttagaaattcattcagaggcttagaaatccacattaacacagttcttacatgcttgagtctggtctacatccatttacgtaagtaaaactccccttccagactgacgaaattctttttgtggcaagaagacaaaggaatacgatggattgataagcgtagtcaaccgcgcagagacgaaa

SEQ ID NO: 113273 - DNA, 2254 bp, Homo sapiens
  misc_feature (1)...(2254): n = a,t,c or g
ctctttataatttagtttccatagaagttatatgtgcatttaaaaaaattcaatgctggagcgaccgtgtctggggagccgagccccgcttctcgctgcggtgagcccggactggggcacgcactgcgcagactccccgctgcagtgggcggagtcccacaggccccgccccctcctcccaccctcgttcagcctgtccagacagaagctggggcccagcggaggtagcagcagacgcctgagagcgaggccgaggccccttcagggtttgggagaccctgacacacccaccttcttcacctggggctctgcgtattcccccagccttttaggggaaagatgaagcctaaactgatgtaccaggagctgaaggtgcctgcagaggagcccgccaatgtgctgcccatgaatgagattgaggcgtggaaggctgcggaaaagaaagcccgctgggttcctgctggtcctcattctggcaggttgtgggcttcggagccctggatgactcagctgtttctatgggaatacggcgacttgcatctctttgggcccaaccagcgcccagccccctgctatgacccttgcgaaacagagctggtggaaagcattcctgagggcctgggacttccccaatgcctccacggggaacctttccaccagccagggcctggctgggcctgcttcgccggtgcgcacagcagcctgggacatcgcctccttctactgggaccctcaccaacaatgacacccacacgcagggagccctctggcccagcaggggtgagggaggttcttccggcagcttgcagaccctgggcaccaaagggcgttgaacgttccgcattcgctgtggagcaaagcccagcgggcccccagccacaggcggacctgcaggctctgctgcagagcggttgcccaggtccgcatggtggacatgcagaagctgacccatggcgtcctgcataccaagttctgggtggtggaccagacccacttctacctgggcagtgccaacatggactggcgttcactgacccaggtcaaggagctgggcgtggtcatgttacaattgcagctgcctggcttcgagacctgaccaagatctttgaggcctactggttcctggggccagggcaggcagctccatcccatcaacttgggccccggttctattgacacccgcttacaaccaggagacacccaatgggagatcttgccttcaatgggaacccctgctctggcctacctgggcgagtgcgcccccacccctgtgtccaagtggccgcactccagacctgaaggctctactcaacgtggtggacaatgcccggagtttcatcttacgtcgctgttcatgaacttacctgcccactctggagttctcccaccctcatcaggttctggcctgccattgacgatgggctgcggcgggccacctacgagcgtggcgtccaaggtgcgcctgctcatcatgctgctggggacactcggagcccatccatgcggggccttcctgcttctctctggctgccctggcgtgacaaccataacccactctgaacatccagggtgaaactcntttgtgggtccccgcggatggagggcccagggttcgaattcccatattgcccgttgttcaaccacaaacaagttacatgggtgactttaacggggccaccttacatcgggaaccttccaactgggtctgggcaacttacttcacgggaggacgggcggggcaccttcgctgctggtgacggcagaatgggaaggggcggccctgcggagcaagcttggaaggccatttttcctgaagggacttgggacttccctttacagccatgaaccttgacaccttcagctgaacagcgtggggcaacgcctggccgccttgctcttgaggcccgattccagtggggcagggccaagggcttttgggggcccccgcgggacccagggtgctttgggtcacggtcccctgtccccgcacaccccgcttctgttttgccccattgtggctcctcagggctctctcccctgctctcccacctctaccttcaccccccaccggcctgacgctgtggccccagggtatccagcagatctggcgtangcggatcaagcccccaaagaaactgggggtgcatgctgggcgctggccccctggcccacccccactttccaagggcaaaaagggcccaagggttataataagtaaataacttgtctgtacaaaaaaaaaaaaaagtcgacg

SEQ ID NO: 113274 - DNA, 1636 bp, Homo sapiens
tccgtgcggtggaattccgcagaggaagatggcgccgcggaggggtcaggtcgtttctgcgcgggctcccggcgctgctacatgctgcttgctctttcctcgggccctggcccgctgcgagccacggcggcaagtactcgcgggagaagaaccagcccaagccgtccccgaaacgccgagtcccggagaggagttccgcatggagaagttgaaccagctgtgggagaaggcccagcgactgcaatcttcctcccgtgagcatggccgatgctccacgctgatctgaagatacaggagagggacgaacttcgcctgggaagaaacttaaagctttgacggctttggacgaagatggggggagaaggaaagcgagactcattacgcaaccttcaatgttcatctttgggccaagtatggtctggacggaaagaaaggacgctcggcaggtgaccagcaactccctcagtggcacccagggaagacgggctggatgaccccaggctggaaaagctgtggcacaaggcgaagacctctgggaaattctccggcgaagaacttggacaagctctttgcgggagttcctgcatcacaaagagaaagtttcacgagtacaacgtcctgcatggagacccttgagcaggaccgaagaaattccacgagaacgttcatttagcccctcgggacctgaagcgacattcaagggtcagcgtcctgcacagcagtcatcacggagctgaaggagaagctgcgcagcatcaacccagggccttggaccacctgtccagagtccaaccaccagggcttacaagcatgagcgttgagttcagatgagcccagggtgatttgacctgttgggacctgggcgcagtccgccaaccttcacgggacaaggagcttggaggcttttccgggaggagcatcaaagcactttcgaagccaaaatcgagaagcacaaccactaccaagaagcagcctggagattgcgcaccaagaagcttgaaggcacgcagagagcgtgggcgaccggcgaagcgtgtgatccgcaagcccgcgaagaaagcaccgccctgctggaaggggcggacccaaggaagctggggctaccacggtgaaagaagcatcttcaggaccctgtcccggcaggaatttccaagaagctcggcaacaacgaaacttcttgaaaggcaattggggaagccccaaccccggcaagggaaagaggccaagcgtgaaaggaccctgggcctcttggcccgtggcatttcccgtgaacaagcccgccggtcaaggttgcctggggctggcacggttggtctagtgagtgtgaggattgtgttgctggtggactgccaaccgctgccggtcgcgacacagggcttggtggttgtagcgatttgggtctgaagatcggccccagctctgacttgaagggggcttggcttcccactcaagcatcagcgtggcaagtcaccacccccagttaaggacctcgatgtccagctgctgtcaagtctgatagtcctctgcttaaaacaaacacggtttacataaaaaatcttacacatctgccaaccggaaataccatgcacaagagtccttaaaaaatatgggtgccgtatttaaaccaaaaaaaaaa

SEQ ID NO: 113275 - DNA, 1919 bp, Homo sapiens
  misc_feature (1)...(1919): n = a,t,c or g
gggcggaattccagctgcgactgctgagggagaaaatgatgcccaggttgggctccccggcccaccggccgaggagaggcctgcgctgcacacgcgcagaccgagcatccgcgtcaagaggcgaaaagagcgcgcgctccccacgtcctgcgctcctggctgccgggcattcgtctcagccgtgactctcgccaggccggggctggcgcgcccacgtctgaagagcgatgccgagggaaatcatcaccctacagttgggccgagggcggcaatcagattgggttcgagttctggaaacagctgtgcgcgcgagcatggtattcagccccgagggattcgtggaggagttcgccaccgagggcactgaccgcaagaacgtctttttcttaccagggcagacgatgaggcattacatcccccggggccgtgttgctgggatttggaaccccgggtgatccactccatcctcaactccccctatgccaagctctacaacccagagaacatcttacctgttcggaacatgggagggagggagctgggcaacaactggggccagcgggatttttcccagggggagaaaaagatccatggagggacattttttgacattcataaggaccggggaggcagatggttagttgacagttttaggaggggttttgtgctgttgttcattcctttgcttggggggacaggctctggactgggttcctacctcttagaacggctgaatgacaggtatcctaagaagcctggtgcagacatactcagtgttttcccaaccaggacgagatgagcgattgtggttggttccagccttacaatttaaatcctcacactcaagaggctgacgcagaatgcagactgtgtggtggtgctggacaacacagccctgaaccggattgccacagaccgcctgcacatccagaacccatccttctcccagatcaaccagctggtgtctaccatcatgtcagccagcaccaccaccctgcgctaccctggctacatgaacaatgacctcatcggcctcatcgcctcgctcattcccaccccacggctccacttccttcatggaccggctacacccctctcacttacggaccagtcagtgggccagcgttgagggaaggaccacggtcctgggatgttcatggagggcgggttgttgcagcccaaaggaacgtggatgggtgttccacagggccgagaccgccagaccaaccactgctacatcgccatcctcaacatcatccaggggagaggtgggaccccacccagggtccacaagagcttgcagaggatcccgggaaccgcaagttggcccaactttcatccccgtgggggcccccgcaagcatcccagggtgggccctgtcgaaggaagtctcccctaccctgcccctcggcccaccgggttcaggcggggttcattgatgggccaaccacaccagctatctcccttcgctcttcgaaaagaaacctgtcgcccagttatgaacaaagctgccgtaaancggggaggcctttcctgggaagcaggttcccgcaagggagggacatgtttcaagggacaactttgattgagatgggacacatcccagggagattgtgcagcagctcatcgatgaagtacccatgcggccacacgggccagactacattttcctggggcaccccaggagcagtgaagtccccccaggacaggggaccctcatctgccttactggttggcccaagccctgcctgagctgacccacccccccagagcacagatcagggacctcacgcatctctttctcatatagcatggacttttctgttggcctgcaaacacatttacttctcctcttatgagactatttatctttaataaagcactggatataaatcaaaaaaaataaaaaaaaaaaaaac

SEQ ID NO: 113276 - DNA, 1698 bp, Homo sapiens
  misc_feature (1)...(1698): n = a,t,c or g
cggaaattgaaacctgatgactgtacgccngcaccnaccggnccggaattccgggggcgacgatttcgtgttccgggaaaaggagctcctgctgccactgctcttccggagcctgcagcatggggcccctgccgcgcaccgtggagctcttctatgacgtgctgtccccctactcctggctgggcttcgaggtgacgctgggaggggtcgcctcggcagtgtctggggagtgagggcggagggaagagtgagcgcagggctccgggacagaggtctcgtgtaactcctggcgccgcccaaggggttaaggcaagcagggagagctccggggctgaaggtcactttgtgcttttaaacggaatagagtcgctggctccaacccgagcctttatatcccgactgcagtttcccacggtggtggaaagaggggcggctccaaacattcagggagaaatgcagaacacggccacctcttagcccaacgatggcagttttggggaaaactggccacaggagcgaagatcctggaatagatttctagtagtgaggagagttttgccaatttcaaaccaaacaatgtagggtgtccgcataacccctgctctgcacttagcgcctcccttccctttccctcggctctttcacttttccatcttgcacactggcaatcgttcttgacctctgcccgcagatcctgtgccggtatcagaatatctggaacatcaacctgcagttgcggcccagcctcataacagggatcattgaaagacagtgggaaacaagcctccaggtcctgcttccccggcaaaggactatacatgggcaaatgactttaaagcttcctggagacaccatcttccagattccccccatccactttccccaaggatttctttgtctgtgaatgctttgaaaaaggaagttttgtcttgccatgcgttttccttcaccgtcgtggaacttgggaggcatccaggagatgctgggagaaaagcgttcccgggaagctgtgggatgccgcgtctgggtcaagggaatgaaggacatcaccgaggccgcgcagagcattcctgggcgggttgcagaagaagggctggtatgtcctgcagaacaagcccaggggacttctgggaaaagatcggcaaccgccaaaggtgaaaggaaccaggctcaagggagacccactggagggcagcctgcaggattacgggagcctttggggctgcccattcacccgtggccccatgttggattggccaaaccccacatgtttatttgggctctgaaccggatggaaggctgctggcgcaccctgctgggtaagagagaagtggatgggcccctatacctcccagccgtgaattgccagacttttaagattgccccggaggaagcaaaacttcttcggtataaaaaaagcaggccatcctgcttaacccttggctccacccataaggcactgggactcggaatttctctatctgatagaggtattttctgtggccctgggagctgtctgtctttcccctacccccaaggatgccaggaagacgtccaccattcagccatgtggcaacctttacttctatgcctcacaagtgcctttcagagagccccaattcttgctttcccacaaaataaacctaactgccatcaggcaaaacatttctgtgtctgtaaaaaaaaaagtcgacgcgg

SEQ ID NO: 113277 - DNA, 6662 bp, Homo sapiens
  misc_feature (1)...(6662): n = a,t,c or g
ttttttttttttattcttaaatatggtttaatactcttctccatttctgtacatcacaacaccaagattttgctgcttagtatctctctgcagaggctatagagaatgcaaaggctacggttttcaccccctcttatatgtgtttgtatgtgtaagtgtaatacatatcaatatatattgatacacacatcaatatataatgcaatatatatccaccgaagagaacacattgattaaagaaatacaaaaatttgggcatcatttccaaacttaaatagtaaaaataaaaactacaaagggggctggcataccctaaatggtatcatgtgaaacaacaaagcatattcaaaaatgtaaatttacatccaatttctcctgggtcttggtcatatcacatcagacccattttacaatgggcaaaaccctaaaggtactggctgtgaagagagcatgtttactcggctcctggggtgttctgcaaacaaatagcagaggnccaaagcaaaaaagcctgttccggtgaagtctccccacgttggtgaacaccaaataatggactcttctcacagggggttgaaaacatcagcgttacacattgaaccagaacagtatttggaccctcagagtacaagtgtgagaaccaagaaactttacatttaaagacaatactcccttccattcaagtgaaaccaggatttattggaacgattaggcagggtcctgtaacctggggaaccaagggagctgggntcaggcccaattaaagctacgagtgactgaatcaaggtcagtaaagaacagcagtcaggcactaaagtgttaaaagtacccaatttgaaaaccaaatgcacccccactaccctaggtcagtgtggaggtgatacccaattgacttttaaaaccttttggtccttcaaagtccatttggtatacttttttccatcgctaccactgggcacgtactatacactttgttcaactgtcaccaccttgggcacgccatgaccttgcatatcagctgggttcaagtctgacttacagcccagctgtgaagcatcagcttcaggggtttcaggccaacttttggatccaacatggtcttaaatccatggtgccagaagctgtgtcccatcccttcccacccgcccctaatttctcatgtgagaagtgcttgtaagtcccacatttgaaacagatgctccaaccccaccaggaggtcaggagtttataattacatgcagtcatacatgtctgtcgttcctgtgaaaaaccttgacagttcattttaataaatcaaaacattcacataatctcatgccatccaacacaaggaaaacacatccacctcccttttaacaaggattgacccaagcaaaataaaatcctctttaaaatttccttcgccttcccacttaaaattgccatgttttatttcctccccaatccccagcaatagccacagaagcccccatcatatcccatccccaaaccggtttcgagtaggttaaggttatagggaccccttgtcagaacattgatacaaaggggctcccaaacgccgggcacaaatcgtgtctgcaaacagatggaagtaaacagtgcactggcccaaatgcttcatgagtcagtttgattttgcaatgcaatttgcatcccttgaaactgcccagtcctggaggggggaacggggtaaccgtgaagggagtgaaagttggaaagtgccctccctattaggctcacccctttcaacattaaacagaggacccaaggaggaggaaatgggttcccaacattttcaccacatatatttctttcttacgcagtctaagctgagaatgcccatgtaaatgggtcacctaggcgaaatgcagcaatttaatttttctccaatcaaaaataagaaacaaaccagtatgatctcacttctattaacttttgaaggtttacagcagttaaagtatttttgcttctatgtatgaaggttaaaaaaatcattttttttcataaaaatacaagagcaaccaatttcaccatccagtaaaagtaaaaactgggattcttttttaaattacgtccaaagtggcttttgaaggaacattagttagttaggctgctgcgctgacaccatgacaaaccaaagtgtagggctgggtctggttttgtttcgggttttcttttcaatatccaatgctcatggattaagttctggaaatgttccaattgtaaggacagggatctgtttggattccaccatgggtatgctccttggggttggatgctggaggggtgaggcacggttttgccggacccatgtcgactacctagtagtcatcaaggtcaagaaattcatcgtctcctccttggtattccattcccctggaaatctactctggtaccgcaagataccctccaattccacccaaatcctttcatcaaactggagaccccttctgggatttatctgtgacaatttccaacgtaggctccaaattttttatagttgttagcaaaccaattcaaacaggggcatgctctcgataagctccatgttcctgtccgggtctctttgtctgtgaaatggagatttatcctttttcttgctctggagttagatagagaatttttctcctcttctgtgccttggcaatgaagaacatatctcattatatccaggattttcatagactattagaattttctacagctcccatttccaaagcctttagtgtatcttcaacgccaaaacagtacttgccagtgagtcctggctgatttcatcaaagtatcgtcctattaatttcttctcttgaatgaatttcacgttggagaggacttcagtagataactcaatagcttggttgaatccattttcaccaccataggatatatcaactaattttaaaacttttgattgtaacctctgatcaaacatatcagattgacttagttcagttttaaagtcagcggatccagctaaaactagaccagccacattcactttgtccccagaaataaacagctgcacagcagtctctgctactttccgaacatagttatgtcgcttttccattcttaaacgggcaaaacgcaaggctgaactgacctccctcctacccgtgtttccttggggaagatccccacagtgaatttgtgccagggacctcctcttgtgtttcccttgggagtgtgcccaaaaagtgcacccactacccacctattacaatgaaatcccaaacttgcctatcatctgaaagtagtgctgtaagagcctctgtatggaatttgttgtcacacaaatacaatgacgtattaattggtttgaaaggttcaaagtcaatgttgactttcttttcctttccttcttctgttacaattgttccacagtatacaaccagaccatttggaggtactttgttataaagtttgagtctttgttgtacagatgtaatggctcccaggactgaaaggcggtttactcgtgacttaatgttagatgcagttccaaactcatccgctaacatttttgccactcgtgaaatctggtctttgggaggaatgatcaatgatatcatgctggtgccattgccgcgggccgcctccaagctcttaatgagcttcttgatcttccagatctccacgttcctgtcggcagcactggggtcgtccgccatcttctcgcctcctcctccctaagggcccagtcctgggcggcagcggctgctcctccccggcggcggctccggcggcggcggcggctctgacgtaggacaccggctccctctctccaggcagctgcaggtggtgccccttttcggcgacatgcagatagagctggccagatacattaagaccagtgctcactatgaagagaacaagtccaagtggacgtgcacccagagcagcatcagcccccagtacaatatctgcgagcagatggttcagatccgggatgaccacatccgcttcatctccgagctcgctcgctacagcaacagtgaggtggtgacgggctcagggctggacagccagaagtcagacgaggagtatcgcgagctcttcgacctagccctgcggggtctgcagcttctatccaagtggagcgcccacgtcatggaggtgtactcttggaagctggttcatcccacagacaagttctgcaacaaggactgtcctggcaccgcggaggaatatgagagagccacacgctacaattacaccagtgaggaaaaatttgccttcgttgaggtgatcgccatgatcaaaggcctgcaggtgctcatgggcaggatggagagcgtcttcaaccaggccatcaggaacaccatctacgcggcattgcaggacttcgcccaggtgacgctgcgtgagcccctgcggcaggcggtacggaagaagaagaatgtcctcatcagcgtcctacaggcaattcgaaagaccatctgtgactgggagggagggcgagagccccctaatgacccatgcttgagaggggagaaggaccccaaaggtggatttgatatcaaggtgccccggcgtgctgtggggccatccagcacacagctgtacatggtgcggaccatgcttgaatcactcattgcagacaaaagcggctccaagaagaccctgaggagcagcctggatggacccattgtcctcgccatagaggactttcacaaacagtgccttcttcttcacacatctgctcaacatcagcgaagccttgtaacagtgccgttacctgttctgagctctgtatatcaagaattcttcctggagttaaccatgggccgacgaatccagttccccatcgagatgtccatgccctggattctaacggaccatatcctggaaaccaaagaaccttccatgatggagtatgtcctctaccctctggatctgtacaacgacagcgcctactatgctctgaccaagtttaaaaagcagttcctgtacgatgagatagaagctgaggtgaacctgtgttttgatcagtttgtctacaagctggcagaccagatctttgcttactacaaagccatggctggcagtgtcctgttggataaacgttttcgagctgagtgtaagaattatggcgtcatcattccgtatccaccgtccaatcgctatgaaacactgctgaagcagagacacgtccagctgttgggtagatcaattgacttgaacagactcattacccagcgcatctctgccgccatgtataaatccttggaccaagctatcagccgctttgagagtgaggacctgacctccattgtggagctggagtggctgctggagattaaccggctcacgcatcggctgctctgtaagcatatgacgctggacagcttcgatgccatgttccgagaggccaatcacaatgtgtccgccccctatggccgtattcaccctgcatgtcttctgggaactgaacttttgactttctccccaactactgctacaatggggtccactaaccgttttgtgcggactgccattcctttcacccaagaaccacaacgagacaaacctgccaacgtccagccttattacctctatggatccaagcctcttcaacattgccttacagccacatcttacagctcctacaggaatttcgtggggggccacctcatttcaagactatctgcagactcctgggttatcagggcatcgctgtggtcatggaggcactgttaaagattgtgaagagcttgcaccaaggagccgttctccagtatgtggaaaacactgatagaggtgatgcccaagatatgccggtttgccccgacatgagtatggcttccccagggatcctggagttcttccaccaccagctgaaggacatcattgagtacgcagagctcaaaacagacgtgttccagagcctgagggaagtgggcaatgccatcctcttctgcctcctcatagagcaagctctgtctcaggaggaggtctgcgatttgctccatgccgcacccttccaaaacatcttgcctagagtctacatcaaagagggggagcgcctggaggtccggatgaaacgtctggaagccaagtatgccccgctccacctggtccctctgatcgagcggctggggacccctcagcaaatcgccattgctcgcgagggtgacctcctgaccaaggagcggctgtgctgtggcctgtccatgttcgaggtcatcctgacccgcattcggagctacctgcaggaccccatctggcggggcccaccgcccaccaatggcgtcatgcacgtcgatgagtgtgtggagttccaccggctgtggagcgccatgcagttcgtgtactgcatccctgtgggaaccaacgagttcacagctgagcagtgtttcggcgatggcttgaactgggctggttgctccatcattgtcctgctgggccagcagcgtcgctttgacctgttcgacttctgttaccacctgctaaaagtgcagaggcaggacgggaaggatgaaatcattaagaatgtgcccctgaagaagatggccgaccggatcaggaagtatcagatcttgaacaatgaggtttttgccatcctgaacaaatacatgaagtccgtggagacagacagttccactgtggagcatgtgcgctgcttccagccacccatccaccagtccttggccaccacttgc

SEQ ID NO: 113278 - DNA, 2050 bp, Homo sapiens
  misc_feature (1)...(2050): n = a,t,c or g
gaattctttcttcagcccatgtaaacatgaaaataagggttaaaaatgacttcattatggggaaaagggacaggatgcaaattgttcaaattccgggtggccgctgctccggcctccggggccttgcggagactcaccccttcagcgtcgctgcccccagctcagctcttactgcgggccgctccgacggcggtcccatcctgtcagggactatgcggcgcaaacatctccttcgccaaaagcaggcgccgccaccgggcgcatccgtggcggtcattggcgcagtggtggacgtccagtttgatgagggactaccaccaattctaaatgcccctggaagtgcaaggcagggaagaccaagactggttttggaaggtggcccagcatttgggtgaagagcacagttaaaggacttatttgctaatggatggtacaagaaaggctttgggttagaaggccagaaaagtacctggaattcttggttgcaccaaatcaaaaatttcctgtttggtcctctagactttggggcagaatcatgaaatgtcatttggagaacctattgatgaaagaggtcccatcaaaaccaaacaatttgctcccattccatgctggaggctccagagttcatgggaaaatgagtgttgagcaggaaattcttggtgactggtatcaaggttgtcgatctgctagctccctaatgccaaaggtggcaaattggggcttttttggtggtgctggagttgggcaagacctgttactgatcatggagtttaaatcaaccaatgtcggccaaagcccatggtggttactctgtgtttgctggtgttggtgagaggacccgtgaaggcaatgatttataccatgaaatgattgaatctggtgttatcaacttaaaagatgccacctctaaggtagcgctgtgtatatggtcaaatgaatgaaccacctgggtgcttcgtgcccggttagctctgactgggctgactgtggctgaaatacttcagaggaccaagtaaggtccaagatgttactgctatttattggattaacatctttcgcttcacccaggctggttcagaggtgtctgcattattgggccgaatcccttctgctgtgggctatcagcctaccctggccacttgacatgggtactatgcaggaaagaattaccactaccaagaagggatctatcacctctagtacagggctatctatgtgccctgcttgatgacttgactgacccttgcccctgctaataaggtttgcccattttggatgctaccactgtactgtcgcgtgccattgctgagctgggcatctatccagctgtggaaccctctagactccacctctcgtatcatggatcccaacattgttggcagtgagcattacggatgttgcccgtggggtgcaaaagatccctgcaggacttacaaatcccttccaggatatccattgccatcctggggtatgggatgaaactttctgtcgagagcacaagttggaccgtttcccggtgcnacggaaaaataccagcgttttcttgtcctcagcccatcccccggttgcctgaaggccttccacagggtcattatgggggaagctgcgtacccccctgaaaggagacccatcaaaggatcccccagccagattttggccagggtgaaatatgacccattctcccaggaacagggccttcctatatggtgggaacccacttgaagaaagctgggggcaaaagctgattaagctggactgaagagcattcatcgtgagggggtctttgtcctctgtacttgtctctctccttgcccctaacccaaaaaagcttcatttttctgtgtaggctgcacaaagagccttgatttgaagatatattcttttctgaacagtatataaggtttaaggtttccaataaaaatgtacacccctcagaagacaaatcaacacataaaaaaaaatggggggcgcccccctaaaggaaccaaatttaatacccccgggcgggagaaatannnnnnnnnnattggggccccttaacctaaacccc

SEQ ID NO: 113279 - DNA, 2628 bp, Homo sapiens
gagcagttcagttcgctcactcctcgccggccgcctctccttcgggctctcctcgcgtcactggagccatggcgttcgccgagacctacccggcggcatcctccctgcccaacggcgattgcggccgccccagggcgcggcccggaggaaaccgggtgtattggttgtgctcggtgcgcagtggggcgacgaaggcaagagggaaggtggtggacctgctggcgcaggacgccgacatcgtgtgccgctgcccagggaaggaaataatgctggccatacaagttgttgtggattcttgtggaatatgattttcatctcttacccagtggaataattaatccaaatgtcactgcattcattggaaataggtgtggaaatatcatctacctggattgtttgaagaagcagagaaaaatgttcaaaaaaggaaaaggactagaaaggctggggaaaaaaggccttattatatctgacagagctcatattgtatttgattttcatcaagcagctgattggtatcccaggaacaacaagagacaagaacaagcatgataaaaattttggggtaccaccaaaaaagggcattggcccagtttaattcgtccaaagctgtccggagtggactccaggatgtgcgaccttgtttctgactttggagggcttctccgagaaggttaaagttctagctaaccaatacaaatctatataccccactctggaaatagacatttgaggtgaattacagaaactccaggggtatatggaaaagattaaacccaatgggtgagagatggagtttattttctatatgaggcccctaccatggaccaccaaaggaaaatcttggtagaaggtgcaaatgcagcactattagatatttgattttgggacttaccctttgtgtaacctcttcagattgtactgttggaggtgtttgtacctgggttggggatgccaaccccaaaatgtttggggaagtggaagggggtcgtggaaggcttattcacacttgagttggtattggtgcctttcctacagagcaagacaatgaaattggagaattattacaaccaagggggtagagagtttggtgtaactacccgaaggaaaagaagatgtggctggttggacctcgttttgctcaaatatgctcatatgatcaatggatttactagcgttggcacttaccaagttgggatattttgggacatgtttacggaaatcaaagttgggagttgcttacaagttaggatgggtggaaattcattacctcatatcccagccaaaccaagaagtctttaaataaagttgaagttcaatataaggactcctcccaggatgggaccccagacatatcaaatggcaagggcgtttaaagaactacctgttaatgcacaaaactatgttccgatttattgaagatgagcttcaaattccagttaagtggattggtgttggtaaatccagagaatctatgattcaactcttttaatgattgccagtaatgcaagaaacactccttgagagggaggggaaaagacctttcttaaatatttcatttatgacctgcaaattcaagaataaagacactgaagtaagtttgaagccctacagttgtttccagtcttttcagatggatgcctactgtggagattaactttggcatattcccagtgtcagctttctttagctggaatgcccaaatcatttgttgctcctgctgctctcatggtgccacgtttttttttttcaatgtttagtaatagtataatccatgttgtttgatagtcaaaagtagaattactttaaatgtagtttttcttccataatggtcattgcgtgttcttaaagttttaccccctattagatgggtaagaaccaattaatgccagttttgccacaaatatttttacattcctgatcattcaggttctggtcattgtaattctctgttgttagacaacaactgatgaaatacataggggttcctgtaaacttttgtaatgcctatgaattcctgtttaaattttggggctgtcctattttctgtctgaaacccatgcaaaattgagcttttggtggggctgggagggggttatgtattcatgggaccctttaatttggacagaacacaagaacttatttctgtcagttatttaatacattgaaaatttaggtgaaatggttcaaagaggaataggatgtttcccaaaacaacaatctttatgttaaaaataggtcattaaaagatctgttgttaatatatgggtggggtatttttctttaaatttccaaacattacctctgaaatgtgtatcttttctttttttatcttaccattaattttaaatctagtggattggttttcaacatcgtgcctgccgatatgcctacagaatcatctggaaggtgtcaaaatgaaccccacgttgttagcccataattttgattatgccctttatttctcctttcttgaaaaaaaaaaggtgttattttgacaattaggcataacattgttttgtaggattatcttttaatggaactattttaaatgttaaattaggtgccacttaaatttattttattacaccatgaatagctgattaaaagaaccgaaatatttctagt

SEQ ID NO: 113280 - DNA, 1085 bp, Homo sapiens
gcggccgcgacgcccgccgcagctggggcgatccacgggaagggcccggctcgcgtccagagtcgccgccgccgccggtccccccgggtgcccgggcccccctcgcgggggaccgtgcccccgccgccggggccccgcggcgggccgtcgccggtccctgtcgtcccgacccttctctccccccgccgccgcccccacgcggcgctcccccggggaggggggaggacggggagcggggcagtctgggacgcgccgccgccatgatcatccctgtacgctgcttcacttgtggcaagatcgtcggcaacaagtgggaaggcttccctggggttgctgaaggccgaagtacaccgagggggacgcgctggatgcccctgggcgctgaaagcgcttacgtgtgccgccggatgctgctggcccacgtggacctgatcgagaagctgctcaattatgcacccctgggagaagtgaccacgctgaaaacccacccaccccgctgtgcttgaccatgggcccctgaagcgtcctacccccgaaattcacgaagctgaagcaatccgggaacttggcgtaaatgcctggcccgcagtgtgtgtgtattcccataaccccactttgggaaggaaccattccagtaaaaggtcttttcaagaaccactaaggtcccagccctcactagaatgtcaggagccaggtctaggcccagctttcacactgtggcagcccagtgaaagcagactgggcccatgaactctcctagccctggggcccagcctggtttcaaagggacccctgcaggaggcgctgccaggagagccttccatctcggggctctttgaggttccctccttctgggtgttcttcaggctgagcagagaggctcctgtaccctctctcttcggaatctgaagaagccagatttaggccgggcaaaggggctcacccctatgaatcccaggactttgggaggtcaaagcaggatgatcacttgggtcagaaatttcaagacccgcctgggcatcataatgagaccccatctctacaacaaaatttaataaattagctgggcgcagtgttaaaaaaaa

SEQ ID NO: 113281 - DNA, 2317 bp, Homo sapiens
  misc_feature (1)...(2317): n = a,t,c or g
ctcccccaaccttatcccgcccctgggggttcgcgggcatttttcaggaactttctttccggcttgagaagccgccactcccaagatggagcaggaaccngcggctgctggacaagaggggtgcggtggatactgacctttgctccggcctcgtgtagcgtgaagacacagcgcatctccccgctgtaggcttcctcccacagaacccgtttcgggccatcagagcagtctggtgagatgctgttgccgctgctgctgctgctacccatgtgctgggccgtggaggtcaagaggccccggtgcgtcgtccctcaccaatcgtggcttctacgatgagtccaaagcctttcacctggcctggacggttcggccaccatcccatttgatcaaggtcaacgatgacctattgcgactgcaaagaatggctcttgacgaagccaggcaacggctgcctggtccttaatgggcaagctttccactggccaccaaacacttgggctataaagccccttgtaataatccccttccaaaccggggtcaaacgatggtgtttgtgactgctgcgatggaacagacgaagtacaacaagcggcgtcatctggtgagaacacctgcaaagaagaagggcccgtaaggagaagagagtccctgcagcagatggcccgaggtcacccgcgaaggggttccgtcttgaagaagatcccttatttgagggactgggaaagaaggcacgggaggagaagcagaaaaagcttcattgagctacaggctgggaagaagtctctggaagaccagtgtggagatgctgcggacagtgaaggaggaagctgagaagccagagagagaggccaaagagcagcaccagaagctgtgggaaagaacagctggctggcttccaaggccccaacagggagcaggacgctagggcggctgatgccttcaaggagctggatgatgacatggaccgggacggtctcggtgactgagctgcagactcacccggagctggacacagattggggatgggggcgttgttagaagcggaagctcaggccctcctcagtggggacacacagacagacgccacctctttctacgaccgcgtctgggccgccatcagggacaagtaccggtccgaggcactgcccaccgaccttccaacagccttctgcccctgacttgacggagcccaaggaggagcagccgccagtgccctcgtcgcccacagaggaggaggaggaggaggaggaggaggaggaagaacaggctgaagaagaggaggaggaggaggattccgaggtgcagggggagcagcccaaggaggccccaccgccacttgtcacccccgcagccgggcagacctgctgtaggaagacaaaatgccgccctacgacgagcagacgcaggcccttcatcgatgctgcccaggaggcccgcaacaagttcgaggaggccgagcggtctctgaaggacatggaggagtccatcaggaaccatggagcaagagatttcttttgactttggccccaacgcgacgtgttgcttacctgtacagccagtgcatacgagctcaccaccaacgaatacgtctacccgcctctgccccttcaagcttggtctcgcagaaacccaaactcggggggctctcccaccaagccttgggcacctgggggcttcatgggattgggccccgaccacggacaagtttcagttgccatgaagttttgagcaaggcacggggcttgctggcaggggccccaaccgctccagcatccgtgacgcttctggttcgggaaaagggaacatggtgaccagctaccacagagcccaagtggctgcgagtaccttcatggaagttgatgaacgccagccgccttgcccggagccacccgccttgaagcaaccccaaccgaaagacggaccatgacgagctcttagcttgggatgggcgcaagagaaccttcaaggaaggcatgaagccaagccccttgcagttgccgttccacccgccccctctggggcttgcctgtggcttcttgttgccctcctctgtgggcggcagggacctttgtgggggcttcgtgccttgcttcttgggggcccagggcggggcttggttccacattcccaggcccccaacagccttcaaagatgggttaagggagcttgccctccctgggcccccccaccttggtgactcgccccaccacccccagccctgtccctgccacccctcctagtgggggacttagtgaattgatttgaccttgttgaccttcaatacaattaaatgttgatcccccacccaaaaaaaaaa

SEQ ID NO: 113282 - DNA, 1911 bp, Homo sapiens
ttttgctggaggccgcaaccaggcccgcgccgccaccatggtacgttgaatcccgatctctggaaggtttagggcagagctctggtgactgggggatgacgaggccacctctcctgtcatccttaggcgtcgcccggtgccacgaggtatgagagcctcggcagacggccgggctccggcagtggattcagcatctccggcctggccgggctaggggttatcggtagccagtgcggcctttccaccgctttcgcttcccggggagcctccgacacttcctcctcggtcagctagatgagttcgcccctcaggtttccttcagtggagtagattctgagcggtccagaatagctcctagtgctgtgtatgggagaggagaagacagagacttgacttggaggcctacctgtaccaccagtgcggacttgacccccaggtttgttttcctggacagcgtcgttgtgtatggtgttgtgtgtttcctgtttcgaaatcagtatgacaatgatgtcactgatttggagcccccagggcaggattcatcaaattgaatatgcaatggaagctgttaaacaaggttcagccacagttggtctgaaatcaaaaactcatgcagttttggttgcattgaaaagggcgcaatcagagcttgcagctcatcagaaaaaaaattctccatgttgacaaccatattggtatctcaattgcggggcttactgctaatgctagactgttatgtaattttatgcgtcaggagtgtttggattccagatttgtattccgatgaaccactgcctgtgttccgttcctgtaacctctaattggagccaggaccccagataccaacaccaccgatatgcccgaaaccattatggtgttgtcctccttattgctgggttatgatgatatgggccctcacattttccaaacctgtccatctgctaactattttgactgcagaggcaatgtccattgagccccggtcccaaatcagctcgtacttacttggagagaccatatgtttgaatttatgggagtgtaattttaaatgaactagttaaacatgggtctggcgtgcctttaagaggagacggttccctgcaggaacagggaccctgacttacaaaggaatgtttccattgggaattgttggtaaagacttgggagttttacaatctatgatgatgatgatgtgtctccattcctggaaggtcttgaagaaagaccacagcgaaaaggcacagacctgctcaaccctgctggattgaaccctgcagaaaaagggctgatgaaccaaatggaacatttaagtgataagcccagtcctatatatgtattatccaaattcggtaaggaattccaggccacccaccatactgatgaccaataatcctatactttggaacccaaaaggttgcagagtggtggaaatgctatgctatgttttaggaatcagtcccagatgtgagttttttcccaagcaacctcacatgaaacctatataatgggaatacatttttcctttggaaggggtctgtataatccattttcctaggaaagtatgggtatctatactaatggtttttatatgaagtaacataggtgtctttgtggttttaaagtacaactgtgaaataaaattgtttacacgtcctggtatattgggtttttgtttttttaagtagcttcaactctatatagtagtctgggattacaactggtcatttgcctaattaaattgccttatttttagtgatggagaaaaataatacctcttatctgtcatagccttataacagttctccagtgtatgaactggctgcatgaggatccatggagatttggtttagaatacaaatttcagggttcaaccgtgggtgattttattaaaactttagggaaccaccactt

SEQ ID NO: 113283 - DNA, 674 bp, Homo sapiens
cagcacagtgcaagcaaacacctttgaatttgcggatgctgaggaggatgatgaggtcacgcatgagagcgcctggtgcccggtaacaggacccctcttaggtccagaaccggcccctcacataacagctggttcctgccagaccggagaggggagaagtcatgttgcccctaaacccctccccacctctgcaggacagacatgggagggaggacagggaaggccaggcttgctctgggacttttaatgctcccagaggccctgccaaactgaccacctcccccgactgccactctggacctaatagctgttccttaggccccactccatgccacccccaccagctggaggacccagcctcacaggtgtgtcctttgtgccagaccaagcggcccgtggggggatggggggcagggagtgtaccacacagggccattgtctcaccctcccaaagggaccgcctgcccccagctcatcccaggagcgtccctgcttgcaaccctgacagccggtactcccaggccggcttaccccaactaccccgccccagccaccctccttaccccagcaaaggtcaggtatgacctcccggggaggaatcccacctgcctgtataccccagacttgcctctggggcctgattaaaaaaaggctgttttgataaaaaaaaaaaa

SEQ ID NO: 113284 - DNA, 392 bp, Homo sapiens
tttcgtctcctctggactttatcccggggaccctcatgggctggagggaggatgtggcctggagtcgtgtccttcacacagcaccatgacccttgcacaggtcctaaaggtcagcggctcccgtccccttaggccggtgggagggatgcgcggtgcctggaaggaccagtagagcttgcagggcaggacccagccccagcctctgcttacaaaactgcacccacggcagcaaaggcccctgccctccaggcccagcctccagcgaggcccccgctccggtcctgccccagccctgagcctggccacctgccgcccggtggagtcttgttttagtggaatctgccccctgcgatttgccaggaggaagagcttccattgcgcgaggtcttgtg

SEQ ID NO: 113285 - DNA, 3587 bp, Homo sapiens
tttcgtggaaggttcgggaggcttctggaaaaagcgccgcgcgctgggcgggcccgtcgctatataaggcaggcgcgggggtggcgcgtcagttgcttcagcgtcccggtgtggctgtgccgttgggtcctgtgcggtgcacttagcctagacgcctgaggaaacccagacccactaccaaccgacggaggaggaggagggtgagaactttcgcctttcaggcaggaaattgcccagttgatgtcattgatcatcaatactttctaactcgaaacaaagagatctttcctgagagagctccttttcaaattcatcagatgcattgggacaaaatcccagtattgaacgcttgacacgatccccattcaattagacctctgggaaaagagcttgcatatttaaccttattacccgaaccaaacaagatccgaactcttcactatttgtgggatacctgggattgggaattgacccaaggctggacttgatcaattaaccttggtaactatcgcccaagtcctggggaccaaagcggttcatgggaagcttttgccaggctggtgccagatattcttctatgatttggcccagttccggtgttggtttttattcctgcttaatttggttgcatgagaaagtaacttgtgatcacccaaacataacgatgatgagcagtacgcttggggagtcctcagcaggggggatcattcacagtgaggacagacacagggtgaacctatgggtccgttggaacaaaagttattcctacacctggaaagaagaccaaacttgagtacttggagggaacgaagaataaaaggagattgtgaaagaaacattctccagttttattgggatatcccattactcctttttgtggagaaaggaacgtgataaagaagtaagcgatgatgaggctgaagaaaaggaatgccaaataagaaaggaaaagagaagagaagacgaaagagtcggaaagcccaacccttgaaatggaagtatgttggttttgatgaggaagaaagaaaagaaggatgtgtgtcaagaggaagaagagaaggattaaggaaaagtccatcgatcaagaagagttcaccaaaacaaagcccatctggaccaagaaatcccgacgatattactaatgaggagtacggagaattctataagagcttgaccaatgactggggaagatcactttgcagtgaagcatttttcagtttgaaggacagttgggaattcagagcccttctattttttcccacggacgtgctccttttgatctgttttgaaaacagaaacgaaaaagaacaatatccaaattgtaatgtacgcagaagtttttcatcattggataacctgtgaggagcctaatcccctgaatatcctgaacttcattagaggggtgggtagactccggaggatctcccctctaaaacatatccccgtgagatgttgcaacaaaagccaaaattttgaaagttatccaggaagaatttgggtccaaaaaatgcttagaactctttacttgaactggcggaagataaagagaactacaacgaaattctattgagcagttctcttaaaaaccttaaagccttggaataccacgaagactcttcaaaatcggaaagaagcttttccagagctgttaaggtacttacacatctggcctctggtgatgagatggtttctctcaaggacttactgcacccagaatgaagggagaaccagaaacatatctattatatcacatggtgagaccaagtaccaggttagctaactcaagccttttgtgggaacgttctttcgggaaacatgggcttagaaagtgatctatatgattgagcccattgatgagtactgtgtcccacagctggaaggaattttgaggggaagactttagttgtcagtcaccaaagaagggcctgggaacttccagaggatgaagaagagaaaaaggaagcaggaagagaaaaaaacaaagtttgagaacctctgcaaaatcatgaaagacatattggagaaaaaaagttgaaaaggtggttgtgtcaaaccagattggttgacatctccatgcctgtatttgtcacaagcacatattggctggacagcaaacatgggagagaattcatggaaagcttcaagcccttaaggagacaacttcaacaatggggtttacatggccagccaaaggaaacaccgggggattaaacccttgaccctttccattattgagaccttaaggcaaaaggcagaaggcttgataagaacgacaagtctgtggaagggatcttggtcatcttgctttatggaaactgcgctcctgtcttctggcttccagtcttggaagattcccagacaccatgcttaacaggtttcttacaggatgatcaaactttggtctgggtattgatgaagatgaccctacctgctgatgattaccagtgctgctggtaactgatggaaaatgccacccccttgaaaggagatgacgacacattcacgcatgggaaggaagtaggacttattctcttgggcttgaggggatggactttacctgttcagtactctacaattcctctgataatatatttttccaaggatgttttcctttatttttggttaatatttaaaaagtctgtatggccatgacaactactttaaggggaaagataagatttctgtctactaaagtgatgctgtgatacccttaggccactaaagccagagctaagtaaatgctttttggagtttccatggttgggtttattttccacgagattgggggtaaccgtgccactgtaaaggcccgtatgttaaccatggatgttaacctttggggtggtcctaaaagtgttttagctggtcaaagcccggatgccctaaggtagacccaaaatcttggttattgaaaagtgttctgagctgtatcttggatgtttagaaaaagtaattcgttaccatcttgtaaggatcttacttttcggaacttttcattccctggtaagttgacaattcgtgcatgtactaagtcctcctagaaatagggtaaacctgaagcaacttggatggaaggttcctctccacaggggcttggttttcccaaagaaaaagtattgtttggaggagccaaagtttaaaagccctacctaagccatatcgtaaaagctgtttcaaaaaataactccagacccagtcctggtggatggaaattgtagtgctccgagtcacattctgccttaaagttgtaaccaaatacgagatgagttaaaagatattgtgtgacagcgtcttatttagggggaaaggggagtatctgggatggcagttagtgccaaaatgtaaaacatgagggcgctagcaggagatggttaaacactagctgctccaagggttgacatggtcttcccagcatgtactcagcaggtgtggggtggagcacacgtaggcacagaaaacaggaatgcagacaacatgcatcccctgcgtccatgagttacatgtgttctcttagtgtccacgttgttttgatgttattcatggaataccttctgtgttaaatacagtcacttaattccttggcctta

SEQ ID NO: 113286 - DNA, 1844 bp, Homo sapiens
  misc_feature (1)...(1844): n = a,t,c or g
ttttttttttacctccaccgccttctagtctcaccgaaggcttgtggccatctctgtaaagtttctggggaggtgggcacggggtaaacgccggagggttctgtggagcctatgggactgactggaggccaaagaactttgggccgcagatgtacaccagcgtcactcttttggtctgttagggccttcatcgctcacatcaggtttcagtgtgaaacgggaaaacatagccgcaatggctgaaaatggtgataatgaaaagatggctgccctggaggccaaaatcttcattcaaaattgagtattattttggggacttccattttgccacggggacaagttttcttaaaggaaccagataaaactcggatgaaggctggggtacctttggagataatgataaaatttcaacaggttgaaccgtctaacaacagactttaattgtaattgtggaagcattgagcaaatcccaaggcagaactcatggaaatcagtgaagataaaaactaaaatcaggaaaggtcttccaaagcaaaccccctacctgaagtggactgatgagtataaaaatgatgtaaaaaacagatctgtttatattaaaggcttcccaactgatgcaactcttgatgacataaaagaatggttagaagataaaggtcaagtactaaatattcagatgagaagaacattgcataaagcatttaagggatcaatttttgttgtgtttgatagcattgaatctgctaagaaatttttacgagccccctgggccagaagtaccaaggaaccagacctgcttaatacttttcaaggacggttactttgccaaaaaaaatgaagaaagaaaacaaaataaagtggaagctaaattaagagctaaacaggagcaagaagcaaaacaaaagttagaagaagatgctgaaatgaaatctcctagaaagaaaagattggatgcttgctgaaantttttccggtgntgatttagatgatcagacctgtagagaagatttacacatacttttctcaaatcatggtgaaataaaatggatacgacttcgtcagaggagcaaaagaggggatatattctatttaaagcaaaaagccaaggaaagcattgggtaaagccaaagatgcaaataatgggtaccgtacaattaaaggaacaaagaagttgacttggggaagtactagaaggagaggtggaaaaagaagcactgaagaaaataatagaagaccaacaagaatcccctaaacaaatggaagtcaaaaggtcgtagatttaaaggaaaaggaaagggtaataaaagctgccccagccctgggtctggtaaaggaaaagtacagtttcagggcaagaaaacgaaaatttgctagtgatgatgaaccatgatgaaacatgatgaaaaatgggtgccacctggaccctgtgaaaaagagcaagagaagaaacagaccaaagaagaacctgcatcccaaacaacagaaaaccagaaaatgggtgcctggagacccagtagtttagtaaaccacattttttattcattttaaataggttttaaacgaccttttgtttgcggggcttttaaaaagaaaaccggattagcgtccacttcaatgtccacctgtgagaaaggaaaaattttttttgttgtttaacttgtctttttgttatgcaaatgagatttctttgaatgtaatggttctgtttgtgttatttcagatgattcaaatatcaaaaggaagattcttccattaaattgcctttgtaatatgagaatgtattagtacaaactaactaataaaatatatactatatgaaaagagcaaaaaaaaaaaaaaaaaaa

SEQ ID NO: 113287 - DNA, 415 bp, Homo sapiens
  misc_feature (1)...(415): n = a,t,c or g
tttcgtgttgcttttaatacatacctatgctgaatgccctatctctgttgtagggtccccacgtctgacacnnnnnnnnnnnnnnnnnnggaaaaggggtttccttttttgtcccccaggcgggagggaaggggggaaatttttgttaacggaacccttggcctcgggggttaaagaaattccccgccccaaccccctggggaagggggaataaagggctggccccccctgcccgggttatttttgattttttaaaaaaaagggggtttcccatggtggggaggggggggccaaaactcttaacctagggggtttggccgcccccgcccccccaaagggcgggattaaagggcggaagcaccggacccacccctggggcctttttttaaatccctcaaaccccgtggaggagggc

SEQ ID NO: 113288 - DNA, 1631 bp, Homo sapiens
tttcgtccgggatggtgagtttcagagttaggggtattgcagtgggggtcctgggctgaggctggggcccaattccgagcactgacgttactgtcttgtccccacagaagccgatcctactgcatgggccatgagcggtccattacgcaagattaagtataaccgcgaaggagacctcctctttactgtggccaaaggacccctatcgtcaatgtatggtactctgtgaatggtgagaggctgggcaccctacatgggccataccggagcctgtgtggtgtgtggacgcctgacctgggacaccaagcatgtcctcacgtggctcagcttgacaacagctgtccgtctctgggactgtggaaacagggaaaagcagctgggcccttttcaaagaccaattcggcttttccggacctggcggttttgacttttggggggcaacattcatcatgttctccaacggacaaagcagatggggctaccagtgctttgtggagcttttttggacctggcgggattccgaggccagatttgacaacaaatgagcccctacatggaagattcccttgcaatgactctaaaaatcaccagtgctggtttggggaccccctgggggaggtgcatcatcgctgggccatggagagtgggagagctcaaccagtatagtgccaagtcctggagaggtgttgggtgaatgttaaggagcactcccgggcagattcaacgacattccagtttattccaggggacatggaccatgttttgttgacccgcgttccaagggacaacacaggccaagcttttttgattccacaacttctggaacatcagaaaggctttcggggacaagacggcctggccaactcaagctggccctctcccccaactaatgacaaaggtggttttgggcgggtggtcaggaaagccattggatgttaaccacaaccttccacccagggatttggcaagttttagggccaggtttctttccattttggccttttggaagaagagtttggaaagagtccaagggtcacttttggacctatcaacagtgttgccttcccatcctgatgggcaagagctacagcaagcggcgggcgagagatggtttacgtccccgatccatttactttcgaccccaccagtacttcgaaatttgaagtttgaggctttaagaaagctgggatctcctggccgggccgttggtggcctcatgccctgtaatcccccacccactttttttttttaaggcaggcgggatcaccctgaggtcaggagtttaagacccagccctgacccaacatgggagaaaccctcgtctcctactaaaaatactacaaaaatacaaaaattaggccagggcatgggttggcacacgccctatagtccccagctacttcagggaggctgaggcaggagaatcactttgaaccccaggaggcagaaggttgcagtgagctgagatcacgtcattgcactccatcctgagccacaagagcaaaactccgtctcaaaaaaaaaaaaaagaagaaggtggatctccaaccaggccagagaagattctcacagaaggttttgaactctaagaaataaattggttactgtaataaatggcttctggtcagata

SEQ ID NO: 113289 - DNA, 1678 bp, Homo sapiens
aagcgcttaaaaggggcccgggagggatgaaccccacagatctgactctgatttgtgtgtgcaccgcgtctccagcgatcccggatccactgcgctgccaggggcctgggggtgggtctcttgctgtctctgcgacgacatccttacgtttcggcactctaatgctgggtttgtgcgtgtgtgtctgctaagcggtctagcgggcgtgttaggcctccctcgcccccagctccttggctgggtaagctcctccaccgcagtccagcagtgagacgcgcgcgcagccagcttcccacgagatggaacagaccgaagtgctgaagccacggaccctggctgatctgatccgcatcctgcaccagctctttgccggcgatgaggtcaatgtataggaggtgcaggccattcatgtgaagcctacgagagcgaccccaccgagtgggcaatgtacggcaagtttcgaccagtacaggtatacccgaaatcttgtggatcaaaggaaatgggaaattttaatctgatgattctctgttggggtgaaggacatgggcagcagtatttcatggattcattaccaactcccactgctttctgaagatgctacagggaaatctaaaggagacattatttgcctggcctgacaaataatccaatgagatggtcaagaagtcttgaaagagtcttgagggaaaaccagtgtggcctacatcaatgatttccattggcttacatcgagtaggaggaacatcaggccatacgggaacctgctgttgaggccttcacttgttacagttccacctttttgatacatgccatgcctttgatcaaagaacaggacataaaaacaaaagtcacaatgacattccatagtaaatttgggaatcagaactccaaatgcaacttcgggctcgctggagaacaactaaggggcaccaaagccctctgaggttttactttaaggttcgctgtatgtttgccttggacaaaaaggctacctaccacgtgctatccagtaatatacttaaataagccaatacttagatctactgtaaggcagatgctaattataaggcattaagtaagcaaatagtgccctcagctactgcaggaaggaaaagtcccacttgagggaaaaggaaagtcttgtggatttttttaaagggcaagtttttcaagtgctctcatagttctatcctcctaattcccattaaatcccatactaggaggcctcaagtagagggttttcccatagccttttgggaaaatacctttgggtcctcctgaacctgtaattaagccaagaaagtaaaaaccagaaaccgtcaaaccgtcaaaatgtttgcctttggttacccctggaggacctaaatgtagatgtcctttagtattacttttgtatggtccttaatattggaagataatttttgtgaatcctgtagattttattttttccagtccttacccttacaaatttccttttcctatgaataatagaggaacttacggcactctgcccatttgttaatgaaaggaagtgcagaggatttagaaaagtacatgatccccagaccacaacaaaccaaaacataaactcatgtctgtgtcccatggtcatagtcaaagattttgtactgctaaaattaccaaataatttaaataaagtggatttgaacacaaa

SEQ ID NO: 113290 - DNA, 1007 bp, Homo sapiens
tttcgtggactgcaggggcctgagccgctgctgccgccgccgccgcgcagccccacatcaacgcaccggggtcctgtcaccgccaccgccaaaaaagtcaccgccgctagggtcgccggtgcatcaggtgcagagcatgatggcatccgccacatactcgcgctatgggcagaaggagctctcggatcaaaacatttactacatgttcaagaatctcatcatcggcaacagcatggtgggcaagacgtccttcctcttccgctatgctgacgacacggtcacgcctgccttcgtctgcaccgggggcatggacttctaggtcaagaccatctatcgcaacgacaagaggatgaagctgcagatctgggacacagcagggcaaagaccggtaccgggaccatcaccaccgcatactaccgggggcgccatgggcttcatcctcatgtatgacatcaccaacgaggaatccttcaatgcagtgcaggactggtccacccagatcaagacctactcatgggacaatgcccaggtgctgctggtaggaaacaagtgtgacatgggaggatgaagcgggtggtgtcatcagaacgtggccggcagctagcttgaccacccttgggttcgagttcttttgaggcaagcgccaaggacaacaataacgtcaagcagacctttgagcgcctggtggatgtcatctgcgaaggagatggtcccagtcgtggacacggcggaccctgcggtcacaggcgccaagcagggcccacagctcagtgaccagcaggtgccaccgcaccaggactgcgcctgctgagagccatcccactccctttcccctcttccctgtcttccccaccttccacgaaatcgtcgacccgggaaatctgaattcctcgacaagcttctcgagcttaggctagctctagtacgcaggtgtggggggcgaagctctcgcccgctgtcttagatagtgtctcctaaatggccgcacaattcactggccgtagtga

SEQ ID NO: 113291 - DNA, 426 bp, Homo sapiens
cacgtactcaattggagtttcggggacgacgatgtcgaggacgacgtataccatcccaaactaccaactctgtttaggagcccctggatcttatcatgctcagcctagatgagcgaatttatgtgaaaatgacaaatgaccgatagcttcgaggcagattacatgcttatgatcaacatttaaatatgatcttgggagatgtggaacaaactgtgactactatagaaattgatgatgaaacatatgatgagatatataaatcaacgaaacggaatattccaatgctctttgtccggcgagatggcgttgtcctggttgcccctccactgagagctggctgaaacaaagaatttgtcctgtatggaaaacgggagactttgtacagtggcctctctaaaagtacaaaacattcataagagaaacctg

SEQ ID NO: 113292 - DNA, 458 bp, Homo sapiens
  misc_feature (1)...(458): n = a,t,c or g
agaacgtcccgattncttntnnaatatttcgtgcctgggacaccgccggcggggagagaagcggatcccgtcctagccccggccccaagtaacgccgccgccccggagccgccgtgagtatgcttgtcccaggacctggtgtctcgcctgcgttgaagcatctccagggcagcccttcctcccgcccagccccagtttagggggatactgacccctcccccgacccgtagccccctcttgaggggctccccaggcgtcgggccataggaggtggggagcttctttccttagcttacctgcctttggtgagccttaaggaaaccgctatgactgtcctctggcctgtccattctagttgtgggagagaggtaccctaagttccgctccccctgcttccagaatcggaggatctttgctaggtgtgaaggaacctgtccctcttctcttttagaagtgac

SEQ ID NO: 113293 - DNA, 1513 bp, Homo sapiens
gtggagtccagaatgagaagaaggaccgcgggtccggttccttcaggacccgcctcagggggcaccgcggcggcttggggaccacttggagccccgtcctggggagaaaacagctcacgtctatggccctgactgcttaggcgggagctgcgtgcagctcagcttctccggggcatttttttctacacggttattgctctgtcacccaggctggagttcatcagtgcgatcttggctcattgcagccttgaacctcccgggctcaagtgatcctccctcctcaacctcccaagtagctgggactacggctgggtgagctatgaacaggccaactggcaagggcgagcagtttgtgtttgagaagggcgagtacgcccactgggactggtggaccagcagccagaggacagacttcagcagcctgaggccccatccaaagtgggacagccaagagcccaagatcatacgtctatgaaaaccccaacttcaccgggaaagaggatggaaatcatagatgacgatggtaccccgcttccacgccccatggctaccaggagaaggtgtcatctgtgtgggtgcggagtggcacgtgggttggctactagtaccctggctaccgtgggctgcagtacctgctggagaagggagactacaaggacagcagcaacttttggggcccgtcaccctcagggacatggatgaagcctggaaacccatcattcctcagcaaactaacacagaagcagaaaacccaaacacccacatgttcctcactcataagtgggagttgaacagtgagaacacatggacacagggatggggaacatcacacaccgaggcctgtcagggagtgggggacaagaggcagagagagcattgggacaaataccaaatgcatgcacggcttaaaacctagatgacaggttgatgggtgcagcaaaccaccatggcacatgtatacctgtgtaacaaacctgcacgttctgcacatgtatcccagaacttataataaaaaagaaaccagtaagtgctcaataaatgttactaacatctatttcttcattcattcttcaaccattaccccactgagtgccctatttggatacttggccttagtcccctgggtgatgaaataatcctacagcaaaccccccatggcatgagtttataacaaacctgcacatgtatccccgaacttaaaagttaaaaaaacagaatctgcacaagtcttaagctacttccttgaggaaaagactcgagctgagatctcaaagaagagtagaagttgcaggggtaaagaggccaaagaagagtgtctcagatgagagcggcacgtgcaaaggccctgtggtgggaggagcctggtagctctgagaaactccacaaaggcacggtggtggctggaatgcagagatgtgggggcacattgaaaaccttgttaaagtgcttaaaatgattatcataaaggtagaaactaataagtgctaaataaatgttattctcgtccgttaaa

SEQ ID NO: 113294 - DNA, 2470 bp, Homo sapiens
agaatttggagttgttttgggcgcgacagagcctggcggggataccattagcgtgtgtgtgtggactgcaatgttgtctgtgcgcgtgtgtgtgagtgagtgagggagagagagagagaataggtgtgtgtagaggcttccggtgcctctgtctggctgctgaggctgagatgggagcaagtggctggcgaagctggtggtggcttcaaaccacactttcttaaaacaatcgcaagagaaaattgttggggggagggaggaggaggagaaggcggtttttcttgcgtccccccttctaacgctgcttttctccttctctctttccccctcatcccgtcttcccctcctcccgtcctccctcgccccgcatgtactccccgtactgcctcacccaggatgagttccacccgttcatcgaggcactgctgcctcacgtccgcgctttctcctacacctggttcaacctgcaggcgcggaagcgcaagtacttcaagaagcatgaaaagcggatgtcgaaggacgaggagcgggcggtgaaggacgagctgctgggcgagaagcccgagatcaagcagaagtgggcatcccggctgctggccaagctgcgcaaggacatccggcccgagttccgcgaggactttcgtgctggaccatcacggggcaagaagcccccctggctggcgttgctctccaaccccgaccagaagggcaagatccggcggatttgacttgcctgcgccaggctgacaaagtgtggcggctggacctggtcatggtgaattttgtttaaggggggatcccccctggaaagtactgatggggagcggctctacaagtcgcctcagtgctcgaaccccgggcctgtgcgtccagccacatcacaattggagtcacaatcaaagaactggatctttatctggcttacttttgtccaacaactccggaatcccgacgatcagatagttcaaaccagcatagagatgctggacatcaaaccactgcccaacgggcacttaagtttccaggagctgttatgtgacttccggggtctggaatgtgactggagctggtgagagtatcacagactcctgttgcaacagcatcagggcccaacttctccctgggcggacctgggagagtcccagctactacaacattcaaccagggtgaccctgggggcgggcggtccatcacctcccctcctttccaccaggcaccaccaaggcgccccaagttccattcgatggacagttgaggtgggagagccctgttgatgacgtgttctatccggggacagcccgttccccagcagctgccagcagccagtcaagcgggtggcccaacgatgtggatgcaggcccggcttctgcgaaagaagtcaggaaagctggacttctgcagtgccctctcctctacagggcagctccccgctgcatggctttcacccaccacccgctgcctgtgcttgctggagtcagaacaagggagcccccgggtcacagcataagccttgcacttccccctcacggtcattcatccagcagtcgagccggtatttcaggcacccgaccatccgctaccaccaccaccacgggcaggactcactgaaggagtttgtgcagtttgtgtgctcggatggctcggtccaggccaccggacagcattcgcaacgacaggcgccttcttttgccaaccggtttgtcagcatcggaccccgggacggcaactttaatgaacatcccacagcagtctcagtcctggttcctctgataagttcgcctaaaagaagcaacaaaatgagaagaagaggttccctcgaaaggggggagaagaaattttgagaactggaaaactcccccagccccagccccagcccccacccgaaaaagcaaaaaattaacacgtcgtccagcccactcagccccttctctccctcccaagcccggggacccccgcgggcccccagaagcagcccaagttctcagagagccccttggaaaggggtctcggtggagctgtgcaccagcagccaagcagaaagaaacacgcgacatggactctgtcaagtagaggacagaaagcaaagaaaggatgcagaactgccttcctccccctgaccccagcaccggccttctggggaaggaacaaagtccccaaacaaagcaaccagcacaattctgaaggggctgggtctccccctcttctctgccctccacccccgtctctgcactgagatacataagaaacaagggtagtttactgtctgttttgttttctgggttttcagtgtcctagcggaatgcaagtaggcagccagcccgtctgttccctctccgccccgccccgccccgcccccggtcactgcgcbbtctgttataccatctttgcctgactctctccggcttctccattgaatggctaatgtgtatgtgaaataaagaaataaagaaaaacaaacgcgaaaaaaaaa

SEQ ID NO: 113295 - DNA, 2550 bp, Homo sapiens
  misc_feature (1)...(2550): n = a,t,c or g
cggatccccaccgacggacggaggcagcccacctgcaggaccggggcgctgtcggtccacgtggccgctctggagcaggttggagttggcagcgggctgcgctgcagggacaggcgcggcggacagccccgggggcagcggcggggtcctgtctgggagaggacagggttgcggcgggcggaacggtgtctccttcactttcgccctccagctgctggagctgcaccnccgaccgcgagcgtgccaagcggctttcagcagctagcggagcggtggcggcggcccccctcaggacaccaccagattcccctcttcccgcggcctcgccatggcgacccacggacagacttgcgcgcgtccaatgtgtattcctccatcatatgctgaccttggcaaagctgcctagagagtattttcaacaaaggatttggttttgggttggtgaaactggatgttgaaaacaaagtcttgcaagtggcgtggaatttttcaaccgtccggtttcatctaatacaagacacttggtaaaagttacttgggaccttggaagaccaaattacaagtgggtgttgagtatgggtcttgactttttcacagaaaaagtgggaacactggattaaccattttgggggaacaggaaattcgcaatttgaaggaccagatttgttcaagggtttgaaactggacattggatactacctttctcacccaaacacaggaaagaaaagtggtaaaattcaagtcttcttacaagagggagtgtataaaccattggttgtgatgttgactttgattttgctggacctgcaatccatggttcagcctgtctttggtttatgagggctggcttgcttggctaccagaatgacctttgaccagtgccaaatcaaagctgacaaggaataactttgcagtgggcttacaggactggggacttcaaggctacaccacaaatgtcaatgatgggccagaatttggagggatcaatttatcagaaaagtttgtgaagatcttggacacttcagtaaacccttgcttgggacatcagggtacccaactggcactcgttttgggcatggcaggctaaatatccagttggatcccactggcttccatttttggcccaaagtcaacaactcctagctttaattggaagtaggcctatacctcagactctggagggcctggtgtggaagcttaacactctctggctctgggtagatggggaagagccatttaatggctgggagggccacaaaggtttgggctccgcccctggagttgggaggctttaatccaggctgaaaggaaaccctttgggaatgggatatcagaaaggttttggccttaaatatatttcccattgtgacccagccagccagggctttttttcccccaagaaggtgattcaaaacaaaggatgatctcaacaagagctgtatttttaagtatttagacagttctttgttagctggtttctagttggttatctagttacccaatggctgcagtcctgccccgagggggtgcaccctatacattatttaaatgtatttaactgttaaatgccgcctaccccacccaataatgaaatagacctttatgaaaactgtgcaattgtgtgcatgtttgtttttatgttccctttagaaaacattgactgttaccattgaatgagatggatcagtggatattaagatgaggttacaaattttgttaagttcagccattattacttttggtatcccagaacatgacaaattatgaataaaacaagtatacataattaatggctccaagtatttgcggagttccacgtttgccagctaggatcaaatccccgtggtagctagccaatacttgatttttccagtgagtattttgctctgtacctaaatctgtgccacagaatcttctgtgtccctagattccacgagctttttaagactacaataagaggatacatgcttttacacttttacatgcacagtttgtaagtctgtgcagaattgccctgcatcattgaaaggaaaaagagaaggtgctgaaaagttacacaaacacaccatacccctgtgagctactgctaggaacataaagtaggccctggtttggtgagatggtgttaagcatacagaagaggagtaaggtgtagacagtgagggtaacctgagggactgtgagaggtcattactcatttccttctaggcagacacactgaaaggtgggtataggtaggagaccagagacaacccctttaggctgcgtggcattggccttcatctgggcatgaatgagacattaataggtggttctggctggaaaagtaggtaagagtacgttttctgatgggagaagataattggatatgattaaaggttggagaagatttgttcaacaaatctgtaatagacctgaagaatggtagaacctgagtgataagaaatgggtaagaaaatggaaggacttatcacccaagaaatgatacatgctacaaacttccaggttgagaagaagctggtgagagaccagagctcaagcaagctctcc

SEQ ID NO: 113296 - DNA, 2533 bp, Homo sapiens
  misc_feature (1)...(2533): n = a,t,c or g
cacgcgtccgcgacgagtccactacctttttcgagagtgactcccgttgtcccaaggcttcccagagcgaacctgtgcggctgcaggcaccggcgcgtcgagtttccggcgtccggaaggaccgcagctcttctcgcggatccagtgttccgtttccagcccccaatctcagagcggagccgacagagagcagggaaccggcatggccaaagccgcggcgatcggcatcgacctgggcaccacctactcctgcgtgggggtgttccaacacggcaaggtggagatcaatcggccaacgaccagggcaaccgcaccacccccagctacgtggccttcacggacaccgagcggctcatcggggatgcggccaagaaccaggtggcgctgaacccgcagaaacaccgtgtttgacgcgaagcggctgatcggccgcaagttcggcgacccggtggtgcagtcggacatgaagcactgggccttttcaggtgatcaacgacggagacaagcccaaggtgcaggtgagctacaagggggagaccaaggcattctaccccgaggagatctcgtccatggtgctttaccaagatgaaggagatcgccgaggcgtacctgggcttacccggtgaccaacgcggtgatcaccgtgccggcctacttcaacgactcgcaacgccaggccaccaaggatgcgggtgtgatcgcggggctcaacgtgctgcggatcatcaacgagcccacggccgccgccatcgcctacggcctggacagaacgggcaagggggagcgcaacgtgctcatctttgacctgggcgggggcaccttcgacgtgtccatcctgacgatcgacgacggcatcttcgaggtgaaggccacggccggtggacacccacctgggtgggggaggacttttacaacaggctggtgaaccacttcgtgtaggagttcaagagaaaacacactgaaggacatcatccagaacaagcgagccgtgaggcggctgcgcaccgtctgcgagagggccaagaggaccctgtcgtccagcacccaggccagcctgggagatcgactccctgtttgagggcatcgacttctacacgtccatcaccagggcgaggttcgaggagctgtgctccgacctgttccgaagctttctggagcctgtggagaaggctctgcgcgacgccgagctggacagggcccagattcacgacctggtcctggtcgggggctccacccgcatccccaaggtgcagaagctgctgcaggacttcttcaacgggctgcgacctgaacaagagcatcaaccctgacgaggctgtggcctacggggcggcggtgcagggcggccattcctgatgggggacaagtccgagaacgtgcaggacctgctgctgctggacgtggctcccctgtcgctggggctggagacggccggaggcgtgatgactgccctgatcaagcgcaactccaccatccccaccaagcagacgcagatctttcaccaccttacttccgacaaccaacccggggttgcttgatccaggttttacggaggggcgagaggggccattgacggaaagacaacaatctgttggggcgcttcgagctgagcggcatccctccggcccccaggggcgttgccccagatcgaggtgacctttcgacattccatccaacgcatccttgaacgtcacgccactggacaagagcctcgggcaaggcccaacaaggatcaccatcaccaacgacaagggccggcctgagcaagcaggagatcgagcggcatggtgtcaggaggcggagaagtacaaagcggagggacgaggtgcagcgcgagagggtgtcagccaagaacgccctggagttcctacgcgcttcaacatgaagaagcgccgtgggaggatgaggggctcaaagggcaagatcagcgaggccggaccaagaagaaaggtgctggaccaagtgtccaaagaggtcatctccgggctggaacgcccnaacaccttggcccgagaaggaacgaagtttgagccaccaagaggaaggagctgggagcagggtgtgtaacccccatcaatcagcggactgttacccagggtgcccggtggtgcccgggccttgggggctttcgggggctcaagggtccaaagggaagggtcttgggtcaaggccccaccatttgagggaggtagatttagggggccttttccaagatttgctgtttttttgttttggagcttcaagacttatgcatttcccargtatttctgtttgttcagttctccaatttcctgtgtttgcaatgtttgaaattttttggtggaagtactgaacttgcttttttttccccgtttctacatgcaagagatgaatttatactgccatcttaccggctatttcttcttttttaattccacttaactcaggccattttttaagatggctactgtacagtatatagactttataactcaaaaagaagaatatagggcgggtcccttcaaaaagattaacagttatgaaacgagtgcct

SEQ ID NO: 113297 - DNA, 1068 bp, Homo sapiens
gaactcctggcctcaactggttcacccacctaggtctcccaaagtgctgggagtaacaggcataaaccactgtgcctggccagttaactgtctaaaatggatttgtctacctttctattgtaagtacagccttacaaatattattgaatccttgataatgtatactcaaacagtacctcaaagttaacattctaaacatttgtagaattctgtcaatggagaaagaacagaccaattgagtaggatgtctctgtagaccctcagaaaaattcctggaagttttaacaaaagatgcttatttatgattactttttctctccaaaagtttgttttccctcctaaatttcagatgaggattctcagcttttgggctgatttttggactcttcatgtcaacaacctttcctttccctcttgatcattggtcatctcttattagtgctagtagccagcatgaaccccaaagacagaagtggaggcagtggttagcagggcagcacttggttggtctggcctcctgagcttagcacccatggacaaagctttacctgctggaggtcagatgactatggaatgtctttgaaggttctgctctgagatcacagcctttaagaattatcccttacgggtaataaaaatttaatttccattgtaatcctcctaaggaaactggacccacccaggaaggccagtccattcctgtggggtcctccaggccaatgtccttgtcctacaacactgtctgtcctagcttggccaggaactagttgtcctcattctttgcctattattttccctagtgagacagtactttgaagagggcagagagaaatccccaaagaggcagcgtccctcattggtggggcccatgtggtccctctctttgggaagagaggtagagtctttcacagcatcagttgtcttaagaatgcatttgtggccaggtgtggtggctcatgcctataatcctagcactttgggaggccggggcaggaggattgcttgagcccaggagttaagagactagcctgggcaatatagtgagaccttgtctctacaaaaaaaaaa

SEQ ID NO: 113298 - DNA, 1403 bp, Homo sapiens
  misc_feature (1)...(1403): n = a,t,c or g
agaggggtcatagttctccctgagtgagactcacctgctcctctggcccctggtcctggcctgttctccagcatggtgtgtctgaagctccctggaggctcctgcatggcagctctgacagtgacactgatggtgctgagctccccactggcttttggctggggacacccgaccacgtttctttggagcaggttaaacatgagtgtcatttcttcaacgggacggagcgggtgcggttcctggacagatacttctatcaccaagaggagtacgtgcgcttcgacagcgacgtgggggagtaccgggcggtgacggagctggggcggcctagcgccgagtactggaacagccagaaggacctcctggagcagaagcggggccgcggtggacacctactgcagacacaactacggggttggtgagagcttcacggtgcagcggcgagtctatcctgaggtgactgtgtatcctgcaaagacccagcccctgcagcaccacaacctcctggtctggctctgtgagtggtttctatccagggcagcattgaagtcaggtggttccggaacggccaggaagagaaggctggggtggtgtccacaggcctgatccagaatggagaactggaccttccaggacnctgggtgatgctggaaacagttccttcgaagtgagagggtttacacctgccaaagtggagccccccaagttgtgacgagccttctcacagtggaatggagagcacggttctgaatctgccacaaagcaaaaatgctgagtggaagtcgggggcttcgtgctggggcctgctcttcccttggggggccggggctggttcatcctacttcagggaatcagaaaaggacactcctggactttaagccaacaaggattccttgagctgaactgcaagcatgacccacattcaaaggaaggaccttctggccccagcttttgcaggattgaaacattttccccgtttggctttcattttttccacaagagagaccttttttcccggacctgggttgctactgggttcagcagctcttgcagaaaatggtcctcccttgtgggctgcctcagctcggtacctttggcctgaagtcccagcattaatggcagcccctcatctttccaagttttgtgctcccctttacctaatgcttcctgcctcccatgcatctgtactcctgctgtgccacaaacaccattacattattaattgtttctcaaacatggaaaaaaaaaaataaaaaaaaaacaaaaaatataaacaaaatatctcatagatacagagtatcgttcggggccgcctcttaaaacacaatttattatccatcccatctcattatatttgttactttcttccttaacccattcgggttgcgtacccccccttatcg

SEQ ID NO: 113299 - DNA, 3640 bp, Homo sapiens
aaaagcaactgaggtcttaactttcagacgctgaattctcatctaattgaaattactgggcataatgctatatatagccaatgaagagattttgagctctcactcagtgccttcaagacatgtcgttttgtagtcagagaaaacagagatcaatgcattttcaaactgacagagggaacggatgctctttagtagcacatgcccaggatcgtgtgtgtggggcttgcgctgtgctgagaagctgaataccggtccatatgctccttatttactgcaatgttctttgcatgttactgtgcactccggactaacgtgaagaagtatcgatatcaagatgaggacgctccacatgatcattccttacctcgactaacccacgaagtaagaggcccagaactcgtgcatgtatcagaaaagaacctctctcaaatagaaaatgtccatggatatgtcctgcagtctcatatttctcctctgaaggccagtcctgctcctataattgtcaacacagatactttggacacaattccttatgtcaatgggacagaaattgaatatgaatttgaagaaattacactggagagggggaattctggcctgggattcagtattgctggggggacagataatccccacattggagatgaccctggcatatttattacgaagattataccaggaggtgctgcagcagaggatggcagactcagggtcaatgattgtatcttgcgggtgaatgaggttgatgtgtcagaggtttcccacagtaaagcggtggaagccctgaaggaagcagggtctatcgctcggctgtatgtgcgtagaagacgaacctattttggagaccgttgtggaaatctaactgttcaaaggccctaaaggtttaggcttcagtattgcaggaggtgtggggaaccaactcattcctggagacaacagcatttatgtatctaaaattatagatggaggagctgcacaaaaagatggaaggccgcaagtaggagatagcctgctaatggtaaaaaactaaaatttagaagaagtaacacacgaagaggcagtagcaatattaaagaacacatcagaggtagtttatttaaaagttggcaaccccactaccatttatatgactgatccttatggtccacctgatattactcactcttattctccaccaatggaaaaccatctactctctggcaacaatggcactttagaatataaaacctccctgccacccatctctccagggaggtactcaccaattccaaagcacatgcttgttgacgacgactacaccaggcctccggaacctgtttacagcactgtgaacaaactatgtgataagcctgcttctcccaggcactattcccctgttgagtgtgacaaaagcttcctcctctcagctccctattcccactaccacctaggcctgctacctgactctgagatgaccagtcattcccaacatagcaccgcaactcgtcagccttcaatgactctccaacgggccgtctccctggaaggagagcctcgcaaggtagtcctgcacaaaggctccactggcctgggcttcaacattgtcggtggggaagatggagaaggtatttttgtgtccttcattctggctggtggaccagcagacctaagtggggagctccagagaggagaccagatcctatcggtgaatggcattgacctccgtggtgcatcccacgagcaggcagctgctgcactaaagggggctggacagacagtgacgattatagcacaatatcaacctgaagattacgctcgatttgaggccaaaatccatgacctacgagagcagatgatgaaccacagcatgagctccgggtccggatccctgcgaaccaatcagaaacgctccctctacgtcagagccatgttcgactacgacaagagcaaggacagtgggctgccaagtcaaggacttagttttaaatatggagatattctccacgttatcaatgcctctgatgatgagtggtggcaagccagggagagtcatgctggagggagacagtgaggagatgggggtcatccccagcaaaaggagggtggaaagaaaggaacgtgcccgattgaagacagtgaagtttaatgccaaacctgggagtgattgattcgaaagggtcattcaatgacaagcgtaaaaagagcttcatcttttcacgaaaattcccattctacaagaacaaggagcagagtgagcaggaaaccagtgatcctgaacgtggacaagaagacctcattctttcctatgagcctgttacaaggcaggaaataaactacacccggccggtgattatcctggggcccatgaaggatcggatcaatgacgacttgatatctgaattccctgataaatttggctcctgtgtgcctcatactacgaggccaaagcgagactacgaggtggatggcagagactatcactttgtcatttccagagaacaaatggagaaagatatccaagagcacaagtttatagaagccggccagtacaatgacaatttatatggaaccagtgtgcagtctgtgagatttgtagcagaaagaggcaaacactgtatacttgatgtatcaggaaatgctatcaagcggttacaagttgcccagctctatcccattgccatcttcataaataccaggtcctatggaacctcttatggagatgaataagcgtctaacagaggaactagccaagacaacctatgatcgagcaattaagctagaacaagaatttgaagaatattttacagctattgtcaaaggagatacttagaatgatatatataaccaatgcaagcttgttattgaagagcaatctgggcctttcatctggattccatcaaaggaaaagttataaattagctactgcgcctctgacaacgacagaagagcatttagaagaacaaaatatatataacatactacttggaggcttttatgtttttgttgcatttatgtttttgcagtcaatgtgaattcttacgaatgtacaacacaaactgtatgaagccatgaaggaaacagaggggccaaagggtgggacagaaaagacattgcagtatgaaggaaggctttgggttgctcaaagtgccagggtgtaggggatgaacctctggacgggctttctgcccaaggagatgagatgaggagcctcctcaccccagcaaatgtccaaagctgatttagctgcaaagctctctgtgtcttttgctttaaaaaaaaattgccagccctcgaacctcatcagccttcccattacccccatctgtaattgggaccctttgaattttataactatgcacatcttttgatttcttaacaagcaaatgaaagaaagaaggaaaaaagaaaggaatccctttggagacgacatactatcagggaaggataagtgtgtagttttttgactggcatctgcaaagacaagaatttcataaaatttgcaagtgtatggaggactaacctcactgacaggaggggattccacctgggattagctttatgattgttgattgcctattttgccatttataaactgaaagaaggcactaaagatgagaataatttatacaataaaaactccattaaatgtatagaaacaaaa

SEQ ID NO: 113300 - DNA, 1606 bp, Homo sapiens
  misc_feature (1)...(1606): n = a,t,c or g
aagttgctggctgactggccttgcgaggaaaccgcctcggagctgcagccgaaggccaaggaatcactgaagatcggcgagggaggacagggggttcatcatgggtggctttttctcaagtatattttccagtctgtttggaactcgggaaatgagaattttaattttgggattagatggagcaggaaaaaccacaattttgtacagattacaagtggggagaagttgttactactatacctaccattgggatttaatgtaggagacggtgacgtacaaaaaccttgaaattcccaagtctggggatttagggagggacagacaagtattcagggccatactgggaggatgtttactatttccaaacacagatgtcagtcatttatgtagntaggacagttgtgaccggagaccgaattgggcattttccaaattcagagtttagttgccatgtttggagggaggaagagcttgagaaaagccattttagtcggtgtttgcaaataaacaggacatgggaacaggccattacttccctcagagatgggcaaatttcacttggggttaccttgcctttgaagggacccgaaaagggccagatatttccaaaacgtcagcaacccaaaggcacccggcccttgatgaggccaatggaatgggttagtttgaaaccattaaaaaggcagacagtaattccagtcccatcctcctcccccctgaaatgaagacctacatcaccctctctcccctttggaaacagtcaagtgtaccttcacacctacctagatgttaaaacctatatgattattggcatatactgactgactgcaatatttgtagtaaatagggaaaataagtatttagttggagggataatttgatcgaatcacctgaatgttctatgtaatgtaaaatattcttttgcttgctttctttgtgttagggatatatattctatgttgtatggaattcattattcaaatacagttcatattaaagaggtatactccctattggtatgaaaaaaacctatttttgaatagtagttgcagcttgtttgtataaatactaaaaaatatcttaacagatttttttccccttaaaatgaattatctttccaaagattagactcagtatgagagtaggtgaggaacatagtttgtgtaatataatcctttatttgcttacctgaccactttttattaagctgttttgtttaaaagcttttggttatagggcatgaatattgttttgatggttaacttccactgacttatctgtaaagtgtcattttatatgtactttacagttgtcaaaaaaaatcttacatatattgatctagttgatcggtagaggaagcttgtgaagtaggtaggacaggttatgatgtcttctctgtatggacgtgaacccagggttttaataggttggcttgcccaaggtcccctcccagcttgtcaggtagtaataaggctcaaagtattacttttggttcaagcgtctcactcatcaattatagtatatattcccgaaaatgttagtattgacaactcagtttatctcttacatatcattatgcttattagtttccctccaaaaaaaaaaa

SEQ ID NO: 113301 - DNA, 2304 bp, Homo sapiens
gacctttcctctgggaagcctgctcctcgggccactgcgaaccctctctactctccgaagggaattgtccttcctggcttccactacttccacccctgaatgcacaggcagcccggcccaagtctcccactagggatgcagatggattcggtgtgaagggctggctgctgttgcctccggctcttgaaagtcaagttcagaggcgtgcacagactccagaattggatggcatgatgattactctgctgctgtttgtgggcgctgctgctgacctgggagagtgggcaggtcctggggggacagaacggtctcagacaatgagctccaggaaatgtccaatcagggaagtaagtacgtcaatataggaaatttcaaaatgctgtctagcgagttgaaacacgatgatgactctcatagaaaaaacaaacgaagagcgcaagacacttgcttcagcaaccttaggaagaagccaagaaggaaggaaagagggatgcccttaaattgagaccagggggattcagagacaaagctgaaaggagctcccagggagtatgcaattgagaccatgatgggccctctgggacaggagtgttaagccctgccttgaaaacagaccttgcatgaagttctacggcacgcgttctgcagaaagtggcttcaggcctggttggccgcccagccttgaggaagttccttgaaccaggagctcgcccttctacttctgggatgaatgggtgacccgcattcgacttccttgctggaggaacgaccggcaaaaagacgcacatgctggatggtcatgcaggaccacttcagccgcgcgttccagcattcatagacgagctctttccagggacaggtttctttcacccgggaagccccagggattaccttaccactaaccttgccctttcagccttgccccacccggaggccttcacttcttcttttcccaagtcccgcattcgtcccgcagctttgatgccccttctctccgtacggagccccttgaactttccacggccatgttccagcccttccttggagatggattacacgaggcttcagcagggccatgggacatccacttccacagcccggccttccagcacccgccaacagaattcatacggagaaggcgacggatgaccgggactgctgtgccggggagatcccgccacaacttccacggggctgccttgcggattgaaggaccaagtggtgacaaagtggccgggaagatcttgttttgtgggattgtttccaccaacaaacccctccccaggctaaagcttgcgggcggggagttcgaacggaattccctccagggttcgattgaggagggtttgaacaggggtaattacaaacgtagcttggttaaaagttccttaaccagttgggaagatggttcaaacaactttcttcctttgttgggagcagctgaaacgagccagttttaactgggtggtcacgggctgggcaaaccctccacgcaagggcgaaagaccagttacttatctggcgggtcaaccacgggtgggctttcccacacttctgaacttcgggacgttcccttcccggtgtcaactgaaggtggtccgtgaaagctcttttgactcctgatcccccatcacttgtgacgggtcccttgttagaagtctcccaggaaagaaccccctaaaatttatggaggaccgtgggcggaggaaagcgcttgcaaggaatacccgcaaaaaaagcaaccgggggaggagttgagatgttggattgttgctttttgcaccttacggggggcattctgagtccagctcccccccaagatggagcttgcagcccccccagagagaagctcttgcaacgttcaccaagtaacccaggcgcccatgcctccaggcccccgaactccgccgcgagcctctccccggctctgggattcctggcaattttaacattcgattttgctggttcatggggaagaacagaatttgctcctgcatggcaactaattcaataaaactgtctttggtgagctgatcgcttggagggtcctctttttatgttgagttgctgcttcccggcatgccttcattttgctatggggggcgggcaggggggatggaaaataagtagaaacaaaaaagcagtggctaagatggtatagggactgtcataccagtgaagaataaaagggtgaagaataaaagggataagatgacaaggttgatccacttcaagaattgcttgctttcaggaagagagatgtgtttcaacaagccaactaaaatatattgctgcaaatggaaa

SEQ ID NO: 113302 - DNA, 784 bp, Homo sapiens
ttttttttgcaatccttaaatagatttatggaaatggcttcaaattacagcatttagaaaataaatataatctcaatacataatatttcctccattatatactctccccccgacagaagccgtttctatgcatatgtactccaccagtaaacagtaattagatttatcctagaaaagaagcagtaggtgtgtcatctccaaaaataaaactgctatcgtcattgcaatgtgaagcctgagatttaagcctgaggaggtgtccgctggggccactcagctgcggcagcttgggtcccaggccactctggggtctgaggaattgggccagggttccagagggtgcagagggaaggggaagtggtagctgagctggtggccccgggcgtcctggctgattggtaaacccgacccaaggccccgagcaacctctgcctgcggtgtcagtgcctggtcggacccccatgccatcagcaaggggacagtggtgggcagacaccaggagcaccctgcctgcctagaggaccactgggtcagcttcctgcatctccccactccaagaagaaatgagatgcatgttgtttagccaagtcctgaggaaggatggtgaggggtgaggggtgagggctggggaacgaggtgggcagctgatggggagaatgggtagcctgcatttgacgtttgggaggcacatagggagccctgctgtgccaaagagcctgtggagtggcccttgctccggcttccagattcaccgcaacagcagaggcggcagagtggccccact

SEQ ID NO: 113303 - DNA, 3258 bp, Homo sapiens
  misc_feature (1)...(3258): n = a,t,c or g
gtcagccactgccccatagcaggatgtgtgcaacatctgccactggtactcagcatctgccacctcgctgaccctcatttgaccctcccaggcaagtgctgtgatgaccccctccctggtgaggagccggccaggacttggatccaagaagtctggcttcaaaccccatgctctgaccgctcgatggcaccgcttccttggcaggacatctacagctcccagggcacccaggggacgtcagcctctgaaaggggaatggtcagacccgggaggccttgaatgccatgctaaggagttcggacttgacaagaggcagcagcaaaagggttttgataaccctggttagacgtgctcctgatttattgtatttcactgctgcaagatttactggacaaagaggaggagggggagaagccagtgagtgcagtgaaaggtgtctagaagcccaagcaaaggcccaggggtggggcgtagagaggcaatggaaaggcacccagacacccaggcttccagcctgagcgcggagtgcatgcaggctgcgcggtggccgcccgggttgcagggaacgcgcgggccagcgactctgcggtgctaccccgtgcccgcactcacccaggacggcgcagaccagcagggctcccacggcgagcctcatcttccgggtgcggcgatgagcagcgagtccgactgtgctcgctgctcagcgccgcacccggaggatgtaggctcgccgtgggagccctgcttggtcttgcgccggtcctggggctgagtctggctgtccctgataaaactgtgagatggagcgcaaagtctgagcatgaggccactaagcgccatagtttccgcgaccatatgaaaagcgtcattccatccgatggtcccagtgttgtttgtgtgaagaaagcctcctaccttgattgcatcagggccattgctgcaaacgaaacggatgctgttgacactggatgcaggtttggtgtatgatgcttacctggctcccaataacctgaagcctgtggtggcagagttctatgggtcaaaacgaggatccacagacttttcttattattgcttgttgctgttggtgaagaaggattagttggtttccagatgaaaccagctttcgagggcaagaagtccttgccacacgggtctagggcaggtccgctgggttggaacatccccataggcttactttactgtgacttaccgtgagccacggtaaaccctctttgagaaagcaggtggccaatttcttctcgggcagctgtgccctttgtgcggatgggacggacttcccccagctgtgtcaacttgtgtccaggggtgtggctgctccacccttaaccaatacttcggctacgtcgggagcctttcaagtgtctgaaggatggtgctggggatgtgggcctttgtcaagcactcgacttatatttgagaaactttggcaaaacaaggctgacagggaccagtattgagctgctttacctgggacaacaccccggaagccggttaggatgaattacaaggacttgccacttggccccagggtcccttcttcataaccgttcgtgggcccgaagtattgggcgggcaaggaggactttgatcttgggagcttctcaaccaggcccaggaacattttggcaaagacaaattaacagggttccaacgtgttcagctctcctcatggggaaggacctgcttgtttaagggactcttgcccacgggttttttaaaagtccccccccaggattggattgccaagatgttacctggggctatgagtatgtcactgccatccggaatctaccgggaaggcacatgcccagaagccccaacagatgaatgcaagcctgtgaaagtggtgttgcgcttgagccaccacgaagaggctcaaagtgttgattgagtgggagtgtttaaccagtgttagggggaaaattagagtgtgtatccagcaggagaccaccgaagacttgcattcgccaaggtccatgaatggagaagctgatgccatgagctttggatgggagggtttgtcttacattagcgggcaagtgtggtcttggtgcctgtctttggcaggaaaacttacaataaggagcgataattgttgaggatacaccagaggccagggtattttgcttgttagcagttggttgaaggaattcagctttctggacctcacctggggacaatcttgaaaaggccaaggaagtccttgccatacggcagttggccagnaaccgcttggcctggaacatcccccattgggccctgcctctaccaataagattcaaccacttgcagatttgaatgaatttttcagtgnaaggttgtgccccctgggtcctaagaaagactccagtctctgtaagcttgtgtatggggctcaggacctaaacctgtgttgaacccaaacaaccaaaggggggattctaccgcctacaccggccctttccaggtgtcttggtttgagaaggggagatgttggccttttgttgaaaacaccagacctgttcccacaggaacactgggggaaaaaaccctgcatccatggggctaaagaatctgaatgaaaaaagactattgagttgctgtgcctttgatggtacccccggnaaaccctgtgggaggaagtatgcgaacttgcccaccctggccaagaacccccgaattcacgctggtgggtcaacacggaaaagattaagggaaagcttgccgtcccacaaagatattaccgtcaaacagccagcagcccctattttgggaaagcaaccgtaacctgaacctgcctcggggcaaccttttggtttggttcccggtcgggaaaccaaaaggacccttctgttccagagattgaccacagtatgtttgggcccaaacttttcatgacaggaaacacatttgaaaaattcttaggagaaagaatatgtcaaggctgttggtaacggtgagaaaatgcgtccacctcatcactcctgggaagcctgcactttccgtagaccttaaaatctcagaggtagggctgccccccaaggtgaagatgggaacgcagatgatccatgagtttgccctggtttcactggcccaaagtggttttgtgctaaccacggtctgtccttcacagctctgtgttgccagtgtgtgctgaacaaaaaaataaaaattattattgattttatatttcaaactcaaggcctgagaacccttatccanggagaactcaaccccccacagaggaggagctgt

SEQ ID NO: 113304 - DNA, 3180 bp, Homo sapiens
ttttttttttcatgaaggtggagactttaatcatctacaaaaccctcagacctgttttactttatatgtttaatcatacagatgccatctacagtattttgtaagttaagtaagcagcaataaaagtttattctgtactactttaagcatattaactattacttttaaagttgaaatagaaaaattatatcactgtcttttcatcttggaaggcaataacaatgaactcataactcaaatctgtttaccaggcttaagaggaggcatttaaaatcatatagggctttttctatggctttattagaaagatttatggagggggaaaaaatggtagaattattccaaggcatgttcaggaacaacaacaacaaaaagaatttgtaactgcaattccagcgtttcataaatgtcctctatttccatttaaaaactctctaaaattaacataattaaagcagctaataaaacacaatccctgcaacttttatatataaggaaagtcctcatacagtatcagtagaccatgggcttataaataaaatatactgtatttgttatcaaatatagaaacaacagttccagatttatgttttttgaaaaaattaatttattttaagttaaggatctctacgtaaatttattttggtatcaaacaactgcaattagtgatggggggataaaagcatccctaattgtggaaggatggtaatttatttacaaaaactatacaaaattagattaattataacaacaacttatcaaaggttcctgaaattaattttgcttttgaaaaagtatcaaaagtcttcagatccagaatgatagcattttattatttctgattcatggaattatagcacatcagatctttaagcaactacatcagataaaaccctagataataaaatattccttcatttccctgacagcttggaatgtaaatgaaaacttgttcccatttttattaaagaaaaaacctagaataatgcatccaatggtatcaaatacctgttagaatggcgtgtctgctataattaaacatgggcaattagttctacatagttaaaaattgccttaaattaattcgttcctttaataaaaaagtttttatcagtcatttcagatctctgttattcggttttaactaggaaattagcatttactataaggaatcttcaaaatagtatatatttaaaaagtgcatataagcaaaactaaatttctcaaattaaataatttaatattgtattgtaaaatacaagtagccttaagagaaacatgcttcgtcaatcttttgcttttaggtttggtgcccaaacatttaaaaataaagaacaaatttccgcgaacttttgggtaatggcttttaagatttgcagacacagctaaatactcatctaacaaagtatccaggctatccaactatattgccatgaattcataagacagtaacacacatttataatataaaagtagtcaaaaaaataaaaagaaacagccacaggtaatttagggctaaaatgagtcctaataagggttacatgagaaataacatataagaccccaaataaattttagatacaaaattaaatgatgtggctttgttcaaacatacctaaaattcaaaatcaagttaaatacctaggctggcttttttatatcaccagctttcattagggctttaatcgctcttgccctcatctcaagttctagcagctccagttgctgtgcagaaggttgaacatcttctggtggaggaacagccagggtggctgcctttgggttcgtttgggctaagactctgcccagtcctagaatctcattcacacttttctcaatgtctttctcccaggtcatctatctgaccagcttcactttggactgtattttctggtgcctcgggagcagctgcttcttcgttgcatgggccttctatgtcgctgtcataagcatctgcatttatactgagtacatcactatcttccccttttccttgttttaattccaaaccttcaggttgcttattctctctcacggatgaagcagaatctatacagatgtcttgctgactgactaaatcagatcccatcttagaaccatcatctgcttcctcttccatatcagagtccattccattgtcaccctcaagaatcttcaaaatttttttttcagacaggagctctaactgttcctggcatagtttttttaatttcttctattgaacagttctttaacacatcaggaagcatcttctgtaactttttctctcctataatacagaagcactgctgaagcatttcttttttgtctgatatatagaaactaactggtttcaatgacacagtcaggtccagtccacctttcttcaaaggtcactgtgctctgccaagaataattctttttccaaagttggcaaaatatatttagtttcctgctgcaaggagcccgagacgctggaagagtcggtactcctccgcttgccggcgctcgctgcgctccacgctgctcccgccccaacacgtgccgccgctcccaccgccggtgacacttccactaaaattggcgttcccagcagcagctgacgctcgccgcagcccccggcgctcccgcagccgctagtgcttccactgcttgccgctggccaacgcgggtacgatgtccggggccgcgagcgctgcggccgcctcctgactgctacgtttgcgccgtttctccctttaggactttttccccgtcatgatccctctgctgcaaccatcggaggaaagtccgctgtctctggtgcgaccgaagcccgactcctgcggccgtgggcggcaggcactggcgtcgcaggttatgcgtcacttccggccgtggcacagaacgtggtgaagcgttatgggccggggtggcaggggggttgccataaccagttgcgcttccccctcgggtcgcggaggtcgatttgagtgtgtagcgggtagcctgtctagtcagagtttgttttgttttgtttttatatctctacaaaggatagaaggtggaacttacgtccttttaacttcaaaactttttattgttagtgttttgtctgtttacaataaggttgaagtatagttgctgattctccatttccgtttacctccaaatcttaagatattaacaacgctatgacaataaagagaatagggaaaagtt

SEQ ID NO: 113305 - DNA, 1223 bp, Homo sapiens
  misc_feature (1)...(1223): n = a,t,c or g
ggccganagcaggcgccgcttcgaggcccgcggaaaacgcgcgccgagacccgctcctgcagtattagttcttgcagctggtggtggcggctgaggcggcatggatctcagcgagctggagagagacaatacaggccgctgtcgcctgagttcgcctgtgcccgcggtgtgccgcaaggaggccttgcgttcctgggcgtcgatgaggcgggcaggggccccgtgcatgggccccatggtctacgccatctgttattgtcccctgcctcgcctgggcagatctggaggcgctgaaagtggcagactcaaagaccctattggaaaacgagcgggaaaaggctgttttgcgaaaaatggaggacacggactttgtcggctgggcgcctggatgttctgtctccaaaactcatctctaacaacattctttgggcggggtcaaaatacaaacttgaacttccctgttcacatgatacagccactgggcttatacagtatgcattggaccagggcgtgaacgtcacccaggtattcgtggacccgtggtaagatgccagagacaatacccaggcgcggctgcagcaaagtttttcccgggattgaggtgacggtcaaggccaaagcagatgccctctacccggtgggttagtgctgccagcatctgttgccaaggtggcccgggaccagggccgtgaagaaatggcagttggtggagaaactgcagggacttggatactgattatgggctcaagctacccccaatgatccccaagacaaaaggcgtggttgaaggagcacgtggagcctgtgttccggcttccccccagtttgtccggtttcagctggcgcacggcccagaccatccctggagaaagaggcggaagatgttatatgggaggactcagcatccgagaatcaggaggggctcaggaagatcccctcctacttcttcaatgaagggtcccaagcccgtccccgtttttcccgccgatattttctggaacgcggcctggagtcaacaaccagcctttaacaactgcctttacgcgctctacctgcttccccaacccagacattaaaattgtttaaggagaaccccccgtaggggatgtacttttgggacaaaacgcaaggtgggagtgtgctctgcagccgggtccagctacttccttttggaaccttaaatagaatgggtgttggttgattaattttaaaaaaaaaaaaaa

SEQ ID NO: 113306 - DNA, 385 bp, Homo sapiens
ctcctcctcctccccagccgtccttgggacagcaaggcccccagcccgtgggaaagacctagcctcctctccagcacttggagagggagttggatgcacgtctcttaaccccaggaggacagagaccctgaggcaggaggggaccccttcccttgctgcttctcttggcacagccggtccagggggctggctcagggcccaggactcctcgctcctcctggagggcctgggtcgcgtggcccaggagctggccacatgggcatctcccgcactgctcctcagggaacgggaggcattatcctgcagggcccactcttacccatgaaagacactcgggaaatgctcctgcggaagctggagctctgcgcgtttgaccacatgtatt

SEQ ID NO: 113307 - DNA, 798 bp, Homo sapiens
cggcggtcacgggcaaggtgccccgggattgacgccgcctgtggccagagccggagtaacgggactcccagctgcgcgtcgcagtcccgacgcgagaagggctggagtcggcgtacattcctaaagcccccggtgggagccaggccgggacgcgtgcaccatgccctacctgctcatcaggacccaaatccgcatggaggtggggccccactatggtgggcgatgaacagtcggatccagagctgatgcagcatctgggggcttcaaagagaagagccttgggaaacaactttttatgaatactacgtcggatgacccgtccccggcatagtcctggacaagcctggaacagcaggggcttccggtgtgctgatcatgacggggggtgggccagacgcttggtgtggtgtctgcacaaggaagtgaccttctcattgctgattttgcagaccggggcaccccctttgaggggctgcttgtgggcccttgaccttccaaagctccttgcctcaccgtctgccttgctcctctcttcccaaatcatcaccgccacgtggcccagccccaaagggcagtgaatggccttctctgaaaccctgcgtcaagcagtgggagacggcagtgcccggtgccctggtgctcccagctgccctcctgcttcgggccctggccgagggccttgtgtaggccatgttcctgcggcagctgccccgggccggagctgggcactccagcggccctggcgcgtggctcctgcatagctagcccaagccaataaagggctgtgatgagtggctg

SEQ ID NO: 113308 - DNA, 2686 bp, Homo sapiens
agggacagcccagaggaggcgtggccacgctgccggcggaagtggagccctccgcgagcgcgcgaggccgccggggaggcggggaaaccggacagtaggggcggggcgggccggcgatggggatgcgggagcactacgcggagctgcacccgtgcccgccggaattggggatgcagagcagcggcagcgggtatggcaggcaccggcgggccggcctccagcgcaggtgcccgagaggcaggggctggcctgggatgcgcgcgcacctgccctcgccccgccccgcccgcacgaggggtggtggccgaggccccgccccgcacgcctcgccgaggcgggtccgctcagcccaggcgcccgcccccgcccccgccgattaaatgggccggcggggctcagcccccggaaacggtcgtacacttcggggctgcgagcgcggagggctacgacaactatagcgcagacagcgacatggcagagcatgtggccctgagccggacccaggtgtgcgggatcctgcgggaagagcttttccagggcgatgccttccatacagtcggatacacacatattcatcatcatgggtgcatcgggtgacctggccaagaagaagatctaccccaccatctggtggctgttccgggatggccttctgcccgaaaacaccttcatcgtgggctatgcccgttcccgcctcacagtggctgacatccgcaaacagagtgagcccttcttcaaggccaccccagaggagaagctcaagctggaggacttctttgcccgcaactcctatgtggctggccagtaacgatgatgcagcctcctaccagcgccttcaacagccacatggaattgccctccacctgggggttcacagggccaaccgcctcttctacctggccttgcccccgaccgtctacgaggccgtcaccaagaacattcacgagtcctgcatgagccagataggctggaaccgcatcatcgtggagaagcccttcgggagggacctgcagagctctgaccggctgtccaaccacatctcctccctgttccgtgaggaccagatcttaccgcatcgaccacttacctggggcaagggagatgggtgcaggaaccttcatgggtgcttgaggattttgccaacaggatcttcggccccatctggaaccgggacaacatcgcctgcgttattctcaccctcaaggagccctttggcactgcagggtcgcgggggctatttcgatgaatttgggatcatccgggacgtgatgcagaaccacctactgtagatgctgtgtctggtggccatggagaagcctgcctttactaactcagatgacgtccgtgatgagaaggtcaaggtgttgaaatgcatctcagaggtgcaggccaacaatgtggtcctgggccagtacgtggggaaccccgatggagagggcgaggccaccaaagggtaccttgacgactccacggtgccccgcgggtccaccaccagccacttttgcagccgtcgtcctctatgtggagaatgaagaggtgggatggggtgcccttcatcctgcgctgcggcaaggccctgaacgagcgcaaggccgaggtgaaggctgcaagttccaatgatgtggccggcgacagtcttccaccagcagtgcaagcgcaacgagctggtgatccgcgtgcagcccaacgaggccgtgtacaccaagatgatgaccaagaagccgggcatgttcttcaaccccgaggagtcggagctggacctgacctacggcaacagatacaagaacgtgaagctccctgacgcctacgagcgcctcatcctggacgtcttctgcgggagccagatgcacttcgtgcgacaggtacggagctccgtgaggcctgggcgtattttcaccccactgctgcaccagattgagctggagaagcccaagcccatcccctatatttatggcagccgaggccccacggaggcagacgagctgatgaagagagtgggtttccagtatgagggcacctacaagtgggtgaacccccacaagctctgagccctgggcacccacctccacccccgccacggccaccctccttcccgcccgtcgaaccccgagtcgggaagacttcgggaccattgaccctcagctgcaacatttcttggccccgggctcttggcaccctgggcccgccccctcgctgctgctactacccgagcccatttacaattctttagtttgacaagcaattggagtacaattcttgccccttccagactctgcttgagcccagggagttgagtcacctccttccactcacttccaacccaacagaaggaaaggaggagggcgccccattcgtcttgtcccagagcttattggccacttgggtctcacttccttgagtggggcccagggtgggagggagggaccgaaggggggaggaaagggggcgagccacccacgtgagagaattctgccttgggccttgccccgccagcctcagtgccacttgacattccttgtcaccagcaacatctcgagccccctggatgtcccctgtcccaccaactctgcactccatggccaccccgtgccacccgtaggcagcctctctgctataagaaaagcagacgcagcagctgggacccctcccaacctcaatgccctgccattaaatccgcaaacagccc

SEQ ID NO: 113309 - DNA, 2031 bp, Homo sapiens
  misc_feature (1)...(2031): n = a,t,c or g
atttctcggagcgggagagcgcgggccgcgcgggcggggaagcgaagaggcgggcgggccagcgaggagcgcggtagagaaaaggcgcgagcggccaggagggctcaggccgaggacaccttgcagctgccgccgccgccaccgagccgccgctgtgctcactgatccgcctccagggccaccgccatgtcgagccgcggtgggaagaagaagtccaccaagacgtccaggtctgccaaagcaggagtcatctttcccgtggggcggatgctgcgggtacatcaagaaaggccaccccaagtacaggattggagttgggggcacccgtgttacatggccgccgtcctgggaattacctgacagcggagattctggagctggctggcaattgcagcgagagacaacaagaagggacgtggtcacacccccggcacatctttgtggctgtggccaatgatgaagagcttgaattcacttgctaaaaggagtcaccatagccagtagaggtgtgttagcccaacatacactccgagtgctagcgaagaagcggggatccaaaggcaagtaggaagcaatcatcacacccaccccccagccaaaaaggccaagtctccatccccagaagaagccttgtatctaaaaaagcaggaggcaagaaaggggcccggaaatccaagaagaagcagggtgaagtcagtaagggcagcccagcgccgacagcacaaccgaggggcacacctgccgacggttttcacagtccttttccaccaagagcctcttccttggcccagaagcttgacccttattcccaagtgaaatcagtaatttagccgggttttgaggtgaaggccatatccaatcctacaaatgctgacattgacctaaaagatgacctaggaaacacgcctggagaaagaaaggtggcaaggagtttgtgggaagctgttcctggaattccggaaaaagaacgggcccttggaaagtagctggagcttgctgtcagcgcaggccatggccctgccctgccaaagtttgtgatcccactgtaataagtcccagtttggggtgcagacaagtgtgaaagaacttctgggaaaagacagtgaaaaacttgctttggcccctggcttgattgataaagaagcttgaaatcccattgcatttccatccatcggcagcgggcaggaacgggttttccaaaagcagacacgcagctcagctgatttcctgaaggccatctcacagttacttccgtgtctacaatgtcctcttccatcaaaacggtgttacttccgtgcttttttgacagccgagagtattaggcatctatgttgcaggaaatggccaaagctggacgcccaactaaggcttgaagcaattgacagaaaccagcttgcaccatgtaccccacccttcagtttaaaagaaaaaaaaaatcacccttcactcctactgggaggctgggacccctttcattttcagttttgctcacatctaggggaaaataaggctttggtttccaagtttaattgtttttgaccttcatttttaaaatgtttttaatgttagcactgataagttggcattactggttgttaagcacttgtgttcccagacccgtgtctgaccttagtgtaaacctagggagattttataagttttaattttaatgaaacccttgattgaccgcacagcagtgggggaagaacaagcgtccttttacctggtcaccgaagccaggaaagcccccgtttggtaagccgtgtgtttgtggtgctttattggtacatcctccagtgggcgttctttttactctaaatggttcctttttggttttccccccttcagaagaatccatggaaatttggcaaccaggacctaaattttttgggttaacttttttgtncttattggatgggatttggaaaatggaaaggtttaattaaggcaaagcagaatctgttggtccttaaattataattgcaatttggaatttgtgtgagttgattatagtaaaatgttaaaccgtta

SEQ ID NO: 113310 - DNA, 1069 bp, Homo sapiens
ttttttttttttaagttctcgaagttttaatggttttcggggaagtaacacgattctccatatgcagatgttacatttcatgtgttagatttgctaagtatgatttaattatacatttccatttttttgatcttcaacttaattacacttaaaaaatgagtattttgctggtgtaaacacctccacttcttttttttaaaaaaacagggtctccatgaaccaagctggagtgcaggggtgcgatcacagctcactgcagcttcaacctctcaagctcaagggatcctcccacctctcagcctccgagtacctgggaacctgggcacgcaccaccacacctggctaatttttgaattttttgcagataagggcttttgctatgttgctcggactggtcttgaattcctggggtcaagccatctgccctgcctgcacctcccaaagtgatgggattacaggcctgggccactgtgcctggccccaacatctccacttctgatctcatttttctgttttctcaccatctgatatattttacttttgtcacatttactgtctctcactagaacatcagctccacaaatacaggccttgggcacaagatacccaatgtgtttgctgagtgcaactcagtggtgcccacctccgccctgtgcctgatagatgtgtatccatcaccccaccacccactgagtgcctctgtgggctccctgggtgtggttttaagcattggtaggccctgtatcatgggtgctgggctatcaggcccccccacctgtgtgtgatgttgtgttgacaccacctgggagggccgacagtccctcagtcttgtgtgtgcgctcatggaccgacatctccaccactgctggtgggctctgttggggaaagtgtttatttgtcttcagttgtatgcaagataactgcatcatgttgggtgggactatgactatgttatcgtacttatttggagattaagtgcggttaaggagatgtgtgagggtgcccagatgacaaggactagatggtcagttttttattttttttgagacagagtcttgccctgtcgccc

SEQ ID NO: 113311 - DNA, 3560 bp, Homo sapiens
ttttttttaaaaaagaaaaaagtgtttattataggcaaccaacacccaatgggaactggtatttgtctacaccaagggagtgcaatttttcatcttcccaatggcggccttcaacctttgaggcgaaatcccactgggcgaaagatgcctttcctaggaggcagagctcccctgaactgggcctaagatagttccagattgatcttaaggtcaaatggtaaagaccctatgtaagttccatgaaagtccttggcttttcggcgctgggtcgcccgaaagcagaatggagacggatagagtgctggctcccagaatcccggaagaacataagcagtgagaacggagcccctggcgcattacacttgtatcccatggaaaccatcagcacaaaccacactgcaaaaagccctgggacccatcaggtaacacaagatccattctcaggacacatttctgggtccccaagtgttattgcaaaggttcttttgccccttgacagatttggttgtctatataagaggtgatagtattcccaggcattaattcctccaggacaagttgacatgttgtggccagtatcagagtcttgaagctgagtaaagccacgggaaggtgttggccaagtcacctttgcagggggtttgcttgcaagttctatgatgaacagtggttatgtgcctgattgaaaagttttgaccagggtcttccaagagaacaagttctggagatccagcccccaaagatggtgccccttctgattcaggcagcaacggggcatgcaagcattagctcttcgtgtcggttttacaataaaaggccacttttgacaaattttgcacgctcccctggacattgggtgcatatctcgggtagcaccagagccctttccacgcccagagcgaggagccaggcggaaagcccagggcaccagggtcgtaagactacccgggccgtgaggcgccattttccgttcccttggtgctccgctgctcgcgcgacccggccccgcgcgccccgccccgcagcgcagtcagggccctcttccccgggcgtggcctaagcggcccggtccaggtcgccctggggctgcttgggggcttttcctgctcgtggagctctgcgctggtcttcatgcgccctagccctctttcggggatactggccgaccccctcttccttttcccctttagtgaaggcctcccccggtcgccgcgcggcttcccggagccgactgcagactccctcagcccggtgttccccgcgtccggacgccgaggtcgcggcttcgcagaaactcgggcccctccatccgccctcagaaaagggagcgatgttgatctcaggaagcacaaagggaccttcctagctctgactgaaccacggagctcaccctggacagtatcactccgtggaggaagactgtgagactgtggctggaagccagattgtagccacacatccgcccctgccctaccccagagccctggagcagcaactggctgcaggatcacagacacagtgaggatatgagtgtaggggtgagcacctcagcccctctttccccaacctcgggcacaagcgtgggcatgtcctaccttctcccatcatgggactatgtggtgttcgtcctgctgctggttctcttctcttgccattgggcttcttaccatgcttgtcgtggctggggcccgccatactgttggtgagctgctgatggcggaccgcaaaatgggctgccttccggtggcactgtccctgctggccaccttccagttcagccgtggccatcctgggtgtgccgtcagagacctaccgatttgggacccaatattggttcctgggctgctgctactttctggggctggtgatacctgcacacatcttcatccccgttttctaccgcctgcatcttaccagtgcctatgagtacctggagcttcgattcaataaaactgtgcgagtgtgtggaactgtgaccttcatctttcagatggtgatctacatgggagttgtgctctatgctccgtcattggctctcaatgcagtgactggctttgatctgaggctgaccgagctggccctgggcattgtctgtaccgtctatacagctctgggtgggctgaaggccgtcatctggacagatgtgttccatacactggtcatgttcctcgggcagctggcagttatcatcgtggggtcagccaaggtgggcggcttggggcgtgagtgggccgaggcttcccagcacggccgcattctctgggtttgagctggatccagacccctttgtgcggcacaccttctggaccttggccttcgggggtgtcttcatgatgctctccttatacggggtgaaccaggctcaggtgcagcggtacctcagttcccgcacggagaaggcttctgtgctctcctgttatgcagtgttccccttccagcaggtgtccctctggcgtggggctgcctcattggcctgggtcatgttcgcgtattaaccagggagtatcccatggagcatttcagcagggttcagggcagccccagaccagtttcgttcctgtaattttgttgatgggatcttcctgaagggcctgccaggcctgccagggctcttcattgcctgcctcttcagcggctctctcagcactatatcctctgcttttaattcattggcaactgttacgatggaagacctgattcgaccttggttccctgagttctctgaagcccgggccatcatgctttccagaggccttgcctttggctatgggctgctttgtctaggaatggcctatatttcctcccagatgggacctgtgctgcaggcagcaatcagcatctttggcatggttgggggaccgctgctgggactcttctgccttgggaatgttctttccatgtgctaaccctcctgggtgctgttgtggggcctgttggctggggctcgtcatgggccttctgggattgggcatcggggagcattcgtgaccagcatggggctttcagcatggccaaccctcttccctcttaatggggtccagctttttccctggcccaccaatctaaccgttgccactgtgaccacactgatgcccttgactaccttctccaagcccacagggctgcagcggttctattccttgtcttacttatggtacagtgctcacaactccaccacagtgattgtggtgggcctgattgtcagtctactcactgggagaatgcgaggccggtccctgaaccctgcaaccatttacccagtgttgccaaagctcctgtccctccttccgttgtcctgtcagaagcggctccactgcaggagctacggccaggtagtacctgctgtccaagtgacccctccctgcccttctccacagatgccactgactcttcaggttcccttctaccccttttctctccccctgccccgggtgcctctctcaggatcagctaagcctaggctgtcccacacggctgtctcaggttctacccacaggactgcactggcttggtgggcagaaggatctcagggctcagaggagctcagccccggcctgggc

SEQ ID NO: 113312 - DNA, 2771 bp, Homo sapiens
tttcgtgtcgggggtccggggcctgtcgcggttgccaagcgctttttgcttggcgctggcgctggccaaggctcctttactgttccaggatacagatctcctgattcaggtgtccagtgccttttgaactgaacgcaagccctcctggacgattggaactgtaatgtggaaagggctctgatggagccagttaaaatgcttcattatttgcaaaataccacatacagtaatacgatctggatgtctttcccctcctccactaagtagcataagtgaagacttcccagaggaagtgcgcctttttcatctcgtatctgagtcatggccaacagttgtttgccaaacaggaacccgaggtttttcacttcactggttggatgggaacaatagggcatctgctaaagtttcagattccatttctgctcagtatccagtagtggatcatgaatttgatgcagtggtggtaggcgctggaggggcaggctttgcgagctgcgtttggcctttccgaggcagagtttgatacagcatgtgttaccaagcgtgtttcctaccagggtcacacacttgttgcagcacagggaggaatcaatgctgctctggggaacattggaggaggacaacttggaggtggacattttctaccgaacacccgtgaagggtctccgactggctgggggaaccaggaatgccaatccacttacatgacggagcaggcccccgccgccgtggtcgagctagaaaattatggcatgccgtttagcagaactgaagatgggaagatttatcagcgtgcatttggtggacagagcctcaagtttggaaagggcaggcaggcccatcggtgctgctgtgtggctgatcggaccggccactcaatatttgcacaccttatatggacaggtctctgcgatatgataccagctgttttgtgggagtatttttgccttggatctcctgatagagaacagggagtgccgtgggtgtcattggcactgtggcatagaggacgggtccatccattcacattaagagcaaagaacactgttgtttgccacaggaggctacgggcgcacctacttcagctgcacgtctgcccacaccagcactggcgacggcacggccatagatccaccaggggcaggccttccttgccaggacctagagtttgttcagttccaccccacagggatatattggtgctggttgtctcattacggaaggatgtcgtggagagggaggcattctcattaacagtcaaggcgaaaggtttatggagcgatacgcccctgtcgcgaaggaccgtggcgtcttagagatgtggtgtctcggtccgatgactctggagatcccgagaagggaagaggcttttggccctgagaaagatcacgtctacctgcagctgcaccacatacctccagagcatctggccgcgcgcctgcctggcatttcagacacagccatgatctttggtggcgtggatgtcacgaaggagtcgatccctgtcctcccctccgtacattacaacatgggcggcttttccctcaactacaagaaacagatcttgaggcacgtgaatggccaggatcagatttgttgcccggcctgttacgcctgttggggaggccgcctgtgccttgggtaacatggtgccaaccgccttcggggcaaaactcgctcttagaactggttgtctttggtcgggcatgtgccctgagcatcgaagagtcatgcaggcctggagagtgaagtccctccaattaaaccaaacgctggggaagaatctgtcatgaatcttgacaaattgagatttgctgatggaagaagcataagaacatcggaactgcgactcagcatgcagaagtcaatgcaaaatcatgcttgccgtgttcccgtgtggggaagcgttgtttccaaagaaggtttgtgggaaaatcagcaagctctatggagacctaaagcacctgaagacgttcgaccggggaatggtctggaacacagaccttggtggagacccctggagctgcagaaacttattgctgtgtgcgcttcaagaccattttacgaagcagaggcacggaagggagtcacgggggcgcccatgccaaggaaagactacaagggtgcgggattgatgagtacgataactccaaagcccattcagggggccaccggaagaagcccttttgaggagccactggaggaagcacacccctgtccttatgtggaacgttggccactgggaagactcttcttttcatggtcaccctgggatatagacccggtgatcgacaaaaacttttgaacgagggctgactgtgccaccgtcccggccagccatttcgctccctactgttgggacaaggattccggttgattgacagaatcagctttttgtaaattatgtataatagctcatgcatgtgtcccatgtcataactgtcttcatacgcttctgcactctgggggaagaaggagtacattgaagggagattgggcacctagtgggctggggagcttgccaggggacccagtgggccaggggagcgtgcgcactttaccttttgtcccctttgctttcattcttgtgagatgataaaactgggcacagctcttaaataaaatataaatgaacaaactttcttttatttccaaatccatttgaaatattttactgttgggactttatgcatatttgctgacctaaaaatcaaatgtagtctttgtgttgtgttacatcaaaatccagatattttgtatagtttcttttt

SEQ ID NO: 113313 - DNA, 2706 bp, Homo sapiens
  misc_feature (1)...(2706): n = a,t,c or g
gaaaaggggaaaaaacccagacgactgaactgcccacattgacttacttgtcccagaggcgaaagtcagaagcaagggcacggttcatgctctccgctgggggagtatgggggcaggcaggtgggcgagggaagaggcagtgagtgtggaggcgcggacgcgcggcggagctggaactgctgcagctgctgccgccgccggagtgacctttgatccccgtgctccggacgagcccgggcctcgccatggctgaccagctgactgaggagcagattgcaggagttcagcgaggcctcctccctctttgacaaggatgggagatggcactattcaccaccaagggagttggggacaggtgatgagatccctgcgacagagccccactgacgcagagctgcaggatatgatcaatgaggtggatgcagatgaccttccagggaacgggaccattgacttcccggagttcctggaccatgaatggccaggaaagatgaaaggacccagacagtgaggaaggagatccgagaaggccgttccgtgtcattttgaccaggatgggaatggcttacaatcaagcgccgcagagctgcgttcacgtaattgacgaacctgggggagaagcttgaccgattgaggaggtgggatgagatgatcagggaaggctgacatcgatggagatggccaggtcaattattgaagagttttgtacagatgatgactgcaaactggacagccccccgggcgccctgcgatgcccgctctctcgatctctctcttcctcgcgcgcgcactctctcttcaacactccccagcgtaccccggttctagcaaacaccaattgattgactgaggaatctgataaagcaacaaaagatttgtcccaagctgcatgattgctctttctccttcatccctgagtctctctccatgccccttcatctcttccttttgccctcgcctctttccatccatgttctttccaagggcctgatggcattcataaagttgaagccctccccagatccccttggggaggcctcttgccttcctccagcccggatgggctctgcctccattttggtttgtttcctcttgtttgtcatcttattttgggtgctggggtggctgccagccctgtcccgggacctgctgggagggacaaggaggccctcccccaggcagaagagcatgccctttgccgttgcatgcaaccagccctgtgattccacgtgcagatcccagcagcctgttggggcaggggtgccaagagaggcattccagaagggactgagggggcgttgaggaattgtggcgttgactggatgtggcccaggagggggtcgagggggccaactcacagaaggggactgacagtgggcaacactcacatcccactgggctgctgttctgaaaccatcttgattggctttctgaggtttggctggggtgggggacttgctcattttgggccactctgcaagattggacttgcccgcgttcctgaagcgctctcgagctgttctgtaaatacctggtgctaacatcccatgccgctccctcctcacgatgcacccagcccgcctgagggcccgtcctaggaatggatgtggggatggtcgctttgtaatgtgctggttctctttttttttttttcccctctatgggcccttaagactttcattttgttcagaaccatgctggggctagctaaaagggtgggggagaggggaagatgggggccccaccacggttttcaaggaggaacggcacctggcaataaaaacagtcttgtcggccaagctgcccaaggggaccggcagctacagcaagccctctgcgttcctggtccgccaagcacctcccggcttctccgtggtgacttgggcgccgcttcctcacatctgtgctccgttgccctctttccctgcctcttccctcgcccacctggnctgccccgcatactcccccagcggagagcattatccgtgcccttgcttctgactttcgcctctgggaacaagtaaagtcaatgtgggcaagttcaagtccgtctgggttttttcccccttttctgttcatttcatctgggctcccccccacccacctccccaccccaccccccaccccctgcttccccctcactgccccaggtcgatcaaagtggcttttccctgggaccctgcccagctttgagaatctcttcctcatcccaccctctggcacccaagcctctgaagggaaggaagggatggggcatagtgggagacccagccaagaagctgagggtaagggcaggtaggcgtgaggctgtggacattttcggaaatgttttgggtttggttttttttaaaaccggggcaatattgtgttcagttcaagctgtgaagaaaaatattatatcaatgttttccaataaaatacagtgactacctgnnnnnnnnnnnnnnnnnnnnnnnnnnnntataagggggggcccttttaaaaaaacccttggggggccaaaatttaccnnnnnnnnnnaaggtaaaatttttttctttaaggggggccaattaaaaccccccttgggatttttggaaaaaaaccttttttttggggggggaaaaaatgggcccacccccccaaaaaaatttaaggctttaagggnnnnnnnnnntttttaaggggaaaagggggaaaaacaacctgattttctttgtttttaaa

SEQ ID NO: 113314 - DNA, 1715 bp, Homo sapiens
ctttcgtggaagaaggaagaagagggtagaggaggagagggaggaggaggagggaggtggcggccccgcggcggaggtatcatgagcaggagggggatggagaggacaacgctcctgggtggcatggcgctcctgctcctccaggcgctgcccagccccttgtcagccagggctgaacccccgcaggataaggaagcctgtgtgggtaccaacaatcaaagctacatctgtgacacaggacactgctgcggacagtctcagtgctgcaactactactatgaactctggcggttctggctggcgtggaccatcatcatcatcctgagctgctgctgtgttcgccaccaccgacgagccaagcaccgccttcaggcccagccacggctacatgaaatcaacctgatcgcttaccgagaagcccacaattactcagcgctgccattttatttcaggtttttgccaaactatttactacctccttatgaggaaggggtgaaccgaactccaactcctcccccaccatacagtgcctttcagctacagcagcagcagctgctgcctccacagtgtggccctgcaggtggcagtcccccgggcatcgatcccaccaggggatcccagggggcacagagcagccccttgtctgagcccagcagaagcagcacaagacccccaagcatcgctgaccctgatccctctgacctaccagttgaccgagcagccaccaaagccccagggatggagcccagtggctctgtggctggcctgggggagctggacccgggggccttcctggacaaagatgcagaatgtagggaggagctgctgaaagatgacagctctgaacacggcgcacccgacagcaaagagaagacgcctgggagacatcgccgcttcacaggtgactcgggcattgaagtgtgtgtgtgcaaccggggccaccatgacgatgacctcaaagagttcaacacactcatcgatgatgctctggatgggcccctggacttctgcgacagctgccatgtgcggccccctggtgatgaggaggaaggcctctgtcagccctctgaggagcaggctcgagagcctgggcacccgcacctgccacggccgcccgcatgcctgctgctgaacaccatcaacgagcaggactctcccaactcccagagcagcagctcccccagctagagcaggtcctgccagcacccagcaacttggcaaagcaaccacggtaggggagaaccacgagagaagcattaagtgactttcaaagactttcagagtacagccacttggttcctttttgtttgttttccttctcctctcctgcattttcctccatctccaggtacagttcggggtgtggatgcctcttcctccacaagggcacagtgttgtggagggctaagttggttctgtgactcattcctcataccctaactccatctcctttctttaaagtcaaatctcacctaccctgtttgggtcagagagatgtgttttaaaagcccccaaggaaggaggctgggactgtgccctgacatgattcttggtgatggaataggtttgtgctctgattctagtttaagagaacgttgctgtatctcagtccaggagaggcagcccatcttggccctggatgaagaaggaaacccacagaggcccagggcttgtcattgtgctgccagtgtctgccaagccagcattgagctaat

SEQ ID NO: 113315 - DNA, 2007 bp, Homo sapiens
cttcccggtcgcgcgccggggcagggtcagggacaggggttggggccatgcttgctcggggctctgcttcgccccacaaatcctctccgcagcccttggtggccacacccagccaggtgagtggctgcataaagtgaatggatgtgtaaagtggttccgtttcagccctgcctgggtccatgatttctgttctgggccccctcctgcagcatcaccagcagcagcagcagcagatcaaacggtcagcccgcatgtgtggtgagtgtgaggcatgtcggcgcactgaggactgtggtcactgtgatttctgtcgggacatgaagaagttcgggggccccaacaagatccggcagaagtgccggctgcgccagtgccagctgcgggcccgggaatcgtacaagtacttcccttcctcgctctcaccagtgatgccctcagagtccctgccaaggccccgccggccactgcccacccaacagcagccacagccatcacagaagttagggcgcatccgtgaagatgagggggcagtggcgtcatcaacagtcaaggagcctcctgaggctacagccacacctgagccactctcagatgagggacccaccctctggatcctgacctggtatcaaggacttctgtgcaggggcctttgatgaccatggcctgccctgggatgagcgacacagaagagttccccattcctgggaccccgcgctgcggaagagggcagtgaaagtgaagcatgtgaagcgttcgggagaaggaagtctgaggaagaaggaaggagggagcgatacaagcggcttcggcagaagcagaagcagaagcacaaggataaatggaaacacccagagagggctgatgccaaggaccctgcgtcactgccccagtgcctggggcccggctgtgtgcgccccgcccagcccagctccaagtattgctcagatgactgtggcatgaagctggcagccaaccgcatctacgagatcctcccccagcgcatccagcagtggcagcagagcccttgcattgctgaagagcacggcaagaagctgctcgaacgcatttcgccgagagcagcagagtgcccgcacccgccttcagggaaatgggaacgccgattccatagagcttgagagccatccattcctatgttgccaagcaggcagggttttgcgcgaggatgagggagagcaacgagggtgacagtgatgacacagacctgcagatcttctgtgtttcctgtgggcaccccatcaacccacgtgttgccttgcgccacatggagcgctgctacgccaagtatgagagccagacgtcccttgggtccatgtaccccacacgcattgaaggggccacacgactcttctgtgatgtgtataatcctcagagcaaaacatactgtaagcggctccaggtgctgtgccccgagcactcacgggaccccaaagtgccagctgacgaggaatgctgttgcccccttgtacgtgatgtctttgagctcacgggtgacttctgccgcctgcccaagcgccagtgcaatcgccattacttctgggagaagctgcggcgtgcggaagtggacttggagcgcgtgcgtgtgtggtacaagctggacgagctgtttgagcaggagcgcaatgtgcgcacagccatgacaaaccgcgcgggattgctggccctgatgcttgcaccagacgatccagcacgatccccttcactaccgaccttgcgcttccagttgccgaccgctggagcctcctggggcccggaccctttacaccctgcatttccagatgggggggagccgcccggtgcccgtgttgtcccgttcctccactcatctgtttctccggttctccctgtgcccatccaccggttgaccgcccatctgcctttatcagagggactgtccccgtcgacatgttcagtgcctggtggggctgcggagtccactcatccttgcctcctctccctgggttttgttaataaaattttgaagaaacc

SEQ ID NO: 113316 - DNA, 1363 bp, Homo sapiens
  misc_feature (1)...(1363): n = a,t,c or g
tgttaagaantgaatggtgtccccccgsggyawtgcatatgttgaagagtagcstgctatgtgactgtttttggagatgggacvtttaaggggttaaggttaaatgaggmcatagmtttaagccstaaaatggtgatattagtgtctttataagaagaggaggagacaccagacccttgctcatgctctctgtccctctcsacagayyaaaggccatgtgaggacatagtgagaaggtgccacctgcaagccaaggagagaggcctcacsagaaaccaagtcttaacaccsttgatctggactttcccagcctcccagaactggcagaaaataaattcctgatgtttaagccatccagtctggcatggtgctgtggcagcccaagctgatgaatagtacacaccactccgcattccctggagctgtcctccagagccagatcagtcatctgctgagcatcaaccaggaagagttcctatccatgggaggctccatcccaacaggtgtgaagaggatgagatcttcagggagtcacccagcgggctagaaaaccaccggagtctgaccgctaagtcactgtggccagaatccaaggtcacccgaggtccaaagagaagtccaggccaggagtcctggagatgcggcccagatggagccacccccttgccgagactgtaataaagcgtgttctgacatgaagatctgagcagatgggatcatgtctctgggttcacctctgcgtccccagcatctggctcagagaagttgcttggtccatgccggtgctggcagcatccagccgacacacaggcagcccaggctcccagctccttccttccccacacagaccccacaggcccatcctggaagacaaaagagccaaccacaccgcaggagaaaactgcacccaggccccctccccaggcccaggccttgccagaactccctgctgaagaaagaaggaccaggagccagggaggctgggcccaggcaccccaccctccacctctctttattccaccccagaacatccttaaaaggtgaggggagaagggttcccaggttcccttcactcactccctgtttcccaacaacagcagaatgtgacccaggagaaagtaggacaaactcagcagcttggtgatagctgaatagcagctgaacggagagtcaggaatccagaattctgatcccagctctgctcctgccacactgggtggccctggaacccttcctgccttgacattcactcaaggtgcacggtaatcacccatttgtttgaagcaaatggatgggaaatggaagggacccttctgcccagcctcagttatttttctgctccccctccttctcgaattccacc

SEQ ID NO: 113317 - DNA, 2104 bp, Homo sapiens
cgcaaagttaaacagctaaaagaagtaaaataagaaggcaatgcttgtggaatgtacagtgcatattggcggcgcacgcctcattacgattcgcctgcttgcttctcctgttcaatcgtttctttggaaggcagtggatttttctcttgcgtctctgtcttcttcagtttcgacttatcgaatttctcgatctcagccatatcgagtttgcagagcagtggcgtgcggagcggcggcggaccacctccaggggcctaagtgatggatcttgtactccgtgttgcagattactatttttttacaccatacgtgtatccagccacatggccagaagatgacatcttccgacaagctattagtcttctgattgtaacaaatgttggtgcttacatcctttatttcttctgtgcaacacgtgagctattattttgtcttcgatcatgcattaatgaaacatccacaattttttaaagattcaagtccgtcgagagatttaagtttactgtccaggcattgcccatgggataaggtattcttactgttgcactgttcttgctggagataagaggttacagcaaattacatgatgaccctaggagagtttccatatggattgtttgaacttgtcgttagtataatatcctttcctctttttcactgacatgttcatctactgggattcacagaggccttcatcatagactggtatataagcgcctacataaacctcaccatatttggaagattcctactccatttgcaagtcatgcttttcaccctattgatggctttcttcagagtctaccttaccatatatacccttttatctttccattacacaaggtggtttatttaagtctgtacatcttggttaatatctggacaatttccattcatgacggtgattttcgtgtaagaatgaaaaattattcaatggagagtttacaaagactgaatagattattgcccagttattcttaagtaaggacaaagaaggaaatatcatcgtatttcttttttttaataaggaaaaaataatatccatacagtcaagatacatagtaaatggtatcatttggaaatcagcatcgtgggcactgctgaggaatgatcctagtggtaggtcagaagaagatgctgtgaacaccaggactttaatcttatgcttaaaatgccagatgttgttcgggggacaacttgtatctttctagcagcagatctgtagtttgtatagcctcaacaacaattttaaataagatggagaataaattattgaggggactaggctatatgcatttgccttcatccacccatgtttattaagaatcattgtgcttaataataccaagactaagcaccataaccaagaaatactaatgtaaagattgtttcttgtttcaggaatggttaattcttcaacgttggtatgataatgataacttgtttttgacttgaattaaagtactacattcagtgtgggaaaaaattctggatacattaggcagctatgtaaatgacctaaattgatagcagggtgtaataagactatccgtcttcctacacataggaggctcattctctggacacactatcacctattaccattttactgattaacaaataaattggaatttaaaaatatcgatatcaccatgatttaatccagatctgggattatgtggctaaaccattgtgatgattattatttaaaaccattatttaataagagtaaaaatatgtgaatctggatatatttaaccaaaaggaaatttgatgcccagataatatattaggcactactggatttttttagttaaattgatgcactacacttttgatgtttgaagttacaaacctgtaatttttttgtaaaggaaataattgccaaatacctaggcccattgctgacgattagttctaaaatcttattcctcctcttctcccctcacttttccctacttcctctgcaaaaagatttaacaaatacattcataaggaaatgtgtgttgtaacaaatatattgcaaaaacatagtttgtaaaggcattctataagctatttatgtaaaatcaataaaagttgatcataattaaaaaaaaaaaaa

SEQ ID NO: 113318 - DNA, 1587 bp, Homo sapiens
  misc_feature (1)...(1587): n = a,t,c or g
atccccccccccccatgctgggcgagagagagccgccgcgccggagcctccttctttcctgcctctgattccgggctgtcatggcgacccccaacaatctgacccccaccaactgcagctggtggcccatctccgcgctggagagcgatgcggccaagccagcggaggcccccgacgctcccgatggcggccagccccgcccattggcccagggagagcctggttctgtaccactggacccagtccttcagctcgcaaaaggtgcggctggtgatcgccgagaagggcctggtgtgcgaggagcgggacgtgagcctgccacagagcgagcacaatggatgccctggttcatgcggctcaacctggggcgaggaggttgcccgttcattcattccaccgcgacaacatcattcagtgattattgaaccagttcatttgactatgtgggagcgcacctttcacagggagaggcacgtggtggccctgatgcccgaggtgggcagccgtgcagcacgcacgggtgctgcagtacccgggagctgctggacgcactgcccatggatgcctacacgcatggctgcatcctgcatcccgagctcaccaccgactccatgatccccaagtacgccacggccgagatccgcaggacatctagcccaatgccaccacggacctcatgaaactggaccatgaagaggagccccagctctccgagccctacctttctaaacaaaagaagctcatggccaagatcttgggagcatgatgatgtgagctacctgaagaagattctcggggaactggccatggtgctggaccagattgaaggcggagctggaagaaagaggaagctggagaacgaggggcagaaatgcgagctgtggctctgtggctgtgcccttaaaccctcgctgaatgtccctccctgggagccacccctgnaccgccctnaagttcctgggactgtcccaagaaatactgggaaagatggcagccggccccaacctgcagtccttctttgagagggtcccagagacgctttgccttccggaaagtccctgggtgacatccacaccaccctgctgtcggccgtcatccccaatgctttcccggctggtcaagaggaaacccccatccttcttcggggcgtccttcctcatgggctcccttgggtgggatgggctactttgccctacatggtacctcaagaaaaaaatacatctagggccaggcctggggcttggtgtctgactgtcggtgtctctgtgctgtgtgattccccgtgagctctcagtaactcactgtctcatgaacacttggacagccctccccgcccttcgttctgagtaataataccgtcagtgtgaaaacattccgtagtttagaagtagacgttgcaaatgctgtgactcaaggccacgggctcttgctaaaagagagagaggaagcgagagagagagagaaaaaacaaaaaaccagaaaaccacgaattgcctttttctatccgatttcaaagggtcctccaagatgggaacttgtggaagacttggtttaaggaatcttgaaggggaactcnttccacaggga

SEQ ID NO: 113319 - DNA, 893 bp, Homo sapiens
agcaaagagtgccaaggccactgcagccctggcccgccgggaggaggagagcctggctgttcctgccaagcggcgccgggtcactgctgagatggaggggaagtacgtcatcaacatgcccaaaggcaccacaccccgcacccgcaagatcctggagcagcagcaggctgcaaaaggtctccataggacgtctgtgtttgaccgcctcgtcgccgagaccaaggcagacaccacgacagggagtaaacccacaggagtcttcagccgcctgggggccaccccagaaacggacgaggatctggcttgggacagcgacaatgacagcagcagctctgtcttgcagtatgccggggtcctgaagaagctaggacggggcccagccaaggccagtccccagccagcactgactgtcaaagccaaggccacaagctcagcgacaacggctgctgccccgacactgcggcgcctggcgctttcctcacggtctgggcttgagaggaagccggagtccttgtctaaagtcagcatcatcaagagactgggcgcagctgcccttgtgcccgaggcccaggacagccaggtcaccagcaccaagagcccgactgtccgctgcgtccttgccccgacccctcctgtacctccggcctcccagcggccccctcgtcggcggtggcgtcgagcctgttgagactgttagccgccctctactcccaggctggagggacctctccagacccctgggctgcggctgaggcgcatccgttttcctgccctgggcatctgtctctgaaagtgtatggcgggtggtgggcaaggggcactgggaagggaggccagtgcctagagtgaagacagctgctgttttaatatatttttgtgactttcaaaaaaaa

SEQ ID NO: 113320 - DNA, 2110 bp, Homo sapiens
gggaagccgaggcagcgggcagacgagcagggggcggtcggactatcttgggatccggagagtggccgggccggcaggagcagggggccgaggacaccagggtctgttctcagagcgaatgggccgcggagactgatctgccgccatgattggaggcttattcaatctataatcacaagggggaaggtgctcatctcccgagtctaccgagatgacatcggcaataggaggaacgcagtgtaatgccttttcggggtcaaatgttatccatgcccggcagcaaggtgcgcagccccgtcaccaacatttgcttcgcaccagctttctttccacgtttaagcgggtccaacattttggctgggcagcagttcaccaaggcagaattttcaacggttgccatggttcttcggaattccctctataagaatgttgtgacgtgatgggctgcctactttgggcaagattcagcgagggaaaacatcaaggaacaattttgtggttcattatatgagctggctgggatgagattctaggactttgggcttaccccacagaattccgaggacagggcgcgctggaaaaccttcatgcacgcaggcagggcattcaaggagttcaggcttcagacaaaaggagggcagttcacagttcaccagccaggtaacctggccaggtttggttggcggcgagagggtatcaagtatcgtcggaatgagctcttcctgggatgtgctggagagtgtgaacctgctcatgtccccacaagggcaggtgctgagtgcccatgtgtcgggcccgggtgggtgatgaaaaactacctgagtggcatgcctgaatgcaagtttgggatgaatgacaagattgttattgaaaagcagggcaaaggcacagcttgaatgaaaccaagcaagaaccgggaaacaattcaattgccatttgatgacttgcacctttcccacccagttgttgttgcgactccagccaagttttgactcctgaacgccagcattcaggctttatcccgccaagatggaagaagtttgagcttatgaaggtatcgcacaaccaaggacatcatccttcccttccggggtgatcccgctagtgcgagaagtgggacgcaccaaactggaggtcaaggtggtcatcaagtccatctttaaaccctcactggctgggctcagaagatcgaggtgaggatccaacccccactgaacacaaggcggggtgcaggtgatctgcatgaaggggaaggccaagtacaagggccggcgaaaattcctttgtgtggaagatcaagtcgcatggcaggcatgaaggaatcgcagattcagcgcagaggatttgagcttctgcttaccaacgacaagaagaaatggggctgccccccccatttcccatgaactttgacggtgccattcgcacccttctggcctcaaggtgggctaacttgaaggttgtttgaacccgaagctgaactacagcgaccatgatgtcatcaaatggggtgcgctacattgggccgcagttggcatttatggaaacttcgcttgcttagcttgccactaggcagctagcccaacttccccagccacccttccttcaacaggtccagggtgccggctcccttcccccaccacacatcaagtgtctccctcccctccctgctttgcctgcccttcccctttgcaaccaagccccgaagtctagggtctggggccaaagcacaattacaaagtgggggaccggttggaagcaagccccctgggcttcccctggggggcaggggaagttcttaagggttcctgctcatccccatccaacctgtcctgttcctggccttaatgcccagggttttgaagttctgtgacccaaagcccaggtggggttccctttcccttccccacccctgtggccacaagctctgggagtggggagggttggtttgcccctcaacttcagagctcccccaaagggccagtaaatggatccccggcctcagtccctactctgcctttgggatacgtgtgagctttcattttgtaacaagtgtggactttcgtccagtttacaaacccaataaaacttctgttagagtggaaaaaaaaaa

SEQ ID NO: 113321 - DNA, 1670 bp, Homo sapiens
  misc_feature (1)...(1670): n = a,t,c or g
tgtggtgcaattcgcggaggcgcgggtgccgtgctgagagcgcctgcctgtgcgccccgagcggcgttgtggactcttccaagatgcccacgttcgcacagagaccccggatcgcggaagctcgcgtctcgaaaggcctgcggtctcacgccctgcccgtcctgggttcacggtttttcatcacctgcggctgtcctgcgatcgaccacagctgtgcaggaggggcaggaggtatctgttgctgcagttaccggaacctttgccagggattagttacagggaccacgggctggttagcttcagggatgtctcgtctgtgagttacagctgcacgctctccaggaaagaaggaatttcctcttctcttggaaaccccaccacacagcttggtttctcattggttgttgctttgcccattccctgaagctgtgactgccagaggagtgggaggttggtggtgcctccagcnccatcagggggagggccctgggaccgcctgggaaacaggaaggactatggcacaaaccgagtgagtgatgggagcaacccgcagggctctgccacatccctgtcttccttcactgacatgaaacgcagaaaaggcagctttgccacaacacaggagcacgcaccgaatgtggccgcccagggctctgtccttgaccctgttgtccaggactgtttaccaagggctgacaggcactgagtgccccgtgcagcctggccagaagactgcactcatgcagcggaaagagcagtgaacgagactttgtccctggcctccaaaggcttaaggcgtagtggctgtcagaggagacggaggcgaggggccaggagggggacctcttagggggccatgcaaggaaggaagccagaaggaatgaaggcctgcagtgaggatggagtggtcggcctgaagccatctctagcaagtggtcaggacgctgattgttctgcgcaggttggaggtaggtggtgagtctgagaaaggggccggaaagactccccagcaactgctggcaaagggtgaagggcacgttcccacaggattcaagccagctgcctttggaggggagacgggcactcagtttaggcgctcctacagcagggtcagcaagacaagcaggttgcggcaagggtctgcgcactgctgtgtaaatgtaggggcatcggggggcagaaaagaccagggggagaagtgtgcatcacccttggggttaagggacagttgtctgctaggtgttgcttcctggagatggctgaaaagccagtccagtctgcagggaccaggccaccacccacctgatgtgggagcatttcccccaatccctgctgggctgctgaatctgggggacatagggaagctgaggctggtgttctgagtagtggcagagctgagccacagggcatgtctgaggtcagccccgagcaaaatggaatagggactcagggtgggtcaggtaactggaaagcggggactgggcacgcctcccttggagggagcacagggtgggtggggatcccccactggtgtgcagaaggcagcagcctttgggaagcagggtgtgctcctcggtgtggtcgctcgataccagaaaatgactcttaaaaactgaagagtgtttgagtttcattcacacaaaacatggacatcatctgtgaaggctctg

SEQ ID NO: 113322 - DNA, 1767 bp, Homo sapiens
  misc_feature (1)...(1767): n = a,t,c or g
gtgtggccgccagttccctgcaactcagaccacgttatttctgggaaaaggccctccctggaggagaactgaaacttatggtggggactgtagaaaggggcggagagatcacccgcccagccaggagttaagctgaggtcgtctgagccctgcgacagcctggacagcaactcaggatggcatcaggtatgggctcgctgcacccgaaaactccggaactgggtggtggagcaagtggagagtgggcagtttcccggagtgtgctgggatgatacatgctaacaccatgtgcgggaggctctggagccatgcaggcaagcactacttccgggaggacacaagaagctgccttcttcaaggcctgggcaatattaaatgtaaagtataacgagggggacacaggaggtccacctgtctggaagactcgcctgcgctgcgcactcaacaagaagttctgaatttaaggaggttcctgagagggcccgcatggatgttgatgagccctacaaggtgtatcagttgctgccaccaggaatacttctctggccattccagggactcagaaagtaccatcaaagcgacagcacagttctgtgtcctctgagaaggaaggaaggagaaggatgccatgcagaactgcacactcagtccctctgtgctccaaggactccctcaataatgaagaaggaggggggcagtgggggagcagtccatttcagacatttgggagcagcagcagcagcagcagccctgagaccacaaggaagattacagacacaactgaaggccccctttcaaggggatcagaaggtccctggagtttctgccttcctccagagccagactaatcactgctgctcaccttcatactacaacgggcgcgtggtgggcgaggcccaggtgcaaagcctggattgccgccttgtggctgagccctcaggctctgagagcagcatggagcaggtgctgttccccaagcctggcccactggagcccacgcagcgcctgctgagccaggcttagaaggggcatcctagtggccagcaccccccagggcctctttcgttgcagcgccttttgccccatccccatcttctggggaattgcaccccagggntccacctggggccaggcccgcatctgctgcccagcaacgagtgcgtggagctcttcagaaccgcctacttctgcagagacttggtcaggtactttcagggcctgggccccccaccgaagtttccaggtaacactgaatttctgggaagagagccatggctccaacccccatactccacagaatcttatcacagtgaagatggagcaggcctttgcccgatacttgctggagcagactccagagcagcaggcagccattctgtccctggtgtagagcctgggggaccccatttctcccacctcacctctttgttcttcctgtctcctttgaagtagactcattcttcacacgattgacctgtcctctttgtgataattctcagtagttgtccggtgataatcgtgtcctgaaaatcctcgcaccacactgggctggtggagaactcacagggtaattttttatccttttttttttttttaattttgagaaaaacgccctctttcaactgtaaaggggcctgggaatttcaaatggtgttaacccagggggcctttccctcttccctgacctcccaactttaaagccaagccctttatattttccttttagatattccctaagggcttaaaataaaattttattgaaagagg

SEQ ID NO: 113323 - DNA, 1293 bp, Homo sapiens
  misc_feature (1)...(1293): n = a,t,c or g
tttcgtgccgtcgtggctcgttccattctcggcggtggtacctgctcccggtggccctgaggacgtgtgggccaggggcggccccgaaattaggaagcggagggggagcagtctgcaggtctgcgggggctaagtgtcgcggcggcgcacctcgcgtcaagaatccggaggaggagactgcaaggataggcccaggagtaatggagtccaaagaggaactagcggcaaacaattttcaacggggaaaatgcccaacaagaaaacgaaggaggggagcaggcccccacgcagaatgaagaagaatcccgccatttgggagggggtgaaggccagaagcctggaggaaatatcaggcgggggcgagttaggcgacttgtccctaaattttcgatgggccatacctaataggcatattgagcacaatgaagcgagagatgatgtataaaggtttgtagggcagatgatggaaatcaagagaaagactagggaacagcagatgaggcactatatgcgcttccaaactcctgaacctgacaaccattatgacttttgcctcataccttgaatcctaaaagttttcgctgaggttaatgttgaacactgctttacaagcttgtatttttgtgagatacatttttctgtgaaccttttggggtgtacactcttaccagtttatagtggaaattagaattctaagtgaatatggtttttgtctcagcctaaaagttacggtcagcatggcaattcacctattttaggaaaaatactcttttcataatatgaaatgcataaagcagttcaaaaagcagtctgtattccatcatcttcctttttcattccagtccttatttttgtaagtattacttttcctcctccggctacctgggactcaaaaatctcccagttgtcctttggaccagttttttttccttgtcccactgacccaaaaaaaggaatgaatcataccccagaattccaaatgtttgaatatttctaagaatgtaatgttctaagtgttttttcaggagtgagtctaccatctgtattaaaaacaccttgggggggcaggcaggggggcattttaaaaatgtaggacctatcgtccagactcacagagtggggctccaggattctccatttttaacaaactctcttaagtaattctggatgtggtaccaaaatcagtggccattggtgtgtgtgtacgtaactaatatacatatgtgtgtgtgtggtanaatatataatgtggtccataaccgtaaacaataaacaatatcaagataaatctga

SEQ ID NO: 113324 - DNA, 1334 bp, Homo sapiens
ccgggtcgacccacgcgtccgggctcggaggatgcatcctttgcaggacccggtctggtacagcagcagacggagccatctcccggggctttctggcttctccgagggtgttcaggagtctcccaagtgcaccaggggctcgtgcccaaagggtggaggtcggcaccgcttcgctcaatccaggagtggagaaggaagctagaggaccctctgtgaggtggcaggtttaatgtcctgcttttttatttatttatttattcatttatttatttatttatttatttattttgtaatcaactgaaagaaggcaaaaggagtcgataggcctcttaggccggaaaccttacaagcataggaccaaggcagaaaaggtccagagggttcatggtcctccgttccacctgaatccagctagagagcgagccagggggataggtgtgcccctcgtcgcccgtgcgctgaggcactgtcacgcaaagagacattcaccttccacgtcaacgcacctttaagggcgagagcggtccgccgtgcccaagaggaacgggatgacattcaactgggacttgcctcaccttggcttgggggacctcgagagcgggtcccgtgggggacggtgttactcgtggtggtagaagtggagggcgtgtccgggtacttgagttcatgggcatctctcccgccgcctctcagcctatctgcaccatgtctcacacgttcagttgcagctcttaccgttttgaaggcgcacgtgggcaagaagtcctgggcagcacaagaaagtcaatcacgttgagacagagagagcgggagaggaagtgggccccagtagaagtgggcgagagagcgttgggtgggaacgtggcacgagagagagaaattatgagattgagagagagagagagagagagagagagagagagacagagaaagagagagagaaagagaaagagacagagacaagaaactatgttgtttaaaatgccagcggaaagtccatgggggtgaaagagtccggcaatggccagggagttagcagcttggcgtagtgtcttcccactgttttgtctgtcttgagaatagcattcaacgcgactgtgttcccgcagcagacgttaggccgctgcccacgccttgagtgccggacgaggtcaacataggctttccgtcacagaatatgtttgggcaggaagatcggaacacttggggctgggccatctaccgctcccccacggcacacacgagtcgtcagggaaatgcccgcctctgtgtgtgttgtacgtgcagccttctgggcagagccgtggagagttggacgtaggccaggtgtgagg

SEQ ID NO: 113325 - DNA, 1336 bp, Homo sapiens
tttcgtgccgccggatgtgacgcaggggccagggcgcgtcggagccgctgagaaagcgcagagaaggcgggccccgtcttgaggtctggcagtcagagacagccgggcgcccacggcccgagcgcccacggcagcaccatgcccgcactcctggagcgccccaagctttccaacgccatggccagggcgcatgcaccggcacattatgatggagcgggagcgcaagcggcaggaggaagaagaggtggataagatgatggaacagaagatgaaggaagaacaggagagaaggaagaaaaaggagatggaagagagaatgtcattagaggagaccaagtgaacaaattctgaagttggaggagaagctttaggctctacaggaagagaagcaccagctttttcctgcagctcaagaaagttttacatgaggaagaaaaacggaggcgaaaggaaccaaagtgacctgacaaccctgacataagctgcttaccagcagagcctgactgttcacacaggaactcatctcctcagcatgcaggggagccctggaggacacaatcgcccaggcaccctcatggcagctgacagagccaaacaaatgtttggaccccaagtgcttacgacccggcactacgtgggctcagcagctgcttttgcagggacaccagagcatggacaattccaaggcagtcctggtggtgcctatgggactgctcaaagcgcccaccctcatttaagggcgacagcagccagcttattagtcctagtcagcagctcagagcctcttcggcattccctgcagtgccagttacctatctcagcccacaggccacaggcctattgctgtgcaatggccactttcagctcgcactcgagacaggtgtcctccaggctggtggttgccctgtccttgcaaaagcagatggaacatgctaaccagcagacttggcttctccgactcatcctctctgcgctcccatgcacccccaggctctgcatcaaggcccttggactccttgcttccccccagctccctgtgcagatgcagccagcaggaaagtcgggctttgcagctaccaggccaacctggccctcggctccccttcatccaacacagccagaacccgcgattctaccacaagtgaccatcagattatatcttcaacaccacaaccccccaccccatcgtgggtgagggtatcccctgtgtgtcccaggccaataaaatctacctgccactgaaagaacagataaaaacgggctaccactctaaagaacccatggaggggcctagttttacccgggcatgccatgtgatacctacctccctataggg

SEQ ID NO: 113326 - DNA, 1472 bp, Homo sapiens
  misc_feature (1)...(1472): n = a,t,c or g
ttttttttttttgctgtggaaaccgagtggggactttactgatagtgacagtgatgacttcggagagggctgacggccggtacttcagggtgtgtttcaaaaagctgccccctgcanggaggtggtagggaggcggtggggagctgcactcaccccggcctgtcccctccagctcagccagcagtcacactgcccagatttctttcttttcctctgccgcctgctcagcccgctgctcaaggccttttgccaaggctgccgccttcctccgccagggccagctgcccgatactgggtgaagcccttgttcccttgcagtcctcgaggcaggctgtgtctgtggctggggtgccaggtctaaggtcttctctcttctgcagagttgggctacacagagcagctgttccaagttcctgcaggccaccgcccagggaagaagggatttttcggtgagtccccaaccagtcagcccaggctcctgcaggcagtggtgtttgctggtggctgctgccccctgcaggacagtgacaacccaactctaggaaaggcaggctgcagagtacagtcttctgtccagtcggagatctatccctccctgggcttctttaaacaagaggagagaagcctgtgcccagtgtctccctgtcctccctacctagagccttcacttctctcttctttccagagtgtgcagacccaaagcttgccatcagtgctatctggaccttcagagacctaggggtgagaggagccactgtcaccatcttctgtccccctgctcccaccccaatagagtagctcagggaaacccagctatgtccccatcactccacagggcgtgccctgatggtgcctcattaagaccctgggatttacttggtgtcttccagcaacagatttggtgatgggttggagaaggtgggatggtttcctgcctcttggtctcccaaatcactggctcatctttctaggtggggtattgggactgctttgcggcagcatttgcacgcaaacattgaggtctaactggccagaggtctcaaggcaggtttctgggggacaggcctggcccctgggccatgtgtacacagtccctgtggtgagcgcactcacggcttatcttccatggcccaggttctgcagcagacgccggagccctgcaggccccaggctccacctgggtcccctacttttgccagccttggacaatcaggaaaaacttagaacagttcatccggcaggttccttggtaggctagaacctgtgaggaggagcctgtgctgagacttctcagcccgcagaacacagctgtgtcctagagccagaagatggagaggaggctgcaaacccttagctgctctataaatataatcattgaggcttgattgtcccttgccatctcttgctttttcccttctttgatgtgataaacaaggggacgagacgagttgtcttttccccagcccagcagc

SEQ ID NO: 113327 - DNA, 4346 bp, Homo sapiens
  misc_feature (1)...(4346): n = a,t,c or g
tttcgtcggagaggcagagagcccgaaaggaccagacgcccaggtcgcccgcatcccgctgccgcaggagagagacagcgcgccccggccctgctccccaggcttcgcccgggcgccctcaactctgtccccagagactgagcacctgtcctccgcctcggcctcgtgctgagagccctctcctctggagcacacaacaaccctggaagcccaagaagagtcccagccccaggccggctaccaccatggcggagaccaacaacggaatgtagcatcaaggtgctctgccgattccggcccctgaaccaggctgagattctgcggggagacaagttcatccccattttccaagggggcgagagcgtgtgtaatttggggggaagccatatgtttttgaccgtgtattccccccaaacacgactcaagagcaagtttatcatgcatgtgccatgcagattgtcaaagatgtccttgctggctacaattggcaccattttgctttaatggacagacatcctcagggaaaacacataccatggagggaaagctgcacgaccctcagctgatgggaatcattcctcgaattgcccgagacatcttcaaccacatctactccatggatgagaaccttgagttccacatcaaggtttcttactttgaaatttacctggacaaaattcgtgaccttctggatgtgaccaagacaaatctgtccgtgcacgaggacaagaaccgggtgccatttgtcaagggttgtactgaacgctttgtgtccagcccggaggagattctggatgtgattgatgaagggaaatcaaatcgtcatgtggctgtcaccaacatgaatgaacacagctctcggagccacagcatcttcctcatcaacatcaagcaggagaacatggaaacggagcagaagctcagtgggaagctgtatctggtggacctggcagggagtgagaaggtcagcaagactggagcagagggagccgtgctggacgaggcaaagaatatcaacaagtcactgtcagctctgggcaatgtgatctccgcactggctgagggcactaaaagctatgttccatatcgtgacagcaaaatgacaaggattctccaggactctctcgggggaaactgccggacgactatgttcatctgttgctcaccatccagttataatgatgcagagaccaagtccaccctgatgtttgggcagcgggcaaagaccattaagaacactgcctcagtaaatttggagttgactgctgagcagtggaagaagaaatatgagaaggagaaggagaagtcaaaggcccagaaggagacgattgcgaagctggaggctgagctgagccggtggcgcaatggagagaatgtgcctgagacagagcgcctggctggggaggaggcagccctgggagccgagctctgtgaggagacccctgtgaatgacaactcatccatcgtggtgcgcatcgcgcccgaggagcggcagaaatacgaggaggagatccgccgtctctataagcagcttgacgtcaaggatgatgatgtcagacggccgagccgcgtaatagagacagctcaagcagcaaacgctggaccaggaagagctgctggagaccacccgaggagacagcgagaaggtccagcgggagctgagccacctgcaatcagagaacgatgccgctaaggatgaggtgaaggaagtgctgcaggccctggaggagctggctgtgaactatgaccagaagtcccaggaggtggaggagaagagccagcagaaccagcttctggtggatgagctgtctcagaaggtggccaccatgctgtccctggagtctgagttgcagcggctacaggaggtcagtggacaccagcgaaaacgaattgctgaggtgctgaacgggctgatgaaggatctgagcgagttcagtgtcattgtgggcaacggggagattaagctgccagtggagatcagtggggccatcgaggaggagttcactgtggcccgactctacatcagcaaaatcaaatcagaagtcaagtctgtggtcaagcggtgccggcagctggagaacctccaggtggagtgtcaccgcaagatggaagtgaccgggcgggagctctcatcctgccagctcctcatctctcagcatgaggccaagatccgctcgcttacggaatacatgcagagcgtggagctaaagaagcggcacctggaagagtcctatgactccttgagcgatgagctggccaagctccaggcccaggaaactgtgcatgaagtggccctgaaggacaaggagcctgacactcaggatgcagatgaagtgaagaaggctctggagctgcagatggagagtcaccgggaggcccatcaccggcagctggcccggctccgggacgagatcaacgagaagcagaagaccatttgatgagctcaaaagaccttaaatcagaagctccagttagagcttagagaagccttcaggcttgactacgagaaagctgaaagagcgaagaaccacgagaagagcaccaaagctgcaggagctgacatttctgtacgagcgacattgagcagtcacaagcaggacctcaagggtctggaggagacagttgcccgggaactccagaccsgccacaaccttcgcaagctgttcgttcaagacgtcacgactcgagtcaagaaaagtgcagaaatggagcccgaagacagtggggggattcactcccaaaagcagaagatttcctttcttgagaacaacctggaacagcttacaaaggttcacaaacagctggtacgtgacaatgcagatctgcgttgtgagcttcctaaattggaaaaacgacttagggctacggctgagatagttaaggccctggagggtgccctgaaggaggccaaggagggcgccatgaaggacaagcgccggtaccagcaggaggtggcccgcatcaaggaggccgttcgttacaagagctcgggcaagcggggccattctgccccgattgccaaacccgtccggcgtggccactacccagcatcctcacccaccaacccctatggcacccggagccctgagtgcatcagttacaccaacagcctcttccagaactaccagaatctctacctgcaggccacacccagctccacctcagatatgtactttgcaaactcctgtaccagcagtggagccacatcttctggcggccccttggcttcctaccagaaggccaacatggacaatggaaatgccacagatatcaatgacaataggagtgacctgccgtgtggctatgaggctgaggaccaggccaagcttttccctctccaccaagagacagcagccagctaatctcccacacccacggctgcatacctggcactttcagtttctaagagggactgaggcctccttctcagcatgctgcaaacctgtggtctctgatactaactccctccccaacccctgttgttggactgtactatgtttgatgtcttctcttacttactctgtatctctttgtactctgtatctatatatcaaaagctgctgctatgtctctcttctgtcttattctcaagtatctactgatgtatttagcaatttcaaagcatagtctaccttccttatttggggcaatagggaggagggtgaatgtttcttctttctcatctactcgtctcacactgagtggtgttagtcactgagtagaggtcacagagatgacaaaaggaaaaatgggagctagagggttgtgacccttcatacacacacgcacgcacgcacacaaacatgcacacacgcatgcacacacacaaagccttaagcagaagaatgtcttagcatcatgagacagagaaatagactcttcctccctcctctttcacatatagcacaggggaaggtaaaatggaagggctgctaattgagacatataattttcttcatacacccctcaccttaatcaaaggattcaggtgttacttctgccctacaaagactgccttttgcctccctcttcctgttttcccctggactgagaaatgggttgctcaagggaccatttccctttttcttcaagctccttttgatattccctgccccagagctcatgaccagaacccagagctgatttaaaatattttgaaaaatggaggaggcagactgctcccagcagcctgtcaatggctgctcatctgtccatggagatggttacaggcaggtgtagtcaaaatgattgattccttgggtttgggggtgaataggctgggaaatttctgagccnnnnnnnnnngtcacagtgccctcaagttgaagtgatgagctggatttctt

SEQ ID NO: 113328 - DNA, 1682 bp, Homo sapiens
  misc_feature (1)...(1682): n = a,t,c or g
cgctgcggcggtgggaaatgctggcgcgcgcggcgcggggcactggggcccttttgctgagggtgagagcgaggcaacctttccagagggtcaggacagagattacctgggttctccgctggaaaagagcgaaattccaacttttggagaggactggggtcagaggtcatggtccccatgtgattctccagaggatcctagagggtcgtggtttatggagatgccttcaggaccgaggggcggcgtgtctggccagatgggatctctgctcaccctcttctttccttcagggctctctactggcttctggccgcgctccgcgccgcgcctcctctggattgccccgaaacaccgtggtactgttcgtgccgcagcaggaggcctggggtggtggagcgaatgggccgattccaccggatcctgggagcctggttttgaacatcctcatccctgtgttagaccggatccgatattgttgcagagtcttcaaaggaaatttgttcattcaacgttgccttgagcaattcggctgtgactctcgacaatgtaaactctgcaaatcgatgggagtcctttaccgtgcgcatcatgggacccttacaagggcaagcctacaggtgtggaggaccctggagtattgccgtcacccagcctagctcaaccaaccatgtggatcagagcctcggcaaattctctttgggacaaagtctttccgggaacgggagtccctgaatgccagcattgtgggatgccatcaaccaagctgcttgactgctgcgggtatccgctgcctccgttatgagatcaaggaatatccatgtgcccaccccgggtgaaagaggtctaagcaagnatgcacggtggaggccagacgggcgggaaacgggccacaggttctagagtctgagggggacccgacgaagtcggccagtcaactgtggcaagaagggaagaaacaggccccagatccctggcctccgaagcagaaaaggcttgaacagataaattcagggcagcaggagagggccagttgcagttctggcgaaaggccaaggccaaagttgctgaaggcaattcgatttcgtgggctgcaagctttggaccccaaacataattgggagattgcagcagctttcacttgacttgttggccgaagcagttatgttcagcggcgtttttccaaaacttgggccaaggaattcccaaaacactatccctactgccctcccaacccctggcgatgtcacccagcatggtggctgcaggcccatgggtgtaatatggagccctcacccaaagccccagtcccagtgccagggacttccagactcactcttccagtgggagcagcagagatgtcccagggtacagatgcaagtccttgatgagggaacttgattcgagtcaagatgagttagtgggagctgggcttggccagggaattctggggaccaaggaagcagattttcctgattcgggctctagcttccctgccacgatttgggtttgtatttttttgtttgaccgtataatcgtataataaactccaccagtggcaaaccagaaactgtcctctttgattggggaatgaagttgggaaagtcactagcattttccttggatccagtcctgtcagcatgatgcctccatgaataagagtgaacttcttgtaaagtgaaaaa

SEQ ID NO: 113329 - DNA, 1474 bp, Homo sapiens
tttcgtggccttagaacgccgtggcgtgccgcaggacgcgacggctgcagaacatccgccgcaccgctgggggccaacgttgtcggaccgaggagtccgaggtggcgactgagtgagatacccagctgtgcggagctaggacgcggaacatcccagaggccagcatcaacatgaggagagccactgtggtctgaagagatgctactgcctggagactggggtcttaacctccagcctggcactgagccacctgcaacctagcagcaggtgaccttggctcccagcctgactcagctgaacctggatcctgtgcataggcaagagctgactctgagccctggcccagccaagctgacccctacactagaccctacacaccggatggagcttgatgactgagaaccagcccatctgagctgtctctggatcctgctttccagtcatagctgccgctggatttcacatgccaaccagagatgaccttgagatcctggtccaactgagcttaccctgggatcctgaacaccagccagaggagaccccagctcctagcctgggttgagtttgaccctggagcctgtggcaccgccgacccgagctcctggatgcttgtgctgacctcatcaatgatcagtggccccgcagccgcacctcccgcctgcactccctgggccagtcctcagatgccttccccctctgcctgatgctgctaagccaccaccccacacttgaagcagcacccgttgtggtgggccatgcccgcctggtcacgggtgctgaaccagccccagagcctcttagtggagacagtggtggtggcccgggccctgaggggccgtggcttttggccgccgccttcatgggagggcctgggaggtctttgctcgggcccggggtttccgcaagctgcatctcaccacccatgaccaggtgcacttctatacccaacttgggctaccagctgggtgagcctgtgcagggcctggtcttcaaccagcagacggctgcctgccaccttgcttaatgccttcccaagagccccctttccccggccaccgaggaaggccccaaacctgactgcccaaagactggccccaaaggggtcccaagggaccttccattgccaccaccccctcccctacctgagtgcctgaccatctcacccccagttccatcagggcccccttcaaaaagcctgctggagacacaatatcaaaatgtgagggggcgccccatattctggatggaaaaagacatctgaggccatcccagggcaaggaactgtctttctggttcaatagactgccccgacagtctacaagcctcagcccactgaccatacctcagcccctagcccctggggggcaggctttaacctgggcatgtttcctgggtaccagtggggcccaggaggtggctctggctcagaaccgtcagtccggctgaataaaggctctcttgggtaaaaaaaaaa

SEQ ID NO: 113330 - DNA, 2558 bp, Homo sapiens
gagactacatagggctcggcgtggcattggctgcaggggagggaggcagtgatcgagacatcagagacagtcagaggaggagcacgaggaataagaccaaagaaatattaagaaagagataacaggatagacagacagtggggctagagttaaatttatgtatcaaggccatcctggtaagaacagggagcaggagttttaatggaatttatcctggacccccaaggtcacagtgggagggaggatcagggaggacctaaaagcaaaggacaaaggggcctggggctgacccgtctgacttcccgtccgtgccgagcccactcgaagccgcagccatgtttggggacgagatgatttttgatcctactatgagcaagacatgaaaaagaagaagaagaagccttttatgttagatgaggaaggggatacccaaacagaggaaacccagccttcagaaacaaaagaagtgggagccagagccaacttgagggacaaggattttggaagctgatggaaggagggacactagggaaaaaagatgcttctgatgatctagattgactttgaacttctttaatcaaaagaaaaagaagaaaaaaaactaaaaagatatttgatattgatgaagcttgaaggaggtgttaaaggatctttaagatctgaagtgatgttcaagaaccaactgaaccagaggatgaccttgacattatgcttggcaataaaaagaagaaaaagaagaatgttaagttcccagatgaggatgaaatactagagaaagatgaagctctagaagatgaagacaacaaaaaagatgatggtatctcattcagtaatcagacaggccctgcttgggcaggctccagaaagagactacacctaccgaggagcctgctgaatccgagtgttcaacatcatgagggaaaaagaatccaggatattggttgcctgggggacgaaaaaggaaatttggtccatggaaacctccacaagtccgtccgagtaggaaccaagaaaactttcttttgtccacttttacaggatatctgttaaactatttacatcgttcagcccaaagcatctccttggcatttttgttgggctggaattggggtaccaagtggttcttttaggtgggtaataacccaacttgttaattcaaagggaaggttcccaacagaaacaggataggaaaatgtcttgaggaagatatatccaaggaatatgtcacttgtcacaacatgcccgattcaccgggacacaaatcctgccggagggaccaccacggactctattttcctacagtgcggaaacttgtccattctaagatgtttctgttgcccagtgatcaaaaaccggccttccccaggcttttcaccgggcaaagccgaggcacagctcccgtgcccaaagcctaacctaatttgcctaatcactgatttttgcaaagctttgttgtggagatggtggctgggacagggtttgcccatcaagacgtggatataccggttggtattaaaaaacaagataaaaaaagctgccaagatttttgggcgagttggttgggtctgaagtccttgcaaagaccgcctgatggctcaagctggttgacatacctcattggcctacttttaacacctggtccagagaaaccgtgatatgggggtaagggaggtgctgttgtaaaattcgttcatagacttctgtaaaatgcaagatacaattgaagttattattaacagtgattctttcaatttggtttgcccttcagttttcttttctataaaggcgcttggtgaaatcagcaagaaaccaaccatataaaacagtgtgtgccgggctctgactgagaaactgaacaatggcaggcgctttatctgggcagccatttttcttctctgcttctcttgagacacatagttaaaggagacacggcctcccacgcgagtgtggtgggaccttgagacttaggaggattgcctgttttcagtgtccagggaatgactccatagatttgaattcttttccgtatgtggggatggttgctactacctcaccgccaagtcctcccccaagctgttaccacatgaagggaatacaaggtgctaggtaccctccttcctccgtttggccactaaagaggtcttagaaacatagcctgtaaatggtgtcttgtaactggcacactaaaaaagatcctagttgagcatctctcttggtgaggaagcgatgtgtgtgcggttcaggaaactcctccaagaggaggaggagtccaaacagggatgccagaggaagctttccgttttcctagccaacttgtgttctgggtttgaaaaagacccaccacaaatgctttttctattttctgatttaaaagtcgcttttgaatatgaccatgagaaaccaagaaatgctgcttgtgtggtgctctgcttcctgaggatttggctggaaggggattctccgctggcacatgggagaaggccatcttctgtgtcggtgctgcgatctgccttgttctcacttgctgaggataagggcatacacgctggtccttgctt

SEQ ID NO: 113331 - DNA, 2835 bp, Homo sapiens
  misc_feature (1)...(2835): n = a,t,c or g
ttttttttttttgagacagggtcctgctctgtcgcctaggctggagtgcaatggtgcatggtcatggcttgagcctggttaatttttgtatttttactagaaacagggttttgtcatgttgcccaggctgatctcaaacacctggattcaagcaatccgcccatcttgacctcccaaagtgttgggattacagatgtgaggccaccgcgcttggccacgattccgtgatgggtcaaaggaaattcaaaacgtctgtcagctagtgttcagttcaggctgaaggtgaaaaaatttttttaacttgttaaaatattacataacataaaactttgggccgccggcgctcccgaagcccccatttcccgagctggccgctggttgtcgctcgctcagcgtctccctcccgggccgccctcttcctcgggacgatggcgcgcggtggccgcggccgccgcctgtgggttagccctgggcgtgcctgctggcgctcggtgctggcgccgcgggttctgcgggccaagcccacggtgcgcaaagagcgcgtcggtgcggcccgactcggagctgggcgaggcggccccctgaggacaaccagagcttccagtacgaccacgaaggccttcctgggcaaggaggactccaagaccttcgaccagctcaccccggacgagagcaaggagaggctagggaagattgttgatcgaatcgacaatgatgggtatggctttgtcactaatggaggagctggaaaacttggatcaaacggggtgcagaaaagataacatctttgataatgtcgcccaaagtctgggaaggattatgatagggacaaggattgataaaatttccctgggaagaattacaaacaagcccncctatgggttactataccctagggaaacccccgcagagtttcatgattccttcagattcattcacaccttttaaaaaagatgcctgcccaccgtgaatgagagaagattccaaaagcctgccagacctccaatggtgaccctgacagctactccgggaggagttccactgcctttcctgcatcctgaagagtttgaaacatatgaaggaaattgtggttttggaaaccctggaggacatcgacaagaacggggatgggtttgtggatcaggatgagtatattgcggatatgttttcccatgaggagaatggcccctgagccagactggggttttatccagaacgggagcagtttaaccgaaattccggggatctgaacaaaggacgggaagttagacaaagatgagattcgcccactggaccctcccctcaagattatgatcatgcacaggcctgaggccagggcatctggtaatatgaatcagaccaaaaccaggattgaagaaagctaacttaaaagaaggaaattatttggagaacttgggaaccatgttttgtttggaagccaagctacccaattacggggaaggatctcacaaaaaaatcatgatgagctttgatagacactcaccacgaatatggcagactgtcataggcattcctgttattgtcttggattgttgctacaattgtctaatttacagcagtttttgatcccaccaaaaagcaagtttatacctcagattggggtataaaaattgtttttcgctcagtatttactggaaaatggtgacatcactagtctttcagtaagatttctctcaaaacacgtgaaaaccttggtattattgcaattctttctgggggatatattgggtacaacatgacttaaaacttttttttttctaattaaaacttaaagggggaccaaaacttggaaaaaagccctgttcttcaagaaggtgagtgggttgagggaggcagtaatatggaagtgacctgctgtgtattttaactaccaggattttttatatttgccactgttaaatagttggggaaaggggggaaattctggattaagccgaaagtggtatcatcctaggtaagcttatttcataacaagtctaatatttcagattctttcttttcgactttatactctgagttattacttactgtaagtgggtgtatatgaaacctccctggcattttcccagtatggatctgctaatatgccaccagtaaattcccatgtctttgtttgtttttcctattaaaaagcaatccaagaaaagataatgtgaaaaagaaaggaatttagaggtagggaaaagattgaattgtcagacattttgaagaacctatagtaaaaatgataaacactaaaatatacttgaggaaaactttcttaaatatgcccaatgaggtaaggcctgatctttgaaatagtgaataggaatacaatgcatttcctcagtgatcactgattagaatgagttggtgggatctcttgggaagccaaacggagcgggagttcttggatcatgtccccatcccagtccagtgaattccactgaccccgcagacctgccccccccgcaacagcttattaccatgggaatgaggacaaggtgatactctgagctgtggactgaactggcagacacaacctgtacagattgaaattttcaccttgtaaggaggaaagtgaatgaaataaaggatacaacctaaggattttctactgtgtcctgtggtgtttgacttcacagatgctatttgtgacattattcatatagcataaaacagtggggttggatcccatgaataacattataaaggttctggggtttttttttcatccaattactagaatgttcagaatagactcatatttacgtaatttaataaatgtatatacttaatgcctttacttttctaggtcattttaactataaaatc

SEQ ID NO: 113332 - DNA, 1534 bp, Homo sapiens
tggtaagcggcggcaggccggcggttggtgtgtcccgggtgtggggaggcgacagagccctggcacttgagggttgagggggcctcccaagcgcgggcgaaccgtctagcctccggaggccaggccgtgagtgcgggaggtatacgccaaggcggaagaattttgccactcactacctgtgtgacctcgggtaaattatccttggaacgtcagttttcttcgtctctataattgaaataataatagtacctctctcaggattgttgtgagccgtcagtgaaacacttaggagcagtttctgggcacatggtaggaattggggctattttgctggaagctttctttgggtgggccctttgcttaggcccagggaaggaaactttacatttttgattttttttgttaccatgggctttggttcacaaattgctgcgtggtacttattttctcagaaaattctctaaggccaacttctgccttgtatccatttttggggtattcgctttgcaggagtattccagtaggtcttcaggaaaccagtgggcttctcctggggcaaagcctcctcacagagggaaggacttgaagggggatttggcaagggagatcaccagaaagaagttgctttgggatataacttcttctggagggagaagcctgatgtttagttttcgattaaaggcaattaggagatgaagcaatatacctttttagggctttgatggatgaaattgtggatcattggagaggaccggaaggccaccctctgcatgaggtcttgctggaacaagccaaggttgtctggcaattccgggggaaagaagatttggataagtggacagtgacttctgataagacgattgtaggcagaagtgaagtgtttttgaaaatgggcaagaataaccaaagtgcactgctatatggaactctgagctctgaggcgcctcaggacggggagtctacccgaagtgggtactgtgcaatgatatccaggattcccaaggggtgcttttgagaggaggatgtcttacgattggtcccagttcaatactctgtatctccgtgtacgtggggatggtcggccttggatggtgaatatcaaggaggccgcagatttccttcccagaggacgaatcagatgtatagttacttcatgttcaacccgcgggggacccctactggcaggaggtgcaagaatttcctttttcccaaatttttccttcctcctaatccgaggaagaatcccgggatgttccagcatgaagctcccgccttgataagatctccttcctataggattcacccttggctgataaagtgggatggtccattcttccctggagatagattttattggcgtgtttactgatccagctcatacagaagaatttggctatgaaaattctccagagcttaacccaaggctttttaaataaagatcatatggtagttttgttttactaatctaagggtactagcatctacaagtgatatagacaaaataaaatatttctttaatggcaaccaaaaaaaa

SEQ ID NO: 113333 - DNA, 1731 bp, Homo sapiens
  misc_feature (1)...(1731): n = a,t,c or g
ggggcgtccgggctggtaagattgctgcagcagggacatcgctagcctcctcggctccagtcgcccccaaagctggtccctccggttcggggagtgaagaagggattccgcgccgccttccgcttccagaagagagttagagcggcagcgccttctgcggtgcccgccgccgcccgtgcgccgttcagagaagccgaactggggattaccatgcagaaatacaagcttttggacatcggttacaggaaaacttttccgttagatcttcgtcaaaactgcatttgttaatagctgctatattaaaaagtgaggaggccaaacgccaacaacttggggatagagaaagaagctgttcttctgaatccttaaaagtaatcaaggaactatcccgaacaaggggacatctttttttcacagactttgccttacacagtttttttgaagacgagttacccagacatggcccattgaagggcttaaaaaatcttgttgactttctcactggtgaggaagtcgtgtgtcacgtggctagaaacttggctgtggagcagttaacactgagtgaagaattcccagtgcccccagctgtgttacagcagactttctttgcagttattggagccctgttacagagcagtggacctgagaggactgcacttttcatcagggacttcttaattactcaaatgactggaaaagagctcttttgatatgtggaagataataaattcccatggggctattggtagaagaactgaagaaaaggaatgtttcagctcctgaatcaaaccttactggggcagtctggtggcccccacagctttgccctttgtattttgttggccttatactgtgataaaaaagttggattgccagaaggacctggggaanccagtattggttgcagaaagaagaggctgcctcgagtggcccttagaaaactttatggattcacagaaaatagacggccgtggaactattccaagcccaaagaaaccttgagagcagaaaagagcatcactgcccagctagccgccatggatgcagcagcctgaaaacttgagagcgaaagtgagataaatgtcaaaggtgtttcaagcccagacattttcacaattgtgaagaaatagatgttttgtttctgttttttactgtgttcccaaaaactcaaataaatgttaaccaagtcacagtgtttttggttttgtttttctgaaatcttggtttgatcaaatctttttttttttctcttgagatggagtcttactctggtcgcccagggctggactgccagtggtgcgatctcggctcactgcaacctccacctcacaggttccaagcgattctccgtggctcaagcctcccctagtagctgggattacaggcactacaccaccatacctggctaatttttgtatttttggtagacatggggtttcaccaagttggctaggctagtcttgaactcctgacctcaggtgattccacccgccttgggcctcccaaagtgttgggattacaggtgtgagccactatacccgaccagatcaaatctttttttgacatttttgcaaaaaaattttcctaatgttcttgatttaattgtatagaatttgtataattaggtgtattttattgtgcgtctagctttagaggtatcataatttatgtatcttatgtgaattttttgctgtaataccaataaagttttttttctccaaaaaaaaaaaa

SEQ ID NO: 113334 - DNA, 1360 bp, Homo sapiens
ccggattcccggtcgacgatttcgtccttttctagaatctccctaccctgttgttccaggaaaggcatctcccctttctactctaaccagagggtatcttgtacataccctatagatggggttgccttgtgccaagagcctggtgtccatgggttgaggaagccctccctacctgggacttcctactgagatgggccttccctcctttgtactgtgatggcccctcttgcccttgcgccaagagggacccttttctcaggatccacttgcccagggctgttgctgtccatgctgaggttgaggcctcctaggggctggtggcatgcaatctgtctctcttgcccagtgctatgagctgggctctccctgaagaagaaacctgggttccccaagatgtgaccagagctggggccccgccagcaggcgagggaatcccaaggcaggtgctgggcgtggaggccacgggggcatatgctaccaaggagacagagaactgaccccctcgggggcgctgcctctccctcactcacacactgcacgtcaccctgttcggccccggtggatggctggttagccagagacgggtaagattcctcagggaaggaacaacctaagacaggcacagtcgcagaggggccatcaggagagaacttgggggcaacagaggtggggcatggaccctcacccccacaatcctacaggggcctgaaccctctcaccttctgaagggaggtctcctgccccccatggctgctttgcttcccacgcccagttcagatcgggaccccaggtagcagacagagaccctggccaacagcaagtgccccactcacccacagcaaggatttgtttcctcatttcctaccttggaccacagggatggggcagctgaaagaaagggctgtgtcagggtgtctttctcccttttctccctcatttttctagatgcttttttgccttgtagttctttctctttttctttgctttctctttcctttttctgtctgtctcctatacctccccatctctcccttgcccctgccccatcttgcctttttctctttttcctccttttcctttcttattcctttgcctctcctcttcctgagccccacctgctcatctccctgccccaacatcctgtgccatccctgtggtgtgtttgggtcttggccaccgccagacctggcagaactgatggatacctggtgaggcagcggagcccctgggctcccaccccattccctcctcccggggctgcacaggtgagtatgtggaatgtcaggtgggcagggaggtgaaagagatccctccttttatactcgctttctacttctttcccttgccctcccgccttccc

SEQ ID NO: 113335 - DNA, 763 bp, Homo sapiens
cgtactgcttatattatctctaatatatgcttttttgctttctgagtctttttacttctgggtatgcctagactaaaagataaagtccaggctcttcagtgtgctgttgctccatatgcttttctaactgaatcctccaccttttttacatcttttatgtaggagaaattcattacatttcaaaatatttttcaggcccagcagttctagtactttatgtgcatcataagcattattttacattgatccaactagtgattatttcctccacagttgtttatgcccccatttgagcactgtgagccatgctaggcatgatggagacaaggatggtgggagtgtcatctagggcttcccaagacctctctcccagtgggtttgatccattattgtttacctacccagcactgagatttctagctcttgagattccttttcagaatggtgtaaggggccaggcacagaatgggctgaccataatccaagtgctttgggaggcctaagcaggaggattatttaagactaggagttccatcatcaaagggagaccctgtctacagaaaaaatttaaaattagctgggcgtggtggtggtggcggcccgtttcctgtaatcccagctatttaaaaggctgaggcagcctcgcttaagcccaggagttcaaggtaagaggattatttgagcacgggagttcaggctgtagtgagctgggattgcgccactgtattccagcctgggagatagaatgagaccctatctcaaa

SEQ ID NO: 113336 - DNA, 4459 bp, Homo sapiens
  misc_feature (1)...(4459): n = a,t,c or g
tgttcccannataggtgantcccgtgnagtcctcngcagngtgcnggaanncccggcccgagcgagcgggggagaccgtgcccccgcctcggccccgcgccgttttggccattcccggcatggaggaggagtgccgggtgctctccatacagagccacgtcatccgcggctacgtgggcaaccgggcggccacgttcccgctgcaggttttgggatttgagattgacgcggggaactctgtccagttttcaaaccacacaggctatgcccactggaagggccaagtgctgaattcagatgagctccaggagttgtacgaaggcctgaggctgaacaacatgaataaatatgactacgtgctcacaggttatacgagggacaagtcgttcctggccatggtgggggacattgtgcaggagctgaagcagcagaaccccagggtgggtgtacgtgtgtgatccagtcttgggtgacaagtgggacggcgaagggctcgatgtacgtcccggaggacctccttcccgtctacaaagaaaaagtggtgccgcttgcagacatttatcacgccccaacagtttgaggccaagttactgagtggccggaagatcccacagccagggaggaagcccttgcggggtgatggacatgctgcactctatggggccccgacagggtggtcatcaccagctccgaccctgccctccccgcagcagggcagcaactacctgattgtgctggggagtcagaggaggaggaatcccgctggctccgtggtgatggaacgcacttnccggatggacattccccaaagtggaccgcgttctttgttgggcactggggacctgtttgctgccatgcttcctggcgtggacacaacaagcaccccaataacctcaaaggtggcctgtgagaagaccgtgtcctaccttgcaccacgttctgcaaggggaccatccagtgtgcaaaagcccagggccggggaaagaagtgaggcccagcccccatgcagctggagctgcggatggtgcagagcaaaagggacattcgaggacccagagattcgtcgtcccaggcccacggtgctgtgagggccccgccgcttcgcccgtgaacacgcaggcgtcgttggtgtctccgtggtttgtccctgtgaaaacatgtaacgtctgccttagagccatgaccgaaacttgatatttttttctttcatgagtgtccggcatctgctggtcttcattgtgaaacgtgccagtcgtgctttgtgaaaaataacaaagtggtcacagaaatttgtgatctgaaaacccggctcccttccccacaaggctcctgggcctccgggaagacgggcccctgtttgccatctcgggggtgttccctgtgggagggtgagtgggtgaggccgagcctgctgcgtgtggagcctcgagtgggccctggctgccactaccgtacagaggccgtgtcgcgctgggctgggcctgggtggcctctgtctttgcatctctgagaaggagtcgggtggtaacggttggggtcaggaagaattctgccaagtatctttactgtcattctgaccatagcctctttgttcccgcattcgaacttttggttcttactttgctgctcgtttagtccctggggatttcagatcttaggctgttgtttcaccgtatgggagggttgatgtgagcttgcttggagacacacggtgcagcatcagggaccttcccaggccccagcaaattcaagtcggtctgcagacctctcagctacccgcgggacctcttgtaacccatcggcatcttccaggaatccgccgagtgacttgaggaagatgctaacgcagtaaggtctgtgctgggccaagagcagctttgaagctccagagaaccaccccgtcaagtttcctggtggaagctcccctcatccgtggtgcagcaggctgagcactgcgcgtttgccacgtgctgcccgtgacagcacattgagccacagcatttgtagacaggacagaggggtgcctgccccctgcccctgctggcacatttaacccttgtcccctgacctcagttctgtgccccaccaaatgcccaggggcaaggaggccaccctggaagctgccaatcttccaaggtgggtgtggggcacggtgggggcgggcagctcccaggcccttgggcaggctggggttgacggcagaggccacagcaccagcttttgacaagtcctatcatcctctgctcagcagtgacctccctggccccactttgcccagagtttggggtccccccaggtatagctataggcggcagtgcctgtccctggcctgccttgatttcagccacacccctgcagccctgcatcccagctctggggtgtgcagaggtttgtgtctccagggaacccacggctggagagaaatagggagatgcaggaagtgggggcccatggggcccccaagaagcggactctccaaggggtacccccaccccgctaccttccccacggacgggcccctcctggagcccataccctcctgtgaggccattccagtgtcttctagaaagactcgcttgccaggagtgcgttctttgttgaaaaatgccctgaagcgaaaagatgcaggtttatatggaacccccaccccctcccccactctcccactctgttcgttcctgaatgttcttcacgaagcgtgcatcagggcgcctggctcccccacctcagccagtgaagtcagaacacgggtttcgcagccatgtttcctggctccgaggacacgggtggcaggcccgttgcagcccagagccactggtccctacagggcgccgccacaccagcaggaaggaaggatggctgtgtccggagcctggcggggaggcggcctccccagtatgtgaagtgcagggatctgccagaaccacctggccctctgtagggcgtttaactggaaataaccctcactgccaagtggagactggggcgtgtgccacattgccagccaccaggaaagcttttctttttcttttttttttttttaaacaccaagagcacgtatggcatgggggaaagaacctaaatgtctctctgtcctgtgagctggtgaaaaacccagcatgagaacgcagtgtcaggtgtgggactccttctgcccctgcagtgggtgttacgggcggtgtgccctggcgagcaagctttgattcttggttctttgagctcgtttcagaggctgagtccccacatcagctttagttcttggacttccctgtattaagcaagaattaggagaatggctgtccctgcaggcgcctcccgtaaatcctgagctctctggcgcaatctgaaacttctcttctgttttctttggctgtatcagccgaaccaggagaggcctgggctgcgactaaggagaaagaaatcgggggtttctgagagcagatggtgcctttgtgggtgcagggcttttgtggaaattgtcagcctctacgggcagagtccggcatcccctccccagactgcctgctgtcaaaccacggagcagctggagcctgccctgtccacggcccgtttccacccgggcatgttcgtctctcatgacttcggcagaggcccctggtggccttcagtttcagttttctccatcccaggaaggtaaaccttgggcattggcagtgggtttcccctatgggcttggatcccagattagaattgatcctttgttttcactttcccatagttaattaacatggcaaaataatgagaaggaatttattttaaggtgacagctatactggtcccaacatcgcctgcttattgtcaggggtacagaaggtttaatactttcttaatccagtttttcaaacttctccctgtagaccgtaagattgaattccacaataggatcctttttaaaatcgattttaaattgttgcctagtcctgccaaggttattatgtgcatctgttatttttccaatacatgtaaacagttgcagcatgatgctttgtttaatgtcctgttcttaagctcgttagagccagttttgaaacgtttggtcttaccgggaacggaggctggcttggcttagccacgctgatgagtaagtgagggatgtctccatcttgagatcaccaggcaagagagttgcctgcaccaggtaagaggccaaagcccctggggtaacagtccccaccgctacccgaggtaaaacaataaaagctatgtggttgagctcaggcctctcgtgcctggtgtcagagaaggcagagcccacagtaggtgcagggtgcaaggccctgggagggcactggccagggaaggtggtatagatggccctcagattgcggggccccgagcagctccccactctgcccgtccaccttccctggctccagcctcattctctctttagtttaactatgcaaagagaggaggttgagagtgttctggcagctgg

SEQ ID NO: 113337 - DNA, 1513 bp, Homo sapiens
  misc_feature (1)...(1513): n = a,t,c or g
ttttttttttttactcaaagttaacctacctgtaactttttaaaaacttgtaaaataactgaccctcccttcctgtccgccctcttcccctctaatgctcacgctcccaacacaaggtgggcagggaggcaccattcaggaacctgggaccaaagctgaccgaggctggggccaagccaggggatggggccacagccagaaccccgagccctacttccagggttctgggttagctcagccccaagcccagcccacgctgctctgcccagagctggggtgagtgggggagacacctcagagccccgcaaaacccacttgaccggagggcaaaagggcagtgggggcttgggggtagtttttccatggggtcacagagaactagttgggttggctctgagaagggggagggaccctctggggctttgattccatctccttgggcttttttctttgtttttaggaggaccagggggtcctgctatttcccaagctagagtgcagtggtgcgatcatggctcactgcagcctcgaactcctgggctcaagcaatcctcctgaagtgatcccatttcttaatcagtgttagccccaagaaggctggggctatttaccaggggtagaaaaagggagcttacctcccaacttttggtcctaagtccctgccccctccccggntacaccaataattaggtaacagtttgataactagggaagaaagcaggaacagttaagcagccgcccacatcccccgctggctggggggcctcactccagggaaggggctggaactggcttgtcctttcccagtggccttgctccgctgtgtggatgggggagatcgggggccagagcaaaagggggaaaanaaccccnccccctttggggnggttgaaggaaagctccaagtcctgctctctaacccaagcccatcttgccctcccatgagtgcctctggaaggcctctgggcctccctcctaacaggggctggtgggcacccaagagcccaatgggagtagaccccctggctgggtaaggggcaaagttccaaccggttgccttctgggaaggggtttctaacacttaagttgtgtgctgtggttccctggnggtgccctccactgccctctgttcagtaacatgggccttgctaatcggcgttgtcactcaacaaaagtgctttggatttaagttactatcctggctttgcccaacctcaagcaacctggtaggactggtaattggaataagtcatgttcatcctaaaaaaaagaaaagagagaagctgttggttctcaatggttgtgtagttaagcgccttcaggtggtgcagttttaggcgtagagtgcatatctgggtttccgaggcggtgaacatcgtgggtcaatagggttccataagtgaaattggtttgggcggtggccaaatttcgcggtgttgtgcacccggagttgtatggagttttgcgaagggaggacagtgtttctgaagggatgcgttgggtggctagctag

SEQ ID NO: 113338 - DNA, 1245 bp, Homo sapiens
ttttttttttttagagtaaaaaaggagtttatatatttataaatgccaaataaataccagaggccacccaacgccccctcccagaacagggctgtctcccaccagccctaggcttctagggtgtgagacatcttggccccaagctatagcccaagagcagctcgtcagtctcgtgctaccagggaactgagtgaggaatgatctgtcccagccaggagtcacgtggccctctgtgtgagggggcccccataagccacaggcctggggtccctgtataggaccctaagggttgaaagactcagggggaggaaggtgggccatcttcgagtgagaccccgctgccacagctccttgggtctgtttgctgcgcttggaggttctgtagggatgttcgttgaactgcatcatgcccatgggcgttcagggcagaaggcgctgcgggcactccggatcgcattcacaaagtcgtcgtagtccgcaggagtcaggtgaatcaagcggtggtggatgtactgcatgtatgcatgctgtcagcgctgcaaccagttgggtggaagggccggggcacgcaggtggtttgtgggcatgaagcgggactcaagccgctgcagcgtctccattgacgatctcctgcagcacaaacgggctcagcacccccttggctgcccccacacagaactggtgcacgtagttcactacccagctttgctgccagccccagcaaccatttgacatcatcagtgtaggggggggagcgggagaagttgttggggtgatcgttgtgtgcccggcgacccagcatctccagtgcccagcattccgacacggtaggcaagcatgcaggtgttgcaggctgtggggattgactggctgactgtgtgtctcctcctcgggcggaggaaaacctccgctcaccagagggctgggctgtgtggtcagggcaggcagtgaggcaccttggatggctggaaacgtggatgctggatggacactgctcaaggccacactggtgggcagtggaagccctggctctgtgtggtagggatgtactgtgatgggtgccatggaaggacgggggaaagacaccagcaatgggcagcaagtgaggggaggagtcactgaataaagggacctgagccccttaggaaatgcgcgaaggcccaccttgggggtattcagaacctgggcccaggaataacggaagggccggcattgtaaggctatggtggccgggtaaacttgtag

SEQ ID NO: 113339 - DNA, 2942 bp, Homo sapiens
  misc_feature (1)...(2942): n = a,t,c or g
gcggccgcggagagagctgcggcccgggggggcgtgcctgggatccggagcttcgctcgggcccgggaaaggcggcagtgggctgggatcgcggtgtctctgggtgtgatggccaatggctggactggctcccgccctgggcggaggaatcccgagctgtgaagcggctggaatccgggcccatgtgcttctttgtttactaagagcggaagcgatggcgggagcgggggtgggggtgcggtggcggggttgttttggcggatgtcccggtgaaatcaggggctaaggggacccaaagaaggcgggggatcataggggtggaaagaaagctgataaccttgagaccggagtgtgaggggccaacggggaagggcgctagaattttaaactaaagtagggaccggaattcccctggggagatgttggatggccctgtgcactgccacgggctctttattcttcgctggttagaaacagacttgtgaaaaagagttatgcccactttggggagacttcgaaaaggttaagaagttcttacaagagttctaccaggatgatgaactcgggaagaagcagttcaagtatgggaaccagttggttcggcatggctcatcgggaaccaaggtggtctgtatgtggaccctggacgacgtagccgaggatgaccccggagttggtggactcaatttgtgaagaattgccaggccgctacgcgaagcttntgttgcttgatgcccgtacaagagctgcttgcctcaggtacaaggagagggaagtggtaaattaaagatgtccttggacggtttacatttgagcatcggctaaatgatggagcagcggagttcgggaccctggggatggtccgaagccctccagaaaccagtacccctgctgaactcatgcgcagattttgagctgtattttcaaggccctagcagcaaccaagcctccgtgttgatccgggaagtgcgggctgactctgtggggaagttggtaactgtgcgtggaatcgtcactcgtgtctctgaaagtcaaacccaagatggcgggtggccacttacacttgtgaccagtgtggggcagagacctaccagccgatccagtctcccactttcatgcctctgatcatgtgcccaagccaggagtgccaaacccaaccgctcaggagggcggctgtatctgcagacacggggctccagattcatcaaaattccaggagatgaagatgcaagaacatgtgagtttgggagtgatcaggtgcctgtgggaaatatccctcggtagtatcacggtgctggtagaaggagagaacacaaggattgcccagcctggagaccacgtcagcgtcactggtattttcttgccaatcctgcgcactgggttccgacaggtggtacagggtttactctcagaaacctacctggaagcccatcggatttgttgaagatgaacaagagtgaggatgatgagtctggggctggagagctcaccagggaggagctgaggcaaattgcagaggaggatttctacgaaaagctggcagcttcaatcgccccagaaatatacggggcatgaagatgtgaagaaggcactgctgctcctgctagtcgggggttgtggaccagtctcctcgatggcatgaaaatcctggggcaacatcaacaaaatgtctgatgggggatcctggtgtggccaagtctcagctcctgtcatacattgatcgactggcgcctcgcagcctagtacacaacaggccggggctcctcaggagtggggcttacgggcagctgtgctgaggagactccgtgagtggagaactgaccttagagggtgggcccctggtgctgtctgaccagggtgtgtcctgcattgatgagttcgacaagatgtctgaggccgaccgcacagccaatccacgaggtcatggagcagcagaccatctccatttgccaaggccggcattctcaccacacttcaattgcccgcttgcttccattctgggcttncccgccaaacccttgccttacgggcgctttacaaacccttcgccgcagcttgggagcagaacataacagctacctgctggcacttgctctcccggttttgacctcctctggctgattcaggaacgggccggcccgagtcaatgacctacgggttggccaagcacatcacctatgtggcacaggcacagccgggcagccccccctcccaggtttgaacctctggacatgaagctcatgagggcgttacataggtcatgtgccgcgagaagcagcccatggtgccagagtctctggctcgactacatcacagcagcataacgtggagatgaggcgaagaggctttgggcttagtaaggatgcccacctatacttctgcccgggacccgtgctgggctatcctgcgcctttccactgtctctgacacgtctgaagaatggtggatgtggtggagaaagaagatgtgaaatgaaagccatcaggcttaatggaaaatgtccaaaggacctctcttcttaggagacaaaggggcaagacagcttaggactccagagacccagcagaatgtgataatttgcccaccgtcccgtgaaactggtcctccagggggcccgaaagtgtcccggttcctctgaaggcagagcaagcgctgtggtatctccgtggcttcacaccccgcccaagttccagggcggctcctggatgaatatgagagctccaaatgtctggcagggtcaatgcttcccggacacgggatcacttttgtcttgattccagcctgcttgcaaccctgggggtcctctttgttcccttgctgggccttgccccttgggaaggggcaatgaatgcctttgaggggaaaggaggagcccctctttctcccatgctgcacttactccttttgctaataaaagtgtttgtagattgtcaaaaaaaaaa

SEQ ID NO: 113340 - DNA, 1667 bp, Homo sapiens
ctgaattccccggtcgacgatttcgtttccggaacccggggcgcggcgcactgcgcaggcggtttgactccgcttatgtttccggtgcggcgaacaccaaagtccgggaacttaagcattttcggtttctagggttgttacgaagctgcaggagcgagatggaggtggacgcaccggggtgttgatggtcgagatggtcctccgggagcggccgaggctttagcgaagggagggaggccagaacttccgatgtgaggccctcaagtcctggggccaaatggggcttccccaaacactcctaactgggttggaccctctggcttttccatcccttttccgatgtggtggtgtttctcttttgtggaattttttgccaatgacttgtttccgctgaataatctaaaattaaagaaagtttggttcttgaagtgaaattctgaaaaatgggctaccaaacttctttgaataaaagaaggaccaggactcctccaatgagaaagaatttccacatcctcccaaaggggaccccttccctttccattttacactttggttactaattttgccagaactcctatttaattggggtaggatttcaacccattcctagcttaagttcttaaaaatttaaaccctttgggttccgtggttaaaaacttttcaaaccatctgatgggcttttacagggggctgaatattaaaaggcattttgtacttaaaggtcttgtgtattcattaagaaatatagtaatgtcttttaatggtttttaagagttgatcaggggtttacctatggatggcaagtaatagggatgattaataaggggaaggtttttatggaatttcaaaagtcaatttatttcaaaagcagggaaagattttgagagagggaacaaagtattcttagattgcgtaaaagctgctaggttccacgttctaatttttacgtttagttggactctgttatgaaaagatatgctatggctgggcgacaagggtgatacagtcttaggaaaaagcaggtaatatcaaagtattgggaaagctagcatgcatgccctcttacctggggtatcttcccccttttttccttttaaactcttgagcctcctataacgaaggattatgtgtttcaaaccttttttttttttttactgtttccattaagtgtgccttgtgccccaaaatatttaccttgtataataatctgtaaacttgccttaaataccttccagcaaagtccaggcattttttaccctcattccaaccaaatatttggaccccccggcattattttaggaccacagcagtgaacaaaacaaaaaaggcattccttgcccttcatggagcttacattccttattgttatttaaatctaaatgttataaaacaagaatttatattctagggttgatcagctagtatttaatcaaaaaggccacactcccgatagcagctactctaagctgtagtagctaataaaaaatattaatgttggccggggcacagtggctcacgcctataatcccagcactttgggaggccaagggtggtagatcacttgaggtcaagagttgtgacaccgagcctggccaacctggtgaaaccctatctctattaaaaaatacaaaaaaatacaaaaaattagctgggcatgttggcatgca

SEQ ID NO: 113341 - DNA, 425 bp, Homo sapiens
  misc_feature (1)...(425): n = a,t,c or g
ntttttggccaaaggggaaaaggggggggaaccgcctttttgtagcctttttctaaaacagcctagggctgttttttttgccaaccatgtttccttttatttaaaaattccccctccccgggttttttttctggtccccacagtgtttgcaaaaaaccagcccccgtgttttggccggggaatttaaccaccaaaatagccttttccgtttcccttgttttccccatgtcccccccctggttatatgccaaaacccttttggtttcccaannnnnnnnnnnnnnnnnnnnnnnnnnnnnnnnnnnnnnnnnnnnnnnnnnnnnnnnnnnnnnnnnnnnnnnnnnnnnnnnnnnnnnnnnnnnnnnnnnnnnnnnnnnnnnnnnnnnnnnnnnnnnnnnnnnnnnnnnnnnnnnnnnnnatgtatt

SEQ ID NO: 113342 - DNA, 1574 bp, Homo sapiens
  misc_feature (1)...(1574): n = a,t,c or g
ctctgcaggagcggtcagtgacgcgatggagcgggcaaggagacagggtctggctatgttgcccaggttggagtgcagtgatgcagttatagctccctgtaacctcaaactcctggttcaatctagactcctgcctcagcctcccaagtgcctgtnagtacaggcttgagggatcgcttacacctgagacgaactacagaacagcacgtaccagaggtggaagtccaagtcaaacgcagaaggacctgcctcactgagcaaccaagagtgtcagttgtaccccgaggcgttctcagcaagcaagcaagtacctgtggtgggatttccaggcctgaacttgaggcaggcattcttaagctgagacaccaagagggtggtttaaagccattatttggaggtagccgaggaatctgatttccaagcaaaaaccaggcttccatcttactcttttgaagcttctgccccagctttgcatttgtttcttaggggaacccgcgttcataccttttatctatagccttccccttaggtcttcagaaagcattcaaagtttttaactgtgggacattggattttggttggaacagcaatcatgacttgtttggcaagagtaggcaagttgctgcagcaacattgactatagaaatgagattgtatcctgcaagattggccgaatccttcattggcaccttttaaggcttttgacaagcatatgaatttgatcctctgtgattgtgatgagttcagaaagatcaagccaaaggaatgcgaagaaccccagagcgtgaagataaagcggttttgggttctggtgtggctgcgtggggagaaccttggtatcccatgactgtggaaggggccaccccccaaaagatactggcattgctcgggtaccacttgcttggagctgctgagggccctggggtttggtagggcaactggtaaagaagtaccagctgggtgtgccaatttccccaggcccccttgctggattggccaggccctgttcccgagggagtttngggggaccattccccagcaggtaatgacttccacagggaaagaggcactgtaagcagctgctgctgttgcctgcgactgccagtatttgcgtggagccccaaacacagtacccacccagggaacgggcactccggcccccaccccgtcgggcagagcaacccccacctccagggcattatggctcctccaccatggtatgagaccaccccatgggcccaccaattgggcttcccccctgctcgagggacgccccaatggcatgccgcctccggggaatgagacccccctccaccaggcattagaggtccacctccccccaggaatgcgtccacacaagacacttagcatactgtttgatccatctcagtcactttttcccctgcaatgcgtccttgtgaaattgtgtagagttgtttgtgagcttttttgttccctcattctgcattaataatagctaataataaactgcatagagcaattaaactgtgcctcgtgccaagcttggcgtnntggtggttcggacgatactcaggaggtttcaaaggggcccc

SEQ ID NO: 113343 - DNA, 1743 bp, Homo sapiens
caggcctggtctctgataacgggatgggtggtgctggacctcgggcggggccgggcctcgtggcgggaggaggcagggcagggcctctgggacggggctggacggcttgttgacggaaacgagcccttgacgctgtggcccggaagtggagcggctgtcgcagtgcggctccggcagtggcagcggaggcctgtgtttgcggccttcggcaagcgactgagatggcgagcgcaactgcaccctgcagccgcagtccccacccctggcttcgccctttggagcagctccggcacttggcggaggagctgcggtttgctcctgcctcgagtgcgggtcggcgaagcccaggagaccaccgaggagtttaatcgagagatgttctggagaagactcaatgaggcagctgtgactgtgtcaagggaagccacgagctctgaccatagtcttctctcagcttccacttgccgtctccacaggaaacccagaagttcttgttgaacaagtccatggttgccatcaaggcattttatttgcagtgtactatttgcttccaaaggatcaggggatcaccctgaagaaagctggttacgggggcgccaccctggacatcgtggatgggcatggctcagctcatggaagtactttccgtcactccaactcagagccctgagaacaatgaccttatttcctacaacagtgtctgggttgcgtgccagcagatgcctcagataccaagagataacaaagctgcagctcttttgatgctgaccaagaatgtggggttttgtgaaggatgcacatgaagaaatggagcaggctgtggaagaatgtgacccttactctggcctcttgaatgatactgaggagaacaactctgacaaccacaatcatgaggatgatgtgttggggtttcccagcaatcaggacttgtattggtcagaggacgatcaagagcatcataatcccatgccctggcgctggtcagagcatcaaaagcctgcctgaagaaaattcggatgttacgtggcagagaatgggaagaaggatcaggtggccacagctgggatgacattgtgggatatttctgattgaaatcagccctagtgtgggatgatttgggctcctgagcatatatcccacctatgtgtcaccctgaccggtgcgaatcaatttctggcgaaacttgtattctgttttaaagaagggcactttgaaaattaccaaaagcaagtcatgttgacccctcagccagaagataggttggatccctttaccttatttaatgcccatggatcatggccatgaatggaatccagggagctccactccaggagtgaacttgaaattatggaccttttccaggcctccatttggtactctcttccccctctccatcgtccatggtccaggctctgataccctgccttttaaaatggagcctagaatgccttgcctggattgaaaggggagtgccctatcctatatttagccaagagacactattacccaaagattgttgggttagggccagattggacacctatttataaacccatatgcggtatatttttcctgtgctatatatgaaaaataattgcatgatttctcattcctgagtcatttctcagagattcctaggaaagctgcctttattctctttttgcagtaaagtatgttgtattcattggaaagatgttgatggtctcaataaaaagctaacttgcccagtgattaaaaaaaaaa

SEQ ID NO: 113344 - DNA, 2893 bp, Homo sapiens
ggcctgagaaaccgtcatgtttctggggagtcacctcagctggcagttaccaccgtgttagaaagcagcctcaggaccggccacctccatcactggcgtcaccatgggggctgtgctgggtgtcttctccctcgccagctggaaaatcctggtgagttgaaggccaggcatggtggctcacgccaggatggtctcaatctcctgacctcgtgatccgccggcctcccagagtgcttggattacaggttccatgcctctgcagtggtgcctcatgtttgctgtgtagttgctgtcctaacagtaagaattccacggtgactcgcctcatttatgctttcattctcctcctgaggcactgttcgtatcctatatcatggcagaggaaaagagatggaaacttacttgaagaagattcctggattttgtgaagggggatttaaaatccatgaggctgatataaatgcagataaagattgtgatgtgctggtttggttataaagcttgtgtatcgggataagctttgcccatggccaatctttttctttgtcttttctctgctcatgttcaaagtaaaaacaagtaaagatctccgagcggcagtacacaatgggttttggttcttcaaaattgctgcccttattggaatcatggttggctctttctacatccctgggggctatttcagctcagtctggtttgttgttgggcatgataggggctcttcctcttcatcctcattcagctggcgctgctggtagattttgctcattcttgggaatgaatcatggggtaaaatccgaatgggaagaaggaaacccaagggttgtgggtatggctgctttaactgtctttccacaaggcgccttttatatcctgtcaatcatctgtgtcgggctgctctatacatattacaccaaaccagatggctgcacagaaaacaagttcttcatcagtattaacctgatcctttgcgttgtgggcttctattatatcgatccacccaaaaattcaggaacaccagcctcgctccggcctcttgcagtcctccctcatcaccctctacactatgtacctcacctgggtcagccatgtccaatgaacctgatcgttcctgcaatcccaacctgatgaggctttattacacggcatgaactgcaccaacccgggctccggggaaattcaactggctgtgggtcccttacccctactccaccattcaaaggagtggggtctttactgggatttcaggataattttattgggactgtttggcttttggttctctgcctcttgtattctagcatccgcacttccactaatagccaagtaggacaagctgaccctgtcagggttgtgacagcgtcatccttgggtgatacaacttaccagtgggtggccagtgatgaagaaggatgggacagccttcggcggggctgttgggacaacgaggaaagaggggagtgcaagtatagctactcacttattccacctgccatgctctgcttggcttccttgttacatcatggatggaccctggaccagctgggtacagccctggatggcaaagtttcagagcatgaccaagcaagtggcccagctgtgtggggtcaagatccagctcccagctgggttctgcctccctgcttttacgtctggacccccttgtggctcccacttgtccctcacccagtcggggacttcagcctgaaccctctggagttgcccaagggacccccactgggacctccacaaagggtcctcccctccacccgaaaaccccctatacccctttaaggtttggtttccaacctaaaatattaaagtgaaatgcctttgccaagtttgacctgtatgccagggtttatatcaagaaggtgagattgaataatgccttgatgccagaacccgaaacctccctcatttaacctgtatattatgtttaccttcctaaggatatagcacaaagggaacatttttttgtttaaagtgaacctacagctgtgctgtggaaggaggagttctttataaagcctgtaggttcttttaactttggtttaaaatgtaagataggaaaatgttggatatttgaggccatgcttaatatatttatattgccagtatcctttaaaagcaaaaaaaaaaaaaatgcatttatattacagtttttcctctatgaaaagtcccttacttaatatgatacaagcactgtgttttggtgcttaaactcttcagcgggggaacatcaaaagttcttgggggaaggatcgtatatgggggggcccttccctaaaaaaatggttgctgatatggctactgcttctacatcttgagttttttaatttactttttttacactgtagcattgagactgcttgattcaagtctggtgctttgccagatgtattaattttccataaatgctttgtgatgtttggttaaaatgaaagattcacttgggaaaacactgcaggctttagtctgtgttacctatccttgttatggagtatgtaaaacgtaaaaatgcatgtgaatttatccatatttgcacctatgaaggtatttgggttaaaaatacaaaagactttttaaagatttttaaggcccctttcttcccaaccagcttttatagttagccagcccattcttttattttctgggatagccagggttttatcacgctttctagtcaggatgcctcctattccttctaaaaaattacggtctgacttagtgaggcaaagtcttgaatttattcaaaaagtcctaaataccttctctaggtaagacacttggtagatgagagacggaaggcattgtcaagaacccattttcatgagagatggtgtgacaaaaagagctagaataaaagagttctttcaacaaagaaaaaaaa

SEQ ID NO: 113345 - DNA, 2611 bp, Homo sapiens
  misc_feature (1)...(2611): n = a,t,c or g
gtgcgcgagcgctgcccgcgcggggaccacaacccaagtcgcggccgccgcagccatgcgctgggtgtgggcgctgttgtaagaatgcgtgccctggcaggggacgcccgagtacatagagcacttcagcaagttctccccgtccccgctgtccatgaagcagtttctggacttcggatccagcaatgcctgtgagaaaacctccttcaccttcctcaggcaggagctgcctgtgcgcctggccaacatcatgaaagagatcaacctgcttcccgaccgagtgctgagcacaccctccgtgcagctggtgcagagctggtatgtccagaagccgtcctgggacatcatgggagttcctgggacaaggattcccgaggaccattcgcaccctgaggccagtttcacttgacgcctgggttcaccattccggaacccggcacaacgacgttggttgcccaccattgggcacaagggcttgttttgagttacaagggacaacttacgggcgatgaccccgtctccaaccagaacatccagtacttcctggaccgcttctacctcagccgcatctccatccgcatgctcatcaaccagcacaccctcatctttgatggcagcaccaacccagcccatcccaaacacatcggcagcatcgaccccaactgcaacgtctctgaggtggtcaaagatgcctacgacatggctaagctcctgtgtgacaagtattacatggcctcacctgacctgggagatccaggagatcaatgcagccaactccaaacagccgatttcacatggtctacgtcccctcccacctcttaccacatgctctttgagctcttcaagaatgccatgagggcgactgtggaaagccatgagtccagcctcattctctccacccatcaaggtcatggtggccttgggtgaggaagatctgtccatcaagatgagtgaccgaggtgggggtgttcccttgaggaagattgagcgactcttcagcttacatgtacttcacagcaaccaacccccagcctggcaccgggggaacgccgctggctggcttttggttatggggctccccatttcccgcctctacgccaagtacttccaggggagacctgcagctcttcttccatgggaaggctttggggaccgatggctgttcatcttattttcaagggccctgttccacgggactcggtggaagcgcctgcctgtctacaacaagtcagcctggcgccactaccagaccatccagggaggccggcgactgggtgtgtgcccagcacggagcccaagaacacgtccacgtaccgcgtcagctaagggccgccgtgcatctgcaccttgagaggacggactgccgcctctgggtccccccacccgtggtgcccctcaccatcctcctgggggagcagggggtgggttctccctgatgaccaggttctgtctctatggaagtcactgcggtgataggtctgtgatggtccctaagtgccagtccatctctgtggagatcccctcggtggtcctccctatctctgtgggcgatgcctgagggttagggatgtctccaccctgatggggtgtcccagagacattttcccatggcagtcctcctctctgagaccagggctgtcacttttctgccaggggtactgggtccccctcagcaccctccacagcacaggccttccaagtggatgtcccgttgccttattcccccagcccacaaaggcaccctggccttggcctgctgaagtgttaggaagagggtgggtgccctccagacctggggactgagtggggaaaggagtttacacccgtgagtggggaatggaggctggtcctgcagcctctccctccgctcagggcttgaaaggtcggtggcggagggggtggctctcaaggggcccnaaactcctaaaagtggaagaaaccttgttaaaaccgaagaagcttgcccatcccagccaagctgctcgaaggccctgcagtggccttggcaatgtggtgtgccacctcctgagccctcccagcatgtcctcacatgcttcatgcccacccgctcctccacaagcctagtccatcctgcctgagctccagcccccaggcccccactgtgcccagacatgtgtgctcagggtggctttctccactaggaccttctgtgtatatagaataataatatagccctgaatgcccccacccttcccctaagcacacaggggttaaagctgtgtgtccctcccagtggctgtggcagtgaccagtgacaacccacaaccaaaagtaaagaggagactgaatgagactggcctggctgcatccctgggggaggggacccacacgtgcgcacgtacacacgcacactgcggtgccctgtgaccaccacatgacgcaccggggacgtccggcccagctcaggactgtgagtaaaacactgggcaaagccatctgttcagaacgccggatggcccagcacctggtgacagacctgttgtcccaccatactcagggcccagcagagtccggccaacccaacaactggagcagacagaaattctggtcactggcacatcataaggatttattgaaataaattgagaac

SEQ ID NO: 113346 - DNA, 2264 bp, Homo sapiens
cgaggctgcgttgggctccgggaagccgtcgggctggggctgtcggccgaggcgcggaggcactcgcgcggggggtaattcggggtctgggttctggtgcccgcgcagctttccccgtctaaaagttggttttaattggttgcccacaggattgacttggcctctacttcttgttaaggaaattcatctcttgttttatcagatggcccacatgcgtgaccttggttcagctgtccatttcctgtgaccatctcattgacaaggacatcggcgtccaagtctgacccactctgcgtccttttacaaggatgtgggagggggcaagctgggctgaagcttggccggacttgaacgggtgcggaacctgctcaaagccctgagttctccaagacttctacagctttgagtaccgctttgaagacagtccagaagcttacgcttttgggaattctattgacataagacaaacaaagacggccagagcttgagggatgatgaattcctaggggggtgctgagtgtttcctaaggacagattgttgtcccagccagggactggactctccccttgatgctgaagcctggaaaacctgctgggcgggggaccatcacggtctcagctcaggaattaaaggacaatcgtgtagtaaccatggaggtagaggccagaaacctagataagaaggacttcctggggaaaatcagatccatttctggagttcttccgccagggtgatggggaaatggcacctgggtgtacagatcttgaggtcatcaagaacaaccttgaacccttacatgggaagcgtttcttcagtccccgtttcagcatttctgtggtgggaaccccagcacacccatcccaggtggcaatgctccgattatggacagtgacgggttcacatggattttcattcggtaacctttccacacccagcttggcccagctggcaggcagttcccggctgagtttgaattgcatccaccctgagaaggcaggcagaaaaagaaaagctacaagaactctgggaactatccgtgttcaagattttgttcgggtaggaaacagagtacctcctttctggactatgttgatgggaggctgttcagattaacttcactgtgggcgtggactttcactgggctccaatggagacccctcctcacctgactccctacactacctgagtccaacaggggtcaatgagtacctgatgggcactgtgggagtgtggggcagcgtgggttcagggactatggacttcagacaagctgttccctgcatttggatttgtgggcccaggttcccccttgacttggcaggtcttcgcattgaattttgcctttgaattttcaaccccagttaacccctacttgttgcagggcatccaggggcatttttgggatgcctaccgccaagccctgcccccaagttcgcctctatgggcccttaccaacttttgcacccattcattcaaccatgttggccaggtttgcagcccaggctgcacatcaggggactgcctcgccaatacttcatgctgttgctgctgactgatggtgctgtgacggatgtggaagccaacacgtaaggctgtggtgcgtgcctcgaaccttgccatgtccagtgattcattgtggggttgttgggtttgtgctgaattttgaagggccatgggagcagctgggacgcctggatgggtgggaccccttgcatacacgtttctggggcaggctgctgccccgcgaacattgttgcagttttgttacccttacccgccggtttccagaatgtgagcccctcggggaggcaattggcacagacccgtgctcgcagaaagtgccccacacaactggtcctcatacttcaagggcccagggttgggccccgctcaaaaccctcaacccccctaagccaaggatcctgcacaggccccccagtgcctaggttcccttggaggctgtggccaggtcctcaaatcctgttgtcccagaggttccctttggggccacaaccccaaccctttcttcactctccctcaggtgctaagcacttttgtattttttgatacttttatacttgaatcaaacttttgctgctcttgatccctacctttggtcctgacaaccctcattcaataaaagaccagtgaagaccaaaattcataaaaattcggggggggcggttctaaagggatccattttatggttcccgccgcgggaccctctatagtctttttattgggctcccccaatctgcaattc

SEQ ID NO: 113347 - DNA, 1652 bp, Homo sapiens
ccctccccagaggtgctgtccatgtgctggtgtggccacacatggctacatcattgtgcaggcagagctccctgcctgcccagcctcagggctctgcacgctcacacctagatcctcatcttcctccatgtctctgcccagcatagccccgagcccctggaagctggtacccctcagtgtgctcacacgtggcaaggccgaggtggccccaggcaggggccataccaggcacaaaccatgcacgctggcatgggtgcggggatcacacgaatgcctcctggaaggaaagggctacttgtaggaatgttactgatgaggcaagaagccaaggacttccctgcagggatcaaagatcaggacacgaacccttcctcacacacccacctcagacctgggagaggactgtgtgtcccccactgccccatcggatgctctgggctctgcctcagggaactcgggtttggggaaatgtctatttcagaagtactggagtggccagtgtggcagtggccactcagggtgggctgggtcctgagacccatccccgacacctctcctgctgaaccctcaggctgctccccacaccagggtgtgactgaggggtacacaggcctggatttctggtgtgaggaaggggctagcacctcccctgttgtgtagccagcacaggcacaatttgtgggtttggtggcaggtacgtggtgcgtgggagaaaggacagtgttagaggtccccactccgtggttctaggatcatggaaaggtgaacacacaagtacacaaatgtgccatgccctggcatggggcttattgtgtgcacagggaaggcacttcggtgtgtgtgtgcggaccccagggtcccagggtcatgttgaagcgttacgtgtgtgtgtcattgtattgtgttgtgtacattgtgtgtgcatttgtgttgttgcatgtggccaaacagatgtgacctcccagaacacagtacccctccacctctacccgagctcagacagccgagctcttcccttgtcctgtgtgtgtgtcagtgttggccacgttgcgtaaaccccagggttgggctgttcctgagcttgggggcctgcctgtccctttcccagaacgcccctctgcagggacaggaagtctgccccaagtctggccacggccctcctgctcccatctcgggctgcttgggagacatcagagcaggccccagcccccagtcccctcttccggccgcctggacaggacccccattcagcccaggtgtttccggaagtcccacggccttggggccacaggagaagggttgaagcgtggctggggcaccactccccccacctggagtggcattgggcccacagctgcccatctctgggcctcaggtggaccaggggatctctaagggtctgctgtgccctttctatgcgtcctccacatcctatgatgtgcctgcttgttggctgctgtctgtgtgcgtcctggcatgttgtctggaggctggtgtcttttgcatgttcttggacaaatgtgtgctacctgcccaggcgcctgcaaccattgagcccacatgtgccccacgtgctgccctgcgggtggtcccgggcctggccagggctcagtgctcctcttccccctcctccctgttcccacccatgcatt

SEQ ID NO: 113348 - DNA, 655 bp, Homo sapiens
  misc_feature (1)...(655): n = a,t,c or g
acgagagcggctgccatggccaagtatttggcccatatcattgagatgggcgtgcaagtggtgggcagggcctttgcacgggccttgcggcaggagtttgcagcctctaccccctaaaaaggaaaccactcctggagaagaggcagctcctagccacctgtccctgtgtctctcatcctgtgctggtggcaggggtgagccaccaactcggaaggcccagggtgaagtgtgggctgctgaggactgagcgatcacccanccaatgtccacacagccagccgggccgcagctgatgcccgaggacgcgctggacaccggtctgcagccgcttcccaacctcttccggcctcagcctccaggaggcacagcaagattctcaacgtggtccaagctgagccctgaggaggtccagaagaactatgaacacttatttaaggtgaaatgataaatccgtgggtggctccttctacctgcagtcaaaggtggtccgcgcaaaggagcgcctggatgaggaactcaaaatccaggcccaaggaggacagagaaacaatgccagatgccccatacgtgactgctcggctccccccgcccaccccgccgcctctaatttatagcttggtaataaatttcttttctgcaaaaaaaaaaacaaaaa

SEQ ID NO: 113349 - DNA, 2250 bp, Homo sapiens
gcggccctcccccgccccaccccgcgcgctccgctcgggcgcgaggggacggggtccgactcagaaatggcggcctccatgttctacggcaggctagtggccgtggccacccttcggaaccaccggcctcggacggcccagcgggctgcctgctcaggttctgggaagttctggattgtttaataaccatggactccaagtacagcagcaacagcaaaggaatctctcactacatgaatacatgagtatggcaattattccaagaagctggtgtctccgttcccaaaggatatgtggcaaaagtcaccagatgaagcttaatgcaaatttgccaaaaaattaaggttcaaaaagaatgtccgtgattaaaggcacaggttttagcctgggtggtaaaaggaaaaggaacattttgaaaagtgggcctccaaaggaggagttgaagataagtttttctcctccagaaggaagccaaaagctgttttccttcacaaattgattggggaaaaaatttgtttaccaagcaaacgggagaaaagggcagaatatgcaatcaagtattggtctgtgagcgaaaatatcccagggagagaatactactttgcaataacaatggaaaggtcatttcaaggtcctgtattaataggaagttcacatggtgctgtctaacattgaagattgttgctgctgagactcctgaagcaataattaaagaacctattgatattgaagaaggcatcaaaaaggaacaagctctccagcttgcacagaagatgggatttccacctaatattgtggattcagcagcagaaaacatggtgcaagctttacagcccttttcttgaaataccgatgcaaccatgatagaaataaatccaatggtggaagattcagatgggagctgtattgtgtatgggatggcaaagatcaatttttgactctaaattcagcctattcgccaaaagaaaatctctgatgtacaggaatggaaccaggaagatgaaagggacaaagatgctgctaaggcaaatctcaactacattggcctcgatggaaatataggctgcctagtaaatggtgctgggtttggctatggccacaatgggttataattaaaacttcatgggagggactccagccaacttccttgatgttggtggtggtgctacagtccatcaagtaacagaagcatttaagcttatcacttcagataaaaaggtactggctattctcggtcaacatttttggaggaatcatgcgctgtgatgttattgcacagggtatagtcatggcagtaaaagacttggaaattaaaatacctgttgtggtacggttacaagggtacacgagtccgatgatgccaaggcacttgatagccggacagtggacttaaaatacttgcttgtgatgacttggatgaagccgctaagaatggttggtaaagctctctgaaatagtgaccttagcgaagcaagcacatgtggatgtgaaatttcagttgccaatatgatctgaaaacccagtggatggctgaaggtgttaaatgtgctataatcattaaaaatactgcgttctgtgttattgttctttttctttttagtgtgtggagattgtaattgccatctaggcacacaaacatttaaaaggatttggactgcatttaattgtaccattccagaatggactgtttgtacgaagcatgtataatgcagttatcttctttctttcgtcgcagcccagtctttttttgcttctcctaccaaaacgtaacttgcaaatttgcccagtttattattgttggatacaaagttcttcattgataagagtcctataaataagataagtacgaagataaagctttattctttagtgttaaaatacagtatatcctaataactagccctcattcagtagagcagttatattaaaacaatgttttatgtaaaaagtgtttatccttcagcacccaaatacatgataaatgtatcaatcactatttataaacagagctttccaaacactccctcagaatattcttctaagtattttgatgaagtaactttgtaattatttgaacattgttttaatcattaggaaaccctgattaactgcaagtcttcatgattctgtcatattaagaaacacctgtgaggtttgcttcaaataaaggcatatataccaaggacttacagacaaaattaagaatgtcaatttaagttaataaaaatcttccccatatgaaaaaaaaaa

SEQ ID NO: 113350 - DNA, 1001 bp, Homo sapiens
tcggtgcgaattccgtggcgcgagggatcctgaggctgctccagcagtgcgccgccgccgtctcctggggcggcttgggttagccgggaggtgggtcagaggctcgccccgtgccctgcgtccgggcgtctccttagggcgcgtcttcgggtccggccagcggtgctgaaaaagggagaaggttgggggtagggaggaaacaagatcccagttcaatagatttctccgcagatcctgtgccttcaaaccctacgagtgcatactttaaaacaaaatcgaacgaaagaaggcttaaggaactagagagtcgcctgcaacaagtggatggatttgaaaagcccaagctacttctggaacagtatcctaccaggccgcacattgcagcatgtatgctctatacaatccataacacttatgatgacattggagaataaagtcgttgcacatctaggatgtgggtgtggagcacttagcatcagaactgcaatgttaagagcaggggtgtgtgttggatttgacatatatgaagacgcattggaaatatttaataggaacgcagaagagttttgagttaacaaatattggacatggttcaatgtggatgtgtgccttattatcctaacagaatgtccaagtcattcgatacagtaattatgaatccctccctttgggacccaaaaataataaagggacagatatggcttttctaaagactgctttggaaatggcaagaacagcagtatattccttacacaaatcctcaactagagaacatgttcaaaagaaagctgcagaatggaaaatcaagatagatattatagcaggtggcttttgttttacagaacttcgatatgacctgccagcatcatacaagtttcacaaaaagaaatcagtggacattgaagtggacctaattcggttttccttttaaaagccccgcaaacaaaagtcgtttaaaacctatttaaaatgaataaaccattggtttactaaaaaaaaaa

SEQ ID NO: 113351 - DNA, 1658 bp, Homo sapiens
  misc_feature (1)...(1658): n = a,t,c or g
cattgaccccccttttgagagcactacggaagngcggcggaannccccggccggaagccgctgtcggggagccggcggtggggctggacgcaggtgcaactgacatgggtgaaccccagggatccatgcggattctagtgacagggggctctgggctggtaggcaaagccatccagaaggtggtagcagatggagctggacttcctggagaggactgggtgtttgtctcctctaaagacgccgatctcacgtggctggcctggcctgggtgtgcttggctgtgttcctggaaaaacaaaccccctcccatctcttcctggaagcctgcaccctcatatcagccaggccctggggccaccctcccttttgactgtccctcctgccatagtcccacccagatcctgcacttggcacccaaccctggtggtgctggttccctccagagcctcctgacagcctggctttctacaaggatacagcacagacccgcgccctgtttgagaaggtccaacccacacacgtcatccatcttgctgcaatggtggggggcctgttccggaatatcaaatacaatttggacttctggaggaaaaaacgtgcacatgaacgacaacgtccctgcactcggccttcgaggtgggcgcccgcaaaggttggtgtcctgcctgtccacctgtaatcttcccttggacaaagacggacctaccccgattaagattgaggacccatgattccacaatgggcctccccacaacagcagagtatgggtactcgtatgccgaagaagatgatcgacgtgcagaacaggggcctacttccagcagtacgggatgcaccttcaccgctgtcatccccaccaacgtcttcgggccccacgacaacttcaacatcgaggatggccacgtgctgcctggcctcatccacaaggtgcacctggccaagagcagcggctcggccctgacggtgtgtgttccgggaaatccgcggagccagttcatataattcgctggacctggccccagctctttatctgggtcctgcggggagtacaatgaagtggagcccatcttccctctcggtgggcgaggaagatgaggtctccattcaaggaggcagccgaaggcggtggtggaggccaatggactttcccatggggaagtcaccttttgatacaaccaaagtcgggatgggcagtttaagaagacaagccagtaacagcaagttgaggacttaccttgcccggatttcccggttcacacccccttcaagcaaggcggtgaaggagaacctgtgctttggttcacttgacaaacttacgagcaggcccggaagttgaagctggaagacaggatcaggtgccagcggaccatcggcctggcagaagcccagcgggccacccacccgtcaaaccttgcaaggagctgagggcaccacccaagcaacctgggcctgcattccagtccgctctgcaagccccaaagcatctttccaagtggggccccccatttcacgttggttccttcagggaaaccaggggttccggggcaggcccggcggtttttgttccccacaccagccccctgcgcgtgtccactctgatcctgcatcccactccctgggagccaataaagtgcattttcacaggcaaaaaaaaaaaa

SEQ ID NO: 113352 - DNA, 1219 bp, Homo sapiens
gcggcgggtgtgggaggtggtgacggccggggcggtgttcctgctcgcgtgcggaggcgggcgctgacgggccgggggggtcgctgctcctgaggcgatgatgggcaaggaagaggagattgcgcggatcgcccggaggctggacaagatggtgaccaagaagagcgcggagggagccatggatttgctgcgggagctgaaggccatgcctatcacgctgcacctgctccagtccacccgagtcgggatgtctgtcaacgcccttcggaagcagagctcggactgaggaggtcattgcactggccaagtctctcatcaagtcctggaagaagctcctggatgctttcgatgccaaagccagggagcgggggaggggcatgcctctgaccacatccttgagggatgccttacaggcctcggataccatgcgcaagaggccggagctgcccagggcaccgtcgactccgaggatcaccacatttcctccggtgcctgtcacctgtgatgccgtgccgcaacaagtgccgcgagatgctgaccgctgccctgcagacggaccatgaccacgtggccatcggtgcggactgcgagcgcctgtcggctcagatcgaggaatgcatcttccgggacgttggaaacacagacatgaagtataagaaccgtgtacggagtcgtatcttccaaccttgaaggattgccaagaacccttgaccttgcggcggaatgtgctgttgttggggccattaaacaccccagcagaatcgctgttgatggacctcagagggagatgggccagttgattgaggttgaaggagatccgttaaggcccatggaccaaggaggccatccgagagcaccagaatggcccgcactggcgggcacgcaggacagaccctgttcaccctgcggcaagtgcaggaaaaagaactgcacctacacacagccctgttcacaggtgcagaccccgcagctctgattgagcccatgaccacctttgttgtctgcaaccgagtgtggaaaccgctggaagttctgctgacccctcgtgtagatgtgctgcagcgcttgggccctccccggcccacgtcctccgttgacacagcttctctggagaccctagaaggcggcatgtcctgccctcaacctgcctgcctggattgcacctttctgccctttccccctcattattaaaatgtatctttttgccaaaaaaaaaaaa

SEQ ID NO: 113353 - DNA, 396 bp, Homo sapiens
agggtgcgtcatcctacattgctctaccacgagctcacttcccctttatagtgaatcttgtgaagctcatgcaggtccagttccggcctgtaaaaccctctctcggttgggtgcggataggtcataaaggaagtgtcacctctggctgagattcaggtgtcagcagggcccaaaacctgcatcgggcaggcgttcgccatggctgagatgaaggtggtcctggcgctcgccctgatgcacttccgcatcctgccgacccacactgaaccccgcaggaaacccgagctgatattgcgcgcagagggtggactttggctgcgggtggagcccctgggtgcgaactcacagtgactgtcctacccacccacccacctctgtagagtcccagaatgtatt

SEQ ID NO: 113354 - DNA, 1578 bp, Homo sapiens
  misc_feature (1)...(1578): n = a,t,c or g
catccgggcttctcctttttgtgttccggccgatcccacctctcctcgaccctggacgtctaccttccggaggcccacatcttgcccactccgcgcgcggggctagcgcgggtttcagcgacgggagccctcaagggacatggcaactacagcggcgccggcgggcggcgcccgaaatgggagctggcccggaatggggagggttcgaagaaaacatccaggggcggaggctcagcttgttgattgacatgggagaacatggatgatacctcaggcttttagctttcgaggatatgggtgagctgcatcagcgcctgcgaagggaaagaagttagaacgctgatgcagcttgatgcagctgctgctgaagaggaggatggagagttcctgggcatgaagggctttaagggacagctgagccggcaggtggcagatcagatgtggcaggctgggaaaagacaagcctccagggccttcagcttgtacgccaacatcgacatcctcagaccctactttgatgtggagcctgctcaggtgcgaagcaggctcctggagtccatgatccctatcaagatggtcatacttcccccataaaattgcaggtgaactctatggacctctcatgctggtcttcactctggttgctatcctactccatgggatgaagacgtctgacactattatccgggagggcaccctgatgggcacagccattggcacctgcttcggctactggctgggagtctcatccttcatttacttccttgcctacctgtgcaacgcccagatcaccatgctgcagatgttgggcactgctgggctatgggctcttttgggcattggattgtcctgttcatcacctataatatccacctccacgccctcttctaacctcttctggctgttggtgggtggactgtccacactgcgcatggtagcagtgttgtgtgtctcggaccgtgggccccacacagcggctgctcctctgtggcaccctgggctgccctacacatgctcttccttgctctatctgcattttgccctaccacaaagtggtagaagggggatcctgggacacactgggaggggccccaacatcccgcccattccagaggggttccccagagacatccctgccaatgctccctgctggntcggctttcccaccaccgtcttcaaacggcaacagccaaaagctgttgcggttgacccttgcagttcacactgaccccacctgaaattcttggcccagtcctcttttcccgcaagctgcagagaggaggaagacttattaaaggacagtcctgatggacatgtttcggtagatggggtttgcagctgccactgagctgttagctgcgtaaagtaacctccttggatggcctgttcggcacttttgaaagggcacaagggccaagaattctggggcagggattgcaagggttttgcaggccaattgcagaaatgggttcagttcttttgagaacccctccccacctaccccttccttcctctttatctctcccacattgtcttgctaaatatagacttggtaattaaaatgttgattgaagtctg

SEQ ID NO: 113355 - DNA, 403 bp, Homo sapiens
  misc_feature (1)...(403): n = a,t,c or g
aatacatggctggaggtagacaggagcagagagatgcatgcacacctgtgcatgctcnnnnnnnnnnnnnnnnnnnnnnnnnnnnnnnnnnnnnnnnnnnnnnnnnnnnnnnnnnnnnnnnnnnnnnnnnnnnnnnnnnnnnnnnnnnnnnnnnncatgtccacgtgttgctctgtgtgtgtgtgcatgtccacgtgttgctctgtgtgtgcgcatgtccgcgtgttgcttgtgtttgtgtgtgcgtgcccgcgtgatacttgtatgcgcatgatcatattcgcttgtcctgtttctgtttttatctatatacaagagtatagatacacattttagattgcgccttcacgatacctcaaggggcctattccttttaatattcttccttggattcgtcacccct

SEQ ID NO: 113356 - DNA, 479 bp, Homo sapiens
ggaaaaaatatggattctactttttaaacatggtctcagtagtatcattacagccccatcaaaatgaaaaacaataatttccctgacaccatcaaatagctcatcaattttactatatttcctcaatcattcaatacgtgttttttatttattttattttattattattttttgagacagagtctctctctgttgcccaggctggagcacagtggcgcgatctcagcctcattgcaacctctgcctcctggggttcaagtgattctcctgtcttaggcctcccgagtaggctggggattgcggggcacgggccaccatgcctgggctaaattttttgtattaaagggagggctgaggacagggggtttctagggttgggctagggttgggtcttgaactcctgcacctcaggtgatccgcccgcctcgggcctttccaaagttgctggggattacagaccgatttggggatgtttgccc

SEQ ID NO: 113357 - DNA, 3205 bp, Homo sapiens
  misc_feature (1)...(3205): n = a,t,c or g
tccctgtgagatgccatgcacctgttgcagctgtcagcggttgttgccccctgaccattcctctgctctaccccttaccccaacacactccctcttcccttcccaaaggaaaccaatcttgtgctgggggtcgccttcctccacacagccacgggctcggacagttccctgtccctgctggtcttgggacaagcgaggcgcttctagctgataggacaggaggggaggctgctgagaggcttctgggaagcatttcctgttgaaggggattatggcacacccttcgtgggaggagaggggatgcctggtgtcgagcacctgggccaccagcagctgcctccgctagctaacagcaagctcaggctgggtctggcctcccgcaggacttagagaagctcccctgtagcccagctgactccggagttccttccttacagctcaagacacccaagttgatgtaacccacagtttgagaaatgcttctagaaaactcacctggagaggcccagctcagctttccctgctgaactttgggatgacacagctgggaccatccacagtgactcactgaaagaaaagggtggcaggaggaggaaatgaacgactgtccccacacggncccccaagaaacatttccatgggccaccccggaatacatgcctcatccttacccagcacttaaatatttattttaaaaatcccacatcattttgcctttaaaaatgtttattccagcgcctgcaatgtagaaggcactgtgtttggcaccatgaggaatacagaaaccaacaaggcatgattcttgccttaggaagctcacagtctagcgtgggaaattagaaattgcacatgcacacaggtaactgtcacaccaggcaggaagcgactaaatgctgtgagattgatagcaacattataagaacccagaggaagaaaacactatttggggaatgaggataagagattagagaagttcccttagaagtagggggtttaaacatgacagatcaaatgtagataggtaaaaaattcagcaggaaaatgtaaatcgggggaaggctctaatttaaaacccagaagccagggaggtacttcccgtggatgttgatgggaggccaggagaagccccgctgggctggattcagaggggaggggagacaagaggatggggaggtggaggagggagcagggagtggagtgggaggggaggctggaaagatgtgtggggatcaagacgggaaggtgagtatgtgagtatgtgtgcccagacaatggtgtttcccatgtcaatggaggtttcctcagagagaggtgatctggctggagaaaagcttaatctggtggcaatggacaggtgactttaagaagtggggaacgagggaaggaggcccagtttgaaaatgataacaagggtccagactcagtgatgcagcaagtgaccatgagaacagagcagctgcaggtagaagatggagacagaactggggagatctggtgaaggtaagcccggttggaaaagatgatgtcaggttttataccttagagacacatgatccattcacaaagccagggaaacttaaagagaaaacactttagaatttgaggagaagaggcttagggctgggcctgagacatgggcttggcctccaggtggaggggtccagcaggcaggtacaagccggatgagagttcagggcagagggcagagccggaaacagaccaaaagctgcccatggaaatggcgaagggtggaaagcaaggggccaccagccgagggccatctcgcccggggaagggtgggtacaagcacaaccctgtggccacgttttcctcacacaggaaattcccacagaaacacccaggagggtgacgatgcctcccatgaacaatgccgtgtgtctctgtttgtcctttgtccccgatttcacacctaagaaacaatgtcttcagctgtgtgatgacaagtaggaacgctgcctccattgtggaggatcatcttgaaaagacttactccaatgagagtttttaaaagttttcactactatttattttgaagagttttctgtaatggaactatttcttctgaagatttcagaaaagcttttgatgtctgttacctcaccatgtctaagaggtggaaggaactgagagtcatcttcccgctcatttcacaagtgaggaagccaaggcccagacgggccaaggggtcttgcccagcatcacccagcagggatgggctcagctgggacccacagggcaaagacagtacctgccctccccacagccactcccctggggcagcggctgccattccaggatacacagagatagggggagggaagggaaggatgatgggacaggacagggcaggatacatagggtaagagggtttgggaattaacacataggatattttaactttttcgagagaggaaaaggagaaaatggcttgtgatagacattttttggaccccaccaaagccttgcatatctgaaaagaaaattactttggctttctggaaacattaaactgcatatcaatcaaaaaaaacagactaaattataacacatcacaaccagtaagcttcatagcagccgcagtaggagtgatggcatttcgtgttggtgtgcgcgtacacgtggaaaggaagtttgcagggcaacaaggtcagcaagaaccagacctcagattgtttcactcaccacagaagaaaaacacccatggcaattcccttttggaaagttaaagcttatctcctcggaatgaagttccaaagacatccatttccacagaagatggaggaaaaaagacaattacatttcaaatctgtaagtcacaaatagacaggcaagagttctggcgagccgtgtcacagttaaccagtttgaggacatcagtgtcttccccccagagtctgtaaacacgcagccagtcaatttcctaatgaatgcttccctttaacaaaggctgcttcagtcctccctgcaggcctactagagtcttccagcagcacatctcagtggggagccatcaggattttccaaaaaatcttctttctatagaggatgtagggcaatgaggcacccagagggcagtggcgacgatgttctgagtcaggtgctccttgtgggactggttgtccttcagcttccactgaaaggggaagtagttctcaaacacctcgtggccgacgtataccagaat

SEQ ID NO: 113358 - DNA, 2447 bp, Homo sapiens
ccagacaggttgagcgagcgggagaggcccggggcacgtgcagaaaggagccccgcgagtggcgcgccggggatgtgagtgccccttgccctctactgaatccagccccctccccgcccaccgcctccgcctttgcatagatacagtcatctggccagcccccgcccctcctcccggcgtcagcccgccagaggccgcgcggggcccgggcttcggccgatcagcccgggaggccccgccgcgcccccttggcccgcgcgcccgtggtcacagtggaagaggcgcccgcgctgcgctgcccggaggagccgtcgcgcgcccgcttcctgttcggctggttcctgccagctcgaggacaaaacacgcgtgcgcgcggcgggcgagcgcgctcgccgcctcagtcgccagcgccgggcgcagtccgcctttttccggagcagactggccgcggtgctagtccgtagcagcggccgccgcagcggctccgcactggcgaaccgagggcagaaaaaggcggggttgacggctttttggtaggagtgggctggaccggacgccagagacaaaggctcccaaggcaagagggactgtggccctgcgtcggctctgctcggaactgctgaccccaggaatttacgccccttcgtttttctcttctgattcttctcttctcccaagcccgcgtcccctcacgcgtggcctctctccttgccgggagggccgcgatggaggtcccgcccaggctttcccatgtgccgccgccattgttcccctccgctcccgctactttagcctcccgcagcctctcccattggcggccgcggccgccgcggcagctgagccccgctcctcccttcgctcgctcccagctccgcccggcagggggcgcgccgggcccagcgccacgtcaccgcccagcagccctcccgattggcgggcggggcggctataaagggagggcgcaggcggcgcccggatctcttccgccgccattttaaatccagctccatacaacgctccgccgccgctgctgccgcgacccggactgcgcgccagcacccccctgccgacagctccgtcactatggaggatatgaacgagtacagcaatatagaggaattcgcagagggatccaatgatcaacgcgagcaaagaatcagcagggtgacggtaaaatgtttattggaggcttgagctgggatacaagcaaaaaagatcctgacagagtacttgtctccgatttgggggaagttgtagactgcacaattaaaaacagatcccagtcactggggagatcaagaggatttggatttgtgcttttcaaagatgctgcttagtgttgataaggttttgggaacttgaaagggacacaaactggatggcaaaattgaaagattccaaaaaggggccaaagctttaaaagggaaagaaccctccccaaaaaggttttttgtgggtggattgagcccggatacttctgaaggaacaaattaaagaatattttggagcctttggagagattgaaaatattgaacctccccatggatacaaaaacaaattgaaagaagaggattttgttttatcacatatacctgatgaagagccagtaaaaaaatttgttagaaagcgagactaccatcaaattggttctggggaagtgtgaaatcaaaggttgcaccaccccaaagaggtatatagggcagcaacagcaacaacaaaaaggtgggaagaggtgctgcagctgggtgggacgaggtgggtacgagggggtcgtgggccgaggttcaggggccaaaactgggaaccaaggatttaattaactattatgatccaaggatatgggaaattacaatagtgcctatgggtgggtgatccaaaactattagtgggctatggccggatattgattattactggggtattaactatggggaactatgggtatgggacagggatatgcagactacagtgggcccaacagagcactttatggccaaggcatcttcgaggggggttggcattcacccaaaacatttaccagccatactaaaggagaacatttggagagaacagccgggaacttcaattgcaggccgtgtgtcaaccctgaccacgtctatctctgggggtcgcactgttgcgggcagagcgcaaggcatacaccagaaaacgctgtcctgtggaggagatgttaaagtaacccatcttgcaggacgacattgaagattggtcttctgttgatctaagatgattattttgtaaaagactttctagtgtacaagacaccattgtgtccaactgtatatagctgccaattagttttctttgtttttactttgtcctttgctatctgtgttatgactcaatgtggatttgtttatacacattttatttgtatcatttcatgttaaacctcaaataaatgcttccttatgtgaaaaaaaaaa

SEQ ID NO: 113359 - DNA, 2205 bp, Homo sapiens
atgcttacgccaatcttggcacgaggttctggagggagccgctgcgggtctttccctcactcgtcctccgcgcgtcgccgctcttcggttctgctctgtccgccgccatggcccaagctgacatcgcgctgatcgtttttgttcgtcatgggccacaacttaattctgaacatgaaggaccatggctttgaggtctgtgcttttaataggactgtctccaaagttgatgatttcttggccaatgaggcaaagggaaccaaagtggtgggtgcccagtccctgaaagagatggtctccaagctgaataagcccccgcgggatcaatacctcctctgtggaaggctgggcaagctgtggatgatttcatcgagaaattggtaccattgttggatactggtgacatcatcatttgacggaggaaattctgaatattaggggacaccacaagacggttgccgagacctcaaggccaagggaattttatttgaggggagcaggagtcagtgctggagaggaaggggacccggtatggcccaatcgctcatgccaggagggaacaaaggaagcgtggccccacatcaagaccatcttccaaggcattgcttgcaaaagtgggaactggagaaccctgctgttgactgggtgggagatgagggagcaggccacttcgtgaagatggtgcacaacgggatagagtatggggacatgcagctgatctgtgaggcataccacctgatgaaagacgtgctgggcatggcgcaggacgagatggcccaggcctttgaggattggaataagacagagctagactcattgctgattgaaatgacagccaatattctcaagttccaagataccgatggcaaacacctgctgccaaagattcaggggacaagcgcgggggcaagaaggggcaacaggggaagtgggaccggccattctccggccctgggaaatacggcgtacccgtacaccctcattaggagaagctgtcttttgctcggtgcttatcatctcttgaaggatgagagaatttcaagctagcaaaaagctgaagggtccccagaaagttccagtttgatggtgattaagaaatcatttcctgggaggacattcggaaggcactctacgcttccaagatcatctcttacgctcaaggctttatgctgctaaggcatgcagctcaccgagtttggctggactcttcaattatggtgggcatcggcctggatgtggagagggggctgcattcattaggaagtgtattcctaggaaagataaaggatgcatttgatcgaaacccgggaacttcagaacctcctactggaccgacttctttaaagttcagctgtttgaaaactgccagggactcctggcgtgcgggcagtcagcactggggtcccaggctgggcatttcccatgcccctgttttaccgactgcccctctccatttagacggggacaagccatgagatgcttccagcccagccttcatccaggcttcagcggggattactttcgggggctcacaccctatgaaactcttgggccaaacccagggcaagtttatccacaccaactgggacaggccatggtggcaccgtgtcatcctcgtcataccaatgccttgatcatgctgctcctgtcaccctccacgattccacagtaccaggacattccattggcctcaatggcactgcccacctggccctttgccctattttctgttcagttttttttaaaagtgttgtaagagactcctgaggaagacacacagtttatttgtaaagtagctctgtgagagccaccaatgccctctgcccttgcctttttgggacttgaccaggagctgctcatgtgcgtgagagtgggaaccatcttccttgcggcagctggcttccgcggtgcccccgtgtgctggtgcggttcccatcacgcagacaggaagggttgtttgggcactcttgatcaactgggaacctcttacaacacttttaaaaaactgaacagaaaatagggcaaagggcgaggtggcagtgccatgaggcacatggaatgtcctggtctgtggaatcgtggagggtgacaggagcagcatgatcaggcattgtatgacgaggatgacacggtgccaccatggcctgtcccgttggtgtggataaactgccctggtttggccaagagttcataggtgtgagccccgaa

SEQ ID NO: 113360 - DNA, 1056 bp, Homo sapiens
gtttcctggtgggcgtcaggggcaggcaacagagtggcggccgctacggccctggaacggggccattgcgagaagctgcggcgacgtcctgagtcggtcaggacgacgaggagcagtgcctgactgcgcaggtcctggatgcctcatcccttagtttcaacaccagattgaaatggtttgccatctgcttcgtatgtggccgttttcttttctattcttggaactggttggctgtggcttcccgggcggcataaagctttttgccagtgttttataccctcggcaatcttgctgcgttagcccagtacatgctttttaatgggacctgtgaagcaactgaagaaaatgtttgaagcaacaagattgcttgcaacaattgttgatgcttttgtgtttcatatttacccctgtgtgctgctcttttggtggcataaagaaagggactggcttgtgttattcctgcatattgcagttcttggtcaatgaccctggtatagcctggtcatacatccccataatgcaaaggggatgcagttattaaatgctgttcttctctcctaagttgaaaatcagaaacttgtggaaaaaagcacttgaatgttggtactctatgtttggtgaagtttgcttttccccataaaacactcccaggaaacaactgacgtgacagttgaagaccgttttgtactaagtctaaaatttgtatactggtaaaaactacaacgacagattaatccattaaatgccttgtaactttaaattcattatgtgtcattaatatacttttccaaagataagattcgtaatcaaggccatgttgtaaagtactgttagccaagtctgacctcttttgagaccagctgtgaaatgtgaatatttaaaggtagacctgtgtctgcaagcataattaaacttttttgcttttaaaaaatgtctgcatttttaagattttttttactttaaatgtgaaacttattttaagctaaaaattgcttattatatgtaataaaaataatatataaatctttacaattttgaaataaacccatccttgga

SEQ ID NO: 113361 - DNA, 1237 bp, Homo sapiens
gcgacagggagggaggaagcctaggagtccgccgcgggacggaggcctgggggaactgggagttcagctttctgcagagggccactaggaacctcggattgcccacggaagccagccactttctttgacagtccagcccacctcctcttctgcccggagaagctccaggggctgcctttgtgatcacagcatcttcacaaggaccaaaggaaaataagatttctcgtaagaacaccgtgaccacatctttaaaattgacccatttcgtggctcccacaagatttacacctccacactgaggccggaagtggtttttgcccctattaaaacatgggcgaaaagctttcttgtctccaaggaaacgccacgtaatgagtcaaagctgtggcgcacgcgcagaagtacaagctaccggaagtgatggcgcccctactaaagccttggggttagtacgcgtgcgcagcagtctcttccgacagttgtgttgtgccaatggtgttataagaaaacttcggttcgctcccaggaccccgggcagcggcgggtgctggaccgggctgcccggcagcgtcgcatcaaccggcagctggaggcccatggagaatgacaacttccagggatgaccccccacgcgggactccctcagctcggcaagagactgccttcagttttgatgacgatgcggacactgggaaagaaaaagaagaaaacccgaaggtgatcatttttaaacttcgcttcccgaaaaaaacttttcaaggccccttgttggaggagcaagaacttgagttttggccgagggccttaacttacctgacggccttgtgcgggaccccccatcgcgggccccagcgccccttctgtgctgtctgtggcttcccccatcccccctacacctgtgtcaagctgcggtgcccgggtactgccactgtgcgctgtctggggaccccaccagggagaccaggtgtcttaaagtggacctttgtaagcctgggcattcccagagaggaagggccgctgttgcactgcccggcctttcagaaagacagaattttcatcacccaattgcaggggggagctttttctgggaccaagggagggagccgctcattcacccaacaaaactgtgtcttatctgccaggaaagaccagcctcactcctgggaactgtctggcaggtaggctgggcccccacagtgctgttagaataaaaagcctcgtgccgaaaaaaaaaaaa

SEQ ID NO: 113362 - DNA, 1319 bp, Homo sapiens
cgacccacgcgtccgacggagtccacacaggcagacttgaccttgaccaccagatagtcttcaagatggccaaactggggcggaggcgcaaaaatgtgggagcctgttaaaagacccgtctaccatggcagaggaaaatccagtgcaatggaaggatgtttccacaagatcgtgtttccactgcattggccttcaggaaggctcttgacaacacgacaagtcgcggctcatgatgtcggagatctactgcaaggtgtgctatgggcgcagatatggccccaaagggatcgggtaattgacaaggcgcttgctgtcttcagcacagacacgggcggagcatctcggcctgcagtttcaacaagtccccaaaggccggcacgcttcagttaccaccagcaacccttccaaattcactgcgaagttttggagagtccgagaagtgccctcgatgtggcaagtcagtctatgctgctgagaaggttatgggaggtggcaagccttggcaacaagaccctgttttccgctgtgccatctgtgggaagagtctggagtccacaaatgttcactgacaaagatggggaactttattgcaaagtttgctatgccaaaaattttggcccccacgggtatttgggtttggagggcttacacaacaagtggaaaagaaagaatgaagaggtgcgccgtttctcagattttttgcgagcctaaaacccttgccaagtaatcctgcacagatcgataccctttccccaaatagcctctcctttgtagtcgtacattatgtgtttctcctcagaagtgatcaggtctttactgaatgttagaagaggcctttggaagaaaattatgtaaagtttaatctataaccaaatgctttattatttataatgcttgggaatgggagaagcaataaataaatgttttagtgctatcttgtatggctctagatcttttctttgagatagaaattttcaaaaacataaagctagttcaaaaaacgagttgcagagcatataataaatttggatgtcaactgagaaaggagtgagaaggaagaaataatgcgcaaaggaaagcagtctttcagaatctgtcagccaagtgtctttctagttactgctaatggagaagaaaacagggggtctgggagaaaatagagaacatgatagcaaaatctaaaaggaaaatcaaaactaataaaattgctgaagagttgatccctttgtcctatcgtggggctttgtaatgttacacatctcgtgaaaactcagaaatgacaataaagcgtggcatttgcatctgtattaaaaaaaaaa

SEQ ID NO: 113363 - DNA, 1809 bp, Homo sapiens
  misc_feature (1)...(1809): n = a,t,c or g
agtaattcggcacgagcagattcgctgctccgcagcacggccggagctggtcgggtcaagagtcgggatttgtggggagaggttttccactggtcaagagaaggctttaagaaagacggtattaatctcccgttgcggctcccgcctggtcccatcttctgcccgctcctccaggaaatgaatctgctgccgaatattgagagtccagtgactcggcaggagaagatggcgaccgtgtgggatgaggccgagcaagatgtgaattgctgaggaggtgctcaagatgtccacggaggagatcatccagcgcacacggctgctggacagtgagatcaagatcatgaagagtgaagtgttgagagtcacccatgagctccaagccatgaaggacaagataaaagagaacagtgagaaaatcaaagtgaacaagaccctgccgtaccttgtctccaacgtcatcgaggtctcctggatgttgatcctaatgaccaagaggaggatggtgccaattatttgacctggacttcccagaggaagggcaagttttgctgtgatcaaaaacctctacacgacagacgtacttccttcctgtgattggggtggggggatgcctgaaaagctaaagccaggagacctgggtgggtgtgaacaaagactcctatctgatcctgggagacgctgcccacagagtattgactcgcgggtgaaaggccatgggaggtagacgagaggcccacggagcaatacagtgacattgggggttttggacaagcagattccagggagctggtggatggccatttgtctttgccaattgaaccacaaggaagaagtttgagaacttggggattccaacctccaaaaaggggtgcttatttatggggcccccagggacgggggaagaccctcctggcacgggccttgtgccgcacagactaagggcaccttacctaaagatggctggcccccaagctgttgcagatgttcattggagatggtgccaagctagtccgggatgcctttgccctggccaaggagataagcgccctctatcatcttcattgatgagttggatgccatcggcacccaagcggttttgacagttaagaaggctgggaacggggaggtgcagaggacaatgctggagcttctgaaccagctggcatgggcttccagcccaaacaccccaagtttaaggtgaattgcagccacaaaacagggttggacatcctggacccccggccttccttccgcttcgggcccgccttgacccgcaaagatagagttcccggatgcccaatgaggagggcccgggcacgaattcatgcagactccactcccgaaagatgaatgtcagtcctgacggtgaactaccgaggagctggcctcgctgcacagattgacttcaatgggggcccagtgcaaggctgtgtgtgtgtggaggcgggcatgatcgcacctgcgcatggggtgccacggaggctcaccccccgaggactacatggaaggcatcctggaggtgcaggccaaaaaaaaagccaacctccaatactacgcctagggcacacaggccagccccagtctcacggcttgaagtgcgcaataaaagatggtttagggtcnnnnnnnnnnnnnnnnnnnnngggggggccccttttaggggaacaagttttttggccnnnnnnnnnnaaagaaaattttttttattgggggcccaaaaataaaataacggggccgggttttaaaaacnnnnnnnnnnnaaaacccgggggttacccaaaaaaaaattcgcggggagaaagnnnttcc

SEQ ID NO: 113364 - DNA, 3296 bp, Homo sapiens
  misc_feature (1)...(3296): n = a,t,c or g
ggaagttccgggtagacccacgcggccgctctttttctccaaaggagggcttgtggagatcggatcttttctccagcaattgggggaaagaatgtttttttctctgaattcgcttagtgtagaccagcggcgcacattttttaggcgccttttcgaaaacctagtagttaatattcatttgtttaaatcttattttatttttaagctcacactgcttaagaataccttaattccttaaaagtgaaataatttttttgcaaaggggtttcctccgatttgggagcttttttttttcttccaccagtcatttctaactctttaaaaccaacttcagttccatcatgggtgatgttcaagaagaccaagcgcttttgaggtggcctttaaacgacccctgaaaagggtgtaacggcagtgggcgagaaggtgggctgggccggggtgaatagtggaagggtgtgtgaaagttactccgtgtccaaagcccgttaggganccctgggcttgcggaagtggcctaaagtgcctttggatgccagggatccccagcagtgcaaaacaggccttcggaggtacctgccgctattgaagacacgccttccttctgggaagacccagcccaacagggtgagaattgagatggtgatcatgagaccttggaaacaaatatgagtacaagttcggctttgagcttccctcagggcggcctcttgggaacgatccttcaaaggaaaatatgggtgtgtagactactggggtgaaaggcttttccttgaccgcccgagcccagccaacttcaagaggccaagaaaaacttttgaagtagtggatctggtggatgtcaataccccctgatttaatgggcacctgtgtctggctaaaaaagaaaataaagttttcttgcatgttcattcctgatggggcgggtgtctgtctctgctcgaattggacagaaaaagggattctgtgaaggtgatgagatttccatccatgctgactttgagaatacatgttcccgaattgtggtccccaaagctgccattgtggcccgccacacttaccttgccattggcccagaccaaggtgctgacttataagttgttatctattcataggccatcatattatctcagggacatgcgcatcatgggcgtgggcaagagccttcggggttcagaagatcagggccttcttatcctggggctgcaacatccttccgagttgaatattccctactgatctaatgttagcgttcctggattcaaaaaaggtcttccttgacctgcccctggtaaattgcagcaagatcagttttaagcagcagaaccatccaggcatggccaagcccgaaccagctctgagatgagttgggtagatcttgaaccatccctgataccccagaaagctcctcccttgctatatggatgtcattcctgaagatcaccgattgggagagcccaaccactccttttgctagatgacatggatggctctcaagacagcccctatctttatgtatgcccctgagttcaagttcatgcccaccacggacttatactgaggtggatcccttgcatcttcaacaccaatgtgcagttgagcatgttggaagaaaagaagcagctttacctacttgtgtcttttagtctctcctcgctggacagttcacttttttcagagactcaacagtctctgcaatgggagtgtggggtccacccttaggcctctgaccttccctaatgtagggaggtgggtcagcagggcaatctcctgggggccttaaagggatgcgggactcatccttcaggccaggcgcccattgtttgttgattacagggggtgttttgtttgggatggggttttaaaaattaaactaggaaaaactcagggcccatcccattttcctcagatctcctttgaaaatttgaaggccttttccgatagtttccgggtcaaggtaaaaaatgggcctccctgggcgtaaccttttttccaaaggttttttttggaaggccttttttgtaaaattggtggaaagggaacttttggaccttgaacttattgttatcatgttggagaagagccaatttaacaaactagggaaggatgaaaaggggaaattgtgggccaaaactttggggaaaagggaggttctttaaaatcagtggtttcccctttgtgcactttgtagaaaaaaaaagaaaaaccttcctagagctgatttgaatggacaatggagagagctttccctgtgattataaaaaaggaaagctagctgctctacggtcatctttgcttaagagtatacttttaacctgggcttttaaagcaagtagtaactgccccaccaaaggtctttaaaagccatttttgggagcctatttgcactggtgttctccttacttgcaaatatttttcatatggggagggatggttttctctttcatgtaaagtccttgggaatttgattcttaagggtgatgttctttaggcactttaaattcccgttccaaattttttggttctccccttctggccatcttgaaatgttaagctggaaactggggtctacttgtgtcctctagggggtttaaggcccaaaaggaccaaaaaaaaattttacctacttttggagatttgcccccaatgtaccagaattatataattctaaacgcttaaaatcatgtgaaaagggttgcctgctgtccagcccttgccccactgtgnaccttcaaaaccccaaggagggaactccttgaatccaagatgcccaaaccccctgtgttcaagaaaccctcccaaatacctgcccattgggaaaacttaggagggccaggtctttcataaaaaggccctttggaaccccctttccctgcccctgtgtttaggggagaagggggatattggggccccttcacttgcagctgccagacacttgggtccagttcactcttcaggcccataggcactttgttcactggtcctgtggtcaggaggcantgaagctccacccttttctggagagtttattacagcccagaaacgtgtgggctgaagatggccggcttcaaggttttggaataaggaatcttttggaatggcaaagactatattttgtacttaaccagatatattttttacccacagatggggatattcttctgtaaaaaaatgaaaataaagtttttttaatgaacaaaaactttggaacttaaaaggcggagcgggcccgaaattccaaatttttgaacccggaattcctgaaaacccccgggggctctttaactggggcttgg

SEQ ID NO: 113365 - DNA, 749 bp, Homo sapiens
  misc_feature (1)...(749): n = a,t,c or g
atcgatcactattccagngtggnggaattcgtccttcttgatcctgaactgggttaggtgcgcctgttgctgctcgtgttgaatctagaaccgtagccagacatgggactggaggacgagcaaaagatgcttaccgaatccggagatcctgaggaggaggaagaggaagaggaggaattagtgataggactgaggctttcagtgcatacttggcaaccttggaaggccaggaatgtgaaacttttcccctactaccttagcatccagaattgaatgggagacccgcattctgccatttctggcgggcagtgtggctctgccagcgtggccttctgcaccggatcccctaacaaacaagtgagagagcaatgcgaagcagttggagaaatgtgtaaaaggccccggggagcggcttagaagctcttgttgaatgaacgtgtatcctctccgttcacatacagaagaggattgcacggaggagctctttgacttcttgcatgcgagggaccaatgcgtggcccacaaacttctttacaactttgaaataaatgtgtggacttaattcaccccagtcttcatcatctgggcatcagaatatttccttatggttttggatgtaccatttgtttcttatttgtgtaactgtaagttcacatgaacctcatgggttttggcttaggctggtagcttctatgtaattcgcaatgattccatctaaataaaagttctatgatctgcaaaaaaaaaaa

SEQ ID NO: 113366 - DNA, 2852 bp, Homo sapiens
  misc_feature (1)...(2852): n = a,t,c or g
attttantggaccgcccgtaccggtccggaattcccgggtcgacccacgcgtccggacaagacagcacagacagattgacctattggggtgtttcgcgagtgtgagagggaagcgccgcggcctgtattactagaccgtgcccttcgcctggtatagaggcgccttgtgacccccgccccctggcgcctgccagtctgaaattgcgctgtgctccgtggctactgcctgggagctggactagcctgctgctgcccaactggctggcaagatgaagctctccctggtggccgcgatgctgcgtgctgctcagcgcggcgcgggccgatggaaggaggacaagaaggaggacgtgggcacggtggtcggcatcgacctgggggaccacctactcctgcgtcggcgtgtttcaagaaccggccgcgtggagatcatcgccaacgatcaggggcaaccgcattaacgccgtcctaatgtcgccttcactcctgaaggggaaacgtctgattggcgatgccgccaagaaccagctcacctccaaccccgagaacacggtctttgacgccaagcggctcatcggcccgcacgtggaatgacccgtctgtgcagcaggacatcaagttctttgccgttcaaggtggttgaaaagaaaactaaaccatacattcaagttgatattggaggtgggcaaacaaagacatttgctcctgaagaaatttctgccatggttctcactaaaatgaaagaaaccgctcaggcttatttggggaaagaaggttacccatgcagtttgttactgtaccagcctattttaatgatgcccaacgccaagcaaccaaagacgctggaactattgctggcctaaatgttatgaggatcatcaacgagcctacggcagctgctattgcttatggcctggataagagggagggggagaagaacatcctggtgtttgacctgggtggcggttcctttgatgaggctcttctcaccattgacaatggtgtcttcgaagttgtggccactaatggagatactcatctgggtggagaagactttgaccagcgtgtcatggaacacttcatcaaacttgtacaaaaagaagacgggccaaggatgtcaggaaaagacaatagagctgtgcagaaactccggcgcgaggtagaaaaggccaaacgggccctgtcttctcagcatcaagcaagaattgaaattgagtccttctatgaaggagaagacttttctgagaccctgactcgggccaaatttgaagagctcaacatggatctgttccggtctactatgaagcccgtgcagaattgtgttggaagattctgatttgaagaagtctgatattgatgaaattgttcttgttgggtggctcgactcgaattccaaagattcagcaactggttaaagaagttcttcaatgggcaagggaaccatccccgtggccattaaaccccagatgaagctgtagccgtgatggtgctgctgtccaggctggtgtgctctctggtgatcaagatacaggtgacctggtactgcttgatgtatgtccccttacacttggtattgaaactgtgggaggtgtcatgaccaaactggattccaaggaacacagtgggtgcctaccaagaagtctcagatcttttctacagcttcgtgataatcaaccaactgttacaatcaatggtctatgaaggtgaaagacccctgacaaaagacaatcatcttctgggtaccattggactggacgtgaaattccttctgctcctcgtggggtccccacaggattggaaagtcacccttttgagaaagaatgcttaatggtagttcctcgaagtgacagctgaagacaatggtactgggaacaaaaataagatcacaatcaccaatgaccagattcgccctgcccctgaaagaaatcgaaagggatgggttaatgatgctgagaagtttgctgaggaagacaaaaaggctcccaaggagcgcatttgatactagaaaatgagttgggaaagctaaggcctattctctaaagaatcagattggagataaagaaaaagctggggaggtaaacttttcctctgaaagataaggagaccatggaaaaaagcttgtagaaagaaaagatcgcaatggctggaaagcccaccaaagatgctgaccattgaagacttcaaagctaagaagaaggaactgggaagaaattgttcaacccaattatccaggcaaacctcctatgggaagtgccaggcccctccccccccaccgggtgaaggaggataccagcagaaaaaagatgagttgtagaacactgaatctgcctaagtgctgtaatatttgtaaattacttgggactcagggaactttttgttagggaaaaaattgaaaagaaacttaaggtctcgaatgctaattgggaatcttccccctcagaagtggagttgaaacctgctatagcctcaaccggctgtttactgcttttcaattagcagttgctcacatgtctttgggtggggggggagaagaagaattggccatcttaaaaaagcgggtaaaaaaacctgggttagggtgtggttttcacacttcaaaatgttctatttaacaactgggtcatgtggcatctggtgtaggaagttttttctaccataagtngacaccaataaattgtttgttatttacactgnnnnnnnnnnnnnngggggggcctttttaaaggatccaatttatacgccggggggtgggaaggttttattttttttatggggccccctaatttaatttccggggccgttttttaacaccggggggaggggaaaacccggggggtaccaaattaaatccg

SEQ ID NO: 113367 - DNA, 701 bp, Homo sapiens
ttttaccagtagcctatttcagatttattaaaaaacacataggtaacgagtcagagctttggctaggaatgatttggaaaagaactgaaggcataattccacaggacattcacagttgtgtgctagagacagagaggagcaggaaagtgttttagaagcatttgcggtggacaatggaaggcccggcttcatcgtattcctgtttgctgatcccacatctgctggaaggtggacagagaggcccaggatggagccaccgatccagacagagtatttgcgctccggaggggcaatgatctgtcagtcaagatgaaaaagaatggtcattaatgtcatcattaggtgcagtcgttagtgcggtaggacagagcctggatgttctaccatggcctagtttcttgttcagcagggacacaggcttgtctgttagatgccaattttgtcctaattgtgtcatgttcttggcaggaccgccagagggagccatggatttagaaattcttcagtaagcacattcgtttttctcacctgtaactcttcgaccacattattgagcaaactgaaagttggctccaaatccagccatggcccccacttaagaaccctggcaatgcctctgatttccatgaactctgcctcagaattcaacacgatacactttctgtagaaacaaaccctagcctattcaaaggagaagtttt

SEQ ID NO: 113368 - DNA, 2376 bp, Homo sapiens
  misc_feature (1)...(2376): n = a,t,c or g
ggcacgagggctgccgaagtcagttccttgtggagccggagctgggcgcggattcgccgaggcaccgaggcactcagaggaggtgagagagcggcggcagacaacaggggaccccgggccggcggcccagagccgagccaagcgtgcccgcgtgtgtccctgcgtgtccgcgaggatgcgtgttcgcgggtgtgtgctgcgttcacaggtgtttctgcggcaggcgccatgtcagaaccggctggggatgtccgtcacgtnagaacccatgcggcagcaaggcctgccgcagccatcttcggcccagtggacagcgagcagctgagccgcgactgtgatgcgctaatggcgggctgcatccaggaggcccgtgagcgatggaacttcgactttgtcaccgagacaccactggagggtgacttcgcctgggagcgtgtgcgggggccttggcctgcccaagctctaccttcccacgcgggccccggcgaggccggaattgaagtttgggaaggaaggcaaggcggcctggcacctcaacctgctctgctgcaggggacagcagatgaagaccatgttggacctgtcactgtcttgtacccttgtgcctcgctcaggggagcaggctgcagggtccccaggtggacctgggagactctcagggtcgaaaacggcggcagaccagcatgacagattttctaccactccaaacgccggctgatcttctccaagaggaagccctaatccgcccacaggaagcctgcagtcctggaagcgcgagggcctcaaaggcccgcttctacatcttctgccttagtctcagtttgtgtgtcttaattattatttgtgttttaatttaaacacctcctcatgtacataccctggccgccccctgccccccagcctctggcattagaattatttaaacaaaaactaggcggttgaatgagaggttcctaaagaagtgctgggccatttttattttaaatgaaatactatttaaagcctcctcatcccgtgttctccttttcctctctcccggaggttgggtgggccggcttcatgccagctacttcctcctccccacttgtccgctgggtggtaccctctgggaggggtgtgggctccttcccatcgctgtcacagggcggttatggaaatttcaccccctttcctgggacactcaggacctgaattcttttttcattttgaagaaagtaaacaagatggcactttgaaggggcctcaccgagtgggggcatcattcaaaaaactttgggagtcccctcacctcctcttaaggttgggcaagggtgacccttgaaagtgggcaacagcctagggctgagctggggacctgggtaccctcctgggctcttgatacccccctctgtcttgtgaaggcagggggaaggtggggtcctgggagcagaccaccccgcctgccctcatggcccctctgacctgcactggggagcccgtctcagtgttgaagccttttccctctttggctcccctgtaccttttgaggaagccccaagctacccttcttctccaagctgggcttctgcaattcccctctggttgctgttccctcccccttgttccttttccctttcagtaccctctcatgctccaggtggctctgaggtgcctgtcccacccccacccccagcttcaatggactgggaaggggaagggacacacaagaagaaggggcaccctagttctacctcaggcagctcaagcagcgaccgccccctcctctagcatgtgggggtgagggtccccatgtggtggcacaggccccctttgagtggggttaatctctgtgttagggggtatatggatgggggagtagatctttcttaagaaggaagacactggccccctcaaaatcgtcccagcgaccttccctcatccaacccccatcccctcccccagttcaattgcactttgaattagccagcggaaacaaggaagtcagaacatttttaagatggtggctagtagaggcttatggactagggcatgccaccgtcgggctcatatggggctgggagtagttgtctttccctggcactaaacgttgaagccccttggaggcactaaaagtgctttagtgtacttggagtattggggtctgaccccaaaacaccttccagcttcttgtaacatactgggcctggactgtttttctctcggctccccgatgtgtcctggttcccgtttactccacctagactgtaaacctcttcgagggcaagggaccacaccctgtaactgttcttgtggtctttcacagctcctcccacaatggctggaatatactagcaggtgctcaataaaatgatcttaagtgactttaaaaaaaaaaaa

SEQ ID NO: 113369 - DNA, 856 bp, Homo sapiens
aaaccagcctcatgtgacaaagcgcaggacccctcactgccccaactgcttgctgttctctctttcttgggctctaaggacccaggagtctgggtgcacagcctccttctctctgagattcaagagtctgatcagcagcctcttcctcctccaggacccagaagccctgagcttatccccatggagctctgccggtccctggccctgctggggggctcccctgggcctgatgttctgccctgattgctttgagcaccattttctggtttagggctgggggtcccacccacttagcttcactcgggcctctggccaacagggcatggggacatcatatcagggctacatccacgttgacgcagaccttcagcattatggctagatctgtggggccctgggtgtccgtgagctttcctgggtccttgtcctgcttcccctcacttgttccccccaggccacggcccgcttgtctaaaccaaccgaagcctttgctgcagccatctccatgggggtgggccatgcgggtgtacaccagcgagcggtggggacagcctccacaccccccagatccagaccttcttctcctggtccttctacctgggctgggtctcagctatcctcttgctctgtacaggtgccctgagcctgggtgctcactgtggcggtccccgtcctggctatgaaaccttgtgagcagaaggcaagagcggcaagatgagttttgagcgttgtattccaaaggcctcatctggagcctcgggaaagtctggtcctacatctgcccgcccttccagcccttccccagcccctcctcttgtttcttcattcattcaacaaaatttggctggaaaaaaaa

SEQ ID NO: 113370 - DNA, 895 bp, Homo sapiens
ttgtgcagctggaggcagagcagtcctctctggggagcctgaagcaaacatggatcaagaaactgtaggcaatgttgtcctgttggccatcgtcaccctcatcagcgtggtccagaatggattctttgcccataaagtggagcacgaaagcaggacccagaatgggaggagcttccagaggaccggaacacttgcctttgagcgggtctacactgttcaattagaactgtgtagatgcgtaccccactttcctcgctgtgctctggtctgcggggctactttgcagccaaagttcctgctgcgtttgctggactgatgtacttggtttgtgagggcaaaagtacttttgtcgggttacctagggagagagaacgcagagcaccccctgggctaacatatttggggaaacgcatcataactctttcctgtttcctcatgtccgttggtgggcatatttcaactaattaccctcatcctctttttcgggaagtgactttgaaaacttacataaaaggacgatctcccacccacccatctccccctcctacttcttcattccctaaactctctgctgaatatggggttgggtgttctcatcctaatcaataccctacaagtcatcataattcagctcttgaagagcattctgctcttccttagaaggccggtaaatctattggccatctgggcttcacagcttgagttaaccttgcttttccgggaacaaaatgatgtcatgtcagctccgccccttgaacatgaccgtggccccaaatttgctattcccatgcattttgtttgtttcttcacttatcctgttctctgaaagatgttttgtgaccaggtttgtgttttcttaaaataaaatgcagagacatgttttaaaaaaaaaaaa

SEQ ID NO: 113371 - DNA, 1383 bp, Homo sapiens
ggcacgagccagggtttcctcttcaagtaggtctaaaacattttttttctcattgacttccttcctgttctaactgccagtactcagaagtcagagttgagagacagaggcaccccggacagagacgtgaagcactgaataaatagatcagaatgactgaaaaagccccagagccacatgtggaggaggatgactgatgatgagctggacagcaagctcaattataaggcctccaccacagaaggtccctaaaagagctgcaggaaaatggacaaagatgatgagagtctaattaagtacaagaaaacgcttgctgggagattgtcctgtggtgacagatccgagaagcccccaatgtccgttgtcacccggcttcaccctgggtttttttgagagttcccccgggacccattcaccatgggacctttacttggaagatctggaaagcccttcaaaaaagggaaaccatttggtgttaaaaggaaggttctggaatattaggagttcaaaatttcactttccaaagttgaacaggggataattgttgttcagggcctgaaattacgttcagcacacctacaggactgggggtgaaagtggataaagcaacattttatggtttggcagctattggacctcggcctgaggagtatgagtttcctcacttccagttgaggaggcttcccaaagggcatggctggcccgaaggcacgttaccacaaaaagtccttcttcacccgcagatgcacagcaagaccacctcagctggggagtggaacctgttcgattaagaaggagtggacagaatgaattgcatccacccctttccccaccctttgccacctgggaaggaatttttttcagggcgtgtttcagcaccctgttccctcctcccttgttcccacagctggggttccctctttcaacatttgccacattttccttattggatggcatctttttcccaccctgttcattcaacgtgggtccctaggaacaaggagggctttaaaaccggggcttttcaccccaacctggttccctctggattccttccattcaggggccagatcttccacggtctccatcttcagtacacaatcattttaatattttccctgtcttaccccctattcaaggcaactaggagggccaggaaaatggggcaaattattcactaacagggtctttggactcagggttccagtaggtttcattctaatgcctaggattcttttgtggttgttgctgggcccaatgagtccctaagtcacatccccctgccagagggaagttcttcttttgtgaagaagacactgtaaacggacacaagagaacaagaataaaacaataactgtgtggtgttctggcaaaaaaaaaagg

SEQ ID NO: 113372 - DNA, 723 bp, Homo sapiens
ctagtccagtgcggtggaatttcacaactgtgttcactagcaacctcaaacagacactattggtgcatcttatctcctgaggagaagtctgccgttacttgccctgtggggcaagggttgaacgtgggatgaaagttggtggtgaaggccctgggcaggctgctggtgggtctacccttgtgacccagaggttctttgagtccttttggggatctgtcccactcctgatgctggttatggggcaaacccttaaaggtgaaaggctcaatggcaaagaaaagtgcctcgggtgccctttaagtgaatggcccctggcttcaactgggacaaaccttcaaggggcaccttttgccaacactgaagtgaagctgcactgtggacaaagcttgcacgtggattcctgaggaactttcagggttcctggggcaaacgttgctggtcttgtgttgcttggcccatcaattttgggcaaagaatttcaacccaccagttgcaggctgccttattcagaaagttggttggctggtgtggctaatgccctggcccaacaagttatcactaaagctcgctttctttgctgtccaatttctatttaaaggttcctttgttccctaaagtccaacttacttaaactggggggatattatggaaggggccttgagcatctgggattcttgccctaattaaaaaaacatttatttttcattgcaaaaaaaaaaaaaa

SEQ ID NO: 113373 - DNA, 1068 bp, Homo sapiens
ttttttccgcgtcgactgaacttctttccaatggaaaactcacggcccagtcccacaggaactgtgcgcataccaaacaacaatgaggaaggaagggccgggtggctctaccaaacagttcaggtccactgggtgaatgaagcctggcgggaaagcggactcctgaagattcaggtttacatcacgtcatccagcagagaatggaaagatcaaatttcctgaattgctatgtgtctgggtttcatccatcccgacattgaagtttgacttactgaagaatggagagagaattgaaaaagtgggagcattcagacttgtcttttcagcaaaggactggtctttttattttcttgtactacaactgaatttcacccccacttgaaaaagattgagtatggcctgcccgtgtggaaccatgtggactttgtcacaggccccaaggatagttaaagtgggggatccggaggacatgttaaggcaggcattcatgggaggttttgaaggatggccgcattttgggattgggaatgaattcccaaattcttgcttgctttgcttttttaatatttgatatgctttataacacttacactttatgcaccaaaatgttaggggttataataattgttaaccatgggccatggatcttctttataattctacttttgagtgctgtctccctgtttggatgtatctgaggcgggttgctccacaggtagctctagggagggctggcaacttagaggtaggggagcagagaattctcttatcccaacatcaacatcttggtcagatttgaactcttcaatctcttgcactcaaagcttgttaagatagttaagcgtgcataagttaacttccaatttacatactctgcttagaatttgggggaaaaatttagaaatataattgacaggattattggaaatttgttataatgaatgaaacattttgtcatataagagttcatatttactttcttatacatttgtataaagtaaggccatggtgtgtggtgtaatctggtgttattttttgttccacaagttaaataaatcataaaacttg

SEQ ID NO: 113374 - DNA, 3611 bp, Homo sapiens
  misc_feature (1)...(3611): n = a,t,c or g
ttcccgggtcgacgatttcgtctccgatccagcgagcgctgcgtcctctattccctgcgcccgtgcgtccagtctgcgacccgaggcctccgctgcggctgcgattctgctgcgaacctggacaccatggccaaaccaccacagggtgccggggaccggggctccatccatgacttcccaggctttgaccccaaccaggatgccgaggctctgtacactgccatgaagggctttggcagtgacaaggaggccatactggacataatcacctcacggagcaacaggcaaaggcaggagggctgccacagctacaaagtccctctacggcaaaggacctcattgctgatttaaaagtatgaattgacgggcaagttttgaacggttgattgtgcgcctgatgaggccacctgcctattgtgatgccaaagaaattaaaagatgccatctcgggccattggcactgatgagaagttgcctcattgagatcttggcttcccggaccaatgagcagatgcaccagctggtgaagagaatcacaaagatgcctacggagcgggacctggaggctgacatcatcggcgacacctctggccacttccagaagatgcttgtggtcctgcttcagggaaccagggaggaggatgacgtagtgagcgaggacctggtacaacaggatgtccaggacctatacgaggcaggggaactgaaatggggaacagatgaagcccagttcatttacatcttgggaaatcgcagcaagcagcatcttcggttggtgttcgatgagtatctgaagaccacagggaagccgattgaagccagcatccgaggggagctgtctggggactttgagaagctaatgctggccgtagtgaagtgtatccggagcaccccggaatattttgctgaaaggctcttcaaggctatgaagggcctgggggactcgggacaacaccctgatccgcatcatggtctcccgtagtgagttggacatgctcgacattcgggagatcttccggaccaagtattgaggaagtccctctacagcatggattcaagaaatgacacctctgggcgagttacaagaagactctgctgaagctgtctgggggagatgatgatgctgctggccagttcttcccggaggcagcgcaggtggcctatcagatgtgggaacttagtgcagtggcccgagtagagctgaagggaactgttgcgcccagccaatgactttcaaccctgaacgcagatgccaaagcgctgcggtaaagccatgaagggactcgggactgacgaagatacaatcatcgatatcatcacgcaccgcagcaatgtccagcggcagcagatccggcagaccttcaagtctcactttggccgggacttaatgactgacctgaagtctgagatctctggagacctggcaaggctgattctggggctcatgatgccaccgggcccatttacggatgccaagcaagttgaaagaagggccattggagggagcccggcacagatgaaaaaggcttcttaattgaaaatcctggccactcggaccaatgcttgaaatccgggccatcaatgaggcctataagggaggactatcacaagtccctggagggatgctctgagctcagacacatctggccacttcaggaggatcctcatttctctggccacggggcatcgtgaggagggaggagaaaacctggaccaggcacgggaagatgcccaggtggcttgctgaggatctttgggaaattagcagacacacccagtgggagacaaaactttcctttggagacacgttttcatggacgatcctgtgtnacccggaagctatccgcacgtccggagagtcatccaggagttcatcagattgaccaactatgacgtggagcacaccattcaagaaggatgatgttctggagatatcagggatgcattttgtggccattgttcaaaagtgcaaagaccaagcctctcttctttcccgacaaaactttacaaatccatgaagggtgctgggcacagatgagaagagctctgaccaggatcatgggtattcccgcaggggagatttgacctgctcaacatccggaaggaaattcattgagaaatatgacaagtctctccaccaagccatttgagggtgaacaactaccggagacttcttgaaaggccttgcgggctctctgtggtgggtgaggactagggcccacagctttggcggagcacttctgcccaagaaaatggttatcagcaccaggccgccattggccaagcctgattgttccagctccagagacttaaggaagggggcagggggtggggggaggggttggggttgggctctatttctttcagtggagcttaggaaacgcgtcccacttcccacggggccatcgagggcccagcacgagctgagcggctgaaaaaccgtagccatagatccttgtccacctccactccccctctgaccctcaggctttcccagcttcctccccttgctacagcctcttgccctggtttgggctatgtcagatccaataaacatcctgaacctctgtctgtaaaatgagtagtgtctgtactttgaatgagggggttggtggcaggggccagttgaatgtgctgggcggggtggtgggaaggatagtaaatgtgctggggcaaactgacaaatcttcccatccatttcaccacccatctccatccagggccgcgctagagtactgggaccagggaatttgggatgcctggggtttcaaatcttgcatcttgccatggcactttgttttcttgaccttagggccagccccttttccttccctgagtctctattttcttatctacaatgagacagttggacaaaaaaatcttggcttcccttctaacattaacttcctaaagtatgcctccgattcattcccttgacacttttgtatttctaaggaagaaataaaaagagatacacaaacacataaacacatttccagtgagggcctctgtcttctacctagagcctgcagcctggattttcctcattagagcttgaggttgtaaagtctgtccaggagcgagttacgtctttaaattcttgcaaggtgtttcccgggaagcgcacaggagaatctgagtttgcagcaagcctgggaaggctggcccagccctgctccgggccctcaggttccccctcatcccctctcgctgtctggacatttctgtatgctcttcatccatttcaaccaagcttcaaactttctcttttgaactatgcaagggtgcccgatgtgatcttgatctggagaggtgcatggaaagtttccttcatgcaggtcactgataagcaagtaggcgcaactgcagttcctctgccttccctcccccgctgccctacttctggactgaggctttggactaagattgtccagtgaccatggcatgggggctggctgctggccaaagggcacttctccctaccctggctgaccagactagtttattgcaggttagcgcgtgtttgcnnnnnnnnnnnnnnnnnnnnnnncttcnnnnnnnnnnnnnggaggggccnnnnnnnnnnngtgcccaggttggagggcaaggga

SEQ ID NO: 113375 - DNA, 2142 bp, Homo sapiens
  misc_feature (1)...(2142): n = a,t,c or g
tttcgtcggcggtggcggccggggagggtcagttggaggcaggcgctcgctgaggcaaaaggaggcgctcggcccgcggcctgcacagggacttagcccgcagagatcgaccccgcgcgcgtgaccccacacccacccactcatccatctatccactccctgcgccgcctcctcccaccctgcagcagagccgccgaggatgataaacacccaggacagtagtattttgcctttgagtaactgtccccagctccagtgcctgcaggcacatgtgttccagggcctctggtgggtgctcccttgggatgccctctcacccactgttgaaaatcccccggtggggcgagggggcgggcagggattccttctnttcttcagcttcttaattatatagggacgaggaaggttcactgtggacccaggggaccttccctgtggaatggatgggaaaaaaccttcaacattcgttccactttccagtatggagggttcaccgaggtgaaaggttctctttcttgggatgccagtcctgtcccagccagaagccctgttttgtagaaattgcccagataggattattaagctgatgggagcaaaagaaggattggttagcactgctagagtttggttgaagagaagatgaaaagtggaactatgtcttctcatctgccttcaggaaggccccaagaaagacaaaggctcccactccctgaaaaccttcagcttcttgggctttgagattgtacgtcccaggccaatccccttgtgtcccccctctcggcccagatgtgatgttccatggtttaatcccccctggacccagaactttgtcccgatgaggacctaatagtccatagaggatgcctttaccccaagagcccacagtgggggaagaggggaagttaggcagccctgggacagacgagagggctcctcgctgtctagggaaggaccactgagggggctcaggggtgaggggttgcctattgtgttctcggagttgactcgttgaaattgttttccataaaagaacagtataaacatagtgattcacatgtaatcaccaatagtaaatgaagatgtttatgaactggcattagaagctttctaaactgcgcttgtgtgatgtgttctatctagcctaggggagggccattgcctagagggggagggactgtctgggttcaggggcatggcctggagggctggtgggcagcactgtcaggctcaggttactagtgctgttggctttctgttttggttattaagacttgtgtattttctttctttgcttcctgtcaccccaggggctcctgagtataggcttttcagtccctgggcagtgtccttgagttgttttttgacactcttacctgggcttctctgtgtgcatttgcgtctggcctggagtaaagcaaggtccgaccccctccttctttacagctctagtgttattctgggcatttgggttaagctgggcttaatctgtttaaatgttatcagtacattttaaataaggggcattgaaatttactccccaccaccaaggggcttttttggggggatgcctggggccttttaaaaccactagcccaaactctaaattaaatcctcaaaatcactgcccagggagttcttgctcctgggttgcaggccccaggcccccaagggtctcccttcttggggtccacaaaacagccagtaagggaaggagggaatatattaggcaacttcagggcctggggaattgttggggggcaatcccgttccttagggactggatacttctggctggctgaggagtatagtactaagctgcctccccacccaggttcccgagtagtgtcctgagacctctgctctncaggggcctaagggtaacgcttgggaagtttagaagttggcctgcccttaactggtttttcacttaaacagccttttttctaaagggggttgagcaagggggagagatctagattgggtgagggttacggtggatgtcagggaggcaagtgtgttgtgttactgtgtcaataaacttgatttaaagttgtggttggtctattctttatttctgaactaggaccaactccctaccaaactgttttgactccagagcctaataaatagaggtgtggtgcg

SEQ ID NO: 113376 - DNA, 3432 bp, Homo sapiens
gaattcccgggtcgacgatttcgtgtggcagcagcgttggcccggccccgggagcggagagcgaggggaggcggagacggaagaaggtctgaggagcagcttcagtccccgccgagccgccaccgcaggtcgaggacggtcggactcccgcggcgggaggagcctgttcccctgagggtatttgaagtataccatacaactgttttgaaaatccagcgtggacaatggctactcaagctgatttgatggagttggacatggccatggaaccagacagaaaagcggctgttagtcactggcagcaacagtcttacctggactctggaatccattctggtgccactaccacagctccttctctgagtggtaaaggcaatcctgaggaagaggatgtggatacctcccaagtcctgtatgagtgggaacagggattttctcagtccttcactcaagaacaagtagctgatattgatggacagtatgcaatgactcgagctcagagggtacgagctgctatgttccctgagacattagatgagggcatgcagatcccatctacacagtttgatgctgctcatcccactaatgtccagcgtttggctgaaccatcacagatgctgaaacatgcagttgtaaactttgattaactatcaagatgatgcagaacttgccacacgtgcaatccctgaactgacaaaactgctaaatgacgaggaccaggtggtggttaataaggctgcagttatggtccatcagctttctaaaaaggaagcttccagacacgctatcatgcgttctcctcagatggtgtctgctattgtacgtaccatgcagaatacaaatgatgtagaaacagctcgttgtaccgctgggaccttgcataacctttcccatcatcgtgagggcttactggccatctttaagtctggaggcattcctgccctggtgaaaatgcttggttcaccagtggattctgtgttgttttatgccattacaactctccacaaccttttattacatcaagaaggagctaaaatggcagtgcgtttagctggtgggctgcagaaaatggttgccttgctcaacaaaacaaatgttaccttcttggctattacgacagactgccttcaaattttagcttatggcaaccaagaaagcaagctcatcatactggctagtggtggaccccaagctttagtaaatataatgaggacctatacttacgaaaaactactgtggaccacaagcagagtgctgaaggtgctatctgtctgctctagtaataagccggctattgtagaagctggtggaatgcaagctttaggacttcacctgacagatccaagtcaacgtcttgttcagaactgtctttggactctcaggaatctttcagatgctgcaactaaacaggaagggatggaaggtctccttgggactcttgttcagcttctgggttcagatgatataaatgtggtcaccatgtgcagctggaattctttctaacctcacattgcaataattataagaacaagatgatggtctgcccaaagtggggtgggtataagaggcttctcgtgcgtaactggtccttcgggctggtggacaagggaagacatcacttgagcctgccatctgtgctcttcgtcatcttgaccagcccgacaccaagaagcaagagatggcccagaatgcagttcgccttcactatggactaccagttgtggttaagctcttacacccaccatcccactggcctctgataaaggctactgttggattgattcgaaatcttgcccttatgtcccgcaaatacatgcacctttgcgtgagcagggtgccatttccacgactagttcagttgcttgttcgtgcacatcaggatacccagcgccgtacgtccatgggtgggacacagcagcaatttgtggagggggtccgcatggaagaaatagttgaaggttgtaccggagcccttcacatcctagctcgggatgttcacaaccgaattgttatcagaggactaaataccattccattgtttgtgcagctgctttattctcccattgaaaacatccaaagagtagctgcaggggtcctctgtgaacttgctcaggacaaggaagctgcagaagctattgaagctgagggagccacagctcctctgacagagttacttcactctaggaatgaaggtgtggcgacatatgcagctgctgttttgttccgaatgtctgaggacaagccaccaagataacagaaaacggttttcagttgagctgaccagctctctcttcagaacagagccaatggcttggaatgagactgctgatcttggacttgatatttggtgcccaggggagaaccccttgggatatcgccaggatgatcctagctatcgttcttttcactctggtggatatggccaggatgccttgggtatgggaccccatgatggaacatgagattggttggccaccaccctggtgcttgactatccagttgatgggctgccagataatggggcatgcccaggacctcatggatgggctgcctccaggtgacagcaatcagctggcctggtttgatactgacctgtaaatcatcctttagctgtattgtctgaacttgcattgtgattggcctgtaaagttgctgagagggctcgaggggtgggctggtatctcagaaagtgcctgacacactaaccaagctgagtttcctatgggaacaattgaagtaaactttttgttctggtcctttttggtcgaggagtaacaatacaaatggattttgggagtgactcaagaagtgaagaatgcacaagaatggatcacaagatggaatttagcaaaccctagccttgcttgttaaaatttttttttttttttttttaagaatatctgtaatggtactgactttgcttgctttgaagtagctcttttttttttttttttttttttttttttttgcagtaactgttttttaagtctctcgtagtgttaacgttatagtgaatactgctacagcaatttctaatttttaagaattgagtaatggtgtagaacactaattaattcataagcactcgtagttgagtgtaatctgaataaagtgtaacaatgtgtgtagcctttttgtataaaatagacaaatagaaaatggccccattaggttccctttttaatatgcttaaaataagcaggtggatctatttcatgtttttgatcaaaaactatttgggatatgtatgggtagggtaaatcagtaaaaggtgttattttggaaccttgtgtttggacagtttaccagttgccttttatcccaaagttggttgtaacctgcctgtgatacgatgcctccaagaggaaaatgcgggtttataaaaaaatgggttcaggatttaaaactttttaattcattcgaaaaaaaaaa

SEQ ID NO: 113377 - DNA, 3540 bp, Homo sapiens
caatatggcagtagccccgtgactgtttggggggctctgcttgcgttgccgggaccagaatccggaaggggctgttgaggggcgtcttccaatctcgcacagctgcgttggctgtagaagagaacggacggcgatggcgacggtcgcagcaaatccagctgcatgctgcggcggcatgtggcggcggcacgggcggtggactgaggatagagagccacagcacgaggagctgccaggccctggacagccagtggcgcctagatagaaaacggcgagagtgggcgagaacgtccactgcgggccggcgaaagctggtttccttgtggaagaagcacctggtataagcagtgggaaggcatacggtgcagggaggggaccaggactccagcaccttccctggctgcatcaacaattgccacactcttttcaagatgagataaacttggccgcctcaaggaagggactggtggaaggccgaggattatgtgctgctcccaacaggttgctttggcatttaccttggtcagctggtaatggtctagagcatggccagccacccatttgaacgcaaggttcattagagctgcccaacatccagaaggtcgaagtgtacccagtagaactgctgcttgtccggcacaatgatttgggcaaatctcacactgttcagttcagccataccgattctattggcctagtattgcgcacagctcgggagcggtttctggtgtgagccccaggaagactttcgtctttgggccaagaactcaaaaggctctttggataggttcgtatgacacacacatcacggttctcgatgcggcccttgagactgagcagctgatcatcatgggagacccgcaagaaagatggcacttgggcccagcgcacagttgcatgttcatggaacaacaacatgttcgggaagagggttgagggattttcaaggggttcagccaggcatctgtggcctcaccattctgggcaacacgtgcttcatgaactcggccctgcagtgcctcagcaatgtgccacagcttcaccgagtacttcctcaaaaaactgcctaaccctggaggaagctcaaacttcccgcaaacccactggggcatgaaagggtgagatccgcagaggccctatgccagaccctggtgaaagcaggcgtggtctggcccacccaccgctcccattgtgcccacatgtgttcaagaacaaggttggccattttgcatcccaatttctgggctaccagcagcatgactctcaggagctgctgtcattcctccctggacgggctgcatgaggaccttaatcgggtgaagaagaaggagtatgtgggagctgtgcgaatgctgctgggcgaccggttcaggaggtgggcacaggaggcatgcccaaaaccacaaacggcggaacgattctgtgatcgtggacactttccacggcctcttcaagaccacgctggtgtgccccgattgtggcaatgtatctgtgaccttcgaccccttctgctacctcagtgttccacttgcctatcagccacaagagggtcttggaggtcttctttattccccatggattccgcgccgcaagccagagcagcaccggctcgtggtccccaagaaaggcaagatctcggatctatgtgtggctctgtccaaacacacgggcatcttcgccagagagggatgatgggtgggcttgatgtcttcagtcaccgcttctataaaggttcttattcagctaggagggagccttttgaggcagcatcttgggaccgtggatggatatcttcgtctatgaagtgtcaggtcgcattgagggccattgagggctcaagagaggacatcgtggttcctgtctacctgcgggagcgcacccctgcccgtgaactacaaacaactcctacttacgggcctgatgctttttggacacccccttcctgggtatcagtgccccgggaccgctttcacctgggagggcctgtataacggtccttgatgtaccggctctcacgctacgtgaccaaacccaacttcagatgatgaaggacgatgggggattgagaaagaagattgacgaggaggataaaagatgaacggtcccttgggccctcaacttggggggcaagcttccgagacccctgagccagaagcaggcttgggccaagcttctggaagtcacgaacaggtgcccgttcctcctggacaattgccttggcacatctcagtggcccccaaggcgacgaacgcaagcagctggttcaactgcaagacggtgaactccaatgggcacaaccgactgcaccactccccttgcacgaagtccaatgccaagccggtacattgctattcgacttggaagccaagagatgaagaagccgttactatgacgaggtagaggttgaagggttacgtgaagcatgactgctttcgggtacgtgatgaagaaggctcccgtgcggctgcaggagtgcattgagctctttcaccactgtggagaccctgggagaaaggaaaacccctggtaattgccctttcctgcaagcagcaccagcttggcaacccaagaagcttggacctgttgattgctgcccggagattatcatcatccacctgaaaacgttttttccttacaccaaagtttctcccgagagaaagctggacaaccctccgtggaagtttcctaatccggggacctgggacttctcctgaagtttgtcatccaggcccaccagaatgaagtcggaatcccggagcttgtacaaaatatgacctcatcggcggtttcccaaccattatggggggcatgcgtgatgggacacttacacaacatttgccttgcaacaaggacagcggccagtggcacttacttttgattgacaacagcgtgttccccttgttcaattgaggaattcagattcgagttccaagggcagcctatgtccttcttctaccaacgccaggacgttggcgcagacgcatgcatgtccccgtgccgtgctcatctggcgccctcagtcctcccctgcctgcacgctccctcacctcagctcgtgagttcatgtgatgttatattgagagccctgggtcctgccacagaaatataaaataaaaaagccctctctgaaaatctcgcttctcgtgtccgccccgctttctcttattcggtgttaggtgcccccgccaggcaattgcaggcttaagtcgtggctactgttctccctgtgcccgctgcatcgctctctcccggggaaagaacaggtcgtgtctcctcctagcagtgcgcgccccgccctgttgtttgccccttccagcagtgaccctcccttcctagtctttaatttatggtcgtgcccttccctctcctcagccccagagtgttctgcgtgggtggtgatgggggttcacctgaacacagagtgtatttccattattgaggccctgtaccttctgctgtgtgtgtgtatatataaagcacccgtccgctcccctctatgctgctacgcccttcgctccctctcctacatcttggtggccc

SEQ ID NO: 113378 - DNA, 462 bp, Homo sapiens
taccgccacgtaattgttcgggtcgacgatttcgtcatgctgctggtgaaataatacaaaacatctcacagaataagaaaggaggacagacgtggggggtggagagagaaagggagggcaagggagaagggaagagagaaacctacagaaaggaagaaacagagcaacaggaattagaaaggaaagaggaactgagaaagagggagacaacaaagacaggaagagagctggctggaggaagcgggagagagggcacagggagccagaggccgtgggtgtcatgtgtctgagggcgatcgtgggactctgctgctccaggccgggtgctcaagggctggtcaatggaaaagtcatgtgggtgggcccctccagtgctggccccattggagtctgcagggaggcctgggtgccgccgttagtacatgtccttgtagatctcctggagcagaaggggcagcgagg

SEQ ID NO: 113379 - DNA, 1870 bp, Homo sapiens
  misc_feature (1)...(1870): n = a,t,c or g
gcggctccaggcagagggccacggcccacccacacgccacctctagccccgccccgcggccccttcacccggtgggcgggtgggcgggtcatcgccatgcgcgcgccttgccattggcccgcgccggtggaggcgggcctgctcacgtctgccggcccctctgttgtcgtttggcagcggatagaggacacgaccaagatggcggcggtgtctggcttggtgcggagaccccttcggagtgtaggcagcagcgcgcgggctgtattcccacgcgacccctgcccacgcctgcgtcccgccgtcatcttcctctctccctgccaggtctccgggctgctgaagagggcgctttcactggaccgcgccggctgcgctgcaggtgaacagttccgtgatgctataaatcagggtatggatgaggagctggaaagagatgagaaggtattatctgcttggagaagaagttgcccagtatgatggggcatacaaggtcagtccagggctgtggaagaaatatggagacaagaggattatttgacactcccatatcagagatgggctttgcttgggaattgcttgtaggtgcagctattggctggggtttgcggcccattttgttgaattttattgacctttcaatttctccatggcaagccatttgaccaggttataaactcagctgccaagacctactacatgttctggttggccttcagcctgtgcctatagtcttcagggggcccaattggtgcttcagcaggtgaagctgcacagcactcacagtggtttgctgcctggtatgggcattgcccaggcttaaaggtggtcagtccctaggacttcgtaggatgccttagggacttattaatccagccattcggtataacaatccagtggtggtgctagagaatgaattgatgtatggggttcccttttgaattctctccggaagctcagtcaaaagattttcatgattcctattggaaaagccaaaatagaaaggcaaggaaccaccatataacctgtggtttcccccattccaagaccctgtggggcccactgccttagaagcctgccagccagtgctatcctaaagaaggagttgaatgtgagggtgataaatatccgtacccattagacccaatggacatggaaacccatagaagcccagtgtcatgaagacaaatcatcttgtaactgtgggaaggaggcctgccccaaagtttgggagtaggagcttgaaatctgtgcccaggatcatgggaaggtcctgcgttcaattttcctggatgctcctgctgttcgtgtcactggtgctgatgtcccatatgccttatgccaaagattctaagatgacaactctatacctcatgtcaaagacatcatatttgccattaaaggaaaaccattaaaatatttagtttgggacttgaatatcaagtcgttgaaatttattttgaaatacttgcctgggcactgcccacctgggntttgtactgccaaagacctgactatttcaataacgggaaaatgatttcctaaagcaaccagcagggtatttttgtaccaggggaagttttaaatgtgtttgtgtatgggaaaactctcccactctcctccccgtagatgccatgcctccctttggccggttacgggtgccatgttcctttgaataaccaattatataacattttatcctctctcaccacaaggaccaagtatggatgtggcagagtcctgatgaaagatgtatcccaacaacgataacttatatgtataaaattaaagcatataatatacgtttactgttagtttgttttgataaagaataaaggaaaaatctaacatgaaaaaaaaaaataaaaaaaaa

SEQ ID NO: 113380 - DNA, 1192 bp, Homo sapiens
  misc_feature (1)...(1192): n = a,t,c or g
cttgaccccgtgngatgatacccagtctgagggcgacccacgcgtgcgccgaccgcgagccgtccaggtctcagtgctgcgcccccccctgagcctagaggatgtttcatgggatcccagccacgccgggcataggagcccctgggaacaagccggagctgtatgaggtgagtggtgggtgcccacccggccggcattggccaacagcaaatgcctgtgtggcctcaccagggtcctgcagcccctgttggcactggcccacagagcccgctctctccggcaggaagtgaagttgtacaagaacgcccgggagagggagaagtacgacaacatggcagagctgtttgcggttggtgaagacaatgcaagccctgggagaaggcctacatcaaggactgtggtctcccccatgcgagtacatctgcaggcctgcatccacggctcctgggtccaattacaaagcttgcctttcaggcaggttcccaggggcttcagaaattcagctctattgacgaattctgccgcaagtttccgcctgggactttcccgctggccaatggagcggatcaaggagggaccggcccatcaccatcaaggaccgacaaggggcaaccttcaacccgcttgcatcgcagacgtgggtcttcgctctttcatcacggttcatggacaagcttgcgccttggagatccggccgccaatggatgagatccagccccgaacctgcggagagcctgatgggagaacccatgcaaccgcatgagcccaccttcccaacccgaactttgagggccggccaagacgggttcaccaagtggctgcagacccctgagcgggcaatgtcgggcgtcaagatgagctgggacgactcacaggtgcgtccagatgctgttcgaccctggagtcagcctacaacgccttcaaccgccttcctgcatgcctgagccctggggcactagcccttgcacagaagggcagagtctgaggcggatggctcctggtcccctgtccgccacgcaggccgtggtcatccagcacaactcactgtctgcagctgcctgtctggtgtctgtctttgggtgtcagaactttgggggccgggcccctccccacaatacaagatgctcgtccgaccttcgaaaaaaaaaaattaaaatttaaataaaaaaagtcgtatcgatgtcgagcgatc

SEQ ID NO: 113381 - DNA, 4127 bp, Homo sapiens
agactggggtgggggaggggttcaggcctgttccccgcggctgcggcagcaccagggccggccgccaccgcctctagaacgcggaggaggtgggtcctgggaagcgggatgtccatcgctccagcttgttggtgaatgctgaggagagtcactgttgctgcagtctgtgccagcccggaggaagttgtgtgaggccgggcgggagctcgcggcgctctggggaatcgaaacgcggggtcggtgcgaagactctgctgctgccagaccctttcctattctggccatgcctggagaggaacaaggcgaagtctacctgcagctgccctgacctgcagcccaatggacaggatctgggcgagaacagccgggttgcccgtctaggagcggatgaatctgaggaagagggacggagggggtctctcagtaatgctggggaccctgagatcgtcaagtctcccagcgaccccaagcaataccgatacattcaaattacagaatggcttgcaggcacttctgatttcagacctaagtaatatggaaggtaaaacaggaaatacaacagatgatgaagaagaagaggaggtggaggaagaagaagaagatgatgatgaagattctggagctgaaatagaagatgacgatgaagagggttttgatgatgaagatgagtttgatgatgaacatgatgatgatcttgatactgaggataatgaattggaagaattagaagagagagcagaagctagaaaaaaaactactgaaaaacagtctgcagcggctctttgtgttggagttgggagtttcgctgatccagatgacctgccggggctggcacactttttggagcacatggtattcatgggtagtttgaaatatccagatgagaatggatttgatgccttcctgaagaagcatgggggtagtgataatgcctcaactgattgtgaacgcactgtctttcagtttgatgtccagaggaagtacttcaaggaagctcttgatagatgggcgcagttcttcatccacccactaatgatcagagatgcaattgaccgtgaagttgaagctgttgatagtgaatatcaacttgcaaggccttctgatgcaaacagaaaggaaatgttgtttggaagccttgctagacctggccatcctatgggaaaatttttttggggaaatgctgagacgctcaagcatgagccaagaaagaataatattgatacacatgctagattgagaagaattctggatgcgttactactcttctcattacatgactttagtggttcaatccaaagaaacactggatactttggaaaagtgggtgactgaaatcttctctcagataccaaacaatgggttacccagaccaaactttggccatttaacggatccatttgacacaccagcatttaacaaactttatagagttgttccaatcagaaaaattcatgctcctgaccatccacatggggcacttccttcctcaaccagcaacattaccaggggtgaagccacttcattatatatcctggccgggttggaccttgaaggcaaaggcagcattctttctttccttaggaaaaaatgctgggctcttgcactgtttggtggaaatggtgagacaggatttgagcaaaattctacttattcagtgttcagcatttctattacattgactgatgagggttatgaacatttttatgaggttgcttacactgtctttcaggatttaaaaatgctgcagaagctaggcccagaaaaaagaatttttgaagagattcggaaaattgaggataatgaatttcattaccaagaacagacagatccagttgagtatgtgggaaaacatgtgtgagaacatgcagctgtacccattgcaggacattctcactggagatcagcttctttttgaatacaagccagaagtcattggtgaagccttgaatcagctagttcctcaaaaagcaaatcttgttttactgtctggtgctaatgagggaaaatgtgacctcaaggagaaatggtttgggaactcaatatagtataggaagatattgaaaactcttggggctgaactgtgggaatagtaatttcgaattaaatccagatctttcatcttccagctggaaaacaagtacataggccacgggactttacgttggagggctttcggtttgccccggaaacagaatacccagttaaaattgtgaatactccacaaggctgcctgtggtataagaaagacaacaaattcaaaatccccaaagcatatatacgtttccatctaatttcaccgttgatacagaaatctgcagcaaatgtggtcctctttgatatctttgtcaatatccttacggcataaccttgcgggaaccagcttatgaagcagatgtgggcacagctgggagtattaaactggtagctgggagaacatggtttaattattcgagtgaaaggatttaaccacaaactacctctactgtttcagctcattattgactacttaggctgagtttcaattccacaccagctgtctttacaatggataactgagcagttgaagaagacctacttttaacatcctcatcaagcccgagactttggccaaagatgtacggcttttaatcctgggaatatgcccgttggtctatgattgacaagtaccaggctttgatggacggcctttcccttgagtctctgctgagcttcgtcaaagaattcaaatcccagctctttgtggagggcctggtacaagggaatgttcacaagcacagaatctatgggatttcctgaaatatgttgttggacaaactaaactttcaagcctctgggagcagggagatgcctgttgcagtttccagggttgtagagctgcccagtggcccaccattctaatgcaaaagtgaaaagcttttgaaccagggttatggccaactttggaagtcactgtgtactaccagtcaggtacccaggagtctaagaggaatatacgcttatggagctgcttgtgatgcacatgggaaggaaccttgttttgacttccttccgaaccaagcagacccttgggtacctatgtctacccctaccctgtagggaacacatcgggggtattttaggattttctttacgctggggagaccggcacacgcaattacaattctgaaagttgttgaataagaaagatagaagagtttctttctagctttgaggggaaaaattgaggaccctttattgaaaagggcattcaaccaccccaggtcaccagctctcgatcaagctgaagggagtgtgaggatacccccacccttgggggaaggaaggtggaataggaaactgggaatgaaagtggttaacaccagacagtaccctcctttgaaccgcccttgcccccacgagattgaagccactgaaagtcattcctcaaaatccagaccctggtcaactgggttcaaagcccatagagggccccggaagtaaaatgcctcagcgttcatgtgagttgttggatatgggaagtatgaactggaagaggatggtcccccctcttagtgaggattcaaattcttcttgtgaagtgatgcagctgacctacctgccaacctctcctcttgctgggcagattgtattcatccccatttattgatgttcagggcttttcacaacaacactcaaccttctcccctaccataaaatagtcaaataaaataaaactgcagtccacgttggccctgaagcaatgtgtattttaaaatgtgtttgtttgtattttatggagttagttatactactgccttagggcttccattgaagttttgcactggcatcatagcatttgatttactttttatcctttgttgagactaataaacccagggttactgtaggagctggcaaaggaaaattagcagaatgggccaagcgagaccagaaagcctgcagcagcactttgagaagccctggcctgtgtcctctcagactgagaatctacttcttgaaaggccttacgtaaccagtatattgaataactaactaaatgctaggtactaatacctgtttttttaatgtatttttaaataaaaaagatgatagatagatagatagatatagttctgtatttcccttca

SEQ ID NO: 113382 - DNA, 2907 bp, Homo sapiens
cgaggggaaattcccacattttaattttgcagcagaatcttttgagcagcttttggaaccacagtgtttgccaagataagagtttgagaatccagcagccctgggtgcctggctgcatttggtttcctgcatgtgctgggtgtgggcggggccacgcacaggccctgcatgggaggactcctcaccccaggcctgtggtgctgcagacaaccgtctcctgtctacactgcgacccagccacaagctgtggggtctcagtggcctgggggaaagcagctccactctcctgcccttcctggctgcccctttgggttccagccggggtcacgtccagcctccactgggaaaccagtgactgaggcctggacccagaggtggaccaggcatttcctgggcacctgtgacctgggaagaagcgagtcagtggcccgttcaacctgctctgcagctgctataaatagcctccctgtttccaagaggaggtaaggaagtgtttatcttctaaaaaccagacgtttcctgatgctctgagcgttactcagtgctacagaggagatgcacacgtccccactatgttctgtcttgagaaggggacaagagaacgaggaaaaggagccactgaactttaatttgcacctacagcgtgccttggcactgggctacagaggcaccttcctgcgtgaatcctgtgcggcaggtcttattgccataataagtcacatcaaagacactgatggtcataaaacactgatttacataccatagggaaaaacgctgccaatcttaactaagatgctacaactgtacagttccttccaatcagagatgttcacgtgtgaaaaaaaaactgtgctacttacatatctatgaaagctgcgattatcccacttggcaggtaagggaaactgaggtcctgtgagtgaaatgacctcatgatcacacaacaggagatggcagggctgggattcaaacccgggagtgtctgctgccacatcccacactcccactgcctggctccaagtcccaggaagctcgagactgtgagttttctcccttgaaaactcacctgggagagagtccgggcacctgtgcctatgtggagggttccagccccagccagggcccctccgcttgcccacaccctgggagggagaagcgggcctcccttccaggctcatctgctcactgccggcattctcctgggcagaagctgaggtctgagagatctggactccaacccaagggccctctcttgttattcaggggcggccaccagtagagaggggacctggggccttgtcccaccaccattcctaggccccgtgatcaccaccccctcaagcggggccccagcccgctgaggcacccccttcacgtggacccagccctcggctgtttccagggttcactgcccatggtgttgttcttctggggccacagcagccaggggttccagggggcgagggacggggggacaccctgaaaaacaccccgttgttcatggacttgtgcccattcattcggagactcctgaaaaactgggctgtttgcaaagcaaatccagctccttgtcctatcaggttctcagaacggggagtcccctgggatggagctgctcccctcacggtagcaccacgtttccagtccctcgatgccactaatcagcatggactgtgttcaggacacagggtgaacttttctctgacccccggtgctggtcctgtgccagcacgtagtagttactcagtagaggtttgctgagtaaaccagaaatcagattatgagtgttcaggggtttgataaaacagcaccacataacgcacacaaagatactccagaaacatttgctgagtacctagtacgtgtgaggtgctgtgaggatagagcagagaggactgtgccccagctgtgatgctggcagaggtgacactaagagggaaatgagatatttggggcagaatccactgggctctcttggccatccgctgccttgggtctgttgaggtggggtgcccaaaggctgccttcttgaccagaactggctgtgcgctttcacagaacctcctctttcattgggaaatgctggggcacatttgcagttcagtgagcttgctgccaaaacggcgtttaagtaggaacccccagagggccccgccggtttgggtgatccaccctcaggtccttgccagggaagacacaagtgaggaagtttggctaatttgctgcttttcagggcctggaaatcagttcgccaaggccccaggagaaccccgggtgaagtccgtccagttgaaggcaagaggcaattaacctcccattgcctcggccctgcgcctgccccagtcctgggcagggggcaccggctcaggaacatgcggcctcccggcatttcctcggtatttaactgtctcgcctgtcttatcccgagtccctaatgaaacgacttgtgttgacaatctgtctgtggcctttacgaaagtgttttgtggcaatttttattcctttttaaaagcaacttttaaaaattggatgggggaaggggggtaagcatacgtggtaagggttctaagaaatctgtggtcatcgctgaaatcctttttgcatcatgttttttgatgttggagtgatgaagtgtacatcccccaccccacacaccactacctgtgtacagacctttttaaaacatgtcttctttttctgattcactactgtgccctcaccctacctttctacccccagagacataaaaccccagttttttacaacctgggaagtgggttgggaagggtttgcactggtcttgagtgttgtgcttttctgtgttgtgtgttttgatttttgtctttttatctgttttatattgacataattttcctgtttaaaaaaaatacaactttggcttgttaa

SEQ ID NO: 113383 - DNA, 1423 bp, Homo sapiens
  misc_feature (1)...(1423): n = a,t,c or g
ccacgcgtncgcccacgcgttcgcccacgcgtccgaagcgccttctccgcaccagggattttcccacccatttataagccaagatgtccagcaagcggtttcaaagccaagagcaccagagaagcggccatcttgcgtgtccacatccaatgtcttcgcaatgttttatccagtcccatatccaggagtttaaggaggctttcaacatgattggtccagaaccgggatggcatcatttaccaagaaggacctgcacgacatgctaagcctcgctggggaagaaccccacagacgaatacctgggagggcatgattgagcgaggccccgtgggcccattcaacttcaccatgttccttcaccatgtttggggagaagctgaacggcacggaaccccgaggatgtgattcgcaacgccttttgccttgctttcgacggagggaagccttcaggttttcatccattgagggaccaccttccggggagcttgcttcaccaccatgggtgaaccgttttcacagatgaggaagtgggacgagatgtaccgggagggcacccattggattaaggaaagggcaactttcaactacgtgggagttcacccgcatcctcaaacatgggcgccaaggatataagacgactagggccacccccagcccccttgacaccccagcccccgcccagtcacccctttcccgcacacacccgttccataccagctcccctgccccatgaacccctcgcttcaggggttcccctttttgaggggtttaggggttcccagtttcccagttgggaaggaaacagggccagggagaagttgcgttgcccgagcatgagggcagatgttccccacagttgaccccaagagccctggggcttaatagctcttttgacccctcccaaggaaaagacccacccttcttgggggacattgggcttggaagggcagggaccttagaaggcacccaaggggaagggcccctttttccggggcttgttttccccgaggggagggaaggggaaggggggttttgttgttgccccccagggaaggaagagggccttgagtccctgggatcaagaacacccccttacgtgtatccccacacgaaatgcaagctcaccaaggtcccctgtcagtccccttccctacatccctgcacgcgccactgccgcacacccacccagagcacgccacccgccatgggagtgtgctcaggagttcgcgggcaacgttggacatttgtcccagaggggggcagaatctctcaatagagaaactgagcactgaaaaaaaatgatacgctagaaacaaaaataataaaaaagcggccgccccttaataaagccccccaggggctcccacagacagtcgctctctatagcacattgctcgctcctattagcagctaaataaaatcg

SEQ ID NO: 113384 - DNA, 1052 bp, Homo sapiens
ggcacgagtcaaagacagagacaccaagaagaatcggaacatacaggctttgagatcaaaggtttataaagccaatatctgggaaagagaaaaccgtgagacttccagatcttctctggtgaagtgtgtttcctgcaacgtttcacgaacatgaacatcaaaggatcgccatggaaagcagggtccctcctgctgctgctgggtgttcaaacctgctcctgtgccagagcgtgggcccccttggcccatctgtcccggcgggcttgtcccgatggccaaggtgaccctttcgagaccttgtttgaccggcgccgtcgtcctgtcccactacatccatgaacctctcctgcagaaatgttcaagcgaattccgataaacggtatacccaatggccgggggttcatttaccaagggccatcaacaagcttgccacactttcttccctttgccaaccccccgaaagacaagggagcaagccccaacagatgaattcaaaaagaatttcctgagcctgatatatcagcatattggcgatcctggaatgagcctctgtatcatctggttcacggaagtacgtggtatgcaagaaagcccccggaggctatcctatccaaagctgtagaagattgagggagcaaaaccaaaagggcttccaagagggccatggaagctggatagtcaagcccaggttcatccctgaaaacccaaagaaaatgagatcctaccctgtctgggtcggggacttcccatcccctgcagatggcttgatgaagagtctcgccctttcctgccttattataacctgctccgactgcctacgcagggatgtcacataagatcgacaattatcctcaagctccctgaagtgcccgaatcatccacaacaacaactgctaagccccacatccatttcatctatttctgagaaggtccttaatgatccgttccattgcaagcttcttttagttgtatctcttttgaatccatgcgtgggtggtacagggtctcctcttaaaaaataaaaactgactccttatagacatcaaaatcta

SEQ ID NO: 113385 - DNA, 1814 bp, Homo sapiens
  misc_feature (1)...(1814): n = a,t,c or g
ccattgtgctggaaaggcgcgcaacggcggcgacggcggcgaccccaccgcgcatcctgccaggcctccgcgcccagccgcccacgcgcccccgcgccccgcgccccgaccctttcttcgcgcccccgcccctcggcccgccaggcccccttgccggccacccgccaggccccgcgccggcccgcccgccgcccaggaccggcccgcgccccgcaggccgcccgccgcccgcgccgccatgggagtggagggctgcaccaagtgcatcaagtacctgctcttcgtcttcaatttcgtcttctggctggctggaaggcgtgatcctgggtgtggccctgtggctccgccatgaacccgcagaccaccaacctccatgtatctggagctgggagacaagcccgcgcccaacacctctcgtctgtaggcatctacatcctcatcgctgtgggcgcctgtcatgatgttcgttggcttcctgggctgctacggggccatccagggaatcccaagtgcctgcttggggacgttcttcacctgccctggtcatcctgttttgcctgcgaggtggcccggcggcctaatggggctgtgatgaacaatgacctgatatgcctaggatgtgaagcagttctatgaccaaggccctacagcaaggccgtggttggatgatgacgccaacaacgccaaggctgtggtgaagaccttccacgagacgcttgactgctgtggctccagcacactgacttgcttttgaccacctcaagtgctcaagaacaatttggtgtccctcggggcagcaacattcatcagcaacctttttcaagggagggactgccaccagaaagatcgatttacctcttctccgggaaagctgtacctcatcgccacccccccccccgacactaccagaaacccccccattattcgagatgatcctgaagcatggtgcttgtgctgtgggcatccggaacaagctccggtgtacttgaggcccccgcaagctctggcccacaggggaccttctgcaagtgcccccctaaagtgacccgtgacactttccgaggggggcccatcaccgcctgtgggtatataacggttttcggtattactctggcaacacggaagcctttttaacttttgggggttttgtttttgttcctgaaactttccttgttaacctttttcaggggctggacggtcacatgtgaggtggccgtgtatgaagtggaagacggggcctggggtcttgggggactgggaggggcaggggtcctttcttgcccctgggggtccccaggggtgcttctgcctggctcagcccaggccgtctcctggggagccacttcgccccagagacttcagctttggccaaacttgggggggttntgttccaccccagccccgcccgtccctgtggggcttgcacagcttcacctttgttccctcctggccccgggttcggagagccgagtcttgttggggcaatctcttgcctttcatgcaactgttccttttcttaaacaagttcgcctttcaaattgttaatcaaaaacattcttgattcccttcattttaattaaagaaagggaacattcaggcatgctnnnnnnnnnnnnngagatnnnnnnnnnnnggggggggcccctttaaaaaaacccttggggggcccaaattttccgggggcggggaaaaaataatttttttccttttagggggggttttaaaaacctcgttgggattttttgaaaaaaaacctttttttggggggggcaaaaatggggcaacccccccccaaaaatttaaagcctttaggg

SEQ ID NO: 113386 - DNA, 1721 bp, Homo sapiens
  misc_feature (1)...(1721): n = a,t,c or g
agcggccgctatcgggaagaagaaatgactgtggtggaggaagcggatgatgacaaaaaaaggctgctgcagattattgacagagatggggaagaggaagaggaagaggaggagccattggatgaaagctcagtgaagaaaatgatcctcacatttgaaaagagatcatataaaaaccaagaattgcggattaagtttccagacaatccagagaagttcatggaatccgagctggacctaaatgacatcattcaggagatgcaccgtggtggccaccatgccagacctgtaccaccttctggtggagcttgaatgctgtacagtcgcttctcggcttgctcggacacgataatacagatgtgtccatagcttgtggtcgattttgcttcaggaattaacagatatagacaccctccatgagagtgaagagggagcagaagtgctcatcgatgctctggtggatgggcagggtggtagcactgctggtacagaatctggagcgcctggatgagtctgtgaaagaggaggcagatggcgtccacaacactctggctattgtggaaaacatggctgagttccggcctgagatgtgtacagagggtgcccagcagggtcttctacagtggctgttgaagagggctgaaggcaaagatgccttttgatgccaacaaactgtattgcagtgaagtgctggccatattgctccaggacaatgatgaaaacagggaattgcttgggggagctggatggaatcgatgtgcttcttcagcagttatccgtgtttaaaagacacaatcccagcacggctgaggagcaggagatgatggagaatctgtttgattccctctgctcctgtctaatgcttagttccaatcgtgagcgcttcctgaagggcgagggtcttcagctgatgaatctcatgctcagggaaaagaagatctcccggagcagtgccctggaaagtgctgggaccatgccatgattggccccgaaggcacagacaactgccattaagtttgtttgacattcttggctttacggaaccatctttcccctctttatgaaatctcccaggaagatcaagaaagtgggaaccactgagaaggaacatgaagagcatgtctgttcgatcctggcttccctcctgcggaacctgagagggcagcagcggacccggcttctgaataaattcactgaaaatgacagtgagaaggtggacagactaatggagttgcattttaaatatctgggtgcaatgcaggtggcggacaagaagattgaaggggaaaaacacgacatggtccggcgaggagagatcatcgacaatgacaccgaggaggagttctacctcccggcgcctggatgcggggctctttgtttctcncaagcaacatctgctacatcatggccgagatctgcaatgccaatgtcccccagattcgccagagggttcacccagatccctaaacatgcgaggaagctccatcaaaattgtcaggcatatcatcaaaggagtatgcagagaacactcgggggacggccggagcccggagttcccggaagaacgagcaaaagcgcatcctgggcttgctggagaacttctagaggcaccttgggccctgcgcatcatgggactctctcagcttccctcccaggatcagtttctacacaactctgtgtggcttttggacaaattaaagctagttttggtaaaaaaaaaa

SEQ ID NO: 113387 - DNA, 2489 bp, Homo sapiens
  misc_feature (1)...(2489): n = a,t,c or g
cggcacgagactggaagaggtcccagcgtgagtgtcgcttgctggcatctgtccttctggccagcctgtggtctggccaagtgatgtaaccctcctctccagcctgtgcacaggcagcctgggaacagctccatccccacccctcagctataaatagggcatcgtgacccggccaggggaagaagctgccgttgttctgggtactacagcagaaggggtatgcggaagcgaggcaccccagtctgagatggctcctgccggttgtgagcctgagggccaccatcctctgcctcctggcctgggctggcctggctgcaggtgaccgggtgtacatacacccctttccacctcgtcatccacaatgagagtacctgtgagcagctggcaaaggccaatgccggcgaagcccaaagaccccacctttcatacctgctccaattcaggccaagacatcccctgtgggatgaaaaggcccttacaggaccagctggtgctagttcgctggcaaaactttgacaccgaaggacaagtttgaggggccgcaatggttcggggatggttgggccaactttcttggggctttccgtatattatggggcatggcacagtgaggttattggggcgtggttccattgggggccaaccttccttttccccaacggctgtctttgggcaccctgggcctctctctatctggggagcctttgggaccacacagctggacaggcttacagggcaatcctgggggtgtttcctttggaagggacaagaacttgcacctcccggctgggatggcggcacaaggtcctgttttgccctggcaggcttgttacagggcctgcttagtgggcccaggggcagggcttgattagccagggcccagcttgcttgctgttccacggtggttgggcgtgtttcaaaagccccagggcttgcacctgaaagcagccttttttgcagggcctggctctctatacccctgtggtcctcccacgctctcttggacttcacagaacttgatgtttncttgctgagactattgatcaggctcatgcaggctgtgacaggatgggaagactggcttgctccctgatgggaaccagtgttggacagcagccctgggctttcaacaactaagttccatttccaagggaagatgaagggcttctccctgctggccgagccccagggagtttctgggtggacaacagcacctcagtgtctgttcccatgctctcttggcatgggcaacctttcagcactggagtgacatccagggacaacttctcggtgactcaagtgcccttcactgagagcgcctgcctggctgctgatccaagcctcactaatgcctctgacctgggacaaaggtgggagggtctcactttccagcaaaactccctcaacttggatgaagaaactgttttccccggaccattccaccttgaccatgccccaactggtgctgcaaggatcttatgacctggcagggacctgctcgcccaggctcgagctgccccgccattctgcacaccgagctgaacctgtcaaaaattgaggcaatgaccgcatcagggtgggggaggtgctgaacagcatttttttttgagcttgaagcggatgagagagagcccacagagttttacccaacaggttatacaagccttgaggtcttggagggtacccttgacccgcccattccctgtttgctgtgtatgaatcaaggcgccactgcccctgcaacttccctgggcccgcgtggccaaccccgctgtagcacagcattgagggccaggggccccagaaacaccagttcccctggcaaggcccttctgccccctggccctttgaaggcaaaaggcccaggcagcagcagtaacaaccccgggacaaatccagcggatgtgttcaacccccccagtctccccaaccttttccttcctaatgaagtccgaactttgagcctggaaagccagcccgtttcctcccttggtcctaagttgtgcctgccatggagtgagccagtaggatatccctgcagcgggccacaaatgccaccctccccagttttgctggggtttatttttagagaaatggggggtgggggagggcaagaaccccagtgtttaagccgccgggacctactgttcccaaaaagaattcccaacccgacccagctttgttttgtgaaacaaaaaaagtgttccccttttcaagtttgaggaccaaaattggggttttaaaattaaagtataccattttttgcatgccctcgggtttggtatttagtgtcttgaatgtaagaacatgacctccgtgtagtgtctgtaataccttagtttttttccacagatgcttgtgatttttgaacaatacgtgaaagatgcaagcacctgaatttctgtttgaatgcgggaacaatagctggttatttctcccttgtgttagtaataaacgtcttgccacaataagcctccacaaaaaaaaaa

SEQ ID NO: 113388 - DNA, 1265 bp, Homo sapiens
aattcggaacgaggaggatggctgggcacagagtaagtttcttcacttagctcctactaacagtggtggttgggtggctgtttactgactggatttcttacccttttaagaaggaatccccctctaaaatgaagattgttctatatccagttggtgttggtattaggagatctgcacatcccacactcggtgcaacagtttgccagctaaattcaaaaaactcctgggtgccagggaaaaattcagcacattctctgcacaggaaacctttgcgaccaaagagagttatgacttattctcaagaactctgggctgggtgatgttcatattgtgagggggagacttcgatgaggaatctggaatttttccaggaacaggaaagttgttgactgtttggacagtttccaaaattgggtcttgatcccttgggacattcaagttatttccatggggggagatattggccagctttagcccctgtttgcagaggcaattttggatgttggacattgctttatcttcgggacaccacacacaaattttgaagcattttgagcattgaaaataaattctttcatttaatcccaggttctggccactgggggcataataatgcctttggaaaccaaacattattccatccatttgtggttgatggataaccagggcttctaccagtggtcacctaaggtgtatcagctaatttggagatgatgtgaaagtagaacgaatcgaataccaaaaaacccttaaagcccaggcctgtcttggatggatttttggtctttttccattggccctggtggaaatcaagtaattaaacatttaaggggccaccaaaatggtatcactttttataatattttgcaggtaaaatataataccatcttctctgttaaataccataattgcctccaaggcttcctgttaaactataagaatatatttagtttaccagtatatgggattctatgaaaaaaatgtccacgaacacagtaatttggtcacttgttaagaaaaatttatccttgtaagtatcttcaaagttgatatttggaactttattccaaaagtaatgcatgtggagaaagaatctagactttcttgtatacatttttctcttctccagtgataaacaattacctttcatttacactttgataacctgtgtttaatttaaaaaaaaaacataaaaatgaggaaccaagtgaaactacggatataaatattaaagtcgcacgagatgacctttcagaaaaaaaaaa

SEQ ID NO: 113389 - DNA, 1160 bp, Homo sapiens
  misc_feature (1)...(1160): n = a,t,c or g
aaccaggaaatttctgaaactgagttttaaacctggcaactcttttaccatccctttatatttttgcagttcctccctataccagcttccttacagctgttctgatttcctgtcgtaagattttttcttttcattttctccagggagggtaaatcaatataacctcttctctagagaggaggtggttaggttggtcttaagcagtgttagaagatctattttttttcaaaccaggtgtctgagctgggtgaattccagcctggggagaggactttgatcaccagatgtttttttggtgtgcgtgctgtcttatggttgcgtggcgaagtttctgcttcagatgcagagcactgtccagagcttcctccagtgggacaattagcatatttgttcgcaaaggaggttggaaggacagattctggggacttacgtttgtatcaaagggctaccacctggtagggaaagaagaccctttttttgcaatgcctcttaagggagtgggatgaacaccactgactgagtgccgcttgggccacttgtncctgattcctgtggctggtgaatgggagagttcaagttctttcagggcctgtgaaatgtaagtgacaaaatcacgtttatgtgcaagtgaccactacatcctcaaggccagcaatcggagccagtgtctagaggaccacacctgggcacctccctttcccatctgcaaaaagtagggactgtgacccccccngggaatccccagttccatggcctattttgaagggaaaataaccttcacccttaggatcccacccattagttattacctgtgaaagacggggtacctaccttagtgggccgttccagggagcagccaatgccgttgatggggagtgggagcagtgcaccttcccagtcctgccaagttgacccccggaagctccccaaacccagagtgtgagaaggcacttcttgcctttcaggagagtaagaaccctctgcgaagccatggagaactttatgcaacaattaaaggaaagtggcatgacaatggaggagctaaaatattctctggagctgaagaaagctgagttgaaaggcaaaattgttgtaacactacagctgagcagatgtaatagaaataaacctatgaataaattttcttcttggttctgaaa

SEQ ID NO: 113390 - DNA, 2022 bp, Homo sapiens
  misc_feature (1)...(2022): n = a,t,c or g
tttcgtgccggggcctggctgcgcggctgggccaaggcccgcgatggtgatctgctgtgcggccgtgaactgctccaaccgggagggaaagggcgagaagcgcgccgtctccttccacaggttcccccttaaaggactcaaaacgtctaatccaatggttaaaagctgttcagagggataactggactcccactaagtattcatttctctgtagtgagcatttcaccaaagacagcttctccaagaggctggaggaccagcatcgcctgctgaagcccacggccggtgccatccatcttccacctgaccgagaagaagaggggggctggaggccatggccgcacccggagaaaagatgccagcaaggccacagggggtgtgaggggacactcgagtgccgccaccagcagaggagctgcaggttggtcaccgtcctcgagtggaaacccgatggccaagccagagtcccgcaggttgaagcaagctgctctgcaaggtgaagccacacccagggcggcccaggaggccgccagccaggagcagggccccagcaagctctgggaacggactccaggagatggactggccaccatggtggcaggcagtcagggaaaagcagaagcgtctgccacagatgctggcgatgagagcgccacttcctccatcgaagggggcgtgacagataagagtggcatttctatggatgactttacgcccccaggaatctgggacttgtcaaatttagtctggctcacttcattcgtacagtttctcctccaagcacacccgaggaaaggccatctgtcccccgagagcccattgaccgcaagaggctgaagaaagatgtggaaccaagctgcagtgggagcagcctgggacccgacaagggcctggcccagagccctcccagctcatcacttaccgcgacaccgcagaagccttcccagagcccctctgcccctcctgccgacggtnaccccaaagccagccacggaagccgtgcaggagcgaggcacagcgacggcagccccatgttccattcaacgaggttcatcctgttcgggcgttcagggggcctgcaagctcatcgactcactgcactcctactgcttctcctcccggcagaacaagagccaggtgtgctgcctgcgggagcaggtggagaagaagaacggcgagctgaagagcctgcggcagagggtcagccgctccgacagccaggtgcggaagctacaggagaagctggatgagctgaggagagtgagcgttctctatccaatgaaccctgatgtcgcccagccgcgagccccccaagatgaacccagtggtggagccactgtcctggatgctgggcacctggctgtcggacccacctggagccggggacctaccccacactgcagcccttccagtacctgggaggaggttcacatctccccacgtgggccagcacatgctgaacttctcgttcaactccttccacccggacacgcgcaagccgatgcacaagagagtgtggctttcatttcgcctcaaagcccgacaccaaacaaggttggcctttgtcaagcgcccaagaacacaggccttgttggaaattggaggagggccgaagttgaacgggcaaggagcttgtgcattcgcatcccacttccattcgccaggatctcctttcgccaagggagcccccacgtagagcagatcaccccggaaagttcaggctgaattctgaaggcaaactttgagcagacgggtcttcatgggcaacccacgacacagcccaatgacttcagcatcatcacgacacctaccaagaaggtgaacaccgtaaaccctagagcttcttggaagcctcgggagggcctgggctactgtgcctcaacggttcggctcctcaacagacagtccctgcggcaagaagtgggtgtggccgtgagcctctgcaggctcaagagtgttgtccagatgtttctgtactgggcatagaaaaaccaaataaaaggcctttatttttaaaaaaaa

SEQ ID NO: 113391 - DNA, 2068 bp, Homo sapiens
  misc_feature (1)...(2068): n = a,t,c or g
tggggcccctgggctcccagggtggaagctggctccgaggctggctggctacgcaggtccgctgacgtcgccgcccagatggcctccaggttgaccctgctgaccctcctgctgctgctgcttggctggggatagagcctcctcaaatccaaatgctaccagctccagctcccatggatccagagagtttgcaagacagaggcgaagggaaggtcgcaacaacagttatcttccaagatgctatttcgtttgaacccatcctgggaggttttccagctttgccgacaaccaacttcaacaaccaattttaaggncaccaaaattaacagcttaattaccacttgattgaacccaccacacaacccaccacaggagcccaccacccaacccaccattccaacccacccaaccaattaaccaggtttcccaacagatttttccttacccaggcccactactgggttcctttttgcccagggacctgttactctctggctctgactttggagagtcatttcaacagagggccgtgttggggggatgctttggtagatttctccctgaagctctaccacgccttctcagcaatgaagaaggtggagaccaacattggccttttccccattcagcatcgccagcctcctttacccgggtcctgctcgggggctgggggagaacaccaaaacaaacctgggagagcatcctctccttaccccaaggactttcacctgtgtccaccagggcccttgaagggttttcacggaccaaaggtgttcaccttcagtcttttcagatctttccaacagcccagacctgggccattaaggggacaaccttttgtgaatgcctctcggaccctgtacaagcaagcaagccccagagtccttaaggcaacaacagtggacgccaatttgggagctcattcaacacctggggttgggccaagaacaccaacaacaagatcagcngggctgcttagacagtcttgccctccgattacccgccttgtcctccttcaatggttattcttaccttgagttgccaagtgggaaggacaacattttgattccccaaggaaaaccagaatgggaaccctttcagcttcaaaaactcagttattaaaagtgccccttgatgaatagcaagaagtaccctgtgggcccattttcattggaccaaacttttgaaaagccaaggttggggcagctgcagcttctcccacaatcttgagtttggtggatcctgggttaccccaggaacctggaaacatcgtctttggaaggacatgggaacagggttttcaggcctttcttgtttttcaagggcccttcatgggaggaaattgggagatgttccaagtttccagcccacttttcctaacactaccccgcattcgacagtgaacgaaccagccgagactatgctctccaatcatgggagaaattgggaattcttcggatttttcttatggaccttaaacctgtgtgggcttgaaaagaggaccccagatctttcaggttttctgcgatggcaggcaccaagacaagtgctgggaacttgacaagagacttggggttggagggccggcttgcaagcttccggcccatcttctggtggccccggnaacccctgcttgggtcttttgaaagtgcaagcaagcccttccctccttcgtggctctggggacccagcaggcacaaagtttccctgttttttcatgggggcgagtattatggacccccaggggcctgaggaccttgcaggattcaggtttaggggcgagcgcctacctcctccagccttcagctcttcagtttgcagcccctgctgttgccctgcctgggattttggccccctgcaacctccctgcctcaaggtgtccgctatccgaccaaaaggggctcccttgagggttttggggcaaggggaccttgcttctaattaagcccttcctgccatggccctgccatgcttcttccaaaccacttttttgcagctttctctaagttcaaagttcaccaagactcttattaaataaaacctggacagaccgatgaaaaaaaaaaaa

SEQ ID NO: 113392 - DNA, 2174 bp, Homo sapiens
atataatataaactaataaagatcaggaaataattaatgtataccgtaatgtagaccgactcaggtatgtaagtagagaatatgaaggtgaattagataattaaagggatggtttaacaaaatgaaggcactcattgcagcactgcttttgatcacattgcagtattcgtgtgccgtgagtcccacttgactgcagtgctgttgagccggaggctgagaaagttctagacctgatcaataaaaggcgacgggatggctaccttttccaattgctgcggattgctgatgcccacttggacagagtggaaaatacaactgtatattacttagtcttagatgtgcaagaatcggactgttcggtcctatccagggaaatactgggaatgacttgtgagccacctgattccagacgtccatcttgaaatagttgatcgggacaatgttaaggttaataggctaccaaggacattccccatggaattcttcagggacctccaggagtgatttgactttaactggcaccacaagttcttgtctcttcaggcactgggccaataccaaagatagtcccggtcctcatagattttcttttgagggtactgagcgctacagaaaacaagccaacaaagcccttgaggaagtacaaagaggagaatgatgactttgcctctttcagagtgggaccgaatcgaggagagttgcaagagtgagaggaggggaaggaactggttacttcgtgggacttctctgtgcgggaacttgccccagacaccatttccccagacaccccaatgtctttgggttcttgcagagcagattttgtttctattgatgttaggaagccttgggactttgggaaagccccgaaaaaccttgtcataaactgtgaagtcttcgaccctcaggaacatgagaacatcaatggtgtaccgcctcatttggggacatcccttccactggggtgggtcatgagcgtttctttttaccaccaagccttccatttcaagccccatggatcttagagtttcatcatcatccccacaagccacacgaacatgggacccccacctcctccagatgaaagagatcactcacatggacccccacttccacaaggccctcctccactattgcccatgtcctgctcaagttgtcaacatgccacttttggcacaaatggggcccaaagacattctcataataataatatccagtgagcctcggtggcccattagcatcattcgcatgaacagcatacccacggacaccatccccatgcacaccatcctcatgaacatgatacccatagacagcatccccatggacaccacccccatggacaccatgctcatggacaccaccccccatggacacccattcccccatggacaccatccccaactgcccatgatttcccaaggacttatggaccttgtggacccaaccaacccccataacccaaggtccactgttgcccattgccacggcccaccacctgggccacttaagaaggcgaggccccaggtaaaaggacccctgtccctttccaattgcagacaaattgggatctgtgtaccgactccctcctcttaaggaaaaggtgaggtgctggccacttcctgggggccaattttcccccagctccccatggccgcaccacaaacatccctcctaaagcccagacattccagcccctttccctcaatccagtctctgaaatccatgtccccccgggaagttccaagaagtggggtttccccacaaagtttccccatgttttttaccaccatacatttccccaaaaataaaaatgtgataccctttgaaagggggaaaatgaataatacattgaatttagaaacataaataaaatgacccagtaattgtgaaaaattacagttccttttcaaccctactttcatactgaaggatgcaggcaaaatgtgaatggggaaagagatggcctgagaagagagatcaaatggaaaggagaggaaagaactcagtgctgcctattagtagttaattctgtcactcaccactacatcacttgagacaaatctatgccacttcagaatctccttctttcctggacttaactctaattctagagtctctgttacgtgcttgggctatgacctgggcatactaataaagtatggtattgaaactat

SEQ ID NO: 113393 - DNA, 1194 bp, Homo sapiens
  misc_feature (1)...(1194): n = a,t,c or g
aagttccgggtcgacccacgcgtccgacctgcagaggggtccatacggcgttgttctggattcccgatcgtaacttaaagggaaatttttatcaatgtccggagtctcttcccttgatgtcctgcaaatgaaggaggaggatgtccttaagttccttgcagcaggaacccacttaggtggcaccaatcttgacttccagatggaacagtacatctataaaaggaaaagtgatggcatctatatcatcaccctcccttttatagatgtactgttccatctataaaaggaaaagtgatggcatctatatcataaatctcaagaggacctggggagaagctttctgctgggcagcatcgtgcaattgttgccattgaaaaccctgcctgatgtcagtcgttatatcctcccaggaaatactgggccagagggcttgtgctggaagttttctgcttgccactgggagccactccaatttgctgggccgctttcattcctggggaacctttcacttaaccagattccagggcaagcctttccggggagccacgggcttctttggtgggttacctggaccccaaggggcttgacccaccagccttcttcaacggaggccatctttatggttaaacctaacttaccattgcgcctgtgtaaacacagattcttcctcttgcgctatgtgggaacattggccnttcccatggcaacaacaaggggagtttcatttcagtggggttttaatgtgggtggatgctggcttcggggaagtttttgcggatgcgttgggcaaccattttccccgtgaaacacccatgggaaggttcatgcctgatctgtacttctacaagagattcctgaagaagattgaaaaagaagagcaggctgctgctgagaaaggcagtgacccaggaggaatttcaaggtagatggactgctcctgctcctgagttcactgccactcagcctgaggttgcagacttgtctgaaggtgtacaggtgccctctgtgcctattcagcagttccctactgacgactggagcactcagcctgccacggaaaactggtctgcagctcccactgctcaggccactgaatgggtaggagcaaccactgactggtcttaagctgttcttgcataggctcttaagcagcatggaaaaatggttgatggaaaataaacatcagtttctaaa

SEQ ID NO: 113394 - DNA, 478 bp, Homo sapiens
  misc_feature (1)...(478): n = a,t,c or g
tggggtggggagtggtggaagaaagaaaaagagggatgagtggttggagaaatcaagtcgatgctcttttcttccagccccacggtgagaatcctacagaaacatgagggtggactccactttcccacctgatgctgtccactccccagcccctgctgcagagcagcgcggacccactcccaccaagacaaagtgggttttgggaaagatgaggcctgcagggttggtgagccaagaagaatgagcccaggtcccctggatccaattcagagcggagaccactctctccacctaggtgtcccaggctgaggctgggacaagattcaaccctggaatgccttctccaggaacacagggcactccgagtgccctcagtggtggctggggtgggcctgcaggcccaggcatgaaggaggaaggggcagggcggctccaaggatggcagggaganctgtggcctctacnntacgcgccaata

SEQ ID NO: 113395 - DNA, 2891 bp, Homo sapiens
  misc_feature (1)...(2891): n = a,t,c or g
tgcgtgtattcggcacgagctccttttactcctctcggaggccctggcccttacccagacctgggcgggtgagtgcggggtcgggatggaaacggcctctaccgggagtagagaggggccggcccggcgggggcgaaggactcggggagccgcgccgggaggagggtcgggccgatctcagcccctcctcgcccccaggctcccgactccttgaagtatttccacacttctcgtgtcccggcccggccgcggggaagccccgcttcgatctctgtgggctacgtggacgacacccagttcgtgcgcttcgacaacgacgccgcgagtccgatggatggtgccgcgggcgccgtgggatggagcatgaggggtcagagtattgggaccgggagacacggagccgccaggggacaccgcacaagatttttccgagttgaatcttgcggacgcttgcgcggctaactaacaatcaagagcgaaggccggggtctcacaccctggcagtggatgcatggcttgcgaagctgggggcccgacgggggctttccctcccgcgggtattgaacagttcgcctacgacggcaaaggaattatctcaccctgaaatgaggacctgcgctcctggaaccgcggtggacaacggcggcttcagatctccgaggcaaaagtcaaatgatgcctctgaggcggaccaccaaagacccctacttgcaagccacattcgtggattcgttccccaaataactgtatgaggggaaggagacctttcttcacctgggagcccccaaagacacacgtgcttcaccacccaatctcttgaccatgaggccaccttgaggtgctgggtccctgggctttcttaccctgtcggagattcacactgaccctggcagcaggatggggagggccatacccaggacacggagctcgtggagaccaaggcctgcaggggatggaaccttccaagaagtgggcaagctgtggtggtgctttctgaagagaaccagagatacacgtgccatgtgcagcatgaggggctaccgaagcccgtcacccctgagatgggaagcccgcttccccagcccacccatcccccatcgtgggcatcattgctgggcctggtttctccttggatctggggtctctggagctgtgggttgctgctgtgatatggaggaggaagagctcagggtgaaaagggagggaagctactttaaaggctgaatggagcgacattgcccaggggtctgagtgctcacagccttgtaaagcctgagacagctgccttgtgtgcgaactgagatgcacagctgccttgtttggccacttgagattcagggatttccttaaggcctccccctatgtgtcctaggggaactctggcttctctttttgcaaagggccctctgaatctggtctgtgtccccctgttagcacaatgtgaggagggtagagaaacaagtccacctcttgtgtcttaccaatgaccccccttccctcacacttgaccttgtgttcccttcccttgttcctcttttcttattaaaaataagaaccttggggcagagtgcgggcatttcattgcctggtaaatcccagcaacttagggggaaggccgaggagggcaagatcacgaggttcaggagattgaaaccatcctgggctaaacacggtgaaaaccccgtctctactaaaaaatacaaaaaattagcctgggcgcagaggcacgggcctgtagtcccagctactcaggaggcggaggcagggagaatggcgtcaacccgggaggcggaggttgcagtgagccaggattgtgcgactgcacttccagcctgggtgacaagggtgaaacgcccatctcaaaaaaataaaaattgaaaaataaaaaaaagaacctgggatcttcaatttaattttttcatattctttgcaatgaaatggacttgaggaagctaagattcatagctagaaatacagataattccacagacacatctctagcaaatttaagcctatttcctatttctctagcctatttccttaccacctgtaatcttgaccatataccttgggagttgaatattgttttcatactgctgtgggtttgaatggttccctccaacacttcatgttgaggacttaatccctaatgtgggccaatactggaaaggtgggggcctttgaggatgttgattgggatcgtaagggctgtgctttccatttcatgggggttaatgggatttaatggggtttatcacagggaatggggacttgggtgggctttataagaagagggaaaagagaactgaagctagcaatgcccaagccccacaagagaagccctcccacttagaagtgatggctaaagtgggaaatgttgaaggtgcagcttgcccacagaaggggcccccacccaggggaaaatgttcttagtgtcttagttggatcccagggcccaccaggagaagagtgcctttgtggaagcggcttgggagcaaggaccttgacccacccaccagggacccccagaaactgtgggagtcaagtgggcaagcatgcaggcgccccccttgcgcnaaagcttttagggcacccagccttgcaaccccatttcgagcaagccacgtaggctggaaccccagcaaaagccacaggcacggggcttacctgaaggccttggggggcccaatccctgctccagtgggtccggtgaggcagcacgacgaagtcaaaaagagattattctctttcccacagataccttttctcttcccattgacccttttaacagctatctgctttcatttcccttcacctttcccaggctgatctttaggtaaactttgaaagtaaaataaaagctgtgtttggagcatcaaaaaaaaaaaaaa

SEQ ID NO: 113396 - DNA, 1055 bp, Homo sapiens
acagcttcctgatgcttagctgggcaatgtctcttccttctgtggggggacaagggagttaatgggactgggcaacagcctcaacatgagaccacccaatcttccacgaaagagacgacattcccacaagcagataaaaagagcagtttaaaaggtgaggagttttagtgctcttgtagccagcccaccttaaacctaaattagaagctttttaccaaccataccaaaaatagactgataaactatgcagattcacattcccatcttcaatagtaaatatacatagtaataaatctattattaacagtgggaccaaataacatataaggcagacatttaaacaggtgttgtatcatcaacatgctctaaaaaaaactcatctgactagatctagacccagggcctttttgcatgaggccaagacaacaagtatacaatcaatacccatgtgacacagtccaagtgctggggaatatgagggggcagtgggccatggggaggaagatatcagccccagtgaaaagctggggtttggctttactcgtgatattttgatgctctatgtctgagtaaaggaggaaaaaaaaaaaaaacactttgataaacgtacaaaaggcatcgactcccatttcaaaaataaatgggaagacttcacagtcaaagtcaagtccacttgtcagtatctgccctggaactctgatgcagtatcaactcttggtactctctccttttcccctccactagcatgccctctctcaagttgtttggtttgtttgttttctgaagatggagtttcactctgtcaacccgggctggagcgcagtggcgccatctccactcactgcaacctccacctcgtggattcaagcgattctcctgcctcagcctccccagtagctgggactacaggcacatgccaccacgcccagataatttttgtgtttttagtggagacggggtttcaccatgatggacagaatggtctcgaacttctgacctcaggtgatccgcccgcctcggcctcccaaattgctggattcctccagacggtctcg

SEQ ID NO: 113397 - DNA, 1379 bp, Homo sapiens
atgaagtacggcgagaactggagagggcggcagaatcctccataaaggattggggagctggcccccgatttctactctgacacggacctctgggcattggagaggaaactgaatcacaccatcatgcggaagcggatgcacatccaagaggctctgaagaggcccatgaagcaaaagcggaagctgcgactctatatctccaacactgttaaccctgcgacagcctgatgctgaggattccgacggcagcattgcctcctggaagctacggccggaggggaagctcctggatgatgtacgtcccggcccagcccagcaaacagaagcggaagttctcttctttcttcaagagtttggtcatcgagctggacaaagatctttatggccctgacaaccaacctcgttgagtggcatcggacacccacgacccaggagacggacggcttccaggtgaaagcgcttcctggggaccgtaggtgttgctctgcagctgctcctcagtctggactaccagcctccccagttcaaactgggatccgccctagcccggctgctggggctgcacacacagagccgctcagccattgtccaggccctgtggccagtatgtgaagaccaacagggctgcaggactcccatgacaaggaatacatcaaatggggacaagtatttccagcagattttttgattgtccccggctgaaagttttcttgagattccccagcgccttacagccctggttatttgcccccttgacccaattgtcatcaaccatgtcatcagcatggacccttcagaccagaagaagacggtcgtgctatgacattgacgtgaaggtggaggagcccattaaaggggccagatgagcagctccctcttatccacggccaaaaccagcaggagatcagtgcttctggacagtaagatcatgaagacgattgagtccataaaccacgctcaagatccaagagggacttcaatgctaagctttctccggagaccccataagctatgtgccagaacctggctccgctctccagagccggggacctcaaggttgatgacagatgtagccggcaaccctgaagaggagcgccgggcttgagttctaccaccaagccctggtcccaggaggccgtcagtcgctacttctacttgcaagatccaagcaagcgcaggcaaggaagcttggagcaagtcgcttggtttgtgccgcaacaccttaaggaagcccaaaaataaagcaagcaccgacggaacttttcaagcccgtgttcccggggcccaagattttgccccgggctccagcatcacttcttcttgccaactttggggttttgggggctggattaaaagtcattcatctgacaaaaaaaaaa

SEQ ID NO: 113398 - DNA, 1107 bp, Homo sapiens
ctcaattattgtattttggattttatcaatttagaaattgtggaaatttgtttgctcttacgccaacataatattgattttgcctcttggctctgaaagcccaaaatatttaccgtctagcccgttacagaaaaagtctgctgactactgagccagacctccattacctccatccctgttggattatttaaagaaagcctcagacagtaagggcttttttaaaagaataaaatgacttggtttgcgcttggaagcaggggaagcattcagatgagcggtttctgcattaaccctgcctatcacgcatctcgtgtcctgtgtggctggcgagcccccctttgaagggtctggtgcttcagctggctcctgcagagtccaccccgcctcgtggtgggaatgcagagccctttgctttccttcttgccgcctgcttcctgttcctggggacccgctgggcctttggtctgcatcccctggccaggtccctcagggttgatgcgtggagaaggactttgagcagtggtgggcagcagtggcctcctggccagctcacactcttgtcctgggaggggcagcctgatctcacctccacctagtaccttggggactgaggaccttttggcttttctggagcctgcaagcctctttccatgtgtccagctgctcttccttgctacaaggggactgctcacagtggcctcagcttggtgggtttgaggggccgccccccggccctccataagggtatcctgggcctgagaattctgcatctgccattggaggatggacagcctcaaatggaaggagtcccacgggagatgggtccgaggtccggctgtgggccatccagccccctgtggcttgtccagcctctgtgcacccctggtgtcttcactccaggggcagacagcagccactgcagttcctttcttcgtgagtaacagtagtgatagcagctggggctaacaggctaggctttgtgttctgcgcatttggtcagcttctcactcgatcctccctaaagcaatggggaggcccccactagcccagttttcaggaagtcaactgggaggttagatgggggccagggtcccacagctactgatg

SEQ ID NO: 113399 - DNA, 1179 bp, Homo sapiens
ggtcgacctctgcttccttacagcacccccacctgccagagctgatcctccctaggccctgcctaaaccttgagttggcccccaatccctctggctgcagaagtccccttacccccaatggagaggaggggcaggaccagatcttttgagagctgagggttgagggcattgagccaacacacagatttgtcgcctctgtccccgaagacacctgcaccctccatgcggacgcaagatggggaatggaactgaggaagattataactttgtcttcaaggtggtgctgatcggcgaatcaggtgtgggggaagaccaatcttactcttcccgatttcacgcggcaatgaagttcaagccacggacagccgcaccaccattcggggtttgagtttttccacccgcattgttgatgtttgggggcaaccgttgttgttcaaggcttcagatgctggggacacagctggcctggggcggaacccgagccatcacctcggcgtactatcgtggtgcagtgggggcccttcctggtgtttgaacctaaccaaagcaccagacctattctgtggtggaagcgatggcttaagggagctctaagacccatgctgaaaaccaacgatcgtcgttcatgtctggtgggtaaacaaagtgaccttcagctaggtcccgggaattgcccaacttagggaggccccgaatgttcgctgaaaaaacaaaggactgctcttccctggaaaacctaagcccctggactcctacccaaatgttgaagctaagcctttgaagactgtccctgaaaaagaaatctttgcgaaaggtgtcccaagcagagacagaacagcatccggacccaatgcccatcaacttctgggcagtgccccaggctggacaggagccctggcccctggggagaagagggccctgttgcatcaagcctctgaccttggccagaaccacctgccccccactggctttttggtgccccttgtcccccacttcagcccccaggacctttccttgccctttggttccagatatcagactgttccctgttcacagaaccctcagggtcttaaggtcttcatgccctatcaccaaatacctcttattatctgtccacccctcacagactaggaccctcaaataaagctgttttatatcaatgcaaaaacaaaaaaaaaa

SEQ ID NO: 113400 - DNA, 2246 bp, Homo sapiens
  misc_feature (1)...(2246): n = a,t,c or g
agccagcgtccgccgccgccgtagctgccccaggctccccgccccgctgccgagatggcgacgcgctcctgtcgggagaaggctcagaagctgaacgagcagcaccagctcatcctatccaagcttctgagggaggaggacaacaagtactgcgccgactgcgaggccaaaggtcctcgatgggcttcctggaatattggtgtgtttatttgcatcagatgtgctggaattcatagaaatcttggggttcatatatccagggtcaaatcagtcaacctagaccaatggacagcagaacagatacagtgcatgcaagatatgggaaatactaaagcaagactactctatgaagccaatcttccagagaactttcgaagaccacagacagatcaagcagtggaatttttcatcagagataaatatgaaaagaagaaatactacgataaaaatgccatagctattacaaataaagaaaaggaaaaaaaaatggaagagaaaaagagagaaaaggagccagaaaagccggcaaaaccacttacagctgaaaagctgcagaagaaagatcagcaactggagcctaaaaaaagtaccagccctaaaaaagctgcggagcccactgtggatcttttaggacttgatggccctgctgtggcaccagtgaccaacgggaacacaacggtgccacccctgaacgatgatctggacatctttggaccgatgatttctaatcccttacctgcaactgtcatgcccccagctcaggggacaccctctgcaccagcagcctgcaaccctgtctacagtaacatctggggatctagatttattcactgagcaaactacaaaatcagaagaagtggcaaagaaacaactttccaaagactccatcttatctctgtatggcacaggaaccattcaacagcaaagtactcctggtgtatttatgggacccacaaatataccatttacctcacaagcaccaacttgcatttcaagggctttccatcgatgggcgtgcctgtgcctgcagctcctggccttataggaaatgtgatgggacagagtccaagcatgatggtgggcatgcccatgcccaatgggttttttgggaaatgcacaaactggtgtgatgccactttcctcagaacgttgtttggcccccaaggaggaatggtgggacaaatgggtgcaccccagagtaagttttggcctgccgcaagcttcagcagccccagtggagcctctcacagatgaatcagcagatggctggccangagtatcagtagtgccaaccccctactgcaggttttggcccagccctccagcacaacagcaggatggtctggaagcctcatccaggtcagactctcaggcacacaactgtggaaatgaaaactgcaatacaagtttcatccagaactaccacctgacattccttgctgaaacgcatctagttcccctgtttattcatatgcatattttttttctttttacccatttgttcatattaagaatgatctgattgaccgtgttggtctgtactgattcaatttgatgtggtgaaaagcaggttgataaatcattttatgtcaagggcagctttgctcatatttcccatgatttcatgtactgcattatttgagaagctgctcaacttgcaaaatcagttttcctctcaataaaattatagcgtctaatgtttgcatataagggaagtagttatcatgttagtaatacctctaatagtataaaccccaccccaaaattagccagtaatcctgtagggaaggtactgtatgatcaaatgtttaatcatataaataggaatgtaaatgtcctcactgaggcactgttttctagtgtatcaaaatgctcttatttccatccattccacttcactgtggctgttgttatggatgtggcttaacaggggaacgtggattagtggaaagggagggtaaacgtggggatgttaactcccaaaacttcgtttaatgaatgcttaaagaattcaaattttatctgcctctcttgtaatttggatctcttcttaatgtacatagtgctaacaatgaggrcctttttctggactatatgcaaacagggtaactaactaaaacaaagccactttcaatcttcaatccttgaagggtatatctaggggttatggacagtaattgtgtttacattttatggtgcctagtattgacaaaatgttatttccctacattaaacatgactccata

SEQ ID NO: 113401 - DNA, 2149 bp, Homo sapiens
gtgcgcctttcagcctcacctgcagctgcgcctccttgcacctgcgcctgtgctttttctcccagcactgcggacgcgactcgagggtgacgctcgctccgctcgtcccgctcgtcatggcctacccgggatacggaggagggtttggaaattttagcattcaggtgccaggaatgcagatgggacagccagtgccagaaacaggcccagctatactcctcgatggatactctgggccagcatattcagacacttattcctcagctggtgactccgtgtatacttacttcagtgctgttgctgggacaggattggtgaagttggatgctgaaggaacttcagagatgtttgacacagtctgggattaatggaacttactctcccttcagttttgaaaccttgcagaattatgattgccatgttggatagagatcacacaggaaaaatggggatttaatgcattcaaagagctatggggcagctcaaaaatgcctggaagggaaaacttcatgactgttgatccaagatgggaagttgccacagtaggaacatcatgagtttgcgtcaagccatttggtcttatggggttataagggttgagtcctcaaacatttaactactattggttaaacgttatagcaagaattggcagaattttctttgatgattatgttgcttgctgtgtgaagcttcgagcattgacagatttctttaggaaaagagaccacttgcaacaagggtctgcgaatttcatatatgacgattttttgcagggcactatgggcaatttgaatgcttaggaattttaaacctgaagagacactgtggaattcttttgtttgggaaggaagtgaactgggactactttaaaaacttttaaggggttttctatgttcttcctacctgttaaacctcttccctttctgtgtgtttttattttagcagatagttcaaagcaataaaagatttcttttttaatttgaggtattactgcttttggaaaagttattttataaatatgtgcatattgtcataaaatattgtatgattaattgatttaaataatgcttagccttaattttagataatgtaaatttagaggaatgtactttacaagatagattgtataagaagccaaataatgaaagcctagaaaaaactaatttatacttatctgaaggttacaaattagacttttaaattttctttgtagttggtggtgtttgagggttggctagtaaatgaacagcctggcattttgtcgccatgtcttgtaatatagctttgttccttgatcaaataatcagagaaaagaaacttaaagatctttgtctgtgaaggagaaaaatattctccctaagttcaatctgtagtgaaataagactacagaaggcattgttttttccttttttattttttgtattatatatttttccttaaatatgttttattgtccttctctaagcaaaaagttccttaataaacatagtatttcctctctgcgtccctatttcattagtgaagacatagttcacctaaaatggcatcctgctctgaatctagactttttagaaatggcatatgtttttgatgatatgtcaacattcaaaattgtcctaattaaattgttgtttaaatgtaatgtcaactctttataaacttaaaaataaacaggtaattagcgcactctaattgttcagaaattttaccatttgaccttatttgaccaacattaacattagtgggggctttgcccattaaaaaccccagtaagtattttgagtgcatcctatgtgatgtggtgttttgagcatagtaggcacccacagcaacttttctgcgtggtactaaaactgccgaaaatgcgacgtagaatcaccagatctttagtgtttaatatccctggtataagatgttataattaatgtaatttctttcttggcaaacacctcatgtctgtcttagtgaagatttaataaaccacttatttttcttatgctttaaatgtgtattttctaacctaacagtgagtgacataattttatgactgctgaccaaattaatttatagattttataaaatcccatgtttcttaatggatggaggatagatggcaatatcttgaacaaaatcttttataaacttacag

SEQ ID NO: 113402 - DNA, 1316 bp, Homo sapiens
  misc_feature (1)...(1316): n = a,t,c or g
aaaatggagaagctgtgctaatagaggggggccagaaatccccactctagaatgctgtagaatgttgggagacacccaggatgtgagccagggactttctggaagtgtttgttctggccccacccgaccccaggcagtccccagctgtctgcacagtcggatggggagggggcttgcacagagttggagccagaggagagagctggctcatcccctacggtaggatggggaaacctcacagaccacattgtcacccggcctcagctctccgccccggcgcttcagagggtaactctcacccacctcgtccgcttctctggaaccagagtggacccagggttggcgttccgccccgctctccttaccccgagtttgggcacgggaggcccgggcagccatgggcggttggaaggaggaatgaaatgtggtgaagttcttgctctacgtcctcctgctgggccttttgcgcctgtgcatgtgggactgattggccgtgggtatgcggggcccagcttgtcctggagtcagaaccataatccaggggggctacccctgggctctctgttgccagtggtcataatcgcagtgggtgtcttcctcttcctggtgggctttttgtggggctgctgcggggccctgcatggagaactaatgtctttatgatcacgtttgccatcctttctgtctccttatcatgttggtggaaggtggccnccagccatttgctgggctaatgtgttttagagataaggtgatgtcagagtttaataacaactttccgggcagcagatggagaaattaccccgaaaaacaacccacaatggcttcgaatcctgggacaaggatgccaggcagatttttaaagtgctggtggggctgcttaactaccacagatttgggagaaaatccccttccatgtccgaaagaaccgaggtccccgactccctgcctgccattaaatgttacctgtgggcctgtgggaattaatttccaacgagaaaggcgatcccataaggagaggctgtctggcagaagtattgggggctgggctgaggaaaaaatgtgcttggtggtaagctgcagcagcccttgggaatagtttttgtcgaggttttggagaattgtcttttgcgctgctgccctcgtgaagagtatcagaagtggcctcacgaggtgatgttaggggtcttggtctcctcagcctcctcatctggggggagtgggaatagtatcctccagggttttttcaatttaaacgggattatttttctcagaccgaaaagagatggtctgagtttgtctataaaaaaaaaaaa

SEQ ID NO: 113403 - DNA, 446 bp, Homo sapiens
  misc_feature (1)...(446): n = a,t,c or g
cacttgtagttcagtaaaagaatgacagcagtaaagggtctttaggaagaggaggtggaagacctgatttgggttgggggctccaagaagaatgtctgccttgctgtgcagaagcctgctacacaacctccctggtccccttgctcagtctcctggccagacccctgtgagccctggaagtgcacagtcagcttagccaaggcatctccagccaggactcatccctgggcatttctgtggccttgggtgccctgcctccaggccctgtcttgcaggcaatcgtcctgcaagcgaagggggaagggaggctacttgacagttaactctgagtggctccacaaggtcctgacttagcccccagtcaccccaagcctatatcccccatctcaaacccaacaataaaagactttgcagnntcctccngggtcttttccgaaactttacta

SEQ ID NO: 113404 - DNA, 2058 bp, Homo sapiens
  misc_feature (1)...(2058): n = a,t,c or g
ttcctgcccgcgcggtgttccgcattctgcaagcctccggagcgcacgtcggcagtcggctcccatcgttgaccgaatcaccgacctctctccccagctgtatttccaaaatgtcgctttctaacaaggctgacgctggacaagctggaccgttaaagggaagcgggtcgttatgagagtccgacttcaatgttcctatgaggagccacccagataacaaaccacccagaggattaagggctgctgtcccaagcattcaaattcttgctttggacaatgggagccaagtcggtagtccttatgaggccacctaggcccggcctgatgggtgtgcccatgcctggacaagttactcctttagagccagttgcctggtagaactcaaatcctcttgcttgggcaagggatgttctgttcttggaagggactgtgttagggcccagaagtgggagaaaaggcctgtggccaacccagctagctgggtcttgtcatccttgctggagaaacctccggcttttcatgtggaggaagaagggaagggaaaagatgcttctggggaacaaggtttaaagcctgagccaggccaaaatagaagcttttccgagctttcactttccaagctaggggatgtctatgttcaatgaatgctttttggcactgcttcacagagcccacagcttccaggtaggagtcaatctgccacagaaggctggtgggtttttgatgaagaaggagctgaactactttgcaaaggccttggagagcccagagcgacccttcctggtccatcctgggcggacgtaaaaagttgcagacaagattccagctcatcaatgaattatgctggacaaagtcaatgagatgattattggtggtggaatggcttttaccttcctttaaggtagctcaacaacatggagattggcacttctctgtttgatgaagagggagccaagattgtcaaagacctaatgttccaaagctgaaaaagaatgggtgtgaagattaccttgcctgttgactttgtcactgcttgacaagttttgatgagaaatgccaaagactggccaagcccactggtggcttcttggcatacctgcttggcttggatgggcctttggactgtggtcctggaaaggcaggcaaggaagtatgcttgagggcttgttcactcggggctaagcaggattgtgtgggaatgggtcctgtgggggggtattttgaatggggaagcttttgcccgggggaaccaaaagctctcatgggatgaggtgggtgaaagcanatccaattctagggggcttgcattcaccattcatagggttggttggagacacttgccacttggctgttgcccaaatgggaacacgggaggataaaagtccagccatgttgagtcactgggggggtggtgcccagtttggaagctcctggggaaggttaaagtccttacctgggggttggattgctcttcagccaatgtttagtattttctttcctgcccttttaggttcctgttgcacagccccctaaagtccaactttagcatttttctgcaatctccaacttggccattagcctaaaacccttcccatgtcaaagattccagcctaggtggcccaaggagatgcaagtgcccaggaaccccttaaacgagttgcgacagcatcctcaagctcatcattcactgcaccctgggatttgcatacattccttcaagatccccattttgaatttttttagtgacctaaacccattgtgcattcctagagtgcatatatttatattttgactcgtgctctaaaaagaaagtgaagcagtgttagcttaggttttctcttttgatgtaggttattatgattaagctttgtgccctgtttcactactcgagcatggaaacaagatgaaattccatttgtaaggtagtgagacaaaatttgatgatcccttaagtaaacaataaaagtgtccattgaaaccgtgnnnnnnnnnnnnnnnngggggcggccgttttaaaggatccttgggggggcccaagtttacccgtgcttgcaactc

SEQ ID NO: 113405 - DNA, 1286 bp, Homo sapiens
gcgcggcagctgtctgggctgctgcgcgccgcctatgtgtctgggcgatctatgggcaagagcaagggccacgatgacagattacggcgaggagcagcgcaacgagctggaggccctggagtccatctaccctgactccttcacaggcagatgtctctcagctatccctgtatagctccagtcctgttcatgttctctctcaccagcagtacatctgtgctgtgaggatgttaaggggatgagtgaagaggggtttgagagtgtcattaactggcttgattgcacattgatccaaccctcctaacaactagtcttccaaaatataaatggactctcctgataccacattctccttcagtagtgcttcacttgacaaggtccctgctaagtattatcagaaaatccaccccagcttcaccattactgtgacgtctgaggctgggagaaaatgatggaaactggtccagactaccctcaagtttacatacaggtgaaagaatacccagaagaagctcctctttatgaaatatttctcccagggaaaatctaggaaggttaatggatgtctcaggacattttaaaaattactaggctttacaggctgaaggaaaatcttgggtatgggtgatggattttttattctagtggacagctgtgcatgaaagaattaatgtttttagtagatcacataataactagatgtgaagtagaaatgaaactataggataaagaagcagaagaagctgtaaagcaattattcaattgtaactggagtaccatggaataattgagaatttcttaaattggaaagcccaagttttgatgcaggacctcttggaaattaaaaagaaaaggatgaaagaagaagaacaagcggggaaaaaaataaatttaagtggggaaaccaacctatttggaaacagatccataatccttgaccacatcctgaatatcccagttccttggaggatgcctggaaacaaccgtggaggtagatgaagtctttgttcccaagaaatggatgacttggagctggaggatgatgaagatgatcccagactataatcctgctgacccagagagtgactcagctgactaatggactgtccccatctgcagagaggcttgactcgcacagcatctgtggctaatgctcagaggggttatgattttcctttctttttttctaagaaaaaattattttcaggagaatattcttctgatacgctctcatcattgaacttcatacaactgaccttaaaatttcaaatataaaaaaaaaaaaa

SEQ ID NO: 113406 - DNA, 2344 bp, Homo sapiens
cgaggggacagagcctcatgggggtcagccttgccctcctgcagaaacacgttctccatccacgccgctcactcatgggcccatttcccagggttacctcgtgggctctgcctttgccctcagaaacggctgaccctggagaagtacctttggtccttctttcttcctctccggctctcagctcccaaaagattctgccttgtgtacccaagcactcactcttgggtgaactaatgcttctggctgcctagcaagtgaagatctgttgagaaactgagaacgctccaagagagaagctgctctcccctccttgaagaagccgcggacacgggaaacccacggcgggcaagggcccagctgtgtgctcctttcctgtcatggcatctgctgatttgaaactccatgacgaacacgttgaactaaacatttttatttaaatttgtatcatgttcatagttgctctcttgttgagagagtcatctgtcctgtttgttaggggtattttttcttgttaaaatgtatctcctgttgaatactcgggaaattcaaagggaagtgtggtcagcacacactgagcgttcttttctggagaggccggttttagcctcgtacctttatcaggaccgacagcgggtgggaagggcccgtgtgctgggatggggggtgttcgcctcctggatgggcacaccctcccgagggacatccagacaggctgtgtcaccctcccgcactttatgtgcctgctctgaggtgtcctgaacacacagcaacggcctctccttcatcacaggccggggattccttttgtgtttctgtataacatcgatgacgagcctgaagctgttgtcacttcactgcccctctttggaatttcttcattgtgctgactgatttctattagggggctaacaattaaaggcagtctaccccactacttatcatgcttgggaaacaagcgtcagcttgtacatatgacaagagaggaccctgaatacaccctctcttcatcagcccaagccttactgaggtgggatgaagacctcattctctgttctttaaaacatgtttcgtgaactaatattggtccatgtattttttgtccttttgggactctaagtgggtcaagaagcaaaaacatccatgtgttgtttggggggaattggcaccattttttcctgactatgtttcaattaactaaagaataaatgatgaagaaattctccttgtagcacaactgtatgctgtgtaaattggtgtgagctcaaagcccagtcatgtgttttacctgtgggtgactctgttgtagaatggtcatattactgcatatgttatcatgacaacttgtgagtttgagtttatatttctcaaagaacaagttacccgtatatgcaacattgcgccattaaaagcttatttctctgtacacaaaatgggtaaaatcttgaaaaaaccttagtaatttctcattcctaacacacagacagagtctcactcttgtcacccaggctgctggagtgcgatggcgcgatctcggctcactgcaacctccacctcccagggttcaagctattctcctgcctcagcctcccaagtagctgggattacaggtgcctgccaccaccacatgcctggctaatttttttgtgtttttttttttttgtattttttagtagagacgggacggggtttcaccatgatggccaggctggtctcgaactcctgcgttcaagcgattctccttgggaaattggctgttatgtctcttttctgatttctcctaaggtcagataacaacttagtttcagtttggtgacatggaacttttctttcttttttctttttttgagaaaggatatctctctgtcgcccaggctggagtgcagtggcgcaatctcggctcactgcaacttctgcctcctgggttcatgggttcacgcgattctcctgactcggcctcccaagtagctgggattaaaggcgcgcaccaccatgcccagctaatttttgtatttgtagtagagacagggtttcaccttgttggacaggctggtctccaactcctgatctcaggtgatccacctgcctcaacctcccaaagttttaggattacaggcctaagctgcgcctggccaaaaagaaagctgtttttttaaaactatctgcactccctacttgggagggttggactcaagttcccacatctctttcctcttacggttatattaagggcttagtcatacatccctaaatttcatatatcccaacagggacttgggctgggacaggaagccctcttcctccacctcaactaccacttagccacccaccattttctcaaacctct

SEQ ID NO: 113407 - DNA, 1531 bp, Homo sapiens
  misc_feature (1)...(1531): n = a,t,c or g
ccgggtcgacccacgcgtccgcagcagtccaagctcagtcagcagaagagataaaagcaaacaggtctgggaggcagttctgttgccactctctctcctgtcaatgatggatctcagaaataccccagccaaatctctggacaagttcattgaagactatctcttgccagacacgtgtttccgcatgcaaatcaaccatgccattgacatcatcctgtgggttcctgaagagaaaggtgcttccgaggtatctcctacccatgtgtgtgtgtccaaggtggtaaagggtggctcctcaggcaagggcaccaccctcagaggccgatctgaccgctgaccttggttgtcttcctcagtcctctcaccacttttcaaggatcaagttaaatcgccggggagaagttcatccaaggaaattagggagacagctggaagcctgtcaaagcgagagtagcattttccgtgaagttttgaggtccaggctccacgctgggngcaacccccgtgcgctcagctttcgtactgagttcgctccagctccggggaagggggttgagttcgatgtgctgcctgcctttgatgccctggggtcagttgactggcggctataaacctaacccccaaatcttttgttaagctcattcgaggagtgcaccgacctgcagaaagagggcgagttctccacctgcttcacagaactaacagagagtcttcctgaggcagcgccccaccaagctcaagagcctcatccgcctaagtccagcactggtaccaatatttttaggaatgagccttgggaatctgccaccctcagtatgcccctgtatcctctgactttcttatgcttggtaccctgtggagcatgaaatcacatttcaacacagccccagggattttcggacggtcttggaattagtcataaactaccagcaaattctgcatctacctgaacaaagtataatgactttaaaaaaccccattatttgaaaagtacctgagaaggcagctcacgaaaacccagggcctgtgatcctggacccggcgggacccttacagggaaacttggggtggtgggaggacccaaaggggtgggaggccagctggccacaagatggctgaggccctggctgaattacccatgctttaagaattggggatnggtccccagtgaagctccctggattctgcctggtgagaccctcctgctttccttccctgcccattccatccctgcccctctccatgaagccttgagacatatagctggagaccattctttccaaagaacttacctcttgccattcatcccggcccctttccatggaggttgaggacataaagctgggggcccttttttccaaagaacttcccttttgccaaaggccctttattttcatatagggacaggctgggccccattttttccagtcattttggtcccaatcgagggtttttggaattttcccatcccttgtccagaattccttcccctaagggtaataataaataatttttaaccccaaaaaaaaaa

SEQ ID NO: 113408 - DNA, 1585 bp, Homo sapiens
  misc_feature (1)...(1585): n = a,t,c or g
gagtaccatcttccgtaattcccgggacgacgatttcgtggccgagcggagcgcggcggcggcggcggcggctttgtttgggccgggagaggctggcgcgccgggggggtgcgtgaatcctccggcatccgccccggcgggccgcccccgcccgcggcagccccccgagcagtggcccggcatcggcgccttcccggcgggcaagagtgagccatggagctacgtgtggggaacaagtaccgcctgggacggaagatcgggagcgggtccttcggagatatctacctgggtgccaacatcgcctctggtgaggaagtcgccatcaagctggagtgtgtgaagacaaagcacccccagctgcacatcgagagcaagttctacaagatgatgcagggtggcgtggtgatcccgttcatcaagtggtgcgtagctgagggcgactacaacgtgatggtcatggagctgctggggcctagcctcgaggacctgttcaacttctgttcccgcaaattcagcctcaagacggtgctgctgcttggctcgaccagattatcagccgcatcgagtatatccactccaagaacttcatccaccgggacgtcaagcccgacaacttcctcatggggctggggaagaagggcaacctgggtcttacatcattcgatttcggcctgggccaaagaagtaccgggacgcccgcacccaccagcacatttccttaccgggaaaaacaagaaccttgaccggcacggccccgctacgcttccattcaacacgcactggggcatttgagcaaagccgttcgagatgacctgggagagcctggggttacgttgttcattgtaatttcaacctggggttccctgccctgggagggcttcaaaagcaggccaccaagcgccagaaagtttgaacggatcagcgagaagtaagatgtcaacgccccatcgagggtcctctgcaaaggctatcccctcagaattctcaacatacctcaacttctgccgctccctgcggtttgacgacaagcccgaactactcttacttacgtcagcttcttccgcaacctctttccacccggcaggggcttctcctatggactacgttttttgactggaaacatggttaaattgggggcagccccggaaatcccgaaggatgtggaccggggaagcggcgagaacacggaacgcgaggagaaggatggggcagctacgggggtccgcgacccggangccctgcccccttggcccacccaccgggggccacttgccaacccggctccgcagtgccgccgaagcccgtggcttcccacagccagcctcccgcattccagccggctggcaatacttctcccagaagcgatttcgcggggtcacccgggagaggaaggtgagtatgaggctgcacaggggtgcgtttcgccaacgttttcctcctcagacctcactgggcggcaagaggtctcccggatcccagcctcacagacaagtgtgccatttgaccatctcgggaagtgaggagagcccccattggaccaagtgtttgcttagatgtcaacactgtattttctttaaaaaaaaaa

SEQ ID NO: 113409 - DNA, 1479 bp, Homo sapiens
aagaaaagaaaaactagttgagtatggtgttgtgtacctgtggtcccagctactcaggaggctgaagtgggaggagcacctgagcccaggaggtagacgaggctacagtgagctgtgattgcaccactgcactccagcctgggtgatgggagtgagaccctgtttaaaacaaacagacaaaaaaacctgtggattgaagggtaaaggatggagtatttaaaaagtactgtgacagaacaaagtactgtaagtactagagttgagtgtggatggaaacacagaccctgtaaatcaagtgtttcatttacgtgctcaactcctactgaattttagcaattaaaacatgaaaactgaaatattggttaacaaatgaaaatagaatttaaagacctgaacttcttttatgatctttaatgattatttgttctaatctttgacttgggaaacccaaattattttcagtctaacggactttgaaatttaactattaaaaaagttggaggaactcaaactttgaagttagggctccctttctccagataaagcacattgcctgggtttattgtaagggcacttaggaacatgtaaccaaaaacactcaatttagggattgggattgattgttttacagctaagtgcgctctcagagtcttttgttttacacccctctcaagtttacctttagatatttttcttgttgtttaatattttgtgacaaatttggcaacttttaaaaagttgtttgaattgaatagtgcataaaattaatagatgtttttcagaaaatccattattaagagtagaggaatgaggagaaatattcgttctaaagagaatcaaaaccacaatgagagattgtcttacccccgttagaatgacagttaccaaaagacagtaacaaatgctgacgagaatgcagaggcaaaggaacgtttaaacactgttagtgggaatgtagacttgtacaaccgttatggagaagagtatggaggttcctgaacaaactaaaaatagaactaccatatgattcagcagtcccactactggggtatataccccaaaagaaaatcccatatatgggagacatcctgcaccctgcccatgcctcgttcccagcacctattcacagtaccccaagattggaatcaaccctgtgtcctatcagcaaatgaacagataaaatgtggtatatataccccgtggaatactatttggccattaaaaaagacaggattctgttattctcagcaacatgtatgatcttagaaagacattatgttaagtaagccaggcacagaaagataaatactccatgtactgtacttatgtggaaggtaaaaaagatctcatagaagtagagagtggctcatgcctctaatctcggtgctttggcgagtccaagctgcgacgatcacttgaggcctggagtttgagaccagcctgagcaacatctctcaaaattaaaaaaaaaagtcgacg

SEQ ID NO: 113410 - DNA, 4435 bp, Homo sapiens
  misc_feature (1)...(4435): n = a,t,c or g
cagcaacctatctcgacaagtcgcgccttacgcactgctcacctcagaactcgcgaatatgctttgccactgcggcgggtcgccgcaaccgagctcagccctgtggctcctcctcgctgccctgcgcggattggtggcagacggcaaccgggccgctgattgggcggcgaaggagccattcggggagactctggtgggttcggctgccccaagagtgataagttcggcttcagacacgccttagcgccagcagtgagtcggagctctatggaggtggcagcgggtaccgagtggcggctgcagcagcgactcctctgagctgagtttgaggccgtccccgactccttcctcccccttccctccccctttttttttgttttccgtctccccttccccctcccttccctactctcccgacgaccggatcctgaggaggcagctgcggtggcagctgctgagtttctcggtgaaggtatttcatttctactgtcccctcccctccccaccccatctattaatattattctttttgaagattctttcgttgtcaagccgccaaagtggagagtgcgattgcagaagggggtgcttctcgtttcagtgcttcttcgggcggaggaggaagtaggggtgcacctcagcactatcccaagacttgcttggcaacagcgaggttcctggggaaaaccccaggggcaaaacgctcagaaatggattcctgcacgaagcactagacgagatgacaactccgcagcaaacaactccgcaaacgaaaaagaacgacatgatgcaatcttccaggaaagtaagaggcatactaaataagcttacttcctgaaaagtttgacaagctatgccttgagctcctcaatatgggtgtagagtctaaactcatccttaaaggggtcatactgctgattgtggacaaagccctagaagagccaaagtatagctcacttgtatgctcagctatgtctgcgattggcagaaggtgcaccaaacttttgatgggcccagcagccagtgggtcaaccaggacagaagcaaagcacccacattcagacggcttcctaattttnccaaattacaagatgaatttgaaaacccgaactagaaatgttgatgtctatgataagcgtgaaaatcccctcctccccgaggaggagggaacagagagccattgctaagatcaagatgttgggaaacatcaaattcattggagagcttggcaagcttgatcttattcacgaatctatccttcataaagtgcatcaaaacacttttggaaaggaggaagagagtccaactcaaagatatgggagaggatttggagtgcctctctcagataatgaggacagtgggacctagattagaccatgaacgagccaagatccttaatggatcagtactttgcccgaatgtgctccttgatgttaagtaaggaattgccagcaaggattcgtttcctgctgcaggataccgtagagttgcgagaacaccatttgggttccgtcgcaaggcttttctttacaattggaccaaagacgatcgaatcaaattcgtcaagatgcagtaaaagatctaggggtgtttattcctgctcctatggctcaagggatgagaagtgacttctttctggagggaccgtttcatgccacccaggatgaaaatggaatagggacccatcttggagacttgcctgatatgttgggacaaatgccaggtagcggaattggtactgggtccaggagttatccaggatagattttcaccccaccatgggacgtcatcgttcaaatcaactcttcaatgggccatgggggacacatcatgccctcccacacaatcgcagtttggagagatgggaggcaagtttatgaaaagccaggggctaagccagctctaccataaccaggggtcaggggcttttattcccagcttgaaaggacagtcgaaggatattgccaccttcggttttcttaaggaaagggacagctttaatgcaggatggaggtttagccttgaggccttgcttcagttcgtttcctaatgaataaaaatcaagtggccaaagcttccgccccagataactatgattcctcctagtgcacaaccaccacgcactcaaatcaccacctctgggacagacacctcagcttgggtcttcaaaacttaattccaccactttatccaggaaaagcctgccaaggaccaggcaaaaagccaccaccgttcaaaggtaggaactccttaaactaacctgaaacctgttgtgacctgaatatctaaatagtggaaatgcaaatgaggctgtcaatggtgtaagaggaaattgagggctcctaaacactttcttcctgagatgttaagcaaagtaatcatcctgtcactagataggaagcgatgaaggataaagaaaaagcaagttctttggatcagtttactcaaacaggaagggatagccacaagtgacaacttcatgcaggctttcctgaaatgtattggaccagtgtcccaaactggaggttgacatccctttgggtgaaatccctattttagcacagatttgcagctcggtgccattatttttagagctggtgagcatttcaggaacttagctcaaaccactagaaagtggcacccattttcctcctccttcctactttggtcttcagcagttagctaaatttccaagatcgagaatgggttaaccaggaacttttttcaacaaagccaaggtcaaatatgcagaaaatgctcccagaaattgatcagaataaggaccgcatgttggagattttgggaaggaaagggactgagtttcttattcccactcctcaaattggaggaaggaactgtttgaagcaaataaaagttgggatccatcccctcaaaccatatataaatggattaaagataacatctctcccaaacttcatgtagataaaggatttgtggaacatctttaaatgactagcttctttacagttacatttctagtggagttaaacccccccagcgaatgaaacagattcatcctctgctcctttccaaaggaacagttaagagcaggaaaaacaactactactatctttcaagccagtaatgcagaaatttcttcatgatcacgtgggatctacaagtcagtgccctgtatgctctccaggtgcactgctataacagcaacttcccaaaaggcatgttacttcgctttttttgtgcacttctatgacatgggaaattattgaggaagaagctttcttgggcttgggaaagaagatataacccaagagtttccgggaaaaggcaaggctttgttccaggtggaatcagtgggctaacctgggttagaaactgctgaagaagaagaatcagaggaagaaggctgtactaaagtaaccagcccaaagcccttaaattggtgcaaaaacatactgttggctatggtgttaactggcatttggacctaaccactggcggaaaattccattccgctggtaatggttttccacaatattttaaagccagaagcaccgtcagttagggatttccttcctgcataagggtttttttggtagtgtaaatgtcttaattatagtaataccatcaaatattttaaggagtatcctttaatggtttagatacgtatattagccagcatgcaataattaccatccataagttctcaaggcagaggccagtctattgccagggcccttctttgctgcccagttatccataggctggttttaagtttagaaaaactggaatagcaacaccttgaatacttgtaggacagttgcaccttttgctcacgtaatacctttgaggtttgtttgcaaatacttttgagttactccattttgggttgttaccagaaaaaatttcttaacttgtaatttgatgggttgttgccccgtaaatagtatattgccctggtaatttctaccttcttaggtaaatgggcttttatgtgctaggattttaaatatcccttgagcctggggcaaggtgccacaagtcttttttaaaaagggaaacatggtttactttgccacaaaaactgatccagttttgagaggatcggttaatgcccytggaagtggtttttggtgggtgtgaaacaaaatggtgagaatttgaatgtggtccctcctattgatagtattggaaacttaagtataacttaatattatcaaggtcatgttcatgcccctgattttatataacttgtatctatcaataaacattgtggatacttgatgaaaacatgcctaaaatatggggggggcctttttaaagaacccttggggggcccaaattttacgggggctggcaaggttttatttttttccttatagggggcctatttataacctacctgggaattttgggaaagaaccttttcttgtggggggggacataatggaacaac

SEQ ID NO: 113411 - DNA, 2795 bp, Homo sapiens
acgctgtctctccatgccaggactgagttgtgggggagggaggcggttagcgggctttagcgccttttctggcggcggtagatttgaagcgcttcaaaggaccggacccagagaagaaggaaatactctttaccggtgcagaataagtggagcacagggatcagttgtccttgtttttttttgggtcttttcttcatttgaagattaagtattgggagccatgggaataaaaggttcacacgtcctcgatgtttttttgacattgccattaacaatcaacctgctggaatagttggctttgaattattttctgatgtgtgcccccaaaacaatgcggagaccttcggttgtcttggtacagggtgaaaagggggaccgggggaatcaaactcagaaacccattacattataaagagttggtctctttttcacagaagttgtccaagggatttttatggttccaaggtgggtgacttccaaggtaaggaaaatggacgaggaaggggaatctaatctatggaggattttttgaagacgaaggagtttcgcttgttaaaacacaaacaaagaatttctcttgtcaatggcccaacagagggaaggatacaaatggttcacagttcttcataacaacggaaaccaactcctcatttagatgggcatcatgttgtttttggacaagtaatcctctggtccagaagttgtaagagagattgaaaaccagaaaacagatgcagctagcaaaccgtttgcggaggtacggatactcagttgttggagagctgattcccaaatctaaagttaagaaagaagaaaagaaaaggcataaatcatcatcatcttcctcctcctcatctattgactcaggataggctcaagtgattctcagtcctcttctgattcctctgattccgaaagtgctactgaagagaaatcaaagaaaagaaaaaagaaacatcggaaaaattcccgaaaacacaagaaagaaaagaaaaagcgaaagaaaagcaagaagagtgcatctagtgagagtgaagctgaaaatccttggaagcacaacccccagttttactgttccgtcccagaagagattccccttcctatacctgaaaatagatttctaatgaggaaaaagtccctcctaaagctgatgagaaggaaaggaaaaacagagagagagaaagggaaagagagtgtaatccacctaactcccagcctgcttcataccagagacgacttttagttactagatctggcaggaaatttaaagggaagaggaccaaggcgttatcgaactccttccagatccagatcaagggatcttttcagacgtagtggagactccctccacattggaggcaagagatgcagagagcctcaaagaatgagggtatcaagtggtgaaagaatggatcaagggggataagagtgagttgaatgaaataaaagaaaatcagagaagtccagttagagtaaaagagagaaaaataacagatcacaggaatgtatctgagagtccaaacagaaaaaatgaaaaggagaagaaagttaaagaccataaatctaacagcaaagagagagacatcagaagaaattcagaaaaagaagacaagtataaaaacaaagtgaagaaaagggccaaatctaaaagtaggagtaagagcaaagagaaatcaaagagtaaagaaagagattccaaaacataatatgaaatgaagaaaagaggatgaggttcaaggagttaaagggaagggatcatgaaaatgttaaagaaaaagaaaagcagtctgattctaaaggaaaagatcaggaaaggagtagaagtaaagagaagtctaaacagttagaatcaaagagtaatgagcatgatcacagtaaaagtaaggaaaaggatagacgcgcacaatccaggagtagagaatgtgatataactaaaggtaaacacagttataatagcagaacaagagaaccgaagcagacgtagggacagcagcagtagagtgcgatcaagaccccatgacagagatcgcagcatgagcaaggcagtaccatagatacagagaacaggaatacaggagaagaggacggtcacgaagcccgagagagaagaacaccaccaggaagatcaagaagtaaagataggaggagaaggaggagagacctcacggagcctcagagagagaagaaagtcaaagcagaaacaaagacaaatacagaaacccaagagagtaagagctcacacagaaaagaaaattctgagagtgagaaaagaatgtactctaaaagtcgtgtccttatttgctcaattaacggcagggaaaaaatgtctgatagtgatcaaagtccctcctcaaaaataaaaacaaagcagtcaggacgatgaatttaaagtccctcccatgttggaaaaaataagggaggatgagaagatcagatccctcagtggaaaaaggaaaaccggaaaatcaaaaggtcaagaaaatgacccatgtacatgaaaaaaataaaaaatttggatcatgaatcaagccccgggaacagatgaagacaaaagcggatgagtgaagttatataaacttacttccattctgttgcggattttaagtttgagagacttgctaatgaatctcctttatgttgttttccttttcattgtttttggattgttttaagtttgtcctttttttttcttaatgtggatttcattgagttgattttttgataatctgcaatctggataatttgtactgctaaagttttaataaactcgacatgagaaaaccaaaaaaaaaaaa

SEQ ID NO: 113412 - DNA, 1172 bp, Homo sapiens
agcggccgcgcgctctgagtacagcttcccgcggagccggccaggtcctccagggcaccgagaaagccggccagaacggcggcgccctatcccggccgcagcgatgtctgacggcgccccggaactgacggtctggtacgcaggggcgctcggcggcaacggcggctttaaacgtcatcgcgggcgcgacgcctgagggacagtcttggggtttggctgtccggacggtgcagcggcgaggccggcccgcgaagatgccagtggcggtgatggcggaaagcgccttttagtttcaaaaagttcttggatcagtgcgagaaccaggagctcgaggccccgtggaggaattgctcacccccaaggtgtatggtcagcttctagctttatatttgttccataatgacatgaataaatgcgagatatctttgggaaaagaataccacctgctataaaatctgcaaattcttgaacttgggggaaatttggtcagtaggacaaagaatctggcaagagagattttccctggggatctattacaaccatcaacgcttcaccagtggttttgaggacggttccagccaatttatgggaagcactttagagatgcaacaagtgagacgcgccttttgccctgggtcttttcaagcgtattactttcaatccatccgcccgatgatttttgcagcctttgttgggacttcctgtaggaagaggctgtgaaaggcatattaggaacaaggatgggcaagcttgattccaccacaaggaatggttcttgcccaggaaagccagtttgcagggggccctgggatgttttcccttttaacaagtttatttccctttattcagagccttgctccagtttcccccaatacccaatgaacagcagttagccagactgacggattatgtggctttccttgaaaactgatttatcactctgagttcaagattcatcttcagaatcctgtatactggacaaacgtaggaaatgttaaagtttgttattttccaatttattgggatgggctttaagcacctcaggcattcctttactatggtggataaaaatacatattaggattttaagatatactattattacattttgttcccttaaacgtttatggctgaataggttgttggaaacagttctccattttgtaggtatt

SEQ ID NO: 113413 - DNA, 1665 bp, Homo sapiens
  misc_feature (1)...(1665): n = a,t,c or g
ggcacgagcggcacgagccgccacatcctccacctctcttgtgtcctttgagcgttgccgggccagggtcaagcggagggctccgacggcgcggacggagcgaagcgccgagccatggcgcaccaaacgggcatccacgccacggagagagctgaaggaattctttgccaaggcacgggctggctctgtgcggctcatcaaggttgtgattgaggacgagcagctcgtgctggggtgcctcgcaggagccagtaggccgctgggatcaggactatgacagggccgtgctgccactgctgggacgcccagcagcccttgctacctggttttaccgcctcgactcacagaatgctcaagggcttcgaatggctcttcctcgcctgggtcgcctgataactccccccgtgcggctgaagatgctgtacgcggccacgggggccacaagttgaaaaaggagtttgggaggtggccacatcaaggatgagctctttcgggactgtgaatgaagaccttattttttgctgggaatccagaaacacctgtcgtcctgtgcggcacctgccccgcttgacctcggctgagagagagctccagcagatccgcattaacgaggttgaaagacagagatcagtgttggaaagcaagcaccagaccctgcagggcctcgccttccccctgcagcctgaggcccagcgggaactccagcagctcaagcagaaaatggtcaactacatccagatgaagctggacctagagcgggaaaccattgagctggtgcacacagagcccacggatgtgcaccaagctgccctcccgggttgccccgagattgcttgcccgctaccactttctttncttttacaagcacacccatgagggcgacccctttgaggtctgtaagtgttcatctacttcattgccgggggtacaagtgcagcatcaaggagcgaatgctctactccagctgcaagagccgcctcctcgactccgtggagcaggacttccatctggagatcgccaagaaaattgagattggcgatggggcagagctgacggcagagttcctctacgaccagggtgcaccccaagcaaacacgcctttcaagcaggccttcgcaaaagccaaagggccaagggggcaaagcgggcccataagcgcctcatccgcggcccgggtgaaaatggggatgacagctaggaggctggagccaggcccggccacgtgtggaacttgtggggctgccccaaccttcccgctcccctgcccacccatccctcccttccctgggctccccaggaaaagtgtttctgggaaggtcaaggaagggctgggcaacttgaaacgcactttgcaagcgtcccgagggccaacgggcttggcatttttgtgaaccttccctgtttgctgtcccctgcatctcgtctgtgtgccccagggttgtcccggggacccctgccctggctggcttaagggggctgggtcaggggcctggcatgaacctgggcctcccggggagctgagactatggtcccagcacagcccataaactctttggccacaagaagtggggtcagtcagggctggggcaggggtcactgcagtttgggatggttgaatgctgtattttctaaagaataaaatatttttaaatcaaaaaaaaaaaa

SEQ ID NO: 113414 - DNA, 2066 bp, Homo sapiens
tttcgtggcgaggggcgcggcccggcgtgggccgcagagacgttggatttcggcgggggctgtggactggcctcggggcgacttgaggtgttcctggccagtgtccttccacctgtccacaagcatggggaatcatcttctccatacctcttcaagggcctttttggcaaaaaaagaaatgcgcatcctcatggtcgggcctgggatgctgcagggaaaaccacgatctctctacaagcttaagctggggtgagatcgtgcaccaccattcccaccataggcttcaaccgtggaaacccgtggaagtacaagaacattcagctttcactgtgtggggacgtggggtgggccagggacaagatcccggcccctgtgggcgccacttactttccagaacacacaaggccttgatctttcgtggttgggacagcaattgacagaagagcgtgttgaacgaaggcccgttgaggagcttcattgagggttgctgggcccaggacgaagctccggggatgctgtcctcctgggtgtttcgccaaaaaaagcagggacctccccaacgccatgaatgcggccgagaatcacagacaagctggggctgcacctcactacgcccacagggaactgggtacattcaaggccacctgcgccaccagcggcgacgggctcttatggaagggactggactggctgttccaatcagctcccggaacccagaagtgaaccgcgaccccccctccctcttaactctcttggcctctgctttacttctatgtgggcaacgtgccggctcgtggtgtgagtgccagaagcttggcttccttggtcggtcaccgtgtgcatcgcaccgtgctgtaaatgtggcagcacgcagcctgcggccaggctttttatttaatgtaaatagtttttgtttccaatgaggcagtttctggtactcctatgcaatattactcagctttttttattgtaaaaagaaaaatcaactcactgttcagtgctgagaggggatgtaggcccatgggcgacctggacctccaggaagtcgcttgtgttgggagagccggcccacgcccttggctttagagctgtgttggaaatccattttgggggctgggttttaacccaaactcagtgcattttttaaaataggttaagaaatccaagtccgagaacacttgtaacacacagcaagggagacccccgcctagcataagattttgcagtttacggcctgggatgcccagtcggccagccccagcttgtttcccctcggggaacattgaaggtgggtggtggcgcacacgacctgcgactcaaattctggcatggtcaacagtagaagatccccggcaactccgcttgttccttggggtcaccctggcatttccattaggccatgttgcttgtcccttgtgcttcccaacggttccccagggggccaaggctggggaagcccccccagccaccccacttttatgcccgcaggccgcccttaccccaccttcaaggcaagccttatggggacgcaagggccccatcttgttccctcgggtcgcccgtgtggcccagaagttgggtcccgttcgtccccccaaacaactcggtgcctcgcctcaagaacacttttggccagggattgtctgggggccctcacccagccagggagcgccgtgcaaaacccgggccaggccggtccaacctagaccccaccagccccctcggggagcaccccccacctcttgtgtgtgatggtagctttctctcccctcagccctgccaagggtcccgatttgcccatcgaaaaaagacaaccttctactttttttctttttgtatttttgaataaacactggaagctggagctgttaaatttatcttggggaaaacctcgagaactggtctatttgggtgttcgtgggaaccttttactgctttcgagatacacggattagtaatcacactgtgttgtatacttgttttcagtttttcattttcgacaaacaagcacctgtaacttactagctattagaactaaaatctcttaactatttaaaaaaaaaaaa

SEQ ID NO: 113415 - DNA, 2006 bp, Homo sapiens
aactgatacaatgcatctgacacgccagcttggacgaggaccgagcttggctgtgtttatctcgttggggactaaggcgtcggttggcgcgcaacgggttctaggctgcaggcagctcgaggacaccgcgggccccgccccggctgcgggctggcagcatagcataggcaggcaggccgtgccggggggggcatgttgctgtaaccagtggcccaggggatgttacggtggacagcgcacctggagggcgggccccgcagggtgaaaccatgctgctgtggctggcgggcatcgggtatactccttcggggggtactgctctggtgaaaactattagacactgcgtcaaatagatgtgcacattttcaatgcagtgtccttgcgttggacaaagctgccccccggtgaagtctgccatccgtgggcaagctcctgtggtacccctacatgcgctatggacactcaacccgtcctcattcgacgacacagtcctcctttggggcgggcggaatgacacccgaaggggccctgcaatgtgctctatgcctttgacgtcaatacgcacaagtggttcacaaccccgagttttcagggacagttcctggggcccgggatggacattcagcctgtgtcctagggcaagatcatgtacattttttgggggctacgagcagcaggcgaactgtttttccaatgacattcacaagctagataccagcaccatgacatggtactcttatctgtacaaagggcagccctgcacgctggagggacttccactcagccacaatggctgggaagtcacatgtatgtcttttggggggccgtgccgtccgctttgggccattccattccaacaatgagatttacctgcaaccgcattcgagtctttgacacccagaactgaggcttggctgggactgtccccccgactcccagtgctgccttgaggggcgcccggaagccacttcggcctttgggtaacaatgggggagctgtacatctttgggtggttattaatgcaaaggctggaaccggcactttccatgacctctgggaagttttaatcctgtgtcctttacctgggaaaaagattgaaccgaaggggaaggggccatgtccccgccggcgccagtgctgctgtattggtggtgacaaaaatgtcctcttttgggggtaccaagtccatctcctgaggaaggccctgggagatgaatttgaccttatagatcaatcttgacttacaatttttgggagctgttagcgctagtctgaagactctgtgcaaactgggccgtgattcagtattaacctagaaccagtcctgttttgcctcatgattatcaggttgggagctgaatgcccatgaccaccaacagcaatatcagtccgccccatccgtctcctcccatgggtaaggaaggaagtttctgccacctcccctcctgaagcctgctgtcaatcttcactgcccctgcccatctgtcacccacctgctcctttggacccctgggactttgggtataacctccatgtgggagttgttgggcgagaggaggttctctgtggctgtgaaattcagtggggggagctgtagcgggggtgggggctaggttcctccccccttgggccgagggcccttttccccttgggtgcttttgttccccatccacctcctttcaagctgctccctgggcctcagctctgcccaagggccagcccaggttctgctgggaaagaaaggggaatggggagaagggagaagcaagcagtgtctgagcctcaggagcttccccctccccctttgcctatcccctcccctctgacttgagccttgagccttgaactgggagtctgaaaggagttgcagctgttggcatgagacctccttctccccgtcttggggaggtggggaccagcagataaatcccacccttccttgagctgtcgctgtactctgaagttcagccagctcagattttataaaaaaataattaaaatctcaa

SEQ ID NO: 113416 - DNA, 1192 bp, Homo sapiens
  misc_feature (1)...(1192): n = a,t,c or g
aagttngccttcaggggnatcttactgcccccaaacttaacatgtgctcactggacccatgctgcccctggaagaagacacctgaactcatttcccaacctcagaactcacacaccaactttcttgcccccaaagccctccaagtttggaccccaaatttaccttaaggactccccattacacaaatgagataacagctttggccagatgagagctagactagtgtggggccacacagagctgtctggacttgcttggaagccctccagcactcaagaaaaagacaccttttgaaaaaaaaaaaaattcattttttattggaactccatctgaacatccagatataccctggtgttggttagcaagaaccgtttgtacatttgatactgatggtgcccaaaaccaaaacagtgactaaacatgatggggaaagatgttgaaaacaaaaacctgattttggagaggaaaataaaagccagtcagattcagtgaggatgcaaaacctggtacaacaaaatccttttacaaaatataaatttattatgaaaacctggaaaggataatccaaggaaggtaaagaaagagaaaaggaggccagcagaagaaggcaggaaggagaggaaaagagaaaaagacaaagaggagatgagagaagaaaatacagttcagcacaacagaagtgcagaagctcaccttacccaaatgggcattaaagcctcgctgttgtaatccgtgtcagaaaacaaagcatacttgacacataggtgctctactttcccatccacttgagttcttagggggtaaatttaaaaagctccctgggaaggggacactgaggttgctcaaaaacccaacaaagaaaattaaaaaaaaaaaagagaagagagaaaccccacaccccccacagtctcatttcccgatgttccattgtttttaaaaaaaggaataaatcccatctgaaagtaggagaggaggagtgggagagggagagaagctcatggctttcacagaccagcctgactcccctggaggggagaggaggaaggcagagagacatgatggtctcctggttgagaggggaaagagaagggacagagaggaaagaagagaggagaggaatgcaggagaggagaagaggggcaatctcaaacactgacgactaatctagtttactgtgtttaaaaaaaaaaaa

SEQ ID NO: 113417 - DNA, 2308 bp, Homo sapiens
  misc_feature (1)...(2308): n = a,t,c or g
ttttttttttttctggttgatgtattatttattatgtaacagttctgagaaaaaatccaattcaaaacatattactgaggattctgtattagtatattttagaaatcgtataatccaaagcctgattttctaatatattttcttatataacacttaaggaatttttcactcccattatttgggctctaggaaaatcttatggggaaacatttgttacactaggaaaacaaaatttaaggtacagttgttagggcacgggttaaaaggggatggatacacacaaactattaattaattacaaatcaggtacttcttttggaatacacatttggaatggtaaacttttaaaatcaggtgttttagataaatataaaacatacttcaagaacttattttaacatctcctttactttctaatggctcttcaggaaaaaattcctttctggattcattcagtaggcaaggggcccaaaaatgggtgttccaagccaagattcaccttgtcctcttcagaaatgacctgaagagcttttgggttggttaaaaatattgcccgaaggtatcttagggtaaactcgaagagctaaaagcactgaatccagagatcaggtctctcggctgtgctggggacaccatcaaccacttggggttgaattctattgctatgaatgagaggtgactctgaggggctttaaccaggccggggctaatgacagggtttcaaacatcagtaataacaggaagatcggggttgagaagagtgacaagaaatcctgaatggtctgaaccattttacacttgattctatttcttagagctctttgggaaacaggcaagcaaggcttttcctggatagtgtttggccccaggaaacaaatgaaatcaccctcacctaaatgattaaaaaaacatttccctgttggtttcatactactaacaattataatattttaatggataggagaaattatgggtttaaaattaaattctctgttaatgcacacgtttcaataaactggttatcagactgcttatgacaagtgtcagtaccatacattcaactgcttttagtccttcgtagtctttctcttgggcaaaattggtggttatctaatttctgttacctatcaatcacctgttttggacattaactgtcaattactggctgcaaaatatgtctgtgtatatttaacatgagatgtaactatacagatgcatgttgaattgtagacatgagttcccattatttcagagctatactctgaatgtgagacctttatatttacacacacatacctctccagcccaacccaacattcattcatataaaaatatatgactattgtagaatccttcatttacatatcactaaaaatatgttcctttccattcctaaacatctttttaatctagccttgcccaaccaacatccataagactgggatataaaatctttttattagttacttatttattttaaattatcattattattttttgagacaaggtcttgttctgttgctcaggctggagggcaatggtgcaatctgggcccactgcaaccttggcctcctgggctcaagtgatcctcctatcttagcctccctaagtagctgggaccgcaggcatgagccaccacgcctggcatataanacctctcctagcagaaattaatttttttaaaaaagtctacttttaaagcagcagttagaaactttgttcttatgtaaataatactgttatatcaaattgtggatttaaatatttttaatttaagttcctttcttatctcttaaaaaaataaaacagatttctgtgatacttaatggcttaaccattcttccaattccaaggaatacaaaggtctccatcttgcataacagagtaaaaatgtgaaatgcagaggtgcatcccatgtaggtaaggcagtgattgttctagaagtctcttacaacaatccaccatttgtatactagaaatgctgggctctttattttaactcctccaaagaaaatttctttgttgatgcctgtatcaattcattttcaataacctttaactcttcctttcttttcatgttctctcttgcctgctgagctttggtgagaataaaccactggagatttgctggatcacagagtgttggaatattaaaatgcccgagttcatgcaagcttggagcatatctgtcactgttaaggatcatttgtaaaccacgcaaacttcgagggtgaaatagtattctacttttcaacagtctattataaaacacatcaagaagagagtaatattcttcaagtgtcaatac

SEQ ID NO: 113418 - DNA, 1417 bp, Homo sapiens
tttcgtggggcggaagcagctccgtaagatataccttgctgcagaggggagcaacagcggaacggagacacggtggccgggccgaaaacgtcacaaagccgcagagagcgggctctgtcccgcccgctccccaggtggacgtggtcttggcatccacgccaatgagaatgtgagggcggggcctgaatagacgcaggaaatggcgacggccgcgggtctgtgagcagcgggggcggggcctggttgtggccccttccttctcccgtccccaagttccctgggtgggaactggggtcttggggtccctggctgggtggccagaccccgaagccagcgctgggaagggctgcggatgcccgggtcagaggaagggtcaggtccaaagaacaccggggtctggtcctgggcaagaaccgcccccctctccgggcctgcttcagtcttcctttgcagaacaatcggccaggccccttccctctgcccccgggtgcttgaagtctagccccatcctggtccaatgcgctcttggtagcctcctttcccagctgcccgcccgctcgccatgccgcccttactgcccctgcgcctgtgccggctgtgaaacccgcaaccctccctcccggctcctcggagcggtcgccgggcagcggtccaaacccagtacttattatgaactgtagggggcgcatcctggtgccagcactgaggaagttaaacgagcttttcttctccaagtccaaagagctgcacccagaccgggaccctgggaacccaagcctgcacagccgctttgtggagctgagcgaggcataccgtgtgctcagccgtgacaggagtcgcagcagctatgatgactcagctccgctcaggtagtccccttaaagtctccacgaaccacagtcccatgccaagtctgcccaccaaaacacacagcagctcctggacaccccccaacgcacaagtactggtcccaagtttcacagcgtggagcccacaggggaccccagttgaggcagcagcaacacaaacaaaacaaacaagtgcctgggtactgcccttctcctcatgctggcgggacatgggcctgcactacattgccttcaggaaggtgaagcagatgcaccttaacttcatggatgaaaaggatcggatcatcacagccttctacaactgaacgccggggcacgggccagggccaacagatgcatccttcagcagggagcgacaacagctagggcagcggcagccgccaccatccgagccaacccaaggcgcccgagatccgtgccccggggcgccggcccctgaggggctcacctggatggggcctgcagtgcgtttcccgctttgcttccttccctggacggcccgctccccgaaacgcgcgcaataaagtgattcgcagaaaaaaaaaaaa

SEQ ID NO: 113419 - DNA, 1901 bp, Homo sapiens
  misc_feature (1)...(1901): n = a,t,c or g
gaggtcggccgcgtggctggaagacatggccactccagtcggtgttgagcacggcgagcagtctcaggcctttagtgatgatgattaaaggtggtggctgtggccttgaaaacagtcatgtgaaaactcatcaccttaaggtgttaagtgtaaggatcttcatgatgaaatttctgtaaatggtgcagtcagcctcagtttccaaagccggaaaaggatcctctagtagccacggtgtggcagctgcgtcgtgaaccaggacctggacccgggacccaaagtgcccatgtctttaatgttagctccccagcgatgccacgactgggatccagcacagcccatgcctctgctgctaattgttccctctaaacgtaatcgccatgccgttcatttgggcttcatctttaaaaggaatgaagccaactgaagattattctcggaaaaccctttttggcagtttagntgaaatttagagtacaactaagaacatttttcagacctccactgtggatgacctggggtataatctcacaaatcgatggggactgcaaggattgtaaactgaaatgaacatgattatacccctgtttggaagagcctaagaagggaactgaatgccatgagtttccagagagtaatgcttaaccccgagttacacaggatgccgtcttgtgtttcctcttgtttagttacccactacagtgattttgtgatctgctcacatgggttgccaccacacaactcattgctttcgcactttctacttcaactcaatgacggattgataaaagttctcctggtgtctccgcagagtgccttccaggaacagatctttggcatagaatatcagtggtttccttttttgtttcaaatagtggtcagaaaatacccagtgttgactcaccaaggcaatcagcttcctttttccctttttttgttttttttttaacattttatatttttgctttattttattttattttattttttgagacggagttccactctgtcgccaggctggagtgaagtggtacaatcttggctcactgcaacctccacctcccgggttcaagcaattctcctggctcagcctcctgagtgctgggactacaggcgcgtaccttctttagtagagactggggtttcaccatgttggccaggatggtctctatctcctgaccttgtgatctgcctgcctcagcttcccaaagtgctgagatgacaggtgtgagccatcagacccagcatttttttttttaatttaaatttaaattttttttcatttttttgagaggttttttttgttttgttttgttgttgttgttgttgttgttgttgttgtttttgagacagtcttggctctgtcacccaggctggggagtgcagtggcatgatctctgcaacctatacctcccaggttcaagcaattcttgtgcctcagcctccccaagtaaactggggacttacaggttgcacgctacccacacctggctgattttttttatgttttagtagagacagggtttcaaccatgttgcccaggttggtctcaaaactcctgagctcaggcaatccacccgccttggcctcccaaagtgctaaggattacaggtgtgagccaccacacccaggctattttttcctttgcgttttttaaattttaaagttggggggggtctcaatttgttaccctgggctggtctcggactcccggacttaagcgatcctctggctccaagcccactaccaagtctcaggtttctttactaaaagatcactacctttttttctcttaatctgctgccatgtgagatgtggctttcaccttccgccatgattgtgaggccttcccagccacgtagaactgtaagtccaataaacctcttttgtaaattaaaaaa

SEQ ID NO: 113420 - DNA, 1750 bp, Homo sapiens
  misc_feature (1)...(1750): n = a,t,c or g
ttgtgtgtttttccccatttgaaacctttcccccccttaaaaattggaacttggtacattcagtaggaaattcgtcactcaggctgtggccaagaccaagaaaagtgcaaagagacagaggaggaatgaaggagtgactcctctgtggttaacattcagggagcctgtctaaaacctccccttttgtatatgctgggagggtatgaggggtaggaggatggtcctggccctccctaaactcacctccctccaaaagccatgatcttgcccttggcagtgattgctgctagggccaccatcttgcccccaaaaaccagttagcctggggaaaaggcctgcccattttgatgacagcaactttttcccttttaaaactgcaactcctctaattccccatttgtcaaaattgctcccccaatactggcttctcccccttgtgagctattttttggggggaggtgggtgggatgggaaattatttatcccaaatcaacagagccagggaggcccccatttttcaaaaggagaattaggaagccaaaacatttatctcccccccactggaaggaaatacagggaccctgaccagggttaactagtgcaaattgggaattggggacttatttaaagtcccttgtacccccatccctaggctgggatctttgggtgtggggcaactgagtcaaagatggggtgtaaggtgctcattttgaagggaaagttggtggggataccccaaagcccaccagaagagtagaatggttcccccaaaaccatctggagtgattggtgaggggagtgacactgagggagatgggaatacaggtaaggatggaaggtccatgtgcaaatcctgggcttacccacccatccgacccctatcatttttctggctatttggtctagtctgggagaaaccatcgaggaaaaaaaaaacagggagaaagtagattcccttctccatcccatntgggagttcttccctcctggcccccaaatctggtctaccccagaataggcccatatgtagaggcaagaaagaggtgtgatctgcttacctcttttgccttggaagaatctggagctcactggatttgggggtcaagatagggcccaatatttccctgcccctggactgggaaagtgctcagccacagaacagaggggcagaggggcaaccctcccccaaacctccttgacctggcttgggagaggccatctccgaagtcccaggaatatggggaggaacatggaagatccaaaggcatggaagctgaggaaggtgtcttgatacaagggaaacagggacgtagagacccacgctggggaaggatgaaacccaaagccacactcccaggtgggcggggtcaggtatcacaatggtcctggtccccagcccctgggcccacaaagaaatggaaatgtgcctaggaaagcaactgggaaagggccttaagagaaagcttccagaacaaggcgggtcattaggtgagagagatggtttcccctaggtttacgaatcaggggagcaggttagacattcagagctggtgggggctgtgagtagagattcaggataagtatattgctcagttgccccaagggctggagaagggatggaagctggccctgcccctcatggaggccattccctggaggaagactgagaggggaacctcgaaagatcccttcccaggagatgggaaaactacatctcacacaaagcagcctgacccctgagctccagggc

SEQ ID NO: 113421 - DNA, 1864 bp, Homo sapiens
gaatgcgcgccgcgtagggtcccccgggccgagaggggtgcccggagggaagagcgcggtgggggcgccccggccccgctgccctggggctatggccatggtgaccggcggctgggacggccccggcggcgacacgaacggcgtggacaaggctggcggcttacccgcgcgcggccgaagaacgactcggccttctcccccccgggtgccgccagcgacgccgagccgggcaacgaggaccggccggggctgcaggtggactgcgtggtgtgcggggacaagtcgagcggcaagcattacggtgtcttcacttgcgagggctgcaagagctttttcaagcgaagcatccgccgcaacctcagctacacctgccggtccaaccgtgactgccagatcgaccagcaccaccggaaccagtgccagtactgccgtctcaagaagtgcaaacgggtgggcatgaggaaggaggcggtgcagcgcggccgcatcccgcactcgctgcctggtgccgtggccgcctccctcgggcagccccccggcgtcggcgcctggcggcacgtggcgaccggcggagacctcttcccggggcagccggtgtccgaactgatcgcgcagctgctgcgcgctgagccctaccctgcggcggccggacgcttcggcgcagggggcggcgcggcgggcgcggatgctggggcatcggcaacgtgtgcgagctgacggcgctgctgctcttcagcaccgtggaggtgggccgcgccacgcgtttcgttgcccctgagctcgccggtggccggaccagggtggcgctgctgcgcctgagctggagcgagctcttcgtgctgaacgcggcgcaggcggccgtgccccgtgcacactggcgccgctaactggccgccgccggcctccacagccgtgactatggtcgccgagcgcgacgtaggctttcatggaaccaggtgcgcgccttccaggagcagatggacaagctgggccagcctgcagatcgactcggccgagtatggcttgcctcaaaggccatcgcggttcttcacgcccggacgccctgtggccttttcagacccggcaaaagttgagaacccttcagtagaaggctcaggtgggccctcaccgatgtatgtgcgggcgcagtacccgtgcccatgccccacggcttcgggacgcctgctgactgcgggttccccgccctggcgccgcggtccctgcctccctcatctcccagctgttcttcatgcgccctggtggggaagacgcccattgagacactgatcagagacatgctgctgtcggggagtaccttcaactggccctacggctcgggccagtgaccatgacggggccatcgtgtgctgtggccaggcctgcaagacagaacctcaagggacagggaaatgcctgaagccctcgaaggggcctccccgcggccccagggactcttgggcttcttcttcctccagacttcctattttttaaaagactgtgaaatgtttgtctttttctgttttttaaatgatcattgaaaccaaagaagagactgatcatccagggcctcagccttcatccttccccaggaacccctgttccaggaatggaagggtccaatcctaaggaaaagccttgtttccttcagcacccctagcattgaacttgtggggatggtgggggttggcttccctgggcatgatggacaaaaggcctgggcgttcggccaaagggggcttgctccagtgggcaggggtagctagcgtgtgccaggcagatcctctgggacacgtaacctatgtcagacactacatgatgactcaaaggccaattaataaagacatttcctacccgaaaaaaaaaa

SEQ ID NO: 113422 - DNA, 1049 bp, Homo sapiens
aactgttccattttccgtatctgcttcgggcttccacctcatttttttcgctttgcccattctgtttcagccagtcgccaagaatcatgaaagtcgccagtggcagcaccgccaccgccgccgcgggccccagctgcgcgcctgaaggccggcaagacagcgagcggtgcgtgcgaggtggtgcgctgtctgtactgagcagagcgtgggcattctcgcgttgcgccgggggcgccggggcggcgcctggccttccctgctggaacgacaacagggtaaacgttgttgctctacgacattgaacggctgttaactcacgcctcaaggagctggtgcccacccctgccccaagaacccgcaagggtgagcaagggtggagatttctccaagcacgtcattcgacttacattcaggggacctttcagttgggagctgaaacttcgggaatcccgaagttgggaacccccggggggccgaggggctgccgggtccggggctccgctcaagcaccctcaacggcgagattcagcgcccctgacggccgagggcggccatgcgttcctgcggacgatcgcatcttgtgtcgctgaagcgcccttcccccagggacccggcggacccccagcccatcccaggggggcaaagaggaattaccgtgcctctgtgggtcttccccccaacgcgcctcgccggatctgcagggagaacaaagaccgaatcggcggcccactgcgcccttaacgtgcagtcccacgcctggggctgaggctgaggcactggcgaggagagggcgctcctctttgcaccacctacttagtcaccagagactttagggggtgggattcccactcgtggggttctatttttttgaaaagcgagacattttaaaaaatggtcacgtttggtgcttctcagatttctgaggaaattgcattatgtatagtatattacaatgatcacccgactgaaaaaatggttttacaatagttcttgttggggtggtttttttggtatttaaccaaataatttagatggtgaaaaaaaaaaaa

SEQ ID NO: 113423 - DNA, 1480 bp, Homo sapiens
  misc_feature (1)...(1480): n = a,t,c or g
cctgtacaagccgcgtccgggccgcgtgaaaacgaaatcgtcgacgatttcgtggataatcggggcaggccggggctgaagaggagaggcgcactagccctggggtgagtggaccctgcccttccgcgccatcgagccatcgctaccgcccttcggacgcagtgcagcaggccgatcagtaacacacagagactggggatcgatcatggggcgtttgttagtgccccaagagaaaggtgaccaacctgttctgcttcagaacatcgggtcaacgtctgcgagcactgcctggtagccaatcacggcnaagtgcatcgtccagtcctacctgccaatggctcacaagatagcgactgcaacctcaattgccgggctgtgcaacatacccctggccagccgagagacgacccgccttgtctgctatggccctaagatctctttcactgggcctgcctcaatgaacgtgctgcccagctaccccgaaacacggcaccctgcccggctatcagtgccccagctgcaatggccccatcttccccccaaccaacctgggctggccccgtgggcttccgcactgagagagaaagttggccacagtcaactggggcccgggcaggactgggcctccccctngatcgatgaggtgttgaggcccagaagcccgagccccctcaaacacgtctgacttctctgacttggtcttagttttaatgccagcaagtacccctggaccagaggaggtagacaggcgcctctgctgccccagccttctacagccaggccccccggcccccagcttccccaaggccggcccgagcagcacacgagtgatccacatgggcaatcctgaggcccttgactcacgcccctaggaagggtgtatgatacgcgggatgatgaccggacaccaggcctccatggagactgtgacgatgacaagtaccgacgtcggccggccttgggttggctgcgccggctgctaaggagccgggactgggtctcggaagcggccgctgaccctgctccagcggccggtggctgctgctactcttgggactgctgggcttcctggccctccttgccctcatgtcttcgcttaggccgggccgcaagctgacagcgagtcccaacctggacccactcatgaaccctcacatccgcgtgggcccctcctgaagcccccttgcttgtggctaggccagcctaggatgtgggttctgtggaggagaggcggggtaatggggaagctgaagggcacctcttcactgcccctctccctcaagcctaagacactaagaccccagacccaaagccaagtccaccagagtggcttgcaggcaaaggcctggaagtccccgtgggtcaagcatttgtcttgacttgctttcctcgcgggtctccagcctccgacccctcgccccatgaaggagctggcaggtgtgaataaacaacaactttattaaaacaaaaaaaaaaaaaa

SEQ ID NO: 113424 - DNA, 2052 bp, Homo sapiens
  misc_feature (1)...(2052): n = a,t,c or g
ctcgcgaggccccagagagcaggcgctgggcagtgtggaggtcgttggagtcacttccgcgtcaccagctcctgtgcctgctcagtcggtgcccctcccgctccagccatgctctccgccctcgcccgggccgtgccaagcgcctgctctccgcccgcagcttcagcaccctcggcccagaacaatgctaaagtagctgtgctaggggcctctggaggcatcgggcagccacttttcacttctcctgaagaacagccccttgggtgagcccgccttgaccctctatggatattcgcgcacacaccccgggagttggcccgcagaatctggagcccacatcggaggaccaaaagccggcttgttgaaaggcttacctcgggacctggaacagcttggcctggattggcctggaaaggtttgttgatgttggtaagtttatttccgggttgggagttccccagaaaagccagggcattgacccgggaacgacctgttcaaacaaccaatggccacgattgtgggcaaccctggaccgctggcctgttgcccagcattgcccggaagccatgatctgcgtcattgccaatccggttaattccaccatccccatcacagcagaagttttcaagaaagcttgggggcaacacccccaaaaaaaatcttcgggcgtgacgaccctgaacatcgtcggagccggcacctttgttgcagagctgaagggtttggatccagctcgagtcaacgtccctatccactggtggccatgctgggaagacccatcatcccccctgatctctcaggtgcaccccaaaaggtggactttcccccaggaccagcttgacagcactcactgggccggatccaagaaggccggcacgaaggtggtcaaggctaaagccggagccaggcgtctgccaaccctctcccaatgccgtaatgccggcgccccggctttgtcttctccctttgtgggatgcaaatgaattggaaaaggaaaggtgtttgtggaaatgttcccctccgttaaagtccacaggaaaacggaatgtacccctacttcctcccacacccgctgcctgccttgggaaaaagggccatcgagaaaaaaaaggnaaaaanctctgggccatcggccaaagtctccttctttttgaggagaaagatgatcctcggatgccccatcccccgagctgaaggccctcccatcaagaatgggggaagatttctgtgaagaccctgaaagtgagccgctgtgacgggtggcccagtttcccttattttatgaaggccatcatgtcgactgcaaagccgttgccagataaaactttgtattttaatttgctttggtgatgattacctgtattgacatcatcatgccttcccaaattgtgggtggggctctgtgggcggcctcaataaaagccgtccttgattttatttttcaaggtcccttctgtaaatgctgtgctttcttccctgtgagagccaactttagagtgtctgctacctcttcattaccaatcagaattaggatgatgtttaactgttagacttgaagcgtgacgttttcatcagtagctttcaaggaaagtcttaaattgttaattttatgggaattggacacagtatttcagttttacccgtacatgctcctcccgcccctcctgttgggcacccttgcatcgcccgggcctgattcctcctggggggtagttcacccccacgggttcatagttcagcgggcgaatgcaggggcaggctgtttttctgggctgaggcaaacagcacctttctcattgagcttcctctactgacctctgtcccccttgggatttcatcttctgaccgaaccctgatgttcagtggcagagacagcccatagccagaactgtgggtagaccagggttggggtgtgcggtttggggacagcccaaacccccagccgctgtgtcaaggcctaggacgccatgctgccatcaaaagggggttccaggtttccaatcagtggcctaaagaagggacttcttgttgtactgaggagtgcggnaattt

SEQ ID NO: 113425 - DNA, 1337 bp, Homo sapiens
cccacgcgtccggctatggggccgggcggtcgtgtggcgcggctgctccccccactaatgtggcgcagggcggtttcctcggtggcggggtccgcggttggagccgagcccggggcttcggctgctggccgtgcagcggctttcccgtaggagcagcgttctgccgggcttgccagaccccaaactttgtccgcggcctgcacagcgaagcctgggctggaggagcgggcggaggggacacgtcaacgagggacgcccagaatcggacgcggcagatcatactggtcccaaggttgacatcgatatgatgggttcacttctgaggcaagaaaatgcaagaggacatttgtgtgatccaggttcctccagaaatgagatatacacgattactttgtgattgttagtggaacttgtacccgacacttacatgccatggccttctacgttgtgaaaatgtacaaacacctgaaatgtaaacgtgaccctcatgttaagatagacgggaagcacactcatgcactggctctgcgtggattctcgccgcatgctgattcatttgatgcttccagaaaccagagaaatctatgaattagagaaattatcgaccctacctctcttatgatgccaccagttagctcagatagcacctgagacactacctgaagcacttcattcttggaatagaagatgatacttcatctgtgactccagtggagttaacaatgtgaataaacatatttctactcgcactgcgttagtcatttcagatttggattgagtcacttattggaaaatacagctcctaaagtccgtctccttggttaggctgctcttaggacaaggcttgtgtacctcatgggcactcctgctaactggcatgcagagactgtcgataagtgagctatacctgcaaccaaaaatcagtacattctacccaaaacttatgacacgctgcctttatcctgggaaatgtcatcagaatttcctgggagttaggcactggctcctgtgctttgacttcctctgctcagatttttattaattttaatttaggcttaaaatgtaaatcttaaaccctgtttgtttaatgggaatggcaaaaattttaaaaaataatataaaacatagcccactggtcttatttttatactttgaggtgataatattcttctaggaggacttctgtaacccttccataatactccagtaacacaagaaagtaaacaaagtgtttgttaggaaaaactctgaacgctctagttcttagttcatatgcaagagtattatcaaggttcacattaagtaccatggctggacatggtataacagaaatctgg

SEQ ID NO: 113426 - DNA, 757 bp, Homo sapiens
ggaattcggcggcagccatcaggtaggctgcgttgaggatctttgctcttccatccgcctttgatcgtcttcctcttcagccatccaggtaagccaagatgggtgccatacaagtacatccaggggctatggagaaagaagcagtctgatgtcatgcgctttctttctgaggggtcccgctgctgggcagtaccgccagctcgtctgctctccacaagggctccccgccccacccggccgtgataaagcgcgccgacctgggctacaaacaaggccaagcaaggttacgttattatataggattcgtgttcgccgttatatataggattcatgttcgccgtgggtggccgaaaacgcccagttcctaagggtgcaacttacggcaagcctgtccatcatggtgttaaccagctaaagtttgctcgaagccttcagtcccgttgcagaggagcgagctggacgccactgtggggctctgagagtcctgaattcttactgggttggtgaagattccacatacaaaattttttggaggttatcctcattgatccattccataaagctatcagaagaaatccctgacacccaatggatcatcaaaccactccacaagcacagggagatgcgtgggctgacatctgaaggctgaaagagccctgggcttggaaagggccataagttccaccacactgttggtggttctcgccgggcagcttagagaaggcgcaatactctccagctccaccgttaccgctaa

SEQ ID NO: 113427 - DNA, 460 bp, Homo sapiens
gacctgcttacgccatgcttggcacgagggtgtccatggacttctcccaggaggagtgggagttgctggagcctgctcagaagaacctgtacagagaggtgatgctggagaactacaggaacgtggtctccctgggtaagaagccttgaagaaccaatgtactgatgtggggattaaagagggtccactttccccagcacaaacctcacaagtcactagtctttcctcatggacggggtatttactttttcaaccagtggcttcttcccacttggagcaaagagaagccctgtggatagaggaaaaaggaactcctcaagcctcctgttcagattggatgactgtactaagaaaccaagactcaacttacaagaaggtggctttgcaggaggaaccagccagtggtataaatatgataaagcttatcagagaagatgggggatggaagcagttaggggac

SEQ ID NO: 113428 - DNA, 4504 bp, Homo sapiens
  misc_feature (1)...(4504): n = a,t,c or g
gggggacgggccggcggcgcgcgccgagcggggggcaccgcgcgggtgcagccacgatggaagggggtgcgtacggagcgggcaaagccgggggccgccttcgacccctacaccctggtccggcagccgcacaccatcctgcgcgtcgtgtcttggctgttctccatagtggtgttcggctccatcgtgaacgagggctacctcaacagcgcctccgagggggaggagttctgcatctacaaccgcaaccccaacgcctgcagctatggcgtggccgtgggcgtgctcgccttcctcacctgcctgctgtacctggccctggacgtgtacttcccgcagatcagcagcgtcaaggaccgcaagaaagccgtcctgtccgacatcggtgtctcggccttctgggctttcctctggttcgtgggattctgctacctggccaaccagtggcaggtctccaagcccaaggacaacccactgaacgaagggacggacgcagcccgggccgccatcgccttctcctttttctccatcttcacctgggcgggccaggctgtgctggccttccagcggtaccagattggcgccgactcggccctcttctcccaggactacatggaccccagccaggactcgcagcatgccttacgcgccctacgtggagcccaacactgggccggatcccgccggtatgggcggcacctaccagcagccggccaacaccttcgacaccgaaccccagggctaccaggtcgcagggctactgagccacagtgaccgcctgcccccgcccctccccatctgtcccctctctccacacccagcccctgctcctgcccaggctgccctgcccagcgcctcatcagcctctgccttgtcccactgaggtccagggtagctcggggcaggggtggggcagtccagtgttggggactgtctacgtatgtgcaagtatatcaccagggcatgtgccccgcaggggcctagagggtgggggccaggggtatttgcattcgtacattgtgtcatcaagcattccttgagcgcctactgggcatccggcctgtgctgggcatgggtggtgacattggcagaaatggccactggaaaggggagcgatgagctgtggaggaagccctggtggtaccagaggccagaatggtgggaaagacagatccagataatgctgggaagtgtggctacaccgtggcttggtcatagggtgagtgtaaacacccacaggacactgggggctgtcaccctgctctggcagtcctgctaagagtgtcaggcccgtctccattttatggttgaggaaactgaggtctagagaggtcaagattacttgcccagaatcactcaggcagctagtgatagaggtggggccaagcccaggctgcccgactgcagaccacgtgctcttccctggccacccacctcctaccatccccacgcttggggcttccctgctcagtgttactgtcattctgggaggccttggggccctcagccccttgagacaccctgattctgctgcatgccaagggcctgttctgccccagctgttcctcctcccctggggacaggcccacctccgggtccctccacccacatccccctggtcctacccctggcccttggcctcctccaagagggctcaccccgggtgctgctctgtgctctgcgtgtcccacagacgcttgttccagggggctccagcaaaccccttcgtggtctctcaaaggactgatcactgtccttgcctctaggaggggtcactaagcccttacctagggctgggtggacaacaaggcacagatgagggtgtgactggcccgaggtcacggtgagtgagtggcaaagctggccctgacgcctgggtttcttggccccagctgcccagcaggtgcctcgattccctgcccttgtgacctcccaggaaacagaactgatctgggacactatgtcacctctcctctcatctggggtcagtcagggttcgggggctgcagcagccaagcgcatgagaggtgtttccttggccttccagaaggcccactgtggagccagcctccctatgggaggcagagcggcaaggacagggctttggaatcagccaggtacggctcctggggttgtggccgtgggagaaacattgcccccagggntgacacaggcaagagcccctgaggcatgggaggcccagggaagaccatgggctgtaggggagagtgtggcaggtgacccaaaggcacaaagagggccgtggggcctgaggaggtcataatctcttctgagtgggggcaggtcgattcttgcacaaggtgggctcttcactgagccataagggacagggaggtatgggagagcgctgggggcccatccccctgtccacccagtgtccactggcctgtccttcagggagcagagcagagcaggtggtggacgggcccagtgctgggtgttttcaccaccatccccccatcccccatctaagaatcctaagaggcaggcgatccctcacctgcttactcactcagcagttacccggcccctgtgctggagataccaagggcatgggtggtccctgcttcgatggccccaaagctgggccagagttaagggaaagaggaggaagtcctaagcagagaagtagcaccattatccccatttaacagaagggaaactgaggctcggcaagcataggcgagttggcagtggaacacggaatctaaactcaggtgtgtccaaggtcctcccaaaggacagcagtgatggagaggaccccagccagctgtgtgacagctggttgttgctgacttcattttccaatccggagaaggggctctgtccacagtcccccgccgccaggtggcccacatggaccacagatatgggggagaggtatatctgttggcctgaagagtgaaacctgtaccaggccaaaggtgagggcgtgagtgagggaaggagtgtttatggaagagtgaagttctgtgcccaccacaagaggctgtgagatgttctgaccctcacccactgtccaccaaaagcctcttcctgctgatgggcactaggagacctcagggtactgcccattctgtttctcctcgggttgccagccagctgctggtgattcctcagccggagggcaggggtaccagggtaagcttaactccatcttgggtgtttgtgacaggccctgactgccaccctaggcagggaaagctgtcaagactcctgccaggaatggggggtgctgagtcatcttcacgaagaatccctcactcttcccgggtttcagcccagaagcccttccagggattgatctttccccattcaggctggggctctggcaggggacctgcccagggattggagatgagagagggtgagagatggagggcgagatttggatgggacccagggctcctgactcttgccctgggaaggttcatggggaaactcgcttcctttctgttggcagaggacagcccctggggaaccccagggcccaactctgtccggtatcccttttcctcccagctgccctcccctacttctcccttgctcccaaagctttccttggagaagggccctcctgcagctggaccctgcagggtggctccctcctccccatcaagcacaagagagggcccagggaaaaaaggtttcacataagtgtagagtcgcaaggacgctttagagttcgggcagagtctggggtaggggagacagcgatttgttccaaggtcaagcacagagggagaggttcaggagtcaggtcttctgccttctgagttggctcatcctgggcagtcacagactgtcctgcctgcacggctcctatccacctgggggtgtcgcagttgaggggctaattcccaggggactgacgttagttccctactccatccttccctggtgattcttgatcttcaaagcctcggggatcccacggtttccccatgtaactgagacaccctgcctgttagcccttgggagaccccctaaccttggcccaaagacccctttgattctctaagggagccacgaaagggggaaatgcccccctcccaggagtttaatgggaagaaagggactgggccaggctgcctcccaagcggatgcacttgacctgacactcccccaatgtcctgggtgccgcacagccctttgtcggtgccccggccccctccccgcagcgttactgccctgtgtaataagtataaatatatatattttctatatataagatgtaataatataaggctccacaaaatatatctgtgtgtgtgtgtgcgtgtgtgtgcggtgcaagggcggtccccatcctgggcctcccactctaaccccccccaccacctggttaagtctcgagtgaatccagtggccccgtggcaccctccttttatgacatccatccatctgtggtgaaccaagtgaaggtggtgacttcatggtgacagtagtaataaagtgaagactcagaacccaccagtgaaaa

SEQ ID NO: 113429 - DNA, 648 bp, Homo sapiens
ttgacccctaatgatatcatctgattaccgccagcttggcacgaggaggatgagggatggagagagtgagcaggggctggaagtagaaacaacagacacaggggaagggggcgtcgccaggagagtggggctttgaggcaggagggtcagcctgagtgagggcctggcccacactgacggcctgcagctctggtgagcagcgcccgggaagcaggggctgagtctggaagaaaagctctcacagccgcctcacccgcccccagggtatctgtacggctccctggccacgctgctcatctgcctctgcgcggtctttggcctcctgctgctgacctgcactggctgcaggggggtcacccactacatcctgcagaccttcctgagcctggcagtgggtgcactcactggggacgctgtcctgcatctgacgcccaaggtctgcccccacaaacccgcgaccctggccctccgttccccaccatggactcccaggccatgccctcccagggaccttacccaccccacctcctgacccctctccctgggtcttggtgggaggcgccctgggacctcccccccagcccagcgcccctactccccaggtgctggggcagcatacacacagcgaagagggcccccacgcgtccg

SEQ ID NO: 113430 - DNA, 1237 bp, Homo sapiens
  misc_feature (1)...(1237): n = a,t,c or g
acgatccggtgctagaagcgctggtaggccttggagaggcgggttaggaagagtggagactgctgcacggactctggaaccatgaacgtatttgatcgatggatcaactttgatgcgcttttaaaattttctcactataaccccgtcaacttcattatcacctgaataatgtctatgcacgatttgccctttgtatgtttgtggcaggctgcaggggcctatgtccatatggtcactcatttcattcaggctggcctgctgtctgccttgggctccctgatattgatgatttggctgagggcaacacctcatagccatgaaactgaacagaaaagactgggacttcttgctggatttgcattccttacaggaggtggccttggcccctgccttggaaatttggaattgctggcaaccccaccatccttcccactgctttcatgggcacggcaatgatctttacctgcttcaccctcagggcactctatgccaggcgccgtagctacctctttctgggaggtatcttgatgtcagccctgagccttgttgcttttgtcttccctggggaatgttttctttggatccatttggcttttccaggcaaacctgtatgtgggactggcggtcatgtgtggcttcgtcctttttgaaactcaactcattattgaaaaggccgaacatggagatcaagattatatctggcactgcattgatctcttcttagaattcattactggcttcagaaaactcatgatgatcctggccatgaatgaaaaggataagaagaaagagaagaaatgaagtgaccatccagcctttcccaattagacttcctctccttccacccctcatttcctttttgcacacattacaggtggtgtgttctgtgataatgaaaagcatcngnnnnnnnnnnnnnnnnnnnnnnnnnnnnnnnnnnnngggggggggccgttttaaaggatccttgggggggccaaagttaacgggggcggtgcaaggaaaaagttttttccctttaggggggccgaataaaaacctacctggggatttttgggaaggaaccttttttttgggggggggaaatattgggacaacctccctccagaatttaaaggctttagggaaaataaaaaattttaaagggtaaagggggtaaaacaactcgcatatgcttgggggttggaagttttgcttccggggtttgatttttgaaaatttttttccccggggctgg

SEQ ID NO: 113431 - DNA, 455 bp, Homo sapiens
  misc_feature (1)...(455): n = a,t,c or g
atatcttaaacctgcctatatataaaaggaaattctaaagaatgtccaagtatcccccaggaagccaagaaaaagggaccaatgaaaaacagagtgccccaacagaaaacaaataatccaatggcaggtgtaagtcctaacatgtcaatatgtgttttaaatatccccattaaaaaacagagatgatagatnnnnnnnnnnccttgactcaactatatgctgtttgtaagaaactcacttcaaatatattgatataggcacgttggaagtaaaagttggaaaatacatactatgcaagtattaattttaaaaaagcaggagtggctacatataatatcagatagggtagaccagagagcaaagaaaattaccagggacaaagaaggacattacacaatgataaaagtgtcattccacacgaaatcgtcgacccggaattnnnggggcggtaccga

SEQ ID NO: 113432 - DNA, 457 bp, Homo sapiens
  misc_feature (1)...(457): n = a,t,c or g
gggcccccctgtggggggacgccttgagttttttttaaatgnnnnnnnnnnggggcnnnnnnnnnntttttccccctccatttccccccccttgggaaacccgaatgggggggttcctttgggcccggggttttaggccccccgggccaccatggggaannnnnnnnnnnnnnnaaaattcaaaattcccccnnnnnnnnnnnnnnnnccccttgttccccggttttnnnnnnnnnnaggcaaaaaattcccctgtaccccgggggcaaagggggcacggagcccaaaccccccccttggcccccggccgggggggagagggggggtccctttttcnnnnnnnnnnnnnnngaaagactccagtttatatgtaagcctggcaaactttcccatgtgccaaaactcacacaccctctactccaccaacgccattaccaacccccattttacaacgaaa

SEQ ID NO: 113433 - DNA, 472 bp, Homo sapiens
  misc_feature (1)...(472): n = a,t,c or g
tttcgtggggccgtgtagcgggtgctgttctgtgtctgagcttcgtggtggtggggccgtgtagcgggtgctgttctgtgtgtgagcttcgtggtggtggggccgtgtagcgggtgctgttctgtgtgtgagcttcgtggtgatggggccgtgtagcgggtgctgttttgtgtgtgagcttcttggtggtggggtcatgtagcgggtgccattctgtgtctgacttcttttgttcatcacttttcnnnnnnnnnnnnnnnnnnnnnnnnnnnnnnnnnnnnnnnnnnnnnnnnnnnnnnnnnnnnnnnnnnnnnnnnnnnnnnnnnnnnnnnnnnnnnnnnnnnnnnnnnnnnnnnnnnnnnnnnnnnnnnnnnnnnnnnnnnnnnnnnnnnnnnnnnnnntaaaaagtgccaccaggggcacatgcccagaggaaaagccacgggaggacagtacaagccaggaggtgagt

SEQ ID NO: 113434 - DNA, 1597 bp, Homo sapiens
tttcgtgtgggtgtacgcggcgcagcgcggcagtcctgatggcccggcatgggttaccgctgctgcccctgctgtcgctcctggtcggcgcgtggctcaagctaggaaatggacaggctactagtatggtccaactgcagggtgggagattcctgatgggaacaaattctccagacagcagagatggtgaagggcctgtgcgggaggcgacagtgaaaccctttgccatcgacatatttcctgtcaccaacaaagatttcagggattttgtcagggagaaaaagtatcggacagaagctgagatgtttggatggagctttgtctttgaggactttgtctctgatgagctgagaaacaaagccacccagccaatgaagtctgtactctggtggcttccagtggaaaaggcattttggaggcagcctgcaggtcctggctctggcatccgagagagactggagcacccagtgttacacgtgagctggaatgacgcccgtgcctactgtgcttggcggggaaaacgactgcccacggaggaagagtgggagtttgccgcccgagggggcttgaagggtcaagtttacccatgggggaactggttccagccaaaccgcaccaacctgtggcagggaaagttccccaagggagacaaagctgaggatggcttccatggagtctccccagtgaatgctttccccgcccagaacaactacgggctctatgacctcctggggaacgtgtgggagtggacagcatcaccgtaccaggctgctgagcaggacatgcgcgtcctccggggggcatcctggatcgacacagctgatggctctgccaatcaccgggcccgggtcaccaccaggatgggcaacactccagattcagcctcagacaacctcggtttccgctgtgctgcagacgcaggccggccgccaggggagctgtaagcagccgggtggtgacaaggagaaaagccttctagggtcactgtcattccctggccatgttgcaaacagcgcaattccaagctcgagagcttcagcctcaggaaagaacttccccttccctgtctcccatccctctgtggcaggcgcctctcaccagggcaggagaggactcagcctcctgtgttttggagaaggggcccaatgtgtgttgacgatggctgggggccaggtgtttctgttagaggccaagtattattgacacaggattgcaaacacacaaacaattggaacagagcactctgaaaggccattttttaagcattttaaaatctattctctccccctttctccctggatgattcaggaagctgacattgtttcctcaaggcagaattttcctggttctgttttctcagccagttgctgtggaaggagaatgctttctttgtggcctcatctgtggtttcgtgtccctctgaaggaaactagtttccactgtgtaacaggcagacatgtaactatttaaagcacagttcagtcctaaaagggtctgggagaaccagatgatgtactaggtgaagcattgcattgtgggaatcacaaagcaaatagtactccagaaagacaaatatcagaagcttcctattcttttt

SEQ ID NO: 113435 - DNA, 805 bp, Homo sapiens
  misc_feature (1)...(805): n = a,t,c or g
tgtctggcaggcaggggggccgagcacctgtacatgcccctgtggtcactctggccccgtgtcttccctgggagaggaaggcctgggaggaccctggaaggggcagcaggccaggtgtnnnnnnnnnnnnnnnnnnnnnnnnnnnnnnnnnnnnnnnnnnnnnnnnnnnnnnnnnnnnnnnnngggtcccttcggggaccccannnnnnnnnnntaaaaggggggggtaaaactccccgacccaaaaaaattaaaaaaaccaaaccttttttggggtttaatcccaagggaaaccttaaatgaggtccctgggccctttgggggaaaattttcccccagggttttaacgggggggggaaaaatttttaatgaaatttttaaaaaaaacatttctttggcatcaggtttaaaatgggtaaaaaactgggttcaaaacccccaaaatcctttaaaaaacccccctgaaccccaaaaaaaggccccccctaaagctggagggcccaccctccaaaggtttttccaacctttaaacaaaaagggtttgccccaaaaaaagggccgggattccccagggcaagtttccttggaggaaaacttttggggcttacccttgggtggcaaaaaacgcaaaccttggattttggggttgggggggaccccttttaaatttgggaaaaagggggttaaaaaaaacccattcctttaaaaaggtgggggaaaccaccccaaaccgggcacattatgggggaaaacccctattgccaaaaggttgggttaaaaaatttaaaccaattttttgaaaccc

SEQ ID NO: 113436 - DNA, 439 bp, Homo sapiens
  misc_feature (1)...(439): n = a,t,c or g
tttcgttgcgcatgtgcgggcgtactgcgcatctactacggcctccaggacagaggaaccgggggaggcagggggaaaaggccggcccagcaattcccctaccccccggtcccacgtgtaccctcctggcctgggtcgccccagcccacggggagcgggcggagtcctggcccacgaagccttgtcacctggcgggcgaatccgcaagcggagacttgtctttaaagggcnnnnnnnnnnnnnnnnnnnnnnnnnnnnnnnnnnnnnnnnnnnnnnnnnnnnnnnnnnnnnnnnnnnnnnnnnnnnnnnnnnnnnnnnnnnnnnnnnnnnnnnnccaggaacgaaagcgcagggagcagaggctggaccgtcctctgtcagttccctcgttcccctggagtggagctctgagccctgggaccacagagttggctgttan

SEQ ID NO: 113437 - DNA, 1137 bp, Homo sapiens
cggcctcccctttgaaaccgtcggacaatgaatacccctagcttggcacgagggtggaaactaaaacagaggcggtggaagaagttgcacaaggctttagagatcactgctgtagggaaaagcatgatgggctctcgggttttgagaactggcaagttgttggaggcagctggagcggggcctgggtcgccggcactggctgtctttgcgtttgggcgtggccagtcactcctcttccaggttccagcctgaactgtctgcccctgatctgcggcgatttatccatgggtccaaccccggctgtggcccttgctttccggagctacgggaggtcgtctcctctatcagctacatcgctcgacagctgcaggaacaggaggaccacgatgcgctgaaggaggactggcagtttgtgggccatggtagtgggaccgcctttttcctgtggaactttcatcatctttcaccagcgttggggaccttagtcatcttcctggacgccacgttaccacttgccccctccagacccctttccttgaagactggatgtgttgagttccaggccccctgccagttgaagtgagagtttggtgatactggcaagccccatccttctctgcctcttaactccttcacgaggaatctgggcctcttatttcgtttctggggactgcattggactgagggctgggtaggcaggtgtcttggacccacctgaaatgcagtatcatctgatttactctttgggatcttgaagaagctcttttgggtatcaacacctaggtcgccagtgaaatagaacacagaacaggaactacattataagccttatgaggtcaagaaatgtgacttggccgggcgcggtggctcacgcctgtaatcccagcactttgggaggccaaggcgggcggatcacctgagggtcgggagtttgagaccagcctgaccaacatggagaaaccctgtctctactaaaaatacaaaattagccaggtgtggtggtacatgcctgtaatcccagcgtactagggaggctgaggcaggagaatcacgtcgaacccgggaggcagaggttgcagtgagtcaagatcacgccattgcactccagcctgggcaacaagagcgaaactccatctc

SEQ ID NO: 113438 - DNA, 812 bp, Homo sapiens
agcgaagatcgctatgtctctgcaaaagacccctccgacccgagtgttcgtggaactggttccctgggctgaccggagccgggagaacaacctggcctcagggagagagacgctaccgggcttacgccaccccctctcctcaacacaagcccaaactgctacccgcgaggtgcaagtaagcggcacctcagaagtgtctgcgggccctgaccgggcgcaggtggtggtgcgagtgagcagcaccaaggaggcggcagccgaggccaaaaagagcgtttgtcgccgtctagattacatcacgcagagcctccagcagcagggcgtgcaggcagaaaatataactgtgacaaaggattttaggagagtggaaaatgcttatcacatggaagcagaggtctgcattacatttactgaatttggaaaaatgcaaaatatttgtaactttcttgttgaaaagctagatagctctgttgtcatcagcccaccccagttctatcatactccaggttctgttgagaatcttcgacggcaagcctgtcttgttgctgttgagaatgcgtggcgcaaagctcaagaagtctgtaaccttgttggccaaaccttaggaaaacctttactaatcaaagaagaagaaacaaaagaatgggaaggccaaatagatgatcaccagtcatccagactctcaagttcattaactgtacaacaaaaaatcaaaagtgcaacaatacatgctgcttcaaaagtatttataacttttgaggtaaagggaaaagagaagagaaaaaagcacctttgaaattccaaacaaaaaa

SEQ ID NO: 113439 - DNA, 1150 bp, Homo sapiens
ctcaaaagaaaaaagctccataggagaaggaaccttgtctcttcaccacataaactgtgtttggattcgcaatcgagttgggaaaaaaaaatcagtctggaagagccacaccaaaccgctaacagctactgtctctgggaatagaacaaggagtttggttggcgcgatataccgcccctgaacctctagccacaataaggcttaattaatgaccggacgacttgaaagcgccttccactgtttatctcttaaatctgcaacgaaatgcaacaaaaacgcaagaaataaacaatagaagccagtcttactgcacactgcagaagccaataaaccccaaatgtagctcaaaacaaggtgtcacgcaaacttctgatttttttttttgttttacactgaatctctgtcgctctgactggagggcagtggcgcgatctcggatcactacaacctccgtcttctagagtcaagagacttttcccgccccaggagtctctgccactctgactagagggcagtggcgcgatctcggatcactacaacctccgtcttctagagtcaagagactctcccgccccagcttctccaataggtgggattgcaaacaggcaccaccacgcccggaataagtttgtgaacatttggtacaaataacaaatgaccaagttccttggttgtagttgcctaacttttaatacttaaaaatgtagcctcaggaaataagaggcctcaaacaattgaataaaaactcacaactttctctccacggaaatctttagtaaaaggcgaaagatttatgggctttgaagagaaacccgagtatattcgtgacttccgcttcgaacctcgcagggagaactaacacttaacacacttatggttgttggatgcctgcgtggtacgcactccctatatgtagtttatgcacacagatgcgtgtaagaggcatcatgctctaaaacagtgcagaaatgcgcgcacagagggagtgcaagcatcttgagggtatcttttcgtggtgcaccatgggtatgcaaatcacaggcggctccgggctgttccgcgccaccggggaagccatgggtcactgatctcctttgctctcctatgctcctctctgctggtcctcctgggacccgcaccccgtgggcgg

SEQ ID NO: 113440 - DNA, 2895 bp, Homo sapiens
  misc_feature (1)...(2895): n = a,t,c or g
tttctttgcgtaaccaatactgtaaggcatttaaaggcacctctgccgccacagaccttgcaggaaactccgccctgacccacccttcccgatgcagtccctgatgcaggctcccctcctgatcgccctgggcttgcttatcgcggcccctgcgcaagcccacctgaaaaagccatcccagctcagtagcttttcctgggataactgtgatgaagggaaggaccctgcggtgatcagaagcctgactctggagcctgaccccatcgtcgttcctgggaaatgtgaccctcagtgtcgtggggcagcaccagtgtccccctgagttctccttctggaaggtgggatttagttttgggagaagggaggtggctgggcctctggatcaagatcccatgcacagactacattggcagctgtacctttgaacacttctgtgatgtgcttgacatgttaattcctactggggagccctgcccagagcccctgcgtacctatgggctttccttgcacactgtcccttcaaaagaaggaaccttactcactgcccaagagcgaattcgttgtgccttgacctggagctgcccagttggctcaccaccgggaactacccgcatagagagcgtcctgagcagcagtgggaagcgtctgggctgcatcaagatcgctgcctctctaaagggcatataaccatggcactctgccacagcagaatggagcggtgtgaggaaggtcccttttcctctgttttgtgtttgccaaggccaaacgtcccactctctgcccccctttaatcccctttctacagtgagtccactaccctcactgaaaatcattttgtaccacttacattttatgctggggcaagcagccctgacctaagggagaatgagttggacagttcttgatagcccagggcatctgctgggctggaccacgttactcatccccgttaacattctctctaaaggggcctcgtttcatttccaaagcagtttaagggaatggggaaccagagtgtttttagggaccctgaagaatctttatgactctctctctttcactctttttttttttttgtcactaagttaaaagcgaagtgagagtattaacgtttttgttctcctccggccccctgttacaatgaaggggcaaaagtatttgctcttagtctattcctcccttaacttctgtgactaatttttattttttttctagatttgcccaattaatactagggtgcagtgtatcctgggagaggtagggtgtgtgggggaggaatcccttggggggaggatattagggagtgctctgttgtttacaaactcacggtacccgcaggccctaggcaaggagactttaaatgactgataaggaaccgtgaggaaacatgttgcttccaggcttgatttcgatttttcgcttttttttttttttggggcagaatctcactttgtcaccaggctggagtgcagtggtgcaatctcacctcactgcaacctccgcctcctgggttcaagcaattctcctgcctcagcctcccaagtagcttggactacaggccctgccaccacgcccggctaatttgtgtatttttagtagagatggggtttcaccatgttggccaggatggtctcgatctcttgacctcgtgatctgtccaccttggccttgcaaagcgctggattacaggcatgagccactacacccagccgatttttcctttttgattaaagatgctattacaatgtaaatatttcttacacagaaagtcacagcacatgtgcccattgatacaaggctgctgaggcctgggtctccagtctcgaaatataattaagggtggcaaggactgggagtcagttgggaggagtgcatagccagtctgtggaagacaactgccgagatactggcaattactccagcctgggtgacagagtgagactctgtctcaaaaaaaaaaagtttccaatgttaactcctagagaaggccaaaaatcccagatttgtatatgaaatcttaccaattttaaaaagattgggccgcttattatttttttaaaaaaagctgtgcgagtgtgatgtgtccccaaacgggactggcctcatggggtggcccacggtcacacccctctgatctccagaccggtgcatgcccttgtcctctttaaggacaactcctgtggggcaccattttttcccttccaccanggcccaaagcccatagtgtcccgggtccccaaggaacaagggctccttcccagtgcctaggagaaggtatgagcagccctcctcaccctgtgaggctgtggggggatcaccaaggctgccctgcccttcaagttcttgggagtcccttgttggggtgaaatggaggccaggatggggaaaagagccttcacccagcagctgcttttgggagcagggggtccaagggaagagagggtgggcctcgaacattcaaaactgcctgggatttttctacccaccctgttacatcataaacaacttcttgaaacacacaccagccctgaagttctggggctcattttgaaagcctggaataagcaataaaatcctttttaacttgcggacagtttccccttgccttggctgcatatttcactgatcacatctcaggatttcaaaagcattttttggggtggggctctttttggttggaagggattgctggaactgaacacgtgagcctaagtgattcttgggacgcaccatttggcagtaactagagcttgcttgtagtctgtgatttattgtgatacatctaccttgtgtgctagttaggttcccatcatataatgtcctgaggtcagcacaaatctcctactgaccattgtacaggtctcagagactcgttctgctgatctgctcaatttg

SEQ ID NO: 113441 - DNA, 461 bp, Homo sapiens
  misc_feature (1)...(461): n = a,t,c or g
ccttctggggnnnnnnnnnnnnnnnnnnnnnnnnnnnnnnnnnnnnnnnnnnnnnnnnnnnnnnnnnnnnnnntgcctgacacgtttctttcggaatatttgccgccagccatcggtaaagaaaacaggctcttggccttttctgctgtgctacctcctggtggcctttgctggtccagatgttcctcgaactcctgctcatgtcgggtaaaggcggctctctctcctgtggcggggatggggccacagtggagaaggtagctgtgccagccctcagggcggccctggtccaaaggacaggggcccaggagccagctggccgtcccgggaggcctgcagccaatgacgggcctggtgggcaggagggcccagcccccttgttccagtgccttgaatttgaagggccacccactttacggtcgccccaggggctgctggccctgccttctcagaactgcact

SEQ ID NO: 113442 - DNA, 996 bp, Homo sapiens
gcacgagggcagctataaaggccgcgccggggccacgaggagcagagccggcgccgtcaccgcccgcattgcccgctcccagtcccgcgctcggcacgacagtgaaatcccccagacgaggtgctacgcggagggcgagtttggagaagcgcagcgacagcctcttccagctatggaagaaaaaaggccgggggtgttaacctccgaccgcctgagcctgttcccccgccagccccccgcgcgcgccccaagggagctgcgcttcccactccatcctcaaggtggactgcgtggagcgcacgggcaagtacgtgtacttcaccatcgtcaccaccgaccacaaggagatcgacttccgctgcgcgggcgagagctgctggaacgcggccatcgcgctggcgctcatgcgatttccagaaccgccgcgccctgcaggactttcgcagccgccaggaacgcaccgcacccgccgcacccgccgaggacgcagtggctgccgcggccgccgcaccctccgagccctcggagccctccaggccatccccgcagcccaaaccccgcacgctcatgagccctccgcgggccatacgctggacgagtcggaccgaggctaggacgtggccggcgctctccaagccctgcagcaagaagaacttcccgtgcgcgccggatccctcgctccgttgcacgggcgccttaagttattggactatctaatatctatgtatttatttcgctggttctttgtagtcacatattttatagtcttaatatcttgtttttgcatcactgggcccatttgcaaataaatcacttggccagtttgcttttctaccatccggcttgtggcttcagtgagaactcctgctgggaagggtggaggcccaggaatggcggggcaggacaccctcatccagtcctgcggggctgggtgtgaaaggcgctgggaaccggctttgaatgaataaatgcatcgtgtcatctgcaaaaaaaaaa

SEQ ID NO: 113443 - DNA, 1684 bp, Homo sapiens
  misc_feature (1)...(1684): n = a,t,c or g
tcgacccacgcgtccgcgccgtagaaaggggcctggtgacgagtcccgcgttctctccttgaatccactcgccagaccgccgttctctggcgccgcaccctgcacacccgcccctctcctgtgccaagaacttgctactaccaccaccatgccctaccaatatccagcactgaccccggagcagaagaaggagctgtctgacagtcgatcaccgcatcgtggcacctggcaagggcatcctggctgcagatgagtccactgggagcattgccaagcggctgcagtgcattggcaccgagaacaccgaggagaaccggcgcttctaccgccagctgctgctgacagctgacgaccgcgtgaacccctgcattgggggtgtcatcctcttccatgagacactctaccagaaggcggatgatgggcggcccttcccccaagttatcaaatccaacggcggtgttgtgggcatcaaaggtagacaaggggcgtggtccccctgggcagggacaaatggcgagactaccacccaagggtttggatgggcttgtctgagcgcttgtgcccagtacaagaaggacggagctgacttcgccaagtggcgttgtgtgctgaagactggggaacacaccccctcagccctcggccttcatggaaaatggccatgttttggccccgtttgcccagtatctgccagcagaatggcattgtgcccatcgtggagcctgagatcctccctgatggggaccatgacttgaagcgctgccagtatgtgaccgaaataggtgctggctgctttctaacaaggctctgagtgaccaccacatctacctggaaggcaccttgctgaagcccaacatggtcaccccaggccatgcttgcactcagaagttttctcatgaggagattgccatggcgaccgtcacagcgctgcgccgcacagtgccccccgctgtcactggggtcaccttcctgtctggaggccagagtgaggaggaggcgtccatcaacctcaatgccattaacaagtgccccctgctgaagccctgggccctgaccttctcctacggccgagccctgcaggcctctgccctgaaggcctggggcgggaagaaggagaacctgaaggctgcgcaggaggagtatgtcaagcgagccctggccaacatgccttgcctgtcaaggaaagtacactccgagcggtcaggctggggctgctgccagcgagtccctcttcgtttctaacccacgcctattaagccggaggggctcccaaggctggccccaacacttcagggccctgggcccctcccactccttgaggaggagggccgccttccctcggggctccaggctgggcttggcccgcgcctctttcttccctcgtgacaggggggtgtggcgtcccctgggaatgctaaatccatcaccctttccggcacactgccaaataaacagctatttaagggggnnnnnnnnnnnnnnnnnnnnnnngggcgccccttcaagtttaaagggccccgttaaaccccgttgataaccctggaggggcctttttagtggccaccctttggtggttgccccctcccccggcctttctttgacctgggagggggcccccccccttgccttttcttaaaaaaaggagaaaatggcttcgctttgccggagagggggcctttttttt

SEQ ID NO: 113444 - DNA, 1368 bp, Homo sapiens
cgatttcgtgccgcggacaagctctcccgggcgcgggcgttggtcgtgtgcttggaggaagccgcggaacccccagcgtccgtccatggcgtggagccttgggagctggctgggtggctgcctgctggtgtcagcattgggaatggtaccacctcccgaaaatgtcagaatgaattctgttaatttcaagaacattctacagtgggagtctatttgcttttgccaaagttttacctgactttcacagctgagcacctaagttatgggatattccaagataaatgcatgaatactaccttgacggaatgtgatttctcaagtctttccaagtatggtgaccacaccttgagagtcagggctgaatttgcagatgagcattcagactgggtaaacatcaccttctgtcctgtggatgacaccattattggaccccctggaatgccaagaaaagtacttgctgattctttacatatgcgttttttagcccctataattgagaatgaatacgaaacttggactatgaagaatgtgtataactcatggacttataatgtgcaatactggaaaaacggtcctgatgaaaaggttcaaattactccccagcatgactttgaggtcctcagaaacctggagccatggacaacttattgtgttcaagttcgagggtttcttcctgatcggaacaaagctggggaatggagtgagcctgtctgtgagcaaacaacccatgacgaaacggtcccctcctggatggtggccgtcatcctcatggcctcggtcttcatggtctgcctggcactcctcggctgcttcgccttgctgtggtgcgtttacaagaagacaaagtacgccttctcccctaggaattctcttccacagcacctgaaagagtttttgggccatcctcatcataacacacttctgtttttctcctttccattgtcggatgagaatgatgtttttgacaagctaagtgtcattgcagaaaactctgagagcggcaagcagaatcctggtgacagctgcagcctcgggaccccgcctgggcaggggccccaaagctaggctctgagaaggaaacacactcggctgggcacagtgacgtactccatctcacatctgcctcagtgagggatcagggcagcaaacaagggccaagaccatctgagccagccccacatctagaactcccagaccctggacttagccaccagagagctacattttaaaggctgtcttggcaaaaatactccatttgggaactcactgccttataaaggctttcatgatgttttcagaagttggccactgagagtgtaattttcagccttttatatcactaaaataagatcatgttttaattgtgag

SEQ ID NO: 113445 - DNA, 731 bp, Homo sapiens
cgaaggggtagttctttcacctcggctgggcgcctagaaaagcctagaaacagctccttttttcttccgcctccgagtcttcgcgtcagcgtcctgcgcagggcccttggggcgaatcgcggtgcgcgtcggggcgaccgccctccctccctgggaggggcgagggggctagcggcgaccgctggggcgagcgcgcctgcgcgctgggtgattttttcacgtgtcgccagggccggactgcgagtctctttgcggcgctacactagagcagagtacgagtctgaggcggagggagtaatggcaggacaagcgtttagattgtttcttccactctttgaccgagtattggttgaaaggagtgctgctgaaactgtaaccaaaggaggcattatgcttccagaaaaatctcaaggaaaagtattgcaagcaacagtagtcgctgttggatcgggttctaaaggaaagggtggagagattcaaccagttagcgtgaaaggtgtacgataaagtccttttaccacaatatggaggcaccaaagtagttctatgatgacaaggattatttcctatttagagatggtgacattcttggaaagtacgtagactgaaataagtcactattgaaatggcatcaacatgatgctgcccattccactgaagttctgaaatctttcgtcatgtaaataatttccatatttctcttttataataaactaatgataactaatgac

SEQ ID NO: 113446 - DNA, 609 bp, Homo sapiens
gttcaggaaataagattgaaaaaagaagggaacggccggggcatggtggctcacatctgtactccaagcagtctttgggagcccgaggcgggcggatcctaggtcggggagttcgagaccagcccggccaaaatggtgaaattacgtctttactcgaaatagaaaacttgctgtttgcttgaaccgtggaggcagaggcagcagcagcagcgagccgagaaggcaccaaggagggagggaggggagagagacagagagagagagagagagagagaaagaaagaaagaaagaaagaaagaaaagaaagaaagaaagaaagaaagaaagaaagaaagaaagaaagaaagaaagaaaacgcaaggcaaaaccaaaaagcaaaaaaggaggaagcattactggctgacggcagcagtgactccctcttaaaagtcccgcggacgcaaactcgcagtggggctgaaaaaaatgtaggagggggagttccgcgtggtcccagctccaccgcgggccgaggccggtggaggtcgcgggcgcgtgaacgggaatcggcaccctcgcgtcggtgcgccgcagcgtccggcgaattccaccacactggacgaaaggacg

SEQ ID NO: 113447 - DNA, 387 bp, Homo sapiens
  misc_feature (1)...(387): n = a,t,c or g
actgtgaactcttaaaatcttcctgagccccatgagggctgttgnnnnnnnnnnnnnnnnnnnnnnnnnnnnnnnnnnnnnnnnnacacggcccacccaggtcacgcagaggtgaggccaggatgtcggcccaggctgcgtggccccagagccgccgactcccagtcatcatgccatcagcaaagcagggccaccgcccggggcggggtgtccataccttcagccggtcccggaagccgagggcctggtataccagctttcggagatggggctgggtggagtccgtgggcatcagagattgcagcacttcaccacagcctgggtgagggacacgccatgtgtgtcatataaaagaacaaaggtcttccctcgtatcccttagatctt

SEQ ID NO: 113448 - DNA, 1794 bp, Homo sapiens
  misc_feature (1)...(1794): n = a,t,c or g
gtaccaaacgctctgcgggatacctgtgcccgtctagccaagagtgcacccgtgtgcgcgagcgggcttctgggacgccgccgtggtcgggggcggccctgcgaggggagggggtcacagggactggccggcgccggccccgtgcgcacggaggcgggggcggggggcgggggccgcgaggggggaggcggtacgaaaagggcggcgcgcgcggcggcggcggcagctccccggcagcggcggtggagagcgcagcgcgcagcccggtgcagccctggctttcccctcgctgcgcgcccgcgccccctttcgcgtccgcaaccagaagcccagtgcggcgccaggagccggacccgcgcccgcaccgctcccgggaccgcgaccccggccgcccagagatgaccgcgaccgaagccctcctgcacagtcctcttgctcctgctggctttcggccacagcacctatggggctgaatgcttccccggcctgcaacccccaaaatggattctgcgaggatgacaatgtttgcaggtgccagcctggctggcatggtcccctttgtgaccagtgcgtgacctctcccggctgccttcacggactctgtggagaacccgggcagtgcatttgcaccgacggctgggacggggagctctgtgatagaagatgttcgggccttgctcctcggccccctgtgccaacaacgggacctgcgtgagctgggacgatggcctctatgaatgctcctgtgcccccgggtactcgggaaaggacttgccagaaaaaggacgggccctgtgtgatcaacggctccccctgccagcacggaggcacctgcgtggatgatgagggccgggcctcccatgcctcctgcctgtgcccccctggcttctcaggcaatttctgcgagatcgtggccaacagcttgcaaccccaacccatgcggagaacgacggcgtcttgcacttgacattggggggcgatttccgcttgccggttgcccagccggttttcattcggacaagacctgcagccgcccggtgaccaactgcgccagcagcccgtgccagaacgggggcacctgcctgcagcacacccagggccaaggccatctgcttcacccatccttggccgtgcttcaccaggcctggttgtgtctggncacttgtgggtattcggtcttcctcaaacaaagtgcgagacctggggtgtccaaacctgcgcttacaaccacatgctgcggaaagaagaagaacctgctgctttcagtacaacagctggggaggacctgggccgttcaacatcatcttccccgagaagatcgacatgacccacctttcagcaagggaggccggcgacgagggagatctaaggcagcgtttcccacagccccctctagattttttgggagtttcccgcagagcttacctatacgcggtctgttcctaatctttgtggtgttcgctatctcttgtgtcaaatctggtgaacgctacgcttacatatattgtctttgtgctgctgtgtgacaaacgcaatgcaaaaacaatcctctttctctctcttaatgcatgaatacagaataataataagaatttcatctttnnnnnnnnnnnnnnngggccccccgttttaagggatcaaattttacgtacccgggcatcgaactgaatactttttttatggggcccccaaaataaaatccccggcccgcggtttaaaaacgcggggaggggaaaaacctgggggacaccaatttaatggctgggggaaaaccccttttcccagctggggaaa

SEQ ID NO: 113449 - DNA, 1315 bp, Homo sapiens
acttggccacggtccttgacagtcacgctgcctgagcatcattcttgtaaatctggcctgagttctttttaaaaaacagcctccaccatgtgatgtcatggtccagccagggttggagaaggaaggaggaggagggtgtgtgcacacagtctggggatcttcctatttgtggaggaatcaatttggtcctagaagaaactctctatccttctctcctcctttccagacccagtaagaaattggtattctgatcaggaggactttggagttcacgtcaagcaggccattgactctctcccactggattctttgcaaaagcagcctcttgaccatagaggaggacaacaggttatccgtgcccatgatccaagagcttgagatcctgagatgaagactggcacatgaagtcgcacactgaaggttctaaaacccctccattctttctcccaaccgtggtcctgaagagctgtggcaccttcttccttctcccgactccagagggctggctcccgcttctcctccctggttttggctggcggactgacatcagctggtattcctccttgctgcacgatggcctcgctccgggtggagcgcgccggcggcccgcgtctccctaggacccgagtcgggcggccggcagccgtccgcctcctccttctgctgggcgctgtcctgaatccccacgaggccctggctcagcctcttcccaccacaggcacaccagggtcagaaggggggacggtgaagaactatgagacagctgtccaattttgctggaatcattataaggatcaaatggatcctatcgaaaaggattggtgcgactgggccatgattagcaggccttatagcaccctgcgagattgcctggagcactttgccagagttgtttgacctgggcttccccaatcccttggcagagaggatcatctttgagactcaccagatccactttgccaactgctccctgggtgcagcccaccttctctgaccccccaagaggatgtactcctgggccatgatcatagcccccatcttgcctcatccccttcctcatcactttttgttagtatgggagggagtaaagacagttgaggcccaggcttaggggggccacgagcttctcaacaaccatgttactccacttccccacccccaccaggcctccctcctcccctcctactcccttttcttcactcttatccccaccacagatccctgggatttgctgggaatgggagccagggttggggtcatgggcacaagttcttgtaatttttcaaaataaaactttttttttgtacaatgaaaa

SEQ ID NO: 113450 - DNA, 5760 bp, Homo sapiens
cggaggaggacgcgagccccttgcgggcggtcatcacagcccagcctcggggctgccacagcgcgttgcgcctgtgcgccctcggtccccgcgtccactgagcgccgcgctcggggatggggcccggccggccggcccccgcgccctggcctcgtcacctgctgcgctgcgtcctgctcctcgggtgcctgcacctcggccgtcccggcgcccctggggacgccgccctcccggaacccaacgtcttcctcatcttcagccatggactgcagggctgcctggaggcccagggcgggcaggtcagagtcaccccggcttgcaataccagcctccctgcccagcgctggaagtgggtctcccgaaaccggctattcaacctgggtaccatgcagtgcctgggcacaggctggccaggcaccaacaccacggcctccctgggcatgtatgagtgtgaccgggaagcactgaatcttcgctggcattgtcgtacactgggtgaccagctgtccttgctcctgggggcccgcaccagcaacatatccaagcctggcacccttgagcgtggtgaccagacccgcagtggccagtggcgcatctacggcagcgaggaggacctatgtgctctgccctaccacgaggtctacaccatccagggaaactcccacggaaagccgtgcaccatccccttcaaatatgacaaccagtggttccacggctgcaccagcacgggccgcgaggatggtcacctgtggtgtgccaccacccaggactacggcaaagacgagcgctggggcttctgccccatcaagagtaacgactgcgagaccttctgggacaaggaccagctgactgacagctgctaccagtttaacttccagtccacgctgtcgtggagggaggcctgggccagctgcgagcagcagggtgcggatctgctgagcatcacggagatccacgagcagacctacatcaacggcctcctcactgggtacagctccaccctgtggatcggcttgaatgacttggacacgagcggaggctggcagtggtcggacaactcgcccctcaagtacctcaactgggagagtgaccagccggacaaccccagtgaggagaactgtggagtgatccgcactgagtcctcgggcggctggcagaaccgtgactgcagcatcgcgctgccctatgtgtgcaagaagaagcccaacgccacggccgagcccacccctccagacaggtgggccaatgtgaaggtggagtgcgagccgagctggcagcccttccagggccactgctaccgcctgcaggccgagaagcgcagctggcaggagtccaagaaggcatgtctacggggcggtggcgacctggtcagcatccacagcatggcggagctggaattcatcaccaagcagatcaagcaagaggtggaggagctgtggatcggcctcaacgatttgaaactgcagatgaattttgagtggtctgacgggagccttgtgagcttcacccactggcacccctttgagcccaacaacttccgggacagtctggaggactgtgtcaccatctggggcccggaaggccgctggaacgacagtccctgtaaccagtccttgccatccatctgcaagaaggcaggccagctgagccagggggccgccgaggaggaccatggctgccggaagggttggacgtggcacagcccatcctgctactggctgggagaagaccaagtgacctacagtgaggcccggcgcctgtgcactgaccatggctctcagctggtcaccatcaccaacaggttcgagcaggccttcgtcagcagcctcatctacaactgggagggcgagtacttctggacggccctgcaggacctcaacagcaccggctccttcttctggctcagtggggatgaagtcatgtacacccactggaaccgggaccagcccgggtacagccgtgggggctgcgtggcgctggccactggcagcgccatggggctgtgggaggtgaagaactgtacctcgttccgggcccgctacatctgccggcagagcctgggcactccagtgacgccggagctgccggggccagatcccacgcccagcctcactggctcctgtccccagggctgggcctcggacaccaaactccggtattgctataaggtgttcagctcagagcggctgcaggacaagaagagctgggtccaggcccagggggcctgccaggagctgggggcccagctgctgagcctggccagctacgaggaggagcactttgtggccaacatgctcaacaagatcttcggtgaatcagaacccgagatccacgagcagcactggttctggatcggcctgaaccgtcgggatcccagagggggtcagagttggcgctggagcgacggcgtagggttctcttaccacaatttcgaccggagccggcacgacgacgacgacatccgaggctgtgcggtgctggacctggcctccctgcagtgggtggccatgcagtgcgacacacagctggactggatctgcaagatccccagaggtacggacgtgcgggagcccgacgacagccctcaaggccgacgggaatggctgcgcttccaggaggccgagtacaagttctttgagcaccactccacgtgggcgcaggcgcagcgcatctgcacgtggttccaggccgagctgacctccgtgcacagccaggcagagctagacttcctgagccacaacttgcagaagttctcccgggcccaggagcagcactggtggatcggcctgcacacctctgagagcgatgggcgcttcagatggacagatggttccattataaacttcatctcctgggcaccaggcaaacctcggcctgtcggcaaggacaagaagtgcgtgtacatgacagccagccgagaggactggggggaccagaggtgcctgacagccttgccctacatctgcaagcgcagcaacgtcaccaaagaaacgcagcccccagacctgccaactacagccctggggggctgcccctctgactggatccagttcctcaacaagtgttttcaggtccagggcccggaaccccaaagccggttgaagtggtcagaggcacagttctcctgtgaacagcaagaggcccagctggtcaccatcacaaaccccttagagcaagcattcatcacagccagcctgcccaatgtgacctttgacctttggattggcctccatgcctcgcagagggacttccagtgggtggagcaggagcctttgatgtatgccaactgggcaacctggggaggcctcgtggccctagccctgctcccagtggcaacaaaccgaccagctgtgcgttcggtcctgcacagcccctcagcccacttcactggccgctgggacgatcggagctgcacggaggagacccatggcttcatctgccagaagggcacggacccctccctgagcccgtccccagcagcgctgccccccgccccgggcactgagctctcctacctcaacggcaccttccggctgcttcagaagccgctgcgctggcacgatgccctcctgctgtgtgagagccacaatgccaagcctggcctacgtgcccgacccctacacccaggccttcctcacgcaggctgcccgagggctgcgcacgccgctctggattgggctggctggcgaggaagggctctcggcggtactcctgggtctcagaggagccgctgaactacgtgggctggcaggacggggagccgcagcagccggggggctgtacctacgtagatgtggacggggcctggcgcaccaccagctgtgacaccaagctgcagggggctgtgtgtggggttagcagtgggccccctcctccccgaagaataagctaccatggcagctgtccccagggactggcagactccgcgcggattccctttttggagtcactgctattctttccacatggagctgctgctgggccacaaggaggcgcgacagcgctgccagagagcgggtggggccgacctgtctatcctggatgagatggagaatgtgtttgtctgggagcacctgcagagctatgagggccatagtcggggcgcctggctgggcatgaacttcaaccccaaaggaggcactctggtctggcaggacaacacagctgtgaactactccaactgggggcccccgggcttgggccccagcatgctgagccacaacagctgctactggattcagagcaacagcgggctatggcgccccggcgcttgcaccaacatcaccatgggtgtcgtcttgcaagcttcctcgtgctgagcagagcagcttctccccatcagcgcttccagagaacccagcggccctggtggtggtgctgatggcggtgctgctgctcctggccttgctgaccgcagccctcatcctttaccggaggcgccagagcatcgagcgcggggcctttgaaggtgcccgctacaggccgcagcagctccagccccaccgatgtcactgagaagaacatcctggtgtcagacatggaaatgaatgagcaacaagaatagagccaggcgcgtgggcagggccagggcgggaggagctggggagctggggccctgggtcagtctggccccccaccagctgcctgtccagttggcctatggaagggtgcccttgggagtcgctgttgggagccggagctgggcagagcctgggctggtggggtgccactcctcccacaagggctgggctgagacccagctgagtgcagcgtggcgtttccctttctgggggggcctgaggtcttgtcacctggtcctgtgcccccacaggaaccagaggtaggatgggagggggaacgagagcctctttctccccagagcccccggccccaggcctgtttcatccgcgccccaggacccccttctttgcagagcccgaggagcctcccctgtcccctcggggcagatctgttgtgtctctcttcccacctggcagcctcagctctgtgcccctcaccctgctccctctcgccccttctctcccacccttcctttctgagccggggccctggggattggggatctcctcttgttcctgatgagggtcagctgagggggctgagcatccatcactcctgtgcctgctggggtggctgtggggcgtggcaggaggggcctaggtgggttgggcctgagaaccagggcacgggtgtggtgtctgctgggctggagataagactggggagagacacccccaacctcccaagggtgggagcttgggccgggctgggatgtcatctccttgccggggcggggggaggcttcttccccctggaagagtcccctgtggggacccaaaattaagttcccttaacatctcccagttccttggctctggtttggagcaaggggaagggttgcccagagtccctgggggccccccaaaggagcaggagtctgggagggccccagagtttcaccctctagtggatcccaggaggagcagcaccccgagcccctggagtggccccagtacccttcccaagaggcccacagtcccagcccaggacaaagtatgcggcccatccctggtgcgacagcgtgggacaatgtgaacatggactcgaagacattgccctttctccgtaagtgaatttttaaaatgtcccattattgtttttaaaaaaaaaaggaaaaaagaaaagcaaacaaataaaacacctttaagaggcttgaaagagaaggttaaaaaaaaaaaa

SEQ ID NO: 113451 - DNA, 374 bp, Homo sapiens
  misc_feature (1)...(374): n = a,t,c or g
nnnnnnnnnnnnnnnnnnnnnnnnnnnnnnnnnnnnnnnnnnnnnnnnnnnnnnnnnnnnnnnnnnnnnnnnnnnnnnnnnnnnnnnnnnnnnnnnnnnnnnnnnnnnnnnnnnnnnnnnnnnnnnnnnnnnnnnnnnnnnnnnnnnnnnnctatgaacaatcgtacaccaacaaattagacaatctagaaggaatgagcaaactcctagatatacagagattaccaaaactgactcagaagaaaaagaaaatctcagacctctaacaagtaaagagattgaatcatagtcaaaattctcccaggaacagatggcttcactggtcagttctaatgaacacttagacaagaattaacagcactacttctcacatt

SEQ ID NO: 113452 - DNA, 727 bp, Homo sapiens
  misc_feature (1)...(727): n = a,t,c or g
cccacgcgtccgcggacgcgtgggcggcgaacgcggaagagcaccgccatgaaaggcctcggggcacgactacgagagtacaaggtatgtgggtcgctgcctgcccacccccaaaatgccacacgccgccccttttaccggcatgcgaaatctttgcgccttaatcatgtcgtcgccaagtcccgcttcttggtactttgtatctcagttaaagaagatgaagaaagtcttcaggggagattgtctacttgtggggcaggtgttttgagaaagtccccccctgcggggtgaaggaactttcggggatctgggcttgcggctattgactccccgggagcgggcaccccacaacattgttaccggggaatacccggggaccttgacccaccgcaggcggctgttcaacccagttgctacccgaagacaatggggttgccccgggcaccggcgccccgaaggccccatttccatttcagattcattgaaaggttggaagggagatttgcgggccagcaaagttgcccgccggcccggcttgttcaaagcagtttccacgaattccaagatcaaagtttcccgctggccccaccgggttccttgcggccttcaggaacaagccacggtttcancaccaaggaggcccaacaccttcttctaggtgcagggcccctcgtccggggtgtgcccccaaaataaaactcaggaaacgcccccggtaaaaaaaaaa

SEQ ID NO: 113453 - DNA, 3378 bp, Homo sapiens
  misc_feature (1)...(3378): n = a,t,c or g
cccacgcgtccgaaggtcttacattttatgtgtttttttaaattctgcactttgacagtggtagcaaaataaaagtaatccaaaagttatttttctattgagaagagagaagaggggggttttattttttttccttttgattccaatcttttctcccagtgacaaagcataaatcatggacaccagagaataaggtggacctcaggaatccggaaaagactgagaagcttacattcttcctctagagggaagagtggggtgtttatagccatctctggaacctaaaacaaaaaacatgagttgtgtgccatggaaaggagacaaggccaaatctgaatcattggagctgccccaggcaganatcccccacaaatctaccatgagaaacagcgcagggagctttggtgccctccacgccctcaataacgtcttccaggacagcaatgccttcacccgggatacgctggaagagattttccagaggttgtctccaaacaccatggtgacacctcacaagaagagcatgctgggaaatgccaactacggtgtgaatgtcatcatggcagcacttcagacccaaagtctatgaagctgttttggtgggacaagcgcagggatgtcggtgtcattgccctcactaacgtcatgggcttcatcatgaatctgccctccagcctatgttgggggtccactgaaactgcccctcaaaaggcagcactggatctgtgttcgagaggtgggaggggcctactacaacttggactccaaactcaagatgcccgagtggattggaggcgagagcgagctcaggaagtttctaaaacatcatttgcgaggaaagaactgtgaactcctgctggtggtaccagaagaggtagaggctcatcagagttggaggaccgatgtgtaacagttctgcccaacctccctctcgcctcagccccttcagtcctctgtgacgtgctgtggcctctacagtgggtctgcccttgccacttccccaaacatctcatcaagtttttccccttcagatctgacagtgcaataggacagacgtgtggactgttataagaactactcagtgttttgttcctggggcaaggaaggtaggagttctgtgcacttaaggccagtggtcacaaacccttgttttatttaagagacagaggagaaagtggagcggggagggaatcctagcttattttcccttttctatgaggacttgacacagggtctggctgagttgtcactgctgctccagactcacctagagatgctgcctccactttccatcctgtctgggtctgaaaacagtgggtctgcagatagtgcccacaaaccccatgtgactggtttgaaggacccagagcataaaggtctctcaggaaaccatgtccaaaaccctagcagcggtacagcatgctgtctccaacccttatccccaggtttaagggtggtttatggccatacgtggaggttttttgttgttgtttttgagactgagtttcactcttgttgcccaggctggagtgcaatggcaccatctcggctcactgcaacctccaccatcctggttcaagcgattctcaggcctcagcttcccaagtagttgggattacaggcgcctgccaccacacctggctaattttgtatttttagtagagatggggtttctccatgttggtcaggctggtctcaaactcccgacctcaagtgatctgcccgccttggcctcccaaagtgctgggattacaggcgtgagccaccgcacccggcagagttttataatgaaaaattaactaatattctagtatgaagtgaggaggatactgaacaggatgtggctaaagccaagcctgggacagccatgggggtggcttggtttcttcactccagtgttgtccctaccatttcgcagcattgatttaggaggctctgggacaaaagagaagccaaagagcagttttcccagttcacttcactctgggcaaaattcagggaaaaaaaagtctgctttttgacatcaaatttccactaattttgggggcagcgttggggtgaggaaaagtattttgaaggacaggctttcttgggagtagggggcagccacaatttcagtagacactctaggctccggaggcttgccactgtaagtttgccaagcttcaggttgggtggttctgtggctgtatgggatgggaataggacctggggctggtcatcttcatgtcgtttcctctctgtatcaatgggaagttcaacccgcccctacctctttcagatagttgtaggccacttttctcttgttaactttgggaaaacaaaagagggagaattaagtatcataccatatgcgtgtctccaaagtggatgtggttgcctcaaggaaggtggcaggcaggggtgacctgctggccctcagatcaatggtccgtggcaggtctgaagagctgtcccactggccagacttctctccagcagcaaagccaagcctggggcttgcattgttgatcctgagcaagcttaacggggtgaagctgggctttctcccccctgttgactggagttgcatgttgacaccagcactttttctgcacaatgtatcttcaatccaacaagggccgttttttgtaatgcttgagtaacagggccacccaaggcggctacttgcgtttattatctttcttcaggcaactgggcccgcagtctctttcttgcaccattttcttacaaccagacctggtttggccacccacaggggagctctttttccttgccctggcacaatggacatttccaaccaccaccaggccaggacatttacagccaaaccttggctggattgttcacaaggcagggaccttgggggccactggccactgtccagatagtaagcccattttnttggggtaggagggaggaaantccctctccgacaaatcccacttgggccctgtgcaaaatggccacttgaaaagagtccccatgcaacttggagtcccatgagcccaatgggatatgcaaagacgccttaaaccatttccaggggctgggtttctcttgttcatatccaaatctggtgccttaggaacagggaccccatgctgatgcccaagggcaaaaaagcccccctttcctttaaggaagtgaacaggcctgaccctgattgcccaataacgggcaaccctaaggctttttgtttttcttgcttttattcctttttgttgttggccttgtgctgcgtttgtttatttataagatgtattttgtttaaccaaatattaaaaatggaaaactccatatatgtctccttgtctgcctgaattctataattgtgtaaagaaaaataaactttaagtatgacgctgttttaaaagg

SEQ ID NO: 113454 - DNA, 409 bp, Homo sapiens
  misc_feature (1)...(409): n = a,t,c or g
cccatggtgctgtctcctgccgacaagaccaacgtcaaggccggctggggtaatgtcggcgcgcacgctggcgagtatggtgcggaggccctggagaggatgttgctgtccttccccaccaccaagacctacttcccgcactttgacctgagccacggctctgcccaggttaagggccacggcaagaaggtggtcgacgcgctgaccaacgccgtggcgcacgtggacgacatgcccaacgcgctgtccggcctgagcgacctgcacgcgcacaagctttgggtggacccggtcaacttcaagctcctaagccactgcctgctggtgaccctggccgtccacctccccgccgagattacccctgcggtgcacgcctccctggacaaggttcctggcttctgtgagcacn

SEQ ID NO: 113455 - DNA, 434 bp, Homo sapiens
  misc_feature (1)...(434): n = a,t,c or g
ccaccgtgcacaactgtgcacagtggcccagtctatgtgtgtttctctatttcccacctccttccccaccctacccccagtgtcccctccagtgtcctgctctggatttaccatacccctccccatcttcaactctgtgtttcctgcccacttgtgtctgaatccccacccaagttgccctcaccccccttctctgtgccacttcagcctgggctggtgcacaccagcccagcatcctctcccatgccaccaagcatggtggacagagcccctgcctgggacatggggaatctttttttccttggggtggaagggagtgcccctcaccccttccccgtgccattgcacagagagccaagatctgaacatgcccctgagatactcttcccacggagctatgagtgagtctcgaatnnnnnatcggtccggcgctc

SEQ ID NO: 113456 - DNA, 1557 bp, Homo sapiens
ggcgggtgcgcttgctagggaaagaagctaaagcacttccagagcctgtccggagctcagaggttcggaagacttatcgaccatggtgagtgcagggtcttggggtcgaacgcgtgccactcgggagccacaggggttggatggggcctcctagacctctgctctctccccaggagcgcgcgtccctgctttgttgctgctgctgctgccgctggatgcacgtctctgcgaccacgccagaacctcgtgatgctggacgatgaagatttccgctgcgtcttgcaactttctcccgaacctcagcccgactggtccgaagccttccagtgtgtttctgcaggtagaggtggagatccatgccgggcggtctcaacctaggagccgtttcttaaagcgcgtcgatgcggacgccgacccgcggcagtatgcttgacacggtcaagggttttccgcgttgcggcgggcttcacaagtgggagccgcacaggttcctgcttcagctactggtaggcgccctgcgtggtgctagcgtaattcccgcttcaaggaactgacgctcgaggacctaaaagataaccgggcaccatgcctccgctgcctctggaagccacaggacttgcactttccaagcttgcgcctacgcaacgtgtcgtggggcgacagggcgttcttggcttcgccgagctggcagcagtggctcaagccagggcctcaaggtactgagcattgcccaagcacactcgcctgccttttcctgcgaacaggttcgctgctttcccggccccttaccagccctagacctgtctggacaaatcctggaactggggcgaaagcggacttgatgggggctctctgtcccccacaagttcccggcccatccagaaatctagcgctgcgcaacacagggaatgggaagtacccacagggcgtgtgcgccgcactggcggccggcaggtgtgcagccccacagcctagacctcggccaacaaatcgctgcgcgaccacgataaaccctagcggctccgagcatgcatgtggtccaacgcccctgaactcccctcaaatctgtcgtttcgctggggctggaacaggggtgcctaaaggacctgccccagccaagctccagagtgcttcgatcttcagcttgcaacagacttgaacaggggcgcccgcagccttggacgagcttgcccgaaggtggataaccttggacaactggacgggaatccctttcctgggtcccctggaactggcccctcccccacggagggctcaatgaaactccgggcgtggttcccaagcctgtgcaacgttcgacccctgtcggttgggggtgtcgggaaaccctggtgctgctccaagggggcccgggggctttgcctaagatccaaggggcccggggctttgcctaagatcctaagatccaagacagaataatgaatggactcaaactgccttggcttcaggggagtcccgtcaggacgttgaggacttttcgaccaattcaaccctttgccccacctttattaaaatcttaaaacaacgaaaaaaaaaaaa

SEQ ID NO: 113457 - DNA, 537 bp, Homo sapiens
tttttttgtagagacggggctcttgctgtttcccaggctggtctcgaatttctgggctcaagcaatcctctagccttggcctcccacttcattagtcactaggattacaggcgtgagtcaccttgcctggtcttaaaatgtttggttttttaaaattaccccactactggtggataagaaagtgtatgtaacaggtaggtaagatggtgaatgaatatttgaccttaggacagcaaactggcatggcagctgtacagatgaccctggcatttaatccccaggtgtgtttgagcccaccatctgggaagccattcctggaaaacaaacacgattttctcttaccttttgttttccattttccaactgtggaggtttgtattttcagttttagggaaaatactcaagttgggccgggtgcagtggctcacacttgtaatcccagcactttgggaggccgaggtgggcggatcatgaggtcaggagtttgagaccaacctgtccagcatggtgaaaccccgtctctagtaaaaatacaaa

SEQ ID NO: 113458 - DNA, 1369 bp, Homo sapiens
cccacgcgtccgcgctcgcctccgggatctcgtgagatcacggccacttccgggagtcggaaaggaaagctgtgggaccatcctggcaaccccggtgtttggctgggttctagcgtagccgtctgtgttggccggtgggggacctgcgatcggagtgggagggccagtctgcacccaagaggtggaaggaggcgggcttttaggctgggaagcgccttagaggagccatttttccagcaggatgcctggtttgcttttatgtgaaccgacagagctttacaacatcctgaatcaggccacaaaactctccagattaacagaccccaactatctctgtttattggatgtccgttccaaaatgggagtatgacgaaagccatgtgatcactgcccttcgagtgaagaagaaaaataatgaatatcttctcccggagtctgtggacctgggagtgtgtgaagtactgcgtggtggtatgataacagacagcaggtccctggagatactcttaaaagatgatgattatgattcacactctgatggtgatggcaaagatattgggcctcaagcagccattgagtatggcaggatcctgacccgcctcacccaccaccccgtctacatcctgaaagggggctatgagcgcttctcaggcacgtaccactttctccggacccagaagatcatccggatgcctcaggaactgggatgcatttcagccataccccattgaaattgtgccagggaaggtcttcgttggcaatttcagtcaagcctgtgaccccaagattcagaaggacttgaaaatcaaagcccatgtcaatgtctccatggatacagggcccttttttgccaggcgatgctgacaagcttctgcaacatccggatagaaagattccccggaagccccagatttcttccctttcttacgccacatgtgtcacttcaattgaaattcaccatcaaccttggctctgtcattctgatcttttccacccccagggtatcagcccgaagttgtgccggcccatcatagccctccctcatggcataggtaacgaggcaggaccttgcagagggtcctggggcctatgttcaaggaagttgcaaaaacaacatgttgttcccaaattcggggggatttgggtgaggccagctgctgggaatggggaggaaggacttttccttgggaggatttccattcacaaacattcatggggatcccgttcttactgatcttctccgaggcccaccgaagggtactgaagagcctcacctgggggcattttgtgggtggagggccagagtgtgtatacccaggcttgtccggaaggagaaggcctttgctgcctgaaagtcgcaaaaaaaaaa

SEQ ID NO: 113459 - DNA, 467 bp, Homo sapiens
cagtcacgggccagcctttcccttaaggatgtctgagagctggtctcctcactcttttcttccgcctattaaactttccgcttcttaactcacccatgtgtgtccatgtcgttaatcatcttgacgagagatgatgaaccccggatatttaccccagacagtgatgccgcttcaccagcattgcactctacttccccgcttcctgatcctgcctcagcttctcctctccacagagaaggaaaaaaattctgcctaaagtctggcaacattcgttttcctgcctgagttttcaggcctgccagcttctcctacggattctgggacttgccagccccacaatcataaccagagaggggcagcaattttgggcaaaatgtctgatttggaaataccaactttacctccatgggctccacaagaaatcagatgggagaagggacaagcagataagcgcaagcccatcaacc

SEQ ID NO: 113460 - DNA, 730 bp, Homo sapiens
tttcagattcaaatgtttttaatatatgtaaagcatttaacacaatacctgaaaaaagaactcaataaatgttaattcctttactttctcttacgtctcatctatccataaaacagtgtcttccaagaatatttcagtaaaaatacaacagaactcattcttactttcctttgaaaaattaaattttcatctctttgatctttaaaaaggagggaaaaataacttgtgtactgctttcaaaatattacaaatgcaaaagctagttaagacaaaaacaatgtcgagaatgagccttgctggtggcaaccgctctgtagttccagctagtagggagaatggccttgaggccaggtagttccagatcagcccgggaaacaaagcaagactccatctcttaagaaaaaaaaaaacaaaacaggaggggggaaatcacttcatctactaatagagatttttaagcaaccgtttatttaagaaaaaagggtgaaattcaagttaatattacttgacagtacgtttcagaaaaaaaaaatactctgcagagctgggtgtggttgcccaagactagtcccagctacttgggaagctgaggcaagaggacagtttgagctcaggagttggagtacagcctgggcaatatagcgagaccccatctctttaaaatacaaacaaaaactcggcaatcgtttgttctgagttgaaaccttaaaaatcaaatattttgaacgct

SEQ ID NO: 113461 - DNA, 583 bp, Homo sapiens
gggaattattgctaattttttgggtgatgatggtatttgtggttatgtttaagaaaaagtccttagagtcttttagagctacctagtgaactacttacagatgaaatgatatctgcaacttgctttaaaagaatgtagtttctgagggaggggttgaatggataggtgtagaggaaacaagatgggggtatgaattcatgttattggagctggtagtggctacactggggttcaattttagatgcaaatcacaaaatgggcacgaaaccaggggagtttagctctctagacactgcacaaataccttacttgcctatccaagttctttttttgtttttgtttcttgagatggagtctcactctgttgcttcaggctggagtgcaagtggtgtgatctccagctcactgcaaacctccacctcctgggttcaaagcgattctcctgcttcagactcccgagtagctgggactacaggtgtgtgccatcatgcccagataattttttgtatttttttagtagaatacggggtttcgtcatgttggccagggtggtctagaactcctgacctcaagtgatctctag

SEQ ID NO: 113462 - DNA, 897 bp, Homo sapiens
caccgtgggcctttgactgagctgcagggagggagagagatggacccagtcagccagaagggttgaccatggcacttggtcctgtctgtgaacttgcaggtgtggaaaataaggttcagtgaggcgatggatgcatcgcatgaacggagtctcactctgttgcccaggctggagttcaatggtgcaatgatctcggctcactgcaacctccgcctcttgggtgcaagtaactctcctgcctcagcctcccgagtagctgggattacagcaatggtgaaaggcagtttccctcgcaatgagagcatccagaacaggcatgccccgggacccagctgtgggaacccctgagagacagacatgaagcactttcgcttgggaaatgctttctttagtctttcaatttaacattcaaagggatgaggggatttttattcaacagcagccagctgcaatggcaaagtcatgctttctagtctcagttcaaatggacatttcccttattttagccgtgcatatcacagtctccattttcaagccaattctggtttaaaaggtgaccctgctcttaaaaatcattaaataataagtggtctcactctaatttttcagcttctctctgactttacaactcattaaaaggaaggttctgcctgccgcccgtgagcttctaaagaataaagtggaataaaatttgccttctctttggggaggtcgtctttggtgttataacatgcacacatgaagcttcaaccgttagaaaggttttcaatgctttccgcagaggcgcaaggtagaaaccttgtggcctaccattaaataataacaaaagccgccacaaaacatcagggactgccatgggcttagtcacttacgttacaaaatgttcctctgttccag

SEQ ID NO: 113463 - DNA, 426 bp, Homo sapiens
  misc_feature (1)...(426): n = a,t,c or g
tcagactgaccgcggggcagcatgcggacatgttcagaccccggcccggagaggctcatgcgggatttcaagcggttacaagaggacccacctgtngtgctcnagtggcgcaccatctgaaaacaacatcatgcagtggaatgcagttatatttggtctctgctggatgaacccgaatcctaacagtccagccaatagccaggcagcacagctttatcaggaaaacaaacgagaatatgagaaaagagtttcggccattgttgaacaaagctggaatgattcataaatagacaactggtcctgttaaatctntttcatccattgttgtgtataatttaccnccccattntgaaaaggctaacaaaatttttaagtggcccaaggtttttaaagntttcttnccganaaaaaaaggaaaaagtnctt

SEQ ID NO: 113464 - DNA, 2102 bp, Homo sapiens
cacgcgtccgggaccaggaccatcacactggggaccggcttctctgctctcccgttatgggggtcgggggaatgatgggtcaagggtcttccgaagaaagcgagaaaggaacaggcgccttcaaaagcccacttggcgatgggttacagtaagagcgttgctccctgcttggctgagcactgcggagtttcacgcctctaaaccccgcctcttcttgcaacctgtgttggcctcatctacccagcaactgtcgacgtcacacgacctgggcctccctgaatgggagatatttactaggcaatcccgcctcactgttctgaggtttcccctccaggtgcagcttcagagccaggcgagccaggaaggaccagcgggcgaggtggtgagttgctgaggcgcgcccagtccctctgttcccgcctggcacttgctctggccgcgcccgccccatctgccacttcggagaggccacggctctgagctgcggccgctagtgccctgatgggccctgtggctggggtcttgcacattcttgggggtgggcctaaggggataggggaagtggaaggggcctcataggaattaaaaagcttaagggaaaaggtgatgcagttagggggtaaaacattgaggatgataaaagaggagacatccgcagctgaaaagtgcgctgcaaaaggcagtgggccgtttggtgtgccggaaacataagaaaccacagtacaaaacaccaattttatttataaatatcaagaacctacagggtgtttaatgggccccagcatatgcccttccagttatgttgaaaatagcctgatcatctttcccgtacattctgaacatttctcagtttccagagtgctggccacaccaaaagcatcaagccctggctcttaaactccggttacagtaaggaattacaaaatcctgtgtttgtactcccaggaaagtctgcattaatcaccgagggagcttgggaaagggagggtaaccacacctcaaagggcaaaattttcaaagtaacctcaatccctgggagggcaggctgcctaactctggcagactgtgggttctcgcgaccactagaagagcaagcaaaaagggaggtgagaatggagtgcggcaggttcttgaggaagggcttttcatttctgggaggcatcttgcagggagccttgcaccaatggccccagtagcaacccttttttcttccatgagcttgctgggtgggttcccccctcccggataagcgcctccttccaggaagatggatgtggtgcaacctggctcaaccagggctgaagttgcttgggtgaatgagaagcacctgagcgggagtatccgctccaaggcttttcgtacaggagctgctccacctgaggaaagacatcggaccgtcagagccggggactaccctcagcccagggagacacctgtgtattccagggctgggactgacctcacaggatcactgctggctctgctaacaaccccaaggacaccaacgtttcccattctgagtacttctccgcaaaccctttgtttcattaagggctgttttacatgaagggtgcaaaagtaggataaaaatgaggaaccctagggtgaaacacgtgacagaagaataaagactattgaatagtcctcttctctacccatgactttggccatttttatattcgattttaaggaaatataacttagtagtaaagagatgagcattcaagtcaggcagacctgaatttgggtcaaggctgcgccactcaaaagctatatgacctctatatgagcagcttattcaacctcttttaacctccattttgtcatctgtagaatgatgataaatgcctagctcaaaaggattcctaatgaataaatgagtgacagtgcatgtaaacagactagcttaattaatattaatatgattagaatgggctgggcccggtggctcatgcctataatcctagcactttgggaggtcaaggagggaggatcacttgggcccaggagttcaaggccagcctgggcaacattagcgggacgctgtctgtacaaaaaatattttttttaaataaacgatattatgaggaaaaaaaaaaaaa

SEQ ID NO: 113465 - DNA, 423 bp, Homo sapiens
atttaaaataaaacaaagaacagtttactttcaggcaaaaagatgccagtaatcaatattgaggacctgacagaaaaggacaaattgaagatggaagttgaccagctcaagaaagaagtgacactggaaagaatgctagtttccaaatgttgtgaagaagtaagagattacgttgaagaacgatctggcgaggatccactggtaaagggcatcccagaggacaaaaatcccttcaaggagctcccaaggaggctgtgtgatttcataatacaaacaaaaagaaaaaaaattaaacaaattcttggaaatatctcaaatgttaataacaatatgaatttttctcatgcatactattactactaagcatgtacgtgaatttttaaatttatagatgtaaacttttaataaaaattggggtgtggt

SEQ ID NO: 113466 - DNA, 2543 bp, Homo sapiens
ccacgcgtccggagctggaggaggcggcgggcgcgagacccggaatgcgcagggcccccgcctcgccccccccagcccgggccgcggcccccgccttccccgcagtcgtcccgcactcggtgcccgccccccgaggccggcggctgctcccactcggggccgttgctgcttgtgccgtgagcgccgcccagccattgtccccgtcgctccgtcagccgcgccggaccgcgcaccaggaggcgagagcgcgcatggggagcctctgttgatgccgccgccgcgccgccctccgaggctgcgtcccgggaagcccggctccccgagcgctccggcctggcccggtgccccggacctgagtgcgtccccatggaggcgcccgggctggcccaggcggccgcggcggagagcgactcccgcaaggtggcggaggagacccccgacggggcgcccgcgctctgccccagccctgaggcgctgtcgccggagccgcctgcgtacagcctgcaggactttgacacgctggccaccgtgggcactgggacgttcgggcgggtgcacctggtgaaggagaagacagccaagcatttcttcgccctcaaggtgatgagcattcccgacgtcatccgcctaaagcaggagcaacacgtacacaatgagaagtctgtcctgaaggaagtcagccacccgttcctcatcaggctgttctggacgtggcatgacgagcgcttcctctacatgctcatggagtacgtgccgggcggcgagctcttcagctacctgcgcaaccgggggcgcttctccagcaccacggggctcttctactctgcagagatcatctgtgccatcgagtacctgcactccaaagagatcgtctacagggacttgaagccagagaacatcctgctggatagggatggccacattaagctcacggactttgggttcgccaagaagctggtagacaggacttggaccctctgtggaacacccgagtacctagcccccgaagtcattcagagcaagggccacggaagggccgtggactggtgggccctcgggcatcctgatattcaagatgctttcggggtttcctcccgttttttgatgacaaccccgtttggcatttatcagaaaattcttgcaggcaaaaatagatttccccagacatttggatttcccatgtaaaagaccctcattaagaaactgctcgtggttgacagaacaaggcgattaggaaacatgaagaacggggcgaatgatgtgaagcatcatcggtggttccgctccgtggactgggaagctgttccgcagagaaaactgaagcctcccatcgtgcccaagatagctggtgacggcgacacttccaacttcgaaacttacacctgagaatgactgggacacagccgcgcccgtgccgcagaaggatttagaaatcttcaagaatttctgaggacaggagctcacatctggaagaaacaggaagattggaatctgcctggaacaaagaactgcacctaagcagaccagaagcaaaatgtcttcttcacggcataaggacatctccacttttctctgtacctgtgtgtatagaaatagattagagcacagttgaaattcatggaactggcattatttaagcaactggaattccacactgtaggaaggttttgaaaattgtttggttgtagattttatcttatcctttagtgttgtgttcctactgtgatgtcttggtttttgtcatagacttaagtttataagtttgaactggacttgttcgattataaccacaaattgtgtgtgtgtgtgtgtgtgtgtgtgtgtgtgtgtgtgtgtgtgtgtatgcctgtgtgtatatatagaagtcattatggcagatgcacagaaattgtgcagtgatgtaaatgttcatactttacagagcctataatttttatttttcaatttgttttttcaaaaatctcttctcggggacaacatctgaagggtatgttgcatgcattaaaaaaaatcatctcacatgcattttatagttttggggaagaaaaatatcatggggaggtctaccttcagtatctttagtgcttcttacctgggtaacttgagactttaaaagaagaaacaaagaggggaaggatatggggagcgaatttattcccaagaatcctacaatgacattgaagttgttggaggaatgtactgtatttaaaaaaaccttctgtgacacattcaaaaaatttcatctaaagctgggcgcagtggcttgttcctgtagtcccagcacttcaggaggctgaggtgggtggattgcttgagcccaggagttggagaccagtctgggaaacatggtgagatgtcatctctctacaaaatacaaaaaaattagccgggcatggtggcacgtgagttaggtctcagctactcaggaggctgagatgagaggatcacttgagcctggggaggtccaggccgcagtgatccgagatcacaccactgcattccagcctgggtgacagagtgagaccctgtccaaaaaaaaaaaa

SEQ ID NO: 113467 - DNA, 1592 bp, Homo sapiens
  misc_feature (1)...(1592): n = a,t,c or g
tcctgccccaccaccgctgctcctcagcaggcgcctcaccagcctccacaccccttgcgcccgcagaaacgcgcctggccctgagctgtcaccaccgacactctccaggctccgttcacgaagcattctcatcaagtgtgtggaggtgggagatggggccgtgggcaagacctgccttctcatcaactacaccaccaacgcgtttcccggagagtacatccccaccgcggttgacaactattcatccaatgtgatgggggacagcaagccagtgaacctggggctgtgggacactggctgggcaggaggactacgaacggtttcgggccggtctcctatccacagacggacgtcttcctcatctgcttctccctcgtcagcccagcctcttatgagaacgtccgcgccaagtggttccccagaagtgcggtaccactgccccagcacacccatcattctggtggggcaccaagctggacctgcgggacgacaaggacaccatcgagaaacttgaaggagaagaagctgggctcccatcaccttaccctcaggcccttggcacttggccaagaagattgactcggttgaattacctggagtgctcagttctcaccctatgatgaggtcctgaaaacccgtgttcgacgaggccatccgggccgtgctgtgccctcagcccacgcggcagcagaagcgcgcctgcagcctcctctaggggttgcaccccagcgctcccacctagatgggtctgatcctccaggatccccacccaaagcctgatggcaccccggctggccatgctgtcccctccctgtggcgtttcttagcagatggctgcagagcttcgttgatggtcttttctgtactggaggcctcctgaggccaggaacgtgcaaatttgcaggtgctgcatcccaagcccctcatgctcctgccttcctgagggcccagaggggagccccaggacccattaaggccaccccccgtgttcctgccggtcagtgccaaactgcccgcatgtggaagcatctacccgttcactcccagtcccaccccacgcctgactccccttctggaaaactgcaggcccagatggttgctgcccacaacttgtgtacccttcagggatggggctccttactcccctccctgaggcccagctgctcttaatatcggatggtcgctgcttgcccagagagttcctctacccagcaaaaatgagtgtctcagaagtgtgctcctctgggcctcagttctcctcttttggaacaacataaaacaaatttaattttcctacgccctcttggggatatctgctcagccaatggaaaatttgggttcaaccagcccctgccatttcttaagactttctgctccactcacaggatcctggagctgcacttacctgtgcgagctctctcaaaccctcaaaccttgccagtcaggacttttgctaattgcaaatagaaaaaccaactcaaacctgcttaagcagaaaataaatttattgattcnnnnnnnnnnnngaggggcggccgttttaaaggacccctcgggggcccaaagtttacgcgggcttgcaacgtaatact

SEQ ID NO: 113468 - DNA, 847 bp, Homo sapiens
agagagctggtttcagacttcagaaggacacgggcagcagacagtggtcagtcctttcttggctctgctgacactcgagcccacattccgtcacctgctcagaatcatgcaggtctccactgctgcccttgctgtcctcctctgcaccatggctctctgcaaccaggtcctctctgcatcacttgctgctgacacgccgaccgcctgctgcttcagctacacctcccggtcagattccacagaatttcatagtctgactactttgaggacggaggcaggccagtgcttccaaggcccgggtgttcatcttcctaaccaagcgaagccggcaggtcctgtgcttgaccccagtgaggagtggggtccaagatatatttcagcgacctgggagctgagtgcctgaaggggtccaagaagcttccgaggccccagcgaccctcgggtgggccccagtgggggaggagcaggagccttgaacccttgggaaacatgcggtgtgaccctctacagctaacctcttccatgggactggttattgccaaacaggccacactgtggggactcttcttaacttaaattttaattttatttatacttatttagtttttgtaaatttattttcggttttcacagtgtgtctgggatttgttttgctctgagagttccccctgtcccctcccccgttccctcaacagtgtgtctggtgacaaccgagtggctgtcatcggcctgtgtaggcagtcatggcaccaaagccaccagactgacaaatgtgtatcagatgcttttgttcagggctgtgatcggcctggggaaataataaagcacgctcttttaaaaggtaaaa

SEQ ID NO: 113469 - DNA, 4963 bp, Homo sapiens
tttcgtaaacttccttattattgtgacgccgaaaacggagaaaccctgggttctgcgagaggggctgtgacagtcggagtcccaagctgcggttcggctgctgccgagaactgcaaggtgtggaatatttctggcttctagtccaatgccaagtgtgtgacctgtggctacatgattccctgaaagataagaacaatgttatgttggggatattggtctctgggccaacctggtatcagcaccaacctgcagggaattgtggctgagccccacgtgtgtgggttcatatctgacaaaagcgtcaaggaagtggcctgtggtggaatcctctctgttttcctgctggaagatggggaagtttacacatgtggtttgaacaccaaggggcaactgggccatgagagggaaggaaacaagccagaacaaattggagctctggcagatcagcatatcattcatgtggcatgtggcgagtcccacagtctggccctcagtgaccgaggccagctgttttcttggggtgcagggagtgatggtcagctaggactcatgactactgaggattctgtggcagtgcccaggttaatacaaaagctgaaccagcaaacagtattacagagtttcctgtggcaactggcattgcttggctcttgcggctgatggccagctcttcacctgggggaaagaacagccatgggcaggcttggcttaggggaaggagttcccctcccaagccagcccacagagggtgaggtccctggaagggatcccactggcttcaggttggcttgccggaggggctcacagctttgccctgtctctctcaggagctggttttggctgggggatgaataatgccgggcagctagggctcagtgatgaaaaagatcgagaatctccatgccatgtaaaactcttacgcacgcaaaaagttgtctatattagttgtggagaagaacacacagcagttctcacaaagagtggaggtgtgtttacctttggcgctggttcctgtgggcaacttggacacgactccatgaatgatgaggttaaccctagaagagttctagagctgatgggtagtgaagtaactcaaattgcttgtggcagacaacataccctagccttcgtgccttcttctggactcatctatgcatttggttgtggagcaagaggtcaattaggaactgggcacacttgtaatgttaagtgcccatctcctgtcaagggttactgggctgcccacagtggccagctttcagcccgagctgatcgctttaaatatcatatcgttaagcagatcttctctggaggagaccagacttttgtactttgctccaaatacgagaattattctcctgctgttgacttcaggactatgaaccaagcacattataccagtttaataaatgatgaaaccatagcagtttggagacaaaaactctcagaacacaacaatgcaaatacaatcaatggtgttgttcagatattatcttctgcagcctgttggaatggaagtatatcttgaaaaaaaaattgatgaacattttaaaacgagtcccaaaatccctgggattgacctgaactcaactagggtgttatttgagaagttaatgaactctcagcactccatgattctagaacagattttgaacagttttgaaagttgtctgattccccagttgtcaagctcaccaccagatgttgaagccatgagaatctatttaatactacctgagtttcccctactccaggattccaagtattatataacattgactattcccttggctatggccattcttcggctggatacaaaccccagcaaagtactagataactggtggtctcaggtatgcccgaaatatttcatgaagctggtaaacctctataaaggtgcagtcctttatctactgaggggaagaaagacattcttaattcccgtactgtttaacaattatatcacagcagctctcaaactcttggagaagttatataaggtaaatcttaaagtgaagcatgtggaatatgatacattttacattcctgagatttccaatctcgtggacattcaggaagactacctcatgtggttcttgcatcaagcagggatgaaggctagaccatcaataatacaggatactgtaacactttgttcctaccctttcatctttgatgcccaagccaagaccaaaatgttacagacagatgctgaactacagatgcaggtggcagtcaatggagccaacctgcagaatgtcttcatgcttctcaccctggagcctctgctggccagaagccccttcctggtccttcacgttcgcaggaacaaccttgttggagatgccctaagagagctgagcattcattctgatattgatttgaaaaagcctctcaaagtaatctttgatggtgaagaagcagtggatgccggtggtgttacaaaggaattttttcttttgctgttaaaagaacttttgaatcccatctatggaatgtttacctactatcaagattcaaatctcttgtggttttcagacacgtgttttgtagagcacaactggtttcacttgattggtataacctgtggactagctatctacaactccactgtggtcgatctccacttcccattggctctctacaagaagttactcaatgtaaagcctggcttggaagacttaaaggagttgtcacccactgaaggaaggagtctccaagagcttttagattaccccggggaggatgtggaggagactttctgcctcaacttcacgatctgccgagaaagctatggagtgattgaacagaagaagctgatacctgggggagataatgtaactgtgtgcaaggataacaggcaggaatttgtggatgcttatgtgaattatgtcttccaaatctcagttcatgaatggtacacagccttctctagtggcttcctaaaggtgtgtggtggcaaagtacttgagctcttccagccttcagaactgagggctatgatggtggggaacagcaactacaactgggaagaactggaagagactgccatctacaagggagattactcggccacacatcccactgtaaaactattttgggaaacatttcatgagtttccattggaaaagaagaagaagtttctcttgttcctgacattgcagcgatcggattcccatctacggcatggccagtctgcagattgtcatccagggcacagccagcggggatggagtacttgccggtgggcccacacttgctacaaccttcttgacctccccaagtacagcagcaaagagattctgagtgcccggctgacccaggcccttgacaactatgaagggtttagtttggccctgaggcttctcagcttgtccagtatttcccttcgttcctcagtgtccacattgaggcctatacagaaaatcatggggagtgcatttctatttttttattgtctaagtgggttgggacttttaaatactgagcctggttgatgtgtttctgggattgtatagcagtaaacaaccctttttgaaaaattagaggttggggatggggtgaaaaattggcccttgtatgggaggtgtttttgtttttgttttaaaccaaactacccagtattccttgcacttgtgaatgtgttgcactctgctggatgaaatggcagtggatttttaaactttaatttcccaaatgtctctctcagccctgatgttttctcacagtgcttccttgtccttctcttaacttctcattcctctataagaatgatttagactgacctgtcctttgtatatctgcgcatgcgaggaacatcaccttcctctgtacacttgggaaatgcctctggcttgttgcagccctcctttaacccaaagggagggaaagggactggcttcagaaactcccaattccaaaaagctggagtctgggggtccattatttgggcaggaactcctaaggaatttatgggagcctatataaacatatcttgcttttaaaaagttcttgagggaatagcaactttcccatggctgtgcctatttcctagaccttttaaaagatgtgcagagcagcttagcattcgttgcagctgagcctaattttttcttgctcatccttgtccctttgacaataaggttaattgatagacccaccacctcttgcactctcgcttttggagcaagttgcattaactattttgagtctctatattgtccaagaaaagtagaaataataaatttactttccctttttctatcaccttatgtcctctaccattttctccttcctcccttcccttattttctccttttcgtaccctgtgtcctccctgattttcctttcgtttcttctttattttatcccattctctgttacttgactcagtgctcccttcctctcctctccttctagtggatgcatgcagcctttttttcaatttttatttaaattgcaaaatttttactcagatttttttttcctcttccctaattgctaagatttaaggacgttctttattatgaaactttatcacattcgaaatgtttgtttacagtgggattttaggggggattgtgtttaaatcaaatatatgtattttaaaaataatgacatgctcaaccttcctcatcatggagtaagaaaattctacatgattaaagaatccatgtaagtctaatttttaaattcctagtaactagagaaaagacttatttatataaaatgaagtatttatgaactgtgataaagcatcaaatcttgatgaaggattgtagatttttgctttttcctttttgtttttaaaacttattcccaattgctaaattggtagtttttcagtctttataaatacaggattaaaaatatatatacagttatatgaaatgtttattttctatgtgtgtgcatatagttcaatattatgcaataaatttggtgttttaacttaaaaaaaaaa

SEQ ID NO: 113470 - DNA, 421 bp, Homo sapiens
  misc_feature (1)...(421): n = a,t,c or g
ctaaaaaacaaaaatagctggggaaggggggcccagccctttaatccaagcccctgggaaaatagggcaaaaaaattcctttaaccccagagggggaggttccaggaaacttaaatcccccccttgccccccagcctggggaaccaaaaggaaaatttttttcnnnnnnnnnnnnggctgtttatttcattaaatatttattaaggaaatgagataaatggtgctggaacaactagatatccacatgcaaaagagtgaatttggacttctgcctcagccatatacgaaaacgaactcaaagatctaaatgtaaaaattaagactataaaactcttagaagaaaacatagccataaatcttcatgatctcggggattaggcagtggttttttacgaaatcgtcgacccggcaaagcggacca

SEQ ID NO: 113471 - DNA, 864 bp, Homo sapiens
  misc_feature (1)...(864): n = a,t,c or g
ttaggangggcagggagtcgtgtggaagggccactgcagcccggtgcctggcaattagtaggtgctcaggaaatgtggttcttgagcctctgcccttctctttgttgttggttttgcagagtcattaagggagtttactgcagactgtcccccatataagtgtcctgtggcccctgagcctttgcctcagcctctctctctccctgcagtgccctggggaggaatcaactgacagccctttcagtcttcccacagtccagccagttaaatcaaggtgttccccttttatagaggagtctcctagagccaaccgcagcatccctgcctttgggagccacctggaatgtgccagctgcagtagccgttccttccacggcccccccccatgctgtctgtggggcttgccactgagtgctccatctccccatgtgctccatcccccggcatctgctgccattggtcctgcctgttgcgttacttctctgtgccctggagcccctcaagcacagaggcctcgaaaggttgatcagacatcctcagcacctggagcggggcctggcacacaagacggcaatgaacggcccaacccctagaagttcaccccccacaagaccctgcagggcgggggctgagtgtcccaagaagcctcttgggaagggatggtcttagaccctagtggtgtcttcccattctgcagaggcctagggatgtccccaggtccccagagtgggaggggaagggtcagaagtccatggaaataaaacacagggccagctacaaaatttgtggggcccagtgcaaaatgaagatgcaagttcccttgttcaaaaagcagtaaaaaaaaaaacacaaaagttttttcaa

SEQ ID NO: 113472 - DNA, 560 bp, Homo sapiens
gtcccgtttcccgggtcgacgatttcgttttacagttccttctgaccactcatccacaagccccccctgttcggcagcctctctgcggggtgggggccctgcccagagaccgggagggtcatttgccgtcgggggtgtccatgagcgaggggccgctcaggctgccagccgcctccatggcacagtctgcagggctgaaaggtcccttgcgcctgtgtgtgtggaccttcttcgcccgcgcttcatttccccattcttctttctctctcctgttctttgattcgggttttacttcctcctaggaggtttctgtctgtctccgacatgctcagatggcagatctgctccatctgcatgctgtcgtctcgtgtggcactgatcgtttccttggggtgtgtgacattgtgctgtggcctcacctgcggagctcgtgttttccatggagttccatgtggccaggctgtagacatccacctggggtgattctgagtttgcttctgctggtgatgagtggggcccctgccccaccatgtcccgcagtgtaacctccgtgctgtatt

SEQ ID NO: 113473 - DNA, 604 bp, Homo sapiens
ggcccagggaagacatctgtcagtgctcataaaccctgtttcctctggggataagttagtaccagcttaacctgagggtgggcaaaaaaaggacatgcagaattcaacgcaacacacatcctgacaagtttataaggaccacgagaagtttagaggcaggaaataaatagtaacaccaaccataaaaaggctgtcactcactctagagtttaaaatgctcgtacgcaggtggcggttgggccttaggcaagccagcatgacagcaaagaaaggacggacccagaggagactccaaggatgtaaaaacatgaatgaaacaaaacatacaaccaagcctcaccacaaaaatgacaacccgtgtgaggtaatgcatttgtgagctagatttaaccattcccaaagcattgtgttgtgcgtgataaatgcgcactgttacgtctgtcaatttaaaaataaaaatgagaaaggccgggtgcagtggctcatgcctgtaatctcaatactttgaggccaaggtgggaggattgcttgagcccaggagtttgagaccagccttacataataattcttttaaaacttacctacacagagtaagtgaattata

SEQ ID NO: 113474 - DNA, 1847 bp, Homo sapiens
ttatccttgctgtaaaagctgatctgccctgtagcttgccacagccttccagcggtggctaccaagttgaaaccctcacaccacgcaggaagaggtcatcatcatgtcggacgatttcttatggtttgaaggcatagctttccctactatgggtttcagatccgaaaccttaagaaaagtacgtgatgagttcgtgataagggatgaagatgtaataatattgacttaccccaaatcaggaacaaactggttggctgagattctctgcctgatgcactccaagggggatgccaagtgggatccaatctgtgcccatctggggagcgatcaccctggggttaggagagttgagattggggtatacagcactcagtgaaacggagagtccacgtttattctcctcccacctccccatccagttattccccaagtctttcttcagttccaaggccaaggtgatttatctcatgagaaatcccagagatgttttggtgtctggttattttttctggaaaaacatgaagtttattaagaaaccaaagtcatgggaagaatattttgaatggttttgtcaaggaactgtgcctatatgggtccatggtttgacccacattgcatggctggatgccccatgagagaggagaaaaacttcctgttactgagttatgaggagctgaaacaggacacaggaagaaccatagagaagatctgtcaatttcctgggaaagacggttagaacccgaagaactgaacttaattcctcaagaacagctcctttcagagcatgaaagaaaacaagatgtcccaattattcccctccctgagtgttgattatgtaagtggacaaagcacaacttcctgagaaaaggtgtatctggggactggaaaaatccacttccacagtggccccaagctgaaagactttgaataaattgttcccaagagaagatggcagatccttccctcgagagctgttccccatgggaataacgtcccaaaacactctggatcttatatggagaatgacattgattctcctgtccttgtacatgtacctgactggggtcattgggtaagacttattattttatcctgaaaccttaaatatcagacctctgcatctctgatcccttccttgttaaaagttaccacggttggccaggcgcggtggttcatgcctgtaatcccagcactatgggaggccgagaccgggctggatcacgaggtcaggagactgagaccatcctggctaacacggtgaaaccccatctctactaaaaatacaaaaaccaaaaaaaattagccaggcgcattggctcagtgtctgtaatcccagcactttgggaggtcgggggggtgggggaggatcacggggtcaggagatcgagaccatcctggccaacatgatgaaaccctatctctactaaaaatacaaaaattagccgggcatggtggtgcacgcctatagtcccagctactcgggaggctgaggtaggagaatcgtttgaactcaggaggcagaggttgcaatgagccaagatcgcgccactgcactccagcctgggtgacagagcgagaccgtctcaaaaagaaagaagtgactagggttcagagaaccagggttcaaagcccagggatgcaaaggttgcagtgagttgagtcatgggatcccagacttttttaaatgtttgcaatgtttcccgtttacagaatgctacaagaataatgtacgtactacctaaaaggatgtctaaatgtttgttaataaaaataagaaatagctacagtgacagattttagagcaaaaattagtaataaaaataagaaataaaattacaggagcaatt

SEQ ID NO: 113475 - DNA, 619 bp, Homo sapiens
aattcggaacgaggcggaaaggtgataccatctgacagtcattttctcacgttggtcttctaaagtcacctatttcttgtgtgtgcacatcacaccatttcctgtttctttataacccgacaagggtaggagtgcctgtttcccctgctgggcacaccagacaatcgtaatcacaaaacagacactgagccaggggcccaaagggtgtgatcatgagagttaccgggacagcagtaggcatgacagtcaccaggaaggacaagggtgctctgttgttagtggccacacaccaatttgacaaggagtgttgcgaaatttttatttatttatttatttattttgagatggagtttcactcttgtttgcccaggctggagtgcggtggtacaatctcggctcactgcaacctccacctcccaggttcaagcgattctcctgcctcagcctcccaagtacctgggactacaggtgcgtgccaccacacccagctaaattttgtgtttttagtagagatggggtttcaccatgttggccaggatggtcttgaacccctgacctcatgatctgcctgcctcggcctcccaaagtgctgggattacaggcatgagccaccacgccc

SEQ ID NO: 113476 - DNA, 837 bp, Homo sapiens
  misc_feature (1)...(837): n = a,t,c or g
ctaancctttnattttgaagggagtccatgaatcccctaaagntttttaagtaggggagccaatttaattgaantcctatagtttttagaagatgggtatgttggtttcagcaagtgtgtatgtagtggccagggtgagggtgtggatggaccttagagacaggagaacaactggaagacccatataatagcccaagttaaatgatgaagaccctgaagtagagcaactgcagagagaatggaaagccacgggatttaagaagattttttaaatgtccttagtactggatataggcccaagagaaaccagaaagagtcaaaatcaacttctgagagtgaaggatgcttgtgggatggattagaggttaaagaaattgccaaggaaaggggccagctagggacaaataatactgcacagccataaaaaaggatgagttcatgtcctttgcagggacatggatgaaactggaaaccatcattctcagcaaactacagcaaggacagaaaaccaaacaccgcatgcttctcactcacaagtgggagttgatacaatgagaacacttggacacaggatggggaacatcagacaccgtggggcctgttgaggggtggggggtggggggcaaggggagggatagcattaggagaaatacctaatacctaatgcatgtggggcttaaaacttagatgacaggttgataggtgcagcaaaccaccatgggggttgataggtgcagcaaaggaccatggcacatgtattcctatgtaacaaacctgcgcgttctgcacatgtattctagaacttaaagtcgaatgattaataatatgtccctaaaa

SEQ ID NO: 113477 - DNA, 1007 bp, Homo sapiens
aattcggcacgaggcggccccggggcgcagcgcgcacgcaatcgcgtttccggagagacctggctgctgtgtcccgcggcttgcgctccgtagtggactccgcgggccttcggcaggattgcaggccttgggtagtctcctttctggacttagaagagaagaatggagaagcccctcttcccattaggtgcctttgcattggtttggctttggctacacagcactggttgtttctggtgggatcgttggctatgtaaaaacagggcagcgtgccgtccctgggctgcagggcttgctcttcggcaatctagccggcctgggtgctttaccagctgtatcaggttccaagggaacgttttgggggtttcctagccgctacatctgttacttttgttggtgttatgggaatgagatcctactactatggaaaattcatgcctgtaggttttaattgcaggtgccagttttgctgatggccgccaaagttggagtttcgtatgtttgatgacaatctgatttaggcagaagtcatgttccagcttggactcatgaaagggattaaaaaatctgcatcttccactattttcaatgtattaagagaaataagtgcagcattccttgcatctaacatttttacctaaaaaaaaaaaaagacaccaaaatttgcgggaggggtggaaaatcagtttgttaccattataaccccttacagaggtggtgagcatgtaacatgagcttattgagaccatcatagagatcggattcttgtatattagattttatctcctttctgtctctataggtaaatctcaagggtaaaatgttaggtgttgacattgagaaccctgaaaccccattccctgctcagaggaacagtgtgaaaaaaaatctcttgagagatttagaatatcttttcttttgctcatcttagaccacagactgactttgaaattatgttaagtgaaatatcattgaatattaaagtttactataaataataaaaaaaa

SEQ ID NO: 113478 - DNA, 467 bp, Homo sapiens
ctttaacaaaaagggaaactttgaagaggaactttttacttttcacatgcggatcccattagtccctcggagaatttaaacagtgaaccctatatagatgtattttgctgtccttacagaacatgcagtgtaagaagtacctttaatgccaacctacacacttctttcccgaagtaccccaattaagtgcaaatgcttaatgtctttagtgttttatagtaaagcaaaaaatccttatttagaattagaagtacaggcctgtgcaacatggcggaaccccatctttaccaaaaaatacaaaaattagctggacatggtggcatgcttatgtagtctcagctacttgggggctgaggtgggaggatcgcttgagtccgggaggccaaggttgcaagtgagccattttcgcaccaattgcacttccagccttgggtgacaaagtgaaactttcacctttaaaaaaaaaa

SEQ ID NO: 113479 - DNA, 1867 bp, Homo sapiens
ataattatgaacattttcacaagagctgggaaaatgttcataattatgcatgcagaataagcccaagctggtggcattctgttcagttacaggtaattttctgaatcttcccagctcttgtgaaaattctcacattcatagaaagatagatgcaccagtaaaataaatacctgtaaatacgataataatttcataataatatgcttcacctagatttaccagttactaatattttgccacagttttattttctcacacacttttgttgagcatctgaaaaccatacacatgatgacagttcaccccataatgttttagtatgcatctcccaagaataaggtttttcttctgtataacaagaatattgtaatcatacctaaggaaaatgaattttattacatatgtgttctatattcaaatttctgtaattacccctaaggatgtcttttaaatgatttttaggcattgatagtctgtgcctgtgtaggattataacattgggctattgcaaaataatggttttctttttctctttttttttgagacgaaatcttgctctattgtccaagctgggagggcagtgggcacaatctcgggcttcactgcaacctccgcctcccagggttcaaggcagtttcttcatggctttcaccctccctgaagtaggctgggggtttacaggggcagggtgcccactgtggctgctgcctaatttttaataatttttaggtaggagacgggagttttcatcgaggctgggccagactgggtcttggaactcctggacctcaagtgatccacctggccttcgtcctcccaaagtgctggggggttaccagggtgtgagcccactgcaccccagcccaaaatgatggttttcctgattcctagcatttccttttataagattgcctatgtaaagcacagcttttctttttttaggggaaaaatgtcttttaacagctggcaaaataaatatttcttttcaatggaatgacaattattatttttgccatatatttattttaaaaatttatgtataatggtaacctgagcctgcatgttattcatgtgtggtgccatactgatctttaattttaatgtgaagcaagtactaatatagtaaagcataaattatataaaatttgctttatattttggattgcaaattaattgctgtactttatagaaaagtttcccaaatccgttttacttttttgtatttggaaatttaatcacaggtggaatcttaaagagagcatttagggatattgtaaacagatgttattaaggactaatgttaacaaacattgaagaagagaaaacagtatttgtttttagcttaacatcttagtggagtgaaatattttcagtatatttattttatttatttattaattattttggtttttgagatggagtctggctgtattgtccaggcctggagtgcagcggtgcaatctcagctcactgcaacctctgcctcctgggttcaagcgattcttgtgtctcagcctcccgagtagttggggatttacaagtcaattttttttttaactaaaactacagaatctatttttcttggtctcatactcagttttttatgtagtcacttagtaaataacctaatttgcttgttttctccacactaattttagggtgaattcctcatttcgcttttcagatcatggggtgagggggatggttgtgtgtgtgaggaactgaggaatcagatggaaaacaatgcctctgctcctttgagtataatcagtgatatttgaggttccagggttaaatgctgcatttttatttctgacgttcgtaccttaaaatatttgaagaaaataaactatttcattgaagtcaa

SEQ ID NO: 113480 - DNA, 696 bp, Homo sapiens
tgttgacttgaatgagtacatcacctcgtgccgaaagcgctttaggtgaatgcacaggatctgcggggacagagagagcgccggtcatctaggaagaaatgatgcgggccctcgcagccttgcccacgggcccaggacagctgatgggatcatgcaagctgactccattggaacaaatccaagagttccacgtgggggccagactgggctcgctctaagtcacacagatcactcccagctccactgctgagaactggaccccaagagctgcaatgagccatcaagtttaccagttctgtcggcactacctttgagaagccacaaagcctccccgagccaccacagccccaacctgggccccctctgccagggccctctcctcttgctccagccacacgtgccttccttggtgcggacaagcctgctcctgcactggggttttgtctgttccttctgtgccttccatccacgacgctgacaccagcctacaccctccaggcctcactcagacgttactcctcagaaagacccctggcaacagccccagctgggccagctctcctcccgccactctgcagctggcaggagccatagctgtctcactgggggtggtaacccagtgtcccacacacctgcctcccattgggccctcatacaacatgttagacaacatgtgctgaggctaccgagagaggg

SEQ ID NO: 113481 - DNA, 1762 bp, Homo sapiens
attccctttcgaccatttcgcaccaaaatggatatccgaggtgctgcggatgctgctgaccttcaccaatattattgctgccaaggctgaagaagttattgctgacaaagtcaactggcaatcctatcttcagggacagatgatttctgctgaagattgtgagtttattcagaggtttgaaatgaaacgaagccctgaagagaagcaagagatgcttcaaactgaaggcagccagtgtgctaaaacatttataaatctgatgactcatatctgcaaagaacagaccgttcagtatatactaactatgggggatgatatgctgcaggaaaatcatcagcgtgttagcattttctttgactatgcaagatgtagcaagaacactgcgtggccctactttctgccaatgttgaatcgccaggatcccttcactgttcatatggcagcaagaattattgccaagttagcagcttggggaaaagaactgatggaaggcagtgacttaaattactatttcaattggataaaaactcagctgagttcacagaaactgcgtggtagcggtgttgctgttgaaacaggaacagtctcttcaagtgatagttcgcagtatgtgcagtgcgtggccgggtgtttgcagctgatgctccgggtcaatgagtaccgctttgcttgggtggaagcagatggggtaaattgcataatgggagtgttgagtaacaagtgtggctttcagctccagtatcaaatgattttttcaatatggctcctggcattcagtcctcaaatgtgtgaacacctgcggcgctataatatcattccagttctgtctgatatccttcaggagtctgtcaaagagaaagtaacaagaatcattcttgcagcatttcgtaactttttagaaaaatcaactgaaagagaaactcgccaagaatatgccctggctatgattcagtgcaaagttctgaaacagttggagaacttggaacagcagaagtacgatgatgaagatatcagcgaagatatcaaatttcttttggaaaaacttggagagagtgtccaggaccttagttcatttgatgaatacagttcagaacttaaatctggaaggttggaatggagtcctgtgcacaaatctgagaaattttggagagagaatgctgtgaggttaaatgagaagaattatgaactcttgaaaatcttgacaaaacttttggaagtgtcagatgatccccaagtcttagctgttgctgctcacgatgttggagaatatgtgcggcattatccacgaggcaaacgggtcatcgagcagctcggtgggaagcagctggtcatgaaccacatgcatcatgaagaccagcaggtccgctataatgctctgctggccgtgcagaagctcatggtgcacaactgggaataccttggcaagcagctccagtccgagcagccccagaccgctgccgcccgaagctaagcctgcctctggccttcccctccgcctcaatgcagaaccagtagtgggagcactgtgtttagagttaagagtgaacactgtttgattttacttggaatttcctctgttatatagcttttcccaatgctaatttccaaacagcaacaacaaaataacatgtttgcctgttaagttgtataaaagtaggtgattctgtatttaaagaaaatattactgttacatatactgcttgcaatttctgtatttattgttctctggaaataaatatagttattaaaggattctcactcc

SEQ ID NO: 113482 - DNA, 358 bp, Homo sapiens
  misc_feature (1)...(358): n = a,t,c or g
cnnnnnnnnnnnnnnnnnnnnngaaaaggagtttctttttttttgccccggttggagggcagtggcccaattccagtttttttcagccccccccttccagggccaaaggatcctcccgtttcatttttccgaacaattggggccccaggcatgcccccttttggccaactaatttttggttttaaatgggttttttaaattttttaaaaannnnnnnnnnnnnnnnnnnnnnnnnnnnnnnnnnnnnnnnnnnnnnnnnnnnnnnnnnnnnnnnnnnnnnnnnnnnnnnnnnnnnnnnnnnnnnnnnnnnnnnnnnnnnnnnnnnnnnnnnnnnnnnnnnnnnnnnnnnctatgcagt

SEQ ID NO: 113483 - DNA, 2365 bp, Homo sapiens
tttcgtctgaggccggcttgttcgggagagacggcgcgagcagtcagccagaatcttatcttggctttggatcttagaagagaatcactaaccagagacgagactcagtgagtgagcaggtgttttggacaatggactggttgagcccatccctattataaaaatgtctcagagcaaccgggagctggtggttgactttctctcctacaagctttcccagaaaggatacagctggagtcagtttagtgatgtggaagagaacaggactgaggccccagaagggactgaatcggagatggagacccccagtgccatcaatggcaacccatcctggcacctggcagacagccccgcggtgaaatggagccactggccccagcaccagtttggatgccccgggaggtgatccccatggcagcagtaaagcaagcgctgagggaggcaggcgacgaagtttgaactgcggtaccggcgggcattcagtgacctgacatcccagctccgcatcaccccagggacagcatatcagagctttgaacaggtagtgaatgaactcttccgggatggggtaaactggggtcgcattgtggcctttttctccttcggcggggcactgtgcgtggaaagcgtagacaaggagatgcaggtattggtgagtcggatcgcagcttggatggccacttacctgaatgaccacctagagccttggatccaggagaacggcggctgggatacttttgtggaactctatgggaacaatgcagcagccgagagccgaaagggccaggaacgcttcaaccgctggttcctgacgggcatgactgtggccggcgtggttctgctgggctcactcttcagtcggaaatgaccagacactgaccatccactctaccctcccacccccttctctgctccaccacatcctccgtccagccgccattgccaccaggagaaccactacatgcagcccatgcccacctgcccatcacagggttgggcccagatcttgtcccttgcagctagttttctagaatttatcacacttctgtgagacccccacacctcagttcccttggcctcagaattcacaaaatttccacaaaatctgtccaaaggaggctggcaggtatggaagggtttgtggctgggggcaggagggccctacctgattggtgcaacccttaccccttagcctccctgaaaatgtttttctgccagggagcttgaaagttttcagaacctcttccccagaaaggagactagattgcctttgttttgatagattgaggcctcagaatcgataattttccccccactctccccacactaacctgagttccctttccttacatacctaccccctaagagccatttaggggccacttttgactagggatataggctgcttgcgataaagatgctaggaccaggactccctcctcacctctggactggctagagtcctcactcccagtccaaatgtcctccagaagcctctggctagaggccagccccacccaggagggaggaaagctatagctacaggaagcaccccatgccaaagctagggtggcccttgcagttcagcaccaccctagtcccttcccctccctggctcccatgaccatactgagggaccaactgggcccaagacagatgccccagagctgtttatggcctcagcttgctcactttcctacaagagcaagcctgtggcatctttgccttgggctgctcctcatggtgggttcaggggactcagccctgaggtgaaagggagctatcaggaacagctatgggagccccagggtcttccctacctcaggcaggaagggcaggaaggagagcctgctgcatggggtggggtagggctgactagaagggccagtcctgcctggccaggcagatctgtgccccatgcctgtccagcctgggcagccaggctgccaaggccagagtggcctggccaggagctcttcaggcctccctctctcttctgctccacccttggcctgtctcatccccaggggtcccaaccaccccgggcgtctctgctgtacatattttgagaccagttgtttattccctgggaagatggatatactatttttgttaagcgtgtctgtatttatgtgtgaggagctgctggcttgcagtgcgcgtgcacgtggagagctggtgcccggagattggacggcctgatgctccctcccctgccctggtccagggaagctggccgagggtcctggctcctgaggggcatctgccccttccccaacccccaccccacacttgttccagctctttgaaatagtctgtgtgaaggtgaaagtgcagttcagtaataaactgtgtttactcagtg

SEQ ID NO: 113484 - DNA, 1018 bp, Homo sapiens
  misc_feature (1)...(1018): n = a,t,c or g
cccacgcgtccggcgggcacttggggggaaagttgagacgtgattaccgggttgggcgggccccatctgggaggggtttgtgggtgaactcggggtccaccgcccgctgaggagatggatgaggacgggcttcctctcatggggtcaggcatagacctgaccaaggtgccagctattcaacagaaaagaacggtggcttttctaaaccaatttgtggtgcacactgtacagttcctcaaccgcttttctacagtttgtgannnnnnnnnnnnnnnnnnnnnnnnnnnnnnnnnnnnnnnnnnnnnnnnnnnnnnnnnnnnnnnnnnnnnnnnnnnnnnnnnnnnnnnnnnnnnnnnnnnnnnnnnnnnaactggcagacctttcacttcgtatccaacaaattgaaacaactctcaatattttagatgcaaagttgtcatctatcccaggcctagatgatgtcacagttgaagtatctcctttaaatgtcaccagtgtcacaaatggagcacatcctgaagccacttcagagcaaccacagcagaacagtacacaagactctggactacaggaaagtgaagtatcagcagaaaatatcttaactgtagccaaggatccaagatatgccagatatctcaaaatggttcaagtgggtgtaccagtgatggcaataagaaacaaaatgatatcagaaggactagacccagatcttcttgaaaaagctgctcctcaaccacagcctaaagcctgaattctgccccattacctcatatgcacatgccattggtcaccaggggcactggttggagtgggggtgactcaatgtaacctatcaccactactagcaacccagtttcaactgcatttagctagatgtgataagtgcagtcaactaccgtgttaacagaggaattatgatgcttttggaatcatgtttacataaaagttacggagcctcacttcaggagaaaagtatgagatgatgaaagagaagaaaatgtgccatccaagggaagag

SEQ ID NO: 113485 - DNA, 1133 bp, Homo sapiens
ggaattcggcacgagttggcaggtacctgggccccgccgcccgggtgtgtgggggtcgggtcgggggtccagcaaagccccatccagtcgagcctgggcaagctgagaggctgtcgggtgcgctccagttacgctcccctgcgtcgtggaaaacctagagagccctacagcgtcagggctaatcccgggacgcctcgaggccccgcggagttttcgcgaacgcgccgggcggtgcagggatgtcctgcttgggagagtgcagggttggaagcgggcacgccctgttggcagctgccggcgcttgtgtacgtggctgctgacgtggagaactgtagctgtggaaagcctgcgccccaaggagggacgcggtggtgcagtcgcggcccattatctgtgcccgggaagtcctgaaggctctaggagctggcagattaaacccccagacccacaagaaaatccctgaagcttcgttgacttttgctgatggagcctctctgaagggcaaattcaaagtacagctgggtgctgcagcactgcgagtgcgagacttgtggctgtggttatgaaggagcctcgtcagctatgcctttagcccctggtgaagcagtgccagtcacactttgccagtcaaacggagaggcagcagtagtaagaccagaccaaatcaaaccaaaccaagcaaaccacggggaatggagacacagagtttcattctgttcacccaggctgggagtgcagatgcagtggcatgactgatagttgcactacaacttgggaactcctggggctcaagccatcttccctccactgcctcccaagtagctggggactacaggtcattgtgagcacacagcataaaggcagctgcccacaagcccaggaagagaagcatcatcagaaaccgaccatactggcttcctgatctcagactttcagcctccagaatgatctctgcctgctcctccaagcccttcactgtagaatggaagcctgtgattttcctggcatcatgcatgactgagaaggtcagtgtggctaattctgagcttcaacatcaggaaacccgtagttcttcacactgagccgcctcctgcagcacagtcatccttggtaataaagctgatattttaatc

SEQ ID NO: 113486 - DNA, 1532 bp, Homo sapiens
tttttttttttaatttttggagacagggtcttgttctgtcacccagactggagtgcactggtatgatcatagctcactgtaacctcagacttctgaggtcaagtgatcgtcctgcctcagccttcctgagtagctaggactccaggtgtgcatcaccattcccagctaattttatttatttatttatttgtttgtttgtttgtttgtttttgtagagacagggtctcactatattgctcaagctggtcttgaactcctggggctcaaacaaatcctcccaccttgggcctcctaaagtcctggggatcacaaggcatgagcccacccatgcccaaccttttcctagttttttaaattttcatacatatctattaggatgtttataggtgtaagggttgaactccattctttgcttctctgtttgctggtaaattttttgggtatatttttactaattttgcacattcttttacatattggtaaaggaacagtctgtgatctggatttattcagatccttattcagaattcccaattgttttattaatcattttatcttaaatgtgtctctacttactagtgatttgcagtatattccaagttagttgtaaaaacatttcacaatagactaatttcttgctttcctgtgaaattgtctcaaatttaaaaagtaaagttcttaatattgtaagtagctgccagaaataagccaattctagcttcaagttcatacttcttacaatgagaattttaaatttctttattcttgggaaatagcagggccttgctgtttttaatagtgaattaactatgaattttttagtttctgtctctcagaaaagatggatttgtttggctttaaatattgagagagtttctagagacccacaggaaatgagaaatttgcacttttgtagcaatggcttttgaaagactagctaacatcctgaagactcagcagaagaaagatattaaactgactttgtcgttttgttgattattaaattaaatggaaaaacaaaatgtaacctttgagtccaatagactcatccccgtaggctctctatcatcttcaaatcaatcagtaaaacacagtgtgcctccctgggggactgtggcagtcttaccttcatgtagtaacctaagacgctccataagaataaaaaatcagagctaaggaacagattccacataaccaaaaggctcacaaaaagcattttaaaatatagtgatcaaaaacactaatgtcgttaaaagaaaaagcagaaaataataaagtaatataatgtggtcttgcaaaaaacagtctgtgatcttacatttcaaaacatgtcttgcccgttcccggcacctacaaggccagatgagctacctgctccatccttcacattctcgctgcacgtcccattcaagctcttctgcaagtggccatgttaaaaatttataaaaatatccgagtctgcctggcacgctcagagattctcatgacaagttcttccctcactgagcacttccctgaccacccaaaataat

SEQ ID NO: 113487 - DNA, 2464 bp, Homo sapiens
  misc_feature (1)...(2464): n = a,t,c or g
cccacgcgtccgcagagagcaagagagaggaactggggtttgcgaaccttgtggctttgtctgtttcctgtttcagcaaggctgctgtgcaaaaagaaagacggtaccaagaagggacgtgttaatggggcccagacctatggattgaaagcgtgtgctttacccatctgctgtcttgctccatcttgagaccatagccaagatctgtccaggactggaatgctttcccgagtggcttgagttggagcctgggactacgagcagccttattgaggtacaattcatgtgcttgtgggtttggatggcacaatctgtgtctgggctaaggaaagcagacttggcaccaacattatacctgacagatccatgcatctattgcaggaacttgtaagccaagcgcaacaggtgcttggaggtcatcatgatcagcccagaccccaggccctcccctggcttggcccggggggctgagagctatgaggccaagtgtgagcgcaggcaagagatccgggaaagccgccgctgccgtcccaatgtgaccacttgccgccaggtggggaagacgctgaggatccagcagagagagcagctccagagagctcgactgcagcagttcttcaggaggaggaacctggagctagaggagaagggcaaagcgcagcatccccaggccagggagcaagggccctccaggcggccaggacaggtgacaggcaccagctctgaagtctttccagcccagcatcctcctccctcaggcatctgcagggatctgtctgaccacctctcctcacaggctgggggccttcctccacaggacactcccatcaagaagccacccaaacaccaccgtggtactcagacaaaggcagaaggaccaacaattaagaacgatgccagtcagcaaaccaattacggagttgcagttctggataaggaaatcatccagctttctgattacctcaaagaggccctacaaagggagctggtcctaaaacagaaaatggtgattctccaagacctactgtccactctgattcaggcctctgacagctcttggaagggacagcttaatgaagacaaactgaaggggaaactgagatccttagaaaaccagctatacacctgtacccagaaatactccccttggggaatgaaaaaagtactactggagatggaagaccagaaaaacagctatgagcagaaggccaaggagtcactgcagaaagtgctggaggagaaaatgaatgcagagcagcaactacagagcacacagcgatccctggccctggcagagcagaagtgtgaagagtggaggagccagtatgaggctctgaaggaggactggaggacccttgggacccagcacagggagctggagagccaactccacgtgcttcagtccaaactgcagggagcagatagcagggacttacagatgaaccaggccctgcgatttttggaaaatgagcaccagcaactgcaggccaagattgaatgcctgcaaggggacagagacctgtgcagcttggatacccaggacctacaagatcaactaaaaaggtcagaggcagagaaactcaccctggtgaccagagtacagcagttgcagggtttgcttcaaaatcaatccttacagcttcaagaacaggagaaactcttaacaaagaaagatcaggctttgcccgtgtggagtccaaagtccttccctaacgaagtggagcctgagggtacagggaaggagaaagactgggatctcagagaccagctgcaaaagaagactttgcagctccaggccaaggaaaaggagtgcagagaactgcattcagaattagacaacctcagtgacgagtatctctcctgcctgcgtaagctgcagcactgtcgagaagagctgaaccagagccagcagctgcctcccagaaggccaatgtgggcaaaggcctcccagtgctaatggtggtgattgctccagcactggcagtgttcctggccaataaaaacaacctgatgatttgaataatttgtgacaactgccttgggtgaaaatcaaaagcaagcaactcagcgaaaaactcaaaaggtttgggtacattacagcttgggttttccaactgacttaggatttctgactttttattaatttcttaacctactgtaaataaacttcacctgaccagattgttgcaatnnnnnnnnnnnnnnngggcggccgttttaaaggatccttggaggggcccaaagttaacgcgggctgtgcaacggaaaaagttttttccttatagggggccgaattaaaaccatccttgggaatttttggaaaggaacctttacttgtggggggggacataatgggccaaccttccctacaaaatttaaaggctctagggaaaataaaaaattttaaagggaataaggggtaaaactacctgcatatgctggctgctggaaagtttggttaacg

SEQ ID NO: 113488 - DNA, 879 bp, Homo sapiens
gggttcccggcggccctcgcggcaggtttcgggcttcaggacaattcgtgatggcgggggctggttccgccgctgtatcgggggcagggaccccggtcggcggggcccacaggccgcgacctttttcgccgaagggctggctggagttcctgcgacccgctgtgcagcagctcgactctcacgtacacgccgtcagagagagccaggtagagctccgggaacaaattgacaacctagccacagaactgtgccgcataaatgaagatcagaaggtggccctgggatcttgacccctatgttaaaaaagctacttaaatgcccggcgacgcgtttgtcttggttaacaacattctacagaatgcttcaggaaccgactgagacggctaaaccacagtgttgccaaggaaacagcccgcaagaagagcaatgctggattcgggaatttacccccctggctccccaggcaaataacagatgagcctatggacccagtagcacaagtactgttccccagctgccttgtttcaacagacatgcaaagatcctaggagacagtccccatagacctttcagacatttaaaaaggggagccgttacagtttgtttggaagcactttcgttctttacccattttatgttagggggccccagggaaacctacacacagccagaatgaggtttcccaaagggatttactttaattatgggtctttggtttctttttcacaaatgagcttgaggcctctaattttttttttaaggtgcattacttgagggcttaccttcttcagggactagtttaaccagaggggcttccttttgtatggttacatgcctgggttacatggggcctgggacagcatgtcctcttacctgtga

SEQ ID NO: 113489 - DNA, 1539 bp, Homo sapiens
ctgcagcggtggtcggctgttgggtgtggagtttcccagcgcccctcgggtctcgaccctttgagcgttctgctccggcgccacttacctcgttcctcggtgccatgaccacaaccaccaccttcaagggagtcgaccccaacagcagggaatagctcccgatgtttggcggcttccaggtggtggatcccaatttttcattagggttttgatgaacccacacaggaccaacctgttgaggaagaccaaaatgggcctctaatatcttgggaccaccttgaagaaaattcaaggccttcttgggcccaagtccagcaggttcccaagttctagtggtggcagggaaaaacttggagtcatctggacttgcagagaaagggaactcccttctaagcaagcctccgggagactttttagaatcttgaagggagaaggtgatattcatgaaaatgtggaccccagactttgccaggcagcctggggcagagtaaaaaaaaagcccgttccctgctgcgcctgtgccctagcaccggtggccccggccccaagtgccatccagaagaaatcgcgcctgggcggtatagtccagcctcgtcttgggttagctctgactgtcctgaacgctgtcgttctgtctgtttcctccatgcttgtgaactgcacaacttgagcctgactgtacatctctttggaatttgtttcattaaaaaagaagcacttttatgtacttgctgtcttttttttttttcttttgaagaacaggtttctctctgacccttgaactcttggggtctgtgggccccatgggcatgaagtgttttccaagtagtagaatgggagggaaaagctttgtgaacacttagtactgtgtttttaagaagaaataatttggttcccagatgtgttaagaggatcttttgtactgaggtttttaacactttacttggggtttaccaagcctcaactgggacagaccatgaaacagtccacagggcaccggttcctgcccaggcccccaacccacaggggagttctctcccgcaaaacccttccttggtgttgcccctaaacttgccagtggccctttggcctcaagaagccctccctccctgtgaacatgtgaaaacaatgaaaagaggccttgcgccctcccttgcctttgcccggcctgcaaaagccaaaggaaacttgccttttattttttaacctttaaaaaagttagccagatagtaaccaagactggcttggctgatgagcaaaagcctttgcctctcacgtcagaggaaggcttggatgtacaatgaaactgccctggaactaaaagcagtgaagcaagggaggcaaaccacactgaagcgggtcttcctcccaggaacggggtccccacaggcgtgttgttttaattaccctggatgctgtgtgcatgatgctggtgcttgaccatgaaaggaaagtctcatccttaaaatgtgttgtacttcacaatcctggactgttgcttccaagtaaacaatatccgacattttgaaaaaaaaaaaa

SEQ ID NO: 113490 - DNA, 2086 bp, Homo sapiens
gctgtttctgcccctgggttaacattcaagatggtacatgctgaagccttttctcgtcctttgagtcggaatgaagttgttggtttaattttccgtttgacaatatttggtgcagtgacatactttactatcaaatggatggtagatgcaattgatccaaccagaaagcaaaaagtagaagctcagaaacaggcagaaaaactaatgaagcaaattggagtgaaaaatgtgaagctctcagaatatgaaatgagtattgctgctcatcttgtagaccctcttaatatgcatgttacttggagtgatattagcaggttttaggtgatgtcattacggatctgaaagacacagtcatcttacctatcaaaaagaaacatttgtttgagaattccaggcttctgcagcctccaaaaggtgttcttctctatgggcctccaggctgtggtaaaacgttgattgccaaggccacagccaaagaagcaggctgtcgatttattaaccttcagccttcgacactgaccgataagtggtatggagaatctcagaaattggctgctgctgtcttctcccttgccataaagctacaaccatccaataatcttaatagatgaaatagactcctttctacgaaccggttcaaggttctgaccatgaagctacagccatgatgaaagctcagtttatgagtctctgggatggattggatactgatcacagctgccaggtcatagtaatgggagctaccaattcgtcctcaggaccttgactcggctataatgagaagaatgcctacaagatttcatatcaaccagcctgctttaaaacacgacgcgaagcaatcctgaaactcatcttgaaaaatgaaaatgtggataggcatgtagacctgctacgaagttgcccaggaaactgaatgggttttcaggaagtgaccctaaaagagatgtgtcgagatgctgccctcctctgtgttagagaatatgttaattctacatcagaagaaagccatgacgaagatgaaattcggcctgttcaacagcaggacctgcatcgggcaattgaaaagatgaagaaatcaaaggatgcagcatttcagaatgttttaacacatgtttgtttagattaagagtaaagatcatttgtacagttcagtgatctagtttggtgtgtcctcttatcagttagtggaaatagaacggaaagagtgctctttaaacaatgagggagctcagtgtttatggttttatactctggaattctaagttattggaggatatagttgttacatagggtgggtattaccgttgggtccaaaaatcatgagggaggaacagttgaatccagcctggaacgtggggtgcttgtgtttggaccttttccaggccatatattgtacagccttatagaatctaagctggtcttaaagtcataaatgattcattgggtcattaagtgagaaacggggatgtggttaggtgctggttcctagacatgtggagtatgcgtttgtgtgtgtgcgtgtatgtatgtgtatattaaatgtatatatccacaccattttatattgacattcctggtaggatatgtttggaatataggaaactttttttaccccaactactgaatccagggagtaccaaataatatatagtaaaactaagatttaaggttgtgtcaaaaaggtacagtgattcagccatttccatttgtcatttgtttcaaccttttttaagttgagtgtttttatttctgcagttattagttgggatcctccacatcttggcatatatacatgggctcaattattatgtttgtcaggataatcaaatgaaaatactagttcagtgatcagcattgaatggttgttaggcagccatgtgctcaacactggatttcacctcttggagtataaactttttaaatttaaattgggtttacatggaaagtggattaaaaggcctttcaaaagaatggggtttgaaaaacctgcagtaccctttaatacatgtacatttctttccttttttcatttaatgtaacatgtctgttgtaactatgtttcttaaatattattttaaggttatgg

SEQ ID NO: 113491 - DNA, 729 bp, Homo sapiens
tttttttgataggaagctatccttatgggtgtgaaatctttgtcttttaataggtagctttagcccatttatatttattttgattactgatcttttgcggattattcctgtcatcttattttatatttttgatttccttttttgagacggagtcttgctctatcgtccaggctggagtgcagtggcacgatctccgctcactgcgacctccggctttcgggttcaaacgattctcccaacccagcctcccgagtagctggaattacaggcctgcaaccactatgcccggctaatttttgtgtttttagtggggacaggttttaaccgtgttggccaggctagtctcaaatttctgacctcaagtgatctgcctgccttacccgcccaaagtgctgagattacaggcatgaaccactgtgccgagctggttcatttcattctcattgctgtgtatatgccattgtatatatccctaatatagatatacatttgactttgattggcagttggttgtttgcatttttggactattatgaatagtaagtacatgaacactctagtacacgtcttttgttgagtgagtgtgtgcatttctgttgagtgtgtatctgggagtggaactgcttggttgtagtctgtgcatgtgctcggttttagtagatactagcaaacagttttcagtaccggttgcaccaacttatttaccccagaagtatatgtggttgctcc

SEQ ID NO: 113492 - DNA, 4700 bp, Homo sapiens
gggcaattcgggaggggataggctcagacacaaggagaggcttggagagagcagacgccttctggattcaaaaagattaggcccattcccctcaggctcacctgttactgggcctcccaaaaagatggataggagaaatgactacggatatagggtgcctctatttcagggccctctgcctcccccggggagcctggggcttcccttccctccagatatacagactgagaccacagaagaggacagtgtcctgctgatgcataccctgttggcggcaaccaaggactccctggccatggacccaccagttgtcaaccggcctaagaaaagcaagaccaagaaggcccctataaagactattactaaggctgcacctgctgcccctccagtcccagctgccaatgagattgccaccaacaagcccaaaataacttggcaggctttaaacctgccagtcattacccagatcagccaggctttacctaccactgaggtaaccaatactcaggcttcttcagtcactgctcagcctaagaaagccaacaagatgaagagagttactgccaaggcagcccaaggctcccaatccccaactggccatgagggtggcactatacagctgaagtcacccttgcaggtcctaaagctaccagtcatctcacagaatattcacgctccaattgccaatgagtcagccagttcccaagccttgataacctctatcaagcctaagaaagcttccaaggctaagaaggctgcaaataaggccatagctagtgccaccgaggtctcgctggctgcaactgccacccatacagctaccacccaaggccaaattaccaatgagacagccagtatccacaccacagcagcctccatccgaaccaagaaagcctccaaagccaggaagacaattgctaaggtcataaatacttgacactgagcatatagaggctctaaatgtcactgacgcagctaccaggcagattgaggcctcattagaaggctatcaggcccaaaaaatccaagggcaagaaggctgccaacaggggcccaaattctgtctctgagatctctgaggccccacttgccactcagatagtcacaaaccaagccctggcagccaccctgcgggtcaagagagggtctagggctcggaaggctgccactaaggctcgggcaactgaaagccaaactccaaatgctgaccaaggggcccaggccaagatagcctctgctcagaccaacgtaagtgcccttgagactcatgttgctgctgctgtccaggccctggcagatgactatctggctcagttgagcctggagcccacaaccaggacccggggcaaaagaaaccgaaagtccaagcatctgaatggggatgagagaagtggcagtaattacaggcggatcccatggggccggaggcctgcaccaccgcgagatgtggccattttacaagaaagggctaataagttggtgaaatacctgttggttaaggaccagacaaagatccccatcaaacgctcagacatgctgagggatgtcatccaagaatatgatgaatatttcccagaaatcattgaacgagcaagctacactctggagaagatgtttcgagtcaatctgaaagaaattgataagcaaagtagcttggagtattctcatcagcactcaggaatcctctgcaggcatactgggaacgaccaaggacacacccaagctgggtctcctcatggtgattctgagtgtcatttttatgaatggcaacaaggccagtgaggctgtcatctgggaggtgctgcgcaagttggggctgcgccctggggtgaggcattcactctttggggaagtgaggaagctcatcacagacgagtttgtgaagcagaagtacctggagtacaagagggtccctaacagcagaccacctgaatatgagttcttctggggcttgcgctcctaccacgagactagcaagatgaaagtcctcaagtttgcatgcagggtgcagaagaaagaccccaaggactgggctgtgcagtaccgcgaggcagtggagatggaagtccaagctgcagctgtggctgtggctgaggctgaagccagggctgaggcaagagcccaaatggggattggagaggaagctgtggctgggccctggaattgggatgacatggatatcgactgcctaacaagggaagagttaggcgatgatgctcaggcctggagcagattttcatttgaaattgaggccagagcccaagaaaatgcagatgccagcaccaacgtcaacttcagcagaggagctagtaccagggctggcttcagcgatggtgctggtattagcttcaatggtgcacccagctccagtggtggcttcagtggtggacctggcattacctttggtgttgcacccagcaccagtgccggcttcagcaatacagccagcattagctttggtggtacactgagcactagctccagcttcagcagcgcagccagcattagctttggttgtgcacacagcaccagcactagtttcagcagtgaagccagcattggctttggtggcatgccttgtaccagtgccagctttggtggtggagtcagctctagttttagtggcccactcagcaccagtgccactttcagtggtggagccagctctggctttggaggcacactcagcaccacggctggctttagtggtgtactcagcactagcaccagctttggcagtgcacccacaacgagcacagtcttcagtagtgcgcttagcaccagcactggctttggaggcatactcagcaccagtgtctgttttggtggctctcccagctccagtggtagctttggtggtacactcagtaccagtatctgcttcggtggctctccctgcaccagcactggctttggaggcacacttagcaccagtgtctcctttggtggctcttccagcaccagtgccaattttggtggtacactaagtaccagcatctgctttgatgggctctcccagcactggtgctggctttggtggtgctctcaacaccagtgccagctttggcagtgtgctcaacaccagtactggttttggtgggtgctatgagcacaggtggttgactttggcggtacactaagcaccagtgtctgctttggtggctctcctgggcaccagtgtcagctttggcagtgcactcaacaccaatgctggttatggtggtgctgtcagcaccaacaacttgactttggtggtacactaagcaccagcgtctgttttggtggctctcccagcaccagtgctggctttggtggtgcactcaacaccaatgccagctttggctgtgccgtcagcaccagtgccagcttcagtggtgctgttcagcacaggtggctttgctttcagtggtgcaccaatcaccaaccctggctttggcggtgcatttagcaccagtgctggcttcggtggggcacttaagtacccgttgcttgactttcggtggtactcccagcaacagcattggctttgggtgctgctcccagcaccagtgtcagctttggtggtgctcatggcaccagcctctgttttggtggagctcccagcaccagcctctgctttggcagtgcatctaatactaacctatgctttggtggccctcctagcaccagtgcctgctttagtggtgctaccagccctagtttttgtgatggacccagcaccagtaccggtttcagctttggcaatgggttaagcaccaatgctggatttggtggtggactgaacaccagtgctggctttggtggtggcctaggcaccagtgctggcttcagtggtggcctaagcacaagttctggctttgatggtgggctaggtaccagcgctggcttcggtggaggaccaggcaccagcacttggttttggtggtggactgggcaccagtgctggcttcagtggcggactgggcaccagtgctgctttgggtggtggactggtcactagtgatggctttgggtggtggactgggcaccaatggcttagtttcggcagcacacttggcaccagtgctggctttagtggtggcctcagcaccagcgatgggctttggcagtaggcctaatgccagcttcgacagaggactgagtaccatcattggctttggcagtggttccaacaccagcactggctttactggcgaacccagcaccagcacgggcttcagtagtggacccagttctattgttggcttcagcggtggacccaagcactggtgttggcttctgcagtggacccaagcaccagtggcttccagcggtggaccgagcacaggagctggcttcggcggtggacccaaacactggtgctggctttggtggtggaccgagcaccagtgctggctttggcagtggagccgccagtcttggtgcctgtggcttttttgtaagggctagtaagggtttcaaatttattccccatgtttacagataccgcctaataaattgccagtagtcccttcccatggagcccaaagtacatcccttggaatctttgtccacacagcagtcaaggcagttatggccaatcagctgagggtgtcatgtgatggaaaaaaatctgttgctgggtcctggcttattgtttgctttctgtgtgctgtcatattttggtatccagagttacattaaatttgcaaaatgaaaaa

SEQ ID NO: 113493 - DNA, 2527 bp, Homo sapiens
  misc_feature (1)...(2527): n = a,t,c or g
acaggtgacgctcctcccgcctgcctagcagagctccaaggcgcacatccgcagtcagccacctcgcgcgcgcctccaggagcaaggatggagaggctgactctgaccaggacaattgggggccctctccttacagctacactcctaggaaagaccaccatcaatgattaccaggtgatcaggatgcccttctgtcatctgtctacctacagcctggtttgggtcatggcagcagtggtgctgtgcacagcacaagttgcaagtggtgacccaggatgaaagagagcagctgtacacacctgcttccttaaaatgctctcatgcaaaatgcccaggaagccctcattgtgacatggcagaaaaagaaagctgtaagcccagaaaacatggtcaccttcagcgagaaccatggggtggtgatccagcctgcctataaggacaagataaacattacccagcttgggactccaaaactcaaccatcaccttcttggaatatcaccctggaaggatgaagggttgttacatgtgtctctttcaaatacctttggttttggggaagatcttcagggaacggccttgccttcaccgtctatgtacagcccatagtatcccttcactacaaattctctgaagaccacctaaatatcacttgctctgccactgcccgcccagcccccatggtcttctgggaaggtccctcggtcaggggattgaaaatagtacagtgactctgtcttcacccaaatggggaccacgtctgttaccagcatcctccatatcaaagaccctaagaatcatgtggcgaaggaggagatctgccaggtgctgcacctggggtactgtgaccgactttaagcaaaccgtcaacaaaggctattggttttcagttccgctattgctaagcattgtttcccgggtaattcttctcgtcctaatcttcaatcttactgtactgggaaacgtcaccgggaatcagggaccgaggagcccttaaattaagttcacacaggcaccctggaaagttgatttccctggtctacttgaatttgacaccaagagaaaagccaggaggaaaaggggcccattcctcccaaaggaccctgaaagagcaaaaagaggtgggaccgaaagcccttaaggatccccacgactttttactgcccatcctgagcctacctcagtgtttgaatccccaagaggaagtcagtttacctctcaggtctgttgtaggacttgattttgtaaagcaatgcccatgttatgtggttgaaagggcactggacttagttagtatcaggagcactgatgctcacagaactgacttgggctcctactggtggggacctctgttaagtcacttttacctcatccaaaagtataaaggaattgggaccaaattaattttaccacatagctcctaaaacctttaattttaaaattgtaattcccaggaaaaaaaaaggggattaagccaaagggggggaaggatttgaaagagagagagaagaaagaatacagagagcttaccttttgcctttctgttgatgttacatctcttcttcctatgttcttagggtctatgagtctgtttccccatcatttgggtatctaagtccagttcctgcttactgctttgccaaataagctgggccttgctaagaatccttgggtttcactgctgttcttcatgtgccttctttggaggtttactccaacacaaatagggactgaatttattgtgaaggtaacattgggcaatcttaacttattcattttaacttatttttataggctaggataaatattgttaggtcttaggacaataggctcacattttttgagaagcatgccctccctgtcccatttgtcttataacatgacccagcccctattttaccgtcattcctaaattcagccctcatataatgaaaatacattaatgaaaaacagatgtttaggagatttcctgtatagccagtcagcccaattccatatgcctttgtcctctgactggccttctttttcccatgccgttaacttttccccaatagccagaggaggcaaatatgagcatacaatccctttgttcctaaagatattgttcccagcctagtggaatgatgttgaatcctttaataaccataattagttgctttttcagtatcttctgctttgtctgtgtctatccgagtggcctaggaattaaagtgtaagttgttttcgtctgttaaattgggatatttatatatatatatataggcaagattttcatgtgttatttaattctgtattgtttcttatatttgtaggtaaaatattgaaccaattaaaagtgttgactccaaatatttgggcttatgatattctcttggggaaatgtgggaaatgaatgataatccttgtcttttcccattcatatgtaaaaaccctcccctcctctctatgctttcccctcctaaaaaggatgagctggggctggggcgcggtgggntcaagnctgccaatcccagttactttgggggggt

SEQ ID NO: 113494 - DNA, 1071 bp, Homo sapiens
accgggtcgacgatttcgtcgtgctgctccctttgctggacatcttgaatgatgtttgctgtagccagcctttcctccttttatcactgaagtaaggccaggctgagctcctgagaaaataggtctgtagattcactgaaggactgagaaaagttaaaatttacatggcaaaggtgtgtcttctactgaacataataaaaatatttatgaatacactttagtatttttaggccttctcaaaactacttaaaagcagaatactttatctaattctaattactgaacaaataacccacacacatatggaaataaaatgaaccaacatgaagattagaagccaggcaagtaatctcccagctccactaaaacgtaaagtcatttaaaaggataacctgaatcttttcaacgctaaaccataaccaaacaacctctcaacaagaagccacagagcagggggggaaatcccggagagaatgtgatagcgctagtgccggtttgtttacagagactccagtaacaatcatgagtcagaaattcaagccaccagatgctttccaactaacagggaccaaatgggaccgttctaagatatcctaaaagatttgggagttagaggaggtaaactaagataattatattacaaagggtacaagaccacaagacaacaaccgactccggaattcttggacctccgccttccgtacaaggcccagccgcgcccgtccactgccaccaccaaacgccgccgccatcttacactgggccagcggccgccaccaccaccgcctccgctctcctgcggcttgcgctgtcgctggccacgctttccggccccgtttgcgacgatgtgcttcgaggaggactgaggggaaggagtggttcgcgcgagctcacggctcgcaaccctcctcgaaggacgcacaaggggcggggcttaaggccaacggaaaacagagcgagaggcgcctgcgcattaccgaagaggcaaagttgtttttgtagtttcttcgggcttgcttatcttgtgatactcaaaacaaatgcgagttaggggctacccagagttgtgat

SEQ ID NO: 113495 - DNA, 698 bp, Homo sapiens
cgaccaatcaggtagcaaagagggctcactaaaatccaacttaggctaaaagcagcacgtagagaaatagtcaaatcacatatcgcctgagagtccaggggtagggacaatgattgggatataaacccaggcatttgagcagtaagtgggcaaccccctttgcatcccctcccattgtatgggagctgttttcattctgttaaatcttgcacctgcacactcttttggtctgtgtttgttacagctcgagctgagctttcgctcactgtccaccactgctgttcactgctgtcccagacccaccattgacttccacccactggatccagcagggtgtccgctgtgcttctgatccagagaggtgtccattgccgctcccaatcgggctagaggctgaccattgttcctgcatggctaagggcccagggttcgtcctaattgagctgaacactagttgcttggttccacagttctcttccatgacccacagcttctaatagagctataccactcatcgcatggcccaaggttccattccttggaatccatgaggccaagaacccctggtcagagaacaaaaggcttgcagccatcttgggagcagcccacccccatcttgagagcggcccgtcgcatcttgggagctctaagaacaaagaccccctccaccccccgtaacatctggtggcccatatggg

SEQ ID NO: 113496 - DNA, 872 bp, Homo sapiens
  misc_feature (1)...(872): n = a,t,c or g
acctacgcacacgagaacatgcctgtgagtgctttggtccaggtttcggcggagatctcgctgttctggtcggaactctcccctcacgctgatttcggatcgtagagggtcctcatttaccctctgcacttcttaggacattaactccagggaccgcagcggcccacgggccacccgcatagacgggagcggagagggagataagatggcggcccagctgcgcagacaccaggggcggcgaggggcgagctctccccgctcgcaataggatctccttcatccctctccaggagaggaagaagaggaaaccacaagaagaaacggcctgggtggccaggagccccaatttcctactttcatgggtgttgaaatgcccaggatgctataamaatcaccactggtctttagccatggcacgaaacgggtagttttgtgtgttggttggctgctccactgtcctctgccaagcctacagggaggaaaagcaaggcttacaggagggctgttccttcaggagggaagcacgcactaaaaagcactctggagttcaagattgagtggggaaaccattcttcaattaaaccacattttggataataaactaaaatattaatattggggcgtccgttttatcttaaaggccccgttaaaccccgttgatcaccctcgatgggcccttttattggccacccttttgtggttggcccctcccccggcctttctttgaccttggagggggccactcccattgtcttttcttaaaaaaaggaggaaatggcttccctttgtcggagaaggggtcttttttttgggggngaccgcgangggcccccccccacgggcctcccaacagaaagggtgagtggcatctg

SEQ ID NO: 113497 - DNA, 1320 bp, Homo sapiens
cgcgcttccgagagtctgtaggagggaaaccgccatggacgatcagggttgccctcggtgtaagaccaccaaatatcggaacccctccttgaagctgatggtgaatgtgtgcggacacactctctgtgaaagttgtgtagatttactgtttgtgagaggagctggaaactgccctgagtgtggtactccactcagaaagagcaacttcagggtacaactctttgaagatcccactgttgacaaggaggttgagatcaggaaaaaagtgctaaagatatacaataaaagggaagaagattttcctagtctaagagaatacaatgatttcattggaagaagtggaagaaattgttttcaacttgaccaacaatgtggatttggacaacaccaaaaagaaaatggagatataccaaaaggaaaacaaagatgttattcagaaaaataaattaaagctgactcgagaacaggaagaactggaagaagctttagaagtggaacgacaggacaatgaacaaagaagattatttatacaaaaagaagaacaactgcagcagattctaaaaaggaagaataagcaggcttttttagatgagctggagagttctgatctccctgttgctctgcttttggctcagcataaagatagatctacccaattagaaatgcaacttgagaaacccaaaccctgtaaacccagtgacgttttccacaggcatcaaacatggtcaaacatattcacctggcaccttattcaccaagcttggaaggaagctctgtatgaataccagccactgcagatagagacatatggaccacatgttcctgagcttgagatgctaggaaagacttgggtatttaaaccatgtcagagctgcctcaccgacaggaccttgctggaggctatacttcttctcttgcttggtccacagggcactacaggatgcattcagtggggctttttctggcagcccagttaacccatttataggatttggaccttggagctgaaccagggagctagcaaaagtaaagcagacttataaaattatagctatgtgcagctgcacaacacagtccttccactagcagctgtggttaaaggattttataaggagaaaatttcagaactgaagttgagtaatataggggatatatatttgtgaaaaataatttttacttatatttttcagaggatttgacacgataagcctcatctgatggaagagaggaataaataattcacctatatgtgtttgaggttgtgacagacttataaaatctttttaaaaaataaagctataatttatattaaaaaaaaaa

SEQ ID NO: 113498 - DNA, 1262 bp, Homo sapiens
tttcgtcggaaatgagcggggcgtgggacgtgttgcgttttcctagctggcttacagggcggcggcggggtgtgtgtcctctgttaagagtgctactcgcccggggttgatctgtgcatgccactcctgggtcagacggtgaggtcggcgtctgcgaggacgcggcggtggagtagaagggcagccggagacaggcccggcgccccttccgaggctagacggccccagcttcgcggggatcatggcattgctggtggaccgagtgcggggccactggcgaatcgccgccgggctcctgttcaacctgctggtgtccatctgcattgtgttcctcaacaaatggatttatgtgtaccacggcttccccaacatgagcctgaccctggtggcacttcgtggttcacctgggcttgggcttgtatatctggccagaagctgggacatctttgcccccaaaagtctgccgccctccaggctcctcctcctggccctcagcttctgtggctttgtggccttcactaaccctttctctgcagaacaacaccataggcacctatcagctggccaaggccatgaccacgccggtgatcatagccatccagaccttctgctaccagaaaaccttctccaccagaatccagctcacgctgattcctataactttaggtgtaatcctaaattcttattacgatgtgaagtttaatttccttggaatggtgtttgctgctcttggtgttttagttacatccctttatcaagtgtgggtaggagccaaacagcatgaattacaagtgaactcaatgcagctgctgtactaccaggctccgatgtcatctgccatgttgctggttgctgtgcccttctttgagccagtgtttggagaaggaggaatatttggtccctggtcagtttctgctttgcttatggtgctgctatctggagtaatagctttcatggtgaacttatcaatttattggatcattgggaacacttcacctgtcacctataacatgttcggacacttcaagttctgcattactttattcggaggatatgttttatttaaggatccactgtccattaatcaggcccttggcattttatgtacattatttggcattctcgcctatacccactttaagctcagtgaacaggaaggaagtaggagtaaactggcacaacgtccttaattgggtttttgtggagaaaagaatgttgtcccaagaagataaaaaatattgttaagtgtgcaagttattaaa

SEQ ID NO: 113499 - DNA, 2099 bp, Homo sapiens
  misc_feature (1)...(2099): n = a,t,c or g
acgcccacgcgtgcgtaacgctggagcataccgctctggtgccgctgcaaccgtcagacatggttgagctcatgttcccgctgttgctcctccttctgcccttccttctgtatatggctgcgccccaaatcaggaaaatgctgtccagtggggtgtgtacatcaactgttcagcttcctgggaaagtagttgtggccacaggagctaatacaggtatcgggaaggagacagccaaagagctggctcagagaggagctcgagtatatttaccttgccgggatgtggaaaagggggaattggtggccaaagagatccagaccacgacagggaaccagcaggtgttggtgcggaaactggacctgtctgatactaagtctattcgagcttttgctaagggcttcttacctgaggaaaagcacctccacgttttgatcaacaatgcaggagtgatgatgtgtccgtactccaagacagcagatggctttgagatgcatataggagtcaacccctcgggtcacttcctcctaacccatttgccgctagagaaactcaacgaatcagcccccttcacgatactaaatgtgcccttccctcgaccatcaccgggcaaaggatccacttccataacctgcagggcgagaaattctacaatgcaggcctggcctactgtcacagcaagctagccaacatcctcttcacccagggaactggcccggagactaaaaggctctggcgttacgacgtattctgtacaccctggcacagtccaatctgaactggttcggcactcatctttcatgagatggatgtggtggcttttctcctttttcatcaagactcctcagcagggagcccagaccagcctgcactgtgccttaacagaaggtcttgagatttctaagtgggaatcatttcagtgactgtcatgtggcatgggtctctgcccaagctcgtaatgagactatagcaaggcgggctgtgggacgtcagttgtgacctgctggggcctcccaatagacttaacaggccagtgccagttggacccaagagaagactgcagcagactacacagtacattcattgtcaaaatgattctcctttcaaggtttttcaaaacctttaggcacaaaagagagccaaaaccttccagccttgcctgcttgggtgtccagtttaaaactccagtggaactgccagattcgtctaaatgtctgtcatgtccagatttactttgcttctgttacttgccagagttactagagatatcataatacggataagaagaccctcatatgacctgcacagctcattttccttctgaaagaaactactaccctgggagaatctaagctatagcagggatgatttatgcaaattttgaacttagcttctttggttccacaattccagttcctcccaaccaaccacgtcttcacttcaagagggccacactgcaaccctcagccttaaccatgaataacaaaggactggctccagggagccagggccttgccccagggcatgggtggatcaccggagggtcagttagttccagaaccaagcttggcccaacatgggtgaaacccccacctctacttaaaaattgtggtatatctttggtgtgtcttcctggtttatgtggtgcccaagggagtatttttcacaaagtttcaaaaccagccacgagtaatcagagatgggagcaaacccagtgccaatccagtcttttatgcaaatgaaaatcctgccaaagggaaagccagattcggtatattgttggtacttcccccccaggggcccctgggttgcntggccaggggaagaagtaaaaaaaggagaaggagaatactggaagataatgcgacgaaaatgaagggactacgttaaggattaactagccctttaaggattaactagttaaggattaatagcaaaagatattaaatatgctaacatagctatggaggaattgagggcaagcacccaggactgatgaggtcttaacaaaaacgcagtgcatatctttgtgtggcttcctggttatgcgtgccaagggagtattttcacaaagttcataacagccacagtaatcagagatg

SEQ ID NO: 113500 - DNA, 1120 bp, Homo sapiens
tttggttgagctctcactgacggaccggtacgtaattgccggatcgacgcacgcgttcggagcgcaccccgcccccgtcgccatcttcccgaccgcgagccgtccaggtctcagtgctgtgccccccccagagcctagaggatgtttcatgggatcccagccacgccgggcataggagcccctgggaacaagccggagctgtatgaggaagtgaagttgtacaagaacgcccgggagagggagaagtacgacaacatggcagagctgtttgcggttggtgaagacaagtgcaagccctgggagaaggcctacatcaaggactgtgtcttcccccagcgagtaagagcccacgtcctgggagcctgctcccggctcctgggtccaattacaaagcttgcctttcaggcaggttcccaggggcttcagaaaatcaattttattgatgtaattctggcgcaagtttccgcctgggactttcccgctggccatgggagcgggattcaaaggagggaccggcccatcaccatcaaggaccgacaaggggcaaccttcaacccgcttgcatcgcagacgtgggtcttcgctctttcatcacggttcatggacaagctgcgcctggagatccgcgcccatggatgagatccagccccgaacctgcgaagagcctgcatggagaacccatggcaccgcatgacgccacctcccacccggactttgagggcccgccagacgggttcaccaagtggctgcaagaccctgagcggcatgtcggccgtcagatgagctgggacgactcacaggtgcgtcagattgctgttcgacctggaagtcagcctacaacggccttcaaccgccttcctgcatgcctgagccctggggcactagcccttttgcacagaagggcagagtctgaggcggatggctcctggtcccctgtccgccacgcaggccgtggtcatccagcacaactcactgtctgcagctgcctgtctggtgtctgtctttgggtgtcagaactttgggggccgggcccctccccacaatacaagatgctcgtccgaccttcgaaaaaaaaaaattaaaatttaaataaaaaaagtcgtatcgatgtcgagcgatc

SEQ ID NO: 113501 - DNA, 1129 bp, Homo sapiens
gttcccaaaagagaaagtttaatgactcattttcccccttttactcctttgagggtacaggataatgcccttatctattttcataataattataatgatgatgataatgaaaactaacgtttgccaagtgctaatactgtgtcaggatcctcataacagcccagggaggtagaaaccatcacaatgtccactgtccagatgagaaaatggaggctaagggtatttaaagaggttgcccaagaacaacaaaccttttaaatggcagactggtgtgtataatctacgcagggttcacatctatggaacactttattttaaattcttttaataatattattatttttcagctgagtctgggtctcactctgtcgcccaggctggaatgcagtggcatgatcacagctcactgcggcctccaactcctgggctcaagtgattctcctgccccagcctcccgagtagctgggactacaggcttgcgccaccatgcccggcttatagggcactttagatggaaacaaatgactggatctttaactcctacctttctctcctctcttcctgtaatgttgttactgaaggcaggaagggagactccttggataaagagcagagcaagagcctcaaagtggtctttgtgagccaccctggactactggttcagtagagggttgagtcaagcaatatttgaggacgggatataaacagtatttcttaaagttgtcaccaatttttcccccgatgaggccattccagacccaaattagtcataacagagccaggacaataatcacatctcctgattctgagcctgaatgcttcccacaggactgcgtcgctcaccattgctatgaggtccattgtgggggagagttgccactgggattccacctcaagggctggggaccaagcctccaggattcctcttgagactcctccactatttcattaccatcccgccacatcttttagtgctatgccctggttccctttggaatcctctcaatcccaaagaaagcctcctaccacctctaaggcatccaaggtgttaaaaagggccccaggacccgacagggcatccttctcattttaaaaaacaactgtggcctggtgggtacgtgctcccggg

SEQ ID NO: 113502 - DNA, 6160 bp, Homo sapiens
cactaacgctcttcctagtccccgggccaactcggacagtttgctcatttattgcaacggtcaaggctggcttgtgccagaacggcgcgcgcgcgacgcacgcacacacacggggggaaacttttttaaaaatgaaaggctagaagagctcagcggcggcgcgggccgtgcgcgagggctccggagctgactcgccgaggcaggaaatccctccggtcgcgacgcccggccccgctcggcgcccgcgtgggatggtgcagcgctcgccgccgggcccgagagctgctgcactgaaggccggcgacgatggcagcgcgcccgctgcccgtgtcccccgcccgcgccctcctgctcgccctggccggtgctctgctcgcgccctgcgaggcccgaggggtgagcttatggaacgaaggaagagctgatgaagttgtcagtgcctctgttcggagtggggacctctggatcccagtgaagagcttcgactccaagaatcatccagaagtgctgaatattcgactacaacgggaaagcaaagaactgatcataaatctggaaagaaatgaaggtctcattgccagcagtttcacggaaacccactatctgcaagacggtactgatgtctccctcgctcgaaattacacggtaattctgggtcactgttactaccatggacatgtacggggatattctgattcagcagtcagtctcagcacgtgttctggtctcaggggacttattgtgtttgaaaatgaaagctatgtcttagaaccaatgaaaagtgcaaccaacagatacaaactcttcccagcgaagaagctgaaaagcgtccggggatcatgtggatcacatcacaacacaccaaacctcgctgcaaagaatgtgtttccaccaccctctcagacatgggcaagaaggcataaaagagagaccctcaaggcaactaagtatgtggagctggtgatcgtggcagacaaccgagagtttcagaggcaaggaaaagatctggaaaaagttaagcagcgattaatagagattgctaatcacgttgacaagttttacagaccactgaacattcggatcgtgttggtaggcgtggaagtgtggaatgacatggacaaatgctctgtaagtcaggacccattcaccagcctccatgaatttctggactggaggaagatgaagcttctacctcgcaaatcccatgacaatgcgcagcttgtcagtggggtttatttccaagggaccaccatcggcatggccccaatcatgagcatgtgcacggcagaccagtctgggggaattgtcatggaccattcagacaatccccttggtgcagccgtgaccctggcacatgagctgggccacaatttcgggatgaatcatgacacactggacaggggctgtagctgtcaaatggcggttgagaaaggaggctgcatcatgaacgcttccaccgggtacccatttcccatggtgttcagcagttgcagcaggaaggacttggagaccagcctggagaaaggaatgggggtgtgcctgtttaacctgccggaagtcagggagtctttcgggggccagaagtgtgggaacagatttgtggaagaaggagaggagtgtgactgtggggagccagaggaatgtatgaatcgctgctgcaatgccaccacctgtaccctgaagccggacgctgtgtgcgcacatgggctgtgctgtgaagactgccagctgaagcctgcaggaacagcgtgcagggactccagcaactcctgtgacctcccagagttctgcacaggggccagccctcactgcccagccaacgtgtacctgcacgatgggcactcatgtcaggatgtggacggctactgctacaatggcatctgccagactcacgagcagcagtgtgtcacactctggggaccaggtgctaaacctgcccctgggatctgctttgagagagtcaattctgcaggtgatccttatggcaactgtggcaaagtctcgaagagttcctttgccaaatgcgagatgagagatgctaaatgtggaaaaatccagtgtcaaggaggtgccagccggccagtcattggtaccaatgccgtttccatagaaacaaacatccccctgcagcaaggaggccggattctgtgccgggggacccacgtgtacttgggcgatgacatgccggacccagggcttgtgcttgcaggcacaaagtgtgcagatggaaaaatctgcctgaatcgtcaatgtcaaaatattagtgtctttggggttcacgagtgtgcaatgcagtgccacggcagaggggtgtgcaacaacaggaagaactgccactgcgaggcccactgggcacctcccttctgtgacaagtttggctttggaggaagcacagacagcggccccatccggcaagcagataaccaaggtttaaccataggaattctggtgaccatcctgtgtcttcttgctgccggatttgtggtttatctcaaaaggaaggaccttggatacggactgctgtttacaaataagaaggaccaccattgaaaaactaaggtgtgtgcgcccttcccggccaccccgtggtttccaaccctgtcaggctcacctcggccaccttggaaaaggcctgatgaggaagccgccagattcctacccaccgaaggacaatcccaggagattgctgcagtgtcagaatgtttgacatcagcagacccctcaccggcttgaatgtccctcagccccagtcaactcagcgagtgcttcctcccctccaccgggctccacgtgcacctagcgtccctgccagacccctgccagccaagcctgcacttaggcaggcccaggggacctgttaagccaaacccccctcagaagcctctgcctgccagattcctctgggccagaacaacttcgggttcactcatggccttggccagggaccccagggacaatgggagactggggttccgcctggcacccctcagacctgctccacaatatccacaccaagtgcccagatccacccacaccgcctatattaagtgagaagccgacaccttttttcaacagtgaagacagaagtttgcactatctttcagctccagttggagtttttttgtaccaacttttaggattttttttaatgtttaaaacatcattactataagaactttgagctactgccgtcagtgctgtgctgtgctactggtgctctgtctacttgctcaggtacttgtaaattattaatttatggcagaatgttggatttacagtgcagtgcgctgtagtaggcatttttaccatcactgagttttccatggcaggagggtttgttgtggcttttagtattttagtgaacttgaaatatcctgcttgatgggattctggacaggatgtgtttgctttctgatcaaggcccttattggaaagcagtcccccaactacccccagctgtgcttatggtaccagatgcagctcaagagatcccaagtagaacccccagttgattttctggattccccatcctcaggccagggccaaggggcttccagggtcccaggctgtgtttggctttccagggaggccctgtgccccttgacaactggcaggcaggctcccaggggacacctgggaggaaatctggcttctggccagggaagctttggtgagaacctggggttgcagacaggaatcttgaaggtgtagccacaccaggatagagactggaacactagacaagccagaacttgaccctggagctgaccagccgtgagcatgtttggaaggggtctgtagtgtcactcaaggcggtgcttgatagaaatgccaagcacttctttttctcgctgtcctttctagagcactgccaccagtaggttatttagcttgggaaaggtggtgtttctgtaagaaacctacctgccccaggcactgcaaaccgcccaccctcccctatacctgccttggagctgagcaaatcaccacaaactgtaatacaatgatcctgtattcagacagatgaggactttccatgggaccacaactattttcagatgtgaaccatttaaccagatctagtcaattcaagtctgtttactgcaaggtttcaacttattaacaattagggcagactctttatgcttgcaaaaacttacaaccaatgggaatgtggatgttcatggggtatagttcatgtctggctatcattatttcgtaggatattgggacaaaggaaccttctcttatgggggcatcctctttttcccaacttgggctggcagggaatcttttaaaagatgctttttaacagagtcttgaacctattttctttaaaacactttgccaacctacctgttgagcatcacagaatgtgataagggaaatcaacttgcttatcaacttcctaaatattatgaggatgctgggcttggggcagcatcccccttggaactctttcacttctttcaaatgcctggactagggggagccatgttttcacaagggtcttttaaagtgactaatggcatgagaaatacaaaaatactcagataaggtaaaatgccatgatgcctctgtcttctgggactggtttttcacattaggaaggacaattgacaacagttacataattcactctgagtgttttatggaggaaagcccttccttttggggggtcaaaccagttttcccttatgctttgaaaaccagaaaaaatatggtacccaagaatccttgggttggcccctccccagaaaaccaaaacctgcatttccacctttccccgggtgttccccccactgtatcctaggcaacatagtattccatgacctatggataaacctaaacacgtgacacaaacacacacaaaaggggaaccccagctcttaatacattcccaactccgtatagcctggcatctgtttatttctatagttatttaagttcttttaaattgttaaggccatgctgggaaaataatactggctgagatacatacagaattactgtaactggattacacttgggtaattggacctaaagccaaacatatatatacctattaaaaaggtttacagaattttatgggtgcattacgtgggcattggtccttttagatgcccaaatcccttagatctgggcatgttagcccttcctcccaattataagagggatatgaactgagtttttcctttgttgtttggttcttagctggtaattcctatgcttctatttccagagagccaggagagttttgatatttaaaaggagggtttaaaactggtgatctttatgccaatgtcatcaatgggccaccttaggggccatgggcctgattgaccacattcttatctctacagtacctaatgtgttaattatagagccatgccattttatttctgaataagaacatatttaaactaatattcccttacaatatggacagtattaatccttccaagatgccagtatttatcaagtgaagcatatttagcagcaaattccattttaacataacttaggaaccaataaccagggtgttttgtggttgggggaggcacggggtggagtattcttttttatatcctcaaaacaaaaaaaatcaatacttatatttcaatggcaatctagtatttttttaaaagactgtataggcatgaataatagaggtggtttgagttttgtagggccatcacctggaaagtcaatgtgactagacaccaaagtagcccagaggctacttttcttcctacagcttattatagttgtaggttcctatgaccctcaacttccatgggttccccggcaattcccgcctgaaaaggtttgtcctccctgaaattttttaagtttgttttccctgacacatgtaatcagatgtgtagcaaccgagggaaacgaagcctaacattctccattgtggaaatacacacaggaggttacacttcacagcgtgggatttttccagcttacacatgtggggatgacatcacagaaaccgacgaaaagcagtcaaattaaactgtaggagagtccaatactcctgacgagtctcgggggggggacatttttatgccttcttaactttatgagaattcttcaggtctgaactataggccattgttcccaggcaaatcaatacatcaatgcatcctca

SEQ ID NO: 113503 - DNA, 1281 bp, Homo sapiens
gccctgcaggggcgccgagatgtgggagctgctggccgcggcgtgggcagttcaggggctgggcggctgagggtgcaaatagctatgggcaacttggcctcggccataaggaagatgtgctgttgccccagcaactggaatgacttctgtaaacccaggagtgtcaggaggatcacaggaggagggggccactctgcagttgtcacagatggaggagacctctttgtttgtggcctgaacaaagatgggcaactggggcttggtcacacagaggatatcccatattttacccccctccaaatccctctttggctgtcccatccaacaggtggcctgtggctgtgattttacgattatgctcacagagaatgggcaagttctatcatgtggatccaactccttttggccagttaggagttcctcatggacctcgaagatgtgtgggttccccaggccattgagctccataaagagaaggttgtttgtattgctgctggacttaggcatgcagtagctgctacagcgagtggcatcgtgttccagtgggggactggtttggcatcatgtggacgacggttgtgccctgggcagactcttccattgtttttcacagcaaaggaaccaagcagagtgacaggtctagagaattctaaagcaatgtgtgttcttgctggctcagaccactcagcttcattaacagatgcaggagaggtgtatgtttggggaaagcaacaagcatggggcaactggctaatgaggctgctttccttcctgtgccccagaaaatagaagcacattgtttccagaatgaaaaggtcactgccatctggagtggatggacacacctggttgctcagacaggtctcttgtggctcagaagcataattttggcaataattggtggagtgtgttactcttggggctgtgaatgagcatggcatgtgcggagatggcactgaagccaacgtctgggccccaaagccggtgcaggctctgctgtcaatcgtcaggactccttgtgggctgtggggctggccacttccttggccctctgccagcatgccagctcaccctgcattggaccaggaccccaaggacacctacctttccccacatgccatcgaggacactgaatctcagaaagccatggaccaaagagagaaactggaaggaaagacaatcagaaacttcaacccaaagccaatctgactggtccagaaatgggggactgtgtatagagaatctttaataaagttggcttttcccaccaaaaaaaaaaaa

SEQ ID NO: 113504 - DNA, 2172 bp, Homo sapiens
aatccagagaagtgagtggtaatttccaacttaccacagtggcaatcagtcactatctgctcatctgcacactggtgccaccaagggtcctgcatccagtcttctgcatgaacacctctggaagccgatagcccgcagcgctcggcttcctggtaattcttcacctcttttctcagctccctgcagcatgggtgctgggccctccttgctgctcgccgccctcctgctgcttctctccggcgacggcgccgtgcgctgccgacacacctgccaactgcacctatcttgacctgctgggcacctgggtcttccaggtgggctccagcggttcccagcgcgatgtcaactgctcggttatggggaccacaagaaaaaaaagtagtggtgtaccttcagaagctggatacagcatatggatgaccttgggcaattctgggccatttcaccatcattttacaaccaaggctttgagattgtgttgaatgacttacaagtgggtttgcctttttttaagtataaagaaggaggggcagcaagggtgaccacttactgcaacgagacaattgactgggtgggtgcatggatgtgtttgggccggaactgggctttgtttcaccggaaagaaggttggggactgcctctgaggaatgtgtatgtcaacacagcacaccttaaggaattctcaggaaaaagtattctaatagggctctacaagtatgatcacaactttgtgaaaggctatcaatgccattcagaagtctttgactgcaactacatacatgggaatatgagactcttacccctgggagatatgattaggagaaagtggtgggccaccagtccgaaaaatccccagggcccaaacctgcaccactgactgctgaatacagccaaaagattttttgcatttgccaacatcttgggactggaggaatgttcatgggatccaattttgtcagtcctgttcgaaaccaagcatcctgtggacagctgctacttcatttgacttctatgggtatgctagaaggcgaggaatccgtatactaaccaacaattctcagaccccaatcctaagccctcaggaggttgtgtcttgtaggccaggtatgctcaaggctgtgaaggcggacttcccataccttattgcaggaaagtacgcccaagattttgggctgggtggaagaagcttgctttcccctacacagggcactgattcttccatggcaaaatgaaggaagactgctttcgttattactccctctgagtaccactatgtagggaggtttctatgggaggctgcaatgaagccctgatggaagctttgagttggtccatccatggggcccatgggaggtttgctttttggaagtatatgatgacttcctccactacaaaaaaggggatcctaccccccacactggtcttaagagacccttttcaaccccttttgagcctgactaatcatgctgtttctgcttgtggggctatgggcactgactcagccctctgggaagggattacgggattgttaaaaaccagctgggggcaccggttggggttgagaatggctacttcccggatccccagaggaactgatgagtgtgcaattgagagcatagcagtggcagccacaccccaattcctaaattttaggggaaggcttcccagtattttcataaatggatctgcatccagttgtaaagggggaattgggtatatttcacagactgtaggactttcaacaagcatcttcagaagcttacaaaatagattttccatgaagatatttggtcttcagaatttaaaactgcccttaaattttaatatacctttccaatcggccactggccattttttttctaagtattccaatttaagtggggaatttttctgggaggtgggtcagctatggaagtaattaggagttttgcttaatcgatttgtaattcaaacatgctatattttttaaaatcaatgtgaaaacatagacttatttttaaagttgtaccaatccacaagaaaataagtggcaagtaattatcacaaacttttaaaatagatgctcatatttttaaaataaagttttaaaaataactgcattatggagtttatgtttacttcagggaatttttatcactgactcagtaagattcacttatgttacctatgtaa

SEQ ID NO: 113505 - DNA, 558 bp, Homo sapiens
  misc_feature (1)...(558): n = a,t,c or g
gttcctgctctcaacagcttgtaattttagtattattatcgtaagctcaattgtaggtactacttcttttctggactttcaggtgcttattacccgtgcaatttaagtggtatgagttgaggactaaatgtttcctataatcacatccctgataaaccccacaagttatggaaacctaacctatttccccctccctcctacaacttttcccccaactttatttttaatggaattggtttggaattcctgaattggttttggtaataagtggggacacagcaaggnccaggaaaagatttccgaaccaatccacctccagttattacagaggaagcccatggcatcatagttgtgtatgatgtgacagatcaggtaagttccaagaggagattgtgttacagtgaccaagtaggaagccattatttgattaatgtcagattcatttactacttcatatataagccatcagtattaattttatggcagaaaactttgtccactctcaaatataaatgtgaatcacttaaaagacattttgtttccctgaataaataaaag

SEQ ID NO: 113506 - DNA, 1823 bp, Homo sapiens
agcatccctccttcccaggacacactcaaagcgtcagagcggtccgctcttctcaagtcctattggctcaagtccatgcgtctcatggcactgccgggtgagaggcggaaaaaggccttcccaggcgcgagaagatgacgtcacagtagcccggccgggcgccgaggttgccttagggctctctgcccagtaacaggcatcgaacggtgcagactgcagacagccctccgtcagcagacgccgtcgaattggccatttgtcaattcttccttcaaggccggtgccgcattggagatcaggtgctggaacgaacatcccggtgctatgggtgcaggaggaggacggcagcaaccgcaagcagcagccttcaggtaataatagacgtggatggaatacaactagccagagatattccaatgtcatccagccatccaatttctccaaatccacaccatggggggggcagcagagatcaagaaaagccatagtttcagttcttttgattctggagcttcaactatcaggaaggacggctttggattgtctgagaaccccatttgcttcacttagtcctgatgaggcagaaagatgaaaaggaaacttctgggaagggattgttaaaagatatgggaggtttgggaatcatcagggcagtggatgttttctgtttattcaccagtgaaaaagaaacctaatatttcaggttttacagacatttcaccagaggaattgaggcttgaataccataacttcttaaccagcaataacttacagagttatctaaattctgtccaacgtttaataaatcaatggaggaacagggtaaatgaactgaaaagtctaaatatatcaactaaagtagctttgctctctgatgtaaaggatggagtaaatcaagcagcacctgcatttggatttggcagcagtcaagcagcaacatttatgtcgccaggctttccagtcaataacagcacgcagtgataatgctcataactttagttttaaaacaaactctggatttgctgctgcctgttctggaagccctgctggttttgggagtttccccagcatttggagctgcagcctctaccagttcaggtatctctacttctgctccagcttttggatttgggaagcctgaagtcacatcggctgcatcattttcattcaaaagccctggcagcttcccagtttgggatcaccttgggatttcaggaatttccaagtttctttggcaacaggttcttgtcagagttccaatgggccccagccctttggaggtggcagttctgtgggcggtttttggtaatcccgggctcacattctcacatgcttttttataagccatcccagtgacacttttggaaatagcagcatatccactttctctgtcagcctcaagcagcatcattgccaacagataatgtgttattcgacacccgggaggttaaactaaccagtagaagaactggaacaatttcaatcaaagaaatttactctggggaaaaattccattaaagcctccacctctggaactttctaaactgtttaaaagggcaattttaaatacaaaaaagaatgatgtttaaaattgctttgagtgattcatacagaggatgtatatatgcatacatgtatatattcataaggaatataagcttcccatcaatagtgattttaaatttgatttttttcttaactctaaatatttaagtaaaaagtaacaaaaactctgcaagcaagggaatttttttgtactgtaattttgaatggaactgaaaaattgtgcacgaataaagtacttttctcatgccataaaaaaa

SEQ ID NO: 113507 - DNA, 3323 bp, Homo sapiens
  misc_feature (1)...(3323): n = a,t,c or g
gagtgatggttcatgcatttgaatattaaaggacaatttgacatttcgctagccataatgtggatgaaatacttcagaaatttttgagccattgtcactcaccaggtacgtaaaccatactatggtaagtactgcctagaaaatgccaaaggaaattttagaattcagagctccatattcattgacccagtcttttatgccttttatatgggnnttnaaagtgttngcaaantnggntggcttctagatgaacctgtcaggttggtgtaaggtaacaagccttagactgttaagataatgtcaacatgcccaagatcacccagtgaactttttaaagtatttaatcttcggcttcaggcagactttttaaaaaactagtttatactattcaaacatttaagtcctggaactcttctccaagataaatgtggctgactgctgagtgtcttctgtgatacatcttggcattttgaaacttcatgtttcggctggacaccggttnggacgcctgtaatcccagcactttgggaggccgaggcgagtggatcaccagaggtcaggagttcaagaccagcctggccaacatggtgaaacccccatctctactaaaaatataaaaaattagctgggcgtggtggtgggtgtctgtaatcccagttactcaggatgctgaggcaggagaatcgcttgaacctggggggcggaagttgcagtgagccaagatcacgccattgcactccggtctcagcaacaagaacgaaactccgtctcaaaaaaaagaagtatgtatcagtcttactggctgggtgcggtggctcacacctgtaattccagtactttgggaggctgaggcgggaggatcacttgagcccaggagtttgagaccagcgtaggcaacatagtgagaccccatctgtacaaaaaatgtcattaaattattagctgggcatggtgcatgtgcctgtagtcctagataccacagtagctagctgagctgggaggattgtttgagcccaggaattcaaggctacagcaagctatgattgtaccactgtaccccagcctgggcgacagagtgagaccctgtgtctaaagaaaaaaaaccatattgaatgtctagagtttccctgggcccaggactccaccatgctcttcaggcagagacagttactcccctaccccagtccagccccagagttcatacttgcaagttcccaggtgacaggtggggtcctgcctgctgttgtgacaacgaatgccgacttttaattcaaactatttaaatactggccccgccgttgactagcattgtgttctgggccaagtgatttaacttcttaaatgggaatagggttgttgtaaaggtccaaggaggtgatgtcttttgaagcttacatggcaggtactcagtttatactggttccctgtctgcctctatgccatagatgtccgctgtttcttcccagccaccccactgttgccacaactgcctcaggacaagctgggaagggcttgtctgggtagggaagatttatacttggttcaccaggttctttgggcgaacgcatagcctccttccaggcacttaccttctgacacaagccaggcctctgagtgcaccttggaggccagaggttcctgagtgcctcagggctcaggttatgattctgccctggagggccctctttcccagcttatttctccttcctttctcactgcccacaccccaggctttcctagagaacctattcctttgtttgccaatgggctctgggctggtcttagccagcttggccctggccgtggcagctcctttttttcccctagagtcccccacccctgggcttccaggtgggcatgaagctggaggctgttgaccgcatgaacccgtcccttgtctgcgtggccagtgtgaccgatgtggtggacagccgcttcctggtgcactttgacaactgggatgatacttatgactactggtgtgatcccagcagcccctacatccacccagtgggctggtgccagaagcaaggaaagcccctcacccctccacaagactacccagaccctgataacttctgttgggagaaatatctggaagaaactggggcctctgctgtccccacctgggccttcaaggtgcgaccccctcacagcttcctggtcaatatgaagctggaggctgtggaccgcaggaacccagccctgattcgcgtggccagcgtggaggatgtggaggaccatcggataaagatcacactttgataggctggacacatggctatgagttctggatcgacgctgaccacccatacatcctccctgccggctggtgcttcaagacaggacttcccctgcagtctcctctcggacccagagagcccagctctgcctcccctgggggctgtccccctctcagctataggagcctgccccacactaggacctccaaatacagctttcaccaccggaagtgccccactcctggttgcgacggctctggccatgtcacaggcaagttcacagctcaccattgcctctcaggctgcccactggctgagaggaaccagagccggctgaaagcggagctgtctgactcggaggcctcagcccgcaagaagaacctctcaggcttctccccaaggaagaagcctcgccatcacggccgaattggacgccctccgaagtatcgaaagattccgcaggaagatttccagaccctcacggcccgattgtcgtgcaccagtccctcttcatgtcagccctgtcggcccaccctgaccgctcactctcagtgtgctgggagcagcactgcaagctcctgccaggagtagcgggcatctcagcctcgacagtcgccaagtggaccatcgatgaggtcttcggctttgttcagaccctgacaggttgtgaggaccaagcacgcctcttcaaagacgaggtaaggtgcaagtgcagagtgggagacagagccggggtcactgtccttaagacggcaggaagcaggtgccctccccagcgtcacttctgctaaggagggacccgtgttgccccaccaggcaagaatagtcagagtgacccatgtatctgggaagactctagtctggactgtggcccagcttggggaccttgtgtgctcagatcatcttcaggaaggaaaaggcatcctggagacaggagtccattcactcctctgctctctacccactcatttgcttgccaaacttagctttgccagtgatagtcaatattaaagtgtacttttttcccctttaatccaatatagttgataattaaagtgtattttgaatgacaaaaaaaaa

SEQ ID NO: 113508 - DNA, 1306 bp, Homo sapiens
  misc_feature (1)...(1306): n = a,t,c or g
cggacagtgccccctagaccatagaccccacagagcataacactgaagcacaggatcccagatacggctctcccaaactttgttttgtttagtttaacatcgccaactcactgttttgtcttagaaacatgaaatcaaacagaatgagaatataattttttttggagttggagcaaatctagataagggtcacaattgccccaagacttgcccaatttgagctcatgctacacaattaaatatattccttaaatattgtgtgcttgcaacttttgattttgtaaatgggttcccacaggacaaaaatgagtcttaaacataaaattaaaccatatgaatgttaggttttttaggttaatttcagctgggtggtannnnnnnnnnnnnnnnnnnnnnnnnnnnnnnnnnnnnnnnnnnnnnnnnnnnnnnnnnnnnnnnnnnnnnnnnnnnnnnnnnnnnnnnnnnnnnnnnnnnnnnnnnnnnnnnnnnnnnnnnnnaaacaaaaaagagttaattccattatatttatttttacatacccagagtttgactaaaatataccagacaatctcctgtccccaaatccatgtccaagcaaggggagccacgttttctaagctcacagtttaaaggttaaagagacactctgaggaaaactcagggaaagaagctgatttgcatggacactaggcctgtcgttgattccctcatttcaaaagttgcatgtgccatgggaggcggagtctctgaggacatcctggctgtgcctcggcggctctggactccagctctacgcagagcgccttaacactgtactggaagaaatgggaaatcgcattgaggacttacagaaggaatgtcaatgacttaagtggtgcaagctggcattgaaaattctattaaagaacaaatgctgaagaccgtaactgcagcatgtctgtatttggagatggggcctcttacagaagtcattaaggttacatccggtcctgagggtggggccctcatccaacaggattcgtctttctgagaagagacgcaaggggctcgcctgctcttcccctccgtgcctgcaccagagaaggaggccatcggcaagccaaggagagccctccccagaaatcacacggaccagcaccttgatgtgggacttccagaaaccagaactgtgaaaaggcaagtttcctgttgtgttaaaccacccaatctgaagtattttgttatggcagtcctgggcagactaatacaatatgcaacacatttacaataaatatacaataaacttaaaaatgtggaatgtaaaaaa

SEQ ID NO: 113509 - DNA, 1970 bp, Homo sapiens
  misc_feature (1)...(1970): n = a,t,c or g
catttatattttccttaaagccttaaatttttgtagggaggttgtcccaataagtccccccccaaaagtaagggttcttttcaaagattcccaggtaacaagttttcccgttccggcgttgtaaaaaggcggccagggcctaggttataaaaccgccccctataaggaaaaaactaattcgttgcaagcccgggtaaacttgggcccctccaggggtcctttaaaacggccgccccnnnnnnnnnnncttaacgagtctcaaatttgtgattttgatggcaaaaatcacacagggaagaacaaaaattatccatgacaaactaggagtggaaatgggctgggagaccacagaaaatgggtgcccacagttcctgggatccctaatggaatccagaggtttccctcctaggaccctggcaaggtacccctaccgtgccctcctgggaaccccccccacccccggaggtcccaaggaaacccagtttgagaaccaaggctttaggccaaaggactttccttgcacaagaagggtgcagaatgtacaggggatgggttcagacagtgggccttcaaccttcaatggctttcattccttcctcctcccagcaaggctgtaaggaagcattggcttcttggcaaaggccgcttgcaggggggtgggcccaacagttttccgccatgcaagttgtgcaacttccaggggctggccacagcctagtggccaccttcatacttgtagcttggtacccttggtatcccaggctgcccatgaaggccaaacatatccttccaactcatctcctcctccttctcctcagtgccattgtggatgtaaacaacgtcaaagaagaaatatgggcactggaacattttccttccatgggctcccgtcaaaggaagaactggggctggcaaaggtgggaacggctgtaaaacaaaggatggtgcgggacccacataatggcgggggaatccgtctgccacgttcctctgtgaccggaagcttcagtttttctgctggatgaggcttgaaaagtccttcccagattgaaggtggaacaggaggcccgtctccagatcatagaggcagctacagagctcgcgggggtcggaggtccaggccacacagccaggccgtgtcatcgttcaccaccaaccagtgcaaactcgtggcttttgtcgatcttgtgttttgtccgcacgaacatctcaatcatcttctgggagacattgagggcgttggttttggagccgttgaacgacttccaagcttttggcaagtgacatttcctctgacaggtccaggcaagataatcacttttctctggacaagttgaccctctggtgtccgaaatttggacctcaggggctggcgggggcacctgcccaggacttagggccggctcctgaagtgttgaggctcccatcatcaagcactggcggcctcaccctcacccttcgctgcggctgcccacgctggcctgtgcccctactgcccggtcctcagccccttcaggattggagcgagtgcggggcccgaggctctgccgagtgctcctcttcctcctcctcctcttcagtggggctgctgggctctgccacttccatggctcctgtgtggctagatggaacacggacaggggcagccaccctcctccccttcggctcaccgtagcctgaacctccttctaaatcagccgccgactcactaggaagccgccatctttacagccggaagttgtacgcgcagccccgacgcctcctgggaaatgtagttcagcgggctgcagaacaagcagagacagaaactggttgaggctagaaagaacttggaaactgataggctgaaactgggttgggggtggggtttggagtgagagctgcctggagctgggtgcggcgggacctggaatgtgattggctacactggagcaaagtatgaaatgtgattggattaaaaaaattagtga

SEQ ID NO: 113510 - DNA, 535 bp, Homo sapiens
ttttttttttggaaacgcagtttagctgtcacccaggctggagtgcagtggtgtgatcttggctcatcacaacctccatctcacgggttcaagcaattctcctgccctctcttcccggagtaactgggattacacgcacgcgccactacatccggcctaatttttgtacttttattagtaaaaaatggggtttccacccatgttggtccaggctggtcctcgatatccctgaccttattgtttacaggcatgagccacccacgcccaggcacaaaagcttttaaggccgggagtagcgtgcagattgcttggccctgggatttttcagaccaactgaggcaacatgggcaaaaccttgtcttcttacaaaaaaaaaattaggaaaaattaggcagggcatgggtgggcttgcacctataggtcccagctacttcgggggggctaacctgggtgggattgcttatgaccggccattagaaactgcagtgagacatgattgcgtcactgcactatagcctgggtgacaaagagaaac

SEQ ID NO: 113511 - DNA, 1921 bp, Homo sapiens
  misc_feature (1)...(1921): n = a,t,c or g
tttcgtgtgaaacttggctgggggtgggggctcagattccgccccagaaagcactgaaagccacagcacgtacacccactccagggatctgcgcagcaccctgtggggcccagactacaggctgatggcggaggcttcgtgtgacccgagtgctgatgagcggcaagagatgctggggcccactgctcagtgtagcgtggaggacgaggaggaggccgtccacgagcaatgccagcatgacagagacaggcagcttttggcccacgacgaggagggaggcgggcatgttcccgagcggtcgaagcacgagatgctcctcagtctgaagctctcggaggcccctgaactggatgaggacgagggctttggcgactggttccagaggccagagcagcggcagcagcacgagggggcgcagggcaccttggacagcggagagcccccccagtgcatgagtcctgacggggagcacgaggacaggcccggcctgcatgcctacgaaaaggaggacagtgatgaagtccacctgggaggagttgagtcttgagcaaggaggggccaggcccagaggacactgtccaggacaacctgggggccgcaggggctgaggaggaccagaaggaccaccaaaatggtcaccaacccaaggacacccagccccttggtcttgggaggggaccatcgaacagagctcgcctcccctgagccctaccaccaaactcatcgacaggaccgagtcccctaaaccgctccatagagaagagtaacagtgtgaagaaatcccagccagacttgcccatctccaagattgatcagtggctggaacaatacacccaggccattcgagaccgctgggccggacccccaagctagcccgccaggccctccatagagctgcccagcatggttgtggccaagtaccaagagtcggtgggagacgggtgagggtacaggctcagtctgcggccaagactccgtcctgcaaggatattgtggctggagacatgagcaagaaaagcctctgggagcagaagggaggctccaagacctcatcaacaattaaagagcaccccatcttgggaaagaggtataagtttgtggccaccgggcatggggaaagtatgagaaggtgcttgtggaagggggcccggctccctagggcgtccaatctcggtttcctgggtcttgcaggttccagcccggctggcaccttccaatggtaccccaggggagatttccagccagacaccgcccccccccgggccctggctaaaaaagttgcttcctgttgccaggcatgacctacccctcgccctctttgaatgccatccgctggccacctccttttgctccctggacccctttagcgtctctgcccttccactctctgcccaccgcgcccccngcctccccacccagctccgcttcttgttacttgggggaggaaagaaactcctgatcattgggccaaagggacttaccccctgggagagggccaagttgcctttcttagggaagttaggtaggttgagggcacagcctgtgctagagagggtgggtcaccccccccagatccaaggggaaactgcaggtcgcctgttgccgcccaagggctgataacggccatgcaggatgcttgatgctcggtccgcccgctgcttgccgcccccccccccgccattttgtataataaagctccctgtgtattctcnnnnnnnnnnnnngggggggcggccgcttaaaaaaacccctgggggggcccagattaacgcggggcgggaagctaaaagctttttccttagaggggggccagataaaaaccccgctggtattttttgtaaaggacccttttttttgtgggggaaaaaaatggaacagcccccctccaaaaattaaacccttaagggcaaaaataaaattt

SEQ ID NO: 113512 - DNA, 392 bp, Homo sapiens
cctgccctgacttctcatatcttgcctaggaactccaggcttgtcttgggctcccaaagggatccccaactgctccctgcaccacaggtggctcctgtgcctgcgccggctcctgcaagtgcaaagagtgcaaatgtacctcctgcaagaagtgctgctgctcttgctgccccgtgggctgtgccaagtgtgcccagggctgtgtctgcaaaggctcatcagagaagtgccgctgctgtgcctgatgttgggagagccctgctcccagacataaatagagcaaccagtactaacctgggatttttttttttaactaccctgaccggtttgctacattcttttttctattcaatatgtgaaaggacaataaaacacttttggacttgaaaaaa

SEQ ID NO: 113513 - DNA, 2119 bp, Homo sapiens
  misc_feature (1)...(2119): n = a,t,c or g
ctctgccgagcctccttaaaactctgccgttaaaatgggggcgggtttttcaactcaaaaagcgctcaatttttttcttttcaaaaaaagctgatgaggtcggaaaaaagggagaagaaaccggcaccctctctgagaggcaacagaagcagcaattgtttcagcgaaaaaagcagcaagggagggagtgaaggaaaaaagcaaaaaagggggcgacacgcaagtgcctgtaggggtgaaaggagcagggaccggcgatctagggggggatcagctacaaaagaaactgtcactgggagcggtgcggccaaggaggaagcagtgctgccaggctctgctccagggcacagctggctggcggctgccctgtccgcagcaaaggggcacaggccggggaccgcgagaggtggcaaagtggcaccgggcgccgaggctgctgagcgctcgccgagacgcggaccggactggctgccccggaactgcggcgactctccctactcagaacttggcctacgtttcccaggactctccccatctccagaggcccccacaaaaccgggaaaggaaggaaaggacagcggcggcagcagctcaatgagtgcctacagcagaaagcctgaacgagctcggtcgtaggcgggaagttcccgggggctgcccagtgcagccgcaatgctgccgcgagctgccccagcagtccgggctccgtagacgctttccgcatcactctccttcctcgggctgccgggagtcccgggacctggcggggccggcatgacgggcttctcgggggcccgccgcacgcccggcagcctccggagacgcgcgccgagcccggctcccacggcctctgaggctcggcggggctgcggctgcctggcgggcgggctccggagctttcctgagccggcattagcccacggcttggcccggacgcgaccaaaggctcttctggagaagcccagagcactgggcaatcgttacgacctgtaacttgagggccaccgaactgctactcccgttcgcctttggcgatcatcttttaaccctccggagcacgtcagcatccagccaccgcggcgctctcccagcagcggaggacccaggactatcccttcggcgagacggatggaaaccgagccccctggaggacctgcccctgcagttctgcctcacacggctcaagtcaccaccgtgaacaagggaccctaaagaatggccgagccttgggggaacgagttggcgtccgcagctgccaggggggacctagagcaacttactagtttgttgcaaaataatgtaaacgtcaatgcacaaaatggatttggaaggacttccgctgcaggttatgaaacttgggaaatcccgagattgccaggggacttctacttaggaggtgctaatcccgatttgaaagacccgaactggtttccgctgtcattcatgatgcggccagagcaggtttcctgggacactttacagacttttgctggagtttcaagctgaatgttaacatcgaggataattgaagggaacctgcccttgcactttggctgcccaaagaaggcccacctcccggtggtggagtccctggtgaagcacacggcaaccaatgttggggcatcggaaccataagggggacaccgcctggtgatttgggcagggctctatgggaggaatgaggttgttagcccngatgcaggcaaaacggggctggggggagcccacaaatcttcaataaaacgtggggagggctccccccacgttgccctttactttatcaattaactgagaagctctcctgacttttaatgtcatttgttaaaatacagttctgtcatatgttaagcagctaaattttctgaaactgcataagtgaaaatcttacaacaggcttatgaatattagttaagcaacacctttttaacctgcaaaatctggtcctaacatgtaattgcagataactttgactttcttctgaatattttatctttccttggcttttcccttgcttccccttttgccaatctcaacacccaagttgaagactttgtttttaaaatggtttgtcctgatgcttttgtctaattaaaacactttcaaaacaggaaaaaaaaaa

SEQ ID NO: 113514 - DNA, 1676 bp, Homo sapiens
tttcgtctgaccagcaccatgcttctcctggtgacaagccttctgctctatgtcctgcatctggagacccatctggatacctgggtccatctgcatttcatctctaatgtttatgagggacccaataagcaccagccaacccaccagaagctcagagctcctcttgttctcacctccttttctgctggtaattcccatccacccattctacagatgagaaaacggaggctcagatacctccacagtttaacccaacgaccatccagatctgcgaacagtggcaccagcctctagtctcaatgtgaggtttgactccaggacgatgaatttaagctgggactgccaagaaaacacaaccttcagcaagtgtttcttaactgacaagaagaacagagtcgtggaacccaggctcagtaacaacgaatgttcgtgcacatttcgtgaaatttgtctgcatgaaggagtcacatttgaggttcacgtgaatactagtcaaagaggatttcaacagaaactgctttatccaaattcaggaagggagggtaccgctgctcagaatttctcctgtttcatctacaatgcggatttaatgaactgtacctgggcgaggggtccgacggccccccgtgacgtccagtattttttgtacatacgaaactcaaagagaaggagggagatccggtgtccttattacatacaagactcaggaacccatgtgggatgtcacctggataacctgtcaggattaacgtctcgcaattactttctggttaacggaaccagccgataaaatgggcatccaattctttgattcacttttggacacaaagaaaatagaacgattcaaccctcccagcaatgtcaccgtacgttgcaacacgacgcactgcctcgtacggtggaaacagcccaggacctatcagaagctgtcgtacctggactttcagtaccagctggacgtccacagaaagaatacccagcctggcacggaaaacctactgattaatgtttctggtgatttggaaaatagatacaactttccaagctctgagcccagagcaaaacacagtgttgaagatcagagctggcagacgttccgcatcttgaattggagctcctggagtgaagccattgaatttgatgatcatctgggaggaattcaccccagaggaagggaaaggctaccgcgaagaggtcttgaccgtgaaggaaattacctgagacccagagggtgtaggaatggcatggacatctccgcctccgcgacacgggggaactgttttcttgatgatgctgtgaacctttatatcattttctatgtttttatttaaaaacatgacatttggggccaggcgcggtggctcacgcctgtaatcccagcactttgggaggccaaggcaggcggatcacctgaggtcaggagttcaagaccagcctgcccaacatggtgaaaccccatctggactaaaaatgcagaaatttacccaggcacggcggcggacgcccatcatcccagctacttgggaggctgaggcaggagaattgcttgaacccgtgaggcggaggttgtagtgagccaagatcgcaccattgcacaccaacctgcgtgacagagcaagattgcatctcaaaacaaacaataataataaataataaaaacctgatatttggctggg

SEQ ID NO: 113515 - DNA, 1167 bp, Homo sapiens
ttgggaccgctctccgtagcatagaaagtgcctgcgtggcacacaaatttcccacaaatgagctgtgcaatctacgtcggaatacatccaaggaagagcacagccaaaagaagaaaaccgtgttaggctctttgaccaggagtgtatgtatgtggttcactgtgagcctgggtgcagacctgtgtccccatgcacacagtgtctcctgtcaggctgaaatgtggcaccctggcagacaagagctgtggctcgtgaggcagaaggcaggcaccacaacgggagaggcagcactcacccctgcctgttgcagctaaatcaagtcaaaaagacaggcaaggctgaacttgctaaatgtctggtgccttataaaaagaaggaaaggccatgaaataaggaaaacatacaaaatatgtaccccctagttcaccagcctcccctcccactaggagggcccctcgagccatcaggagtgaccaacttcctgggtggaggtcaggggagctccaggaggctgcccaggctcctcctcctcctccccagcggccgagcatctcttaccaggaacctggagccaccgccggagccagcgtcatctctagggtcactggccaggggactgcattctggtttgggactttgcctatggaaatgggaaaaatgaaattcctgctaaggtgcttctatctctttcagattcatgcattgaaggagagattttttatactttaatgttttatctttctcagttattttgcaagtgagtgtccttttaaaaacacacttcttcatgcttttctttgtaaatgacagatcgaagtataggttacatcaaaaccctaccatcctgagaagagttatggttctattatagcagacgtcagccacacagcctatgtgacaataaccttagagtcctgtgttttgtttttgtgtgttgtgagattttaatcttttttttttttcggtgagtctggccatttctataatgccaggtgggaagccaggctgcgggtgttagggtgggaatctgcccggcgtctctggcaccctccctgccatcctcagtgcggctgctgttctcctgtccggtgctgtggctccattccaaaggggcacctggatatttatatttgctgaagttttataataaagtttatatggtacaaa

SEQ ID NO: 113516 - DNA, 379 bp, Homo sapiens
aactgcattctgggacatagggtgttagtgaatgagactctgctctgaggtgggccttagcccagcttgccttgggctgcatgtctctccatccccaccttctgtctctgctcaccttgatctcaaaccatgttccatttccacctgcacatttcgcttccaggctagctcctacttggcctttaggaccagccaagaggccaccacctccaggaagtctcttcaactctgtcccacctctccgtgttcccacagagcctgtgctgcctccccaccgcccccacctgcagagcacagaccagcctgtgttaataactgactgactggggctccctgcaagcaggttccatgtcctgtgaccattttccaggaaagagcg

SEQ ID NO: 113517 - DNA, 1736 bp, Homo sapiens
  misc_feature (1)...(1736): n = a,t,c or g
gcttttgccctccatggtgcacatgtgatcttggcctgcaggaacatggcaagggcgagtgaagcagtgtcacgcattttagaagaatggcataaagccaaggtagaaacaatgaccctggacctcgctctgctccgtagcgtgcagcattttgctgaagcattcaaggccaagaatgtgcctcttcatgtgcttgtgtgcaacgcagcaacttttgctctaccctggagtctcaccaaagatggcctggagaccacctttcaagtgaatcatctggggcacttctaccttgtccagctcctccaggatgttttgtgccgctcagctcctgcccgtgtcattgtggtctcctcagagtcccatcgatttacagatattaacgactccttgggaaaactggacttcagtcgcctctctccaacaaaaaacgactattgggcgatgctggcttataacaggtccaagctctgcaacatcctcttctccaacgagctgcaccgtcgcctctccccacgcggggtcacgtcgaacgcagtgcatcctggaaatatgatgtactccaacattcatcgcagctggtgggtgtacacactgctgtttaccttggcgaggcctttcaccaagtccatgcaacagggagctgccaccaccgtgtactgtgctgctgtcccagaactggagggtctgggagggatgtacttcaacaactgctgccgctgcatgccctcaccagaagctcagagcgaagagacggcccggaccctgtgggcgctcagcgagaggctgatccaagaacggcttggcagccagtccggctaagtggagctcagagcggatgggcacacacacccgccctgtgtgtgtcccctcacgcaagtgccagggctgggccccttccaaatgtccctccagcacagatccgcaagagtaaaggaaataagagcagtcacaacagagtgaaaaatcttaagtaccaatgggaagcagggaattcctggggtaaagtatcacttttctggggctgggctaggcataggtctctttgctttctggtggtggcctgtttgaaagtaaaaacctgcttggtgtgtaggttccgtatctccctggagaagcaccagcaattctctttcttttactgttatagaatagcctgaggtcccctcgtcccatccagctaccaccacggccaccactgcagccgggggctggccttctcctacttagggaagaaaaagcaagtgttcactgctccttgctgcattgatccaggagataattgtttcattcatcctgaccaagactgagccagcttagcaactgctggggagacaaatctcagaaccttgtcccagccagtgaggatgacagtgacacccagagggagtagaatacgcagaactaccaggtggcaaagtacttgtcatagactcctttgctaatgctatacaaaaaattctttagagattataacaaatttttcaaatcattccttagataccttgaaaggcaggaagggaagcgtatatacttaagaatacacaggatattttggggggcagagaataaaacgttagttaatccctttgtctgtcaatcacagtctcagttctcttgctttcacattgtacttaaacctcctgctgtgcctcgcatcctatgcttaataaaagaacatgcttgaatatcnnnnnnnnnnnnngggggcgcccgtttaagaggacccacctttccgc

SEQ ID NO: 113518 - DNA, 540 bp, Homo sapiens
  misc_feature (1)...(540): n = a,t,c or g
cttctaagtaggtggaaactgcttcacaattctgtttctgtcgtcttttcttgttcttgctgttctcttttcttctttgcagatttcctcactttgagggagtctagggatcttctttctgagtattcctgaaataatattatcacttacttccattacacagacttctttcttttcccactcctatgaggttaacactgaggattagaaaaggnttcccagcatttgctgttttcccttttctgaattgtaagtgctatttaggacctataaactacctacctgctatagtaaacaatattccagccaagcgtggtggctcacacctgtaatctcaatactttgggaggcgtaaggtgggaggatcgcctgaggccagacattcaagaccagcctggacaaacaaagcgagaccctgtctctacaaaaaattttaaaagctgagcatgatggcctgaacctgtagtttcagctactctagaggatcgcttgagtccaaagtgattgaggctgcagtgtgctatgatcgcactcggcgct

SEQ ID NO: 113519 - DNA, 1348 bp, Homo sapiens
atgggcgcttcattacgccaagcttggcacgaggcggggcatgaaaaaaaactctttgtcaggtctcagaacagggtccatgctagatgagagatcaccaaggccccctccactatggactctgccaggtgaggggcccagcctgagaatccagctgctggggctgcccttgaccttctcagaacctcaaacagggggtgggtggcaagaagacagaggacaggccaggttctgacctccaggtgtggaggggccgcgttaacctcttcatagccagaggggagcagctgtgtccttgccccctgggctgggcatcctgttcccctcccccagcccactcccagctgcaaccatgtccagtgggaggaagggggaccaactcccgcctctggcacctggtttgtgctctgagcttcactttcctcatcgctaaatggacaaggcagcagaactcaccctcaggagacccgcaactcctctgccacgttagctgggattttagtacctgggtctctccattccagttccccaagtagaccgcactcctggccaccagcagtgctcaataaagatttattacattaaaaattccattgccaaaccctgaggcactcagggctctgaccggtgcagccatgacctctgaacccagaacacatggaagcagcagcagctgagttgccaactcaagtcttggcctgcctggctttgctggcgaactcctgcacacccttcaaggccctgttcaaatgtctctgtcttaggctgacgcagctgctgcccttctgtggccatacagtgctccttttcacagatgatggctcctgcagggagtgcccccagtgcccagcacagggccaggcacacagtggtgcacgggaacgtctgctgatgcccaccctaaggccaatcaaggagccacggggctgggtcctggtcctcacatcctcttccgcatcttgcccttcttggagcgggcaccccggccgaaggcaccctgctgcagctcctggacgcggcggcggttgcgggcagagagctgcttgaggccaccacgctgcaggaagtgcagcttctgggcccggcgccgctgcttcaggatctgctgcttggtcttgagttccgggcggactcggcctgcaggggtgcctggggcgtggggccgggatgcacctgcttggccacggtctcgcttcccacctcttcgctctgggcctcgccggtcagatgccccttcttcgtccgagtcacgatcatcaattttctgtttctgtttccacttctgatagctgggaaacctcgttaaggaagctgcgtgaagcccctgggatgggagaaggctacgaaa

SEQ ID NO: 113520 - DNA, 365 bp, Homo sapiens
cttcatcctgctaaaagcgccgtgcaccgacggaggggacatgggcagagcaatggcggccaggctcgggctaggacgctgctgctgctggcactgctcctacccacgcaaatttattccactgaaacaacaactggaactttaagtaactcctaccacagtacttgcaactctgggttggccccaaatccaactaatgccaccaccactgtggctgtgggtgccctgcattcaacacccaatctcttaggggcctcactctctcttctgcatatctactcttaagagactcaggccaagaaacgtgttctaaatttccacatcttctaaacccaatccaaaaggcgtctggaagacctatgtgg

SEQ ID NO: 113521 - DNA, 848 bp, Homo sapiens
  misc_feature (1)...(848): n = a,t,c or g
aagnggttgtgtttgattcaaattttcttttacctttttagggaactttttgttttgatattattttaaactttaaaagtgcccgaatgctccttggtgatgtgataagctctcagagcagggggctgcatcctaatttctcaggtgcacatcacagtacacagggcgaccccagcacccatgaggccatgaccaggacatggggcatcccccagcacccagggggccgtcaccaggacacagggcataccccagcccccctaaggccttcaccaggaacagggggcttcccccaaccacccaaggggttgtcaccacagacaagggccatcccccaaccacccagggggccatccaccaggggcatgggggcatccccccagcgacccaaggggggccctcccccagaacacgggggcattcccccagcacccatgaggccatcaccaggacacagggcgtcccccggcacccagggggccgtcatcagggcatggggcatctcgcagcacccacagggccatctccaggacacgggctctcttccctcatcctcaaggtcctgcaggtaccttggggcctgttagagcttttgcttgagaagtcgtcatcgtggggtgctctgcacggattatcacgtgattccctgttagtgacccttcccataggaacattttccgaggccttccatacacgtctctgggtgctcactctgcttccggtcttggccttcccagcagtgtctctgcgctgccgccgggctcatccatgcacagctccccacagaacgcggtgtcggtccgactgatctccgggtaccgacctagaattcgtaatgatggtcctgc

SEQ ID NO: 113522 - DNA, 345 bp, Homo sapiens
  misc_feature (1)...(345): n = a,t,c or g
agaagnanagatggggacagcgtgcccagcactccaggggcagagagagctctcagtggagaaggcccctccttcacatgcagccaacagcgatggcccacacctcctgctcctgcgaagcagctgggagctcctcctcctcctgcagactggaaaccgaggctcccagggcaggtgtgggaggatagacccaaacccagccacgcccctttggtctaggatccccaccccacccatgctcccctgctctgtgcccccaaaggaagccatgggcggccctgccggggccatcacctgctgagcacaaaacccactgtgacaggcagcacagggccaggtccccag

SEQ ID NO: 113523 - DNA, 444 bp, Homo sapiens
  misc_feature (1)...(444): n = a,t,c or g
gttacgaattcaatcgtccgtacccggacatcagctgcacagctaaatgctctggcgccctgcagaggtaagccactcgcctgtgacagctgcatggggctgggtcacagggagtggtcagacccgaccttcctccccggctgcccctcccccagctccaagggtgtcttctgcagcaggaggcgtgggaagtgaggagagtggggggcttaccacanatcctctcccaactccacctggctctgtgagccctgcagccctgaagcccccacactatactgagagcccctgttcctggcatcccaggcgtgaacctgcatggagctcttggagccacagaggagaggactcttacgaaacctaatcacaggggggttgacaggaccttctgcccttggcgtttcctcaaatgggttttccctccttctgggcaaccccagctag

SEQ ID NO: 113524 - DNA, 1372 bp, Homo sapiens
  misc_feature (1)...(1372): n = a,t,c or g
cagaaagatgtgaaccccgggtggcctgtgtttgtgtgtggtttctntgcataaggaagttggccgtgggccgggtataactaggaaggccagtggttttcatcctcaggaattcttgattccccccacattgttccaaggggttcgttcccctgaaaagcacttctgaggttccctggggtaccaggccggaagaatcctgccaagcctgtcccctggggtgcggagcggaaaggatctgtgatggtgtcccctggggtgtgcggcgaaaagatatgccacccgtttccctgggggtataagcaaagagaatttttcatcctgtcccctggggtgtgcggcgagaggatctgtcatgctcgccccctggggtgcggggcggaaggatctgtcatgctgtcccctggggtgcggggcgagaggatctgtcatcctgttccccttggggtgtgcggcgagagaatctgtcatgctgtcccctggggtgcggggcgggaagattctgtcaatcctgtccccttggggtgcggggcgaaatgaactgtcatgcctgcccctggggtgcggcgcagacaggatctgccatgctgtcccctggggtgtgcggccgagatgatactggcatggctgtcccctgcggtggtgcggcataggatttgtcatgctttccccttgggtgggccggcagaaggatattgtcttgctgtcccctgggggtgctatgcgaaaggatctgtcattctgtcccctggggtgcggagcgaaaggatctgtcatgctgtcccctggggtgcggagcggaaggatctgtcattcgactgccacaactcttgcgatccaagtatgcgaaggccactgttctttcactcctcctgcttcccattgctgcctcaggatctccatgacatgtgacttctggccgattcctcctgggccctccgagctgggctggggctgccacctgccctcctgggtgcggagcaggacctggtgatcctgtgcctcctgctttcagcctcgcctgatgtcccctttcagagatgcctgaaaggctctccctgtagctccggtagcctcctctggttggcctcaccggtgcccattcgtccatcatctgtacatctgcctccagccctcagactttgccatggccctctgcctttcactgtcttggcactggaccattgtattcctcctcctgctcctccttcttcttatactcctcctcctccttcttcttatcctcctactacttattgtgctcctccttctccaacttatgttggtgatcttattcttcgtactcctcctcttaatactcttcctgttcatgttattgttagtcctcctcttactcgtttatttactcgcg

SEQ ID NO: 113525 - DNA, 691 bp, Homo sapiens
ctacaaattccatttatcccctataaaacttccccatcaataaatgaatccaagattgcgccaaggggtcagttggggtaaagagtataaattaaagtcctggtataccagttcagtgaattcccttttaaggggaaatgtgaaaattgggaattaaccttcaaatttataaaaacctgattggcctttaaaatacaagtttgaagaaagaaaaaaggtggccaaaaataaatcccactacttcacgccattccattagagttgcgccagaaacgacttacttaaaataggcccctttaaatatcttcattaatgacccaggtttttagaatacaaaagaaataggaattcccccatttcaaaagcaaaagatgattcctcccctcgtcatcagcgagtccagggctgcagaacacgttcattttgggggcagtggaatgcacaggaaggatgaggagctttcactgtcacccctgtcaagaaaccactcaaaccccaccgcctccagctgcttctcgaccgactgcagcggcccctccactcccctcacccccagactcaccccaactcagagccctgccagctccatcccgtgccatgtggccaggggctcctggcttccttctccagtcctcccctcccttctctgttcccaggctggctggtaaatcagatccccgggtaccgagct

SEQ ID NO: 113526 - DNA, 701 bp, Homo sapiens
  misc_feature (1)...(701): n = a,t,c or g
taccaattcgagtctcggacccggggatctcgcgagagctaatgagatgagtacaaatttagtgaggatggcaccaagacattgatgtaggggccacaccagtgacgcagacacctcccaccacaacaatgaccagacacctcccaccacaccagtgaccacacacctctccaccacaccagtgaccacagggggggggaggggagcggtgaccaaacacctcccaccacaccggtgaccaagacacctcctaccacaatgaccagacacctccccccacaccagtgacccagcaccctcccatcacaccagtgacccagacagcctcccatcacaccagggaccaaaacacttcccactaggccggcaccaacactggcgatccaatgtcagcctgaggttttgggggtgtcaaacatccaaacgatatcactggggtatgtctggggaggcaggatgatggcaaaaaggcttcagaaaaggggaaaacttttgctttgggtccaaaacccggggcccacccattaggaaactccatttggttctgggggggttaaacttggacttggattgggtattaaaaaccatcttgaatctcagcagtttgggagggtgagggggcaaatccttaaagtcgacctgtggcatgcaacttggcattggccgggnnnnnnnnnnnnnnnnnnnnnnnntgcgtacca

SEQ ID NO: 113527 - DNA, 764 bp, Homo sapiens
ctgattttgcaaaacttaatggccgcatttagtttttttctaaattgttgcagctcagctttacaagaaaaagcctgggcattacgccaaaacaattcgatggtaagtaaaagattaagttagttacctgcgggatgatgtgcccaaaggtctcactcctgggtggaatgggaagcccgtttcattcctctcccagagtccccaccaaaggtctcactcctgggtggaatgcaaagcccgtgtcattcctctacgggagtccccccccaaaggtctccatccctgggtggaatgggaaggccgggtctaatccttttccggagttcccaccaaaaggtctcactcctggggggaaaaggaaagcccgtgtcattcctctacgggtgtcccccccaaaggtctctctcctgggtggaatgggaaggccgtgtcattcctatacgggagtcccccaccaaaggtctcagctcctgggtggaatgggaaggccgtgtcattcctctacgggagtcaccaccaaaggtctcactcctgggtggaatgagaaggccgtgtcattcctctaccagagtcgccaccaaaggtctcactcctgggtggaatgggagggccgtgtcattcttctaccagtgtcaccagggcagatctgtcccagtcccgttggtactcacctatgcctctgcttctccacatggaaggggacgggcgcttattctccgcctttcgtcccatctgcctagagaaacctaccatcaagaccgttc

SEQ ID NO: 113528 - DNA, 1759 bp, Homo sapiens
cggtaacaaagcagactgctgtgacgtttgagaactggttcgtagcagaaaataacgaatctggtcatccagttggccaagtgggagctcaggcagggtttgcaacctccaccgcaggcctggggatcctggctgggctgtacgtcccggggatagctctgcagagccaggcgggccgccccgccccaggggggttcccaagccaaggaccgaaaaagcccaccggtccccccaggcaggaagtgtgggccaggctggggaccgggcctaacaccaaatccacgcttttccacctcccaggaaggaggtctgcgttcacatccctcattcaatgatcaaaacgcaaccggagaaccacctgctcctctactccgggacttaaaatagtctttattagaacaaggctttattactggctctaggttgacagaacaaaaataagcaaattgttttaaattcatgctaagttattttaaaaataaattaaatgatatgcaattattttaaataatcaaataatattttaaaataagaaaatcactttaaaacaaacggattttcctttaggccagaattctaaacttctgccggccttcatttccagggggttctcatggctccgcggtcacagagtgacaacagcagcgtggatcatgcagaccgtggtgagttccgaggactctggccgacttcaacaggaaaacgcacaggaggccgtctattgggaaacctctgtgtttcccaaaatccaaaattgagatttttctttaagagatttttttttctcaactgctattaactggaaagggaaggctgcttccactgaaacctttacaggaataatgaatcatgtctcacgcgtagaggctgtgggcttccattacaggaacatcccatgatccctggaaatcctgcagcgcgttcctgggaaagacagcatataaacacgatctgggcaaaaaaggaaaacttcggctgagacgcctcgactgggtcgctcctgaagacagaggcagggtatgtgcttaccctcaccctgggcgcctgtgccctaaagcagggccggcaggaagcccccagcccttgggctgcagtcgaagcagccacggggtggcacgctgtccttccagcagaaccctggggctctgcagacacagctggtgcgtgactacacatggcagggccatgtaaggacagcagagaacgggctccaccaaccaagccccttctagagcacatggccactccttctcactaagtggaggaggaagcagactcgaaaaggaggatgtaggcgctgaggacaacagtataacggagggtgatcgggaggcacccacgagggcacccacagtcctcgctcggagcatgtcctggctacagggaacaccgtcctcagtggccccctctgagccctttgtgctgccccaggtggctcatgaccttccactgaggactctgctgagatcctgcggcatcttcccggcgaggaaaagcatgagtgggaaacaggtagcccatgaggcaattctcccacccccaccacccctccatcctctggaatgaagacagcgagacacacgctttgaccccagggagtctgagtctatagacaagcaggtgacacgggacatacataacggtaactgtcatctagcacagtaagtcatgcggtgcaaggcgagtaagctgggtagcgacagggtgttgccagtctcagcgttgtacggggtacggccaggaatccgtagtcaggtcc

SEQ ID NO: 113529 - DNA, 604 bp, Homo sapiens
  misc_feature (1)...(604): n = a,t,c or g
gaaagagacggcatagtaaaagtgattaccagagtgcccattccccgaccagctatacctcgatacactgtccagaacggtgcccaataagccccctcccccgcggtgttggacagggagaacatccccccccttcaagagggtatacaatnnnnnnnnnnngcataaaatgggccaccccttttttccccctttttacagagtggtnnnnnnnnnngccccccttgcggtgtacacacagccatgcttcccccacactcacgcatgtacacacgcgctcacaccccacactcacacgtgtacacacaggcacacattccccacactcacacatgtatgcacacactcacagcccacactcacacgtgtgtacacacacaccccacactcacacatgtgccaggcactctgtggagcacgttatactttgcagttcattaagcttcagaacaaccttgtggggtaggcggtcttggcatttgcatatcttggaagagaaggtggaagtctgaatgggcttaaacctcttcctgacatcagcccacaagaaaaatggtagaactgagattcagatgcttctccagttgtcggttataatgagtct

SEQ ID NO: 113530 - DNA, 1355 bp, Homo sapiens
  misc_feature (1)...(1355): n = a,t,c or g
ctttttattgaacaagtagggttaaaaagggtggccccttacccttaaaccgggatggtaattttgccaaaaagccaggtttctcccacaaaaaagttcttcccccgtaaagccgttccccccaggtatcaaacccgccttccaatttaaggccaggtttgccaaacgccttcccattctcgggcgcgctttggcgcctttttcaaaaattccacccggtaaaagtggccgtttctgtcggttcccctggatccacgccggcggccgagagctccagggttttctcgcgctctgtcttctgtgcggcaccgggcttctggggtcaaaagagatcccgcacaagaagccttagccctgaccccacccagggggcgttcgtgagcaagtcacccccctcctctgatcccccagctctctcctggggctggaaacatccttggggttattgtgtggattacacgtgataacgctggaacctcagcactagtgcctggcgcagggtacgcaccaaataagtcttcgctgttaccatcagtacctctcttagccacaaatctgagccagtcctcgttgacacaggcttaaccttaggatagtcacaaagggcaactcaaatgttaacgtgcagctcctctctcttgcctcacaggggacagggtcagaaatgggtcacgcctaggctcctttccctcgtagtgatcagtaatatttttaagaagggagagattttataacttagctatgacacttcaaagagggctcaaaagtccttttgatacaataggtaatacttttctggaaagaggaatgactgagtgcctggaatcatatcaatggcttaactaacctttggtttcacagttttcctacttggggtgggtttggnnnnnnnnnnagaaaacggcctgtactaaaattccccttgggggaaaacttcccatacctgaggatctttgcagggcttgtgggttttgggggaactttttggcaaatccccccacaatcaaaattctttggggaaaacatgatttctgttttagactaacggcccccctgctggccttccttttataaaacgtgaaacactcttatggaaatgaaggggggagagttgcctcttgttctagaaagagcggaaaaacttttttggggttttttggcgcggggggccccccaccaaataaagctcttttaaaccccttatttgggggacaaaaccgcggggggggaaatggcgggtcttttttccccaaaaggcgggaaaaaaaacttttaaccctggataaagcgcgtcacaaccccttttttttgccgtgctggaacaaccggtttttttgcatactttaaaacaccat

SEQ ID NO: 113531 - DNA, 1066 bp, Homo sapiens
tttcgtgccatggaaacgaaagcggccaagtttatgcttcgtcctgacgcgccgcctcccgtgggctgcggccggctaagccgcggcggacaactatgctgaaagccaagatcctcttcgtggggccttgcgagagtggaaaaactgttttggccaactttctgacagaatcttctgacatcactgaatacagcccaacccaaggagtgaggatcctagaatttgagaacccgcatgttaccagcaacaacaaaggcacgggctgtgaattcgagctatgggactgtggtggcgatgctaagtttgagtcctgctggccggccctgatgaaggatgctcatggagtggtgatcgtcttcaatgctgacatcccaagccaccggaaggaaatggagatggggtattcctgcttttgtccaacagccgtccttacaggacacacagtgtatgcttaattgcacaccacaaaccaggctctggagatgataaaggaagcctgtctttgtcgccacccttgaacaagctgaagctggtgcactcaaacctggaagatgaccctgaggagatccggatggaattcataaagtatttaaaaagcataatcaactccatgtctgagagcagagacagggaggagatgtcaattatgacctagccagccttcacctgggactgccacatccccagtgaaatcagcatgtttctcggtgcagatctgaagatcacatcgagctgctgatgtgtttcttctccctctgactgcagaggaagttgttcctacctgcaggaaggcaccttgcacccaagggcgttcactcagaccaatctgtggtttggccctgagttcagttgagaaaatcctattatcaaatttggatttcctggccccagaacttcccaaagacctgtaaaatggagggatttaccacctcacatatgtccagttaaacagtttgtggacttgtaaccgtcgcagcccaatgatacaacagtagtttaatcacgtgtattggcttgaatgtgattttcattccttgattcacccaacaaataccgactggctgaa

SEQ ID NO: 113532 - DNA, 3283 bp, Homo sapiens
  misc_feature (1)...(3283): n = a,t,c or g
cttttccctcctcaccttcagcctcaaagtctcagaaccctcctgccccctccacttgaaaatctctcctgaggaaacgaccagactgaatgcttttgcgtcgttgtggaagtatttctcttccagttgccagcatttgaagaccagttgcttaaaattctccggggctttgggggaggctggttttaggccgaaaccccgaacccggtgcctgaaagtctgagtcccgcctcccagcgcgggccgggacagcgcttcacccctctccctcacttcctaacaaactgtgtgggtcccaggctgctccaggtcccctggaagctccagatccagatccctgactgggggtgtaggtcaggaggaacgcgggggcctcattctgggactcccccaacctcctcctcttccaaccatcaggaggctgagaatccagagaaagatctctgaccactaaatctgtgtgcagcctctgaagagccaatccattcaggatgggaaaccacgcaggcaaacgagaattaaatgccgagaaggccagtacgaatagtgaaactaacagaggagaatctgaaaaaaaagagaaacctgggtgaactttcacggacaacctcagaggacaacgaagtgttcggagaggcagatgcgaaccagaacaatgggacctcctctcaggacacagcggtgactgactccaagcgcacagcggacccgaagaatgcctggcaggatgcccacccagctgacccagggagccgcccccacttgatccgcctcttttcccgagatgccccggggagggaggacaacaccttcaaagacaggccctctgagtccgacgagctccagaccatccaagaagacagtgcagccacctccgagagcctggggtgtgattgtgtcacagaagagaccctcccagaggcacggatccgaggagcctggccacagcatgcaccatggaccatgccagtcatgggttgctcgaaaggcacagaaacacgggcatccttgactccatggggcgcttcttttggcggtgacatgggtgcgcccaagcgggggctctgggcaaggacttcacaccacccggcaagaacttgctcactatgggttccctgccccagaagtcacacggccggacccaagatgaaaaccccgtaagtccacttttttcaagaacattgtgacggcttcgcacaccacccccgttcgcagggaaagggggagaggacttttccctgaggcagattttagctggggggcccaaaggccaaaagaccaggattttggctacggaagcaaaagcgtccgactataaatcggctcacaagggattcaagggagtcgatgcccagggcacgctttccaaaatttttaagctgggaggaagagatagtcgctctggatcacccatggctagacgctgaaaacccacctggttccggaatcctgtcctcagctttcttaatataactgccttaaaactttaatcccactttgccccctggtacctaatttagagcagatgacccctcccctaaatgcctgcgggagttggggcccgtaattaagggtcaggcccacgggcagcctaccggcaattttccgggccaacagtttaaatgaggaaccatgaaaacagaaaacgggttaaaactgttcccttttctgtgtgaagatcacggttccttcccccgcaatgttgcccccagacggcacgtggggtctttcagggggccaggtgcacagacgttccttcacggttacccctccacccttgggactttcttttcgccgtggctgcggcacccttgcgcttttgctgggtcactggccatggaggcacacagctgcagagacagagaggacgtgggcggcagagaggactgttgacatccaagcttcctttgtttttttttcctgtccttctctcacctcctaaagtagacttcatttttcctaacaggattagacagtcaaaggagtggcttactacatgtgggagctttttggtatgtgacatgcgggctgggcagctgttagagtccaacgtggggcagcacagagagggggccacctccccagggccgtggcttgcccacacaccccaattagctgaattcgcgtgcggcactagggaggaaaaggaggcaaacgtgggctgggcaatggcctcacataggaaacagggtcttcctgggagatttggtgatggagatgtcaagcaggtggcctcttggacgtcaccgttgccctgcatgggttggcccgcanagcagcctctatggaacaaccttcgtttccaaaccacagcccacaggccggagagttccagggaagacttgccgcactcagagcagaagggtaggagtcctctagacagcctcgcagccgcgccagacggcccatagacacttggctgtgaccggggcgtgctggcaacggcaagtgcacaagtgggccagcactaaaccctcccttgagaagataaaccggcttaatttactttcttcccagaaggacgcgtggttagcgagttagggcacaggcgtgcaacctggttcccgaatttattcaccgagaacacacgggtttgagcagaacgggccccttggattgggagaccaaaagtctccttctgacccaaaacccttccttaaaaaaccggctgggcatcctccctttcgcgccctcccctcccctaaccctactgaccccacccttttgaatttttagccgcaacctgtgaattgaataggcccttcccaaaagagtccccacggctggcatcgcccctcccccgagggacggaggatgaggaagtaagtcagccgtgatgcccaaaacgccgtccttccttaatcccaattcctaattctgaatgtttccgtgtgggcgttaatacccatgtctattaagattaataacgccctcgatgatgagagagttacaaagaacgaaaactccagacacaaacctccaaatttttcgagcagaagcactctgcgtccgctgagctgaggtcggctctgcgattccatacgtgggccgcacccgacacagcacgtgctgtgaacgatgggcttgaacggaaagtgttacactgttcctggaatatttgaaataaaacgaataaacttttaatggtnnnnnnnnnnnnnnnnntnnnnnnnnnnnnnnnggggggggccctttaaaaggacccctgggggggcccaattttaccgggggttgggaaggaaaagcctttcccttaagggggggctttattaaagccggccgg

SEQ ID NO: 113533 - DNA, 415 bp, Homo sapiens
cccggtctttccctactctgtgccctctgcccagcctgcctggtcagccggctcctgtccagggtccgccttctcacctggttctccgggaggctcttccggattctctcaacagggccactctgctggctgggactcggctctgtagtcatttttataaggccgtatttcttacctgttgcactatccctcctctgaatggttgcagacagggagtgtgtgtgcatgtgtgtgcatgtgtgcatgcgtgtgcgtgggtgcgtgggtgcatgtgtgtgcgtgtgtccgcatgtgcataggtgtgcacgtgtatgtgtgcgcgtgtgtgcgctgatatgctacaagttcaccttccctctctgcacaattgtgccagcgttcacgtaaactttacttctctataactctcacgaaa

SEQ ID NO: 113534 - DNA, 1874 bp, Homo sapiens
acttgtaaactacttctatattagtctttaaaagattcgcttatcttacgaatgattttgaataagcgtccttgggaatgtttctagagatgaatctccctcccccagtcctacgcttgggtgaggaagtgtcgggtacccgggcgacctgtcttcaggtgttctaggaacgcggccccatcccttgtcagcctctgtctctgtgtggtgagaaggcgcactggctcgtgcctctgcgaaactcgcgcacacagaaaagaccaatcaaggacgggtcattctcgccccccgcgcgccttttgcgaccgcccactcgacaggttgacaacctagacagctcccccggacttgccttacttttccatctcctcccacccagctataccctcccactggcggcgcggatggcacgccggcggagccagcgagtctgcgcgagcggtccgagcatgctcaatagcgcgcgcggcgccccggagcttctccgcggaaccgcgaccaacgcggaggtctcggcggccgctgcgggagccacaggaagtgaagagcttccgccgggagaccgcggctgcaggaacggaggcggaaggggccctgcggcgacgacgtcgtcgacgtggtgtggccgtgggagctgagcacggagaagactccctctctcggaagccggatcccgagccgggcaaggatggatcaccaccagccggggactgggcgctaccaggtgcttcttaatgaagaggataactcagaatcatcggctatagagcagccacctacttcaaacccagcaccgcagattgtgcaggctgcgtcttcagcaccagcacttgaaactgactcttcccctccaccatatagtaagtattactgtggaagtacctacaactttcagatacagaagtttacggtgaagttttatcccgtgccacctccctataagcgttgctaacctctcttcctacatacgatgaagctgagaaggctaaagctggctgcaatggcagctgcagcagcagaaacatctccaagaattcaggaggaagagtgtccaccacgagatgaccttctgtgatgcagaccacctcaaagtggggaatgatggcattctcatgctggcatttttcatggcatttattttcaactggcttggattttgtttatccttctgtatacaccaataccatagctggaaggtatggtgctatctgcggatttggcctttccttgatcaaatgggatccttattgtcaggttttctgattattttactgggatatttcaatgggacagtattggctttgggtgggatatttccttgttacttgggcctggcttccttttctttcaggagggatttgttaattatctaaaagtcagaaaccatgtctgaaagtatggcagctgctcatagaacaaggtatttcttcttattgtagagactgcatcaacccgacattcctttcttataccaatgtgaaatttccagatcatctgtaaacctacaactttaatagaagactactaataacagaagacaaattagtgaagaaaagacagagttctcggaaattggaatgggcaggggtgggtttttcgctttacagagcacattctctgtctcattctttaagtatctcatatcttcatttgtttttgcacatatggcatatggggcccatttaaggatatttggcatatacttgatagaaaccataaagttgtagcagttaagtccagtcacatttggttaatcagtgtttgatataattgaaagagttgagtggataaacagtcttccagcttgtaaatgccattgacttctgacctgacatttagtataataaaaatgaaattcttaaccatgtcaaaaa

SEQ ID NO: 113535 - DNA, 1501 bp, Homo sapiens
ggtcgacgatttcgtgaaatgtggtcgcggttggtgtggctgggccttcgggcccctctgggcggggcgccagggcttcacctccaaggcggatcctcagggcagtggccggatcacggctgcggtgatcgagcacctggagcgtctagcgcttgtggacttcggcagccgcgaggcagtggcgcgactggagaaagctatcgccttcgccgaccggctacgcgccgtggacacagacggggtggagcccatggaatcggtcctgggaggacagatgtctattacctgagatcccgacaatgtggtagaaggcaactgtgcctgatgaattactacaaaacttcccattcgcgtcttggaaggattacttttgttgggcccccccaggtaatatctcttttgccaaagctggattgaacaagaagccattcccacacagcttgagtagctcattcttggaaaggggggtactctgtgaacatgtggaagcataatgacagtatttttttactgtgaatactaatgttcctgcttttttcagtcccctgaaaaaatggatgctcaagcatttcttaataacagattcttctgaagacagaattgggaaagatctggccccaacaaggcagtgagttcctgatgctaactgaggtgaaagaaaagcaaaagtcagcttccaaggaattcacttaacaggcctgttcagtatggaagacattatttatctgcctttaactccccccaaaggaccataccaactgcatgaaagtgaacttttctatctacgtaactggtagacggagcatcttgatcactatgtgacaaccttggctgtcatttttagttgccatttgcattgatttgagcagccctatctttaccgaacatacctgaatttgttcctgggctcccactttcttcccagaagagggctaacttcctactaaggtctgaagagtgttgaaagtagactagagcttgggaactcctaacctagaactatctgccatccccacaaagtgattatattcccaaagggatactagtcatacctagtgtttctctttctgaaaagaggaacttatcctaaaattagcccctgggccctgggacaaaggagccctctccggccccaaaatgattattaaattgagatgagtccaggataaaactcagataccaaggataaatgaaacttatttagggataaaagtgggctgggcgcaagtggctcactcctgtgatcccagcactttgggaggctgagacgggcggatcacaaggtcaggagatcgagaccatcctggctaatgcggtgaaacctcatctctactaaaaatacaaaaaattagctgggtgtgatgacaggtgcctgtggtcccagctgctcgggaggctgaggcgggagaatggcgtgagcccgggagacggagcttgcagtaagccgagatcgcaccactgcactccagcctgggcgacagagcaagtctcaaaaaaaaaa

SEQ ID NO: 113536 - DNA, 6085 bp, Homo sapiens
  misc_feature (1)...(6085): n = a,t,c or g
ttacaatcttgttcctccgccgttgcaatgaactattttctctcagtccggggtggtacttttgagtaaccccttccaaatagaaacccataccagcctatttagctcggtctccactatatgaaggtttcctagggcttggtgtgacgcaacgtatacgaggctcggaaggacaccccgcggaaggatccggtttgttgtggtgtggggaggggagacgctgacaaaccaagatggcgtgcggcggcgccttaattgctcgcggcgtttgggaggtaacttgtggtggcgaaggcttgcggtagtggggaggcaaccacactagtttggaagaaacggagcgggacgaagaggcggtagcagtagagtcagcctgagactctcagagcacgacggccacacgcccccttaggccctcggcgggcggcggctgccccgcttagggcctagcctccgagcattgcctcggcttcaaacagcggcggcgccatgagtccttaagggcggtccaagcctcccgatccctggcccagacctcgggcccaccatggagccggggtccgacgatttcctaccgccaccggagtgcccggtgttcgagcctagctgggcccgagatccgagaccctcttgggtacatcgcgaaaatcaggcccatcgcagagaaatcgggcatttgcaagatcagcccacccgcggactggcagccaccctttgctgtggaagtggacaacttcaggtttaccccccgaatccagaggctgaatgagctagaggcccagacgagagtgaaactcaactacttggaccagattgccaaattctgggaaatccagggctcctccttaaagattcccaatgtagaacggcggatcttggacctctacagtctcagcaaaattgtggtggaggaaggtggttatgaagctatctgcaaggaccgtcggtgggctcgggtagcccagcgcctcaactatccaccaggcaaaaatattggctccttgctacgctcccactacgaacgcattgtttatccctatgaaatgtaccagtctggagccaaccttgtgcagtgtaacacacgttcatttgataatgaggagaaggacaaggaatacaaaccccacagcatccccctacgacagtctgtgcagccttccaagttcaacagctatggccggcgggccaagagactgcagcctgatccggaacccacagagtgtaagacattgagaagaatccagagctgaaaaagctacagatctatggggcaggccccaagatgatgggcctgggcctcatggccaaagacaagactctgcggaagaaagataaggaggggcctgagtgtccccccacagtagtggtgaaggaggagttaggtggggatgtgaaggtggagtcaccatcgcctaagaccttcctggagagcaaggaggagctgagtcacagcccagaaccctgcaccaagatgaccatgaggctacggaggaaccacagcaatgccgagtttattgagccatatggctgcctgacgggttctcgaggggatgaggatgacaagctcctgctgagtgatggctgtgatgacaactaccacatcttctgcctgctgcctcctctgcctgagatccccaagggtgtctggcggtgcccaaagtgtgtcatggcggagtgtaagcggcccccagaagcctttggctttgagcaggctacccgggaatacactctgcagagctttggcgagatggccgactcctttaaagctgactacttcaacatgcccgtgcatatggtgcccacagaacttgtggagaaggagttctggaggctggtaaatagcattgaggaagatgtgactgttgagtatggagctgacatccattccaaagaatttggcagcggtttccctgtcagtgacagtaaacggcacctaacccccgaagaggaggagtatgctaccagtggttggaacctaaatgtgatgccggtgttggaacagtctgtactgtgccacatcaatgcagatatctctggcatgaaggtgccctggctctacgtgggcatggtcttctcagccttttgctggcatattgaggatcactggagttactccattaactacctccactggggtgagccgaagacctggtatggggtgccctcacttgcagcagaacatttggaagaagtgatgaagaagctgacacctgaactatttgatagccagcctgacctcctgcaccaacttgtcaccctcatgaatcccaacaccctcatgtcccatggtgtgccagttgtccgcacaaaccagtgtgcaggagagtttgtcatcaccttcccccgtgcttaccacagcggcttcaaccaaggctacaactttgccgaggctgtcaacttttgcactgctgactggttgcctgctgggcgccagtgcattgagcactaccgccggctccggagatactgcgtcttctcccatgaggagcttatctgcaagatggctgcctgcccagagaagctagacctgaacctggcggcagctgtgcataaggagatgttcatcatggtgcaagaagagcggcgtctacgaaaggccctgctggagaagggtatcacagaggctgagcgagaggctttcgagctgctcccagatgatgagcgccagtgtatcaagtgcaagactacgtgtttcctgtcagccctggcctgctacgactgcccagacggccttgtctgcctttcccacatcaatgatctctgcaagtgctccagtagccggcagtacctgcggtatcggtataccttggatgagcttcctgccatgctgcataagctgaaggttcgggctgagtcctttgacacctgggccaacaaagtgcgagtggccctggaggtggaggatgggcggaagcgcagccttgaagaactgagggcactagagtctgaagcccgtgagcggaggtttcctaatagtgagctgctgcagcaactaaagaactgcctgagtgaggcagaggcttgcgtgtcccgagctctgggactggtcagcggccaggaagctggcccccacagggtggctggtctacagatgaccctgactgagctccgggcctttctggaccagatgaacaacctgccttgcgccatgcaccagattggggatgtcaagggtgttctggaacaggtggaggcctaccaggctgaggctcgtgaggccctggcctcactgccctccagtccagggctactgcagtccctgttggagagggggcggcagctgggggtggaggtgcctgaggcccagcagctccagcggcaggtggaacaggcgcgatggctggatgaggtgaaacgcacactggccccctcagcccgaaggggcaccttggctgtcatgcgaggactgttggtcgcgggtgccagtgtagcccctagccctgctgtggataaagcccaggccgagctgcaggaactgctgaccattgctgaacgctgggaggagaaagcccacctctgcctggaggccaggcagaagcatccaccagccacacttgaggccataatccgtgaagcggaaaacatccctgttcacctgcccaacatccaggctctcaaggaggctcttgctaaggcccgggcctggcattgctgatgttgatgagatccaaaatggtgaccactacccctgcctggatgacttggagggcctagtagctgtgggccgggacctacctgtggggctggaggagctgagacagctagagctacaggtactgacagcgcactcctgggagggagaaaggcctccaagaccttcctcaagaagagattcttgctacacgctgctgggaggttctctgcccatgtgcagatgccggctcagacagcaccaagcgcagccggtggatggaaaaggagcttggggttgtacaaatctgacacagagctgctggggctgtctgcgcaggacctcagggacccaggctctgtgatcgtggccttcaaggagggggaacagaaggagaaggagggtatcctgcagctgcgtcgcaccaattcggccaagcccagtccactggcatcatcgagcacggcctcctctacaacctctatctgtgtgtgtgggcaggtgctggctggggcgggagctctgcagtgtgacctgtgtcaggactggttccatgggcggtgtgtgtcagtgcctcgcctcctcagctctccgaggcccaatcccacctcatccccactgctggcctggtgggaatgggacaaccaaattcctgtgtcccactgtgtatgcgctcaaggcgcccgcgcctggagaccatcctggcactgctggtagccctgcagagactgcctgtgcggctgcccgagggcgaggccctgcagtgcctcacagagagggccatcagctggcaaggccgcgccaggcaggctctggcctctgaagatgtgactgctctttttgggacggctggctgagttccgccaacggctacaggctgaacctagacctgaggagcctcctaactaccatgcagcccctgcttctgaccccctcagagagggcagtggcaaggatatgccctaaggtccagggcttactggagaatggagacagtgtgaccagtcctgagaaggtagccccggaggagggctcaggtaagagagatctggagctgctgtcctcgctgttgcccacatgttgactggccctgtgttggaactggctgaggcaacccgggcctcccttggaggaagcctcatgatggagggggacctgctcgaggttgaccctggatgagaaccacagcatatggcacatgctgcacggctggacagcccccagacctggagaggatcccgcacacttctggagctggagaaggcagagcgtcacgggagtcgggctcggggccgggccctggagaggcggcggcggcggaaggtggatcggggtggggagggcgatgacccagcccgagaggagctagagccaaagagggtacggagctcagggccagaggctgaggaggtccaggaggaggaagagctggaggaggagactgggggataagggaacccctgcacccatccccaccactggcagccccagcacccaggagaaccagaatggcttggaaccggcggaagggaccacttcaggcccctcggcccctttctccactctgactccccggctgcatctgccctgcccacagcagccgcctcagcaacagttgtgacagtggctgagcctagcacagaccctgacagagacccccctcggcctcaaggatcctctttctgaccatcaagcctgcttcttggggcggtcgggcgggtagggggggtggccatccctgctacccgcccacccctgagtcccttgacttttgtattctgactccaaggtattgttcagacctcagctcctgggggccggcccctggagtcttccctccctggtagcctctaaccagcattcccagacacctgaggcagaatagatggatgggctggtgggcaggggggtggctggggctgggccatcaccattccagagacaaggccagggtatatgcacactgggggactctcctcccttatctccccagatctggtcctgggcaggccatgctacactaacccctgcccccactgtactcccctgttttacttgcttactacccccgtctccctctcccttcccctgaactgttcccacccccnggaggagggaaacttcacatagccgtggttcacagtttttttatttttaaaggaatttggctggggagctgaacaggggctccctgtgatctgaagagaagcttttggtgcttgttcctcacaaccccctcagtcctccccccctgtcctcccctgtttcctttcctcctcctgggttcatgttgtaataaaaaaaaattgttggggggtaattaatttgttcaaaagaaaaaaaaaaaagcaaaacaagaaacttggttccaactgaagcctattttaattttattttattattttcctcttgttagaaataaaacccttagaaacattttttggaaaaaaaaaa

SEQ ID NO: 113537 - DNA, 701 bp, Homo sapiens
tttaatttttaaaaacactttctgtatcttacggcacaacaaaacacttttactacaaaacatgtattgtataacggatgtggctgcgtttgacagtttgagatgacactgaggagtgtgaaagagagcctggaccttcaaagcttgcaaacggcccgggctatttctccacctcttcgctactcaaagcgctggcatcgtttcctgggaacctgtgagaaatgccgagtctcggacccatccagagcgcccgaatggaaacctaggcgttacgaggccccaggttcagcgtctcacgggtcctgcaccacctgggacgccccgcaagcagcgggcatgccgggcccccagaagactccgaaagccacccattccctaaacggggagggcctcgtccgcgcgtcccagcgccctccccggaagccccgccgctcccacacccaggatggggccacatgggcactaaaaggcgggcaggagcgcccagtctcgagatggctggctcgcctttccagtccgggccctcggggtgcccgtgtgaaaagatgtgacactgaagcctggggaagaagtttgaacctctcactaattcacgtaacgggagccgccggcagcgctgacggctgcacctcccctcccacgcggacactacctgcaggatcggacgacccccagaactgtttgccaacaaagacacgaaa

SEQ ID NO: 113538 - DNA, 1176 bp, Homo sapiens
  misc_feature (1)...(1176): n = a,t,c or g
gaggtggaggacccttgagaacgccggcggtgaccgcagccacagcggtgaccgagtgagaggaaggcggcggcggcggcggcggcggcgtgaagtcactgctgctctgggttcgggttggcgactgaaggcggtaccggcctcccggaacagcccgggggagggcttaggtgcagaagggcaggctggccgcggccggtttggtctggggaccacgggctggagcaggtggaaatttaaaattgtttacagtcaacactgtttccagccatgggtttgtctccatcatgctcctgctgttgcagttcaggcctcaaatgcttcagcgtccccaccttcaggatgccccgatgcatgaaggaaaaatgaaaggctgtccattaataccaggggcttctgggcccaacctgtgagagaaaaacttactctgtgctgccccacccggaacgcgcctatgagttacgtgagttgtcccattaggggcactgcggctgagaataggagaaacctagatccttcaaatctgatgcacccaccaaatcaaacaccagcttccagatcagcccatntgcattgtctacttgtcagagaagagtcatccattccgagagcagattcagagaaaaagtggggtttacccttctgagcagatgttctgggaatgcaatgttaaagaaagggtggaagtggaaggattgaggatatcagtcagaaagggatatgttataatatcatttagaatccacaatccagaataacgagcaaggctttggaaggagattttgaagtgggaacccttccatgctgcagagtgtccttgtggtccatcattgaatccggtttgggagggaaagcaaaagagtatccaccaagggcacgaattcgttcctggatggggtatgagttgccttttgataggcacgattggatcataaaccgttgcgggacagaagttagatatgtgattgattattatgatggtggtggaaatccaacaaggactaccagttcaccatcccatgacgtccgtcctgccttagattcactttcggcagtatgggacagaatgaaagtcgcttggtggcgttggacctcgtaaagcactgtttcagatggaaaaatataaactatttttttctgagcgatacattaaactattttccccagaaaaaaaaa

SEQ ID NO: 113539 - DNA, 1200 bp, Homo sapiens
cccgctgaggcctgtctgcagaatccacagcaaccagcaccatgcccatgacactggggtactggaacatccgcgggctggcccattccatccgcctgctcctggaatacacagactcaagctacgaggaaaagaagtacacgatgggggacgctcctgattatgacagaagccagtggctgaatgaaaaattcaagctgggcctggactttcccaatctgccctacttgattgatgggactcacaagatcacccagagcaacgccatcctgcggtacattgcccgcaagcacaacctgtgcggggaatcagaaaaggagcagattcgcgaagacattttggagaaccagtttatggacagccgtatgcagctggccaaactctgctatgacccagattttgagaaactgaaaccagaatacctgcaggcactccctgaaatgctgaagctctactcacagtttctggggaagcagccatggtttcttggggaacaagatcacctttgtggatttaatcgctaagaatgtccttgagacgaaaccaagtatttgagcccagctgcctggatgccttcccaaacctgaaaggactcatcctcccgatttgaagggcttggagaagatctctgcctacatgaagtccagcccgcttcctcccaaagacctgtgtttcacaaagatggctgtctggggcaacaagtagggctttgaaggcccagggaggtgggagtgaggagcccaatacttcaagcttgctggcccaaggtgttgcagcgcagctggaaccttctgcatcccaagcaacctgcctccttcgttcccttttcttcctgttttattcccaatcttttaatcccaagacttcaattgtccctcttcactcccccctaaacccctgtccccatgcaggcccctttgaagcctcagctacccacttatccttcgtgaacatcccctcccatcattacccttccctgcactaaagccagcctgacctttccttcctgtttagtgggttgtgtctgctttaaagggcgctgcctggcctctcgcctgtggagctcagccccgagctgtccccgtgttgcatgaaggagcagcattgactggtttacaggccctgctcctgcagcagtggtcccctgccttaggcctacctgatggaagtaaagcctcaaccacatttaaaaaaaaaaaa

SEQ ID NO: 113540 - DNA, 1943 bp, Homo sapiens
ttgggtatttgcaagtctagagctttaggtgttactggttttaaaggtgtcaggggcagctggggctgcgtaaggtaaggtggcagaggaaaggagtaggtgaatggaacttactcacatcctaagcccacaggttgagaacttctgttcagctccctcaggggtttgcgaggctgcctttgcttttctagccccctaaacgggccccccttctctctacaggtgtttcccattaaacactaccaggacaaaatcaggccttacatccagctgccatcgcacagcaacattactggcattgtggaagtgatccttggggaaaccaaggcctatgtcttctttgagaaggactttggggacatgcactcctatgtgcgaagccggaagaggctgcgggaagaggaagccgcccggctcttcaagcagattgtctccgccgtcgcccactgccaccagtcagccatcgtgctgggggacctgaagcttaggaagttcgtcttctccacggaggagagaacccagcttagactagaaagtctagaagacacacacataatgaagggggaagatgatgctttgtcagacaaacatggctgcccagcctacgtgagccctggagatcctcaacaccactgggacctactccggaaaggctgcggacgtttggactggggggggtgatgctctacacccttctggttgggacgataccccttccatgactcagaccccagtgcccttttctccaaaattcggcgtggacagttctgcattcctgagcacatttcccccaaagccaggtgcctcattcgcagcctcttgagacgggagccctccgagagactcactgcccccgagatcctactgcacccctggtttgagtccgtcttggaacccgggtacatcgacttcagaaataggaacttcagaccagattgttccagagtaccagggaggacagtgacattagttccttcttcttgcttaatccccaaaaccttcaggaaacctcataattcttaacacctggcatttccatttctaaagatggacaggccctttggcgtggtaccaaccagataatgactgcatcaggatgaaagctgctgaactcggcatggcgcctcctcttctctgttgggatgagtgactttattgatttgagcagcatatgctgtgattggctgccctgcaaatttgtttcccttaaggaaccctcaccaactaatctctgctggatttgggagttccgcatcttttgtggagggcagagtatggacatcttacacccggtggtcaagtgtgtaataaacttgagcattcgaatgggagaaaaagcaaatcgcacaatgacatattttgagtaataaccgtatttttcacagggtgacaaattgggccaataaatctgccatctttgaactcatctttggtggctagactgctacggcagcttctctgatgggaaagttccttttttggcttaacactcaccctttcttcacactcacatttaccaatgactctgctccgtttttggagcagactgttttaagttgctcaggagcctgatggaaccatgaaccgagactcttctctgtttcctgccaagacctcatctgcactaatgccttctccctgaccttgacacttccccctttagctataaaagcacttaccagccgaacgtggaacagtatcacaaaagattccatctcccaacgatttcagaactctgagctcagagagactccagattttaaaaaataatttgagtgcttggaaactattagctttttaagttccttccaaatatgttagtacctaccctttactttttccccaagaccatctcagggtggagcattctgtctaagagaagaaagataaggaggctcccacccacctctcccaagagcagacattaaacatctttgtgcttt

SEQ ID NO: 113541 - DNA, 3351 bp, Homo sapiens
  misc_feature (1)...(3351): n = a,t,c or g
ggccgcatgatgtctggagttaaccggccgacgatttcttgcgagcgagagagcaagcaggcagcaggctgtttttgggcgggcggacggcacagagggagggagcgagcgagcagtgagtaagccagcaagggcggtcgggtcccgaggtcagccgagatttctcaggtccctccggccccctccctggagtccacagcgccttcggtgtccagaggatcggacacggtccggcccggccatggcctcgttgctgaaggtggatcaggaagtgaagctcaaggttgattctttcagggagcggatcacaagtgaggcagaagacttggtggcaaattttttcccacagaagttattagaacttgatagttttctgaaggaaccaatcttatacatccatgaccctaactcagatccactctgacatgaatgttccagtcacctgactgacattcttcttaccaatagccatgatggaactggatggtcccacttatatgaagcgaaggttggatgagtgtggagaaagctttccagggaacaaaggtgttgtgatgcccaatggaatgctgaaaagcaaccagcagctggtggtacattattgagaaagtgaaacctgagatccggttgttgattgagaaatgtaacacgccttcaggcaaaggtcctcatatatgttttgacctccaggtcaaaatgtgggtacagcttcctgattcccagaatagaagatggaaaccaacttttgggtgtccattccggaaggacacagttccccaagttaagaactggttaaaagtaaagctggcttcttatcgggacagaattttctagatattatattacaagaagccaaattggtttctaaaatagcctaaatatcccccatgtggaggactatcgcccgcacccgtgacagagattgatgagaaagaatatatcagcccttcggctcatcatatcagagctgaggaatcaatatgtcactctacatgacatgatcctgaaaaatatcgagaagatcaaacggccccggagcagcaattcagagaaccctgtactggagccatggccagggccaggggactctgtgagtctggctcaagaccgacattgccttggtttgttacatgactatccgtgatgggggaaactggctgggagatagttaatcacacctctctgttttttagtttaggagtctaaatgnaaactcttcatcttagttctggtggatgtgtttacctcttttttcaggcctcaggaactcttctatttccttccctaataccccacacccaacctgtcgtaatttctggagaactccagggtttgtgtgtgcaggatgttgggcacaaaaatacctgtgtttttattctccccctctctccctcctgtgtcttgcgctttatgttttcttccgtttgataattagttggggtaaaaggtgaggggaaccggaaggaaagtgctaggtgttttttaggaactagggtggccggggggacgaacttctcttcctcacatgaggttactgtttctttcctctgtggggcattggatcctcccacagttgccctggtgatgacttagggcttcccatctgtgtacatcccactttgaatcttgatcgtgacaagaaataccttaggccttcagtcaattccgaagctccttcagttgtttttataatgggcgttttcacatgcacatatgtgtatgcatgtatacgcccatacagacatgcacacacagactcctactgccattagcttaacataccctccctctccacaacccctgttcacattaccttttcaggaggtggacagttgtctttagttgttcatctacccaggacaaacgtcctggggcccgttccttcctcctggataatggtaggctcttggtaacccagggtgagtttggttggagaacagagagatgagaaagcagagggcttgggggaaagcctgttcctctctgactcagccctttttggcattattgcaagagcttgactcctgggttgccttttcccagccagttttcagttggggtgaaggtttctgcaagtgtgagggccagatgctgctgctcatgttgggctttccttttgggaactatttctctttatttatagtgtcgggcttccggggaaagcaatcattggtgtgtatgtgtatgtgccatgcacacacgtgcatatatacacatttgtgtatgtggaaaatgtgactgggacaagtcaaaactatagaagagttgacctcctgtgctctgcgnaatcttccagagatatgcaccttaaattgtttaacagcttttgtgtttaatccccttcagcccctagctcttttattctaccacggctgggagagttgcatcacctgcagttcaggcctgcccagtgcactcttaagtgtctgtttcctgacttaatttttcctgtgctctgtgcttccaacccccaataatatttcccaccgggggatgacattcatttttacttccccaattattctgtaggagaggggagtcagggatgctgtctttcccacggattggtacttcaggtaacaaacccaattgcattttagtgtgggcagtgctcccacccacccttccagttcccttccggttaaaacccttcccccttccctccatgtgtttctcagtttcccgtttcgtttggtggactgttccactgcccctcctggtcaccctatcacccatggatcgtaatgtaaaatgggtgtaccatgtcaagaaattattaaaaatacatggtactttgacctctttctaaagccgcaggacccgggtgcaatgctctgggtgggctaggggatgtacttcatggcttcatatggtgtggcacgcttgggacacccacctccatggggncacctaggccaccctgttgtgtggtccttatggccagttgaggtggaatctttttccccagtatagtggaaagactgaggcttctgcctactgagcaaggttgggtgcttcatttgtgttcagtctgaattatgggaaagttagctcttcccagacctaagctgccttctctccctactttcagaagatcctagttccttccttcccgagtgatacccatgaactgccagtagaggcctgctatcgttcccatgtgtaaggaatgaactggttcaaggcgcgtcctacccagtcattttctttaccttatactaattcttcctgaataatgtcttcagtttcttgaggagaactcctagttttggttttcaaattacttgggagggctgcctatggaatctatctccctctgaaataaagtttcctcatcttccaaaaaaaaaa

SEQ ID NO: 113542 - DNA, 810 bp, Homo sapiens
  misc_feature (1)...(810): n = a,t,c or g
taatggtctggaattcccgggccgacatttcgtctggagacgacgtgcagaaatggcaccttcgagagggggaaggaaaaaaaggaaaaccaggtcatcagcgctcggacctcacgtggctgaaagagacagtgcagtttgttgactgccatatcattgcatactatccctgacactatcgaccatgacactgatctttctgacaaggaaaccatctgccgtgtgactggtgggatgaaggtaaaggcagaccgagatgaatcctcaccatatgctgctatgttggctgcccaggatgtggcccagaggtgcaaggagctgggtatcaccgccctacacatcaaactccgggccacaggaggaaataggaccaagacccctggacctggggcccagtcggccctcagagtcccttgccccgctcgggtatgaaaaaacgggcggatttgaggatgtcaccccccatcccctctgacagcactcgcaggaaggggggtcgccgtggtcgccgtctgtgaacaagattcctcaaaatattttctgttaataaattgccttcctgtncnnnnnnnnnnnnngaggagaaaaccccatactaaccccaaaccaaaacctaaacctacatttgggggggcctcctttaaaaaattttttgggggggcccaattttaccggtgagggggggatatannnnnnnnnnnnnnggggggggttttaaaaacctgcggtgggttttttgggagaccctcttttttttggggggcggccaatggcgccacaccccccccaggagataaagaccttagtggt

SEQ ID NO: 113543 - DNA, 1283 bp, Homo sapiens
ccgggtcgacccacgcgtccgcgcagctgggagagctagactaagttggtcatgaagcagaagctactcacatgcattcggcttgtcctgggctcttgccctcatcctggttctggaatcctcagttcaaggttatcctacgcagagagccaggtaccaatgggtgccctgtaattccagacagtaattctgcaaactgccttgaagaaaaaggaccaaatgttcgatctacttccagggtgaatccaacaagatccccccgtcttgaggactgaccttttttccaaagacgagaatccagggacttgaatccgtatcttcccactttcttgaggactactctggattcaggcttcggctccggctccggctccttgaatcagggtcttgggagttggttcctaacgggaaatgggaacagggtttaccaattagttagacggaagttaatgcttttccatgacaacccttagggtctcttgacaggaatctgcccctcagacagccaggacttgggtcaacatggattagaagaggattttaatgttataaaagaggattttcccacccttgaccaccaggcaaatggtagttaagcaatattttaatgtacccatggttaatatgattaattcttgggacaaagaattttataggaaatttttaaacatctgaaaaaagaagcttaagtttttatcatcccttttttttcctcatgaattccttaaaggattatgctttaatgctgttatctatcttattgttcctcgaaaaatacctgcattttttggtatcatggtccacccacatccattatgaaattaattagattccccatggccataaaatggcctttaacagaatatatatatatatttttaaagtagcttgagaagcaaaattggcaggtaatatttccatacctaaattaagactctgaccttggattgtgaattataatgatatgccccttttcttataaaaacaaaaaaaaaaaataatgaaacccaggtgaatttgtagagtgggggtatttgacaatattttacagggtggagtgtactatatactattacctttgaatgtgtttgcagagctagtggatgtgtttgtctacgaagtatgattgctgttacataacaccccaaatttaactccccaaattaaaaccccagttgtgctggccataacctaatactgctttaccttttttttctggaaaattggggaattttcaaatgttactatatattaaagcagaaatataaccaaaaaaaaaaaaa

SEQ ID NO: 113544 - DNA, 1479 bp, Homo sapiens
cccacgcgtccggcgtcggactaccgttggtttccgcaacttcctggattatccgtagccaacgactttgcaatatatttttccgcctttcctggcaggatttcgctgcttcccgaccgtcttggcccgagcgctctagctctgcgggaaggttttgggctctctggctcggattttgcaatttctccctggggactgccgtggagccgcatccactgtggattataattgcaacatgacggcttggaagagctcgtgggcgtgcgacaacgcgggcgcagaaggatgcagacggtgaccgccgcggtgggagggagcttttggtgggccgctcagcgccagggattcgccttcacagttggggggtttacgaagtcggccaaagtttgatgaatgttggacccaagacaagcgtggtccttctgcctctttggccatttgacgaaggaaggaaggaaggatgacattcgccctgcaaaattccactttcacgctcattccagtccttctgcttgtgaacaacgaacatcaaacatcgttgccgggttgtcggggccattgccaaggccttggcgcaagcttccttgggagagcccggcccgagaccccagggcacccaccgagggcccgagacctgcattgtcttcccttcctacagaacccttcacacggacgccttggaagagcccacggcttggtggaggtggccagctactgcgaagaaagccggggcaacaaaccagtgggtcccctacatctctcttcaggaacgctgaggcccttcccagcagcagaatctgttgagttgctgccacaaacaaaaaatacaataaatatttgaacccccttcccccccagcacaacccccccaaaacaacccaacccacgaggaccatcgggggcagagtcgttggagactgaagaggaagaggaggaggagaaggggagtgagcggccgcccccagggcggagatcccgggagcttgcggccccccgatccgatggagaaggggggaccccaggccagtcaggagacaggacccccgaagctgaggccttgggatggagcagaagccggagtggcggcggcacgctgccgcctttccccattcacggagggtcccagactgtcccactcgggggtggagtgaagactgactggcaagcccccacccctccttgaagactggagctgggcttttgcattacgagagatttggttgaacttggttggtccttgtcttgcaccctcgacaagaccacacttttgggactttgggagctggggctgaagtttgctctgttacccattgaactcccaagtttgcgaattataagagacaatctatttttgttacttgcacttgttaattcgaaccacttgagagccgaagatggggaagcattagatatctatattttaatttctactattgaagggccttgtaataaatttctaaagcctctataaaaaaaaaa

SEQ ID NO: 113545 - DNA, 1422 bp, Homo sapiens
cgataatgcaaagagctatgttcttggctgttcaacacgactgcagacccatggacaagagcgcaggcgggggccacaagagcgaggagaagcgagaaaagatgaaacggacccttttaaaagattggaagaccccgtttgagctacttcttacaaaattcctctactcctgggaagcccaaaaccggcgaaaaaaagcaaacagcaagctttcatcaagccttctcctgaggaagcacagctgtgggtcagaagcatttgacgagctgctagccagcaaatatggtcttgctgcattcagggcttttttaaagtcggaattctgtgaaggaaaatatttgaattctgggctggcctgtggaagactttcaaaaaaaccaaatcacccccaaaagctgtcctcaaaaggcaagggaaattattttacttgactttcataggaaaagggaaggttccaaaaggaggattaaacatagattttcaaaccaaaactctgattgcccagaatatacaagaagctacaagtggctgctttacaactgcccagaaaagggtatacagcttgatggagaacaactcttatcctccgtttcttggagccagaattctaccaggaacttgtgtaaaaagccacaaaacaccacaaaagcctcatgctacattgaaaggcgaaaggggagcccagaaatggaggacatttcattctttttcctgaggggaaggaatggtgaccctgcccataagactgaccttgaattcagcctgggtgttcaggaaccatcactcagaactattgattcaaagttgggtagtgaatcgggaagcccagtacctgacctaggagaagctggtatccagaaccagcttcccctcactgtgtacagaaccgcaagaaggggaataggtgggtctgaaccgtggttgtctccactcctggaaaaagccagggaatgttaagatggatggaaagagaccaatgtaaatacctgttgggccccaaaagccattttaaaaatccaatagatcctgggattaatgtggcccttagggtagcctggttgtaacatcctttcccctaaatccgatcccatggttacccacatagtaagttttaagtttaagggattccagtaacagtgaaagtgtttacctatgtgcaacggtattgaagttccttatgacccacagatccatcagtactggttgtctccatggtaatgcctaaaactgaaatgggtccgctgtttgcattgttaaaaatgatgtgtgaaatagaatgagtgctatgggtggttgaaaactgcagtgtcccgttatgagtgccaaaaatctgtcttgaaggcagctcacactttgaagtggtctttgaatacttttaataaatttattttgataaataatattgaacaaaaaaaaaaaaaa

SEQ ID NO: 113546 - DNA, 928 bp, Homo sapiens
  misc_feature (1)...(928): n = a,t,c or g
ttttttgagatggagtctttctctgttgcccactgtactctatcgtgggcgacgacagagcaagagcaagactccgtctccgagaacaacaacaacagcaacaagaaaacaacaataaaaaaaataaggctgcgtgggaggcagaaagagcttaatgcggccacgctttgtccccttcgggccaccgtccccacccagacttccggtctgccttaaaatgttcatgcgtaagtgcgtgggcaggaaggcgggctcaagcgcagcttcgtggcgttcattggctgtgcagggccgagggaggcggtgcaagcccgccgcgtgacgtcaggacgccgcggtcaggacgtcgaagccaaagaagaccagagccagccgggtggcacagcggtgtcgtggccgtgttgctgatcgcctgggtggttgttggcgtgtccctgcagcgaaggatcctggttggcagtgaaaaagcagtctggctcccgaggtccaccccttatacccccaaggtccagatggcggccaacgtgggtgatcaacgtagcacagattggtcttctcagtacagcatggtggctggggcaggccgagagaatggcataggagacgccgatgcacgagaacccggagtgggagaaggcccgtgcaggccctggccagcatcagcaagtcaggagctgccggcggctctgccaagtccagcagcaatgggcctgtggccagtgcacagtacgtgtcccaggcagaagcctcagctttgcagcagcagcaagtactaccagtggtaccagcagtacaacctatgcctacccctacagctactactatcccatgagcatgtaccagagctatggctccccttccccagtatgggattggccggctcctatggctcagcacacccnaggcaagccaatttnccccgggggaa

SEQ ID NO: 113547 - DNA, 541 bp, Homo sapiens
  misc_feature (1)...(541): n = a,t,c or g
cagatcccgaagcagcgctgtgagcgtaagtgcgggcagagcactgcgccgtttgggaacgcaactttgaggagacagtgcggtggacttcagtgaagttccttatgactttcccctgaaaattgccttcccttatccatgggggccaaatgaaagtaaaaggctcctaatacaaccctataaggactgccnaagtatggccagggggcaagtcggacttgggattggagagaaacaggaactgagcattctcctgggtgtgcagcctgcagcctgcagatgtgaaggaaagttgttgagaagggtgtacagactcttgtgattgggccgagggatgagtgaggccttgaaggtgccttcatcaactgtggagtacctcaaggaaacatggcattgatgtgcagggtcctccagacagagcaggcagtgaaggagtataatgccttggttgcccaaggggtcagggtgggaggtgtcttccattccacctgctgatggtagccttaagaggagaataaatcactaagtgcctaaaaaaaaa

SEQ ID NO: 113548 - DNA, 2821 bp, Homo sapiens
gggggctgttgctgttgctgtggctgtcgctgcccgtcaggctgccttcttttgtcgtttcccagcgctgcgcaggacttctcctggcggcgctgcggatccagggggtcggctgccaggtacaggtgaggacattgcgggaggccggctgggagccttttgtgcggccccagggacgcgcaaattctgaccagtcctccatgtctctcacccgcatcccaggggttgaggctgggcaaacgccgcgaaactatcgctcttccccgtcccgcttccgcgcctgtccaccctgggtaacggaaccagcatcgcggtagggacatcctcgctaggcccggccggaccattcctcagggtgggccctttccgaagccgggaccgctcctgcttgtcggcatcgctccccacaggccgacgtcgagagggcctgctttactcctcctctttctcctccttctcccgcggcttctgcgcggagaggcgtcgcccgggatctgggttttggaagaaggatctttgtgggaagacagggtgaatttatcacagaggaataacgagggagaggagaaaggtttcctaaagacaaaaaaaaatggaggaatctgtaaaccaaatgcagccactgaatgagaagcagatagccaattctcaggatggatatgtatggcaagtcactgacatgaatcgactacaccggttcttattgttcggttctgaaggtgggacttattatatcaaagaacagaagttgggccttgaaaatgctgaagctttaattagattgattgaagatggcagaggatgtgaagtgatacaagaaataaagtcatttagtcaagaaggcagaaccacaaagccaagagcctatgctctttgcacttgccatttgttcccagtgctccgacataagcacaaaacaagcagccttttaaagctgtttctggaaggtttgttcgccttcctacccatctctttacttttatccagtttaagaaagatctgaaggaaagcatgaaatgtggcatgtggggtcgtgccctccggaaggctatagcggactggtacaatgagaaaggtggcatggcccttgctctggcagttacaaaatataaacagagaaatggctggtctcacaaagatctattaagattgtcacatcttaaaccttccagtgaaggacttgcaattgtgaccaaatatattacaaagggctggaaagaagttcatgaattgtataaagaaaaagcactctctgtggagactgaaaaattattaaagtatctggaggctgtagagaaagtgaagcgcacaagagatgagctagaagtcattcatctaatagaagaacatagattagttagagaacatcttttaacaaatcacttaaagtctaaagaggtatggaaggctttgttacaagaaatgccgctcactgcattattaaggaatctagcaaagatgacggctgattcagtacttgaaccaggaaattcagaagtatctttagtatgtgaaaaactgtgtaatgaaaaactactaaaaaaggctcgtatacatccatttcatataatgatagcattagaaacttacaagacaggtcatggtctcagagggaaactgaagtggcgccctgatgaagaaattttgaaagcattggatgctgctttttataaaacatttaagacagttgaaccaactggaaaacgtttcttactagctgttgatgtcagtgcttctatgaaccaaagagttttgggtagtatactcaacgctagtacagttgctgcagcaatgtgcatggttgtcacacgaacagaaaaagattcttatgtagttgctttttccgatggaaatgggtaccatgtccagtgactacagatatggaccttacaacaggttttaatgggctatggagtcaggatccccagcaggtgggaactggatttgctcttctttcccaatgatctgggctcagaagacaaacacacctgctgatgtcttcaattgtattcactgataatgagacctttgctggaggtgtccatcctgctattgctctgagggagtatcgaaagaaaatggatattccagctaaattgattgtttgtggaatgacatcaaatggtttcaccattgcagacccagatgatagagccttgcaaaataccctactaaataaatcattttagacatggagtgcaggtggacactgtgtgaactgtttttggtcagttattgtagaaattgatagatgtaccaaataaactctatgcacattaacaaagtgtctgtctatctctttcaagaaatacgaatgttaaggtttataatatgccttaaaaaatctaaagcctttagtaatcttgtatgtgaccaaggtaaaatttaagttttgataattaatattgaccttttaatgtatctagttttatgtaagtattaaaagtatatgaagttaaagattctttacccatggaattcaattataacaaaatgattagatttaatgaaaacaaattatttaaagttttaaaataggattcttttgtgaaaagatctactcaaaattgcctttggcaaaagttatcatccaaacacaaaaagtcaactatgcaaaattaaaaacactgtttcagtgccaattttgcagacatttttctcctcaattccccattaaaaattttctgaaaagttcctaagatctgaactgtgggtaactgaaagcaagttacatcagaatatattcaccaaaacttcaaaacatttggttgattttacagcactcatttcaacacttgtacaagaaggatcacaaattata

SEQ ID NO: 113549 - DNA, 5607 bp, Homo sapiens
ggcttcctcactatagggctcgagcggccgcccgggcaggttaaaaagccaacattcctctgcttcataggtgaacagcaaagatttctctacccctcaaatgcagctagaattcagcggccgctgaattctttcctgctcactcagtagtcaggtgggcttgacgtctgtgaccagtattcaagagaggatcatgtctacacctggaggagaggaagctattgaacgtttaaaggaatcagagaagatcattgttgagttgaatgaaacttgggaagagaagcttcgtaaaacagaggccatcataaatggagagagaggctttgttggctgagatgggagttgccattcgggaagatggaggaaccctaggggttttctcacctaaaaagaccccacatcttgttaacctcaatgaagacccactaatgtctgagtgcctactttattacatcaaagatggaattacaagggttggccaagcagatgctgagcggcgccaggacatagtgctgagcggggctcacattaaagaagagcattgtatcttccggagtgagagaagcaacagcggggaagttatcgtgaccttagagccctgtgagcgctcagaaacctacgtaaatggcaagagggtgtcccagcctgttcagctgcgctcaggaaaccgtatcatcatgggtaaaaaccatgttttccgctttaaccacccggaacaagcacgagctgagcgagagaagactccttctgctgagaccccctctgagcctgtggactggacatttgcccagagggagcttctggaaaaacaaggaattgatatgaaacaagagatggagaaaaggctacaggaaatggagatcttatacaaaaaggagaaggaagaagcagatcttcttttggagcagcagagactggactatgagagtaaattgcaggccttgcagaagcaggttgaaacccgatctctggctgcagaaacaactgaagaggaggaagaagaggaagaagttccttggacacagcatgaatttgagttggcccaatgggccttccggaaatggaagtctcatcagtttacttcattacgggacttactctggggcaatgccgtgtacctaaaggaggccaatgccatcagtgtggaactgaaaaagaaggtgcagtttcagtttgttctgctgactgacacactgtactcccctttgcctcctgaattacttcccactgagatggaaaaaactcatgaggacaggcctttccctcgcacagtggtagcagtagaagtccaggatttgaagaatggagcaacacactattggtctttggagaaactcaagcagaggctggatttgatgcgagagatgtatgatagggcaggggagatggcctccagtgcccaagacgaaagcgaaaccactgtgactggcagcgatcccttctatgatcggttccactggttcaaacttgtggggagctcccccattttccacggcctgtgtgaacaagcgccttgccgaccgcacaccctcccccacttttttccacggccgattccgacatcactgagctggctgccgaccagcaagatgagatggaggtttttgatgatgaggcattcgtggatgacgccggctctgacgcagggacggaggagggatcagatctcttcagtgacgggcatgacccgttttacgaccgatccccttggttcattttagtgggaagggcatttgtttacctgagcaatctgctgtatcccgtgcccctgatccacagggtggccatcgtcagtgagaaaggtgaagtgcggggatttctgcgtgtggctgtacaggccatcgcagcggatgaagaagctcctgattatggctctggaattcgacagtcaggaacagctaaaatatcttttgataatgaatactttaatcagagtgacttttcgtctgttgcaatgactcgttctggtctgtccttggaggagttgaggattgtggaaggacagggtcagagttctgagggtcatcactcctccagaagaaatcagtcgaattaatgacttggatttgaagtcaagcacttttgctggatggtaagatggtaatggaagggttttctgaagagattggcaaccacctgaaactgggcagtgccttcactttccgagtaacagtgttgcaggccagtggaatcctcccagagtatgcagatatcttctgtcagttcaactttttgcatcgccatgatgaagcattctccacggagcccctcaaaaacaatggcagaggaagtcccctggccttttatcatgtgcagaatattgcagtggagatcactgaatcatttgtggattacatcaaaaccaagcctattgtatttgaagtctttgggcattatcagcagcacccacttcatctgcaaggacaggagcttaacagtccgcctcagccgtgccgccgattcttccctccacccatgccactgtccaagccagttccagccaccaagttaaacacgatgagcaaaaccagccttggccagagcatgagcaagtatgacctcctggtttggtttgagatcagtgaactggagcctacaggagagtatatcccagctgtggttgaccacacagcaggcttgccttgccaggggacatttttgcttcatcagggcatccagcgaaggatcacagtgaccattatccatgagaaggggagcgagctccattggaaagatgttcgtgaactggtggtaggtcgtattcggaataagcctgaggtggatgaagctgcagttgatgccatcctctccctaaatattatttctgccaagtacctgaagtcttcccacaactctagcaggaccttctaccgctttgaggctgtgtgggatagctctctgcataactcccttcttctgaaccgagtgacaccctatggagaaaagatctacatgaccttgtcggcctacctagagctggatcattgcatccagccggctgtcatcaccaaggatgtgtgcatggtcttctactcccgagatgccaagatctcaccaccacgctctctgcgtagcctctttggcagcggctactcaaagtcaccagattcgaatcgagtcactggcatttacgaactcagcttatgcaaaatgtcagacacaggtagtccaggtatgcagagaaggagaagaaaaatcttagatacgtcagtggcatatgtgcggggagaagagaacttagcaggctggcggccccgtggagacagcctcatccttgagcaccagtgggagctggagaagctggagctcctacatgaggtggaaaaaacccgccactttttgctgctgcgtgagagacttggtgacagcatccccaaatccctgagcgactcgttatcccccagcctcagcagtgggaccctcagcacctccaccagtatctcctctcagatctcaaccactacctttgaaagcgccatcacacctagcgagagcagtggctatgattcaggagacatcgaaagcctggtggaccgagagaaagagctggctaccaagtgcctgcaacttctcacccacactttcaacagagaattcagccaggtgcacggcagcgtcagtgactgtaagttgtctgatatctctccaattggacgggatccctctgagtccagtttcagcagtgccaccctcactccctcctccacctgtccctctctggtagactctaggagcaactctctggatcagaagaccccagaagccaattcccgggcctctagtccctgcccagaatttgaacagtttcagattgtcccagctgtggaaacaccatatttggcccgagcaggaaaaaacgaatttctcaatcttgttccagatattgaagaaattagaccaagctcagtggtctctaagaaaggataccttcatttcaaggagcctctttacagtaactgggctaaacattttgttgtcgtccgtcggccttatgtcttcatctataacagtgacaaagaccctgtggagcgtggaatcattaacctgtccacagcacaggtggagtacagtgaggaccagcaggccatggtgaagacaccaaacacctttgctgtctgcacaaagcaccgtggggtccttttgcaggccctcaatgacaaagacatgaacgactggttgtatgccttcaacccacttctagctggcacaatacggtcaaagctttcccgcagatgcccgagccagtcgaaatactaagtgactctgccgagtgccctcactcgccttcgagagataaagaaagcgttacctctcatttctctttgtgattcttgacggtgactcttgtatgtaatcctgtggcttaactacttctccctccttgtccagcacttttctagctctcccgttccccatctccattgctctgtactcttttcttttttcttgtgctgagaatctcgttagtagcatgtggcctaacaaaaggaaaaaatgtttttaaacacacacacacacacacacacacacacacacatacacagacaaaaacacaaaaactctgaggggatctggtgaatctccaaattattgtgggtgtactttggcttccttttgtatgataggtccccatcatgaccacctctgatgtctgtgctgctgtcaccaggcacctttgtttttcaagacaacatactttttttttcttttctctgtttgtgatatcactttaatttttcttgggtggcttagagactaagggaggagacatctggcctttttagaacctgagaggaaaaaaagagtctttttttcccctctgtctctttttgccatggctaatccctgcatttccattcagggaaaaggtggtagtgagcatagaactgcaacagttatattctgagtcaaagttggggctttttacggcataattatggaatttttatttactggtagagaggagacgagaggctttttcagtgggcctgggacagtggctgctcttgactttgtgtgaagggaaatgccaaggatgcttctggtggacttcaggggaccccagggtttggccgtgggccgtgatggcagcaggcggtgggatgcttgtagctcctcacagcaggattcctgcccactgttttttctctgttgggagggaagctcttttctaggagtgtctcagttctgcttttggcattagtgatggtggtggtacagttggaattagtgccatgtcatacacaaatgttccacaaggcgggagtgtttcactttctggtgataaacttgatggtcattgttatgattaagataatgccgggcaggccgggcacagtggctcacgcctgtaatccaagcacttggggaggccgaggcgggcagatcacgagatcaggagttcaagaccagcctggccaatgtgatgaaaccccgtctctactaaaaatacaaaattagtcgggtatggtggcacatgcctgtaattccagctgcttgggagcctgaggcaggagaactgcttgaacccaggaggcagaggttgcagtgagccaagatcgcgctattgcactccagcctgggtgacagagcaagactctgcctcag

SEQ ID NO: 113550 - DNA, 1198 bp, Homo sapiens
ttcgagcgtggctcgtgggttttccgtgaagtcgttttgcatgcggtgggcggcatgtctgtggccgggggggagattcgtggggacacggtgggatgaggacactgctgctcccggccgggttcagcttcagcccggagcccacgctcgaggacatccgccgcctccatgcagtcagtttgctgcggaacgagactgggaacagttccatcagcctcggaatctcctcctgggccttggttggggaagtgggggaagctggcagaactcttccagtggaaaaccgatggggaacctgggcccccaaggctggtcccccagggaaacgggcaagcccttcaagaaggagcttagtgacgtcctcatcctacctgggtgggcatttagcagcccgctgcccgtgttggatcttgccgttagcagttgttttccaaaatgggacattcaaccggcgacgttaccccagcccatctggcccgcagctctttcccgcaagtatacagaattggccccatggggcaattctctgaagaccaggctgtggggcctgcggacattccctgtgactccacaggccagacctcaacctagaaagatggccacaggacttgcaactcagggtggtgtctgaagagcagagagtggcctgggccttggagcctttttcttagtcttttcaagaatagatcatgggcctgaggcctcccacttcttgaggtctgaggcccagcagcctctagaaggtagcctcctggtgtttgttctcccagtaaaatggttttgggcggataacttctagattattcctggatggccagggaggctctctgtcctcaagcaggtgatgacgggggtacccagggggtgcctctgagacccattctcgtgtttccctgttgtaccgttttgcctgcagggaagaagagatcttggttttctagcaaattccccagtaaggaatgtcaatgtaagttccttcccccctctttaagagatttgaaggctgtaagagtccagaatggttggagcccaagctggtcttgggttcaaaatgccatcttttgacactttgcaagcctaaatgacattactcaaattaatcgttctgcacttcagcttccttgtctatcaaataaaaaagaataataccttgccaataagggcgtgagggttcaatgagttatgggaaagctcaagg

SEQ ID NO: 113551 - DNA, 3028 bp, Homo sapiens
  misc_feature (1)...(3028): n = a,t,c or g
ggcacgaggatgtcatggtgtctgttggtttttaggctttcttgggaagtctggtgtttcctatgtagtttggggactaggccacacctctccctcatgcttgtcaccactgctacaccttgtctgcccactttctctccttcccgcccctggaggtgagaccctcacctctctcgtgagcatgctgcctcatgtcttccgtgccgtcgttctgtggctgggtgactgtccctcaggccgccaaccctagttggctctcacagcaacttccagtgctcctggacggggacttcctaagcagcatgggggccacacgggccggccacgcacactggcctgggtccgcattccctatttcaggctgttgtctcgggtcagatctccggaagcggcaggagcgctgggtttcctggttgtggccgggcagcgtctttcttcttcaggggctggatgccacttcccgcctcctccctgtgcccagtggaaggagaaacatcctagagggtggagactgccctgtttttcttttgccattgagtcccagtgtgactcaagcacgaggccacctttctctgccagaggacagaaagcttcagtgactggcccagggtcacacagttctgccgcccagcccagcagcctgagccagcagtcaggatggggtggggacactccgtctctcttgagaccccactcagagaatggggctgacactgtaggagaaatataagcaggactcctgctggctgctcccctcctgcatgaggcatgttagagggactgggaccgccagcccccagctcccatgccgggcctcggcccagtctcagctcctgtttgggagggggggcagaggggcaggggggcagaagttgagtctgggagctggggcagggcacaggctctagggtccagctgtcctcctctcccctcccctgctggccactcctgctgccgtctccacagctctggaatgatgaagtggacaaggccgagcaggagctccgcgttggcccagacagagtttgaccggcaagccagaagtgacccgtctcttgctggaagggaatcagtagcactcatgtgaaccacctgcgctgcctccacgagttcgtcaagtctcagacaacctactacgcaacaagtgctaccgccacatgctggacttgcagaagcagctgggcagctcccagggtgccatatttcccggcaccttcgtgggcaccacagagcccgcctccccacccctgagcagcacctcacccaccactgctgcgtgtcactatgcgtgaggtgtgctctgtaggccagcctggcccctccgggggagagcctcgctctgcctggaagaggtggcccccccctgccagtgggacccgcaaagctcgggtgctctatgactacgaggcagccgacagcagtgagctggccctgctggctgatgagctcatcactgtctacagcctgcctggcatgggaccctgactggctcattgggcgagagaggcaacaagaagggcaaggtccctgtcacctactttgggaattgttcagttaggcaggtgccccccaatcccccccgcattctgggcctaggcaggagaggatgggcgcagccctgccacttaacttgttttgttggtgacacaggtgtttcaaagaggggaaaattttcaccccaattctgtcccttgccccctaagtcaccttagctgtgaagggttcctgaggctggaatggcttccaccccttcccccccagccctgctttctgaccttgtgggctcttggagcccctgcccctggcctgcaatccccgaagcacccccacctttccaggcttccacttaaggagggaggggctgttctgcagcagcttgcacttcagcaccttagggccaggggttgggggccgccgcagatggggcttcagggaagcccccagggtgcatttaagcgagagcccttgccttttcagtttgccaaaaagcttgcatcagggggaatgcgggcaaggcacaccagggcttttgggcagcccctgggggagctgggcgctgcccctgggaggggagagcctggccangcgctggtgctctgggcccggagcagcatcttccggtgctatcctcccctacacacccctcacagctcaagccaagtccagcggccgcagtcttcacctctccacactcactttttatctggtgtttttacttcttgcctgcgtttgcctctctagccaattaaaccgtccttgctgtgcgagtcacctgggctcctgtcagggcctggccctgatggtggtaaagggaaaggtagactcaccctctgccccactcttccacagagtgagcaggggccctgtggctgccccggcccccagctctctagttgggaagaagtgcagccctccctgtcttctgcggggcctgtgcctctcagagggcattgctgttcctgtacatgaagccgcacaaggatcgttttattcctaagaaaaagtttcctaaatttggattgtggagcggactgtagaatgcgtctgacagttcagttcaagcacaagaagtgggtagcggtcagtgctgtctgcaggtcgggcgtttcacccagcatgtgcccccgtgccatgggttctcatgccgtcctcagtgtccacatttcacagatgagatcagcaagacagtcagctcctcaagggaccacagttggcaagtggccaagcagggactgaagcccaggcagcctgattctagaaaccctaagtgatgtctgtgttttagatggcccctagcaggacctagcattctgacttcagtcctgagaaggccaacagccagtaggccccactgttggggcttctgaagaggggatcgggggatgacgggggcacggggctataaataggaaggcacagagcttcaagaaaggctcacccagggatgagctcagcccactgggccaatgagagcctggccagggctggtgttgggcccggagcagcatcttccggtgctatcctcccc

SEQ ID NO: 113552 - DNA, 2666 bp, Homo sapiens
  misc_feature (1)...(2666): n = a,t,c or g
gaaaaggggaaaaaacccagacgactgaactgcccacattgacttacttgtcccagaggcgaaagtcagaagcaagggcacggttcatgctctccgctgggggagtatgggggcaggcaggtgggcgagggaagaggcagtgagtgtggaggcgcggacgcgcggcggatttttaactgctgcagctgctgccgccgccggaggaaccttgatccccgtgctccggacgagcccgggcctcgccatggctgaccagctgactgaggagcagattgcagagttcaaggaggccttctcccctctttgacaaggatgggagatggcactattcaccacccaaggagttggggacagttgatgagatccctgggacagaaccccactgaaggcagagctgcaggatatgatcaatgaggtggatgcagatgaccttccagggaacgggccccattgacttcccggagttccctacccatgatggcccagaaagatgaaggacacagaccagtgaggaggagatccgagaggcgttcccgtgtcattttgaccaggatgggaatggcttacaatcaagcgccgcagagctgcgttcacgtaatgacgaccccctgggggaagaagcttgaccgattgaggaggtgggatgagatgatcagggaaggctgacatcgatgggagatggcccaggtcaattattgaagagttttgtacagatggattgactgcaaagttggaaggccccccgggcagctggcgatgcccgttctcttgatctctctcttctcgcgcgcgcactctctcttcaacactcccctgcgtaccccggttctagcaaacaccaattgattgacctgagaatctgataaagcaacaaaagatttgtcccaagctgcatgattgctctttccccttcttcccctgagtctctctccatgccccttcatctcttccttttgccctcgcctctttccatccatgttctttccaagggcctgatggcattcataaagttgaagccctccccagatccccttggggaggcctcttgccttcctccagcccggatgggttttcctcccattttgggttgttcctcttggttgggcattttaatttggggggcctggaggggcttcccaaccttgtccccgggaacctgcctgggaggaaccaaaaagccctttccccaaggcagaaaagcatgccctttggccgttgcatcccaaccagccctgtgattccacgtgcagatcccagcagcctgttgggggcaggggtgccaagagaagccattccagaagggactgagggggcgttgaggaattgtggcgttgactggatgtggcccaggagggggtcgagggggccaactcacagaaggggactgacagtgggcaacactcacatcccactgggctgctgttctgaaaccatcttgattggctttctgaggtttggctggggtgggggacttgctcattttgggccactctgcaagattggacttgccccgcgttcctgaagcggctctcgagctgttctgtaaatacctggtgctaacatcccatgccgctccctcctcacgatgcacccagcccgcctgagggcccgtcctaggaatggatgtggggatggtcgctttgtaatgtgctggttctctttttttttctttcccctctatgggcccttaagactttcatttttgttcagaaccatgctggggctagctaaaagggtgggggagaggggaagatgggggccccaccacggttttcaaggaggaacggcacctggcaataaaacacgtcttgtagcgccagctgcccagggcgacggcaggctacaagcagcctttgcgatctggtccgccagaaccttccgcttctccgtggtaacttggcgccgatttcctcacatctgtgctacgtgcccctcttccctgcctcttccctcggcccacctgcctgccccgcatactcccccagcggagagcatgatccgtgcccttgcttcctgactttcgcctctgggaacaagtaaagtcaatgtgggcaagttcaagtccgtctgggtttttttccccttttctgttcatttcatctgggctcccccccacccacctccccaccccaccccccaccgccctgcttccccctcactgccccaggtcgatcaaagtggcttttccctgggaccctggcccagctttgagaatctccttctcatcccacccttctggcacccaagcctctgaagggaaggaagggatggggcatagtgggagaccccagccaagaagctgagggtaagggcaggtaggcgtgaggctgtggacattttcggaaatgttttgggtttggttttttttaaaaccggggcaatattgtgttcagttcaagctgtgaagaaaaatattatatcaatgttttccaataaaatacagtgactacctgnnnnnnnnnnnnnnnnnnnnnnnnnnnntataagggggggcccttttaaaaaaacccttggggggccaaaatttaccnnnnnnnnnnaaggtaaaatttttttctttaaggggggccaattaaaaccccccttgggatttttggaaaaaaaccttttttttggggggggaaaaaatgggcccacccccccaaaaaaatttaaggctttaaggg

SEQ ID NO: 113553 - DNA, 1540 bp, Homo sapiens
ctgacttaccggatcggaattcccgggccgaggctggtgcagcggctccaggaggtctccctgttgcagtttatgagggccgacccaggggtgctggccgccctctgtgagaaaactgacaatgacatccgggcctgcatcaacaccctgcagttcctgtacagccggggccagcgggagctgagcgtgcgggacgtgcaggccacacgcgtgggcctcaaggaccagcgcagagggctcttctcggtgtggcaggaggtcttccagctgcctcgagcccagagcaccccacctgcaggcgccgtgtgggccaggaccccgccctgcctgctgacacactcctgctgggtgacggggacgcgggctccctcacctccgcctcacagcgattctaccgtgtcctgcatgccgctgcctctgcgggcgagcacgagaaggtggtccagggcttgtttgacaacttcctgcgtctgcggctgcgagactccagcctgggtgctgtgtgtgtggccctcgactggctggccttcgatgacctgctggcgggggctgctcatcacagccagagcttccagctgctgcgctacccacccttcctgcccgtggccttccatgtgctgtttgcttccagccacacacccaggatcaccttccccagcagccagcaggaggcccagaaccggatgagccagatgaggaacctgatccagacgctggtgtccggcatcgcgccagccacgcgcagccgggccacgccccaggccctgctcctcgatgccctctgcctgctcctggacattcttggcacccaagctccgccccgtgagcacacagctgtacagcacccgtgaaaagcaacagctggccagcctggtgggcacgatgctcgcttacagcctgacctaccgccaggagcgcacgcccgatggccagtacatctacaggctggagccgaacgtggaggaactctgccgcttccctgagctgcctgcccgcaagcccctcacctaccagacgaagcagctcatcgcccgcgagatcgaggtggagaagatgcggcgggcggaggcttctgcccgggtagagaacagcccccaggtggatgggagccccccagggctcgagggtctgctggggggcattggggagaaaggggtgcaccgacctgccccacgcaaccatgagcagcggctggaggcacatcatgaggcagaagcggcccgggaagaccagcctgagaagggccttctttggacgtgtggtcgtcaggagcacagcagtcccgagtgcaggggaacagggccccggagcaggactcagtggagcggcgcatgggcacagcggtgggcaggagcgaggtctggttccgcttcaacgagggtgtctccaacgccgctgcggcgcagcctgtacatcagggacttgctctagttctctgagccgcggacatgccctcgcattgcttcccgcagagtgcagagacaggaagctggagatgtctttataaagtcacacctttacagactgtaaaaaaaaaaaa

SEQ ID NO: 113554 - DNA, 898 bp, Homo sapiens
  misc_feature (1)...(898): n = a,t,c or g
tttttttttttttaaatacaagtggatttttagagtttattaagcaggggagtggaggggagatgtggcacaaatagaagtatgtaacattcaaacaacagcatctaggatttttgaaaaaactttcggttacagtntacacaaagggtcacttccctccccagcgacacattgggcctctcaaaggagaggagggagtaattccccacggtaagggccaagtggttgctcccctgggtttttggaaatccatttctgcggagcttttcaagncccaaaaccctggggctttagggtcgagactttcatagcagttgaccagccagaccccagcaaaaatggctgcgaaccgtgaaaacccctgggggcggcgatccggggtgccgcatcatgaagctgaagagcgcctggcctgtttgcccccgggtgggaagggagtagaggccgtaggtgaagggcggccgccgtggccaggcaacctgaggaggggacaaagcaactgggaaacagcaggtcgggccccgcaggtcattccccgctttgggtctcgcttccccaaagccaagatctctggatcacagcggagggagggcggcgagggtaggtcgagtcgaggtcttcctagttacagagtcctcccaatcttaggccccaaatcccgccccctaaacccgctgctcccgctccaatcagtttcgcccctcaccgccccgccccctcgtctcttctctagtccgctctccttccgctccccgctagcgctctggtccttctctacttccttccctccgacatcactgtcctctccttgtgcagttcctaccgcacccacttacctatgggtaccaccgggttctcgcgggtcttgcgaacgaacttttccttgaaactctctgga

SEQ ID NO: 113555 - DNA, 401 bp, Homo sapiens
aatacagtgctgctggatgtccagaaggacgcctggagggaagacagagggtgctcactggccgagtctgatggttggtgtccccacagaccagcccagcctctttcccgccttgcagggcccagcctggccatatctgcggcactcctgctctgctgcgacctctaccctgcccaggtttcccaggcttccctcctgcctccccggggacctcctgtcctcagcctgttcccatcactcacaaggacccgaggggcagggaaaggcagggctcctctgtggtcattctgccccatgggcaaccacgcctcctatctgccagcttgggcctcttccctacctgcggcccaggccgtggatcagtgcaatagacataggcctttccctcagggggaacacaa

SEQ ID NO: 113556 - DNA, 1718 bp, Homo sapiens
  misc_feature (1)...(1718): n = a,t,c or g
tcgtgaaagggccgcaaaaaggccgaggngangttgacggctgcgactccattttgtaggccgcttatttgttgtgcatccacggcgactctgcccgcagagtcgatgcaagcgcaaaggccttacaatttaaaaggaagaaaaaaaaataaagataattcggcgagtacaattgacaaagcgtgtgaggtcgctcagcctccagcagtaactgctgatctccagttcttggagggttccggtgagaagaacgcccctactgcggtacttgaggaagcggcaggaggagaatgcggcccctggacatagacgaggtggaagcgcctgaggaagtggaggtgcttggagcccgaaggaaggatttcgagcagttccctgctcccgggtcatcaacgagatgcgcgaggacatcgcttcttcttattacgcgagccacggggcggggcgtacctgcggaccagggagccaagctgttggggagattggacaatattgctttttcccagattcaaaacgcaggttggaaggcctcggaggagagcgccctcaatcacgtgcaagcacccgagtggcgaagccgacgagagagtgtcggagttgtgcgagaaggctgaggagaaagccaaggagattgcgaagatggcagagatgctggtcgagctcgtctggcgaatagagagaagcgaggtcttcttgaaaggaggagatccggtggtaaggttcacagctgaggactgtagtcaactggtaaggatgaactgacaccttgaggaaactgaaacagcttgtcattttctctgttttgtttttgtatgttttttacccccatgtaacagtctcccttatgggtccagtgattgatgacctcgatatggatttagattatcaaatgtgtttggttttggaaatataacttttgtcaaagaaatactctcagaagagaaatggggcttaattaagttgtttttgtggtcacgtttattcttgttacttcgctgtgtttttgaaatgttgggcatggcctccgtattttgctgttacctttggtgacccgaatggttttttggaacacgtcaagaccgtgggatcagaatcttccaactttagaggtgcaatggaaagacactacgctacttggttgagccctggtgaagaatgtattaatgacgactgctttgcataaaactgggaagaaagagaaggacagttggagatggaagatggttttgtatatattttgggaaccttaagtccccccctgtgagaccgaaaagaggagagcctatgttttggtgtccaccattgtcctgatatataattgtgtaaccctgtccaggtgacgttgatttagaccaaccatagctgacccttttatgacaaggccagtttgaatagggacctattgtaatacccctcacacattataggggcatcagagaatggcatggacagagacagtctacagagagctttaagaaggccggagaaaggaaaagacattatcagggcctggaaagtctcttccagttcgatcgagggtagtagacctgtcagattggaggtcaaagtcaaaagtataataagtgttaatttgccttgaaaaacaaagacctaaaaagcctttttttaagaaataaatttatttgttcacatgaccaaagcccctccctgtgtgggttaataaaagaatcatagacggtatgagaaagagaattcag

SEQ ID NO: 113557 - DNA, 377 bp, Homo sapiens
aatacatccctctttaatattcactatcctcttctcacagcctgtaagcctcgctcaaattagggtgcagctgcaacccaaacccaaaataaaatgcccaagcacgcgacagggacacacacggctccagatccaccggccccgcccgcctcctctccacagcctggctgctagcaggcaaagaagtcagggaagatgctctccacctcgtccttcagggccaggcctgcacagtccacatccaggccccacggctccagagggctgtcctggagctcctgggagccaagctcagggtcccctaggaagcctggctctccaacatccagtggactgctctcagctggggcccatgcagggccactgcctcctcgacc

SEQ ID NO: 113558 - DNA, 639 bp, Homo sapiens
  misc_feature (1)...(639): n = a,t,c or g
tgagttgaagcgtacgcctgcggtaccggnccggaattccgggtcgacgatttcgtgcgctgtgcggcgcaaggcggctggcacaaacggcggcgccggggccggaggaaaaagcctcgccaccctgaagggtcccttcccaagcccttatggaccgcacaggactaggggaccagcaagcaactcccgcagggcacgagaagagctcttgctgtctgccctgcctcaccctgccccacaccaaggcccggtggcccccagctgcatcaagtggaggcggaggacatggccggaggagggtggcaccatgggccccgggcggtgccctccatgccccgggggatgaagacactgctgccatggacagcccgtgccaagccgcagccccctaagtcaggctctccctcaagttacccagggtcttcgtcagagcccttggagcctgagcctggccgggccaggatgggagtggagagttaccttgccctgtcccctgctcccctcctaccactgtccaggagtgcctagtgaggcctcggcagggagtgggacccccagagccacagccacctctaccactgccagccctccctcgggacggttttggcgggtcaggatggtggtgagctgcggtcgcaa

SEQ ID NO: 113559 - DNA, 1073 bp, Homo sapiens
tttcgtgctggttctgcggtgtgcggccagccatggatttttctgggcccagcgaagtgacaggctcagacgcatcgggaccggacccgcagcttgtggtcaccatgggcttcacggtgttcggggttcggtaaaaaagctcacacatttgacttggaagcaatgtttgaacaaactcaaagaacagctgtggaaagaagtcacaaaacactggggctggtgaattaccagatctccatcaagtgcagtaaccagttcaagttggaaggtgtgtcttttgaatgcagaaaacaaagtcgtggacaaccaggctgggacccagggccagctgaaggtgctgggtgccaacctctggtggccgtacctgatgcacgaacaccccgcctacctgtactcgtgggaggatggtgattgctcacaccaaagccttggacccctcccagcctgtgacctttgtgaccaagtcccacctaccaggcagacaaggggcctctgtatgtggatgtgaccccgtgtgaacagctactactctgggtatcgcaactacgggccacctgggagttgattccagctgcagctggccgccccagtttgagaattggtgtaaggaccatcacaatcccattattcagagcgcgtatggagtggaaacgcttgtaaggcttctaccaggatccaccctctgatgttccagtgaagaggacccggaaaagtcctgctagagcagtaccatctgggtctggatcaaaaacgcagaaaatacggtggttggagagctcatctggaattttgccgatttcatgactaaccagtgtgtcagtttcttggtcgggaatgaaaatagtgccaacctgtgataccttcactctaattttactttctgaggaagttttctgtaatagttatttggtgataattattaatactggtgagaaaatcaatgtaaaagaggagaaataacccacacaaccacatacaactaggaaatgatagatggatctgaaaaaaaggatatgcactcttaacaagttcaacacccaagtactattgcaagtaccagctgtatttcatgg

SEQ ID NO: 113560 - DNA, 1280 bp, Homo sapiens
  misc_feature (1)...(1280): n = a,t,c or g
ctcgtcgctgcagccggcggctagcgggcgtccgcgccatggagcgctacgcgggcgccttggaggaggtggcggacggtgcccggcagcaggagcgacactaccagctgctgtcggcgttacagagcctggtgaaggagttgcccagctcattccagcagcgcttgtcctacaccacgctgagcgacctggccctggcgcttctcgacggcaccgtgttcgaaatcgtgcaggggctactggaggatccagcacctcaccgaaaagagcctgtacaaccagcgcctggcgcctacagaacgagcatcgagtgctcaggcaggcgctgcggcagaagcaccaggaagcccagcaggcctgccggccccataacctgcctgtgcttcaggcggctcagcagccgagaactagaaggccgtggaacacncggatccgtgaggagcaagcgggcgattggaccagaagatcatcctggagctggaccggaaggtgggctgaccagcagagcacactggagaaggcggggggtgggctgggctcttacgtgaccaccaacccacaggagctgatgctgcatgatgaaccatgctggaacatcatccggaaagctgcagcagattgggctgccggggcagggatatgcagccctgggactggggaggtcccctggcagttgccttctgcccagtgtgaccagaaaggcagccctgtcccaccatagccacaggcaacagaagtttgggcaaagttcatttttttgaccttttggccacttgccttccctagctgcntccgcagggggttcccccctgctgcagggagagacccaggtggaccccaagcttgcctgtcaccctttcaatcttgggacttgctgtcaaacccttaggatagtctcataaaggggaggctgggccagcctgctgctgtctgcttcaggacccaggcagagagtgaggctgggggttctcacaccttactccaccgggcacattcccaacctgctactggggcccactcaagtgcttgttctggtctcagccgctcccttggcagctgcagcccccatgcagaagaggctcccaggcccaagctctgtgtgacccaagagaaatacaagatgcctcagtgtggcccaaaaagaaaaaactaaaggacttttattgaaggggcccagcgtttattccctttaaggggggcatttttactgtccaccctggccctgtttttaacggacaggagtgggaaaaaaccccccatctgtggacaaggggtgagtc

SEQ ID NO: 113561 - DNA, 809 bp, Homo sapiens
tttcgtttcctcgtttgcccctcgagttcatgggagctcgctttcttttcctctaggcagagaagaggcgatggcggcgatggcatctctcggcgccctggcgctgctcctgctgtccagcctctcccgctgctcagggatctgcctcctgtggtccagacccagagccttctctgacgtcctctgctgaagccatcgttctgccagggcaccacatttggacagcggttggctgagaacattcccactttggggagcctttgttttcacaccctctgatgtaggcggcagccttcctttcctttgggcctctggttatggagaaggctaaggcaaggtcctttctctcacagctaaccagctggtgcttttggaaccagagtctcttcccgttacttcttcaggaaacgctggggccagtcttcaccttctgtcaactggccgggggcagagaccctttctctcatcttgaaagccccagtgcattggcctggcctgcagcccccacccccgatgtctctgctgagagatgccttcagtaacctcgtccaggccgtttgtggcttctgaattgaggctggcctggcccccagggcctccgtgtcataggtccaagtgttggcatgtattgtccagtgaatccagcccccacctgtccccagttcgctcttcctgcacacctccagaaagccggccttgcccctccccagccttccttcacagccatcccgcctacgttgccattgcatttgtgaccgagcacttggatctgtctcgcatatcccacctggaaggggcaggaagagcgc

SEQ ID NO: 113562 - DNA, 1673 bp, Homo sapiens
  misc_feature (1)...(1673): n = a,t,c or g
cggccgcgtcgacggagagtggcatggtggcctactatcaggtccaaaagggacccctgaagctgaaaggcgtcgcaaagctgggagtgaccaagcggtgaggcccgagggcccgcgggattccgtcttcatcccccttaaaccttttctcgggacccctgggcctgatcctccgacccgccgccttctcatgtttttttccaggaagaagaaaaagaaggacaaagacaaagcgaaacatcctggaagcaatgggaacggagcaaaaagaacggaggaggagaagcggcgcggccttggacaagcggaccccggcccaggcggacttcgagaaaatgcaggagaagcggcaaatggaaaggatcctaatgaaggctatccaaaccccacaggcagagagtggaggacttcaacagacacctgggacacactcacggagcattaccgacattcccaaagtcaacttggacgaagtagcccgcctgcccccagtatggagcagcatcgaagggttcgcaaaaaggggcacactgggggttgtgtgtggtttcctttgggtatattctnggaaaacatggcttacaccacacccttgcatcttcttgctacagactgcttttccgaagctgtgttaccctcattctggaacttgattaaagtaagatcgtccttgtactcagtttaggcttcttggcaacatacagaagatacacccttttcgtttggatgggaaagtttcttaagtttatccagaggtaaagcccattgtgtgtctgtgtcatgttaaaaatgttttcacccgagttgcatgttaacgctctgagggccagccagctgtcttctcctgggatgagacagactccagagggtaaggagctagcgccataggtggccctgcagtatgcagagccccgtcagggacccagcgtgggcgcccttccaagcttcctctaagctttggggcctaatgctgtcccctgcaggccctagggaaggccatttggcaactatggctggccttcaagacttcctccttcagcccacctgggccactgaggacagcattagcctggggttaacgggaacagcccacctaagggcaagatttgggaacgggacaacactttgttcctttttttgaggcccgttttcccaaaacccccttttccagggtgcttctaatgggttgttgcccatagcagaacgctgctaatgacatcacaagcattcctttgaaaatggaacccagacacagccctgccctcctcaatccctccagcctgggggctccctagccagccctcttgtatttacctcagagttggacacattcacacagatccctgtttgggcatttccttacctttacgggacgttttcagggggttgacagggaccagggcagagcccggttacaaacagacaaggcttgcagtcaaaatgggagggtcccaggtctccgtgttggagggctgggactcttgtagggcctgtgcgcccctggctgaggatcaaaccacatatgttattgggagaaacgatttctgttgacgtagatattgaaagaataatgaaggcagaaatataaaaacgaagtgtgggaatttgggggttgtcctgtgttaaattaccacaataattgcaaaagtcagttattgtacaaaaaaaaaaaa

SEQ ID NO: 113563 - DNA, 715 bp, Homo sapiens
ttaataaacatccgattttatttacaaagcattaaagcttcagcaagaagtacccaaggctaagtctcatcttgtacaaaactacagattttttttttttttgagatggagtcttgctctgtcgcccaggctgaagtgcagtggccagatcatagctcactgcagcttcgacctcctgggctcaagtgatcctcctccctcagccttccgaggtagctgggacccacaggtgcgcgccgccacgcccgacttccttactgtctccgctactactactttgtacttcggttatttaatccttcaaaacactcgaagttaaagcattttcatccccatcttaaattcgtaacccagggaaggtctgctcatactcatttcaggtgagcgacttgctccagtcccgccgtgcccggcagcggggctgaacccagatgacaaagcgctgaccgtcggggttcatttccccgccccgcccctacccttggccaggtgcggctgcagcttcttcgcactgaggaggccggcgctggagatcacggcatccagcacggcggagtagcgctgcgtttcgcacaccagcgcgtacagctgcttcacgttctggaagttgctggagtacaccagccccttgatagagccctggcggctctccacgccggccagcacgcctgcctccgcagcgtacagccccatgttcccgcgcgacgaaatcgtg

SEQ ID NO: 113564 - DNA, 891 bp, Homo sapiens
ggggtgagtgttcaagtcagaacctccctcccgcagccccttcatgaggagccccctccatgggggacatggagaccaggcgcccactctgtgccaggccccagcagctcccaggatgtggggcttcagcctggtggggggcatagggtagagggtgcccatgggggatacaggggaaccaaccatactgggctcaggcacagcctcctaggggtggacagcctgctcttggcagaggtgagagaaagaccctctctttgtttccagtgcccagggagaggtgggaggtgatgggggatctgcacagtttgggggctcagtcaacacgagctctgcgttacgggaggaacagcaagcccagtgggaaaattggcctaagtctggggttctggcgacagcccctggcttctttcttggcagataagtgcatgacggaacaataggtcagccactccattcattcattcattcagtcagtcaatccttcattcattcaacatccacccaacccactctgcgatgggatggatcagggccccaggacagcctggtgctgcagacccatccttcccgatggctgcagtccagggccgggcgggagacactggggctgcccacattgatgggtgcacaggtgtgaggctcaaaaggaaaacctgtcccagtggctggaacagggctgactcctgaaggctcatggttgggaggtgcaggtgcgaggccccaggcagacaaggccaaggggctataccacagggaccacctggcagcaagggtttctggctcctgggctaggaggaaaccaaggtgggggagacaggatgggagggaacaggggatggaaggggagggccaaggacgctacatggatgccgtgggacagctcggaga

SEQ ID NO: 113565 - DNA, 2324 bp, Homo sapiens
aactgatcgtcccacccagttcttgaacagccccaatgctgttcatgaaggtggaagaagtggctgccccggctgcatgctcttgtcgtaggacctggcttgggtagagatgatcgtccacccagttcttgacagccccaatgctgttcatgaggtggagaagtggctgccccggctgcatgctcttgtcgtaggaactggcttgggtagagatgatgcgcttctcagaaatgtccagggcatttttgaaagtgtcaaaggccagggacatccctgtttgtcatcgacgcggatggcctgtggctggtcgctcagcagccggccctcatccatggctaccggaaggctgtgctcactcccaaccacgtggaagttcagcagacttgtatgacgctgtgcttcagaggccctatgggacagcgatgacagccaatggatctgttgctaaagacttcaagccaaagccctggggcaacgtgacggtggtccagaaagggagagcgcgacatcctctccatcggccagcaggtgcatgtgtgcagccaggaaggcagcaagccgcaggtgctggagggcaaggggacctcctgtcgggctccctgggcgtcctggtacactgggcgctccttgctggaccacagaaaacaaatgggaccagccctctcctggtggccgcgtttggcgccatgctctctcaccaggcagtgcaaccaccaagccttccagaagcacggtcgctccaccaccacctccgacatgatcgccgaggtgggggccgccttcagcaagctctttgaaacctagagcccgcgcagaccagaagtaaacaggcaccttggacggaggagagcgtgtgtgtgatgggaaaatccggacccacgcgtgtgctgaaggcgtacggtgcttgccagattttcaacttgagcataaattggttgccattgagaatttaagaatctggaatattgcagggtcttgggtaaacttaatgcatgggtggagatgttagtggggacactaaacaaagcattcctgagagtgccttagctccttggtaagtaacttgggaagacagaaatgaagaaaatcacattgagaatgaagaattctttagcagctcaacagagtttctcggcctgctcccagatcggcgaagtttctacttgttactctctctgccggcgcccttcgttcctcctctgcttcacttccctagtctttcctccggcaggggagctgggcaggggtccaccgggtgtctccctcgagtccccgactcgcactcgactgggtccatcagaggggctggctttcgtttcttccagcttcatcttcttttaaatgtggtgactagcttggtggtatctgggctgctggtgtttgggcttatttgacatactccaggggtaatcaatgatgactttgtttgggaaaccctttttggaggcaccatggggaacagaaggaaacatgagtgacgctgacccttgagtgtgtgggtggggagctctgagacgcctcctgtcccacgctctccggtgtccgtgtctacacaggggtccccaatgatacccaccggccccagcagggcaagaccggaccggggacgggcacggtgaagggcttgcagcttggggtctgacgttggccccctaattgctgtctcaggagaaggctctggaggactttaaggcatgcctgggcctggttgcagtgatggcgctaagaactacccggggaaagacagtatcgtggtcacgtatgcttaaggaagcagcacagccagtgtccttaagggatgttcgcgtccagtaaagacactggtaactgcggtttcagccaaacaactcttcatggcagttgtcgacctcgggttagcttctgttgtctttgtggatggttttcctggagcggcctgacgttgacgtgttctctggtcccaagttctaaccggggcatggtacggtttcgtgcctgacgcagtgcattagggtgttctcttatactttcagtagcgtctttccacagcaagggccaaaccctcctggttcccttcaagagtctttttggcctgatgatgactcttgaagtgataccctgtgatgcagacatgcccccagatgggattctactttctttaaaactaagggactttccaagattaaaaaaaagatttgtcactactaatttgacgcctaacttcagaagcttcactgtctacatgtgaacttttccagaaaaactgtgccatggacatttttcctctggggaattaacatctaaattctggtaactattaaaagacagatctggttaatttaaaa

SEQ ID NO: 113566 - DNA, 2012 bp, Homo sapiens
tggactctttggacaaccacaggtgccgaggggacctgaccaagacctacagcctggaggcctatgacaactggttcaactgcctgagcatgctggtggccactgaggtgtgccgggtggtgaagaagaaacaccggacccgcatgttggagttcttcattgatgtggcccgggagtgcttcaacatcgggaacttcaactccatgatggccatcatctctggcatgaacctcagtcctgtggcaaggctgaagaaaacttggtccaaggtcaagacagccaagtttgatgtcttggagcatcacatggacccgtccagcaacttctgcaactaccgtacagccctgcagggggccacgcagaggtcccagatggccaacagcagccgtgaaaagatcgtcatccctgtgttcaacctcttcgttaaggacatctacttcctgccacaaaatccataccaaccacctgcccaacgggcacattaactttaagaaattctgggagatctccagacagatccatgagttcatgacatggacacaggtagagtgtcctttcgagaaggacaagaagattccagagttacctgctcacggcgccccatcctacagcgaggaagctctcttcgtcgccctcctttgaaagtgagggtcccgagaaccacatggaaaaagacagctggaagaccctcaggaccacccttctgaacagagcctgaggcggatgcagcccgcgacgccagaggaagcacgtgcactaactgggtttaaattttgactgatgtgggttgagaatgaggagcccctcactggttggggtccattttgtatataacttttatgagaaaaaaatggtaattatttcacgcatcaacctttggcacttacaaagttttttttgttgtattttaaataacagggcaaggccctgctttggggagggggaggggagagtatcatgggagatggtatccatgataacatcttattctaatgagatgtagagtattattttttactttttgattattaacatcttatgaaaaaaatattttaaaaaacccagccaaaaccaacgtgagccctgcctgctcggacgcctttccagccagtgtctctgacgtcggggttagtgccttaaagggtactgggggtctggtcttcctgctctgtggtttgggctgcggtgagtcccactccacctgggcgcctgccctcaggagcctgggctgcgaggctccataggagggctggtggctgggaggtcgcgtccgcacacttctggaagtgagcctttgagtacgggctgtccaaagtttacattttcattttcctttcagggatttgtggggtcagggaggggcagggggcacctggcagcatattttctgtgacaatgtgtccagcaaatcattcttcaactacattttagaaaggaggaaatctaaaataaggttatggagtggaagcatggagttgacagtcttctgggctgtgactgaaagacacactgagctgtgatgaagaacaatacatggccgactccacggaggagacatttagagctaggcttgaaacctatcatctacagaggggagggcagccatcagccctcttcccacctgggtaggcagcgccctaattggaattggaaacagaaaattcgccaggccatactgctggagcccattcagataaaactgcccaatactgagaggtgttttctacacccagctagaggagcacactccatttttccatggctgagattccggggggaaagccctgggccttactgaccatggcgcaggacagctgtccttcagaaagcacacggtcaatccacgtggaccgtctccctcgcaggaactccgcatccttgtccctctctgcattcccagtttccgcaggagccttgatcaatggggaagcctgggtgaggatgggccaggtcccaattcccaaagctcctggaagagcctgaagacattgtgaaaggctgggcctggggag

SEQ ID NO: 113567 - DNA, 1485 bp, Homo sapiens
  misc_feature (1)...(1485): n = a,t,c or g
taccaatccggccttcccgggtcgacgatttcgtgctttgcagactagagggaagggcttgttagtgtggagggaagggggggttttggggaaggcaaaaagaactagaggctttgaactgagggggagaaaaggggtgaagtccggtgcagggagattgagggctgaaagcaaatatgaatggggagcctacggtgggggtagggttgtttcaagcttgagatcttttcaatttaggggctagggtcgggcaggggatggctgactgcccacaacgataaagccatcttcctctttgttctcctttcaggagcgagcctgatgcccccagactactgccttcccctgtcacctgcacacataaagagggggagacaccaccagcccctgcagcactctccagtcctcttgctgtgccggccttgtcagcatcctcattgagttccagagctcctccacctgcagaagtcagggtgcagccacagctcagcaggacccctcaagcggcccagcagactgaggccctggccagcactgggagtcaggcccagtctgctccaaccccggcctgggatgaggacactgcacaaattggccccaagagaattaggaaagctgccaaaagagagctgatgccttgtgacttccctggctgtggaaggatcttctccaaccggcagtatttgaatcaccacaaaaagtaccagcacatccaccagaagtctttctcctgccccgagccaggcctgtgggaagtctttcaactttaagaaacacctgaaggagcacatgaagctgcacagtgacacccgggactacatctgtgagttctgcgcccggtctttccgcactagcaggcaaccttgtcatccacagacgtatccacactgggaggaaaaacccctgcagtgtgagatatgcggggtttaccctgcccgccagaagggcttccctgaactgggcaccagcggcaagatggcaggaggacggtgggctgccttgcgctttcccctgtggaattcttgcgggcaagcgctttttgaggaaggccaggacagtgttttgcaggcccaccgtaggcaaaaagtcaccccagccctgcttcttagccccttcaaagagttcaccccagtggtccccntaggaggccttgtccccagcatctcctgcccctgggccctctgggatcccagcgaggggttccaggcccttttgcatttccttcaggcttccaaccctgcttcctcagcaatgagctctcctccagctttggcttttgggaagccagactcccagggactgaaaaggagcaacaaggagagggtctgcttgagaaatgccagatgcttggtccccaggaactaaggcgacagagtgcagggtgggggcaagactgggctgtaggggagctggactactttagtcttcctaaagggcaaaataaacagtattttatgcaaaaaaaaaaaacacagggcggccgct

SEQ ID NO: 113568 - DNA, 2621 bp, Homo sapiens
  misc_feature (1)...(2621): n = a,t,c or g
ctttaagtctcttttctcttttttcgcgcaaaaatgccggatccagcgaaatccgctcctgctcccaagaagggctccaaaaaggctgttacgaaagtgcagaagaaggacggcaagaagcgcaagcgcagccgcaaggagagctactccgtttacgtgtacaaggtgctgaagcaggtccaccccgacacccggcatctcgtccaaggccatgggcatcatgaactccttcgtcaacgacatcttcgagcgcatcgcgggagaggcttcccgcctggcgcactacaacaagcgctccaccatcacatcccgcgagatccagaccggcccgtgcgccctgcctgcctgccccggcgaagctgggcccaaagcaccgccgtgtcccgagggcacccaaggcgggtcaacccaaagtacacccagctcccaaagttggaacctgccgggaccctggcgctcgctcgctccctccctccctccctccgcgggtcgccggctgccttgactcccaaaagctcttttcagagccaccccacctaatcactagaaaagagcttgttcacttattcccttagtttcctttcataaagtaagttattttagtgtgaaggtcatgggaaatggcatacgtagctttttaactatttggaactcgaggtccccagtgcgtcattggatttgcttttgaatctagagcgtgtctttactcattgtgctgcttagccttcccaggagtcggttctcaattaggctgttgggaatccgcctctttcacccgcccccactcccgccccacacgcgccctggtggccccttgggtctgtttcattctaaaacgaagtgtgctgagttcggctgtcatttaagagaactccaggacacaattcagcccgggttccgcaaacactggcgtgacagcatctgtatgactgacgcttggcagcagctttttgtgtccggttcaccagttctggccgtgcgatggggcctcctgtggataccagccgttctgtgtaatttgggacgaaggccgcgcagcgggggtccccagccttggtcctgatttggggcgacaagaattattccaaaattctgcgcctttttctaatttgtagatttcagtttccgtcgtttcaatttgagactttgaaattcctatttctcaattttgttgataatttctgcatttaatggtctgtgctttaaatgggtaacgctacgggccccaggtcactgcgaggcactttaccatgtagatacggggctcaaaagtcacctctcagagacctacgtcatccactcaggaattcgcgcctctcatacttgcctgtctcattttatcttccttctagcagctgtctgaaattggttcgtctgttttcttgtttatgggtattctcaagcccttgacagaccggctagtgtgggttttcccgtgcatcttgcagcctgggcacattatgggacacttaaatactacggtattggatctaatattgttggggttaaatttttccatcccaccctttttcgttaaaccgcgttcggttgaatggatgaagggtgctggttcaattccaattaagatgtatgtgaaggcaacagtggaaaatggaaatgttcttggagctacttcctcaaaatgtatccttagtcacctcagtgcaacagctgggagggggccgtgttaagattttttttgctacaaagaggaggtggcaatggtagatccacccttatgcttgctcagtttagcataacctcttatgggattttcatcaaattcagccgtgttggtcactgggaaagagccttttccttctccttttcttactctcccctcatgggtgttccccctctttaaagggagagggagcttttaaatttaccacttacccaccctcatttgctttttctgggagggccatgcaatatagggcggggacttacaggagttaaatctccttttttacaaaatgagggccaaggaggaaggcctcattgggtttcacagtccatgcaagcctcatacctgccccacccctgtattccctcagatgcagggacaattggcattttaaggtttaattttggtgggaggtgccagaatatttacctctttcctgtcccaaccccttgattcctgcccgaggaagacactgatggtttgatgagtgattcagcttgtttttggctacagggcttttggagctgatggcaggggtttgatgaatttataatgagctctagacattatcacagactgaatagatcttaactgtctcctacatagtgtgttttcaaatgtgtcatagatgcctattgttattaataaagtttaccaattaatttnnnnnnnnnnnnnnggggcggccgttttaaaggatcccttgggggggcccaaattttacccgggcttgcaaggtaatatttttttccttatggggggccgttttaaaacctacttgggaatttttggaaaagaacccttacttctgtggggggacatattgggccaacctccctacagaaatttaaggctttagggaaaataaaaaattttaaagggtataaggggtaaaactacctccatttcctggctgttggaaagttttgtttac

SEQ ID NO: 113569 - DNA, 415 bp, Homo sapiens
  misc_feature (1)...(415): n = a,t,c or g
ccacaccatgaaccctgccatgcgctccccaactcccccaggctccctgtccactgccctccctggtctggccccctcctccgggttaggggagcaaggattgggggtcgtgcagcccagccagcaggagggactgaggccctctaggaggaaagcccagagggagggggccctcattccttcagacccagttttcccccaccctccttaccccgctgggataggtctccgccagggctggcctcagtttctcctcaacaggcctgggggcagcccttcccctgcctagtccccgcctgagtgacagcccaccaccccgcccgccgccccctgtccaggttccctcaaaaccacagtgaaataaagcataccacccagtattcgnnccgctgtngggtnttctaccgagggacac

SEQ ID NO: 113570 - DNA, 2058 bp, Homo sapiens
aattcggcacgagctcacgttgcattgaagacgaaacctcggggaggtcaggcgctgtctttccttccctccctgctcggcggctccaccacagttgcaacctgcagaggcccggagaacacaaccctcccgagaagcccaggtccagagccaaacccgtcactgaccccccagcccaggcgcccagccactccccaccgctaccatggccgaagacgcagacatgcgcaatgagctggaggagatgcagcgaagggctgaccagttggctgatgagtcgctggaaagcacccgtcgtatgctgcaactggttgaagagagtaaagatgctggtatcaggactttggttatgttggatgaacaaggagaacaactggaacgcattgaggaagggatggaccaaatcaataaggacatgaaagaagcagaaaagaatttgacggacctaggaaaattctgcgggctttgtgtgtgtccctgtaacaagcttaaatcaagtgatgcttacaaaaaagcctggggcaataatcaggacggagtggtggccagccagcctgctcgtgtagtggacgaacgggagcagatggccatcagtggcggcttcatccgcagggtaacaaatgatgcccgagaaaatgaaatggatgaaaacctagagcaggtgagcggcatcatcgggaacctccgtcacatggccctggatatgggcaatgagatcgatacaacggatcgcccagatcgacgggatcatggagagggctgattccaaacaaacccagaattgatgaggcccacccaacgtgcaacaaaggatgctggggaagtggttaagtgtgccccacccgtgttctcctccaaaatgctgtcgggcaagatagctccttcatgcttttctcatggtattatctagtaggtctgcacacataacacacatcagtccacccccattgtgaatgttgtcctgtgtcatctgtcagcttcccaacaatactttgtgtcttttgttctctcttggtctctttctttccaaaggttgtacatagtggtcatttggtggctctaactccttgatgtcctgagtttcatttttcattttctctcttcggttggcatttgctgaataacaacaatttaaggaatgctcaatgtgctgttgattctttcaatcaacagtattgttcttgtaaaactgtgacattccacagagtttactgccacggtcctttgagtgtcaggctctgaatctctcaaaatgtgccgtctttggttcctcatggctgttatctgtctttatgatttcatgattagacaatgtggaattacataacaggcattgcactaaaagtgatgtgatttatgcatttatgcatgagaactaaatagatttttagattcctacttaaacaaaaacttttccatgacaggtagcatactgatgagtcaactcacacacacacagatcatcagcaccatcatcagaacaacaacatagcatgctcagtattgagacactgtcaagattaagttataccagcaaaagtgcagtagtgtcacttttttcctgtcaatatatagagacttctagatcataatcatccttttttaaaaaaaagaattttaaagaagatggatttgacacactcaccatttaatcatttccagcaaaatatatgtttggctgaaattatgtcaaatggatgtaatatagggtttgtttgctgcttttgatggctacgttttggagagagcaatcttgctgtgaaacagtgtggatgtaaattttataaggctgactcttactaaccaccatttcccctgtggtttgttatcagtacaattctttgttgcttaatctagagctatgcacaccaaattgctgagatgtttagtagctgataaagaaaccttttaaaaaaataatataaatgaatgaaatataaactgtgagataaatatcattatagcatgtaatattaaattcctcctgtctcctctgtcagtttgtgaagtgattgacattttgtagctagtttaaaattattaaaaattatagactcc

SEQ ID NO: 113571 - DNA, 1622 bp, Homo sapiens
  misc_feature (1)...(1622): n = a,t,c or g
ttacccaaagaatgataaagttggttttatttcaagaagtcgatcaaaaagaaagccccagcgctctagagcatcagttgacgagaaagggggtgcgcagcctcgagtttgagagctacccggagctccaagacaggggtgggttccagctgcccgcacgccccgaccttccatcgtaggccggaccatgggaaccccaaagccacggatcctgccctggctggtgtcgcagctggacctggggcaactggagggcgtggcctgggtgaacaagagccgcacgcgcttccgcatcccttggaagcacggcctacggcaggatgcacagcaggaggatttcggaatcttccaggcctgggccgaggccactggtgcatatgttcccgggagggataagccagacctgccaacctggaagaggaatttccgctctgcccttcaaccgcaaagaagggttgcgtttagcagagggaccggagcaagggaccctcacggacccacataaaatctacgagtttgtgaactcaggagttggggacttttcccagccagacacctctccggacaccaatggtggaggcagtacttctgatacccagggaagacattcttggatgagttactggggtaacatggtgtttggccccactcccagattcccggacccccaagcctggctgtagcccctgagccctgcccctcagcccctgcggagccccagcttggacaatcccactcccttcccaaacctggggccctctgagaacccactgaagcggctgttggtgccgggggaagagtgggagttcgaggtgacagccttctaccggggccgccaagtcttccagcagaccatctcctgcccggagggcctgcggctggtggggtccgaagtgggagacaggacgctggcctggatgggcagtcacactgtcagacccttggcttggtcctggacaacaggggagtgatgagctacgtgaggccatgtgctgagctgcctgggtgggggactggctctctggcgggccgggcagtggctctgggcccagcggctggggcacttcccacacatactgggcagtgtaccgaggagctgctccccaaacagcgggcatgggcctgatgtgtgaggtccccaaggacaaggaaggaaggcgtgtttgaacctggggccccttcattgtaggctcctgggcccccaagatctgattaacctttcacgggaaggaaacggaacgctcaaccacgctaatgcccttctggttctttgtggggggagtcaatggcccccaggaccaagcccgtggaccaaagaggcttcgtgatggtcaaggtttttgcccacgttgccttcagggcctttggtagaaatggcccgggtagaggggtgccctcctccctggagaatactgtggacctgcacatttccaacagccacccactctccctcacctccgaccgagtacaaggncctacctgcaggacttggtggagggtcatggatttcccagggtccctggggagagctgagaccctcgctcctcatggtgtgccctccaacccccctgttcccccccacctcaaccaataaactggttcctgctatgaaaaaaaaaaaa

SEQ ID NO: 113572 - DNA, 1389 bp, Homo sapiens
tttgcaggaggttgcagtactcgctgggctgaggtcgtctcgggtgaggaggtcgcgccgaaagtggctctagccgtggcgcttcggcgtagtaaggagcctgcaacagagttttgttgtttagggggcgcggcaccgcaccgctcccttcaccttgcagcagccatggcgaaaggcagagtcgccgaacgatcgcagttgggcgctcaccacacgacccctggggggggacgggcaagcggggacgcggggtctcgcggcgcctggcagcagagaccacagaaaggaaaaatcctgggtagaagctggatcagcaagaatgtcactccttatattggtgtccattttcttatctgcagcttttgttatgtttttggtatataaaaattttcctcagcttaagtgaagaagaaagagtgaatatgaaggttcccagagatatggatgatgccaaggctctaggaaaagttttatccaaatacaaggacaccttttatgttcaagtacttgtagcttattttgctacatatattttcttgcaaacatttgctattccaggctctatatttctcagtatactctcagggtttctttatccctttccactagccttatttcttgtttgtttgtgttctggacttggtgcctctttctgttatatgctttcctatttagttgggagaccagttgtatacaaatacctaacagagaaagcagtaaaatggtcacagcaggttgaacgtcatagagaacatctcattaactacattatatttttgagaataacaccatttctgcctaattggtttattaatatcacatctcctgtgataaacgtgccattgaaagttttttttattggtacttttctaggtgttgcacctccttcttttgtagccattaaggcaggaacaacactgtatcaacttacaacagcaggagaagctgtttcctgggaactcaatatttattctgatgatcttggctgttctttctattctgccagccatcttccaaaaaaaactaaagcagaaatttgagtaaaaataatcatctgatttttagttttgctgtcatcaccatctcaggattaacaggtgcatccatttatgttttaaaatcacctcttcagtaattaaacaaggaatttgtaaaataaaatttcctatcagatagttaaagtaatacatttaagtgacaaggggagaagaaagtaaaaatggaaattggtatactgtgaaaagtgctatcaatagttaaggtagacatcttagacatcttataaattattataccaagggtagctgtagataatagtagtgtggtaggaaattgttgatccagctaattcattcaatttaaattgaatattttttatctttaataact

SEQ ID NO: 113573 - DNA, 6351 bp, Homo sapiens
  misc_feature (1)...(6351): n = a,t,c or g
ctgaagaggagctagaggcctcaaagagctttgggcctgggaatgaagaggaggagaaggaggagaaagaatatgaagaggaggaggaggaggactatgacgaggaggaggaagagtccagtgaagccgggaaccagaggctccagcaggtcatgcacgcggcggatcctctggagatccaggctgacgtgcactggactcatatccgtgagagagaggaggaagagaggatggcgccggcctctgagtcctctgcttccggagccccattggatgagaatgacctagaggaagatgtggactcagaaccagccgagatagaaggggaggcagcagaggatggggacccaggggacactggtgctgagctggatgatgatcagcactggtctgacagcccgtcggatgctgacagagagctgcgtttgccgtgcccagctgagggggaagcagagctggagctgagggtgtcggaagatgaggagaagctgcccgcctcaccgaagcaccaagagagaggtccctcccaagccaccagccccatccggtctccccaggaatcagctcttctgttcattccagtccacagcccctcaacagaggggccccaactcccacctgtccctgccgccacccaggagaaatcacctgaggagcgccttttccctgagcctttgctccccaaagagaagcccaaagctgatgccccctcggatctgaaagctgtgcactctcccatccgatcacagccagtgaccctgccagaagctaggactcctgtctcaccagggagcccgcagccccggccacccgtggcggcctccacgcccccacccagcccactccccatctgctcccagccccagccttccaccgaggccactgtcccatcccctacccagtcccccatacgcttccagcctgccccggccaaaacatccaccccactggcccctctccctgtccaaagccaaagtgacaccaaggacagactgggcagcccccttgctgtggatgaggccctcagacggagcgacctggtggaggagttctggatgaagagtgcggagatccgccgcagcctcgggctcacacctgtggaccgcagcaaggggcccgagcccagcttccccacgcctgccttcaggccagtgtccctcaaatcctattccgttgaaaagtccccccaggatgagggactccaccttctcaagcctctgtccatccccaaaaggctgggcctgccaaagccggaaggcgagccgttgtccctgccaaccccccggtccccgtccgacagagagctacgcagcgcccaggaggagcgcagggagctgtccagcagctctggcctgggcctgcacgggagctcctccaacatgaagacactgggcagccagagcttcaacacctcggactccgccatgctcacgcccccctccagcccgcccccaccgccacccccgggcgaggagcccgccaccttgcggaggaagctcagggaggccgagcccaatgcctcggtggtcccgccgcccttgcccgccacctggatgcggcccccccgggagcctgctcagccccccagagaggaggtgcggaagtcgtttgtggagagtgtggaggagattccctttgctgatgatgtggaggacacctatgacgacaagactgaggactcaagcctgcaggagaaattcttcacgcccccgtcctgctggccgcgccccgagaagcctcgccacccgcccctggccaaggagaacgggaggctgcctgctctggaggggacgctgcagccacagaagagggggctgcccttggtgtccgcggaagccaaggagttggccgaggagcgcatgcgagccagggagaagtccgtgaagagccaggcgctgcgggatgccatggccaggcagctgagcaggatgcagcagatggagctggcctcaggcgcccccaggccccgcaaggcgtcctcagcaccctcccagggcaaggagcgccggcctgactcccccacacgccccactctcaggggctccgaggagcccaccctgaagcatgaagccaccagcgaggaggtcctctccccgccgtcggactcagggggcccagatggctctttcacttcatccgagggctccagtgggaagagcaagaagaggtcgtcactcttctccccccgcagaaacaagaaggagaagaagtccaaaggcgagggccggcccccggagaagcccagctccaacctcctggaagaagccgtcgccaaacccaagtccctgtggaagtccgtcttctccgggtacaagaaggacaagaagaagaaggccgacgacaagttcctgccccagcacccccttcagcggggccacggtggactctggaaagcacagggtgcttcccgtccgtaagggcagagctgcagctccggcgccagctgagcttctccgaggactcagacctctccagcgacgatgtccttgagaagtcctcacagaagtcccggcgagagccaagaacctacacggaggaggaactgaatgccaagctgacccggcgtgtgcaaaaggcagctcggagacaggccaagcaggaggagcttaagcggctgcatcgagcccagatcatccagcggcagctgcagcaggtggaggagaggcagcggcggctggaggaaaggggcgtggctgtggagaaggcgctccggggcgaagcaggcatgggcaagaaggacgaccccaagctgatgcaggagtggttcaagctagtgcaggagaagaacgccatggtgcgctacgagtcggagctgatgatctttgcccgggagctggagctggaagaccggcagagtcgactgcagcaggagctccgggaacgcatggcagtggaagatcaccttaagactgaggaggagctgtcagaagagaagcagattctcaatgagatgctggaggtggtggagcagagagactcactggtggcgctgctggaggagcagcggctccgggagagagaggaggacaaggacctggaggctgccatgctgtccaagggcttcagccttaactggtcctgagctcccacccaacgctccattttctgttggcatctgcctggccaggcagtggcatccaaaccacccggagccgcgatctgaggaggcctggcacctccttggagtttacgctcagatgcccgtgtgctgcttggaaagtggtcgagtcccgcgtgcagtggggagccccaggtgacagtggttatctgagacggctccacctcctgggaggaggcccacctggacctcccactcagaggaggagcacggcgtgtatggcatgacgcaggggaccaccccgcgcgctccctgaggatgtgctggctgtgccccttttttccactggcacatttggtaagagagggaagctgctccccgtcagaaccacagtgcgccgtgcgaggggcactgtcttcttcatgctccctggagcaccaccaaagaaacgtaaacaataccccacgaaagcagggtcaggggtcagggtgcgatcgagacccatgatgggggcgtccagtcatgcccaccccagcatcacaggagacatggaggtgcgggcaggctcctgaattattatgcaaattaggaggacgcaggaggggtctgccctccagccgaacaccacacactggaccctaagtggccaaatgcctgggccgcttgctggctgtggcctgaggcttgtgggttgctgcattttgcttgtagttcacaaccattttgacactggaaaatgctgactttgggggacaggatgaggccctacattctaagcccccagttggcagacaggcattgtccctgttccacatttatgtcgggacaggagatgaccttttcctccgtgtttttcctgtgtttgcacgttgaaatgaagctgacaacctggcaagacgctcagccgcttcaaaccctttttgtcaattaacttattttttaatacttgaaaagaagtaacttcgtttgtgtatctttactagaggaactgatcacctgcgcccgggtgcgggagccacagcggcatctggtgcgtcctacgcgacctggtccggggctgcccgtcgctcctcacgtgcatctatttattagcctttctcttcgtatcactggcctggctggcatcagggagctgcccagaacccctgtgtgggtcctcctcacagctttctgtcccctcctccacccggtgcctgcctcaccctggcgctagaccaatctggaccactcatgtgatgagggtgcatttccgttctgttttggggccaggccaacagcagagctgccactctcaccctcccagtgagaattccggctctgcagaactcgcccttggtctcagtttgggggccagggcatcaccttcctccgcacatatgttaaagaaggtttcaggatgggccctcatccacacaggccaagagggtgcaaggtgggaacctggaatcatgtgggctggtgagaattccctcctcccagcctaagattcacccagacggaaacgcgagtgctgcagtggatgctgggatgcaggctggtgcctctcaagcagatcagggactcccgcccttcctttcgaaggggacgggcacctgccttgcgccggatcttcatggggacataaaggggcgagccccggaatcactagctcctatagccaaactgttcctttctcacggttccgcaccagcctggctgtgtacagctcatcaagccactgagctaatcggggtggggtgcttgtccatcaaagcagtcagcacatagcccagcgaggagccatccgggaccagacccgcctgccagggggcgcttccagccgcctggccgcctccgtggggctgggggccagctggggagcagaggcttgggcccttccaaggcgttcccgcagttggagcaggctgagtggctgtgctgaccttgggctttccatgggaaccacactgtgcttcaacttgaacattcatcccagctgcaaaggagcaaagaacctgtgtcatccttgtctgtccagaagctgccatctctctcccatgcacatccgggagataacgccgctagtggccgccacagcgctgattctccacctgttctcacgtgaggcaaaggtctccttttcttttctctttacttaaaaaaggggagaggagggtttctagattccatcttcaaaccccagtctgtcccataaaattggacgtgggaaaagaccttcactgcctgcgtggccttttcccagacctttcctcgaatgccacaaaaccggtccagccccggcagagcggcctttcgggcccttgtagctcctgctggccccacaacagggaaacagtttgcaaagtggcttggaaggagtgtggcctagggatcttgctgtaagtggccagacgtagcaggagaagcccagtgtcaactttctggtcctgggtcagccttaacactgtgggcatcctccacatgcacacacggcagcctgcagtcctggaaggtgggacccgagccttttgcagagaggcgccgcagagccgcaggcctgcgccccagccttctgctcccggacttgtgaggacacccagttctagtagagcactttttttaaagcttcccattttgtaaccactaagtttgcggttaactggagtacctctggtgacttcctgcgtcaagcgttctcaagctgtgagaatgtgcgcagctccaggccaggttttctctcggaaagttaaagtccttccccttgaaaggcagggaagccaggatggatacacatatatccacacgcataaaaacccccaggtgcgggagcagccccagactcaaggactgaactaaactggaggtctgaatacccgtggaggtcccacatgccagccttcccctggagggcaaggccggaggccgctcccgcccctgggcttgaggatgcctgacaccccgtgggcttcccaggcctgcccagatgatgccttcaggcctctgtccctggcggccatcctcaggccgattttgaccagcaatgatagactcttcttaaccctttcaaaataaatttttcagtgggacagagaggggaagttaaaaaacatttttttaaaaggtggtaacatctgacccacaaagggaatgggtctgttttatgcaaaataaaagtttttcaaatnnnnnnnnnnnnnnnnnnnggggcggccgataaaaaggaaccctcaaggggcccaggtttacgcgggcatgcaagggaacacccctttccctaaaggggggggaaaaaaaacctccccgggaattttggg

SEQ ID NO: 113574 - DNA, 1056 bp, Homo sapiens
aggagagcatagcacctgcagcaagatggatgtgggcagcaaagaggtcctgatggagagcccgccggactactccgcagctccccggggccgatttggcattccctgctgcccagtgcacctgaaacgccttcttatcgtggtggtggtggtggtcctcatcgtcgtggtgattgtgggagccctgctcatgggtctccacatgagccagaaacacacggagatggttctggagatgagcattggggcgccggaagcccagcaacgcctggccctgagtgagcacctggttaccactgccaccttctccatcggctccactggcctcgtggtgtatgactaccagcagctgctgatcgcctacaagccagcccctggcaccttctgctatcatcatgaagatagctccagagagcatccccagtcttgaggctctcaatagaaaagtccacaacttccagatggaatgctctctgcaggccaagcccgcagtgcctacgtctaagctgggccaggcagaggggcgagatgcaggctcagcaccctccggaggggacccggccttcctgggcatggccgtgaacaccctgtgtggcgaggtgccgctctactacatctaggacgcctccggtgagcaggtgtgatcccagggcccctgatcagcagcggaggagcgctcgggccacctgcccgggctgtggaggagcgctcgcgctgaccaggcgctggggcgtccactgaagcggggtcatccaggcaactcgggggaggggaagctcacagaccggtacttcccactcccctgaattctctctgtccatcctcaacattcctttgcttcatagggtcagtggaagccccaacggaaaggaaacgccccgggcaaagggtcttttgcagcttttgcagacgggcaagaagctgcttctgcccacaccgcagggacaaaccctggagaaatgggagcttggggagaggatgggagtgggcagaggtggcacccaggggcccgggaactcctgccacaacagaataaagcagcctgatttgaaaagc

SEQ ID NO: 113575 - DNA, 3609 bp, Homo sapiens
gcggaatcctaaaccagcccaatttacatccattcatgaatctgtgacgtcagcaagcctttgggctcctttgcggtgggctggaggattgtgtgggtggaatccccctcccctttatttttccaattctgcaaggcttttaaaattcaccttacatcttttcaaagcaagaaaatggaacagcatgtgtaggaattcttcgttgttgttttggagccctctcttaagtcagaactctgtcccaaaaatcttctgagtgtcatctcaggactttggttatactcatggcacgatggccaactttcaggagcacctgagctgctcctcttctccacacttacccttcagtgaaagcaaaaccttcaatggactacaagatgagctcacagctatggggaaccacccttctcccaagctgctcgaggaccagcaggaaaaggggatggtacgaacagagctaatcgagagcgtgcacagccccgtcaccacaacagtgttgacgagcgtaagtgaggattccagggaccagtttgagaacagcgttcttcagctaagggaacacgatgaatcagagacggcggtgtctcaggggaacagcaacacggtggacggagagagcacaagcggaactgaagacataaagattcagttcagcaggtcaggcagtggcagtggtgggtttcttgaaggactatttggatgcttaaggcctgtatggaatatcattgggaaggcatattccactgattacaaattgcagcagcaagatacttgggaagtgccatttgaggagatctcagagctgcagtggctgggtagtggagcccaaggagcggtcttcttgggcaagttccgggcggaagaggtggccatcaagaaagtgagagaacagaatgagacggatatcaagcatttgaggaagttgaagcaccctaacatcatcgcattcaagggtgtttgtactcaggccccatgttattgtattatcatggaatactgtgcccatggacaactctacgaggtcttacgagctggcaggaagatcacacctcgattgctagtagactggtccacaggaattgcaagtggaatgaattatttgcacctccataaaattattcatcgtgatctcaaatcacctaatgttttagtgacccacacagatgcggtaaaaatttcagattttggtacatctaaggaactcagtgacaaaagtaccaagatgtcatttgctggcacggtcgcatggatggcgccagaggtgatacggaatgaacctgtctctgaaaaagttgatatatggtcttttggagtggtgctttgggagctgctgacaggagagatcccttacaaagatgtagattcttcagccattatctggggtgttggaagcaacagcctccaccttccagttccttccacttgccctgatgggattcaaaatccttatggaaacagacgtggcagagtaaacctcgaaaccgaccttcttttcggcagacactcatgcatttagacattgcctctgcagatgtacttgccaccccacaagaaacttacttcaagtctcaggctgaatggagagaagaagtgaaaaaacattttgagaagatcaaaagtgaaggaacttgtatacaccggttagatgaagaactgattcgaaggcgcagagaagagctcaggcatgcgctggatattcgtgaacactatgagcggaagcttgagcgggcgaataatttatacatggaattgagtgccatcatgctgcagctagaaatgcgggagaaggagctcattaagcgtgagcaagcagtggaaaagaagtatcctgggacctacaaacgacaccctgttcgtcctatcatccatcccaatgccatggagaaactcatgaaaaggaaaggagtgcctcacaaatctgggatgcagaccaaacggccagacttgttgagatcagaagggatccccaccacagaagtggctcccactgcatcccctttgtccggaagtcccaaaatgtccacttctagcagcaagagccgatatcgaagcaaaccacgccaccgccgagggaatagcagaggcagccatagtgactttgccgcaatcttgaaaaaccagccagcccaggaaaattcaccccatcccacttacctgcaccaagctcaatcccaatacccttctcttcatcaccataattctctgcagcagcaataccagcagccccctcctgccatgtcccagagtcaccatcccagactcaatatgcacggacaggacatagcaacctgcgccaacaacctgaggtatttcggcccagcagcagccctgcggagcccactcagcaaccatgctcagagacagctgcgccggctcgagccctgacctcatctccacagccatggctgcagactgctggagaagttctgagcctgacaagggccaagctggtccctggggctgttgccagacagaccgcatatgacacctgccttcagagcaggccagaacagtatgggtccttagacataccctctcgctgagccagtggggaggagccctagacctttccaagtcaccagcacataatcctctcttggaaaaccgcccagagttctgagaaaaccggaagaaaatgaattcagcggctgtaggtctgagtcatccctcggcacctcttcatctcgggcacccctccagcgctacctcgaaaaacaaggccttttgcagaagagtgggagatgattcctcagaagagggaaggaagggggaagttaggttagtgaagtttgaattttccacggaggacaggaggccccatcggttgtatcagcagctgccagtcatattcaacctttagctctgagaatttctctgtgtctgatggagaagagggaaataccagtgaccactcaaacagtcctgatgagttagctgataaacttgaagaccgcttggcagagaagctagacgacctgctgtcccagacgccagagattcccattgacatatcctcacactcggatgggctctctgacaaggagtgtgccgtgcgccgtgtgaagactcagatgtctctgggcaagctgtgtgtggaggaacgtggctatgagaacccccatgcagtttgaagaatcggactgtgactccttccagatggggagtgttctgatgcccacagttagggcccaataaacacctaacagctctgcctaccctggtaatgaaggaatacacatccctgaagatctcgtgactatactggcatttcagatccaccccacccccagactcatcccactctctcccagcattttgtctgggaagagagactaccccatctttacccaccccctagaaatgagctgcaataacaggaacatgagacttcgcaaatctctggaaaataatatccaaatgaaattaagtctcactgaacatttcaatcaagaatggcagggatctattttattgaatattctagctactgtaacattgatatttatttttgtttgacattttaacactttgtactgcaaagagtgaactatatatgagatagagagacaataatttcttgcaaaaaaaaaaagagataaaagaaagaac

SEQ ID NO: 113576 - DNA, 1022 bp, Homo sapiens
  misc_feature (1)...(1022): n = a,t,c or g
ttaaataggactcactaaggggaaatttggcccctcgaagcccaaaaaaatcgggcacgaagcaaactgccctgaactgcttggtttcgttcctcactggtgtgaagctccaagcatccccctttgcttcgaaaatggaccccccaactgctccttgccgcccacttggtggctccctgcacgtgcgcccggctcctgcaagtgcacaagaggccaaatgcaaccttcctgcaagaagagtgagtgcggggccatctccaggaatctggggctgtggctcaggttgggagggaactcaaggctggccctgagtgcatccttctggggaactgggctttctttgccctcattgcccgtgtcattccctctccaaggctttctgccctaaattcagatggggcaggacagcatttttctccgtgggacacaaaccccaacttgtacccccctatggtttcagaaacagagctgtgcccagacgaaaaaaaagcatccctctggggtctgggttcctgaagctcgaaccccaggcttgcctattaggggcaggggaggtgccccggtcaaagtcctactgcccacctctcactctccccttccttcccccaggctgctgttccctgtctgccccgtgggctgtgcccaagtgtgccccagggcctgcgtctgcaaaggggcatcggagaagtgcagctgctgtgcctgatgtgggaacagctcttctcccagatgtaaatagaacaacctgcacaacctggatttttttaaaaatacaacactgagccatttgctgcatttctttttatactaaatatgtgactgacaataaaaacaattttgactttnnnnnnnnnnnnnnggggggccccttttaaagaacccctaagggggcccaacctaaacggggattgaaaaacctgaacttcctccattttgggagccatacaaaacccagccttgggatgtttgaaaaggaacactacttctgggggggacaataatggcacaacctaccttaaaaa

SEQ ID NO: 113577 - DNA, 1087 bp, Homo sapiens
atgcatccttgctattgtttttggccctgctcctgcggatttgggagcagcccctgcatctgcacagcctccacaaggtgctgctgctcctcattatgctgcttgtggcggctggccttgtgggactggacatccaatggcagcaggagtggcatagcttgcgtgtgtcactgcagactgcaggtagcttttgaactccagcagtcaggccctaagaggaaagcggggaggggcactggagaagagcccacctcaccagcttttgtccacaggccacagccccattccttcatattggagcagccgttggaattgccctcctggcctggcctgtggctgataccttctaccgtatccaccgaagaggtcccaagagtctgctactgctcctattttttggagttgtcctggtcatctacttggcccccctatgcatctcctcaccctgcatcatggaacccagagacttaccacccaagcctgggctggtgggacaccgaggggcccccatgctggctcccgagaacaccctgatgtccttccggaaagacaagttaaatgcgaagctccggtggtttaagactgatgtaatggtcagctcgatggggttccctttcctcatgcatgatgagcacctcagcaggaccacgaaggtagcctctgtattcccaacccgaatcacagccccccaccagtgacttctcctggactgaactgaagagactcaatgctggatcctggttcctagagaggcgacccttctggggggccaaaccgctggcaggccctgatcagaaagaggctgagagtcagacggtaccagcattagaagagctattggaggaagctgcagccctcaacctttccatcatgttcgactatgcgccgacccccacagaaccacacatactatgacacttttgtgatccagacattggagactgtgctgaatgcaagggtgccccaagccatggtgatgttgccaggaccccctctccccaccctgccttccctaggccatgatgatgaggatgattttgaggctgcccctacccccagggccctgccccagctcacataccccatt

SEQ ID NO: 113578 - DNA, 1237 bp, Homo sapiens
  misc_feature (1)...(1237): n = a,t,c or g
ttttttttttgtttttgagacagagtctcgctctgtcgccccaggctggagtgcagtggcactatctcagctcactgccagctcccacctcccgtgttcatgccagtctcctgcctcagcctcccgagtagctgggaatacaggcgcctgctaccacgcccggctaattttttgtatttttagtagagacggggtttcaccgtgttagccaggatggtctcgatctcctgacctcgtgatccacctgcctcagccccaacaaagtgctgggattacaggcgtgagccactggtgcccggccaagaatttttttatcgataacatagtgagctctctgcctcttcggaacgatgtccactttgcttatgatcaacccaagcaggactcttctctccctgggacgcctctcccctgggtctgggaatcttccagttctgccagaattggccttttcccaggatgttggcaaactttccagttggaaccccttttttctgtgtgggccctgggggtttgcggaggaccaaaatccatggagtttttgtggttaccctaggaccttttgggaagggtgaggagcaggggccctggaggaaaagggcagccacctcctctccctggggtggaacccttgccaccctgattccttcaccagaattgttcagtgggccttttcaccacagtgggttcctttctggcctggaggccctggcactgttcccaggaccacacaggaagtctgggtcaactctgggcgcctggggatggtcaccgaagnaggaagcacgctgtccccgtctcttcctggcttctgccagaaaattcgaacaagttgcaatttaacacaatgttaattgccgaagcctgaaactcccaaggacttgtccttgatccttcccagaaacccacccaggtccggcacttgggagcccccccggagagggacctcccagccgagcccttcaaagaattccatggaaatcagggaattgtttgatgaaatgtatcttcttgtaactggggaggatgaaggcccaaacacccacacttttgtttttccccagggctcgggatgtctccaggaagnccgggcaangaagcttcccaggtgggctcggggaggtgggagcagggaccatctctgtcccctccaccctcactccatccacctcggagaccaccctcccccagccagatacggaatgaaacttgcagacgcagacgtcggaaaaaaaaa

SEQ ID NO: 113579 - DNA, 1821 bp, Homo sapiens
gcggccgcggaggggcctggagtgcggcggcggcgggacccggagcaggagcggcggcagcagcgactgggggcggcggcggcgcgttggaggcggccatggcaaagcagtacgactcggtggagtgccactttttgtgatgaagtttccaaatacgagaagcttcgccaagatcgggccaaggcaccttcggggaggtgttcaaggccaggcaccgcaagaccgggccagaaggtggctctgaagaaggtgctgatggaaaacgagaaggaaggggttccccattacagccttgcgggagatcaagatccttcagcttctaaaacacgagaatggtggtcaacttgattgagattttgtcgaaccaaagcttccccctataaccgctgcaaggggtagtatatacctggtgttcgaattctgcgaacatgaccttgctgggctgttgagcaatgttttggtcaagttcacgctgtctgagatcaagagggtgatgcagaatgctgcttaccggcctttacttctttcacagaaacaagatcctgcgtagggacatgaaggctggtaatgtgcttatcactcgtgacttggttattaagttggaagactttgggctggcccgggccttcagcctggcccaagaacagccagcccaaccgcttacaccaaccgtgtggtgacactctggtaccggcccccggagctgtttgctcgggggagcgggactacggcccccccattgacctgtggggtgctgggtgcatcatggcagagatgtggacccgcagccccatcatgcagggcaacacggagcagcaccaactcgccctcatcagtcagctctgcggctccatcacccctgaggtgtgggccaaacgtgggacaactattgagctgttacgaaaagctgggagctggttcaaggggccagaagcggaaggtgaaggacaggctgaaggctaatgtgcgtgacccatacgcactggacctcatcgacaagctgctggtgctggaccctgcccagcgcatcgacagcgatgacgccctcaaccacgacttcttctggtccgaccccatgcccttccgaccttcaagggcatgcttttccacccaccttgacgtccatgttcgagtacttggcaccaccgcgccggaaagggcaagccaagatcacccagcaagtccaccaaccagagtcgcaatcccgccaccaccaaccagacggagtttgagcgcgtcttctgagggccggcgcttgccactaagggctcttgtgttttttttcttctgctatgtgacttgcatcgtggagacagggcattttgagtttatatctctcatgcatattttatttaatccccacccctgggctctgggagcagcccgctgagtggactggagtggagcattggctgagagacccaggagggcactggagctgtcttgtccttgctggttttctggatggtttcccaaagggttttccatggggtaaggaggatgggctcgcccaccagtgactttttctaagagctcccggcgtggtggaagagcggacaggtccctcacccacccacaatcctattctcgggctgagaaccctgcgtgaggacagggctcgcctcaggaatgggctgtttttggcctaaccctcagaaacactggggctggcacaaactcttggtttcttcaacaggagaattttactgtgtttcttttggttccattgtttggagacattcctgggcacagtttggtccgttagaattaaaagttgaattttttttttttttaaattttttttttcctccaaaaaaaaaa

SEQ ID NO: 113580 - DNA, 373 bp, Homo sapiens
aatacagccgatgtggaaatttgttttgtggacttcaccgttaactctgacaagcacaactgtccgtatgattacaaagcagaagctgcagcaaaaatcagaaaagagaatccagttgttgtggccttctggagtttccaggcaggctaggcagaacattggggcatcaacagtctctcagtttaccaggtctgtcctcttctgccaggaagatacctgctccctgccaggctgcctccataggggactcagtccagccaggcggaagggccttgcgggttgtgttctcagcaaggaggagccgggagagaggtgcgggagccgccaaggtctcaggcaaggtcaaggactgacggcaggaaagttgggggag

SEQ ID NO: 113581 - DNA, 1793 bp, Homo sapiens
tttcgtgcaggactcttggtggggtagcgagggggacggtcccacgactgctccgaagggccgggactcccagtgggggcgggacccccggagtgcccgcctgcggactcccaagcctggagcctggggagagggtgggcacctccgttcccgcacacccgtccatggtgtgtgcgccgagcgtccaggagccacggcggtgtcttccttgcgcgtcttttacacgtgtgggggtaggctgctcctcggggctgagccgtggccagggttatggagaggcccgcctctccccagatggcgtcgtcgagccctgactccccatgttcctgcgactgctttgtctccgtgcccccggccttcagccatcccggctgtgatctttgctcatgaactcgggaccgaccccgggacgaggtgcaggaggtggtgtttgtccccgcaggcactcacactcctggggagccggctccagttgcaccttacattgaagttggaacaggtgtcgaagacgcaccgctgtgattctgagccgtccttcttggctatggggggctgagattgggccgccaacgaagcatggtgtctgcattggcaaccgaggctgtgtggaccaaggaaccagttggggagggggaaaccctggtgggcatggaccttactcagctggctttggaacggagcagctctgcccaagaagccctggatgggaacaccaagggttacggaaccacttattgggcaggggggcaactgcctggaggatgctgcgccattctcctaccatagcaccttcctgcttggctgaccgcactgaggcgtgggtgctggagacagctgggaggctctgggctgcacagaggatccaagaggggggcccgcaccatctccaaccagctgagcattggcacggacatctcggcccaacacccggagctgcggactcatgcccaggccaagggctggtgggaatgggcagggtgcctttgactttgctcagatcttctccctgacccagcagcctggtgcgcatggaggctgccaaggcccgcttccaggcagggcgggagctgctgcggcaacggcaagcttccccctctactccttggcagggggcatcacggcagaggtgatgatgggcatcctcagagacaaggagagtggtatctgtatggactcgggaggctttcgcaccacggccagcatggtgtctgtcctgccccatgaatccaacgcagccctgcgtgcaactttcttaccgccacgccagacccatccaggtctgtgttcaaacctttcatcttcgggatgggggtggcccagggccccagggtgctgtcccccacttttggagcacaagaccctgttcggaccctgccccgattccagacttcaggtagatcgttcggcataccctcttaccgtgggacaccagggcagccctggggctgatggagagagatcaggattgggggcagccagctccagcagaaacggcaggatctggagcaggaaggcctcgaggccacacaaggggctgctggccggcgagtgggccccacccctttgggagctgggcagcctcttccaggccttcgtgaagagggagagccaggcttatgcgtaagcttcatagcttctgctggcctgggggggtggacccaggacccctggggcctgggtgccctgagtggtggtaaagtggagcaatcccttcacgctccttggccatgttctgagcggccagcttggcctttgccttaataaatgtgctttattttcaaaaaaaaaaaaaa

SEQ ID NO: 113582 - DNA, 2294 bp, Homo sapiens
tttcgtgcgcccgcccggagccagcggttctccaagcacccagccatccttctagtaaccccctcccaccgacagacgggacatgggcagagctaatggtggccacgctcgggctgcggcatgctgatgctggcactgctcctacccacgcagatttattccagtgaaacaacaaactgggactttcaagtaactcctcccagagtacttccaactcctggttgggcccccaaatccagactagatgccgacaccaaggtggctgagtggtgccctgcagctcacgagccagtcttcttcgtggtctcactctctcttcttgcatcttctactcttaagtagactcaagccaaaaaaacggcttctaaattttccccatcttctaaaacccaatccaaatgggcgtctgggaagacccaatgtgggcaagggaaaaacaggtctttcatcgaaactactaaatttccacaccttttatttgacacaggaaaatgttgagaatcccaacatttgattgatttggaagaacatgtgagaggtttgactagatgatggattgccaatattaaatctgcttggagtttcatgtacaagatgaaggagaggcaacatccaaaatagttaagacatgatttccttgaatgtggcttgagaaatatggacacttaatactaccttgaaaataagaatagaaataaaggatgggattgtggaatggagattcagttttcatttggttcattaattctataaggccataaaacaggtaatataaaaagcttccatgatctctattttatatgtacatgagaaggaacttccaggtgttactgtaattcctcaacgtattgtttcgacagcactaatttaatgccgatatactctagatgakgttttacattgttgagctattgctgttctcttgggaactgaaactcactttccctcctgaggctttggatttgacattgcatttgaccttttatgtagtaattgacatgtgccagggcaatgatgaatgaggaatctacccccagatccaagcatcctgagcaactcttgattatccatattgagtcaaatggtagggcatttcctatcacctgtttccattcaacaagagcactacattcatttaggctaaacggattccaaaggagtaggatttggcattgaccgcgaactaatttcaaaatgctttttttattattaataatttttttaggacagtctcactttgtcggcccagggccggagtgcagtgggtgcggttctcagatccagtgtaccatttgcctcccgggctcaagcgatttctcctgcctcagcctcccaagtagctggggattgacagggcacctggccaccatgcccggcttaatttttgtaattttagtaggagacagggtttcaccatgttgcccaggctggtttcgaactcctgacctcaggtgatccacccgccttgggccttcccaaagtggtgggagtacacgctgtagcccccgggccccgaccatccaaaagcgttttaatcctgccaatggtgtgaaactctttcaaaattcacaaaaaaggcctggtttggaggccaaaatttcaaatctttgagaattaagaagggcaaaaaagtaaaaggagtccaaaactataaatccaagtatttggggaagtgaagactgggaagcttaatttggcattaaatttcacaaacttttatactctttctggtatatacattttttttctttaaaaaacaactatgggatcaggaatagccacatttaggaacacttttttggttatcagtcaatatttttaggatagttaggaacctgggtccctaaggccctaaaaagtgggggcttggatttctggccggtaaatctttttacaaactgccctcgacacaccataaaccttttttaaaaataggacactcccccgaaagtcttttgttcggcatggtcaacacactggatggcttagatggtcccagtaatcctaatatgggccacagttagtcttgatgacccaaagtccttttttttccatcttttagaaaaactaacatggggaacaaacagatcgtaacagttttgaagcctactgtgggtgtgaatgaaccacttctttgctttattccaggaatgctgtacatcctattttggattgtatattgtgtttgtgtatttaccgctttgattccatagtaacttcttatgggaattgatttgcattgaacaccaactggtaaataaaaagaaatgggctgaaagagcaaaaaaaaaaaa

SEQ ID NO: 113583 - DNA, 504 bp, Homo sapiens
gggcgggaggtgcttcccaaggaccgtagatgcctctctaaagctctcggagaagatcgaccagctagagaagagcctggagctcaagtttgacgtcctggacgaaaaccagagcaagctcagcgaggacctcatggagttccggcgggacgcatccatgttaaatgtgagcgggcggggctggaggggctgggttgtgagacccggggaggccggcggccccggcagggaggcctcccctggccttgcctacactagtcaagatcaggggtcttgtgtgtggcaggggctgctgtcacccctgcccacccctggcccagggcagcaggggcagagaggctgcactggccccacagcagccctgcccacctgccctctgccctgcccttggccctgcaggacgagctgtcccacatcaacgcgcggctgaacatgggcatcctaggctcctacgaccctcagcagatcttcaagtgcaaagggacctttgtgggccaccagggc

SEQ ID NO: 113584 - DNA, 626 bp, Homo sapiens
  misc_feature (1)...(626): n = a,t,c or g
aactcatcttttcatgtttttaatttttctgtgtcacagaacctaaattggtaataaatcaataagaaatatttacattcactcagtgaaaagtgtcatgtctgagctcagcatatatcggagccacacatggacacgtaagtatcttgtgtgtggacctgtataggcaggtgaatctccgaactgcaaggccggcgaaggctctcctgacattcttcctttctaatccttcagctctccttcctccactaagagcggaaaatgaacaaatcccaggaacaagtgtcattcaaggatgtatgtgtggacttcactcaggaagagtggtatctgctggaccctgctcagaagattctatacagagatgtgatcctggaaaattatagcaatcttgtctcagtagggtattgcattactaaacccagaagtgatctttaagatcggagcaagggagaagagccctgggatattagaaaaagggattccccaagcccagtgcccancccagaaaaggaaatggaaagttggatgaacgtggttagagagcagcccaggaaaatgaagatgaccatttttggggagcctcctattcccacaaccaacaaaacagtaagtggttggaaaat

SEQ ID NO: 113585 - DNA, 869 bp, Homo sapiens
ttttttataattatcaactgacactcctgtgagtatctatcaatcacccagtctaaggttgggccctatctgatactagaaactgtcccaagaaacctgacactggggaatgctgcctcacacatggctggcaccaccgtaacagaagcacttcattctactgaagcaaaggtggcccagtgtttaattacttcatttcctcacagacctaatatttacattcaggtgaactgtgtttaatatgtaaactctgttttgcaaaacagcaagagttcaagggtataatgtgggctgggcaggaaaagcaaaattttaaaaaatggtttcagaagcatgactaattttgtcttttatgtgtgtctgtctgtgtgtgggtctgcctgctttgcagggaagacttcctgtcccaaaaggaagtgacccgcaagaagaacgatgagacaaacgctgcctccctgactccactgggcagcagtgaactccgctccccaagaatcagttacctccactttttttaatcgtaacacctccatttgtattacatatggtgtatgggtattgatgaggtcatggtatcatatatgggatttttttctgtgtaaatcatcaagtataatgaagaaactatgggactctgagccttgctttagagaatttacagtggacaaataggtatatcagctgtgtaaatagagcaagaaaacagtattctgcatctgtggcatttatgtagagttgcagttgtgtactgctgaaaatgcaggcttttgtaacagtgtgatctttactgatgcactcatgacaagtacccaatgtattttagctattttagtagtatttgttcaataaatacgcaagctgtaaaaaaa

SEQ ID NO: 113586 - DNA, 1825 bp, Homo sapiens
gggaaggaggctggaggtccgctctgtgccaagggctctggggccctgggccagcgtgtctgtctgattttagaactgtaggtcagtggtgagtagtaggagcccaggctttgggcatcaaggcagttgtgtgtgccgggttacagcctgacacctgtgcgttgcatcggtttgcattatccgtgtgatttctaagtatcttagcgttgatgaactcatgtttgggaagaaataggcctctcccccagtcccatttagaatcgtggtccttctgttgcagctttatttaatgagcatgggtcatgatacttattttatgtttcgaaagacagtcctatgtgtctcacccaccggccactgcaggccctgggtgagggcggggtgggcgccggccggcctgggaaggagcgccgtggctgggccacagcctgtggctggcgttgttgctcactgaatctgttggggagaggtcaccatagtcaccgcctgacctggggctgcttgctctttgctttcagagccacaagcaaagttttgcactggggcccactgccgagttttagaggccggagaacggccacttggtgttgggaggggagcgcacgagttgggacttttgcacagcaaattgtgtccccagctcctcctctcccgcctgcctgggagccggccctgaaggtttctatggaagaaattaatcccccaataatttttacttacgtgtgttgatttttcctgttttatatttgaaaaaacttttttgacactccgcggggccattcagggaaattttataaaaaatgcagatactgtcttgagcagattcgaaatgccgatgaagtggatgcaatttccttttgtgcaagcagtgcacgggtgcccccccctcgggtggtccgtgctgtgccttagcttccccaggtgccgggactcacacctgctaggggctgggcaaggccccggctctgctttctctgaagggcttgtccaagttcattgccctgttacaggtgggtcaagacgtccggccgccttgacccagggctaacccttaggccaatatcctctgcccctggggtgggctgggtgggtggggctcagggtggggcaacgttagggggttttggcgaaacccggccccatgggaattgaaggaacggggctgcactccaaccgttctgcacctgctctttccccccaacccctgtgggaacctcatctttcacgtgcccatgtgtgctgaaaggcccagggcccagccagggggcaagttgcacctgttgacggaaaaaggccgaggtgctttaccagtggaccttctggcccgcccctcccctgtcacttgtcgggcattccagggcccccgacctttgccttagccgcccagggtgaacagaaggcaagaaactgaaagcggggtcctcggccacggggccaggccactgcccttttgtcctcagtgaccatacattccctgctcctggggacttgaaactcctactgttaactgttttcttaaaggaaatgaaagctgtaacaggacgattcaactgcccatgcccagtcaggcggggcttgcccatgttctgtgaatctcgagtgaagcggtgccacccgcccccataacctcccgccaccggccgctgtcgggggatgccacagcctgccacggtcgcagccagacgtgagcttggcattgaagttgcaaaagcggcccctggccgggcttcgccgtcgctgtcccagggccgttgtccggtgctgtggctgtaaagctgtaggaccctcttttaataaatagagaattattaataaaaaaaaaaaa

SEQ ID NO: 113587 - DNA, 1214 bp, Homo sapiens
  misc_feature (1)...(1214): n = a,t,c or g
ggcacgaggccgagaccacgtggcctccgagcagctcagggcgcccttgaaagttcttggatctgcgggttatggccggtcccttgcagggcggtggggcccgggccctggacctactccggggccatgccgcgtgtgagcctggccaacttaaagccgaatcccggctccaaagaaaccggagagaagaccaagaggtcgggagaagaggtagaaaatgttggcagaggccataaaaggagaaaggcaaagaggaacccggccccgcttgggctttttgagggaggccagactttccattttacatcccgaattcccaaattacgggttttaacgaaggacatagttttcagacgccatatttaagccttttaagtctcaatagactgcagtatctttatttgattttgggttcgtgtttgatcctagtcaaacctattnggatttaacccagcttgttcaatggggagaggtgttgaccatccagcccacttaaaagggattatggtgtccagcatggttgaggagggtgctgacacctttacggcaaaaatttatatgggaggccagtttggattcacaactaggtatatgctgccattgaaaaaaaatggtggtgttgttactacagccttctatgatccaagaagtctggacattgtatgcaaacctgttccattctttcttccgtggacaacccattctcaaaaagtatgcttccaccagaagaactggtaccatattacactgatgccaaagaacctgtgggtacctgggccggatccctgcccaaatttcctggaagcaccgacttggaactccgccaggaagtatggttatatcttaccctggatatcactaaagatgaactcttcaaaaatgctctgtactagggaaggatcccaaagcagattttctttggtcttgctccagggatggggtggtgaatatgggccgataagaaaattccttaaaacctacacgatgaaaatctccttaaagtattatacctcatggaattccccgtccaagggaaggcaggagtttgtttaaaggagtactggaatgggggctgaaggatctatattcccttattgcattttccttaggtataattttccagatggtgatgttacttttcagtgtactcatatgtctcattttcatctaaaattaaatggcaggaaacaaggacgtgcatagagaaaaaaaaa

SEQ ID NO: 113588 - DNA, 514 bp, Homo sapiens
tttttttttttaaggtttaatcagtttttatctcacaaggcagtaacaatgaggggcacagtggtggtcagggtggtggccccagtggccaactaggggagtatggcctcctccacagagccgctgcctggggaagatgctgtcagggcacgaccacagcccagcacttgccccactcaataaaaggctgtagtgctctggtgggctgtgcaccgtgcgcagatcctcctggtgggcactggaggccagggagaaaaagagcctccccgcagcccagatccagcatgcaaggtgctagatttctcggcaattccacagggaaggacagtagcctgttccctgccctctctcttgggcaatgggagcacttctagcacattccttccttaccctgctctctcaaaaccaccctgacccccatggcccctcctggaaacatggtactcagaaaagcagggaccaccagtggctggcaaagtgtttggggaaaaaaggaggtgcaaagtcagcaaga

SEQ ID NO: 113589 - DNA, 1247 bp, Homo sapiens
tttttcccgggtcgacgatttcgtcttattgctggagaaggagaaaagtgcccacagaacctttcacgatatttggtttttttgggcgcgacacaaatcgaggtgagggaagagagaggaaaatcccctgaatccctgcaggattaatttattcaaaaaggaaataaaaaatactcaatatgcaaaagtcttgtgaagaaaatgagggaaaaccacagaccatgccacaggccgcaggaagatcgccctttgggaggatgtaccacagggagggcaggaagggaaatcctgcaacctttccgaaggaaggcgtaacacgcgatacgcagaaggaaaccccagaggacgggccgaattcagcctgggccaggggattttaaaggagggacacacccgtttagggcattttgggaccctggaaggaattgttaaggagggagtaggatggagctttgaaaggcttagggaagagataagaagagtaagaaacaagtttgtgaggatgccatgggaagcaaagacattcacgcagcccgtcccttaccctgtgtgcctttaggcccttggaattcattttttgcctaatattaaaatctgggccccagctttctttccggtaggcatttccggaggtatccttggacctcccattttacttttaatccatctggatgaaattttgttttaggtaatttccttggtaccagcatctcattggattttggattttgaccccattttcccaggtctatttttcaattggaaactttccacacatttgcatggggaatatgttccattcccatgttgtaaagtaaaaccataacaggtttatgggcaaagccagccatatttaaatatccagcctcacatatggtagggataaaatccccaaacctttgtgtgtgtgccgtgtgtgtatacatacaatccaatataacatatatccacaaaccttaacccaagccttatttcctgtgtggtgtgaaattttatttgttttcttcttttttgttctttttgcttatatgtacctttttaatgaaacaacgtgtctcacacacaaaaagaattaaggattttttttacaagtaagagtcaaataatttgcaaccagcttatgagggcaatgggggcacctaaactcttgatgaaagaactttaaaaagaaatgtaaaccttcaaattacctctggatctcttagccagaggaataaactggcaattattacagataaaaaaaaaaa

SEQ ID NO: 113590 - DNA, 1685 bp, Homo sapiens
  misc_feature (1)...(1685): n = a,t,c or g
gagggggaattgacgactgatcgcctgtcgggaaggcccggaacgacccacgcgtccggaagactgtccacccgtcctcagccccctctcttcgtgggctatctactcagttgatccctccctcgctggcttggctctgactcctgctcagacccatcacctttgccggggaatgatgtctggagaacccctgcacgtgaagacccccatccgtgacagcatggccctgtccaaaatggccggcaccagcgtctacctcaagatgggacagtgcccagccctccggctccttcaagatccggggcattgggcacttctgcaagaggtgggccaagcaaggctgtgcacattttgtctgcttcctcggcgggcaacgcaggcatggcggctgcatattgcggccagggcaactcggcgtccccgccaccatcgtggtgcccagcaccacacctgctctcaccattgagcgcctcaagaatgaaggtgccacagtcaaggtggtgggtgagttattggatgaagccttcgagctggccaaggccctagcgaagaacaacccgggttgggtctacattcccccctttgatgaccccctcatctgggaaggccacgcttccatcgtgaaagagctgaaggagacactgtgggaaaagccgggggccatcgcgctgtcagtgggcggcgggggcctgctgtgtggagtggtccaggggctgcaggaggtgggctggggggacgtgcctgtcatcgccatggagacttttggtgcccacagcttccacgctgccaccaccgcaggcaaacttgtctccctgcccaagatcaccagtgttgccaaggccctgggcgtgaagactgtggggtctcaggccctgaagctgtttcaggaacaccccattttctctgaagttatctcggaccagggaggctgtggcgcccattgagaagttcgtggatgatgagaagatcctgggtgggagcccgcctggggcgcagcccctggccgctgtcttattagccacgtgatccaggaagctccaactggaggggaatctccgaacccgctntgccatccctcgtggtcatcgtctgcgggggcagcaacatcagccctgggccaagctgcgggcgctcaaggaacagctgggcatgacaaataggttgcccaagtgaggacggaccccttacccgatctttgctctcctagccaagaagcaccctggaaggggctggaagttttaacccaacgccctcgtccgtatgtttggcctgaagcaccctgtggccccgggtgcaggtttaacttcttgttaatcaggagccccactatgccagaggcccaaaggtcggcagcccagcgaggcctatgaattggacctttttggtatctgtgtgactgctctgtgcccatccttagccaacttgctggcgtgacaagtgcccacaagtaacacacccaggtacccagagccagggtggacaggagagacctgaatcacagcagtgaggaattcctcaaagctgtgacctcgcccctgaacttgttcccagtgaaggtcaacagggccaccaaccagggttgaggaaccatctcagccatcctcccaggaagcccacccctgacccttactaatttttctaatgtgcaaactttttcattgaaaaataaaatatatttatgaaac

SEQ ID NO: 113591 - DNA, 657 bp, Homo sapiens
ccattctgctccgtataccagctttctgtctctagaaaaaaacacatttgaagcatgaattctcagcagcagaagcagccttgcaccccaccccctcagcctcagcagcagcagtgtaaacaaccttgccagctttcaccccaggaaccatgcatccccaaaaccaaggagccctgccaccccaaggtgcctgagcccttccaccccaaagttgcctgagccctgccagcccaagattccagagccctgccagcccaaggtgcctgagccctgcccttcaacggtcactccagcaccagcccagcagaagaccaagcagaagtaatgtggtccacagccatgcccttgaggagctggccactggatactgaacacccctactccattctgcttatgagtcccatttgcctattgaccctgcagttagcatgctgtcaccctgaatcataatcgctcctttgcacctctaaaaagatgtcccttaccctcattctggagggctcctgagcctctgcgtaaggctgaacgtctcactgactgagctagtcttcttgttgctcgggtgcatttgaggatggatttggggagggatcaagtgaaccatccctagtcttccctcaataaataacttttaactccacaaaaaaaaagtcgacg

SEQ ID NO: 113592 - DNA, 2377 bp, Homo sapiens
  misc_feature (1)...(2377): n = a,t,c or g
cccacgcgttcgtctcttccctctctcctccagcctctcacactctcctcagctctctcatcttctggaaccatggccagcacatccaccaccatcaggagccacagcagcagccgccggggtttcagtgccaactcacccaggctccctggggtcagccgctctgcgcttcagcagcgtctccgtgtcccgctccaggggcagtcggtggcctgggtggtgcatgtagaggagcttggctttggcagccgcagtctgtatggcctggggggctccaagaggcatctccattggagggggcagctgttgccatcagtggcggctatggcagcagagccggaggcaggctatgggctttggtggcgccgggagtggatttggtttccggtggtggagccggcattggctttggtctgggtggtggagccggccttgctggtggctttgggggccctggcttccctgtgtgcccccctggaggcatccaagaggtcaccgtcaaccagagtctcctgactcccctcaacctgcaaattgaccccgccatccagcgggtgcgggccaggaagcgtaccagattcaaacccttcaacaacaagtttgcctccttcatcgacaaggtgcagttcctagagcagcagaacaagggttctggacaccaagtggaccctgcctgcaggagcagggcaccaagactgtgaggcagaacctggagccgttgttcgagcagtacatcaacaacctcaggaggcagctggacagcattgtcggggaacggggccgcctggactcagagctcaaaggcatgcaggacctggtggaggacttcaagaacaaatatgaggatgaaatcaacaagcgcacagcagcagagaatgaatttgtgactctgaagaaggatgtggatgctgcctacatgaacaaggttgaactgcaagccaaggcagacactctcacagacgagatcaacttcctgagagccttgtatgatgcagagctgtcccagatgcagacccacatctcaaacacatctgtggtgctgtccatggacaacaaccgcaacctggacctggacagcatcatcgctgaggtcaaggcccaatatgaggagattgctcagagaagccgggctgaggctgaagtcctggtaccagaccaagtacgaggagctgcaggtcacagcaggcagacatggggacgacctgcgcaacaccaagcaggagattgctgagatcaaccgcattgttccagaggcttgagatcttgagattcgaccacgtcaaagaagcaagtgcgcncaacctttcagggccgccatttgctgatgcttgagcagcgtggggagatggccctcaaggatgccaagaacaagctggaagggctggaggatgccctgcagaaggccaagcaggacctggcccggctgctgaaggagtaccaggagctgatgaatgtcaagctggccctggacgtggagatcgccacctaccgcaagctgctggagggtgaggagtgcaagcttgattgccgaaggcgttggacaagtcaacatctctgtagtgcagtccaccgtctccagtggctattggcggtgccagtggtgtcggcagtggcttaggcctgggtggaggaagcagctactcctatggcagtggtcttggcgttggaggtggcttcagttccagcagtggcagagccagttgggggtggcctcagctctgttggaggcggcagtttccacaatcgatgtacaccacaccctcctccttccagcaggaagagctataagcactaaagtgcgtcctgctagctctcggtcccacagtcctcaggcccctctctaggctgcagagcccttctcctcagggttgcctttcctctcctggcctccagtctcccctgctgtcccaggtagagctgggtatggatgcttagtgccctcacttcttctctctctctctaaaccaatctgagcacccatttgctcaccatccagatcaaccctctgattttacatcaatgatgtaatcaccactgggagcttcactttggttactaaattaagcaatttcttgcctccaagtgttctatcctctgaggctgagcattataaagaaaatgacctctgctccctgtcgatttgaagagaattggccaggggcgttatttcagaacgaacttcgcacttactttcgcactggctgctcaaactctgctaaccttatgaagtgttgtgaacccccacccatgcggtatccatggaaggtgcaagtgagctaggcctatgatgtacaaagcctgtatctctgtgatgatttctgtgctcttcactctttgcaattgctaaataaagcagatttataatacaaaaaaaaaa

SEQ ID NO: 113593 - DNA, 1412 bp, Homo sapiens
cccacgcgtccgcagaactcagagctgctcttcctctgtggccagttggggaccagcatcatgaagtggatggtggtggtcttggtctgcctccagctcttggaggcagcagtggtcaaagtgcccctgaagaaatttaagtctatccgtgagaccatgaaggagaagggcttgctgggggagttcctgaggacccacaagtatgatcctgcttggaagtaccgctttggtgacctcagcgtgacctacgagcccatggcctacatggatgctgcctactttggtgagatcagcatcggggacttcaccccagaacttcctggtcctttttgacaccgactcctccaacttgtgggtgccctctgtctactgccagagccaggcctgcaccagtcactcccgcttcaaccccagcgagtcgtccacctactccaccaatgggcagaccttctccctgcagtatggcagtggcagcctcaccggcttctttggctatgacaccctgactgtccagagcatccaggtccccaaccaggagttcggcttgagtgagaatgagcctgggaccaacttcgtctatgcgcagtttgatggcatcatgggcctggcctaccctgctctgtccgtggatgaggccaccacagctatgcaagggcatggtgcagcagggcgcccctcaccagccccgttttaagcgtctacttcagccaccacaagggggctccagcggaggaacgggttgtctttgggggtgtgaatacaagcctgaacacgggccagatctatggggcgccctgtcacccaggaaactctacttgcgagaattggcatgaaagagttcctcatcggggggccaggcctccggctggtgttctgagggttgccagggcccatcgtggacacaggccacctctctggctcactgtgcccccagccagtacatgagtggctcttctgcaggccacaggggcccagaagaaagagtatggacagttttctgtgaacagtaaacagcattcagaatctgcccagcttgacctttcatcatcaatggtgtggagttccctctgcccaccttcctcctatatcctcagtaacaacgggctactgcaccgtgggagtcgagcccacctacactgtcctcccagaacggcccagcccctgtggatcctcggggatgtctttctccaggtcctactaattccgtctacgacttgggcaacaacagagtaggctttgccactgccgcctagacttgctgcctcgacacgtgggtgggctcccctcttcctcttgaccctgcaccctcctagggcattgtatctgtctttccactatgaaattcagccttctttttctggactctggacttttctctaataataaaatagttcttctttaaaaaaaaaaaa

SEQ ID NO: 113594 - DNA, 4144 bp, Homo sapiens
  misc_feature (1)...(4144): n = a,t,c or g
aacaggcgtgacgccagttctaaacttgaaacaaaacaaaacttcaaagtacaccaaaatagaacctccttaaagcataaatctcacggagggtctcggccgccagtggaaggagccaccgcccccgccccgaccatggccgaggagctggtcttagagaggtgtgatctggagctggagaccaatggccgagaccaccacacggccgacctgtgccgggagaagctggtggtgcgacggggccagcccttctggctgaccctgcactttgagggccgcaactaccaggccagtgtagacagtctcaccttcagtgtcgtgaccggcccagcccctagccaggaggccgggaccaaggcccgttttccactaagagatgctgtggaggagggtgactggacagccaccgtggtggaccagcaagactgcaccctctcgctgcagctcaccaccccggccaacgcccccatcggcctgtatcgcctcagcctggaggcctccactggctaccagggatccagctttgtgctgggccacttcattttgctcttcaacgcctggtgcccagcggatgctgtgtacctggactcggaagaggagcggcaggagtatgtcctcacccagcagggctttatctaccagggctcggccaagttcatcaagaacataccttggaattttgggcagtttcaagatgggatcctagacatctgcctgatccttctagatgtcaaccccaagttcctgaagaacgccggccgtgactgctcccggcgcagcagccccgtctacgtgggccgggtgggtagtggcatggtcaactgcaacgatgaccagggtgtgctgctgggacgctgggacaacaactacggggacggcgtcagccccatgtcctggatcggcagcgtggacatcctgcggcgctggaagaaccacggctgccagcgcgtcaagtatggccagtgctgggtcttcgccgccgtggcctgcacagtgctgaggtgcctaggcatccctacccgcgtcgtgaccaactacaactcggcccatgaccagaacagcaaccttctcatcgagtacttccgcaatgagtttggggagatccagggtgacaagagcgagatgatctggaacttccactgctgggtggagtcgtggatgaccaggccggacctgcagccggggtacgagggctggcaggccctggacccaacgccccaggagaagagcgaaggaacgtactgctgtggcccagttccagttcgtgccatcaaggagggcgacctgagcaccaagtacgatgcgccctttgtctttgcggaggtcaatgccgacgtggtagactggatccagcaggacgatgggtctgtgcacaaatccatcaaccgttccctgatcgttgggctgaagatcagcactaagagcgtgggccgagacgagcgggaggatatcacccacacctacaaatacccagaggggtcctcagaggagagggaggccttcacaagggcgaaccacctgaacaaactggccgagaaggaggagacagggatggccatgcggatccgtgtgggccagagcatgaacatgggcagtgactttgacgtctttgcccacatcaccaacaacaccgctgaggagtacgtctgccgcctcctgctctgatgcccgcaccgatcagctacaatgggatcttggggcccgagtgtggcaccaagtacctgctcaacctcaacctggagcctttctctgagaagagcgtacctctttgcatcctctatgagaaataccgtgactgccttacggagtccaacctcatcaaggtgcgggcacaactcgtagagccagttatcaacagctacctgctggctgagagggacctctgcctggagaatccagaaatcaagatccggatccttggggaggcccagcagaaacgcaagctggtggctgaggtgtccctgcagaacccgctccctctggcgctgggaagatgcaacttcactcgtggagggggcgggcctgactgatgagcagaagacggtggagatcccataccacgtcgcagcaagggaggaagttaaggtgagaatggacctgctgccgctccacatgggcctccacaagctggtggtgaacttcgagagcgacaagctgaaggctgtgaagggcttccggaatgtcatcattggccccgcctaagggacccctgctcccagcctgctgagagcccccaccttgatcccaatccttatcccaagctagtgagcaaaatatgccccttcttgggccccagaccccagggcagggtggcacagcctatgggggctctcggaaatggaatgtgcccctggcccatctcagcctcctgagcctgtgggtccccacttcaccccctttgctgtgaggaatgctctgtgccagaaacagtgggagccctgaccttgggctgactggggctggggtgagagaggaaagaccttacatttccctctcctgcccagatggcccttttggaaaagccattggaccacccaccatattgttttgatcttacttcatagctccttgggagaagggcaaaaaaggggacagcattgccccttggctggatcagggaatccagctccctagactgcatcccgtacctcttcccatgactgcacccagctccagggggcccttgggacagccagagctggggtgggggacagtggatagggcccaagggtnccctccacattcccaggcagcccaagcttaatagccctccccctcaacctcaccattgtgaagcgcctactatgtggtgggtgcctcccacacttgatggggctcacggggccttccaacccattttaattcaccatggggaaactgttgtggggcgttgtttccagggttaaggagattgagggttagagagaggaggcagccccctccacaccagtcggcctccgtggttattagcaaggctgggtaaatgtgaaggcccaagggcagagtctgggcctctgactctgagtccactgctccatttataaaccccagcctgacctgagacttttcggagaggctgtctgggggcctttattcaaaaaaagattcagccaagacaaggaggtagagaggggactgggggactggggagtcagagccctggctgggtttcaggtcccacgtctggcccaggcacttgccttctcctctcttgggccttttgtttccttgttggtcagaggagtgattgaaccagctccatccccagggattcttctccactccagtgtttgcaatgcttttatatgggcccagcctttgtaaaataaaccacaaaggtccactccctggttccacggaaggcctttaagccatagggcccaggggttatttcttgaggagttgaaaccaatgacttgtgacccacctttcttgtcccccagccctgtcctgggttcctttcctattgcccagggtaccaccctttcaggacccccagtttttagggggaggaaggagcctggggacacccctgctcttacccatggaggccttgccccgttggcaatggcttaggattttcccaaacagcctttagctgcccagttgctgggtcaactaacccaaccaaggtttgggcaccccccagcttacccccttcctttggcaagggctaaaggcccccccaaaacataaggcccctggccaccggagggaaggttttggggggaacccccatggagtttgtcaagctttgacctttatcctccctgcctcctttcctacatggattgggggccttcccttggggcttgggaagaatttgggggattcttcttatttgggagggtgagatcaacagccttccaggggggccccccaaattcccagggggaagggacttttgggagagaatcatgcttgtttggaatttaagaacttttcttgcttttggaccaggaaagaagtcacacgaattaatcaaccatgtatattttcctcctatacatagagctctatttctctaccggttttaataaaagccttggggttcccaacccaggcaagtagatgtgctttcttgaaccgcaaggaggcaaacactgaaataaaatagtttattttttcacactcaaaaaaaaaa

SEQ ID NO: 113595 - DNA, 2142 bp, Homo sapiens
  misc_feature (1)...(2142): n = a,t,c or g
gggggagtctgggttggactggcggccgtggagtttgtgacatacgaggtgacacccctcgagtcacttcccttcaactccagctggagcgcctgcttggctttgggttcgttctgcagccttcgccccgctcctagcctcagggccggactccagcgcagagcccagcccagcgcagcctgccagcagccacccagccgcccagccgcccagccccgcacgaaacccggccagagcttcctagcagcccgagccatgaacaccgaaatgtatcagacccccatggaggtggcggtctaccagctgcacaatttctccatctccttcttctcttctctgcttggaggggatgtggtttccgttaagctggacaacagtgcctccggagccagcgtggtggccatagacaacaagatcgaacaggccatggatctggtgaagaatcatctgatgtatgctgtgagagaggaggtggagatcctcgaaggagcagatccgagagctggtgggagaagaactcccaagctagagcgtgagaacaccctgttgaagaccctggcaagcccagagcagctggagaagttccagtcctgtctgagccctgaagagccagctcccgaatccccacaagtgcccgaggcccctgggtggttcttgcggtgtaagtggctcttgtccttcagggtgggcagagcacttaaaacttgtttttaccttagttctttccagtttgtttttggctccccaagcatcatcttcacgaggagaactttaacacctagcagggctgggtgccaagagatgttccttaaggacatggccacctggggttccattccagcgacagacccctgacaagagcaggtctctggaggctgagttggcatggggcctagttaacaccaagccagtgagcctctaatgctactgcgcccctgggggctcccaggggctggggcaacttagctgcaactggcaaaggaagaagggtagtttgaaggttgtgacaccagttttgctccagaaaagttttaaggggtctgttttctcatctccatggacatctttcaacaagcttcaccctgacaacgactggttcctattgaagaagccactttgtggttttaagcagaggcaaccctctctcttctcctctgtgcgctgccttcacgaaacagaggagaagagagaggacacagatgggagagattgagccaagtcagccttctgttggttaatatggtataatgcatggcttttgtgcacagcccagtgtgggattacagctttgggatgaccgtttacaaagttctgttttggttagtatttgggcatagtttttctatatagccataaatgcgtatatatacccatagggcatagatctgtatcttagtgtagcgatgtatacatatacacgatcctttaacaagatgaaggtcctaaccacctcttgggagtattgactgttccctttatctcttatggctaaagtctttgactgtgtccatttaccaaagttgacccaagtttggccttttaggttaaagtaagactccgaagagtaaaaggccaaggaaggggggcccagcctcctgaatgccggcccacggatgcccttgctggctggcaaccctttccccccagctgtcccaactgaaaaccgtgaaagtccctgtttttgaaatgcccaaaaccccacccattcaactgggtgcctgacctaccatagaaatgggggttgagagaaagatcagtttgggccttccacagtgtcattttgaaaaacgttttttttgttttggttttggtaatttaattgttggaaaacttttcaagtggaacacgaaggatgggtgttcctactgtgggatggaggggatggaacaagggggatgggcttttgatccccaatgggagccggggaggtgtgcccaggaaagcttgttctgttagccgggttttgtgagagtgaacactttccacttttttgacacccttatcctgatgtatcnggttccaaggatttggaatttttgattttccacaatgtagccttgaaatttcaataaactgtgctctgtttttctagcacttaaagaaagggttttattgggggccgctcataagacaccacccctg

SEQ ID NO: 113596 - DNA, 1400 bp, Homo sapiens
  misc_feature (1)...(1400): n = a,t,c or g
gcccttcgctctagctgggaggctgacggcccgcggtcgtaagcggactgcagccgcgagctcctggaggcggcgggatggaggcggcggccgagcctggaaacctggccggcgtcaggcacatcatcctggtcctctcaggaaaggggggcgttgggaaaagcaccatctccacggagctggccctggcactgcgccatgcaggcaagaaggtgggaatcctggatgtggacctgtgtggccccagtataccccgcatgctcggggcgcagggcagggctgtgcaccagtgcgaccgcggctgggcacccgtcttcctggaccgggagcagagcatctcgctcatgtctgtgggcttcctgctggagaagccggacgaggccgtggtgtggaagaggccccaagaaaaacgcgctgataaagcagtttgtgttccgacgtgggcctgggggggagttggattacctgggtngttggacacgcccccggggaccttccnattgagcacattggccaccatagaagccctgcgtccctaccagcccctgggggccctcgtggtcaccacgccccaggcggtgtccgtgggggacgtgaggcgcgagctgaccttctgtaggaagacgggcttgcgggtgatgggaatcgtggagaatatgagcggcttcacctgcccacactgcacggagtgcaccagcgtcttctccaggggcggcggagaggagctggcccagctcgccggggtgcccttcttaaggctccgtgcccctggaccctgcgctcatgaggaccctggaggagggccacgacttcatccaggagttccctgggagccccgccattcgcatgcactcacctccatagcccagaagattctggacgcgacgcccgcgtgccatcccctgactaaggccaccttgcagccgctttccagggcccaccaagggcatcatgctccagcctctcagagaaacagaggcctgggctcggttcccgggccctgcaggggcaggccccaggcagcgtcagcgggagagcttctccccgaaccagcccaagccccaaggatgtgtcgcaccagcagctctgcctggttgggcctgcagtgccgtggtctgcggtctctgcagctggtgaagacggagggcggcctgggctctcttcccatccatggttgcctacctgtgcccctggaagcccgcgtgtccacacagttagcggagcgcaggacttctgcagtcctcaggtgaccccgggcctccagcaccctgggtccgctgtcatctgtgtttagctcggggagtgccccctaagggggcgaactgacgctcaggcatgtcttgtaactgttgaggcgcctgccattaaacgtgtacgctgctgtggcgacagaaaaaaaa

SEQ ID NO: 113597 - DNA, 3668 bp, Homo sapiens
aaagagctggaggcgcgcaggccggctccgctccggccccggacgatgcggcgcgcccaggatgctgccgtgcctcgtagtgctgctggcggcgctcctcagcctccgtcttggctcagacgctcatgggacagagctgcccagccctccgtctgtgtggtttgaagcagaatttttccaccacatcctccactggacacccatcccaaatcagtctgaaagtacctgctatgaagtggcgctcctgaggtatggaatagagtcctggaactccatctccaactgtagccagaccctgtcctatgaccttaccgcagtgaccttggacctgtaccacagcaatggctaccgggccagagtgcgggctgtggacggcagccggcactccaactggaccgtcaccaacacccgcttctctgtggatgaagtgactctgacagttggcagtgtgaacctagagatccacaatggcttcatcctcgggaagattcagctacccaggcccaagattgcgccccgcgaatgacacatatgaaagcatcttcagtcacttccgagagtatgagattgccattcgcaaggtgccgggaaacttcacgttcacacacaagaaagtaaaacatgaaaacttcagcctcctaacctctggagaagtgggagagttctgtgtccaggtgaaaccatctgtcgcttcccgaagtaacaaggggatgtggtctaaagaggagtgcatctccctcaccaggcagtatttcaccgtgaccaacgtcatcatcttctttgcctttgtcctgctgctctccggagccctcgcctactgcctggccctccagctgtatgtgcggcgccgaaagaagctacccagtgtcctgctcttcaagaagcccagccccttcatcttcatcagccagcgtccctccccagagacccaagacaccatccacccgcttgatgaggaggcctttttgaaggtgtccccagagctgaagaacttggacctgcacggcagcacagacagtggctttggcagcaccaagccatccctgcagactgaagagccccagttcctcctccctgaccctcacccccaggctgacagaacgctgggaaacggggagccccctgtgctgggggacagctgcagtagtggcagcagcaatagcacagacagcgggatctgcctgcaggagcccagcctgagccccagcacagggcccacctgggagcaacaggtggggagcaacagcaggggccaggatgacagtggcattgacttagttcaaaactctgagggccgggctggggacacacagggtggctcggccttgggccaccacagtcccccggagcctgaggtgcctggggaagaagacccagctgctgtggcattccagggttacctgaggcagaccagatgtgctgaagagaaggcaaccaagacaggctgccctggagaaagaatcgcccttgacagatggccttggccccaaattcgggagatgcctggttgatgaggcaggcttgcatcccacgagccctggccaagggctatttgaaccaggatcctctagaagtgactctggcttcctcaggggcaccaacgggacagtggaagcagcccactgaggaatggtcactgctggccttgagcagctgcagtgacctgggaatatctgactggagctttgcccatgaccttgcccctctaggctgtgtggcagccccaggtggtctcctgggcagctttaactcagacctggtcaccctgcccctcatctctagcctgcagtcaagtgagtgactcgggctgagaggctgcttttgatgttagccatgcctgctcctctgcctggaccaggaggagggcccctggggcagaagttaggcacgaggcagtctgggcacttttctgcaagtccactggggctggccccagccaggccctgcagggctggtcagggtgtctggggcaggaggaggccaactcactgaactagtgcagggtatgtgggtggcactgacctgttctgttgactggggccctgcagactctggcagagctgagaagggcagggaccttctccctcctaggaactctttcctgtatcataaaggattatttgctcaggggaaccatggggctttctggagttgtggtgaggccaccaggccgaagtcagctcagacccagacctccctgcttaggccactcgagcatcagagcttccagcaggaggaagggctgtaggaatggaagcttcaggcccttgctgctggggtcatttttaggggaaaaaggaggatttgattggccacatgcggaacctcccctcatcgggcctctggggcaggaagcttgtcactggaagatcttaaggtatatattttctggacactcaaacacatcataatggattcactgaggggagacaaagggagccgagaccctggatggggcttccagctcagaacccatccctctggtgggtacctctggcacccatctgcaaatatctccctctctccaacaaatggagtagcatccccctggggcactttgcttgaggccaagccactcacatcctcactttgctgccccaccatcttgctgacaacttccagagaagccatggttttttgtattggtcataactcagccctttgggcggcctctgggcttgggcaccagctcatgccagccccagagggtcagggttggaggcctgtgcttgtgtttgctgctaatgtccagctacagacccagaggataagccactgggcactgggctggggtccctgccttggtggtgttcagctgtgtgattttggactagccacttgtcagagggcctcaatctcccatctgtgaaataaggactccacctttaggggaccctccatgtttgctgggtattagccaagctggtcctgggagaatgcagatactgtccgtggactaccaagctggcttgtttcttatgccagaggctaacagatccaatgggagtccatggtgtcatgccaagacagtatcagacacagccccagaagggggcattatgggccctgcctccccataggccatttggactctgccttcaaacaaaggcagttcagtccacaggcatggaagctgtgaggggacaggcctgtgcgtgccatccagagtcatctcagccctgcctttctctggagcattctgaaaacagatattctggcccagggaatccagccatgacccccacccctctgccaaagtactcttaggtgccagtctggtaactgaactccctctggaggcaggcttgagggaggattcctcagggttcccttgaaagctttatttatttattttgttcatttatttattgggagaggcagcctttgcccagtgaaagaattctgggatatctcaggagccccgaaattctaggctctgactttgctgtttccagtgggtatgaccttgggagaaggtcacttatcctcttggagcctcagtttcctcatctgcagaataatgactgactttgtctaattcgtagggatgtgaggttctgctgaggaaatgggtatgaatgtgccttgaacacaaagctctgtcaataagtgatacatgttttttattccaattaaattgttcaagaccaccctaaataaaaaaaaaa

SEQ ID NO: 113598 - DNA, 843 bp, Homo sapiens
  misc_feature (1)...(843): n = a,t,c or g
gtggtccnnntttgatcgcctgcaggaattcggcacgaggcagtatgagagttgtaatggcccgactgttgagtgagggggagcaggggatcccaacggctttgcgctgcctttgcgcagaacccgggcgggcggccacagtcgaggccttgctggggtaggagaggggcggtccccagtgcagtttgggtgaactaaccgttgcacacttggagtttcctgggtgtctttgcttggaactgacctagcctcgtggcaggggggaactccggctagcggcccccacagcccctgctgactcaaaacaactgagttgtaaagacgttcatcgcccgtgttatccttggagtaaaagaatgaacttctggaaagccccagcccaggggacaactgcacctttcacaggagattctgccacttaatctggagttgaaggtcttaagggtttgggaatctccccccctcatgggagaggaagcttttgtatgggctgtcaatgctttagacaggtgaattcctggcaactttgaaccttcaaggctggggagaggtgggagagccatgccttgttctcctttccttgcctatggaattttggctgacacakatatcttcccgccctgggtgctggggcatattcctaagaaacttacaaactttccctgtattatccttgtgtggagcagctgtcacctttattgggggaaaatvtcavtgaaaattagggggcacttcaagtatgatagcttctatcttcctatcatcttgtctctatatccaagtattttgcttttatcaaaataattccaataaagcgattttaaagtaaagaaaaaaaaaaaa

SEQ ID NO: 113599 - DNA, 601 bp, Homo sapiens
  misc_feature (1)...(601): n = a,t,c or g
gcggccctactactactaaattcgcggccgcgtcgacataaggagtcctgcttatcacgtgtgaatgttctctctgggcagcgttgtgatctttgccaccttcgtgacttttatgcaatgcatcatgctatttcatacccntaatgagggagtttccgggggattcaaccaggaaatgcatggatctcaaagggaaacaaacaccccaataaactcggagtggcagactgacaacttgtgagaccttcaacttgttacgaaaacagaaattttcatgttggcacccttgtttctacaccctgtgggttatgaccaaagacaactggccaaagaatcttccaagaaggaaggcttgcaatgtatatcgtggttggagaagaaaggaccccaaaaaaagacctgtcctgtccagtgaatggggtaatctaattgtgcttcctagtagggcacggggcctcccagggccagggcttcattcctccccttggcccctaatagttcaatgatttgtgtagccatgccctatgcagtaagaaagattttttgagcacaccagaggaaaagtaaaaaggttggcccctagggggtcgcttttcgcgcg

SEQ ID NO: 113600 - DNA, 2236 bp, Homo sapiens
ttttttttttttgtattttacgattatttaaatgttattcactgtacagccaagctttgtgctactatgggatttcgttttctgcggttccaagtcttgatccacgtcctgccacaggatcactgaagtagagcccattttcttacactctcgccattagttcaaaagcttgcagcattttatgtctggtacttggaggatgattttcctgtacagttttgcgtttttttcaccgaaaatttctgattattattgttttcctcttgtgggatgaaatatgtaccttctatatcacagcccttaataccttcagcttcttattcattcaaatcttgcttacaatccagtccgaggattcccggtttactgattttctttttcctgcaaattttaagccttctgttttgttttgaaataatgcatcctctgcgcctttgtcacattctgaaattcggcaggtggttttaggatgcacactttcttagatcttttcgagggtcttaactgcagttctgtttccggaatggcgtattttctttctagggattataggcytcccsggccgccccctgaggagctccgctagcagctawagagggcagccacgaagagcgcctgagcactctcgcagagactgtggggctcgccattggctgctccgccgcgccgcaacggaccctgggagtcggccatcatgctggccccggaggccgttagcttagtcatggctctaaatatgtacctgcaatcggatgttgaggatcaccgagcccgcgactgtataaatacgggaaggtcatggcgcagctgccaggccagctcgaagaaggcgagcagggtgcgggagagccccttgcagaagacgccgtacgaggttctccagcatttggctcaaggccccaagggcacatgtgacaagaaggcgccggctttttaaacattggaagttcttctgtgttcagttctgttgacagaacattttactttaacacattcatggaaggctaagttttggatgtggaggggaatagactccatctatccatatgagcttgctgcagaagaatattttgcctgctggaacctgctgtatctactcaagagtggaagttttcacagatgtgaactatgaagactttactttcaccataccagatgtagaggactcaagtcagagaccagaatcagggaccccagagacctcctcctgaaggactcctacctagaccccctggtgatagggggaaccaaagatgatggtcctcagcagagaccaccaaaaccaggaggccatcaccgccatcctccctcacctccctttttcaaattcagcaacgaccaccccgacgaggacaccgtcaactctctctaccccgatttccttctgtcagcctgcaggaagcatcatcattcttccggagggacagaccagcaagacatccccaggagcaaccactctggtaatttagaattcagtggcaggtatgattccagttcattctccattaaatgcccaaactgctaccattcccaaactttatcgtgttcacaaatcaattggaaatatgttgaaattacataatcctggaccccatttctaaagatttgtattcagatattcttggataaggttgcaagtccttgtatttttaacaagtggttcaaagaattcttatcttttgaaatactgacctccccaacttttttcttaagatgacttgtctcattaaaatgagttggtaatcaggcagtcgcggtgtgctctccctttggtgctttgcctcctgtctttgagtctgccttctcaaacccaaggactctccatctcaggtttctctcaggtttccgccagaggactctttgctcagtcctgcctcacactagcctctcaggtccagtgtccctgctaaatgatacttgaacttgatgctcttatatcttatttaatttttaaaatacttattttgaaattagaacatgctcaaggaaaaaaaaatctaactgaacagaatggtatgaagctaaatcttaaagtgacgccttatcctacttacccacacccttcaccaaaagtcaccacccttaattttttgaacatcctcctggaaatatttatatgtatataagcatacgtcattatttttcccacaaatgacatattattttatatgccgatctggatttgcttattttaaaataatacatgtcttaaacaactttttcatttcacgggacc

SEQ ID NO: 113601 - DNA, 1324 bp, Homo sapiens
cggacgcgtgggctaggagcccagcgccgccttcatgtcctccggggctagcgcgagcgccctgcagcgcttggtagagcagctcaagttggaggctggcgtggagaggatcaaggtctctcaaggcagctgcagagcttcaacagtactgtatgcagaatgcctgcaaggatgccctgctggtgggtgttccagctggaagtaaccccttccggggagcctagatcctgtgctttaactctgaaagactcgtgataggagagaagctttgctgaggaatgcccttcaagcacaaagtgatgaatgacttgccttcaagtctcaaggaaaacactttttcccttaactttttaggagatatttcagccctttcctgttggcctgggtcctattagccaaaaatcacagatatttcatgagttttcttactttgagtgaagaaaactggggtgaaggaataggaatttttaaatagtaataactggcttgttttttttgtggcaagtacttttattacataaggtaaacaaaaaccttaccaccaaacataccaaaatggcacctcttttcataagtgagttactaaggatttctatacctgggaatatccatgtatgtttcatttactgggatgtttacattttagggaagggaaaatagttctgtttatttaaacaacctggaatacttattaaactgttgttcccggggagttatttattccataaaaaatttgttcttttctcatggaatttataattcctaaatgaaggccagaaaggtacaaattgctggggagggaaggaatagggctttatttaatccaactgatgtcttggattttttcctaaatggggaaggattgctttatttttaacactaaattatggggagcaggattcttaggcaaacttctttggggaaaagtttaatgtttatggatgtgccattaggggctgccccctccgtgttattataaatggaaggccggattttgatttttgttattcttaacgtttcctctgcttttgttagttgtggcctgtaccttaaagaaataccagaatttccatatatttaaaaatgtttaaaatgtgacccccacagaacattgtaaatgattaaaaactaacatgaaaatattacgaaccgtaaaagaattcttaacttcmacaaggtgttttaacttcgacgatgtggctttgatttaatttgggacacttttttagaaggatacattattcggtgtttgcaacggtcttataaagagcttggaaataaaatttctgcttaattaatcatttttctatgacgagcaaaaaaa

SEQ ID NO: 113602 - DNA, 1490 bp, Homo sapiens
  misc_feature (1)...(1490): n = a,t,c or g
gggcgtacggcatgcgccggttgggtgaatggagcggcagcagcagcagcaacagcaactgcgactacctgcgtgacttcctgttggtctacaatcggatgacagaactctgcttccagcgctgtgtgcccaagcttgcaccaccgagctctggacgctgaggaggaggcctgtctgcacagctgtgctggggaagctggatccattccaaccaccgcctcatggccgcttacggtgcagctcatgcctggcccttggtacaagcngccgcatcgcagacttacggaggcttgccttcgggctgtgccagggcgttgctgctgaacaagcctggggtctctccatcaggcagcttagccatacccaaccccaggaaggaaggccttggattggaccctcaagattgaaggacccggtggacctttggggttggtgaatcctaaacaagagagaattcgaggttgcctgaaaagctgggttgtccttgctccttttcctggaagccaatatacccagtttttactcagtttgattttatattctgggcaaagaagcttttgcctactttatttggcacaatccgttgtcttgtcgtttaagtgcatatctgctggcttcagcctcggcagctgagaaattgttttctatatgtagaaggaaaacctgagcatttgcaggcatctggttaaagcagggtctggtgtgtacaattttaaaacgggtaatatgtcatgctcttaggtccatcttcacaaccaaacctatggagtaagcggtattagcctcacttaacagatgaggaagccaagattcccagaaaagtacccagaaggtcattttatacaacaggagattggttcctgcccacgatgacagaaaatgggagctctgtctaggttgtccttaagtctgactgacttcagtggctcataaccgtgagcccaaagtattttgttggttcataacttgttgttttgtgaactatgtcttacatgtctagagttctgctgggatctagggaaaggaggagctatcggaagtacaacgggatcaaaaaaccacagggcttttggggcactggcctcccttgggaagttagtggccccaaaaaaaagatgaaacctgtaagaagtcttggagtcttttgggaacttcagccatttccccaggttgttactttcttagtatgtacagtcttctcaggatgagcagtaaaacctttgaacaaaggtctgtgtggttgtcttcacgggcaatcaggaagggagagagctggggaccatattctgcaatgcagccaaatccgaggaagagaaactgaagggagaagtagatggcaatggttatgataaaaagggataaaactaaatcctcgggactcctttaatgctacgttaatgtttcactgctcgtctagaaactcctaaatccagctttctatcatctgccccacattggtccccttgagtacattctgtgatttctaattc

SEQ ID NO: 113603 - DNA, 1354 bp, Homo sapiens
gggtccggtgtcagttcgaggcgccgccgccgccgccgcagccgccggagccgcaatgcctaaaggaggaagaaagggaggccacaaaggccgggcgaggcagtatacaagccctgaggagatcgacgcgcagctgcaggctgagaagcagaaggccagggaagaagaggagcaaaaagaaggcggatgatggggctgcaggtgaccccaaaaaggagaattaaatctctatactcagatgagagtgatgatgaagaagatgactaccagcaaaagcgcacaggcgttgaatggctcatcgacatcgagaaccccaaccgggtggcacagacaaccaaaaaggtcacacaacgtggatctggacgggccaaaggagctttcgaggagagaacgagaagagattgagaagcagaaggcaaaagagcgttacatgaaaatgcacttggcccggaaggatggacaaagcaagggctgacctggcccggttgtccatcatccggaaacagcgggaggaaggctgcccggaagaaggaagatggaaaggaaagcaaaagaccgatgccacatttgtcaggaaaacgaatgcagtcactctccctgaataagtaactgcgacccgcgggaggagatgccggggacctgggccgcgctgcccaggacactctgatgtgtctcgcccacccctgtgccctggcgccgcttgcaacaagcccctcatggccaaggaagcccccattggccttggggcttcctcttcatctttggcacagaaattgtttgggggatgggtctgcttactgggggaggggtagctgctatctttgagacagaaagatgcaggacagcatttcatatgtaaccattttgaatgtttttgctgtttttagaattcagagcccttgctggggggtgcctgggagatgactgtaagaatagctttcatttgtctgggagatagataatatgtaagggggtggctgtcccagggaggcagctgctgacaggtttgctacacacagccccggactgtgttgcctgggtggtcaattcaaaaagggggatatcatctggggagcctgtgcccctggggtccttcgagggtcatgggctttgttccctgggtcagtcctgtcttgacttgaccttcaggggcctcacctctcttgcccttccctggcccggttcctaattcacctggggtaggggccaattgcccatttttcagccctaaccccattgaatcattttcaagaaacctctgttttactgtgttggcacccaaggcaaaacatgctccacaaattcaacttgtatatttggcagattaaactttgacattatcgtaaaaaaaaaa

SEQ ID NO: 113604 - DNA, 872 bp, Homo sapiens
agcagggcagcgagcgagatgcagcaccgaggcttcctcctcctcaccctcctcgcccctgctggcgctcactcgccgcggtcgccaaaaagaaagataaggtgaagaagggcggccccggggagcgagtgccgctgaagtgggcctgggggccctgcacccccagctagcaaggatttgccgcgtggttttccgcaagggccacctgcggggcccaagaccaagggcatccgggtgcagggtgccctgcaacttggaagaaggagttttggagccggactgcaaagtccaagttttgagaactgggggtgcgtgtgatgtgggcacaggccaaccaaaaggtccgccaaggcacccttgaagaaggcgcgcttacaatgttcaagtgccaggagacccatccggggtcaaccaaagcccttgcaaccccccaaggaccaaaaggcaaaggccaaaagccaagaaagggaagggaaaggacttagagcgccaagcctcggatgcccaaggagcccctggtgtcacatgggggcctggcccaacggcccctccctctcccggggcccgaagatgtgacccaaccagtgcctttctgtctgctcgttagtttttaatcaatcatgccctgcccttgtccctctcactccccaagccccacccctaaagtgcccaaagttggggaagggacaagggggatttctggggaagctttgagccccctcccccaaaaagcaatgttgagtcccagaagcccgcttttgttcttcccctacaattccaattacccaagaaacacatcaaataaactgactttttccccccaataaaagctcttcttttttaatatataaaagccccttaaaaaaaaaaaa

SEQ ID NO: 113605 - DNA, 400 bp, Homo sapiens
  misc_feature (1)...(400): n = a,t,c or g
nctgacatccggggaattcccaccatatcccggtgaaatagaacgatacacgggtgagaatcagctttctgttatggataaaacaaatgtccttgtacctgagcatgtcaacatgagtgagctcatcaagataattacaaggcgcttacagctcaatgctaatcaggccttcttcctgttggggaacggacacagcatggccagcgtctccacaccaatctcagaggtgcatgagagagagaaagatgaagatggattcctgtacatggtctatgcctcccaggagacgttcgggatgaaattgtcagtgcaaaaccagaaaaaatgcatctcttctagaattgtttaaacccttaccaaggaaaaaaaaggggtggtaccaactgagatcgatcagttc

SEQ ID NO: 113606 - DNA, 2747 bp, Homo sapiens
  misc_feature (1)...(2747): n = a,t,c or g
gacccacgcgtccgtgccatggctgagtcacacctgctgcagtggctgctgctgctgctgcccacgctctgtggcccaagcactgctgcctggaccacctcatccttggtctgtgctccagggccctgagttctggtgccaaagcctggagcaagcattgcagtgcagagccctagggcattgcctacaggaagtctggggacatgtgggagccgatgacctatgccaagagtgtgaggacatcgtccacatccttaacaagatggccaaggaggccattttccaggacacgatgaggaagttcctggagcaggagtgcaacgtcctccccttgaagctgctcatgccccagtgcaaccaagtgcttgacgaggaggttcctcctgggcatcgactacttccacaaccagactgcactcaaacggcatctgtatgcacctggggcctgtgcaaatcccggcagccagagccagagcaggagccagggatgtcagaccccctgcccaaacctctgcgggaccctctgccagaccctctgctggacaagctcgtcctccctgtgctgcccggggccctccaggcgaggcctgggcctcacacacaggatctctccgagcagcaattccccattcctctcccctattgctggctctgcagggctctgatcaagcggatccaagccatgattcccaagggtgcgctacgtgtggcagtggcccaggtgtgccgcgtggtacctctggtggcgggcggcatctgccagtgcctggctgagcagctactccgtcatcctgctcgacacgctgctgggccgcatgctgccccagctggtctgccgcctcgtcctccggtgctccatggatgacagcgctggcccaaggtcgccgacaggagaatggctgccgcgagactctgagtgccacatctgcatgtccgtgaccacccaggtcgggaacagcagcgagcaggccataccacaggcaatgctctcaggcctgtgttggctcctggctggacagggaaaagtgcaagcaatttgtggagcagcacacgccccagctgctgaccctggtgcccaggggctgggatgcccacaccacctggccaggccctcggggtgtgtgggaccatgtccagccctcttccagtgtattccacagccccgtctctttgatgagaactcaggctgtccagctgcaaaggaaaagccaagtgagacgggctctagggaccattggtgaccaggctcttcccctgctccctgggccctcgccagctggccagggttgaaaagaagcctcagctcccacaccgccctcctttaccgcccttccttcgggagttcacttccacttggttggacccaagggcccccagccctgtgtcgggccttgtctgtctcagctcaaccacagtctgacacccagagccccacttcccatccctctctgggtgttgagggcacagcgaggggcagcatctgggagggagcttttgcagcctccacaccttaccacggacctccccaggggctggggcttcagggaaaaaccaggccattgcttttacagggacagggggttgaagctgagccccggccctcacacccaccccccatgcactcaaagattgggattttaccagcctacttgccaattccaaaattccagaagaataaaaaaatgggaacatcccagaactcctaaaagatagacatccagaaattgttaaagttaaagctttttccaaaaaatcaagcaaattccccccagccgtagtccaagggtggacactgcaacgctcttggcattgatggggatggcgaccggggcaagcctttcttcctcgaagatgctctgcttgcttgaggagctattgctttgttaaggatattaaaaagggggtttctttttgtctttcttgttaaggtgggacttcccagcttttggatttgaaagtcctaggggtngattctattttctggctgtggatttattctggctggaaagcttccagctggggggtttgtggcaagcttagggggacccctttccctgtggttaatacaatgtctggcaccagtgctaattaaagtcctatttctcttttatgagaaagaaaaagacaccgtcctttaaagtgctgcagtatggccagacgtggtggctcacacctgcaatcccagcaccttaggaggccgaggcaggaggatccttgaggtcaggagttcgagaccagcctcgccaacatggtgaaaccccatttctactaaaaatacaaaaaaatttagcccaagtgtgggtggcatatgcctgtaatccccaacctactcaagaagggccgagggcagggagaattacttgaacgcaggagaatcactgcaagccccaggaggcagaggttgcagtgagccgagatttgcaccactgcactccagccctgggtgacagacgcaagactccatcatcagtaaataaataaataaataaaaagcgctgcagtagctgtggcctcacccctgaaagtcagcgggcccaaggcctacctcactctctcccttggcaagagaagcagacgtccatagctcctcttcccttcacaagcggctcccaggctggccctccagctggctgctctccccttccagtctcttactcactggggatgaggttagggtcattgagggacaacaaaaaccttaaaaataaacaaaaaggccaaacaaggctttaggttttcttaaaatt

SEQ ID NO: 113607 - DNA, 9477 bp, Homo sapiens
ggcggccaggggcgggcggccgcagagcagcaccggccgtggctccggtagcagcaagttcgaaccccgctcccgctccgcttcggttctcgctccttcggcccttgggcctccaaacaccagtccccggcagctcgttgcgcattgcgctctccccgccaccaggatgccggtaaccgagaaggatctagctgaggacgcgccttggaagaagatccagcagaacacgttcacacgctggtgcaacgagcacctcaagtgcgtgaacaaacgcatcggcaacctgcagaccgacctgagcgacgggctgcggctcatcgcgctgctcgaggtgctcagccagaagcgcatgtaccgcaagtaccatcagcggcccacctttcgccagatgcagctcgagaatgtgtccgtggcgctcgagttcctggaccgtgagagcatcaagctcgtgtccatcgatagcaaagccattgtggatgggaacctgaagctcatcttgggtctggtgtggacgctgatcctccactactccatctccatgcccgtgtgggaggatgaaggggatgatgatgccaagaagcagacgccaaagcagaggctgctggggtggattcagaacaagatcccctacttgcccatcaccaactttaaccagaactggcaagacggcaaagccctgggagccctggtagacagctgtgctccaggtctgtgcccagactgggaatcctgggacccgcagaagcctgtggataatgcacgagaagccatgcagcaggcagatgactggctgggtgtcccacaggtcatcactcctgaagaaatcattcacccggatgtggacgagcactcagttatgacttacctgtcccagttccccaaagccaagctcaagccgggggctcctctcaaacccaaactcaacccgaagaaagccagggcctatggcagaggaatcgagcccactggaaacatggtgaagcagccagccaagttcactgtggacaccatcagcgccgggcaaggagacgtgatggtgtttgttgaggacccagaagggaacaaagaggaggcacaagtgacccctgacagcgacaagaacaagacatactctgtggagtatctgcccaaggtcaccgggctacacaaagtcacagtcctctttgcaggacagcacatctccaagagcccatttgaagtgagtgttgacaaggcccagggagatgccagtaaagtcactgcaaaaggtccagggttggaagctgtagggaacatcgccaataagcccacctactttgacatctatacggcaggagctggtgtgggtgacattggtgtggaggtggaagatccccaggggaagaacaccgtggagttgctcgtggaagacaaaggaaaccaggtgtatcgatgtgtgtacaaacccatgcagcctggccctcacgtggtcaagatcttctttgctggggacactattcctaagagtcccttcgttgtgcaggttggggaagcctgcaatccaaatgcctgccgggccagtggccgaggcctacaacccaaaggcgtccgtatccgggagaccacagatttcaaggttgacaccaaagctgcaggaagtggggagctcggggtaaccatgaagggtcctaagggtctggaggagctggtgaagcagaaagactttctggatggggtctacgcattcgagtattaccccagcaccccggggagatacagcattgccatcacatgggggggacaccacattccaaagagcccctttgaagttcaagttggccctgaagcgggtatgcagaaagtccgtgcttggggccctgggctccatggtgggattgtcgggcggtcagcggacttcgtggtagaatccattggctctgaagtggggtctctggggtttgccattgaaggcccctctcaggcaaagattgagtacaacgaccagaatgatggatcgtgtgatgtcaaatactggcccaaggagcctggcgaatatgctgttcacatcatgtgtgacgacgaagacatcaaggacagcccgtacatggccttcatccacccagccacgggaggctacaaccctgatctggttcgagcatacgggccaggtttggagaaatctggatgcattgtcaacaacctggccgagttcactgtggatcctaaggatgctggaaaagctcccttaaagatatttgctcaggatggggaaggccaacgcattgacatccagatgaagaaccggatggacggcacatatgcatgctcatacaccccggtgaaggccatcaagcacaccattgctgtggtctggggaggcgtgaacatcccgcacagcccctacagggtcaacatcgggcaaggtagccatcctcagaaggtcaaagtgtttgggccaggtgtggagagaagtggtctgaaggcaaatgaacctacacacttcacggtggactgtactgaggctggggaaggtgatgtcagtgttggcattaagtgtgatgcccgggtgttaagtgaagatgaggaagacgtggattttgacattattcacaatgccaatgatacgttcacagtcaaatatgtgcctcctgctgctgggcgatacactatcaaagttctctttgcatctcaggaaatccccgccagccctttcagagtcaaagttgacccttcccacgatgccagcaaagtgaaggcagaaggcccagggctcagcaaagcaggtgtggaaaatgggaaaccgacccacttcactgtctacaccaagggggctgggaaagccccgctcaacgtgcagttcaacagccctcttcctggcgatgcagtgaaggatttggatatcatcgataattatgactactctcacacggttaaatatacacccacccaacagggcaacatgcaggttctggtgacttacggtggcgatcccatccctaaaagccctttcactgtgggtgttgctgcaccgctggatctgagcaagataaaactcaatgggctggaaaacagggtggaagttgggaaggatcaggagttcaccgttgataccaggggggcaggaggccaggggaagctggacgtgacaatcctcagcccctctcggaaggtcgtgccatgcctagtgacacctgtgacaggccgggagaacagcacggccaagttcatccctcgggaggaggggctgtatgctgtagacgtgacctacgatggacaccctgtgcccgggagcccctacacagtggaggcctcgctgccaccagatcccagcaaggtgaaggcccacggtcccggcctcgaaggtggtctcgtgggcaagcctgccgagttcaccatcgataccaaaggagctggtactggaggtctgggcttaacggtggaaggtccgtgcgaggccaaaatcgagtgctccgacaatggtgatgggacctgctccgtctcttaccttcccacaaaacccggggagtacttcgtcaacatcctctttgaagaagtccacatacctgggtctcccttcaaagctgacattgaaatgccctttgacccctctaaagtcgtggcatcggggccaggtctcgagcacgggaaggtgggtgaagctggcctccttagcgtcaactgctcggaagcgggaccgggggccctgggcctggaagctgtctcggactcgggaacaaaagccgaagtcagtattcagaacaacaaagatggcacctacgcggtgacctacgtgcccctgacggccggcatgtacacgttgaccatgaagtatggtggcgaactcgtgccacacttccccgcccgggtcaaggtggagcccgccgtggacaccagcaggatcaaagtctttggaccaggaatagaagggaaagatgtgttccgggaagctaccaccgactttacagttgactctcggccgctgacccaggttgggggtgaccacatcaaggcccacattgccaacccctcaggggcctccaccgagtgctttgtcacagacaatgcggatgggacctaccaggtggaatacacaccctttgagaaaggtctccatgtagtggaggtgacatatgatgacgtgcctatcccaaacagtcccttcaaggtggctgtcactgaaggctgccagccatctagggtgcaagcccaaggacctggattgaaagaggcctttaccaacaagcccaatgtcttcaccgtggttaccagaggcgcaggaattggtgggcttggcataactgttgagggaccatcagagtcgaagataaattgcagagacaacaaggatggcagctgcagtgctgagtacattcctttcgcgccgggggattacgatgttaatatcacatatggaggagcccacatccctggcagccccttcagggttcctgtgaaggatgttgtggaccccagcaaggtcaagattgccggccccgggctgggctcaggcgtccgagcccgtgtcctgcagtccttcacggtggacagcagcaaggctggcctggctccgctggaagtgagggttctgggcccacgaggcttggtggagccagtgaacatggtggacaatggagatggcacacacacagtaacctacaccccatctcaggagggaccttacatggtctcagttaaatatgctgatgaagagattcctcgcagtcccttcaaggtcaaggtccttcccacatatgatgccagcaaagtgactgccagtggccccggccttagttcctatggtgtgcctgccagtctacctgtggactttgcaattgatgcccgagatgccggggaaggcctgcttgctgttcaaataacggaccaagaaggaaaacccaaaagagccattgtccatgacaataaagatggcacgtatgctgtcacctacatccccgacaagactgggcgctatatgattggagtcacctacgggggtgacgacatcccactttctccttatcgcatccgagccacacagacgggtgatgccagcaagtgcctggccacgggtcctggaatcgcctccactgtgaaaactggcgaagaagtaggctttgtggttgatgccaagactgccgggaagggtaaagtgacctgcacggttctgaccccagatggcactgaggccgaggccgatgtcattgagaatgaagatggaacctatgacatcttctacacagctgccaagccgggcacatatgtgatctatgtgcgcttcggtggtgttgatattcctaacagccccttcactgtcatggccacagatggggaagtcacagccgtggaggaggcaccggtaaatgcatgtccccctggattcaggccctgggtgaccgaagaggcctatgtcccagtgagtgacatgaacggcctgggatttaagccttttgacctggtcattccgtttgctgtcaggaaaggagaaatcactggagaggtccacatgccttctgggaagacagccacacctgagattgtggacaacaaggacggcacggtcactgttagatatgcccccactgaggtcgggctccatgagatgcacatcaaatacatgggcagccacatccctgagagcccactccagttctacgtgaactaccccaacagtggaagtgtttctgcatacggtccaggcctcgtgtatggagtggccaacaaaactgccaccttcaccatcgtcacagaggatgcaggagaaggtggtctggacttggctattgagggcccctcaaaagcagaaatcagctgcattgacaataaagatgggacatgcacagtgacctacctgccgactctgccaggcgactacagcattctggtcaagtacaatgacaagcacatccctggcagccccttcacagccaagatcacagatgacagcaggcggtgctcccaggtgaagttgggctcagccgctgacttcctgctcgacatcagtgagactgacctcagcagcctgacggccagcattaaggccccatctggccgagacgagccctgtctcctgaagaggctgcccaacaaccacattggcatctccttcatcccccgggaagtgggcgaacatctggtcagcatcaagaaaaatggcaaccatgtggccaacagccccgtgtctatcatggtggtccagtcggagattggtgacgcccgccgagccaaagtctatggccgcggcctgtcagaaggccggactttcgagatgtctgacttcatcgtggacacaagggatgcaggttatggtggcatatccttggcggtggaaggccccagcaaagtggacatccagacggaggacctggaagatggcacctgcaaagtctcctacttccctaccgtgcctggggtttatatcgtctccaccaaattcgctgacgagcacgtgcctgggagcccatttaccgtgaagatcagtggggagggaagagtcaaagagagcatcacccgcaccagtcgggccccgtccgtggccactgtcgggagcatttgtgacctgaacctgaaaatcccagaaatcaacagcagtgatatgtcggcccacgtcaccagcccctctggccgtgtgactgaggcagagattgtgcccatggggaagaactcacactgcgtccggtttgtgccccaggagatgggcgtgcacacggtcagcgtcaagtaccgtgggcagcacgtcaccggcagccccttccagttcaccgtggggccacttggtgaaggaggcgcccacaaggtgcgggcaggaggccctggcctggagagaggagaagcgggagtcccagctgagttcagcatttggacccgggaagcaggcgctggaggcctctccatcgctgttgagggccccagtaaggccgagattacattcgatgaccataaaaatgggtcgtgcggtgtatcttatattgcccaagagcctggtaactacgaggtgtccatcaagttcaatgatgagcacatcccggaaagcccctacctggtgccggtcatcgcaccctccgacgacgcccgccgcctcactgttatgagccttcaggaatcgggattaaaagttaactcagccagcatcctttgctataaggttgaatggcgcaaaaggcaagattgatgcaaaggtgcacagcccctctggagccgtggaggagtgccacgtgtctgagctggagccagataagtatgctgttcgcttcatccctcatgagaatggtgtccacaccatcgatggtcaagttcaatggggagccacgtggttggaagccccttcaaagtgcgcgttggggagcctgggacaagcggggaaccctgccctggtgtccgcctatggcacgggactcgaagggggcaccacaggtatccagtcggaattctttattaacaccacccgagcaggtccagggacattatccgtcaccatcgaaggcccatccaagggttaaaatggattgccagggaaacacctgaagggtacaaagtcatgtacacccccatggctcctggtaactacctgatcagcgtcaaatacgggttgggcccaaccacatcgtgggcagtcccttcaaggccaaggtgacaggccagcgtctagttagccctggctcagccaacgagacctcatgcatcctggtggagtcagtgaccaggtcgtctacagagacctgctatagcgccattcccaagggcatcctcggacgccagcaaggtgacctcttaagggggcagggttcttcaaaggcctttgtggggccagaagagttccttcctggtggactgcaagcaaaactggctccaacatgctgctgatcggggtccatgggcccaccaccccctgcgaggaggtctccatgaagcatgtaggcaaccaagcaatacaacgtcacatacgtcgtcaaggagaggggcgattatgtgctggctgtgaagtgggggggaggaacacattcctggcagcccttttcatgtcacagtgccttaaaacagttttctcaaatcctggagagagttcttgtggttgcctttgttgcttgtttgtaattcattttatacaaagccctccagcctgtttgtggggctgaaaccccatccctaaaatattgctgttgtaaaatgccttcagaaataagtcctagactggactcttgagggacatattggagaatcttaagaaatgcaagcttgttcagggggctgagaagatcctgagtacactaggtgcaaaccagaactcttggtggaacagaccagccactgcagcagacagaccaggaacacaatgagactgacatttcaaaaaaacaaaactggctagcctgagctgctggttcactcttcagcatttatgaaacaaggctaggggaagatgggcagagaaaaaggggacacctagtttggttgtcatttggcaaaggagatgacttaaaaatccgcttaatctcttccagtgtccgtgttaatgtatttggctattagatcactagcactgctttaccgctcctcatcgccaacacccccatgctctgtggccttcttacacttctcagagggcagagtggcagccgggcaccctacagaaactcagagggcagagtggcagccaggcccacatgtctctcaagtacctgtcccctcgctctggtgattatttcttgcagaatcaccacacgagaccatcccggcagtcatggttttgctttagttttccaagtccgtttcagtcccttccttggtctgaagaaattctgcagtggcgagcagtttcccacttgccaaagatcccttttaaccaacactagcccttgtttttaacacacgctccagcccttcatcagcctgggcagtcttaccaaaatgtttaaagtgatctcagaggggcccatggattaacgccctcatcccaaggtccgtcccatgacataacactccacacccgccccagccaacttcatgggtcactttttctggaaaataatgatctgtacagacaggacagaatgaaactcctgcggctctttggcctgaaagttgggaatggttgggggagagaagggcagcagcttattggtggtcttttcaccattggcagaaacagtgagagctgtgtggtgcagaaatccagaaatgaggtgtagggaattttgcctgccttcctgcagacctgagctggctttggaatgaggttaaagtgtcagggacgttgcctgagcccaaatgtgtagtgtggtctgggcaggcagacctttaggttttgctgcttagtcctgaggaagtggccactcttgtggcaggtgtagtatctggggcgagtgttgggggtaaaagcccaccctacagaaagtggaacagcccggagcctgatgtgaaaggaccacgggtgttgtaagctgggacacggaagccaaactggaatcaaacgccgactgtaaattgtatcttataacttattaaataaaacatttgctccgt

SEQ ID NO: 113608 - DNA, 2004 bp, Homo sapiens
  misc_feature (1)...(2004): n = a,t,c or g
cacgaggtcagaagcgtccgcgccgcgaggaggaggccctgctggtttctgtgcgggtgagactccgagcctttccactgcctttcttgtactgtgttaaatcttctctcactcccttgggcttcgggggtgtcctggtaggtccgcagtctccacacccgtcactgagagccgacctcggtcctcggcattgcgcgggctcttgtcaggatggtgaagctgttcattcggaaaccctgccccgggaggctacaagagcaggaagattcgctcacttcttcgagcagtatgggaaggtgctggaatgtgacatcattaagaattacggctttgtgcacatagaagacaaggacggcagctgaggatgccatacgcaacctgcaccattacaagcttcatggggtgaacatcaacgtggtttgccagcaagaattaagagcaaaacctcaacgaaagttgcatgtggggcaacatcagtccccacctgcaccaataaggagcttcgagccaagtttgagggagtatggtcctggacatcgaatgtgatatcttgaaagattattgccttcgtacacatgggagcggggcagaaggatgcagtggaggccatcaggggcctttgataacacagagtttcaaggcaaacgaatgcacgtgcagttgtccaccagccggcttaggactgcgcccgggatgggagaccagagcggctgctatcggtgcgggaaagaggggcactggtccaaagagtgtccgatagatcgttcaggccgcgtggcagactttgaccgagcaatataattgagcaatacggagcagtgcgttacgcctttacaccatgagctatgggggattcattgtatttaccaacaacgcgtacggagcgctcgatgcctactacaagcgctgccgtgctgccccggtcctatgaggcagttggcagctgcagctgcctcccggtgtataattacgcagagcagaccctgtcccagctgccacaagtccagaatacagccatggccagtcacctcacctccacctctctcgatccctacgatagacacctgttgccgacctcaggagctgctgccacagctgctgctgcagcagcagccgctgctgctgttactgcagcttccacttcatattacgggcgggatcggagccccctggcgtcgcgctgacagccccagttccccactgttgggagagggctacggttacgggcatggagagtgagttgttcccaagctttcagcagccgcgcggaagtgctctgtacgacatggcccgggtatgagcgggagcagtatgccgatcggggcgcggtacttcagcctttttaaagcttgaggtggggatgtgtgtggggctgaaaaatccgaaactgcggttgtgccangaagaaaaacaccctttcgtgggtacccccatctcccgggacgttctcgggccnctgtggcgtttcagtcccttcaggaaccctgggaccttaaatttaaccttgcctaaagttcaagaccttcctccttccctttccctttccctttccctctccctgccccattttccctgttcttctgtccttcaatacttctgtagcttcccattcatgttctcttctccccagcaggcctcagttgtgtgcagaagactggtggtggggggctgtgctgtctcctccctggcctcctgcctcctgcggctgttggaattggggaatgaccttggtgagagtctcactgctccagggtctctttttggtccaaaggctagacctatagagttggatcactttttttctttccggtgaaataaatggtttttcaacttacaaaagaaaacttaagagaaaaaggcaacctttctctgggtggaccaacacaccgcacacatgcaacctgacatatgcttgccaggggcgggggggttttatgaattacattcctgaactccctagagcggaggcactcattattttagtgaccacccactgtttgctgc

SEQ ID NO: 113609 - DNA, 5067 bp, Homo sapiens
  misc_feature (1)...(5067): n = a,t,c or g
tttcgtgtggcggcctgggtctgacgcggtcctgttcgtgggggcctctcttggttatttatttattttccgcgggtgcctccgagtgtgcgcgcgctctcgctacccggcggggagggggtggggggagggcccgggaaaagggggagttgtagccggggtcgaaacgccgcgtgacttgtaggtgagagaacgctcgagccgtctccgcagacttcgccgccgagaagctccttgttctcgctgctgggaaggagagtctgtgccgacgatatggcggacggagagctgaacgtggacagcctcatcaccctgctgctggaggtacgaggatgtcgtccaggagagattgtgcatatgactgaggcagaggttcgaggcttatgtatcatgtctcgggagatttttctcaaccagcctatttttttggaattggaagcaccgctgaaaatttgtggagatattcatggacagtatacagatttactgagattatttgaatatggaggtttcccaccagaagccaactatcttttcttaggagattatgtggacagaggaaagcagtctttggaaaccatttgtttgctattggcttataaaatcaaatatccagagaacttctttctcttaagaggaaaccatgagtgtgctagcatcaatcgcatttatggattctataattaagtgcaatcgaagatttaatattaaattgtggaagaccttcactgattgttttaactgtctgcctatagcagccattgtggatgagaagatcttctgttgtcatggaggattgtcaccagacctgcaatctaatggagcagattcggagaattatgagacctactgatgtccctgatacaggtttgctctgtgatttgctatggtctgatccagataaggatgtgcaaggctggggagaaaatgatcgtggtgtttcctttacttttggagctgatgtagtcagtaaatttctgaatcgtcatgatttaccatttcgattcgtcgagctcatcaggagctggaagatggatatgaatcttttgctaaacgactgccggcaaccttattttcagccccaaattacctgtggcgagtttgataatgctggggaaatgatgagtgtggatgaaactttgatgtgttcatttcagatattgaaaccatctgaaaagaaagctaaataccagtatggtggactgaattctggacgtcctgtcactccacctcgaacagctaatccgccgaaggnaaaggtgaagaaaggaattctgtaaaagaaacccattagattttgttaaggacatacttcataatatataagtgtgcactgtaaaaccatccagccatttgacaccctttatgatgtcacacctttaacttaaggagacgggtaaaggatcttaaattttttttctaatagaaagatgtgctacactgtattgtaataagtatactctgttatagtcaacaaagttaaaatccaaattcaaaattatccattaaaaggttacatctttcatggtatcacaatttttaaagttgaaaagcatcccagttaaactagatgtgatagttaaaccagatgaaagcatgatgatccatctgtgtaatgtggttctagtgttgcttggttgtttaattattttgagcttgttttgtttttgtttgttttcactaggaataatggcaaatacttctaatttttttccctaaacatttttaaaagtggaaatatgggaagaggctttacagacattcaccaactaattattttcccttgtttatctacttaggatatctgtttaatcttactaaggaaaactttcgcctcattacattaaaaaagggaattttaggaggattggattgttttaaaaaaaaaaatacggcacattgtccaatccagtgattttaatcatacagtttgactgggcaaactttacagctgatagtgaatattttgctttatacaggaattgacactgatttggatttgtgcactctaatttttaacttattgatgctctattgtgcagtagcatttcatttaagataaggctcatatagtattacccaactagttgggtaatgtgattatgtgggtaccttgggctttaggttttcattcgcacgggaacaccttttggcatgcttaaacttcctggtaacaccttcacctgcattggttttctttttcttttttctttctttttttttttttttttttttttgagttgttgtttgtttttagatccacagtacatgagaatccttttttgacaagccttggaaagctgacactgtctctttttcctccctctatacgaaggatgtatttaaatgaatgctggtcagtgggacattttgtcaactatgggtattgttgtgcttaactgtctaatattgccatgtgaatgttgtatacgattgtaaggcttatgtcactaaagatttttattctggtttttttcataatcaaagggtcatatggatactgtataggacaaggctttgtaggtgaagtataggtaggccaataatttctgtgacctgatccaagtttattggcaggcctttcttttcctatttctttttttttaagggtttagtattaacaaatggccaatgagtagaaaagttaaccatgaagattttagaaggagagaacttacaggacaccagatttgtgattctttgactgtgacactattggatgtgattctaaaagcttttattgagcattgtcaaatttgtaaagcctccataggggatgggacatccaatatctatgaatgccccttcctatatggtgcctacccataggatgtggccattttttggccttaatatccgtctttggaaaatgttaaaattgaggaaacctgtttaacttacattttatgggattgggccacattgttatttacttactgcaagagatatttcattttccgcacacgtgcacaagttcttcacaatcgcctacgtctttttttctaattcctgttttgtttttgagcttattttaaatgtagttttctcatttagtaaaagttgtctaattgatatgaagcctgactgattttttttttccttacagtgagacatttaagcacacattttattcacatagatactatgtccttgacatattgaaatgattcttttctgaaagtattcatgatctgcatatgatgtattaggttaggtcaccaaaggttttatctgaggtgatttaaataacttccctggattgggagtgtgtaaggctggggcggatttctaataaaaattttaggttgtaccacttttaggtagtccatagtgaagcaggtctaggaaaataagccctttggcagggaaaaagggcaatgttgattaatctcagtattaaaccacattaatctgtatcccattgtctggcttttgtaaattccatccaggtcaagactaagtatgttggttaataggaatcctttttttttttttttaaagactaaatgtgaaaaaataatcactacttaagctaattaatattggtcattaaatttaaaggatggaaatttatcatgtttaaaaattattcaaggcactcttaaaaccacttaaacagcctccagtcataaaaatgtgttctttacaaatatttgcttgggcaacacggacttggaaattaaattaaaactttgtttcttagggggggaaaatgattctgtaattccagtgtcactaatttatattgttctttcctctgatttttttcaggttagtgatttttttgtatacaatttaatccaaatgttatggacattcaggaaatcatggaaacacagtaggatatctgttataatgtgggtgtatcacatgggattataaagcataagttatcggtcgatttctattcttggaaaggaatcaactacagtggaatcctttgcatttgaagcccttaacatggcattgcttttaattttgcccgggggacaaattttaataatcaggcaagactggtttgtggcaaagcggttgagtccatcagggtatttagagcctagccagctacccaggtattccatgctggccatatcccctcattggtaaaaaggtacctaaaccattccgtggaaatgattttttttagctgaaaaatgctggcaagaagaattttaaagcttaaaataggtggtaaatttgaagtatgagtgtgttcacgagaaacataggcttttcaaaaaaatttttattcaaggcaaagcaaggaacatcttgagatatgtctcaagaatataaagatgtattattttaagccaaggagctgaaatatatctcagtttataaattcaggtatatccttttggtccccagggcacccataaactttggaacccaaaaaaaaattgtttttacatctttatgctggaaaatgtgtttaggttagggatatgggtccgggctgaatttgctgttgctccctaaccaaatccacctcttgtttgtccttgtgagtccatggctaaatcaaagctgcccctgagaagagacttaatcccaagcctgattgtactagtgggcatcaacttagaagtaggctttcccctcctcccctagtagatcctcaatgtttttataattcccttaaaacagcctgaaaattgggacaaccatactttaccgcaatgaacagtagttaaatagggaaataaaactagttcccatgtaagtatacaccctagagttttaattaccctttataaatgtttctttaaaagtggaaacttaggatacaattgtggattgggataccttaggatactaagtggaaacttagtgtaacaattttgatctgtttaaattggattttacatgtacatttgaatgcccagaatttcctaaataaatcccctggttacggaaattttaaaagtcaaagcttgttttcttcaaccactaccttctacattggttgacttagaccgtaagctttataagtttctcattgtaatttaccttctcatgcagattgctgatgttttattaaaccttatttttacaaaaaaaaaa

SEQ ID NO: 113610 - DNA, 1911 bp, Homo sapiens
aggaaaagggaaaggaaggaaagagtagaagtattggaaaggaagagacaaaactatcattatttgcatattaaatgataaatgttagcccaaagaagccctaagagaatcatctaagattttcgtggaagtaatatgagaattcagtacggtggctagaaacaaaatcaagagagcagcacacaaacctcaaatgcttttcagatgtgccgccaataactaactagaaaatggaagaaagatcccatttaccaatggcaatacaaatgtctgaagtatttaggaacaaaaatacaaagatctgttatctaacaaaagaccgtgtaagatctatatgatggaaacccctaaaactcttctgaaaagacattaaacaaagaaatgaatacatgacatgaaaataccatgttctagaaatgtcgtacagatgtaaattctcaaattaatctacaaatttaacgtaatcctattcaaatcccaagatagtttttggtggtggctgtttttaagacagggcctagctgtgttgcccaggctagatgtgcagtggtacgaccacagctcactgcatcctcgacctcccaggctcaagcgatcctcccacttcagcctctgaagtctctcatatggtgtccaagaaatggtgacaaatctcacaaagggactaggctcagcagggctggaatattcagggaaggtgtcaagaagaaagatgaacttgagttggcttttgagagatgcataggactcccacaggcagagtgaaataagggcattttagatggacagacacacagacaaaagcagaaatgtgggtggtgtgactggggtttggtgaggggctgctgtggctggaatggagggctgccacaataatggaaatggtaaatgaggcaagtaaggttggactggtggcatagcgtcaaggttgccagctttattaaatcactcttccaatatgctagcactggcctgttgggaaaagtaatatatcatgtaatcgaacaaaagacaaacagaggcaagctccaggaatgggcactgtaaacaggacttgccccagagtagccagatgtaggctttagataagttgatgcaggctgagcatctctaatctgagggggaatgtctcacatggtgtccaagaaatggtgacacatctcacagagggtctaggctcaggagggctagagtatgagacgttccccctcgcctgtgaacttaaaaatgtggccaacaatttttgtaaaagatggctactctgtagtgctttaactggacctatttagacaatgccttacacactggaggacgatactgtgtaaatctaataagtctacaagacaatacgtatgtcttttggctctctccttcctctccagggtgatgacaactccgtgagggtggagattatacctctctcatcatttcagcaccaaggaaataaattagtggcagagtaagggtgacttgatgagtacatccaattgttgacatagttttgggtgggagaaattttgctaatatatcgacttcttaaaaatattcaagtgggattaactttgtttcaattcacagagatctcttggaagcgaggatcttttaaaaatcctgaaatatacactgcaataaaagaacaaagcatacacctcagccttaaatgactgaagaagtatgtcaagtagcagcaggtgggaaagtggctttggttttcagtttgtgagctctgaatccacacagaaacaggactgcattctgacaacctgaattaattattgtccttaccacaatgaggcagaaaagtataataaaaatcattagtatttcagtcacaattaatgccaaggatgagtttgtcagtatagccatatcctggaacttattttgtgagcttaaaaaaacaaaaaaaaa

SEQ ID NO: 113611 - DNA, 1815 bp, Homo sapiens
gtagcggggaaaaatcattacgcttagcttggaacgaggcccgcgctggttggtgctcctgcgccggaggagttctgcgttttggggtggtgactgggtccagaatggcttcggattcggggaaccaggggaccctctgcacgttggagttcgcggtgcagatgacctgtcagagctgtgtggacgcggtgcgcaaatccctgcaaggggtggcaggtgtccaggatgtggaggtgcacttggaggaccagatggtcttggtacacaccactctacccagccaggaggtgcaggctctcctgggaaggcacggggcggcaggcggtactcaagggcatgggcaaccggccagtttgcagaatctggggggcagccagtggccatccctggggggggccttggcaccgtgcagggggtggagcgcttcctacagctgacccctgagcgctggctcatcgagggaactattgacgggctgggagcctgggctggcatggactccacgtcattcagtacggggaccttacaaacaattgcaacagctgggggaaatcactttaaccctgatggagcatctccatgggggcccccaggactctgaccgcgcaccagcggagacctgggcaatgtccgtgctgatgctgacggccgcgccatcttcagaatggaggatgagcagctgaaggtgtgggatgtgattggccgcagcctgatttattgatgagggaagaagatgaccctggggcccggggaggccaatccctttatccaaagatcaccagggaacttccggggagtaggttgtcctgtggcatcaattgccaagtccgctggcctttttccagaaccccaaagcaagatctgctcttgcaatggcctcacccatcatgggaggagcgaggccggcccatcgctggcaaggggccgaaaggagtcagcgcagccccctgcccacctttgagcaggacctcaccttggctctgttgctgtcctccagggcgagcactttccaacttcaaaaggggccaggagggaactttgcctgcccagtttttggagagctcagtacagggcaggagctgaaaatggtgctcccttggcaaatgaaagttttactcttcgttttgggacttggtgttttgtgcttgtctccatgccccttatgggctttggtgaacatagctctgcttctttcctttgtatcagggccaccccttagcattggagccaaacaaacctgaattcaaacctacacacacactgaagtccccatcttcctccttggagccataatgaagagccactacagtcaaatttctgtttgtggcctcccccaacccctcactatggctgattggaaccaaaatggacacctgacccatggtggcccatgctttccctgagaaatcagggcagatccagctttagttttttcctgtggttggacccataacatgggaatatgggaagttttggtggccctcttctccctgccttattgactgagcatcagaaaaagccagtcggctaaggaggaaaaatgaggcagggagaatctaagagttgctggagaatcccagtcactctggagtcccctctctgagcctttcgtgaggccagctgcctcctgcctgggattgaagagatgctcccgaatcctcctaatgcatccccctgttaaaataatctggcttgaggctgggcacggtagctcacacctgtaatcccagcacttcggaagccaaggcgggaggatctcttgagcccaggagtttgagaccagctgggggaacagagtaagaccctgtctctaca

SEQ ID NO: 113612 - DNA, 2319 bp, Homo sapiens
atcgaggtagttacataaaattattttgtttggcattatttttctcactcgaagaaactatatagggttgtttttcctttagcttgtgctcaagtcctcttgctgtgttttcagaagcactcacatgttctttcttttcctgagtgaaaagcaaaggtcccacggtgtgtgctgtggtgcaccgcctgggctttgggggtcccggaggcaggctgcctaggactcacagcctcgggaccgttgccacggcctgtcttctcgttcaggcctgcctctggacagcacttaccatggagggacattccatccttcaccccctcctctgggcacagggccaccactgcggtgctggtgcctttcaggatggggaggtgggcgcggtggccgcctccttccctccaggacctgcccgtgtgaagaccccccggagtgctgagcttcagggctgcgtggaaagagtttttactctctttttctagcctgtataccaggcttttccccacattgtcaggtagagcaccagcttccctgaccgctgctgctcggggagggctggggctggccgggggtcctgtggaggagtacatggaggactccaggtacagcgcaggagtcacggcttttgttttttgacattggcccccggttctaccaatgacagggtgccctggctggagctgtcatcacacacacccctcagctcggaggctgtgggctcctcaaagctggagaaagaggccaagatttttctgcacacggagtgtggggataggagccgggccaagcgctggcccctcagcggtgagccctgcccactcttcccgagcaaggtgggtggctctggcacgagtccaacagggggagagcatggctaccagggagctgcagcggagccctccagccctcaccccaggccagccccaccccggcctctttgagaattctcagaactttgtacctttcccctgatttttaaaaccctttttctaaacagactgactttcttacaaaatgcatttgggaaaccagacctttgctacccaccaatgtctctggggttttgtaccagtccctgcttttcagggccaccctgcccaggacccaggcccgcctccccctccacactcaggatgtcctgctccatctggccggctcactccgtgtggccctgccctttgcctgacccgttttgggggttcccccgccggagctacaggggtcattttccttcccctaaaacccaacagtgtccccactgacctcccccaagtgtttgccgcgtggcagatttcctgttcttgttcgcgagtttgccgactgaagagtgtgggatttccgaggcccaggtgagcacgtccatctcaggaggcgtggagggaaaagacatgtcatgaagggttttttttatgtgactgatttttttttaaatcgatgttcaaactaataaatatttttttatgaagaggaaaaatgtgtagattacatttcacattttgtatttttgtttgtgtctgtttgtattttggtgtttacaacaccaaagtgggaaatacagtccattggggatggtgttatttgggggcggggagggggcagggacaccacgatttttctgtcaagctctggatcctgaccaggttgtacactggggctctctgagctttgggacacaggacactgccagggctacgtagggaactgactcacaagacgcagcttactgcttccaactttgcacatcttcctctttaaaaaactgagaaaatgcaaaaacttgaactttttgcaatattataaaagaagtaatcttattttagctcattctgtgacatgtgcgactcttaagaaagccatacttaatggtggtggttttttttagatcttatattgtgttttgtatgcagcccttttagaactacttgtagtgagggtgctgtgtgtgcttttcttaaatatttatttttttcaacatgctttcaacctgtcaacaaaaacaaaacacacaaaaaaagggcagtgtttgaagattgttgatttttttctggggataatctatattatattgacttcctattacttattataaacctgtgtttgtattggagatgtgtctactattgggggaagaggttctcgtaatcgctcggtgggaaatcatggctctgccgtcctgcctctctgtggccgtgggttcacgtggcctctgcggtgagtctccaagtttctgcctaggcgcctgtgcgtttcctttctgtgacgggattagcttagacatccatgcaaagcgatcactttcaataaattgggaaatagctgctc

SEQ ID NO: 113613 - DNA, 2607 bp, Homo sapiens
acgaggacaggaggctcaagggggcggaggcggcgttgccgggctctccggaaggagacgtggcggcggttgggccggtgatacccgggcgctttatagtcccgccgcctcctcctccacctcctcctcctcctcctctcctcctggagcaaaggaggttgtggcggtggctggagaaagcggcggcggaggatggaggaaggaggcggcggcgtacggagtctggtcccgggcgggccggtgttactggtcctctgcggcctcctggaggcgtccggcggcggccgagcccttcctcaactcagcgatgacatccctttccgagtcaatgggcccgggcacggagttctctctgcccacaactggagttttatataaagaagataattatgtcatcatgacaactgcacataaagaaaaatataaatgcatacttccccttgtggacaaggggggatgaggaagaagaataggattataaaggccctaatccaagagagcttttggagccactatttatacaaagcagttgttcctacagaattgagtcttattggacttaacaaatatggttttggaaaaaccaatccggcggtccctatgaaaaaaaagaactgtcagaaaataaatattcaccgagtactaccttgggaatatgttggccaagaaccttctatttgaaaaagaacgagaagcagaagaaaaggaaaaatcaaatggagattcccactattggttggggtggccaaatgacaccatactatcctgtgggaatggggaaatggtacaccttggtagtttgaaacagaacccggcccagatcaagtacctgtgatgtacatatgtcatcctgaatctaaggcatgaaattctttccagtagctgaaggttacaacttgtgaatatggaagttgtcattttgacaccactccttgtgcagttcatcctaaaatataggttcagaagcatctcccggtggaatggacatattttggtcaaatcactgccaggattctccatttaagccccctcaccctgaggcagctggagcagcaggaagaaatactaagggtgccttttaggaggaaataaagagggaagatttgcaatccaactaaagaagagagatttccagcgatccacaaagtccgattgctattggctctcagccagtgctcactgttggggacaacccacatatccaaattgacagatgaccaactcataaaagagtttcttagtggttcttactgctttccgtgggggtgtcggttggtggaaatatgaattctgctatggcaaacatgtacatcaataccatggaggacaaggatagtgggaaaaccctctgtgggttgtcgggaccatggaacccaagaagagccatattgaatgggcctaagaagaatacctgcctagagccttatcatccttcaagaccgatggtaccccagaccagtcagggatgggtgtcaccatttttatggaaatggagatatttgtgatataacttgacaaaccaagacaaggtgactgtaaaacctaaagtgcaaagaatcagattcacctcatgctgttactgtatatatgctagagcctcactcctgtcaatatattcttgggggtttgaatctcccagttgatctgtaaaatctttagataccagcagaatgaaaaatggacttcctttctcctccccaacttaaaggatattaaagtttagggggaaagaaaaagatcattggaaagtccatggataatttcctggtccccactggtggtcctcattataggaggttccccagcccattgggcctcttccaaaggatgggataaaatggctccccaaccactttgtgaatacatatgtgtatataagaggttattgataaacttctgaggcagacatttgtctcgctttttttcatttttgttgtgtcttataaactgactgtttttctttgcttggatactgtgattccaaaataaatctcatccaagcaagttagagtccagcctaatcaaaatgtcataattgttgtacctattgaaagtttttaaataataggatttattatgtaaattataggtattatgtaaggtaggctaatggaaggtaaagatcattgaagaaagaaattggataggtgtaaatggagagaccatgtaaaatatggtaaattcctagtaccctgaaatcctttccaaccagatttttaatataggcaactgctctctgccaaagtagttaaacttagaaactggggcacatgggtagaggctcacatggggagttgtcctcacccttgttaatctcaagaaactcttatttataataggttgcttctctctcagaacttttatctattactttttttcttcttatgagtatgtttactctcagagtatctatctgatgtagacagttggtgatgcttctgagactcgagaatggtttactctaacaaaacactgggcctgctatcccctgtacctggctaccggtatatgggattccaccttccggaacagtttacatgcacaatatttattttaaagtgaataaaatgtccacaagcagtgttgtcatgtagtcaatggcagatt

SEQ ID NO: 113614 - DNA, 2295 bp, Homo sapiens
ggtcactggagaatgatggcgtctgtttcaccgagcaggaatgggagaatctggaggattggcagaaggagctctacagaaacgtgtttgttattttctatgagacactggtctctctgaaggtccttggccagacagagggagaagcggagttgggtacagagatgctgggtgacttggaagaggaaggtcctggtggtgcccacccagcaggtggggtcatgatcaaacaggagctacagtatacacaggaaggccctgcggatcttcctgggagagttctcatgcattgctgaagagccaggctttcctgagcccagagcagaccgaactctggggtggtcagggcagttctgtcctcttggaaacaggtcctggggactctactctagaggagcctgttggtagtagagttcctagcagcagcagaactgtgggctgcccgaagcagaaatctcataggcaggtacagctggaccaggaatgtgggcagggcctgaagctgaaaaaggacacttcccgcccctacgaatgttctgagtgtgagatcaccttccgctataagcagcagctggccacacatctgcgcagccactctgggtgggggtcttgtacacctgaggagccagaggagagccttaggcccaggccacggctgaaaaccacagaccaaaaaggccaagctgcatcagtgtgatgtgtgccttaggagcttcagtgtcaaggttgagcctgggtgacccatcagcgttgcccacctgcaggaggggcccagtgccggccagcatgtccaagagaggttctcacccaacagcctggttgccctgcctggccacatcccttggaggaaaagccggagttccctcatctgtggttacttgtggcaagagcttcagtcacccatctgacttggtgcggcaccagcgcatccacacgggtgagcggccctacagctgcactgagtgtgagaagagcttttgttccagaagcagcacctcctgcagcaccagaagatccaccagcgggagcggggtgggctggccctggagcccggaaggcccaatggcctgctttaagggtgcagcccctcgcccgtctgggggatggaggggggtggcattggttcccccgaagagacactgcagtcagggacagagttcttcccgagggcagatgtttgtgattgccttcccttgtcccagtaccaagccaagcccaaaggctgtcctgaaaaccctgtggaagaagagtccaggccaggtcttcatcctgctgccaagtttgctgtttcttggcaccttcaggtctctggttttctcattcatgccaatgcttgtgggctggggttggcgttctgaccccacagggactggtggctggttccagggctcgtcccggcatttcatgtcttcccaacggggtttgagtcgggccataggggtgagcagctgcctggaagagttctgggaagtataaccctccattttttcttgttttataatctctttgtttaataataagtagaagaaataatttaaatgaactgcttagccctgctctgaagaacctttttttggaattagattttagttgattttttaaagaatacagcccaacacttgttttttacattttaagagttgtagaagttgttcctaacttggggactggacctaccctctaggagggagttgttaatggggctcttttagcccactgatgcttacttaggccggagagcaggggacacggtgctaggttccctcgtgcagtgcctggtgctctcaaattgtctcaaaaggaccaagaggaaaataggtcggaggggtagacccttgcagcccctgttgagaagaaagattccagtgaagttgcttgatggtatggctgtggtctgggacttgcggtggtctcggcataccccctctccctccttccccaccctcccccccggcctatgttcctgcagccctccccagagtagaaaactactttgttaccttaaggttgttcacccttgtacccagtggttatttgagtttgttccctattacacccaatccttacttgaggtggttcggattacagtttccaaatgcattctgggattgcctattccagagagggtacaagaaaaagcacacagatggcttgtctcaggagtgttgaatgtgtgccccgctgctgtctggggggatgggagtgggctctggggtcatatgtgaacatccccttggatgatttcgcggttgcttagaataaaacttgctactagcaaaagaaaaaaaaaaaaaa

SEQ ID NO: 113615 - DNA, 468 bp, Homo sapiens
gcccgcggtgaatctaaggatggcagcggtccagcgggcatgggtgctggaggtgggattcggtgccaacgggcccagaaccgacttgagctcctcttgcccgaatacgggctttttgcctctttctccagctgccacccgggctccgggaccctcagactctgccgcctgggggcagcttggaaagctgggaatgctgacacccccagcctcttgtcctggtctcaaggggacagcccaagctggctacccctccccctggagggccctggcctcacccctcagcccctcagaggtcagcccttctcccatgaaggccactgggcagctcttgccaggcaatgaaggtccttggccagcctgagcacccagtgctgtcccggcccctgagcaagcagctgtgtgcgcagctgtggtgtggcaggtaccatcacctccacacaggcctccggccaagctggcgtagca

SEQ ID NO: 113616 - DNA, 1064 bp, Homo sapiens
gaatgtgcaggtgtccacctgggcccatatcacatggcccacctgagaacgggtgggcgaggggtcaggagcagtgatgagcatacctgatgcttacgctgtttcctgtgtatgccaagagcaacaaaatcctttgtgtctgaccataaagtctcatttcttctgccacatgaaactggcaggctaacttgttagcttgcaagtagggtaagatgtcagaccctttacagttgtttgttttttggagacagggtctcattctgctgcccagactggagtgcagtggcatggtcatggctcactgcggtctcaaacttctgggcttaagtgatccagctacctcagcctccagagcagctgggactgcgggcatgcaccaccatgcctggctaattttaaaaaaattatttttgtagagatagggtcttgctatgttgacgaggttggttttgaactcctggcctcaagtgatcctcctacttctgcctgccaaggtgctgggattatgggcatgagccaccatatccagccagttcttattgtttaagtaacacattcagttttctagaaatttacttatgaatttacatcaaccttcataagtagtattggtttgtaatttttttcttccacactatcttcattagattattatggttatgctaatgctacaaggaatttgtaagttttccatctcttcctgtactgaaacagtatatacgatgtgcaaactattcctttaaaatttgcaaagacttagactgagcgtggtggctcacacttgtaatcccggcactttgggaggtggaggtgggaggatcacttgagggctgatggcttgagtccaggagttcaggaccggcctgggctacacggtgaaaccctgtgtctactaaaactacaaaaattggctgagcatgctggtgtgtgcctgtggtcccagctacccgggagactgacgaaggagatcacttgaacccgggaggcagagtttgcagtgagccgagataatgccactgcactccagcctgcataacagagtgagaccctgtttaaaaaaaaaa

SEQ ID NO: 113617 - DNA, 723 bp, Homo sapiens
gcgattacgctcagcttggcacgagggagacagaaggcagggctccctgggagtccactgtgctccagggttctggggaatcagggttagccagcagctcctggctgcttccctcagagactagggctctcatcctccccaagagaagcagcaagcccagcctggaccacactgtccatattgctggacagtggcctgacagaaagtgactcctccaagtcccaggaggccagggcttttctcatccttgcctttcagccctaacccatgggactgcccacggattggagacttcaagggctgaggtctgggagctgcataaagggcattgcttcagcccaggttagaaatctgcctgggcaagctcttcctgccccagacctacaaagcagcagaccgggggctctggtggactagcccctgacattggtggggggccccacaccactccaccccaccctgccttccagctctcctgggcatttttctccctgtactcaaacagcctacccacccaaggtttcctccctgggcagcctagcaatgaacagtgcagccggcagggcagaggcccggcagtcaccgggcccgtcaggctcaggcagagaagccacaggggccaggagtcactggagactatttctaaatgatgggggtaaatgcacaaatagaatctcaccaaagggctgcctccacattgatgccgtgcccagagggacagag

SEQ ID NO: 113618 - DNA, 651 bp, Homo sapiens
cgattacgccaagcttggcacgagggtgccctgtagcgtccaccatgtgtgtgtcctgagtttccagtgcaagtcatctggatttgcatttagctagggaaactcggccctcaaaccctctccctctctgcctgaatttgccaaaatgccaaccatccgggcaggtgtggatgccacagtccatccccattgcatttcacccccacatggacagaggcacacactcgcacacattcccagcacctttgactgctgggggatgcaggccagggtctgcctggagcctcagggttgggacttatctccaaaggagcccacaccccctcttccaggatgggcactggctggcagcacttttttccctcatcacatccctgacccctgcccagcccacatgcacatgctgtttcctgtctccagggccctagcctgtggatctcttcctcccatgcactcctagggggaatgggctcagcaccaaacctggctgtgcccattccccacaaccccagcttggcctcctgtgggaaggagaaggcagacctgcccagaggagaggggcagtgttcccacccacctgctccagcacaggaaccatggaggaaagaacggagagggagggtccattcaccgccttctggggtagcgctt

SEQ ID NO: 113619 - DNA, 1599 bp, Homo sapiens
aaaggtagaagtcattatgaatttattatttacacgattgttaaagtacacaaatacagtggcgatacaaacgcacagctcggagactggccgtcagtgcacagctgacacgacgtcctacctacgtctcctgcacggggcgacggggactagatactgggcaaggactgtcacaagcactccgaagacgcgacccggcgaggctcgggctggaacccgggcgcagagctgcctcgcacaaacgttctgggcactacatcgggaccacagatatttacaaagcaagcttgcgccacttcaggccacagcgcgacgtctctccgggtgggggacgtctaccttcaagaaggggtccagcaacaaagaaaatctcttaactcggctctgacccaccccaacctccctctgtacttcaacacacagctcccacccgctcaaggccccgtactccaaaacgcttacacagtaaccagcctaggattgagaaagcatccatgggctcaggcagacggccagccagctggtgggggggtgaacaactgtgttctgggacgccagccagttatggcatccggggaactctggggaggagaagggagaaccaaggtgcacaccttcgaagccctagagtccaaagggaacatcgtccatcgtgatggggtccagccgaagtgcccacgaacacagactgccctgcgcattggggttgggagcacatggccactggctaccgcccaagtgctgcggagtgagaggcgagaaggcatcctgggaacctcagggcacagcagcatggagcctggggcagcaccagctcacggaggccacctgccttctggtgggactcggccccacgcacgctgcttcacttctgaccaacagacacgcgcccaacagaaggtcacagcgcagactctactttctggccgtgaaggttctgggtccggttgggagagtcacctgctccttggcacctcagggtgggtccttctggcctgccggcttttctgagctagtcttggcacgtggcaaggacagccccgctcctggttttaagcacaggcattcatacagacggagtgccaatccgcacaggagcattgagtgctgagaaaatggactgagtgcaaaggcagcaaggcaacaaacactacagtaaccacctctcggttcacagtcctctcccaagggaccagaaacgcatcttccaccttgaatcctgggactcccaattgtcctgctagggtctcaaagcctctgcttccaagctctcagctgcctgcccacctcctggggaagaagcgcgcagtgctttgcctggtaacacccactgcacccctgccccgcggcagcctgcggtccctaactgctctccgagggcctcaagagttcctgacagcaggcatgtcaattacgggaggagggagggtgagacgccaaaatcaggttgaagaggtcccaccacacacgggcacacacacacaccacggacttttgatgagaaatctcctctccaaagcggacaataaaacactgcaaaacaaacacagcacacacccttgaggtcgtcaaaagctggcgtatcaggtcatagatggt

SEQ ID NO: 113620 - DNA, 434 bp, Homo sapiens
gacctgcaccaatagtgatgacggtagaatgacttttgggtcacagcgcgtctcccctagagcaaacaacggctttccattgcaggaggatactgcccatctcctcagtctgactcgagggctctttcaaggtcgactctggggtagtgaggtccccggctttgggcgcgtctcccctcagtcggctcgtatcccacaccccttcccccttggatgcctcgttctctggggccctttggcgctgcccctgcgtccccatcatggaaactaccacctggtgcctaactgccagacgcaaaagtgaccaagcctgtctctcacgttccaccccataaaccttcccctcccgtccagaagccaaaaagaacacaggtcgaagcaggaccacgcaaggacgcgccgggcgcgtgggtcgtatcggagtagctggacat

SEQ ID NO: 113621 - DNA, 614 bp, Homo sapiens
gtgatgttcggaattaccgggacgacccacgcgaccgcggacgcgtgggatcaaatcaggacttctgttttaaggatttattatttgcttatgttcatcctaagttaaggggaaggttttagtggttagtgccgtactgacgttcagttcacaataactaataaattttagctttaaagatagtactggattttattttaccttttgttattgagctgtttaactttagagctatttatattttgaataaatttattatttaatttttatttagattggattcatgcatagtgatgtcctgctttttatctagctatcttaaaaatttttggccaggcccagtggctcacacctgtaatcccagcactttgggaggtcgaggtggaaggatcccttgagctcaggagtttgagatcagcctgggcgacatagcaaaaccttgtttctacaaaaaatcataaacttagctgcacatggtggcatgtgcctgtggttccgactacttcaggctgttgtgggaggattgcttgagcctgggaagtcaaggctgcggtaagccgtgatcatgccatggcactccagcctggaaaatagagcaagaccctgtctcaaaa

SEQ ID NO: 113622 - DNA, 433 bp, Homo sapiens
  misc_feature (1)...(433): n = a,t,c or g
gnnnnnnnnnnnnnnnnnnnnnnnnnnnnnnnnnnnnnnnnnnnnnnnnnnnnnnnnnnnnnnnnnnnnnnnnnnnnnnnnnnnnnnnnnnnnnnnnnnnnnnnnnnnnnnnnnnnnnnnnggggggaaaaaaggccgggccctaaaaaagggggggcccaaaaaccgggttttttgtttttttaaacaataaccttggttatgaaaccaaaccaaagacctaattttctttggaatcccattttcaaaggggcaaaaggggaaaagaagggggggtttggaaaaaatttaaagccccatggttggaacttggggggggtaaaaccccaaggggcaaaaagggttaaataattgtgtcaacctaaaattgggaaacgggggtccctgggagtgttgcttggaaaacaattcgggggggcccaacaaggaaaat

SEQ ID NO: 113623 - DNA, 501 bp, Homo sapiens
gcacaacaaaaatctgttccatgatgacagcaagtcacagcggggggagagcctaaagcttcttttggagatgggaaccagagaccaaggaggcaatactttcccagagaggcaggagcagaggtgggctttactccccattgctagtcagccagtaaggaggtagcatttggaaaacagcaacgaagaaccaggcatttggtttggaggaccgtaacgggtgaacggtggctcaccaaggagcgctcatgtctgaaggcccagttcctggggatgtgactttatttggaaaaagagtgtaggctgggcatagtggctcacacttgtaatcccagcactttgggaggccgaggtgggaggactgcttgagcccaggggtttaaggccagcctgggcaacatggcaagaccttgtctctacaaaaaataacaaactagctgggtgtggtggtgtgtgcacctgcagtcccagctacttgtgggtgctcaggtgggagatcac

SEQ ID NO: 113624 - DNA, 757 bp, Homo sapiens
gtctttatgagtgtgaccatcagagtttttatcttctcttatgaaaaaagagagttctcaacattttgaagtctctgctagttcctaaaagttccttcttttcgttagatcttcagtttccagtaggttccagccttcccttcacatttgagttttacagtatgatcaaccactctttgcttctcctgggtatccagctcttgggacatctcagcctccatagtcacatgagccaattctgttatgtcataactctgagctttcactgctagcaatcacaaggttgtgtattctcttttcattctttatctgcggtgaatatagtagacgagatgacctccagtggccaggtatctcaaacatatgcctctgcagtggttgcattctcccgcgcttgtttgttcacactgagcccagcatggggggaagcttcaggatgcaacaataaataagggaagggagccatctccagttgagtcagataaatcctcttcttcccattattttttcttttcccttctgctgccagatctttggtcatttcacagctcgttagcattctctctctgtagtctcagcactttgggaggccaaggcgggaggatcacttgagctcagaagttcaagaccagcctggacaacaaagcaagactctgcctcttttcaagcgtccggcgacagcggccgggcgcgggtccgcagaaaagccgaggcgtttcgggtcccaagctgttccgccgccggccccggcacgaaa

SEQ ID NO: 113625 - DNA, 596 bp, Homo sapiens
  misc_feature (1)...(596): n = a,t,c or g
ccgtgaattcccgggtcgacgatttcgtgatnnnnnnnnnnnnnnnnnnnnnnnnnnnnnnnnggannnnnnnnnnnnnnnnnnnnnnnnnnnnnnnnnnnnnnnnnnnnnnnnnnnnnnnnnnnnnnnnnnnnnnnnnnnnnnnnnntcaggttggacaagcctgtttcagtattacttattttctctttttttcattttttatttcatttattttcagtctttttttttcctccctttaacttattttcagtttactttgctcttgttttattgcttcttaagaagagagttagatctcttcattccacgttagttttagttatagtcaacacattttgctttcgttttcattccattcaaaatatcatctagttttccttgtgatttttcttttcatggacacttgagttatttaaaagtgtattttttttaatttctactacatagagatattataggtatgttattgttgctgatttctaattcatttatagtatagttggagaacatacattcttagtgaatttccatgtacacttgaaaagaatgtgtattctgtagatgttggttcagggtattgaagctcaaggtta

SEQ ID NO: 113626 - DNA, 552 bp, Homo sapiens
  misc_feature (1)...(552): n = a,t,c or g
gcattggcgtttcttcgatctcaaaaaatatacaagaaaagtatccttttgccttgtctgggttttgagtgtaggtatctctgatttaaaagtgggcaacggaagtgtgcagttggaagcaaaaaatacgaaatcctgctgttcgaaattctgctcactagctgttaatctcctttccttttcttgtatcaacttcttgtcaggaagtatcattgcagacattcatgtctccttttccagggagannnnnnnnnnnnnnnnnnnnnnnnnnnnnnnnnnnnnnnnnnnnnnnnnnnnnnnnnnnnnncagctagcccaggcccccgcaatcgcctcgtcgccccagctccgggctccgcgtcccggacgctcccgggtctgagaagaggaaaggagatcctccacctccccttctagagccaccgccgccgtcgccgccgcgctcctcccccagctctctcagagccggacgccgccccgcccccaccgccgcctccccacttctctcctgggccggactgcaggatgctgccggagatccagcagatcacc

SEQ ID NO: 113627 - DNA, 386 bp, Homo sapiens
  misc_feature (1)...(386): n = a,t,c or g
gatatttccgtttgggagtttgtgcactttttttaaattaaagaaagtttcccgcttttgtggccacgccttttatttccaccgttttggagggttaaattaaagggtcccctttgttccagagtttcaggcccgccttggccactcaggggggcctttttttttccaaaaaattttaaaatttgctggggctggtggggggcccccgttgttcccacccccttggggggttagccgggggggttcccttaggcccaaagggccagggttccgttagcccttgttggccccctgcccttccgccttggagacagggttagcctccctttccnnnnnnnnnnngataaagaaaaggttaatttgaccccaatagttttaaccttaag

SEQ ID NO: 113628 - DNA, 686 bp, Homo sapiens
tgggaggtcagtctgaaagcccaggttattagaagctgttaacactcgaaccttagtaataactgcagtaaggaaaaagatagtaaatggagcagaatccaaaataagatggaaagcctagtttttagaaactgggagagttgatttagaagccacaataaggttagaacagtcaccactgtagggttgcagagaaaagtcagaacaattttgttgaagattcatcatgagttccaaaagatgtggggaaagagttttagaatgtacaaaggtaaatgtgaatttattcccatgatgactcatggatactaaaggcctggggctttctggagtgctcagagtatgggcagaggaaaggccaggaatccatcatttctgagcactgggggaaagaaaatcccaaaatttagtatctttatcttggtgattaaaagactcaagcctgtaatcccagcactctttgggaggccaaggagggaggatagcttgaggtcaggaattcaagaccagccttggaaacatagcaacacatcgctactaaaaatcagacattaatgagacgtggggggcttgcctatagtcccagttactcaggagtctgaggtgggaagatcacttgagcctgggagattgaggccacagtgagctgtcatcatgccatggcactttagtctgggcaacaaagc

SEQ ID NO: 113629 - DNA, 391 bp, Homo sapiens
tggggttggggtgcaggtgggagtttgttaacacaagagcttgttattctcggagcttcaggccctggtttggaaatgttaactggccaaccagccacgggagttggaattccctaactattgtcatagagagtgcacagggatttgactgattgaacaatctgcatttgaagatgacctggacctgcctgcatcccgcatggcagaggtggacatttggaaggtgcgtttgctcatgtttcctcttctctccccagaacctgctaaggctgcctcagacctgactgcctggttcagcctcttcgctgacctcgacccactctcaaatcctgatgctggtgggaaaacccgataagaacacgaattgctcaatgcatgaatctgtaccctt

SEQ ID NO: 113630 - DNA, 481 bp, Homo sapiens
gaaatatttaataatgtgtatctgtgtatttatataaggctcgtaatatcctatagcccttgaaagccaatatggctcacttactttgccatttttaagttgtctttttattaatgatttgtagaaaaactatatgtcctggatagaagtcacttgtcaggtatgcatatagtacaaataatttttttctgtctctggctttttatttttttgatatttatttacttatttagagacttcgctctgttgccaggctggagagcagtggcgccatctcggctcactgcaagctctgcctcccatgttgaagcgattctcctgcctcagcctcccgagtagctgggactacaggcatctgccaccatgcccagctaaagatttttggttttggttttgcattttttgtattattagtagagacagggtttctccatgttggccaagatggtctcgatctcctgacttcatgatcccgccacct

SEQ ID NO: 113631 - DNA, 467 bp, Homo sapiens
  misc_feature (1)...(467): n = a,t,c or g
gggaattnnnnnnnnnnnnnnnnnnnnnnnnnnnnnnnnnnnnnnnnnnnnnnnnnnnnnnnnnnnnnnnnnnnnnnnnnnnnnnnnnnnnnnnnnnnnnnnnnnnnnnnnnnnnnnnnnnnnnnnnnnnnnnnnnnnnnnnnnnnnnnnnntgatattattgcccagggagggcaccccggggacactttcagcaggggccccaggggtaaaccattctaattggggtggtgggtggaaggcgtgcttctttcaaaaaagctgatgttaaagggtaagtcaccacctgcacctgggcattattggatggggccctgaaaaactggccatttcctccagggcctttgaggaatcccgaatgttctctaacaaaaggttttcattcaaaaaagaaacctattacaacaaagctgttaccttgtatcctgctgaataaaaacaagttacattggagggaatgtgtaaga

SEQ ID NO: 113632 - DNA, 679 bp, Homo sapiens
  misc_feature (1)...(679): n = a,t,c or g
cggacgcgtgggtgactatggtgggcagcatggattcattgggcttcttctgctaaacagccacattgaaatggtttaaaagcaagtcagatcaggtgatttgtaaaattgtatttatctgtacatgtatgggcttttaattcccaccaagaaagagagaaattatctttttagttaaaaccaaatttcacttttcaaaatatcttccaacttatttattggttgtcactcaattgcctatatatatatatnnnnnnnnnnnnnnnnnnnnnnnnnnnnnnnnnnnnnnnnnnnnnnnnnnnnnnnnnnnnnnnnnnnntatcacacataggtttctaacttttagatagaagaggagcaacatctatgccaaatactgtgcattctacaatggtgctaatctcagacctaaatgatactccatttaatttaaaaaagagttttaaataattatctatgtgcctgtatttcccttttgagtgctgcacaacatgttaacatattagtgtaaaagcagatgaaacaaccacgtgttctaaagtctagggattgcgctataatccctatttagttcaaaattaaccagaattcttccatgtgaaatggaccaaactcatattattgttatgtaaatacagagttttaatgcagtaagacatcccacaggggaaaagaatgg

SEQ ID NO: 113633 - DNA, 462 bp, Homo sapiens
  misc_feature (1)...(462): n = a,t,c or g
tcgaattcctgtggaaaacctttcacttgtggcttactattcatatggctgtatagctcattgtgcttttgaatacgttggtggtgttgtcatgaggtgacattgtgattgcaaaaagcccaagtgatccaaaatcaaatatttgtaaaagagtaattggtttggaaggagacaaaatcctcaccactagtccatcagatttctttaaaagccatagttatgtatttggaaactaagcagttcctattaagatgctgttgcnnnnnnnnnnnnnnnnnnnnnnnnnnnnnnnnnnnnnnnnnnnnnnnnnnnnnnnnnnnnnnnnnnnnnnnnnnnnnnnnnnnnnnnnnnnnnnnnnnnnnnnnnnnnnnnnnnnnnnnnnnnnnnnnnnnnnnnnnnnnnnnnnnnnnnnnnnnnnnnnnnnnnnnnnnnnnnnnnnnnnnnnnnnnnnnnnnnnnnnnn

SEQ ID NO: 113634 - DNA, 485 bp, Homo sapiens
  misc_feature (1)...(485): n = a,t,c or g
ccgcgtggtggaattccggtgagacagggatagagacagtgagagagagaatggggcacgatggggaggcagaaacagagtcagagagagactgagagaagaaagatgagcaaaaacaagacaaagaagggcagagatcaagagatcctgagagacagagttgatgagaatgaatgtgaaagagagggagagagagaatgaatcaggctttgggcttgatctctgctcttctgctcctggatgtcnnnnnnnnnnnnnnnnnnnnnnggaaaggggttttctttttttaacccnnnnnnnnnnnnnnnnnncctttttggtttaatggaaccctcattttcgggggtaaagggattttccggccccaaccctcccgagtgccgggactggaatttttgcccccccccttggggtaaaannnnnnnnnnnnnnnnnnnnaaaaaaaaannnnnnnnnnnccccccgggggannnnnnnnnnnncac

SEQ ID NO: 113635 - DNA, 517 bp, Homo sapiens
catgacacacgtagttgtcctaaacccacagcacaaaaaagagtgaagtttcatgtaaaagatggactttaggtaataataatattggcttcttcaattttcatcgtgttcacatgtaatatattcttgcatcaattataggatacactacacacagtcaatatggtttcccttggtttaaaacattttttttttttttgaaacagggccttgctatgttgcctaggctggcctccaactcctgagtccaagctatcctcccatctcagcctctctaagtggtagaattacaggtatgaggcacagcacctggccagtcaagatgtttaaaatagggggaactatgagcttggaagaaaaatgagggaactctggattatctgctcaatgttttgggtaaacaaccactgttctaaataataaaatcaactaaataagaaagtgaattaactatcattccatgtaaggttcataactgagtttaaataaaatccaatataaaatatcacatattggc

SEQ ID NO: 113636 - DNA, 444 bp, Homo sapiens
  misc_feature (1)...(444): n = a,t,c or g
nnnnnnnnnnnnnnnnnnnnnnnnnnnnnnnnnnnnnnnnnnnnnnnnnnnnnnnnnnnnnnnnnnnnnnnnnnnnnnnnnnnnnnnnnnnnnnnnnnnnnnnnnnnnnnnnnnnnnnnnnnnnnnnnnnnnnnnnnnnnnnnnnnnnnnnnnnnnnnnnaattcccccttttcctgcattctccagctcctcctcctcagtactcagtcccaccactttccccactacccagcaccagcatctagactgttctggtctccctgcaccccccacagccaccagagggagcacttttcaaagtannnnnnnnnnnnnnnnnnnnnnnnnnnnnnnnnnnnnnnnnnnnnnnnnnnnnnnnnnnnnntgcctctatcagctgtgagacaccaagatcaatccctcctcttcctcctcctctgcttgaattccaccacgactggact

SEQ ID NO: 113637 - DNA, 490 bp, Homo sapiens
gaagccctatttaaagctggaaatataggccaaaatatccaatggggccggctaccaaggaggttaagagctgccagttttaaggtaggcatggtgttggtcttttgtgccatgaaaagaggttggtactctcttagaaaccctaagcaaaaatataggtggacctggagtatccttttctagccaaggcggcccaggatatgtgaaaattacctatttctttgattcttaagtctactcctaacccactagttaactgattttcagttgtaaggaactaagatgtaaggaatgaagttggacaccatttctctctgcacttaagggtatggaattgattttattcgagaatgaactgttgctgggtgtggtggcttatgcctgtaatcccaatactttgggaggctgaggtgggaggactgcttgaggccagcagttaaagaccagcctgggcaatacagcaagaccccatctgtggaaaacaaacaaa

SEQ ID NO: 113638 - DNA, 983 bp, Homo sapiens
  misc_feature (1)...(983): n = a,t,c or g
tttcgtgtccagtgggcccacagataacgaccatcagagattaaagaaggaaagtcagcgagcttgaacacaggcgtcccgtgtggaaatgtccaaggagaccgccagaagtgcgcaagccggagtcggctagagtttccttctcaccgagagggggagcccggcgttcccggccgggagcgacccggagtccccagccccgcgtcccagctgccgccagcgccagttttggattcggcggattaggaagaggagggaggggggagagagcgcgaagagggaggggaccgaagctggagggtcccgagtccagcgccgtgttggcgtagagaaactttccctctcggcctcggagacggcgccccggccgtgccggagtggagatcgccaggctcggaggaaccggcagctctccacgcccctgcccgaagcctgacccgactgcctctctcagtgagttatttatgattccatctgatatacctaggaggagaaactgatagaagaattctgatggcaactgtatgatagaagctatataaagccaagtgtccattttctttcaactatatttgagcataccnnnnnnnnnnnnnnnnnnnnnnnnnnnnnnnnnnnnnnnnnnnnnnnnnnnnnnnnnnnnnnnnnnnnnnnnnnnnnnnnnnnnnnnnnnnnnnnnnnnnttaagtcgtggaactgaacatttatttggctgatcctcatcatgaaccttgcttttagcaggaagaaagacaaaacatggatgcatacacctgaagctttatcaaaacatttcattccctataatgcaaagacttgcctggccccaccttttgccttctgccatgattacaaaacatggatgcatacacctgaagctttatcaaaacatttcattccctataatgcaaagtttcttggcagtacagaagtggaacatccaaaaggaacagaagttgtgagagatgctgtaaggaaactaa

SEQ ID NO: 113639 - DNA, 1150 bp, Homo sapiens
caggagagcgtctaggaaatcgtctagaatgggacactggcgccttcttactgctgatacgacaggaatgtgcgctatctttaggaaatgacaccgaactggcagccggcgcctttggagccggccctcgctttgctgaagacgagcagctcccaccaaagtcttgcctccccttaccccgaaagccccgctcagttcaatatttcaagtgaaaatctgcctgttcgaaaagaaaatattcacaaatgagcagtgtattagaagacaactgaattgcttctaagaatgggtctcactctgccatcacccaggctggagtgtggtggcaccatcatggctcactgcagccttgaactcctgagctcaagtcatcctcccacctctgccttccgagtagctggaactgcaggtgtgagccaccatgcctggctggatttgtctttttaaattttttatagagaccgagtctcaactatattggtccagggctggaaaagaacttctttccctccaagtgataaccttttcccagacaagtcagcttaaaaactgacccaaaggccctgaagtacacagttttcttggagaaagaaaaaaataagtgaaaaggacttgctgacttgctaattcattttggggcctgtgggtaacatcagaatggcaaagcacttggggctttttttctaatttgaatttttttaatcttatgagaaatgacttttatatgccaagattcattccatagattagtttttatgaccaagttaatgaacgcttttgaatatggggacctagaatagaaatgctaacctacctgcaaggagagctctgtgattggcatccccatcatgctgtaactgacacaaaataaacttagggtaattgccgcatagtgtaacttttaatgtgtgagcatactgtaacatttgacaagctttttgatttagatcagcaatgtgtaacccattcattgttgtcactctcaacaaggccttatggtcaaacatcatcactctccctaaaaagatagtttactgaaatatactgagattttgaaactggagtcaagaggtagcaccctgttttatgttgatccatttaatggtccttgacagccaataaaaagaccctggaagaaaaaaaaaaaaaa

SEQ ID NO: 113640 - DNA, 733 bp, Homo sapiens
  misc_feature (1)...(733): n = a,t,c or g
cgtttcactttttaaaagcttaagctttatggaatgagggagcacggtggactctgacaggaaccttttcaaatcaatgctgaggctgtatttcttagccgtccacaaactagtccataggtaaagagcatacaaaacagacgccgaggtgatcagtgattccaaaggctgacgctcagcagcgccacctccatgccagccaactaggctacgggatggaggggcggtctgtgaaacaccagccatcccgtgaaagctcagtttgccactgtcatgtaacagggtgcggtggtggcaacagcagaggctcacacttgtcacccgtcaagccctccnagacagctccccgtggggcaacgaacggctggggacagagtgtcctgaggttttgttacaaggctagactttaaaataccttttcaaagtttcattcccgccttcatgtcgcaggactgctgtgttttgtggaaaggcgcgtttgttttccacaagacaagctccgtgtagtcgccagcgggtgcctggcccaggagctgccctgtggagccagcgttgtccccgagctgctcgcctgtggccgtggctccttttctgaggctcctgactccattcttgcagattctggtggatcaggagcttacattctaaatgctacatagaggtgttgaagaaaatttcataggttctgtaatagtggatgggattaaaagaaaaaatgttaaattataaaaaa

SEQ ID NO: 113641 - DNA, 424 bp, Homo sapiens
cctgtccgtagaagcccgtgacatttcaaggttcgcgcgctcgtttggtattggttctcaaggagacgtggccacgggaggcccatggcgataattggctggcagctcctgctgctcaagatcccagaggaggcggcggagcctacggagttcacggtgcaaggcatcgtccgtcactggaccagtgaggcgcaggcgcgagctccccagggggaggatgaggggcgggtgcgaggagaagctttcgaagatgtcccctgtgtccacagcctcccgctctgcagggggagggtcccacgcggctggcggcccgcggccagggcccagctgatagtggctgagcagatggtgcagctgggcgggggtcaaggtggggtggtcggttcttaggctgctccatgaagccttgagcagggaagtgcgg

SEQ ID NO: 113642 - DNA, 441 bp, Homo sapiens
  misc_feature (1)...(441): n = a,t,c or g
ttttgcaaaacagcaagagttcaagggtataatgtgggctgggcatgaaaagcaaaattttaaaaaatggtttcagaagcatgactaattttgtcttttatgtgtgtctgtctgtgtgtgggtctgcctgctttgcagggaagacttcctgtcccaaaggaagtgaaccgcaagaagaacgatgagacaaacgctgcctccctgactccactgggcagcagtgaaccccgctccccacaatgaaataaagttattttctcattcccccnnnnnanannnnnnnnnnnnnnnnnnnnnnnnnggggggggcccctttaaaaaaaacccattttaaacccccnnnnnnnnnnnnaaaannnnnnnnnnnaggggccccaaaaattaattttggggccggggtttaaaaaannnnnnnnnnnnaaaaccctggggttccccaat

SEQ ID NO: 113643 - DNA, 410 bp, Homo sapiens
  misc_feature (1)...(410): n = a,t,c or g
ccccccccttgggggcctccccccaggggggcccccgcccccccaaagggggaaaaaaaaccttcccgggccggggggggccccctttttaagagccggggggcatgaggcccccccccttttgcccctttttaaaaaaaaagttaagggggttccccctttgggggcccaggggttaaaatttggcccggggggggtttnnnnnnnnnnnnnnnntttaaagggggggcccaaaaaagtttttttccccccccaaaaaaaaactttaggggggggaaaaaaaggcccccccccgatgcccccaaaagggggccccccnnnnnnnnnnnnnnnnnnnnngagacgcaannnnnnnnnnnnnnnnnnnnnnnnnnnnnnnnnnnnnnnnnnnnnnnnnnnnnnnnnnnnnn

SEQ ID NO: 113644 - DNA, 940 bp, Homo sapiens
agagttagtaggggcctcaaaggaataaagataataaagggaggaagtgagggttgagaggtaagcctcaagcctagaaagttacttacaggatgtagtttaagggaaaccaatgagttctccttgtcctgaaatatctccctagctaacttattacagtgctaggaatcatcaccattatgattttatggttaaaggttaaaactgtaagatatatgtattactgctgggcacaggggctcacacctgtaattccagcactttgtggggcaaaggcgggagcccaggagttcaagaccagcctgggcaacgtagcaagactctgtctctacagaaaatacaaacattagccaggtatagcggcatgcacctgtagtcccagctacttgagaggctgaggtgggaggattgcttgagcccaggaggttgaagctacaggggaccaaggtcacaccactgcactccagcgtgggcaacagagcgagatcctgtctctttaaaaaatacatgtatatatatatgcattacctgattacctgggaagggcagtaaaaccaaggagcccatcaacataggacaactaattcatttatcggattagtcatcacctgtggtgacatgacaggaaggcaccagatctgataaaaagagacaagggcaggtttagaaagcataatagggttccaggtagtgcttgataaaggcaatatttggaagcaggtcaagtttacctttggtgtccttccacccactgctgccctcaacccacactgaggctctgttgccacctttgtttttccgggtctcagaaacacatcccaagctgtggacctttcctactttctaaacctgcccttgtctctttttatcagatctggtgccttcctgtcatgtcaccacaggtgatgactaatccgacaaatgaattagttgtcctaaa

SEQ ID NO: 113645 - DNA, 1182 bp, Homo sapiens
aagaatttatacttaagcataggagatggttctggaaattctaagaaattctgctctcagtaagagtagaggtttggagctttacctcttggcagtatcccttggaagggagctctgagattaaatgtaatcaaacacttattgagagctttctatggaccaggcactacactagacgctgggaattacagaggcaattacctgtcctatactcaaggtgttaatgatctagtgtcatttttctttaaaaaagaaagcacctgcatttgtcatcttgagcaaatatagtaactctaacctcaaggttcaagtgatttactcaaggtttaaatcatagttgttttggagaaagtaagtgtcagatgcactgtggctgtcagggtcatagtaggcatttaatcaacatggttggtgttcattaaatgtggattgaagataaaatgactgatcttaagtttcatgaggaataggtttgcttcattgaaactggtttttatcttcccaaatagttttcaatcattcctttaaagtactaggttgattaatattgcaaagttgtaatgtaaaatgtgaccttacctctgtctaacctgtattgttcacatgaatgggagtttgactttgggaataaacattgaaaatttgcagggaggacccacccaaatgtatcatgaaatgtgattccaggtatgaaaaaccagtgatactaatttaaaggatcattttgatttaacatgtggtttcaaatttcactttaacaagaactattttattttagaaacatttatccactcagatgcattggttctttcattaacagagttttggaactggcttttcaatctgggaaagccccagtcacacttctggagcaaggcccataatgcagatggttcaaactttttttttgtttggatacggagtctcactctgttgcctaggctggagtgcagtggtgccatctcagctcactgcaacttctgcctcctgggttcaagcgattctcctgcctcagcctcccgaatagctgggactacaggtgcatgccaccacacccggctaattttttgtagtttagtagagacggggtttcaccgtgttgcctaggctggtctcgaactcctgagctcaggcaattcacctgcctcggcctcccaaagtgctaggattacaggcgtgtgc

SEQ ID NO: 113646 - DNA, 744 bp, Homo sapiens
actcttatcacagtgcccttcaccagtatgggttgaaagaatgaatggtacaggtaaccattgctgagaggcacaagaaaagaagggaaagctcagttgaggctgagcttaaccagggatggctgcttcttgttgaacttgtacgaccttttagtggtctgaggtaggtaagacttcttagtccagccacaatctgcaagttacttttgccagatatccttggactaggttgggtaaatgagaatcacagagaaaggttggtcaccagcagaacacagttaatccctgcctccacctgattgtgccgttcaaaaattattttctctacctgggatattcccccctgatctttgtgtggttagcaccttcttcactcatctcacatattacttcctcagagcagtttcctttcccagctactccatctgaaatcacacccctccatagcacagcacccagttgtatatatattttttaattttaaaattattgtttaatacatagagacagagttgcactctgttgcccaggctggaatgcagtggtgcgataatagctcactgcagccttgagctcctaggctcgaacagtcctcccatctcagcctccccagtagctgggactataggtgcatactaccatgcctggctagtaccccgttttcaatgagcttctaaaactggtatttgtatattatttatcttatccccttggattgtaagcaccatgagtgaggactttgtc

SEQ ID NO: 113647 - DNA, 538 bp, Homo sapiens
atggggtggaaaaaaaagatctaacatgttaactttaggaactataaaatgccttcaggtgtatgtgatctgaaattacaagtggtgacttctcagaaagcatatgaacacggtgaatgttgtaatgttctgaagataaagctgatacttagtagtgatatgttctaaagacaagaacatgagggccccaaagcctgtgtcatcaactctgctttgaggtcactaatttttaaatacagagcataaagtagaactcccaacccttgggcaagaagaaaatccattgcaaatagccaacacatttctattaaacctcacattttcaattttgtatttggttgagagtactttttaaaaaaaaggcttaaatcaatattatctaacacacacaaaaaatctcattaattctcctcactctgggccagatgctgtggctcacacctataatctcagcactttgggaggctgaggcgaaatgatcgcttgagcccaggagtctgagaccagcccgggcaacatggcataaaccccgtctcta

SEQ ID NO: 113648 - DNA, 1332 bp, Homo sapiens
ttttttttttaatgatctaataagctttatttttattattgttaaaaattctcattttgaggaacacaaccacaaagtaaagaaagttttcattgatttaagtaaaaaaccaatatttaataacaattttaaaaacatggctctaggccatccacatgctttaactcatgctcaggctcctgatattgatgggttgtctttgtatttttctgatgcccctttatgtgaattcacccgttttggaagaaaacacaattaaggttatctatcacaacaaccactatctccaatgtggtattcattccttttattcattttaagtctcatctaccccgatgagataacttttttgaagacaggaattgtatgctgtttaacagtgctttgattcttccacagttcagtcatccttgctaccttgcagacgactggttctaggatatcgcctccacaccataccagaatctgtggatgctcaatcccttacgtataatggtgcagtgtttgcatataaccaacacacatcccccccatatactttatttatttacttacttaggagacagggatcaccctctgccactcaggctgggagagcaggtgtcaacaatcacaggctcacaggcaggccgcaacctcctgggggctccaggtggatctggcccacctcaggcctcttgaggtaggctggggactacaggggtggcataccaccacactaggctaatttttttatttttatttttactaaagacaaggtctcactatgctgcccaggttggcctccccaagtgttgggattacaagtgtgagtcaccgtgcctggtcccatgtacttgaagtcatcactaacaaaatgtatagatattgtataatggcaacagttgttatactgtactttctatttgtatttttattgttttttttcttcaaatattcagccttatctagttgaatctgaagatgtggacctgctgatgaagagggctgactgtatctaacttagggtcttgcatgtagctggtacttaacgcattttattgactgttttagctaacattccaatggacaattccctaataaaaacctcttaaaagtatgaaaaaaaggaaacctgagtccttcctctgaagtggcaggaaaactagcctgggcaacatagcaagaccttgtctctacaaacacattttttaaattagctgcctgcctgtagtcccagccactcaggaagctgaggcaggaggatcccctaagcccaggagtttgatgctacagtgagctaggtcacaccattgctctccagcctgggtgacaacaaggccctgagaaggg

SEQ ID NO: 113649 - DNA, 471 bp, Homo sapiens
cagatccatgtggttgtttatgtgttctgatccccctctccccctggcaaccactccagtttagctgtcttcaacctctcccaaagagacagacctccctgtcactgagcggagatagccctgatctgagcctcctatggctgttccttgtcagtttggttcttgctctgaaaaacgaatattatcatgccagtctcccaggatgctgaggtgttgtttcgagattctacagaggggtaggtgggtgggccctggccaagctgagagagacactggggacctgtcaagaatatcacatagttatcagccttgtgaagaggctgtgtcagaaatatacatggtggggtgggtgcaggctgcacgcctgtaatcccagcactttgggagactgaggccggcagatcacctgaggtcaggagttcgagaccggcctagctaacatggtgacgccctgtctctactaaaatacaa

SEQ ID NO: 113650 - DNA, 742 bp, Homo sapiens
gggcactggaaatcaggctgtcctaggactgccctagatcatcccactgcacttgtcactgggacattggggtggataatgaagctattggcagctttaagcatcatgtacaaaagtgctgcatgcagtgcctacaaatcatgggctatcaataaataagcctcctcatatttgccttaaaaatccatttgtcttgtacatagagaagcaaatgaactttctgctgccttctatttctccaggaattaaatatccatgttacaaataattatgttttcacagaacatcttcaaggaaggcagaaagaaccataccataggattctacctgctattttgctgaaggattagaaatagaattctaagtcataagccaataggatgtaacttgcaatcctagaacatcacaacttagaaggcacatcagacatagtctctctggctttagtttcctcatctctaaagtgacagggttgacgcaggtatctctgaggtcatttgtagctctgtttttctgtggttaccttctgttgttaatacaactttcctccagatttatatacatattacttgttacacatatgtaataaagtgcgtgataaagaatgtataaaatgaaatgtggccgggtgcagtggctcatgcctgtaatcccagcactttgcgaggccaaggtgggaggatcgcgtgaactcaggagttcaagacaagcctgggcaacatagcaagactttgtttatacc

SEQ ID NO: 113651 - DNA, 549 bp, Homo sapiens
ttttttttttttaatactctatttgactttattgtgtccaaggattctactgagtacaatcccagctgattttagagtggagacagaattgtcccctcaactgcaacccccccacctccactccagcccacttcaaatttgcaagtgacatgaaagcaaaggacttccataatcaacacagggtagatgaccatagcccttctagtttggattacttcccgatgctttccttccaacacacacacacacagacacacacacacacacacacacacacacaccccgtatgcttagttagctgggcgcgcacacacatacacaccttgtatgcttaggcaggctgggcacaagggcctcctacttttatggttccctggccaactgggtttcagaattagccaactggaatgctgttgcctgggtctaatcctgctccagcactacaatcctgggacattaaagttcaaaggagtcaaacttcatagggcaggtggggtgaggatggggagtggacagtgatacatacccttaacaggagctcaatttttc

SEQ ID NO: 113652 - DNA, 404 bp, Homo sapiens
  misc_feature (1)...(404): n = a,t,c or g
gagggtatcaataagctcctagtccagacgccatgggtcatttcacagaggatgacaaggctactatcacaagcctgtggggcaaggtgaatgcggaatatgctggaggagaaaccctgggaaggctcctggttgtctacccatggacccagaggttctttgacagctttggcaacctggcctctgcctctgccatcatgtgcaaccccaaagacaaggcacatggtaagaaggtgctgacttccttgtgagatgccataaagcacctggatgatttcaagggcacctttgcccagctgagtgaactgcactgtgacaagctgcatgtggatcctgagaacttcaagctactgggaaatgtgctggagaccgctttgtgaatccatttctgcaaagaattcacn

SEQ ID NO: 113653 - DNA, 884 bp, Homo sapiens
ggaatctcccggtcgacccacgcgtccgagaaaagggagagtgctccgccgggagcggggagcgagtagggtggcgtctccagggatttaacctcctaccctcagttccatgacgccaccccctccctccaaagactgggacagcgcctccatttttgttttggggaggaagggcaggggcttgcggatagaagggggtcaaaggaacggtgattatcacctgtgaggggaaagggggtgctgtcctccctccttcccttttcctcagcctgcaccccctgcaatcccccacctttcggggtctccccctccttgttgctaaggcccggaccgtcatcccagcaacagcctcagtcatgtgaccggcaatggcggcgctgacgagaggctttcttgggggccgcagagctggggaagaaaggaggaagtcctgggtcagctgagtggaaatagaagggatttctgctgccatcatcttccatgggctttccagggtcacaagacctacaagtaggggaagcaggggaaagaaagaattgagccttgcattgccaattcttaaagctctttcaaggatcaaatgttcgtttcgtccttgttccaggaatggcagcctgttggaggcaccttgcaagaacaaagtgacttttttccaagcccgtgtggggacttcctggagcaaaggagaaccccagcccgggtgggcccgggtttcgggagggagcaccgtgtgtccatcctcatagatgggcgagactttttgacatctatgttcttccagcttttccccacaaggttccttcccccggccccttccaaatggggctctacctgagcccggaaagctcttcaaaggggggttgctaaaagaggcagagaaagag

SEQ ID NO: 113654 - DNA, 442 bp, Homo sapiens
  misc_feature (1)...(442): n = a,t,c or g
ggaaatttgtaaaaaataagttttgaagattacttaggtaaataagaggcagctgggctaaaagaagttaaatttaaaggataatttaaaaacaaaaacaaaaactattctttattccacccagtaggaagcatttaattttcctcaactctgtgtcttaaaaaagtttgcttagaagtgtttttggccaggcatggtagctgacacctctaatctcagcactttggcaggctgaggcgggaggatcgcttgaacccaggagttcaacgaccagcctgggcaaatatagcaagatgttgtctctacaaaatttaaaaattagctgaagtgtgctggctgggggcatgcctgtaancccacctnctccaggagactgaggtggggagaatcacttggacctgcggaggtggagtctgcagtnagcccaagatcgtgncaactg

SEQ ID NO: 113655 - DNA, 673 bp, Homo sapiens
cgcacacccagctattttttaaaaaaactttgtagaattttgaatgagccacagtgcctggctgaggatggtttccgagttaaaaagttttccacgctgttaacaatttaatagtttccacaagaatgtttaaacatccagataagtttgatcataagactgtttccctagtatttattttataatgcctcctagaatttctccaaatatattagagggtggcatagcagtctaaaaaaatattaatttttttatttttttaatgccatagaacatttttgctcaaatcaaataatgatgggtattgcaattctgaaaatgtttgggagttactgggcctaaaggtaagagggaggcaaggattaggttggataagttggaatggaataggacaggggcagaacccagtatacctttggtgaactagtaagtttatttgcgtgggacattttttttctctttgcagtactggcatagctgggtgcagtggctcatgcctataatcccagcactttgggaggccgaggcgggcagatcacttgagcccaggagttagagaccagcctgggcaacatgatgaaaccccatctctacaaaaagtagaaaaattagccaggtgtggtggtgcacacctgttagtctaagctacttgggaggctgagataggaggatt

SEQ ID NO: 113656 - DNA, 1305 bp, Homo sapiens
gtttctgagacagttctttgccttcacttccctgctagctgggaaagaagagtggagcagagaacttctgcctggcccactgagaacagcccaaaattcacaaacccttcaagtggggcttttgtttttggattttctccggacttcatcagtaaaacctgtagaagtgtcgctttccagccttttgtttctggatcctcaaaactcagaacgtggccgggcgtggtggctcacgcctgtaatcccagcactttgggaggctgaggcaggcagatcacctgaggctaggagttgctgaccagcctggccaacatggcaaaaccccggctggtactaaaaatacaaaaagccgggcgtggtgggcgcctgtaatcccagctgctcaggaggctgaggcaggagaatcgcttgaacccgggaggcagagattgcagtaagctgagatcgtgccactgcactccagcctgggtgacagagcgagaggctgggactaccacacctggctaattttcatatttttagtagagacggggtttcgccatgttggccagggtggtctcaaactcctgacctcaggtgatctgcctgccttggcctcccaaagtgcggagattacaggcatgagccaccacgcccagctaggtttggtagtctataattttaccggctatcaacaattctctcatatctatttgttttaattgaaagcatttctgctcaatctctgcagacagaaaagaaatagtacactattctttatataaattgttaataactgacaacaacaaattgagtcttcccttgcctttctttagacaaaacaactctaattcctttagcttttcccttaggaggtaaaagacaacttttctggtgagtttttatttcctactccataatttgtcttttctatttttactcaccaagttctttttctttgttttttaaaggtgtctacttccctttattcttaatttactccaagttctaaagcaccaatctcaatgtttctgtttgttaattttttgtaactcccaactgtcctaagaggattcagaccttattctctactcctagaattctttgttaaccatttccacctgcccaagttcacttctacatgccagagaacctggtattcttttacagaattgcacagggattctaagaccaaggaatcctccaaagcatgtatcgttatttgatacatgttatttattccagattccaaaagtattccactaacctcccctctccccacaaaataaattcattaaaatatagctatctaccaagagtatcaca

SEQ ID NO: 113657 - DNA, 859 bp, Homo sapiens
aggttttgattcaaacctctaccatcctcaaaaatatatgactaaaatttatgaataaattatgaataattataaataattatgaataaaatttagctgaaatcagaatgacatgggttttaaaaaatgttttcaagtcgccaggtgcggtgcctcatgcctgtaatcccagcacttttggaggccgaggcaggtggatcacctgaggtcaggagttcgagactagcctggccaacatggtgaaacactgtctctattaaaaatacagggggttggccaggcgtggtgcacacgcctgtaacaatctgagctactagggagactgagacaggagaattgcttgaaccctggaggcagaggttgcattgagccgagatcacatcactgcactccagcctgggcagtgaagcgacattccgtctcaaaaagaaaaaaaagttaaaaaatgtttcaaatctcccatatactacatcagtggtcttcaaactcttctgttcctagacccaaataattgttttttaaattatgtaactccctgcacatctttaaatagacatctataatttttcatcataaatttgttccttatttcttgttaacagcagatagaaacagtattttataagatgaaatattgtgaggattgactgcaattggagtatttcatggtatggcttgataaaataagttttaactaccttatccataatacactctgatcctcaaataagtaaaattttaatccatgtgttttgaaaacccatggattaaacacacagattaggaaggagtacctatggaatgtgaagacctggaaacggattgcctaagagttatccaagcaaaaaagaaaaaaaaa

SEQ ID NO: 113658 - DNA, 586 bp, Homo sapiens
tttgagttggagtctggctcttgtcacccaggctggagtgcaatggcgcaatctcagctgactgcaacctccgcctcccgagttcaagcgattctcccgcctcaacctcccgagtagctgaggcagaagaatcgccttgaaccctgggaggtgggggttgaggtgagctgagattgtaccattgcacttcagccctgggcaacaagagcggaactccatctctaaagaaataaatatgtttattgtgaaatataattcatataatgtagaaagatatgaattgaaaagtacgtcttgcttctaagactctgcatttagaacagagaaaaatatttaatggccaaaaacttcgcattggtctatgacataaaattacaaattcaaaaagctctgcaaatcgtgaacagggttaatatgaagaaaaaccacatctactagtcaaattgctgaaaaccgaagatagaaaagaaatctaaaaagcagccagagaaatagcacattaaatacaagaaggagatcagccactggaatgacttttttctcaccagctgcaaagaaggtccaatatgagtataaaaaagaacat

SEQ ID NO: 113659 - DNA, 438 bp, Homo sapiens
tctccttccaactcaggttgctggctttggaaacactaaaaaagtattctggaaaaagtgtgatcctcagcctggatctcatcttcctagctgcaacattagcttccctttgatttcaccacagcttcagaatgactgcctaatggatttcaggctgctcctgtgacgccttacagaggatgctgttcactcctgaattacggtttccttgtttgaaaacacgaaatatgcgagttatagactggggataaatgtggagagggtcctgaagtcaaggagaagattttaccaaaactagagcacttcaatggagaagtaggcggagtgtggtggtcatgcctgtaatcctagcactttgggaggtcgaggctggtggattacttgaggtcaggagttcaagaccagcctggccaacatggtaaaaccccatctctacta

SEQ ID NO: 113660 - DNA, 1261 bp, Homo sapiens
tttaataacttcctaaattttccaactacagaaaaacaagcaaagagtaacttatctcagttatacaagctcaaaagtatattggccataaaagaatcatgaataattcttaatctttgtgtatacacacacctatataaatatacgcatagtaaatttttttttctggctgttaggatttataactttctgaaggtttgataatattataactaaatattattagaacagttaagaaaaaaattatttttcatagtcattgaattttgctaaagttacacttatgggtgattaaactacaaagttttctcttgttaaatatttgcttaagacagaatgttcaagataagctaaactctttacaagaatcatatcaagaaattctaccatttgtgaaataataaagaggagaggaaaaaaatagcgacaaaccagcagaataatttagggcaaagattccaggtattatataaaatgtgtgtaataccacattactggcatttcaagtgaggtgacttacactaaaatcttgttctttttaaactatcactggacataataatttatccaacaagaaaagcaaaagataaaaaatatgcattagtccttatagaatatggatcaacaagttttaaaaataaactttctagtgcttcctcttatgtgagaggtttatcctcgtcataaattctaggaacctatctatattgcttaagtgtgattttattcaaaatcatattagtctactataaataatacttttaatgtaaaaaacaatgcagactggcagtgggtaagaataagaatgttcaataaaactgtattttgaaagtcaagaaaagtataagctaaggctaacctaaaactgtctagacaaatgaaggggaatagagtctaaaaaatgcctttgcattttcactgtacatgaacatgtataacaaacactgtgtttgtatattatattgaaaaataaactcagatatttctaaattagtaaattaaaattgtatatacttcatttagagtgtgaaacttgtttaagtcctttaaacagaaaatgattgggccaaaatattctcatcctgtccatctagaaatgagaaacataataagtcaaatgagattaaaaattaactaaggccagtagggcaaggtggctcacacctgtaatcccagcactttgggagacagaggcaggcggatcacctgaggccaggagtttgggaccagcctgactgacatggtgaaaccctgtctctac

SEQ ID NO: 113661 - DNA, 762 bp, Homo sapiens
  misc_feature (1)...(762): n = a,t,c or g
ccccgatacccttaaaaaaggcccaaaaatattttggttagggtttggtttttaaaaggttaaagtccgggtttttgccgggtagggaaaaatttttgaaaaggggttcttttttttgggaggggccccaaaggttgggcggcaggggaatccccccgccaaaaggtttcccagcccaggttgggggccccccttccccccttttttggtcccgtggacccagggggggggcggcccatttccctttttaaaaaggcccccggggaagttccccccccggggtggaaaaaggaaaagggcctttttcctttttccnnnnnnnnnnggagggttgttgttctctagcttttcctgctagaaaatactgattccttatcaggaacttatcctctgctatctactattttgtataaaatatcaagggaacaaaaggctgtttgataagaacaaacgttttcaaattgttttacttacgtttatttaaaagaaagcatttttctcaatctattttattattacagtgaagatgaaacattgagcatagctagcaaatgcttctttaaagcttgatttagatattcaggttcctaacatttgtttttttggttttttttttgagatggagtcttgctctgttgcccaggctggagtaagactttgtctcaaaaaagagtaataaccggactatgattcttctaccaattatatgaatttaacagaataagtaggattttatttaatactatcaaacattattgtaag

SEQ ID NO: 113662 - DNA, 530 bp, Homo sapiens
  misc_feature (1)...(530): n = a,t,c or g
taataatgaagggttttctctcctgatattgtctgagaatctatcatagatgaggttagattgcctttggaaagatgcttctagttaattcctgtcctatataattagttgaattcatctgtgaaggatgtgaatttttctttgatctttttatttcatgagcagctttgtgagtacattctcaggtctaaagtcctcaccctcttctcctattcccccagggcccccagtgaaacacacacatacattaaacagtgcagtttgttatttcaggcctttttctttgcatttatgaaagtagcgncgcatgctgcctcacacctgtaattccagcactttgggaggccaaggtgcgtggattacttgagcccaggagctcgagaccagcctggccaacatgatgaaaccacgtctctgctaacactacaacaattcgccaggagtgcataccacgtgactttaaatccggatccccgggacgctgagaactcggcatcactagcaaccaaggcgctacagcttgacgtgag

SEQ ID NO: 113663 - DNA, 550 bp, Homo sapiens
agaatttctaggtttagcttttgtttaggtctatcatccattttaaaatctaaatttttcactaaaattatgtatgtgatgtaaaagtcgaggttcatttctcatatgaatatatacttattccatttgttgaaaagatgcttttcctctttgctttggtgcctttttgttttgttttcttttctttttagacagggtctcacccttttgcccagactggagtgcaatcacagctcagtgcagcctcaacctctccaggctcaggtgatcctcccatctcagtctcccaagcacgtgggaccacaggcacacaccaccacacacagctcattgtgcctttgtcaaaaatcaattgtccatatatgcatgggtccatttttgaactctattctgtccattggtccttaacatttcttataaaacatgtccattggcaataaattgtctcatcttttctctgagtcttctcactttttgaagatttctgctgaatatcaaattctaggtaaaccggttattttttcagcacttttaagatagcatgccaagg

SEQ ID NO: 113664 - DNA, 462 bp, Homo sapiens; identical to SEQ ID NO: 113633
  misc_feature (1)...(462): n = a,t,c or g

SEQ ID NO: 113665 - DNA, 613 bp, Homo sapiens
taaaagatatggggtcttgctttgtcacccagggtggagtgtggtggtatcatcatagctcactgcagcctccaactcctggtctcaagcaatcttcctgcctcagcctcctgagtagccactagaggtgtgcaccatcatcccagctaatttgtttgtttttgtaaagatggggtctcactattttgtcaaaagctggccttgaattcctggactcaaagcgatcccatcctgccctcagccctcctccaaagtgcctgggattaataggtatgaagcccacagtgccccggcccttgttatcctggaaccttaaaataattggcctccccagaattttttgaatgggatcctgcccatttgaggaacatacaggaaataaagggactttaaggttcagagggacatcatttagatattctagtgagagtctggattgcgggagaagaaatggggaggattctggcttccatcagtaacaagcaatatcctctctctcatagacacacccctacccaagagaaaatgaagggctgggaagaggacgctggccgaggccggtggggaatgagatggaagccaaatgtcatctatttcgcgttctctattcttt

SEQ ID NO: 113666 - DNA, 513 bp, Homo sapiens
  misc_feature (1)...(513): n = a,t,c or g
ttaacatcaaatgcatgntgtctcttcacaccaattccaacaggtaccaacaggtgcccaacaattacaacttcatttctgacaataaccatgcagagtgtctttaacacagatcccacaggtcaagggctcagtcccacaagactgcccacacttcgggacaccagtggccagtagacttacaaatttcacgggttcccacaggccccttcntcaggttccattaattctcttacaactttttcatagaactcaggaaagggttttacttaatgattgcccatttattatggaggcctaaactcagaaacagccagaggaagaggcacaggacaagggaaggggcgggagtagggcacaggacaagggaaggggcgggagtggggcacaggacaagggaggtggggggaatagggctaaaagctccaccctctaatcaactgtttggtctttctggtaaccagcctctaccctgaagctatctagagatgccaccctaagccacctcattag

SEQ ID NO: 113667 - DNA, 592 bp, Homo sapiens
ctaaaacacagatttctgcagttaaataaatgtttaataagcaaatgactctcgaattgatagaagttcaggaaatatgacaaaatgatggcaaaactcctgccattgtaattggggagttattacagagcacatgccaagatgtatcagctagacttgttcaagttggaccgcctatgtaatacttttcctaaatttctaacctttaagttatttaaagcctatgtgtactgtgtatgcatgcactaaagtatgtatgtatgtatgtttctaattgaagcggaaagatggttagttaaaagtgtaattctaggatgggcgtggtggcttgtgtttataatcccagcattttggaagacccaagtgggaggattacttgagcccaggagttcgagaccatcctgggcagcataaggagactccatctctacaaaaaattaaaaatagcaaggtatggtggtgctctgtggtggcagctattctggaggctgaggcaggaagatcacttgagcctgggaggttgaggctgcagtgagccatgatcacgccactgcagcctgggggtcagaatgagactcagtcttaaaaaaaa

SEQ ID NO: 113668 - DNA, 1266 bp, Homo sapiens
  misc_feature (1)...(1266): n = a,t,c or g
gaattcgggcctggaagccaagaattcggaacgagggataatagagcccctcacccaagcccagggccacattgcccaccgactcaatgtttggctctaccacatccccgatataaccatgagaccaagccccaactcagtcatctaagacggcatcaggactgggggcctgggtgtggggaaggttccccaaaaactgcctgatatggggcaaaggagaggaaaaatagctgctctgcacagaatgagaagctccaacacacttcttttttaaattattttttaaatagagatgggttcttgctgtgttgcccaggctgatcttgagctgctgggcttaacgtgatcctccntgcctcagccgtcccaaaatgctaggattgcaggtgggaanccaccgtgcccagcacccaacacacttctaaacagagttccaaaggcagaaatagaaagtagaaaagcattatttaaggagatcgtagctgagaattttctaggatgaagcatgagccccttaagctgaaaatatcaagcaaaatacatgaaaataaatccaaaacctggagtgttgtggtaaagccttagaaattgaaaaatcaaaagaaaccttcaaagtaacccgagaggagaggcagatcatttgtaaagaaatgatggctcttctactgacagcagacttctcatcagcaaaaaaaaagatgtgtggaaacaggaaagaaataccttcaaagcactgaagggnnnnnnnnnnctgtcaaccaagaattccacattttgctacgttgtcattcaagaatgaggacaaataatgtacaatttcagacgtgcagaagttgagaggcagcaatccagacactagctggaaagaatacaaaagtctgcaccaaggaaatagacatgaacctggaaggaaggagagggctacaggacacaattttgagctaagacattggtgcaaatatgttaggtgtaagaagccactgcctggggccagtgagtgttagcaccctgggaaaaatggagaaggggagatggttcgccactgtctaacaccacactgcatttcatttaaaaacaccatcagttgttaagatatactcttattgtatgtaacattaagaaaaaataaatttccaaaataaagtgtctaataggaggccccacataaagctggggcacattagtataacagcaagcaagacatgaacccaccacgcagaaaggaggagcaaatatcttgaccttggcatccagtggacagagagg

SEQ ID NO: 113669 - DNA, 479 bp, Homo sapiens
  misc_feature (1)...(479): n = a,t,c or g
tgggtctggtagtgcatgcctgtnnnnnnnnnnnnnnnnnnnnnnnnnnnnnnnnnnnnnnnnnnnnnnnnnnnnnnnnnnnnnnnnnnnnnnnnnnnnnnnnnnnnnnnnnnnnnnnnnnnnnnnnnnnnnnnnnnnnnnnnnnnnnnnnnnnnnnnnnnnnnnnnnngcatgcagatttggcctacaggccatagtttgccaacccatgctctaatacatagtttttttgtttttgattattagagtatttgtatgtatagttggcaggattatttaactcttctaactactttaattatggttatataatttttattatacaacgtttaggtataatttttatatatattattaagtttatttagccacgtctttaagttctctattatttttattttaaaatatatcttattataatataattttatatttgtatttatttatactttataattatatttattacgaatgttctg

SEQ ID NO: 113670 - DNA, 377 bp, Homo sapiens
  misc_feature (1)...(377): n = a,t,c or g
ggtcgtannnnnnnnnnnnnnnnnnnnnnnnnnnnnnnnnnnnnnnnnnnnnnnnnnnnnngctcaaagttcctgnnnnnnnnnnnngggaaaaaacccaaggagaaaaatggtttaataaaagggaatttttttaactttttgggggacccacggaataattttaagggggaaaaaaaccccaaaaattggttttgaaaaaaaagtttaccggccccccagccaaaagggaaggggaacaatttgggttaacaaaagccttggcctctggggtaaagggaattccccggcccaacctcccaaaaaactgggaaaaaaggggccagtgccccacccccagaaaattttttaaactttaaaaaaaaacggggcttccn

SEQ ID NO: 113671 - DNA, 821 bp, Homo sapiens
cgttttccattcgtaactgcatatatataagttataggaaaaatgtgccctggatccatatttagagcatatacttgcagatttagtcccttaacattcagttgtgtcctgtagagagctatagttgtatagctttttgaacatcctaattataatgaaagtaatgcagtgttccaatgtactgctcaaatcctgtttaaaaagtcataaatcaaccagttacagttaatcccagcacttggggaggtccaaggctggaggctcacttgagcccaggagttccagaccagtgtgggcaacatagtgagaccccacatctctataaaaactaaatcattagctgggcatggcggtatgcacctgtgatccagctagtcaggaggctgaagccgggaagatcgcttaatcccaggagttaaaggatacagggagtcatgatggcaccaccgcattctagcctgagtgacagagtgagaccctgtttaaaaaaaaaaggtcatcagtcttttgcattatcatttttcttcccctcattttcccacctctttgcatctgagtcttagtttgtgtgaatgtttgctttgatgacacctgaatttcttactttttaaatatttgtaggtattcgcatattagtagataggtagatgaatgcttctttggttcagtagctacgtaatatacttacagttttttctgtttaggtaatcacaagtgaagaagctgaaagacgaggacagttctatgacaacaagggaatcacgtatctctttgatctggactatgagtctgatgaattcacagtggatgcggctcgatac

SEQ ID NO: 113672 - DNA, 982 bp, Homo sapiens
tgagatggagtctcggtcgggcacctaggctggagtgcagtggcatgatctcagcacactgcaagctctgcctcccaggttcacaccattctcctgcctcagcctcccgagtagctgggaatacaggcgcctgccatcatgctcagctaattttttgtatttttagtagagacgaggtttcaccgtgttagccaggatggtgtcgatatcctgacctcctgatccacccgccatggcttcccaaagtgctgggattacaggcatgagccaccacgcccggccaatatattggtttctttatgaaaattatactggatctgttacaggtatgattgatgtattttatttttaagttgtcaagcattcagttaatcatgtgtgttgtaacttttcggggagggacatttgcagagactgacagatggtatggcattctgaaaagcggttacagattaagaaattttttaattctgcagatggtagtgtcgaaccaagtggaacaaagaaagaagatctgaatgacaaagagaaaaaaaatgaagacgaaactcctgcacctgtatatagggccaagtcaattctggagacctgggtgtgggtcaagcaaccaggaaacggaagcccaaagaggaggggagcttacagcaggccctggactagggattaacacaaaaacaacagcaacaaatctgatttaagcttcacacatatactcgggggactgaggcaggagaatcgcttgaacctgggatgcagaggttgcagcgagccgagatcgcaccattgcactccagcctgggcgacagaacgaaactgtgtctcataaaacaaatataactgaaatggtaatgtgtttctttaaaactgaagaaaatgtgcaaggtggatgtcttcctgtcacttcgcacagcctactgccatggcacctgaagcccagaccctagactcactgtcctgctcggggacccagaccacactggcc

SEQ ID NO: 113673 - DNA, 1095 bp, Homo sapiens
ttccagcgtggcggaattccgttggcggcgtgaggctcaggactgtacatcagaggaagccaaaagccagctggaatacttcctgaatacagttttaatcttgtttgcaattatttcgaaggggagaaatcatctggatcagaattaagatgctctggtttcaaggaaatagcatgcaacttgccagatcctcctttggactcttcttgagaaattgctctgcctctaagacaactctgcctgtgttgaccttattcacaaaggagtttctcagcacaaggtctctctttgcctgctgccatccatgtaagatgtgacttgctcctccttgccttccgccatcattatgaggcctccccagccatgtggaacttgacccatgccccctttgtgatgaagccaaggaagtactcaagccttatgaaaacaggttcattttacaggaggtgaacatcacacttccagaaaactctgtctggtatgaaaggtataaatttgatattcctgtctttcacttgaatggccaagtttctgattgatgcatccgagtaaacacctcaaaacttgaaaaacaagctcctgaaacttgagcagcaaagtactggaggctgactgatggccctcatgatttttccaccctctcttcccataaagcatcttcctaaggaaatgaccatggcctgatactcattttgtcacttgtacagagccctaaggatgttctgaattcagtggtgccaaataaaatgttgacattccccttttggttgatggaagtatcagtgtgggaactgtttgcttaatggcattttataaaataagaagagcatattagcagggagggagatgatggagggagggagaagtccatttgtcttatttatcctttttgtattaatagagaagcacttcacagtcactgggcaatgccatttataggaagaaggttctgcattcctgctgctgccccggagggcttaactttttaatgaaagaataaatgctcttccactcagtagataaagtgaaatgtgaattgttaataactgtgcacggtcaataaagcgatgttttaaggaataaaaaaaaaaaaaa

SEQ ID NO: 113674 - DNA, 761 bp, Homo sapiens
  misc_feature (1)...(761): n = a,t,c or g
tgttgttgttgttgttagttttttccttgaaccatgtgaaaacaagttacagacatggtgctgcttataaacatttcagtgtgtgtttaagaccaaagatatcatcttatgtgatcagagtataattatcaaaatcaggaaatttaatactgaagaaatgctcttatccgcagtctaaattatttcataccagtaatgttccgtatcgctgttgcttcctgatctttcccttccccagcctccagtccagaattcatcctgcatcacacaagtgcatccagttgtcaggcccatcttggcgagacggggtctccctctgtcggcaggctggagttcagaggctctgcttctgtggtcccaggctcttaccttcctggctccagcggtccttcccaactcagcntcctccaatagctgggcccacgggtacgtgactccacacctggcttaatttttgaatttttttgtagagacagggtcttgctatgttacacaggctggcaggcccatcttcttaactgagagaccagtttatgctttcctctagggccatcatatacaaagtccagaaatttagtgtgtgtaaaggtagcttttaagtcaagcaataagatgaaattgtcagtaaatgttactgggatcggccgggcgcggtgcttatgcctgtaatcacaacactttgggaggccagtgtgcgcagatcacctgaggtcaggaatttgagaccagcctagccaacatggtgaaaccctgactctact

SEQ ID NO: 113675 - DNA, 395 bp, Homo sapiens
  misc_feature (1)...(395): n = a,t,c or g
cgatgatttaaacaaaacagggccaggtggggtggcttaccccctttattcccgcctnnnnnnnnnnnnnnnnnnnnnnnnnnnnnnnnnnnnnnnnnnnnnnnnnnnnnnggcccacaatattaaacccccttttttcttaaaattcgaaaatttggcgggggtgggggaggggccccgttattcccccttctttggagggttaagccagaaaatccccttaaccttggaggcaaaaatttccattaacttagattgggcccctgcctttccgcctggggttcaaaagggccctccgttttcaaaattaattaattaaaattaagcccttccctttnnnnnnnnnnnnnnnnnngggggccgctcgcgatctagaactagtccggacgcgtggg

SEQ ID NO: 113676 - DNA, 853 bp, Homo sapiens
  misc_feature (1)...(853): n = a,t,c or g
tttttttttgtaaaatcactctttaaatctcttgcccatggtttagccctgagaataaacctagaattttttacactaattttgtactcctgcttttacattggattgcttgtcttagtgagttgtaagagttctttatatattctggatacaagtcctttatcagacagatgattttgcaactaatctcaattgtagcttgtcttttcattttcttaccacggtatcatactaatgtaaggtgttagtaatatgagaaaactgggaattctttatagcatctttgcaatttttctaaaaatctaaaactactcaattttttttttaattagtggaggaactattagcgtaagagataaggcatttcagccaactgcaatttgtgaacctttctggattctaatgtgaaaaaaaatctatttttaaaagacatttacaagacagaaaataagtacaaactggatatcagatcataagataatataaggtattgtaattgtttaaaaaatccttctctgttaaagattcatattaaagatattaaaggccaggcatggtggctcattctactgtttcatttcataaatgtttaaagatttccacacatacaccatggaatactacataaccataaaaaagaacaaaatcacattctttgcagcaatatggatgcagctggaggccattatcctaagtaaattaaagtaacagaacactcaatactgcatgttctcacttatatgtgggagctgaacactgggtacatatgaacataaagatgggaacaacagatactgnggactactagaagagggagaagggagggaggggcaagaggtgaaaaactacctgc

SEQ ID NO: 113677 - DNA, 931 bp, Homo sapiens
  misc_feature (1)...(931): n = a,t,c or g
aggtccttaaaacggcncccnnnnnnnnnnnnattaagagaagggttntatctgtgctcagcaggggcatagggcccatcttagctcagtcagcttaaagtcannnnnnnnnnnnnnnnnnnnnnnnnnnnnnnnnnnnnnnnnnnnnnnnnnnnnnnnnnnnnnnnnnnnnnnnnnnnnnnnnnnnnnnnnnnnnnnnnnnnnnnnnnnnnnnnnnnnnnnnnnnnnnnnnnnnnnnnnnnnnnnnnnnnnnnnnnnnnnnnnnnnnnnnnnnnnnnnnnnnnnnnnnnnnnnnnnnnnnnnnnnnnagagatgtattattttgtgcatctgccatcttcatgattttagacaaaaagaattttagaacccataggcatcattacatgcagagaatctatgaataatctagccaagagaaattcacatttggggtccaagtgaattaaaacatttgaattttaatgatagatatgcgactgtctaattaagctttgctatttgaagacgcataaactaattttctactttttacaaaaaataccgacactttccatttgtaaaatgaaaacacactaccttggagttttaaaaagcacatcaattttaaaacacatggatcttctttataatttacaaaaagatgcaagaaaaatcccaattgaatgagttgctaacaattagaatatacagtaagttgaggaaaggggactctttctttagagagctcattgtaatagtgaagtttactcatctgcataaaatatttttttaccagatctagtcagagactgctctacctttatggtgctgaaaagagaacatagacacatcttactttaaaaatcaactaactagatgatggtaataataatagttaatattttttgagtactttaaataaagaatttcatttaattctattaataac

SEQ ID NO: 113678 - DNA, 923 bp, Homo sapiens
  misc_feature (1)...(923): n = a,t,c or g
aatacnnnnnnnnnnnnnnnnnnnnnnnnnnnnntatattaaaagaggagtcacatgctggggcgtttgtggtatctcaactggcatctcatctgctggtgatgatggctatacattttcctcagtattcaatgcgcgtattttgagataacagtccacccattgtnnnnnnnnnnnnnnnnnnnnnnnnnnnnnnnnnnnnnnnnnnnnnnnnnnnnnnnnnnnnnnnnnnnnnnnnnnnnnnnnnnnnnnnnnnnnnnnnnnnnnnnnnnnnnnnnnnnnnnnnnnnnnnnnnnnnnnnnnnnnnnnnnnnnnnnnnnnnnnnnnnnnnnnnnnnnnnnnnnnnnnnnnnnnnnnnnnnnnnnnnnnnnnnnnnnnnnnnnnnnnnnnnnnnnnnnnnnnnnnnnnnngttattgggacatgctgtacactttcacaaattcagggtctcccaaaagccggaaaaccctttttcctccctttcttttttttcgggaaaaagaaaattcaccccttcccccccgtctgggaggaaaggggggaccctcgtaaaaacacaccctttctggggttaaaggaattttttgtccaaaccccaaaatctnnnnnnnnnnacaaatggtggaaaaaagggtttgggcccccagccccactcnnnnnnnnnnncccaccaagaggggggttttcccccctgaaaagccgcggtctgtacaaccccgcccagggggctccccccccctccctctttgagaagccgggattatcccgttaggcccctctcctccccccaaaaaattttacccctttttattttaacacctcttccccccccagagggccttttaaagggccggggaggggccccccttttgggccggggnnnnnnnnnntaaaaaaagggggcggagaaatttttgtgggg

SEQ ID NO: 113679 - DNA, 963 bp, Homo sapiens
  misc_feature (1)...(963): n = a,t,c or g
cgtatcgcgcaagaagctctatttcccccgcgtcgacaaaagcccccacgagaggtattttcgtctctggaggcggggccgccttcggggcccgctggagaaaattaaggtggggggcaccatggcgggccgctctttgtcttcacgctggggtttatattccgaggcgtctggaagggccactctttgaaaagcacttgtgcgcgagggggcccactctataacagaannnnnnnnnnngtcccccggggccacaaccacattgtgtccctccgttaaaacccccggggcgcgtctttgggcattatcccggagcgggggggnnnnnnnnnntgttctttcccttttttagagataattcccaaggaaaaaaaaatcttggggggcaggggggtgagaccacctataaggcctttaaaaaaattggggcaatgccctccccggggagtttttttatattaaaaaggtgttccctctcccgggagggggttttttgggccccctttaccaaaagaaannnnnnnnnnnnaaaaaaaccctttaaaaaccccnnnnnnnnnnnnnnnnnnnnnnnnnnnnnnnnnnnnnnnnnnnnnnnnnnnnnnnnnnnnnnnnnnnnnnnnnnnnnnnnnnnnnnnnnnnnnnnnnnnnnnnnnnnnnnnnnnnnnnnnnnnnnnnnnnnnnnnnnnnnnnnnnnnnnnnnnnnnnnnnnnnnnnnnnnnnnnnnnnnnnnnnnnnnnnnnnnnnnnnnnnnnnnnnnnnnnnnnnnnnnnnnnnnnnnnnnnnnnnnnnnnnnnnnnnnnnactttgggagactagctnnnnnnnnnnnnnnnnnnnnnnnnnnnnnnnnnnnnnnnnnnnnnnnnnnnnnnnnnnnnagagttgcagtttttcgctccagttgctatttttcatcaaatcaagaaaggtatttagctgatatgtaccacaacatgtatt

SEQ ID NO: 113680 - DNA, 441 bp, Homo sapiens
ttagtgcctggcacctactcacactattcaatttaacccagtttcctgttggagcatccactgacaacgtagccgaggctagtcactcagctacatgtcaggaataaaggcaaaataaggttccttgcccctcttggaaagtccgaatttccgttcgaggtgagggaggatataaaaagacaaaatagtacctcatgataaaacctacaaggaaatagacaatagaatgaggtagagaataattgggatggtctgttgggcatgtacttcaggtgatcggaaaggtctctaaggaagtgccatttagacacaccataaaggcctggtgcagtggctcacactgttaatcccagcactttggaaggccaaggcaagaggattgcttagggccaggagtttgagaccagcctcgccaacacagcgagatccccatctctattt

SEQ ID NO: 113681 - DNA, 953 bp, Homo sapiens
ggcctcgtgccacctcgtgccatttggaagtccagagggggagcttccagttccctacggaggttgagggacacttgaccatgaagggccgtttagggtgtgtgttgaaaaatcaataagagcttaccatgcggcttgagtaaaggctaggaggatccatgtgtgtagagctccttgctgggggtgtggtttcagggtgaagtgccaatggggaggatgagggaggaggagaaataagatgaggctggacccaggtgggcatttatgtaattgtcaaaatcagaatttatccgaagcagagtgaatgggaaggggagtgtagacctggaacaggaactctttctggatgcttcactgaagaggagagagattgagtgatggtgacccgggaggaaccaatggtcaggggaggtttccatttttaatataaattcttgggccaatattccatgcatcagagtattataaggtctgtgtatggttagaagaagaataaaatgaacatgatttacccatcaccagagagaaacaaggactttgggggccctcccgttccccttcccatgcaacatctccttcctgcttcccagaggtaacctacctttgttgaccccaaagtgtttattatttgagaaaggttttttttttaaagcccttgattgggtgtaaagctatcatttaactaatttcctgacattctcctagttttgttttgttctgacacatttttaaagttaagttttatgtcatttataatgatgctaaaagcattttggcaggagctaggttaattctctgtagccttttctcttggcacatgtgaaagagaactgctggttggcgggtggctcacccctgtaatcccagcactttgggaggctaaggcaggaggatcagtagagtccaggagtttgagaccagcctgggcaacatagtgagacccctatctctac

SEQ ID NO: 113682 - DNA, 388 bp, Homo sapiens
ctcatatgcccaacacgaccactgcctccctgcccccacacctgcacccaaacagacacatcaacgcaccccactcacagacaccccttaccccacccccactgtacagagaccaagaacagaaattgtttgtaaataatgaaccttattttttattattgccaatcccctaagatattgtattttacaaatctccctcttcccttcgcccctcccttgttttatattttatgaagttagtgcgggctttgctgctccctggcccaggaaagagggactacctgaccctcacctggcacccccctgctgctgcccaagccgctgggcctttttaattgccaaactgctctcttcatcagctcagcacatgctttaagaaagcaaaacc

SEQ ID NO: 113683 - DNA, 448 bp, Homo sapiens
  misc_feature (1)...(448): n = a,t,c or g
ttagtcagcgtggtggaattccatgaaaataattgcagtagactgttaatttgatggcttccagtgaaccatgcttctggcattcatactcttatgtagtcccctcccacattgattctggactttgccatattgatgcagggcaggtaagccccagaattggggcttagcccgagaaggttcttcacttcatccaggaaagaattcaagggcaaacaggtggtggtagatgccaacannnnnnnnnnnnnnnnnggaaagggagttttattttgttttaaggtgggagggcaggggcccaatttttgttaattgaaccctccgactcctgggtaaaaaggattctgcctcgccctcccaagaaccgggaatgggggccaaaccccaccatgcccagttggtttttgaattttaggggaaagggggttcccccacgtgggcaaggggg

SEQ ID NO: 113684 - DNA, 1592 bp, Homo sapiens
agtggaatatcattactgcatcacagacaagatcacagacagggtaagaagggggagagaggaaatttacaattcctcataaatagttccttatttacagagattgtaagtgattatgtaaatcacagagcttccaattaaaaccagctcaagctacaaacatgaaagtccaggggcagtgccagagccacctcacttgcccgagtgctgctctccagggcttgctaccatctgctcgtgtgccccttaaagtgagggcaatggtagagacagcaccggcctctagtcctaggaagcacacatgcattcatgtcaagcactgggggttgagtggggaggaggagggggacaggggattatctgacagctgaggatctaggggatcctggcggagtctgggtcacagctggagcccagttgtggctgagatctccagtagctgagggggaactaatgtatcaaaatgggagggtcccaaactggccggccaccataagggcctgcctgaaaagcccaagggactggcctaaatcttcagatggtggcggggccgccaggatctcaggggggcttctcagctgctggcaggccatgtccaggtttcctacctcccttctgctcaacctttaggtgcttctgcaacatttactgcagcccatgctgcctgctgttgtctgtgtgtcctctgccaggtgccaccattgatgtcagatacccttcccagccccacagctaggaaccaggcctgtctttgtatcccagtggctggcacacgttggatcctcagaaagccccctttgcctgcctgctccaacaatggcttgaagacaaatattacaccaactgggcagggcgctgtgagggccaagatggctggtcctgagcactgggccacagccagcccaggcccttccgggacacatggcccacaaagctgcctttcccaggtaatggggagcaagggggagacagaagtcagggaaagtttccatgaaatcttacaactcaccaaggctgttggattcgcatctgagggacgcttgggctcagcctattaaacaggaggctgggtctggcctggactccgtccaaggcctcctgccaccaccgcccaccctaggaagcactttagaatcttcacagtcagcatccaggaaaccaacggctatggctaagagtgagcaccttggatgtcccttcaaagcactgagtaattacgtctcctaacttggacctttgtctctgaaaatcactcgcctaatagaacaaggcaaagccagccactcctgcgcaccccatctccaagcccaggccttcccctcagtgaggctcaggtgtttgggactggcctctatcccagccgcctccctgcaacgagaaggcccatgggcaatctcagtgcctgggagaacagccctcccccgggaagccaagaccatggccagaatactttgacctggccaagaagtggcccccaggagaggttgctcagatttaaggggcaccaactgcccctgggccctcagagcccctttagggagctctctgggtgctacccacatcctcgtgccaagcttggagtaatcagggtc

SEQ ID NO: 113685 - DNA, 683 bp, Homo sapiens
gattacagatgtgcaccagcacacccggctaattttttgtatttttagtagagacagggtttcgccatgttggccaggctggtcttgaactcctggccttatgtgatccgcccaccttggcttcccaaagtgctgggattacaggcatgagccacctcgcctggccagatgctagcattttagatcaaacaattcattttagatgaattgttttgtttcacaatcattttaaatcattttagaatgtacttcacattattagttgtgttatggcataaaggtacaaccattccctaactccatcttttattaatgcttaagtttaaattatattcttccaatgcctaagctattccctaggaattaaactggggcacttttgggaaggcagcaacagtaacaggcaggcaggcaaactttttcctctcatattttgggtgtatcaaaagttctagacttttgaagttatgatttcagtggcccactttatttctaagggaagagtgtctactttgggaacggatactttggcacatagtagggaactccaaggaaatacatttggaattaattattaatttaactgtttaggctattctttaatggggaatttgtttggaccaacaaaggatcatccatcggccttatggtgtggggtagggttggggggcccctattcagga

SEQ ID NO: 113686 - DNA, 697 bp, Homo sapiens
gatcctacggcctcggcctcccaaagtgttggggttacaggcgtgacgaccagcacccggcctgagttaatacatctggtctcactacgtcttaaccacgcacccacgaagaactcaagtcaagagagagtcggcaagagactctcagcattctctcccgaaagcacgtgtgtcccgagctcctgtggtttcaggtggccgcgcgtagaggagagatttccaatgtttccggagaggtgcgagccacagtcactcggggcatccgagcatgagatggggtttctgacagcgactgaagggccagggaagggcagaagtctgccaaggcccggcgttccagggtggggcccagggaacccaaggtaagagggagtcagcggtccgcacggagaagaagcttccagccctaggccccacttgtgcagaccgaatcagaaggaagagagtccttcgtcctacctgccacacccctcacatccccccactgaacttgggagtggatccgtgttctaaacacgaggtgagacttcggtttgcaatggatcacaaggcgccgggctttccagagtcagcaggataaagaagtcattctgtctcggactcccccatcccccggtaacggcggctggtgcctttaaatgagccggggctggccgggccggagccgctatgggggggggggggtgctgaggcactg

SEQ ID NO: 113687 - DNA, 469 bp, Homo sapiens
gcaaagccaaatgtagccacaagatgaatagggtaatgtgctgtaactatgaagatagccaggagtaagaagtcagttcactacgtttgttctcttgtccccacctcaccattcttttctaaaattgtcttgttttattaatgaaagcactaggaaaggagaagaaaaaaagaagtgggactttctttttattttttccatttcagcattcctctaacccattccccacactcagttccatcagatgaaaataaccatttctctcatgagaaccaaactaaagaaagttgatataacagtggaagtagtgtggtccttggactgatccaaaataaagtcttctcggtgggcacagtgggatatgcctgtaatcccagctactgaggaggctgatgcgggaggatcactggagcccaggagtttgagaccagcctgggcaacatagcaagaccgcatttccaaaaaaaaa

SEQ ID NO: 113688 - DNA, 383 bp, Homo sapiens
cggacgcgtggggatgggtggacagattactggctggctggatggatgggtagagatacatgagtgggtggatggatggatggatggatggacgaatggatggatggatagataagtggacagacggatagatagctggatagatgggcgggtagaagaagaatacacggatgagcggatggatgagtgaatagatggattgatggacaaacaagtaaatttttacctgacatttttgcattgtgcaaccctctgtgcgatcattcattggggaccaattgtgatacatggatcttggacttattagctctcgtgtgacgataacaaaacctcacaggcccctcgagctcattagcagtggactgggacccaactgaaaggct

SEQ ID NO: 113689 - DNA, 689 bp, Homo sapiens
  misc_feature (1)...(689): n = a,t,c or g
ccagctataataatgcaagactcaattaaaaaattaaactcaagccattgtgaggttgattatataattacacagaagttgttgaactaccaatttacttgtctctcctatctctccaaaagggttaaaatgggggacccccccggttttccccccacccccatgtaaaaaacccgccccctgaagttcattaagggcccccataaaaaaaacttatccgctccccaccccggggaaaaaaattgggcccctaaaaaggccccccccnnnnnnnnnnnnnggcttagggggtggaatcttatttttgactaattccctctgggcattatttctaaaggagagaaatttaagatctaacttccatataggggggttatgctcattaatcccactccttatgattgtaaattgaagagaaaggatgttccccaaaggaatgaaggttggaggaaaacctttagcccttcttttcagaagtaatttatctgacaaggatggcagaagaccaattattggcatctgctttctttggccttctctcttcctatactccatacctccagcaagcacttatgtattcttgggcttgacaagggtgaggtcaggtgcaatcttctatccagctgatggctctgtccactctaccaagtcaactcttcccaagtttaggctccaaagtccagttacag

SEQ ID NO: 113690 - DNA, 480 bp, Homo sapiens
tgatggagtctcactctgtcacctagcctgaagtgcagtggtgtaatctcggctcactgcaagttctgcctcccttgtcaagtgattctcctgcctcggcctcctgagtagcttaaattacaggtatgcgccaccatgcctggcttatttagattcacatttttgtcaccaatactaaagtttagggagttgcccttaatggtttcttttccccatctgccttttgactgatggactggtcatggagagagaagaaaagaaaagaaccaagaaagaaactccaattgttcactccctcattcattcattcaaacatttattgagctctacattagcgggactgagcatatgacaacaagatactatcccttcgagttattcacagtcctgagaagcaaaccaaacatacacaaatatttatgacaaatagtgtaagtacaagtctaaaatgacaaaggtaaaatgattcactgatgaact

SEQ ID NO: 113691 - DNA, 403 bp, Homo sapiens
acaggatgggcaagtgtcatggacttcgtactgttaggaagctccgtaatcaccgacgagaccagaaggggcatgataaacagtataaaaaagctcatttgggcacagtcctatgggccaacccttttggaggtgcttctcatgcaaaaggaatggggctggaaaaagtatgagttgaagcccaacagacaaattctgccattaggaagtgcgtacgggtcctactgagcaagaatggcgagaaaatctcagtctttgaacccaacgacggctgctggaactttattgaggaaaaagatgaacttttggctgatggatttgggagcaaagggcatgctgttggagatattgctggagtacgatgtaaaggtggaaaatacccgatgggataattttgggccta

SEQ ID NO: 113692 - DNA, 599 bp, Homo sapiens
  misc_feature (1)...(599): n = a,t,c or g
caggatacctttcccccccaattaaaagatctaaaatgattttccaatctgtaggaataaacttggtttaaagtttgagaagagaaccaaacttgtgtgtgatctaaacattaaaagttaaatcccctcgacattctctttccctaccttgcctacctactactatattgaggagggaaaatgttgggtaggaaggaggatttacaaaggctttgggcctctccctacagtcctcatggacaacttggcatgctttttgggtgaaataaaaaataggtcggccgggctttttgggagatgacatttcaccatattgcccaggttggtctctaactcctgagctcaagcgatccgcccgccttggctcccaaagtgttgggagtacaggcgtgagtcaccgcgcccagccatattgatatgaattttaaaaatgcatctgctgggaatataaattaaaaggtaaatagagggaaaatgtggaaaataaggaaataccctaccatttaaagggtgattgggaaggggttaaggtgaggaaaacatgtaaaagggttcaggcangtgcctggggcccaagggtacactccctttaagtgggt

SEQ ID NO: 113693 - DNA, 941 bp, Homo sapiens
acttgggcacacacactctgcacactgtgggctcagtggttccttctgtgcacctgctaggaaagctcctgaaggtccctgcctgacttgtcaagaaatcagaagccgttttagagccacattttattgtacttgttgcttcaccgctggacagcagcatgacatgctttgtgcatgatgtatacatatacatacatgtacacacaaggacacaccacagcctgcactcacagcatgtgacaacacgaaccgttgctggtaaggacagtaaaaatgtagcttttgccaattccacaggacaatgactcacaaccaaaataacaggcacagatcagtcctgcgccacactatttgggttcccagctccaaatactgggagtgagatcagtgacttcgtgtcccctcatgagatgtccccacagtaggatgcactgagccagagctaaaggagggcggacaagccccacgttgaactctgcctgcagcacctggaccctcccggggcagcctgcatgctgatgcccctgcagcacaaggctcgcccggaacagaacgccctgggctcggcaggacaacgggtgccaccactggcaacacgtagcacctgagagcagcctcgactgcgtgaggctccagggccttccctggatggcagcagctgacgtggagatgaagcttcctgctgggcacatgcacatgccagtttcttttcctaataggtccccactgggtgctggctgcatcaactgaacatcagagaactaggaaagttcacaaacactgagcagtagtatctaaagcagtttaaaaataaagccaaaaggaagaccaaaaaatccctcatcactgagcggagacaaatctacataccagcagctgccttgaaagggccggcggggccgctcccatgcctcctgcaggtcagaagcaatcagtgctgc

SEQ ID NO: 113694 - DNA, 1442 bp, Homo sapiens
ttttttttttttttttacctgatatgcccataaatatttttattacatgtgaaactacacgtgcataaaaatagtacccatatttgtagacatgtctgagacccatttcaaatattaggttcctttttttattaaaacactacattgagatggattaagttacttagtcttttctcattcaaaacaaactaaaacctcacaggcaagagtaatattttcacaaacatctccaatgtttacctcctccttggctcggctttccactgcagggtaaggtgtttcaggccacaggacaaggtggcaacaaaaccgggttactatacacaaaggccacgcagtggcttaattttactcttaaatcaatgcattcaggcaaatggggatccatctggtaaacaaacaaaaaaaaacccccaaataatcccacctcctttaacggtccatttggaaattacaggataaactggccacttaacaaaaaaagggatgatctggatttagaaaaaaggatattcgttgttggcaaaattaacattggcgcttcttcctgtcctttataaatttggaaaagtcaactacatttcaacaaagttgcgtgaaacttctctagggtgataccattgctgtgtgcctcagtgaaaactttgcaacgccccatcacccagggccgtgtctgtaacctcacccagggagccattttatgtagtttttttcatggtaaatgtccaaagacaacttctgaccccatttaaaggtgaaaatttttccatccatcccattgtgaagtagaaaatggtatccaattttcaaattgtggtttttattggctaccttttttacccaagttatgttttctccttaaactgtggggtagttttaaaaatcccccatatccaggggcaaccaaaaatttggttttccatacccaatacgtttaaaaaagatttttaatacctgacctaaagagaaaggcattgtagaattagtagtacgttacatctgattcacattagtaaactgtcaagatttttttcaagttttcatctattcatggtaagaaagcacaaactttcagaactgaggaatgaattaaattttgtctcccgttttggaaccttttcacaatgcttctagactgatgtgtctaatacttcctgctgggcaaaatatccacaaagtacagaccactgataactccacccatgaagctcaccaaaaaggaaagaagagcagaatacaacgagcttgtggctagggtacgcctctctgatttcacttttcctgaaagagccataaaggttacctgatggccaggcgctgtggctcacgcctgtaatcccaacactttgggaggccgaggcgggcagatcacctgaggtcaggagatggagacccatcctggtctaacacgagtgaaacccccgtctctactaaaaaaaaaa

SEQ ID NO: 113695 - DNA, 562 bp, Homo sapiens
gggaagaagccttggctttattcgctctgtggggacactgttccgttcagaggcccctcccagccatggggtgggggacagtggtgggcgtgggaatcccagcgagcatcctggagggtgcgtcgtctccatgtattttgctcttccccatcttttccatggggtcccctgccagggtcaagcactaatatgtggtgaaggcagcaaacagcgtcggcgtccctttaggggtggggagagggctgtagcaccaagaacctctcccccgcccacgacatccttgaaaaggagactaaaataaagccccggggcctttctacgtaggggctccacttaaatatggaatggtggtaggcagagaggcggtggcccagcaatccttaagtccagattaccagctgtggggaggcttccagggggccaggagcaggctgggcagttccagccacagacacgtgggtggaggacggaaatatctccaagggggcacagtatcagaggagcaggatggaaggggcttttctgcctgctacgggatcctttttaaagaaatgggtgtgaa

SEQ ID NO: 113696 - DNA, 677 bp, Homo sapiens
ccgcgctcctattggtcagaggaaagatcccgactttagaaggactttcctgctggctggctcgcagcgtccccggagagcaagcgagcgcgccgcagcgggagactaggttctctccgagcgtcctccgcagaggcgccgcgagaggagcagggagccgcagctcgccgtgttgtcttcatttcgtgcaataaagaattgtcattaggtttgcgtatggcatgtgctattaccccgccgtaaaactaaaattagcaaaatgtcaggaatggaaagattgattcaccaagatgcaattatcatttaaaagtgcttgattgaggtactgatgttcagtgatttattctgcataccatatacataattaaagtagtgtagtggagtaatttatcaatctagttgagactggaggggtgaggagggagctgctgtatgtttgttttattaaaatgctccgaggtctagtcccgccccccttttgcaagagtgaaactgatgatttctccagctcgcgaggaaagagtcaacggtttgggattgtgggggagagagagacggagagaaaaaggcagcgcgaagcaaaggcaaggacaaaattaaataaagggggaaaaaaggaggcaaaagacatttcatcggacgtgctgcttagaaccccaaccattcgtgcgaattcc

SEQ ID NO: 113697 - DNA, 991 bp, Homo sapiens
  misc_feature (1)...(991): n = a,t,c or g
aaaggatactctccaaaaagttcgagaaaatctagatagacgctaacaggaattggaaaataacacccctggtaccaaaacatgtttaactggaatctatggctaactactctaatcactggattggcgggaccccttctcctcctcttgttaggtttagtcttcgggccttgtatattaaattggtttcttaaatttataaagcagttcatagcttctgtcaaacttacgtatcttaaaacccaatataactcccttgttgtgactgaagaatcaatgatttgattacccaaaacatgagtggggaatgtgatacctaccctgttttaacctgccccaagtttacgtgtacagtgggtcagaagggtgacttctgacccttctgctcagagtgactctctcttagctgagatagctggacactctccattttagcttcttcacttgcagtccccttatccccctcccttaagggaataactagtgcaagctgactccaagcacatccaggaatgcacttactgataagatattgaggcaagctgtaccagcagctcctggggacgtgctcggcggatggtacccaagcccctgcatttatctctttgtgatagtttaagcccctgcacctggaactgtatttttctgtaactatctctgtaaccattaatttttttaactttttgcctgttctgcttctgtaaaaattgcttcaagtaggctccccctcccctatttagaccatggtttaaaaagaaatctatcccgttcttcgaggccaagagaattttgagctctagccatctctcggtcgccggcaataaaaggactcctgaattanncnnannnnnnnnnnnnnnnnnnnnnnnnnnnncccccaaaaaaanngggggcgccggcttaaaaaaaaactttgggggggcccacttttatccagggagaccacaaggggtttatctttttctctttgggggggggataaaaataactt

SEQ ID NO: 113698 - DNA, 378 bp, Homo sapiens
gggctttatgttaagtcatctttgacttcctttttgtagcttgtttttaatagcagaggtcacccgggacaagggtgctgtgtactgtatatgacacttgacgcttttgatattttttcaggtttttaaagaattattatttttcatgaaatgtaaaatatcagtttgagaacatcacatttacgtctactcaatgtctagttatttagcacccaccttttagctttcattctagatgaaaacgagacaagggagaaggagagctaccaactcttgccagatatcctgctgaacagaaatccctgaagctgccttaattctcaaaaggagttaccgctcagctgggagccagttcctgctatatgatcttttttctag

SEQ ID NO: 113699 - DNA, 1451 bp, Homo sapiens
ttttttttttttggggactgcaaaggacaaaaaacctttccactttggccatactgggttgttaagccggagccatttcagctcctggttcctaaaaataacggggagtccagggccattttggaaaagctccaggggcagggctgacttttttcctacagggaggaacaatgtggggatctgagggatgggagggaaacttccccctaaagtgggggtcctgctgggggctcatatccagggacccaaaaaggggggctgtgtaggaggttccacattggaggggctctctctctcgcagctgtcagagttggtcctggctgtggcgtccaaacagcttgagggaaaaagatcctgtctaaccacctcatctactactcaagttctttctgaaggagggatttcttcagttaaccatggacagtgaggtttctcaccacagtaacttgagtccaggttgagggggagacagatctgtggtaaatctctgacttgggcagcacactgagtgtggaaccccacaggactccttagggaaggagcttgtgtgtgaaagaacccctggggctgagctggtgacctcccatgtgtgggtgcagcaaggccttggatggtgccaattgatctggacagccttgtgatgcttttctacttccacccttcggcctggccccactgagccccatcaaggtgcctgaagaggggtccagtgagatcccgtggccacagggactccagaggcatctctgcaggaagcacaccatgccttccctccatgttccatcacggcgccacaatcttgtgtgccttaacttctcaggggcaaagacaaaggcgagcgttgctgaaattttctctttaatggccattgggaagagtctggttcagtttttcccaactctcttcccactcgtatttgggggcctctggggttttctgaagggcacaagggactgtgactttgtaccactaacctgtggttcaaacctgggtgtgtttctggcatctccctaacccagatcagcaatggccaccctgctcctctgaggtcagcagaagactgggaagcagaggtgagggatgcaggccacactggaatgggaagtcttttccccactggatgtgcctgtctggtgggttttggaccttcccagaactacatctctagaagaaggcctgtttggagtaggtacactgagagaccctggcctcttctgctggaagactgtccaagtcttggggtttcttgagctggtgattcctctgccatcctgctctctctcttcatctcaggcagcatggggtccacttttgtccccaaacctaatgttttaatccaaatgcaaattggttccacatttttactggagggtaatcagtttttaaaattcacacacatgtaatcgaaacgcaatactataaagttctactggtgagactcctgaaaaaaa

SEQ ID NO: 113700 - DNA, 899 bp, Homo sapiens
ggaatttaaaatttctttaatatttaataattaatatggatgggaagactgatttacaaggcaatattttattttaccaaggagattctatacatccagggaggcatcttgaagtacaatacaccaggcttttcattttttctttacattatgattgggaagttcccatataaagtggtactttacatgggaaggggaacaccaaaatccattttttatatacataaaaaacaaaacaccccaaagagaccttgaccccccaaaatgtcttgttttcactttgaaaataacatgaatgagacggaaagatgaaccagattacttggtgaccgcaccagaaaggcggaccaagtagctcaggaaatcaaatcctgttttcaagcttggcacattaagggttaagaaaggtagtggaaagaagggttcggaaaatatcatctcaagccacaaaaaaaatctgggcagaagacagcctccaaatcaataaggataggaatggttaagaagtccaagttaagaagttattgtgtgggctaccttatatcccagacctctaatagactgagtggaattgtcacttctcttccctcagttatccccaattgttagtaaacttcaaggaggctgggcatgactgactcacacctgctatctcagaactttgggaggcgaagatgggcagattccttgagccccggtgttcaagacgagcctgggcaaacatgggcaaaacctcatctctaacaaaacacaaaaattagctgggcctggtggcacgtgcctgtagtcccagctacttagactgaagtgggactacaagcacaagccaccatgcccggctaattttttttactttttagtagagacagggttttgccatgttggccaggctggtcctg

SEQ ID NO: 113701 - DNA, 579 bp, Homo sapiens
cctgttgaccccggtctgtgcgttcctgagcgagggcttcttggtaggaaggagacttacggcttctcaaaggtcctggaaagcagcaataagcccacaaaacccatcctgacaacctgcagggctccccggatcagaaactgaagagaccttgaggggctccagttccacagggagcagcggagaggaagggcccagccgagggggagagagggtagcacagagccagggagcagggccaggcggagcgaagccaccgaggccactgcctgcagtgacgttcgaaacggacagtaggaaaaggacaaaacttgaatgacacagcagaggggtcaggagtgggaggcagaattcgccatgctctgtcatctcctccaaagccgccatgggcaatgacagaagtgcagcttcccgccagcccctgccaggggtaccaggaccctcctccaatgcctggatcaagctctgccgctgctgctggtttcttccctgtgaccccacacagcaccctcatctgcagggagaaccaggcatgtggggctgtcgggcgagctccgccccaggaagggagaagccagc

SEQ ID NO: 113702 - DNA, 379 bp, Homo sapiens
  misc_feature (1)...(379): n = a,t,c or g
cctagccaggtcatggcaaagtcagggtttaaacccacaattggctaatacccaagcccacannnnnnnnnnnnnnnnggaaagggagtttttttcggccccccagggggaagggcaggggccaatttttttttaacggaaggnnnnnnnnnnagggttaaggcatttttcgggccggcctaaccccccggagaggtgaaaataaagggccccccccacaaagccgggttaatttttttggatttttaaaaaaaaacggggttaaacggggtaacccagaagggcccaaatccccgaaccccgaaaccggggggcccggcccccccaaagggggggaataacggggggaaacaaccaccccgggccacaagcccaattt

SEQ ID NO: 113703 - DNA, 679 bp, Homo sapiens
acgtgcggtggaattcctgatgcccacaggggagccaggctggctgccgcctcgctgtggccggatggagggtggcagggcaacctcacataccaaggcccctccccaccatcggttgccccaggacacagtgagggcctgggggcagccactgacgcccatgccttcctttatctaagctggcagaggcagggagagagaaaccactcaaaaacaggaatggttctttctgggcctcctgggacaggggcccaggccaaggtggggtgcaggaggaaacaggcgcaccagagtcagggtgggggcagggcagcccccccaggggtcaggcagctgtgtctccccacactggctccccagtattctggaaaaggggtacaggaggccgataggaagtcactgggcccaaagtgtctccccaccagccaggtgaagaccactctgacagaggctccagggactataccagtccccctgttcctccttcccctacccccaccattccttcctaacacagagttgcacccccatccccattctccaaaccctggactaccatattcccccttccctccaatacatcttaataggggtgctgggtacagttgttcaggctgtgcactgcacaagggcaccttgtaccaaggagacaccactttcacccaaacttgtatatttt

SEQ ID NO: 113704 - DNA, 803 bp, Homo sapiens
  misc_feature (1)...(803): n = a,t,c or g
ggttcctctaaaccggccgccccnnnnnnnnnnnnnnattttaatattttttattaaggggctattaaaaataccccagaaagataaataaatgtggatgcaatgatatctgtccttaatatggaagaactttcttttcactggcatttggttttcccttcaacaaatgggccttcaaaatccacaggaggcaagtgattccatgcccatttccctcttcttttatttacacgcttacaggatttctgaatcagtatrrrrcgtcctcagtcttctctttataaatcaaagtcattttcaatccaccggtttaaagggagcgtatttttttcttttccacgaaggagggactctttggtttcacaactggatcatcataatggcaaaaggagtcagttttttccccgcagtcgggtttctcttgggtgttggaggcaggaaacctggtccccagcttcgcttcaccattctccacccaggaatggttttttgacttgcccctgggcaaaagaagaccgcggaaaggaacatgggtgaccacaccttgggcagtctccgtcaccggccaaaaggcccccaaccaacaacaactgcttccggggcacggcccggttctggaagaggacatccggcagtcgcccgaggccacgccccccgcctggaacctgcctccagtcgtctggctcgttcctcggtttctcagagcgagtgtgttttgcttttgtcgtgctggaggttggaatcctcatcattcttcatcagatactggcgggaggcaccctcctggcagatttctatcatcc

SEQ ID NO: 113705 - DNA, 646 bp, Homo sapiens
gatcaagattcggagtttgggctgcctaatagctgcaatgatactgttgtcctcactcaccgcgcaccccatcttgaggcttatcatcaccatggagatatccttcttcagcttcttcatcttactgtacagctttgccattcatagatacatacccttcatcctgtggcccattcctgacctcttcaacgacctgattgcttgtgcgttccttgtgggagccgtggtctttgctgtgagaagtcggcgatccatgaatctccactacttacttgctgtgatccttattggtgcggctggagtttttgcttttatcgatgtgtgtcttcaaagaaaccacttcagaggcaagaaggccaaaaagcatatgctggttcctcctccaggaaaggaaaaaggaccccagcagggcaagggaccagaacccgccaagccaccagaacctggcaagccaccagggccagcaaagggaaagaaatgacttggaggaggctcctggtgtctgaaacggcagtgtattttacagcaatatgtttccactctcttccttgtcttctttctggaatggttttcttttccattttcattaccacctttgcttggaaaagaatggattaatggattctaaaagcctaaaaaaaaaaaa

SEQ ID NO: 113706 - DNA, 400 bp, Homo sapiens
  misc_feature (1)...(400): n = a,t,c or g
nnnnnnnnnnnnnnnnnnnnnnnnnnnnnnnnnnnnnnnnnnnnnnnnnnnttctaaagatccctttttaccaactaattttccccaatccaccctccaatctctcctctatactgccaccagaatgagtcttgcgacctgtgactaaacatactattcccatgttcaaagcacacagttgtatttgtctgggctgccctctcctccacccttgcacttgtattataattcctacccagtctttaccacccttccaccaggcacccagcagtcagagcccctcccctggacactgtgcttttagatggcccctctctggccctcctccagtgctcacccaactcctatgtcccaccttctagaacatattctgggaacctgggacccctgaatttctgtt

SEQ ID NO: 113707 - DNA, 1287 bp, Homo sapiens
ggcacgagctcatcaaaacggagagagtggttacatgaggcaggtgtgagggacccgagcactcctgaggagggaagaacactcctcttggccatgagtgtccatcccaaagctgccctgcagcctagcccaatgcagattgaatcataaagccaaagccccttccacccgcttctctcaggcaagctgcctgcaagagagaaaagtgcattagtgcaggagcttgtgtctgctgaggatggcacctggccctctcctctcaccacgtacgggtcctcctgaggaccggtcccctgtccccgatccccagccagctcatgcctgaccaggcttttagaggctccgcaccccagcatcggccagtgctgacccttgtacggctgtttgggtccccgatcactctcataacagccctgcccttgtcctataccctctactcagagaggatccagaagggtccaaggaggccatgatccctccctgagctttttcacgcgggccccctccttcccctacgagggtccgtcctgggtcttagctggtctaagccctacacaagtcatggagagggctgtgtgtctgggacttctcgggggagagtgcactgtttcctctgagttcctggagggggtgcgccatgaagatcaggacacagccatctgcaccttccctcctcactctgggtccgaggcctgggatgagccaggacagcgggaagcaggggtggccctgggcgtggcccttccttccttcctgggcccgcaggagggggccacaccacccacccagggggctgacccgtcctcaggacagaaactagcaagctgtcaaacctgagggtttataactaaatgacggggtgctgcccctggaaattacacccagacatctcttttctcgtagacctgggccccctagcttttagacaggatgacaaatcactgacaggtgctgactttacatgcactgtggccctcatgcttcagcccatttcactgcccaggcagtcttcctagggcagcaaagagctcagccacacagcccgggcccacagtcaggatgagaccctggcgttagacctcccctcagcgccgctcaccccccattctgggcatttcaatctccaacaggagatttaaatgaagaaaacacgcacctcacacagctgtaaagggaggaactgggaatttctcccaaatcttgacccttgagttctagaaatggggttctccctggaatgcatgatggcattattctggaaggcaaaaataaagctatttaatatag

SEQ ID NO: 113708 - DNA, 1020 bp, Homo sapiens
ctgacatggcggacggcagcggctggcagccgccgcgcccctgcgaggcctaccgcgccgagtggaagctctgccgcagcgccaggcacttcctacaccactactacgtccacggcgagcggccggcctgcgaacagtggcagcgcgacctggccagctgccgcgactgggaggagcgccggaacgccgaggcccaggtgctaagtgtggtggctcacacctgtaatctcagctacttgggaggctgaggcagaagaatcacttgaggataggagtttgaggttgcagtcagctatgatcgtgccactgcactccagcctgggcaacagagcaagaccccatctctaaataaatgttttaaaaataaaaataaatgttttggataaaaccccatattaataataagtattttacattattatctggcatagactgttatatatagcatattattgttgaaatacaaaacaatatgtatccgtactgtatgtgatatagtgccattttcagtaactgctgtacacacagcaactcagatgaaactcaaggaaattcttcagagcaaaaacagccaatcttgaaaacatacatgtagcaggattccatttatgtaacattggtgaaataatgtaattatagagatggaaaacagattaaaggttaccaggggtttaggttagggatggtgagggggtggttcatacgaagggagtcctgtggtgttgaaaaccattctgtcagcctgattggtggttacacagggctatacatgaaggttaaaattgtgtagagttaggtacacaaagggagtacagatgtaactggggaaactgagtatgttctgtagactgtaccaatgtcaatttctgcgtcctgatgctgtgctctactgtataaggtgttaacattggcgggaggctggggcaagggtacccaggacctccctagacaacctcctatgcaacctcctgtgaatctataattacttcaaaataaaaagttgaaaccaaaaaaaaaaaa

SEQ ID NO: 113709 - DNA, 863 bp, Homo sapiens
ttttttttttgagaagtaaacaagaactggttttcacttttgggtaaatataaaggaaaagtgctaaatgtttaccttatgactgcgtaacagtgacatttcaattataacaccatgaactgattaaaagtacaaaatctctttatattatgcaataaaacgacaaatttcaaagtactctaaaaagatttatttatttatttattttcattttcagagacagggtctcactgtgctgcccaggctggagatcaattgtgtgatcatagctcactccagccttgaactcctgagctcaatcaatcctcccgcctcaagctcccaagtagctggggactacaggtgtgtgccaccatacctgcctatggttgttgtttatttgttttgagaccaggtcatgctgtgttgcctagacttatttttacatgtaaatcacctttaatagaggccatgtggatctaacccaaataattgcaacttaatttccatctctgattttccccttaataacctacagaatttccatcaactaatttatataatcctacttcattttggctgaatatcctatcctatgatagataccttaagactatctggtattagaaatactgtaagcattaacaaaataattaagtaccttaaagctttctcataaaatgtatttaatcttattgaccaaactcaggcacataatgtcaatttatatgatgaatttaacctgagctttatcaaacacacagtcctcaatatttgatagagatcacagcctgcacaactactttgttttcctggtctacacatagtaatcttccctttgacataacttcagtctcgcctgtattaatggtgtcatttctaga

SEQ ID NO: 113710 - DNA, 858 bp, Homo sapiens
tgacacactgcatatttcatttattttgtttactatctagtcaatgtaaacttcacaagagccaggaatgcttctgtcccttttgttataaagtatccccgggacctcataacagtgcctggcatgtactaggggttcaataagtgtttgctaataaagagatgctgagtgcatgaggccccaagtgggctgccatccacaatccccccgggaaagcgctgcctcacaccattacccccatttccacagatgaggttaatcgaggcctcagaagaggagtcccatagctagctaataagaggtgggagacagaattgaaaccccaggtctcctgactccaggggctgtgtgctttcctctctccaagcacaacagcactgggggagagtcttgtctcccaaggcaggcctgccatgaagatccagacagggaagagaagccctttttttttgtatcctgtcctgtatacccacaatatggccttaggaaggtccttggtggttaacaaggctcccaaataggacccagaacacaggtgctcaataaacatctggatggatagatggatggatggatatgaatgaatggatggctgatggatagaaaatagataaatatggatgcatgggtggatattaatgaatctgcacagacccgtgtgtggatggatgggtgataaatgaataggtaggtggatggacgggtgggtgggtggatggatgaatggatggatgagtgggtggatggatgggtagatgggtgataaatggataggtggacggatgagtgaatgggtagatgggtagatggatggaaatgaacagatggaaatggttggatgggtggataaatggttgg

SEQ ID NO: 113711 - DNA, 753 bp, Homo sapiens
  misc_feature (1)...(753): n = a,t,c or g
atgtgtgctaactaaaaaatatcatgatgatgtttccttggtaaattttacaaggaaggaataaaatttcagtgagtttgtagattatctgatggttttctgggcttgctcaggtactgtctaggccagagtatcacctctccagccagtcctcataagctcttatctttgtcagtaataataacagacataaatcctaaatgccaggagacctgtaaaatgtaaaatacagaaaacctctaatagtctagaacttctctcctagatacctaccctagaaagatattcacacatatggaaaaggaaattgtatgtatacaaggaatctttttggtatcattggaatatggatagtggaaaaatctacgacaacattaaggccctaaaaaagaatgggttaaataaaattggtagttctgagctgtggactccctgcaacatacatgaagagtggaataaatctgtatgagctgacatggcaaaatctttgtgcagtattgagtttttaaaaagcaggtttcagccgggcacagtggctcatggctgtaatcccagggatttttggaggccgagatgggtggatcagttgcggtcaggagttcaagaccagcctagccaagacggtgaaacccggcctctaattaaaattacaaaaattaggccaagcgtggtgggcaggcgcctgttattcccagctaattcgggaggctgaggccgtgggtgggtctctttgagctccggagttttnagacc

SEQ ID NO: 113712 - DNA, 669 bp, Homo sapiens
tccctattcatcaaaaagcaaaaaaagtcagcattgtacttattttattagagatgggggtcttgctgttacccagactggagtgcagtgtcacaatcatagctcactgtagccttgaaatgctaggctgaagtgatcctcctgcctcatcctctgaagtagctaggactataggcgagtgtcaccacgcgtggctaattaaaaaaatttttttcttagagatggggtcaggctggtctcaaactcctggcctgaagtaatcttcacacttcagctgggattgcaggcacaagtcaccatgcctgagccccaactacgacatatactattcccagaaacctaaatttcttcacttcaagctctaatctattcttcaaagccatttcaacacatcttttcaagcaaatcattccaagttttactagagtttaaagcgaaagcaaacatttcttaattcaaagtgcacatgtcataatgcttaatttattcaagagcagaactgttttctgcctcctcccccaattcatttagcacagtggtggacattttgttgatgggttatcaatacatttggttgatgaatcagtttcccattaacagtcttgtcatttcctgcacactatcacctgagtaacattagaaaagacctcaccaaacacgctttatgtt

SEQ ID NO: 113713 - DNA, 427 bp, Homo sapiens
aaatttctcaaggtgttccttttcccaaacactgcttttagagtgtcctgttgccaagtctattctggaattactggaaggacccactcagagaatgtctatggcctaaaacatgagacataatctgggagacatcaataagatctacaatgtcatggaatgctgcaaagtgagtattatctactctttggaaagttcatctctttagagaacttatagaaaataaattagtatgtgacattctcaaacttacagactcaagaaaaataatgtaaagatttttttaaagtctgagaagttggctgggtgcagtggctcatgcctgtaatcccagcactgtgggaggctgaggtgggcagatcacctgagctcaggagttcgagacaggcctggccaacatggtgaaaccccatctctactaagaata

SEQ ID NO: 113714 - DNA, 660 bp, Homo sapiens
ttttttttttcttaaaagatatggctttattgatatgtaatgtgcataccataaattctttgatttaaagagtacaattcagtgttgatgtttctttagtgtactcagagttgtgcaaccatcaccataatcagttttagaacatttctaataccccaaaaggaaaccctgttcccactggcagacactcttgatttcccccaagtccctcagccctagataaccactaattacctttctgtggtaatggtgatctgagtctggcttctttcatttacatgtttattttgttttgtttttttgaaatggagtctcactctgtcacccagggctggaggtgcagtggtgcaatcatggctcactgcaggcctcaaactcctcccacctcaagcgatcctcccacctcagcctcagtagctggaactataggctcgtgatactttgcctggctaaagctgagctttaaggcactagggagggcgcctacattgctcctcctgatcattgatgggctccaccccttcacagcttgtgctcagcccctaagaatccttgctactctctgtagcctttacctgaaccttactcagggctagcaggcaggggaggaaggacaggcaagaccttccacctcctcctggcagccagccaagcagccac

SEQ ID NO: 113715 - DNA, 649 bp, Homo sapiens
  misc_feature (1)...(649): n = a,t,c or g
cgtgggcatctataataagcgactgagctacatagcttttaagcttccttagagctacattaaaattttaatttactttatccttattttaatcaagacagtggttttcaaacactgaattcctacaaatccttcatgctagatagtattataattactaatttacttctgcctatccccagcctgtcactctctatccgaagctcgctgatagatacggactgtctttttttttctgttctagacagggtctcactcgagttggcccagactgaagtgaagtggcatgatcttggctcaccanagcctcaacctcccaggctcaggtaattttcccanatcagcctccagagtagctgggactacaagtggcacaccaccacacctagctagttaattttaattnggaatttttagtagagacaggggttttggccatgttggcccaggctgggtctcgaactcctggactcaagcgatttgcctgcctggacctcccaaggtgctgggggtaaatgcatgagccaccgcgcctggccaggactgtctttcataattatgaatacttagatgccaggaaattttagctttcctttacatagtatgttgtttacaaggaatctgtttttgaaccttactggttctcttt

SEQ ID NO: 113716 - DNA, 333 bp, Homo sapiens
gtatatgtaaagataacttggggatgggacgcacatgagatttacttatgttttatatataccttatacacatagtccgaatgtagttttatgcaattttttttagtagtttcgtgcatgaaaacaaagttttgattgatctgtcacacgaggtcaaatgcagaagttttcacttgtggcattatgtcagtgctcaaaaaattactgatctttggctgggtgcagtgagtggctcgtgcctgtggtcacagcaattcgggaggctgaggcaggaggatcgcttgagcccaggagttcaagaccagcctaagcaacatagtgagaccctatgtc

SEQ ID NO: 113717 - DNA, 842 bp, Homo sapiens
ggcacgagactctgcactggtacaatagtcttccttgggtgtggaaaatgtaaccctgtgatgggagactagtgaagtttgacaagttatgaaagatttatgacaaacatttttttctcctcacgggcttccgcgttatttataattacatgaatcttaaccagaggttttattgatttcataatgaattcaaataaagattgcagctcctcagcgacctttaaaggttatactggctatgcatgtgactttccagaagtatttgtcgtgataccaagttatttcttaccatggaagtattcagacttagtagggtcacttcagactgtaattatcactggcaaggcttatgaaataagggacccaaccacagtctctatcacacacacacacacacacacacacacacacacacacacacacactttatatattcagaggacttcttttataatagttcttattccaagcaagcccatgtaaggagaaatggttgtcacttttgtgagggcatataacatgagcaacctataatggatccctttttttggtgtttgccatctcttagagagatttgatttgcaaaggaagcccccaaaacgtgcctgttatccacacgaccctgtatgtctagggcaggccttgatggctgatcaacctgtcttgaagtgaatgagggagaatattttaacgtggaatgccaccttaaagcatgactttaaaaaatatcttgaggctgggcctgtaatccgagcactttgggaggccaaagtgggaggatctcttgagctcaggagttcaagcccgagcctaggcaacatagcaagagctcgcctctacaa

SEQ ID NO: 113718 - DNA, 1798 bp, Homo sapiens
  misc_feature (1)...(1798): n = a,t,c or g
agccaccacaccaggctgccccacacattgtaaagtttcgcttccctctaatgtcagattccaaagacagcagccttcatgagtcagaaagaaacatcggtcattttgaaatcaacatccaactgaagtgtagaaaggcctctggatttttgaaacggcaacaacagatgatgtaatacaaagacgcccccaccccactgctttcccactgcatgctttacatgacatggcacagcttccacgccagcagcttcaatcatgtaaagcgggatgcagtcccatcaagaccacagcattggctgagcagctactccatgctgggcaccgtcctgggcactggaagtacagcagagaacgaaaccaagaacacccccctccagaggcctgctttcaaccaggacagacagacttccatacacagagcaggaaaatgcacagcgtgtcagatgatgatgattactatgagaaaaataaagcaggcaaagagaacaggactatttggatgagggtggtgcaaattcaaataatcagacagcctttgctgggaaggtgatatctgagcaaagattcgagaaggtggggagagccccggagccttccccgcaggagcagagggaggcccgggaaggctcttgaactcatagcgggttcagcaccggccacgacacgggccacttccagacagagcccctggctagctgggtagggaccgcagcacctcagagaaaccctttctggggtcacttctgggcaccctctgcaaaacctcaagggggaacgtgaaggctgggggctgtccatcagggtcccaggcacctcctgaaggaacctctcaaagcccagccgatcaccggctccagaccccacgctgtcagacatctctgtggcccaccagaccactgccaactctcacgggtgtgatgaacatggggacctgcctactggtagtcttctgccttcgtggaattctgcaacttcccttcctgcctcggccacagcatgtcagccaagcacctgtcagggtccctccctgggcaggacgatgtttagaagctcaacaccgtgctcctggcttcttcttcagacccatcagaacttgctaccatgggtgtgttttaataaataacttcatttttngcctggtcagcaaataaataaataaataaatgtagttgcaatattgcctttaaaagcacttttaagcatcaattgtgaaataaaaagcccgagcaaaagccctctttgagcgtgaagtgtctaaacgtttatttgtactactattgttgtaaagggtagattttgtagcattttgaggtggtgattcaactgcattaacagcattcccgagaccgcctgccacgatctggaggaaacgcacggccagggcccacgtgcagggtagggtcctgccaggctcccaaaatgccccgtcccagcactcagtcccatggaggcagcaccagcctcagggaggccagcggactctgggcctgcgggtgagtccttcagcccctgcacagcccaatccatctgccacccacttggtgaccccaaattgtagtaagacaacacttccagttactcaacagcttctgaaatttaaatctctggaacaatttacagtaataagaccctaggtgcacctgtctactatccttgtcctctccctaatgaaatgggctaggcgtggtggctcatgcctgtaatctcccattttgggaggccaaggcaggagaactgcttgagcccaggtgttgggggaccagcctgggtaacatggcgagacctcacatctaat

SEQ ID NO: 113719 - DNA, 979 bp, Homo sapiens
ctcccggtccggcaagccgccaatgtgcatgttccacattcctcgggggtgttagactcacaaagcgggtacccaccgctttttgcgtcctactcaacgagccctctgcgctctcttctccacgacaaaacccccggagggctgaccatcagggccacacttttgaggccgcaatcgcggactaacaaaccccttggttcgtgaattgacacgtccagcgcatctcccacatgaagcggaatttcgcgggccagcgatccacatggctgaaccacctctttaggaagtacctgtccctcaaaatgctggttccgccccaccaggagtgcagcgattctccgttgcaatggaccttgatgacggttctgagaagacatctgaactttcatactgcattcctcaactgccgactggccagagcccaggtgctggctggttatcacgatctgggcctgcttgagagctgcaggagcagccttgctgtggcacaggctctctcagggacttgccgattcctgccctgctctgtggcgataccggccttcctttggactgtaacccttcttgaaggtttcggatgtatgaggaagggacagatgaggatggctgggacctgggagttggggaaacagattcttcctggggagaagtttcttcctcttcagtctcctcagagtgaaagtggtcacttaagccaggggttggggtgtcctcttcgttctcggagtcgttgagtggagctggtagcgggccctgctgtttttgctgttgactcctctggagttgtttgcactcctcttctacgcgggccagaagcctcttgacttcctgattggtgggacagagtttcacagcctcttgcaggtcagccagagctgccacgaattgcctgctatttctcttcgctcttgctctggcataaaaggcttcataggacttgggcttcaattcgagagccttggaagcacccacgcgtccg

SEQ ID NO: 113720 - DNA, 708 bp, Homo sapiens
tagtaaaatcaggaatcccttccactggcttgtgagtacgaggttattttctggttttcacatggcaggcccatcaaataattaacttttctggtataattcattatgagtgggctagtgaaggacaaaatatcagcaaacactttgaataaggcaacttgaatcaggatggatttaaaggtgttccacaatgcatagagtagagatggtttcttgatatgtgcctctttataacaagatacctttactttttgcctctcttgattccttaaaacttcctttctccattgtttttcaaagatgggacacggcagggcaggaagggaatcactttccctttaagttcaaaaaggatcctctctttccaaaggtctcttataggcctaaaagtaattactctgctaaaccgggggtatgtcactttaccgaaaaatgagggcacttttctctggactgcatttggatgtatcaagcgccccgcggacccgctgataggagccgcccgcgttttgcgtactggagagcatggtccgcggggcgcccggccgctggctgagagcccggctgcggctgtcacttcccttggcagcggacagtcagttcagcgccagcacggtgggaggacacgcactccgccccggcagagtcagctgtcaccttagtccctgcctttcagtcctacccagtgcgcctggggcggtgcgggca

SEQ ID NO: 113721 - DNA, 699 bp, Homo sapiens
cgcaggccgtggaacggactcgctcccttcccttcacaaaggaggaggggagagaacaagccgcggcggcggcaggccctcagccgctttcgctaggcagcgccgccgccgaaggcttcggagaaaacccggcccggagcccgcgcatctctggagcctgcgccgcctccctcccggcgtccctatccaggtctgtcccctcccggccgtaccgaggggagcgggcagcgtgaactttacccgcggctgcaaaattggccagagcctgagaccgcggccgcctcggcccagccctgaccccctggcagcgggcccggtccgttggctgctgcttagcacctctacagcacttttcgtcttcaaagccttctacggaccccgctaaagacccaaccttttttacccgtctttgcaagcccgaaagaatgactgatcattgttcagacgattcgtttcccactcgcctgccctcattagccgggtccttacaaggctctgggggcatgaggtccggattatccccattttacagaattgaaagagaggggagggaactgcctgtcacttaaagtcagagggcagaggaggggtgactttaaaaagaagtggagtcaccaaagctgccttcggtctacttgcctttaaaaaaaaaaaaatcaagttgtgagcacattcaacaatgggatcagaatatcaaaa

SEQ ID NO: 113722 - DNA, 2153 bp, Homo sapiens
  misc_feature (1)...(2153): n = a,t,c or g
cacgaacaagaaaaaaaggtcatttggtagaaactagggaaatctgaatacagtgtggacttcagttaatataaatgagaaaatggtttcattggctttaaagggattttagaatatcttactttgcatagtttcatgagcactggccaggaggttataaactggcatttaggcctctctgccatttagtagcagtatagtcattaagcaaagcattactctggactttattgtcctgtttctatcaaattggactaacaaaaattgatataatacattcatcacagtattgttaggagatttaaatgaattagtgaatgtaagatactttagaaagcatgtaaagtactagaaacaatgaggtggcttcaattagtgctcattctgagacctaaatttaaagggtcaggcattagaaacaaaagtgtttcttcatatctaggagatttggaaattctgaacctaaggtcttataggaaccaggaaatgagccaaagtgttccattgtagatactagggaaaagctttgttgaataacagtaatgatgataatatctgagctttattaagtacttactacatgcttaagagctttttaagcacttatttaatcctcattaacaaattcataaggtaggtgcttattgatagtttagccataacccagatatggcttggttatttgtaaagttatcatgaaaaaggtttatattcactattctttatttcagtgtagcacttttagagccaaaaaaaactcaggcacaaaagaagttaaataacttgccgggtgcggtggctcacccctgtaatcccagcacttttgggaggccaaagcaagcaggntnatctacctgaggtcaggagtttgagaccagccgggccaacatggtgcaacctcgtctttactaaaaatacaaaaacaaaaattagccaggggtggtggtatgcacctgcagtcccagcaacatgggaggctgaacaggagaatccgcttgaacccgcgacagggaggttgtgatgagccaaggtcatgccactgcactccagcctgggagacagagcaagactccatctcaaaaacaaaaacaaaacaaaacaacaacaaaaaaagaagttaaataacttgtttaagatcacacagctagtgcagttaccccctctcagtaattatgtttggcaaatatgaaatacaaggatctggcaaggttagggaaggaggttaaggattttcagtgaccagtactcttgaggcatctgggcatgtcagatgaaggatttaattattcagaaaaagttaagtcagctgttgccagggatcagttgttttattcctggaaaatgtttttcattttgctgcaaatctatatctgacctgctgaggaaatcgtttggtgaaatggaatccccagaaagcagagaaaatgcctccattacctttaaaatagcagcattaaagccccattatagccctctgaattggtccccttcccttgagtttgctaatgcttccaacttagtcatttgaagcccaagagtctaatttttatatgccctgccaatgtcctcatctattgcagaatgtataattaatctatttggttttgggactatatggttaccaaaaattttaanaaccataagatcccctctcctataatttccattattgggtggaacccaccattgtgctgtgttttggtgatattttatccattttctagattcttatgtggatctaataacggaccacttgaaccccagtttcacagaatcccttatttttctgttccaaattaggaattagggacatgggatggaaattgggaaatccttccattctccagtaaactatcgcaaggacaaaaaaaccaaacaccacatgttctcactcatagataggaattgaacaatgagaacacatggagacaggaaggggaacatcacactctagggactgttgtggggtgaggggaggggtgagggatagccattaggagatatacctgatgctaaatgacgagttagtgggtgcagcacaccagcatggcacatgtatacgtatgtaactaacctgcacatcgtgcacatgtaccctaaaacttaaagtataataataataaaataaaaaaaaaggaattaggcaaaacaaa

SEQ ID NO: 113723 - DNA, 1303 bp, Homo sapiens
tttttttttttactgtgcgtattaataaatattctttattttaaattttgcacattgcgctttaacattacatccaaacattttgcaagtggatgtctactttgtaaaaccatatatwtcagctcattgtcatttctgtaccggaattataagtacaacattactttttggcccactaagttgctttagtaagtctcacaggaaagagaaacatttaatgaaaagagatggcttaaatcatatggaagggcctgcgcacgcacgtcaactaaagacacaagcbctgaagaaagaactaatgaggatacctccaccgtctcccaaaacaagaaagaatcacattgatttaagataaaattttggccataagtcactaaattaagagtttttccgaaagagaaggcgcagtagtcatcgtgagtgtttcattgaaagacagagctattttatttatttaatttgctccagccgttgtcaaccagccactacaaatgggcctcttgtgatcatttaaccggcagtatttattaaatttctccttcagatgctgtcggtattgttctctattgctgtagaaagactggttattagccataaatgactgtatttcatcttgtgagataaagatttcctcatctgaagtacattcagactcatcctgcaaattaaagcagtagttaagactatgacttaagaatgcaaaatgttatgtaatggaggaggacagctaaaaattaaaccagtctaactttttagtttcacatcagtcacataaagcctttaattggagtgtttgcagaataagcatcacgtctttctgcctaagaaagtagtgagaataaaatccatctccttgagttgaaaccttgaatctataatttctcctagaagcctatgagcctagcaaactacccccatactttggccttgaaaaaataactaattaaagatgttacacctagttacccatattttaagtaggcccagacgtatcctcccagttagtccctatccttgaaacagtcatctcctacaaactaagtaaaagataacccattttcctacttaagaagtaaacttttacaaccattaaaacttttaaacattaaacttatacaggtggtggctcacacctgtaatcccagcattttgggaggctgaggcaggagaatcacctgaaccttggaggcagaggctacagtgagccaagatcgtgccactgcactctatctagcctgggcgacagagcgagactcctcaaaaaaaaaaaataaataaatattaaaactaaactttacaacca

SEQ ID NO: 113724 - DNA, 724 bp, Homo sapiens
gtcatcttgaactagaagttggcttcattcactgattctcactgccgcatgcctaaccctgcagcacccacccgagacccttagccagacgcaacaggcactttctaaagcccagcagggaggggtctcagagcctgagctcatgcctggggtcaggtggcaccttcacccaccccacagacccactgtgcaacctgaggcaccagaaccggggtgtcacccaaaagcacctgcctccaccttctccccgctctgaggcaggcccagcactcagaagcaccagaaaggtttgggggttgtaacttaaaagaaggaaaagataaatagcatgtcaacttaacttactacccaggtccctcaaaagtccaaatcccaaggcctggcttaggggaaattgcagactattgattcatccaaaggagggcagtcagaggtgacaggcaagacctgcaaccacagtctggtcaccctccctcactgggattatcccaaccaaatgccagctgattcgacttcactccatgtagaaagctcgagaattttgtcagggaattcaaccttgagttgcccgtggtccagcactactaaaggttgatttgaggcaacaaatcctcaccagtgtcaagggcatgtcaattacccattcctttgcagtattccaggtgaaagttacataaagtgcaggctgagttagggaagcactgggcaaggaggtgcactcacc

SEQ ID NO: 113725 - DNA, 399 bp, Homo sapiens
tctaaaaaatgaagggacacacatacaagtgatgtggaaaagttattcaaaacactgctcccaattttttgtaaaggcagattttaagtagacccaaactccccctttttcctaaaatccaaaagcactcctagaaaaaagtatatccccatactattaacaatgattatcacttggtagtgagagcagaggtgatttatattttattcttttgctaatacaggccttcacttttttctactatgaaaatctattatttatatcactttaaaaaaccaggccaggtgcagttactcacgcctgtaaccccagcactttgggaagctgaggcgggtggatcacttgaggtcaggagttccagaccagcctggccaacatggtgaaaccccaactctacta

SEQ ID NO: 113726 - DNA, 559 bp, Homo sapiens
cccgggtcgacgatttcgtgagaagtgaggctgagtgaggtggggtctgcagggatccaggtgggaggggcccagccagccaaggtcaggcccagccccccaaggtcaggcccagcccctcggcaggaggacggggaccgcggcctttgggcagggcctgacttgacacttttgtgtgacttgaagccccactgtgccccagccctgaaacaccccttcccctggtaaaacactcccaaaacccaggaaaagaaggaatgtacagcaacaaaataaaggcccagtcatgcaaggcccatggctgaaagtcctttcagtcattttagatgaaagactgaaatctttgccctcccaagatcagggaataagagaaggatgcccgattcttcactactttttatttcaacacagggttttgaagttcaggctggttcacagtgggcttcacacctgtaatcccagcgcttttggaagtcgaggcaggtggattacatgaggctatgagtttgagaccaccctggccaacatggcaaaaccccatctctacttaaaaaaaaaa

SEQ ID NO: 113727 - DNA, 792 bp, Homo sapiens
tttttttttttttaaacaacagagtaaagtaaaactaggtagccagaagaattgaagtagctgcctctggggattgtgactaggagggctggaaaaactatgagagacaacaggggagaaaaagaaaaatctgggaagaaattaataaatccctcacaaacattgttccttgttttttcaattccataagattaaaattcccctaggttggcccacagataaacagggctcaaccagtcccgggttccataacagattgtggaacaaaaattcctaatgaaccatccatcagacctccatccctaaatgccctgactcctaatttgggaccagaggacaagggttaacctcccagaaaacaagagtctgtcaactttctttagcagacccttatgtctttttacaagagatttttaaaaaaaaaaataatcctgtcatatttcctcacctgtacaccctagcttcttcagaggaaatggacaaatatcttgaactaagcagcattccagggaatcccctagcaaaaatacatacaataatcctgggctgggcagttgctcatgcctgtaatcccttgggaggctgaggcaggcagattgtttgagcccaggagttaaagaccagcctgggcaacacggtaaaaccccatctctacaacaaatacaaaacttagtgcacgcctataatcccagcactttgggaggccgaagcagatggatcacctaaggtcaggagttcaagaccagcctgactaacatggtgaaatccctactaaatacaaaaaaaatcagc

SEQ ID NO: 113728 - DNA, 1297 bp, Homo sapiens
cacctgcgctaggttcttgtatgctggcttttcttaaaggaacagcagagtagaaaagaggttgagaatgttttctagcaggcagaatgtgcatacatgttttcatgagtgtcctttgggtgctgtttcttttaaatcctctgtgcacagggctctggcctttagtaaactgtttttctgtcttacgtcatgctgactgggtgctaggggctgattacaaaggggaagagttgaacagacatcaggggccgatgaaaccaaaggactaggagtcaggagaacaagtcagggattaggagacagcggtttggtttattgttatccagctggaggactcctaggggcagcagcaggaggaataccacggcgcccgggggggcccgggaatctcacaggggagggcagactctaacagatgccagctgaacgctcgctggccctggatgtcatacgagttggggaccagaaatctgggctcagagaacccgtccagggagatttgaagccatgggttatcttctagagttgatactgataatatattttaatttttatcgatgtttaataccttctgaaacaggagggtaagatcagatgggaagcccctctgttggaggatctcgggaaccttggtggttttttttttttggtttttttttttttgatcgagctgtggacatccttcttaattcgattctgaggatttgtttaactaaaaagttcccaaacacagaaagggcctccccacctgctttggggagctgtctgtgctgggagtgccaggcatcccatgggacccatcactgccagtgtctgtgcctcccagaggtcagccctgtgtctgccctggctctgtctcctctgtgacagggcagagcatttctggtcagtttctccatggtgcctcccacccctttgtaaagtggatggacatgatggaattcagttgtctcaccctgatagcctgggtgtttgatattcactttacccgcactcgagacacaggcgaccttgaagcagttctcggtgtgtagagtccacgtgacagtccccacagcctccccggatagctgtgtgcctgtgcgctactgctgtgcscgttttcccaacttgggcgttcactaaatgcagctgatctctctctctgtgcactcgtgatccatgttgaacaatacatgttggttctttttccacgcaatgtaagaacatgatatactgtacgttggaaaaaaawttaccgtatttatataccgtgaatgttcctactacacaaataaacatatattaaattctaaaa

SEQ ID NO: 113729 - DNA, 867 bp, Homo sapiens
ggcacgaggccagataagtgcagggaacacttgctggctgtcagcagttttctttttgccttgatctggggctttggagcccaccttccctccaggtacctaccaggatgggggatgggagatgcagagggctgagatggactggcccatggaagtaaaaacccacatgacatcactgttagggtatggtggagtgtgtgagtgtgtcataaatggaagtgttgtaactgtctgacgcttttgcctgtgtgtccatctgagcaggttctggcccatctttgataccttcataagggattctattagtcgcctctccaactaccctgagccaccaccctcagccttggtgtttgatctacatgtaagccctgaagatggaacactggtccccttcactgggccaatacctgaggcagccacatcaaaggaactttggggcaccttttcacccttctatccaggtactgaacgggtttttgtatgtgatggacctgcttctgttcaggggggacagccagtgttgctggttgggagaaggcagcaacaggggaagtcagcctttgtggaggtgctggtagagccacatcacccttacatatacagcccccatccaccctgccttcagttcctcccacctccgtctcctgctgagcagaggaatcccagggccaaacacaagcccagcccacagccctgggcatcaccaggattctaaaccctccctcctcttcttgctggaggacctgcacctagccacttctggtgaggagctgcgaagagggaaggaaggagctactgtcatctcttgagactataaaatccctagcaatattcattgactctcaaatatatgtctgtagatctaaa

SEQ ID NO: 113730 - DNA, 507 bp, Homo sapiens
gtttgacccatttaaaaaatggcttgtggtttataagacaaattgtttgagaatctgaatgtacgtacttctacctcatcacctagaacaaagaaagtctaaataatcatagattgttttgtagttggcatctcacctcataacttttaaaagagaggggtctcaatttgtcacgtttgctgcctaggtaatgtagtgacttattttatgctgcaaatgtctgcttgtttaggatttctgatataggctggcatgatttcattcttgtagacttacgaccaaattactctgtgctgattctgaaaagatttgtctttttggtgcatgtataagaacataagttgcctgatcttaagagtttttttctgattgggtatggtggctcatgcctgtagtcccagcagtttgggagacctaggtgggaggattgcttgaggccagcagtttgagacgagcctggtagcctggtcaacatagtgagaccgtggctctatttaaaaaaaaaaa

SEQ ID NO: 113731 - DNA, 584 bp, Homo sapiens
gcgggaattccgggcctctgtgggtgggttggggccttcctcgccctcggccggtccaccactcaccattgtctgtcccagtagagcccgaaggcgggggcgcgggagggcttctggctggggcgaagagggcttgagggctcagtcgggatgctgtgatcgcacgcggtaaacctccagtagatcaagaagctgtacaaagtgcccgacttcccctcgaaacgcctgcccaactggaggaccagagggttggaacagcgccggcagggcttggaggcttacatccaggtatgcgagagcacagttggttgccccccggccttctgtgccaggggtgtggcccagacagagaggtgtgggggcatggcagggagggaacccacaacttggggatgttatttcaccacctcaagcattcaatttttcttgagtcttaatattaggtccaaacacccccttttgggttttttgaaaggactgaaagaggtaacggacacaggtagtcccagctccatgaaacccaggtcctgtcccctccatggtgaggtcctgtgctgccctcctgatggcatgtagggtgaggg

SEQ ID NO: 113732 - DNA, 389 bp, Homo sapiens
  misc_feature (1)...(389): n = a,t,c or g
ggcaaaatcccataataaaaccaccttggtctggacatttctttttcacgatatttaatgacaaaatcagaattatttctttagtagttatagaactatttaggtgatctgttttatcttgcctgagattgggcagattgtgtttttttaagaaatagattagttttgctaagttgttgaattcataacagtaaagttattcataattttcccttattatccttttattgcctttagattctgttgagataggttatttaaacctttggagatatacttatctatggaggaataagacacaggccgttgtnnnnnnnnnnnnnnnnnnnnnnnnnnnnnnnnnnnnnnnnnncaaataaaatttctgaccttgtaatgttgccgaccgg

SEQ ID NO: 113733 - DNA, 592 bp, Homo sapiens
ttttgcctaagatacaatgataagtaaaaacatgttacagagtaataacgtgttgcataggacaatactgtaaatgtggttcattccatcaacagacactgagccctgcgacgtgcctggctctattctacatctgagggacacaaggtgaacaagaccaggccactgtattcaacatctacatttaatggaaatttttgaaagaagacttgagagtttataaacagtggtcttccagcatccagggagtaggccctagaagaagaggaggtccaagaagtggcttttcttattatcttcttaactcttcaaaatttttactatgaagccaattattattttttattaaaattttaggccaggcttatggctgtaatcctagcagtttgggaggccaaggtgagcggatcacttgaggttgggagttcgagaccagcctgaccaacatggagaaactctgtctctacttaaaaaaaaatacaaaattagccaggcatggtggcacatgcctgtagtcccagctactcaggagactgaggcaggggaattgcctgaacctgggagacagaggttgcaatgagccaagatcacg

SEQ ID NO: 113734 - DNA, 2018 bp, Homo sapiens
atcgcccccccatcaatagtccccgcgctgcaggaattcggcacgagcatacttctaaggaattttcttgctataagctggagtttaggtgatgtataggttcagttgagacatttttggaacaggcaaatccttagttaacataagatatttaacagttgaagatagtgtcatggatttttatcttttttagcaagtaatgctaagaaccactggcctgagctactactcttcagtatacattattaggattgcatagacttactagaggaacagtttcaggttttgatgctaatcagtgttgtgtcctaaagttgtcctttgtgcctttaaaaagttttggatatatcttctagtttaaaattgcttattaaggaattcattttataattgcagtgggaaagtaatggtcaagtaacactaggtagactatcatgcctgtttagcccagagaatttggggggagagagaatagataaaaatggcacccagaaaaatgttaaaatctttagtcaagactagaattaatacaattgtctacacttgtatggcagaaataaccttataaagtgtttaaggaattcagagaagggaatgtaccaaataagcaacagggagaaaattaggtaagaagtaagatacgaacgagaaacctgatttattgctcatccttcccttgcctccctaatggcaagcaaaactctgaacatctgaaaaggatgtagttctggacaaatcctgactacccagaggaaactcactgtgagattgctgttgatttgaagggtgctttcactaaggttatattttaaagtagaataacacatgctgagtgtaaactggctttggattggtcagctgcagtagtacaaaaacagcatagaatttgagaaaactaaaactgctatgagatagctatgagaaaactaaaactgctatgagatagaaatgatgtaaaattatgtggaaagttttccctcatatactcacatacagcctttgaagggctctggctctgaccggttgatggccttgagcgagatgaaatcatgaaattgagtcaaatcaatttgacattgaaatgacaagaggaaactcttaaatacataaaaacaagctctcatttgcctaggatagatactgtcttaaaaataaagactgaacctagatgttctgagcactagcaacaaggtattttaacaagtttaaaggaattctctgaaaaagttataaaattattctaggaaacataaccataatagtgttttaagggactttcacctggggattttatattcatgaacagagtgtattctgtatttaaaatgtctcatttgtgggaattggatgacatgttttttgataaatttattcacaatataaattgactttttattctaggaccatgtgaataatgggttccattgcacaaatacaaatattttaatagcttcttaggcagtggtgtagacatcttggatataaataattgtagatcttgtatatttgatttttaaaaaactagaataaacagagaggcataaacatatcttagagtccaagtggtagtgtttagcattggatataataaatggatgttttacaaagtgcttccataattctcttcctatacataaatgtcttgttttcaaaagtggatggaacttggctgggtgtggtggctcacgcctgtaatcctagcactttgggaggccaaggcgggaggatcacttgagctcaggagtttgagaccatcctgggcaacatagtgagacctggtctcttgaaaaaaaaaaaggggatggaacttgtaccaaaaaattttatttacttctcaacctgcttaaaaatacccatttgagatgttcccctggaaagatgaacacaatactgcatctgaagccattttttcccacctaacattcttaaaatgattagagtctaaactttgccattcattcctaattctggagctctgaggttgaggggttcaaagtttggtgaataattgggtttaa

SEQ ID NO: 113735 - DNA, 369 bp, Homo sapiens
atctggtcgatcgtttcctggccctcgcctcctgcgctgtgtccctggaattcttgcacgtcgcccaagatgtctgatgctgacgttgagaaagctgccaaggatgttacgcaccttaagaccattccttcggatgaggagatgctgctcatctatggccactactatcaagcaactgggggcgacataaatacagaacgggccggcatgttggacttcactggcaatgacacgtgggatgcctggaatgagctgaaagggacttccaaggaagatgccatgctagcttacatcagcaaagttgtatagctattgaaaaaatacgggatattgagagactggacttgatactgtgccatgcgatatgcc

SEQ ID NO: 113736 - DNA, 469 bp, Homo sapiens
gcctccggtacttgcaagcctcgctcagtcttaagcaagaggggatggattcgcccgcagcactgagaatccaggggcaggcgggatggcgttcaggcgctgttgctagaaatctctgtctttactctgttttgaaggcagcatggcagggtgaacacaaagcacagactgaaggcagcttgcccgggggttcaacatcccctggtcacacccacttcccttacccatgtcacgtgggcaaaattatgtaacttctctgagcttgctttcctcctcttgaaaatgggggttaacaatggataataccccactttccatagggattgttgttaagagactataaatgaggctgggtgtgatggctcacacctgtaatcccagcactttgggaggccaaggtaggaaggattgctagaggccaagagttggagaacagcctgggcagcaaagcaagaccccgttttgtaca

SEQ ID NO: 113737 - DNA, 398 bp, Homo sapiens
  misc_feature (1)...(398): n = a,t,c or g
cgcggcgctcgaaggaccatggacgattcttgcgtgagacagatcaagatcaataccggcgtggtgaagcggttggtcaaagaaaaagtgatgtatgaaaaagatgcctaacatcttgaagaaaagattgaaccattgagagctgaagacggtgaatattattacattaaaaagcaggcggagatccttctacaatcccggatgatgatcccttattgccagcgcaagttgtaagccgcatatttggatcttcttcggattcttgaaaatgataaagacttggacgattctgtggaatataaagaagcacgcctactactggattcagtgaagttagaagcctgaaacttttcttgtatggggtggttttcgcattaaatactgatgtccattttacn

SEQ ID NO: 113738 - DNA, 1056 bp, Homo sapiens
ccttaagagataattatctaaaacaaatataccaatatatacaagaatttataatgtatgtagcagtaaaatgtataacaacaatagcaaaaatggggagtatacaaaataaatgcatactcttttaaggttctgacaccacaggaaaatattatcaattgaaaaccggccaggtgcggtggctcggccaataaaaaattattaatccaaaagaaagcaggaagaagaaaaaaggagcaaagaactgacaggtcaccctgggaagggtttaggagggacggcaccctttcaccaccactgtgaggaaatcaatttgtgagggtgagggcccaggcatctttgctctgtgggttgcttctctttggtagggtcaggaaattacagttgggggacttgcttacccatcaactgggatcccctaaatgccaatggggataaaggaatccccgggggtggcagggccccaagtaagccagcaccatgccaaatccaaggtgggcatagttaccataataaatagtggagccaaagcagtaatcagaatagtctgacttgctgagacctatagcattgggtggttgatcatggtgtccctaaaaaagaaatagatgggccatcctactaactcttacttgatctgtataagcagaagaattctaggtctggtaaaacagaagtataatttgaaatcacctgaagagagtcatggccccttaagcaattccccagaaatgaagctagtttacagacccagaatctcccttaaatgaaaagggaaagctgtgtccctcttgaaggaagactttcctgtttatctttctcctacccttccccaaagggacctatggctatttgccttgcagaaggggaaacaatgattttttggggattactagacactggcttctgaactaacactaattctaggggacccaaacttcgctgtggtccagcagtcagagtaggggcttatgaagtcaagtgatcaatggagttttagctcaggtctgtctcagtgggcctagcaggtccctgagcccatcctgcggttatttt

SEQ ID NO: 113739 - DNA, 1726 bp, Homo sapiens
  misc_feature (1)...(1726): n = a,t,c or g
attgatcgccttaggaattcgtcgcgagctcatatctgcagagaacccattgatcaccttgtgccctcttttggggcagcctgttgaaactgaagcacagtctgaccactcacgataaagcagatttttctctgcctctgccacaaggtttcagagtagtgtagtccaagtagagggtggggcacccttttctcgccgcaagaagcccattcctatggaagtctagcaaagcaatacgactcagcccagcactctctgccccaggactcatggctctgctgtgccttccatcctgggctcccttctctcctgtgaccttaagaactttgtctggtggctttgctggaacattgtcactgttttcactgtcatgcagggagcccagcactgtggccaggatggcagagacttccttgtcatcatggagaagtgccagcaggggactgggaaaagcactctacccagacctcacctcccttcctccttttgcccatgaacaagatgcagtggccctaggggttccactagtgtctgctttcctttattattgcactgtgtgaggtttttttgtaaatccttgtattcctattttttttaaagnnnnnnnnnnnnccttaagctgcatttgttactgaaatgattaatgcactgatgggtcctgaattcaccttgagaaagacccaaaggccagtcagggggtggggggaactcagctaaatagacctagttactgccctgctaggccatgctgtactgtgagcccctcctcactctctaccaaccctaaaccctgaggacaggggaggaacccacagcttccttctcctgccagctgcagatggtttgccttgcctttccaccccctaattgtcaaccacaaaaatgagaaattcctcttctagctcagccttgagtccattgccaaattttcagcacacctgccagcaacttgggggaataagcgaaggtttccctacaagagggaaagaaggcaaaaacggcacagctatctccaaacacatctgagttcatttcaaaagtgaccaagggaatctccgcacaaaagtgcagattgaggaattgtgatgggtcattcccaagaatcccccaaggggcatcccaaatccctgaggagtaacagctgcaaacctggtcagttctcagtgagagccagctcacttatagctttgctgctagaacctgttgtggctgcatttcctggtggccagtgacaactgtgtaaccagaatagctgcatggcgctgaccctttggccggaacttggtctcttggctccctccttggccacccaccacctctcgcacagcccctctgtttttacaccaataacaagaattaagggggaagccctggcagctatacgttttcaaccagactcctttgccgggacccagcccgccaccctgctcgcctccgtcaaacccccggccaatgcagtgagcaccatgtagctcccttgatttaaaaaaaatactgtataaataaaaaacggaaaaaaatttctccccccacccaaaactaaaaaaactattctatggattgtttctttctaaaggactgacgttcactcaaatatctgaaaatactagaggtcaaaaccttgacaaatgttaacttctaagctcggtttggaannnnnnnnnnnnaataaaaataaagatgtttttgtttttaaggaaaagcggtgcattgcaaaggtttggtt

SEQ ID NO: 113740 - DNA, 648 bp, Homo sapiens
gccgctccttggtgggggctgttcatggcggttccggggtctccaacatttttcccggctgtggtcctaaatctgtccaaagcagaggcagtggagcttgaggttcttgctggtgtgaaatgactgagtacaaactggtggtggttggagcaggtggtgttgggaaaagcgcactgacaatccagctaatccagaaccactttgtagatgaatatgatcccaccatagaggattcttacagaaaacaagtggttatagatggtgaaacctgtttgttggacatactggatacagctggacaagaagagtacagtgccatgagagaccaatacatgaggacaggcgaaggcttcctctgtgtatttgccatcaataatagcaagtcatttgcggatattaacctctacaggtactaggagcattattttctctgaaaggatgatctttgtgttctgaatctttatggggaaatgaggttaccacactagggaagatagagctttttaattatgggaagagttggttttaggttgtttgacattgagaatctagggtaattactgaaagttaatactggaatttattttacataatatactgttactataaagtttgataatacgtaagtgaagcttgctactgggaatg

SEQ ID NO: 113741 - DNA, 462 bp, Homo sapiens
  misc_feature (1)...(462): n = a,t,c or g
ctgaaataactgatttgaagacaatgaatagaaaattaattagaataatgtgaatttgtatagatgtcgagaaatgactgcaattttgtgggaccgggttttggggcttctatgaagggaagatcttgtgcaaaaaatttgtgtatccagctgtagttgctgccatcttttaaaagcatgatgcctctgtcaatagatctgacattaatatgatataattacatattgatggactcattttattagaagcacttgcctttttcttggttatttgacttatacttgacggccagtttctcatgtatagaaatgtgtagcctggccatgtgcagtggctcatgcctgtaatcccagcaatttgggaggcctaggagggtggatcacctgaggtcaggagttcgagaccgcagttgccagcctggccaacatggtgaaaccccatctctactaaaaaanntttca

SEQ ID NO: 113742 - DNA, 957 bp, Homo sapiens
ttttttttattattttgggaggctatgtttttctagggatttctcagtttcaccacaattttaaatgacataattattgattatattccttattaatctattcgatatctatataacttgatggatgtttcatttttcttcctaatagtgaaaatttgtgtctttgcttctatttatgatgtcatgctaaagggcctatcaattttattgttcttttcaaataatacactttgggttttgtttattttttctagtgaacatctgttttatatttttctgctcctatattcattctacattttaatccccataagacattaaattattgacatatatggtgaatatttacttacatttaccctcatatcatctctttttatttttctttattattttctcatgtttccatgcttctgtgtgggaccatttttcttttgtctgcggaattccttttagtatttcttttagttcacatctgctaatgatgaatattttcactcttgtttatctagaaatgtcttcaatttgccttcatttttgaatagtatttttgcttggtacagagttctagatgggcaattattttctttcagcaccttttgcttttcatattttttctttttctttttttttaaaaatgtggtctaagttccccaggctggtctcaaattcctgggctcaagtgatactcctgcctcatccttccatgtagcctgagattacaggtgtgagctaccatacccaactctttcagcactttttaaatgttatttcattgtcttcccatcttccatcatctcagctgaggagtgaatttaagtcttttgttgcttttacaactactatgctttttttaaaatctaactgcctgaaagattttcacttgtctttggttttaacagtttggctataatgtgcttaggttgtatttttaaaattcatcttactttgggtttg

SEQ ID NO: 113743 - DNA, 499 bp, Homo sapiens
agctgggattggaacccaggtctccaagaccagacctcaggctctctgaactgcctggcgttccaaggctatccctggagtgtggagccgagactggaatgctgtccctggctgcagggtctggcttcagattcccagctcaaccccagatgtcaatcccctcgtgggccccaactccaggacccaagccaggggtctctgcctgcatcccctcctgggcagtgggtcagatacacaaggaagagagaaagaggtatagacgaagacagggaatgagaaatacaaggagacagaaagaggcagaaacagagagacacagagagagacagaactcaagagggacaaactcatctcccatgcctccctccctcgtgggggccttggaacctccttgccagcacccctgacccattcccaccatcaccattgactccctccaggaaaagattgatccactgccccccaccccacatggtcctgggctggaatcccagcccag

SEQ ID NO: 113744 - DNA, 487 bp, Homo sapiens
  misc_feature (1)...(487): n = a,t,c or g
caataaccgtcgaccatgatcacggattcgctggccgtccccgtacaacgtcgagactgggactaccctggtgtgacccaggaaaatctgcttgtacaacagcctagtctatggcagnctgctggggcagcctgagctgactaatacagtatacctccccggcaaaatattctaactnnnnnnnnnnnnnnnnnnnnnnnnnnnnnnnnnnnnnnnnnnnnnnnnnnnnnnnnnnnnnnnnnnnnnnnnnnnnnnnnnnnnnnnnnnnnnnnnnnnnnnnnnnnnnnnnnnnnnnnnnnnnnnnnnnnnnnnnnnnnnnnnnnnnnnnnnnnnnnnnnnnnnnnnnnnnnnnnnnnnnnnnnnnnnnnnnnnnnnnnnnnnnnnnnnnnnnnnnnnnnnnnnnnnnnnnnnnnnnnnnnnnnnnnnnnnnnnnnnnnnnnnnnnnnnnnnnnnnnnnnnnnnnnnnnnnnnnnnnnnnnnnnnnttn

SEQ ID NO: 113745 - DNA, 435 bp, Homo sapiens
tgtaagcatcgctacccgagtccaggatggtttttcataggaaagtgaagggatactgcaggcctgtgtttgcagcgcctgtggtaactgtggaatgagctctgttagggacagttgtctggtttgtgccaaaccttcgaggggcgagtagggagtgggggaggtgggtccaagtcttcctcaggaaggccttttctatcggcagcaattccatcaagccaagcctcctgtggtcctgagcatgaaggggccaggggacctcctgggagatgcagcttttgtttccgctgcgtttcatcagtcaggcttgcttggaattctggcagggtccccggcgtgcttaagaggacaggaggaccccgtgccgtgggtgagtctgtcctggtaccctcatgaccaacgagggcctccctgatgatctggtcccccacgaac

SEQ ID NO: 113746 - DNA, 707 bp, Homo sapiens
  misc_feature (1)...(707): n = a,t,c or g
acccaaggcactggcattgattctccattggtcgatctgtgctaacacaaaagcagacatcactttcttagaatgacatcagcatgtggctgtaaaaggtcttggggtcactgagcactgtcttccctccatgtgtggggcaacagggaactggggagacagacaagcttgtcacttgatttaactggtccctgaggagctggactgagcatcatcccgtagctctcctcccagtgggctctgcccaggaaaccaggtgccgactctccaggctgccttggtttctaccaggctgcagaggcagtgcagacacagctggatctcagggaggctctgcccaggaaaccaggtgccgactctccaggctgccttggtttctaccaggctgcagaggcagtgcagacacagctggatctcanggaggctctgcccaggaaaccaggtgccgactctccaagctggcttggtttctacctggctgcagaagcagtgcagacacagcttgattctctataagtcnaactgcangcatgcgaacttgggacttgtcgccgttttaaacacgccgggagggaaaaaactggtggtgtccccccccaccacttattaataataaaaaaccgcccccnnnnnnnnnnnnnnnnnnnnnnngcccccgnnnnnnnnnnnnnnnnacaaatatattatattgtggggagagggccggt

SEQ ID NO: 113747 - DNA, 958 bp, Homo sapiens
tacgaattcaatctccgtacccggagatcctgtcgatcagctgcaagcgctcctaacgacaaaaaggaagaatatttataaacatttatttctctcttcttattcttttaaatcttatccgtacactaggacccacagacaaattcctttagtttccctgtttcctggctgcgaaataaaatctggggttgtgaggacccagaaacctgtagttttccaccagaaagtttaatgcaattgacaggaagggacagccctgcacaggcatctttgaaaatgccagacgtcaatccagctgagtcctaggacagaaacagcccgataaggtgtgcacacagctcgtgatattcagtttcatagatccttccatgaggggtccagcagcaaccactgggggacagtgaggaggggagagaagtcaccgagctgcatgccccgaagaggtggtttcactgggaggcggatgtggggatgggggaagcttgctactgcaagaaaccgcccttgtgaacgagcgccatgaaagccgtggttgctccctgcagacgtccttctatcctccgatcctccgggcagtgcttcccaatgtcggcacgataacgctctgtgttgtttccgaggatgtgtcatctgagtggacgtgagagggagcccagtggcgtcagggcagggaagtccaggagtgggtggctggctgcagaacaacaggaccagagtgtctggaatgaccccatggcacggaactcagatctgtcagacacaatcagaccagccagttggttccaaacaaaaaaaatctagggggaggaagagagtaaagagaggacaaacctcgggctgaacgagatgaagaggctcatcagcagctgccaggcgggccccttctctggatcctgattcaaataaaagccaacaagagacagtgagcccttcaggggaatgtggaccctgaccaagg

SEQ ID NO: 113748 - DNA, 1069 bp, Homo sapiens
tttggtactttagaacaaaaaatttccccccgtatgagtatttggagcttaaaaaccaaaagaattaaccctggggtataagtgtcggaacttagagaaacaaaagaatttctggtggggtttttgcttcagtttaaaaatatttttgataaaaaggcctgggcctttgggcctcttaagccctttgggaaaggccgtttttccaatctccaggggtccccccggggaattttttctcctttcgggaggaataaagttaaattttgaaggcgtcccaggcaatgattttttgggccccttccggacctcttccccagccatgtgtgtcagccccctatccaggaaggccctcgtggtggctgccgatctgggaaacgcctgcactccactcacgttgcagaataaacctttgcgataggatttgtaggttttccccacaattcttcccattgcaagtgagatcagcggttcttcttttcagagatttctatgggaggaagccaaccccacgatatcctctccattggcaaagatcaccatgactttcacaaaagcctgtactcagtagagacatgactgaggggaccaggggctcagggagaggaggaaagaggccggaagctgggaatgatgacagccagagaaggggacctgcgggtctctgagcagctgcagaacacggcccctgtcctgatcatgccccagggaaggtctgcagacttgagcgaatcctgcatgcagaaggggacctggggatctcataacaagcccgaggggaccaatgaagggacccaagggccattaaccgggaaggtttccccaaagcctcccaaacctcctgggagtcctggctttggtattgccttgggtttaacctgaaatgacagaggctgaatttcacagtacaccacgcaggaggggtgggaacttataatggaagttgatttaaaaaaaaatgggatttctttgacacgtcgggatataataaatgaacatgtgcccatagacatctgataagatgctgggtggccctgagtagattgcctcagaaggactctacagaaaaggt

SEQ ID NO: 113749 - DNA, 1402 bp, Homo sapiens
accatgccttcctcctggtgggcctccagctgaccctgtgaaatcgagaggtcaagtctgctagccccgtggagtgagtctgagtggggcctgttgggtccacgtggcgtccagctggagcgccattcagtggctgcaacacagtagcaggctttgctccaaatcacaggcgtctccagcaaccaaacaccagcaacccaactgcctgccattttccaatcatcctggctcctttgtgagcccagaaaatggccattccaaagacacaggcatggtgcgcctgccgaggggccattgagctctgtgtcctaaaggagacatgggcaggctggcgaggggaggcacaggatccatccccccaggcccatcagaacctgctggaacctttctcgatgtcttcaagctatggcatggggccccactgcctgcctgcagcctgaccctggttctgagtctgtgcctcctcttagctctgctgtcctggaaaggcaccttctgcttctccaagcaacttggtccttctggagcttccaggctcagctgcagccccgcagctccgaaagtgcatcccagcggcctgctctgaggggtcccacgggtgcctgggcactgggccctcgtcaccccacagccagcaggagctgctaacacagcgacccccccacatggcctcaggggctgccagggagttcaggctctctgggatcagtcccaggaggactgccccccgccttgcccatcagggattggagggggtgacagagggtgagggctgggatgaagcttagagacactgcgtgccccaggaaccagcagcctcacagctcttgaaattaaagaaactcacgatcctgcacagtgatataacgcatgagggatgaacacttatatcaacccacaggaaataaccagactgacatcttggccctacgagttgtcccacaatctgagaataagggaaaagacgacagcccccatggtggagactgctgactccacacacatgccccgtggcaccaaaccccatcctgcggcactacgccgcgcccagagtccagtgaaccccggcgggcaggaattcaggcaatgcgtcttcagtggatgggagatcccttctcccatggcatcgcctcttatttcagttgaaaatcacatcagggacaggggccagaggactccagcctacacaggggcgctgcagggcctgagagctgaggagaggactgtgtcctcaggctgggcacgcagggctggggtcccgagggaggcgacacggtgcgggaggctggggtccccagggaggcgacttggcgccgaagccagtagtctgcatggaggctagcgcggtcccagtcgctgcgttgtacgggtacggacatggaatctcgtaatcatggtcata

SEQ ID NO: 113750 - DNA, 1062 bp, Homo sapiens
tgattacgagattccatgtccgtacccggagatcagagccactggcaaaagcttagaaggaaggcgaatttcccgtgtccgaccaattcccatgtaattcatgggagctgggcactgcagacaccaggctgtgatggaaggtggcggtggggtcctgcagcgtgaccaggtagtctctccagtcacagccgctgtgacaaatagcgtctttaccagaacagatcagcacagctgccgattcacgcaactgcacttttctccacaccctatccatggagagaagacagtttgtgttgacttggcgaggactgcagtacacttactgccttgcccactgtgctgtcaacgctggctatactataaggccacagggtctttacatgtgtcgatgatctcatgctgcctggacctgggagaacccaggtgacctaggaatgcaggtacctgcctcaagctgggagatatcggaggcctgccacatcattgaagcttctggggtttcagcatctgagcatgccctgatacaccctatgaggtaaagggcaaaaccataccccacgctccatgccattctggggagcagtgactgggggacctctggagtttggacccagcatgcactacacatgggaagactgctccaactcatttctggggagcctctaaggctggcggttttgaatggggccaagagcggggaaaagcctgctgagccacttttcaagcccagacgccttgcccggcctcatggtaatgcaagatatgactatgctgagacgttgctgtaacagcacggcccacagagctgcggagccaggctctcagttatctcccgtttgaaaaaatggagcttgggtggtactaggcccagtcaaaattgggcgccaggatccctgcagaggccactgtctctgctcgggtggcaaaccacaccgtcatagcatgggcagcctcgtcacgttgatttcaccctgtgctggaggttaagtcagatccggtttacggcacggttggctcgtcggcagggctccttcctggcccgcagccagcctcctttgtacc

SEQ ID NO: 113751 - DNA, 768 bp, Homo sapiens
cttagcactgcatcgcgctgctaacactatgagaattaaacagcgattggacaaacccagggtaaagggccatttgcaggtggagaaaaagagatacttcccctcccctaaagcatccaggtgactgtgactggcaccgtgcggcagctcagcgtccatggcatgtcttcccatctgctcctgacggccctgacagacaggtgggtgccccctgccacgttgggggtgctgcaccaagcacccggctcagcgtctctactggttcgcccagtgctgctttgttatggcgccagagctgggacggggccagccacccccaccggtatgctgactcctccactggcacagtcactccaggaacaccgaagcctcagagcctcaggtgcctttttcttccaaatatggcgccgcatctcccaacccgctcaacccaagcccagatcacatgcagctcccaggccggcactgttctgacagcatatggccattcgggacggatccccccgcagctgctgccctcgctgtcagcaaggcggacacatacccagggctcgaatcttgtgggctcaggtcctgtgggctgccccagcccctggccacagttcccctgcacaacgggaatgacaggatgaatatcatgttttcagagagcagatttctgcttctttctaaaattgtctgcaggtcgattgatatgtggtaacgccaggatattcccattcatctcgttgtacggggcgcgacatggaatacacgtaagcatggtca

SEQ ID NO: 113752 - DNA, 1387 bp, Homo sapiens
  misc_feature (1)...(1387): n = a,t,c or g
gaggtggaccgtgcttacggatttaatggccgtacccggacaacctagggactgagaatgccctggcaccccctacccaagttgttttgctaaaaagacctgatgccccatgatgcgcaccagcccgatggccgctcgctgattggattctgaggaatctgttgttggccaactcctgggtccctcccagcagctttcgatggatcaaagcttgactcccatgtcgcgttgaactcaggagtgagttcatgccggtttttgagccacctcttttctaacaaagctgcggattctgcagcattttgcaaacagagacgccctagtctctctgccaaacaccgagtgagctgcacgctgccttcctcattggcagcattgtgggttacagaatgtttctacacacacgcttctcccaggctgccaccctgtacgtattcatcacgccctttaaatatgaccgaaattctgtcggcttcctgactaatggtgccgtgtatctaaacatctaagcattttcaaggcagacacctaatgatttcaaattgactttggggtctcctttgctgcttgcacacagcggatcaagaatctgctgaatcataatccaaggattgtgataatgtggtcccagaaaaggcccatttcatagtaaaaactggtttgtaaaaattattatcagaagcatcacctttttgcagcaaactaagcaatttaattaatgaaaaagtgtccccagagaaacacaaattgcatcattagaaaaataaaatgagaccgattgttgaagagttgtctaggatccttatgtgactggtaaccagcaaacgctgaaggcccccgttctttggacgtcagcaggctgtgccagcgttgggcactggtgaaaattggttttgcgagggagttctgtgatgccgtgagcccgggtgcctgcactctggtcgttggacgtcagcaggctgtgccaggccgtgctctggtgaaatcggttttgcgagggagctctatgatgctgtgagcccgggtgcctgcactctggtcgttggacgtcagcaggctgtgcactggtgaaatcggttttgccagggagctctgtgatgccgatgagcccggtgcctgccctccggccccgagcggtctctcagtgacaacacatcacagcacactaatgagcgctggcgcccaggcctgcaattagcctttcccgagttcagaggtttgcttggctctgggcctgcagatcacagggcttcatttcaatgtggtcatctttgttccctccgtgcccctagtgatttgataaaagactcctattttattgaagttgcaagatttttcagtgtatcctatattcaagcagatgaaatccgttggagtagncnttttg

SEQ ID NO: 113753 - DNA, 716 bp, Homo sapiens
gacctcattacgaattcaagctccgtacccggagatctggggcaccgtgaaaggacacgagagttgcggtgcttacacacctcacttccaatcccgtagtggaacagcaggtccgggaggagcttctcatccccttttaagccactctggacacagacgcacaaccctgcacaatccttccgcagcccctcgagtttctggtctggatctctcctgcactgacacccagccaccagctgccccatccgtccagtgtgagtcctaaaacgcctccttgagacaaagcggtgacctccgcttccaggagccacgtgtgcctgccccccacactctgtgttccctgtcctgtggcccaagcccccccccatttcctgactgcaaagcctgtgttgtgaggggctcctccacaactgggcctgcctctgggccaccgcttccccccggccccgactgccacagaatcctctcccaccttgagtaccgtcacacagggcttggcaggatctcgctggtgctcaccgagcccgttcgtgtaatcagggaccgtctgcaggagtgcaggagctgggcctgtgccttcgagcctctcactgtctccccggctggactcctccatcaccccccagttgtcctgggcctcaatgcgtctaagttgggaacagctatggttccgtgccagtcagggagatctccgggtacggacatcgaattcgtaa

SEQ ID NO: 113754 - DNA, 1636 bp, Homo sapiens
cttcagctctgtacccggggatcaccaaaatagttgatatggagggggcttacagttggagaccagtatgctgggtgagaacactgtgagcgtgtgtgtgcacgtgggtatgctctgtatcgtgtgcctgtgcggcgtgcgtgtgtctctctgtgtctacatagtcccagctactgcagccatccctgtggctctgcaggctgaacccacagaagcacacagctgtgcatgcagctggttagtgacgttgccacgtgttccctttgctgggggcacagggagggacactgagccacagagcaggatggaaggcagcctgcccggctcccaggtgcagaagatggccaggttctaggaggtctcttgcaaactgagaacgccataagctggggtcggaatttcttcgcaatcaaaatcttccatagggtgggtgctaaaaacctccctggggaagggaggccccccaaaacttgtcccttgacacacttggcgggacccctccccatgtaatattctcatcaaaatttgtttttatgaaatagacaatacatgctattttaaatataaactaaaatgatcgtcctgccttgttacaaaaatagacactaatggatatcactttgtattttttgtctctaggaaagagtttttgaagtgaaacaatttcacggtgtatgaaggccttgaacgcgctttgctgcctttctatgggtttacgtgtaacatgacaaggcgtaaggcctgcattggcgtcaccctcagcccgtccttctttcctttggatcaaggactctgactttcaggccgtcagctgctctgctttcagaggtgataaattactttggaagagaattactcccttgcctcttgcaaaaacaagacataggcgggtgttaattcatacttgagggttatcaatggaaaagtataaacgtatggccctgtttccacaaggacaggcatgattgagggccggcaggatctaggagcttccatcaggcctttgacaaagagccctcgctcgggggtcaccgcgtgtcaggaggggctgagttaccgcttctcatcttccacttgcaccccgacagggagggtattcccgcagaccgcggctctccgtgtcagaatctgtggccgtttccacctaattcaacagagaacgtcttattttagaactgaaacatggggcctgggcaagggactattttgttgttgttgtggatttgctggaaataattacccctttgggttaattaaggcagcggggcacttgacccagtaaaaccgcagagagggaaatgcattcacactggagtaattacatcactcctgcgtctcatcacattttacataactacctgaactcaaggctgcagtttggtcttctaaatgtatgccaataaaaactgcgttaattcagctctagggcaaaaaaaagggggtgggggaccgggttttataccggggacttaaaacctcttttcacgccctatggggaaaaaagtcccggctggacccaaacccagcttttggccccaaaataagcgttttaaaagaccttttcttgtggctggctccccgtccggaaagcaccagaagggattttcgccttgtcagaaacagaggcgaactttcc

SEQ ID NO: 113755 - DNA, 1293 bp, Homo sapiens
attagactctgggaaatatgccaactcggcacccggggagggtgccactgcaatctactctttataaagatttagactggctcaaaaaaatagggggcaaggggaaattctaacacgttcttctggtgtttttgagatatttaaagccccaggtatattagctgttatagacagtcccctactcacaatggtttgacttacaattgtttgattttatggtgcaaagatgatacacactcagtagaaactgtactccaaagtacccacacaaccattgtttcatctttcagtagagcattcactgaatatcatgagctgttcagcaatctgttgtaaaacagaatttgtgtatactatcattgtgctcaaacttaggctgatccaagtcttttggacatgttataaggcaagccaggctataatcccataatgttcgggaggctggcccatttttgccacaaatttttttaacttatggtgggcttattgggaatgtaaccccatcctgagtcaaagagcatctattcttaagtctggaactgaaaaaatttaatgtgagggacattaaaagagaaaaggcccaccggaatgggagtaacccagcctgcctcatacaactgtcacgggagtccttcccaggtctcagaggggacctcagggctctcgcatgtgcatcacggcaccctcatgcacacacacgccttcagagaccgccagttcggctttccacaaacataccaagcacttagttcaccccaaccccaggtgcaaatgaaacactccccacctgtggttggggccaccttcaaggtggccaaggaccacatgctttacccggctcttgattgggttggggcccggtgaacccttagggaggaaaagcaggaggaggcgggatcccaaacaagcctggagcctcccaactgaacgggatcaggggagaagcccacaaaccagaagaacctatggctgtcagttccggatggttaagtgacatgggattgaaatgaaatgtgaagagttaatactataacttatttcttacttgtgaaattatagagttaggctacaagttcttggaggtttttgatatgtccaaagcaaaagtcacaaatatagctggttctcagaccctggggtgactgcagatcctggtttgcctggggcagtccctgacatccttgtctgggtggtaaacagtatagtcactctgacaactggccacaaccaccaggtccataagtggtgaaggacaatgctggactttggcacaggcaagttttcgatcctcta

SEQ ID NO: 113756 - DNA, 1333 bp, Homo sapiens
  misc_feature (1)...(1333): n = a,t,c or g
cggcggaaatccccccccctccgaaggggggaaagaaaaaacccctttttaaacaccaccaaaaaactttgacccgaaatttttggggatattttttggattaaataaaaaaaatttggttttcccgcaacaccaactttgtgggattattctttttttttcccgccccccccggggagaaaaaaaccctggggagaggcccacaaacccttatggcccgttccagaagcccttattccccactccggtggggggttgggccagaaaaattcccaaacccgggagggggaggttccaataaaccaaaattttccccccgccctcccaccgggggacaaaagaaaaatcccttttttcnnnnnnnnnnnnnnnnnnnnggatggctatagtcatgcttagatgtagttacgcactgaaatgccaaggataacgttatttacatccaccaagtactagatcttgtcaccctggacaggccacctgcgcttacacctatactcggcttgtacattgatacaagatgcctttgaaacaaagatggcacattcttcttcctgctttccgcgggctccccactcttgtatcagagcagctgtctctcagtgcacatctgcggactgccttgagttcctccctgcgcaagatccgagaactctctcttagggtctggactggacccctttctccatcagcactgggttccttagattcctactaacagcatgctgaggcctgtcttaacaaagaatgaagtgaggcttagaaagatggaaccataacttgctcagtcacgtggctagtaagctcttcagcttgaatttaaacattccaggactgtgtctttccactcggccatctttaaagcagagtgataaaataagttttgtttcctaaaaacccatcacaggcgtaacctggcaccggggtttaaccggttcccatgcggggtgtggaagactgaatgaaacccgggcggattcccagcttgctccgtctcagcttggggcactgctgtttacagcctgtgtaactcccctcccgccctgcccacccacaagtgtctcacctccttcctcgacagatcgaatgacacaacaaacatttatcttgggtgcacagcgtggcaagcgtcaagctaagcactttgataaacctggtctttcaaacattcaagggggtgggacgcggccccctttatccacgtcatataaaaaaaacagtgttcattgagcctgaaggtagcaatgtgtgcacctcaccccctgttaatgacaagctgaattttgagtacaatgccttgagggcctggagtaacaaccaatgacctatttgg

SEQ ID NO: 113757 - DNA, 1295 bp, Homo sapiens
  misc_feature (1)...(1295): n = a,t,c or g
gcaacccgggtgggctttacagttacacaggtcatcagttcaggcagatccgcggtccacggccacagctttctcctggatagaagacagaccctctctccagccttgattggccggggcctctccccttcagcattgtgatggcccccgggcccttcctttcatagggaaatacccaattggaggcccgataaagggcacctaggggtattgccaagttcttttggctttannnnnnnnnnnnnnnnnnnnnnnnnnnnnnnnnnnnnnnnnnnnnnnnnnnnnnnnnnnnnnnnnnnnnnnnnnnnnnnnnnnnnnnnnnnnnnnnnnnnnnnnnnnnnnnnnnnnnnnnnnnnnnnnnnnnnnnnnnnnnnnnnnnnnnnnnnnnnnnnnnnnnnnnnnnnnnnnnnnnnnnnnnnnnnnnnnnnnnnnnnnnnnnnnnnnnnnnnnnnnnnnnnnnnnnnnnnnnnnnnnnnnnnnnnnnnnnnnnnnnnnnnnnnnnnnnnnnnnnnnnnnnnnnnnnnnnnnnnnnnnnnnnnnnnnnntcctaattagagaggctcttgagccgcttgctcaagcccatcccactgtgtgtgaattgtgcttttgcttcttcaatagatctgtgccttggctactccctctgttcttctgttggtttgttcttttggtactttgtgcattttgttcagttcttcgttcaacacgccaagaaactggacaactctatccagtaacattctgttctgaagccacaaagataataagatgcctgtactgagaagttcaagtggccttttttttcccccattctgacaactccggttttttgtttcgaaccccagtccaccccacagctccaaaccaccctccctgcctccaccatacagctggcacctagaagccgcgtcgacgtggggctgccgctgtgatctgagcccgggagcaggaaggtcaggccttggtgcaccggctggccagtccagacaggagtggcctgcctcactccaggactatggacagcacctgtgatttgcagggcctttcttaaattaacaaccacaaggcttatttcctaaagaaccttggaccttctctagctccctgaattctccaggcctagccttgcaaagtgattgtgtgtgctcactaaggacgtgtgacctgtaatttgttttttaaaaaaagaaaaggggaccgggctcattcgatcatactatgtattggcagcgccagggtagtcccagtcgggtcgatgtacggctacggccatcgaatccgtagtcagcgtg

SEQ ID NO: 113758 - DNA, 488 bp, Homo sapiens
tttcgacttgacacggcttccatgtccgtacctggacaacgctatgactgtgacacccctgaccttaccccacgaaaactacctcgtccttgaagttggtaactgggtaggcttacctgttgaaatgtctatccacatcaccagtctcatctggagacgtactgccctcctgagctcccccatctctaggccataaaaacggattcagatccaggacttttagataaaccatgctgttacatagctaaaacccgttctggaacacggacagggcttaaacatttctagttgaactttccattcaacccaggaattgtgctccttggtgtctacacaaaggagttaaaaacttgtgtccacacaaacacctgcatagaaatgtttacattcataattgccaaaacctggaagcagccagaaatgtcaatatgtgggtgaatgaatcgtgatgccacatctccatccatctgatcttcaacaaacctgag

SEQ ID NO: 113759 - DNA, 836 bp, Homo sapiens
acgtttccattttgagaatcatactctatgcgcagcttgggtagatgggctcacgtttgctctcaatgaccaaagaatcgcagcctagacggacccatcgtgtgcacatgggctaacttcagtccgttccgtttgtgcaaccctctctcatcaggagcatcactgatcatctccttcacctcagatccaaaccgtggcttacacggacctgtctagtcccacacatgggttatgtggacctgcctagtcccatgcatggcttacatggacctgtcccatgcatggcttatgcagaaccggctaattccaaggcatgggtatactgggacctggctaaacccatgcatgggtttacccgaacctgcctagtcccacacatggcttacatggacctgtcccctgcatggcttatgtggacctgcctaatcccatgcatggcttacacagacctgtcccaaacatggcttacttggacctgtctagtcccacacatggcttatgtggacctgtcccatgcatggcttatgtggacctgcctagtcccatgcatggcttacactgacctgtcccacgcatgggttacttggacttggctagtcccatgcatgggtttacttggacctgtccccagccttggtttactgggacctggctagtcccatgcagggtttaaatgggacctgtcccatccatggcttacttggacctgtctaggcccatgcatggcttacttggacctgtctaatcccatgcatggcttacatggacctgtcccatgcgtggcttacgtggacttgcctagtcccaccatggtttacttggacctgtccatgcat

SEQ ID NO: 113760 - DNA, 637 bp, Homo sapiens
tgtaagcatcggtacccgagtccaggatggaattttttttgaaagggaagggatactgcaggcctgtgtgttgcagcgcctgtggtaactgtggaatgagctctgttagggacagttgtctggtttgtgccaaaccttctaggggcgagtaaggagtgggggaggcgggtccaaacctccctcaggaaggccttttctatcggcagcaattccatcaagccaagcctcctgtggtcctgagcatgaaggggccaggggacctcctgggagatgcagcttttgtttacgctgcgtttcatcagtcagccttgcttggaattctggcaggttccccggggtgtttcagtggacaggaggcccccgtgccgtggctgagtcaacctgggtaccccagtcaccagcagggccacccttgatggaagagccccccaccaaacttgggaaaggcaccgggaaatgtgtgaaagggtgtgcgctgtgccccacatataaaacttttcacaaaaacactgtgttttggggaggcccttggaatactgctttggcccccattgaaactggatttgcccacctgtgagcacagaaacacgcttctccacacgggccgaataactaaactcacatggttctgcctgct

SEQ ID NO: 113761 - DNA, 445 bp, Homo sapiens
  misc_feature (1)...(445): n = a,t,c or g
ccccactcgcactcactatccgccccactatcaaccccaccgactcattcgtctctcgcagactactccactaactaccctacacgagttctggacacgctcgggcgccggacatccctctcccaaccactaaccccagcacctcatcccaccctctcccaccagacaacatccacctacattcacggcaaacacacctgtatctcccatcacgcaccgtgccaacccacgaccagtcccaaattcgcatacctaccgctcccatatgcaggttcccagttaactnnnnnnnnnnnnnnnnnnnnnnnnnnnnnnnnnnnnnnnnnnnnnnnnnnnnnnnnnnnnnnnnnnnnnnnnnnnnnnnnnnnnnnnnnnnnnnnnnnnnnnnnnnnnnnnnnnnnnnnnnnnnnnnnnnnnnnnnnnnnnnnnnnnnnnnnnnnnnnnn

SEQ ID NO: 113762 - DNA, 2211 bp, Homo sapiens
ccccaggttttaattaatattccttcccccggttttggtatccctatgaaaaaacacaatatcttcttatttttcccccgcccttataagagggtttgccacaaaaaaaccacttttaatttccaaggaaaaaagagaaacctctcagtggacaagtgggccttccaaaaccaatctgtgtaggtgcctggggcagggcttccttgcccaagccgggtttttaaaaggcttttaatgtctccttcacgcaaggcttgcctgccgctaagaaatgtctgaccagaggtgcaggcgggggcttgcctcgggtggtcacacacaagactgtgtccctccatcacttcgtttttttttaacttttcaaatttacttctgatgagcacatacccagatggaaaatacgatcagaaggatttttgctgcctggcagttgccttgtaagtcagacatcttcccctgttatttcacatggggagggctacacagcctgtggtggttttgtgaacgcagagaacggagctaggggcttaagccattggagctgtgggccaggcaggagcccggcaggagtggggtggtcatggcagggcatattccagaagggatggacgccccagccgccatgtgctggagctatgcccgctgcccctgctttagagaagcagctcagttgaggatctcagcctatgttgtatgccaggaacttccagtctcttggtgatgggggaggtaactatgggagctggatcggcgtcaccagcagctggtgccacagcagagagctgctctctgcaggaacctcgggatttggaaacttgcaatgggacgtgaccatggatggtgacggggccaccgctttattccggtggggctcagggcacccctgggataaaggggccacacagaacacaccaaaatttggtggggcaacaatttcagccccctataggtggggggtttttggttagacttggcccttctgctgtgaggcagaaagtggggaggaagaaatacggtgtctgagtgtttgcaaagaattggtaaacctggttatcttcagaatgtggacgctggatggtacgtttgaaaaaaggcgttccccggaatttgtttacacaagttccccaatataatcccccatgttcatgccataattgctgcggagcaaggggttttcttggtggtagatgctggaggcagacatgagaagcagcagcaatggcaggaaatgtccgtaccgtcctcccatctctgctccagcaactgtcaccccaagcttctgtctctactctcctcccatctctggctccagcaactgtcacccaagcttctgtgtctactctcctcccattttgggtcccaagcacttgtcacccaagcttttggtgctaactctcttcccacctctgctccagcaaactgccacccaagcttctgtgtctactctcctcccacctctgctccagcaactgtcacccaagcttctgtgtctactctcctcccctctctgctccagcaattgtcacccaagcttctgtcttcttggtcaagaaatgcagatgcagattctgagtatcttttgaaaaagccccccagatttttttttggaaataccgaaaaaggccaaatatttattttttgttaagcgccatctgccagataacacgggtgttttagaataccctcacagataaaacctccgttttatcgcacacacagaataagcgtgtgagagaccactcctgtgccttataattacatcaagatctaagctatatgctgacactatttagaaaacacagctattttgactagttttatgaatcataggacaggttataatcatccaacactgataagaagaagggacaaaagtttttgaacatgattatctcttcatgtatatggagcttctaaatctatttccaattctgtttcctttccttttataaaggacctctccattatcttatacacatcaggtaccaaatacatatttgtgaggttggttaaattgattgtggaaatgaacggaaaggggtttataaggaggggaccggttgaacccattaaggggacccagaaatactcgtttttattacagaaagagagtaggagcatatcctgccactgaaagacttggaaatgtaacctgcccgcatatttaaggtgtggggctttttttcacaattcctgaatggcgtgccatgt

SEQ ID NO: 113763 - DNA, 1727 bp, Homo sapiens
aaagacacactttttatcccatctaactgtgagcagccctgaattcatgaataccttacgctagggttcccctggggtcatggactctagcttggagacttcagttccagatccagcaaccagctgggggactgtctgcactatgtctcactgcagtgtcctgctggaaattcacagaggactctgtccctggaaccatcagtccacaggccttcaatggtggtgcgcctccatgccccggcaccgctgtcagatgagccaaagcctgagccctgtgtctgctgaagtcctggatcctcctgacactggacgatcactgtctgtctctgccctgtgccctgtgctttacaacgcttctctggcctttccatcacttctctgtggggacagacgctgattagaagaagggacaaaagttttcgacgctggctttccaagcccacctgggttttcccttccaaaaggggatttgaaccggttgcccctttggcccccttcaattggggcccccccagcttaattagaggcctggtcccaaaaagggccaagccctggcccgggaaaacaaaggctggtgccctctgacacctggttttcaacaagcacattgacactgagacagcggcctttaatttaatggacaattcccccaacacagttacaaaggactgaaggttctgacctaactttttaattttcaaattgttttccagtgggaagagctgatggggagaattctcttaataaattctctgatcattttaaatacagaaacctggaaaaataccctttaagggtatgatattagttggggcttttcagagaaacagaattaatggaacatgggtgggatggatggacagacgatagagatatagatgaacacatatagagagagatggtaaggaagagacagccaatagagacacaggtgaatccatccagagaaagaagaataagggattgggctccctttcgtcaaataagcctaaaaagctccaagatctcccagagaaagtggccaagctggagatctggccgggttcattgggcaaagtcgcagttcaaaggcaggagtactttccctctctctatggaagagtcagctgttttgtttcttccactagataggacgtggcccacccacactggggaaagcgttggattaccgtcgcccccccctccaatgttagcttcatcaaaagcccccttttcagaccccccccaataatgttaaccgaatatttggccctccatgggccagtcaagttgccacatgaactccaccgtcacactatcatacagagaactgtgcggcattattcggcctccaccaccaatgggcaacatcacctaaaccattcgcaaactgaacgggaaagacaaggctggaatatgacgtgttgggagcaagcagtccaatcaccttgtcgtttccatggtgatgcttcacagggaaaaagatctttttaaggttaactctctgggatctaggaatacctatcaggaagcaattttgtttaagtccaaaaatattctattaaatcatgtcaatgactcttgaaacccatgaagcgaaaggaagaaaatttcaagttataaaagtagcaaataaattacacccttttaaggtaatacatcgtacctgtaagattattgtctggataatcaaacaacacaaatgtatctatagcacttcatgatccccgggtgcgagttgaatacgt

SEQ ID NO: 113764 - DNA, 1729 bp, Homo sapiens
agtgtcatcaagaccgttgtcgttcacccacttctccctttcccagaagggtcacttctttttcccttgctgggaaagggagaagttcatggaatgccgaaccgtctgtgattcaatggaatgacgaaggtttgaatacacctcaccctgaaagggcccctaaaaggcacgcagttctgacaagccccagcagattctcattggctcggaggtctgtaaggagaaggatttcccaaggcccataagctttgtttccgaaaagggtttctgaagctttgcagcaaaggctccttctccttcagtggctgatctctttgaaagaaagaacttccggccttgcttctggttcaggcagagatggcctgtttgaccccagggcaccagagtgagcagctgaacccacacatgcgctgtgaactatccactgagccaccaagccttccccagctcattggatcctcagagcaggcatggggttgggatgtctccagacgggtttgcccatagtccctgctctgcactttcacccagccttccaccaagttccctcttgggggcttttcttatgaagagatgtctggagaatgaaaaaatgtggtgttccaccaccaccttttatttcttgaagtgtttgggagaagaagtatatcactgctattctctcaagaaaatctcaaagttctgaaaatatccgttatttcttgggaatgcttataagaacgtcttcactacaaaagagaatcaggctgatagacatgttgagaccaaataaagatattccaaaccaaataaagatagtcaaggacaaataagagagacccagtggagagggaaacttcattcttacatataactggaaagtaattgttgtgggtgcctggcgattatctaaagccaatggtgtaatgcaggggttaagaagaatttaccaagacaggttgttggtaaagaaaggcagatttattagaaaaagtatgaaagtacattgcaagggagcaacgggcaggccagcaggagaggagctgactgggcaggaaacagacacttgcaggggaatttgataggatcattgctccggtggggggctggagagggctatgtgcagggctaagaacgcccagggttgagggggagtaattttgattttttgtataacaaaaggtctggggaattgttgggcacaggaagaatgatttttttgtgcagggggccttgtgtgcttggacaatgaagaaaggcagactcacagcttatccttttgctttcctttgggcccaccaacctgaatccccctccttgattaggactgtacagtaatgagtatgcaagagaatgagaaattttcttttctttttttttctggaaaggggggttcactttggtccttaaggttggagggcaagggcggaatttcagctaagggcaccctttgcttccggggttaaaccaattttctggcctcaccctcccatggggcgggaattacgggcccccccaacccaaggcggttattttttttggttttttataaaaaccggggtttcacccttgtttccccaggaggggttcaaactctgggacccttttaatttgggtgcgcggggcccccaaaggggggggaaacacgggtgggccccttacccccacgcccgggtgttttttgtctttctcttttttttcttttgttgaagagtatcctttttgacaccgtcggtggtggagtgtggtt

SEQ ID NO: 113765 - DNA, 596 bp, Homo sapiens
  misc_feature (1)...(596): n = a,t,c or g
ggtttttgcaaaaaaaaagagaccccaattttcnnnnnnnnnnngggccccccacaaaaaccccccctttttggccgcccaaaaaggttccaaaaaataaaaattttcnnnnnnnnnnnnnnaaaaagagggcccctcttccccccccgggggagaagaaaagggggtttttaaaaccaagaaaccctttccccaccggggtacaaaatatttcccgnnnnnnnnnnnnnaaagaagggggagttaagggccccccaacccccaacggggtaattttttttatttttaattaagaagggggttttccccttttaacccaaagggtttcaatttccggccccaaaaaatggccgcccccgccccccaaaaagggggggttcaagggttggccccctcccccccacccggnnnnnnnnnnnnnnnnnannnnnnnnnnnnnnnnnnnnnnnnnnnnnnnnnnnnnnnnnnnnnnnnnnnnnnnnnnnnnnnnnnnnnnnnnnnnnnnnnnnnnnnnnnnnnnnnnnnnnnnnnnnnnnnnnnnnnnnnnnnnnnnnnnnnnnnnnnnnnnnnnnnnnnnnnnnnnnnnnnnnnnnnnn

SEQ ID NO: 113766 - DNA, 849 bp, Homo sapiens
acatccacccgacttggactaccctggacgtacccattttgataatcatagctctatacgcaggttgggtagatgggctcacgtttgctctcaatgaccaaagaatcgcagcctagacggaaccatcgtgtgcacctgggctaacttcagtacgttccgtttgtgcaaccctctctcatcaggagcatcacaggtcatctccttcacctcagatccaaaccgtggcttacacggacctgtctagtcccacacatgggttatgtggacctgcctagtcccatgcatggcttacatggacctgtcccatgcatggcttatgcagaaccggctaattccaaggcatgggtatactgggacctgtctagtcccatgcatgggtttacccgaacctgcctagtcccacacatggcttacatggacctgtcccctgcatggcttatgtggacctgcctagtcccatgcatggcttacacagacctgtcccaaacatggcttacttggacttgtctagtcccacacatggcttatgtggacctgtcccatgcatggcttatgtggacctgcctagtcccatgcatgggttacactgacctgtcccacgcatggcttacttggacctgtctaggcccatgcattggttacatggacctgtcccacgcatggcttaccttggaccggtcttagtccatgccaggcctaacttggacctgtcccaagctttggttaattggaccctgttagccccatgcatggcttacttggacctgtctagtcccatgcatagcttacatggacctgtcccatgcgtggttacttggacctgcctattccacgcatggcttacgtgta

SEQ ID NO: 113767 - DNA, 681 bp, Homo sapiens
ctacatgactacggattttatggccgtagctgcacatcatgaagactgggagaacattggtgttaccaatattgttcatcatgacactgaagatcccagctaacacaataaagcaaggaatggacagactaatcacacttcattgagaagagattaaaaatctgtctttgtgttacagatgacaattgtctgtagaaaataccagagaaacaacaacgacaaaaaaacactcatggaaccaaaagcaattacagctaggttgcaggataaaaagttaatatgaaaaatcaattgctttcttacatagaaaccattaacatattggaattagaaatttcaaaacatctttaatgcaattgcaataaaaatcccagcaagttaccttgtgactgttgacaaacgaattataaagtttatatggagaggcaaagacccagaacagccaacaaaatagggagggaggaaaacaaagtcagaggagggacactttccaacctttagagttgactttaacaccacagcaatcaggatggtgtgtgatttgctaaataacagaccacatctatggaaccgaaatgagaaaccccaaaccaacccctttaagggtccaactggcttttgaaaagaaacatgcgaagtcagggtgaaaaaacgttttaaaacaaatagggtagacaagtg

SEQ ID NO: 113768 - DNA, 634 bp, Homo sapiens
aagagattgccaccggcagagtaagcccgtgtggtcatctggtaaaaaatgcttggctttcctttcccccaagagtgagccctttgcggtgattctggtagagaaatgtcctgccttcccattcccccaagaatgaggccctgggcggttactccgggaaaaaaaagcccggtccttccaattcccccaggagtgagccctttggtggtgactccggtagaggaatgacacggccttcccattccacccaggagtgagacctttggtggtgactccggtagaggaatgacacggccttcccattccacccaggagtgagacctgtggtggtgactctggtaaaggaaatgcacgggcattcccattccacccaggagaaagccctttggtggtgactctggtagaggaatgacacggccttaccattccacccaggagtgagacctttggtggtgactctggtagaggaatgacacggccttcccattccacccaggagtgagacctttgagcacatcatcacacagttgactaacttaatcttttacttaccatcgacttctctttggcataatgccaaggcatttttttgtaaagcatgagctggtaacaattctagaaaataacataaatt

SEQ ID NO: 113769 - DNA, 663 bp, Homo sapiens
attacccaattcagcttggtacccggggcaccccgatctatccatttttctacttacattaaataacctgttctacgccgccttacacatgaaatcatgcaggattttttttacagaaatccttcttgttacaatttcaacatttatatttttgaaaaacatatgtctttcatctatatttcctaactaatgtaacattttttaaaaagtacttttttatgttagcaaatctctctatatctggaggggcttttgttctatattttgctgaattgtatcttacttgcttgttttttggtttgattggtctttttcaagctctactttattaatctttctaagaagtagaggtttttttggctaatctttttgataagaatttatttgtttctgcccttatattcattatttcctttcttcttgtcgctttcaaagtatcccaggggttctattcagttttcaaaattttggaatggaaaatttgtttatattttaaatttctttgctttccggtaaaccctttaaaatttttaaattcctttaaagggctaattaacattgttcccaaagggggactttgggtttaattccttgggtctaaaaatttgaaccctctttggttactttaaacccagggatattacatggcctttctttccaaaa

SEQ ID NO: 113770 - DNA, 703 bp, Homo sapiens
actgacatccgtatgaccatgactacggattcgctgtccgtcccctgacatccacgcgactgggagaaccctggcgccaccctgcttaatcgcgttgctctacacagttcgccactggtaacatttcacccaggaagggtgtcctcgggagaccctggcgggagcccggaacccgcggaggggctgaggagccgcccagccctctggcgggttgggagcgaggcccctgcccttgctgacaggccacatgaccttggtctttgatacagaaagccaccatttaatgacagtgctctggcttggaaacttaggtgagtttctagccaataacttttacgacaaatagaaatagggataatggcccggccgtctcttctgaggattctgtggtactttaattataatttcccccattattaaagtcaacccgccactttaaaaggcgcccctgaagatcaggatccagcaggaagttattgcgaccatcatttattccgtgcgtggggacacagttggggctggtactttataacaatcacttttctggggttttttccccaaaattctttttctccatattgaagccatggaatataaattttaactttttttttgggagggggggtggtgttttcccccgggggggtggggaggggggagttgggtaagtgaaccccccttccggggtaggagtttccgcctg

SEQ ID NO: 113771 - DNA, 677 bp, Homo sapiens
taccagattcaaggtccggacccgtacatcgcggtgaaggggaagacactggagatacccagcttagtcggcttgcagaccatcatgtaggggccacaccagtgaccagacacctcccaccacaacaatgaccagacaccttccaccacaccagtgaccacacacctctccaccacaccagtgaccacacacctcccaccacaccggtgaccagacacctcccaccacaccggctaccaagacacctcctaccacaatgaccagacacctcccaccacaccagtgacccagacacctcccatcacaccagtgacccagacagcctcccatcacaccagggaccaaaacacttcccactaggccggcaccaacactggcgatccaatgtcagcctgaggttttgggggtgtcaaacatccaaacgatatcactggggtatgtctggggaggcaggatgattggcaaaagggcctcagaacaggaagaactttcgctttgggtccaaaacccggggcccacccattaggaaactccatttggttctgggggggttaaacttggacttggattgggtattaaaaaccatcttgaatctcagcagtttgggagggtgagggggcagaacttttaagatgacctgtaggcatgcaagtttgccttggcctttttaaacgggg

SEQ ID NO: 113772 - DNA, 1685 bp, Homo sapiens
  misc_feature (1)...(1685): n = a,t,c or g
tttaataaaaattcattttcaccgtcttatccactataaacacacactttttatcccatctaactgggagcagccctgaattcatgaataccttacgctaggggttccctggggtcatggactctagcttggagacttcagttccagatccagcaaccagctgggggactgtctgcactatatctcactgcagtgtcctgctggaaattcacagaggactctgtccctggaaccatcagtccacaggccttcaatggtggtgcgcctccatgccccggcaccgctgtcagatgagccaaagcctgagccctgtgtctgctgaagtcctggatcctcctgacactggacgatcacctctgcctctgccctgtgccctgggctttccaacgcttctctggcctttccatcagtgggtctgtggtgacagacgctgattataagaagggacaaaagttttcgacgctggctttccaagccctcgtgggttcctcctttccagaaggggattttgatccgtttgccctctggcccccttcactcctgacacactcagcctaactagtgaccttgtcncagcagtgccagcccttgaacctgtcaacaaagaactgggcctttgacacctggttttcaacaggcccattgacactgagacagcggcctttaatttaatggacaattcccccaacacagttacaagggactgaagtttctgacctagctttttaattttcaaattgttttccagtgtgaagagctgatggtgagaattctcttagtaaattctctgatcattttaaatacagaaccctgaaaaaataccctttaagggtatgatattagttgggggctcttcacagaaacagaattaatggaacatgggtgggatggttgggcagacgatatgagatctagattaacacatatagagtgagatggtgaggaagagacagacgatatagacactggtgaatacatacagagaaagaggatctggaattggctcctgtcgtcaatgaggctgacgagttccgagatctgcagggagagtgggcaagctggagatctgggcgggctcatggcgcaagttcccagtcaaaaggcagaaggaattcccttctctataagaaagagccagctgttttgtttcttccactagataggccggggcccacccacactggggaaagcatgtgcttcaccgtcgcccccccctccaatgttagcttcatcaaaagcccccttttcagaccccccccaataatgttaaccgaatatttggccctccatgggccagtcaagttgccacatgaactcccccatcacactatcatacagagaactgtgcggcattattcggcctccaccaccaatggcaaacatcacctaaaccattcgcaaactgaacgggaaagacaaggctggaatatgacgtgttgggagcaagacgtccactcccctttcatttccatcgatgatgcttcacagggaaaaagatctttttaaggttaactctctgggatctaggaatacctatcaggaagcaattttgtttaagtccaaaaatatcctattaaatcatgtcaatgactcttgaaacccatgaagcacaggaagaaaaatttcaagttataaaagtagcaaatcaattacaaccttttaagctcctacatagtacctgtagg

SEQ ID NO: 113773 - DNA, 1039 bp, Homo sapiens
cccctttgaagaaacaatttccaatttttgaaacctcagccccgtttttttcctcccccttttcctccaacaaaaggcccagattaaccaaaaacccccacatatgtggcggaaaagttgccccccacattctgtgtttttttgtggcccctttctccacagggcccctgagccccaccaaaataagccctggcccctccacaagccatggtcccgtccccttggaagttccaaatcccgaggttcctgcagagagcagctctctgctgtggcaccagctgctggtgagggatccagctcccctagttacctcccccatcaccaagagactggaagttcctggcatacaacataggttgagatcctcacctcagctgcttctctaaagcaggggcagcgggcatagctccagcacatggcggctggggcgtccatcccttctggaatatcccctgccatcaccaccccactcctgccgggctcgtgcgtggcccacagctccaatggcttaagcccctagctccgttctctgcgttcacaaaaccaccacaggctgtgtagccctccccatgtgaaatagcaggggaagatgtctgacttacaaggcaactgccaggcagcaaaaatccttctgatcgtattttccatctgggtatgtgctcatcagaagtaaatttgaaaagttaaaaaaaaacgaagtgatggagggacacagtcttgtgtgtgaccacccgaggcaagccccgcctgcaccctctgggcagacattcctcagcgccagccaggcttttgatgagggaggccctcaaagccttttaaaaacccggcttgggcaaggaagccctgccccaggcacctacacagttcgtttttgcaagccccacttgtccactgagaggtttctcttttttccttggaaattaaaagtggtttttttgtggcaaaccctcttataagggcgggggaaaaataagaagatattgtgttttttcatagggataccaaaaccgggggaaggaatattaattaaaacctgggg

SEQ ID NO: 113774 - DNA, 686 bp, Homo sapiens
  misc_feature (1)...(686): n = a,t,c or g
aaacctcccggggctcccagggccaagggaaaccccatccctttttttccgcccccgaaccatctcttaaaagccccaaggcagtccgtttttttttcccacgcgttttggcccaaaacctttgggggcctttttctccaaactttttaggcgcctcccggccaaggggttttcccccttttccacctacaaaaacccggttggcccttaaatttccccagagcgggggaaaaaaaatttttcctggggtggacccctaaaagggcctatggtgtgctcttgggaaagggaattttggcccctggccccccccgggggggaacccttttccccccgccaacaaaattttttttgggcacccctccccccctttgtccctttccaaaaaccaaaaaaaaactttggggcccttggggggtttttctccccannnnnnnnnnncccnnnnnnnnnnnnnnnnnnnnnnnnnnnnnnnnnnnnnnnnnnnnnnnnnnnnnnnnnnnnnnnnnnnnnnnnnnnnnnnnnnnnnnnnnnnnnnnnnnnnnnnnnnnnnnnnnnnnnnnnnnnnnnnnnnnnnnnnnnnnnnnnnnnnnnnnnnnnnnnnnnnnnnnnnnnnnnnnnnnnnnnnnnnnnnnnnnnnnnnnnnnnnnnnnnnnnnnnnnnnnnnnnnnnnnnnnnnnnnnnnn

SEQ ID NO: 113775 - DNA, 655 bp, Homo sapiens
  misc_feature (1)...(655): n = a,t,c or g
tgattgttaaaaagagcctggcagctcctttcctctctctctgtccctctttatggcttttttcctcttggcatgtgatgcctgctccgcttcccattccgccatgacgccacgagcagaatgatttctcacannnnnnnnnnnnnnnggaaagggagtcaagttcggccccccaggcgggagggcaggggggggatttgggataacggaacccttggccttgggggtaaaggggattccccggcctaacccccccgagaaggggggataacaggggccggcctttacccccagaaaattttggaattttaaaaaaagggggggttccaccaaggggggaaggggggggctaaatccccggaccccgggggacccaccccccccacccccccaaggggctgggataacgggcttgacccacgggcccgggccaatttttaatttttggggggcctccccagtcgaaaaggcgggccccatggcacctgggaaggctgcacaaaggggggcccaaccccccctcttttttttaaaaaaccccacctcgggggggccctggggggcaaaaacaggggataaaacctttttttatttaaaaccccggttcccataaatttgaagaaaaaaaacaatatctccctcttccctccaaagg

SEQ ID NO: 113776 - DNA, 836 bp, Homo sapiens
gtaaggaaccggcctgctggatggcgggaggctgcggcggacccttggtgttgaatctgttgctgttgctagacgacgggaactaggtgtcgtcacttcctcagcccgccgtgtgcccactcctctagccggaacctgggggcccggagccggggtaggcacagagttgtcctcggaggtccaggacagcggccagcccggcggcgggagtcatggccacgccacctgcagggaagaacccgagtcgaagcgggaagatggctgcagacaagcctgcagatcagggagcagagaaacatgaaggcacaggtcagtcctctgggatcactgatcaagagaaggagttatccaccaatgctttccaagctttcacatctggaaattatgatgcctgtctacaacaccttgcctgtctacaagatattaaacaaagatgattataaaataattttgaatacagcagtagctgaggtttttttaaaagtaaccaaacaacaacagataatttgagacaaacacttaaccagctgaagaatcaggtccactcagctgttgaagaaatggatggattagatgatgttgaaaacagcatgttgtactataatcaagcagtcattctttatcatctgcggcagtatacagaagccatatcagttggtgaaaaactttatcagttcatagagccttttgaagaaaaatttgcccaagcagtgtgttttttgcttgtagacctgtatatattaacctaccaagctgagaaagctttgcatcttcttgctggcctagaaaaaatgatttcacagggtaacaataacaaaaatggaaagaatgagacg

SEQ ID NO: 113777 - DNA, 440 bp, Homo sapiens
cccttccgtgtgtcgacgattccgcgggaaccacaggagaggagaggagggagagaagcgggcacagttcccatcctctgccccgacctgtgcccctctccgctcccctccccgtccctccctcccccccgctgccacccccgcagtacttcctcccccagccctggccttcacccactcacaccccccgccgaaggaggaagatggggcacgtccctgcagagtagaaacagtgacagcagctgtggtgacaacctcacatctgcgcccagcgcccactgccaacacctggctgagtcctaacgccagcctttggcaagacagtttgatccgctgaaaccaggctcagggagaagccgcctgccctgtgccagcctcagctcctgctgttcctttctcctggagcgcttttccctggacccggtgctggcagcctcctg

SEQ ID NO: 113778 - DNA, 1360 bp, Homo sapiens
tttcgtgtggttccgaggctgactaccctgcggcggcgcggctcgcagtccttctcagcatggaccgcacttgtgaggagaggcccgctgaggatgggagcgacgaggaggacccagactccatggaagccccaacccggatccgggacactccggaagacatcgtgctggaagctccggctagtgggctggcgttccatccggcccgtgacctactggctgcaggggacgtggacggggacgtgttcgtcttttcctactcttgccaagagggagaaaccaaggagctctggtcatcaggtcaccatctcaaggcctgccgagctgtggccttctctgaagatgggcagaagctcattactgtctccaaggacaaagccatccatgttctagatgtggagcagggccaactggaaagacgtgtttccaaggctcatggtgcccccatcaatagtcttctgctggtggatgagaatgttctggccactggggatgacacaggtggtatccgtctctgggaccagcggaaggagggccccttaatggatatgaggcaacatgaagagtacatcgcagacatggctctggatccagccaaaaagctgctgctgacagccagcggggatggctgccttggcatcttcaacattaagaggcgtcggtttgagctgctctcagaacctcaggctggggacctgtcctctgtcactctcatgaaatgggggaagaaggtagcctgtggctccagtgaaggtaccatctacctcttcaattggaatggctttggggccacaagtgaccgctttgccctgagagctgaatctatcgactgcatggttccagtcaccgagagtctgctgtgtactggctccactgatggagtcatcagggctgtgaacatcctaccgaaccgagtggtgggcagtgtgggccagcacactggggagcctgtggaggagctggccctctcccactgtggccgcttcctggccagtagtggccatgaccagcgcctcaagttttgggacatggcccagcttgcgagctgtggtggtggatgactaccgtcggcgcaaaaaaaagggaggaccactgcgggctctgagcagcaagacttggagcaccgatgacttcttcgcaggactgaggcaagagggagaagcctccatggctcacagaagaaaaggaggagactggggatgacagtgactgaaggaatgaattgaatcttgagacgggtcctcaccaggcaagagtcttgcttattgggctgcatccccagagaggatatgaattattttttaaaagacagggtctgtttgcgccgctctgaggatcaagcttcggcgcgtgcatagag

SEQ ID NO: 113779 - DNA, 441 bp, Homo sapiens
  misc_feature (1)...(441): n = a,t,c or g
nnnnnnnnnnnnnnnnnnnnnnnnnnnnnnnnnnnnnnnnnnnnnnnnnnnnnnnnnnnnnnnnnnnnnnnnnnnnnnnnnnnnnnnnnnnnnnnnnnnnnnnnnnnnnnnnnnnnnnnnnnnnnnnnnnnnnnnnnnnnnnnnnnnnnnnnnnnnnnnnnnnnnnnnnnnnnnnnnnnnnnnnnnnnnnnnnnnnnnnnnnnnnnnnnnnnnnnnnnnnnnnnnnnnnnnnnnnnnnnnnnnnnnnnnnnnnnnnnnnnnnnnnnnnnnnnnnnnnnnnnngagaaattttaaaagacctaaatgttaatgggtcagaagattcaatatggttaaaatgtcaattctccccaaattcatctgtagagtcaacacaatctcaatcaaaatcccagcagtatttttttgtgcaaaatagaagtcgaccggaattagggcggt

SEQ ID NO: 113780 - DNA, 549 bp, Homo sapiens
tttcgtgttccttctcgctaacctcttcgcccggaagtggcatcaagactgcaacatcccctcacgcctagtctgtaaagaactttgtttaacccggaggcggggccagccagctccgcccctccagctggacgcgggagcgaggttgagggtcatgacccctgggttctctccaggcctgaggcggagagccagccgcctgcctacctctgggctttgaaccccgggtctggtgacttcgcttaaagacctcgggccgaaggcccgccaggctcaacctcggttcacaggacccccgacttgtgtgagtcgtacaccgctctttaccgtctctggacctaagtcatcttcggaggtaaaatggggtgaaatgacccgacctccccggaggatgccgcgcacgatgtgtgcctcaagttggcttccactgacctgaactgttaagaaagccctcctcagtgacgccttccctgaatccacagtggagattgccgttttcctggaactaattcacccacacttacccatttcatccctttccacctttta

SEQ ID NO: 113781 - DNA, 1317 bp, Homo sapiens
ttttttagttgccacaggttggacaggtttttattggagagtcaggagttactttccttccctcgtccctgcctcccccacttaaaagaacccccactccagtggggcttgtccttcatctgcccctaggaactccccatccccagctacacaggcactcagggagagcgcacatgctgtgtgggcagacagccccaggccaggtaggcagtgagcttccctcaaaatccttcccaccccccaggactcaggttgggagggccaggagaggtgtgggcccggtgtgcagtccttcaggcggccccccttgagctcgcaagccagccaaggccttgtgccttccaggattggattggtgtgatgaggcacatgccccgttagcctttccctttccggaagggcctttaaccaagaagtatcttgtttaggggctggggacagggtggggaagatgacaggaggacagctgtcctcttcaccctttgagtggtatccccttcagaagattccagccaacaccagaggaggcaggagcagtagtcccaggagagggccccacacatgaccagggcccgagttcagccctgacacgacgctaggcttgtcagggccctctgcacctggcaaggacgactgcagagccagggcacgcccacccgtggcattagcggtggcagaggtatatggggaaattgggcagggacttggaggaggtgtgccccgtgtggtccagtgtggcctgcagctcacctggcttgtcctgggctggaaaaactgaggccaagacctcactggaaggaggcaactcagcctcagcctcagcctcctcctgggcatggggtaggagttcccttgcccctgtcagggacatcttggggtccagagagttctctgggctcctagagggcacttttgttttgtctgtcactttgtctgctgattttgggataaggaacatgggtcgattttggggaaggtaactggctcctcatccaaggagggcaggccgtgagctgccaaaatggaagggacctcagttgttacgcaaggtggagcctctgttgccatggagggcgggtctttcgttgctaaggaagttggggcctgggtttccacagcaagcagagccttggttgccagggagcctgagacctctgttaccaagaaagccggaatcccctgttgctagggaagaaggagtacccattttcctagagtctgatgcttcagtcgcccggaaggatggggcctcagttaccaggtaaggcaaatcctgagcatcttccgggcttccgatgggttcacagagggagttct

SEQ ID NO: 113782 - DNA, 2237 bp, Homo sapiens
  misc_feature (1)...(2237): n = a,t,c or g
ggtggacctaaactacaaagtgggaactgaggagggaacttatgagaaatgttactaactgcggagctttaatcttggccccagtgttcagccactcggaggggcgggggctgtggcccattcaggggctgctggtgggctgtagtggggtgggatgacctggccagagccaacgaggatactggagcccaaagtcaagtttagagaccagctgggaacgtgaatggggctcttgattttcttatcaaaatcaccacttctcccagcttggactaaatattctttctagcaagcagctttgtgagctccctgaagcccaaggaaacccttcggtggggagaaatttcatttcttgtcttgagaggatttaagggcagcaggtgactccccctccttcgcctggccgtgttcctgcttatttttcagggcagctctaaggagaattcttatcacagttcaagtgatttccagaagttccagggcttctgagagaccatcaagggaactttaacaacttgacaaatgtccttgaagtaagatgcctcatctttagggaaaaatggggtttgggatttctgcttaggcaaagtctcctgcagttcatccttctctgtcctcttcttgcttcaggcttggggaccgtccctgctgtccccactgtggtgggcaatcaggacctaaggtgaagcaaacttgaatgttctatcttgacaagtttaggcatgtaagagaaggagggaaatcggagcaaagctccctcactttattgttgagaaactggcatctggaaagagggagggaatttgccccaaagtcagtcagctgggataaaaaacctgggtgtcctgtccagaaagtgcagggtgctttctgctctgtagcaaggcagcagacatctctgagccaggcccaccaacaggcccttatctggtggttggatcatgatcccattttgcttggacatgctctcaggaagataaaaaccatggagaaacactaggccattgacaaatgatctgagacaactttagaaaacaatgtaggatgaatggaaagagaaagaaaggaaagaaagaagaaaaagaaagaaggaaagaaagaaagagaaaggaaggaaggaaagaaggaaggaaaagaaggaaggaaggaagcaatatagtgttataaatactgcactcaacattttccaaattcttgccattatttttcaaaagtttaatagtttgcagaaatagatactcaagccaaagtctgttttatagaaactttccatggaaagtcagaatttctaccaccttccttttctatccacatttccagtgcagaagaaactgagaaacagagctttttgaagagaggacagggccatagcaacaaggaccttcttgggggattaatgggaggtcagtagaattaataaccctccttggatgagtgctactgttttcacatggcttcagatgctatcaacctcaaagaaatgatctcaacagagaagcttattctctcccaacttctacggtaaaatccaggagtattttctctggggatctgcccacaggacaaagtccataaaagcaagtcctgtctggaccatgtggttatctgaagcattagccatcaccagcacaacaaacggggcagggctttccaaggtggggctggtcagaagggaatctttgataagaggcccacaggcagggaaagcgaaatagggttgatgagaccaggggagacctaaaaaaaaggcagctttgtgtcttctagctccaaatatacctgccttttagctcacacactgtcctggagttctcagacctttaggggccctaacacagttcagttcatacaggggttcaaaagggacagtggcccatttgggagacctttaggatcaatgggaatcaattccattgttttgcctcagagtaaagtttctggctcggggacaattattaagttgcaaaaaggatagaggcatatcccaagtcttccttcattccacaaataattacaaacaacctactgtgtgccagggcantattcttaggcactgggaaatacactagtgaaggaggcagatgaggaccctgttttatttgtttctcttccaagaatttttccaggatatttgtttcttgggagagaaataataaataaacaaggacaatttctggaaagcaataagtggcaattcaaggataatttaaagggatgctaaagtgttgacttgtggg

SEQ ID NO: 113783 - DNA, 968 bp, Homo sapiens
cgcttagagtaaagcagatttagatttcacaaagacagaggtgaaggtgggtgaagacggagggaaggatttaaagggaaagagaaagaggaaagataagaatgagggagaaagaggaagagagaaagaaaaagagaaatagagttatcgaagatgactgcaagtctggcctctctcaacccaaggagccaaggaggggaaggccggcctgagcagcaacgtagacaagagctcaggagggcagggacagagccctggcttcagcaagagcgtggggaacagagggcaagggggtccatgcagcccaggatggcagggtgctcatacacacagccttggtcctgtcccctctcccactgccgcttttgagcttcaccttgtttaaggccaaagcacacaccattcctcccacagagccacttaatgcaattaacaaaacacattcataaatcttgcatggcgtccggagctgtctcctctccctaagcacaaaggccagctccagagatgctgtgcagagagctgtctgacctctcccaccgtcagggccccctgaaaaagtgccagcataaccccttagtaggaacagaaagacccattgtccttctgcccaaccattacaaagtggagtggggctggggttaggaaacacagacaaatcagaagaggctgagaaggcggagatgaaagtgcataggtgtttgcagggagctggggaatagttcgtgccttccaagctcaacaagagagcattcagcagagaccagagaatcaccacttttggagggtgattttaccttgtgagaacagagcacagggtgtgtgggacccagggcatcttcggcaatgcgggcgtgacttggcgggatgtcggtgtttgtgtttgcatgtgtgtgtgcgtgcgtgcatgctcagtctggaaaactggtgactcactaaaacaccgagctttctgatctgaagagctt

SEQ ID NO: 113784 - DNA, 577 bp, Homo sapiens
caacctgcatgcccagttccatgcccctcccctcttgtgaaagcacctgtctacttgggctgaggatgtgggggcacaggtggcaggtgaggctgccctcaggaggggcccaggccacgctttgtaccccacctccaccagtacctgaagaagtggggctctcaccctacctgcctctgccattggaatggcctggtttgcacagatgggaaacccgtttgaggggtgggtgtctgggtgggcacgtggggcgaggacctgcctgagggaccctgccctggaactgacaagtgcaagctcggcgtcctgcccatctgggcagaaggctggtttctcccatcaacgaagccctcccaggaccttcctggcaagccctcgtcccacacgcagctctgccgtcccttggtgtccctcccggcctcaggtcctccatgctgggtacctctgggcacctcgtttggctgagccaggggttcagcctggcagggcgccctggcagcagtccttggcctgtggatgctgtcctggcctgtggatggtgtcccggcctccacgtacccctctcagcccatgtatt

SEQ ID NO: 113785 - DNA, 1404 bp, Homo sapiens
  misc_feature (1)...(1404): n = a,t,c or g
gggacgaggaagctccaccgacccaagcgcgtaatggccgctggctatcttgggggagccagctgttggactatgccccactgccaggaaacaggcgccggaaggttctctgacaagatctcgctttcctagggcggtgaaggcgttcaaaggtcgggaaggggcgctgggagaagcggggcagcgctgagccatgctcgcgaactgtgggtctgtctgtgaagagacccagtttcgtgggaccacggtggcgcctgcgctgggagagttcttcactaccacaaccaaggagggatatgataggcggccagtggatataactcctttagaacaaaggaaattaacattttgatacccatgcattggttcaggacttggaaactcatggatttgacaaaacacaagcagaaacaattgtatcagcgttaactgctttatcaaatgtcagcctggatactatctataaagagatggtcactcaagctcaacaggaaataacagtacaacagctaatggctcatttggatgctatcaggaaagacatggtccatcctagagaaaagtgaatttgcaaatctgagagcagagaatgagaaaatgaaaattgaattagaccaagttaagcaacaactaatgcatgaaaccagtcgaatcagagcagataataaactggatatccaacttagaaaggagcagagtaacagatatgtttacagatacaagaaaagcaacttatggaaacaactacagaatttacaaaaaaggatactcaaaccaaaagtattatttcagagaccagtaataaaattgacgctgaaattgcttccttaaaaacactgatggaatctaacaaacttgagacaattcgttatcttgcagcttcggtgtttacttgcctggcaatagcattgggattttatagattctggaagtagtattaatgctcatcctgctgtggctgttggcttcttagaacaccaaaccgggagagatttactttgaacattgtcagttgcagcaaaaatttactacacaagattattcggaagtgtatacgggactaaaagaggaagtgttttagaatgagaagagatactgtgtctttattgtgtgtgtgtgagtgcaggtgtgtgtctttattatattgaaaagctgtcacttcagacctgggntttgaggataggaaggagcctttttgtccttttcgatagtttaataggaattggaacccagagttttcttatgtttgcttgaacagttgtgtaaatcatacaggattttgtgggtattggttgaatatttgtaaaccattccctagcctacatatttattactgaattaactttcctgataaccattgcataattacatttttctataaaatgaaagattattacaaaaaaa

SEQ ID NO: 113786 - DNA, 1749 bp, Homo sapiens
gagaggtccaatgaacgccataggtaccgtttgagaacctttcgggtcgacccacgcgtccgcttgcttctgggggtcgtggccttgctcccgctgtgcggttttaataatccaggcccttccacgcgcgtgtgggtgcgggggccccgaagtgctcgtggttccccgctaggtctccgctggggcaggaaccggaatcatgggtgggaccaccagcacccgccgggtcaccttcgaggcggacgagaatgagaacatcaccgtggggaagggcatccggctttcggaaaatgtgattgatcgaatgaaggaatcctctccatctggttcgaagtctcaagcggtattctggtgcttatggtgcctcaagtttctgatgaagaattgaaaagaagagtagctgaaggagctggcatttggagcaagccaagaaaagaattccgaagattcagaaaacgactaaaagcaagccaaagagcttggacccgagaagagggcttgcttgccaattgaagcagtttaaccagagccatccttcgggagaggatatgtagcgaggaggaacgcgctaaggcaaaagcacctggatattgaagacaaagctaggcagctggaagagaaagaccgagtgctaaagaagcaggatgcattctacaaagaacagctggctagactggaggagaggagctcagagttttacagagtcaccactgaacaatatcagaaagctgctgaagaggtggaagcaaagttcaagcgatatgagtctcatccagtctgtgctgatctgcaggccaaaattcttcagtgttacctgtgagaacacccaccagacccttcaaattgctccgctactggccacccagtattattgcactgtgttcaatcatggccaaacagaggcatgcttgaggaaggggaggataaaaacttttcaggaatgaggcaaaacaccattcaacgtttaattccagagatgggaacattttttttccctagttgaggaaaacaacccttttgaagagaagaccactaatgagaagaccactaaagagagacatcaagaatggattcagcagaatcatttcacgttttgaacagcagcagtttgaaggggccaaagccttgatcagggatcagtcattaaaggacactcttgagtattagtaaacccctcttatgatgattaaaagagaaggggcagcccttctcccacctttttgggactttctattcaacttgccactgcccataaaatgttccccttctgaaccaagcccccatcatttggtgaaccctcccacccctaccaaagtaggatggggttgggggctaaaattaaattggagtggggccgaggagagagccccagaaaaccataagatcccgagggccagccagtgctggggtggagagagccccagaaaacagatcctggagggccagcagtgctgggatggaattgtcctaggctgtggcatgttgggtttgtcttttccttttcctccctttgattatgtaagagctatttcattataacttaattatggtgattatacaggcaagaagacaaaaaggagagaaaatgtacctcttctactggaaataatgttttatgattacaagtgagataaggtatttttatcaatatgaaggcaaccttggctgataaaacctctatagtgaatactcacatctttaccttcactcactatcaataataaatatattttctgacaaaaaaaaaaa

SEQ ID NO: 113787 - DNA, 403 bp, Homo sapiens
aatacacgggtggtgagtgggagggagtctatttttgcatggatagggaactggcttatagacaagaaagagagggtggagatagatgggtgcttttccaaatgggttccccaggaattggtactgagattggtcttatataacactcagtacacacgtattgagcagccagtgtgtgcaggtcttgcactaagcatggggctggagtacccaaacaagctggagtcagctcttgtcctgcaagagcccaaaggtgcaagtgctcagtgacatctccaaattttggaagatgagaagctcctcagtgagaggaaatgccaagacattggagacaaaacctgaagaaggctgctgggaatgtggaaaccccagacagcagccagaaggtctgggctttaacacg

SEQ ID NO: 113788 - DNA, 820 bp, Homo sapiens
gttcccaccacactgaggaaatgggggttacccaaatccacctgggccctggtgccagtttttcaaccccacggcttctagctgctctgaggggctcctcccatcccttccagggcctccccagccccgcactgctcaggccaactgtgacttccccagaaaggagccagcttgagcacccaccccctcccagccccctcccctctgctcaacacctccgcggaacactcagctttctccagctgccgggatttgggggtctgggcctttcagcttttttatcccccctccactagctctagcccagcctggattccagggatcccacccctagccctgtccctattcaattggcaacaggctgccctggaccctgggggccttgatttggatctcaaataagcccatagaggagagaggtcttgaggggtgggagcaggtgtgtactgaaaattccccctcccacatgtcttgagctggggacctcggtcatcttgagacttcccccatgccccaacaaatgcaaatgcacacaaacccatgcattacacaaggcacacacacacagggcattttccccgtctgggttggggggaggcatggggagggggcactttcacaggggagaagataaatagtttccacacctggaaggaccctcccaacagcttttgcctccctcctcataacttcctctctccaccccctctccaacactggccccttcccctaattaattccctggtgaggacagccagaggagctgcgacttggtattttttggaataaatagacattttcctgatcaaaaaaaaaaaaa

SEQ ID NO: 113789 - DNA, 413 bp, Homo sapiens
aatagagtcgtggcttgtattacaagtaatatttagctctcaatcatcagggttaatgggggattggagaggtgagaactgatatacagaggggactctgggctcattttggggggggctctgtccctccctgatctggacacttgctgcttaccagtcaggaatgctgttttaggagcttcctatgtgtatatgtgtgcatgtgtgcatgcatgggctagtgtgtgcacacaaccatgtacacatgtgcacatatgtccacctgcttacatgttttctggatgtgtgtctgtgtatgtgtgcatggatctcctaccctttcctcttcccatcgagggagggagctggacagaggccaaagggtgatggggaatcaagagccagagaggaagaggcctgccttttaaaacccg

SEQ ID NO: 113790 - DNA, 518 bp, Homo sapiens
agctgtggctctgcggtggacgtattaatctctgagtctcttatttcccagtctgcacaatgtgaaaaacgagtacatctgtcccacagaatccttatacgccactacgaaaaagtgacgcacgtcaaaaaaaaccgccttggcatggcgcccggcgaggagagcacgtttcgcacacagtgcccgccggacaccgctgcgccacggcaaaaaaacaaaaaacaaaccaacaaaaaaacaaagaaacacgcggggttcaacaaggagagggcgaggggtgccacgcgaaccgggcgaggacacggagagcgccaggcagagtagaagggcctctgtctcctcgtgacgccggtcccgcgcggccctctcgctttgtctcaggcacgaacgcgcgcacgaaaccgagaaaccgagaagccgagaagccaaggccgtcaggctctgatgaccggacaaggagcccaaggcgcggggaccgtggcacgcagctcggttggacggcttgggccggcggccgc

SEQ ID NO: 113791 - DNA, 1232 bp, Homo sapiens
ttaaatgtaaatccagctttattggtaaaaaaggaatagcagatttaatcagaaattcccacctggcccagcagcaccaaccagaaagaagggaagaagagaggaaaaaaccacaggaagaaagagaggcgggagggagggagaggaggaaggaaggaggagggaagggaaggggggaagaagggagggagggagggagggaaagaaagagggaggaagggcagagggagcagggagactgtagatcagggtctgaatggagatccggtcctggaagtaaatgatccaaggctccaggtgctgggaagagagcaggaggggagggcggcccatggcactgccaatctagaagggtagtggctcttccacaggaatgttgaggatgacatccatgtctggggtgcacttgggtctccgaagcagaacatcctcaaatatgacctctcggggttccccgggtctgggcttggagctcttccacctcggcccttaatacaggcatgttctcctcaaactggtcaataaactgagaggaaaggcacagcaggggagaagggagaagccaaatggcccccaaccaaagggagaaaggccaaaatgaacgaggagcaaagctatctggggaaatggtatgggttctgtcactgggacttgctggactccagagaggggacttcccccatgcagggttccggctgccttccaagttagtgacaatattcagtgttgctgaaacagttgagggatcatggagaatggagacaggttacaaagtggcggggaatgctcaatcgtgggaatgaatggaggctggcagagatagtgaagggcatgcacattaaaaaccagtgaagaggcaagataatgaaaattaattcaagaaggcagtgatggtgaagttcattaacactgataatgggtggtgggcagtaacaagaatcaagtggtaaagatgcacggtggttaatggctgaataggtgatgtttggtgatggttgtaaatgggtcattagccagcattgctggctaatgaggcaaggcctaggtcagtgccaatcgccttcccagatgaaagacaagtgacagtaatggcaccgacaaggagggaggccaacaccagaatcacgagacctcctgagcgccagatcaggagaagcctgactcattcccacaggccgtggggactgcccatccactgcttccctacagggaccaccaccctcctctttcga

SEQ ID NO: 113792 - DNA, 886 bp, Homo sapiens
  misc_feature (1)...(886): n = a,t,c or g
tggaaggaggagagcgggaaggggagtggaaggcaggggctgaagacacaggccaggcggaatgaagatgatggtggtcttgctcatgctgtcctcgctcagccggctcctgggcctcatgaggccatcatctctcaggcaatacctggactctgtgcccttgccaccctgccaggagcaacagccaaaggctagtgccgagctagaccacaaggcctgctacctgtgccacagcttgctgatgctggccggggtagttgttagctgccaggacatcactccagaccaagtggggcgagctgcagctgctgtgcatgcagttggaccgccacatcagcacgcagatccgggagagcccccaggccatgcaccgcaccatgcttcaaggacctgggctacccagaccttacatccgtttggcaggaagttgctgacccacttgccaagcccaggccccantatttcagcccctggaaagacatctaaagggacagggtcagggcaagcccagggctccctggcttcagcaggaagtgaaaaggctcagggaactggaggaagcggaagcatcaaggccagaggaggccacatgctgaccagcctgattgaggcaagagcctgcccctgccaccgccccgacccctctcctctctgcaagagcctgcctctgccaccgccccgaccccctctcctctcagcaagggatgggcctctctgcctcgcccacccctcagccctcctcccagccatctcctcttccctaaggcctctgtctccatagctctggtttccctgggcctcagtcctccccaccctccttcctctgtctccctgtcactaatgtgaggtttctttgtgcacattaaagtcttctttcagcatcaaa

SEQ ID NO: 113793 - DNA, 448 bp, Homo sapiens
  misc_feature (1)...(448): n = a,t,c or g
acgatgctgtgatgctccagagcggacgcaatacattgtggtgggcctggggcagcgttgttcaggcaggccctgtttcacggcatgagagtgcggaataccctgccccactctggtcctcagccttgtccctgcgtcaccacccccgtgcccacagccgccaaagatacagcgtccccttacctgtgcccagggcctgtgcaataaccttcaaaccgttgggccttcaaagccactgtgccctggcttcagacgtggcctcttcccctggacactcagcctccgtctgttctccacacatgcttccgattcacccctcctggcccctcctccctacccttcattcattggtgcaggtctgtgttcctcaaagccatgtcctgcttgcctcattcaccagcagttgtcattgtcagcaccttnttccccagacccaacgcccccaaat

SEQ ID NO: 113794 - DNA, 441 bp, Homo sapiens
  misc_feature (1)...(441): n = a,t,c or g
ccgtcgactgctcccattaggggaaaccccacagcggccgcaaacagttggccagtattggtatcatgttttatatagggntaggggcagcatgggggcaggggaaacagcgaagtcccgggtgaaatgatcttgaaacatccttgccagcaccctcctgggctcatctgagctgtgccccctccttggccatgaccccatggtgggagttccctctgtgggcacgggctctggctcgactgctcagccctgcttggcctgccactgggcgaggagcctggggaagctgtcaagacattcccctcggcagacggaaaacactctgcagctggggctgactgtggtggagggcctcccccactccctgcagcaaggcaaggcccagtggtgttttcttcttgaggggaccggagtcggtagggggagctgcagctggaggct

SEQ ID NO: 113795 - DNA, 750 bp, Homo sapiens
taagtccaacgggccacatgcagacttcactgtaggcaggttgctctcctgctttgattcctgttttgtgtgtaaaattggcataaacttcttgattgcagtgaaatcacaaaattctatatcggggtggtcaacctgagaacatttatttgaacctcttagccacatttccagcagggcaaaccaactgatgccctggaagagtcttccgcaccctctccaggtgcactcggcccagtcctgccgccgtgtccaggcgcccctcacccccacacctgctgcatggctggccacaccactcagtgcatggcggccgatgggcagccaacccaaacccgcgcctttccttgttccactgcagactcatatacagatgcgaaaaattccttcttccaccgcccttctcgttctgtaaagaaagaaaagaaacatagcctttctgcatatattctaaacgtctctctgcctctgtctgacatggggccaccccacaggtcagagtggtggtagaaccccttcaggactcccagccgtggtcaggctctgaatactcccttcccaacatccagactgctgggcctttggcatccacttacattagaacccacgtttgtttcagagcacattttggactttcactgttgggaaatgaatgaatttataacatgcctgcacagcgaaggaacacacctgtcgctcttagctctagagtcagaggatgagtaaacccagatgcaagagtataggaca

SEQ ID NO: 113796 - DNA, 435 bp, Homo sapiens
agagtcaacacataagggtttgggcgatgctggtactgatgaaataagacagcactggggcaatccctgttatggccaatgacctatgcatccaaggcagcttcttcagcttcaagttgggacagtcgagcaccaagaagaggatctacatcagcgtcttggtactggtggtgacaaagcagcaatctgcctgaggctctgcaagcctacaacattctttttaacatccccaagctggaagcacgtaaaatgtccataagccacagaaaaaataaataaagtatggcattttcttacaatagaatactatattgcaaagaaaatgaataaataatggctatacactataacaggaatgaatcttgcagacaaagttatcataaggcagacaatgtattgcgggcgctgggaggataccgcatacgtcgcgcgcat

SEQ ID NO: 113797 - DNA, 400 bp, Homo sapiens
gtcccaggcttgccgcatcctggaagttcaccctacttcagtatgcagtcagatccaggtacgcagggacgcagtgtgcggttagacccagttatgcagggatgcagtgtgcggtcagacccagttatgcagggatgcggtgtgcggtcagacccagttatgcagggatgcggtgtgcggtcagacccagttatgcagggatgcggtgtgcggtcagacccaggtatgcagggatgcggtgtgcggtcagacccagttagatggtccttaaacatgccatgctgatttgcccctgggggcttcacttgtgttcttccattgttcctcttttcctcacttccttcaggtttctgtacaaatgtcgcctcctcagagaggcctcatctgaccccgatgtatt

SEQ ID NO: 113798 - DNA, 795 bp, Homo sapiens
ttttttttttagtagagacggggtttcaccacgttgggccaggatggtttcgatctcctgacctcgtgatcctcctgcctcatcctcccaaaatgctgggattacaggcataagccaccgtgcctggcctctttaataatttttaaaataccctaaaggcttgtgaatatacaagtctactgataaattatgtattgtctgggggaatttgatagtcattgttttaggataactggattttacgctgtggtagacaggggctgtgacacttagtgttgcacaggtgtaattggtcatcctatgccttcaccagaataacttgggagtggtgccagaaactagagtctacaattctcactgtttagagagtgttaatgaccatactgtgtatgcataatagccgcatgtactataatagcccttaaaattaaactcattgggattgctgtaaatattttaaagtactggaggtgccttttacctgtttattagattttgaaaaggtttaaattatttcatgagcaatcttttaaatttcatttaacataaagctgaaaattcaataacaggataaaaaagctttttaacaaggctgccatttaacttaaatgtgttcatcttagctttcacttgtataaaatttgattctttgaactgcagcaataaaaccctcagctcctaagaagtcttaagagggtattctatatattctgctttgttttattttctgtaaattttgtaggtcccatatgtgcattaaaaataaatcctttatatataactcgtaaaaaaaaa

SEQ ID NO: 113799 - DNA, 1253 bp, Homo sapiens
aatacatggtggaggagtgcaggcagggtattctgttagccaagggcagtgtctggggcaggccgagaggcacgcccccctcccccccatgcctgcaggtacatactggtgcacatgtccatggcctgggctgcagccgggggcagcttggagcacagggacagagggaggggctggacagacaccattgccctgggctctggtttctgcacctccccggcctttccacgcactgcccttgccatctgattggacaaagagaactaggacagagggaagtgggtgtcccacggaagtcttggagaggtggcaggagagggactacgagaaaaacacaacagacggagagaaatggtttgcttgctgtccaagagcaacgtttcttttctccaggtgacttcatagctttaaattgttgctgtttaaaaagagagtggcttggagcaaagttagaagttgccgctcctgtttgcttctgacaggttatatgcccgcgccccccaaccaagggcacaatcactttggttgggtgtacacctgctctctctgttccccaagcctgggccctgtctgagcttggaggtggagcctcagggacgtcctggctcagaagatgtcctggccctcttccccaccagtccccaagcaggaatggcagaccccctctcaaacacagactcttgtcctttttctctgctttctgagtgtgtttatggggtatcttggcttataggtcaggggtcaaaccgatgacccctggcccccgagagacgttgtctttcccagaggtttgtgcttttctgtggtgggtgggctggttttcactgccaccaactgccagtgctcctccaaggctcggggcccatgctggggcccgggggccttctcaggctccacgttcaccggttgggaggctctggaccaggaagcagggaggcagggttacagtctagaagatggaagaaccttggggacactggaaggtcatctggaatcggcacacgcggagggaccgggaagccgcatcagcgtgtgccctcttaccgggctggttcctctcgggagggtggtcttcaggcctgcgctgggcatgggcccaagccaagggtgtggaggtgggacgtgggctccagacccacacagccttcctggtgcactggtgcaccctccctacccctctgttctgagagggctgcagcgggggagggctccccgccccacagcccgtggctctggtgcggggcggtctgagg

SEQ ID NO: 113800 - DNA, 972 bp, Homo sapiens
ggaggctgtgatgggcacgtttgccaaccccccccccccagtagagcccaggaccctcctctctcagcttgccagtgccctgccctccacatggcggggaacagcatcaatgaggtccttgctccctgagagcctctctggaacctgcccacttttctcaacatgtatattctgctttgtagtctgaggttgattttctagaggcgaggaaggggctgagttctgccctcgtgctgttcgctggtgctgatcagggccaagacgacccttccctctcccccacagcctgttgaggtgccgttgacgtggacagcgcccctcccttaagatgcccccttgccgttgccatgagccgctgtgactcacgcgtgcactgggccttgcttggtgctcccctcctcctcctgtctgagatcggagcttgctggagagcaccccaggtcgccgtgcttggctgcaggcccgtccctctctccccatcctcgggttcccagcgtgttttgtgcttgaacttggtggactcatcttaccccacaagagtggcctgctcaacctgcagcctccaatgtgccgtaggcgctctaggtccttcggggtttttcatgacaccaactctccctccctgcacttaggatgttctggaaatgagaggaaatccacattcctgccccaggaggtgggaagcctggcaacgatgtaacttcccctgagatgcggtatgatcaggcctcagcaactactcaggaggcaaaggtgtttggaaagcaaaccccaaacctcccggcacggcatgtgctctgcttccgtccctcaccgcctgcacaaggtcgttgagacttttctagaactccccggggttgtatttatggccttcaagcaaacaaattgaaaagcagtcaaggaggagttcagatagaaaagtgctggagatacacatctttccttcaagggaaatgtaatttatttccaacc

SEQ ID NO: 113801 - DNA, 531 bp, Homo sapiens
tatccgccacgtaagtttggatgctctatagcgagcgcgctgtccagtggtctgacctgcaactcccaggttctttgtgtctgtccctcgcatgggcctctgcacgctccgtccccacgcgacaggactcgagtccgattcggggctccgactcagaccctaccccgcagcgccctcctgcaaatgctctcctgaactttggttttccccgccttgctttcttcctcctcctgtagccgctgcctctcgatctcagaagcttctcttcctctgcactcagtgctaggccagatcccaaggcgacctgacctttcccctggctttgcccaacaacacaggcaccggtgactccaaacctgcatctcccctacgttccaggccccagcatcccactgcatgttccacatcccccccccttagacagctcgccttccctccccaaacgattccttacacagtcttcactttctcagaacgcggcgctaaacttctctaagttggaagggcaaaaaccttgcagctaactttgat

SEQ ID NO: 113802 - DNA, 1037 bp, Homo sapiens
  misc_feature (1)...(1037): n = a,t,c or g
aaaaaagtttttgccnaatccanaaatnaattggggccccaaaattctgcccttttaattgaaaaagaaaaatgtccctcaaaagccatgcggtaagtgcctgggaagtgggcctccgccttnaggaaccagtgttccaggccagaggcaactccaggcgcccggcagggccccacagcacatgcatccatccgnctgcccagggcaacggtgccaggctggcctccgggaggcgggcctggagcaggctcccaggtcagggcctccacgctcagcttttacctttctgggctgagtaggtgaaaccggcgacctaaagtatttgtgtccatttagtccccagtgccatggaccttgcctgtcctgaatccagcccatgagcccctttagaggacagaaaaatcaatacagggatgtacgggagaagatgatcagagatttgaggagaggagaaaggacagaagaggaataagaagggcagagaaacagagactaaaggagaggtggacaaaaagagaaagggaatagagaaggattataggagaaagtcaacaactcagagatggtgggaaggaggaataggaaaaggagaggaacaaaaaaaaaaaagagatggaattagtcggaagtagaaggaggaggagagtaaggaaaagaatgagaaaaaaagtagagtctcgagccagaggttggagagttctttcctggctcggagtcctgaagggccggcagtaggatctaagacagcgcacagaggcacccgagtgcagctttgtgaagacaggctctttaagcagacagagccaacccaagaatttggggctgggaaaaaaaggcctgcaaataaatagccaagaaatcccgcaaaaggcctgcaaataaatggccgacaattctgtgggaggagagcaaaaaacaaatgcctctgcacttagctgacaaatggaattttgactctggtaaagctgagacccccgtggtgctacacattgtaccagagcatgaaaaatagcaccagttacacgatctggcacttt

SEQ ID NO: 113803 - DNA, 443 bp, Homo sapiens
  misc_feature (1)...(443): n = a,t,c or g
tcgcgttaggattcgcacgagcttgtgtgctcgtttgctgcggacctgttacctcttttgtgaagcgctagctgctgagactccggcgctcgccatggccgactaaaagccccaggacggattcacgactgacaacaacgatcatattattttgaacgcggcgccgcacgatggttctgcggtgcccttcatgattaacacgcatacaccacttactaaactattgaacgcctattgtgaacgacagctattgtcaatgaggcacatcagattccgatttgacgggcaaccaatcaatgaaacagacacacctgcacagctggaaatggaggatgaagatacaattgatgtgttccaacagcagacggcaggtgtctactgaaaagggaacctgcttctttactccaaaactctgttctttaaagaccaagattacattctcn

SEQ ID NO: 113804 - DNA, 1058 bp, Homo sapiens
  misc_feature (1)...(1058): n = a,t,c or g
actgagaactgaggccgtgtcggggaattccgngcgtcctctggagaagtgcgcgcgtgagctgacatggacccaaatcctcgggccgccctggagcgccagcagctccgccttcgggagcggcaaaaattcttcgaggacattttacagccagagacagaggttgtctttcctctgtcccatctgcatctcgagtcgcagagaccccccataggtagtatctcatccatggaagtgaatgcggacacactggagcaagtagaacttattgaccttggggacccggatgcagcagatgtgttcttgccttgcgaaagatcctccaccaaccccccagtcgtctggggtggacaaccatttggaggagctgagcctgccggtgcctacatcagacaggaccacatctaggacctcctcctcctcctcctcccgactcctccaccaacctgcatagcccaaatccaagtgatgatggagcagatacgcccttggcacagtcggatgaagaggaggaaaggggtgatggaggggcagagccttggagcctgcagctagcagtgggcccctgccctacagacctgaccccgctggctattctcccacatgggaccaccaggccccagcccagagcctgtcgggagaagacccagactccttacttccaagtaggcaccagaggtgggaatggatggtgggattgtggtacctttcctaagaaataaccctctcctgctttactgctaattttttcctgctgcaaccctcccacccagtttttggcttactcctgagatatgctctcccaatcacgagagagaacatgcggtctgccaagcatgccactgcttttcttagcactcttccctcccctaaaccatccgcgtagtcttctaaatacagtctctccagacaagtgtctctagaatggatgtgaaatcccttaactcatcaagtaaggtggtactcaagccatgntggcctccttaacatcctttttggaacagagcacggtataaataataaactaataataatatgccaaccaacaaaaaaaaaaa

SEQ ID NO: 113805 - DNA, 3772 bp, Homo sapiens
  misc_feature (1)...(3772): n = a,t,c or g
ctactatggagatgtcatctgggagaatctcagcgtggaggcgggtggacttttaggagtaacgcagcagctgtcatcttttgaaacggagttcaacacacagccgtatcgtaaggtggaaggaaacttcaacccttttgcctctccccaaaagaaccgacaatcagatgaaaacaacttaaaagaccctgggggctccgagttcgactcgaacagcaaaaacacatgggctcctgctcctgacacatgggctcctgctcctgaccaaactgagcaagaccagaatagactgtcccagaactctgtaaatctgtctcccagcagtcacgcaaacaaccttatcagtagtgacttacagtaaggggctccatgggccttaccccttcggccagtcttaaacgggtgtcagcaagaagaaaaattaacaaaagacagaaggcctgactttggggggttagggcaaggggttcctctgggattgcagaccacatcgcacagacccctgggctctgaccccctctcatcccggaagaagaggaagaagcagaacagactagttttgagtaaacttcagtattgcatgtgtggaatgctgaatcacaggaatggtgttgaggctaccaagaagaaatccatgcagccactttgggttttggtataggcatcagtctaacaagtcattaggtcactcgggaagggggaaaaagtttaaaatgggggaaaaaaagccatctttttaaacaaaaattattttgcctacagaaaggttgtagtttttgaggcacatgttaatttttttccctctttccccacttttatttttttaaataagggataacatattctttatagaatagtgcttgttcctggaagagattcaggtgaaaagttggcgtggcatgttttgaggactctgcggatcagtgcctacaggagtacatcctgccctgccacatgactccagaagtctctgacccccatttgtttttaaatggcatcagccaatgagttatcacccttttcctcctcttttctctttaatcttctgttgatttacacctttgacatttgtattcgtcaaccctgtggcttgttagcatcagaacctctctgaagaccaaaacttccctgtgtggccagcagaggaagccttgaggatagatctcgggtgacgtgggattttctaagcctgagaggtgtccttctgcacacccttgtaacaattaaaattgcttttcttccatgtttttcttggcagagagaaatgccatcatgcttactgctcttttggattcttcatgcagtggcttcccatttgctctgggaacagtgcctctgtgctggttatatgtatgcaccacatgtgcacacacgggtgtcggtgcaactcaccagcaggtgtgcagtaggcaagcttgaaggtggcccatgcttctctgttgtcacacaacacctttccctgtttctcttcagttgtcctctgatattttcacagcctgttagtggcggctgatctgtagaggtatgaaaatacagccccaaagggggaatttgtcatggggaagggccagccactggactacttgatcttggagaccacattttagatggaaatgagaggacctccacagccccgcctccctgccaggatgctagattattggctgggaggtgggcaagtggcagcccacctgaagcaagaggctgattgactggctgctcactcaggcaggtggccctgcccctggcatcctgtaaattctgagcaaggttgagatgtggatatctccatgggaagcttgaacccaggctagaacagctgtctgccaaagatacaagaatatgcaaagtccctcttacccccctccttccctcaagtcttagttggtttgagagccagggatatggatccagggtgctgttgcagggtcacctgcctgttaccacacccccatccagcttgggtggtgggtgagggtgtgagacaggcagggagaccaggtaatgagtggctgcaaggagtcattatagcctggggtgtggggtnaagggtctgcctgcctgtttcatgtctgggtgtctgagttccaaaaaaatgtgtgttgtttgttcctcctcatcctcttctgagactgttgttttttttagagcttgattgtgggagaaaaagcttgtgttgaaattccctcttcacctccccaccccccaaaaaataaaagggggcataaactttattccactggagaagccctgggggtgggctggagccagcctgctgagaagcgtggtgcagctgggtctgggacttcactagagcttactctggagcacctatttttctgttgcacatggggagtgctccactccctagcagagcagaggggaagtctctggccagggtacccaacgccacaggcctcaggatggctttttgtctggaggcctcattaggcccagacttctgctgctggtaccagtctcctgagacactgcctccctggagcccatgcaatgcccagcttgtttcttactgctttagtaagcccttgaaagcaagcacatctccactgtcccctgggcaggattgtggggaggcttcacaacccctgctttcctgacttcctctttcttgcccaacactggggtgcccctttcccagttttcccagcaaggggtttcatgggccaccgtcagtggggtctgggcctgcaagaagtcgtcttggctcttcctcttgcttctaggcaaccacacttggcaagttaaatgtcccaagcaccttgtctcccttcccaagaacaaaccatttctgtgcacatccttggaggcgagatgagctccttgcagagggccagagtaagtgcaagtcatggagtgcaggcagaggggtccatggcttccccagcccagggagggtatcagtatcattcattctctctcccctcactgggtatgggttcagagcaatgcctagggcccctctctgctcccctgcctagtggggtggtagtggctacctctcagccccaatagtccctgctcctcttagaatcttcaccaagtggcaggccacctctgggcaggaccacctgcgtctggcacccaggaggtgaggcagacaccatggttagggtgatagggtctgaacccagttggggagacagaggggttcagacttgggaagaatctgtcaatgtgcatggaatgaggtgtttgtgtgtggatggatgtgcacgtgtgcatgctttttttctttttgccgtgaggacagttgaatttggggcatttttctacaagaagcagtcaagccttctctcccccataaggactggctgttaaccttaagccccatcaaaggttacttccaagccctggaagagaacctcaccaaaacaagctggtcgtggcctgaagggtggccgatggtgggaaatgggcatgagaataaatacctccccaaattcaatcttgagcccagcaggacgaggatggtagggttgccagggctcagaagtgcaagctgattactcaccgccaccctggcctcggccgcaccttttccttttgtttcctttgggtgaatgcaggagcagcagtggctgcccttcccaccttggnacagttggttgttgtgtaagaaaaccagcttggatgtttggtgggtgggggcctcattggtgcctaggaggaagataaagaagaggaggtttttccttattgttataaatgaatatttagtaagattaaattaacacacaccccaaaaaaaaaa

SEQ ID NO: 113806 - DNA, 471 bp, Homo sapiens
agacacatccccaaggcacatgaactccccagtgtggcctgccaatgccactggcaccttgaggcagcactggaactcctcctgggcatcgctgaacacctcaacatccaggaagagccggagtcggtggtccacagagcggaggccacagcgctcaggggggggactgaggctccagcaaccatggtcacgggtgctcggtgcatgaggtgggctgttcttggccctgtcaaggtggtctccatggccaggagggtggcagacagggctggcaaacggagaaggagccagagactgctctccctgtttccgctccctgttgggggttccccgagacacagcgaggagagccacgtggtcgctaccacagttaggacacacagcaggagattctgtcttatggaacagaggcctccagccttcctcacagtataatcccttgctgggctcctcgtacaaaattgcgtagca

SEQ ID NO: 113807 - DNA, 1422 bp, Homo sapiens
cctgcttgtgcctggtgagagggtgctgtctcccccagcccccaacaacctctcagacccccaccctccaacatagctgagttctgaagatggtgctccggacctgtcctcttaagtggtgcccagtgccctccccaccccacgttggtgctctcagctagaaggagctgtgcctctgcctgagccccaagccccgagcctggccttcaggacaggcagactgctctgtgtcgccacgggccggatacgccacagggttgatggcagaaacggccgagtccctggtctataacaagacacattctttaaacactggattacttctgcctccctctaggggacagaggcagtccgggtgccatcacgggtcctgcagatggccatgcagggctcctgcccacgcaggccaccgtatgttcaggacacgcactgggtctcagagccactggcccaggcagaagtctccttgagcccactgggtcatatgcgtgtcaccacacgtgaactagtgcggtggctgcctgcggacaccctcctgttctgagccctgggcctgtgttcttctcagacactcccagactgaggggtggtgtgtggcgggtggcagggtggctgtggagactgtggatctggagcctggtgctggaaccctggcctgagtttccgtgggcaactgacggggacctgtgctgctgctgctgaactgtgggtgggcgggcggcgccctggggagtggctcttgcctcaggaatagataggaacccctaaaaaactaggataccccctcctcgggcccatgaggcacgcacagtgacttatttaaagacttcccccttaatttatcttgcccccaggatgcgttcagtcttgtttcagtggttcagcagggccccccaccccccgccgactgccctcgccatcgtggtcagaccccccctcccaacacaacacgctgctggtctgtgtcagcctttgtaacgtgggaagctctgccgtgtcttccgggtgaactgtatttggattgcgcgcattgtcacggttccgcccctgggctgcaggcgccccttcctctgggcaccgcctgcattctgcatccccacctctagacgctgtaataaacagactgttttcactcggacctggtgtgaatggcagcctttcttccaggtggcatgaggcgtctcctggcggccagtgagaggccccggctagtgtgtcatcgccgaaacggggagtggagggcctaggggtgctcctagcagaagctccgggggctgacaccaggacaccctggccttggggaggcttatgagggcaccaggccacaggcaaggggaggcttatgagggcaccaggccacaggcaaagtgccttttgatgaacggaaaaccagatctgcgaccccaatgacatctgcaaagg

SEQ ID NO: 113808 - DNA, 2240 bp, Homo sapiens
gccgcctactactactactaaattcgcggccggtcgactttttttttcgaatacaaagttatattgattttcaacaatgaaaacaacacaacaaagtggaagtcaatccactaatttttttaaatctaacacgaatgctttagcacaaacaatactgcaataaatatcacattaaccaagtaacattattcttaacacaactctagagttcgtgtgcgcggttttaaggaaaactgaggggtaggtaaaggaaaggacatccgggcagacttgactgaggaagggctccaaaaaaaggaacagccaaagagccagggtacccaaaatactaagttaggcaaaaatggaatacaggcattttcaaaggcagtctaagaaatccagagctccactggggggggaaatgaccagggggtttggggggataatcccgtgtttcaatggcctcattaattaaatccttctcctatttcctagattcctttattttggaatctatcccaatctaaaggagcttctgccaaagggacagggagattacccttatgctggcctggaaatggccctatgccccccctaaattccctttcaactttgtcactacttatagcaaggggttccattcccaacaatggattactactatgtagacccaactcctgtctgatttagatcttcctttcataaacacattgatacttgttcaaggacagctgtaaatacatccaatttcttttctttttatcccccctctacaactctgcttggctaccaaaaatctagggactcacagagcaacagcagcggatggtcagaaaataaagtgcccagttccaatgcaagaactctctaaaagttcattgggtcacaatttttttttaaccacctcacctaccatgacttttttcttttctcattatcttgccaattatttctttcgaaattcaatcctccgagctacattctgagcaccaaattttttgaccaatgcctctctggtatcctcatcatctttttgcaaatctatgtcatcttgtcgggaccaaatggggatatccatcagctctctgaccaggacgctaagaaggcggaagtagcctcccagttccaccactatttttttaggaaaggcctgtgtaaactgttggataagatcccaagttaaacttctcccattaactgccgaatgatcttaatggcagctccccacctctgggttgagaaactttttcttcttcttcttcttcctcctcattaggctgtgtttctgagtcttcctcaggtgataggtggatcatcaacacacatagttatatgtatttcaaaatcaggagggctctcatccaccacaacctcctcaaactcccgggtggcttcccaaaagcatctttttgactgcttcttcattctcctggatttcttccttcaacatactcttcttcaaggcaaatctggagttctcttattcttgtggtttccccgctatccgcggcctccgggtcctcctccgccttccgcttgagcttctgggaggaggggctcaccggcgcgtcccccagcaggtacttatgctcctggccccgcaggtgcttgaggtagcggtccttcagggactgccacgagtgctgcgtgagcgagctcttctccatcgctttccacaaggcgttaccggtgacggagctgggcgagcgggcattttccttcacgtaggtaaggatggctacgtcgtccgcatccgtgaaggcgatccgcccggcgtgccgctgcggctccggctccgcggcgccctcggccagggccccgggctttgcttccgagccggtgtccgccgccgaggcggggcccagccgataggcctccagctccagcctctcgttgcgctccacgcagtccaggatgtactgcgtggagatgaaatcacccgaggcctcggacagcgccttccccgggctgggccagcagcacggccccgggctcctgcactcggcacacggtgccgccgccgtgcaggatgagcgtcgacagccgacgcttggccgggctgggccgcacgtagaaggacatggagctgccgtcgtccctcacgaacagagtcgaggaatgggtgggcccgttggggtctttgcccaaatccatcgcctccgccaatgtctgacgccgagcactactagaagagctaccccctcgcgagcgcctggcacacagagctcaactgactgagctgtcaccgcagacgcctc

SEQ ID NO: 113809 - DNA, 1560 bp, Homo sapiens
ctagacatcacgccttcttgcacgaggctcggcgccgcattcctgcgcctctcccgcccctgtctcccgctccgtctgccccgggcacggctggaggcagcaggacgcctgggccggggtacctggagtagaacagaaaaattattatgtctgtgttcccttgggactcattggaaattgtacagtgacatcttctgggatttagtctggattgtgcagactggtgcttaaaatggaagtcgatattaatggagagtctagaagtaccctgaccaccttgcccttccctggggctgaggccaactccccgggaaaggcggaggcagagaagccccgctgctccattacaccctgctccccgatgcggaggaccgtgtcaggctaccagatcctacacatggactcttaacttatttggttggcttcacgactggcgaggaactcctgaagttagctcagaagtgcacaggaggtgaagagagcaaagcagaagccatgccgtccttacgctccaaacagctagatgcatgacttgcccgctcctctcgtttgtataaaaccagaagtaggtactaccagccatacgagattccagctgtcaatggcaggaggcgaaggcggatgcaaggctcaggagacaagtgcactaaatctttaccttatgaaccttacaaggccctccatgggcctctggcctctttgtcttcttaaaggtaagagggctcactccaaatctctggactacctcaatctagataaaatgatccaaggagccagcttgacacagaagtgctacagtaccagcttcaacaccttaaccctccgaggggaccgttgtgtttgcttaggaataatacatgaatgacttggagagagcttaaaccaatttaggtcagcctacgcttggctagaaaaaacccactgctgtactctgtacatgactcttcacactatagatggttatatcagctaagtgttcctggaacataaaaattgtttgggtcaaatttgaatacaggaatgaaatcacaggtacttgggggggggatatcattctagagcacgcaactgcaaagaaaacagaatgttgactgttagtttgtatagctttttagctaggaaaaaaaggctttggtacagtaatttcatctttatgattctgacactcaaattgggaatgttacctgcttggttgttgctgacttgatatgattcattagaaatttatatcttcagtactcaagtacttcttgaatctctgtattttactataaaatgtatgtaatgatttgttttatgaaatttagaacttgaacattgctgaattggaccactttttatttttaaatattgagtttaaatattttataactggttttgcactgaaaaaattaacatttcagattgacaagagagtaatctttcttcacttgcctcaataatgttattgagcaatgaattttttatttccgcatggaaagttattgatctctatggctgtaaaatatttcctttatagtcgttattaaagtgtgtacttaataaaattaaaaaaaaaaa

SEQ ID NO: 113810 - DNA, 1759 bp, Homo sapiens
tcagccctggacagacctctgcccagggaactgctccatggggtccgggagagcagccatcccctgctggcaccatagacccacacaaggagcctgcacagcaagccagcggtgacacacctgcaggtgtcaggcatggcactgggcacaacagggacctggcaggagaaacagaccacagagaggtctggagttgaggctgtttgtcagcaaagcccctggtcccacacagctctgccctagagccacctctttgaccctttacccaccctgagaccataacttgcagcccctctgcagatctcctctggccactgcagcccctccaatgggctttttctctcatgcattccctggcctggaggcgtcagggaccccacatcctccctgctcctcagactcacagcccctccatgttacctcccgcacctcctccctggggcagctgctccctgggcctctgaggatgtcagctcctggctccctgcctctctcccactccactcctggctcagtcttagagatttctatgccctcatggattctacccctgccttcctgggcctctttgattcttggcttgcctctcctccaattccaaactttaggtgaaaatgggcctttaagcattttaaactggtatgtatacattagccgcattcatgcctttctaaacgcatttcaaatgtcaaccaaggaaggcacaccactgtattaagttttatactgcccgctgtaaaaatttaccacaaaacttaagtgacttaacacaaatttattgcaattctgtaggctggaagtctgactatgggtctcactgggactagaatcaaggctggcaggctgccttccttcctgggaggttctaggggagactctgtctctggctccttcaggctgctggcagaatccacatcctttcggtgggcagggccaagggtccccactttcttgctgactgttaaactaaggccacttcccagcttgtagaggctgcctacattccttggctcttggccccctcctccatcttcagagcctagccaggttccagtctgtgttcacgaacccatttcctctggttcccctgcagacaggaaaggttgtcccctaaggacttcatgagattaggttggggcccagcccagatgaatacatggatgaatcttccctcctcaaggtttttaaatatttaaaccaccatctgtcaggacacaattttgcccatgtaaactaaacattccactggtcccagggattaaggaatgaacctcttttgttggggaagggtgggcattcctgctgacccacagcactcccaaccaaaagcccaaaaaccaaagcaagacttactaacgcatatcaaataacattaaaggtacaaaatcgtgaatctcagttatcttaaatattccaatactatttacaaaattattcaaattctcacgccttccaactcaaaattagcgaatctaaagtaatttccatatcctagatggaaaccctcatgctaaacctvtctgattatgcatggttctaaatggtttcagtggcaaatacataacattgtactactgattaaactgaacttaaaagcatcaataccaccattgctgcacttaatcatgtctctgttgaatttttccttttaaattttatcttttcagaattatatatgtattgtttttaaagtagaatagttttttttttgaggccaataataaataataaatgcaggctcctactctgatcctctcca

SEQ ID NO: 113811 - DNA, 968 bp, Homo sapiens
tcttaagcacgagaaaagaaaaggacaggggagtcaagtgagcagtttcaattatcagccccgtgtaatataagggaaggtttctggagctgggtctactatcgtcatctgcaaaatggggataagaatgcctgttgtaaggacagttgaataatcttgctcatgacaacttacagaaggtacgaaataaacaccgatctcctttattctgatctcacattcagcaaatgtgagagaaatgtgaatgtactgaaatgtctgccagaaaaaagaaaatccaattcctcaaaagaatgacatcaggggttttgatatctattcacctacacttccctcttccacaggaagcggcccaccttctgacccacacagcccatcactgtgcttatcatggagctttcaagagtgaggatcggaggctgtattgagccagtgggtacaaaccacagggagcggctgttcaaaaatgggaaaacaaggtggccctggacaccggagtgctgcttgggcaccctctcagacctgccctgcaacagcatcaggaggctgagggtccccagccagaaggcccaagaggggcccaggctggaaccttttctgcgaaccagccctcatcttaaggtggctcaacaccacccctgagatctagcccatgcgacagtatggaagcaggaggccctactcctccacagaaagaccatttatgggcgcctaagccctgggagaatggcacctgagggaacagagcgtgcccacaagcagaccttggggagggagaagaggcagccctgctcctagtcgcagccagcgtgcgtcatgtccaggccccacaagggtgaccctggctcaggttctcatgctccagaagctggcccaggtggcagtgggttccctatggaggcagctcatcattcacaacacagcaacaaaccttctgctctcatgaggagaatgtattttctcgtgcc

SEQ ID NO: 113812 - DNA, 414 bp, Homo sapiens
aggaattcggcacgagcagcagtaggcgaacgaggtgacggaaattatgcgtaacaacttcggcaaggtcctggatcgaggtgtgaagctggccgaactgcagcagcgttcagaccaactcctggatatgagctcaaccttcaacaagactacacagatcctggtccagaagaagtgctgggagaacatccgtgaccggatctgcgtggtgctggtggtggttggagaactgctcattgtcctgattgcgctgctggccgcctttcttcctcagagcagagactgcagcagtggcccacggacccaggatgcaggcgttgtcttggggactgtgaacggacccagctggtcctgaaggagaagccaaatggctgcactggccgagtgtggtctccacaggaccttggtgtttgg

SEQ ID NO: 113813 - DNA, 1239 bp, Homo sapiens
cgaagaaccgccgaggtctcgggagatggacgtttcgtcttgttttgggccggttctggagtggctggcggcggggcctgggtgtccgcccagtgcccgaggacgcaggctttggcaccgaagcccggcatcagaggcaaccccgcggctcctgccaacggtcggggcccctcggggaccagcccttcgcggggctgctgccaaaaaaacctcagtcgggaggagctggttgatgcgctgcgggcagccgtggtggaccggaaaggacctctagacgacagcgaacaacccacagggtctaccagtgacaggaaaaccaggagagctgacgttgttctcagtgctgccagagctgagccagtccctagggctcagggagcaggagcttcaggttgtccgagcatctgggaaagaaagctctgggcttgtactccttttcagcttgtccccagacacgtagtcgcctccagaagtacttcacccatgcacggagagcccaaaggcccacagccacctactgtgctgtcactgatgggatcccagctgcttctgaggggaagatccaggctgccctgaaactggaacacattgatggggtcaatctcacagttccagtgaaggccccatcccgaaaggacatcctggaaggtgtcaagaagactctcagtcactttcgtgtggtagccacagctactggctgtgccctggtccagctgcagccactgacagtgttctccagtcaactacaggtgcacatggtactacagctctgccctgtgcttggggaccacatgtactctgcccgtgtgggcactgtcctggggccagcgatttctgctgccagctgagaacaacaagccccaaagacaggtcctggatgaagccctcctcagacgccttcacctgaccccctcccaggctgcccagctgcccttgcacctccacctacatcggctccttctcccaggcaccagggccagggacacccctgttgagctcctggcaccactgcccccttatttctccaggaccctacagtgcctggggctccgcttacaatagtcctccctctgttcctgaccccctcacacacactggaaagggaaggtggggggctctgcagtcagacaaacctaagatcacatcctggacagcccacttgcttgctgtgtggcattgggcaagtaactttacctctctggacttgtgataataaaagttcctacctcaaaaaaaaaa

SEQ ID NO: 113814 - DNA, 484 bp, Homo sapiens
tgcgtcctgttctacagctatggccgggccagctgcagctttccgccgcttgggcgccttgtccggagctgcggccttaggcttcgcttcctacggggcgcacggcgcccaattcccagatgcctacgggaaggaggtgaagtaactgcgctggggctccctgactcgtgggtctacgaagctgtttgacaaggccaacaaacaccacttcttacacagcctggccctgttaggggtgccccattgcagaaagccactctgggtaatctttccctgcgcctaaccctgaccaagccccacacactccctctcagcctgccctgttcttaacaatcctgttttctgtgctgagtctccttcaggctgggttattgctagcttccggaacgaccttattctgcaccagcttttactaccaggctctgagtggagaccccagcatccagactttggcccctgcgggagggaccctgctactcttgag

SEQ ID NO: 113815 - DNA, 1606 bp, Homo sapiens
cgcccccgtcgggtgtttgtggtggggctgcggagtcgccgatcccgccggaagcgccaggacaatggggacccgggacgacgagtacgactacctattcaaagtggtgctcatcggggactcaggcgtgggcaagagcaacctgctgtcgcgcttcacccgcaacgagttcaacctggagagcaagagcaccatcggcgtggagttcgccacccgcagcatccaggtggacggcaagaccatcaaggcgcagatctgggacaccgctggccaggagcgctaccgcgccatcacctccgcgtactaccgtggtgcagtgggcgccctgctggtgtacgacatcgccaagcacctgacctatgagaacgtggagcgctggctgaaggagctgcgggaccacgcagacagcaacatcgtcatcatgctggtgggcaacaagagtgacctgcgccacctgcgggctgtgcccactgacgaggcccgcgccttcgcagaaaagaacaacttgtccttcatcgagacctcagccttggattccactaacgtagaggaagcattcaagaacatcctcacagagatctaccgcatcgtgtcacagaaacagatcgcagaccgcgctgcccacgacgagtccccggggaacaacgtggtggacatcagcgtgccgcccaccacggacggacagaagcccaacaagctgcagtgctgccagaacctgtgacccctgcgcctccacccagcgtgcgtgcacgtcctccgcccgcccccgccacggtatcctctggcccctccctgctgtccctctgtggccggctcgttccagccctcccagtgagctctgcacggccgggccggggcccaggaaggacaggagccagtgctaccccgtcctgcccggggaaaagctagaagccccggtttgctgcacccatgaaactcgggtccccacagcgtcttggcggggtggggagggcggcaggatggacggggctggccagaggcgaggaggacgggcggacggcgccgccttctccccttttccttggccgactctagggagcgattgcctccctccctctgtgaccgggtggcccagccagcccgtcgtccccacccagaaccgtgctctgggccaaagcccgaagaaccaggcagcgggggccggggcaggcggaccccccgggctctcagcgcccacccgctcctccgcacacagcagctcgcacaggcctcccacctctgcctgttgattgatgcagggagaagcccgtccccccctctcccctctcccctcccctctcctgcacgcaacgcgccctctcggccctccctgtccccctcctctgtctcgtctccccatctggtctggaacctgtttgcaagtgaagcaatatctccgtgttttgtatatacaaccgctcttgtagcctttggtttttgttaatgtagagaaacacagattctttatacactttgtaagatttacgccaaaccccagctctcgatctcttcttctccctgtggcccctgcgctgttgccccgtccccgtcaccccgcccgttactgaaatgtataatctgacttcctgtacagaagaaaaaaaaa

SEQ ID NO: 113816 - DNA, 453 bp, Homo sapiens
gccaagggggtcaggacagtcaaagcagagtgtgctattcattcatactcattattattacttttgttattcatagaaattgatgattcttacttaatttcaatctgtgatctggacctaaaggatgggatctgagtttccagatcctcacatcccttgggtggctctgccatcccctggagaccctcacccccaagccgacccctcctcaccagttcctgcttccctggctcaagcatccgtcaccccgaccccagccagagagttgccgcctccatcaggcccagtagggaccgtgcccagggcccaaaatatgttttcattttgattccttttaaaatcagggaaaacaatgaataaaataataatgaatatagaattacaaatccagcctggattacatctttgcaatacatctttattccaatcctcgtgccaagcatggcgtaagca

SEQ ID NO: 113817 - DNA, 2898 bp, Homo sapiens
aggcgggactgactttttctcttcagagtttgcgcatgcgcgtaacgtcctgaggcggtgggtggtatattaggcgaagaggcggggtcgcccaagctgccgcgctggcattttctcctggacaaggagagagtgcggctgctgagagccgagcccagcaatcccgatcctctgagtcgtgaagaagggaggcagcgagggggttggggttggggcctgaggcaagcccccaggctccgctcttgccagagggacaggagccatggctcagaaaatggactgtggtgcgggcctcctcggcttccaggctgaggcctccgtagaagacagcgccttgcttatgcagaccttgatggaggccatccagatctcagaggctccacctactaaccaggccaccgcagctgctagtccccagagttcacagcccccaactgccaatgagatggctgacattcaggtttcagcagctgccgctaggcctaagtcagcctttaaagtccagaatgccaccacaaaaggcccaaatggtgtctatgatttctctcaggctcataatgccaaggatgtgcccaacacgcagcccaaggcagcctttaagtcccaaaatgctaccccaaagggtccaaatgctgcctatgatttttcccaggcagcaaccactggtgagttagctgctaacaagtctgagatggccttcaaggcccagaatgccactactaaagtgggcccaaatgccacctacaatttctctcagtctctcaatgccaatgacctggccaacagcaggcctaagacccctttcaaggcttggaatgataccactaaggccccaacagctgatacccagacccagaatgtaaatcaggccaaaatggccacttcccaggctgacatagagaccgacccaggtatctctgaacctgacggtgcaactgcacagacatcagcagatggttcccaggctcagaatctggagtcccggacaataattcggggcaagaggacccgcaagattaataacttgaatgttgaagagaacagcagtggggatcagaggcgggccccactggctgcagggacctggaggtctgcaccagttccagtgaccactcagaacccacctggcgcaccccccaatgtgctctggcagacgccattggcttggcagaacccctcaggctggcaaaaccagacagccaggcagaccccaccagcacgtcagagccctccagctaggcagaccccaccagcctggcagaacccagtcgcttggcagaacccagtgatttggccaaacccagtaatctggcagaacccagtgatctggccaaaccccattgtctggcccggccctgttgtctggccgaatccactggcctggcagaatccacctggatggcagactccacctggatggcagaccccaccgggctggcagggtcctccagactggcaaggtcctcctgactggccgctaccacccgactggccactgccacctgattggccacttcccactgactggccactaccacctgactggatccccgctgattggccaattccacctgactggcagaacctgcgcccctcgcctaacctgcgcccttctcccaactcgcgtgcctcacagaacccaggtgctgcacagccccgagatgtggcccttcttcaggaaagagcaaataagttggtcaagtacttgatgcttaaggactacacaaaggtgcccatcaagcgctcagaaatgctgagagatatcatccgtgaatacactgatgtttatccagaaatcattgaacgtgcatgctttgtcctagagaagaaatttgggattcaactgaaagaaattgacaaagaagaacacctgtatattctcatcagtacccccgagtccctggctggcatactgggaacgaccaaagacacacccaagctcggtctcctcttggtgattctgggtgtcatcttcatgaatggcaaccgtgccagtgaggctgtcctctgggaggcactacgcaagatgggactgcgtcctggggtgagacatcccctccttggagatctaaggaaacttctcacctatgagtttgtaaagcagaaatacctggactacagacgagtgcccaacagcaaccccccggagtatgagttcctctggggcctccgttcctaccatgagactagcaagatgaaagtgctgagattcattgcagaggttcagaaaagagaccctcgtgactggactgcacagttcatggaggctgcagatgaggccttggatgctctggatgctgctgcagctgaggccgaagcccgggctgaagcaagaacccgcatgggaattggagatgaggctgtgtctgggccctggagctgggatgacattgagtttgagctgctgacctgggatgaggaaggagattttggagatccctggtccagaattccatttaccttctgggccagataccaccagaatgcccgctccagattccctcagacctttgccggtcccattattggtcctggtggtacagccagtgccaacttcgctgccaactttggtgccattggtttcttctgggttgagtgagatgttggatattgctatcaatcgcagtagtctttcccctgtgtgaggctgaagcctcagattccttctaaacacagctatctagagagccacatcctgttgactgaaagtggcatgcaagataaatttatttgctgttccttgtctactgctttttttccccttgtgtgctgtcaagttttgggtaagaaaggaaagaaggctgcggttggtgttaagaagcagaagaagcctctggtgggaaaaaaggcagcagctaccaagaaaccagcccctgaaaagaagcctgcagagaagaa

SEQ ID NO: 113818 - DNA, 1128 bp, Homo sapiens
cgtcgacgatttcgtggatgagcggagccggcgtgggcggggcgtccgaggagagccaggccatgcaggcccacgtgtctattatcctcccagtccacaacgctgaaccgtggctggacgaatgtttgaggtctgttttgcaacaggactttgaaggtaccatggagctgtctgttttcaatgatgccagtaaggacaagtctggggctatcattgaaaaatggagagtgaagctggaagattctggtgtccacgtgatcattggggggcacgattctccctctcctagaggcgtcggatacgctaaaaatcaagcagttgcccagagctcagggtcttacctttgctttttggattcggatgacgtcatgatgccccagcgggtgaggctgcaacacgaggctgccgttcagcacccgtcgagcatcattggttgcagagtgaggagagatccccctaactccaccgaacgatacacacgttggatcaaccagctgacgccggagcagctcctaacccaggttttcacctcaaatggccccacggtgatcatgcccacctggttctgctcgcgagcgtggttctcccacgtgggcccctttaacgagggaggtcagggcgtcccggaggacctgctgttcttctacgagcacctcaggaagggcggcggcgtcatccgcgtggaccagagtctcctgctgtatcgccaccacccacaggcggccacgcactgcgtcctcgagacgaccatctggacccaccgcgtccgcttcctggaagagcaggccctgccccgctgggcgggcttcaccatctggaacgctggcaagcaggggcgccggctgtaccgcagcttgactgccggcagccagcgcaaggtggtggcattctgtgacgtggacgagaacaagatcaggaaaggcttctattgccacgaggactctcaggaaagacccaagccccgaatccccatcctgcacttccgagccgcccggccacccttcgtcatctgcgtgaagctgcctctccgctattagcagaggagcagaacacttgacaggtggacacaggccacccccaacccctggccctggaggaggctccacagtggcctcctagagccaggag

SEQ ID NO: 113819 - DNA, 1060 bp, Homo sapiens
tttacccagtttcacggttggtatttcggacatgcaatgttccatgctgtcaaacttggaatgcctcgtttggatacagggagacaaagacttggagacccagaagcctgaaagtggttcttgaccgactttgtccactcaaattaaggcatcatgcagctggtcatcagttacattgctggttgcacgcaggcacacacacaccagtgctcacagccagcacttgttaagaatggttgagctggaccaaatggtatacgtgtctttcatcaatataaacatggactgcattcatctggacacgggcctttcccgcctaccgagcctgcccaccacccgaagtttaagctcatcttggaggacctgacactcaggaagccgtctcccgttgttccaccggctttgtggccccaatgtctgtataagctgctgatttgccttgggaaaacaaaccagcatcgatttcagagaaattactggataatttgcgctgtgaggcgcctagatcgcaaggcgcactccgcaaatgacagccgctcccgtgcacttgtccagtcattcgggtggcatactgtccgggtggaagcccgccaaaataatccatttggaagggacggagagcttcgtcagaaattgccttcttgtagctatgagacattgagcaaaacagataagaactggggcaatggaggcataaacattaaggctaggatgtatttttggggagaaagcggcggctagcagggacgaagctcaacttcatgcgccgcgccccggaatgctttgcctttagccactagcggagccgcccgcctgagggagccctccggaagtgagcgcacgcaaccgtgcagtcagattcctccgccgaccgcggccctctctcctcgggctttgccttcgctctctagcttttcttctttcactcccgctcgccgactccagcccgctgggctcacgctctgccggacaccaatcccggcggccctgcccgacggagctcaaggctaggcctggccttgtccgcggcctcgtgcaagctggcgtaatcaggtaaagt

SEQ ID NO: 113820 - DNA, 850 bp, Homo sapiens
tattactctgcggtgatattattaggattacattgctcaacttttcaaggaccgtaaaagaaattgttagctgtgcttagagatggggatcttagaggaggcaaactttatacaaagggagaaaataatatagccatgtgcacggatgtgtggttttctttttatgatttaaaaatttgaagtattgactgttaatgctttgcttgaagtgttacctgtgatcagaccccgacagtgtttaaggtaaagcgtggcctgtagatcccgggacgctcccagtttggccccaatcattcgttaccctcctggttctcagatccttcgaaatgtgcagatttgcagccctgcatcctgcttgtcactcagcgtggcccaagttttgtttcaaaaaataggagccctattaggtcatccccagcttgttaagtctcattattgtgtgttttcccctgggttgttggaatttgacacagttttacctgatgtgatgcttgaaggcgaccctatgactctttttaaaggaagagtttgcaggacgattttggactgggggttgtgggaatggaggaggggaggtgggcacatggccggggaaacagctccaggctgcacgaccagaccagcgttcccaccctcaagagccagtgagaaaccttggggagaaaaagcaaagatgggcaaggcttccctgttcgtctccactcatatcaaaatttccagcctgagctgggtgtggtggctcacatctgtaatcccagcgtcatgggaggctgaggcaagaggatttcttgaagccaggagttggagatcagtttggccaacatagcaagaccccccatctctaaacagt

SEQ ID NO: 113821 - DNA, 473 bp, Homo sapiens
ggaatccctcaggccacatttccagctgccatccacacagctgtccttgaagatagcaagagcacttctagtgctcacatcctcaactgcactgtcccctcctttacactgctggtaccctgcagccacacagccaggccagctttccttgattcccccacttctgttactggcaccgccatgctcatggccactcaaaaggcagggcccacagaccatcccccacccctgccctgccattctacagggcaagtgaaagctatgccaaccgtgggcactctcagcctcaagacatcagagtcactctgcttgaacaccacagccctgagcatgtcagcaagccctgcctttagtataacttcccccatcaggccaggtcacctttgacagaagctcctgcatggcataggcagagagcaggcattaggaaggacccctaagccttttccccattggcagctaagtgaatgtcg

SEQ ID NO: 113822 - DNA, 460 bp, Homo sapiens
cgacccacgcgtgcgggaatgtctgaggtggcaacacttctcttcagccagacagcactggccagtttggagtctgtccatcctgcaggccacaagctctggatgaggaacttgaggcaagtcaccagcccctgatcatttcgcctaaaagagcaaggactagagttcctgacctccaggccagtccctgatccctgacctaatgttatcgcggaatgatggcccagggctcctcagagcaggaactccactatgcatctctgcagaggctgccagtgcccagcagtgagggacctgacctcaggggcagagacaagagaggcaccaaggaggatccaagagctgactatgcctgcattgctgagaacaaacccacctgagcaccccagacaccttcctcaacccaggcgggtggacagggtccccctgtggtccagccagtaaaaaccatggtcccccc

SEQ ID NO: 113823 - DNA, 424 bp, Homo sapiens
  misc_feature (1)...(424): n = a,t,c or g
nnnnnnnnnnnnnnnnnnnnnnnnnnnnnnnnnnnnnnnnnnnnnnnnnnnnnnnnnnnnnnnnnnnnnnnnnnnnnnnnnggggaaaaaaaggggacccaaagggccgaaatttttgggggggggcaaaaagcgccaaaatttttaccccggtccccggcccagattttcttcccgccggaaaatttggcccccaaaaaaaatttttttccaaaaaaannnnnnnnnnnttttttttggggcacaacccttttttttcttcaaaagggttannnnnnnnnnaaggggaaagggtttttttggttttcccaacccaaatggggccccaggggagtctgggaaaattgggggaaaaaacttttaaacccattttgccctctaaaaaccccgggttccccacacaagttttaagggaggcggaaaa

SEQ ID NO: 113824 - DNA, 1833 bp, Homo sapiens
ttaatttcttaaaaagtacacttctcatactatgtgtttggcattgactctggttaactcttgtgcagcaacacctacgagatgctatcacacacgcgccagctgcactcctgcaccagccgctgcaacgactgcacctcacgtggtggcggggactcacattcacaagacgggacgggaacatgcagtaataaaatagctttttaaaaaataacacatataaattcatcacataggattatgcttttcactgcaaccttgaaggtggcatttatctcaatctgtgactccagctatttagtggcagacaatcccggtgaggcagcctgtggtcccaccttgtaggtggcagcccctgcaatctggggtctagcctgtcggcgtttgctttattgtgggtggagcagctgctgcagaatctgtgagttgactcaccagtccctacagttctgctaccaaagtggtcttcaatttaggggcctgacccctccccagctggagacaagctgccatctccagggctcgctgtaaacagcctccactcttgggctgaataagcactcccaagaagctgggcccctaccaacagattaatcggctgcagagtgctcatcccctccccacacccccatccacccctgcctcctcctcctttccactgctttaaccaaaccttaatgaggtaaggccaggctaggtcagggctcaaaggaaaatgggctcaggaaaacttagtttgcccagccttgtcagctgagattggttttgctttccagccagaagtagaaacttgatgctttttcctttttgcagtgttaaaaaccctatctccagttttattatgttccatcacagttttggggcaaagccagaaagctgacttgtttgcttcaaaacacaaaccaaggcactgtcttctgtgcttttcagggaggtgggaaggtaaaggagactgcccactataggggctcagttcccccaaaggccttgcacaccttttgataaaccccctggctgaggcaatcctactggctgtgcagacaaagatgtgacagcagcactagatgctgacccaacaagcagtgctgggcctgggcggtggggcatgttcagcactgcgggcagcagtcagcacatgcaagacattcagtgagcagagggctgccctcggcctccaactgcagccgccctggcgcgtgaaatgaaattggtgggccttcctaggattgtaaaatgggacttgtcatttgtgtgaggttgaaatctactatactttgaatatggcaactgttttcaaccactgaagcaaagaaggtaaaggccagatggggaatgaaaggtaaggtactgtggtctatttccaaatttgggagcaatgtgtgtaacttcaactgttggagtaaatgagttatggaaaagccacaatttctaaaatcccaaggttctaccaaaggagtgaggttcctggggaaacaggcatgaggcagcagctcaggctgatgtgtcctgtgcgatataaaaagctgtggcctgatctctaaagtggggcttttgaaaatcaccagtccacaactacctgcctggctagtttaacctagactgcttcagaagcaagggagggggataatggactggagaaaaagctgacacaaaactcaagacaaccagtttcagtacctgggccctcaaagcaatagtgaggactgagaaagtagcaaggggccctgatgtcatctattttttgggaagtgttatttttaatggtttcattaaaaacttactaaccttctactggaagaatacctcaaatgaaaaatttttttttctcgtgcc

SEQ ID NO: 113825 - DNA, 1045 bp, Homo sapiens
  misc_feature (1)...(1045): n = a,t,c or g
atcgagatccctagtccagtgcggtggcattcgagtgtaccacagggggacagagtcattagaacaaagtatggccaggcttgagcccaggtggagcagcaaagcctggaggcccggcagtgggacctggcagtgggactccggggaaggctttatggcccctgcactgggggagagggggcagacaggagggggatgacactgaggaggaaggtggtgttgagaggctcgcagttaccaggggagcagagctcccacctgcactggggaagacccaggagatggaaggcaggccctgagcggggccatgggtcgcgggcagacacaggagatgcctctggagcttgacccagtgcctgggagccagatgccctctaacctggtcaggagctcaggcgggtagaggtctctgttgagttctgctggaatctggtgaccagaaagtctcggcgagagggatttgagctagaacttcagcagacagtggaaattgtgtaacggggccttggagggaacaggaaacggagcgttgagggggaagggagccagcagtagcgaggggaactgacattcatagcaaacagggtgagcggnggtcaaatgctggccccagattgagtccagcagagcgatccgggacaggtggcctctctctgcccccacttccacacctccaaaaaggagaggcgaatttcctgcctcccaggaagctctcggagctagtgggggacaccagctctttctgcatcaaaccctggctctccctgtctttgtgttcttgttcctccccaccccgccctgagggaggcctgggagcagccagggaggtgaatcatgacatggtgataatgactatggcaacaataacagctggcagaggtgccaagggcttggaggtatgttcttgctcttcactagtgtcaacccatttccttccctatcctcatccccattgtacagacgatccaacggaggcacaggcccactaaggaacctgctcagggttagctggctaggaaatagcagagtaaaagaagagatggtt

SEQ ID NO: 113826 - DNA, 487 bp, Homo sapiens
  misc_feature (1)...(487): n = a,t,c or g
ggaattcccgggtcgacgatttcgtccccttctgtgtcattctctgaggaaaacaagttcttctcaaggaggatagtctgaacttgtcaaacagtcccttaannnnnnnnnnnnnnnnnnnnnnnnnnttgatgcaccagaggattcccatttagagaaagaaccactggaaaaatttccagatgatgttaatccagtgaccaaagaaaaaggtggacccaggggcccagaacctacccgatatggagattgggaacgaaaaggacgctgtattgatttttaagtcgcatattctttaacttcaatattgttttctgaatatgtacatctgaattaacttatttctgatnnnnnnnnnnnnnnnnnnnnnntatgtcgngtagtttgtataatgtgtttaaatatatatatatatgatggctttggaagaaaatatgctgctgtaaattaggaaagnnnnnnnnnnnnnnnnnnnnnnnnnnnntct

SEQ ID NO: 113827 - DNA, 415 bp, Homo sapiens
  misc_feature (1)...(415): n = a,t,c or g
tttcgtgtgatttcatgcaggtaaagggcaaagggtnnnnnnnnnnnnnnnnnnnnnnnnnnnnnnnnctggtatacagttacgtcctcaagtcttgttaactggcaaaacctgttctttctccctcctgtcgctctggctcaggcctggctcaggtctcccctccctgcatggggccccactcttgcccttcacaggccccagatctgttttgtcctcctcctgctcacacaccttccatggctccccattgttcttgggagagagttcccactccttatcctgtcactcaaagcccagcccactgcacagacgcatggtccattccccgacccaacccaagttccagccacaaatgctggaagtatgtagaagtagctcatgtcaccccctgcggtggcactgccctgctgga

SEQ ID NO: 113828 - DNA, 481 bp, Homo sapiens
gtttctcctgggccttgaaaggaattgaaggatttaaatgtttgaatgtggtggtaagatggctactgtaggtggaagatgactcaccctttaccttgaaaggatgaaggagaaaccctgattgaggtctaagaaaaaacaatcatgacctgcggaaggctttggccagagctgtagagtgcatgagggtgagaacggggggatcccgtgaaaaggtaatacgtcggctttcatatgttttaggcacgagatgagctgaatcctgatatgatttgagttagtcttcccatgacctgaaggaagagctggtatctccatttaagaaaagtgaagctgcccaggtgtggtggctcacatctgtaatcccagcactatgggaagctgaggcaggaggatcacttgagattgggagtttgagaccagcatagagaaaaatagcgagacccaatatacataaaatagactaaaaaaacacaaagtc

SEQ ID NO: 113829 - DNA, 434 bp, Homo sapiens
  misc_feature (1)...(434): n = a,t,c or g
tttagctttnnnnnnnnnnnnnnggcaaaggaaagaagggaaaagaaaacagaaggaaggaaggaagaagagggaaagggaaggaaagggaagggaaggggaagggaaagggaaggaaagggaagggaaagggaagaaaagggaagggaaggggaagggaagggaaagggaaggggctgtcacttagcccagaattgcataaatctcaatcattcacctactttggtcacaatttttgccagctccgtatattacctgctcaattctttacctaacatatttctttaaactacctttctttaaatgtaaatatttttctcttcctcttctcttcctgaagccattcactggtgtggaacaaggtaagcatccacgctagttatgagaaaagtcatggtggcccaggacacagtgccgtcccaagcaacacgaaa

SEQ ID NO: 113830 - DNA, 519 bp, Homo sapiens
ccaggatggagtgcagtggcgcaatctcggctcactgcaagctccgcctcctgggttcatgccattctcctgcctgggaagcagaggttgcggtgactgatattgccccattgcactccagcctcagcaacaagggagaaactgtctcaaaaaaataaataaataaataaaataatgtagatcttgaaagggggttggtttatgctggtgtatgtactttccaaagttagtaaacttacacttaaggttatatattttggccaggcgcggtggctcacgcctgtaatcccagcactgggaggccgaggcaggcataggcacagtggccacatcaggaggcagtacttgggcaagtgttggaatttacagctgaagtagctgcttgccctcatggagcacattaaaactttcaggaatgactgagagataagctatagttactaagctctggttatatgtcagacattttctcagaaatgaacaaagagggccagttacttcaaggacaactgacagtat

SEQ ID NO: 113831 - DNA, 434 bp, Homo sapiens
  misc_feature (1)...(434): n = a,t,c or g
tttcgtatcagctttaaactctaggcagcaaatgcactgcaggcatgttttagggagttttgacttctttgggtttgtttgataacatttgataaataattgcctttctgtgttgaatttctttcttttttcccnnnnnnnnnnnngaaaaaaaaatttgcctttgccccaggctggaaggcaaggggggaaccccgggtttttggaagcccgccccccgggggtaaaaccattttccgggttaaaccccccaagaaagggggaaaacaggcccctnnnnnnnnnnnngggtaatttttttttgaattttgggaaaaaaccaggtttccccatggtaccccggggggcccaaaaccccggaccttggaagccgcccatttcacccccccaaagggcggggatacacgggaagaacccctggcccgggccctttt

SEQ ID NO: 113832 - DNA, 440 bp, Homo sapiens
  misc_feature (1)...(440): n = a,t,c or g
nnnnnnnnnnnnnnnnnnnnnnnnnnnnnnnnnnnnnnnnnnnnnnnnnnnnnnnnnnnnnnnnnnnnnnnnnnnnttgattggcacccagcctggacatcaaagcgggaccttgcctgctcccttgatgattctaataacacggtctccaaagaatggacagaaattcctggagaaaacagtgtgctcctggcagccacttccacagcccctggaactctggcacaaggctctctgattgactccttcccagatcttcttggcttagcggctgaagactgatgctgccggatcgcctcggaagcctgggctgtactgcctcaaggcttcacagacagccgccattacttcagtcaagcccaaatttcttcctcatctgttacctatcttggcgtaattctcnnnnnacacacgtgctctcgctgctgatcgtgacgaaa

SEQ ID NO: 113833 - DNA, 1651 bp, Homo sapiens
  misc_feature (1)...(1651): n = a,t,c or g
agaggtctctgcggcgcggtcctcggagacacgcggcggtgtcctgtgttggccatggccgactacctgattagtgggggcacgtcctacgtgccagacgacggactcacagcacagcagctcttcaactgcggagacggcctcacctacaatgactttctcattctccctgggtacatcgacttcactgcagaccaggtggacctgacttctgctctgaccaagaaaatcactcttaagaccccactggtttcctctcccatggacacagtcacagaggctgggatggccatagcaatggcgcttacaggcggnnnnnnnnnnnnnnnnnnnnactgtacacctgaattccaggccaatgaagttcggaaagtgaagaaatatgaacagggattcatcacagaccctgtggtcctcagccccaaggatcgcgtgcgggatgtttttgaggccaaggcccggcatggtttctgcggtatcccaatcacagacacaggccggatggggagccgcttggtgggcatcatctcctccagggacattgattttctcaaagaggaggaacatgactgtttcttggaagagataatgacaaagagggaagacttggtggtagcccctgcaggcatcacactgaaggaggcaaatgaaattctgcagcgcagcaagaagggaaagttgcccattgtaaatgaagatgatgagcttgtggccatcattgcccggacagacctgaagaagaatcgggactacccactagcctccaaagatgccaagaaacagctgctgtgtggggcagccattggcactcatgaggatgacaagtataggctggacttgctcgcccaggctggtgtggatgtagtggttttggactcttcccagggaaattccatcttccagatcaatatgatcaagtacatcaaagacaaataccctaatctccaagtcattggaggcaatgtggtcactgctgcccaggccaagaacctcattgatgcaggtgtggatgccctgcgggtgggcatgggaagtggctccatctgcattacgcaggaagtgctggcctgtgggcggccccaagcaacagcagtgtacaaggtgtcagagtatgcacggcgctttggtgttccggtcattgctgatggaggaatccaaaatgtgggtcatattgcgaaagccttggcccttggggcctccacagtcatgatgggctctctcctggctgccaccactgaggcccctggtgaatacttcttttccgatgggatccggctaaagaaatatcgcggtatgggttctctcgatgccatggacaagcacctcagcagccagaacagatatttcagtgaagctgacaaaatcaaagtggcccagggagtgtctggtgctgtgcaggacaaagggtcaatccacaaatttgtcccttacctgattgctggcatccaacactcatgccaggacattggtgccaagagcttgacccaagtccgagccatgatgtactctggggagcttaagtttgagaagagaacgtcctcagcccaggtggaaggtggcgtccatagcctccattcgtatgagaagcggcttttctgaaaagggatccagcacacctcctcggtttttttttcaataaaagtttagaaag

SEQ ID NO: 113834 - DNA, 397 bp, Homo sapiens
  misc_feature (1)...(397): n = a,t,c or g
nggggggtggggggggcattttggggggcaaaagaaaaacccctttttttnnnnnnnnnnnnnnnnngcgctatataatgagaggttataaaaatttatatatgtgtacataggtgcatatgtgcgcgtgtatatgcatacatatgtgtgcgcgcatatatgtatatatatatgtgtgcatgtgtgtatatgtgcatatatgtgtgcgtatatacatgcgtatacatatacatatatattacatatatacacatatatacactatatatnnnnnnnnnnnnnnnnnnnnnnnnnnnnnnnnnnnnnnnnnnnnnnnnnnnnnnnnnnnnnnnnnnnnnnnnnnnnnnnnnnnnnnnnnnnnnnnnnnnnnnnnnnnnnnnnnnnnnnnnnnnnnaaa

SEQ ID NO: 113835 - DNA, 474 bp, Homo sapiens
  misc_feature (1)...(474): n = a,t,c or g
cgtaccggctctgaattcctgggtcgacgatttcctctcggggagtcggcgccatgaccccatcgaggcttctttggttgtttagctgggcctcggccacggcgtggagagcggcaagattaccccttctgtgtcattctctgaggaaaacaagttcttctcaaggaggaaagtctgaacctgtcaaacagtcccttaannnnnnnnnnnnnnnnnnnnnnnnnnttgatgcaccagagggttcccatttagagaaagaaccactggaaaaatttccagatgatgttaatccagtgaccaaagaaaaaggtggacccaggggcccagaacctacccgatatggagattgggaacgaaaaggacgctgtattgatttttaagtcgcatattctttaacttcaatattgttttctgaatatgtacatctgaattaacttatttctgatnnnnnnnnnnnnnnnnnnnnnntatgcc

SEQ ID NO: 113836 - DNA, 457 bp, Homo sapiens
  misc_feature (1)...(457): n = a,t,c or g
ctggcaagcaaagtcgtctccagcctcagcggcccctccccctctgctcagacactgctggcaacagtgtccctcttggttagtgacaatgccatccttcctgaccatggcccaggccaaaaccttggagccaggcctggggcctttcctgcacacctatagcttgtccgtcagctctgcctcccagacatccccagagcacacttggaaccctagcccttctccccacagccactgtcaccaacctggtccaggccggcatctctggcaggataagtgccatcccctccccactggtgtcgataaggtcttcccacatccctcggtccaacctccacacccaccccgtcggggttccctgggaaaacatgagtcaggctctnnnnnnnnnnnnnnnnnnnnnnnnnnnnnnnnnnnnnnnnnnnnnnnnnnncgaaatcgtcgacccgggaattcc

SEQ ID NO: 113837 - DNA, 1164 bp, Homo sapiens
  misc_feature (1)...(1164): n = a,t,c or g
ctccagagcggtggaattcgtggagaagggtgagaagactggaaagacaacctgaatgggggactgggagccttgaataacaggcatggagaggagcgtctcttgaaatggaagaaacaggaaataattacagcctctatggaggagcaacaggatggactggagaaactatcattccaaaatccagttggggcctcaaaggcccttagaatttttctaggaaggttgaaggccagctgctgacccaggactcacatgtgcttcgtcctcttccctaggaatgatgacaggcacaatagaaacaacggggaacatttctgcagagaaaggtggctctatcatcttacaatgtcacctctcctccaccacggcacaagtgacccaggtcaactgggagcagcaggaccagcttctggccatttgtaatgctgacttggggtggcacatctccccatccttcaaggatcgagtggccccaggtcccggcctgggcctcaccctccagtcgctgaccgtgaacgatacaggggagtacttctgcatctatcacacctaccctgatgggacgtacactgggagaatcttcctggaggtcctagaaagctcagtggctgagcacggtgccaggttccagattccattgcttggagccatggccgcgacgctggtggtcatctgcacagcagtcatcgtggtggtcgcgttgactagaaagaagaaagccctcagaatccattctgtggaaggtgacctcaggagaaaatcagctggacaggaggaatggagccccagtgctccctcacccccaggaagctgtgtccaggcagaagctgcacctgctgggctctgtggagagcagcggggagaggactgtgccgagctgcatgactacttcaatgtcctgagttacagaagcctgggtaactgcagcttcttcacagagactggttagcaaccagaggcatcttctggaagatacacttttgtctttgctattatagatgaatatataagcagctgtactctccatcagtgctgcnnnnnnnnnnnnnnnnnnnnnnnnnnnnnnnnncaantgagtgaataaatgtcatcctcttctccatcttcnnnnnnnnnnnnngggggggcccttttaagagaacacaccttcacgcccgcccg

SEQ ID NO: 113838 - DNA, 450 bp, Homo sapiens
  misc_feature (1)...(450): n = a,t,c or g
gtgactactagtacagngcggtggaattnnnnnnnnnnnnnnnnnnnnnnnnnnnnnnnnnnnnnnnnnnnnnnnnnnnnnnnnnnnnnnnnnnnnnnnnnnnnnnnnnnnnnnnnnnnnnnnnnnnnnnnnnnnnnnnnnnnnnnnnnnnnnnnnnnnnnnnnnnnggtnnnnnnnnnnncggggcccccccggttggaaccccaaccttttgggaagccggggggggccaaacccctgggggccgggatttgaaaaccccccggccaaatgggggaaacccctttttttccaaaaggaaaaaaattaaccnnnnnnnnnnnnncctggtatccccattttttaggggggtgggggcagaaaacccttttaacctgggagggggggggtgccacaaacccaaaatggccccttggcctccggccgggcaaaaaaaaggaaacttccttt

SEQ ID NO: 113839 - DNA, 750 bp, Homo sapiens
  misc_feature (1)...(750): n = a,t,c or g
gaggacattcgcccgcccggcgggccctggctcagcactcttctcacagcaggtctttgtgccccaatctggcaggtgcgggggtgcgacggggtccttggcacagagcagccctctggttgcatgtgacagcggcggccaaggtctcccctgcgcataaatgtggagctcgctcggcagcagcagaactcccggctcagagagttctccaccgctcctcccaggctcacgaggctcacgggctacccagcgccagcggcccaggaggctggaccacaggcctcagtcccgacttctccctgctgcccggcacgggaccctcccccaggacagccacctcccagtgctgaagagccggcccgcctcagagccgcccgccgttcctttttcctatgcatatacttctttgaggatctgggctaaagagactacgaagctgcaccgtgtggggcccactttttatacaagcgggtggcggtggatccaggcgcacagacgggagtgaggcgtggcggaaacgcgtgcacgctgggtctgtgcacttttgctgctgctgcnnnnnnnnnnnnnnnnnnnnnnggaaagggggtttttttttgccccccnnnnnnnnnnnnnnnnnnnnaatttggttaaaaaaaacctttgtttcccgggttaaaagaaatttttttggttacccccccaaggagatgaaaagaggggggcccggccccatacccgggttatttttggttttttaaaaaaaaa

SEQ ID NO: 113840 - DNA, 438 bp, Homo sapiens
  misc_feature (1)...(438): n = a,t,c or g
tctgcaggaattcggcacgagacattttcaagctctgacggcaacattaaacctcagaatggaagaaatgggaaatcgcattgaggacttacagaagaatgtcaatgacttaatggtgcaagctggcattgaaaattctattaaagaacaaatgctgaagacctaactgcagcatgtnnnnnnnnnnnnnnnnnnnnnnnnnnnnnnnnnnnnnnnnnnnnnnnnnnnnnnnnnnnnnnnnnnnnnnnnncaggattcgtctttctgagaagagacgcaaggggctcgcctgctctccccccgtgcctgcaccannnnnnnnnnnnnnnnnnnnnnnnnnnnnnnnnnnnnnnnnnnnnnnnnnnnnnnnnnnnnnnnnnnnnnnnnnnnnnnnnnnnnnnnnnnnnnnnnnnnnnnnnnnnnnnnnnnnnnnnnnnn

SEQ ID NO: 113841 - DNA, 1166 bp, Homo sapiens
tgagagacaaaccgattaattctgcataagggataagtgctgtatgtgggaagcaatccaatgagggctctgaggatggcaaaggaagggttcctggaggatttacatttaactggtgccttgaaaggtgtgtagaagttggcaagatcaaaagggagtagagtccaggtggagaagagaaaagagcagggcaggctggatggcatggctcacacctgtaatcccagcactttgggaggccatggagggaggattgaggccaggagtttgagaccagcctgggtgacattaaaagaccctgtctcaaaagaaaaccgaaaggagcagggtattatacaagggggtctgccagccttcttcagccttttctgtgagaagccgagggtaagggtagtacaggagagtggcaggagatgacacttaaaagtaggtctgtgttgatctaacgagtctcaactttactgccaaaactaatgaactaggaaagtttaggcagcaagggccagagatggagtctggacttgtattgcagaaagttcctgtgacggcagcttggagggtgaatgagagtgtgggatggaggggtgaatgggtgtggacagactggaaaaatgactcatgcagggaatgaggaagggaggagccttgggagactctcaaatccctggcttagcctactgaattgcttgctacttgcctttttatgtcttcattttgcctcccattgtctgtgatattaaaggcctaacttcttagtagagcaaactttgcatctgctagcaggttggtgccctagctagcttccatgcccctctgcttagaatgcctgcgaaccactaaggactaatcctagtggtagaaatttattttcaattgttctcaaacccttgtagaattccaagttagaactgtagtgttcttttttcatgtgggttagaaaatttgctgtttggagcaacatggtgaaacacaggacttttgaacctgcttatggtgcaaaaggggaaattatatttctacttcaacactggaggaggggggacttctgggagcaaaagagaaatggaaactgagatgagacatgttttttactccatgacagaatacaaagaaatacaaggatgatccttcaatgttagaaacagtagaataaccataatggtaaa

SEQ ID NO: 113842 - DNA, 1409 bp, Homo sapiens
ataaaagaactttattatatttctaaaattcaatcatatggaagaatctattgagcaggttagcctttgcttaactttcctcctctgttactccagccttggctggggtgttttgtagaattttcagagcatgggagacagacaactggagcttcctcctgcccttggcccatgcttttgggggagcaaaaggcaaaagattgaaaccactgactttagtttcctcaggccctttctttctgagggttaaagaagaaggaaatgtcttctgtggccaagaattcaaggacttgtaggagataagtgaaggctattacagggattttgtcctggtttggtaggtttctcttggagaaataccactacaccctggtctagaaatgagttttgaagacttggggagttaaagggcactgagttttgctctcactgtaccctgattccaggttttacatggagaaataacctgagggactttatttctatccaatgccctggtttccatcctgaccagaggatgatgacatccgctgataggccatgcttctgtcttctcttatgtgcctcatgccaagcctcgaaatatacctttctggaccatcattttcacatctaccttgtgactagaagtcctaaatatgggattttgaaaattatgaaccattaatccttgccagaaatcctgcagcgaactatggcatggcatcatcctagtcattgatttcagtcttttgccttttgctcccctaaaatcttgggccaattgcaggggggggctctgtttgtctctcttccatgctctgaggattgtataaaagcatcccagctaaggctggagtgaaggggttggggagagttaggcaaaggctaacttgaccaataggctcaatagattcagtcttgttggccaggcccacttgaagggttttttgtttcatcttggagaaggacagtgaggtcatggtataattgttatgagtaaagtcaagaacagcttctaggtataagttattatgtacccaaaaggagttgaagggaaaatcaatttaggtttacattaaacatccttcaagttcttatctttaaatggagtttcagtgtctcccaaaggctggatgagttttacagttataaccactggattgtgagaccataggacatttgaacaatcttttcttctacccatctagaaaagcatcttttttatataccaaatttttacacatatatccacatctgtttttgaaatctagagcagaggtactcaaagtttggttcatggactagtgccagttcacaaattgttaatgttttataatgagataagtacggaagttgagagtaaccatttagaaactgtgtaggaatttaaaaagtaatatctgacaaatttaataataaaaatggag

SEQ ID NO: 113843 - DNA, 1221 bp, Homo sapiens
ctggtggaattccttttctcttgtttcattttggtaaactaaattagtttaatacctctaccccatcggtggttggaattccccacctcaatcattttgggggctctctgcctcctttgaataggacagatctccaggggtttacccaggctccgaagagccactccaggcagccggctgtttggggaggtgcaccctggtcttctagtctgcggattccctgcatcgctcccctggtactgctctcaagctcaagggtcacctcagccagatgtgccctaggctggcagaggtccttcccctaaatgcagctgggcaggatgccaccctttctacaataagttcggtcccaagggattcccccaacacacacacacatacattctctgttactcacatcctcacacacactcacacaccccaccacactcacacactttcaaaatccaccgactctcacgctcacactcgccagccctttcccttgctctgtcacttccctccaagtccccgccccacacagcctcctgcacgtcccagcccccttggtgccagccatctctggtgccagccatctcccccaaatatccacccttctgggctcctttctgcccagagggacctgaagtttccctaggaagcacttgctaaaggcctccagtccccaactcctggggaagaaggatccaggcctctgccgcacaaagcctccactgttctcttggggctggcaccccttcctgtggccctgtggcaccaaacaaattgattcgtccagcgaatatttcttatttactctgttccacatggtggtgagtgaatcaaccctggactctccccacaaaggacttaagaacacgcaggtcatgaacaaatgaacacttttgcataatttttatgaccaacggtgaccaggccaagagcaggatgaggtgatggagaataccttggcctggggcatcggaggaaactcttgcgaggatgtgctacctccgttgaaagtgggaagatgagagaccggctgttaagaggagcaagggaaggaggttctggaatgagagaacagcacgaacaaaatgcccgagacaggagcgagcttggcaccttcaagaaaataaagaggagaatcactgaacctggcacgtggaggttgcaatgagctgagatcgcgccactgcactccagcctgcgagacagagcgagactccatctcaaaaaaaa

SEQ ID NO: 113844 - DNA, 1133 bp, Homo sapiens
  misc_feature (1)...(1133): n = a,t,c or g
tcgtagacattagtccacgtggtggaattcgaggacagagcggcccggtcgccggcatggtttctccgtcctgctgcagccggcgggaggcagccagtccagtgcgcccgctagcttcggcggcgacccagacggggaaagcggaaggaatgtcgcgtgcaagcatgcagctggtgtggaagaatggcggtgagccattcagtgaaagagcggaccatctctgagaacagcctgatcatcctacttggagggcctccagggccgtgtaaccactgtggacctgcgggatgagagcgtggcccacggacgcatatacaatggcgatgctttcatgaacatccgcctggccaaagtcacctacacggaccgttgggggcatcaggtcaagctggatgacctctttgtgacaggccgcaatgtccgctacgtccacatcccagatgacgtgaacatcacctcgaccattgagcagcagctgcagattatccatcgggtgcgaaactttggtggcaagggccaaggccggtgggaatttcccccaaaaaactgtaagtgaggccctcagcaagccctggccccaactcggagtcctccagtgatctccggagctagttccctgccctcacaccctgtctggtacccgagaagaaagcagggccaggccagaagctggtgtccaacagacaccacctgtcaaagctgcctttcacagggttccacctcccagactcactctgggacccagaatcctatatgtggccttggggtaggtgacaatccccctttttgatgatctgaatttctgacttattgattatggaacctgtcaagtagttttcaactctcccagtgaggataattaaacatgctcagcctgagccacctctaagtgtctccatttctcatgcagttgtgttcattttctcatgaaacccaacttggatacaaacaggtccgtgccccaggctttcccttctgtgtgctgcgctcccaggccatcctgtgtagtcgggggcagannnnnnnnnnnnnnnnnnnnnnnnnnnnnnntcccaccctcacagattcatatttcattggtatggggtatggtctgagggctatgagtttttttaatttcccaggcgtgtatt

SEQ ID NO: 113845 - DNA, 1042 bp, Homo sapiens
  misc_feature (1)...(1042): n = a,t,c or g
ccaatctgtaacaccgctgggaacgactgggtcccctttaggtcctttaggacagtttttgttatcttgctttcccctgcagggatccagcaccggctcctcctccggcaaccacggtgggagcggcggaggaaatggacataaacccgggtgtgaaaagccagggaatgaagcccgcgggagcggggaatctgggattcagaactctgagacgtctcctgggatgtttaactttgacactttctggaagaattttaaatccaagctgggtttcatcaactgggatgccataaacaagaaccaggtcccgccccccagcacccgagccctcctctacttcagccgactctgggaggatttcaaacagaacactcctttcctcaactggaaagcaattattgagggtgcggacgcgtcatcactgcagaaacgtgcaggcagagccgatcagccgggtgcaggatggcaggaggtggcagctgtaacttccaagaactacaattacaaccagcatgcgtatcccactgcctatggtgggaagtactcagtcaagacccctgcaaaggggggagtctcaccttcttcctcggcttcccgggtgcaacctggcctgctgcagtgggtgaagttttggtaggtgagtgtcagagtgagccgacccaggccacatcctggcagtggaggcacagtcacccggggcagggccaggatcttggtatatcctcagatctcagtgggcagcgacatgaagtcaggtatgctctgggtgcgtgctctaaaggtgataaggaagaggggacctcatggtggggtgtggagaaagacccataataaagtgatctnnnnnnnnnnnnnnnnnnnnnnnnnnnnnnnnnnnnnnnnnnnnnnnnnnnnnnnnnnnnnnnnnnnnnnnnnnnnnnnnnnnnnnnnnnnnnnnnnnnnnnnnnnnnnnnnnnnnnnnnnnnnnnnnnnnnnnnnnnnnnnnnnnnnnnnnnnnccattccagcctgggaaacatggcanaaccccgtctactataaat

SEQ ID NO: 113846 - DNA, 668 bp, Homo sapiens
tgcgctgcaggaattcggcacgagctcgtgccgcttcgcggagctggaacgctggccgcgcaggccctgagggctcgcggccccagtggcgcggccgcgatgcgctccatggcatctggaggtggtgttcccactgatgaagagcaggcgactgggttggagagggagatcatgctggctgcaaagaagggactggacccatacaatgtactggccccaaagggagcttcaggcaccagggaagaccctaatttagtcccctccatctccaacaagagaatagtaggctgcatctgtgaagaggacaataccagcgtcgtctggttttggctgcacaaaggcgaggcccagcgatgcccccgctgtggagcccattacaagctggtgccccagcagctggcacactgagcacctgcactaaattactcaaaatgtgcttgtaagtttcttctttccagtaaagactagccattgcattggctccttctcccataacaaaaaaactgaaaaaacctcgggggccgttttaaaggatcaaagttaactaccccgggcttgcaaggaaaaagtttttttatggggcccccaaaattaattccctgggccggggtttaaaaacgcggggatgggaaaaacctgggggtaccccaattaaatgccttggagag

SEQ ID NO: 113847 - DNA, 459 bp, Homo sapiens
  misc_feature (1)...(459): n = a,t,c or g
tcatttaaacacttcggaaaaattccttntaagccaccaaggtaaggcctntaagaaaatacccagttctcatcancggggcacttttacccccccaggggacatgtggtaacatctgaagaccatttttggtggtctcatctgaaaggagtgctagtggcatttagtaggtggaagctagggatgttgctaaacgtactataatgcacagggcagccccatccccaacagaggattctgcagctccaaagcatcaccattgccaagaccctgagctcaaggaacagactcagacctgcattctctgtgacgtgggatctggggagagttgtgtgcctcctcatctgaaagatggggataatgaaccttagccaggctgggcgtggtggctcatgcctgtaatcccagcagtttgggaggccaaggcaggcagatcacctgaggccgggagttcaagat

SEQ ID NO: 113848 - DNA, 725 bp, Homo sapiens
agggcctgcggcttcatttccttagtcagccagaccaccaacccacagagaggaacaaacgactgcagacacgccacctttaagaactgtaacactcactgcgaggtccgtggctttattctttttttctttgagatggagtcttgctctgttgcccaggctggaatgcagtggcctgatctcagctcactgcaacctccgcctcccgggttcaaggccattctcccgcctcaggaggtcaaggccacagtgagctgtcatcatgacagtgcactccagcctgcgtgacagagcaagaccttctcttacaaaaaaaaaatgtgcggaggagagctccatttccctttaggagctttgtagcgggtatcctctgcctgctgggggtgacaataagaaatgctactctataaattgccttccttatttcagagaccaagtgacagtgtttaacaccagagacacagtgggcacagttactttcatgggcagcagggccacagtggtaaaatgaatgtttttgacttgtgagggtctttggtagtatctctaggaataaaatagcctactaaaatatatgttgatctacataattagaaattatcaggtaagtagaattctaatttggatcaccataatagtcatggcccttcccccagttctgggagctgaacaattttgcagacctggagcccactgacattgctgcaatatatactaaaaatcat

SEQ ID NO: 113849 - DNA, 433 bp, Homo sapiens
  misc_feature (1)...(433): n = a,t,c or g
ctgcgaccggtcggattccggtcgccccgcgtccgctatttaatatccgctgccccccgccccccgccaccnnnnnnnnnnccgggtttttctgctccatatattcaggtaaaggacctccgaaaagaattaaaaagtcgagctcttagttccaaaggattaaaatcccagttaatagcccgatggacaaaacagcttaaggtagaggaccaaaaggaaaaccagagggagttagagaaatctgnnnnnnnnnnggatgaggatgatgataggaattctgaggacgataaggaggaggaagaagggaaccgtcaggaggaaataaaacgccagcgtcgnnnnnnnnnntatattttgcctgatgaaccggccatcattgtacatccaaatggggctgcaaaaaggggcaggtttgattggagcatcatgtctt

SEQ ID NO: 113850 - DNA, 417 bp, Homo sapiens
  misc_feature (1)...(417): n = a,t,c or g
tannnnnnnnnnnnnnnnnnnnnnnnnnnnnnnnnnnnnnnnnnnnnnnnnnnnnnnnnnnnnnnnnnnnnnnnnnnnnnnnnnnnnnnnncatgtgtgtatatatatatgtatatctacatatatacgcatatatatatacacatatatgtgtatannnnnnnnnnnnnnnnnnnnnnnnnncacatatatgtgtatatatacatatatacgcatatatatacacatatatatgcgtatatatacnnnnnnnnnnnnnnnnnnnnnnnnnnnnnnnnnnnnnnnnnnnnnnnnnnnnnnnnnnnnnnnnncnnnnnnnnnnnnnnnnnnnnnnnnnnnnnnnnnnnnnnnnnnnnnnnnnnnnnnnnnnnnnnnnnnnnnnnnnnnnnnnnnnnnnnngaattaccactgggctgn

SEQ ID NO: 113851 - DNA, 412 bp, Homo sapiens
  misc_feature (1)...(412): n = a,t,c or g
cgaggcaatttttttccaaggctggggaaccataaagaaaattttgtttgnnnnnnnnnnnnnncaaaaacccagagtgcttactaactagagtcctgtaaaatgtcttggctgctgttgctgctgttgctcctgttgccgccgctgccgctgcctatgcctctgttaccagaaaagatcctcatcctccgggttataggagaaaacacacatggcacagccaaagggttaattcaactatttccatgggggaggcctcgagccctgacaatacagatgtgagactccttggaggaataaatatataaatatgggcagagtagagagaattcctctcctgccaaattatattcagaagcctcaagaaagatagaatagaaaaagaancctgaaaacagggagaagacacaaa

SEQ ID NO: 113852 - DNA, 3407 bp, Homo sapiens
tcggtacaagagatggctgcagtccgtatgctgagaacctggagcaggaatgcggggaagctgatttgtgttcgctattttcaaacatgtggtaatgttcatgttttgaagccaaattatgtgtgtttctttggttatccttcattcaagtatagtcatccacatcacttcctgaaaacaactgctgctctccgtggacaggttgttcagttcaagctctcagacattggagaagggattagagaagtaactgttaaagaatggtatgtaaaagaaggagatacagtgtctcagtttgatagcatctgtgaagttcaaagtgataaagcttctgttaccatcactagtcgttatgatggagtcattaaaaaactctattataatctagacgatattgcctatgtggggaagccattagtagacatagaaacggaagctttaaaagattcagaagaagatgttgttgaaactcctgcagtgtctcatgatgaacatacacaccaagagataaagggccgaaaaacactggcaactcctgcagttcgccgtctggcaatggaaaacaatattaagctgagtgaagttgttggctcaggaaaagatggcagaatacttaaagaagatatcctcaactatttggaaaagcagacaggagctatattgcctccttcacccaaagttgaaattatgccacctccaccaaagccaaaagacatgactgttcctatactagtatcaaaacctccggtattcacaggcaaagacaaaacagaacccataaaaggctttcaaaaagcaatggtcaagactatgtctgcagccctgaagatacctcattttggttattgtgatgagattgaccttactgaactggttaagctccgagaagaattaaaacccattgcatttgctcgtggaattaaactctcctttatgcctttcttcttaaaggctgcttccttgggattactacagtttcctatccttaacgcttctgtggatgaaaactgccagaatataacatataaggcttctcataacattgggatagcaatggatactgagcagggtttgattgtccctaatgtgaaaaatgttcagatctgctctatatttgacatcgccactgaactgaaccgcctccagaaattgggctctgtgggtcagctcagcaccactgatcttacaggaggaacatttactctttccaacattggatcaattggtggtacctttgccaaaccagtgataatgccacctgaagtagccattggggcccttggatcaattaaggccattccccgatttaaccagaaaggagaagtatataaggcacagataatgaatgtgagctggtcagctgatcacagagttattgatggtgctacaatgtcacgcttctccaatttgtggaaatcctatttagaaaacccagcttttatgctactagatctgaaatgaagactgataagacattcttgaactttttgagctttcaaagagtatgttaaccctagctgtgccagctcatgttcatctttacaatttatattggacatgatatgcatcggatgattaaggatctaagcgcacaatatttgtcactgttctattagactttttactgaaaatgaataatggtgtaatggttctcctggggcttgtcacattttataggtcaagagtgtgacttcttaatatggtgttgttgtttttgtggtcaatggcttgaaactggcaagattaacaaaattaggccgggcatggtggctcacgcctggtatccccagcactttggaaggcccaggtgggcggatcacctgaggttagaagtttgagaccagcctggccaacatggtgaaacctggcctctacctaaaaaatacaaaattgaccgggtgtggtggtgggtacctataatcccagctacttgggaggctgaggcaggagaatcgcttgaacctggggaggtggagtcttgcagtgagcttgagatccgtgctatttgcacttccagcctggggcgacagagcaagacgccatcttcaaaaacaaaaaaacaaatttcatgtttacttaaaagacaggtagcctttttacagacattttttgcccctttttttttttaactgactcttaatgaaactttaattttacttaattaagaaaatggaatttatatacaaaaatattttccatttccgttattatgctaattgttgtatgaaataagtgcaattatacttctcttttgagatatccaagagtatattcttgctctgtatagagaatatcatctgatagtgtcttatttatattaattaatgtctttgaaaagggaaaagtataaactgggccttaaaattgtccaattatagttttataaccagtctattaaagttggtttggttaaaatggatatagttttagatttgtggtaatgctttggtattttcttggggaagaccttcacctttgcaaacttccctcatgtaaggaaggtactttaaatgtagcagccactgacatttctttttttaaaaaaaatttgagaagtctacttccttttaacttttttggtcttcagctaaaaaataggaataagaaattaaggtctattccattccttatatcctggggtaagaatgtaaataagagggagaaggaagagtctaataggtaattatggatataaaaaataagaaattttgtataggaaatgaagggtttccataatgatccattttgttaaaggtctactttaatcagaaatagcaacgagatgaatgtatccaacatttcaatttgcattcggaaatccatgttgtttctaatattgtccagttgaaaactgtatgccaaaattagttgtttaagtgaagttttgtgacagaaaaaaggttgttttaatatctacttggtttttctcaaaatggaaataattttaaaatcaggaaagaataaatcagccaggtgtgatgacttgtaactgtaatcccagttataggggaggctgaagcaggaggatcacttgaggccaggagtttgcagacccagcctgggcaaacatagtgaagatcccatctccaaaaaacattatttttaaaattagcctggtggctcacgcctgtaatcccagcactttgggaggccgaggtggccagatcacctgaggtcaggagttcgagaccaccctggccaacatggtgaaaccccatctctacagttttgtaaaaatacaaaaaattacctgggcctggtggcacacgcctgtagtcccagctacttgggaggctgaggcaggagaattgcttgagcccaagaggtggaggttacagtgagcagagatcacaccactgcactccagcctgggtggcagagcaacactttgtctcagaaaaaaaaaa

SEQ ID NO: 113853 - DNA, 422 bp, Homo sapiens
  misc_feature (1)...(422): n = a,t,c or g
ctctattgtgtggatgtaccataatttatttattcattcatttaccgaaggacttcttggttgcttccaggttttggcagttatgtatcaagctgttataaacatccatgtgcgggtttattattttcttagtgattaccccaatgattataactaatgtcctaaatttattataatcttatctttagtagcctacaaaaaactctttgactgtgcccttgttatattgtcacaaactctctttatgcaccatatacccattaacataggctataaatattgttttatgcattagtcttttaaatcataaaggaaacaaaaagaagagttacttaaaatacagaaatattggcttcnnnnnnnnnnnnnnnnnnnnnnnnnnnnnnnnnnnnnnnnnnnnnnnnnnnnnnnnnnnnnnnnnn

SEQ ID NO: 113854 - DNA, 806 bp, Homo sapiens
ttttttttttttaaaaacaacaacaaaccactttaatggacacataaaatccctgggggtctcattgcaatgcaaatttggattaaacagtctgggtgggtcctgagaccctgatccccttgcttttcacctatggccaacattctgagaagcaggccaattcagagggccccccatctcgtgtgaatcaacccctgctccatctgcccctataaatgacaggagtgggggtgtccccaggtctgagcctggagggggttgcaggcttcctccaggcatggaagtggagtgagaggaggctgtagttaaacgggttactctgtcagcagacacagaggagaccagaatagcttttatttcacattgaagcttaaggaaggaagtcgagaggacagggctggttcttgtgggcgctgccttggcaggttgcaccacctccaactgctgggctccagctccagggctccagaagccatctccgagaaggtcgggagcggggctcgaagggtcccgggggcaggttccaggtccagctcctccaggcaggcccagcaggcctttcacctctgtcccccaagttgatccacggtcttctctaccatctcctccatgacatctagcacggcgttgcacagccatgtgtctgtcacacgctgtgctctgagcctgagatctcctcgcggagggcttgaagggttcggcagcggccaaagagcccgcggcgcgaagcaaggggccagtccggttcaacgcgcagagcaggggggccgcatggtgccggcctggccgagcgcagcgccgcgtct

SEQ ID NO: 113855 - DNA, 1816 bp, Homo sapiens
  misc_feature (1)...(1816): n = a,t,c or g
agagggagcaggccnnnnnaatgagnaatgangtatatacacagngcggnggaattctgccaagaagaatgtaagttctccaacatcttcaaataaagaagtggttatgaggaatgatcagaataatggagatatgaaaccattccagaatttcacaacaataccaatcacacaggctctcaactacaatctgagcaaagaagggcatttagaaaaagaaccttggaatgcattcagccatcatggcccagttaatgtctccatcaatggaattccttgcattctcttctgggccaaaagaataatgattaaatttaagaatcaaacctggctggaccttacagacgagccatttggtcagaaggtaactgtggaccctgacaactcaaattgcagtgaagaaagtgctaggttgtctttgaagcttggtgatgctggaaaccccagaagtcttgctataagattcatccttaccaattacaacaagttgtccatccagagttggtttagtttgcgccgagtcgagatcatttccaacaattcaatccaagcagtctttaacccaactggcgtatatgctccctctggttactcctaccgctgccaacgcgtgggcagcctgcagcaggaccaggccctcttgctgcccagcgacacggatgatgggtcgagcctgtgggaggtcacttttattgatttccagatccaaggttttgccatcaaggggggacgatttaccaaagcccaagactgcgcctcctccttctcgccagcttttctgatcggcctggcaatgtccctgatcctgctgctggtgttggcctatgccctgcacatgctcatctacctgcggtatctggaccaacaatatgatctcatcgcctctcctgcccacttctcgcagctgaaagctcgagacacagccgaagagaaggagctgctgaggagccagggggctgaatgctataaactgagaagccaacagatcagcaaaatctatgtttagcagcacaggctggcccccaccatgtccacagtgggctccgaaagttgtctctgttctgtgctatttgacttgtgaattacagattttcaccgaatggcttgattacaaaaaaaaagaaaaaacgcagaaaggaaatagataatgaattctttttgaaccatccactggcctacttaggtagacttggggcaatcaaaaaaggcatctcagggatcccacagagacaaatatgcctgttagttgcctcaaagtaccctgaaagcaaaggggtatttcaagtacggagaaagagagagagagaagaagaaggaggaggaggaggaggaggagaaggagaaggaggagcaggaggaagaggaggaggaggaggaaagggagggagggagggagagggagagagagagaaagattggcaacacagagaaggggaaaacacacttggtcctccttgcctgtgccagtttggatgtgacaattatagaaataataaaccaagattatctggaagttcataatttaaactattttgtaacataatttgcatttctagatattatgtcccaattttgttttaaaaacagtctttttctctttcatagaaatgttgagggaggactcaacatgtggcagagcactttatttaaggaccttcttgtcctttactgtgctgttcagaagcagtacagctccatctgtgaagtaggggtaatagtcatggccatattttacctttccatttgggaaggggccagggttgtctcacttgtctgatttagacctccatgagctctcataggtccacttggaata

SEQ ID NO: 113856 - DNA, 1288 bp, Homo sapiens
  misc_feature (1)...(1288): n = a,t,c or g
agcgctgccgtcgggaggcgctccgaggttcgaggctgtgccccgcgaccccgccttcggcgctcggctcgcaggatggatcccgtacccgggacagactcggcgccgctggctggcctggcctggtcgtcggcctctgcacccccgccgcgggggttcagcgcgatctcctgcaccgtcgagggggcaccccgccaagctttggcaagagcttcgcgcaggaaatctggctacttcctgtgccttagttctctgggcagcctagagaacccgcaggagaacgctgtgttgcgatatccagatcgtggtggacaagagccccctgccgctgggcttctcccccggtctgcgaccccatggattccaaggcctctggtgtccaagaaagaaacgcatgtgtagtgaatcttgtttgcccttggaagccacggacacggctgtgttttgatgtccggctgagtgggaagaccaagacagtgcctggataccttcgaataggggacatgggcggctttgccatctggtgcaagaaggccaaggccccgaggccagtgcccaagccccgtaggtcttcagccgggacatgcagggccttctttttggatgcagccagccagccaagtaagggcggcctcctgggagcggacagcgtcaaggctgggctctcgggcattcactctgcggaggaatgactccatctacgaggcctccangcctctatggcatttcaaccatggatggggttcccttcacactccacccacgatttgagggcaagagctgcagccccgctggccttctctgcttttggggacctgacccatcaagtctctggcggacattgaggaggagtataactacggcttcgtggtggagaagaccgcggctgcccgcctgccccccagcgtctcatagtccctcaacccttccgcggaaagagcccccttactccaacctccccgccagcctggggccaccccccctcactgcatcctggggccacccccactcactgcatcctccccctcaatgcatcttgggaaccttcgccctgcaaggcgtttgctatcttcaagccactgggcggagctgcagccctggaggagggggcgggtcgaggctgcgtggtgatggggtctccgcccccacgccctgccgggcagggctggagctggacagaagccagtgcctttaagtcatttgtgtcaaaaccctctggggtccggaggctgtgcgggtgtcctcctggcaataaacactacccggttctcgcccaaaaaaaaaaaaa

SEQ ID NO: 113857 - DNA, 729 bp, Homo sapiens
  misc_feature (1)...(729): n = a,t,c or g
cggaggaagactctgtctcatcaacagacaaacggaccacaagtgatattggaataactagacgtgcatatgtttttttaaaaaagagagaaccttgaccacctctaccttacaacttcaacaaacgttatttcaaaatgggatcatagacctaaatcccaacctcaaaattaaaatacttcccgaaggaaacatagcagacaatctctcgtgagcttagattaggaaaaaagtttcttagatatagcttctatatccatgaagcataaacacaaacatatgcttaaactagatttcataaaaatttaaaaacatctgattttcaaaagccactcttatgaaaatgggaaaaacaaaccacaaactgggaaaaaatgtttgcaaggcacataaatgataaagggcttttattgagaatgtaaagaatcctcaaaagtcagtagtaagaaaataactaaatttaaaatgaccaaaaagtccaacacagtggcttatggctgtaatcccagcactttgggaggccaaagcaggaggatcgcgtgagtccagaagttcaagaccagcccgggcaacacagtaagaccttgtctctacaaaatatatatagctgggtatggtggtgtgttcctgtggtcccagctactcaggaggctgaagtaggaggatcacttgagcctgtgaagttgaggctgcagcaaactgtgattngccactgcactctagcctcag

SEQ ID NO: 113858 - DNA, 703 bp, Homo sapiens
ctgatacaccagactttctgagaacctgtgctttaatgagtaaactcacacagctgcaacaaatgctgccacctcctggcatcttttaaaaaggatggagtgcagtggcatgatctcggctcactgcaacctccgcctcccgggttcaagtgattctcctgcctcagcctcccaaatagctgtgattacagggaacccgttgttgctcagacacccgatgtggaaattttcctcctcccctcagttcaaatgagataaagatccctccctctccctcacagtggaacatgaggtccacagtgtccatgtaacctaactcccggttaagaggatatggatagaaggcacatgtttcaacttctgggcttctgttccttggaaaagtgtggatggatttccatcctttggctgtcttcctttccccgctggactgggaatgtgggacttgggtagtggaggttaccttgggactatgtgggatggaagacaaagataaaaggaaccaaggactctgatgattctgtagagaagaggaaccgtagctgctcaaacgttcatgtgaaagaagaataaactatcagatttaagccactgctattttgggtctttgtgataaacagtgtttaccatatcctaattcactattccttccatttctaggtcaaccatgttgaattaaatatagtgctctaacttgcaaaaa

SEQ ID NO: 113859 - DNA, 760 bp, Homo sapiens
agtgactgtagcatagatgtcgactgacagacaccaaggaccagaggacgcttgcttaggccgcccctcccccactggttacccaaacatgaaaacctgctcggcagcaaactgtgcctaactccctcaccccatcttgaaagccttgaaaggaagctttgggttcgggaagacaaggcaaaagggagcccatgtgtggaagagcccctggtttcctcaagtacttcccagacccgtgaactggactatgggcaaggaccctgatggatgaaggtccaagagccccagagctttcaggcccgaggcaaaggtcttactttgataaagtcaaagggagcagctgacacccctgattcaagaaggctgggaacgggaactggttaaacttcttggagctatttcgtgggaactttggggaacacagccttgccacccagttgaaggtgttccaggaccattgttttttcccaaccccagctggggcttttagggaacaacccattgggccagttccttaggagctcctcctttgaaaagtcaaaggagcagctgacacccctgatcaagaaggctggaacggaactggttaacttcttgagctatttcgtggaacttggaacacagcctgccacccagtgaagtgtccagaccattgtcttccaaccccagctggcctctagaacacccactggccagtcctagagctcctgtccctacccactctttgctacaataaatgctgaatgaatccaaaaaaaaa

SEQ ID NO: 113860 - DNA, 147 bp, Homo sapiens
ttttttttttgagataagagtttcactctcattgcccaggctagagtacagcagcatgatctcatcttactgcaacctccacctcctaggctcaagcggttctgctgcctcattcttccgagtagatgggactaacagatgcgccac

SEQ ID NO: 113861 - DNA, 622 bp, Homo sapiens
ctgtaaaaaaagaatgaatgactataattttggcgattgcagacctattcagtgtcatttgattgaatgattgatcaggtggtagaagaggcttgagcaggccgacttgcccttcaggaatactgcctggccttcagattcaaccttattgcttgacactacttggcctgctcagtggcgctatctcggctcaccacaacatctgcctcctgggttcaagcgattctcctgcctcagcctcctgagtatctgggattacaggaaccgggcaaatctaactcagtcttcctttgatccacactggatgacgtgaactgcatagatggggttttgctagtgctcgcccatggctggtcttgaacccgtgagctcaagtgatccatcatgttgcaccacttgcccccaggtgaactttttagcataaagtataagaaaacaggattcctcctctcaatgcctacaggaatcccctctgatcttctaactggtaaagtactaagttaaaaaaacctcttagccctctgtctctccaagttgggtagtattaaatatatgaatccatttttagcctgggcagcatggtgagactctgtctccatacacacacacactgactacctgt

SEQ ID NO: 113862 - DNA, 709 bp, Homo sapiens
ttttttgccgcttttaaattgaactaatactattttcatatttaatacccataaacttacattattttggagaataggcccttaaatcctttttgaagaaatagggaagttatgtaaaataaacatggggttaagaattaaatacagccgaatagaaataaatataatctggtggctcacacctgtaatcccagcactttgggaggctgaggtgggaggatcacttgagcctaggcgttcaaggagagcctgggaatcatagggaggcgccgtctttatgagaaaaatacataaatccataaatatttaaaaatgtgtttcctgccctccattcggcactgccttaacaccagataccaataacatcaacttgctagaatgttactcgctactttgctaactcagcctcagagttgactttatcaccttctcttacttgaggaggctttgagtcctgtggaacctggactgaaagccctcgagggagctgttaccacaggaacccttcaggtttgccactattaatcacccattttcctttacataagggacgagggaaagaagatggcttcagccataagttggttcatcatcaatgaaagtaataggcaacacatctgaatatggaaagtagaatgacaaagccattaaaaaaatagtttctcatcccacgcgtccgcggacgcgtgggtcgacccgcgaaaaccgg

SEQ ID NO: 113863 - DNA, 559 bp, Homo sapiens
aaggttttggcccacattagcccaggttgggtcttgaaactccctgaccctccaagtaatcctcccctgccctcgggccctcccccaaagttcctaggattaacaagcatgagcccacccacaccccagacaaatacaagtaaattcctaagtggcccaccccagagaataccccacagcatcctgcaggataatggcagtagggacaatggcccaggatgcatgtgctgaaggtgaatgtcttttcttaagcattggataaaactttttaacactcaaaacctgccccagaacacaccttggatgctacaatcaatgtagaaactctttcctcaatcttttcattgttacagttggaaaagattgaggaaagagtttctacattgattgtagcatccaaggtgtgttctggggcaggttttgagtgttaaaaagttttatccaatgcttaaaaaaagacattcaccttcagcacatgcatcctggccattgtccctactgccattatcctgcaggatgctgtgggtattctctgggtggccacttagaatttactgga

SEQ ID NO: 113864 - DNA, 365 bp, Homo sapiens
  misc_feature (1)...(365): n = a,t,c or g
ggctcgtatttgctaagaccaagagagaaagtggagctattcctactgatctcacagaaataactagggctattcaaggatactatgaaccattgtatggtaacagattagataccataaacgaaatggacaaattcctagaaacatgcatgcaaactatctaaactgactnnnnnnnnnnnnnnnnnnnnnnnnnnnnnnnnnnnnnnnnnnnnnnnnnnnnnnnnnnnnnnnnnnnnnnnnnnnnnnnnnnnnnnnnnnnnnnnnnnnnnnnnnnnnnnnnnnnnnnnnnnnnnnnnnnnnnnnnnnnnnnnnnnnnnnnnnnnnnnnnnnnnnnnnnnnnnnnnnnnnnnnnnnnnnnnnnn

SEQ ID NO: 113865 - DNA, 427 bp, Homo sapiens
gacctagataaaaattaaaccatttatattattttctgaagctgagtaagaatggatcacatgataacatgttctcccagcaaatagcagtacatcttttgattttcttccctcccctcatgtattccaaatcaaaatctgcctattctaaatcacctgtcgcagcaaaatgacaaacagaaaaagaaaagagcaaaagatgaaaataattccttttctatactgaattcaatggctcttatgtcactttggacaaattagttcagatttttctcccaattcctacctattaaaaaggtgatttctgccagggtgtggtggcttatgtctgtagtctcagcactttgggaggctgaggtaggcaaattgcttgagaccaggaggtcaagaccaacctgggcaacatggcccaaccccatctcttaaa

SEQ ID NO: 113866 - DNA, 397 bp, Homo sapiens
  misc_feature (1)...(397): n = a,t,c or g
aaatccnagaaatagctgaactccctgcctatcaagtggaaattaaaatggcttctccctggagctactttttctccttctaacacccagggtctaactgcccggggcccttcaggtagcattggactgaacagtcttctccccagattagacagaagcaggactcttctgagactgctggctctttgatccttctctgacatagccctgtcagcttacagatgtgtccctttgcctatatcataatatttttcatcgtcctctcaagaacccaaagcttcaggctgggcatggtgctcatgcctatcatctcagcactttgggaggcagaggcaggaggattgcttgagcccaggagttccagaccagcttgggcaacagaacgagacttcatctc

SEQ ID NO: 113867 - DNA, 301 bp, Homo sapiens
ggatgagctcccttcccagatccgtgcctctggacctgggctgaaggcttctactccctccattgtcaccttcgggaatctgcttgttaccttcctcccaagaatgttccaaaaggtcttggtttaatttctggagggcattcaagaactcagtcatctcacgtgtctagaaaagaaacattaaggccaggcacggtggcttatgtcggtaatcccagcactttggaaggctgaagcaggaggaccacttgagcccaggagttcaagaccagcctgggcaacatagccaagatctcatctc

SEQ ID NO: 113868 - DNA, 368 bp, Homo sapiens
  misc_feature (1)...(368): n = a,t,c or g
aatgaactaaagatggtttgttgtgttggagaaatagagaatgtcagtaagatgaagtgtcatgaagatggcagaagaccatatgtgcccatcatccccttgcttaccaagtccttacaggaatttacaggagatactgtttcactgtgtgttgttttaaagagtaaatctccagtgatgctggaaaacaaggaagagtacacacatacacatacacacacacacacacacacacacacacacacgtatgtttttgtttttgtggggtttgttttttttttgtttttttttagttttgttacaggccataaacttncaaaagacttcaaaggcagatagggtttgtatccgttgaggganaacccaac

SEQ ID NO: 113869 - DNA, 615 bp, Homo sapiens
ttttaagtttatgagatttattttatttatttttcgaaacagggtcttgctctgtcattcaggctggagtacagtggcatggtcacagctcatcacaggctcaacctccaggctcgaacaagcctcccacatcagcccccccgccccaagtagctgggactacaggtgcacaccaccacaactggctaattttatgtatttatttatttatttatttagtagagacagggactcaccgtgttgcccagactggcctcaaacttctgggctcaagtgatcctcccacctcggcctcccaaagtgttgggattacaggtgtgaactaccatacccagacagtttatgctattaaaaaccagcattaggggaggtattccaccaacataacctaagcaacaactctgtttcaagatctgtattccaagcatctcctacaatatcttttaaacccttcagcagcctccctaagcggcggggggtgttgttattccagtttgaggaaagaggaaccagggcctaccaggggtgagtaatttcaccaatgtcattacaggctgataaatgaaggaagattttaaaagatctgtcctcgtgccgctcgtgccgctcgtgccg

SEQ ID NO: 113870 - DNA, 459 bp, Homo sapiens
tgggaacctggcatggaagagtgagggcatactgaaagggtgggtgtggtactggtcacatggcatagagcctttaactcagcttttaagtgttttgtttgcttgaacatgcactttgaaaggacctcacaaaactggttctccatgacaatgtgtggttacctgctaactctggctatggacagatgagaaacatacatggtcaaaagtcaacctttttttaaagtttctaagattaaaaataaacccctgccagccctgggagtctctgtaagtctaaacacaccctcccttgatagcagggtgttctcagatttctgcagtaataattatgccaggccagttgtggtggctcatgcctataatcccaacacttcgagaggctgacatgggaggatcacgtgaggctaggagtttgagatcagcctgggcaacacagcaggaccctgtctcttttta

SEQ ID NO: 113871 - DNA, 381 bp, Homo sapiens
  misc_feature (1)...(381): n = a,t,c or g
aaaagaagtaaacgtgtttacatgaacagagagacagtgccttttcatgctaaatgtggttccccacatctcctctgattagaggtgtgctctgaacaagccgagacggggccgtgccgagcaatgatctcccgctggtactttgatgtgactgaagggaagaacccccaataaaactgccatggactggnnnnnnnnnnnnnnnnnnnnnngggnnnnnnnnnnnaggnnnnnnnnnnnnnnnnnnnnnnnnnnnnnnnnnnnnnnnnnnnnnnnnnnnnnnnnnnnnnnnnnnnnnnnnnnnnnnnnnnnnnnnnnnnnnnnnnnnnnnaccctttgagacgaaagaanncnggtcaaggcttggtttcttttgcctgg

SEQ ID NO: 113872 - DNA, 756 bp, Homo sapiens
gagatggagtctcgctctgtcacccacactggagtgcagtggcacgatcttggcttactgcaaggtatagctgaacaactaccacaaaataaggtttctggccaggcatggtgactcacgcccatactcccttgggagcttggggagctgaggcagaaggactgcttgagaccagccttccaaagtgttgggattataggcatgagccaccatgcccagtcctcaaatactttttagaaaagtttttttaatgttttcaatgatgccaggcagcccccttatattggagcatagagggcatcctaaagccaatggcccctgcttggcttacagaataactagaatcttcacaacaccatcatacttgtaactgttagcttttccaaagccgtatttgaccttatgtttgaagaaggctttccatgctttaacttcagaatactttttcatcatcttctaatagtaaactgattcatcttctgtccctaaaaatgacctgtactttgctattcccgctctccttgcttacactgctctgtccaaaattccctctttcccatttttctccatacatagaaacaatccttctcactgctcaatcctagctcaccctggtagccttccttctttgactacctcagtcaacaaaaggttctctgtccatcctcacaatctctataatagtaattgtccagatctctcaattgggcacttagggaaacaaaacaacaaatactatattttcactgactcata

SEQ ID NO: 113873 - DNA, 1605 bp, Homo sapiens
aacttgaaggcccgcaattccttccgctacaacggactgattcaccgcaagactgtgggcgtggagccggcagccgacggcaaaggtgtcgtggtggtcattaagcggagatccggtgagttttgtctggtttgggccagagagcggcccctttcccgggtctgggagctgtgattttttactgtcaggcaggaagagcggtaactgccatcgcggcgggcatccctggcgccagggtgttggtctgggtaccggcttccctctcggccgacttgtcagctctgtgagccgcgcgcgtctgagcccgtgtcctcacctgtaaagtggagaaatgaaaaaggacctgaacttcctcggtggttgttgagagttaaggcacggggttgatgttttcagatgaaattctcaaagcaagtcagggtggggatggatggtttcatcccacaggtgggaagattgaggcacaacaggggaggggccctcgctaccacacttaggaggggacaggctgggttggttgcagccatttgattcccattttgcctgtgtaggttagagaagaggtcttggggaccccactccatacattgtgctgtcaggtgcaggcctttttggggattccctgaatgttcgtgtgagtcgggggtctctaatggaggagtccagcttcacatgtgttcttgacagggctgtattttctttttagagtgagtttttctcaggtccttgattggaactgcctcagagccaagggtccttttactcagtggcagcaacaaacgcagtctgttggctagtgatcctcctgtctcagggacacgtagtccagggagcagccaattgcttggcacttggggaccccgttctggggagtcctgaaagctttcacctcttggattgccgaatacatgggtggcccttcctagactaagggactggcctgagtgaggctgggcctctcagccaagctgatgttgaaccactgctgtggggatgggcctggggttcctgggaagctgttcatacccattgccaggagcgtgggctctggctggacctggatcagatcctaactgaagcggcagctttctggcatgagaaaggagtgttttcatggtggacagaattgggctatgagtgtggcagaagctgtgtcctcagtactccgtgatgacgagtgagcctctgtgaaatggacaggtgggaaaacagctacctgctggtctgcccaggcacccgccacgggcccacgctgctcagcttctcaatgtgagactgtccacacctgcgaggtgtgctaaaggtgcaggttaggtggactgaccccaggacctccctgacccccaaccaggccagcggaagcctgccacctcctatgtgcggaccaccatcaacaagaatgctcgcgccacgctcagcagcatcagacacatgatccgcaagaacaagtaccgccccgacctgcgcatggcagccatccgcagggccagcgccatcctgcgcagccagaaacctgtgatggtgaagaggaaagcgacccgccccaccaagagctcctgagccccctgcccccagagcaataaagtcagctggctttctcacctg

SEQ ID NO: 113874 - DNA, 637 bp, Homo sapiens
tttttttttacccttgcaaatgtatttattgggtttaaaaacccactgggaaatagaacagtgagatttgaaaaggtggaacaaggacttgagtagaaggtgtcttcttatgctggaacatccttaagggttccaaggggtgtatggttccgagtgtggagggacccttctgagttgtaagactatgaacccaaagtttaaggttttaaagttttgctgtcatgtgaatggcaagggcagtcctctgatgttctcagaagatccagtcatcagattctagattgtgaaggggttggctgtcctctgtgttcccgagtgtttttcatggtccttttcattctttcatgaatcttctattctagaattttgcatgcttgtgaagtttttagaaactgcatcaccattaagcaattaactgtggaaatgactttaaataattatagttaaagacaattgataaggaaatttggttatttctgtggtctacaataacttaataaccataattagggtggatgtggtggctcattcctgtaatcccagctctttgagaggccgggttaggtggatcacctggggtcgggggtttgggaccagcctggccaacatggtggaactctgtctttgctgaaaataa

SEQ ID NO: 113875 - DNA, 831 bp, Homo sapiens
ggcacgaggtgaaaagacaaactcttagcttctgagctatagcattggatagtcttcattacctttcccagaaggattccagtgcaaccgatttcaagcttgcaaaggcttttaactgctcgagataatttttagagctaactatgacattaactacaaaattcctgtcctctagatggcagagaccaagagtaagtactgccacatagttacaagatcaagctcccacggacataaaacaagatgagagggaaacctcatccagtataggtttcaggaacacacagcaaagtttgtaaccgaccagcccaagaggctggcttaaaaagtaggcttataggaatcctaagcctactttctacattctttcctatgacacccctctccattacagaacaacactaaaagacaaattcttagcacaaagtacaccagatttgctaaagcctaagactagtctcaaaaattcatttttctattaatcagaccacacacacacagagagagagagagagagacagaaagacagagagacagagagacagagaaagacagagacagagacagagagacagagaccagaagcttggctgggtaacaaattcttaccccttttgccagcataccacgtttctgggttccctttctctgcagcttccagaagaatgaagtgggcttttgatgaccctgcttcatttgcaccatagctttgggggccaagccactttttacaaaaggaaaattattccttttctgttttataaaactataggcaaaagcttctcatttttgcaagatgctgcccaatgggctggatgaggaaaccaaata

SEQ ID NO: 113876 - DNA, 602 bp, Homo sapiens
ttttttttttttcctaaaatttcattttattttatcatttccaattcagccgctgttctccccctcctcgttgtgctactgtctcctgtccatcctgtccaccctttggcatgccttccggcccagggtttaccactccaatcggccctgctggtgccatccaggaaaggaagagcggtcaagcgtcttggataaagagcatctttctggagagactcttatttgctggggtagaggaaggcagctaaggcctatttgcatatgcttttattccatttccacaccctgcacgctaaccctctctggaaagtcccttctagattcctcctcggcacagcgagggaggaagaggctgggccggaatggaaggttccagcctggcagtgtcagcttctctccgcggagctgagggggaagcctccaccttccccatcatgcgtgcagggtctggacccccgggtcggggaccctcttgcagcacgtgtcaggagcagcctggtgctttggcctgcgcgctctagagcgttctgtgcaggatgcgcctgctcccctgcagcctcccccgaggaagttctggtcaggcgctgggtcccctcgtgccg

SEQ ID NO: 113877 - DNA, 1271 bp, Homo sapiens
cccacgcgtccgcagcactaggccggcagaatctgagcgatgtctttcacactccctgccctgctctgcgtcggtgaggtctggcgtggaaggggaatgggatcacggtgtgcctgggaggcaacaggtctcattactcccgtcttccagggctgtgtctgagtcagaggatcagcgcccagcagcagactctcccaaaaccgttcatctgggccgagccccatttcatggttccaaaggaaaagcaagtgaccatctgttgccagggaaattatggggctgttgaataccagctgcactttgaaggaagcctttttgccgtggacagaccaaaaccccctgagcggattaacaaagtcaaattctacatcccggacatgaactcccgcatggcagggcaatacagctgcatctatcgggttggggagctctggtcagagcccagcaacttgctggatctggtggtaacagaaatgtatgacacacccaccctctcggttcatcctggacccgaagtgatctcgggagagaaggtgaccttctactgccgtctagacactgcaacaagcatgttcttactgctcaaggagggaagatccagccacgtacagcgcggatacgggaaggtccaggcggagttccccctgggccctgtgaccacagcccaccgagggacataccgatgttttggctcctataacaaccatgcctggtctttccccagtgagccagtgaagctcctggtcacaggcgacattgagaacaccagccttgcacctgaagaccccacctttcctgcagacacttggggcacctaccttttaaccacagagacgggactccagaaagaccatgccctctgggatcacactgcccagaatctccttcggatgggcctggcctttctagtcctggtggctctagtgtggttcctggttgaagactggctcagcaggaagaggactagagagcgagccagcagagcttccacttgggaaggcaggagaaggctgaacacacagactctttgaagaatgaccatgagacacagtggccatgggtggatctgaaagctggtgttgagcctgggcggcgtgagctctgtgttggacccacggaggagggagtcactgcagggaaagagggacactggcattccatttgtcagagcatcccggacgatgcagagggtgggagaactacatgctaaatttctttttttttttttttgagcctgggcgacagagcgagactccatctcaaaaaaaaaa

SEQ ID NO: 113878 - DNA, 864 bp, Homo sapiens
gacattacgccaagcttggcacgaggcctctgcttggtccccttttcccccaggcaggaggcaatcccaggggcctgcctgatagaggcatttcctgtccctgtctcctcctgcatctcctttatcctgcactgccaccctctattccccattctgtgttggactttgaaggccccaagcccagccaaagcactgagttcccccttaagacacctccacaccctccccacaagcaaagcacaaattttggggtccatgtagcatgggccacgtaggaggctcctgacttgccaggggcccagcctcagcatacccaccgagcagctgccagcctgggctgagggtgggcatgaggcaggagtcagcacttggacctagggatgtgaggttttctgtgccccaagtttgtgggaaggtgggcactactgctgggcccacagacacagccagctggcaaaagggaggtctagcccagcagagagatgaggacattttgcttctccttcatgcccacagcatgagctgagcttctgctttgctggaaatgaaataaacttggtatgaattgtgccaaggcctccccagttgtcatcctgcctcttgttgccctccctgtccttgccccccaccccacacccatgcccctgtttccttacagattttgatattgttctaatgtgtaatagaaccagccgagtccccttttatcagaggggtctgaaaagcagcagcacagagtaggtgaacacaggcctgcaagtgcgaccacctcagacccagtacgtgtgcccacagtggacacactcacacctccaacacacccacgcgcaggcatgtgtacacgcatgtacacacgcatgcatg

SEQ ID NO: 113879 - DNA, 1824 bp, Homo sapiens
cgaggcccaggaagcacgctgaaaccctgggcggcggcaagctgtgcgacctcttctgcggccggcctgggcaggtgtcttcctcgagaggcaggcaggggatcccggacgatgctgtgttctttgctcctttgtgaatgtctgttgctggtagctggttatgctcatgatgatgactggattgaccccacagacatgcttaactatgatgctgcttcaggaacaatgagaaaatctcaggcaaaatatggtatttcaggggaaaaggatgtcagtcctgacttgtcatgtgctgatgaaatatcagaatgttatcacaaacttgattctttaacttataagattgatgagtgtgaaaagaaaaagagggaagactatgaaagtcaaagcaatcctgtttttaggagatacttaaataagattttaattgaagctggaaagcttggacttcctgatgaaaacaaaggcgatatgcattatgatgctgagattatccttaaaagagaaactttgttagaaatacagaagtttctcaatggagaagactggaaaccaggtgccttggatgatgcactaagtgatattttaattaattttaagtttcatgattttgaaacatggaagtggcgattcgaagattcctttggagtggatccatataatgtgttaatggtacttctttgtctgctctgcatcgtggttttagtggctaccgagctgtggacatatgtacgttggtacactcagttgagacgtgttttaatcatcagctttctgttcagtttgggatggaattggatgtatttatataagctagcttttgcacagcatcaggctgaagtcgccaagatggagccattaaacaatgtgtgtgccaaaaagatggactggactggaagtatctgggaatggtttagaagttcatggacctataaggatgacccatgccaaaaatactatgagctcttactagtcaaccctatttggttggtcccaccaacaaaggcacttgcagttacattcaccacatttgtaacggagccattgaagcatattggaaaaggaactggggaatttattaaagcactcatgaaggaaattccagcgctgcttcatcttccagtgctgataattatggcattagccatcctgagtttctgctatggtgctggaaaatcagttcatgtgctgagacatataggcggtcctgagagcgaacctccccaggcacttcggccacgggatagaagacggcaggaggaaattgattatagacctgatggtggagcaggtgatgccgatttccattataggggccaaatgggccccactgagcaaggcccttatgccaaaacgtatgagggtagaagagagattttgagagagagagatgttgacttgagatttcagactggcaacaagagccctgaagtgctccgggcatttgatgtaccagacgcagaggcacgagagcatcccacggtggtacccagtcataaatcacctgttttggatacaaagcccaaggagacaggtggaatcctgggggaaggcacaccgaaagaaagcagtactgaaagcagccagtcggccaagcctgtctctggccaagacacatcagggaatacagaaggttcacccgcagcggaaaaggcccagctcaagtctgaagccgcaggcagcccagaccaaggcagcacatacagccccgcaagaggtgtggctggaccacgtggacaggatccggtcagcagcccctgtggctagaggaacaccagcacaaacgacagcctcaagtctccttcgagctttatatccatttgg

SEQ ID NO: 113880 - DNA, 2078 bp, Homo sapiens
  misc_feature (1)...(2078): n = a,t,c or g
aaacagtgtttttatttgcatagttgactttttgtgtttggatgataacttttgccaaaggcaattttgagtagatcttttcacaaaagaatcctattttaaaactttaaataatttgttttcattaaatctaatcattttgttataattgaatgccatggttaaagaatctttaacttcatatacttttaatacttacataaaactagatacattaaaaggtcaatattaattatcaaaacttaaattttaccttgttcaaatacaagattactaaaggctttagattttttaaggcatattataaccttaacattcgtatttcttgaaagagatagacagacacttgtttaatgtgcatagagtttatttggtacatctatcaatttctacaataactgaccaaaaacagttcacacagtgtccacctgcactccatgtctaaaatgatttatttagtagggtattttgcaaggctagaaaggagagaaaggatttcacagtatcagtgaaaactgttttatcatgaaacaaatggtaatacattaatatattcnatttcattcctctattagaaaacagcaagaattacattggttaggttgtattatttacagtgaaaacttggaaagacttgacaaaagcatccagttaagttttatcaaccagacctaagggaagctcccctgtcccctcctttcnggggtcctttcctttggaaatggaaataaacttaaatcagattttacataactttaagcaccagcttgacaatttaaagttttaatttcagttttaataaaatactcctgctttggaaaggcaaagtgaatggtaaaaatgtgaatgtaattaaacaagtccactggccctggaaactttttattgcaatagtctttatgttttactactatattcacttcttggaatgaatttgcttgtaggtttgaaacaaaatatttgccttttgtcttgaaaaattcccccttaaaaaaattaattattttttggaactgtaccaactacattttcattcgatgttaaatatgcaacttggtccttggatatcatgttacaaagtccaacctgttggataacttgttatagaaaacaataaaaaaccttaaactatcataaaatatatactgatgttaacagtcatgtatgtataacacatcactgtatctagattttcctgttattggatgtttaaattaccaatgtacaatcaggttttaaaatgtaatacttaaatttccattcactatgtaaaattaaaagctctaaaagaccccttgagttcctgtatttccagaaacattagaacactattaaggcattaatttaaacagacccccaaggaaagtaactagtatgccctgaattacagagcaagtagtattttaaggcagtcaaaaggttcattttttacactttaaggctcttgaatacttaagtttattcctatgtagacattattcctgtgtaatttaaatattcatcaaatggtcaggttattgaaatcaaagcctttatataaagcaaatggacagtttagaactagataataataccccactcctcgctggttcagataaaagatcattcttatatctcatccctttggaaactttcactatcagaagctggcaataaaaggaacaacatatatctaaaatacattacagaagttatgcccagtcacgccataccagatatagagagtccatattcagagtaacagtgcaacaaaagcgcttagagtactactcattaattgtatattttaaatcgtaatttggctacgtatggattatatatagtttacgttacaaataaagccaagtttcaatatgtttgttgatataatattccatcaattatatctggtaatgatatttaaaacagcagggttttaatttcatttactgtctttatccacatatccatatccacatcgaagtgaaaccagcagacatatagctaatttactatttcctttgttcaagcatatattctgatatctaaaagtgcataaatttaaacaacttaagatgaaaagttggccaggtgcggtg

SEQ ID NO: 113881 - DNA, 566 bp, Homo sapiens
  misc_feature (1)...(566): n = a,t,c or g
tttcgtgtgatttcatgcaggtaaagggcaaagggtnnnnnnnnnnnnnnnnnnnnnnnnnnnnnnnnctggtatacagttacgtcctcaagtcttgttaactggcaaaacctgttctttctccctcctgtcgctctggctcaggcctggctcaggtctcccctccctgcatggggccccactcttgcccttcacaggccccagatctgttttgtcctcctcctgctcacacanccttccatggcctccccattggttcttgggagagagttcccactccttatcctgtcactcaaagcccagcccactgcacagacgcatggtccattccccgacccaacccaagttccagccacaaatgctggaagtatgtagaagtagctcatgtcaccccctgcggtggcactgccctgctggaaccagaccagccccttggtccatcccacttctgatgatgtggggctggttcttgtccgggaacctgatggaccttgagttcagatccaggtgccattttgtggccaaaagtgtactaccctttccaagcgcagtctccccaccctcaa

SEQ ID NO: 113882 - DNA, 777 bp, Homo sapiens
gcagcaaggatggcgagggtcctcatggctggggtcacagatcctctagctaggcagggtgaccagagagggcagacagcaggttcactagcaacctcaaacagacaccatggtgcacctgactcctgaggagaagtctgccgttactgccctgtggggcaaggtgaacgtggatgaagttggtggtgaggccctgggcaggctgctggtggtctacccttggacccagaggttctttgagtcctttggggatctgtccactcctgatgctgttatgggcaaccctaaggtgaaggcattgagaacagtgggaagagctgacctctgcgaaatgagatcagcctcaccttggtatagtttgggtcattccaggtgtttttttttcttctcttcccaaggctgcctaatctctagccagtgtctggcttttgactgataggtgtgttgctcagttactttgggcccgtgtacgtttgtgtgtcacctccatcccataattttaagtacatgcatgatatgcagcccatatgcatgaaccttaagtagctaattatcatacagggttatgtgaaagaaactttttctctctaatgtaaatgcccatctctgaagagctgccccttactggtttggtccggatcttgccggccacggggtcccttttttatgtcacttttgtcttgcctgctgaacctctgcttttcatctcacttcttgctcacccgtcccattcaccgtgcttctattctctgcttttacttattctgcccctgtatt

SEQ ID NO: 113883 - DNA, 814 bp, Homo sapiens
attttttcccgggtcgacgatttcgtgtcgcagtctcggtcgtacctcccctagttgttaccttagctgctggcagggagaagagagggcttgcccgtctagacagcccccgccaggggggtcaggactgcttcaagggagccgggctcgttcatatggaagcctggtgcaatcggcctgctccccagtgagggaaagacgcctggagcatcagttggagcccggagacaccctggctggactagcactcaaatatggggtgacgatggaacagattaaacgtgcaaaccgcctttatactaatgactccatcttcctgaagaaaaccctctacatccccatcctgacagagcccagagacctgttcaatggtttggactctgaggaagagaaagatggagaggaaaaagtacacccaagtaacagtgaagtttggccacactcaactgagaggaagaaacaagagacaggagcaggacgtgccaatggtgaagtcctccccacacctggccaggaaacccccacgcccatccatgacctctctgcctctgatttccataagaagcttgattcacagatcagcctgtccaagaaggctgctgctcagaagctgaaaaaaggggaaaatggggtacccggggaggatgcaggtctccacctgagctccccttggatgcagcaacgagcagtcctaggtcctgtgccgctgacccgtacctctcggacccggacactacgggaccaggagaaagaaatcttcaaactatgatgtccccagtgtattgcggccgcgctagagtttccatacgatgca

SEQ ID NO: 113884 - DNA, 482 bp, Homo sapiens
ccttctaaggtgagtcattagtgcaataagtgtaggaatagataataattccaaacatatctgaagaaaatggtccatggagtgaatcaccaatgtagttaattagtctgtatacaactgacaatgtatctccacaaattatctagtttttcaatgaaatattctcaaaatcaatttatcaaagaagatttaatcatccccttccctgcttttttttaaagagataaggtctcaactatgtgcccaggttggagtgcagtggctggtcacagatgcaatcacagtgcactgcaggctcaaactcctgggaccaagtgatcctcccgcctttgaatccagaatacctggaactacaagcacatgtgattgcacctggcagatttaagttactaaaatttttactttcagtacctattcagcaccgtgtaaaaattcaggaatgaagattcctaacacattggattctacttctcatgcattat

SEQ ID NO: 113885 - DNA, 1168 bp, Homo sapiens
atataactgagtttacgcagacgcagaaaacgcaggcaaacctgaggtcctcagaatggcgggcacaggtttggtggctggagaggttgtggtggatgcgctgccgtattttgatcaaggttatgaagcccctggtgtgcgggaagcggctgcagcgctggtggaggaggaaactcgcagataccgacctactaagaactacctgagctacctgacagccccggattattctgcctttgaaactgacataatgagaaatgaatttgaaagactggctgctcgacaaccaattgaattgctcagtatgaaacgatatgagcttccagccccctcctctggtcaaaaaaatgacattactgcatggcaagaatgtgtaaacaattctatggcccagttagagcatcaagcagttagaattgagaatctggaactaatgtcacagcatggatgtaatgcctggaaagtatacaatgaaaatctagttcatatgattgaacacgcacagaaggaacttcagaagttaagaaaacatattcaagatttaaactggcagagaaagaacatgcaactcacagctggatctaaattgagagaaatggagtcaaattgggtatccctggtcagtaagaattatgagattgaacggactattgttcagctagaaaatgaaatctatcaaattaagcagcaacatggagaggcaaacaaagaaaacatccggcaagacttctgaaaagacaatttagcaggtagaagaaaagttgggctttcacaaaaggcatctgaacttttaatgaactttgaaggacaacagcatcttcccaaaaccattgatgtttaagtgtttagaaatcatagaaggtgtaggctgctgtggtaattctatttgtatatctcaacagaattaaaatgtctagcttggtggtatttttatagccataaaagaaaatctttaggctttcaaaataaggatgactttagaataatattgtgtcatagaattaattttcagccatgtggaccatattttgtatccaaggatccttatttaaagctttcaacatgtacaggaagttggaaatttttggtttatgactttgtctaataaagagatagttctaaacacattcttgatcaccaaacaacttcagaaagacagtgactgtac

SEQ ID NO: 113886 - DNA, 1849 bp, Homo sapiens
tttttttttccaggattcttgtattggaagatagatcttttattgtaccactcaaggattaagccattcaactagacgacacagataaaacgggagttataacatataaaccagtacctgcccacactcatagcagtgaggggagataaaaatcaaggttgcactgtaattccatgacttctaaaatttcaagtctatttggaccttggtttgaagcaacagaacctttataggcaggattcccctttttaaaggaaaaacccaaggagaggatgatcaaggcacaaatggattcacttcatggcattttattggataggtctatattttaaatctggcaggtatggacatcttacatagggggaaaaaaggcttctttcctaaaagataactattaattaattcaaaccagcttttaatatggattggacctttcaaggtcttcgttttgctttaaacaagttaacttttagcagttgtaaagccactgtacaaaaaaaaccttgtgtacattctcaaaatttaatacaggggcttcccaacccaggagtctgctgggatagggtatcggagaaggggtgttatgttcagggtttaaattgaaaggaaaatgaggaaaccaggataaaggcaaggccaaccaaattaactttccactttgtggctcctctctggcttttttggagtctcctccccgaaggtccaggaagcccctggtataacaatcacctttagtctttacagaacatacatcctatgtgccttggtgaccaaagacataaaggcagccttttgttacgtgttcccccttccaaaccctttcagggttctttattaaggcttcaggaaagttttccaaggattgctgccctgttctttgtatgaatccaagtaaacaactataccaaagcagctcttcctgggagaagataaaacaggcacagatacataaccaggcccaactgcgtacctactcaacttgatacctgatcacatggccctacatccttaaaagcagcaccagggacaaatggagctatcaagaggtaaaatccaaacactggacagttaaaacacatacaaaccagttaaaagaacattagtaatggggcactaaatagagttaaggctggacagctggttcaaccataccttggtattgaaataattctgcaagatgaggaacttacagaggaaccttgaaagaggcaccatgatatgacagggttctctttcactgcatgtctttaagatatcctactactcagcccaactgaccataaagcagctcgtggaactttaataaacaaatcccctaataaaaaataaaataatttttaagaatgttgggagggtatgccctatttcccttccagatctgatcaacacactgagaattataaaaccggatacaaaactgttctgtgattaatcacttgaacagttctaacactgttaatacagctcaattcctatgctgcagcctttaagatacaaactggggttaaccatgagatcaccccacttgttaagagaagtatcagataaattttaagaaactgttcccagttaaggaaaataattccttaatttcataaccctaaaactttttcctaaaaatttttgcagggcaggtacttaactcatagctgttttagttgattaaaaaatctgatttaaaaataagtaaggctgggcgcacgtggctcacgcctataatcccagcactttgggagaatgaggcaggcaaattgcctgagcccaggagttcaagaacagcctggacaacatggcgaaaaccccatctccacaaaaaattagccaagccaatgttggtgcatgcctgtta

SEQ ID NO: 113887 - DNA, 592 bp, Homo sapiens
ggacttccccgtcgacccacgcgtccgcccacgcgtccgagcctgcctcaccccttaccaatgatggcagttgaagaccacctggcatgacggagaggggctgagggatggacttcagcccctctgctctgtaccctttttccttttgtccccggcagcagggaagaagctggaggccgtgggagaatggctgggcagagcagaggggcagcgatagactctggggatggagcaggacggggacgggaggggccggccacctgtctgtaaggagactttgttgcttcccctgcccccggaatccacagtgctctgcttctctgtgtcgccccgcccagccccctggtgtggagggaggggtctcgtttgtgcgcgtgggtgtagctttgtgcatcctctcccagtggagcgatcacctgtgcctcccctccccctttgtttgcccctgtgtggttggtcaaggagggatgtgagggaaatagggaccccccgacttgccctcctgcctcagtctttcccccaccctgtctcttccttgtccttctctggaaaatgccaaaatacacgatgtgaataaaagtacaacggctaa

SEQ ID NO: 113888 - DNA, 548 bp, Homo sapiens
  misc_feature (1)...(548): n = a,t,c or g
ttatgttgtttgtacttgccaggatacacttccatttcatatttgcaagtacacataaaggtatccttcatcagcagcacagtgcttcctttcctctgaatctgccatcagctcaggcagatttctaagcagcaaatcagcctttgccagaacactgcaggacaccagtgcagcgcccagcctgcgaccatgnnnnnnnnnnnnnnnnnnnnnnnnnnnnnnnnagtgacatttggtgccgtgactcggatcggggaacctcccttgggagatcaatcccctgtcctcctgctctttgttccaagagaaagatccacctacgacctctggtcctcagaccgaccagcccagggaacatctcaccaattttaaatcagccgcttccagatcccctggaactctggcccaaggctctctgagtgactccttcccagatcttctcggcttagcagctgaagactgacactgcccaatcgccttggaagcctacaggacaatcacagatgctctgggtaactctcacagtggaggggacgtgagtaaaaatg

SEQ ID NO: 113889 - DNA, 621 bp, Homo sapiens
gctgcaggaagcttataatttggctaattatccaccttaatcaccatgaaaatttataaggatcttattactgatgatgaacttttctcagacacctatcccatgaaacttattgatggtgtaatctatgaagtaacaggaaggcttgtcactcgtaaagttggagatgtccagttaattggttctaacccttctgctgaagatgttgatgaaggaactgaagaagcagttgaatcaggatgtgatatagttctgaatcatagactacaagaaagttatgcttttggtgataaaaagggatacaccttgtatttgaaggaatatatgaaaaggattgttgataagcttcaagaaacgaatccttcagaagtagacacatttaaaactaacattaataaatatatgaaggatgtccttggaaggttcaaggatcttcaattctttactggtgaatctacagacatagatggcatggtcgctcttcttgaatacagagatttaaacggtgaaagcagacccgtgatgatgtttttcaagcatggccttattcaagaaaaatgctaatgtattccaattgttaacaccttttgttattcttggaaacaaaggtctttgaaagcc

SEQ ID NO: 113890 - DNA, 1233 bp, Homo sapiens
cggccgcgtcgacctcggtcctccacctgtccgctacgctcgccggggctgcggccgcccgagggactttgaacatgtcggggatcgccctcagcagactcgcccaggagaggaaagcatggaggaaagaccacccatttggtttcgtggctgtcccaacaaaaaatcccgatggcacgatgaacctcatgaactgggagtgcgccattccaggaaagaaagggactccgtgggaaggaggcttgtttaaactacggatgcttttcaaagatgattatccatcttcgccaccaaaatgtaaattcgaaccaccattatttcacccgaatgtgtacccttcggggacagtgtgcctgtccatcttagaggaggacaaggactggaggccagccatcacaatcaaacagatcctattaggaatacaggaacttctaaatgaaccaaatatccaagacccagctcaagcagaggcctacacgatttactgccaaaacagagtggagtacgagaaaagggtccgagcacaagccaagaagtttgcgccctcataagcagcgaccttgtggcatcgtcaaaaggaagggattggtttggcaagaacttgtttacaacatttttgcaaatctaaagttgctccatacaatgactagtcacctgggggggttgggcgggcgccatcttccattgccgccgcgggtgtgcggtctcgattcgctgaattgcccgtttccatacagggtctcttccttcggtcttttgtatttttgattgttatgtaaaactcgcttttattttaatattgatgtcagtatttcaactgctgtaaaattataaacttttatacttgggtaagtcccccaggggcgagttcctcgctctgggatgcaggcatgcttctcaccgtgcagagctgcacttggcctcagctggctgtatggaaatgcaccctccctcctgccgctcctctctagaaccttctagaacctgggctgtgctgcttttgagcctcagaccccagggcagcatctcggttctgcgccacttcctttgtgtttatatggcgttttgtctgtgttgctgtttagagtaaataaactgtttatataaaggttttggttgcattattatcattgaaagtgagaggaggcggcctcccagtgcccggccctccccacccacctgcagccccaccgcgggccaggaccaggctctccatctgcttcggatgcactc

SEQ ID NO: 113891 - DNA, 2194 bp, Homo sapiens
gggcgccccagcgcatcgctccctactccgcctctcgggatcctttttaggcggggcttggctgccagctccgcggcccgggcaaaaggctgggactttactccgggtggcggcgaggacgagtctgtgctccatcagctgccgcacccgccgcctcccgcccccaaaccccatccccgcggttgagccacgatgagcggcagagtcggcgatctgagccccaagcagaaggaggcattggccaagtttcgggagaatgtccaggatgtgctgccggccctgccgaatccagatgactattttctcctgcgttggctccgagccagaagcttcgacctgcagaagtcggaggccatgctccggaagcatgtggagttccgaaagcaaaaggacattgacaacatcattagctggcagcctccagaggtgatccaacagtatctgtcagggggtatgtgtggctatgacctggatggctgcccagtctggtacgacataattggacctctggatgccaagggtctgctgttctcagcctccaaacaggacctgctgaggaccaagatgcgggagtgtgagctgcttctgcaagagtgtgcccaccagaccacaaagttggggaggaaggtggagaccatcaccataatttatgactgcgaggggcttggcctcaagcatctctggaagcctgctgtggaggcctatggagagtttctctgcatgtttgaggaaaattatcccgaaacactgaagcgtctttttgttgttaaagcccccaaactgtttcctgtggcctataacctcatcaaacccttcctgagtgaggacactcgtaagaagatcatggtcctgggagcaaattggaaggaggttttactgaaacatatcagccctgaccaggtgcctgtggagtatgggggcaccatgactgaccctgatggaaaccccaagtgcaaatccaagatcaactacgggggtgacatccccaggaagtattatgtgcgagaccaggtgaaacagcagtatgaacacagcgtgcagatttcccgtggctcctcccaccaagtggagtatgagatcctcttccctggctgtgtcctcaggtggcagtttatgtcagatggagcggatgttggttttgggattttcctgaagaccaagatgggagagaggcagcgggcaggggagatgacagaggtgctgcccaaccagaggtacaactcccacctggtccctgaagatgggaccctcacctgcagtgatcctggcatctatgtcctgcggtttgacaacacctacagcttcattcatgccaagaaggtcaatttcactgtggaggtcctgcttccagacaaagcctcagaagagaagatgaaacagctgggggcaggcaccccgaaataacaccttctcctatagcaggcctggccccctcagtgtctccctgtcaatttctaccccttgtagcagtcattttcgcacaaccctgaagcccaaagaaactgggctggaggacagacctcaggagctttcatttcagttaggcagaggaagagcgactgcagtgggtctccgtgtctatcaaatacctaaggagtccccaggagctggctggccatcgtgataggatctgtctgtcctgtaaactgtgccaacttcacctgtccagggacagcgaagctgggggtggcggggggcatgtaccacagggtggcagcagggaaaaaaattagaaaagggtgaaagattgggacttaacacttcagggaagtcagctgccggggagaaacttgctcctaaatgaacacataagtttagatcgcaatgaggagtagcagggtagctggttgctagagttacggtggggatcagaaactcttccaaacattttagcactgaggctggggtagcttttggcttttcccaggtctcaggaggtggcctgagtcagcacacatcttcccactcggtagacaggctggcctctccctcactttgagactttggcaactcctgggccacacggcctgcctctttgattactaatgattgtcagtgactcagagcttcctgggacttcgggtacccacccgctgttctccatgcaaacaaagcgccagggaaatgacccacagggatcgcagctgcatggagggccaaggagggtgggggtgggagtgaatgctaaaagcag

SEQ ID NO: 113892 - DNA, 418 bp, Homo sapiens
  misc_feature (1)...(418): n = a,t,c or g
ccgagcgtgnggatnnncgacgagcctacgcgccagctcgcgacaccatggtggcgtactggcgacaggctggactcagctacatccggttttcccagatctgtggagaagcagtgagggatgccctgaagaccgagttcaaagcgaacgctgagaagacttcgggcagcagcataaaaattgtgaaagtctcgaagaaggagtagctgaatctgaagcctgaagtgctgagtcttgaaggtgaagcatgtgggcccctgttctggcagatggaaatcaacctcacctcctgggggacaggctgcccatctcgttgataaattgactatgccaataaattaacatggttcactttcnnnnnnnnnnnnnnnnncctnnnnnnnnnnccgggcacccatttggccttatggggggggga

SEQ ID NO: 113893 - DNA, 448 bp, Homo sapiens
  misc_feature (1)...(448): n = a,t,c or g
tcgtacgagnnnnnnnnnnnnnnnnnnnnnnnnnnnnnnnnnnnnnnnnnnnnnnnnnnnnnnnnnnnnnnnnnnnnnnnnnnnnnnnnnnnnnnnnnnnnnnnnnnnnnnnnnnnnnnnnnnnnnnnnnnnnnnnnnnnnnnnnnnnnnnnnnnnnnnnnnnnnnnnnnnnnnnnnnnnnnnnnnnnnnnnnnnnnnnnnnnnnnnnnnnnnnnnnnnnnnnnnnnnnnnnnnnnnnnnnnnnnnnnnnnnnnnnnnnnnnnnnnnnnnnnnnnnnnnnnnnnnnnnnnnnnnnnnnnnnnnnnnnctnnnnnnnnnnccgggacccaaattcgccttatggggagtggaataacaattaactggccggggtttaacaacgtggggacgggaaaaaccttggggttacccaatttaatcgcttgtgcgcacaancaatggaaaagcc

SEQ ID NO: 113894 - DNA, 425 bp, Homo sapiens
  misc_feature (1)...(425): n = a,t,c or g
ctcgcggaattccgcacgagggaatatgctggcccttcgtcagattgcccagaggaccatcagcaccacttcacgaaggcattttgaaaacaaggttccagagaaacaaaagctgtttcaggaggataatgggatgccagttcatctgaaaggcggggcatctgatgccctcctctacagagccacaatggctctgacgcttggtggcacagcctatgccatctatctgttagctatggctgcatttcccaagaagcagaactaatgtcgtcatcccagtcttcacgtggttcagtttcatcaacgctcgatggaccaggaatctgatgagtaactgagctcttctttggggatcaatatttattgatgtgtattaactgctgccaataaagcaatccttaaccattnnnnnnnnnnnnnnnnnn

SEQ ID NO: 113895 - DNA, 391 bp, Homo sapiens
cccacgcgtccggtagattcctagtaaattactaatgaatgagttgtaggatatttgttcctgtcaactattatataagtggagtaaatacatatttttcttttgttaaaattcacccattggtactttggcctagaaagggtattatactaaatcttaagaggcagtacacttgtctttattcaacccaaagggatggatggaatttctaagaaaaagcctggggcagtgtcctgaatttatcccattagagttcagatttgggttttcttcaaaaagtgtcctgggctggcacagtggctcacacctgtaatcccaacactttgggagcctgaggtgggaggattgcttgagcctaggagtctgagaccatcctggacagtgtagtcag

SEQ ID NO: 113896 - DNA, 425 bp, Homo sapiens
  misc_feature (1)...(425): n = a,t,c or g
tctcgggtcgacccacgcgtccgcggacgcgtggggattggtattgcaggttactttggtaaatgcgatcttgggagttgcaagctaaagtctttaggagtgatgggtcatatgtgcagcttacttttaaatacttcagtatatacatatatgtgcatacacatctacatgtatatttatacacacatgtctatgtatatgttcatatatgtatatataaagagggatatatcacannnnnnnnnnnnnnnnnnnnnnnnnnnnnnnnnnnnnnnnnnnnnnnnnnnnnnnnnnnnnnnnnnnnnnnnnnnnnnnnnnnnnnnnnnnnnnnnnnnnnnnnnnnnnnnnnnnnnnnnnnnnnnnnnnnnnnnnnnnnnnnnnnnnnnnnnnnnnnnnnnnnnnnnnnnnnnnnnnnnnnnnnnnnn

SEQ ID NO: 113897 - DNA, 1062 bp, Homo sapiens
aggcaggccacttccggcgtagccatggcggctaacgctactaccaacccgtcgcagctgctgccgttagagcttgtggacaaatgtataggatcaagaattcacatcgtgatgaagagtgataaggaaattgttggtactcttctaggatttgatgactttgtcaatatggtactggaagatgtcactgagtttgaaatcacaccagaaggaagaaggattactaaattagatcagattttgctaaatggaaataatataacaatgctggttcctggaggagaaggacctgaagtgtgaatgagtttccttgacttacactagattttgttttggcttataatgacaagaaaatggaattttttttcccactttctaatgtttaaatcccataaagctaagtttcccgttaaagggaagtgctttgaagatgtgtacccatttttgtaagttaatcatgattatcctggaaaaagaagaaaagaacttcttctttgcagatgaaaataaaggtgtttttggttaactgtcattttgtttattctactgcagtagccagtggaacaaagtttgtagttattttgccacttacttttctgtcattatatgcttatttggtttgtcatttacgtgaccatttgattctcaaacaaaagttgttccaaacaaaatgatgaactttgatttgaacaggtgcatttaaacaaccggaaatgatcacttacaaaattcaattaaaatgctgttgttttgtaatgaggatttttcttctgatttcaaattccatgaactcctattgaaaacaaacaatgtacaggtaatatatgcacattgtagaaatgcaggaattatctattggaattaccctaaagatagaaattttatctatttgcttataaaattgattcagaaggttattaccttaatgtagttattactgaattgccaggaaatgagtggagacagagctttaagataaaggatactaaaaacagctaagaactccaggactcaggtcaaatcaaggaactgataataagatcattgaactgtataaattaa

SEQ ID NO: 113898 - DNA, 1583 bp, Homo sapiens
  misc_feature (1)...(1583): n = a,t,c or g
ctttgatgaccaggaaacaaagcctacccctaaacaaaggggaaagtttccagatactactcctgctcttgttggctagctcaggaaagaatggtccactgtgtaagtctgtatttggaccaggtccagggtggtaagatggtctcagggtcactaacttctaccttgtgcaaaactgcattagtcagaaagggggcccaaattcagacaggctcaacaattccttatatatttttcaaagtgcttttgttgcatgtttcattttctgctatacatggcaataaatatttgttgctttggtctgtacaaagtctgtgaggaaggtaagacagatgttacctaaatggacaaacaataaatacagagaacaatcttgttctgagtccccccagacaatagtgaaagaacctgaaaaaggtcttttgattcatagtccaaatcgacaccatattgccacctttcaagttgttgccttacatacagtaaatacccaagaacccagacaatattccccnggagtccctgcaatgagactgcatgcccacagctttcctaaaagagaatgtgaaggtcccccagcaactcatatatagaaagctatttatttcctatagaaaactcaaaaacaaagaaaaagaaagaaaaataaagagagatagaaagagaaagggaaagaaagagagagaaaaaacaaacacacaaaaggtggtctttccccaaaaggcaggcagttgaagggaggacatgtagttgctggagtgsgaaacagtaacattcagttaacaatggaatatttaaaaaaaaatagttttcttttcaaattgtaacttgtggtaaaacatagaaaaatgtactaaacgagcttgtataaaacagtaaaattttcaaataagcccaggggaaaagcacaatgctggaaagaatgcggtacaacgggagaggagaaaagatttcatacaaaactacctattacaatacagaaaaaagtataaaatgttcctactttggaacttaagtacaaaatgacactggcatttgatcacttcactatctaagcctgaggagctctcagagggtggggagagatgctagaaagaacaaaaggaatagcagtttttaaatctcaagttgatcagtccaaactccacccgttttttttttttagctgaaaatatcacctccctctgtaacctctacccatatggcaaagttcatccaggcctcaaaaatattccattaggtagtccacaaacaccctactcataggggctgggatctctgtgtgctggaatttggaaaatggaaataaatctacaggctaaatggtgaacacattcagtctttaaaaaaaaaaagcatatccctgtgaaattttatacatacatacatatatatatatatatgtatgtgtatatatatatgtatatatatatgaaattctctgtggttagaaacatatttaaactacccacagaccaaactagatctgcattcatccagcgctggaattttatgctaaatactaaggtcctttttcttcttgcatcagaagtaggcaacagtaaaagtggtgctttgttgcg

SEQ ID NO: 113899 - DNA, 794 bp, Homo sapiens
tttattttgtagcgccaaggtctcactatgctcacacctgtaatcccagctttgagaagaggcacagacaccaaggaccagaggacgcttgcttaggccgcccctcccccactggttacccaaacatgaaaacctgctcgccagcaaactgtgcctaactccctcaccccatcttgaaagccttgaaaggaagctttgggttcgggaagacaaggcaaaagggagcccatgtgtggaagagcccctggtttcctcaagtacttcccagacccgtgaactggactatgggcaaggaccctgatggatgaaggtccaagagccccagagctttcaggcctgaggcaaaggtcttactttggaaaagtcaaagggagcagcttgacaccccttgattcaagaaggcttggaacggaactggttaacttcttggagctattttcgtgggaactttgggaacacaagcatggccacccaagtgaaagtgtccagcaccattgtctttcccaaccccagctgggccttttaggaacacccacttggccaagtccttaggagctcctcctttgaaaagtcaaaggagcagctgacacccctgatcaagaaggctggaacggaactggttaacttcttgagctatttcgtggaacttggaacacagcctgccacccagtgaagtgtccagaccattgtcttccaaccccagctggcctctagaacacccactggccagtcctagagctcctgtccctacccactctttgctacaataaatgctgaatgaatccaaaaaaaaa

SEQ ID NO: 113900 - DNA, 452 bp, Homo sapiens
tttttttttttttctctgtcaagctacattcaaatccacatgacaatcagagatatcagaacagtgttcttgtgaatattcttataacaaatttactgtacatgaatttgactttcacataaataattataaatgcaggcaccactgagagttgttgttcttcattccttgacatttttttatgagcattcacatatcaaatgaaacactcctaatgcccttccacgccccaaggcattccagttcacctggctgaagtcaaattccagtaaatgaggactgtgagcagggttgttcacattcccaaggcctcagctgcctcatctataaatgaaggcgttaaccacaggactttggatctccctatgaggggctcacctttaaggattcaaaatacagttccagggaattaacagagaaaaaagttcctctagaaattgaaaaaaaaaaaa

SEQ ID NO: 113901 - DNA, 1149 bp, Homo sapiens
aattgaaaaccgttatgtcgatgatcactccaagcttggcacgaggggtcttggcggccggaggaggagtaggtgcgggtgaagatggcggcagccgaggccgcgaactgcatcatggaggtgtcctgtggccaggcggaaagcagtgagaagcccaacgctgaggacatgacatccaaagattactactttgactcctacgcacactttggcatccacgaggagatgctgaaggacgaggtgcgcaccctcacttaccgcaactccatgtttcataaccggcacctcttcaaggacaaggtggtgctggacgtcggctcgggcaccggcatcctctgcatgtttgctgccaaggccggggcccgcaaggtcatcgggatcgagtgttccagtatctctgattatgcggtgaagatcgtcaaagccaacaagttagaccacgtggtgaccatcatcaaggggaaggtggaggaggtggagctcccagtggagaaggtggacatcatcatcagcgagtggatgggctactgcctcttctacgagtccatgctcaacaccgtgctctatgcccgggacaagtggctggcgcccgatggcctcatcttcccagaccgggccacgctgtatgtgacggccatcgaggaccggcagtacaaagactacaagatccactggtgggagaacgtgtatggcttcgacatgtcttgcatcaaagatgtggccattaaggagcccctagtggatgtcgtggaccccaaacagctggtcaccaacgcctgcctcataaaggtgagggggtgggcatggccaggtgccccctgggttgaaaccaaagagaggccatcacctggccctggcatgggactttggggcccagaatgttggcctgaggtctcagagcctgatctgccagccagaggtggtgctagaggcccaggaaagacacttcgtcctttaaatatctttgtgagcgctgctgtgtgagaaccatgcttggcacttggcttctggcggaggaaacacccaaagctggcagctaaagcccacagcccatgcacggaaaggcaggaccccagggcgatgagcggatgcccatgcacgctggccactgcagaagagcacggagccaggctggtctccgagatgtgc

SEQ ID NO: 113902 - DNA, 2504 bp, Homo sapiens
agaaaattcgagaccatagtccgtgtcgtagaccctatgcagagtggtggaattcctcgccgcggcgcggagtcccggctgcgggatagaccgagggccatggccgcctctcccggacccgccggcgttggcggcgccggagcagtctacggctccggctcttcgggcttcgccctcgactcgggactggagatcaaaactcgctcggtggagcagacgctactcccgctggtttctcagatcaccacgcttattaatcataaagataataccaaaaagtctgataaaactctgcaagcaattcagcgtgtaggacaagctgtcaacttggcagttggaagatttgttaaagtaggagaagctatagccaatgaaaactgggatttgaaagaagaaataaatattgcttgtattgaagctaaacaagcaggagaaacaattgcagcacttacagacataaccaacttgaaccatctggaatctgatgggcagatcacaatttttacagacaaaacaggagtgataaaggctgcaagattacttctttcttcagtgacaaaagtgttgttgctggcagaccgagtagtcattaaacagataataacatcaagaaataaggttctcgcaactatggaaagactagagaaagtgaatagctttcaagagtttgtccaaatattcagtcaatttggaaatgaaatggtggagtttgcacatctgagtggagatagacaaaatgatttgaaagatgaaaagaaaaaggcaaaaatggcagcagctagggcagttcttgaaaagtgtacaatgatgcttctcacagcttcaaagacatgtctgaggcatcctaactgcgaatcagcccataaaaacaaagaaggagtatttgaccgtatgaaagtggcattggataaggtcattgaaattgtgactgactgtaaaccgaatggagagactgacatttcatctatcagtatttttactggaattaaggaattcaagatgaatattgaagctcttcgggagaatctttattttcagtccaaagagaacctttctgtgacattggaagtcatcttggagcgtatggaggactttactgattctgcctacaccagccatgagcacagagaacgcatcttggaactgtcaactcaggcgagaatggaactgcagcagttaatttctgtgtggattcaagctcaaagcaagaaaacaaaaagcatcgctgaagaactggaactcagtattttgaaaatcagtcacagtcttaatgaacttaagaaagaacttcatagtacagcgacacagctggcagcagatctattaaaataccatgctgatcatgtggttctaaaagcattaaaacttactggagtagaaggaaatttagaagctttggctgaatatgcctgtaaactctctgaacagaaagagcagcttgttgagacctgtcgattgttacgacacatatctgggacagaacctctggaaataacctgtatacatgcagaggagacatttcaggtgactggccaacagataatttctgctgctgaaacattgacattgcatccatctagtaaaattgctaaagaaaacctagatgtattttgtgaagcttgggaatcccaaattagtgacatgtcaacactgctgagagaaatcaatgacgtgtttcaaggaagacgaggagagaagtatggctacctttcacttccaaagccaatgaagaataatgcaaacctgaaatcattaaagccagacaagcctgactctgaggagcaagccaagatagcaaagcttggacttaagctgggtttgctcacctctgacgctgactgcgaaattgagaagtgggaagatcaggagaatgagattgttcaatatggacggaacatgtccagtatggcctattctctgtatttatttactagaggagaggggccactgaaaacttcccaggatttaattcatcaactagaggtttttgctgcagagggtttaaagcttacttccagtgttcaagctttttcaaaacagctgaaagacgatgacaagcttatgcttctcctggaaataaacaagctaattcctctatgccaccagctccagacagtaactaagacttctttgcagaataaagtatttctaaaggttgacaagtgtattacgaagacaagatccatgatggctctcttagtccaacttctttcactttgttataaactgctgaagaagcttcagatggaaaataacggatgggtctcagttacaaataaggacactatggatagtaaaacttgagaagcttttggggtcagatctctggaacatcatgtgatgaagctgacatttttaaaaatcaaatgatcctttatcttttcagaaattcatcaattttataaagaaaacaatattgaaattttgctctattttctgatcatgaaactgattgtaaagctttttgacaactaataaatgtcttggtaattgccaaaaaaaaa

SEQ ID NO: 113903 - DNA, 1184 bp, Homo sapiens
ggatcggggaattctgctggcgctgcagctgcagaatggtcggcggtggcgggaagcgcaggcccggcggggaggggccgcagtgtgaaaaaacaactgatgtgaagaaaagtaaattctgtgaagctgatgtctccagtgaccttcgaaaagaagtagaaaatcattataagctttctttacctgaagatttctatcacttctggaagttctgtgaagaacttgatcctgaaaagccatctgattcactttctgcaagccttggacttcaattagttggtccttatgatatccttgctggaaaacataaaacgaagaaaaaatcaacaggcctgaattttaaccttcactggaggttttactatgatcctcctgagttccagaccattattattggagataataaaactcagtaccacatggggtatttcagggattctcctgatgaatttcctgtatatgttggtataaatgaagcaaagaaaaattgtataattgttccaaatggagataatgtatttgctgcagtcaaattatttttgacgaaaaaacttaaagaaataacggataaaaagaaaatcaatctcttgaaaaacatagatgaaaaactcacagaagcagccagagaattggggtactcgcttgaacagagaaccgtgaagatgaaacagagagataagaaagttgtgacaaagacctttcatggtgcaggcttggttgttccagtagataaaaatgatgttgggtaccgagagctccctgaaacagatgctgacctcaagagaatttgcaagacaatagttgaggctgcaagtgatgaggagagactaaaagcttttgctcccattcaggaaatgatgacttttgtgcagtttgctaatgatgaatgtgattatggcatggggcttgaattgggaatggatctcttttgctatggctcacattattttcataaagttgctggccagcttttacctcttgcatataatctgttgaagaggaatctgtttgcagaaattattgaggagcatctggcaaacagaagtcaagagaacatagaccaacttgctgcatgagtaaggtggctttgattggtgtacagtatttcaaaggactagtattaaacttgtgatttttgttttgtttttaaggaatacaaaaaataaacatttactaaaaacgtt

SEQ ID NO: 113904 - DNA, 1466 bp, Homo sapiens
  misc_feature (1)...(1466): n = a,t,c or g
cggactgcttgggcggacgcgttggtgcctgcttctctggcccctggtcctgtcctgttctccagcatggtgtgtctgaagctccctggaggctcctgcatgacagcgctgacagtgacactgatggtgctgagctccccactggctttgtctggggacacccgaccacgtttcctgtggcagcctaagagggagtgtcatttcttcaatgggacggagcgggtgcggttcctggacagatacttctataaccaggaggagtccgtgcgcttcgacagcgacgtgggggagttccgggcggtgacggagctggggcggcctgacgctgagtactggaacagccagaaggacatcctggagcaggcgcgggccgcggtggacacctactgcagacacaactacggggttgtggagagcttcacagtgcagcggcgagtccaacctaaggtgactgtatatccttcaaagacccagcccctgcagcaccacaacctcctggtctgctctgtgagtggtttctatccaggcagcattgaagtcaggtggttcctgaacggccaggaagagaaggctgggatggtgtccacaggcctgatccagaatggagactggaccttccagaccctggtgatgctggaaacagttcctcgaagtggagaggtttacacctgccaagtggagcacccaagcgtgacaagccctctcacagtggaatggagagcacggtctgaatctgcacagagcaagatgctgagtggagtcgggggctttgtgctgggcctgctcttccttggggccgggctgttcatctacttcaggaatcagaaaggacactctggacttcagccaacaggattcctgagctgaaatgcagatgaccacattcaaggaagaactttctgccccggctttgcaggatgaaaagctttcctgcttggcagttattcttccacaagagagggctttctcaggacctggttgctactggttcggcaactgcagaaaatgtcctcccttgtggcttcctcagctcctgcccttggcctgaagtcccagcattgatggcagcgcctcatcttcaacttttgtgctcccctttgcctaaaccgtatggcctcccgtgcatctgtattcaccctgtatgacaaacacattacattattaaatgtttctcaaagatggagttaaatatcatctggtccatttggctccaaagacagaaaatgaaaagaaaaagggaagattattttccaatagaataatgattttcatgtatatgtcatgagtgtgcgagggaatgcgtatgttaaatagctggatttagannnnnnnnnnnnnnnnnnnnnnnnnnnnnnnnnnnnnnnnnnnnnnnnnnnnnnnnnnnnnnnnnnnnnnnnnnnnnnnnnnagtaatcctaacatttaanaaggcaatgcataanaactgagaacagactataacaactg

SEQ ID NO: 113905 - DNA, 397 bp, Homo sapiens
cttggcagtggagaaaccaggcatctgcaggcagaagcccagccatagaatagcaagtcacacaggcctgtattgccccggcaatgccaacacgtgtaagtggcctgcgggactccctgcactcagcaccagtgatgaaatctgtcagcagagatgtaaagaatcatgtgatctggccgggggcggtggcttatgcttgtaatcccagggcttcaggaggctgaggcaggaggattgcttgaggctaggagtttgaaaccagcgtgggcaacacagtgagatcccatctctgccacttcccgtctctccccgacgtctcgtcaggatgttagcaaagccagtacccgttacgggtggcagtctcaccaggagcacgctgttgagcaggggactcctg

SEQ ID NO: 113906 - DNA, 980 bp, Homo sapiens
  misc_feature (1)...(980): n = a,t,c or g
tttcatcacagggaatatattcgacattagggttgggaggacctcttggcgcaggagctgaagttctgaaatcatccatcactttctccagtttgaaaataaaatagcctttaaattgggaccactgaatctgtttctccagtcttggctacatgacaaaggaactgatccaggacaggacagactttcttttttgcctcttctcaaaatcttccagcgcctcctggagcctgtcgacgtccatggcttcccagagtccctcacagcctccgtctccctccgcgggtctcttggggaccggaacgcctccccccaccccccgacatcctcccactccctcgcacaccctccagcacgcaggccaagtggggtgggggggaacgaagggagccaggggaagcgtgtgagagagtgagaccgacagagtgagcacctccccaagccgctaccaccagccctccaacatggcgcctggcacatcaccctaaaaagtcatttcttggagaagcgatggatgacagagattaatctgagagttactattaatggagaaacttagaacttaccatttttcctgtgaggtttcggtgctgatacttctattctgtgagttctggcaattgtgtccgttcacccagcctggtgatgcagcaggtgtcacagaaggaccctgtcccagctggtcctgctccactgctaggatggtgtggcctctgatctgtgaccgtgtcttgaggggagaccaggcccttgatcacaagcgtatccatggtgaggttccgtggatggaagctcatggatgttccttcctgatgttcatctgccaccatgctattgaatgcatcttggttataactggcttctaaatattgaatagaaataaagcgtttttacagtnnnnnnnnnnnnnnnnngggggggccgttttagaggatccaattttaccaccgcggggtggcggcgttttactttttttttgc

SEQ ID NO: 113907 - DNA, 413 bp, Homo sapiens
tcctttctccatgtctcagacagaggaggttcaagtgcttccttctagacacgaactcttgctgaaacttggctcttccttcaaatgacgtccagcccggggatgacagcagggagggtcggtgacagacacaacccaatgagcatgcggcctgtgtgccagaacctaccgggccctgcggtgctgccggagctccagccttgcaggggcagccgggggatcagggccacagagcaacacgggtaccatgtcacgtgccagaaaccacgatatcagaactgtgtgcacgtgtgtgtccaatctctggggaggtgagacagagagaaaccagtgccagaccgctccggcccctcccgcaagctgccagcctcctcgaacttgtcaaatacccaccgttccactctttaagattc

SEQ ID NO: 113908 - DNA, 1010 bp, Homo sapiens
cggacgcgtgggcggacgcgtgggcgtagctgtcggagcggttagttcgatttcgagctcgaggtttcccccgccgccaggctgacttctcatcgcttgtttttctttttgcatttttcctcccaccgccgttgccgccctccccgtcctggccgtccgccctccgccctctgcagggacatctctacaccgttcccatccgggaacagggcaacatctacaagcccaacaacaaggccatggcagacgagctgagcgagaagcaagtgtacgacgcgcacaccaaggagatcgacctggtcaaccgcgaccctaaacacctcaacgatgacgtggtcaagattgactttgaagatgtgattgcagaaccagaagggacacacagttttgacggcatttggaaggccagcttcaccaccttcactgtgacgaaatactggttttaccgcttgctgtctgccctctttggcatcccgatggcactcatctggggcatttacttcgccattctctctttcctgcacatctgggcagttgtaccatgcattaagagcttcctgattgagattcagtgcatcagccgtgtctattccatctacgtccacaccgtctgtgacccactctttgaagctgttgggaaaatattcagcaatgtccgcatcaacttgcagaaagaaatataaatgacatttcaaggatagaagtatacctgattttttttccttttaattttcctggtgccaatttcaagttccaagttgctaatacagcaacaatttatgaattgaattatcttggttgaaaataaaaagatcactttctcagttttcataagtattatgtctcttctgagctatttcatctatttttggcagtctgaatttttaaaacccatttaaatttttttccttacctttttatttgcatgtggatcaaccatcgctttattggctgagatatgaacatattgttgaaaggtaatttgagagaaatatgaagaactgaggagg

SEQ ID NO: 113909 - DNA, 1175 bp, Homo sapiens
caaagcagcttctctttttgaaacaaatgatgatcactccgtaactgagggcattaatgtgatgaatgaactgatcatcccctgcattcaccttatcattaataatgacatttccaaggatgatctggatgccattgaggtcatgagaaaccattggtgctcttaccttgggcaagatattgcagaaaatctgcagctgtgcctaggggagtttctacccagacttctagatccttctgcagaaatcatcgtcttgaaagagcctccaactattcgacccaattctccctatgacctatgtagccgatttgcagctgtcatggagtcaattcagggagtttcaactgtgacagtgaaataagctcccacatgttcaaggcccattctggttcctggctgcctgcctcttgcacagaagttcgttgtcatagtgctcaccttgggaaaaggattaggtgggcacataagattccgatcagaccccaaccatgctgcatgtgtaaagaaggattgaaaataaaattgcactttttaggtacaaaatcataaaagctgtttcactagaaaaggcagaaagcagtgtattaaggtgttgaattacgccagaagacctgaaatgccttgtacctacaacaatgcttaggcttttctaagcctcttgccacttttaaaattatccttcaggcataaatatttttgacagcagaatagaagaatgattcatgagaacctgaaccagatgaacagctactagttattttatcaaatacagatgacatttaaaaattcttaactacaagagattagaaatataaaccttgcctggctcttgccaggagataacaaaatgggttgctgatgaactgcacccttttacatgtgggtagaatataagctcacatggcagtgagatgttgaaaagtcaaaagagacctgtctctctcctttcttttctatctttaaaccagaaaacctcatactcagtcctcagtgaaagaaagtaaagtattaaggactttagacagaagagcattgtgtaacttgactgaagatcatccattaatagttattaggcatttaggtaaaattttctaatacctaaaaattgtcaaaaacactcaatagggctactgctggcccaaagaccatttaggtccacctcctcttttttgctc

SEQ ID NO: 113910 - DNA, 1061 bp, Homo sapiens
cgggtcgacccacgcgtccggcagaagtcctggtaatctggtccttgttcccgtctggataccagcttccttcagcagcgcaggcggtggtccctgaggcccgtggaaggagtcaaacttgcgggaattttgcagtttatctgcagggctgttgtttccagcaagacccaaagctagaaaaggaggaggaagaaactgacccgatcagtgccagaagtcattgtattcaaagaagaataagcaagaaagaaaagaaggaaggaagagaggtagacagatacaagatgaaatcctgtcaaaaaatggaaggaaaaccagaaaatgagagtgaaccaaagcatgaggaagagccaaagcctgaggaaaagccagaagaggaggagaagctagaggaggaggccaaagcaaaaggaacttttagagaaaggctgattcaatctctccaggagtttaaagaagatatacacaacaggcatttaagcaatgaagatatgtttagagaagtggatgaaatagatgagataaggagagtcagaaacaaacttatagtgatgcgttggaaggttaatcgaaaccatccttacccctatttaatgtagtttaccttgatttttatctgatattaacaataccatatagcttgctttttattagcatttcctgatattcctttgtccatatttctacttataacctgttgctattaatggttttagatgtatctcttgttatctgcatctcattgtttattgtattttgaaccaatctacaagtctctgtcttttaataaaagaactttacacatttgtaaaaaagaggttcttggtaagatataaaatggaaaaaggctaagtaatatgtgaatatcatatttttgaaaggtaaaaagtacatttgtatattacatatatggacataacttgtgaaggatgaaagaaagtacagcctctcggtggtgggattatgaatgatttttctccttttgcttgtttgtattttctatattcctaaaattaacacacattattattgctagaataataaaagttttataaaaaaaa

SEQ ID NO: 113911 - DNA, 1065 bp, Homo sapiens
  misc_feature (1)...(1065): n = a,t,c or g
attacgccaagcttggcacgagggaaaagcagcagcacagagtaggtgaacacaggcctgcaagtgcgaccacctcagacccagtacgtgtgcccacagtggacacactcacacctccaacacacccacgcgcaggcatgtgtacacgcatgtacacacgcatgcatgcacagccagatggccactcagcacagatgtggcagagggaatggtctgatcctgctgaaagccattaaggagaaacgaatttcccagtgcccgggctgcaagagagccttataggggccctgtttcctgggcatgcgcttcctctgccagccaacccccacttgcccaagtcactggtgcaataacttttctgccttcctcagagcagagaaattgggaattgtgttaggtgggtgtgggcagctctgctgagccaagcagacacggatgtcccctcttctgggaggagggtagtgctcccaggcctcaggagtccagacagagacccccaaagcctgactgccaacagaaaccctctcctagtgaggggcaggtgggtgtgccccaggtccccacacccacagggaggcttcacacactgcccagtaccggggatgccaggaggcaggcccctctgctgctgccactgctgccaacactgcccagcttgtgaggccaggaggagcccctgtcccactcggtgctgctgctcttctgacccctgctgtgaggaatgggattcttggtcgaaaaaattggttttccttttttgtataaatgaaaagaatccaggagaagctgccaccctcccctcccagcgtgatgcgctaccttgcttcggcgtcttgtcgccctttccgcctttggtccagggacagcccagcagatcctcctggttctgacctggggggtgtttgcatcacccccttttacttgtattaaaaaaaaatgatgggttgaaaatgtactgaggattaaaaatgtacttttttataaataaagtgtttaaaacnnnnnnnnnnnnnnggggcgcccgttttaaagaacccttggggggcccaaagtttacgcgtgctc

SEQ ID NO: 113912 - DNA, 478 bp, Homo sapiens
cggcaaatgtatttccccatagtataccaaattaaataagagaaattatttgattcatttgatcagacacaggaaaaccattgatataaatgcacatccattcacaaaatgttttaaaaaccttaacaaactacataaagaaacttccttaatctaataaaatgtatctaccaaaaatgcagagtaaacagcatcctagttaataattagacatttaaagtcagtaacaataatgcgttctattattacgtctactcaatattattctagaggttctaaccatggcagtgagacaagaataggcagtaaattagaaacctatattcaggggccaggcgccttggttcacgcctataatcccaacacttcgggaggcctaagtggaagcatcgcctggagccaggtgtttgagagcagcccagacaacatagtgagacctcattgctacaaaaaagaaattgttttttaattattcagg

SEQ ID NO: 113913 - DNA, 620 bp, Homo sapiens
cagcacaatgcttggcacatgtagacgtttaataaatacttgcattcatgaatgaatcctctatgtggcagatttttaaacaccgcaggaaagacagctcagactcctcccccgacccagcagaaagtttacctttcagggtagctacagcctctcccacttgacgcaggaggaaagccccgtcttccacgtctttcagagtaaccaatcggctggctgccgtggagtccttcttcaagtcttcaacaaagtcttccaactcgctgcgggagcaaggactccagcacatagagctgaacacgaggcctctcagaggaagaggaggggccgagtgcccgtctcagcctctgattttgtgtagagccccagctcctcccccctgcctttcgtgtggtggtggtggaggggggtcgctcatcttttaacagtggctgggaacattttgcagtggtgtgaggcaggtacaaggagggttttccagggaatgttctacattggccaaagggacgattgtgcctggctaacagaggaccgagtctttttattcagtggtgctgatgccaacagagggacagaaggagggataggtgggagggtggggtaggagagagagggagaaa

SEQ ID NO: 113914 - DNA, 1170 bp, Homo sapiens
  misc_feature (1)...(1170): n = a,t,c or g
tgcggctcgtggggcagctcggcagcatggcgtccgtgacgctgagcgaggcggagaaggtgtacatcgtgcatggcgtccaggaagacctccgtgtggatggccgtggctgtgaggactaccgatgtgtcgaagtggaaactgatgtggtgtccaacactagtgggtccgccagggtcaagctgggtcacacagacatcttggtgggagtgaaagcagaaatggggacgccgaagctggagaaaccaaatgaaggctacttggagttctttgttgactgttcagccagtgctacccctgaatttgaaggtagaggaggtgatgaccttggcaccgagatcgctaacaccctctatcggatatttaacaataaaagcagtgtcgacttaaagaccctctgcattagtcctcgggagcactgctgggttctctatgtggatgtgctgcttctggaatgtggtggaaatttgtttgatgccatttccattgctgtaaaggctgctctcttcaatacaaggataccaagggttcgagttttggaggatgaagaggggtcgaaggacattgaattgtcagatgacccttatgactgcatacgactaagtgtggagaatgtcccctgcattgtcactctgtgcaagattggctatcggcatgtggtggatgctactcttcaggaggaggcctgctcgctggccagcttgctggtgtcggtgaccagcaagggagttgtgacgtgcatgaggaaagtggggaagggcagcctggacccagagagcatcttcgagatgatggagactggcaagcgtgtgggcaaggtactgcatgcctccttgcagagtgttctgcacaaggaagaaagcctggggcccaagagacagaaagttggattcctgggatgatttgcacatcaactgctcaactgtggattgttttttacttttccttttaaaccggggaactgaaactcctaaatcttaaaacaccctggggaaggagctgattcacgaaggagagcgtttcaaccgtggcatttgctctctgcattccagctagcaaatggggtaaggcgttaggaatctatcaccaaatggnaagaacataatgtgagctgaagccctttggactgcttncagaggtcctggtggtggcgttcctccagcnaggcca

SEQ ID NO: 113915 - DNA, 1772 bp, Homo sapiens
tttacagccagttggtcagatgcataggtgatgcttggccttgcacctggggtctgacatgcggatggttctgtgtgactgagcccttaacctgtggagtctggtgctcactctgcttagggcttctcttgcctttttaatgtccttctaggcggcctttccttcctcttttctgctcagaaaacttttcttccacttcccttcttctaagccatcccttatatctactcctttccagccgaccaagagcagaaccacggctggctccactgccagcatgctgtcccacactgtctcctcaggatgtattcagatgtccagccctctccctagtctaggagccccccctttgaggaaagggatgctggcctagtcaactctttcccagcaccaggtacagcatctggcacgttccatctttttcatggactctccccaggcggcctgaccttccctcctctgaaccggtgcatttcttgtctgcatcatgtttgccctaatcagatatcaccttatttcctcttttaaaaaatgctttgtttctctggcaggcttcatcggaatcacaattttcattcatttagtaactgttcgttgtttattctatgtatttttgcaggaggcctgaggtgggctgtgttctcctcctatggcagggcttcactctcctcctcctccgttggggcttcgctgtccccagggtccctgttgagagatcttgtcctcattagatgacttcttgtgcagcttccatgcatgattatttattcttgtggcactgagaggtttgtacatatctttaaaccagagcggctgtccaaatgaggaaagtccatcctagaagatagaaagggaaatattaattttgcatgtcctctgctttccctggccacagcaatgaatcctccaatgtacccgactctcccttcgcgaagagcaatccccctccgtggcaagaaatctgaaaatgcccctggggagacacatgcacaagacagtgagtgatgcagccgtttcccacgtatctcacaatgtacttctctggtcttattaggactaaatgagtatctcagtccataatcacagggagaaccaccaccacagaccacatacccggggtcttgaaaataattccatgcatgtgggactttcagaagctctccatgtctgtccagaagggccccacaatatactggggggactttgtatgtggctcagcatggagcaggggcaggatgttcattcccactcatccccttggccaagtgcccttgtgcagtgaacaaactgcacaaccatgctgggcagaagcattttatatcagtccccttcggacttagtctcacaggcatcatttgatggggggtgggagatgaaagtggttcctccgttttcctagatactttattcctataagttggatcacctcaagcaaatgccgtgagtgcagctagcccaagttctctatctcacagtcttcatatggctggctgtcgctgatgagtgagtgagctacgaaatcagcttaaagcacaacatgttatttttgaatttgaataaaataggaaaaggcagagtgcattgtgtgcccatggggtaagtaagaccctctccctttctccttttcagttttcctgtcataaaagggcaaactgctatttaaggtttccgtagttaaaattcttttttgttgttttttttttatttgagacagtttggctcactccagcctggcaacaagagggaaatccgtctcaaaagagaaaaaaaaa

SEQ ID NO: 113916 - DNA, 617 bp, Homo sapiens
ctcgtacagtgcggtggaattcggccgtgtgtttgagattcctagagacattagtaaaaccctccaaaagagtggggaccttacaccagcctgccggttcaagctccatactggacctccacctccccaacccccaccccctccccaccagaaaaggaccctccatccccttcaggtcatagagtgaggaagagggaagcttcaacaggcccagatggccctggtaatgggcacggtgacatttgggcagagaaccccagggccctgcatctgcagacctgggacaggcagagaatgtccaatgggggtgctagtggcattgcctggccatgactctgtccagctgtggcatcatgtcccatggccaaagtgtccaagcaagcctgcttctgccattgacctagggaggcctcttgacacctgctcattttccaagcctgttcctcctgcatcctcaagattcggagtgccctccaaaataagatctttttctgtagttgttactatgggttaagaaccctcctgtctgatacatacaactgattacaaacttttaatttttgccaatctgataagcaaaaaaaaagaaagtagttcatggatttagtttacatttc

SEQ ID NO: 113917 - DNA, 879 bp, Homo sapiens
ggcacgaccagcctctgtcggaggcgaattctcagagtgagggttccctgtcacttgagagaaggttccctgtgacgtgaccttgggggacgtcattgccctttctgtccccacccaccccctcggcagttctgttggccaggactttggcctagacaaaggatgggggttgtggctgtggagcggaagtgggtctcaaccactataaagcctctctgtgcccgtccggagctggtgaggacagcctgccagagtctggtctctggacactatgggcacacgactcctcccagctctgtttcttgtcctcctggtattgggatttgaggtccaggggacccaacagccccagcaagatgagatgcctagcccgaccttcctcacccaggtgaaggaatctctctccagttactgggagtcagcaaagacagccgcccagaacctgtacgagaagacatacctgcccgctgtagatgagaaactcagggacttgtacagcaaaagcacagcagccatgagcacttacacaggcatttttactgaccaagttctttctgtgctgaagggagaggagtaacagccagaccccccatcagtggacaaggggagagtcccctactcccctgatcccccaggttcagactgagctcccccttcccagtagctcttgcatcctcctcccaactctagcctgaattcttttcaataaaaaatacaattcaagttgcttctcatggatggcactgcttttctgaggactcaaggtgccaagatggaggggctgactcagtccagccaacatttaatgagcacctactttatgtatggagctctaacccatgggtccatgggaataaagcagtgaatagtaacaataaa

SEQ ID NO: 113918 - DNA, 1189 bp, Homo sapiens
  misc_feature (1)...(1189): n = a,t,c or g
ggcacgaggaacgaaagatggcggcgcccgtaaggcggacgctgttaggggtggcggggggttggcggcggttcgagaggctctgggccggcagtctaagctctcgcagcctggctcttgcagccgcaccctcaagcaacggatccccatggcgcttgttgggcgcgttgtgcctgcagcggccacctgtagtctccaagccgttgaccccattgcaggaagagatggcgtctctactgcagcagattgagatagagagaagcctgtattcagaccacgagcttcgtgctctggatgaaaaccagcgactggcaaagaagaaagctgaccttcatgatgaagaagatgaacaggatatattgctggcgcaagatttggaagatatgtgggagcagaaatttctacagttcaaacttggagctcgcataacagaagctgatgaaaagaatgaccgaacatccctgaacaggaagctagacaggaaccttgtcctgttagtcagagagaagtttggagaccaggatgtttggatactgccccaggcagagtggcagcctggggagacccttcgaggaacagctgaacgaaccctggccacactctcagaaaacaacatggaagccaagttcctaggaaatgcaccctgtgggcactacacattcaagttcccccaggcaatgcggacagagagtaacctcggagccaaggtgttcttcttcaaagcactgctattaactggagacttttcccaggctgggaataagggccatcatgtgtgggtcactaaggatgagctgggtgactatttgaaaccaaaatacctggcccaagttaggaggtttgtttcagacctctgatgggccgagctgcctgtggacggtgctcagacaagtctgggattagagcctcaaggacattgtgtgattgcctcacatttgcaggtaatatcaagcagcaaactaaattctgagaaataaacgagtctattactgnnnnnnnnnnnnnnngggggggccgttttaaaggatccaattttacttccgcgggcttgcaaggtaatactttttttttggggcccccaaaattcaattccccgggcgggggtttaacaccgtggggaggggaaaaacctgggggttccccaatttaatggctttgaagaaaatccccttttcgccagggggcaaaa

SEQ ID NO: 113919 - DNA, 1475 bp, Homo sapiens
ggcacgagaaaagagggaggggaatccgaagtataaagtgatcggtacactatcttagcatttcagtgccattttgatgaaaggatcaaaggccctgtttatactgatataatcccattgcctctatcccctcactaaccacttttagcaacttgtcctaccaacacttcctgagactcttttcagccagatggcaagcacattcctagctgctctcagctagaaggatcacccatcagagacgttttcttcatgtttctgacactcccacctgttggagaagaaaaaaacacaggtcatccaagccaatgaacttagattctcatgtggaatgatttatgtattttaaacaaagccttcatcttatttagaaatcacttgcatgaggcactcttttgaaaatgttctcctcatctggaaaataatttggctgtataatcgtggtattcaggaagttagggcaggtgtttaggtggaagagcagaagggagtattccaatgaggctgaagagtgaggggaattgaccccctgggagaagggaaggcatgtcagggccctccttttaacaggaaaggattgaagaaggcagtgaccctgagagaagaggagaagccaggcctgggcgccaaacacttttgggcctgttgctttgaagggtagaaagagtggccataatatttctcctgacccagcagatttgaaaagattcctccagcagacagtggaaagccccttgcttcctcagccattcagtctgatttctgaaataactatgctatttcctggttgtggtgaagtggcagggcccgagggtttgatcagcttttcatgggctatggccattactggggttggggtgcaggtgggagtttgttaacacaagagcttgttattctcggagcttcaggccctggtttggaaatgttaactggccaaccagccacgggagttggaattccctaactattgtcagagagagtgcaaagggatttgtctgattgaacaatctgcatttgaagatgacctggacctgcctgcatcccgcatggcagaggtggacatttggaaggtgcgtttgctcatgtttcctcttctctccccagaacctgctaaggctgcctcagacctgactgcctggttcagcctcttcgctgacctcgacccactctcaaatcctgatgctgttgggaaaaccgataaagaacacgaattgctcaatgcatgaatctgtacccttcgggagggcactcacatgccgcccccagcagctcccctgggggctagcagaagtataaagtgatcagtatgctgttttaataattatgtgccattttaataaaatgaaagggtcaacggccctgtttatattggtataattatttactcttatttggtataaagggttttcgtgtatctctatgtggatctaaataatacaggattgtctagaagcggtttccaggccaccgctctc

SEQ ID NO: 113920 - DNA, 681 bp, Homo sapiens
  misc_feature (1)...(681): n = a,t,c or g
aaagcatccaagtatatatgaatgaataaagtatgtaagtatcaccagaaaaaggaaagaaaaaatgtactccttggggcaagcccagaagctgccctggcctctccagaccgtgtttacagtgtttgcatgtagaatgtagcccttcctgaaaagaacacttgtttctaaatacctcggggctgctggagccgctgtgggttagggatggactgaggcctcgaggagtgagggtgcacccggggcccagcctcaggctgccctagggatctctcagtaggaagaggaagttgcgtgtttacccaatcctgtttctccaatgcaacgtccacccactttaccaccaaaaactccagggcctgacggcagcccggtcccccagcactcaccagcagcccagtgttctccaccaagccacagtgtgcatgcctggtatcctccggattcccttccttctgcccgctgagtcactgggcagagaatgatgacatgtgtaggtggtgtggttgggggtggaaaggggaaggggttnntctcttacactctgagggataatctttgcatttccctcgtcatggtttccaagacccaactgcctatgcgatttaggactgacttccagagacgacattactgactaccctgttgggggaaccgggggatttttcaccgccgtacaca

SEQ ID NO: 113921 - DNA, 754 bp, Homo sapiens
aactgttgcattcctcctagcatctagcagagtgccttacacaaagtagggactcatatatctatgagtgcccgcataaatgaagaaacgaagcgtacttacaatgcaaatattaacaggataagaaatatttagccaagtaccaccccttctgacacagcagaatacttacaagggatctgggccattccagatcaccatctttctttctgaaatgatatcccaatcactagggctctgttcagacagtgaccttgtaaagcccgaggagcaccctagagaagggaacacaggaggagcaggaaagggaacacgggaggaccaacgcccagatctccaccgtgggtcgcccagaatgaaccccatatttagtcatttggggttgccagaaagaaggggatgcaagccccattccccaggacggccttccacccggcggggcaattgaaggggaaatgacttgacgtaggggggctccagcgcagggggccgaggaggattgcgacaccagggagaggggccccgggcacaggcagcaaggaaagaggtcagcggagtctgagagagaaacgatgaagaggggagacgggcgccgggaggggggccgccgcatacagttcccccgacactcgcaccctggaaggcaccagcccctcacgaccaacctgccagacgctgtgaggaatccccgggtcagaatgacaagccaacgcgacagtacccaccgagccaaagctcctggagagcgacgaaa

SEQ ID NO: 113922 - DNA, 976 bp, Homo sapiens
  misc_feature (1)...(976): n = a,t,c or g
cgggtcgccgtgtttgatgtcagttttccctgccagaatctacaatctccttgatcaccattatatcccaacgtagagctcagtacctggtacaaagcacatttgatcaatacttgctgaataaagaaataaaaatgaagagnnnnnnnnnnnnnnnnnnnnnnnnnnnnnnnnnnnnnnnnnnnnnnnnnnnnnnnnnnnnncgactggaaaggagatgagggtacttgtgaagccatattatatgacacgctctgtgctaggacttttatataccttgtctcatctcttcatctcatataatccttacaaggatctcaaaagtggggaaatccccatataactgaagacgaaggcagttcagaagttcactgatttgccctaaggttcctcaatttgcaaacgtcaggccaatgatccaaccccaggtatgtttggcagtgaaggaccagttgagtcacagctgcaagtaaccaccctgcagtggtccctatcttggccgttagcttacattgacatttaacactcaaatttactcagtaacaccagctatcatgttttccactaaaactccacagcattctggcaacttttctattttagagcaataaagtaaattgttagcatccctttgacatataaatatttctacaaatagtaattctctagccattcatttggagtatttaaaactcaacattcatagcacattttatgtgacaaagaacttatgttcagaacacaaaaataagtcgtacgtcttcattaaaaacaggtgaagaatttgaacaaacatttgcaaactaaaatacaaatgaaatacactcaacatcattaaacaagaaaataaaattatgagataatcactaataatcactacatatgcaccacagtgattaaaatttttttaagttaagccacgtgacccaacaaggtgcattcactcaagagaaacgcaaatatatgtcctcgtgcc

SEQ ID NO: 113923 - DNA, 1447 bp, Homo sapiens
taggggcgggccggctggcgtcccctttccggccggtccccatggaggcgctggggaagctgaagcagttcgatgcctaccccaagactttggaggacttccgggtcaagacctgcgggggcgccaccgtgaccattgtcagtggccttctcatgctgctactgttcctgtccgagctgcagtattacctcaccacggaggtgcatcctgagctctacgtggacaagtcgcggggagataaactgaagatcaacatcgatgtactttttccgcacatgccttgtgcctatctgagtattgatgccatggatgtggccggagaacagcagctggatgtggaacacaacctgttcaagcaacgactagataaagatggcatccccgtgagctcagaggctgagcggcatgagcttgggaaagtcgaggtgacggtgtttgaccctgactccctggaccctgatcgctgtgagagctgctatggtgctgaggcagaagatatcaagtgctgtaacacctgtgaagatgtgcgggaggcatatcgccgtagaggctgggccttcaagaacccagatactattgagcagtgccggcgagagggcttcagccagaagatgcaggagcagaagaatgaaggctgccaggtgtatggcttcttggaagtcaataaggtggccggaaacttccactttgcccctgggaagagcttccagcagtcccatgtgcacgtccatgacttgcagagctttggccttgacaacatcaacatgacccactacatccagcacctgtcatttggggaggactatccaggcattgtgaaccccctggaccacaccaatgtcactgcgccccaagcctccatgatgttccagtactttgtgaaggtggtgcccactgtgtacatgaaggtggacggagaggtactgaggacaaatcagttctctgtgaccagacatgagaaggttgccaatgggctgttgggcgaccaaggccttcccggagtcttcgtcctctatgagctctcgcccatgatggtgaagctgacggagaagcacaggtccttcacccacttcctgacaggtgtgtgcgccatcattgggggcatgttcacagtggctggactcatcgattcgctcatctaccactcagcacgagccatccagaagaaaattgatctagggaagacaacgtagtcaccctcggtgcttcctctgtctcctctttctccctggcctgtggttgtcccccagcctctgccaccctccacctcctcggtcagccccagccccaggttgataaatctattgattgattgtgatagtctgaaacacggatttttaatctccaaaaaaaaacaaaaatttatcagtggcaaaaaggagtgtgtttgtgctgggtgccgggttgacttagcagaatatgttttactgtagttaccctggttccg

SEQ ID NO: 113924 - DNA, 387 bp, Homo sapiens
  misc_feature (1)...(387): n = a,t,c or g
gtctcggccacggcgtggagagcggcaagatcaccccttctgtgtcattctctgaggaaaacaagttcttctcaaggaggaaagtctgaacttgtcaaacagtcccttaannnnnnnnnnnnnnnnnnnnnnnnnnttgatgcaccagaggattcccatttatagaaagaaccactggaaaaatttccagatgatgttaatccagtgaccaaagaaaaaggtggacccaggggcccagaacctacccgatatggagattgggaacgaaaaggacgctgtattgatttttaagtcgcatattctttaacttcaatattgttttctgaatatgtacatctgaattaacttatttctgacnnnnnnnnnnnnnnnnnnnnnntatgtcgg

SEQ ID NO: 113925 - DNA, 536 bp, Homo sapiens
  misc_feature (1)...(536): n = a,t,c or g
agcttcaatacctgataggcgaacttcaattgtaagaccaggtaaaatgttaccagtaaatagctctcagctcctgagccagaattcattgcttctgtaggggctggtaacttggtccagttctgctcagctgctcctttgttgcagactgagcccatgaccagaagcctcagctgctccagcagatgggtggctagaattttttgagttgtttttaacctggtgctctgagactggggtgaacctagggagctgaagcagcaatgccacacccccaacacatcatacacacacacacacacacacacacacacacacaccagggcacacgcattaacatgggactttacaacatggccatcatgttgggctgatggggcacgtttattaagggatggggctnggcagggcncggttgtattcacggccttattaaaccccaggcattttgggcagggcccagggcagggcagaggtttgcagttgaggttgnggttggcaccctttncacttccancttggggcaacaaggttag

SEQ ID NO: 113926 - DNA, 467 bp, Homo sapiens
gtcagtgcggtggaattccgcatacctaccggccccgaccccgaaccgcgtggcgtccgcccgagccctggcgctgctgggtctcctgctgctgccgctgctcgcagagcccaggaaactctgcccgcagcttatgacggtcattaaccagtttctgaccaaggacaaggacacctacatggacactgtcaacagataccacctcacggagccggaaagaaacacatcctctaaactcaaggactgcgtgaccgacacaatgacccccgaggagacagaggccgtcgtgcagcaactggaagaaatcaacaaccagtgtgccgacacgatactgaagtaacaccatccataggcacctcgggttcctgtccaggctgcctgtcccaaccatgagaatctgggcccagggccccaccctccctagctcccgccctgctgctgcctctactctctctcctgctgtgctg

SEQ ID NO: 113927 - DNA, 1184 bp, Homo sapiens
gcattcagcgcctgcctttatctgttctgccccctccccacccatttcagcaccaccatgacaccgggcacccagtctcctttcttcctgctgctgctcctcacagtgcttacagttgttacaggttctggtcatgcaagctctaccccaggtggagaaaaggagacttcggctacccagagaagttcagtgcccagctctactgagaagaatgctttgtctactggggtctctttctttttcctgtcttttcacatttcaaacctccagtttaattcctctctggaagatcccagcaccgactactaccaagagctgcagagagacatttctgaaatgtttttgcagatttataaacaagggggttttctgggcctctccaatattaagttcaggccaggatctgtggtggtacaattgactctggccttccgagaaggtaccatcaatgtccacgacgtggagacacagttcaatcagtataaaacggaagcagcctctcgatataacctgacgatctcagacgtcagcgtgagtgatgtgccatttcctttctctgcccagtctggggctggggtgccaggctggggcatcgcgctgctggtgctggtctgtgttctggttgcgctggccattgtctatctcattgccttggctgtctgtcagtgccgccgaaagaactacgggcagctggacatctttccagcccgggatacctaccatcctatgagcgagtaccccacctaccacacccatgggcgctatgtgccccctagcagtaccgatcgtagcccctatgagaaggtttctgcaggtaatggtggcagcagcctctcttacacaaacccagcagtggcagccacttctgccaacttgtaggggcacgtcgcccgctgagctgagtggccagccagtgccattccactccactcaggttcttcagggccagagcccctgcaccctgtttgggctggtgagctgggagttcaggtgggctgctcacagcctccttcagaggccccaccaatttctcggacacttctcagtgtgtggaagctcatgtgggcccctgagggctcatgcctgggaagtgttgtggtgggggctcccaggaggactggcccagagagccctgagatagcggggatcctgaactggactgaataaaacgtggtctccccctg

SEQ ID NO: 113928 - DNA, 611 bp, Homo sapiens
  misc_feature (1)...(611): n = a,t,c or g
tgttgggattttatatcaaagttaacctggcttataaaaggatttaagaagtattgccttcctctaattttctaagagtctatgtaaaattgtatttttttcttccttctttgaatggttgataaaatttactgctattatgggcctagagttttttttgttagaaaattttttattacaaattcaatctctgtagtagatatggagttccttaagattttctatttcttcttgtgtcagttttggtaaactgtgtcttttaaagtatttgtcaatttcatcaagttgcggcttgtcaatgaagttttccatacccactttacttttaatatatgtaggggtctaaactgatgccctcttttcatttgtgatgtggggataatttatggttttcacctttttttcttggggggatataggtttggggatttgccatcccttgcccccaaatcctccatggttggaattgggggggagggggtttgggtggggggacccattgggatcacagggggcccaatttccccccttgctgttcttgtgataggtgagttcccatgaganctgatgggtttaaaccatgtgtggccattcccccctcaattgcactc

SEQ ID NO: 113929 - DNA, 554 bp, Homo sapiens
gggtcagctctctgctgcaggtacacgggcagcaggctgtttgtgcaggtgtggcagaagttaccagcatggcacgcatcttgcatagtctgcttgacctccaccttcgcctaaaggaggagaaggcccctggcccaggttctggcccatctttgataccttcataagggattctattagtcgcctctccaactaccctgagccaccaccctcagccttggtgtttgatctacatgtaagccctgaagatggaacactggtccccttcactggccaatacctgagcagccacatcaaaggaactttgggcacctttcacccttctatccagactgaacggctcttgtatgtggtggacctgcttctgtcagggggacagccagtgttgctggctggagaggcagcaacagggaagtcagcctttgtggaggtgctggtagagccacatcacccttacatatacagccccatccaccctgccttcagttcctcccacctccgtctcctgctgagcagaggaatccagggccaaacacaagccagcccacagcctg

SEQ ID NO: 113930 - DNA, 383 bp, Homo sapiens
ccagggaaatgattcagttcctgcatcctgggacaaacatattcaatgtggaatcagtttcgcagccaataaaacctcttccaagacagcatgagaggctagaagaatgtggttaagaatgagtacatgcctgtctgagtgtgcgtgtgcatgtgtgtctgtgtgcgtacatgcgtgtctgtgtgagtacatgcatgcatgtatgtgtatgtgtctcatgggaacaggtcaataggttgagcattctgaggaagacaccatgggagactttactctcagtctgtcatgagccgtgcagtgtgctctgtgttccatctcaaggaatccaggtgaccgaagcatgtccgtgctggtctaaggccctgccaattatcctcgtcacg

SEQ ID NO: 113931 - DNA, 904 bp, Homo sapiens
tttttttttgcatatataaataacatttattaacttaggctgtacaatatattgatttagtcaaataaaaaataccgtacacaaaaattgaagtaaaatctgtaagatgccattcagactgaattttatattctgaataagacaagggactgccattcacttaaagcaaaatggctccaattccgtttatctatctatctatctatctatctatctatctatctatctatctatctatctatccatctatctatctatctatctataagtctcgctctgtcacccaggctggagtatctatctatttatttatgagataagtctcgctctgtcacccaggctggagtgcggtggtgcgatctcagaaaaagagaaaccaaaaaaccaaaatcaaacaaacaagcaaaaaaaccaataaatcacatagccagtaggtggtattaaaacaataatgcagccatttgcctgagattgtctttgtagctaaagctcttataagcaaactggaacctaacttggaaacatttcttttgtcgggggaaaagaacctccgaaagacagaaataatccgcagccaatcacaaacagccagccagctgacttgttatacaactagggacttcccatcagaccatgcccaggtttaagacaaatacctagctgtagcgaccaggctggtctcgcactcatgggctcatgcaattcctctcgcctcagccttctcagagtggctgggattacaggaataagtcaatgtggccaggccaggcatgatgcttaattggcacactaacggtgttaacttccatgacggattgacttggaaatctgatctattcaattgactcgtggcggattcctggcctcggaggcgaataccctttggggagtcgtataaagtcgg

SEQ ID NO: 113932 - DNA, 613 bp, Homo sapiens
tgtgcactccagcctcctctcactgccctgggttggcaccaggtgctgagtgggcctcaggccaactgtgggcatgggctcgatgccgctgcttcctcctccacatcaaggcatcagccgtatctcaccccaaaaggcagagaggaaatccagctaagtcccacgccccaagctctgtgctggcttctggaaatggctttggaacccctgggtccctggccatggaagctggtgccccatcaagtagaattactttaatctatcgtgcaaaccccaggagtgtctggaagcttctctgcgtaccagagcaacgctgctcatctcctttacctgcagaaaggacagcaaaggagtccagccctactaaattcaactcaaaaaagccactgctcccctactgcaagccctcaggggcccgagcgccaggtgccaaacccaggccaaccccagggccagagcaaggcccctcaggttcagggggcctgggcagctggggccagacacacagaaactgccagagcttctgcctgccatgctgagcatgtttcctcagctttaaaatggtgacctcaacagtgactggggctaggcaaggtggctctcacctgtaatc

SEQ ID NO: 113933 - DNA, 437 bp, Homo sapiens
  misc_feature (1)...(437): n = a,t,c or g
actatctggaatttggtcgtccctggcaggaatttggcacgagccactttcttgggacagtgaatcaacaatgccgtcttctgtctcgtggggcatcctcctgctggcaggcctgtgctgcctggtccctgtctccctggctgaggatccccagggagatgctgcccataagacagatacatcccactgtgcccctgctctggctaagtttttatatttttggacttttaatacaatagggtttcaccctgttcattgtcgtccttgttttctgagacagagtttttctctgtcgcccaggctgggagtgcagtaacgtgatctagacccacttgcaacctccgtctttcttgggttcaaggcgatttctcctgcctcaagcctcttgagtaagctnggggactacaaagcaactnccaacaaaacggntaaatttt

SEQ ID NO: 113934 - DNA, 1158 bp, Homo sapiens
tttttcttatactagcatgaacatatttattcacatacctttctaaaacacgaatggtagatactacattttggttttcaaacatagcttgttttattataaacaaacatcattctctggaaattaaaagctttgataatttcaaattatttttaacaatcagtcactaacggaatgcaaaaggcaattttattattatacattaaaacgtaaatcacatttaaagcacgaacactaaacaaataggcctccatttgtccacctttaatggccgtttctcttcactggtttccttcccatatacaaaataaattcttctttgtcataacccattagatggatatagtcttcacggtttgggaaagagcactggattaactaacagtgattttgttttaggcataaaatgtgggtaaatacatgtttaggcatctgggaatcttcacatccattctgggtgaaacactgtaactcgtttctgcaagcatagcattgtaggtaatggctttataagtgtctgttgtggcctcatggtaccattcgaattgacttagccttttggtaattaaagttgaagccagccacttgggttgattcacccgtaaagcttccccatgaatgcccatagaattatgatttgaaataggcagaggcacacttttcagaaatagcattacttttgtgtaaaaatgtatggcagaaatgtaaggccaatcagacttcgtagaataaggagaaacatttcacacctccaattacttaccaaacactgctcgggccatattgccagtataaattagccttccatcttctgatttgtcagatggcgtatttaagaatcgaacatatccttcccaataaacagggatctgcgctcgaacccggacgccggagaatggcgcgcggctcccgaaggccccgtactccagccggctaccggccccgaaggccctgctgctggaggacgcccgggagacagaggcccggggacctcggagccgcggcggccgcacacaatgcagtcctccttccgcagagaggcagttcgaccgcccacgggctgcccaacgccagaaacagcatcacgcgggtgacgagcggctgcggacgccccagctgcacgagtccacgactgcgagacacggcttcccaaccgac

SEQ ID NO: 113935 - DNA, 661 bp, Homo sapiens
acatcgatacgactttttttttgtttcttttttttattattttgagaccaatgttcatactcttgttgcccaggccggagtgcaatggtgcgatcttggctcactgcaacctctgcctcccgggtttacggttcgtttaatgtcctggttatcttctccctaccgcttttatctgaacctttcctttcgtctctactaacttgtctctctgcagctcaatctggattatatttccaacagtttgtcctcagtgacgggctttgttctggaagggtatagtggccagctagcatgaacaacgatagaaccctgtggctggttaccgcttccttaagtcacaaagtcatccctttctggcctgttggagcaaaaattgttgccctgggacacttttaaaaacttttcctttgacagctggcatgttaacttctgccagcggagaacaatggagagatttttacttcctgttcctgtgtgtttttcagcaggctcccacagcacccagttcctcaaagccaggttctgacatataagtgagctcagagaccagcagcttccctcagcacctcatgtgagtagttttgtagcagagtgacacctctcatgaaaagcctttcagcacgcttccccagagaagcacatcagcaatcggacgcgtggg

SEQ ID NO: 113936 - DNA, 950 bp, Homo sapiens
ggcaatttgtatgatacctttttcttttagcctatttatatctttgaatcaaaagtttgtctcctgtagatagcatatagttggataatttttagttcttttgattggattgtttaattcattcatttttagtgttactattgatatggctggatttgtgtctgcaattttaatttttgttttctatatgtctcgcgtttttgtggctttgcttcttcttctttgctttcttttgcattaagtattttctagtttaacaacttaatttcttaaattatttttaactatatttttacgtatttccttaatgaatgcttgatggctcacaatctccttctcagtttatcagaatctacttaagtttatactaacttatgtccagggagatagaaacacatttcttctttatagctctaggccctcttcacttgtttttgtgctattattgttatacttactacctctgtatatgttacaagcccaagaatacctattcctacttatttatataaattttatgttttttaaaaagaacctgaagactggaaagtgagggaaaatagggcgtgccaggaaaggaaggaagaggaaggaaaaagtgtgtgaaaagggggctcccacctcctttaagtggataccctgagcttatttcccaggggcctttgtaaattcccagtgacaactctttggaagatgaaatccccctcttccctgcatcttattagaacagtgtatcctggaggacatcccttgcctttcaccaagtgaccctatactggcggcagaacttctcgattttgcggatttcaaaatggctccacgtacgcatagttttcatgacagacttcattgcgatagtcaaatactgttccacttacgtgcagttgcctacagtctgggttttgttcagttgaaattaaataaattttatgcacaaacctttaaaaaaa

SEQ ID NO: 113937 - DNA, 764 bp, Homo sapiens
gagtgaatggctggcctaaggctccctctgccctgggttgaaatagctgattgcctcaccctcccccctcctcaccctgccctgtcagggccaggaattcattctgtcattcacttattcattcactcacatatctactcacttatggatttactgaatcatacattcacttactccttcagtaactccccaagctccttgctttataccagcctctcttctgggctctgaggagtcagaaatagaccagacgtggttcctgctctcaggaggcttctagtctcaggagaggacggtagaagaaccatctgctgcacacagaaggcgaccaagaccccacccctttatgccatcctgacattcttggtaccttgtggggtaggcatggtggggtgtcatggctagcaccaggtaggtgggacacagagaggcaggactgaggtcacccagagtgggactctggtctttcctacaggtgttgggaccctgaggcctcaggtgggcaggcccccattttgcccggcccccaccctggggcacccccattgcagcctggggttttgccaagttgcccaagagagaggagtcacagtgactggactcagacccgagtcctggcagagatgttgacggaggaggaggtggtaccttctgcacctcccctgcctgtgaggcccccgaagacatcaccagggctcagaggagcatctgcgtgcccagatgtggggccggggttccaaacctggcccagagactggaggccc

SEQ ID NO: 113938 - DNA, 2785 bp, Homo sapiens
gctgccctccagacatgctggggccctgcatgctgctgctgctgctgctgctgggcctgaggctacagctctccctgggcatcatcctagttgaggaggagaacccggacttctggaaccgcgaggcagccgaggccctgggtgccgccaagaagctgcagcctgcacagacagccgccaagaacctcatcatcttcctgggcgatggggtgggggtgtctacggtgacagctgccaggatcctaaaagggcagaagaaggacaaactggggcctgagatacccctggccatggaccgcttcccatatgtggctctgtccaagacatacaatgtagacaaacatgtgccagacagtggagccacagccacggcctacctgtgcggggtcaagggcaacttccagaccattggcttgagtgcagccgcccgctttaaccagtgcaacacgacacgcggcaacgaggtcatctccgtgatgaatcgggccaagaaagcagggaagtcagtgggagtggtaaccaccacacgagtgcagcacgcctcgccagccggcacctacgcccacacggtgaaccgcaactggtactcggacgccgacgtgcctgcctcggcccgccaggaggggtgccaggacatcgctacgcagctcatctccaacatggacattgacgtgatcctaggtgggggccgaaagtacatgtttcgcatgggaaccccagaccctgagtacccagatgactacagccaaggtgggaccaggctggacgggaagaatctggtgcaggaatggctggcgaagcaccagggtgcccggtacgtgtggaaccgcactgagctcatgcgggcttccctggacccgtctgtggcccatctcatgggtctctttgagcctggagacatgaaatacgagatccaccgagactccacactggacccctccctgatggagatgacagaggctgccctgcgcctgctgagcaggaacccccgcggcttcttcctcttcgtggagggtggtcgcatcgaccatggtcatcatgaaagcagggcttaccgggcactgactgagacgatcatgttcgacgacgccattgagagggcgggccagctcaccagcgaggaggacacgctgagcctcgtcactgccgaccactcccacgtcttctccttcggaggctgccccctgcgagggggctccatcttcgggctggcccctggcaaggcccgggacaggaaggcctacacggtcctcctatacggaaacggtccaggctatgtgctcaaggacggcgcccggccggatgttaccgagagcgagagcgggagccccgagtatcggcagcagtcagcagtgcccctggacgaagagacccacgcaggcgaggacgtggcggtgttcgcgcgcggcccgcaggcgcacctggttcacggcgtgcaggagcagaccttcatagcgcacgtcatggccttcgccgcctgcctggagccctacaccgcctgcgacctggcgccccccgccggcaccaccgacgccgcgcacccggggcggtccgtggtccccgcgttgcttcctctgctggccgggaccctgctgctgctggagacggccactgctccctgagtgtcccgtccctggggctcctgcttccccatcccggagttctcctgctccccgcctcctgtcgtcctgcctggcctccagcccgagtcgtcatccccggagtccctatacagaggtcctgccatggaaccttcccctccccgtgcgctctggggacctgagcccatgacaccaaacctgccccttggctgctctcggactccctaccccaaccccagggactgcaggttgtgccctgtggctgcctgcaccccaggaaaggagggggctcaggccatccagccaccacctacagcccagtgggttaccagggcaggctcccttcctgggggaaaagaagcacccagaccccgcgccccgctgatctttgctttcagtcctttgaatcacctgtggggactttgaggattcgggatctttcaggacggcttgggagaagggtggttttccttgccaccctgctggccaaggaggttcttggggttggggatcaacagggggattttgacacagccttcggctgcgcccccaataagctaattccacacccctgttacccccccagggggcccttcttgcctcatgggcaaaggcttgccccaaatcttcaacttcttcagacgttccataccccccacatgcccaattttcagcacccaactgagattccgaggagcttcctggggaagcccctgggtggcagggacactggttcgagaagccaaaggtcccttcccccaagacatcttggacacttgggcatagatttctccaagaaggaaagactccccctgcctcccccaggggcctctgcttttcctggggagacaaaggcaataattaaaagggaagtgttttgttattcccaggcattttggggaggccgaggtgggcgggatcacgaggttcaggagatgggagacccatccctggctaacacggtgaaaccccttatctatgcgcctgtagtcccagctacccagggaggcttgaagcagggataattcgctttgaacccgggcggcgggagatttgcagttgagccgaggtcatgccgactgcacttgcagcctggggcgaacagagcgagatttttgcctcaaaaataaacaaataaattttaaaaataaataaataataaaagaaagtgttagacaatgaaa

SEQ ID NO: 113939 - DNA, 502 bp, Homo sapiens
  misc_feature (1)...(502): n = a,t,c or g
cacggcggtcttttgaatgccttaggtatgatttcactttcgctcacatcaatgctgacctgaatgcctttcatatctgatccgctgtgtctctcccagtaaacatcccctgaggggagaacaaagaaaggagctcttcttcttcttaatcacaattcagccctttcaccgccggcaggctccatttgcattctgccacagaaagccaagatgaaaagaaagagagagagaaagagagagagagagagagagagagagaggcacagggtagtagctgagtaaaataacttaggtgtttgtggctgtttgttgggcttcccctagttaccagccttatatagctgatgctccaccagggccctgntccctcctgacaggcatattagtgttacaagatgggcatgtctgtactattcatgggncacccgttcaacanttgaggtaaaaagtgttcaggaggggttcgatttttcccccagaagncctgttagattttggggtc

SEQ ID NO: 113940 - DNA, 527 bp, Homo sapiens
ttttttttttgtatgtggaaaaatgtatttttgtaccatatctcatacctggagagaaaccttttttctatcttcagggctgtagaatatattagcgtaacactttcactgaatgtgacgtaaaagcattctgatgaaaactggttctgttataattaagactcagtgtttaaaaatatccttaatccagtgttaatttcccccagtgtttccagtatccacagtaaatacttgttttactgagaacagaaaataatcccagaaaaggaaaaggaccagcctctctctagattgctggaattgtatggatgtgttggggttggtttagtgatctcttccttgacaccctagcaaagatgcttttgtggagtgcaaacctttcataaatatactttccaggctgggtgcagtggctcaagcttgtaatcccagcactttgggaggccaaggcgggtggatcacttgcggtcgggagttcgagaccagcctgaccaacatagtgaaatcccgtctctaccaaaaaatac

SEQ ID NO: 113941 - DNA, 2116 bp, Homo sapiens
  misc_feature (1)...(2116): n = a,t,c or g
gattttgctgtccacaaatacttgtttcagagttttcatggatacagtggcatggttgaaatgaagctgtgagccttctgctttaaatctgatgtaagaaactcctgttaacaaatagtaagtatgggttaattagccctttgatcaaagcctagctttacattgtttaggatctttggaaaacaattggtttggttgcccactttccgtagatcaagagcagaacctttcacatggcacagaagaacccaggttgcgcttcatacctgcatattccagccttagcctgccatttctctccttggcactttgtgtcccagcaacactgggtctcagttgggtcatcctcaaacttgggttccataatccagcctcaggaacctctgttcctgttactatggttccttgcatgtcgcctgctcttactaaagagctcgtgtgttttccagcacacttcggtttatctcttgatgatgatgctagtctctccctccgcaagggcggaaaggctgcctggttggttttgtaccagtgtttcctaacgtgtagctgcagtcagtatttggctaagctgttcccaggggctcaacagatgctttcggatgagccttaactgacccaatcctttgtgatgcgggagagattgctaggcctcgcttcacctgggccagaaccaggggaaagagggccgcggttnccagcgcgatttccagggccctgggcgtcaggcgcggggtgggcagctctccccgggcggtggggtccttgtgaccgcgaggcggggcgcaccaggaagggagtgggacagcgcgggcgcccagggatgtggcctggttacctgccttctctgatacgtcaagacaccttcaacaatggcttgcagctgtaccctgttggctgcacccaggacgcccttttcactgctaagcagtcctacctgaggcccaggggctgccagattgacccataaataatctccggggccctcagatccagaagctgctgagcctgatcttagtgcccttctcctttctctgtgtgggccccccagcccctttcccccgactgccttgtgtccaaggccctttcccttcatgtattccatgggagggagagacaaaattacacatcaataaaataaggataggggaatcccataaataggacattcaggaagtatgggccaacgggatttatctttaaaaccaatgggggggaggaggagttttcaattaaatgttgtgggacttcccatttgtcaaagaccaaaacaaaggaaccccaaccttacatttagatatatgatccattttgagttaagtttgtattacatatctaaatgtaaaatggaaagctataaaacatgaaaacagactatctttacaacctaggccgtaggtattagtttttagacattacaccaaaagcacatgccgtaaaagaaaaaatagataaattgggtgggtttcattaaaattaaaaaactttttctctctggaaaaatcctgttaggctggggcgctgtggttcatgcctgtaatcccaggcactttggggaggctgagttggggaaggaaattaatagcttgaggccagggagttccaaggtccatcctggggcagcaaagtcatacactcttgagggaagagagagaccctctcatattgttttatattgttttatatggtgttatactcagtaccctgttttaaaggaaaaaaaacaaggaaagtgaaaatcaaaagacaggcagccccggcaccagggccttgaaacccagcccctggggccttgcctgggccttaaacctagttagtttaaaaattcaactttacggactttggaacctgatgttattccgtaggtttccaaggcttgtattaaaaaaattgttgaaacttccctgttgtgttctgtacccgtggccttgaaacccctgttcacatttcccctagattgctcaatcaaatcacgaccctttcatggtgaatccttagtgttgtgagccccttaaaaagggacagaaattgtgcacttgaggagctcagattttaaggctgtagcttgccgatgctcccagctgaataaagcccttccttctacaaaaaaaaaaaa

SEQ ID NO: 113942 - DNA, 366 bp, Homo sapiens
ccaaggtggacatggagctataggctgtgccatcctaggagccaacaaaggttaagaaccactcctgctgagtaccagcagcatggaagacagtggagtgactgcctgcttactcatgcttttgtttttccaatctagaaagtgtacagaaactcctgggagcagacccgggctggcagttatgacttcaggctggatgccttccccttccagactgcccgggcatttagggagatcgccagtgatgtaagacccccatgttctctcgtgcggtcactgatgagtttttctctggttttcccagttctgttgaaaggcaaaccgccaggccctgtcaagattatctctctctgtgcaccaaaactg

SEQ ID NO: 113943 - DNA, 1053 bp, Homo sapiens
ataagttgtgttatgactggatatgtgtgtatagccaataaaatgcaataaaatattaaaagactgaaagctacacagcaattatggtttatgtaacaacttctaaaaaagttcttgacaagttattatgagaaacatttcatctaggagtgatttctaaggcagcatttgagtttccataaaaacagaaccttctgtctcagaaggtatatcaataagaggaccagaatcttctatttccaaagtgcattggtttctcctgttcacaactcaggtttgaactgtcgttcatttgaatctcttcctcttccaaatccaaaggatttatctgggggctgaaagctaccacttcttcgtcttcattttcatggtaagaaagttacaaatcatgttgggtccgataggaggaaatcattatcccttaatttggcaaggccattccaacccccacctatgttttcttctccttccttcttctctggtcaggagagttcttggtcatgctgaggcttcttcattggatgggcatttatatttaagccccggttttattattgccttctgtatcagcatgttcaacattttcttcaaatataacacaggtccctagagtgtcttcatactccccagcaaagacacagctgtccacttgcagaatgggcctctcagtgtcaatgcccaaaaccttgcatttattttcacattttgagaggaagtctgaatcaataattcctgataattccaccagaaccaactgctcctcctcttcctcgtcttctccgtcctctggactccgctcgtccgccgccgccgccatggtcccgcggcgcctcgccttatagtcactggccacgcccgcccggagccgccatcttgagtacgggcttcagctccgaggcgaagcagcttattgggttcctgccgctccgctcctcgccgcgcaaattgcttctgccagaactcgagatgtcggcttccggcgggcgggtggctacgggcgccgagagcgccggtacccacgtggagactcgccacgggcctcctcgtttctcg

SEQ ID NO: 113944 - DNA, 375 bp, Homo sapiens
ccaggagtaagaggagcccagggtggtccctctatccccaggcagtgtgaagagtctgctattggtcctaaatttgcttggatcatctcttcctttcactggaagcaaggcatgttcaacatggaggctccttcttcccttttctttgtcaacatgtgtgcagtaaagaagcagacaacctggggccggccagacagaggattcatctggcagccacttccagagcccctggaactctggcccaaggctctctgactgactccttcccagatcttctcggcttagcagctgaagactgacactgcccgatcgcctcggaagcccctgctcttgtttcccctgccggtttacactgtttctccaagccatcacagc

SEQ ID NO: 113945 - DNA, 865 bp, Homo sapiens
tgatccctagtccagtgcggtggaattcggagttgctctaggtcgtaaccagcctttgaaaaaggagaaaccaaaatggaaaagcgattatcctatgacagatggacaactacgcagcaagagggatgaattttgggatacagcaccagcttttgaaggccggaaagagatttgggatgccttgaaggctgctgcacatgcttttgagagcaatgatcatgaactggcacaagcaatcattgatggtgcaaacataacattaccacatggtgcacttacagagtgctacgatgaactggggaacagatatcagcttccagtgtattgcttggcaccgccaatcaacatgatagaggaaaagagcgacatagagactctggatattcctgagccaccacccaattctggatatgaatgtcagcttcgtttgcgcctttccacaggcaaagacctcaagcttgtggttcgcagcacagacacagtattccacatgaagagacggttgcatgcagcagagggagtggaaccaggtagtcagcggtggtttttttctggcagacctctcactgacaaaatgaagttcgaagagctgaagatcccaaaggactatgttgtacaggttatagtgagccaacctgtgcagaacccaacaccagtggagaactgaactgagccctgttggccagctcccacatccctctgctcctttttatggttcttgttgtcatttcctactctgcggcgtgaaatctatttcactgctctaaattccctatgaatggatttagttctgaggaattaccagtgaaaaattccatctgtgatggagaccaacaaaaataataaaacacaaagagccagaaaa

SEQ ID NO: 113946 - DNA, 438 bp, Homo sapiens
  misc_feature (1)...(438): n = a,t,c or g
gatgccccctccccacctgagtcctcatgggcagctgtgttttgttttattttgttttgttttgttttgtttgagacagagtctcgcactgtcgcccaagctggagtgcagtggtgcgatctcagcagctgtgtttttaagaagtgtttctactcctttccttactcaatcctgaccctgtaaaattcccacttgctggctgccccctccccaaggaaaggccgcccctctgcccctccacagtgggtggtgcccagagtcatggggacatggtctgggctttcctattcttgctgacccagctatagagaccgtgctctttcccattcagagagtcatagctacttggtttttttatgtttgttttgttttgtttggtttaagttttgttngtgtgagtggcctntaatttacgcttgggggtggnccttttaaaaa

SEQ ID NO: 113947 - DNA, 419 bp, Homo sapiens
ctgaaatgtctcaagagcaaccctttttataaacaagactctagtttactactgtttgctactagtgtagtagtcctcaaactcttacactcttaaaaattattgacatctccaattacagtcttaaaaattattgacatctcaaaagagcttttgtttctgggattatctatcaatgtttgccatattagacattaaaactgaaacattttaataatatttacgccaggcatggtggcttataactgtaatcccagcactttgggaggccgaggcaggaggatcccttgagcccaggaatttgttttttctttttctgagatggagtcttgctctgtcgcccaggccagagtgcaatggtgcgaggctgaggtgggaacactgcatgagcccaggatatggaggctgagtgagatatg

SEQ ID NO: 113948 - DNA, 735 bp, Homo sapiens
gggtctgagtgcattcaataaatcctcctccttttaccccgtggtctttctggttctcctgattctgcaaccgttgtgtcttccatgtaaaattctgagactccagcaggatgtcttatcaacagcagcagtgcaagcagccctgccagccacctcctgtgtgccccgcgccaaagtgcccagagccatgtccacccccgaagtgccctgagccctgcccaccatcaaagtgtccacagtcctgcccacctcagcagtgccagcagaaatgtcctcctgtgacaccttccccaccctgccagccaaagtgtccacccaagagcaagtaacagcttcaggattcatcaggagcatgaaaggataaggataattggctcacctcgttccacagctccacctgcatcttctcatcaaagccatccagggatacacagggagcttctttcctcttagcctgtgatcggcctgtgatgatctctgatagcaaaaggttttctttttgaggctgccatactgccactgtccaggtggagactgagcaaaggaagtcctgggctgtgccagctcccagagctttggaaggaaggaccagcagctctttccctggggaccatcagagaattctgttgatgtgttctgtgtctgtctgtcacctggtcacgagcttctaccacctttgcaattgtcacttatctttcacttccctgaataaagtatctatgcataaaaaaaaaa

SEQ ID NO: 113949 - DNA, 859 bp, Homo sapiens
ccaaatttctaaaagtgggtgagattgggtggaacaaaaggagaagtggccagagctcaaaaccccggaggaaatgctgccgaccccgccacaccgagctcatcaggtatcagaccgcctgccgcacagagtcgtttgcaaaaccagaatgcttgggtgacaccctgcaaacgtgcgatcccctttgacagttttgtaatgaaggcaggaagtgaatttgagcaaggcccccacgtagccatgtgacccgagcaaggcagcacccgccttggagcccctttcccgcctgcgagggagacctggcgtctgccccgctgctcgcagagtcacgttgccggcggtatcaaagggcgaggaaaggatgaggaagcgctttgtggtctgaggcagcccctctgtcatgtggtgctccctattcctcctcctcgtcttcctcgtcttccccctcctcctcgcgcccggcaggcaccctcgcctacctcaggagttctgtcccatccctcgttttgtgtggctgacctcagttctcgagcccccttcctccccatgcagaaagggggacagtgtgggcaacccgcccccaacctcttattcttggttgaatttaaaaatggggggtttccagagtgggtgcttggcaccccaggggggaacaacaaaacagaccacccaggctgcaggagggagaacacaggccgtgctgtctgtgttatggagtgcaccctttaaaagttccgaggtggtctagccaggggcggtggctcacacctgtaatcccagcactttgggaggccgaggcgagttcaggagatcgagactattctggcttggctaacgtggtgaaaccccgtctctacta

SEQ ID NO: 113950 - DNA, 819 bp, Homo sapiens
  misc_feature (1)...(819): n = a,t,c or g
cagcaccggctccagtgggctctatggagtttctccctgtcgtccaggctggagtacaatggtgtgatctcggctcactgcagtctctgtctcctgggttcaaacaaggcgcctctgtcgaagagccttctgctggtccccagtgccctctccctcctgctcgccctcctcctgcctcactgccagaagctctttgtgtatgaccttcacgcagtcaagaacgacttccagatttggaggttgatatgtggaagaataattttgccttgatttgaaagatactttctgcagtagtctgcttatttataattttagggatatttgaaagaagatatgggaaggcagaaaattttgcatccttttttgctgggttcctgggttttgtcagcctttatttgactttctcctcattgaaggntatgcagtattttctttgggcatcactgcaggttagtaatttgccttctggattcctggcacctgtgtttgctctgtttgtaccattttactgctccataccaagagtccaagtggcacaaattctgggtccgttgtccatcacaaacaagacattgatttatatattgggactgcagcttttcacctctggttcctacatctggattgtaagccataatgtggacttatgtccggtctgtgctacgacagcaaaatgttccagggtgcatcaggtgctctgcatccccagctggatgggcaaaaattcttttcttggacacttaaatcctatcatcactttttctgaccccttccatcctacacccctacactcatcgctactcaccttctcacctttcc

SEQ ID NO: 113951 - DNA, 1012 bp, Homo sapiens
ccagccttgtctcggccacctcaaggataatcactaaattctgccgaaaggactgaggaacggtgcctggaaaagggcaagaatatcacggcatgggcatgagtagcttgaaactgctgaagtatgtcctgtttttcttcaacttgctcttttgggtaagtgtatctcttctgagcacggtttagctcacctttacccagctaagctctcctcattcctctacttgaagaggctggtgtgggggtaaaatgcatgcgtgtttgggtcatgtccagcacaaccatcctaggaaacaaaagagtaataatttttcccctcttcctgccacaggattaaacctggcaaaatttgaaaggtaccagtggcagttatttattggagggtgctgtttctctctgagggctttaggtttaccctaccacctccgtagcctaacatatataggtgagaaaccctgagactgtgcctctggatattgagtgccctctgtttttccttgtctttttttctagattccttgaaacaataagtgattgaaaggaaagtccaccctttcccagggaggtttcactgtataaaattcagcaattgaatttcagatataggatgggttggtacttgtgtatatgagaagattattataagtttggcttctctagttttctgcctagcaagatgagcttcctcaagcagggcatcttctctacatggtcatggtttctacagagaaagccatgtgtgagcgactgaaaagataaggaaaaagaagttagacctatatatggtgaagatactgtgtggctcacagaagtgactttccttggtatctggagatgggtaggaagagttgtgagtaggtctccacatgagaaagctgagattgcctctccaatgtaagcatggaaaagtttggtaaagaaattgttcatgagactcttgattgagccagttaaaaataaagtgattctgatctcaaggaagtgagaatatgaggagatacccaagaaccaca

SEQ ID NO: 113952 - DNA, 707 bp, Homo sapiens
gcggccgccctttttttttttttttttttttttttttacaaagatagggtcatttattcacgttatattatttaattttaaagtgttaaaatacagttctgtgttttaacaccaagatcagacacagtgcccgtgacacaatgagtaaatacacacatttgcatacaacaggaaatcaaaaatacacagcacaacaggtctctggggacatgaaagccggtcatcctggcttatggcagagccccccgcccctgggcagttcagcagaggaccctgtcccaggcttgaaggccaggcacagcatctcctttacttgtcctgtgcccacctctgcccttctctgatctttccccaaaggccagattcacacaggggtcaccagcatggtacccccaaaacccccagcaaaccagaaaagggcacggcacatggacaactttcgcggtacataactccccaggaaaaggaaattgctcccctgaaccccccagccctgaaatcccccagtaaggaaaacagggacccgcgggatctcacgggaccagggcaaacatcccaggcctaactgttgcccctggctgtgcctttgggccccaggtggagcccatgaaagcactacgtcggcaaatggggggagcagtatttcccttgggttctaagaatgaaccacatacttgacatgaatgagaaggtaaccaaaaaaaaaa

SEQ ID NO: 113953 - DNA, 6901 bp, Homo sapiens
  misc_feature (1)...(6901): n = a,t,c or g
ctgcgggcggcgggcggcgggcgcaccatgccctccttcgacgaggcgctgcagcgggtgggcgagttcgggcgcttccagaggcgcgtgtttttgctgctgtgcctgacgggcgtcaccttcgccttcctcttcgtcggcgtggtcttcctgggcacgcagcccgaccactactggtgccgcgggccaagtgccgcggcgctggccgagcgctgcggctggagcccggaggaggagtggaaccgcacggcgcccgcctcccgcggcccagagccccccgagcgccgcggccgctgccagcgctacctcctggaggcggccaacgacagcgcctccgccactagcgctctcagctgcgcggacccactcgccgccttccccaaccgttcggctccccttgtgccgtgccgcggcggctggcgctacgcccaggcccactccaccatcgtcagcgagtttgaccttgtctgtgtcaatgcgtggatgctggacctcacccaagccatcctgaacctcggcttcctgactggagcattcaccttaggctatgcagcagacaggtatggcaggatcgtcatttacttgctatcctgccttggtgttggcgtcactggggttgtggtggcctttgcaccaaacttccctgtgtttgtgatcttccgcttcctgcaaggtgtatttggaaaggggacgtggatgacttgctacgtgattgtgacagaaatagtaggttcgaaacaaaggaggattgtgggaatcgtgattcaaatgttctttacccttggaatcataattctccctggaattgcctacttcatccccaactggcaaggaatccagttagccatcacgctgcccagctttctcttcctcctttattactgggtggtccctgagtctccccgttggctgattactcggaagaaaggagataaagcattacagatcctgagacgcattgctaagtgcaatgggaaatacctctcatcaaattactcagagatcactgttacagatgaggaagttagtaatccatcctttttagatctggtgagaactccccaaatgaggaaatgcacacttattcttatgtttgcttggttcacaagcgcagtggtgtatcaaggacttgtcatgcgcctgggaattatagggggcaacctctatatagactttttcatctcgggcgtggtggaactgccaggagctctcttgatcttactaaccattgagcgccttggacgacgcctcccctttgcggcaagcaatatagtggcaggggtggcatgccttgtcactgcgttcttaccagaaggaatagcatggttgaggaccacagtggctacattgggaagactagggataaccatggcctttgaaattgtttatttggtaaattcagaattgtacccaacaacattacgaaatttcggagtttcgctctgttcaggtctgtgtgattttgggggaatcatagccccatttctgctctttcggctagcagccgtgtggctagaactacctctgatcatctttggtatcctggcatccatctgtggtggccttgtgatgcttttgcctgaaaccaagggtattgccttgccagagacagtggatgatgtagaaaaacttggcagtccacattcctgtaaatgtggcaggaataagaaaaccccagtttcccgctctcacctttgaggcccccgacaaagacagaaagaaggagctatccaggagctgatcctccttgcaaagctgtgccttgcagagatgcacgtgtgcatttcagctacatcatgccgcgctgttgtaatactgtataaagacctcaatctatccagagtatttttatataatgttggatgagttaggatttgtaatgctgttgaagtttctgggaacacataatatgtagccagtttaacaaagaagctgtcaggtgcacagcccttcctgggtttttttcttgtgttccctgtggtctctgacccattaggctaaagagagacaagagaagcccccaacctgattctcatgacagctccatcaagaatgtgggatgtgccgaccaaggatttgagaaagttgtacagaaatgtgttcatcaaatctggtcaagggactaagctcctagctgaccattcattctgaagattgcatggaggatgaacatctgggaatcctgttaatgagaaggctgaatcacaggcacctgggccaaagggtgtgagcattcatgttctctgctcaccttggtttccgcacaccttcgcaatgtgaacaggtcaggagtccctcccgtccacctcctctgtaacagctggggttccaggcatggtttaggccctgttccagcaataagaaccaatctgctgtacaatctgaggacttggctgtgttatttacaaaatgatgctgtggttctgagattatttgggacatttttggctctcctttagtggacacctagagccacagattcccttctttactaaacaaatcccatggattctgatttctgggtcttaggattttaaaagtgaagggatatttttcttatatttgtgagttcagttccgatggtgcccgtggtcaaaagcgaaaaacatggacaattcctattcattcttagcactttgacatgtcttggggaaaagctttacattttaatttaaaagaaagatcaattatatccatgcttaacaggatcagcaggagctttataaatgactttacagagactaataagggatttgatctttctttttttgttatcgaggctttggaaatgtggaactggtgtgtcctgctttatatgttatattccaatatcttttcagatgcagtctatattttatgctgagttttaaaaaaggaaatacctttatgccaaacaggcaaaattgggtaccaaagggaaacattaaccatgaggaagagcatttttcctaaggagaacaggtgacaatatacacatgtgtgcctaatccgtaaaatgagcatccttagtctttaaaacacatcagaattgaatacgaataatctatttgtcaatgaaataaacacagctctttgaggatttgagactacattcaccctttattcacagtcacttgcagttttgcttttctctgcatttctctgctgtaagatgactgttgcattgttaaattgtattttgaatggatatttttgtttggtaacaatattttaaatggtaaaacgtgtgcctttgtcctttctcttccttctaaacatgtatctctcccacaggtcattctcctgtcaccgtgtgtactgcagactgtttcaaaaccgggcagggcaattaggcaatggggaaataaggtgggtcccacccttcaatatttgcttgttgttcatttacatgcttcttggcaccaatcctagactcacgtgtgcccccagaataacattcagactctcagttggtcttgtgttaacacatcccatggaaccggttccactccatccatatacagctctctgctccggtgtcccctgggcacaagtcaaggcagtcggtgacagatttcattcccaataacagaatcggttcgcatgactccccatgcatgttgcagctttgaaaaccattcatctcagtgtcaggaaataaagacagtaaaaaatgccatgtcaagccctcgttagctgatgaggtaaatgcgtggacaacttcttggctctcccctctgtgaccttgcagcctgctcagtcctttgtgcagctgttccttatcaaaagcagctaaatccccccatctgcccatttaaaaattggtggggtgaacaaagagcatgaaaatgttgaagaccaaaaccaaaatttacttcaaatcaaagttaaagtaacaagagtttattttttaacaaatgtcatagctatgtcaccattactacagaatcccgcagtcagaaaataacacaaaaaaatgcccgaggtttggcgtacgtggtagctggggacagtgtcttcgtttgattactgccagttatttccaggcatgctaaatcccctaccccacggttcccagcctctagggtgagtcaggtgcgtcaactctgtctccccgtcccaattaattaatttctccatcaactcccctcaatcccaagtaaacaaaccttggaaaacagggaacatgggacacgggggggttattgggggccgttgcacaagcccaaagacccccaaagaaagtgactcccttggtaaaatggtattttggtccctttttngagggcaaacccagaggggcccttccactgttcaccctggggggcaacttgttcaggtggccttccgggccaaaatggcccaggcacaggagtttcgggtgggattgggacttctttccattttcagggaaacttcatagggcggatttgcacactttattctcaaatcaacaggggagctgggcttcccttgaagaaggcccagctcccaaaagtaccttgggtttctcccccagcccagtgatgaaacattcggtcccggtcaaccgaaccacaaaaatttggggaatggccagacaaagctgggattaactttgtcaagtgaatgaacggcaggactgccttagctttagcaaggcaaatatcttttccgtgtgggctcccaagaacagcctaagacactttctatttcctgaacatgcggttccgagattcacttcttggtgtgcaccccaggatgaccttgtaggatgaaggccttggggacttctccaagcagtgggcagcagtcaacgacccactctggggatatcaaggtgcctccacagaagtgcaatccaaaaccttgttctaaagactgaacttgccagggcccaggaatgtggggtgggccacacacccccctacaacccttcccaggacatttccttcggctccacttgaggcttccccacaatcaaaatgaaggggccgcacactgagggacatcacagtagtcgtaaagttttcttggatttgtcgtgtagcaccagggaccacatacactcaccatcagggttacggcagtaatttttttccagacccgccccgtggagtttgtctctggagtgaaaatgctgtgtcctaatggggctcctgggcagcccagtccctggcatggcgtccccagtaacaagtggtcgccctcttgcctcggtatcctttcccattcccaaacatacagtcttcttcggaaggagtcatatacatctggaagcaggacaacaggcggaggtgctaacaacactcgcttctgttcctgaagcattttttcaggttgcagtactcccacctgaacgctgggggtctgtgggtaaaaacaccagggggcctttaatcggccatctgggattccctgcagtagttccattgtcaaggcccagcatttggggtagttttcctggggtccttcctggtgcccggtgtgggtgtcataggatgacccaaagactgaacacttctttccctgtgggtgggtgggtgggagggatgttgcctcggtaagctctgtcccatcacccatgggtagcaagtccctggaccacaggggttagctcaggtggtgctgtgggagccaattgttccgtggatactggggaggagtcaacaggaacggtaaccttaacaataactccccacccgcaacttggcctgttggttgtaatggcaccccaggggcccctttttcccgtccaggattgcggcaagtagttttccatcccaaattttgccagggaaaattttcctggtgtccctgttatgtgtgtgaaggggtcctgtgcactcccagtgctgaacagttttccccgaacacggttaaacagccacattcccgcgaaaattttcacctgttccccttcaagacactggtaaggtgggacccataagatgggtggaggtgttgtgcaagcgggggatgtcaaaaaagttccccagcgcttgttggggtcgggtggtgaaaacacccaaggccgcaagccccctatcggggttacgaacagtaattccttccttcaggttcttgtttgggaaaatttgggaaggaaagtatcccatgaaccgtgtgggctctgaagagtccccaggcctggcattcccagtcccagacatggtcttggaaattttgccgtcaatagttttcctcccactgcaaatgccatacattccctccttcaacactcaaagaatgtcgcaagtagtcatatctcttttctggatcaagtagtatagcacccagggcccctgcggatcgttgtctggattcctgcagtagttctccctccaagtccctcctgaggggtgtgtagcaaggtgaagaatctaaggtctgcgggggagaagtggaactcccatttttgacaaggtgatgccatttttgtttttggaacatcgtcccctctgtaaatcctttccaatccccaagtcttggcactctgaagagaatacactttctttttcaaaaataaaactaacatctcctcatccctaatgaattaatggaggacttccctgttttccagccattatcacacattgttgctctttactgtgatattgggaatgcccctgcaggtgaaattcctttgtccctccttacattttgcctgcacattccttctctgcttccctgcccccagctgccttcttagtgacactgaacagtgaagccccctgggtattcacatagtcatccagaggctctccttgacctgatttcagaaataaaagaagtagaagaaccacttccttatgttccattttgggactggccaggcagtgcccagaaaagtgggtcccaatcccaggatgttgttgacttacatgagagtaaacgcatccacagaccagatagtcaaattaagttaatgattctctcagac

SEQ ID NO: 113954 - DNA, 1124 bp, Homo sapiens
gttccgttgtgacccgctgcacccggccggttttgttattcaaccactttcacagccaccacacagaccgaagggatgagacaaagccaatttctactttttgcattttgctttcgggctaccatttctgttctttcttagagtttgtcttcggtcttctcttttgatgctaaaggaagaagtggactagatcctttcctttctcttacacagatagagctgtgtcatctgtgacacagtgttcttcctgtttattccattttcttggttttatttacttagttgggtaactgttactagttatagcttttttttttagacggagtttcactcttgttgcccaggctggagtgcaatggcgcaatctcagctcactgcaacctccgcctgggcaacaaacagagtgagactccatctcaaatataaataaataaatattaattgcttaattaattaattaccttctttttctcaataaaataaacaaactggaacttaccactgacacagagcaaggacattaactatttcatacatttttctcagtgattctgaaaatatttctcaggaggcagcatcagcatgatttggggaaactattggaacctacagaaattaagttaattagaaaatttagattctcaagacccccacaccaaacctactgaaatcagaaatcctgaggaatgtagggtgaccttctgtattttacaagccctcccaggtcactcccaatgctcgcatttgagaacaactactctatattaccctaccctagacaggtgacacccttgatgtacaggtttcttaatgcattgcagtgtttcagaattacagaaccaaaaattcctgtctgatagcattttcctcaattaatccagctttatcctcttcatctttaattatttatatgtgtgtctgtatgttttgctgattctttcatttatttccttcgaataatgcaataagtccccaggatctactgaaaccccataattagatccctcaaatttactgaaatttactatagacttattctcacagatgtaatgcccaagtgttcaatctatgacccattgtccctctcatagaaaacttggttatacaggcagacaccatggagg

SEQ ID NO: 113955 - DNA, 1316 bp, Homo sapiens
tacagcgcggcggaaccggtctggtccagtcggtcttcctccggcccgggccctggcccagttagccgtccaaggaaggtaatggccccgctgcggaccactaccagccggccagccccccgcgggacgcctgcgtgtacagcagctgctactgtgaagaaaatatttggaagctctgtgaatacatcaaaaaccatgaccagtatcctttaaaagaatgttatgctgtcttcatatctaatgagaggaagatgatacctatctggaaacaacaggcgagacctggagatggacctgtgatccgggattaccatgttgttttgcttcatgtttcaagtggaggactgagcttcatttatgatctcgatactgtcttgccatttccctgcctctttgacacttatgtagaagatgccattaagtctgatgatgacattcacccacagtttaggaggaaatttagagtgatctgtgcagattcatatttgaagaactttgcttctgaccgatctcacatgaaagactccagtgggaattggagagagcctccgccgccatatccctgcattgagactggagattccaaaatgaacctgaacgatttcatcagtatggatcccaaggtaggatggggcgccgtctacacactatccgaatttacacatcggtttggcagtaaaaactgctgaacttggtctcaagatgtggaactgtggaagaaattctaggacatgaacaagctatcctttcatcgaggacagcaaacattatggtacagttggcttggaattatgtctttctcttttaatttgattgagtggaaatctgagtgagtacaaatattaaatgaacaacataaaaactttttgtgttgacatgtcaaattgaaacttgataaagtgcgtacttgctaagatattcctgtggctcatgcgttacaacacgaggacttaagccagtaatcgtttttgttcagatagaggtgtggaagtagagccagcccctcatgtctgttttggatgttttgtgtctctccagctacattggtaagttccttgaggggcagggccatggcccattgctctgtgaatctcaaatgcccataaaagggtggcccataaaatgttttcttgaacatttgaattgtgctgttgtctggaaagggggtaatattgtgagctgaatcagcaataaggtattagtctttttggactatggtattgttaaaaagactgcagccctctcagacttgagcgttaattggcttatttatttatggctttaaataaaatcgatttaacgttaaaaaaaaaaaa

SEQ ID NO: 113956 - DNA, 758 bp, Homo sapiens
  misc_feature (1)...(758): n = a,t,c or g
ttttttttttttccaatgcaacttgcaccaaagctttatttgctatttttcatagtctgaatgcaacatctttgtacatgcaaaggtcatcttgttttattgcagtcgaccagatttccaactgctcttctgtgcctatggaaactttctttacagttacaaaatataaaagcacttgtaggacgtccaatactctgtgagggtctgggnaagcccccatttgttttttaacattaaaaaataataagtttttcctagaatgacttcctcaagtcacacgggttaggaggattctttctggggactgggataaaggtgcctctcggtctgcccttccggttcaggaactcctaggaggcttgtggaattccctaaggggcaattggcaagggaacaccgcaggcagggaaggctttaactttccctacacaaaggaactcgaggctcccttttctatcgtggactcaaggatctgaggggagggaccccggaggaaagggttaggggaaaatatatacctatacttgtgtgtgtgtgtgtctctgtgtgtgtgtgtgtatatatatatatttccacgccctgccccgtcttacaaagcagtgtggaggatcacgatcatctgggaagtgcatgactttaggatattggtatgatttaggaaacagcacagtacaaaattatcttccataacacaatatattacttttgtgacccccccctatttacaggatctataaggctatgtggaataagattat

SEQ ID NO: 113957 - DNA, 412 bp, Homo sapiens
aaaaagaaaaccctttatctgcccagcagcttcttttcctcattacctactgcccctttcacctctcttgctaggctaagcttgaaaatgtagcttatattcgctgtattccttttccttcccattcttttctttttatttaaaagtttatatttaaatttatgaaaatataaatatatataccaatttacatagaaataataaacactaatgttttcatccctgaatttaagaaacaatattacagtactgttgaaaacccttgtgtactcttcctttaatacacattttttcctcccctcaaaagtaaccattactggctgggcatggtgggtggctcacacctgtaatcccagcactttgggaggctgcagcaggaggatcatgtgagctcaggaatttgggaccaggc

SEQ ID NO: 113958 - DNA, 672 bp, Homo sapiens
acctcttctcataccctgtgctaacaacttttaacaaaaaatttgcatcacttttaagaatcaagaaaaatttctgaaggtcatatgggacagaaaaaaaaaccaagggaaaaatcacgccacttgggaaaaaaagattcgaaatctgcctttttatagatttgtaattaataaggtccagggtttctaaggcaacttaaatgttttgtttcggaaacaaagtacttgtctgggatgtagggagggaaaggggagtgatgttcacttgccattatggtggccccttggaatataagaccctacttggctatcttcccctggcaccagccagggagccaccccatcctccagcacactggggcagcaagctgggacacacggcacactggatcccaaatgggtaaggggatgggtggcgatgctcattctgggtctgctacttctggcgctgctcctacccgtgcaggtttcttcatttgttcctttaaccagtatgccggaagctactgcagccgaaaccacaaagccctccaacagtgccctacagcctacagccggtctccttgtggtcttgcttgcccttctacatctctaccattaagaggcaggtcaagaaacagctacagttctccaacccatacactaaaaccgaatccaaatggtgcctagaag

SEQ ID NO: 113959 - DNA, 672 bp, Homo sapiens
atgcagtacccgtccggaatacccgagctcatgcaggagctacacgtgactgccacgtgcaagcgatgtgatagcgttatcttaaatgcgagccaatgtccgtccactgaccgcggttttacagcgaaaacactgggaaaacattctgacaaaagaagtcgtgacattttatttagttcttaaatgcacctcacttctatttggagccagagaactagaggcttgggatcataggaaccagagcattttggttgttatgagctgagacctgtgcaaaggaagcaacttcattagcaaggctcttgccccccaccaccccttcctcacaggtcacctctctgttccctgcagacagtggttcagttggaaggtgacaataaactggtgacaactttcaaaaacatcaagtctgtgaccgaactcaacggcgacataatcaccaatgtaagttggtggtgctctgagcgtgtggctcccagtgcttgaggggagaggggaggtgaagcatggggagcggctcacataccctaatgccacccctccaccctccaacccccaaacttctttcctgtggtcagtatctgccagcacttactgaggatccatcatgtcccagcactttgggaggctgaagtgaaaggactgtttgagcctaggagttcaagaccagcc

SEQ ID NO: 113960 - DNA, 1046 bp, Homo sapiens
aaaaaaaagacagactgctttgatcaaccctatttgctaaagcagcctatttttctttgtttaaaagtcaaaacataaaaaagcagagtataacatacaaaccattcttaactattcattaaaatgggtccttcaacaccttagtggggtttgttgttgttgcttatgcagagagattattttctttttattattttataatttttgaaatagagatggggtctcactgtgttgcccaggctggtctcgaactcctggacttaagtgagcctcccgcctcagtctcccaaagcgctgggattacagggcaggagccactgagcccagccaagacttcagtgttgactgctttgggagggcacaaacccatggcaagcgttagttccaaagttcagtgtgtacccttaaatgaacaatgaagcaggtaaaattacccttgaaaaaaatcccttggaccacccataaatgacagtgactttttcaatatggactcatcatagccagttttccttttgaagttggaactgatcacccttttgtcatctgtaccagatcagtagttggcttgtgttacattttgtgtgtgtgtgtgcgtgttttaaacccagggccatataaaatggtatgttaaatgtaagtaactttaaagttggacttatctcttcacagttaatcaagcctcacggtaattcatgcttcttaaattccagccagcccccccctctcctgaaaatttttattaatgtaaataatttggtggttccctgatccactcgtttaagttcttagttgtatgtcattctcttcttctagccgggaattgggcaaacttttttgttaaagggggtaggaagtgaagattttaaggctttgcaggccatatagcctctgctgcaaatgctcagccctgctgttgtaatgtaaaagctgccacagacactacatgaacacgaatgagtgtggctggtgttccaataaaactttatttacacaaacgggtggcccttttgggctgtagtttgtcaacccttgctctaaaaaaaaaa

SEQ ID NO: 113961 - DNA, 1258 bp, Homo sapiens
agctgtagaccacgattacgcctagcttggcacgagccaggaggcgtcggggctgcgccgtacaacttccggctgtaaagatggcggcttcctagtgagtcggcggctgatttagaaggaggttcaggctacggtgagccgaagccacacaggagccatggaagtggcagagcccagcagccccactgaagaggaggaggaggaagaggagcactcggcagagcctcggccccgcactcgctccaatcctgaaggggctgaggaccgggcagtaggggcacaggccagcgtgggcagccgcagcgagggtgagggtgaggccgccagtgctgatgatgggagcctcaacacttcaggagccggccctaagtcctggcaggtgcccccgccagcccctgaggtccaaattcggacaccaagggtcaactgtccagagaaagtgattatctgcctggacctgtcagaggaaatgtcactgccaaagctggagtcgttcaacggctccaaaaccaacgccctcaatgtctcccagaagatgattgagatgttcgtgcggacaaaacacaagatcgacaaaagccacgagtttgcactggtggtggtgaacgatgacacggcctggctgtctggcctgacctccgacccccgcgagctctgtagctgcctctatgatctggagacggcctcctgttccaccttcaatctggaaggacttttcagcctcatccagcagaaaactgagcttccggtcacagagaacgtgcagacgattcccccgccatatgtggtccgcaccatccttgtctacagccgtccaccttgccagccccagttctccttgacggagcccatgaagaaaatgttccagtgcccatatttcttctttgacgttgtttacatccacaatggcactgaggagaaggaggaggagatgagttggaaggatatgtttgccttcatgggcagcctggataccaagggtaccagctacaagtatgaggtggcactggctgggccagccctggagttgcacaactgcatggcgaaactgttggcccaccccctgcagcggccttgccagagccatgcttcctacagcctgctggaggaggaggatgaagccattgaggttgaggccactgtctgaaccatccctgtacatctgcaccttcttgtgcaaggaagtccttggcctaaagccttggttctcaaactgggttccttgggacctccggggtgggggggttccaggaggcat

SEQ ID NO: 113962 - DNA, 1188 bp, Homo sapiens
  misc_feature (1)...(1188): n = a,t,c or g
tgggccccaagcccaaattaaatgaacctgcgggggttttccggattttccatttataaatttgggaatttcggcccggtttaccaaaggggnnnnnnnnnnnngcgggttgccccttttttttcnnnnnnnnnnnnnggaaccgcggttgtttaaaagcctgagggaacctggagaggggctcccactccctaccttctttcctccgagtttgtgactccgagatggacaaagtgtgtgctgtttttggaggctcccgaggcattggcagagctgtggcccagttaatggcccggaaaggctaccgactggcggtcattgccagaaacctggaaggggccaaagccgccgccggtgacctcggcggagatcatttggcatttagctgtgatgttgctaaagaacatgatgttcaaaatacatttgaagagatggagaaacatttaggtcgagtaaatttcttggtaaatgcagctggtattaacagggatggtcttttagtaagaacaaaaactgaagatatggtatctcagcttcatactaacctcttgggttccatgctgacctgtaaagctgccatgaggactatgattcaacaacagggagggtctattgttaatgtaggaagcattgttggcttaaaaggcaactctggccagtccgtttacagtgccagtaaaggaggattagttggattttcacgtgctcttgctaaagaggtagcaagaaagaaaattagagtgaatgtagttgcaccaggatttgtacacacagatatgacgaaagacttgaaagaagaacatttaaagaaaaatattcctcttgggaggtttggagaaactattgaggtggcacatgcggttgtgtttcttttagaatcaccgtatattacagggcatgttctggtagtggatgggggattacaactcattttgtaatttgcagattattcagttataggggtgattagcatcaagggcacactttggctactgattagacaattatacctacatgggtaacatgtgctaatcaaacctgctgatgctacaaatgttaatttctgtctttataaaaatatgtctcaaaagaacaatgtgtgacaaattgtggtttttttttttttggccaaactaacatcagggtggttttgttaaaaaagcctttttgaaatccaattcacataca

SEQ ID NO: 113963 - DNA, 382 bp, Homo sapiens
ctacttaatccttttttaatcattttccaaatctccttacattttccaaatataatgtattaatacccgaatatcttaataaggtggagaaaaataaccttttaaaaattgtttagcaagcaacgccagatgagtaggcttttcaacgcagactcgtgtgcagacagcccagcccaacccaatagcctgcagccaggacccagcacccggagcccagcgacacagggagccccccagcgtccccatcacacacccagagcccagcgatgcagggagccccccaagcatccccctcacgcaccatgcagcgcagccacaggaagcagcaagagggggagggagtgtgcagcctggaacctctctcaggagccacttcagcctt

SEQ ID NO: 113964 - DNA, 1052 bp, Homo sapiens
atagagaccttcgagctccatagtcagtgtggtggaattcgtcaccagagaagtcttggtggaaacgtatgaagagagtgtgcctgtgtccagttaccagcaggcaggaattcccgtggacttgaaaaggaagattgcacggctggggatcaacatgctcctgaagatgatatttgtggataactttgtccatgcagaccttcaccctggaaacatcctggttcagggtgccaacggcctgtcctcgagtcaggaggcgcagctgcagcaggcggacatctgtgacactctggtggtggccgtgccatcttccctctgcccgctgcgactggtgctgctggatgctggcattgtggcggagctgcaggcccctgacctgaggaatttccgggcagttttcatggctgtggtgatggggcagggccagagagtggctgagctgatcctgcatcatgcccgggccagcgagtgcagggacgtggaggggttcaaaaccgagatggccatgctggtgacccaggccaggaagaacaccatcaccctggagaagcttcatgtgtccagccttctctctagtgtctttaagttgctgatgactcacaaggtaaagcttgagagcaactttgcctccattgtgtttgccatcatggtgttggaggggcttggccgctcactggaccccaaactggacatcctggaggcagcgaggcccttcctcctcacgggcccagtgtgccccccgtgatggggcagtggcctctgtgggcccttgtcaagagctggaggccactcccaagagcctctcctatggcagctgggacgttttaaaattgggacaccaatttcaaatgtaaccctccagtggtggaaggcacaccatggcttcctctgcttggtttgagggtctgttcaaaagctttgggccaattagggagtaaaaggagggaaggggcctatccattccattgtggaagctgggccaggtgccagggacactctccttcagggaaaatgttatgtggaggaggacgaataaatttattttgttttcc

SEQ ID NO: 113965 - DNA, 1170 bp, Homo sapiens
  misc_feature (1)...(1170): n = a,t,c or g
aaaatccagccacgtagagatttgggaaaagagtatttccaatagagtgaacagtaagtgaaatgagaaacagcttggcttgtttgaagagcagaaaagacatgatggctgtagtaaaacaagttgttggagatgaggtgagagaggtaggcgggggccagattaatgtaggattttaaagaccacactgagagatttggattgttactgtaagtgcagtgggaagacagttattggttgctgagcaaaggagggattgttggttaagagtggaagcagggagaccagtaaagaggccttaacaatagtcccactgaattatgttggttcaataaaggttggctattataatttttattattttcatgaacttaatagcttgttaatcttggttccacaggatttcaaatatgcgtgcattagagaatgattttttcaattctcccccaagaaaaactgttcggtttggtggaactgtgacagaagtcttgctgaagtacaaaaagggtgaaacaaatgactttgagttgttgaagaaccagctgttagatccagacataaaggatgaccagatcatcaactggctgctagaattccgttcttctatcatgtacttgacaaaagactttgagcaacttatcagtattatattgagattgccttggttgaatagaagtcaaacagtagtggaagagtatttggcttttcttggtaatcttgtatcagcatagactgttttcctcagaccgtgtctcagcatgattgcttcccattttgtgcctccccgagtgatcattaaggaaggcgatgtagatgtttcagattctgatgatgaagatgataatcttcctgcaaattttgacacatatcacagagccttgcaaataatagcaagatatgtaccatcatgagtatacttttccttattttgaatgtttaattctcaagaaaattgtaatcaattagtaaaaattataaaatgttaatagtattaaagcttgagtcttancacnnnnnnnnnnngccctgnnnnnnnnnnnnngaaatataccntggggggccttcttttgcttattttggggggggcattctcaagagggtggggggccgntaataccttttctttttatggggggagtattaaagcctgcgtggtattttaaaaaaaaa

SEQ ID NO: 113966 - DNA, 1112 bp, Homo sapiens
cgaaaagaaaagaaaatatgattttgagaagcgatccatggcacaaaaaatggccaagagcccctgactgagaggggccctgttgacactcacatgccacccgcccagagtgagggcagctgcccagctgagcagggaccccgcaggaggaaccagagcaggagaatccctggcaccacccttgctccagtacacacccatgggtgctcaatgaagaagtgaggacaacttgctgccatcttcagtttgatggaatggccttaggcctctgctgccgattgtgaaatcatcggcctcttacctaaaagctcaggaggatttagggggaatgcagatagagcacatgagttcactgtgtaatgaaggaaggggagcctcccagcattagatcttagggaattgttcaaatttaaggaagcaaaagccaagagttgggaggagaggcagggagagattcctccctcctcagctgtagctatagcattgcttggggccatggaaaaacagttttccacaccctagcagacagcaaaagctatttcaatgtgccaagtgaaagttgagccatgccctcatccaaactagcccccagcctcacgcaggcagctccgggcacccgtgcacactgggttcacccttacggagctgttcctccatcaggcagctctgggcactggtgcacactgggcttgcccttacgggggctattcctccatttctgtctccccttgtgctgcccctcactgggggcagcaccaccccaatccacgccaggcaagccctgccctgggacaccgctgctgtctgttttcatggatgactcaggccccagcaaagatactctttgttcctcaaaagagggaatggagggtacacttgctcttaggaaatgtcccccaccttgcagtctggcttcctgatctctctctgttaagatcttttaagccaccccatcagccacagaacgaagcgcatccaccaagaatacctgagcccacatctccccctccctcgccccgccagctcctctgccccccacagcaggagaatggacttgtttcctattacacaggccatgtgcccactgggcaagacccaaacccgtggaaccc

SEQ ID NO: 113967 - DNA, 388 bp, Homo sapiens
  misc_feature (1)...(388): n = a,t,c or g
cctgccctgacttctcatatcttgcctaggaactccaggcttgtcttggctccaaatggatcccaactgctcctgcaccacaggtggctcctgtgcctgcgccggctcctgcaagtgcaaagagtgcaaatgtacctcctgcaagaagtgctgctgctcttgctgccccgtgggctgtgccaagtgtgcccagggctgtgtctgcaaaggctcatcagagaagtgccgctgctgtgcctgatgttgggagagccctgctcccagacataaatagagcaaccagtactaacctggannnnnnnnnnnaactaccctgaccggtttgctacattcttttttctattcaatatgtgaaagacaataaaacacttttgacttgaaaaaaaaa

SEQ ID NO: 113968 - DNA, 1774 bp, Homo sapiens
ggcacgaggctcgaaaagagtggcgcagggtcgcgcggccccgcctccttccccgcccagcgaagctctctgaccacccctcttttctagagttctgcctcgcttcccggcgcggtcgcagccctcagcccacttaggataatggcgacagctgaggtactgaacattggtaaaaaattatatgagggtaaaacaaaagaagtctacgaattgttagacagtccaggaaaagtcctcctgcagtccaaggaccagattacagcaggaaatgcagctagaaaaaaccacctggaaggaaaagctgcaatctcaaataaaatcaccagttgtatttttcagttattacaggaagcaggtattaaaactgccttcaccagaaaatgtggggagacagctttcattgcaccgcagtgtgaaatgattccaattgaatgggtttgcagaagaatagcaactggttcttttctcaaaagaaatcctggtgtcaaggaaggatataagttttacccacctaaagtggagttgtttttcaaggatgatgccaataatgacccacagtggtctgaggaacagctgattgctgcaaaattttgctttgctggacttcttataggccagactgaagtggatatcatgagtcatgctacacaggctatatttgaaatactggagaaatcctggttgccccagaattgtacactggttgatatgaagattgaatttggtgttgatgtaaccaccaaagaaattgttcttgctgatgttattgacaatgattcctggagactctggccatcaggagatcgaagccaacagaaagacaaacagtcttatcgggacctcaaagaagtaactcctgaagggctccaaatggtaaagaaaaactttgagtgggttgcagagagagtacagttgcttttgaaatcagaaagtcagtgcagggttgtagtgttgatgggctctacttctgatcttggtcactgtgaaaaaatcaagaaggcctgtggaaattttggcattccatgtgaacttcgagtaacatctgcgcataaaggaccagatgaaactctgaggattaaagctgagtatgaaggggatggcattcctactgtatttgtggcagtggcaggcagaagtaatggtttgggaccagtgatgtctgggaacactgcatatccagttatcagctgtcctcccctcacaccagactggggagttcaggatgtgtggtcttctcttcgactacccagtggtcttggctgttcaaccgtactttctccagaaggatcagctcaatttgctgctcagatatttgggttaagcaaccatttggtatggagcaaactgcgagcaagcattttgaacacatggatttccttgaagcaggctgacaagaaaatcagagaatgtaatttataagaaagaatgccattgaattttttaggggaaaaactacaaatttctaatttagctgaaggaaaatcaagcaagatgaaaaggtaattttaaattagagaacacaaataaaatgtattagtgaataaatgcttctctagatccatattaataaacatgagcatctaacccctcctttcttaggctagacaccaagatatttcagccagcctttatcattcctcttactttatcctttttccttaagtattgggggtcactactattgagtttcttccttaacactgattaaatgatcttaactccctcagctaaaactggcattactgactcccagctatatttctccagacttgca

SEQ ID NO: 113969 - DNA, 1417 bp, Homo sapiens
ctcaggacctgtctttgtccctcctcttaacatacttgcagctaaaactaaatattgctgcttggggacctccttctagccttaaatttcagctcatcaccttcacctgccttggtcatggctctgctattctccttgatccttgccatttgcaccagacctggattcctagcgtctccatctggagtgcggctggtggggggcctccaccgctgtgaagggcgggtggaggtggaacagaaaggccagtggggcaccgtgtgtgatgacggctgggacattaaggacgtggctgtgttgtgccgggagctgggctgtggagctgccagcggaacccctagtggtattttgtatgagccaccagcagaaaaagagcaaaaggtcctcatccaatcagtcagttgcacaggaacagaagatacattggctcagtgtgagcaagaagaagtttatgattgttcacatgatgaagatgctggggcatcgtgtgagaacccagagagctctttctccccagtcccagagggtgtcaggctggctgacggccctgggcattgcaagggacgcgtggaagtgaagcaccagaaccagtggtataccgtgtgccagacaggctggagcctccgggccgcaaaggtggtgtgccggcagctgggatgtgggagggctgtactgactcaaaaacgctgcaacaagcatgcctatggccgaaaacccatctggctgagccagatgtcatgctcaggacgagaagcaacccttcaggattgcccttctgggccttgggggaagaacacctgcaaccatgatgaagacacgtgggtcgaatgtgaagatccctttgacttgagactagtaggaggagacaacctctgctctgggcgactggaggtgctgcacaagggcgtatggggctctgtctgtgatgacaactggggagaaaaggaggaccaggtggtatgcaagcaactgggctgtgggaagtccctctctccctccttcagagaccggaaatgctatggccctggggttggccgcatctggctggataatgttcgttgctcaggggaggagcagtccctggagcagtgccagcacagattttgggggtttcacgactgcacccaccaggaagatgtggctgtcatctgctcaggatagtatcctggtgttgcttgacctggcccccctggccccgcctgccctctgcttgttctcctgagccctgattatcctcatactcattctggggctcaggcttgagccactactccctcatcccctcaggagtctgaacactgggcttatgccttactctcagggacaagcagccccctttgctgcctgtagatgtgagctgttgagttccctcttgctggggaagatgagcttccatgtatcctgtgctcaaccctga

SEQ ID NO: 113970 - DNA, 1187 bp, Homo sapiens
tttcgtggaagctgatgtgttattccttctctgcatcgaaggatcaggaagtttgtgctctctgcgtggctaagtttttcacctactaggacgggggtggggtggggagaacaggtgtccttctaaaatacagcacaagctacagcctgcgtccagccataacccaggagtaacatcagaaacaggtgagaatgaccactttaactcaccgggcccgtcgcactgaaataagcaagaactctgaaaagaagatggaaagtgaggaagacagtaattgggagaaaagtccagacaatgaagattctggagactctaaggatatccgccttactcttatggaagaagtattgcttctgggactaaaagataaagaggggtacacatctttctggaatgactgcatatcatcaggcctgcgagggggcatcctgatagagctggccatgcggggtcgaatctatctggaacccccgaccatgcgtaagaagcgactactagacagaaaggtactgctaaagtcagacagcccaacaggtgatgttttactggatgaaactctgaaacacatcaaagcaactgaacccacagaaactgtccaaacatggatagagctactcactggtgagacctggaaccccttcaaattacagtaccagctgagaaatgtacgagagcgcatcgcaaagaacctagtagagaaaggtattctaaccactgagaagcagaatttcctgctatttgacatgactactcatccagtgaccaatacaacagagaaacagcgactagtgaaaaaacttcaagatagtgtactagagcggtgggtaaatgaccctcagcgtatggacaagcgaacactagcactcctggtgctagcccactcctctgatgtgctagagaatgtcttctcctctctgacagatgacaagtatgatgtggcaatgaatcgagccaaggacttagtagaactggaccctgaagtggaagggacaaagcctagtgccacagaaatgatctgggctgtgctggcagccttcaataaatcttaaagccggcaggtggatttctccttttcccctgctggctggggactgtcagagaccccatcactgagttttgtgtgatgagatgttttcatcaattttggttccttttctttgatcaaactgtgaattgggagagcaatt

SEQ ID NO: 113971 - DNA, 560 bp, Homo sapiens
agctcgtgatctcaggatgtatggaaaaataatctttgtattactattgtcagaaattgtgagcatatcagcatcaagtaccactggtgtggcaatgcacacttcaacctcttcttcagtcacaaagagttacatctcatcacagacaaatggtttgttttcatttttatttttaaattgtggctccgaaatcgtttttgtgatgcaaccctattttaggggacctgtcactgcagagaaactgacaaacactgagaaatgcgagctaagtagacacagcctactaagtagacacaattcctactacagaggaattcttgcctctgaaatatctcacagaaataatactgtgagttaaagaaattaaaacaatgtggcaaagcacagaaatgatgcacgtgaccatgaaatagtgggccagataaaggggacctaatagtgcggtggtgcggagggtctgtgggcaaaatgagttcagctcagacctgggctcagctctatcccagctgctgacccagggtgagttgccctgcagggtattgctcgtgccgaattcttgg

SEQ ID NO: 113972 - DNA, 1659 bp, Homo sapiens
  misc_feature (1)...(1659): n = a,t,c or g
cgagatttcgtcgctgctagctcgcggcgacgtcgggccgattttcccaggatgacagagctgaggcagagggtggcccatgagccggttgcgccacccgaggacaaggagtcagagtcagaagcaaaggtagatggagagactgcatcggacagtgagagccgggcagaatccgcacccctgccagtctctgcagatgataccccggaggtcctcaatagggccctttccaacttgtcttcaagatggaagaactggtgggtgagaggcatcctgactttggccatgattgcatttttcttcatcatcatttacctgggaccaatggttttgatgataatcgtgatgtgcgttcagattaagtgtttccatgagataatcactattggctacaacgtctaccactcatatgatctgccctggttcaggacgctcagctggtactttctcctgagtgtaaactatttcttctatggtgagacagtgacggattacttcttcaccctggtccagagagaagagcctttgcggattctcagtaaataccaccggctcatttcctttactctctatctaataggattctgcatgtttgtactgagtctggtcaagaagcattatcgactgcagttctacatgtttggctggacccatgtgacattgctgattgttgtaacacagtcacatcttgttatccacaacctatttgaaggaatgatctggttcattgtccccatatcttgtgtgatctgtaatgacatcatggcctatatgtttggctttttctttggtcggaccccactcatcaagctgtccccgaagaagacctgggaaggcttcattgggggcttctttgctactgtggtgtttggccttctgctgtcctatgtgatgtccgggtacagatgctttgtctgccctgtggagtacaacaatgacaccaacagcttcactgtggactgtgagccctcggacctgtttcgcctgcaggagtacaacattcctggggtgatccagtcagtcattggctggaaaacggtccggatgtaccccttccagattcacagcatcgctctctccacctttgcctcgctcattggcccctttggaggattcttcgcaagtggattcaaacgagcctttaaaatcaaagactttgccaataccattcctggccatggaggcatcatggatcgctttgactgccagtatctgatggccacctttgtcaatgtatacatcgccagttttatcagaggccctaacccaagcaaactgattcagcagttcctgactttacggccagatcagcagctccacatcttcaacacgctgcggtctcatctgatcgacaaagggatgctgacatccaccacagaggacgagtaggggccacccagggccaggagaacaggaacagaactgagcaggggcaggtctccaaggcaagcccagctggtgtgacttagacaatgacgaggcttcaactcactgtcnnnnnnnnnnnnnnnngggggggtttttttatttggggggtcaaaaaatttggtttatccagtttttgggttaaaatttggggtggaaggaaaccaacggtttggggtgggagggnnnnnnnnnnnnnnnnnnnnnnnnnnnnnnnnnnnnnncctttttaaa

SEQ ID NO: 113973 - DNA, 1663 bp, Homo sapiens
tttcgtcactgtgtcccacccttcctagctttgtgcccggggtgctgagcccttccccgtcagccgggccgcgggaggagggagccgccaccgaggagctgccgctcgctgccccgggcaggggcacaggttgatgtcatatttttagtcttgagaaacagcatcatgccaaggaaagagcttgagctttggagtaatgcggccctgagattgaattctggctatgccacttattagctctgttctagattgcaaccaaggcaatgtcttactacctcagctcagaaaaccacctggacccagggcccatctacatgcgagaaaatgggcagctgcacatggtcaatctggctctggatggtgtcaggagtagcctgcagaagccaaggcctttcagactgttccccaaaggcttttctgtggagctttgcatgaacagggaagacgacactgcacggaaagagaagactgatcatttcatcttcacatacacccgagaggggaatcttcggtactccgccaaatccctcttcagccttgtcctgggtttcatctccgacaatgtggatcacattgattcccttattggctttcctgagcagattgctgaaaagctgttctctgctgctgaagccagacagaaattcactgagccaggtgcagggctgagggctttacagaaattcactgaggcctatggaagtttggtgctttgctccctgtgtttgcgaaacaggtatctcgtgatttcagaaaagcttgaggagattaagtctttccgggagctgacctgcctggatctttcctgttgcaagcttggagatgagcatgaacttctagaacatctcaccaatgaagccctgtctagtgtaactcagctccacctgaaggataattgtttatctgatgctggggtgcggaagatgacagcaccagttcgagtgatgaaaagaggccttgagaatctaacattattagacttatcatgtaaccctgacatcacagatgcaggcattggatacctcttttcttttaggaaactaaactgcttagatatctctgggacagggctcaaggacatcaaaaccgtcaagcacaagctccagacccacataggccttgttcactccaaagtgcctttgaaggaatttgatcatagtaactgcaagacagagggctgggctgaccagatcgttctgcagtgggagcgtgtgactgcggaagctgtgaagccacgggagacctcggagcctagagcagcagctcagcgcttctatgggaagcggtctcgagcagaagccccactgaagtgtcccctggcagacacccacatgaactcttccgagaaactccagttctataaagagaaagccccagattgccatgggccagtgttgaaacacgaagctatctcaagccaggagtcaaagaagagcaagaagagaccttttgaggagtcagagacagaacagaataactcttcacaaccttcaaagcagaaatatgtatgtcttgctgtggaagactgggacttgttaaattcctattgattagtagatacaagttgacctttctctggcccccagctctagtgtttgagtaaaggagactgaggatgatttactttttggttggaattacctatggcattagcatagtaagg

SEQ ID NO: 113974 - DNA, 362 bp, Homo sapiens
tttagttcgcgtccagcacctacgtcccgctggggtcgccgccgccaccatgcccaagagaaaggctgaaggggatgctaagggagataaagcaaaggtgaaggacgaaccacagagaagatccgcgaggttgtctgctgtaagtgtatgcttttgaattttcgtgcttgtcccttgaactaaaaaacatcaaaaaacaattccctttgcttccatgaattatggttagtgcctgggtttgaaacattggctctacttgggactcttgcccctttggggtttgctgggtctgaaattctgatgcctgtagccaaagtgggacatttgaatgggcttttgggaaatcaacattctagaaaaaa

SEQ ID NO: 113975 - DNA, 464 bp, Homo sapiens
cggcagcgtcgacgtcaccgccatggctgccccgtgtttgctgcggcaaggacgagccggggcgctgaagactatgctccaggaagcccaggtgtttcgaggacttgcttctacggtttctttgtctgcggaatcagggaagagtgaaaagggtcagccacagaattccaagaagcaaagtccaccaaaaaagccagccccagtgcctgctgagccgtttgacaacactacctacaagaacctgcagcatcatgactacagcacgtacaccttcttagacctcaacctcgaactctcaaaattcaggatgcctcagccctcctcaggccgggagtcacctcgacactgagggccctcggtgtgaagatgaaccttccaccgtcttcactgcatcctggagtgcaaaaataaaatccactcaagagtcacaaggcccgctgtgcataatcggtttcacttttacc

SEQ ID NO: 113976 - DNA, 521 bp, Homo sapiens
gggtcgacccacgcgtccgcggacgcgtgggggacccgccaacatgggccgcgttcgcaccaaaaccgtgaagaaggcggcccgggtcatcatagaaaagtactacacgcgcctgggcaacgacttccacacgaacaagcgcgtgtgcgaggagatcgccattatccccagcaaaaagctccgcaacaagatagcaggttatgtcacgcatctgatgaagcgaattcagagaggcccagtaagaggtatctccatcaagctgcaggaggaggagagagaaaggagagacaattatgttcctgaggtctcagccttggatcaggagattattgaagtagatcctgacactaaggaaatgctgaagcttttggacttcggcagtctgtccaaccttcaggtcactcagcctacagttgggatgaatttcaaaacgcctcggggacctgtttgaattttttctgtagtgctgtattattttcaataaatctgggacaacacggacgcgtgggcggacgcgtggg

SEQ ID NO: 113977 - DNA, 602 bp, Homo sapiens
tgtgcactccagcctcctctcactgccctgggttggcaccaggtgctgagtgggcctcaggccaactgtgggcatgggctcgatgccgctgcttcctcctccacatcaaggcatcagccgtatctcaccccaaaaggcagagaggaaatccagctaagtcccacgcccaagctctgtgctggcttctggaaatggctttggagccctgggtcctggcatggagctggtgcccatcagtagaattacttaatctatcgtgcaacccaggagtgtctggaagcttctctgcgtaccagagcaacgctgctcatctcctttacctgcagaaaggacaggaaaggagtccagccctactaaattcaactcaaaaaagccactgctcccctactgcaagccctcaggggcccgagcgccaggtgccaaacccaggccaaccccagggccagagcaaggcccctcaggttcagggggcctgggcagctggggccagacacacagaaactgccagagcttctgctgccatgctgagcatgtttcctcagctttaaaatggtgacctcaacagtgactggggctaggcaaggtggctctcacctgtaatc

SEQ ID NO: 113978 - DNA, 1054 bp, Homo sapiens
cacgtttccttggcgggttaaggaaagacaaacaccttggaattataaaagggggtggtaaagggtggcccccctaaaccacagggtttttccctttttccaggggaaccccttgtgtggaacgaacacccccgggccacccaggagagagagaagcccaagccctggcaagcctttcccaagggctgggatttcttcccagcacacgttcctgaggaaaccttcttgttgccaaggccggcaattccacaaaaccaggtggcacctcggtacagagcatgggtcagcccaaaccaagcccctccaacacagacaatcccccgtgggccagggagatgcacccaagcaggacggcccagctcggctgcagtcagctccggaggggtctgagggggagccctgatagggagcaacccacagacacacaacccacttacactccacgcagtctccaggcgctctctgccgagcctcctggggaagtcgcctcccggggaactctagcggtctaaaaccaacctttaaatttgaggtgtttcattttcctttgaatctcctaaactagtcatacattctaggagtgccttttgaaggaaacagatttttaggtccccacaaatacacagaggggcccaggcccacgacagcgtgaactggatccagctaccactgcaaggacggtggggatgagacccccagctgaccatgacacctggggaccccacgagctttctggaactgcttccaccaacactcacgagttttacaagtatgagaatgacaaatactaaaattgaatcaagaaaaaggattcagaaatgtgttatttttaaaacatacgtctgataggagtgtgtgttgctgtccttctggatggtgaactctgctctgcccagataccaaagcctcacccacttcctagagggtcaaagacttctctaaattcaaagttttgaatttaagcctaatcaaatgaaacaatcgaagcagggggagagctggaatggacagaaccgctaatttccagagtttgagccttgttaactatgtactt

SEQ ID NO: 113979 - DNA, 725 bp, Homo sapiens
  misc_feature (1)...(725): n = a,t,c or g
gaatgactacaactctatgtccgtacccgcacatcttgcttacggaggacagggaccatcctgctcatctatttatccccaacatctactgtggagcctggaactcgtgatgcctgtggcttcatggatgcaaggatggaaggatagatggaaggatggatggatggatgaaannnnnnnnnnnnnnnnnnnnnnnnnnnnnnnnnnnnnnnnnnnnnnnnnnnnnnncaaatggataaatggatggatggagtaaatgtcatacgaaaagtgcagataaaattctaatattcagagaaaagagagctaaatttaggtgggagagtttaagaagatgctcataggagaagaaagctcttacaatgggtcttaaagatggatggagtagccataagtaaggaggtgaatcacaggaagatactgcggtgggaacagagagctgctgtccatggtaagggcagctgtagcctcatgcaaagtgcctgcatttgaggatgagaagctggcctggggcacctgcanggctccgggcttgtgatgctgcttggggctgtccaacacttcatggtccatgcagaagggctcagacctccctggcatccccggccttttnttcctttttttccccccttttctccccccnnnnnnnnnnttttttnttttttnnnnnnnnnnnnnnnnnnnnnnnnnnnacccccctctttcnnnnnnnnnnnnnnnnnnnn

SEQ ID NO: 113980 - DNA, 1790 bp, Homo sapiens
agaggcctttccgggggcgggcccggtgtccccccaaaaggcctcaaacttttttaaaaatatgcccttcttttcccacaaccgtgttggtgaattttttttaacccccccacacccccctggccttaaatatccgccagcgccccccacaaaatcctcttccctgtattatgaaaaaaagaggttccctctctccgcgggctctcttaatgtgtctgggactatcttaattggtttgaaaaacttattttggggtcccaacatttttaacccgcctatttcttcttttgaaggagggccgttcttataagctttcccaggaaataccggtatatttccaagaacttgagttctttctgagagtaatagaagtgatatacttcttctccaaaacacttcagcatctaaagctgctgtcgaacacacatttttcattctccagacatctcttcataggaaagccccccaagagggaatttggtgcaaggctgggtgaaagtggagagcagggactatgggcaagccgtctggagacatcccaacaccatgcctgctctgaggatccaattaagtggggaaaggcttggtggctcagtggatagttcacagcgcatgtctgggttcagctgctcacccgcgtgccctggggtcaaacaggcccatctctgcctgaaccagaagcaggccgggaagtttctttctcaaaaagagatcagccactgaaggagaaggagccttggctgcgaagcttcccaaaccccttccgtgacagtgctgctgggctttggagataccctttcccttaaaaacctccgaggccaatgagatctgctggggccgccagatctgctggcttctaaggggccacttcaggttgagtctatcaagaccctttgtcattccaataaatccaagccgttgttcaatccaatgacttttccccctttccaagcaagtgaaaaagaagtgacccttctgggaaaggaagaaagttggtgaaatgacacgggtcttgatagacacaccctgacatagactaacagatgggttagtctaactaacagagaggttagtctatgtcatgcattaaactttcctttactctgggtccaaaccttacaaaggtcctccatggaggtcagagattggattccccacccggactctcctcgctttttccattctggttttttttccctggctggggagtggatcctccaaggcccttagggggcccacacagacccctccccaccttttgtgggctgggcaaaaagcctttgcccaacaaaatacaaagggccttccccccgttgtatacccctttaagaagacagggggcttggtgtaacatgttctctgaaacaccgtgtcgcagggccctgacttaataagtggctctttaaccttggaatggcttagaataaaaacgggcttgcccaaagggttggggtttggaaccaccaaacctgggcccaacttttctttggggatgaccgacaatccatccaatccatcgggtggcagccccacttcctcagcagagacaacattctgttacaccctttcttcatgctgagagatgttaaactcctctgggatgaactccatgcttgcagaaacattcttccaaagagacaacttcgcttgtgccccgccggagacactcgagatggtgtgaaaagcgcagttcctatgagaccgggagatttggtggttctcccccacgaacggtgggggtcgtgttttctaaaagagggggaaaagggaaagggaattttttctaaacc

SEQ ID NO: 113981 - DNA, 1233 bp, Homo sapiens
agcttggagattgaccaagcagccaagaaacccaagaaaggcaaagagatggtggataaccagaaacaagtcaaatgtccggaagatcaaggtgaacgggaggactgtgacattttcacaagctaatgaatttcgttgctgtcgtgatgtgaaaccagcaccagtgtctgctggccacgccccttgtcgcgcatgcagcacagggtcccccagcagagcccacaggcctgcggctgtgctctgaacaccaaagactgcacgcgtggccgccaggtcccagaagaccttctctctggccaccaaagaacggtaagtggcattcagggaagaggacagctggtggcagaccacaaagacgcccaagtagaagacaaagccagcgaccatcagcgtggagcggatcccccaggatgcatagaccactgtcaaaaatgctctctgatgtgcccccatcgctcgcaggattcattgtccacagctatattccaaaaggagtgctggggccaacacggggccgggcccttacctggggctttgtctaaggaaatgaagtcagtgcagcgggtcccttgaattgtcacgctatccatcttcaatctaaaagaaagctcattcaatttggtgttgactcgatagaaacaaggacacatcacttaccccagtaacgcaaacattaaactacaaaatatttaattctgtaccttattcttaatgaacttacaaggatgcataaacataccaaggtaacatccactgaccgtataggaggaaagaaaatgaaacttaagcgttagaggggccaccaccaatcagaaggccgaatcgttgctggcaggaacacacggtcctatgctcgtcctatgtgcaccccaccagcaagtctcccgccttcacagcagtcccaatcagtcacacaattcaggcatcgcaggatgaaacatatttaagtcattacactgggatacactttgttacagcactgaacttctgctgtttgatcctagttaacaccccaaggatgtcacgaaaacctgtgctcccgggcttcaagggatttccctggtaaagccatggaaggcttttcaacagaacaaggaaaggctgaacttcctccttggacctacggacctttgaaaagggaatataaattatcctttcttgtttcactctaaccatccctgcattcacttcatgctatactttcaatctttgaaaaattacactctctggacc

SEQ ID NO: 113982 - DNA, 345 bp, Homo sapiens
  misc_feature (1)...(345): n = a,t,c or g
aatgaggagcctggaactcgggatgcctgtggcttcatggatgcaaggatggaaggatagatggaaggatggatggatggatgaaannnnnnnnnnnnnnnnnnnnnnnnnnnnnnnnnnnnnnnnnnnnnnnnnnnnnnncaaatggataaatggatggatggagtaaatgtcatacgaaaagtgcagataaaattctaatattcagagaaaagagagctcaatttaggtgggagagtttaagaatatgctcctaggagaagaaagctcttacaatgggtcttaaagatggaaggagtaccccttagtaagggagtgattcacagggaagatactgcgggggga

SEQ ID NO: 113983 - DNA, 715 bp, Homo sapiens
actgggttttggtgaaagacaccgttatgagttgaattataccccattcacaaaaaaaaggtatgtgggaaacctaaccaccccccatacctggaaatgtgactttatttggaaaaagggtcttgtttatttccaaaaagggaatgaaattaaatcaaattcaaataaggccatgagggaggatcctaattgatgacagtcatgtggttttataaaaaggggaaactgggacacaaagagagacacacagaggagggacaccacgtgaggactggagctccaccaccgagccgaggagccactcagcccaggggccacccagccgaggggccaccggaggccagatccaggcccagctgggacagaccctcccctgtaagccttcaggggagctcatccctgcggtcaccgggatctccgacttgtggcttgggagagaagaccgtcctattgtttgtggcactctgttatggcaggcctgagcaaactgatacagaccctaaagcgagaggggtgaacacaggtctgaattttgaaggcaccaaagcccacgtttgcattccagttctgaagcttactgatggtggcaccacctgatttctctgagcttattttcttttcatttatttatttttcagagggagtatcattgtttcgcccagggtgtagtcaatcggcatgatctacgggtacggacatcgaattcgtaatcatt

SEQ ID NO: 113984 - DNA, 852 bp, Homo sapiens
tacgagattcaatgtccgtacgccgtagatctttgctactgggacaagcttgtttacacacagattgatagcgctgtctctcaagagcccacgtgttttgcagtcgctgcgggaggccaagcggatggagggcttcttcccccagtggctcctgcctctgagcaccaagtgctaattggtgacttgatgagctaatcagtgctaatgcgcgaggttgcactcccctgggatcttaatgcctgaagacaaccgagaaaacaacctccttgcccttcgggagaggctgctggctggcgaggggggccgtggcctggggaacacatctccctcctccttctcctccatccccctcctccttctcctctcctggcaccagtgatcttatttcctacattcttagacaaggtttatccccttcctgtacccctcccagctatcccctgcccaggagctgtgaaacagcaattcattgcaggtctcaaaagacttagaaattgagctgctttataggactgtaagggcacggagggatttctgtagaggagaggccagaaggaatcatctttgaacttttggctcaggaattcagctattatttcttagttactaatatataagattaacattatatgataaaaccacaaaatgttttcaagtacattgttttatttaatcatcaaagtcaccctagtcaagtgtgggtgctcaatacatgtattctagaagtctaaaatacccacaatgtggttattatatagtcagtaaataagaatgatcgggctggtctcatgaaggcaccagtttggaaggagaatttgaggctggcagctgcaggtgtgtaaaagccttggc

SEQ ID NO: 113985 - DNA, 439 bp, Homo sapiens
gattcaatgtcggtacccggagatcgtgaggattgttaatatcctgagctgagacgctgttgtttcctggcgcacgcagagtctctaagcttcatcccagccctcaccctctgtcaccccctccaatccctgatgggcaaggcgggggcagtcctcctgggactgatcccagagagcctgaactccaggcagcccctgaggccatgtgggggggtcgctgtgttagcagctcctgctggctgtggggtgacgagggcccaggcccaggcacccgtgggacccctcagagcaggccgctgggatgcactttcggagctgcggggctgcagctgagcctggaagctccagaaggaccaagttgcttggagaagcagaaggtgcctttccaggacagcagagctaagaggaggcacagactcagaaccagggtcaggctgcg

SEQ ID NO: 113986 - DNA, 363 bp, Homo sapiens
  misc_feature (1)...(363): n = a,t,c or g
aaaagnttatcgnngggggggggaatatggactttatggctcaagtgcaaactctgatgatgaccagtcagtttgaggctgcattgaagaaggcgaacctgaaaggctacggccgataattggccgccctagaagctacggagagtaaaaatgaaagttcgtgcttccgtcaaaaaattatgccgtaactgcaaaatcgttaagcgtgatggtggcatccgtgtgatttgcagtgccgagccgaagcataaacagcgccaaggctgattttttcgcatatttttcttgcaaagttgggttgagctggctagactagccacccaatcttttgaatgtctgtgcctttccatttgaaaatcccgg

SEQ ID NO: 113987 - DNA, 453 bp, Homo sapiens
tcattactaattcacagcgtccgtacctcgagatcgtgaggactgttaaatccactgagctgagacgctgttggctcctggcgcacccagtgtctctaagcttcatcccagccctcaccctctgtcaccccctccaatccctgatgggcaaggcgggggcagtcctcctgggactgatcccagagagcctgaactccaggcagcccctgaggccatgtgggggggtcgctgtgttagcagctcctgctggctgtggggtgacgagggcccaggcccaggcacccgtgggacccctcaaagcaggccgctgggatgcactttcggagctgcggggctgcagctgagcctggaagctccaaaaggaccaagttgcttggaaaagcaaaaggtgcctttccaggacagcagagctaagaagaggcacaaactcaaaacccaggtcaagctgctggc

SEQ ID NO: 113988 - DNA, 851 bp, Homo sapiens
tttcggactaaaaacccccgccccggcctccaaaaggttgggttcacagttgaacccatgccctggttttatgtccaattattttcttgaggcttaaaaaattattccggtgttttgtgccacccttgtggcttctgaaatctcgaaaataacccttcctcttggccaagtgatctgctcttctacatagaaccttttggaattttctttgatatccatgttttttatctgccaattatagggtaacgttactccatccgggggggggtagacactctctaagccctttcaacttgagagctttcatctttaatttttctgattttacctttgaatatttttttctccatttttatttttctctgttcctggaactccattatctgtacatttccacttctttaattaccttacttacctttaaccattctttcatacattctctcttttcctattgcctttggggtgagttgcctctagcctgctcatctggctttggctgcatttggcctcatcatgttccttatttcaattatttcattggatgctagacattccttcttccctgctttatgtctctggtgtctgcctttatctctttgaatatgtttatttgtataaattcttggtgcatctgttttaaaactttgaacaggggaggctgaagtgggcagaacacccgtgggcggggtttgaaccacccggccaccagggggaaaccggttttataaaaacacaaattatccgcggggggcggcggcccggacttccgtcttggcgggagggggcggaaatcccgggcgcggaagagaggccaggcgttccgatcacccgtgcctctggttgggcgg

SEQ ID NO: 113989 - DNA, 1055 bp, Homo sapiens
  misc_feature (1)...(1055): n = a,t,c or g
agacgtccatgattaccgattcaatgtccgtccccgtacatcgaagccacgggcactaaccgatggaggctcccacacttagtgcccatgcaaacgattcaatcaccactgtgacccgagcacactgtggtctcagcacaccgacctcgccgggccagcgcaaggtcttggttcacccaccacattcttgccccctcatgatggcggcccctcagcagcaccattcttggcctcggctgccctggccggctcagtctctcggctcagagcagcacagcaaaaggggaagagaaagggccctggggtgtgtggccgggtaacacgggacagtaaacgtcctcggttgctctctacttggcctggaagtggagacaatgcttgccccacagctgccgggcctgtgagccagccactggcacgctggcactggctgtctggagtcgcttctcctgcaatgggaaggccacaggttcagacccagcacggccaccacacgagcaggcaacttgcctggaagacgacacgatgaacccacaggactccattgaccttgacgctggcccccgtctgatcttggcagggaagggagggcaccaagaccgccaggggctgagctgccacctggtgtcggtcctggcaatgcctcattatggagaattgatgaagaaaaatggcacgtatgaggatttaaaggtacatttgccaacaggcatatctcgggacctcactctaacaccctaccactctgtcattacgccaggagtgatcatctctacgttctgtggatgcagaaattgaggcctggggaagttaagtttgttctctgccgccacagaagagttagatctccgtgaagctgagcctcaaccccgtggctggagctctgtgtgctctgtggtgtggtggtgtctgtttgggggaggctgcatttgagtggcacctcgtttcttttcttttctttccnnnnnnnnnnnnnnnnnnnnnnnnnnnnnnnnnnnnnnnnnnnnnnnnnntcacattgttagctccaggtttcttccactccccgggatgta

SEQ ID NO: 113990 - DNA, 414 bp, Homo sapiens
actcgtgaactgcattacaaattatatgtccgtccctggacatcatcgatactgggaaaacactggtaacacccaccttggtcaacttgcttggcagggtaactaacgttatccttgggcgtttctttccattgcgtaaaacatcgcgctggcaagagaaagctaccggctggctgaaacgctatggtgcagtcacgctattattaaactggatgcccgcggttggcgatttactgtgtctgttagcgggatggatgcgcatctcgtggggaccggtaatcttttttttgtgccttggtaaagcgttacgctatgttgcagttgcagcaccgaccgttcagggcatgatgtggaggcactaattgtaggcctgcacatatggtcaccattacagttatgctaattaaaacgatt

SEQ ID NO: 113991 - DNA, 801 bp, Homo sapiens
ccaaaagacttgcaatccctagggtgcctttagcggcctccagttggttattccctaaaaaggagggccttgtgcccaatccaaagcttaaatggaaaaagcccttgtccatccaagggtaaagggagggtttcgtttttttttcccagaaaaaaggcctgggccttgtgtccccccggttccctgcctgaacctgactgcacctgctgttcctggtaaaaagccccagcccggggcttgccataattccctattctcctcacgaagcccatagctgttgggaaagaccagtcccagggtccttcccacgtgtaagtgtcttcctcaggcgtgtccagagcactgtggctggattgctctttcccggaccatctctcagggctgtgcgtgcagggagccatcctcgagggaggaggaaatgtgtcccccgcggacaaggagcaggcatcgactgtctgctatagaacagggtcccagcgtccgtgtgcctcggccgggacacagagccagcgtgcacccggcaccgagctgagctgttccacccgggccctgtgggatgtggggccaagggaaccacagattcctggccggggtgttttttggccacagtaagaattaaaccttgtgtttttgatcaacgcgtctcccgacttttagcagcgtcaatgaaatagcaaaaggcaacttattagcttgtaagtaaagtgaaagaaaatccgtgaccttgtagttcaatgtaagtaaggcggatctttatttaaactttcccctgaattgcttaagggctttactttctgtgct

SEQ ID NO: 113992 - DNA, 1509 bp, Homo sapiens
  misc_feature (1)...(1509): n = a,t,c or g
gggtaggagccgcattcccaccccgaaatgcgccaggcctgaaccccggcaacccgttgttcttggtgcctgaaccactgccatgcattggtcttggtgctggccctcgggttgggtagggacccacaatcctcaccccgctcaggggaaactccaggtgccggggtataaagggttcccgtggcgcggccacagaccagagccggggtatcctgtgcccatcccaccccctcattgctatcaaggctgccggcttcctggccccacaggtgtcgttcatgctcagctagctcaaactgatgcttactgatccacataggctctggaggttcacagagcaacttccagtcaaaggagcccttgtttaatggcaggaccaaccggcagccctttgaaggggtcgttttctaagatccgtgggcagagggcaagccatggatgttcgggccgtaaactgcagggggggaatcctgtatttgcttgggctgtgaactgcaggggcggactcctgtatttgcttgggctgtgaactgcaggggcggactcctgtatttccttttccattagggtcaccttaagattgagagttataacatccagtagtgtgggcatggttccttccatccttctgatcaagctttatgggagacgttgacatgatttaggatatattcatttgactctgaggtgtaagtcagaggtaacacggtcttaactcttgtcagttgcctttgctttattgttttattaattttttaattgaaagtcactttcttattccttagaaggagagacattagtaacttcaggtatgcatatctgacggatcaatgtctgcgcactcactatttgccatgtgcaatggaaaaaataacctctcatcatcaaataaaataccacgtacagaattagccctccccttgaaatcttggtagtaaagatttcattctgatccaactttcgtaatagatgtcattcacaattaggtgtcccgtgtacgcacatgcacatatggagagacacactgactgtgaagatgtgtaacaaatgctacctcctgtacaggtcacaagcattttaaaaaacagggccaacaacaatcttcaagtcttgggctcttcattttttcactggaaaaattattcctttcaaacattgtttcatctaagaagctttgcattcttaaagaattggnnnnnnnnnnnnnnnnnnnnnnnnnnnnnnnnnnnnnnnnnnnnnnnnnnnnnnnnnnnnnnnnnnnnnnnnnnnnnnnnnnnnnnnnnnnnnnnnnnnnnnnnnnnnnnnnnnnnnnnnnnnntaagaaaccaattttcccgggctgggggggaagggccgtgatttccagtttcttgggaaatggagggggggaaataacttaaacccgaaggcgagggttccatgaactgcaacaccctttgcactccacccggggacagagtaactccgtttnnnnnnnnnnnngggtggggcaaagggggcccataaaaa

SEQ ID NO: 113993 - DNA, 405 bp, Homo sapiens
accggacagatagcgcagatcgttgagtcggaaaaatggatcaacgaggacggcatctgcgaccggacattcgacctggttacgaagccaaaggtcattacgccgcagggtaaatctcggctgttcacccggcgcgccatagagcagtcgcaggaaggcaggcggcatgagtgcattgaacgtgcagcacgccgtcgccgctttgattgctcaagggcctctatatcgacgaaatggagtccatcttatgactcacgctcacgacgacatcagcgtaggcacactgtgcctccccttcattggtaactgctggctaataccatggggtgaagtggtcagcaatccattaaaggcgcagcggctcgctgaggaatatcgggaaaggcaggaggcagcatgagatac

SEQ ID NO: 113994 - DNA, 713 bp, Homo sapiens
actgggttttggtgaaagacaccgttatgagttgaattataccccattcacaaaaaaaaggtatgtgggaaacctaaccaccccccatacctggaaatgtgactttatttggaaaaagggtcttgtttatttccaaaaagggaatgaaattaaatcaaattcaaataaggccatgagggaggatcctaattgaatcccgccagggttcttataaaaaggggaaactgggccccagagagaccccccccgaggaaggcccccccgtgaggactggagctccacccccgagccgaggagccactcagcccaggggccacccagccgaggggccaccgggggccaaatccaggcccagttgggacagaccctcccctggagcctttcggggagctcaaccctgcggacaccgggatctccgacttctggcttgggagagaagaccgtcctattgtttgtggcactttgttatggcaggcctgagcaaactgatacagaccctaaagcgagaggggtgaacacaggtctgaattttgaaggcaccaaagcccacgtttgcattccaggtctgatgcttattgatggtggcaccacctgaattctctgagcttattttcttttcatttatttatttttcagagggagtatcattgtttcgcccagggtgtagtcaatcggcatgatctacgggtacggacatcgaattcgtaatcatt

SEQ ID NO: 113995 - DNA, 1663 bp, Homo sapiens
agactggcgcgcatatggacatgttgcactttccataaaggcctcacaataattttaccactcccaacggtgtcggttcaagtgtggaagattatggagtccccggaaaaaaaaggtaagggcttccattcagggccgggttcccaacaaaccccccttttttcatgccataaccgacttgttcaaaaaaggccaggccacgggggtttccattctttttgcggccaccacacgagcaattttccctctatgtatgtgtgcacatgtgtatacgcacatgtgtgtgcgtgtgtgtgcatgtgccgaaaatggggcagaattgaagccttgggcatgggtggtaaataatagggtctcccctgctctgtctcttctatataagcctttcagagagcctctagccaagatcacaagcaaacctgcagcctcattcctgacacggggtctcacctatgaattatctttatcaaacttggtctcattgtgtaaatattaagctggcttcccacagggaaagttttaggcctggttatggactatctcctattcaatataccttctagtatgggccctataagcaaggggccttttttatccttaatggaaccgttgaatgaattaatcttcctgtagatccatcagcctcaacccttaaaataggctgaaatttgcccattaattctgaaccttggcatttcacttcttccgtgatgctgtcatcagaagaactagtagatagttctgagttagcagcaaagacatagatttcctcacacgttttaaagacgtcctgaggaaccataaatggatttttctagacaaatgttattaattaaaatgataaagaaaatcaagtcagcatcctttggggaagtggtgtttggtatccagcaaggatgcacacctgggtcatgagaacgagagccagatctagtggtcatcatcatcggctcctcccagaaggtgaccagagccactagtggagttccaggccagatgcaatggattcaccaggttccctttttatccaaaacaacaggggagtgagggtgggagtgcacagggtccacgtaagccatgcgtgggacaggtccacataagccatgcatgggactaggcagggtcacttaaaccatgtgtgggacaggtccatgtaagccatgtgtgggactaggcaggtccacggaagccatgcatgggacaggtcccacgaagccatgcgttggactatgcaaggtcaagtaagccatgcatgggagtaggctggtccacgtaagccatgcatgggacaggtccacgtaagccatgcgtgggactaggccgggccacggtaagccatgcatgggacagggccatgtaagccatgcctgggacttgacaggtccaagtaaaccatgcttgggattagacagggtccagtaagccatggcttgggaaaagggcatttaagcgcctggctgggaattgaaaagggtccagaaaaccatgggtgggacaggtgcatgtatacccttgctggggacagacaaggtcatgtttaccattcgggggacacaggtcatgaaaaccattatgggaaaagtgtggggccctatatcagtggttgggagagtcccaataaccattgttgggtcaaaaaagttccattgcgcttgttgtgcag

SEQ ID NO: 113996 - DNA, 660 bp, Homo sapiens
  misc_feature (1)...(660): n = a,t,c or g
cggcacatagaatacgcattcgtcgcacacgcgtcagatgtacaccagatactagcataacatcacatataccacaatcgacacgagccaatccatcgcacaaaccacaccacacccgacgagcgcataccataagtcctaacgatctcgatagtcgaaagttcacactaggaccagcgtataaaccctaaaccatatactacgacaaacaaatatcacctatcctcccactcttcacattcccacccgtacaggttcacccagacacatacatactcacacacataatgctgacatacacacacactcacatacactcttgcacacacagctgagccctttcagaataaaccaccatactgtcactcgagcccagtgcttcagcacatttctcttaaaaacataaacnnnnnnnnnnnnnnnnnnnnnnnnnnnnnnnnnnnnnnnnnnnnnnnnnnnnnnnnnnnnnnnnnnnnnnnnnnnnnnnnnnnnnnnnnnnnnnnnnnnnnnnnnnnnnnnnnnnnnnnnnnnnnnnnnnnnnnnnnnnnnnnnnnnnnnnnnnnnnnnnnnnnnnnnnnnnnnnnnnnnnnnnnnnnnnnnnnnnnnnnnnnnnnnnntaattagcctggcagcaagattttcccatgtagccacgatcta

SEQ ID NO: 113997 - DNA, 592 bp, Homo sapiens
  misc_feature (1)...(592): n = a,t,c or g
cccatagtggtggtgggttccatccgttggaggtcgaagaataaccaaccgggttaggctgtgccagcctccctgacaggtgctcaaggacatccgctgtgggcctaggtgcaactgtgtcnctgggatgacacaggaagcaatgtggggtttttgctgccagtaagctcccggtctagaagaaaaagaagaagctccttatctgtgtttcccaggtacgcgtgccaattatatgtctgtatccttatctgtgtctacatatacacctacatctacatctacagtcatatcaatatctatacccatacccatatctctatatttctacatctatacccatatcacagctgtgtctatatctgttaagtcattcttgnnnnnnnnnnnnnnnnnnnnnnnnnnnnnnnnnnnnnnnnnnnnnnnnnnnnnnnnnnnnnnnnnnnnnnnnnnnnnnnnnnnnnnnnnnnnnnnnnnnnnnnnnnnnnnnnnnnnnnnnnnnnnnnnnnnnnnnnnnnnnnnnnnnnnnnnnnnnnnnnnnnnnnnnnnnnnnnnnnnnnnnnnnnnnnnnnnnnnnnagagtgggttgggggag

SEQ ID NO: 113998 - DNA, 595 bp, Homo sapiens
tcttcttcaacagagcgttgaacccttagggaagggctcttgagaaccctattaggtatgaacccgggccaaagcccttcaaaaaaaaaccaatggtcctcccccaaaagtcttcccctatataggcacaagccctttaaagcacaaaagagaaagggaacacccaccgaaagaccccgcgtgcttgccggaaggctccttgaggacgagagaagatgaaaactcgggaaggcagctccctaggcaggtcttccgtgatatgcaggaactatcccggctgggaatgtgacggtgagacgtgacaccgcgaaggatggcagcacgtgcacaaataaggggtgaaggtcaagggtgaggtctggaaacgggctggcgtggccgggagggggacttcctggaggaaggtgcagggcaggaaatgggagcagggcccctggatggggccggatccgaggggagggcaggcacctaaactcttcgagtacccaatggcgtgccgcatgacacttgctatgaccttggcatcaacacgggacccggctcgtgatgggcaaactgcacgaggataaaaactgttcccctgagatgttaggag

SEQ ID NO: 113999 - DNA, 590 bp, Homo sapiens
  misc_feature (1)...(590): n = a,t,c or g
tnnnnnnnnnnnnnnnnnnnnnnnnnnnnnnnnnngcgtnnnnnnnnnnnnnnnnnnnnnnnnnnnnnnnnnnnnnnnnnnnnnnnnnnnnnnnnnnnnnnnnnnnnnnnnnnnnnnnnnnnnnnnnnnnnnnnnnnnnnnnnnnnnnnnnnnnnnnnnnnnnnnnntttggccccttttgtggggcccagaacttaatttttgggccggggcggttaaaaagggaccttttttgacacacctggggaaaccctaaaagggtgggctttttcatggggtagaagtttccccccctttatttttgccaaaattgaggccaccatggggatttggccattggggccttctcccttttggacagcctttttgactccaaatattgggccaatttttctaaaaggggttgcgaatggagggggcttcattcccaaatccttctggggaaaggcaggtttttaccaccccttttccctggccctattttttcggtttttaacggggaggggcccctctcccctggataacttttctctttaaaacataaacacttcttattttcttggcattttttaggggatattttcctaaag

SEQ ID NO: 114000 - DNA, 889 bp, Homo sapiens
aacggttaattcctcacacgaaatacacgcgcagtccgacccgcctgacgattcctccctgccgtttttggctctcccgggggaacgcgtaacccttgacaaaaccccaaaggtcggtttctcccacactttccacccgaggtggggtgcgaccttagcccatccaagggccagcttgagacgccagtgcagaagaagcagcccctcccaccccgagagggcttctggggcaaaagccagccaagagtctgtgaaggctgttatggtgtgggtgcgggcccacgtggtcccttgacgaatctgccaccgcccagccgcgtggcaccaagaatgatgtggggaaggagagccagcagcactcagcggctgctgctcatcgccacactggcagctgtccatgaaacactttctaaagggaatttatctttggaatgagcaacagttctcaaccgttttcaaaccgcagcagttggctcaaagtcggagacagctgagctcgatgtaacctgcttggaggtctcatccctgaaaacaggtccctggtcacaccaggagctgccacacagctggatgctgcctagcaacaaacccaaattgccccaagggcttggggggttgatttctgcgggaagcgctgcaaatcccacatgcatctgctggttcagtgttccgggccaccttcctgagtggcaggtggcagggcagacacagggccaggatctgaaatccaatctgcctgctccaaaaactgcccttctcaacactgccacgcctgcctcaaagaaacacccaaagatccagctggccgcgttggctcaaaccagtaatcccagcgctacggcaggcccagtcgcgcgcgatctccgggtacggagcggacattcgataa

SEQ ID NO: 114001 - DNA, 1697 bp, Homo sapiens
agtacccgctcactcgttctgtccgggttgcagtcttggggatagctcttggagtggtgtgttcccctggggtataagccccggtcggaaaatcccaggtgaggtcctccccaaaactggggttgttaagggaaagagtctgggctaaccactccattaagttcagcccctcccgcaagccccgggggcaaggaagttccctcccaacttcttaaaaaaccaaataaccaaaaaagtcaagtaagtttaaccatccctagaggcttggacgagcagaacctgcctgctttgcaaaaagacggggaggggaaggagagcaagggccatctcctgaccagccccgagcctaccttgatagtcctcccacccacccagctccggatgatgctcccactcacaagattgctgcttttttcataaacccgggaggaactccaggccttttctccagctgtccctgaattctccttgtttccttccttcctaacttcctccatccaaggctgggagggccccagtttggaaatcaagaacccacgtccccctccacaccttcctatttgtgtagttctgtttcgagtctggactcagtaaatctctctgtcctcctggaccagggtgttggcgctccaaggcgacataagtagggtaccgtcagtgttttccagtcattacagatcccaagacactcctaggccctaggagccccagatctgaagggcagggccgccttctgccaggcttcctgcctgggtcacaaactcacatctgcctggactcccactgcgtggctctctctttctctctctctcccctctttttaactgtccactaggttttatggataactcctgagagaatgtcccagtctgcttaccatcacattgatcccgcccaccagcattgaggctctgcactgtctccccctcccttgcctgtccaaagccccttccacccgggaccgtcgcccctttacactcaggggtactggtccatctatgccatgctgagagctcaggccatgtaaaagtcccctggatctcaccccctccagcagctacctcttctctttctatgagaaaccacctagaaggacttcctacacacaccaagcccacacctcttttttcttgtggccttataggcccaaggcccaccacagtgcccctttgccccccacagtcacccctgccagggcaccggggggcaagaattgtgttcaccaaccctttcttcagaaagagcttttttgggagggatccggggagcccaaccttggtccccctcccatcatcctaacctcctcctggcttttttttccatctgtaggatcttcccaggcaaaggcacctgtaaatcacatccatacccaagaagctcccaaaatctcacttccagcccagacctgaatactgggtcagctgacaccttatctggagcatcacacactttctacaggccttaggcaacccacaccagggctttgctttcccccacaaggtgctcttcttcctgttacctccatctcggtgacagggggggggtcttctcttccggggtgtagaggcaaaaacttggggagattttcgtggatccttgtttttttaaaaccaatttccaatcccgaggccccgtcctgttgacctaaccttgttaataataaagccctgcgcccttttcctcctcttaaagggggg

SEQ ID NO: 114002 - DNA, 811 bp, Homo sapiens
cgtgcccaaaattccatacccgggaggaaagttacattattaaattgcccccccctcccaccttgctcaaaccacgtcctttcaaaaagggaccaaacccaaaaaggcccctccccaatccagtttgtttaaggccacaaaaaaacttccttggggcccccaaacgcccttgccttttccgccccttccgtggggacctttgccaagtttcggaagccgttttttgggtgctcatgcccttggttgagaagcaggttgctgctgctgaccttcagaggggagaagctaccaggcttccgacaatgcccagggcagccccacggcaatggcccagccccaacatcaattggtggtgagcttgaaaaatgtatatcctggaagaggacacacctccgcttaaaaactaaaactgtagagagagggacgctggcctcgaagtggacttttcgctgcccccaataggcctgctcttcagcttcaatctgttggaatgatatcaaagggcacgttggttgaccttaaggactttagtgcaggttttaaaaaagggtaatttctggcccaggcatggtggctcttgtctttattcctcacactcttgcgattgctagggtgctgggcgtcgtttggtcgcgaatattgacgttcctcgcccggccgggtatcttctgcgtcgtcttcttgttctcgttgtccagtgtagtgctcgttctccttatccctgctacttcgtggaggtcgtcacaatcgtgcgtctgttctctgggcgtcggtttgagcagcgtctgtcctctcactcctaccaatgtcc

SEQ ID NO: 114003 - DNA, 1198 bp, Homo sapiens
ttatcgaatgtccgctccgtacccggagatcgcgcgcgactgggcctgccgtagcgctgggattactggtttgagccaacgcggccagctggatctttgggtgtttctttgaggcaggcgtggcagtgttgagaagggcagtttttggagcaggcagattggatttcagatcctggccctgtgtctgccctgccacctgccactcaggaaggtggcccggaccactgaaccaacagatgcctgtgggatttgcagcgcttcccgcagaaatcaaccccccaagcccttggggcaatttgggtttgttgctaggcagcatccagctgtgtggcagctcctggtgtgaccagggacctgttttcagggatgagacctccaagcaggttacatcgagctcagctgtctccgactttgagccaactgctgcggtttgaaaacggttgagaactgttgctcattccatagaaaaatttccctttaaaaagtgtttcatggacagttgccagtgtggcgatgagcagcagccgctgagtgctgctggctctccttccccacatcattcttggtgccacgcggctgggcggtggcagattcgtcaagggaccacgtgggccgcacccaccgcagtacaggcattacagacttttggtgggtttttggccaaggagcccctccgaggggggaaggggccggcttctttttgaactggcgggtcaaggctgtgcctttgaatggcctaaagttcggacccaacctgtgtgggaatgtttgggaaacctgcactgcggctttgctcacggctcaccgttcaccctggagagccacagacaggcagggaggaatcgtcaggcgggtcggactgcgcgtgtatttgcgtgtggagggatgtgagcgtgtgccagtgaaagctggtgtcacatgtcacaagcgtaaccactcctctcttgaacatcttttgagcgtgccaggcggatgccccttcaggccagtcacagccgtggctcctgtgaacacatggagtggcagagaacttcccgtttctttgtagttatagcctgatgaatgtggggcccggtcacagccatggctcccatgcacatgcggagtgggagaccccatcccgtttctttataactttagcctgatgcatctgggtgcgggtgcagattagtttgggctgcgtcccaagacctcagta

SEQ ID NO: 114004 - DNA, 668 bp, Homo sapiens
  misc_feature (1)...(668): n = a,t,c or g
cgtggagaataaccaacggtttagctgtgtcagccttcctccgggtgtcaagggcctcccgttgtgtgcttaggtgcagctggtcactggaagggccacagaagccaatgtggggtctttgctggcagtgagctcccggtttaggaaaagagagaggaagcttcttttctgtgttatcccaggtacgcgtgccaattatatgtctgtatccttatctgtgtttacatatacacntacatctacatctacagtcatatcaatatctatacccatacccatatctctatatttctacatctatacccatatcacagctgtgtctatatctgttaagtcattcttgnnnnnnnnnnnnnnnnnnnnnnnnnnnnnnnnnnnnnnnnnnnnnnnnnnnnnnnnnnnnnnnnnnnnnnnnnnnnnnnnnnnnnnnnnnnnnnnnnnnnnnnnnnnnnnnnnnnnnnnnnnnnnnnnnnnnnnnnnnnnnnnnnnnnnnnnnnnnnnnnnnnnnnnnnnnnnnnnnnnnnnnnnnnnnnnnnnnnnnnnnnnnnnnnnnnnnnnnnnnnnnnnnnnnnnnnnnnnnnnnnnnnnnnnnnnnnnnnnnnnnnnnnnnnnnnnnnnnnnnnnccacgannnnnnnnnnnnnnnnnnnnnnnnnnnnnnnnnngagg

SEQ ID NO: 114005 - DNA, 668 bp, Homo sapiens
  misc_feature (1)...(668): n = a,t,c or g
ccccggggttttcccaatcgggggcggggacgttcgcggagggggagcatcgcaacggcatagtcgggacagcctcctgccagttttcatggcctccgcgtgcgcctagtgcgctcttgtcgctggtctgccaccagacaacaattgtgggttttgcatgccagtgagctcacggtttaggaaaagagagagccagcatctttatctgggttatacgaggtcggcgtcccaattatatgtctgtatccttatctgtgtctacatatacncntacatctacatctacagtcatatcaatatctatacccatacccatatctctatatttctacatctatacccatatcacagctgtgtctatatctgttaagtcattcttgnnnnnnnnnnnnnnnnnnnnnnnnnnnnnnnnnnnnnnnnnnnnnnnnnnnnnnnnnnnnnnnnnnnnnnnnnnnnnnnnnnnnnnnnnnnnnnnnnnnnnnnnnnnnnnnnnnnnnnnnnnnnnnnnnnnnnnnnnnnnnnnnnnnnnnnnnnnnnnnnnnnnnnnnnnnnnnnnnnnnnnnnnnnnnnnnnnnnnnnnnnnnnnnnnnnnnnnnnnnnnnnnnnnnnnnnnnnnnnnnnnnnnnnnnnnnnnnnnnnnnnnnnnnnnnnnnnnnnnnnnccacgag

SEQ ID NO: 114006 - DNA, 642 bp, Homo sapiens
  misc_feature (1)...(642): n = a,t,c or g
gggctcaatntgccccgcgcaagtgctcgccgggctatatcagcaaaggcagtcccgcgaaacagcgagtgatgtcgtagccactntgggagtgcagtgatgatgaagctgattaatcgcagtaagcaatcacctattggtcgccgcgcttgcgatgttgcgctggcagctcacttgcaaacatatggcgactatgggcgaagcaagatgaaagagacttatacggtgaagttgaaaggcgtaaaagtctgggtggaggtggtgaaccgaaaggcgagctacgtggccacagcgatgaccggcatgcgccgtctccgctccctgcccgggcaggttggttgaaaaagattttgaatggcccgaacgggcaactggagagagctatggatgatattttggtaacgtcagacctgaccagtcgctacaaaatttcacgcaaaaccctttggtcatggcaaagtgcagacacaatgcctcggggcttcgtatgcccgttcccaccccctgactggcccggcaaccctaaccgctggcgctctgagtcaatcaaagagtgggaggataaaaagaagataaattaactgaagggctctccgatgatctcttcaagatggctctgccaaacgcggagccagtgtttct

SEQ ID NO: 114007 - DNA, 624 bp, Homo sapiens
cttataaagtgccaacggcacagggggccaaccccctagccttccgggaagggctccccaccccaggggcgtcccggcccaggcttccccactccatagcattaccaggcacggggctccccacccccaggggtgtcccaggacatgggcatccccagcaccaggggccttcacaggcatgggcatccccagcaccaagggggcctcacaagacacggggcatccccaagcacccataaggccgtcaccagaacacagggcgtcccccggcacccagggggccgtcatcagggcatggggcatcccgcagcacccacagggccatcaccaggacacgggctctcttccctcatcctcaaggtcctgcaggtaccttggggcctgttagagcttttgcttgagaagtcgtcatcgtggggtgctctgcacggattatcacgtgattccgttagtgacccttcccataggaacattttccgaggccttccatacacgtctctgggtgctcactctgcttccggtcttggccttcccagcagcgtctctgcgctgccaccgggctcatccttgcacagctccccacaggacgcggtgtcgggacgactgatccccgggtaccgagct

SEQ ID NO: 114008 - DNA, 1040 bp, Homo sapiens
cgcaacttccgtttcgacgatttcgcagccagttgatgtgggcgctttcttctgcccctactcccggctgtccgcttcctccccagccccctcctgtgagctctgggagctacagaataaggacactccttggccccaagccagccccagcttgctcgggagcctgggtttccccctccgtccccatcaccgcgagggtctgtgcatgggaatctgctccagaggctccctcaggcgccgcgccgcggggatacgcctttcaccgccccagcaattggagcgctgagtcgaagtcctgattccacgataggcggatgaagccctaacgctgaaattctttcctctaggtctttggcagcggctggggccaaagcccgggcaagaccaacgccttcggcacccggactcaggctccgtcctctctgccagcgtgcggctacaatgactcgacatggcaggccactgccttcagagaaggtgacagagggccatgtctgaaacattctcccacaaccaggaaccctcagcagccgctgaagaggaaaggcagttaaatggaaagacttctgagcaagtggaggaaaagtcacgtgtgacctagggaggggctcccacaggaaggggcaatgcccttgccctgttcacctagcctcaaggtgggcttcccacttgaaatttcagaggatggcagaaaccctacttacaaggaaatgaaagagggcacagcaaccttaagacccagagcagccccacgatattttttaatgagggcaaaaatagaagacttgcaaaagacccctgaaaataatgcctggaagctgcgaaacatcagactgacaccgcacaaaagaggtccagctgagcaggagaaaagcttgagaagcatccagaacaatgtaggtggagaggctaagaagaaagaggagcccacatggaatgaataaccaaggtcgggacagaggaaggttcgccagaactgggagggctgaaattggacattgagataaattaaagagtgttctttaaaactgtcaaaaaaa

SEQ ID NO: 114009 - DNA, 426 bp, Homo sapiens
atatattgttcctggaaacccgcgtcgacgatttcgtgtgaaggtcggtgcggagttcgtctctgcttttttggtcgccctgggatggattcctcctcctcttcctccgcggcgggtttgggtgcagtggacccgcagttgcagcatttcatcgaggtagagactcaaaagcagcgcttccagcagctggtgcaccagatgactgaactttgttgggtgaggagcctggtgctgggacctgaacactgtacctactttccctctgtccttgtaccgcgggactcgcgacaacgtcggggattcggggtggggggcgggcgcctggcagcaacccttgattttctcaggttcctgtggcctatccggatgggagaagggtgactccgcttttctggggactgtcattccggacctcggctttgttgg

SEQ ID NO: 114010 - DNA, 1054 bp, Homo sapiens
tttcgtggcggagcgctaacgtctaacgctaacggcggtcgtgccccgccgctgctgtcacccccggccgctgctgccctccccgccgaggttctactgctctccttcttaagaagggtgggaggcactcggtctctccccacacctctcgcctgaggccaggcgccaggtgtcgcctgaagccagacagccggtttgggagcgagcctgagcaatttatctcaaagcttcaagttcctgccatctacatgtgcccaggtcaaccaatcaatggctcagacagataagccaacatgcatcccgccggagctgccgaaaatgctgaaggagtttgccaaagccgccattcgggcgcagccgcaggacctcatccagtggggggccgattattttgaggccctgtcccgtggagagacgcctccggtgagagagcggtctgagcgagtcgctttgtgtaactgggcagagctaacacctgagctgttaaagatcctgcattctcaggttgctggcagactgatcatccgtgcagaggagctggcccagatgtggaaagtggtgaatctcccaacagatctgtttaatagtgtgatgaatgtgggtcgcttcacggaggagatcgagtggctgaagtttttaggccttgccttcagcgctttggaaagttactattaccaaaactctcaagatagtgtgtgaggtcttatcatgtgaccataatggtgggtcgccccggatcccgttcagcaccttccagtttctctacacgtatattgccaaagtggatggggagatctctgcatcacatgtcagcaggatgctaaactacatggaacaggaagtaattggccctgatggtataatcacagtgaatgactttacccaaaaccccagggttcagctggagtaaaagcacaattttggcaattttaaaggaagatacagagatgattgtacttcagaatgactgaaacccatataccacccaaaatcaattttcttgtacaactggtacacactaataaacaattaaacatatgagatcagaaaaaaa

SEQ ID NO: 114011 - DNA, 601 bp, Homo sapiens
ttttctgagacagagtcttgttctgtcgcctaggctggagtgcaatggcgtgatctcagctcactgcaacctctgcctcccaggttcaagcaattctcctgcctcagcctcccaagcagctggaattacaggcacccaccaccacttttttgtattaaggccgttcttcatatgtgaccaacttttagcacagagaatatctgtcccttcctgacacatattctgcagacttataacaccgagggcttcctacgaaccttaagaagtccctttcccttccgcagtgctgttagggatttcttccctttctgatacagatcttaatctgctgtcaaaaagacagtaacaaaggcgaaggaaaaatccgtgcctttctgcttctgctatccactcctctccacctaatcaccctccctgtttcttacacctaagcaaacattaaaagagaagaggaagacaaaaccgtcactgctcctttcatcaactcttgtagcctccattatactttccacaacccaagtctctgaccttgtatgtcatccttcaggcctcaaccaattacttgccctctacctgcacgacaacacataaaaaaaaaaaa

SEQ ID NO: 114012 - DNA, 439 bp, Homo sapiens
tttcgtgcatcctgctagacgcgccgcgcaccgacggtttggttatgggcagagcaatggtggccaggctcgggctggggctgctgctgctggcactgctcctacccacgcagatttattccagtgaaacaacaactggaacttcaagtaactcctcccagagtacttccaactctgggttggccccaaatccaactaatgccaccaccaaggcgggtggtggtgccctgcagtcaacagccagtctcttcgtggtctcactctctcttctgcatctcttcatcgaatctactaattccacaccttttattgacacagaaaatgttgagaatcccaaatttgattgatttgaagaacatgtgagaggtttgactagatgatggatgccaatattaaatctgctggagtttcatgtacaagatgaaggagaggcatcatc

SEQ ID NO: 114013 - DNA, 481 bp, Homo sapiens
tggggctgctgggactcgcgtcggttggcgactcccggacgtaggtagtttgttgggccgggttctgaggccttgcttctctttacttttccactctaggccacgatgccgcagtaccagacctgggaggagttcagccgcgctgccgagaagctttacctcgctgaccctatgaaggtaaatcgctggcggggccgctgctttgggccccagcccaggatgtcttcccgccatccactcggcccctggagcttccccagcgctcccaggaggtgctgggaatgaacacaaatggaccctgccaagttaatgttctgctctctcgtccccttcttccctgatctagcggcccagtgaggccctgaagctggcaacagccaggttcatctcagccctaaacatttctgcaatcgatcttcccgccccagtccctcagcttcctttatggcttcggttgttttacgagtccctgaagccaggg

SEQ ID NO: 114014 - DNA, 513 bp, Homo sapiens
ctggggctaagtctgccctggggggaaagggctccacgctcacacgcacgcgttcgcacacacacactcacacctggacgcacacggaggctcgcggacccatactcacaggcacatgtggcctggggactgggggagcaggaaagacccctccaacatttggcccttggaaggcaccattgccaatgagcctctttgctggttcccccgaccccacctgggggtcccatgggagcccagcccagccaggtgtggggatgggccaccggccattcctgttttccttgtacagacagattctcactacccacccgccatccccagacacattttatttaataacttgtcattgttaaattatttattagcgtttaccacaccaccacccccaccctgccctccactctcaccttccacctcttcccacaacagcagaaaatggaaacaacaacaaaaaaagatgagacatcagtatatttgtaaataaaccgacctgtacaaaaaaaaaaaaaa

SEQ ID NO: 114015 - DNA, 399 bp, Homo sapiens
cgggctttctttgccctcattgcccgtgtcattccctctccaggctttctgccctaaattcagatggggcaggacagcatttttctcgtgggacacaaaccccaactgtaccccctatggtttcagaacagagctgtgccagacgaaaaaaagcatcctctgggtctgggttctgagctcgagccaggcttgctattagggcagggaggtgcccggtcaagtctactgccacctctcactctccccttcttccccaggctgctgttcctgctgccccgtgggctgtgccaagtgtgcccagggctgcgtctgcaaaggggcatcggagaagtgcagctgctgtgcctgatgtgggaacagctcttctcccatatgtaaatagaacaacctgcatgtatt

SEQ ID NO: 114016 - DNA, 403 bp, Homo sapiens
cgcttgatgaaggacaggaagggaaactgggcatcttaacaattttttccattttatactttagtaaagtacttttatgtattggtaacacagattttggaatggtggtcagtggttaaggaatgctgtttcttttactagacagaataaattagaggatatcatattcttttgtgtatttcaattattttagctagacaaagataaattttgatgttcttttaaactcaattcacttagatttctgaactggatttccaagactctgtttttgttctgggattctctgaagaattaaacaaattgttgcttcagctttatctggacaacagaaaagagatcagaccgcttctgagtgaattggcaccaagccttcccagttatcataaccttgaatggcgaa

SEQ ID NO: 114017 - DNA, 437 bp, Homo sapiens
aattgaaatcatcccgaccggccgcaatacatgcattttcttccagaacctacccttttttaataatttttagaaatagttttagtcactgaccataagaggaaaaaatggacattttcccacaaaacaatcaggtaaaactggcattgtgaaaataggaagcatatgtctccagtgctcctgggcccacctctgtgccccatggtactcgtaaatctccaaacatgccaccaccgccaccaccaccaccccacagcctacttctcagttttctgagcgcttcctggcacacacacaccaaagtgctcctgtgtacaccattttcagaaacaaggcaaaaggcatttccattcatttctgggttggagaggcaagacctggttctcaccagggccagtggccacgaccctcccacccccacccccacttcacatcag

SEQ ID NO: 114018 - DNA, 716 bp, Homo sapiens
tatggtggaatttttattgaagaaccagggcaaatatacatgccgttgacaatttcaaaagaacagcccctcatacttgcagtacagcataacttgtcaagtatcgtcaccctctgcttcaacaaaatatacgtatctcttctcaagacatgtttggccaaactgccgaggattatgctctttgttctgatttgagaagcatccgacaacaaattttggaacataaaaataaaatgcttaaaaatcatcttcgaaatgacaatcaagaagcagcagccatgaagaatgaaagttttaaaacacaaggagcaagttcaaaagtctcgctctatcaccagtctggagtccagtggcatgatctcagattactgcagccttcacctcccaggttcaagcaattctcctgcctcagcctcccgaggagctgggacaacaggcacatgcgaccatgcccagaaacagcagctatgaagcctgcaaatttgaaaaaaagaaaaaaaagaaaaaaattgaaaaaaagaaaagaaggtgcaaaagaacacaacttaaaagtggcttcagaggaaaaggaccaagatggcggccgcaaactgacacctcagggacaaagagatctggacagaatcgccggacaggtggcagctgccaacaagaagcattagaacaaaccatgctgggttaataaattgcctcattcgtaatccttaaaaaaaaaa

SEQ ID NO: 114019 - DNA, 1422 bp, Homo sapiens
  misc_feature (1)...(1422): n = a,t,c or g
aagaagaagaatagatagaggaggaggaggaggaggacccggaataagataagaaatccacaaaagaacaagagagtgaggtgcgcgaagccccggaaccaccacccgtccccgtgctggctcccacggaggggccgcccctgcaggccctgggccagccctcaggctccttcatctgtgaaatgcccaactgtggggctgtgatcagctcccgacaggcactgaatggccatgcccgcatccacgggggcaccaaccaggtgaccaaggcccgaggtgccatcccctctgggaagcagaagcctggtggcacccagagtgggtactgttcggtaaagagctcaccctctcacagcaccaccagcggcgagacagaccccaccaccatcttcccctgcaaggagtgtggcaaagtcttcttcaagatcaaaagccgaaatgcacacatgaaaactcacaggcagcaggaggaacaacagaggcaaaaggctcagaaggcggcttttgcagctgagatggcagccacgattgagaggactacgggagcccgtggggtgcngccgggctgctgtcccctggaccagctgagtctgatcaaaaaacccatcaaggatgtggacatccctcgacgacgacgtcgtccagcagttgggaggtgtcatggaagaggctgaagttgtggacacccgatcttctcttggatgatcaagattcagtcttgcttcagggtgacgcagaactataaagccctgtgtgtcacttagagacagtgaaaacccacggcctccatcttcattaatcaggaaacctggactgcctgcttgttttgtaacccttttaaactatctgttttaaaagtggtcattttattcaggtttagaaaaaaaaatcctatttcttttccttttatttaaaaaaatttgtttttgtggggggttgggggaataaataattggcacaactatctttaagaggtgtttcatctgggctaccttctcatgaaatcattcccagtagggactgaagctgaccttcatgttccattgcattcagatgtcaaccatcccggttgccttttatcccaaagcttgctgtgagtgtgtgtgtgtgagacgcaggcgaccctcttagtactggggtcttggggccaacttttcccatcaagcgttactttgattctgttctgacctcattccatagtttgcagtgagcatggcatctttgcctgggagatactatggntagggggcagcttttccaggggcaaagcaaggccctcgtgtttacacggctctcctccagctcacacgacatgtgaggagatgaccaaatgtgaaaacaggtttcccctgtgttgcccgtcatcctttggcccgttcacaggaatggagtactgtataattttaggctttcattcccagc

SEQ ID NO: 114020 - DNA, 1377 bp, Homo sapiens
cggtggcattcgaccgtctggcaggccgcgtggcgcccgcgccggccttcctgcaggggactccaccggagccttgccaattccgtttgtttccctgttgtcgcccgcttcaccctggatcatgttcaagaagtttgatgaaaaggaaagtgtgtccaactgcatccagttgaaaacgtcagttattaagggcattaagagccaactggtagagcaatttccaggtattgaaccatggcttaatcaaatcatgcctaagaaagatcctgtcaaaatagtccgatgccacgaacatacagaaatccttaccgtaagtggggaattattgttttttagacaaagaaaggggcctttttgtccaactctaaggttgcttcacaaatacccctttatcctgccacaccagcaggttgataaaggagctatcaaatttgtactcagtggcgcaaatattatgtgtccaggtttaacttctcctggagctaagctgtaccctgctgcagtagatacgattgtagcagtcacagcggaaggaaaacagcatgctctgtgtgttggggtcatgaagatgtctgcagaagatattgagaaagtcaacaaaggaattggcattgaaaatatccattatttaaatgatgggctgtggcacatgaagacatataaatgagcctcagaaggaatgcatttggggggctaaatgtggatattgattgtgtcgtatgtgtgtttgtgtctgtgtgtgacagcgtgaatacaatgcctctgtggttatgctaaataagtttaacagatactttatagaaaacaaatcagggtgctcttaccacagatgaacaaacaaattaggggacaagcagcaagcagtctgctaacactctggaatgtgaaaggagtgtctggactctgtgactcccggcaaactccacagcctctagttgtcttcttaggaagcttggaagcaattgagaatggtctaacatcaagatgtctaccacagggccccccacaaaagcagcctcggggactccggcctttccttgagacctgcatctcttcccttcttcatcgcctgctagcgaactgaggctgccgctaaccttcttcatcctttggtggcaaagtagaaagattccagaattaactcgacctttctaaagacctgggctcagaggcagctggcactgactgagcacccactatgtgccaggcactgtgctgaatgcattgtaaggactgtcttacttattcccccacagcagccctaagaaggggtgctgttatcccctttttacagataagaaaactgaagctcagagagggcactgcattccccaaggtcacccagctacaagtaacaaagcctgtgcttctaacacc

SEQ ID NO: 114021 - DNA, 480 bp, Homo sapiens
cggattcccgggacgtcggctgcgagaagacgacagaagggggacaccgctaggttggggaggcttagcctgctggcctctgaagggtgcttgttgtcgctaactggctaggggctcagggtcggtagctcctaggggagacgactctggcagtgcgatactacacgtgggcagggcctgcgtgggcccaaccccggggacaagggcttcttccttcacctcgagctacccgcagaccccagtggtcacctcaccagtgacttgtctaatctgtcctgggaccacctgctcctcctcacattccaggaacccacgtacctgggggagagggagtcctatggacgggtccccccagcctggggcggagtgcaggctgggtcggggtcgtgttccctggactacctgcacagcctgtgtgggggaaggggaagcccggactccagcacaaagggctcttgtgtgagctgcaggcgccactgg

SEQ ID NO: 114022 - DNA, 427 bp, Homo sapiens
  misc_feature (1)...(427): n = a,t,c or g
gagcgcctttgcgttgagccaccagagcggccgcaatacactgtgtggagtacatggcattgtgcctttatttgtcatcaaggaacactggtgaccaggagaagagggatgaggaagcaagggaagaatgtggggaagaagaaactggttaacagggctaagggcagggcaggcacacagaggggcgagggggccaggggcacagcccgcctggcctgggtcccggcagccccagaagggagcggggctggcgctggcccgggtgtgcagcagggtgttaaacaggcagcagaggccagcagggagggctacccagggccttcaaccaccgctaaagccggtgggtcacctggggactttcagaggtacagattcaccaactctgttgctccagaggtcctggtagggggtcagccagggctggagn

SEQ ID NO: 114023 - DNA, 427 bp, Homo sapiens
tctggcctgacccctggcagctataagaaggctcccggcttcgagagggaagaccaggtgggagccgagtacctgaaaaatttcaaatgccaggccaaattaaaaccccactcattagagcccaggagtcaagagcagcctctgcttcagcccaaacaggacatgctgggcatcctccccgcaggcagccccctgacctcaagcatctcttctagtatcacctccagcctggcagctaccccccctagcccagtgggcaccagcagcgtccccggcatgaatgcaaacgctctgcccttctaccccaccagcgacacggtagagtcagtcatagagtctgctttggatgacctggacctgaatgagtttggcgtggccgccctgaagaagactttcgataacagcacagtgcccctgtattcggggc

SEQ ID NO: 114024 - DNA, 792 bp, Homo sapiens
ctctgtcctctgtacagcaggctcagataatgggaccaggacaaggcccaggacaaagactttcagtaccagtcaaggtggtactgcagccacaggctggctcttcccaaggggcctcttctgggctctctgtagttaaagttctgagtgccagtgaagtggcagctttgtcatcaccagcaagctctgctcctcattcggggggaaagacaggaatggaggaaaaccgcagattggaactccagaagaagcaagagaaagcaaatcggattgtagcagaggccattgcgagagcccgtgcccgcggtgagcagaacatacctcgagtcttaaatgaggacgagttgcccagcgttcggccagagaaggaaggcgagaagaaacgcaggaagaagagtgctggggagaggctgaaagaggagaagccaaagaagagtaaaacatctggtgcctccaaaacaaagggcaagagcaagctcaagtgagtactccttgctactgtgatgggacgtgcaagagtaagctcaagtgagtactccttgctattgggatggtacatttgagggcagagcaaacatctggtacctccaaaacaaagggcaagagcaagctcaagtgagtgctccttactactgtgatgggacgtgcaagagtaagctcaagtgagtactccttgctattgggatgggacatttgagggcagagcaaacatctggtacctccaaaacaaagggcaagagcaagctcaagtgagtgctccttgctactgtgatgggacgtgcaagagtaagc

SEQ ID NO: 114025 - DNA, 1646 bp, Homo sapiens
ttttttatcagatgatgttttatttgaacagcattctgtgcagaacagaatggctaaaatgatcatttattttaccttcacatgatttataataatgactgaaaaaaatcatagccataaaagccaataatgacagcagaagtctttttattcaaatctcccaccttacagatgtccagaataatcaacatatttcaaagggtatatttcaaaaacgtactagcaactcagccagccactgtcacatggaataagaagacatgccctggccattagaaccatgctgtcctcgctcttgtgtccctccacgggacagacatcaccttgcaagacaactcgtgccactgtccccaacagttttccacagagttctcgtttccccttcatctgaatcttctctgtgcaaatttgatgtcctggactatttctgacggttgcacacaagatctcagggactggaccttttagttatgagaccagccctcttagacagcagacagtaggtacagtgcttgctctcccttctttgcatccttccagagttgccttcatcctcatttcctgcatctggtaaagtctctctgaaaatgtgaaaccgacgacagaacatggcaagctggatggagaagccgacaacccctcccccactctcacccaacgccgggccggtcctgtttcggatcctgcacactgtggaagcttcttgcttccttgttttggtgggtgaaatctttgctgttcaaaaaggtgtttttgcacagaaattttaggacgtgtttattctagtaacgtagtgttttcttttttcgctatatttacatgtggagaactccagggaggccccccccagagatcccttaaatgctggtctctgtccttgcttctcggccccgctggccttttggagccatcgtgcttcccagtccgcaggcaacaatcacagcatcacctgcaaggggcagcaaagtgaaccgcggacccctggagtgacgccttggagatggaccctttggatttgggaacccctctgacggccgggactcccaggattcccttccatagagggagtccacggtggtcgcagccggcggctgagtcctccttagagtgccgaatcagagaagacccgcatcaggtttgggatgtaagtggagagggagaggttagaaagaggcatcattggataagcaaagaatgctaccctgggaaaaggaggcagaaaagacgtagggaagtatgttccccttaatcccttccccgtgccgcccgtagatccctggatcttcttgtcacggagacaggctgcagccacacacgcgaccccgggccggaaacatgcacacgcgcgcgcacacacgcacacacacgccccgctgcgagttgcacgctgcagacttctgcctgacttcccggccaaaaacaccgcacctctggggccagaccacgaattcctgtggcctagaactgacaccactccccctacccccgcaatacacacattcagaccctacactgcaccctgagcgtgccgggaaccactgaacggaagcccgagcagctccccccgtaaacgactaccttccccactgcctaatgtctatttaaatctcctaaagctcgcctacagcgagccgaggtgcgtccaa

SEQ ID NO: 114026 - DNA, 991 bp, Homo sapiens
tttttccagttttaactgagaaagggggaccttaattctttattccccaatgggctataaagcataaattataagcaatgaagaagggaaaaataaagccaccagctttttctctcagaatccttggatagctaactttttcccaagtcacagaatttaggtatcattacaaccattccctagctctgtacttggggacagttaaaaccttttggtgggagtagcattcttgctttctggagtttgtctgtgtatttggagaggttgtgaagagggctggggagaaggtgatgctcgaatttgtggactttgatcattagaatgagattcctcttttttttctctctgtccttgtggtttttctttctttttttctgtaccacttttagcagcagatgaaagagtttcttttcctgcaattgagacagcactggtatgacttggttttctgtttgcaccacttccatttggttatacaggacatgggaataactgctcgagggccttggttggcctttacttgaagactgatttttttcactgaaggccacatgattcttcagagattgcaagacgccctcaaaacatcagccaaagccgcctttagcacagtgatttcatcttcttgttgctgaactcggtgactcaaagagctgacagagcgatcttgaacatcagaagtacttgcagcagaaatactatcatccctgtaatcccagcactttgggaggctgaagcatgcggatcacttgagcccaggagttcaagaccagcctgggcaacatggcaaaaccccatttcgagactgccggcgaaaccgtccatcttgcggggaaagcgccgggctccgggctcagaggggcgggcacttcattcagcggaccgacagagtggccgacgctgagcctgacccgctcgttctctaggtcgcccggctcggctaccggctcccgcctccgtcgtccgtccgttcgccctggggtagtaagcc

SEQ ID NO: 114027 - DNA, 2906 bp, Homo sapiens
  misc_feature (1)...(2906): n = a,t,c or g
agtgctgcctgcccgctgggtggtactgctacctagtgggtcttggggaccttcgaaatcgccgccgctctcacaatggcttgggtccagactgcgccacagcctctcgggagacgtgggccctcggaacctttttagtgccggactccgggccgcaggcagtcccgcggcagcaggatcacagaacctctggatggactcttcctgggaagctttgctactttgcagcagctggaccatgttcctcattaacatctgtctgtccgcttagtcatcacatcatttcactgtggtggcagggactcagctcggaattctgtataggaaaaagcacctggattcccagtcttttcaatgggcttcaaagacaaccagaagttgcctgctccttgaaggctaagttgcgccctctaaggcaagaatgtcccctgcccatcgggattataccgccggggcagtcagctatgatgataccctcgaggaccctgcgcccatgactcctcctccatcggacatgggcagcgtcccttggaagccagtgattccagagcgcaagtatcagcacctcgccaagtgtggaggaaggagaggccagtctaccctcccctgccatgaccctgtcatcaagccatttgacagtgtggacaaggctcccaagtgggtgaaggctaaagctacccatgtcatcatgaattctctgatcacaaaacagacccaggaaagcattcagcattttgagcgacaggcagggctgagagatgctggctacacaccccacaagggcctcaccacccgaggagaccaagtacctttcgagttggccgaagcactccacaaactaaagttacagagtggagaggttaacaaaagaaggagaggcagcctgcatcagcccagtccaccccaagcaccactccgcactcctttacctaagcagaggcccaggggctggttcacttctggttcttccacaggcttacctgggccaaatcctagtatcatggactctggaagttgggggattaaggacaagaaactttgttcagataagtggagcctctttggaccgagatcccttcagaagtacgattctggaagttttgccacccaggcctaccgaggagcccagaagccctctccattggaactgatacgtgcccaggccaaccgaatggctgaagatccagcagccttgaagccccccaagatggacatcccagtgatggaaggaaagaaacagccaccacgggcccataacctcaaaccccgtgacctgaatgtgctcacacccactggcttctagagccctctttccagggattctggaaaaggtggtttcttgcatcccactccccttttaccttggctttgacataggaaaggtatatttmamcmacttaatcagctgggcgtscgtggctcacgcctgtaatcccagcactttgggaggccaaggtaggtggatacctgassgtcaggagttcaagaccagcctgggccaacatggtgaaaccccgtctctactaaaaatacaaaaattagctgggcgtggtggtgggcgcctgtagtcccagctacttgggaggctgaggcaggagaatcgcctgaacccaggaagcagatgttgtaccgagctgagatcatgccattacactccagcctgggcgacagaacgagacgccatcaataaataaataaataaagtaaagtaaaaaacctattaaattgaggctagagctggagatgtaattggtttttgagaaacattagtataaagcttgcccttgttgtgtggaagaagccattttgtactgctttaaagttaggactaatattcttcaggcacgggtgtatggggacctcattacctatttttttcatcatttaccctagggtaagaactttgatcactgcttactaggtaaagaaatgtttgtactgttccaaaacccaagcttctttattcctttaccactatccatgtgagcattgacaaatcatgggcttagaggtgctcactgactcgctaagacgactttggccctgttgatgactggtgctgtgctccagcctttatcagttaggggacccaaggtttgttttgggacctggggtacaggtaaaaagccagactttgcagggacccctctttttagggttgaaccttgagtccccctgcttttttgggcagacctaatggatcactgtcttgcagctagttcttcatgtgggggcctcttaggccagttgcccggaggacggcatgctcctcctttctatgccacaagaacaaacattattttaggcagagcctttttttgcatttaaagtgagattaatttagcctgtaatttggttaaaaacttcctaagagagaaaattaagtctactgaattgggtataggtaaatggacattaaaccttttttaaaagtaaaggagatgggtaggataccgttaggattatagtcttgaggttcatgtgaagcccagtgggtgttaactttactttggatttcccttgttcagggtcaggggcctggaacgcctgtgcggggaaggtcactccaattcaaaaattttcctggtnatgaaagcaatttttcaccaaaatgaggcctcatcccctttatggcaacacataacccttactggagggagggaaatacacgaagccacctttttattttctcttcactgtgttacaagttcacttggttgtcttgaacactgtctccaaatacctggctttttgttttggatagtaccttgtctgtataagaagctgggcctttccatagagaggccctggagtctaaaattatgagaacaattaatttatttgtgtcttctattatgatctcgttttgacaactcccaatccttactactttttcaaaaaaaaaa

SEQ ID NO: 114028 - DNA, 435 bp, Homo sapiens
gttccaaacatcaagttgggaagaaaagcatttattgatgccaatgggatgaaaattctgtataatacttcgcaagaatgtctggcagtcaggactctggatcctcttgtcaatacctccagtctgataatgaggaagtgtttcccaaaaaatcgactgccactcccaacaattaaaagttcttttcatttccagttgcctgttattcctgtgactggtcctgtggctcagctctacagcttacctcctgaagtggatgacgtagtagatgaaagtgatgacaacgatgatattgatgtagaagctgaaaacgaaactgagaatgaagatgacctagatcaaaattttaagaatgatgatattgaaacagatattaacaagctaaaaccccagcattgtattgcgggcgctctggaggataccagcagcgtcgct

SEQ ID NO: 114029 - DNA, 501 bp, Homo sapiens
  misc_feature (1)...(501): n = a,t,c or g
atacaggnnnnnnnnnnnnnnnnnnnnnnnnnnnnnnnnnnnnnnaccaggnnnnnnnnnnnnnnnnnnnnctcnnnnnnnnnnnnnnngaaagtttttgaaagccaaaggggttttttaccaatttaaaaaattacctcaaaaaaaaagggtttaaaaaagnnnnnnnnnnnnnnntggccccggctggggggcttctccctttaaaaagactttgggaggcccagggtgggggacccccccaggcccaggtttcaaaacccacccgccccccctggtgaaacccccccctttagggnnnnnnnnnnnttacccnnnnnnnnnnaattggcccttgggccccaatttatgggggggccgggggaaaaaaatctgtttaacccnnnnnnnnnnnnnntcccgggacccaaaaaacccccccttgccttcagccggggggaaaaaacaaaaattccgttnnnnnnnnnnnnnnnnnnngaaggccccttttatattccgccc

SEQ ID NO: 114030 - DNA, 380 bp, Homo sapiens
aatacagtggtgggctgggtctggctctcctctttcctcctctcccctggcctcaaggccccccgtggcctgcacgtagggacagaggtgcctccccgcccagcttcctcagccagaccgcatcagcaactggcgccttctctctgggcagctccctcagctgtttcttctgtctcatttccccaaactgcagagtctgatgccggcaagtggctgtcttacaggcggagactgtgcacacacagtgcagaggagcacctgttgcccctggagcgccgggggcaggacgagaatggccaggccagcagggtggccctcagggactgcccggaaccaggtgcagatcatgggctcgcacagtgggccccggcccttccttg

SEQ ID NO: 114031 - DNA, 397 bp, Homo sapiens
  misc_feature (1)...(397): n = a,t,c or g
aatacatgccccctggaatctaaacttagcatctctgccagcctcagatttgcnnnnnnnnnnnnnnnngaaaaaggggcccctttttgccccccaggtggaagaaaggggggggaaaaaaaattaatgggacctttaaccccggggcttaaggaaatcctcccccctaacccccccaaaaaggtggtataaagggatgcccccccaacccgggttttttaaaaaataatttttttgaaaaaagggggtttgtttttgcggaaaaggttgatttaaaagtcgggttttaaaggaatctnnnnnnnnnnnnntccaaaaaactgggaataacggccgaaacctatatcttggggcccgatctttccttttgaaaaagggccctaaaaaaaaaggactc

SEQ ID NO: 114032 - DNA, 4790 bp, Homo sapiens
tcttgcggtaccgctccggaatttccgggtcgacgatttcgtgctgcattgggcagaggaagctgtgcaacggggtcaacgactgtggtgacaacagcgacgaaagcccacagcagaattgccggccccggacgggtgaggagaactgcaatgttaacaacggtggctgtgcccagaagtgccagatggtgcggggggcagtgcagtgtacctgccacacaggctaccggctcacagaggatgggcacacgtgccaagatgtgaatgaatgtgccgaggaggggtattgcagccagggctgcaccaacagcgaaggggctttccaatgctggtgtgaaacaggctatgaactacggcccgaccggcgcagctgcaaggctctggggccagagcctgtgctgctgttcgccaatcgcatcgacatccggcaggtgctgccacaccgctctgagtacacactgctgcttaacaacctggagaatgccattgcccttgatttccaccaccgccgcgagcttgtcttctggtcagatgtcaccctggaccggatcctccgtgccaacctcaacggcagcaacgtggaggaggttgtgtctactgggctggagagcccagggggcctggctgtggattgggtccatgacaaactctactggaccgactcaggcacctcgaggattgaggtggccaatctggacggggcccaccggaaggtgttgctgtggcagaacctggagaagccccgggccattgccttgcatcccatggagggtaccatttactggacagactggggcaacaccccccgtattgaggcctccagcatggatggctctggacgccgcatcattgccgatacccatctcttctggcccaatggcctcaccatcgactatgccgggcgccgtatgtactgggtggatgctaagcaccatgtcatcgagagggccaatctggatgggagtcaccgtaaggctgtcattagccagggcctcccgcatcccttcgccatcacagtgtttgaagacagcctgtactggacagactggcacaccaagagcatcaatagcgctaacaaatttacggggaagaaccaggaaatcattcgcaacaaactccacttccctatggacatccacaccttgcacccccagcgccaacctgcagggaaaaaccgctgtggggacaacaacggaggctgcacgcacctgtgtctgcccagtggccagaactacacctgtgcctgccccactggcttccgcaagatcagcagccacgcctgtgcccagagtcttgacaagttcctgctttttgcccgaaggatggacatccgtcgaatcagctttgacacagaggacctgtctgatgatgtcatcccactggctgacgtgcgcagtgctgtggcccttgactgggactcccgggatgaccacgtgtactggacagatgtcagcactgataccatcagcagggccaagtgggatggaacaggacaggaggtggtagtggataccagtttggagagcccagctggcctggccattgattgggtcaccaacaaactgtactggacagatgcaggtacagaccggattgaagtagccaacacagatggcagcatgagaacagtactcatctgggagaaccttgatcgtcctcgggacatcgtggtggaacccatgggcgggtacatgtattggactgactggggtgcgagccccaagattgaacgagctggcatggatgcctcaggccgccaagtcattatctcttctaatctgacctggcctaatgggttagctattgattatgggtcccagcgtctatactgggctgacgccggcatgaagacaattgaatttgctggactggatggcagtaagaggaaggtgctgattggaagccagctcccccacccatttgggctgaccctctatggagagcgcatctattggactgactggcagaccaagagcatacagagcgctgaccggctgacagggctggaccgggagactctgcaggagaacctggaaaacctaatggacatccatgtcttccaccgccgccggcccccagtgtctacaccatgtgctatggagaatggcggctgtagccacctgtgtcttaggtccccaaatccaagcggattcagctgtacctgccccacaggcatcaacctgctgtctgatggcaagacctgctcaccaggcatgaacagtttcctcatcttcgccaggaggatagacattcgcatggtctccctggacatcccttattttgctgatgtggtggtaccaatcaacattaccatgaagaacaccattgccgttggagtagacccccaggaaggaaaggtgtactggtctgacagcacactgcacaggatcagtcgtgccaatctggatggctcacagcatgaggacatcatcaccacagggctacagaccacagatgggctcgcggttgatgccattggccggaaagtatactggacagacacgggaacaaaccggattgaagtgggcaacctggacgggtccatgcggaaagtgttggtgtggcagaaccttgacagtccccgggccatcgtactgtaccatgagatggggtttatgtactggacagactggggggagaatgccaagttagagcggtccggaatggatggctcagaccgcgcggtgctcatcaacaacaacctaggatggcccaatggactgactgtggacaaggccagctcccaactgctatgggccgatgcccacaccgagcgaattgaggctgctgacctgaatggtgccaatcggcatacattggtgtcaccggtgcagcacccatatggcctcaccctgctcgactcctatatctactggactgactggcagactcggagcatccaccgtgctgacaagggtactggcagcaatgtcatcctcgtgaggtccaacctgccaggcctcatggacatgcaggctgtggaccgggcacagccactaggttttaacaagtgcggctcgagaaatggcggctgctcccacctctgcttgcctcggccttctggcttctcctgtgcctgccccactggcatccagctgaagggagatgggaagacctgtgatccctctcctgagacctacctgctcttctccagccgtggctccatccggcgtatctcactggacaccagtgaccacaccgatgtgcatgtccctgttcctgagctcaacaatgtcatctccctggactatgacagcgtggatggaaaggtctattacacagatgtgttcctggatgttatcaggcgagcagacctgaacggcagcaacatggagacagtgatcgggcgagggctgaagaccactgacgggctggcagtggactgggtggccaggaacctgtactggacagacacaggtcgaaataccattgaggcgtccaggctggatggttcctgccgcaaagtactgatcaacaatagcctggatgagccccgggccattgctgttttccccaggaaggggtacctcttctggacagactggggccacattgccaagatcgaacgggcaaacttggatggttctgagcggaaggtcctcatcaacacagacctgggttggcccaatggccttaccctggactatgatacccgcaggatctactgggtggatgcgcatctggaccggatcgagagtgctgacctcaatgggaaactgcggcaggtcttggtcggccatgtgtcccacccctttgccctcacacagcaagacaggtggatctactggacagactggcagaccaagtcaatccagcgtgttgacaaatactcaggccggaacaaggagacagtgctggcaaatgtggaaggactcatggatatcatcgtggtttcccctcagcggcagacagggaccaatgcctgtggtgtgaacaatggtggctgcacccacctctgctttgccagagcctcggacttcgtatgtgcctgtcctgacgaacctgatagccagccctgctcccttgtgcctggcctggtaccaccagctcctagggctactggcatgagtgaaaagagcccagtgctacccaacacaccacctaccaccttgtattcttcaaccacccggacccgcacgtctctggaggaggtggaaggaagatgctctgaaagggatgccaggctgggcctctgtgcacgttccaatgacgctgttcctgctgctccaggggaaggacttcatatcagctacgccattggtggactcctcagtattctgctgattttggtggtgattgcagctttgatgctgtacagacacaaaaaatccaagttcactgatcctggaatggggaacctcacctacagcaacccctcctaccgaacatccacacaggaagtgaagattgaagcaatccccaaaccagccatgtacaaccagctgtgctataagaaagagggagggcctgaccataactacaccaaggagaagatcaagatcgtagagggaatctgcctcctgtctggggatgatgctgagtgggatgacctcaagcaactgcgaagctcacgggggggcctcctccgggatcatgtatgcatgaagacagacacggtgtccatccaggccagctctggctccctggatgacacagagatggagcagctgttacaggaagagcagtctgagtgtagcagcgtccatactgcagccactccagaaagacgaggctctctgccagacacgggctggaaacatgaacgcaagctctcctcagagagccaggtc

SEQ ID NO: 114033 - DNA, 1024 bp, Homo sapiens
gtcaggtggcggcgccgcagccatggagggaggcggcggcggcggcggcggcggctcgggtggctgcgctgggaggcggcggtgagaggctcgcacgcctccagcccggccccggccccccgggagggagagccgagcagccccggctctgggctacggactatgggcgaatagctctgaccacccggcgaagagctgagaatgaagcggagagcatcagacagaggagctggggaaacgtcggccagggccaaggctctaggaagtgggatttctggaaataatgcaaagagagctggaccattcatccttggtccccgtctgggcaactcaccggtgccaagcatagtgcagtgtttggcgaggaaagatggcacggatgacttctatcagctgaagatccctgacctgaggagagagggggaccaaggcatagagagccaggaagagcggcagggcaagatgctgctgcacaccgagtactcactgctgtctctcctgcacacgcaggatggcgtggtgcaccaccacggcctcttccaggacccacctgtgaaatcgttgaggacacagaatccagccggatggttaagaagatgaagaagcgcatctgcctcgtcctggactgcctctgtgctcatgacttcagtgataagaccgctgacctcatcaacctgcagcactacgtcatcaaggagaagaggctcagcgagagggagactgaggtaatcttctatgacgtggtccgcgtggaggaagccctgcaccagataaatatcgtgcacagagacctgaagctggggaacatggtgctcaacaagaggacacatcggataaccatcaccaacttctgcctcgggaagcatctggtgagcgagggggacctgctgaaggaccagagagggagccctgcctacatcagtcccgacgtgctcagcgggaaccggggcttacaccagctcccatccctccaacatggagaacttggggttgtctccaagatccttcatccccaccatgtatt

SEQ ID NO: 114034 - DNA, 1986 bp, Homo sapiens
  misc_feature (1)...(1986): n = a,t,c or g
gtgctgtgccagagagccacagtgtagagtgcaaggacattcctcaggaacatttgtcccaataggttggatatatttatgtccctggaagaaattttccagtcccatctatgctgatgggcctgctgagtatagactcagaaaagctgccccactgctacagcctttggggaatgactgaatgactttctctgtgccatgttttcaggccatcttggcagcaggcagcatgatgcagacccacggggactttgatgttgccctcaccaaatacagagttgtggcttgtgctgttccagaaagtcctccactctggaataacattggaatgtgtttctttggcaagaagaaatatgtggcggccatcagctgcctgaaacgagccaactacttggcacccttcgattggaagattctgtataatttgggccttgtccatttgaccatgcagcagtatgcatcagcttttcattttctcagtgcggccatcaacttccagccaaagatgggggagctctacatgctcttggcagtggctctgaccaatctggaagatatagaaaatgccaagagagcctacgcagaagcagtccacctggataagtgtaaccctttagtaaacctgaactatgctgtgctgctgtacaaccagggcgagaagaagaacgccctggcccaatatcaggagatggagaagaaagtcagcctactcaaggacaatagctctctggaatttgactctgagatggtggagatggctcagaagttgggagctgctctccaggttggggaggcactggtctggaccaaaccagttaaagatcccaaatcaaagcaccagaccactttcaaccagcaaacctggccagtttccagcagcctctgggctctaatcaagctctaggacaggcaatgtcttcaagcaagctgcatacaggacgctcccctcaggtgctggagggaacatcccagttcacaaagcccccatctcttcctctggagccagagcctgcggtggaatcaagtccaactgaaacatcagaacaaataagagagaaataagaatagaatgaatgaccccaaaatagggttttcttgggcgaggatgtgctggattaggaaaggtgacatgacacaggcagagcagagtggcacccaccacagaatacagtgtgtgttattacgaggagccagcagttgagcctaaggtccttcgtacctacctggtattggcatttgaggtcggaaaccctctactgccccccataagccagggaaaagtgaaaagagaacaccagttccttttaagaactgggcagcaaaggcttgagggcttattgtatgtagctgagtcagcaaggtacatggatgcttgtctgcttttcaaaagggacttttcttttcctaggctggactgactccttccttagtttcaagggaacagctgagacagacctctgctgagtagctctgtgatgacaaagccttggtttaactgaggtgntccctcaggttgtgaggtttattagtccccaaggcaaacacaaatattagattaataatccaactttaatagtatacatttaaaagaaaaaaaaacaaaagccctggaagtttgaggccaagcctgctgagtattgcagctgcatttgcccaaaagggaatccagaacaagtccctccaagtattttgttcttgagaggggtcagtctagaagctagatcctatcaggatgaggagcagcagccccagggcttgtctggatcagcaccaacgattttaaagaaaaaaggaagagtttcttagatgagtaattgttattgaagatagtcagtgataaccactgaccagatgctatcaatacactatgtgtcctttttagaataaagggttacatatcatcattcctttggggaaaattgttattcaggtataaaaacaagagatcataataaaaacctaaaagaacctatgaaaaaaaaaaaa

SEQ ID NO: 114035 - DNA, 556 bp, Homo sapiens
  misc_feature (1)...(556): n = a,t,c or g
tgcaggcttgttacatgaatgtattgtgtaatagtgaggtttgggcttccagtgtgcccatcacacaaatattaaacattgtatccaataggtacaatgtttacttcttcaaccctcacccccctcccatccttcccccaaagattaattaaaaataaaacaaaatcagaattttaaataattcaaaatccaccttaacgtaggtcctgatcttgggaccctttagcaaccatacaccactgcattctgttgataacagaaactgggtacaccaggcacggtggcaaatgcctataatcccagcactctgggaggctgaggcagaaggactgcctgaagtcaggaagtcaagaacagcctgggcaacaaagcgaaacctctatctctacgaagaattaaaaaaaaagtggataatttagacttaaagagatattttgggtgcaaaaggattaacattacatgttnccacttaaaagnttcataatttcccgcttnataacttcatggtaaagtccaccagatggtactttaaacattggcnctttcggcggtccgg

SEQ ID NO: 114036 - DNA, 1944 bp, Homo sapiens
  misc_feature (1)...(1944): n = a,t,c or g
cggagaaaagaggataaagccattcctccttccacctagatggattgccaatcttctgccatcaattttgggaaacctgcctttgtgcccccgaggctgcctttcctcagcatagctgacttgtcatagtggatgaggtctgggctggagcagtagaagccaaggccttttttctgcaagtaatgatgtaggttatttgcagtctctgtaaccaccatccaggccagtacgcagtatttagctggggaccaagggatgggattccctactctaagaaaatacctttattttaattattattattttttgagactccatctcaaaaaaatataataatgaagtggaatcaaggtggcaagaaaatttagaatcgtttctgatagggactttcccttatcctaaatgtgttttgaaggcacacgttatttccattgtcattctgactttagaaaggcaggttggggcatgagtgggcattttcctaatgacttgctgctaggaggttataggcagggaacagtctggggagtctctaattccagagagacttttcagattccctctcttcacatggaacctccattagttaggattttggggaaagtgagcatgaagaagggactcaaagctgccaggtacccgagtctcaggctctgacatctcttggggcccccttctgccacaacttcttgccacttcacggacttgaattatgtcccgcgcctaaaaaaaagattggcctgcagcacaggcgtgtatcctctccaaaaagctgctgctcatttctggccccatctgctgctatctttgccagtcagccatcacagtttgggcatcatcagagtctcagctagagggagcgtgtcatttctgccttagtggtttgcctgcggacctgaccagggggcatgaccagctggggatgttcaagtgacatttggggaacttgtaggagggccaaatggatttgaaagtttaattcttctcaagacccactgatttgccagtgtgcatggaaataatagattagagcagaaactagcagggactgttgtataatcgtgatctactagcagaattgggcccaaagagaaagaatttctgaggctgggtttcttctgggagggtagcaggttggtcttggccagtgctctgtttcccaccagtgttgttcccttttccagcttgcctggcccggctctgtcttccagggtcctgctccagacccctctgcctggggtctcccctccatccagggggttctgggcatcacagctccttttttttcctttctcctcttccagatccagtttcagctggttttgcttcttccagcaggcacccttatgtccctggagcagctccccttgagagaattttgagtcactcatttccttggaacagcacccccctttatactagcagccatttgtgccattgcctgtgccctagggtttgtggggagagagcgagggatcactgagcagttttcccagagctccatgggaaggcaagctctccccccccaatgggagcccccactgtcaattaactgtaaactcaggctcaggccttcaactgccctacccccccatccctccataatttcctgtcctgtccccagcaccctcaggagcattcctcattgtggcccggctaactccccgcctggatgtgaancaggcaagacacagtgggaaatgagtcacgtaacttgtattgccacagtggacacctcctagaggtcccattggtttaaagggatagggaaggaggagggatgagaccatccaccccctcccaggaagtaaatctaagtatctaaggttttctttatgcccttgagtcaaactaataactgtctagtacgggaggtgtttgctggttttcttgcggtgttttttctaatgcaataaactcatttctgcctgctgaaaaaaaaaa

SEQ ID NO: 114037 - DNA, 1992 bp, Homo sapiens
  misc_feature (1)...(1992): n = a,t,c or g
cggcgtagtgcccttctgccctgcctgacgatgtatcgaaaagatgagagtgaaggagactttgtgcagcaggaaacgggtaggtgaggtgttgggcagttgtgggaacttctgagagtattacagagtggtagaatcggtaagaactcttgatttggacttcgctttggtgggaactgtgtgcctatacctgcctgtgtgtgtgcaagtgtgcaggttcctttgtatgtatgtgtacgtgtgggaacctgtgtttgtcatatttttcttcatttcacaaaggctttttttgaagcagtggcagtatgcttttgtttcaagaacacatgaaattcttttaacaccagattagtgtgttaccccaaatgaacggttctagccctctattaaggaaataaaggggaccataaggcattttgggctgcttatgggctgtgtgttactacttacaagagtcttgaaaattatacagaactttgccttctttttttaatgtcttccacaatgttgtgactgattataaccctgtttcccctcagagaagagctatggctcagggatctgtgttgactctggcatttagtggctttgtgaaggaaagaaaccattaaatgacctgacaaaaactgactcatgtctttaaagtagttgaagccacttttaggaatgttactctcggttgcttttgtctaattcttaatgggcttaaagccaaggaaaaccatagtattaaatcttttttgtgtaccctatggctagtgttttaaatgggcagttccgttgtggataaagtatccagtcacttcaagttttctgtgaaaagtttttaattaggttaaaaataattttggcatacgtctctactcagtttataaaagcagttccacaccatgcaaacaaaaactctaacagcaaagggttatcttggacctgatggttacttgaatctgagagaaagtcattacttactactgcactcctgcttttgtgggaaaaattttcttcttccccagaagagttaacagttgagtgttcagctcctgacttacctttaatttagaggcaatattattactgtttaagtgattatttgcttaacacaggttttattttgtctttttgctggtagattatacaagggacaactttagtgatgaggcatgtggatgatttggtgggagtagggtatatacttagtggaatgggtttattttatggaagagaattccattggaggtggaggattggaagtatattgtgaagtgggatttgaacagcacatatgctctgggtttgctcaaataactgcaagtttatgcttacatctaaaattttggtttcctgttaccctaaacgggagcttctagaattacgaaggcccatacctgccacgatttataaaataatggttttatccctggcccccaaatccatccaggttcccccgggttttaaggagaagtgggtctaattagacagggaatagaagttgtggtggaggtgatttggggatagactaggtttcccttatgcaagtggatatgagcttcctcatggaaacccngacctactgtattagaccagtaaccctctaacctcacctccaagccccaagtatatggcccctgctgggttacctggtggactacattttcccagattcactctaaattcaaggtagtgacccaaataaattgggaaaggaggggggtcaaggaggaaaagctgttgaaaatctttctccctatttaagagaaatatatgccctagagctgctccagcacccttggtttctgattttttttaatattgaatatggattagaagaatgaaatcagatgacacctgactgcaaaaatgtttataagcaaatagccttcttacattttggtataaagctgtgaacttcgtaactttgtaaagcaagcacataaagccaatacaagaggaaaataaagtacttttactaattgccggttaaaaaaaaaaaaa

SEQ ID NO: 114038 - DNA, 6829 bp, Homo sapiens
ggaggcagaggggcggcgagaagatggcgacttcgaacaatccgcggaaattcagcgagaagatcgcgctgcacaatcagaagcaggcggaggagacggcggccttcgaggaggtcatgaaggacctgagcctgacgcgggccgcgcggctccagctccagaaatcccagtacctgcaactgggccccagccgaggccagtactatggcgggtccctgcccaacgtgaaccagatcgggagtggcaccatggacctgcccttccagcccagcggatttctgggggaggccctggcagcggctcctgtctctctgacccccttccaatcctcgggcctggacaccagccggaccacccggcaccatgggctggtggacagggtgtaccgggagcgtggccggctcggctccccacaccgccggcccctgtcagtggacaaacacggacggcaggccgacagctgcccctatggcaccatgtacctctcaccacccgcggacaccagctggagaaggaccaattctgactccgccctgcaccagagcacaatgacgcccacgcagccagaatcctttagcagtgggtcccaggacgtgcaccagaaaagagtcttactgttaacagtcccaggaatggaagagaccacatcagaggcagacaaaaacctttccaagcaagcatgggacaccaagaagacggggtccaggcccaagtcctgtgaggtccccggaatcaacatcttcccgtctgccgaccaggaaaacactacagccctgatccccgccacccacaacacaggggggtccctgcccgacctgaccaacatccacttcccctccccgctcccgaccccgctggaccccgaggagcccaccttccctgcactgagcagctccagcagcaccggcaacctcgcggccaacctgacgcacctgggcatcggtggcgccggccagggaatgagcacacctggctcctctccacagcaccgcccagctggcgtcagccccctgtccctgagcacagaggcaaggcgtcagcaggcatcgcccaccctgtctccgctgtcacccatcactcaggctgtagccatggacgccctgtctctggagcagcagctgccctacgccttcttcacccaggcgggctcccagcagccaccgccgcagccccagcccccgccgcctcctccacccgcgtcccagcagccaccacccccgccacccccacaggcgcccgtccgcctgccccctggtggccccctgttgcccagcgccagcctgactcgtgggccacagccgcccccgcttgcagtcacggtaccgtcctctctcccccagtcccccccagagaaccctggccagccatcgatggggatcgacatcgcctcggcgccggctctgcagcagtaccgcactagcgccggctccccggccaaccagtctcccacctcgccagtctccaatcaaggcttctccccagggagctccccgcaacacacttccaccctgggcagcgtgtttggggacgcgtactatgagcagcagatggcggccaggcaggccaatgctctgtcccaccagctggagcagttcaacatgatggagaacgccatcagctccagcagcctgtacagcccgggctccacactcaactactcgcaggcggccatgatgggcctcacgggcagccacgggagcctgccggactcgcagcaactgggatacgccagccacagtggcatccccaacatcatcctcacagtgacaggagagtccccccccagcctctctaaagaactgaccagctctctggccggggtcggcgacgtcagcttcgactccgacagccagtttcccctggacgaactcaagatcgaccccctgaccctcgacggactgcacatgctcaacgaccccgacatggttctggccgacccagccaccgaggacaccttccggatggaccgcctgtgagcgggcacgccggcaccctgccgctcagccgtcccgacggcgcctccccagcccggggacggccgtgctccgtccctcgccaacggccgagcttgtgattctgagcttgcaatgccgccaagcgccccccgccagcccgcccccggttgtccacctcccgcgaagcccaatcgcgaggccgcgagccgggccgtccacccacccgcccgcccagggctgggctgggatcggaggccgtgagcctcccgcccctgcagaccctccctgcactggctccctcgcccccagccccggggcctgagccgtcccctgtaagatgcgggaagtgtcagctcccggcgtggcgggcaggctcagggggaggggcgcgcatggtccgccagggctgtgggccgtggcgcattttccgactgtttgtccagctctcactgccttccttggttcccggtcccccagcccatccgccatccccagcccgtggtcaggtagagagtgagccccacgccgccccagggaggaggcgccagagcgcggggcagacgcaaagtgaaataaacactattttgacggctgtcttttatatttctgagcacacacagagccctggcgtccaccggggcaggcgcaaagtggacagagcatgcagggcggcggacccccccacgaccctcctcgccctgtctccatcccctcgaagccctgcctcaccgcaggcaggcccatcggtggccacctttgccgggaagtgaccggaaggccccgtgaggggtcgaacgcggaggcaggggttacctcttggggctttacaatccgtggcccctcctgtcctgcactgtggtcaccggtcctgtcatagatgctgttaatttaaggtacaggcagaggtggccaggggagtttcattgtggtttttttttccttttagtttctagttacattttggttgtagatgactcgcttaatcttttaagccaacacttgcctgagagcatgtttttatttcagaaatccaactttacctattttttaagctaactggaaatggaggccatgcgccccaaagcagcccgccacccacctgagtgtaagaagtgagtccggcttttgggtttcaccccaagttatctcaaaacaaaagggctggtcaggctgggcagggccttgtcaggagctcacggtaggcagaggtgcctctgccagggccacagaacagacttccgggaaggggccttggcttttattgagggtctctcaaagacccagcctgccagcctctcccagaggtgcctgctagtccttagagtgtgtgtgtgaagatgccatgaccagtggcagctgagacctctctgccccaagagtgtgggggactggcagggagcgagggtccccgagacgaggaccacggtcctccctgagaacctgggtggaactggcatttcatcccctctccaccctaccctctggctcctagcccacaccccctctcttgggcagcgtggtctgctggctgccccttcttggcagctcagggtcgtggcaggtggacttggagacacacagcagtgtgtgttttagtggcaggtttcaggagcacctctaagaccagggtgacagggtacttgggagctgtcctggaccctccccataccacgggccctgcaagggaggcatcagggctggctttgttttctgctgttcttggaataggaactgctgttctgatccccccaaaactgcattgcggctctcgctcgctcctgcctgccgggacagcgccttctgctgagtccgtttatttgtagtgtcatggctgctgctttcactggggtcctgggcaccctggcttctgtcctcagagctgggtttgatcctagcaaccatcccttcctctctttgcccggcaatgcctttggcatgtgtctgagcagccaagtggccactcataggagaaggctccctggtcacgttgctcctgctgccgtcttgttccaaggtgcgggggggacactgttggtctgtccaggtcaaggtccctttctcttaccatgacagaggctgggggcagacagcggggacttttttttttttttaagaaaaactacatgtacataggagagtttcattaccattagacttgtatgtaggacttaaaaaaaaatggccttaataaaattacaagcaacccgcctggatgcggttttcaaaagaaggcattgaggaccatgctaggaaacctcataccccatccgtccaacctccggcgggcgccactgcttgtcctctggtcttcggtgtggacagataggagaggagggatgcccacctcggagcatcccaggcccgtggcccattttcagcatcctgaagccagattcacagtgacattgtgttaacgtgacgaccttggtccattatggagttctttttccaataagaacctggtggaccgaggtccgagcttgccagggacagtggggcccacgcgagtacccggggcccagccaggagccagcagccaggcgtccctgtgttccagaaggattcacgcccctcctggacctgggcgggcctcccagggggtctgtatcacggccttttgtgtgtgcgtacgtgtggtttttttaaatatcactactacatattcttgaattgccaagactttctgaaacaagacagcttaagggaatcagccttttgctttgtgatgtgaaaatactgtgatttgacgagccgcttcctgaggggcaggcccacgtggggaggttgcgccgtgtacatagacccgccgtctgtgtccttggtcaggcccggatgcttggtctacactgggttagaggctgctctccccacgcacccatgtgctcatggcttctgcagaccctctgctgggtacatcggtcccctacggcgaagttcagccagggctctccctcctgagagcatggcgtccccaccttcctgtttcgccgacgtcactacccagggttggcaagtcttgcaggcagagggtgtaacccaagttcagcctctctctgtgtccttcagagaagaagggtttttttgccctcatcattgtccctgcttgtgggttttcggctctggggaggagagtgttgggatcattgtgtttggcctgatttcttcagggggccaagctcccgggaggacccctagccagggagggccccccatgtccatccatccctcctgctggggcttggatgtcaggcttgggggctgtgagctgggacctcgcctgagcccggtcaggtgggacaggagcctgccagaagcccatggggggccagggccgggtggctttctattttatttttttagagatggggtcttgctgtgttgcccaggctggtctcggactcctgggctcaagcagtcctccctcctcggcctcccaaagttctggggctacaggtgtgagccacttctgcccagcatcccaggcctgaacagccttggcaggacccgtccctagagggggctctggtgcctcccttaggtgggccttgagctggtttttaaccaaacatccttccaaattcggggctgcgacctggcttcctgagttttctgtatttccaaggagccctccgaccaggggagaggctggtgggagtaaaggtccagcggtatttcgggggtcctctgtcacctcgccctgaaaacagcagctcccatcaccttcactgggtcccgatggagccgtctcagaggccgaggggccctctgtgtgggggtgggacgcaggggctctcagagcaagggccacaaagccgatggcacagatgtgcccctgggcctggcccgtcacccacatgtggtgccctgggccagggcgtgcgggcgccatagccttccctacacagcctaatagcaggggcgagactcggcccctcactcaccctgggaggcctgcctgggctacatggacacctgggtgtctttctacccccagtgcccatggaccaggggcctccatttcctgggggctcttgcggcatgtgatttgggggtccctgggacattctcccgtcagctccaccttgagccaagtgtcctgttccctgcggcccttggccttccagggtcctggccaggcaggggtcaggcaccccatactcttccgtgtggcacaggtgtccacccacccccactggccacagacaccattctccccctgggagcaggaggtggagtaagttgtacccccaggcctgggtgctggggagttcctgagggcatgggtggggcaggagtgagtgcctcgtgatcccagcctcagtttctctcttgtcactttctcaaacctgcaggtctcagggccccgggctcctccctgggcaggatggggggcaggggctgggccttggggtggtgctggctctgaatgattccagagcctgtatccaccttctgggctccctggccaagcacccccacccccaggagcccagggaacaggtggcatgtgttggggttcgggggatggcccccatctcgaagtgttctggaattttgggggcaacccttgcccagcccaggccatcaagaacttctgatttcctgcccacccaggaggggacttagccatggacctttgccagtaggcctggggagggagggctttggcagccaaagtctcaactggccctgccgtgcccctgaagtaggaaactgtcccctagggcctgggtggcccacctgatatatgcaaacccgccggtccgagccctgttcctgcctgtgctcctctgtgcccaggctggctctcccccaaccctagcatgtatactctgccacggacgttcccgtgggccatgattgtgggcggccgc

SEQ ID NO: 114039 - DNA, 746 bp, Homo sapiens
tgtcgtctttctctgattaatgaaaatgtgaatatagctgatttctgaatgagtactctgaacttgctagagaaaattccttccaaatatttcaaaatgtaggttgcataaggggcaacaaacaggatgctctgtagtgaaaaaggctgggaatcgaaacctttagaagccttatgctggggaggaatggcagatgtcatgctgagatgtgctatttccacaagcagggcgtttacctggggcaggtacatgggggctgctgtggaactggaatctattttacaggaatgagcctttagcaaggaaatcagaaccctacttttctcctctctcattaagttcaatgtagccttttctgggcatggtgtttcccggcactggggtcaccccacacacacaacaccagcacctaaatgaaagacagcctcccaaaggccatgtgccttctacccagcagacaccggcttcagttccaaagcctcttcggaacgcagtcccacctctgcgaggacacagctgcatctggggtgaggcagccggaatgcctcctcccggccccagggtgccccgacttctcccagcctatcctccaactgggcaagtgccgacccagctgtagcaggagctgtttgggcttccttgcttctcctcctcggctgggattgccgcccccacccccaccctgtgaacacctgcacaccacgtgcgacagaccaaggaggccttacctcatgggacaaggagaa

SEQ ID NO: 114040 - DNA, 1500 bp, Homo sapiens
  misc_feature (1)...(1500): n = a,t,c or g
tcccgctctcctcgggctcgccgcccccgccccgtgccccctcccccatcgcgagggccccttccctcccctccctgcgggcgggcaattcaaacccgaaagggcgggaaggcggcgctcggggttggcgggcgggggaaagcgctgccgccaaaaaaccgccccctcgcccacgttccccgcgcacgagacgcgcgctgtcgccgcccacgagttccccgggctgcgcgcgcctccctctcccgccctcgacggctgccatagcaacggcgctgggctccgcctccggagggggtttgtttgcgccatctgcagctgttgctcctgcctgtcgcggtggtgcgggctccgctgccctccccggctgcgctccggtccagccctcgcttctcggggtcggcgagccggagctcctgcgcgcgcttcgttcttatacgaacgtcgggctcactcatttatgtcctagaaaagttgtgtggacgactgctttaattttcatttttagcactctaaagtttgggaagtaattaagaaccacctcaaaatctgcagttttttgttcttgtttcttataggctgaaggggatgctaagggagataaagcaaaggtgaaggacgaagtaaggtcattctctcttcaagggtcaaagccttgggactagcagaggccactggactcggtgattaaccgtaacctgtgtcctgaatttacactcctataattttagagcaaattgataccaaactttcaaagcgacttacctgtcctatttctaactttctcgttgtctttaatagccacagagaagatccgcgaggttngttttgctgttaagtgttatggttttggaatttttcgtggttgttccctgaaactaaaaaacatcaaaaaacaattccctttgcttccatgaattatggttagtgcctggttttgaatcattgcctctacttgggactcttgcccctttgggttttgctggttctgaaatttctgatgcctgtagccaaagtgggacatttgagtgggcttctggaaatccaacattctagaagaaaggcccaccccacaaaaacttttgaggaggaggagaaaacttctcctacccctggtaccttttggttggttgtgggtggttttccttccagtcccattgtacctgatgttccacctttttccctcctccttcctgcccaaaaaaagaaaccctgctccctcccaaagcccagagccccaagcctaaaaaggcccctgcaaagaagggagagaaggtacccaaagggaaaaagggaaaagctgatgctggcaaggaggggaataaccctgcagaaaatggagatgccaaaacagcccaggcacagaaagctgaaggtgctggagatgccaagtgaagtgtgtgcatttttgataactgtgtacttctggtgactgtacagtttgaaatactattttttatcaagttttataaaaatgcagaattttgttttttaaaaaaaaaa

SEQ ID NO: 114041 - DNA, 453 bp, Homo sapiens
  misc_feature (1)...(453): n = a,t,c or g
ggaccggacttcccgggtcgacgatttcgtacctagtgggtcttggggaccttcgaaatcgccgccgctctcacaatggcttgggtccagactgcgccacagcctctcgggagacgtgggccctcggaacctttttagtgccggactccgggccgcaggcagtcccgcggcagcaggatcacagctcttgaggctagtgcgcctctaggcaagatgtccctgcccatcgggatataccgccgggcagtcagctatgatgataccctcgaggaccctgcgcccatgactcctcctccatcggacatgggcagcgtcccttggaagccagtgattccagagcgcaagtatcagcacctcgccaaggtggaggaaggagaggccagtctaccctcccctgccatgaccctgtcatcagccattgacagtgtggacaaggtcccagtggtgaaggcn

SEQ ID NO: 114042 - DNA, 413 bp, Homo sapiens
  misc_feature (1)...(413): n = a,t,c or g
attcctcaccgcaggagcctctgaagctcccaccaggccagctctcctcccacaacagcttcccacagcatgaagatctccgtggctgccattcccttcttcctcctcatcaccatcgccctagggaccaagactgaatcctcctcacggggaccttaccacccctcctccacccaccgctaactctcagccccagtcaccctcttggagcttccctgctttgattaaagaccactcatgctcnnnnnnnnnnnnnnnnnnnnnnnnnnnnnngggggggggccctttaaggggaccagtttttattcacgcgccgggggaagctgtggtcttttttgttgggaccataaaaagaactgggggcccggggtataaaaaagccgggtggagaaaaannnnnnnnnnnccaaaat

SEQ ID NO: 114043 - DNA, 15721 bp, Homo sapiens
atggggctgccactagcccgcctggcggctgtgtgcctggccctgtctttggcagggggctcggagctccagacagagggcagaacccgataccacggccgcaacgtctgcagcacctggggcaacttccactacaagaccttcgacggggacgtcttccgcttccccggcctctgcgactacaacttcgcctccgactgccgaggctcctacaaggaatttgctgtgcacctgaagcggggtccgggccaggctgaggcccccgccggggtggagtccatcctgctgaccatcaaggatgacaccatctacctcacccgccacctggctgtgcttaacggggccgtggtcagcaccccgcactacagccccgggctgctcattgagaagagcgatgcctacaccaaagtctactcccgcgccggcctcaccctcatgtggaaccgggaggatgcactcatgctggagctggacactaagttccggaaccacacctgtggcctctgcggggactacaacggcctgcagagctattcagaattcctctctgacggcgtgctcttcagtcccctggagtttgggaacatgcagaagatcaaccagcccgatgtggtgtgtgaggatcccgaggaggaggtggcccccgcatcctgctccgagcaccgcgccgagtgtgagaggctgctgaccgccgaggccttcgcggactgtcaggacctggtgccgctggagccgtatctgcgcgcctgccagcaggaccgctgccggtgcccgggcggtgacacctgcgtctgcagcaccgtggccgagttctcccgccagtgctcccacgccggcggccggcccgggaactggaggaccgccacgctctgccccaagacctgccccgggaacctggtgtacctggagagcggctcgccctgcatggacacctgctcacacctggaggtgagcagcctgtgcgaggagcaccgcatggacggctgtttctgcccagaaggcaccgtatatgacgacatcggggacagtggctgcgttcctgtgagccagtgccactgcaggctgcacggacacctgtacacaccgggccaggagatcaccaatgactgcgagcagtgtgtctgtaacgctggccgctgggtgtgcaaagacctgccctgccccggcacctgtgccctggaaggcggctcccacatcaccaccttcgatgggaagacgtacaccttccacggggactgctactatgtcctggccaagggtgaccacaacgattcctacgctctcctgggcgagctggccccctgtggctccacagacaagcagacctgcctgaagacggtggtgctgctggctgacaagaagaagaatgcggtggtcttcaagtccgatggcagtgtactgctcaaccagctgcaggtgaacctgccccacgtgaccgcgagcttctctgtcttccgcccgtcttcctaccacatcatggtgagcatggccattggcgtccggctgcaggtgcagctggccccagtcatgcaactctttgtgacactggaccaggcctcccaggggcaggtgcagggcctctgcgggaacttcaacggcctggaaggtgacgacttcaagacggccagcgggctggtggaggccacgggggccggctttgccaacacctggaaggcacagtcaacctgccatgacaagctggactggttggacgatccctgctccctgaacatcgagagcgccaactacgccgagcactggtgctccctcctgaagaagacagagaccccctttggcaggtgccactcggctgtggaccctgctgagtattacaagaggtgcaaatatgacacgtgtaactgtcagaacaatgaggactgcctgtgcgccgccctgtcctcctacgcgcgcgcctgcaccgccaagggcgtcatgctgtggggctggcgggagcatgtctgcaacaaggatgtgggctcctgccccaactcgcaggtcttcctgtacaacctgaccacctgccagcagacctgccgctccctctccgaggccgacagccactgtctcgagggctttgcgcctgtggacggctgcggctgccctgaccacaccttcctggacgagaagggccgctgcgtacccctggccaagtgctcctgttaccaccgcggtctctacctggaggcgggggatgtggtcgtcaggcaggaagaacgatgtgtgtgccgggatgggcggctgcactgtaggcagatccggctgatcggccagagctgcacggccccaaagatccacatggactgcagcaacctgactgcactggccacctcgaagccccgagccctcagctgccagacgctggccgccggctattaccacacagagtgtgtcagtggctgtgtgtgccccgacgggctgatggatgacggccggggtggctgcgtggtggagaaggaatgcccttgcgtccataacaacgacctgtattcttccggcgccaagatcaaggtggactgcaatacctgcacctgcaagagaggacgctgggtgtgcacccaggctgtgtgccatggcacctgctccatttacgggagtggccactacatcacctttgatgggaagtactacgactttgacggacactgctcctacgtggctgttcaggactactgcggccagaactcctcactgggctcattcagcatcatcaccgagaacgtcccctgtggcactacgggcgtcacctgctccaaggccatcaagatcttcatggggaggacggagctgaagttggaagacaagcaccgtgtggtgatccagcgtgatgagggtcaccacgtggcctacaccacgcgggaggtgggccagtacctggtggtggagtccagcacgggcatcatcgtcatctgggacaagaggaccaccgtgttcatcaagctggctccctcctacaagggcaccgtgtgtggcctgtgtgggaactttgaccaccgctccaacaacgacttcaccacgcgggaccacatggtggtgagcagcgagctggacttcgggaacagctggaaggaggcccccacctgcccagatgtgagcaccaaccccgagccctgcagcctgaacccgcaccgccgctcctgggccgagaagcagtgcagcatcctcaaaagcagcgtgttcagcatctgccacagcaaggtggaccccaagcccttctacgaggcctgtgtgcacgactcgtgctcctgtgacacgggtggggactgtgagtgcttctgctctgccgtggcctcctacgcccaggagtgtaccaaagagggggcctgcgtgttctggaggacgccggacctgtgccccatattctgcgactactacaaccctccgcatgagtgtgagtggcactatgagccatgtgggaaccggagcttcgagacctgcaggaccatcaacggcatccactccaacatctccgtgtcctacctggagggctgctacccccggtgccccaaggacaggcccatctatgaggaggatctgaagaagtgtgtcactgcagacaagtgtggctgctatgtcgaggacacccactacccacctggagcatcggttcccaccgaggagacctgcaagtcctgcgtgtgtaccaactcctcccaagtcgtctgcaggccggaggaaggaaagattcttaaccagacccaggatggcgccttctgctactgggagatctgtggccccaacgggacggtggagaagcacttcaacatctgttccattacgacacgcccgtccaccctgaccaccttcaccaccatcaccctccccaccacccccacctccttcaccactaccaccaccaccaccaccccgacctccagcacagttttatcaacaactccgaagctgtgctgcctctggtctgactggatcaatgaggaccaccccagcagtggcagcgacgacggtgaccgagaaccatttgatggggtctgcggggcccctgaggacatcgagtgcaggtcggtcaaggatccccacctcagcttggagcagcatggccagaaggtgcagtgtgatgtctctgttgggttcatttgcaagaatgaagaccagtttggaaatggaccatttggactgtgttacgactacaagatacgtgtcaattgttgctggcccatggataagtgtatcaccactcccagccctccaactaccactcccagccctccaccaaccacgacgaccacccttccaccaaccaccacccccagccctccaaccaccaccacaaccacccctccaccaaccaccacccccagccctccaataaccaccacgaccacccctctaccaaccaccactcccagccctccaataagcaccacaaccacccctccaccaaccaccactcccagccctccaaccaccactcccagccctccaaccaccactcccagccctccaacaaccaccacaaccacccctccaccaaccaccactcccagccctccaatgactacgcccatcactccaccagccagcactaccacccttccaccaaccaccactcccagccctccaacaaccaccacaaccacccctccaccaaccaccactcccagtcctccaacgactacgcccatcactccaccaaccagcactactacccttccaccaaccaccactcccagccctccaccaaccaccacaaccacccctccaccaaccaccactcccagccctccaacaaccaccactcccagtcctccaacaatcaccacaaccacccctccaccaaccaccactcccagccctccaacaacgaccacaaccacccctccaccaaccaccactcccagccctccaacgactacacccatcactccaccaaccagcactaccacccttccaccaaccaccactcccagccctccaccaaccaccacaaccacccctccaccaaccaccactcccagccctccaacaaccaccactcccagccctccaataaccaccacaaccacccctccaccaaccaccactcccagctctccaataaccaccactcccagccctccaacaaccaccatgaccaccccttcaccaaccaccacccccagctctccaataaccaccacaaccaccccttcctcaactaccactcccagccctccaccaaccaccatgaccaccccttcaccaaccaccactcccagccctccaacaaccaccatgaccacccttccaccaaccaccacttccagccctctaacaactactcctctacctccatcaataactcctcctacattttcaccattctcaacgacaacccctactaccccatgcgtgcctctctgcaattggactggctggctggattctggaaaacccaactttcacaaaccaggtggagacacagaattgattggagacgtctgtggaccaggctgggcagctaacatctcttgcagagccaccatgtatcctgatgttcccattggacagcttggacaaacagtggtgtgtgatgtctctgtggggctgatatgcaaaaatgaagaccaaaagccaggtggggtcatccctatggccttctgcctcaactacgagatcaacgttcagtgctgtgagtgtgtcacccaacccaccaccatgacaaccaccaccacagagaacccaactccgccaaccacgacacccatcaccaccaccactacggtgaccccaaccccaacacccaccggcacacagaccccaaccacgacacccatcaccaccaccactacggtgaccccaaccccaacacccaccggcacacagaccccaaccacgacacccatcaccaccaccactacggtgaccccaaccccaacacccaccggcacacagaccccaaccacgacacccatcaccaccaccactacggtgaccccaaccccaacacccaccggcacacagaccccaaccacgacacccatcaccaccaccactacggtgaccccaaccccaacacccaccggcacacagaccccaaccacgacacccatcaccaccaccactacggtgaccccaaccccaacacccaccggcacacagaccccaaccacgacacccatcaccaccaccactacggtgaccccaaccccaacacccaccggcacacagaccccaaccacgacacccatcaccaccaccactacggtgaccccaaccccaacacccaccggcacacagaccccaaccacgacacccatcaccaccaccactacggtgaccccaaccccaacacccaccggcacacagaccccaaccacgacacccatcaccaccaccactacggtgaccccaaccccaacacccaccggcacacagaccccaaccacgacacccatcaccaccaccactacggtgaccccaaccccaacacccaccggcacacagaccccaaccacgacacccatcaccaccaccactacggtgaccccaaccccaacacccaccggcacacagaccccaaccacgacacccatcaccaccaccactacggtgaccccaaccccaacacccaccggcacacagaccccaaccacgacacccatcaccaccaccactacggtgaccccaaccccaacacccaccggcacacagaccccaaccacgacacccatcaccaccaccactacggtgaccccaaccccaacacccaccggcacacagaccccaaccacgacacccatcaccaccaccactacggtgaccccaaccccaacacccaccggcacacagaccccaaccacgacacccatcaccaccaccactacggtgaccccaaccccaacacccaccggcacacagaccccaaccacgacacccatcaccaccaccactacggtgaccccaaccccaacacccaccggcacacagaccccaaccacgacacccatcaccaccaccactacggtgaccccaaccccaacacccaccggcacacagaccccaaccacgacacccatcaccaccaccactacggtgaccccaaccccaacacccaccggcacacagaccccaaccacgacacccatcaccaccaccactacggtgaccccaaccccaacacccaccggcacacagaccccaaccacgacacccatcaccaccaccactacggtgaccccaaccccaacacccaccggcacacagaccccaaccacgacacccatcaccaccaccactacggtgaccccaaccccaacacccaccggcacacagaccccaaccacgacacccatcaccaccaccactacggtgaccccaaccccaacacccaccggcacacagaccccaaccacgacacccatcaccaccaccactacggtgaccccaaccccaacacccaccggcacacagaccccaaccacgacacccatcaccaccaccactacggtgaccccaaccccaacacccaccggcacacagaccccaaccacgacacccatcaccaccaccactacggtgaccccaaccccaacacccaccggcacacagaccccaaccacgacacccatcaccaccaccactacggtgaccccaaccccaacacccaccggcacacagaccccaaccacgacacccatcaccaccaccactacggtgaccccaaccccaacacccaccggcacacagaccccaaccacgacacccatcaccaccaccactacggtgaccccaaccccaacacccaccggcacacagaccccaaccacgacacccatcaccaccaccactacggtgaccccaaccccaacacccaccggcacacagaccccaaccacgacacccatcaccaccaccactacggtgaccccaaccccaacacccaccggcacacagaccccaaccacgacacccatcaccaccaccactacggtgaccccaaccccaacacccaccggcacacagaccccaaccacgacacccatcaccaccaccactacggtgaccccaaccccaacacccaccggcacacagaccccaaccacgacacccatcaccaccaccactacggtgaccccaaccccaacacccaccggcacacagaccccaaccacgacacccatcaccaccaccactacggtgaccccaaccccaacacccaccggcacacagaccccaaccacgacacccatcaccaccaccactacggtgaccccaaccccaacacccaccggcacacagaccccaaccacgacacccatcaccaccaccactacggtgaccccaaccccaacacccaccggcacacagaccccaaccacgacacccatcaccaccaccactacggtgaccccaaccccaacacccaccggcacacagaccccaaccacgacacccatcaccaccaccactacggtgaccccaaccccaacacccaccggcacacagaccccaaccacgacacccatcaccaccaccactacggtgaccccaaccccaacacccaccggcacacagaccccaaccacgacacccatcaccaccaccactacggtgaccccaaccccaacacccaccggcacacagaccccaaccacgacacccatcaccaccaccactacggtgaccccaaccccaacacccaccggcacacagaccccaaccacgacacccatcaccaccaccactacggtgaccccaaccccaacacccaccggcacacagaccccaaccacgacacccatcaccaccaccactacggtgaccccaaccccaacacccaccggcacacagaccccaaccacgacacccatcaccaccaccactacggtgaccccaaccccaacacccaccggcacacagaccccaaccacgacacccatcaccaccaccactacggtgaccccaaccccaacacccaccggcacacagaccccaaccacgacacccatcaccaccaccactacggtgaccccaaccccaacacccaccggcacacagaccccaaccacgacacccatcaccaccaccactacggtgaccccaaccccaacacccaccggcacacagaccccaaccacgacacccatcaccaccaccactacggtgaccccaaccccaacacccaccggcacacagaccccaaccacgacacccatcaccaccaccactacggtgaccccaaccccaacacccaccggcacacagaccccaaccacgacacccatcaccaccaccactacggtgaccccaaccccaacacccaccggcacacagaccccaaccacgacacccatcaccaccaccactacggtgaccccaaccccaacacccaccggcacacagaccccaaccacgacacccatcaccaccaccactacggtgaccccaaccccaacacccaccggcacacagaccccaaccacgacacccatcaccaccaccactacggtgaccccaaccccaacacccaccggcacacagaccccaaccacgacacccatcaccaccaccactacggtgaccccaaccccaacacccaccggcacacagaccccaaccacgacacccatcaccaccaccactacggtgaccccaaccccaacacccaccggcacacagaccccaaccacgacacccatcaccaccaccactacggtgaccccaaccccaacacccaccggcacacagaccccaaccacgacacccatcaccaccaccactacggtgaccccaaccccaacacccaccggcacacagaccccaaccacgacacccatcaccaccaccactacggtgaccccaaccccaacacccaccggcacacagaccccaaccacgacacccatcaccaccaccactacggtgaccccaaccccaacacccaccggcacacagaccccaaccacgacacccatcaccaccaccactacggtgaccccaaccccaacacccaccggcacacagaccccaaccacgacacccatcaccaccaccactacggtgaccccaaccccaacacccaccggcacacagaccccaaccacgacacccatcaccaccaccactacggtgaccccaaccccaacacccaccggcacacagaccccaaccacgacacccatcaccaccaccactacggtgaccccaaccccaacacccaccggcacacagaccccaaccacgacacccatcaccaccaccactacggtgaccccaaccccaacacccaccggcacacagaccccaaccacgacacccatcaccaccaccactacggtgaccccaaccccaacacccaccggcacacagaccccaaccacgacacccatcaccaccaccactacggtgaccccaaccccaacacccaccggcacacagaccccaaccacgacacccatcaccaccaccactacggtgaccccaaccccaacacccaccggcacacagaccccaaccacgacacccatcaccaccaccactacggtgaccccaaccccaacacccaccggcacacagaccccaaccacgacacccatcaccaccaccactacggtgaccccaaccccaacacccaccggcacacagaccccaaccacgacacccatcaccaccaccactacggtgaccccaaccccaacacccaccggcacacagaccccaaccacgacacccatcaccaccaccactacggtgaccccaaccccaacacccaccggcacacagaccccaaccacgacacccatcaccaccaccactacggtgaccccaaccccaacacccaccggcacacagaccccaaccacgacacccatcaccaccaccactacggtgaccccaaccccaacacccaccggcacacagaccccaaccacgacacccatcaccaccaccactacggtgaccccaaccccaacacccaccggcacacagaccccaaccacgacacccatcaccaccaccactacggtgaccccaaccccaacacccaccggcacacagaccccaaccacgacacccatcaccaccaccactacggtgaccccaaccccaacacccaccggcacacagaccccaaccacgacacccatcaccaccaccactacggtgaccccaaccccaacacccaccggcacacagaccccaaccacgacacccatcaccaccaccactacggtgaccccaaccccaacacccaccggcacacagaccccaaccacgacacccatcaccaccaccactacggtgaccccaaccccaacacccaccggcacacagaccccaaccacgacacccatcaccaccaccactacggtgaccccaaccccaacacccaccggcacacagaccccaaccacgacacccatcaccaccaccactacggtgaccccaaccccaacacccaccggcacacagaccccaaccacgacacccatcaccaccaccactacggtgaccccaaccccaacacccaccggcacacagaccccaaccacgacacccatcaccaccaccactacggtgaccccaaccccaacacccaccggcacacagaccccaaccacgacacccatcaccaccaccactacggtgaccccaaccccaacacccaccggcacacagaccccaaccacgacacccatcaccaccaccactacggtgaccccaaccccaacacccaccggcacacagaccccaaccacgacacccatcaccaccaccactacggtgaccccaaccccaacacccaccggcacacagaccccaaccacgacacccatcaccaccaccactacggtgaccccaaccccaacacccaccggcacacagaccccaaccacgacacccatcaccaccaccactacggtgaccccaaccccaacacccaccggcacacagaccccaaccacgacacccatcaccaccaccactacggtgaccccaaccccaacacccaccggcacacagaccccaaccacgacacccatcaccaccaccactacggtgaccccaaccccaacacccaccggcacacagaccccaaccacgacacccatcaccaccaccactacggtgaccccaaccccaacacccaccggcacacagaccccaaccacgacacccatcaccaccaccactacggtgaccccaaccccaacacccaccggcacacagaccccaaccacgacacccatcaccaccaccactacggtgaccccaaccccaacacccaccggcacacagaccccaaccacgacacccatctccaccaccactacggtgaccccaaccccaacacccaccggcacacagaccccaaccacgacacccatcaccaccaccaccacggtgaccccaaccccgacacccaccggcacacagaccccaaccacggtactcatcaccaccaccactacgatgaccccaaccccaacacccaccagcacaaagagtacaaccgtgacacccatcaccaccacaactacggtgaccgcaaccccaacacccaccggcacacagaccccaaccatgatacccatcagcaccaccactacggtgaccccaaccccaacacccaccactggaagcacggggccccccacccacacaagcacagcaccgattgctgagttgaccacatccaatcctccgcctgagtcctcaacccctcagacctctcggtccacctcttcccctctcacggagtcaaccacccttctgagtaccctaccacctgccattgagatgaccagcacggccccaccctccacacccacggcacccacgaccacgagcggaggccacacactgtctccaccgcccagcaccaccacgtcccctccaggcacccccactcgcggtaccacgaccgggtcatcttcagcccccacccccagcactgtgcagacgaccaccaccagtgcctggaccccaacgccgaccccactctccacacccagcatcatcaggaccacaggcctgaggccctacccttcctctgtgcttatctgctgtgtcctgaacgacacctactacgcaccaggtgaggaggtgtacaacggcacatacggagacacctgttatttcgtcaactgctcactgagctgtacgttggagttctataactggtcctgcccatccacgccctccccaacacccacgccctccaagtcgacgcccacgccttccaagccatcgtccacgccctccaagccgacgcccggcaccaagccccccgagtgcccagactttgatcctcccagacaggagaacgagacttggtggctgtgcgactgcttcatggccacgtgcaagtacaacaacacggtggagatcgtgaaggtggagtgtgagccgccgcccatgcccacctgctccaacggcctccaacccgtgcgcgtcgaggaccccgacggctgctgctggcactgggagtgcgactgctactgcacgggctggggcgacccgcactatgtcaccttcgacggactctactacagctaccagggcaactgcacctacgtgctggtggaggagatcagcccctccgtggacaacttcggagtttacatcgacaactaccactgcgatcccaacgacaaggtgtcctgtccccgcaccctcatcgtgcgccacgagacccaggaggtgctgatcaagaccgtgcatatgatgcccatgcaggtgcaggtgcaggtgaacaggcaggcggtggcactgccctacaagaagtacgggctggaggtgtaccagtctggcatcaactacgtggtggacatccccgagctgggtgtcctcgtctcctacaatggcctgtccttctccgtcaggctgccctaccaccggtttggcaacaacaccaagggccagtgtggcacctgcaccaacaccacctccgacgactgcattctgcccagcggggagatcgtctccaactgtgaggctgcggctgaccagtggctggtgaacgacccctccaagccacactgcccccacagcagctccacgaccaagcgcccggccgtcactgtgcccgggggcggtaaaacgaccccacacaaggactgcaccccatctcccctctgccagctcatcaaggacagcctgtttgcccagtgccacgcactggtgcccccgcagcactactacgatgcctgcgtgttcgacagctgcttcatgccgggctcgagcctggagtgcgccagtctgcaggcctacgcagccctctgtgcttagcacaacatctgcctcgactggcggaggcacacgcatggggcctgcttggtggagcgcccatctcacagggagtaccaggcctgtggccctgcagaagagcccacgtgcaaatccagctcctcccagcataacaacacagtcctggtggaaggctgcttctgtcctgagggcaccatgaactacgctcctggctttgatgtctgcgtgaagacctgcggctgtgtgggacctgacaatgcgcccagagagtttggggagcacttcgagttcgactgcaagaactgtgtctgcctggagggtggaagtggcatcatctgccaacccaagaggtgcagccagaagcccgttacccactgcgtggaagacggcacctacctcgccacggaggtcaaccctgccgacacctgctgcaacattaccgtctgcaagtgcaacaccagcctgtgcaaagagaagccctccgtgtgcccgctgggattcgaagtgaagagcaagatggtgcctggaaggtgctgtcctttctactggtgtgagtccaagggggtgtgtgttcacgggaatgctgagtaccagcccggttctccagtttattcctccaagtgccaggactgcgtgtgcacggacaaggtggacaacaacaccctgctcaacgtcattggcttgcaccacggtgccctgcaacacttcttgccagccctggcttcgaactcatggaggcccccggggagtactgtaagaagtgtgaccagacgcattgtatcatcaaacggcccggcaaacaggcacgtcatcctgaagcccggggacttcaagagcgacccgaagaacaactgcacattcttcagctgcgtgaagatccacaaccagctcatctcgtccgtctccaacatcaccctgcccaaactttgatgccagcatttgcatcccgggctccatcacatttcatgcccaatggatgcttgcaagacctggcacccctcgcaatgagaccagggtgccctgctccaccgtcccccgtcaccacggaggtttcgtacgctggctgcaccaagaccgtcctcatgaatcattgctccgggtcctgcgggacattttggtcatgtaaccgggccaaggcccagggccctggaccacagcttgctcctgctgcaaagaggagaaaaccagccaagtgtgaggtggtcctgaagttcccccaatggcggctcgctgacaacacccaccctacacccacatcgagagctgccagtgcagggacaccgtctgcgggcttccccaccggcacctccccgccggggcccggcgctcccctaggcatctgggggagcgggtgagcggggtgggcacagcccccttcactgccctcgacagctttacctcccccggaccctctgagcctcctaagctcggcttcctctcttcagatatttattgtctgagtctttgttcagtccttgcttttcccaataataaactcagggggacatgctgt

SEQ ID NO: 114044 - DNA, 415 bp, Homo sapiens
aaggagtcctgcttatcacaatgaatgttctcctgttcagcgttgtgatctttgccaccttcgtgactttatgcaatgcatcatgctatttcatacctaatgagggagttccaggagattcaaccaggaaatgcatggatctcaaaggaaacaaacacccaataaactcggagtggcagactgacaactgtgagacatgcacttgctacgaaacagaaatttcatgttgcacccttgtttctacacctgtgggttatgacaaagacaactgccaaagaatcttcaagaaggaggactgcaagtatatcgtggtggagaagaaggacccaaaaaagacctgctctgtcagtgaatggataatctaaagtgcttctagatggcacagggcttccaggccaggcctcattcttctctg

SEQ ID NO: 114045 - DNA, 404 bp, Homo sapiens
cgcgctctgctccacccgacgggcgtgtgtgtgctgggcctggctcgcggcgaaccgagatggcagagcagtcggacgaggccgtgaagtactacaccctagaggagattcagaagcacaaccacagcaagagcacctggctgatcctgcaccacaaggtgtacgatttgaccaaatttctggaaatgtccaaaacattcatcattggggagctccatccagatgacagaccaaagttaaacaagcctccggaaactcttatcactactattgattctagttccagttggtggaccaactgggtgatccctgccatctctgcagtggccgtcgccttgatgtatcgcctatacatggcagaggactgaacacctcctcagaagtcagcgcaggaagagcctgct

SEQ ID NO: 114046 - DNA, 452 bp, Homo sapiens
  misc_feature (1)...(452): n = a,t,c or g
accattctgcacgcgggtgatcggctaggcatgcacgtttctgcagaaatgaggcgtccgcaccctcaataatgactttccagttgagaaaaggagtgttctgttagaaaatcctcccagagtcggatgaagtagaggagggctcgggtgctggggggcgggacctggttattgtttatggcatcccagttgatgaaacccagcttggatttaaaattcttccagaaagtgtcaaagttaaacatcccaggagacgtctcagagttcacagtattgactccaccaacagcgtcacctcctccactgccccagctcgacccttgccccccgggaatatgtccatttcctccgccgctcccaccgtggttcacgaagaaggagccggtgctggatcccttccccctctttagcctgtgggcgcgcaggaaggaactcgnnnnnnttacataaac

SEQ ID NO: 114047 - DNA, 387 bp, Homo sapiens
  misc_feature (1)...(387): n = a,t,c or g
tcaaacagttctcaccttgggggnagtctcgccaatttgtcccnngcagggggaccacgcccttgtctacctgttggggtcagggtaacaacattaagacacaggaaatgacctntagcaccctttccactgtcgccccggctggagtacagtggtggaatctcagctcactgaagcctccacttcctggactcaagtgatcctcccgcctcagcctcctaggtagctgggcgtgcccctctttcctcttctttagccccagtcttcccccacatttacttaatcccttaaactgcatctcagggctggcaaatatattcacttagttacaattaaaatatttagttacttaagccgggcatggtggctctcgcctgtaagaagtcg

SEQ ID NO: 114048 - DNA, 2093 bp, Homo sapiens
  misc_feature (1)...(2093): n = a,t,c or g
ggtctcactatgtagcccaggctggacttgaaaacccctgggctcaagcggtcatccccactcagcctccccaaaatgctgtctctactaaaaatacaaaaattaagcctgggcgtgtctggtcacgccctgtagtccccagctactcgagaggctgaggcacgagaatcgcttgaaccctggtaggcagagattgcagtgagctgacattataccaccgcactccagcctgagtgacagagtgagatatggcctcaaaaaacaaaaaaaagccacacagaatacaagcaagaaagtacttttagattaaaattcgtcttatgtgaattatggcaaatgaaatcaccccactgtttacctgttttatgagtttttacatttgcttaaaattagcataccttgatcttttacagttcccatctccaccaattagtattggcagatttccactatatgtagaagtcaaaagatcagactgtaaaaatatcagatattgtaattaagagctccaaacaagtcttgcagtttcaaaggtagaaacccacccagccagttcagctgcttgggacttcaaagccctaacgcctagccatcttcaggccgggcttcagggttccttcttcccacccattcagggccaagcagggacttgttcaaacatacacatttcaagttcctagcacacagtagggtgctaaagtggggaattggattattaaacttggaattcttcccatcaacaaatatccaccctctcctgtccagcttggcctcaggatcttcagggttctctcttctctgagggcagctaaggtttctacatccttcatggaggttttcctttacttctcgacagaagacagttccctttaggcctatcatctctaaatgcaactggctttccattttccacttactcaacactccacaaagtacacttgctacatggtatttattcaatgactgtatatttagtcaccacctcaaatcactgctaagcttctcttcatgtctatctgtaccacagtttcccaatcttaagactgtgacagtcagcttggcaagggcttggctgttggccgattcatcatgacttgacaatggtgtgtcacaaaagaagctccaaagtaaatgctgtgaaggaaagaggatgaggatggagatgaggatcctgaaaaagggccccagactggctgccccaaccccatggaccctgaggccctgagtaaggcctggggagctgctttcccctctgccccaggaactctgtcccaggggccgattctaaggcacagtggtgaaggacatggattggtcccccaaagtgtgggtcctcaggtctcatggcagccactccgcctggggaacagtgcaaacaagcattccatttagaagatcttccagaacacacacaagaagcattgtctaatgaaaatggagacaaaggtctttcttggaagagagtgcccaagtagatactctctgccccaagactaaccaggtcccattttaaggtccctgagaacagcagccgtgggagcaaccaagcctttcaaaggctgacaaggcacagagtggatgaatggaactgaacgatacatgaaaaaaacactttggctgataaaacctccaacctgaggcagggacagtgtcgctcgctgacatgcagaaacatgactgtagcagagatgatgatgatgagaaatgcttcgcatttcccacactgccgatatcccaagccctgtgctaccaccctctcccccgaacacacacacacacacacacacacacacacacacacacacacacacacacacacagagcatctgcagaataagtcagaggttgacacccagagcctgacgtcaggataggactcttggcactccgcactgaaacaccgtgattagtcctgactagacagcaaaagtaacgccagcctaagcttgaaatgaagggtccatcttgtgaaagttaggctgcgcccaagacagccangtctgggaagtctttcacttctcctacttcgctgaaagnttgtccaccttggttgaatgtcanttgtaccgtagcggatanggtctttgtgtggt

SEQ ID NO: 114049 - DNA, 473 bp, Homo sapiens
atgacctgcttacgccaatcttggcacgaggagatgcctgtgattttatgaattcagaagtcagtttttaattgcagaaaactaattattttctttttaacttacagagggtggttttcctgaagcagctggctagtggcttattacttgtgactggtaagaaaatccttggattgtgatgttctgtgaaacttccatttttaaatgcttgcagtatacacgtttgtttgctactgcctacatggtagacacttattgccacaagtgtctgaggcccatttcattgccttgtgtgcaagtgggttagacaagtggtcttctttgtgtagcaacataacaagtaatggtcacctaaattgcaggatgatgattcttcccccttttccttgctaaattaatttttcccccttaggacctctggtcctcaatcgagttcctctacgaagaacacaccagaaatttgtcattgccac

SEQ ID NO: 114050 - DNA, 1937 bp, Homo sapiens
agttaggactcctcctgggctggaggatttacctggtggggcacttccagactgtttctagcaatatacacacacgttctttcctgtgtcttcaccccaaaacttcagttgattctgacctgggaggatctggggaccagggggtcttgggctgccttgtgatacacagccccagccaccctgcacgggggctgcgagcaccagcaactttgatttatagaaggaaaatggaaacccccatctgagtattttgggaggagcccccagccctcatccagctctggcacgctgatacctccaggtactcccctcactgtcaaagctggggctcagcctcttgtcatctggagctttgtgggcaaagctgagaagctgcaacccagatttcaacccaaaaaggtcaagctgaatgcctcagactgatgtggaaggcagctggccttcctgggttggaacgaggcagtggccctgagccccttctccagggccaggtagaaaggacaaacttggtctctgcctcggggaagcaggaggagggctagaagccagtccctccccacctgcccagagctccaggccagcacagaaattcctgaggccaacgtcaccaaagttagattgaatgtttattatctttctttttcctttttaccttattgatttgatgaatcttgaaatggattcatttccataaaccgagttaaagtatggcccgaccatttaagaaaacaaccatctgagacacgcaggaaattgtgagcatttcgacccgagctctcatttcctatttgtgaagggtcagacacagtctacccaggggtgtctgggggacaagggggtctctggagatgtcacccagggagccccctctatgtctgagaggctgccactgctgcacatgctcacgtgaggcttgggcggccatcctggcacaatggctcttccctggggtcaaccgtgacctgtctggctcaggaatgggctctggctgctgggggagcccgtgtcactcctgggccatgggggcacctcctgggcacttaggtgtttcagcatagattccagtttcgcaccctgggcagaccccccaggccccatccgggatagggcaaagacaggtgctggcggcccccagggaaggagggtgtgtaccccaaggccccctggctgtgctgaggggctggggtgagcgctccatgttcacatgagcactgctgcctcttcacttgtgggactttttgcaaacccaaggatgaactttgtgtgcattcaataaaatcatcttggggaagaggctggcatccccgtgtccttgaagcttttgggtcggggaggccccacacgggcccggagccatcctcaccacctgctcctgtagaggcaggggccaggcgcagagcagttagggaaggagtcaactccccgcaccctcccaagccggtgcccactcagggctttaagccagctcatgctctgcccctcacagaccaggcacggggttgggctggcaacaggcctgctcagccctgcgggggccatggggcagactgcaggcctccaacgacgttgagggcacccaggagccaggaaagagttcaaggggacacctggcaagtcgcccccacaggtctctcattagcaagaacagagcctgggactctgcctctgttggacgctggtgtttgcggggaggcgggcgggggaatgcagaccaatcgaccaccccatagtgagcgtggaacatgcccagtcacaccacccaccccctccgactcgcccatcatctgaccatgcccccacttgcaggactgactgacaggctgaaaacgacaggcacgcgggccgggcgcggtggctcacacctgtcatcccacacctataatcccaacattttgggaggccggggcaggtggatcacgaggtcggtcaggagttca

SEQ ID NO: 114051 - DNA, 1615 bp, Homo sapiens
  misc_feature (1)...(1615): n = a,t,c or g
cgtttgtcagcccaagcttggcggtgcacaagagctcctcggccgtggaccgccagcgaagagtacctcctggacatgatcccaccccgctccatcccccagtcagccacgtggaaatagtgcgagccaggccccgtggaagacgggctccctcctcccccacctggcccctggtctagaaggacccactgcaccaccctccgctggctcgggaagacaccgtgcccgccccaagagcaagcaccggccatgctgcagaggcaagacctcaattcttggctgcaaagtttcatcagggctagggggctggtgccgcctcataggcagacgaggatcatcgctggggggacctttcccgtgggctttcttcctttctctcttttgcctttaagttttgcccggacaccagcagaaaaagtggaccttgggggctggttctgctcctggcccccttgttcagcccctgccggcacacgggcggctcaccctggacactgtgatgcgcatgggcaaggccagcgcccggggctttttaaccgagcggggggtttcatttttttgcttttccctgttttaggctcccagtctttgacgtgccttcccatggcgatttataagttgaaagattttttttttttttaatcacctcatgatgatggagttaaaagtaaaccgtgcagaccctggggtccctgttgtacgctgcatcatcccgctggccctgtgccctggagggtgggcggctcatggtgccancagccccctggcaggggacggcccggcccgccccccgtgactgacggganagatgcagggatgggccgaggcagccctcgctccagctgaacgcctccattgctgcttgttttggagacccccgcccccgcaacttccagacttagcagaagaacaaactgaagaacagacggcagccagagaagcagggattccagaagctgcccattaagggagaaggagaggatccggtcggcagcagccctgagcagaaagctggaggggggactgtcgcggggtttttctgttgtggtttattttattaaattttttccttttttctattcatttcgatggacgcaatcttaagccaccctggccttgctcctgggaggtgagcgtgcacaggtgtgtgcaggtcaggaggtgccgtccaggtgtgcggcgagccgctgcgcacagatgtcaggatttccgtttgggtctagtttagaacctgtccttaaacctaggggttgctgtcaggatttgctttcagacttttttttttttttgtaattccctttagagtctacaaaaatgtttttaaaaggatcaggtctgcttttagtttcatttttggttttttcccggccccacttttaaaaaccggttcccgggagaaagggaaaaacccgttccgtgtctcttgcaggctgggccggcttcatgccagtgcgagggcgtcccgtgcccacgtacatacgtatgtctccatgagttctgggctccactggttccaattgagctccagccctggttttcctacccatgcagttagggactttaatttaattttttttttgtagggccaccgcctttcaaacacaactggtacaac

SEQ ID NO: 114052 - DNA, 478 bp, Homo sapiens
  misc_feature (1)...(478): n = a,t,c or g
ttacgcaagcttggacgagggaagtgtgaagagtgtggaagggttactgtgggatctgggggcattggccactgatgggattgttgggcagtgctgggtttgaggttggtgatggtgattgttggacttgccttgggagtggaagagagaatgcgagccagtgtcagaggtgctggtgaatggaggtgtgtgacccgagcggtaacatccagaaaggatttcccgcaaagacagcgcggcttttcagctgcagctgccccaccctgctccagtctccctcatttccagcctggaaattgttgctaattgccccattggcagttgggaaggcaacgcctgttaagatgtggagcaataaagtggagcaggtatgctgtgccgtatgcccctcttcctgcaccgtcctccttctgtnatcgttgagtggctcaggagtgctggccctctaacagactgcctgggcgtggatcctgactgn

SEQ ID NO: 114053 - DNA, 462 bp, Homo sapiens
  misc_feature (1)...(462): n = a,t,c or g
nggtgccaattatatgataccccgncatcagtgagaataagtaccgccggtggcaggggctgggtggggggcacactcgctccccacacaggccagggctgagcaggaggcctcagagctgctcttggggagcaacccagggccttggggcttctctcccatgcccagaagggctgcaccaggaacacccagccctgtctcctgctccagttccacagcacccctcacaccctgccccagaccctccacaaccaggcacagcctggagtcaacacatccaggagccccatcttgggaggagggaggaagagcttccagcccctccccaccattcaacttttaaggatgaattggagctcatctgattagagtttctggcagctccaatcatctctgattggccccactccccgagcactcttagctaagcgctctttcccagtgccttcgtccaatgttgcg

SEQ ID NO: 114054 - DNA, 430 bp, Homo sapiens
cccgctgcaggaattcggcacgagctgaaccaagacttacccgaagttgccgcggggccttccgatcccctaggccattgcccaagtctggccaggctgatgggaccagcgaggagtctctgcaccttgacattcagaaactgaaggagaagagggacatgctggacaaggagatctcccagttcgtatctgaaggctacagtgtggatgaactggaggaccacattacccagcttcacgagtacaatgacatcaaggatgtggggcagatgctgatgggcaaactagctgtgatccgaggtgtcaccaccaaagagttgtatccagagtttgggctggacatgaatgactgagcaggctcatcgccccttgtccacagctcccagggacagaagggtgtggacatgataaacactgagagcccaaccag

SEQ ID NO: 114055 - DNA, 397 bp, Homo sapiens
gttgacacatatacatacttgaatgaataacttaattcttaggagacacttaaataagaattatttctgttattgaaacacagttccagttacagggtctttgaaatcatgagagagttgtacagttatatttctgtatagtgtgaagagctatcttattttttgcagattacttactttgttaatatacctccccctcctttaaccaattggtccattattattgtaagcgtattacaaagaatactcctttggaagtcagaagaatgatacctaatctttaatttcttatcaggaactaggttttcattgtatgatggacacgatgtaacccctaaagacagaaaaagaagtgaaaaatagtcctcattctcatggatttatagctgtagtagaa

SEQ ID NO: 114056 - DNA, 735 bp, Homo sapiens
atgagtggagatatcagtggcaatggaatgtttttaagggaggaaggaattcagaatacacgtctatacacagcaaagcctgttgatcttgtcatggccatggacctgcaccagtctgtggcccgaaggctggggacccctggggttacatcgtgtccatcatacaatgaaaaactagttcctgataagaaattaaagattaggtatcattcttctgacttccaaaagagtattctttgtaatacgcttacaataataatggaccaattggttaaaggagggggagctatcatggtaaaaggcttgacacagccctgttcaggcttgtccgtgtgccaaaatcaacatacaatacgtacttctgggttttttagagctgaccccaaaatatctatttacccagacgttgacattctcatgagtaataggcaaagctccgaggacatgctgttgattcctacacgaagaaacctcaaacccaggattcaagccaaaaacaatgattctcaagttcctatgaaatcctggatggatgttgaactgggcaacgtactagctgactcccgtggcagatgcgagcctcaacaaagctccagggctggcacttcaagggagcggaggagcctgcctcctatctatggcctacagctcctttgccctgtgatttttggttggcctttgccaactggaagcactggcaggaaatcagaggatgagaagagggacagcaaatga

SEQ ID NO: 114057 - DNA, 783 bp, Homo sapiens
atgcccagcgagcggagggccggcctccctccctccctcccggaccgcgggcgggcgggcgaacacgacggctcctcaaactcgcggggcggggcggggcggcaagcccgctcaatcgcgcgcagacacagcgaggcgatccgcgctgccggctcggcgcagaaatacgaccagagagacttgcatgcaaacattcctaacagcattgtccacgccaaccagaacgtccaccaaccgcggatgcatgagcagcagggaaatggccatgaaaagaaactgctgagacatgggcctacatggatgaacctcaaaaacgctaggccagcggcatcaattgagctgcaccatctcttcggcgttcacaatcgtacacaacgggccacccgcctgcagacaccactgccgagtccaagggcccccacgaacatccgacagggggccccttacctggtcggctccaccctcagccatcttggaagtggtaaacggccggaagggggaaggggctcgagcgggcagggctcaggcgtagggagccgaccggcggagcgcatcgatggggctcccctgccccggccgcccctccccgcgttcttgaatgccttcgtgttcctggaccctggcacccagcccagggcccccacaggagggaacagcagccaaggcttgctgagccccgcacggggcttcactggagccccaggcccggggacctccttctcagccacgaccacctgccaggagacgcccccgcagctgcccatctgcccacagatgttctaa

SEQ ID NO: 114058 - DNA, 1175 bp, Homo sapiens
tttttttttttttaagtgttccacgattttaataaatgtatacagttatgcaactatcattgcaatctaagtttcaaaatatgttcgacatccaaagttttatttttcatcacccaaaaaagttccttcgtgcctgtttgcagttgatcccactctcacccccaggcaaacatgaatttgcttcctctctagagatttacctttttaagaagtgtcacataaatggaataatgggattttccttgtctggcatctttcacctggcctagcgtttttgaggttcatccatgtaggcccatgtctcagcagttcctttccatgggcaatttccctgctgctcatgcatccgcggttggtggacgttctggttggcgtggacaatgctgttaggaatgtttgcatgcaagtctctctggtcgtatttctcttggcgtgggttccagggagtatggtaggggatgctgaattatagaagaagctgcaccattttacactcctaccaaggatttaggagaattccagcttctctacgtctttgctatcacttgccattgtcctttttattttatcctggcggccgtcacaggcttcctctgattggagacctgtctgccggcgatttggtagttctgaatcccaggagatctgcgggggggagccttgggttagcccccgtcacggaaaagcctcgtgttgtcgcagaccgggacttgctcaagccctggggaacttgggggcccgcggctgaaccaagaaagtaaattttgaccccgacgtaagtccttatggtgtaggggtcgaagtttaaagacttgtttttaaaaacctgaggtctcatcgacagcgtaccgcgccaatctgaagggcgctgtcccgccagcttccgtctccctcccggcagccccggggcgcctgttcggcttctctgagtgttttgtgtgctccctgacgttttaaacccacctgttaatactttgtgaaaaacaggagccacggtagcccgtaaaaactgctcacaatcaccccgccacccagagctcactagtgcgactatttttgtgaaatttcttttggcaacaagtttctcagctctcgggtgatctttaaggcagaagctggctctccgcgtgtcggcgcggaattccagcacactcactagtgtctcaggttaccct

SEQ ID NO: 114059 - DNA, 1113 bp, Homo sapiens
atgaagagacccaattctgacctaagtactaattgttcagggacaaaggtatgtctagacccagcctatggtgaggaagatgagggacttccaggaaggcttcctgaaggagaaggcctgagggagcccacagagtgcgatgggtggacaagcctgcaggccgcagggtggatgagtgttcacacgggaggctcgcaggagatgaggctgcagggccagaaaatagcaatggccaatgctgaatgcttatgccgtgccagaccctgtgcaagtgcactttcctgcccaacagcccaacaagctaggcatcctgataccatcttaccgaggcagctggggcactggaaagcagtgactcgtgtgaagttgctcaacagttaccatggtaggtcacccttcacaaccctgcggcattccaaaacaaggaaggaatctatttggaacaagcaatccatagcaaatcagaatgcccttttccagttccccacccaggtctccttaacagcatttatcacaggcctcaagaggccttgcaagtccttttctgcctccacaggatgccgtttcttaatagtcaccacaggaatggtgtctgccgtgcagccagaaactcaggatggccaacttcgatcctttgacaccatctggcaactgagagcccaaaggaattccattattagtgtgaaccaacgtataaactctctgcagggcttatgtatttattaccagaagggaataaacacagatctaaaaagcacatattttcaaaagcctgatgctggtagaagtcacagtggaagcaggagccacaagctccgaacagagccagccagctcccagcacaaaggacgctgcagtaagacatcaagtataggaggccttgctgttgaacttatgttgctcactgtatctgtcccttggagccagagtatgtctcagcaggccacccagggccctgctagcccatgcagccctttcgtcaaaagagcagaacctccagagtgtctgctgggcaaatggctgcccagctgcagactgatctcctcagcacccccacagctaggtgtgcccactaagtccctcttcccacaggctgataagcagacaaagtga

SEQ ID NO: 114060 - DNA, 412 bp, Homo sapiens
cgatgttcagaatccagtatttttggtatgtaccaccccccaccaacagacacatgatgcacatgatacatttccaacaaaggtactctgaggaccacacttcgagaaccatttctaaagcctcagtgacactcagtctttcaagaagcccaggtgagcagtaaacatattccctgaaggctcgctgaggagccctcccactttaaaataaagacttagggagcactgacccacccggagtcagaaataagttcctaaaggcaatggaggaggtgactccatgagtacttcccaaatactcaaggcccttctaccgtgcgcacctttcctttgtcctgccatttttagctcccagcacaaaggacgctgcagtaagacatcaagtataggaggccttgctgttgaacttatg

SEQ ID NO: 114061 - DNA, 420 bp, Homo sapiens
atggagtggcaaggggtgtgtgagcaagtaagcacagggtccatccatggtgcacagccaggcacaccggctgctgtggcagggcagacagctccagactctggcacaggcatgagcccgtacaagggtgtggctggaccagcatctagatgtggggaatgcggtggtgcccgaaaactcagagatgccagcaaacatggagccccaagggagcagaagcattgccagtcttcactcctgtggtctggcagacaagagtgtgtcactgcctgcagcttggtgagctggccaggaacatgttacagcgcttttcatacccacccttcggcacgtcccaggttcttgtcccgtgtccaagaagaatcaggttatgtggacaaccggagggttagcaaggtggagaagagttttactgagtga

SEQ ID NO: 114062 - DNA, 594 bp, Homo sapiens
ttgctcatcagttatcgttagtgtccgtgtattttacgtgtggcccaagacagttcttcttgttccagtgtggcccagggaagccaaaagattggacactcctggaggtgcagcacagtatctaacactacctcaatactttttccaccgaactacgtaagacccagcccacagcccagaaaaagaacttcccacaggaaaaggaggaagaggaaaatgtggaggaaattctacgaggaggggattggcccaaccgccaagtcagcatgggatgctgggacaccctggccgtgcgagaaacagaaacgtgagaagttggaagaaaggagcataaagagatgggagaaggcaaaaggcagacactgccacttaagcactagtctagtaagactagtacttaataaagtacaagaaaaaagaacggtcattaacatcctaactctctaaagcacaggagcctttttaaagggcttgaggaagtggcagagacaaactccaagaaagcctggaggaggggatcacacagcagctccctgattcactaattcagaggtggtccccagcatcttgttaagcagactgccaacccccagc

SEQ ID NO: 114063 - DNA, 687 bp, Homo sapiens
atgagccaccgcgcctggcctccttgctgcactggtcctaatgccccgagccaagttccactggttcttcttgaagatgtatcgaatgtgtatggtgatgtagaaattgatcgtaataaacacatccataaaaagaggaaactagctgaaggaagagaaaaaaccatgagttcagacgatgaagactgttcggcgaaaggaagaaatcgtcacattgtagtcaataaagccgaacttgctaactccactgaagtgttagaaagctttaaattggccagggagagctgggagttgctctattccctagaattccttgacaaagaatttacaaggatttgcttggcctggaagacggatacttggctttggttaagaatcttcctcactgatatgatcatctatcagggtcaatataaaaaggcgatagccagcctgcatcacttagcagctctccagggatccatttctcagccacagatcacagggcaggggaccctggagcatcagagggcgctcatccagctggcgacgtgccactttgcgctaggggagtacagacgaagagaaggaatggggattaaaactggggctgtggcagttgatcttctgaaagtcgtgaaagacatgattcaaggaattgggaatcttacaaccctcttccattttccactgctaggtgacttctaa

SEQ ID NO: 114064 - DNA, 598 bp, Homo sapiens
ggtgggggacccgtcctctgagaagcctgcagcttctcctccagtacccttccagcccacctggctggctgtggggataatgggcacttgggagcattggagggggaggaagcatagagaaagcagcaggagacgcacctggaagcccaggggagggaagtccacctccctgcaagtgtagggcagtgagaggagccctggcaccagcagagcaagaaagaaatgcatgcaccgttcagaataagctgtcaggtcgtctggctgtttaagatttatttattaatggtatgtgacatttagcatttctcaatgcctaagattaaactaatgctttgaatcctgatcatgcttttgagctgctcctcttgggtacttgtggcatcgtgttggcagaccctgagtgacatcttcagcggcgggaaaacgaaatgtatttcactgggatgtcaaatcaacagtgccttgacatctttccacactgctttggaacttgcagtagaccagagagaaattcaacatgtctgtctgtatgaaattggttggtgcagcatgatagagctcaatctcaaggatgcatttgattcctttgagaggctaa

SEQ ID NO: 114065 - DNA, 960 bp, Homo sapiens
atggggcaggcagctgtccacagccacgggctcctcaacaccagccaccgggctttccaggggcttgaagccaatgacaaagagggtgtcctcacaggccagccatgggggacaacaggggccagagtgaaagacacgcaggcagaaaggaaggcgccacggagtgggaaaaggcggtgtgttcatcatgtgtttactgaaccacagtgtgggcacctcagtgcaaccaatgagaaaacgtggagaagaaggagtttgagagcttatgtaaagatcgaggaatactcaggcttgtcacctggagaagagataagtggagagctggctgaacgtgcccatgtggataggtccaagagagagaagtcagcagctgcacagatgcaaaaactgttggtggggcaaggatttttccccctgcgggccagtggacactgcgcagaagccaattttaatcatgaaaggatttcaccaacaatggttgcctgcaagggaaaagccaccagtagaatgagactggaggcatgtgaaagagctgatgaaggcctgcaagattccgagtccgaaaggtccctgagtagattggaagcagtgacagcacgctcctttgaagaggaaggagagcatttgggcagtagaaaacacagaatgtccgaagaaaaagactgtggtggcggagatgctctctccaatggcatcaagaaacacaggagtctgaatgggggcagcgggctacaaaggaggcatcagtcaactttacagagtggagaatgttgtatcaggaaagaactgtggctgatgattgagctgcgttcgctgacaaggagtaagagtggggatgaggacagttacaatacaggagctgtcccaagcaataagaacaccatggccaacacagcgaggaatgcactgtgcagtgagatggcagtggaaggcacagaacgggcagacatgagactgtga

SEQ ID NO: 114066 - DNA, 480 bp, Homo sapiens
gcccctttagctacattagctctgctctggtatcatactgtagtccgcccgttttttgccttggatggcagtgataacaaggcaggcctggatgaagctaaggaaattctccttaaaaaagaagctgcttatccaaattcttccctctttatgtttttcaagggacggatacaacgactagagtgtcaaatcaacagtgccttgacatctttccacactgctttggaacttgcagtagaccagagagaaattcaacatgtctgtctgtatgaaattggttggtgcagcatgatagagctcaatttcaaggatgcatttgattcctttgagaggctaaaaaatgagtccaggtggtcccagtgctattatgcctacttgactgcagtttgtcagggagccactggtgatgtggatggggcacagattgtctttaaagaagttcagaaactcttcaaaaggaaaaacaatcagattggtaac

SEQ ID NO: 114067 - DNA, 478 bp, Homo sapiens
aaggtccaggttgtttttatggcagtctgggttctgcctctccttccctctctgttatttgacccagccgtgtgcctttccattttcttgaatgcgttcattctgagttactaaaagaaatggaaagctgtttaaattattatagattacaacattttattaaaagaggcttgtagaattttagcagcttttcaaatgattaaaaaataaatctacttattgaattgatgataaacccacatcctttgtgccttggtctccagagttcacaccaccctctttgtcattggcttcaagcccctggaaagcccggtggctggtgttgaggagcccgtggctgtggacagctgcctgccccatcctgccgtgctgtgttttcccacggagctggatgtggagaaatggcagtgcacgcagcattgctttagagttgcaagattgcatccctcctcgtgccaagcttgacgtgatcaggctt

SEQ ID NO: 114068 - DNA, 1556 bp, Homo sapiens
cccatctcgagaggcgatttcgactcattggtgcccttgtttccccgaggcctcctgcagtgacgtgctgaggagaggagcccaggtctgcgggtgggggacccgtcctctgagaagcctgcagcttctcctccaggacccttccagcccacctggctggctgtggggataatgggcacttgggagcattggagggggaggaagcatagagaaagcagcaggagacgcacctggaagcccaggggagggaagtccacctccctgcaagtgtagggcagtgagaggagccctggcaccagcagagcaagaaagaaatgcatgcaccgttcagaataagctgtcaggtcgtctggctgtttaagatttatttattaatgtgtcaaatcaacagtgccttgacatctttccacactgctttggaacttgcagtagaccagagagaaattcaacatgtctgtctgtatgaaattggttggtgcagcatgatagagctcaatttcaaggatgcatttgattcctttgagaggctaaaaaatgagtccaggtggtcccagtgctattatgcctacttgactgcagtaagggagaagcagaaggtggcagctaacatgtatggagggccttccgtgccaggccccctgcatgaggtttcacacgtcatgtcatctaaacctcacagctgctacaaggggaggcaccttaactccaatggcaactatgtggctaggaagccagccaggtgggctggaagggtcctggaggagaagctgcaggcttctcagaggacgggtcccccacccgcagacctgggctcctctcctcagcacgtcactgcaggaggcctcggggaaacaagggcaccaatgagtcagcaggtgatcttcaggacagcctgtgactcgggaacactgaaggttgaaactgcagcattcaatccattatcaccgtttatgaatgctgaccagaatgtttctagatgggccatcaccaccgagctgttcccccccgtgtcccccatggtacatgacagtgcaatagcacgctgtccttcagaggacagaaaattaatcaggaaacatttactgggcaaccgctatgtgccagggacaggctctggagataaaaagatgagtccaaataaagctttgaatctaaggaaaggaaaaagaaatccagtgacacacataggagagaagaggacactgtcaaccatggaggcagagcctggagtgatgctgccacaagtcaaggaaggccagcagccaccagaggctggaagaggcaaggaagggttctccccacagcctccagagggcttgaaagcactgagaccaggttatggagctcaatggcattatgccgagagcaaagttcacaccaccctctttgtcattggcttcaagcccctggaaagcccggtggctggtgttgaggagcccgtggctgtggacagctgcctgccccatcctgccgtgctgtgttttcccacggagctggatgtggagaaatggcagtgcacgcagcattgctttagagttgcaagattgcatccctag

SEQ ID NO: 114069 - DNA, 838 bp, Homo sapiens
gcaaacgtctgtgtagtgttgatgccacactgcagttgttaacatcgcgtccttttctgccctgttaggttggtttctctcttaaacagggcagcgctgtcatcccattcccccgcctggtccttcctcttccccctagctggttactgaactgactgccattcaggcactgatgggaaatcacttccagaacttgcaaaaccatagagaccggaggttttctgaaggaggctttggtgctgaaacattgctgctgaaacattgttgcagaaatgtggggtggagcctccttcctgcccgtctcacccaggggatgtggtttgcttcccgtgtggtcagcgctgtgctgcgagctctgagaggtcctcctggaattatcctcaccactcggctgagggatgctgtccacacccctctcaccgatgtggacgtgtgcacgcggtgtgtgtgcagaatccaggctatcaggatgctgtgccgtggctgcccctgcgaggcccgtgtgaagccagccccgtgcgtctgtagctaccccttgaggagtaacccgagcggcgtgcttcctgggaagttgctaagctgcgctgaggtgggaggtctgagcatgggggatgcctgggtccccgcgccttcatggacacgctcgtgtgtggtgtgccgtgatgcttgctgtgcagcaggccggctggtggagagctttcgctggcaccgagctcttctccttggtgtggccgtcggctccatcctggtcatccttccctgggcttactgtgacctgggctcctcctcctgtatcaaaggattgctggcagtcagagctcttcagtcgtgtacatga

SEQ ID NO: 114070 - DNA, 372 bp, Homo sapiens
atggctggctatagccatgtgattaagttctcaccaacaaaacctgataagcagacttgccagtgtcctagctttgactatggaggtgagtccacatgtactcatcaggagacaatccagcaggcattatttgggctctctgtatctccaggccccctttgtctgaatggctggatgtttactggagacagggagccatgtctaaacctacaaagatctccacgttacaataaccaggcacctgccgaaactttggaaaacaagatctaccctaaacttccaagtggccaggagcagttaaggcaggccaggaaatcccaccaggatgaagtgccagccaagggaccagccagctccatcaatttctcctga

SEQ ID NO: 114071 - DNA, 1404 bp, Homo sapiens
atggttggtcttctcttccatgctccaaaagcccctgagatggcccctctgcgttgctgcattatgaataaaatcatcatggtcaggcgacccaagcagagcacagctgactatggtatgaggaccagtggccctgtggaaagcggtctcagtgctgactcgctgcagcttctttgtagctatgcagcaatcaagaatagtgctgagctcttgatggtggggccccaaggcagatcggcaggtcgagaaataatagacacacgcaagatagcaaaatctgggtccaggggggtcaccgccttctgctcccacggtgccaacaacgcactggatataccggcatttattattaagtttggtgagagggcaggggaaggttacacacatcgcgatacacttataagccagacgtggcgcggcctgcaacgatcagggatctatatggatctaattgggatctgtatggacctgattattggatctatccagtggataatgtggataagtgaaaaaccggccaacgtagccggttggaagggagtcgtattattctacgctttcgatgagaagaccatgttcatagcatttaagctgatcgccctcgacaggaatacaagctgtgcccgtctccgggagctgcatgtgtcagaggttttcaccgtcatcaccgaaacgagcgaggcagctgcggtaaagctcatcagcgtggtcgtgaagcgattcgcagatgtcgaaggccgtggcggcggcacttttgcccatgaattgctcgctgtggagtacgcaggctggatttctcccgcgtttcggctgaaggtaaaccagacatttatcgactatcgaaccggaagattacaacctgctattccgcagagtctccctgaagctctccgtttggctgccgacctggcagagcaaaagcaacggctggagcaaaaaatgcttatggatgcacctaaagtcgaattcgctgaacgcgttgctaccgccagcggggttctaatcggcaactatgccaaagtgctcggcctgggccaaaactatctcttcacctggttgcgtgataacggaattctgatcgcaaccggtgaacgcaggaacgtccccaaacaagaatacatatctcgttcagtcactgaggatgaggtcgaaggccgtggcggcggcacttttgcccatgaattgctcgctgtggagtacgcaggctggatttctcccgcgtttcggctgaaggtaaaccagacatttatcgactatcgaaccggaagattacaacctgctattccgcagagtctccctgaagctctccgtgatgaactacttgcagtcactggccgggactttacatttcttggaggaggagccaaaagtatcaggggaatcaatacaaaaatgggaccctag

SEQ ID NO: 114072 - DNA, 2041 bp, Homo sapiens
ttccatgctccaaaagcccctgagatggcccctctgcgttgctgcattatgaataaaatcatcatggtcaggcgacccaagcagagcacagctgactatggtatgaggaccagtggccctgtggaaagcggtctcagtgctgactcgctgcagcttctttgtagctatgcagcaatcaagaatagtgctgagctcttgatggtggggccccaaggtatgaggccagccagagaaataatagacacacgcaagatagcaaaatctgggtccaggggggtcaccgccttctgctcccacggtgccaacaacgcactggatataccggcatttattattaagtttggtgagagggcaggggaaggttagtgagggatttaggggtctccctacatcaacctctggttccctctggtgctgttttctgagcacactgtgaacttccttgctggtaagggtgcttgtgctgcctcccctatgggaatgcccttttcaacccagcagtcactcagcttgtcagggtccaggtcactccatgaggtcagctggcaaggcatacagatatctgaagatgtgaaagcagctttggatctgggtaatgggcagagatatcagaagatatcagaagaagacaggaagatgcaggaatgtttcaaacttattggagatttgttaagtggttttgaccaaattgctgacagaaatatggacaatgaaggccaggctgatgaggtctcagatggaaatgaggaatttactggcaaaggtcacccttgttataacctgcatctggctgatccagctccacccatggctcaaagtgccccagatacagttcaggccactgccttggaggacacaagctataagacttggtggcttccccatggtgttatgtctgcaggagaacagaatgcaagagtgaaaaaggcttgacagcttccacctaggtttcagagggtgtatgtgttgaaaagcctgagtgcccaggggaaaagcctgccacaagggtcgagctcctacagagagactctactagaacagtgctcatggaaaatgtggggttggagcccctgcacagagtcatcatggtactgctgagtgggattgtgggaaggtggctgagaatggtagagccaccagcggcttgtactctgaacctggaaaagcaaccggcactcaactccaaccagtgagagtagccatgggagctgcacctgcagagccacagggatgggtatgcacaaggccttggcatcccaccccttccatcactgtgccctggatgcagaatatggagacaaaggagattattttggagctctaagatttaatgacagccctgctgggtgtcagacttgtgtggtgcctgttgcccctttcttttggctgatttatctcttttggaattggaatatttacccaatgcctggatcaccattgtatcttggaagtaaataacttgtttttttatcttacaggctcatagttggaagaaacgtgccttgagtctcagattttggaattttgagttgatgctgaaatgagttgagacttttggggaactattgggaagggatgcttgtattctgcagtgcaaaggatgtgagatttgttggggggtcatgggcagaatgaaacagcttgggtattttgtgcccttcaaatatcatgttgaaatgtgaactccaatgttggaggtgggcctagtgggagaggtgtttgggtcatgggggtgggtcctttataaataacttgctgctgtcctcacaataatgagtgagttctctctgtctgtgagttcacatgagatctggttatttaaaagagcctggcagcttctccttttcttgcttgctctctcactcgccatgtgatgccagctcctcttttgccttctgccatgaatggaagcttcctgagccctcacaagaaggctatgatgacgccatgcttcctgtacagcctgcagaaatgcgagtcaaaatgaacctcttttcttgacaaattaaaaaaaaaaaaaaaaaaaaaaaaaaaaaaaaaa

SEQ ID NO: 114073 - DNA, 381 bp, Homo sapiens
atgggagcggttctcacaagatgtgatggtttcataagcggtttctcctttggcttggctctcattctctcttgcctgccgccaggcagatcagcaggtcgagaaataatagacacacacaagatagtgaaaactgggtccaggggggtcaccactttctggtcccatggtgctgccaatgcactggatataccagcatttattattaagtttagtgagggtggggcaagatatcaatcaacagtaacagttgcagcaaaagctggttacaaacaatccgtagaaacaggatgtgaagctagacaaccggttagaccagaaattctcagaagggagtatgccttaaccctgaagaggcctagaagagccgtggcaagatga

SEQ ID NO: 114074 - DNA, 755 bp, Homo sapiens
ccctgattattgtaaatacaaaattgcatgcaggattgtgtaaagaccaatgccaggttgggctgccagaatgagccaacagcacgtgatgtgcttccccctgcagaaagcctataaacggacatgcagtcagggaggtttcacatcaccaagattcctatcccagaaaagcagatgttcatagctctgggaatggaatgtgacccttgtggagagcctataaacggacgcatgaggggggtgcctgttcatatggataagatagtgctataaataccctcatcttgccacggctcttctaggcctctttagggttaaggcatactcccttctgagaatttctggtctagctgactgtctagcttcatggcctgtttctatggattgtttgtacccagcttatgctgcacctgttactgctgattaatatcttgctaatcataggttatggaaaggctgtgttttctgttataaggctctgttagaaactactgatgcacacactatatcataaattcttatccctgtatactgtacttgtgcatacagatgttatgttaaagaattacttcatccccatgtgaccatctcacctcataatcaaatgaccctaaatccctcactaaccttcccctgccctctcaccaaacttaataataaatgccggtatatccagtgcgttgttggcaccgtgggagcagaaggcggtgacccccctggacccagattctggtatcttgcgtgtgtctattatt

SEQ ID NO: 114075 - DNA, 912 bp, Homo sapiens
atggtggctgtaaattatgttggagaagaactgtggagttactttaatgcgccatgggaaaaacgagttgacctcgcttggcaattaatggaaatagcagaacagcttacaaacaatgactttgaatttgcactctacctcctggacgtcagctttgacaattttgcagttggtcctagagatgggaaggtaatcattgtggatgctgaaaatgttttggttgctgacaaaagattaattagacaaaataaacctgaaaattgggatgtatggtatgaaagcaagtttgatgactgtgataaggaggcttgcttatcattttcaaaagaaattctttgtgctcgtgccactgtggaccacaattactatgctgtttgtcagaacctcttatccagacatgccacctggcgtggcacttctggaggactccttcatgatccaccaagtgaaattgccaaagatggccggctcgaggccttgctggatgagtgtgccaacccaaagaagcgctatggcagattccaggctgcaaaagaactgcgtgaatacctagcacaattaagtaacaaccatattcctccaacacaccctccatacctctgtgtccctgatggcaactataggagtggctggagctacatcaaactgtgtccatcatttgagtgtcttactgaaacctatgctgccctgcccttcaacagatacatgggaaagagcagaggaatagagggctctctgtacagtcctggaagacctgtaacagccatgtggtcaggactcgttgggggaacagcggttgtcctgcaattaaccaacagtactcctgctgacccagtatccactctagaagctgtaccctttggagccagcatcctgactctggaggggctccacatgagagtgacccactga

SEQ ID NO: 114076 - DNA, 679 bp, Homo sapiens
  misc_feature (1)...(679): n = a,t,c or g
ctggaacatcagctgttctctaggtcttaagtctgctgctctaacctacaaattttggacatgccaatctccacagtcacatgggccaattccttagtttctctggagaatcctgactaatgtatgcaatgtctttatttcatcctcattcttaaaggatattttcatcagcaacaccacaccctcctcgatcaccatagctttatgcaacaacaagaaacaaatttattagctaacctaaccactaatgacgcaagagacaattctaaaggactttcaaaaacagcaaacgtagcagcagctgctaccctctaaggggatgagggatgcagattgtccaatttattcggtgaaattggtccatttccattgcttaattggctatttgaaattcctcctctaaatttccagaataaatcactgaaattgacatcgggccagtctgaatttcaagaaatttacctggctggaagacaagagggatctcttcttcagatttgcagtctggggaagacacagcctctactgtactttagaacctgagattgggtggtggaaggagccctgggtcgagtggtaagattcaccttaggttagtattgcgtaagtgccgaagantgtagccaaagatgtaccatagactccatgtttgtatttcncggcttatattggtggtttt

SEQ ID NO: 114077 - DNA, 507 bp, Homo sapiens
  misc_feature (1)...(507): n = a,t,c or g
cctctactgaaggctactcttcttatcaagtaacgtcttctccatgctcttgacccttgccccttcagacctatggatggtaataacctgcccacacctagtttaccatcagaggacacagcagcacgtgtgccatcctagaagcatagagcagacccttaccagacaaccaaccagctggtnnnnnnnnnnnnnnnnnnnnnnnnnnnnnnnnnnnnnnncacccctactctgtccagacccaactgtcaacagaagccaaagccatctggaggagcatgcaacaacaagaaacaaatttattagctaacctaaccactaatgacgcaagagacaattctaaggactttcaaaacagcaaagtaggagcagctgctacctctagggatgagggagaaactcaaaaatgcatacaaaaaccattgcatgaaaagtgactggatttgtacatagcgtcaggagatgtgcgtagtgtcaaagtatctcatcacacattacttgataatg

SEQ ID NO: 114078 - DNA, 330 bp, Homo sapiens
atggctaaaaggagccaaggtacagctcaggccatggcttcagaaggtgcaagccccaagccctggcagcttccacaaggtgttgagtctgcgggtacacagaagataagaattaaggcactgctcttcctgccatcatgtgaagaaggacgtgtttgcttccccttccaccatgattgtaagtttcctgagggctcctcagccaagcaaaaatgtaaacacaaggccacaaacatcaacaacaatcaggaacaaatgacaccactaaagaaacaaaataaagtaccagcgaccatccctaaagaaacagagatgtatgaactgacatag

SEQ ID NO: 114079 - DNA, 411 bp, Homo sapiens
atggccacctctaaggcccttctcaagggctgtacccagaccaaagcttccttgcggatccttcaaggtctgaaagctgagcccaaagagccagtgcttgtgcaagtcccagacttcaccaaaaaagggggtgaagttgggccaaagacaaccttacacgccaagctactttctctaaatacccagtggatggaacagcttcatccttctgtccaggatccgtgggtccaggatgcccaatatcctaccataactgcggcagaccctggctgcttcctgccctgtaatgggcatattggcttaaaagcaggggccgcatgctgtactactctccatgtctggaatggccgagggttaggggccattttctctagggcttcactcaatggagaaaagcacatcatctcatga

SEQ ID NO: 114080 - DNA, 430 bp, Homo sapiens
  misc_feature (1)...(430): n = a,t,c or g
actcaactatcccccactnnnnnnnnnnnnnnnnnnnnnnnnnnnnnnnnnnnnnnnnnnnnnnnnnnnnnnnnnnnnntcaaaccacatccaaaccatagcaccaggtgttgctttaactgccttctatctactctatcatgcagtcttcacatccatcctatgaggtgcctggtgttattggcccatctcacaggaagaacaccaaggctcagagacgtgatgtgcccatgatcacacagctcatccggtatcaggtcaggacttggccagtgctcttgcctctggagtgcactttctctcttggagaagcccttcccagggctcctgtctgaggagtcattcctgaagccctcccataggtctttacattgactctgctgtgggaaggaccactctatgacattatccaagttactgagtgtgtttt

SEQ ID NO: 114081 - DNA, 597 bp, Homo sapiens
atgaggactcatcgcagcaagtcccacagacgggactccattaccccatggctctgtgatgagagctcatctgaagtcacggcagtttccattatggtgaggctctgtgatgagaactcacctgcaatggtggtagtatgcattgtggtggaggcagaggccatccccggatcaggctctgtgaacagaggacaagaatctgagtcttcacatccatcctatgaggtgcctggtgttattggcccatctcacaggaagaacaccaaggctcagagacgtgatgtgcccatgatcacacagctcatccggtatcagtgtctgcttgccatccacggctccaaggctccggaagcctctggagatggagggcaaaccttttgtagcaccttctacgctccagccatatgctccaccgttaaggccaagtccctgccatcaggagcacgctgtgtaaccgacaaggacaaatgcatgtggatttctagggaaatcaaatttgaaagaggcaggaagagtggggaggaggcgattctagtggctcttacgtctgggaagctcctggggcttggtcagcatctggctgctggagatgggtag

SEQ ID NO: 114082 - DNA, 896 bp, Homo sapiens
gtttcaaaccaggaccaaccctgagaaaggaactgattttgtcttcaaatattggacaacatgatttggacacaaagactaaacagattcagcagtggattaagaaaaaacacctagtccagattaccataaagaaaggaaaaaatgtagacgtgtcagaaaatgaaatggaggagatatttcatcaaatactccagactatgcctggaatagctacattctcatctaggccacaagctgttcaaggaggaaaagctttaatactctccttcctaattcatgcaaaagcctttagtaccgctgaagacacccagaatgaaggaaaaaagacaaaaaagaataaaacagcttttagtaacgttggaagaaaaattagtcagcgagttattcacttatttgatgagaagggcaatgatttgggaaacatgcaccgagcaaatgtgattagacttatggatgagcgagacctgcgactggttcaaaggaacaccagcacagaacctgcagagtatcagctcatgacaggattgcagatcctccaggagcggcagaggctgagggagatggagaaggcgaaccccaaaactggaccaaccctgagaaaggaactgattttgtcttcaaatattggacaacatgatttggacacaaagactaaacagattcagcagtggattaagaaaaaacacctagtccagattaccataaagaaaggaaaaaatgtagacgtgtcagaaaatgaaatgcaaaaatgaggagaaggcatataaagaaactcaagagacccaggaaagagacactttgaacaaagaccatggaaatgataaggaatcaaatgttctgcatcagtaattttaataaagaaaagcatgctctgagagaaaaaaaaaaaaaaa

SEQ ID NO: 114083 - DNA, 1231 bp, Homo sapiens
tttttttttttttctctcagaggcatatttttccgtattaaaattactgatgcagaacatttgattccttatcatttccatggtctttgttcaaagtgtctctttcctgggtctcttgagtttctttatatgccttctcctcatttttgctcaaagcacgaagaacacacattaaagcttttcctccttgaacagcttgtggcctagatgagaatgtagctattccagggcatagtctggagtatttgatgaaatatctcctccatttcattttcttgacccggttacacttttttcctttctttatgggtaatctgggactagggtgttttttcttaatccactggctgaatctgtttaggtctttgtggtccaaatcatggttgtccaatatttggaagaccaaaatccagttcccttctcaggggttgggtcccagttttgggggttccgccttctccatctccctcagcctctgccgctcctggaggatctgcaatcctgtcatgagctgatactctgcaggttctgtgctggtgttcctttgaacccagtcgcaggtctcgctcatccataagtctaatcacatttgctcggtgcatgtttcccaaatcattgcccttctcatcaaataagtgaaataactcgctgaactaatttttccttcccaacgttactaaaagctgttttattccttttttgtcttttttccttcattcctgggtgtcttccagcggtacttaaaggcttttgccatgaattaggaaggagagtcttggggcagaagcaataggggacaactgtgctggtgctgtcttttgcaggatgtgttttaccaaaaacatctaatgcaactattttcaggactttacaggtttgtaggtgttaacctctttagaaaaagagcagccatccttttttaggaagaactgtaatcatccccagttgatgaggagaagctcttctgtagagaagaatgacagttgaaactgagacttctcagtaagagaacttcgtttacttggttcaagtcttaagccacggagcccactaaatgacaaatgagaaaaaaaatcccagtcacttcgcgaccttcccccataaggcctcctcccgcaacagcaggcagcaagaacaacgcatttgtccagcatgtcctgcgcaggcgcccttcgcctggctcgctctgccccacctgtgccaggcaggaattccaccgcactggactaaa

SEQ ID NO: 114084 - DNA, 1400 bp, Homo sapiens
ttttttttttttttttttctttgtcagaaaatatatttattattgatagtgagtgaaggtaaagatgtgagtattcactatagaggttttatcagccaaggttgccttcatattgataaaaataccttatctcacttgtaatcataaaacattatttccagtagaagaggtacattttctctcctttttgtcttcttgcctgtataatcaccataattaagttataatgaaatagctcttacataatcaaagggaggaaaaggaaaggacggaacccaacatgccacagcctaggacaattccatcccagcactgctggccctccaggatctgttttctggggctctctccacgccaggcactggctggccctcgggatcttatggttttctggggctctctcctcggccccactccaatttaattttagcccccaaccccatcctactttggttaggggtggaggtttcaccaaatgatgggggcttggttcagaagagaaacattttatgggtcagtgcaagttgaatagaaagtcccaaaaaggtgggagaagggctgccccttctcttttaatcatcataagaggggtttactaatactcaagagtgtcctttaatgactgatccctgatcaaggctttggccccttcaaactgctgctgttcaaaacgtgaaatgattctgctgaatccattcttgatagaatgtctttattggccttctcattagggggcttctctttaaatggaaagttttttcactaagaaaaaaaatgttccatctctggaattaaacgttgaatggtgttttgcctcattcctgaaaagtttttatcctccccttcctcaagcatgcctctgtttggcatgattgacacagtgcatatactgggtggccagtagcggagcatttgagggtctggtgggtgttctcacggtaacactgaagaattttggcctgcagatcagcacagactggatgagactcatatcgccaccattcacaagcccacacgctgtgccttcttgatctcaacgtgatggccctgtccaagcaccccttcacctgctgtgtccgtaattgaagtgtggtctctgaatctgcagctgtcacagaggacttgacaaagagaccagagcagggtcctgcacataccaggctctccttggttgccttgagcacagaagaatgcaattttccacaccctgaagctgaggggaaatccagctccatctccacgaaaatagtattttcctcaatcttggtggccaccgtctcatcagctgccagcctggctgagactgggtaatttatgaagaaaggaggtttaattggctcagggttctgcaggctgtccaggaagcagggctggggagccttcaggaaactttcaatcat

SEQ ID NO: 114085 - DNA, 203 bp, Homo sapiens
ccaagagccacatctgtgtgtgcacatgcagataggcagggaatataatcatgagcaattatgtcagtctcagggccacatcgtcctagaagctcttgcatgccaatatcaatcacttagccatccaccagcccctggataatggtaacatgcacagggtagctgccagtattccctttaccatggccagcagcttgtgtgtt

SEQ ID NO: 114086 - DNA, 2328 bp, Homo sapiens
atggggagccccacagtcccacaggttggtgccagctgccataatgctgatagaggctgcaattacagtgctggggagtggtgggcacaggactgtattcccccagaaacttcacataccacggaccatgcaaacctccaactcccaccgcccctggccaggcaagacttgccagcttggacttctagaacagcaaccccacccctacctgaatgctgtggatgggcaaagctctgtgttgccctgggaaccaccctgatgacagactgtgtaactccttttacacccactgttcagagccaggcagaaaaatgtgaaaagagagactggcctagcgtgccagcctacatcctcttcccatgctggatgcttcctgccttcaaacatctgactccaagttcttcagttttggaactcagactggctctgcttgctcttcagccagcagatggcctactgtgggaccttgtgatcattcttgggcatgtctttatcagcagcatgaaaatggatgaatacagtaaattggtaccaatagaacagagcattgctgaaaagatacctgaaaatatggaagggactttggaagtagaaaaggaagaagtagaggagcaggaggaggaggaggagcaggaagtagaggaggaagaatatggagagaagaagaaaactctttttctctgtaagacactgatgaccctaattcttttcagctatgaagagaaaaaactggctgtgcctgactggctgggctgccgcatattcgcgctgccattggtccataatcagctgggggtgggcgtagggagacctacttcagcaggtcctggccggaccagcattgttaacggctgcggttcgaagtggctgtgggtattgctgcggctggtgcgtcgtcgctctagtagttactcaatcaaaaaatttgtaaaacaagccacagttctgacttttacgactgcacttctggcaggaggagcgactcaagccttcgcgaaagaaaataaccaaaaagcatacaaagaaacgtacggcgtctctcatattacacgccatgatatgctgcagatccctaaacagcagcaaaacgaaaaataccaagtgcctcaattcgatcaatcaacgattattaatattgagtctgcaaaaggacttgatgtgtgggacagctggccgctgcaaaacgctgacggaacagtagctgaatacaacggctatcacgttgtgtttgctcttgcgggaagcccgaaagacgctgatgacacatcaatctacatgttttatcaaaaggtcggcgacaactcaatcgacagctggaaaaacgcgggccgtgtctttaaagacagcgataagttcgacgccaacgatccgatcctgaaagatcagacgcaagaatggtccggttctgcaacctttacatctgacggaaaaatccgtttattctacactgactattccggtaaacattacggcaaacaaagcctgacaacagcgcaggtaaatgtgtcaaaatctgatgacacactcaaaatcaacggagtggaagatcacaaaacgatttttgacggagacggaaaaacatatcagaacgttcagcagtttatcgatgaaggcaattatacatccggcgacaaccatacgctgagagaccctcactacgttgaagacaaaggccataaataccttgtattcgaagccaacacgggaacagaaaacggataccaaggcgaagaatctttatttaacaaagcgtactacggcggcggcacgaacttcttccgtaaagaaagccagaagcttcagcagagcgctaaaaaacgcgatgctgagttagcgaacggcgccctcggtatcatagagttaaataatgattacacattgaaaaaagtaatgaagccgctgatcacttcaaacacggtaactgatgaaatcgagcgcgcgaatgttttcaaaatgaacggcaaatggtacttgttcactgattcacgcggttcaaaaatgacgatcgatggtattaactcaaacgatatttacatgcttggttatgtatcaaactctttaaccggcccttacaagccgctgaacaaaacagggcttgtgctgcaaatgggtcttgatccaaacgatgtgacattcacttactctcacttcgcagtgccgcaagccaaaggcaacaatgtggttatcacaagctacatgacaaacagaggcttcttcgaggataaaaaggcaacatttgcgccaagcttcttaatgaacatcaaaggcaataaaacatccgttgtcaaaaacagcatcctggagcaaggacagctgacagtcaactaa

SEQ ID NO: 114087 - DNA, 759 bp, Homo sapiens
atgggctctatggtagctcttttccaggatcccacagcctggggtagcaagtcgtgccaagctgtctctctgctatatcccgaagtccgacaccctgctggtcagcctctgagggccatccagcctccatctcccaacactaagttcacttcgtgtctttcacgacaaggagggaacttattccttggagacctgaaaggacacgagacttttcaggagcttaccaatcagtcagccttagtcatccccgagcagatgtgtggcagtattgtggtggacctttactggacactctgccaatccctaaccccagtgccgcccggacctgaggccgcacaccactcccgcttcaccagtatccctctgcgaaaacggtggagacgcgcccgtccgcccctcaggggcctcttcccggacctgtcagacggccccgcggacgcttttcagtcagggcagcttcgccgcaaacgtccggacactcgcccggccccaacgtacctagagcgacgacgcaccagccgcagcaatacccacagccacttcgaaccgcagccgttaacaatgctggtccggccaggacctgctgaagctagaggtggctttgatggcaactgcaggtccatcaactcgcagatgagcaacagtgcacaccagctgcctcgttctgatgtcctgcactgccctttggaacctaagacatgtgatgccagttcacttctgctctccaaatctcagaaaaaatctcatgatcaatgctaa

SEQ ID NO: 114088 - DNA, 2121 bp, Homo sapiens
ttttttttctcttctagtagcctttattttctcttgtttttcatcataccgtggtacaaaaaggtaagagaggatttcattgcctgcctctcctggacctcatggcctgtagagtgaggatggtgcgttgagatgaggcactgactcctccatcctggtcagcggccatgggccctttgctgtccttatagacaatgcaaagtgtgtccaactgctcggggctctgctgaggtttgtgtgagaagcatttgtgattctggaaaactttccctttcccaggatgaccccagtgatgatgatgctctacccaggagcttggcttgggtctgtccagaagggctgctgctgtggccatgggcacacagagccctgtccctggcccagcagggagaagtggagacccttggactggaagtgctggcccctctcactcagcccctttccaagtacctcattgccaagcacagtgtggggaatgaggattcggggaaaatagcacatgggattgctctgggatcagtgtccacagttcctggaactagtagaggtggtgttgttgcagcaataatggccaatgtgtgtgacactcagcctgtgacagccaggaccccagtcaccaggttcaaagccgcacaggtagttgtccagcagcgctgcccagtgatgggagacccgatggaagcactgtggtggcatggatttgacaatcagtgtggtatctcctgtgtgcagaacatgcatggcacaggcattgactgggtgctgcagtttctgaagacatctcattgcccactgcaaccagatagtcctgacccactaaattcaaagctgtttcttggagctcagccccacacagcccatcaccaccagagacatacccaagactgggtaatttataaaggaaagaggtttaattgagtcacagttctgcatagctggggaggcctcaggaaactcacaatcatggcagaaggggaagcaaacacgtccttcttcacatggcagcaggaagaagtgccaagcaaagggggaaaattcccttacaaaaccatcagattcgtgagaactcactatcaggagaaaagcatgaagaccctcttccacacagtggccacggtgatcttcaaatgcaaatctgacccaattgcctataaccaaagccccctccagcccgcagtcttcgtgcttcaggtctactttcatgcggacgacgcctccctgaccacactactccgtgcccagccccgcatgccacctgctcatccctccatccccctcactgcaccacccagtaccagagagccatcccatcctcagagaactttctactggactgtgagctccctgagggcggcattggactctgccctgctcctcaccgctaccccatgcctggttgacgcaggaagctgtgtgggggctgaacaagtgaaggagccactgacggggcggaagtggagcaattgctgctctggcaaagcaaaatatgaaatgctagatgtgccgctgttacggcggttgtgccagtcctacccacagccaggaagagtgagaaaggctcagaaacagccccaacaggtagaagctgtgaccctgcagtcccaacagcccccctgcttcttggctgcccctgccggaaacacgcagggcccaagcctggaagcaggagcccaggcagtacccagcaactccctgcaggaggtggtagtaaacagctgcgctctggagaatgaccaccgacctcaagctcccagggagcacagagacacgcaatggattggttttctcatctgtaaaatggggatgttaacaggggaggtggttgggctggctaagccatcagcgtcggggagaggagctgggacagaagagctgcaacagcaaacaaggttgcgcagccaggacatacttccacagactgtaaaccagggcccaacccactgcgagcagggcgtgctgcggtgcgggcaaggcgacctcggcagctggatggttcttgacagttattggcagggccttgctactgaggacgagcgggggaagggaaaaggaagaaagccaattttgtttcgattgctgctgacagctgtcataggaaagcggaggcgtgtgcccacgtaa

SEQ ID NO: 114089 - DNA, 449 bp, Homo sapiens
gcccactagtccagcgcggtggaattcgccagcatgtgaagaaggatgtgtttgcttccccttccaccatgattgtaagtttcctgaggcctccccagacatgctgaactagcgtgctggcccttctcaaagtgtcccatgaaaaagttattccacacctcctccctgaccttgtcgtgcagacgcttccaggatgaactccaactcgccgagccaccgcagctcctcagctgactaaaagagttaatgatcctccaggttaaaactcctccttgagcacacaccttctctcaacaaatgacaatacttggcaaactgaactcctcccacgagtcgccctctgctaggaggaattgctggctgctccctgcttattgcattctctcagagcagctgtctcaaaggaggctgctcccatgccgatctttttgtgcccaacttacagggag

SEQ ID NO: 114090 - DNA, 396 bp, Homo sapiens
ggcagtaaaggtgagtctgggagaaagaaccggtcagacttagttcagctccaccctttcctcctgggagacatacctgagattgaaaaaggtttaattggctcacaattcagtatggctggggagccctcaggaaacttacaatcatggcggaaggggaagcaaacacatccttcttcacatggcagcagcgagaagtgccaagcaaaagggggaaaatccccttataaaaacttcagatctcatgacaactcactatcacaagaacagcatggagtagctctgaccatggcctcaggcatcggtagcccctcccatgggctctttgacagatcaacatggcctgctatccagaaagtttcttcaccaacagtggctgtttttttccagtggtaa

SEQ ID NO: 114091 - DNA, 432 bp, Homo sapiens
ggagccctgcagctatcaccaactagctccacccacactatcaagtcgcactccccaccaccaccactctgtggttgtttccacagtagctctgaccatggcctcaggcatcggtagcccctcccatgggctctttgacagatcaacatggcctgctatccagaaagtttcttcaccaacagtggctgtttttttccagtggtaaacatgctctctataacgaggtctaaacttcagccttggcttaagggtaggggaaccctcctagtccttagatccacttttcctcagcttagatgtagcagcttctttttttaatttttgcagctgctacttctagatcccttttacaggtaggtgtcttatcacttttactagttaataattctttttattaaatttttccttttcaaataattggtatgcttttca

SEQ ID NO: 114092 - DNA, 483 bp, Homo sapiens
cttttcccccttttgctcagcacttcttgctgctgccatgtgaagaaggatgtgtttgcctcctcttccatcatgattgtaagtttcctgaggcctccccagacatgctgaactgttgaaagcctccacaatcaagcttttattaaagaacgagtactaccattgtgaccacagaagatagaattcgacaccaagagcgtgctggcccttctcaaagtgtcccatgaaaaagttattccacacctcctccctgaccttgtcgtgcagacgcttccaggatgaactccaactcgccgagccaccgcagctcctcagctgactaaaagagttaatgatcctccaggttaaaactcctccttgagcacacaccttctctcaacaaatgacaatacttggcaaactgaactcctcccacgagtcgccctctgctaggaggaattgctggctgctccctgcttattgcattctctcagagcagctgtc

SEQ ID NO: 114093 - DNA, 1125 bp, Homo sapiens
atgggcgaaatctgtaatactgacaaatgctggccagaatgtggaccaacaggagctctcatcatcgctgagcaatgtggaacccacgggggagaaggttctactctggaggggagccgtccagatgtcccccaagacctcttttccccaactctaggattctacggttctacatccagcttcagcttgcttaatgaaatagaaccagaagagcaaacgcctcctaacacttcctgtattaatgtacacaaggcagctgatacctgtgcatatcgaaacttggggaattcccaggtggagagaggcaagtcagcacactgcggacaaggtcacatgaatccaaaggtgatacgaaaagaaaatgtaggttccaagccagagtttaatagagaggtcgtgtttctcttggggctggaggctggaggcctcatcccaggtgccgaggggccaccagaagacatggggctagtgcggggaccaccagcggtggcagcaggaccacccccaaggtggctgtctccagagttctgcctcttgcagtacagcgaggaggaggggtgcaaggagcccctgtggttaaaggtggaggcggaggtgtccacgctgtaccggttcatgcccacagggttcaccaggaagctagctttttctttgcttgaaaatcaaaacattcgcccacttccaagcatcagaatcctctccggcttgccacagttcctgtttggcagcaagtttgaggccaacctggatgttctggttcccagggaagtcatttttcaaggagcccactggcaccacatgtggaagcttctgaaggtttacagcctggaaagtcaaaaaagagaagaggacatatccaaaaggttgccaaactttcttaaaagtagccgcaggccatgggaggatctgattctgatgctgagaaaatctccggagatgtctaaggaatatagagcaagccccctgagcctttctgctgcccttcggtctaaggacagacagtctaggcatcgctgtgtaacctccacattccacattcgtgaagtccgctgctgcaagagccagggcctgcctctgtgcatgcatgaaacagcagcccacatctgcccttccctgctggcttaa

SEQ ID NO: 114094 - DNA, 831 bp, Homo sapiens
atgggcatggttaggaagcaggccctggaacggacggagtgggctcttgtctgcagacaagcgtggtctagcagaatgggatactccacaactgtctcaccaactcagtgccagtacacatgctctagaggacttctggactcgcagctacaactgtacaagtgcacacaagccctaccagagatccactcactcgggcacgtctgcccatcacttatcacagttaaatacagccattacgtgctggctgcggcaacgctgtttatctgggacaataacgagtccctgaggactggattgctctcagtctcgacttgtaaaagtggaaccagagattttatgagaatttctggaatggtttccctaacctctgaggttgacaacgtggaagtgtttcattattttccattacacatccaagggaagaagttctgggctgtaggggctatcatgacaatttttgtaataagcatctactacgagccaggagcccactggcaccacatgtggaagcttctgaaggtttacagcctggaaagtcaaaaaagagaagaggacatatccaaaaggttgccaaactttcttaaaagtagccgcaggccatgggaggatctgattctgatgctgagaaaatctccggagatgtctaaggaatatagagcaagccccctgagcctttctgctgcccttcggtctaaggacagacagtctaggcatcgctgtgtaacctccacattccacattcgtgaagtccgctgctgcaagagccagggcctgcctctgtgcatgcatgaaacagcagcccacatctgcccttccctgctggcttaa

SEQ ID NO: 114095 - DNA, 710 bp, Homo sapiens
ttttgagcccccttaaaggaagaacatataggttctgaaatcgggtaaagattgggccacctaagagttcctttaaaacggccgccctcttttatttatatatttaatagattttagttagttttcttccttttttgattattttcttaatttgttctcttctattcttattcatttattctctgtactcatcagaatgggatactcccacaactgtctcaccaactcagtgccagtacacatgctctaggagggacttcttggacttcgcagctacaactgtacaagtgcacacaagtgaatctaccctgttatcctccacccactgattgaggtatcgtaattgcacatttctcttaaccatgacaggagaaagcaaacagtggaaacaggaatcatggggtgatctttctcactttccctcttgttttcattgggtttgtccataccattctaattatcatggaaaggggctctggcatataggaggggattgtctcactggacttccggatcaccggaaaaccatcagggttgaaatttcatctgagtctttcctgacgcccagcaaatattccccctcggattattttacaccttgagggcattttggtcttcagttcaacactcttgctctgttcccaaatggggcgctatttaggggaatttaaagagaaagctgagaagaataaacatttaccgagttctct

SEQ ID NO: 114096 - DNA, 354 bp, Homo sapiens
atggctgctgccacggagcttaatcgcccgagcagcggtgacaggaacctggagcgaagatgcagacccaacctctcccgagaggtgctctacgaaatctttcgctccctacacaccctggttggacagccttttttagcaaaacttcagtctccgattaaagaggagaatacaactgctgttgaagagataggaagaacagaaatggggaacaaaaatgaagtaaatgacaaattttccattggcgacctacaagaggaagaaaagcacaaagaaagtgatttaagagatgtgaaaaagacacagatccattttgatccagaagtagttcagataaaggctggaaaagcagaa

SEQ ID NO: 114097 - DNA, 456 bp, Homo sapiens
gagggggcggggttgtgagcaaatcttggtggtggtggtggtggggcggcctgagaagatatcatggctgctgccacggagcttaatcgcccgagcagcggtgacaggaacctggagcgaagatgcagccccaacctctcccgagaggtgctctacgaaatctttcgctccctacacaccctggttggacaggggagaggtggcctgagggactgggaatatggaaaccatccggtccctcctcgccattctttttctctagcagaggccgggggcagctaggcctgcagaggtgtgggatgcggtcccgaaaccgaggtgtggaaggagcccgggcccaacctcctcggtcggagtgaggaggacggcggtaccggatgcagagtcgtttaccttgcagctgtcctccccaagagtgggtgaggttggcctaagtgaaaacccggctccgagagg
